United States Patent Application Publication US 2005/0228172 A9 - sequence listing, part 73

SEQ ID NO: 320528 - DNA, 594 bp, Homo sapiens
taaaacactaataactaagacaatatggtattaatacaaggataaacaaataggtcattggcatataatagagttcaggaacaaatccacattgttaccatcaccagaattaatttttaaaaaatagtacaaagaaaagatgacagtttttatttatttatttaacttttattttaggtcgaggggtacatgttcaggttcttatatagttaaaatgtgtcacagggttttggtgtatagattttatcacccatgtaataagcataatacccaataggtagtttttcaatcctcaccctcctcccaccctctgccctcaagtaggcccagtgtcttttgttcccttctttgtgtccatacatactcaatgtttagctctcacttataagtgagaacatgtagtatttggttttctgttcctgtgttagtttgctttgcataatggcctccaggtccatccaaattgctgcaaaggacataatcttgttcttttttatggctatgtagtgttccatratatatatgtaccacattttctttatccagtctactattgatgggcatctaggttgactccatgtctttgctattgta

SEQ ID NO: 320529 - DNA, 517 bp, Homo sapiens
ctatggggttttctggctatagaatcatgtcatctakacacagaaagagtttgactttctctcttcctatttggatgccttttttatttctttcccttgcctgattgctctggataggacttccagtactatgttaaataggagtagtgagagagggcatctttgtcttgtgttagttctcaaggaagatgctttcatcttttgcccattcagtatgatgttggcagtgggtttgccataaatggctcccatattttgaagtgtgttccatcaatgcctagttctttaagggtttttaacatgaagaaatgttgaattttattgaaagccttttctgcatccattgagatgatcatgtgggtttttgtctttagttctatgtgattaatcacatttattgattatatatgttgaactaaacttacatcccagtaataaagcctatttgatcatgatggattacctttttaatgtgctgctggattcagtttgctagctttctttgaggatttttgca

SEQ ID NO: 320530 - DNA, 517 bp, Homo sapiens
ctatggggttttctggctatagaatcatgtcatctagacacagaaagagtttgactttctctcttcctatttggatgccttttttatttctttcccttgcctgattgctctggataggacttccagtactatgttaaataggagtagtgagagagggcatctttgtcttgtgttagttctcaaggaagatgctttcatcttttgcccattcagtatgatgttggcwgtgggtttgccataaatggctcccatattttgaagtgtgttccatcaatgcctagttctttaagggtttttaacatgaagaaatgttgaattttattgaaagccttttctgcatccattgagatgatcatgtgggtttttgtctttagttctatgtgattaatcacatttattgattatatatgttgaactaaacttacatcccagtaataaagcctatttgatcatgatggattacctttttaatgtgctgctggattcagtttgctagctttctttgaggatttttgca

SEQ ID NO: 320531 - DNA, 524 bp, Homo sapiens
tttctgtaaacagataaagaatatatccattattcctgccccatgttcactattttgtccgactatgcccccagtaataattatttcatataatgtctttatttccaatccattttagacctattaaagaaaacatttatgtaaaatatttattacttcctttttaattcgaaggttttacaagcaaagttaatttggcattaatagcttgtcaaataaartcaaaaaattccaacagtcacatgtagttatagtccagctcacaaaagctattcataaattacaatggactttggggactcaggggaaagtgtgagagaggggtgagggataaaagactacaaatcactgaagaacttactcatgtaacaaaataccatttgttccccaaaaacctatggaaaatataaaataaaatgcttcctgagcacttaaagataaatacaattgtaacaaaatgtctaactatatacttattcattgaatgtccatcttcccatattaaatggaaagccttgtaagga

SEQ ID NO: 320532 - DNA, 524 bp, Homo sapiens
tttctgtaaacagataaagaatatatccattattcctgccccatgttcactattttgtccgactatgcccccagtaataattatttcatataatgtctttatttccaatccattttagacctattaaagaaaacatttatgtaaaatatttattacttcctttttaattcgaaggttttacaagcaaagttaatttggcattaatagcttgtcaaataaagtcaaaaaattccaacagtcacatgtagttatagtccagctcacaaaagctattcataaattacaatggactttggggactcaggggaaagtgtgagagaggggtgagggataaaagactacaaatcactgaagaacttactcatgtaacaaaataccatttgttccccaaaaacctatggaaaatataaaataaaatgcttcctgagcacttaaagataaatacaattgtaacaaamtgtctaactatatacttattcattgaatgtccatcttcccatattaaatggaaagccttgtaagga

SEQ ID NO: 320533 - DNA, 483 bp, Homo sapiens
atttctgtacttccccagctttgccccacccacacttctgctatcatattatatgtgctggttaagccaatagttagtatgtacattattatgacaatgcaggtggagtagaaattactcattctcactaatgagcacttgttctgctcttcttttccactcttgtgcaatgtggtgagggtgtatgactggttgaaatggaagtgatacacattacttctgaatagaagtgttcaggagctacagtgggaccctcctgttcttctctccactctgtcagtgactggggatatttcagatcatacagtcacagattggtggaacctacatcaggctgggatcctgagtgactgtgtggagcaaagytccctgttgtccctaaggaaacatagctgagcaagtaataaaccttttcatcttaatccatggggtttcggggttaatgttagtactgcataaaccagccactgtgaatacagtctc

SEQ ID NO: 320534 - DNA, 544 bp, Homo sapiens
gagtatagactaagaagctttggatagaaagctaagtatgagttataacagtaagcaaataatgaaatctacttggagttctttccttttacttaaacaagtaatcagcctctatgattttagtgacattcactcctctttcttctttcctttcaaaggcatttacttaaaccagacttttccctcatctctctcgatcactttggagactcaagctaacatactaactcttgctttcayacacactttctgtttcttcttcctgtagttaataacatcggatggagtgtgttgtaataaatacaattgagggccaggagcaatggctcactcctgtaatcccagcactttaggaggccaaggcgggcgatcacctgaggtcaggagttcaagaccagcctggccaacatgataaaaccctgtctctactaaaaataaaaaattagctggatgtggtggtaggtgcctgtaatcacagctactgggaggctgaggcaggacaatcacttgaacccgagaggcggaggttgcagtgagctgagat

SEQ ID NO: 320535 - DNA, 544 bp, Homo sapiens
gagtatagactaagaagctttggatagaaagctaagtatgagttataacagtaagcaaataatgaaatctacttggagttctttccttttacttaaacaagtaatcagcctctatgattttagtgacattcactcctctttcttctttcctttcaaaggcatttacttaaaccagacttttccctcatctctctcgatcactttggagactcaagctaacatactaactcttgctttcacacacactttctgtttcttcttcctgtagttaataacatcggatggagtgtgttgtaataaatacaattgagggccaggagcaatggctcacycctgtaatcccagcactttaggaggccaaggcgggcgatcacctgaggtcaggagttcaagaccagcctggccaacatgataaaaccctgtctctactaaaaataaaaaattagctggatgtggtggtaggtgcctgtaatcacagctactgggaggctgaggcaggacaatcacttgaacccgagaggcggaggttgcagtgagctgagat

SEQ ID NO: 320536 - DNA, 559 bp, Homo sapiens
gaggccacctgatgcaaacggaaaacttcacagagaatgtaagtccaggacagggggcttgtgcagagaaagtgttcagtgaatgtttgctgaataaatgaataaataatgagggaacgagagctaacactgctgaatacacaygatggccattcatattttataacagaatccaggactgtaaatatcattaacatctggcagactgtatcctgattaggttaatacggtctcagccacagtggtttggagaaataacttgttctaaacatgtggccaactgggaatatgattctcagtaaaaagctagtctgtgactttggatctcctttaaaattttctttaaaaatgattctattttgtttattattgtaaacatctcttatttttttcacaagcagatgagaaatataattaattacatgatgtaaaggcagaatatgtaaagaaacgctgccttctgaggttggccccagaggtgaagcctgtggtagggatgtgagcttcacacaaagctctcgccacccccttgggagttgtttgctatccccattacagg

SEQ ID NO: 320537 - DNA, 449 bp, Homo sapiens
tgtggatctgtagttattcaataggtttctgtttgctgtgatataaaggactataacataaagctactcattctgtctgtttgtgcaactcaaacacaatgggaacatgcaacctctcttactctgctgaaatatttttaaaaaatcaatttgtactatatcaacaatgtgaagttcatatatatttaaaagaaagcaaagcttgttcaaatttctcctatttttaaaataggctatgaaatatatcttttctcttggtaattgagtaattgtttctttaatattttatgtaatgaatgtttattgtaagaagcttaaaagaagaaaaaattsctaatgtctttctgcttttctgcctcacgatatatactgagcattttcgtgccttttaaatagttttgtgatagtaccattggtgttgcatagtattttatagtatgtgtgttctt

SEQ ID NO: 320538 - DNA, 504 bp, Homo sapiens
gcaatatatgtcttcagcgattgacatttggtcattgccaaggttcgtatctgcatttcagacatcatccttttctctgtctccttctgatattttaggaaaattgcatttacccccatctccacattttgaccaaaaagaaaaggagagacaaatataaaatgtgtatcaaggtcgagtttaggggaagtaattttacttattagaggtaaacagattttcttcgctagctaatattacatagggcaatattctataaaagacttggaaatatattgacaatggggcttttacttacttttctagcataaaactagatttttaaaaaacaagagttatcttcaatggaacctcatttttctttttacgtctttctttyttttttttttcttggtaacaaggatttgcttgttcttcagaaattgagccagaagagcagttttcagttaataggatcttaagcccctaccaccaagcttagcaataatacatccttgatattct

SEQ ID NO: 320539 - DNA, 621 bp, Homo sapiens
ttccacatggtgttggtcctttgtgtgtgcagaagacaagaatcgaggtttgggaacctctgcctagatttcagaggatgtatggaaatgcctgaatgtccaggaagaagtctgctacaggggtggagtcctcatggagaacctctactagggcagtgtggaagggaaatgtgttgtcagagcccccacacagagtccccactaaggcactggctggtggagctgtgagaagagggccaccaactttgagccccagaatggtagattcacttccagcttacactgtgcacctgaaaaagctgcagacagtcaatggcagcccatgaaagcaaccaggaggggagctataccctgcaaagccasaggatggagctgcacaaggctgtgggagcccacctcttgcatcagcatgccctggatatgagacatggagtcaaaggagattattctggaactttaaggtttaatgactgccctattggattttggacttgcatgcggcctgtagcccctttgttttggccattttctcccatctagaatggttgtatttacccagtgcctgtacccccattgtatctaggaaagctaacttgcttttgattttacaggatcatagtt

SEQ ID NO: 320540 - DNA, 597 bp, Homo sapiens
ccagaatgtaatccccatgagggtgaggacttttttgtctgtactgtggaatgctatatccacagcatttacaacactaactgacattcattgagaatccaataaatatctgctagatagatgactaaatgaacaccagatgatttactagcatgcttataggtgatcatgagtctccaagaagactgtgtttctgtattttatacctttggggaaataagtgtttagtaccatatgtcaatataaactgtcatttttcttaatttttttaagaaatatacttccttttatatcttcaccttgattgtagtatatcccttgtcaccagagagtggtgaggtgtagagtaccacactgcagatatttcagagattctagaggagctgtcaggggcttgtaatccagcagcttagtcaagcacttgccctgattaacacctttgaatatsctcagcatgtctatggtttcatttttgatgctggtgttgacttttcttgggattcttaagccaagtggcctcttctgctgctgaggtgcatttgagcatgagaactagccatgcagctcccatgcaaacatgtttctcttgatgcaagc

SEQ ID NO: 320541 - DNA, 597 bp, Homo sapiens
ccagaatgtaatccccatgagggtgaggacttttttgtctgtactgtggaatgctatatccacagcatttacaacactaactgacattcattgagaatccaataaatatctgctagatagatgactaaatgaacaccagatgatttactagcatgcttataggtgatcatgagtctccaagaagactgtgtttctgtattttatacctttggggaaataagtgtttagtaccatatgtcaatataaactgtcatttttcttaatttttttaagaaatatacttccttttatatcttcaccttgattgtagtatatcccttgtcaccagagagtggtgaggtgtagagtaccacactgcagatatttcagagattctagaggagctgtcaggggcttgtaatccagcagcttagtcaagcacttgccctgattaacacctttgaatatcctcagcatgtctatggtttcrtttttgatgctggtgttgacttttcttgggattcttaagccaagtggcctcttctgctgctgaggtgcatttgagcatgagaactagccatgcagctcccatgcaaacatgtttctcttgatgcaagc

SEQ ID NO: 320542 - DNA, 610 bp, Homo sapiens
tgcagctcccatgcaaacatgtttctcttgatgcaagcaactcttaatcccactttacaaatctcagtctagctatgaatactaggaatgtaaaaattgaaaaatattaaatattatatatatatgctttaaaaaatacagttgtctttagacaactataaatgtgcaaaaaaaacctgattcatagttctttaaaatcttcataatcaaagtattttcttccagaagccaagatgtgtattttcagaattcttttctttgcaaataacagaaacccatctcaaaacagatgaagaataaaatgatgaagactaggaataaaaatggctactggaatatctgtagtgaaataatgctatatgagtctctctccttcagacaattctcttttttgtggtaggcaagatggctgacctatatcctgccaacttawcaagcccaatggagagtaatagtttcactaatatttatggtgaaaagctagagaagaagtgttctgactgagattacatgccacttgtccattccttaaccaatctctttagctaaagggagaaatactcggattgattggatatggaggtcatgactactcttgtaattgatgagt

SEQ ID NO: 320543 - DNA, 597 bp, Homo sapiens
tagaccaatcacctgactattatttacaatacgatttctaggcaagtttcatgattcaaatctccggaaaaggggaggctttcagaagtcaggaggtggataaagtggtggtctgggtatacagacagggtctactggattcmttctatttgtaacagacaatgctcactatgcctagagctcccatattttttttttctctttaatcttcaaaacaactctgggaggtagatattactagtcctcattttgtggctgggaaagtaaattgcccaagttcacaagcttggtcacataaaaattggagcccaattctgaacccagatctaattctgaaaaccatgtgcttttcgacataaggtaatattcttagttggaaaatgctgatgccctgacaaaagtagaggttttattttgttttctttcttttgctttcctattaatcagaacatgttacttgttagaggtcaactttgagaaagtgacccatttccagggtccaggagcatgggtcccagaagggctgtgagatcattagcattgaaagcagcaagaaggacaagaaaggcgttcaggtgatctcaagatggaagaccc

SEQ ID NO: 320544 - DNA, 578 bp, Homo sapiens
atggcatacttggctttctgcattcgggttcctgcttaccattatgtcttgcctaagtcacatcttctccctccttcaggatccaaaggcctatttgctattttcaaatatcctgttgtgggtggtttttcattttgcctctatgcctttatccctttgggaacaatgtctgtcacttttagaactaggaaactctaataatgcacccttcaaattttaactcaaatacaattccggatgctgttaccaaaggaaaagaaaatcaacctatctgctctcctaaaaaattttttgtcatacctctaggacagatattttactaaattattttgcattaaattatgtttaattaactgcatttaattatattttccttgatttacttaatttaggtcattaatctgcaagtttttcaaaagcactgttttattcattatyatgctttcaacccctaagggtgcttttgtatgagactaattactcacttcatagttggttaattaattcattactttcctgaactacatgctaaacagtattccaatcagtcaagataaaaagagacagaaataatgcct

SEQ ID NO: 320545 - DNA, 600 bp, Homo sapiens
gtggtttttcattttgcctctatgcctttatccctttgggaacaatgtctgtcacttttagaactaggaaactctaataatgcacccttcaaattttaactcaaatacaattccggatgctgttaccaaaggaaaagaaaatcaacctatctgctctcctaaaaaattttttgtcatacctctaggacagatattttactaaattattttgcattaaattatgtttaattaactgcatttaattatattttccttgatttacttaatttaggtcattaatctgcaagtttttcaaaagcactgttttattcattattatgctttcaacccctaagggtgcttttgtatgagactaattactcacttcatagttggttaattaattcattactttcctgaactacatgctaaacagtattccaatcagtcaagataaaaagagacagaaataatgcctctgactccaagaagtatgcaatctgtttgcaaatggaaggtacacaaaattcatgacaaaataaaaaataktgatataacacataccatataccagggaccattctaagtgttttaaatgtattaatttgtttaatcctcatg

SEQ ID NO: 320546 - DNA, 623 bp, Homo sapiens
tggcaagatgggagctattaaatttgtcaaagattccagttgtgatgaatataacagccccatttttaaatcctttgatttatattatctttagaattaataatcactcatccaatgaaatgatcttggtctgggcctctagccaattctgtcattgaaggcgataagacctaatagctataagccttatatcaatcagcttcagacccaagggaagtatgttgcccaaatgagccactcccttctaattccttgccrtcatgactgatgctagcaagcatcttcattacattgctgctgttatggtctgcagaacagatttacgtgctacagttaagactacaaaacaagatctcatggtactttttcaaccggtggtgaattaaatttagataattttaaaaatctatacaaatattacatgacctaatgcaaacttacgcaaacataaccatctataggtagaaagagtagaataaaaagcatacaagaattttatatgttgttgatgatattattacagtattatactctggtgaccaacactttgacttgatttaaaaatactctgagggaaaaaaataggaagatcaaacttttgttaataacaagttgcagattga

SEQ ID NO: 320547 - DNA, 623 bp, Homo sapiens
tggcaagatgggagctattaaatttgtcaaagattccagttgtgatgaatataacagccccatttttaaatcctttgatttatattatctttagaattaataatcactcatccaatgaaatgatcttggtctgggcctctagccaattctgtcattgaaggcgataagacctaatagctataagccttatatcaatcagcttcagacccaagggaagtatgttgcccaaatgagccactcccttctaattccttgccgtcatgactgatgctagcaagcatcttcattacattgctgctgttatggtctgcagaacagatttacgtgctacagttaagactacaaaacaagatctcatggtactttttcaaccggtgktgaattaaatttagataattttaaaaatctatacaaatattacatgacctaatgcaaacttacgcaaacataaccatctataggtagaaagagtagaataaaaagcatacaagaattttatatgttgttgatgatattattacagtattatactctggtgaccaacactttgacttgatttaaaaatactctgagggaaaaaaataggaagatcaaacttttgttaataacaagttgcagattga

SEQ ID NO: 320548 - DNA, 432 bp, Homo sapiens
tctgaagagagcagcagacctcccagcacagtgttcgagctctgctaagagtcagactgcctcctcaagtgagtccctgacccctgtgtgtcctgactgggagacatctcccattaggggctgacagacacctcatacaggagagctctggttggcatctggcaggttcccctctgggatgaagcttccagaggaaagaacaggcagcaatctttgctgttctgcagcctccactggtgatacccaggaaaacagggtctggagtggacckccatcaaactccagcagatcggaagcagaggggccgggctgttaaaaggaaaactaacaaacagaaaggaatagcacatccattcaaagactccatccaaagatcaccaacatcaaagaccaaagatagataaatccacaaagatggggagaaaccagcac

SEQ ID NO: 320549 - DNA, 432 bp, Homo sapiens
tctgaagagagcagcagacctcccagcacagtgttcgagctctgctaagagtcagactgcctcctcaagtgagtccctgacccctgtgtgtcctgactgggagacatctcccattaggggctgacagacacctcatacaggagagctctggttggcatctggcaggttcccctctgggatgaagcttccagaggaaagaacaggcagcaatctttgctgttctgcagcctccactggtgatacccaggaaaacagggtctggagtggacctccatcaaactccagcagatcggaagcagaggggccgggctgttaaaaggaaaactaacaaacagaaaggaatagcacatccattcaaagactccatccaaagrtcaccaacatcaaagaccaaagatagataaatccacaaagatggggagaaaccagcac

SEQ ID NO: 320550 - DNA, 421 bp, Homo sapiens
agaacactagaagaattatttttgctagtatactcgtacattgttacagtcatgtgtgttctttcatccatttttccaaaaataatttgatttagttaattcttcaggtattttcatttacataattcatcacrattgaagttcagccaacccaggatattaccttcctttgttgcaatgacatactcagtcactaattacaaagacattattcagacacattttatcttgtaatttgtgcccattaaccatagtagaaagaaaaatgatatcctatcctactgcttattttctctttaaatatagcaacagaaaacaataaatacagtattggtggagatatggactctccctcccaccaactctttccttatcctctagctctgtactctatgtagtatgtcttttacatttgtgttat

SEQ ID NO: 320551 - DNA, 421 bp, Homo sapiens
agaacactagaagaattatttttgctagtatactcgtacattgttacagtcatgtgtgttctttcatccatttttccaaaaataatttgatttagttaattcttcaggtattttcatttacataattcatcacgattgaagttcagccaacccakgatattaccttcctttgttgcaatgacatactcagtcactaattacaaagacattattcagacacattttatcttgtaatttgtgcccattaaccatagtagaaagaaaaatgatatcctatcctactgcttattttctctttaaatatagcaacagaaaacaataaatacagtattggtggagatatggactctccctcccaccaactctttccttatcctctagctctgtactctatgtagtatgtcttttacatttgtgttat

SEQ ID NO: 320552 - DNA, 421 bp, Homo sapiens
agaacactagaagaattatttttgctagtatactcgtacattgttacagtcatgtgtgttctttcatccatttttccaaaaataatttgatttagttaattcttcaggtattttcatttacataattcatcacgattgaagttcagccaacccaggatattaccttcctttgttgcaatgacatactcagtcactaattacaaagacattattcagacacattttatcttgtaatttgtgcccattaaccatagtagaaagaaaaatgatatcctatcctactgcttattttctctttaaatatagcaacagaaaacaataaatacagtattggtggagatatggactctccctcccaccaactctttccttatcctctagctctgtaytctatgtagtatgtcttttacatttgtgttat

SEQ ID NO: 320553 - DNA, 472 bp, Homo sapiens
tgttgcaatgacatactcagtcactaattacaaagacattattcagacacattttatcttgtaatttgtgcccattaaccatagtagaaagaaaaatgatatcctatcctactgcttattttctctttaaatatagcaacagaaaacaataaatacagtattggtggagatatggactctccctcccaccaactctttccttatcctctagctctgtactctatgtagtatgtcttttacatttgtgttatttcaagcaataattacattaattttagtttaagacaacaaatactagtctaaacgtgtcccttcacttcatatttatttatcctcttctcctgayggattcagagcacactaccccaatataacactttggtatactgaatattttaagttgaaggaagctgagaaaattgcagaagcaggaaagtctgaccatcttccatccttcttcccttaagtggtg

SEQ ID NO: 320554 - DNA, 525 bp, Homo sapiens
tggcatcagaaataattctatcagagaagcagaaccactgcatgtaaaataagggacatgttatcaggattgaatcttacacaatcatgggagctggctcagtagtatttgtaaggctgttgtcttccatttgatgttggagcttgaagtctgcagggcagaaagttggggacacragatggatgtaatacaggggagatcaaggaccaactagaacccatgaggaaagaataaaacccatgccagttctcactgcctgcaatcttgatgacacagtgttctgcacagaaagatggcacctgtcatgtagctagacacatacctgccaagaggaggaggaggatccaggggaaggaattaaagctgcagacccagttgctgtccaaaccaagatccaaaacagccccactgggtatgaaccacaaattaaatttctgtttaatttccattccccaaacatcctatgaacattctctagtggcccactctaactggcaatatacaagaaagggaattttgggaaat

SEQ ID NO: 320555 - DNA, 644 bp, Homo sapiens
cagcgatttgtgtctgagaagctgagaaacagcttaaagaggaggcaccatttggaagaaactatttgaagattgatatggtaaagaaggagaggtgaactggcaaggaagacagctgtaaaaaattgctacaatagcccgggagaagactcaactagtgcttgaaagcaggtgagtttgttgaagggggactgtaccaaaaccaattctaaaaaccgttttagtttttgagaagttggaggcaaaacatcctttgctgtttttcattacagacttatttctattatttgacacagttyaatagttaatagtttcttagagaagattgattcctctttttagtagcagtaatataataataataattaacatctatgaatacttgctatcttcaaaggactaggcaatgagctttggctacataacaggtttaattcttgcaaaaatcctgtaagaggatggtaatcttatcgatagtccaattttaccaacgagaaactagagagatttaattacacgcctaaggtcactcagcttggaggctacagaccccaaagcctgtgctctgaaacatacgattcttattttgttggagaaatattaaaatcccacagagtactgccaactcctcattaattaagaaa

SEQ ID NO: 320556 - DNA, 644 bp, Homo sapiens
cagcgatttgtgtctgagaagctgagaaacagcttaaagaggaggcaccatttggaagaaactatttgaagattgatatggtaaagaaggagaggtgaactggcaaggaagacagctgtaaaaaattgctacaatagcccgggagaagactcaactagtgcttgaaagcaggtgagtttgttgaagggggactgtaccaaaaccaattctaaaaaccgttttagtttttgagaagttggaggcaaaacatcctttgctgtttttcattacagacttatttctattatttgacacagtttaatagttaatagtttcttagagaagattgattcctctttttagtagcagtaatataataataataattaacatctatgartacttgctatcttcaaaggactaggcaatgagctttggctacataacaggtttaattcttgcaaaaatcctgtaagaggatggtaatcttatcgatagtccaattttaccaacgagaaactagagagatttaattacacgcctaaggtcactcagcttggaggctacagaccccaaagcctgtgctctgaaacatacgattcttattttgttggagaaatattaaaatcccacagagtactgccaactcctcattaattaagaaa

SEQ ID NO: 320557 - DNA, 644 bp, Homo sapiens
cagcgatttgtgtctgagaagctgagaaacagcttaaagaggaggcaccatttggaagaaactatttgaagattgatatggtaaagaaggagaggtgaactggcaaggaagacagctgtaaaaaattgctacaatagcccgggagaagactcaactagtgcttgaaagcaggtgagtttgttgaagggggactgtaccaaaaccaattctaaaaaccgttttagtttttgagaagttggaggcaaaacatcctttgctgtttttcattacagacttatttctattatttgacacagtttaatagttaatagtttcttagagaagattgattcctctttttagtagcagtaatataataataataattaacatctatgaatacttgctatcttcaaaggactaggcaatgagctttggctacataacaggtttaattcttgcaaaaatcctgtaagaggatggtaatcttatcgatagtccaattttaccaacgagaaactagagagatttaattacacgcctaaggtcactcagcttggaggctacagaccccaaagcctgtgctctgaaacataygattcttattttgttggagaaatattaaaatcccacagagtactgccaactcctcattaattaagaaa

SEQ ID NO: 320558 - DNA, 499 bp, Homo sapiens
aggatagatgatccctcagctgattcttgaacagggaggatttcagcaggtgagaaagcatggtggtggggttggtacctggaaaaggagaagctagatgaaggctcagaggtgcatctgaggggagtgttgaaggcattttatttagtcagaatttgagctgtagctaactgtgctcctcaaaccattatcattagcatcacatggaacttcttagggttgcaatttgtcagctcccaccagaaacytaatgagtcagattctgaggataaggctcagcagtctatggtctaacaagtcctccaggtgattgggatacacagtcaagcttcagaactattggattaaaacattgggtaccatggcaagagatatgtctacactaattgaatatttatagagtttacaaagacaatcttatatgtggaattatacactttaaggtatctgccactttaggctatttatttgaaaacagaaaaggttcaagataaagttt

SEQ ID NO: 320559 - DNA, 499 bp, Homo sapiens
aggatagatgatccctcagctgattcttgaacagggaggatttcagcaggtgagaaagcatggtggtggggttggtacctggaaaaggagaagctagatgaaggctcagaggtgcatctgaggggagtgttgaaggcattttatttagtcagaatttgagctgtagctaactgtgctcctcaaaccattatcattagcatcacatggaacttcttagggttgcaatttgtcagctcccaccagaaacctaatgagtcagattctgaggataaggctcagcagtctatggtctaacaagtcctccaggtgattgggatacacagtcaagcttcagaactattggattaaaacattgggtaccatggcaagagatatgtctacactaattgaatatttatagagtttamaaagacaatcttatatgtggaattatacactttaaggtatctgccactttaggctatttatttgaaaacagaaaaggttcaagataaagttt

SEQ ID NO: 320560 - DNA, 524 bp, Homo sapiens
acaacagcaataaaaatgaatactaaaaaggtatctaataactgcagtgacacttagatggcagccaattcaacaagaaaaatcagcataggcattataggagatgtttcagtgcatgtgttgtttactatcccccatcttctgtgctggkttcccaaaggcaactgtggttgtaacattttgctgccactcctgtttactacagcaagaaacaaacacctgatcagatatgggccaatcaggatccatttcctagaaataagagaagtctggctttgcagtgtgcattgtaatatatgaacctgaatgtcatcagtgatcatttccctcttaccaccaatattgataacaaagaaagccagcctgtcaagaaagaagacttcagccccgcagagaggaggagaaaggagggtgtgtgtgtgtatgtgtgtgtgtgaatttgagagaggatattctctaggcttcctacccaccttctagttcctggatcaaatccattctaaggtcaagctgcattcctgcct

SEQ ID NO: 320561 - DNA, 429 bp, Homo sapiens
ctgtgtgatatggtttggctgtgtccccacccaaatctcatcttgaattcccatgtactgtaggagggacccagagggaggtagttgaatcatgggggcaggtctttccctgcccctgttctcgtgatagtgaataagtctcatgagatttgattattttataaaggggagttcccctgcacaagctctctttgcctgctgycatccatgtaagacgtgacttgctcctccttgccttccaccatgattgtgtggcctccccagccatgtggaactgtaagtccattaaacctccttcttttgtaaattgcccagtctcaggtatgtcttcctcagcagggtaaaaacagactaatacattatgcatactttccaaaaggaaagctatacattaagttacaactacaaggtgcagcgaatatgtaccta

SEQ ID NO: 320562 - DNA, 200 bp, Homo sapiens
tggctaactgatccaattaatgctaacagyaacagttccttctctgaggttatcccgttagaaagaactctgggaattctttgtcccacagatacctaaaatacacaccaaagtcacacctatctctctgtgccctgaggcatgacacaaggcctcaccaagacattccttatacccttcagttctagtcatttttgatg

SEQ ID NO: 320563 - DNA, 548 bp, Homo sapiens
attccttaccaggctcagggtgcaggcctcacaggatgccagaatagcctayttaagttcaaatttcattaaatgagacatggcacatttccatcattgatcaggtatcaggaatgaattgtaataaagagtctgactccagttttggtgtttgttcactgacagcgtttaaggcccaccccttctcttgccccttttgccccacatctgggcaggcccataagaaagtcttttggtgccagcaggaaattcaaaccacacaagtggctggccctgcacaggaacactcaccccagctccaatccctaaccacaatcagaaccatcacctctcacctctcgcatcactggagcctttgcagattggcttgggtttctgccatgctctcccagaaagtcctgttatgtaaattaaaagcctttccataccatctttgtgtgtgtgtggctttatcagtctgcacattcaaaactattttgggtgaggggttgataccactcttcagtggcaaacacaaaacatatacctataactttgggcacttgtct

SEQ ID NO: 320564 - DNA, 548 bp, Homo sapiens
attccttaccaggctcagggtgcaggcctcacaggatgccagaatagcctatttaagttcaaatttcattaaatgagacatggcacatttccatcattgatcaggtatcaggaatgaattgtaataaagagtctgactccagttttggtgtttgttcactgacagcgtttaaggcccaccccttctcttgccccttttgccccacatctgggcaggcccataagaaagtcttttggtgccagcaggaaattcaaaccacacaagtggctggccctgcacaggaacactcaccccagctccaatccctaaccacaatcagaaccatcacctctcacctctcgcatcactggagcctttgcagattggcttgggtttctgccatgctctcccagaaagtcctgttatgtaaattaaaagcctttccataccatctttgtgtgtgtgtggytttatcagtctgcacattcaaaactattttgggtgaggggttgataccactcttcagtggcaaacacaaaacatatacctataactttgggcacttgtct

SEQ ID NO: 320565 - DNA, 589 bp, Homo sapiens
tttaacttaattgtatttaaatttaaatagcaacttgtggctagtagattctgtattggacagtgtcagtgtagtatttttgttgtccctatgaactcagaatttactcattttattatgtattattttacattatttcttttcagattaatttacatatttcacaatttcttggatcaacagttcttgcattttagaacttgttacaatctttccttctttaaatatatcttttagaatgtacgttagtaaagatttgctggtggtaaactcagtttttaattttggacatgtgtttgacaatgtcctagaaaaayaatttttataacacaattctaggttgatagtatttctctcagtattttgaatatattactctatgaactctggtttccattgaagctattgagaaatctgctgttagagtagatcatcctccttttaggcactctggttttttctgtggctctctttcagatactttatctttggtgctctgaaattttactatgttttacttgtggatttttctttgcttgatcctcttggtatatattgtgcattttctattgtagatgtgtgcctatcc

SEQ ID NO: 320566 - DNA, 603 bp, Homo sapiens
ctggtggttaagacaccaacatactttttttgtggggagtggggggcaaaattcaacctctatagtaagcaacagaccagggggagctttatttcatgggctagtggggtgaagtactgataaacaatatctggtaacaatgtaagttaagtgattttagtttgagraacaaatgaaaacgggaggaagaaaaaaatctagtcagcaaaagcaaaaatgttagtgcaggtaacaaggtcagaataagctataacaatttacataggctttgtcatttcctttggaaattaggaattggtagttcaggtcagggaagaactataccaagacacagcttttagcaaaaaagaatactggagctaccaagaaaagttgaaccaacagtcttaaaaaaaaaaaaaaaaaaaaaggaacacagcaaagaaatctgctggaggatatacaaccccaggaattttgcatgccctaacaatgaacagcagatggtactaagtccaaagaacatcggtaaataaaatagccactggtttcaatcagttgaaaaactggaatgttaactccaaatcctatgtaaaccagtttccacagagaaatttttttttt

SEQ ID NO: 320567 - DNA, 563 bp, Homo sapiens
ttatttatttatttatttatttatttatttttgaaacagggtctgactctgttgcccaggctggagtatagtggcccaatctcagctcactgcaacctccacctcccaagctcacacaatcctcccatctcagcctcccaagtagttgcgactacaggtacttgccaccacacccagctaattttgtttttttktgtgtgattttttttttttttttttttgtatagacagggttttgccacatttcccaggctggtcttaaactcctaaactcaagcaatcttcctgcctcggcctctgaaagtgctgggattataggtatgagccactgcacctggcctgaaaccattttaaatggggcgaaagagtgcctccatactcaattcaaataaataagacagaatcaattctagattagaaaaaaatagtatttaaaattcaataactaaccagagaacaatatctttagtaaaaatgttttcttcctaataagagaaaggactaataagagaaaggaatcattgtctatattcagaattgggatttcagtcttttttttccta

SEQ ID NO: 320568 - DNA, 477 bp, Homo sapiens
tcactattaaataggtttacatcacacaatctactacttataactttaaaattctgcttttgaatctgtctttttcaaagttcccttctttaccattctccttttggaagaagcatcctggcctccaggattccctggttatcatcaacacaaaacaattccactttaaggcataccagatgcattttagtgattgaaaaaactacgtcatgcaaataaccgtatctaccctccccagagaacaatcacacatcaatccagtctagtgtttcttgagcatgctctttgacatcttccctcctacttgaaaaaacaaaagtatttcaccatcaggactttgtagttctttggtccaatgctctactaatgtaattcaactccccttcaggtttctgctttgtttcccattytccgtttctccaacaattggccttttcgctctgtgctgtctgcttgccatttttccacctcgaggtt

SEQ ID NO: 320569 - DNA, 474 bp, Homo sapiens
atttggagaggcttagatttaggaactttttgtaaaagctccaagaagactaaaatagaaatattggcatgggatataccacttctttgcctgctttaaaaagagatgtctgtgacaaagtttattgacatggaaaagaacattaatgatatcaaattctcaattaggaatcttgaaacatgcatttctctgaattaaataccagttgcacgttgtctctcaccaatgaccayttcaaatagtgttttagcaacactggtgcatcatagtcccataatatgttttcattccaagcacaaacagttgtacttggaaaatattagtaatgtacccaaaagtctttttaaagagacattgcaaaattatgagacagtccaataagggaattcttaaatgtgaataatattatatttacaaaaaaattaatatggggaaaacatgacaatctcatgtcaatgaaaattcatagtacaa

SEQ ID NO: 320570 - DNA, 474 bp, Homo sapiens
atttggagaggcttagatttaggaactttttgtaaaagctccaagaagactaaaatagaaatattggcatgggatataccacttctttgcctgctttaaaaagagatgtctgtgacaaagtttattgacatggaaaagaacattaatgatatcaaattctcaattaggaatcttgaaacatgcatttctctgaattaaataccagttgcacgttgtctctcaccaatgaccatttcaaatagtgttttagcaacactggtgcatcatagtcccataatatgttttcattccaagcacaaacagttgtacttggaaaatattagtaatgtacccaaaagtctttttaaasagacattgcaaaattatgagacagtccaataagggaattcttaaatgtgaataatattatatttacaaaaaaattaatatggggaaaacatgacaatctcatgtcaatgaaaattcatagtacaa

SEQ ID NO: 320571 - DNA, 407 bp, Homo sapiens
ttctcatctgtgagggctgatgttttgttatcctttgacactgctgccaaagcagctttttggatggggcttttgttttyaaatcctctttattgtccttgaaggtttgaccatggtgcaagttggtatactgaatgcttcatttctgggtgctctcagaggtccagggttcagatttgcactcatgggctgtgtgctctaggacctgggactaggtctgtggctttgtcctcttgtcccttaaggttgagccctggctgggctggaggggccaaggagctaccagaccgactggcaacagcattttctaggagaggtgggggcaggtgggtgtaagtgcttcagtggtgtctccatggaaaggaagcacacccccagcaggggttatgggggcactgtaggtgagc

SEQ ID NO: 320572 - DNA, 523 bp, Homo sapiens
cttttttaaaatatgtggtagaatctgcatggaagccatcaagtcctggactttccattgacaggagactttttattacagattcaatatcctactcattattggtgtcttcagattttctattatgattcagtgttggtaggtgatacggtttgggtatttgtcctctcaaaaatctcatgttgaaatgtgatccccagtgttggaggtggggcctggtgggaggtgattgggtcataggggtggattcctcacaaatggcttggtgccctcccacagtaatgagagagttctcactctattagttcacacaaactctgttaaaaacagtctagcatttctttatatttcctcattctctctctggttccttctcwcaccatgtgacatgcctgctccctcttcttcttccatgagtaaaagcttcctgagacactcaccagaagtagatactggcaccatgttttttcgtacagtctgcagaaccgtgagccaaaataaacttctttataaattacccagt

SEQ ID NO: 320573 - DNA, 579 bp, Homo sapiens
ccattttcatttctctgaagaaattttttaatttccattttttctttgacccatgagttgttttagggcatgtataatttccatatatttgtgaattttctgaaattgcccctattatagacttctagtgtcataccattgtggtcagaaaaggtatttgatatgatttcaatcttccttgttcaatttgttatgacttacactgaggcctatcatatgatctattctggagtgtgttccatgtgcacctaaaaagaatgtgtattctgtagctattggttggatgttctatatatatatctgttaggccaatttggtctaaagtgcagctcaaatccaatgtttccttattgatttccatctgaatgggctgtccagtgttaaaatcatgttattaaattccctattactcttgtattgtggtctctctctccctccctcaaatctattaatatttgatttatatatttttgmtattctgatgtcagatatgtatatatttaccattttaatattcctgtgatgaattgactttttatcattatatattgaccttatttgtcttttttaaagtttttc

SEQ ID NO: 320574 - DNA, 515 bp, Homo sapiens
tacatcacaaacacaggcctctcttctctctattgtccctgcacaagccatttaactttctcagtccatgttattccccctgcagagaatatcgggccctccaagtgaagcccttacttacattgagatgtgtgggcaacaaactcttcttttccttgggtagtagaggtaaggctcaagcccagctttttccatgggaaccttccccacaacattctgtttcattctgtgcacactgtcactttttaatatatcyttaatctgtctcagaagctcaagtgtgaaaccagtttttgcacattttgtttgtgaattctgcattttgtttgggccttagctttggcatctttgtgatgaagttcaggatgtggtaccccaacatatggcaccttggcattttgagtatttcaaactaaagagatttgagaaaatgacaaaataaggaaggtctctttgccccttgggggcagtttatgaaacctaccagggattttttgaccttcccctgaggcaga

SEQ ID NO: 320575 - DNA, 515 bp, Homo sapiens
tacatcacaaacacaggcctctcttctctctattgtccctgcacaagccatttaactttctcagtccatgttattccccctgcagagaatatcgggccctccaagtgaagcccttacttacattgagatgtgtgggcaacaaactcttcttttccttgggtagtagaggtaaggctcaagcccagctttttccatgggaaccttccccacaacattctgtttcattctgtgcacactgtcactttttaatatatccttaatctgtctcagaagctcaagtgtgaaaccagtttttgcacattttgtttgtgaattctgcattttgtttgggccttagctttggcatctttgtgatgaagttcaggatgtggtaccccaacatatggcaccttggcattttgagtatttcaaactaaagagatttgagaaaaygacaaaataaggaaggtctctttgccccttgggggcagtttatgaaacctaccagggattttttgaccttcccctgaggcaga

SEQ ID NO: 320576 - DNA, 383 bp, Homo sapiens
tacaaaactcactagcatttctatacactagtaatgaactactagaaaaagaatttcagaaaacaatcccatttataatagctacaaaatacttaggaatatatataaccaacaggtgaaagacatattgaaaactayaaaacattgataaaaaatttaagaatgacacaaataaatggaaagatatcccatgttaagggattgaaattattaatgttgttaaattggtcatactacccaaaacaatatacagatttaatgcaacccctatgaaaattccaatgacgtttttcataggaatagaaaagacaaacctaatatttgtatgaaatcacaaaagaccccagtgcaaaatcattcctcagcaagaacaaagccagaag

SEQ ID NO: 320577 - DNA, 550 bp, Homo sapiens
agaataaaaggcatccaaataggaaaggaagcacttaaattgtctctgtttacacttaacaatcttgtatatagaaaactcttcagactccataaaaaatgttaaaactaataaattcaataaagttgcaggatataagaccaacatacaaaactcactagcatttctatacactagtaatgaactactagaaaaagaatttcagaaaacaatcccatttataatagctacaaaatacttaggaatatatataaccaacaggtgaaagacatattgaaaactataaaacattgataaaaaatttaagaatgacacaaataaatggaaagatatcccatgttaagggattgaaattattaatgttgttaaattggtcatactacccaaaacaatatacagatttaatgcaacccctatgaaaattccaatgacgtttttyataggaatagaaaagacaaacctaatatttgtatgaaatcacaaaagaccccagtgcaaaatcattcctcagcaagaacaaagccagaagcatcttattacttcatttcaa

SEQ ID NO: 320578 - DNA, 576 bp, Homo sapiens
actgggtttagcatctgaagggaaataacttactgggaattccagattttacagtgagtttaggaaaagatattgagcctcttttctccttttagtccttacaacattttgaggagaaaaattctaccctgccttctgcttctagttggaaacaaatttaaatttgcagagaaggtgtatcggtcagagctcttcaggaaaacaaagccagtagaaaaaagaaaaggctgggtgcggtggctcacgcctgtaatccsagcactttaggaggctgaggtgggtggatcacgaggtcaagagattaagaccatcctggccaacatggtgaaaccctgtctctactaaaaatagaaaaattagctgggtgtggtggtgtatgcctataatcccagccactcagcaggctgaggtagaagaatcacttgaagctggtaggtggaggttgcagtgagctgagatcgcaccattgcgctctagcctgggtgacaagagtgaaactccatttcaaaaaaaaaaaaaaaaaaagaaaagaaaagaatgtatataaaaagagactcattaaaacaaattggctta

SEQ ID NO: 320579 - DNA, 576 bp, Homo sapiens
actgggtttagcatctgaagggaaataacttactgggaattccagattttacagtgagtttaggaaaagatattgagcctcttttctccttttagtccttacaacattttgaggagaaaaattctaccctgccttctgcttctagttggaaacaaatttaaatttgcagagaaggtgtatcggtcagagctcttcaggaaaacaaagccagtagaaaaaagaaaaggctgggtgcggtggctcacgcctgtaatccgagcactttaggaggctgaggtgggyggatcacgaggtcaagagattaagaccatcctggccaacatggtgaaaccctgtctctactaaaaatagaaaaattagctgggtgtggtggtgtatgcctataatcccagccactcagcaggctgaggtagaagaatcacttgaagctggtaggtggaggttgcagtgagctgagatcgcaccattgcgctctagcctgggtgacaagagtgaaactccatttcaaaaaaaaaaaaaaaaaaagaaaagaaaagaatgtatataaaaagagactcattaaaacaaattggctta

SEQ ID NO: 320580 - DNA, 608 bp, Homo sapiens
tttcctccactcttctaagttagttagcctttttgtcattgaagtgaatatctaactagtgtttctgttcaaggtaatagggattctatttttattcactcattcattcctcattattcaataaatgtttcttgagtttctactgtatgtcagactttgtgctaggtgttcacaaatatatgtatccttttggttattattaacttaaaaaaactcctttgaatgatcaacctccatgttgtcttctcaagcagttataattacaggtgtttgttattaaaatgaatagtgtgmgtttctttcaaagtcatcacacctgaacatagacccatttgggaaaagaaaaaaagacaatatatcaggtacaagcataaaattattccagacaagacaaaatcttgatagtaattgtagattttgaaaattccactccactattaatgcaataacattctgtttcttagccaatacaagactaatgatactaaaaacccattttaaaaatcagcacttgcacaactctatgtcataatgcacttgatcaagttatgcctcatgtccttggctttaagtcttttaagaaatattgtttaatttactctaattga

SEQ ID NO: 320581 - DNA, 570 bp, Homo sapiens
ttatgattttgatagggattgtattggatctgtagattactttgggtagtatgaacattttaacaatattaattcttcctatccatgaacacagaatatctttcaatttaaatgtgtattatttaatttccttcatcagtgtttgttgaattccccctagcttttgtttggaaaacaatttctccttcatttttaaaagataattttgctggatagagtatttttgattaacggtttttttttttaaattctgtgctgtgatatatcatgctattctcccttggcctgcraagtttttgctgagagatctactgatagcattttaagggttgctttatatatgattagttgcttttctcttgtcactttcacaattctgtctttgttgctgacttttgacaatttaattataatgtatcttggtgtagtctcctttgtgttgaaaattttcagctccatttttggaaaatttgcagcttcctgaatcttgatgtatatttctttctcaagatttgggaagttttcagcttttatttctttaaatgagatttctttccctttctttctgtc

SEQ ID NO: 320582 - DNA, 615 bp, Homo sapiens
ttccaattacacactaaattaggcacatgattgaacacgaacactaacattttccaacaggtggtgaataagcaatttctatccatcaactcaacaacagctctctggccaaatagtcccctgttttagagttcttctaatataacaagtgtttttagccaatttaaaaaattattcccttaatagaaagatttaggggaatagagtgtctaattctaattcagaattgcagagtgcagcaacagttagtatttccatatgtgaaactgagatatatatgagattttgtgtgtgctacagagttgtatcaagctaaatctaagtaaatttagtgttacacctctgattttttgagatcaataattcctaacagattttgagaagacactatagtgcctcatgtttttttcaaacatcagatttttgaatataastttgagatataggtgcaaaaattatctgtattctgaaaattaatatttccagtttcagtttacactgaataaaaaaagcaaagtggagctactaaattcaagaagatgtcaggatgaagttgatgtaggttgattttaatacatgagacacatttcatcagaattctgggattagtttacc

SEQ ID NO: 320583 - DNA, 547 bp, Homo sapiens
aaaattaatatttccagtttcagtttacactgaataaaaaaagcaaagtggagctactaaattcaagaagatgtcaggatgaagttgatgtaggttgattttaatacatgagacacatttcatcagaattctgggattagtttacctgtttttaaaatggtcttcaccattagatcatatctgggcaaaccaaaaaacataaatcaatcaggtgaaagtgttgttctaatggtcatcagatgattttggaggagcttcctaaaccacaaagcactytcacggattaagtcaaggcatcatataacgttgctggcataatgtgctatccaggagtagcacatagcaagcagagaacaaagtctctgacaatatctagttatattttactaggcaaatccccagaaaaagttatgagccaagattgtgagactcaggtgtgtgtatttaaatagtcctagagtctaaaaagtaccacctacttattctgtttgtgctaacttgatctggtgggtggaagaggaataaagttgaatatgcatggccaaat

SEQ ID NO: 320584 - DNA, 576 bp, Homo sapiens
taaaaaaatagagactaggcttctttaatggctccaacagaaattaaaaaaaaaaaaaaaaaaactacatctgccttttgcttttgaataaatagaacattttaccaataatgccaagatgactcacaacacacattttatgtatcttgtaattttcctatacactgcaaagacaacatagttgagctaatactagcgaagtcttacatgtaattataggatgcctatagcatttctagtataatatattaatgaaaaccagttatttaattatggcataatatcatgaaaagcttttatagtcacttgctaaaacagaccaaaaaaacattttcccaartatagctgaggaacagtagaatcgtatcttgatgtcagtagatgcctttgccggggtgtagaaacagcttctcctgtcattaaaaggacaaactgtaatccatctgccatgtataatttgacaatctgcaatctttaaacagtaggagggaaagacatgtcttccaaaatttcccctgaaggaggaggctttcagcagttcccaattactatctaggcctaatgtctcacttgaga

SEQ ID NO: 320585 - DNA, 645 bp, Homo sapiens
acacatttctactgataatagaagaatgaaaatcatagaatgccatagatccatgtttcctgcagataaggattgctttcttgggacccatttcagctcattacatttattaastcaactaaaaatctttcctggcactggttcagaatgcacaaagctgttgtctacaaaaacctactttagttaccacgtgggtgttttcccaggtaggggtgattttaaagggaaaataagaaaatggaaaattccattttgcagatttaggcttaccttctgaaatcttgagaatgctgggtgagatttaagacagactctgtcgttctatcatcagagaaatgcaaatcaaaaccgcaatgagatactatctcacaccagtcagaatggcttttgataaagagtcaaaaaataacagatgttggcaaggctgtggagaaaagggtgaactgatactctgttgcaatgtaaattagtccagccactgtggagggggcagtttggagagtttggaaagaagtgagagttgaactgccattcaaaccagcaattccattactagataggtctggatgtctggaaaataaattgctgtaccaaaaggaaacatgcacctgtatgttcactgcagcactattcacaatagcaaaa

SEQ ID NO: 320586 - DNA, 585 bp, Homo sapiens
ttactgtcatgttcattaattaattaatgggtattatttcatcatttctcctccctccaactagctttgagcttccttgagttcagagaccacaacaaacattcttctgcatctttacagagcttaacaaagtgcaagatgcacagcaaaccctcactcagccgattgctgattggcagagctttctcagttgtgataaagcagagttgagcagattgatggagagtacactctcctattagaaacgttgagctttaaagataaaattaatgctaaattagcattaataagaaatttctgaaagaaaatgtttccttcttttttttttttttttgagacaragtctagctctgttgcccaggctggagtgcagtggcgtgatctctgatctctgcgatcactgcaacctctgcttccggggttcaagcaattctcctgcctcagcctcccaagtagctgggactacaggaatgtgccaccatgcctggctaatttttgtatttttagtagagacagggtttcatctctcctattagaaacgttgagctttaaaaataaaattaatgctaaattatcattaataag

SEQ ID NO: 320587 - DNA, 600 bp, Homo sapiens
actagcaagcaacagaaagaaagccatataaaaatagaaagttttatgctaaaggtaaatacatggacagatacagtaatctgtattattgtatttttggtgcataaatccacttttaattcttgtatagaatttgaaagacaaaagcataaaagctatgratatctgttaataaacgtgtaatatataaagatataatatgtgatattaataacataagatgtgtgtgggggaacaacagtacgcaaaaggaaatgagaaagaaatcaatgtatgacactacaaggaatgaacaaaacacaaggcaataagaaagaaaagggaaaaaggccaaaagacatacagaaaacaattaacagaatggtaattagtgagcccttccctgtcagcaattacattaaatgtaaattggttaaactcccaaatggaaaggcatagataggctaagatttctctttttagaacagcaacaacaacaacaacaaaataaataaataaaaaagccagaatttatgcactgtctacaagaggcttactttagacctaatgatatacataaactgaaagtcaagagatgaagaaagataatccatatgaatg

SEQ ID NO: 320588 - DNA, 600 bp, Homo sapiens
actagcaagcaacagaaagaaagccatataaaaatagaaagttttatgctaaaggtaaatacatggacagatacagtaatctgtattattgtatttttggtgcataaatccacttttaattcttgtatagaatttgaaagacaaaagcataaaagctatgaatatctgttaataaacgtgtaatatataaagatataatatgtgatattaataacataagatgtgtgtgggggaacaacagtacgcaaaaggaaatgagaaagaaatcaatgtatgacactacaaggaatgaacaaaacacaaggcaataagaaagaaaagggaaaaaggccaaaagacatacagaaaacaattaacagaatggtaattagtgagcccttccctgtcagcaattacattaaatgtaaattggttaaactcccaaatggaaaggcatagataggctaagatttctctttttaraacagcaacaacaacaacaacaaaataaataaataaaaaagccagaatttatgcactgtctacaagaggcttactttagacctaatgatatacataaactgaaagtcaagagatgaagaaagataatccatatgaatg

SEQ ID NO: 320589 - DNA, 575 bp, Homo sapiens
tgcccccatatatgtatgtttgcatgtctgtgtgcctatatagagaattagaagaaaatatacaggtttatgcatcttaccttaagctagagaaagttttccttcaacaggaaacagagctctaaagcaaaakattggtatagttgtctatgtcaaaattaacaatcttaaatttcacgcaagcatcaacataattaaaatttaaaagtctgtcactggacagagtggcagaaaattgacaaactgtaagaaaaatgttgtaatatttaaaatactcaaaatatatgtatttattacataattataacaaatcaataggaaaaaacatttcaaaagaaaaatgggcaatggatgtaactggcttttcacagaaaagaaaatattaatgtccaattaacacttcaagttatcatactagtagccaagaaaatgtaaattaacataatgcaatgccatcttttacctattggtctagcaagaaagtaccacatatcaagtgtttctgaaggttcagaaaaacagttaatctcattcattgattatagaattgtaaattatacagcattttagagggc

SEQ ID NO: 320590 - DNA, 562 bp, Homo sapiens
aagtgggttgagaggaaggtttactgtgaagctgatgaagctcaagataaagagcscttcaattgcaaagaccctttcttcagccttagtggaaccctagaaatgtgtttgcatggtcatatttactaaagtaagatattttactccagctggttacattgatgtctcattccattctgaccacttaaagagggccctaaaactatttaaattttggggccaatcctgggtaggggactaaatagatttgttgaacaaaaagagccttactgaaggagaacatagtgacaggatatagtagccatttgaagagacttggccagagttttctaggtagaggaaatagcaaaggaagggtcctgagcagaacttagcttgaacctgtgtttctgaggctgagtgaggaggagaatggtgagaaatgagctagggaggtaaccaatggccaggcatgcagaggtttgcagacgtcataagaaagctggacttcattccaactgcaatgtgaagctgatcaaaggttttcatgggtgttacacaatatagtttaacttaaaaatat

SEQ ID NO: 320591 - DNA, 558 bp, Homo sapiens
gctgtgtggtacagtgcccaaaatgtaacaacttaaagcaacacacatttgttatttcacagacttctgggttaggaatctgggcacagtttagctgggtcttctgcaaggctgcgaacaaagcttcatccagatgagacggatgaaggattctcttttaaattcactcagattgttggcagaactcatttcctgggggctgcagaaggtatgatggcttgcttcttagatgcctgaagtgaaaagcaataccttctgtagggagagttcaatcaagayagaatctcatataaccttaagtaatcacaggagtgatattgcagcactttgctaccttccattggttagaagcaagctaccggttccacccacactcaagggaagggaattatactagtcataaacaccaggagatgggaaccaaggggccccatagaagtccatggtcacaaggctattccaagtaaatttgttatgaatgtatgtgtacaagattttgagtacacatatgtttttgtttcttttggataaacactcaagggtggaaatgctgatata

SEQ ID NO: 320592 - DNA, 558 bp, Homo sapiens
gctgtgtggtacagtgcccaaaatgtaacaacttaaagcaacacacatttgttatttcacagacttctgggttaggaatctgggcacagtttagctgggtcttctgcaaggctgcgaacaaagcttcatccagatgagacggatgaaggattctcttttaaattcactcagattgttggcagaactcatttcctgggggctgcagaaggtatgatggcttgcttcttagatgcctgaagtgaaaagcaataccttctgtagggagagttcaatcaagacagaatctcatataaccttaagtaatcacaggagtgatattgcagcactttgctascttccattggttagaagcaagctaccggttccacccacactcaagggaagggaattatactagtcataaacaccaggagatgggaaccaaggggccccatagaagtccatggtcacaaggctattccaagtaaatttgttatgaatgtatgtgtacaagattttgagtacacatatgtttttgtttcttttggataaacactcaagggtggaaatgctgatata

SEQ ID NO: 320593 - DNA, 561 bp, Homo sapiens
atatattgggtttgacttactgctttgggcatgtcttagaaggggaagaagtgacctttaaaattatttacaataaagaaacaggctgtattcaaagttacccctctcttgctttctttatattatgatatatttttctgaggggcatatgagaagtcatgttatatctaggagtcaatgagggttacactgaaatttttcctgtccataagcctcatctttcattagcgacctctggaaaattgttgtgaacaactgctatgaactagaagtgctatgaatgcttaataagagatacacagcttaaagaatgatagataaaaactgaaaatacaaagcaacctaaccaaatggccaaaagtactgcactaggtaatggtgtcaaattaaatgtgggcacactcttatttattacrtaagttgctttctttttcctcctgaaaatacagattgaaatttgcctttctctttcttaaaacttccttttttactcttgagtatcaaattttcattagacttgagacagtcatttttatagacctgtccttaaggtcaaaataa

SEQ ID NO: 320594 - DNA, 589 bp, Homo sapiens
aattttctcccaggccccaaatatccattttctttcccctggagagaatctcagggtactttggttaatggaaatagatggcgtcagagagatgaggagaggccattcaatcttcattgagtttggctgggacaccaggtgacttacactgkactcagaaattcagaccctatcccatcaagaatgagcaaccacagtcagagagagctctttcagaggaatttgcaagcattcatgtttcaccatttagcaatataagtaaactgtcttctgggaaatgttgacactaaatatactgtgatataaaaacattggttaagagtctcaaattgctaatgctatttttccttcccaggagaaattttaaaatcagtaattttgatgatagttagcgacttcagccttatcaaggggaatttgtccacagaactcccaggtttaagtttcagaagcaatcataactgttgattcccctctagtaaatgctaaactacagtagagtcccacgtcttacttgggtcaataggtgtttatgcaggatttgccctagaaacagattaaattcaagaatctggtaaaggtgactatt

SEQ ID NO: 320595 - DNA, 589 bp, Homo sapiens
aattttctcccaggccccaaatatccattttctttcccctggagagaatctcagggtactttggttaatggaaatagatggcgtcagagagatgaggagaggccattcaatcttcattgagtttggctgggacaccaggtgacttacactgtactcagaaattcagaccctatcccatcaagaatgagcaaccacagtcagagagagctctttcagaggaatttgcaagcattcatgtttcaccatttagcaatataagtaaactgtcttctgggaaatgttgacactaaatatactgtgatataaaaacattggttaagagtctcaaattgctaatgctatttttccttcccaggagaaattttaaaatcagtaattttgatgatagttagcgacttcagccttatcaaggggaatttgtccacagaactcccaggtttaagtttcagaagcaatcataactgttgattcccctctagtaaatgctaaactayagtagagtcccacgtcttacttgggtcaataggtgtttatgcaggatttgccctagaaacagattaaattcaagaatctggtaaaggtgactatt

SEQ ID NO: 320596 - DNA, 523 bp, Homo sapiens
atcaatagtgcttacattatcatgaatatggatatatttttctttgctcagtgaagtactgttctaaaacttaagagagaaagataaaaggatttataaagggggaaaaaagggaaatcttgatggatcagtatgatattaggtcaattaccttgtataatatcaagactcagaagggcaatcattaaaaytcttctcagactccatgtcattcatctaaggcttttaaaaagagctatatccatcacttgcctacattagagctctggagttttacagcagtgattctcaggaagatgaggatgtttttaaattgccatcaggcttattttaaaaggcagaatattttagctaactatgtttattttccagagaatggatttagtgcttctaattgagatagtatttaaaaagacttgatatattataggtcataaaaactgtgaagaataatactaaagcacattaatgtggctttttcaaacaatggatttctgaacaccattttagggttgaagcaatg

SEQ ID NO: 320597 - DNA, 475 bp, Homo sapiens
tgaataagtctcacgagatctgatggtttcataaagggcagttccyctgcataagttctcttgcctgctaccatgtaagacgtgtctttggtcatccattgccttccaccatgcttgtgaggcctccccagccatgtggaactgtgagtcccctaaacctctttttctttgtaaattacccagtctcgagtatttcttcatagcagtatgaaaatggactaatacaccgtgataacagaataaattcattatccctcaaagtcattgcacctttgcttttttgtttatagagagtaaactagtgcatgcaaaaagacctttttctctgttttttttttttttaatctttttgtagtttcggattaatgttctctaatatcctctggtttcctgcctcactcatacagctatttctgaggaaagttgatcacatggttaaccaagctggccacagctgatcagataaagagtgggt

SEQ ID NO: 320598 - DNA, 581 bp, Homo sapiens
aatattagtcatgaaattacaagttctccaatatgttgattctaaaaatcatactttgttgtgactaaactttaaagagtgtatgagattgccgtttgtttttttaatatatatatatatttttattatactttaagttctaggttacatgtgcacaacgtgcaggtttgttacatatgtatacttgtgccatgctggtgtgctccactcattaactcgtcatttacattaggtatatcttctaatgctatctctcccccctccccccaccccacaacaggccccggtgtgtgatrttccccttcctgtgtccttgtgttctcattgttcaattctagatgcttcccttattttaatgctttgtgattagaaatttcttgccttcatgcatgtgggtatgcttgtattttttttcttctttatgagcaacttttgaatactcttcaaatcactgcacttttcactctttcgctacttttaggtcttaaatttctttgttctaaattagagaacttccaagaaaggccacaatgggtcctgatgcatctttgaatctgactctgataagaaaatattgaaaa

SEQ ID NO: 320599 - DNA, 581 bp, Homo sapiens
aatattagtcatgaaattacaagttctccaatatgttgattctaaaaatcatactttgttgtgactaaactttaaagagtgtatgagattgccgtttgtttttttaatatatatatatatttttattatactttaagttctaggttacatgtgcacaacgtgcaggtttgttacatatgtatacttgtgccatgctggtgtgctccactcattaactcgtcatttacattaggtatatcttctaatgctatctctcccccctccccccaccccacaacaggccccggtgtgtgatattccccttcctgtgtccttgtgttctcattgttcaattctagatgcttcccttattttaatgctttgtgattagaaatttcttgccttcatgcatgtgggtatgcttgtattttttttcttctttatgagcaacttttgaatactcttyaaatcactgcacttttcactctttcgctacttttaggtcttaaatttctttgttctaaattagagaacttccaagaaaggccacaatgggtcctgatgcatctttgaatctgactctgataagaaaatattgaaaa

SEQ ID NO: 320600 - DNA, 470 bp, Homo sapiens
gccactaatggttacactgggcaagaggctgaaagccagagcctgaattctcctggccttgagttgtagtggattttcatgagatcatatcggttaaacagtaggggatgaggacaaattacgtgctgttgatcaaggagatggaggtgatgatggggatgagtgctgaggaatgacaggcttycagtagcatggaaatgagcacattcacttttccttggaaggatgtggcctggtgaggaggagaaagaatgatgtactagagatcaggagtgcagtcgtcaatggctcttccaatctctgctgtctggccttgggcaacctacttctttttctgggcctctgttgctggtaggatgaactagttttctatctccttaaaatcatcagctgcattctgcctgcactggctggacatatgaatcaagaatttagtgaatactacaatgtcaaatttatttcatcacttt

SEQ ID NO: 320601 - DNA, 470 bp, Homo sapiens
gccactaatggttacactgggcaagaggctgaaagccagagcctgaattctcctggccttgagttgtagtggattttcatgagatcatatcggttaaacagtaggggatgaggacaaattacgtgctgttgatcaaggagatggaggtgatgatggggatgagtgctgaggaatgacaggctttcagtagcatggaaaygagcacattcacttttccttggaaggatgtggcctggtgaggaggagaaagaatgatgtactagagatcaggagtgcagtcgtcaatggctcttccaatctctgctgtctggccttgggcaacctacttctttttctgggcctctgttgctggtaggatgaactagttttctatctccttaaaatcatcagctgcattctgcctgcactggctggacatatgaatcaagaatttagtgaatactacaatgtcaaatttatttcatcacttt

SEQ ID NO: 320602 - DNA, 520 bp, Homo sapiens
taaagcaattatatttggatcatgaaaaatttttatgaataaagatctagtttcaagacaacaaacaaaagataggtagaaaatagcmattctctaaatgggaaatgttaacaatcagatctgaagacagatttgggagctttcttatttatcttttttataagtgatttttgaaaggcaaatttacagtaagacctataagattggagaaaacactaacatcttctagatcaaagccatcttgttaatttgcaggttctgactcattgggtctggggtgggacccaggattctgcatttctaacaagctcctgggtgatgcagaggctttatcccgagaccacacactgagaagaaagacaccaagagcaattgttctcaacactgactgcacattagaatcatttgagagacttataaaattccagtacccacatcatacttcaaaagaattagatcagaattttgagagatggaacacaggcatagtttttaaatattccaaagtgatcccaatata

SEQ ID NO: 320603 - DNA, 589 bp, Homo sapiens
gaaaattccaaaaaccagaatgcctcttctcctccaaaagatcacaactcctygccagcaaaggaacaaaactggatgaagaatgagtttgacgaattgacagaagtaggcttcagaaggtgggtaaaaacaaactccttcaaactaaaggagtatgttctaacccaatgcaaggaagctaaggaccttgataaaaaggttagaggaatttctaactagaataaccgtttagaaaagaacataaatgacctgatggagatgaaaaacaaactacaagaacttcgtgaagcatacacaagtatcaatagctgaaacaatcaagtggaagaaaggatatcagagattgaagatcaacttaatgaaataaagtgtgaagacaacattagataaaaaagaatgaaaaggaacgaacaaagcctccaagaaatatgggaccgtgtgaaaagatcaaacatacatttgattggtgtacccgaaagtgatggggagaatggaaccaagttggaaaacactcttcaggatattatccaggaagacttccccaacctagcaagacagggcaacattcaaattcaggaaatacagagaa

SEQ ID NO: 320604 - DNA, 582 bp, Homo sapiens
ttttgaggaaagaatacaccttgaatggatcagtaggtattaagygtcaacttctcatattcaaaactatcaataatgatttcactgaagccaggtgactagctttagaaaatggttctttattccctccccaaactactggaaagaggtgtttaatggaacaatcatgtttcactcatgaactccacagccaccatcatattgtaggcattcatagcaattcaaccaaggtggttgttaaaacagaaaacacaaaacacgtttaatctgcaggtaacattgaaatttaaacttcccattttctttgtgtatgttcagaactttaaaactcagcctgaaataagaaaatatatgtcagcaagagcatgaaatatcttggcaaccacttctgggcagtcaccctcaactttaatgtaaggggcttcaccagctcagtctgccatcgctcaaagtacccagcaacaaacaaggttagccaagaaaaataacttctttgagacagagtctcattctgttgcccaggctggagtacagtggcattgtgttggctcactgcaacctccatctcctgggttcaagcaa

SEQ ID NO: 320605 - DNA, 582 bp, Homo sapiens
ttttgaggaaagaatacaccttgaatggatcagtaggtattaagtgtcaacttctcatattcaaaactatcaataatgatttcactgaagccaggtgactagctttagaaaatggttctttattccctccccaaactactggaaagaggtgtttaatggaacaatcatgtttcactcatgaactccacagccaccatcatattgtaggcattcatagcaattcaaccaaggtggttgttaaaacagaaaacacaaaacacgtttaatctgcaggtaacattgaaatttaaacttcccattttctttgtgtatgttcagaactttaaaactcagcctgaaataagaaaatatatgtcagcaagagcatgaaatatcttggcaaccacttctgkgcagtcaccctcaactttaatgtaaggggcttcaccagctcagtctgccatcgctcaaagtacccagcaacaaacaaggttagccaagaaaaataacttctttgagacagagtctcattctgttgcccaggctggagtacagtggcattgtgttggctcactgcaacctccatctcctgggttcaagcaa

SEQ ID NO: 320606 - DNA, 574 bp, Homo sapiens
agtccttaatgtcagtttcatttccaaccagtcatccccatgcctattcctatatcttgtttactttcttcatcattttcattttcattaccatagtcatcatcagaattatttcctaaaatcttagagaaatgaaagccatatcttttctgtcctctcttacaagtcattacaattttttccaaaaattatgagtgcagaagtgtaagcaaatacactctatatttctcatttttaagaaacagacttcttgtctctcatttattctctgtagcaagagtttggagtaatcatcagagaccatgcttttaaatagacaatgatcctggcrtatctgataccagatgcaatatgaaatattatctcagttagtgaggtcgcatttttaagtaatctaatgcagataaagccatatctaaaaagtggatttaaaaagttttcaaattcttaactactacttgcattttttttaatggttgttgggcctagagttgttgcaatgtgtggtaataatattagtaattttaaaaataataataaacttttattatcctgaaactaaaaatgcatagat

SEQ ID NO: 320607 - DNA, 577 bp, Homo sapiens
tcacctcatggtacaaaatagctgctaaactccaacaattccatctgcttcaggcagtaagagaaagtaatggcaggggaccaagtggtgttcctcctaatcaagctgtctttaaagagccttcttggaagtttcacacaactgcccctgtagttagatagaacataactatattggcatatctaactggaatggaggctacaaaagtagcatattagcggagaacactgacatccagaatagcactggtgttctattactaaagaaaactgaaagtatagatattgggtggcaactttcaatccacycccgtcctgcccaccccaccaccaccaccaccaccaccaccctcattccctgctttctttgtccatttcttgtagatattgagaaacaggatgaagtctggctcctgagagaaggagtcctgctcatgaacccattcgtctttgtccagtgaggcatgagcatgaccctgtgatttcttatttagctttccagaggtccagtctcaagatttcagggtgtaagtgaaagtctttaattatcctgactagacagacacaagtataaattc

SEQ ID NO: 320608 - DNA, 578 bp, Homo sapiens
gttatgatgcaacttgtaatgtgttaactctttaattctcacaaaacactgtaagggaggaattmttatattatagatgaaggaatggagactcagaggggtgagtggacttgttcaagatcacagagcgcgacagtgctgaaaccaggattcaaacccaggtctggccaagtccaaagcccatgtgcgttctagtacactctacctgcagtgccttaaatgcagtgcgggactataaacacagcctttccgcctgtctcttctttaatattgtctcttactttgtttcatcagtaacagcacctcccattttatggtgctttacagacatttatcaggtgttttcacagacactgtctcacttagtccccacagcaatcctgggaaatactagtgttgtttgcagtttacagatgtggaaactgggatctggagtgatgatggggttggcttctggtcagacagcaagtcagtgacggggctgattctgaaaggaagatggggctgggccaggtcactgggaagcctgcagggcagatccgggagctaggattggtaaaagacatgtcaaaagggtc

SEQ ID NO: 320609 - DNA, 616 bp, Homo sapiens
gtatttgtttttctgtgaccagtttatttcacttaacataatgtcctcaatgttcatccatggtgcagtgtcagaattttcttctttcttaaggctgaataatatcactttttatgtatatgccacattttgtttattcattcatctgtggacatttgggtagctttcttcttttgcygcttgtgaataatgctgctgtgaacataggtgtacaagcatctgtagagttgctgctttcaattctgttgggtatacacctaggagtgaaattactgggtcatatggcaattctatttttgccttttttgaggaaccaccacattgttttccataatggctgcaccattttacatttccatcatcagtggacaagggtcccaacttctccacatactctccaacactttttggtctctatttatggataataggcatcctaataggtgtgaagtggtccaacgttgttttgatctgcatttccgtaatgattagtgatgctgagtatctttttatgtgctttttggaccttggcatatcttctttggagaaatgtctattcaagtactttgttcattttttaattggattgtttgttgttgctgttgctgaatcgtag

SEQ ID NO: 320610 - DNA, 577 bp, Homo sapiens
ccattttagggtttctttaaacataaaaaagaagaaagaagcaaatgccatagtcttcaattttgaagagtacacataagaggacaataaactttccaccaaatgctcttacataaaaaagcaagtaatttttaattttgctcttttattgattcgttgattgcattcctttttttcagaaaattggaaaacacaaatatatctgtatactattactcttgttccaaaaccttaaaaatctcttgtacctaaacttccctgtcaatcttacagacttgtcccattctgggacaagcaattttaagtaatattagaaaaattttttgaatatcttagggcaaaataaatatggcttaaatttatttaactgggtagaggtactcatggaattgttgaaagtgaacatctatatgtgagatcatttccaattytgaagaaagtaaatttggctgcaatacataataaaatcatactaatgtactgaagagcatactaagtttgacaatttgcacgtactgtgcatttggccctcccatgcaaaaactgaaagaaaagtctgtaaaatggacaaaggcca

SEQ ID NO: 320611 - DNA, 527 bp, Homo sapiens
tgtgtcaccttattctggctggcatatagtagatggcccacaagtgttcagtgattgaatgaatgattggatgaatacatattattcttgaaaaaaatcatctcaataattacttcctgatcatactggatactgtcaggtatagtttcagaaaatattctgtaatttaattaataaaaccaagaattagaagaaagaaaatttgctgctaaagtactgccaaakatccagttgtgtggtgtgaatttggtagcttcgataaggccttcttatttactctaaaaatttctaatattttacttgttgtattagccacctattatctgatgatgagtggctggaatttctctgttaaatcttcattctcttagccctagttttacaatgatatttaagtgcaatcattcttgcagatattaacaggaacacctagtgcttttcttaacaacaaattgaactaagattattattttttattatactttaagttctagggtacatgtgcacaacgtgcaggtttgttacat

SEQ ID NO: 320612 - DNA, 626 bp, Homo sapiens
tggtctttctgtgtctggcttatttcacttaacataatgacctctggttccatccatgttgttgcaaatgacaggatctcattcttttttatggttgaataatgctccattgtgtgcatgtaccacgttttctttatctattcatctgtctatggacacttaggttgcttccaaatcctggctattgtgaattgtgttgcaataaatatgggagtgcagatatctctttgatatactggtttcctttcttttgggtctatactcagcagtgagattgctggatcatatggcagctttatttayagctttttttaggaacctccaagctgttctccacagtggttgtactaatttacattcccaccaacagtgtgtaagtgttctcttttctgcacatcctcgccagcatttgttattgcctgtgttttggataaaagccactttaactggggtgaaatgatatttcattgtagttttgatttgcatgtctctaatgatcatgatgttgagcaccttttcatacacctgtttgccatttgcatgtcttctttggagaaatgtctattcagatcttttgtctatttttaaattgggttattagatttttttcctgtaaagttgtttga

SEQ ID NO: 320613 - DNA, 563 bp, Homo sapiens
tgtccatcttgctttatctattattcaccttttttgatgtcatattgttttatccataattaagtcagtagtatataaatcgaacagaygagcatttttaaaaaccacaaacccaccattccattatcatacctgacaaaattaacattaattctattatttcacctattacgcagtccgtgttcaaatgtccccaattttctcaaatatattttacagtcctgttgaaatcacagagtaaagtccacaaattgcatttggttgaaatgtctcttaggtattttctaatctatgaaagttcccacttccccatttttagccgtttttttgtttgttgaagacattggttcatttgtcctgtagaacttccggcatgccagattttgctgatcgcattctcattcaacccattaatctaataacttgttcctttgtatttttcatgagcttgctgcctgagtgtgaagcttgcttagattcagatgcatttattttggcaaatactccataggtactatcgcgtgtttccgattgcattccatcaggcggcacatgaggtctcg

SEQ ID NO: 320614 - DNA, 592 bp, Homo sapiens
gaataacgggtgctgtgggcttaaaagaaatttatttggtgttttatcttttcggaccatttgggttttcaaaggcaacagctcaaatcaaaccttaagcagaagttttaatttttagaggtttttttctgtcattctacagtctttgctactttcatgttaagaatttcctccattactttaaatatttatttacctatggctttactgagaagacttatacatatacatacatatgtataactggatttatacrtatatagctatatgtaactatttatacatatatagctatatgtaactattcacatatatcaacaagtaacaccctgaatcctaattgtgattgatgtaaagctgtttgtttttatagactgaagtttatgcccctctgcagacataactgtggtaggggctgtgctacacctcagatgcatggagacaggacctttataactgcttttcttgggcttagttttgagtaaactgttgatcttgtcatggcctttcttgcctttaccctacatacagactaaaactcccctttgaaaatgttaaccacatgtgcacacccaagtgggatttctgtagc

SEQ ID NO: 320615 - DNA, 547 bp, Homo sapiens
tatgctaagtgaactagaccagtcacaaaagggcaaatactataggatccacttatatgaggtaattacagtaatgaaatcatcgagacagaaggtagaatggtggttgccaggagcaggggtaggggaaaatgagagttattgtttagtaggtacagagttacagttttgcaagatgaaaaagttctggaaatggatggttgtgattggtgcacaacaatgtaaatgtacttaatgtcactgaactgtacasttaaaaatggttaaggcggttctttttttgttatatgtattttaactttaaaaataatacttttaaaatgtgagaaaaattatccttgaatctgttttatgttagtgagtgaaagcatctctaagaagagagtcaattactttgtcaaggcagtccccagcctttttggcaccagggacctgtttcgtggaagacaattttttcatggattgggtggggggtggcggttttgggatgaaactgttccatgtcagattagatcatcaggcattagatgagagcacaacctagacc

SEQ ID NO: 320616 - DNA, 547 bp, Homo sapiens
tatgctaagtgaactagaccagtcacaaaagggcaaatactataggatccacttatatgaggtaattacagtaatgaaatcatcgagacagaaggtagaatggtggttgccaggagcaggggtaggggaaaatgagagttattgtttagtaggtacagagttacagttttgcaagatgaaaaagttctggaaatggatggttgtgattggtgcacaacaatgtaaatgtacttaatgtcactgaactgtacacttaaaaatggttaaggcggttctttttttgttatatgtattttaactttaaaaataatacttttaaaatgtgagaaaaattatccttgaatctgttttatgttagtgagtgaaagcatctctaagaagagagtcaattactttgtcaaggcagtccccagcctttttggcaccagggacctgtttcgtggaagacaattttttcatggattggktggggggtggcggttttgggatgaaactgttccatgtcagattagatcatcaggcattagatgagagcacaacctagacc

SEQ ID NO: 320617 - DNA, 667 bp, Homo sapiens
ctcactgtgttgcctaggctggagtgcagtggcgccatctctgctcacttccacctccgactcctgggttcaagtgattctcctgcctcagcctcccaagtagctgggattacaggcgtgcgccaccacgcccagctaatttttgtatttttagtagagatggagttttgccatgttggccaggctggtcttgaactcctgatctcaaatgatctgcccacctcagcctcccaaagtgctgggattaaaggcataagccaccacacccggcccatcttaaccatttttaagtggcattaagtacattcacattgtcgtgaaacagatctccagaacttttttatctcgcaaaactgaaactctatgcccattwaaaaaatcctcattttcttttgcttccagccccaggtaatcaccattctgctttctgtctctatgaatttgactactttagatacctcatgtaagcagaatcacagtatttgtctttttgttaactggcttattttacttagcataatgtcctcatggttcatctatgttgcagtatgtgacagaactttcttactttttaaggctgaataatattccattttatgaatttactacattttgtttatccattcatgtcaatggacatttgtgttgcttgtagctcttgactata

SEQ ID NO: 320618 - DNA, 599 bp, Homo sapiens
catcaagccttacctagaatcatctttccaatctcgctcttctcttccatttagaaccaccttcaacatctccccagggtacattccctaaayagccccgattattcattattttatggaactaccagatactgaattcctgttctgggccatgcactctaggagctgtgatttcaacagtgaaggaggacagggtggaccccaccatcgtggaatttacattctaaagggcacagtttttctgttgagtcttcccaggaggtgtctttttatttcatacctttgaccttcagatccattcatgatactttggcttatgggtgttccacacttgattccaagggtgatattccatatgtgtaatgcctcgctcaatcagaatggacactggccctagtggccacccaagatggattcttggagcttctttgctgtgacaaataatgaccttttagttgacgaattataaggaagttatgggagatcccagaggaaggctttaagacaggggaattcagagagcttggagcagcagctctttacgtagggccacagtgtatttcagtgtttctccaacggctgcacctgtggacctatgt

SEQ ID NO: 320619 - DNA, 554 bp, Homo sapiens
ccatcacaaaatgaaccttaacaagtatttagtgggttcctaatatgtaccaggcattggaatgggatgctgccccatggctcttatgtctgtgtgtggcagtgctctgtttatttttaccattagctcaccacagcaagaattgcaacttgttcatcaatgcatctgggaaggctagcattgygtctgacatgtaacagcccctgcaaacttttctagaattaatgagtggcaccgtgtcaacctttaagaagttctgtttttttcttcccttaacaactccgctttgtctttgggccttccttaacctccagagttaaacatgtttcaaggattatataaatatatttagttaggcatccacccacccaggtgcccattacaccctgggtgttcttccatcaaagcagtttaaagagagaaaaatcaacaagtggcttcgagattttgaccagtccctaagcaaaggagaaacatagaaagcaaaacctcagcgcagcttactgactagtttggaaactcaggggaattaatttcttatgcacttcaggttt

SEQ ID NO: 320620 - DNA, 529 bp, Homo sapiens
tctcttcccaccttattttctccacagccctcattgctatctggtatactctgttttctctacagttctgtcatcctctcttttccctaagaagtaagtgccatcaaggcagggattttgcttgctttgtgttcctaagcaaagtcactggttcatgataggtgctatgtacttatttgctgaatgcaagaataagtgcatacatattcaggcaactgggtattttatccagtttttgttttgtgttaagtagtgtgtttcttttctcttcatatcttaagcagttccttttgccatttatatcctggtagagtttggtgcttaaaagcataagccttactaaaagaccccctkgagatttaaaccccagctcagtcacctgttgggtctgtgaccttgagcatctatagaacctcactaagcctcagttttctcatttgtaagatgaagatggaatgttgaatgtctcataggatcaagatgatgaaaaacactcagcacagaaccagtcacctatcacttaatgaga

SEQ ID NO: 320621 - DNA, 599 bp, Homo sapiens
tcctaaacttaaatttaaattccagataggaattccctctagtttccccatcagactcttcctctgtaatgggtatccggaaccctcactcatccccagatgtcggacacaaactcttgatgaaaccagaaatccaaagtgactaaacagatcctcagtgttcctgaaaacatgagctatttaccatagtaaatatgtatgaataatagtaagcctttggaaatcagtggttagatatctgtggtcactagcacacggactagaaaattaactgctgctggcttttatctcttggcttttgggataggctggtagcaactggccactcatttcttgagcaagaataagagggataaatctcttttaaacaaccctcattccattccattcatcttcctgtttcaaatcatttacaacagcttcagaaatagatttgtcctggctggtctttaaagagacagtcaataacaatatgagaaataattactatacctggagaaagtgggcattgatttttagcaactactggggcctcaaaactgaattcaaatatgttgtagttgartgacagccatttattacttaactaacttgctgaa

SEQ ID NO: 320622 - DNA, 599 bp, Homo sapiens
tcctaaacttaaatttaaattccagataggaattccctctagtttccccatcagactcttcctctgtaatgggtatccggaaccctcactcatccccagatgtcggacacaaactcttgatgaaaccagaaatccaaagtgactaaacagatcctcagtgttcctgaaaacatgagctatttaccatagtaaatatgtatgaataatagtaagcctttggaaatcagtggttagatatctgtggtcactagcacacggactagaaaattaactgctgctggcttttatctcttggcttttgggataggctggtagcaactggccactcatttcttgagcaagaataagagggataaatctcttttaaacaaccctcattccattccattcatcttcctgtttcaaatcatttacaacagcttcagaaatagatttgtcctggctggtctttaaagagacagtcaataacaatatgagaaataattactatacctggagaaagtgggcattgatttttagcaactactggggcctcaaaactgaattcaaatatgttgtagttgagtgayagccatttattacttaactaacttgctgaa

SEQ ID NO: 320623 - DNA, 434 bp, Homo sapiens
agcaagagctgatgtagagagttgcaacaagttttccagaagatctagctaagatcatcgacaaaggtggctacactaaacagatttttcgtgtagataaaacatctttatactggaagaagatgccatctaggaattgcctagatagagagaagtcactgcctggcttcaaagcttcaaaggacaggctgactctcttgttaggggctaaacagccagtgacttttagttgaagccaatgctcattgaccattctgaaaatcctagggccctaaataatcatcctaaattactcttgcagtgctacttttaaaaagcctgtmtaacagcacatctgtttacagcatgctttactgaatattttaatcccattgttgagacctactgctcagaaaaaaaaaaaaattccttccaaaatatcactgcctattgac

SEQ ID NO: 320624 - DNA, 581 bp, Homo sapiens
atgcaaaaagaaatctgtgtatgtttatatcacctctttttttacttagacagcaaactaaagatttcatcagagtcccagaagggtcagtggccccaaaagattaacacaaatctaggggctttccctggtcaagcacatctagtttacagaaagtagatgtcacccgaatttcaggcttgggagagaaagtaactgtcagagaaacattagaaaggcttagtgttgtrgaaaaattgataaatgtgtgtagataaggaatacatttggcaggctagtagatttgagacatttatctgcaaggctgctttaaatgggttatggttgatttaactctgtgtttaatgtcactcaatatcttgtacataatctgttaaaaattaaatgtgctgtcttacaaacctaaaagttattcagctcaactctaccaggctgcatggtatagcaccatgcccttgtgttcaaatctcctgctgttctaacactatggagaatcaattagtgacctaacaatcatgtctctttcaagaattcagataggggctttgactgaggtcagcacagtagctttctgtccctaa

SEQ ID NO: 320625 - DNA, 585 bp, Homo sapiens
ttttggtaacatgaagcatggcagtgggaaaattcaccaaaaaagctgagtattaacagaggttttagaagatgattgggaatgggcctgggaggaagggaaggaggggagattcagttttatagtcttagtataatcataagataaataaagttgagataaaacagcctccttctcatgcctgcaagccattgattcagctaaaaaggcaattacccaagaagaatatgaatattgtctatcacattgacacagaaaaaagtgctgaatgttgyagtgatagtgagcagtccataaaaaaatgttggggtggtgaaataccaaagtctgcctgtcacattttatcaaaagtagctcaaataactctgttcaatctcatgtacttggagtcaaacattactttttattgcaggacagaaggctgagccatttcctatggatactcttctataaaagtatccatatctggtagttgtcacataaacttttctgcataaatagctctatatgcaagtgaataaattaactggggagacagaattattgagtacctactaagtgccaggcactgaattttttatgatc

SEQ ID NO: 320626 - DNA, 533 bp, Homo sapiens
ggagactgactgcaggtggcctctgaggtgcacagtacctgatgcatagtaactaactaacaaacactttggtcttcctttcctcacttgtaggtaacacctccacgagggtccctgaaggtccagacttgttcatttggctgattgttwtatctctgagtccagtgcagcgcctggtacaccatagatgcccaataaatatttgctgaatgtgtaaatgaatccaaaatctaggtgtttctctgcatgtccctcactggctctattctcccatttcctatgtgtctttatagacattggctggctttcctctcaacctttaccttcccagctagatgactgattctttatctgccacaggcaactagagcgttcatcctcatccctggctctgcttctggtccatgatgggacaggcagttgcggggttgacagtcagctcagccgaggccaggctgcgtcagccaacacccaggtgactcccagaggtgtgagcaggttgtgccaggccaggtgtgctgcatgtgcacaca

SEQ ID NO: 320627 - DNA, 533 bp, Homo sapiens
ggagactgactgcaggtggcctctgaggtgcacagtacctgatgcatagtaactaactaacaaacactttggtcttcctttcctcacttgtaggtaacacctccacgagggtccctgaaggtccagacttgttcatttggctgattgttatatctctgagtccagtgcagcgcctggtacaccatagatgcccaataaatatttgctgaatgtgtaaatgaatccaaaatctaggtgtttctctgcatgtccctcactggctctattctcccatttcctatgtgtctttatagacattggctggctttcctctcaacctttaccttcccagctagatgactgattctttatctgccacaggcaactagagcgttcatcctcatccctggctctgcttctggtccatgatgggacaggcagttgcggggttgacagtcagctcagccgaggccaggctgcrtcagccaacacccaggtgactcccagaggtgtgagcaggttgtgccaggccaggtgtgctgcatgtgcacaca

SEQ ID NO: 320628 - DNA, 582 bp, Homo sapiens
cttcattactgtgggtacaatggtcacctatatgaaaggctttgggcatcagatttttttcttaagtgtctctttgctcattctcacgagatgaactcttctgcccacgaggctgtgctagggccctgtgtattttctatccagaatagcttaggctaatctacaaacttgtgtgcttcctcttctggatcatcaataaatgtgtaaagacagaccagccctaagattattccacagagaacatgactcttagatattaattttttgttatttttgtgtccaagccaagttcttcatttatagctaaatattaaaatacaactaaatatttaaaaatagcaatgctttasggttgacacatttccaaagctttctggtagtctacacagtatatgcccactggttgtctcaccattcttcttcatatttatttccctccaccaaccccaccccagccacccacccggggtcatgagaagattttttttttttttttttttttgagacagagtttcttgttgcccaggctggagtgcaatagcacaatcttggctcactgcaacctctgcctcccaggttcaa

SEQ ID NO: 320629 - DNA, 628 bp, Homo sapiens
aggaactgtgttaaatccttctcatgtgcaagctgctcctttaacctgcgtggcaacccggggtgactagctgttagtatagcagttccttgcccaagtttctcagtatctttcagcctcagtttcctgttgggcaaaatagagattacgggacagtgggaacattaaatgaggctatgcttgttatgtggttagcatggtgtcaagcagggagtaacaggtcagtgagaattatagtattagctactattagcatttctccttcctcgttagtatttttccttccctgaggaggaaacagagaattaggaggaccaagctgaatataagcagtacctgagagcattcttggaagattatgctttcgtgagctcctcttagaactgaaaattgatgatgagagagacagactgtcaccaatgcatgactatcaccttgtcattattaaagcactttccactagtttatattattttattctcataagctctgtgagggccaggatttgggtcttctyttgtcccttgctacatcctcatctatatcagtggctggcacattatctttgttgacgactgacctttccttttcctctttctttgcctggcaaactgttacttgcccatca

SEQ ID NO: 320630 - DNA, 582 bp, Homo sapiens
acgggtgtgagccactgtgcctggccatccctggatttgaaaaggaaaggggtagagtgacaaggactggttgcatctcacattccaaactgcttgttttagtatgcgctaatgcatcaaccttttattactgcccagaccgtagacctggcttgttccttttcacatgttattctcaccagaagctacaaagtaggtgttatttgtattattattgctgttgttgttgttagaatacatattcctcatttacagacaagtacacaggctaagcatgactgcaacttttgaattgtcatgcagctcagaactgggggatctagaaactgaattcagcagctgattatttgrttcccaataccatggtcttgctacttacctactagaaaggattctcatttgtctatttaagttcttctcctctactctctgaggaggattctttcagctcttagtgaaataaaactagaaatggaaagggaagtctcaaatctatgttcagaagagggaagaggtttaacctgggggtgggagggaagcagatagatgtgctagcagagcaagcagtttgagatctaatat

SEQ ID NO: 320631 - DNA, 631 bp, Homo sapiens
tattatgcatctggtgtaaagcctcctcatctttagctcaattcaacaagtttccattcagtgcccagctctaaaagtcttaaatggaaattgattccctactccttctattttaactgtcaaaatcatagactgcattgtttccaactgaaaatccgctgacagctccccaccraccaccccgtgagccttcctagggctggcgttgatgatgctgctatcaatggggaatctacattgtgcacgggtatttatgatgagaaaatcatgtggcataaaagagaataattgccttcataagtgtataattttttatactataagcttctcaatgaaaaagcattctaagggaggcataattgctaattttcggtgttaaacatacctctgaagagtatttcacagtctaactctctgagtgtcatgtcttcctgtggcccggggaagagagtgggaaggaaataaaatttcattgagcatctacataggaccaggccctgtaagttcttggatattggtttcttcttataatgacttgagaattacatggaattatccccattatatgagaagacagagtctcacaggagttaaatcacttctcataaaatcatctctcatagttatgtga

SEQ ID NO: 320632 - DNA, 631 bp, Homo sapiens
tattatgcatctggtgtaaagcctcctcatctttagctcaattcaacaagtttccattcagtgcccagctctaaaagtcttaaatggaaattgattccctactccttctattttaactgtcaaaatcatagactgcattgtttccaactgaaaatccgctgacagctccccaccaaccaccccgtgagccttccyagggctggcgttgatgatgctgctatcaatggggaatctacattgtgcacgggtatttatgatgagaaaatcatgtggcataaaagagaataattgccttcataagtgtataattttttatactataagcttctcaatgaaaaagcattctaagggaggcataattgctaattttcggtgttaaacatacctctgaagagtatttcacagtctaactctctgagtgtcatgtcttcctgtggcccggggaagagagtgggaaggaaataaaatttcattgagcatctacataggaccaggccctgtaagttcttggatattggtttcttcttataatgacttgagaattacatggaattatccccattatatgagaagacagagtctcacaggagttaaatcacttctcataaaatcatctctcatagttatgtga

SEQ ID NO: 320633 - DNA, 575 bp, Homo sapiens
ataagtttaatctatatagttacatattcaatcattatgctttgagttatattgacattccatagacagatgtcatttcatgatttttaagcagtcaattttcaattactgcataatattcttccatttrgagatacatattttagttcagtattattgtggcacacttattttctatatttcctttttttctggagacagagtctcagtctgttgcccaagctggagtgcagtggcgtgatctcggctcactgcaacctccgcctcccaagttcaagcaattcgcctgcctcagcctcccgagtagctgggactaaaagcgcacactgccatgcccggctaatgttttgtattttagtagagatggggtttcaccacattgcccaggctggtcttgaactactaagctctgagctcaggcaatccccccgcttcggcctcccaaagtgctaggattacagccgtgagccaacacacctggcccaatagttccaattttttatgtgtatatttttaaaaaattaagttgtgactttagcgtgaattgaaatttgtttgactatacttcataaacc

SEQ ID NO: 320634 - DNA, 575 bp, Homo sapiens
ataagtttaatctatatagttacatattcaatcattatgctttgagttatattgacattccatagacagatgtcatttcatgatttttaagcagtcaattttcaattactgcataatattcttccatttggagatacatattttagttcagtattattgtggcacacttattttctatatttcctttttttctggagacagagtctcagtctgttgcccaagctggagtgcagtggcgtgatctcggctcactgcaacctccgcctcccaagttcaagcaattcgcctgcctcagcctccygagtagctgggactaaaagcgcacactgccatgcccggctaatgttttgtattttagtagagatggggtttcaccacattgcccaggctggtcttgaactactaagctctgagctcaggcaatccccccgcttcggcctcccaaagtgctaggattacagccgtgagccaacacacctggcccaatagttccaattttttatgtgtatatttttaaaaaattaagttgtgactttagcgtgaattgaaatttgtttgactatacttcataaacc

SEQ ID NO: 320635 - DNA, 575 bp, Homo sapiens
ataagtttaatctatatagttacatattcaatcattatgctttgagttatattgacattccatagacagatgtcatttcatgatttttaagcagtcaattttcaattactgcataatattcttccatttggagatacatattttagttcagtattattgtggcacacttattttctatatttcctttttttctggagacagagtctcagtctgttgcccaagctggagtgcagtggcgtgatctcggctcactgcaacctccgcctcccaagttcaagcaattcgcctgcctcagcctcccgagtagctgggactaaaagcgcacactgccatgcccggctaatgttttgtattttagtagagatggggtttcaccacattgcccaggctggtcttgaactactaagctctgagctcaggcaatccccccrcttcggcctcccaaagtgctaggattacagccgtgagccaacacacctggcccaatagttccaattttttatgtgtatatttttaaaaaattaagttgtgactttagcgtgaattgaaatttgtttgactatacttcataaacc

SEQ ID NO: 320636 - DNA, 575 bp, Homo sapiens
ataagtttaatctatatagttacatattcaatcattatgctttgagttatattgacattccatagacagatgtcatttcatgatttttaagcagtcaattttcaattactgcataatattcttccatttggagatacatattttagttcagtattattgtggcacacttattttctatatttcctttttttctggagacagagtctcagtctgttgcccaagctggagtgcagtggcgtgatctcggctcactgcaacctccgcctcccaagttcaagcaattcgcctgcctcagcctcccgagtagctgggactaaaagcgcacactgccatgcccggctaatgttttgtattttagtagagatggggtttcaccacattgcccaggctggtcttgaactactaagctctgagctcaggcaatccccccgcttyggcctcccaaagtgctaggattacagccgtgagccaacacacctggcccaatagttccaattttttatgtgtatatttttaaaaaattaagttgtgactttagcgtgaattgaaatttgtttgactatacttcataaacc

SEQ ID NO: 320637 - DNA, 376 bp, Homo sapiens
aaattattccatgttacttcaatacttttacccagagccttgtaacaatcttcttgaactgttgaatctatacaggtgtagattgggtcaggagatagctttaaaagtttgttgttcacgttcgtgccaactcctggtgtcttagattttgttcccaaacactcattatgacaaaaggatttaagtgcattctatttatttgtgaagtgatgcaggaaactacagtaaggagtgcggatgtgaataagtggaaggcaatacagtgtgtgtgaatggtaatgtcamctccatgggcgggtggggctcagttccgttgaggatctctggaagactacatataggctggctcagagctgtgccccactggggcagctca

SEQ ID NO: 320638 - DNA, 621 bp, Homo sapiens
atttaagtaacttgctcagggtcacatagaaactaactggaaaaattgagatttcgacccagttagtctagcctgcgaatctttactctgagctactttttaactgattctcaatgtatagtcacataggttgtagtttattatatgtccatgtgtctgtctttccttctagataataagttttttaagggttttattcatttktccatctctagtatctaggccagagcctggcagataatagaaatgttaaattttcactaagaaaatcaattttaaaatgaacctgatgatgctgtcataatggcagatcaaaatgtcccataatttgaaagaggcaattactaaaacaatagcaaaaaataaaataaaacaaaataaaataaaaaatgagagacaatgcttatttatgccaaggagaggagcacttaggacactcattgccacatcctgactctgacagccttgtcaaagcattccaaagccatgaccttcccttattctcccttccttccccacctcgccttcaaattccctctcctattcctttctaactcctctattttgccctcttcattggttttcccaaattatatttacatgttaaaataccaagtaaag

SEQ ID NO: 320639 - DNA, 580 bp, Homo sapiens
taaaggacaagcaaactcttttgtctgggactaatgcaactgatgactttaagttgaagccaatgcttattcaccattgcaaacatcttagggcccttaagaattgtgctgaatctactctgcgtgtgctctacaaaaggaacaacaaagcctggatgacagtacatctgtttacaacatgatttattcaatattttaagcccactattgagaactgctgctcagaaaactatattcccttcaaatcttactgttcattgacaatgtacctggacatccaaaagttttaatggaggtatataaggagattagtgttgttttcacacctgctaatataatttccatttttcagcccgtgaatccagaagaaatattgactttcaagtcttactatcaaagaaatacattttgtaaggctacagcttctaaagattgtgattcctctgatggatcargacaaaatgagtcaaaaacctgctgaaaaggattcaccattctagatgcccactaagaacatttgtgattcatggggggtggttaaaatgtcaaaaataacaggagtttagaagatgttgatttc

SEQ ID NO: 320640 - DNA, 606 bp, Homo sapiens
ttcaagacttcagtggaggaaggaagtgcagaagtggtcgaaatagcaagagaactagaattagaagcagagcttgaatatgtgtgtgaattgctgcaagctcatgataaaaatgtgaatggatgaggagctgcttcttatggatgagctaagaaagtggtttcttgagatggaatctaatcctggtgaagatgctgtaaacattgttgaaaagacaataaaggatttagaatcgtacctaaacttagttgataaagcagcagcagggtttgagaggactgctttctattttgaaaaaaaagttctcctgtgggttagatgctaccaaatagcatcacatgctatagagaaatcattcgtgaaaggaagagtcgatagattggcaaacctcrttgttttcttattttaagaaattgccacagcctccccaaccttcacaaccgccaccctcatcactcagcagccaccaaaatggaggcaagaccctcaccagcaaaaagacaaccacttgttgaaggctcagagatcattagcattttttagtaaaaacgtatttttaaattaaggtatgtacattgtttttagaaataatgctattgcatactt

SEQ ID NO: 320641 - DNA, 606 bp, Homo sapiens
ttcaagacttcagtggaggaaggaagtgcagaagtggtcgaaatagcaagagaactagaattagaagcagagcttgaatatgtgtgtgaattgctgcaagctcatgataaaaatgtgaatggatgaggagctgcttcttatggatgagctaagaaagtggtttcttgagatggaatctaatcctggtgaagatgctgtaaacattgttgaaaagacaataaaggatttagaatcgtacctaaacttagttgataaagcagcagcagggtttgagaggactgctttctattttgaaaaaaaagttctcctgtgggttagatgctaccaaatagcatcacatgctatagagaaatcattcgtgaaaggaagagtcgatagattggcaaacctcgttgttttcttattttaagaaattgccacagcctccccaaccttcrcaaccgccaccctcatcactcagcagccaccaaaatggaggcaagaccctcaccagcaaaaagacaaccacttgttgaaggctcagagatcattagcattttttagtaaaaacgtatttttaaattaaggtatgtacattgtttttagaaataatgctattgcatactt

SEQ ID NO: 320642 - DNA, 633 bp, Homo sapiens
tatcctgtgtggcacctttctcattgctttggacaatgtgtagcaaagtcctcactgaatcccaggagtctaataggtatttgtgaatgaggagtgagtgaatgaatgaatgatttgactaattcttacctcactaagtcacccatggcccaggagggtactgtgtacctttatgttacaaatcatttaactttaattttgactggtaggtgaagtgtcccaagaatttgtaaagataaaactgtgcctttggggcttctcctactgctcccctcttccctaagagtcagcagctggaaaaggtttatttattttttttattttgtaactgtagaggaatcctgaatgggccctgcaaagtaatctcagagattgagccacacatagacaaagatggagaacacagctcacctgcagagtgctgtttctcatcactaactgtgstttctctcagtcctgactttttatgctgaggattctgggagaaatttcaccttctttacttcctacaggatatccagtttcctggtctgggagctgagagcagaattagccaattggaaggttaacgcataattgtaggcactgggtgtatggaggagacccttgaccatttgctatttaactgaatta

SEQ ID NO: 320643 - DNA, 607 bp, Homo sapiens
tccacatacctttccctatgcatctcttggtgtgactgttcatctatactctttgtaatattctttataataaatgsgtaaatataagtaaagtgttttcctgagcacttctgtgagtcactgtagcaaattaatagaagtcaaagagggggttgtgggaactccaatttatagtgggtcagtcagaagcacaggccacaacctgggccttgtgactggcatctgaagtaggggacagtcttggaggacctgtgggatgtggctttatctccaggtagatattactgaattgaattgaatcagaggattacccgctggtgtccactgaagaatggcttgatgtattggggaaaaacccactcatacttggtgtcaaaactgttgagtggtgtgtgacagtaggtaaaacattttgtttttttttctatccttcatattggcccagagagcttatttaataaatatctcattcatttcttttttcttatccattataccgtaggctcagctgaaaacatcgttcatgacccacctgaatgcacagtagggtacttagaaagtactgcatggttagcagacagctctgtagggagtcggaacagccacg

SEQ ID NO: 320644 - DNA, 565 bp, Homo sapiens
acatgcacatatgcacacacctataattataaatgcatgtatatatatatatgtatgtatacacacatacatttttatagaaatgcataggtatacacatgtatagagttgtagatgtatgcacatatttgcatgcatacatacatgactatacgcacaatgcacacatgtttatatatgaatgtattcactcatacatgtatggttgtgtgtgtgtgtgtgtgtgtgtgttttgggaagactaattactccaggagatttacatgtagtttcccttcttaagtagatcacaaccctgctctgcatttgctgccattgtttctgttacgtagatgaggaatttgagtctctaaaacttgaagttgcccggccaaggtcacgtagctagtaagttgtgaagctgatattcaaactaaggactaaaagayaaaaaagaccactttcttccaatgcttaaaagatgttaacagaaagagagcaaagcaacaacaagaaagaaggaaccctaagtatgttcatcgagctactcacagaaaacagaaaatatgattacaacataaagtga

SEQ ID NO: 320645 - DNA, 610 bp, Homo sapiens
ccttgctcatatagacttcagcctagtagggaagactgatgaccaaatgattctataaattataatgaggaatccaataaagcttgctttgaagggagaaggaagagagtgtgagattcagcacatgttctaggctcttggtatattatataactccctttgtcctcctatttatcctgaaatatcatcttatgcctacttttccttcttgtaaccttttttttttcctttcaacccatggaaaaattttatagggtcagaatttagaattagaagggcactcagaaaccaggtgtcttcattttagagtagaaaaatacaaaaacaaaaccaagagtgaggtgacttgctcaagatcccacagctaacaaagagtagaactgtcttctagggtcttccactcatcagactccacctgtgcgtycttgtcctctgttgtctgagcactagtgtagcataatgtggacttaaaatttatttgatgcgtaccattcttcctcctcatcattagtttttcatcatgtgtacatccttcagttgaactagaagcttcctcagcacaagaacatactttttttccttctttttaatgtaccaatctacaggagag

SEQ ID NO: 320646 - DNA, 520 bp, Homo sapiens
agactgaatttcctcatatataataatgtaataacacatatcttgctgggtgattgcgaagattatgtagagtaatgcatataaagcacctggcaactgcagacacaatgaaaggtggctgttattattccacttactgagccatggggctgggaattagttcttgttaaatttgtgctctctactcggcattttacaagttagttttcataattatcatggcaacctcattttacagatgagaaagctgcatcccataaagggtaagtcatatatccaaagtcagtctgtgctatgacttgcctaagctagaacgccagcctgggtttggaccccaccccttcctctgtgtcatgtggcttttctagaaggttctcttaagtcagaaacagaactatgaaggcctttcccaggaccagccaggcagccacattytgaatcaagccggctttcattcatgtccaccagtcacatgcccagggatgcagctcatgtgtccttactccccatgaaaacaaag

SEQ ID NO: 320647 - DNA, 614 bp, Homo sapiens
ttataccctcatgctgaacactgtgctgttttgtgagtataaagaacaatggcgaacacactagtataaggactaatctttccaggagagaaaaatgggagggaggacttcctagttcctcattctgggaargaatatataaggaattaataagtcaaatattctctcctgtctttttgactgctcccatgcagtgtttctattttactaaggtttggttctctccttttgtgtcttttccatttttttctcatacaaataaattattttcagaaaaatttaggaaggacagacattttgtttgtttctttcttttttaataaaatgaaattggtttatctggacggtgagttaaatgttcatttttaagatgactttgtagaaggagaatagaagaaatcataaaacccaattattcagccatcaactggcttatgattttgcagagttctcagtagaagagaaaagactacccagggaacattgcagaattctaacataacagaggtggtcagtctaatgggaaaccagcttgtgattgtcttagaaataattggaaaataaacatttatttctgagtgtgttcagtggtggtcaattttctgttgcacttc

SEQ ID NO: 320648 - DNA, 527 bp, Homo sapiens
tctctcctgcttctcaaagaaatgggaaatcaaatgcatggtatcttacagttcactgtaaaaaacatgaaaatatctctggacttaactggatacacacacacacacacacacacacacacacacgtacacacacagrcttactaactgatatggctttgtgttcccctaaaagatattttcaaatcctaaccttggtatcctaaccttggtacccgtgaatgtgacctatttggtaatagggcctttggaaatgtaatcaagttaataaagttaagataaggtcatacttgattaggctgggcactaatccaatgactggtgtcaaaagacagactagagaaatggggacaccttggtgaatgccatgtgccgacagaaggagagattggggttatgtgtcttcaattcaaggaacatcaaagattgtcagtagcaccagaagctaggagcaggcaaggaagcgtccttctctacatgttccagagagagcatggccctgctgacaccctcatgtggtacttttg

SEQ ID NO: 320649 - DNA, 602 bp, Homo sapiens
cagattcttcagagaagagcctgagatggaagttagggtgcgtgtggttcatcaaaggaaggactgtgaacaggagaaagggaagagacattagtactgggcaggggaggagccaaggacacgtgtgttttcagcaggactctgcctctggcctcctcacatagtgtgttctggaagatgaactgtgtcttgagttggwccatcctcaaggcaaggaggtcaggctcccttgttggtccatgggctgtgggctttatgcaacctcctgggaaataaagtcagtcttccatgtggctgaaagcggttctctggggagacagcacctacccaggagcagccaatacacacgaacctaacccggagggtcctgacaccttattaatagcatccattactgacttttcctgatgacccttctcacgtttcaccttgtgttatatgaattcacatttctgtcatatttatactaaattgtgagttccttgaggtcaaattaagtgaaatatttatcattgaaattttcgcaatacctagccttgctcctggataacatagcactggaaataactttgaaattgcttaccaggacttaatttttaact

SEQ ID NO: 320650 - DNA, 605 bp, Homo sapiens
gcttcaagaaacacttataaacattagccaattacagagtattttgttatgtttgaggttttataaatacctgaccatccagggacttaaaatcctgttggtggcagagaccatcaatattaaaacacttattttcacagacatttatgagttactaattttgtgctaggaattgtactaggtaaaaggggatataatgataaygtcatgccttgactttgttgttaagaaagttttagcctagttgggaagaaggcaggtttatataatacatttagagcagtggttttcaactctgactatacattgaagaatccagttaggagtttaggaaacttcaacatctgggtctcaccatcaagatcttacttggtctgagatgtgacccttgaattaattttcttgaaagctttctaggggattctataacgatgcaggatggagagagggaaaagtatccagtaacgaatgaatcattgctttgcctattctcattgttgtgcacaatatgtcttcctgactttgtcaaggaacaaataactcataaaataacatgatcctgatggaccagaatgtggtaaggtccacattctaatgaaaagaac

SEQ ID NO: 320651 - DNA, 603 bp, Homo sapiens
ttgttcttaattttcactttatagtttttatacacattttgttaaattatttctgaacatttcatatacttttactattacaaattatattttctatttattttgccactgtttattgcaaacaggtagaaaagtgatgggttagtttgctattggttggtatcctgcataccggtaaaactgaattttggttctatatattatcatttgtaggctcttaaaatatcagcaaacatgatgatggcatcatcaaataagaatagctgtttcttctcatatccaatttttctgttttttttttcttccttattgcattgactggggcatccatttagttatagggcatccataaataaataaatttttaattttttttaacttttttcaaatgcttctgcatccattgagatgatcatatatattttttcttttttartgtgataaagtacattgatgctggaactttgaatcaatgtcgtacatctgagttaagccccaactggttctatataatatatgtcatacacttttatatttattgaaatattcattatatatacatttttaaatctttcattagagaggtccaattgtctacttttt

SEQ ID NO: 320652 - DNA, 609 bp, Homo sapiens
aagtcagatatatcaaaatataagtcagaattttacaaatattgaagtgtcatatcacatcagagtaacaacaccacctaagtaccaaatgatgataatgaaacttagacctactggaattgagtagaggtgaacatcatgtgagagaaagatcactgtgcgctcgtgaatcagggtagggtccaccgggatgtgaaacatgaatttgaacttgaacgaagaggggctaaatctgatgcacacaaaacaaactcrtgctacatcttcctctgaaattgcgattctagcttcttatgtcaggtacttttagtatctgactcttttaagcaagactgggataattaaattcatggcttccagttggaacacctccttcagtatggagctggcaaaacctagccagtagcctatgaatgttaccgtttggcaaagcctcagaactaggcagaaccatggatgctgtcatttgtattgtcagcttccaacataccaaataaccttggtaatgacttcaccatagctcctctgaactgcttggtgtttacccaaaatgtgccttggtacaaagtctgtgggaggcagtgtcaagtcgaatgcctaacagtttga

SEQ ID NO: 320653 - DNA, 621 bp, Homo sapiens
cttcctcccctcctccccttccttccctctatttcctcctcctcctcctcctcctatcccccagttggaaataagagctcggagttgaaaacgagcactaaaaggattttccagtaaggcaaatttacttctccagaagagtgctgctggctcttctggtcactgccagagcacactaatcmaaggagggaaagggtttttatccctaacacagccagtcccagctactgtgtctggtcctcattggctggagtcggactgcatgatctaagctgatcccgattggctacttcaaatggagcagaggtgggggctacagcggcaggaagagcagtttcagaactaagggcaccaaataaagaacagatgtaggatgttacagattgggaatgggtgtggattacagattgagaatggatgtgagttactgattgggaatggctggaaggctgtttactgtaactaggggcaaggaggcaaggaagttaggctttgaaaatagaggacaaagaacaagggatttgaacaagtggaacctttgaagaggaactcactgtatccaacatccctacccccagtaggaatccactgaaaagtttcaaatgagagggagacgggatt

SEQ ID NO: 320654 - DNA, 621 bp, Homo sapiens
cttcctcccctcctccccttccttccctctatttcctcctcctcctcctcctcctatcccccagttggaaataagagctcggagttgaaaacgagcactaaaaggattttccagtaaggcaaatttacttctccagaagagtgctgctggctcttctggtcactgccagagcacactaatcaaaggrgggaaagggtttttatccctaacacagccagtcccagctactgtgtctggtcctcattggctggagtcggactgcatgatctaagctgatcccgattggctacttcaaatggagcagaggtgggggctacagcggcaggaagagcagtttcagaactaagggcaccaaataaagaacagatgtaggatgttacagattgggaatgggtgtggattacagattgagaatggatgtgagttactgattgggaatggctggaaggctgtttactgtaactaggggcaaggaggcaaggaagttaggctttgaaaatagaggacaaagaacaagggatttgaacaagtggaacctttgaagaggaactcactgtatccaacatccctacccccagtaggaatccactgaaaagtttcaaatgagagggagacgggatt

SEQ ID NO: 320655 - DNA, 495 bp, Homo sapiens
tattcttctttaaaaccacacccatattttatacacctatattttacaaagaatagtttcttaatggttatttgcaatgtagaatctgaaaccatattaataaacttttcatactttgttacattaagatttgcttattttgaagtttgaatagatctttgcccatgtttgattttgtaatcatctttgcccatatttgattttgtggtctcatgtactaggtatttggaaaatactggtttgtacagatcttccaagtgttagcttagrttattatgcaatgtcgaggagcacatgcattaatggcaccatcaatttcatcagaagtctttaaatatcgggaagctgtcaagctcgtggtggcagattcaagctgtaatgcagaatcctaatttctacttcggagctcaaattctattatctttgacaaatattgcaatttgttgtccttaaaatgacagtttcactcaatttatttttgggaaaatttctccc

SEQ ID NO: 320656 - DNA, 532 bp, Homo sapiens
taatattactagtcatagtgatgagtagcatattgatattgtggacaggaattgtgcaaatgactctatgttaatctcatgatttctaattcctgtgcatggaggcatgttgtctcatgccttcgggkgtttattgggataccagtctctccagtattattttgaagatcttcaccattcttattttatagccatttccagattgctttcttatttctattttcagagagtaaattctcccctttggcagtattttttcctcttgtcagctttctgtgggcactttttgtttaaaagaatatgttgactagtcctttctctttctcattcccatctcaactttccccatgaagcctcaaggcttgtggttgttttccagtttagatttacattaatgtgcagttcggggcagccatctgcaaacagtatttcagttcaggcacctgagtgagggtgtggcttagcctggttgcagtgaatgtggctcttcccgccaagcccagagctcagtaacagccacactggtggtaac

SEQ ID NO: 320657 - DNA, 532 bp, Homo sapiens
taatattactagtcatagtgatgagtagcatattgatattgtggacaggaattgtgcaaatgactctatgttaatctcatgatttctaattcctgtgcatggaggcatgttgtctcatgccttcgggggtttattgggataccagtctctccagtattattttgaagatcttcaccattcttattttatagccatttccagattgctttcttatttctattttcagagagtaaattctcccctttggcagtattttttcctcttgtcagctttctgtgggcactttttgtttaaaagaatatgttgactagtcctttctctttctcattcccatctcaactttccccatgaagyctcaaggcttgtggttgttttccagtttagatttacattaatgtgcagttcggggcagccatctgcaaacagtatttcagttcaggcacctgagtgagggtgtggcttagcctggttgcagtgaatgtggctcttcccgccaagcccagagctcagtaacagccacactggtggtaac

SEQ ID NO: 320658 - DNA, 612 bp, Homo sapiens
ctctaaatcaaagccatatgggaggtactggggctgagagggcaggaggagcaggggtaattggccagcggttcaaacactgagtgattctaggcagtagacagccagatctgaggactggctacctcctctctattcccttctgcagatgccatgactctattactgttaaatatgttagctgctcatcagtcaagagactaaagcataatgagattgaaaggaaaattctgatgtgtcctagagaagaaaattatgttcacttagagtaaaatatctaatagrtcacaagcaacacatatatgcatttaatgttttaacaaaaaagaggaaaattcctctcctttccagcatgtgtgtgtgagcaatggagtgcatacaatgaacagtgaactaagagcacgtgggagtctcagggatcagagcaaatcagcctttcagcatcagcagtctggctgcatagcctgtaaccccgaatttcaacctgttcaccaaaattgcactttgtaaaaaagaaaataagtcaaaaatatgccatattgatacaaattctggagtccactgcctcagttgccttttactaataacatgcattttccttgggaacattac

SEQ ID NO: 320659 - DNA, 612 bp, Homo sapiens
ctctaaatcaaagccatatgggaggtactggggctgagagggcaggaggagcaggggtaattggccagcggttcaaacactgagtgattctaggcagtagacagccagatctgaggactggctacctcctctctattcccttctgcagatgccatgactctattactgttaaatatgttagctgctcatcagtcaagagactaaagcataatgagattgaaaggaaaattctgatgtgtcctagagaagaaaattatgttcacttagagtaaaatatctaataggtcacaagcaacamatatatgcatttaatgttttaacaaaaaagaggaaaattcctctcctttccagcatgtgtgtgtgagcaatggagtgcatacaatgaacagtgaactaagagcacgtgggagtctcagggatcagagcaaatcagcctttcagcatcagcagtctggctgcatagcctgtaaccccgaatttcaacctgttcaccaaaattgcactttgtaaaaaagaaaataagtcaaaaatatgccatattgatacaaattctggagtccactgcctcagttgccttttactaataacatgcattttccttgggaacattac

SEQ ID NO: 320660 - DNA, 612 bp, Homo sapiens
ctctaaatcaaagccatatgggaggtactggggctgagagggcaggaggagcaggggtaattggccagcggttcaaacactgagtgattctaggcagtagacagccagatctgaggactggctacctcctctctattcccttctgcagatgccatgactctattactgttaaatatgttagctgctcatcagtcaagagactaaagcataatgagattgaaaggaaaattctgatgtgtcctagagaagaaaattatgttcacttagagtaaaatatctaataggtcacaagcaacacatatatgcatttaatgttttaacaaaaaagaggaaaattcctctcctttccagcatgtgtgtgtgagcaatggagtgcatacaatgaacagtgaactaagagcacgtgggagtctcagggaycagagcaaatcagcctttcagcatcagcagtctggctgcatagcctgtaaccccgaatttcaacctgttcaccaaaattgcactttgtaaaaaagaaaataagtcaaaaatatgccatattgatacaaattctggagtccactgcctcagttgccttttactaataacatgcattttccttgggaacattac

SEQ ID NO: 320661 - DNA, 612 bp, Homo sapiens
ctctaaatcaaagccatatgggaggtactggggctgagagggcaggaggagcaggggtaattggccagcggttcaaacactgagtgattctaggcagtagacagccagatctgaggactggctacctcctctctattcccttctgcagatgccatgactctattactgttaaatatgttagctgctcatcagtcaagagactaaagcataatgagattgaaaggaaaattctgatgtgtcctagagaagaaaattatgttcacttagagtaaaatatctaataggtcacaagcaacacatatatgcatttaatgttttaacaaaaaagaggaaaattcctctcctttccagcatgtgtgtgtgagcaatggagtgcatacaatgaacagtgaactaagagcacgtgggagtctcagggatcagagcaaatcagcctttcagcatcagcagtctggctgcatagcctgtaaccccgaatttcaacctgttcaccaaaatkgcactttgtaaaaaagaaaataagtcaaaaatatgccatattgatacaaattctggagtccactgcctcagttgccttttactaataacatgcattttccttgggaacattac

SEQ ID NO: 320662 - DNA, 426 bp, Homo sapiens
tatgcaacctccaccctatgattgatcagggaggtaggcarttatggttccaatattctgggcctgccacacctggtgtagagcctttgtcctacgaataagggctggatgaagcaaggtagcccccaacctttagccaaacttgcttgaaatttaccttctgcaatagagggctgaaagtagggagggagatggagctaagaaatgctggctcctgactctcccaggaagataccatatctcttcctatggagtttgaaggtagaggagagagaaactctgtcttttttctttcttttttttttttttgatcacgtctacctggagtggagcttctgtcatgctaagctgggggtgagaaagataagagtaggttgtggacccagtgtcagactcttgctattcctaccaagatgagtagacatc

SEQ ID NO: 320663 - DNA, 474 bp, Homo sapiens
ctcctgtcagaaacatgaaaggatttttgtttcgtttttactttaagaacctaggttgggaagagagaggagagagagtttttttggaggtctaatcacaaaagcgtggcaggggcagtggrgtgtccctgagactatgagttccgagagtttttcagtctcatgcagtccacactcagcctccagcaatttgcccggtcacttctcaatgtgcatgccaggcatggcttcaggggcttccactccgggtaaactgatcttgactatgattttctgtatttacctgtcttctagatttcggggtggagtttcgccatgcaacctcaattttatgatgggtcaaagaagtcatttattttcagttaattctgtgttttattgttgtaagaacaggaataatgacttccaggttatttacatgtctgagatgaaactggaaaccccaacatctttatcttcttatctggacctgtt

SEQ ID NO: 320664 - DNA, 581 bp, Homo sapiens
agtatgagctacctaggccttgtttgtctgagtcttgcatcctgctcataaaagtaacacaaaattttttcaacaaggactaagaatgagcttattattttttaacatacatacaatttattcatgataatattgctagtagaagcctggaaataactgagatgccaataaacaggaaaattactaattatatctatacaatgaaatctatgcaactgatttaaaattaaggatgcaccctcttatttttagtgtgtatgtataaatggatacgtggtatgttgtcaaagaaggtttagaagttcaatttaaataatactgaagatacctgctattgtataagcaatgaaaatgctatacagatgttctgaaataaaacaaacacacccatactctgaccactgaactttggaccagtattgctcttcattagtatcctaaaatgtatggacattttatgggtcattgttccaaacctgtctttggagctatytggagtagcacagaaccaacctgtctttagagcttccttgagcagcacagaaaagggactttcagagcttcaggagacagtatttcat

SEQ ID NO: 320665 - DNA, 426 bp, Homo sapiens
tatgcaacctccaccctatgattgatcagggaggtaggcagttatggttccaatattctgggcctgccacacctggtgtagagcctttgtcctacgaataagggctggatgaagcaaggtagcccccaacctttagccaaacttgcttgaaatttmccttctgcaatagagggctgaaagtagggagggagatggagctaagaaatgctggctcctgactctcccaggaagataccatatctcttcctatggagtttgaaggtagaggagagagaaactctgtcttttttctttcttttttttttttttgatcacgtctacctggagtggagcttctgtcatgctaagctgggggtgagaaagataagagtaggttgtggacccagtgtcagactcttgctattcctaccaagatgagtagacatc

SEQ ID NO: 320666 - DNA, 594 bp, Homo sapiens
tgggtaagctcactgcaacaatcctgctgtactgaaagaattctgctttagggaggcctctgggttcacttctgctcagatggtgctgaactcccaccaactttacttctgcttttccaggctgaccattcccctccagctgacacattatttcaatgaacagtgttgrcactatttccacaccccagttcccgtggacctgggagataccctgtgtcttcccctgatgaactactttaaataacctcaccctcacaggcaagaacaccagcttctgcatactgtggagttcacccaccctagattgtccaatttcctcctgctcttttgcctcttcaggtaatggaatcacactcttattctgaatttcaactcttttcctcccttccttcatacatttctctagagctgaagtgaatcattattctttgtttgcaaagaagcttccttttcctttatggagaggtctcagaatctcctgcctttcataaactttcctgattaaataaaagagcgatttctcttttcttccttgtcctagaaaccgatttccatattataaataagcactcaggttagaaatatatatgcaaa

SEQ ID NO: 320667 - DNA, 587 bp, Homo sapiens
aagagaaacaatgcattctcacagaagtagacatatattccatgtttgggtttgcctttcctactccaagggcttacagactgtttgatccactgtcacaggattccacacagcattatatcagataagtggatccacttcatagcaaagggcatttgaaagcaggatggcatgggatccatctttcatattacacaatatgcccctgaaagctgcaggtacagtagaacattagaaggcctgctaacagtaaagcggaagcaccagctcagyggtgacgttttataaagatgagtcacaatcctccagaatgcagcatccacattgcagcaaagactttaaatagcactgtgtcccaaataggaacaatacataggtcagataagccaggagcgaaatcagaagtgaacttgcttaccatcattctctgtaggcactaggagactttgggctttccattctggcgactctaggctctacagggttagagatcctagtcctcaaagggtagcactttcatcagaagacacaagagtcctattcagcaataagttgtgattgctgcttggccactttgggttccaagc

SEQ ID NO: 320668 - DNA, 558 bp, Homo sapiens
acagtagtgtttggtggagtttgtaaccaatacaggcatactttagagatattgcaggttcagttccagcccacctcaataagagtatcacaataaagtgagccaaataatttttggtttcctggtgcatataaaagttatctttacactatactgctgtctattatgtgtgtgagagcattatgtctaaaaaacccaatcaatatgtattaatttaaaaatacttaattgctaaaaaatgctaataatcatctgagccttcagagagttgtaatcactttgcttgtgaagggtcttgtctcaatgtcgatggctgctgactgatcagggtggcgattgctgaaggttgmggtggcagtggcaattttaagaaacaagacaacaatgaagtttgccacagcaattcttcctttcatgaaagatttctttgtagcatttgatgctgtttaacagcatttaacctagagtagaacttctttcaaaattggcatcaataatctcatacactgctactgctgtgtcaattaagtttatgtaatattctaaaccctttgctgt

SEQ ID NO: 320669 - DNA, 563 bp, Homo sapiens
tgcagtttgtggtgacccaaaacagttacaatagtaacaccaaagatcactgatcaaagatccccataacagatgataatttaaaagtttgaaatgctatgagaattatyaaagtaggacacagagacatgaagtgggcacaaaatgttggaaaaatgtaaccaaatgagttgcttgatgcagggttgccacaaaccttcaatttgtaaaaaatgcagtgtctgtgaagctcaataaagcaaagcacaataaaatgaggtgtgcctgaatatatcatatatagtaacaagaatacaaataccagataaatgcatgtatacagatgcaaaattttcatatattacatgctacagcacaatattaactgcataaactataataatttaagggtgcatatggtaatctctggaataatttccaaaaatatataataacaatgcaaagaattgtagctaaaagaccacaaaacaaaaacaagaaacatgtgggacaaacagaaaccgaacagtaatatagtgaacttaaatccaaccataacaagagttacattaagtataaggtga

SEQ ID NO: 320670 - DNA, 559 bp, Homo sapiens
agcacaatattaactgcataaactataataatttaagggtgcatatggtaatctctggaataatttccaaaaatatataataacaatgcaaagaattgtagctaaaagaccacaaaacaaaaacaagaaacatgtgggacaaacagaaaccgaasagtaatatagtgaacttaaatccaaccataacaagagttacattaagtataaggtgactaagccttacaattaaagggtatgggttgtcagacagggttgaaaaagaataattttctttttgctttcctgtatggagactaccagttttaattcatagtatttgaattatctttcaatgtttcatacattttaattctcattttgatttattctttgatccataaattaagcagaattgttctgacatttacaatcatatgaaatgttttccttatcttttatgacaatttcaaatttaactgcaatcacataatgtagtctctgtgttacgcattttttgaaatgtattgaagtttactttgtgatttaattaatggtcgcattttgttaatgtacacctgaa

SEQ ID NO: 320671 - DNA, 426 bp, Homo sapiens
tatgcaacctccaccctatgattgatcagggaggtaggcagttatggttccaatattctgggcctgccacacctggtgtagagcctttgtcctacgaataagggctggatgaagcaaggtagcccccaacctttagccaaacttgcttgaaatttaccttctgcaatagagggctgaaagtagggagggagatggagctaagaaatgctggctcctgactctcccaggaagataccatatctcttcctatggagtttgaaggtagaggagagagaaactctgtcttttttctttcttttttttttttttgatcacgtctacctggagtggagcttctgtcatgctaagctgggggtgagaaagataagagtaggttgtggmcccagtgtcagactcttgctattcctaccaagatgagtagacatc

SEQ ID NO: 320672 - DNA, 409 bp, Homo sapiens
caccacattaatgaactgtatagattaactatcttatattatcctgcttggtttgtgatgaagaggacagcttgctccatctttcagtgtaattttaagacagaaagcctgytataaaaccagtgaatttccaggccatcataataaaatttcctatgataataataatgtgcttttgttcaaaattaaaatatttgaagagatgagagttttaatattagtttcaaagactgacatgacttattaaaattatattaatttacgctcattatatcttttatgataaaaattttaaacctctgaagcaactctgagttcattctagcaataaaataaatatttcaacacctactatgtgccaggaagtttttaagtgcttagactgtatcagggaacaaaacaaagatct

SEQ ID NO: 320673 - DNA, 581 bp, Homo sapiens
catgcttttggttaaaaactgtcatgtctttcacccgcgtatttgtcctgactctcctgtgattgaatgtatcccttcttcctattctttccctcttaattgattctattttttccaattattgtcagctccacgtagactccactattattcagtgaatcaytgaaagttattttagtgggaagtgacagaaattcagctcaaaattacttatacagaaaagagactccaatgacttgtgcaactaaaatgtcctgggggcgatctgccttcaggtaagaattgattcagtagctctaactagcaacacgctgcgggggcagggtcttcctagcagggaggagccgtttaccacctgcactcttcagagtcattggcacatgacggtagcacaaagcacaacttgatagtttttaattttgtggattctgttttttggatatgatcttctattatgtaaaatacttacatggatttgaaatacagtataaagcaagatgcaatcagacaagtgaagtttccatccttctgtatatcctgatgcaggtctcttgttagatgaccattgttttatttttaaa

SEQ ID NO: 320674 - DNA, 608 bp, Homo sapiens
tcataggtgtcagggaagtctaaacccagcaaccattttagatggctctgaagtatttgggggatagttttaaaaaygtaagtactatttgaatagtacttaatgaactttagtgaaaaacattggaaagagtatttagaaacctcattattattaacttttacactattgtgacttcatttaaaatactttgttaaactgagaatgtctttcccttccagcacctacttacctgaccattgtctcaactacagctgatgggatccatgacagaagcttaaccaaaactagcccatgagattgtttttctcaggaatgtagaaatgaggcagaggttagccactgtccgtgtgctctggagctaaacgcatgtaagtgtaagggttctcttctgtcctaagctgacacaggctgcagagaaaagtggttgatgctgccagtcagagagaagcagatgaaggagccatgcagcctggaaggcgagaggagggccaagaaaatgagcttggtttccaacgggttccgcaattgctattttcggtggctgctgagcccaggtgctgtttcttcacttgagctccatgaccctccctgtgtggtgggttgaa

SEQ ID NO: 320675 - DNA, 515 bp, Homo sapiens
gttttagaaacctttggccccaaccttctctgaccgtgatcatgtattttaaagttaccatgatgccaacacagatttatactgctcttcctggaggaaaaaccgtagtatctctgtgccttaagacatagttatggttttaaattccagccattatttctcaaggaatctaccgtggactctgtggtggcttttataatagacatagcacatgcctatgggccacctggccttgtggactgcttggctcaagccgccccctgggttcatgatgctctcccttgcctggctcactcgtctctttcctaacagaagctgctgatggagacagtgcaagccttcatctttcgcaaatttctgaccctctctggatgtgtatggagatccccaaggccccagagcagtgctstatagttaggggtttctcctctgcacccaaattttccacctctaacctaaaaaggctgaaggctttataggagcctgctctgattccatggaaatgagtctatatt

SEQ ID NO: 320676 - DNA, 572 bp, Homo sapiens
gctataaaccttcctctcaacactgctttagctgtgtcctagagattatcatatgttatatctttgttctcattagtttcaaagaatttcttgatttctgccctaatattgttgtttaccccaaagtcattcaggagcaggttgtttaatttccatgtaattgtatggttttgagtgatttcgttagtgttgatttttgtttatattgtgctgtgttcttgagtgtggttggtatgatttcaattattttttttaattttctgaaaattatgtgatggcccattgtgtggctgatatatggtatgtgccatgtacaaatgagaagaatgtatattctgttggttttgagtggaaagttctgtagatgtccattacttcctttatttgttcaagtgtcaagttcaggtactgaatatctttgttaattttctgtctcaatgatctgtctaatactgtcagtggtgttttgatgtcttgcactattattgtgtggttatctaggtctctttgtaggtctctaagaacctgctttrtgaatgtgggtattcctgtgttggctgcatatgtattta

SEQ ID NO: 320677 - DNA, 595 bp, Homo sapiens
tgataataattatattgacctcactgagtttctttgaagattaaatgagatgatccatacaaagaatttggcacagtgcagaacatagagtaggtataaataattattagaaattatgggcctggtgcagtggctyacacctgtaatcccagcactatgggaggccgaggcgggtggatctcctgaggtcaggagttcgagaccagcttggacaacatggtgaaaccccatctctactaaaaatacaaaaattagccaggtgtggtggtggaaacctgtaatcccagctactcgggaggtggaggcaggaaaatcacttgaaccctggaggcagaggttgcagcgagccaagatttcttaaggaagcctgagttgtttatgttttggtctattaagaaaagagagatcgttggtaataacaaactgaaataatgaacatagcagaaaaacacaaatcagttgtaactgaaagtttccaacagttggaacatatttcctgttttcagggtatagaatttataaacgtaacaagagagaatgtaactggaagattctgagtcaggccctgtatttctcctcaaacacacacaattgt

SEQ ID NO: 320678 - DNA, 446 bp, Homo sapiens
tcagtatcaatagcaaaaacaacctcacctgccataaaataagcagtttcgggtgtctcgtgaacgtatgtatgtatggccagacacggtggctcacacctgtaatctcagcactttgggaggctgaggcaagaggacaccttaaggccaggagtttgagtccagcctgggcaacataggaagactctgtctctacaaaaaaaaaaaaattaaaaaattaaaaaacacatttttaatgacataaatacttaaatgacagcatttaaaagcaatgctgtcaaacacaccaaatacctaggwataaattaaatgatagatatgaagagtttgtatgctaaatattatgtaacactgaaaaatttaaaaatgattctgaacatcacattcctagattgaagatgataaagatggcaattctgatgagattgattgtattcactgaatgt

SEQ ID NO: 320679 - DNA, 593 bp, Homo sapiens
agagttctttttttccaataagatattaatgcaacaggatctattaaaaagaatcatgtttgcttccccaactgcatttcactcatgcgtttattgtaaatcaggcagtgatttatgtgagcatctgtttctaaataccttccaatagtgtatttgtctatccttgtaccaataccacaccattttaaacttacagcacttttatagtaagtcttcacatttamtaatctgtgtgctattcaattttatttcagtatttcattgggtattgtatttctacatacatatcagaatcatattatacatttctttttaaaaagcctgctgagattttaattagaattgcgctgaatatgtagaacactgacattttatcaatattgactcctctagtctctccttttatttaggtcgtccttatgctgcagatttctagaggtactgtatacttttcatttgattattctcaatatttttattgtttaaattattgcaaatgatagtatattaatttattttcttttcatcaattgctagtgtctagaaatataattgattttttaatattgactttgtatccaggaacttgttgt

SEQ ID NO: 320680 - DNA, 671 bp, Homo sapiens
tttgcgaaggaaaaaagaaaaaaattggcagcctaggaacagtaggagaagtttccacttgtgagcaagaagaaagaatatcatactagtttgtaatgcttttcaagatacatagaaaatgaccatcagcttctcaatcagtccttgaattgcttctttctaacatttgcytatatattaattttgtcatttgaagatcagtttatcttgacacggtttaccataggttaactgttttctcttcctcctggtgctttgaaaaatttgactatcatattatcccatgaaatcacatatgtagcatcactgtgcgtttgcaatgttgcatgcagtttggagacggttccattacgagcagagaacataggagaatgcacaaaactgattcttctccagaatgaatctccatgctttaactgctgtaactttgtaaaagaatagaataagggacacaaaaagagaaagggcaaggaagttgtggttgcgaagacaaaataagaagtgagctacttgaaaatatcaagaaagtttaactcaattatttccgttcaatctggagtttattagcaattatacttgctaagtaaagtaacattttgagtattcactaaatgacaaacatttgtcactggtgattaggaagttttctcaaaatctatataaactgaaca

SEQ ID NO: 320681 - DNA, 614 bp, Homo sapiens
caggtcacagtcttccaacttttcccacacagcagagattttccctaattgtgttcaagtgcctacctgaacaaaaaggaacacttcatttcactctgtgacagtggctgtggggttactatcatgctctgggaattaaagaaaagaaattagagcgctctgytcttttatcacctcctgagagttggcctcatggctagagtaaacttggccttgaaatggagttcaaataacttaaggaacagaggtatcatggtattaagcacctgtaggaaagcaacatatggcaaaatggtgcataggttggtgataagtattgtaggagtcatatatctcaagagaggatggcctgatttgatgactttcacatcattctctgggttcatcataaatatacaagccatgtttgtttatgagaaagtttgtttgttatgcagattggcactagttttatattttaaaaagttctctacaattattccaatcaagtttaaactttcagagagaccattgttaaggctagatttattccttctcttcctttttttgttgggacatagctcaacttagttctctttcagaacacaaatttataataatcaaattttaaaagg

SEQ ID NO: 320682 - DNA, 495 bp, Homo sapiens
aagaacccagaagcagaaggtccctgagctgagggcaacaggtctggcacagaagcatcctcaggagagacccactgctgggtacagagccctggaggaggcaccctgwggatagggcggagactcggaggcatctacagcaccagatgccaaagacaggccacaatgcttcactgagtgcttcacggagtaaatagaacaaggaacaattcaccaggtactttggagcaaagacgagtgaagatgcaggtaaaactccttgacttaagctccttttccccctttgctcgtagggcattagatgtcctcttcattcacctggatgtcaccctgtggaggagctgagtgcgttgtgcatgtccacttaacgtttgcacgcatgtgtgcagatacgtgtgctatgtatatgctggtggagggtggcatgggctgtcatccaatagaaggggcttttacctggaacagttgaagttaatgaacaattactaattaaat

SEQ ID NO: 320683 - DNA, 495 bp, Homo sapiens
aagaacccagaagcagaaggtccctgagctgagggcaacaggtctggcacagaagcatcctcaggagagacccactgctgggtacagagccctggaggaggcaccctgaggatagggcggagactcggaggcatctacagcaccagatgccaaagacaggccacaatgcttcactgagtgcttcacggagtaaatagaacaaggaacaattcaccaggtactttggagcaaagacgagtgaagatgcaggtaaaactccttgacttaagctccttttccccctttgctcgtagggcattagatgtcctcttcattcacctggatgtcaccctgtggaggagctgagtgcgttgtgcatgtccacttaacgtttgcacgcatgtgtgcagatacgtgtgctatgtatatgctggtggagggtggcatggrctgtcatccaatagaaggggcttttacctggaacagttgaagttaatgaacaattactaattaaat

SEQ ID NO: 320684 - DNA, 620 bp, Homo sapiens
atttgctaatcaatagttatatatatatatatatatatatatatatatatatatatatatatttccattctaaatgtgcagtgctctgtaactgaacccacatcttggctcaatgcccagtggaaatttcaggaacaagggacagtgtgtctcagtccattgtttcaaataactctccttggcttctttagggggatgaaacaggcattcacattaggccagaaggttattagatctccacgagatgctgcccaggtctggctgcacaccgtgaatattattctgtcaacgcaaatgtccttagaatctgctagaattgaatgactcttagcagctttacagctgtcttacaacatttgacatctcccaaaaaacgcttcttggcaccartgagaattagtcactgggctgatttatatctaaaaagtatggaaaatgaagtgggataacagtatcactgtttccatgtatcatgtttataaaataagtattgtgttttccccccgaaggctgggattgattttttacgccacccacagccatcccccaacttttatagcccgggcaactataaataagtttaggaaaattactcctctacggtttcacaaagcatttct

SEQ ID NO: 320685 - DNA, 647 bp, Homo sapiens
tcacacaatgctgattatctctccacagactacttcatattttcagaggaggaaacatgtatttatagtggaaaggtctgactgtaacaaaattaatccagtattaccactaactaataggactccttagacattctgttaatgaaatgcaaccggaaacaccaattttctccatgaactattatattatgaaaatacaaccagacaaatacaggaaatagaacatcacacaatatctggctgatgtctttaaaaattaatagctcagggagaaaaaggatgtaaaaactatacttgacttaaaaagacaagtgacataacaaaaaaatgtattaaatgctttttgatcgaatcctgcttagaaaacaagagttaaaacagacattgaggaaacttgaatttgggccacgtatctggtattagggaattcctgctgattttgtggggtgggtacaataaagccatggcgatctcatgggagagcacttctgttcatactgaagaattcaggagaaagtgtcakgacatctggaagtaacttcaaatgatttagcaaacagataggaatagcaatataaatatggatattcatatagagtatagatctacaatatataccctactcatatagcgtacagatctacata

SEQ ID NO: 320686 - DNA, 450 bp, Homo sapiens
ggccattaccccaaccactaaagcataatgctcttgaggtagaatgtgctagtatttaggaaactcattaagtcagaaagtactcactgagcccctatagcctggaaagtacagcactgatcacttaaggaaatcatcaatatcagactaactccaggtccttagggagttgcaaatatttatgagagagaaggtaatcagcctaagatcagtcttccttgaatgtagccataaaatatttattttgctcatatagattttatgctttgtttctttaaaasctaaattctgaaagttaaaacaatgctgtttctgataatgctatggttgtactttctgatatcttttatttttagatactatgaatgaaatcttaccaagtgtcatatttagttactaaacaaactatgaataaaccatcagcatttccagcatgtggatgttagcatt

SEQ ID NO: 320687 - DNA, 627 bp, Homo sapiens
gctcagtgattttgagggagcctgctggaaatcctctaaagatgtttcaaatattatttttgtggctagttttgtattgttggtaataaaagtttttgagagactttccatttctaaacacaaatcaaatatctctaattcttctaggaaagagaccataaaatctcttgattataataaaattttgctctctcaatttctaatgagaaccatggtagtgaaaataattttgacatatagaaattgttttgatgttttaataactarttatctgtatagtgtctggcttccagaatttctttataaataattctgatgttgattagccatgtggttgctaaccttgttccaagtgcatcacaaattcaaattttacaaaaaattaggaggaattatgtgatccacatgaatcactgatgccccggggaaagttttcgatggaaacctcacaatgtgggagatttggagaagaaactgactacataaggtatctgcttttgaaaggaatagttctattttgggaaaatttttcatgccatagagaggatgttccataactcactgcagagacagaaaatcatgagagttcctttgtgtttctatcataagacagaagaatgtgtacca

SEQ ID NO: 320688 - DNA, 627 bp, Homo sapiens
gctcagtgattttgagggagcctgctggaaatcctctaaagatgtttcaaatattatttttgtggctagttttgtattgttggtaataaaagtttttgagagactttccatttctaaacacaaatcaaatatctctaattcttctaggaaagagaccataaaatctcttgattataataaaattttgctctctcaatttctaatgagaaccatggtagtgaaaataattttgacatatagaaattgttttgatgttttaataactagttatctgtatagtgtctggcttccagaatttctttataaataattctgatgttgattagccatgtggttgctaaccttgttccaagtgcatcacaaattcaaattttacaaaaaattaggaggaattatgtgatccacatgaatcactgatgccccggggaaagttttcgatggaaacctcacaatgtgggagatttggagaagaaactgactacataaggtatctgcttttkaaaggaatagttctattttgggaaaatttttcatgccatagagaggatgttccataactcactgcagagacagaaaatcatgagagttcctttgtgtttctatcataagacagaagaatgtgtacca

SEQ ID NO: 320689 - DNA, 570 bp, Homo sapiens
gtgagaaaattcaatatttaaagataagtaaaggaggaggctcatgtgtagagtctatatacaaattggaagtggtggtgactgaaaaaaatgcattaaaattaaccaaattttctcttttctaggcactgtcctaattgtagatgcttgagaaaatagagatgtaatcatggatacccaccaggtatttgagtcaggttcttcaatgcaaaagtcacatagaagctgctgctttaatgtttgtaacagacttccaaactaatgtctcttataatgtccctgtgtattaagatttccataaaaccattacaatttctatttattttgtctagatgtaaagcagacrgcatatcatattacatatattgctaaaattcttgcagcctaatgtatacagatttgtgaattttgagtgatctgaagttcatgaatattttgaggttggtttgttttgtcttgttcaaagcctagatatcatgttttttcagtttaacatatttcttgagggaaaagaaatgtttagatttccagctagttataaaattgtcagaaagaatagaagttaaacat

SEQ ID NO: 320690 - DNA, 595 bp, Homo sapiens
ggaggtcaaaataaaactggtagtcgtgaaagttgcacatggtaaaaattaccattgacaaaaaattggtgggagataaatacttttaaaaatatttgatatgcattatttgaccaaaagtgcttaacaagatagaaataataacaccttgggacaacttaaaaggcagaatctatagtcagcaaatcatgatgtgtaagagaagtcaagttatttatataaaacataattgatcttcatacagacattttcagtaaattccaaataaactgaatcaaaaaattgtaatgaacaaattataactggtttactgtgctgtattagtccattttcacactgctgataaagacawacacaagactgggcaatttacaaaagaaagaggtttaatggactcatagttgcacatggctggggaggcctcacaatcatggtggaaggcaaagaagagcaagttacatcttacatggatggaggcaggcaaagaaagagcttgtgcaataaaacttctttttatgaaaccatcaggtctcatgagacttattcactttcacaagaaccgcacgagaaagacctgcccccatgattcaattac

SEQ ID NO: 320691 - DNA, 578 bp, Homo sapiens
agtttggcagtctgtcctctgaccttcatttacaaggagtccaaagcttataattactattgattgctgttatttttgcctttagtttatatctgatcacaatgaacaaagacagatacagaatttcagattttggaaactgtatagaagcctgcaacaagtggatgacaaagaggtcctccaaaagctagtttgctagttgctctagttgaaaaatatataatagtgtctgctttcaaaaagatttaaagacatacaatttctttcaagtcttttttttttcttttgagacagaatcttgctctgtcacccaggctggagtgcagtggcgcgatctttgttcactgcaacctccgcctaccaggttcgagtgattctcctgcctcagcctcccgagtagctgggactacaggcaygggccaccacgcccggctaatttttgtatttgtagtagagacggggctttaccatgttggtcaggctggtctcaaactcctgacctcaggcgatccacccaccttggcctcccaaagtgctgggattacaggcgtgagccaccgtgcctggaccctcaagtc

SEQ ID NO: 320692 - DNA, 544 bp, Homo sapiens
tttatcttgtaaaactgaaatcctacactcattaaataataacttcctattactcccttaaccttggcacttggcaacaaccattctactttctgcctctatgattttgactatgctgagtacatcatattagtgcaatcacatagtatttgtcttttgtaactggcttatttcatttataaagtcctcaagtttcatccatgttgtagcatatatcagaattttcattttaaaggctaaatcatgaaggaatagaaaatctgaatatacctataacttgtaagtggaataaatcaataatcaaaaattttccaattaagaaaagccatggacctgatagtttcactggtaaattctatcaaatatttaaagaactaccaacaatttttaccaaacttttctaaaaacttgaagagaagggaayacctcctaactcatcagagtcctgataccaaaaccaaagacactatgagaaaacaaaactacagaccagtagctcttatgcacattgatgcaaaaatactaaaaaaattactaacaaacc

SEQ ID NO: 320693 - DNA, 544 bp, Homo sapiens
tttatcttgtaaaactgaaatcctacactcattaaataataacttcctattactcccttaaccttggcacttggcaacaaccattctactttctgcctctatgattttgactatgctgagtacatcatattagtgcaatcacatagtatttgtcttttgtaactggcttatttcatttataaagtcctcaagtttcatccatgttgtagcatatatcagaattttcattttaaaggctaaatcatgaaggaatagaaaatctgaatatacctataacttgtaagtggaataaatcaataatcaaaaattttccaattaagaaaagccatggacctgatagtttcactggtaaattctatcaaatatttaaagaactaccaacaatttttaccaaacttttctaaaaacttgaagagaagggaacacctcctaactcatcagagtcctgawaccaaaaccaaagacactatgagaaaacaaaactacagaccagtagctcttatgcacattgatgcaaaaatactaaaaaaattactaacaaacc

SEQ ID NO: 320694 - DNA, 574 bp, Homo sapiens
aatcaccaaccaacacacctttgtttgaatgacttcaaggcatcagctctccctggtttcagggaacaaaggagcaggagctgtaggatccagggcattgagagggaccccgcaaactttccttgtccccctattgccagcaatagctctggggtccagttcactcatgaggccacttcaccacagccagggcagtgactatgggttcatttccagtgaggactgaaggctctaacagayggtctttgccttattcaagatgagtagttcagtgctctgccatgttcttccttaccccacatctcagtcctccagtctctctctgattcactctgctgcaaaagactctgaggaagtagaaagcattttccaaggaccacggagttcagtaagtcatctacagggaacctggagccatagacactttctaaagtgtcaccttggggtgaccaacccatagcatcacaatatgtaaggaggtaaactgaggccctcttgcctgtagccctcctcaccctaggaggtcttgtctcagttgaaggtgcccagtatggtggacatagaaccccaagta

SEQ ID NO: 320695 - DNA, 582 bp, Homo sapiens
ggtgtttgcctaaatatgtagcaaatgatattttaattacaatttgagttgctaatcgttgtcaaataaaattttaataaaaaaaaaaatggggaaaacaatgtcgttgtcctaagcagtcctgcactgccctctggtggcctttcacttactatgtcttctcattgttgatttcaagcaccttctgcctttcttgatatttttacatttgactttaatttttttcactctgatagtattttggagtttaagaatgtcaagaaaaaaattaaattatcccttctgtattacaagaatcttaatacacttttatatgtaattcttttagcctaccagaattcctcattatgactttgtaatattttatggaatacaaattgtttacttaatatttcatattgataaggacactgtgctcagtttcctgggtawgttagtctgtaaatttccttacagctttttgaagtataattgatatattacaatgcacatcagccaaataaagattacaatttcacaaatctgggcacatgtatatatccataaaaccatcactgcgattagggtaatatacacgtatac

SEQ ID NO: 320696 - DNA, 579 bp, Homo sapiens
tagacccccccgaccccgaccacctcccatctgatcccactatcatctgaagttgtggaagtgctgtggtctcagctctgccaaaaatgaatggtgagatgctgggactttgcttctctggccttgttttccacactgtgtattgggtcaggggccgtgggaaggaaatggagccagccttcagggagcttttactcagtgcacatagaatcctttttattcctcagtgcatttagcacacacattttccagatgagaacaatgaggttccaaatgccacacaagttgcctgagcccacaaacgctgggattcaaggccagttgtcaacttgcacaactctttccctgctccaggaataggagtttgcatgggttagtgatggggctctctgatagctctaaaggrctttgaaggagttggagtataatttgggtgaaaaaccaacagaggtcattgaaggatcctactgaaaacatgccccccccccgccccgcattaacagagtccaccacataggtgtgaaatgcatgtatttttaagtatgataaatgataaagtagaaataatggctaccactt

SEQ ID NO: 320697 - DNA, 609 bp, Homo sapiens
cattatgtatgtcagatgtagaattgtttctttggataaatgaccttgaactggaattgctgaatcaaaggttaaaatacatttgtggttttggcagatatggccaaactgttttccactagaaggcaatttgtattcttatcagcaatgttcctatttctcyacagtctcagagtgtattgtcagacgtctaaatttgacaattttgttatattatgattgagactgagcatattttcatgtgcttaagattatttaggctgggcactgtggctcatgcctatgatcccagcactttgggagatggaagcaggaggattgcttgaacctaggagttcgagaccagcctgggcaacatggtgagacccccatctctataaaatattttaaaaattagctggtcatggtgacatgcgcctatggtcccatctactcaggaggttaaggctgcagtgagtcatgccactgaactccagcctgggcgacagtgaaaccttgcctcaaaaaaccccaagagtatttaatttctctttctgtgtactgtccatgaatgtcgtttgcccatttctctgttgtgaatagctgttctttttttacaaatcaatttct

SEQ ID NO: 320698 - DNA, 313 bp, Homo sapiens
atatagtcaacagaaaggggcaaagcaaggagagatgcttgtggagggtttccatggactaggtgtggaagtatcatatattccttctactcctcttctgttggcaagaacctagtyatgtagccatacccaatataagggaggctgggaaatgtagtctagctctgtgcccaaagaagggagaatggattttaagggacaactatagttctgtgtaacaatgaataacaaatttgggattacattgtttcttaagtatttatggaatatctactctatgccaagcactggactaagagttggaagagggcag

SEQ ID NO: 320699 - DNA, 582 bp, Homo sapiens
tgcacctgatctttttgacaaccaaaaataacctcataaaagtacaaaacaacgtgccccaggcttggggrcagggggcttggactggggcagagcccactgtctcaagagtggttgagtatctatggggagtggttatttcccatagataaccactgatgaatagaaattgaccaaacagccccaagagaagcctctttcactactttctgtgttcactttgccacataagggaatccaaggctagaaccagagccaaagggctctggagttctatgcaacctcccaatttaacgaaaggtcaagtcctaaatgatccagggcaagcaactaacgggtagtgattcttcctgtatagtacacttctaatcggagcccacacttctcgaatactgtctgcttctttcagtgtcagctcacctatactgagcacctcctctgcacccatgtagtttctcctcactgcctccccaattcctcaccactagcagctattgcagtataattcttgtgccatctggtttattgactattacaaaatcagtcatattgtggttgattgccttgcttaaaatattagtt

SEQ ID NO: 320700 - DNA, 582 bp, Homo sapiens
tgcacctgatctttttgacaaccaaaaataacctcataaaagtacaaaacaacgtgccccaggcttgggggcagggggcttggactggggcagagcccactgtctcaagagtggttgagtatctatggggagtggttatttcccatagataaccactgatgaatagaaattgaccaaacagccccaagagaagcctctttcactactttctgtgttcactttgccacataagggaatccaaggctagaaccagagccaaagggctstggagttctatgcaacctcccaatttaacgaaaggtcaagtcctaaatgatccagggcaagcaactaacgggtagtgattcttcctgtatagtacacttctaatcggagcccacacttctcgaatactgtctgcttctttcagtgtcagctcacctatactgagcacctcctctgcacccatgtagtttctcctcactgcctccccaattcctcaccactagcagctattgcagtataattcttgtgccatctggtttattgactattacaaaatcagtcatattgtggttgattgccttgcttaaaatattagtt

SEQ ID NO: 320701 - DNA, 621 bp, Homo sapiens
tcctctgcatttgttcatgaggcaattaaagctgatgggagaggcagtgattatggtgttaatgattaaccaaaagtagatctgtccaaagattccttttgtcgtggatctatttttcctgaccttatgtaagcaaaaagtactcatgtggctgggttccatctgtatacataatttcaaacatgctgtagtttagtttcaaataggggtattgttaaaattatttgcaatcaaataactcagcaaccaaagatgaataaaatgtaaactcttttcaagttgttcacaagggagatgagatataaaatcacttgttatgttctctctgctataaatatatttaaggaacaaagcaktctagaagctcagctaaaggaacaatgattgtcaggtgggggattcgaggaaggcttcctgagagaggaactactccagacattgaataatgttattaccaagtccccgctgttcatttgatgggtcataaactgatagaaatgaaagttttgtttttggtttttgctttcttttaggagtcaatatagagaggaagggaagtgagatgacagcacctagaggtctatcaagttgttgctctaaattttgcaagtgacaaagctg

SEQ ID NO: 320702 - DNA, 520 bp, Homo sapiens
ctctctgctataaatatatttaaggaacaaagcagtctagaagctcagctaaaggaacaatgattgtcaggtgggggattcgaggaaggcttcctgagagaggaactactccagacattgaataatgttattaccaagtccccgctgttcatttgatgggtcataaactgatagaaatgaaagttttgtttttggtttttgctttcttttaggagtcaatatagagaggaagggaagtgagatgacagcacctagaggtctatcaagttgttgctctaaattttgcaagtgacaaagctgcctatggtggttgtaaagtctgacaggctcttagagaaaggatgaggaatgtattgttcttgggctrtattgctaagaccaaaagaactatcagataagaaaaaaaaaaatgaactacagacatgttcctggaccatgcttgctgtctcaccctcattctaaatggtgcttgctgatgagagatgaaaaagaggaaggacagagattcaactcaaccaat

SEQ ID NO: 320703 - DNA, 595 bp, Homo sapiens
aaaattagaaagacaggcaataccaagtattggagaagatttagagcaactggaagtcttacacattaccaaggagagagtaaaagtgggagtacaaaatggcacagccacattagaaaacagtttgacggtttcttaaaacgttaagygtacacctatcccacaaccagatgttctatacttaagtctttatgccaaaaaaccacatcaccacacaaagacctgcatatggctgttattacagctttatttataacagcccaaactggaaacaacacaaatgtgcatgaaatgtgaatgaataaacaaattgtgataaagccatgcaatggcttactattcagcactaaaaaggaaccgactaccactatgtgcaacaacatggatgactttcaaaaccatcatgctaagtgatgaagccagacacaaaagatgacatcctgcatgattccacttatatgatatgctagaaaaggcaaacctatgatgacaaaaatcagatcagtagctgctagtggataaaggtatggggagagaattaactgtaaaggggcacaggagaagttttggaattatgaactaatcccatatgttg

SEQ ID NO: 320704 - DNA, 577 bp, Homo sapiens
taagtgactccattttgtattgtcagcttccacattagatactccccatgaggccacaaggtacaggttgggagagagaaggcattgtaacaagagtaggaaccacaggcatttggaccacttcttataacttatttctgccttcagatcckgttcaggctcaatcatatacatatgtgtgtgtatgtatgtatgtatatatatatatatatatatatataacttccattggatgatgaagtattgctgtgtatggcaactttatgggttggtggaccagataacactaagttcatgatgggcagctcagggcacatcgtaacttagtggcccacgcatgatcaagcattcagtttctactaagtcccagtagcaggtcaaaagctatctcttaaaagaagattagttatctgtagatgatggtagtgccttgctccaaaatcctaaagacaggagctgcaattcacctgtaggatgccaaaggctcccaacagcgtccctctctgctgctaacacctcaagtaccattgaacctgctggagcaatggtacttgtggcagaccaagtggcagaccag

SEQ ID NO: 320705 - DNA, 577 bp, Homo sapiens
taagtgactccattttgtattgtcagcttccacattagatactccccatgaggccacaaggtacaggttgggagagagaaggcattgtaacaagagtaggaaccacaggcatttggaccacttcttataacttatttctgccttcagatcctgttcaggctcaatcatatacatatgtgtgtgtatgtatgtatgtatatatatatatatatatatatataacttccattggatgatgaagtattgctgtgtatggcaactttatgggttggtggaccagataacactaagttcatgatgggcagctcagggcacatcgtaacttrgtggcccacgcatgatcaagcattcagtttctactaagtcccagtagcaggtcaaaagctatctcttaaaagaagattagttatctgtagatgatggtagtgccttgctccaaaatcctaaagacaggagctgcaattcacctgtaggatgccaaaggctcccaacagcgtccctctctgctgctaacacctcaagtaccattgaacctgctggagcaatggtacttgtggcagaccaagtggcagaccag

SEQ ID NO: 320706 - DNA, 552 bp, Homo sapiens
tacatatagcagcaccaagagattttactttccccagagcatttgctcatagtatctatgtatattttcatttatttrtgttttgtctttttgttttgttgaagggttgggggcggaaatgatgtcaagataaatgaaccatgaaacccaatttataaaagagctacccagaattgcagcaaatgcacggatactcccatctcaaatgcacacctacaacatgagctatgaaacccagtttataaaagagctaccctgaattgcagcgaatgtagggatactcccatctcaaatgcacccctgcagtgacatctgtcaggagcctatggagacagctgcctcacccagaaggcctcttgcatttttatttttgcaaatattcagcagggatggaggggactgcatctgctctctccactttcttcctggagagaggaggacatgaaggagaacagaaggcaaggacaatacattccactcacatttctaagaattccatgaccggaagctgccacaaaaataatgcaaaagtctgtcaccaatcacagatgc

SEQ ID NO: 320707 - DNA, 558 bp, Homo sapiens
gttactctcttttcttgcataatctaaaaagccattgctttaagttcctgtatcatgtggctggcaatacatggaaagatacatcaattcatattaatgtttaaaggagcaggtaaagaacttgcctaggcttcaagataaagccaaaagcttcaagatggctccttcaaagaggttctttggcctggacctaggtagttgcaaattcatagtcgtattttcacttgctctgccttttgatgtgaaatgttgatccagttactaaacattcctgtgccttaatttcgtcctctgaaaaaaagtggatataatagaatttacttcatatggtggctatgaagattaaatgacatttaacaaaataatccatgcaacacacttagaacagatcaccaaaccttggaagcaratgcttaggatgattttgatttttaacagatgactattgtcttttaacttcccagggaactttgagaagatgtgtttgattggaaggcatgtgaatattcctggagcttctaatcaaagaccatgaaataccattgcaatgacatgaag

SEQ ID NO: 320708 - DNA, 612 bp, Homo sapiens
ttcatttggaaaaggaccgaccctataggcctttcyggaatgtgggattgataaacactaatcaatactcccttagcaagtggtgcatgcctcttttcattccaaatttctggagataaatatttggattataactctcatctgaatgtttgaagctgctcccagcactctattgtccttttcatttttctgtcttagccaagcaggggaatgtacctgttgagattcagccattatgcctttggaacctggcatttttcaggaggagccatgcaccactatcacgggggcaaagagcactaggcaaggctggcagagtattctcatagcctcagttaattgttttaggagcaggtcagtcacaccaccgtgggtattcaaactggaaggaaccttacaaagaactcagtctagtaatttccatagtatgttccctgaggccctagagttctaccgagtgaactgagggtccccagaaggtgggggaaaactaaactagaagaagcactctgttttcactagagaagttcctctttgatttgtcctgtataatgcaattttatataaagtttggcctgaaatgaagtattttgcagaaataattggaaggaa

SEQ ID NO: 320709 - DNA, 609 bp, Homo sapiens
ctgtcttctccaattcccaatgcactgcaccactgctgcagacaaacagtgagtctgaagtgaagcgggagggrgttggtagaaataaggccccacccagcgtgaagcttccagatgatctgggggccacgcgatgcaggtgctatcagcaagtagcaggctgcatggctggcttgtgagttattgctgtggtcacaagatctccttgctgtagcattctgcgtgtgtaggtgataaatcttagggacacgagggaacacatcaggcttctctcctctggcccattatttttctcctacatcatttagaaaagtgcaggtctggaccttttaattttttttttttttttgatcatgaatgttttcttcagctccatgccacatttccttctgcatgttcaattttcacaatggagtgtatttttaaagcgtggctcaatagaagatgagagaacagaaaccttaagcaggagacaagagaaagagacaaatacacgcatttgctctctttgttctcttgcgaatggcgatgtgaaagtctggtggagtcagatatagttcctgcttgcaaagggagcaaaagggaaagaaacttacatcttttaagacc

SEQ ID NO: 320710 - DNA, 513 bp, Homo sapiens
gatctgtccaaggtcacatggtcaatagaagaccaggtttatatcttcscatagtacttagaataaaatccaacttcatacattggccttcaaagacttaattggaatagtttctatcttcctgtttctctaattgtggaaggtgcaaccatagccccagttctccacccttcctggtgttcagatcccttgccatgtaaatataccatatctgcctatgctggctcagagatcaggcttgttgtgtgcattactaataaaatataatggtatgctggttccaaacctaagcctgcaaggggcattgcatgcttttttgcatccttgtgcctttgacatttctggagaacatgtctggactacactgccagaagataagagacctgtgaaacagaacttagagctgatcccaagctgacccccagatacatgaacaataaatataatgttaaaaaccactggaacttgtagttgtttgttatgcagcattgttctatcaacaatagctgaaac

SEQ ID NO: 320711 - DNA, 513 bp, Homo sapiens
gatctgtccaaggtcacatggtcaatagaagaccaggtttatatcttcccatagtacttagaataaaatccaacttcatacattggccttcaaagacttaattggaatagtttctatcttcctgtttctctaattgtggaaggtgcaaccatagccccagttctccacccttcctggtgttcagatcccttgccatgtaaatataccatatctgcctatgctggctcagagatcaggcttgttgtgtgcattactaataaaatataatggtatsctggttccaaacctaagcctgcaaggggcattgcatgcttttttgcatccttgtgcctttgacatttctggagaacatgtctggactacactgccagaagataagagacctgtgaaacagaacttagagctgatcccaagctgacccccagatacatgaacaataaatataatgttaaaaaccactggaacttgtagttgtttgttatgcagcattgttctatcaacaatagctgaaac

SEQ ID NO: 320712 - DNA, 539 bp, Homo sapiens
atttctgacaagcagctctagcattcagagccttaggcaagctttgtgtctcccatagtgatgtataactggccagggaggttgcagagcccagtgttcaagactaatcaacacctcttcagatattctgtgcaaagctcccttttccttgtctgcaaaacctatcagcaggaggtactttatttaggaacgaatggctgagttcagtacccygtttgaaaggaggaaaataatttttattttattttagaatcctcataatccaaccatatgctctcagtttcttatttaattggttccacgtatactttggggataaagctaagttctagggtttagtcatcaggctatctctgcaatacttttgtgatgtggaatgggggttatcggatactcatcttcaaaaacctttaatgattcccacccaattacgtgtagaaaaacttaaaccccttagcctgactttcacagtatgacaccaagcattgcattccccattatttttactatttcctataaatatcgtctactccattcag

SEQ ID NO: 320713 - DNA, 610 bp, Homo sapiens
aaggattctaaatagggagggtgtatagtctgcgtctgtgtccccacccagatctcatcttgaattgtagctcccacaattcccacctgtcatgagagggacccagtggacggtaattgaatcatgggggcgggagttcccctgcacaagctctctcttccctgccactgtgtaagacgtgacttggtcctccttgtcttctatcatcattatgaagcctcctcagccacgtggaactgtgaatccattaaaataaattacccagtctcgggtatgtctttattagcagtatgaaaatggactagtatagtttggttctgtgtccccacccacatctcatcttgaactgtaatccccacgtgttgtgggagggacctgttggaaagtaattggatcatggagtsagtttccccatgctgttctcatgatggtgagtgagtctaatgagatctggttgtttgataagtgtctggcgcttcctccttcactctcttgcttgcctgcctgtcgccatttaagaagatgcctgcttccccttcactttctgccatgattgtaagtttcctgaggccccctagccatgcttcctgttaagcctgcagaactgtga

SEQ ID NO: 320714 - DNA, 544 bp, Homo sapiens
gaaaccaccgtatgtgaagaggagcccatttttcccgcagtttggtgcagattattccattgctttcacggaggctgtgaaaaatgttctcggaggacttatctatcaccatcaggacaaagagacagccacagcccctgagagagtgaygggaagaaaggcaggcaccctgttagtgatgggaccgctgagcattgatctggaataactggacttctgctaagcctgtgcacctgttacaaacacacacatgtgcacgtacacaaacaggaacactacatgcatacatatgaatacacacatgcataaaccatgttatacatgcaccaacataaatacacatggatatacaccacgtgcccacacactcctccattgtacatggcaaacgaaatcacacatttgcacacccagccacattcatgaacaataccacatacagcattgatcaaacacctttcccagcactggccaagcctgctaatgagatgtggaaggctggcatgcccaatgtgggtttcatgctggtgagagtcaatgggca

SEQ ID NO: 320715 - DNA, 544 bp, Homo sapiens
gaaaccaccgtatgtgaagaggagcccatttttcccgcagtttggtgcagattattccattgctttcacggaggctgtgaaaaatgttctcggaggacttatctatcaccatcaggacaaagagacagccacagcccctgagagagtgacgggaagaaaggcaggcaccctgttagtgatgggaccgctgagcattgatctggaataactgracttctgctaagcctgtgcacctgttacaaacacacacatgtgcacgtacacaaacaggaacactacatgcatacatatgaatacacacatgcataaaccatgttatacatgcaccaacataaatacacatggatatacaccacgtgcccacacactcctccattgtacatggcaaacgaaatcacacatttgcacacccagccacattcatgaacaataccacatacagcattgatcaaacacctttcccagcactggccaagcctgctaatgagatgtggaaggctggcatgcccaatgtgggtttcatgctggtgagagtcaatgggca

SEQ ID NO: 320716 - DNA, 535 bp, Homo sapiens
tgggcttttggaaaggttagcattgctccttacagaagccacagactcgccttgctatgcaccatccccatctctccccgccamatgtcttccagacttttcctgtacaatccaggaagcaccagaaaagagagacatcacagcttccacaagcaatacaaaattaacctgcttttcagtcaagggagaatgaacctccaaacaaacaaacaaaaaagccctggggttggggaggaattttcaaatatatatgcatccccttccctccactgaagatttttctgtcatttacatgaactaaacagggtccacctgccttggatgctcaccacctgcttttgtgtccaatcgggcaccggatccaagtctttctccaaagcccgctccccacctttgttttttttatatacctctttaaaaaaaataccctttgagtatggttattttatctggggtcagtgctcagtcaactgttaaataaattgcaaattctacaaaacacagccagcagagccatttctaactgtaatgccac

SEQ ID NO: 320717 - DNA, 535 bp, Homo sapiens
tgggcttttggaaaggttagcattgctccttacagaagccacagactcgccttgctatgcaccatccccatctctccccgccaaatgtcttccagacttttcctgtacaatccaggaagcaccagaaaagagagacatcacagcttccacaagcaatacaaaattaacctgcttttcagtcaagggagaatgaacctccaaacaaacaaacaaaaaagccctggggttggggaggaattttcaaatatatatgcatccccttccctccactgaagatttttctgtcatttacatgaactaaacagggtccacctgccttggatgctcaccacctgcttttgtgtccaatcgggcaccggatccaagtctttctccaaagcccgctccccacctttgttttttttatatacctctttaaaaaaaataccctttgagtatggttattttatctggggtcagtgctcagtcaastgttaaataaattgcaaattctacaaaacacagccagcagagccatttctaactgtaatgccac

SEQ ID NO: 320718 - DNA, 596 bp, Homo sapiens
gactacaaagtgaggataagatttttaactcgtgtgctcctattaccagaggaaactctctggaggcaggcaggagcaaccaatatggcctgagaaacacaaaggtggaggaaagatgtgtttgtttktagaggaggagttaatggggcccagtttgcagaagttcacttattcagtgtgatggttgagtttatgtgttcacttgattgggccatggagtgcccagatgtttggtgaaacattattctgagcattcttgtgagggtgcttttgggtgaggttaacatttaagtcattagactgagtcaagaagatggcactccataatgggaggggacttcatccagtctgttaaaggcctgaatagcacacaaaggctgacccttccccaaatttctcctgcctgcctgcctttgaactgggaaattggcttttttctgcctccaaactgaagcttagacattggctgcttttttggggtttcaggcctggtggccttttgactgaaatgacacccttgtctcgcctgggtctgcagtttgcttactcactctgcagatctcgggacttgtcagcctccaaaactgcatcaacga

SEQ ID NO: 320719 - DNA, 500 bp, Homo sapiens
aagtggatccttttccctcttcctatttyctgctgcctgggatggggccatgatggctggagttccagcagccgttttgggaccacgaactgaccctgaggatgaaagcctgagttcctaagccattctgtcagccctgagctgcctgtctctaaactttatttatttatttatttatttatttattttgagacggagtgttgctctgtcacccaggctggagtccagtagcacaatctctgcttactgcaagctccgcctccaggttcacgccattctcctgcctcagcctcccgagtagctgggaccacaggcacctgccaccatgcccggctaatttttttcgtatttttagtagagatggggtttcaccatgttagccaggatgggctcgatctcctgacctcgtgatccgcctgccttggcctcccaaagtgctgagattacaggcatgaaccaccacgcctagcctctaaactttatttttaatgtgagggtgg

SEQ ID NO: 320720 - DNA, 567 bp, Homo sapiens
ggacacaaccatctcactctttctcctggtaaaggattatttactagtggtgaaatatccttgattcttggccaayagcaattaggagatggcatttcagaagataaggaacagaagtgtgacccctgtaccctggttggtacctctctagtccccatgctactggtaatatcaccacaagcacaatgccagtaagccaatcagagtctctctgcagtttactggggaatttcacatcttcttccttttccacttgttgatgattgagagagaaacaatcacaccatttctttcctccattgaaacagacacacaatagttaaacactcaaactggctaatgtagtgtacattacaacggaaaccagtgagcaaaaacaagttttaggattgagtagttgccaacagagttaacccaacaactaaatacttcacataaagtttcttttgaattccttgtttccttacagagctacacggtcctcattccatcaagttctgggttggcaagatggcagaacccataggatgttctggtggatgggatgtggggttcttaaaaaagaaa

SEQ ID NO: 320721 - DNA, 567 bp, Homo sapiens
ggacacaaccatctcactctttctcctggtaaaggattatttactagtggtgaaatatccttgattcttggccaacagcaattaggagatggcatttcagaagataaggaacagaagtgtgacccctgtaccctggytggtacctctctagtccccatgctactggtaatatcaccacaagcacaatgccagtaagccaatcagagtctctctgcagtttactggggaatttcacatcttcttccttttccacttgttgatgattgagagagaaacaatcacaccatttctttcctccattgaaacagacacacaatagttaaacactcaaactggctaatgtagtgtacattacaacggaaaccagtgagcaaaaacaagttttaggattgagtagttgccaacagagttaacccaacaactaaatacttcacataaagtttcttttgaattccttgtttccttacagagctacacggtcctcattccatcaagttctgggttggcaagatggcagaacccataggatgttctggtggatgggatgtggggttcttaaaaaagaaa

SEQ ID NO: 320722 - DNA, 565 bp, Homo sapiens
acatggtatttggctggggacataaagccaaaccatatcaggtgcctagtattatcaggaattaagtcaagccttttacaaaataagttatttttttaatactcaccagaaccctgataatttacaatccattaagtgaacacccactatatctcatttagtgagataaatgagacatatttggtgccataaaggatctcattgtaggaaatatgaccccatttaaaagaaatagttgagtctaggggtgaagtaatttgttcaatgtcacacagctggtaaatgtcacaattgattaattgattgtcaatgctatgtgcatgtgatgtcaaaactaygactctttttactcttcttacttctattatcccttccatctgaaaggcagaagatcaaaatgctacccatattacagaaaaatatgaaagacaaccaacctacatgtttaagcacacttgcaacttttaatccatatgagcaaatggtgaccattttattacaaatcaatctgattatttaaagcaggagttctacaggactcatatttagtcacactttgtgttat

SEQ ID NO: 320723 - DNA, 449 bp, Homo sapiens
agaccagtgtttacactctcttctgtaggttgtacaataacctttggcgagaaaaaataaaagtctggctttctgactcataggtgtgttccctttaagagaaaaagaaaatatgtcctctttaaaactgatgatcattggtcacctcaattttattgaagttcacttctgacctctttctctacataaaactgcccaacagaattctctgtctgaatgcctyctccacaaacaaaattttaagaactaaaatcatcatctttccttccaaatgtgctctccctatgtccccagggctctccatgtgtagagctgagaccatttgccactcagtttcccctcacccaattaattacaagtcccaacaattttccttttttttttttttttttttagatggagtcttgctctgtcaccaggctggtgtgcggtggtgcaatctcagctca

SEQ ID NO: 320724 - DNA, 449 bp, Homo sapiens
agaccagtgtttacactctcttctgtaggttgtacaataacctttggcgagaaaaaataaaagtctggctttctgactcataggtgtgttccctttaagagaaaaagaaaatatgtcctctttaaaactgatgatcattggtcacctcaattttattgaagttcacttctgacctctttctctacataaaactgcccaacagaattctctgtctgaatgcctcctccacaaacaaaattttaagaactaaaatcatcatctttccttccaaatgtgctctccctatgtccccagggctctccatgtgtagagctgagaccatttgccactcagtttcccctcacccaattaattrcaagtcccaacaattttccttttttttttttttttttttagatggagtcttgctctgtcaccaggctggtgtgcggtggtgcaatctcagctca

SEQ ID NO: 320725 - DNA, 449 bp, Homo sapiens
agaccagtgtttacactctcttctgtaggttgtacaataacctttggcgagaaaaaataaaagtctggctttctgactcataggtgtgttccctttaagagaaaaagaaaatatgtcctctttaaaactgatgatcattggtcacctcaattttattgaagttcacttctgacctctttctctacataaaactgcccaacagaattctctgtctgaatgcctcctccacaaacaaaattttaagaactaaaatcatcatctttccttccaaatgtgctctccctatgtccccagggctctccatgtgtagagctgagaccatttgccactcagtttcccctcacccaattaattacaagtcccaacaattttccttttttttttttttttttttaratggagtcttgctctgtcaccaggctggtgtgcggtggtgcaatctcagctca

SEQ ID NO: 320726 - DNA, 449 bp, Homo sapiens
agaccagtgtttacactctcttctgtaggttgtacaataacctttggcgagaaaaaataaaagtctggctttctgactcataggtgtgttccctttaagagaaaaagaaaatatgtcctctttaaaactgatgatcattggtcacctcaattttattgaagttcacttctgacctctttctctacataaaactgcccaacagaattctctgtctgaatgcctcctccacaaacaaaattttaagaactaaaatcatcatctttccttccaaatgtgctctccctatgtccccagggctctccatgtgtagagctgagaccatttgccactcagtttcccctcacccaattaattacaagtcccaacaattttccttttttttttttttttttttagayggagtcttgctctgtcaccaggctggtgtgcggtggtgcaatctcagctca

SEQ ID NO: 320727 - DNA, 587 bp, Homo sapiens
ttttcacttttctgcaaaatatttaatacattattaaattgaattatgctgacgccacagttgttcttatctcaattgtcttaaaattcatttaatttttttttcctttggtttcattattcaaattttaacttcagttctcaagattttatctgatggaagagatggagtccattactaaggactccattgtgctccatcatgccagagttgtaaaatagatcttttaaaggaaatttattatgatttttttctatttaagagcttcctctccagttgagcatgtaagaaaattacaccaggagaatacagtaaactctatgaggcaagctataaacatgtagcattgtgattagggctggttctccttctagagacatggtaggattgcaatttcataccatccttgaagttagagagagccacgtgactcatttagccaatgaayggtgagcagaatgacatgtcacttccagcagaagctttaagaatctgagagacattcatacgttttccatgtgctgtagccttatacccaaagcctgggtcccaagtgaccatgacaggcagagctcccagttgagcca

SEQ ID NO: 320728 - DNA, 595 bp, Homo sapiens
cttctagtccctagagttcccaatctcctaccatcccatcctaatatgacagaagtaattcctgagttgcttctgaaaccagagcttccctcagaacccttagcctgccagatggcttcttggagagccctcactcacttttctccttctgctattgctgctcattcattccagcttttaaaaattcatctttatccaggaacctcgcttctagaaaagtcatacaggtgcttccaggaggctacatgggcacccatatttttctagccacwttcattagaccaatgcagcagagaagaaaagcctcaataattattatgacatggcatgttaggataccaagtaaattgcatttgtaaaatgtgattttctgttggtgttcacttctgctctactgacatttggtaagtattattgactgactgactaactaatgtggtcattagtcttcataaagaaaggctctctacaaaaacggagggatgccctttttctggcatttaatacgtaagaaattgcctccgatggaaaccagagttgcctgattactatcagcacaggagaaatgtattaatgtgcctttctagtaacaggt

SEQ ID NO: 320729 - DNA, 595 bp, Homo sapiens
cttctagtccctagagttcccaatctcctaccatcccatcctaatatgacagaagtaattcctgagttgcttctgaaaccagagcttccctcagaacccttagcctgccagatggcttcttggagagccctcactcacttttctccttctgctattgctgctcattcattccagcttttaaaaattcatctttatccaggaacctcgcttctagaaaagtcatacaggtgcttccaggaggctacatgggcacccatatttttctagccacattcattagaccaatgcagcagagaagaaaagcctcaataattattatgacatggcatgttaggataccaagtaaattgcatttgtaaaatgtgattttctgttggtgttcacttckgctctactgacatttggtaagtattattgactgactgactaactaatgtggtcattagtcttcataaagaaaggctctctacaaaaacggagggatgccctttttctggcatttaatacgtaagaaattgcctccgatggaaaccagagttgcctgattactatcagcacaggagaaatgtattaatgtgcctttctagtaacaggt

SEQ ID NO: 320730 - DNA, 451 bp, Homo sapiens
agggttccagtctctgcggtgaggcagtggcaagagctccgtgggcgggaagaatattaggccagagcttagaacaggactgcagaagcaagcatggaatggaagcacatctggtgatctgtgacatacaaygagcctgcagatcacaggcaatgatttttggaaactcatcacacagtagtttgaagcagcaggaacgatttgatccaaagtgccatgtgaacacttccgagtctacaaatgctttcataggtcaacctaagctgttcctcccaaccaacctgtctggcaattagaaattaggaaattaaaactcagagtgtctaaatagcatgcacaaagccacacagctcactggttcagtagcctagacctgggtcccactctgtctgacaccaaacctcacacttttcaaataattctcccttccactgggggaagggctgggtct

SEQ ID NO: 320731 - DNA, 451 bp, Homo sapiens
agggttccagtctctgcggtgaggcagtggcaagagctccgtgggcgggaagaatattaggccagagcttagaacaggactgcagaagcaagcatggaatggaagcacatctggtgatctgtgacatacaatgagcctgcagatcacaggcaatgatttttggaaactcatcacacagtagtttgaagcagcaggaacgatttgatccaaagtgccatgtgaacacttccgagtctacaaatgctttcataggtcaacctaagctgttcctcccaaccaacctgtctggcaattagaaattaggaaattaaaactcagagtgtctaaatagcatgcacaaagccacacagctcactggttcagtagcctagacctgggtcccactctgtctgacaccaaaccycacacttttcaaataattctcccttccactgggggaagggctgggtct

SEQ ID NO: 320732 - DNA, 550 bp, Homo sapiens
agtgatttctgtaaggtctcagagccaatagacactggtaatgaaataaaatgcaacgccccttatctttggagcccagtgttccttccacataggtggttctccacccaggctgcccaggagaatgtggaatctccagcagttctgacttaactggcctggtgtggatgtctgtgatgggtgaacattcccagacccttttaagaacctgatagaagtggtggacccacttcccagaaaaagggacgcacaacaaaataattgtcctgagtgggtctgacagaatcaagtgaaccctttaaatctggatctagaggtcagagactgagaatgtcagagatgcaaaagagattcagtgcaagagaaatcctcctactggttttgaagatagatgttggcascctgtgtcaacaacctgagagtggccttgagttgctgggagcaccccagactgacaaacagcaagaagaatatggggacctcagtcctacaaccacaggaactgaattctactgacaaccagtgagcttgcaaagaggacttggagccc

SEQ ID NO: 320733 - DNA, 556 bp, Homo sapiens
tgcaacacccaaacttctgacctatagaaaccctgagataataaatgggcattgctctaaatcaccaagtttgtggtaatttgttacacagtcataggaagtgaattgacctgatgtatctgagcacctgctaggttatcattaagattactcttcaaaggtaaaaattatttttcaaaatgtttctgccctaccttccgtgagcatctggtgatggatrgacacacacacgtcaaggtagactgtgtttaggtgggcatggtggtgcatgcctgtggtcccagctactcaggaggctgaaagaggaggatcactagggcccaggagttcaaggctgcagtgaagctgtgattgagccattgcactcaaacctgggcaacagagcaagacaccagctctaaaaaaaaaaaaaaaaaaaaaaaactgctgaatgctataaataagattggaacttgctctgcttttacaagaccactgttagatgaccactgacaagaagactgagctggtctctgtaggaagcaggggcctgggcagctctgggggcagaggagac

SEQ ID NO: 320734 - DNA, 556 bp, Homo sapiens
tgcaacacccaaacttctgacctatagaaaccctgagataataaatgggcattgctctaaatcaccaagtttgtggtaatttgttacacagtcataggaagtgaattgacctgatgtatctgagcacctgctaggttatcattaagattactcttcaaaggtaaaaattatttttcaaaatgtttctgccctaccttccgtgagcatctggtgatggatagacacacacacgtmaaggtagactgtgtttaggtgggcatggtggtgcatgcctgtggtcccagctactcaggaggctgaaagaggaggatcactagggcccaggagttcaaggctgcagtgaagctgtgattgagccattgcactcaaacctgggcaacagagcaagacaccagctctaaaaaaaaaaaaaaaaaaaaaaaactgctgaatgctataaataagattggaacttgctctgcttttacaagaccactgttagatgaccactgacaagaagactgagctggtctctgtaggaagcaggggcctgggcagctctgggggcagaggagac

SEQ ID NO: 320735 - DNA, 556 bp, Homo sapiens
tgcaacacccaaacttctgacctatagaaaccctgagataataaatgggcattgctctaaatcaccaagtttgtggtaatttgttacacagtcataggaagtgaattgacctgatgtatctgagcacctgctaggttatcattaagattactcttcaaaggtaaaaattatttttcaaaatgtttctgccctaccttccgtgagcatctggtgatggatagacacacacacgtcaaggtagactgtgtttaggtgggcatggtggtgcatgcctgtggtcccagctactcaggaggctgaaagaggaggatcactagggcccaggagttcaaggctgcagtgaagctgtgattgagccattgcactcaaacytgggcaacagagcaagacaccagctctaaaaaaaaaaaaaaaaaaaaaaaactgctgaatgctataaataagattggaacttgctctgcttttacaagaccactgttagatgaccactgacaagaagactgagctggtctctgtaggaagcaggggcctgggcagctctgggggcagaggagac

SEQ ID NO: 320736 - DNA, 538 bp, Homo sapiens
atccctctccaacatactgagcaatgtctgatattcgtttcccaaaaaacctcacctttctttacacatgtataaaagtggcaaaaaaaaaaaaaaaatgcatggcagagtacaatgacttacaacctgggcctctaaggagaagtgaaaggcttatgtacaagaaagataaaggaaacaactagggatcctgggaagccgtagactcatttctgcctttttgcactgactgaggccgggccccaaggaagatgtgggttgaattgcttccagaactaattgctctgggctgcagtgatagtcttcagttccttgctgacttcaattaagtggaaaaacaatccttagtggtctttcttgctaaaaattgctgagtaatatcccaaattcttcaggtctcagaccaacatagcatagttaaaaagtattgtacataagtagaagtctaggccccagggcactagtgcactggtatggaacagatatggacctacacagaaatmgggcaagtgtgtcttttctattggaatatcagtaa

SEQ ID NO: 320737 - DNA, 397 bp, Homo sapiens
gaaacaaacaaacaaaaatctgcttcaagcattatggccttgaaaaaaatatttcatctatatragttaattgtctcatgaaactgttttgaagaatagatggttaatgtatgtagagctgtgtaacagcacctagaacatcaaagtaggtattactgtgattattactgagccctccttcccctcataacctatcctcatgttctctctcctccctcctattcctgaagggactgaaaatttagtttatgccaatgggatagtggttaaagagatttcatatgtaacccctcccaatggcattagatggagataatgaaagaagtaagtggagtgtttatcaaatgaattccagctataagtcaaccactgcaacagctgtttaggaaatgtgaca

SEQ ID NO: 320738 - DNA, 397 bp, Homo sapiens
gaaacaaacaaacaaaaatctgcttcaagcattatggccttgaaaaaaatatttcatctatatgagttaattgtctcatgaaactgttttgaagaatagatggttaatgtatgtagagctgtgtaacagcacctagaacatcaaagtaggtattactgtgattattactgagccctccttcccstcataacctatcctcatgttctctctcctccctcctattcctgaagggactgaaaatttagtttatgccaatgggatagtggttaaagagatttcatatgtaacccctcccaatggcattagatggagataatgaaagaagtaagtggagtgtttatcaaatgaattccagctataagtcaaccactgcaacagctgtttaggaaatgtgaca

SEQ ID NO: 320739 - DNA, 552 bp, Homo sapiens
aacagataatgatctgaaagtgctattaaatagcagagaatttcagtatttgctaggtttaagtaggtaggaagcaaaagttacaaaatatcagacctttgatgtggtttttttttttcttagtattttttttcaagcatggtcctagaagcaccttcataagaatcttcttaggtacttgatacaatgcagatttaaaggccctaccccaattcattgaatcagaatctctgggaataaatttctggaatctgctttttactaaggtccctagatgattcttatgcacactaaagtttcagaaactatagatctagtccatttttctcattttgtcaaygcaaatctaagattcggaaagagtcacctctgctaaccacttttgggatcaagattataacccataccttcttagttcatgtctgtgtccttttccaccaaccaatcagactacaaaggtgaaccatataaccaagctttcctacttctatattagtaggtatgctttgcataccaaccttgcccgaaataattttccatactgtttgtcat

SEQ ID NO: 320740 - DNA, 537 bp, Homo sapiens
ttgtagacacctttcatcagattaagaatatcactgtttctaatttgctatgagttttcattatggggtcagatgctaaatttgtcaagtattttcttctgagctattaatgtgatcatayacttttttctctaatatattgttagtgtgatgaattacactgaataatttttaaggataaataatctggcattactgaaataaaaccaacttgatcattattgtattttttctacatattgctggattcaatttgctaaatatatgtaatttagaattttttgtatctatatgtttttactaaaatggatctgtaatttttattcttcatattcttgctaacctaatatgatgtgttggttactacacccttttttgtattcattaaaattgtttatataagagtaaagttatttttaccctaaaatatttgaaaaaaattctccagtaaagccatttaggcttggtgttcactctatatttctatacccatgaaataatgtaattgtttatatagtcagtattcatatagattta

SEQ ID NO: 320741 - DNA, 622 bp, Homo sapiens
gtgtggtgttactttaaacacattctgactcttagagtgggaagaaaatattacagctggatgtaaacaagagattcaaaccagaaaattaagggcaaatggcagtcaaggagcaacaacaacaaaaagcttcctcatggatgaatgatatgggtgaacatcttgaaaaggccatttgaagtggggaaaaatcagtgtctacttttcctgaatgaagatgcatacaatctgtttcagcccgaaggctgcacaacctcatagattttataaagaaataaattattttcracatggacctaacatttttttataccaattataccattattcacattgctctcctgagatgattcaacatgcatgaattttaaaatacagctttacagaacttcatctcataaatctctctgaaaaaatccatcaggtgttataacgggaagagccttactctcttaatggtttcaagtttccaggcactaaagggaaatggactgaggagttaaatctatccttgataaacctacctatactcacaacatcaaataatactagaaggtgaaagtgattacagtcttttaagacaatctcaaaaagagacctaagggaatttttgctgccttac

SEQ ID NO: 320742 - DNA, 622 bp, Homo sapiens
gtgtggtgttactttaaacacattctgactcttagagtgggaagaaaatattacagctggatgtaaacaagagattcaaaccagaaaattaagggcaaatggcagtcaaggagcaacaacaacaaaaagcttcctcatggatgaatgatatgggtgaacatcttgaaaaggccatttgaagtggggaaaaatcagtgtctacttttcctgaatgaagatgcatacaatctgtttcagcccgaaggctgcacaacctcatagattttataaagaaataaattattttcaacatggacctaacatttttttataccaattataccattattcacattgctctcctgagatgattcaacatgcatgmattttaaaatacagctttacagaacttcatctcataaatctctctgaaaaaatccatcaggtgttataacgggaagagccttactctcttaatggtttcaagtttccaggcactaaagggaaatggactgaggagttaaatctatccttgataaacctacctatactcacaacatcaaataatactagaaggtgaaagtgattacagtcttttaagacaatctcaaaaagagacctaagggaatttttgctgccttac

SEQ ID NO: 320743 - DNA, 622 bp, Homo sapiens
gtgtggtgttactttaaacacattctgactcttagagtgggaagaaaatattacagctggatgtaaacaagagattcaaaccagaaaattaagggcaaatggcagtcaaggagcaacaacaacaaaaagcttcctcatggatgaatgatatgggtgaacatcttgaaaaggccatttgaagtggggaaaaatcagtgtctacttttcctgaatgaagatgcatacaatctgtttcagcccgaaggctgcacaacctcatagattttataaagaaataaattattttcaacatggacctaacatttttttataccaattataccattattcacattgctctcctgagatgattcaacatgcatgaattttaaaatacagctttacagaacttcatctcataaatctctctgaaaaaatccatcaggtgttrtaacgggaagagccttactctcttaatggtttcaagtttccaggcactaaagggaaatggactgaggagttaaatctatccttgataaacctacctatactcacaacatcaaataatactagaaggtgaaagtgattacagtcttttaagacaatctcaaaaagagacctaagggaatttttgctgccttac

SEQ ID NO: 320744 - DNA, 592 bp, Homo sapiens
ccttctaactagcctccctttatgcacttgacatccttcagtctattctcagcaaggcagccagatgttagtccttggatcaaaatcattcattctattttagaacaaaatccaaagtttttacaaagaactttaaggtcctacagagactgacactgacactcctctaatgttccctctttctacaatctcccccatcatcttgctccagcagagctgggcaacttgccattctttgagcmcacgaggaccaccctgtctcaggaatgtagtacttaactctttcctttctctaaatgtgactgacccttcacacaaaaatcctcaatggctacactaactaaaatgcaacctcctaatatttctaatcaccctttcctattgtgtccagagttggctccttccagtgggttcttggtctcgctgacttcaagaatgaagccacagaccttgtggtgagtgttacagctcttaaaggtggcatggacccaaacagtgagcagcagcaagatttattgtgaagcgtgaaagaacgaagcttcgagtgggttgccactgctggctagggtggccagcttttattcccttattt

SEQ ID NO: 320745 - DNA, 596 bp, Homo sapiens
atttcctacgtctgatctaaaatctgcatcattttttaagccacatggaattttctttttctttttgtttttttcaaacataattgatgactgaaaaatactktcaattaagcatcataaaatagatctggataaattacttgcttgttacttctcagctaatgtgcttttttaacataagaaaatcaccttttgaaatcttaatgagaaacctgttctaagaacgttaatttaaattgtgtcactatttttcctcatcaatatgaggtgttgttttgtatgtggataatcagtatttgtaagggaaattttttcatattcatcttcagagactaccctatgaagggaaagaacacactctagttttaagaaacatgatcaatatatttctccttatagtgaagaaaatggcaaagcaaatcaagtgtaatttgggggctaatttctcatttatctgggccagtgtagaaactcctggactagcatggtgataaaattcaagaaatcataaatgagtctagagggcccagttcccttatcaccctccccatcatggctccaacatcatgctcattgcagaaatgttcctggcactc

SEQ ID NO: 320746 - DNA, 514 bp, Homo sapiens
taattggctaactaccccaactttctggccttcagatgtacattctgagaggaattctgaattcttctcataagacaaatcaagccctttttgcttacagtcaatagccttcatgatgcatcaatttttggcttttcttccctttctcatctcattcttctcactttctcactcctgctcccctgagatcctttcttaaatataaactatctctacccagtccttgtcatgctctactttcaggaaaactaggaggagaagcagcttcctcctatgttttacccctttagccctctgtattagttcattttcacactgctataaagaaatacctgagactcggtaatttataaagaaaaaaggcttaatggactcgcagtttcacatggttggggagacctcaggaaacttacaatcatggyggaaacagaagcaggtaccttcttcacaagatggcaggagacagagagagagccaacaaaggaagaacgcttataaaaccatcagatctgat

SEQ ID NO: 320747 - DNA, 488 bp, Homo sapiens
cttctcccagacatttttctcagttctggaaaggtgcttcagttggtcaatttatcaataaaggtaactggacttatcaacttagtaagagaagaaaataacacaattttctgactggttagcaaaataaaatgctgctgcatacaatagacaaatctaaaatgaagatatttggagaggaataatataaagtagacaaggcaaatgcaaacaaaaacaaagaagaggttgtgacatttttctctaacaagggaaaaaaaawatatatatatatatgtattagcaagaatggagcctctaatgacagcaattacaattcacaattaaggtgtgtcagttattaatatttatattctcagtagtacagcaatcatttcataaagcagaagctacaaaagatacaaagatgaattgacacagacatggtaattatgagagattttaacacatctctcttaatctgagataaatcaaatgacctgaaaatg

SEQ ID NO: 320748 - DNA, 550 bp, Homo sapiens
tggccaaatataagatatcaaaactgtccaaatctatgatgataccaaaaacaaacaacaaactttgacctatcaccattggaggatgctactaaatcaatattttgaaaactggtaaatagtcgggaagaatcaggcatttatattgtctttcttatgtgaatcatagcacttggtacacaaatgggaaaggtaaatttttcttcatagaagtatattggctaataagtgagtatcatcattttgcaatctctaatgagttaatagatcaatatatgtatcataaaaagtttgctaacaccacaaaaaaggcaaccagaacttacatgcctcttgatagaatataatattatttatgaattcatcttgcttaaaaaaaatttcagccctcaatcygataaagcttttaggtctgaccacttttcaagaaacccagggatataagctgcaaaatctagatttcaggagcctgtacaggacaaatgttttgggttgcttattaaacgaagtgaaagcaaaaaagagagatgaatagagaggaacttgtaga

SEQ ID NO: 320749 - DNA, 551 bp, Homo sapiens
atcgaaaatagcaaggcattcaattcaaccagaatactcattcatattgtrtaaattcaaacacaggaaagtgtttatgtgctgacatttgggtgcatgtgagctatcttaaactccttctattttcattattatagctcaagaaatgagcaacaccactgcagataaaatcattaggcagaatctggagaggttcaagtgatacttgcttcaaagaaggcctttcctgaggacagggtaggacatctttaatgatctggaagccagtattgctcagcacttaaggtatggattttcagtttgaatctcatttctatcctaaacaactagcttcatgaccttgaaaaggttatttaacctttacgagcctgtctcccagcctttaatataagaataataatagtaactaattcatagtgtatctctgaggattaagtcagactatctgtgtaaagcttttaattcaggacctaacactcaaaagctcaactatcatttttgcatagactgattaagagatatactgcagtcacttccacaagaaatggctg

SEQ ID NO: 320750 - DNA, 551 bp, Homo sapiens
atcgaaaatagcaaggcattcaattcaaccagaatactcattcatattgtataaattcaaacacaggaaartgtttatgtgctgacatttgggtgcatgtgagctatcttaaactccttctattttcattattatagctcaagaaatgagcaacaccactgcagataaaatcattaggcagaatctggagaggttcaagtgatacttgcttcaaagaaggcctttcctgaggacagggtaggacatctttaatgatctggaagccagtattgctcagcacttaaggtatggattttcagtttgaatctcatttctatcctaaacaactagcttcatgaccttgaaaaggttatttaacctttacgagcctgtctcccagcctttaatataagaataataatagtaactaattcatagtgtatctctgaggattaagtcagactatctgtgtaaagcttttaattcaggacctaacactcaaaagctcaactatcatttttgcatagactgattaagagatatactgcagtcacttccacaagaaatggctg

SEQ ID NO: 320751 - DNA, 551 bp, Homo sapiens
atcgaaaatagcaaggcattcaattcaaccagaatactcattcatattgtataaattcaaacacaggaaagtgtttrtgtgctgacatttgggtgcatgtgagctatcttaaactccttctattttcattattatagctcaagaaatgagcaacaccactgcagataaaatcattaggcagaatctggagaggttcaagtgatacttgcttcaaagaaggcctttcctgaggacagggtaggacatctttaatgatctggaagccagtattgctcagcacttaaggtatggattttcagtttgaatctcatttctatcctaaacaactagcttcatgaccttgaaaaggttatttaacctttacgagcctgtctcccagcctttaatataagaataataatagtaactaattcatagtgtatctctgaggattaagtcagactatctgtgtaaagcttttaattcaggacctaacactcaaaagctcaactatcatttttgcatagactgattaagagatatactgcagtcacttccacaagaaatggctg

SEQ ID NO: 320752 - DNA, 409 bp, Homo sapiens
agcttatctggcaaccccaaatttggggggttgkcattctatcttccatgagatactgatagaaaggaattacattatgtgtccaggaggtaatagcaaaccaattattttaatttgggtagttgctttgccttggaagatgtgattataaagtcactaaatcttagtagtccaggtttactccatgtctgaacaagattagcaagtgtactgattgaaatcttcgtctgactcaagttgccatttgtttggccatgtgatgaaatccctgagaagttcatttttgggttcgttgataattatttacaatagaaaaagagtgagcaaacaatcttccactttgcaatgagataggcaagatggagttgtattttgccacaaagtttccactgaatcatatctaatgtcc

SEQ ID NO: 320753 - DNA, 594 bp, Homo sapiens
ctcaatgtcaggaatacatgtgattattgttgctcaaggccagtgcatactgaaatttccaagtcatgtcctcattattcagcagccatagcaaagattaagtctctccaggactctttgcttatcatctgactgcacaaaataacaaagccaacagcctaatggaattggtgaactcttagtattaccatcatatgtgaagactagcagccagcacattttcccttgtgccygttgttgcatttatcaaaaaatgaaaacatatattacaaaagcatctacaaactaggaattacacttggactgccaccttgttcctgttcccttgtactccctggcttcagtaatgtggttgaagcagagaagatgttaaatgccacagggctagggaagacagacaaagacaacttctgtttctcctaagaagacatcctttctagcagaaatatgaaatattttttatttggaaagacagacctgttttcactatattaaatattttataaaaattttcccagagtaaaagaaatttaattttacaaatattaatcatgtacctatcacaattcagacacagtgtttgatgtatgcaag

SEQ ID NO: 320754 - DNA, 594 bp, Homo sapiens
ctcaatgtcaggaatacatgtgattattgttgctcaaggccagtgcatactgaaatttccaagtcatgtcctcattattcagcagccatagcaaagattaagtctctccaggactctttgcttatcatctgactgcacaaaataacaaagccaacagcctaatggaattggtgaactcttagtattaccatcatatgtgaagactagcagccagcacattttcccttgtgcccgttgttgcatttatcaaaaaatgaaaacatatattacaaaagcatctacaaactaggaattacacttggactgccaccttgttcctgttcccttgtactccctggcttcagtaatgtggytgaagcagagaagatgttaaatgccacagggctagggaagacagacaaagacaacttctgtttctcctaagaagacatcctttctagcagaaatatgaaatattttttatttggaaagacagacctgttttcactatattaaatattttataaaaattttcccagagtaaaagaaatttaattttacaaatattaatcatgtacctatcacaattcagacacagtgtttgatgtatgcaag

SEQ ID NO: 320755 - DNA, 594 bp, Homo sapiens
ctcaatgtcaggaatacatgtgattattgttgctcaaggccagtgcatactgaaatttccaagtcatgtcctcattattcagcagccatagcaaagattaagtctctccaggactctttgcttatcatctgactgcacaaaataacaaagccaacagcctaatggaattggtgaactcttagtattaccatcatatgtgaagactagcagccagcacattttcccttgtgcccgttgttgcatttatcaaaaaatgaaaacatatattacaaaagcatctacaaactaggaattacacttggactgccaccttgttcctgttcccttgtactccctggcttcagtaatgtggttgaagcagagaagatgttaaatgccacagggctagggaagacagacaaagacaacttctgtttctcctaagaagacatcctttctagcagaaatatgaaatattttttatttggaaagacagayctgttttcactatattaaatattttataaaaattttcccagagtaaaagaaatttaattttacaaatattaatcatgtacctatcacaattcagacacagtgtttgatgtatgcaag

SEQ ID NO: 320756 - DNA, 601 bp, Homo sapiens
aagccacccacttggctacacatcttggggaaggaggggggaaaagctctggagtccattagcaatttttttaaaccatggaaaccccataaggcattgattggcagcaatgtgactgctttttgctgtagctgctaattgatgttgttacttcaaaaggtgagtacagacagcaaaggaattcaaagcagaaaagtaacagacagtgatatgtatttaaaaacgtcttagagtttggggttctcagggagaagggatgcaggacwtgaagcaagaaagggtcctagagaccctgggtccttttcagccactccaaaattacccagaaaagaggaaatgaacagaagagagggaattaacttttgatatcattagagcatgttaactttgtcaaatatctcagtataaattctttatgagcatcagtagctaaggtcaaattcatctgttcatttatttattcatttaccaaattgtcactgaaaacttgctatgtgccaggtattgtactgagtgctgggtatttagtagtgaggaaaatagccctggcacttctggagtttagcaatgtagcttatgacttccctctttattattttaa

SEQ ID NO: 320757 - DNA, 575 bp, Homo sapiens
ggagacatcagtcttattcaatatgaattgtaatatctktgttagttttctgtcgctgcctaacaaattaccaccaacttggaagcttaaaacaatatctatttattagctcacagttctgtaaatcagaaacccagtaccatgtggctgggttctctgcttagggcatgagaagactgaactcacaatgtcaggctgagtcctcacctagatgctctaggagaaatctgcttttgagttattcagtttgttggcagaatgtagttccttgcagctataggactaagggcttcctttccttgatggctgtcaacttggagcctctgttacctttttaaagttgcttgcattatttctcaacactctccatctccaagctagctatggaacatccagtcttgctcatgcttcagactcctctgaccttctcttctgcccccagttggaggaagctctccacttctaagagctcatatgattagataagcctaccgagataatctccctatcttaaaataaactgtgccatataacatagcatcatcatatcttataatagtcacaggtcctgggaa

SEQ ID NO: 320758 - DNA, 575 bp, Homo sapiens
ggagacatcagtcttattcaatatgaattgtaatatctttgttagttttctgtcgctgcctaacaaattaccaccaacttggaagcttaaaacaatatctatttattagctcacagttctgtaaatcagaaacccagtaccatgtggctgggttctctgctyagggcatgagaagactgaactcacaatgtcaggctgagtcctcacctagatgctctaggagaaatctgcttttgagttattcagtttgttggcagaatgtagttccttgcagctataggactaagggcttcctttccttgatggctgtcaacttggagcctctgttacctttttaaagttgcttgcattatttctcaacactctccatctccaagctagctatggaacatccagtcttgctcatgcttcagactcctctgaccttctcttctgcccccagttggaggaagctctccacttctaagagctcatatgattagataagcctaccgagataatctccctatcttaaaataaactgtgccatataacatagcatcatcatatcttataatagtcacaggtcctgggaa

SEQ ID NO: 320759 - DNA, 575 bp, Homo sapiens
ggagacatcagtcttattcaatatgaattgtaatatctttgttagttttctgtcgctgcctaacaaattaccaccaacttggaagcttaaaacaatatctatttattagctcacagttctgtaaatcagaaacccagtaccatgtggctgggttctctgcttagggcatgagaagactgaactcacaatgtcaggctgagtcctcacctagatgctctaggagaaatctgctttygagttattcagtttgttggcagaatgtagttccttgcagctataggactaagggcttcctttccttgatggctgtcaacttggagcctctgttacctttttaaagttgcttgcattatttctcaacactctccatctccaagctagctatggaacatccagtcttgctcatgcttcagactcctctgaccttctcttctgcccccagttggaggaagctctccacttctaagagctcatatgattagataagcctaccgagataatctccctatcttaaaataaactgtgccatataacatagcatcatcatatcttataatagtcacaggtcctgggaa

SEQ ID NO: 320760 - DNA, 575 bp, Homo sapiens
ggagacatcagtcttattcaatatgaattgtaatatctttgttagttttctgtcgctgcctaacaaattaccaccaacttggaagcttaaaacaatatctatttattagctcacagttctgtaaatcagaaacccagtaccatgtggctgggttctctgcttagggcatgagaagactgaactcacaatgtcaggctgagtcctcacctagatgctctaggagaaatctgcttttgagttattcagtttgttggcagaatgtagttccttgcagctataggactaagggcttcctttccttgatggctgtcaacttggagcctctgttacctttttaaagttgcttgcattatttctcaacactctccatctccaagctagctatggaacatccagtcttgctcatgcttcagactcctctgaccttctcttctgcccccagttggaggaagctctccacttctaagagctcatatgattagataagcctaccgagataatctccctatcttaaaataaactgtgccatataacayagcatcatcatatcttataatagtcacaggtcctgggaa

SEQ ID NO: 320761 - DNA, 661 bp, Homo sapiens
tattgtttatattcataattgaaggaaatctaaatttcagttagagatgaataaaattaaagctgtaatattgttgccatttcagttcatgggcctctgaaattctacctaagatgctttggaggtccgtggaaaagaaactttgacctaaaacaacaattcccaaagtgtgctacaaggcactgcagaccttcggagcccaaaaaaacatcaggcacattggcaatgctgacttcagttttctttgaattagactaaaggtgaccagtgggatgttaaataaataacatagytgtagcattctcatacactgtttgtgagagtataaattggtaaaccttgatcgtttggctttgtgctccaaaaggcttcaatgatgccaaaggccgtttgagccagcaattccacttctagcatttattccaagaaaccaatgagatatgtgtgcaaagcttaaaacacaaaaatgttcatacccagctgtgcaagaaatagtattctgtcaataaattatgtaaattcgtgattattgatataaaaataggacaaacatgaagtaaaagcagtatgaggcaaataaaaataatttcatatgcatatatttacacagaaaaaagtttggaaggatatacactaactctttcctagtggtactttctgg

SEQ ID NO: 320762 - DNA, 576 bp, Homo sapiens
atggatgtcactttaagtcgctgaactatggggtagtttgttacgcaacattattgccccaatagctgattaatacaaggagcaatgggaaggtactgaaggttattaagcagagcactggcaagatctgatttacattttaaaaattaatttggctgctgtgtgaagaatggattgcaaaggtaagagtagaaatagggggaacaactgaaaacctaatatgtttgtcctggtaagagatgatgacagtgcaatttattgcaatggcaatgaccaggaaaggagaaactaaaacagcaggagagggtccttgatgacaggtagccactaatgagtggaaacctaactttacaagaragcttactccacttacagacacctttagttgccagtccctccctctggaactgagatacccttcttgaagctttcactcattaatagcggtgtttcccatggggccataaagaacaaagtttcttcatcatccataagatttgcctctatatttgaaagtagtttgggctctagcttccttctaaagccttttcttctgagttgaacattcatgttcct

SEQ ID NO: 320763 - DNA, 651 bp, Homo sapiens
aggtatcctagacaagagataggagggaacctgcaattaattaaacatctattcttttcaaagatcacttcttaagctcaatatctgagctacataaactaaaagggaatygtaataaaagaaaataaaatgtagttataataggacttatgattattaatggattggaaattgaattcacactggcaaactgaggtagagggcaaaacctactcagtaaaatcagccccagttcctccatctctggattaggtgaccaaggcaagggttttaagcttggtgctaacattattaattcacttcggaaatttcaagggtatcactcagtgtcattttagttatacatagtgaattctgagagtttcattccaaactctgtgggctgttctgaggtttaaataagatcacaaaataagatcatggacatcctttaaaagctctgatgggttatactaatgcaagtgataaaacaacatcctgaaaatttccctgtatagactgaaaatgtgctttttaactgacaattattttttaaactcttcttatatcatttggttagtgattgtctagtgtctacaattaatttggctatgtctgaacatggaaaattaaatggagcttcacagacacttactactcagagatagcaag

SEQ ID NO: 320764 - DNA, 488 bp, Homo sapiens
gacttcctttgcatcctttcatcctttttcttgtggtaaatgcccactcccaggtggaaagaatcacaaaaagggaataagagaaagggaaaataaagaacagagtcagatggctgggcatagtggcatgcacctgtagtcccagctgttcaggaggctgaggcacaggaacatttgagyccaggggttcaaggctgcagtgagccatgattgtgccaagacccttcagcctgggcaacacagcaagacaacatctcttaaaaaaagagagcagggtcagatgacaaaggtaggataagataattgtaaaaggtcaaaataaagaatgagaataagatgaaacattgttcaaaaaacacattacaaagaattcaagagtagaaaatagtgagtttataaataataaaatcaatttaatctaaaaaaagaaactgtgaaataaaaatacacagttattattagggtttacaaaataacacccttatata

SEQ ID NO: 320765 - DNA, 609 bp, Homo sapiens
agtgggatgtttattttgtacaatggtccctaactgcatttctgtgatttaaaagctttccgaggcgtgagatgataatattacatgcatatagaattgtgtgtttgccatgcctcattactccccacagagacccaaaatcatttggtattcaactcctacctaaaatatttccttttacatacaaatattttttctgctttaaatggcttctctatgttaactttttttttttctttctggggctgtgaagcaagatcgcttcctacatgggattctattttggtccagtattgatctttagtggtagttgctaagtgggttgttggctttttcacccttcttttcctgtagccaattccttcccaatacaaagcaggtgcaggttttcgtgggggtgattttgaattttctgctcattctttcccttccatttcagatttctgcttcctggtttatttttactaatgtcttcctcagcaaytaggaatgtttctctctcgctcatgtcttaataacaaagcttcataataattattataacgctttgccaggagaggcaagcttaacagccagtagaggatttggaaggcagtgtggtttggggaa

SEQ ID NO: 320766 - DNA, 532 bp, Homo sapiens
tgggtgcagacacaattatcctttaacatagatgtcaaaacttaaaatttaagccaggtgcagtggctcatgcctatactccaagctactcaagaagctgaggcaaaaggattccttgagctccagagtttgaggtcaacctggacaacatagcgagactcccttaaaagaaaaaaaaaaccttagtatttaagtaccttgcccagagtcatagcttgtaaaagctacagactaagtccaaacctcctgttctttctgctatctgctcccatacccagctttacagctttccttcttatagcctctgatttgcaagagttatggctgtgtggtcataactcactaattrgggaaggaaccagtaaggtgttaaaagctagttcaaaggagaatttaaaacagtcttggtttcctcagttttcaactgaggactcaaagcttaaccctgcttagctcagttattcatgtagagtcctgtatatggacatattttgagaagagtgaaaaccccatgcatgaataagtgtattat

SEQ ID NO: 320767 - DNA, 519 bp, Homo sapiens
ctgtcccttcgtttcattgtgtgactgtggaacattgtggaaaatctccagatctctctgggccttggtttcctcacctgtagtgagatacatttgcagttaattgcctctaaaggcatctgcctgccagacacaggcgacaaggcctttatgggtccctgaagcagtatcccagaaggtccacccccgtaccttcttataagataggcctcaggcttaaagctgtcagtgaaaccacttttgcaaaattatggctgagacagtgaaagagatctaactgactccatcttgcttctaacctccaagctgtccttgwtcattcctgggcatagacagaactaactttgggagaaacttagtttatagtttaaacaaagatggtaacaaccctttcccaaagcagacctccttctttcctggggactagtttgcctttataggactaacattagccacaagattagaaattatggtttaggagccatgcagctggtggctacaagattctgaccccctccc

SEQ ID NO: 320768 - DNA, 308 bp, Homo sapiens
aaaagactaagtaaccattaactgctttaagcactaataacgttatgtggaattaaaagaaaagacagaatctaaagtatgaaaacatcaacacataagtcaggggttaaatggatttaaagtgttctaagtcctttttatagtttaggagaaagacaagggtatggatttatattarctattggtaagttttgaatacatgtgttgtaatttctaggtgaactattaaaataatagaaatagaaaatatatctttcaaattgaggacgacattttgaattgtcaaaaatatttcattaatataaaaa

SEQ ID NO: 320769 - DNA, 565 bp, Homo sapiens
gttttcattcatagaatggatatttacgtgtaggttgctttcagcagaaggaggttcagaggtgactgcaacatgctctctgccctcaagaaacttataggggaacaagacacacacaaaaatccaatcacaagtcaaacctaaaagacacacaggtgaaggggatggagattcagaggtgggagccacaggcttcatggcatgtggcatttgagtagactggaggacacacaggaagagagagtgtggcaatgggagaggtttgggatatggaatcggacgacctagcttaaaatttacccttagaaaatccacagtttctctgagccttggttttctcacctgtaaaatgtgaataatagtagtaataaaacttctctgcattgttatgattattttatgtcatcatcatcatacacacacacacacactcacacactcacacactaagatttcctgagaaatgtcagagccatgggactgagaaacatctcttgagattctggtgagctccctagcatctcgtcctcaytcatttcgtcccctagcagtggcaaggtagact

SEQ ID NO: 320770 - DNA, 525 bp, Homo sapiens
gctggaccttccagcctggccacctgactttcccctggacatcccacagtcctttcaaactcagcaaggatcaaggggcgtcaaggccttcccctggaccccatccttcttccatctgtgttcccaggcactgaaaccaactgcagagctacccatggtgcctccctcccctttgccctcctctcgttttgtctatagattaattggttagcttcagtctcattctgtgaattgcacctcttagcattcttmatttccacgtttcagctgttcttgaccacatttgggctccctccagctgctccaaatcccgcagctgccacttagcaatgctcgttctctttcctgcagtgcctgcctcggtcaggcctaggtgcatctctaggtgctgatttcaagacagctgagttccctttagccgggcacggtggctcacgcctgtaatcctaacactttgggaggccgaggcgggcggattgcctgacctcaggagttcaagaccagcctgggtaacatggtgaaacc

SEQ ID NO: 320771 - DNA, 525 bp, Homo sapiens
gctggaccttccagcctggccacctgactttcccctggacatcccacagtcctttcaaactcagcaaggatcaaggggcgtcaaggccttcccctggaccccatccttcttccatctgtgttcccaggcactgaaaccaactgcagagctacccatggtgcctccctcccctttgccctcctctcgttttgtctatagattaattggttagcttcagtctcattctgtgaattgcacctcttagcattcttcatttycacgtttcagctgttcttgaccacatttgggctccctccagctgctccaaatcccgcagctgccacttagcaatgctcgttctctttcctgcagtgcctgcctcggtcaggcctaggtgcatctctaggtgctgatttcaagacagctgagttccctttagccgggcacggtggctcacgcctgtaatcctaacactttgggaggccgaggcgggcggattgcctgacctcaggagttcaagaccagcctgggtaacatggtgaaacc

SEQ ID NO: 320772 - DNA, 599 bp, Homo sapiens
gcacacatgaacagccatatggtcagaaataacgttcttagaccaaggctgaagtacatgcaaaataacttatagttatttgcttttttcctctaagtctctgagtctaggatcatgcttatcaggctgtatgataactacgagtttattaagatgcctgcaacactagcctgtgagtttatccagggcagaagcaaagctctccttgccgtgcctccaacctaacccaaggcaggactcatgtaagactggcaatcacatctgtggaataactgtcagtccttggatgattttcatcattaatcctgcttagacatcaaacattaaggttgmttaagccaaaccaagagggatgaaagagaaaattcacagtggagtaaattcactgagtggtctcctacatgtggttgacagaaaggatgaccagattgacaagttactgttatacctgaataaggtgatattagattaccttaaaaaggttgaacagaacctttgaatctcaaatacaatatatctctgggggaaaaagaaaacgttctacttgtacactacaaagacagtgttgttttctagcacaaatgcacttctgctgagat

SEQ ID NO: 320773 - DNA, 531 bp, Homo sapiens
attttcatcattaatcctgcttagacatcaaacattaaggttgattaagccaaaccaagagggatgaaagagaaaattcacagtggagtaaattcactgagtggtctcctacatgtggttgacagaaaggatgaccagattgacaagttactgttatacctgaataaggtgatattagattaccttaaaaaggttgaacagaacctttgaatctcaaatacaatatatctctgggggaaaaagaaaacgttctacttgtacactacaaagacagtgttgttttctagcacaaatgcacttctgctgagatactgctttgctaaactacygctaagacacactgagtgaccttataaaagggtgcggaggtatgttgggtgggaagaaccactgttaacatgcagcacccacacactcgctcatgagtgggcgtatcatccctccaaatagcgcaataggactgggaacagagataagaaaaaacaacaagaattttgcttgccttttttttatttttaatttatggctttc

SEQ ID NO: 320774 - DNA, 627 bp, Homo sapiens
tctgcgaataccggactgaaaattgtaattcatctgccgccgccgctgccttttttttttctcgagctcttgagatctccggttgggattcctgcggattgacatttctgtgaagcagaagtctgggaatcgatctggaaatcctcctaatttttactccctctccccscgactcctgattcattgggaagtttcaaatcagctataactggagagtgctgaagattgatgggatcgttgccttatgcatttgttttggttttacaaaaaggaaacttgacagaggatcatgctgtacttaaaaaatacaagtaagttctctgcacaggaaattggtttaatgtaactttcaatggaaacctttgagattttttacttaaagtgcattcgagtaaatttaatttccaggcagcttaatacattctttttagccgtgttacttgtagtgtgtatgccctgctttcactcagtgtgtacagggaaacgcacctgattttttacttattagtttgttttttctttaacctttcagcatcacagaggaagtagactgatattaacaatacttactaataataacgtgcctcatgaaataaagatccgaaaggaattggaataaaaatttcc

SEQ ID NO: 320775 - DNA, 506 bp, Homo sapiens
agttgtgtttgtacacactaacaatggactatttgacaagtctaacaatggaccctttgacaaggagattaagaaacaatcctacttataatagcacccaaaagcataaaatacctaggaataaacttaattaagcaagtgaaagacttgtacactgaaaactataaaactttgatgacagaaattaaagaaggcacaagcaagtggaaatacttctcatgctcatggattggaagaattcatatcattaaagtgtccataccatccaaagttacctgtatattcaatgcaatctctactaaaatcctaatgacaatttttacagaagcagaaaaaacaaacctaaaatttgtgtggaacgacaaaggtcccgaaatagccaaaataatcttgagaaataaaaacaagactgaaacaycacacttcctgatttcaaaatatgttacaaaggccccttctttgaaaataaaaaaaaaaattacaaagctgtagtcattaaaacagta

SEQ ID NO: 320776 - DNA, 424 bp, Homo sapiens
cattgtaagaaatactgacacaaaacaaagtagagatacttaaacagcattcaacaatgagaatggtactttacctttggagaatgacacaccactgaatggcctgaagtgagatggcactagtgggatatgtgtaaggggaaggcagcagaaaggggagaaatccatgatttaaccctccttgcctactctgcagactgctataaaactatggtrccccaagagtctagcaaaaagtggaatttaggagaaaggaagtcttcaagatccagggacattctcctcatggcagcagcagcctcagtgaggggatgtatgcccctttgagatcatctttttgtctggctgatcctgagactctcgtgaggacaaatgaagacagatggcagctttacatacatcctcatttcaaagtgatgtagag

SEQ ID NO: 320777 - DNA, 595 bp, Homo sapiens
actgctaccttacagctagtcagtggcagagccggggcttcagccaagtttgtctgaaatgaaagagcatgcccttggctccttgttctattgcctgttacatacgtttccctcctggaggtgggatattgggccatcactgattgatcccactagcatttcacaccattcaactcacatatttggctttttactctgcacttgtcagctgtattggttggggcagatcaaactgctgtaccaaataaacccaaaagcttaatgcctcaaacacaacagaagatgtcacacgtttagtacagtagtacagtgcccaccccaataaatattagctatttattattacatacctggcacactttcctaaagatacctctgtgacacaaacattatcctcattgtacagaggagaaaactgaggtcccacagcaagtaaatggcagagccctggratcccaaacccatgctcctaaccactaaacaatcccttctcatgttaagtgggggaaataattggcttctggcatgagagaactgagctctttacactctgtttaaatgttttccatgttaattagatctaaaatgtaactgt

SEQ ID NO: 320778 - DNA, 618 bp, Homo sapiens
ggcaccttgggcatctgattacttggtgccctttggtttaatatttttagatatttggcagggtgtggtggctcacgcctataatcccagcattttgggaggccaaggcaggtgggtcacttgagctcaggagttcgaaaccagcctaggcaacatggcgaaaccctgtctctacaaaaaaatacaaaaaattagccaggtgtggtggcagcacctgtggtcccagctacttgagaggctgagacaggaggatcacttgagccggaaggggacaggggacagagttttagtgagccaagatcgcaccactgtactccagcctgggtgacagagcgagactctgtctcaaacaacaataacaacaatgtttttaggtatttattaaatgtttatttaatggtggtgtggttgtgactaaaaggagtaatttctgttttttatgtagtaataatttctactttcccaraagcaggagcaacgtacattttgctagttacaaaagatagctgtggaaagtagaggtagttggtatatatttcgtctctctctctcacacacatatatgttcctgcaatacttgggtgaatctttgtggatttgttgagctagcctgatgct

SEQ ID NO: 320779 - DNA, 618 bp, Homo sapiens
ggcaccttgggcatctgattacttggtgccctttggtttaatatttttagatatttggcagggtgtggtggctcacgcctataatcccagcattttgggaggccaaggcaggtgggtcacttgagctcaggagttcgaaaccagcctaggcaacatggcgaaaccctgtctctacaaaaaaatacaaaaaattagccaggtgtggtggcagcacctgtggtcccagctacttgagaggctgagacaggaggatcacttgagccggaaggggacaggggacagagttttagtgagccaagatcgcaccactgtactccagcctgggtgacagagcgagactctgtctcaaacaacaataacaacaatgtttttaggtatttattaaatgtttatttaatggtggtgtggttgtgactaaaaggagtaatttctgttttttatgtagtaataatttctactttcccagaagcaggagcaacgtacattttgstagttacaaaagatagctgtggaaagtagaggtagttggtatatatttcgtctctctctctcacacacatatatgttcctgcaatacttgggtgaatctttgtggatttgttgagctagcctgatgct

SEQ ID NO: 320780 - DNA, 554 bp, Homo sapiens
acactaactcaactcttattctgtgcatagtaagaaatgattacagaaacatgacccttggcagagatygctaggtattctccaaattctgggttcctttcttctgggcactcgggcaggttatatctctcagcttcttgcagatggctgtgtctctgtgcctgagtaccagctgatggaatgtgagtggaagtcgtgtcccatctcctggtctgacttccaaaagcctctcaaatatgctccttccccttttccctgcttccagcttccctgggtgaaaatgatgcctaggtgatcttgaaagtcctgtgttgatgaccgcagaactgccgtcaacctgttcccctgaagcagaggcatgctgctgatgaggtatgcctaccttgccctacaaggtgagcgagaagaaaacctgcatagtgtttgaaccattatgcactttgcagtccatttgttacaggagtttaacatactccaattaatatacaacattaatcttcaaatcattcctatgaggtagatagtacttacctttatttttacagaggaaaaac

SEQ ID NO: 320781 - DNA, 565 bp, Homo sapiens
atataatctcttatggttcatgaatattgacatttcaaaataaaattgctatatttctcctttaaatgtatagaagggaatttaaataccagtgggatttgatattcaccatcagctatttttaaattacacaaaaaagcttttataaatgagtaattttcacataattccttttcctccttggtcttatatttgaattccatttccccaatagacttaaattctgttttacacacatttatgttttaatatataatgctatatttaatattatgtatatataaaacactatatatatttctctataacaaaaataaatataaattaaaagttaagttataattttttctgttgaccacaaggctttagttatctacatttttaagtatacaactgattgaaacacaaatgttaaaatatttattgaaaataattttatttactttatttaaatttatttaaaataattattaaacattaaaaagtaattaatacttgagatatatgargctttaaaaattagtttacatatccatgatgaatattattgctagaatgagacaag

SEQ ID NO: 320782 - DNA, 525 bp, Homo sapiens
cttcggcctcccaaagtgtggggattacaggcatgagccatggtgcccggcctataagttttttatcaggaatgaccattacttttatcaaatgactctgcagcattgatttatagcaaaactatccaatagaactttccccaatgatggaagcayccattatctgtgtttgtaccgtaactactagtcacatgtggctactgagcacttaaaagtggctaataggaatgagaaatgacattttttaaataacctaatttcaaccattcaaatttcaatggaaagagccacatatggctagtgtctaccattttggacacagctgtgaagtcagaggaactgtgagtcaattaagcctctttcctttacaaattacccagttctgggtatgttcagagcagatctagatgatcacataggtagtttctttaaatctattaatataaagatatgtatcttcataaatatgaaatgaaaccatgctaaaccatctttcatatctgaaacaaaacctacatggtaatg

SEQ ID NO: 320783 - DNA, 525 bp, Homo sapiens
cttcggcctcccaaagtgtggggattacaggcatgagccatggtgcccggcctataagttttttatcaggaatgaccattacttttatcaaatgactctgcagcattgatttatagcaaaactatccaatagaactttccccaatgatggaagcatccattatctgtgtttgtaccgtaactactagtcacatgtggctactgagcacttaaaagtggctaataggaatgagaaatgamattttttaaataacctaatttcaaccattcaaatttcaatggaaagagccacatatggctagtgtctaccattttggacacagctgtgaagtcagaggaactgtgagtcaattaagcctctttcctttacaaattacccagttctgggtatgttcagagcagatctagatgatcacataggtagtttctttaaatctattaatataaagatatgtatcttcataaatatgaaatgaaaccatgctaaaccatctttcatatctgaaacaaaacctacatggtaatg

SEQ ID NO: 320784 - DNA, 550 bp, Homo sapiens
gccacctctacctccagaagttactgttacaatctttgagcaaattaggtataaaaatggattctgatttggtatatatacatacatgtagaaaattacagaaggggactacatctaaatgttaaaagtggttttctttgggtggtaagattacaggcagtttttattttcttacgtgaattttttgtatggaaaattgctgcaatcagcattattgcttttaagatcttaaagaaggcctatttttcaaagaaaaaagagtatttcaaaaggattgtgtttaaataactatgcaaatgttcacttattattcatgtttcacttattcgtaaacacttattgcattcatgctatgtgctagatactatgctagacactagagacrctgtcctgccctcaaggagcttacagtagagatagggagatagacaagttagcagggactgtaacagaagccctatagtgtattagaagaggagtacagaagtcatactgggtggaggacaggcatggggcatcaaggaaggctttctggaggaaacaatgcctg

SEQ ID NO: 320785 - DNA, 572 bp, Homo sapiens
cttgtttatgcctcttttcttcactttaggctttcctagttactcctcttcagagagaatttgtgtctggtgaactctatcagttgtattcactgttactgtgctgctggtgtggcagtaagttgtgggagaagggaagtgttctgtaactttatggttaaatctcagtcttttagtggacctgtgtccctgggctatgatcttcacctttttttcccagtagcatagctttccccctgtatgtaagacggaaaggctagagggggctagagtgtggggaatgccctttctcatctgggataaggcttggagagttggctttttttttttatggaaaatgctatggtcatatttcacaatgatttactctctctctctgacacagttactaggaaatcttttttggatcccacaaaagtgtggagccaaagactgcagctcccaggtttttaagctcaaattagttcatacgaaktctccagcaattcacgggaattaccacttaagtgctgataccagcttatggcttcagcagtttctgctcttattaagcaaattttggtggtaactgt

SEQ ID NO: 320786 - DNA, 572 bp, Homo sapiens
cttgtttatgcctcttttcttcactttaggctttcctagttactcctcttcagagagaatttgtgtctggtgaactctatcagttgtattcactgttactgtgctgctggtgtggcagtaagttgtgggagaagggaagtgttctgtaactttatggttaaatctcagtcttttagtggacctgtgtccctgggctatgatcttcacctttttttcccagtagcatagctttccccctgtatgtaagacggaaaggctagagggggctagagtgtggggaatgccctttctcatctgggataaggcttggagagttggctttttttttttatggaaaatgctatggtcatatttcacaatgatttactctctctctctgacacagttactaggaaatcttttttggatcccacaaaagtgtggagccaaagactgcagctcccaggtttttaagctcaaattagttcatacgaagtctccagcaattcaygggaattaccacttaagtgctgataccagcttatggcttcagcagtttctgctcttattaagcaaattttggtggtaactgt

SEQ ID NO: 320787 - DNA, 630 bp, Homo sapiens
gtattaaaacagttgacaatttaaaagagcaaatacatttctattttaaagatctttctatttaaaggtattgttccatttcagtaaaayattttagtgtaaaccaaaacttgcatttgtccaacagaaatagagcatagcttgtactctttccgtttacattttcaacacaaaatctctaagtggccacataaattgacagagttgaaataactctagttctgttttttcatctttaagatcacgatgctatcatggtttatttcgaaccctctgtttaagtgcaggaggatgtagtaccattaggagttggagatgtgaagtcctggctggagaagagcttgcacaatgtcaaacagctcacacagtcacaaattcattctcacaaggaacatgtgtgtgtaggggacccactaaacaactgggagttcttggaattgactttcatctagagtacaatatttactaaaggataaattattaaaatgtgctaatttgaagcttacacacatattattaaaactcaacagaaaccacaggggttgtttagaagttagaaccaacaaaagattgtttcagggaggagtattttatgactggcaacgtttagaattgttggcacatggcaat

SEQ ID NO: 320788 - DNA, 606 bp, Homo sapiens
aaggtttagagaggagatctcatcaagaatcagagtctcagagacaaaacagcaacagtgaaaaaaattcttaggaggttttgaaaactgacccaaagcatagtttttccaaaggatgctggwcaagaagaaaccttctgaatttcttagtccttggggccagcttgagaagcagactctgagtctttatcctttcccttcaaacttttctttaaagatgtacaagaagaaatgtcaaggacagatagaaacaaatagcagggttaataataaggcagatttccatcaaggataaaagttttcccaatcttatcaaataatgaaagaattcctgaaaaggtttcttaaccctaggatgcaaaataaactcagcatttggagagctcaaataaatgaaatgaaaaagaaatcagagccaagtccaatgcaggacttataaactttattgtcaatgtcagtgagatcccagcaggaggcaacagggctcaggggagcactgttttagagttgagtcttaggtagtgatagtgagcaggtcccaaatgaatttcagtggcactgccaaaattgtggaatgagggctccaaagtaccaccaaactaacct

SEQ ID NO: 320789 - DNA, 505 bp, Homo sapiens
ttttgaaattggagtccagtatctatctggagtaagtaaatattgaatacagttctaggtctactatggatatgttaggagactcaagttagttacttcctctttgttcctcagtttctccttttgtaacagagaaaatgtaattttrttggccaattacatcaagataaatgctttttttaaatgtaaaattattttacccctttgaagcccattcaacgatcattcattacacattggtctccttttgcaaggttcagggttagtctgtgcagtatgatcccccatgattttttaaattttgttttagtagtagtagtagtagtaaagatagaatctcactgtgttgcccaggctggtcttaaactcctgacctcaagcgatactcctgccttggcctcccaaaatgctgagattacaggcatgagctacatgcctggcaggtccccatgcttaatccacaggattattgtaccaggcagcaaatgggccaagcactgacata

SEQ ID NO: 320790 - DNA, 505 bp, Homo sapiens
ttttgaaattggagtccagtatctatctggagtaagtaaatattgaatacagttctaggtctactatggatatgttaggagactcaagttagttacttcctctttgttcctcagtttctccttttgtaacagagaaaatgtaattttattggccaattacatcaagataaatgcttttttwaaatgtaaaattattttacccctttgaagcccattcaacgatcattcattacacattggtctccttttgcaaggttcagggttagtctgtgcagtatgatcccccatgattttttaaattttgttttagtagtagtagtagtagtaaagatagaatctcactgtgttgcccaggctggtcttaaactcctgacctcaagcgatactcctgccttggcctcccaaaatgctgagattacaggcatgagctacatgcctggcaggtccccatgcttaatccacaggattattgtaccaggcagcaaatgggccaagcactgacata

SEQ ID NO: 320791 - DNA, 505 bp, Homo sapiens
ttttgaaattggagtccagtatctatctggagtaagtaaatattgaatacagttctaggtctactatggatatgttaggagactcaagttagttacttcctctttgttcctcagtttctccttttgtaacagagaaaatgtaattttattggccaattacatcaagataaatgctttttttaaatgtaaaattattttacccctttgaagcccattcaacgatcattcattacacattggtctccttttgcaaggttcagggttagtctgtgcagtatgatcccccatgattttttaaattttgttttagtagtagtagtagtagtaaagatagaatctcactgtgttgcccaggctggtcttaaactcctgacctcaagcgatactcctgccttggcctcccaaartgctgagattacaggcatgagctacatgcctggcaggtccccatgcttaatccacaggattattgtaccaggcagcaaatgggccaagcactgacata

SEQ ID NO: 320792 - DNA, 561 bp, Homo sapiens
aattgcaagttatatagaagttaaagtaacttgctcgggatcatacacttaaattgattttaaactaaggacttcacccrggactcattttgcttctggagctttactgtcactgtctcagcagggtcaacaggatttcttctaaagagtttagttcttctgcatccttcttgacatgctgaggcaaagaatcagggcacagtagaaagtctgctacctaagtctgataaaagcattatggtgactaaggttacaaaacccattgaaccctgcactaatgtttttgagagctatgtggtcttcccagcagtgtcttttccatgttagccctttgcacatctggcatgcttgatcccagatgtgtgatttttatcccatgaggtggggccacagtactggggatcctgccggctcagctgtgttcacaaaggcctgtttctttgacagggcctgcaggaggtagctagtggtggttttgtaacccctgatttattactgtctccagtcagaggcaagtgctacacaatttggtacacttacatgtatacacacacacacaca

SEQ ID NO: 320793 - DNA, 561 bp, Homo sapiens
aattgcaagttatatagaagttaaagtaacttgctcgggatcatacacttaaattgattttaaactaaggacttcacccgggactcattttgcttctggagctttactgtcactgtctcagcagggtcaacaggatttcttctaaagagtttagttcttctgcatccttcttgacatgctgaggcaaagaatcagggcacagtagaaagtctgctacctaagtctgataaaagcattatggtgactaaggttacaaaacccattgaaccctgcactaatgtttttgagagctatgtggtcttcccagcagtgtcttttccatgttagccctttgcacatctggcatgcttgatcccagatgtgtgatttttatcccatgaggtggggccacagtactggggatcctgcyggctcagctgtgttcacaaaggcctgtttctttgacagggcctgcaggaggtagctagtggtggttttgtaacccctgatttattactgtctccagtcagaggcaagtgctacacaatttggtacacttacatgtatacacacacacacaca

SEQ ID NO: 320794 - DNA, 561 bp, Homo sapiens
aattgcaagttatatagaagttaaagtaacttgctcgggatcatacacttaaattgattttaaactaaggacttcacccgggactcattttgcttctggagctttactgtcactgtctcagcagggtcaacaggatttcttctaaagagtttagttcttctgcatccttcttgacatgctgaggcaaagaatcagggcacagtagaaagtctgctacctaagtctgataaaagcattatggtgactaaggttacaaaacccattgaaccctgcactaatgtttttgagagctatgtggtcttcccagcagtgtcttttccatgttagccctttgcacatctggcatgcttgatcccagatgtgtgatttttatcccatgaggtggggccacagtactggggatcctgccggctcagctgtgttcrcaaaggcctgtttctttgacagggcctgcaggaggtagctagtggtggttttgtaacccctgatttattactgtctccagtcagaggcaagtgctacacaatttggtacacttacatgtatacacacacacacaca

SEQ ID NO: 320795 - DNA, 639 bp, Homo sapiens
gtataaacacctggtccaaagaagaaggatgggaagatgataattgagtttgtgtgtggctgtgggtggatgagtcacatgctcccctgctctcttgaggtaatctgcctttctgttgaattagggaacccaagggtaattgttggcaggattctcctaaaattctgctctgatgagcagaagacaagagcaaatggggaaaggcagaccatggcctgaggagatgaacaawctggcgtatgagacagggaatgtctttttttatgagcaaagaggtatttttatggtttgccttgagtgagtagcctctgatgctgggaaaacagactggtaacagctggaccacactttggatcagttgccacagcaacttgatacatttgtctctagtgtcatttgatccctttgagagctgtattatctcaatgtagatgtttgacttttgggcctactctgtgagtgaacacgtctgtttgattgtattcctcagattacagacagttattcatttgggagcttgcattctaggattacagatgctggcaacctcataggtgactggaacccaggatcttttggaaccatctttatatttaccaccctcagaacgctgatttcaggagcaaattataccttata

SEQ ID NO: 320796 - DNA, 555 bp, Homo sapiens
tttttagtgttgtaatttggattaccatccagtagatggcgcctgagagcgatggccgatagataagcccttagccaccgggctcttttgtatttcagcgcattgtcgatagtgctctgtgatagagggtgagagaggtgrtccctttaccaggtccattcctgggccttggaagagccccttctgatcggtggtactgtgcccacgtttcctttgccaggtgttctgagccatggcgctgcctcaagcagattccctggctggcaaacaggctacacccttcttggactggccctgcagaagaaggtaggccctgcttccctgccagcccacaaacccaggcatctcaccccattcagtgttctgagagtgggggctcttctcctgcttgggcagtgggggtgggtggaatcacccggtccaccatctgggtgtttaccaggataacacagttgtgcgcactggcagagtttaatcagggtcccagccactgtactgaaagcccaagcaagttttgcctggctaggagcagctgagatgggtagagtcatctgg

SEQ ID NO: 320797 - DNA, 422 bp, Homo sapiens
tgtataattctgcactcatagtgctaacaaatttagaaaataaatttgcaatgagaagattgtgctgagaatccctcagggatcagctgcctcttactcattaacacatgaccattcttttcccctcatgtgtacttctgtttgatctgccccccagcagcactttctctcttcattcagacaacaaacaaataaccagcctggtagccaagaatgaaatcagtagcatgcagaacagcttagttttaatgatgctgcaaccaaagtttaattgaaaaaatagtttaacttttcccatccttagcttattaatgcctcacaagtaytcagtgaagttagcaataccaagtctcctagggagaaaaatgctaatactcttggcatctattatcagctttcctttcctcttctctaagtgaacc

SEQ ID NO: 320798 - DNA, 600 bp, Homo sapiens
agaattcaacccaggctggattcaagggtccatgagtttcccattcccaactccctttatagcaataggcatttcaakatttctgtgctagccctttgtgttgtaggatctgatgtaccttctctatttctgaagcttcgtacataacaaacaatttgggagaggtgttgaagaaatactagagactcccaacataggaacaggagagttttcttctccaagctctcaaagagcttctcagccctagcgatagattaggggtctgtcatgttaaacaggcaaacattgcacatggcctggcttaggaagggccctcttgaaatccagataaagagttctgaattaaacacatgaaaaaaatagaaataaggaccttctggggctaatttaccttaaaatatatttgcttggtttaaatgtcaatatgaaaaaacaactagcagttatggagtacttataagtattaattcatttaattctcacaacaaccctatgagtttaggtattatgatccccatttgtggatgaggaaaattgacacacagagagataaagtaacttgctaagggtcacacagttggtaagcaaacagtagagggg

SEQ ID NO: 320799 - DNA, 600 bp, Homo sapiens
agaattcaacccaggctggattcaagggtccatgagtttcccattcccaactccctttatagcaataggcatttcaatatttctgtgctagccctttgtgttgtaggatctgatgtaccttctctatttctgaagcttcgtacataacaaacaatttgggagaggtgttgaagaaatactagagactcccaacataggaacaggagagttttcttctccaagctctcaaagagcttctcagccctagcgatagattaggggtctgtcatgttaaacaggcaaacattgcacatggcctggcttaggaagggccctcttgaaatccagataaagagttctgaattaaacacatgaaaaaaatagaaataaggaccttctggggctaatttaccttaaaatatatttgcttggtttaaatgtcaatatgaaaaaacaactagcagttatggagtacttataagtattaattcatttaattctcacaacaaccctatgagtttaggtattatgatccccatttgtggatgaggaaaattgacacacagagagataaagtaacttgctaagggtcacasagttggtaagcaaacagtagagggg

SEQ ID NO: 320800 - DNA, 595 bp, Homo sapiens
gtcaggaccatcaagcacagtgaaggcagagggtaatcacaatgaaacctagaggattatgtgaaaggctatattctaagcaataagacatccagccctttctctcagatgtcagtatgctagaagatttatacttccaaaatggtagaatagagaattcttctctggaacaactaaatatcccaagagaaaagatgaacagatatggacagttargaatcccctaatgacctaatcaaatcaccttatgtagactgttactagttaaaaagaaatgtctataaacaaaatcatccaatcacctttttatgtctctctcctaaataagagtagagattcagggaccatcagatatttgaggaaaaggtttaaagtcaaagccagggagtaagacaaatagggagaagagggaaggacatagaggaaataacagtaattcagggaccatgaaaaaaaaacaaactacctactggaaaagcaaagaaagcaactgagtggagaaaagaaaaaaagaggaaagaaagaaaaaagaaaaaataggaaaagaagataaataaaactaaaattgatatcctcagagagaaaatagaaggca

SEQ ID NO: 320801 - DNA, 550 bp, Homo sapiens
acatgaaatagctaattcagttttcattctctgtaaccagttttagctttcattctctatatatcatgctgcccttcagctctttatctattgaattgaggacatccaagcttcttcagaaggtcagatactacttagaacaaaaaggtcaatatccagctttgagtttcaaaytagcctaaaaacatttattcaggcaaagtcttggaaaacagattttattaagtaagttttttctctctaaattgtcaaagcttttcttaacacagcaaagcttggaggtctgacataatatttcactagaagccttagagaggattgaggatatgatgtagggaaagtttggaggggatgagaccagggccaggacattgcctgcatcacagaaaagaggcccagtgtttatcctactaattttcaggccagggagaaggagaaactgaaagacaggcatgcaagtgtttgacttttcatatggagctgcggggagactttaccaacctagggcagctacagtggcacagaaacagtgtcttggtgtgattctgca

SEQ ID NO: 320802 - DNA, 544 bp, Homo sapiens
ctggttatgcttctaggggtcatatcattcaaacattgtcttgtttaaatatcaccctttattctttcattttcggattctctttttcattcaggactcaacagtcactagtggctgagaaaagagttttgtctargttggagccatgatgcgcttatctgttgatagacatgtcacataagcatttctccagtacagaaacatgcagtaaattgaaatctgtacaccaggattagatacacccaggattgtatgccaacttccaatagctttcccacaccaggaaaatgaaatttatgataaagtagcttctaagttcaatacagtctagtggttacagagtggtttctggagccagactgcctggatttgaattccagcccctccacttactagccagtgggagagtcacttaattcctttgtgtctgagtttctctacctttaaaaaataaataaatgagatggaaagatttttttaaatgaaggcaataataaggtctacctcatagtgttgttgtgagcattaaatgcattaatatatg

SEQ ID NO: 320803 - DNA, 602 bp, Homo sapiens
atgtgaatgggggcagcgtactatctctattaggatctgttgttcatacttccttccaccaagtttgcatgtcctgtgctctgggagtacatccctcttctgttctccacattccagaggtcagtgtagctcacagcaatttcccttagatctagactctgtgtcgctatctggtaagctcacccctttctttatcactatcagtcttttttggctagaagcacatgtggcaaataataaaagtcaattaataataataataataaaagtcggagtttaatatgggttcttcaactcagtcttttctgtrgtgaggagctaagtctttatagagacactctccacttccaccttttagagttcttagtatgctttcaaggctgtgacagttttcaggactctttattctacctcaagcaagcaagctcagtacatagtaagtatgctttgtaattatggtgcttggtattatggctgtttacttgcttcattgataatggccttcttcttaaggctgctttacgttattttcgtgttgtcaaattggtttcgaaagaggagaattaagttacaatgcctttattccatcatctgcaaccaaa

SEQ ID NO: 320804 - DNA, 581 bp, Homo sapiens
caatgcaagattgtactgtaaaaagaaacaggggccaaaggactgactggacacagacacatgtggctgtccacctgaagatgagaaattccactgagaacaaaacagccccccaaaacagcacaggaagagccatagaragaaaagagagaaacaaaatagcaatcatcagtgacagcaattaaattcgtctttcttattgtgacactggagaggctttattaacctgtggccttggaaaagaagagaggctaatgtgatctaggatccagaaggtgagaggtgatattagcgcttgagcagtgggatggcagagtcagaaatggtggagagaaggatggtagaaaattcagctggaacagaccaagagaattgacctggccattgccaaggcttgaggtgtgttccgtgcaaaaagtaggcttggggaggaggtgagctctttacttcaataatgatgcatgtctgagcatgtagttgacccctagggatttggtgagactgaacacacaggtaatggccacccaaagtctcacatgtaaacaaggaaaaggaataaagcttcattaagagaaagaaca

SEQ ID NO: 320805 - DNA, 600 bp, Homo sapiens
atgtagtacctatatgtgccaggcacagttctaagtgcgttaatattaagtgtcataaaaccctatgaataggtattataattactaagatgatgatgatgatgatgatgatgatctccattacacagagaggctaagtaacttatccaaggtcacacatctagtaagtggcagcaccatttactagctacctattttcccttaaatatcctgcattatctaaatatcagcatatcccaaaactaaattcattgttcccctataaacatgcttctccttagcttttagagcatcatcatcctgttagtcactcaagtcaggtccctctcctcatccaccacatccaacttatcactatgtctgtcagtttctttgtttttctttccctgctgtctttgccctagttaggtgtttgccaagtttgcctggttattaaaacctaccagaaaaaatgtattaatgataaagattcctaggctgttcccctggggttactgaytcagtgattttggctagggtaggatccagaaatatgtatttttaacaagcaccttagatgatgtttatattcaggcaagtttgggatacagtgctgtatca

SEQ ID NO: 320806 - DNA, 551 bp, Homo sapiens
aaagttccccaccagggtgtccggactgaaaggaatgtcttaaagagctgagatactccttttggtttcctgtgcctgggtaatgactccctcaactagtagttataaccatgatagcacatggcctcagaacatgtggatagggagaaggagataggtaattgagttattcacaaacatgcaatttatgagagaccctgtgtcatctttgggcccccagatgcatcttcttggcctattgattttcctgaagcctccagaaacacagaagctggggaactgctggcaaggctttgatgtgtgcttaactgcacggaaccaagtctggtttaccttttgagctgagcatgattgtcagataacactcagtactctayttagctgctccaaaagtagacgatagatttctctttgtgctgctcaactttctacactcagacagatgtggcagcctctcactggggcatatttgatggtactttttacttgtataaataaactgggttttcccatgctcgctctaggaaagcctgaagtttttcaaaggcatc

SEQ ID NO: 320807 - DNA, 578 bp, Homo sapiens
tgttcagtgtcctcaccaaaaaggctatctggataacgtagtataaaggctgaacctttaagaatttataggatttgtggagaaagataatgatatcagcataaaaatattattggctaagaatgtatggctttaattattatggctgacagagagggataagagaaagcttttcttttctattcaagtactcttcctggcacaaatggaatgaaatgagcacagtattatttttatgatgcaaaaatacatttttaataaatacattttgtttattgactacttaaaaaatattggccatatctccagataaatatcactgtttgcaactactccaaaaataccctaaaaagcaagcagggggttgyatttcttttggctccaggatcagcattcattagaggacaaatagcacctggaatctacaatttatcctttccagccatagttttcagtgaagacttggaaaagtcatggaagaatcccaggcaattctggccaggaggacttcatgaaaattaaagccaaatgccacgtttcttcaatcctgagaaatactgaggtgaagatgtcctaat

SEQ ID NO: 320808 - DNA, 549 bp, Homo sapiens
ttgtcacatgagagacagaggttggaatttgaatgtcacaaatttagaaggacttgataaacaccttgtttttatccagtgaaatctaaaagagttatgccttaggtgtaaagtstgtctcaagactaaggatttgctctaagactcaaatataaccaaaacagacttgtccaaaaaaatcataaactgatgccttcacaagaacaagaagatcagtcattcatttaacttcctgctagattcaaaatcagcattcttctatctctgtagtatatcatccacactatgctacatacaataaaaaaaattaccagacatgcaaagaaacaggaaaatatgaccatgatgaagaggataagcaataaatagaaaccttgagatgacccaggtattagaattagctgacaaggattttaaagaagctattataactcatattatatattcatagagttatggggaaaatatccatattgagaaatattagcctggagaaatatcagcagtgaaatggaaactataaaaaagaaccaaatggaattcttgaag

SEQ ID NO: 320809 - DNA, 598 bp, Homo sapiens
ataatatgtcatgcaagcagttatcataaaaagctggtgaggctatattaatttcaggcaaagtaggcttcaaaaaaaggaggattaccagagaaaaggagattattcatagcaatacaaggatcaattcatcaggaagacataataatcgtaaatgtattgtcctgtgataggcagaataatgaacctcccccaacctcccccaaagatatctgcattctaatctctagaacctgtaaatatgttacattatatggcaaaggggaattaaggttgcagatggaattagttgctaatcatctgactttaaagtaaggagcttattctggaatatccagagggacccaatataaccacaagagtagaagaggaaggcataaagaggargcatagggagttttaatagagaggaggttggagaaatgcagtgttagcaggacttgacctacaattgctggatttgaagatagaggaagaggaacaagagccaatgattgcaggtatcccatagaagccagaaaaggcaagaatatggattttcccttagcatctccaaaagaaagatagccttccacatactttgattttaggccagtga

SEQ ID NO: 320810 - DNA, 639 bp, Homo sapiens
gcttgcaagaacataggaaaagtatatcaagtccctaccctcaaggagcttatattctaggaagggaaataatgacaagtttacaaatgactataaatacctgtaggtaacaccatatatactacaygcataaaaggatacagataacatgttaatgatttttagaagcagaaaagaaaacattcacttaggataattcaagaaaagcgtcaagaaagagttggtggtctttgagataaactttgaaagacagcttgagttttgtttaatggagatgttggggaaggtaattataagtgttgaagaaatccaatcatacacttacatactcagttcctctttcactcatcaaacttttattgagtacctactgtgtctgaggagtatagagattaccaaaaacaaagtctctgcacatcagatttcagtcactttcaactcaaatgtttctcctcctcatggagaaggaggaaaaaaagacaaacagatgaactgcaatgtaatatgctcagtatttcatataagtgcttaattaaatgctgtatgtattagtcatagttctccagagaaacagaacctatactaataggatatatatgtatatacatacacacaaaaaaaatatacacacatatatac

SEQ ID NO: 320811 - DNA, 639 bp, Homo sapiens
gcttgcaagaacataggaaaagtatatcaagtccctaccctcaaggagcttatattctaggaagggaaataatgacaagtttacaaatgactataaatacctgtaggtaacaccatatatactacacgcataaaaggatacagataacatgttaatgatttttagaagcagaaaagaaaacattcacttaggataattcaagaaaagcgtcaagaaagagttggtggtctttgagataaactttgaaagacagcttgagttttgtttaatggagatgttggggaaggtaattataagtgttgaagaaatccaatcatacacttacatactcagttcctctttcactcatcaaacttttattgagtacctactgtgtctgaggagtatagagattaccaaaaacaaagtctctgcacatcagatttcagtcactttcaactcaaatgtttctcctcctcatggagaaggaggaaaaaaagacaaacagatgaactgcaatgtaatatgctcagtatttcatataagtgcttaattaaatgctgtatgtattagtcatagttctccagagaaacagaacctatactaataggatatatatgtatatacatacacacamaaaaaatatacacacatatatac

SEQ ID NO: 320812 - DNA, 580 bp, Homo sapiens
tattcatttttgcagttactcacactttccaatttcaaagtttaatacaaaactacagtaatcaagagattatggtattggccatartctcttgattactgtacatatacatatatgtataaaggtagacataaagatctatggaataaaattgaaagtccagaaataaacccttacatatgtggtcacttaattttcaataaaagtgccaagacaattaaatgggaaaagaatagtcttttcaacaaatggtattgggacaactgtatctacatgcaaaagaatgatgttgaatctctacctcatatcatgtacaaaaattaactcaaatggaccaaagacctaaagataggagagctacaactatacaaattcttagaagaaaaaataggagtagatctttgtggccttgaattgaacaccaaaagtacaaatgaccaaaaaatagataaattagagttcatcaaaattaaaaccttttgtgcttaaaaggacaccatcaagaaaataaaaagacaacacacagattattggacttctggtttccacttccatatatgaggagtttagaagtcaccat

SEQ ID NO: 320813 - DNA, 445 bp, Homo sapiens
ttgtaattaattgttagtttacttgtttatttttagtctccccttctagactgtaacctccagtgaggacagggatcttgtctttccccttcacctccatttcatcagaatctasaagtgtctggcacatactaggtactcaataaatagttgtcaaatgaatgaatgatagacagtactaaatattttgttaatatctcaaaaattgaagcaagagttgagtacagaggagtagagaaaaataaaaaggtagttaatttaattagggcaatgtaaacctctaatacagttctcaattctggcttcacgttgaatcacttggactttaaaaaaatatcaacacctgggatcctctacggatcaacttgaacaggaatctctggggttggtgcctaagcacaggtatttttaagaagctcccgaggtgactataatgttcagccag

SEQ ID NO: 320814 - DNA, 570 bp, Homo sapiens
cgtctttcccccactgcagcctttgcagatgctgttcctgttgagcgatgctctgctcttccaccagcctctctaatggctgcctcttcagtgaagacctccttagccacactttctaaagaagcctcccctcctcattattcaacttagcaactgcttcctacacagcattcagaattttgtaattaattgttagtttacttgtttatttttagtctccccttctagactgtaacctccagtgaggacagggatcttgtctttccccttcacctccatttcatcagaatctagaagtgtctggcacatactaggtactcaataaatagttgtcaaatgaatgaatgatagacagtactaaatattttgttaatatctcaaaaattgaagcaagagytgagtacagaggagtagagaaaaataaaaaggtagttaatttaattagggcaatgtaaacctctaatacagttctcaattctggcttcacgttgaatcacttggactttaaaaaaatatcaacacctgggatcctctacggatcaacttgaacaggaatctctggggttggtg

SEQ ID NO: 320815 - DNA, 445 bp, Homo sapiens
ttgtaattaattgttagtttacttgtttatttttagtctccccttctagactgtaacctccagtgaggacagggatcttgtctttccccttcacctccatttcatcagaatctagaagtgtctggcacatactaggtactcaataaatagttgtcaaatgaatgaatgatagacagtactaaatattttgttaatatctcaaaaattgaagcaagagttgagtacagaggagtagagaaaaataaaaaggtagttaatttaattagggcaatgtaaacctctaatacagttctcaattctggcttcacgttgaatcacttggactttaaaaaaatatcaacacctgggatcctctacggatcaacttgaacaggaatctctggggttggtgcytaagcacaggtatttttaagaagctcccgaggtgactataatgttcagccag

SEQ ID NO: 320816 - DNA, 493 bp, Homo sapiens
gatttaaaattccattctctgcacttgttatctcaaaccacagaaaagcagttgaatgtaattgcaacaaaacataaaattaaaataaggacatacacaaaaaagataaagtcactggggaggcaaggacattatgatcatatgcaagaaaatgggaaagaaaagtttcacagagcccaaagcaatgactacgttcaaggataagtgctagtgagagagagattggaaagtagccacttgcacataaattactcttcgtctctttcccagtccttttctgtgactaaccaacccctacctacttacaagtcataggttccagcagcctcactgttaattttactcttgcttaggacaaaccctataatcctcccacttacatgctgaaacactggatggtcatcctaagttgccccttcctcctgaagaagctttttgccccaaacagcaatttgctcccagggccwttcctccaaatgtccatgggtagcac

SEQ ID NO: 320817 - DNA, 579 bp, Homo sapiens
catgttgtcactatgtgttacaactagtgttaacattgatcgcttgactaaggcagatttctgacatttttaaaactagaaacttaattatattctttttataccaaaattcacagccttttaaatgtacttaataacaaaaacttccatactaccaaagtagaatagccaagctagtgactcagtaatattccttgaagaataatatatgctattagtgtacactagtycttgaagaatagtataagcactgtgctcggtgggcttcttaagtggaaaaaaagagattttgattaagtaaatattattgttaattgtccctttttgtaagacccaaaggcacttcttcaatataagaacatatatcccctcatatcattgccaaatttgaattatatctatcactctactcatggtgtctttttgcctgcatgctcttccagaccagctcaaaacagttcagaaccataggatggagaaaagagagcttcatatcatattttctaatgtccttttttatggcatagtcacagcagaatgatcccaggtggagagaacagttcaatgggaaatatcatt

SEQ ID NO: 320818 - DNA, 574 bp, Homo sapiens
ggtaagctttaataaattatttaattcctttatttgtagaatcactaaggktttatttaactttttagaattctctattagaatgtatatggagtaatagatatataatatgtaatacatatttaaaatatttgcctaatgtaacagatatatcccttatatatgaaaatattccatgttaccttggaaaagtactatcttactgtgtactagtctaaataatgctaacctcatatacaaggccatttgttgtttttttataactaaatatttccaaaaatctgtttaagttcttctaagtaaatatctccttacaacattatttcaaccactaatttgcttaaacaagttctctctttagaaaatatggaggaaaacagtatccttttcttaaactgaaatatccaaaatatttggaagtttggaagttttccagcctggccaacatggtgaaacctcgtctcaaccaaaaaaagaaaaaaaaacaaacaaaaattagccatgcatgctgttgcatgcctgtaggcctgcaacctcaggggcctgaggtgggagggccacctgagccctggga

SEQ ID NO: 320819 - DNA, 415 bp, Homo sapiens
aactttgcttgattctgaggcatgaaggaaacagacatggaagaagatgatgactgttaattttatcatatgtgaagtgatttctgaggcagtaaaacatgcagaagcttgaggagagagaggtgatgtcaacacagaatttatttgctcctagatacacgtgattagtraaaggaagtaaaattaagcatcttttatttttaagaggccacatttctgcagtggagaccattgtcactttttttcaagccagtactttaagaagtttgttaggcacatggagctctcctcagtttacaactagaagcactatgaataagataaggtaaaagttttttgaggagtaatgaaaagctcatgtttaattgagtagtaatgaataaaaggtgtatagtctacacctaaaattttttaa

SEQ ID NO: 320820 - DNA, 415 bp, Homo sapiens
aactttgcttgattctgaggcatgaaggaaacagacatggaagaagatgatgactgttaattttatcatatgtgaagtgatttctgaggcagtaaaacatgcagaagcttgaggagagagaggtgatgtcaacacagaatttatttgctcctagatacacgtgattagtaaaaggaagtaaaattaagcatcttttatttttaagaggccacatttctgcagtggagaccattgtcactttttttcaagccagtactttaagaagtttgttaggcacatggagctctcctcagtttacaactagaagcactatgaataagataaggtaaaagttttttgrggagtaatgaaaagctcatgtttaattgagtagtaatgaataaaaggtgtatagtctacacctaaaattttttaa

SEQ ID NO: 320821 - DNA, 333 bp, Homo sapiens
aaccattaggttcaagaattataatgataatgttgttaaaatacccactccttgaacaaatatgtgaatggaggaaaaacttaagcacttaatcattattcacctgtgctaagtgggagtggtgagggagcagaagtgtgagaagggagggtcttatcagtttcatagagtaccttccctatcctgtccacctatacaaattgcatttatcatcaasgcacaaggcccagctcccccaaagcaccagcagtgatttcttgctcgctagcacttccccaggatttacagatggtaacattcgtttggcagtttcatcagatatcatcttgtatt

SEQ ID NO: 320822 - DNA, 446 bp, Homo sapiens
gcctccccgacctacggccgctggacctcttctccatgtcgtcccagtcaccgcaatcttccgctctgggagtaatcacgaccggctcgtccacttgtgccccctcagtcttactcaagtagatgtccaaagttagcaccttagcagggtgggcgtgacccttggggcgggctgtgcagtctgcctgcgcggagctggccgtgtgcgctgcgccctcggccggaggctcacctggcaaatcagacgcgcccttggggggctggctgcgggcgttgcggggccccagggagccttcttcggcacacacactgggggctscgttaggggcctcgcctagtcctcccgcgggccgctcctgggtgggcgaccctggcgcacccctcacacccaggaaagcctcctgttcgtggccagcacctggtgaagcgtcctcccccggactgcgg

SEQ ID NO: 320823 - DNA, 559 bp, Homo sapiens
gtttggcatttgatctggtgggactctctaacccgtttctactgtttcttctccttcctgcagtgaatagagtgccaagtttccccaaaactggcttccttctgttgtcttctggaggttgtgctctggactgaaaaataaaagggatgaggagggaacatatgagaatctggtgtttttccccttagacgtacattacagaaccaccagccaaaatgataacagaccagagtttctaattgaaaatgataaagttatgtttatgttacattcattccaacaaaataaactctggttttacttttgaattttgcttaaacaccttaagtttctggcagtagtcagaatagcatttwctttgaattataattcttgttttttaaaggaaaatttgaacggtccaaataatcacatatacaaaataaatagttccttgccctctctaggttttttaccttcttcctcaataaagatgcaatttataaacagccgtgcatgtgaccatggggcagcagtaaacacactaaagtatcctaaggcggactttttcccgaaacac

SEQ ID NO: 320824 - DNA, 493 bp, Homo sapiens
atatctcctggagcaaaacggctagcatccagtgcccgcgccagaaggcgggagggagcgcagaacaaaccaataaaagcaaacccgccaatgggcgcggtggcgctccggggtttgccagagtggggactgggtaggtgcggggcatagaggtgggcaggaagaggaggaggcgagcctgggaaagcgggggagcaggggcggcgagcccagcctggctcctaggagagggaagtgtatttgcgtaaggactcctctgaaaccaggccaaacgtgcggctactgtatttcttaagaatcaacttttaaacattcaaaaccyaggtgctagcttgagtcctggcgacgcaggaaagagccccacctttcctggaaaaggaacattcaggacagtaccgactacggggaggttccccaatcaccctttgaagctccattgcgtttgagttacatgcagcaaatggactttggcgatgggaaataggaaagataa

SEQ ID NO: 320825 - DNA, 545 bp, Homo sapiens
cttttcacagttactcaggatcatcactgtgagcattatttaatgcacagtggtgtcctcaggggctctgaagttctgtggggctgcttgttcycaggccacaaagctttttgagttcttggttctgattgttatggcttttcaataccacacccttctatcagcttgtcagctgtcacttctgcttcagttggggaaccagcagccccaccctcctctaatgtgccagaaatcaggaaaccagaaaaccatgcctactagccctgtctctaaactttacaaggtcttcttgtaaacatcttcgttcctgggaagggttctgagaaggtgaggatgctgaagaagtgacttttctataagagaggggttaatgtacctgcttcataaacaaacatagacttcttagtgatcacttacactcatcaattcggttagttttgctaaaatgttttagccgtggtactccaccatgttgtgttccccagaacaccatgccaagaagagagtggctgtaaatgaaatcttttaccaacaaaatgggtctg

SEQ ID NO: 320826 - DNA, 545 bp, Homo sapiens
cttttcacagttactcaggatcatcactgtgagcattatttaatgcacagtggtgtcctcaggggctctgaagttctgtggggctgcttgttctcaggccrcaaagctttttgagttcttggttctgattgttatggcttttcaataccacacccttctatcagcttgtcagctgtcacttctgcttcagttggggaaccagcagccccaccctcctctaatgtgccagaaatcaggaaaccagaaaaccatgcctactagccctgtctctaaactttacaaggtcttcttgtaaacatcttcgttcctgggaagggttctgagaaggtgaggatgctgaagaagtgacttttctataagagaggggttaatgtacctgcttcataaacaaacatagacttcttagtgatcacttacactcatcaattcggttagttttgctaaaatgttttagccgtggtactccaccatgttgtgttccccagaacaccatgccaagaagagagtggctgtaaatgaaatcttttaccaacaaaatgggtctg

SEQ ID NO: 320827 - DNA, 545 bp, Homo sapiens
cttttcacagttactcaggatcatcactgtgagcattatttaatgcacagtggtgtcctcaggggctctgaagttctgtggggctgcttgttctcaggccacaaagctttttgagttcttggttctgattgttatggcttttcaataccacacccttctatcagcttgtcagctgtcacttctgcttcagttggggaaccagcagccccaccctcctctaatgtgccagaaatcaggaaaccagaaaaccatgcctactagccctgtctctaaastttacaaggtcttcttgtaaacatcttcgttcctgggaagggttctgagaaggtgaggatgctgaagaagtgacttttctataagagaggggttaatgtacctgcttcataaacaaacatagacttcttagtgatcacttacactcatcaattcggttagttttgctaaaatgttttagccgtggtactccaccatgttgtgttccccagaacaccatgccaagaagagagtggctgtaaatgaaatcttttaccaacaaaatgggtctg

SEQ ID NO: 320828 - DNA, 578 bp, Homo sapiens
ctagtacacattctgctaacagctaaccctagtctggagaaagtgaccaaagcttgtcttcctcagtcaaatgatggtgttgggccagatcatctttatactccctttgaagttctaaacttctttgcttttgttcgtcataaatataccaccccccacttccacccctacacacaccccgcccccaaaaaacccaatatgctttcacctctgggaggatgggtgccaggattagccagctgcttaaaagaaagatttaaaaacaaattactctcaacagaatctgaaaggcaagtttagttagaaattactcatttcctcaaacaagaatttgaccagacaagtaacacccttattttgtgtatgagtagaagagcttartctagagtgaatgggccctggaataaatcacctaatggattcttaaggagttccctctacagcaaagacttcttatcccagttcaggggaaccagtgcatcaacagaagcaaaatgagcttcagtacttactatcagtgacatcttctcaaccccttgagactttcctttgagatctataaaagcactaatgacctg

SEQ ID NO: 320829 - DNA, 421 bp, Homo sapiens
tgtacctgtattatgattattactgcagaaaaagcagactagaatatggccaacaaagggtagaaaattcaaaaaataaaaggggaggggacacttcatgatggygggaatcagatgatctttttaaacattgctttatttccaatattatttgagcagtaaataaaaactctaggcaaaatattccactaatgaggacattttgaaatagggtttctcaagtcttacttagtcttctcgtattatatacttaaaacaaataaaagataaatcatttagcataccaattaccacctaagttactcagaaatgttgactcaggaagtaagcgatgctttcctctgccaaaactgttactcatccttactcattctcatgtaagaatgttccttttctctgtattgcatcttgacactcgtct

SEQ ID NO: 320830 - DNA, 547 bp, Homo sapiens
gctttattcaaaacacaggcaataacaaatgctggcamggatgtagagaaaagggaagccttgtacactgttggtgggaatgtaaattagtacaatcactatggagaacagtttggagcttcctcaaaaaactaaacatagagctaccatatgatccagcaatcccactgctggctatatacccaaaagaaagaagaccagtatattgaagagatatctgcactcccatgtttgttgcagcactgtttacaataaccaagatttggaagcaagctaagtgtctatcaacagataaatgaacacagcaaatgtacatatacacaatggagtactattcagccatataaaagaatgaaatcctgtcagttgtgacaaaatggatggaactggagataattatgttaagtgaaataagccaggcacagaaagacatacattgcatgttctcacttatttgtgggatctaaaaatcaaaacaattgaattcatagagatagagaatgaaaagatggttactgggggctgggaaggctagtggtgggaagga

SEQ ID NO: 320831 - DNA, 254 bp, Homo sapiens
gtctaattgttcattaaacagaaactctyctggcagcagaatgtaagcttgattgaaggggcagaattgtgaggtagtaaaagttaggagggcattggggtaagcaagacaggaactaaggtgggtcggacttgaacatgctgctctgtagtttcccagggatggacagttcctgttttcatcttttcttggaggttcttaagctaaccaagttgtccacatgcatttgtgggatattaagaaaaaagaaaaac

SEQ ID NO: 320832 - DNA, 627 bp, Homo sapiens
ggtaatttttttcctgtcatgtaattgcttctggacaagccaaaatttggagatgatgaacatgttcagaaatgctgctctgagaaaggtagggttccatgctggccatagatgggtaagtgtgagagaattaatcaaagcataatgaaagggagtttccttttcagatagcacatgtgacctaccaagccacccaggactcttttctgtgcccaggtaagcagaggctatgctctaatatctgatggatgagtcatcttcaaatgcagtttcatcagcttcttcaygttttccttatgctttaatcccatgaccacagcgaagctgaccatatgccttgttttcctaggacagtaccagtttacatcagttgtcctggcactattaacagtgcatccttttgctctctgaagtgtccccctttggacaataattatatggtcaccctacccatggactatgccatcaaacctgctcagcctggaatccaatgcatcaccaatctgccaaaaacctgcccacacaacctgctctttcctttcttcccaccatccattgctcagctgatgctcttttcattgtccacaatccaggtcattctcttctccatgtagttatattgtttgc

SEQ ID NO: 320833 - DNA, 571 bp, Homo sapiens
tagtggtcagcttacaggtcataggtggattcaaagattttctgactggcaattggttgaaagaattaagctttgtctatacacttgaagtcagtagaaggaaatgcttgaggtaagatataagggggttgtggagagcagggttcttattatgtagatgaagcctccaggttacagccttcagaaagaataagtggcaaatgtctgttttgggaccttaaaaggtgtcatattcttaatctctcctagatctgggaaaagcctggctgcattattggagaatctctacagatgcaaattttccccactaaagatggctttgcagggccatttcaaaatayaccaaagaaatatattgtggggttacatattttgatttctttcagggtcagctatctgtcatgtgatgctatgccagagtcaggttagaatttggtatcttattgccaaaaggaatctgttgtcagtcttatgatctctattttatttatagagatcatgttaatgctggtcagctctgcctaaattccaaagggagaagggtataatgaggaataatgaggcatgtccc

SEQ ID NO: 320834 - DNA, 609 bp, Homo sapiens
aatatgcagacttccacttacaataaagggcaatgactgcgattaaatttttatataatttcttctattatatcactgattacctacaaatcctggagyaaaccattcagcattgcccacacctcaaggaacaaaagcaacacaggcttttgaataggatgctgaacaaataggatgccagaaatagtccctttaccttaaattattagtttccacaagaagaaactgagactaatgtcagaacctgtttgtatggtataccaccatgtacagtaaactatatatagttctcattataaaattgggcttcatcaatttcaacagacactttttaagttaaaaaacattccaaagattattattaataggtgtcaatactgggtgggcttagtacagagctcagtgcttggcactcaataaacacttattaaattaatgaatggagtcaagatcctcttgcccaaaataagcacaaactttagcttaaccttgccttctaatttgacaaggcgtattaaagactagttggctataagtggcataagctcctttagacagagcaggagtttacaccccttcaaacttcccgccatgcctagcaaaaaggtg

SEQ ID NO: 320835 - DNA, 505 bp, Homo sapiens
ttgggggaggaataaaaaaggacttagagatgtgaatcttgcttaaaataatcgttggcgattgcttgrgtgcagaaaaagagtaaaaagattgaagaaacttggatcaaagctggtttcacaagtacaaggaaacagtggctgccaccatggcgtggtttaaaaaaatgcctggagaagggacattctggatccactgctatgggttcactactgaggatccttaacagagtgttctactttgactcagtagatacttactgaacagctattatgtttctagtaatatatggggcatggaaagttcaatacctatctttgagaagcttactccaatttaatagatgggcatataccccacaagccactaaagaaagggtttttgtgctttcaaattataacgtctctttcacattttctcttttgccttccttccctatggccattaaacttgaaccctccagtgcatgcgtgttacatgcagtactaagagtagttcaacagt

SEQ ID NO: 320836 - DNA, 589 bp, Homo sapiens
actgcagggcctatggagtgaacactctttagctgggtgctttcactagctcacccttgggaggagagcacagagattagtgttggstatttgcagatgccttcatggagcactgtccttgaactgattcctgaaggatggaaaaggtttgggagctggaggtgaagggaagggtagttctgtccatggaagcttcctgtgcgaagagtccttcaggtcatgtgtgtagttggtgactgcaaaggccagagcacccagagtactgctatactctcctcgaaacctcacttcagaattctcacacttgtaaatttttgaagctccaggtaggtccacgcatcatgagaagtctaaatgcaggatctctaaacctttatatcgggtcctcagatgccctcaaaagtcagtttctttggaacatatgacaaatccaatttcctatgttagatttcaaatgccagacatgctgatgcatttactgaaacaaatggctatgtgccttggacaagcccttcaccttcccctctgggtcacttaacctctgagatcccacactccgacctcctcttccctttatctcaacctctga

SEQ ID NO: 320837 - DNA, 564 bp, Homo sapiens
tccagccagggaccattctgtaaggccttgtactctgaaggatccacagaatcttcaagtttataatatgtgaaaaacagaaaagatttctaaaacccactaggttggtttgctagtgacaggattttagcttcaatgcaagcagtgaagtcttgagtggtgtgtctttgaattgcatctacccgatctatttttccatcaagggctcttaagcaccacaacaacaatgaccttttccctactactgtgtttaacccccaatggtcctcattatacggctcgcttcaacaaatgctgatgtccagctttgtctgctccttctatccccagataatttagagtcgactctaataaaatgttttgcaacttacagcatgaagtcattaaagatcctctgtcaggtaaytgataaaataacagtccagcccatccttcccacactggcttaaagttcatgcaacctgtacttgtataaattatacctaaaccacctttggcctgctgatttgagaatatcatccatcatccctcagtggatgaatggtgatactaatccctggccct

SEQ ID NO: 320838 - DNA, 313 bp, Homo sapiens
ttgactttaaacccacacttatactgagtctacatgcactgataagcaatgttctcagaggtcatcaaataccaactctccatcagaccagtcaaaagtttccacagtccacagggatcgcacaagccagctctacaatcacacacggtgatgttggaacagacaatcaagtagacccgaaggtttccatttaacggccattcagtacacctaagtrgctggagtagatgtttgagctttctcccatgtgaacagatagagctgtaaatatgtcctcttgttctcctgacgggagcctcaagaggttgatttt

SEQ ID NO: 320839 - DNA, 549 bp, Homo sapiens
accactggaacggtgattcttcctgtgaccactctggttctgcttggtctcccctctgccatatggtttcctccttttttttctttacacattactgagaggttaaatttttacaaatcttattgtctttgagctgatggaagataaggaggacttgtacacctggccttctccaggtggaaaactccatttgagaaactaattggctatgttaaatgttggtacatgagcatactttatgatgaaactcaggtgggagaggcaggttcaaagaagaggtcaagagaaccacttcccatagaatctgatccccttctctttgagagagaaccaggctgtagtccagttacaccactatagtaatttccaaactgaagtaacttaaaactagaagactagaaccccagacttaatcatcctcatttcattctcctcctctttgctatgattatcacaaaamgaaacaaaaataatattttactccccaatgttatgtttgataacattgagcagaacgacttgcatatatttgcctcaaacattgggtaa

SEQ ID NO: 320840 - DNA, 621 bp, Homo sapiens
acctttcaatcccagaaagcaagaagtatttaatcacacacacacacacacacacactacacacatacatacatggaggtgttagatatgtcaaaggaacacaagagccaagagcttccaatgaccaaagttgaaacaacttgaaaaataaagaagtgaagtaaaataaatatccatgagtccatacygatataaatgagttattaaatagataaatgggtagaatagtcaaatctcccattcagaacaattccaaataattgatgtggatactcagccctcaagaagatagaacataactccccactctttaagtgggctggctaaaatgactactttccaaagagtgcatacagcatgctcaggggaaaggggagatttcctgactaacactacctcagacatcacaaatgatatcacctttttgtatccttgataggaaatgatgagaatagcactttttctctgtggtcttcctttaaaaaaccataacaccactctactcagaattaaaacatgagacaaatttacagaatacctcacccataatcctaaaaactgttacggtcatggtcatcaaaaaatggaaagtctgagaaactgtcatagccaagagaagcc

SEQ ID NO: 320841 - DNA, 510 bp, Homo sapiens
gaccccgaatatcttccttgtttatagagctggatagcttgaatattattgactgatactgataggctctcacttctcttactgggtcacactttttcctcatcagttggacaaaatctgaacatagaaggtcttttatgtatcatgcagctctctatagagccaagttaatgttgcataccacaggtttttgagatagaacaggtgaatgagaaaggtaaccagtaatctaaaatataattatgtatttagatacaaagaaaattctctcttcatggtcctagactaactcccagcttaagagacttagttggaatgcacaataggctgtttttttctggagtgtggacatgatggaagataaatgtgtgtggcacatccaaatctatgtctaatgtcttttgacactgaagagcccctacctttttcctccggatttctgaagccagcacatccttcgtartgatcccaacattagtccaagtctaccttagagatgtcttccccatt

SEQ ID NO: 320842 - DNA, 440 bp, Homo sapiens
gtttggagcccatagataaataactataaattcaaagtaaagtatctaagtgccttaggggagaaacaaggagatagagattacactggtttctgggttcgagaaggaaatgcgatttcacaggaattttgaaagatgtgtgcatttttttatggtgattgttgggggtaggattttcaaggaagatagataaacaagccacagaaatgggaatttgtgagatttccttggagagatccctgtaattgggtggctggtaggtagctgtagcaagtaargcaggaagatgggactgtagaagacagaggattggatgaccagaccaagggttcattttaagtttagtaggtaatagagaatcatggaaggctgtcacccagagaagaggaacaattagagttataggacagaaaaagtgcatctggaagtttgggatggat

SEQ ID NO: 320843 - DNA, 538 bp, Homo sapiens
tcagaaataaataagacccagtcccaagccttaggagcttactgtagtttggagcccatagataaataactataaattcaaagtaaagtatctaagtgccttaggggagaaacaaggagatagagattacactggtttctgggttcgagaaggaaatgcgatttcacaggaattttgaaagatgtgtgcatttttttatggtgattgttgggggtaggattttcaaggaagatagataaacaagccacagaaatgggaatttgtgagatttccttggagagatccctgtaattgggtggctggtaggtagctgtagcaagtaaagcaggaagatgggactgtagaagacagaggattggatgaccagaccaagggttcattttaagtttagtaggtaatagagaatcatggaaggctstcacccagagaagaggaacaattagagttataggacagaaaaagtgcatctggaagtttgggatggattggaagtgggagtgaaaatgcaggtgtcttagaggtagagaacagccaaacc

SEQ ID NO: 320844 - DNA, 691 bp, Homo sapiens
tcacctcaagaggagtcagaaaatatttggctctggctctttagcatgggaagtggtggcccacagacatcacagttgagatattaatagattattccaaatgttatatttgcatagatgcaccactcattatgcagattgccaattatgaattatttgttctttcttccaggagagttgtttatttgcaaactgcacaagggtgactttggacagcatggagacaaggctgtcactyagcatatctttttgtgggcctctctgcaataacctgtactttgacaggttcttataaatagccaggtgaaggtcagcagtgggtgctgggtaggaaggtgaggagagggaagaaagcaacaggatcttaagaggactaaaatgagaaggtcttgaggttgtcatgatcagatggctaatgtgaaatagagatagttttgctctaagttaggcacaatccacaatgtgttcactcctttttagcaacagtatttcttgggttgagccatgcaatgaatcctgtcttcacaattcaaaaacaaccaactttaatagttgagcactgactatctaggggcactgtcttttaagtccttcacttgggttggctctttcacctacctattaggagaaccgaagcatagaggatttacatacttgccctgtgctgagctggtatgtgatcacaggctgt

SEQ ID NO: 320845 - DNA, 618 bp, Homo sapiens
ctgcattctgtcctgtggctactgggggatgaatgaaacccagtctcttctattaagggtttattacgcaaataagggataaaaatcacacacatgatgactacaatccagggtgacttcatctgtgctgtatcagagggacacaaaatgctatcaggtctcagagagaggagaggggacttctagctgggtggtctgacaggaacgacaagatgtgctacccagtttcaggggaagagaacaagaactgacggatacgggtcctgtccattgcattttatttcaatgtttttaaagacttaaatattggaagcgagggagtgagtagagaaaaaagtgaatacattaggggtggcacagagggacaaagagagaggaaaagagagatgggggaatgtttcagataaactttcaatgtacaacactacaaaatctccccttcttcttcagagccctgatgttttcaaaatactgagctgttagttcttgtcatttcaattgccctttctctctgtagcatatttttaaaattgttggcttctaaaagataaggatsatgagcgcctattttaataaatcagtttacagtgcaagttatttcccttcttggaaatcaga

SEQ ID NO: 320846 - DNA, 421 bp, Homo sapiens
aatggttagttaatgcctgcttttaccactttcactgaagagtgtttcctgtcattactctgtatctggagaaactgcatcaatatctggggccatagtaagaaaaatacaagcaatctaaaacttgttcacggacagtgactaagaaaataaatacatttgaaatcacaggatttgataccagtggagaagtatttctggagaaaaagggtgatagcctgatttaaatatctgaaggacyggctgtcacagtttggtgtgatcctcaaaacacatctgggaccaaagtgggaaaattatatagagactgatttttttaaaaaacacatcataaagacctaccagagatatccaaagattagataagtaccttgagagaacgtattacattattagagatgttcaaagcacagattggaca

SEQ ID NO: 320847 - DNA, 592 bp, Homo sapiens
aattgagcctttcatctgttacagacattttatcctagagaggtcaaagtgtaaggaaaacacagttccttaggcacattacatttcaaatgaatctaaagagacagtctattaaattcgattccttgaaaaggtttctttaaacaaatcagctatttttgcttttacagcaaagatataaaagacagtatcatatacagtaactaagtttacctactccaaggagccatttcacagtagaggagcataggcaaaaaggaggggttgttgggggagtacagtgttgaatctagcacgaatacaaaaatctgcatttgaatctagcgttcacaagctaactgtaagatgaaccctggtgaattacttgtrtgtcttctctctaagcctcagtttcttcatctgtgaaactggagaaggaatgggaaagaagaaattaacgtttaataaatgtcttctaagtgttaggccctgtgctgggggattagatacatctttttattacatcattctcaaaaatagtgcaaggccagaaccactatctccatttcagaaattaaatcactaagtctcagagtttcctccaaagaagata

SEQ ID NO: 320848 - DNA, 572 bp, Homo sapiens
aacaaaatagtaaaacaaaataaagaaaagcagygacatcctaccgatagataacaactcttacctaactttgtcattgtttaatttactcaataacaattttggtttctcaataatgtgcaagttaatctacaagtcagatatttcatggtgaatacagcatcacctggaaaacaaaacatttatggctatgcccttcaaataatatacaatctcctccagggatggctttgttataattttagcacgcaacacagagttaaggagtcaatatgggagctcatcttaagtaagtgggctgaggctcctgcactattctgtaataaagatgcagtgcccatctatgacttgtttctttgctccttttggctggagaatttagtagagcagtaaacaggactattatacacaaatgtggctgtagtgagtatgtaggttggaaagtttacaggataaagtaagggagtaaagagtgaaaaacgggtggcaacactacagtaactttataggtgcgcgatcttgaggacgcttccttgccataacactggtgatttcagactgaaatggttgtt

SEQ ID NO: 320849 - DNA, 642 bp, Homo sapiens
agatggaaaaatgcatttacaatttatcctttctttaataacaaaaagtatactggtctaaatcacctgggctgacttaatagtaaacatactaaatcatccatgatactgagaagtggacacatctaatcagagttctctatgctgaatatgatgatctatcatagygcccttttatacccacaagcaaaccctagacccagagaccaggaatatttcaccaaaacacaggttaatagaaagtagatacataaatatgaagcagtcatcaaatgcctgtgcaataaaaaaatgtgacataatcttttggtggactatatattagaagctggcccacttttaatttaaaaatgctttgcagctttaagtatcttgtttaaaagatatttggtagaaatcaccagaaattctgacatttaaacacagtttggataaagcatcagagaatacctaaggcttgctgtaagcagtaaaacaaaaggcactggcctggttaggctatgtgtaagacataaaagaagggagctaatgaaaaaataatgaggtttgaatgcttcatatgaacaaagtttgcttttgcagtaacgtttcagaactagataggggtgacagcggcacaatgtagtgaatgtagtatatgct

SEQ ID NO: 320850 - DNA, 642 bp, Homo sapiens
agatggaaaaatgcatttacaatttatcctttctttaataacaaaaagtatactggtctaaatcacctgggctgacttaatagtaaacatactaaatcatccatgatactgagaagtggacacatctaatcagagttctctatgctgaatatgatgatctatcatagtgcccttttatacccacaagcaraccctagacccagagaccaggaatatttcaccaaaacacaggttaatagaaagtagatacataaatatgaagcagtcatcaaatgcctgtgcaataaaaaaatgtgacataatcttttggtggactatatattagaagctggcccacttttaatttaaaaatgctttgcagctttaagtatcttgtttaaaagatatttggtagaaatcaccagaaattctgacatttaaacacagtttggataaagcatcagagaatacctaaggcttgctgtaagcagtaaaacaaaaggcactggcctggttaggctatgtgtaagacataaaagaagggagctaatgaaaaaataatgaggtttgaatgcttcatatgaacaaagtttgcttttgcagtaacgtttcagaactagataggggtgacagcggcacaatgtagtgaatgtagtatatgct

SEQ ID NO: 320851 - DNA, 670 bp, Homo sapiens
caactcagactggttaatgagagttgagcaatagtgaaagaaagaacaagacagcagagctataatgtagaaaaaggtagcagatgaaacaaatggttgaacacaagaagttaaaaagaggaaaaaagcaacgtagtggaaagggactgtgagctagtcagaatcaagagggtcaatgccatgtttctttttctgtttttttgtttgtttgttttgtttttttgagatggagtcttgctctgtcatccaggctggagtgcagtggtgcaatctgggctcactgcaacctctgtctcctgcgttcaagcaattytcctgcctcagcctcccacacagctgggattacaagcatgtgccatcatgcctgactggttttttttttttttttttttttttgtatttttgtatttttagtagagatggggtttcaccatgttggtcaggctggtctcgaactcctgaactcaggtgatccacctgcctcagcctctcaaagtgctgggattacaggggtgagccattgtgcctggccagggccatgtttcaaactaacaagtaatttcatttttcttggctttagtgccttcaactgtatctaggctcctttctctcaagtttctcttggtgccaacattttgtgtttgtcagcacagccaaaggtcagagaatg

SEQ ID NO: 320852 - DNA, 571 bp, Homo sapiens
ctaaaataagtaaagcttataaacatggagggattaaaaagataatagtagtttattacacaatcacttggggatggaagccaggcaattctgtgagaataatttgtttctaagttcaaccagtaaactgatcctcccatcatcaaaaatatgactaattatcaaaaggtaaaggaaaacaagtattactgaaattaatgagaggatcaagggtggagaaatggaccagagctggaagaagcttgagacagacaaggctacttggtgattgatagtagccttgaatgaccatgggattcactgctacggtcaaagcttttcatacagttttaatatttcagagtacagaactgcttgatgctaattacctagtgatgtgccaaaaagatgtacttatttcactcgaaacataagaaaagccctctttcccatattgacatatccacaggagatttctgcaattcataaaagaaacattaactgattcagcataaaacacttcaaaatatatacatgaatatataaacrcactttctgttgcaaattgttcattactgaatcattatcaacc

SEQ ID NO: 320853 - DNA, 535 bp, Homo sapiens
ggttggggaaatgtggtgacattaagaaaaatactcatattctgaactttaggcaaagcaacagtgcaatacagatgtaaattatgttatcaaggacaatttagaatatacaactgttaagaaaagtgattccaaagtggaaattagattttgagctacctttaattatagtttacttcttttttttttttttttccttttttgagtcggagtcttgctatgtcaccacccaggctggagtacaatggctcgatctaggctcactgcaacctccaccttctgggttcaagagagtctcctgcctcagcctcccgagtagctgggaccacagttgtgcaccactacaccgagctaatttttgtatttttagtagagatggggtttcactatgttggctaggctggtcttgaactcctgacctcaggtgatccgcccactttagactccyaaagtgctgggattacaggcattagccaccgtgccaggcccagaatgttctggtcagtgactgaaattgatcaaaatgtatttatgt

SEQ ID NO: 320854 - DNA, 507 bp, Homo sapiens
tgttttctataaaccttctcatcctcacctatttatatttaatttgcaaatctgatgttaaggggagagaagtggagagcatgaggaagggtagttgagttggtgaatgttttgcatcctagaatacttcatcacagatgttaaagtctcagaaagtcgtttyttttttttttttttctttgagacagtatctcactctgttgcttaggctggaattcagtggactcactgcagcctcgacttcctgggctcaggtgattctcccatctcagcccccctggtagctgggactacaggtgtgtaccaccatgcccagatgattttttgtattttttgtagagttgggtttttgccatgttgcccaggctggtctcgaactcctgggctcaagtgatccacagcctcagcctctcaaagtgctgggattacagatatgagccagtgcacccagcctagaaagtcatttataaagcctattcaaattgcccaggtctgactgtgtgcttt

SEQ ID NO: 320855 - DNA, 507 bp, Homo sapiens
tgttttctataaaccttctcatcctcacctatttatatttaatttgcaaatctgatgttaaggggagagaagtggagagcatgaggaagggtagttgagttggtgaatgttttgcatcctagaatacttcatcacagatgttaaagtctcagaaagtcgtttcttttttttttttttctttgagacagtatctcactctgttgcttaggctggaattcagtggactcactgcagcctcgacttcctgggctcaggtgattctcccatctcagcccccctggtagctgggactacaggtgtgtaccaccatgcccagatgattttttgtattttttgtaragttgggtttttgccatgttgcccaggctggtctcgaactcctgggctcaagtgatccacagcctcagcctctcaaagtgctgggattacagatatgagccagtgcacccagcctagaaagtcatttataaagcctattcaaattgcccaggtctgactgtgtgcttt

SEQ ID NO: 320856 - DNA, 562 bp, Homo sapiens
cagagcacacaccatgagagtattgtagaattgctttggtctaaatttgggtgttgaaggcagagtgaaactgaacaccattctccaagtgtggattgtggctaatctgctctgaggttgctaatgaagacatacctgggactgggtaatttttaaaggaaagaggtttaattgactcacagttcagcatggctggagaggcctcaggaaacttaaatcatggtggaaggagaagcaaacacatccttcttcaygtggtggcagcatggaaaagtgcagagcaaaggggggaaaagtcccttataaaaccatcagatctcatgagaactcaccatcataaggacagcatggaggtaaccacccccatggttcgattacctcccaccaggtccctcccacgacgtggggattatggaaactacagttctagatgagatttgggtgggcacacaaaccatatcaggcaccttctaacctttgcggtatttttagtaaatatatattatcaaatactagatttctgtcactaaaaagagctaaatgtctaacaaatgtagcagta

SEQ ID NO: 320857 - DNA, 373 bp, Homo sapiens
cttgcaagtctccaaggtccattatgttactttgtatacctttgtgtacccttggyttagctccctcttatacgtgagaacattgcagtaggacattttcagattaaaagaagcctgcatccaagcatttctctcgttgttgatgaaatataccaaaatcaactcttgaacacagactgtcatcttcagaacccaagaaaaattaacacaatatattgcaaaggattgtttttactatactaacttttcctaaaaatagtggtgattatccagcacatataaacagagagtttgaacaattgtttcaaaccaaatcattaaacccgattttaagttttgagaagtcatgctttctagagcactctaaatggct

SEQ ID NO: 320858 - DNA, 373 bp, Homo sapiens
cttgcaagtctccaaggtccattatgttactttgtatacctttgtgtacccttggtttagctccctcttatacgtgagaacattgcagtaggacattttcagattaaaagaagcctgcatccaagcatttctctcgttgttgatgaaatataccaaaatcaactcttgaacacagactgtcatcttcagaacccaagaaaaattaacacartatattgcaaaggattgtttttactatactaacttttcctaaaaatagtggtgattatccagcacatataaacagagagtttgaacaattgtttcaaaccaaatcattaaacccgattttaagttttgagaagtcatgctttctagagcactctaaatggct

SEQ ID NO: 320859 - DNA, 373 bp, Homo sapiens
cttgcaagtctccaaggtccattatgttactttgtatacctttgtgtacccttggtttagctccctcttatacgtgagaacattgcagtaggacattttcagattaaaagaagcctgcatccaagcatttctctcgttgttgatgaaatataccaaaatcaactcttgaacacagactgtcatcttcagaacccaagaaaaattaacacaatatattgcaaaggattgtttttactatactaacttttcctaaaaatagtggtgaytatccagcacatataaacagagagtttgaacaattgtttcaaaccaaatcattaaacccgattttaagttttgagaagtcatgctttctagagcactctaaatggct

SEQ ID NO: 320860 - DNA, 579 bp, Homo sapiens
aagaattttattcttttacttcctgaactaaagcaacatgttccagactgtgtgtttctctattaaaaacatcaaattcaaccagacttatttgaataaaacatacattcattaggctcactgtaaggttttagtttattcagtgataataaagctgaaaaataattgaatcagactagtgttaaacgcagaagaacacgtttgtgtttcaagaaatactagaaatatttcaaagcagttagaagcagagtcctagaatgtgagaacggctcagaggactgagaattccaaggtgcatatggggtttgaagagcaaaaagcgcatcatatgtttgctgtggctcttccactaagatatctggtggtggagaatcctaaatttcccctttttggaaaatctcatttgaaacataggctggttgtgaagaaaaaagggmatcagctgagtggcaaagtgtcaggtctgattgcttcatctcttccctatgcggagggcatgaagggagagtctttgaaagaggaaatgtgctcagggaatttatagagagacacagtctatggcctgtaacatttgcaaaa

SEQ ID NO: 320861 - DNA, 564 bp, Homo sapiens
gcattcaagtaagacagcaaggtccaacctgaatggggctaccgtaatctggtatcaacatttttggaagttgcccaaatgctggctctttggctcttggggcacgttcaaggtctcctctctgcctaccaccacccactcgattctgcatccccaggatcccctgaacagtactcatctctgacaggtgacagactctccagctgacctcctctctgctcctgacctttgggttaaggctgctccaccctcaagggagtcgtcttgggaaagatcctttaaagatggctctggtttggcagcaytgggcagcatgccctgtcctggaatggtgctgggataggggtcatagaactaagtctgctctaccatggcatgtccagaatggatggggaagcacctctcttgaaaatgtgatggtgagtcttaatatgtcagctttgaggcttcagcagagacttaagacaaaaagagaagtaccatttatgctctcattatttcaagacaaatagaatcaaatacatagaaccagaaagtttttattcaatttggctggtacatcct

SEQ ID NO: 320862 - DNA, 627 bp, Homo sapiens
atgctcagtgaagcatgacatttaaaggttttatgcattttgttccaattagctatgtgatttattccaggagtaggaaataaaatattgctaataacatgacatagaccatacaccacggtgtccatcactgaaaattatactgttcatttgaatctcagaattcacatggcctcttacctgcaacacaacctgattagaacggtatgtggatcctttctagaaaacttaagatgggtcytttccaaggagtagctgtggcactattgtctgaaatctgaaaacaaatactaaggagaataaagctgctcctgggataggccagtgcataaaagcctggatgaggtctgcttctcggtcgattctctattccagtctttgggtctggctgttccctccctgatctgtacctctacgatcccaaccatcttcccacagatccctcacctgtcctgtgcttctaactcagatccagtctttcgactctgagtctccccttgcttatttgtctataaaattcttggccttgatttatatcttgattcaaatggtgaatattattaccgaaggcaatgttaggtcttacttttaggtaaggccagttatatatcgttttaacctactgac

SEQ ID NO: 320863 - DNA, 627 bp, Homo sapiens
atgctcagtgaagcatgacatttaaaggttttatgcattttgttccaattagctatgtgatttattccaggagtaggaaataaaatattgctaataacatgacatagaccatacaccacggtgtccatcactgaaaattatactgttcatttgaatctcagaattcacatggcctcttacctgcaacacaacctgattagaacggtatgtggatcctttctagaaaacttaagatgggtcctttccaaggagtagctgtggcactattgtctgaaatctgmaaacaaatactaaggagaataaagctgctcctgggataggccagtgcataaaagcctggatgaggtctgcttctcggtcgattctctattccagtctttgggtctggctgttccctccctgatctgtacctctacgatcccaaccatcttcccacagatccctcacctgtcctgtgcttctaactcagatccagtctttcgactctgagtctccccttgcttatttgtctataaaattcttggccttgatttatatcttgattcaaatggtgaatattattaccgaaggcaatgttaggtcttacttttaggtaaggccagttatatatcgttttaacctactgac

SEQ ID NO: 320864 - DNA, 571 bp, Homo sapiens
agccaactacaatctcctggtgtctgacagactgggattttatacaagctttgtggggtatcccttcacatgtttggaggcaggaggcaagaatcattctttctctctgcacacataggcagctgtgccacagggcacagttgggtgggaatatactgtagacctgtagccacactacaagtgatattgagatgacaacttgtactgcagtcctccctgtgagctcagacagacttcattgtgaagtgtccagcacacggacttagcatgtggtgaacatgattgtcaatttggggggcagcctctgaagttacaaggaatgaaaacattctcagcatctgaacttaagccttgtggaagaaaacagactgagagaggggccctggagccagcacctcactggcccccaaataggctattgatctcattttgtgtggttgtttttyatcattttttaaattataaagtaatatttgaatgcatgattgttgtaaacacctcaaacaatacagaggtctagagaatgaaaagaaatccctgtgcaccaccagctcctcgcacaatttcactt

SEQ ID NO: 320865 - DNA, 595 bp, Homo sapiens
atttcttttgggagtatatgtattttaccaaactgaccatgagtccttccagtttatatctatgtgctctacttttaatacggagcttatggatctttcagtgtctgacttttatgcacagcctcactcaggaataagtccctgagcttcctcttttcctagtatgtggttgaaggaggtgctaatccccattcctagttcccttgcatcaagtacatggttctcagtctcctatctcaaatatagcacttgcctttttttttttttttcttatggcctgatagcatgggcagttttgagcttccttaacctatttgtaattatttttttctgtttgggtaatttttatttattcagataagatttcttttgacctaacccttttctcttgactccatgggttctttggctttattgagggtacygtgttcttctcttctttcatgtttgaatttcttttgtcatctgtcttattattttcattttctttcatatttttctcaatgctgttaccttttcttcctcctctaaggatttcaggtagagagacatcatttttctttgattacttgtgatgtatacatatacttttaaa

SEQ ID NO: 320866 - DNA, 572 bp, Homo sapiens
tgtctttgaacacgaaggaaggggactgtgatccgtggaatgcaggtggcctttagaagctggaaaaggcaaggagattgatcctgcactggtccccagaagggatgcagacctgccaacaccttaattttagcccagtaagatccagtacccagaagtcaggacttctgacctacaaaactggaagataatataatacatctgtactattctaagttgctacattttggtaatttgttatagcagtagtaggataccatggctgtgggctgaagagatgaccgggaacaaaataattaaactccagctagtctctctagaaatctgttgattcatttttggaactaaatttggataaagatraggaagcagtctctctccttcccttatcctcccctccttccctccttccctccttccccatcctttcctctctttctctctttcttcaatttgcagctactcttctatctcacctggtaaagtatttgttttccactgtcatttccactacttgacctcacctgggatttgtctagtagaaattccttccagagtgtcaaaatgttgat

SEQ ID NO: 320867 - DNA, 563 bp, Homo sapiens
agccttctccttcctcagcccctactctgctctcctcgcatggtcttctccctcacggttctactcctcctcgatttcgaaaactcttccctgccatccacaatctggtggaggtgtcatttctcagagagacttacccagactctcccacttgaaattagttcctgtgtcactcatttgcgtagtaccttattatattcctttattgcatgcaccaatatttataattgtctgttttagtgtttattcgtttaaagtctatctcccccrctagcccacaatctccatgaaggcagagaccagatcttcttagcccacattgtatgttcagcaccaaacacagagtcagacaaagaaggcacttgttgaataactaaattaactgttttctgttatttcaagagaaattccaaagtctcaaacagtcctcaaaacgaagtcaattttcttgcactctaattctttttaattattccattctttaagagtgataggaaaaaagttgtaagtcatgaaatctaagttgttggaagggccttttgtgtcttaattcaacaaattca

SEQ ID NO: 320868 - DNA, 587 bp, Homo sapiens
aacagaactgccactttaaaaaaatatttctatttaaggacaatacaatacaaagaatggcatgtgggtaggcgttgaatagaggtggactgaatgaaaaaagaatgaagaaattaacctcatttagggtttcagctggtactaggattacaaactcagatgccttcaagcccatgcaggtggtatcaatgagccagcagactgggtgtgagataataaggaatggtgggtactgtgatgagctactgagcccatgccccayctgaaggggcagctactgctcaggtctagttgatgattttgactgatgccacaaagataaacaggcccaatgatgtcacaacgtccaatatttagggaaaaacagaaatatagattttttaaatgtgaaatattttgagttttgtactttaggatctaattttaaaaataaaacaaaactgcacaggtcagacaaggctaaaaccaaagtccatgtgaggggtcaggattggcacatggatggccagcttttacctaaggtcttctgcaacatcttaactttccaagtgataaaaaaggtccagagggctgaagctgcctttggg

SEQ ID NO: 320869 - DNA, 587 bp, Homo sapiens
aacagaactgccactttaaaaaaatatttctatttaaggacaatacaatacaaagaatggcatgtgggtaggcgttgaatagaggtggactgaatgaaaaaagaatgaagaaattaacctcatttagggtttcagctggtactaggattacaaactcagatgccttcaagcccatgcaggtggtatcaatgagccagcagactgggtgtgagataataaggaatggtgggtactgtgatgagctactgagcccatgccccatctgaaggggcagctactgctcaggtctagttgatgattttgactgatgccacaaagataaacaggcccaatgatgtcacaacgtccaatwtttagggaaaaacagaaatatagattttttaaatgtgaaatattttgagttttgtactttaggatctaattttaaaaataaaacaaaactgcacaggtcagacaaggctaaaaccaaagtccatgtgaggggtcaggattggcacatggatggccagcttttacctaaggtcttctgcaacatcttaactttccaagtgataaaaaaggtccagagggctgaagctgcctttggg

SEQ ID NO: 320870 - DNA, 497 bp, Homo sapiens
tccatggcaaattataacatgcaatttgcaccattcatgtatctgctgcaaacattaataaagaggattattctctaatactgaaaacaaatcacaaattgctaaatcttaatgaaaagtacaggacttccctctattggtggcctttggagttttgttccttaractggcttagcaatcttcatgcccaatatttgacttccattcaatactgaaggtgcatactgatgtttttgtattggcagttccctggtatgacttagctgatagctcatccttcacaagaatgcttacatgaatggcacccgagttggaaggaaagtgagtaatcaaagtggtttatagagctcttattatttgctttctgccccctaggaactcttcatttcactaactgatgtcttctagtatcttgggagcagggaaggaaatatatagatgccatttttacccctatcattactcccactttgatgcattcttaagcttatttctca

SEQ ID NO: 320871 - DNA, 489 bp, Homo sapiens
gcacttctgttaatagtttccaggtttgaactctaagcaactaagctacccttggaatttactttttctcacagacaaataaagattgaggaatactacgaaatctattttttattagcatgtccagatagaaattctcttgtatctttggccactccatttcttcttgtcagtgttaaaactggaatttaggatgcatatgctgttaaaagatctggaatttatcataaatgtacaaattgagaaataaagtgtaattatgtaccactatgcacatctaaragaaaaagcctgcagtatagccaaatatgatgttcctgttggcatgtctagcctggtggtcctttgcattactatgcatgtaatatgtttacagggtatgtcatcaccctcttcttggcagtagaaaccaagcagagtctaaaacatgggagacttttaataaatgcctaccaaattacattgagaagtcagtggcctctaaacata

SEQ ID NO: 320872 - DNA, 549 bp, Homo sapiens
aagtataatgcaaaacttataatgcacttatatttttagtactctttatggtgttaagattacaaagaagtgactctctcttgttttaggactgagtcatccctgacatttacatattataaacacaatatttgaatttccctttttaaaaaaatattatattagctatactaagttaatatacttttttccattgaacttacagagctcatgggcgttcacttaaactaaactgacatagggaagatacattttaaaaaatcaaagctctctagtatgactgcttaaaagaacaattatgatatacaagcaatatgaatactaggttttgcttacaaagatagttacctgccttcattttctattaatttccatcagggcactaccaaaatattacctggcaaaattaaaatgaaaaccgtatgttgatgagggaaaacatataatggcatagcacatttcaacgttcagtgaaagagttaacactgraagcttctccaaagagaaagaagatatattgattcaaatgtatattagaatatgttgttc

SEQ ID NO: 320873 - DNA, 579 bp, Homo sapiens
attaaaatcattgttgtcatgagaaatatgacttattgccatattattttagaaagaatataaagaaatctaacataaaataaacaaaggcatcgaaccctatgccataggacattaaagcgtcagagaggacaatcagaaaataactatttttaagctcccagcaggagcatatgctgccactgctaatggttatatacatctcagaattgaaagatggaagctgctctaatattttagattttgtcacaatatatcattctattttaaaaatagatcagtggaagatgcttttcctttgaagatatttctgtgctgctttatacgcaaatttttttgtggattctatttatcctttgaccaattcttttcaagtctaaaagtaaggattgtcccaattttctaggttcctatgaaagaaagaacaagctgtagtagttcagccacttcatgccatttttcyatgaaattaaaaggccgtagaccaactgaagggtttgattgtagaaaccaccacttaccaaatgttttatttagatgccatataaagcagtgggtagttgaagatgtgttgaaaaa

SEQ ID NO: 320874 - DNA, 610 bp, Homo sapiens
tgtatctccataactgccacagcctgtattctcagcttcagaaacttgataagctacacacatattatctccaattggaattgctataggcatcataaacttccatcttcagaaactgagctttaaatattcttaaattgtcccagtctgtgatagtggcacctccatctacttagttgggactagaaaaagtccattcaattgttcacatgaaagtcrtctctcatccctctttctcgcttactttccatcttgattcatcaccaactctttcaactttgcttctgcttttcttttctaccaccatcatgctaatctaatccccatcattgctctttggtattattgatataatctcctaattagctatgtccttttttgaccacattatccatcccacctcctagtagccacaataaaattcaaattttaccatgtcacttatctgcctaaaatttgtctataaattgtcactgtttaaaataaattctaaaatcctttgcatagctttaaaagccttatatggtctggtcgctgactctctttacaattttatctcaaactttgtcttctttttattctctaagtttcagccgctctcatctttttt

SEQ ID NO: 320875 - DNA, 598 bp, Homo sapiens
gctattgccaaatgcttaattataacttgtatcagtggggaaaaaaaattaagcagtctgttacttatgatggctcacacctgtaatcctagcactttgggaggccgaggcaggcggattacttgagctcaggagttcaagaccagcctggctaacatggtgaaaccctgtctctactaaaaatacaaaaaagtagctgggcatggtggcgtgtgcctgtaatcccagctacctgagggactgagacaggagaatsgcttgaaccggggaggtggaagttgcagtgagccaagatctcgccactgcactccagcgtaggcgacaagagtgagacttcgtctcaaaaaaaggaaaaaaaaaagagaaaataatcttacttcatgagattcagcttatcagtaaactgtttccctacaataaacaccaggaatgtgatagcaaccatttaagcattttatatttaaagagtgacaaagtaatctgaacccattttttccccaaaataaaatatattgtgtttttcacttccctacatgatctctctgtttaccaaatttcagaacagtgagaggtttgaatttttctttttacagtcaaa

SEQ ID NO: 320876 - DNA, 617 bp, Homo sapiens
tgtttatttgtttgtttgtttgtttggtagcttcatagtttgaggtcttagattaggtcttactctattttgacttgatttttgtatatggaaagagatgggggcctattttaattcttctgcatatgtatatccagttttttcagcacagtttattgaagagactatcctttcctcattgtatgttcttggcacctttgttaaaaaggagttcactatagatatatacattcatttctaggttctctaatctgttcctttggtctgtgtgcctatttttatgccagtaccatgctgttttggttgcaatagctctgtattataattgaagtaagaaactgtggtccctccagttttgttttgttttgtttttttgtttgtttttgctctggatggctttggctattctgagtcttttgtggttccaaataaattttaggattttttttctatttctttgaagagtgtcattggtgttttgataagaattgcrttgaatctgtagattactttgggtagtatagacattttaacaatattgattcttccaatccatgaacatggattatctttccattttttgtatcctcttcaaatccttgcattcagtgttttat

SEQ ID NO: 320877 - DNA, 609 bp, Homo sapiens
atgctatatagtatctccaaccttcagttgattcacacttcttaccttcaaatttctccattaacttacgggaaattatttaggggctgctgttttggtaaagtgaaattagcctgccttttccctctatgtatgtgtatgtgaatgtatgtgtgtgaatacacaatgcacgcatatactcatttctatagtgttttataaattaccaaatattttagagtaattaaaaagaactagtgtccttgagtcaaaaatctgctctgtttcttacaatytatatgattttggtaagactatttaatatctctaagcctcagttttcccatctgtaataatttttttgtacctcataggccattacaggattttaaatgtgataacatatgtaaggatctcaatatcctatgtattattatttttagttccctacttatattcagtaagtaaattatacttattattagtaccattattgtctaatttaggccttacaaatttttgaattttattctcaggtcaccctcactgttaatttttttttctctggcctgctcattaggcatcactattctctctttggacttgatatcacatcaaaccaactctctc

SEQ ID NO: 320878 - DNA, 532 bp, Homo sapiens
actggaaaataacaaaggtaatagggatttgagaagcctattaactgagaaaaatggaaattcatagggaaatttcctaacatttactaatacattttcttcttaagacattcactgctgtgcacagtggctcacacctgtaatcctagcacttttagagrttgaggcgggtggatcacgaggtcaggagtttgaaaccagcctgaccaacatggtgaaaccctgtctccactcaaaattcaaaaattagccaggcatggtggcgcacacctgcaatcccagctactcgggaggctgaggcaagagaatcacttgaactcagcaggtggaggttgtagtgagccaagatcgcgccactgcactccagcctgggcaagagagcgagactccatctcaaacaacaacaaaaaaagagaaacattcacaattcacatcaaggagaatggaggccaatgatacttttattagtagatataaatataatatgataaaaacatggagaattccatcatagattataaaatcataataa

SEQ ID NO: 320879 - DNA, 532 bp, Homo sapiens
actggaaaataacaaaggtaatagggatttgagaagcctattaactgagaaaaatggaaattcatagggaaatttcctaacatttactaatacattttcttcttaagacattcactgctgtgcacagtggctcacacctgtaatcctagcacttttagagattgaggygggtggatcacgaggtcaggagtttgaaaccagcctgaccaacatggtgaaaccctgtctccactcaaaattcaaaaattagccaggcatggtggcgcacacctgcaatcccagctactcgggaggctgaggcaagagaatcacttgaactcagcaggtggaggttgtagtgagccaagatcgcgccactgcactccagcctgggcaagagagcgagactccatctcaaacaacaacaaaaaaagagaaacattcacaattcacatcaaggagaatggaggccaatgatacttttattagtagatataaatataatatgataaaaacatggagaattccatcatagattataaaatcataataa

SEQ ID NO: 320880 - DNA, 532 bp, Homo sapiens
actggaaaataacaaaggtaatagggatttgagaagcctattaactgagaaaaatggaaattcatagggaaatttcctaacatttactaatacattttcttcttaagacattcactgctgtgcacagtggctcacacctgtaatcctagcacttttagagattgaggcgggtggatcacgaggtcaggagtttgaaaccagcctgaccaacatggtgaaaccctgtctccactcaaaattcaaaaattagccaggcatggtggcgcacacctgcaatcccagctactcgggaggctgaggcaagagaatcacttgaactcagcaggtggaggttgtagtgagccaagatcgcgccactgcactccagcctgggcaagagagcgagactccatctcaaacaacaacaaaaaaagagaracattcacaattcacatcaaggagaatggaggccaatgatacttttattagtagatataaatataatatgataaaaacatggagaattccatcatagattataaaatcataataa

SEQ ID NO: 320881 - DNA, 532 bp, Homo sapiens
actggaaaataacaaaggtaatagggatttgagaagcctattaactgagaaaaatggaaattcatagggaaatttcctaacatttactaatacattttcttcttaagacattcactgctgtgcacagtggctcacacctgtaatcctagcacttttagagattgaggcgggtggatcacgaggtcaggagtttgaaaccagcctgaccaacatggtgaaaccctgtctccactcaaaattcaaaaattagccaggcatggtggcgcacacctgcaatcccagctactcgggaggctgaggcaagagaatcacttgaactcagcaggtggaggttgtagtgagccaagatcgcgccactgcactccagcctgggcaagagagcgagactccatctcaaacaacaacaaaaaaagagaaacattcacaattcacatcaaggagaatggaggycaatgatacttttattagtagatataaatataatatgataaaaacatggagaattccatcatagattataaaatcataataa

SEQ ID NO: 320882 - DNA, 587 bp, Homo sapiens
gaattatttcatataagttggttcaccagagttcatttccctaaatccattctccaacctccaccaccttcacaatgtttatctcatctcacccagtttccagaaaaccactaattaattggatatttaatcctgccatcattcatccttgtaaggcattttccccaacaatgttaaatcacagtgtcattttgaaaccaatgcttgtttcaatgatcctgatgctgctgttattattgtctcatctaattgttcaaatgcttaaaaatgttattaatatcttataatgaaggaaagtagtcagtagattaaaagcacaccagtggaagtctgcacaagatacagtctagtggccttcttaayaacacaggcaatttgaaataatgacaagaggaaaatactttaaaagagacgctgatagatatatttacgttttaatacttaattcatgtaaaatctagaagaaaagttaaaaagaatcaggaaatccaataagataactgtattgaagtgactagatgatattatctgaatcctacgaagttctttcactgaaattagtagacattcactgcattaaaatagtc

SEQ ID NO: 320883 - DNA, 576 bp, Homo sapiens
ttccaaatagaaataaccaatgtcattatacagggaagtattttctaaatccataaagagttttgaaattctaaataaacaaataactggaaattccagatgaatttaggaaaaactagaagcaactaagaaatctcagaaccaatgtgaaatgtcaccttttcaaagtgaaatgttttattcggatgctggaagatttcatgctcaatggtcaggcagggatgcttttggtgaaatgaaagtccaaggagacaaaatagacttaggattggttttataaaggctagatgtttgctggaaaggctcatttgctcttcatttattaattaaaaaaattataaagagccaataatctccccaacacacacaatcatccaggcactcatacacacacacacacacacacacacacacacayacacacacacacacacagagagagagagagcaagagagagagaaaaaatatatttttttaaatggcaaaaaccatagttacctttgtaccaacctaatacatatgtaaaatctcacagtagtacactcaaggtatgagtaaggtaccacaggtgcaca

SEQ ID NO: 320884 - DNA, 576 bp, Homo sapiens
gtaatgaggaatgagtaagaatttcccaggtaggcaagaggcaaggaatgcactgaagcaagcaatagcatggttcctcccagggaatgaaagtaattattctagactagggcacagaatgccaatgtggataatgcaagggatagggctggagggacagcccaggggctaatcatcaagggaagcatttcccctattgagacttctaaacctaagagtgatggagagcctctaaagaattttaacagggggagcaatggggtttgcactgtgaaaatgcaactctagctgcgaagataaattggagtgggggtggcctatgaaaacagattagagaagtaaatataatcctagtaagaaattacaaagtcctgacctgatgcagtagaatggtgaaagggacagatttgaattagaaactttttaaggaggtgtagtggcacttgtgacaaattagatatatagacttagtaattctaggataactcccacatttctgaattgggttcccaggtaaatgwtactattctgaaccagatcatggttgacagagacaaggagccagcagcgcactgt

SEQ ID NO: 320885 - DNA, 565 bp, Homo sapiens
ataggtgtggggtacattcctagaagtagaatggtggatgcaaaggcgtgttttacatttagcctgtatggcattgccartttggccttcaaaattgatttttccaacttattctcccgcccatattttgtgagtagctgtttttccatacacagcctctgccaaccttgggtattttctatcttttaactctttgccaaacatattggcaaaaatatctttttattatttccttttcattttccttcatgattgatgaggctgatcagtttggggctattctttgaagtatcacatcataacctttgttcattctttttctcttaagaaggtgaacaaatcatgtagtcaggcatttccacagtttacaagtgcagcagtgcaggagtataagacaaacatgagtgccacatccccagactcccaagctgtccagctctcaggttagaacaaacctgcattgagtccctggctttaaagagcacttgcattcccagagcagagctcctcatgagggcccatgttttccgccatgtagaaagcaggaccacaggctatgtttatc

SEQ ID NO: 320886 - DNA, 401 bp, Homo sapiens
tatttgatgtcccagaaacactttgaggctttttattgcccttgtaaacttaacaataagagtctaagaggtagaagttgttggcagttctgggtgaaaaacccaagaacaaagaaaaaaaattctggttagatggaggcygagaatctcagaattttggaagtgcttcaggccggggttccagtttcaggttttctgggaggggacacgtggcaaagtagaggtctctgtgctgtgacatagagagtgccataccaacatgtgtttccccatgatgctagaaactccccattgtaaccgtaggtgaagatcaataaaaggtctcctatcccttccccctgctggtacatggaactgtgctaggacacacaggaaactacaccagtggttctcagccagga

SEQ ID NO: 320887 - DNA, 426 bp, Homo sapiens
tggctttggaggctggagtcaggctggggttagctacggagcagttggagagagaaggctctgaagcaaactagaggggaaaacatgccaggtggtcagtaccagagtgaggagggagagctgccaagacctgggagatggctccagcaggcagtgagctgaggcagagctggaggcagattgggcacagcccagagtgtctgagggggyaccagtaccagggaaggggatttttgggctccggactctgcccagccctcctgcccatattcttccctggtgcccctggggcttctcccactttcattccattgctgcttgtaagaagacagatgttgatgatcttcatgtctctggggctgtcagttcccctggcctaagccagctgttccattgcagagccgaggccccaaagggtcttttacc

SEQ ID NO: 320888 - DNA, 426 bp, Homo sapiens
tggctttggaggctggagtcaggctggggttagctacggagcagttggagagagaaggctctgaagcaaactagaggggaaaacatgccaggtggtcagtaccagagtgaggagggagagctgccaagacctgggagatggctccagcaggcagtgagctgaggcagagctggaggcagattgggcacagcccagagtgtctgagggggcaccagtaccagggaaggggatttttgggctccggactctgcccagccctcctgcccatattcttccctggtgcccctggggcttctcccactttcattccattgctgcttgtaaraagacagatgttgatgatcttcatgtctctggggctgtcagttcccctggcctaagccagctgttccattgcagagccgaggccccaaagggtcttttacc

SEQ ID NO: 320889 - DNA, 594 bp, Homo sapiens
ggctatgatatggtttgactgtgtccccactcaaatctcaaattgtagctcccacaattcccacgtgtcatgggagggaccaagtgggaggtaattgaatcatgagggtgggtctttctcatgctgttctcatgactgtgaataagtctcatgagatccgatggttttgtaaaggggagtgyccctgcatatgctctttctcttgcctgtcaccatgtaagatgtgacgttgcttctcctttacccctactttgccttccaccatgaatgtatggcctctgcagccacatggaactgtgagtccattaaacttctttttctttataaattacctagtctcaggtatgtctttattagcagcatgagaacagactaatacaggctttctcccaagtgtctggcttgggcatctggaaagctgcacagtgcttaccagagctaaaaagccctgggttaagatcaggtttgagttgccagatttgtctcctagacaaatggccctgccttagcactctgaataactggatttgtagttgtggtcttggctctcagtacaggtaactggttggggtcatcccagtctgggctggacat

SEQ ID NO: 320890 - DNA, 566 bp, Homo sapiens
ttttctgcaacacgcagggccccagcccgaccctctgtggtctaggactgcattccagctgcctggttgaaggcagcaggcaaggggagaagcaggagtgtggggccattcaaaagagaactgctcttttgtggctgcaaaggggaggtaaggcagtttccatgccttcctcaagagctgcctttggggttacccctggtcagtgctcacttggggtcctggaatcaaaggttcttagctcataatcacctcattcatggctggctgggaggtgtgctgtgtgcatgtctgaccctgggcgtgaggaacaccagccaagtccttctggctgcrgttaaaagggctcaccagcctctccctgaaggtgaagtgcaaagatgggctggggatttttaaggggagtgggaagtattaatcgttggggtgctagctccactgtaaatacactaaagccagcatttttttatgtctctggaatggtggatggtgtccggcaagggccagaatagcctggttcttcttgcccagatgtagaagtgcagaccctggagagctgtacgttttat

SEQ ID NO: 320891 - DNA, 482 bp, Homo sapiens
tgagtttatcaatcaattgagaaacagtcactggatatcaacggtgtacccagccctgtgctatgtgtaagataaggaggttcagaggtatgccgctaggtccctaaccatgagagacccacagtccagcttaggagataacaaatatgtgttatccaggtatgttaacacatgggaagtgaaatagmagtgcagtgatgatgctgatgatgctgacagtaatgatggaaaggatgaagatgatgttaattattcttcatatacaccacaattgtacagtttacaaagcatgtttaggacgattatcttatctgatattcaagtctagaaaaaccctgattttactgatgaacaaactgagggtaataacttctcagagatcagataggaagaaagtagcttagttggactccagcttctttcttttggccccaagagtgccattatcctcaagacatcataactttcttcctttaaattgc

SEQ ID NO: 320892 - DNA, 572 bp, Homo sapiens
tagctatgttaatagggattatttacagatgtgaattttatcccacaaaggacagcttgcagaaccatttcaaaatgtgacaaaaatatgtttttgggggtaaaatattttgattttcttccttgtcttgttctgttatgccagagtcatgtcagaaaataagtcacgatatataggattaaatagaatccatctgatgagaatgtatggcttgtagggcgtggctcccccagaccccttagataggaatctgggcaagagaaaaagataagaaaatcagaatttattctctctctctmtatatatagagggctatctatattctgcagattactttaggaaccatgagtgttttataaactgcgccatgaggaaaactttcttctcactagaacccagggcagacagcttaggaacattccacaggtagaagcttagatttggtcattgctatgagcacctgaaaaaggggcctgaaccttctcgttacttgattttaaactcagaaatggcaaaagatggttaagacaatctcacataaatctggggaagccagaacaggagaaaagtac

SEQ ID NO: 320893 - DNA, 572 bp, Homo sapiens
tagctatgttaatagggattatttacagatgtgaattttatcccacaaaggacagcttgcagaaccatttcaaaatgtgacaaaaatatgtttttgggggtaaaatattttgattttcttccttgtcttgttctgttatgccagagtcatgtcagaaaataagtcacgatatataggattaaatagaatccatctgatgagaatgtatggcttgtagggcgtggctcccccagaccccttagataggaatctgggcaagagaaaaagataagaaaatcagaatttattctctctctctctatatatagagggctatctatattctgcagattactttakgaaccatgagtgttttataaactgcgccatgaggaaaactttcttctcactagaacccagggcagacagcttaggaacattccacaggtagaagcttagatttggtcattgctatgagcacctgaaaaaggggcctgaaccttctcgttacttgattttaaactcagaaatggcaaaagatggttaagacaatctcacataaatctggggaagccagaacaggagaaaagtac

SEQ ID NO: 320894 - DNA, 585 bp, Homo sapiens
ttagcacagtatcattgctaagtcatcataggctttgtctaaacgttagaactagtttgtaagcaaggagggagaaagatgaattcagttaaccacaactgtacctcttctttcccttctcacattatccttaacaaacctccctaaacaggagaaccaaaactgcttacccctggaccctaagattccaaaccacaccttaccatctacatcaacatgactttgctgttccactgtctgtcttagcacctctttcctcttctggggctcttccaccaaagcaaatggcttcactgatccttataggaacttcccccaaagttctatccagtctttcatggaaaattcaacagacatctgtgctcagatttactgaatcttttgactcaccttgctgttttcttcaatcctgaattgttgtgtcataattcttgtataatcctaaacaagtttctacatygaaaaaccttcctagactcatacttccaattcttttttttaaattaaattaaattttaagttcctggatacatgtgcaggacgtgcaggtttgttacataggttaaacgtgtgccatagtggttt

SEQ ID NO: 320895 - DNA, 597 bp, Homo sapiens
ctaagcaatctacagattcaatgcaatccctgtcaaaataccaaagacattcttcacagaaatagaaaaaaaaatcttaaaatgtatatgagaccacaaaagacccagaatagccaaagctatcctgaacaaaaagaacaaaactggaggaatctcattacctracttcaaattatactacagagctatagtaaccaaaacagcatggtactggcataaaagcagacacatacaccaatggaacataatagagaatccagaaacaaatccatacatctacagtgaactcatttttgacaaaggtgccaagaacatacactggagaaaggacagtctctttaataaatggtgctgagaaaactgtatgtctatatgcagaagaagaaaactagacctctatctctggtcgtataaaaaaatcaaaatggattaaagacttaaatagacattgtaatgagatatcatctcactcaagttaaaagggcttttatccaaaaacagtaacaaatgctggtgaggatgtgggaaaaagggaactctcaaaatgtaaattagtataaccactatggaatacactttggaagttcttcaaaaaac

SEQ ID NO: 320896 - DNA, 499 bp, Homo sapiens
acgactcccttgcttctcctcttgcctcagtgataactctactcaacatccattgctggttgtgtcttgtctcacaggccaatgaaccttggagtgccccaggtctcaaatcagtggacctcttatttatctatactcactctctaggtggtcgtataatgcttttaaacaccatctataaactgaagacygccaaacttaaatctccagcaggcttgcagacttgtatatactactgctttttcaagacctccacttggaggcttcaaaaatcaacctgtctacagtcaaactcttcattttgatttaacccgacaaagactttttctaatggcagttgcattcattcattcatacaactatatattttaagctcttactgtgtgccaagcaccatttcaggaatgatttttctagtgctcaggccaaaatctaccttgaaacgtttttttggtctcataccctctctttttggattgtatcacctctacatcttatc

SEQ ID NO: 320897 - DNA, 597 bp, Homo sapiens
ctaagcaatctacagattcaatgcaatccctgtcaaaataccaaagacattcttcacagaaatagaaaaaaaaatcttaaaatgtatatgagaccacaaaagacccagaatagccaaagctatcctgaacaaaaagaacaaaactggaggaatctcattacctaacttcaaattatactacagagctatagtaaccaaaacagcatggtactggcataaaagcagacacatacaccaatggaacataatagagaatccagaaacaaatccatacatctacagtgaactcatttttgacaaaggtgccaagaacatacactggagaaaggacagtctctttaataaatggtgctgagaaaactgtatgtctatatgcagaagaagaaaactagacctctatctctggtcgtataaaaaaatcaaaatggattaaagacttaaatagacattgtaatgagatatcatctcactcaagttaaaagggcttttatccaaaaacagtaacaaatgctggtgaggatgtgggaaaaagggaacyctcaaaatgtaaattagtataaccactatggaatacactttggaagttcttcaaaaaac

SEQ ID NO: 320898 - DNA, 567 bp, Homo sapiens
gttcctgaggaagaagagaattctaaaagctcagaaaacatatttggggaaaacttccctggcctagctagagaactagacatccaaatacaagaagcacaaagaacacttgggaaatttattacaaaaagatgtttgcctaggcacactgtcatcagattacccaaagttgagatgaaggaaagaatcttaagagctgtgacacagaggcaccaggtaacctataaaggaaaatctatcagatgaacagcagatttctcagcataaaccctgcaagctagacgggattggggccctatcttcacccttctcaaacaaaacaattatcagccaagaattttgtatccagcaaaactaagcatcacatatgaaggaaagatacagttgttttcagacaaacaaatgctgaatgaattcrccattaccatttgcctataaaacaaaaatacaagctaaaaagcaaaaaaaaaaaaaaaaacaaaaagcaaagtacacaggcaacaaagaacacaattaatgcaacagtacctcacatttcaatactaacattaaatgtaaatggcctaa

SEQ ID NO: 320899 - DNA, 582 bp, Homo sapiens
agcagaactaaatgaaattgaaattaaaaaaatacaaaakataaatgaaacaaaacctggttctttgaaaagatacataaaattgatagaccattatcaagcttaaccaagaaaagaagagagaaaatccatataacctcactaagaaacaaaacaggagatattacaactgacaccactgaaatacaaaagatcattcaaggctaccatgaatacctttatgcacataaattagaaaacccagaagagatggataaattcctggaaaaagacaaccctcctagcttaaatgaggaagaatcagataccctgaacagaccaataacaagcagtgagattgaaatgataactaaaatattaccaacaaaaaaaagtccaagaccagacggattcacagcagaattctaccagatgttcaaagaagaattgataccaatccttttgacattattccacaagataaagaaagaaccttccctaactcattctatgaagccagcatcaccctaataccaaaaccaggaaaggacacaaccaaaaaagaaaactacagactgatatctttcatgaatatagatgcta

SEQ ID NO: 320900 - DNA, 603 bp, Homo sapiens
aaagactttcacttaatacaattatttggtctgtaagagccgtgtgacttaaagttaagtgctttcaagattctcagtataagtagaacagagtcgatttaagtgcatgtgccctttatggctctttataaactatyagcctacatttttatgtttctttctcctttggtttttgtggttgaaaatttccttttgctattttgtctgatttcctgtagtcttttaatataaatcacttcaagtctttttttttgaagtaggtaggataaccagaatttctaaatatgatataaactatgtttataatcttactcatgagacatttctgaattaagtaatttttttcttccctgaatcaatcaatgtatgcttatttcccagtccccctccacaatattcatggtattcagggtaagaatactaatggaaggccacaaaccatatttctaaatagctaaaagttataaataagctaatatactgttaaataaaatacattctgtctccctacattgacaaatatgtgcctttattctggcctggaaggcaggtatgaacttagctttcttgagctctcagaatggagtgactcagggagggtca

SEQ ID NO: 320901 - DNA, 603 bp, Homo sapiens
aaagactttcacttaatacaattatttggtctgtaagagccgtgtgacttaaagttaagtgctttcaagattctcagtataagtagaacagagtcgatttaagtgcatgtgccctttatggctctttataaactattagcctmcatttttatgtttctttctcctttggtttttgtggttgaaaatttccttttgctattttgtctgatttcctgtagtcttttaatataaatcacttcaagtctttttttttgaagtaggtaggataaccagaatttctaaatatgatataaactatgtttataatcttactcatgagacatttctgaattaagtaatttttttcttccctgaatcaatcaatgtatgcttatttcccagtccccctccacaatattcatggtattcagggtaagaatactaatggaaggccacaaaccatatttctaaatagctaaaagttataaataagctaatatactgttaaataaaatacattctgtctccctacattgacaaatatgtgcctttattctggcctggaaggcaggtatgaacttagctttcttgagctctcagaatggagtgactcagggagggtca

SEQ ID NO: 320902 - DNA, 603 bp, Homo sapiens
aaagactttcacttaatacaattatttggtctgtaagagccgtgtgacttaaagttaagtgctttcaagattctcagtataagtagaacagagtcgatttaagtgcatgtgccctttatggctctttataaactattagcctacatttttatgtttctttctcctttggtttttgtggttgaaaatttccttttgctattttgtctgatttcctgtagtcttttaatataaatcacttcaagtctttttttttgaagtaggtaggataaccagaatttctaaatatgatataaactatgtttataatcttactcatgagacatttctgaattaagtaatttttttcttccctgaatcaatcaatgtatgcttatttcccagtccccctccacaatattcatggtattcagggtaagaatactaatggaaggccacaaaccatatttytaaatagctaaaagttataaataagctaatatactgttaaataaaatacattctgtctccctacattgacaaatatgtgcctttattctggcctggaaggcaggtatgaacttagctttcttgagctctcagaatggagtgactcagggagggtca

SEQ ID NO: 320903 - DNA, 586 bp, Homo sapiens
actgataaggtacctccaaagaaactgtgaccaggtgggcacaagttaccaccacacataacaagagacccttgcctgcagcatcatgggaggatacaaaaagtcctttgagggacaaaatctttcaaagcaccaacaacttgaagccaataggctctcccttcaaaatgacgcaccacaagcaaaacagaaaaaaaaagagtacctaagtggagatgtgaatggattcatggaatacctaaggcagaactcacagatggtttacgatggggagatgatagcaacgatggggagatgatagcaacgatcaggcagtaagggaataaattgcagttgctttaaagaaagacagtcttatgggaaggaaaacaatgaatgacaagcagcaaagagaaagacaatagtatgtttccattgcagaaaacctggtcatacaactgcagattgcccagttgccctagaaaatcaacatacgggcactggaacgtgttctgggtctgggtcygtggagcgcaaaatgatcaagggcagggctaaagtagccctggctcttaattaatttccttttgcgaaatgtttgtttgtg

SEQ ID NO: 320904 - DNA, 575 bp, Homo sapiens
ggaatggtcacagttgattgctggtcaaagggagtgagtggagactctgaagaaactggatgacttaaattacagaaatccaaaacaaagatacctaaaattgttattttttgataatgagtaagtactgttgctacttacaacctcattgttactttccaaacaggacatacttcacaaattagagctgggcacccttggagtcaagcctttattgtaggtgtcagtatgatcgagatgtagtcaaaaacagttttgtgtattctgtccattgagaagtacttctatcactgttwggagaaaatcactgaaggaaataataatattaaatagaattttctaaaggaacatatgtttaactgatacaacttagacataactaagtggcgatataactgattgtaacaatcatctttttgaaaatgcaaaattacacataaatgtgaatcacccctgagcaaagatactgctttgcatttggaaatgaatttttctttgtattattttcttgcttcaaactatcaatttattattataatagtataagttgcacaaaatctttgtttaaaatatat

SEQ ID NO: 320905 - DNA, 593 bp, Homo sapiens
gtttaaagggtgagtaaagcagggttttattgggtgaaaagaaaagaacagccacagtgcggggacaggcagtggaaacagggactcttacaaggccagagtccctccgctagggcacttcctgccaggtagttggaatcctagtttccacagaggaagcagaggggccaggttcaggctcctccctgctgcaaacgtcatgaacttcccagggctccatctcagtgggcaggctggttggagtttcttcagggacccccctcccacatggctgtctcattccctcctttaaagaagtacacctaactgccattagattatggataaggacaaagaccgatcttaactgcttcctgctgacagggctgctgtttggggaaacagcagtccccagaggcctatttaagggttcccagcaaaaggggccattgtcagaggctctggttgcatgagagtttggagtttgatggcctgaggcaagaacagacaaaccgggttattagaaaacatgtatctaaacaaaacaaggggaggagtaaagacagctcaaaaattcygaggtcttttaccagtttacacagggagatggaggc

SEQ ID NO: 320906 - DNA, 455 bp, Homo sapiens
cagtggctgggaaccagccagccagctgtgcaggacccctgggccatgggtccccaccccagcagggagcggggagcggaaggagctgctgcttaccggtgggccccaaaaaaggaaggaaaaggccatgaaaaggccagggagctacgcggggtggaggcgtggcttcccccacactcagaagtctgaagattaaaaggctgagaagcaacagtgagaagctttgagtccccmtttcactcagggcttctggagcctccactttgctgcaacaatgttgcacgacttttccttagttcatctaaagatggggttcttgtccatctcatggccatgaaaattcaggctcgcagaccagtttaaaggatgagtaaagaagagttttactgggtgaaaaggataaaaaaaaaaaaaaaaagagggaaacaggtactctctcaaggccagagtccctc

SEQ ID NO: 320907 - DNA, 525 bp, Homo sapiens
tttttgcctaacaatttaatatataaaatatctgatactggtgagaatgtagtaaattggacactatctaatgctgcaataatgctgccaaagaaaacacccacaaaacttcagtggaatggaaaaagaaaaatttatttttgctcacactctatgggctatctgagcagttcttctgacaagagcttggctctttgattgaactgtgagtcagatgggcagttctgctgggctaggctgggctggctctgggctggtctatgattaactcagtggggaaaattcagtctacttgttctgtcatcctccctcagccaatcccaagcttattatcatggtggagacaagattttaagagaaagagcaggggtgacaaggacctcttgaagyccagttttagaacaaacatactttcatttttttcaacattctattggccatggcgagtcacaagaccagcccagtttcaaggaatggcaacacaaatctactctgcaaagtcacattgcaaggggattgtggaga

SEQ ID NO: 320908 - DNA, 565 bp, Homo sapiens
gaagtccagttttagaacaaacatactttcatttttttcaacattctattggccatggcgagtcacaagaccagcccagtttcaaggaatggcaacacaaatctactctgcaaagtcacattgcaaggggattgtggagaagtggcaccttttctgaaatcagcctaccaccaacactgwcatatatttctgatgagagcgtacatttgaaaagtccattgggtaagactaacttgacaaaaatgggttagcaatctttaaaatgctatagtcattgatcaactgatatattttctatgactataatcaagtaaattatataataacacatacaatatgtgaaaatgttgtcatctcatgattgtggttttttgttaaaagtcaagtgaccgaatgatcaacagtacaaaactggttaatctcactgacagcatcaactttagaaaatcaggcagtctttgtttttgttgttgtttatttagtttttgagacacagtcttgctctgtcacccaggctggagtgcaatggcacaatctcagttcactgcaacctctgcctcccaaa

SEQ ID NO: 320909 - DNA, 565 bp, Homo sapiens
gaagtccagttttagaacaaacatactttcatttttttcaacattctattggccatggcgagtcacaagaccagcccagtttcaaggaatggcaacacaaatctactctgcaaagtcacattgcaaggggattgtggagaagtggcaccttttctgaaatcagcctaccaccaacactgacatatatttctgatgagagcgtacatttgaaaagtccattgggtaagactaacttgacaaaaatgggttagcaatctttaaaatgctatagtcattgatcaactgatatattttctatgactatawtcaagtaaattatataataacacatacaatatgtgaaaatgttgtcatctcatgattgtggttttttgttaaaagtcaagtgaccgaatgatcaacagtacaaaactggttaatctcactgacagcatcaactttagaaaatcaggcagtctttgtttttgttgttgtttatttagtttttgagacacagtcttgctctgtcacccaggctggagtgcaatggcacaatctcagttcactgcaacctctgcctcccaaa

SEQ ID NO: 320910 - DNA, 565 bp, Homo sapiens
gaagtccagttttagaacaaacatactttcatttttttcaacattctattggccatggcgagtcacaagaccagcccagtttcaaggaatggcaacacaaatctactctgcaaagtcacattgcaaggggattgtggagaagtggcaccttttctgaaatcagcctaccaccaacactgacatatatttctgatgagagcgtacatttgaaaagtccattgggtaagactaacttgacaaaaatgggttagcaatctttaaaatgctatagtcattgatcaactgatatattttctatgactataatcaagtaaattatataataacacatacaatatgtgaaaatgttgtcatctcatgattgtggttttttgttaaaagtcaagtgaccraatgatcaacagtacaaaactggttaatctcactgacagcatcaactttagaaaatcaggcagtctttgtttttgttgttgtttatttagtttttgagacacagtcttgctctgtcacccaggctggagtgcaatggcacaatctcagttcactgcaacctctgcctcccaaa

SEQ ID NO: 320911 - DNA, 534 bp, Homo sapiens
ccttatattcatctgacaggtgtcacagaaacaaatttcacatcatggtcatctcatttccctagaatacctccactgtccttccacttgtctcatttgatggaattgaatacacacacctatccctaaaccatcaatggcaaagggattgggaacactcattgtcttaaataaatcaggattgttatctgagattaaaggtaaattagccctcttctgagtcatgaagaaagaagtgaatgtatgaaccaaatcaagcctcttcaaagagtgcataccaaactcaaggtctttgggatattaaggcttgatattacaccctggaactcttgagaaatcactacctaagccatttaaattaaaccatcttgaccaggctcccctcccattcctctagggagaagagcatatatatgtaactgccagaatcatattactacgttgaatgacagggtcagggcagaacatatgcatcctgaggcttgagccrtaccctaaccctgaaatagtttctttgaccgcaagccgtcagtg

SEQ ID NO: 320912 - DNA, 581 bp, Homo sapiens
atattatgtgtatccgtgagaatgttagtaaatacaaaagatacagtttataagctatatgaataaacaatacttccaattatcttatctgtaaaatgaatatgacattaagcttatttcaaagcgtgggtgagaaggttaaaaatgtttttaaccttatgygttgtgtaaagtgcaatgcaaactaatgtgaagctctctctgggttggtgtttaaacaagagactaccgaatgttagatggactcaggatagcggtagaaaattcaattatttaatgtagaaaaatataaattcagacctactgaacgcagacctaacccagacctactgaatcaaaacttctgtggagaagacccgagaatgtgaatttattttaaagtgattcaggcaattctgatagatggccaaatttggattttagtgaataaaaacattaaaattgctgatattcaggcaagagaaagaaataaaaacatccaaataggaagagaagaagtcaaactaactctcttcactgatatgattccataactagaaaaccccatggacttcaccaaaaggttttcggaaatgataaat

SEQ ID NO: 320913 - DNA, 591 bp, Homo sapiens
tttctcaaaagaagacatatacatggccaacacatacatgaaaaaaatgctcagcatcactaatcattagagaaatgcaaatcaaaaccatctgagataccatctcacaccagtcagaatggctattactaaaaattcaaaatataacagatgttgacaaggttatgaagacaagagaacacaaccactacaggtaggaatgtaaattagttcagccactgtggaaagcagcacagaaatttttcaaagaatttaaaactgagctaccatctgacccagcaattccaccactgggtacaaacccaaagaaaaaaaaatcattatataaaaatcatatgcactcatatgttcatgacagcactattcacaataataaagacatggaatcaacttagatgctcatcaaaggtggactggatagagaaaatatggcacatacacactgtggaatactacacagccataaaaagaacaaaatcaygtcctttgcagcaacatggatggaactggaggccattactctaagcaaattaatgcagaacagaaaatcgaatactgcatactctcacttacaagtgggagataaacact

SEQ ID NO: 320914 - DNA, 435 bp, Homo sapiens
ggtggaacgggaagcaaacatgcccttctttacatggcggcaggaaggagaagtgctgagcaaaacgggggaagcccttcataaaaccatcagatctcatgagcactcactatcacgagaatagcatggaggaaatcgcctccatgattyaattacctcacactaggtccctcccatgacacatgaggattatgggaactacaattcaagatgagatttgggtggggaaacagccaaaccatatcagttacaatttttaaagaaatttttaaataaaagttaaatacccagatattaataccacatatgtttcactccaaacctatatatattttaaaatgtatagcatactgtataaaagcttaggcagtgcagtcaaatagaactggatttaaattcaggattgacctcttgttatctgagtccatgggtaaa

SEQ ID NO: 320915 - DNA, 605 bp, Homo sapiens
gttatcatacatacagtgagctggtcttgccatatatagctgtaagtgtaaaaattaactggatgctttaaaacattagtctccaacctttcggcttcccttggccacattggaagaagaagamttgtcctgggccacacataaaatacactaacgtaacgatagctgatgagttaaaaaaaaaaaagtccatgcatcattttcatgatatccaccaccacaaataagcaaaaaaagtcctcaagtttaaagggctggaaacagctgctttaaaagttactgagatacgaaaaagtatcagcaaaacaattaaatagtaataactaagctgctcctttgaacttgatttgagagggttaaaggataatcatataaatgatttcaacactttcgcttttaagggcatttatattttttccactggtcagttctccgtcctctccttgcagggtttactgtctgatatttctttctgtattattattcctcttcatttataatgcaagcttccatagactcacaaaaactaaaatctaatgggcacaggtccactcctcagaacgctgcacatttgcaattcctgtatttacttacccttttgggaa

SEQ ID NO: 320916 - DNA, 605 bp, Homo sapiens
gttatcatacatacagtgagctggtcttgccatatatagctgtaagtgtaaaaattaactggatgctttaaaacattagtctccaacctttcggcttcccttggccacattggaagaagaagacttgtcctgggccacacataaaatacactaacgtaacgatagctgatgagttwaaaaaaaaaaagtccatgcatcattttcatgatatccaccaccacaaataagcaaaaaaagtcctcaagtttaaagggctggaaacagctgctttaaaagttactgagatacgaaaaagtatcagcaaaacaattaaatagtaataactaagctgctcctttgaacttgatttgagagggttaaaggataatcatataaatgatttcaacactttcgcttttaagggcatttatattttttccactggtcagttctccgtcctctccttgcagggtttactgtctgatatttctttctgtattattattcctcttcatttataatgcaagcttccatagactcacaaaaactaaaatctaatgggcacaggtccactcctcagaacgctgcacatttgcaattcctgtatttacttacccttttgggaa

SEQ ID NO: 320917 - DNA, 555 bp, Homo sapiens
cttgttgacaactgatcttctttcccatgccagactcaatcaaccactaatctattttttgtctctataaatttgattttatgaacactttctataaatggaatgataaaacacatgatcttttctgtcagtcttcttacaattagcatagtgttcatcaggtttacacatgtcagagcatatatcagtatttcattccttttcacaaatgtataatatttcactgtagtgatgtagcaactttctwgatccactaaccaattgttggttatttggattttttaaatatattggttattttgaataattttattatctccacttgcttccaagactttatttggacatatgtttttatttctctgaagtataaacctaggaaatttcttgataattgagtaaatttgtttaatatttttaaaaattgtcaaactgttttgcaatgtggaaattgcaaatttcccatttacacaagcaaggcatgagagtttcatttcttcacatcaacatcaacagtatttgtcttttttaatatagccattctagtgagtgtga

SEQ ID NO: 320918 - DNA, 555 bp, Homo sapiens
cttgttgacaactgatcttctttcccatgccagactcaatcaaccactaatctattttttgtctctataaatttgattttatgaacactttctataaatggaatgataaaacacatgatcttttctgtcagtcttcttacaattagcatagtgttcatcaggtttacacatgtcagagcatatatcagtatttcattccttttcacaaatgtataatatttcactgtagtgatgtagcaactttcttgatccactaaccaattgttggttatttggattttttaaatatattggttattttgaataattttattatctccacttgcttccaagactttatttggacatatgtttttatttctctgaagtataaamctaggaaatttcttgataattgagtaaatttgtttaatatttttaaaaattgtcaaactgttttgcaatgtggaaattgcaaatttcccatttacacaagcaaggcatgagagtttcatttcttcacatcaacatcaacagtatttgtcttttttaatatagccattctagtgagtgtga

SEQ ID NO: 320919 - DNA, 594 bp, Homo sapiens
ttctaagtgacttaccaaagccaataagcctttaaccaaggttatgacttaaacaaggacatactagatatctccaaagagatgcagagcagtgcttgcaagatttataacgaccccaaaacagcttaaagaaacgaatgtttccatagtctctagaatctcagcttcttagccaaccatctacaaacaaaagcccaaaattcccatatgscccaaatatgaaagaagtcaaaagctggccatgaaagagaaaagttatcaataactaatgggtacccccccaggaattcaagagtcacacaaataatttccaatggtgtacttattccaggagggacccaattccataaacctgttcatggaaagcccagcaggtaatttttcatgtttagaataactttttatcttagcaagaggtattatctggatagagaatagaagaggcagttccagtgatcctctccgtcaaaaaactcactctcaggagtagattaaaatagcaaaatactcttgttgtcacagacagttaaggataatgtttgagcacacagtgcctttgttatcccacaaatgtgtgaagggtcgccagtcaca

SEQ ID NO: 320920 - DNA, 594 bp, Homo sapiens
ttctaagtgacttaccaaagccaataagcctttaaccaaggttatgacttaaacaaggacatactagatatctccaaagagatgcagagcagtgcttgcaagatttataacgaccccaaaacagcttaaagaaacgaatgtttccatagtctctagaatctcagcttcttagccaaccatctacaaacaaaagcccaaaattcccatatggcccaaatatgaaagaagtcaaaagctggccatgaaagagaaaagttatcaataactaatgggtacccccccaggaattcaagagtcacacaaataatttccaatggtgtacttattccaggagggacccaattccataaacctgttcatggaaarcccagcaggtaatttttcatgtttagaataactttttatcttagcaagaggtattatctggatagagaatagaagaggcagttccagtgatcctctccgtcaaaaaactcactctcaggagtagattaaaatagcaaaatactcttgttgtcacagacagttaaggataatgtttgagcacacagtgcctttgttatcccacaaatgtgtgaagggtcgccagtcaca

SEQ ID NO: 320921 - DNA, 572 bp, Homo sapiens
tgctcaagcttttaaatgtctttgcagctcacttaaaattaaatcttttcattgcactacaaatttctatacggactccctccctgaagtttgataacatcgtttaccgtcactctcctcttcactcagtcagcctcactcacactggcaccttgttgctcaaaacatgctatcaggaaaaggcctgaaatgtttttcctcacatatctacatgattcaatcattcatttcatttaaatatttgttcaaagatgaaatcctcattgatacatttcctcatcacaattttaaaatgctatgcatcactaccatagcactagcaattttctaatatagtacacaaacwcatatgcatatatgtgtatctgtatgtgtatatgtgtgtgtatcatatccatctgatcctactagaatatattttgcttctattggaatatattttgtttattgaggtattccaatgtctagaaattatttgaacataagataggaatttagagaaactttgttgaagaagtaaaagcaataataacttagcacttattgatcattacctatgttcaaacactgtg

SEQ ID NO: 320922 - DNA, 580 bp, Homo sapiens
agcattacctcaaatgaaagttattatgtgaaataaataaaacagtaggctaggatacacaataatattagcattggaattagtttaacagattatttgtaratgttttctaaggcagacaaatcatggtggtggagaggtaaagacttttcttttcattgggaggagagagattgtagagggagaggcattggtatttgtactcaataaccatgctgggagaggatggttgactatgttccaaaatgaagaattagccatgtggtttatagaaaagcaccaacgatgcagattatatccttcatctcacgtatgtaaaacctccagctcaccttgctaattataatgagatactgataagacgtacagaggttttcaattacaccaacaaactagggccatatattatgttgacagaacaatggattaggtacttttagccatgtaaatctttaaaacaaatggagtaaaacatcagactttaaaacattaaaataagatttatataaaaggcagcaaatcctatgtaagatgtaaaaatattgacctaatgaccaaggaactcagcctgagtagttca

SEQ ID NO: 320923 - DNA, 561 bp, Homo sapiens
ttatatatctatatatacacatacatgcaaaggtatatgtatatatctttttctggtatgtgatcaaattacttagaaacagtttgattattaaaagtctttcttttaaactttgacagtcagaagaagaattggctttggtatatgactgatttcctccacaamttatactatatgatcctgattattttacccatcaccccaagaattatgaggcttccactctgcctggagagatcagacactattcccagtcctgtgtgagtgccagagactgtgacctttaaacctttcaggcattttttttccccagcctcagaccattttctcatagtcatgtggtgataagtgctatgctgaatacttaaaaagtactctatgggtttcagaatttctctaaatatgcagctctatcttccatggtactctgccctgagaactctatcctccttggtcttacccaactttcagctccattccttctattcatagtgtcagaagtgtactgcctgggttcctctttgctgcagtgcagcctggcattatatattacaaattggg

SEQ ID NO: 320924 - DNA, 561 bp, Homo sapiens
ttatatatctatatatacacatacatgcaaaggtatatgtatatatctttttctggtatgtgatcaaattacttagaaacagtttgattattaaaagtctttcttttaaactttgacagtcagaagaagaattggctttggtatatgactgatttcctccacaaattatactatatgatcctgattattttacccatcaccccaagaattatgaggcttccactctgcctggagagatcagacactattcccagtcctgtgtgagtgccagagactgtgacctttaaacctttcaggcattttttttccccagcctcagaccattttctcatagtcatgtggtgataagtgctatgctgaatacttaaaaagtactctatgggtttcagaatttctctaaatatgcagctctatcttccatggtactctgccctgagaactctatcctccttggtyttacccaactttcagctccattccttctattcatagtgtcagaagtgtactgcctgggttcctctttgctgcagtgcagcctggcattatatattacaaattggg

SEQ ID NO: 320925 - DNA, 547 bp, Homo sapiens
ataaattccgtgaggatatagtgattggagctccagcaggtattttgaacattgcagaaaatgatcatggcaggaatggtggaactaaatgttagaatgagaaagrtttctaataactttgtgaaatttataaaagctccggattgctgatctctgaccatcttatgtaacataatatcttgtgtgttttggccacttctcacttgagtttactcttgcagatacgatgagtaactgatgccctagattaccacaccaattttttttggtcagttcttaggcctttgtaaagactatgatgccagacttggtggctcacacctgtaagtccagcattttgggaggctgagctgagaggattgcttgagttcaggagtttgagacagcgtgggcaactagtgagtgagacctccactctccaaaaattaaaaagttaactggttgtggtggtgcatgcctgtggtcccagctactcaggatgctgaggtgggaggatggcttgagtccaggagattgaggatgcagtgagctataattgcaccgctgc

SEQ ID NO: 320926 - DNA, 613 bp, Homo sapiens
atgtgtttctgtagcaacctggtctttcctatgtgatagtgtttatcatggtatgctaaatttttcratgtacattttgttttttccaaaaaactataatctctttgaagtcaagaataatattttgtcaccatagggcaatacttagcacatggttgattatatttgtgttaaaaaaataaatgacatgtctgcttccttgtcatttaaatcgagattatattaccatgtgaatgctaagatccctttgtttcaacattctaatgaggtatcagtcacagagataatacaccttaaaattaatatagacattcttttggttttgcttttcaaaaatgctatcacagctgaaaatctgtatcctcataacatggcttaatataatgaaaagtaggcaaaaagacaatagaagacttaagaagatgaggacaattggaaacttaaactgcttttgggctcagattctaagaacacatattttatttctttaaaagttctgatatttgaagctaatttcacagatgtggatacatgtcatcattttctgtattaccactctaaaacactaaatgcctcatagcatccagaagcagtgtaaaagaaattacactaa

SEQ ID NO: 320927 - DNA, 613 bp, Homo sapiens
atgtgtttctgtagcaacctggtctttcctatgtgatagtgtttatcatggtatgctaaatttttcaatgtacattttgttttttccaaaaaactataatctctttgaagtcaagaataatattttgtcaccatagggcaatacttagcacatggttgattatatttgtgttaaaaaaataaatgacatgtctgcttccttgtcatttaaatcgagattatattaccatgtgaatgctaagatccctttgtttcaacattctaatgaggtatcagtcacagagataatacmccttaaaattaatatagacattcttttggttttgcttttcaaaaatgctatcacagctgaaaatctgtatcctcataacatggcttaatataatgaaaagtaggcaaaaagacaatagaagacttaagaagatgaggacaattggaaacttaaactgcttttgggctcagattctaagaacacatattttatttctttaaaagttctgatatttgaagctaatttcacagatgtggatacatgtcatcattttctgtattaccactctaaaacactaaatgcctcatagcatccagaagcagtgtaaaagaaattacactaa

SEQ ID NO: 320928 - DNA, 613 bp, Homo sapiens
atgtgtttctgtagcaacctggtctttcctatgtgatagtgtttatcatggtatgctaaatttttcaatgtacattttgttttttccaaaaaactataatctctttgaagtcaagaataatattttgtcaccatagggcaatacttagcacatggttgattatatttgtgttaaaaaaataaatgacatgtctgcttccttgtcatttaaatcgagattatattaccatgtgaatgctaagatccctttgtttcaacattctaatgaggtatcagtcacagagataatacaccttaaaattaatatagacattcttttggttttgcttttcaaaaatgctatcacagctgaaaatctgtatcctcataacatggcttaatataatgaaaagtaggcaaaaagacaatagaagacttaagaagatgaggacaattggaaacttaaactgcttttgggctcagattctaagaacamatattttatttctttaaaagttctgatatttgaagctaatttcacagatgtggatacatgtcatcattttctgtattaccactctaaaacactaaatgcctcatagcatccagaagcagtgtaaaagaaattacactaa

SEQ ID NO: 320929 - DNA, 548 bp, Homo sapiens
tggctcaaattgtgctacatcactgtatttgtttcytagggatgtcataaaaattaccacaaacttggtggtttgaaacaacagagatttattgatttattctattgcatttctgtagactagaagtctgaaacaaatatattgtcagggccatgcgctctcaaaaggtctagagaagaatctttcttgaaatagttccttgcccctttctatcttccagtggtctctccccagcaatccttggcatctcttgttttactgtggcatcactttaatctctgcctccgtcttcacatagcctttttgtgtgtgtgtctcagttttctttttctgtttgttaaaagaacacttacattgtgtttatgatccaccctaattcagcatgatttcatcctgatccctaccttaactacatttgcaaagatcctatttccaaataagattacattctgaggctttgggtaaagttactaagaccaactattatctttactattgctttaatagaaagtatttttcatatttttcataaaaagcattgtctaccc

SEQ ID NO: 320930 - DNA, 466 bp, Homo sapiens
gtttttttttcttttttcaatctcaagtgtgaggaattcttatcaagtgttcttcatagagggtaatatctcatccttctcagaaatacggcttcttttcagagctaatcatgttacgctgaggaaaaaaaaaaaaaccttttgagcrttatatcctcaggacaaaaagagtctgcaaagtcaaggtctgggaagtaattatgtattataaagatgaatttttattcatgtggtattatggatcaaggtatgacaactttcagtagttaaaaaaataagctagacaatacttttccttgaagaaaaatgagtcttggcaaactaaaatgtactgtatgattctccaccttgagagtgcctatcaacagcaatataattgacacaaattaagtttgacaggttgctgaagaaggcttaaaaatgcattcttctgctttcatagagtgtacaagggtgtgcacacaat

SEQ ID NO: 320931 - DNA, 570 bp, Homo sapiens
tttatcttacatttggtgtgactcattactattcttatattccttttgtttttttgacacagaaagcattgaggcaacaatgtcttgccatttatcaggcatacagataagaccactaaacattcacttcaagcacttagcttacccttaatttcatcttatttggttaatgaggattgtatccttatttaagatgcaaattttggttttagttaaggtacctgtaactgatgaaaaacatttgctctaaaacttcagtggtttatatttgctcaagwaaattccagttggtggcagtagggagggtggagagaaatactatgttcaacgctgttactgaaggggccaatatggcggaaaacctgccatcttcaatgtgtcactctcaaatgtcacccagagtttcaatacacaattggtgctaagaagaagaaagagggttggggaatcatttgagtttaggcttaaaagttgcacacttcggcttacaggtcattggcccaaatgtgctcacatagcccagcagattcaagaggacaggacatatacagtaactgttctatggaaagg

SEQ ID NO: 320932 - DNA, 639 bp, Homo sapiens
ttttccatggagcctggctataaaatcattaggttgaaaaactatcaaaataagagttatgaaggacccataggacatcattattgatactgaattctcatagtttagccctttgttcttttcctaaggcattaagttgtggaaattcaaaatctatgaaratattattgttttgaaatatccatgcattgtgtgcacagtttcccagtccaaataaaatctacattttaacgctggtaatcatgtaaaggaattatttgaaaaacaaagtcatatataagtaaaggagctaattttctccaaagtagtttcaattttgtcaattaaatgttaaagaacacatttcaaactggtgtcattgtctattaactctctgactatccatagttatagagcagactaaattgtcaatgaggtagatggagccagaaaaactataccattattatataaaaatatgtttatatgttttaccatgttaaataagaaaagtgaggcaaacaaacaaaatgaggacaagctactgaggtagaagaaaaatacaaagccttggggaaaagtgagaatgggatcactgatttgcattttgggaattattacctgattcatcttgagattcttcatttggattctgactat

SEQ ID NO: 320933 - DNA, 498 bp, Homo sapiens
ggtaaacaaagtggcctggaagctcgaactgggtggagcccactgcagctcagcaaggcctactccctctatagactccacctctgtgggcagggcatagctaaacaaaaggcagcaaacaacttctgcagacttaagtgtccctgtctgacagctctgaagagagcagtggttctcccagcatggcttttgagctctgagaacgaacagactgcctcctcaagtgggtccctgacccccatgtagcctaactgggagacacctcccagtagggaccaacagacacctcatatgtgtgggtgcccctctgggacgaagcttccagaggaagratcaggcagcaatatttgctgttctgtaatatttgctattctgcagcctctgttggtgatacccaagcaaacagcgtctggagtggacctccagcaaacttgaacagacttgcagctgagggaccttactgttagaaggaaaactaacaaacagaaaggaatagca

SEQ ID NO: 320934 - DNA, 603 bp, Homo sapiens
gagttctgtgtgaggtggggcagcacagaaatgaacaatgcatcagagagagagaactggctgctcctgctttattcttatagctcaattatakgtacaaggctgtctataaaatgtttctatccaaacatgaatcttgaacaccactaatttcaccagtgatttgtggtgtcatagatgtcatcacttatgttaattttagtgcaaaacagaatttagtcaatatactttgcaattctgagggtgaatatttctgattacagtaactataatgctaacaatatatactaattgtggattcataatgagtatatgtcaaattctagttattctgtaggatctatggttttgtgattaagatactttaatgctctttaaacatcagaagaagtgaagattaaatttaacctacataaataaataatttatattgaaatgctttaaggagatatttcatttaactatatacatagacaaatgtatgaagtcataaatatacaacacaaagtgtacaccccaaactaatcagcacacagaataagataaagaacattttttgtgtcccagaagtccctctcatgtacactccagcccctactccct

SEQ ID NO: 320935 - DNA, 496 bp, Homo sapiens
acaggtaggacgtttattagtaatttaattcacccagtaagctgctgtgccttgtttatttgtgcttcaaaatcctcctgttcatttagtttcacttttccccatttccacatacagcacaatcaggagctgtgctatrtactttcttggctctgctttccagggaacagaagtagatataacaatttgaatttccccattgtaatctgaatcaatgactcctgtatgtacttgcactccttttgaatttaaactagatctacctagaagtaatcctacagttcctgctcgcaacatctgactagagatagcaatattctttaacagtcccattacaaaaggagaacctggtccatattgattaatagcttatttaaattctttgagtaattcaaaaggaaagggctcaaatgtagctacaatatttccctgttgatctcggggtgcgggggcggtaacctaacagggaactgccaagcctctatatcaccctctc

SEQ ID NO: 320936 - DNA, 496 bp, Homo sapiens
acaggtaggacgtttattagtaatttaattcacccagtaagctgctgtgccttgtttatttgtgcttcaaaatcctcctgttcatttagtttcacttttccccatttccacatacagcacaatcaggagctgtgctatatrctttcttggctctgctttccagggaacagaagtagatataacaatttgaatttccccattgtaatctgaatcaatgactcctgtatgtacttgcactccttttgaatttaaactagatctacctagaagtaatcctacagttcctgctcgcaacatctgactagagatagcaatattctttaacagtcccattacaaaaggagaacctggtccatattgattaatagcttatttaaattctttgagtaattcaaaaggaaagggctcaaatgtagctacaatatttccctgttgatctcggggtgcgggggcggtaacctaacagggaactgccaagcctctatatcaccctctc

SEQ ID NO: 320937 - DNA, 603 bp, Homo sapiens
gagttctgtgtgaggtggggcagcacagaaatgaacaatgcatcagagagagagaactggctgctcctgctttattcttatagctcaattataggtacaaggctgtctataaaatgtttctatccaaacatgaatcttgaacaccactaatttcaccagtgatttgtggtrtcatagatgtcatcacttatgttaattttagtgcaaaacagaatttagtcaatatactttgcaattctgagggtgaatatttctgattacagtaactataatgctaacaatatatactaattgtggattcataatgagtatatgtcaaattctagttattctgtaggatctatggttttgtgattaagatactttaatgctctttaaacatcagaagaagtgaagattaaatttaacctacataaataaataatttatattgaaatgctttaaggagatatttcatttaactatatacatagacaaatgtatgaagtcataaatatacaacacaaagtgtacaccccaaactaatcagcacacagaataagataaagaacattttttgtgtcccagaagtccctctcatgtacactccagcccctactccct

SEQ ID NO: 320938 - DNA, 603 bp, Homo sapiens
cacacagaataagataaagaacattttttgtgtcccagaagtccctctcatgtacactccagcccctactccctcacttgaggataatgactattataatttctaaccttgtgtactagcacttgttttaatcagtgtgtatatttttatgtstagttttctttgcccaacattatgtttctaggattcatccatgcagttcatggagttataggttggtccattctcattgctgaataatattctattttataaaaatgtgttgatatttttatctgctctactattgatggacatttaggttttttccattttataatattacaaatatgctgttaagaacgttctagtatgtgtctttattactgttggctatataactaaaggtagaagtgctggataataaagcatgaatatgtttaattttagtgaatataatcaatagtttccaaattggttataccagttcacactcctactaccagtatctgaaaaaaaattgccgccccttatcaataaaaaaattggcattgtctcaatttctaatgaactacatgatggtcgcatattttctttcaattagcatttccatgatgactaaaa

SEQ ID NO: 320939 - DNA, 603 bp, Homo sapiens
cacacagaataagataaagaacattttttgtgtcccagaagtccctctcatgtacactccagcccctactccctcacttgaggataatgactattataatttctaaccttgtgtactagcacttgttttaatcagtgtgtatatttttatgtgtagttttctttgcccaacattatgtttctaggattcatccatgcagttcatggagttataggttggtccattctcattgctgaataatattctattttataaaaatgtgttgatatttttatctkctctactattgatggacatttaggttttttccattttataatattacaaatatgctgttaagaacgttctagtatgtgtctttattactgttggctatataactaaaggtagaagtgctggataataaagcatgaatatgtttaattttagtgaatataatcaatagtttccaaattggttataccagttcacactcctactaccagtatctgaaaaaaaattgccgccccttatcaataaaaaaattggcattgtctcaatttctaatgaactacatgatggtcgcatattttctttcaattagcatttccatgatgactaaaa

SEQ ID NO: 320940 - DNA, 434 bp, Homo sapiens
atgatatgcccaattaaaggtaggtagatattgtattatgacctcaaaaattgcaacaatgtacactgtaaccaattttatatgacatcatatttcctacatcccctctaaaactagttttatcaataattttaatatttgctagtctgataatcatattttatttaaaattctaattatgtatttactagtgaatttgtatgactttawactatacatgacacttgtacaattatttttaaaattgaatcttcatatttttatcaatttttgtcatattagattattgtcttatttttattgattattagaaactgtattttatattcttagacacatctttcacttctgttaggaatcttccttgatttacatctggtatttaaacattgtttactatgctatgtttcttgcagaaatcgaatattatacta

SEQ ID NO: 320941 - DNA, 536 bp, Homo sapiens
tgttgggtttggttcaggttttcttctatccacttctggatattatgctttacattcttcttgaattatttcatgtgtagttattgtttttctatcagcaatatttgctccttgtgaaagttttgatattttgtacttaatatttccttttatgttgacaggatgctatcaatctctgtcagtaactgaagaaatgattgatttaattactgaacatatctgacatgacactgtatattttaattaagtttatwtataagcaatggagtttaaaaagagtgtttttgttatccaaagaaacacctgaagtgatgacattaaaagactctaagaaataaacatgttttgtttttcacatattaaattacctggtagatggcatgcgataaacactgttggacttactaccagaacagcagcacacaattgtgtatttctaggtctgctaatcagagaaagtgacttcaagggccactgtctctttcatggcttgttcttcatataaaggccacataagttgtacaccagtttgtgaa

SEQ ID NO: 320942 - DNA, 569 bp, Homo sapiens
ttatagagaattaataacaatgcaggtacaagatatttcttattaaaactttagatagaattgaggatctatacaaaagtgttgggagtggaggagtgaggtaggcagaatcaatagctgttttaaggaaataaacaagtgctatttttagccaggcatggtggcagacatctgtaatcctagctactttggaggctgaggttggaggatcccttgagactaggagtttgagactatccaaggcaacacagcaagaccctgtccccacaaaaccaaaaaagctatcttcgcttggatgttgtgagtgagaagagggacaaatcaaaccggttttgagacagataaactattaattcagttttgaacattctcagtttgtaggagacatacattggatatgtagaagaggaaagtagagttgctakcctaaagctctgaagaaaaaaaaagtgcctgaggtactgatagaaattggaacacataagctcatcctcaggagaaaaaatcttgccataatgataaaatcaaagatggagcaataagtatagatggaggagaggaaagaggaa

SEQ ID NO: 320943 - DNA, 569 bp, Homo sapiens
ttatagagaattaataacaatgcaggtacaagatatttcttattaaaactttagatagaattgaggatctatacaaaagtgttgggagtggaggagtgaggtaggcagaatcaatagctgttttaaggaaataaacaagtgctatttttagccaggcatggtggcagacatctgtaatcctagctactttggaggctgaggttggaggatcccttgagactaggagtttgagactatccaaggcaacacagcaagaccctgtccccacaaaaccaaaaaagctatcttcgcttggatgttgtgagtgagaagagggacaaatcaaaccggttttgagacagataaactattaattcagttttgaacattctcagtttgtaggagacatacattggatatgtagaagaggaaagtagagttgctagcctaaagctctgaagaaaaaaaaagtgcctraggtactgatagaaattggaacacataagctcatcctcaggagaaaaaatcttgccataatgataaaatcaaagatggagcaataagtatagatggaggagaggaaagaggaa

SEQ ID NO: 320944 - DNA, 618 bp, Homo sapiens
ttttgccaattcagtagaatgttgactgtgggtttgtcatgaatggctcttacaattttcaagtatattcttttgatgactatttattgagttgtttgtatcatgaagggatgtagtaggattttatcagaagttttctctgtgtatattgagatgatcatatttgtttctaattctgtttatctgaggaatcacattattgatttgcatgtgttagccaaccttgcactccaggaatgaggcatacttaaacatggtgaattaactttttaatgtgctgctggatttcgtttgctagtgttttgttgaagatttttgcatctatgatcctcaggaatattgrcctctagtttcattttctttttactgtgtctttgccaggttttggtatcagggtgatgttagcttcatagaatgagatagagtcctttcaccacaatttttgaaacagtttcagtagaattggtaccagctgttctttgtacatcttgcagaattcagctgtgaatctgtctgttctggtgcttttttgtttggtaggtgttttattattattattattggctcaatttcagaactccatattggtctgttcagtgtttcattttcttcctgact

SEQ ID NO: 320945 - DNA, 606 bp, Homo sapiens
tcaacctcatgagagcaaatgatcctcctgcctcagctccccagatatctgggactccaagttcacaccaccacacctggctaactttttaaatttttgttgagatacgatttcaccatgttgcccaggctggtttcagactcctgagctcaaacaatctgcccaccttggcctctcaaagtgctgaaattataggcatgagccaccatgcccagccagattattaatttgagatctttctaacttttgggggtaggcagttgtgctataagccttcctcttaacactgcttttgctacatccgaggaattttggtatgttttgtctctgtttacatttatttcacataattttttgatttcagtcttgattttgtttacctaaargtcttaaagcaagttgttgcatttgcatgtaattgtgtccttgagaaatatccttgatattgaattctatatttattccactgtagtttgagagtatgttttgtatgattttaatgttttaacatttcttgagacttgctttatagccaagcatgcagtcagtcttggagtatgttccacatgcaaatgagaagaatgtatatttgtgattgatgggtgg

SEQ ID NO: 320946 - DNA, 543 bp, Homo sapiens
gtcagctgagtcattaaatgaacagtggtctgaactctctgctcagccccaggagagtgagagccacaacagttggggctggacctggcaggtccacctcctggttccctgatggcagacacaaacaccagtgccaagaaagaatacactgggtggccaccaggcacccagaggtatgcctaggcatggagcttggaaacctccttggctgcaagttctctgcatggggatcagcggcagtctaagcttctgatccaggagaatgggtattccagatgcctggatatctgtctgggagtggagcagagaggtcccttccgccaaaatctctgtgaagcagagatggggtaactcaggctactggaccaagccagcaggtgctctgaatgcttggagattttcctaggtatgtagcagggagggtcccccctataccaggatctctgcrcagaaaggaggaggtggctcaggctgctgaaccaggtgaacaggtgctccaaatgttggacatctgtgtgggcttggagcaaagagagcctcgct

SEQ ID NO: 320947 - DNA, 608 bp, Homo sapiens
tatagtattagataggaaagttgattctgcagtgtctactcgccatgaagctaaattggatagaagccagtctaaggccaacattaatttattcaacaatacaaacctttccttcaattttatggaaaaagattattttgtttgccagtgtttatacatatagattaaatrtgccaccaggtgtaaaaagggaagcactacactaggttcttagaaatcgcaaggcagttgtcaagccttcttgttctcttactgttttacagctctgtttataaaacttcatggctgaattggcaggaagaaaacaaccacagataaattatccacctaaaggattaacattcattaatatagataacagtgtcaaatttaagagtattaggtggcaattgtggtgaagtggttttaatgactaaagatacaatgaggataatttaaaaggcttttgaaagaaatgtcaacccaacactctaatgagggtgaattttttaaagaatgatgagactgtttacattcagcagacatcttgttcttcacatagaccaaaatacaaatgagacaagttagtggtggatgagaaatagagataaattattaatatctctgtc

SEQ ID NO: 320948 - DNA, 551 bp, Homo sapiens
cttttattgtcacattaggacatgctctgtccagaacaatatcttaggattctaagtgatgtatgtggctggattacatacacaaaatggagacgtttcattcctgaaatatctttattttatactcagttacatagctcacatgacattttccagggagccatgcctatacatcttcctattctgtgcttgcttaccatacgcaatcttagacaaacctagggmattccatagatagtctctgttagtaagtatcattatatgtttgccaagaagtctgttgctagcagttagcatgtttacaaggaggtttcagcaaatcacctttcttttttctttccccaggacatgtaacctctcaaattgagagaatggattggagagatattgttgaccatgttttcccctgtatctcaccttcccctctccaagacttccttgtcagttacccatattgatatcagtttatccacatccatgctttcaagtttaaacaaagaaactaggcaaaggcagctatgtattcgctaggattagggaggagaagataa

SEQ ID NO: 320949 - DNA, 583 bp, Homo sapiens
acatgacttgcaagactttttactattttgctattttaaaatataataatttcatgttatctattattcagaaattatttccatgtatttcatatttgtgtttgatgagaagcagttaaataatacctagagtgtccttattgtcatcacataataataaagctttttattttatcccattcttggaatgaaacctcaggttttatgcaaggagaacctagatagtttagaggcctgtgtccagctttctacctagaacttgcagatgaaagctgtcttagtttatttgccctgctattacaaaataccttaaacttgrtaatttgtaaagaacagaaatttatttctcacagttctgggggctgagaagtccaactcaaactgccagcagatttaggatctagtaagggctgcgctctgcttccagaatagctccttgttgctgtgtcctaacatggttgaagggcaaaaggcactttggcactcccttcaatctctttcataaaaggactaattcattaatgagggtggagccatcatgactgaatcacatcactaaagacctcacctcttactacaagca

SEQ ID NO: 320950 - DNA, 583 bp, Homo sapiens
acatgacttgcaagactttttactattttgctattttaaaatataataatttcatgttatctattattcagaaattatttccatgtatttcatatttgtgtttgatgagaagcagttaaataatacctagagtgtccttattgtcatcacataataataaagctttttattttatcccattcttggaatgaaacctcaggttttatgcaaggagaacctagatagtttagaggcctgtgtccagctttctacctagaacttgcagatgaaagctgtcttagtttatttgccctgctattacaaaataccttaaacttggtmatttgtaaagaacagaaatttatttctcacagttctgggggctgagaagtccaactcaaactgccagcagatttaggatctagtaagggctgcgctctgcttccagaatagctccttgttgctgtgtcctaacatggttgaagggcaaaaggcactttggcactcccttcaatctctttcataaaaggactaattcattaatgagggtggagccatcatgactgaatcacatcactaaagacctcacctcttactacaagca

SEQ ID NO: 320951 - DNA, 538 bp, Homo sapiens
ttttcaacttcctaaaagttgtgtcttcactagaggaaagaatagagtaggatagttgatggctagctaatttgatagctacttcagccattttggccgctgatccaaataccaaagcaggcattatcaaatgcctctgagtcctcagttgccactgttgcctctttcagcatatcacaactctttataaaaggttgccacctttttccttagtctaatgtcaatatagcccaggtatgacagataggacctgagaatcccaaccaaagagggtagcactggcagctatgaagacagacattcagttactcagggtttcatttctgatctaagatatttcattcatccattatgaaatgcttgctagattaaaaacgggctcctagtcaacacaaaaaaagtgtatagaaaataaacctgacattaagcaacatattgttaaaactaaggacatatttctaaaaatgtgaggaaaggaaaatgaaaacacaatccaaaacaaaattttttagatytattgagacttgggtcaaaatct

SEQ ID NO: 320952 - DNA, 434 bp, Homo sapiens
cctaacaatgtggcttttgttttctatttctacagttttcaactacaaaaactgaaattttaagaagaaaaaaacttcagccsttacatttttttcagttaagacatccaaaggtaacttcaaaacttcaggtttcgcaaagcccctcagactgacttatttacaatactgacttgattctgaaatcttgttaagtataaattccactttaacagtagcttaaaaattcttcaaaagtaagacgcacctgaatatcagaaatgttaaaatatggtaatgtacacaccttagagctgagcaaatatggtgatagtgtttcctactcatcaggtactgaactaccattaaggcaaggtgctgtatgcatgtgtatatgttgtatgttctgcagttttgtgcttgtaccttcaaatgtaattgttgagattcttaaa

SEQ ID NO: 320953 - DNA, 588 bp, Homo sapiens
atctcaagaaaccactttctttgctcatccgtaagaagcaactcctcattcattaaaattttgttatgagattgtagcagttcagtcacattttcagcctccacttctaattctacttctcttgctatttccgtcacgcctgcagttacttcctccacttaagtgtttcttgaacccctcaaagttatccatgaggattagaattaacttcttccaarttcctgtgaatgttgatattttgagctcctcttatgaatcacaaatgttcttaatggcatcgaaatggcaaatcctttccagatttattttctttggattcaccagaggactcactattgatggcagccatagcctttcaaaatgtatttcttaaataatacgttttctttgtgagcatatagattttaaaaattttattgaagtatggtttatatccagaaatgtatgcctgttgtaaatgtatagatcaatggatttctacaaattgagtatacctcaatttgaacatgtatcagtctgctttgtgcttacttcaagtcattaaccttccctttgaacctccactcctcgaagctaatgactagcctg

SEQ ID NO: 320954 - DNA, 588 bp, Homo sapiens
atctcaagaaaccactttctttgctcatccgtaagaagcaactcctcattcattaaaattttgttatgagattgtagcagttcagtcacattttcagcctccacttctaattctacttctcttgctatttccgtcacgcctgcagttacttcctccacttaagtgtttcttgaacccctcaaagttatccatgaggattagaattaacttcttccaaattcctgtgaatgttgatattttgagctcctcttatgaatcacaaatgttcttaatggcatcgaaatggcaaatcctttccagatttattttctttggattcaccagaggactcactattgatggcagccatagcctttcaaaatgtatttcttaaataatacgttttctttgtgagcatatagattttaaaaattttattgaagtatrgtttatatccagaaatgtatgcctgttgtaaatgtatagatcaatggatttctacaaattgagtatacctcaatttgaacatgtatcagtctgctttgtgcttacttcaagtcattaaccttccctttgaacctccactcctcgaagctaatgactagcctg

SEQ ID NO: 320955 - DNA, 574 bp, Homo sapiens
catattatgacattggtgtagagacaaacaattcaatggaatggaatagagtataaaaagaaacttgcacatacacagaaacttggtttttggtacagtgaatactgaaagccagaggggaagaagaaactattcactaaatgactctggaacaactggttatctatacagaagaaagaaaaatgcataaaattgactgcacaaaaacagttactggtaaattcaagatttaaagccaaattatagcaattgtagattaatatatttgggatccatataatctcaaggtagagaaacacttcttaaatggagtattaaaaagcacaattcataaaagcaataaaaatacttgattatattaaaattaaagattaattttactaagagtcaccaaaaataataaaaacccaagccattccacgtgagaatttatctgcaacatagaaaactgaaaaagaattagctctactatatractactacaaataatttttttaaattagtgattctattaaaatggtcacatgatatgaataggaatttcaccaaagaggaaacacaaatggccaaaaaa

SEQ ID NO: 320956 - DNA, 607 bp, Homo sapiens
tgtttcttcacaatcaattcatttgtggtgcttctttcaaaaactctccagcacctgcactgcagagcgcaaatcaacccctttaaccggtgattctcaaaggtaactttagaacaaactgaggagctcttaataacacycatgccagcaattctgatttaattgatcagggtggagtgtgggcatggtatcacttaaaaatctcctgccagaagtggtgcctcatgcctgtattcccagctactcaggaggttggagtgagaggatcatttgagcccaggagttcaaggaagcagtgagctgtgattgtgccatggcactcccacgtgggcatcatagcaagaccctgtttctaaaataaacaaacaaacaataaaagtttcccagctgattctaacatgttgccagagctgggaagactaccggaaatgtgcacaccaggccctctgcaaccagcttgcctgctttgccaactcttatttcttgacagtcccacaaagccaccacaccctctaggcatgacacgaacagaccaccatttggcactaatctgtatgtaaagaaagaatgcctagcaaaggaaagaaacttttttggattaagatcg

SEQ ID NO: 320957 - DNA, 620 bp, Homo sapiens
tgaacctattaaaactgtctcacagcaggagtttaatgaagtatcttttcctgctctgtttttgctgtcatttttcatgaggcaaagaaagatggaaattcacagaattttagaattaggtcaactgattgtgtcccattggctcagccaatttagagcatggcactgagactaatatcatggcttttctgttgtccagttggctctttatagattcacaaacactaactttacccttaatcctgtgtaggaaatacataaatgccagcaattatgcagctgatcataataggaaaagggtatgtatgacttggtgaaaatccaatagcatcatcttgaaatgcaaagaagaacatatttcaaagagcagcagtccagccaatttggaccaattagaagacagaaggaaaatagctagataatcaatagtcagctgatcataayattaatcaaacctttcatgcttcagttctgcaagctgatgttgaatataagataaaatcactcccatttgggctcagctgggattttgagcttattaaacaaaaagaatgagttaaattaacattctaactcagcattaaactcctagaagcaagagaattcatcataaaatgtcc

SEQ ID NO: 320958 - DNA, 620 bp, Homo sapiens
tgaacctattaaaactgtctcacagcaggagtttaatgaagtatcttttcctgctctgtttttgctgtcatttttcatgaggcaaagaaagatggaaattcacagaattttagaattaggtcaactgattgtgtcccattggctcagccaatttagagcatggcactgagactaatatcatggcttttctgttgtccagttggctctttatagattcacaaacactaactttacccttaatcctgtgtaggaaatacataaatgccagcaattatgcagctgatcataataggaaaagggtatgtatgacttggtgaaaatccaatagcatcatcttgaaatgcaaagaagaacatatttcaaagagcagcagtccagccaatttggaccaattagaagacagaaggaaaatagctagataatcaatagtcagctgatcataatattaatcaaacctttcatgcttcagttctgcaagctgatgttgaatataagataaaatcactcccatttgggctcagctgggattttgagcttattaaacaaaaagaatgagttaaattaacattctaactcagcattaaacycctagaagcaagagaattcatcataaaatgtcc

SEQ ID NO: 320959 - DNA, 531 bp, Homo sapiens
tgagtggaaaaagccaatccccaaagtaacatactgtatgaattccatttatacaacatttctgaaatagcaaaattgtagaagtagaggacaaattagtggttggtaagggataggggtgagtttcaagaaggaagtagatatgggtacaaaactgcaacatgagagatccctggtgggggatacatgaatctacacaggtcatacacacacacacacacacacacacacacacrcgcgcacacaggaatccaggtaatactggagaaatctgaataagctttgtacatcagatcaatgtcaatatcctgattacactattattctatagctttaaaaaattttgagatcacgccactgcactccagcctgggtgacagagtgagactccgtctcaaaaaaaaaaaaaaaatttttactatgggtagaagctgggcaaggtgttcaagaaaactccataatttcttacaactgcatgtgaatctctgattatcttgataaaaatttcagttaaaatttataataatgatg

SEQ ID NO: 320960 - DNA, 579 bp, Homo sapiens
ttgtacagtgtggctgaaaaggccgaaggttgagcaatggcccacagttactacagaagctaccattactatagttattgataacatctgctaccattctgcttcctatctggactatagactcttagggctgtgccaattcacttctgtatgacgagcactagtgtagtgcttaatctcttatgggcacccggtatatctttgctaaataaaaataaaatatctaatgattatacagtacaaaagactacttatgtatgttacatcctttaaactgtaaaacagacattttagagattataatttacgcatgatgaaaaagtggctcagggtgtatattgcttgacaagttcattcagtggacaaatcatagatctaatgttataactcaggtcccctgaatgttatactacccactgtggcagcttggcacaaaataaactattccaggtcyattttaaaatcaattcaagctcggtattgggacatgctggatgcttactaaatccagtgggtagaaaagagaaagctaagatcaggcaaaatttggattcaaatgccagttggcaacagatatgc

SEQ ID NO: 320961 - DNA, 575 bp, Homo sapiens
taatacttaagtcccaccacccaggggcttctactataattatatttgtatatttttatctcaatctttattctgcatatttartgcaactatgataattccttataggcaatattgtatcccattgattttctactcctcaaattctattttccaattgtgagaacttgcatacattactaagctcatccacaagataggctaatattaggatctaactcacaggacattggtccaacttaaattacacgccagccacctggttagtgttcaaaaatgttaactattattaataaaaatagaagaaatatttgtcattacaaaatcttaaaatcataatgggtatatgatgtacatatctcattacgtgaatgtctatttattatacttttattgtagggtatttagactcctaagttttgctcaaatagtagtcaaggtatacttttttatttattgagaataacatgggatctgttgtgcaatgtccataaagatcaaagtttgcaggaatgtccctaagacatttacctttttcctcattctaaaagaatgagaagagtaagagtggtaga

SEQ ID NO: 320962 - DNA, 219 bp, Homo sapiens
agaagtgataatcctcttttttattattcaagtcattgtgagaattaaatgactttctatgtaaaacgcttagctcagtgcttggcacaaagtcagtcactgctcaataagaggaactctaagatttcacyagctccagaaaaaaaaaaaaaaaaaaaaagcgtgagatttgagtggggtggtagattgccagtcactgctatctctaatatcattcca

SEQ ID NO: 320963 - DNA, 478 bp, Homo sapiens
ctgcattcagcccataggccactggttggacaagctttgttctaagctttcatattttactaaccaagtagatctgagctcttccastgatgttttttgagtttacgaataagctcactgatagggacatagtgtcttttctctgaacttacgaacccagatattgcaatacatctttttgctcttggggggcacataagttacccacataaggcatttgtatagcagatagtcctaaagattttttaatttattgggagtgaatagtatagcaacactatttacaattaaatatcaaacgtgcctatccttcaaaattgttacatcacatctcttcccatactctggacttttgtattcatgccttgtcaccctccttcttgtctctctggtagatattgctacttctccatgccaaatatgatcaagtctcctaccaacttcagaacaacttctctcactctccctgtattataca

SEQ ID NO: 320964 - DNA, 536 bp, Homo sapiens
agcattcagcataactccttcctttaagtcgagacttggattttcagaaccattgaagcccatttcgttggcctccattctaagtttttattgttgttgttggtttgttwaatttgtagacaaccatgcctaaaataagcttaacctaccaggtagtaagcttgaaataatgctactccataatgaaagtcattgctaatggacaagcagagggttggctcttaaattgcagagttttcaaggactttctatggactccagatgtaattccaaactggtttttcagtaagtcagaaaagacttaaaatggcctatttcccctgttctttgtagcaatttactctaagtactgattattttgtcaagccttttgagctcaaagctctcactataatatcttcagccttgatggactgtggttagaggagtaagtgctagaaatgaaatgtcttgtttatttaagaaaagaatcaaaagtgaaacagggcttgctctgtatggggaaaactgagtaaatgctgatgagcaataattgg

SEQ ID NO: 320965 - DNA, 536 bp, Homo sapiens
agcattcagcataactccttcctttaagtcgagacttggattttcagaaccattgaagcccatttcgttggcctccattctaagtttttattgttgttgttggtttgttaaatttgtagacaaccatgcctaaaataagcttaacctaccaggtagtragcttgaaataatgctactccataatgaaagtcattgctaatggacaagcagagggttggctcttaaattgcagagttttcaaggactttctatggactccagatgtaattccaaactggtttttcagtaagtcagaaaagacttaaaatggcctatttcccctgttctttgtagcaatttactctaagtactgattattttgtcaagccttttgagctcaaagctctcactataatatcttcagccttgatggactgtggttagaggagtaagtgctagaaatgaaatgtcttgtttatttaagaaaagaatcaaaagtgaaacagggcttgctctgtatggggaaaactgagtaaatgctgatgagcaataattgg

SEQ ID NO: 320966 - DNA, 536 bp, Homo sapiens
agcattcagcataactccttcctttaagtcgagacttggattttcagaaccattgaagcccatttcgttggcctccattctaagtttttattgttgttgttggtttgttaaatttgtagacaaccatgcctaaaataagcttaacctaccaggtagtaagcttgaaataatgctactccataatgaaagtcattgctaatggacaagcagagggttggctcttaaattgcagagttttcaaggactttctatggactcyagatgtaattccaaactggtttttcagtaagtcagaaaagacttaaaatggcctatttcccctgttctttgtagcaatttactctaagtactgattattttgtcaagccttttgagctcaaagctctcactataatatcttcagccttgatggactgtggttagaggagtaagtgctagaaatgaaatgtcttgtttatttaagaaaagaatcaaaagtgaaacagggcttgctctgtatggggaaaactgagtaaatgctgatgagcaataattgg

SEQ ID NO: 320967 - DNA, 593 bp, Homo sapiens
agggcactggatttggctgtaaggtctttggccatcaagttgccttatgtagatgacaagtttggataagacaatgtgtgactgcaactgaggaaagattatttttttctttagacttgaatgcaatcagaatttagcccaagagttcttctgtgaaggacttgtatctcttcccaaattatgagcaatgactttcaaacagagagttttttatatttgcaaaggaagtaatatttsttccctatccttcttcatactcttctaattattgtaatcattgtatgaatcatagggtgtgcagtggatgcaagggaaaaaggctgagtaggtgctcaggtattatgttttgtcccaggtacgtgtggtttctaatggtgttgcccagtacagagcagaacctagaggatttcaataaacatgttagagatcagaacattgagtggtttaggtatcacaatttgctctgttcccaagaaatctggcagtgttgtttttttaaagataaaatttaatgggctataattaatatatgataatctttcaaaggccaatttggctttctttgtttgctcttagcatattgcattagatgc

SEQ ID NO: 320968 - DNA, 593 bp, Homo sapiens
agggcactggatttggctgtaaggtctttggccatcaagttgccttatgtagatgacaagtttggataagacaatgtgtgactgcaactgaggaaagattatttttttctttagacttgaatgcaatcagaatttagcccaagagttcttctgtgaaggacttgtatctcttcccaaattatgagcaatgactttcaaacagagagttttttatatttgcaaaggaagtaatatttgttccctatccttcttcatactcttctaattattgtaatcattgtatgaatcatagggtgtgcagtggatgcaagggaaaaaggctgagtaggtgctcaggtattatgttttgtcycaggtacgtgtggtttctaatggtgttgcccagtacagagcagaacctagaggatttcaataaacatgttagagatcagaacattgagtggtttaggtatcacaatttgctctgttcccaagaaatctggcagtgttgtttttttaaagataaaatttaatgggctataattaatatatgataatctttcaaaggccaatttggctttctttgtttgctcttagcatattgcattagatgc

SEQ ID NO: 320969 - DNA, 526 bp, Homo sapiens
aagccagtgatttagagtgaaagagaagaacaaggttgaatttaacatagaggcccaggctggcaagaaaaatgcaactagaaaagctctctggtgagaaaagcagaggcagaattacagcatctaaaagccagtcactagaaaagaaagaacatgagaatggaatttagattgaaaaaataaataaaaatttttaaaaatcagaaaaagccattagaatataactaatttttcccttttttttttttttttttttttttttttttttgccttgagaccctgggagggactgagttccagatgtgtcttttaataagataaattcttcattatggaagtagttgaataaagcatgtgattactacagcaatttacamatcagatgtaaagtagaattacctttgctccatttctatgtaagtgaaaataagatttgttaagtccaatacaaaatgtatgaaagacttgatattgtattcatcgttcacctctttgcagttaaaatatgcaaggaagtacaattaac

SEQ ID NO: 320970 - DNA, 526 bp, Homo sapiens
aagccagtgatttagagtgaaagagaagaacaaggttgaatttaacatagaggcccaggctggcaagaaaaatgcaactagaaaagctctctggtgagaaaagcagaggcagaattacagcatctaaaagccagtcactagaaaagaaagaacatgagaatggaatttagattgaaaaaataaataaaaatttttaaaaatcagaaaaagccattagaatataactaatttttcccttttttttttttttttttttttttttttttttgccttgagaccctgggagggactgagttccagatgtgtcttttaataagataaattcttcattatggaagtagttgaataaagcatgtgattactacagcaatttacacatcagatgtaaagtagaattacctttgctccatttctatgtaagtgaaaataagatttgttaagtccaatacaaaatgtatgaaagacttgatattgtattcatcrttcacctctttgcagttaaaatatgcaaggaagtacaattaac

SEQ ID NO: 320971 - DNA, 636 bp, Homo sapiens
tcattataacatttttaacaagagtgatgtctttaatctcttttcctctctgtccctagagttagaaacagtttgatatcagtagagttggccacatagcacatctgtggtctctgagcaagtgtttcatttttataatccctccgggtccccaaaattagagtcagaaagagataataaattttccctctacttactaactgtgtgatttagactacttaatctcatcaagggtgtccttgtctgtaaaatacaggcaatgatacttaccttgtggaatggctgtgaagaagaaacatgatagaaaacatgtaaccaaatatctgatacacaaagcacgttatctaatgttgcaatcattttgttataaagataatatagagttattcctttattagcattttgaagaaaaaattaagcatacaagcttttgaaatgatgatgcaaatggaaaatatggccagttcaaatatttatgctcataaagcaaaataaatttctttgtctttttctttctactggttagttctctgttctttttaggtcttaggagtcaggatacaaaatgaaatgcacatggaattgtgtaacrttttgtgattattactttcttcaagttggggcaatggccacaaa

SEQ ID NO: 320972 - DNA, 609 bp, Homo sapiens
ctcaccaacaacatgaaaaaaatcaagtataaaacttttaaggtctcttacagcatgtgagtaattaaggagaaatattctttgccttatcataaaatgaatgagattaaatgacatcaacgtatattcctggccagtaaacagcaaccaaaaggagaaaaaaaatcagtgatgagtaacgattttcaagaaatgctcattgaaatggataacaagaagcattcaacaagagctcaagataaatgaatgttaatgaactacaaaaagggctcaggattacttattgaagagaaaagcaagagtaataggcctcaggcattttgccctacttatccctggtactgcaatgctcccatggcttttctgattgaactacagtgaggatattttagaggagacttggattgatgcaagtactttcaacaatactaaataatgtaaaatttacaggtaagttaaatgtcttgtattatgtgactaatttcagggaggggatttttgaagacagttttctcyactagtatatcacataactgcgttctacttgatctgttgtgaaactggtaaacattgtcttcactgttagctgaactcctgtagtctatagca

SEQ ID NO: 320973 - DNA, 622 bp, Homo sapiens
taaaaactaacacttaactatggctattaatgcaatrttataggttatttattataaataattgtttagcatctatatggttttgccttttaaatcataatggtaaaataaatgttaaaaatgacattttaatgtcagacagctgtggacacaatagctcatttatttactaagtacgtgagcttgggcaagttgcttaatttttttttttatgccttggttttttcatgtttaagagtaagagtaattgagttttctgaaagtttaactgagataatgcactcatattatttagtgtggcacaaagtaaagactgaaatatcagatatcattattgatttggaaaagtaagtggaaggaatagccttgatacaaacttccttttatagcagatttgaacaatagcagcaacatttaacatttttaattaataaaaccttaagtaaagtttcatttaagttttaaatttgtagccttagccacaatcagcatctgagaggacaaggaagtgctgtttacaatttaaaaacatattctttctaagcgtgttgatggtgttgtggtctgcagccataaagtgcaagagccaaggggatttgactgtctcatcctatctatgatc

SEQ ID NO: 320974 - DNA, 622 bp, Homo sapiens
taaaaactaacacttaactatggctattaatgcaatgttataggttatttattataaataattgtttagcatctatatggttttgccttttaaatcataatggtaaaataaatgttaaaaatgacattttaatgtcagacagctgtggacacaatagctcatttatttactaagtacgtgagcttgggcaagttgcttaatttttttttttatgccttggttttttcatgtttaagagtaagagtaattgagttttctgaaagtttaactgagataatgcactcatattatttagtgtggcacaaagtaaagactgaaatatcagatatcattattgatttggaaaagtaagtggaaggaatagccttgatacaaacttccttttatagcagatttgaacaatagcagcaacatttaacatttttaattaataaaaccttaagtaaagtttmatttaagttttaaatttgtagccttagccacaatcagcatctgagaggacaaggaagtgctgtttacaatttaaaaacatattctttctaagcgtgttgatggtgttgtggtctgcagccataaagtgcaagagccaaggggatttgactgtctcatcctatctatgatc

SEQ ID NO: 320975 - DNA, 553 bp, Homo sapiens
taagtgtaggcttccagtctgttagtgtgtttgtacatattcataaatgtgtttgagtatatgtgtatgtatgaaagtatatgtgagtgtgtatgtttatatatgtgtatgagtgtgtgcacatttctgtgtatgtttgtgtatgtatctggtcttggattataattcaaccacttattgatggtaacttctctaatctgttaatgataatgtgacataatgtatgtaataatmtttataaaatctagagtactatgcaagtctacttcattattacagatacataaaacatactattttacagctttaagaccggaacagtactgtatggcaatcactatactctctgaatgcctgtatgtagtcagaaaatgcagtctaaaatgtttatccatatctgaaatgtaacttttatatcctttctctcattcctaattcataagacttcctttcctcgtatttctgagaagatatctttacaaccattaaaaatgagctcttctgcctagtctatttttttccctttacttgggaccagtaactataaccaacc

SEQ ID NO: 320976 - DNA, 619 bp, Homo sapiens
ctttgaaaatttggcagaaccatttcctagaaaaagccatgtataaacacatacacagtgaagaattagagatctcctaatacctctctgtggatacacagagattcatcaacccccatgtacatcccctaaaccagttcaagtcatacttttttttttttttttttttgagacagagtctcactctgttgcccaggctggagtgcagtggcgtgatctcggctcactgcaagctctgcctcctgggttcacgccatcctcctgcctcagcctcccgagtagctgtgactacaggggtccgccaccacgccyggctaatttttttgtatttttagtagagacggcaccatgtttagccaggatagtctccatctcctgaccttgtgatccgcctgcctcggcctcccaaagtgctgagattacaggcgtgagccaccgcgctcagcctcaagtcatattttaacacaagcagaaactgaaaccaaaagatcaaatcactaatggaggcctggtatcaaatagcaagtagtttctgtggtaagctggggagtgtataacctcctctaaaagggtttccttacttcattctagccaatttttggcaggtaggaaagtcagt

SEQ ID NO: 320977 - DNA, 619 bp, Homo sapiens
ctttgaaaatttggcagaaccatttcctagaaaaagccatgtataaacacatacacagtgaagaattagagatctcctaatacctctctgtggatacacagagattcatcaacccccatgtacatcccctaaaccagttcaagtcatacttttttttttttttttttttgagacagagtctcactctgttgcccaggctggagtgcagtggcgtgatctcggctcactgcaagctctgcctcctgggttcacgccatcctcctgcctcagcctcccgagtagctgtgactacaggggtccgccaccacgcccggctaatttttttgtatttttagtagagacggcaccatgtttagccaggatagtctccatctcctgaccttgtgatcygcctgcctcggcctcccaaagtgctgagattacaggcgtgagccaccgcgctcagcctcaagtcatattttaacacaagcagaaactgaaaccaaaagatcaaatcactaatggaggcctggtatcaaatagcaagtagtttctgtggtaagctggggagtgtataacctcctctaaaagggtttccttacttcattctagccaatttttggcaggtaggaaagtcagt

SEQ ID NO: 320978 - DNA, 550 bp, Homo sapiens
agggatttatacaaaaataaagagaagatcactgaaaacctttgggatctgatccccctcaacagaattaaagctggtttttagatgtgtgtgtatttctcttgttttgctgctacttctaatttgaaggtattggagcagcaatgacaaattgttctcagagactatatttgctctgygtacctaaatgtgccacctatgtccagaggcgcacctgaggaggcttgcctgcctgactgctttcttgtgatttgaattgttacgaatggcagctggctgggattccattcccagtgtttttagattgtctcgtagacacagacaacatgttagaaataataatttttgtgcatagttcttctgtggtggttggacgttttcgtcagtgttgactgaagaataattgagctttagggcatatcatctaaaaaatgtaaaaccactcaaaaaggaggaaataaatgtgggtaaaaatccaggcaaacatgaatgcatacttacagactgacccaattatctatttagtgggtgctgcctacacagccaaaac

SEQ ID NO: 320979 - DNA, 550 bp, Homo sapiens
agggatttatacaaaaataaagagaagatcactgaaaacctttgggatctgatccccctcaacagaattaaagctggtttttagatgtgtgtgtatttctcttgttttgctgctacttctaatttgaaggtattggagcagcaatgacaaattgttctcagagactatatttgctctgcgtacctaaatgtgccacctatgtccagaggcrcacctgaggaggcttgcctgcctgactgctttcttgtgatttgaattgttacgaatggcagctggctgggattccattcccagtgtttttagattgtctcgtagacacagacaacatgttagaaataataatttttgtgcatagttcttctgtggtggttggacgttttcgtcagtgttgactgaagaataattgagctttagggcatatcatctaaaaaatgtaaaaccactcaaaaaggaggaaataaatgtgggtaaaaatccaggcaaacatgaatgcatacttacagactgacccaattatctatttagtgggtgctgcctacacagccaaaac

SEQ ID NO: 320980 - DNA, 617 bp, Homo sapiens
ctagtcataaatttatttaaccagttctgtttgaatatatacrtgtgatactttgaaatctcttttcaaactactgtgacatcatttaggtttccttattaatgaatgaattaaataaaatctttgacattattttatatttgtatttaattcatgattttacctgtttaaaaaatgcttccttcaacacctgtgttggttggtgctgaatttgaacctcagtctgatgttaagacaaagagaaacaaaaatctaatttaaacttctttttccaccagaaggagagcagattccaggttattatcaaccctttgaattattgaatcttcttgcatcagcataaatagttacaggaacccactacaaaagaccctatgggtttcttaaaatgaagtaacagttcaaggacatctggagctgagagaaaggaagaaagtgaatgtaaataatgatcagaaattctgttccctttgggtcattattcacctttccaagtcaatttatctgctataatgccttgaaaacactttttaatcattgcctagcatcttaaaaaatctaagatattacctgaattaagtcaaaaacccagaatgaatttaagaatgaaggctact

SEQ ID NO: 320981 - DNA, 567 bp, Homo sapiens
ggtgcaagtcgcttagcaattgtaggtgacaggcgggctagtatcacaggtaaaacatttctgtggccactaagttctttaggtacactgaagagaggaagatgagatccaactcttactaagtttatccaatcaggacactttaagccatgtgttttacagatatatctctctatttctctctttccatcacccactgtctccctctttttgattctctttttcaaggttcataatagctgtattttctgaactatgttcaacattacttaaagatctgttctctcatcctgtaaatgaggagtcagagctgtattatgtacaagagtccttccacactaaacgaactatggttttctgcatataatgggacaaaagagatggtactagaaattatacagcataagtgctgaagtctaggcttatatccattgctcctatcaaggagtctctttaaacctagttgagaagagtgtgtgatggctggattccttcccttatgcaaatctacygggggatgaggggtttccaatgcagatttctgccaatttccattctgataggaag

SEQ ID NO: 320982 - DNA, 535 bp, Homo sapiens
ttctcatacctcagtcccttcagtagctgggattacaagcatgtgccagcatgtctggctaatttttgtwtttttagtagagatagcgtttcaccatgttggccaggctggtcttgaactcctgttcttaagtgatcttcccacctcggcttcccaaagtgctgggattacaggcatgaaccaagacaccaagcctatgttttagaatgtgagaaggacatgagatttggtaggggccagggcaaaatgatatggctagtgtattagtttgttctcatactactataaagaactgtcccagacagggtagtttataaaggaaataggtttaattgactcccagttcagcatggcttgggagggctgaagaaacttacaattacggcagaaggcacctcttcacaaggcggtggtagagagaatgagagcgaagttgggaaaagccccttatgaagccatcagatctcatgaaaactcactcgctatcatgagaacaacatggggggactgccctcatgatataatcacttcccac

SEQ ID NO: 320983 - DNA, 605 bp, Homo sapiens
aaaaaaaaaaaaaaaaatctaatgagtgacagcattaataaatgtgatttttaataytgtataataaaatttgtcaacatttaaacctgtataactcagtgaatcaatattttccaaatgactaatatatgatgttataaaatcaggcatgagtaaaagatcaaaaggcaagttaggctaatgccttataatgtaacacaatgctccccaccctttgtggcatcaggagccagcttcatggaagacaatttttccacagatctgggagtgactgttggtggtagtggtttcagaatgattcaagcacattacacttatttgtgcactttatttctattattacattgtaatatataatgaaataattatataattcaccaaaatgtagaatcagtgggagccctgggcttgttttcctgccactagacagtcccatctgggggtgatgggagacagtgacagatcatcaggcattagattctcataaggagcatggaaccagaacccagattcctggtatacacagttcacgatagggtttgtgctcctttgagaatctaatgcccctgctggtccgacaggaggcagagctcaggctgtaatgt

SEQ ID NO: 320984 - DNA, 559 bp, Homo sapiens
gagccctgggcttgttttcctgccactagacagtcccatctgggggtgatgggagacagtgacagatcatcaggcattagattctcataaggagcatggaaccagaacccagattcctggtatacacagttcacgatagggtttgtgctcctttgagaatctaatgcccctgctggtccgacaggaggcagagctcaggctgtaatgtgagcgaggggaattggctgtaaatactgatgaagctttgctctgcttgcttgcctgctgctcacctcctgctgtgcaacccagttcctaacaggccaccaactggtgctgtgcaacccagttcctaagaggccaccaactggtataggtctatagcccaggggttgggggtgcctgatgtaaaagatatgaaaatctcattggtatgttttcatatttcacattgaaattaaccttttaaaaacatccacttgttmagttttcacatatcacatatccacaattaaccgaaaaggcaattaaaatgttgtccttcccttcaaatcacatatctgtgtaatggaagaccatt

SEQ ID NO: 320985 - DNA, 591 bp, Homo sapiens
gccaaacatatgctactaggccccacctccaacactggagatcaaactttttttcaacattggaggggatgaatatccaaactatatcaccmcaagtggggtataaagttcggtgttaggcctgctgagttgcagaggcttatggtatatacataagtgaagatatgcaacataaaattttgatgtcagggtttagttctgcaatgatatctgtgtggataatagagatttgtgaattatgaaaatattagggatagttgaaaaactggaagttgaacaaatcaataaataagagagtatatactgtgagaagaaaaataagagagagaagagatgaggatacaaatggaactccagagattaccattacctataatatgagtgaaaagaaggaaaactataagagacagtaaagggacataaccacaggagaatgatgagagaggcacttctgaagccaaaggaagagaaagtttcctgagttagagagtagccaaagatgtcagatgttgcagagacgtcaaaagagaaaatgactcaatagctccttgaagtgcataagtgatctttttcagagctcttccagaggat

SEQ ID NO: 320986 - DNA, 496 bp, Homo sapiens
aaccacagtctcactcaggaaatgtgacattggtgaaatatcattatctaatctagagatgttaggattaaaaaattgtcacaataatgccattctaatatacagttctaaatctgggatctaataaaaaatctcagactgtaaaaaaaattaaaattgatacccaacttgactgcactttatggatttatacatctctgrggttttattttgttattttctccatgcaatataaggattttcctctttggagacaggaaaatggattacataattattcaaagtcctgattaggcctatgactctatgatctactgatatgtcctaattcaactgctccatgaacatacccaatcacaaactagacacgcattcaaattctatcagctttctgtatcatctttttggacaacagttttgctccactgactagctccccaggtcaaaattcatcacctgctgcagtagaggatttcagtaacaaaggattgcagaa

SEQ ID NO: 320987 - DNA, 565 bp, Homo sapiens
ttttgactgattaaaaaaaagataaatcacaattggtaatattgacactctgaggtgctacaaagatcatataggtaccacaatttttaactagaattgacctatctcttggccttcaaaacctgggagtctccagtgtccagtatcggtttccccttttcagtgaaggatkcctcagaaaaatgaatcatgtcttaagatcgagcaagaaggagaccattgccataaatcagttaaatttctaaccaaatccttttgtgcaatatcttgttctctcttctttcagtctacataaataaacatcttatcttcttaagacatgcaaataagggagttggtgacaagtgaagttaatagagaaacatgatagagttccagactatcaggatccctgtgagaccacatttgaaagtctctgaacatggcatactcttctcagcctgtcttaaatctggtctgttttgtctgacaagctaagagaactctacataattaaaaaaaaaaatccacccacattgcaaatatctgctgaattttaacgcaacccttagttgacccaagatat

SEQ ID NO: 320988 - DNA, 565 bp, Homo sapiens
ttttgactgattaaaaaaaagataaatcacaattggtaatattgacactctgaggtgctacaaagatcatataggtaccacaatttttaactagaattgacctatctcttggccttcaaaacctgggagtctccagtgtccagtatcggtttccccttttcagtgaaggattcctcagaaaaatgaatcatgtcttaagatcgagcaagaaggagaccattgccataaatcagttaaatttctaaccaaatccttttgtgcaatatcttgttctctcttctttcagtctacataaataaacatcttatcttcttaagacatgcaaataagggagttggtgacaagtgaagttaatagagaaacatgatagagttccagactatcaggatccctgtgagaccacatttgaaagtctctgaacatggcatactcttctcagcctgtcttaaatctggtctgttttgtctgacaagctaagagamctctacataattaaaaaaaaaaatccacccacattgcaaatatctgctgaattttaacgcaacccttagttgacccaagatat

SEQ ID NO: 320989 - DNA, 565 bp, Homo sapiens
ttttgactgattaaaaaaaagataaatcacaattggtaatattgacactctgaggtgctacaaagatcatataggtaccacaatttttaactagaattgacctatctcttggccttcaaaacctgggagtctccagtgtccagtatcggtttccccttttcagtgaaggattcctcagaaaaatgaatcatgtcttaagatcgagcaagaaggagaccattgccataaatcagttaaatttctaaccaaatccttttgtgcaatatcttgttctctcttctttcagtctacataaataaacatcttatcttcttaagacatgcaaataagggagttggtgacaagtgaagttaatagagaaacatgatagagttccagactatcaggatccctgtgagaccacatttgaaagtctctgaacatggcatactcttctcagcctgtcttaaatctggtctgttttgtctgacaagctaagagaactctacataattaaaaaaaaaaatccacccacawtgcaaatatctgctgaattttaacgcaacccttagttgacccaagatat

SEQ ID NO: 320990 - DNA, 579 bp, Homo sapiens
atagatatttacctaatgggggctaacaccattattcactataatgttatttttttcaagttaatctgaaactccaagattaggctttcttcagatatgaataaaaatggatcaaatatatagtacatcttctgctaatggtcagctaaatatgaatactaattgttctagtgttttgtagctggttgggtctttcaatccaatgaaaattattaaaatggattctgcaacttttattctactttattttctgtttttgttatttgcactataaagtaaataaaatcgtgttagtttgaaaagataaaacagtasttgctcttaacctgccctttaacaaagggtgtatggttattatagaaatattatgcaacatgggtacatttctagtgtctcagggcaactggccacgtactccaaattgccccctgagacatagtgagtgaagtaatggttatggagtcactaagcccgggtttctatctagactccatcatttacaagctatgtagcctttgtgggtcattaattcctgaaaatctctagtttgcacttaaaattaaaaaaaaaatcattcta

SEQ ID NO: 320991 - DNA, 530 bp, Homo sapiens
ctattgacaactaactactggattgatttttcccctaatggttttattstttccaatttgttttgtgaatggaattatatagtacaaaatatgtctgatcacagaatttctctccttaaaccattttaatggctttttactgaataaaacaataattttctcatgaggacttatggaccctgctgttgtaggtagaattattaatatatccccaaagctaagctaaagcactaacctctggaatttgtgcatatgatcgtctgtggaaatagggtctttgcatatttaattaaaatgcatattatgatgagagcatactggaacgggtgggtccttaatccaatatgctgatgtccttgtaagtagagaagacacagagacagaaacacatagaggagaatgctatgtgaagaaacagacatgcagagggaagatggtagcagagattgaggtcatgcagctgcaagtcaaggaatggcaagtattgctagcagccccccaaagctaggagcaagggcatggacccgcca

SEQ ID NO: 320992 - DNA, 563 bp, Homo sapiens
tggggtgccacaaaccaagcccttataagacagcatacataatagataaatgtgtgttctcactgctccactcactggctgttcccttgtctttctccctctacttggacctctctattccctgagacaaaacaatattgaaattaggccaattaataaccctacaatggcctttaagtttgccagtgaaaggaagagatgcacgtctctcactttaaattaaaaactagaagtgattaaacttagtgagaaaggcatgttgaaagccaagatagatatgttaaaagctagrcctcttgtgccaaacaattagccaagttgtgaatgcaaaggaaaagctcttgaaggaaattaaaatgccactccagtaaagacatgaatgataagaaaatgaaacagccttattgctgatatgaggaaagttttagtgctctgtataaaagatcaagcaaaccacaacattccctaaatgaaagactaatccagaccaatgttctaattgtcttcatttctataaaggcctgaaggtaaaaaaaaagaaaaaaaaaaacttgcagaagaaa

SEQ ID NO: 320993 - DNA, 570 bp, Homo sapiens
ctatctatgcataccttactcaaatctataacataaaacataatttgacaatttagttcatgcatggattcaagaacaattgttaattatggacactacagaaatatgaatacaacttaagccatatttagttcttcattttagaattttaatctatgctgttaaacttatcagcttataagttttattttaaaagatcttgcaacttaataaactataatttctacctagtaggcactttaaatttttaaagtaactattttcttctaaaaatccttccttcaaatacctatcattattcmactataaaatgtactgaatgataacatattcattgtacactttttgtttacttaccttatttatagaaattttctgtgtctcttcaaaaactataaattctattttaaaaaagattgttccattcattgatgctttgctctctagctacagagatttgacaatcttacattgcaaaataaattcatatttagttattctcttaaaagatataaaatttaattcactttagcccttcagcacattttgtaacttacaacaaaatatttt

SEQ ID NO: 320994 - DNA, 568 bp, Homo sapiens
acactataagaaagcagtgcaatatcatggatctggaaactggaataatatcccaaatcattgggttgtatttttgttttgatgtagctttattaaatcttataaagaacagttgaaggaatcagaaaaataagaaagatatcagaaaacaataaaggctaaagcaggctacatatatcatatagtctaaccttttattttacacacaaggaaactacttcagagagattgtgcaactgtcaaaaggtttaaaagagagtttggaaacttttgatttacaactcaaaggtatttagcagayacgtagtatgttgcttgtttcattgtcttgggcatttttctggtgagtcaaagagtcaaacaataattttaagtatctaatatgaatctagcactgttctagatgtcatagatcaagtttatatatatatatagagatctttaaacaatatacatatatatttatatctatatatcactatagataaggatataaatcagacgtggatcagtcacaaatacaatacctattccaaatatttcaaacagaaaattatttattacaaga

SEQ ID NO: 320995 - DNA, 568 bp, Homo sapiens
acactataagaaagcagtgcaatatcatggatctggaaactggaataatatcccaaatcattgggttgtatttttgttttgatgtagctttattaaatcttataaagaacagttgaaggaatcagaaaaataagaaagatatcagaaaacaataaaggctaaagcaggctacatatatcatatagtctaaccttttattttacacacaaggaaactacttcagagagattgtgcaactgtcaaaaggtttaaaagagagtttggaaacttttgatttacaactcaaaggtatttagcagataygtagtatgttgcttgtttcattgtcttgggcatttttctggtgagtcaaagagtcaaacaataattttaagtatctaatatgaatctagcactgttctagatgtcatagatcaagtttatatatatatatagagatctttaaacaatatacatatatatttatatctatatatcactatagataaggatataaatcagacgtggatcagtcacaaatacaatacctattccaaatatttcaaacagaaaattatttattacaaga

SEQ ID NO: 320996 - DNA, 568 bp, Homo sapiens
acactataagaaagcagtgcaatatcatggatctggaaactggaataatatcccaaatcattgggttgtatttttgttttgatgtagctttattaaatcttataaagaacagttgaaggaatcagaaaaataagaaagatatcagaaaacaataaaggctaaagcaggctacatatatcatatagtctaaccttttattttacacacaaggaaactacttcagagagattgtgcaactgtcaaaaggtttaaaagagagtttggaaacttttgatttacaactcaaaggtatttagcagatacgtagtatgttgcttgtttcattgtcttgggcatttttctggtgagtcaaagagtcaaacaataattttaagtatctaatatgaatctagcactgttctagatgtcatagatcaagtttatatawatatatagagatctttaaacaatatacatatatatttatatctatatatcactatagataaggatataaatcagacgtggatcagtcacaaatacaatacctattccaaatatttcaaacagaaaattatttattacaaga

SEQ ID NO: 320997 - DNA, 654 bp, Homo sapiens
tcacaaatacaatacctattccaaatatttcaaacagaaaattatttattacaagaattcacttgttttcaggagactgaaagacagaagacataaatgtaaaaactgctattacatctctgatttacaggtacattttaggggatgataagtgatgatctcagcagattcaatcactaagtcaggtaatttacaaaaaaaattgtttatgcaaaatctcacatctgctgaaacccattcatttgctttcagtagccagaatacaaatatgggttttgcctctcatcttctttccaaattttttaagcccagggagcaaacattaggtggttgagaaaagacattgactgataccaactaaattagtcatacatatctgctagataattgagtttcctcygcagtgggtccctttacattttgtcaattccaagggatacatccatattctttaggaagatttacttgtcaacaattcgccagtcctagtcttggtgaatgttttcctatttagattttactacctttcttgcactttaccttaccctcttctatataaatgtctgtgtgtgtgtgtgtgtgagtaccttaccctctactatatatatatgtgtgtgtgtctatgtgtatacacaaacacatatgtgtatgtat

SEQ ID NO: 320998 - DNA, 524 bp, Homo sapiens
acttttaaaccatgagatcttgtgagaactccctcactattaggagaatagcatgaggaaatctacccccatgatccaatcacctcctaccaggtctctcccttaacatgtggtgattacaatttgaattgagatttgggtggcgacacagtgctaaaccatatcatgaggttttgcactccttatgagaatctaacacctgatgatctgaggtggaacagtttcatccccaaagcatttcccccagcactgtctgtggaaaaactgtcttccacaagatcagtccttggtkccaaaaggttaaggactgctgatctaggacttcaagtatgatattgaataggagaaaagcatacaatgtctcaaaattaattattatgttagctgttggcttcttgctttttttttcttaagaggttctttatcaagtagaaaaagcttgtttctatccctaatttgccgagggttttaatcaactatggatgatattttaaagtgctttttctgcatgaatttatataatc

SEQ ID NO: 320999 - DNA, 616 bp, Homo sapiens
tttcttggcacttctccttcctgccatcatatgaagaaggatgtgtttgcttctccttccaccatgattgtaagtttcctgaggcctccaaagccatgtggaactgtgaatcaattaaacctctcttctttataaatcacccmgtcttggaagttctttatagtagcatgagaacggactaatacaaggacattgtgtcatttaaaatctgaaaaggatttctgtctgttgggagcattagcagtgccatttttaaggacatttgtgcctggggggaaacagtagcatcctccttgtgaatctaatatgtttgaaatgttaaaatcaagtaaaacatcagttgtccatgaatggaaaaagtgcaagaaaaatggaagtaagaatgtctatgttatatttattcaaacataaattaatcacttactgtctatgctaggttttgctttcatagcattacttaagaattgcccaactacatctggaaagaaaaggcagtgttttatatctagatcatgtgggtactttatttgtaacatgacgcttatgagtgatttcattcagtaagaaattcaagtctgactctaaattcaaagctcttactaaaactctttagcat

SEQ ID NO: 321000 - DNA, 581 bp, Homo sapiens
ttcaaatgagggtgggaatgtcagttactaagatttgaaattcaaaaggctgctatggctgcattacaaagaatactttagtatctagaaaagagacagggggactggttattaacaaaatcttgtgcatgaatgggacaatttagagtgaagaagaggggagctacaaatgaggcactaaaactacacttataccctgcatgtagcttccttaaagtccattccatattgtctccttaattcaggattcttctatcctgtgttcttagaatcatcaaatatacgattgattctgtccaaatgcaattgggtgttagcaagctatgtagaaagcactatgccargcaacaaaatgatgacacatatttaaataattatcacaataagaaaagctaatgtagttgtatgaaaagtgctacagaaacctggagtgcttaagcattgattaaatatatgaaggaaatcaggacagtgtttacacagaaaaataaaagaagataagcaaagtattggctctagtttataggcagaatcatgaattttaggctcatgatgcagtgagtgttaatgttattagaaac

SEQ ID NO: 321001 - DNA, 618 bp, Homo sapiens
atactgtatgattccaaccatataatatttttagaaagggcaaaactatgaagacagtaaaaagatcagtggttgccggtagttagaagaaagggaggaaggaagaattagaggaatacagaggattattagggcagtgagactatcctgtatgattcacaggtgkatacatgttattgtacaactgtcagaatccatttaatctaaagcaccaagagagacccttaatatgaacaatggactttgagtgataatgatgtctcaatgtgggtccatcagttgtaatgaatataccactccagtgcaggatggtgacaacagaagaagctatgtatgtatggggccaggggatatataggaatgctgaaatttctgttcaatttttctgtgatcttaaaactgctcttttaaaaagtctattttttataatcctggatagtaaaataaaaatgttaaaattttttaaaaaaatctttttattttaatttgctatattagaggcccagttattggtagaaaagtaaaaattttgattttctctgagaaagaccaaaaatactattcttctttccaagttaaggaatgctttgtgttttttattctcaaaaagagtttcag

SEQ ID NO: 321002 - DNA, 618 bp, Homo sapiens
atactgtatgattccaaccatataatatttttagaaagggcaaaactatgaagacagtaaaaagatcagtggttgccggtagttagaagaaagggaggaaggaagaattagaggaatacagaggattattagggcagtgagactatcctgtatgattcacaggtggatacatgttattgtacaactgtcagaatccatttaatctaaagcaccaagagagacccttaatatgaacaatggactttgagtgataatgatgtctcaatgtgggtccatcagttgtaatgaatataccactccagtgcaggatgktgacaacagaagaagctatgtatgtatggggccaggggatatataggaatgctgaaatttctgttcaatttttctgtgatcttaaaactgctcttttaaaaagtctattttttataatcctggatagtaaaataaaaatgttaaaattttttaaaaaaatctttttattttaatttgctatattagaggcccagttattggtagaaaagtaaaaattttgattttctctgagaaagaccaaaaatactattcttctttccaagttaaggaatgctttgtgttttttattctcaaaaagagtttcag

SEQ ID NO: 321003 - DNA, 489 bp, Homo sapiens
cttacctcttacaatacacatacaaaccacattttttcctgtcttagaaactcatattcctttatgcagttacctggaattgaagaaccttactacattttgaaacacagggcttagcaaaacttcttttaatttcatgtgagagtaagatgcagtcagatgtttgttttatttgtactaaagactaacacattccatattacaaatgccagagtggaaaactgaagtcccaattctagkctattgggaaacccaaaagaaagtgaaattaaagagtaagatttgcctgctactaaactgcagaacatttcttgtactagggatgaatgattcaattcaattccaatgcagaatgatgtgagaatgaaactgataggagagcaaatggaaacagctgtgttttattgcaacacagacagtcggcacattttgctgctgatttataatgaaaatggaaattgtaagtgacaggctgagggtagtttataa

SEQ ID NO: 321004 - DNA, 679 bp, Homo sapiens
ggatcccatgcctgccaagggcaagacaggtgtggagcagtgaggagtgtgtgagcaaatgagcacggggtctggccactgtggacaaccaggcacactggctgctgtggaggggcaggcagctccaggcactggcacaggtgccagctccatgcaagcctgcagctggatcagaygcaccacaagtggcttctgctatgggcacctgcatcagggtgaagggaacgtggtggtacccagaagctttgagatggcagaaactgcagacccccaaagagggtttcatagtcttagctcagagactctctatatctgggctccccaaagggccacagctcttctcttcttcttgtcgcccacagtgtggcaagtgggggtgggggtagcgtgtttcagccctgtttgtgttacaactctaccagtcccccatttggcaggtcctgagttcctgtcccatgtctagaaataatcagtatgtggacaactggagcatgagcaaggcagagaggagctttattgacagaacggctctccagagactcaaattgagtagctcctttctgcagacaggttgtgccgatgagtgtccaactcttggtagagaggagacccatagtgggtagctagctcctttctgcaggcaggtcatcctgacatgtccaggagacgcaaagtggga

SEQ ID NO: 321005 - DNA, 377 bp, Homo sapiens
gcactttagggcctcagtttctttccttgcacatagacactaataatagtgataagaatgataattacccaattgtgtagattgaattaagacacacacagaaaacctctgggcaaaaatgctggacacatgggtgttcarcattttgtcattgaattaaagtaattacaatttaatgttaatgaaactaaggataaagagttactttaatattatttcagctgcttttacctagaactgtgctcatttccctgatccgtattctgcaacctaaagcttcctgtaatatactggcaactaaccaaatgtgaagtataattcatgagaaaaataattgtcctctgcaaattcaaccctatctggtagttaaaatatca

SEQ ID NO: 321006 - DNA, 578 bp, Homo sapiens
tgtaaattcataaattctttctacaaaaaaatttagcaacatttaatgataggaatacatacatagagagagacagagagagagagaaagagagagagaagagagagacagagaaagaataaamctcacaacttattataaggagttgtttcacacaattatgggggttgagaatttctgctatctatcatctgcaaattggagtcccaggaaagccagtggtttaaattccagtctgagtctgaatgcttgtgaagcaggatcactgatagtgtaagtcttagtccaagggcagaaggagactgatgtctcaggttatgcattccagcagagagacagaattctgccttcttccacttttttgttctatccctggccttcaaaagattaaaagatgcccacttaccttagggagggcaatctattttacttactccatcaattaaaatgttgatatctcctaaaaacaccctcacaggcacattcagaaataatatttaaaacagatatctgggcatctgtagcccaatgaagatgggcttaaccatcacattcccctataaaatgggccaacattt

SEQ ID NO: 321007 - DNA, 578 bp, Homo sapiens
tgtaaattcataaattctttctacaaaaaaatttagcaacatttaatgataggaatacatacatagagagagacagagagagagagaaagagagagagaagagagagacagagaaagaataaacctcacaacttattataaggagttgtttcacacaattatgggggttgagaatttctgctatctatcatctgcaaattggagtcccaggaaagccagtggtttaaattccagtctgagtctgaatgcttgtgaagcaggatcactgatagtgtaagtcttagtccaagggcagaaggagactgatgtctcaggttatgcattccagcagagagacagaattctgccttcttccacttttttgttctatccctggccttcaaaagattaaaagatgcccacttaccttagggagggcaatctattttacttactccatcaattaaaatgttgatatctcctaaaaacaccctcacaggcacattcagaaataatatttaaaacagatatctgggcatctgtrgcccaatgaagatgggcttaaccatcacattcccctataaaatgggccaacattt

SEQ ID NO: 321008 - DNA, 555 bp, Homo sapiens
tgcaaatttgtcctgcagaatcagttgttgaatgtcaaaaarctaacatggtaaaacacagctgctttttttaccttttgtaattgagattgtttgtagacttccctaaattatatggcagacaataaaaattgattctaagtaaagtcattatccttttaaatgagttacatagctcagacattaagatatttgcgagacaaagtgatttccaaaaagtattgatttttaactaaataaagctaaaggagaatcagcatataacttcaaaattgcaatatgctatcatctctgtagaaatgagtaagttcaaaatgtatataaaattttcttctttataattatttttgctaattattgagcactttaaaaaattgccataatataaaataacgtatacttactaatccatgctaagaaatgtaaccatgtaatgtatttacctacagataaagtcatcttgatttgtgtatatattatacataaataataaatgttatacaaatgagcacaactagactttcaaggaacacgtaattccattgatgcatatgc

SEQ ID NO: 321009 - DNA, 555 bp, Homo sapiens
tgcaaatttgtcctgcagaatcagttgttgaatgtcaaaaagctaacatggtaaaacacagctgctttttttaccttttgtaattgagattgtttgtagacttccctaaattatatgrcagacaataaaaattgattctaagtaaagtcattatccttttaaatgagttacatagctcagacattaagatatttgcgagacaaagtgatttccaaaaagtattgatttttaactaaataaagctaaaggagaatcagcatataacttcaaaattgcaatatgctatcatctctgtagaaatgagtaagttcaaaatgtatataaaattttcttctttataattatttttgctaattattgagcactttaaaaaattgccataatataaaataacgtatacttactaatccatgctaagaaatgtaaccatgtaatgtatttacctacagataaagtcatcttgatttgtgtatatattatacataaataataaatgttatacaaatgagcacaactagactttcaaggaacacgtaattccattgatgcatatgc

SEQ ID NO: 321010 - DNA, 555 bp, Homo sapiens
tgcaaatttgtcctgcagaatcagttgttgaatgtcaaaaagctaacatggtaaaacacagctgctttttttaccttttgtaattgagattgtttgtagacttccctaaattatatggcagacaataaaaattgattctaagtaaagtcattatccttttaaatgagttacatagctcagacattaagatatttgcgagacaaagtgatttccaaaaagtattgatttttaactaaataaagctaaaggagaatcagcatataacttcaaaattgcaatatgctawcatctctgtagaaatgagtaagttcaaaatgtatataaaattttcttctttataattatttttgctaattattgagcactttaaaaaattgccataatataaaataacgtatacttactaatccatgctaagaaatgtaaccatgtaatgtatttacctacagataaagtcatcttgatttgtgtatatattatacataaataataaatgttatacaaatgagcacaactagactttcaaggaacacgtaattccattgatgcatatgc

SEQ ID NO: 321011 - DNA, 554 bp, Homo sapiens
tgtaatcccagcactttgggagcctgaggcaggtggattatctgaggtcaggagttcgagaccagcctggttaaaatggcaaaactctgttgctaccaaaaatacaaaaattagccaggtgtggtggtgggcacctgtaatcccagctactcaggaggctgaggcagaagaatggcttgaacccaggaggtagaggttacagtgagccaagatggtgccattgcactccagcctgggggacrgggggagactccatctcaaaaaaaaaaaaaaaagaaagaaaagaaactgactaatgcttgtagcatactgcacactcatggcaagttatgcaagggctacactttactgcaatgcttctcaaattgtagtccaggaagctgtggatactcttattaatatattattaaaatatatgcttttagagtatctacaaggtcaaactattgttttagtaatgataaaacattaattgactttgttcactctgttgaaatttacactgattttgcaaaagcaaatgtggtaaaattgttggtgtcatagaaagtatc

SEQ ID NO: 321012 - DNA, 638 bp, Homo sapiens
taggcattcaagcctgcaaattgcttcagccattgcagcagtaggggatgtcctaagctgaggactactgcgctggaatcctttggccactgaggctgacaaagcactgggttagacacaamgtttatgactacagagaacaacgtagcactgtggcacacctaaggcctgcagctgctgcagcctgttctctaccatggcttatgcaaggctttaggttgctgtagttaaccagcagtgatgtgtgatagatctccagtccatctagccagggccatggattcctgtttggtattaggccaggtcaagatcccccaaatgtggataccttctggtgtcaggggccgtggaatctgctcattgctgggtttcagtggggtgggtacagtacttagttgcaaggcaaagtcctatacttactttattttgcttcctttaagcaaatggtatcttcctttgtgctatgctgcctatggttgtggaagaagtgatatggttaatgtaaaactcttctttagaccctctttaatgaatcttttcttattatgctaactccaggaaatgggatctctcactgggttttttggagctcttgtgaaggtattttatgaatggttattcaaattgatgttatttgt

SEQ ID NO: 321013 - DNA, 558 bp, Homo sapiens
tttattgtagaaaagtatgactgacctgtcttgagaattaaaaaacaaagtaaaataaccttaaagaactagtctttcatatttacattgatagctatctagatcaatgctaccaaattctgctaacctatatttcctttggatttgagaatatgttttaatcatcatcatataaaatttaaaactttggttagacagaccctccggtactagagtaagttattatttataagataatascacaagtatgtggagttaattaaaacctattagttgggctttatatctgctcatagctagttgtatattttgcacaaatcaatttacttgccattttcttcctgtctaaaatgaggaagttggtcaggcccagtcgggctttatatctgctcataactagttgtatatctttgcacaagtcaatttacttgccattttcaacctgtctaaaatgaggaagttggccaggcccagtggctcatgcttataatccaggcactttgaaagggcaaggaaggtgtattgttgagcccaggagtttgagaccagtctgggcaa

SEQ ID NO: 321014 - DNA, 638 bp, Homo sapiens
taggcattcaagcctgcaaattgcttcagccattgcagcagtaggggatgtcctaagctgaggactactgcgctggaatcctttggccactgaggctgacaaagcactgggttagacacaaagtttatgactacagagaacaacgtagcactgtggcacacctaaggcctgcagctgctgcagcctgttctctaccatggcttatgcaaggctttaggttgctgtagttaaccagcagtgatgtgtgatagatctccagtccatctagccagggccatggattcctgtttggtattaggccaggtcaagatcccccaaatgtggataccttctggtgtcaggggccgtggaatctgctcattgctgggtttcagtggggtgggtacagtacttagttgcaaggcaaagtcctatacttactttattttgcttcctttaagcaaatggtatcttcctttgtgctatgctgcctatggttgtggaagaagtgatatggttaatgtaaaactcttctttagaccctctttaatgaatcwtttcttattatgctaactccaggaaatgggatctctcactgggttttttggagctcttgtgaaggtattttatgaatggttattcaaattgatgttatttgt

SEQ ID NO: 321015 - DNA, 576 bp, Homo sapiens
tgggatagtagcaacaaaatctgtctaccaatgcctgtcaaaacatgagtcacctcttttcttcttgtctttgtttttatattattcttgaagttttatttaaatcattttttgtctttkatttgagacaataaacttttttgttcaattattagatatttctgcaattcctgaattttcctttctctctttctctttctctttcttttcttttcttttcttttcttttcttttcttttcttttcttttcttttctttcttttttttgagatgaagtcttgctctgtcacccaggctggagtgcagtagtacgatctcagctcactgcaacctctgactcgtgggttcaagccattctcctgcctcagcctccccagtagctgggattacaggcactcaccaccacgcccagctaattttgtatttttttagtagagacagggtttcaccatgttggccaggctggtctcaaactcctgaccttgtgatccgctcacctcggcctcctaaagtgctgggattacaggcttgagccactgtgcctggccgaatcttccttttttaaccatcacaaac

SEQ ID NO: 321016 - DNA, 541 bp, Homo sapiens
tgtgagaacacatggacacayagagggaaacaacagacactggggcctatcagaaagtggaggggggaggaaggagaagatcaggaaaactaactaatgagtactaagcttaataactgagtgatgaaataatctgtacaacaaacccccatgacacaagtttacctatgtatcaaacctgcacatgtacccttgaacttaaaataaaaatttgacaaaataattttaaatttaataactgtttttattaattgctatgacaaatagatgaagaatatagagtacttgtacaccactatcaaccacatctcttcaaaattttactagatgttccagccattgcaaaaataagtaaaatgcatacagagattggagaaaaagtaaacattttccgaaagtttgtagatgacagaattgtttatgcagaaaatattaaggtaactataaaactcctatcagaactaaaatatgtacttaacaaggcttgaaaatataagtcccatacttctttaaaaaacagttttttctagatggtaagaag

SEQ ID NO: 321017 - DNA, 541 bp, Homo sapiens
tgtgagaacacatggacacatagagggaaacaacagacactggggcctatcagamagtggaggggggaggaaggagaagatcaggaaaactaactaatgagtactaagcttaataactgagtgatgaaataatctgtacaacaaacccccatgacacaagtttacctatgtatcaaacctgcacatgtacccttgaacttaaaataaaaatttgacaaaataattttaaatttaataactgtttttattaattgctatgacaaatagatgaagaatatagagtacttgtacaccactatcaaccacatctcttcaaaattttactagatgttccagccattgcaaaaataagtaaaatgcatacagagattggagaaaaagtaaacattttccgaaagtttgtagatgacagaattgtttatgcagaaaatattaaggtaactataaaactcctatcagaactaaaatatgtacttaacaaggcttgaaaatataagtcccatacttctttaaaaaacagttttttctagatggtaagaag

SEQ ID NO: 321018 - DNA, 565 bp, Homo sapiens
tcacctctcacagcgtccctcctccaacactgaagatcatagttcaacatgagatttggatggggacacagagccaatccatatcaccatgtttttctgacatgtaatattctttgtgacatgcttagtgtattagtccattctagtgctgctataaagaactgtctaagcctaggtaatttataaagaaaagaggtttaattgactcacaattccacatagctggggaggcctcaggaaacttacaatcatggtgtaaggggaagcaaacacatccttcttcacatggcatcaggagagagaaggagtgccaccaggggaaatgccagatacttataaaaccatcagaattcatgagaactaatttactatcagagaaccgcatgggggaaaatgcccccatgattcaattacctccacctggtccttcccttgacacawggaaattcttacaattcaaggtgagatttgggtgggaaaacagagccaaaaaatatcatttagcaagaaaaacttgaggtcctgactatcttaagctttccgaagctcaaatcaacaacttaca

SEQ ID NO: 321019 - DNA, 605 bp, Homo sapiens
cctccctcctttctctccctgattcctgggctccaggaaccacgggatcagcatatccggtgccccaccctctttgctctgttcaggcccctggataaggagtgcatcccttcttcagtatttactgcgcatggcagacaaatggrtccttggagctgcctccagagaaccaagacccagacattaaagtgaattacgaaaaaagtaccccgtcattttccttgtttgcttcattcagtctccagtaaataatcagaaagcacttagcaaggacacaggccagtagtgtcaataataagacccctttgtcactgacaaagctctggaaacaaagctggagacatcgctgccaagtgaggtgagcattaggcaacctgtggagcctccgagttagcctccaatcctgccttctcctcccgctccttccttgggcaaatcgcaagcctgctctccgccagagtgtcctcatcagtaaatagggctgatagtcccctggcagtttatatacagaggtaaggtattattgattcatcaaaatgaatttttttattcacgttattttatttatttatttagccattcaaaaagcatctattgaacaccta

SEQ ID NO: 321020 - DNA, 605 bp, Homo sapiens
cctccctcctttctctccctgattcctgggctccaggaaccacgggatcagcatatccggtgccccaccctctttgctctgttcaggcccctggataaggagtgcatcccttcttcagtatttactgcgcatggcagacaaatgggtccttggagctgcctccagagaaccaagacccagacattaaagtgaattacgaaaaaagtaccccgtcattttccttgtttgcttcattcagtctccagtaaataatcagaaagcacttagcaaggacacaggccagtagtgtcaataataagacccctttgtcactgacaaagctctggaaacaaagctggagacatcgctgccaagtgaggtgagcattaggcaacctgtggagcctccgagttagcctccaatcctgccttctcctcccgctccttccttgggcaaatcgcaagcctgctctccrccagagtgtcctcatcagtaaatagggctgatagtcccctggcagtttatatacagaggtaaggtattattgattcatcaaaatgaatttttttattcacgttattttatttatttatttagccattcaaaaagcatctattgaacaccta

SEQ ID NO: 321021 - DNA, 605 bp, Homo sapiens
cctccctcctttctctccctgattcctgggctccaggaaccacgggatcagcatatccggtgccccaccctctttgctctgttcaggcccctggataaggagtgcatcccttcttcagtatttactgcgcatggcagacaaatgggtccttggagctgcctccagagaaccaagacccagacattaaagtgaattacgaaaaaagtaccccgtcattttccttgtttgcttcattcagtctccagtaaataatcagaaagcacttagcaaggacacaggccagtagtgtcaataataagacccctttgtcactgacaaagctctggaaacaaagctggagacatcgctgccaagtgaggtgagcattaggcaacctgtggagcctccgagttagcctccaatcctgccttctcctcccgctccttccttgggcaaatcgcaagcctgctctccgccagagtrtcctcatcagtaaatagggctgatagtcccctggcagtttatatacagaggtaaggtattattgattcatcaaaatgaatttttttattcacgttattttatttatttatttagccattcaaaaagcatctattgaacaccta

SEQ ID NO: 321022 - DNA, 584 bp, Homo sapiens
atctgttaaagtaaaatggtgtgatgatgtggaacatatatctctcttatattgctagtgggaaagaaaaatggcataacttctttgagaaagtttggcagtttgtatttttaattatagacctatctttgacctcataattccaattcaaggaatttgctcagtggaaataaaaacatatatctttacacaaatttgtaccaaaatgtttatgacaactttacttataacagctaaaacctgaaacaactcaaatgtccatcaacaggaaaacagatacgaaaagtataatataataaaatattacttagcaataaaattgagtgaaatattgatacatgcaactgcataaatcacacaaacatgctaagaagctgtacaaaaarcaatgcagattattttatttatgtgaaattctaaaacagacaaaacaatggtgaaaaattagaacagtggatgcctccagttggaagcaaggaagggagttaactggggacgactgcaaggaactttctggggcgatgggtacattctgtacctcaacagcggtgtggtttacaggggtttgctcatttgtcaaaact

SEQ ID NO: 321023 - DNA, 509 bp, Homo sapiens
ttcagtattgttaaattaataatgataattccaacagactaaactagtattctgttcatagatcattttttgaaagaagctagaaaaaaattaataaatgtaagtatactgaaaataaagacttcggtgatttaaaaaatactgtagacaaacttacaagatgaactatagattgatawatgtatttgcaaagcatataaccaaaaggattgtataggtagacagacagatagatagatcttagcgattagataaaatatataatttcatcaagaatatagaagtagaaatacataatacaaaattggcaattaatttaaaagacaattcataaagaagaaaactcaaaggctaataagtatgggaaagatatttccactaactagtcatcagggaaatgcaaattaaaacaatgtaatacctttaaagaatgtgttgctacaacattaagaagctttaatttaaaaaaaatctaataatatcaagtgttagtgagaaaataaagaaaa

SEQ ID NO: 321024 - DNA, 509 bp, Homo sapiens
ttcagtattgttaaattaataatgataattccaacagactaaactagtattctgttcatagatcattttttgaaagaagctagaaaaaaattaataaatgtaagtatactgaaaataaagacttcggtgatttaaaaaatactgtagacaaacttacaagatgaactatagattgataaatgtatttgcaaagcatataaccaaaaggattgtataggtagayagacagatagatagatcttagcgattagataaaatatataatttcatcaagaatatagaagtagaaatacataatacaaaattggcaattaatttaaaagacaattcataaagaagaaaactcaaaggctaataagtatgggaaagatatttccactaactagtcatcagggaaatgcaaattaaaacaatgtaatacctttaaagaatgtgttgctacaacattaagaagctttaatttaaaaaaaatctaataatatcaagtgttagtgagaaaataaagaaaa

SEQ ID NO: 321025 - DNA, 579 bp, Homo sapiens
tccacattgtttaaggatcaactgtaattcctacctgattgtgtgaagtttagggacacccaaataagaagagccatatgaatgttcctaatgatctcctgagaacygcatacctattcctcatcagtattatggagtaaggcagatctctaaagaaggatgccacatttgtgtccaagttttgagaattttgtaaaccttgcagcaagcctgtggttcagttctaagaccctgagctacggggcctccagcatttttcaatagaattactgccttgtttaggaagaatctaattcttattatttaaagtgctgttggcagctgacacattgagaatattatcaaaatataatttaactgccattttggtagggaaaaaacacttcctcttcataagagtaacccacaaagaaacgtttttcatctgaaaaaaaaaaacactgagaaattgtgctttatctcaagacctttactctgtgaatatgtgtaatgcttcctaattatcaatttacattaggtgaaaaatgacaagagtacaagaattcctaacaaagtatcaccctgataaggtcctcacca

SEQ ID NO: 321026 - DNA, 546 bp, Homo sapiens
ggtgaataaatatgtatgaacactttgtattgccataaatgattatatgcatttaacacataaattctcacataatctttataataatgctaaatggtagccattgtttatctctttgtagagatgagaaactgtgattccaaaaagggaattacaacaaaaaaatcaacatcaccttgctgtttcctagaaaaccagcttgtctggctccaaaacttctgcctgtgttacgctaccaggtgcctccaaggstgtgtggagggggcaactgaaatcactgatggcacccaggtcttcgcagctttttgggaagattgttagagctcacagctgacaagcagcagggactgctggagccctgtgcactcttcctgcaggaagtcctgggagcaactcataaatgtgcacaccttcctttctgcttttctggacacaagctccttacctcctccctcagcacaagctccttaagtcattcctctgctgcttggtgtggtcattgcctggacgaccctctgcccatcagtgacctctggataggccttc

SEQ ID NO: 321027 - DNA, 609 bp, Homo sapiens
gtgcttttccttgcatctcatctgctgactcctgctcctggattttttttctcagatattctacctacattttaacctccttgctttctattcagatcttctctacatcaaaaatatcatcttagaaaatctgcttggaaaatcctcgatctaaagtaaytaactgatttagcacttttggtgtatgctgatgcatttgcttttcattgtcaaaagaagaaaaagggccactgctgttaggaagctggactcccggaccagttcttgcatgtactcagggtgtgatcttgggtgcatgacttggctttgttggacacagattcactgtctatggaataagcatagtgaattcgaatcaatctctccaatattttacagcctctaagatgccttgactctacatacttattttaagctctccccatactcagcccattccatcattcacaaaggcattaattcagcaaatagccccagtgggctacaccacgttccagatgcaatttcattttaacaggaacagagacttaaaccaaaaaaaaagtgcatcatttccactagtgtagagtgaagcttatttaaggaaagtaaactaaagagtaagcaagt

SEQ ID NO: 321028 - DNA, 609 bp, Homo sapiens
gtgcttttccttgcatctcatctgctgactcctgctcctggattttttttctcagatattctacctacattttaacctccttgctttctattcagatcttctctacatcaaaaatatcatcttagaaaatctgcttggaaaatcctcgatctaaagtaactaactgatttagcacttttggtgtatgctgatgcatttgcttttcattgtcaaaagaagaaaaarggccactgctgttaggaagctggactcccggaccagttcttgcatgtactcagggtgtgatcttgggtgcatgacttggctttgttggacacagattcactgtctatggaataagcatagtgaattcgaatcaatctctccaatattttacagcctctaagatgccttgactctacatacttattttaagctctccccatactcagcccattccatcattcacaaaggcattaattcagcaaatagccccagtgggctacaccacgttccagatgcaatttcattttaacaggaacagagacttaaaccaaaaaaaaagtgcatcatttccactagtgtagagtgaagcttatttaaggaaagtaaactaaagagtaagcaagt

SEQ ID NO: 321029 - DNA, 590 bp, Homo sapiens
tcttctgtccttttgttcttccagacatttccacttctgtatgagttttgagtaaacactcgaaacttaaaatttctaaaactgaactctttcttgtacagtctagaattacttctatttatttatcagtaatactccaagacttgatatctccaagtcttctctgattacgttcctctaatgcagtacaaattatagtcagcataacacataacaatagcagtcaccgatgttttctagtaacactgttactatcacaattacagccccactacttcttgccaagtgtattcactcatagaatgagtttttcttcccagcttacttccaggaattcaatgtcactttcawtcagaaaactagatgcagttaaaatagaaaattaggggaaaaaaatgaaccccttcccaaagaaactggatgatatgttttcttaaatttttatagatttgtatttttataaattgtgcacttttctataggtatgctgaacttcaatgcaaagtttacttaaaacaaaaatggaataaaaatgccaagatcccccataaggctctgggtgctccctctgttgggaacctcacttcccc

SEQ ID NO: 321030 - DNA, 606 bp, Homo sapiens
ggcccatcagcagagagggaaagggcactccctggccatatgtgaatattttcataggcttttgaattggagatcatgaccctagagattacaaagtgtgtaagatttgggaaaatgtgaaatgcatatatgcaatcattttgcaactctcgcagatggtctacctgtttgtgttcacattgctacttattagagataactcagtgtattaaaatctgtctagacactgtatatcatgatgttatcattcatagtgtccctttttgatgtctaaaatttgattttcatgtttatatgtctttaatcaagtcctccaacaagggaacaagggggatgcagttggatggaacaaaatagatggttgtcttcctgcgttagtattatttctttaaccaatattttttggataggaaaattcaatcatctgaaatccacttatctttattgtatatttcacaacttcgatgataaagagaaaaatcaaattattacaaaaggaaaatatraaatgtattacctatcaaaaaataaaatttgacaaccatgaatagaaatgacagagaaccgggaaacaaggtcttccaagtgttttgtagaaataactca

SEQ ID NO: 321031 - DNA, 550 bp, Homo sapiens
atcttttgttctcactcaatgatgaggtctcaggcaggcgctcattgctgtaaccccagatcccataacaaatcttgttactaaacagcattcaataatatttaagaaaggaagacaaatcatargaaatgaggaagtatggatattaatggctgtgatgaaaattaaagatgaatcactcattcattcattcattcaattattcaacaaatgtttttgagcactgcccacgtactaggtgctgcaactacattggggaatgaaacagatggttagttgctttcaaggtacttgttttctcaaagggaacagatagtacataaacaaccaaatatcaatcacaaagtttatgtactatgaagatgagactaagtatcctgcaaaaatggaaataatgaggagaatgagctagagacgtaaaaaacacgctcccttttctgcccgcctgtattttatagccaagctcaagtgtgttgcgtcctcaaggaaaacttccaagatgacctcagcctcctttactgagatcattttgaggcagacagggcaggaa

SEQ ID NO: 321032 - DNA, 592 bp, Homo sapiens
ctggatataaaatataatataagcaaggaaaccagaaggttgagtctcttcaagttttcccatcatttcctttgacttattttattttattgtgcagcatacactaaccatgtgcatgrccatagtttctttctagagtccttgattgtcctagatatttcactctttggatatgaaaataattgcaaattgcaacatcggtctaagaggatggaaagaaatggcttagttttccagtggaaggcggcagtccttaaagctacagcaccaactttctgatgagagaaaaaacttcaaaaaaaccttcatttttcaaggcagagatgtggtattataggtgagtgaggaggattagaatttcacctttacctatttacttctgaatgggatcttagtggactcagtttaaccttctgagatgtatggcctgtttaccaattttgaaaagctgctggaaagcttaaatattccgattaagtatggagaaatttgaaggtgtaggtgggtaataggaatatgagtctacatcagatcagatttaggtcaactctatcatgaatgtctactagaggaaatagatgtggaatcactt

SEQ ID NO: 321033 - DNA, 585 bp, Homo sapiens
aattaatgataaagtctttaaggcatctgctagttgctgagtaaaataaaggcattaatgttgcaacagtaagactgccctagtgtggttcaacttgtagaagtagatcaatgaatttgggctcttagagaaacattagatgataatgacaaccctgatttcataaaactcagtaaaagttattatgcaatattatttttaacatttaaagaacaaattatttcaaaaatgttaattaattaattaattaagttatttatttatttattgaacaaggtctcattctgtctcccaggttagcgtgcagtgtcatgatcttggcttattgcaatctctgccttccgggctcgagtgrtcctcctgcgtcagcctcttgagtagctgggactacaaagtgtacaccactaggccccgctattttattttttaaatttttttagagatgaagtctcactatattgcccagccaggtttcaaactcctgggctcaagtgatccgcccaccttggcctcccaaagagctgggattacaaggatgagatactgtacccagccactgatgataatttaaacaataacaggcat

SEQ ID NO: 321034 - DNA, 461 bp, Homo sapiens
cattagccattagagaaacaaataaaaatcgtggtaagagagcacttcaaacccactaggatggctatgagaataatactaatctgatatattgatatagatggatagataagtatatatagatatatatgaaataatattttgatgagaatttggataaaattaacaccttgcytattattcggggggacataaaatggtgtgactactttggaaaatattttggcagttgctcagaaagttaaacagagagttatcatatgacccaataattttattcctaagtgtatactcaagagacttaaagatgtatgtctacacaataacttgttcaggaataattataatagcattattcgtaatagctaaaaagtggaaataatccaaatgtccatcaaatgatgattggataaacacagtgtggtctttccatataatggaatgatatttggccaaaaaag

SEQ ID NO: 321035 - DNA, 461 bp, Homo sapiens
cattagccattagagaaacaaataaaaatcgtggtaagagagcacttcaaacccactaggatggctatgagaataatactaatctgatatattgatatagatggatagataagtatatatagatatatatgaaataatattttgatgagaatttggataaaattaacaccttgcttattattcgkggggacataaaatggtgtgactactttggaaaatattttggcagttgctcagaaagttaaacagagagttatcatatgacccaataattttattcctaagtgtatactcaagagacttaaagatgtatgtctacacaataacttgttcaggaataattataatagcattattcgtaatagctaaaaagtggaaataatccaaatgtccatcaaatgatgattggataaacacagtgtggtctttccatataatggaatgatatttggccaaaaaag

SEQ ID NO: 321036 - DNA, 412 bp, Homo sapiens
agaccttttgccaaggaaatgtctgaaaccacctattagggagaatgatcaggccccaatgagttagaacatgtgggttctctttagtattggttccccctttgatggcaatttatagagagaagtagttctgtatayacttgtcaaattatttatcagaaaaaacttttgatattcatattagaatatttctgaggtaattcatcacgaaaatttacttcccaacttcatcagtatgtattcctagctatgttcaaagcaaagtgctaaaatacaaaaattaaggtgatttggtctatgcctcgagaaagttttcaaatgagagtttgcacacatcctagctcatcactaatattagggagcattcactttgggtatgtctgcatggtagaaaacatatgattggacaggg

SEQ ID NO: 321037 - DNA, 412 bp, Homo sapiens
agaccttttgccaaggaaatgtctgaaaccacctattagggagaatgatcaggccccaatgagttagaacatgtgggttctctttagtattggttccccctttgatggcaatttatagagagaagtagttctgtatacacttgtcaaattatttatcagaaaaaacttttgatattcatattagaatatttctgaggtaattcatcacgaaaatttacttcccaacttcatcagtatgtattcctagctatgttcaaagcraagtgctaaaatacaaaaattaaggtgatttggtctatgcctcgagaaagttttcaaatgagagtttgcacacatcctagctcatcactaatattagggagcattcactttgggtatgtctgcatggtagaaaacatatgattggacaggg

SEQ ID NO: 321038 - DNA, 441 bp, Homo sapiens
tgcataactaatgaggattccaacattaataaccaagacaatgggacaaatgtctccagggcatttcagagatcttcatagcagcccctcccatcacagcccctcccatcacagcccctcagaggcctaagagggaaaaatggattcctgggccaggcccagggccccactgctctctacagcctcaggacatagtaccatgggtctcagctgctccagctccagctgtagctaaaagaggccaagatacagctcaggtcattgcttcagagggtgcatgccccaagccttggcagcttccacacagtgttgggcctgcaggtaaacagaagacatgagttaaactttggaagcctccacctagatttcagaggacatatggaaatgcctggatgcccrggcagaagtttgctgcaggggcagagccttcatggaatacct

SEQ ID NO: 321039 - DNA, 618 bp, Homo sapiens
ttgaaatgtgaaaaggacatgagaattaagaggggccagtggtggaataatatggtttggctctgtgtccccacccaaatccctccccatatgtcaaaggagggacctggtgggaggtaattggatcatggggatggctttccccatgctgttctcatgatagtgagtgagttctcatgagatctgatggttcaaaagtgtatgcccactcccccgcctcactctctccctctcctgtcaccttctgaagaaggtacttacatctyctttaccttatgccatgattttaagtttcctgaggcctccccagccatgcagaactgtgagtcaattaaacctctttcctttataaattatccaatctcagattgtgtgaaaccagattaatacacttattttattgtgaaaatgatttctaaacaaaacaactcattttttttttctaccaaagacaatgatttaagtgtgtgaatggacatggatcttagaacattctacatggttatctgtttgtctatatacttcatttaagttttctttcaagaattacacttgctttattcatatcactgttcctagtgattggcacattgtatatgcttaaaagtgttttctgaa

SEQ ID NO: 321040 - DNA, 636 bp, Homo sapiens
aataaatccattaaatgaaatattcacagaaaatatcagagaaaagctcataggagcacatttcrccccaagcaagtggagtagccaatgtaagcattcactgtttcactgttgctgctttccattactactttggagaataatcttttccaaacacctgtctgatcttgctttacactcttcagcaggtccacaccacccatgagagggaactcagacaccttgcccaaggctccagcactcaggctccagctcatgtttctggtttcacctccactcccttctacactcccacaaatccacccacactactcctaattactgaagcacagcttggtgtttcagcctacattcacacttgctgttccctctctcagaaacatcttttccacttactagcagaatttgtcacttcttcatgcttattctcactatataatcttttcacacttctgccacattatcacctcaaattgcaaaatcttgtttatgtagatagctacacctactagattgtagagactatgtcatatccatccttgtccttggagcctagcatagtgtctattatatagtttctagtaaagagatgctcagtgatcctcaacaggaaggaaaaaatgaatggatggatga

SEQ ID NO: 321041 - DNA, 620 bp, Homo sapiens
aactttccctttgtattcacaatatgtctatttggtgcaagaggcccagctttcagcctgtcttgacttttggtgtgccttcctcactaagcgaaatcatttctagcttttgatttaaagtgggagatatgtgactcttcctttcacttgaactttgatgccattgtagggttgttaattggcctaattttaatattgttgtgtctyggggaatagtgaggcccaaagagagggaaagagacaggggaatggctggtcagtagagcagtcagaacccacataacacttaattaagtttgccatctcatggcacatacagccccaaaacaattacaatagtaacatcgaagatcaatgatcaaagatcaccgtaacatatataataataattttgaaatattgtgagaattaccaaaatgtgacacagaaacatgatgtgagatcatgtagttagaaaaatggcagagatagacgctcaacacagggttatcacaaacctttgatttaaacaaaaaatcaaaacaaaacatgtctgtgaaacaaagtaaaatcaaacataaaacaatgagcatggctgtaataggttcttcaaaagcaatgacaccacagcagccatgagc

SEQ ID NO: 321042 - DNA, 552 bp, Homo sapiens
aatcctctgacctgagagtaatgtgggagaacctgaagagccccttgaagccatcaagtgtactttcttaaaggacaggctttccaaagcacatgggcctgtatttccctcctccacgtgtcagctgaaatccagcaccaaggataaattgggttggacagcacaagccccagcgccaacactctagtcaaaccaaagccccggagaccgctgaaaacattaacttcmaagaacggattgtgtttgcccagctctctgcttcctggttttgaccaagactaggatgagaaaagcaagcgtttttcctttgtgaggtgtcaactagttcatatctgcagctctggaagagtgtctgacttatcaaacaccctttgaagccaaaagggattgagaatatacagaagtcgaatccgtgggtgtgtcttctctctctctcaatctctctccttccccctccttctctcccctattttccccatttactctctgtatccacagttctctttttcagtttgtccttctgttgcacctttgcgagcagcttagtagaga

SEQ ID NO: 321043 - DNA, 567 bp, Homo sapiens
agttaggaataagtccccaaatgatgcttttgcattctctttcccaccaaaatatgatcgactgttgagacctgcctcagacctgaacctggcatctctaccatgcatccctggaaaatagcacatcctcagcaaaacctgggataccagctcacctcaccccaccaggatcctctgggatccttgcaagccccttgcactgtgatcctttatggtccctgccttctggatactcctgtcactgggcagtgttgctcagaaccctccctcccctgtatctgtctctccagttcagcctaagttccttgagggcaggagatatgcatggttttaattagcaccaccatccctggggtcatgcccggtaagtacagtaatccccccatctgtattttcacagtttcaattactcacgatccaccacagcctgaaaatattaaatggaaaattccagaaacarttaatcagttttaaatgttgcattgctctgagtagcatgctaaaatatcatgctgtcctgttgcatctcactggggcatggatcatcactttccaccatattccatg

SEQ ID NO: 321044 - DNA, 496 bp, Homo sapiens
ggactgagacaggaaggttgagaacacttctaagcagagagaaaggacagggtagatcgtgtggtagctctgaacgtaaaatgagcactgacacactagatgatggtagctttgtgttattcctgctttccctgattgtctctccagatccacatgtaagccactgggctcccagaagaaaagggatgattcacccagatctgagccaagcacaatttgggcagccctttgacaaacccaactgttgccagtaaatggggatccagaagacrtgagccccaccttctgaggccagcatcttgtctcagggttccaggccaagctgtgccctggttcgagcttgaagccaaatgacactcagcatgacagccatgggttaggttttctatatatcacaaataaaaattcaattaaacatagaggcgggtggggacggtgtttggggaaaggagtattggtgggggggaagggatctaaggttggttttcttcctaac

SEQ ID NO: 321045 - DNA, 604 bp, Homo sapiens
acacaacaagcagtcactactgggagatcagagaacaagagagaagtgaggataccagagctgagactcaaaagagggcagagccctgcaaagaaggtcttatcagctgctgtttgtgggtctaagaagctgtgagaagtctggttctgggaatggagaaagaaggtagagatagagtcaattgctgctgctgctggagcaacactgaaaaggaataagaracaccaagaataaagttctttttactcctcctaacttcctgtctccttcctgtgacttccattggcacaacgcaacaggaagccaaggataccgcagcctgggaaatggatttcataaagggcaactccagcaacagataacagagcagagaagtgtttccttggggctgggaacccgtaagtatgaaaccaccataatacgattttactgaacttttactctgggctgagttctctgctcaacatcatgttcattgccacaggtcctttacccaatattttcatcgattttattttttaaagaagggagtgtatcttccttttcatattgaaaacctggtagtatgtaggggtagcacagtatactaaatggtcagtttggg

SEQ ID NO: 321046 - DNA, 604 bp, Homo sapiens
acacaacaagcagtcactactgggagatcagagaacaagagagaagtgaggataccagagctgagactcaaaagagggcagagccctgcaaagaaggtcttatcagctgctgtttgtgggtctaagaagctgtgagaagtctggttctgggaatggagaaagaaggtagagatagagtcaattgctgctgctgctggagcaacactgaaaaggaataagaaacaccaagaataaagttctttttactcctcctaacttcctgtctccttcctgtgacttccattggcacaacgcaacaggaagccaaggataccgcagcctgggaaatggatttcataaagggcaactccagcaacagataacagagcagagaagtgtttccttggggctgggaacccgtaagtatgwaaccaccataatacgattttactgaacttttactctgggctgagttctctgctcaacatcatgttcattgccacaggtcctttacccaatattttcatcgattttattttttaaagaagggagtgtatcttccttttcatattgaaaacctggtagtatgtaggggtagcacagtatactaaatggtcagtttggg

SEQ ID NO: 321047 - DNA, 603 bp, Homo sapiens
tctcaaacacttgaagggctgttactagtacaagaagttcaatggtcctgcatggtggtgataagattaagggacaatgaatgaagctgcaaagggactgattgttttattcttaaaatagaactactgtagctgagttcagtgtctcacatatataattccaacaccaagaggccaaggcgggaggattgcttgagctcaagagttcaaggccagcctgggcaacatagagagactctgtctctacaaattatactaataaaaaaattagccagatgtggtgatgtgtgcctgtggtcccagctacttgggaggctgaggcaggagaactgcctgacctggaggttgaggctgcaataagacatgatcatgccagtgctctccaaattgggcgacagargaataccttgtctgcaaaacaaaaacaaaaaaaagaactaatttaattgtctgaaaatgtaagcctatgcttttgcaaatgatgagtttcatcatcagtgaaggtgttcaggtaaaggctggggaccatctattgagcaatgctgtaagagaagaaagttatctttggaagcatccaaagacagcttgaggttggcctctctt

SEQ ID NO: 321048 - DNA, 585 bp, Homo sapiens
gttaggcaaatccataacaacagaaagtaaattagtggttgctaggagctggtgggagtgaagaatgaagagcgattgccaacaagtataggatttcttttctgagtgataaaaatattcctgaatttgatataggagatggttgcataattttgtgactatattaaaaaacaatgaattgcacaccttcaaagtgtgagtgttatgctgtgtgaattccatatcaatgaaattgttattctaaaggaacaaaaatatagaaaaaaaagtagttcatatttataaaaagaaaactaaatgcaccgtatgcttgttgcttgaactagaggataagtcatattaacagatatagaagtccgcattgaacaatttctccagttagttagatggctagttagatcgtttctggacttacttttgttactaatgctgtgtgaactttccatacacccatcttcatacatttctctaataattttctcaacttcartttttaagttggaatgcttcaaagactgttcataggatttttaggcaattgggatgcactggaggactgttcttcatgcaggccatgccattttt

SEQ ID NO: 321049 - DNA, 581 bp, Homo sapiens
tttgtgaatttattaatttgacttggtggaaaaattgcttaaagatataaactctatttgatggcctctgtcacctccagggcaaagcccacacttcttcccactgtattcaggrccccagtaactgggtattgccatcttaactaacctcctctttgactttggacgacacagatgatttcagttgagtgacacaatgcctgggttcaaggccagcctgacctaggtagagggccccaagaccgatgatggtgacttagccttgctgaaaatcaccttctggcagccgcttggcagagccgggcttgcaatccatctgattccaagctgagacttttgctctttccagatagacttcagggtgatcttgtgcatggtagaaactggtgagggatctggtttcagagattgtggactcacttaggaataagtgagctttatgcctttagcactaaactagttgtttctaatgaagcctaggatagatgtccctggggtcaagggaagtacgtattcctgacattctgcctgtagttacttctcaagctgctgctctaactgggccccccggtagcaattgg

SEQ ID NO: 321050 - DNA, 457 bp, Homo sapiens
cttcaccatgcagcaggactgacaggtgggcatcaaaggcggacgaggcaggctgcagagtggctcaggtgctaggcagctcggggcgcggggctttgttcagtctgactgagcagtcagtctgcttatactgaaaatgcactatgctaagcagaaggcagtcctatatttagatttttcttttaatcttgaaagagaagaaaacagtaacaaaggacttccttgtcaaatcctaatgcaagttgaacttctaaagacttggaggaggtgttcatgacaccaaagattttacaagcactgacacagaaaactgaagtaggggggaaaaaaagaggcttctcccctttgtgtttttgcttgccaccagagccwtgagatatcagctcagtctcatggggagtttttgtgtttaaaattttgcacaatattcgcagctgcatttgatcctatggtgcac

SEQ ID NO: 321051 - DNA, 568 bp, Homo sapiens
tatgttacatgtttgacagtagtaagtactaagaaggaaaaataaaacagataaaaagcaaaagaatatcatgaatgggaagaggtagactgttagaccaagaggccagaaaaagcagcacttaagacattatgctgaacccatccacccacccactgactcatttattcattcacgtattccttcctccattgtccttccaaccaagtaaccagccrttctttcagctactcaataagtggtacagaaatgtatgtatttgatattttattcatccagttattcaaaaattaattggttcttttactcactctttgatgtattcaccaacttatttactcattcatccactttatttcttcatttcctttttctttttttctttctttctttatttttttgagacggagtcttgctctgttgccaggctggagtgcagtggtgcgatctcagctcactgcaacctccacctcccgagttcaagcaattctccgcctcagcctcccgagtagctaggactacaggtgtgtgtcatcatgaccagctaatttttgtatttttagtagag

SEQ ID NO: 321052 - DNA, 635 bp, Homo sapiens
acagtgccaggggctttatcacagcctaatactactaaaaggatgctatcaggcttaaccctgtcaccttgaaccagaaatgaataatgagcacctttcacagttaatattaatccagacagtctccatatatcatttgccaaaaggcacaatgtcttctgggtccmggagctctgggacagcacacagagtccatgggcgacttcagggcgagacggtagggtgagttcacactttgaagctgagtttgcccatccaacctcaaaacacatagcaagacagacatagataaaataagagtaaagcagacatggcagtcaaaagcaagacaaacatccacagggaacagaaacccaaggcataaatgaagctaaagccacgggctgctgggatttgagcttggaaataagcagcagcagttggagtttcacatcgtaaggatcatgtctttcctgtactgaatatgtccacaatattatcatttagatgtgtaatcaatgtaaaatgttattaatgaaatattcataatttctgttcttttctttgtactaaatcttcaaactccattatgtacacattatataaattatatatacacattatatacattatgtgcacattatatatacataggg

SEQ ID NO: 321053 - DNA, 538 bp, Homo sapiens
gaaaacatgctttaatgtgtttatttgttgctattgaatttctttcctattctgaagtcctctatgatacaaaacaaactactcagcggggcctgggaagttaagccaggactgtgtgattatcacacagacagatgttacactcacaagaggtgacttgctagcagcattgacttcttggcaacagaatggtctgcgctgttaggtaatcagttcacttcaaggagagatttttaaacaaaggctccatggagggctgtctgttaagctttctgcagtagactttggtgatctttagacatgcattttacaaaggaataaactaatatttatgaatacataaattttgcatgtgtagaaaaagaagtaaatggtccatatgctaaagggagagcttagagctcatccaggtaagggctccttggactctctcaaagggttgcttgagaactggaagggtgagcctcccttsgttggcccaggcagcactcactggacagctgttccagccccttcagcaattcaggccacaaaagat

SEQ ID NO: 321054 - DNA, 538 bp, Homo sapiens
gaaaacatgctttaatgtgtttatttgttgctattgaatttctttcctattctgaagtcctctatgatacaaaacaaactactcagcggggcctgggaagttaagccaggactgtgtgattatcacacagacagatgttacactcacaagaggtgacttgctagcagcattgacttcttggcaacagaatggtctgcgctgttaggtaatcagttcacttcaaggagagatttttaaacaaaggctccatggagggctgtctgttaagctttctgcagtagactttggtgatctttagacatgcattttacaaaggaataaactaatatttatgaatacataaattttgcatgtgtagaaaaagaagtaaatggtccatatgctaaagggagagcttagagctcatccaggtaagggctccttggactctctcaaagggttgcttgagaactggaagggtgagcctcccttggttggcccaggcagcactcactggacarctgttccagccccttcagcaattcaggccacaaaagat

SEQ ID NO: 321055 - DNA, 650 bp, Homo sapiens
tggaaaattatcagcataaggaaaacagtcaaaaaactaaagtgaaccctctgttaaatcctttatagggacgatcctaatgtcrgaagttacccatgaagagaacacatcagaaagcttcatgaaagaacaacacataaaccaaccctgaaggacaccaagggatgggtagagtcttttgggctttggagacagcacaaatataagggaataggcaaaaatgcacagggtctttgaggggacagtgtatgcctatgactggaggatgaaaggacacttagaatgagagaggggactggtcaaatgggccacaggcaaaccagggcagaaaaaaagggaatgctgaagagagtggagctggaacacaacctccctagagtcgagctttggaaaggtgagttgtttctgggtgaggagactggattggagaagaagctaatgggaaaggccagttaggagatggccgtagcaacctggaggaggtgcaggagggccttcctggcacaagttggctgcaggagtggaaggttaacttacagttggccataggaaggaattggtcattagtgaggagtgaggaatagagagcagttccgagtcgatgtcattaggaggtcagagacaactgaaagctggcttggggcagaaat

SEQ ID NO: 321056 - DNA, 583 bp, Homo sapiens
tctgtttatctaaagagaaagccgtggtaccccataatcctgtaggaacatgaaactagaggctgagtgtgggctgcatgagggtgagaagttcctgagtcattagtcatatgtgggtcacactttcttaagcttttttccatatgacccaccacctactacactctcatgagaggactccccaactcctctctctctcctctccactttcttttttccttccctatcctggcctcacctctctttggccctggcagtaaaggggaaaagtggtcatcatgaaatcttctctaacctttcttccttmcaatacagaaggcttaattccagtgattccacatgacaagagtgaaattcagtcccaactagtgggggagaactctaccctgtttcagtactgctcaaaatgcccttcctctgtcacctcaggcaaggaaataaacacacacaaaaaaacataatttatagggggagggctccaaaggcacagatttcaaaggttgttagctacatgggaggaatgaattagattacagggaaagttttaaccccgaatgagggaactttgaaggcctacacctca

SEQ ID NO: 321057 - DNA, 508 bp, Homo sapiens
tgaatgccaacaaattttgctcaaaatttgatactcttacatgcatgcatgcatasatgcacacataaatatttagatgtgtatatttagatacccatcagcctatctaacatcattaagcaatttttatatatgccttttctgtgcatttgtattactttctagctttctaccaaaaatagatacaataatgggtaacattgttagactcatgtactaaagtaaaaatctatgggtcaaagataatttaaaattaaaataatataatgtatatttggaccactttttttctatataaagtggagatctcacccattatgaattaagaagaaactcagcaaatacataaagggcacattgcaaaacagtgtatgccatatgtgttcatctgttttcacactgctataaagagctgcccgagactaggtaacttataaaggaaagaggtttaattgactcacagttctgcatggttggggaagcctcaggaaacttacaatcatgatag

SEQ ID NO: 321058 - DNA, 594 bp, Homo sapiens
taccctttcagcttgtgtttatgtttaaagaacaccttccaggccaaggtcagcccccgtggaagactccccaacagtcgtggatgggctggaggagagaagtcacaacatgtttcctgttaaaagaaactttaaaccgtaaatcactttctcacaaggaatttgttcatgtttatttcttaagaggatattgagcaatgttgccccttgagcctggtaaatatgttgatttaagatgtatatctaatagttccatgatgcatttgaccacaatggttacctaaagggtggaatgaggtagctatctccaagggagggatgaggagaggagtgtcctctgacatgataactggacgtcaccagagaatgaaaggcaggcatgaagcagacacccagagctgagtcaaagaygggatggtgaggggagcagaggaatgcattacagggtcatcagcattatcagttacctatagggtgcctcctggcactatattaagcattaaagcataatttctcagcaagccaggcatagatgtggaatctaaattacatcccacccagagtgtttacccctttctcttttctagcactcaa

SEQ ID NO: 321059 - DNA, 587 bp, Homo sapiens
tgtctttcttgtttagagaacttcctttagcctttcctttatggtagatctgctggcaaagcattttcttttttttttttttccccacctcagaatgttttgccttcccctccattcctgaggggtatttttgcttgacaagtgatattggttgacagtttcttcttttagcacttgaacaatgctttgccccacttcatctttccttcatggtttctgatagaaaatctgctgtcatatgaattcttttccacccataggtaaggtggtgtttctctttgaatactttaatkattttcatttgccattagtttacagaagtttaactgcgatttgtcttggtgctgttttatttgggtttaccctgttcagtgtttggcccacttcttaaatctgtagtcttacatcttttgcctagtttagagagtttcagcccttctttcttcaagtacttttatagcattattttttatttcctctccttctgggactctgataacaagaacaatataccttttgtgatagttccacgggttcctgaagattctttttttttgagaaggagtcacgctctgtcacccaggttg

SEQ ID NO: 321060 - DNA, 639 bp, Homo sapiens
gctaatctgctgctgtgctgtccaggccactctgctgcagacaaatgggtctcagagttcattgtgttggtcatgattattttttaaaagtragctaagacttcaaaagactaaatgctttggccaaagtgacacggtttgagtggctaaaacagagctgaatccatttgttttgatggaaaatcatctttaatatccaatttctcaatatgagtacttattattctttgtaaaatacatttgcattactcccttttcatactgctgtaaaaaactacctgagatctggtaatttatgaagaaaagaggtttaattgactcacatttccacaaggctagggaggcctcaggaaacttacaatcatgatggaagatgaaagagaagcaaggcatgtctttccacagtgaagcaggagacagagagagcacacatggggaagtgccacacagttttaaaccatcagatcatgtgagaactcactcactatcatgagaacatcaatggagaaatccacctcataatccaatcacctcccaccaggcccctcctctgacatgtggggattacaattagagatgagatttgggtggggacacagagccataccatatcaacattattatttaatatccatgcaa

SEQ ID NO: 321061 - DNA, 638 bp, Homo sapiens
tctataacatctgtatctagattctagattccaatatctagaaaatagcaaagggcaaattgtcatgcaagaaggcaagaaacatgaatgggagcccatgggtaggttgggaggtggggagcagagaacaaaaacggactgcatccacttagaaattaaaatgaaaaaattctgattataaaacaagtcaacttactatttacaaaagaatatgagccaagcttttaatatgtgaattagaaaccagaacaaagtgacattgcaggtttgggaaagaaccgagcaaaaattctggaactgaaaatactaagaatgaaattaagaacamagaagaaagctaataaacatagctgaagagataagtagtaaaactgaatgtggaacaaaagcccatagagagacagaaatttagaagctaggaataaagggcaaaatatagagaaggaattcagtgggccaatctaacctatatttaattggcatcccagaagtagcaaatggggcaaaggtgatttttttttctgaagtggtaatggcagcaaatattcaagaactaataaaagatatcacttcataaattcaagaatccccagaaaccaccagagtataaatgcaattcccacatagacacactatgt

SEQ ID NO: 321062 - DNA, 585 bp, Homo sapiens
taggtgacacaaacaaatagaaacacatcccatgctcatggatgggtagaatcaatattgtaaaaatgaccatactgccaacagggatctacaaattcaacacaattcccgtcaaaataccaccgtcattcatcaaagaactagaaaaaaaccatcctaaaattcatatgkaacaacaacaacaacaacaaaagcccacatagccaaagcaagactaagcaaaaagaacaaatctggaggcattacattacctgatttcaaactatatcataagaccatagtcacccaaacatcatggtactggtataaaaataggcatatagacaaatggaacagaatagagtacccagaaataaacccaaataattacagcaaactgatcttcaacaaagcaaacaaaaacataaagtgaggaaaggacacccttttcaacaaatggtgctgggataattgagtagccacatataggagaatgaaactggatcctcatctctcaccttatacaaaaatcaacttaagatggatcaaggacttaaatctaagatctgaaactataaatattctagaagataacattggaaaaac

SEQ ID NO: 321063 - DNA, 557 bp, Homo sapiens
attaagtcattagtttatttcctataatcaattacactgcaaaatattataaactagtagttgtagtctcaaaaggtagcacagtgtttttttttcttcacactatttttgagaaccggagctctgtgacttgtgcaattaaaatgcatgttattatggaccagcaaacccaagtcttgaggaccaattggtaaatccatggggatttgcactcctgcatggcctgtctttgggaggtatttcccttcataacacgtgccactaggtgccagtgttgttctaccaaagtgaccctccaaaagtacaggtggtccccaactttacatgcttagcattcttgaaaatgatgactttacacagaaggtagaagagcaagtctagtagggaaatgaactgtgtaacttatgwttgtacaggtttgacatcaccacattaaagaaatgaacaaaaagattgactaaagggaagtacaggtgcttattaggtagcattaaatcagtttagagacaaagaatgaaaaatgatctctgctgagatactcttgaatttgcaaacca

SEQ ID NO: 321064 - DNA, 450 bp, Homo sapiens
ggctcctgtacatgcctctagaggtttcccttgcacatacacaatgggtagctccagctatttcacgctctacttctgtctctatcttccctgtctctatctctttccatatcctacttttatccctatgccaatttccatcttcttctctattcttaattctgtactcttctctcttgacctctgtgtctttctctctcttgatctagctttctctacctttttatctacttttaaaaaatcatactgcagatactcattctatagtctgctttaaaaacatttagtcacattccctcaatttatttccatgtcagctcatgtcaacacattttattgtttcttatatccccatggattttcacakatttcacagatcatttatcttccactattaccaattatcacctggtcattaattgtattttgttattacagacaaaacttcct

SEQ ID NO: 321065 - DNA, 555 bp, Homo sapiens
ttggtgggagtgtaaattagttcaaccattatggaagacagtatagcaattcctcaaagacctaaagagataaataccattcgccccaacaatcgcattactggggatatacccaaaggaacagaagtcattctatcacaaagatacatgcatgcgtatatgttcattgcagcactattcacaatagcaaagacatggaatcaacctaaatgtccatcattaatagactggataaaaaaaatgtggyccatataccccatggaatactacacagccataagaaaatgaaagcatgtcttttgcagggacatggatggagctggaggccactctagcaaactaacgcaagaacagaaaaccaaatactgcattctctcacttgtaagtgggagctaaatgatgagaacacatgaacatgttgaagggaacaacacacactggggccttttggaaggtggagatgggaggagggagaggatcaggaaaaatatttaatgagtactaatacctgggtgatgaaataacctgtacaacaaatccccatgacacaagttt

SEQ ID NO: 321066 - DNA, 555 bp, Homo sapiens
ttggtgggagtgtaaattagttcaaccattatggaagacagtatagcaattcctcaaagacctaaagagataaataccattcgccccaacaatcgcattactggggatatacccaaaggaacagaagtcattctatcacaaagatacatgcatgcgtatatgttcattgcagcactattcacaatagcaaagacatggaatcaacctaaatgtccatcattaatagactggataaaaaaaatgtggcccatataccccatggaatactacacagccataagaaaatgaaagcatgtcttttgcagggacawggatggagctggaggccactctagcaaactaacgcaagaacagaaaaccaaatactgcattctctcacttgtaagtgggagctaaatgatgagaacacatgaacatgttgaagggaacaacacacactggggccttttggaaggtggagatgggaggagggagaggatcaggaaaaatatttaatgagtactaatacctgggtgatgaaataacctgtacaacaaatccccatgacacaagttt

SEQ ID NO: 321067 - DNA, 555 bp, Homo sapiens
ttggtgggagtgtaaattagttcaaccattatggaagacagtatagcaattcctcaaagacctaaagagataaataccattcgccccaacaatcgcattactggggatatacccaaaggaacagaagtcattctatcacaaagatacatgcatgcgtatatgttcattgcagcactattcacaatagcaaagacatggaatcaacctaaatgtccatcattaatagactggataaaaaaaatgtggcccatataccccatggaatactacacagccataagaaaatgaaagcatgtcttttgcagggacatggatggagctggaggccactctagcaaactaacgcaagaacagaaaaccaaatactgcattctctcacttgtmagtgggagctaaatgatgagaacacatgaacatgttgaagggaacaacacacactggggccttttggaaggtggagatgggaggagggagaggatcaggaaaaatatttaatgagtactaatacctgggtgatgaaataacctgtacaacaaatccccatgacacaagttt

SEQ ID NO: 321068 - DNA, 547 bp, Homo sapiens
ttggttaaaacagcaagcaggtctatagtcaccttaaacaactaggagcccactacttatgctttataatatcaggaatgcaaagttgcttcacttctctgaggtggttcttagttggaaaattgtcaatggcagtgcctgcttggaaggttttgaagatatatataaggcgaagttgctctgaaaatgcctggcacaaagcatgtcctcaatgaaaaacgaatcttcattatatctttaataaattccagtttccttttcttgcttccatycttcgtctctctctctctctctggaaagtccagtagcaagtcctttccttggaatcttcagagcaagcaggcctagagttcctcattaatacttacgttggggaccttctttcccttttcctcaagtttttttcaactcttcaccttatgaccacttgaagggactccaaatgattccagtgagccacatttctcttagaaggttgccaatggctttacagcacgaggtgtcatggggccagtgctagaattggataatgaaagatgagtttagg

SEQ ID NO: 321069 - DNA, 540 bp, Homo sapiens
tttaaaggagtcctggtttcttttattagagagtggtatttagaaatcaagatctgggtgctaggtgtgctcattcttatcaggccattgttgcttcatggtcctctttatggacagagctaggaaatatgtatatgtgtactaaaccatgcatactcatatctgtttttctaccgtatctatataactgtatttttactggtatttttactgaaagtccacgagttcataattgcatctctgactccagtgcaacaccacaagcttcattccagcctcctctttcctgatttgtcacttctcctcttacaatgagaatcctgtctctcattatctatgatatrtatacttatttattcaactcttgtatacatggaaagtggtttcagacttgctaatgcattgccacatgagaaaaaattatactaactggagtacaatgtttgcctacagttaatttttgcccctttatcttagaatatctactcaaaatactttttttccacagttacttaggtcagttctttcccccgacccctt

SEQ ID NO: 321070 - DNA, 594 bp, Homo sapiens
ttggcacatcaaatttctcctagtgaagataactctgtggaataaaatccgtagtggagtgttgctctaaaacttactttaatcatgttgtattcactagtggccttctcttaagtaattctgttgattttaagcacttcctccagaaagagctttttgcctggggaataaagtgccttagtctggtaaacttacctaaagaaatatccagcaagcaaaatgaattgacggttaaggctcactattaaaactgaaatatcatactcatgagtcagacttttcagagcatcaatcctttgaagactgggaagcagaccaaaaacggcctcacctgtctgtggacctggatcccctaamtagagagccctcttgaggtgttttattctgcagatctctagacaaagcctgagcctgtgaatcaaaaggcagtgtatgcacttttgtggaaatgtagcatgcatcagcactttatttcttttgatggtttaataatattctattgtatgaatacagtatactttgtttatccatttatcagttaatggacatttgggttgttttcactttttgaggattatgaataatgctgttata

SEQ ID NO: 321071 - DNA, 578 bp, Homo sapiens
ggccattttaacagtattgattcttccagtccatgagcatggagtgtttttccatttgtttaggtcacctgtgatttctttcagcggtgttttgtggttctccttgtagagatttttcagcccttagttaaatgtattcttaagtattgtgtggggtgggaggcagctattataaatgggattgtgtccttgatttggctttcagcttgaacattattggtgtatggaaatgctgctcatttttgtacattgattttgtattctgaaactttactgaagtcatttatcagttctaagagtcttttggcagagtctttggtgttttcyaggtatagaatcatattgtcagcaaagagagatagtttgtcttcttctttttctatttggatgtcttttattttttcttttgcctgtttactctggctaggacttcctctctgttttttaataaatttctcattttgggtttttttttaatgttttctcatgattagattcaggtgattcattcttagccaagatattccataggtgatgttgtatgctcagagatcacatctggaggcacatgatgccat

SEQ ID NO: 321072 - DNA, 503 bp, Homo sapiens
tatgaaatgcctccatgtgcttcagtgtttgctctacgcccttccccttgttatccaccagattagctcctattcatctgtcagtgtgcagatcaagtgtcagctcctcttggacactttcccatacaatgtgttctacccaaatcactaccccaagctactttctgcacttcctcataggggtcttaactcattacagcacatattacactgtatgcaatcatgggcatatatacctctctcccagaccagaatgaaagtaactttagcacaggggtcgtctcttatttgacttcatrgttgtattgttcagcacaaagtcatgctccctacaaacttattgaatgaacaatcagaatgcccacattccctgttcatagagttgctctctgctacttctatttcctaaaattttagtcacttgatgattcttcccaaaggcattttatataaaataatagctaccatgaatcaggctctatgatataaagaagagtaagata

SEQ ID NO: 321073 - DNA, 569 bp, Homo sapiens
ataccatgttaaagtaataggagcaaattcaagagacagacttctcttcatgtttctatcatcaagattaacaatttgctggtttatgttaaaacctcatttctcattctcaagcaccagacatcacagtatttgcaaagcttatgggaaatcaagactaggaatccaagcacacagccactaatayttttgagtaaggcagatcatcatctcactcaaaacaaacagttatccttagcaacagaaacataatgagaattaaatgttcttttcaaatttctcttgcatgtaggacattaaataatgtggtttttaagttatgaattatctatattatcccatgtgagacttcaaattaatagaaaaaaatcttcttctacaacttatgttcaactctgtagcatattttatcaaaaatagactcaacagttactcagcacctatcaggtgcccttaagcagcttgtagaagagaaacaaacggttatgcacataaaataagggcaatcatggaaattcatgaaagtttcagtgttggtacttcattgaaggggtcgagatgtcacagaa

SEQ ID NO: 321074 - DNA, 473 bp, Homo sapiens
aattatgaagtctagttgaccatttcccattttgaatgactgatgcacggatgttaaaactttgaaggccctgataattcctgcttatttgacttttaactgggccagttgctattattcatttctgtcttttctatagttgaaaatattattccaactaacatagggaaaagatttgggagtaaatttgaygtactaaatacacacatttcatttgccatcttctcaaaaccccgctaaaacagcagtaaaggaatttactttttaaagacataagcccccaagtgtagaaacaaagaggggaagggaaaatgacaacacaattgtgggagctagaaagcatatggactgctggtagtagatttagcatacagaagaaacctgatcctgaattggcagggggaaaagctaagaatcaaccagacatacactgcacaatacccctaaatcttgggaatgaatgtcatacatac

SEQ ID NO: 321075 - DNA, 478 bp, Homo sapiens
tgccatctagtgagacacctgccagggtggttaatagagtgcttgcaccacccctcccccaatcccaggcagcatagcttgcagctccaggagagactacttccttactgcttgaggagaggagagggaagagtaaagaggactttgtcttgcaacttgggggccagttcagccacagtaggatggggcascgggaacagtcctggggtccacattctaagccctggctcctggacaatatttctagacacatatttggtcataaaggaacctgcactcttgaagggaagtgcccactcctggtgggattcatcacctgctgactaaggagctcttggccctgaataataagcagcagtagccaggtagtacacaccatgggccttgagtgagactcagtgccatgcaggcttcaggtgtgaccctgcacgtttccaccttggtggctaccaggagagattcctttttgaggaaagca

SEQ ID NO: 321076 - DNA, 579 bp, Homo sapiens
ttgttttaattaaagtatattaaaaaaaaatccaccatcacacagaggtttagttggacgagggaagacctcgtgagctccccaaaggggcaagtgtcgtcaggatccccaggggtccttggaccacactttaaaaaccactggcataatgtattcttgtgaaataaggagccttttttggtgattatatgagaactagttatatcatacgcaaaacaggktaattattattttttcaaaaaacaactgtcataggatgtttttcaaactcatatccaattttaatcattctatatatatagtagtgctatatatgtttcagaccatgatattagttaatgattaatttaatgtttgttagataacatgactgactccattttccagatactagggagagaatttagatccatcctttttcctatataattccttttattaccacatacgtatttataggataactgtttttggttgatgtattctaggatttttttaagtaaaatgacaaagataaaagatacctcactttctcatgaaaactcacctttaaccaattaggcttctaataacattgta

SEQ ID NO: 321077 - DNA, 492 bp, Homo sapiens
taacacctacaggtaaaaatggtgttaactttatatataaattattttaaaggggcgtgaaaaaaaattcttgggagtaaagcaatccagagatgaaaaatccaactaaatttgtatttttttaaatattcaactaagaggttccattcatctactttgaagttaagaacagagcacacagtactgaattattagatgcaacaaatgaaacgtgtataacatgtgtaaaatctcttatccaatagtgtaaggtaacagaaagttccaaaaaactaaagcttgttkgaatttcattcacatttaatgcaatctatatttccctgaatgtgacgtaaagaagagtcaaatttgagtgagaatcttaagtttgtagtttccatctgacacttaggcaagtttgttaaatttattgaatataagaatactcatctgtaaaaataaaaataacatttttatgaggattaaatgaggtgatgtatgaaaggacctatc

SEQ ID NO: 321078 - DNA, 579 bp, Homo sapiens
ttgttttaattaaagtatattaaaaaaaaatccaccatcacacagaggtttagttggacgagggaagacctcgtgagctccccaaaggggcaagtgtcgtcaggatccccaggggtccttggaccacactttaaaaaccactggcataatgtattcttgtgaaataaggagccttttttggtgattatatgagaactagttatatcatacgcaaaacagggtaattattattttttcaaaaaacaactgtcataggatgtttttcaaactcatatccaattttaatcattctatatatatagtagtgctatatatgtttcagaccatgatattagttaatgattaatttaatgtttgttagataacatgactgactccattttccagatactagggagagaatttagatccatcctttttcctatataattccttttattaccacatacgtatttataggataactgtttttggttgatgtattctaggatttttttargtaaaatgacaaagataaaagatacctcactttctcatgaaaactcacctttaaccaattaggcttctaataacattgta

SEQ ID NO: 321079 - DNA, 561 bp, Homo sapiens
gaccttggaaagtttacagaacctctctgtatctctacttcctggtaaaattaattatttcatgcaaaacatttattgaattctgttttgctttgtagcaagtcttaatctaaaagctggagatgaagcacatgaaatagacaagacctctgctctccttgagcttcttgtctacagacaaataagcaaaacacaatttcatcagacagggtagcaaatagggagtaaatgctttgttgttgtgtttgttgttttgagatgcagtctcactcttgtcaccctggctggagtgcagtggwacaatcttggctcactgcaacctctgcctcccaggttcaagcaattcttctgcctcaacctcccaagtagctgggattacaggcacccaccaccattcctggctaatttttgtatttttagtagagacgggatttcaccatgttggccaggctggtcttgaactcctgacctcaggtgatctgcccgcctcggcctcccaaagtgctgggattacaggtaaatactttttaaataagggaccaattaagggtttgaagagga

SEQ ID NO: 321080 - DNA, 614 bp, Homo sapiens
tagagacatatatatatatttgcagataaatgcagattaaatttttgactacattaaaatattaaacttttaaaatatgctaaaatattacattatttctaatcatttgttattactttataatcattttgcaccaaacagggtattgagctttatgatctgctctatttgttactttttcttyaataaaacaaatctcttgtttcaagatgtataatacatgttaaaatcattttttcacatttggaaacattcaaaataatatattttgagcactgaagtgcgtttaaaataagtgatcataaaaaggtttaaagcagcagtagtgttgctgggatcaacttaccaactttagaggtacatcattcattttgatacaggagactccttgcctcatcgccagtgtatttattcttttgaatttctgttgtatgcgttgataacatataggtactgaaaacacaaaaatgaataaaacacgctgtctgctcttaattgtgcacaaatccgacattctaggtttcatgttttgacagattgtcatttatatgaaaatcttttagaccactccgtagttatgtcttgaaaaagcctagaaagctcagaaacactta

SEQ ID NO: 321081 - DNA, 614 bp, Homo sapiens
tagagacatatatatatatttgcagataaatgcagattaaatttttgactacattaaaatattaaacttttaaaatatgctaaaatattacattatttctaatcatttgttattactttataatcattttgcaccaaacagggtattgagctttatgatctgctctatttgttactttttctttaataaaacaaatctcttgtttcaagatgtataatacatgttaaaatcattttttcacatttggaaacattcaaaatratatattttgagcactgaagtgcgtttaaaataagtgatcataaaaaggtttaaagcagcagtagtgttgctgggatcaacttaccaactttagaggtacatcattcattttgatacaggagactccttgcctcatcgccagtgtatttattcttttgaatttctgttgtatgcgttgataacatataggtactgaaaacacaaaaatgaataaaacacgctgtctgctcttaattgtgcacaaatccgacattctaggtttcatgttttgacagattgtcatttatatgaaaatcttttagaccactccgtagttatgtcttgaaaaagcctagaaagctcagaaacactta

SEQ ID NO: 321082 - DNA, 549 bp, Homo sapiens
tggtctgtttagtttttggatatcctcatggtccaatcccggtaggttgtatgtttctaggaatttctccatttcttctaggttttccagtttattggtataataaattgctaatagtagccactaatgatcctttgaatttatgtgccatctattgtaatgtttcttttttcatctctgattttatttatttgggtcttctctcttttattttcttagtttggctgaaggtttgttgattttgtttatcttttcataaaatcaacttttcattttgttgattatgtactttcttcatttmatttttcctgctctgatttttattatttcttttcttatattaattttgggtttggtttgctcttgctttgctagttctttaagatatatcattaggtagtttatttgaagtttttctgcttttttgatgtaggcacttaaactacaaacatagtttagaaacacttaaactataaacatccaccttactactgttttcactgtatcctgtaggattttgcatgttgcatttccattatcatgtgtttc

SEQ ID NO: 321083 - DNA, 571 bp, Homo sapiens
ttatatctcaaaatctagaccattaaagaaataacggcctaacaaaaaggtaaaaagcataattttatatcatctgaacttcataatatccagggacacttaagtgttaacacaattgttgacccaatctttgtttcaaacacttctgtatttagtgtcatatatgtagttcattacatatttgctttatgataagaacaaaggcaataccccaggaggaacccagtttattttytagggtgtagtgaacagatgacttcatcagtatctgcaattactgtatgatattcaaccacatagctttccaccttgtgtgaaatgtaattggcaacaaaatcactattctttctctttctcttagaagtttcaatcaacacaagctctaatcctggccaattttctaaagatactgccacacccttcaaaagtgagcagagcatgagaagtacgacattttaatgaaattaagtaaaaaaaaacccacaaaaaacaaaagtgagcagagccaattcatttaggtcattagaagagcaggaggagaaaataaaaggtgactgaggcaaaaaaaaaa

SEQ ID NO: 321084 - DNA, 571 bp, Homo sapiens
ttatatctcaaaatctagaccattaaagaaataacggcctaacaaaaaggtaaaaagcataattttatatcatctgaacttcataatatccagggacacttaagtgttaacacaattgttgacccaatctttgtttcaaacacttctgtatttagtgtcatatatgtagttcattacatatttgctttatgataagaacaaaggcaataccccaggaggaacccagtttattttctagggtgtagtgaacagatgacttcatcagtatctgcaattactgtatgatattcaaccacatagctttccaccttgtgtgaaatgtaattggcaacaaaatcactattctttctctttctcttagaagtttcaatcaacacaagctctaatcctggccaattttytaaagatactgccacacccttcaaaagtgagcagagcatgagaagtacgacattttaatgaaattaagtaaaaaaaaacccacaaaaaacaaaagtgagcagagccaattcatttaggtcattagaagagcaggaggagaaaataaaaggtgactgaggcaaaaaaaaaa

SEQ ID NO: 321085 - DNA, 584 bp, Homo sapiens
aagtcaacagtatacattaagcactcaatacaagtggtggtggtggctttagaaatatcagtagcattaccacactgtgttattttaattgtaccaaatcgaaaaaattcaactcaggaaatgcccaatcatctgtttattattattttcttgttctagaccatatgatgtaagaacatttgtactgaattcatttgaattaatttttaaagacaaggcatgtaaatagtagaatttttttttttttttttttttyttgagatggagtctcactctgtcgcccaggctggagtgctatggcgtgatctcggctcactgcaagctcagcctcctgggttcacgccattctcctgcctcagcctcccgagtagctgggactacaggcgtctgcaaccacgcccagctaatttttttttgtatttttagtagagacggggtttcaccgtgttggccaggatggtctcgatgtcctgacctcgtgatctgcccgcctcggcctcccaaagtgttgggattacaggtgtgagccaccgtgcctggccagaacatattttaatctaatacagtgaccacaacgtacaatt

SEQ ID NO: 321086 - DNA, 584 bp, Homo sapiens
aagtcaacagtatacattaagcactcaatacaagtggtggtggtggctttagaaatatcagtagcattaccacactgtgttattttaattgtaccaaatcgaaaaaattcaactcaggaaatgcccaatcatctgtttattattattttcttgttctagaccatatgatgtaagaacatttgtactgaattcatttgaattaatttttaaagacaaggcatgtaaatagtagaatttttttttttttttttttttcttgagatggagtctcactctgtcgcccaggctggagtgctatggcgkgatctcggctcactgcaagctcagcctcctgggttcacgccattctcctgcctcagcctcccgagtagctgggactacaggcgtctgcaaccacgcccagctaatttttttttgtatttttagtagagacggggtttcaccgtgttggccaggatggtctcgatgtcctgacctcgtgatctgcccgcctcggcctcccaaagtgttgggattacaggtgtgagccaccgtgcctggccagaacatattttaatctaatacagtgaccacaacgtacaatt

SEQ ID NO: 321087 - DNA, 584 bp, Homo sapiens
aagtcaacagtatacattaagcactcaatacaagtggtggtggtggctttagaaatatcagtagcattaccacactgtgttattttaattgtaccaaatcgaaaaaattcaactcaggaaatgcccaatcatctgtttattattattttcttgttctagaccatatgatgtaagaacatttgtactgaattcatttgaattaatttttaaagacaaggcatgtaaatagtagaatttttttttttttttttttttcttgagatggagtctcactctgtcgcccaggctggagtgctatggcgtgatctcggctcactgcaagctcagcctcctgggttcacgccattctcctgcctcagcctcccgagtagctgggactacaggcgtctgcaaccacgcccagctaatttttttttgtatttttagtagagacggggtttcaccgtgttggccaggatggtctcgatgtcctgacctcgtgatctgcccgcctcggcctcccaaagtgttgggattacaggtgtgagccaccgygcctggccagaacatattttaatctaatacagtgaccacaacgtacaatt

SEQ ID NO: 321088 - DNA, 587 bp, Homo sapiens
gtatttgcacaaatgtaagacattgtgctaatctttagaagtgtaacatattatggcatgatttttgaatgatcagttttagtttaaataatataaccaacaaatggttwtgcagttgctctctttaaacatttttcaactctcctatatgtttgaaaattttattttttatgataaaatattagaaaattatggtaatataaaatgaacatatgcatatatgtgtattacaaatgtgcttttggaggtaaaattttagccaaaatatttttacttagtagtttctgatggcaactttgccatagtccaagacctgattcagtttatcataaacattgttgaaagaagaataggtgaggaaagaaactagaaagacaaaagatatttaaagagggaacattaaaagggaaaaaaattaaatttaggaagtatcacaaatactgcaattacataccatttgcttttttcaaatctatctttagataaattgatacagaattatacatcttttaatctaaaatcattgacttgatatacatgctaataacattagtaaaaagcacaagccaaattcctattccaaaata

SEQ ID NO: 321089 - DNA, 545 bp, Homo sapiens
gaatccagttgcaaaagttctgctgtgcataaaacgctgtcaaatagccctgtatgctgcagagaaatctttcatgataggaagagtcagtcaatgtagcaaatttcattgttgttttatcttaagaaattgtcacaatcaccccagccttcagcaaccaccaccctgatcagtcagcagctgtcaacatcgagcaagaccatttgctagcaaaaagattatgccttgctgaaggctcagatgattgttagcatattttagcaataaagtgtttttaattaaggtatggacattgttttttatacataataccgttgcatacttaaaagactattgtatattcattwtatatatatatactatatagagaaacataactattatatgcactgaaaaactaaaaattaatgtgacttgctttattttgatatttgctttattgcattagtctcgaaacaaatccccaatatctccaaggttggcaggtatttggaaaccatttgcttttaattttttattttaaaatatcaagtactcagtatttt

SEQ ID NO: 321090 - DNA, 442 bp, Homo sapiens
tacaattcccagcagggctataactagatatgagatcattaggcatatatttctgaaaacctgccctccctacaatgttatgaatctctctattccaactcagttggctgaactgtcctcttttttctgagctctcccttccctacttatcctgagggaaggcaggcatgttcctgagggtgaaattctgttgatagaatgagaactgttctctgaacatgatgtgaatgctttatcacttgcagtcatgctttaggtttccccatacatgaaaggcctctgcttccaatattcagtgcttggtgagaatactggagatgattaccccctccaacttgccycacccctttgttaaatagtcttttctgctcatagtgtagttgtagactaggggtcagcaaatgacagcatgaggaaccaatcctgccccatccctattttt

SEQ ID NO: 321091 - DNA, 417 bp, Homo sapiens
attatgaataactggaggaaaaaggtgttggaggtttatttttcttttcttctgcttgacggagtcttgccattacagaagtagaacttgttgcggaactgcttccttatttagttcagctgaagacggggtctttatcacaccgccatgaaaatttaggctcgcagactatttgaagagtgagraaaatgggatttcttgggcaaaagggaaaaaaagggggaaacagagactcttagcaaagcgacagcgtgtgcttcttgcccttgggcttccctcctggccaattgaattccaggttccacccaggaagaggaagggcaagtcctccctgctgcaaatggtgagaattctgtggctccaccccagtgtgcgttcctcccagtgcacaggttggttggaggctctgccagggag

SEQ ID NO: 321092 - DNA, 590 bp, Homo sapiens
tgcccatgagaacttgagaaactttgctaacagggttgtttgttgctggaggttggcctcgtagactaataaatagcaattctccaggaagagagttgggaagtgggagtggaaagagtgatagatgttagaggaaaatcygtgcatggtaaattttaaaaaggctgacttgttcttttgactatagttggactatagactccctccagaccctgttgttttgatctgcctacctctctctcctacttcaatcatgtcctgtgttctggtggggctgtcagttgcagcactccttcgctcctccatgggggaaccaatgactcaggaatagccaatcaaaattctttttcccctggccacagtgattctgtagaggtgcttggatgtcagagtctgcctatttgacttcacactccagccctgccatgtctcaatttggtgattttgggcaagttacttcacctctctaggcttcagtttccccatctctaaaatggggatgataattgggttgttgtgaggatcagatcacttacatgaaaagtaggtggaatcgtgcttggaacatggtgcacactctccatgtggta

SEQ ID NO: 321093 - DNA, 587 bp, Homo sapiens
gaatttgtggagaagaggtatgtgtttaggccctgttttaatatttcaatatacttctaatctaacttcaatttctcctctgtattagtcttcctgatagaaccttctaaaatagtactctgagcatatcactttccttactgagaagttttagtggctctcttatctattgactaaaatacaagatcctcagcctgactttgaggttacaatctggtttccacggcagttggttaaaaagtattttatggagtgcccactgtgtgccaggaataggctagaatatctctgtctaaaagaaatttaattcaagtcacatatgtaatttaaaattttttagwagtcatattgaaaagttaaaataaatgggtaaagttaatttaaataatgcattatatttaatccaacatatacaaaatatataaaagatcaaaatgtaatcaatatgaaaatttgtcaaggagctatttatattcttttaaaataaatattaagaattcaatgtatattttatacttagcagcacatctcaatcagattgtaaattttcattgaaaattacttatttatttatttattttgagatg

SEQ ID NO: 321094 - DNA, 583 bp, Homo sapiens
ctttaggtaccagcttggccacagcagggtagagcaccaaacaggctcttggggtgactgattctaggccttgagtgaacataatcagtagccaggtagtggtttcagtgggtcttgagtaagacccagtgctgtgctgacttcagttctaacccagcacagtcccattggtggtagccacaggagtgcttgtgtcaccccacttccagctccagagagcttatcacagagagagactccattgttttgggagaaagtaagggaagggaacaagaatctctgcttggtaatccagaaaattcttccaggtcttatccaagaccascaaggcggcacctccatgagtctgcaagaaccacagcattccttggtgtgaggttcccacaaatgcagatatgggttacatcacaacaccaaagtccttttaaatacctggaaagactttacaaggatgacaggcacaaataagcccagactgcaaagactacaataaatacataagccttcaatgtccagaaaccagtgaacatccataagcatcaagaccatctaggaagtcataacttcatgaaatgaactaaat

SEQ ID NO: 321095 - DNA, 583 bp, Homo sapiens
ctttaggtaccagcttggccacagcagggtagagcaccaaacaggctcttggggtgactgattctaggccttgagtgaacataatcagtagccaggtagtggtttcagtgggtcttgagtaagacccagtgctgtgctgacttcagttctaacccagcacagtcccattggtggtagccacaggagtgcttgtgtcaccccacttccagctccagagagcttatcacagagagagactccattgttttgggagaaagtaagggaagggaacaagaatctctgcttggtaatccagaaaattcttccaggtcttatccaagaccacmaaggcggcacctccatgagtctgcaagaaccacagcattccttggtgtgaggttcccacaaatgcagatatgggttacatcacaacaccaaagtccttttaaatacctggaaagactttacaaggatgacaggcacaaataagcccagactgcaaagactacaataaatacataagccttcaatgtccagaaaccagtgaacatccataagcatcaagaccatctaggaagtcataacttcatgaaatgaactaaat

SEQ ID NO: 321096 - DNA, 583 bp, Homo sapiens
ctttaggtaccagcttggccacagcagggtagagcaccaaacaggctcttggggtgactgattctaggccttgagtgaacataatcagtagccaggtagtggtttcagtgggtcttgagtaagacccagtgctgtgctgacttcagttctaacccagcacagtcccattggtggtagccacaggagtgcttgtgtcaccccacttccagctccagagagcttatcacagagagagactccattgttttgggagaaagtaagggaagggaacaagaatctctgcttggtaatccagaaaattcttccaggtcttatccaagaccaccaaggcggcacctccatgagtctgcaasaaccacagcattccttggtgtgaggttcccacaaatgcagatatgggttacatcacaacaccaaagtccttttaaatacctggaaagactttacaaggatgacaggcacaaataagcccagactgcaaagactacaataaatacataagccttcaatgtccagaaaccagtgaacatccataagcatcaagaccatctaggaagtcataacttcatgaaatgaactaaat

SEQ ID NO: 321097 - DNA, 600 bp, Homo sapiens
caaaacatagtttgaaaaaatgtataatataagacctagtatttgctagcacaacagggtgactattttaaaaaataatttaattgtacatttaaaaataactaaaagcgtacaattagattgtaacacaaaggataaatgcttcagktgatggataccccatttactctgatgtgattattatgcattacatgcttgtattaaaatatctcatgtaccccataaatatgtacacctactatgtacccaagaaaataaaaaattaaaaataatataatggtgtactctatgtttagtatgtagaggcagctataatgtacactgtaggaaagtacaaagtgatgctgcttctgcctgtggattgggaatggacagtggatcagcaaatgcatgacagagaccatgatgtgaaatgtggttctagaagaatgggtaggaataagcatggaaaacagattatttatatcccatgacccaacaattttacttctaggctatttagaacaaataaccaggcatatgcatgagtgttattgcaacaatggataagaacaaaaaaagctgttttcaacaataaagcattatataaataaattatgg

SEQ ID NO: 321098 - DNA, 600 bp, Homo sapiens
caaaacatagtttgaaaaaatgtataatataagacctagtatttgctagcacaacagggtgactattttaaaaaataatttaattgtacatttaaaaataactaaaagcgtacaattagattgtaacacaaaggataaatgcttcagttgatggataccccatttactctgatgtgattattatgcattacatgcttgtattaaaatatctcatgtaccccataaatatgtacacctactatgtacccaagaaaataaaaaattaaaaataatataatggtgtactctatgtttagtatgtagaggcagctataatgtacactgtaggaawgtacaaagtgatgctgcttctgcctgtggattgggaatggacagtggatcagcaaatgcatgacagagaccatgatgtgaaatgtggttctagaagaatgggtaggaataagcatggaaaacagattatttatatcccatgacccaacaattttacttctaggctatttagaacaaataaccaggcatatgcatgagtgttattgcaacaatggataagaacaaaaaaagctgttttcaacaataaagcattatataaataaattatgg

SEQ ID NO: 321099 - DNA, 530 bp, Homo sapiens
acccacatctgagctagcatctctctcccccagattcctgcaacagccacctaacctccctgcttttactcttaacccccttaatccattcaacacagcaactaaaatgatccttttaaaatatcagttgccatgtgttgatcctctgctcaaagcttacaatggttcaccttttycttcagtggaaatgtcaaagcattcacaatggcctatgctggtggtttaacacacagaccttttctcctctgtcacattctcctcaaccacactgattgaacaacttcagacttttatcaagtgttttgagttaaatttaattgtatcaattgaattgtcatttctgtgaacttcagtttcttcccttgtaaaatgaagaggtttaaataatctatacggattctttcagctctaacacttataatttttcactaacaagagaattcactctactatgtattatggtgacactgtgttgaaggagtccaaatgaagctactattttgtaattatatatagagttgatctaatca

SEQ ID NO: 321100 - DNA, 602 bp, Homo sapiens
cctagcatgctgcagtataaatacatcactataatatttgtaaagtatctcaatattgccagatcacatatagtgatatattatcatgagataattgccccttatctcatgactcctactaacctcccgcctccaagactgaaccttgagtattattgctccatgaaaagtgagagcagacatttggtttatttattggtaaaataataaataagcttggaaatcaagcatggaaaaagagagaatttttctaactttcatagtatatttagccaagtgtgctcagaccatagagtttccatcagggacaagacaaaaaaaaagctaggccaagggatttggtgccctaaggtagaaggaaagaaccttctccatacttgacaatagaatgtgttttagataagataagggatgcactgaaagcagatgctactcmtatatgagtctggaaaacgccatgatggagaacagttctgtacccacataacaggctacagcatggtaaagaggatagggcaacttgatgggcaaagtgagatgcagttggtactcctaaagtagcctcagtttctctgtggcattttgataaatcgagagaaggt

SEQ ID NO: 321101 - DNA, 602 bp, Homo sapiens
cctagcatgctgcagtataaatacatcactataatatttgtaaagtatctcaatattgccagatcacatatagtgatatattatcatgagataattgccccttatctcatgactcctactaacctcccgcctccaagactgaaccttgagtattattgctccatgaaaagtgagagcagacatttggtttatttattggtaaaataataaataagcttggaaatcaagcatggaaaaagagagaatttttctaactttcatagtatatttagccaagtgtgctcagaccatagagtttccatcagggacaagacaaaaaaaaagctaggccaagggatttggtgccctaaggtagaaggaaagaaccttctccatacttgacaatagaatgtgttttagataagataagggatgcactgaaagcagatgctactcatatatgagtctggaaaacgccatgatggagaacagttctgtacccacataacaggctacagcatggtaaagaggatagggcaacttgatgggcaaagtgagatgcagttsgtactcctaaagtagcctcagtttctctgtggcattttgataaatcgagagaaggt

SEQ ID NO: 321102 - DNA, 602 bp, Homo sapiens
cctagcatgctgcagtataaatacatcactataatatttgtaaagtatctcaatattgccagatcacatatagtgatatattatcatgagataattgccccttatctcatgactcctactaacctcccgcctccaagactgaaccttgagtattattgctccatgaaaagtgagagcagacatttggtttatttattggtaaaataataaataagcttggaaatcaagcatggaaaaagagagaatttttctaactttcatagtatatttagccaagtgtgctcagaccatagagtttccatcagggacaagacaaaaaaaaagctaggccaagggatttggtgccctaaggtagaaggaaagaaccttctccatacttgacaatagaatgtgttttagataagataagggatgcactgaaagcagatgctactcatatatgagtctggaaaacgccatgatggagaacagttctgtacccacataacaggctacagcatggtaaagaggatagggcaacttgatgggcaaagtgagatgcagttgrtactcctaaagtagcctcagtttctctgtggcattttgataaatcgagagaaggt

SEQ ID NO: 321103 - DNA, 607 bp, Homo sapiens
tggcttcatacccctttgtacctaataagcagccactgattatccatgttgggagaagaactgccacctttccgaacccagcatgggcccagtgagcaccaacagagctttgaccactctgtggtgtccacatccagacctgaactctgtggttacactggatctgcctatgtctcagacattggagtcattaccgtagtaagctaatttgcacattgggttctggagccaagctcttgctgcttatgctcatgccccaggcattagctcagccaccacagagcttcattctgaccctgtagatgctttactaagattcacyctgaccttatagatgctgaggctagcacatgcttataccttggatcctggctacaaggctgcattgtgtgcacccacatctcaaacatcagagccactgccagagagaggtagttcataatccaagtctggagtcaaggtctgcatgtggctacacttcaggcactaccttggctgccataaagagcaaggccctgcccaactccagagccactctaatactgtgcccactggtgctcttattcttgcttcccctagctgcttcataacaatccatacctcacat

SEQ ID NO: 321104 - DNA, 543 bp, Homo sapiens
ggcactagaaaattcttgcctatcaataattaccttgaatgtaaatgtataaaattatctaatcaaaaaacatagagtggatgaatgaatgaaaaaaaaagaccaacaagactcaactatatgccacctacaaaagagactcacytctccttgaagagtacacatagattaaaagtgaaaggataaaaaaaagatatttcatgcaaatgaaaaccaaaagagagcagaggtggctgtagttatatcagataaaatagacattcagtcagaaactgcaaaacgagaaaaagaaagtcattatataatgataaagggatcagtttgtcaaaaagatataacaattgtaaatatatatacacccaacatcagagtacctaaatatataaaacaaatattaatacatttgaagagagatatagacaataaaataacaataaaggacttcaataccacactttcaacaatgaacagatcatacagacaaaaaatcaataagaaaacctaagattttaatacattttagatcaaatgggcttaacagac

SEQ ID NO: 321105 - DNA, 621 bp, Homo sapiens
cagggtacattacatgttaggccactgctgtggtttgaatgtttattccctcaaaaactcacactgaaaattgccactgtgatagtattagaaggtgggactttcaaaaagtgtttattgtcattagtgttccactctcatgagtgaaccaaagccattattgtgggagtgggtgtgttatcacaaaagcgggtttgtactctcttgctctctcactcttgccttctctttgcccttgtgmcatgtgatcctttctaccatgttatatcatagtcaccgaggctttcaccaggtgctggcactttgatattgtactgctcagtctctagaattgtgagccaataaattacttttcattataaattacccagaagaaaaactcttatcaagtatcttttctaatctcaatggtatgaaactagaaattaataacaggaggaatttttagaaacatacaaatatgtggatataaaacaacatgctctgaaacaaccaatgtgtcaaagaaacaattcaaagaaaacttaaaaatagctagagacaaacaaaaatggaaatgcaatataccaaaactatgggatgtagcaaaagcagttcattgaggaaagtttataccaataa

SEQ ID NO: 321106 - DNA, 633 bp, Homo sapiens
acacatttttctcaagaacacacataattttgtccagggtacattacatgttaggccactgctgtggtttgaatgtttattccctcaaaaactcacactgaaaattgccactgtgatagtattagaaggtgggactttcaaaaagtgtttattgtcattagtgttccactctcatgagtgaaccaaagccattattgtgggagtgggtgtgttatcacaaaagcgggtttgtactctcttgctctctcactcttgccttctctttgcccttgtgacatgtgatcctttctaccatgttatatcatagtcaccgaggctttcaccaggtgctggcactttgatattgtactgctcagyctctagaattgtgagccaataaattacttttcattataaattacccagaagaaaaactcttatcaagtatcttttctaatctcaatggtatgaaactagaaattaataacaggaggaatttttagaaacatacaaatatgtggatataaaacaacatgctctgaaacaaccaatgtgtcaaagaaacaattcaaagaaaacttaaaaatagctagagacaaacaaaaatggaaatgcaatataccaaaactatgggatgtagcaaaagcagttcat

SEQ ID NO: 321107 - DNA, 602 bp, Homo sapiens
aaaaagctggctctcccaccctagtcctttaatatgcaaatgcagggcgccatgatgttctacacacgtggggatatgtgggggctgccacgttgccagggcaagggcaagggcaataaggcctcaggaatcaccacatttgggtggacccagtttctaatggcttgcatttgcatatcaaaagttgctggcctggctctaagaaccagggctttacaagaaactttctctgagatgctttaaaaaaygaaaacttcccaagaaccccttttcttctctatctgcctaaaataatttcttaataactcctacaacataacaataacaagcccattacttttcatttcttttatctttcctcttttacaataaaaaactgtattttcccaaattaaaactaattagtgagaaagatggccatgcttaaatttttgcaagtcttttaaacgtctggcttaatggaacacaactagagtctcctgtcttctgcaaaccattgtgttgtcatattacatgtcatgtagcctctggagaactccactgtacactagtgagagaataagtctgaaaagggcaaacagttttgtattattataaaaata

SEQ ID NO: 321108 - DNA, 591 bp, Homo sapiens
gaggatttctcttactttctaactttctcattttcccaaagcccaggacactgctttgctygcaactgcttagtcaatatatgcattataaatgaagtttttaagggcgaacaaagacaaagattgttttacatattttttgtagcacctgttctacccagtattatgctaagatatggtgtgcttaatcatgttagtggtaatttagataattcggtgaaactgatttcattagtcatgtgtaaagaaacctttctattatttgtagtttgatttttgcctattaaagaaaatgcagtacttatttccctttattatttaactattcattcactttaaagaatgtaacaggctcctattgaagggacttcattgagcctgctttattttcattactttaggtagatttattaattagatcccttagctgattctcaatctgtccttttgttatttacttatttatacaagtcctagtgggttagatgggggtgcagtggacttctcctctagtcttcacagcacacaccactatgattatcacacagtgggcataactttctgtcctgtttccaagatttggtgttgata

SEQ ID NO: 321109 - DNA, 591 bp, Homo sapiens
gaggatttctcttactttctaactttctcattttcccaaagcccaggacactgctttgcttgcaactgcttagtcaatatatgcattataaatgaagtttttaagggcgaacaaagacaaagattgttttacatattttttgtagcacctgttctacccagtattatgctaagatatggtgtgcttaatcatgttagtggtaatttagataattcgrtgaaactgatttcattagtcatgtgtaaagaaacctttctattatttgtagtttgatttttgcctattaaagaaaatgcagtacttatttccctttattatttaactattcattcactttaaagaatgtaacaggctcctattgaagggacttcattgagcctgctttattttcattactttaggtagatttattaattagatcccttagctgattctcaatctgtccttttgttatttacttatttatacaagtcctagtgggttagatgggggtgcagtggacttctcctctagtcttcacagcacacaccactatgattatcacacagtgggcataactttctgtcctgtttccaagatttggtgttgata

SEQ ID NO: 321110 - DNA, 595 bp, Homo sapiens
ggctcctattgaagggacttcattgagcctgctttattttcattactttaggtagatttattaattagatcccttagctgattctcaatctgtccttttgttatttacttatttatacaagtcctagtgggttagatgggggtgcagtggacttctcctctagtcttcacagcacacaccactatgattatcacacagtgggcataactttctgtcctgtttccaagatttgstgttgatattctccctgcaagggaagacccttggcacatctgtatacaatgtgaagaaatgtggagatgtcaaaacccgggacacatgccgcccagcacttgacaagcagagtgttattagcattggtaataagactacctgggtctgtctgcagaggtccttcagcttgagatcatttacattcactgcacacagcattcaaacctggctcctaaatgagacagctttagagaagacaatggaaatcctgacagtaaagtgaaaatttcaggtagaaatctattcatcctaattaagagaccctctcagacctgcctcttggcaattaacacagttgtgtgtggtcctgttatttaaactg

SEQ ID NO: 321111 - DNA, 545 bp, Homo sapiens
ccttagagcagcaagagcaggaagacaaaggatggagcttgaacctggcacatgtccagataactgcgcagcccaaggtgcagagggtttgacaagacctagcatgctgcaggcaatagtgagcaatttaccaccaagaggtcatgagcttccaacaggtagacacttttcttcytaagaaatccaaggcagaaacacctgtggtttaccttcagttgtgaacgtttattccaagaacacaagaagacaaggtcacatgaaagttaccccatcagcctgataatcatgctaggattcagatttataggccgttcagaaatctcatagacacccagaaaatgtgttcagcatcttctacctgggactcccacagaagttatacatttctaaatgaaaaaggataatatgccgtcattctctatagtgcacccattgtgtagaatttaccccaagccacttgagagacccctgagcttcctcagatgcaccctttgtacttatctcatgctcctgtctctaacttaattgtatctggctactgcacc

SEQ ID NO: 321112 - DNA, 456 bp, Homo sapiens
tgtggaaagggcaccatattgctttcggaaatctttgatctgccaatatcagccattatctgtttctgctatctatgcttgatgtttatgtaagtttcagattcttttctctgaaagttgtctatttctttgatgaacaaataacactaaatagagatttattcttccaaagatttgcagtattgcaagggggtttaataaatactacatattcatctggaatttagagctatttaagtttgagtttctaaaaattctgcctgagaagatattaaatgattaagaggtacccatccaattgcaaattatttttcctgatttctttyctgatttatccaaattttctctgtttcttctggataaggctttccatggtagcccctgggacacaatggaaaaatagggaacaagtgacagttaccttaattagagtacagttaggagattttcaagtgg

SEQ ID NO: 321113 - DNA, 477 bp, Homo sapiens
gacttttctcttagggttctaggtttctgatttttaatggtgtatttggaagtaaaaccagtcaaaatagaaggtatactttagagatttcattttctgttttaactttttaacagcatttaatcattaaagacagggaaaaaaagacagaaggaattaaatttaaagtgataatttaatcttaacaatttgtccttttataattttggaaatatagtcatcatttagtcatccacttattcactgatgtacttacttggagaacatttatagaacacctggctttccaaaattaacctttcactgtaactgggtagrtatgctgcctgtcttgtgtcctcgatcccttaaaatgctaaaactatgccactcatttttgcccttaaatttttgttcctgtttttttcttgggctgtaaggccttctcatgtaccctctgccaatttaaactctatgcccaatccaaagagttccaat

SEQ ID NO: 321114 - DNA, 555 bp, Homo sapiens
gtttacaacaattacacagttgacttagcaattggcttcagaccattgtccaatttatggggaatgcacatttatctaatttctcaccatattagcaaaactatatattcagtgaatcaaagaatatagcctataaattgccttaagaatagttactgttgcctttccttaggcagactgttctagtatctatcaaagtgatgctttaaaaggaacaactcttcttrataattgcattaaaataatatggaattagaaattttcatacttcaaattttagattttatgtaacatctatatgtatttgcttatatagacatatatagttcatatacatgtgtatgtaaatatgtgtgtgtgtatcagctttccatttcagtgatctacttttttttttttttgaattaactcatttctctggttgagtgatgtctctgttttagagaatacagtttgtgtttttgtaatagaattattgtcccagaaattgacagaatgtatttaaagctatcgtagcacttacatagttctggaggatttggggcatatttaaat

SEQ ID NO: 321115 - DNA, 555 bp, Homo sapiens
gtttacaacaattacacagttgacttagcaattggcttcagaccattgtccaatttatggggaatgcacatttatctaatttctcaccatattagcaaaactatatattcagtgaatcaaagaatatagcctataaattgccttaagaatagttactgttgcctttccttaggcagactgttctagtatctatcaaagtgatgctttaaaaggaacaactcttcttaataattgcattaaaataatatggaattagaaattttcatacttcaaattttagattttatgtaacatctatatgtatttgcttatatagacatatatagttcatatacatgtgtatgtaaatatgtgtgtgtgtatcagctttccatttcagtgatctacttttttttttttttgaattaactcatttctctggttgagtgatgtctctgttttagagaatacagtttgtgtttttgtaatagaattattgtmccagaaattgacagaatgtatttaaagctatcgtagcacttacatagttctggaggatttggggcatatttaaat

SEQ ID NO: 321116 - DNA, 518 bp, Homo sapiens
ttatgaggaaacaatgcttaccatagcaatttaaaagtttatctgggtagatgaggtaagcaaaaagcaaaatcgctaatgtgaatacaaacccttgttgaaaatattttaatgtaaaaactggaccttacctgtatatcattgttgggcaaatgcagctcttggttgtgacttctgctcagccagttccctgttctctctttcctttcttcccagcagccctagaaatacagcctccttactctttcttattaaaactctcaccatgtaatctctttcttcagggttgtctctacccatgattgattgtgaatgttggccttgtaccctaacttgttcaattctattgaaaaccaacattcaaacccttgccctttttaagactttggccacargtctttaagaaaagctttgggcaaagcagaaccctggagtggtttccttggggcattttctctccagcttttacagtgcatgtaataactacactttatctcacttgattattacagtgggag

SEQ ID NO: 321117 - DNA, 627 bp, Homo sapiens
tttcatttttatatatatttaaatacagtattatactaattataacattagtattaatagtatatacacacacagacatatatacactctatctccctaagtacaataatttacaaattgtaataataatgatactgataatattaataagaagtttatgttaggcactgtttagtagctttacatattctattcaatgcgccaaacaattrttttgaggtacgatgaattattatcctcattatacagatgagagaactaaagcaaaagttgataaagtggcttgcctaatgtcacacagcgagaaatgaatgtagtttgtatttaaatcatagaagagatagaatatagtttgaatatattttattaatattttatttcatgtagttttggaagctgtgtagaggaatcagcaaagcatttggaatcaaacatatttgattttgaatgctgactctgtcattgattaaagatgtctactttggtagcctatttaatctctctgagcctcaagttcttgctctgtgaaatggaataataaaaccaaccaggaagtatgtaaggtaggggttaagtacacagtgcttgcctgcttaaattcaagtttcacctttgaaattcttagct

SEQ ID NO: 321118 - DNA, 627 bp, Homo sapiens
tttcatttttatatatatttaaatacagtattatactaattataacattagtattaatagtatatacacacacagacatatatacactctatctccctaagtacaataatttacaaattgtaataataatgatactgataatattaataagaagtttatgttaggcactgtttagtagctttacatattctattcaatgcgccaaacaattattttgaggtacgatgaattattatcctcattatacagatgagagaactaaagcaaaagttgataaagtggcttgcctaatgtcacacagcgagaaatgaatgtagtttgtatttaaatcatagaagagatagaatatagtttgaatatattttattaatattttatttcatgtagttttggaagctgtgtagaggaatcagcaaagmatttggaatcaaacatatttgattttgaatgctgactctgtcattgattaaagatgtctactttggtagcctatttaatctctctgagcctcaagttcttgctctgtgaaatggaataataaaaccaaccaggaagtatgtaaggtaggggttaagtacacagtgcttgcctgcttaaattcaagtttcacctttgaaattcttagct

SEQ ID NO: 321119 - DNA, 562 bp, Homo sapiens
aacacatgtattttttcagtatatataggtttatatacccagatatatatatgtatatctttaccaaaatatgaccattctgtctatcacggacattttgtatgccaattaaaacagattacattatttttaatgactatgtggggttgcattatcatttaacccttttgtttttgttggatattactcctttcttcaaattttcaatattagaaataaagctgtcatctacatacatattgtacatatagccttgcacatgcctgtaggataggttttaaagtcattaaatatataatttgtcactgctgataggcagtactakagattattgtaattattatttttaagatgtaatgacatattatatcttaaatgtataatgatatattacatcctatattagtgttgagacagattgcaacataacctataatacttttataaagttgttagtagtgttagtgaaatcaacagtttggaatagtgactaaaaggatgcagagtagaatgttagccccgcaaatttaccatatgttttatttgcgggggaaataaaatt

SEQ ID NO: 321120 - DNA, 581 bp, Homo sapiens
tttagggaaatgcattaattttgaacagtagaagtctactcaaggttgatatcttttaccttttgctagtgctgaagttagaacatcttccatttcttagacagttcagtttggattcctgattctaggaaggtggcttttagttaatttatttttattctgttattctggcttaggcttttctctttttcttccttcttttgactttctgggaaacatagaactgcacrgaggaggcaaacttggcttattatctacatctgctgaggcatgacatataaagcttgctcaagaagcacattatgtggcatggacagcatgagacaagccagcttgagacacagtagagcagttcagacactctgaaggaaaagaatatagggtgaaccagagtagttccctagtattttagtgagtaggagtcctctgaatatttcttatagtaaattacatatgtagagaattaggaaagcatgtcagaatgtgagtttactcatgctcaacatagactttagttatctcaccagacacttggattaaaggtgctttataatcttattccatatggaagtggaaacctg

SEQ ID NO: 321121 - DNA, 581 bp, Homo sapiens
tttagggaaatgcattaattttgaacagtagaagtctactcaaggttgatatcttttaccttttgctagtgctgaagttagaacatcttccatttcttagacagttcagtttggattcctgattctaggaaggtggcttttagttaatttatttttattctgttattctggcttaggcttttctctttttcttccttcttttgactttctgggaaacatagaactgcacggaggaggcaaacttggcttattatctacatctgctgaggcatgacatataaagcttgctcaagaagcacattatgtggcatggacagcatgagacaagccagcttgagacacagtagagcagttcagacactctgaaggaaaagaatatagggtgaaccagagtagttccctagtattttagtgagtaggagtcctctgaatatttcttatagtaaattacatatgtagagaattaggaaagcatgtcagaatgtgagtttactcatgctcaacatagwctttagttatctcaccagacacttggattaaaggtgctttataatcttattccatatggaagtggaaacctg

SEQ ID NO: 321122 - DNA, 533 bp, Homo sapiens
aagtggaaacctggaacatttctctagcaggcggagtcaagttttaatacctgggatggtgaaggccatataagttgctatcatttattaatgcaattttaatgaaccttatttctgtgggaatatactgcaaacagtggctgagcacagcaagtgcargggtaaggaaggtagaaagagaaaaaacttgcctcctgagctctttctttaatgtgctgacattgtctgagagataccaaaatgcacatgactgttccatgacccagagaagccggtaattagctggggaaaaaggaagcacatagattggaaaatgaaacaagtacggcatacagatgacaattgtccccagaccttcttcctcagggaaactttcaagtctcgcttcactttttgcaaaatcactatcctggtgttttagttgttattagcagtatttagaacatctcccatttcttaaacagttcaatttggattcctgatttcagaaaggatgcttttagttaatttatttctttttctgttaccctgac

SEQ ID NO: 321123 - DNA, 566 bp, Homo sapiens
gagtttagctaatttatacatagaattaggaaatttccttcttctgccctcttttctactggattcccctacattttytgttttgcaggggatgttttgcccaatcctctgaccaaaaagattaggtttgtcttgcagttttaggtgcctgtgctacccccagatttctgttattggagttcactctcaggcctagttcatgaaagaaaagaaaagacaaaaaaaaaaaaaaaactcccccaaaaattatactcacatgagtttcctttttcagttttgactttccctctccaacctgcctgcttttttatcctattcaggtaattactttttgtattttgtctacaggttttagttgtaatcagttagggaattaagctatagtatgcttatccatattggctggcaacagcactttttataaacataattttggatggttacattgtaattcactttatggatattttaaaatttaaaatggcttctctatttaggaacacttgagtttgttctttggttcttctaaatagcattacagagaatattattaaaataaacatttc

SEQ ID NO: 321124 - DNA, 606 bp, Homo sapiens
ttgattgagtggatatattagccattaaacagaatggagaaagcaactctccctccaagtcaaaataggttgctaaaaggatgagattcaagaaaagtaagagatgatgcctttccaactcaatgacattaggaayagtgttcacgacacatggtcctctgtttaatgagaatagctacttaccatcatgacttccagaaaaaaaaaaaaaagggtcaagagctctggctcaaggaggcaggatctaggctttaagtccctagagggcaggcactatggccatctgccttcactcctgaattactggcacatagtaaaagtcttggaatgtcacaaatattcagtagacaagagtcaatgacccagacagctaggaaagaattcccctaaaagtcagcccatattcccaagacctggggaatttgaaggaattggaagatgtaagaaaaaataaataaataaaaacatgctctgtaggaaaagaaattaagagttgtagattatgaagtgatgatttgaatagattttgcagactgaagattcttgggtattgctaatgtctacatccatttggtatgttgcaagtttttacatatgtatatatat

SEQ ID NO: 321125 - DNA, 435 bp, Homo sapiens
taactgtataggatagaatggctgggttatgtggtagatgtatatttaacgttttaaaagaaatatattcatgtataatttatatactatacaattcatccatttyatatatacaatccaatatttgttagtatactcacagagatgtgtaaccatcaccacagtctgatatttaaatattttcatcatcctaaaaagagaccccatacctattagcagtcactgcccaatccccactctcccatgtcacaattctcagccctatgcaagtaatccacttttctatttctatggatttgttttttcttttttttttaaattacactttaggtactgggatacatgtgcagaacgtgcaggtttgttacatagtatacatgtgccacggtggtttgctgcactgatccatcagtcaattattacgttaagtatttc

SEQ ID NO: 321126 - DNA, 606 bp, Homo sapiens
ttgattgagtggatatattagccattaaacagaatggagaaagcaactctccctccaagtcaaaataggttgctaaaaggatgagattcaagaaaagtaagagatgatgcctttccaactcaatgacattaggaatagtgttcacgacacatggtcctctgtttaatgagaatagctacttaccatcatgacttccagaaaaaaaaaaaaaagggtcaagagctctggctcaaggaggcaggatctaggctttaagtccctagagggcaggcactatggccatctgccytcactcctgaattactggcacatagtaaaagtcttggaatgtcacaaatattcagtagacaagagtcaatgacccagacagctaggaaagaattcccctaaaagtcagcccatattcccaagacctggggaatttgaaggaattggaagatgtaagaaaaaataaataaataaaaacatgctctgtaggaaaagaaattaagagttgtagattatgaagtgatgatttgaatagattttgcagactgaagattcttgggtattgctaatgtctacatccatttggtatgttgcaagtttttacatatgtatatatat

SEQ ID NO: 321127 - DNA, 625 bp, Homo sapiens
aaaattaaacagcaaagccatcaaatcttgagctttttttttgatgggagtgttttgattgcttatttagtctccttactcatcattgatctgttcaaattttctattttttatgattaattcttgataggttgtatgtgtctaggaatttattcatttcttctaaattattcaatttattgacacacatagtatcaaaaaagaatggacatacttaggattaaatttaatccgggagttgaataatctgtacactgaaaactaaaacattaatgcaaggaattaaaraagacacaaataaatggcaatacattcctagttcatggaacagataaattagtattgccaaatgaccatattacccatgataatctacagatgtaatgcagtcctggtgggaatgtaaattggaagagtcattgtggaaaatagcatggaggctcctcagaaaactaaaaatagaactaccatgtgacccagcaatcccacttaggcatatattcaaaggaaacgaaatcactatctcgaagaagtatctttactcccatacttattgcagcattattcacaatagccaagatatggaaacaacctaagtgcccttcaatgaataaatagataaata

SEQ ID NO: 321128 - DNA, 473 bp, Homo sapiens
ttaggttgttaatttgaaatctttctaactttttttacgtgggcatgtagtgctrtaaactttcttcttgacattgttttagctgtgtcccagaaattctagtatggcgtatgtctgttttcattagtttcaaagaattacattatttctgccttaatctagttgtttaaccaaaagtcattcaagagcagatcatttaatttctatataattatatgattttgagagatcttctttgtattaatttttctggcttactgtgctgtggtccaatagtgtggttggtatgatttcagttttttttttaatttgttgagaattgctttatggctgagtgtgtcatcaattttaacatgtcatatgtgaatgagaacaatgtatgttctgttgttgttgagtggagtattctgtagatgtcaactaggtataattggtcaagtgttaaattcaggtccttaatatctttattagtt

SEQ ID NO: 321129 - DNA, 435 bp, Homo sapiens
tgaaattcttatagtttttcagctccatcagatcagtttggttctttcttaaaattgttttttcatcttttagctcttgaatcattttactgaactccttagattctgtggattgagtttcaactctgtcccaaatcttgatgatattaattgctacccagcttctgaattctatgttatcatttcagccatttcartctggttaagagccattagtggggagctactgtggtcatttggaggtaagaaggcactctgccttttagcattgaggcaactcattttaaatccactcaaataattttgtgatttttcttttttgtttaatttaaaatgaaacttaaaaattctttaataccaattacatttgaatgtggcaaacataatgattttttaaggtactatgtttttctagctttgagttttcctaaacat

SEQ ID NO: 321130 - DNA, 618 bp, Homo sapiens
aacatgtttttgtaagaaaaccatgttcaatgctaaaacatgttatacagcataaatgcaacaaaatagtccaagtgacaatagagtgattaagcagccttggtaaagtaaacttacagtaaaaggccaccgggtgatctagtactacctttccagagccagattcaggcattcccatttcctagatgaagaaacagatgaaatgtatttgtataagatcattcagataccacctgttggaccagaatttaaaatggtttactttctgtaaggttagctgagagaaatgatgagagagacccaaggtcaggctagtaagtttattaacctgccaagctgcaacaccatagtcagaggaggcagccctgagcttacaaaaataaggggtttatatgggggagagagaccctggggttgtttgttggttaactttaccacayaacatctcgtgactggcttacaatataggaatttacaagacagtgtaacttaggtttatccacgtttctggtgatgtcccccatgccacctggagggctgtaagcaagtgtggtaaccttgctgtagcacctagataagggtccaggaatgcagctgcagagtattcagggtaagggt

SEQ ID NO: 321131 - DNA, 596 bp, Homo sapiens
ttttataatataaataatgctgcccaaggcagatacgaattagcagtcacatctacaggctttcagaatgtttacaaaagaaaacgttgtccttaaccatatacagaaacataatctacttctgtccaaactttataccagrctctttttggaaatctctcaaatctcccagctgacattatctcccagtcagaccattattcccgaaagtgtgatcaaggccctttcttctggctatcctatcactcctctctcagcctatgcccccaccattcagccatctgctacctggacaggattgcctccctccattttctcagatgtgaatgtattagagcagtttaaaacaggcaaagggaggaatattttctggtattatgtaattaaaaattccatttagttaacaatctttctggaaaaatatttctataacatttggctgccaataaaaatttatttaaattaatattttcaatgtttgtgatttcaaaatacatttttaagtgccatgctattttgttatcaacttttctttttctacaagtttctttctggcagtttgaactattctaataaagtgctttaattacaaagag

SEQ ID NO: 321132 - DNA, 607 bp, Homo sapiens
agttgaagttctaaaaatcttccagttattccagttcagagatacgctttcagttgaagttctaagcatcacaatagtctcactcttttattttaaccctttgaaaaatagatatatccaaaaagtgtcacagggaaaccaccagagtcccaaattctagttcaaccctcttactccttctgtcagcttgggggatagcttgcactcggtgttcccatgtataaactgaaaayactggaccagataaacctccaaaagttgttgatgggttgtattctgtttgttgaatttaagatacttcttaaccatgtgtagtaacactcccatcattgcaatccatttcttagcagtactgacattgaataggcttgttttagaaagtgagatcagatcagagagacctgggcttcagatgccaaagcctaattcctacctatctactctaaaggtcacagaaatttttgtaaaataataggtttcaaccttaaattcaaatttcctcaagtcagctccatagtttcaaccttggacagaattttactagtgtaaggagtcagggaaccaaacatttgaggtagtttgaggctagtggacagtcatttgacaa

SEQ ID NO: 321133 - DNA, 607 bp, Homo sapiens
agttgaagttctaaaaatcttccagttattccagttcagagatacgctttcagttgaagttctaagcatcacaatagtctcactcttttattttaaccctttgaaaaatagatatatccaaaaagtgtcacagggaaaccaccagagtcccaaattctagttcaaccctcttactccttctgtcagcttgggggatagcttgcactcggtgttcccatgtataaactgaaaacactggaccagataaacctccaaaagttgttgatgggttgtattctgtttgttgaatttaagatacttcttaaccatgtrtagtaacactcccatcattgcaatccatttcttagcagtactgacattgaataggcttgttttagaaagtgagatcagatcagagagacctgggcttcagatgccaaagcctaattcctacctatctactctaaaggtcacagaaatttttgtaaaataataggtttcaaccttaaattcaaatttcctcaagtcagctccatagtttcaaccttggacagaattttactagtgtaaggagtcagggaaccaaacatttgaggtagtttgaggctagtggacagtcatttgacaa

SEQ ID NO: 321134 - DNA, 614 bp, Homo sapiens
gaagtggttgctctgaaaatgggactcaattatttcagagttgttgtatatgggcccattacagagtgccactttctctattcaatttcaaatttaatgagacataaatcaagagagaagatggagaggtaaactgcttttattactgctaagactgatactgatgaacgtggcttttgactgcaggcactctgtttattaacagtgaaccycacaaatagacagacttacctaatctgtcacaggcagggctgtatcacacatgagtggaccccatgcctggaaacttgcaaatggaggaagagaacagaatatatgctctttgtgtctgatttctaaggagaaagaagaaagtgatgatccaagcatttttcatttattcttctcaaaattagcatttgacaaataatttcttctctcttgggaacgaacaagaaagggttatagagggtttctctataatgggaatctctctataagaaaagaaacaaaaggaatgagagaattatcttcttcatactagaacataaaccaaaatcaatcatcagtgtgaggatagtaattgattctgtgggtttgtacaaacttaccttggaagagaacgcagatagtga

SEQ ID NO: 321135 - DNA, 614 bp, Homo sapiens
gaagtggttgctctgaaaatgggactcaattatttcagagttgttgtatatgggcccattacagagtgccactttctctattcaatttcaaatttaatgagacataaatcaagagagaagatggagaggtaaactgcttttattactgctaagactgatactgatgaacgtggcttttgactgcaggcactctgtttattaacagtgaaccccamaaatagacagacttacctaatctgtcacaggcagggctgtatcacacatgagtggaccccatgcctggaaacttgcaaatggaggaagagaacagaatatatgctctttgtgtctgatttctaaggagaaagaagaaagtgatgatccaagcatttttcatttattcttctcaaaattagcatttgacaaataatttcttctctcttgggaacgaacaagaaagggttatagagggtttctctataatgggaatctctctataagaaaagaaacaaaaggaatgagagaattatcttcttcatactagaacataaaccaaaatcaatcatcagtgtgaggatagtaattgattctgtgggtttgtacaaacttaccttggaagagaacgcagatagtga

SEQ ID NO: 321136 - DNA, 592 bp, Homo sapiens
gccagcatgggcactggatccctgcaaggctgtggctggaccasgtgtaccataagcaggttccatggctgacactaaggaatgtggtatggtgcccagaagcttggtgatgccaggaaccacagagccctaaaaaggatgtcacagccctggctcagggagttcctaggtctgggctccccaaaaagctgcagctcttctccccttctctcttctctccttgttgcctgcaatgtgggatgcaaaagtgtttaaggcctgtttgtgttacagctcttttagtgttgccatttggtgggttctgagtgcttgtcctgcatccaggaagaatgaggcaaacagacaagtggagggtaagcaaaatgaagcggaggtttactgagcaacagaacagctcagacgagacccacagtgggaagctcctctctgtagccagggggtctcgatgagtgttcagctctcaccagagagggcagtttcccttggctaggcaggtcattctgatgagtgttcagctctcagcagagagggtagctcctttctgctaggtaggtcatctagacgagtgtccagctctcagcagagaggggag

SEQ ID NO: 321137 - DNA, 592 bp, Homo sapiens
gccagcatgggcactggatccctgcaaggctgtggctggaccacgtgtaccataagcaggttccatggctgacactaaggaatgtggtatggtgcccagaagcttggtgatgccaggaaccacagagccctaaaraggatgtcacagccctggctcagggagttcctaggtctgggctccccaaaaagctgcagctcttctccccttctctcttctctccttgttgcctgcaatgtgggatgcaaaagtgtttaaggcctgtttgtgttacagctcttttagtgttgccatttggtgggttctgagtgcttgtcctgcatccaggaagaatgaggcaaacagacaagtggagggtaagcaaaatgaagcggaggtttactgagcaacagaacagctcagacgagacccacagtgggaagctcctctctgtagccagggggtctcgatgagtgttcagctctcaccagagagggcagtttcccttggctaggcaggtcattctgatgagtgttcagctctcagcagagagggtagctcctttctgctaggtaggtcatctagacgagtgtccagctctcagcagagaggggag

SEQ ID NO: 321138 - DNA, 621 bp, Homo sapiens
atagtatttggccagcctacctctgtattaaattggcagaaactaaggcttaaaataatatattaaattcttcagtatgcagaagcttccaatttctatctgagatatgaagtcactagtagtcaggacactagatttcttttctctgccaagaactttcaaaaaaatagttctccctacactcatcataaaagattaacatacctatcatattagaaatcttacttataagttctatcattttatctagatagtttaacatgtctttgccagttctagctaattctatatttacctttggaggagctaaacttgggaaagaataaagatcagtttttgcttatgtgtgtgagcacacacacacacattatctcaaaagaaaagcaaaaactttcaatttttatacaaaaggaaattttatgaaattaattctgattctaccattgctttttcaaaacttctaacccaacaaagaccaaaaatcaacctttcattcttctcaatatagttggaataaactaaatttraaatagattggtacatgctgactttcttctgacagttgaagaggctgagtttaaagtgcacctgagtctacattgagagactccttgaaaatct

SEQ ID NO: 321139 - DNA, 525 bp, Homo sapiens
gtttccccacccccctcgtttggtaacttgattgtcacatgcacttcattgtgacttggttatgacttgtaatgtgattgcgacatacacacggtgtatcttatgtatttagaaatcttctcttctaattactcagaaagtaattctactgtctctttctcctttttaaaacattctgattaaaactgaaaatacattcagatatcattatttttgttttttcttctttatcttcagacttgttctttaaacttcttttttttttttaatttgaactatgggacagtcgagaagttaatttgggrtgggtcactttctgaagaccttttaaaataaattggatttcacctgctttttttcttacctggaagtcgacagaaatgctacctttatcaaaacaaagcattctgtcttctatttgtattatgagtattcacagtctaattttcctaaaattacatcttcatatgttaaacaaaatttttgttgccctagggaaagatgtatagggtaatttcatcccac

SEQ ID NO: 321140 - DNA, 507 bp, Homo sapiens
acaattttagtggggaatttggttttcaacaatgacaaattaaaacagaaaatcttttctttcaaggatgtatgaaaattttcagcatgtataagtgtacaatacattttgtttttctttattaagggaaatggtacatttgygaaaatgcggtataccttttaaagaggaaagatgttttgcaacatttcaactaaacaggaaagaaatgatagaccatttatttggacttgtgtgttttatgccttctttcatcactttaaggttattaaaaattaggaaatttttctaataaactgaatggaacctgaaacttaagtcataattatgtgagtggtaaaattagtagacatttcattctaatattgagaaggaaattaaaaccaaaacttttacactgtaccaaaagtagaaatttgttatgaattagagatgtatttcaaatacaagaaaaaggcggattttttattgttaataatctacttaatgtaggagatattgttacac

SEQ ID NO: 321141 - DNA, 507 bp, Homo sapiens
acaattttagtggggaatttggttttcaacaatgacaaattaaaacagaaaatcttttctttcaaggatgtatgaaaattttcagcatgtataagtgtacaatacattttgtttttctttattaagggaaatggtacatttgtgaaaatgcggtataccttttaaagaggaaagatgttttgcaacatttcaactaaacaggaaagaaatgatagaccatttatttggacttgtgtgttttatgccttctttcatcactttaaggttattaaaaattaggaaatttttctaataaactgaatggaacctgaaacttaagtcataattatgtgagtggtaaaattagtagacatttcattctaatattgagaaggaaattaaaamcaaaacttttacactgtaccaaaagtagaaatttgttatgaattagagatgtatttcaaatacaagaaaaaggcggattttttattgttaataatctacttaatgtaggagatattgttacac

SEQ ID NO: 321142 - DNA, 625 bp, Homo sapiens
cttgccctagagatctgtgggacttggaacttgagagagatgatctgaatttatatcttatgtttaaaaaggaagcagagcataaaagtttggaaaatttgtagcctgacactataaaaaagaaaagcccattttcttcagagaaactcaggctggctgcagaaatttgcacaggtaatgaggggctaaatgttaatcaccaagacaatggggaaaatatctccagggcatgtcagaagacttcatggcagactctcccatcacaggccttgtggcctaagaggaaaaaatggttttgtgggccaggcctagccttgcagctttgtgcattttgaggcttggtgccttgtgttccagcccagaccaaaaggggccaatgtacaactcaggctattgcttcagagggttcaagcctgaagacttggcagcttacatgtggttttgagcctgtaggttcacagaagtcaagaattgacttttgggaacctctacctagctttcagaggatgtatggaaatgyctggatgtccaggcagaagtttgctgcaggggtggaaccttcatggagaacctctgctaaggcaatgcagaagggaaatatgggatcagaaccaccacacagagt

SEQ ID NO: 321143 - DNA, 549 bp, Homo sapiens
caattatctgttcattacacattggcctaaaagcaatgcactctggaggtggcttgtctgagtgtcacaactaaactaaaatgattaaggtttagcaattagaacagaagagattatcgttcccatcgaaacagtaccagtgaccaacagtgtgcaaagtggtgttcagatctcaaagacttagacaggtgctgaagatgagactgggggractggtccacataatggaatgggccacagtgatgaggcttttaggaagatctgggtgtcagttgtgcctgaagtcatggttctgcattaaagcgaggattgctgggatagaatacagcttcaaaaaaaaaaagcacactgtatgtatgtttgtaggtatatttggtggatgaagatcgtcatcctacttgaccacacacttaaatgtaaatagattaaaactacaaaatatggacaggaggaaacaagcttcagcagaagtttaaaaaatgcagatgacattaaggtcagagtagttaaataaatatgtgaagaagactgacataagacaaggaatgg

SEQ ID NO: 321144 - DNA, 580 bp, Homo sapiens
gccacagtgatgaggcttttaggaagatctgggtgtcagttgtgcctgaagtcatggttctgcattaaagcgaggattgctgggatagaatacagcttcaaaaaaaaaaagcacactgtatgtatgtttgtaggtatatttggtggatgaagatcgtcatcctacttgaccacacacttaaatgtaaatagattaaaactacaaaatatgsacaggaggaaacaagcttcagcagaagtttaaaaaatgcagatgacattaaggtcagagtagttaaataaatatgtgaagaagactgacataagacaaggaatggaaagactatgccctacctaaagacattcaaagtttaaaattaaggggatcataaacctaataatgtacagggccattgaaattaagtagatcagcctgccagttctgccctctggctcacaggacataaatcctggttaaagtgtagatagagaggagtgagaagaaatatacacaacattgtatctcagaaggtatagagtggcgacagcaggcttcttctcttaaagttagtattcccagtgtatgataggttttattttaa

SEQ ID NO: 321145 - DNA, 543 bp, Homo sapiens
gtgtgtatgtatgggtagaccagggaagtaacctaaaatcactgactcctatcacctacaattgagtcaaacaagggaaggcagaacaaacctagagataagagctggaatggtgactcatatctacctatgtgcagcactagtatattggaaaacactaggtactatatattttatgtatcacatatatatttttatatataaatatgtgtacacaaatatatatacatatatactttatatacatagtatatgcaaatgtattatataaattatatatattaaatatatcatgtatgtagttctatgtgattatatatgtrtatattgtgttatgtgatatgtgtgatatgtcgtgtgattatatgtgattatatatgtgtatataatatatatgtatacacatatattatcacatataaccaagtttgatgagtggtgtttggtaggtgctatctcctacagctgataggtggtttttggtaggtgctatctcctatggctgtatttttttttaaccaaataaaattaaaagtggaagaa

SEQ ID NO: 321146 - DNA, 495 bp, Homo sapiens
acatgtggggattatgggaactacgttttcaaatcatatttgggtggggacacaaccaaaccatattaagtggtgtccaaatattaacttgaaaaatgataaaactaggttcaaatttcaaataaygtgtcaggataaattccaatgtatcagatatctgacaataaaaacaaatgaacaaaaacctcaaataaatagtcaaagaaagcatgctatactcttttgtaacataggagtgaggtatttcctaattgtgactcaaagcaacaactacaaaatttgatacagtttactatacaaagataataaaacattatttttcatacagaagtttactataggcaaagaaaaaaatcaactacactcaaaaatgttcaacaaatgaaatatgatctggtagaagaaatgaaaatatttggattcagagagctattgcctcttttgtctttaaaatgtgactagtcctctttggttatttcaaggttaagaaaaact

SEQ ID NO: 321147 - DNA, 495 bp, Homo sapiens
acatgtggggattatgggaactacgttttcaaatcatatttgggtggggacacaaccaaaccatattaagtggtgtccaaatattaacttgaaaaatgataaaactaggttcaaatttcaaataacgtgtcaggataaattccaatgtatcagatatctgacaataaaaacaaatgaacaaaaacytcaaataaatagtcaaagaaagcatgctatactcttttgtaacataggagtgaggtatttcctaattgtgactcaaagcaacaactacaaaatttgatacagtttactatacaaagataataaaacattatttttcatacagaagtttactataggcaaagaaaaaaatcaactacactcaaaaatgttcaacaaatgaaatatgatctggtagaagaaatgaaaatatttggattcagagagctattgcctcttttgtctttaaaatgtgactagtcctctttggttatttcaaggttaagaaaaact

SEQ ID NO: 321148 - DNA, 604 bp, Homo sapiens
gggcatctctcaactcagtcaagttgacacataaaatgaaccacgacacactttatctcactgaaatatcaaaatatttgcaatttttagggtcatgtatcctgtcaaaggccaccyggagagcattagaaacacttctttggattagaattttgattatctgactacaaaatctatatatgaaccttctattttcttagaacaattattgggtttacagatgtttttgtaaaacacaagaaaaactgtaagggatttcaggacttctgtaattggttcttttttcaagttagttaaagtctttggaaaaaccaaatgatagttttttatttaagccagaggttaagtgatgattctacctctacaataacctcctctgttcatcagtgccctcctctgttcaccaatacattttaaaacaaatatccatatgttttacaatatatcttaaaaataatattaattggtatataattgaataaattgataattaaaatgggaagagagtagctgtccaaacgttctctcagcacagacagttcaatgttttaagcttctatagtatacatatgcaggagccatgtctatggttctccaaaacatg

SEQ ID NO: 321149 - DNA, 518 bp, Homo sapiens
gactgattttaggcaatgaggttttaggggaagtcaacraagagactttttgaaatgttttcttacgctgataaaaggagagggtaacttatagtagaagttctgtatctttgcttgactctacttttttattattcaaatgtaattggcatgcttggaactggggccattatcttgctatgaagaggtgacaaatgtaagatcaaatagcttattgcacttaggtatcaaactcttgcactccagcaatcctcccaccttggtctcccaaagtggcaatacaggtgtgagccaccatgcccagctggagggtcatttttaaaatacagttctctgtacccctagctcacaaattccaattcagcttttattttatttatttttctggtaaattttgaagtaactttttagctttttgagcttctaatgcaaagtaagatcaggaaaatttaaagctgtagtttaccattatacaattagtatttgccagacattttgctatatattttatataggtc

SEQ ID NO: 321150 - DNA, 548 bp, Homo sapiens
catgttctactgtcttaaaacaaagaaaagccatttatctcagggcacatattgatgctgaaaatgattcaacttcaccacatcataagcggaaccgtcagaagcatattcctggaaaccaaagcctcttgggagaaagttcaaggtcagagtttttaaactttagacatagacatatgttttaatagaagacggtcaaatatcacccacctctctctcactttctttatatatactaaataactaaaataatacaaaaaaggatctctaaaacttccatattgaagatataatacatattcgcatctttaaaatggrctatgatcacactggtagcatcagtttgaaagtgaaaaatgtaacaatatggcagataatttcccccaagagagttgtaaacattgttgagagctctcgttgtttttaacatgttagaaataaataatgaggaaagatcactggaagagtgattcagattatgcaaaagtcaataacctctatatgcctcaggtccttcatttggaaaatgtacagaataaaatatatgt

SEQ ID NO: 321151 - DNA, 548 bp, Homo sapiens
catgttctactgtcttaaaacaaagaaaagccatttatctcagggcacatattgatgctgaaaatgattcaacttcaccacatcataagcggaaccgtcagaagcatattcctggaaaccaaagcctcttgggagaaagttcaaggtcagagtttttaaactttagacatagacatatgttttaatagaagacggtcaaatatcacccacctctctctcactttctttatatatactaaataactaaaataatacaaaaaaggatctctaaaacttccatattgaagatataatacatattcgcatctttaaaatggactatgatcacactggtagcatcagtttgaaartgaaaaatgtaacaatatggcagataatttcccccaagagagttgtaaacattgttgagagctctcgttgtttttaacatgttagaaataaataatgaggaaagatcactggaagagtgattcagattatgcaaaagtcaataacctctatatgcctcaggtccttcatttggaaaatgtacagaataaaatatatgt

SEQ ID NO: 321152 - DNA, 554 bp, Homo sapiens
tggaatgacacagtagagaaacagaggagtgatgtctggacactgaggcgagttctgctgggggtggtcagagaagaatctggctgctgagtggcctgactccaggtgaagaccaccttcccattccatcccctcttttagctccccatccatcttgctgagagccacttccacccctcaacaaaacattgcactcatcctttgagtctgcatgtgatttaattcttttgtgacactgggcaagagcttgggwtacagaaggctgtcacattggccctctgcctttgcaataaggcccagggtccatttagctgattaacacacaagtcatttgcagacatcaaagctgaaagagcttggtaacactagggttgcaggcacccacccctaaacactaccacagggccaagagcccaaagcacttgccccagcctctgcacctgcccatctacatgcttcccataaaggtttgagctgcagttgggggtgaccaaacaggcaagccacactcctgtcgcatgtcttgtgaggggaatcgggcaatgctactgttt

SEQ ID NO: 321153 - DNA, 484 bp, Homo sapiens
ttactgctggttattttttagaacacaaatgttgcatcatcttttgataagttgaagatgctacattcaaatggcagatatcttgtcccattctactaatactttctagctctatgaccttaagaaagatttggtggcttaggtgggtctggttatgcatcccagttttgtaaaattggtaatgtatagactcacattttaaagcttcttgtgtagaaaggcaaaatacggcagrcatttgtagataagacagttatattgaagtatattggtagaatgttttagttttgaagaacaaggagggtgctgagaatctgagagaatgagagttatgaaagcataatggagcttattatgggttaagaaatggataggataaatcggagatagggtataaattcttgttcttttaaactgatggtatataggcataataatgcatttatgtatcttaaagtggatcctctaaaggtcagaactgtta

SEQ ID NO: 321154 - DNA, 516 bp, Homo sapiens
gtgctgtgattctattattccgcatttaagaattttaaggtagctgaattttataaaaggacagtaaattacagacttcactacactttggttatattcaggctttaattccataattcagggaggccataaataaattactttaaacacatgtaacagaaatatatttattccttacaccattttctcatgtgatgtgaagaaaggtttttttaggtcatctatccaacaaatttggaagagcatggttcaaaagtgatcaggacccacacaaaaagaaaaataataataaagttaagaagagatatgtcaggattatgtgagaaataaatacraatcattgacatctaatagacaagatgaagatatttggacctcatggagaattttatttttaattatttatttatttttatctttttgagacagggtattgccctgttgcccatgctggagtgcagtggtaggatctttgctccactgcaacctccgtctcccaggttcaagtgattctca

SEQ ID NO: 321155 - DNA, 598 bp, Homo sapiens
gtgttggaaatgggctgaaagtgtgttccttctactcaagaatggctcttgcagtgcatactgagcaaaatctcatcttctgtctgaatttgggacacacacaaatgygcacacacacagcgttttttcttcggtttgtaggcatcaaagccagagatggtgaatgctatggctctttgagggtgttttagactagaatagagaaagtttccacttttattgctaacaaatggaatttctgccttcatacagcacacttggttttttagttaaaaaaataagtaacaaacatataaagaagtgtacaaaaaaacgagaagaaagtacaagattttcctttcaaatacaaatttcatttgagaatatattcattttcctttattaattttcaccccgaaagctctcagtatgtaaaaaataaaataataggcatcatttttccttaaatatgttatcttttcactgattatagaaaaaaagcctttcctaaaacgagggactacaagttacaagagtagggaaaccaaataaatacatgtagaaataaatatagccttcttttttttttaaggacttcattatcctgtctcagaaatga

SEQ ID NO: 321156 - DNA, 598 bp, Homo sapiens
gtgttggaaatgggctgaaagtgtgttccttctactcaagaatggctcttgcagtgcatactgagcaaaatctcatcttctgtctgaatttgggacacacacaaatgcgcacacacacagcgttttttcttcggtttgtaggcatcaaagccagagatggtgaatgctatggctctttgagggtgttttagactagaatagagaaagtttccacttttattgctaacaaatggaatttctgccttcatacagcacacttggttttttagttaaaaaaataagtaacaaacatataaagaagtgtacaaaaaaaygagaagaaagtacaagattttcctttcaaatacaaatttcatttgagaatatattcattttcctttattaattttcaccccgaaagctctcagtatgtaaaaaataaaataataggcatcatttttccttaaatatgttatcttttcactgattatagaaaaaaagcctttcctaaaacgagggactacaagttacaagagtagggaaaccaaataaatacatgtagaaataaatatagccttcttttttttttaaggacttcattatcctgtctcagaaatga

SEQ ID NO: 321157 - DNA, 486 bp, Homo sapiens
tcaaaaggaagaggcaaaattcctgacgtagcagcttatctttaacaaatattaatacatccacacacacccccattatttttcttctcatttctgataacagaagataacacagcccgggtgtgtttcttttcgtacttaggaaacagtagagaaagcataacctcacagactccaaactgagtaattcttgagtcatgctttagctatggtcccttagcacagtttgataactggaaatcacaggtaattcatcagatattatcagttccaaatttgacatcagaaaaaaaatkataatattagtgaaagccataaaatcagagtggcatattagagttggctctgttgaagaagcatctgtaaaaatcctaagaagtaggtatgaaaatatctggaccaggcaacataaaattttaatgtacatccaacgctgcacgctgtcaatcgtggcaaaacatatttgtaaattctgtttgagtttac

SEQ ID NO: 321158 - DNA, 486 bp, Homo sapiens
tcaaaaggaagaggcaaaattcctgacgtagcagcttatctttaacaaatattaatacatccacacacacccccattatttttcttctcatttctgataacagaagataacacagcccgggtgtgtttcttttcgtacttaggaaacagtagagaaagcataacctcacagactccaaactgagtaattcttgagtcatgctttagctatggtcccttagcacagtttgataactggaaatcacaggtaattcatcagatattatcagttccaaatttgacatcagaaaaaaaattataatattagtgaaagccataaaatcagagtggcatattagagttggctctgttgaagaagcatctrtaaaaatcctaagaagtaggtatgaaaatatctggaccaggcaacataaaattttaatgtacatccaacgctgcacgctgtcaatcgtggcaaaacatatttgtaaattctgtttgagtttac

SEQ ID NO: 321159 - DNA, 424 bp, Homo sapiens
tgttcaagggatgagcatttaccaaaaaatgataaggataaagaaagagagttaagggctatataattatgatttggattcagcctgagtatattttaattttgagttggggggtgtgtgttaattgtttttacactattgtctgaattttaaaactatttctgaagcagtcttcaatcattttctagatatgtataagtgtgttttrtttcaactacgattactatacttatgacatgcagtttgttagaatcctttttgagttttataagtacatcgtgtatgtaagagacagaagttatgtgtgctcaagcaggtaattgacaaacttgagcttattcatttactttcaatataaaaaaaaaactaaaatgtgtagcacattgaggttatttatctggattaaagaaggttatgtgtgtac

SEQ ID NO: 321160 - DNA, 611 bp, Homo sapiens
ttaaaactatttctgaagcagtcttcaatcattttctagatatgtataagtgtgttttgtttcaactacgattactatacttatgacatgcagtttgttagaatcctttttgagttttataagtacatcgtgtatgtaagagacagaagttatgtgtgctcaagcaggtaattgacaaacttgagcttattcatttactttcaatataaaaaaaaaactaaaatgtgtagcacattgaggttatttatctggattaaagaaggttatgtgtgtacacatgcacagtaaatgctcttattttatttttttattagatggctactgagtgtgttagttacaattacttttttttcagaaacagaatttgtagtctcatgagcatgtattttggaggaaacagataagaacactgggggccagattattattaggtctggctatctccagaaatatatatttgaamaatacgatttcagatactaaaagtgaaaataggaaggtcagcctagccttgttatggtggtgctattgtagagtggttgcagtgatgaatggagttggagagatttgagatttattttgaagatagaaaaagagcttgaaaaaaccag

SEQ ID NO: 321161 - DNA, 558 bp, Homo sapiens
agaacggagatcaagaatgcagttcaactcagaaatgttattgagaatcaactgcaatgtgcaagtcgggaccaaagaacgtctgagttaggtggccaagtcatattcaaggttgtcagctcattccagggtgktttcagttcttcaaagtaagggaaggcctttaggtatgttaagaaatgccataggtcctgtcagaaatagtgaattccccaaacatgcactagagagaggagaatgattgaggacctcaaaagtttgaaagccaagtatattttaactgcaactgacatgaagcattaacccttgtgctatttctactgacttctttgcaagatattgatggtagagttgagaagaaaaacacataaattaggtctcacatttttcagatcactgtcagtgtagaggtgacaggaaatgaatgtgtttcctgagatcactcaatatcttgatagaatcaaaagcagaaggcattgattcgacagggaggaaaatgaaagaagcggcatctgtagaacttcgatatatctgaatgttggccatcactcctacatt

SEQ ID NO: 321162 - DNA, 583 bp, Homo sapiens
atgtgtagacaatatagtacagtgcctcacacacagaaaaaaatgttagctattttcattattttatatattttttcttctttgacattccatgtgtcttaaaataatatgtctagataaattaaaaataatttacccagaaaaataaaaatggaagcatccaaataataagattgctctaaagtgatgcttcctttttaatgaaaaatcaaatactaaaaatgccattacaaaaattaaagaataaaaacccacaattttcaatccagccttttcwgaccaaaatagttgatgactattttcctttattaattcatttaacaaatgtttgttaggaaatgtatctactcagcccttagggtacaaaggtgatcgaggcaattttacaaaattcctacttgcaaacagcttacattcctatggggagctaggcaatacagcaaatgaacagatatacaaacaaaatagtgaaagagaaatgttcacatggtagcatatagacttgctgagggatgacctcttccaaaataaaaagatgtgacggtatctacccgtggcaatagaattaccatccatttatacc

SEQ ID NO: 321163 - DNA, 610 bp, Homo sapiens
atagtgattacatgaaaaacaaataaattggtgttgcagagcaaaaatgtcataagcacacactcaagaattagtcactttcaagctgcacttaagatctgaatagctaaggacaagctacttagcatatctaattctcagcaaactcatttcaaaattgaggataatcataacaactttctcaatatggaatggtttaatttaagcatttggcacatttcttgtcatgctaagtgtttaacaaatattagcacatcttcttccctttttttgctttttaatttgtcttctctttcttcttctgaaagtgttactagagttgaagcttgaagtaccggaagagttgaaggtgaarcacaatattatctgtgccaaggagattcaccaagagtgtaggtaattgttctagagctttaattctttgaactttgcacaaaagtaatttttttctatgttgctagaaaattttaaggatggattttctatttataaatggggaaaaacaactagccaaggggaaagatcaagctcacagttttcctaatattactgaaaaatcaagtcacagattaattgtataagaatcaataataacacaaagatcacttaa

SEQ ID NO: 321164 - DNA, 582 bp, Homo sapiens
cattatatatgaaagtaggcctaacagttggataaaagagtttcactttaaagtatctttctctggttttagtatttgcattgttcttataaaccagaaaagtggcaatattatttttcacattaagtatactaacagaggcatgaaaaaaataactgttcctggtaagatataataattggcataaatggtaaaatctagacaacacaacaaactactaaacacaacgttctacttaaaagtataagacctgaataccagattgtgaattaygattatggaggataatagaaaattgagatcagggctagatggatctagtaactggtgtccccgttttccctaataaggagtggaatagtacaatatgcactgagggctatctctacccagattgcaaagagatgtaacatagcatgtgacattttgagagagttatttgatagaaaactctgtgaagggagagataagatcagaatgtatgtgtgtatgtttgtgtgtgtgtgtgtgtgtgtgtgagagagtgagagagagagagagagagtgcttatgcaatgggagaagtagtggttgggacagaag

SEQ ID NO: 321165 - DNA, 582 bp, Homo sapiens
cattatatatgaaagtaggcctaacagttggataaaagagtttcactttaaagtatctttctctggttttagtatttgcattgttcttataaaccagaaaagtggcaatattatttttcacattaagtatactaacagaggcatgaaaaaaataactgttcctggtaagatataataattggcataaatggtaaaatctagacaacacaacaaactactaaacacaacgttctacttaaaagtataagacctgaataccagattgtgaattacgattatggaggataatagaaaattgakatcagggctagatggatctagtaactggtgtccccgttttccctaataaggagtggaatagtacaatatgcactgagggctatctctacccagattgcaaagagatgtaacatagcatgtgacattttgagagagttatttgatagaaaactctgtgaagggagagataagatcagaatgtatgtgtgtatgtttgtgtgtgtgtgtgtgtgtgtgtgagagagtgagagagagagagagagagtgcttatgcaatgggagaagtagtggttgggacagaag

SEQ ID NO: 321166 - DNA, 560 bp, Homo sapiens
acagggtgactaaaataaaaagttaggtttttcagcaaaacagaactaaaggaattatcaggagctggaataaaagtgcaccaagaaacagtaggaggagaaatttaatttaaatttgcagagatgctcttccattcattgtaattcagagatgaggtttttggccttaggatccaaaccaattagtaaattaagtattaatagtaagagtggagtctttgactccttgtgctttaggtataggctgtatttaatgaatyccttccatacagtagagtatagaaagacaagagatactttctttacagtagagaaatctgaaaagtactacctcttccagaggatcaaggtaaacaaaaacagtcatacatcatgtaaatagcacatactcttgctagaatgtgacaaagggcacacgacctgtcttgtcttcctctaaatatcttataacccaggactagaatgagaaaaaaatcaaaccaattgcaatagaaggacatcatacaaagtatctgaccagtactccttagaacttataaggccatcaaaaaacaaggtaa

SEQ ID NO: 321167 - DNA, 560 bp, Homo sapiens
acagggtgactaaaataaaaagttaggtttttcagcaaaacagaactaaaggaattatcaggagctggaataaaagtgcaccaagaaacagtaggaggagaaatttaatttaaatttgcagagatgctcttccattcattgtaattcagagatgaggtttttggccttaggatccaaaccaattagtaaattaagtattaatagtaagagtggagtctttgactccttgtgctttaggtataggctgtatttaatgaatcccttccatacagtagagtatagaaagacaagagatactttctttacagtagagaaatctgaaaagtactacctcttccagaggatcaaggtaaacaaaaacagtcatacatcatgtaaatagcacatactcttgctagaatgtgacaaagggcacacgacctgtcttgtcttcctctaaatatcttataacccaggactagaatgagaaaaaartcaaaccaattgcaatagaaggacatcatacaaagtatctgaccagtactccttagaacttataaggccatcaaaaaacaaggtaa

SEQ ID NO: 321168 - DNA, 630 bp, Homo sapiens
tgaaaaatgataaagaaagcgaaaatacacacccataagaaaaatgttaaactcaaaaagcagattgacattggaaatgaatagtcaagccagaagagtgaatataaatgtgactagatatgcaacattttctttatcttcactattaatgagggaaatgcaaattaaagcaacttccatatttggcaagaaataaaaataaataaataaaaaggcacttctatgaattttgataggatcataaataagtatagytttgcaaagcaatttggcagattctatcaaaatttaaaacatgtctagtctttgtcccagcaattttcttttcagaaatgtggtctacagaaataattatagatgtgcacaaagagatgtgtgatataaagtctactacagcgactattacaacaattgagaacaacttaaagtttattaacagataaattattttattttatctgtaaaattcacaatatgggacatagtacagctgctataaataataaaatgaatctttagattaatataaagtattatctataagattatatttttaaaagcagatttttaggacatttcatatttgattcttatttgaaaaaaatcatatttgtatgcatacacatatgc

SEQ ID NO: 321169 - DNA, 500 bp, Homo sapiens
tgtgatataaagtctactacagcgactattacaacaattgagaacaacttaaagtttattaacagataaattattttattttatctgtaaaattcacaatatgggacatagtacagctgctataaataataaaatgaatctttagattaatataaagtattatctataagattatatttttaaaagcagatttttaggacatttcatatttgattcttatttgaaaaamatcatatttgtatgcatacacatatgcatacattaacacacagaaagagtacgattgttaaatgtaaatacaaatgatggatattgtttagcactggtgaaatttgtatatttggggaaggattaaagggcaagggataaaggttaactattagactacaagtctatttgaattatttgaattgttttacaaccccggtacttttattactacaggatgaaaaaactgtttgcacattagtatatataatgtaaacagaccatttttgtat

SEQ ID NO: 321170 - DNA, 569 bp, Homo sapiens
gttttacaaccccggtacttttattactacaggatgaaaaaactgtttgcacattagtatatataaygtaaacagaccatttttgtatatacacaacataaatgcacacatcctctctcagaacatggaaggcatgttgatgttagattactttatagtggtattatgtgctaagtaactattttattagcttagaaattaaaatattatatacagcatgtttttgagaagttattttaaattaccatactgaaaagttttttgaatatataacaattaacaaatacctttataattgaaagtattctttaaaatcatttctctcattcatatccatttgataatgtttcaaaaatttgtttcttctaacttactcttgcttaatgctaaactaggtatttttttttcttagggggatattgtcatgaataattttgtattattttcttagagttttcttctactttgtaggaagaagactcactatctgagcgtttctttaaacatgttattaaatacaaacactttcttatattggataaaggcattcttcagattatacccttgac

SEQ ID NO: 321171 - DNA, 529 bp, Homo sapiens
attatgggagagacaagaattttttttttttgagacagagtttcgctcttatttcccaggctggagtgtaatggtgcaatctcggctcactgcaacctctgcctcctgggttcaagcaattctcctgcctcagtctcccaagtatctgggattacaggggcccaccaccatgcccagctaatgtatttttagtagaggcagggttttaccacatggccaggctggtctygaactcctgaactcaagtgatgtgcccgccttggcctcctaaagtgctgggattacaggcttgagccgtcatgcccagctagaagaattttaatgcagatggaataagaaagctaatccccatattttgtctattgacagaaagacagtaggtaatatataaaactaacaaatcaatataaaataatataatcctaacaatagcgattcaaaggtaaataagaaacataaacagagataaaagtggaaacctctgggcatgcaagttggtgttgatgatgagatgaacaagctttactgt

SEQ ID NO: 321172 - DNA, 655 bp, Homo sapiens
tattactgagtctgggcatctttaccaatgttgattcccatgttttctctaggaaatttcttaaattcctctgtccattttccaatgagtcacttgtctatgggggaatgcgtgtgaatgctagtgtgtgtcttccaggcactctatggctataggctgcaaagctcaacagttaacttggattccccgtgcatttttttcctcctcaacagtcataaaaaataatgctctcagctgaattctatattttcctaactttttgactaaggtctgtkttgtttttcattatttttatctcttttctcccagttacctgtaaggcaaatacctagttcagttctcgcagactgtttcaaacacaaccatgtggcacagtatccacaggaaaaatcacacataggagaaattcacacaaaagcacatttttttttttaattttactttaagttctgggatacatatgcagaacgtgcaggtttgttacataggtatacatgtgccatggtggtttgctgcacctatcaacccatcatctaggttttaagccccgcatgcattaggtatttgtcataatgctctccctccccttgctccccacccctgacaggccccagtgtccctgcatgtcccatccatgtccctacaaaggaaatga

SEQ ID NO: 321173 - DNA, 589 bp, Homo sapiens
atgaactgaaaatgaaagaaacatacagtatgcatatggattttactcactaccccagaatgatgcaaagttaattcatttgtttgaggatattcaggaaaaacgaaacccttgtatatgaaccactcactttgcttagtcttattcttggcagtctagttttgtctatattgaaacagttaacttacattgacattagaagagcacgagcacccagatttaatccaaaaaccttgacccaaccaatatatgttaatcttaaacacaatatgttatacatagtagattgttaaaattttagcctactttgtaatgagaactttcctagtttgacagaaatagytctataaggtacagatattggcaccttatagagacataaactaatcgtttactcagcttaaatacagaaatatcaaattaacctaccaagaacaaatacagacttttttccccaaatatatttaaaatgctttccaagatacttatcactggattgatttcttagtgcagactgttattaacagaatactctgggctgagtagtttaagctatacaaatgtatttcacacgtttcagaggctgaga

SEQ ID NO: 321174 - DNA, 480 bp, Homo sapiens
aaatcaggatgtcagtaagccacattccctctaactattcagggaagagtcattatttgcctcctctgatagctgtcagcattccttggcttgttacttaaattacttgaattattgatcttaacaccttactttaatctttgcctctatgatcacatcacattttcctcttgtatctgtgtaaaatccccctctgcctctctatcttataagcacaattgtgatttcatgtaagacccactttgataatccaggataatacccctrtttcaagatccttaaccacatttgcaaagacttcttttgccatataagatattactcacagactgcagagattagaatgtgggtattttttgtgcgaccattgtacagcctaggagaaagaagaagacatataaaactttaactttttgtaaataatattactgtctactcactaccaaaaaatcacagacaaattattataaataagtgact

SEQ ID NO: 321175 - DNA, 537 bp, Homo sapiens
tggtttttgcaacccgtagaccaagagattccctcgagtgcctaggccaccagggccctgggtttcaagcacaaactgggaggctgtttgggcagacactgagctagctgcaggagttttttttgtttttttgttttttttgcaccccagtgacasctggaaccccagcgagacagaaacgttcactccccttaaaaggtggctgaagccagggagccaagtggtcttgttcagtgggtctcacccccacagagcccagcaagctaaggtcgacctgggacgctggaggttggtggggggaggggtgtctgccattactgaggcttgagtaggcagttttcccctcacagtgtaaacaaagccgctaggaacttcagactgggcagaacacaccacagtgcagcaaagccgctgtagccagactgcctctccagattccacctctctgggcatctctgaaagaaaggcagcagccccagtcagagccttatagataacactcccatcttcctgggacagagcacctgggggaagggg

SEQ ID NO: 321176 - DNA, 537 bp, Homo sapiens
tggtttttgcaacccgtagaccaagagattccctcgagtgcctaggccaccagggccctgggtttcaagcacaaactgggaggctgtttgggcagacactgagctagctgcaggagttttttttgtttttttgttttttttgcaccccagtgacagctggaaccccagcgagacagaaacgttcactccccttaaaaggtggctgaagccagggagccaagtggtcttgttcagtgggtctcacccccacagagcccagcaagctaaggtcgacctgggacgctggaggttggtggggggaggggtgtctgccattactgaggcttgagtaggcagttttcccctcacagtgtaaacaaagccgctaggaacttcagactgggcagaacacaccacagtgcagcaaagccrctgtagccagactgcctctccagattccacctctctgggcatctctgaaagaaaggcagcagccccagtcagagccttatagataacactcccatcttcctgggacagagcacctgggggaagggg

SEQ ID NO: 321177 - DNA, 525 bp, Homo sapiens
catttatgtctataaagaaaaacttctcatttgttacccagtggtataatttataaaggaaacataggataaatgcttgattatttttatttaggtaaagttcaaaaataatgaattggttctttaatattcttaatgttgggaaatttgtgtgtgtgtgtgtgtgtgtgtgtgtgtgtgtgtgtgtstgtgcattgttttgtttttggtatcattaagaatgaataaactggccaggtacggtggttcacacttgtaatctcaacactttgggaggctgaggcaggaggaccacttaagcccaggagttcaagaccagcccccatctctacaaaaaataaaaaattagccaggtgtggtggagcacacctgtagccccaggtactcaggaagctgaggtgggagaatcacctgagctcaggagttcgaggctgcagtaagctgtgattgtgacactgcactccagcctgggcaatagaccaagatcctgtctctaaaaaaggcataaacacagggatttaaata

SEQ ID NO: 321178 - DNA, 568 bp, Homo sapiens
gagattgacctgaaaggtatgggcagaatgggccatgtgtgtgtcagctacccccatctctgatgaaaagctatgtgtgtaatagctaaatatcgctcctgaaatttgtatctcctagaaaagaggagggtgtctaaagtttggcatacactaaaacacaaaaacatcattctccgtctagatttattagggaacctacacaaacgaccagaatatgtttttattttcggtactatggtttattttgcattctttttctgtaattggttccacttcagtttctatgatatttcctagaaacttaaattacagtaagattaggtcgaagtagatatttgtatttgatttattttcagttcctatagttttttagaacattaatttacatttaaattttaaaagataaattttatttttgaagttctgtatattgccatgccacttaaatcaacttagcayacctgctcccctgggcacttcttgccttgctgtacttcttctttctatcttccttctctttccttttctcttaagcattaataagctgtctgaacactgaaccagactg

SEQ ID NO: 321179 - DNA, 568 bp, Homo sapiens
gagattgacctgaaaggtatgggcagaatgggccatgtgtgtgtcagctacccccatctctgatgaaaagctatgtgtgtaatagctaaatatcgctcctgaaatttgtatctcctagaaaagaggagggtgtctaaagtttggcatacactaaaacacaaaaacatcattctccgtctagatttattagggaacctacacaaacgaccagaatatgtttttattttcggtactatggtttattttgcattctttttctgtaattggttccacttcagtttctatgatatttcctagaaacttaaattacagtaagattaggtcgaagtagatatttgtatttgatttattttcagttcctatagttttttagaacattaatttacatttaaattttaaaagataaattttatttttgaagttctgtatattgccatgccacttaaatcaacttagcacacctgctcccctgggcacttcttgccttgytgtacttcttctttctatcttccttctctttccttttctcttaagcattaataagctgtctgaacactgaaccagactg

SEQ ID NO: 321180 - DNA, 583 bp, Homo sapiens
ccagctttttgtttcatttatcttttatatatttttgctgttgttgtttaaatttcatttaattctgtcctgatctttgttatttcttttcttatgctgggtttgatttgttttctttctctagttctttgaagtgtcaccttagattgtctatttgtgctctttcagactttttgatgtargcatttaatgctatgaacgttcctcttaacactgcttttgctatatcccaaaggttttgataagttgtatcattattattgtttagctcaaagattttaaaatttccatcttgatttcattgttgacccaaagatcattcaagagcagattatttaatttccatgtatttgtctatttttgaggattctttttggagttaatttccagttttattccactgtggtctaagaggatacttgatatgatttggattttcttaaatttattgagacttattttgtggtctgtcacatatgctatcttggagaaggttctaagtgctgatgaaaaaaatgtgcattctgcagttgttgggtagaatgttctgtaaatatctgttaagttcatttgttctaggata

SEQ ID NO: 321181 - DNA, 583 bp, Homo sapiens
ccagctttttgtttcatttatcttttatatatttttgctgttgttgtttaaatttcatttaattctgtcctgatctttgttatttcttttcttatgctgggtttgatttgttttctttctctagttctttgaagtgtcaccttagattgtctatttgtgctctttcagactttttgatgtaggcatttaatgctatgaacgttcctcttaacactgcttttgctatatcccaaaggttttgataagttgtatcattattattgtttagctcaaagattttaaaatttccatcttgatttcattgttgacccaaagatcattcaagagcagattatttaatttccatgtatttgtctatttttgargattctttttggagttaatttccagttttattccactgtggtctaagaggatacttgatatgatttggattttcttaaatttattgagacttattttgtggtctgtcacatatgctatcttggagaaggttctaagtgctgatgaaaaaaatgtgcattctgcagttgttgggtagaatgttctgtaaatatctgttaagttcatttgttctaggata

SEQ ID NO: 321182 - DNA, 556 bp, Homo sapiens
aaacaaatgctgagagaaattgccaccatcaagcctgcactacaagaaatgctaaaaggagttctgaatcttgaaacaaaacttcaaaatataccaaaacagaacctccttraagcataaatccaacaaggcctatagaacaataatacaatgaaaaaaacaagatgtttaggcaacaactagcatgatgaatagaacagtatctcacatagtttatgtgagatatgctgtggtctgaatatttgtgtccccctgcaaaattcgtatgtggaaacctaatctctaatgcaatagtaattaagggatggtgtctttagaaggttattaggtcatgctttgctttcggtgggattagttccctttcaaaagagccctgaatgaaggcgcttgattgccccttctaccatgtgaagactcagcaagaaggggccacctatgaggaagggagttctcaccagacactgaatctgccagttccttgatcttgggcatcccagccctagaactgtaagaaataaatttctgttgttgataaaccacccagtttatggtattt

SEQ ID NO: 321183 - DNA, 567 bp, Homo sapiens
atgctaaaaggagttctgaatcttgaaacaaaacttcaaaatataccaaaacagaacctccttgaagcataaatccaacaaggcctatagaacaataatacaatgaaaaaaacaagatgtttaggcaacaactagcatgatgaatagaacagtatctcacatagtttatgtgagatatgctgtggtctgaatatttgtgtccccctgcaaaattcgtatgtggaaacctaatctctaatgcaatagtaattaagggatggtgtctttagaaggttattaggtcatgctttgctttcggtgggattagttccctttcaaaagagccctgaatgaaggcgcttgattgccccttctaccatgtgaagactcagcaagaaggggccacytatgaggaagggagttctcaccagacactgaatctgccagttccttgatcttgggcatcccagccctagaactgtaagaaataaatttctgttgttgataaaccacccagtttatggtattttgttatatcagcctgaactaagaaaagccatcaaaacttctgctgtgattagtttatct

SEQ ID NO: 321184 - DNA, 556 bp, Homo sapiens
aaacaaatgctgagagaaattgccaccatcaagcctgcactacaagaaatgctaaaaggagttctgaatcttgaaacaaaacttcaaaatataccaaaacagaacctccttgaagcataaatccaacaaggcctatagaacaataatacaatgaaaaaaacaagatgtttaggcaacaactagcatgatgaatagaacagtatctcacatagtttatgtgagatatgctgtggtctgaatatttgtgtccccctgcaaaattcgtatgtggaaacctaatctctaatgcaatagtaattaagggatggtgtctttagaaggttattaggtcatgctttgctttcggtgggattagttccctttcaaaagagccctgaatgaaggcgcttgattgccccttctaccatgtgaagactcagcaagaaggggccacctatgaggaagggagttctcaccagacactgaatctgccarttccttgatcttgggcatcccagccctagaactgtaagaaataaatttctgttgttgataaaccacccagtttatggtattt

SEQ ID NO: 321185 - DNA, 567 bp, Homo sapiens
atgctaaaaggagttctgaatcttgaaacaaaacttcaaaatataccaaaacagaacctccttgaagcataaatccaacaaggcctatagaacaataatacaatgaaaaaaacaagatgtttaggcaacaactagcatgatgaatagaacagtatctcacatagtttatgtgagatatgctgtggtctgaatatttgtgtccccctgcaaaattcgtatgtggaaacctaatctctaatgcaatagtaattaagggatggtgtctttagaaggttattaggtcatgctttgctttcggtgggattagttccctttcaaaagagccctgaatgaaggcgcttgattgccccttctaccatgtgaagactcagcaagaaggggccacctatgaggaagggagttctcaccagacactgaatctgccagttccttgatcttgggcatcccagccctagaactgtaagaaataaatttctgttgttgataaaccacccagtttatggtattttgttatatcagcytgaactaagaaaagccatcaaaacttctgctgtgattagtttatct

SEQ ID NO: 321186 - DNA, 593 bp, Homo sapiens
caggacaaaatcatttagtacaggacacctcttgtatatacaggacgcctggaaatcagatgctggctatatctcaggcctgcatctctgtgatattcccagaacagattgtgcttcagcttctttgagttctcagaggagagtgagtggcccaagctgaagctggatcatttgagaagttcaaagccagactaaacaactactgaaaagtttgaatcaaagtagtgccataattagatttgattttagaaagttttttttggtatttatatgggagatttgggataggcagaagcagagactggtgacaaatgagtctattaggaggctcaacacccacgaygggagtaagaatggaagccattaaacttctgtttttaccaaagattagtaatttacttataatactgaataaaataacgtatcaaagttttggggtttaatttaaaatatatcactttccaacaattctaagaaagtttatgacaagcacaggacttggacttggtgaatatattattctaggttctcttgagaagcagaaccaattggatgcatgtatatacatagagaggattgtttagagttcccac

SEQ ID NO: 321187 - DNA, 581 bp, Homo sapiens
tgagtctattaggaggctcaacacccacgatgggagtaagaatggaagccattaaacttctgtttttaccaaagattagtaatttacttataatactgaataaaataacgtatcaaagttttggggtttaatttaaaatatatcactttccaacaattctaagaaagtttatgacaagcacaggacttggacttggtgaatatattattctaggttctcttgagaagcagaaccaattggatgcatgtatatacatagagaggattgtttagagttcccacacttggtttttgaggctggtaagcccaaaacttgcagaatgagcagatagactggaggcytagggaagagctgatgttgtggttcaagttcaaaactggctgttgaagaattcctccttgcctgagggagatcagtcttttgttttattcagaccttcagctggctgcatgagacccatccatattatgaagggaagtctgctttactaaaaatcccccaatttaaatgttactcgtatttcccaaattaatattgtatctgtcttctgaattgcagtgtcattaatccaatattgagaa

SEQ ID NO: 321188 - DNA, 536 bp, Homo sapiens
agaatgtctataaaatctgtagaattgtcatttctctcattcctgatattgctcatttgtgtcttctcctttatttccctcattagtytggaaagaatctcctaaattttattgaacttctcaaagaatcagctttggtttcactgactgtctctattgtttttctgttttctatttaattaatttcagttctgatctttattatttccttttctctacatactttgaacttaatttttccttctttggtggaaaatgaggtcattgtttcaaaacttcttctcttcatatatggttatttagtgctataatttcatcctaaataactgctttagtgacatcccacagattttgatatgctatgctttcattttcagtcatcccatatattttgaatttcccttttggtttcttctttcacccattgactatttatgagtgttccacttagccttaaaatacttgcggttttccagaattcttttgttattgatttctgattgccttccattgtggtcagtaaacataatttgtac

SEQ ID NO: 321189 - DNA, 590 bp, Homo sapiens
gagcatcagctcaatttttttttaacaattaaagcatttttttaaaagttacagtgagttatgcagatactgtaatcaagttaatagtttggctaattttcaagccaatccactcagtcattcaaagagtactgagtgattattaagaactgttctaggtatccaggcactgattatagatcagtaracaagcaaacatccctactcttaaggaaattaaggtccagcagctgatattctctaaattcttgttcagtggccatcctgccgtcacttgaacacgctcctgggaaattgccaaacccatttccagctccctacaacttttagtacgcttcctcgaaaatgttttggtaaatatcattttatccatttcattacattttcagtggtggcacagagtcccttcaagattagtttccttggatgctacccagctagtattccccttaatccaattctgatttcaaagaatcattaaaatgtggcaaacggggaatgattaagtgttaagtgttagatctaaatttcttgaataacacaatagctacttaaggggggtactttagtggacgctttattagattagt

SEQ ID NO: 321190 - DNA, 590 bp, Homo sapiens
gagcatcagctcaatttttttttaacaattaaagcatttttttaaaagttacagtgagttatgcagatactgtaatcaagttaatagtttggctaattttcaagccaatccactcagtcattcaaagagtactgagtgattattaagaactgttctaggtatccaggcactgattatagatcagtaaacaagcaaacatccctactcttaaggaaattaaggyccagcagctgatattctctaaattcttgttcagtggccatcctgccgtcacttgaacacgctcctgggaaattgccaaacccatttccagctccctacaacttttagtacgcttcctcgaaaatgttttggtaaatatcattttatccatttcattacattttcagtggtggcacagagtcccttcaagattagtttccttggatgctacccagctagtattccccttaatccaattctgatttcaaagaatcattaaaatgtggcaaacggggaatgattaagtgttaagtgttagatctaaatttcttgaataacacaatagctacttaaggggggtactttagtggacgctttattagattagt

SEQ ID NO: 321191 - DNA, 590 bp, Homo sapiens
gagcatcagctcaatttttttttaacaattaaagcatttttttaaaagttacagtgagttatgcagatactgtaatcaagttaatagtttggctaattttcaagccaatccactcagtcattcaaagagtactgagtgattattaagaactgttctaggtatccaggcactgattatagatcagtaaacaagcaaacatccctactcttaaggaaattaaggtccagcagctgatattctctaaattcttgttcagtggccatcctgccgtcacttgaacacgctcctgggaaattgccaaacccatttccagctccctacaacttttagtacgcttcctcgaaaatgttttggtaaatatcattttatccatttcattacattttcagtggtggcacagagtcccttcaagattagtttccttggatgctacccagctagtattccccttaatccaattctgatttcaaagaatcattaaaatgtggcaaacrgggaatgattaagtgttaagtgttagatctaaatttcttgaataacacaatagctacttaaggggggtactttagtggacgctttattagattagt

SEQ ID NO: 321192 - DNA, 649 bp, Homo sapiens
gtttgaggcattataccatgtagagagagatgggagagctgcgctttgggtaaaaacagttcctatttttgtgcctgttgtttatgccacagtaaataatgatatgaaaatgacatgttaagacaatacagccaggtgtttttcttggtaatgctttaattagatctctgcatgacacttctaaaagggatagtttatagaacaggaggcagatggaaggtcattttgaaatttagttttaattrgcaaaacgtataaaacttttacagtgtgtttcatgaataagggaatgtttgcaaccttcaagattgtgaaaaaaaagctaaacttattgaatggcaggactttaaaaagaattttttttaaattaaaatgttattcatctagagagcatctagtaacatttattatgaactgcataagtaactaaaagatgattaaactactgaaataactgagggtgtgataattatgttttttgtattcatgttagcatgatgccttgaatacagttagaattcaataaatgttgaatataattatattttaaaatattgcattttaaaacatatattttaaaatgtccatatgtatttttatttactgtatttagtgcacttcttcatctgtgtgacgtttagaagagtcc

SEQ ID NO: 321193 - DNA, 649 bp, Homo sapiens
gtttgaggcattataccatgtagagagagatgggagagctgcgctttgggtaaaaacagttcctatttttgtgcctgttgtttatgccacagtaaataatgatatgaaaatgacatgttaagacaatacagccaggtgtttttcttggtaatgctttaattagatctctgcatgacacttctaaaagggatagtttatagaacaggaggcagatggaaggtcattttgaaatttagttttaattagcaaaacgtataaaacttttacagtgtgtttcatgaataagggaatgtttgcaacctwcaagattgtgaaaaaaaagctaaacttattgaatggcaggactttaaaaagaattttttttaaattaaaatgttattcatctagagagcatctagtaacatttattatgaactgcataagtaactaaaagatgattaaactactgaaataactgagggtgtgataattatgttttttgtattcatgttagcatgatgccttgaatacagttagaattcaataaatgttgaatataattatattttaaaatattgcattttaaaacatatattttaaaatgtccatatgtatttttatttactgtatttagtgcacttcttcatctgtgtgacgtttagaagagtcc

SEQ ID NO: 321194 - DNA, 452 bp, Homo sapiens
ttctctcagcatgatttacaagtgtatcccaaacctgtaatcttccccaaatccttcagtactgtgaatgacagcaaaaataatttagcataatyatgtataatgtatgactaaacgtgtcacagtagatattaagagctttctgaagttgtaatatgaagcccactctagcgcatctcttgcagatcacaaaaaaagcaaaaaaaaatctattttgtgtagacattattatgcagtcataaatgtgacttagaagccattgtgtgtgtgtgtgtgtatgtgtatgtgtgtgtttgtgtgtgtgtgaaaacaaatgcccaccacctatcactggtgtcaataagtgtagttttttagggagaatacatttgctagggtgctctgccataccaagctgcataattattgtaaaagggaatggatagaaatttctatattcctctttctttact

SEQ ID NO: 321195 - DNA, 523 bp, Homo sapiens
tggctatttcaaactgactctcagtgaatggcttacactgaggtcaatgatctgctcccagctttggggactaggagctattttattcattgacctagagatagaagaatatacaggcattgagccatgccaaactcccaagagatgtatctacaagctagcatatcaagtataactatatctgacaaagcttgcccrggggaagggtactcatttcctctggcttggtggatcacccaagagcacaaacctcagagcaaatatttgcagaaggaaagtacaggacgtgggatgttcttacaggcatatttatgaagctaagccggctggatagaaagctcccttcattttaggtattccctaatgaatcacaatcacagtctatgaagcaaaatcattctttggccattgaccatgctacagaaaaagacccactattaatcccctttctataaaagggttacttaccttcttctaaaggtaacattgcaacatgagccttcttctttcaagttccattaac

SEQ ID NO: 321196 - DNA, 617 bp, Homo sapiens
tgtacgccacaagtatgtacagttattacttttcagtttaacaattttttaaaaataaaggggcaatttaatgaagagtggatcagccctcacaagcttagaaaaataagaaccactgaggcaaaagttaatcatggcaatttagagcacttttcagggagagagaatgtttcagttcctactgtgaggtttccagggagcatcgtagatgcaccgtcttattttagcccaatgctgttcagcattcacactgcatagctccctctgttcccatttctgctcaccatacaggcttttcattcttattctttcccattatgaatttaaaattatttgctaattataatttggattcccaagtggactcatctactacagacttcaagaggaactccatgaggaaacttctataccttgaaagccaaagatcaagtccagccacctttcctttgaataatgtgtctctaccacttccaactgcragatacaacaatgcctatagcaagcacatgaaatgagtcaaggggaacttaaaggaaaaccctcctacatctgccccagaggggcgttctatcatgaacatagctgaaattcttatcactattctttcttctaaa

SEQ ID NO: 321197 - DNA, 624 bp, Homo sapiens
gtcgagagccaactccccactagtgccaaagccggagttcgaacaaatgccccccggtaactgcgcgcacgcactccccatccttcggtcccactctcactagaagcctctggctcccacttccagagaacctgtcccacacaagtggaaagaagagacgtgcaaaagaaggaaaaagcataaaagaaggcgaactgcatgggctgcatctactcacttaggagttctccgcgtctstcttcattcattcaactctgccgaagtgcagttccctctgggagcccgggcgccggggtcgggtaggggtgggagagctgggcgaagggaacccggacacctcacggagggagggagcagggacaggcggccggctggacaggcaaaagggaccgcggagccgtgcgcgagccgccgggcggactggccctggccgccaatgtgcctttgtttatgtggcttgcgctgccgctgccaacatgcacctaaagtctccgcgcgtcagcgcgcgtcagcggcccgccgcccaatcgccgcgctgccgcgctccctggactcctggcccgcgctcgctttggtatatttccgacctgacgtcacgagcagggccgattttaaggtgggaac

SEQ ID NO: 321198 - DNA, 584 bp, Homo sapiens
ttaataacaacctgtcgagtgcggcttcctgataacagcctttgtccaagtcttaatgcaaccaagaatgaagggtcgttttcacagcagcttattataacaattattattaactgggaatataattaaatataaaattaaatataaattaaaatgagagaaaggggagacctttctcatctattccatcatctgtgtaagagttctctcctcttcaaagtcctattctggtttctgggaagcttttactgtttcttaggaagacacgccggatgtaagactgttaaactcgtttaaaccaattttgaataagctacttcttaggctagggtttctgtaaggcccggatgagatgggttggaaaggattcagcatatagatcagaagtgtttaaaaaaaaaaaaaaggccacgctcaaaaccccagactagttttcctcaccagattctgatgggacgatgtctcagtagcaccgccaatgtgtgtgtaattgactgatccagtcagtagggggcctgactccacaacgttcaagagaatcactcacwcacacacacacacacacacacacacacacacacaca

SEQ ID NO: 321199 - DNA, 635 bp, Homo sapiens
taaactacaaatagatgtagaattttaaatgtagctctgtagytcaatttataccacagaaattgcgagatgctatcttcctgttgttataacgtatcaggtcaagggatataaattgtaccaggtaattcattttgctgttcagagagtcattaagttcctcccagaatatatgtgattgatatccctggaggtgaaaggctaaaggaaccatatggcaacatgttgcattccgtatgctatctgcccatccgtgcttaagctgtcattagcaacatctgtaccttacggaaatccagctgcgccgacgacggctgacggaattgtacttggggggaaaatctagcttagcgccattaacttgagacttagagtctatctaccaggacggatggaagctttcacaattagacgagacgacacgaatgctttattaaagtttaattttgaactcccaattagcgaaagtgcattacaaatcgattgcaatttcctagaaggtgcagcaagttctctgcctgcctgccacgtgcgagacgctccacagcgagcttccccagctccgggcagcagaaaggggatggttcagagccgatctccgcatcccaggaagtccctaaaatccgcgccagccc

SEQ ID NO: 321200 - DNA, 593 bp, Homo sapiens
gactggcaatttccgacaccagttttgctaaactttataaattttgcttcctccagaggtaggagggggaaggagatgggcaatacagaaacagattttacagccagaatatgacagggccccttaaactacaaatagatgtagaattttaaatgtagctctgtagttcaatttataccacaraaattgcgagatgctatcttcctgttgttataacgtatcaggtcaagggatataaattgtaccaggtaattcattttgctgttcagagagtcattaagttcctcccagaatatatgtgattgatatccctggaggtgaaaggctaaaggaaccatatggcaacatgttgcattccgtatgctatctgcccatccgtgcttaagctgtcattagcaacatctgtaccttacggaaatccagctgcgccgacgacggctgacggaattgtacttggggggaaaatctagcttagcgccattaacttgagacttagagtctatctaccaggacggatggaagctttcacaattagacgagacgacacgaatgctttattaaagtttaattttgaactcccaattagcgaaagt

SEQ ID NO: 321201 - DNA, 613 bp, Homo sapiens
ttaaactacaaatagatgtagaattttaaatgtagctctgtagttcaatttataccacagaaattgcgagatgctatcttcctgttgttataacgtatcaggtcaagggatataaattgtaccaggtaattcattttgctgttcagagagtcattaagttcctcccagaatatatgtgattgatatccctggaggtgaaaggctaaaggaaccatatggcaacatgttgcattccgtatgctatctgcccatccgtgcttaagctgtcattagcaacatctgtaccttacggaaatccagctgcgccgacgacggctgacggaattgtacttggggggaaaatctagcttagcgccattaacttgagacttasagtctatctaccaggacggatggaagctttcacaattagacgagacgacacgaatgctttattaaagtttaattttgaactcccaattagcgaaagtgcattacaaatcgattgcaatttcctagaaggtgcagcaagttctctgcctgcctgccacgtgcgagacgctccacagcgagcttccccagctccgggcagcagaaaggggatggttcagagccgatctccgcatcccaggaa

SEQ ID NO: 321202 - DNA, 613 bp, Homo sapiens
ttaaactacaaatagatgtagaattttaaatgtagctctgtagttcaatttataccacagaaattgcgagatgctatcttcctgttgttataacgtatcaggtcaagggatataaattgtaccaggtaattcattttgctgttcagagagtcattaagttcctcccagaatatatgtgattgatatccctggaggtgaaaggctaaaggaaccatatggcaacatgttgcattccgtatgctatctgcccatccgtgcttaagctgtcattagcaacatctgtaccttacggaaatccagctgcgccgacgacggctgacggaattgtacttggggggaaaatctagcttagcgccattaacttgagacttagagtctatctaccaggacgratggaagctttcacaattagacgagacgacacgaatgctttattaaagtttaattttgaactcccaattagcgaaagtgcattacaaatcgattgcaatttcctagaaggtgcagcaagttctctgcctgcctgccacgtgcgagacgctccacagcgagcttccccagctccgggcagcagaaaggggatggttcagagccgatctccgcatcccaggaa

SEQ ID NO: 321203 - DNA, 438 bp, Homo sapiens
tttctctttcgctcttcgcgctacacacccagattggcttccagcgcgcaggcgagtggggcgaaggaggggggacaggagtcccggaagggccgtccggcgttcacacccacccctgttccgctcctcccgccccaaacaaagtcccccgactstaggtccaggatacgttacctgcccggcgctcccggcccctcggtcaccgcatcccccgctgggcgcgcctggtacgggtcccgctccccggggctcacaaagtggtcgcccctggctgggcggctgggtagatgcccctctctggacatgttggggcggtttttggggtggagggaacgcgggaagtgaaagcggaggctgggacaaggggaacttactgataaaatggaaaaaaaaaaagcccacagggcccaggtcctggccgggggcgaaagaggcctg

SEQ ID NO: 321204 - DNA, 529 bp, Homo sapiens
ggacatgggcattaagggattagattacttctgccatctttactggtgctatctgaaatgatactgaaaaatgccgatgccaaaggtcacaatatctaatatgatgagttgttgctaaatttatatgtggtttatatcttttaaccacagtaagcatgttctacttcagagtttatagcttaaatttgtacctaggtaacactgttttatccctttttttggtttgatttctctctaataattgatcttaaagaatagaataaacagaagagactctggccccaagcagtcaagttataggtggattttattcagtaaaatcaaggcaaaataaagacctattgattcctgggacattttgtcattttatctttcctgagttagacatcctgaccaccctaatagccaaatgaaatggatagcagcagcttgaagtcatttataattttaacctgacaagttctgttgwaaaagattactacaggcatatgcaatcaatgagttgcataagaaatccaactatgtgcat

SEQ ID NO: 321205 - DNA, 628 bp, Homo sapiens
taatttaggatttatttgaatagaccccaaataaagcaacatttagcttcctgaatgtgtctgttatgtgaatgtggctgggttttggtgaacctgttgtagcgtgtgtaggatataaaaaatttcagaattccaatttcttcataaaataaagataatgtaactttacttacaggcttttttctctgccaagcactaagtcratacatacaaatcagtgatcacagtacctggcacatagcaggtcttcagtatctgctttacttctttcccttcccctgaggtaggatatgaacatttgaaatagacctagccttgtcaggcataataagaaagatataacatcagagtttaaaaaaaaatagctgaacttttggttggcacacttttgcttatattgatgactaaacagataaactggtagagggtagagaaacttgaagttcaaatgagtatttgttgaagagaaatcaaaatcataagcatagtatctaagatatgatgtcagttaggaaacaatttaatcttgtggcatctgcaggaaaaaaagaaaataaagaaacaatttaaattacaaacattccaccttagcattgcttttcagcagtttctttgtttgaatataaca

SEQ ID NO: 321206 - DNA, 628 bp, Homo sapiens
taatttaggatttatttgaatagaccccaaataaagcaacatttagcttcctgaatgtgtctgttatgtgaatgtggctgggttttggtgaacctgttgtagcgtgtgtaggatataaaaaatttcagaattccaatttcttcataaaataaagataatgtaactttacttacaggcttttttctctgccaagcactaagtcaatacatacaaatcagtgatcacagtacctggcacatagcaggtcttcagtatctgctttacttctttcccttcscctgaggtaggatatgaacatttgaaatagacctagccttgtcaggcataataagaaagatataacatcagagtttaaaaaaaaatagctgaacttttggttggcacacttttgcttatattgatgactaaacagataaactggtagagggtagagaaacttgaagttcaaatgagtatttgttgaagagaaatcaaaatcataagcatagtatctaagatatgatgtcagttaggaaacaatttaatcttgtggcatctgcaggaaaaaaagaaaataaagaaacaatttaaattacaaacattccaccttagcattgcttttcagcagtttctttgtttgaatataaca

SEQ ID NO: 321207 - DNA, 563 bp, Homo sapiens
gagccacttaagctgcaagcctccctctcctcttctgtaaaagtgacaatgtaatccctatttcccatgatcacagagctcatcctggtaagtgtcctcctggcctccctctgggcctcaatttcactaataatgaacccctctgtaatttgggggcttctaaccatggcaagagagcctataatccaggtagagaactcttcagggtagagacaccagccaagctctcttcaagtagaaaagggaatctagagacaatgacattcagagaaatgactgctttggcttccaragccaaagctcccaatctctgtttgaactattgagctgccctggaagctcagggagcaggaaaagaggatgtgttgtactatctggtgttaaaataatccaaaggtccatgcagaaaaacaggtgagcaaagcaagctggctggctgccttcaaggaccccagccctcctgcatcatgctgggcactgtctctacctccttccatccctgttttttccatgtaccccccaccttggctctgttaggtctcacacttgtaggctgatgcact

SEQ ID NO: 321208 - DNA, 546 bp, Homo sapiens
cagggagatatagagaatgcagaagaaatcactgatacatgtagatgttctattcttccagacactgttctccaccatcactcagaagcctcattttctttcttttttttttttttttttgcagttgcaagatttaatagggtgaagacagagctcccatacaaagggaggggactcaaagagggtagccattgccagcttgaatgcctgggtttatatccccatcattgtccctcccactatgctctcaggcaatagattattggctatttctttacctcctgtttttgtctaattagcattttagtgagctctctttactacctgattggtcagatgtgagctaagttgcaagccccatgtttaaaggtggaagcagtcaccttcccagctaggcttagggattcctagtcagcctaggaaatccagctygtcctgtctctcagtcccccatctcaacaggaaaacccaagtgctgttggggaggttggccgacgactgctctaactgcttcctgctgaattggggtgtagtaggggttttgca

SEQ ID NO: 321209 - DNA, 483 bp, Homo sapiens
aggtctctaaggacaaattcttccttgtttcttctagcttttktggttggtggcaatgtagctagctgcatcatttcaatctctgcctctgtctctacatggccatattcccctctgggtgtgtcttctctgttccaaatcattttctccttatgaggacagtagtcaatggatttaggacactccctaatccaatatgacttcttcatagcttgattatatctgttatatcatacactcatatcatcaacaccacaatcaagatgtaggacattttcatcatctcaaaaactttcctgatgcccctttgcaatcaactccatctaaattctggccaaagacaaccactgattttctttttattgctatagttttgtcctttctggaattttatataggcaaaatcaattacagtaggtagtctttttatgtggtttctttcaattagcataacatttctcaggatcatccaagttgttgtct

SEQ ID NO: 321210 - DNA, 483 bp, Homo sapiens
aggtctctaaggacaaattcttccttgtttcttctagcttttttggttggtggcaatgtagctagctgcatcatttcaatctctgcctctgtctctacatggccatattcccctctgggtgtgtcttctctgttccaaatcattttctccttatgaggacagtagtcaatggatttaggacactccctaatccaatatgacttcttcatagcttgattatatctgttatatcatacactcatatcatcaacaccacaatcaagatgtaggacattttcatcatctcaaaaactttcctgatgcccctttgcaatcaactccatctaaattctggccaaagacaaccactgattttctttttattgctatagttttgtcctttctggaattttatataggcaaaatcaattacagtaggkagtctttttatgtggtttctttcaattagcataacatttctcaggatcatccaagttgttgtct

SEQ ID NO: 321211 - DNA, 187 bp, Homo sapiens
gatctctgaatttactgtggctattaaatraaataatatatacaatagtgattgaaattttaaaactgtcaagtatttacacctacaatcaaaatgtaaatcaaattccaactgtagccttaatggaagaatgtcacattttcatcactccctacattctcagccatgagtcccctccatcccagga

SEQ ID NO: 321212 - DNA, 560 bp, Homo sapiens
cccatgtgttgtgggagggacctggtaggaagtgattggatcatgggggtggtttcccccatgctattctygtaatagtgagtgagttctcacgaaatctgatggttttataagcatctggcatttcccctgcttgtgcttctccttcctgccaccttgtgaagaaggtgccttgcttcccctttcgccttccaccatgattgtaagtttcctgaggcctccccagccatgctgaactgtgagtcaattaaacctctttcctttataaattacccagccttgggtatttcttcatagcagcatgagactggactaatacagtctatgtccttgggatacactaacaaataaaacagacaagatcacctccacaatggagcttatagcttagtaggaaaagacaaaaaattaacacatgaaaaaaacttattcaaacaaataataaaaacaatatcagaatgtgatgaataaaaagaagaaaataaaactagatagtgggatatagggtgactagtcagatgttgctaaggtggtcgggaaagcattcttggaagagataa

SEQ ID NO: 321213 - DNA, 601 bp, Homo sapiens
aaaaatcatccacaaaactcaaacattgttcaaagaattttttattgtttattatctaaagataaataagtatgccttgcatttggattggggttttcttcccatattcaaaatgctttcttatcatccacctcctatatctctacaacatccctgaaggagggcagggcaagaagggtacacaaaacaatggactaagatagaatgaggtcttctggttcattgttaaactacgaagtttaagatttagagcagaagatacaaggattagcaggactgtttctatcttaagtagttgtcagtctagaaggggagaaaaatatgtaaacaaatagctgtaagagattcgatgtaataagtagtattatgaacagcagacagagatgagttttggaaacayggaggtggaagagtcagattgaatgaactcacgaggaaagatagaatatgcctcccaaaatagaggccgggagtggtggctcatgcctataatcccaacaatttggggggttaagacaggaggatcacttgagcccatgagtttgagaccagcccagggaatatagtaaaacctcatctcttatactaatactgctactgc

SEQ ID NO: 321214 - DNA, 554 bp, Homo sapiens
gccctgagggtgcaatggtggccccgcagtggggtggcactgtggacatgcaactgctggaaccaaagtgactgccatcctggtagtcatcttgggcactgcarcctttgctagaccagtgtgcacatttcttcaagcagggaccatgcatagtgtaatggcaatcagtgtatccttctgtcaagggaaaaaagaaagaagcttctgtcccttctgtagggagggtggggaaggatgaaatcagcaggtatattcttcagatgtttatcttttcagaggcattgatttccaattgtagctaaataatatgatcaataagttaggacacttccgcacactatgctaggaaacatctcttacttaacaaggttcttcctctgttcttttgagtgaggtgtctaatgggagcagttaattcattgtgttttgagtaatattattttcttagaatgcccttagggaaaatctcagcaaatcattaaatgtatgtatatgtgtgtataaataccattgcaataaaagtcattagattgcaaatctctacacaataaaac

SEQ ID NO: 321215 - DNA, 508 bp, Homo sapiens
gtgtaagacacagttcagacactagcactaaataaaaatgattgcaaatttattacttttctaaagattctggaagggtccctttttataggctagatcataattttaaatgttactrtgaaagcaggcacacagcacagtggtcttctgtctgaccaactgcttctaatgtttaacccagcatccccgagcagctctcaggaaccctttgggtctagcttctgtatctgtgaaatgagggcttgcaccagctaattactaaaggtcctcttgttactttatgattctataaaaacaattatctttgcagtgttcttttaaaataagatataggggaaactttggatcttttagtataagaactgaagaaaatagggagcagaaagttgtaattgaatgtttaccaaagatacacattcttataaaaattctcatacagaactaggtaaaatgagagtcccaccaacagtatccgcgtgcgctgaattttttcattttaatatgtttt

SEQ ID NO: 321216 - DNA, 363 bp, Homo sapiens
ccctgaggctgagtaaatggcctgcaagtggcagaaaggattcagtgtggaccaacagataatataagaatataaagtcacaataccaacttcagtagtattcgttcttttctaaaaatactttgtttttgaagtgatacatgattatcrtaaaaaaaaaaaaaaaaagcaatgtagaaatgtacaaagaaaaagtaaaactcgccttggatgccatcataggtaattgttagtagaactcagaaaacaatcttaaggactttctctacctactccatatgtatttatgtattcatttttataggattacattctacacgtggtgttctttaacctatggttttttaatccatttgttttaaa

SEQ ID NO: 321217 - DNA, 550 bp, Homo sapiens
ttgtctgttctcatagattcaaatattatttctcagtccatgattttaaaattcgtatctctaaccccaatacatagcccccctgtaacctctcacatgtgttccagtactgtatttccaactacattctgcacacatttactcagatatcctgccattgcttcaagctcaatgtgttcaatgttaaattcattagcttttactccaaattgactctctttcccaactacaacatgtgtgtcaataacctagttacctccccgtctttgagtatctttctccctggtttcctatattcagtccattattcatttgtttcttcctttataatatctctcaaatatgtccatttaaaatcatatattaacattgaacatctattatatactaggtgttataaactgaacattttttttcctcccataaaattcgtaagttgaaattctaacctccaaygtgatagtattaggagaagcctttgggagataattatgtaatgagggtggagccctcatgaatgagattagtgcctgtatgaaagggactgcag

SEQ ID NO: 321218 - DNA, 378 bp, Homo sapiens
attcttgagtagacgggaggaaaggagtgataaatcgtctaaaatggcgtggtttggagattggcagaacgtgactagctaggtgccctccttcccccgcccccagccaggtttcatttgtgtttgggggcacaatggtgtttgggtgkctctcgggtttgttgtcgaagctggattgtcttcgagatttctgaactggtggtgtgattgtgtgtggcgggggggggggagtcgggaaaggggggcgcaatggggatggtggtggagaaaggcgaggagggaaaggctgtcttattgtatgccgcggcggcgtgccctgggttcttggaaaggtggctggctggggccagagggcttcggtaccttttgatgaggctt

SEQ ID NO: 321219 - DNA, 629 bp, Homo sapiens
ttttgcatttcttaagctatcttttcttagtccctgcttttcctcaaatattttacaagccagagctgtttaatgtaattggacatttcatctgcacttagctaggagagccagccttgctgtttatctgggggtaagcagcactttgaaaaaatttacattagattaaaaaaaaaaatctcatccagcctggtgcagtggctcatgcctgtaatcccagcactttgggaggccgaggcaggagggtcacttgaggtcgtgagtttgagaccagtctgaccaacatggcgaaactctgtctctactaaaaatacaaaaattatccaggcatggtggcgcatgcctgtaatcccagctacttggggggctgaaacacaaaaatcrcttgcagaggttgcagtgagccgagattgcaccactgcacaccagcctgggcaacagagtcagactctattttaaaacaacaacaacaacaacaacaaaacaaaagaaacctcatccttctcacagaaagtctagatagataaatgagctttcttcgggttctcttgttctctctcttttttttcttaagtgctaattaccaatcttgttagcagtagcatattaataatttatttacaccctga

SEQ ID NO: 321220 - DNA, 632 bp, Homo sapiens
tgtccattctctgcctgcttccccacactgcacagtacttaggctcctcctcatccttggtctggattcttttagtgattctaattatatgcatraccttggctttcaggctaaggtaagctttatggccaatttgtgggctattttcaaagaaatttcctggtgttttacagggactttatttactttcacaagacctcatccatgtattcattataaagaaccgtattggtttgcttttctactctttcctgctctgccacctctacaggaaattacattgcaggcagaggcatcacgcagagaaaagacacctccttattcagtggaagcaatttctgtcttatgtgttacttcaactgtcataacattctcaggcatgaacttcactctcttgattaatatttataacctcctctttagacacctgtaatgtcagtgcctgttggggtaggaagctcagtacatggcaggcaggagagttaatacagtctgttaatacttaaagagacgagggttgtctaaaggttccattgtcaaaggaagcccggggatggattctggctacaaaccagggagggacatttctatccagccttgcactagtcctaattggaagtggcatgacccac

SEQ ID NO: 321221 - DNA, 632 bp, Homo sapiens
tgtccattctctgcctgcttccccacactgcacagtacttaggctcctcctcatccttggtctggattcttttagtgattctaattatatgcataaccttggctttcaggctaaggtaagctttatggccaatttgtgggctattttcaaagaaatttcctggtgttttacagggactttatttactttcacaagacctcatccatgtattcattataaagaaccgtattggtttgcttttmtactctttcctgctctgccacctctacaggaaattacattgcaggcagaggcatcacgcagagaaaagacacctccttattcagtggaagcaatttctgtcttatgtgttacttcaactgtcataacattctcaggcatgaacttcactctcttgattaatatttataacctcctctttagacacctgtaatgtcagtgcctgttggggtaggaagctcagtacatggcaggcaggagagttaatacagtctgttaatacttaaagagacgagggttgtctaaaggttccattgtcaaaggaagcccggggatggattctggctacaaaccagggagggacatttctatccagccttgcactagtcctaattggaagtggcatgacccac

SEQ ID NO: 321222 - DNA, 632 bp, Homo sapiens
tgtccattctctgcctgcttccccacactgcacagtacttaggctcctcctcatccttggtctggattcttttagtgattctaattatatgcataaccttggctttcaggctaaggtaagctttatggccaatttgtgggctattttcaaagaaatttcctggtgttttacagggactttatttactttcacaagacctcatccatgtattcattataaagaaccgtattggtttgcttttctactytttcctgctctgccacctctacaggaaattacattgcaggcagaggcatcacgcagagaaaagacacctccttattcagtggaagcaatttctgtcttatgtgttacttcaactgtcataacattctcaggcatgaacttcactctcttgattaatatttataacctcctctttagacacctgtaatgtcagtgcctgttggggtaggaagctcagtacatggcaggcaggagagttaatacagtctgttaatacttaaagagacgagggttgtctaaaggttccattgtcaaaggaagcccggggatggattctggctacaaaccagggagggacatttctatccagccttgcactagtcctaattggaagtggcatgacccac

SEQ ID NO: 321223 - DNA, 587 bp, Homo sapiens
tagcgttatttggcaaaattgaagcattctaccacctacaattctattcagtgatgttttccctaaagagattcttgcacttgtrtaccaagaaacctatgcaatatatggaatcctctaaagcacatggagtaataaagggaccacttttactcaagtttaaaaagttatacataccataattatgaatcccattttgatcttttatcccaattctggtaagttgatcaatcactatattaataacaagcctattttcccttttacagacctgagagtattttcttagtcttgataatacttttatctgaaactaaaatcctgtggctaaatccaattcttacgacttttatcctaatagttattgagatttttttcttgcactggtattaccaacctcgttgggactggaatttccatgtttccataccagcttgtaaagatgcccagagacttcttgaaattgcaccaattgtaatgacagctttgccaattgttacctgtgtccatatttttgttagaatgttctacctttcagatgaaattggaacttcattccagggattccatttccaggttcaattctg

SEQ ID NO: 321224 - DNA, 561 bp, Homo sapiens
ttatgtaatcttcacaatagccccatgaaataggtgttactacttggttaaaaaaagagtaaacttttaatggccaaaactgcgataacttttgcaccaacctaatattattatccctaatttataagtaagaaatgaaggcacaaaaaattttaaacttgtgggtgctrtggagaactttggtagtctgaggaaactcatggataccttcccagaatagtcattttcaaaagtataaaataaatttaattggattgaaaagaaaacaattacactgaaatataagtaacatcatttaataaaaatgtaagataactatacctctttattaattcattaaataagatgggtgaaatcggtgtaatttcaagagtgctgaccatagaatatattctaagatgtctataacaactgtcatgtgatataaaaatacatgatgtgtttattggtgataaagtcacaagggctaaatttactacttaaacttattttatatattgataatgaagaaaacactaaattcctatttagtattactgaaataaaattaagtaacccaat

SEQ ID NO: 321225 - DNA, 596 bp, Homo sapiens
aatggtaaaatggcataggcagtgggagattttctcagttcgtttgggctgccatatcaaaacaccataaattgtgtggcttataaagaacagaaatttatttctctcagttctggaggctggaagtcctagaaaagtaccagcagatctccctagtttaattagatcagaaagaaaaccaaatgccacatgttctcgctggtaagtgggaactaaatgatgagaaaacatggacacatagaggggaacaacacacattgcggcctttgcaggatggatttgggatgagggagaggatcaggaaaaataactaatgcatactaggcataatacctgggtgacgaaataatctgtacaacaaaccgcatgccacaagtttacctatggaacaaacctgcacttatacccctgaacttaaaagtttaaaaagaaaagtacccacagattcagcgtttggtgagggccctcttcccagttcrtagacaaccatctttctgctgtgtcctcaaatgggaaaagagaaaggcatccagtctcattaaggagagctctacctcatgacctattcacctcccaaagactccacctcccaatat

SEQ ID NO: 321226 - DNA, 578 bp, Homo sapiens
gattcagcgtttggtgagggccctcttcccagttcgtagacaaccatctttctgctgtgtcctcaaatgggaaaagagaaaggcatccagtctcattaaggagagctctacctcatgacctattcacctcccaaagactccacctcccaatatcatcaacgtgggggttaggatttcaacatgtgtattctggggtgacaaatattcagtccatagtrgcagaaaactttgatcttctcaacataataaagttaatctcaacatacttgttttgaaagcatcaaactggcattcattttcccaatatttagcattcaggactttactgttgagaattaaaatgcaactgctacattagtcctatcaaaaccatcaaagactgtaactgcataaacttaaagtataaaaacctaaaacatagaaatcatttccttttttcctgtggtgttggtttagtcacataaaccaacatacatgaaaccaacactacataaaaataagtcatataaaccaacactacgtaacatacatccttagttaaagcattttctgagcgagaatatttttacaagacaggc

SEQ ID NO: 321227 - DNA, 565 bp, Homo sapiens
acacagttggtgaagcattattcctgggtttggctctaaaagtttttcctgaagaaattggcatttgagtcagtggactgaataaggaagattcaccctcacccggtgtaggtggcaccatccaatcctctgaaggtctggatagaacaataaaagacagaggaaaggcaaattctcttccctgaccctctctttctctccctatttaagcggagacatccattttctcctgctcttggacatcagaactccaggttctctggcctttagaccttaggacttgcaccagtggccctcagagtctcagtctgaggccaaaggcatgagatttataccactggctaccgtggctctcagtccttctgacttggactgagccacactactggcttccgtggttctccagtttgcagatggcctattgtaggaattctcagattccataatcatgtgagccaattcccttatwaaatctcctctaatctatctatctgtccatctttctttcattctatcatctatttatctgtctcctgttggttctgtttctctggagaacccctac

SEQ ID NO: 321228 - DNA, 565 bp, Homo sapiens
acacagttggtgaagcattattcctgggtttggctctaaaagtttttcctgaagaaattggcatttgagtcagtggactgaataaggaagattcaccctcacccggtgtaggtggcaccatccaatcctctgaaggtctggatagaacaataaaagacagaggaaaggcaaattctcttccctgaccctctctttctctccctatttaagcggagacatccattttctcctgctcttggacatcagaactccaggttctctggcctttagaccttaggacttgcaccagtggccctcagagtctcagtctgaggccaaaggcatgagatttataccactggctaccgtggctctcagtccttctgacttggactgagccacactactggcttccgtggttctccagtttgcagatggcctattgtaggaattctcagattccataatcatgtgagccaattcccttataaaatctcctctaatctatctatctgtccatctktctttcattctatcatctatttatctgtctcctgttggttctgtttctctggagaacccctac

SEQ ID NO: 321229 - DNA, 569 bp, Homo sapiens
actcttgttatgttttagcaaagagactgctggtattttgcccttgccctagagatgtgtggaacttttaacttgaaagagatgatttagggtatcttgtggaagaaaattccaagcagcaaagcattcaagaggtgacttaggtgctgctaaaggcattcagtttcataaaggaagcagagtataaaagttcagaaaatttgcagtctgatgatgcagtagaaaakaaaaacccatttttttgaggggaaattcaagccagctgcagaaatttgcataagcaatgaggagccaaatgttaatccccaagataatggggaaaattgtctccgggggatgtcaaaaggtcatggcagcccctcccatcacaggcgaggaggcttaggagaaaatggtttcgtgggccaagcccagggtcccagtgctgagtgcaggctagagacttggtgccctgtatctctgccactccagcgatgactaaaaagggccatagtacagcttgggctgttgcttcagagggtggaagccccaagccttggcagcgagtctgcgggtgcacagaagtcaag

SEQ ID NO: 321230 - DNA, 514 bp, Homo sapiens
cttataaacatgataaataacataggctaatatttcatatgtcttgatgttatgggataaagcttttagcctaaaaatgataaagtatgtgactagccaatactttgtaataattaaccactttgaattatgcccttaccagaattccttcacttatcctggtaagcttcaatgccatagctaccaccaatccataggagtttcttctagaacaagaatttatttgccactcatagtcgtataaaggttaacaaacttagataagacttgagcttttgttcagattatcagaatctaatagtttatttcaagctaagacagtagcttcaacaataaaagatagtgactcaaatgcattgtgtataaatatataatttaataattatgtgattctaggtaaatctctttcaagaattaaaaaattccrtttacttgactgttgattagagagtgaaactcagaggtattgttacctatgatgcatgtacaacaattttgtgagatatttgaaatt

SEQ ID NO: 321231 - DNA, 592 bp, Homo sapiens
tggtttctggtgaggcttcacaaagctttgacacatggcagaaggtaaaggaggagcaggcatctcacatgacaagagagggagcaagagagagaggagaggccatgctgttttttaactaccagctcttgtgtgaagcaatagagcaagaactcatttatcaccaaaaggatggtgctaagccatcaatgagggatctacccccatgactcaaacacctcccaccaggcctcacctccaataytgaggatcacatttcaatatgagattttgaggggacaaatattcaaaccatatcaaggtttccttttgttggggggcagattttgagaagattttgtttttaaattatatttccctaaaatcctctaccgctcaacccatgcacacccccattgtttcgtgtatctgaccgttagcatgtttaattttcatctattcctttttttccaaggcagagacaaaaaagctccagttcaaagcaactacatccaaatgttcttggtgccaaaatgttatgtgcctacactttgtcacatccttacagaatttctttcttttttcaagcttcagattaatgcttccaaaacaa

SEQ ID NO: 321232 - DNA, 634 bp, Homo sapiens
gcagaaaagaaatgcaaagcatccagttcagctcctactgtgatatgctattaataaaggctatctgtacaccttttacatcgtttcaactggcataaatataatagctaaaactactccaaagtacattttaaaacatttccaacttatgctaccatttggtttatgtcttttaaaaatacattaaaggacaaactctagttaaatctatacatgaagttagctagggtatgctgatcagtgtgaaaagatgtatatgtaagaaatattttcccccattctatgagttatcattacattttcytgcaggtgttgtttgaagcattcaagattttttaaattgatgcagtccaatttttctatttttttcctttgtcacttttccttttggtgctgtataaaaggaatcatgaagttttattacagtatttttttctaagagtcttacatttttagttcttatatttaggtctataatccattttgagttaaatttttatgtggtttgaagttgaggtccagccttgtccttttttgtatagctgttgtctcagagccatttgttgaaatgactgttctttctccttttgaattgccttgacacttttgtcaaaaattggctgcccataaataa

SEQ ID NO: 321233 - DNA, 580 bp, Homo sapiens
gcctccaacaccacagcttccaggcagtgagggagtccctggtgcagggcaagccacagcaactgttttagaggccatccacagccaaggccgttgagactctggacaatttcctgggatgaccgccagcttgagtctgcatggtgctgctgagacagggtggaagagggagcygggtggcccttactttcctttgcttaaaggtggccctgactttccttttcacagagtggtttcctgaatgtgtaaatgtgaaagtaaaatacaatttaaaatatgtgcctatatatatatatatatatatatatatatatatatatatatatatacacacacacatacatacacacacagacacataaatcccttcagccaagagtggaaagcatattggctcaaagcaattaagaaaatatctgtccagtcattccaatcattagcagatctctaagctaactgagcagtatcttttaaccggtacacacaacagggaataaaacctggaaagaattactccagaaatgctattagtcaaataaagagcaacagtagtagcaacaataacaataacaacaaatgg

SEQ ID NO: 321234 - DNA, 516 bp, Homo sapiens
aacactctggagcccctcaggcagggaacgtgcatttcaaatcttgactttactcatactgaaaggctgcacatgttccttcttccctgccttctctctgtatgctccttgaacccgagtggaacagtttcttcctctctctgccgacaattgcaaattgaaattctcagccaaggatgaaagaagtaaattgtaggcttatccaagtagcartaattctgcaggtcacaactcctgcacaaggacacctgctcattgcataattaatgtgaggaagtctcttccagttaatcccatgaactagggagggcctcaagtcaccaaaacacaccaggatgtggccgggatttacctatatattgaggcattccttcaatgttctcacagtttacaactctgtcttaggctttacttttacacagggacccaaggccagccaaaggcaagagattagagccttctcaggatttctggagcatgtacacacccctttacatgtgtgtggttttttatacc

SEQ ID NO: 321235 - DNA, 539 bp, Homo sapiens
gtagcatagaaaatagaaaatgtgcttaatgaactggatatctggctaaagagatttcaggcaaagtattgaaagtgccacctggcttcttctatttgcatataataaaatgaagagagagattagctaatgaacagatggttgaatataaaagagccaaaatttgctgatttcaaaataaaaccgtttttcattcccagattatccaaatggcaaacaattttcaaattcagaaatagcttccaggcaaagatcaaatccagagcactgttaggaaaacattgtctaaaaataaagtaaaaaaaactatgacttacatagtgtstgtgtgtgagattctgtgtgtctcaatattgagatctttatatccatatacctgtatgtgtgattaaaatgtgtgtgtgtatatatatatataatatatacattttaatcttgcagatatttaaatactttatgatgtcacaagtttcctttacaggttctgttctttgtgtcttgcttcagtaagcctttcccacttcaaaaatataatgact

SEQ ID NO: 321236 - DNA, 539 bp, Homo sapiens
gtagcatagaaaatagaaaatgtgcttaatgaactggatatctggctaaagagatttcaggcaaagtattgaaagtgccacctggcttcttctatttgcatataataaaatgaagagagagattagctaatgaacagatggttgaatataaaagagccaaaatttgctgatttcaaaataaaaccgtttttcattcccagattatccaaatggcaaacaattttcaaattcagaaatagcttccaggcaaagatcaaatccagagcactgttaggaaaacattgtctaaaaataaagtaaaaaaaactatgacttacatagtgtgtgtgtgtgagattctgtgtgtctcaatattgagatctttatatccatatacctgtatgtgtgattaaaatgtgtgtgtrtatatatatatataatatatacattttaatcttgcagatatttaaatactttatgatgtcacaagtttcctttacaggttctgttctttgtgtcttgcttcagtaagcctttcccacttcaaaaatataatgact

SEQ ID NO: 321237 - DNA, 557 bp, Homo sapiens
ctggatttgtagtttttccaatgctgtaaatactcccactaccaccaattcaacctaccgatattatgtgactgaactagaaagttgggaagagatgcacacaattagttcttctgagtacaattggtataagtggtttccatcccatcaaatgctatattacaaggaggatatcaactgtaaactagttcatgaagattttccattaatactcgagagtagtcagtgcccagagaaatgaaattttttgaaatactatagttcacatatgaaagatgtaagattttctcaatctgacaataatcctaagtatacatattatatacacattgagttgtgaggccaaaagaaatttgtatgttatcaatacaaatttcaaataatttactagaggacatattgaattaagctttcaatcttttcataaatgtattagtaatggtcaaatgcagctagaaaatataaagaagaaagaatataaagatggattaggcaattaaaaatttyttttaaagcttgtgatgtaaatgctgtttattagctacttatagtttgca

SEQ ID NO: 321238 - DNA, 615 bp, Homo sapiens
tcatacacagcaccctaacccagatcagtgtttctcaaatttgcagattgaactaatccttttttagagaaaagggctttcaaaaactgatrtagagtcttatgctgattcaaattgtttattatgtatcatatcttttttatagcattgcttaaatatttataattataaaactacatttcaattacttaccacacaaaactaattaatggcttatacattttgtacaagtatgaaacctaaacaagtaaatttaaaatgtatatggaaaaaaaatcaatgaaattttagcaagcatatttttgtgccacctctccctgatttaatactttcctacttttttccagctttctggaacaatgtcaaaagtcattcatttggggggaactcattctctacaagcaaactacaaaggtaagtgtacatgctcagttcctatatccaaagtaaaaaaagcttcccaaagaaagaagaagaagaatgtagaaaacaccagtcaaaaaggaaaatgtattagggcgctgggctaaagagttaaaattatctgaatatatttctgttcaaaaaatgtgcatttctacatgttttcttgtcaatagataagagaccactgtg

SEQ ID NO: 321239 - DNA, 632 bp, Homo sapiens
cattagcgagacttctccctgtagccaccacagctaagaatgtgctgtgtcactcctgaagccagtatttctcagggtctcacccaaggtccatggcgagtactatgatgtggctatcactgctgtttactcagggcccaagagctcattagttggcagatgatgaatgctgttaggactgggttcttcccttcaaggcagtgggttcccttctggcccagtttttccagaaactttgtccaggagctagggcctggaatgagggccataggatagggcacctctgcctcgtgccctatcctactatggctgagctggtatccaagttgcaagacaaaatcgtcttcactcttccttcccctcaggtgggggaatgaattctttcccacagatgggagctgtgcttcctggggttcaaggaggtgtggcacaaggactccctgagccaccctggctggtctcactaggttgcatrtttctccaagtctactggctctgagcccagggtcaggacttacccaggagttgcagtccttgcggcttagattgcctttcaagtttatttaggaccccacagcactttggcccacaggagaaaggcttgccagaactgaaatgggcaactcccctct

SEQ ID NO: 321240 - DNA, 589 bp, Homo sapiens
cttcatgtgaacctgcactgcactaatgaatatgcctttgccatagtatgatattgatatgaatattcttacatctattttaatagacctcaatttttttttaagaatcacatagtcctttttaaaagcaattatgaaaaacagcagtcaagatgatagaaagggtgctctagcaggaaaagaatttactaagtaattcttactgtgtgctaaactgatatgctttaggaaagccaggaagcttgattttcttttgctttcatgacagatccacctcatttcctttacttctgcctgctccagttcctcactgcaggccccytgagagaccacaccttcagcctgtatcctgccaagttgcagaacagaaagggcaatcccactgtaggaaggcagtatatgaactgcaaacatcttctttccctcatctggagtacatctctgctcagtctaagatgcagcatacccaggaggcccagggtactgcctttcttgtccacaaatcttccttgtgttgaaaaaggtaaaatataacacagaaaattagaagtatgacttctaattctattgcatagagatgtactgttaa

SEQ ID NO: 321241 - DNA, 462 bp, Homo sapiens
ggtcatcctcaggtagatgattactaaaacacatttgttgtttttagccagatgcttttttaatgtgagtgccttttataattgtgtacattaaaaactcaatgaaaaatgtgttttcctagccattgaccaaaattttgctttaagatattggttatgggtgtgatacagaaatatttcttacttgctrgtgtaatagcatgccattgtttttactgtgatgtttataaatagcttccaagccataaattatccacgtcaaaaattttaaagtctaacactctcctgtgttctaaaaacattgagatattttaagtggaatctgttttcttagcatttctaggtataaaggctctaaatgaatgagaaaatattataagattatgttctaataattatgctgtccacccaaagaataattttataattttgagttgaataatacaatatatcctatgacac

SEQ ID NO: 321242 - DNA, 634 bp, Homo sapiens
cttgccagttggtcattcttgatgaacccagagtaccttcaaaactcttaattcaaggtgcctagccttccctcatgctgtagctggtccaaaagataaagcttagaggtcatcctcaggtagatgattactaaaacacatttgttgtttttagccagatgcttttttaatgtgagtgccttttataattgtgtacattaaaaactcaatgaaaaatgtgttttcctagccattgaccaaaattttgctttaagatattggttatgggtgtgatacagaaatatttcttacttgctagtgtaatagcatgccattgtttttactgtgatgtttataaatagcttccaagccataaattatccacgtcaaaaattktaaagtctaacactctcctgtgttctaaaaacattgagatattttaagtggaatctgttttcttagcatttctaggtataaaggctctaaatgaatgagaaaatattataagattatgttctaataattatgctgtccacccaaagaataattttataattttgagttgaataatacaatatatcctatgacactaagcaagttctctgtaaaaatatttgattaacattcactgaaaagttacaaagtctattaaact

SEQ ID NO: 321243 - DNA, 575 bp, Homo sapiens
ctgtctaaactttgtattgtaaagtggaacttatccattccagcagattgcaaggcactggaaaagacaagtaaagaagggccactgtggaaacagaaattaaaaaacaagtttcctgtcagatattagcagtatcttagaagaagaaatgaggatggcatttgaatttataattgaaacctcttccgtaaggtgtgtttcaccatctaaatttaaggaactattactttcctccaattttttatatctctaattgtgtacaccaattaaattatgattattatagtgtcttgagtttttagttatcttctaayatgtacacattttatctcccaaattagattttcccacatctattcctgattatgtccccctacacatctggaaaatactagagcagaactgagcatttggcattcaatagatcttcgttcattaagtaattggattcctttaattctatataaaaatgtatacagacttcaatttgattcagatatagtaaactgaaatgaaaaaaaaattttccaacattcaactttggaaattttccaaaatttcaactattatgaaaa

SEQ ID NO: 321244 - DNA, 571 bp, Homo sapiens
taggtttactgataaaggaactcatataagacaagtctaagtttctcaagcttcagttctatgcgaaaattgggttggtttcaaactaaatgaaattctacttatgcttccttcaattatgtccacataccaggaaatattctcggaggcttagtttgagtatttaatttaattccatatttctctgtgggtmtatattttttcattcaacaaacaattattgatctcctgctctgtgccaggagttggaataagaactattttagtggggaaaaaatgtcctcttcccagaattatctcccagtcagaaggcatacacattatgagaaaagttacaggagaatgaagtatgttcttttgaacagtaaaaaaaaaaaaaaaaaaaaatgcgcaagctgtgcctggaagactcataaatgacactactgatataacagacttaaaggaattttctaggtagagtccagagcattctagacagaagaaatcacatcttgtaattataatatatacctcctctatggccagttccagacctctgtgtcgtcatataaatgccattcttcagcta

SEQ ID NO: 321245 - DNA, 571 bp, Homo sapiens
taggtttactgataaaggaactcatataagacaagtctaagtttctcaagcttcagttctatgcgaaaattgggttggtttcaaactaaatgaaattctacttatgcttccttcaattatgtccacataccaggaaatattctcggaggcttagtttgagtatttaatttaattccatatttctctgtgggtctatattttttcattcaacaaacaattattgatctcctgctctgtgccaggagttggaataagaactattttagtggggaaaaaatgtcctcttcccagaattatctcccagtcagaaggcatacacattatgagaaaagttacaggagaatgaagtatgttcttttgaacagtaaaaaaaaaaaaaaaaaaaaatgcgcaagytgtgcctggaagactcataaatgacactactgatataacagacttaaaggaattttctaggtagagtccagagcattctagacagaagaaatcacatcttgtaattataatatatacctcctctatggccagttccagacctctgtgtcgtcatataaatgccattcttcagcta

SEQ ID NO: 321246 - DNA, 597 bp, Homo sapiens
tttttataaaaggaaccccagagtgatcccacaccccttctgccatgttcagttataatgaaaagatggccatctatgaaccaggaaggaggaccttaccaggcactgaaccttcctatgcctttatcttgtacttcccaacctccggaactgtagaaataggtttctgttgtttatgtgccacccattctgatactttattatagcaacctrtatgaactaggaagctatcatttacacttttcttttttattcattggagccaagttattatggagttaagttcacactcaaaagtaagggaattaagctccattttttgaaggaagtttcaaaaaatagggacatatttttaaaccatttatgcctgaggttgcaattttttgaattttgaaatcagaccttagcgatgaccttgagcagcaagatataaatcactcccacgtgcttagagttccaataatggaaccatatacgagtataatggtgagcagggcagacaaagctctgcccttatggagatcgtattctacttcaggaagatttaaaaaaatcaatgcataaaatctataagcaagacaatttcagattgtttta

SEQ ID NO: 321247 - DNA, 582 bp, Homo sapiens
tctctctttcactgtttcttctgttccagcttattccactttaaaaaaacagcacaaaagtatttcaaacaaaataaataactcaacgtttatatactcagcaaatatttcttggagcgtatgagggattttggtagttattggtgctaattatggtgatcaaaaagagatcacttatgaacattccagggtagaggagaaaacaggagtttgttaatattctgattagttatctactaacacattcatataatggttcctaagacaagggatcttgtgtgtcagagtatataagacgagaatctgaccagacttctgagttgtatggtttattgaggaagagatactgacactaagatgtaaaaaataaagacaatttcattaggtgaaaagagatggggaaattattacaatcaataaagcgtatagtatgtaccaggcactgtgctgctggagaatatgaatggggagatgagggagtgcttgygaaggagaaacaagatgagtttgaggaatcaaataatcctgcaactagattagagagaaagatgtgctctatgggataatgctggagtagttagc

SEQ ID NO: 321248 - DNA, 415 bp, Homo sapiens
ttgatccatgaattttgctagatatgggccacatgggcctttgatgtttttagaaaatgacacaaagaagtaaatatgtaatttcttacagtacttagaggataaaagtgaatcattctttttaacagaagcataagaattcctgataccaggaaccaaaagacattttctatgtagttctctataaaaataatayggtataatcagtgaatatcatccccaccaaaaccttagcaacaattccatcaatgagaagctgaagactagttaaattcaaggtaaaattttacaagtatgtcaaatatgaattttttgtaatatttggcaagccttcataagcactattctctcaatgaagtattaagttgtgtagattggaggtgatagccctgtgaaagaatggaatattctcacc

SEQ ID NO: 321249 - DNA, 598 bp, Homo sapiens
tgaattttgtatttagacttgggctcgatccccatgatatttcattatgtatgtgcaaatattccaaaattcaaaaaaacatgaaattcctaacacttatgatcccaagcattttagataagagatactcaacatgtatgcatgataaagtactattcaatcataaacatggggaaatcctgttatttgtgacaatgtggataaacttgaaaaggtttatattaagtaaaacaagccaggcacagaaaaacaaatactacatcatctcactcatataaagaatctaaaaaagttcatctcatagaaatagagagtagaattgttgttatcagagactggggtggttgggggagagggtggttgttgagatgtttgttaaaggatacaaaatttcagtgagatgggaagmatgaattgaagacacatattgtgcaacatgatgactatagttaataacaatttattgacttatttaaaaatgctgagtggacatattctcactataaaaataactattgtgaggtaatacatatgctaattagtgagatttagtcatttcacaatgtgtatatatacttcacattgcacatgataaata

SEQ ID NO: 321250 - DNA, 582 bp, Homo sapiens
agctggccatgttcaacttatatttctagtaaaataactataaactgaaaactagtacaaaattccagactaagggaaaaatattttaaagcactttctctaaaaattattatagaaacacataataaatacttcacatctttttttcggggttactgtggctttttattaaattaatcttttatgatgtgagcttcaaagatgactttgaatggaaaagtwgatcgttaaaaaaattctttaaaatcttccttttttcttttcatttttcttctttatttcatttctgtctttaacttaagaaatatttcactatcccaaggatacacagacacacatacatatatatatataaaatatgtgaatagatatatttaagtatatataaataaaagaatcataaaaagttacatgttattatgatatttaaaatcataatgtttattttaaaatatttccctgcggggctgagaaagtaatggttaatgcagaatggaaagttcatgagttttctcaaggccaatgtggaatttggtgtgttactatttgaaggtagtagatgctattttccttttttttttt

SEQ ID NO: 321251 - DNA, 552 bp, Homo sapiens
ctatttaactattgaatcatgatttgtttaatgtgtgcatattttatctccattataagttataygattttcttaatatatgtatgaatcaaaaactagttaatgatctctccatatgtctatctctgtttttattaaaatacggtgagctaaagtgaaataactgagatccttctttttattatgttgtctttatttccttttcccaataattgtaataatttttctatactttcctaatttaactttgtacatatttgattagaacattgcaagcatttctcaaagtaacgtattggcaaagcagccagaactagctggttggctacacagtgttgccaaaaaaccacttattttgatttaagatgatctccatgctccagtttctaaatccaaatgctacatttctgggaacataaaagcatttgccaccattgacaatttattttacccaaaggaaagtagccacaatataatcatacattccttttggaaaaaaaaaaagactaagatgtttcagagatcaaaagctcaaaagaccaggatatccat

SEQ ID NO: 321252 - DNA, 546 bp, Homo sapiens
cttattctccttgaagctctccatgattcttcagttcaaatactgttctgtgaccactggaactttaggcctctatttaactattgaatcatgatttgtttaatgtgtgcatattttatctccattataagttatatgattttcttaatatatgtatgaatcaaaaactagttaatgatctctccatatgtctatctctgtttttattaaaatamggtgagctaaagtgaaataactgagatccttctttttattatgttgtctttatttccttttcccaataattgtaataatttttctatactttcctaatttaactttgtacatatttgattagaacattgcaagcatttctcaaagtaacgtattggcaaagcagccagaactagctggttggctacacagtgttgccaaaaaaccacttattttgatttaagatgatctccatgctccagtttctaaatccaaatgctacatttctgggaacataaaagcatttgccaccattgacaatttattttacccaaaggaaagtagccacaatat

SEQ ID NO: 321253 - DNA, 543 bp, Homo sapiens
cagtggggaaaatgcctcggagacctttgcagtagcccctcccatcacaggcctggaggcctaggagggaaacatgatttcatggaccagacccaggagggtcctgctgctctttgcagcctcgggatatagtgcgctgggtcccagccactccaacttcagccgtgaccaaaaggaggcaatgtacagctctggctgttgctttagagggtkcaaaccccaagccttgtcagcttccacgtggtgttgggcctgcaggagcacagggatggaaagttgaggtatgggaacttccacctagatttcagaggatatatgaaaatgcctggatgtccaggcagaagtctgctgctagggcagagtcctcatggagaacctctacaagggcaatgtagaggggaaatttggggttggagtccccacgtggaatccccactgcctagtggagctgtgagaagagggcaattatcttgcagacactagagtgctagatccaccagtagcttgcactgttcacctggaaaagatgcaggcactcaatgc

SEQ ID NO: 321254 - DNA, 625 bp, Homo sapiens
ctgtttctttgctaatttcatttggcctcactctaatcctctttccttctagatacacattattgttattcccaatctaaatttactctcgcttccgaacaacacataaactrtaggcaagctatgcttcctctatcactcccaaatcacctaccacaagtttaaatcttatacatcctttctaagattccctaaatgagaagcctcattattccctgtggagtgtttcttacggtctttggctggagagtattggcagaggcaacttaaaaacctgtatggatttcaaacacagtacaaattccacttgtgctttaagtatactgacacacacacacacacacatatccatatttgaatgatacaaaaccaaattgacttgatgtaaaataataaattaacaagataataaaaactgtctttataatgtattatacttaaagcatgctagcctcttacctgcttaacctcattcaattcttaaaacaatggtataagggagatgtttaccatatttattttatatatgaggaaatacaggttttgctgtaaaatctgaaatttttgacacatttggaaattgtatattgactgtcagattcttgaaacagttttaactactaaa

SEQ ID NO: 321255 - DNA, 560 bp, Homo sapiens
aaaaaaaaaacaaaactctgtgtaatcaagtctgacaactaacaacaaacattactattttcctaagcataaaaataaccaaatgatagttaatagcttgaaagctgtttctttgctaatttcatttggcctcactctaatcctctttccttctagatacacattattgttattcccaatctaaatttactctcgcttccgaacaacacataaactataggcaagctatgcttcctctatcactcccaaatcacctaccacaagtttaaatcttatacatcctttctaagattccctaaatgagaagcctcattattccytgtggagtgtttcttacggtctttggctggagagtattggcagaggcaacttaaaaacctgtatggatttcaaacacagtacaaattccacttgtgctttaagtatactgacacacacacacacacacatatccatatttgaatgatacaaaaccaaattgacttgatgtaaaataataaattaacaagataataaaaactgtctttataatgtattatacttaaagcatgctagcctct

SEQ ID NO: 321256 - DNA, 560 bp, Homo sapiens
aaaaaaaaaacaaaactctgtgtaatcaagtctgacaactaacaacaaacattactattttcctaagcataaaaataaccaaatgatagttaatagcttgaaagctgtttctttgctaatttcatttggcctcactctaatcctctttccttctagatacacattattgttattcccaatctaaatttactctcgcttccgaacaacacataaactataggcaagctatgcttcctctatcactcccaaatcacctaccacaagtttaaatcttatacatcctttctaagattccctaaatgagaagcctcattattccctgtggagtgtttcttacggtctttggctggagagtattggcagaggcaacttaaaaacctgtatggatttcaawcacagtacaaattccacttgtgctttaagtatactgacacacacacacacacacatatccatatttgaatgatacaaaaccaaattgacttgatgtaaaataataaattaacaagataataaaaactgtctttataatgtattatacttaaagcatgctagcctct

SEQ ID NO: 321257 - DNA, 418 bp, Homo sapiens
ttgactatttttagtcaaagtgtacagaaatataataatttcaaatatatgcctttttaartttaaaatatatttcaaaatatggctacttggcatactgagtattttaagctgaaggaatttgagaaatgaacagaagcatgaaagtctctctgaccttcttctatcaatttcccctgaagtaggccagaaaagaattctttgacctttctctaaagtgggtcatagacactcattccagaggtggtcctcctatattcagaggaaaagaatgtccttatctctaaagaccacgcgatacaaagaacaatctgaaccaactcagatacactgctcagttccctgcggtgtattaccattagatcattcccttttgtcctccaatcatacttctacctgattgctcataaaaatatgc

SEQ ID NO: 321258 - DNA, 418 bp, Homo sapiens
ttgactatttttagtcaaagtgtacagaaatataataatttcaaatatatgcctttttaaatttaaaatatatttcaaaatatggctacttggcatactgagtattttaagctgaaggaatttgagaaatgaacagaagcatgaaagtctctctgaccttcttctatcaatttcccctgaagtaggccagaaaagaattctttgacctttctctaaagtgggtcatagacactcattccagaggtggtcctcctatattcagaggaaaagaatgtccttatctctaaagaccacgcgatacaaagaacaatctgaaccaactcagatacactgctcarttccctgcggtgtattaccattagatcattcccttttgtcctccaatcatacttctacctgattgctcataaaaatatgc

SEQ ID NO: 321259 - DNA, 567 bp, Homo sapiens
gtgaatactgataacgatggctatgatgttgacgagaacatgattagacaggtgtttaatatgatagtttgttaagatccactttaaatagattgacttctcagagacttgcatggattgagaacrttaactggatgataaatgccttgagaataagacccacatcttaagaatccttatagacagtaaaattacgacttgactaatagtcattaaatgtagaggtaaatagaatttttgtgaatattaatttcaaatcatctcaaagtattctgtgaaaatggtgactattttagtaataaacatttctttaagaaaacaatctgtttacttaatatataaagtcagtaatgtatatcataggaagaatttcttaattttcatgagtagagagattgataactggaaacagtgctgagaagatatattaatctacaacaagaatacttaaattatacaagattgtcagattttattttaaaaagaaatcagtgatggtctttctacaagtaatataatttaattctgaaaacagaaagactgaagatttaaaatttggtaaatatt

SEQ ID NO: 321260 - DNA, 567 bp, Homo sapiens
gtgaatactgataacgatggctatgatgttgacgagaacatgattagacaggtgtttaatatgatagtttgttaagatccactttaaatagattgacttctcagagacttgcatggattgagaacgttaactggatgataartgccttgagaataagacccacatcttaagaatccttatagacagtaaaattacgacttgactaatagtcattaaatgtagaggtaaatagaatttttgtgaatattaatttcaaatcatctcaaagtattctgtgaaaatggtgactattttagtaataaacatttctttaagaaaacaatctgtttacttaatatataaagtcagtaatgtatatcataggaagaatttcttaattttcatgagtagagagattgataactggaaacagtgctgagaagatatattaatctacaacaagaatacttaaattatacaagattgtcagattttattttaaaaagaaatcagtgatggtctttctacaagtaatataatttaattctgaaaacagaaagactgaagatttaaaatttggtaaatatt

SEQ ID NO: 321261 - DNA, 567 bp, Homo sapiens
gtgaatactgataacgatggctatgatgttgacgagaacatgattagacaggtgtttaatatgatagtttgttaagatccactttaaatagattgacttctcagagacttgcatggattgagaacgttaactggatgataaatgccttgagaataagacccacatcttaagratccttatagacagtaaaattacgacttgactaatagtcattaaatgtagaggtaaatagaatttttgtgaatattaatttcaaatcatctcaaagtattctgtgaaaatggtgactattttagtaataaacatttctttaagaaaacaatctgtttacttaatatataaagtcagtaatgtatatcataggaagaatttcttaattttcatgagtagagagattgataactggaaacagtgctgagaagatatattaatctacaacaagaatacttaaattatacaagattgtcagattttattttaaaaagaaatcagtgatggtctttctacaagtaatataatttaattctgaaaacagaaagactgaagatttaaaatttggtaaatatt

SEQ ID NO: 321262 - DNA, 567 bp, Homo sapiens
gtgaatactgataacgatggctatgatgttgacgagaacatgattagacaggtgtttaatatgatagtttgttaagatccactttaaatagattgacttctcagagacttgcatggattgagaacgttaactggatgataaatgccttgagaataagacccacatcttaagaatccttatagacagtaaaattacgacttgactaatagtcattaaatgtagaggtaaatagaatttttgtgaatattaatttcaaatcatctcaaagtattctgtgaaaatggtgactattttagtaataaacatttctttaagaaaacaatctgtttacttaatatataaagtcagtaatgtatatcataggaagaatttcttaaytttcatgagtagagagattgataactggaaacagtgctgagaagatatattaatctacaacaagaatacttaaattatacaagattgtcagattttattttaaaaagaaatcagtgatggtctttctacaagtaatataatttaattctgaaaacagaaagactgaagatttaaaatttggtaaatatt

SEQ ID NO: 321263 - DNA, 451 bp, Homo sapiens
ctacaggccaaaagtagcaaagatgttttccccatgataacgaccttcaccataagctctatatatataggaatgaaatgaggagcacyaacatttattatttttattgtcaagatattggacaagggaatcctcagtgttcagattctcctttgaaggtgatctatggaagtgtgtttgccttctgcaaatatggttttttctaactacttgacatggtctactaagttcctaaggtagagtatttgcctttgtaacgatttgagacaggaaatccacacatattcctcttcttttcatttgttcctttctggtttataaaagagaagagggataaagcttattcagaatccatctgtcactatgttcttctgtcacagtgtctggttcttgcttgcaactgctcaagggtgttgatttattaaaagcaagctgtcaatatatttatcta

SEQ ID NO: 321264 - DNA, 451 bp, Homo sapiens
ctacaggccaaaagtagcaaagatgttttccccatgataacgaccttcaccataagctctatatatataggaatgaaatgaggagcactaacatttattatttttattgtcaagatattggacaagggaatcctcagtgttcagattctcctttgaaggtgatctatggaagtgtgtttgccttctgcaaatatggttttttctaactacttgacatggtctactaagttcctaaggtagagtatttgcctttgtaacgatttgagacaggaaakccacacatattcctcttcttttcatttgttcctttctggtttataaaagagaagagggataaagcttattcagaatccatctgtcactatgttcttctgtcacagtgtctggttcttgcttgcaactgctcaagggtgttgatttattaaaagcaagctgtcaatatatttatcta

SEQ ID NO: 321265 - DNA, 565 bp, Homo sapiens
aaatattttagtgcccattgagtttgaaaatttgttaaacttatttttcmgttggaattatgtaagctgaaccaactgagatttctatggtgttggccattgtgtgtacttttaatcattggtattcttcattagggcattaaccttaacaagactaattttttctttgcagattgatgtgaaggctgctgcagcattcatcttcaacatcatctcattccttttcagaatgagttatccatttgtgaactgctgagttctttggggcattgtcttcataaacttttcataaaccatcaaagatttcaccatcattcaacccaagctttgccgtaagtttaatgtttgttgttgcttcaattttagcacaattcatattgttctgataggactcttttcaaactgatttcttatcctttttaatccctcaaactagattctactgacatgtattataacaagttaatatttatttatatattttaacaattatttaaaaatttattcataaaagttagaatttattttggtacaaacctttttgaaatccatgcacaatttttta

SEQ ID NO: 321266 - DNA, 644 bp, Homo sapiens
acatgtagtcaaggaagaaaaaggtaaagatgtattaatttatttatattatttttattccagactatgttctcaacaatttcccataccccacctttttattttgacagctaggctagatattttcattgttaatatattaaagaagcttgtttgacatgtaaacaaatgttcctattatatggggccatagatttaaaaaaaaatcatgcttatagagcaccttcgcttgaacagtgttcaaaatgtaggtagattttttaaagtggattacaatacaaactgcacaacaaacaaaagcgcagtttgtttttaactgcaaaaggcaaataaatgataaaatgttgtgatgtttccactaatcaaaactcgcagaggcagcatgtaatctcartgccttatgatttcaacatgcagttctaaattgggtagttcacaaacactaatgttatccagtaatttatgtcttctctctcccatatttatgtcttctctctcccattagttggttatatgtctggctgtaatacaagaagccaatatagatgtccatattgtaagattactgatagccttgtcttgtttacagagtgaagcattgatcagattcagcctctaggtccatagggtgactcatatcagta

SEQ ID NO: 321267 - DNA, 669 bp, Homo sapiens
atttaagatagcatgtttagcctattaattattggttctagtatatatctgtccactttttgtttatttgattttgtttttaatacaaatttttctacgtggcttagtatggttttaaaatttaaaatttcttcactttaataaatgctacaatcttacaaaaaactcaggattatctaaaataaccaaggtatggaaacaacstaatgctcatctatgaatgaatggataaagaaaatgtggtataaacacaaacacacacacaatggaaagttaatcagtctttaaaaatatggagacccatttgctagaacatgaatggatctagaggacattatattaagttaaataaggcagacacagaaagaaaactattgcttgatatcactgacatgtggaattacaaaaaagagctgaaatacacagagatagagaataaaacagtggttaccatcagtgggagggggagaagaaatggggagatataggtcagaggatatcaaatagtggaaatacaggataaacaactctagagatctaatgcacaatatgagaacaaaaaagggttttttttaacttttattttaggtttgggggtacatgtgaaggtttgttacacaggtaaacacgtgtcatgaaggtttgttgtacatattatgtcatcaccca

SEQ ID NO: 321268 - DNA, 669 bp, Homo sapiens
atttaagatagcatgtttagcctattaattattggttctagtatatatctgtccactttttgtttatttgattttgtttttaatacaaatttttctacgtggcttagtatggttttaaaatttaaaatttcttcactttaataaatgctacaatcttacaaaaaactcaggattatctaaaataaccaaggtatggaaacaacctaatgctcatctatgaatgaatggataaagaaaatgtggtataaacacaaacacacacacaatggaaagttaatcagtctttaaaaatatggagacccatttgctagaacatgaatggatctagaggacattatattaagttaaataaggcagacacagaaagaaaactattgcttgatatcactgacatgtggaattacaaaaaagagctgaaatacacagagatagagaataaaacagtggttaccatcagtgggagggggagaagaaatggggagatatargtcagaggatatcaaatagtggaaatacaggataaacaactctagagatctaatgcacaatatgagaacaaaaaagggttttttttaacttttattttaggtttgggggtacatgtgaaggtttgttacacaggtaaacacgtgtcatgaaggtttgttgtacatattatgtcatcaccca

SEQ ID NO: 321269 - DNA, 669 bp, Homo sapiens
atttaagatagcatgtttagcctattaattattggttctagtatatatctgtccactttttgtttatttgattttgtttttaatacaaatttttctacgtggcttagtatggttttaaaatttaaaatttcttcactttaataaatgctacaatcttacaaaaaactcaggattatctaaaataaccaaggtatggaaacaacctaatgctcatctatgaatgaatggataaagaaaatgtggtataaacacaaacacacacacaatggaaagttaatcagtctttaaaaatatggagacccatttgctagaacatgaatggatctagaggacattatattaagttaaataaggcagacacagaaagaaaactattgcttgatatcactgacatgtggaattacaaaaaagagctgaaatacacagagatagagaataaaacagtggttaccatcagtgggagggggagaagaaatggggagatataggtcagaggatatcaaatagtggaaatacaggataaacaactctagagatctaatgcacaatatgagaacaaaaaagggtttttttwaacttttattttaggtttgggggtacatgtgaaggtttgttacacaggtaaacacgtgtcatgaaggtttgttgtacatattatgtcatcaccca

SEQ ID NO: 321270 - DNA, 604 bp, Homo sapiens
tgccttctcttataaattaaaacagagtttgtgatagaatctgcttttggtttgttatgttgagtgatacacagtgtgtcaaaacaaagttacacaaaaagttcctgtgaagtaccagctcatcactaacaaaaagctaacagcaggatgctgaaatgcaaggaacattgctgtagtcacggaaagttctaagctacttatctggttcagctccttactaattttaagatcttcagcttcctacttaaatgttctaaagtttctttttactcatttaatatggtgataacaagacctttctacttccataaattgctgcgaaaattaaatgaggaaatgtatttgaaagttgtttgaaagtagttttgctgaagatgtaaggtatctttattaaggaaagggatagcaaaacaataagtggagaacaacaaaatactagtaaytttcaggaaaattaaattaaattgatgtttttcaggtgaggaggaagacctgtggcatttgtttggaatttttttttttttttggagctgaatagcaaaatgtggatctacaaataaataagaatagcaaattttcaatgcctcaagtctttctgataaac

SEQ ID NO: 321271 - DNA, 604 bp, Homo sapiens
tgccttctcttataaattaaaacagagtttgtgatagaatctgcttttggtttgttatgttgagtgatacacagtgtgtcaaaacaaagttacacaaaaagttcctgtgaagtaccagctcatcactaacaaaaagctaacagcaggatgctgaaatgcaaggaacattgctgtagtcacggaaagttctaagctacttatctggttcagctccttactaattttaagatcttcagcttcctacttaaatgttctaaagtttctttttactcatttaatatggtgataacaagacctttctacttccataaattgctgcgaaaattaaatgaggaaatgtatttgaaagttgtttgaaagtagttttgctgaagatgtaaggtatctttattaaggaaagggatagcaaaacaataagtggagaacaacaaaatactagtaattttcaggaaaattaaattaaattgatgtttttcaggtgaggargaagacctgtggcatttgtttggaatttttttttttttttggagctgaatagcaaaatgtggatctacaaataaataagaatagcaaattttcaatgcctcaagtctttctgataaac

SEQ ID NO: 321272 - DNA, 574 bp, Homo sapiens
gtatctgtttgtttcaatgcattcataaacacacacacacacacacacacacacagtgtgcttatctaatcattttacagaagatccctatatttaagttgtcattttgtaagagttttatgttttcgcttttgcttttttcaaagctttcaacaactgcctaagctttgaagcattttgtgtgtgtgtgtgtgtgtgtgtgtgtgtgtgtgtctgtgtgtgtgtgagatcytaaataagggatttgtatttcttcaccaattacctcttcatcgatctccatttgcttacatacctcctatattgccttgttctgggcatggaaaaatatttatttcgatggttttcacttataatgcattctcactctaagcgattctaataaagcaatcaaagtttacaatcctgagtattagtatttgaccctatgaaagcataaattttgccttgtatctttaagaatttttaccttttgtgtaatgagctatcagcattgtttacctataaattaaaaaataaaatattatttgttttcctatgaagttagtctatatttctgacatagttttaatct

SEQ ID NO: 321273 - DNA, 574 bp, Homo sapiens
gtatctgtttgtttcaatgcattcataaacacacacacacacacacacacacacagtgtgcttatctaatcattttacagaagatccctatatttaagttgtcattttgtaagagttttatgttttcgcttttgcttttttcaaagctttcaacaactgcctaagctttgaagcattttgtgtgtgtgtgtgtgtgtgtgtgtgtgtgtgtgtctgtgtgtgtgtgagatcttaaataagggatttgtatttcttcaccaattacctcttcatcgatctccatttgcttacatacctcctatattgccttgttctgggcatggaaaaatatttatttcgatggttttcacttataatgcattctcactctaagcgattctaataaagcaatcaaagtttayaatcctgagtattagtatttgaccctatgaaagcataaattttgccttgtatctttaagaatttttaccttttgtgtaatgagctatcagcattgtttacctataaattaaaaaataaaatattatttgttttcctatgaagttagtctatatttctgacatagttttaatct

SEQ ID NO: 321274 - DNA, 571 bp, Homo sapiens
gactgacatattgaagtttcaatactgtaccagctaggagacactttacaaatttgggtgctctcttgcatggtgytttatatgctttaaatcagtgaccaatatgtagtgagttttctccaacagctagaatataggttcagatgacacacatgagggtagaaagaaaaattaaatatctcattattaaatctaatgatgcatgtataatactttgccttcttatttctttacttagaattctgccgattcagaggagtgcttcctccaggtaacataaaaaatgttccactgaagtgcaaatcaacactaccaccttgctatccctagtggtaaaaggtgatagacatttatagatatgtattagaggcaaaattccaagaactgatacccccaaaaaattgtttcactgattaaggatgcagatggattaagattgctaatcagatgactccaagatggaaagatttcctagattatccaggctggctcattgtagtcaccagtgttcttataaaagtggaagaatgaggttgaagagtcaatcaaagagaaatttgaagatgctgtg

SEQ ID NO: 321275 - DNA, 571 bp, Homo sapiens
gactgacatattgaagtttcaatactgtaccagctaggagacactttacaaatttgggtgctctcttgcatggtgctttatatgctttaaatcagtgaccaatatgtagtgagttttctccaacagctagaatataggttcagatgacacacatgagggtagaaagaaaaattaaatatctcattattaaatctaatgatgcatgtataatactttgccttcttatttctttacttagaattctgccgattcagaggagtgcttcctccaggtaacataaaaaatgttccactgaagtgcaaatcaacactaccaccttgctatccctagtggtaaaaggtgatagacatttatagatatgtattagaggcaaaattccaagaactgatacccccaaaaaattgtttcactgattaaggatgcagatggattaagattgctaatcagatgactccaaratggaaagatttcctagattatccaggctggctcattgtagtcaccagtgttcttataaaagtggaagaatgaggttgaagagtcaatcaaagagaaatttgaagatgctgtg

SEQ ID NO: 321276 - DNA, 600 bp, Homo sapiens
tatgtttgaggtccaaagaagttatagaaaaagtcagttatcttacaaacaagaaaagkttacaagaaaaacaaaaggacattgttggagggataatttttaaaatgtggaaacagagatagaaaatctgatctgagtttccaaacatttttcagttatgaacattgaattcaggagatatatttataatttccataacgaaatgtaccctgacaggcaaagttatattttccaacatttatgtgacccatgattttcccaatgttgagagcttttgatttaaatagaaatgatggtgctaagaatatttattaatataaaatatattttatattttctatctacctttaccaaatcttgtactattatttttcttatgtgtccatcctcaacactaacaattttctagatattctgcaattataccgagcttgttatctgtcagagtcattgaacttgcccttttgttttctatgattccttccttccagacattgacaagactttcttgtttcatgtttcaacggctctctgaccaaatgccatgtttttagtgaggtattctctaagaaccctttccaaaacatggtcttttttgaa

SEQ ID NO: 321277 - DNA, 577 bp, Homo sapiens
ttccagtaactagtcagtaaaaattttatggagagatacaagaaaatakggaagacagtccatttcataagagatctgaagtttaataatactttaataaattatttaaactttcaaaatcttcaaaattaacgaagttattttaatgatattttccttacagaggaagtatcaagctagaaaatactctttcttggcctatagtttgcacgattcttaagcactctttttctgcattttcctttggtgagttttgaaatctgcataatcacattaaagaaatgagaaaaacagaaaataaaggctataacaagaacacagtatgaaagcaaattccatcacacataaaaatattaaaatggaaagctgatgaaatgctgtatttgccatttaaagcctgctaatattgctctataaattactgtaacacatgttggaaaaactatttgaaagacctggaggcctttttcattgcttcacttattctgtttaactactgtctatctcagtaaaattgattcacctctacaattacagcacggaaacaccatgaaatcagtaaaagaaaaagaaaggt

SEQ ID NO: 321278 - DNA, 650 bp, Homo sapiens
aacatagacactagagaacattttagcctctgtcacccagagcaatcaatacatgcatcataattcttactcaaataaacataaggcctcacactaataatctatttacctcaggtccttttacatgatgcatcatgttcaggctccaacaaaaagttagaaagcatgctaaaaagctaaaaacacaatctaaaggtacaaagcaagcatcagaaccagaagcagatatgacatatgttctggaattatcagagtaggaatttaaaatgatcgtgcttaatatgctagggtttctaatggaaaagtgatcaayataggcagaaatgtggaaactctaagaatcgactgaaaatgctataaatcaataatacataacagaaatgatgatatttgataagtctgttagtagatagaatatggccaaggaaagaatcagaggttgaagatacatcaataaaatctccccaaactgaaaagcaaagagaaaatagtaaagaaaaaatggaacagattatctatgaactgaagaacaataataaatgtgcaatacacatacaatgggaatacaagatggagaagaaagaagaaaataatggaataaatacttgaaagaataatggtcaagtggcttctgtatgacaaagtcaaca

SEQ ID NO: 321279 - DNA, 679 bp, Homo sapiens
aacagtgaatcgttacacaaaatacagtggaaacaccaaagggggatgagaatcctggcacaaaagtgcaatttaaagttttcttgagaatcgtggattgttggcagagacagtaaggccaaaacataragatgttacagagtagcaagaaaatgttgctagtctggtactcagatagaaattaactgcatttttttcatgttttgatgtttccttcccttccccaattttgaaatattaaaataaaaatcagttcttgaaattaagaagatggtgatgatgatgacagtgatggcaacaatgatggaagaggtcttattgcctgctcacttcgtgcttgactctctcctgaaagccttctcttggaggacattagctttccctatcataaaaattatttatgtttctgacgtggctgtttctgataaggcaaagctcattatatttaagaactacattagtcagtgcttttaaacctataatgaaagttacatcacatcatgcctaaaagggagaattacaaattttcctccgaagaagatagcctgtacaacaaagggactgcaaaattttcccaatttgcgttggtaaggacttgaaagtatgtttgtaaattaataggttgtaagggtgttagatcaaggagaacatatatgtcttaaattattgatatggctgt

SEQ ID NO: 321280 - DNA, 679 bp, Homo sapiens
aacagtgaatcgttacacaaaatacagtggaaacaccaaagggggatgagaatcctggcacaaaagtgcaatttaaagttttcttgagaatcgtggattgttggcagagacagtaaggccaaaacatagagatgttacagagtagcaagaaaatgttgctagtctggtactcagatagaaattaactgcatttttttcatgttttgatgtttccttcccttccccaattttgaaatattaaaataaaaatcagttcttgaaattaagaagatggtgatgatgatgacagtgatggcaacaatgatggaagaggtcttattgcctgctcacttcgtgcttgactctctcctgaaagccttctcttggaggacattagctttccctatcataaaaattatttatgtttctgacgtggctgtttctgataaggcaaagctcattatatttaagaactacattagtcagtgcttttaaacctataatgaaagttacatcacatcatgcctaaaagggagaattacaaattttcctccgaagaagatagcctgtacamcaaagggactgcaaaattttcccaatttgcgttggtaaggacttgaaagtatgtttgtaaattaataggttgtaagggtgttagatcaaggagaacatatatgtcttaaattattgatatggctgt

SEQ ID NO: 321281 - DNA, 573 bp, Homo sapiens
tattgctatacctgggtaaatgaaaaactactgcagtctaccagtcaagagtgagggttaatggattagttgatagagaaaacctacaaacttatgctatagttaatttcttatcttcctgaatgcagaatttgaatacatatgttttacccctgttaaaatctccacactgactcccttaactctaaaatgaaggctattatggtatgaaatatttttttaaaagacactggaggtgttcatcaccgcaaataaaagaaagcactgaaactgccacaactggcccatggaactgatgtttactgttttytggacaggcatagatattgaccctcctggtcttaaagcttgaaacttacatttgtcttatctgaattacttcctaagttaactgagcctcagacaataaaatgccagacccctcatccgtcatgattcctgtttaccaacttctcttccttaccacttcttaattcctgttttcccacacatagttacatttcttcccttttacataagcacctacttttagtccattcaggatgcaaactgatggtagtgaataagtctcac

SEQ ID NO: 321282 - DNA, 442 bp, Homo sapiens
ctccaaggatacatttgggctatcctgaggaaaaaaaaaatttcatcaatccagagagcagagtctaaaagcctaacaatactcaagctagaaaaaatttttttcaaactgttttggcacaagtgtagcttaataatggaaaataacctgtagatatgtgtttttaaagtaataaatgtgtatgaagctattgaaaatatacaacacactaatgtattgaacacattttggcatctcttattatatcatctttagaagagagctgattttttttcatttatttcactgttctttgtttcttttcactttctttgttttcttaatactgmaaattacaagtgtttttctgtgtgatttttaaatgtaaaataattgttgaatttagtaaatataaacagcaaggagagatttcctgaaatcccagcacccataataaacaaaa

SEQ ID NO: 321283 - DNA, 593 bp, Homo sapiens
ggaatgagaagaggtgaatgagcaaactttccacaggacatttcaatgtaattgcttctcatgttttattctggaaaatatccagatggctctamacttttacataaggcttctttagataaaaagccatttaaggaaacaaattacagaagtgctgttatgataaccaacaaagaaaaagcaaatgaattctaaatatttcaacaaaactagcatggaatagttttgccatttttaatatattctaccacttattagaagatagatcaaactgtgatctcaactgggacctgcatcagtgactttttaaggaacaaatatatgctgggtcttacagatttacagaagattctgatttagtaactgtgaggtaggatcgagaaatctaagttttagtgagtatcagtacttctgataatcaagaaatttggggaagcactacagtgacgtaagaaaagaaatgaaaataagatggtatttgctaagtactaggcactttccaaattataaataatttaaccatcataaaacacttgtaattaaaaaatatattttaaatgtagcaaaatgaaattttaaagtaagtattttac

SEQ ID NO: 321284 - DNA, 593 bp, Homo sapiens
ggaatgagaagaggtgaatgagcaaactttccacaggacatttcaatgtaattgcttctcatgttttattctggaaaatatccagatggctctacacttttacataaggcttctttagataaaaagccatttaaggaaacaaattacagaagtgctgttatgataaccaacaaagaaaaagcaaatgaattctaaatatttcaacaaaactagcatggaatagttttgccatttttaatatattctaccacttattagaagatagatcaaactgtgatctcaactgggacctkcatcagtgactttttaaggaacaaatatatgctgggtcttacagatttacagaagattctgatttagtaactgtgaggtaggatcgagaaatctaagttttagtgagtatcagtacttctgataatcaagaaatttggggaagcactacagtgacgtaagaaaagaaatgaaaataagatggtatttgctaagtactaggcactttccaaattataaataatttaaccatcataaaacacttgtaattaaaaaatatattttaaatgtagcaaaatgaaattttaaagtaagtattttac

SEQ ID NO: 321285 - DNA, 622 bp, Homo sapiens
ttctataacagcagtcaatgaattttcatacctgtgaatgtatataaaacagagtggaagtaaaaaagctctagttgaggtacaaawtaagctatgatactgcctgttccttcataattttctttgtcaccaaatcttaccatatcattgtgtaatagcatgtaatgatcaattttatatatcttctctacaccatgtaattacatatttctttaattgcttctgtagtataacacaactcagaaactttgttctccctatttcttttttatttaatttttatctacttttgtgtaatccaaatcaatccattctacccacatctacccttattccttctacagattgatattttgaatctcatatcttttcttaaaatattgtatgaataaacctagtgtcttagtccatttttgtgttgctataatacccaaggctgggtaatttacttaaaaaagaggattatttggctcatggttctgcatgctgtacaagaagcatggcacaaacatgtacttgtatgagggcctccaactgctttcactcatggcagaaggtacaggggagctgtgtatggataaatcacattgtgagacaggaggcaagagaaagttagggaaat

SEQ ID NO: 321286 - DNA, 622 bp, Homo sapiens
ttctataacagcagtcaatgaattttcatacctgtgaatgtatataaaacagagtggaagtaaaaaagctctagttgaggtacaaattaagctatgatactgcctgttccttcataattttctttgtcaccaaatcttaccatatcattgtgtaatagcatgtaatgatcaattttatatatcttctctacaccatgtaattacatatttctttaattgcttctgtagtataacacaactcagaaactttgttctccctatttcttttttatttaatttttatctacttttgtgtaatccaaatcaatccattctacccacatctacccttattccttctacagattgatattttgaatctcatatcttttcttaaaatattgtatgaataaacctagtgtcttagtccatttttgtgttgctataatacccaaggctgggtaatttacttaaaaaagaggattatttggctcatggttctgcatgctgtacaagaagcatggcacaaacatgtacttgtatgagggcctccaactgcttycactcatggcagaaggtacaggggagctgtgtatggataaatcacattgtgagacaggaggcaagagaaagttagggaaat

SEQ ID NO: 321287 - DNA, 568 bp, Homo sapiens
ttgcagtaaatttcaaaaattagagttacataaaaattcatacttaaaattgcaaatgtttcaattattttttagaccttgttttttgacatggacatgagcagaagtttatgtatcgtgttatttcacttatatgttttattgtaagataatcagatggccatgacatgattttcagaaaacgtagtccttatttcacaatgtttttcctcactgagtctcacttctttgccttttcatttaatttagcattatgcttcaatggttacatcgaaaaaaattaatatgaaaacagaatacacatggttatctgttatgattttatatttctgtgtgcatgttatttattttatttgaagttgaattacctggttatkttaaaattatatttaaaattgttaacattttatagtagaatgtatgatccttgagcagaaggctaaacataaactgtcttattaggatacataacatcaaggtgtggaacaatttgtttcaaccaataatcctaaaattgtaagttaaaaactttaaaaagaacctacatacttatgatattgtgtacatg

SEQ ID NO: 321288 - DNA, 546 bp, Homo sapiens
aatattcacatgcatttgtctttatggtaraatgatttatattcctctaggtatatgcccagcaacaggattgctgggctgaatggtagttaggattttagctctttgaggaatcaccgtactgctttcaaaatgattaaactaatttatactccaccagcagtgtataagttttcccttttctctgcaaccttgctagcatctgttattttttgactttttagtcatagccattcagactggtgtaaggtagcatctcgtggttttgatttgcatttctttaatgatcagtgaattgaggttttattcatatgatttttggctgcatatttgtcttcttttgagaaatatctgttcatgtcctttgcccactttttgattagttggcttgttggattttctcctgtaaacttgtttaagttccttatagatgttggatattttgtccaatgaatagtttgcaaaattattctcccactttgtaggctgtctgtttactctgttgatagttgcttttgctgcgaagaagctcttaactttaactag

SEQ ID NO: 321289 - DNA, 586 bp, Homo sapiens
catccaaatactccttggaaaacattagattatttagtgatttttacacttactatagcaaaatatgagttctgttagcctctggaatgtaccttactcaaataatggttcctggatcctgttatgcaagtaaaggtaaagaaattatcatctgttcaactacaatatgtatttacgttttttggttkttttttttttagacagagtcttgccctgttgcccaggctggagtgcagtggtcccatcttggctcactgtaaactctgcctcccagttcagtgattctcctgcttcagcctccctagtagctggaactacaggtgcaaccacgcctgactaatttttgtatttttagtacagacagggtttcaccatataggccaggctggtccggaactcctaacctcaagtgatccacccagctcggcctcccaaagtgctaggattacagctgtaagccacaatgtgtatttctgtcaaccacatatatgtgattgttcaatggaaagtcatgttagtgtgacaagaaataagaaagttgtgttagctcatcaaccttttgacctaggcaaaagaactgtaattg

SEQ ID NO: 321290 - DNA, 586 bp, Homo sapiens
catccaaatactccttggaaaacattagattatttagtgatttttacacttactatagcaaaatatgagttctgttagcctctggaatgtaccttactcaaataatggttcctggatcctgttatgcaagtaaaggtaaagaaattatcatctgttcaactacaatatgtatttacgttttttggttgttttttttttagacagagtcttgccctgttgcccaggctggagtgcagtggtcccatcttggctcactgtaaactctgcctcccagttcagtgattctcctgcttcagcctccctagtagctggaactacaggtgcaascacgcctgactaatttttgtatttttagtacagacagggtttcaccatataggccaggctggtccggaactcctaacctcaagtgatccacccagctcggcctcccaaagtgctaggattacagctgtaagccacaatgtgtatttctgtcaaccacatatatgtgattgttcaatggaaagtcatgttagtgtgacaagaaataagaaagttgtgttagctcatcaaccttttgacctaggcaaaagaactgtaattg

SEQ ID NO: 321291 - DNA, 538 bp, Homo sapiens
tttattcctacattgttttctgtgtatcactttagtgattgtgtgtaattggartggaaattgttttctcattggcatgtgattattagattagaaatcataaaaggtttacaaacatatgtatattgataaatttaatgaatttgtcaaatattgaaatgagaattatatttcattaaatatcactgtaattgtagaggtgtgactttacaaatggttacatttgttaaccattagcaaatatctcaaagtgcaatatacaattagcatagcctattattaacaatagtaggttaaaatcatagtcgccatgattacttttgctgacttttcatatatcatttgactgtccttatttaaacctcttagtatgacttatattctttgtgagattacgataaatatcaggtctgtcattttctcattgtcttgagtatttaatattagcaatgcttcaatatatgattttctgcagaaatttttaaaaacttctatttctgagcattagtttaattgaagttagaaatatatattaatt

SEQ ID NO: 321292 - DNA, 671 bp, Homo sapiens
tatacctgatgaacatggatgctaaaatcctcacaaaatactagcaaactgaatacaacagtatatcaaaaagattatccaccatgatcaagtaggtttcaaaacaggaatgtcgagcatggtttaacatacataagttgataaatatgatacaccacacaaacagaattaaaaacaaaaatcacgtgatcatctcaataactgcagaaaaactattgatgaaattcagcaactgcttatgattaaaaccctcagaaaaataggcatagaggagacataccttaaggtaataaaagccatctatgacaaacccacagccaacattatactaaatggagaaaagytgaaagctttccccctgagaactggaacaacacaagattcccattttcaccccttctattcaacatagtactggaagtcctagccagagcaatcacacaagagaaagaaataaagggcatccaaatcagtaaagaggaagtcaaactgtcactatttgctgatgatatgattgtatacctagaagactctaaagattcatccaaaaagctcctagaaatgacaaatgaattcagcaaaatttcaggatactaaattaatgtacacaaatcagtagctctgctatacaccaacagtgaccaagctaaaaatcaaatcaagaactcaac

SEQ ID NO: 321293 - DNA, 634 bp, Homo sapiens
tgatgtttgctaagccagctgatataaacttggagtttctgtgaacatccctggactgcctggaaaaaatgccatctgccaacatgccaagcaaaacagctgagagaagggcaargggtagaaagaatcttgatgatgtttagtaagttctgaactcatccctatgttttctattctatgaatccttcatctcatttttttgttactgtttaattaggcatatttgaattgggttcctatcatttgccactggaagagtcctgactgccacaatatcactggaaagaatcaggtgacctgagttcaatgtcagtctatctctccctcctagcagagcaacaggggaggacaattcagtcaaatttgctacttctattttcctttctactatagtggattaatgtgaggattaatataatgcttagcacagtgctggaaaaatagtaaatacccaataaatgttcatttatattattaactttatcataccagtatcttaccattatttcaggcatgatgtagtattttaaaagttaattcgaccataatttgaacaagtgttgtgcttcatgataataaatacacatgttttagacgatacatgttactgcctcttattttaaactttcctctc

SEQ ID NO: 321294 - DNA, 495 bp, Homo sapiens
aggtcaggaaatatgccttttccccagttgtccaaggcttgcacatgtcacttttgaaactatggattttatatacaggtcaggagatgcataccaaagaaataaacagtgaactggaccataatgacagctaactttcaaatgtcctcggattttttacatatctaggcaaacacattttgttattttgaatggactgggttttgtttgtttgttttaaatattttttgaacaattttttgtctaataaaattttatgtgttagcttgaaattgygttcctgtattgtaagcttacatcaataacatatttcagaaaagatttatcttttccccttttaaaaacgattttaaattgcagcattggaatattataaaaatataatgccatgggacttgtgaacctagtataaaaattgccctatagaaaaattaaaattgtcatgtttatctctaaacaacatgatgctccagctattaatgaggtagtgttctt

SEQ ID NO: 321295 - DNA, 405 bp, Homo sapiens
ggcatgttatccttgcatgtagctcttttaagttacctgctgaacagaatttttttttcaatctagagagacagaaagacagcagagtcatttatgagctcctgtctagctgagacatactgatccagggtatcctttgcaaaagttttcttrtcagcatttgtagcctaaattatgtatctgcaaggatttgagcttggccatcaatatgtattcttctctctcaacacttctatgtaaaatatgctatttttagaaggaaatgctttgtctcatattgagaaacactgagattcagggaggtaaaggacttgtgcaactttacccaattgcagagctgggattccaccgaaggtctgtagactctgtatcaggaaggccactggtttctttctttccttctcc

SEQ ID NO: 321296 - DNA, 502 bp, Homo sapiens
aaaaaaaacctttgctcttttaaaactcagaagtcttgattctcttaaatagttaagaacataacaaaagttaatataaagcaaggaaaattattctcacagaacacaaaattttagtttcctaggcagattactaaaaatgtaaacaaaaatccttcacaatctctcattaagaagagactaatataatacaagaaaatgtccttttaacagaaaactaaattcaatttttataatagtactctattargcttatttttttttaattcctgtaagtaaatccattcgtttttaccatccttgatcaccatgaagtttattttccacaaatcttctataattttctatatccattttgtatttgtgctgtattttcctctttctccttctggaataaccagtatcttactttaggacaaaactgctctcattttcccttacgaaaccatatccttcatattcgttaccttttcttatcaatgacacatcttactttccttgt

SEQ ID NO: 321297 - DNA, 635 bp, Homo sapiens
gaagttatataatcatatattaataggaaatctttagatatttaaattttgataaccaattcaaaattatcaaaaacatctttcaggtcatagtgagatccagatgccctagcctgaattagaaatgcacataaagaggggtgacatcatgaagtaaaataaaaattctgaaaaacaacatattttaatggctgctgtgagtattctgtcattggcataaagtccataaagttccagttcagagtaaggattaaactaacctttttatcaattaagtaaaagtgtacttttccttgcttaggctgacaattctctaatttaaaaacaatggccagggaagtaattgaaacactcacagctcaaaattgctaagtaaataggtagattgtttgctaggagaccaaygctttctaaacgataggttctgagcttccagttagaatctaggcttaaataaaggtataccttggaattctcctgcccaatggtggtcatttgctcaggaggagttgcccctggatgatttaggtaaatgtaatgtacttcaatcaaacaaggaaaaaaaaagtaccttgatggtattccagaaagccacagcacattatctgtcttcactttatctcttccttcttcta

SEQ ID NO: 321298 - DNA, 551 bp, Homo sapiens
ttaggcacaaggagcttattttcttcaaaatattgcaagatcctgttggtcttccactgtgtttagcaaatattaaacatttgktgagtagttgttgattccctgatttttatatttgaaaaagctgttaatgattctaaaacataagcatacttagattaaaagaagacatgctgtatttgagggaagccattacattaatatcatcattatcattataatcatcatcattatcatcacctaagtttccctataaatgtcacaatacaaagttcatacaaaagttgtaataattagccatatctttagagaaaaatcacttgtgagaaattactccttttcatctccatcatcatcatcatcatcatcatcatcatcatcatcatctttatcatctttagtaggtcctgccatttctgatgttttataaacatataaaggatggaaaggcataattatcatatcaacaagacattctcaatatctaatatttaatgaatacttactatattccagccactgtgctatctttcttacatgaattatgcttg

SEQ ID NO: 321299 - DNA, 551 bp, Homo sapiens
ttaggcacaaggagcttattttcttcaaaatattgcaagatcctgttggtcttccactgtgtttagcaaatattaaacatttgttgagtagttgttgattccctgatttttatatttgaaaaagctgttaatgattctaaaacataagcatacttagattaaaagaagacatgctgtatttgagggaagccattacattaatatcatcattatcattataatcatcatcattatcatcacctaagtttccctataaatgtcacaatacaaagttcatacaaaagttgtaataattagccatatctttagagmaaaatcacttgtgagaaattactccttttcatctccatcatcatcatcatcatcatcatcatcatcatcatcatctttatcatctttagtaggtcctgccatttctgatgttttataaacatataaaggatggaaaggcataattatcatatcaacaagacattctcaatatctaatatttaatgaatacttactatattccagccactgtgctatctttcttacatgaattatgcttg

SEQ ID NO: 321300 - DNA, 593 bp, Homo sapiens
agcaacttataccataaagaataagtagcttagaaagatatttttctcaggttcagctaagacataatgtgtctttctggctaacaaaacactatgatttcaagtatttttcatttttcatttattgttcccaaaatataaatggatatggctcaaatataaatcaaaagcataagattagattcatgggcttacaataaggtccttaatcctgcttccaaaattcccattaaaattgtctacaaactatgaaaatgtgagaggaaaatgttcatgccagaaaagatagctaaagaaaagtatcacccatataccagaaaactggtggaatttctgctagattcaatgtcaaagacaccattttgaatcaaatcaaataaaaaagataaatcactacaacactcattagcaacattttacacaatcccacttcctccactttctttcaagtacatagtatttttagtcagtattaagagtaaaaccctaagtagrctccttcaaatgatacccattaagtcagaaaggctttacctgcatagcactcattaaacattatttggatctctatcaccatcaagaaacaagaaaat

SEQ ID NO: 321301 - DNA, 631 bp, Homo sapiens
tgtttttaactcaattttacaacacatacaattttcctgtctccttcaattataaagttcttatgtcaactggtttcggcaaaataatccatttcaggcagccctatttctgtcattatctgagtctagcatagatgttaataccatttctgcccaatgacttaaggctaattgtcttctttggagaatcttgtattcaacagaactaataacacttccatttagcgtacaaaatatatttactataaaatttctgaaccactatgcgtcaatattaagcatacatttgtagctgtagagtttccaagactcaaatctgtataatttgtctcctaatctaaatcctttttacacrgagagcagtccatttgacaatcaaatgttgggatctatttatcttcttttaccttttagttaaggcaaaacaagagaatacaaggcatgaggtcttttcatcattgtgtacctaaaagatcatagagaagtaaagcagtgtgtggaatgggttttgaaaaaacgaaacgttactaaaaagtgtgttttatgacaacaacctgtacagctggaagattcaaaattaactctaagaccaacataaacttggagcataataagaataatcaaagaaaaa

SEQ ID NO: 321302 - DNA, 517 bp, Homo sapiens
accaagtcctccttggaatgtcaaatcctgaatgctcacaattttatgacaagtatatagatatttctgcccaagttatttcttatcttcttcatctaaaactgctctggattatctttgttgaaattgaatagttttgtcaccccattccatttaatagttttgagcaacaaatggaaaaaacaatttggggaaaataactaaccttttgctacaaaccactttcargctgatgatattcaatgttaagttctgtcagaacccaacaaacaatctaactgactttttcatcttctgaaattcttctgaaggattgtatgtggcctacttctgatcaactttctattatgctgaaatttcctaaatatcctctgtttgggaaccagtacaaaaatgtttgctataaaaaattctgagaatataagagattaaaaatgcgtagagtctttgatctcacaagcaaaataaaatatatctatttaagcagggtttttatatttaaaaataagttttaaag

SEQ ID NO: 321303 - DNA, 517 bp, Homo sapiens
accaagtcctccttggaatgtcaaatcctgaatgctcacaattttatgacaagtatatagatatttctgcccaagttatttcttatcttcttcatctaaaactgctctggattatctttgttgaaattgaatagttttgtcaccccattccatttaatagttttgagcaacaaatggaaaaaacaatttggggaaaataactaaccttttgctacaaaccactttcaggctgatgatattcaatgttaagttctgtcagaacccaacaaacaatctaactgactttttcatcttctgaaattcttctgaargattgtatgtggcctacttctgatcaactttctattatgctgaaatttcctaaatatcctctgtttgggaaccagtacaaaaatgtttgctataaaaaattctgagaatataagagattaaaaatgcgtagagtctttgatctcacaagcaaaataaaatatatctatttaagcagggtttttatatttaaaaataagttttaaag

SEQ ID NO: 321304 - DNA, 586 bp, Homo sapiens
agacataaattgaaagttaaacctgatgaacattttagccataccaagaaaagtcaagagtatagaatcaagttatacctaaggaaaacacagctttcctagaccttcaagatagacagtttagtatcaggccacaatagcagttagaaccagcggaataaagttacaggaggtgagaaaawaattgaatgactcaggccttttcaaggggagaaaaaaaaggccaaagcagcaagacacaatagagatgcacttctgaaatataaatcagagaagttttcagaaagagattatagaatcaaaatgaaaaccttttgtaattttattaagaacaataaaaattttaggtaaaccttgttttaacataggggaagaatcttagaaagactattataaataattcctcttaaattatacccaagttaatcacatacaaaatttattttacaaattcttttttcaccaacttcattattatgtacacagaccatctatgacatgcttggaccttctgatttggcacattttatatgaagaattatatgttaactagaattcttacttttagtaactttaaattttagtg

SEQ ID NO: 321305 - DNA, 261 bp, Homo sapiens
gccaaaacagaccaatcagcactctataaaatggaccaatcagcactctgtaaaatggaccaatcagcaggatgtgggtggggccaaataagggaatraaagcaggccaccagcgcaggcagcagcaactggctttggtcaccttctgcaacgtggaagcttttttcttttgctcttcacaataagtcttgctgctgctcactcgttgggtccgcattgcctttatgagctgtaaccctcactgtgaaggtctgcagcttc

SEQ ID NO: 321306 - DNA, 585 bp, Homo sapiens
  misc_feature (1)...(585): n = A,T,C or G
tattcagtgaggtggcattatgctttaaggttatcaaggcactgtttgggtaattgcraccccatgatctcaaaggtcaaaagggataaaagttgtaaggaaaacttaacaaaaaatgtagagagaaaacggtggatacaataggagcaaaagtcattaaactgaaagaagaccattgaagttaactatctccctcggtgtttcttcacattttccctctccccactccataatcagacagatgatgaaatagagaagtgtcaatatggttgatgattcatccattttaagacaagtgagtacaaatnccttgcaaaatatcaagaaaatgtattgaatccttagaatggctttgacttctcaaaaaatcctaaacattgttactaaactttttatacagttagacaaataagcattcaaataaatatgtaaataaatatgtcaatattctctatgcaaattatggttcccacacatttttatttctaagacctgggtactatgaacatagccatggattaaggaagatcaagccattagcagtaagaagtgatttgcttttcccctacagaatcccagaatgta

SEQ ID NO: 321307 - DNA, 585 bp, Homo sapiens
  misc_feature (1)...(585): n = A,T,C or G
tattcagtgaggtggcattatgctttaaggttatcaaggcactgtttgggtaattgcgaccccatgatctcaaaggtcaaaagggataaaagttgtaaggaaaacttaacaaaaaatgtagagagaaaacggtggatacaataggagcaaaagtcattaaactgaaagaagaccattgaagttaactatctccctcggtgtttcttcacattttccctctccccactccataatcagacagatgatgaaatagagaagtgtcaatatggttgatgattcatccattttaagacaagtgagtacaaatnccttgcaaaatatcaagaaaatgtattgaatccttagaatggctttgacttctcaaaaaatcctaaacattgttactaaactttttatacagttagacaaataagcattcaaataaatatgtaaataaatatgtcaatattctctatgcaaattatggttcccacacatttttatttctaagacctgsgtactatgaacatagccatggattaaggaagatcaagccattagcagtaagaagtgatttgcttttcccctacagaatcccagaatgta

SEQ ID NO: 321308 - DNA, 550 bp, Homo sapiens
agtctagtccatcctctctttatgtaaacaagaaaattgaaaataaaatgaattttcctgtccwaaggccctagtactaggatgtaagttctttgtctccatattcattcgtcttcctcccatgcctcaatatctcactcagtctgatatacacagacaatacagataattgcattcaggtgaagtggatttagctttgcctccatgaaatgcttggtttgaagaggggttcaggtagcagccctgcatcagctctagaagcctgccatgggaaaaagttagggagaaaaagcctagaaactcatagggtctttcttatttctacccataaaatattctcttaaacctgaaatcagaatcactattttaattaagtagtagcagtagattgtgtgcactaaagatctataatattgtgtgtatcttggttgattagtagtagataaaagcagctcagatttcattttatttttttcaattcacaaatagtatagagaattttgcaacctgtcttctttttccatcagcgaagtgcaactcttgcctattc

SEQ ID NO: 321309 - DNA, 514 bp, Homo sapiens
tacgcgggtgtgcacacactcggggaaggctggcacgccagccccgtgctgccttggcacactctggactttgagctctgatgagcatgggagggaagccaaaagggtgctgagggcagcttggtgctggccttcaggcgccccttggcacaaacagcctgggtgccatgaatgtcagtgggagacagataggctcctgaatggaagcgattgagtcccccgygaggacctgaaggcagggggctgggctgccagtcccactgaccagagtggggacttttggtgccttttctgggccagcccatagccaccaatggaccaattgggcttccttccctctgaggcccataaaagcccagggctcagctagagcagagcagaggacagaaagaggacaggatgaccaggtacagagaggagctaccaactctagggcctcctctccaccaagagctgcagatgaggagacaaccagctgcaaagaggaactaccctctctactgagaactaaata

SEQ ID NO: 321310 - DNA, 507 bp, Homo sapiens
tggagttttaaagtaaaaaaaatgaaatgcaaaaattgagtagaggagcccaataatagattcaagctggcaaaagaaaaacttagcaaagtttcatataggtcagctgggattatccagcccaaatgtccatgaaataatcaatatataaaatatggtacatttataaaataaattattgagccatatgaagggcatatagttctgataacatgctataatawgaataaactgaaagcattatgctaagtgaaataagctagaaaaggccatatattatatgatataatttatataaaacattcagaattggcaaattcatagagacagaaaagagattagggtttgccagagtcaggggaatggagtggatgggagtgactgctagaggttatggaattcgtttttggaaggatgaatatgttctaaagtttgaaagtggtgacagttgcacaattctgtgaatatattaaagccaccttattgtacactttaaaagggtgaatt

SEQ ID NO: 321311 - DNA, 561 bp, Homo sapiens
atgctgtgtttcaatcactctatggtccagcatatacagagaagagaaaacttagtttcataattaaactattttttgttaacttccatcacaatattctggattattaataacaggataagaaatgaatattttaatgatttattatgcatttttataactatgaaaagaacacaacacatgatgcaaagagcatatttgtaaatctgttttaaattttaaatgtttttctttatttttcccaccatggcatataaagtactttttgtttattagataactcaataaatatgtgttaatttgaatttttatttagagcacctaagagccactatgtcaatataattataaattcaatgctatatagattaaaaataartaagtttttaaaagtaaaattgtacttcgtttgaggtagtacaatgttgcatgaaagtagtcatttatcttatcttatttctcctggaaatttttttttatcattcagatccctagccatatcaaataatataatacattatttttgagattcatcttcttaagtacataaaaaataagaat

SEQ ID NO: 321312 - DNA, 561 bp, Homo sapiens
atgctgtgtttcaatcactctatggtccagcatatacagagaagagaaaacttagtttcataattaaactattttttgttaacttccatcacaatattctggattattaataacaggataagaaatgaatattttaatgatttattatgcatttttataactatgaaaagaacacaacacatgatgcaaagagcatatttgtaaatctgttttaaattttaaatgtttttctttatttttcccaccatggcatataaagtactttttgtttattagataactcaataaatatgtgttaatttgaatttttatttagagcacctaagagccactatgtcaatataattataaattcaatgctatatagattaaaaataagtaagtttttaaaagtaaaattgtacttcrtttgaggtagtacaatgttgcatgaaagtagtcatttatcttatcttatttctcctggaaatttttttttatcattcagatccctagccatatcaaataatataatacattatttttgagattcatcttcttaagtacataaaaaataagaat

SEQ ID NO: 321313 - DNA, 592 bp, Homo sapiens
tttgtgtgtgtgtgtttaggattttttcagatttatttttaaaaatcttgattaatcttgagaatataatgatattctatattttattccaaaatttttgaagtattgcttttttccttaactacttgattcccttgggtcactttacatatacaatgagaagtaggcatcctatttcatttttttctatatagataatcagttgatttgcactattcattgcagagtctttcactcgtttattgacctgtatacaatttccatcagaatgaataagggtctgttgattctgtgttttctattttatttcactggtcaattttccattctgacytatgctataccctttcaattattatagcatcagaatcaattttgatattttgaaaacctaatctcctatactttttattttttagttttagtttggtggtacatgtgcagggtgtgcaggtatgttacataggtaaacgtgtgccatagtggtttgctgcacctatcaactcatcacctaggtattaggcctagcatgcattagccatttttccttatgttctccctccctgccacctcaccccccagtgtgtgttgt

SEQ ID NO: 321314 - DNA, 547 bp, Homo sapiens
ttattctggtaacagctcctgtaatgttttatcatggttctcagcttctttgcagtgagttagaacataaccctttagctcagtgaagttcgttgttacccatcttctgaaggccaattctgtcaattcatgcatctcagcctcagcccagttctgtgcccttgctgaagatrtgttgcaatcatttggaggagaagagacactctggctttttaagtttgcagcatttttgcattgattctttctcatcttcatgggtttatctacttttgatttttgatgctgcagacctttggttggggtttttctggagtctttttcattgatgttgtttttgttgttgccgtctgtttgtctttcttttcgctgtcaggcccctcttctgtagggctgctgtggtttgctcgggatctactccagaccctatttgcctgggttcctctcacccctggaagtatcaccagtggaggctgcagaccagcaaagatggcagcctgcttcttcctctagaagctctgtctcagaggggcaccaacctgatggtggc

SEQ ID NO: 321315 - DNA, 547 bp, Homo sapiens
ttattctggtaacagctcctgtaatgttttatcatggttctcagcttctttgcagtgagttagaacataaccctttagctcagtgaagttcgttgttacccatcttctgaaggccaattctgtcaattcatgcatctcagcctcagcccagttctgtgcccttgctgaagatatrttgcaatcatttggaggagaagagacactctggctttttaagtttgcagcatttttgcattgattctttctcatcttcatgggtttatctacttttgatttttgatgctgcagacctttggttggggtttttctggagtctttttcattgatgttgtttttgttgttgccgtctgtttgtctttcttttcgctgtcaggcccctcttctgtagggctgctgtggtttgctcgggatctactccagaccctatttgcctgggttcctctcacccctggaagtatcaccagtggaggctgcagaccagcaaagatggcagcctgcttcttcctctagaagctctgtctcagaggggcaccaacctgatggtggc

SEQ ID NO: 321316 - DNA, 532 bp, Homo sapiens
aacaacaaatgtccattaactgatgaatagagaaataaagtgtattatacctaataaactgagtaacattcaacaatataaagaaaagtactattgatatctgcagcaatatagatgtacttcaaaaacataatacatagggaaagaagcaagacacaaatcattatatatttttaaatttgatttttatggaattcttagaagtaaaactatagatacagaaagcagattaatggtagccgaaggtgcaagtgaggtttggccctttttgtagtgatagaaatgttctaaacagagattgtgtggatgttgtgtaactgtacaaatttacttaaaatcaatcaatacatttatgatgtatctgttttgtagtaagtacatttcacctttaaaaaatattatatagttaaatttaagtgtcttaaaatcactgmcaaatatatttcttttcagaattcagatggtaaatttaacttctattctggttttgacccacagtgttattataaaccaaaaatcaaaatatggtctt

SEQ ID NO: 321317 - DNA, 547 bp, Homo sapiens
gtaagtttcagttttttcttacatatattttactcatgtactaattaataatctaaaaaattctgattgtggaaggaaattaatcaatctattacatgcttatttacaaagacacaaacacttatagcatagttttcccttaaggaaatggagaaaaactctaagcacaaaaagaaaactggcaacacatataaacatttcaatttcaattgaatattactgacagttattgttatatggttttacataatgtagamatttatgtacattagaatgaaggatgctatcctgacaattaagacaatgtgtttcaaggtgggggggtaattaggcactgtaatgtgcccaaagtaatattaagctaaaactaaaatgatcaactggatttagttaatgctcttggtaagttaaatttttattgtattccagagaaggaaaggtgttgaaaaatcctggaaggcaaaggggtaacaggggttattggtgtataagaaccttaatagaattggactcagaacacatggggagtctcttctgtccatcaaca

SEQ ID NO: 321318 - DNA, 573 bp, Homo sapiens
ccaccagcacttatctgttaaacaaatattcattaataaagactacgtgctaggtactatactaggttctgaaaacagaacagtgagacagtacagacatggtttgtgtctgcattaagtttataacctgaagtgggggtatttgtgagggratatggagaaggaagcaggcaagtgacaatgcagtatgataagggctatatgagaagttaacatgcaataaaaacacacaagacacatctcttttggtcttaaagagatggtaagggaaggctttctaagtggaagcaacatggaagcagaaacctaaaagaaaggtcacatgaacagagttttaccaacttagaagggatggaaagaggggaaaataatctatgaaatgtaatagtcaactaagggcccagaattgggagcaaagatggcgagctctggaactgactggatgggagatgaaactagagaggaaagcaggggacaaattaccacacgtcttgtgagttgtcctcatctgttgggccacagtaaaaaaatacctttagactgggctatttataaacaacagaaatttattgc

SEQ ID NO: 321319 - DNA, 573 bp, Homo sapiens
ccaccagcacttatctgttaaacaaatattcattaataaagactacgtgctaggtactatactaggttctgaaaacagaacagtgagacagtacagacatggtttgtgtctgcattaagtttataacctgaagtgggggtatttgtgagggaatatggagaaggaagcaggcaagtgacaatgcagtatgataagggctatatgagaagttaacatgcaataaaaacacacaagacacatctcttttggtcttaaagagatggtaagggaaggctttctaagtggaagcaacatggaagcagaaacctaaaagaaaggtcacatgaacagagttttaccaacttagaagggatggaaagaggggaaaataatctatgaaatgtaatagtcaactaagggcccagaattgggagcaaagatggcgagctctggaactgactggatgggagatgaaactagagaggaaagcagggsacaaattaccacacgtcttgtgagttgtcctcatctgttgggccacagtaaaaaaatacctttagactgggctatttataaacaacagaaatttattgc

SEQ ID NO: 321320 - DNA, 592 bp, Homo sapiens
aggtagagttcacttcatgtatttgtaccttttaaacttgacttcatgtatttgtaccttttcacctcatagttgcatgtctttaatgacatctttggtctgtgaatatttgaaacattaacataattatctatcttaacatattgtatttaccacctgctggggatgaaacattgaaactatcactagtagctcattaacaataacactagtccctcattaacagtgttgacccaattacatgttgtatatcccagagacaaataactgtaattgcaactcagaagtgatttcataaacacaaagattctttttttgaaatgcaaattggaacgcattatttgaattttccacataaatacaggtttaaatgaaacaaagtcattcaaccaaataaaataaaaattcaatctaaagagaggccatttggaatcaattggtacagagcacattctgctttgaaggatcaaaacactgtcattgctgggtgcagaaattaaacaagttcrcaacaatgaatgccagacatctggtaagtgagatctaccctggctatcagcaggtagtgattttcttttggactcattcagag

SEQ ID NO: 321321 - DNA, 614 bp, Homo sapiens
acatagagcctttaatgacaccatttaggctcttgattaaatgctctgattctcactgtgtctctggattttccattacatgaattaaatatctcctgtatagtttaacccaaaggtcataaaacttgtaaatggtaaaactgagattctaagccatgtctttgacttcaggatccaatcacttttctatgactgcaaatgctctcctaagcgattaaaataattaaattttatgcacaatgcgatagaaaattaacttcagctcctcagcagggaagtaatctgatcaaaacaatgggtgagacagatggccctgatttgggtgttcagagttaactggggaaggacaggaaggaaggtagaggaattatcttaaagtcattgttgcagtgttctggggatttgctrcaacaaattcatgtgtgtcttcaataagtatttgagcacttaccctgtgctagatactaagaatatagtgtgacaaaatagacatgctccctgcttatatgaagttatagtcagtctggagcagcggttgtcaaaccatgacccttgagccaaatactgctgctgcttgtttttgtaaataaaattttattggaacatagtcatgg

SEQ ID NO: 321322 - DNA, 554 bp, Homo sapiens
gataatgagctaggattcttggaattgttagtccccatgtctggatggctcttgcaggacattctatgggctaggaggctggaccaggtttcttctaaattcttttctcccttgaagctttgttccttgtgctgtgttacaggttgcctttacctcaccaggaatgggccctgagctcatctaatttgaccatgtatatgagaagtcagcaaactacttctgaaaaggacaaggtggtaaatamatattttagtctttgcaagctatgtgctctcttttgcagccacttaactctgccattgtggcacaaaagcagctttagacactacataaacaaataagtgtggctgagtttcaagaaaaccttatctatagacactgaaatccaaatttcatatgattttcatgtgtcacaacatagtattcttctttcgatttttcttttcaactatttaaaaatgtaaaaatcattctttcctggtgagtctgcaaatatgcagtgcattggatttgacctagggccgtagtttgccaatctttgatgtatatcgtta

SEQ ID NO: 321323 - DNA, 615 bp, Homo sapiens
ctggttaattatggaacagatgcccagcagcaccttggggtgaatgcattaagaagggggaactgtcatctcattctccctctcaaatttattcacagtctcctgcggcacccagctggggctggtttagtgtgggttttgcctcagttggagagatctgcaagttcaaagccttctccttatttccaaatgggatctccctccagccttctctctcttccttccccactccgcctccccattgtgactctccgcacaccccgctgtgctgcctctgcctgcagatgctttcattgttttgcctgtactggttcaggaaagtggcctcccgaccttcaggcaaataggaggagagggctgaggcttctaggcatcctctgccttcccctgtctcccctctgctccttggcctggccatggctgggagccaagtccagccagcagggtcttctcgcagagggtgcctgagggaaggcttcaaagccgagcayggtagacctggggcttctgcttgcagcccagagatatgtaaatcaggtagcagggacacaaagagcagaggcccatattctaacagtttggcttacagtactgttcgctatgcagatactgcat

SEQ ID NO: 321324 - DNA, 606 bp, Homo sapiens
ataaaaactgacgaaacaaaataaaacaaacaagaaaagaaacaagaaaaaaaagtaaacaagcaagagtcttaacattaaaaatagtagaatttaggcaaaaataaggatttaatataacgaaaggcagttttatcctatagtgtgcacctcatragtctttaataattatgcttatctacacatcaaataccaatggcactcacgttataaagtacaaattacaagagataaataaaaaggaaagaagaaacacaagcactaagggactttaattcacctctttcaatctttgatagaggaagtggaacattgtgggaaacaaaatagtatgattcacaggtagataagatggatgtatctcaaactatactttgaaaatagagaacgcacatttcttccatgtttctaggggatatttaaaaaacttaactatagaataggtcaatagagaaaaatctcaatatgttccaggaggtaatgcagacacagtcatttttcacaatgtaataagaataaagcttaacaacaaaatcaaataataaaatgtgccttctaactgggattttttaaaagttctcttattcaacttctccagcaataatg

SEQ ID NO: 321325 - DNA, 603 bp, Homo sapiens
ttgcagatgggagaaagagaacatggcacagacaccctctttgtgaataccttggcctggaagtgacacaatatatctgttcaccttccgctggtaaaaactagtcacatgaccccacctagataaagagtggctggaaaatgtagtccatagctgggcagctactttccagcagcaacagtgaaactattttggtgactatctttgtcacacacatgtccttgtayaggcagaatcaatgttataacaatatcaatgatctcatgttaattttaaatgtaaagtagctcagcattatgaattgtttactgaaatagacaagacacttttaaagctcatatgggaaactgaaaaataagtatagctagggctgggtgcggtgactcttgcctgtaatcctagcactttgggaagctgaggtgggtgaattacctgagctcaggagttcaagaccagcttgggcaaccccatctggtttcaaaatggtgaaatactgtctctactagaaattcaaaaaattgaccagatatagtggtgcacacctgtatttccagctactcaggaggctgaggcatgagaattgtttgaataccggaggcagaa

SEQ ID NO: 321326 - DNA, 603 bp, Homo sapiens
ttgcagatgggagaaagagaacatggcacagacaccctctttgtgaataccttggcctggaagtgacacaatatatctgttcaccttccgctggtaaaaactagtcacatgaccccacctagataaagagtggctggaaaatgtagtccatagctgggcagctactttccagcagcaacagtgaaactattttggtgactatctttgtcacacacatgtccttgtataggcagaatcaatgttataacaatatcaatgawctcatgttaattttaaatgtaaagtagctcagcattatgaattgtttactgaaatagacaagacacttttaaagctcatatgggaaactgaaaaataagtatagctagggctgggtgcggtgactcttgcctgtaatcctagcactttgggaagctgaggtgggtgaattacctgagctcaggagttcaagaccagcttgggcaaccccatctggtttcaaaatggtgaaatactgtctctactagaaattcaaaaaattgaccagatatagtggtgcacacctgtatttccagctactcaggaggctgaggcatgagaattgtttgaataccggaggcagaa

SEQ ID NO: 321327 - DNA, 603 bp, Homo sapiens
ttgcagatgggagaaagagaacatggcacagacaccctctttgtgaataccttggcctggaagtgacacaatatatctgttcaccttccgctggtaaaaactagtcacatgaccccacctagataaagagtggctggaaaatgtagtccatagctgggcagctactttccagcagcaacagtgaaactattttggtgactatctttgtcacacacatgtccttgtataggcagaatcaatgttataacaatatcaatgatctcatgttaattttaaatgtaaagtagctcagcattatgaattgtttrctgaaatagacaagacacttttaaagctcatatgggaaactgaaaaataagtatagctagggctgggtgcggtgactcttgcctgtaatcctagcactttgggaagctgaggtgggtgaattacctgagctcaggagttcaagaccagcttgggcaaccccatctggtttcaaaatggtgaaatactgtctctactagaaattcaaaaaattgaccagatatagtggtgcacacctgtatttccagctactcaggaggctgaggcatgagaattgtttgaataccggaggcagaa

SEQ ID NO: 321328 - DNA, 603 bp, Homo sapiens
ttgcagatgggagaaagagaacatggcacagacaccctctttgtgaataccttggcctggaagtgacacaatatatctgttcaccttccgctggtaaaaactagtcacatgaccccacctagataaagagtggctggaaaatgtagtccatagctgggcagctactttccagcagcaacagtgaaactattttggtgactatctttgtcacacacatgtccttgtataggcagaatcaatgttataacaatatcaatgatctcatgttaattttaaatgtaaagtagctcagcattatgaattgtttactgaaatagacaagacacttttaaagctcatatgggaaactgaaaaataagtatagctagggctgggtgcggtgactcttgcctgtaatcctagcactttgggaagctgaggtgggtgaattacctgagctcaggagttcaagaccagcttgggcarccccatctggtttcaaaatggtgaaatactgtctctactagaaattcaaaaaattgaccagatatagtggtgcacacctgtatttccagctactcaggaggctgaggcatgagaattgtttgaataccggaggcagaa

SEQ ID NO: 321329 - DNA, 615 bp, Homo sapiens
tgcctgtaatcctagcactttgggaagctgaggtgggtgaattacctgagctcaggagttcaagaccagcttgggcaaccccatctggtttcaaaatggtgaaatactgtctctactagaaattcaaaaaattgaccagatatagtggtgcacacctgtatttccagctactcaggaggctgaggcatgagaattgtttgaataccggaggcagaagttgctgggagcggagatggcaccactgacctccaggctgggtgacagagtaagactctgtctccaraaaaaaagtatagctggaaaaattttgaaaaaagaagaaaaatgagaggaaaatagctttgatatgcatgaaaatttattattaagccacaataattataatagtgggttaacagtgcataaattgatgaataaaccaaaggaaaatgattgaaaacctagaaatagtttaaaatgaatatgagcaaatttagaatacaatatttcagtataataaatgatatgttttggctgtgtttccactcaaaactcatcttgaattgcagttcccatgatccccatgtgatatgggaggaaccctgtgagaggtaattgaatcgtggaggggattag

SEQ ID NO: 321330 - DNA, 491 bp, Homo sapiens
aaagcttttgagatagaagtgtcaatattaatgatatctatagtacaaaatatatacttgtattattgaaagtagagcaagcrttctatgtaccagtttgaatctaagataattaatttttaataattaattgaacataatttcagttccaaaatggtgttgtaaacacaagctggctgccaccacagaaaaccaaaaacaaatatacaatgccaagatgatcaccagcaatatcccagaactcaaatatgaaaatgagtcagttcctggggccatggagaagtgaaaaaaactctgagcagatggtaaaagaattggatttccatatctgcaagacccctcccctacatctgcccagcaccaagcatgcagaaaatttcttctgactcatggtttctacactggaaaaagtaagattgaggtggacaatcagcttccccactatcttgggtttactggcaggagacctgtttctgcctcaacacatgggc

SEQ ID NO: 321331 - DNA, 491 bp, Homo sapiens
aaagcttttgagatagaagtgtcaatattaatgatatctatagtacaaaatatatacttgtattattgaaagtagagcaagcgttctatgtaccagtttgaatctaagataattaatttttaataattaattgaacataatttcagttccaaaatggtgttgtaaacacaagctggctgccaccacagaaaaccaaaaacaaatatacaatgccaagatkatcaccagcaatatcccagaactcaaatatgaaaatgagtcagttcctggggccatggagaagtgaaaaaaactctgagcagatggtaaaagaattggatttccatatctgcaagacccctcccctacatctgcccagcaccaagcatgcagaaaatttcttctgactcatggtttctacactggaaaaagtaagattgaggtggacaatcagcttccccactatcttgggtttactggcaggagacctgtttctgcctcaacacatgggc

SEQ ID NO: 321332 - DNA, 554 bp, Homo sapiens
gagtgggatggcagtttcaaagtgctaaaagaaaaaaacttgccatctaagaatactgtatttagcaaagcttgccatccaagaatactgtatttagcaaagctatccttcaaatatgaaaaagagataaagttttttcagatgaatgaaagctgagagaattcaccaccaccagatctgacttataagaaatgctaaagggagttcttaagtctgaaaamaaatactaatgtgaaaaaagaaaatgtttgaaggtataaaacccactggtaaaattaagcacaaaggtaactccataatactccaatactgtagttgtggtatgcaatccactcataactttggtatgaagcctaaaagactaatctatcaaaaacaataacagcaacagcaacctggtgagagatgggcaatataaaaagatgtaaattgagacaatgaaagatcaaaatgtggggagatgaagttaaaatataaacttttggttttttcttcatttgtttctattctttttcaagatttaaaattagttatcatctctttgaaataacttg

SEQ ID NO: 321333 - DNA, 615 bp, Homo sapiens
tcataactttggtatgaagcctaaaagactaatctatcaaaaacaataacagcaacagcaacctggtgagagatgggcaatataaaaagatgtaaattgagacaatgaaagatcaaaatgtggggagatgaagttaaaatataaacttttggttttttcttcatttgtttctattctttttcaagatttaaaattagttatcatcwctttgaaataacttgttatatctataagatttttttttaaatgccagagtagctacaatgcaaaaatctgcagcagatacactaaaaacaaaaaagtaatgaattataatatactaccagagaaaataatttaaccaaaaaggaagacagtaagaaataaagaaaggaagagaggagttccaaacaaccagaagaccagcaatacaatggcaatagtaagtccttacttatcattaataacactgaatataactggactcaattcaccaattaaaagccatagagtggctgaatagatgaagaaacaagactgaactatatgttgcctacaagaaaccaacttcacctataaagacacataagaactgaaagtaagagatagaaaagatatcccatgcaagtgaaaact

SEQ ID NO: 321334 - DNA, 493 bp, Homo sapiens
ttcaccaattaaaagccatagagtggctgaatagatgaagaaacaagactgaactatatgttgcctacaagaaaccaacttcacctataaagacacataagaactgaaagtaagagatagaaaagatatcccatgcaagtgaaaactaaaaaagagcaggagtagctatgctgatatcagataaaacagacaagtctgagactgtaaaaagagatgatgaaagtcattctataatgataaaaagaactcagttcaaaaagaggatataacaatcataaatagctatgcacccaacaccagagcacccaattatataaagcaaacatwaatagatctaaaaggagagtagactgcaatatagtaataataggggacttcaacaccccattctcagtaatgggcagatcatctagacagaaattcagcaaagaaacatcagagttagcattttacctaactgttgcaaaatacattctttttatcagcacatgga

SEQ ID NO: 321335 - DNA, 555 bp, Homo sapiens
attaagaaggaaacaaaaacttcattaaaacaataaaaacagaaagacaacatacaaaaatctataggatacagcaaaagcagtatttttagtagaagtttatagcaataaatgcctatatgaaaaaaggaaaaagacttcaaataaaagacctaatgatgcacttcaagkaattagaaaatcaagaacaaaaatcaaacccaaagttagtagaaggaaagaaataataaaaattagagcataaataaataaaattggaactaaaaaaatacagaaaatcaatgaactgaaaagttgtttttttaaagatacacaaaattgacaaacttttagctagactaagaaaaaaagagagaacatccaaataaataaaattaaatgaaaaaggagacatagtgactgagagcacagaaatacaaagaattggagactattatgtacaactatattgtcaacaaattgaaaaacctagaagaaatgaataaatttctggaaacatacaacttatcaagattgaaccatgaagtgatagaaacttcgataaaacaacagtga

SEQ ID NO: 321336 - DNA, 474 bp, Homo sapiens
cacttggctacaccagtctcctactgccctccccgcaagtaccacgcaacatgaaactagttgggtctaaaggctgtgtcagagagggtctgccaagaggaagaacacatgcmtgaaggcattgtcagcaaatgcactgagccatttataaacattccaaagcctgggacagtgtagaagcacattagaggagaaccaggatcttcataaataaagaatcaagcatggttgggggtaggggtgttatttgatgtttccctataaagagaagagcttaggaaacaggtaattaaatgattataggtccatgtggctcctatcccacaagcttagggggcagggaaagtggaattaagggagctatgagtagagggcagcatacagttctatccatcattccccagggagcctgtttgcttagactgtgctccctgctaagaaggaaggaaactcctactgtagattaggctcagt

SEQ ID NO: 321337 - DNA, 532 bp, Homo sapiens
tataaatatgtataaatgcctactccgtgagccccaaatatgagacaggtctcagttaatttagaaagtttattttgccaaggttgaggatgcacatcctcagccttgtgacacagccacaggaggtcctgatgacatgtgcccaaggtggtcagggtacagcttggttttatacattttagggaaatatgagacatcagtcaatatatgtaagatgtatgttggttctgtccagaaggtgggacaactcgaagcaaggagggggcttccaggtcacaggtaggtgagagacaaatggttgcattcttttgagtttctgattaacctttccaaaagagtcaatcagatatgtgtctatctcagtgagckggggggtgactttgagtagaatgggaggaaggtttgccctaagcagttcccagcttgacttttccctttagcttagtgagttggaggccccaagatttattttcctttcacatttccctccttttctttttacaatcttttggaaaaagcattttagaagaaa

SEQ ID NO: 321338 - DNA, 589 bp, Homo sapiens
acatgaaacttacccagtgccagggaaagtagattataagggacagcttgcaaacattattttcacaatgctgtagaaaggttgtgttggcaggaaatcgaatcattagaggtcaatctacataatgcacatctataacagaaacctgccaattgcatgctcacccttgatcattcttactcatctcaaagagaaagcatcccctgaaactgaggtcaccccaacataaacaagagtaacgacatcattcatacccagacatagagagcaatgtcagatctctcacaagtggacacaattacagaagcagagatgtccatgcaaattgcaccaccatgcacttctggyatcaataatgtacatgtctttaaaatcaaattaaatcctactcagcaaccagcctgcctgatattatctaggagtccccaatgttaactcacttcctcaaaagaggcctctaagcctgcaattgcagtggcaactattgctattgcagccccaagatgcaccactggcctcctgttttaccatctgtccagttctgttgttggatttagagcagaatctcatttgcccagcttgctgccaa

SEQ ID NO: 321339 - DNA, 589 bp, Homo sapiens
acatgaaacttacccagtgccagggaaagtagattataagggacagcttgcaaacattattttcacaatgctgtagaaaggttgtgttggcaggaaatcgaatcattagaggtcaatctacataatgcacatctataacagaaacctgccaattgcatgctcacccttgatcattcttactcatctcaaagagaaagcatcccctgaaactgaggtcaccccaacataaacaagagtaacgacatcattcatacccagacatagagagcaatgtcagatctctcacaagtggacacaattacagaagcagagatgtccatgcaaattgcaccaccatgcacttctggcrtcaataatgtacatgtctttaaaatcaaattaaatcctactcagcaaccagcctgcctgatattatctaggagtccccaatgttaactcacttcctcaaaagaggcctctaagcctgcaattgcagtggcaactattgctattgcagccccaagatgcaccactggcctcctgttttaccatctgtccagttctgttgttggatttagagcagaatctcatttgcccagcttgctgccaa

SEQ ID NO: 321340 - DNA, 586 bp, Homo sapiens
ttttggcattgatcatgtgacactctcctggttttctctttttctaccttgcaacagcctcatctcagtctccattgccaggtcttctaatgttgtactttttgacttatgctttaacaaacccttaaaataatgtgctgttaacactcactaaataatgcttgctctgagtgccttacatataccatctcattaatgccccccacccccctgcaatctcaattctcacatttcatccgtattttccctttcttggttatctcactcgacctcacggccataagtaccatctactcactgacatctcccaaattatgtctctggccccagtgtttccctggaactccagatttgttccacaatctccctatactcaacattgtcacttgcacatctgttagaaatcctcaacttagcacaccccacattaaattctcctcctgccccagatacacatctctaccccaccctggtctccttctatgagaaagatggcaactgcatctattcyaagatgctcaggccaaaaatcggtagccatatttgactcttctcgctctcttaacctacacctaatttattactg

SEQ ID NO: 321341 - DNA, 549 bp, Homo sapiens
gcagggcccagacactccctgtaccccagattatggatctgaaaaatgaggggaagtgatgatctctaagatccttttactaaaggagctaagactcagacttagctcctttaggccagtgtctcttgaatttgaaagaccctgagaatcatgtaggagcactggtttagaaaaagacagattgttgatctttatcccaaaatcttcagggaaagggacagggaaactaaatgtttaaatgaagactcaggtgagactgcgrtagaacaatgaagggtaaggagccacccgaagtctccactgttctacctagctttgatctcattttagaatgaaaagttaaaaactctatctttattcctatttttcaactatactcagatattagcattttagcaactaaagagcagggccatatctctcactgttattcttccagtgcataaagtagtgaatctctaaatttgtccagggtatttaatagacttcattttaagtgagaatgaacatcaagaagggagaaagaagcctcaggaaagagatgttgac

SEQ ID NO: 321342 - DNA, 605 bp, Homo sapiens
ctagactacttattagcagaagggggtggagtctgtggtaaacttaatatctctaattgctgtcttaacatagacaataacggaaaagcagttctaaaaattgctycaaacatcagaaaagtagcccatgtacagtccaaacctaaaagggatgggacccaacaaaccttctaggaggatggctctctaatttaggaggatttaaaaccctggtagggacagtaatcttcatcactggggttctcctgtttctcccctgtgttatcccactgataataaaagccattaaaactcttgttaaaactacagttaaccaccagacaatccaaacgatgctcctgctacaatgacacaatggataccaacccgtctctcaagaatacaccaaaaattaagtttttctttttccaaggtgcccagatcacccctatgtcacgcctgaagtagttattgagaaagttctcccttttcccttttctataaccaaataggaatgtaagattctcccaggggcctgaaagcttaaagagatgaataactcctcccttctcaggcccagtcccagggtgcaaggccacttgtgtcagcagcgtgcaccagcaaga

SEQ ID NO: 321343 - DNA, 605 bp, Homo sapiens
ctagactacttattagcagaagggggtggagtctgtggtaaacttaatatctctaattgctgtcttaacatagacaataacggaaaagcagttctaaaaattgctccaaacatcagaaaagtagcccatgtacagtccaaacctaaaagggatgggacccaacaaaccttctaggaggatggctctctaatttaggaggatttaaaaccctggtagggacagtaatcttcatcactggggttctcctgtttctcccctgtgttatcccactgataataaaagccattaaaactcttgttaaaactacagttaaccaccagacaatccaaacgatgctcctgctacaatgacayaatggataccaacccgtctctcaagaatacaccaaaaattaagtttttctttttccaaggtgcccagatcacccctatgtcacgcctgaagtagttattgagaaagttctcccttttcccttttctataaccaaataggaatgtaagattctcccaggggcctgaaagcttaaagagatgaataactcctcccttctcaggcccagtcccagggtgcaaggccacttgtgtcagcagcgtgcaccagcaaga

SEQ ID NO: 321344 - DNA, 605 bp, Homo sapiens
ctagactacttattagcagaagggggtggagtctgtggtaaacttaatatctctaattgctgtcttaacatagacaataacggaaaagcagttctaaaaattgctccaaacatcagaaaagtagcccatgtacagtccaaacctaaaagggatgggacccaacaaaccttctaggaggatggctctctaatttaggaggatttaaaaccctggtagggacagtaatcttcatcactggggttctcctgtttctcccctgtgttatcccactgataataaaagccattaaaactcttgttaaaactacagttaaccaccagacaatccaaacgatgctcctgctacaatgacacratggataccaacccgtctctcaagaatacaccaaaaattaagtttttctttttccaaggtgcccagatcacccctatgtcacgcctgaagtagttattgagaaagttctcccttttcccttttctataaccaaataggaatgtaagattctcccaggggcctgaaagcttaaagagatgaataactcctcccttctcaggcccagtcccagggtgcaaggccacttgtgtcagcagcgtgcaccagcaaga

SEQ ID NO: 321345 - DNA, 605 bp, Homo sapiens
ctagactacttattagcagaagggggtggagtctgtggtaaacttaatatctctaattgctgtcttaacatagacaataacggaaaagcagttctaaaaattgctccaaacatcagaaaagtagcccatgtacagtccaaacctaaaagggatgggacccaacaaaccttctaggaggatggctctctaatttaggaggatttaaaaccctggtagggacagtaatcttcatcactggggttctcctgtttctcccctgtgttatcccactgataataaaagccattaaaactcttgttaaaactacagttaaccaccagacaatccaaacgatgctcctgctacaatgacacaatggataccaacccgtctctcaagaatacaccaaaaattaagtttttctttttccaaggtgcccagatcaccyctatgtcacgcctgaagtagttattgagaaagttctcccttttcccttttctataaccaaataggaatgtaagattctcccaggggcctgaaagcttaaagagatgaataactcctcccttctcaggcccagtcccagggtgcaaggccacttgtgtcagcagcgtgcaccagcaaga

SEQ ID NO: 321346 - DNA, 447 bp, Homo sapiens
cccccaagtccatttcataggcctgcctcagaagttcagagggattatgcaaatgaggccccaaggcttgcctccagcacatgggggttcccccaggcaagtatgcaaacgaggcccatatagtgacccccagctcacaaaaatgaagtttcaagttacttgctttattctgcattgcttttctctgcctcctttcttacctcagtctcctcacctgggaaagatgcatgtttggtttatacactataataatgctcactgaggcagcttgctagttaagaattatgttgcattaaggtttcctacactgtattrtactcaaaaaaacatatgtcagtggggtttgagagcagacaggagggctgaaggagatagcctcaaatgggaaaggcagaatggtaaatctgcacctccactcctcatagaattcctaatttgtagttcagt

SEQ ID NO: 321347 - DNA, 587 bp, Homo sapiens
tgtacgccgggtctgtagaagtcctaatctggacctggccttaaagtgagaatatatcacccttttgaccctctggaaaaccctcccctagagttagaatggggtggaggaggttgaaatgtaaaaggaggagagagttgcatcaggtgaagggagtagtcctgtaaaatgtgctttggattggagtccactaaagagaccatccccaacccctccccggggcactagatgtcttgcaggttattcatgyaggagagggaaaattgggtatgcagtggcacaaataatccaaaactcattgatatttgaatacttaatgctgtttgtgatttctgtagccagcatagttcccttcttgattgcacttcactgggatcactgtgaaggttgcttggtattccccacacacacagcagctaatgggaagaagacagtgaggacgagcatgagatgaaagtcaactaaataaggtgaggctggccacaaaagtgattaattctcatagggacaaatgagtaacctcttactcccagctgaattctaagcctcacacagggaatgagagagagcaaatctcatgagacttc

SEQ ID NO: 321348 - DNA, 587 bp, Homo sapiens
tgtacgccgggtctgtagaagtcctaatctggacctggccttaaagtgagaatatatcacccttttgaccctctggaaaaccctcccctagagttagaatggggtggaggaggttgaaatgtaaaaggaggagagagttgcatcaggtgaagggagtagtcctgtaaaatgtgctttggattggagtccactaaagagaccatccccaacccctccccggggcactagatgtcttgcaggttattcatgtaggagagggaaaattgggtatgcagtggcacaaataatccaaaactcattgatatttgaatacttaatgctgtttgtgatttctgtagccagcatagttcccttcttgattgcacttcactgggatcactgtgaaggttgcttggtattccccacrcacacagcagctaatgggaagaagacagtgaggacgagcatgagatgaaagtcaactaaataaggtgaggctggccacaaaagtgattaattctcatagggacaaatgagtaacctcttactcccagctgaattctaagcctcacacagggaatgagagagagcaaatctcatgagacttc

SEQ ID NO: 321349 - DNA, 587 bp, Homo sapiens
tgtacgccgggtctgtagaagtcctaatctggacctggccttaaagtgagaatatatcacccttttgaccctctggaaaaccctcccctagagttagaatggggtggaggaggttgaaatgtaaaaggaggagagagttgcatcaggtgaagggagtagtcctgtaaaatgtgctttggattggagtccactaaagagaccatccccaacccctccccggggcactagatgtcttgcaggttattcatgtaggagagggaaaattgggtatgcagtggcacaaataatccaaaactcattgatatttgaatacttaatgctgtttgtgatttctgtagccagcatagttcccttcttgattgcacttcactgggatcactgtgaaggttgcttggtattccccacacacacagcagctaatgggaagaagacagtgaggasgagcatgagatgaaagtcaactaaataaggtgaggctggccacaaaagtgattaattctcatagggacaaatgagtaacctcttactcccagctgaattctaagcctcacacagggaatgagagagagcaaatctcatgagacttc

SEQ ID NO: 321350 - DNA, 599 bp, Homo sapiens
aagtgaggaaatggcaggtatgggatttccattttgcagcccggggggtggcagaggccacatgtttctatgattggaagtgggggaagcaggagaggccacttgctatcatggatagggcagtggggtcctgggatcagtggccagttcctcagggtgtttccaggagttgttagtagaaatcagcctagaattgtccctctagtcctttttgtgactctgggagctagggaaagtagcctgggctccaatcctggctctgccgcttaataattgtgtgatctcaggcaagttatctcactgctttatgccagtttccttatctgaaaagtggtgcaaataggtagctgttgcatagggttttcatacagtataaaggagttaatataggtaaagcatttagaatgcatcctgacacatggtaaatacattaatgttacattatggttgttgttgcttctgttgttattattactaataatatatttcaaaytagctaaagtggattcttttatctatgagtaaaagcacagattaatacaaagagcaacatgctttgtacttgaatttttaggtaaagaagtattaatatatatatg

SEQ ID NO: 321351 - DNA, 537 bp, Homo sapiens
aaattttaatacagagcaaagattattactgatctattattttaagactrttagtataattaatctttcagtgagtgatacacaaaatattatgatgatcctttgagaccataatcatgttgtcaatgatgaattttttattttttatttttataggtatataagaaatatatatattttcagagtacttgtgataatttgataccttcaaataaacaaatcagggtaattgggatatccaacactttaaatattaatcctttctaattattctcttctagccattttgaaatgtacaattgattaatgttaactacagtcacccacctgatctatcaaacactatgttttatttcttctaagtgtatatttatacccattgatcaacctgtcttcatccctctcttcctctacccttcccagcctctggtagccaccaatctactctccatcttcatgagatccacttttttagttcccacatatgagaacatataatgtttgtttttgtttttctttgcctggcttatttctctt

SEQ ID NO: 321352 - DNA, 537 bp, Homo sapiens
aaattttaatacagagcaaagattattactgatctattattttaagactgttagtataattaatctttcagtgagtgatacacaaaatattatgatgatcctttgagaccataatcatgttgtcaatgatgaattttttattttttatttttataggtatataagaaatatatatattttcagagtacttgtgataatttgataccttcaaataawcaaatcagggtaattgggatatccaacactttaaatattaatcctttctaattattctcttctagccattttgaaatgtacaattgattaatgttaactacagtcacccacctgatctatcaaacactatgttttatttcttctaagtgtatatttatacccattgatcaacctgtcttcatccctctcttcctctacccttcccagcctctggtagccaccaatctactctccatcttcatgagatccacttttttagttcccacatatgagaacatataatgtttgtttttgtttttctttgcctggcttatttctctt

SEQ ID NO: 321353 - DNA, 473 bp, Homo sapiens
tttgaaatgtacaattgattaatgttaactacrgtcacccacctgatctatcaaacactatgttttatttcttctaagtgtatatttatacccattgatcaacctgtcttcatccctctcttcctctacccttcccagcctctggtagccaccaatctactctccatcttcatgagatccacttttttagttcccacatatgagaacatataatgtttgtttttgtttttctttgcctggcttatttctcttaatacaattacctccagtttcatctatgttgctgcaaataacaggatttcatttttcatggctgaatgatattccattgtatatatatcacatttttattatccattcatccaatgatggacacaacggttgatttcatattttggctattatacatacaactccaataaatatggaagtacagatatctctttgatatatggatttcctttcttttggat

SEQ ID NO: 321354 - DNA, 537 bp, Homo sapiens
aaattttaatacagagcaaagattattactgatctattattttaagactgttagtataattaatctttcagtgagtgatacacaaaatattatgatgatcctttgagaccataatcatgttgtcaatgatgaattttttattttttatttttataggtatataagaaatatatatattttcagagtacttgtgataatttgataccttcaaataaacaaatcagggtaattgggatatccaacactttaaatattaatcctttctaattattctcttctagccattttgaaatgtacaattgattaatgttaactacagtcacccacctgatctatcaaacactatgttttatttcttctaagtgtatatttatacccattgatcaacctgtcttcatccctctcttcctctacccttcccagcctctggtagccaccaatctactctcmatcttcatgagatccacttttttagttcccacatatgagaacatataatgtttgtttttgtttttctttgcctggcttatttctctt

SEQ ID NO: 321355 - DNA, 537 bp, Homo sapiens
aaattttaatacagagcaaagattattactgatctattattttaagactgttagtataattaatctttcagtgagtgatacacaaaatattatgatgatcctttgagaccataatcatgttgtcaatgatgaattttttattttttatttttataggtatataagaaatatatatattttcagagtacttgtgataatttgataccttcaaataaacaaatcagggtaattgggatatccaacactttaaatattaatcctttctaattattctcttctagccattttgaaatgtacaattgattaatgttaactacagtcacccacctgatctatcaaacactatgttttatttcttctaagtgtatatttatacccattgatcaacctgtcttcatccctctcttcctctacccttcccagcctctggtagccaccaatctactctccrtcttcatgagatccacttttttagttcccacatatgagaacatataatgtttgtttttgtttttctttgcctggcttatttctctt

SEQ ID NO: 321356 - DNA, 473 bp, Homo sapiens
tttgaaatgtacaattgattaatgttaactacagtcacccacctgatctatcaaacactatgttttatttcttctaagtgtatatttatacccattgatcaacctgtcttcatccctctcttcctctacccttcccagcctctggtagccaccaatctactctccatcttcatgagatccacttttttagttcccacatatgagaacatataatgtttgtttttgtttttctttgcctgrcttatttctcttaatacaattacctccagtttcatctatgttgctgcaaataacaggatttcatttttcatggctgaatgatattccattgtatatatatcacatttttattatccattcatccaatgatggacacaacggttgatttcatattttggctattatacatacaactccaataaatatggaagtacagatatctctttgatatatggatttcctttcttttggat

SEQ ID NO: 321357 - DNA, 571 bp, Homo sapiens
aacttaactattggaaactattctcagtacccaggtgttgggatcatttgtaccccaaaccttagcatcacacratatgcccaggtaacaaaccggcacatgtaccctttgaatatctaaaataaaatttgaaaaggaaaaataaaaaggattcttactttatagcaatgtttcttaaacttgagttgtaccaaaaccacctggagaccttgttaaaacacagattgtttggccccaccttcggaatgtctgattcagtaagtttctaaaattttatttctaacaagttctcaggtgctgctaatgctgctgctggtttaaagaccaccactgccttgcaagatgatgggatttgaaataaaattctcaaactataaacactcaatgaatgactacttttgtcattgttgatttattcatatggaaataatgtatggtcattttgaaactttacaaaatcaagaaaatattaaaaattaaaataatccatatcctaccttcagcctttataacttggtctcttcactgttttccagcttaactagcatttctacctgtttgtattagttct

SEQ ID NO: 321358 - DNA, 587 bp, Homo sapiens
ttggtgcttactgttgtatagtttatgaaatattctcaccaaggttaccttactgaagccttcacctccctttacgctccatccaatccaygagataactcagactaaagaaaaaccattaacacaggttttaaatctgaaaaaaaaaatatgaacagagttgctgagaaattgagtaacaattacctttctaattattttaaaaaggcatatttattgtaaaaaaaattatagaaaagtataatgatgataactatatcataatttacttaacctttacactattgttgaacatttaggtaatttttaaattttgctattaaggaaaaatgctttggtaaacatttttgtccataaaagccttgtgtaccttaggattttctttagaaaggtttcccagatgaaaaattattaggcgaaagagataagcatgtttcagactcatgagaacacaataccaattatcatcttaagtggttgtatctgtttctccttctaagctcagtgtttaacagtgcctgtttcaccacaaatatataagctggaaggttttggaaataatgtgattatttaaaagtaaaaacagg

SEQ ID NO: 321359 - DNA, 539 bp, Homo sapiens
tcaccttctaactcctgtttattatttttcatctttcagttatcatatcccctgcatagaaagcatccgtattttcccccaaaacacttatcacaactatgaattattctttcatgagattatttgattatccacaccagtctacaattcttggttgtatcagatctcttttgttcacctttgaatcctcagaacctggcaaagtgtctagcatctcactgaagcttaatattatttatttatggaataaaaatatctatctaatgatgcataacttatatctggtggggaagctgggagaactaataataaaggagactgactccagattataaggcatggaaagtgcttacattttcaaactgagccaagccaattgaggagtgtgtgatgctataactgactttcaacaagttatctaacwtcttcgttactgaaatgcctcatctctataatattaatgaaaccatgtaatttaaatattgtctgatatcaaaacaccatataacctttatgttaaatttgattcaaactgctat

SEQ ID NO: 321360 - DNA, 536 bp, Homo sapiens
gaatttctttgttttctttaatctaatacataatagccatttagttggcattttagttcatgtgttgggagtggaagtctttatcaatggagtttgtgtgtatactgattttgacaactttgttcaaaatcaatttattgaggactgttcagagtctgaggtttaaccgtacctacaaactgacaagtaatactgccacactttcatggatgcaggcagaagacttgagacccctgggtctgagacaaagtactttttactcaaaccaatagtagtaatgggtattagcattttcaccagttcctctaactccaattccttcagaataatataactaggccaggtaacagctacaaacacagtggggtttgttacaggagagaaccccaagcttagagaatctgaactttatacaatggacaataagcatacctgaaggaagcattatctttattatactttggcawaagcaaaccaccctttgctctgggagtgaagacagtatgtctattctctagttacttgctatagtacaa

SEQ ID NO: 321361 - DNA, 503 bp, Homo sapiens
ccaataaagcttgtgggtagagaagctgggtattctcatgcttcacctacaaagcttacttttaattgcagaatttgtggtttattgatgatgctaggtagagagcgcacagcttgatgttcacatcacaggctggattctcagctctaatagtttttaaaaatcagcctgcgatttcaaaactgaaaatgcacagtatatgtaaataagaaagaataagtatggaaatcttcaaggtcagactcctcagattcttgtcacatttcaaaactaatacaggagaaactatctatgatattgtaatgatgcttcaatcatttatttacttgctcctcaagtactttgtgatcgtctactaygcatcaggcttattctgctacctggacataagcgataaaatgggcacccccaagttcctcatgaagcacacagatataagtattattaaacaaaaatgtaggatgcttgagaagttatgacaggagaatctgactatggacata

SEQ ID NO: 321362 - DNA, 568 bp, Homo sapiens
aaatgctgggttcagcagggaaaatcttcagccctatcccaacagtcagctagccctggtgcatgagaagggacttggaaaagaggaagtctttctccccctgcccactaccatagacacagctggggcttcttccatgggagtttggcatgggtgcaactatagacagcctttctggaacatgttagggtgactgcacccccgcagyaggagcaccctctagatttaggtttgcgtgagagacagagtcacaattcctctctgtttggaacatcaacattcctgcagatgaaaagaggtgtctgtcttatctgaatagctggagtgctgggtcagaagtgtgtctgagaggtggataacattcctgctgacttggcaggggagctatggtggctccgacctttcccccagataagacctcttaaaactcattgagagctcctctagctgcctctgtcaaggctaggccttcatttattcacctgctttagccacagcaggttcctactgagggatacctctcccactggcctgaagcctgaaccatcaaaccagtacataaaatact

SEQ ID NO: 321363 - DNA, 529 bp, Homo sapiens
gacagcctttctggaacatgttagggtgactgcacccccgcagcaggagcaccctctagatttaggtttgcgtgagagacagagtcacaattcctctctgtttggaacatcaacattcctgcagatgaaaagaggtgtctgtcttatctgaatagctggagtgctgggtcagaagtgtgtctgagaggtggataacattcctgctgacttggcaggggagctatggtggctccgacctttcccccagataagacctcttaaaactcattgagagctcctctagctgcctctrtcaaggctaggccttcatttattcacctgctttagccacagcaggttcctactgagggatacctctcccactggcctgaagcctgaaccatcaaaccagtacataaaatacttgggaagagaaataaataagaaagtgcatgccatgggagaatgagttgttttaagagacttctaccattccaacaccacaagagatagtgaacttgttcacacagagtacattgctactacaacc

SEQ ID NO: 321364 - DNA, 250 bp, Homo sapiens
ttcatcatgatcaagtgggttttatccaagggatgcagggatggtttaacatatgcaagtcaataaatgtggtaagccacataaacagaattataaacaaaaaccatatgatyatctcaacagatgcagaaaaagcatttgacaaaacccagcactgctttgtgataaaaactctgaaaaagctaggcatagaagggactacctcaaaatattaaaagccacatatgacaaaccgacagccaatattata

SEQ ID NO: 321365 - DNA, 555 bp, Homo sapiens
tggtgccaggctagtggtcaagctaaaccattggaatgagagtctctgaaccatattaatgaaagatctgaagtcaatttctgcttaataggcaacagattaaattggaaaaaaataagaataaattcaggggaaaaaggagggggagaaaaaccttgtttatttccattgtaatttaycaagttttctttttgttaaagctgggaaaaagaacaatgacatgtaattctttctggatattgaatattcagaaagagatcatgtctgaatggctaaaagtcattcctgtggagatattgttctcagcaaattaagatctgattatgacagcaataccgtctagcgatactgctagtaatatcctgttagaaaatgtgttaatctgtacaacaggcaacttcttggttttgaaaaaaatatttttactttccatcaatttaaaagacaaaagatctagatacaagaaatatgaatgttattttgctgtatgtttggaactcaaattcttgggaaatgtttcatttgaagacgaagaagagctagaaatttcaattt

SEQ ID NO: 321366 - DNA, 605 bp, Homo sapiens
tgtagactgcaacctcatttgagttgacatttttcatgcctccagcaaattgtcagactgagaggataygcttgctgagctccccatcgtgctcagcaattgtcctccagatgctaatgacaactcagaatgctctgttctctctctctagatattaatgaggagctatattaaaatataaccttatactgtctatagccctacaaaaacctggaatttacttttacctcaatagttgttgttgttgttatttttcctctctctcccccaggaactttgaggctggacaaaaatgggttggccactaaaacataaggtcatgggagtgtgtggtatgtgagatccctgccctgtgccatgacctgattaaagtccactgtgaggcatgtccttccagggaagaagaatcctagaacctgcaggggcttcacttctgctgttatctaatgtggacatggtctacctaataagcttcatgagcactgcaaattgcaaagagaaatattctctctttaatttcctgaagtggggttacctcacattcttcaacctctgtagaccaatgttttggttctttaaaattgtagttacctgtagttaaattc

SEQ ID NO: 321367 - DNA, 625 bp, Homo sapiens
aagttttcctagtcttattctctccacatctctttacatttcccaaagattttctacttcctcttcctgtcagatggcarcatttccttttgtcatattatctatcctttcaaaagtaatatttataaaactcaatggacataaagcaccttagggcttcgatatgtaaagggaggcttcgtctctcaataaggcccagctatcaagcctcctggaaatcaccatggaatgaacaaattaaatttgcaactaaaactgagcaacattgtctgttttaaaagctgtatcagtccttgcactgaagcaaggagtgtccttggattaatagcttaggtttctaaaagtcaaggggaattaaaaaatacatgagcttgatatataaaaaatagaaaaaactgcttatttggaatgatggttgtaatctgtcataaagcgttaccagtcagaagcatgtagaaatctatagagaatcggagggctgaagggatggataaatttgggcctatctctgcagatattatggagcccacctctacagttgtgatgttacaacacccagtatcacataatttgcttaaacttaaacatacttaaacattgcttttcactggttccaagcaaatag

SEQ ID NO: 321368 - DNA, 625 bp, Homo sapiens
aagttttcctagtcttattctctccacatctctttacatttcccaaagattttctacttcctcttcctgtcagatggcagcatttccttttgtcatattatctatcctttcaaaagtaatatttataaaactcaatggacataaagcaccttagggcttcgatatgtaaagggaggcttcgtctctcaataaggcccagctatcaagcctcctggaaatcaccatggaatgaacaaattaaatttgcaactaaaactgagcaacattgtctgttttaaaagctgtatcagtccttgcactgaagcaaggagtgtccttggattaatagcttaggtttctaaaagtcaaggggaattaaaaaatacatgagcttgatatataaaaaatagaaaaaactgcttatttggaatratggttgtaatctgtcataaagcgttaccagtcagaagcatgtagaaatctatagagaatcggagggctgaagggatggataaatttgggcctatctctgcagatattatggagcccacctctacagttgtgatgttacaacacccagtatcacataatttgcttaaacttaaacatacttaaacattgcttttcactggttccaagcaaatag

SEQ ID NO: 321369 - DNA, 583 bp, Homo sapiens
aaaattttctgtgtgaaaccaaggtcaggagtgttggttcaagctataaacataaacttcctacagccacaatctaaagataacaaaaaatttattcartaagaatttattaaatgcatgctgattttaaatcatcatacatattacttcagtagacgccaaaattccttcactagcctcacagttcctaactttgaaaagtttcttacttaattggttcttacaactgtgttgctagtgatttagcataatagtgaaatgaattagaatgctttaaacttgctcacctgaatgatcagtgagagagtgttttgcttcatatatttttttcttataaaacactaagtgaccaggattttttgctatatagaggtaacatcatttttaatttgtggtttgtatcttttccataaaaatgatgcccttcttgatattccagttactaaagtaattttcctaatgtcacccagttataaacccctcttgctttgcacatggtttttttctctctctttgatactcatgacatttcccattgtattcggctttctgttgcattaattgtgtgtaattttgttcacca

SEQ ID NO: 321370 - DNA, 589 bp, Homo sapiens
ttttttacttctattattgctaaaaacacctttctggtgagaggcgtatagtcattcatagctatctttatactcctttgtacagaccaaatttataaagcttgatcaacatgacaaatataatctcaattaaatgtatatttcctttttcctaaaaaattcagttgcatattcatcccattatattgattgcatatttgtgttgtctattgtygatgctaaaaaatgtatgagacatttttgtataagttataaatgtataagtttggtgcccaaatttatgagacttcaatttactggaagacaaattcatattaaaagcgaacataatacaaagcagagcatgatacatgagccaagagtggtgcaaagtgctctgaaagttcagaagagggagccatcacttcagttggggaaatcagaaaacattgaagaaatgaggtggtgtgtgggtcctttaagaagaatttagatttcaacaggatgagatggaggcaaatggacattacagggagagagaagagcatgagaaaaataaagggtcggcaagtgccagtaccattatgggaagttagtggtccaattttgc

SEQ ID NO: 321371 - DNA, 559 bp, Homo sapiens
tgattgcatatttgtgttgtctattgtcgatgctaaaaaatgtatgagacatttttgtataagttataaatgtataagtttggtgcccaaatttatgagacttcaatttactggaagacaaattcatattaaaagcgaacataatacaaagcagagcatgatacatgagccaagagtggtgcaaagtgctctgaaagttcagaagagggagccatcacttcagtyggggaaatcagaaaacattgaagaaatgaggtggtgtgtgggtcctttaagaagaatttagatttcaacaggatgagatggaggcaaatggacattacagggagagagaagagcatgagaaaaataaagggtcggcaagtgccagtaccattatgggaagttagtggtccaattttgccctagagggagggaatgggaacatgaagataaaaaggcacatgagagagtagagccaagaaatccttaattgctaagaaattcaaactttctctagaggtggtagagagttaactgaaacagtaagaaagatccatgatcagaacagtgagactga

SEQ ID NO: 321372 - DNA, 563 bp, Homo sapiens
ttgagaatcactgtgacctcaaggacagtaaaaaattatagatacaactatgattttatttttgaatatgatatatcatttttggaatctggacttgatggaatacaatgaggtagaatggtgaaccaggtcttttctagagggctttaatttttacagcaagtgaaaattaagcagcctaacatctaaactaagtttcattttttctccttgtttctaactgttcttttccttggtattttctttgtttctctgatatcacaatgaaactaaattaataacaaatgaamtatattgaagaaatcctcaacggatgaatggatagacaaaacattgcatacctgtacaatggaacactatttagtcataaaaagaaatggaatattgattggtgttacacagggacgaatcttaaaaacatatgccaagaaaaaaaagccagacacaaaaggccacattctgggtgattccttttatatgaaatgttcaaaataagcaaatatatggagacagaaaacagattagcagctactaggagcaaaggggagaaaggaatgaagagt

SEQ ID NO: 321373 - DNA, 563 bp, Homo sapiens
ttgagaatcactgtgacctcaaggacagtaaaaaattatagatacaactatgattttatttttgaatatgatatatcatttttggaatctggacttgatggaatacaatgaggtagaatggtgaaccaggtcttttctagagggctttaatttttacagcaagtgaaaattaagcagcctaacatctaaactaagtttcattttttctccttgtttctaactgttcttttccttggtattttctttgtttctctgatatcacaatgaaactaaattaataacaaatgaactatattgaagaaatcctcaacggatgaatggatagacaaaacattgcatacctgtacaatggaacactatttagtcataaaaagaaatggaatattgattggtgttacacagggacgaatcttaaaaacatatgccaagaaaaaaaagccagacacaaaaggccacattctgggtgattccwtttatatgaaatgttcaaaataagcaaatatatggagacagaaaacagattagcagctactaggagcaaaggggagaaaggaatgaagagt

SEQ ID NO: 321374 - DNA, 563 bp, Homo sapiens
ttgagaatcactgtgacctcaaggacagtaaaaaattatagatacaactatgattttatttttgaatatgatatatcatttttggaatctggacttgatggaatacaatgaggtagaatggtgaaccaggtcttttctagagggctttaatttttacagcaagtgaaaattaagcagcctaacatctaaactaagtttcattttttctccttgtttctaactgttcttttccttggtattttctttgtttctctgatatcacaatgaaactaaattaataacaaatgaactatattgaagaaatcctcaacggatgaatggatagacaaaacattgcatacctgtacaatggaacactatttagtcataaaaagaaatggaatattgattggtgttacacagggacgaatcttaaaaacatatgccaagaaaaaaaagccagacacaaaaggccacattctgggtgattccttttrtatgaaatgttcaaaataagcaaatatatggagacagaaaacagattagcagctactaggagcaaaggggagaaaggaatgaagagt

SEQ ID NO: 321375 - DNA, 514 bp, Homo sapiens
tctgctaatttcatcatctctgtgattcccaaatctctttttatttactgattttttttttcttcctggaaatgggtcacatattccttcttttgttgcctgagtggtaatttccrattggatctcagacatcgtaaatgttgtccatatgtataatgtgttgtatttacttagatagccactattggccttttgccctgaagggaattacagttctggcatagccctttcatttaaagcctttttaaggatatgtatgttgtagtctttacactagggctaatttagctcccccactacattactgttgtttagggtctctactttaagctccatgtatttggcaaggtctctccattctggcttgtgaggccttggatgagtccaagccttgtgtgagcccttggaattgtttggcttatagctctccagaatattttcttttcctgaaaattgttcttcacctgcctattttaccctcggagtgaacaacttagtatttggccaaagactc

SEQ ID NO: 321376 - DNA, 514 bp, Homo sapiens
tctgctaatttcatcatctctgtgattcccaaatctctttttatttactgattttttttttcttcctggaaatgggtcacatattccttcttttgttgcctgagtggtaatttccgattggatctcagacatcgtaaatgttgtccatatgtataatgtgttgtatttacttagatagccactattggccttttgccctgaagggaattacagttctggcatagccstttcatttaaagcctttttaaggatatgtatgttgtagtctttacactagggctaatttagctcccccactacattactgttgtttagggtctctactttaagctccatgtatttggcaaggtctctccattctggcttgtgaggccttggatgagtccaagccttgtgtgagcccttggaattgtttggcttatagctctccagaatattttcttttcctgaaaattgttcttcacctgcctattttaccctcggagtgaacaacttagtatttggccaaagactc

SEQ ID NO: 321377 - DNA, 514 bp, Homo sapiens
tctgctaatttcatcatctctgtgattcccaaatctctttttatttactgattttttttttcttcctggaaatgggtcacatattccttcttttgttgcctgagtggtaatttccgattggatctcagacatcgtaaatgttgtccatatgtataatgtgttgtatttacttagatagccactattggccttttgccctgaagggaattacagttctggcatagccctttcatttaaagcctttttaaggayatgtatgttgtagtctttacactagggctaatttagctcccccactacattactgttgtttagggtctctactttaagctccatgtatttggcaaggtctctccattctggcttgtgaggccttggatgagtccaagccttgtgtgagcccttggaattgtttggcttatagctctccagaatattttcttttcctgaaaattgttcttcacctgcctattttaccctcggagtgaacaacttagtatttggccaaagactc

SEQ ID NO: 321378 - DNA, 469 bp, Homo sapiens
ctatccattttagcactttttctctagtgtgtcatccttccatggccctatttttatgtggatgtcttcaatctaacctctcagcattctcagtcttcagattttgtctcctgtcctcccatccaataaacactttacaactgaggttatgggccactgtagattcccaagtkctcctagacaaattgcaggctcagatcttcttttattatccctgtagacttctagacttgggtcatttattccccttacttgtctttcttaatgcaagctacttttaatattttacatatcttttttgtttcttatgcattataatatgtctccttctacagcaagtccattatattaccaaatgtatacacttaagtgctgtcaaattgattctgataaatttcaaatagaaaccattagaagtatttatttagcaggcaatatgacaatgtgtgctctcatgggtaaatatctt

SEQ ID NO: 321379 - DNA, 469 bp, Homo sapiens
ctatccattttagcactttttctctagtgtgtcatccttccatggccctatttttatgtggatgtcttcaatctaacctctcagcattctcagtcttcagattttgtctcctgtcctcccatccaataaacactttacaactgaggttatgggccactgtagattcccaagtgctcctagacaaattgcaggctcagatcttcttttattatccctgtagacttctagacttgggtcatttattccccttacttgtctttcttaatgcaagctacttttaatatyttacatatcttttttgtttcttatgcattataatatgtctccttctacagcaagtccattatattaccaaatgtatacacttaagtgctgtcaaattgattctgataaatttcaaatagaaaccattagaagtatttatttagcaggcaatatgacaatgtgtgctctcatgggtaaatatctt

SEQ ID NO: 321380 - DNA, 469 bp, Homo sapiens
ctatccattttagcactttttctctagtgtgtcatccttccatggccctatttttatgtggatgtcttcaatctaacctctcagcattctcagtcttcagattttgtctcctgtcctcccatccaataaacactttacaactgaggttatgggccactgtagattcccaagtgctcctagacaaattgcaggctcagatcttcttttattatccctgtagacttctagacttgggtcatttattccccttacttgtctttcttaatgcaagctacttttaatattttacatatcttttttgtttcttatgcattataatatgtctccttctacagcaagtccattatattaccaaatgtatacacttaagtgctgtcarattgattctgataaatttcaaatagaaaccattagaagtatttatttagcaggcaatatgacaatgtgtgctctcatgggtaaatatctt

SEQ ID NO: 321381 - DNA, 478 bp, Homo sapiens
cttcctccacacttgtgtgtgcctccaccatagtgttcatttctaagtgctttgtagaaatatgtcttagaaggagtttgctcagagcattttattttgttgtttgtttgtttttaccatagtgatgaggtatatttggtttattgaacccaaggaaggttttctttgattgaaaagaccataggcaaagtgaaatccttgactgaaaagaccacaggcaaagttaaatagctagaattattcagtgttagatcttatgtctttgttaacttaagcctccttagtatttatatccacagataattctttgtcttctggaaatttcctcccagagggaataaaattctcagatttttgaggggataaaattctgagttgtctrtgggatcatctggtcctcttcagcttgccaccaatggaaatatcatcaagacctgtaaggccttttcttttccactctctgttgataagctctgtc

SEQ ID NO: 321382 - DNA, 589 bp, Homo sapiens
ggcatattcttcctttgaaacaactattcaagccagaaattttacaaaaattatacacataaaagtaggactagaaaaatttaaattctagagaagggrgaaagttttgggggttatgaagttgtccatatgggtattagccaaccttgggtttagggtaaacactacaaataagctcaagctttagttttgagtattcttattgctgtacagttttgctaatgtttgatcataactatattttcaaattttagagtgtaatgaaatgcctttagtttgcctattctgatctttaataagatggattatcttttcatatatttatttgacctttgcatttcctcttcaatgaaaatctgtccatatttttgctatactctctattagattgtcttttctcatttattcatagaaattctttgtacatgatataaagtattattttttatatatatgcaacatatacaaaaagtgcaagctccagtttgtggactacattttcacttattttgagatgtctcttgaggaatggagtcttatttctaacgtagttatatttaacaatcttttcctttatggttaatctttt

SEQ ID NO: 321383 - DNA, 589 bp, Homo sapiens
ggcatattcttcctttgaaacaactattcaagccagaaattttacaaaaattatacacataaaagtaggactagaaaaatttaaattctagagaagggggaaagttttggrggttatgaagttgtccatatgggtattagccaaccttgggtttagggtaaacactacaaataagctcaagctttagttttgagtattcttattgctgtacagttttgctaatgtttgatcataactatattttcaaattttagagtgtaatgaaatgcctttagtttgcctattctgatctttaataagatggattatcttttcatatatttatttgacctttgcatttcctcttcaatgaaaatctgtccatatttttgctatactctctattagattgtcttttctcatttattcatagaaattctttgtacatgatataaagtattattttttatatatatgcaacatatacaaaaagtgcaagctccagtttgtggactacattttcacttattttgagatgtctcttgaggaatggagtcttatttctaacgtagttatatttaacaatcttttcctttatggttaatctttt

SEQ ID NO: 321384 - DNA, 624 bp, Homo sapiens
tttgtggttcattattgcatttctatatgtttgatgtagatttgttttatcaggtaagaacatttacatttattcctaagttttgaagggcttatatcatatatgtttttcagaaattggctatcagatagaagctttcaatgcatatatttaaataattttaatttgttaccaaggtaaattatgtcaacacattgaaaaatattaaaccaagattatgtgtacatatatatatatatatatatatatatatatatatatatatatacacacacatatatatatattttttttttttttgggggggatggagtcttgctctgtcaccaggctggagtacagtggcatgatctcagctcactgcaacctccgcctcccgggttcaagtgattctcctgccttagcctcccaagtagctgggactacaggcacacaccaccatgcccagctaatttttgtaattttagtagagatggggtttcaccgtgtcagccagggtggtcttratctcttgaccttgtgatccacctgattatatttcttatataatcccaacttgagcaagagctaatacttttataaacaaccaattttggttttctaatattttatttacgatttttg

SEQ ID NO: 321385 - DNA, 516 bp, Homo sapiens
agcaagagctaatacttttataaacaaccrattttggttttctaatattttatttacgatttttgcatgtatagttagctctgagattcttctgtaattttgtctcatttggtcctttctaagtttttttatgtcactgttattgtaggtgcataagatgaattgtatagttttttcctccttttctattgactgaaagattttgtataagtttggaattaattatatagtaggtaaaatttaccactgacactatgtgggctttctttgagcatatttaactattcattttattacttattacaagattattcagcttttctacttctacttaagtcattttgttaagttatattgttttaaaaatatttaaaatatttttataacaatataaatgtttttacatttaagttttaaaagctgagctacaattttcataattctcttattttaaaatttgatttttcttataagaaacttaattggagttgcatcagagaatgtaattggattaca

SEQ ID NO: 321386 - DNA, 627 bp, Homo sapiens
cttttgccattataactacacatagtgggtgggttgctagacattccactcttcatgggccytgtgcttcaacttctgtggcttagatccatgaaactcaaaaatgctacccaatttatcacttggtttctcatatcaataagtaaatatgtcaggcctctttcttggtctcctgtttctcactgcagtgtcagttctttgacaacttctggcaaattctattaaatgtctaggttttctaattttcattattagctattttggtccaaattatctaagttttctgttatcttaagtcagtgtcttatatattttataattcaacctagatatctatatgtttcaattatctattagaaaaactgcatagaactgaagttaagattatagcctgtggatcttgattgcctgggttcaaatcatactctgagacttcctggctctttggacttgagaaataacttcatctctctatgcctcagtttcctcatctgtaaagaagggacaaaagtgtatttcatttatattaatatttatgaagcattaaaaaccatttgacttacatgacttaaagtattacagaatattataaagttagtacttgatctgtgatgactgcaacatgtt

SEQ ID NO: 321387 - DNA, 496 bp, Homo sapiens
ttactagtatgaacatccactgtcctctaagacactatcaggacaaactccaacatggcccatgctcatttaatttaggcactggtacaattttgaggttccatagtcaccattatcagtggaactcctacctttacggtgcactaatctgtgcactcctcctgtgctatccaagtctgtgttcttagaattgcaaatgagtgatcagccctgaatccgcagtctcctttctgaatatctcttctaccttcaaatcttaactaaacttggctatctcatgaagactgcattctcaaaatgaagtattctaagataacagcttggrtcaacagcttctttgcaagctgcattttttggaaactattatttttattttctttgctagaaagagccactactacattgaggctaacaccattataatttaccatcttgctattccctcaccactgccatgtggttttcttcccatcattaattaaagacattagactcc

SEQ ID NO: 321388 - DNA, 496 bp, Homo sapiens
ttactagtatgaacatccactgtcctctaagacactatcaggacaaactccaacatggcccatgctcatttaatttaggcactggtacaattttgaggttccatagtcaccattatcagtggaactcctacctttacggtgcactaatctgtgcactcctcctgtgctatccaagtctgtgttcttagaattgcaaatgagtgatcagccctgaatccgcagtctcctttctgaatatctcttctaccttcaaatcttaactaaacttggctatctcatgaagactgcattctcaaaatgaagtattctaagataacagcttgggtcaacagcttctttgcaagctgcattttttggaaactattatttttwttttctttgctagaaagagccactactacattgaggctaacaccattataatttaccatcttgctattccctcaccactgccatgtggttttcttcccatcattaattaaagacattagactcc

SEQ ID NO: 321389 - DNA, 496 bp, Homo sapiens
ttactagtatgaacatccactgtcctctaagacactatcaggacaaactccaacatggcccatgctcatttaatttaggcactggtacaattttgaggttccatagtcaccattatcagtggaactcctacctttacggtgcactaatctgtgcactcctcctgtgctatccaagtctgtgttcttagaattgcaaatgagtgatcagccctgaatccgcagtctcctttctgaatatctcttctaccttcaaatcttaactaaacttggctatctcatgaagactgcattctcaaaatgaagtattctaagataacagcttgggtcaacagcttctttgcaagctgcattttttggaaactattatttttaytttctttgctagaaagagccactactacattgaggctaacaccattataatttaccatcttgctattccctcaccactgccatgtggttttcttcccatcattaattaaagacattagactcc

SEQ ID NO: 321390 - DNA, 533 bp, Homo sapiens
ttaaactgttttcagaaaaggggccaagatatttattagaacttgttcccagattttttcytttcccacagagccctgacagatgagaaccaggaattttttgttgaagagctttcatcctttagtcatggaattattctggagcattttttcctcttcttccaagtgttcaagtaataagaaagacagcaggatcttttatttcagaacaaacatgaagttatttaagattatgttattgaatagtcaaaagattactatggagactaaagagtgctttcaacctagaaaaatgactttgaattaagaaaaaaataccttaaacacttgtcctagataagagccagtgtgaattgcctaagcactgactatgtgatttttcagagtgctatttcgcaaagtcatcccacagccagatttctaaacatagaccttgtaaatcggagggaaaaatccagaagacatttttgtacactagggtcagatgaaaatttccactctgtagtactttgtcctctaaacaactttatctc

SEQ ID NO: 321391 - DNA, 564 bp, Homo sapiens
cagctagtatttgtatggtagttttgtatcctgaaactttactctgatgatcttttgaatttctgtgatatgtgctgtgatgtcacatttatcatttttgattgtgctcacttgaaacttctctttttatcttggtgaatccagctacttgtccatcatttatcctttatatttgaagcaagagagaatattatttatattttcttgaaaaatcttaaaataggtttattcattttgtcaagaagcatcttttggctttatttattctctagtgtgtatttattttctattcattatggtctgtatttgtctttattattttcttcttttttatatttaatgtgtctttttactraattttttgaagtgaatgacaagatcgttaatttgaagactttcttattttctgacacatgtattttaaactacacatttttatataataacatttatataaaatatgtaaaattattttggtcattagatttattttttctagttttcattattattatacctatgactcatgattaaactataacttaattttccaaaagattggta

SEQ ID NO: 321392 - DNA, 500 bp, Homo sapiens
aattcaatgtttagttttttgaggaaatgccaaactgttttccatgacaactagatcattttgctttccaaccagcaatgtctgagggttgaaaattcttcacatccttaacaatacttaatccttttccctctttttaaaaaaattatagccgttatggaaaacagtacagagtttcctcaaataattaaaaatagaacttccatataatccaaaaatttcactactgagtatatatcctagggaaatgaaaccagtatgttgaagagatatctgtactcccatgtttattgcagcactgttaacaacagtcaaaatgtggactcaacttgtgtccaacaatgaatgaatgaataaaaayatgtggcatatacaacagaataccattcagccttaaaaaagagtaaaatcctgtcatttgccacaacttagataaatctgaagatcattatgttaagtaaaataagccagacacagaaagataatactgcatgttctca

SEQ ID NO: 321393 - DNA, 500 bp, Homo sapiens
aattcaatgtttagttttttgaggaaatgccaaactgttttccatgacaactagatcattttgctttccaaccagcaatgtctgagggttgaaaattcttcacatccttaacaatacttaatccttttccctctttttaaaaaaattatagccgttatggaaaacagtacagagtttcctcaaataattaaaaatagaacttccatataatccaaaaatttcactactgagtatatatcctagggaaatgaaaccagtatgttgaagagatatctgtactcccatgtttattgcagcactgttaacaacagtcaaaatgtggactcaacttgtgtccaacaatgaatgaatgaataaaaatatgtggcatatacaacagaataccattcagccttaaaaaagagtaaaatcctgtcatttgcmacaacttagataaatctgaagatcattatgttaagtaaaataagccagacacagaaagataatactgcatgttctca

SEQ ID NO: 321394 - DNA, 612 bp, Homo sapiens
tatttatttttgttttacttaaattgcttaaaacataatacaaactacgtatttatgtgttgaatacctatatgagtaaatggataaacatcataatgtactctactattaatcaaagcaagcataagataataaaagagattcttattaaataaaaacggaatgaactacctattrtcatggcagcattattaaactctttaggagactggtataaaatgaccagctggatttttcttcaccctagaattattaccaaggcccaaagctggagaccagaggaagtattacaattagtaggttctgagaattacttgagattagggccagccaccccttcaaaaagaattattgagagggtccagctcagagaataaattcaaccatgtatgatattcaaaatagttactaaccagtttggcacaacactgactaattcaaatggatgccagctgtaaaaaaccaatgtggctctaaaagctaatactattttcacttttaccctctgataatgtcagaagaccaggagaacagctctgtaaaattcagttccttctcatcagggaggttgctttcacaaatggaagactggcaatgatatgcccattgact

SEQ ID NO: 321395 - DNA, 612 bp, Homo sapiens
tatttatttttgttttacttaaattgcttaaaacataatacaaactacgtatttatgtgttgaatacctatatgagtaaatggataaacatcataatgtactctactattaatcaaagcaagcataagataataaaagagattcttattaaataaaaacggaatgaactacctattgtcatggcagcattattaaactctttaggagactggtataaaatgaccagctggatttttcttcaccctagaattattaccaaggcccaaagctggagaccagaggaagtattacaattagtaggttctgagaattacttgagattagggccagccaccccttcaaaaagaattattgagagggtccagctcagagaataaattcaaccatgtatgatattcaaaatarttactaaccagtttggcacaacactgactaattcaaatggatgccagctgtaaaaaaccaatgtggctctaaaagctaatactattttcacttttaccctctgataatgtcagaagaccaggagaacagctctgtaaaattcagttccttctcatcagggaggttgctttcacaaatggaagactggcaatgatatgcccattgact

SEQ ID NO: 321396 - DNA, 381 bp, Homo sapiens
gggcttccctttgaaccttttttcaaggttcttaacttccttacattgggttagaacatgctcctttagctcagaggagtttgttattgcccaccttctgaagcctacttctgtcaattcgtcaaactcattctctgtccagttttgttccctttctggtgaggagttgtggtcctttggaggagaagaggcaatctggtttttggaattttcagcctttttgtgctggtttctcgccatctttgtggaagtatctacttttggtctttgatattggtgaccttcggatggggtctttgagtggatgtgctattcytttctgtttgttagttttccttctgacagccccctctgctgaaggtctgctggaatgtgctgtag

SEQ ID NO: 321397 - DNA, 632 bp, Homo sapiens
atactagctatatagcttcctttgaaagaataagaaaatagtcactcaaataatattctgtcgcacttatttattctctactagaaacctaatgagacagatagaacctaccatgaagtctacaaagcccatttatgcatagaatgtgtctaggcatagaattatgcatagaagktgtcaatcagctccatgtcctctcaaatgtaaaaaagtaagctatctcagacacacataagaaatgcctgttctcatttagggccacaggtcttcaggcttgtgtgtgtgtgtctgaggtagtcctccaatgtaagaaattgaggccaagacaaacaagtaaatatgcaaagaggaaaacaatacttagtaaaacagactacacaatatttctaaaatattgcatccatgaaacaaaagcaaagtgctttaataaatgaatattagagaaaaaagaacatttagaaatcataaacatgttggcagaaatgagaaaacaatagaatgattggaagataaattaagatgatatgctgggaagcagatcaaaattttaaaaatgaagaaaggtagtaaaaatatttttaaagctcacttcagtagatccaatatgcaaatcagagtactataaagaaatt

SEQ ID NO: 321398 - DNA, 439 bp, Homo sapiens
ttattccctagaattggtcagaacgaaattacccagacttcaacctgatggtcatgtgtctgaatatttacatttgaatgagctgcacaaacttatgtaaactttcatgtaatccctctatgtttagttctgtgccctttgtttagttccaacccattgatttttctgccatcaatgagttcagagtttctctggtaaaataataataataataataataataataataataataataatmatcatctagaattgcattttgctaaacttataacctgaaagtaggttaggtagataaaatgaggcggaggcagctgcttggacaaatagagtaaaggaggggaagtgggttccaatcactctgcatgcaaacttttaaattccaactgttcacctaatttctgtcactccctaggggttctgcaaggtgtttatgctc

SEQ ID NO: 321399 - DNA, 649 bp, Homo sapiens
ttttgagtgcaagactagcatacttgcactatatgtaatacctataattagacatgcacagtgagaaagagaacagattccttcagatttgtgacattggtagagggcttcaaaagaaataaacaataatccagcataaagcttatttcaaaagtgaaaaaacagaattgaaagaaatctgtactaaatttctgttgctaatactttatcctccataaggacatgaagagaaatcttaagcccttagaaatctgtatgaaatcagatatgtttttattctctttctctttttctttctctctctccctctttttttatttcatttttggtgatcatatatawacacacagagggagaaagaatgtatatatgtgtgtatatatacacacacaaattatatatatcatataggtaaaaatatttatatgtaaagttttaacttaattttaacatatgcagaacaattacagaattgtataaaaaaatgctgctcatgttcaagtccactgaaaattgaggtgccttgggcatggagtgcactttacagaaatactaatgctaatgggattgattcaatgaaagccatgcactgtgaagttatacccatactttttttaatttcatttgctaaaaatgttttataaaaagc

SEQ ID NO: 321400 - DNA, 651 bp, Homo sapiens
tttataaattcttgtcattcaaatattttaattcatggatttgctactttaattcaaatgtttattcaccatctacaatgtacctgccagacattattttaggtacaagtggtataaggtctctgctgtattcgtgtttatattattagttggagggagacaactaaagaacaagtaagcaaacaaattagaataaattcaaatggtgataattagtaccaagaaaataaaacaggataatgtggtggtctatgaccagttggtggtaggaatgaaatgtaccagtgtgaaacatttggtggggtgaatagaaaaaccttctttgaataaaagatgttatatgagctgagagcaagatgggaaagagaaagcagagggtgttagggggaaagcatttcagtcccgatgtgggagagaggttgatatttgagcaytagaaagaaggcctgtgtaacaggaagtgaatgagcaaagggagagaaacacaagaggagactgaagagataagcacaggctatgacagaagggtcttttaggtcatttgttagaattacaccccaatttttatggaatgactttgcagagtttttagaaaatttaattcccacaataatctgttatgtttgtttaacaaattagaaaacttggaga

SEQ ID NO: 321401 - DNA, 651 bp, Homo sapiens
tttataaattcttgtcattcaaatattttaattcatggatttgctactttaattcaaatgtttattcaccatctacaatgtacctgccagacattattttaggtacaagtggtataaggtctctgctgtattcgtgtttatattattagttggagggagacaactaaagaacaagtaagcaaacaaattagaataaattcaaatggtgataattagtaccaagaaaataaaacaggataatgtggtggtctatgaccagttggtggtaggaatgaaatgtaccagtgtgaaacatttggtggggtgaatagaaaaaccttctttgaataaaagatgttatatgagctgagagcaagatgggaaagagaaagcagagggtgttagggggaaagcatttcagtcccgatgtgggagagaggttgatatttgagcactagaaagaaggcctgtgtaacaggaagtgaatgagcaaagggagagaaacacaagaggagactgaagagataagcacaggctaygacagaagggtcttttaggtcatttgttagaattacaccccaatttttatggaatgactttgcagagtttttagaaaatttaattcccacaataatctgttatgtttgtttaacaaattagaaaacttggaga

SEQ ID NO: 321402 - DNA, 565 bp, Homo sapiens
cactccccccgctcggggagcctcctcagccagaggaggtgacaacaaagcagtggcggcggtggctccccaacatccgcagtttctattctttatagcagtgtaagaatggactaatacagtactgttaatatttccggatcctctcatttrtaaggccctgaatactctgcaactaggatttgaaactacagttctgggccccttagaacctctcgaggtagagtctctaccaggtattctaaattatctcattcatatttcttcttacttcttgcctcaaagctgcctctttgcttagattcttcaaatcagttcttcagttggactttttgtatgagttttcatattgattttagatactctttttcaggtaactctgggatctataattcagtatctcctgcctcagctcaaaacactaacttcaaggtatttatcaggaggacagttataattaggaaaattaaatgacaaattgaataaaagactgattactttcttgttatgttcttaaaattatttaacacatctgcagagtcacagtcttgactatcatgatcag

SEQ ID NO: 321403 - DNA, 565 bp, Homo sapiens
cactccccccgctcggggagcctcctcagccagaggaggtgacaacaaagcagtggcggcggtggctccccaacatccgcagtttctattctttatagcagtgtaagaatggactaatacagtactgttaatatttccggatcctctcatttataaggccctgaatactctgcaactaggatttgaaactacagttctgggccccttagaacctctcgaggtagagtctctaccaggtattctaaattatctcattcatatttcttcttacttcttgcctcaaagctgcctctttgcttagattcttcaaatcagttcttcagttggactttttgtatgagttttcrtattgattttagatactctttttcaggtaactctgggatctataattcagtatctcctgcctcagctcaaaacactaacttcaaggtatttatcaggaggacagttataattaggaaaattaaatgacaaattgaataaaagactgattactttcttgttatgttcttaaaattatttaacacatctgcagagtcacagtcttgactatcatgatcag

SEQ ID NO: 321404 - DNA, 565 bp, Homo sapiens
cactccccccgctcggggagcctcctcagccagaggaggtgacaacaaagcagtggcggcggtggctccccaacatccgcagtttctattctttatagcagtgtaagaatggactaatacagtactgttaatatttccggatcctctcatttataaggccctgaatactctgcaactaggatttgaaactacagttctgggccccttagaacctctcgaggtagagtctctaccaggtattctaaattatctcattcatatttcttcttacttcttgcctcaaagctgcctctttgcttagattcttcaaatcagttcttcagttggactttttgtatgagttttcatattgattttagatactctttttcaggtaactctgggatctataattcagtatctcctgcctcagctcaaaacactaacttcaaggtatttatcaggaggacagttayaattaggaaaattaaatgacaaattgaataaaagactgattactttcttgttatgttcttaaaattatttaacacatctgcagagtcacagtcttgactatcatgatcag

SEQ ID NO: 321405 - DNA, 597 bp, Homo sapiens
ttatttatttatatgtacttgtacctttcagaatacagtgtcctttttttacagtgtcagattttttagtcaggaaagccttgaaaagtcatcagcatttccctttcccacacatttgtagccatagtcaaaaactctctagtagattttccatgtgtgcaaagaaagatatttcttgratgttaggagagaatgcccccagttttttccaaactgattattcctgggtatttaaatatgtttcttatcagtgtttcgtaacgtataatgattgtgaaagcaaagagcatgatgatatttgggggaaagaatcgcctacaaatatctgaagtgtttatttaaccacagactgatactctaataaaataaagaagtaatgctatttcataaaggcatattcatatggcattcttttattaaaacatacatctcatctcgtttaatccttacatcaatctcaatgagtactattatgcccacattctcttccattgccaagtcctggattctttctcaaatcttattctaaactttaataacttggaaatggtctgtgtttgggttgaaacagaggtaaaattattgagttcttaaacg

SEQ ID NO: 321406 - DNA, 276 bp, Homo sapiens
ggaacaagctgaaaatcatacgccacctgatcagatgctatgagaaatacacagcatcacttctgggatattcttgctagaggtaaataatctagatctcattgtaagggaacatcagaaaacctaaactgagggatattctacaaagtagcctttaatcttcaaaaaagtcaaggccatgaaaatgttccagatagaaataaggagacatrcatcgtgcaattcagaactgcatccttttgctataaaggatgttattgtgacaattcctgaagt

SEQ ID NO: 321407 - DNA, 276 bp, Homo sapiens
ggaacaagctgaaaatcatacgccacctgatcagatgctatgagaaatacacagcatcacttctgggatattcttgctagaggtaaataatctagatctcattgtaagggaacatcagaaaacctaaactgagggatattctacaaagtagcctttaatcttcaaaaaagtcaaggccatgaaaatgttccagatagaaataaggagacatgcatcgtgcaattcwgaactgcatccttttgctataaaggatgttattgtgacaattcctgaagt

SEQ ID NO: 321408 - DNA, 276 bp, Homo sapiens
ggaacaagctgaaaatcatacgccacctgatcagatgctatgagaaatacacagcatcacttctgggatattcttgctagaggtaaataatctagatctcattgtaagggaacatcagaaaacctaaactgagggatattctacaaagtagcctttaatcttcaaaaaagtcaaggccatgaaaatgttccagatagaaataaggagacatgcatcgtgcaattcagaactgcatccttttgctataaaggaygttattgtgacaattcctgaagt

SEQ ID NO: 321409 - DNA, 418 bp, Homo sapiens
aaattttaatataatgtatctcttgtggggcttcatgtcatatgaaaggaaaagacagaaaatatgggaaactagaaggagacacatcagttgtgatcatacagcaggctcaagagttgaagcatcttggaggaggaagagacagagagcgtcagagaggagtcatggaaatgaaggaggtagaaagcaaggcagttyggtaccatcaagctgccacaacatgcagttccttctgcttattaggacatataccccttttaatacaatttttctcttttaaaagttgctttccaccattacattgtagactcaatgatgatatggactggttttatttcaagagtttaacagagtctttgacatatagtaaattcttaaaatttttgactggacatttggataggtagatagatggaag

SEQ ID NO: 321410 - DNA, 504 bp, Homo sapiens
atggaaggagttttacccctgggaaggagaagatggaaggaggcatatcattcagtcagaaggtggagttcagtatgatagagatggaagtggaagtrtatcatcaactgcgagccagaatcaatatttaaattttgggttggagagtagcttgaaaaaaaaagtaaaacagttaagggtacttacagatattactcacaggggacttaaaacagagcatgtattgcttacagggcacttgtaaaacaaatagtgcagggtatttatcaaaaatggatattgctacctcatcagatttgatgtgtctgtctcaggaggatttttaggaggactggctcttttgtagagtcaggaatgaaggagatactcccatttccagaaccctcttttagactcatccgaggggtgcagacactaaattccagagtatgtgttctatcccatacactgtcaccacctagaacttgaaagtcctgagactgaatatagtttaagcaagagttc

SEQ ID NO: 321411 - DNA, 504 bp, Homo sapiens
atggaaggagttttacccctgggaaggagaagatggaaggaggcatatcattcagtcagaaggtggagttcagtatgatagagatggaagtggaagtgtatcatcaactgcgagccagaatcaatatttaaattttgggttggagagtagcttgaaaaaaaaagtaaaacagttaagggtacttacagatattactcacaggggacttaaaacagagcatgtattgcttacagggcacttgtaaaacaaatagtgcagggtatttatcaaaaatggatattgctacctcatcagatttgatgtgtctgtctcaggaggatttttaggaggactggctcttttgtagagtcaggaatgarggagatactcccatttccagaaccctcttttagactcatccgaggggtgcagacactaaattccagagtatgtgttctatcccatacactgtcaccacctagaacttgaaagtcctgagactgaatatagtttaagcaagagttc

SEQ ID NO: 321412 - DNA, 552 bp, Homo sapiens
cttgttacaccttcttccacctgccttttctagccacacagctgattggatggtgcccctaacaaccaccattctactctctgtctttcttatgtaagtgaaatcatacagtatttgtccttttgtgactagcttatttatttatctatttatttattttgagacagagtctcgctctgttgccaggctagagtgcagtggcacaatctcggctcactgcaaactccacctcccaggttcaagtgattctcctgcctcagcttctcaagtagctgggactacagacgcttgccaccacgtctggctaattttttgtatttttagtagagacggagtttcaccatgttgrccaggatggtcttgatctcttgacctcgtgatccacctgcctcagcctcccaaagtgctggaattaaggcgtgaaccaccccacccggccgtgactagctgattttacttagcataatgtcctccacatttatccatgttgtggtttgagtcagtagttctttaatttttaaggctgaaaaataatccattgtgtgagtatgt

SEQ ID NO: 321413 - DNA, 584 bp, Homo sapiens
ataaacaatctcccaccaaaggaaagcccaggacctgatggcttcacaggtgaatcccattaagtgctcaagaagaaataccaatccttctcaagctcttccaaaaaattataaaacagggactacctcagagcttattttatgaggccagtattaccctgacaccaaagccaggcaagaacaccccaagaaaactacaggccaatatccctgatgaacacaaatgcaaagatctttaacaaaatactagcaaactgcattcaacagtaaatttaaacgatcactcaccataatcaagtgggacttatcccagggatgcaaggatgggtgaacatatataaatcaataaatatgggccaggcactgtggctcaygcttgtaatcccagcactttgggaggccgaggcagatggatatcttgagcccaggagtttctagaccagcctagggaaacatgctaaaccctcttctctacaaaaaatcccaaaagctaacatggtggcatgtgccctgtgtcctaaactacttgagaggctgaggtgagaggacagcttgagctcgatgcgggtggaggttgcagtgag

SEQ ID NO: 321414 - DNA, 611 bp, Homo sapiens
tcacttctttctctccattccctgaacctagtcatttatcaaattgcatcacatttctcttgcattgtttttcctatttacccctttctttgaattccaactcttaacatcataactgagacccttgcttaacttactgtgttgagaggttgctcaaggtgaccataaattcctctgagatgtgtaatttccaaatgaggttaggaagtccctgaatggtttgctattcataagtactgttccatcctaactgtaaattcagacccacttcctagtgagagtcagtatcatgaakaaaggacagaagaaaaatgctgaatagggtcagggactcagaaggttgaaaggggttaggaaaataagattgaataacaccctcaggtagagaaaaagggaaaaagcaggaagttctcaggtacaaggacctcagaaatatcactgtgagaacttttacagttctggatcctctttctggactctcgtcattgcccttttcattctccttaaaaaatacttaaatgaagaagaagggcctacatgcttagttgtagggatagaagagaaaagggaaaaagcaaattactgaacagtgcttaaaaggatatcatttt

SEQ ID NO: 321415 - DNA, 577 bp, Homo sapiens
aacacaaagtagtctgtgaatgtaacaaaattaagaaacagagagagtatagtctgcaccaagtttagaagatgtataatcactcattatacatgaaaacaacagaatgaaacttagttaaatgtactttctaagtagacaccagacactaccttataatgaaagaagtaaaaaggaaaaaaatattacaaatacaaaagacattctttgcctcttaaactgagctaagatagagttccaaatatttgctttgtttaatcttagccacttttatagaatgctccattggccctatgtttagcagttagtagttaggactggttccatcataaaacttctttaccasccactctccaggggcaataatctctcattgggatatttcaagccaactgggaagagcagggaacatggacctggacctcccactcccacctcccaccattcatctattacctactgtgtgacctcagtcaagtcacccaacttttcatttccttagggttttcattgttaaaatgaggcatttgaacttagtggtctataatgcctcttgtagctaagtacagagagacta

SEQ ID NO: 321416 - DNA, 542 bp, Homo sapiens
tgagttttaaagccaaaattaattgagaaagcaagagaacatttagtggctttcctttttttccccctttcatttttttccttacatttcattattctgtatggcatatgcccrctttacctatttcagcctgaaggataaatcttagatttacttaattgctttgttcgcctacatcgttgccattctctatgccctgtaacttcagtccacctgacttctagaatagagagccagggtaaacacaatattcctggcatttcaccttccaatgccccacaattcatatgaaatgtcatcttctttctgtaggagacagcatggaagaggaagactctgtcttaaaaaaaaaaaaaaaaaaggaaagaaagaaagaaaaaaacaaaaagaaaagaatcttaacctggaagagaaattaaaacaccaaataattcatatccgatttttgtagattagcaaacttacctgaaaaagctaagaaacttctctaagttcacaaaatcagtggcagagatgagactagattttgtcttcagattttg

SEQ ID NO: 321417 - DNA, 542 bp, Homo sapiens
tgagttttaaagccaaaattaattgagaaagcaagagaacatttagtggctttcctttttttccccctttcatttttttccttacatttcattattctgtatggcatatgcccgctttacctatttcagcctgaaggataaatcttagatttacttaattgctttgttcscctacatcgttgccattctctatgccctgtaacttcagtccacctgacttctagaatagagagccagggtaaacacaatattcctggcatttcaccttccaatgccccacaattcatatgaaatgtcatcttctttctgtaggagacagcatggaagaggaagactctgtcttaaaaaaaaaaaaaaaaaaggaaagaaagaaagaaaaaaacaaaaagaaaagaatcttaacctggaagagaaattaaaacaccaaataattcatatccgatttttgtagattagcaaacttacctgaaaaagctaagaaacttctctaagttcacaaaatcagtggcagagatgagactagattttgtcttcagattttg

SEQ ID NO: 321418 - DNA, 623 bp, Homo sapiens
cagaggactgacaaatcaatggaacagtagtgagcccagaaatagactcatactcatacagccatttgattcttaacaaagacactgaggcaatctgtggtggccatgaaratgtaccattcatatctcctgctgagggaaacatagttgactgatggtcccagctgccagccatctgagtctactaccacatttatgctatgaccaagcttaccttatgctactcacagccaatgagcacagcagggtcagtaatactggcccattcctttaacaggcaactttggcttgaggattccccatatgcctggcccaaactttcttataatagcgctgcagtctacaacactttccaaccaatcctcctttttccctcctttccaattggaaggtttttacaatgctttctctggtcccctccctttttttcgtcataggcattccctccaataattctcttacacatctaatccttgtcttggcatatgcatctccaagggcctacactaataatacaggtggtggcagaagtagtctaaaaacatgtgttagaatattggactggcttctctactatctggtgggcaaagagaatgtcatcctgagtggtatgtggggcatgg

SEQ ID NO: 321419 - DNA, 466 bp, Homo sapiens
aaccccgtctctactaaagacacaaaattagccgggcgttgtggtgcatgcctgtaatcccagatactccggaggctgaggcagtggaattgcttgaagctgggaaacagaggttgtggygagctgagatcataccattgcactccagcctggacaacaagagcaaaactctctctcaaaaaaaagttctatgtaggccagatgtggtggctcatccctgtaataccagtaattttggaggccaaggcaggaggatcctttgagcccaggattttgagaccagcctgggaaacatagtgaaaccccatttctacaaaaagaatacaaaacctagctggtcttggtggttcacacctgtggtcccagctactcgggaggctgaagtaggaggattgcttgagcctagcaggtcaaggctgcagttagaggaagttacaccactgcactccagcctgggagatagagc

SEQ ID NO: 321420 - DNA, 427 bp, Homo sapiens
gacagttaattcttccttacaaaaaactcacaggaacatttataaaatgcagaagtgtgaacacacagctattgaccttggaaacagtgaaagagggtcagctgtagaactaagaaataagcaaattatttcaatcaagaatacatgagtggtcaggcacaatggctcacgcttgtaatcctagcattttgggaggtcgaggtgggcagatcacctgaagtcaggagttcaagaccagcctgccaacatgatgaaaccctgtctctactaaaaatgcaaaaaatgagccgggagtggtggagggcacctgtaatcccaactactcagtaggatgaggcaggagaaatcacttgaacccaggaggaagacattggmgtgacaccagatcgcaccattgcactccagcctcagcaacaaaagcaaaact

SEQ ID NO: 321421 - DNA, 584 bp, Homo sapiens
agtaacaacacatcattgtctctcaaaatggtgccctcatgaagttgttcatgaaatttaacaatgttgccatctctccaaaacattttgatacctttcttttggagatgtcccctgaatttacacattgcaaaagatgtcagagaaggaaagtcatgtagaattttagagtggaaaggacatttgagatcaccttattgtgttatagtgatgtagccccttccaccraataggttagctctcagttgatcactttctgattaacaatacttgcctaagtttcactctgggttaaaatgaatttattagtcaaggatgaaagacatgtttccatcaagtatagtgaaaataataaaccaaatattataaaagctattttacaaataggaaataaaaaatgttctgagtaacaaaaatggtcatttttagcagtagacagtaaactgtttggctatataaattctggtgaattttctttaaaaacatcatgctactttatgaccaaccaaatttttgattaataacttaatcaaaataagtgacaaaataattaagtccgtcttaattcatgtttctctgagttt

SEQ ID NO: 321422 - DNA, 504 bp, Homo sapiens
ttaagggcagatttatctgcattggacatcaggcaaaattaagggtaggtttcaacactttttatgaatttagacaataccaggtagaacataccacacatatataactgaataaaataccacccactgtcaaggccaaaattttcactaaaaaataacaccacaaagacaaatagccatttggggcttctgtattggaaacaactttaacawgttttgaccatttaaaggaaatgtgcgatacgaccaaggaatccatttttattatgttgcaatcaacaatgtgggatgagaaacggggaatgaaaatttggaaatgttaggtatacgggtcacaaattaaaatatgacatcttaataaactatgttaaaaccaatcaggaaacccagcaatgtatttgcagcctgtaatgctaacatcaaaccagcctaggaaatttccttggggattaatgaccagagggaattaatggcccttggcttcacctcaagccatccactttc

SEQ ID NO: 321423 - DNA, 549 bp, Homo sapiens
aagaccaatcgcttctgcctcagcattttggaactctgttttctaaacaacttctccaatcaacttctaaagatgcttcatttgcctaagaataggcttctaccaggcaatggagaatggatcaatcagaatcatagtgaaagtgactgatcagaataaaagtaattagaaaattatcccaataagacaatactttttaagtgtaatgtgtggaaagggaacaaattcactaggagtagcttatgctaggaacagtatacatctgattatactccttgtagttccgatgctggctgcctgccaaccaaaggaacccctyctaaattctgataattagtaaccatgttttacccaataagtagtgtcaagagttcatcagtttgcaaactttttcactcttctatttttgattttcttctctggactcagttctgaggaacagaactattccattctgtcacagccttgaacgctaattgtctgagcatggtgggtgtaagtgtatatgtgagcatgtgatcaaagagtattgacagcggatttcaacat

SEQ ID NO: 321424 - DNA, 546 bp, Homo sapiens
tgccctattccaaaatcaatgtcattttcttttacagtggccctctctgttatttcgggtgacaccttaaactgctaatttaggcctagagctgaggacaaagagatgttatgtaacccacgaagggagctgaagggagctgacaacagtaagggccagaccactccctcaggatttattattaagagacctgtgggctaattttgatctgtctatccactacccaatacctcagcaccatcccaggctaaatagacagaggaggcatcaaggggtcacctgggtcatcaagaatattaagatccccacaagttcaaactggggraggaaattccaagagaatcatcctcctcaggtgtccaagggtgagaatatagtcataggttcttagtttctgtttctggttgggtcagtaaatctccttcctcgtccctcttttctgcttatctactagagacagaaactaaagaccatggcttcagaagctaaaagcctaaaacagaataaaatagagcaacaacaaaataaggcaggttggacaagctc

SEQ ID NO: 321425 - DNA, 569 bp, Homo sapiens
agaatatagtcataggttcttagtttctgtttctggttgggtcagtaaatctccttcctcgtccctcttttctgcttatctactagagacagaaactaaagaccatggcttcagaagctaaaagcctaaaacagaataaaatagagcaacaacaaaataaggcaggttggacaagctcgctagagattgaggcacctggaaggctggcgtctcagtccctaagtcagacacctgcttggtcagtggacttgttaatctgctctgagcctacctgagcargagaaaagaggactgaagagaagtagcagtgcagagatacaaatagctaaggtttagaaagggtatagaaatttccttttgggttaagagacgcttggaaggagacaggtttccattgtcttgttagtgtccaggccatgaaagtgtccctaagattgcggggtgaattactagtggcacacacatccacaaaccattgcctggagccagactgtcaatgaaagaggtgaaagttttgatccagatatgagatgggaattttagactggtctagactggactttgaatat

SEQ ID NO: 321426 - DNA, 369 bp, Homo sapiens
cacctcttttatccctcagtgacataagcattttcacatctctgatttttttatggatggtgcctgattttctggttttaaactyattgatggcagttttttgaaggtaacgtaaaatagctgcacaattgaatgccatcttaactagtccacactcttctggatctcttccgtggtttctattgagtttactcttagcaacggctaaaatgggttggatcaatagaatttcccttagaaactaatctacttcacacagcatctcttagatgacaaaataactgcttaaaaaatagaaaatcacatctcttaaccaaacatcccaaataactagttatgttggctgattaattactttctcaagttaag

SEQ ID NO: 321427 - DNA, 369 bp, Homo sapiens
cacctcttttatccctcagtgacataagcattttcacatctctgatttttttatggatggtgcctgattttctggttttaaacttattgatggcagttttttgaaggtaacgtaaaatagctgcacaattgaatgccatcttaactagtccacactcttctggatctcttccgtggtttctattgagtttactcttagcaacggctaaaatgggttggatcaatagaayttcccttagaaactaatctacttcacacagcatctcttagatgacaaaataactgcttaaaaaatagaaaatcacatctcttaaccaaacatcccaaataactagttatgttggctgattaattactttctcaagttaag

SEQ ID NO: 321428 - DNA, 560 bp, Homo sapiens
ctcattttttttgttactttattcttccattacagcctacttttttgttaaggagatattttctattatattattttaattctcttgtttattttactaaaatttaaaattatattttcttagtggtggccctggggattatagtaatcatcttcatttataataagatagtttcattttatactaacttaatttcaatagtatagtgtatatagctttatactctccttccttctttttgctgttattgtcatacaaattacatctttatatttttgcaccaatcaatgcagatttaagtattaccttatccagtttttaaataaaatcagttagaaaaattatgcamaaaaaatacattaatattatcttttatatttgcctgtgcagtttatttttgccagtgccctttatatcctcatgttgattctagttgctatctgtactatctaattttttgtttgtttgtttgtttgtttgtttttttgcctaaaggattccctttagtattttttcaagggcaagtatagcaagtatgttagtaatgagttctttgtttt

SEQ ID NO: 321429 - DNA, 620 bp, Homo sapiens
caagccaggagaggatgggatgatatattcaaagtgttgaaaaataaaaaagaactgtcagtcaagataccatactcagcaagattatccttcagaaatgaagagaaataaagtcttttccagacaagcaaaagctgagagaattcatcaccactagaccagccttacaagaaatgcttaagaaaatgcttcaactggaagcaaaagaatactaattatgaccattaaatcatatgaaagtaaaattcactagtaaaggtgagttttacataatcaaattcagaatactgactggacgcagtggctcatgcctgtaattccagcactttggaaggctgaggcgtgtggatcatgagtcttgagtttcagaccagcctggtcaacatagtgaaaccctgtctctactaaaaatacaaaaaattacctgggcgtggtcgtgggtgcctgtaatcccagctactcaggaggctgaggcaggagaatcccttgaacctgggaggtggaggttgtagtgaaccaagactgcaccgctgcactctagcctyggagacagtgcgagactccatctcaaaaaaaaaaaaaaaaaattagaatattttattactgtaatggtggtatat

SEQ ID NO: 321430 - DNA, 492 bp, Homo sapiens
gtcttctcctcaactgtcctgcaagcttctatgtagcctttgcactccaaccagaaggatcagtgatggcattcaaaggttgagtagtcccatggagggccctggcagccactgaaaaggtgggactatttttcaagtgtcctgcagacatcaatgaagaacctagaacagaaaacatgaatgaacaattcatgagcacatttgagcaacacttaagacttccacgtggctttcatttttctctgaggagatgactgsgtttataacttgattaatggggaaatgggaggaaggaatacagtttcccagttactgaaactcatgcatggattttagtgtgaacaaatttgaaaatttcaggttcacctgaaagttatcacacaatgctttggagagatttaactgtttatgtgtgtatctttgctttctaactagattacaataactctgcaggtaaggaccatgtctttccctcacaaatatttaatgatt

SEQ ID NO: 321431 - DNA, 480 bp, Homo sapiens
tctcccaatccccgcagaacatcttggccttgctgcccttcatttgccttttgaaacagtctcctttcttttctcctgtgaaactaarcatcttggttctgtttgagcattctctctcctttctcaagggctcatcttccttcccttgcccctgaaaagaggaaattccccagagctctatccttaggtttatgttttctctctgcatactcgtgcactaaacttggtgcattcacatcctcaagtgagagcactaatgtgagattttaactagtgggctgatgttaatctctgcccattgactcccctcccagtcaccaaacccttaaacccaaacagccttcctaaagctcagccctcttccccttcatgtctttacatccagccaggtagcaaattctgtcattttaactctgaaatgccatttaaatctcttgctccttatcctaactcttattaagtcaaaggaacctcataagt

SEQ ID NO: 321432 - DNA, 506 bp, Homo sapiens
gggttttggtaggtaattaggtcatgacagcagagctcattcattacaaaagaggccccagagagttcactgggcccctccaccatgtgagagcacagagaaaagacagttatcyattaactaggaagtggagtcctcaccagtcatggaattttctggagtcttgattttggactttccaggctccagaattgcaagaaataaatttttgttgtttataaaccacatggtttatgttattttgttatagcagacaatggactaagatgaaaacactaaattattattctatgttcggggattattgccaaacctaatgctatcattcatatataacatttctaacactagagtggtgagacttacttttggcttctaatagtatctctgtaaaaaccaagaaaaaacaacaacaacaacactgatttcttctctttcactttttccagacccaagatattaccttattctgcaaacaaggactttaagcacaaagaaggaaatca

SEQ ID NO: 321433 - DNA, 550 bp, Homo sapiens
gccgctaagccaagaagatctgggaaggagtcagtcagagagccttgggccagagttccagaggctctgggagtggctgccaggtgagttgaagagtccgatttccagtggggtcctgcacggatgggacacggctcaggaggaatcctgggctgcgggcattccttggcctggtggccagatttctggcacttgtagcaagctcctggggraggtggttctggaggaatgcctggccgctgcggttcaggcgtttggaagttcttgtgtgctggagatgtggctggggtttgtctcacagtggaggcaaggaattgcaacgtttttctattattgtacaccttgaaggcaaggttaattaaatcctgttgtggggtttgagggccggaatttaatttttggagttttatttaatgtcgggagcagattgggtaagaaaatgtattttgagaataagacggccttttgacattttagggtctagggctgtaaagtgtctcagggttgctgccaaacaagtcatgaactgggctggatttttatatttgac

SEQ ID NO: 321434 - DNA, 550 bp, Homo sapiens
gccgctaagccaagaagatctgggaaggagtcagtcagagagccttgggccagagttccagaggctctgggagtggctgccaggtgagttgaagagtccgatttccagtggggtcctgcacggatgggacacggctcaggaggaatcctgggctgcgggcattccttggcctggtggccagatttctggcacttgtagcaagctcctggggaaggwggttctggaggaatgcctggccgctgcggttcaggcgtttggaagttcttgtgtgctggagatgtggctggggtttgtctcacagtggaggcaaggaattgcaacgtttttctattattgtacaccttgaaggcaaggttaattaaatcctgttgtggggtttgagggccggaatttaatttttggagttttatttaatgtcgggagcagattgggtaagaaaatgtattttgagaataagacggccttttgacattttagggtctagggctgtaaagtgtctcagggttgctgccaaacaagtcatgaactgggctggatttttatatttgac

SEQ ID NO: 321435 - DNA, 647 bp, Homo sapiens
tttacacttgaactgtattatgattttaatgcaggctcaggtgaggygaggtcagaagatacaattaaatggatctggtaccagctggagattaggctctctttaaccatgcttgggtggtttatccatcaacaactcatgtactgctccataaaaattgatatctgtttaaaaataggtattaaaatacagtgtacttttaaaattagagactaaaatattatgtagttgccagcaggtagtttatttaatattcatgtacaatatcaaacagaaagattcctgttcttggaacaaaaatctattagaataaatctgtcctagttgcaggagtttctgtgcttggtcaagtccttggaaacaaatgcagaaacagacttttatatcattacaaatccttgacatggtggaatggtgatatataactgccacccttgttaaatagctctatctgttcctcaaagatttattttaatgttgttctttcatgaaaggctgtttaaaagcaaaaacaggaaaaaagggaaacagaaatgcaaagtaaacaggtttattaaggataataaaaaatcttggtgattttatatattctactgtgaattatgaatggtggacttcagtcttgaggttgaatttggtttctaata

SEQ ID NO: 321436 - DNA, 414 bp, Homo sapiens
aatacaatttattttcaagacctctaaacatttcaatcttctacagtttgatccaaaacttttacatagggttttacatcaacttgcattcttattattaaatacttttttagtaatagtctctctctctctcttgctctgtgtgtgttartgtgtgtgtgtgtgtgtgtgtgtgtgtgtgtgtgtgtgtgtagagtgtctttctttttgacatccaccaatattctttcaggtggcaagttgcctcttaccagattacctctgaaaagaaacagcttctgacagggaaatgagcagctgggtggcagctcacagcaactctgttattttgcactgatacagcattgtaatataaatggctgaaatgcaatctgaaaatagtcattcatctcaaacaaactccacaaagctggt

SEQ ID NO: 321437 - DNA, 621 bp, Homo sapiens
gtacattgtgctaacctagttaccttcatgtttacaggctgaacataaggcctgacatatacacctggaaaagcataatctgtttcctatttgtcattatgtgtcattctcaaacacaacatgcaaatacatagcattcctgggagctaatggaagtgagttcacgagggggtttcttgtattatttctatactttaagaaaagttaagactatcattgctttttgttgggagaagtctgtacaagaaatcactattctttattttatctcttgacaaccttaagaccttgatagcaaatcatactttttcaagttttattatggcaaaatcagctttgtttctttttccttcaaaattttaagacgataaaatgagtgtagtgctatttaggcagtgaagaaagaaacattatgttgagctgtaccctaaagacatttcttttgtattataatgctttctatccacagaygttagttgaaaattgatataatagtgtttcttgtaagtctaccagaaacaaaacaaaacaaaaaacatttaaaaagtagattagatataattgtatgtgacaaatgagcctggtagaactgtactaaaaacccatagggaataattatct

SEQ ID NO: 321438 - DNA, 628 bp, Homo sapiens
aataaaaaaaaaaaacttcttacacaaagcatttatgagagcagcagtctttaaaagctcactcattgaaacattcccactatttctttacttcatataacgctcaaatctcccacagcactaattycattttattctttccttctcatactttcatatctcaccttcgtcccttctttgcccttaaaaccctaagttactgtcttttgtatttccagacaaattcatcatcttcttttccagtgctcatctttattttctatttgcacatccgagttcatcaatatgcttaacagattaagagtagtcacattccttagaagttaactgtgttttacaaaacatcaattttgtttttcattgcaaatccaaatactttctatatagaaggtcctactagaggatgaaaatattgctgcagtttcctgttgtaatgaccccaccactgaatcaagacggctattccccatcactgtgttaccattccctactctgattattttcacctgcatagagtctacagcgagaaaattctcctctaagagacatacctcaatagaatatgaaatactctgttttaaaaatataactttcaagcacttttatttaagcttcaatcagtctatca

SEQ ID NO: 321439 - DNA, 589 bp, Homo sapiens
acacattattgataataaaatattaattttttagatgaaatatatgcatcctcaaattaaacatttcattttctactgcttttcaaatgtattatagtttatttttcaataatatttaaaataatgagaattgatattcttagtcagaaattttaaaggcaaaactgattactgcattaacttagaactgaatgatctgtacaaaaaaggataaaaagatcaaatgtaaaagtaggtcttaatatctaggtaaactcacactttaaaatgaactttataacacttccttagcattttgtagtgcatatgttttttgctcttttttttttttattttaatagaatgtgctataggagggcaggcgcaggggctcacacctgtaatcccagcactttgggagctttgggagacccaggcagacggatcccatgaaatcaggagttggagattagcctggccaacatggtgaaactctgtctctactaaaaatacaaaaattagccaggcgtgtcggctggcacctgtaattccagatactcgggaggctgaggcaggagaatcgctkgaacccaagaagtggaccgtaggg

SEQ ID NO: 321440 - DNA, 566 bp, Homo sapiens
attttattgggtattacattttaatttcttcctttttattttttgtgtttctgttgtaggtattttgatttaaggtttccaaaggcttaccaacatcattttataacctgttattttaaactggcaacaagtatgattgcaaaagcaaattaataaatgagcaaagagaaaactaataaaaactctttactttgtctgcatcccctaacttattagctttttgctgtttcttttcatgtcttattaaattgtctatgtcttgaaaagttgttgtagttattatttttgataggtttwtcttttagcctttcaagatatgagtaaacacaccacgattacagttttataatattctgtatttgtctgtaaacttactcttaccagttaattttgtaacttcagatgatttatttttttttaacttttaactatcagttctagggtacatgtgcacagcatgcaggtttgttatatatacatatacctgtaccgtattggtttgctgcacccattaactcgtcatttacattaggtatttctcctaatgctattccctcccccatccc

SEQ ID NO: 321441 - DNA, 599 bp, Homo sapiens
aagccagaacgatgttgggtctttcccaaggcctgtggtgactatttcctggctattgctgatgtttattcaaggcccaagcgctctttagccagtatgtggtgagttctgcctggcctgggtctctttcttcggggcagtgggttcccttctagctcaggatgggtctggaaatgccttcaagaactaaagcctggaatcagggattttaggagtcggcttggtgctttatttttctgtggctgaaatagtaaccgagttgcaagacaaagtcctttttacccttcactctcctttccacaagcagccgtctgtccttgtggccatcacagctggaatgtgctgggtcacacctgaagccagcattttactaggccttggccagggtctgtgccaactgcgacctggctaytgatgatgtttattcaaggtccaagggcacttgggtcagcaggtcatgaattctgccggagctgggtccttccattcgggacagtgggtttccttctatatatctagaaatgttgtctgggacacaagcatacgtatgtttactgcagcactatttacaatagcaaagtcacagaaccaaccctaac

SEQ ID NO: 321442 - DNA, 621 bp, Homo sapiens
ttgcctttcttttcacacttttgtgttcatatttgaataaatatcattcatcatcctaaattataacagtattacaaaatgattttttctaattatttttcccagatactaatttttatttaatgtaagccagtatcttttttaaaaaactattttatttttaagttccatggaacatgtgcaggtcgtgcatatttgttacataggtgagtgtgtgccatggggatttgctgcacctaacaacccatcacctacatattaagcccagcatgcattagctttcccttaatgttctcctccccaccatcctctcccaagagttcccagtgaatgtcgttcccctttaaactcagttaatacttgaaatgtacatcatttacatctttacttaacatcataaacaattctcttcttgacatgaaattcagtgccactcattcaataatccttactttattttttgattgygatgctatagttatatttaaaaattcttaatacttattaatatttaattatctttcaatcatatagctatattactgatgtaattcttagtaatttgagtgccaactacttttcatttactttatgctgcttcttaggttcataatagggcat

SEQ ID NO: 321443 - DNA, 630 bp, Homo sapiens
tactatgattctataggactgagccagagcttagaaattgatgattcataaatattgctatgtgatgataatgatcatcctgggttggaaaccactgaatcataggcctcaggtcagggaaacagctttaatttcagctccgaaacttaatagaagaatggttttccacaaacttctcaaatatctgactcccagcaataaatcttttctctgttttcaaactatgttgggatttctaccacgtcttcccatttctatcagtakccccagccatcatcatctctctcatctggcctaatgcaacctcctgactgatctctgattcacacttgcttcatctattatattttctccgtgtagaactgagagactcctttatggaaaagtaatataatgccacttctctccttaaaaatcttccagggacttcctttgacatgcagaatctaatccaaattcttcacaatagcctatatgaaagtataacttgctgttacaaatttcccttttccaattcctgttattcctttgatttctcctacttccttttcacttgtttatttcaactcagccatgctgggctccttaatgttccttagctacactagacatgctcaggcctcagagtcc

SEQ ID NO: 321444 - DNA, 630 bp, Homo sapiens
tactatgattctataggactgagccagagcttagaaattgatgattcataaatattgctatgtgatgataatgatcatcctgggttggaaaccactgaatcataggcctcaggtcagggaaacagctttaatttcagctccgaaacttaatagaagaatggttttccacaaacttctcaaatatctgactcccagcaataaatcttttctctgttttcaaactatgttgggatttctaccacgtcttcccatttctatcagtatccccagccatcatcatctctctcatctggcctaatgcaacctcctgactgatctctgattcacacttgcttcatctattatattttctccgtgtagaactgagagactcctttatggaaaagtaatataatgccacttctctccttaaaaatcttccagggrcttcctttgacatgcagaatctaatccaaattcttcacaatagcctatatgaaagtataacttgctgttacaaatttcccttttccaattcctgttattcctttgatttctcctacttccttttcacttgtttatttcaactcagccatgctgggctccttaatgttccttagctacactagacatgctcaggcctcagagtcc

SEQ ID NO: 321445 - DNA, 600 bp, Homo sapiens
ttcaagtaatctgggtgtgatagatgcttgactgctaaatttatgctaggattagcaccatttatctgctcttagtgtgttaaatactcaatgaaatatgtatttatgaaagtaattcagtgtttttcaaatttcatgacgcttttaataaagctgttaaattaacagctttatggggttataattgatatacaaagaactgcacatattcaatatgtacaatttgatgagtttgaacatacacaaacacccatcatatcatcaccrcaatcaaggtaatcaacatatccagcacattttaatagtaccataaagacttctccgccttttaagagtcctggtagtctcagtgaaacaaaatctcttgattttcaacattcctctaatttatcagttctttccaactgggatttaccaagcaatgtcattttgtgttgaattaccatgagtttttaaaagatgctaaaagaaataaagtatgttagaatttcattgccaatcaagattttgatatgcgatctgaatttttagaccagtggttctaaggttggtgagggagaggggaagttgtactgtgtgggagacagttggcaacgtctg

SEQ ID NO: 321446 - DNA, 600 bp, Homo sapiens
ttcaagtaatctgggtgtgatagatgcttgactgctaaatttatgctaggattagcaccatttatctgctcttagtgtgttaaatactcaatgaaatatgtatttatgaaagtaattcagtgtttttcaaatttcatgacgcttttaataaagctgttaaattaacagctttatggggttataattgatatacaaagaactgcacatattcaatatgtacaatttgatgagtttgaacatacacaaacacccatcatatcatcaccgcaatcaaggtaatcaacatatccagcacattttaatagtaccataaagacttctccgccttttaagagtcctggtagtctcagtgaaacaaaatctcttgattttcaacattcctctaatttatcagttctttccaactgggatttaccaagcaatgtcattttgtgttgaattaccatgagttyttaaaagatgctaaaagaaataaagtatgttagaatttcattgccaatcaagattttgatatgcgatctgaatttttagaccagtggttctaaggttggtgagggagaggggaagttgtactgtgtgggagacagttggcaacgtctg

SEQ ID NO: 321447 - DNA, 548 bp, Homo sapiens
tttttatttctgggaaagggaaccacagaagaaatactgcctagtcacttagtcagttgttttcctgcataaatctgtcagaagaaagaatcaaagataatgtgtsaaaaagtcccacatatattacagaaacatttgaaaagttactactataagaagtagtgagtagggtgaattatgagcttatttcaagactctaatctggtaatgctctctccctgaaacataattttaaggctttgatggttttactcctacaatttaaaaaaagagaagagtgtatccaaaatatacaaagaactcttaaaattcaacagtaagaaaacaaactaatttaaagtggtcaaaagatctgctttaccaagaaagatatacgaatggaaataagcatatgaaaagatgctcaacatttatccttaggaatttgcaaattataataacaataagatgccactatacacctaagagaatggctaaaacaaaaacaaataaaccaaaaaaccctgacaataccaaaatctggctatggtgcagagcaacaagaactc

SEQ ID NO: 321448 - DNA, 520 bp, Homo sapiens
tcccaatgtccaaagtgcaatgctagaggaatttgagcaacaaaataaataaaatagtattagattatgtcaacatataaaatggatattcctgactctatatatttacagtaaagtattgaacaaattaacagagagaacttaaaatctcycatgcagaataatatttttaaataacttatgtaggtactccatcctcaaggagggaaagcacatctcctcacttgttaaatgtgtgctgcacaaagtaacttccttccagagcccagcacagaaacaggatagaaaaggggtaattttacagtgcagaaaaatgacaaacaccttctcagccaggtgataaaggtcaacattaacagtgataaatcacgttgttagtttgcactcttcacataatgcgatgaatatggcactttatttctctgacctttccccccagacccataaccccaatccaatcatgaaaaaaacaaattccaatagaggaacatcctacaaaattcttgaccattactcctca

SEQ ID NO: 321449 - DNA, 456 bp, Homo sapiens
tctgcatggggatattcagttttctcaagaccacctactaaagagagattcttttccccatggtgtgttcttggcatttttgttgaaaaatcattggattaaagacttaaatgaaagacctgaaactgaaattacaagaggaaaacacaggggaaacctaaacaatatgtgtctgagcaataatttttttatttaacccccaaaagtcaggctacaaaagcaaaaataaacaaatgggattttttcaaactgaaaagattttgcacagcaaaagaaacaatcaataaagaaaagaggcaacctacaaaataggataaaatatgtgtacattgtgtatttgkacaaggggttaatattcaaaatatatcaggaactcaaatgcattacagcaagaaaataaataatgcatttaaaaaaatgagcaaaggacctgaataaagattgtttaaaagaaga

SEQ ID NO: 321450 - DNA, 540 bp, Homo sapiens
atgcaatattagattcaggcagcatcctctgagagaaaacacactgagaaaaaggatagtcacacaatctcagagtatcttctacagattgcttagagaaaataggttcattcactaatttagtatcatcaataatgataaataacagacattgcttattacctratgtgatgtgataggaatagtgctacacacctatagagtattcttgctcaaaatctttaccctgagtctaattgttagaagaaaaactcagaaatatacacattgtgtggtaaagtacaactgtgaaccttacaactaatttggactgtaaaaaatattaataacatgtcaagttcttggacattaaaaaaaaagcctcagtagattttgagattaaaagagatttatgagatattgtaattagttgtatgacccttaattggaacccagattgggaaataaaaacctgcagaagacatttttagaaacaatgggaaacttggatatggactgtatagttgatactttaaatgaaataaagcatgtggtttttac

SEQ ID NO: 321451 - DNA, 540 bp, Homo sapiens
atgcaatattagattcaggcagcatcctctgagagaaaacacactgagaaaaaggatagtcacacaatctcagagtatcttctacagattgcttagagaaaataggttcattcactaatttagtatcatcaataatgataaataacagacattgcttattacctaatgtgatgtgataggaatagtgctacacacctatagagtattcttgctcaaaatctttaccctgagtctaattgttagaagaaaarctcagaaatatacacattgtgtggtaaagtacaactgtgaaccttacaactaatttggactgtaaaaaatattaataacatgtcaagttcttggacattaaaaaaaaagcctcagtagattttgagattaaaagagatttatgagatattgtaattagttgtatgacccttaattggaacccagattgggaaataaaaacctgcagaagacatttttagaaacaatgggaaacttggatatggactgtatagttgatactttaaatgaaataaagcatgtggtttttac

SEQ ID NO: 321452 - DNA, 540 bp, Homo sapiens
atgcaatattagattcaggcagcatcctctgagagaaaacacactgagaaaaaggatagtcacacaatctcagagtatcttctacagattgcttagagaaaataggttcattcactaatttagtatcatcaataatgataaataacagacattgcttattacctaatgtgatgtgataggaatagtgctacacacctatagagtattcttgctcaaaatctttaccctgagtctaattgttagaagaaaaactcagaaatatacacattgtgtggtaaagtacaactgtgaaccttacaactaatttggactgtaaaaaatattaataacatgtcaagwtcttggacattaaaaaaaaagcctcagtagattttgagattaaaagagatttatgagatattgtaattagttgtatgacccttaattggaacccagattgggaaataaaaacctgcagaagacatttttagaaacaatgggaaacttggatatggactgtatagttgatactttaaatgaaataaagcatgtggtttttac

SEQ ID NO: 321453 - DNA, 434 bp, Homo sapiens
aatcataaaatatgccatttcacattggtttctttcactttataatatgcatttaaggtttcttcatgtctgttcatggattgacagcttaaatttcttttttgtactgaataatattccattgtctgctgttgtatctagtttctttatccattcacctactaaagggcatcttggttgctttcaagttttggcaattatgaataaagcagcttcttgaccaactggacctaagagacatctacagaatactccacccgacaaccatggaataaacattcttctcacycacacgcagaacgtattctaagattgactacatgcttggccataaagcaactttcaataagttcaaaaaactcaaaatcataccaagagtatgttcagactacagtgcaataaaaataaaatcaaagccaatgaaaactgaacaa

SEQ ID NO: 321454 - DNA, 608 bp, Homo sapiens
tatttttcaaaaggcagctttaagagaatgaaaaaggaacctgcaaatagacaatctgaataggcatgtccacttaaaaaattgaatcaataatgaataaccttccaaaacagaaagcctcaggcccacatgtgttcactagtgaattctaccatgcatttaagaaaaaaattatacaaattctctataatctcctctagaagacaaaattagagggagtagtttctaattaattctgtaagaccagagttagccttatacaaaaattaggcaaggagattataagaaaagaaaactacaaaacaatatctttcatgaacgtggatgcaaaaatcctcagaaaaaagttaacacattgaratgaataatttatgaaagaattatacaccagaactaagcggacttcatcccacgtaggtaagattggttcaaaattcaaaattaaactaatataatccatcacatcaataaacatacaaagaaaaatcacatgattacatcaatagatggagaaaagtcatttgacaaaacaatacttaatcctgattttttaaagaaatgcaactgtcagcaaattaaagtactggggaacctcttcaatttgataa

SEQ ID NO: 321455 - DNA, 579 bp, Homo sapiens
aagtttttggccttcataaaagtggtaaataatttaattttttctttttattgcatacatttaatgcataaaacatgacgtttttatatatattcatatagtgaaatgataactacagtyaagccaattaacatatccacatggttaccttttttgtgcgaaggacacctaaaatctattctcttagaaaatttccagtatatagtataatattattaactatactcctcatgctgtacttagatctctagatttattcatctgacataaactgaaactttgtaccctttgacttacatctctctattccccccatatttttaattttttaaaataaaaataaaatgcttaatttaagtctaaatcatgtcttgaattctgcagttaggtaaactgttttttttgaataagaagaatcacactgaataaaatcaaaataggaaaataggattgcaataaaatcatcttttgagttttgttgcctcgtttctttgatttttaactaatcaaaaaagcacttccacattaatcctccaaaagcataatttcaattttaattattgttgatttttcatggaa

SEQ ID NO: 321456 - DNA, 468 bp, Homo sapiens
aatggctgtggcatcactgctactcctagtggcccactagaaaaattctgctttgtgttcccatgactttatgctctgctggcctaacagtcttagcttcaaagggagaaatgcttctacaacaagacacaacaattacactatttaactgaaagttaagactgttactcacccactttgggatcttcatgtctctgaatcaataggaaaagaagagagttacaatgttttgatcctgcttacaaaggggaaattggactactatttcacattggcaataagaaagaaaatgtctggaatatgggagatatttcttagtattgctgtgtcctgtgattaaagccaagaacaaaccaaaacaacccaattaagacaggamtactaatgacttggaatcttcaggaataaccctttacttcattaaataaagaaccatcatcagctgaggtacttgctgaaggcaaaggg

SEQ ID NO: 321457 - DNA, 468 bp, Homo sapiens
aatggctgtggcatcactgctactcctagtggcccactagaaaaattctgctttgtgttcccatgactttatgctctgctggcctaacagtcttagcttcaaagggagaaatgcttctacaacaagacacaacaattacactatttaactgaaagttaagactgttactcacccactttgggatcttcatgtctctgaatcaataggaaaagaagagagttacaatgttttgatcctgcttacaaaggggaaattggactactatttcacattggcaataagaaagaaaatgtctggaatatgggagatatttcttagtattgctgtgtcctgtgattaaagccaagaacaaaccaaaacaacccaattaagacaggactactaatgacttggaatcttcaggaataaccctttacttcattarataaagaaccatcatcagctgaggtacttgctgaaggcaaaggg

SEQ ID NO: 321458 - DNA, 535 bp, Homo sapiens
tatatattctgctttcattttatgattcactggggcctgtgaattatcagagtatatagtacrtttatgttcattgaacagaacaccaagcataattttatcatttaaaattattgcacaaattcgtagttgtatgttactttcagacatattttcagtcatgtctatgatttattaaatgcttggtctaccatataacatcaaattataacattgttcctatgagaaaatataaaatttttataacaatctgctgtacagtaaggtttctcagaatacattgtggagacaaatgagaacttccctatagcagttttatgaactatacttggcatagatttatggtttaaggataaactgtccctggtgaatatttagtagcttatgtaaacctgattttgaaatgttgagatacatattatcttcttaaccacaacatttaaagccctgtttcaggactacctctctgacacagactccactctgtgctcatcttctgattggtaacagtttcataaagatgccccacctgcct

SEQ ID NO: 321459 - DNA, 535 bp, Homo sapiens
tatatattctgctttcattttatgattcactggggcctgtgaattatcagagtatatagtacatttatgttcattgaacagaacaccaagcataattttatcatttaaaattattgcacaaattcgtagttgtatgttactttcagacatattttcagtcatgtctatgatttattaaatgcttggtctaccatataacatcaaattataacattgttcctatgagaaaatataaaatttttataacaatctgctgtacagtaaggtttctcagaatacattgtggagacaaatgagaacttcccyatagcagttttatgaactatacttggcatagatttatggtttaaggataaactgtccctggtgaatatttagtagcttatgtaaacctgattttgaaatgttgagatacatattatcttcttaaccacaacatttaaagccctgtttcaggactacctctctgacacagactccactctgtgctcatcttctgattggtaacagtttcataaagatgccccacctgcct

SEQ ID NO: 321460 - DNA, 525 bp, Homo sapiens
tcatgatattaataaaattttagcctatgttttcaaatatcaatgccagcccattcaatacttcttctgagtttaattttttgatgtagcacttactgctgtgcaattttaatatattaacccattctcctgtttattatctgcctttccccactggaatgttggcccacatggacaggaagttggtctgttttgttcattgctctatgcacagtaactaaaagagcacctgtactttatgggaactcaataaacatttgctgaattcagccaggaagtcagcctcagaatggtcattggaaaaagaggagtttcagtatgggagctcaggaggacagtttacaaagaaagatctccattctcctcctcacagatcttcacgatctgtcataaatattctacgtgcccagatctttataagtatctgtaatgaatgatgtttacagtaagatagatatttttcaaagacaaaaatccaatwttattagaaacttcatgcctcgggcctacatgttgtgtagtttg

SEQ ID NO: 321461 - DNA, 598 bp, Homo sapiens
atcaccagcgaagtcaagaaataaaaatttgccaattgtctcagaagccccttgtattagtctgttttcactctaataaaaacacacccgagactggccaatttrtaaagaaaaataggtttaatggactcactgttccacatggctggagaggcctcacaatcatggtggaaggagaaaagtttgtcttacatggtagcagacgagagacaatgagagccaagtgaaagcagaaaactcttataaaaccatcagatctcaagagacttattcactaccaggagaacagtatgggggaaactacccccatgattcaattatcacccactgggtccttcccacatgtgggaattatgggagctacaattcaagatgagatttgggtggggacacagcaaaactgcatcacccctctatgtgcccttcctctatctcaaaaaagtaatcactatcttgacttttatagcaataatttcctcatttctttatagttttgccacccaaatgtgcatcccaagccactatagtttattgttgtccattaaattttattatcatttaaatccctttcatctatgtgttctccccaccctctttc

SEQ ID NO: 321462 - DNA, 583 bp, Homo sapiens
gacttcactaagtttatcattccaaaggtaaaatattgtcctatattctccttgctcactagtcctcttactcagcctggtattattttctctttcactgttaaattaggtgagtgaggagctttcctatctcaagatgtctgaacactaccccgtattaatattcactccctactaatttttctaacttgttcaatcactgttgcatttgaaayattttatccttgttccatctactacactaaatcacatcttgaaaaattcaattacaagttcaggtgaatgatttgaacttgggttttgttgtttatgatgccactggaacgcatcaactgtgctgcattcaatacagggagcacattactctttacacagtaatagcttcttgtgaggctctggcttactgtagacctggagcttatctgtaaaatctttttctttcctagtgtatttttcatgttgtgaacctgaatcatttttctattctattatgaagtactaaagtaacttgtatcttgttgtaaagaggaaaatcaacttatcttttgaaggagtccaagttttatattgaatgtaaactatt

SEQ ID NO: 321463 - DNA, 489 bp, Homo sapiens
  misc_feature (1)...(489): n = A,T,C or G
tttatgggtcactcatagagcagaaaccagaaccgtgctcccagagtgccaggagaattagcagaaccttagacgaaagtgaaccttctgagaaggttctgagaagatgkaacacaagaggccaagagtttcagccctagcaaaaatttcccactctgagctttagtacaaaatgtatagagttactctctttaaggaatcaaaatgggattggactgaagagcaaaggattgccccccanaagctatgaatgcattaattcaagtactgtggacaaaatttatacctgcttcaggtattcccatatttatttgactaaagctggaatggtcatctacaacagaaggaagcttccctactgtctgaagtcagtctactgtagaagtagaagtagaagtctgtctactgtaccctgcaagcttacacagtctattaaaaagggttgagaaacactggcctgacatataaattctcccctcccaaaagagt

SEQ ID NO: 321464 - DNA, 581 bp, Homo sapiens
ttacccttcacaagctctctttttatctttcttatgggtctattttcagggcaggaataagtttttatttcgaaaattaagtctcatgtttgctttaggcccttttattctaaaaggaagcttcggtaaaggtacagatggaagaggcatactaacattcattaatttcagagctatgactccttagttatctggtttgtattaccgtagtagtccctccttacccacaagggttatgttccaagacccccagcaaatgcctgcaggtagcaccaaaccctatatataatttttttgtgtatatatacacatacttgaagtttaatttataaatcagacactgtaagagattaacaacactaatattcaaataaaacaattataacaatatagtataataaaggttatgtgaatgtgatctctctktctctttctcccaaaatatcttattgtagtataccgtaactgaaactgtgggaagcaaaaccgtggataagaggggactactgcataataagatgcatgctttctacatttaaaaatgcctaaaactgccatgcgtttcataatctaatttcaag

SEQ ID NO: 321465 - DNA, 575 bp, Homo sapiens
ggactactgcataataagatgcatgctttctacatttaaaaatgcctaaaactgccatgcgtttcataatctaatttcaagaaaatgtacctattatcacccagatgaataaattaaaatagtcccaagtgttctaagacatccatataatctgctttctgattatcatcctcagttgaggtttttttaagttcataacaccagaacaggtttaattttaacttaaatttgaattcttaacggttacaacactatcttcaaagaatgcacatgatgctgcaataaaaataaaagttattttttaagtgtagaagatagtcacacactaggactgcaattaaagrgagtagacatttctaaatcttctgaaatatttatgtcatagaatattcaaatgcaggagaagtctgcatacatcaccaggatacaaagtctcaaaactgattcagattagttacattctgaatgtgaaaaaggcttagttccatactttaataatattggaaaaaaagaggtattggtgctattgaccattaatttaaaaatcagatgcgataggaagagggagaccaaaa

SEQ ID NO: 321466 - DNA, 575 bp, Homo sapiens
ggactactgcataataagatgcatgctttctacatttaaaaatgcctaaaactgccatgcgtttcataatctaatttcaagaaaatgtacctattatcacccagatgaataaattaaaatagtcccaagtgttctaagacatccatataatctgctttctgattatcatcctcagttgaggtttttttaagttcataacaccagaacaggtttaattttaacttaaatttgaattcttaacggttacaacactatcttcaaagaatgcacatgatgctgcaataaaaataaaagttattttttaagtgtagaagatagtcacacactaggactgcaattaaagggrgtagacatttctaaatcttctgaaatatttatgtcatagaatattcaaatgcaggagaagtctgcatacatcaccaggatacaaagtctcaaaactgattcagattagttacattctgaatgtgaaaaaggcttagttccatactttaataatattggaaaaaaagaggtattggtgctattgaccattaatttaaaaatcagatgcgataggaagagggagaccaaaa

SEQ ID NO: 321467 - DNA, 575 bp, Homo sapiens
ggactactgcataataagatgcatgctttctacatttaaaaatgcctaaaactgccatgcgtttcataatctaatttcaagaaaatgtacctattatcacccagatgaataaattaaaatagtcccaagtgttctaagacatccatataatctgctttctgattatcatcctcagttgaggtttttttaagttcataacaccagaacaggtttaattttaacttaaatttgaattcttaacggttacaacactatcttcaaagaatgcacatgatgctgcaataaaaataaaagttattttttaagtgtagaagatagtcacacactaggactgcaattaaagggagtagacatttctaaatcttctgaaatatttatgtcatagaatattcaaatgcaggagaagtctgcatacatcaccaggatacaaagtctcaaaactgattcagattagttacattctgaatgtgaaaaaggcttagttmcatactttaataatattggaaaaaaagaggtattggtgctattgaccattaatttaaaaatcagatgcgataggaagagggagaccaaaa

SEQ ID NO: 321468 - DNA, 580 bp, Homo sapiens
tgaggtgcagaaaagcagtcctaagagggacattaatggcaataaatgtctatatcaaaaaagaagaaaggtcacaaataatctgactttacaccttaaggaactataaaaagaatacattaagcccgaagttagcagaaggaaggaaagaacaaagttcagataagaaataaatgatatagatactagaaagtaagagaaaaaaaatcaatgaaactaaatttttggaaasacaaaatcaataaatccttagctagactaactaggaaaaaggaagaaactactcaaataagatcagaaatgaaaacagagacattacaactgatatcatggaaacacaaaggattataagaaaccattatgaacaattttacatcagctaactgggaaatctataaaaaaataaattctgagatgcatacaacaaacagagactgaatcatgaagaaataggaaaatctaagcagtccagtaatgagtaaggagattaaatcagtaataaaacatctctcatcaaagaaaagcccgcaaccagaacgcttcattgctgaattctaaaagacatttaaagaactaacac

SEQ ID NO: 321469 - DNA, 580 bp, Homo sapiens
tgaggtgcagaaaagcagtcctaagagggacattaatggcaataaatgtctatatcaaaaaagaagaaaggtcacaaataatctgactttacaccttaaggaactataaaaagaatacattaagcccgaagttagcagaaggaaggaaagaacaaagttcagataagaaataaatgatatagatactagaaagtaagagaaaaaaaatcaatgaaactaaatttttggaaagacaaaatcaataaatccttagctagactaactaggaaaaaggaagaaactactcaaataagatcagaaatgaaaacagagacattacaactgatatcatggaaacacaaaggattataagaaaccattatgaacaattttacatcagctaaytgggaaatctataaaaaaataaattctgagatgcatacaacaaacagagactgaatcatgaagaaataggaaaatctaagcagtccagtaatgagtaaggagattaaatcagtaataaaacatctctcatcaaagaaaagcccgcaaccagaacgcttcattgctgaattctaaaagacatttaaagaactaacac

SEQ ID NO: 321470 - DNA, 474 bp, Homo sapiens
aatgttttgagtgtaagaatgctgtttccttttctctcaggtctacatatctttactcatcatctcaaaggtgattattttgtaacttgaccttagtcttgcaaaggagctctatttagagatttaaatatagtattaacttagaaaataaatttcaactattcatactgttttacctagagttattacattattaagagtaaatatcttattaaactcaatagggagccmcaaaatagataagatttctaaaggaggtaactgagtgtatataaaataactgatgaaaaataaaagttaagaaaatggggcagctaaatcatctgtcaacagtatttatattgaaaagacattgtaaatattaacttcagtttttctagcttgccatatggaattgctataattggaagacaaaacaaaatgtgggaagtacctgacatttcacttaaatttatttaaacaaagtttgtatat

SEQ ID NO: 321471 - DNA, 556 bp, Homo sapiens
aatactatagttcatgatccctaacacacagggcaaaaatataattgaaaaaatatagaataaactgctgcagttctagagcactgttcttatttttttgctaagacaggcaggttcataagaggattcataagccaagaaattgcgggtggggtgggttcaataaaaattcatttaaaatcaaatttgcaagtgaaaaacctttgactttctgtggattaacattggtataatatcaagcaagagagtttactgggccataattttaagactcttcaatgcctttggcagatatcaaataatagcctayttaaaggcaatcctacttacttgaatcaagggatggacttgaaaataacataactacaacctctggaaaaagacttttaaaatgctatcctttactaggacatagaaatcagaaaagaaatacaaagtaaattgtataaattatgacctgaaccaacattaaactcttataaacaaaaaagttagaaagaaaagaaagggggtggtaagggagggagggaggaaagaaggaaaggaagaatgaaag

SEQ ID NO: 321472 - DNA, 610 bp, Homo sapiens
tggtcattgtttgtaaaggacaaaacttcctagggaggtcatacagcctagtgattaaataactcagcagaaaatttggattctagaccatccatgtaagttacttaatttcyctaaggctcagtttttaaaatccttattttaagataatgaagtatctacttcatttaggactataaaactaaaattagaaaacatatgcaaaataatatagtctacatcctagcactttactgaaaagaagtccaaaatttatatataaaactaagtgaaaaattatgggtatccagatttacttttcatgatcctaactgttctttagaaaattatattctgtttgttgtgatattttacccttttaacatttcaaataaagtctaatcttctttctatgttacttttataacttattttcaaaatggcaaaaaatagttgagtatattattgggcaatcttaaggttattctgcttaaaagaacaaatgggttaaaaaaagaggacaaatgggtttaatagtttaaattatgaaattttctgaggctaatgtaaaactgtagtttgtcattagctttttgtggtccattagttacagtgtttagaagttgaatgc

SEQ ID NO: 321473 - DNA, 578 bp, Homo sapiens
tagaaacttaacatacgaatttgagggaggacaaaagccacctataacagtgacctctagggaattttacttcttggaggaagtcattcttgttttacttttcaggttcattgaagtattttggagttcttgcaggctttctctaagtcttcagccaaacactcacactaatagtccttaccaaataaatatttcactgtttttttcattgaaagttcttggggctccagctggagatgaacgctacagccctcctgaatgtgcatctgttccaacagaatgaatggcattctctattacagccttctyatatatgtaagctgaactgttttagttttgtaaggctgactgtataaatataattctttatctaccagaagtttgtgaaaatatctgaatgtcatatctgtagaaggcatcctctcttgatttcacagtgccatgaatttattcttttttgtctcccttcactgttatttcaaagggattttggaagggagaagaggaatatgtatgctttgtatggcattattgaaccagaagttaactataaaatcttaaagtactatatatctgca

SEQ ID NO: 321474 - DNA, 559 bp, Homo sapiens
acctttccccatgccatctcattggtgccattgtcaaaaattagttgactgtatgcgtttgggtttacttctggactctctattctccattggtctgtgtgtctgtttttatgccactaccatactgttttaattaccatagctttgtagtcaatattgagakcaggtaatataatgcctccctcttttgtggttccatatgaattttagaatttttttttctatttctatgaaaactgtcattggattttgataggaattgcattatatctacatatcactttgggtaaatatgaacattttaacaacattaattcttccaatccatgaacatggaatatctttccatttatttatgtttcttccattgttatcaatgttttgtagttttctgtgtacagatctttcacttctttgtttaaatttatttctaagttttttatgctattgtaaataagatggttttatctctttttctgagtttattattagtatttagaaatatctcctatgcccttgtctagacagagtatggtttcataagttggagcataggaat

SEQ ID NO: 321475 - DNA, 601 bp, Homo sapiens
ttccattgttatcaatgttttgtagttttctgtgtacagatctttcacttctttgtttaaatttatttctaagttttttatgctattgtaaataagatggttttatctctttttctgagtttattattagtatttagaaatatctcctatgcccttgtctagacagagtatggtttcataagttggagcataggaattctttgaaaacattcattttctccaataacagcagaatacacttataaaatttgcattaaatagagatttaattaacctaggaagaataaagatagcatagatttttgcatgagttctttcatttttcactttatatccatatrgaccaacagtattcttaggtcccctggaaatttgtctctataaattgtccaaaacacaaactatgtttcttcacactatcccaaattagggtgccttttcactcgtagccctgttcttgtgtagctgtgaaatgaatgttctgtctttgggaaattacagtcaatctctacttcttggtaattcacacaacattaaaatagagccttattattaaaaaaaatcaataacttgttcaggatatcagaaagtcataaaagct

SEQ ID NO: 321476 - DNA, 511 bp, Homo sapiens
tgggggagaggggccatgaagactgtaagaacttatagatcaggatacaaactttagtttttactctgagggacrtaggtagccatttgagggttttaagccgaggagagacgtgacataacttacattcaaagcatcactctggttgagctaagaatagactctagggagacaaagatgagagactaaaaaccgacagtggtagtggaggtagtgagacagagctggattctaggatttgctgatggctttcatatagattgtcagagaaaaggaggaatcaatgatgactccaaggctctttggcctgagcaaccataggatgtagctatcatcagctgagaaggggaaggttctgtttgtacatgttacatttgagatacgtattacatatccaagtggagttgttgagtaggcaattcactataggaggtaaaagttcagaagacccattttcaggctggatataaaaatttgggagatgtccacatagaaataataaaataatatt

SEQ ID NO: 321477 - DNA, 640 bp, Homo sapiens
aaaggggttataaacaaattctcagaagcaatttgatcgtggcatatctagagtgactgttagagtgagcaaaagattatattagaactagtgaaaaataaactggaatatacaaggtagggccatatgttaaagggttttgaattttaggttgaattttatcctttccagtagttctcaaatgttagtgtgcatcggaatcacttatgctgccttctaaaaatgctgattcccagaatccatgcccagagattkgatttaggtgatgtgggatggccacctctggcaaatatcacaagtgatcctgatgctgcaattcatgcatgacgtactacactttaccaagtgaaatactaaactaggtttattcttcattgaataacatataggaaaaaaaaagttataatttaagatctgtcttccagctatgtctagaatgaattaagcatatagaaaataagttaaacagcattatattaatctattcataaaattatcaggaactgcaagacagtcaaaatcatagtggaacatgaatggcagatatgaaacatatttctagactagaactagaaggactctgattaattaagaaaatgaaggcaatacaaaatcctaaaaacaaccccaaaatttcaaa

SEQ ID NO: 321478 - DNA, 640 bp, Homo sapiens
aaaggggttataaacaaattctcagaagcaatttgatcgtggcatatctagagtgactgttagagtgagcaaaagattatattagaactagtgaaaaataaactggaatatacaaggtagggccatatgttaaagggttttgaattttaggttgaattttatcctttccagtagttctcaaatgttagtgtgcatcggaatcacttatgctgccttctaaaaatgctgattcccagaatccatgcccagagatttgatttaggtgatgtgggatggccacctctggcaaatatcacaagtgatcctgatgctgcaattcatgcatgacgtactacactttaccaagtgaaatactaaactaggtttattcttcattgaataacrtataggaaaaaaaaagttataatttaagatctgtcttccagctatgtctagaatgaattaagcatatagaaaataagttaaacagcattatattaatctattcataaaattatcaggaactgcaagacagtcaaaatcatagtggaacatgaatggcagatatgaaacatatttctagactagaactagaaggactctgattaattaagaaaatgaaggcaatacaaaatcctaaaaacaaccccaaaatttcaaa

SEQ ID NO: 321479 - DNA, 532 bp, Homo sapiens
gaactctttaatgaattgtctatgatctggtgattaccaagccacaggactgaagttttagtgaatttatttgtgaagatctctataaaccgtaactgtcagatcatacctatcataattttagagggtagtttaaaatagactcaaaattagaccttgtgcctgaactatatggaggaggagattaatttttaaaatatagcatgtttaataaagatcgattggygtgtacttaccaaataatttcagatatagcaggacataaacagtgtacacaagagtactgcatctcttgccttaagctgtgtaccaactgtaccttcattcattcattcattcaattttgacttttttacttaggagagacagatgagtactgagagaaattgtggggtgtggtagaggggcaagctaaagtgcccaaaccatcctttgatgtttgcttctgttttttactgggaataatcattttcggtcttgatgtttcaaagattattttaatgtaatttcttattacagtttatatttttat

SEQ ID NO: 321480 - DNA, 532 bp, Homo sapiens
gaactctttaatgaattgtctatgatctggtgattaccaagccacaggactgaagttttagtgaatttatttgtgaagatctctataaaccgtaactgtcagatcatacctatcataattttagagggtagtttaaaatagactcaaaattagaccttgtgcctgaactatatggaggaggagattaatttttaaaatatagcatgtttaataaagatcgattggtgtgtacttascaaataatttcagatatagcaggacataaacagtgtacacaagagtactgcatctcttgccttaagctgtgtaccaactgtaccttcattcattcattcattcaattttgacttttttacttaggagagacagatgagtactgagagaaattgtggggtgtggtagaggggcaagctaaagtgcccaaaccatcctttgatgtttgcttctgttttttactgggaataatcattttcggtcttgatgtttcaaagattattttaatgtaatttcttattacagtttatatttttat

SEQ ID NO: 321481 - DNA, 532 bp, Homo sapiens
gaactctttaatgaattgtctatgatctggtgattaccaagccacaggactgaagttttagtgaatttatttgtgaagatctctataaaccgtaactgtcagatcatacctatcataattttagagggtagtttaaaatagactcaaaattagaccttgtgcctgaactatatggaggaggagattaatttttaaaatatagcatgtttaataaagatcgattggtgtgtacttaccaaataatttcagatatagcaggacataaacagtgtacacaagagtactgsatctcttgccttaagctgtgtaccaactgtaccttcattcattcattcattcaattttgacttttttacttaggagagacagatgagtactgagagaaattgtggggtgtggtagaggggcaagctaaagtgcccaaaccatcctttgatgtttgcttctgttttttactgggaataatcattttcggtcttgatgtttcaaagattattttaatgtaatttcttattacagtttatatttttat

SEQ ID NO: 321482 - DNA, 532 bp, Homo sapiens
gaactctttaatgaattgtctatgatctggtgattaccaagccacaggactgaagttttagtgaatttatttgtgaagatctctataaaccgtaactgtcagatcatacctatcataattttagagggtagtttaaaatagactcaaaattagaccttgtgcctgaactatatggaggaggagattaatttttaaaatatagcatgtttaataaagatcgattggtgtgtacttaccaaataatttcagatatagcaggacataaacagtgtacacaagagtactgcatctcttgccttaagctgtgtaccaacygtaccttcattcattcattcattcaattttgacttttttacttaggagagacagatgagtactgagagaaattgtggggtgtggtagaggggcaagctaaagtgcccaaaccatcctttgatgtttgcttctgttttttactgggaataatcattttcggtcttgatgtttcaaagattattttaatgtaatttcttattacagtttatatttttat

SEQ ID NO: 321483 - DNA, 595 bp, Homo sapiens
gcccaaaccatcctttgatgtttgcttctgttttttactgggaataatcattttcggtcttgatgtttcaaagattattttaatgtaatttcttattacagtttatatttttatggtatgattaatacaattttccatggaaataatttgaggttttttggttatattataaatagaataatatgaaactcaggatgacaaagacatattgcatatcttggcttcaacctgtaataacattgttttataggaaatatgtaaagtgtataccctttatcattatgtataccctttatgtatatgtgtaccctttatcattaagttaaacaaatattttrtttctggtcaaaataggttctggtcagaatattgaaattcagaccagaatctggccaagaggttctggtcagaatattgaaattcagcaatctgggggtgatagaattaaacagagtttgacatatgcattgttgagaattagagaaacttataaagtttcaggctcttgcttcctattttttgaaaaatgttcatgcaagtaatgtttttcagaaaaatgaaaaattctttggctcattttcttttgttatatatt

SEQ ID NO: 321484 - DNA, 520 bp, Homo sapiens
aagctgagtactttgaactgaaggagatgggaacagtttcagaagcaaggtctttctgactttctgccctcctgtcttccactgctctttctccctttgaagtgagttatagaaaccagaactttttccccagaaggagtcatagaaactagattctctttcctagggagaaaggagactctctctctcctagggagaaaggagaaactagactctcttcaaggacctagggagaaaggagaagggagtgacctctctaggttttttgacttgtttgagtgtcctaccccacatcctggaggaaggaatgttacacggagagatcaagargaatctcagctgaccagaccttatagaccataccctctgttgaattacattcctacatggctgtccattcttcatcaaatctacacataaaaataaaaactttatttctgaagtctcccacatcatgtaaaactttgattaaataaatttgttttgtctattgctatacaaatgttggctgtaatgggtg

SEQ ID NO: 321485 - DNA, 506 bp, Homo sapiens
agggcatgatgctgaacttctgtgcagcccccaactgcaagcrgaggagcatgtggttggacctggccttcttcaagttcctgcagtatcgggccagagcccagaagtgagtgaagaattgttggagagcagacttagaagataaaatgcctgaccaactaaataaaccttattgatcatgtgccaaatactttgagacctctgtgatcggtagaaatgtaaattttgcagaaacatcagaaaaattcagaatgattgggttattttatttctcaaaattaattgaagcagatatttgtgaagtaattgggagagtccttataggactgttcttcaatacaatgcaataccaacaatatttgttcttaccaatcatttaaacaattcaaataatagacacacaaaatgaataaaagaattgaatgaagatgaaatcaagacagtgaaacagagaaaaatttatgaaactctgaacaggaacaaaaacataaactaacaacagcaat

SEQ ID NO: 321486 - DNA, 577 bp, Homo sapiens
ttccaaaatgaaagttgtcacttgtagagttttagagaatgctagaagcaacactccgcaagctatctacactctctgaccttattgtgccttaaatatgtgttgggctaaatcagtgcctgttatttgagtatctgttgcattaggaacaattgaggaagtttattctttttaccatagatcaccacaactgcttgtagaactttacaatgtaatttctattctttttcagaacaatgaagaaaggggtaaacaaactgaagggaatttgccattctcagtgaacagtcagggatgatgattctgaaattttagtggacctcctgtaagcacttgttttatgtttagatggtataagtagtgacacaaatattagatggtataacagtatagatggccaagcatttgtactctgcagtgtagtaacagattttgatttcatggttactattgctgttatttaaaatgtcttaacttttacaagagccttgggaaaacaatctycaggggcaaacctctgatgtcttctttgcagccagtagtttgactgctgtattgcattcactcaatgaagtga

SEQ ID NO: 321487 - DNA, 520 bp, Homo sapiens
cccacaacagtgtgctggtaaatgcttaaccaccagttccttaggtataatgaccttatttrtagtgctttttgatttatgaggagtaaatattcctatcatatggcatatatcactgaatgtagagctgggaagagatgtacacaattagatcgtggaaaccagttctagtaaactctaatgtgggaaaagtaaacttctattttgtttagaccagtattttgtgttgtttcttgctcatggccagaaatgatcccagtttatttctgagtagtggcctatgagatgatgaaggccaaatggggtcatccagatttctttttttacatacttcaaactatcggtatggagagaggatcattagttaacagttggatcatgaataaaattatgcactaaggcatgtagtgacagagtggctgtatcatgttactatagagaggtataatacaccagcaaactcctgtgagtgcaggcaggcaccataagacaacctggcttcaagcacagccttggatca

SEQ ID NO: 321488 - DNA, 520 bp, Homo sapiens
cccacaacagtgtgctggtaaatgcttaaccaccagttccttaggtataatgaccttatttatagtgctttttgatttatgaggagtaaatattcctatcatatggcatatatcactgaatgtagagctgggaagagatgtacacaattagatcgtggawaccagttctagtaaactctaatgtgggaaaagtaaacttctattttgtttagaccagtattttgtgttgtttcttgctcatggccagaaatgatcccagtttatttctgagtagtggcctatgagatgatgaaggccaaatggggtcatccagatttctttttttacatacttcaaactatcggtatggagagaggatcattagttaacagttggatcatgaataaaattatgcactaaggcatgtagtgacagagtggctgtatcatgttactatagagaggtataatacaccagcaaactcctgtgagtgcaggcaggcaccataagacaacctggcttcaagcacagccttggatca

SEQ ID NO: 321489 - DNA, 520 bp, Homo sapiens
cccacaacagtgtgctggtaaatgcttaaccaccagttccttaggtataatgaccttatttatagtgctttttgatttatgaggagtaaatattcctatcatatggcatatatcactgaatgtagagctgggaagagatgtacacaattagatcgtggaaaccagttctagtaaactctaatgtgggaaaagtaaacttctattttgtttagaccagtattttgtgttgtttcttgctcatggccagaaatgatcccagtttatttctgagtagtggcctatragatgatgaaggccaaatggggtcatccagatttctttttttacatacttcaaactatcggtatggagagaggatcattagttaacagttggatcatgaataaaattatgcactaaggcatgtagtgacagagtggctgtatcatgttactatagagaggtataatacaccagcaaactcctgtgagtgcaggcaggcaccataagacaacctggcttcaagcacagccttggatca

SEQ ID NO: 321490 - DNA, 520 bp, Homo sapiens
cccacaacagtgtgctggtaaatgcttaaccaccagttccttaggtataatgaccttatttatagtgctttttgatttatgaggagtaaatattcctatcatatggcatatatcactgaatgtagagctgggaagagatgtacacaattagatcgtggaaaccagttctagtaaactctaatgtgggaaaagtaaacttctattttgtttagaccagtattttgtgttgtttcttgctcatggccagaaatgatcccagtttatttctgagtagtggcctatgagatgatgaaggccaaatggggtcatccagatttctttttttacatacttcaaactatcggtatggagagaggatcattagttaacagttggatcatgaataaaattatgcactaaggcatgtagtgacagagtggctgtatcatgttactatagagakgtataatacaccagcaaactcctgtgagtgcaggcaggcaccataagacaacctggcttcaagcacagccttggatca

SEQ ID NO: 321491 - DNA, 605 bp, Homo sapiens
cttcctgttcagcctacagaacgatgatccaattagaccttttttaaaaaaataaattacccattctcaggtatttctttatagcaatgcaaaaacacatgaatacaaccctgatccctgaattttcatggtgactgatttgagtaataataaaattctggtctcttgtacagccggctctgtgtgaattaaactttctttattgcaatttgctgtcttgataaatcagctctatcaggagagtgggcaaggagaacttgttgtgcagttgyaaaatctttgaatccaccaaaaagtggcccctgcccttctagttgtcctgtctttccagacagaaacaatacataccttgtatatattgattgatatctgcctgaaacttctgtctccctaaaatgtataaaatcaagctgtaatgcaatcaccttaggcacatgttctcaggacctccttgggctctgtcacaggtcatggtcttcacatttgcctcagaataaatctcttcgaacgttttacagactttgactctttttcattgacaaagctttttggatatggtaaaattttctacttgccttgtgttgttttgcataaagccaatgtgc

SEQ ID NO: 321492 - DNA, 496 bp, Homo sapiens
ttaatccagccatgcccccttccctttctgttccttttcccagatccagcagaaattgagagtctgaaacctttaaaagtctgaaaagaaatatttatcatatgttctctctgaggaagttttcatctacatagcaaggccacctttgctagcaatccttttctctcgcttcaaataacttgttttaccagcatctaagcccccattctttctataacytaaaaatggtatatacatttctgtaactcattgggaagttgggtcttcgttctaaagctcctgtgtatgcaccttaaataaatttgtatacctcttctcctattactcaatctgcctcatgtcagtgattcttagtgaacctttagggttccaagaacaaatggccccacattagcacattttactttcaagtcccagtgatactcttatcagcagataattttaatagttgtgattgctcagcatggccttgagcattacaaatgaaagtactatt

SEQ ID NO: 321493 - DNA, 496 bp, Homo sapiens
ttaatccagccatgcccccttccctttctgttccttttcccagatccagcagaaattgagagtctgaaacctttaaaagtctgaaaagaaatatttatcatatgttctctctgaggaagttttcatctacatagcaaggccacctttgctagcaatccttttctctcgcttcaaataacttgttttaccagcatctaagcccccattctttctataacctaaaaatggtatatacatttctgtaactcattgggaagttgggtcttcgttctaaagctcctgtgtatgcaccttaaataaatttgtatacctcttctcctattactcaatctgcytcatgtcagtgattcttagtgaacctttagggttccaagaacaaatggccccacattagcacattttactttcaagtcccagtgatactcttatcagcagataattttaatagttgtgattgctcagcatggccttgagcattacaaatgaaagtactatt

SEQ ID NO: 321494 - DNA, 576 bp, Homo sapiens
cattgatccctgcactgggagttgtcaggacactttctcctaggggctaggataatcagaaaagtgccatgttttccaacaattatttcaaattctgaatcatagagggaccctctaacttaagtgagagctgcaagcagctgaagtgtattggcccccattggtggcctgcagtacaaccaaactcgcagggcagcagtccttggcttaggtcactggacctccaggactcacctggtgctgggcaccagtgcctgcaggagaggcagcaggtagcacgctgggctgaatctcatgtgttgcctgccgggggcctccttccatccctctctggctctccagcctcttcctggccctttcacttctcagtgtccagttaactaagggaygtctactgaaggttgggagcaggaaatatatggagaagcgaggcgagtccagaccacacatacacatacgcatatgcatacacatatgcatacacatacatgcacatacatatacacatacatatacagatgtaactccaccctcttgcaaagctttattatgaagaggaaacatatctgctaatcc

SEQ ID NO: 321495 - DNA, 576 bp, Homo sapiens
cattgatccctgcactgggagttgtcaggacactttctcctaggggctaggataatcagaaaagtgccatgttttccaacaattatttcaaattctgaatcatagagggaccctctaacttaagtgagagctgcaagcagctgaagtgtattggcccccattggtggcctgcagtacaaccaaactcgcagggcagcagtccttggcttaggtcactggacctccaggactcacctggtgctgggcaccagtgcctgcaggagaggcagcaggtagcacgctgggctgaatctcatgtgttgcctgccgggggcctccttccatccctctctggctctccagcctcttcctggccctttcacttctcagtgtccagttaactaagggatgtctactgaaggttgggagcaggaaatatatggagaagcgaggcgagtccagaccacacatacacataygcatatgcatacacatatgcatacacatacatgcacatacatatacacatacatatacagatgtaactccaccctcttgcaaagctttattatgaagaggaaacatatctgctaatcc

SEQ ID NO: 321496 - DNA, 580 bp, Homo sapiens
gcatgtgctctttggttcataatggaaagacacatgttccaattctagcatctagtgttctttgcagtgaagaaggaaaacaacaaatgtaaaaatattctaactagtcttttctcccattttaagaagagattcccaggagcctcatccaaaaattctcacctctcattattataagcatatgtcatatgctcacccttatatggaaaggaggctgggatgagaaatgcaatttacacagtaaaattgagaactttgctaacaacaaagtaagaatgccgtaaggaagatattaaaggaacatcagagagtaaggaaaaaaggggagtcaggaagaaaggaaggagaaaaggtttttgttgttgttaattttgtgtgtgtgtktgtgtgtgtgtgtgtgtgtgtgtgtgtgtgtgtgttcaaaccagaaatgttagctctaaattctgaagggactgagctaggtcttgaagccaaggttttctaattctaaacctaagactactagttagtaaattaaagaatgtcacatggatttcctgagatttagacacattagagcttaaatataatataaata

SEQ ID NO: 321497 - DNA, 567 bp, Homo sapiens
ttgtatgatacatttttaagagaatcagaaggcaagtcacaaacaaggataaaatgtttgcaaaacacatatctaataaatgacttgtatccaaaattaaaactaactattaaaactcaccagtaagaaaccagatatttcaattaaactgcttatagactcttcacaaagatgtatacatgaaaaataagtacatgaaaagatactcaagatcatgtcttaacgacttgcgaattaaaactgaaaaaccaatgtataccaattggaatggctaagctgaaaaactaacaataccaactgttggttaagaatccatagccacaggaacttkgctgagatttgttttataatcctgtatatggcccatattcatatacactttgtggacatcggaaaaatatgtgcattttgcagatgttgggtggtatggcatgtacgtaaaaaaaaaaaaatcctgctggttgattgcgttgttcagattttccatgttattgctgaatttctgtctagtagttctaccagttgctgataggacagtgctgaattcaatatgtataattatttgtt

SEQ ID NO: 321498 - DNA, 224 bp, Homo sapiens
aacatttgtaaatgactgattctctgttccttgtacctcactgtgttgttctgagtactgataataggaaaatgctttgaaactggaaacattttatactaatgatattatctctgaattgtgaatcccgttaaattgatgacagaattatcaaactcttaatcagttaattycatgaaattagataacatggtttgtttcaacatttaacccaatcgttgata

SEQ ID NO: 321499 - DNA, 540 bp, Homo sapiens
tgcctttttttttcttgctcagtttttgattgccttccagttttaaccattcttgcttaggtctaaaagtaagctacttttgtatatgttgtctctctctctttcacacacacacacacgygttgtgtgtgtgtgtgtgtatatatatatgcatctatatatgtctatataatgtgtgtgtgtctatgcatatgcatgtacctacatgtgtgtgtatatacagatagatagacacacacatacattctaatttcaggcagtaacatacagatatatagatacagaaatagatatagcccacttgcttttaatagtgtgaaagagtcagcttttcttatttttcttaaaaaaatctttaaacatttatttcaaaattgaccatgaaagaataatttatttagctatctggcttcaaataaaacattaaaaaataatgtctcaattttatttggtcaagacatcttgctgggttctcagaaaactgatcaggaacaaagtttacatgctaatacattactggagagtataatttcaagaatg

SEQ ID NO: 321500 - DNA, 540 bp, Homo sapiens
tgcctttttttttcttgctcagtttttgattgccttccagttttaaccattcttgcttaggtctaaaagtaagctacttttgtatatgttgtctctctctctttcacacacacacacacgtgttgtgtgtgtgtgtgtgtatatatatatgcatctatatatgtctatataatgtgtrtgtgtctatgcatatgcatgtacctacatgtgtgtgtatatacagatagatagacacacacatacattctaatttcaggcagtaacatacagatatatagatacagaaatagatatagcccacttgcttttaatagtgtgaaagagtcagcttttcttatttttcttaaaaaaatctttaaacatttatttcaaaattgaccatgaaagaataatttatttagctatctggcttcaaataaaacattaaaaaataatgtctcaattttatttggtcaagacatcttgctgggttctcagaaaactgatcaggaacaaagtttacatgctaatacattactggagagtataatttcaagaatg

SEQ ID NO: 321501 - DNA, 540 bp, Homo sapiens
tgcctttttttttcttgctcagtttttgattgccttccagttttaaccattcttgcttaggtctaaaagtaagctacttttgtatatgttgtctctctctctttcacacacacacacacgtgttgtgtgtgtgtgtgtgtatatatatatgcatctatatatgtctatataatgtgtgtgtgtctatgcatatgcatgtacctacatgtgtgtgtatatacagatagatagacacacacatacattctaatttcaggcagtaacatacagatatatagatacagaaatagatatagcccacttgcttttaatagtgtgaaagagtcagcttttcttatttttcttaaaaaaatctttaaacatttatttcaaaattgaccatgaaagaataatttatttagctatctggcttcaaataaaacattaaaaaataatgtctcaattttattkggtcaagacatcttgctgggttctcagaaaactgatcaggaacaaagtttacatgctaatacattactggagagtataatttcaagaatg

SEQ ID NO: 321502 - DNA, 540 bp, Homo sapiens
tgcctttttttttcttgctcagtttttgattgccttccagttttaaccattcttgcttaggtctaaaagtaagctacttttgtatatgttgtctctctctctttcacacacacacacacgtgttgtgtgtgtgtgtgtgtatatatatatgcatctatatatgtctatataatgtgtgtgtgtctatgcatatgcatgtacctacatgtgtgtgtatatacagatagatagacacacacatacattctaatttcaggcagtaacatacagatatatagatacagaaatagatatagcccacttgcttttaatagtgtgaaagagtcagcttttcttatttttcttaaaaaaatctttaaacatttatttcaaaattgaccatgaaagaataatttatttagctatctggcttcaaataaaacattaaaaaataatgtctcaattttatttrgtcaagacatcttgctgggttctcagaaaactgatcaggaacaaagtttacatgctaatacattactggagagtataatttcaagaatg

SEQ ID NO: 321503 - DNA, 660 bp, Homo sapiens
ctaccccttcctacgtggcatgagcctcagttcttcattagtaaaacagagataacattatctatcttatagaatagttataaggaccaaatgaaataattaatgcacttatcatatattaaggaatcaatagtattagcctgtattattatgtgttagccaaaatataacaagcctcaaactgtttattttctttttgtgaaaactttcataccattctcactctgccaccactgtaatttatcactccttctttatacttctacattatgtagataatagtttaactttatacacatttgaaattattgtttatacatgtgttttgtgacagaactgtgagaactacttcagtgtagttctaggccttcagtattgcagtattcctatttccatgacaaatttggccaaagaakaagtacataacaaatatgtattgatagaatataagctttttttcctcacaactgtgcatgttttcattcttcacactctaaaattatttttccatggagaacagtcttttgtgtttaaattttaatgttggagcaactcctttcgcacttataacagacttctttattgacccatgaaaataatgtgatttgtttagctgaaagtttcaaaacctcatgatagttacagctgagcatgcttgag

SEQ ID NO: 321504 - DNA, 522 bp, Homo sapiens
tgtggagacaaaccctgtctctacccgatattaagtcaaacacaatataaagagggtgtctgaaaacagaacaaattttctaaaattgagtatctttgtttttaagaagatatttttcttggcactgataaccactgaaacagaaaggttctttaaaaatttctgaaaaattgtgggttttagctaggttctatgtttaaagccagggtttatttaattactttgaataacttggcagacaatttagactaagtgtggtataaggagtactttaacctcccatccatattaaaggtgagtataaaaacagaatgcatgagggagaatgaatttggaggctttggatagaatgaacatacctttcctctgaaagtcatgctaacaagctatgggatcctgggtatattccttcagttggctattgsatgcccagtccctaaactccattagaaaataagacataaagtttcctagagtacaatcaataatctgtatttccagtttcagcaggtgacatcatat

SEQ ID NO: 321505 - DNA, 617 bp, Homo sapiens
acagcattaatcgaatttgatgtttccttagagattaatttaagcactctgaaaatcatgttgattgatcagcagtcaggagacttttaattgaagtgcttaattcatttagctaatgtgataaacaatgccagaagaaacaagaaatgaagctgtcaggggtccagatatttcatgaccttaattttgtttcagaaaaccacaactattttttcaacctttttggtcttacttcccattcttattygtccccacctcattttatttcctttcattataaggaagaattgtcaggaatgaaatctgagaagcagtgaacagatcaaggcatttcctctacccccttttaatataaatacttgatatcctgaaagtaagaatcccacgatccccacccctccagcctctcattgcaggttttctcacaagtgtttgttgggatatgactgtaaaggagttttgaggcatcctcccacctaatacagcatacagcacatacatcattgactctgtattacattgtattattctgcaatgtttgcacactattaatttgacaaagattacaaagccaatcacatctgtgacattatgttaaaatcaaaaactgctgaatg

SEQ ID NO: 321506 - DNA, 578 bp, Homo sapiens
ctagctggttgttttgcacactagttgatgcagtttcttcatagtgtcattgatctttatatttttggtgtgtttttgcagtggctggtaccagttttccctttccatatttagtgcttcctcaggagctcttgcaagactggcctggtgggagttggagttttcattctttcctttgtatagtggctattcttgaaaaaacaaaaatgaaaccaaacaaaaaagctcttaaatatttttgcctcagttttataaaataagaggtaatacmatatatcagtcatgttttgtgaatgttgggtttgccaacatcaagaaccttaaatatccaatcagaagcattataataacatatggtaatattttagtgatttgcaagtggttatgagataagcttttacttgaaattcatttcctctatatctgaaaataataaaataatttgagataattgggttcagagatgtgacaacagtaccaaagtaattataagttgccctccaaaggcagcctaactaacttgaagttaaagatgaacataacccattatataaactgcaagttgtctaaatatgcat

SEQ ID NO: 321507 - DNA, 591 bp, Homo sapiens
atgaactaaacagagaaatctagtccagacaagatgatgtagactcatctctccatattaccccctcacaaagcacaactcttaatgtgagaaatcaagtaagaaatcaacaaaaggcaattccaagaagagaagaaaaaaaagtaactccgggagtagagaaacactatagcactatggcatcctataatgccccatctaaaatasaaaagcaatccagacccagtaattcctgatgtttacattgacattaaaaggccacctaggcaggttctttctcccctggggttgaacaagagtccacccgaaaacactaggttgaatcagcaagagagatggacatatattaaatctcagcaatgaaataaaattattaaaaaatgaaccagtaactttcagcttctggttctgcatgtaagaagcttagaagttgccactttatcttaacaacaagtataaagctaaagaaaatgaaaaattaacaattcctcttggatccctaagagaggtgaggatatagggcaaaccattgcacccaggactggagagaaaaaaatggtgaatacagggagtaacagcttatcacagcag

SEQ ID NO: 321508 - DNA, 591 bp, Homo sapiens
atgaactaaacagagaaatctagtccagacaagatgatgtagactcatctctccatattaccccctcacaaagcacaactcttaatgtgagaaatcaagtaagaaatcaacaaaaggcaattccaagaagagaagaaaaaaaagtaactccgggagtagagaaacactatagcactatggcatcctataatgccccatctaaaatagaaaagcaatccagacccagtaattcctgatgtttacattgacattaaaaggccacctaggcaggttctttctcccctggggttgaacaagagtccacccgaaaacactaggttgaatcagcaagagagatggacatatattaaatctcagcaatgaaataaaattattaaaaaatgaaccagtaactttcagcttctggttctgcatgtaagragcttagaagttgccactttatcttaacaacaagtataaagctaaagaaaatgaaaaattaacaattcctcttggatccctaagagaggtgaggatatagggcaaaccattgcacccaggactggagagaaaaaaatggtgaatacagggagtaacagcttatcacagcag

SEQ ID NO: 321509 - DNA, 558 bp, Homo sapiens
aatttcctgtttgaaactgcagaataaaatattcgatctacaaaaaattgagataaaattattatsctagttttcacttactgatataataattatgtcatttctgtggagaaatagagaaggccatatttgcattaggagtattctgttgtgtatgccaccataattttattgcaatttgataaacatgggttggattaaccaatttgtgtattaattcccataggtacctgttccttaaattgaagctgcaaacaacacttgtaattggtcatggcaaaacaaggcagatagaacatcttcacaaaggcaacttttggctgcccaatattttaaccatcagaatagaaaattaattcagctatgtgagtttcattggcattaatgttacttactttcttatacttgcttactggaaaggcatttgttaatgttgtctggtgttgccgcattactaattcaacatctaactgcaaatcaagtctattcaaattcaaaaggaatggcagtgtttgctttttatctcttactgaatacatattctttcaaaaaataatt

SEQ ID NO: 321510 - DNA, 558 bp, Homo sapiens
aatttcctgtttgaaactgcagaataaaatattcgatctacaaaaaattgagataaaattattatgctagttttcacttactgatataataattatgtcatttctgtggagaaatagagaaggccatatttgcattaggagtattctgttgtgtatgccaccataattttattgcaatttgataaacatgggttggattaaccaatttgtgtattaattcccataggtacctgttccttaaattgaagctgcaaacaacactkgtaattggtcatggcaaaacaaggcagatagaacatcttcacaaaggcaacttttggctgcccaatattttaaccatcagaatagaaaattaattcagctatgtgagtttcattggcattaatgttacttactttcttatacttgcttactggaaaggcatttgttaatgttgtctggtgttgccgcattactaattcaacatctaactgcaaatcaagtctattcaaattcaaaaggaatggcagtgtttgctttttatctcttactgaatacatattctttcaaaaaataatt

SEQ ID NO: 321511 - DNA, 558 bp, Homo sapiens
aatttcctgtttgaaactgcagaataaaatattcgatctacaaaaaattgagataaaattattatgctagttttcacttactgatataataattatgtcatttctgtggagaaatagagaaggccatatttgcattaggagtattctgttgtgtatgccaccataattttattgcaatttgataaacatgggttggattaaccaatttgtgtattaattcccataggtacctgttccttaaattgaagctgcaaacaacacttgtaattggtcatggcaaaacaaggcagatagaacatcttcacaaaggcaacttttggctgcccaatattttaaccatcagaatagaaaattaattmagctatgtgagtttcattggcattaatgttacttactttcttatacttgcttactggaaaggcatttgttaatgttgtctggtgttgccgcattactaattcaacatctaactgcaaatcaagtctattcaaattcaaaaggaatggcagtgtttgctttttatctcttactgaatacatattctttcaaaaaataatt

SEQ ID NO: 321512 - DNA, 601 bp, Homo sapiens
gtgcagtgctcatgcctgtaattccagcactttgggaggccgaggtggatggatcgcttgaggtaaggagttcaagacctgcctggccaacatggtgaaaactcatttctactaaaatatagaagttagccactcaggaggctgaggcaggagaatcgctttaacccgggaggtggcgattgcmgtgagcagagatcgtgccactgcactccagcctgggtgacagagcgagactctgtctcaaaaaaaaaagaaagaaagaggagagttccctgattcacctcacaggacatgtgacagtgatgtggctcatctgtttggtcactgccactgttcaaaccccttacgggatggggagcaggcagagagacaggtgcaggagctcaagtgggtgtgtgctacagtgcactcttttagccttgctgtccatggacagcttaagtgttaaccagctcagtggagcctttgcctttctgcaagggcagagggccagtgtgacagctttctgtcccgagctcttgctcagggtcctggaagaattgggtcacacacaggcttgaggaatggtgaatgcgaggttttactgggtggtggagttggc

SEQ ID NO: 321513 - DNA, 659 bp, Homo sapiens
aagcccacttcatgatattgtctgaacactgacagaaaagaaggtccctgcaaacatgtcctcccccawccattgtgggtgatgaatacaaaattaccaaccatagttttagcctaactctattctttcttcctgctaggtaaaatgcatagagattctcattcatagaactgctctaagccagagcaaagcaccactttcttgaactctcgccagaactacctaatagaagctcagtcctataataaattttcctcataataaaacaatcttattgagatgtctcttgatatcccatgatgtgcatttctcctagatgccagaagtaataaactcaaatttgttcaattacaggtatatttctggaggtctttcattgaagggcattgactatgtgaaccaaattttttagctacttcctcttctgtgtatagtaaaactttcataatctgttggaaaagaagtatatcaaacttaagcttctgaaaataagttgcaaaaagccctgtgaactttttaaaacagaatttggaaacaaggagtagcaagaagcctaaattatgtagttttatttttaggtttttatattctgctcagtccatgctcaaataaaaatatgaagaaattctgggtcctacaagggcataaatgctacatct

SEQ ID NO: 321514 - DNA, 607 bp, Homo sapiens
attcctggggtgcagggatgtttcaacacatgagaatcaataaatgtgattcaccaggtaaacagaattaaaagtaaaaacattataatcatctcaatagatgtggaaaaagcatttgataacatacaacattccttcctaataaaaaccctcaataaacaaccatccaaagatcataactcaaaataagaaaagccatatatgacaaacccttagccaacatcattttcagtgaggaatagtttaaagcagcaactcccaacctttttggaactggggacagatttcatgaaagacaatttttctaccractgtgcagagagtggggaatggttttgggataaaactgttccagctcagatcatcaggcagtagttagattctcataaggagtgcacaaactagatccctctcatgtgcaatttacaacaggattcacgctcctatgagaatctaatgccaatactgatctgacaagaggctgagctcaggaggtaatgcttgcttgcccactgctcatctcctgctgtgtggctgggttcctaatcggccatggaccactactgtttggcagccaggtgtttgggaccgctaagtgccaaaggat

SEQ ID NO: 321515 - DNA, 546 bp, Homo sapiens
ttttctaccgactgtgcagagagtggggaatggttttgggataaaactgttccagctcagatcatcaggcagtagttagattctcataaggagtgcacaaactagatccctctcatgtgcaatttacaacaggrttcacgctcctatgagaatctaatgccaatactgatctgacaagaggctgagctcaggaggtaatgcttgcttgcccactgctcatctcctgctgtgtggctgggttcctaatcggccatggaccactactgtttggcagccaggtgtttgggaccgctaagtgccaaaggattaaaggattccccgtaagtcctggaacaaaacaaagatgaccatttttattacccctactcaatttagaactggaagtcctaaatagagcaataaggcaagaaaaataaataaaaagcttccacattggaaaagaggaagtcaaattatctgtttgccgataatatgatgcaatacctagaaaacactaaatactcctacaaaaagatgcctagacttgatgtaaagtttcagcgtaca

SEQ ID NO: 321516 - DNA, 546 bp, Homo sapiens
ttttctaccgactgtgcagagagtggggaatggttttgggataaaactgttccagctcagatcatcaggcagtagttagattctcataaggagtgcacaaactagatccctctcatgtgcaatttacaacaggattcacgctcctatgagaatctaatgccaatactgatctgacaagaggctgagctcaggaggtaatgcttgcttgcccactgctcatctcctgctgtgtggctgggttcctaatcggccatggaccactactgtttggcagccaggtgtttgggaccgctaagtgccaaaggattaaaggattccccstaagtcctggaacaaaacaaagatgaccatttttattacccctactcaatttagaactggaagtcctaaatagagcaataaggcaagaaaaataaataaaaagcttccacattggaaaagaggaagtcaaattatctgtttgccgataatatgatgcaatacctagaaaacactaaatactcctacaaaaagatgcctagacttgatgtaaagtttcagcgtaca

SEQ ID NO: 321517 - DNA, 572 bp, Homo sapiens
ctggctactatcactttatgaaattattgacgctcaaagttgcttaaaactgamctgaaatatggtaaataatctgaaaatgtcatcttttattattttcatttttttctataatactatgtaaacaaattgctaaggaagaccacataattgaaataattcagatggctgaaataaatggagaaaaatattaataaatgggttacatctacgtctaagttagtgattgaatttaataaacaaatggaaaaaatttcatttgatggaataaaatagtttaaaatatcaattttcaaaaaaacgaaggttgagcacacagacaactctacgggctcgtgaggtatattgtgggaatggagagaaaaagaggttgaaaacaaaaatcgacaagatcagtcagaatcagattttgaagggctacagcaaggcacactaaaagcactcaatggtctattttgtagaataaataaaaataactcaattgaaggtcttgcatttgaatatagaagatagttaagagctgtattgaaaagatggcaaaaatctttacgtttagatgtcatactatataa

SEQ ID NO: 321518 - DNA, 610 bp, Homo sapiens
ccttgctttttattgcaatgcctctgaaaggattaatgtattttgtagaaataagaattgcaaataaatattgaaaacagtgttaatttcttatagatatattacatgcttttactagcatttatatgtaattatggaatatacatttactagttttttttaagaaaaagtctgatattttatggcttgatgaaaactaacgaactttccactgagctagtgaaacaaataaattgcataatacaacatgctaatagggagtaatagggagttgatctaggaaaagtcaatgctataaagtggagtagcaataatcccattttataatttttcaaaatgatttttttaaaaaactggtatttgtttctaatttctaaaactatatatattttctatatatttataaaaatatatatagcgaaacataacagtatataccaaaggacttctaatttttttaagaaattacttgactttggctggcgatttatcactgcctacagggaaaaacatagtacaatatagtacgtttctatagtataatatagaattctrtattatactctatagtataatatagaattctatattatattctatagtataatat

SEQ ID NO: 321519 - DNA, 570 bp, Homo sapiens
atccaaatgataaacagaggagaacaagagtcattatacttatatcagacaaaatagactttaagtcaaaaactgttataagagtgcatttataaaaataaatggacaatctaccagaaaatataataattataaatctaacaaatataaatacaagatatcaccttaagatcgggtacaaaacagggatgaccattcttgccaattctattcaacacagaactggaagtcctagccagagtaattaggcaagaaagaaaacytacatgcttacctcatgtaagctgctatggaaaacatggaggttcttttaaaaattaaaaatagaactaccgtatgatctagcaatcacacttctgggtatatacgcaaaagaattgaaaatagaatttcaaaaagatgtctatacttttatgttgattgtggcattgttcataatagtcaagatatggaaacaaccttaaatgtccatgggcaaattaataaagaaaaagtggtatatacatgcaagacaatattattcatccttaaaaaaacaggaaaatttgcaatatttgacaatatggctga

SEQ ID NO: 321520 - DNA, 570 bp, Homo sapiens
atccaaatgataaacagaggagaacaagagtcattatacttatatcagacaaaatagactttaagtcaaaaactgttataagagtgcatttataaaaataaatggacaatctaccagaaaatataataattataaatctaacaaatataaatacaagatatcaccttaagatcgggtacaaaacagggatgaccattcttgccaattctattcaacacagaactggaagtcctagccagagtaattaggcaagaaagaaaacctacatgcttacytcatgtaagctgctatggaaaacatggaggttcttttaaaaattaaaaatagaactaccgtatgatctagcaatcacacttctgggtatatacgcaaaagaattgaaaatagaatttcaaaaagatgtctatacttttatgttgattgtggcattgttcataatagtcaagatatggaaacaaccttaaatgtccatgggcaaattaataaagaaaaagtggtatatacatgcaagacaatattattcatccttaaaaaaacaggaaaatttgcaatatttgacaatatggctga

SEQ ID NO: 321521 - DNA, 570 bp, Homo sapiens
atccaaatgataaacagaggagaacaagagtcattatacttatatcagacaaaatagactttaagtcaaaaactgttataagagtgcatttataaaaataaatggacaatctaccagaaaatataataattataaatctaacaaatataaatacaagatatcaccttaagatcgggtacaaaacagggatgaccattcttgccaattctattcaacacagaactggaagtcctagccagagtaattaggcaagaaagaaaacctacatgcttacctcatgtaagctgctatggaaaacatggaggttcttttaaaaattaaaaatagaactaccgtatgatctagcaatcacacttctgggtatatacgcaaaagaattgaaaatagaatttcaaaaagatgtctatacttttatgttgattgtggcattgttcataatagtcaagwtatggaaacaaccttaaatgtccatgggcaaattaataaagaaaaagtggtatatacatgcaagacaatattattcatccttaaaaaaacaggaaaatttgcaatatttgacaatatggctga

SEQ ID NO: 321522 - DNA, 570 bp, Homo sapiens
atccaaatgataaacagaggagaacaagagtcattatacttatatcagacaaaatagactttaagtcaaaaactgttataagagtgcatttataaaaataaatggacaatctaccagaaaatataataattataaatctaacaaatataaatacaagatatcaccttaagatcgggtacaaaacagggatgaccattcttgccaattctattcaacacagaactggaagtcctagccagagtaattaggcaagaaagaaaacctacatgcttacctcatgtaagctgctatggaaaacatggaggttcttttaaaaattaaaaatagaactaccgtatgatctagcaatcacacttctgggtatatacgcaaaagaattgaaaatagaatttcaaaaagatgtctatacttttatgttgattgtggcattgttcataatagtcaagatatggaaacaacyttaaatgtccatgggcaaattaataaagaaaaagtggtatatacatgcaagacaatattattcatccttaaaaaaacaggaaaatttgcaatatttgacaatatggctga

SEQ ID NO: 321523 - DNA, 467 bp, Homo sapiens
  misc_feature (1)...(467): n = A,T,C or G
gtgtgaagctatgtatccaagaagttgttttaatttgtgttatggtttttttcagtctcacatggaaaaaaactacaacttgaacatagtattttataaatgtttctagattttatagggcattgacatttaaacctctaattagatatatgcatatctcaaaatatagtccactactggcatcaaaaaaattaagataaaataaaatcgaagtcttggaattattgttgctttgctttcttctttagtcatattataarcaagtacccccatcttncctaagagatagtttaatttttctctctcttcttttcttgttcccctagtttcccactttcaacttagtggtagtttaattgtttttctctctctttttctcaatcccccaattcctcacttcctacttatcccttgagaaatgaaaatatagccacttacctctccctaaccagacactccctacaagt

SEQ ID NO: 321524 - DNA, 467 bp, Homo sapiens
  misc_feature (1)...(467): n = A,T,C or G
gtgtgaagctatgtatccaagaagttgttttaatttgtgttatggtttttttcagtctcacatggaaaaaaactacaacttgaacatagtattttataaatgtttctagattttatagggcattgacatttaaacctctaattagatatatgcatatctcaaaatatagtccactactggcatcaaaaaaattaagataaaataaaatcgaagtcttggaattattgttgctttgctttcttctttagtcatattataagcaagtacccccatcttncctaagagatagtttaatttttctctctcttcttttcttgttcccctagtttcccactttcaacttagtggtagtttaattgtttttctctctctttttctcaatcccccaattcctcacttcctacttatcccttgagaaatgaaaatatagccayttacctctccctaaccagacactccctacaagt

SEQ ID NO: 321525 - DNA, 634 bp, Homo sapiens
agtccccaaatttaaaatttgaatacgatgatggaggagctatgcagcgatggattgaggttattcataactgattataaaagcagttattttattggtggggaaacactgacaagtcaacagattcatttcagccattttctctcctaaaacaatgacattctaataaaaaaaactaacatttacaccacccaatgaattatgccactgcaatatgcccttctacattttccaagaacttaagctgtgtcacacasgtgtctaaattagtaataaaattaaactggagaaactattactccaattttaaaagcagcacggattaaaaaagtaagaagggggcaaggcacggtgactcacgcctgtaatcccagaactctgggaggctgaggcaggcggatcacttgaggtcagttcaagaccagcctggccaacttagtgaaatctgatctctaccaaaaatacaaaaattagtcaggcgtggtggcgggcgcctgtagtcccagctactcaggaggctgaggcaggagaatcgcttgaatccgggagaggaggttgcagtgaaccgagatcgctccactgcactccagcctgtacgacagagcgaaactgtctcaaggaaaaaaaaaaaaaa

SEQ ID NO: 321526 - DNA, 509 bp, Homo sapiens
cctttcagctctgcctccgcagctggctgattttagtatacgaagctccctgtaagcccgcagcctatcgacttccacagtcccagactaaggcaccgaagccttactgttctctctggagtctaggtcaggtcctgaggtgaaggggtagggtgggggcgggcaggacgcaggtgcagccccgtggtcccggatctaactcacatctctgggaatgggaaccgragtcaccgcttaggtctcccccagcggttttcggttcaggtctctgtgctcctcacctggatatgggcgccctgggggcctggcttcctccgcagagaccagaagcgatctctgtgttccggattttccctttatctttcctctccccagtgtcctctctgtttcccaacctccccataccgaggaccccacaacccgccccgggatggcgcctggctgctcgcaccctaattcaggaccccaattggtgggagaggaaccgcggtcctcaagcttgcaggaca

SEQ ID NO: 321527 - DNA, 599 bp, Homo sapiens
gtaaatgctagttcctcaattatgtcttatttatttttgtcatatgtgattattccagtttctgtattcccaaaatactttgtttttatttcttaccaaattatattttaatttatccaattaaattttggtattctttgacagaatatgagcttctaaagagtagggtacatgtttgtatcattcttattggcccagtatctaggattttacatatataatttggctcaatgaatgtctattgaactaaygatatatttgtggacaagatagagaaatgagagctggataatattattcattaaataattggttctcaaccaattggatactcagaatcacctatgggatttaagagacatacttcagtcccattatccaaagattattattcagtaaatttagcaaagggtctccaggtatatgtatgttttaaaatgccatatgtcattttgatgcaccaccagtgttaagcacctctaagatagagtcatgaatgtacgtgctctttgataattgatgtcaactgggaggaaatatcttttgggatgtgaaaacatgcatgtgtcctgaaaaggatgtatgctgaactgctaaca

SEQ ID NO: 321528 - DNA, 606 bp, Homo sapiens
cctgtgaatcatcagatgtgtgttctgatatatttcacaattttggctgattgttgacattaattttggtgaaaagtccaacatgctgggaacattctcattttatttgatctgttttctctgaaatcctgtgccagctgtcatctcacattttagactccttagaggtaaagctaaagtagagttttaaacaccaagaaaatctaaatgtgcaaagtagcactttaaagtttcttacattaactttatcttaataaacaatatgcttttaataggagacactgattagtagtcactgagataacttaaatggtactctagtgtcatgaactacagctgccttgaaatgtaacaagtccatcaaaattattatatgcatcatcactgtctttatgaatatatatttattgaggaaccmctgtgtacctggtaccctactaggagcttgcagaacatttgctgagattattcgaaagatatttttcttcatgcaaattgggatttcatgtatattaggaactgaatcagaaacacatataccagtcactattggatagtaaaatatcaggataaaatgagagtagagaatgttattcatattttact

SEQ ID NO: 321529 - DNA, 596 bp, Homo sapiens
gattgctcctgtaggacttgggagacaccccaagtattgtgagtgtccaaaccatggaagtgggaaagagrgattgtccacctcagatcacacacccccactagggaacccgagggtctagattacaggagaagattctgaccttacctggatcggagtcaattgagagagccaagtgaaacacaggggtagaggaagcagcgggaaaagccctgtgggctcactggggcccctagcaagccatttctgccctgcctcacaggggtccttggggaggtaggaggcctgaggcactgggaaaaagccacagggagaaggaaacttccagctgagctttgtaacaatttgaagtgattgagaagtctcctgtccagagcttgggggagggcatgaacctggtgtgcagaccctacaggttgggaaagaatgaaagcccttcttgcttttgcagctggaagttgggtagcgtggggcaagttctcagccctgcttgcccactgcctggaaacagactcgggctgttgcagggcctggggggtggggggcacggtgggagtgagaccggccctttgggttgtgtgggagctgggtgaggc

SEQ ID NO: 321530 - DNA, 596 bp, Homo sapiens
gattgctcctgtaggacttgggagacaccccaagtattgtgagtgtccaaaccatggaagtgggaaagagggattgtccacctcagatcacacacccccactagggaacccgagggtctagattacaggagaagattctgaccttacctggatcggagtcaattgagagagccaagtgaaacacaggggtagaggaagcagcgggaaaagccctgtgggctcactggggcccctagcaagccatttctgccctgcctcacaggggtccttggggaggtaggaggcctgaggcactgggaaaargccacagggagaaggaaacttccagctgagctttgtaacaatttgaagtgattgagaagtctcctgtccagagcttgggggagggcatgaacctggtgtgcagaccctacaggttgggaaagaatgaaagcccttcttgcttttgcagctggaagttgggtagcgtggggcaagttctcagccctgcttgcccactgcctggaaacagactcgggctgttgcagggcctggggggtggggggcacggtgggagtgagaccggccctttgggttgtgtgggagctgggtgaggc

SEQ ID NO: 321531 - DNA, 614 bp, Homo sapiens
gagcctgtgaaactaatgcagtggaagaagtctactgtaatataagggatcttcaaaaacttcatggaaaatgcatattatagaaaaaactatgcttggattttaaaatatttatgcaccaaaactaacttgtactaactagttagaatatttttgaatagtacctagtttgaggcattaagaaggataatgcaatttgaaaagagaccgtattagagtaacatgaactctactaaaattgaagcaagaacaaacatgaaatttatggtgaaacttgggtggaagaatggtaaaattattgatgctttatgaaaagtttatggagacaatcccccaaagaaatcagcagtttacaaatagataactcatattaggaagggacaatgtaatgttgaacatgaagcctgcagcagcagaccatccacataaatttgccatccaactttacaaattttgtgaggaaaacactcatcttgctcatgccctaattgaagagaatcaaaaattaatagcagaaacaatagccagtaccacagacatctcacatgattcagctyacacaattctgagtgaaaaattaaagttgagcaaaccttccacttgatgggtgccaa

SEQ ID NO: 321532 - DNA, 612 bp, Homo sapiens
aatggcacaaaattaccaagtattattctcctgtgctacctgccccaagtcaayagcattccttgcttaagccagaagcctgacatcgttgcctgtaattcatcaatttccaaactgaggcaatacaggagcctcctccaaactaatcagaaaaagtcctgcttttaagcctgtattttcttttccaggaagcacattcacatctgccaggtgacacaagccagaaacttggtagtgattacagatttcttcctcttcctacctctgatctccattcagctctctcctttctctctctttctctctccgtaaaaccagagaattctcttttccgtaactcccaaatctgtctacatcatatccccacagccacgactctagaccagacctttaacatacttcccccaatgtcagtttccaaactacaccattgatatcagaaatacattttgaaggcaaaatgtgttatattattcactctatcattaaatgaaaagaaggattaagaggacaatcatattaaggaggaagaaatgtggagcactctctaattatattatacttcttgaaatgtgaatgtcatctttgactccttcccctcctcatgttcct

SEQ ID NO: 321533 - DNA, 621 bp, Homo sapiens
gtagctttctctcacgtggtgattcaggaacctagtttcctttgtaaggccttgaaatcctttgcatccggctggcagacagaggaactaagcagcgaaagcacaccaactttatcaagataaattattgccarggtgacatgcatcatttctgcccacattttattagtgaaaactagtcacatggtcacaatagaatgcaaaggttactatagggagatgtcaccattggctggacagctatctttaggtgacaactccacactatggaaatggaggagcataagtgtttgctgaatggtaagtcatctctgtcagtgtctttaaccatgcttctaaagtgattaaaggtctggatggagtgggatattataattaacattttatttttttctttaccaccttctagccatgacatactataatattcatcatctgaaattcatactttgacattcgaccatcctgtttcatgcatgaattgtttcatgtgcagattttttgtctctccaaacagattatacattcatcagggacatataatatgtagcacagaatagatgctaaatattactaaattcaattggatgctatcgcacttctacaaactccgtaagagct

SEQ ID NO: 321534 - DNA, 534 bp, Homo sapiens
atgatgccataatattacattaaaacagtttttatttttaattagattatttttaatattacagtatctctttacttctcaatatgctctttcccttgttctgctgttattttagttgctgttkttgttgttttgttttattttgttttggtattttttgtagtatgatgttaaaataaaaatatttgtttgagttttggctgaagccctaaaatatcagatgacacatcccaacaggtggaaacccatcatgtagaattgacaaaggtggttgaatacttctatgaagatattaggatatctcattttcagcctactaaaaaggtaggagagtttgataaaaaaaaaattggtgtttaggaggggattttaggaaagagctgttggtatgctctgagtaccactttctcaaagggtgaatagtgtgggatgcttgccccttatcacaagttgaagagtcttcaacagaatcatatgaagagtttaaaatacgtctctggtaacttgatagatagtggattgatgcatggctta

SEQ ID NO: 321535 - DNA, 562 bp, Homo sapiens
attacagtttcttatgtaatcactcactagataaattttcattttggcaagcatgaggctgtgtttaacagccagtaatgtaggtaaaatgaatcatttaagtaataacaacatagccactgacacttgtctgcctctctaagtagattactaasaggcaattaatttaaaagactgaaattttatttatttcacaatcagatgaaaacaccatgggtctaatgccaaggaatattcttggatttgacatttcagttctctatatttaaccaactagaattttccccactgttactcataaaaccttttttaaagaagtatttccctgagaaatatgcatttcttcataaaaatacaatatagtttggtaattctcaagatgaacatgatctttttgatacaatgtacctcttaaacaccaggtttacatgaaaaaatttacattaagcatgacagaatggaaacatacatgaaaactgagaagatgaaagacacaattcttaattcaagtgaatcagatgccatatgacaaaattcctagaagtgataccgcagtcctgtc

SEQ ID NO: 321536 - DNA, 508 bp, Homo sapiens
gaattattttgatattggtgctgttaaaattcctgattgcctttttcaaactccaaaacctgtcaataattggtatgtctgctatggagaactcctacacaatcaccttcactggaaaaacaagttgattttctattgagactaccgctcattttgaacatgtttagattcctttctttgctttgaaggaatctagctatgtagactcaaagaatggtttaaaaaagtaggcacaatattacatgtggartcaataaagctataagaagccccaagcattcactttttcttaaataaattgaagtatacatactaaggatattagtgttcctcaacaaagtttctttattgtatcacatccgtaaatgaaaaagtggttgctgaaaatataatcagtgagatatttgctttaaaaagtcaaaataaatgtccagaatattataatgggaacagagttaaaatcctcagaaggtgatttcaaaacatttgcattttattgcagagtagc

SEQ ID NO: 321537 - DNA, 575 bp, Homo sapiens
caaactattgcaaggacaaaaaaacaaacaccgcatgttctcactcacaggtgagaattgaagaatgagaacacatggacacaggaaggggaacatcacacaccagggcctgttgtagggtagggggaggtgggagggatagcattaggagatatacctaatgtaaatgatgagttaatgggtgcagcacaccaacatggcacatgtatacatatgtaacaaacctgcacgttgtgcacatgtaccctaaaacttagagtataataaaaaaattaaaaataaataaataaataggcatgtgtttctatgtctatttttctgcttactagctttgttatcatggaaataacactcaacctgagtttattatacatccatagagataataatacttaattcgcgggactgttgtgagaatcaagaaaaacggcatttaaggtacctgamaacatacaagacatatattattaagtaatggaacagggagggaactctaggtctgcctgactccaaaattcgcccttttcaccaccttattacattgacaatcaagtatatttttgcatcaaaattta

SEQ ID NO: 321538 - DNA, 580 bp, Homo sapiens
ttgtttcattgatcgtttatgttgttttctgtgtttcaatttcatttatttctcctctgattttactatttcttttcttctactaattttgggtttggtttgctcttgattttctggttctataaaatgcatcattaagttgtttatttgaaatttttctacttttttgatgtaggcactataaactttcctcttagtactgcatttgctgtatccagtcggttttagtacattatgtttataytatcatttgtttcaaaaaattttttaaattccttcttaatttcttcattgatccactggtcattcagaagactgttgtttaattaacaggtgtttctatagtttccgaaattcctcgttattgatttctaatttgattccattgcagtcagagaagataattgacgtaacttcaattattttgaatttcttaaggcttcttttatgacctatcatatgatctatccttgagaatgatctatgtgctgagcaaaacaatgtgtattctgcaaccattggaagaaatattctttaaatattttttagatccatttggtctatagtacatatgaagact

SEQ ID NO: 321539 - DNA, 560 bp, Homo sapiens
tggctaccactgatgtttattgaagtcccaagggctcctcagtcagattgtggtgaatgctgccagatctgagactccccttcagggtaatgggctctcctctggccaagggcaagtccagaaatgttgcccaagagccaaagcccgtaatcagggacaccaagaaactgtttggtgctctgccttactgtggccaagctggtacctaagctgcaggacaaaacctccttattcttcccttctccttttgttaagcaaaaggagtaccyccccatagctaccatagctgggaatgtgctgggtcattcctgaagtgtcacccaagacccatggtgagtacttcatgggtaccatgctgattatacagggcccaagggctctttagtctgcaggtgatgaatccttccaggactgggtctttcccttcaaaacaacgggttctcttctggcccaggatgtgtctagaactgtccagaagctaggtcctggaatggcagcctcagtactctgatgccctattctactgtggctgagttgatatccaggttccaagacaaagt

SEQ ID NO: 321540 - DNA, 364 bp, Homo sapiens
tctccctcccccaagaacacagaatctctctccatgctgcattgccactgctgtggggatgggggagggatggcatcagtgatttaagattgtctttcctacactcttcagtgcctctttcagtggtgtgaatttaaaacctggatttttggttcttatgacggtacatttttgtgtggatagttgtacagtttggtgctcctgcagagaagatgattggtggaggctctatttggccatcttgccatcaaggattcttctctaagattcatgagacttaaaagcaacgtttcacaarggtctcattgggtctctgctcaaatctgccttgataactgtgtaaaatatcaccaccactggttct

SEQ ID NO: 321541 - DNA, 558 bp, Homo sapiens
atatggaaacaatagacactgtggactactagaaggtggggggaggggtargctaaaaaaaactacctattgtgttctatgcttactaccagggttacaggatccatactccaaacccagcatcacaaaatattcccatgtacccccgtatctaaaataaaaattggaaaaataaagagaaatatcttattggaatcagggcttagtggctagttcaagttaactagaagacagagattaggatggctgctgccactttttattctttacccattctggttgtttttcagagatattttaaaaaaaaagatgggctgactgtgaagctgtcccttcttgggatgggaggctaggtttgtccttctctaatatttcaaggctgctacgtcatacacataaaagcaggaacagaatgataattgaacaattaataatacccatgataaaacaatgtccttaaaacacataattaaaacaactgaaccacaaaaaagtgcaactatacacagaaaatgtgcatgtacatgctaaacaggagcggagcaatcccataaacac

SEQ ID NO: 321542 - DNA, 591 bp, Homo sapiens
ccatatgctggtatttcttggctttcataaaataaaacaccatcagaattgcatcatcagcccttagctattcatccatacaagtgtaggtggataccaatgtgatatgaaaataataaaactgacccaacagcaattggacatgaactctgtggggttcttttagttgaagagaggagacaaattgagttatctctactctctcattcaggctatttagttaccaaggaatctatctcttttaaaaggagackggccaggttaagagcagaaagtaattgggtcctccaaacattttattgtctaaatcttgccttgaacaaatgcaaagtaaaacatgcaaatgagggtaattctgtatttatgacctagcactgaaaaaaacagatgtcaattcaaatgtaattaggaagaaaatcggtaagtttgtggatgattggttaaaaacataataccaaagagaaattgctttgtgtgaccgtaatatctaaaacagttaaaaacttgcatagtttatgttaacccacaagcctaggcatttgtctctatcacagatctcctgtttcaccgagcaaaattgactgacggccc

SEQ ID NO: 321543 - DNA, 570 bp, Homo sapiens
ttctgagaaccacactagcagtgaatttgccctgtcctctggggttattgctagagggtaaaattctatgtccccacaagttccactaaatcaataaattcttgtttatccagtcttatattctgataaccttgatcaaacaccttcaaagcctgatccaggtggacttttctgattcctgtaagtacatgctagctaattcttgcaattccttcattacataatttcttttattccttattaggcccaacatgttcccagataggttatyttggaatttaaccctggttatatatctttagccaggagagtggactggagcagctcttggggtatggggagtgaaaagataaatgctataatcttgcaggagagaggcctttgcagcatctcccagcacagtggtagtactagctcttacagaaaaagatgggacagctctgcaaggtctaagggcttgggagtctgcaaagtaaatgttctcaagggaatccatccatatgtcccccactacatttcaagatcctaggttttcttacttaggaccctaactttaccataataagtttg

SEQ ID NO: 321544 - DNA, 570 bp, Homo sapiens
ttctgagaaccacactagcagtgaatttgccctgtcctctggggttattgctagagggtaaaattctatgtccccacaagttccactaaatcaataaattcttgtttatccagtcttatattctgataaccttgatcaaacaccttcaaagcctgatccaggtggacttttctgattcctgtaagtacatgctagctaattcttgcaattccttcattacataatttcttttattccttattaggcccaacatgttcccagataggttattttggaatttaaccctggttatatatctttagccaggagagtggactggagcagctcttgggrtatggggagtgaaaagataaatgctataatcttgcaggagagaggcctttgcagcatctcccagcacagtggtagtactagctcttacagaaaaagatgggacagctctgcaaggtctaagggcttgggagtctgcaaagtaaatgttctcaagggaatccatccatatgtcccccactacatttcaagatcctaggttttcttacttaggaccctaactttaccataataagtttg

SEQ ID NO: 321545 - DNA, 540 bp, Homo sapiens
aagctgtaaatgtaggcaaggactagatcatgcaaatatgggtttgtattgcattttatttttattttattataagtaagctgtgcagagaatggatggagggtgtagcagtgaatggccaaataaaaacaggtaggattgtggagcagaatgccttgccagaaatacaatttcctatcttcctcactttaaagcaccttaggctatagtgagagtttagtctctatctaaaggaaataagaaaccaagagtttaaacaagatgaatgattcttgttatggcccaacagttcctctcatgtgtaaytttcaaacccatcctcattatggtcctccctcctctgaatacttcttggtgtacctatattctacataaaatgtgatacccagaacagactattacactaaaaatataagctgaccaattgcagagtagagtgggaccatggatttctttaaactacacactatatttttatcaacacaagctaagttttgatttgctttgttcagcagcctctaaaaattattttttctttca

SEQ ID NO: 321546 - DNA, 540 bp, Homo sapiens
aagctgtaaatgtaggcaaggactagatcatgcaaatatgggtttgtattgcattttatttttattttattataagtaagctgtgcagagaatggatggagggtgtagcagtgaatggccaaataaaaacaggtaggattgtggagcagaatgccttgccagaaatacaatttcctatcttcctcactttaaagcaccttaggctatagtgagagtttagtctctatctaaaggaaataagaaaccaagagtttaaacaagatgaatgattcttgttatggcccaacagttcctctcatgtgtaactttcaaacccatcctcattatggtcctccctcctctgaatacttcttggtgtacctatattctacataaaatgtgatacccagaacagactattacactaaaaatataagctgaccaattgcagagtagagtgrgaccatggatttctttaaactacacactatatttttatcaacacaagctaagttttgatttgctttgttcagcagcctctaaaaattattttttctttca

SEQ ID NO: 321547 - DNA, 601 bp, Homo sapiens
tctggaaaggtctgaagcattgaaatgatataagctgaagaagatcagcacacagaggttttacagagccacagtctttcccaaggatcggtgtacataaaaaagaaaaaatataaaaattatgcataaaagtggccaaaggtgaattcaagtcaaatggtgctacattttctatcatgctcaggattggccttgaatacagttaggtgctacttcacttttcccaaaaaaggatctaattagtatgtattactcatctcctttaatgctaaatggaccccacattctatattattctatcatgctagaattggatgaaagatttgtcatcatcattcattcactcatttattcatccatttattatttcacttctaaggtcatctatttctagaacaaaaggctaagcaaaccccctctgkacactcaagcaagtagaagtaggcttgtgggattagaggaattagaccttctggtttgcattataccttaaagctatcccctaacctgttcttaaattgctccaagctatgatttgataaaacaccaagggcacaatgttgaatggttggatttatcctatggcatagaaaattcataa

SEQ ID NO: 321548 - DNA, 498 bp, Homo sapiens
ggataaatttctggaaatatacaactctgctagattaaatcgggaagaaatagagactttctatatttctttttaatttggatataaaaatgacagaagcataagttgatttttgacagaaatttagttatgagcaagagttttttataatktaagataatccttgtaatttgtgtgcttagcttgtgatatattaaacgtctaagtttgtcaaatagagcacctgaactttacttataaaagaaaacgctttatttctagtcataaatattctttcatttatgaaattctgttttgttcatttattcacttactcatttgataatcaatgatgtagtggagatagcatgcattttggaattagacttgggctgaaattatagctccaaagtgtactaattgtgaaaattggacaaattagttaacattgttgaacctcatttaccttaatctcctattacttaattattttatataagcacatatttatgcttatat

SEQ ID NO: 321549 - DNA, 521 bp, Homo sapiens
atccttgtaatttgtgtgcttagcttgtgatatattaaaygtctaagtttgtcaaatagagcacctgaactttacttataaaagaaaacgctttatttctagtcataaatattctttcatttatgaaattctgttttgttcatttattcacttactcatttgataatcaatgatgtagtggagatagcatgcattttggaattagacttgggctgaaattatagctccaaagtgtactaattgtgaaaattggacaaattagttaacattgttgaacctcatttaccttaatctcctattacttaattattttatataagcacatatttatgcttatatactcaagcatttgttgagtacctgatatgtgcatatattggacaaactaaaacctcccagtttaagcagtcccaaagcctaccaaatgagttgtttcaaaagttcttattaactagtaatcaggtaatatgatggaacctcttctgggtttaatggggcacggtatccccagtttgtattgc

SEQ ID NO: 321550 - DNA, 561 bp, Homo sapiens
acagactggagacagcaaagtatgttttgtttactgttgaatccttaacatagtgcctggcacagaataggtgctcaataattataatactaattagctctagaaaattgacacagacctttcttatttcttctactacattccacgttattttatttttgtsctatgaaacaaagcttctttccattcactccctctacttttttttccaaaaagagccttttatttaaattgtctcagaactttgaaattgccctttttttgctgattatatcatgtcttcccatctttaaattgcattccagaagagccgtcttctcagaaaacaaacaatgaaatgataacatttgctgtgatattttttacctattatttttcaattatagagcatcagtgcagaatcagaatgtaagtttcataggccaaggatcttgcctgttttgtttatatcttttgtctacagtgctagaacagtacctgggacatcataggtacttagcaagtatctattaaatggatttgcctctgtctaccactgttggcctagagtaaagaagatcc

SEQ ID NO: 321551 - DNA, 622 bp, Homo sapiens
agatatatttctatgtcaacaaataaaatccacatcaacattataattaataaatagggctgggtaaaccataactgtgtcagccattgaccttctgttggttgtcttctgtgtatgtatgtatgtatgtatgtatggatgtatatatttctctttcttctgggctaagccagtcttacagtggctgacattggtttaattcctcacccatgccacgtgaaggatactggatggtactggtgtaaattaatgtaggaccccatagaaaagaaaaataattcaactttcttgtcagtaatgctacaagagctttattttatttgtgttttctcttttaaaattttttgattttttaattcatacataatagatgcacatattttggaygcacatgtgatgactacattcatataatttgtaaagatcaaatcagtataattgggataaacattcccttaaatatttatcttttctttattctagaaatatttgaattattctcttcgagttaatttgatgtatacagtaggttattgtaatctatactcatcctactgatctatcaaacactaggtcttatttcttctatcaaactgtatatttgaagggctttattttaaca

SEQ ID NO: 321552 - DNA, 577 bp, Homo sapiens
ccatttgatttactgtctgtttcatctatgcctaaagaaatgccatttaatcaaatagctagaggagtaagttcaaggaatctctaaaataatttcctctcaattgtattaaaacatatatttaaaagtcatatactctaatgtatatatagtattgatttatggtgctatagtggaaacgaaataaatgtccaaatatagggtattgggaaaataaattaccaatcagtcatacagtgtgaaacaatgtagacattagaggtggtataaaagcatatttattgatatgaaaatatggtcatatgaaattattaaaaagtgacaagtcagcttataaaccaatgcatgtatcatatttttagaaacacacacacccctaaaaaataatgttaatatctccatatagtgggtttataggcaattttttattatctcctttttgcttgtctgcattttctaactttttagatcaaaagaacgtgtatttctttttataataaagytttttttaaaaattagtaactgatacattcctttaagcagacaaccatgagtaatttaagaacaaggtactcat

SEQ ID NO: 321553 - DNA, 559 bp, Homo sapiens
tatgttaaaaatcctgtatcagccaagcaagtatagtatgaccttggataaatcatttcttttatctgatcctcartgtctacttcatcaaaacactgataataggatttcctttatagtgttggtgtgaggattacgttaaatatgtgtaaagtgcctcacacaatgtttggtacgtgtaagcactgattaaatggcagttccatttttacttgttttagttggaatagaggtaggtataggaggatagtgagagatatagttgtggtaggccttattctttagtccatggggagccattaaagtttatgaaggaggaaataacatatgcacagtgccatttcatgataattaatgttttcatcatttagaatgtggtttggagaggaggaaaaatggagacagaataattgttactttaggcagaaggtgaaagtgatctgttccagggtagtgtggttggattggaaaggaagccataggcaagaagatatcaaaatgaaagaattgctgcatcttggagaatggttatagagggaagaaaatgagggacaggact

SEQ ID NO: 321554 - DNA, 585 bp, Homo sapiens
ttctttctcactccctgaaaaacgtttttcttttarcaaggcagttttttactcatgatatctagtgatgaaaaaggagattactattagctccttctaaaaggagatataagatatttccttttttttttttttaataaagaagcaatgacttttagtatacgtcaacataattatcaaggtagcaacctttctgtttcttataaactgtaacctgtattccctcaagccactgtcaagtactggagaataataagtgtttcaaatcaagttggtagttttatgtgaatgaatgtcatttagaagataatttcccctaaaaatcagcacatcctcagagctattgtatgacctggttgttttatggtgttaatgagctttctaagggtaacattggggtaacaaaaattgtggagttttctttctgtgaattttaaattttatcataaagctcaacaatctttcatgtacaatgttcaacttaatattctttggttcagtccagataattattcttatatatctggctttaggtacatgttaatacatgtatgtaaaatttttttgtctgtattcaaaaactag

SEQ ID NO: 321555 - DNA, 585 bp, Homo sapiens
ttctttctcactccctgaaaaacgtttttcttttagcaaggcagttttttactcatgatatctagtgatgaaaaaggagattactattagctccttctaaaaggagatataagatatttccttttttttttttttaataaagaagcaatgacttttagtatacgtcaacataattatcaaggtagcaacctttctgtttcttataaactgtaacctgtattccctcaagccactgtcaagtactggagaataataagtgtttcaaatcaagttggtagttttatgtgaatgaatgtcatttagaagataatttcccctaaaaatcagcacatcctcagagctattgtatgacctggttgttttatggtgttaatragctttctaagggtaacattggggtaacaaaaattgtggagttttctttctgtgaattttaaattttatcataaagctcaacaatctttcatgtacaatgttcaacttaatattctttggttcagtccagataattattcttatatatctggctttaggtacatgttaatacatgtatgtaaaatttttttgtctgtattcaaaaactag

SEQ ID NO: 321556 - DNA, 557 bp, Homo sapiens
gagagaggggaagaagaaagagaggaaggaaggaaggagacacaaaaggaaagtattaattgcctgaataatattgtgtagcttattaggttttaaataacataaagaagagaaaggaagatgaaacaactgagaacaattccttatgtgtgcatagcattttataagaccagtgctctaacccttgaactatggagccaagtgcatagtattttatagttggtattgtcattcattcattcattgatttattcatctactcagcaaacattggtatgtatgaagcactagactggagttacaaaaatgaatcaaatttgtctcaaggagtcaaagcccaggctgacgtttagagtttagggagggatgacaggcatrgacataaacaattataaaacaatgaattaatgttgtcagttattagttttttttaaagcagtcaaaatctgtgtcaagtaacaggagcacagaggaaagcaaaaatataactgctcctttaaggaagttagaggattaaatgcatgcaaatgtttggggaagtttcagagagatggcac

SEQ ID NO: 321557 - DNA, 508 bp, Homo sapiens
atttccataaagagttatattttttctgttgtgaaaaagataattgagtagcaaagaacattatgccttcttttctcattcatggaggccttggttgttcaggccaaattcccagtcaaggtactgcagttggagatagcatgtctgaattgatgacaattttcaccaatcatgagtaggtggaatcataatcataaatcataatcataatygacaatcatggtatgtagaaatagttcacagattattggtcttgtaaattgtataatcagagcaaacacaggcactttgcttaattaagtactagtggggtgcattgtgtattcagaatatgagtggaagaaggaagtactacaatgagagactaattggtggtgatagtagaaagagcttcaagtggaactgggagagaagacgtgagaaaaagatgcaaagagaggctaaaaaaacagagctgcaggaacttaagttgaaatctttccttgtcaaagaagaatcatggatggga

SEQ ID NO: 321558 - DNA, 583 bp, Homo sapiens
acaggccgagaaatggcagtgtgattatttkctgggaattgtaaattagagcaacgacagatagccagctgatctagtttcttcccaaagctagtcaggccacagatggcttaccaatctgtctttctttcagttaaccattcgctgtaattttcaggatattcctcttcctacttccatggatgtcctttagcagcagattccgtctcaaacagagagaagtacagttgtgcatgacttctgacaatttctgggcatgttactgatggacttcatttttttaagataatactttctgaggcattattcttcacagaaaaacatattttttaaataaattgaacaattagctcaagatgaaaagttgcagaatatgagagaaatacatatggtaaacatgagtgatcaaaagtagaacctagttttaagtagatatataatcggtatggtgtgttatttcagaataaacttatataggcaaaagactatgaaataaaaaaatttggatggaagaggtattatatagagtatgctgatgaaaagagaaagttgaaagaccagaggtcctaaaaactcacctgtc

SEQ ID NO: 321559 - DNA, 567 bp, Homo sapiens
aaaaaccgaatatcccacaatctaaactagaatgaaactatctgtgaataccctttgtgatgtgtggattcatctcacagagttaaaactttcttttgatgcagcaggttggaaacactctttttgtagaatttgcagtgagccatttgggagcccatgtggcctgtaggaaaaaacgtatatttcatgaaaaaaaaagaaagaaaaagaaaaactataaaaaaagtatctgtgaaaatgctttgtgatgtgtggattcatctcatagagttaaacctttcttttgattcagcagtggagaacactctttttgtagaatctgtgaacagtcatttgggagccaattgaggtctatagtgaaaaatagaatatcccttgatacaaactagaaagaagctatctgtgaaaatgctttgtgatgtttggattcagctcacagagttaaatctttcctttgattcagcaggttggaaacrctctttttatagaatcaacgaagggatatttgggagctcattgaagcatatagcaaaaaacggaatatcccatgataaaactggaaagaag

SEQ ID NO: 321560 - DNA, 578 bp, Homo sapiens
aaaaccaaatatcccatgataaaawctagaaggaacctatttgtgaaaatgctttccaatgtgtggataaagcaaacagaattaaatcttttttgatttagcaggttggaaaaactctttttgtagaatctgcacagagacattttggagtccattgatgcctgtagtaaaaaaccagtatcccgccaaaaaaactagaaagaagctatctgtgaaaattctttgcaatgtgtggattcatcttacagagttaaatatttcttttgattcagcaggttggaaacactcttttcatggaatctgtgaagggacatttgggagcccattgaggtaattcatgaaaaattgaatatcttgtgttaaaaactaaaaataagccatctgtgaaaatgctttgcaatgtgtagattcatcttacagagttaaacctttcttttgattcaaaaggttggaaaccctctttttgtagaatctgtaaaggatcattttggtgcccattgaggcctatactgaagaatcaaatatcccatgctaaaaaccagaaggaagctatctgtgaaaacactttacgatatgtg

SEQ ID NO: 321561 - DNA, 609 bp, Homo sapiens
tagcttccttctagtttttatagtgagatatctattttcaccatatgacacaatgggctcccaaatgtccttgcacagattctacagaaagaatgtttccaatctgctgaattgaatgaaaggttttaactctgtgagatgaatccaaacgtcccaaacccttttggcaaatagcttctttttagtttttatctcaggatattggttttccactataggcctcaatgggcttccaaatgtccctgcaaagattctacagaataaaygttaccaatctgctggatcaaaagaaaggtttaaccctgtgagatgaatccacacatcacaaagcattttcacagatagattctttctcatttttatcacgggatattggtttttcactatagtcctctgttgcgggaagtcggggacctcaaacggaggaaccggctgaagccatggcagaagaatgtggattgtgaagatttcacggacatttattagtttcccaaattaatacttttataatttcttatgcctgtctttactgtaatctctaaacataaactgtgaagatttcatggacacttatcacttcgccaataaataaccttgtgatttcctatg

SEQ ID NO: 321562 - DNA, 606 bp, Homo sapiens
cactatacctgcgcaaaaattctttctgaaaaatgttatatcagtttacatatcaaaagataggccatagaagataaggaagatgttttaaagaaaaaatayctgaataaccatagtaatggcttatgtcatgatttgcaaaaaatttctcagatattatcttattttgtaactacttatttgacttagaagatagtaaaatataagaaaacataatctgaacatttaaaaactactaatgtgataaatacatactctcatctttgaggcagatgaagagaaagtttaaaaataaaatgtcattttggttactagatctaattataataatatatttaaaagctatagtcctcccatgatttattagtgtttttcaaaaggtccacttttcgattagatatctcattatctttcttttaatttacccttgtgctattaagacacaaacaatagccaactcagttaatctctttcactctctcttctcactcttgtattcttccaagtctaatagaattgaacacttgaagttgttgttgttgctgtttcctcctctgtccctttctgctatcctaacaatatgcatttgaccttaggccactcttg

SEQ ID NO: 321563 - DNA, 614 bp, Homo sapiens
tgtcactgcacagattctaaagagtggttccaacctgctgagtcaacacaagggtttaactctgtgagatgaatccacatgccacaaagcattttcacagataccctgattaaatttttcttgcaggatattgatttttctttataggcytcaatgggcttcaaaatatccttgtgcagctacagaaagagtgtttccaacctgcttaaccaaaagaaagaattaaatctgtgagatgaatccacgcattgccgcaaagcattttcactgatagtttctttctccttttcattgtgggatattgctttttcagtacaggcctctatgggctcctaatgtccctgaacagattctacagaaagagtatttcaatctgctgaaacaaaataaaggtttaactctgtgagattaatccagatattgcaaagaattttcacagacagcttctttctagtttttatcgcaggatatctgttttcactgtaagactcaatgagctcacaaatgtccttgtgcagattcgacagaaaggatgttccaaacctggtgaatcaaaagataggcttaactctgtgagatgaatccacacatctcacagcattttcacagatagc

SEQ ID NO: 321564 - DNA, 614 bp, Homo sapiens
tgtcactgcacagattctaaagagtggttccaacctgctgagtcaacacaagggtttaactctgtgagatgaatccacatgccacaaagcattttcacagataccctgattaaatttttcttgcaggatattgatttttctttataggcttcaatgggcttcaaaatatccttgtgcagctacagaaagagtgtttccaacctgcttaaycaaaagaaagaattaaatctgtgagatgaatccacgcattgccgcaaagcattttcactgatagtttctttctccttttcattgtgggatattgctttttcagtacaggcctctatgggctcctaatgtccctgaacagattctacagaaagagtatttcaatctgctgaaacaaaataaaggtttaactctgtgagattaatccagatattgcaaagaattttcacagacagcttctttctagtttttatcgcaggatatctgttttcactgtaagactcaatgagctcacaaatgtccttgtgcagattcgacagaaaggatgttccaaacctggtgaatcaaaagataggcttaactctgtgagatgaatccacacatctcacagcattttcacagatagc

SEQ ID NO: 321565 - DNA, 589 bp, Homo sapiens
ggaatgaaaaggaaaggaatgaacgtgtatgtccatttaaatatttacagtgtaaaccaaaataatgtttcccagtgttgaagaggtgacacaggattctcttggtgcaccttcaccaaccagaaatctccacakctggtggcacttctcccggacttggctcaggcccactgggcttgctctgcccacttgtccccatgggctgcactcagctcatgctactggcccagatcccatgcctgccatggctctgtgctcagcccacagctggtccaggagtgataagactggcttccaccttgggtgccagtgtctggatgaggagaatgtagtggtgcccacaaactgggaggtgacagcaaccgtagagccccaagcggtgttatagcttttgctcagggcctcccaaggtctaagcctccaggaagtgttacaactctcattcattcctgccgcccacagcttcagtgaatgaggacgtgtcacagctcatttggttctgctgcctacagcttggcaaacaaaggcatgtggtgcccaatggctttttctcccttgttgctcagcaagtggaagggaggctttcagt

SEQ ID NO: 321566 - DNA, 614 bp, Homo sapiens
tgtcactgcacagattctaaagagtggttccaacctgctgagtcaacacaagggtttaactctgtgagatgaatccacatgccacaaagcattttcacagataccctgattaaatttttcttgcaggatattgatttttctttataggcttcaatgggcttcaaaatatccttgtgcagctacagaaagagtgtttccaacctgcttaaccaaaagaaagaattaaatctgtgagatgaatccacgcattgccgcaaagcattttcactgatagtttctttctccttttcattgtgggatattgstttttcagtacaggcctctatgggctcctaatgtccctgaacagattctacagaaagagtatttcaatctgctgaaacaaaataaaggtttaactctgtgagattaatccagatattgcaaagaattttcacagacagcttctttctagtttttatcgcaggatatctgttttcactgtaagactcaatgagctcacaaatgtccttgtgcagattcgacagaaaggatgttccaaacctggtgaatcaaaagataggcttaactctgtgagatgaatccacacatctcacagcattttcacagatagc

SEQ ID NO: 321567 - DNA, 616 bp, Homo sapiens
ataacttaaatggaaagtttcaacaattatcaagtctattgttctctaagytatggattttaaatttaggttttaagcatattttattcagtctgatttccctcttcatttccacctatgttcaaaagcaaattgttttctaattgtctatagaggatcagggctccctcagtgcatcttcaattatttggaatttattttatatttgttctctaagaatgtctatatattcactgaaaggttgaaaaagaacacatagtgcttatataatgtgtatgacctgcttggatgtgctccttgataacatgtaatgtatcatcttctttatgtaccctatactatctagtacaattcttcgctcataatattatccaacatatatgtatgaatttaaaattgattcaaatcatttttgaatgcctactgtggcaatatattgaatcagtgactaatgtaatccaaatattgtcctagttacaatggctcatttttttcttgcattatttagtaaaatgagaaattcaaattaacaagaacatttaaaatttataccattcatcaagacacgttacagctgttttgagctttactagttaggttcttaatgctaaggacc

SEQ ID NO: 321568 - DNA, 616 bp, Homo sapiens
ataacttaaatggaaagtttcaacaattatcaagtctattgttctctaagctatggattttaaatttaggttttaagcatattttattcagtctgatttccctcttcatttccacctatgttcaaaagcaaattgttttctaattgtctatagaggatcagggctccctcagtgcatcttcaattatttggaatttattttatatttgttctctaagaatgtctayatattcactgaaaggttgaaaaagaacacatagtgcttatataatgtgtatgacctgcttggatgtgctccttgataacatgtaatgtatcatcttctttatgtaccctatactatctagtacaattcttcgctcataatattatccaacatatatgtatgaatttaaaattgattcaaatcatttttgaatgcctactgtggcaatatattgaatcagtgactaatgtaatccaaatattgtcctagttacaatggctcatttttttcttgcattatttagtaaaatgagaaattcaaattaacaagaacatttaaaatttataccattcatcaagacacgttacagctgttttgagctttactagttaggttcttaatgctaaggacc

SEQ ID NO: 321569 - DNA, 570 bp, Homo sapiens
tacaatggctcatttttttcttgcattatttagtaaaatgagaaattcaaattaacaagaacatttaaaatttataccattcatcaagacacgttacagctgttttgagctttactagttaggttcttaatgctaaggacctaactaactgttaactattattgaacaaatcgacaatttattatgatgctytttgtagagttaaaaaatacattttttaatttaaaacaataatacaagaaaataatgttttattgtttaacagtgttgtatctccttttgtaacaatacattttttttcatgaattgtctgacacttgaatgataaacaggtcagataatgttttctttgttcccaacaatttgaagtaatttgaaaatattgatgtcataattccataaagtaaatacctttttaagctaaattgatttgtctctacttaccaaattatatacttaatataatttgtattttcttctttttctggtgaggtccaatttatagactgcaagataagccaggtctctgaataattttcagtttctagctcaaaataaataagcctactc

SEQ ID NO: 321570 - DNA, 560 bp, Homo sapiens
atcaccagctaaattattttcttttttctttggctatttaagttcaaaattaaatgctctgaaaagtctaagcaggattgaaattgtacaattcctaagcaaccatgcttcatttatgtttcatatacagccaatgctcaaacttttcttttctttaagaaacttgaaaacattgaaaaatagcaaataaaaatatagatttgtgaataaaaatggattttgtgaattttccaagggtttaaacaaattggatttttcactagattaaatttgataataaaatacaactcttggtcaaagtttygattcttaaaaatatctttcagatctctctggagacagtcaccttgaactattttgccctttcaagtaatacctaaaagactgaccttctgttagatatgtatgtggtattccacctaccttgttacatatctctagcctcctgcgcttcttaaaataattctatatacaaatggtccccagtttatgatggttcaacttgtggtttttcaaatttgcaaagattttatctggatgtaaccccattgtataagtca

SEQ ID NO: 321571 - DNA, 560 bp, Homo sapiens
atcaccagctaaattattttcttttttctttggctatttaagttcaaaattaaatgctctgaaaagtctaagcaggattgaaattgtacaattcctaagcaaccatgcttcatttatgtttcatatacagccaatgctcaaacttttcttttctttaagaaacttgaaaacattgaaaaatagcaaataaaaatatagatttgtgaataaaaatggattttgtgaattttccaagggtttaaacaaattggatttttcactagattaaatttgataataaaatacaactcttggtcaaagtttcgattcttaaaaatatctttcagatctctctggagacagtcaccttgaactattttgccctttcaagtaatacctaaaagactgaccttctgttagatatgtatgtggtattccacctaccttgttacatatctctagcctcctgcgcttcttaarataattctatatacaaatggtccccagtttatgatggttcaacttgtggtttttcaaatttgcaaagattttatctggatgtaaccccattgtataagtca

SEQ ID NO: 321572 - DNA, 560 bp, Homo sapiens
atcaccagctaaattattttcttttttctttggctatttaagttcaaaattaaatgctctgaaaagtctaagcaggattgaaattgtacaattcctaagcaaccatgcttcatttatgtttcatatacagccaatgctcaaacttttcttttctttaagaaacttgaaaacattgaaaaatagcaaataaaaatatagatttgtgaataaaaatggattttgtgaattttccaagggtttaaacaaattggatttttcactagattaaatttgataataaaatacaactcttggtcaaagtttcgattcttaaaaatatctttcagatctctctggagacagtcaccttgaactattttgccctttcaagtaatacctaaaagactgaccttctgttagatatgtatgtggtattccacctaccttgttacatatctctagcctcctgcgcttcttaaaatmattctatatacaaatggtccccagtttatgatggttcaacttgtggtttttcaaatttgcaaagattttatctggatgtaaccccattgtataagtca

SEQ ID NO: 321573 - DNA, 621 bp, Homo sapiens
gccctcaaccttatctagaatattgtacaatagaagtaaaagtgaaccatataagtgagccaaatatacaattttacattttgtaggaacatcattaaataaggtaaaaacaaagttgaattaattttaatgatatattttacttaatatatccaaaatataatttcagcatataatcaatataaaatattaacaagatgttttatatttaaaaatctaattcttgaaaatctgttttttgttttgttttgtttattcccttgcagcacatatcaattctaattggccacagtcaaagtgcttgaattgcctcataaagytaatagacaccacactggacagtgtagatagagaatgacatctggacatggaacgtgcttgttaaagtgatgaattattttgtgtttgtatgtatgtgaatgcacattcatatgaagtaaagtaaaacattaaaacatttaatacgatgttacaataaacagatacaatcaaattaatagccatagaaagggaatgtattaggaaaagatagaacttgtgtttgtatagataagtatacagaatagctgattaaagacacatgaaagtgaataaatgagccaatgtttaagaagtgagaac

SEQ ID NO: 321574 - DNA, 525 bp, Homo sapiens
ccttttctacagaatctcaacagcatctgttattttttgacgtttttaataatagccattctgactgatgtgagatgttatctcaatgtggttttgatttacatctctctaatgattaaaaacccaactcaagtgatgttgaatatgttttcacaggtttgttggccccatatatgtcctcctttaagaagtctttgttcatttcctttgcccactttttaatgaggttttttttcttmtaaatttgtttaagtttcttatagatgctggatattagacctttgtcaggtgcgtacttagaaaatattttctcttactctgtgagttgtctgtttaccccattgatagtttcgtttgcagtgaaaaagctctttagtataattaggtcccctttgtaaatttttgtttctcttgcaattaattttggcacatccatcataaaatctttgccagggccaatgtgcagaatagcatttcctaggtttacttcaagggattttatagttttatgttttacatttaagt

SEQ ID NO: 321575 - DNA, 525 bp, Homo sapiens
ccttttctacagaatctcaacagcatctgttattttttgacgtttttaataatagccattctgactgatgtgagatgttatctcaatgtggttttgatttacatctctctaatgattaaaaacccaactcaagtgatgttgaatatgttttcacaggtttgttggccccatatatgtcctcctttaagaagtctttgttcatttcctttgcccactttttaatgaggttttttttcttataaatttgtttaagtttcttatagatgctggatattagacctttgtcaggtgcgtacttagaaaatattttctcttactctgtgagttgtctgtttaccccattgatagtttcgtttgcagtgaaaaagctctttagtataattaggtcccctttgtaaatttttgtttstcttgcaattaattttggcacatccatcataaaatctttgccagggccaatgtgcagaatagcatttcctaggtttacttcaagggattttatagttttatgttttacatttaagt

SEQ ID NO: 321576 - DNA, 543 bp, Homo sapiens
tgggtttgtcatagatagctgttattattttgagatatgttcgtgtagtgtttagtttgttgaggttttctaacatgaagaaatattaaattttattgaaagcctttactgcatctattgagattatcatctggtgtttgttattggttctgtttatgtgatgaattgcatttattgatttgcatatgttgaaccaaccttgcatcctggggataaaaygcacttgactgtggtgtattagcttctcaatgtgctgctagattttgtttgctagtattttgttgaggatttttgcaactatattcatcaatgatattggcctgaagttttcttttccttttttttttttttcatctgccaggttttggtatcaggatgatgctggcctcatagaacgagttggggtaagtccatcttgcacaattttttcaaatactttcagtaggaagggtatcaactcttctttggtgtcaaatataatttggctgtgaatctatatggtcctggacttttacagaatgataggctttttattactgattc

SEQ ID NO: 321577 - DNA, 618 bp, Homo sapiens
cctcaacaaaacactagtaaactgaattcagaggcatatcaaaaagttaataacaccacaatcaagtaagctttattcctgggatgcaaggctggttcaatatatgcaaatgtgatttgacacataaacagaattaaatacaaaactacatgatcacttccatagatgctgaaaagtgtttctgtaaaatcccatattccctcatgataaaaaaccctcaacagattaggcatttgaaggaacatatctcaaaataatgagggccatctgtgacaaacccacaaccaacatgatactgaatgggcaaaagctagaaccattctccttgagaactggaacaagacaagtatgcccactctcatcactccatttcaatatagtactaaaaacccttgccagaggaatcaggcaagagaaagaaatgaaaggcatccaaatagaaaataaagaagtcaaaacctttctcttctctgataygcttctataactagaaaatcctaaagactccaccaaaagtctcctaaaattgataaacaacttcagtaaaattccaggatacaagatcagtgtataaaaatcagcaacatttctatacaccaataacattcaacatgagaa

SEQ ID NO: 321578 - DNA, 608 bp, Homo sapiens
tttttatttacatatttttaaattgccaaataaaattatatgtatttaccatgtacaacatattgttgtgaagtatgtatatattgtggaataactaaatctagctaattaacattatgttttaccccagagtgatcacttttgtgataagaacactttacatcctttttcctagcatttttcaagaatacaacatgctgttaactatagtcatcacatgtacaatagattacttgaacttattcttcctatctaactgaaattttgtattctttgatgaacatctcgccaattcacccactaccaaccaccctgccccagctaaccaccattctactttctgtttgtactatcatcttatagttgtctattttcttttagttttgtcaagttttactttctatattttgaagcgatrttactgactctactagtttagaattgtttagaatttagaatcttctcgatggataggccaggttattattaagagatatttgtctatctttaatgatgcttcttgtcttaaagtatactttttatactattagtattaaaaaacacatattttgttagtatatccatggtatacattacattcattattt

SEQ ID NO: 321579 - DNA, 580 bp, Homo sapiens
gcactactctaatgctcagtgatactgagttttttacatatgcttgttgcatgcatgtttgttgtcttttgaaaaatatctgttgatgtttttttgtccacttttgaatggggttttttctcttgtaaatttatttaagttccttatagatactggatattagacctttgtcagatgcaaagatttcaaatattttctcccattctgtgtattgtccatttaatctgttgatagtttatcttgttgtgtagaagttacatttaactatctatatctgcatgtatatatcttctaaaatctaatattgcaatatattgtgtctatgagtgtatatattttgcaaattaattgtaacagtatcctatctagaataygtgtttagaataacgtttaaatattttgataaaaattgtgaggcatttttgacgctagtgaggcagtgtaccagaagggggttgttaaaaacagcttcatgaagatgtgaatatcttgggataggtttaaacctaaaaattgctttaaaagaacagtgactgttatacaagaaaaaggagaataaaactgataagaatcaaaggct

SEQ ID NO: 321580 - DNA, 551 bp, Homo sapiens
tgtgaaaatgctttgtgatgtgtggtttaatctcacagagtaaaacgttttcttgatttagcaaattgaaaacactcttttgtaggatctttacagggacatgggggaacccattgagggctatattgaaaaaccaatacccatgataaacactaaagagaatatatttgtgaaaacgatttgtgatgtggggattcatctgacagagttaattttttttttgattcagcaggttgaaaacactctttctgtagaatcagcycagggacatttaggagcccattgaggcctacagtgtaaacatatatcctgcaataaaaactaaaaagaaagtatctgtcaaaatgctttgcagtgtgtggattcatctcacagagttaaaactttctttaattcagcaggttggaaacactgtttctgcagaatctgtacatggacattttggatcacatagtggcctatagggaatacaggtatcctgcaataaaaacaagaaggaagctatctgtcaaaatgctttgtgatgtgtgtattcatctcacagaaacaaa

SEQ ID NO: 321581 - DNA, 563 bp, Homo sapiens
cttaaatatctgtaacactgcatctcagaaccgcacttatctttgttcactaacatacagccatgataatcttttgtatatcttactggtcaagcatttttttccctttgagtatcactcgtcctyactgttacgcaaatatagaaggcaaaactttgaacgggtacctcctctttgtaattcatgcacttgcagatattgattaaatttaggacatccacacactgtttatttgctattatattcccccagttttgttattcttgtggtattcaatgactttacatgaactcttaatttttgttgttgttagttgtcaatctcctttcagtaaaaactatcccaattcattttctcataatcacagaaactttgagcattctggcacagaagaggaactataaaatactttatgaataaaggaataaataaattaccaccttttacttttttatttggctaatattcctaaaaaaccaagttatgttgttaaataaaatagtgtatattgcttcaaagagaataaaatacctatgaatccaacttacaagggatgtgaagga

SEQ ID NO: 321582 - DNA, 563 bp, Homo sapiens
cttaaatatctgtaacactgcatctcagaaccgcacttatctttgttcactaacatacagccatgataatcttttgtatatcttactggtcaagcatttttttccctttgagtatcactcgtccttactgttacgcaaatatagaaggcaaaactttgaacgggtacctcctctttgtaattcatgcacttgcagatattgattaaatttaggacatccacacactgtttatttgctattatattcccccagttttgttattcttgtggtattcaatgactttacatgaactcttaatttttgttgttgttagttgtcaatctcctttcagtaaaaactatcccaattcattttctcataatcacagaaactttgagcattctggcacagaagaggaactataaaatactttatgaataaaggaataaataaattaccaccttttacttttttatttggctaatattcctaaaaaaccaagttatgttrttaaataaaatagtgtatattgcttcaaagagaataaaatacctatgaatccaacttacaagggatgtgaagga

SEQ ID NO: 321583 - DNA, 580 bp, Homo sapiens
ttaaatataagtttaaagaatactgtaacctattttcttcatacagagctgattaaggttctattaacagaattcaaggctttacaatatgactagctggaccgtaatctgtcccgtttctcacagctctgcgtatacaatgaaaacagattttgtaaaaggcatcctttaccctctttaagaagagttttgtaggagaacctcaaaagtaccactttctttttaaagttgatgttaagtattcttgaaacttttagtgctcatttttcatagaattgttagtaaaaatcattcagccatattgacacattaaatagatacctataattcagttatttctcaacratgttctttaattaattgtgttcttaataatttttaagctgatattgttttggcaataaatgttgtggtttgttatttttgtatatgcctactcgttctactagtgtaagttaactttattaaacatatcatttatttggaaaagatctgtttaccaagactaaaaatatcaataataaacataatatggcactttaccaattgtaataaattaaaacatttagcttatgaagta

SEQ ID NO: 321584 - DNA, 591 bp, Homo sapiens
gcaaacataaaataagagaagatagcatgagaataaaaaaaaaaaccatacctatctttccctgctgtaggtttccaagattaagtcattamagtagctacagaaaaaaggtgaaagcttaaatttaattgaaagttctattcagattgtgctttacttttaaatctgaaaattagctccttagtaactgaaaagttaaagatctgactgaaatatatagaacagaggggcaagcatttgaaagagaatgtaagcaaaatatatattttaaacctattttgtaattcaacttcagattatttttaaatgggtataatatacataagttggtgagcataaatgccaaggatttactgtacgggctttaccatgagagcctatgtgaatctgactacccaaaagaactataaatatacttttttacttatctgtgaaaaaatcccacatagttgatggtcttcttctgttatattaaggtgagaggctgagtgctctttaggtaagctgtcacataccaccgctacgattttcttcaggcaatacacttctctaaatgtttggtaagctttaatgtaatttgaatttaactaa

SEQ ID NO: 321585 - DNA, 591 bp, Homo sapiens
gcaaacataaaataagagaagatagcatgagaataaaaaaaaaaaccatacctatctttccctgctgtaggtttccaagattaagtcattaaagtagctacagaaaaaaggtgaaagcttaaatttaattgaaagttctattcagattgtgctttacttttaaatctgaaaattagctccttagtaactgaaaagttaaagatctgactgaaatatatagaacagaggggcaagcatttgaaagagaatgtaagcaaaatatatattttaaacctattttgtaattcaacttsagattatttttaaatgggtataatatacataagttggtgagcataaatgccaaggatttactgtacgggctttaccatgagagcctatgtgaatctgactacccaaaagaactataaatatacttttttacttatctgtgaaaaaatcccacatagttgatggtcttcttctgttatattaaggtgagaggctgagtgctctttaggtaagctgtcacataccaccgctacgattttcttcaggcaatacacttctctaaatgtttggtaagctttaatgtaatttgaatttaactaa

SEQ ID NO: 321586 - DNA, 591 bp, Homo sapiens
gcaaacataaaataagagaagatagcatgagaataaaaaaaaaaaccatacctatctttccctgctgtaggtttccaagattaagtcattaaagtagctacagaaaaaaggtgaaagcttaaatttaattgaaagttctattcagattgtgctttacttttaaatctgaaaattagctccttagtaactgaaaagttaaagatctgactgaaatatatagaacagaggggcaagcatttgaaagagaatgtaagcaaaatatatattttaaacctattttgtaattcaacttcagattatttttaaatgggtawaatatacataagttggtgagcataaatgccaaggatttactgtacgggctttaccatgagagcctatgtgaatctgactacccaaaagaactataaatatacttttttacttatctgtgaaaaaatcccacatagttgatggtcttcttctgttatattaaggtgagaggctgagtgctctttaggtaagctgtcacataccaccgctacgattttcttcaggcaatacacttctctaaatgtttggtaagctttaatgtaatttgaatttaactaa

SEQ ID NO: 321587 - DNA, 634 bp, Homo sapiens
gtcttgctccttattctcctaccagcaataaataaaaattccagttgttcattatccttgctcatattcatatcttcaaaggaagaaccttcaggtaaatatgtgaaaccaaaagtattctaagtttttgatatacaaagatatgcttttaagtttcaaggtttataaatataaaaaactttcaaatttatacaggaattttaggatggtggaagtcagggattagcaaacttttagaagtgatgtgtttagcaattgatttaacttcagtcatggaaccatggtctgttgaataaagcacctgttgaccttacgactttcaaaaacatagggttgtcactggtcatgtagcattcagagtgtttaaggctatttctggtgtttattacttgttatatccaaaatatatagagatatatttttctagtgtaacactaacattttattgtctttattgtcagcattttttttcttaatgccttctgagttgtgattactaatatcacattttagatttaactaaaacttgtttgttaatgaatgatatttatttyttctttctcataggcttatcagccatttagattttttgtgtgcgtgaagggcttcttcaggtattttgctaatattttaa

SEQ ID NO: 321588 - DNA, 628 bp, Homo sapiens
aaatatataaagaaatacattcttccaaggtagtgaaacacttacatactgaaactataaaacactgctgaaagaaattaaagacctaaataaatgaaaagacatcccatgtttataaaaagaaagtcgatagtgttaaaattgtaaaacttctataaatttattgtaatgcttatcaaaattccaacagtctgtagtctgaagcaaagaagtcaatctagttgtttcatagtaattgctagtggccttgaatagtaaaacaaaacaaaacaaaacaaaacaaaaacaaaaaacttctgaaaaaaatacaaagttgtatgactcacatatttccaattcaaaatttattacaaagatatagtaatcaaaacagtgtggaactggcatgaggatagatatatagaccatggaatatgatagaatccatagtagagtccagaaataatggtcaattgatttttgacaaggggattaaatccattaaattgaagaaaartaatttctctaacaaatgatgttggcacaagtagttttccatatgcaaaaaaataaagttgaacctctactttacttcacatataaaaattaatacaaaataaattaatgacctaaacatataaattaaaac

SEQ ID NO: 321589 - DNA, 617 bp, Homo sapiens
ttaaattcataatttgattataaatttcatatggcaagataaaggaccaagaatagtcaaggcaggattgacagacaagtaagcaacactggacacttgcactacccaatatcagtgcatactatagttattgcgattaaggcagtataattttgtcaaaaggaagatagatagaccaagggattagtacatggtgatcagacagatatgcagttttgtaatcatttgacttaagacaaagatgatacacactctgcaaataaaataggatggcttttctttttttwaattttattattattatgctttaagttttagggtacatgtgcacaatgtgcaggtttgttacatatgtatacatgtgcctttttggtgtgctgcgcccattaactcatcatttagcattaggtatatctttcctgaaaaatggtcctggataatttaattcctataagaaaaggttgaatgatgtgaggtccactacttcagacgttagcaatgaaagacacgccatagaagaaaatatagactatttttatgcccttgggttagctaaacatttctttaaaaagtacatagagcttacaaataatatattttattgtaccaaaatattg

SEQ ID NO: 321590 - DNA, 582 bp, Homo sapiens
aacctcttggttgagatggcaatctttttgacaatctctcacagagagattaaatttagaaagccagattcccaaatagttgtacaatacatatctttgtttagaaatacagagttccagtgttatgcacatacaccccccaccacacacacacgcacacacacacacacacacagagagagagagacatagaggaaatcaattttcactttagataatttgtgagcttatcatttgtgttacctgtgatcataatgacaggcacagagaagtgacatctacaagattcatggattagttttagtaacttgatgtgctcttatttatgagatggcatagatatcactttcctaattagcttagtagtcctataatagaatattatatatttttcatcttaattctgggtacataaatgaggttaaatgttttcagcaagtaattctccttattctcactaatttccgtcaaatataatcaatcwcaacacagaaaagaaagaaaaatgttattctatagctaatctgaagctctgtaccaaattcattaagcaggattattgatatatttcccataactata

SEQ ID NO: 321591 - DNA, 594 bp, Homo sapiens
gtgaatatttagttttaattgatgaaatttaaaattctatgattatagtctgtctttcttaagttaggaaacataaattatcttgatagcaggaaaagtaatacaaaatataaaaacaccctttgcatttcgtaagtcttatggtaatggtagacattagacagaattgggaggtcagaggggttaatactgagaggtatgttacgttacagaattatagaaaaagtgcttcactaacaaatttgtgaagacagtcctgtttcagagtatcttttggtttctgaaaagccattttgtttctgattgctcatgacttttttggaagttctaagtagttatttcatatttcccaakatcttgtgatgtgcatttggaattctatgaactgattttgttttaatcaaaatcttagagctgttggcatctgtattagtttgctagggtagtactgactgggtgacttagcaatttagtatctcacaggtctggaggctagaaatatgacatcaaaatataggcaaggccattctatctcaaaaacccataaggaaattctttcttccctcttcctagtttctggtagccccagacttt

SEQ ID NO: 321592 - DNA, 594 bp, Homo sapiens
gtgaatatttagttttaattgatgaaatttaaaattctatgattatagtctgtctttcttaagttaggaaacataaattatcttgatagcaggaaaagtaatacaaaatataaaaacaccctttgcatttcgtaagtcttatggtaatggtagacattagacagaattgggaggtcagaggggttaatactgagaggtatgttacgttacagaattatagaaaaagtgcttcactaacaaatttgtgaagacagtcctgtttcagagtatcttttggtttctgaaaagccattttgtttctgattgctcatgacttttttggaagttctaagtagttatttcatatttcccaagatcttgtgatgtgcatttggaattctatgaactgattttgttttaatcaaaatcttagagctgttggcatctgtattagtttgctagggtagtactgactgggtgacttagcaatttagtatctcacaggtctggaggctagaaatatgacatcaaaatataggcaaggccattctatctcaaaaacccataaggaaattmtttcttccctcttcctagtttctggtagccccagacttt

SEQ ID NO: 321593 - DNA, 585 bp, Homo sapiens
tggtggttagaacctcaacatacagcatccaataattttgttatagaaatattatcctcccctttatttcttccctttcattattctacctctgactttatgcctttactagattctctgccccattccagatgatggaattgatattgataagcctcaaggtaaatgcaatatagtacgacttctcatctgttccaccacatcattttcctaatttctgatgctgagttatctaaaagatgatgaaggrgcagaaatctccttggattatttcagatctaaaactttatttattatcaagaatatacacattgatattttttaattttcaggtgaaaactatgtactatattgtactcatcaattaatttatgtagaatatattgagtgtctactatatattctaaatatcgaaaatgtgctaaataaggaagaaaaggtttatagcccatggggattacatactaatcttacatatcaagaaaagtctaaaaacaaacaaatgtgttagattgaaaagtgaatgtgatgaatgctgaagggagactttcctgcttctttctaaaaattattggaaaaccacaa

SEQ ID NO: 321594 - DNA, 585 bp, Homo sapiens
tggtggttagaacctcaacatacagcatccaataattttgttatagaaatattatcctcccctttatttcttccctttcattattctacctctgactttatgcctttactagattctctgccccattccagatgatggaattgatattgataagcctcaaggtaaatgcaatatagtacgacttctcatctgttccaccacatcattttcctaatttctgatgctgagttatctaaaagatgatgaaggagcagaaatctccttggattatttcagatctaaaactttatttattatcaagaatatacacattgatattttttaattttcaggtgaaaactatgtactatattgtactcatcaattaatttatgtagaatatattgagtgtctactatatattctaaatatcgaaaatrtgctaaataaggaagaaaaggtttatagcccatggggattacatactaatcttacatatcaagaaaagtctaaaaacaaacaaatgtgttagattgaaaagtgaatgtgatgaatgctgaagggagactttcctgcttctttctaaaaattattggaaaaccacaa

SEQ ID NO: 321595 - DNA, 595 bp, Homo sapiens
gacaccttaacttctgtgtattcattcagtgttatttttctaccacggactccctctacttgttgctatgttcttttccatcataactttggcttttacktagcctatcaaaatctgtcctgttcaatttcccaccaaaaccttctaaatcctggtttcaatacttcctgttttatattctaagaatttattaattcatactaatgacaaatgactagatctctcaggttatatttgttgaggcaaaagacattgtaatttactggacaatttattgatttcttgctccttggataggtattattcctggttaatccaactgctcttaatgtggacaagagtcatataccattaaataaacacagaagggagcttaagcatgtctatcaacaacatacgtttacttagaagcatatatatttttcttccagtacttagaatgtacacaaattaagcattgctagtatagctgcaaatggccataactttctgaatttggcaatgtatgctaaaattccaaaggtatatactctttcatccagcatttctacctcatggagtctctataagtaaaatatcacatgtgaaaaataat

SEQ ID NO: 321596 - DNA, 575 bp, Homo sapiens
tgaaaaatcctttgccattatttcttcaaaatttcttttgctcctttctcttttccccctttttctgggattctgattatgaatgtttggcattgtctcatgtatcttgtatgattttacctgttatttaattctttttttccctttgtttttgtttgactttctactgacctgtcttcacattaactgattcttttatttgctgtgttgagattactggtgaacctgtcagaggcattctttttatttctacaacttctatktgttatattttaatgtttccatctatctattaaaatatacattttatattgcttgtaatgcttttccattaaagcctgtattagattggtcatatttattttaaatttactgtctgtaccaacatctgtgtcacattatagtgtttttctgaggactgtttttcatcttcagactgtttctttctttttgtttttttgcatgccttataatttttgtatttgcatgccttgtaatttttgtattgaattctcaacatgttatatagcacagaatatactgagtcacatatttgttgtagttagggatgagca

SEQ ID NO: 321597 - DNA, 586 bp, Homo sapiens
atccatctcattttgcatattgtccaactttcatagtagagaatctacttttccgtggccctgaaccatgtaacactgcaatggtgtcagtttatttaatcaactacaatccaaacaagtctataaaatgctatcagattatacttgactatagtmattacccacagattaaaatatttatagatagttccccatgaatataggataaagtcccagataatttatccagatgtaaatcgttctatatatttccattttctatgtatcaaatactatcgtgctctcctgcataaactttgtattttattaaattgatctaataaatattctccactctctgcatattttctgtctacaggccttcatctacaggtcttctgtctacaggctttcattctaaattattagaatagttttatgttcttctttaatattcaatgtccatcttatgtctgacctctctatgaactcagcccatctcaacagtccatcactaaagtttaaccttcagaagaatttattatctctcaaaggtataccattgggccatgtatatcttgcctccttatgacttatagttttggta

SEQ ID NO: 321598 - DNA, 628 bp, Homo sapiens
taatttccattgacatattcaaagtcactggttacatcttcagttgtgtcaagtttatgcattagtccattgctgatattatttatatctattatgtgttttttatttctagaattttattttgattttttagattgtttccttttctctgctggaattatccatctcattttgcatattgtccaactttcatagtagagaatctacttttccgtggccctgaaccatgtaacactgcaatggtgtcagtttatttaatcaactacaatccaaacaagtctataaaatgctatcagattatacttgactatagtaattacccacagattaaaatatttatagatagttccccatgaatataggataaagtcccagataatttatccagatgtaaatcgttctatatatttccattttctatgtatcaaatactatcgtgctctcctgcataaactttgtattttattaaattgatctaataaatattctccrctctctgcatattttctgtctacaggccttcatctacaggtcttctgtctacaggctttcattctaaattattagaatagttttatgttcttctttaatattcaatgtccatcttatgtctgacctctctatgaac

SEQ ID NO: 321599 - DNA, 674 bp, Homo sapiens
ccttgtttgtctactgagcgctgactttcaacctcagtcttatctaatgtcaaatttcctggagttctagaaagagtcttttttttttatttatatcattgtaaacatttcatgaaaataatttttagttacaatgtcattttcagcacaagaagccaaagagtagtttaccttggttaggcatatatgttttctcttccattcatgaaaattcttattatactcacagaggaaatggagtttctaatgataaataaatagctatgttaacactaattaattgattgggagcttaggaaatgctaacrtttaataaggctttattgacaaagtgaattttgaatttcattttatagatcctttagtaataataagaaaagaggtaaatactaggcaaaactatagcaactttaagaaatatcattaattcctattttatccttgtgctttattctttaaatttccccgatattattacatatgtggttatatttttcttatgttttattgattacctgtaaaatgccacagttattttggaaagtaaaaaaaatacataaataaataaatactttttgctctctaaatatataacatttcttatttactcttcctggaagaagtataccataggggtaagatttaaaatttaaatgtgtcatttatgtcagaat

SEQ ID NO: 321600 - DNA, 575 bp, Homo sapiens
aagtttctccttgttctctttgcttggctaacactgygataataaaactctccttgctgcaatacctattgttttcagtacaattggctttattcatcaggtggttacaaaatgaccaatattaaacaaatgtttatgctctggcatatttgctagttcaaataatatgaagtaatgaagatggaattttgaatttcatacacaaacataaaaaatgaattcaagttagaataaatttctaatggatatatagactatgattgcaactttggagtaagtatataaacaaaagtcaatatactatattgaaaagtatattaagtggtagtattgtgagtgatttagatttaaatttgtttgccatatttttaacatgagaaaaggagtaatagcaataacacagtgttatggtctgaaagtttgtgtcctccaaccccaattcatatactgaagtcctaactcctaagatgatgatattaggaggtaggatctttgggagatgattaagtcataagagtgaagcttttatgaatgggattaatgactttgtagaagagaccccagagagctgctag

SEQ ID NO: 321601 - DNA, 590 bp, Homo sapiens
caacacatccttgctttataggttttcttttatttttatgtcattctgatgggtgtgtggtggagttgtatatttttcactacatttctttgtgcttgttgaccttttttatactctatgttataaagttcctggtcacttttctctctcattataccattgaattgtccatattttgacaaagaatttgtagaaatcccttacatatttttattatctgcctcttattgattacatgtgatgcaaatatcttctcccattctagtgatttcatttttcatttcctaatggtacctcttgcrtagcagttttaaattttaatacagttcaatgaattgaatttgatgttaggcattttctgagtgtactgtttaagaatattctactacaatgtcataaaagcttcctctatgcttacctataaaaagcttttctttttttaccctgtatgtttatttaaatatgttgtaacttgtattttgcagccacaaataaactggagacttctttgcttatcaaagcatatcacattacatgaacaagaaacaaaagaaaaactaaattaattaaattaaatacaaatgaaaaac

SEQ ID NO: 321602 - DNA, 556 bp, Homo sapiens
ctcaattccttttaaatattagtttcattctatatctaggatatgtgtgctttatttgtcttgcctctaaactttgtatttatataattatgctgtatgtatcttgtaagacttgctcttttttcaatgtaatagtgatatttgtgcacaggtgaagagttaattgagtgtayataattaactgtagaactgttggattctatgttatgtttatatttaaggtataaataaataacaggaaattttgttcaaggtgtttttgtttaatttagaattccacaatcagtttctgagagtgttatattagttcactgttttaaatatctattgatggtattcgtcattcttagcattgtaataacataaattggcacattacattatatttagcctaacgatttctctgtactttgaaaccatatgtaacaaattgcaatttaacatactacgtaaacaaactgcaatgtaatttaggagtctattctcctaacaagtagctgagtctcagccgatcatagcaaccaaacttcagccaattaatggctaccaactgatc

SEQ ID NO: 321603 - DNA, 537 bp, Homo sapiens
ggcatttgtacatattactccatattactgttatccatgagctataactctgaagaccacaaaaatgccgcagtgacttttagtactacacagaatgatatcacataataaattttagtttttctgtcttgatgtaagagttataagaaagaatgaarattctagaagtctttatttatttaaatattgagttatcctattaaataccagtgtgtggtactcactggctgaaattctaacaccaagcaatattgttggaagtaaagcctttaaaataaatttcctctttatttgtttatttatttatttattttacttatttttgtttgagatggagtctggctgtgtcgcctaggctggagtgcagtggcacgatctcggcttactgccacccctgcctccctggttcaagagattctcctacctcatcctcccagttagctgggactacaggtgcacaccattacacccagccaatttttgtatttttagtagagacagagtttcactctgttggccaggctggtcgcgaactct

SEQ ID NO: 321604 - DNA, 537 bp, Homo sapiens
ggcatttgtacatattactccatattactgttatccatgagctataactctgaagaccacaaaaatgccgcagtgacttttagtactacacagaatgatatcacataataaattttagtttttctgtcttgatgtaagagttataagaaagaatgaagattctagaagtctttatttatttaaatattgagttatcctattaaataccagtgtgtggtactcactggctgaaattctaacaccaagcaatattgttggaagtaaagcctttaaaataaatttcctctttatttgtttatttatttatttattttacttatttttgtttgagatggagtctggctgtgtcgcctaggctggagtgcagtggcacgatctyggcttactgccacccctgcctccctggttcaagagattctcctacctcatcctcccagttagctgggactacaggtgcacaccattacacccagccaatttttgtatttttagtagagacagagtttcactctgttggccaggctggtcgcgaactct

SEQ ID NO: 321605 - DNA, 586 bp, Homo sapiens
atttttggaatttaaatgtagtgttccatccactgaaattatatcatatgttgatgttcaaacttgtttcaaatgtcaaccttaattggtactttgtctggcaaagacaatgttgggcattggcattcacacaaccattttctttttcccctcaccatacagagaactacgttttctacacttcgtgactctctggcaggaccatgtgacagagttctgaacatttgaatgtggatatacatgatatatgactattctaagctctaaaatctccatggaattatttatgacagataataatggatttagatcataatctcaaaaaacacaatcccaaaccctgtaattccaaatgttgaaataatgaattatcaaaattcattaagtctaaatccctaatgtctaaaatccccaaaagcataatcataggatagttgyatcgtggaactattaccttgttattgtctttatttagaaattaagtatggcttaaggagatgtatatggattcctaattgacaaggagtagatttgtgaccttaattttaagtgtcagcttgactagattaaggaatacccagaaaaa

SEQ ID NO: 321606 - DNA, 418 bp, Homo sapiens
gcaacgttgctgtatgttggtttctcattcctgtatagctatttatttgatcaggtgtgaattagagttcttcattaaacatagttgttactcggcacaagagggtaaggggagacggaggaagtggctgcctacaacagtaattaaacatgtgtaaccaattagagggttttccaytatggcacaagcatataatttgctaagtcttctatgagaatagatgaaaataggtacaaaaagtgtgtctgactacaacattctcatgttaaacatgtcaacataaatgaactttaaatatataatttctagtttgttaacaaaccactgaattctattggctaataacagtaacatgtaattttagttcattttgccaagaaatattgcatctgacagagccaattaattgtattacaca

SEQ ID NO: 321607 - DNA, 457 bp, Homo sapiens
atgaataaaatttatttgatgccaatacttgctttaattttaatttattttgcttattagattcaggtaaagtagcataatatcattttcaataaatagcatttctagtataatcccagttcataaaactatatttagytagtcctctaataatgtatatacgcttcatcaaaaatgtgtagcatgatgatcacccaagattaatgatgacagtttttgagcagcagatttgggatttttttcatttttatctttttactctacagcattattggatttacaatttacaatacataatgaatataatttctaaatagtaagtacttataaattattataaaatatgtgagttatagtaaatacatctcattttagataaatagaagggattttcttaaaagcaaataaatcatgtgctatcatctgggttatgttctcctttgtacttctctatatt

SEQ ID NO: 321608 - DNA, 457 bp, Homo sapiens
atgaataaaatttatttgatgccaatacttgctttaattttaatttattttgcttattagattcaggtaaagtagcataatatcattttcaataaatagcatttctagtataatcccagttcataaaactatatttagttagtcctctaataatgtatatacgcttcatcaaaaatgtgtagcatgatgatcacccaagattaatgatgacagtytttgagcagcagatttgggatttttttcatttttatctttttactctacagcattattggatttacaatttacaatacataatgaatataatttctaaatagtaagtacttataaattattataaaatatgtgagttatagtaaatacatctcattttagataaatagaagggattttcttaaaagcaaataaatcatgtgctatcatctgggttatgttctcctttgtacttctctatatt

SEQ ID NO: 321609 - DNA, 457 bp, Homo sapiens
atgaataaaatttatttgatgccaatacttgctttaattttaatttattttgcttattagattcaggtaaagtagcataatatcattttcaataaatagcatttctagtataatcccagttcataaaactatatttagttagtcctctaataatgtatatacgcttcatcaaaaatgtgtagcatgatgatcacccaagattaatgatgacagtttttgagcagcagatttgggatttttttcatttttatctttttactctacagcattattggatttacaatttacaatacataatgaatataatttctaaatagtaagtacttataaattattataaaatatgtgagttatagtaaatacatctcattttagataaatagaagggattttcttaaaagcaaatawatcatgtgctatcatctgggttatgttctcctttgtacttctctatatt

SEQ ID NO: 321610 - DNA, 562 bp, Homo sapiens
ctcagccacttggaaatagcaagatgatagtgcataaaaatgaactctgaactttaattcaaaaaggaaatcagggatccaccccaatccatgaaggacaccctagatcccagggaggagaatgcctgcaaacygccctgtgacagtccctggttgataaaagtgagtgaacccccatatgtgaaggaggcagagagcctccctctgtgacttccctttcccctgggatctgagcaacccaggccaagggatagcctttgctttgctcaagcccaacagctaacttggagagaggctgggagacactgtgagggacagacaccgggaaaagctgcagacattgtcccagacttgggaccgagagcaagacaccatttttaatctgggcacatataaaataggccattgattggtgacccggcagcgtggccatgcaggcatcttagtcttgggccagagattggagcacctgctctgcagcacagtaggggcctccatggccagaactgtggaaagcatctcggcactagggctaaatggtacctccccaccaaccccactg

SEQ ID NO: 321611 - DNA, 562 bp, Homo sapiens
ctcagccacttggaaatagcaagatgatagtgcataaaaatgaactctgaactttaattcaaaaaggaaatcagggatccaccccaatccatgaaggacaccctagatcccagggaggagaatgcctgcaaactgccctgtgacagtccctggttgataaaagtgagtgaacccccatatgtgaaggaggcagagagcctccctctgtgacttccctttcccctgggatctgagcaacccaggccaagggayagcctttgctttgctcaagcccaacagctaacttggagagaggctgggagacactgtgagggacagacaccgggaaaagctgcagacattgtcccagacttgggaccgagagcaagacaccatttttaatctgggcacatataaaataggccattgattggtgacccggcagcgtggccatgcaggcatcttagtcttgggccagagattggagcacctgctctgcagcacagtaggggcctccatggccagaactgtggaaagcatctcggcactagggctaaatggtacctccccaccaaccccactg

SEQ ID NO: 321612 - DNA, 562 bp, Homo sapiens
ctcagccacttggaaatagcaagatgatagtgcataaaaatgaactctgaactttaattcaaaaaggaaatcagggatccaccccaatccatgaaggacaccctagatcccagggaggagaatgcctgcaaactgccctgtgacagtccctggttgataaaagtgagtgaacccccatatgtgaaggaggcagagagcctccctctgtgacttccctttcccctgggatctgagcaacccaggccaagggatagcctttgctttgctcaagcccaacagctaacttggagagaggctgggagacactgtgagggacagacaccgggaaaagctgcagacattgtcccagacttgggaccgagagcaagacaccatttttaatctgggcacatataaaataggccattgattggtgacccggcagcrtggccatgcaggcatcttagtcttgggccagagattggagcacctgctctgcagcacagtaggggcctccatggccagaactgtggaaagcatctcggcactagggctaaatggtacctccccaccaaccccactg

SEQ ID NO: 321613 - DNA, 562 bp, Homo sapiens
ctcagccacttggaaatagcaagatgatagtgcataaaaatgaactctgaactttaattcaaaaaggaaatcagggatccaccccaatccatgaaggacaccctagatcccagggaggagaatgcctgcaaactgccctgtgacagtccctggttgataaaagtgagtgaacccccatatgtgaaggaggcagagagcctccctctgtgacttccctttcccctgggatctgagcaacccaggccaagggatagcctttgctttgctcaagcccaacagctaacttggagagaggctgggagacactgtgagggacagacaccgggaaaagctgcagacattgtcccagacttgggaccgagagcaagacaccatttttaatctgggcacatataaaataggccattgattggtgacccggcagcgtggccatgcaggcatcttagtcttgggccagagattggagcacctgctctgcagcacagtaggggcctccatggccagaactgtggaaagcatctcrgcactagggctaaatggtacctccccaccaaccccactg

SEQ ID NO: 321614 - DNA, 538 bp, Homo sapiens
tctggagcacccactctcctggattagtagcttaggctgctcccaacaccatgcagagaacttggggccaaagagatttcctagctccaagcctaggcaaatctcctgggtgcttggtagctgcccactggttcttcctcagcattgctgcctgtgcccaccatcaggggtcctgtaggtggccagtccagtctagcctgctcttcatgctcccacccccaattcctaaggccaaacagggagytcagcattccactgtatattccatgaatcagcccattgcctgaggcaacagagagcttctaccagtaaacaaggacaagtatatacccagccacattggctgcagttggctcttacccataagcaccatctatgggcttgtaggatgaactgcacggcccaatataaaacctgccaaaagaagtgcataaggctatagaaagatcctacccagcattctctacactcacaccccctagggagtgggagaaggaaagggcaagaaaaaatagtataaaataataataacattatt

SEQ ID NO: 321615 - DNA, 538 bp, Homo sapiens
tctggagcacccactctcctggattagtagcttaggctgctcccaacaccatgcagagaacttggggccaaagagatttcctagctccaagcctaggcaaatctcctgggtgcttggtagctgcccactggttcttcctcagcattgctgcctgtgcccaccatcaggggtcctgtaggtggccagtccagtctagcctgctcttcatgctcccacccccaattcctaaggccaaacagggagttcagcattccactgtatatwccatgaatcagcccattgcctgaggcaacagagagcttctaccagtaaacaaggacaagtatatacccagccacattggctgcagttggctcttacccataagcaccatctatgggcttgtaggatgaactgcacggcccaatataaaacctgccaaaagaagtgcataaggctatagaaagatcctacccagcattctctacactcacaccccctagggagtgggagaaggaaagggcaagaaaaaatagtataaaataataataacattatt

SEQ ID NO: 321616 - DNA, 538 bp, Homo sapiens
tctggagcacccactctcctggattagtagcttaggctgctcccaacaccatgcagagaacttggggccaaagagatttcctagctccaagcctaggcaaatctcctgggtgcttggtagctgcccactggttcttcctcagcattgctgcctgtgcccaccatcaggggtcctgtaggtggccagtccagtctagcctgctcttcatgctcccacccccaattcctaaggccaaacagggagttcagcattccactgtatattccatgaatcagcccattgcctgaggcaacagagagcttctaccagtaaacaaggacaagtatatacccagccacattggctgcagttggctcttacccataagcaccatctatgggcttgtaggatgaaytgcacggcccaatataaaacctgccaaaagaagtgcataaggctatagaaagatcctacccagcattctctacactcacaccccctagggagtgggagaaggaaagggcaagaaaaaatagtataaaataataataacattatt

SEQ ID NO: 321617 - DNA, 617 bp, Homo sapiens
ccatgaatccataaatcagcaaatcctttcatgaaggtggagccctcatcacccaattagctcttcaaggccctctctctcaaccttgtcacattgaggattaagggtttttttttttttgttgttgttgttttttgaccaagtcttgctctgttgcccaggctggagtgcagtggtgtgatcttggctcactgcaacctccgcctcctgggttcaaaacattcttctccctcagcctccagagtagctgggattacaaatgcctgctgccacacgtggctaacttttctatttttagtagagacagggttttaccatgttggttaggctggtctcaaactcctgacctctagtgatcctccygccatggcctcccaaagtgttgggattacaggcgtgagccaccacgcctggcctgtgattaagttttaacatgagttttggagtggacaaatattcaaaccataccagatttgaaaatagtggtgatatttgcacagcactgggaaggagaaaaagaagaaaaacgtaagtaaattcagttgtcatgagactcaaaaggaagagttttataaagagtctgacagtgtgaaaaaattggagcagggttgaaggac

SEQ ID NO: 321618 - DNA, 617 bp, Homo sapiens
ccatgaatccataaatcagcaaatcctttcatgaaggtggagccctcatcacccaattagctcttcaaggccctctctctcaaccttgtcacattgaggattaagggtttttttttttttgttgttgttgttttttgaccaagtcttgctctgttgcccaggctggagtgcagtggtgtgatcttggctcactgcaacctccgcctcctgggttcaaaacattcttctccctcagcctccagagtagctgggattacaaatgcctgctgccacacgtggctaacttttctatttttagtagagacagggttttaccatgttggttaggctggtctcaaactcctgacctctagtgatcctcctgccatggcctcccaaartgttgggattacaggcgtgagccaccacgcctggcctgtgattaagttttaacatgagttttggagtggacaaatattcaaaccataccagatttgaaaatagtggtgatatttgcacagcactgggaaggagaaaaagaagaaaaacgtaagtaaattcagttgtcatgagactcaaaaggaagagttttataaagagtctgacagtgtgaaaaaattggagcagggttgaaggac

SEQ ID NO: 321619 - DNA, 597 bp, Homo sapiens
ccaaaaagtatctgagacatgtctcaatcaatttagaagtttattttgccaaggttaaagatgcgcccgtgacgcagcctcagaagatcctgagaacatgggcccaaggtggtgagggcatagcttggttttatacattttaaggacatatgagacattgatcaatacaagtaagaggtacatttgttckgtccacaaggggaagataacttgaagggtggacagtttccaggtgataggtggattcaaagattttctgattggcaattggttgaaagagtttccctaaatacctggaatcaatagaagggagtgtcttggttaaaataaggggctgtagagaccatggtttcatcgtgcagatgaagcctcctggtagcaggcttcagagagaatggattgtaaatgtttcttatcagagttatcagagtgttatcagagatttattagagtcttatcagagactcatcagagtctgttctttcagtcttaaggtctctattttaatataaatactggtcagctgtgcctgaattcatggcctgaaatagtgtttcagatttactgtggaatgcctttgtctgagagctgggtcca

SEQ ID NO: 321620 - DNA, 527 bp, Homo sapiens
catacacaaacatcttattaaagattagaaatagaccttgctatataatttaaaagtgtaattcataccaggaaacatttttttgagctgtgagttctttgaggtatagtcttagtgacctccctcagaatatatttattacagtgccattgagactaaatcaatggaacttcatgtcctatttgtagtttgctggtgttagaaaaataaaattagaaaaagaagcgtttatgtttttatgtttatcgcagcacaattcacaattgcaaagatgtggaaccaacctaagtgcccatcaactgacgtgtagataaagaaaatgtgggatctgtgcaccatggaatagtattcagccataaaaaatgaaataatgtattttgcagcaacttggatggaactggaygatgttgttctaagtgaagtaactcaggaatggaaaaccaaatacaatatattctcacttataattgggaactaagctataggtacacaaaggtttacagatataacggacattagggactcaa

SEQ ID NO: 321621 - DNA, 527 bp, Homo sapiens
catacacaaacatcttattaaagattagaaatagaccttgctatataatttaaaagtgtaattcataccaggaaacatttttttgagctgtgagttctttgaggtatagtcttagtgacctccctcagaatatatttattacagtgccattgagactaaatcaatggaacttcatgtcctatttgtagtttgctggtgttagaaaaataaaattagaaaaagaagcgtttatgtttttatgtttatcgcagcacaattcacaattgcaaagatgtggaaccaacctaagtgcccatcaactgacgtgtagataaagaaaatgtgggatctgtgcaccatggaatagtattcagccataaaaaatgaaataatgtattttgcagcaacttggatggaactggatgatgttgttctaagtgaagtaactcaggaatggaaaaccaaatacaatatattctcacttataattgggarctaagctataggtacacaaaggtttacagatataacggacattagggactcaa

SEQ ID NO: 321622 - DNA, 621 bp, Homo sapiens
tgtagataaagaaaatgtgggatctgtgcaccatggaatagtattcagccataaaaaatgaaataatgtattttgcagcaacttggatggaactggatgatgttgttctaagtgaagtaactcaggaatggaaaaccaaatacaatatattctcacttataattgggaactaagctataggtacacaaaggtwtacagatataacggacattagggactcaagggggaaagatgagagagagagagggataaaaaaactacatagtgggggccgggtatggtggctcaggcctgtaatcccagcactttggaaggccaaggcaggcagatcacctgaggtcaggagtttgagaccagcctgtccaacatggcaaaaccccatctctactaaaaatataaaaagttgtcaggcgtggtggcgtgtgcctgtagtcccagctactcaggaagctgaggtacaagaatcgtttgaaccctggggcagagccgaaagtgcaccactgaactccagcctgggcaacagagcgagactatgtcttgaaaacaaaaaacaaaaaaaactacatactaggtacaaaatacactactccagtgaagagtgcattgagatctcagattctc

SEQ ID NO: 321623 - DNA, 621 bp, Homo sapiens
tgtagataaagaaaatgtgggatctgtgcaccatggaatagtattcagccataaaaaatgaaataatgtattttgcagcaacttggatggaactggatgatgttgttctaagtgaagtaactcaggaatggaaaaccaaatacaatatattctcacttataattgggaactaagctataggtacacaaaggtttacagatataacggacattagggactcaagggggaaagatgagagagagagagggataaaaaaactacatagtgggggccgggtatggtggctcaggcctgtaatcccagcactttggaaggccaaggcaggcagatcacctgaggtcaggagtttgagaccagcctgtccaacatggcaaaaccccatctctactaaaaatataaaaagttgtcaggcgtggtggcgtgtgcctgtagtcccagctactcaggaagctgaggtacaagaatcgtttgaaccctggggcagagccgaaagtgcaccaytgaactccagcctgggcaacagagcgagactatgtcttgaaaacaaaaaacaaaaaaaactacatactaggtacaaaatacactactccagtgaagagtgcattgagatctcagattctc

SEQ ID NO: 321624 - DNA, 507 bp, Homo sapiens
gttgagtaggtcagaaatgatgctttgtggccatagtgagtccctgtttttatttatagtaaaattcacttaataaaatccagcaaagcaagaggcagatgtaagaaatcagaaaggagaagcttygataaataaactattattaaggagtcatccatttgaataagcaatagagataaactaccatagatttacaaaatgttttaaatcttacaaatgcaactttacttccttgggccacatgtttttggggtgctttctcttggcatgcagtcacccagccttcattcactgagaaatcccagccccatggtgaagccacatgtttgtatctggtcaaccatcccagctgaaccctggtttcagttgactccgtccaggcagtcagcaaggcacgtgagcaaagaagccatcctgaatacagaccaagatgttctatcctaagtgctgttccatcctctacctgttggcctcagccccaagagaaacaaaccaccggctccttac

SEQ ID NO: 321625 - DNA, 626 bp, Homo sapiens
aaatttagaccggcacatctacgaattctgtctcagaaaatcagccctgaattgccaatttgtgcctttttcaccaccttccatctatacaacaaggctgtaccttctctaacaaacatcattagaagaataatcacacacacacacacacacacacacacacacacgcatacaccaagtgggagcccaactggggagtccctgcttgtggcaaattgccagtggccccaacgtaaagcatcacagtcttccagtcaggtttccttatcagggaggaagtcacaatagacagtgacccaggacctccagcaggcctagggtttcccctgaagccaagatgaccatgagcacagccagattctctgagtggtgatcccgtctccaaggtgtgttgtcagtttcagtcattttcatgagtcagtaacagcttagtagacagatgggaattaaggtgtggattccattgtgataaattagctataatgcaaaaagagacagasagagagagattcatatttgtaaataagccctaaatcttcatatatgactctgtgtgttatgtttctacagcatgaagacttgcttttctgtgaataataaaacaaagtggctaaagtatttctgtg

SEQ ID NO: 321626 - DNA, 626 bp, Homo sapiens
aaatttagaccggcacatctacgaattctgtctcagaaaatcagccctgaattgccaatttgtgcctttttcaccaccttccatctatacaacaaggctgtaccttctctaacaaacatcattagaagaataatcacacacacacacacacacacacacacacacacgcatacaccaagtgggagcccaactggggagtccctgcttgtggcaaattgccagtggccccaacgtaaagcatcacagtcttccagtcaggtttccttatcagggaggaagtcacaatagacagtgacccaggacctccagcaggcctagggtttcccctgaagccaagatgaccatgagcacagccagattctctgagtggtgatcccgtctccaaggtgtgttgtcagtttcagtcattttcatgagtcagtaacagcttagtagacagatgggaattaaggtgtggattccattgtgataaattagctataatgcaaaaagagacagagagagagagattcatatttgtaaataagccctaaatcttcatatatgactctgtgtgttrtgtttctacagcatgaagacttgcttttctgtgaataataaaacaaagtggctaaagtatttctgtg

SEQ ID NO: 321627 - DNA, 627 bp, Homo sapiens
tgattaaattaaatggtttctgcatgtggatgctatacatcagtaattttaggtaaatacttgttgtgttgaggacagaatgctttgtgcatatttgttttgccaaagcaaatcattctgaatagcaataaccttggatgagatttgtttatagaccatatgaggaaaattattgtctatgatctttaatcttttttaatatccattcatattttggccactcagcagtataatcaatacataagaaatagtacacttcaaacaaaatctataytacatatttacttttacacacacacacacacacacacacacaccccttccagttaatgttagatctacatgaacaaaacatgttaagctgttctgtgaactgtgctgtaaataaattcaacatattgtatgtagaatagcatcttctgatagttacttttaagaaaattattagatcaaaatggaaagcctggaaaaatgaaagcctccactttcaattatagaaaattatctataaaaaataatcatcactcatatattttaaaacagatcaaaggaataagcaagtaaatttaagagatatccatgccttatcaaaaaaatcactaccttctagttcataacctacatata

SEQ ID NO: 321628 - DNA, 627 bp, Homo sapiens
tgattaaattaaatggtttctgcatgtggatgctatacatcagtaattttaggtaaatacttgttgtgttgaggacagaatgctttgtgcatatttgttttgccaaagcaaatcattctgaatagcaataaccttggatgagatttgtttatagaccatatgaggaaaattattgtctatgatctttaatcttttttaatatccattcatattttggccactcagcagtataatcaatacataagaaatagtacacttcaaacaaaatctatactacatatttacttttacacacacacacacacacacacacacaccccttccagttaatgttagatctacatgaacaaaacatgttaagctgttctgtgaactgtgctgtaaataaattcaacatattgtatgtagaatagcatcttctgatagttacttttaagaaaattattagatcaaaatggaaagcctggaaaaatgaaagcctccactttcaattatagaaaattakctataaaaaataatcatcactcatatattttaaaacagatcaaaggaataagcaagtaaatttaagagatatccatgccttatcaaaaaaatcactaccttctagttcataacctacatata

SEQ ID NO: 321629 - DNA, 616 bp, Homo sapiens
ggatcttttatgtcaaaagtgtccatttttgcattcatgtgatttggaaatttttcatcatacaggaaagaagtaaacatcctttgccttataatatattgggcaagaaataaataaggaaacctgaacgtagaaaaatatgtcttaaaagttctgtttctttcttctttccaactgctatctacctaacagcatctatagagacagggggaaatgatttcctccttttaactttcaaaaattaggggagcaggcaatgacatttctttctacagtggttccaatgaaaagtcaagccaataaaaagtgtattacagattacagattctcatacagatgttaaggaaagagaaacagccacagaagttgatggtctagctcagtaacttcaaacaaarcatttgagcatatggacatggtgttatcttagtgactccaaagaggctactttagaggaagaaagggaattttacatctcgttttctcttgagattttagcctcagagtaattagcaaatttccaagattcatttatgacatcttcaaactgggggaggtatctgaacactttcctggactgttatgaatgaaagatacaagaagtgaaatttctgag

SEQ ID NO: 321630 - DNA, 616 bp, Homo sapiens
ggatcttttatgtcaaaagtgtccatttttgcattcatgtgatttggaaatttttcatcatacaggaaagaagtaaacatcctttgccttataatatattgggcaagaaataaataaggaaacctgaacgtagaaaaatatgtcttaaaagttctgtttctttcttctttccaactgctatctacctaacagcatctatagagacagggggaaatgatttcctccttttaactttcaaaaattaggggagcaggcaatgacatttctttctacagtggttccaatgaaaagtcaagccaataaaaagtgtattacagattacagattctcatacagatgttaaggaaagagaaacagccacagaagttgatggtctagctcagtaacttcaaacaaagcatttgagcatatggacatggtgttatcttagtgactccaaagaggctactttagaggaagaaagggaattttacatctcrttttctcttgagattttagcctcagagtaattagcaaatttccaagattcatttatgacatcttcaaactgggggaggtatctgaacactttcctggactgttatgaatgaaagatacaagaagtgaaatttctgag

SEQ ID NO: 321631 - DNA, 533 bp, Homo sapiens
tgaaatttctgagcaaattaggctaagaagttggttattagaacctgctaattttgttttgttttgcctgttgttgttaaaaatgaaggtcctttgcttttagagacaccattccaatatccttyatctagattcgagtcctttcctgatacttaatatttgtcaaggcatgagtaaacaatgattgatagagaggatttgttctttcaatgaacttggaaggataaatagcaagcttaaagtgtaagaaaatctacttccacgctttccagaaataaatttgctccttttatgaatgctctgctagttcttgtaatagataaatgcaatagcaagtatattcttgttggaggttagaaaacaagacccaaaatacaggccacagaagcagctctctctgatcatcttctgccctcctgtctcttggttgcattttccctcgaggcgccataaaaactagaatccctcttcctcaaggtgggtcctagaaatcagaaccccatttccccaaagccggccagaaaacctagaaa

SEQ ID NO: 321632 - DNA, 533 bp, Homo sapiens
tgaaatttctgagcaaattaggctaagaagttggttattagaacctgctaattttgttttgttttgcctgttgttgttaaaaatgaaggtcctttgcttttagagacaccattccaatatccttcatctagattcgagtyctttcctgatacttaatatttgtcaaggcatgagtaaacaatgattgatagagaggatttgttctttcaatgaacttggaaggataaatagcaagcttaaagtgtaagaaaatctacttccacgctttccagaaataaatttgctccttttatgaatgctctgctagttcttgtaatagataaatgcaatagcaagtatattcttgttggaggttagaaaacaagacccaaaatacaggccacagaagcagctctctctgatcatcttctgccctcctgtctcttggttgcattttccctcgaggcgccataaaaactagaatccctcttcctcaaggtgggtcctagaaatcagaaccccatttccccaaagccggccagaaaacctagaaa

SEQ ID NO: 321633 - DNA, 593 bp, Homo sapiens
accatgactaatgatggaaaaactatcgttgtacttcaaacacaagaacactaatgactataataaggaaaacaaatccactaataaaaattattaattactcactcatcgatctccccactccatctaatatctctatatgatgaaacctctgctcacttcttggcacctgcttattccttcaaatcatcacagggctattcctagccatacactacacaccagacaccacaactgccttctcttcaatggcccatattaatcgagatgtgaactatggctgaattatccrctatctccacactaatgacgcttcaacattcttcatctgtctcttcctacactttagccgaggcttatattatggctcattcatatacttagaaaactgaaacattgacattattgtcctgctcacaaccatagcaacagcatttataggctatgtacttccatgaggccaaatatcattctgaggcgctacagtgattacaaatctactatcagccatcccatggacaagatcggggctgacctttttcaatgaatctgacgcggattttcagttgacaaagccactctcacacgattct

SEQ ID NO: 321634 - DNA, 631 bp, Homo sapiens
ttatgtctatatctatctataaaaagtctacatctatatttgtagatctaaaggtgtctatctatctatcatgatctagatatccaccacctatcattctatctatctatctggatatagatgtatgattgctttatctacctatctatctaccttgatataaatagatgttatctatcatctatctatactatctgtcatctattttttatctatttatgtgtctatctctctatctgaatatagatgtaaatagagctattattctatttatctattaaaaataaattaatagacaaatagaataatagatagataatatataaatagaataatctaccttaaatgatacatagatttatcattatctaagataattgataaacagatttatcattatctaagatattgataaacagatttatcattatctaagataattgataaacagatttatcattatctaagataattgataaacagatttatcaytatctaagataattgataaacagatttatccttatctaagataattgataaacagatttatcattatctaagataattgataaacagatttatcattatctaagataattgataaacatatttatcattatctaagata

SEQ ID NO: 321635 - DNA, 631 bp, Homo sapiens
ttatgtctatatctatctataaaaagtctacatctatatttgtagatctaaaggtgtctatctatctatcatgatctagatatccaccacctatcattctatctatctatctggatatagatgtatgattgctttatctacctatctatctaccttgatataaatagatgttatctatcatctatctatactatctgtcatctattttttatctatttatgtgtctatctctctatctgaatatagatgtaaatagagctattattctatttatctattaaaaataaattaatagacaaatagaataatagatagataatatataaatagaataatctaccttaaatgatacatagatttatcattatctaagataattgataaacagatttatcattatctaagatattgataaacagatttatcattatctaagataattgataaacagatttatcattatctaagataattgataaacagatttatcactatctaagataattgataaacagatttatcmttatctaagataattgataaacagatttatcattatctaagataattgataaacagatttatcattatctaagataattgataaacatatttatcattatctaagata

SEQ ID NO: 321636 - DNA, 571 bp, Homo sapiens
acacttgttatttggagcactgtcttagttctggcgctcatgcattctggagtgaatatcatatggacaatacaagttgatgcctcaagagaataaaacccccagaatggcaaggcataggcaacataggaaacccattgatgataatgagactctgttttgtacttttgacaaatcaaactggaaacattggagttatgcgtyccctaataatatgtggaaaataccatatcttatcattctgaaaatggtcagtgaaatctgagtaatggctccttggatggatgtcatgacaactatgatattttgttgggtttatatgcccatagtatattttgttcaactcatatttttaagtatttaacacagagggaggaaggtataatacattatttagattacgaatgtcttacatcatatttcccattactcagggaaactagacaattgaataaatattactgtccttgaaatacctctaatgtattgtaatctcccactccacataaaggtcaaatttctaattcaacttaaagtgctctcaaaacaaatctcatcaagacaataacag

SEQ ID NO: 321637 - DNA, 571 bp, Homo sapiens
acacttgttatttggagcactgtcttagttctggcgctcatgcattctggagtgaatatcatatggacaatacaagttgatgcctcaagagaataaaacccccagaatggcaaggcataggcaacataggaaacccattgatgataatgagactctgttttgtacttttgacaaatcaaactggaaacattggagttatgcgttccctaataatatgtggaaaataccatatcttatcattctgaaaatggtcagtgaaatctgagtaatggctccttggatggatgtcatgacaactatgatattttgttgggtttatatgcccatagtatattttgttcaactcatatttttaagtatttaacacagagggaggaaggtataatacattatttagattaygaatgtcttacatcatatttcccattactcagggaaactagacaattgaataaatattactgtccttgaaatacctctaatgtattgtaatctcccactccacataaaggtcaaatttctaattcaacttaaagtgctctcaaaacaaatctcatcaagacaataacag

SEQ ID NO: 321638 - DNA, 586 bp, Homo sapiens
gtaagtttactattttttgctgtaagttttctgaaacactgttgcagttgtacttacttttatccaagaagaaacatagtccttaattgtcttttagactgatttactacttgatattttatatcttattttcaaactatggcaatttaaaaatttgagtattctgatatacatgaaaataaacagatcaatggactattccttaatttcatcccttaaaactcattgtactgaatcctgggtttattggcagggagggaaaaaaaacagaacccaaaccctccagtgcatagtagaagataatgtacctaaacmaaaactattggtagattattatcctatgtctgaataaagatttcataaataaagattcatgaaagtaaaataattactaaagaaaaactatcaatacgaagtcatttcttgtttcattttttccctttctacccacagaaatataaatatctgcaaagcttggaggtgaatattgcatttcccaattaactagtgtcttgctttggtattgcagaatgagctctttctacagttgactgaaattggccaattcatgggtgaacagattcta

SEQ ID NO: 321639 - DNA, 599 bp, Homo sapiens
tattcctggctttcttttaaccagaaataaatatttcatctgtattttggggtttcttttttttaagattatcaggcattagattctcataaggagtgcacaacctagatccctcacatgcacagttcacaatagggtgaaccttcctatgaatctaatgccgccgctgatctgacaggaggcggggcttgggcggtaatgcaagtgatggggagcggctgtaaatacagatgaagttttgcttattcgccagctgctgtgtggcctgaatcctaacaggtcacagactggtactgactggttcatggcttgggggttagggacccctgttcttcattctatgtccacgtgtacacattatttagctaccacttataagtgagaacatgtggtatccctctttctgtttctgagtkgttttacctgagataataacttccagttccatccatgtttctgcaaaaaacatggttttattcttttttatggcttaatacgactccattgtgtgtggagtcacattaagctacattttctttatgcagtcatctattgatgggcacttaggttgtttgcatatcctctctattgtgtatagt

SEQ ID NO: 321640 - DNA, 573 bp, Homo sapiens
tgtcctctcaatctatatcttagacaaatattgtgcaagaattaaaaggyctattctataatttattaaaatgcaaaatgttgcaatagataaaaaagaataaaagtagaacatcatgcactatgacttcaagacattgcctgaatctactgataccaaaaaaagtttgatagtggccagagaagagaatatagattgaaggaagaaaagagacagtccagaaattgactcacacatagttaaactctctttttaacacagttgatcaaggaattccatgggaaagaaaaacatcttcgacacatgttgatgaaatgtttgaatatccttatggttaaaaagaaacttcaactgccaactcagattatgcacagaaatcaattcaaaatgaattatagacttaatcatgaaagttaaacaatggcctttctcaagaaagtaaaataggagaatgggtaggcaaagtccttcatgcccttgggtaggcaaacattttgtagggagaatattgaaagcgctagccataaaaggtaaaaatggacaattacacttttgcaaaattaagtacaatca

SEQ ID NO: 321641 - DNA, 561 bp, Homo sapiens
cccctgctggaatgcagtggtgagaatcatagctcactgcaaccttgacctcttgggctcaagcaattctctcacttcagyctcctgagtagcttgggaccgtatatacatgccgctacacaagactagtgttttatttttaattttctgtcgaggtgagactttgctgtgtagcctaggctggtctcagactcctggattcaagtgatcctcttgccgtagcctcccaaagtgctgagattagacgtgtgagccaccatgcctggccaatggtcactccttgagcttctagtctaaatagtatgatgccatagacatagcatgttaatatgatggtagcatatggagggagcccaggcccttgctataacataaggcagaagagaagacaatgcattcgggaagagagactgaatgtcaactgatttctcttccaactgatggaaactctttttaattcttcatcctataagaaatagaaaataatacattccaccaagcaatgattgcataccatgtaactaagcctatgttcatctgtgttcagaaaaacagaatatc

SEQ ID NO: 321642 - DNA, 618 bp, Homo sapiens
tgtccatcctgacattctgcatatcattccctcctgtgtatcaatatgcaatacatttctatctaaaaaaatgattgggatcatattatatctaaattatgacttgcagttttccatgtctgctcatataaatttgtcagatcttctgattacctagttttccattgtatgaacgacacaattttctttttgattcttttatttatctatttatacagggtcttgctacatcacccctgctggaatgcagtggtgagaatcatagctcactgcaaccttgacctcttgggctcaagcaattctctcacttcagtctcctgagtagcttgggaccgtatatacatgccgctacacaagactagtgttttatttttaattttctgtcraggtgagactttgctgtgtagcctaggctggtctcagactcctggattcaagtgatcctcttgccgtagcctcccaaagtgctgagattagacgtgtgagccaccatgcctggccaatggtcactccttgagcttctagtctaaatagtatgatgccatagacatagcatgttaatatgatggtagcatatggagggagcccaggcccttgctataacataaggcagaagag

SEQ ID NO: 321643 - DNA, 493 bp, Homo sapiens
cccacagtttccagatccgagccagttctcagaccccacaggctgcaccctcttgtgaaaggatcctgcaatgtctcccatactagtgaagtgtttaggggttcaatggtctaaggcatgttgggacatgccctgtaagataaagaacaagttattagccaggtgcagtggctcatgcctgtaatcccagcactttgggaggccaaggcaggtggatcatgaggtcaggagttccagaccagcctggccaccatggtgaaaacccatgtctactaaaaatmcaaaaaaaaaaaaaaaaaattagccaggcatggtggcacgtgcctatagtcccagctactcaggagcctgaggcaggagaatcacttgaacccgggaggcagaggttgcagtgagctgagatcgcgccactgcactccctcctgggagacagagtgagactctgtctcaaaataaataaataaataaataaaaataaaacaagttattacac

SEQ ID NO: 321644 - DNA, 453 bp, Homo sapiens
atgccaggagaactgacttttggaaatattaatcataagtgagtgtgctactagatttatgaagcagtctgatagtggtttaaaataagtgccaaacataaattcctctgacctctaggataatgaattgtcctcacagctgctattgtcaaattttaggtacaacmagacttttgttttatagtcatgaagtcttgatctggttgttaactggtaagaatacagatgtaaattgttgggcagaaagaagtgtgagggtttatattcaagaatccatataaagaagataaaggaaataattcaagataatagaaatttgtaaatgtatactaagtatggatgagttgtataatagcattttcttctttcctttctattgttttgctgtgtctagctgaagtacaatttaccttctatttaagtattatatttctacaaattatcattaacatt

SEQ ID NO: 321645 - DNA, 537 bp, Homo sapiens
agagggtagatagttttattagactttgataagtcaagaatgaatgctttaattctagtgtaaacactagcattgtctaagtagtgtatttcttacaaatgaatgagacttagaataacaaggatttaatcagatgaaaataacataagaaattaaagaaacaaaataagttgaacaaatacaaaataaatattcaaatagtagatttaaatccaaatttaatttggatttaaataataaactaaattttccatttccaagccaaagattgtcacacaaattaaaaataaaatgaataaaagagtagcaaagmgcacactcagcactagttctaaatatcattttccaataataggaactaaagcttcttagagaaatgtctgattccatgactgagccagggaatattgaatgtggagcaccttgctttgccagaaagtaagaaagtgttcaaaaaccagagaaacacagcatttaaaaaggacacaggggctgattgaaaagagttcctagtggtcaaaactgaagcaatttgag

SEQ ID NO: 321646 - DNA, 619 bp, Homo sapiens
aaatgttaaaactttgtgaatttggtaaaataatctcttgaaatcaatcagattaaggaatttttactttggaaatcttattttattttcagaattggcaaaataaaatattattttaaggatttttatatcaatagaacataaaccttttatctacacgtctgtaaacatgaatactttatctataaatcatttcatacatgtagatgggttttatttaatacaggggcctcaatagaatatgttttttcatattattataaaacaaagtttaagactaatttttaaaaaatatcccacaaagtttattttgaataatctaaacatatgatattatagggaaattgctattacttttctcagagaagtaacatccatcaaaaactaaaaccaaagtttctaatatgtgtataatttaaagttaatttctcagtgagtcccctttctggacatgatcayataaaaaacacttatctcttaattagtattctaattaaggaatatatatatatagagagagagagagagggagagacagaaatgtatgtcttataaacaatgtatatcttacaaacattgagaacataaagtatataatatgtataatacaaatttgaga

SEQ ID NO: 321647 - DNA, 590 bp, Homo sapiens
tgttactaggaacgtaatactttctccatatgttttaggttttattcatacagcatgtattagttttacataataagacatctgacagttttctaatctttagacatataaaaggttgggataaacctgaaggccttttggttatacccagttgtaacacaggtgtttgttttggaatgaaaatgtgtttcttctctaaattttttgaactatttacaactgcttattttcttatgctaccaacaatattcakgatgacgcttgaaatactctaaaaatataaagtagcctcaaggacctgtgttgtatttaaaaaataaaactgattccaatgagaaattccaaaacagatatagatagatagatagatagatagatagatagataatgatctgatgaggcatgctgatagaaaacaaccttgtattgattaatttcccctttatattactttctaattttctcctcaaagatttgttaagcatcttttatatataaggcatagtgttggaagttttttttttatatatcacaagtgttacaaagtccttcagcgttaaaaaaaatgatcaatagtaaaactatagtca

SEQ ID NO: 321648 - DNA, 521 bp, Homo sapiens
taaatgacctattgctatcaaaacagtattagaatcaggaatgtaatatagatttcattcacataggaagcattgtttatgaagtcggtatttagcctatcattttaaatyttaaaacaaaaaagaatattttatttatttgttttctttttttcttttttctttctttttgagatagaatttcactcttgttgcccaggctggagtgcagtggtacaatcttggctaactgcagcctccgcctcctgggttcaagcgattctcctgcctcagcctcccaagtagctgggattacaaatgctcaccaccacacccagctaattttgtatttttagtagagacagggtttcactatgttagtctggctagtctcaaacccctaacctcaggtgatccacccaccttggcctcccaaaatgctgggattacaggcatgagccacctcacccggccaaaaaaatgaactatattaaattcagtatttggtatgtttcaggaaacacttattttctatcaaatat

SEQ ID NO: 321649 - DNA, 521 bp, Homo sapiens
taaatgacctattgctatcaaaacagtattagaatcaggaatgtaatatagatttcattcacataggaagcattgtttatgaagtcggtatttagcctatcattttaaattttaaaacaaaaaagaatattttatttatttgttttctttttttcttttttctttctttttgagatagaatttcactcttgttgcccaggctggagtgcagtggtacaatcttggctaactgcagcctccgyctcctgggttcaagcgattctcctgcctcagcctcccaagtagctgggattacaaatgctcaccaccacacccagctaattttgtatttttagtagagacagggtttcactatgttagtctggctagtctcaaacccctaacctcaggtgatccacccaccttggcctcccaaaatgctgggattacaggcatgagccacctcacccggccaaaaaaatgaactatattaaattcagtatttggtatgtttcaggaaacacttattttctatcaaatat

SEQ ID NO: 321650 - DNA, 608 bp, Homo sapiens
atagtctcaaaaaggaaaaatgtaagaaacaagacagagtagagaaaaataattctataaaatgaataactgaatctaaataattgatgacactctaaaaataatatgctcataatattacttataattttcccttattgcaacagggcagtggtgacaggtaagaaaaatgaagagagttgggcaaggttcccrtctatcgtagagagtaaattgatatggctaaaccttcataacaactgaaaaataagttggaatatgtatgttaagatttaaaggatatacactaggcagggagaaacacaatttgtaacttcaacccataaatggaaaaagaaaaccagtaacaagtaatcttgatgaatcaaattaaaagcagataagaacagcacagtaacagagcagaagagtatcagtgataaacaaagtaatatggaaaggaaatattcatgcattttagaattcacaaaacataaatggattaaattccccaagtcaaaggtttgaaaaaaaaatacagttatcttttatttaaagataagtaccataaaagtgatgttgtagaaagactgaaaattaagtaatgatgattaagtattaggtaaatg

SEQ ID NO: 321651 - DNA, 608 bp, Homo sapiens
atagtctcaaaaaggaaaaatgtaagaaacaagacagagtagagaaaaataattctataaaatgaataactgaatctaaataattgatgacactctaaaaataatatgctcataatattacttataattttcccttattgcaacagggcagtggtgacaggtaagaaaaatgaagagagttgggcaaggttcccgtctatcrtagagagtaaattgatatggctaaaccttcataacaactgaaaaataagttggaatatgtatgttaagatttaaaggatatacactaggcagggagaaacacaatttgtaacttcaacccataaatggaaaaagaaaaccagtaacaagtaatcttgatgaatcaaattaaaagcagataagaacagcacagtaacagagcagaagagtatcagtgataaacaaagtaatatggaaaggaaatattcatgcattttagaattcacaaaacataaatggattaaattccccaagtcaaaggtttgaaaaaaaaatacagttatcttttatttaaagataagtaccataaaagtgatgttgtagaaagactgaaaattaagtaatgatgattaagtattaggtaaatg

SEQ ID NO: 321652 - DNA, 585 bp, Homo sapiens
aataaatcattcaaaatagtgaaatgtaaaaatctctgacacaagacaacaaagataaaaaataaaaagaaatcagaaaaataattcaagatatgaatgagaaatttagcaaaaagatattataaaaaacaatcaggccaagttcagtggctcacatctgtaataccagcactttgggaggccacggcaggtgaatcatgaggtcaggagtttgagaccagcgtggccaaaatggtgaaaccccatcactactaaaaatacaaaaaattagctgggcgtggtggcgggcacctgtaatcccagctactcgggaggctgaggcaggagaatcgcttgaacttgggaggcaaaggttgtagttagctgagattgcaccactgcactccagtctgggtgacagtgtgagaccccgtctcaaaaacaaasaaacaaacaaacaaacaaaaaaccagaaccaacaagaaattctggaactagagaattcattaaatgaaatacaaaatacatttggaagcttcagcaatagactagatcaagcagaagaaagaatttcagaacttaaagacaggtcttttgaaataactc

SEQ ID NO: 321653 - DNA, 585 bp, Homo sapiens
gcagaaatagctatatttacgtaaaataaacttcagagcaagaaaaattaccagagataaggacattatgtgatgataaaaacatccctctatcactgcatagcaatgctaaaagtgtttgcatcacagtgctgaaaacagtactgaaaacagtgctgcaaaatacgtgaagcaaaatctgatagcaccaataggagaaatagacaaatacagatggaagttaaaacacctctttctcaacaattaatagaataactagacacaaagttaaaaaggatataggagaactcagcagcattatcagctaacaggattgaacatttataatatttcattcaatgaccacatagtacacattctttccaagttcccaggcacaatattccaagatagaccttacactgggtcacaagtttaaaaaaattaaaatcatacagattatgttctttgaccaaaaggggattaaaataaaaatcaatcacacagagataaaagaaaaaaccctccaaatacttcaatagtagacaacacatttctacatagtccatagattaaggaaaaygtttaagggaaatattaaaagta

SEQ ID NO: 321654 - DNA, 594 bp, Homo sapiens
aaatctaccaaaaataccctacaactaacattctacttaatggtgaaagattgaattcctccccaccaatcaagaattagtcaatgatgtctgctctcaccaaacactgtattggaaattataaaactactgattgcctgacctcgtgatccgcccacctcccactgcagcctcccaaagtgctgggattacaggtgtgagccaccgcgctcgggaccatcctggctaacacggtgaaatcctgctctactaaaaatgcaaaaaattagcagggcgtggtggcacgtgcctgcagtcccagctactagggagactgaggcaggagaattgctagaacccaggaggcagaggttgcagtgagccgagatcatgccactgcactccagcctgggcaacagagcaagactcagttgccaaaacgaaaacaaaaacaaacaaacaacaacaacaacaacaacaacaaaacacctactgattgaaaaggaaaaaataaaacaatcccrattttcatatgacatgattgtttatgtagaacattctaaggactctacaaaaaatttctaagtcttataagtgagcttagtaagtttgcag

SEQ ID NO: 321655 - DNA, 554 bp, Homo sapiens
gtaaaaccatgcctgcaagatcagacccttgctaattacagtactaacattaactttttcattcattgtcaactttcattcatttcttaaggttaatactaattgcaacttaaaaaaaataatgctaaatagggtaagcaatctgagaacccaaatggtatatccccctcctgatacacattctcttattagacacatacacagaggagggraaaaaaaatccctccaaagagctggcactgcaaattatttttttataaattatatttgttctagggttattgaatatactatttttttatttataaaatgagagtttggggaaaatcgacttggtaagcagtctcaatggagaatttaaaatgagggaaaacatggtgaagaggaaataataaggatagtaaagtagtagatcttgaaaagtaatctaggataaaccaaagggacatttaataaacatgatctttgttaaatttgctttggaactagctagcaaaaattccagaactattttgctagttaagaaaataactgcttttctgaaatgattcccc

SEQ ID NO: 321656 - DNA, 599 bp, Homo sapiens
tgtttatctggcaattgctgagtaaaatgaatttaggtgttgtgttatgatgacaatttgttaattttttacttttttctattaccagttaaagtttatatttttgattagatattaacatacacttgatgcttaatatagtatttgaaatatttaatgaagtagtttacataaagatacaggataattgcatggttttgttaggatgactatcatrttacatatacttcatgtctatctaatgttttttgcatagtctattttgaataattttaatgttgatattttagcctttgtcagtcttttccagatatctctcaaaaaaattttaaacctttatatgtaatgctttttcaagtttgttttatatatgtggctgatttaaaaaaatcagagaaacttgaagctttccctctaggatcaggaataaggcaacgatgtcttttctgatcaatgcttttttaacaccacactgaaagtcttagctaatgcaataagaaaagaaagaaaaggaatacagctcaggaaggaagaaataaaactgtcctttttcctggatggcatcatcatgtatatagaaaatccaaagaactgacaaa

SEQ ID NO: 321657 - DNA, 585 bp, Homo sapiens
agccagtcatggtggtgcatgcctgtaatctctgttactcaggaggctgagatgggaggctctcttataccccagaggcagaggttgcagtgagccgagatcacaccgctgcactccagcctgggcaacagggcgagaccctgtctcaagaaaagaaaagaggggtgttttttgtttgtttgtttgttttttgtttttttttttttaagttggaacatcgtctttagaagaaaaacaaaagcagtcagaattyatgagtttatctttggctttctcccaatattttcctcagtctttcctcattttcaattcttcttatgacctgccttccagatgcctacaaccacatgctgttctcagatcctaaaacacattcagactcagccttcagtagttatattccaagcaatccaaaataacctttccctgttcccccaataaaaatgtaaattccacaagtgtatcagatcttatcaagatgttacagaattatttgattaaaaattcacatgtagatattaaaagtggatagaaaatccccaggaagtatgttgcattttaaaattggattttgttatcgtactt

SEQ ID NO: 321658 - DNA, 608 bp, Homo sapiens
cattattctcaattataacactccaggtgaagccttggttgcatagtcaatactaaaaattatatcttggtagaaatgagaacagattcttactgaacatatgtaagtaactgaattaacatgaaaagttagaagctgaagaatttctggagggcccaatggaaatagatattattttaaaatgtttcatttcagataacaaaaacagaattgattaaattggtatgtttcattagattttgggttataagtcttgcgacgtgttttgttcttgactcaacccagtctgaatgttgtataagtgatgtcatcagaagcctttacccaagagtcttttctctgaattgccaataatgtgaagaacctgcaatagccctttttcatggtgttccaacaccgtggaaaaggactttcctgtccatgtcaaagtctttttttgtcaaatacaaaatcagataagcatctgagtaaaataaagactatttgtagattacagagacttaatggctattgctaatctattaytgaaatttttcaaatgtgaaaggactaatgagagttcataaagagaatctgtaagtgacaacaaatgttggttgtttctgcag

SEQ ID NO: 321659 - DNA, 460 bp, Homo sapiens
cttcaaaaaagaaataattattatattactgttctgtaggtcaagaatttatgagcagcttagctgaatggttttggctcagaatctctcgtgaaattgaagtaggctggggtcatctcatggctcaagtgggggccagaagatccatctccaagatagctcactcacaagggtgtgggcaggaggcttcagttcctcaccacatggaggtctccagatagcttgaatgtcctattgacatggcagctggctactttcagagcaaatgrtccaagaatgttacaaatgtcttttatgacttggtgtcagaagttacacatggctacttccccaatattctatgcattagaaaagagtcactcagaccaggccactgggatattaagctccacctacacaaggtaagagtgtcaaacattttgtggatatttaaaaaccaccaaaatactaaatgaaaaag

SEQ ID NO: 321660 - DNA, 599 bp, Homo sapiens
aatataatgatgatttatgactgcccttttgataaatgtccaaaaaagcactcagaagtgaagtaacattttaatagtacttgctctatcaagtactgatgctcatttttgagacacgtgtggaatatgataaatcatatttgaaaattcttatttttcaaaaattgtcatggaagtagatgcaaggattccatttaaaaatcaaatatatatatatatatatatacacacacacacacacacacacayatatatttaaatctgtttaaaagagggactattttgattataatatttcaaaatcactataaaacacattcgaatttatctgatgacctgaggacatcttgacaagaagataattttctcttaaatgacaaaaaacaactatttgttgtttatttgctcagtggaaatagtaaaattttcaatctaaacaaaataaagtaaaataaatcagaaaaatgtttggcaagtcttccaagtaaagcatggatgatagaatccattgagataattgctacagtgataaatgcataaagtatatgtttttatcatttataattattaaaccaaagtaaataattgaacaataagtt

SEQ ID NO: 321661 - DNA, 598 bp, Homo sapiens
cacctgtgacctgcaggtaaggcatctactataaaacaccgtacaggaatatcttacatcacataacttaaagcagtccattaatatcaaaygagagtaagtcaaatgtttgcagccaaatgtatcctatcctatcaatctaaagaatcatttcaagaaaatcagtcaacttttaactttatgtcctgattctatctgcctcattaaacctgccttctcatatctgtgctacaaagaatttttggaaataccctaaaaatgttgtgggagaaacacaatgaactagtacttctacaacactttttaaaataatctgttaaagtagagtaattttaaagtttggaaataaaatataatgaagtgaaaaagcaacagatggggttagtgtagattacatttagacacaacataatatttgagtaaaaattattcagatatttgtattatttaccacaccacaaataagtccattgagatgtgagatttcaaaaaaaaaaaaaagcattaaaaatactggaataaaatactagaggattactttatgatctcaagatagatatggacaatcttagcgtgacattaagcctagagactatat

SEQ ID NO: 321662 - DNA, 598 bp, Homo sapiens
cacctgtgacctgcaggtaaggcatctactataaaacaccgtacaggaatatcttacatcacataacttaaagcagtccattaatatcaaacgagagtaagtcaaatgtttgcagccaaatgtatcctatcctatcaatctaaagaatcatttcaagaaaatcagtcaacttttaactttatgtcctgattctatctgcctcattaaacctgccttctcatatctgtgctacaaagaatttttggaaataccctaaaaatgttgtgggagaaacacaatgaactagtacttctacaacactttttaaaataatctgttaaagtagartaattttaaagtttggaaataaaatataatgaagtgaaaaagcaacagatggggttagtgtagattacatttagacacaacataatatttgagtaaaaattattcagatatttgtattatttaccacaccacaaataagtccattgagatgtgagatttcaaaaaaaaaaaaaagcattaaaaatactggaataaaatactagaggattactttatgatctcaagatagatatggacaatcttagcgtgacattaagcctagagactatat

SEQ ID NO: 321663 - DNA, 598 bp, Homo sapiens
cacctgtgacctgcaggtaaggcatctactataaaacaccgtacaggaatatcttacatcacataacttaaagcagtccattaatatcaaacgagagtaagtcaaatgtttgcagccaaatgtatcctatcctatcaatctaaagaatcatttcaagaaaatcagtcaacttttaactttatgtcctgattctatctgcctcattaaacctgccttctcatatctgtgctacaaagaatttttggaaataccctaaaaatgttgtgggagaaacacaatgaactagtacttctacaacactttttaaaataatctgttaaagtagagtaattttaaagtttggaaataaaatataatgaagtgaaaaagcaacagatggggttagtgtagattacatttagacacaacataatatttgagtaaaaattattcagatatttgtattatttaccacaccacaaataagtccattgagatgtgagatttcaaaaaaaaaaaaaagcattaaaaatactggaataaaatactagaggattactttatgatctcaagatagatatggacaatcttagygtgacattaagcctagagactatat

SEQ ID NO: 321664 - DNA, 637 bp, Homo sapiens
aaatgtatcctatcctatcaatctaaagaatcatttcaagaaaatcagtcaacttttaactttatgtcctgattctatctgcctcattaaacctgccttctcatatctgtgctacaaagaatttttggaaataccctaaaaatgttgtgggagaaacacaatgaactagtacttctacaacactttttaaaataatctgttaaagtagagtaattttaaagtttggaaataaaatataatgaagtgaaaaagcaacagatggggttagtgtagattacatttagacacaacataatatttgagtaaaaattattcagatatttgtattatttaccacaccacaaataagtccattgagatgtgagatttcaaaaaaaaaaaaaagcattaaaaatactggaataaaatactagaggattactttatgatctcaagatagatatggacaatcttagcgtgacattaagcctagagactatatagaaaactacttagattatataaaaatatttaaatgtttctgcataaaataataaaaccataggccattaaaatgtgaaagcaaaatwaaaaaatgtgggaagctttttgcaatttatatcaaagacaaacgttaggcatcattagaggcattgca

SEQ ID NO: 321665 - DNA, 604 bp, Homo sapiens
ttactattttcattttccaatttgtaagtccctttccattttccagatcattaccatttataatgttctgawcattcttcttgagagttcctggggtaattaaaaggagtcctcctgatgggtccctgacctttggcagtactcctcaaacgctaggactgctgcaaggtgcaaagcccttatttatacccttccattgtagagttgcgtaaggcatgtttttggttatttattcaacagagatttattaaatgccaacactgtgtcaagcactgtgttcatcactgcgttaacttcctgttaacttcctacttagagaaacaacaattacaatatgtcctgataagtgctgtgataaaaagtatgtacaggattctgtatgagcccaacacaatagggtcaggcaggaaggactggcagcagaggagggttacatttatatcaaacagccagtgtagattatagaggagtgttcaggatctataaaatgttccatctgcccaaagaaagggttcatgtcaccctcagtcaataaaagagtaaatcttctttactttgtttccaaaatatatactcaaagttcatccacttctcttccccaatg

SEQ ID NO: 321666 - DNA, 604 bp, Homo sapiens
ttactattttcattttccaatttgtaagtccctttccattttccagatcattaccatttataatgttctgatcattcttcttgagagttcctggggtaattaaaaggagtcctcctgatgggtccctgacctttggcagtactcytcaaacgctaggactgctgcaaggtgcaaagcccttatttatacccttccattgtagagttgcgtaaggcatgtttttggttatttattcaacagagatttattaaatgccaacactgtgtcaagcactgtgttcatcactgcgttaacttcctgttaacttcctacttagagaaacaacaattacaatatgtcctgataagtgctgtgataaaaagtatgtacaggattctgtatgagcccaacacaatagggtcaggcaggaaggactggcagcagaggagggttacatttatatcaaacagccagtgtagattatagaggagtgttcaggatctataaaatgttccatctgcccaaagaaagggttcatgtcaccctcagtcaataaaagagtaaatcttctttactttgtttccaaaatatatactcaaagttcatccacttctcttccccaatg

SEQ ID NO: 321667 - DNA, 604 bp, Homo sapiens
ttactattttcattttccaatttgtaagtccctttccattttccagatcattaccatttataatgttctgatcattcttcttgagagttcctggggtaattaaaaggagtcctcctgatgggtccctgacctttggcagtactcctcaaacgctaggactgctgcaaggtgcaaagcccttatttatacccttccattgtagagttgcgtaaggcatgtttttggttatttattcaacagagatttattaaatgccaacactgtgtcaagcactgtgttcatcactgcgttaacttcctgttaacttcctacttagagaaacaacaattacaatatgtcctgataagtgctgtgataaaaagtatktacaggattctgtatgagcccaacacaatagggtcaggcaggaaggactggcagcagaggagggttacatttatatcaaacagccagtgtagattatagaggagtgttcaggatctataaaatgttccatctgcccaaagaaagggttcatgtcaccctcagtcaataaaagagtaaatcttctttactttgtttccaaaatatatactcaaagttcatccacttctcttccccaatg

SEQ ID NO: 321668 - DNA, 583 bp, Homo sapiens
tttgtttccaaaatatatactcaaagttcatccacttctctyccccaatgctattactgtcatccatgctgccatcatctctcatctgaaattatttccctaaacctacttactgttctctatgcattcattcttactcattgcaatttattttttccccagcatctaggagtattaaatagcaaatcagataaggtttaaaccttccattggctatctactgaactacttagattaaaacttataattccttggcatggcttaccaggtcctttgatctagtacctacctaacccctccagtccttacctagtgtttttccctcaattattctccatgcttagcattattggtctttattctatttctaagacacgagttccttctgtcccacacagggattttacatttattatgctccttgcctggaatgactttatcctaaacatttgcataggtgagaacttcttgctgacagtgctcaagtcacatgccaccttctcaatggatccctctaaaacaatccagtctaattctatctgctaagattatgccacatcacactgttttctttctttaaaat

SEQ ID NO: 321669 - DNA, 534 bp, Homo sapiens
attggtctttattctatttctaagacacgagttccttctgtcccacacagggattttacatttattatgctccttgcctggaatgactttatcctaaacatttgcataggtgagaacttcttgctgacagtgctcaagtcacatgccaccttctcaatggatccctctaaaacaatccagkctaattctatctgctaagattatgccacatcacactgttttctttctttaaaataattagcaccatataaatttatatattactttgcttactaattgtttgtttcactgtgctagaatataagctttaagaacagggaccttcatgttgtcaccatcatttatcaaatgcctagaaagtacatagcatatagtaggtcatcaacagacatatgctgggttagtgaaaacggacatgtaagcaagcactagacagaaaagcctggtatatttcatggttatactaataaataggatggatccacaaccaatatttggtttggatgttaggactgatgataccacatcttcacc

SEQ ID NO: 321670 - DNA, 534 bp, Homo sapiens
attggtctttattctatttctaagacacgagttccttctgtcccacacagggattttacatttattatgctccttgcctggaatgactttatcctaaacatttgcataggtgagaacttcttgctgacagtgctcaagtcacatgccaccttctcaatggatccctctaaaacaatccagtctaattctatctgctaagattatgccacatcacactgttttctttctttaaaataattagcaccatataaatttatatattactttgcttactaattgtttgtttcactgtgctagaatataagctttaagaacagggaccttcatgttgtcaccatcatttatcaaatgcctagaaagtacatagcatatagtaggtcatcaacagacatatgctgggttagtgaraacggacatgtaagcaagcactagacagaaaagcctggtatatttcatggttatactaataaataggatggatccacaaccaatatttggtttggatgttaggactgatgataccacatcttcacc

SEQ ID NO: 321671 - DNA, 430 bp, Homo sapiens
ttgtgttgatatttgagtgttcagatcctatgtcaagctcagtttcctattgacttcaaatcttaggctgttccactgagatatgcaacattgtccctatacttgcaatggtagatgaggagttcttggaatcttgactcaaatattcaggattctggcaagggaactgggctctgtcagttttttcatagagatatccttgcctaaagggacagaaacaaagaagtttccaaaatattctgtttattagtaggttgtgctgttaatgaataactgtagctaagcatcatatgccttgaggactgggatttgcagcttgtccctcctacttcacatctactgttcaaaagaggtcctcccttcttctggaccatccttataacactcrtgtccctgttgccaaaaatcctgcatgtgctttcaagtgagc

SEQ ID NO: 321672 - DNA, 556 bp, Homo sapiens
tagtccattttcacactgctatagaaactgccctagactgggtaatttataaagaaaagaggtttaattgactcatagttccaaatggctggggaggccataggaaacttacattcatggcagatggtgaaggggaaacaagcttagacattctcacatggtgtcaggagasagaagagtgagtaatgaagagggaagagccccttataaaaccatcagatctcatgagaactcactcactatcatgagaacagcatgggagaaaccacccccatggtccaatcacctcccaccagatctctctctagacatgtagggattacagggattataattcaagaggagatttgggtggggacagagccaaacaatatcattctgctctggctcctcccaaatctcatgtcctcacatttcaaaattaatcatgccttcccagcagtcctccaaaatcttaattcattccagcattaacccaaaataccaagtccaaagtctcatctgacacatgtcaagtttccaaaaccaatcatgtcttcccaacaatcccccaaag

SEQ ID NO: 321673 - DNA, 533 bp, Homo sapiens
tccccaagaatctaagacagagtttggttacagacattatctaaaccatactgctagcctggaataacgtagtatggacagaggaaagggcagagttcagaactatcatcagcaaaggaagctcgggcagtgtgcagagaaagttctatgtgaaaataaaagaacaggaagatgaaaaacatttttaagatgaagggaatctaagctgcacagggtaaaattatagcaaagaaacccgatattctatacaaaaaacaaaaagaaaaatattaaagaaaataattgtgcaagaccaaactcagtaatgtggayttgtttaatactgaaaaaactcctaaagaggcatagattttggacagttaattattttggcttgttactttctttatcctaggaaatatttggctaggattagagatgctattttttttgtatgttaaaaaacagtccaactcttttctttttatctgtagtgtgtttggatcaacatttagttgtatattcccaaaaagatcaagaatattttattatgt

SEQ ID NO: 321674 - DNA, 533 bp, Homo sapiens
tccccaagaatctaagacagagtttggttacagacattatctaaaccatactgctagcctggaataacgtagtatggacagaggaaagggcagagttcagaactatcatcagcaaaggaagctcgggcagtgtgcagagaaagttctatgtgaaaataaaagaacaggaagatgaaaaacatttttaagatgaagggaatctaagctgcacagggtaaaattatagcaaagaaacccgatattctatacaaaaaacaaaaagaaaaatattaaagaaaataattgtgcaagaccaaactcagtaatgtggatttgtttaatactgaaaaaactcctaaagaggcatagattttggacagttaattrttttggcttgttactttctttatcctaggaaatatttggctaggattagagatgctattttttttgtatgttaaaaaacagtccaactcttttctttttatctgtagtgtgtttggatcaacatttagttgtatattcccaaaaagatcaagaatattttattatgt

SEQ ID NO: 321675 - DNA, 533 bp, Homo sapiens
tccccaagaatctaagacagagtttggttacagacattatctaaaccatactgctagcctggaataacgtagtatggacagaggaaagggcagagttcagaactatcatcagcaaaggaagctcgggcagtgtgcagagaaagttctatgtgaaaataaaagaacaggaagatgaaaaacatttttaagatgaagggaatctaagctgcacagggtaaaattatagcaaagaaacccgatattctatacaaaaaacaaaaagaaaaatattaaagaaaataattgtgcaagaccaaactcagtaatgtggatttgtttaatactgaaaaaactcctaaagaggcatagattttggacagttaattattttggcttgttactktctttatcctaggaaatatttggctaggattagagatgctattttttttgtatgttaaaaaacagtccaactcttttctttttatctgtagtgtgtttggatcaacatttagttgtatattcccaaaaagatcaagaatattttattatgt

SEQ ID NO: 321676 - DNA, 533 bp, Homo sapiens
tccccaagaatctaagacagagtttggttacagacattatctaaaccatactgctagcctggaataacgtagtatggacagaggaaagggcagagttcagaactatcatcagcaaaggaagctcgggcagtgtgcagagaaagttctatgtgaaaataaaagaacaggaagatgaaaaacatttttaagatgaagggaatctaagctgcacagggtaaaattatagcaaagaaacccgatattctatacaaaaaacaaaaagaaaaatattaaagaaaataattgtgcaagaccaaactcagtaatgtggatttgtttaatactgaaaaaactcctaaagaggcatagattttggacagttaattattttggcttgttactttctttatcctaggaaatatttggctargattagagatgctattttttttgtatgttaaaaaacagtccaactcttttctttttatctgtagtgtgtttggatcaacatttagttgtatattcccaaaaagatcaagaatattttattatgt

SEQ ID NO: 321677 - DNA, 542 bp, Homo sapiens
ttggagactactgtcatcttaatagtactaattcttctaatccatgaccatgggataccttttcatttatttaattcatatttaacacttttttgtaagtttgagacaacatgttttagcattcttttgtgaaayctgttaagtattttattctttttgatgccatggtaaagacaaatgtttcccgagttcaagtgattctcctgcctcagcctcccaagtagctgggattacaggtgcccaccaccacacccagctaattttgtatttttagtagagacggggttctgccatgtgggtcaggctggtctcaaattgctgacctcaggtgatccgcccacctctgcctcccaaagtgctgggactagaggtgtgagccactgtggccagctgattatttagaagtgtgtttttaaatttccacatacttttgaattttccaaatttccttttgtacagacccttgaacaacatggtttgaacttcatggattcatttatatgcagagtttcttctacctctgccacccatgtgaaaacaag

SEQ ID NO: 321678 - DNA, 542 bp, Homo sapiens
ttggagactactgtcatcttaatagtactaattcttctaatccatgaccatgggataccttttcatttatttaattcatatttaacacttttttgtaagtttgagacaacatgttttagcattcttttgtgaaacctgttaagtattttattctttttgatgccatggtaaagacaaatgtttcccgagttcaagtgattctcctgcctcagcctcccaagtagctgggattacaggygcccaccaccacacccagctaattttgtatttttagtagagacggggttctgccatgtgggtcaggctggtctcaaattgctgacctcaggtgatccgcccacctctgcctcccaaagtgctgggactagaggtgtgagccactgtggccagctgattatttagaagtgtgtttttaaatttccacatacttttgaattttccaaatttccttttgtacagacccttgaacaacatggtttgaacttcatggattcatttatatgcagagtttcttctacctctgccacccatgtgaaaacaag

SEQ ID NO: 321679 - DNA, 594 bp, Homo sapiens
tttgcctccagggttacctgtattcttaggtattttatagttttttttggctattgttaatgggattgtattattgacttggctctcagcttggacattgttggtgtataaaaatgctactaarttttgtacattgattttgtatcctgaaactttgctgaagttatttctcagatctaagaacttttgggaagaaattacagaattttctagataatttgatttcctctcttcctgtatggatgtattttttttctcttgcctaactgttttagctaggacttccagtaatatgttgaagaggactgatgaggatcagcctccttgtcttgttctagttttcaaagggaatgctttcagctattgcccattcagtatgatgttgcctgtaggttcgtcatagatatctcttattacattgaggtatgttccttcaatacctagtttgttgaaaatttttaacatgaagcttgttgaatttttccaaagccttttctgcatctattgagataatcatgtggtttttgcctttagttccatttgatgaatcatatttattaatttgtatattttgaagcaatattacatcccagt

SEQ ID NO: 321680 - DNA, 647 bp, Homo sapiens
ttgcatgtaattgtatggttttcacagatattcttagtattgatttctatttttattgcactgtggttttagaatgtggctggtattactttgttcttttttgaatttgttgagaactgttttatggctgagcatgtggtcaactttggagtatatgctatgtgcagatgagaaggatatatatttgttgtttggtggagtgttctttagttgcctgttaggtccatttggtcaagtgtcaagttttcatcctgaatatctttgttcattttctgcctcaaaaatctgcccaatatagtggtggtaaagtctcccrctattattgtgtgcttatctaagtctctttgtaagtctctgagaacttgttttatgaatatgggtgtgccagtgttaggtgcatatatattaaagatagttaagtcttcttattgaacagaaccttttatcattatggaatgtcctccattgtcttttttaactgttgttggtttgaagtctgttttttcttaaattaggataccaactccctgctcttgtttgttttccctttgcttagttgatttttctccatccttttactttgaacctatgggtatcattgcacatgagatgcatctcttgaagacaacataccattgggtcttatt

SEQ ID NO: 321681 - DNA, 524 bp, Homo sapiens
aaaaaactggggttatttcagtgggcagtgttatgggctgaaccatatttctcaaaattcrtgctgaagctctacccccagtacctcagaatgtgactatataatggacatagggttaaagaggggactaaagtaaaatgaggttgttttacttcattttgagagtgtccttaagaggagattaggacatgtgcacacacagactgaaggatgattctatgaagacacagctagaagacaactacctacaaggcaaggagagagtcctcgtaaggattcaacccaggcaacattttaatcttggacttctagtctccagaattgagaaaaactacatttctgtttaagctacccagtcggtggtactttgttatggcagccctagcaaactagtacaggctgagtacctttagagaggggagacagcatgcccactgactgcaaaattaattttgctctttagtgtctgtgaaatgaaggagacattaacagtgcttcagaggagctcttggctaagggaggtt

SEQ ID NO: 321682 - DNA, 524 bp, Homo sapiens
aaaaaactggggttatttcagtgggcagtgttatgggctgaaccatatttctcaaaattcatgctgaagctctacccccagtacctcagaatgtgactatataatggacatagggttaaagaggggactaaagtaaaatgaggttrttttacttcattttgagagtgtccttaagaggagattaggacatgtgcacacacagactgaaggatgattctatgaagacacagctagaagacaactacctacaaggcaaggagagagtcctcgtaaggattcaacccaggcaacattttaatcttggacttctagtctccagaattgagaaaaactacatttctgtttaagctacccagtcggtggtactttgttatggcagccctagcaaactagtacaggctgagtacctttagagaggggagacagcatgcccactgactgcaaaattaattttgctctttagtgtctgtgaaatgaaggagacattaacagtgcttcagaggagctcttggctaagggaggtt

SEQ ID NO: 321683 - DNA, 524 bp, Homo sapiens
aaaaaactggggttatttcagtgggcagtgttatgggctgaaccatatttctcaaaattcatgctgaagctctacccccagtacctcagaatgtgactatataatggacatagggttaaagaggggactaaagtaaaatgaggttgttttacttcattttgagagtgtccttaagaggagattaggacatgtgcrcacacagactgaaggatgattctatgaagacacagctagaagacaactacctacaaggcaaggagagagtcctcgtaaggattcaacccaggcaacattttaatcttggacttctagtctccagaattgagaaaaactacatttctgtttaagctacccagtcggtggtactttgttatggcagccctagcaaactagtacaggctgagtacctttagagaggggagacagcatgcccactgactgcaaaattaattttgctctttagtgtctgtgaaatgaaggagacattaacagtgcttcagaggagctcttggctaagggaggtt

SEQ ID NO: 321684 - DNA, 524 bp, Homo sapiens
aaaaaactggggttatttcagtgggcagtgttatgggctgaaccatatttctcaaaattcatgctgaagctctacccccagtacctcagaatgtgactatataatggacatagggttaaagaggggactaaagtaaaatgaggttgttttacttcattttgagagtgtccttaagaggagattaggacatgtgcacacacagactgaaggatgattctatgaagacacagctagaagacaactacctacaagkcaaggagagagtcctcgtaaggattcaacccaggcaacattttaatcttggacttctagtctccagaattgagaaaaactacatttctgtttaagctacccagtcggtggtactttgttatggcagccctagcaaactagtacaggctgagtacctttagagaggggagacagcatgcccactgactgcaaaattaattttgctctttagtgtctgtgaaatgaaggagacattaacagtgcttcagaggagctcttggctaagggaggtt

SEQ ID NO: 321685 - DNA, 553 bp, Homo sapiens
aaaacataacaaagtatatagagtttgcagaactggataaasaaattccttaaacaaacagtagtagtagcagcagcaacaataacaacaacaacaatagcaacaataaacagcaataataaaaaaccatggtttgggggagtaggtctgattttccagacttgcctcaaatattattcaaaataaccagttttaaaaaacaaatttaatagatatgtgaagaaacaggaaagtgtggcctattcacacagaaataaaaagcagacaatagaaattgtccctgaagaaattcagatgttttacttacgatagtgaatttaaattatctattataaatatgttaaaggataaaacaatctgaacatataaaggaaagtgtaagaaatgcttctctaactaaagaatatccatagatagaaacaataaaaagagccaaatagaatttctggagcgaaaagtataatcattgaagagaaaaaaaaaaatcactagaggggttaaacagcacatttgagctgtttaaagaatcagtgaactggaagatatgacaatt

SEQ ID NO: 321686 - DNA, 515 bp, Homo sapiens
gagcttttgccaactccctccctagatggctagaccacttcttaaatctctgcaaaaaaaaaaataaaataaataaagaatagactgatgtcgccatttacctaacaaaagtataacctatgactttggccatcttttttggcaggatctgctgattggatggatccatcttgaataataaatgtctaaactcttaagctaatcaccatgccctttggtcctctcaggtgcctttgacagagtcagtctctgtagctgagccaggtagcaattaaaacaacctgttgaacatttactatgggctggtcactgcacatacattatcttatttaatccttcaaacaacttttgggagcttaataatatgattatgcttaacttgcctatttaaaattctagtaaatagtgaggggctgtagttctataaaatttttagagcttaaagtgactgtatttggggttwctagggagaagccaggatttctgattttgtagatgatagttcatgtctagac

SEQ ID NO: 321687 - DNA, 439 bp, Homo sapiens
agtgagtgctttgatctgaaaacagacacacttgggttcaaatcctgactcagacctattcgagcagtgggatcttaggaaaattatctccggaaccttaaatttgcatacatttaatatgaataaacgttattaacatatcctctatgtcatagggttgtgaaatgctttgtgtactacctaggacagagtaaaatcaagaaacattgactgttaataataatgaagactggaataagacttctgggatgtgacattaaaaaacagcaaaattcttgccagttaaatgtaaaatttaccagagatgasaagagagtgtttttctattttgttttgtttagagggacagtgcgatatagcattttagttggaaaaagctgagctatggagacaataaagacctaagtttgaatccatgctctgtctctgattaagcccc

SEQ ID NO: 321688 - DNA, 615 bp, Homo sapiens
cacatacaaaaccacaaactccataagtcacccttaacgaagaccatttagaaacaggtatcacctttcctaaatcaacacaatgtgaaaacttcttggtaacatcattgtttttctctgggtctatcctatatctattttaatgagagatgaaaagagagaaagaagaggagaaaggaacactgcacatctgaatatttctccaaagtggccagttataaaataacaatatttgaagttgataaaaatgaaaataaaaaagcaatcagtaaatagtcatggtgaaacaaggtagaataatttgttttctctaagcaaatggttgagtttggccagagttctggttagagacaattaacatgtcctttttttatatatgagttgtagaatataagtgtcacattttttcttcccctattgtctgagcatagcatgcttaactcagcttttctttygaggtgtggaaggtgagagcctgtgtcacataaaggggtatttctcaaataggaagacattctgaattctggagggtccaaatatgacaacagcttgtccatttctctatttcctgctcctatgagagtgctggtgtcagtaaatgtggttgaatgaata

SEQ ID NO: 321689 - DNA, 618 bp, Homo sapiens
cttctcagtgaggactttcctgagtacatcattaaaatttataccctctttctgcagttttcatccctgcttcctgcttcttttatctccacagcatttgcccccatccaaccaattttatatttaaatgatctatttgttttattgtgtttcttctgccatccccatgcagacactagattataagcttctgagaacaagatttattttgtctattttatttactgacaaatctccagaatgtagagcaatgcctgacacataacaggtgctcaatgagtatttgtggaataaatgaatgaatagatgagtgtggaaatactaactgcatgtttagatataggttatgtgataggtaattgattacacagaagaatgctttcatctgaagctacttargactagttaaccaaggaaaaggggatgtttccccatgactcagcccactctattgcagtactggtttgaaggcccaagtacatctgttaaaattgttcattgtttctcatttgccattgttttaaaggatatatgcagcattcttggaaaactctgagatatacaggcatagatttagtatgagcaggaactagaagttcctgcttttcctatgtcatt

SEQ ID NO: 321690 - DNA, 618 bp, Homo sapiens
cttctcagtgaggactttcctgagtacatcattaaaatttataccctctttctgcagttttcatccctgcttcctgcttcttttatctccacagcatttgcccccatccaaccaattttatatttaaatgatctatttgttttattgtgtttcttctgccatccccatgcagacactagattataagcttctgagaacaagatttattttgtctattttatttactgacaaatctccagaatgtagagcaatgcctgacacataacaggtgctcaatgagtatttgtggaataaatgaatgaatagatgagtgtggaaatactaactgcatgtttagatataggttatgtgataggtaattgattacacagaagaatgctttcatctgaagctacttaagactagttaaccaaggaaaaggggatgtttccccatgactcagcccactctattgcagtactggtttgaaggcccaagtacatctgttaaaattgttcattgtttctcatttgccattgttttaaaggatatatgcagcattcttgraaaactctgagatatacaggcatagatttagtatgagcaggaactagaagttcctgcttttcctatgtcatt

SEQ ID NO: 321691 - DNA, 619 bp, Homo sapiens
  misc_feature (1)...(619): n = A,T,C or G
tccagctctttcaagctggggtagaataacacacagagaggcagggaacattgtgaggagatttggagtcctggagacctaagcacaaatcatgacggctccaatcactgtttgtgcagctttcagagagttgcttaatttcgcaagttgtgttttgtcatttctaacacagggatgatagtatctattttccacttaggaattagataatttaacataygggaagtgcctggtgcagtgactgacacaaagtaggaactcccccaaaattaacaataataaaaatacatattcctttatcccactggtttccaaccagcagcaatttttccccccggggacgccaagcaacacttggagacatatttggttgtcacaattggaagagtacttaccagtgacatctggagaatagaggccaggaatgctgctaaacatcctacagtgcacaggcaggcccccaacaataaagaattatctagccccaaatgtcaaaaatgccaaggttgaaacacctgctttattctctagtntctgaaatctaatatctcatgggtgtaagacagtccagaagaacttanagagcatattctggtagcacatgcagatgtacagggta

SEQ ID NO: 321692 - DNA, 592 bp, Homo sapiens
gcctcacaatcatggcagaaggtgagggaggagcaaagacacgtcttacatggtgacaggcaagagagcttgtgtaagggaactcctccttataaaactgtgtgatctcatgagacttattcattatcatgagaacagcacaggaaagacccacccccatgattcaattacttctcactgggtccctccctcaacacatgggaaatatgggagctacaattcaagatgttaagttagcatttgcaaatttgtaccatactaaatgcatccagtacggtcctagacakaaacggatggcacacagagccatagtaattgagatgaatttaatggagggaccctgtacaagggtgtgagcagaaggaaaggaaaccagcaagaaattgtaaagcattacaggatgagcaacaatggaagagccaatatgttttctgggaatgaaggggcaagagaaaagagcagttattagaataagaaagttgtaactgtagagataggagctgtggcctgtacaaaggaacaaagccatgtgaatccacagcccaacaggaataaataccctggcctctgtctctccaccttctcatctctc

SEQ ID NO: 321693 - DNA, 549 bp, Homo sapiens
ttgtgcccaagttttccttgctctagatgcaaggtgctccatcatacagctgtcatgataacaccaaaaggctgtggcagagttatcttatacattcacacwattcttataataggggctgccagcattctgaatggaatgtaatagatattaatttgcacacccaggtgtgaatattgtgatttccttttaccaccttccagcttggaaataaatgagcttctactgtttgttgttgctcctttcctcattccagatgttgtaccttgcttttaggtatgataattacacatctaaaagctgaacactctttgaatgctataaaaaaacccaccagattgcatgaaagtgtttttgtcaatagggaaaaaaatcttacgcagttcataaatatcattaaatcaatgcaagctttaaattagcttttttcacctgttatacatatgtttaatcacacatatgtgtatttataaactatatacataatgttttctcacatcgatcatgaaatttcataaagatcaacttctactccaagaaaagttccca

SEQ ID NO: 321694 - DNA, 549 bp, Homo sapiens
ttgtgcccaagttttccttgctctagatgcaaggtgctccatcatacagctgtcatgataacaccaaaaggctgtggcagagttatcttatacattcacacaattcttataataggggctgccagcattctgaatggaatgtaatagatattratttgcacacccaggtgtgaatattgtgatttccttttaccaccttccagcttggaaataaatgagcttctactgtttgttgttgctcctttcctcattccagatgttgtaccttgcttttaggtatgataattacacatctaaaagctgaacactctttgaatgctataaaaaaacccaccagattgcatgaaagtgtttttgtcaatagggaaaaaaatcttacgcagttcataaatatcattaaatcaatgcaagctttaaattagcttttttcacctgttatacatatgtttaatcacacatatgtgtatttataaactatatacataatgttttctcacatcgatcatgaaatttcataaagatcaacttctactccaagaaaagttccca

SEQ ID NO: 321695 - DNA, 521 bp, Homo sapiens
gcctgacatccaggcatttccatacatcctctgaaatctaggcagaggtgcccacacctcaattcctgacttctgtgcacctgcagacccaacaccatgtggaagccaccaaggcttggagatttcacctttgaagcaatgtcctgagctgtacattggaccctttggccatggctgggatgcagggcatcaagtctagagactgtacaaagcagcaaggtcctgggtctggcccacaaaaccattttttccttctaggcctcctggcttgtgatgggaggggttgctgtgaaaacctctggcttgccctggagacattttcctcattgtcttgstgattaacatttctctccttgttacttatgaaaatttctacagccagcttgaatttctcctcagaaaatgggtttttcttttctatttcatgatcaagcagcaagttctccaaacttttatgctctgctttccttttaaatgtaagttccaatggcaaaccgtatctttgtgaatacatataactg

SEQ ID NO: 321696 - DNA, 582 bp, Homo sapiens
taatcatggatatttttattgactacatattatatttgaggtacatcatctattaattcctacaatagcaacgcatcttgatactgtaaagtaatactatttttgtttctatttcacatattaggtaaccttgatgcaaagaaataaaataaatttttcaaggtcacacttttttgtttgtaagtgatggtacccacctcaaatcggtctaagtaattgggtgtgtattggctcacattattgaaatgtctcttagtggtcctgtctgcagtccaaggtggatgctgaggcttaaataatgtaataaaaagtttattttccatccatatcctggtctgtttccctctgtgttggctttattttaaagaggactcctctattatattgtctgccatagcaagtttagctctaggattatattacagtttcagcatgcaattaggagtaaagaaaaggcacttccatctatgtagcttcagacaagttgttgggatgggctctaattggctagactttgrtcatgtgcccatccatgatccaatcactgtggcataagtagtgcaatgctgaggctgctgtgtt

SEQ ID NO: 321697 - DNA, 592 bp, Homo sapiens
acagtttgtaagtcttttctactgctcttcacaactggccaggtcagcatgatctccattttatctttgagaaaaatgaagttcaaagaaattaagtgatttgtatgagcagatattgaagaaagaggtaggactgaacccaagtctgatagacagtaaaataatattcttttttcttctaccatatccccttatgaaggtatgatctaagtaaaaggtctataggtactgatgaacagtaccacataaaagtgaacagacacacacacacacacacacaattaacttcattttctcaatagcagaaatagcttatttagaaagtctgtaaaatgattaagcaggctttgtggtattagactgtaggcaaaggtactgagaatgactccttgagcaccactaattctacygactttgtgtgaactaatattcacaacaaaagccacatctagaagcatggtgtaagcaacacaggaagagtaaaattaataactgattttgaaatgacctttcccaattcattattcataataaggacagcatatggctatccttgttcctggctcattcacagtggtcagtgtctatcatc

SEQ ID NO: 321698 - DNA, 549 bp, Homo sapiens
aagcacaaataaacatattcatttagtacctatcacgtattatttgtttcaccaagaatccgctttgggtaaggacatgccctgtattaatcaaacacccctgactaactctcagtgatagacatttaaatattcactacccttaatggttaaaaaattccttcatcatgataaatattatacatggtctcctgtcagtatagtgagttttatatctacagttttcaaactctgtaccttcaggactcctttgcagtcctaaaaattattgagggatcccccaaaatcttttgctagtgtacattttacctatctacatttactatattataaattaaggctgaaaaatgtaagtatttatgtataaattcatttaaaataacaataaacccattacatgtttatgtaattatacttatgaaattgatatattttccaaacaaagaartaattagtaagaaaagtgacttttcttagttttgcatactcctttcgtgactaaattaatagacaccaatctaattctcatatctgccttcttacacaagc

SEQ ID NO: 321699 - DNA, 606 bp, Homo sapiens
tgcctattgtagtgtaggtattcagtttctaattcatatcaaaaagggttttaaccatgaaggaaaaaggaaaaacaagtgccatgcattctcattctcattactgccaccaaatatcatggccttttgttgcccatttgctggtcagagcttctgaggtactgcccagcatatagttgtgtttaccaagcaatatgaaaaactgagtttagtctgtcttggtacaagccctttatcccctctggaatcattcgtacttgcttctaatgcagaaacacttcaaccaagtagacatattctattgtttttccttcaagaataagttttatcgtttataaattttataaatgctttctctggccaccatttcatgtaaatttatgagatcaaaaaatgcctaagattgaaaactaggtctctggatggaagctgttgtgggyatcactcagaattgatgctgtatgttgtatgttagtcagtccataaaccagcactaagatcttggacttaatcctagcactccctctcaggggccacagcatggcacaagtataggcacatagtgtacgaggcactgcatctatcgtcttcattccaggggcctat

SEQ ID NO: 321700 - DNA, 572 bp, Homo sapiens
taagtctttaatctattttaagttgatttttgtatatgatgagaaatgagggtctactttcattttcctgcctgtggatatctagttttcccaatattgtttattgaagagacagtcctttttcccattgtattttcttggtgtctgttgaaatcagttgactataaatgcatggatttacttctggaatctctattctgttcccttggtgtatgtgttgctttttatagcagatttttgtttttggaggaaatcaggtagatttcccagcagccagaagatgctgagaacttgctgaaattcagacttacccaagaatggcccccaaaagatattaaataaagagatgggaggatcttttttaatgaattatctgtcatttagttatttctgtatatgagcaggtaactcaaatactacagctctgccttattgccatattactactggctgacctttaataaccattcaagaccctgaacatgattatacagacttctggtagcctgattaatrataagacccattcctacacacaccagtcattggaacaaatgtgcatggaccagata

SEQ ID NO: 321701 - DNA, 604 bp, Homo sapiens
ttgtaaatattagatgataacggtgtatttgaagtatgcagcagtagagcttagcatatgctttatatataagacctgttataatattgttacttttcatattttgattcggttaagatacttaagacactttaatgtgttaacatttatttttctttaaccatgatcatggcacatgcaaagttacggcaatccaaagagaacatatagtttcttgtcttaaggcagaagtagtggaaacttttagattaatgctcctactggggccatggcacatactaagggtaaggtaaggtatgatacccatttggtagtgtggactttagacaaaaatcacaactttcattaaacaaaaattttaaataaattaaaaattttattttagtttcaggaggtacatgtgcaggttagttacatgggtatattggatggcattgaggtttggggtacaaattgtcmccttagccaggtagtgagcttagtactcaatggatagtttttcagcccttccacctccttcccctctctcccctcggtagtagtccccagtgtctaatgttcccatctttatgccaatgagtacctagtgtttagctcccactta

SEQ ID NO: 321702 - DNA, 567 bp, Homo sapiens
attttaagcaggagaatgacattttaaaaagatcttttctctaataaatgcagcatgcaagatatttagaactggttaccactaaaagcaagatgctactgtgttagctgaagccagaactaaacgcatgctttgtaacttagttgttcctaggcctttccttactcttagctctttaaataacaagaaactttttatctacctcwgtgttctgtctgtcatataatggttacttgatcaacatttttaaaactaagccaagcaagcaagcttgatctgcacaatcaatgtaaattggaaatattagaagaggcagcaaaagggaaccaaggaagagagaggggaaatataataatagaaaagtaggtttttacctagaacatggggagatgggagtggataaaacatgttcttaggaaagaatatatgtgcaagttacagtaggcacatatcacacaaaaataataaagtatgtggcttttctagaatgtaagggaaaaacaagaataaattgtggaagactaagagtgcagtttatgtggctggaaagaagatgacatggtttgg

SEQ ID NO: 321703 - DNA, 567 bp, Homo sapiens
attttaagcaggagaatgacattttaaaaagatcttttctctaataaatgcagcatgcaagatatttagaactggttaccactaaaagcaagatgctactgtgttagctgaagccagaactaaacgcatgctttgtaacttagttgttcctaggcctttccttactcttagctctttaaataacaagaaactttttatctacctctgtgttctgtctgycatataatggttacttgatcaacatttttaaaactaagccaagcaagcaagcttgatctgcacaatcaatgtaaattggaaatattagaagaggcagcaaaagggaaccaaggaagagagaggggaaatataataatagaaaagtaggtttttacctagaacatggggagatgggagtggataaaacatgttcttaggaaagaatatatgtgcaagttacagtaggcacatatcacacaaaaataataaagtatgtggcttttctagaatgtaagggaaaaacaagaataaattgtggaagactaagagtgcagtttatgtggctggaaagaagatgacatggtttgg

SEQ ID NO: 321704 - DNA, 565 bp, Homo sapiens
tttggtccttattccattgtcactacgtaactgtgacaaaaataacttctctgggtcttattcctcttgtttccttatctgaccaatgaggcagttgaacaaattctctgtagtctcttacaatgctaatattttatagatgtcacccagtagattcagtttacttcyccatcatattttttaaaagagcttgagtggcaagcaggattttctcctgtcaataaaggataggacatattatattcactgagaataggatagtttatttactctgattaataaagaattgctgggccttttttaaggatctccctctccaccccccactgatactatatatgctttgataaatctaaaatttcatatcttggattccaactgaaagtttaaaagtctgaggagatttaaggcagaaatcatattttatttatctatgcagctccattatccttagtggattttctttctaaagagataactagcagaaatctttttaggcccttttaattggctttctccatgcttaccatattttctatgcatctacttttctacttagtttgag

SEQ ID NO: 321705 - DNA, 565 bp, Homo sapiens
tttttttttttttgctagtctggctaaagctttgtcagttttccttcttaggtgccaagcttctctggctgaatatcagcatggggacatccctatgtgttggtaatctctagctaatttaccagtagtccagagactccacattcagtcaaaatggctcatgtctgttcccaaccaacagmgaaccagtcctgagtttctcccttcagggaagtgggttcccctctagcccagggcaggtccagaaatgctgtccaggagctaaggactggaatcagggaccccaggagcccacttggtgctctcttcctctgtggctgagctggttcccaagctgcaaaacaaagtcccttttattcttccttcttcttttctcaaggtgaagggacgtctcccatagccatcacagctgggagtgtgctgggacacacctgaagccagcacagctctgagtcttaccaacaaggcccataaggagtactgtcccatgcctaccaccgctgactatttagaacttaagggctttttagtcagcagataatggattctgccagaactgagtcct

SEQ ID NO: 321706 - DNA, 554 bp, Homo sapiens
tagcccagggcaggtccagaaatgctgtccaggagctaaggactggaatcagggaccccaggagcccacttggtgctctcttcctctgtggctgagctggttcccaagctgcaaaacaaagtcccttttattcttccttcttcttttctcaaggtgaagggacgtctcccatagccatcacagctgggagtgtgctgggacacacctgaagccagcacagctctgagtcttaccaacaaggcccataaggagtactgtcccatgcctaccaccgctgactatttagaacttaagggctttttagtcagcagataatggattctgccagaactgagtccttgccttcaagacagtgggttcccttctgagccagggtgtctagaaatattgtccaagagctagggcctggaatggaggccacagractctaccctattctagtgcctatttctactgtggctgagctggtatccaagttgcaaaacaaagtcctctttacattaccctctcttctcatcaagccaatggaaggaattgctcccagagctgtgttt

SEQ ID NO: 321707 - DNA, 523 bp, Homo sapiens
gctgttcataggtaagatttctcttgcatggaatctgagttggaagatgttcataaaaaataaattgtgaatgcacatcctcctcaaaagatatgtggaatggaaaaattatttaaggacatacatctttctgtactgtaagaatgacagtttgagggaagaatttatatcttgagaaaaaacggtggagcccacagcaaccgatatctgatacatgaagccagctacttggaataaatcagccagaagatgagattgaagcacaacattcgaatcaaatttacaacatggatataaaatgacgaagctggtaaatggcattaacaatagttacgtgccacaaaaatgacaatagatgtgaaatgtaaagtgaataaaataccccttaaaagttcagctacagcaacaactgagtgttctagctttcttgcaataaatctcttaatctgtgtctcctactggttctgctttctttgggtgaaccctgacygatacacagattaacagttggctatacatagaa

SEQ ID NO: 321708 - DNA, 555 bp, Homo sapiens
cctggtgactctcctagtcacaaagacctgtttccctggcaaagtagaggaagggggaaagttgtgattacattaatttgggggtcactgttgtgcaaggatagctgcagagatgtatttccaatccaattctcacctctctaccttatttatctgarcccattaccactatctttactctcatgtttcctaggcctcaccaaaattagagactgtgttgggagcaggccccccaaaatctggccataaactggccccaaaactggccataaacagaatctctgcagcactgtgacatgttcatgatagccataacgcccatgctggaagactgtgggtttatgggaatgacggcaaggaacacctggcctgcccagggcggaaaactgcttaaaggcattcttaagctacaaacaatagcttgagctatttgtgccttatgttcctgttgcagttaactagcccaacctattcctttaattcggcccatccctttgtttcccataagggatacttttagttaatttaatgtgtgtagaaacagtgttaatgact

SEQ ID NO: 321709 - DNA, 555 bp, Homo sapiens
cctggtgactctcctagtcacaaagacctgtttccctggcaaagtagaggaagggggaaagttgtgattacattaatttgggggtcactgttgtgcaaggatagctgcagagatgtatttccaatccaattctcacctctctaccttatttatctgaacccattaccactatctttactctcatgtttcctaggcctcaccaaaattagagactgtgttgggagcaggccccccaaaatctggccataaactggccccaaaactggccataaacagaatctctgcagcactgtgacatgttcatgatagccataacgcccatgctggaagactgtgggtttatgggaatgacggcaaggaacacctggcctgcccagggcggaaaactgcttaaaggcattcttaagctacaaacaatagcttgagctatttgtgccttatgttcctgttgcagttaactagcccaacctattcctttaattcggcccatcccttygtttcccataagggatacttttagttaatttaatgtgtgtagaaacagtgttaatgact

SEQ ID NO: 321710 - DNA, 571 bp, Homo sapiens
gtgtatgtggttaactgaaataccagatgcctgagttggctcaaaaggctccactgagaagaaataattttttattataaatttatctgtccaaaaaggcaccaggttatgttttcttcttcttttcccctttgccttccagaatagatggatcaccattgtatcaacttggactcttggttgtaataaacagaaatcaattcaaactggctgaacaaaaaataacttatttgtaagaatgcacgaatgaatcataggcccaaaggcaggaaggtaggcagacctcagaaaggagctaggcctagacactgggattttcatcatctctctccttttctcctttctgcccaatagcttcattctctttgggaccagctttctttgctcaccaatatgcccggtggaatatctgctgcactgtggaatgttggtcccagagttaaaattattgctgcagccacacagagagaccatcccagtttcaagtctgattgcctggtttaaatcaagtgtcttccctattcacttggctatggcccmgggctgggcgtagaaggctttgaggtccaca

SEQ ID NO: 321711 - DNA, 628 bp, Homo sapiens
aaaacaggcagtatgcttcactggtttttccactttagtaaaaccacccaacatcttgggaggctgaggcaggaggatcacttgaacccagcagtttgaaaccagcctgggcaacatagcaagacctcgtctctactaaacataaaaaataaaaaatwaggcatggtgtcttgtacctgtagtcccagaaactcaggaggctggggtgaaaggattgcttgagctcaggaggtcagggctgcagtgagctgtgactgtgccactgcactccagcctgggtgacagagtgagacccctgtctctaaaaacaattccaaaaaaaaccccaaaccagtcaaccaaacaaaaaccataataacacattgaattaagcatccaccttttcctctttcacttcagtctgcctacgccagaaattaaaaaaaaaagacagtagattattacatgttcatttagtccttctatgtgctcagctctgtggaaatcaatatcaaggaaacaaaggaagcataagaaatagatctggagaaaaagggcttgttatttattggaagaataaaatgccggattgaggataagactataccaggttaatttttaaatacaacctatcagcatgatacatata

SEQ ID NO: 321712 - DNA, 524 bp, Homo sapiens
ctgtcacttcagaataaacagcacatttagatacatggatgtataatatagtcattgtctgtagcagtatcattgctaataagaaaggtagttaagggcaaatgtcatggaatatgttgctctkatcctctttgagctgtaattattgtggctgcatctgcctgaaaacaagtttcaagaatatgacctttgtagtctctggttcagggatatattggaaacagtaataattagcagtacaacccccccttccccacacatacaccttaaaaaagctattttaagctaccaataaaacacaggtttttctcatagcaattccagacagccaaatagtttaaagggggaacagaaataagagtcttgctaatcttgcaaactgtgcatgcaaagggcatttaataatagtactttttcttgcatttttttttgttgttgttgtgagcaaatgctgcaaactaccaagttcagctgtgtaatcactaacttgatttcactcatttctttgttaagtactaaagata

SEQ ID NO: 321713 - DNA, 482 bp, Homo sapiens
actcattagtgaatactcattaattatattaatattacttattaattcattttgaaatatatgttatgtggcaggaattgaatcaaacaccgcctgggagaggtttgctcaggttagtcccttttcttttttcttttgctcaggcagattgaaggaagtgcctggtattgtgagatgggatttgcttattagaaaccaaatgtccaactttatggctgaatctggtgaaagtggtgagggctgagatttttgcctatcatggcattattttattttgttaggtcgtgyattttgcctggagttttttttttttttttttttgagacagtctcactctgtcaccaggctggagtgcaggggcgcgatctcagcttgctgcaacctctgcctcctgggttcaagtgattctcctgccttagcctcctgactagcttggattacaggtgtgtgtcaccacacctggctaattttttgtattttta

SEQ ID NO: 321714 - DNA, 482 bp, Homo sapiens
actcattagtgaatactcattaattatattaatattacttattaattcattttgaaatatatgttatgtggcaggaattgaatcaaacaccgcctgggagaggtttgctcaggttagtcccttttcttttttcttttgctcaggcagattgaaggaagtgcctggtattgtgagatgggatttgcttattagaaaccaaatgtccaactttatggctgaatctggtgaaagtggtgagggctgagatttttgcctatcatggcattattttattttgttaggtcgtgcrttttgcctggagttttttttttttttttttttgagacagtctcactctgtcaccaggctggagtgcaggggcgcgatctcagcttgctgcaacctctgcctcctgggttcaagtgattctcctgccttagcctcctgactagcttggattacaggtgtgtgtcaccacacctggctaattttttgtattttta

SEQ ID NO: 321715 - DNA, 516 bp, Homo sapiens
ataatagtatccacctcatagagttactatccagtcatgacatcgaacccaaagaccaggaccttatgagagtatctacatcatttctggatgtagcttctctggagagggagacagatctacctaccctctccatggcaaattaccccgcatacatgctacatataatggtggaattactcccatcagaaaggggaaatttagacatttgcagcagctgctggttgtacagtcctgatayctgtgcaggccaatgacccttgattaggtctcacttctgtttccaggagataatttcccaggccactggttcttcctctgagagggcttgctcttactattcttctccttggccacatgtgaagatggcactggagaatatgcccttcctaggggaggagctactttcctagcctactccctgctcattgaacagccacagtccatttcatcttaggctctctagctctctcaaaaacttagttggctttcttctttggtttccagtcagtttta

SEQ ID NO: 321716 - DNA, 566 bp, Homo sapiens
agtttattctcattaagcactggattgattggatttagctccaaggtcaaagtatctgaggaatcctggctgggattctggtcttctgtctgtgccaagggcctgggagtcccggggatggagctaaacaaaggtaaagaagcagatggtgctggtctatcaagtgacttctgctggactgtggtctgcctggagcttttacaaatgcagctttggttttgtgtgatacagttggattaatcttacttaaaggcagaaggggtggataaatgtgtccaaagaaatwttgaagagtgacctttaatttcttaaggcagcctgattgagaggaaggtcagaacccagaatctttgtgctattaagcaggactacatttactcctttcattcactattcttttatttgagttgaattcttcctgttaatttataaaataatcaactatggaatttctggctttatccaatgtgttttacctgagtgtcccaggtctcaccgggctctcacaaaaatatcaagaatattatattttgccaactcctagcacccacctgctgaagtagtca

SEQ ID NO: 321717 - DNA, 563 bp, Homo sapiens
aatgattgctgaatgaataagtgaatgcacaatttttatctgacgattgtgtaatttaggttaatttgaagactgtagggcacacaaataggagggtacaaaatacaaagtgcaaaacactggtgaaacagcacgcagactgttttgaacccctgctgctactgcagctgcaagggttggttaggaatttgttcgtgtgataaacaaaaggactatgtacatacagttttgggacttccaagtaataagggtatcgtttgcactttcagtctgaagatttgtcctccaataatgaggcaatgggaaaaacccctgttgctgccatacaatgttatacaaaatgtgcattggaaaagaagagcagcccctgtaaaattgggtgaatgtgtggaaatgctcacagctgtgttaataaagtatttaaaagtctgaccttgaagcatttgccaaaaatttasatgctaaagaactgtaaacccactagagcctcctttgcacgctgtcaacactctgcttacgtttattgcatgcatgagctaatcaagggaaattggatcaggact

SEQ ID NO: 321718 - DNA, 559 bp, Homo sapiens
cacattccctgtacagtcttacttaaatttcatattagaagcacataaccagttttttgttgttgttcaattcaacttcacagatatttgctgagcatttaatatatgtttaaaaagaggtcatacaggctatatttatatgrtatcaccatgggtgtgaatgatatctcccaggaagaccatgcagagaaaacacaaacggtagcagggtggggaggggagaactgacgtaagagatggaccaaaatagcatgattgacaaggtaggaagagacccaggggagagtagccgtggaggccaagggtagacattcaggaaactaggagtggttaacggtgtcacaagctgcaaaatggtaaaataagaagaaaactgcaagttgacacttagaagatcattatgaatgggatacagagcaagtaggcagtgggggtcctggggatggagggtagcaagtagccatctcccaatttcacctagagctgaccctgtacaaaggagtcttatttaaagtgatttgaatactttgttaacagctcttagaaaaggttggttgag

SEQ ID NO: 321719 - DNA, 523 bp, Homo sapiens
cattttggggtgtcataggccttttgaatttaaactgtcttcatgatttcttttaaagaagatttgattgaaaaacaactcccaaatcagaggagtatcttctgtcaatgctgtgtagtcagtcttgactgcattgttagcatcctgcaaattgtgaagtgacaaacactcttgtttctgaactttccattttagccacttcttcttgtgtcattccaaaaaacgagcaacacatggatgtgatgtgggagactttattaatgtcatatcagctcagaggtgtcctttgtgccagtctctgagcatgggatgacacttccaaacaggttattacttccatgagttattgggttgctaatcaccccatttacagagtgatcccattacattaccctgcagtgttcaattaagggagcttagaccaaagcccatatttaagagcgctcccttttctgtttcatcttgaggtttaaattgaattmtctgatgttggtagagcaacctgaatcatttcctaattcag

SEQ ID NO: 321720 - DNA, 540 bp, Homo sapiens
ctcattttcataaataggcttggaaaacataatcacattcaacccttgctgttttgaactctggagtaactttagagaacacactattttaattaacacttatttataaaagttaaggtcaaaattccagtttgttataattcaattatagaaggaaatcagggatttcttttataaggttttcttctgctgctcctgcctcttttgagtatgtgtgtgtatgtgggagtcaaggttagccttgttagttaggctatttttatttaaatatgttgaagtctacaataaaacattacacagacrttccccaagttgcgggcatgatggcttcaaggttacttcgtggagctggagcactggctgcgaaggccctgagggcctgtggtcccaatggggtggccgtggtgtgctccatggcatctggaggtggtgttcctattgatgatgagcacacgactggattggagatggaggtcatgatggttgcagggaagggactggacctatacagtatatgacccccaaaggcagcttcaggca

SEQ ID NO: 321721 - DNA, 575 bp, Homo sapiens
tgcctttttgggtgacatttgcactgattgtgtagaagcaatggtggctaaaactgttggtgctttagcatgacttaatgcagtagcaccaaactgtatagtaatctttataatttcaccactgtgcatttgcactgcaggaaaaaaaatgcctgtttcacttaagaatgcccttgatgaaatactaaaaactattaagtttgttaaatcttaaccctcgagtacacatytctttagtattctgtgtgataaaatggaaagtatgcatacagcacttttgctccattcaaaggttcagtggctgttttgaggaagagcactgtgcagttgaattgtgagctgaactagtctcttttttcataaaataccattttatcttaaaagaacaagagatgaactatgattatttagattcaggtggctagcagacatgtttgcaaaaatgaatgaagtaagtgtattacttcaaggaagcaactgacagtatttgttgcctgtgataaaattcaagctttcaagagaaaattagcattttagaaatcttctatctgttactatgagcttaataccttaca

SEQ ID NO: 321722 - DNA, 593 bp, Homo sapiens
tgtgttatttttcttgcttctcttccccatggctcccatgtgctatcaacaactgagatttcaatttagacttaaaatcaaattaagactatgcaccagacttagctcatttggtgatgtcaataaatgatttgtgactagaacatgaatatgctaacagtrtttgtgctggtgggattatgacagtttctgtatttttcaagttttctgctttccacaaatcctgattgttcataacacagtttctaattatacttcagtttctgatattacctatgaaataaaaacaggtaaaaattaataatttgaaaaagcattagattcattttgctaatgagtacatttccagttttcacaatagacttttctctactaaatttaatattttgcttcaaagattgatgcttgaatcaactctcttttattttaatgaggagtatcattgcaagcattaattataatatgtagtgttcacactatgattttcacccaaaaatgtagaaacatatttttaaaattagtaatcccttaaataagcctaccatagcagataggcagcaaatatttacgtttttaaagaagggcttagaggt

SEQ ID NO: 321723 - DNA, 525 bp, Homo sapiens
aattacctgcggggttttttcaagctactcacctctcttcttccactagaagagtggatattataccccccttgggtaaggggaggtgactggtgagcctctaagtcatggagagtgctctattccttagccatgttggggagaaaagtagttcaaaacccctgatttaacctttgcttcttttttgtcgttctgataaattcttgggagaatcctttctaacttcatgttagccatgacacctagcaaattgctagctctcagtatttatttattacagcccttagcatgtataattaatcctaatgatagtatgataaaaatgagaaccatcactgctgaaagttttaaggtcatatggtagatagttctggacaaattccaacatttctttcctgatttarcaatggggaatggaataagaggaaggagatctcatatgtgttttctgtgatcctctgtcttaaagatattctgtattcggagtcacttctaaacacctagagtcatgagtgaataataatg

SEQ ID NO: 321724 - DNA, 450 bp, Homo sapiens
atagaaacttattcaaagaaatgataacaaaaaactttccaaaacatgagaaagacatacatattcaggtatggttaggtcagagatcattaaatagatgaaacccaaataaaactatcacaaggcatataataaccaaactttcaaggtcaagggcaaagacaaaagccacaagaaaaaagaaacaaataatacataaaggaacttcaatttgtctgacaacagacttctcaacagaaaccatacaggccatgatgacatatccaaaatgctggrgtaggggattggtggccaggtactaaaatgtccaccaaaaattctatacccaacaaaaactacctgataccagacccaccccgcccccccaaaaaaaagaaaaagctcagggaattcatcgccaccagacccatcttacaagaaatactaaagagaactgctcaatctgaatga

SEQ ID NO: 321725 - DNA, 450 bp, Homo sapiens
atagaaacttattcaaagaaatgataacaaaaaactttccaaaacatgagaaagacatacatattcaggtatggttaggtcagagatcattaaatagatgaaacccaaataaaactatcacaaggcatataataaccaaactttcaaggtcaagggcaaagacaaaagccacaagaaaaaagaaacaaataatacataaaggaacttcaatttgtctgacaacagacttctcaacagaaaccatacaggccatgatgacatatccaaaatgctggagtaggggattggtggscaggtactaaaatgtccaccaaaaattctatacccaacaaaaactacctgataccagacccaccccgcccccccaaaaaaaagaaaaagctcagggaattcatcgccaccagacccatcttacaagaaatactaaagagaactgctcaatctgaatga

SEQ ID NO: 321726 - DNA, 450 bp, Homo sapiens
atagaaacttattcaaagaaatgataacaaaaaactttccaaaacatgagaaagacatacatattcaggtatggttaggtcagagatcattaaatagatgaaacccaaataaaactatcacaaggcatataataaccaaactttcaaggtcaagggcaaagacaaaagccacaagaaaaaagaaacaaataatacataaaggaacttcaatttgtctgacaacagacttctcaacagaaaccatacaggccatgatgacatatccaaaatgctggagtaggggattggtggccaggtactaaaatgtccaccaaaaattctatacccaacaaaaactacctgataccagacccaccccgcccccccmaaaaaaagaaaaagctcagggaattcatcgccaccagacccatcttacaagaaatactaaagagaactgctcaatctgaatga

SEQ ID NO: 321727 - DNA, 582 bp, Homo sapiens
ttgttaaaatgtaatacccaaactgatctatagattcaatgcactacctatcaaaataacaatgacattcttcacagaaatagaaaagacaatccgaaaatttatatagaattacaaaaaccccraatagctaaagcaatcctgaccaaaaataacaaagctggacacatcacactacctgacttcaaaatatactacagagttatagtaactaaaacagcacgatactagcataaaaatagatatatagaccaatggaacagaatagagaacccagaaataaatccatgcatttatagtgaactgattttcaacaaagacaccaagaacatacattgggaaaagcacagtcttttcaaaaactgatgctgggaaaactggataaccatatgcagaagaattaaactagactctatgtatcaccatttacaaaaatcaaataaacatggattaaagacttaattaaaagacctcaaactatgaaattattacaaggaaacattgggaaaacactccagggcattggtctgggcaaagatttttttagtaacacctgaaaagcataaggaaccaaaggaaaaa

SEQ ID NO: 321728 - DNA, 410 bp, Homo sapiens
ccactgaagctatcactagccgtgctaaactctgtaactatcacacaccacatgaccagatgtagactcctgagtaacctggggctccctactccctacaaggaatagcttggtctggtcaaatgtcatcataatatcccattttaacatacaaaattttcattacacttttttcaaagataaaaattaagatcactataatcaataagccttaatatatttccaaaatttatcttgtagcaagtgaatataaaaatggaaagttgaatctattaatctctatttaaggcactgcacatcaataatttttgaaaaaatattttgaaatatttgagtaagaagctacaagtttataatatgctatgcataattcaaatagacttgggraaacattaccacataactactcc

SEQ ID NO: 321729 - DNA, 589 bp, Homo sapiens
ggatatgaaggtgaatgagacagtctcatcctcgctcctcacaatgtggcccactgcacaggagcatcagcctaacctggaaactggttagaaatgtagaatctcaggccccactccaaacctactagattagggctatccagagaaacagaaccaataggtaattgatatatatctttctttaactatatatagatagatttattataaggaactggcctgtaagattatggagactgacaagtcctatgatctgctgggtgagtcagagaactagagacccaggagagccaatgggcttgttctagccagaagaccagcaggctcaagtcctaggsagggccatgtttcagttaaagtccaaagccatgaagacacggatgtgctgtctttagaagcccaaacctcagcatcactcaatatacccatacctacacatacaccctctgcatctaaaatttttaaaaatgaagaagctgatgttccagctgaaaggcagtcaggcaggaggaattcttgcttactccaggggaaagtcagcctttttcttctatgaaggccttcaactgattggatgagtcccacccac

SEQ ID NO: 321730 - DNA, 589 bp, Homo sapiens
ggatatgaaggtgaatgagacagtctcatcctcgctcctcacaatgtggcccactgcacaggagcatcagcctaacctggaaactggttagaaatgtagaatctcaggccccactccaaacctactagattagggctatccagagaaacagaaccaataggtaattgatatatatctttctttaactatatatagatagatttattataaggaactggcctgtaagattatggagactgacaagtcctatgatctgctgggtgagtcagagaactagagacccaggagagccaatgggcttgttctagccagaagaccagcaggctcaagtcctagggagggccatgtttcagttaaagtccaaagccatgaagamacggatgtgctgtctttagaagcccaaacctcagcatcactcaatatacccatacctacacatacaccctctgcatctaaaatttttaaaaatgaagaagctgatgttccagctgaaaggcagtcaggcaggaggaattcttgcttactccaggggaaagtcagcctttttcttctatgaaggccttcaactgattggatgagtcccacccac

SEQ ID NO: 321731 - DNA, 619 bp, Homo sapiens
ccacccacatttggaaggacaatttgctttattaagtctactactgagctaaacaataatctcatccaaaaatatcctcacagaaacatctagaataatgtctgaccaaatatctgggcaccctgtggcccactcaagttgatacataaaattaaccatcacacctactaaattgaaatctgcattccaacaagatctctgggccatttatagatatactgaagtttaaaaaaacgcaagatagtctacatgcacaaggaactcatagaaatatgaacaaatgactacaatatagtgtggttcctgctacaatcaaacttgtacaagatagagtggtagctggcataggtagtrgtaaacaaccctcaaaaacatatcagaaaagacttcacagaagatttcacaaaagagaggcccttgactaggtgctaaaagtgaacaggagtctcccatgcacagcctctgcagccagactgtctggacgtgaagaaataactctgccactttactagctgtgtgacctggggcaatttaatctcactgtgcctcaattttcccatctgtaaaatgaaggaaatagtaatgcctaatatataggattattgtgatgattacataa

SEQ ID NO: 321732 - DNA, 617 bp, Homo sapiens
atcacaggtgtgggccacacgcccggcttaatttttgtacttttagtagagacggggtttcgccatgttggccaggttggtctggaactcctgacctcgggcgatccacccgcctcggcctcccaaagttattcagtcttaaaaagagggaaatcctgtcatttacaaggacatggatgaatctggaggatattatgctaagtaaaatgcaccaggcacagaaagacaaataccacatgaactcactcacatgtggaacctaacacagttaaactcatgaaagtagagagtagaaggakagttacaggaggctgggagggtaaagagggagggaatggaggagttgttgatcaaagggtacaaagtttcagactgacaagcacaggttttgagatctattgtatagcagggtaactatagttaatagtaatgtattatgtatttcaaaataactgagtaaatttcaaatgtcacaccataaaagagataggtaagagaggcaatggatattaatgagcttgatctaataaccatgccacattgtatgcatacatcaaaacattgcaacgtaccccataaatgtgtacaattatgatttatcaatcaaaaataatatt

SEQ ID NO: 321733 - DNA, 617 bp, Homo sapiens
atcacaggtgtgggccacacgcccggcttaatttttgtacttttagtagagacggggtttcgccatgttggccaggttggtctggaactcctgacctcgggcgatccacccgcctcggcctcccaaagttattcagtcttaaaaagagggaaatcctgtcatttacaaggacatggatgaatctggaggatattatgctaagtaaaatgcaccaggcacagaaagacaaataccacatgaactcactcacatgtggaacctaacacagttaaactcatgaaagtagagagtagaaggagagttacaggaggctgggagggtaaagagggagggaatggaggagttgttgatcaaagggtacaaagtttcagactgacaagmacaggttttgagatctattgtatagcagggtaactatagttaatagtaatgtattatgtatttcaaaataactgagtaaatttcaaatgtcacaccataaaagagataggtaagagaggcaatggatattaatgagcttgatctaataaccatgccacattgtatgcatacatcaaaacattgcaacgtaccccataaatgtgtacaattatgatttatcaatcaaaaataatatt

SEQ ID NO: 321734 - DNA, 617 bp, Homo sapiens
atcacaggtgtgggccacacgcccggcttaatttttgtacttttagtagagacggggtttcgccatgttggccaggttggtctggaactcctgacctcgggcgatccacccgcctcggcctcccaaagttattcagtcttaaaaagagggaaatcctgtcatttacaaggacatggatgaatctggaggatattatgctaagtaaaatgcaccaggcacagaaagacaaataccacatgaactcactcacatgtggaacctaacacagttaaactcatgaaagtagagagtagaaggagagttacaggaggctgggagggtaaagagggagggaatggaggagttgttgatcaaagggtacaaagtttcagactgacaagcacaggttttgagatctattgtatagcagggtaactatagttaatagtaatgtattatgtatttcaaaataactgagtaaatttcaaatgtcacaccataaaagagataggtaagagaggcaatggatawtaatgagcttgatctaataaccatgccacattgtatgcatacatcaaaacattgcaacgtaccccataaatgtgtacaattatgatttatcaatcaaaaataatatt

SEQ ID NO: 321735 - DNA, 651 bp, Homo sapiens
atatttcaatataattggtttcctttgtaattctctgtgttctatttttggatttattaagattcttttgaaaattgacctgacagttttccagactgcccaaagggggttcaagggggttgatggaacaacaaaatagatgtttatatgctattttctatttgccctcaccactgctgaccctgcatccctgcccctcgggccatgcacacactatgcttccctgccttgctctgtgccccaggagtgtgaccctgatggaatcatcacctgagcttccatgacccttgttccagcttctggttgggagtggccctggggagaatggcagtgggatgaatttccccacttatccctacctcactgggcttccagtagacagctgcatttctacagctctctttctcagtgacgtctctctcsaggcatccatagctctgttcctgtgccttgccattcttgctgtcactagtccctgggtattttacctcctgttggttcttaaactcacccacactgctggaaattgtcccttcattaaattcttcccagttaagtcttcgaagaacaacatctggtcttgacaacctgattccaattacaaacactgggatcacctgatttgtgaactaaaccagcaaggatatggtc

SEQ ID NO: 321736 - DNA, 589 bp, Homo sapiens
gcagctgtctcttcagcatactgatttcattcatttcctttggatgtatacccagtagtgggattgctggatcttatggtagttctatttttaatattttgaggaacctccatattgttttctgtaatggctgcactaatttacattcccaccaacagtgtgcaagagttcccttttctccacatcctcaccaacacttgttatctttgtctttcttataatagccattctaacaggagtgagataatatctcattgtggtttagatttgcatttccctgatgattagtgatgttgagcagtttttttcagaaacttattgactgtttgtatgtcttcttttgagaaatacytgttgggatcttttgcacatttttaaattgggttgttttcttcttattgagttgagttccttatatatttccatattaatcccttatcagatgtatggtttacaaatactttctttcattctgtaggctgtctcttcactctcttgattgtttcctttgctgtgcagaagctttttagtttgacgtaatcccatttgtctacttttgcttttgttttctgtgcttttggggttatag

SEQ ID NO: 321737 - DNA, 623 bp, Homo sapiens
ttattacacttgcaatgcagcacaaagcactgctctttgagctttcttgctctgtctagaaagataactttccgtatttttttttgccatccagggcatctgccatgaaaatactacaaaatatagtttgtcactggctttataaaaactctgggataggaacaattaaagctatctatgctgctggggacattccattttacatcaacaaatgttacatcatctgtaaccattccaatttccacttaagaacgtctaattattcatattgctagggggtgaattctggcttgcttgctgatggttccattacctcttccccatccaccttcacagaaaaagacagaacgtaggcttttgcagaggtgagggtgggggatggyggtaggggggcgggggtgggtagataaccatatacaaactgcaaggtcagcttcccagtattgcaaaactgggtgctattttccatagttccaaatggcttcttcaaaaccacagaaaataaacctatttcatttttacacacatcactgtttccctgcaggttgtagaaatgtattttcagttggtcagcaatttttccaagtgactgcaaagttttccttattgtcctaccaccaggg

SEQ ID NO: 321738 - DNA, 496 bp, Homo sapiens
tttgtaaattcctctcggtattcatttctaattttattccactgtgatctgagaaaatacttaatataattttgattttttgaagttactgagatttgctttatggccaagcatatgctcaattttggagaatgttttatgtgcagataagaaaagtgaatattctgcagttgttgggtagaatgttctgtaaatatctattgggtcaatttgggttggagcccagcttatgtccagaatttcttcattggctttctgcctcaacgacctgttagtattgtcagtagggtgttgaattctcccactgttattatattggtatcaatctcttttctttgatttagtggtatttgttttatgaatctgggtgctccagtgttgggtgcatatayatttaggacaagacaggtaaatcatcttgttgtattgaaccaattatcattatataatgcctttccttttcttttactgttgttaaagtctattttatctgata

SEQ ID NO: 321739 - DNA, 614 bp, Homo sapiens
gtctctcactcaccacttctctgtatcaggaatcttctcttggctccatgccagtcccagctcagctggctgtacagctttgctcctctctgctttctatgattcctatcacttctttaatggattccagtgtgycctcttaggtgatctactcaagtgttaatatttactcactattttgaattctgtctgtgtgggaggctcccactatctggttctattcagccatcttgaaccggaacctcagaattgagtttttacatacactaatcgcatgatctattaataaacacattattagttggacttcattaaaattaaaaatatgttatgcaaaagaccccgtcaagaggatgaaataataagacacagactgaaagaaaatatgtgccatacataaatttgatacagaacttgtacttaaaacatataaataactcttaaaactcaacaataagaaaacaatcaaccctactaaaattgggttctaagaagacaccacactacagaagatatatatatgacaattaagcatatgaaagatgttcaacaacatacttcattagggaattgcaaattaaaatgacaatgctatcactatacgtttattaaaa

SEQ ID NO: 321740 - DNA, 555 bp, Homo sapiens
caactaagttgtcaaatttattggcatacagttgtatttaatatgcatttatgccattttacaattcatcaaatttacagtgatgtctactctctcattcctaactttcataatttatacccttactcttttcttcttgataactttggctagagatttatcaattttatatatcttctcaaaaaattggttttacttgcaatgactttttttctattcattttctgtcttatactttatttattttcattttgatttttgttattttctttcttataattactttgggcttattaactcttctagtttttaagttggaagatgggtcattgacttgagacctttatwgtttcatcagctaggcatttaatgctacaaactttcctctaagaactgctttaacttcttggatgtgcgggtttataattttcatcaaatttacaaaaattaagtttcttaaagctgtttcactattcaattatatttttatgtctttcgttttccctctgtgtttcactttgaataatgtccatcattatgtctttagggtcatta

SEQ ID NO: 321741 - DNA, 551 bp, Homo sapiens
ccaccacgcccagctaattttttgtattttagtagagatggggtttcaccatgttggctatgatggtctcaatctcctgacctcgtgatctgcccacctcagcctcccaaagtcctgagattacagacatgagccaccgtgcctgkcctaatttttaaatttttaaatatgtttcttcttcaaattattcagattgatatctcagaagttgtaccctgctgcttcagttgcttctgtcttttgagaaggccttgaatggaaactttctctttcaacttttgttggctcctgtaatgtttttaaattaatactctaaagtaagggagagaatttttgaaaacaagcaaattaaaaatgttttggatttgcttttttctgtatgtctgctatgtctatatgtttacatatgacatgtccaagttctgtttcacaccaaactgtatgaaagagctctaaacaattgccttaaagaatttaatacttaaccatatttgacagaatctaggtcagatgccttgtagttcacatgactagtaatatttgggaagatt

SEQ ID NO: 321742 - DNA, 588 bp, Homo sapiens
aaagaagattgagcatcattttggcaatcccatgtacttaaacatgtcaaataatcctgtttacctctgttttctggacacttcaggggccctctgaagtattcaaaagccaggtgtcagggaagacaattttgaaactgaagtttgatttgaaaaaggctgttaaatgttcaaggtttaaaacacttgacattatgaaatagaattccagattaccgtaagttatttattttgccaaaatgatgactcagaaacttcaaagaagcaaaaaccttgtacaaccctctaaaaattttgccaaagagcagattagcaccttaggagaacattgttatgcttttatttcaatgctcaatttgcggaaaaaacacataatacccttttttgaattgagtcaatatgttcacagagagaacctcttctgcaagattaatttccacaattcttycaccacttcattgaaccttcagcttttttctaatttaactcaaaacaatccctttaaccctaggcaaaagtttacatttccatgccttcttataaccttgtactaaaaaatacattttactgttcttacacaccttgaat

SEQ ID NO: 321743 - DNA, 575 bp, Homo sapiens
catacacatatgcaccaaaatacatggaaaaaaacctcataatgtgaatggataaatatatgttatgtattcatacaatgggatataactcagcaataatagttttatgatttctgaaaatacatggatgaatttcacataaataaaattgagcaaaagaaggccaagcacaaaagaggacaaactataattccattcatatygagttcaaaaacaaacaaaacttttggagtatataaactaggagtgggcacaggagagctttcctgggtgctggatatgtatcttgattttggtgctgatttcatagatgtaaacatttatcaagctttcttaagattcatttacttactaaaatatatacacttaaaataattgaaataagaatctgtataaccaacattgtcaaaatgccccgttaaagcaacttccgcactggctgattcaaagtgtttgactttagtcccagagaatgaaagcttttctgagtcaccagatcatgttcctgtaggttctacttggataatacattttaaatgctgtgttcaggagtaactgatgcttaaatatagatt

SEQ ID NO: 321744 - DNA, 575 bp, Homo sapiens
catacacatatgcaccaaaatacatggaaaaaaacctcataatgtgaatggataaatatatgttatgtattcatacaatgggatataactcagcaataatagttttatgatttctgaaaatacatggatgaatttcacataaataaaattgagcaaaagaaggccaagcacaaaagaggacaaactataattccattcatatcgagttcaaaaacaaacaaaacttttggagtatataaactaggagtgggcacaggagagctttcctgggtgctggatatgtatcttgattttggtgctratttcatagatgtaaacatttatcaagctttcttaagattcatttacttactaaaatatatacacttaaaataattgaaataagaatctgtataaccaacattgtcaaaatgccccgttaaagcaacttccgcactggctgattcaaagtgtttgactttagtcccagagaatgaaagcttttctgagtcaccagatcatgttcctgtaggttctacttggataatacattttaaatgctgtgttcaggagtaactgatgcttaaatatagatt

SEQ ID NO: 321745 - DNA, 596 bp, Homo sapiens
tagccctaaatctattttttttaattgtagttaaaacctttccaagaaaggaaactgaagtctcaaatggttttactgtaatattattaccaacagtttaaaaaataaactataccatttctatacaatctatttcagaaaataagagggaagataatacttcgcaattcattttacaaggccagtagtatcctgagaccaaaagcataaaaatacattaaaagcaccaactacctaccaatatctctaacatagatgcaagaatcagaataaaatayctgcaaattaaatccagtaacatatgaaatgataataccatgtggggttcatcacagatattcaagaacattttaacatacaaaaattaattaatttatttcagcatattagcccattaaatataaaacccgtataatcatatcaacagatgcagaaaattatttgacaatatgccatatccattcatggtaaaaatcctcaagaacgagttatataagggagcttccttaacctaataggagatacaaaattataaaatgaagtaaaacctagagctaacaataccccagagagtagactgaatgctttcacactaa

SEQ ID NO: 321746 - DNA, 332 bp, Homo sapiens
ttattatttctaattgtgtttatttgaatcttctctcttttcttttttattattctagctagcagcctatcttaattgtttttcaaaagaccaactcctgtatttgtttattttttaatagattttcatgtgtcattttccttcattttggctctgattgtgttatttcttgtcttctgctagcttgtgggttgatttaytcttgcttctctacttctttccattgcaataagttgttaagttgagatctttatttttgatgtggatatttagtgctatgaattttcctcttaacactgtcttagttgtgtcccagagattctggtatgttg

SEQ ID NO: 321747 - DNA, 289 bp, Homo sapiens
agcttttcaggaaatcaggtctgacatttgcattcacacaaatccatgtatattcctggcttaaagctcctgtggaaccagatagacagaaagytaatagaggttaactggcaaggaaaaactctgaaagtctgaaataatctctgggtttcaggagagcatgccacatgagttgaaaacaacactaatttattgtagtctgttgcatggaagcagggggctcttgagtatcaattagaagaaagtgctattagttttatttactcagagtgattttatcctatcaaca

SEQ ID NO: 321748 - DNA, 568 bp, Homo sapiens
aaggaaacccgagtgggttgctgctgctggctggggtggccagcttttattcccttatttgtccctgcccctgtcctgctgattggtccattttacagagcactgattggtccattttacagtgtgctgattggtccaatttacagagcactgattggtccattttacaaacctctagctagccacagagagctgattggtgcgtttttacagagtgctggttggtgcattttacaaacctctaggtagccacagagcactgattgctgcattttacaatcctagctacagagtgctgattggtacattttacaatcctcttgtaagacagaaaatttcttcaagtccccacccaacccagaagtccaactggcttcacctctcaatctcccctctaaacaggacaccccagctgctgttggaaattgggcgatgaccactctagctacttcctgctggataggggcgaagaagggccctgcagtggtagtgtcctccagaggggaactctaggcyagccaaagggtcagtgggttggtccaggggtcctcagtagaagttgttaatt

SEQ ID NO: 321749 - DNA, 544 bp, Homo sapiens
acaattgaggaggtgggagaaatacctggttacaggctgtcccaggattcctcagatggtaatggactttgaggacagccgaccagggcaggagattaacactgagagggccgcaccagtatccaagaggaagtcaatttcctgtccctcaatagttaaatgtacctggggctcagtgagggtgatgacataagccggtgcttgttccaggcaccctcagtcctgttgttggatcggctggttgggggaytctggcctagagaacatttgtcctctggggcagtgtgccttccagtgattgcctcagcatagtggacatgggcgagggggaagcttgtttctcactggacaatcttttttaaagtgtccttgcaaaccacactgataacaagccctaccagctgattggcctgctctattttctgtcctctctgaaccaccagggtttgtttgtctgagggccatgactaaggctgtgccctttctctgatttcactttttcttctcagcctgttcctcttggtcccttttatagaacactgag

SEQ ID NO: 321750 - DNA, 544 bp, Homo sapiens
acaattgaggaggtgggagaaatacctggttacaggctgtcccaggattcctcagatggtaatggactttgaggacagccgaccagggcaggagattaacactgagagggccgcaccagtatccaagaggaagtcaatttcctgtccctcaatagttaaatgtacctggggctcagtgagggtgatgacataagccggtgcttgttccaggcaccctcagtcctgttgttggatcggctggttgggggactctggcctagagaacatttgtcctctggggcagtgtgccttccagtgattgcctcrgcatagtggacatgggcgagggggaagcttgtttctcactggacaatcttttttaaagtgtccttgcaaaccacactgataacaagccctaccagctgattggcctgctctattttctgtcctctctgaaccaccagggtttgtttgtctgagggccatgactaaggctgtgccctttctctgatttcactttttcttctcagcctgttcctcttggtcccttttatagaacactgag

SEQ ID NO: 321751 - DNA, 517 bp, Homo sapiens
cataggttcagggcataaaacctgatctatgcttataatcaaagtgaaaatggacagtggaacatcattagaacatctggatcattttggaaacttattatgtttggcatcaaggaccaggatgaaatctcatttttcttaccttttgtattatagtggtggtaaagaaagagaaggaaaatgtgttcataaagtctggaaaaatataagcggggtacatatgctttaaaaaaacagacaatagacaatcaaaaaccaactctgggatatctaaagcattaaaaacttttagatatttaaaattagctagaattctagttgttaaaataatatgcttgtagatggcttatttctgtgccaaagtgtcaatactggagtagaagtgtgctatacaaatagtcttcaccatgaacaatcccatgacaagtcttgytgatagggtaaaatttgaaaggagaaacaacaggcatggtggctcacacctgtaatcccagcattttgggaggccgaagcgggc

SEQ ID NO: 321752 - DNA, 523 bp, Homo sapiens
gatgctatattataacctagaatgactgttctaacaatttttttatttttttattttatatatttatttttgagactgagtctcaccctgtcacatccaggctggagtacagtggctcactgtgacctccgcctcccaggttcaagcgattctcctgcctcagcctcccaagtacttggaaytacaggcacccatcaccatgcccagctaatttttagtagagacgaggtttcaccatattggccaggctggtctcgaactctcgacctcagataatctgcctgccttggcctcccaaagtgctaggattacaggtgtgagccaccgcacccggccccaataatttataaactataaaatctgatataaatattaatcatctacaaaatcctgctctagggctccatactactgcacttcaccctgtattattatttatttaatattctggttacggaaggagactgaagaggtaaaatgaactcgagaatgactatcaactagataagcatttccaaatatg

SEQ ID NO: 321753 - DNA, 523 bp, Homo sapiens
gatgctatattataacctagaatgactgttctaacaatttttttatttttttattttatatatttatttttgagactgagtctcaccctgtcacatccaggctggagtacagtggctcactgtgacctccgcctcccaggttcaagcgattctcctgcctcagcctcccaagtacttggaactacaggcacccatcaccatgcccagctaatttttagtagagacgaggtttcaccatattggccaggctggtctcgaactctcgacctcagataatctgcctgccttggcctcccaaagtgctaggattacaggtgtgagccaccgcacccggccccaataatttataaactataaaatctgatataaatattaatcatctacaaaatcctgctctagggctccatactactgcacttcaccctgtattattatttatttaatattctggttayggaaggagactgaagaggtaaaatgaactcgagaatgactatcaactagataagcatttccaaatatg

SEQ ID NO: 321754 - DNA, 579 bp, Homo sapiens
gtgtgcagggcagcagggacctgggcctggcccacaaaaccattcagtcctcctaggcctcagggcctgtgataggaggggctgcatgggaaatctccaaaatgcctttgaagcctttwtcccattatctttgttattagcacttggctcattttcagtcatgtaaatttctctagcaagtgtttgctcctcagcctgcttgaaatcctctcctgaaaaagctttttctttctttgccacatggctaggctgcaaattttccaaacttttatgctctgcttcccttttaaatataaattccaactttaagtcatttctttgcttccactgtcagaagcaaccaggccacatcttgaatgctttgttgcttagaaatttcttctgccagataccctaaatcatcactgtaaagttcaaacttccacagatccctagggcaggaacacaatgcagccaagttctttgctaaggcataacatatgtgacctttgctccaattcccaataaattcctcatttccatctgagacctcagcagcctggacttcactttcagcattttggtcacaactatttagct

SEQ ID NO: 321755 - DNA, 503 bp, Homo sapiens
ttttttagaaatgcatagaaaccaatcaatgtgaccttgagactttagcaagatgaagtttgagacatcatgtggtcatgaagatggaggatgcagtgaggcagggcaggctagggtggtgaatatacctctgggactcttcttggcctaacttgatcctgctctaattgaaaacaggagcataatcaagaaaatggctcttgtgatttaaaaaaataatgacttttactatgtatatattaayatacatatatgaccatatatttacataaatattaaatatttataaaatattaaatatatatacaacttgattaattattataatggaaatactcatgaaaccactatccggacaaagaaatagaacaatgccagcactccagaaactgttcatgtgtcctcctcaacaacaattccttttcctgccttaaatactgttgtgacatctatagtaattacttctttaatagtttttcataaagaaagttatgtgatatttg

SEQ ID NO: 321756 - DNA, 594 bp, Homo sapiens
gtgggtgtcaattttaatttgtggatgtctttacctaccttggttttgcttaatgctatgttaacttaatagagaatgttyttctatgctgggaccagatttatttatattagttttgtttaactatgatttgaggtcatttgtgatctctcactcttctactactcccaattgaatggaagctgattttgtgacttctgagtacttaccaggtaccatactgtagttggcattctgataaatattcttgcatagtatattattttaaattcctttactttcaaccgttctgtattttgtatatgttggaaacagaatattgctatttttagtagtattttaaaatatttctcttaataatttttctattttaattagaagattttgtacatttatgtttaatgtaattgacactatccttaggtttaaaaccaccattttaatatttagtttattcttgtctcactttgtttatgttttttttttctcttttttttcttttcagaaacgaggtgtcactgtgttgcccctggtggtcttgaactcctgggcacaagtgattcacctgcctcagcttcccagagtgttgggatt

SEQ ID NO: 321757 - DNA, 588 bp, Homo sapiens
gtctattacagtttcctaatctgtaaaacagaaataataataaaacctctaaatccttgataattgttagagattaatataattattgttttacatgaatttatgttgaagtagtctttctacctttacacccagtgactttctggtacacaatacctgtctggtaagtaaaagacagcarcatcaatattgggcagcattattgctggacctaggactgagctaggtgttttggaaagtgaaaacatagtcctgaccttagctatcttaaaatttagttatgtacatgaaaaagatacagtagcaaagttgcattcagttgtgaaaatgcattgaattgtatacttcagctatgtgtaattttatgcctattattaatcaacaaaaagaacagaaaagtagataattttatggcagttgtataatatacgttgtaaaaacctaaagacatttatatcctagttgaaaatatagttggaattaatagcttcccttttttggagccaccacatttataataatgtagaaatcaccataaagcaccacataacatggctacctttctagaattgagattggttcctaaac

SEQ ID NO: 321758 - DNA, 588 bp, Homo sapiens
gtctattacagtttcctaatctgtaaaacagaaataataataaaacctctaaatccttgataattgttagagattaatataattattgttttacatgaatttatgttgaagtagtctttctacctttacacccagtgactttctggtacacaatacctgtctggtaagtaaaagacagcaacatcaatattgggcagcattattgctggacctargactgagctaggtgttttggaaagtgaaaacatagtcctgaccttagctatcttaaaatttagttatgtacatgaaaaagatacagtagcaaagttgcattcagttgtgaaaatgcattgaattgtatacttcagctatgtgtaattttatgcctattattaatcaacaaaaagaacagaaaagtagataattttatggcagttgtataatatacgttgtaaaaacctaaagacatttatatcctagttgaaaatatagttggaattaatagcttcccttttttggagccaccacatttataataatgtagaaatcaccataaagcaccacataacatggctacctttctagaattgagattggttcctaaac

SEQ ID NO: 321759 - DNA, 603 bp, Homo sapiens
tattaaacattgttgagagaaaaaaaaaagaaattttcatagcccaagtaggtgttccaataacaataaatctagcagaaatttactgtgcacttgctatgtgccagacacttgattagttttgatttgtgttatttaatgcatatagcattcttcatgataagtattattatgctcattttatacatgagggaattacaattcagagaggttaaataacttgtccaaggccacacagctttgtcatacttgcttagtaaaaccccaactctcctttgaatcaaactgtctgtttactctataactgcattgcctgcttccagctgaacatggtatcactttaaattcatgatagtgaacttcatgtgatcctttgatctgccaacattcagactacattttcctaaattcctaatgttttcacttgtaggtaaccattcacaacctcttctttaacttcaacccctccctcccawcttcactcttggtttatctttttgcttcttgctttactgagaaaatacaatcagaagagaaatttgaatcctcacactgtgccttcctgcttgttactgtagatgaaccagctgtaccctgtgcact

SEQ ID NO: 321760 - DNA, 528 bp, Homo sapiens
aagccatactgttcattcttctaggaaaaaaacaaggagtcatctttgactcacttttacatttgacctgtcagatctaattggtcctcccttccaagttatctagattgaccacttctcaccaggtccaggtctacccttctcattgagccaccatgctctcttgctattcacagctaacaggtctccttatttccactaccatgcctgcacatgcaattataaacacagtaaccagaggacactttcacrtctttctaggactttatccagttcatttaagttgtttaatttattgacatacaatagttcatagtgttcctttacaatcctttttatttctttaaggttggtagtaatgttccatctttcatttctgattctagtaatttcagtcttctctttttttttttcttggtcaatttagcttaagtttggccgatgttgctaatcttttcaaagaatcaccttttattttcattgatttttctctattgtttttctattctttataaaattaatttcctt

SEQ ID NO: 321761 - DNA, 608 bp, Homo sapiens
gtttacatcttgcttatataactgcttttgccaggttgctctgttattaccatttattatttatgaagtgccaacagaattttmagaccttgtccatatttgttgagtcatgcactactgcataggacaaacaagatgacgcataaaaacccaggagtgggtgggagtagtaagttctcattttcttttttgtttgcttctatgctactttcttagacgatagaacaaaagcatcactgtccttcatcaaagaaggaagggaggaaaaagcagaaaatgtggccaaaatcaagacaagtcaaagaaatgggaaaaattaccttgattcatccattacaattctagctttagtaggaataaaaaagggatattgttcttttgagtctcagaaagaaaaaaagaaggctaagaaatgaatttgtgaagtcaaactaagaaaattaattgagtaagaatagccaaggtttgctatgaagcttgatcaaatgaatttcactagtgctctctttttacagtaaaaaatacctaattcatattcacttgccattaatttgaccaaataataaagacaactaaaaataaaattatgatggaactgagaaatacat

SEQ ID NO: 321762 - DNA, 536 bp, Homo sapiens
tctttgtataaaaagtgtagttatctcactttgtgtaaagaggaaaaggaaaagagtaagaagaaagatggtatgaaaacatcagcttttaaaaaaatagagaaagcttaaagtgctcttaaaagttgtcagatttatagccttaaaagacttgaagattgagagccccatttattcacagcaaaggcacaggtcccatctctgctctytcatgactcatcctgctgcactggaagggtcgcccacagatgagagggtaatttagtttctcggattgttcaatcttcttgttcggtttgctcacaaaggtactaattaggggaaattgttatggtgttatttttctcatttgaacatctgttccttatgagctggacacagagaagtaagtcacttatagaagcaaccaggaagttggagggtggcggttctgagtcattgtcttaataagttcgagtgtaaaccagtggccagtgtatgaaaggatcaaaaccctctaaatccacgaactttccatgtccaggtaaatatactgc

SEQ ID NO: 321763 - DNA, 536 bp, Homo sapiens
tctttgtataaaaagtgtagttatctcactttgtgtaaagaggaaaaggaaaagagtaagaagaaagatggtatgaaaacatcagcttttaaaaaaatagagaaagcttaaagtgctcttaaaagttgtcagatttatagccttaaaagacttgaagattgagagccccatttattcacagcaaaggcacaggtcccatctctgctctttcatgrctcatcctgctgcactggaagggtcgcccacagatgagagggtaatttagtttctcggattgttcaatcttcttgttcggtttgctcacaaaggtactaattaggggaaattgttatggtgttatttttctcatttgaacatctgttccttatgagctggacacagagaagtaagtcacttatagaagcaaccaggaagttggagggtggcggttctgagtcattgtcttaataagttcgagtgtaaaccagtggccagtgtatgaaaggatcaaaaccctctaaatccacgaactttccatgtccaggtaaatatactgc

SEQ ID NO: 321764 - DNA, 595 bp, Homo sapiens
aaaaaaagtggaagtagtctcaggccaactgaaacaaattggtcatcctgttgcttacatgtgaaaaaatctgtgagcaaaataactggctctgagttattccctgaaaccacttaacaggtgacacctttaaaacactggcacacagtaagtgccctatatatattacttgctgtttagaaaaaaatagaagtgacagtttgaggcagtttgcaaaaacaccatgattgtgctattaactggcctctagcacagtttctggtgcgtgatacacattctcttaatgtttattgaattgatctgattgggaaatctcattctctagagatactctagaacaaagtatttatcccatcacttcaaatctttgaagattggttgattgatgcttcaggggacaactaaattcaggtaatatctgttactccatatactatttcatataaaacattaaactatcaatgcaatggaacagctractatttcatataaaacattaaactatcaatgcaatggaacagctgatatggatgaaaagccgtgggtagctttctattagtaatctttcatacccctgagacagtagtacaattaa

SEQ ID NO: 321765 - DNA, 607 bp, Homo sapiens
cagtactttcctttgagaaccttgggatgtacttgcattaagtgaaacccattgtagtccccatgtggtcactgttgcaccaggtttaaaagaataattgctgtatttagctttgtaacatcctcattttataaagtagatatttcatggctcaaacaggatcagcgataaggttattcatgggtgaatttctactcatggacatttctgacagtaaatgcacagagccaattcacagaaagagcrttaaatggaattccagattttaattaccctatccttccctccaaatctgtttcttagtctctggttttacttatctttgtacatatcacctcccaaatgctcaaggttggaactttggagccattgttgattattcctttttcttggacatcttcatgcccactccatcagcaagtcacatcctgtcactcctctccttgtcctctgtcccatcctggtcccagctgcccacttttcttaccaagatgcctgcaacgagccctaccctttggcttggctctggcagctgtttttcataagtcagtcagcacaatctttgcagaaaggagatcggtcactatgggtctctgctcaaaatcct

SEQ ID NO: 321766 - DNA, 607 bp, Homo sapiens
cagtactttcctttgagaaccttgggatgtacttgcattaagtgaaacccattgtagtccccatgtggtcactgttgcaccaggtttaaaagaataattgctgtatttagctttgtaacatcctcattttataaagtagatatttcatggctcaaacaggatcagcgataaggttattcatgggtgaatttctactcatggacatttctgacagtaaatgcacagagccaattcacagaaagagcgttaaatggaattccagattttaattaccctatccttccctccaaatctgtttcttagtctctggttttacttatctttgtacatatcacctcccaaatgctcaaggttggaactttggagccattgttgattattcctttttcttggacatcttcatgcccactccatcagcaagtcacatcytgtcactcctctccttgtcctctgtcccatcctggtcccagctgcccacttttcttaccaagatgcctgcaacgagccctaccctttggcttggctctggcagctgtttttcataagtcagtcagcacaatctttgcagaaaggagatcggtcactatgggtctctgctcaaaatcct

SEQ ID NO: 321767 - DNA, 566 bp, Homo sapiens
ccattgtaatggtccatgggactgtgacttaacttcagcagttacccgcacatggccagtcttctttaatctccacctccaccctcatttcccttcccctgtacacactgggttcttttgagtaaatctcaaacatcatctctcgtatctgtaaatacttcattatgagcctgtgcaagttacaagattttctaaaaaacatatgcccaaacttattatcactcttgaaaaaagtaataatggtattgagaatattatatgcttctctcttctttttaaaaagttagtgtgtgtaaatcaggatcctagcaagttcacatattacatttggttgttatgtctctagtgttcttgtaatatataggttcattttttcttttcctttgcaatttatttattgaaaaaattcttatggagtatatatcacattgtggattttgctgatttgtttatgcccctgtggtgtcatttattatgttctcagtcccttgtatttgtataaattaatcagattcaagtttkattttttaaaatttctgcaagaatatttcatagatgttgttgtg

SEQ ID NO: 321768 - DNA, 462 bp, Homo sapiens
tggcactaaatattgtcttcttcattgtcatgcactaagttttacttaataatgtccttgataaaacagtgaaaatttattaaatctctacccttgagtacacatctgtttaatattctgtacacattaagcccttctgcatgccaaagtacaacgcttgtctataggaaaagccattgtttgagttgcaagctgaacatttatgcttaaaataacagctacagttattttatgaaaaatgaagtgagcctgtcacttctaggaaagtaacaggcatttattgccaatgataaaattaaagctttcaaatkgaaatttgaattttggaaaatttgtatctaccactgtgagctgaaagcttcctagaacttaaaaggacttaattatgagatctgtgtttattatgtggatattaacaagtgtgatattttgaagtttgaggaaatgtgtcaacattctgaa

SEQ ID NO: 321769 - DNA, 620 bp, Homo sapiens
ccactaatccccactcagactttgctgacagtgttggcggtggggctgcaaatttttctgtggagtttggctggggttaggggaggctattatatcaacattttctgtctttctaggctacccttttcttagttctttggttagagagaactggctctttttggggcttttttttttttttttttttggtctgtctcactggcacttagaaattactgcctctccagcaaaagaaaaccaggaaactcatagccatgtctttcctcaggccccaagcaagcctgccttcttctttccacctttggaagtcttcttatgtttattttttatataatgcctagagttttcattgtacctttttttttttttttttgagacagagtcttgctctgttgtctaagctggagggcagtgatctcagctcattgcaacctccacctcctgggcttaagtgatcctcccacctcagcctscaagtagctgggactacaggcacgcaccaccacactcagctgatttttaaattttttgtaaagatgaggcctcactatattactcaggctggtctcgaactcccgtgctcaaataatcctcctaccctggcttctcaaagtgctgtg

SEQ ID NO: 321770 - DNA, 576 bp, Homo sapiens
tccttggttcatgacatcatttcttccctggaggactgaggtaatctcctcctaactggttcagacgctttgaaccaaacttcccttctgccaataccatagttaargtattggtttttttctaaagcactacaacaagcttcctctaacctgtctttctgcctgctttcttgctttgcctttgatatattttcagttgtgttatcagagaacgttttcttttatagaaatgcagagtgttcaagttaacgtcaaactccttaggatgacgcagaggtgtaacgctctcacctggtcctgcccaacttatctagtctgctcatctcatttcgcaatgtctgtacctatctgtgaagaaccacgtacaacttcctcaatgtgctgtggtttcccttgatctcatgctgttgcacatgctactttcttggttaatttctacctgtcatccgagactcagtccaggtgctaccacttttcagaagccagagttacctgcctttcctatatataaccacagcacattttgcaattattataactgctggtttactccattggcttataagttatttgaag

SEQ ID NO: 321771 - DNA, 576 bp, Homo sapiens
tccttggttcatgacatcatttcttccctggaggactgaggtaatctcctcctaactggttcagacgctttgaaccaaacttcccttctgccaataccatagttaaggtattggtttttttctaaagcactacaacaagcttcctctaacctgtctttctgcctgctttcttgctttgcctttgatatattttcagttgtgttatcagagaacgttttcttttatagaaatgcagagtgttcaagttaacgtcaaactccttaggatgacgcagaggtgtaacgctctcacctggtcctgcccaacttatctagtctgctcatctcatttcgcaatgtctgtacctatctgtgaagaaccacgtacaacttcctcartgtgctgtggtttcccttgatctcatgctgttgcacatgctactttcttggttaatttctacctgtcatccgagactcagtccaggtgctaccacttttcagaagccagagttacctgcctttcctatatataaccacagcacattttgcaattattataactgctggtttactccattggcttataagttatttgaag

SEQ ID NO: 321772 - DNA, 576 bp, Homo sapiens
tccttggttcatgacatcatttcttccctggaggactgaggtaatctcctcctaactggttcagacgctttgaaccaaacttcccttctgccaataccatagttaaggtattggtttttttctaaagcactacaacaagcttcctctaacctgtctttctgcctgctttcttgctttgcctttgatatattttcagttgtgttatcagagaacgttttcttttatagaaatgcagagtgttcaagttaacgtcaaactccttaggatgacgcagaggtgtaacgctctcacctggtcctgcccaacttatctagtctgctcatctcatttcgcaatgtctgtacctatctgtgaagaaccacgtacaacttcctcaatgtgctgtggtttcccttgatctcatgctgttgcacatgctactttcttggttmatttctacctgtcatccgagactcagtccaggtgctaccacttttcagaagccagagttacctgcctttcctatatataaccacagcacattttgcaattattataactgctggtttactccattggcttataagttatttgaag

SEQ ID NO: 321773 - DNA, 613 bp, Homo sapiens
cttcctgtgccccctacaatccagtctccacccagaagcaagggtgatcttttcgttttctagttttattgagatatgattgacaaaacaaaaaacaaacaaacaaacaaacaaaatgtatctaggccaggtgcagtggctcatgcctgtaatcccggtattttgggaggctgaggcaggaggatcacctgaggtcaggcgttcaagaccagcctggccaacatggtgaaaccccatctctattaaaaatacaaaaattagccagtcatggtggtacacacctgtaaccccagctacttataagggtgaggcagtagaatcgcttgaaccccagaggcggaggttgcagtgagctattgcaccagtgcactccagcctaggcgaaaaaggctccaaaaaaatgggcatacaacatsatgacttaatatacgtctatatatatacattgtgaaatgattaccacaatcaaattaattagcacattcatcaccatacatagtcaccattgtttgcgcatgtgtgtgtgcgagtgtgtggtgaggacacttaatatctagtcccttagtacatttcaaactctatggtattattgagtataggcaccacattagat

SEQ ID NO: 321774 - DNA, 635 bp, Homo sapiens
gtatctcatttttaacaatttcccattcctcaatgacgaatgctattgagtatcttttcaygtgcttatatgccacttgtgtattttctttgaggaatgtctgttcaaatcttttgcccattttcaaggcattgggttgttagagagttccttaaatatttgagatatgagttcgttaccagatatgtcatgtgaagacattgttacccagttggtgatttatcctttcattttcttcacagtgtctttcagagagtaaaaatgtttaattttgatgaagtccattggactgtttttttggttttgtacatgttgtatgaggaatggattggagtttttgttttgctttgtttttggatgctaatgttccatttttccaaaaccatttgtggaaaaaaactctattttatccactgggttgcctttacacacttgtcaatcaattgtccacctaagtaacccacaaaaaactattagagttcataaacaacatctaattgtaattgtggatttatctctttcttcttgcagttccatctatttctgattcagatattttgaagatctgttattggaggtcttaatgtttaagaatgttatatcctcctgatgaatttaccctctttttcattatg

SEQ ID NO: 321775 - DNA, 635 bp, Homo sapiens
gtatctcatttttaacaatttcccattcctcaatgacgaatgctattgagtatcttttcatgtgcttatatgccacttgtrtattttctttgaggaatgtctgttcaaatcttttgcccattttcaaggcattgggttgttagagagttccttaaatatttgagatatgagttcgttaccagatatgtcatgtgaagacattgttacccagttggtgatttatcctttcattttcttcacagtgtctttcagagagtaaaaatgtttaattttgatgaagtccattggactgtttttttggttttgtacatgttgtatgaggaatggattggagtttttgttttgctttgtttttggatgctaatgttccatttttccaaaaccatttgtggaaaaaaactctattttatccactgggttgcctttacacacttgtcaatcaattgtccacctaagtaacccacaaaaaactattagagttcataaacaacatctaattgtaattgtggatttatctctttcttcttgcagttccatctatttctgattcagatattttgaagatctgttattggaggtcttaatgtttaagaatgttatatcctcctgatgaatttaccctctttttcattatg

SEQ ID NO: 321776 - DNA, 560 bp, Homo sapiens
acaggtggccaaagctggaagcaggtgtaacagaaaacctgctttgaacaacttatctcacacgtaggaatyagacaggtggggttagcttcaggcacagaatgatcaaggccctggcttaatctctttgccatttttttgaccctgtcctctccgtcatgttagtaccttcccaaggctggctttcctcaagattgccaccttgtagtgagttgaatggtggccaccaaaagataggcccatgccctggaacctgtgaacttgatcttatttgaaaaaaagtgtctttgcagctgtattaaggattttgagatgagatcatcctagattgactgggtgggccctacatccaatggtaagtgtcactgtaacagacaggagacacaggcgcagaggagaaggctgcaggaagacagaggcagaggaggaagtgatgcctccacaactgaggattgcctggagccagcagaaggtggaagggaaggaaggagtcaccccttgggccttcagagggagcacagccctgccaggacttcgatgttggacttctggtctccagg

SEQ ID NO: 321777 - DNA, 467 bp, Homo sapiens
tgcaaaggcatggaggcaagatactttcagaaaagaataaaacatggctggcatgcaggatggggaatgcaattgctaagagaggatgctggagaggtaggaagaggctaggtcacaaaaggccttacctgtcattctaaagactgtgtttgcagtgggaagccatcaggggcttgagccacattttggaagccacccattggctgttgcatgaaaaaaaaatcacttagatggggcaagactggagatggggagaacagttagtagattgtggcagacagtaattcaggtgagagatatctgtggtctgacccaggcagggcaatggcgaggaatgccagtagacagagggggtggtattaagctacctatcaagtagacagattgatccgttggacaggatgagcatgttgtgaaagacaggcytgaacttgtgtcatgctttgtttctgtgcaagtcagctcca

SEQ ID NO: 321778 - DNA, 560 bp, Homo sapiens
ggagagaaaggtattgaggaaatgatcagttaccaatcagagtttccttctaattgaatgtctgattttattaatgatagaatttataaaggtccttaagaaaagaaaagaatttagtcagttcagcagttaactgtgaaaattaatgcagaggatataagttaaaatggccattttatttgtcttcctttttttttttttcctggtggtgggggatgaacctgggcccatcacctctgaggtcttttgcatttctgggctctctttatttggctcaraagaagcaggtagatggttccagggcctcaacttgacactattaaggacaaaaaccacacctatctctgtgaggtcctctttccagaggaggaagctgaggctcagagatgtttggtcacttgtcccaggcttcacagcttgagagccgtggctccaggattcccaccaggccccgactcccgtgtcagtgaggttggtaatgaccgtgagccttttctcccaactctggaagccagtgtccccgcaattggcttgtacggttgggagaaaactttgagacc

SEQ ID NO: 321779 - DNA, 462 bp, Homo sapiens
tcaatatttctgggttgctgtcttctcaagcttcaagtttagggtatacaaggcaaaatgagaacccagaaaactcacctccatgttgttccttgggacctgacatctctagcccatctgcctccttctttccacctcttcttatgattgttttccagaccttctagttatacttactggcagtaatagaaaaaagkatgtctattccatcttcccagaagcagaagtcctactgcatgacttttataattagaaaaaaagtgtgagtatatgtgtgtgtgtgtgtgtgtgtgtgtgtgtgtgtgtgtgtgtgtatttttaggagcattaacatacaggaacataaaggttcagtgccagccttttgtttaggtgacaggcactgtcctggcactgcagagacaggacaaaataaggcacatctcagggtccaaggagctcagcatggacagatgaagcaag

SEQ ID NO: 321780 - DNA, 462 bp, Homo sapiens
tcaatatttctgggttgctgtcttctcaagcttcaagtttagggtatacaaggcaaaatgagaacccagaaaactcacctccatgttgttccttgggacctgacatctctagcccatctgcctccttctttccacctcttcttatgattgttttccagaccttctagttatacttactggcagtaatagaaaaaaggatgtctattccatcttcccagaagcagaagtcctactgcatgacttttataattagaaaaaaagtgtgagtatatgtgtgtgtgtgtgtgtgtgtgtgtgtgtgtgtgtgtgtgtgtatttttaggagcattaacatacaggaacataaaggttcagtgccagccttttgkttaggtgacaggcactgtcctggcactgcagagacaggacaaaataaggcacatctcagggtccaaggagctcagcatggacagatgaagcaag

SEQ ID NO: 321781 - DNA, 521 bp, Homo sapiens
tattatgcttaccatgattttgcctcgtgtaccctaaacttgaagtttgagaagacagcaacctagaaaaggcctggtcaagtctctttggggcctggcttcatggaggaggagatgcttgagctgagcccactgtagcttctgaaagaacctttcttgaccagtaaagatggggacatcagggtggtggsaatggggagcagatcttaaacttgaacgtatacatgtacacatgaatcacctgtgtattttgttaaaatgcagattctgattcagtaggtctgatgctacgtccatgtaaccacactttgagtagcaaagtagggtatggattttggagtcagtgtgcaaatcgactaactgggcaagtcactaaaccaccatcagtttctgcatttaaaaaataaagataataatagtccctgccccatagggttgtagtgaggactaaagaggcaatggataaacagttccaggcccatgataagaaaagtctggagaatttattccctggatgcaat

SEQ ID NO: 321782 - DNA, 521 bp, Homo sapiens
tattatgcttaccatgattttgcctcgtgtaccctaaacttgaagtttgagaagacagcaacctagaaaaggcctggtcaagtctctttggggcctggcttcatggaggaggagatgcttgagctgagcccactgtagcttctgaaagaacctttcttgaccagtaaagatggggacatcagggtggtgggaatggggagcagatcttaaacttgaacgtatacatgtacacatgaatcacctgtgtattttgttaaaatgcagattctgattcagtaggtctgatgctacgtccatgtaaccacactttgagtagcaaagtagggtatggattttggagtcagtgtgcaaatcgactaactgggcaagtcactaaaccaccakcagtttctgcatttaaaaaataaagataataatagtccctgccccatagggttgtagtgaggactaaagaggcaatggataaacagttccaggcccatgataagaaaagtctggagaatttattccctggatgcaat

SEQ ID NO: 321783 - DNA, 589 bp, Homo sapiens
  misc_feature (1)...(589): n = A,T,C or G
ctgtgtttctagaacaaacaaaytgctttcctgctcattgttccttggctccgctaaaaaaaaaaaaaaaaaaaaaaagtcaagcatatttcaactagaaaaaggaaaccataggcagccagacacagagactatactgtttctcatttcatcagccttgggacttgaacagcaggtcactccatttgaaaactagcagacgtaataaatagaaagaggcatagaaagcaagctgacccccaattgggctgtagcacccagccatttctgtctgtcttggaaaggccaaagagaatgcactgtatactgccattgtatcaaatgttttgggcacctttttcagggcatttatgaaagaaaaaaagaaaagggagggattaaggnctggataagccttttcctgcctgagtacctgtttcatgatgtttctttatagtcatcatgactggcaaaataatctttaaggttgcttggcagtgtccaaaaagtagacaaatagaccttgtacctgtggaagaaattttaaaaactaaaaaaaaaaaaaaccataaagttgctttatgaaaaataaattatatgggtatggagc

SEQ ID NO: 321784 - DNA, 633 bp, Homo sapiens
  misc_feature (1)...(633): n = A,T,C or G
aaaatacagcagacatgaggttgtgtgacatctgagaccaagatgtaaaagcattgcatctttctcgttgttctgtctcggatcattttttctggaggaagctggctgccatgttgaggatgctcaagtagcatctaaggagagggccacatggtgaactgaggccaatagccatttgagtgagtcaccttggaggtggatcctccagccccagtcaagccttcagatgactgcagcccccataccatgactgaaacctcragagagagagagaaccacctgagtcagagccatccagcaaaaatgctcttgaattcttgaaactttaagaggaaaaatattgttttgnggtagctagggtttggagggatttgtcatgcagcaggaggtaactaacctattcctctntatccttttcaactctggggtctgcactanagagttatttttttttcacagcaggattnaaacagatttactanagaattgtgtgtgtgtgtgtgtgtgtgtgtgtgtgtctcactatcaatatttgaactttactatgtcanatgtgggtgtaggagattgtgttcctggacggagaaaatgatcatggaggagaaattgtgggatggtgaagnnnnnnnnnnn

SEQ ID NO: 321785 - DNA, 633 bp, Homo sapiens
  misc_feature (1)...(633): n = A,T,C or G
aaaatacagcagacatgaggttgtgtgacatctgagaccaagatgtaaaagcattgcatctttctcgttgttctgtctcggatcattttttctggaggaagctggctgccatgttgaggatgctcaagtagcatctaaggagagggccacatggtgaactgaggccaatagccatttgagtgagtcaccttggaggtggatcctccagccccagtcaagccttcagatgactgcagcccccataccatgactgaaacctcaagagagagagagaaccacctgagtcagagccatccagcaaaaatgctcttgaattcttgaaactttaagaggaaaaatattgttttgnggtagctagggtttggagkgatttgtcatgcagcaggaggtaactaacctattcctctntatccttttcaactctggggtctgcactanagagttatttttttttcacagcaggattnaaacagatttactanagaattgtgtgtgtgtgtgtgtgtgtgtgtgtgtgtctcactatcaatatttgaactttactatgtcanatgtgggtgtaggagattgtgttcctggacggagaaaatgatcatggaggagaaattgtgggatggtgaagnnnnnnnnnnn

SEQ ID NO: 321786 - DNA, 588 bp, Homo sapiens
  misc_feature (1)...(588): n = A,T,C or G
tgggctctgtattgtggtttctgtccacataaaaagttgcggtttattttctctgaggtttgggtcccaacagccagacaagaatcattcaaagaacaacctcatctcaacctacctagctgcacgtggcttccatgcaaatagtccatcatctagctttcggttcccttggttcagtgttatctgttctgaacactttcaaatttgcttaattttctaatctccttctcctcttttggcaacaccactctttatcttgtggttttcatctttattactcacatttcctcacanagagtgttcattaaaatattttaaattaagatttttactgcctttctaactgagcatgtcgggtcttcccatacaacacatttttaattcttatcacagaatttcaggcagtttgtacataatatgctatcaaaaactctattccactcaaggttgtcacaattcagagattacagcrttttgcagggtgttttgttggggatatattcatatattcactttgttagctggcaagcacggtccacgagcctgtacttcacacctcatttgatattacaattcaacaaaaaaagg

SEQ ID NO: 321787 - DNA, 575 bp, Homo sapiens
gcaatcagcatcaagggcatggggtaatcatttattttgctaaataacacagacatgctctggcttaattacagtagttttgctgtggaaaagaattgtgttgttttccatgtcattgtatctcattaatgagactttgtacacttttattggcaatactctgcagtgccctttggtctgaaatgattttccaatttgctaatgtcacttgtgaaagaggaacatttccaaactattttttggaggtatgataattgtgttttggaaaagcctctaatgttaatccctcaaaatcctcaaatgttaatccctcaaaatcctagctctgmtactaggtagctggatggtattggacatgttatttaacatttctggacctgaatttactctgtaaaataagtgggttcattcttttgtcctctcaatgatcagaaattacctagaaaatatatggaaattaaggctgtaatttgcctattattttcagtaaggtccaatgatgaaaagtgctgacacttctaactagtgttgatattattctaattgatgagattgataaggagaacaagacagtt

SEQ ID NO: 321788 - DNA, 472 bp, Homo sapiens
aaataagtttagtcttatgtgccaaccccccacagcagtgataggggctgcctgaaggggtgggttcaatgtcctccatggcagagggagtgctgaagtgctgcagttgattggtaatgtctgccatggcagagggagtgctgargtgctgcagttgattggtaatgtctgccatggcagagggagtgctgaagtgctgcagttgattggtaatgtctgccatggtagagggagtgctgagaggcagaggcagtgaagccatcccttggccattcttggtctacagcaagcatatgacactgccttatactaaaagaatctctgtggggttggatttcaggcttctctagtttctatcagagccaagaactggttttagaccaccccaccccttccagtggagtgactagcacagggctcagtccacaccaagttttgaatcagtaacagccaaaggctaaatcaagaggct

SEQ ID NO: 321789 - DNA, 574 bp, Homo sapiens
  misc_feature (1)...(574): n = A,T,C or G
ccaggtggcctgctggtgctgtgggcacctgcttntaatgagttttcagtcctgtgggaacaagagagctgaaagctggctgggcaagagcaggaggaagtgaccacagctcacagcacaggcgcyttgccatgccttctgaggagcccaggatggcagtttaagcatggactctaaagtcggactgctttgaccacataccggctctgagacctcaggaaatcatttaactgtctcaatttacacaactgttaaatgggaataataataacattccatatccactttacagggttctaatatttctgatttttaaaattgtattcacctagaagacataacatagtgcctggtacctaacaagagccatatggtttttcaatagattttttaaataaaataagaaatggacaaacagaatcaaacaaaattgtcctcaaagacatattacatgttctgtgtgttcttttacctttcaacaaaatattttatagaaggaaagaaactaacacaaatggggtcaggtaggaaaaactacttctactttgttgaaatagaggcacctgttataatc

SEQ ID NO: 321790 - DNA, 574 bp, Homo sapiens
  misc_feature (1)...(574): n = A,T,C or G
ccaggtggcctgctggtgctgtgggcacctgcttntaatgagttttcagtcctgtgggaacaagagagctgaaagctggctgggcaagagcaggaggaagtgaccacagctcacagcacaggcgccttgccatgccttctgaggagcccaggatggcagtttaagcatggactctaaagtcggactgctttgaccacataccggctctgagacctcaggaaatcatttaactgtctcaatttacacawctgttaaatgggaataataataacattccatatccactttacagggttctaatatttctgatttttaaaattgtattcacctagaagacataacatagtgcctggtacctaacaagagccatatggtttttcaatagattttttaaataaaataagaaatggacaaacagaatcaaacaaaattgtcctcaaagacatattacatgttctgtgtgttcttttacctttcaacaaaatattttatagaaggaaagaaactaacacaaatggggtcaggtaggaaaaactacttctactttgttgaaatagaggcacctgttataatc

SEQ ID NO: 321791 - DNA, 574 bp, Homo sapiens
  misc_feature (1)...(574): n = A,T,C or G
ccaggtggcctgctggtgctgtgggcacctgcttntaatgagttttcagtcctgtgggaacaagagagctgaaagctggctgggcaagagcaggaggaagtgaccacagctcacagcacaggcgccttgccatgccttctgaggagcccaggatggcagtttaagcatggactctaaagtcggactgctttgaccacataccggctctgagacctcaggaaatcatttaactgtctcaatttacacaactgttaaatgggaataataataacrttccatatccactttacagggttctaatatttctgatttttaaaattgtattcacctagaagacataacatagtgcctggtacctaacaagagccatatggtttttcaatagattttttaaataaaataagaaatggacaaacagaatcaaacaaaattgtcctcaaagacatattacatgttctgtgtgttcttttacctttcaacaaaatattttatagaaggaaagaaactaacacaaatggggtcaggtaggaaaaactacttctactttgttgaaatagaggcacctgttataatc

SEQ ID NO: 321792 - DNA, 596 bp, Homo sapiens
ctggcaaagctgttgctgtgtttgttgttgcctttgaaacaggtaaaagtggaatccaaaagaggggagaaaaacagaatgtaccttgcaattctcttgacggatccattttcattcccctaatggtgtattttgggttttaaaagaatataaattttagaggaaaaaaatctttcaaaaatactgcatttggatttaagtctttagggagcatatctgctgagggaagaaaccatcaaaaagaacatttacaaaggatgggttgcttttcattttctattgcatttaatctccaccataagcctgcaacaaaatccccattttacagaagagattcagaaagagtttgttatctgactaaattcacacgagtgatcggagatggaagagccaccaytgattccagctctctgccttcaaatcccaggctacaccagccttttaaaaagcctctttcccctggatctgagtcacttctttctgtaacacattgggctactctgtcagaccccaatagggtgggagggacctaagggcctggaggggccagcagataacttcaaagtgagaccaacacaggtttaacacaaaagtgc

SEQ ID NO: 321793 - DNA, 394 bp, Homo sapiens
ttatcacggaggtactaaggtttatttataatgggtgttttacattgtttctttcaacttggaaaccttttgtttgcatattaatcatatagaaatactcttctttgttacaaagaaatgtgctttttcacttatctgaaaacayatcactctttgtctatctccccccaacttttgatctagacatggatgctaataatattaattcaatcaatattacaggttatttattctgtgccagacaatgttgcaagcactttacattgatgaaatcatttaatcccacaacaaccctatcatgtagagacaaaattctccctatcttaaggttgaagaaactaaggccaaaggattttaaataacttgttcaaggtcacatggctaataaagtggt

SEQ ID NO: 321794 - DNA, 592 bp, Homo sapiens
  misc_feature (1)...(592): n = A,T,C or G
tagggtggatctcttccttcggcttgtcactaattccaggaaactgtgtggtatcatggaaaaagcatgaacaataaatccaggaagactggttcagatccctattctgccatggaccagctgtgagctgatatcagctggagtgcatttgactgcacgtaccatcaaatccaatgacagtgcctcartcaagcagggccttagttttctcccataagaagaatttacaagtaagtagtcaagggtggaggtagctgttctctgggccatcaaagactcaggctctgcctggcttcatctttaacccacagtttttatcttcatggctgctacacctctaggaatcatgtctggattccaagaagcaagatggcagcagggcaagggaaatagacacgcacagctggatgtggcctttgctgtaagaaacacttcgttttcctagagctcccacccagagctacctacttgcatttcattggccagaactgtgccatggtcacttctagctgcaagggagtctttggaggtgaatgtatttaagtggacatttctgtccncactcctgcaaacaagtttataggtcaataag

SEQ ID NO: 321795 - DNA, 592 bp, Homo sapiens
  misc_feature (1)...(592): n = A,T,C or G
tagggtggatctcttccttcggcttgtcactaattccaggaaactgtgtggtatcatggaaaaagcatgaacaataaatccaggaagactggttcagatccctattctgccatggaccagctgtgagctgatatcagctggagtgcatttgactgcacgtaccatcaaatccaatgacagtgcctcaatcaagcagggccttagttttctcccataagaagaatttacaagtaagtagtcaagggtggaggtagctgttctctgggccatcaaagactcaggctctgcctggcttcatctttaacccacagtttttatcttcatggctgctacacctctaggaatcatgtctggattccaagaagcaagatggcagcagggcaagggaaatagacaygcacagctggatgtggcctttgctgtaagaaacacttcgttttcctagagctcccacccagagctacctacttgcatttcattggccagaactgtgccatggtcacttctagctgcaagggagtctttggaggtgaatgtatttaagtggacatttctgtccncactcctgcaaacaagtttataggtcaataag

SEQ ID NO: 321796 - DNA, 596 bp, Homo sapiens
atcagttacgctgggaaataacacatttccttaggcctaagaaaagtatcttatttcgagagactgaatatacaaatggacaacggccagacaacatataacaatacaactctgatcttccaccgtgcagcagccaggaagtcaagccacaacctctgcaacaatcagcctagaatagtcatagcctggtcaatgactcccagctcttctcttttctgcctctgcttccarctccgggccaaccagagaaagccaactgtgctcccaagcccatcacataaaatgtctgcttctagctatcctgcctccagctcctccaggccaaaaccctccaatccaagcacacctgaagctttctcattcctctgcctgcctttgagtctctgctaatgcaagtgctggtgaccaacccccactgacacagtaagctctgagtaaatattcctctgtttgttttcatttgggtggtcttcatttatatccacaatctcaatgcatttttctctggccatcaaataaagcttaataagtaatctaaatgctgacccagagagctttagtagtgaataaagatcagtcccccaccagacaagcag

SEQ ID NO: 321797 - DNA, 629 bp, Homo sapiens
  misc_feature (1)...(629): n = A,T,C or G
acttaactttaaaatacacaagtaatactgtaaaacaataatctgcaacaatacagacaaggccagcgtccatgytgacaacccccttccagtcctgattgcttcgaaggggtaaccaacccatttacagtttagtgttgaaccctaaagagcactttctcatgccccattctttgtatctgctcgaagagctctatggtaagttaactagtcattctcccatcagtgggcattagtttgcctccagtttttcactggcacctcaagcagtgctgcaggggacatccttgcctgccacgttgaacacaaacaaggatttctctggggtcgaggcagcagggtagagtggctcagagcctggagcctggagccagtttgctggctcaaatcctaactttaccatctataaagtaccagttttaaacttaagtgtaaataaagttaaaaaatgaaggctcaattgaacaagggtccccagagttgccagccccaggatgtttcaccatcccttactgatccccacaaccctgcctatacctctgtgaatagtcccttcatgagaccttctgaagccctgatgggtacagtggtgtgttagcacagcgtaaaagaagaagctgnnctgacca

SEQ ID NO: 321798 - DNA, 646 bp, Homo sapiens
ggcattctagctacagagcttgtgcccttaaacactgtgctatggctgatgtgaatgaccatggtaaatgtactgctgcttctgatgttgattgtaaccaatgataatcataatagaccactggctatgacctgacatgctaatggcttcatgtagaatgcttctttaaatgctgtgagataaatctgatcattatacccattttacatatgggtacactaaggtttatagaagtaacccttttgtagtcgccacagatggcgaggacttgatcccaggtgtgatcaactgcaaagccatgcacttaactggcctgatattcctcacaagaagggtcataatmacagtcagaagacttgcacaacggctttagctgaagggataggcattttctctcctgtgacagctggcttgttgatttgtctgtttgccaatgctaaagagaagcatgcgagcacagctgtgaatgccagaagtcagaggtggcagtccaagatgatgtgccaaggtcagaggtaggaaagacaaggcagacaagcagagatggtccaggggctggtgcctgggcaagagacaccaagggcagagtgggggaccaaggcattagttgcaaattagaggtcagggctcaagccacacactggga

SEQ ID NO: 321799 - DNA, 494 bp, Homo sapiens
aggtaaaaccacaggcaccataggtatcccatccatccaggactgacgtttttatctgatcccctcctctaaaagccccaccatatttgaatttaacatcaaacacccattatgtatttcagctatggttttctggagacaaagctctggtctttggggtgtggcctgtggtgattttaacgtaggggtttcaggctatgaggagatattttggagggagagattagatggagcccagccttctcactcaatggttagtacatcctaaggagcaccttctgactggtcccatagatccccaaggaagctgtgccctgttgttggcatttcatgactctgaacatcacccctagctcacagaccaggggccagatgaaaaccagcagagtgaaagtcccaggagaatccrtccctcgtttctttttctgctttgctttcctggcatgtgggaagccgaggacaatgtcagagcaaggtgggacaacagggaatca

SEQ ID NO: 321800 - DNA, 638 bp, Homo sapiens
tttcttctgaacagtaggtctcaacagtgggcttataatattcagtaagccatgctataagcttatttgctgtcatccaggcttgttgtttcatatatacagcacaatcagaggggacttagcattattattaagggcccctaagattttttgaactggtcaatgagcatttagcttcaacttaaagtcaccagctgcattagccccctaactgaagagtcagcctgttctttgaagctttggagtcaggcattgagttctcctctttagctagtaaggtactagaaggtttctctcttgttgaagactgtttcacctacattgaaaatctgtttagtgtagctatcgtcatcagtgatcttatgtagaccttctggayaacttgttgcagcttttccattagcacttgctgcttcaccttgcacttttatgttatggcgatggcttctttccttaaacctcatgaaccaacctctgttagtttctaacttttcttctgcaatttcctcacctcactcagccttcatagacctgaagagttagggtcttgctctggattaggctttgacttaaaggaatgttgtgggctggtttgtttttctgtccagcccacttaaactttccctgtgtcagcaata

SEQ ID NO: 321801 - DNA, 321 bp, Homo sapiens
gccccaacacttccctaagcagccctccctgccacctcaagtgtccatggtggtcaaggggtccccctccttctagggttcccaaggcctgtgacragagcaggttgctccttgccagttcaactcacccattccccctgagctgttgttgttcaaaagtgagtcctgctgcagggtagcccatgcagggttcccagatttctatgtcttgcctccatccattctcagtgccctccttctgaagatctgttaaaagcatgccagtcatctcagtccctccttgggagctgttccacttgtctccgtctagtcagccatctt

SEQ ID NO: 321802 - DNA, 595 bp, Homo sapiens
agctggttgtaaagatgctgacggccatctgcttgggttcaaatcttgactctgctgcattccagctgtgtgaccctaggcaaattgcttcatttctctttgttttggtctccccatcagtacaatggggataatcatagtacttggtaatggagttaacatgcatggagtgctgagaactgggcctactgaccactcttcttttattgcrttaggtctgaaagcctgcctctctcttcgctgagggtcactgcccagatgcattccaagaaataactaggaggctgctctgtctctcctgccctctcccaccctccttcttcctcctccttcttctcactccctttctcaaatgccaagagtgcagagagctcatgatggcatccctgggtcctttggtgagctctaatcagcacagcatccagagcagctgcggctatccccactccctgttagaggtacacaggaagtccagtccctctggtctgtctgccaccagctgcttctccaagctttggcaagcacacatgctcagatgcagcagcaagggcctagttcctcgggatgggggcctcatggaaggaagggctcagtt

SEQ ID NO: 321803 - DNA, 553 bp, Homo sapiens
ggcaaattagtaatgctatgattggttttcgagaagccaagagtgaggagaactaactatgatcactccctcaagaaacccagcatagagggcaaaccgaatcatgtgttcagccaggctatgcagtcatattctgaagctctgtcaccatttctaatctgaaagcagtgtctaaaattaaacctaaataatttgaaagccatttctttacctggaagtctcagctgagtccttgttcctcagatcccctaatggtttctgacatcatgtgttgaartgactactgtacatgaacgctatcaggtatttggtctgttagcccctttccccatattattatggttttttaaagaaagctacacttttagagaaacgctgcttcttcttaagcatcaagatttaagcgtttcttcaggactccctagagctgtgacataacactttgtaatcgagctttctaatcagcatagaaaaggcaaaaggggtcgcagggccaccaaaaatgctacctggccaagaaaacgaagacccaatatcctcccccagtgcaaag

SEQ ID NO: 321804 - DNA, 553 bp, Homo sapiens
ggcaaattagtaatgctatgattggttttcgagaagccaagagtgaggagaactaactatgatcactccctcaagaaacccagcatagagggcaaaccgaatcatgtgttcagccaggctatgcagtcatattctgaagctctgtcaccatttctaatctgaaagcagtgtctaaaattaaacctaaataatttgaaagccatttctttacctggaagtctcagctgagtccttgttcctcagatcccctaatggtttctgacatcatgtgttgaaatgactactgtacatgaacgctatcaggtatttggtctgttagcccctttccccatattattatggttttttaaagaaagctacacttttagagaaacgctgcttcttcttaagcatcaaratttaagcgtttcttcaggactccctagagctgtgacataacactttgtaatcgagctttctaatcagcatagaaaaggcaaaaggggtcgcagggccaccaaaaatgctacctggccaagaaaacgaagacccaatatcctcccccagtgcaaag

SEQ ID NO: 321805 - DNA, 553 bp, Homo sapiens
ggcaaattagtaatgctatgattggttttcgagaagccaagagtgaggagaactaactatgatcactccctcaagaaacccagcatagagggcaaaccgaatcatgtgttcagccaggctatgcagtcatattctgaagctctgtcaccatttctaatctgaaagcagtgtctaaaattaaacctaaataatttgaaagccatttctttacctggaagtctcagctgagtccttgttcctcagatcccctaatggtttctgacatcatgtgttgaaatgactactgtacatgaacgctatcaggtatttggtctgttagcccctttccccatattattatggttttttaaagaaagctacacttttagagaaacgctgcttcttcttaagcatcaagwtttaagcgtttcttcaggactccctagagctgtgacataacactttgtaatcgagctttctaatcagcatagaaaaggcaaaaggggtcgcagggccaccaaaaatgctacctggccaagaaaacgaagacccaatatcctcccccagtgcaaag

SEQ ID NO: 321806 - DNA, 575 bp, Homo sapiens
ggtgcttaacaactgtgccacrtgcattggcctgagctccactttcactctgagtcttgaatgaggtcagcaaaaataactgagttagacttttcattcacaacttgcctcctgatggcacatggtaggagcttttctctcccagcttctatcacccactgcctcccactccaccaccaccaattttgatagagtaaaagtctccacactgtagctggtagaactccacctgataaaatggagacccattttctaaatgcttagaaagtgctttcaatgtcattatattagtcagcttgggctgccataagaaaatactacagaattggcgacttcaacaacagagatttattttttcacagctctgaaggccagaagtccaagatcaaggggccagcagtggtggtttccagtgagggctcttttcctggtttgcagtcaccttcttgctgggtcctcctctgcccatgcacacacacagagggggatcttggttgtctcctttttataaagacactagtcctattggattaaggcctgacccctatgacctcacttaacctttactaccttct

SEQ ID NO: 321807 - DNA, 562 bp, Homo sapiens
tcttgaatgaggtcagcaaaaataactgagttagacttttcattcacaacttgcctcctgatggcacatggtaggagcttttctctcccagcttctatcacccactgcctcccactccaccaccaccaattttgatagagtaaaagtctccacactgtagctggtagaactccacctgataaaatggagacccattttctaaatgcttagaaagtgctttcaatgtcattatattagtcagcttgggctgccataagaaaatactacagaattggcgacttcaacaacagagrtttattttttcacagctctgaaggccagaagtccaagatcaaggggccagcagtggtggtttccagtgagggctcttttcctggtttgcagtcaccttcttgctgggtcctcctctgcccatgcacacacacagagggggatcttggttgtctcctttttataaagacactagtcctattggattaaggcctgacccctatgacctcacttaacctttactaccttcttataggccctatctctaaatacaattacattaggggttagg

SEQ ID NO: 321808 - DNA, 660 bp, Homo sapiens
gagacccattttctaaatgcttagaaagtgctttcaatgtcattatattagtcagcttgggctgccataagaaaatactacagaattggcgacttcaacaacagagatttattttttcacagctctgaaggccagaagtccaagatcaaggggccagcagtggtggtttccagtgagggctcttttcctggtttgcagtcaccttcttgctgggtcctcctctgcccatgcacacacacagagggggatcttggttgtctcctttttataaagacactagtcctattggattaaggcctgacccctatgacctcacttaacctttactaccttcttataggccctatctctaaatacaattacattaggggttagggcttcaacatatgaatttgaaggcaacacagtttagtccacaacaattagatatgttttttctttcaataaggctaagataaaagtcttttctgtgcttccartacatgtggtgttcttgtctaccacgatctctgctaggagaactcagcaagcatgctgtgggtggaaaaaggatacagtaaactatttcagctggtgagaatgacatgcaagattaaaaacataaaaaaaaatggaatatcatctcttcttgttctccttccctgtaaatgtagcctgttg

SEQ ID NO: 321809 - DNA, 415 bp, Homo sapiens
agtaaactatttcagctggtgagaatgacatgcaagattaaaaacataaaaaaaaatggaatatcatctcttcttgttctccttccctgtaaatgtagcctgttgtatttgtaactgcctgtttatttcacagccctcttctgatagatgcctattattaaagtagattgggccctgaagtggtaatagcagaggcgacttcccagggtgrggaggttttcttagtgtggagattagccttgtgttcagcaatctagtccttatctagaaactgggaaggaaaggccacaagtaggactctagcttgcttccagcattatttttaccattgagttaaatgtgtcaaggcattttcctagataattaattggctttggcctctaattctatatattcctgtatatgcctacttgtt

SEQ ID NO: 321810 - DNA, 636 bp, Homo sapiens
gcttgggtctaggggcttgagaccagtctgaacaatacagtaagacccccgtctctacaaaaaaaaaaaaaaattaaaaattagccgggtacggtggtgcacacctgttgtcctrgctacttagggagctgagtcgggagaattgcttgagcatgagaggttgaggctgcagtgattcgtgactgtgccactgcactccagcctgggcaacaaagcaagaccctgcctcaaaaaaatgctggtttttctaatgggaccccctctggctattagagtatctctccagcatggaggaatggctcactttaaatgagctgtttgttcaatgtgaacaaactgaacacttgttaaaagaaaatattaaaagatacttaaatcttaggtgtagggctttgatatgggggtcttcatcacaggcttcccaggttccaatagaatgaatcccactaatgtagtaggaggcattaagaaatcaggcacctgctactgatgtggcagaagtgttaaggtctttattattacattttccttaccacttaactagctgtggcactttggacaattagcttgctcctcatgtaattactgagcaaagtaatgatatatgtaatatgctgtataacagtgcccagtacc

SEQ ID NO: 321811 - DNA, 636 bp, Homo sapiens
gcttgggtctaggggcttgagaccagtctgaacaatacagtaagacccccgtctctacaaaaaaaaaaaaaaattaaaaattagccgggtacggtggtgcacacctgttgtcctagctacttagggagctgagtcgggagaattgcttgagcatgagaggttgaggctgcagtgattcgtgactgtgccactgcactccagcctgggcaacaaagcaagaccctgcctcaaaaaaatgctggtttttctaatgggaccccctctggctattagagtatctctccagcatggaggaatggctcactttaaatgagctgtttgttcaatgtgaacaaactgaacacttgttaaaagaaaatattaaaagatacttaaatcttaggtgtagggctttgatatgggggtcttcatcacaggcttcccrggttccaatagaatgaatcccactaatgtagtaggaggcattaagaaatcaggcacctgctactgatgtggcagaagtgttaaggtctttattattacattttccttaccacttaactagctgtggcactttggacaattagcttgctcctcatgtaattactgagcaaagtaatgatatatgtaatatgctgtataacagtgcccagtacc

SEQ ID NO: 321812 - DNA, 636 bp, Homo sapiens
gcttgggtctaggggcttgagaccagtctgaacaatacagtaagacccccgtctctacaaaaaaaaaaaaaaattaaaaattagccgggtacggtggtgcacacctgttgtcctagctacttagggagctgagtcgggagaattgcttgagcatgagaggttgaggctgcagtgattcgtgactgtgccactgcactccagcctgggcaacaaagcaagaccctgcctcaaaaaaatgctggtttttctaatgggaccccctctggctattagagtatctctccagcatggaggaatggctcactttaaatgagctgtttgttcaatgtgaacaaactgaacacttgttaaaagaaaatattaaaagatacttaaatcttaggtgtagggctttgatatgggggtcttcatcacaggcttcccaggttccaatagaatgaatcccactaatgtagtaggaggcattaagaaatcaggcacctgctactgatgtggcagaagtgttaaggtctttattattacattttccttaccacttaactagctgtggcactttggacaattagcttgctcctcatgtaattacygagcaaagtaatgatatatgtaatatgctgtataacagtgcccagtacc

SEQ ID NO: 321813 - DNA, 585 bp, Homo sapiens
tagttcgtacttccttgatcctcaggccctgttcttctgaagtctgctttttctgctttgtctttgaaactgtgaggcaatctatatctttcctctttactgaagttagcagaatcagttttgtagcttgcaatcaaagaatccaaaatgatataagctctaaatctagcctttccaaggacagcatatcagttcacaaaaggaataaaatgagcatgactgtatttaccaggtgtgcactattatttatggcaggcgaggagctattttcaagacagcaggaaaattggcacttaggctatctgagggttaataactctcattctgtctgcyagttcctggggaagagtggagatgagagggaagcagaagggcacagatgtaactgatagactaggactctagtgggattaattaacaaagcttgtgggtttttatcagcatacaagaaaggaacagtttgaaagaaggagagaagtatgtcagaactatatagatatggatttgcaagtgtagcataatagagatatcttagtcaaggattaggttctgaagtcagaatataaagcaaaaataatgtagact

SEQ ID NO: 321814 - DNA, 585 bp, Homo sapiens
tagttcgtacttccttgatcctcaggccctgttcttctgaagtctgctttttctgctttgtctttgaaactgtgaggcaatctatatctttcctctttactgaagttagcagaatcagttttgtagcttgcaatcaaagaatccaaaatgatataagctctaaatctagcctttccaaggacagcatatcagttcacaaaaggaataaaatgagcatgactgtatttaccaggtgtgcactattatttatggcaggcgaggagctattttcaagacagcaggaaaattggcacttaggctatctgagggttaataactctcattctgtctgctagttcctggggaagagtggagatgagagggaagcagaagggcacagatgtaactgatagactaggactctagtgggattaattaacaaagcttrtgggtttttatcagcatacaagaaaggaacagtttgaaagaaggagagaagtatgtcagaactatatagatatggatttgcaagtgtagcataatagagatatcttagtcaaggattaggttctgaagtcagaatataaagcaaaaataatgtagact

SEQ ID NO: 321815 - DNA, 582 bp, Homo sapiens
gacagaatcgaaaacacatgaaatcactttgagaagcaagtgggttgcataagactagatgcacatcttttgtctcacatccaaygagagacaaaccttacacatagaatggtggacagaatcacctgtagtattgtgttatttttattttgggaggcaggtgagtggccaactatccagataatgcaagttaaaagagtatctaacataatgcctgtgatcttaagaagcaatttactttatcaaggagacttggctgctattaggtaagctaccaccagtttgcataacattggaaacttcatgaggtcttcacaaagttagacttcctgtaggccttgaacactaagacatatggattattctaaaattctttgcttgtttttgcatccctgaataaaaaacacatacaactctatgaaaatatttgacaaaatgctaagagaaaattctgaatggaattaaacacacaatatgaagaaagagatgaaatggaaaaaggtagataccatgatgtgaattactggttatagcatcacaaaataacttaggcctgaaagaaaccttaaagataatgtaatt

SEQ ID NO: 321816 - DNA, 622 bp, Homo sapiens
cagagtgtaattttacattattgttacttacataggacagacagaatcgaaaacacatgaaatcactttgagaagcaagtgggttgcataagactagatgcacatcttttgtctcacatccaacgagagacaaaccttacacatagaatggtggacagaatcacctgtagtattgtgttatttttattttgggaggcaggtgagtggccaactatcyagataatgcaagttaaaagagtatctaacataatgcctgtgatcttaagaagcaatttactttatcaaggagacttggctgctattaggtaagctaccaccagtttgcataacattggaaacttcatgaggtcttcacaaagttagacttcctgtaggccttgaacactaagacatatggattattctaaaattctttgcttgtttttgcatccctgaataaaaaacacatacaactctatgaaaatatttgacaaaatgctaagagaaaattctgaatggaattaaacacacaatatgaagaaagagatgaaatggaaaaaggtagataccatgatgtgaattactggttatagcatcacaaaataacttaggcctgaaagaaaccttaaagataatgtaattt

SEQ ID NO: 321817 - DNA, 582 bp, Homo sapiens
gacagaatcgaaaacacatgaaatcactttgagaagcaagtgggttgcataagactagatgcacatcttttgtctcacatccaacgagagacaaaccttacacatagaatggtggacagaatcacctgtagtattgtgttatttttattttgggaggcaggtgagtggccaactatccagataatgcaagttaaaagagtatctaacataatrcctgtgatcttaagaagcaatttactttatcaaggagacttggctgctattaggtaagctaccaccagtttgcataacattggaaacttcatgaggtcttcacaaagttagacttcctgtaggccttgaacactaagacatatggattattctaaaattctttgcttgtttttgcatccctgaataaaaaacacatacaactctatgaaaatatttgacaaaatgctaagagaaaattctgaatggaattaaacacacaatatgaagaaagagatgaaatggaaaaaggtagataccatgatgtgaattactggttatagcatcacaaaataacttaggcctgaaagaaaccttaaagataatgtaatt

SEQ ID NO: 321818 - DNA, 582 bp, Homo sapiens
gacagaatcgaaaacacatgaaatcactttgagaagcaagtgggttgcataagactagatgcacatcttttgtctcacatccaacgagagacaaaccttacacatagaatggtggacagaatcacctgtagtattgtgttatttttattttgggaggcaggtgagtggccaactatccagataatgcaagttaaaagagtatctaacataatgcctgtgatcttaagaagcaatttactttatcaaggagacttggctgctattaggtaagctaccaccagtttgcataacattggaaacttcatgaggtcttcacaaagttagacttcctgtaggccttgaacactaagacatatggattattctaaaattctttgcttgtttttgcatccctgaataaaaaacacatacaactctatgaaaatatttgacaaaatgctaagagaaaattctgaatggaattaaacacacaatatgaagaaagagatgaaatggaaaaaggtagatacmatgatgtgaattactggttatagcatcacaaaataacttaggcctgaaagaaaccttaaagataatgtaatt

SEQ ID NO: 321819 - DNA, 581 bp, Homo sapiens
tgactcttcctgtcttgctcttctatttcaagattgttttggctactctgggtcccttgaatgtccatatgaattttgtcaatttcggccaaaaagaaatcgatttgtattttcaccyatgctccaaatttaagatgatcccaaatttgttttctgtaggtgggaactcgggtaggtggttcagagagagcctaaagaaaacgggacatgaaagatgagcagctgccttttcttgctaaggttaatgcttgcacatgcacacacatgtgtgcatacatatgcacacatacctctcagcctccttcatgcaggtaggtccaaattttcctttaccttcactgtcacctgaatgagactatgagcacacaacctgctattgtgcgtgtgttgggagtaatatcattgttcccattttacagaccatatgagtcttaagtgagatgacgtaaatagtttattacactgtctggcatacagtgagcacttgatacttgtttgctgttgctgttgttattgttttcatgagtggtatcagtctcaaggaagcagcaagtccttatacaaaatagggacttcagtag

SEQ ID NO: 321820 - DNA, 581 bp, Homo sapiens
tgactcttcctgtcttgctcttctatttcaagattgttttggctactctgggtcccttgaatgtccatatgaattttgtcaatttcggccaaaaagaaatcgatttgtattttcacccatgctccaaatttaagatgatcccaaatttgttttctgtaggtgggaactcgggtaggtggttcagagagagcctaaagaaaaygggacatgaaagatgagcagctgccttttcttgctaaggttaatgcttgcacatgcacacacatgtgtgcatacatatgcacacatacctctcagcctccttcatgcaggtaggtccaaattttcctttaccttcactgtcacctgaatgagactatgagcacacaacctgctattgtgcgtgtgttgggagtaatatcattgttcccattttacagaccatatgagtcttaagtgagatgacgtaaatagtttattacactgtctggcatacagtgagcacttgatacttgtttgctgttgctgttgttattgttttcatgagtggtatcagtctcaaggaagcagcaagtccttatacaaaatagggacttcagtag

SEQ ID NO: 321821 - DNA, 587 bp, Homo sapiens
aaaattatgaacacaaatgcataattaagagacatctgcatggacacaagacagcaaaacagcagcaacatgacactggcaggtaataacaaagagacagctccatgcatgctggaaaatcaaatcatctttccattctagccagctttaggcagcatcttgttagaggattacagggaaaggtcaagtacatctctactggtcaggttacagaagggaagggtaagtgacaggaagggtggtagcctcctagatgaagagctgtaatgaggaaggctgcaatgaacaagttttaaatctctgtttctacrggtataaaataagaaggaatggatttaaacgacctaaagagggtcctaaattcctctttaggtcatttaaaatctttcttggacctaaggaagacttctgaatattgagataagaactgacatgggtcactcaaggaaatggcagtgtttcagtttttggagaactttaaaaagacagacatcactcatcctagctcatttagattactaccttctggccctgctattgggaaattctaattgttgtaagggatattaccaaagtttcaaaccact

SEQ ID NO: 321822 - DNA, 392 bp, Homo sapiens
tctttttaccaaattatggttactatttcttggtattgtttttacttcataatgtgtcattcaaagagcttatattaggagtaaaaaatgcatcaactcaacccctctctcgttttcttgtgcttgcattattacaattataycctatctaaagatttttttgtaacaatctgtttaggtcatttgcaagggttagttcagtaatatcagatagctacaaatgcataaattcagttaacttggcaaactcaacaatatgtcacagggcactaaaatctaatcctcagtgtccccactgtcgcctatcccacaatgtgtccctcccacccttttttttcaaggcatgccacatgactgtctgacagcaaaatcaagtgaagacctcagtgtca

SEQ ID NO: 321823 - DNA, 562 bp, Homo sapiens
tgttgttctgacctccacagcctggggcactttggctgtggtgcataattcaactcctatttgtctacttttcttcagtgacagaggcatgttacactttcccttcctcctcctagagctgcaaataaccaaggaagtcaccgagcctattactctgtcgtttgttttttagagagcttaccatagctggaaaggtccccttgatttgtttagtgattttttttgtcttctccatgctcctccactccctcacccaaatgtaacctccacaaaaagagacgttctcatctgacttggtctcattctgtatgcccagctcccagtatgtccccctggcatgtagcaagtgctcaataaacatttgttgcataaatgtgttaaaaatactttatacacacaaagcagaaatcaccaaccaacagcytagaggccaaatttggcttgctaacttcttttctgtttgtctgtgtggtttctttttttttttttttttttggcttgcttagtatttttaaacatattgaattagtggccagcatttaaatatagtgagccctcatac

SEQ ID NO: 321824 - DNA, 616 bp, Homo sapiens
ggtcccccgcatggccacttggtagccttgtgtctcaggggagttaccaaacctctttgagcttatccttcatcatctgtgaaataggctggctgatggcaccaaccctcayagggttgtcgtaagggtttttcagtaataaagagcaaacagcgacgtgcttctcaagataaagtccagagttccacctggatatttcttaaatgcagatttccaggtcatactacagacctatgaaatagactccctgaaggatatccctatgcactataaagtctgagaaagactggtaagacgttaagtctgtgcttggcaaaagctcagtaagttaacaggcatcattctgtttactgatgttatcatttataatatggcaagatgagacctcttctccagcctggacaacttagtgttcaaaattagaatttatctaacatccaactcaacagatgtttgcttatccccagaagcctgaacagagcctcaatcatcagaaaatataaaacaaaaccagtgactaattacagcagcctgggtgaatgcagagtaaccttttgcaaatgttcccaagagatcaaatagtagctgttttaaagaaaaagtagtaagaagcaac

SEQ ID NO: 321825 - DNA, 609 bp, Homo sapiens
tctgaattgcccaacaggctgggaagatttggcaattgatgatttgaaaaggaaaggcccagatcttccccaagtggtatttgttctgtctgtacagacagggccatgtccatgtctctaattactcaactagctgcacagataaaaacatttgygtacagaaagcagggaactcaaagtatacaaatgattcacaccacctaaacaactgcaaataaaggccggcccagcaaaataagggcttctagaagccaaaataatttaatatgggcggaaatggaatttggcaatccacacatcagactctgctccaattttggaaggcatgtcttccagctgcctcatcttaaaaaaaaaaaaagtaaactctgaccctctgcattcgattctcaacctcttgcttaggtacacacaagtgaacagatgggtggggggagctgaaacctcatcttttaaatcttacccagcacctacccacaatctttcctgattattttggttttaaaatttcccagggcacggctgcccaggcaccccagatttgtaatcccaaccttcaccaagtcctgactcttccagcatctgagagggtgcatttggcaacttgga

SEQ ID NO: 321826 - DNA, 637 bp, Homo sapiens
ttatttgaaccttttaccatgagcttgtaacaaggtcctggttctggcaaaatggcaaatgatgacaacctgaaaattccaactcttcaaatacctagacatgctagataaaatataacaaaaattattttaaatgcctagctgactcacaataaagaaaggaaggctgggcacgatggctcacacctgtaatcccaacactttggaaggccacaccaggaggatcattgaagccgtgagttcaatatcagacttggcaacatagcaagacaccatctctacacaaaataaaaaactaactggttgcagtggtgtgcacctgtagtcctagctacttaggaggctgaggtggttggttcggcccaggaattcagggccacattgagccatgagggcaccaatctacttcaacctgggtgacagcrtgagaccttacataaaaaaaaaaaacaaaaaaaacaaaaaaaaacacaggaaaataccaagaaataaagaggtaattaaaaacaagagtaagaagcatgcaaagttatgctgtggctatgagagagagggaagagtggttggtggcagacaaaagggttgtcttggttccctaggggctaggattgtaatgcccacacaggagacagacagt

SEQ ID NO: 321827 - DNA, 583 bp, Homo sapiens
gtgctttgaaacatttaggaaggaagcaggaaggtgggataaagggagggaggtcaagcaacaggaaatttggacataggaagaaaatctagctagacttcgataattgttaaatctgttaygtggagatacattgtacagctctctctttttaatttattttagagacagggtgtcactctgtcacccaggctggagtgcagtggtgtaacgacagctcactgcagccttgaacatctgggctcaagccatcttcctacctcagcctccaaagtagctcagaccacaggcacatgccaccacatctggcgaattttttaaattttttgtagagacgtggtcttgctatgttaaacaggccagtctcaaactcctggacttaagtaaccctccatctcagcctcccaaaggtctaggattacagctgtgggccactgcacctggcctgtactgttcttttgatttcttattatgtttgaaaatggtcttagtaataaaaaaccttcaagcatgatttgtccagggcagggtggagtgggtttatgccctcctcattcccaacacatgatttgaacatcatatt

SEQ ID NO: 321828 - DNA, 564 bp, Homo sapiens
tgaaattaaaatggataatagtctaccacatcagtcctctcattctccacctcataccmtgcaaatgagagatcgtggaggagaaatccctccatgtatattatttcgctcagattagctgaagggttctttgggaagcttgggatgccaagtgtgccttctaattatcttttctcttttttgcaagcagcttaagggatcagaggtcttatttggagccttccaccttcatcccgcttttctttcctcttcttctgtccccacactaccgcaaataaataaataatgtgcacataataataatgatctttttctgaaagaaggaaaagggcatatttaatgtcaccttcttagcagtctagctagaaccttgcattttaacttacatttcatgaactaagcgcagcatatccaactgcacattttccttaggagtgtttccatgaaggaaattccttcacctaatcacttcccaaccccctttcttcaacttataccctctttcccaccctgtctaccctagaaaaggtattttaaaagaaaatacataaatcttcagcttat

SEQ ID NO: 321829 - DNA, 564 bp, Homo sapiens
tgaaattaaaatggataatagtctaccacatcagtcctctcattctccacctcataccatgcaaatgagagatcgtggaggagaaatccctccatgtatattatttcgctcagattagctgaagggttctttgggaagcttgggatgccaagtgygccttctaattatcttttctcttttttgcaagcagcttaagggatcagaggtcttatttggagccttccaccttcatcccgcttttctttcctcttcttctgtccccacactaccgcaaataaataaataatgtgcacataataataatgatctttttctgaaagaaggaaaagggcatatttaatgtcaccttcttagcagtctagctagaaccttgcattttaacttacatttcatgaactaagcgcagcatatccaactgcacattttccttaggagtgtttccatgaaggaaattccttcacctaatcacttcccaaccccctttcttcaacttataccctctttcccaccctgtctaccctagaaaaggtattttaaaagaaaatacataaatcttcagcttat

SEQ ID NO: 321830 - DNA, 622 bp, Homo sapiens
gccactggtaaccaaggctggataccctggaatctcagttcaaatgcaaaaacaccatcttaacatgctccaatttgtatacttatttgtgtcttgtcattttcagggaggatataagatgagctaactggcaaagggaattatgtagtaactgatgcaataattagtctctcacttgaaaatgtcggggataattaccaagtcatatttaggaaggagctctccctggccagggctgattttcaattaccctggatttagtgaacatatgctagacattctgatgttggccactaggtgatgatgataaaaggggaaactatgataaacctagaggagaaaaagtgaatgactggtgtgtgtgtgtgtgtgtgtgtgtgtgtgtgtctgatagagagggagaacgagacagggagagagagacagaaagcgaaaaaatgggaatggatatattcatacatgccacaaaacacaacttagcatgacctaggcttcatctggtcaccaamatatagcagaaatatagcacggtaatttgggtcaagtggctcatggctcaaaaaagagcagtatcattacatatgtaatacacaggtatgattctactgcggttgtgggtaga

SEQ ID NO: 321831 - DNA, 606 bp, Homo sapiens
cctaggcagacacctttaaacttctttgaggagagacaaataaaggcttgactcattcatgccactatggaggttttcactgttctgtgcagtccaacttgatcattacttacatataaggctcagccagaatgtaaataaaactatgaccttcaagccaagtccagccccacagcccgtttctatatggcccaggagctaagagtgatttttatagataaatatttgcaatcaatttggtaataggagacagtaactctaaacctcacttcctcaaaaatgaattccattcttctcattaggagacctgtawttcggaaaggttatgctcaattattatcattgtattttaaattttgtcaaaaaaaatctgtggaaatttgttttctcattacaaaagtacctacatactagtcttgattttgcctcttgacttgcataacctaaaacatttactatttggctctacacagaaaaagtttgttgacccatgatgtagaaaagtctccaacatgctgctgatcataaagaaaataactcaataaatgatacctgctactaaaattaaatctccaaaaaagcctggcacaaagttactcaactatt

SEQ ID NO: 321832 - DNA, 606 bp, Homo sapiens
cctaggcagacacctttaaacttctttgaggagagacaaataaaggcttgactcattcatgccactatggaggttttcactgttctgtgcagtccaacttgatcattacttacatataaggctcagccagaatgtaaataaaactatgaccttcaagccaagtccagccccacagcccgtttctatatggcccaggagctaagagtgatttttatagataaatatttgcaatcaatttggtaataggagacagtaactctaaacctcacttcctcaaaaatgaattccattcttctcattaggagacctgtatttcggaaaggttatrctcaattattatcattgtattttaaattttgtcaaaaaaaatctgtggaaatttgttttctcattacaaaagtacctacatactagtcttgattttgcctcttgacttgcataacctaaaacatttactatttggctctacacagaaaaagtttgttgacccatgatgtagaaaagtctccaacatgctgctgatcataaagaaaataactcaataaatgatacctgctactaaaattaaatctccaaaaaagcctggcacaaagttactcaactatt

SEQ ID NO: 321833 - DNA, 606 bp, Homo sapiens
cctaggcagacacctttaaacttctttgaggagagacaaataaaggcttgactcattcatgccactatggaggttttcactgttctgtgcagtccaacttgatcattacttacatataaggctcagccagaatgtaaataaaactatgaccttcaagccaagtccagccccacagcccgtttctatatggcccaggagctaagagtgatttttatagataaatatttgcaatcaatttggtaataggagacagtaactctaaacctcacttcctcaaaaatgaattccattcttctcattaggagacctgtatttcggaaaggttatgctcaattattatcattgtattttaaattttgtcaaaaaaaatctgtggaaatttgttttctcattacamaagtacctacatactagtcttgattttgcctcttgacttgcataacctaaaacatttactatttggctctacacagaaaaagtttgttgacccatgatgtagaaaagtctccaacatgctgctgatcataaagaaaataactcaataaatgatacctgctactaaaattaaatctccaaaaaagcctggcacaaagttactcaactatt

SEQ ID NO: 321834 - DNA, 638 bp, Homo sapiens
ttgtgcattccttgtcagtcacttggtttgtactggggctgaaccactctttaagcagtctgccccttgtccctgtgcatgaaagtggcctgaacctgatctagccatggacttgggacagaggagcccacaccacaggggaggtggaagtcaagacagatggcagggctagcaacaagagacactattctcatgtctgatgtagtcttgcctttcaccagtgccttttcacaccccactgggtacccagctgagtggcaggagggcctagtgatgcaagaggttaagacatggtggcaaggaagggctggcatagattctttgggacagtttgaaaatgtacattgcccagagttgctgagaccatcgattatattggtaaaacccacacctgtttttaaaccacactctacggcactcctttctractaggaggctactacagaagagtggccttgagctgtgcttggaggaccggctgcatcacaatcaccaggcacactggtgaaaatgcacattcctgagcctgcctcagacctatccaattatagtcactgggacatcctactattccccatgcatctccatgtaatgtcttggcaaccagatatacagtttctcacaactagaattattat

SEQ ID NO: 321835 - DNA, 508 bp, Homo sapiens
aaactcaaatgtttattgaataattgaaaatggacttaaaagtgtgctgtagtagatatactttgtgattaatggtgtgcactacaagactacattttgagcatttgtaataattttatctcttagacttaatatatggctaatttttcatgagtgtctcaaccataaacagtttgaagttctgtatctgggagagaagtaaaaacaggtttccttaagctctattcctttctagccctcacctctgacttcaagtaagcatagcttgtttatatttgttagtttccttccttaaactaaggaagttttgtgcctctgcctttgcatatgctattccttctccctgaaatgttgctgtcctcccaagtcactttctaaaaattttattaaggarattttcatacatacaaaagtagtgaagtagtacgaaaacctcccatttattcatcacccagcttcaaccattaacaacattttgccaagtccagataatttaatggttagctca

SEQ ID NO: 321836 - DNA, 505 bp, Homo sapiens
attgagggtgcagtgagctataattgcaccattgcactacagcctgggtgataaagaccctgtctctaaaaaataataataaaagataattaactgtttaaccaaaagtgagtcacagamggtcagaggaagaaggaatgtacaatctcatttgcaatctgaattacttactgaattcatataattggtgggagggccaggaatataaatcaagttctctgatgcaacctaaccaaatgataacagatatactagtccccggttatctgtggttttacttttcaaagtttcagttatctgtgggggactacagtccaaaaatactaaatggaaaattccagaagtaaataatccataggctttaaaaaaataatttataagttttaaattgcatgccattctgagtagcatgataaactctcacactgtcctgctctgtactgccctggacatgactcactcctttgtccagtgcatccacgctgcctgcatgtattacccacct

SEQ ID NO: 321837 - DNA, 606 bp, Homo sapiens
aagttaatccttcttttactcaccctctctcatagacaaactgtgaaccagtagtcagagttgagataaaatctgtatccataaaagaaaaggaaactaactggcccatgcaggaagtgaattattccctttgacttcttactaaatgtgtttttatctactgagataactctagccactcatttattcattcattcracaaatatttattgaacatgtacactgtgctatgtattataaaaggttctacgtataaaatgaacaaacagtcatttcccctttcccctcagagcttacagtctactgaggaaccaatattaaatacacactcacacacacatgaatgtaattataaactggaactacctagaagtaattcttattggaaatctggaaaaaaaaaaagacttatctcaagtagaagctattcttctgctaagagtctaagttcattttggagatggccaacagtcacctaattcactttcttaataacagggttaaagttttaaaaaagtgaaaagtaggcagcaataaatccagaaatattatcactgtgcagtcaggatgaactcctgttgttagtaaaaggggtctattttggag

SEQ ID NO: 321838 - DNA, 621 bp, Homo sapiens
tttatccaaagtgcaatgaaaacctctaaagacgtcttaaaaatttactaaccatcctacagagaatattaaaatgtcatctcaataaattaatcttggcttagaaatctgttacacataaaacatagcatttaaaattttcatttaaaatacaaatgttatgaagatcttaagaatttgtgagaatgggaattataccaatgctaaagaaaattctactttcagataacaagtatcttaaaatattatgaaaaatatcctttattctgaaaacattgtcaggaaaagatacctaatttcctctaaatcactagttctaattacccagttgttttggtaacacaagagtacacatgtacagtttaacaatgcaatcatctgtcaattaagatagaataaatgttgctgacacacacattaggctgaacataattttttttaacacagggttctttcattcatttaatcttttaaaaattgtacaacatacttaaactttattataatattctaaaatatttggtggaaacatttttcttaacttctagcactgaaaaatccattctaatgcatatatatatatatatatatatayacacacccacatattctgatgtcact

SEQ ID NO: 321839 - DNA, 575 bp, Homo sapiens
atattgtaccatctgcaaacaaggataatttgatgtctttctgtccaatttagatacctttcatttctttctattgcttaattgctctagtctcatcaagaattccagaactatgttgaataaakgtggtgaaaatgggcatccttatcttgtttcagatgttagtgcaaacggccttcaatttatttttatacgtgaagtgagtttcttgtacacagcctatatttgggtcttatttttaaatgcattcatttactgtatgtcttttaattagagaatttagtccatttacattcaatgttattattgatagggaaggtcttagcaccaccattttgttacttgttttctagctgttttgtaactcctctctatttttcttcttttcttaccatcttcctttgtggttaagtaattttctctggtagtatgttttaatttactgatttttatttttagtgctattacaggtcatttctatgttgttactatgaggtgtaaaaaaacatcctatagttataagaagtttttaagaactggtaccaactttactttgatttccaaaaataatataa

SEQ ID NO: 321840 - DNA, 625 bp, Homo sapiens
atttcttgtaggacaggtctggcagttatcaattccctcatgattttgtttgtctggggaaatatttatctttccttcatttctgaaggacagctttgctgagtacaatattctttgttgacagttttttttgtttttttattttcttcagcattctgaatacatygtcctactcctttctagcttgtaaggtttctattaagaagtatgctgctaggcattttggatctcccttatatgttatttgcatcttttctattgctgctttcaggatcttgtttttgtctttgacctttgaacctttgattataatatgtcttggggtattcttatttaggttgaatctgcttggtgacctttgacattcctgtacctggatattacatctgcttccagttttggaaagttttttgttattatccctttgaataatctatttctctgactttctcagtttcctctttaacaccaatgacctgaatacttgcttttttgatgttgtcctatagactctacaagattacttcattcactttcattcttttttcctgtatctcctctaactctatattcttaaatagcctgtctttgagctcactgattctttctgctatttgataaattc

SEQ ID NO: 321841 - DNA, 557 bp, Homo sapiens
tatcctgcctaaaattctcttaagctcctattgtccttacttccccaattttttttctttgtacctgaaatatgacctttagttaaggttctatccatggccggtcattgtggtttatgtctgtaactccagagctttaggatgccagggcaggagcatcgcttgaggccaggagttcaacacaaacctgggcaacaaaactttaaaaatttttgtctctacaaaaatttaaaacattagctggacatggtggtgtgtgcctgtagttccagctaatcaggagtctgaggcaagaggatctcttgagcccatgagttcgaggttacaatgagctgtgatgcyacttgcactccagcttgggcaacagagtgatagcttatctctaaagaaaaaaataaaataaaacaagaggtgagaaaaaccataggcatttgccaaaatcaatattttaaaaatattctatttacaatgtatttatgataaaagacgtctttctctatatactttttccccaaacccttcttttccacacttactctttcttacattattaataa

SEQ ID NO: 321842 - DNA, 557 bp, Homo sapiens
tatcctgcctaaaattctcttaagctcctattgtccttacttccccaattttttttctttgtacctgaaatatgacctttagttaaggttctatccatggccggtcattgtggtttatgtctgtaactccagagctttaggatgccagggcaggagcatcgcttgaggccaggagttcaacacaaacctgggcaacaaaactttaaaaatttttgtctctacaaaaatttaaaacattagctggacatggtggtgtgtgcctgtagttccagctaatcaggagtctgaggcaagaggatctcttgagcccatgagttcgaggttacaatgagctgtgatgctacttgcactccagcttgggcaacagagtgatagcttatctctaaagaaaaaaataaaataaaacaagaggtgagaaaaaccatagrcatttgccaaaatcaatattttaaaaatattctatttacaatgtatttatgataaaagacgtctttctctatatactttttccccaaacccttcttttccacacttactctttcttacattattaataa

SEQ ID NO: 321843 - DNA, 477 bp, Homo sapiens
atatctaatattggtttaatattgagaataaatgactcatacccttccaaaacaaaaacaaatcaacccaattaaaatgaggaaaggatgtgartagacatttctttaaagaagacatgcaaatgaccaacaaaccattaaaaagatattcaaaatcattcattgtctcagtgcattcaggctgctataacaaaataccttagactgggtaatttataaacaacagaaatttatggctcacagttctagaggctgcaaagtccaagatcaacacaccaccatattcagcatataatgaggtctctcagcttcatagatgatcttttctatgtgtcctcatatgacagaaggggtgaacaagcttcctcaggcctctgttataagaggactaatcccattcatgacagtagatgcctcatgacctaatcacctcccaaaggcccacctctcaataatgctacattagtgattaagttt

SEQ ID NO: 321844 - DNA, 610 bp, Homo sapiens
gttatttttaaatgttcaatttttattgactatagtgatcttgttgtgctatcaaatagtaagccttattatttctttaaactatttttttgtgcccattaaccatcgccacctccccagcatcagacccccactacccttctcagcttctggtaaccattcttttactctttatgtccacaggttcaactgttttgatwattagatcccacaaatcagtgcaaacttacaatatttgtctttctgtgtctggcttatcttacttaacataatgatctccatttccatccatgctgttgcaaatggctggatctcattcttttttatggctgaatagtactcaattgtgtatatgtagcagatttcctttatccactcatctactgatggtcacttaggttgcttccaaatcttagctattgtaaacagtgctgcaacaagcgcgggactgcagatatctttttgatatactgatttcctttcttttgtctatattccccccagtgggattgctggatcatatgatagctcaatttttagtttttttgaggaacctccaaactgttccctatagtggttgtactaatttacctttccaccaatggtatct

SEQ ID NO: 321845 - DNA, 552 bp, Homo sapiens
aaaaaaccccattgtttcataaaaacttagcatttacttgttgcaagacagtttggacttggtttatctaagattccactgtatgggttattgatgacagaaatattggagagccagagccagatcctattatttgtaacaattgttctgcgaatgttttttcatcaggcttcagaaaactgccagttctctggggccctttgatataactaggttagtgccacaaacaggtagtagtgcactggctttgagcttcgagtgtctgcaaagcaagataaaatctaggcagtttgatggcctgtatttccagctgtctgcctcctttgtgcatggagaaataaggttgacaccctgattattttcgttttccagaaagactatgggaaatgtrctcttttaaattacaatggcagttttacattaaatcttttgttaaggtctttacatttagtctccataaatcttgataggccacttaggtaggtgaactaagaatatgacatgcagtaatgcaacatgaggggcccaatgaggatttacagagattaaaat

SEQ ID NO: 321846 - DNA, 548 bp, Homo sapiens
atattgaaatctcaaagaatgaattccctgtgggaaattttttcatttgatacactatgttattaaaaaaagtacaggtaatgagggaaggtatgatcttacatgtatgagtttgaaaatatctgtaaagatgtttatacctttacaaacatgactgaatgaagttggttttgatgagatggcaatttcaacttgaacaatgatttattgattatrtaacatatgcaaattatcctataggttctattatgaccacagatttgaataaactgcatgcccttagccattaatagcttttaatttagtagaggaaataaaattacttgtaactgttttactatgtgacaggccatgttaagagcttaatggtagtgcaaataaatggtgagaatttggcaaagaacttagatctgggcagagggtacctaggaatattttgataaacatctatctttgaagcagaatattaaaagacaccttggggttgtataggagatatctggggagcagggacattcaaaatgtagaacttctctttttattgttca

SEQ ID NO: 321847 - DNA, 608 bp, Homo sapiens
tttgaaacatcatgctaactgaaataatccagacctaaaaggaaaactattacgtatttcaacttacatgaggtatgtagaacacgaaaatttttagggacagaaagtagaatagaagttactaaaggtggggttggggaggggaaatgggagtttttgctcaatgggtatagtttctatttcagataacaaaaaatgttatagaaatagatagtggtgatggtcaaacaacattgtgcatatattttatacctctgaatggtacacttaaaatgattaaaaatttaaattttgtattactgtgattttttaaatgtcagtgaaytaaacattcagggtaaagggagaaaaatacaagaatgtgtcattgttagacaactagctattaaaagcataaggtcaaagctttataaatttttgtaactatagagaaactttcagatgggtctttgtacaggaaagagagaacgtgctataagaaattatttgcttttctgctttgtactttttacattatgtgtaatcaagattgtgtgccctattctaggctgatccaattaatcgcccctaacttaaaaatgtttgtggctctatacaactgtctgtta

SEQ ID NO: 321848 - DNA, 608 bp, Homo sapiens
tttgaaacatcatgctaactgaaataatccagacctaaaaggaaaactattacgtatttcaacttacatgaggtatgtagaacacgaaaatttttagggacagaaagtagaatagaagttactaaaggtggggttggggaggggaaatgggagtttttgctcaatgggtatagtttctatttcagataacaaaaaatgttatagaaatagatagtggtgatggtcaaacaacattgtgcatatattttatacctctgaatggtacacttaaaatgattaaaaatttaaattttgtattactgtgattttttaaatgtcagtgaattaaacattcagggtaaagggagaaaaatacaagaatgtgtcattgttagacaactagctattaaaagcataaggtcaaagctttataaatttttgtaactatagagaaactttcagatgggtctttgtacaggaaagagagaacgtgctataagaaattatttgcttttctgctttgtactttttacattatgtgtaatcaagattgtgtgccctattctaggctgatccaattaatygcccctaacttaaaaatgtttgtggctctatacaactgtctgtta

SEQ ID NO: 321849 - DNA, 582 bp, Homo sapiens
actcttcatgctcttggcaaaagttaagaaaaaatagtttagcatcaacaaagtttacctctactataygtttattatgtgccaggctgtgtgctatcccatgggaatcatctccacctgctcgttattatccctacagtagaggcacgaaaattgaagatcacatagggttaaataatagttaataactggcaaagtatagctgacttcagtatgtgctcttaaactatgtatttcaagcttctcaattttatttcaaagaagggaaaacaattggcttcctcatgagtttagggtgcctgtgaattgtcttggcctcagtttggattaaagctgctaaaaagccaccttacatcaactgtgtttattagaaattctgctgtgctagtcaatgtgttaataaaactgacagctacagtttttgttagaaaatattatttcccttggttatgtgttcatctagagcaaagatattatcttcccaataccaagaaacatgactaggatttgttcaacacaagcctgggaattgccacacctaaaaagaatattgctaatagccatatcaccaaagtaagttaa

SEQ ID NO: 321850 - DNA, 625 bp, Homo sapiens
ttctacaggacaattgtgccagtttcataatttatccttttctcatattactaccctaaactattaatagcaaactagcctccttgtgtatatttttgtagaatttatgmcatggagctttcatattttgacaattttgaatattctttcctgttttctgagactgtgaaatctttaccacttgctctggtttgaattaatatcttccttacctgaggttataacattacctataaaatttgttttggtttctaaatatacaagatctcatattattttagtactatttcatttgtgcatttgctattttgctaagagtttaatatcctcatttgaaaatactgtctcatatctcttctgcatctctcaaagccatgacacaattagaccttagtataggtgttcaataatgacatactgaagtgaaaagaagaagatgtaacatgatgatcaaacccataattataatcacttcaagcttacattgatggactcttgcttgatcacaggtagaatatctttttgaggacctcagagcaaagggtaataaacacctacttttctttcatctataaccatatcaggaaaatgaattaaattaactcaacttttgataattcttttt

SEQ ID NO: 321851 - DNA, 653 bp, Homo sapiens
aaggagcataagcataggcagtgttacagaccaggcattccagtctgcattctgagacatagcaataaaggaaggytatgcagtaaatcagttctgaaataaggcggagtagtattgtgtcaggcaatttgtccgtacagagaaggaccttctgacatgagcctgaggtaagccaaaaaagagttaagtgtagggtaggagagttggcaggaattagtcaagcggcaggcctcttagtactggttgagattcagagcagggccaccatccttgattaccaggtagagtagaatgggaaacaggcgcacagtcagtgtcatgtgaggatggaaatgctaaaaccagaagcagaatgaacctcgtctgccaactatttttcattctcatggctagtacaccagattttttatctagattgccacagatgagacatggggatattggagaattggtgcaggggtgaggtgggttcaagtgggtgtatacatttatgaaataatccattaatcacggtttagtccatagattctaggtctgggggtacttaatatagttaatcatttattcattcagacactaattaaaatgtgaaaatgtaggagaaatcacaatagctgaagctttttttctgccacaattgattcattaattga

SEQ ID NO: 321852 - DNA, 606 bp, Homo sapiens
agaggaaaatgtggagacagtaaaacgatcagtggtttccagggtttaggggagaggaagggataaataggcagagcatagagaaattttacagcatgagtctataatggtggatatacctttgtccaaatccatagaatgcacaacascaaaagtgaatcctaatgtaaactatcgactttgggtgatgatatgccaaggtaggctcatcaattgtaacaaatgtaccactctggttgaagatgttgatagtgggggaggctatacagatgcacaatcattggttatatggacaatctctattccttcctctcaattttgctgtgaacctaaattgctaaaaataaataaataaataaataaagttcagatgatttctgacctaagatggttaaacaggatttttcaactttatgatgtggtaaaagtgatatgcatttggtagacatcattggactttgagtacccatacaaccactctgtttttcattcactatcagtacaatattcaatacatcacatgagatattcaacaattcattataaaatagactgtgttagatgattttgcctgtcagttaatgtaaacgttctgagcatgtttaa

SEQ ID NO: 321853 - DNA, 606 bp, Homo sapiens
agaggaaaatgtggagacagtaaaacgatcagtggtttccagggtttaggggagaggaagggataaataggcagagcatagagaaattttacagcatgagtctataatggtggatatacctttgtccaaatccatagaatgcacaacagcaaaagtgaatcctaatgtaaactatcgactttgggtgatgatatgccaaggtaggctcatcaattgtaacaaatgtaccactctggttgaagatgttgatagtgggggaggctatacagatgcacaatcattggttatatggacaatctctattccttcctctcaattttgctgtgaacctaaattgctaaaaataaataaataaataaataaagttcagatgatttctgacctaagatggttaaacaggatttttcaactttatgatgtggtaaaagtgatatgcatttggtagacatcattggactttgagtacccatacaaccactctgtttttcattcactatcagtacaatattcaatacatyacatgagatattcaacaattcattataaaatagactgtgttagatgattttgcctgtcagttaatgtaaacgttctgagcatgtttaa

SEQ ID NO: 321854 - DNA, 609 bp, Homo sapiens
gatatatattttaagctagtaaagagatctgcatcattaccagattagaagttgcattgatgaaatggcccaaatgaagggaaaatgagtgacagtaagggtcataaaaactgcttagcctttgcatgagctcttgaaagcaatttttacattgaattaagtttttcctttattgagtgccaccttaaatttattggaaagcttcctgaagtttttcagcaggagctttataaaatgtatctttaaccccatttctccttcttttctctaatttaaaaacagcttgaggatacttgcccagttggttgtcattttgagagggcctttagtgaacattttctgagcaggaataccctggctctgtaagagacagctggctcttattaacaaactttgcattacaaaacaggcagacacarcactcgtgggggcttatgagtctattttcctctcattccaggcaggtgttcctctcacaaaggccagctcccaagcacttttattttaactataaatgaattatagggaacatgtgctctcctttagagagtactgactaacctagaagcatggttacccaactttaaccacaacatggaatgatagacc

SEQ ID NO: 321855 - DNA, 525 bp, Homo sapiens
ttttgtttgttcttttttctctaatcttgtctcccttgctgatttcagcaagatagtcttccatctctgatactttcttctgcttgatcaatttggctattgatacttgtgtatgcttcacgaagttctcatgctgtttttcagctccatcaggtcatttatgtttctctcttaactggttattctctttagcagttcctctgaccttttatcaaggttcttagcttctttacagtgggttagaacatgctcctttacctcactgaagtttgttatttctcaccttctgaaacctacttctgtccattcatccatctcatccagttctaygcccttgctggagaggtgttgtaatcatttggaggagtagagacactctggctttatgggttttcagcattttttcattgattcttattagtcttcatgagtttgtctagttttgttctctgaggctgctgactcttggatgaggtttttgtggggacttttgttgatgctgttgttgctttctgtttgtttttc

SEQ ID NO: 321856 - DNA, 548 bp, Homo sapiens
cttcctctgggatctctggcctcaaggggcaacaacctgatgccagtaagagtgctcctgtataagatgtctgacaaccccttttggggagggtctcacccagttgggtggcacaagaagcaggatccatttaacaaggcactttggctgtcccttggtggaggtggtgtgctgtgctgggggaaaactcactcatctgggctgcctggattcctgagagcaagcaagaggaaagactaagtcttctggtctgtggagactaaagccacccctacctctaggggttyaggcctagggagatcacagttctgtccctgagcccctggctagagttggagttcctgctgggaggccctgcagccagaatgatggttcctgtccctcctccatgaagctcaggtggcttagaccacaggcagccatagcattggtgatggccacaccgcccccaaggaactcagcaggcttaggctgattccagccgattaggtgttgagaaactgcatggctccatggttgggacccaaggcctcagtggtgttggctcc

SEQ ID NO: 321857 - DNA, 425 bp, Homo sapiens
acagtaattctcttctgttttaaacccttttcttggcaattccatgctattagatackcagtgcagtttctactaagaatgtttaataagatatgtttcaaataatacatggatctctcttccctgtggatctctcatataagtatgttgctatgattaatcaacatatattttctcagatgtctttaattgaattccatcaaatctattcatcaagaataacataaaaacgtaatctgctctagggagtttctacatatcttatttttatatttttctaaattttattactatgagactgaatgctgattatttgatttacagatttaaaatttttattttcagttttattgaggtgattaaatatctgattcaacactacaaacatagatgctcattttaatcattatacatagtttaagtgt

SEQ ID NO: 321858 - DNA, 482 bp, Homo sapiens
gaggaaaaaataaaaataaaaaataatgtttatattatatgagtacacttttatgataattaaaaataaacacaattatcctacaatttaaaaataaaaggaaaggaaataaatgtaagtatcctagttccatgtaatgagtttaagtactatattttgtggcacataatcttcccttgtttatacaataataaaataaagatacaatagtaaattaaggaaaacatggcaatatctctcagtccattcgattagctacaaaactcttgtagtttaatttatgggatacattctggaaaaaaaaatttctcaagtttcagattttacttttakatcctcacaccatgaagcttctctgaaattgatgagtaatttgtgtgaccatccttgcattgtttgcctggaatgctcttgcaccttctttctcattaactttggtctgcatttaagctcctgcacaagcctcgagacctccaggaatt

SEQ ID NO: 321859 - DNA, 597 bp, Homo sapiens
atcatgcattcaaatcactgatgtgggctaggatggcataagtgactgggtctaagattatttcttataaagtcactctgtttatttgatggataaatgtaaattggacatttaaatgagattgatgcaaaagaaataaatgtataaaaatacccaaaagttttacttacaagaaaccaaaaaatcattcttatttctaatacagatcagaaatcaaataattatatttatgtgttatataycctcacttgcaaagccttgttttctgaaaaggactcagatgaagacagcagtcatcagagttgcataacttgtaacagccctaccctcaattaattctgttaacttttagtcactgctgttctatttcattggtaatgcatagaaagttgttggatatgttggataatgcattcatggcataattttgagtagttataggttctgtgaggttatttctttattcaaaatagagataatgcttaaaataggcttataaatcctggaccactgtaaatcttacaatagatcatatttattttgttgccactgggtacctgacacccaacatttagcacctgaaaaaacatatgcatt

SEQ ID NO: 321860 - DNA, 538 bp, Homo sapiens
tgtacatatacaccatggaatattatgcagctataaaaatgaatgaaatcatgttcatacacacaatctgatattgtgtgtatcagtagggacatggatgaaactggaagccatcatcctcagcagactaacacagaaacagaaaaccaaacaccacatgttgtcactcataartggtagttgaacattgagaacacatgtacacagagaggggaacaacatataccagggcctgttgtggggtaagggtgaggggagggaacttagaggacaggtcaataggtgcagcaaactgccatggcacatgtatacctatgtaacaagcctgcacattctgtacatgtatcccattttattttatttttttagaagatataaagaaaaaaagtataatatccaagtaacacctagcaaagggcatgtggatatgaatgcatggaaatctgaacttaaaatgaaaaaatgattgatactgtactatatgaagtgttccttattctgcaatagtatgctctataggtgtcttttaaaaaaattt

SEQ ID NO: 321861 - DNA, 552 bp, Homo sapiens
gacacaagctacccataacctttaattcttaaatgcaatttacagttttcagtgttttttatgtgactttcatgtggtaattgacattgttagctgccactttgggaaaagcttttcctttgcctgataccccactttctccttattttccttctactttttagcttgttctttatgtcaatcttctttgcaggattgtctgtctattccttctcatttggagttactgtttttcaggattatggattgattttcttcttcatcttccatttatctaatctattttctcagggtgatttcatctactcctaggcttcaactagaatcaacataatattgaccctcaactattaataaataagtcacaatgtagtttttcttgtttctgagttttatgcttatctctctatctactttatgaagatgcacacttgaattttccagatacctaaaataccacatrataaaactgaactaattataagaccacttttacatgtccatttggactgctgtagcaaaatataagctatgatgcttttaaacaacaga

SEQ ID NO: 321862 - DNA, 599 bp, Homo sapiens
gtctatatctttgtgtacatgtggttgtatagttatatatattgtaaggggttgaaaacaggccaccccaaaatatgacatcttggcatattgattattttgagttaaaggcacttgaaaaacagcagatgcaasaagggcaccttgacctgctttttattcctaaaagcaggagattaaacttccatgtaaaggatgctcttcacatgggaaggaaggaagacattcttgtcaccagagatgaggaggcaaggctgagagaaatctgtacaaactaaccttgtcaaactaactcttatcttcctagtcatttttccacagttaactggccgagcccaagccccttgtcttgccatattttcacaatttactgctctttgtccaatctagtatacaagctttcagctctaaatgcttctttaggtcttcattttccttctgaaggctcccatgcacatagaaaacttactaaataaaatgtgtatgcttttctcctgataatctgtcatatgttagtttaattcttaggcccagctagagatgctaataggctacagaagaaattttatgtccatgacagtattctaggaatgtatata

SEQ ID NO: 321863 - DNA, 604 bp, Homo sapiens
cccaggtaacacagtagccttatatggtctattgtttcagagtgataaggtagcaacagataaagagctagtgattccatagtttgagccaggcatggtgtgttcttcctataatcccagttactcaggaggttgaggcaagaggatcacttgaggccaggagtttgggcccatagtcctgttattctctgacttggcatacttgttcctctctatgggtggtcaagaacaccaaattttcagcactccttctcatgaaagaagggaagaaatagaccgtcatgttcaccacttttatcctttgtacttcctattgtctcttcatgaatagaccagagaaaagtacacttgtgccaaggtcaaatcgttaccacctctaatctttcagctattacgagactttataatctggcctagctcgtctatggataataatgtgtgtgcgtgaataataaagaatgaacatattcrtatgtagaggggagagtaaagggggactatgtgttatctacaaagagatttcctgggcctgtaattcaagtttaaaacctatgtctggagctcaaaaaagaggccacacttcaatcatagatatggatgccat

SEQ ID NO: 321864 - DNA, 604 bp, Homo sapiens
cccaggtaacacagtagccttatatggtctattgtttcagagtgataaggtagcaacagataaagagctagtgattccatagtttgagccaggcatggtgtgttcttcctataatcccagttactcaggaggttgaggcaagaggatcacttgaggccaggagtttgggcccatagtcctgttattctctgacttggcatacttgttcctctctatgggtggtcaagaacaccaaattttcagcactccttctcatgaaagaagggaagaaatagaccgtcatgttcaccacttttatcctttgtacttcctattgtctcttcatgaatagaccagagaaaagtacacttgtgccaaggtcaaatcgttaccacctctaatctttcagctattacgagactttataatctggcctagctcgtctatggataataatgtgtgtgcgtgaataataaagaatgaacatattcgtatgtagaggggagagtaaagggggactatgtgttatctacaaagagatttcctgggcctgtaattcaagtttaaaacctatgtctggagctcaaaaaagaggccacayttcaatcatagatatggatgccat

SEQ ID NO: 321865 - DNA, 558 bp, Homo sapiens
ctccatgttggtcaggctggtctcgaactcctgacctcaggtgatctgcctttctcggcctcccaaagtgctgggattataggtgtgagccactgcgcccagcctagaatgtttctatgttgaagagagaagcatatctttggcaaatttgaagaggcattgtttgaacagactatatgtgggatttattagtctgttttctgttgcttttaaaagaataactgaaactggataatttataaagaaaaggaatttatttcttacagttatggaggttgagaaatccaaggtcaaagcccacatttgrtgagggccttcttgctggtggggctccttgtagggttccaaggcagcacagggcatcgcatggtaagggggctgagcttgctagttcatgtttcttgtcctcttcttagaaagccaccagttccaccctcatggcaacccattaatcttttaatcctttatccattaatctataaaaaagattaatctatttatgagggcagagccctcatgaccctatcacttcttaaaggtccttcgtctcaatactgc

SEQ ID NO: 321866 - DNA, 560 bp, Homo sapiens
aatagatactataaatgctacactcttaggagaaaaagaagtgctagaaatatatctagtgatctccgagacaaatggagcagaccaactctgtgactgattttggccttattcctagttaaaggcagatgccactaaatatggacccattcacagtccacaatgaactcctatgatcacgtatgtatttcaaaatatgcttttaaatttttttacttatccttatacttcatacttttattttttttttgcattacatttttttccaaaaagctttgaagaaggagcctttgctgaaagaatctgtatttcaaataattcctctctatcctccttcagttgggtattactttcctttctttggctgtcttctcccatcctgcttgatgacttgcctcaattcagtgtgtgagctttgccctttgcacctttcaggacgtcattagttatttcaaagattttacacagaatgatagagaagaaggttatttgaagggtttggggctctgtatttttttttggcattracaaatacccattggtaatgaagacttcaaaag

SEQ ID NO: 321867 - DNA, 608 bp, Homo sapiens
ttataaatggttaacatataagtactgtactgtgtcttcaacctttatcataattatatttccagtattgaacaaaatatgccaaactaagaaatgggagcttattacaacactaattgcttgataatgacttactgctgctcttaagaaaacttacacaatttttttttttttttgccttcactttctttaggggttttgatatttgcaattcaaatatactcagaagaagtcttctgtgaaaataatcayccatcccatgatagtggctaattttgttcctaactggggctgtgaaccattcaaacaaaaaactttcaaccctgtccaaaatccactggctggaaaaaaacctagatgtcgttaaggttgtcaatgctccctggtgacagaaaacaatgaataaagcatttttgacttttggggatgttttgagacgatgatgtcatcagcttctcttgcacttcatagcaatttacttcattatattctaatttaattattttaatgcacattcagtcactagttaccctacataaaactaggaagcccagacaaaaggacactagattcagactcctgatcgtattatgataataccaattcag

SEQ ID NO: 321868 - DNA, 629 bp, Homo sapiens
tgcttttaattctgtgtgctctttttgtagcaagcagatattttgaacactagtaacatttatctgtatttctctgtatgattttttcaatcacttgtacttctagtccttaatctgtactgtaatttactgttagctcacattttcttatgatatgatatgatttatttttttccaattcattctttattaatacatatgaaatttctgtaggaatatattaagctaacacacctaaacacacattttacctcctccctaccccaaccaccaccactctctctaccaccaggtagctcactaaatgccattgataaaaatgtttgaaggagaattggggaattagtgggaattccaaggagatgatgagaggcaatagaggattcagraaagttgggagaaaagcagtagatcaatctaatgctattttcttcaccttttgcagagtgtaacacagaccttgaaagactgatttgatgatttcacaaatgtttctcattccttaatcaatgtcattactcataatatgacagtaatatattaaaaaatagtgaaaatcagcaacagtggtggataaaacaaagcctcacttgcacttctgagaagttggagtagaaaaaggcagacaa

SEQ ID NO: 321869 - DNA, 579 bp, Homo sapiens
ttatagctggtaaatgaggagcacaggtaaaacaacctagggcttgtgattggcattggaagtgtgggaggggcagtcttggggactgagccctcaacctgtgagagccgatgctatcctcaggtagaaggtgtcagaattgaattaaaggacacccagctggtatctgctgcagaattaattgtttgtttggtgtgtggagaaccccacccacctgcaatgcacacatacacatttggtcccagaagtcttctgtgttgattgttgttgtggtatgagagtgaaagaaaaactgtttgagatctctctcctctcagagacctatgacsaataaagaaacataattcaacattttaaatttccccccaaagaaatctccatgcttagatgtttaactgaagaatttgatcaaagtttaaagaagaattagcactacttctacacaatttcttccagaaaatagaaaaggtgaaaatacttcccaattcattttataaagctggtattgccctgataccaaaaccagataatgacagtattagaaaagaaaaggaaaaaaaaagaaaaagaaagtaaact

SEQ ID NO: 321870 - DNA, 537 bp, Homo sapiens
ggatgcggcacagaataatgcctgaatatggaggacactttttaaattttggatgaattcgttaaagaatgaacaattcagtgcaacaccagatcaatcaacacccaattctgcaacaccagactttatcccaaaacttgaggactctaaatgtcatacatgatcaagagtatttttcaaagaagrgtcttggcgaatgaccaagtcagcaaagcaagactaaactgtggggaaacccatttaaacacaagtgcaacaatgaaccatcaggtgagaactttccaagtaaaaaacattacacaagggacaatggggacacagaagaaactggctttccctgagccacttcactgatccaacgtggtctctaagtgcagggattactcacagctctgagatgtgtgggtgttgttatccccacttcacagagctgtgggaatatcagaaaatagacatgaaatgaggagagtcagttgggacccgagtattccacatctgttatgtacagagcactagtctgtgggctgcggtgggcag

SEQ ID NO: 321871 - DNA, 537 bp, Homo sapiens
ggatgcggcacagaataatgcctgaatatggaggacactttttaaattttggatgaattcgttaaagaatgaacaattcagtgcaacaccagatcaatcaacacccaattctgcaacaccagactttatcccaaaacttgaggactctaaatgtcatacatgatcaagagtatttttcaaagaagggtcttggcgaatgaccaagtcagcaaagcaagactaaactgtggggaaacccatttaaacacaagtgcaacaatgaaccatcaggtgagaactttccaagtaaaaaacattacacaagggacaatggggacacagaagamactggctttccctgagccacttcactgatccaacgtggtctctaagtgcagggattactcacagctctgagatgtgtgggtgttgttatccccacttcacagagctgtgggaatatcagaaaatagacatgaaatgaggagagtcagttgggacccgagtattccacatctgttatgtacagagcactagtctgtgggctgcggtgggcag

SEQ ID NO: 321872 - DNA, 537 bp, Homo sapiens
ggatgcggcacagaataatgcctgaatatggaggacactttttaaattttggatgaattcgttaaagaatgaacaattcagtgcaacaccagatcaatcaacacccaattctgcaacaccagactttatcccaaaacttgaggactctaaatgtcatacatgatcaagagtatttttcaaagaagggtcttggcgaatgaccaagtcagcaaagcaagactaaactgtggggaaacccatttaaacacaagtgcaacaatgaaccatcaggtgagaactttccaagtaaaaaacattacacaagggacaatggggacacagaagaaactggctttccctgagccacttcactgatccaacgtggtctctaagtgcagggattactcacagctctgagatgtgtgggtgttgttatccccacttcacagagctgtgggaatatcagaaaatagacatgaaatgaggagagtcagttgggacccsagtattccacatctgttatgtacagagcactagtctgtgggctgcggtgggcag

SEQ ID NO: 321873 - DNA, 570 bp, Homo sapiens
gccatagcaggtgggcaggagcagagggagaacattacgaaggcggtattttggcggggttactctaactgcagtgtgggactggattaaatgaaaggacacgagctagcatcacagacccgataaaaagcagccggctggccgggtgcggttggctcacgcctgtaatcccagcactttgggaggccaaggcgggtggatcacaaggtcaggagatcgagaccatcctggccaacatgataaaaccctgtttctactaaaatacaaaaattagcagggtgtagtggcgcgcacctgtgatcccagctactcgggaggctgaggcagaagaatcgcttgaacccaggaggcagaggtttcagtgagccgagatcacgcyactgcactccagcctgggtgacagagcaagactccatccccccacccgctgccaaaaaaaaaaaagcggctagttacactatagcagctggtttagaggctggtggcatttgcagtgctaacagagagaaactaaaacaaaaagatcaggaagtttttcaaggaaagaaacaaaattaagagagacaattt

SEQ ID NO: 321874 - DNA, 570 bp, Homo sapiens
gccatagcaggtgggcaggagcagagggagaacattacgaaggcggtattttggcggggttactctaactgcagtgtgggactggattaaatgaaaggacacgagctagcatcacagacccgataaaaagcagccggctggccgggtgcggttggctcacgcctgtaatcccagcactttgggaggccaaggcgggtggatcacaaggtcaggagatcgagaccatcctggccaacatgataaaaccctgtttctactaaaatacaaaaattagcagggtgtagtggcgcgcacctgtgatcccagctactcgggaggctgaggcagaagaatcgcttgaacccaggaggcagaggtttcagtgagccgagatcacgctactgcactccagcctgggtgacagagcaagactccatccccccacccgctgccaaaaaaaaaaargcggctagttacactatagcagctggtttagaggctggtggcatttgcagtgctaacagagagaaactaaaacaaaaagatcaggaagtttttcaaggaaagaaacaaaattaagagagacaattt

SEQ ID NO: 321875 - DNA, 489 bp, Homo sapiens
agattttcaggaggtaaaatcaataagtctcaatgaccaaatggatttcagcaatgaaagagagatgatgtccaggatgatgagcaagtacaataggygtaacagtaataaccatcatgcactgagtacctatgacacaccctacactgtgctaatatttttcacatattatttaatagtatcaatgctatccattttatagatagaaagctgacattcagagaagttaagaaacttagccatggccatagctaattaaagtgacaggtctggcatttgagcccaagactatttgattccaaatccagacttcaaatttctaaacaattatgcattttggagaatatagtttaaaaatatatagttctttataaaatagtaacagtgatgaacataaataaacttgcttgttgagggttaactctgtactagatactggtctaacaacttttctcacattatttcatttaatcattaacatccctttca

SEQ ID NO: 321876 - DNA, 489 bp, Homo sapiens
agattttcaggaggtaaaatcaataagtctcaatgaccaaatggatttcagcaatgaaagagagatgatgtccaggatgatgagcaagtacaataggtgtaacagtaataaccatcatgcactgagtacctatgacacaccctacactgtgctaatatttttcacatattatttaatagtatcaatgctatccattttatagatagaaagctgacattcagagaagttaagaaacttagccatggccatagctaattaaagtgacaggtctggcatttgagcccaagactatttgattccaaatccagacttcaaatttctaaacaattatgcattttggagaatatagyttaaaaatatatagttctttataaaatagtaacagtgatgaacataaataaacttgcttgttgagggttaactctgtactagatactggtctaacaacttttctcacattatttcatttaatcattaacatccctttca

SEQ ID NO: 321877 - DNA, 506 bp, Homo sapiens
tggaaacagcccaggtacccgttgatggatgaatggctaaacaaaatatggtctatgcatacaatggaatattattcagtctttaaaaggmaggaaattgtaatacatgctacaacatagataagccttgaggacattatgtacgctaagtgaaataagccagacaaaaggacaaatagaatatgattccacttatgtaagcttgattacccagagtaatcaaattcatagacaaaagctgaatggaggctacccagggctgggggaagagaggaacgtggagttggtgtttaaggggtacagagtttctgtttgggaagatgaaaaagttctggggatggatggtggtgacggttgcacaatatacttaatgccactgtactgtacacttaaaaatggttaaaatggctcccactgcagcctcaagtgcccctgtcccacctggctccccctgctgatgtctagtgtttttttctctcctgtctttgtattgaaggcaggaaaca

SEQ ID NO: 321878 - DNA, 585 bp, Homo sapiens
tattcttgtgacaactggaacttctcaaaataatgagacttagagtcaaatcggttctttctctttggttagaatatgacttgaaaagtctgtccagcctctaatattgatattyaatatctaaaaatgtcaccaccgtgttatagcaatttgactgcctcaatagattaataatcataaaatttacacatgtgaagataataaatcagaccaaacattgtttaagcatctgaatttagcttagtcctcccaaagatatgtccagtacagtgacataatgtgacaactcattataaacaaataaattctctgctattcaattagcataggacaaaaaagaaaagaaaagaaaattctgatctctatactaccaaggaattgtgaaacacactttatcactgttactgagcatataaattgagcaatgtttttgaaaaaaataaggcaataaagatcacattttaaaaaatttaagcatttaaccaaataatctaattttttggaatcgacactaaaaaataaactaccgtaacagccataaaatattcaaatgtttgttgcagcataacttagaatagccccaaa

SEQ ID NO: 321879 - DNA, 585 bp, Homo sapiens
tattcttgtgacaactggaacttctcaaaataatgagacttagagtcaaatcggttctttctctttggttagaatatgacttgaaaagtctgtccagcctctaatattgatattcaatatctaaaaatgtcaccaccgtgttatagcaatttgactgcctcaatagattaataatcataaaatttacacatgtgaagataataaatcagaccaaacattgtttaagcatctgaatttagcttagtcctcccaaagatatgtccagtacagtgacataatgtgacaactcattataaacaaataaattctctgctattcaattagcataggacaaaaaagaaaagaaaagaaaattctgatctctatactaccaaggaattgtgaaacacactttatcactgttactgagcatataaattgagcaatgtttttgaaaaaaataaggcaataaagatcacattttaaaaaatttaagcatttaaccaaataatctaattttttggaatcgacactaaaaaataaaytaccgtaacagccataaaatattcaaatgtttgttgcagcataacttagaatagccccaaa

SEQ ID NO: 321880 - DNA, 628 bp, Homo sapiens
tcacatactgtagtagttttagaagattacttacagctctttcagaaacattacttaagactagatgacaagagactattagttttaaggtaaattaggtkctctgtctttaagtttggcccagaaaaatatttgtagccctagtttcacttcagctgccaaaatgcaataaaatatttcgactgcagtttgagaaatttgacaacctcatattaaattcaagagttagcctgtatttaatatgtgtcagtttacttctgcattgcaaaatacatggctaaccatggtgtttgacacttgctcatgcactttttatcacaggagcatcacaaaatgattttttatctgcattgaaataaatgagattttctgttaaaccagtgcagcaattcaacaatcatttagttcctcactgtgtgttttgcacattacttggtgaagtgagaaggtattaaatggactagaagattaggttaggtgttactgtaaagaaccttaaattgttgttgaatttggacacattttaaggaaatttaagtagcttctcattcatttgaagtattgaatcataggtgcctacaaaattgaatgaccaaggttctccacagttgcattcctaattgctgca

SEQ ID NO: 321881 - DNA, 582 bp, Homo sapiens
aacttgggagtgagttttatttgtggttcataaaatttttaacaaaacgatatggaggaaattgtagtttaatgaatgttgtggtttttgagattaaattttaataagccggggaagtgctatgtcatattaggaagggtcatctatttcatcacagtatttcctgcaccagtgcctggtacatagttaacacgccttgagtatttgaaggactgactgagtgaatgagtaactgagtaccattacacatcgttggtagagtaattaactggctagactggtgtgcagccatcaggactttaggtgccttgttggttaaaagctttcaggttggctttaaaagtatggaaaacttaattattttgagaacccttttattacgtaatagatgctaattgatgtcttttaagtggttgttggggcaagggactcttccacttttggggtaccagctgtttcagctcttatattggagagtcaaaagaaaaagcagtagtaggcactaagtgatgtggacctcatcatacatatcgccaattgtctttrgcatcttcatatgatttcagctgccagtaaacaatt

SEQ ID NO: 321882 - DNA, 500 bp, Homo sapiens
taaaacttgtcagattaggataaccccaacagtgattcagcgacaatgaaaggcaaagaagccacagaaatttggtcaccatgarggcagaaaaagctaagcccaagccacatgactgttgggagaagagtggttctgcataggtgagggggcccaggcatatcccaaattagtctttccatgggcagccttatgtcttcctgaagtaactatgtgcataaatctaaagaactagaatattgggacctcaggacaatttcattatggaacaccactgtcctcagagagtactgaggaggttgttagggagaaaggttatccttctcagaaatattgaagaatcactcggcagtgatctgcaatggttgatacaaaagttactggattttacagttcatcatcataagtctcatcttacagtacattgctaaaacttattcagtaatatttgttaaagcacagtaaggaagactttattcaggacaatcataataggtata

SEQ ID NO: 321883 - DNA, 388 bp, Homo sapiens
aaaaacatagctctaaatatttgtggattacaaagtgatgttatgatttttagcacagtgtggaatgatacacatatacatcacctcaaatattaataaattattaataaagaaaaaattataatagaaaacatttgaactagacagcatcatggctctgagtctgttatctctgttatttcaattggaaacaaataacttttaaccataagcattgtctgagtcaagcattgtttagttgtaagaaatagaaattcacttgagttaacttaaagctcttgcagaggacaggaagtagggaayggccaggaacgatgtgtgaggcaagatggccaaataggaacaggttcggtctgcagctcccagcaagaccaatgcagaaggcagg

SEQ ID NO: 321884 - DNA, 233 bp, Homo sapiens
taagtcagaaattgggctatagtcacattttgttgttgctatggtaacttttttgtgcaacaccagctttcaatcttagagtaagggctggtttaccagaggttgttttttgaatgtttgccccacctctgctttatatcttctcagagagcttctctcttcaaggtcttgctccttttctttaagcrcgctgttgttccttgacggatagttcagctttagttgcatggcgg

SEQ ID NO: 321885 - DNA, 604 bp, Homo sapiens
acagctttctacaacatctgttgcgctgctctatatcatatttttcctttgaattagaaatagatataaaaatcaagctataaagttctgacattttggaaaatcttactagccaataataattgcaaactgggtggggtatgcaaaagaaagatgctaatgtttattgagcacagagtaatggacaggcagtaatttmatctaatatttatttttctttaaattccccatatgtatatgtggtgtgtgtgtgtgtgtacatgtgtatatggcagtctttgttattctaatccttatagatgggacaaatgagctcaaagttaataaactttttcaagatcactcatgtaatatttggaaagagagaatttaaacaaagaaagaagtgttcacttatcaatatatagcttgtgctgtagccatctactgcctgtcatataaactcaccagtgattatcttgaagtcaagatgggatgcctattcaacgaattacttattgaccacttccaagggtaagatcttggcatattagtttaagtagtaattggtaattttgtaaagagcacatgtcagggtaccaattgtagagcagcctctttccta

SEQ ID NO: 321886 - DNA, 535 bp, Homo sapiens
ctcagcctggacttcattgtccatatcactatyagtattatggtcacaaccatttaaccagtctctaagatgttccaaactgtaactaatcaacctgtcttttgagccctccaaacttttccaaactctacctgttacccaaatccaaagctgcttctacattgatatggttttactgtgtccccacccaaatctcatcttgaattatagctcccataattcccacatgttgtgggaggaacctggtgggagataattgaatcatgggggcagtttcctccataatgttcttgtggtaatgaataagtctcacgagatctgaaggttttataaggggaaacctcttttgcttgactgtcatttctctcttgcctgctgccatgtaagatgtgcctttcaccttctgtcataattgtgaggcctccccagccacatcaaactctgagtccattaaacctcattttctttataagttacccagtctcagatatagctttatcagcagcatgaaaattaactaatacagtaaattaat

SEQ ID NO: 321887 - DNA, 535 bp, Homo sapiens
ctcagcctggacttcattgtccatatcactattagtattatggtcacaaccatttaaccagtctctaagatgttccaaactgtaactaatcaacctgtcttttgagccctccaaacttttccaaactctacctgttacccaaatccaaagctgcttctacattgatatggttttactgtgtccccacccaaatctcatcttgaattatagctcccataattcccacatgttgtgggaggaacctggtgggagataattgaatcatgggggcagtttcctccataatgttcttgtggtaatgaataagtctcacgagatctgaaggttttataaggggaaacctcttttgcttgactgtcatttctctcttgcctgctgccatgtaaratgtgcctttcaccttctgtcataattgtgaggcctccccagccacatcaaactctgagtccattaaacctcattttctttataagttacccagtctcagatatagctttatcagcagcatgaaaattaactaatacagtaaattaat

SEQ ID NO: 321888 - DNA, 506 bp, Homo sapiens
ttttgtctttcaaagtacctcagtttttcttttcccagctctgcaattatttagagtcctgggaaacttattggcttgaagctttaaaaacattgctctcatatgatgtgaagcagctctcttgcttgctaagcataccctattagtaataatgtttgttcaaagtatctattatacttataccctcatcttgatttacaagaaaagttccttttggaaatacagacatctgataaataagaattttaactgagggaattttaacttttcaaaccagtggtgtgaatagacctagggagcaccaccttagctagatgactataaaagccctccaatagtgcatgctaaactttgctcctcargaaattcttgtacgttagctcacagtgcctgtcaaacatggtaatgtgtctgtaaatttcacttgacagaaaacatgtcagttaatcagcaacctcagaaagtaaacaaagctgagctacagacaacaattgcaaagcaaccag

SEQ ID NO: 321889 - DNA, 615 bp, Homo sapiens
gggctactatatctcctgcacaataaaatacacaaatcaatttgttttctatgtacttgcctctattattttgtctttcaaagtacctcagtttttcttttcccagctctgcaattatttagagtcctgggaaacttattggcttgaagctttaaaaacattgctctcatatgatgtgaagcagctctcttgcttgctaagcataccctattagtaataatgtttgttcaaagtatctattatacttataccctcatcttgatttacaagaaaagttccttttggaaatacagacatctgataaataagaattttaactgagggaattttaacttttcaaaccagtggtgtgaatagacctagggagcaccaccttagctagatgactataaaagccctccaatagtgcatgctaaactttgctcctcaagaaattcttgtaygttagctcacagtgcctgtcaaacatggtaatgtgtctgtaaatttcacttgacagaaaacatgtcagttaatcagcaacctcagaaagtaaacaaagctgagctacagacaacaattgcaaagcaaccagagtgtttcatgaaggtggtgttagggaaaacataccaagac

SEQ ID NO: 321890 - DNA, 514 bp, Homo sapiens
ttggactggttcaggcatgccaaggcaaatatctaggctaaaatgtgggagctaagaacacacagtgtattgatttctttattatggctagcagatatttaagaatattagcacaattctttgagtaaattttgcttccaagagaggttactatctattctcaattagactgggaggaaagtttctttgaagaggaacctctacttatttcattttctacaattcccccctcttttattttataattcctcttcaaacctgtatactatgtcttgactcaactgctgtttgtccttctaagagaagtaatctttccgaatagggtggagaagagttaggaaatcattttgtgagagtagcagagacaaatttttgtataaaactttgaagacagggaataatacagcagcctacaagaataagtacaccaataacaagagcaaacgaggtgagaactaaagtcaaaattcctttccatccactgaaccaaygttctattattttagaaaaaaga

SEQ ID NO: 321891 - DNA, 585 bp, Homo sapiens
cctccctctcccttttggaggtcccttacattstttccgtctgtgttcacacattctgccgaacagcaggactcgtagcacagataatcattcacacatacacacaattactcatcctccaaaagctgaccaccaaggaagtactttgcccccctcttgcggcttttcctaccttggcccacgcacggagtcacctggtcaccacggtcccacaagcctctctctttccccgccgatgctgagactccaagtatattcctcacaccaggtaggtcccggctctcctgctggggccgcggcaacaacgggtggcagggcacctccccatgagagaggggcaaacaccatccaagaggggaatgttattccccatacgggccaccaaattgttgggaactagtgctcggtgttgcaaaaatcaacactgagacaaagaatctctcagcaaggctagtttactttctgcagaaagggtgctgcttgctagcagtcttgccaggaaagcacacacgaacaaaggagacagggtcatttataacctgacatgtccaccctactgctgtgtccgatttccattggctggaa

SEQ ID NO: 321892 - DNA, 594 bp, Homo sapiens
gatttgatttagacaacttaccctttgtgactgctaaccacaagtctagtccttatggtgacatttctgtgaaatcaaacctttcatctcctttggagatggcagaaggatgggcacatgcttctcagataggggtgaaggcctggatgtctgcctaattttaattcatatcttaaatctatgtatatttcaaaccaattcctttgtttttaatccccatcatactcctccttcttgataactggtacccctaatatctcaatatttccayggtttgacacatcaataggtttgcaccttatctccttctgcctgcttttaagattcattttcctgtgccttattgtttctttcatcctcttgtcatattcctctctaacttttctctttcttgcctgttgcagtcttctcttcaattttcattgtattgtcatggatgaatcagtatattttctataccttcttgtaattttgctggaaatttgagagggagcagagattaacacatttgtttcatcagccatgtttacttgacaggcttcagtgaattttaaagtttctctactaggttaggtgataggaggcatagcaata

SEQ ID NO: 321893 - DNA, 602 bp, Homo sapiens
tgctattgtttgattttacaacataaaaacttgaataaatcctttcatagcttaaaattttaaagttttagggctttacagaaacttagaattttaatcaaagctttctaatatttttcagtgctgccaagataaacagcaacagttgtgagatttatctgcagaacacgtggttaatgacctttaaggcaatttgcctcatatgtcaacaagaaaaaaaatgtgagctataactattgagatgaattgctcttgttatttttgcccacttatgttactcaatatctggtaaaatagatgtaacataagggcatagaggtgtttttcagaacagtttttatcttaaaaaygtcatttttgaaactaattattaagaaaattcatttttttttggcattttgatctaaaatatgtcagtgttcctcaaagtaattgggttacatttttctacaaatgtgtatattggcttatgttaatcttggatgaacaaactgttaccatgagattgtgtttaaaacaactggtgagacttgtggaaaatacatttcaaccactaaaaacttgtcttcatattacacatttcgtcaggcaactcaaagggg

SEQ ID NO: 321894 - DNA, 636 bp, Homo sapiens
gaaatgattcagatttcagcaagtgttttcttcctgatttaactgtgccaattgaattgaacaaattttgattcttcagtttcttcacctgtaaaataaggaattaatctctaaggccccttctgtctcaaaaattctgtaattctttatgagcaagggaatatactgcatagtatgtggagctagcacaaactgaaatgactrttttgtaataatacagtaaaactgatcaatgcaggcagctaaaccatgtaattcaatccctgaagtgggttttgttcagtttggctgtctgtagtcatcacataaattgagcgattaggtaaccatggtctctgtatgagaagccagcaatctgcagtcgagctgtggattctgaagggactgcccacatttcacacagatcatacacgcgcaaggcttatgcatatgaaagtgcggtgtatatcaagctcatgtacagaaaagtcaccaagggctggaaaaacttgattcacatgcttacaaaggaaaatggtttaaaacatatttaatattaaattttaaaagctgataaaacactctgtgacttggaaaatttctgttaacatgtttagttttacgttgaaacaataaatattatcttattgacttaac

SEQ ID NO: 321895 - DNA, 570 bp, Homo sapiens
tggcttactgtgtgagctcggaccagtcatttaacatttccagaatcttaaagaccttgtctctgaaactgggatagcaatatttctctgcctacatgcagacctcatagggttgttcagagaataagacataaaacaaagtggcttgaatgattatgtgctacttttatcatcaagtcaacattaaaactgtattcaaaataatcaatagttattaaatctaagatataatttaaatactagtttgttccctataaactttatgttaaaaagtttctgaatttgtattgaccaaagtatgaagcctctacatttcagtaacgatgtggaggagattccagccagattttaaaaatctcaatttgtttttaaaaggtagattgttgtccaatcrggtttctttgtgctgtatttgtgcaaccaagtctttgaactgaaattccaaacttaaaaaaaaaaaagtcgtatatgcttctaggaagagggtctatagtcaggaccctggactttactataaaatcgtaaagacctacctgttagatctgaagagagaattggacaccaccctca

SEQ ID NO: 321896 - DNA, 522 bp, Homo sapiens
tagtagttaggtttgtacctagagtggttgatgtttacatcaagtacttatgttaggagatgatctagaatatttcttagcagccctagtttggttttattmatcctccatttattaggtctgaaacatggcaagaaatgggctctttttattagtgattgcagttacttttaaccaaaagaccatgaatcattggagggaagaagcagcaagtagcaattaatattttaagttttagcatcatattattattttttcttccaaggcaactccccaaatgggatgtctaaccaagaccctgtcaacatcctctaatctttccctttcacatcaggagtaagaagtagtgcttgagcatatataatttttttaaaaatcaacttccttagtgttaaatattctaaaataaagatttaaaacttaaaaaaattaagtataaaacatattttcatctcaaaaaaaaacccacaccccctatacctttatatcatttccgacttcttacccaaatctggaaagaaa

SEQ ID NO: 321897 - DNA, 562 bp, Homo sapiens
tcttttccatacttagtgcaaaacctccagctccagcctcctgcaaacttggccacagttatttctaaaggttcccctggggaggttttattactattcaaagttttatcagctattattatatgattttccattttctttatctgcattttccttatctctaactctgacctgtagctgacggtgtctgatcctgagggatttgttgtctacgaggctacaggaaggtgccccaaaacagctgtctctgtttcccacaaatgttctgttggtatcttgctctgataagctgctatgataggaaggactcttattcttttgggcattgttctctcctgccagttatttccttctcctactaagttcttaatcragtgacttgatagagtcctccaagaagtcaaaattcccgctactaattaaaaacttgtcttgctcttgttataagcatattctctgttaagctttcatacttccagtgcttaagtttcaaatcctgaatcaactttgattctttcatttccttcactccctacatctaatccataagtaagcccacttg

SEQ ID NO: 321898 - DNA, 569 bp, Homo sapiens
gcagtcatttccctaatttctcctcattaacaggcaataaagtggaggaccattttgtgcacagttaactgtacaatttgattaaatattcgatattgatcagtttggtgggggcaagggaaacacaaagagacagcagtttttcctttccttttccatctctgctatctttccctctggcttaatatggagataattgattctgttttcctgttaaatcacacagacttctgtttaaaaggaatctggggaaagaaagaaatcataaatttcaatttccagagggaagaattcacttttacctaaaataatttaatcaaaagaagattgagacattaaactcatgtatttttgaaaaaaaaatatgagggggttgttggatattgaagtctgagaagagcttaatagtttctaattgttcctgaaatgtctggatgaattctgattaaatttgccacaggcataggcatsaatggaagaaagcaagatataagacactggacaacttacaaagaaaggtcagtttttcatttctctgcattttctcagtacgtgcatttgaaatactt

SEQ ID NO: 321899 - DNA, 433 bp, Homo sapiens
gttagtcaaaggattgaagagttaatacaatttcatcatttttcaattagtgtttaagtcttttaattccacataagtaactataaattttgaatgaaattttggattttcacattgctgaagtaatacaagttaattacatccttgttaatgatctattgctatgattttccttcatgcatgcaaatcaggcatggagttttattatctttcatggcctgttgtgttgacccatcacactcaggaaactttctaatttttctttcctgcgttagattttctctgtctgccttggtttaaatgtagtctatttactaatgcatgagattcttggtattacaaaaccaacaagttatyatatattttcatgataatagctatttgttttgatcttcaaagagtcttaggaactatgtatacaattcctcagtta

SEQ ID NO: 321900 - DNA, 508 bp, Homo sapiens
gatgccgtcccagcaatcttgtgccaatattgccttggccactttcccttgtgttgcagacagttactctaaattatacctcatttcaaagatataaagaagaaaagcaagttagatggaggagaccatttcttgttagttattaccctttaaagtacttcttttataccatatcttcttacgtatgcaactattgcttaactactatgtggaatagtggggatttccctcgactttagcttgctctgggctctcactgccttgctgtgatattttggataaatcacttaagctttctagttctaatattctttaagtataaaataaggaagtayggtgcaggtccacgactgtcattctttgaggttgaaagcatgtcttatttgtatttccctactcatcctctacataacacaatatataggtatgctctgtaaatatttgctagatgaataaaaaaataaatggacacccctcacatttcttcctgttggtgtttatatgctgt

SEQ ID NO: 321901 - DNA, 549 bp, Homo sapiens
atctcttagtaaagaaaataataaatagctgcagccctgttcatttaaggcgttasgtacttaatctcttaaaatcaatcccctagggagagtactgatttattagagaaaaatgaatgcagtacaatataaacattacattttcagagaataatttctaagaaattctaagtgaagatcagtcaatgatgttgttagtacacttaatactttatctttctatatattttacattgtataacccaccctcccatatgtaattttaattgctttccataggcggcaatttgattggaattaaagtttaacttgccaacttaaaaaggtttgtttcttatttcaaaaaagaaaaaaaaggacactttggaagtattagcaataatccaagcaaataccattttcccctcctattttgccacttctcttattggtcccactatgctctcattcaatccaagcttaaaacactgaggtcacttatctttctccttcttctttcatatttatatacacaccaaggcctgtgactttttacttatttaattaccc

SEQ ID NO: 321902 - DNA, 549 bp, Homo sapiens
atctcttagtaaagaaaataataaatagctgcagccctgttcatttaaggcgttacstacttaatctcttaaaatcaatcccctagggagagtactgatttattagagaaaaatgaatgcagtacaatataaacattacattttcagagaataatttctaagaaattctaagtgaagatcagtcaatgatgttgttagtacacttaatactttatctttctatatattttacattgtataacccaccctcccatatgtaattttaattgctttccataggcggcaatttgattggaattaaagtttaacttgccaacttaaaaaggtttgtttcttatttcaaaaaagaaaaaaaaggacactttggaagtattagcaataatccaagcaaataccattttcccctcctattttgccacttctcttattggtcccactatgctctcattcaatccaagcttaaaacactgaggtcacttatctttctccttcttctttcatatttatatacacaccaaggcctgtgactttttacttatttaattaccc

SEQ ID NO: 321903 - DNA, 526 bp, Homo sapiens
tttctatatattttacattgtataacccaccctcccatatgtaattttaattgctttccataggcggcaatttgattggaattaaagtttaacttgccaacttaaaaaggtttgtttcttatttcaaaaaagaaaaaaaaggacactttggaagtattagcaataatccaagcaaataccattttcccctcctattttgccacttctcttattggtcccactatgctctcattcaatccaagcttaaaacmctgaggtcacttatctttctccttcttctttcatatttatatacacaccaaggcctgtgactttttacttatttaattaccccacattcttgaggtgacttttctttctagattaaatattagccaccataaattctactaatgatcacctcacacaatataccaaggctcttcttaagcttgcctatcttcagtcttacctccttgatccataccatacaatcccaaaactgactcaccaaacaccatgtatatcagtttcaatggagctcttt

SEQ ID NO: 321904 - DNA, 606 bp, Homo sapiens
tcactcttgctctctaataaacacacacacacacacacactcatcacctacacacttttctcctgccctgcacttctggcaggggactacaaagtcaaagtgaggaagaaggctttgctgctgtgcagtgtttagagttccccatgaagtaagacacagggagagggccagtcatacttcttatctcatcattgccctaacaatgtacccattttaggatagaaacctmaacaaaaaaacaaaaaaaacaaggcatcctacaatgtatcaaccatgtaagaataaattcactaggaataactcaattctctgatcctaaatacaaacaaaaacaaaacaaactaccagctaaacaaactgaactgagattatgctactctctgttaccattttagtgtcatatagattctataggctccaatcctagaaaatgcctaaaaatgatgctggatatagaaaattgggtggtatggggaggagagtggaaagaaatcatgtagctctgatttagtacatgtcatcatgttttttattgaatatctggtatgcactgagcaaaatattaccctcgccctcaaggggctttgagctcattaaaaaaaactg

SEQ ID NO: 321905 - DNA, 472 bp, Homo sapiens
ttgaagagcaagaaaagaaaaagcaaagcaaatatatttgtgcatgagagagagagagagwgtgtgtgtgtgtgtgtgtgtgtgtgtgtgtgtattgtgttgagactgaggggaaggtaagggcaggggaaagcaactctgttcacttgacaaatgtaaaagggatccctgttaatataaccctatcactgatgtgagcacttattatggtgtatcaggcagtgtgctaataagaactggggttacttcatttaagtccaattaaatagttactaattttattcctacttcacatgagggaaagctgaggtttggagaggttaatttacctgagttcacacagaaaataattgctgaatcagggatttggatccctttggtgtgactctaaatttgagtcctccagattatactgctttcctcttctttagtgtgatgtttccagattattcttgtacaacctgagaagtga

SEQ ID NO: 321906 - DNA, 585 bp, Homo sapiens
tactcttactacctttgttattaaagagcatcttggtttaggaagtaaagttttagcttcttcaataacctaggaatcatatctcagtttccatgtttctctgatagttrcttgaaactttgatccctggactctgcaatgtggaaccatattcacaggtcacagtaatttcgaaagatgagcaaataaagtattttccattatctatctgtaggcttttctattgcttaaaaagagactaaatagcatggttttctaggcaagtgtgatagaaaatgtggagcctaactcccctccctcacccttttgaaggccaatctatgaatttgtttgaaaattgtccagtttcagaatttagctaactagttgtgtaaatgactaagggtcatcagagagcatagaagtattatttgcccaggcatattttgacctcttctttgacagcccttcttttcactgaaaaaaattctttctcattctagtcttctgctcttctgtagaaagagaacttgctgggagttaggtgacttgacttctaatctcagttttgtggctaactagttgtaggactttaagccagaggtt

SEQ ID NO: 321907 - DNA, 597 bp, Homo sapiens
ctattgcttaaaaagagactaaatagcatggttttctaggcaagtgtgatagaaaatgtggagcctaactcccctccctcacccttttgaaggccaatctatgaatttgtttgaaaattgtccagtttcagaatttagctaactagttgtgtaaatgactaagggtcatcagagagcatagaagtattatttgcccaggcatattttgacctcttctttgacagcccttcttttcactgaaaaaaattctttctcattctagtcttctgctcttctgtagaaagagaacttgctgggagttaggtgacttgacttctaatctcagttttgtggctaactagttgtaggactttaagccagaggttgtcaaactatagcctgcaggccaaatcttgaccaccatctgtttgggaaaataaagttttaytggagcatagctatgactgtttgtttactcattgtttacgaatgctttcttgctacaatactgagatgaatacttctgatagtaccatatggcccacagagcctccagtatttactgcctggccctttacagaaaaagtttgccaacctcatctttaggcaagtcgctgt

SEQ ID NO: 321908 - DNA, 625 bp, Homo sapiens
ctctcgtataggggaaagttctgattctgtgaacacatcttcagaaagagactcctcagtgctcctaggagcagtgctggcactatcattacctgcatctcggattcttgagtctatttcctcagtgttacttcctgtcattttctttgaatggcagaagtcccttcctgatagctgatctatatctctgtcattaaacaaaattaaaaataattagacttttaaaattgtggtattttacttttcacacactgaacacagaattagtatcactaaaaagactttttaacaaaaggatgtagcacgtatctccaaagaatataaaaaatctgatttattcaatatgaccaaataattaaccttatagaccaagtaattctataaatcaagtaattaagtcaaacttttatatcaattgcttaatatttaggaaatatcaaagtaagatttccttgcaagtaatcyacttgaagggaacttgatgacataaaccctgggtaaagctgtaattctaaactaaaatttactcactgatggaatatggaaaataaacacagagaaatgtttaattaaaattttaaatctcccaataaagtaaaaataaactgatttccatagatataca

SEQ ID NO: 321909 - DNA, 576 bp, Homo sapiens
ttagtgtccttctagtatattagatggaagggcccgggctctctccatgtgaggatacaaggaaaagatggcttctacaagccagctggagtgcttcaccagacccagatctgcttgcgcctcagtcttgggcttyccagcttccaaactgtgagaaataaatgtttgttgtttaagctactcagtctgtggtattctgttttagcagccggaacagataaagacaggagccattttagaattctggctaccatacctcccatcctacaccagacttgtctctgggtaatggtctcttgcataatggatattctttttaacttttttgggtattttctcaaatttctacactgaatatatgttagtgttctcactttgcaaacagtgccctaagatcagttattctgcttaaaatccttcagtggcttctcactattttcttacaatactccaaactcctaatagcctggaagtctactaggctgcatgatctggctacctcctgcctccctcctccagcctctatttccttcagagaatttattagaacatttaattaccatgtttttgttttct

SEQ ID NO: 321910 - DNA, 600 bp, Homo sapiens
gacacacactcagacacttgaacatagatgtaggcacacagactcacttaagctgtgcgtaaatatttacatacacacacacaagacgtgctcacgcaagcacatccttgctaagaccacatttcctggcaaattctggtaattctgacccctctgccagagttcttggtgcctctttgggaagagacaaaggaaactagggacctgtccttcctagaaagggagtaatgtrtccccaaggaattggaccccaaacaaggattatttctttccccggaaagccaatgactagcaaatgctccagtgccttctgggcttccacctagagcttggagcaggatctgggtgggccttgacaaacgggagagcagagcgggagaagatgtattggtgggtcccaggccatgaattgcaggaaagcatcattgcctgagaatttccatgttgacctcagaggccagtgtggaatggggtggcgtgagctgctgtaccttcatccctgaaggccccaagaggccaagctcaaagaagctccagactcccaaagcttcccaggatctagggcccaggggctggacactggagcttagaggcacaggg

SEQ ID NO: 321911 - DNA, 490 bp, Homo sapiens
agtgacatgtgtctgtggtggactgtgtagggtacacaaacaaaaatttttcaaaatcttcagatgacatctgcccatgtgtgcagtccacctcgaagaggccatcctccctcctctacacacagaatgcctgttagcagagagacatgactcccatatattccattgccttgtccaggtttctgccagaagcaagcagagttgtcctagtggaatcagccagacacatgtgacaagctgcatctcaagccaaacacatgtgttgagagaaagtccagtgaggaagggtaaggaggcctgggtaggtgtgcatcctctggaggacagtgctgcagggctgggcycaggatatctgaccgtgagccagagagcatctacgtgatcttgcatctgccaagtcctccgtctgggactgccttggggctgagacccttcctggatgactctcttctctgcttccctcctagatgtaatgggcaacaatatcccc

SEQ ID NO: 321912 - DNA, 526 bp, Homo sapiens
gaggaggagttgtcagagagccaagttttgagacatgctattctatactgacccctctttgtaagaaagtcttgagggtccaggcaactggagagtgttacaggacaggagaaggcaggggtagtctgtatatctccaggcggttcctatcatggaacaccactcagtgtcaactagaacaacagcaggayagcccaggcaggctgagctctaaactctgaaaatgcatttcaacaagagggcctttagtcacactcaggagagattttatatggaaaaggggacacagcagccaacatgaggaacaattgtaaagcagagaccaatagtgattctaggatcgtggtgagcttgcaagcaatgtgtatgttgctcaaatatacacatagatgaaaggttgcctttctggaacatagggacacacagagacaggactatatgcacaagagaaagggagaaagagactttgaccggatctgacccaaggaaagatacttagataaatccaaggtatagagctgtagtg

SEQ ID NO: 321913 - DNA, 649 bp, Homo sapiens
ctgtcctccaaatgagccccatctgccagcattgcataaaatatgggtcacagtggaatcggctcagtgtgggaccagaattgcaggtcatgggctgccccaagcatcttgggagagactgcctgtcctccctccctcttgcctgccccagactcaggccaagcgaccttcttggactctatatcgggaaaggggtggcaccatcccaatgacatgaaaaatgtccccaaatggcataacaataatagctaccgtgtgtttaatacttcctgtgtaccaggcatttgactgatgactttgcacacataatcttattttgtctttactacaatagaggtagtgttattttcactttgcagatgaggaaactgaggcctagagtggctggataaccatcttaaagtcatacacacaggaagaaacagagacaggccttgaacctcggcytttctcagcccaaggctgtgatcttaaccacagctctacactgcccataggattttcataaagcgacagaatccagctgcctatgtgttcccctctcagtgacactagggaatgggagctccagagtcaccacatgaagaccagagctcctccagaatcctatgaagagatgaagcatccctaatcactggaacgtgaccag

SEQ ID NO: 321914 - DNA, 649 bp, Homo sapiens
ctgtcctccaaatgagccccatctgccagcattgcataaaatatgggtcacagtggaatcggctcagtgtgggaccagaattgcaggtcatgggctgccccaagcatcttgggagagactgcctgtcctccctccctcttgcctgccccagactcaggccaagcgaccttcttggactctatatcgggaaaggggtggcaccatcccaatgacatgaaaaatgtccccaaatggcataacaataatagctaccgtgtgtttaatacttcctgtgtaccaggcatttgactgatgactttgcacacataatcttattttgtctttactacaatagaggtagtgttattttcactttgcagatgaggaaactgaggcctagagtggctggataaccatcttaaagtcatacacacaggaagaaacagagacaggccttgaacctcggcctttctcagcccaaggctgtgatcttaaccacagctctacactgcccataggattttcataaagcgacagaatccagctgcctatgtgttcccctctcagtgacactagggaatgggagctccagagtcaccacatgaagaccagagctcctccagaatcctrtgaagagatgaagcatccctaatcactggaacgtgaccag

SEQ ID NO: 321915 - DNA, 575 bp, Homo sapiens
ttactagaacgtccaactacttgccacttcctgttcgttggatttgttgagaatgatgccatcagtatagtggaccagcatgatgtttttggaatgtcaagacaatcaaagtccttttagatgatattgtgacaaagagcaagaaaatcaacatagccttgaggcaagacagtaaatatatattgctatccttctcatatgaatacaaactgcttctaatccttttttctgatgtgaattgaaaagatcaaataccatgtatcaaatgctggaggctatgttgatctgttctagtaaakatgccatatccagcacagcagctacaatcagaactcccccttgttttgatggtccactggtcattatccttgaccaatctggatttctagggtccctatcaataaatagaatgggaatgtggtggggaaaaccaattcctaaatcctttaagcctttggtggcagcactaatttctacaatgccacctaagatatggaattgctttggatttaatatcttggccaaagagttaaagagcattttaaaagatctcaacttgggcttcagaaccaata

SEQ ID NO: 321916 - DNA, 535 bp, Homo sapiens
aaataccatgtatcaaatgctggaggctatgttgatctgttctagtaaatatgccatatccagcacagcagctacaatcagaactcccccttgttttgatggtccactggtcattatccttgaccaatctggatttctagggtccctatcaataaatagaatgggaatgtggtggggaaaaccaattcctaaatcctttaagcctttggtggcagcactaatttctacaatgccacctaagatatggaattgctttggatttaatatcttggccaaagagttaaagagcattttaaaagatctcaacttgggcttcagaaccaatatgaaggttttgtcaactactaagtatatccatgctaattacatactcagaaacgaggaaaatgaacaaaccttcagtgtgggcatctattggacccactgtaagacagagttaaaccagggttcccttatcacctgccctcaatatgcccaattctaatatgggagtgattgtggcatttgcatycccagctgactcaatacccaacag

SEQ ID NO: 321917 - DNA, 588 bp, Homo sapiens
gctgccacttggcccctgccacytcgggatccaattattcccactgaatttaaattttgtagttgagtgactgtggttcccactgttagatctgacatacagagaagagtaactacagggctcttcaaagatgcaggtgctgccctcacaaatctatttcacaatctatttggttaagggtacatcttctggaccctcccagctgggatgagtagatctaaagtgactaatccactccaccatcccaatctctctaagcctttggattccttcctctacattaaaccaagggagatcagacacttccagctcactcacagtgggccatcttttaatccatatttcagctaaccaagcaaataaactattagaacattttttaactccccaagctgcaatattaaaagcaaagtccctacttagtgggcccaaatcaataaattcagcctgatccaactctatgttccttccaccattatctcatactcttaatatccattcccatgactgttctccagattgttgtttatataaattagagaactcccctttttgagtgtagctcacctcctcatggatcatactctc

SEQ ID NO: 321918 - DNA, 453 bp, Homo sapiens
tgagggcagagccctcaagacctaatcacctcttaaaggtcctacctctcaacactgttgcattggggattaattttccaaaacatgaactttgggagaaacattgaaaccatagcaagggccattatggatagtctgtccccaaagaagagtcattttcaatagccagaaaatgagccatagatccatgatcatgaaagaatgtctcagaatctgagtgtctaggctaagtcaggaatagagatatacatgggtgctacaggagtttttttttttttttcaagtyatacagttcacattgaaatacaaatgtgggcagtgccaatctttgaacagcactgcacagcagaggctgctagtaatgacggaagtacacctatgggactgtagaaaacagattttaaagtttctgcatgattaggcctttttgaagaaagaaacctggtaattggg

SEQ ID NO: 321919 - DNA, 629 bp, Homo sapiens
gggacaaggaaagacagaacagattcaaactcacattttgctgacttgcatataggcaaatgactcctcaaagatttcttatgaaccatgtccaggagacattaactgagtagtggtttgtgaggaaagcataattaatctactaaatagattaattatctagtccactcagaccataaggcttccagactgatgtcaatggcactctatatctcagagtagcagagcattctcaggtctaaaagactactcttccaacagacacacactttcgtttccatcagttgaattatatgtcaactaagattcaayactgttcccctggatgaagaattcttgtttgacaggtttgtttttatttctctgccccaggactttgaccttgtcatctcattgtattcctgcctctatggtttttgatgagaaattgcctattactgttattgaagatccttcatatatgataaatcacttctttgctactgatttcaagattctttctttgttttggctttcaacagtttgattacaatgtgttactgtgtgtctttttaaatttatcttaactggaagttgttgagcttcttggctctgtagtttcacatgtttcttcaaatttggaaagtctt

SEQ ID NO: 321920 - DNA, 430 bp, Homo sapiens
aagtcaacaccacaacgagatattacctcacacttgttaggatggcccttataaaaatatcaagagataagtgttggtgaggatgtggagaaaagggaamcctgatatactcttggtgggaatttagattaatgtagccattgtggaaaacagtatagctgttccttaagaaactaaaaatagaactacaatatgaccgagcaatctgggagtcattacttcataatgatacctacactctcctgcttattgcagcattatttacaatagccatgatatggaagcaaagtattgttacccattggataagtgggaaaataaattgtggcacacacacacacacacacacacacacacacacacagagaccccccctccccccacacacacacagaaaatggaatattattcagcttttaaaaataagaaa

SEQ ID NO: 321921 - DNA, 575 bp, Homo sapiens
cagtgtgatgttttggtacctatatacattgtgtaatgatcaaatcagtgtaattagcatatccattgcctcaaacacttgtcagttctctatgatgagaacattcaaaatctctcttctagctattttgaaatacacattagttcagactatagttaccttactgtgcagttaaacactagaacttattcctcctaactataactttgtayccattgaacatatatatttttatatgtgtgtatgtgtgtacatatccgtgtatatatatgtgtatgtgtatatatatatagagagagagagtgtgtgatgagagagagatgtttgtgtatacatatatataagtatacatattcacattgacaatatactttatttgggttcttatctaaatattagataagacattttaaaaaatccacaactacccttcaaaaaaatctgtaaagtattacccatatataatttttactttttggcttgtaaacttcagacaaactttttttaattaaataatacattgagacactcaattttgatcatttctgtaaagctgaaaacctacaggaacctgg

SEQ ID NO: 321922 - DNA, 610 bp, Homo sapiens
attttagacaaattttgcgtaggagagcaagcttctctgtgaataaaatacattactgaaatcttgatattttcagacagattcctgatgtaaagttttatgtctttctgtcatttttsgtgcagtattattatatagatttttttcaaatgcattgttttcatgaattcatttataacttttaatagctcatttcaatattttgttacttatggaggtacaaataatgctctttgaagcatttttaaaaggtatcctaactattaagtgggggtaaggttatatctgaataatcttcagaacttttatttaatattgctctagattactgttgtctctggtatttaccatcctccaactctatctactaattgtgttattcaaaagtgatgtttttctctatttatttaccgaaattgttattgctattgtaaataaaaacctcattgtttagtacattgtttctaacttagtaatcaactaatttagaagattcagtaggaaagataggagaggtcttatatgttatacccagtcaatagctatgctagtggtgagtgctatgcacacagttgcatgggacatgacaataattacttcatttagaaag

SEQ ID NO: 321923 - DNA, 622 bp, Homo sapiens
acttcactacagtgaagtaaatgaacatctatagtgccttctctttgtaaataaatactatatatttcaccatttttcctctatcctatatatgagcttttgagaagactggcattaggrctcattgggtttttagaaatgatgactaaccaacaccatataaatatttagcacatactattttcttttgttttttataatttcagcttttattttggattcagagggtacatatgcaggtttgttacctgggtatattgcataatgcaattttacttagagtaaaattgatgtatgattgatcccttcacccaggtagtgagtatggtgcccaataattagtttttcattccttgttcccctctcttcctccacccccttcactctagtggtccccagtgtctactgttgccatctttatatatggcatatgagctatagggtccccattctttagctgtatgaaacctattatttagctctcacttttaagtgacaacatgtgatatttggttttctgttcctgccttaattcacttaggatagcagcctccagttgcatccatgttgctgcaaagtacacgacgttattcttttttatggattcatagtactccatggt

SEQ ID NO: 321924 - DNA, 557 bp, Homo sapiens
atgatgtttttctcatacatatatccacttgacctagtgcaatgtattaagatggtcctccgctccccacagcaccaaagcttcatattattgttgttgctgtagatcaggaacgtgtgtgggtttgtttctggacttttttccattgatcagtttgccatttttagccacaggtatttcttttattatttcctgattaagatataacttttatagaatggtgccacttttgaaatcaaaatgtgacatgaagtttagtttatttaatttggtggcacaagtataacacagatactgattttccagttgagtaggacagcagaaattccataatttgtatctctcgccaagtgtcttmgtcacttggcttatggaatcactgaaataatgagttctcatatcaatacctaggaagttactgttaagatacaagagttaagttgcctttaagatgcaagagttctctctaagttatgagtctctgtacttctgtctgctttgggacacataaaagaatgctggagaagttcaatggcaaattggaattgtttcacact

SEQ ID NO: 321925 - DNA, 643 bp, Homo sapiens
atataggtatgtgtgtgtgtgtgtgtgtgtgtgtgtgtgtaaacaaattattaagtatcagaggcagatttggagatgatacaaaacttggaagacaggaccagcataggatacgttttcattttttagtcttagtgtaaggacagtctgcaggtgcagtggactgcaaataactaacactgtggtagagaatctatcctcttggcatccaggaatgagcctgggataactgcaggtactagaaagtaaggtggagaggcatctcagaaaagagaaatccagaagataagagcccccaaattggtatacaaactttgcccaattctcaggctgacaggtgaattgagcatgtctgcagcagactcaaaacatcctgcagctaaggctaaaagaacaacactgagattttggctgtctccctccataggcacacaaagtatgtaatttgagcctaaccaattaattgccttctaatataaaaatagtawctttctttggaggaatattagagaatgcagaaataatgacttggatacaatacagactggcttcacattcaaagaaaaaatatatgattaacagagtccaaccctgagacgacccagatgttgaaatttcagataaagactataaatcagccaat

SEQ ID NO: 321926 - DNA, 581 bp, Homo sapiens
ttaagggacttacagttccacatgcctggcaaggcctcacaatcatggtggaaggcaaggaggagcaagtcacatcttacatggatggtgccaggcaaagagagcttgtgcagaaaaactcttgtttttaaaaccatcagatctcatgagactcattcactatcacgagaacagaccaggaaatatccacccccataattcaatcacctcccacggggttccccccatgacacgtgggaattgtgtgagttacaattcaagatgagatttgggtggggacacagccaaaccatatcaaccattatggaaaacaaagaaaaaccaaaataagttcattgtggattagaaagattatgaaataataatccaagtccattgttaactcaaggacatttagaaaccataaagaaggaaaagaaaaacttttattgaagtktggaaaaacatattgaagaatatttaccattacaaataaatacaagggcctgatacttttatggtttaattttttttgctataataatgagatagtttattccattgtttttaaagtgaaagactataaaaatggatgatactca

SEQ ID NO: 321927 - DNA, 581 bp, Homo sapiens
ttaagggacttacagttccacatgcctggcaaggcctcacaatcatggtggaaggcaaggaggagcaagtcacatcttacatggatggtgccaggcaaagagagcttgtgcagaaaaactcttgtttttaaaaccatcagatctcatgagactcattcactatcacgagaacagaccaggaaatatccacccccataattcaatcacctcccacggggttccccccatgacacgtgggaattgtgtgagttacaattcaagatgagatttgggtggggacacagccaaaccatatcaaccattatggaaaacaaagaaaaaccaaaataagttcattgtggattagaaagattatgaaataataatccaagtccattgttaactcaaggacatttagaaaccataaagaaggaaaagaaaaacttttattgaagtgtggaaaaacatattgaagaatatttaccattacaaataaatacaagggcctgatacttttatggtttaattttttttgctataataatgagatagtttattccattgttwttaaagtgaaagactataaaaatggatgatactca

SEQ ID NO: 321928 - DNA, 549 bp, Homo sapiens
taatatctgtatagagcaatgagaataaacaaaatataactacatgcaacagaatagatgcatttcacgcacttaagtgctgaatacaaaaagccagacacaagaattcatgtgctattattccacacctttataagattaaaacatgggcaaatctacagttttagaaatsaagttagtgattacccttaggagatagtgactagcagaagatagaaggaggcttccgagtgtctgtaatctttttaaggtttcttgatatgagtgtaggtgcatggatttgctctgtttgtgaaaatcgttccaactgtacatttatgatttaggcattttatatgaattttctattttaatcaaacaaatataatggtggtgtttgaggaattgataccctttatttgataaggtgatgtaaagataaggagattagatgaaggattgcacaattccatcatattcagaaagattgaatcaagcagtagcaaagcaagaagatttaaaacaaaggagaatattaagaccagaagacagcaggaatggtaatattaa

SEQ ID NO: 321929 - DNA, 592 bp, Homo sapiens
tatgtcatgtatccaccattaatatatacaaaattgatttaccagtcaaaaaaggcctgcgcttcacctattcaatcctcctcctctcgccttggatcattggcagtctctcattgktttactgttcctctagttttgttcttttcaacatactgttcaattgggatcatatagtctgtagccttttcaggtgggattctttcacccagctataagcatttaaagttcatccaggtgttctcatagcttgatagttcatttctttatatttatgaagaatactccattctaagcatgaacatctctgtcttttaaatgatgctgcagacctttcacatttaaagtgattattagtatttctgttttctatgaattacctctgttgttttcatttcttttttcttttctaccttctctagttttaatcattgcatatggtttctattttgttttttattgtcagcatataacttatacttttcttaaaaaactgagtacttgccctagagtttgcaatatacatttacaattaggtccactttcataaaactgctttctgggtagtagggtcatctttcaatacagtattctc

SEQ ID NO: 321930 - DNA, 538 bp, Homo sapiens
aaatttacataaatgtttaataaaaatataaaggtgtatattgggatgaggtataaggtagtggagaaagaagaggaaaagcaacaaacagaaataaacttttgccacaatccagctaggtctgtgggctaagctcttacccaaagcatcttagtgtaaytgagcctcacaacaacttttgggattaggtattattatccgaattttattctgagggaaacaaactttaaaagagaacacatattgcccataatcactcattagaggaccagaactcaaattcaggtctgcattactcaatattatagggcctttctaatatataacactgcctctaagatagttaatctttcacagaatgaaattgattagaaacacacacacacacacacacacacacacacacacacacacaaacacacacacacacaaaacttccagatgtttaccagataggtagaagcagacaattttaagaaggcatgatctagggtactctatcatccctcctttcccaccccatttttttttctttttt

SEQ ID NO: 321931 - DNA, 521 bp, Homo sapiens
tctcaacttccatatttatcaagaaaatgcatattacagtgctccagcactgcatatagactagaatagttaaaattaaaaggactgatatcattgagtgttggccaaaatgtggaccaacttaaaaagcaatactatttcacttctggtggattaaacatatatataaaactttggaacttgccgtatcttctaaagctaaatatgttatrcttgatgatgatctaagaactcttctcccaggtggaattgaaaatgtacttaaatgtgtgttaaagcacatgtataagaatgttcatagcagcattattaataattgttaaaaacttagaatgcttttccagtaaggaaaatggatgaatctttactaaacaaaatgtcatagttgaatttcacaaactattttgaataaaataaacctgttgtaaaaatgtacatatgttctctgttccatttatataaaactaaaaaataacaggcaaaattaatttgtggtgatagggaaaaatgactccttttta

SEQ ID NO: 321932 - DNA, 521 bp, Homo sapiens
tctcaacttccatatttatcaagaaaatgcatattacagtgctccagcactgcatatagactagaatagttaaaattaaaaggactgatatcattgagtgttggccaaaatgtggaccaacttaaaaagcaatactatttcacttctggtggattaaacatatatataaaactttggaacttgccgtatcttctaaagctaaatatgttatacttgatgatgatctaagaactcttctcccaggtggaattgaaaatgtacttaaatgtgtgttaaagcacatgtataagratgttcatagcagcattattaataattgttaaaaacttagaatgcttttccagtaaggaaaatggatgaatctttactaaacaaaatgtcatagttgaatttcacaaactattttgaataaaataaacctgttgtaaaaatgtacatatgttctctgttccatttatataaaactaaaaaataacaggcaaaattaatttgtggtgatagggaaaaatgactccttttta

SEQ ID NO: 321933 - DNA, 589 bp, Homo sapiens
taagaatgttcatagcagcattattaataattgttaaaaacttagaatgcttttccagtaaggaaaatggatgaatctttactaaacaaaatgtcatagttgaatttcacaaactattttgaataaaataaacctgttgtaaaaatgtacatatgttctctgttccatttatataaaactaaaaaataacaggcaaaattaatttgtggtgatagggaaaaatgactcctttttaaaaggttaatgactgggtaggcacacaaagtatatttcttgtggtactgataatattcaacttcttaatccatgaatgctttcatgggtgttttcactttatataaagtcatttatattttttattttacacttctttttacatatgttacacttcaacaacatgtttaccaaataaataatccaaaaatatatatatttggtcataaatcaggtatggttcttcaacaagaatctgtctccccctactaaacagcaggactcctgtgctccttagagttgaagatacamacatacacacagacaaacacattcacatacagccaaacacacacatgcctggaaaatattgctg

SEQ ID NO: 321934 - DNA, 503 bp, Homo sapiens
cattggacagtgtctgattttgggggaagttattactctctttaggattaactctgaaaacctcaactgtatgtaattagaacacactgtgggttgtatttcattagatattcttggatctgtatcttctgtttagactgggaaattaaatttctgtttagatggtgaaacagaatttaatccttagcagtagcagtatagcattgagatagtttattcagtaatactaatttgatcttgtaaaatcagagagtaaggaggaggagtagagagagaatgggggctttgtttgtcagctaattgtgaaactgtcagctttctcattgttggtattcttaaaaatacagctaaagcatacacatgtctgtggataattggataataattgctagtctatttagttttgcatttagcttctctagtaaagagggaggataaaataaagtaactttattaatttaaartatatacccattcccagatattttattttgttttccctt

SEQ ID NO: 321935 - DNA, 624 bp, Homo sapiens
acaatgttacactatgtaataagagttcatataggcatttcacatttttgacagcattgaggcataacatttaataaaatgcacatttaaaatatacaatttaatatgttttattggcttatgtataaaaccccaaggctatcaccataatcaagataaggaacccatatatcaaacccaaaagcttactcataccccttcacaatctgttcactcctcccaccaactctcaaataaccacagatctgatttctgccactacagattgactggcaagttttagaatgttatataaatggaatcatgcagtgatatggtttggctstgtatccccacccaaatttcatgttgaattgtaatccacatgtgttggaggaggggcctgggggggtggtgattgaatcgtgtgtgcggacttcccccttgctgttctcgtgatagtgaatgagttctcaccagatctggttgtttaaaagtgtgcagcgcttcccccttggctctgtctctcctgctccatgtgaagatgtgcttgcttcccctttaccttccaccatgattgtaaggttcctgaggcctccccagccatgcctcttacacagcctgtggaattgtgagtcgattaaa

SEQ ID NO: 321936 - DNA, 633 bp, Homo sapiens
atcaaaattgaacagttgttagtgagacaaacaaagaaaaaagagagatgacccacataaatcaaaaatcataatgcaggcattacaacagataccacrgaaatataaaggatcacaagagaatattgtgaacaactatatgccaataaattggaaaacctagaggaaatgaataaatttttggatacatccaccttcgaagactgaaccaggaagaatttgaaaatctaaccagaccaataatgagtaaggatgttaaatcagaaataaaaaatctcccaataacaacagcacaaagcctaggaccagatgacttcactgctaaattctaccaaatttttaaagaactaaaatcagttctcacaattttgcaaaaaagtaaaaaggagtacaaactttcttactcattttataagggaagcattaccctgataccaaaaccagacaaggacacaacaataaaagaaatctacagaccaatattttgaatgaacatagacgcaaatatcctcaacaaaaaactaacaaatgaaatccaacagcatatcagaaggattatacattgcaattacgtgggattatttttctaggaatgcaaggatagtttaacatatgcaagtcaataaatgtgat

SEQ ID NO: 321937 - DNA, 633 bp, Homo sapiens
atcaaaattgaacagttgttagtgagacaaacaaagaaaaaagagagatgacccacataaatcaaaaatcataatgcaggcattacaacagataccacggaaatataaaggatcacaagagaatattgtgaacaactatatgccaataaattggaaaacctagaggaaatgaataaatttttggatacatccaccttcgaagactgaaccaggaagaatttgaaaatctaaccagaccaataatgagtaaggatgttaaatcagaaataaaaaatctcccaataacaacagcacaaagcctaggaccagatgacttcactgctaaattctaccaaatttttaaagaactaaaatcagttctcacaattttgcaaaaaagtaaaaaggagtacaaactttcttactcattttataagggaagcattaccctgataccaaaaccagacaaggacacaacaataaaagaaatctacagaccaatattttgaatgaacatagacgcaaatatcctcaacaaaaaactaacaaatgaaatccaacagcatatcagaaggattatacattgcaattacrtgggattatttttctaggaatgcaaggatagtttaacatatgcaagtcaataaatgtgat

SEQ ID NO: 321938 - DNA, 593 bp, Homo sapiens
gcataatactgcttgtctccaaaatatactacaaatctatagtaatcaaagcagtgtgatactgatataaaaacagacacatagacaaatggaacagaatagagaacccagaaataaatccacgtatgtatagccaattgatttttcacaaaagtgcaaagaataggcattgggaaaatggcagccttttcaataaatggtgctgacaaacctagatatctgtaggtggaagaatgaaactagatctctatctctcactatatacagaaatcaactcaaaatgggtgaaaacttaaatgtaagacccaagtctataacactacyagaagaaaactagagatattggcctgggcaaagtttttgtggttaagagttcaaaaacataggctataaaagcaaaaatagaccaatggattatataaagctaaagagctcctgtgcagcaaaggaaacaacagagtgaagaatgaagaagtaacctgtagaatgggagaaaatatttgcatactactcatttgacaagggattaatattaagaactcaaagaagtcaacagcaaaatatccaaataacctcatttttaaaatgagcaa

SEQ ID NO: 321939 - DNA, 633 bp, Homo sapiens
aaaacataggctataaaagcaaaaatagaccaatggattatataaagctaaagagctcctgtgcagcaaaggaaacaacagagtgaagaatgaagaagtaacctgtagaatgggagaaaatatttgcatactactcatttgacaagggattaatattaagaactcaaagaagtcaacagcaaaatatccaaataacctcatttttaaaatgagcaaaatatctgaatagacatttctcaaaataagacatacgagtggctaataagtatatttaaaaatgttcaatatcactaatcatcaggggaatgcaaattaaatccagagaggtataatttttccccaattagaatggctgttattaaaaaaaaatcagaaatrttggtgaggatgtggagaaaagggagctcttatacactgttgatgagaatgtaaattaggacatctattttgaaaaatagtataatgtttcctccaaaaattaaaaatttgaataccatatgatccagcaatcccattacttgatatttacccaaaggaaataaagtaagtgtatcagaaagatatatgtatccccatatttattataacactattctctatagtcaagatatggaatcagcctaattgcttatc

SEQ ID NO: 321940 - DNA, 608 bp, Homo sapiens
gtatttcacgttgttaccatgacaagcaatataatattatatgacatttctaaataccaagccttctggagaaagtattttctataaattggcactacctggtgtggtggaaaagcgtggagtataaaatgtgtcaggcattagtttgaatctccactggataaatctttgttgaacgcttcctacttgtattagtcagagttctccagagaaagagaaccagtaggagattgtttatatatatgaagatttattamgagaaattggcttacatgggagctggtggtgtaaatcagttggagtttgaggacctgagaaccaggggagtcaatggagtaaatcctactcccagtgtctgagaagatatgagatgcctcagctcaaacagtgaggtaggaaaactgtagtgaatttcccctttcttgctttttacatttttatttatttttatttttttagagacagggcctcactgtgttgcacaagctagtcctgaactcctgggctcaagtgatcctcccatctcagcctcccaaaatgctgagattacaggcttgagccactgcacccagccttttgttgctttttgttcaactcagaccattaaa

SEQ ID NO: 321941 - DNA, 564 bp, Homo sapiens
tctccagagaaagagaaccagtaggagattgtttatatatatgaagatttattaagagaaattggcttacatgggagctggtggtgtaaatcagttggagtttgaggacctgagaaccaggggagkcaatggagtaaatcctactcccagtgtctgagaagatatgagatgcctcagctcaaacagtgaggtaggaaaactgtagtgaatttcccctttcttgctttttacatttttatttatttttatttttttagagacagggcctcactgtgttgcacaagctagtcctgaactcctgggctcaagtgatcctcccatctcagcctcccaaaatgctgagattacaggcttgagccactgcacccagccttttgttgctttttgttcaactcagaccattaaagacttggatgatgcccaaccacattgtgaagggtaagctacgtaactgaatccaccaattcaaatgctaatctcatccagaaacaggctgaaagacacaaccagaaagaatattttatctggcaccctgtggtcaataaagttgatacataaaattaa

SEQ ID NO: 321942 - DNA, 580 bp, Homo sapiens
agttatctgttcccacataaccaacatacgaaggtgggacaagcatatgaataaccactataggtatttctaataagaaaggagaacaatggaagttacaaaggagtctttgttcctaggaagttttaaattcagtcaggaaaaatttggaagtttcttgattaggactctgtcctgtatctgcccaggagttattcatcaaagtcaaaattctatgaacagtgtgtaaaaggctctttaagatatcactagcagtcttctcaaaatctttagagtttattcagctccattcattaggtggttccaaagccactcttacattttaagtttttattttggcatcactgcacttttgtgtcaaaatatatatttgctgtgtatgcttgagtaacaaataacacaaaacttagcttcttaaggaatctggcagtgtcttagctagttgagtttggcttagggtctcttaaaagrttacagttgaagtgtttgctagagttgtagtctctgaaggcttaactggggctgaacgattcactttcaagtttgctcatgtggtttttgcagaaggcttcagttcttt

SEQ ID NO: 321943 - DNA, 472 bp, Homo sapiens
ctttacatatttgttcaatgaataaatgtgtgactcatggcagaaatgatgttattactttaactggaaaattatttaatgtattgatatatccagagcttctaaatggcaggttagatatagccagctcattagaagatggggatagtattggaggacttttaaaaaatatgcatttgcataaaaatatactatattgtatttatacatrgtatattttactataaatataccataaaatatatactcattttacttggattgagtattcttaggatggttttggtgggatgcaatggggtacattgaagtggaggagactaaagctatccactccagtgtcccctgggccctttggtgactaggatggaagaaatcctcatgttattaaaacagtggtacttatgtgagaatgtggagtgggtgaagtatatctgcggctgagggctgagggctggtggtggtcgtcatg

SEQ ID NO: 321944 - DNA, 472 bp, Homo sapiens
ctttacatatttgttcaatgaataaatgtgtgactcatggcagaaatgatgttattactttaactggaaaattatttaatgtattgatatatccagagcttctaaatggcaggttagatatagccagctcattagaagatggggatagtattggaggacttttaaaaaatatgcatttgcataaaaatatactatattgtatttatacatggtatattttactataaatataccataaaatatatactcattttacttggattgagtattcttaggatggttttggtgggatgcaatggggtacattgaagtggaggagactaaagctatccactccagtgtcccctgggccctttggtgactargatggaagaaatcctcatgttattaaaacagtggtacttatgtgagaatgtggagtgggtgaagtatatctgcggctgagggctgagggctggtggtggtcgtcatg

SEQ ID NO: 321945 - DNA, 572 bp, Homo sapiens
aagccaatctttcattttacaaagaaaatcttctcttaattggccagtttaatgacaaaatcttctaagagtgtagatgatatggccaaatctctgcaaattaattaatatatgggttatatatgtttatgttaaaattatataaaacctatgaagtggtttctgatcacatttcatgaatttcattcccttgtgttcttcactggtatcttgagatatcagtagcttcatcttctctgagtcctcttaaacagttttctagaggataacactctgaaatactcaagtgtatgaatctatgggtgatattatcactggraaatttatttcatgagtgttgtcccacgaaattaggccattcccgttcactcatttattctgtagacacatatacatgatctctacaagatagctgcttactctgataaggcagtctttgaaaggtttatttgaaattatgtccaatagttaacaattattagataatatcccagaaatagtgactaagttggtgttatatttccttgactttttcttttaaatgcatataggttatcgctacaattacccca

SEQ ID NO: 321946 - DNA, 523 bp, Homo sapiens
gagtttccatttcttacagattatttgggttatttgtcagccctctactagccaatttgtgttgaaaactgtctagggtcacacagcatctggatttagtttccttcaaatctagttggcatcattggtagagatcacatcttatgartggaaattgaattggaaatacattttgctaaaagtaagctttgctcttgctttcagggaagtgggtgcgtggttcactcaggctgatgccactgaaggtaaagtgtaggtgtcaaggcttgcaaagtaattgaccaaaggaaattttgttaaaattaaggctctttttagaatgctggaattaggataaacacacctcagtttttattctggcttagcacttgtagacgatgaagacttggttagaaaaccaaatttattcatttgaaaaatgagatgaataataccatagtttctcacagcatcactggtaacttcaaataagataatgcatatggaagtgtttcaaaaatttccacattatatacgatggtaa

SEQ ID NO: 321947 - DNA, 586 bp, Homo sapiens
ttataattacctcttctttctttgcccctgcccaagaagaacatattctacagtcattctttcctccgcctgtacaacttgaaatccaataaggtctaaatactaaatcaaaggttttgttctgtctcacacaacttaaactttgattatagtgtcttgtaggtgagtggtgagaaaaggaatttgttagcactgaattagactgggtaagatttttatttaaggatatttgaatctgctagttctaattgctggaattgagtttaatgaatagaacattaaaaacaagacatttaaatattataatttcaacgatagtcatttcatatttcattgtgaccaggttatactacatttttaaagatacattatttstcatatatactgatgaccccaaattacagaaattgtaatatgcagtctttgcttgatgactaaggtctgtcatgtgtttaacattatattcacttaagagcatatagtttgtcaacctgccctgccttagagaaaatctctggggccattgaatctatataaggtctataaatagaagtaatttaggacagaaataagaacagttgcctag

SEQ ID NO: 321948 - DNA, 564 bp, Homo sapiens
tcttccattgatttatagagtagaacgttggtattcaaaaatgccmgttttccaccttataacatggacaaaaaaaccaaagttctatatctttagtagtttataatgccaccaaggcatgaatttaagtggtatattgtgatatatgtgacttacttgctacttagtgaacctagcctgccatccattctttaaacagagttttctactcatcgatgcatttacagtggaagaaatagcaagcagagaagttctgagaagaaaatgtttttggaggtgaatgttggtgaagtgagcagtaatagaagtctgaaactaaaagggaggcctggtccagatgatgtataaaccatcataagacatttgccttttactttgagtagaatgagaagccattggaggggtttgaagccagaagaatcatgatatgacatgttttaaaggagtctttctgaatgctgtgttgaaaatagtctgagaagtgattcaggaagaagcagaaagttaaaaaccattgctattattttggtgaaaaatggtggagacagagaccaggattttaga

SEQ ID NO: 321949 - DNA, 532 bp, Homo sapiens
attgtgcagtgaattaaatataagttacctaaggtaaaggcgaaccagagtagatttaaaaaaacagtttatgttttaatttgcagggagggaatagaaaaaaaggcacaaggaataggaataaacaaaagtatatagaaggaaggaagaaaggaaggaaggaagggagtaaggaaggaaagaaggaaggatggaaggaaggaagggagcaaaggaagggagggagaaagaaagagaggagaggtttgggttggggcaggaagactctctatttaccaagagtaatagtgtgcaatgaactgaagaatatgactaatgcaatcctcagctcctgagttccagcaacataaacaacaacaacaaagggccctatatgtactagataaaaargagtaaatatttatttttgtgactttaggatggtaaaggatgttccaaatgtgataccaaagaccaaaaacaaaagaaaaggggcgcgaactttactgctgagaatacaaaataaaaaaggtaaacccaagcaaacaaaaca

SEQ ID NO: 321950 - DNA, 605 bp, Homo sapiens
gagttttacctttgaaagcttaactaattgaagccttacttttaatttccttttgygctcatttatagacatggcttcatctatatcctgtctcagtactaagataggctcgtgtgtcagctgctgcctcttgagcagagggtcttatttctagtgcctgaatggaattttacttggaaaagccttgtctattgctatgggcctttctaatccagatgttccccctccaaattcacattcagaagacaagaagaattatgttttgtttatttaatgttggtgtgtgttctgaccagatggatttagcttgtacaaactgattgtattgttagtgctactgatgtaggataggtgttaccatcaaccctgtgttttgattcttgcagcagcaaaggggtgttttacatgttttgaatcttaggcagtgattgtgccatattttaacataaattatggtactacataaaaagggattgaattacttccattgcatatagaaggaagattcctttaattgagatctgacaatgtaacacagaagtatatttcaaaacaattaagcctcatgattttgtttggagaattacgaatgctgtaggcactgt

SEQ ID NO: 321951 - DNA, 605 bp, Homo sapiens
gagttttacctttgaaagcttaactaattgaagccttacttttaatttccttttgtgctcatttatagacatggcttcatctatatcctgtctcagtactaagataggctcrtgtgtcagctgctgcctcttgagcagagggtcttatttctagtgcctgaatggaattttacttggaaaagccttgtctattgctatgggcctttctaatccagatgttccccctccaaattcacattcagaagacaagaagaattatgttttgtttatttaatgttggtgtgtgttctgaccagatggatttagcttgtacaaactgattgtattgttagtgctactgatgtaggataggtgttaccatcaaccctgtgttttgattcttgcagcagcaaaggggtgttttacatgttttgaatcttaggcagtgattgtgccatattttaacataaattatggtactacataaaaagggattgaattacttccattgcatatagaaggaagattcctttaattgagatctgacaatgtaacacagaagtatatttcaaaacaattaagcctcatgattttgtttggagaattacgaatgctgtaggcactgt

SEQ ID NO: 321952 - DNA, 605 bp, Homo sapiens
gagttttacctttgaaagcttaactaattgaagccttacttttaatttccttttgtgctcatttatagacatggcttcatctatatcctgtctcagtactaagataggctcgtgtgtcagctgctgcctcttgagcagagggtcttatttctagtgcctgaatggaattttacttggaaaagccttgtctaytgctatgggcctttctaatccagatgttccccctccaaattcacattcagaagacaagaagaattatgttttgtttatttaatgttggtgtgtgttctgaccagatggatttagcttgtacaaactgattgtattgttagtgctactgatgtaggataggtgttaccatcaaccctgtgttttgattcttgcagcagcaaaggggtgttttacatgttttgaatcttaggcagtgattgtgccatattttaacataaattatggtactacataaaaagggattgaattacttccattgcatatagaaggaagattcctttaattgagatctgacaatgtaacacagaagtatatttcaaaacaattaagcctcatgattttgtttggagaattacgaatgctgtaggcactgt

SEQ ID NO: 321953 - DNA, 577 bp, Homo sapiens
ccccattcactagctcatggaggatcctggttgctggtgtcaccactgcagctgaatctacctcagattctaacacttctgtgtgtcttggctgctactggggtgagtaatgggcttcctggtatggcctccattgctccgttctgcctgccaggagccataatagctctggccatcaacctagtcagatttaaagaggctctccattctattcttactttactcatgtaaagtgtccttcaacaggacatgagatttggttttctcagaagccacctaaggggccaggtgatgtaacctgaaagtgagrgagttagttcctgagttaatcctaatgtgaatcagtaagggagggaagaagacatctagagttagcaaataaattccattcctttacttcctctgatatacagaggcatggagtttctggttggcttccctaaagacgtgatgtcctctatggccaagcaaccagttgggtcttttcctgaagttgtggccagataaaccttgactttgcctcactttttatgcctctctttcctttccctgtgcttgctggttcgggattgcagct

SEQ ID NO: 321954 - DNA, 620 bp, Homo sapiens
gtgtcttttctttccctgagtttccctgtctcctcattttctttttcccatgcttcttttttattcaggttttccctctatcctttcaaatttatcctgagtgctactttgctctttaatctaaaatcatttaacaatttgcctaattggtgtgtaaaacgtgctttttaccaaaatcggctctataactcaggattggaatttttcttcccttgactaaggctgcctgccgctgagatgagcccacagtctaaaactgcacatacaaatgttcttgctgttgtcattatcaaaacaaatgctattgctgcgcatgcttgtctgatgttgtactgagcagataygaaggagtaggaaggagaaagaatgattctcgcactgtcttaaaattcctaatgtgtctctgacctcagcaccttaattttaaataatcagagttgcatatgtactgtgcttttggtttaagggctgaaacatacacacacacaaatcatctagaagaagataagtttatatgagatatggtaatacattcaggccatgagagtgggacatttttcacaaacatgtctgaattctcctagaaaacttttaagggtgtcccatagttggtaatagtt

SEQ ID NO: 321955 - DNA, 571 bp, Homo sapiens
ttcactgtacgtttggagaaggagtggggcaaaaataaatagggtgaggatacggcataaattagatacctaacatgtatctctggctctcctcttcacactttagaaccacggtcacagaaggtgagagtccgcatgagctcttctctcctttggcctaactgactttctttcttctcatggaaaatatggatttcctgcatttgttctggtgagtaactcgaaggcaacatagcccgggatgttgggcaccagaacaaatatcctggataatctacctgctaaacacataggtgaaaaacaaragcatcttattttgtgtgtgtgcacatgtattgatgtttcctctttatctgctcatggtaacaggtttcctcctcttctgttttccctttcccctttcctccttcctcttaatttatagaaaagagtgggggtgggggttaatgaaaaatggagagacttctttttgtctgataacataggatcattcattagtcagatctatgggcttcctgacctaaagtgagctccaaagctctgcctggccctgatgatgtgtttgggagaa

SEQ ID NO: 321956 - DNA, 549 bp, Homo sapiens
aaggcagttcttgataataattaagagaaatagatttgttatcaaattctgtgtttctgatttagtcactcttgctgcctgggcttcctccaaaattcctcccagtatagtccagactagacttagctcaagaaatttaaagacttttttcagtttggcatctccttatgagatttcctccagcccccagttgactactggctgaagtcctctctgctgtactctagaaacttgtgcatgttgcctttcattattcctaattgctgagtgccagggatttctcaagtgtcctataggactcatcattctctcagacaattttacgttttacacaaatcaatccaaaccagattgtatctgtcatggtgtgacctagttggccatgtgctgtccaagcaaggtattaggwtgatgcaaaactaatcgcggtttttgtcattactttttatataatctcaaagtaccatgtaatctcatgggaatctcatatgactagaaatagtaggataccttatgtcatcttttttactcaaaaattttattctgcca

SEQ ID NO: 321957 - DNA, 361 bp, Homo sapiens
  misc_feature (1)...(361): n = A,T,C or G
ggagttgctttttatcaatgagcaaagaaagtagttacngagatgaaatctattcctgctgaagatactgtgaatattattgaaatgtcaacaaataatttagaatattacaaaaatttagttgataaaggagtggtaaattttaagaggactgactccaattttgacacaaattctactgtkggtaaagagatcacttgctatagagaaatcttttatgaaaggaagagtcaattgatggtgcaaacttcattgctatcatattttaagaaattactagtcactgcaaccttcagcaaccactgccctggtcaatcagcaggcatcataattgaggcaatatcctccaccagccaattat

SEQ ID NO: 321958 - DNA, 482 bp, Homo sapiens
  misc_feature (1)...(482): n = A,T,C or G
ttatgagcattggattctgacaaacctagcttatgttggatgaggagttgctttttatcaatgagcaaagaaagtagttacngagatgaaatctattcctgctgaagatactgtgaatattattgaaatgtcaacaaataatttagaatattacaaaaatttagttgataaaggagtggtaaattttaagaggactgactccaattttgacacaaattctactgttggtaaagagatcacttgctatagagaaaycttttatgaaaggaagagtcaattgatggtgcaaacttcattgctatcatattttaagaaattactagtcactgcaaccttcagcaaccactgccctggtcaatcagcaggcatcataattgaggcaatatcctccaccagccaattatgactcactgaagactcaaatgatcattagcagtattttatcagtactttttaattcagatatgtacttttttagacat

SEQ ID NO: 321959 - DNA, 582 bp, Homo sapiens
ctttgcacgttgtgagtgtccaataaatatttattgaaggaataaatcggtttttaaaagaccttaaatttggattaatgccgtctttagacttctctagggtgatctggataatgaagagagctacacctggcagaagtcttaaaaatttcctccaaatgggaatgccgagccctcatccaaccttccacgtttccaccatcgtcactttatctgcatcccctttcagctcttagagagagactaagtgtacctggatggatgtgttcttattgtcagcaatcaaaatcccaggctctgaatgtaatgtaactgagaggcaagaaaaatrctggcacttctggattttagtctttcttgatctacttacaagcctctttttgtagggatggcaatgctactccccatctacaggcatatcctaataaatgaggacaagagcaagacaatggaggattatgattttcaggttttgtttctctatctctgtctctctctgtctctgacacacacacacacacacgcacacacacacacacacctcaaagatgaaggactaaggattaaacagaaatccaacca

SEQ ID NO: 321960 - DNA, 582 bp, Homo sapiens
ctttgcacgttgtgagtgtccaataaatatttattgaaggaataaatcggtttttaaaagaccttaaatttggattaatgccgtctttagacttctctagggtgatctggataatgaagagagctacacctggcagaagtcttaaaaatttcctccaaatgggaatgccgagccctcatccaaccttccacgtttccaccatcgtcactttatctgcatcccctttcagctcttagagagagactaagtgtacctggatggatgtgttcttattgtcagcaatcaaaatcccaggctctgaatgtaatgtaactgagaggcaagaaaaatgctggcacttctggattttagtctttcttgatctayttacaagcctctttttgtagggatggcaatgctactccccatctacaggcatatcctaataaatgaggacaagagcaagacaatggaggattatgattttcaggttttgtttctctatctctgtctctctctgtctctgacacacacacacacacacgcacacacacacacacacctcaaagatgaaggactaaggattaaacagaaatccaacca

SEQ ID NO: 321961 - DNA, 415 bp, Homo sapiens
agtttatgatgattaaaactgcgttttctcagaaagacagtgtgatataaggctgagtaatttaaacttgctggatggagactgtcaggtggaattatgggtacagacttggaaaagattaggagcacaggggccattctcaacaccccgtggtcacatctcacctgcaatctcctcttttactcagacttacagctgttgctgactggaccacttgaaaatatcgacaagcatgggccatgcatatattgctggtttgaagractttttagacaaaataaaacattctcagataaagagaacaatagatatttctctgttggatgcataagtaagtgtctttctcataggcaaatcaggatctcagtgtcaccaaacaggtgtgatattgaaaactttcctacttaaaatatgt

SEQ ID NO: 321962 - DNA, 415 bp, Homo sapiens
agtttatgatgattaaaactgcgttttctcagaaagacagtgtgatataaggctgagtaatttaaacttgctggatggagactgtcaggtggaattatgggtacagacttggaaaagattaggagcacaggggccattctcaacaccccgtggtcacatctcacctgcaatctcctcttttactcagacttacagctgttgctgactggaccacttgaaaatatcgacaagcatgggccatgcatatattgctggtttgaagaactttttagacamaataaaacattctcagataaagagaacaatagatatttctctgttggatgcataagtaagtgtctttctcataggcaaatcaggatctcagtgtcaccaaacaggtgtgatattgaaaactttcctacttaaaatatgt

SEQ ID NO: 321963 - DNA, 481 bp, Homo sapiens
taccctaccccctactaccttacccagcctctggtaaccatcattctactttctatctccctaagtttaattgttttaaattttagctcccataaataagtgagaacatgcaaaggttttctttccctggcttatttaacttaacataatgacctctagtgtcattcatgttgttgcaaatgactgtatatttttcaaataacctgtcttcaagctcactaattctttcttctgcttgatcaaatctgctgggaagagactgatgcattctctattatgtcagttccatttcwcagctccagaatttctgcttgattctttttaattattttcatctctttgttaattttatctgataggattctggattccttctctgtgttattttgaatttcattgagttcctcaaaatggctattttgaattctctatccgaaaggtcatataactctgtctctctgagattggtcactggtgcctt

SEQ ID NO: 321964 - DNA, 575 bp, Homo sapiens
tttcttaccctcttaagtgcctctttcagtgacatgaagttaaaaccagatattgtgattcctcacctgatttttggttcctatgaaggtgcttttttgtggatagttgttcaatttgctgttcctgcagggaggatgatcagtagaggcttctagttggccatcttgctctcagttttctctaagttgttcatctttacagcactttgacagaaattaactctttttctgagtgcaaaaggtcagtcacacaaccaatcaacagagaggtcaagtgatactcccatgaaatagctggttaagaaacaggtcttttaaaagctgatcttataaaataaataaataaataaataagcaaacaatacccccccmaaaaataacactcttgcttggaattacagatgctagtaaaggaataatttttgttaactagcagaggtatttacttaaatcatttcattgttattaaaattctttctataaagtaagtggttagagagctgcattgtaactaaaataaacattcctgactggggagaatatcaggagataaaaccatatttactatcttcaaa

SEQ ID NO: 321965 - DNA, 478 bp, Homo sapiens
agaggcttctagttggccatcttgctctcagttttctctaagttgttcatctttacagcactttgacagaaattaactctttttctgagtgcaaaaggtcagtcacacaaccaatcaacagagaggtcaagtgatactcccatgaaatagctggttaagaaacaggtcttttaaaagctgatcttataaaataaataaataaataaataagcaaacaataccccccccaaaaataacactcttgcttggaattacagatgctagtaaaggaataatttttgttaactagcagaggtatttacttaaatcatttcattgttattaaaattctttctataaagtaagtggttagagagctgcattgtaactraaataaacattcctgactggggagaatatcaggagataaaaccatatttactatcttcaaatggaatgaatttgaacaaagaaaatactgaataggaaggaaaaaaac

SEQ ID NO: 321966 - DNA, 478 bp, Homo sapiens
agaggcttctagttggccatcttgctctcagttttctctaagttgttcatctttacagcactttgacagaaattaactctttttctgagtgcaaaaggtcagtcacacaaccaatcaacagagaggtcaagtgatactcccatgaaatagctggttaagaaacaggtcttttaaaagctgatcttataaaataaataaataaataaataagcaaacaataccccccccaaaaataacactcttgcttggaattacagatgctagtaaaggaataatttttgttaactagcagaggtatttacttaaatcatttcattgttattaaaattctttctataaagtaagtggttagagagctgcattgtaactaaaataaacattcctgactggrgagaatatcaggagataaaaccatatttactatcttcaaatggaatgaatttgaacaaagaaaatactgaataggaaggaaaaaaac

SEQ ID NO: 321967 - DNA, 507 bp, Homo sapiens
acagaaaaccaaataacacatgttctcacttctaagtgagagctaaatgatgagaacacatggacccatagaagggaacaatacacactggggcctatcagagggtggaaggcaagaggaaggagagaataagggaawataacttattggcactaggcttaatatctcagtgatgaaataatctgtacaccaaacctccacaacacaagtttacctgtgtaacaaacctgcacctgtacccttgaacttaaaataaaagttaaaaaaataaatttgagatgatctccgaaagttctacttcattccaaggatgaatagcaaaaagatcctgaagaatctttgctacttggaaatcttaattagaatattttaaatatatttttaaagacatttttgacatttgatcacttctctaactctagtaggtagggtatggtgcaaacagtaggagagggatctactctaagacttgaagagcctaaacaaggatcagagtggaaggctgga

SEQ ID NO: 321968 - DNA, 507 bp, Homo sapiens
acagaaaaccaaataacacatgttctcacttctaagtgagagctaaatgatgagaacacatggacccatagaagggaacaatacacactggggcctatcagagggtggaaggcaagaggaaggagagaataagggaatataacttattggcactaggcttaatatctcagtgatgaaataatctgtacaccaaacctccacaacacaagtttacctgtgtaacaaacctgcacctgtacccttgaacttaaaataaaagttaaaaaaataaatttgagatgatctcygaaagttctacttcattccaaggatgaatagcaaaaagatcctgaagaatctttgctacttggaaatcttaattagaatattttaaatatatttttaaagacatttttgacatttgatcacttctctaactctagtaggtagggtatggtgcaaacagtaggagagggatctactctaagacttgaagagcctaaacaaggatcagagtggaaggctgga

SEQ ID NO: 321969 - DNA, 546 bp, Homo sapiens
tagtcgttggcatatttagagcaatacatagtttttaaggagttgcttsctacctccatttaacaaaaaataaaaagcagacctatcataaaacaagaccctagagttgcctacagttggccccaacccaggccttctgattccaggtctacagcactttgctctacaacccagaccctaatgtaaaataaaataaattttttttaaaaaaaagaagccaacactcattcattcagtagatttttcagcaaatatttaggctgttcctatgatataccctgtttaggttgagcaacatatgagaaacattttatagggggtcccaacatgaaggccagatttattatcaatccataatgattacttgctggcaaggtcattggctcaaaaagatatagagtaaattagaaacaaaaaattctgtgtagtaattaataataagcaaaattaaaatttagaaaaattacctttttgcctcttttctttaaatcttgatatctgttgaatctttgtatttgtttatatcttatgttaagtagttcaacc

SEQ ID NO: 321970 - DNA, 408 bp, Homo sapiens
agtaaactaaaaagtggtatatggttgcagatacaagaatgttgctcgatgtgtatatgtttgttttctgcctgaagtttgatataactgcactgactcaaaaaacacaggatgcacttttcctctgggaaagcgtccactgatagggtaacaaatgtggagttatatcattaagaaaatcagagtacaaaatgagaaagaaaggaaaaattaatatagaatatgtgaagaatagagaattacatatgaagtacagagaagtaaatgagtagcaaagggatgactatttcataaagtgaaacaatgactragaaagctttggagttagagtcaagctcaccttggttagaattccatctccatccgtactaaatacaactgtataagttgccatgctatacatagacc

SEQ ID NO: 321971 - DNA, 580 bp, Homo sapiens
tgggctaatggagttttattatggaggaaaaaaccaaagtcacatataaagtacacgtacaaataaaagcataatcacattcatttcttttgtttatttttcctctatttactcatttttatataaaaagataatagagacagcattayacagcagagacaagtgtaacctaaccccatgtatatatatatatatatatatttttaaattatactttaagttctgggatacatgtgcagaacgtgcaggtttgttacttaggtatacatgtggcatgttggtttgctgcacccatcaacccgtcatctaggttttaaattccggatgtgttaggtatttgtcctaatgctctccctccccttgctccccacccctgaacaggccctggtgtgtgatgtccccctccctgtgtccatgtgttctcgttcaactcccacttacgagtgagagaatgtgatgttggttttctgttcctgtgtctaaccccatatattttcatggggtttcacggggttacatttattcacagaaacagataatagatgtaagtcaagaactatggaattgtctaactgtgagt

SEQ ID NO: 321972 - DNA, 580 bp, Homo sapiens
tgggctaatggagttttattatggaggaaaaaaccaaagtcacatataaagtacacgtacaaataaaagcataatcacattcatttcttttgtttatttttcctctatttactcatttttatataaaaagataatagagacagcattatacagcagagacaagtgtaacctaaccccatgtatatatatatatatatatatttttaaattatactttaagttctgggatacatgtgcagaacgtgcaggtttgttacttaggtatacatgtggcatgttggtttgctgcacccatcaacccgtcatctaggttttaaattccggatgtgttaggtatttgtcctaatgctctccctccccttgctccccacccctgaacaggccctggtgtgtgatgtccccctccctgtgtccatgtgttctcgttcaactcccacttacgagtgagagaatgtgatgttggttttctgttcctgtgtctaaccccatatattttcatggggtttcacggggttacatttattcacagaaacagataatagatgtaagtcawgaactatggaattgtctaactgtgagt

SEQ ID NO: 321973 - DNA, 577 bp, Homo sapiens
cttaccctgtgctgctccttagttcagtgtgcaccagctcagatcacgcatcaagtgtaagcaatacagctctttgggaacatggggttgtaacatatcactgtgatcttttaagacaaagggcacctttgtgatccccactttgcatatgaataaaatgaagtacatcaactaattttccataggacccattgcaaacatcaggaataggacataaagctcagaaaacaatgttaatactctaaataatttggtaactctgtgcttgtatttctgtagtttttttttttttcttgcctggggcatgaattcagagaggttagaagagaaaagaacagagctttaaatgaggaagaaagggcagagcaagtgagagaatggaacagaccaatgatgcatgttctgwtagctcaatgccaggaagcattgagcagagtgtgatggggtgtgggagagggagctggcatgggagccacacccctcctcttaagatccagacaaagggagagtcacacagtctgttaaactctgaggtctaagaacagttaaataaatgagaccaaatttaagtagccct

SEQ ID NO: 321974 - DNA, 300 bp, Homo sapiens
cacgtgcggagggtctctgccccttggggtcacgtggggagggtcttgcgaccccgcctcctgggggggtcacgtgcgtcggcctcctttgacagacctggggactgtgccttgcacaccggccgcgacctagccctcwgccccccactcagtacttccatttagtcccgtggaacaggagagacctgttcccaatctggcccagaaactagggatggggggactgtattggagcgatgcattagagtatgaggtcgaggagtcccctaagccgggaatcgaacttggtgaggggggttg

SEQ ID NO: 321975 - DNA, 300 bp, Homo sapiens
cacgtgcggagggtctctgccccttggggtcacgtggggagggtcttgcgaccccgcctcctgggggggtcacgtgcgtcggcctcctttgacagacctggggactgtgccttgcacaccggccgcgacctagccctctgccccccactcagtacttccatttagtcccgtggaayaggagagacctgttcccaatctggcccagaaactagggatggggggactgtattggagcgatgcattagagtatgaggtcgaggagtcccctaagccgggaatcgaacttggtgaggggggttg

SEQ ID NO: 321976 - DNA, 615 bp, Homo sapiens
tttaatgtctcccttctgtattcacccagatttgattcttccttatctcaaatatattttataattctaaattattttctatgggttcattcttttttgtcctgatggccccaccctagttcagacccttatcactttactttatagtcatcttcctgttggtttctttgtctactaactttatcctctccaatctaccatcttcaatgacccacattaattcttcctgaagcagtgtgttggctacattattacactgcggactccatcagtgtattcacatgcctgtgccaaggcacatttccagttcaaatgcttgttaatttcatccrtaaattctttcattttatctactctttattctccactgcctgaataggagttgtatttctcttatttttgtctttatttattttatatctctgcttagaatgccatcttctccttatctttccccatacttaaattatgcatattcttttagggcccatcagaagctgctttcacaaatatgtcttcccagttctttgtgattcttttttttcccccctcttagagcaattagtctgtaccatttacatggtacttattttttactttgattataagtgcata

SEQ ID NO: 321977 - DNA, 568 bp, Homo sapiens
tccagatgtaatatttaaaaaaaatcaaattacttcctgtatttcatatgatttccctactgatttactaatgcttcatatgcagaataaatcataacagtaagttcatgtcccctgaatgaaagaactgccttttctgcagaccaagagtgaactgctgacactmattaaggttcgtagcacatgccttaccctaagcacgtgtggatttggttccatgaggaaagatgatttgccagattgcagctaacaggttagatgaactcaatcaaactgtaatgggaaatgcacacgacttcaccaatatgtgttagcagtaaagtattgtgagtttccagattcacagattcacatggctaaccagcaataagaaaagcaaaatgcactgagtacttcttatggtccaggtacatttctaaaggttttaataaattacttcatctaatccttactacaacctcatgcattagctacagtaattaccttcatctcacagacaaggtgtggagaggtgaagtcacttacccatagttacagaattgggaagtggaggaagtatggttcacac

SEQ ID NO: 321978 - DNA, 580 bp, Homo sapiens
agtctaaaatctgcaatgctatcccaaggcagaatatcttctttcttggggtacctcagtcwttttattctcttatggactataactgattgaatgaagcccaagcacgttataaagggaatctgttttaactcagtctactgatttaaatgttactcacatctaaaaaacaccttcacagaaacatgtggactgctgtttgaccaaacagctgggcaccaaaagctagccaagatgtcacaaaaaaattaatcatcacagcccgactcaccaaatatactcagagaaaaggacggcaagaactttcaggcaggctcaaagaacatctggagccatggattccacgggccttgacacgccatgtaatccaagtataaaattccatgctgggcctttctgtgggcatagagttacaagcattggtgcaatttttcactccattccaagtcctcagtttccctccaggttagagctcaccaattaatcctggaatttgactgaaggttttaaagaatcaactttagccgataaatggtcaattaaacttctgatcctgggagcataataaatgtatttacct

SEQ ID NO: 321979 - DNA, 475 bp, Homo sapiens
ttcatccctagaatttcttttatttaagaatactgaaaataggcccatagtctcttctggcttataaggtttttaccgagaagttcaccaatagcctgatggrcacttggaaggaaagaataatgtgtagagattaacactgtatatttttttccaagaagcaatgcaggaacttaacagaaaaatggaaagaatctacagaccctttgaaagaagtggcaggctgcagccttcaccatgagacaggtgaaaaattctaagtccccagagtatgggagtgggagaaactgcctccaggatacacatccccacaaaggaacctgaaaattcaggctatcagagaagaccttaaccctacccagatctggaactgatttagggagtgatgagaaatataaaagaagaaacggcggtggaaaatgcctggcaggcattcccagtctttagtgccaacctagggaagccattccttatt

SEQ ID NO: 321980 - DNA, 638 bp, Homo sapiens
tcacactcatttcagaaaaagaaagcgcagcagcagcagaaccatcacaaacactattcaattttaaatttgattttcaagataatgcaagtcaaaccatttgcccaaatatgtaacaaccacacacaataaaactcatatagttatcctacagtacccacatcagtcacttccacagacatgttccccaggttgctgtaaaacaaaagacccaaaatagtttaagaagggaaaaatttcagagagatatttgaaaaacagaatagcaatagattttgcttttgatttgctgacttgaaattagagatatgattttaaattatggaaaccaccaaattgtaccagaactggcaaatgtatatatactgagaactctgtacatagcctttgtagctctggagggaagctcaaagaatccttacttttgtgataggaaagaagctaaaaatcttgacccacagtcactttaacacacaatagaagtgtttgctgtggcatgctctaagctgcactctttgtcccagcatagttttggcaggtcattgcattctcaaaaagtggctagaaaatactaagttaaattaatatgattaagctttgtckcataaaattcttccactgtttcacatctgttaatc

SEQ ID NO: 321981 - DNA, 545 bp, Homo sapiens
gcaaagtaagaaggaacaaggaatgtagcaggggggtgatgctcttttaaggaggcagtcatcttggtgaagattttgtggatgacaattgaggagcatctaggaaaaattttgtcaccagccatgtagcataagatcatcccagataaaattgcatgtggaaaggacctaaggcaggatcgtctctgatatgttcaagaaacagtggggaatctasagtgagcaagagtcatgggaggcaaggttagaaaagtggtgggaggcagatcacatagccattattaggactgagtggtgtgagagatcctggcttgcctgtagaaaagccatgccatgatctgacttgcatcccaaaggttcactctggcctctctgccgaggacagtgggtaagtgttgaagaaaggaaactcatcaggaggctactggaataatctgagggaaaaggggaattgtgactgcttgtatcactgaaattgcaaaaactgcagaatttactgatggatttcacatggggcctgataataggagagtattcaaagattg

SEQ ID NO: 321982 - DNA, 561 bp, Homo sapiens
agtatcacatgatttatatcaggtgcttttagcaaaatatatgggagtagatagtaggggtatgtggatgggagaggaggaagctaatagtcttacaagatactttcatgtgttttccattatgcataattactcatcctaaggcaagaggattattgcataagcattattccaaatagcttcccattttagggggagagggaggggtgactggagagaggacaaataattataaaagatcaatgtccctgttctccaaatgaggagacggggctagagaggtattatgacctacctaagactctttatgtaatgtctacattataatgggccagatatattcctggaagtgcatttacctgctgaagattcatcttcccctctatagaatgaagctgtgaaaaaaaaatattctggaaaaagtatttsccctttaaacgtaaaaatgagctactgaacagaaggacaaaagaaaggaataataatcttgacagtcatcattgaatacacactggaaccctcgttctgactgcacctatatgctgacagggcacttcgttt

SEQ ID NO: 321983 - DNA, 561 bp, Homo sapiens
agtatcacatgatttatatcaggtgcttttagcaaaatatatgggagtagatagtaggggtatgtggatgggagaggaggaagctaatagtcttacaagatactttcatgtgttttccattatgcataattactcatcctaaggcaagaggattattgcataagcattattccaaatagcttcccattttagggggagagggaggggtgactggagagaggacaaataattataaaagatcaatgtccctgttctccaaatgaggagacggggctagagaggtattatgacctacctaagactctttatgtaatgtctacattataatgggccagatatattcctggaagtgcatttacctgctgaagattcatcttcccctctatagaatgaagctgtgaaaaaaaaatattctggaaaaagtatttcccctttaaacgtaaaaatgagctactgaacagaaggacaaaagaaaggaataataatcttgacagtcatcattgaatacacactggaaccctsgttctgactgcacctatatgctgacagggcacttcgttt

SEQ ID NO: 321984 - DNA, 570 bp, Homo sapiens
agccagtgatattttgaggtcaccattattcacaacagaacctgtagtacaactaatagattgatagatcgatcttctatgtttcctttcaggtctacagacccaaaagtaatttcaaaaattaagaataatggtagaaaactgtcctatgattcttaattctaattcctctgatcctttgaggaaatgtgtcacttttattctgccgtatgtgtatagcaaatgaggctgagaaagccaaaggagacaaagtggaagttgaagtcmaaaacagaagagatgtacagaatctcgctaaataatctgccagacctggtgactcacctccctggatactgttctcatactgagtcaaaaggaaagatgttgataaagatggaaaagaaattcggatatgcatcctgaaatggactatgctaattttcccaattatccaggtccatctttaaccataagtgatttcaaagtgaaatgatgactttcataaaattttcatttggttctgagataaaggaaagggaaatggaaaatcatctgaaaagtgttgcttggtgcataacgcttaccaag

SEQ ID NO: 321985 - DNA, 621 bp, Homo sapiens
ttccatgtgttaaatatttcttctcaccctagcgatcaaaacaacatcacatttaaaatcacataggataacttttatatatactgcaatctataatcatttaccaaaatgtgacttgggcttctatctaatttcaattccatatttaatcttgtgataatttgacctaggactcttgacaaaacaacattatctcagagtttgcaattttgttaacctcttgtgattgaaaaagggattatttaaaacttcccatctcattactctgagctctagctcagattttaaaagttattaccagatttaatttaatactttttcttctctgattatgagactaagctattaaggtttattcaatcagataagtcagtatcatggaagttttaaaatgattcttaattaattcatctttttatttgaatttgttcaaaataatctctcatttactttgtagttttgatgtaaaaaaaatcagtattctgccagkctgctgcagagtatgatttaaagaagactctttcacggtgtttttttctgtgaaggtattgcatcagattgcactggtcacactgaatttgctatgttaaatgaaaggaagacaagcttatcccatgcaaa

SEQ ID NO: 321986 - DNA, 555 bp, Homo sapiens
attgatccacaggttacaaaagtgacatggttttggaaggcaaaaagaacatccttaagatattatcactaaatcaatagtgtaaaaattgtctgagggcactattataaaatagttttgtttgcaagattttccttctttgtatgtactttgatcaacagtgacaactcactcctcatgtaatcattaactatttcctttactatccttactttgtgatttgggtgcrcaaaataattcattttcaacatttctccaaagggcttgggttttcaaaggtattagcttaacattgctttcataatgtatatctaaaattctatctttggatatataatgtctgcactatttttacctcttcttttgaaatgaatgcaacacttatttcctaaatattccaggtttatcaccattaaaaacttgcctgtggtatgaattgtttgattgccacctcactattaatggaagctgtttcagctgtgagctttaaattatgcagtgttgcatactcttaaatctttttacctattgtggatttgttttatttttttcatg

SEQ ID NO: 321987 - DNA, 507 bp, Homo sapiens
tagcaagacaccaggtcacatagagttttgcagccatgaatgaatgaactattggaaagtgaaggcaagaaagtatgaaagtaccattttcatttctggaaatggtatggctataggaaaaagtacaatttttcctaggaaatagagttcaaaatctttagcataaagttcatggctctcctcaatttcaccttaaccaagtgggaggcagtaatattttttaaaactaggttgattgggaggccaacgtggctgttcgcttgagcccaagagtttgagactagcctgggctctatggcaaaatgttgtctttacaaaggatacaaaaaatcatgctgtgtgttggtgcrtgcctgtagtcccagctaatggggaggctgagatgggaagatcacctgtgcctgaggagatcgaggctgccgtgattgcaccactgcactccagccaggacaagtgagaccctgcctcaaaaaaacctaggttgaggtgaaactggggaaagccatg

SEQ ID NO: 321988 - DNA, 331 bp, Homo sapiens
tgctatgtcatgttgataaagcatatcctccagtagctttctgagataaggtgtatgggtaggcaatatttaaaaaaccttaaacatctgagaagctctttatttaaccttcatatttaagtgatagtttatttgaatatagaattttttgatcgaaataaattcttaccagaattttaaaggcactgtgcatttccctgcctcaccccagtatattgcatygttactgagaaatttaatgccaatctaatcccaagttctttgtgtattaccagttattttctcacaggaatttttagtgcctttaaaaaaatctctaacattctgcatt

SEQ ID NO: 321989 - DNA, 629 bp, Homo sapiens
agggaaagtggaaatgttttcttttaaaattcaaactaggaacagagttgccaacttctcttgtttcccaacattgtctttgccctgtaacctgtcctatgaattctgagcacttttataagaacatgaatagcttatggtttggcactatatgtcatattatatttggcacttaatatgtcatatatgacatatatggcacttaatatgttatattaaggatcaaggtgtgtcttaatatgtcatattaaggatgaaggcatgacttaatatgtcatattaaggatgaaggcatgacttaatatgtcatattaaggatgaaggcgtgtcttagtctgttttgtgctgctataacagaatacctgatagtaatttacaaagaatgaaaattcattggctcacaattctggaggctgggaagtccagtatcaggtgctgctgtctgtcatggcatagtttctcctacaaaatttctaagccaaacatgtgttttgtttttgtgattgttccataaaaactctcttccttctcttcattggtgagtagggtgtggatgggggcaagagaggcatgccccagttttcaagtagagtttytaatttatacttggtttccatgtgggaaccacc

SEQ ID NO: 321990 - DNA, 519 bp, Homo sapiens
gcatcattccttagaaactcaagctccgggctgcctggtatagatacctccattgtaagaattatcttgttgctttgtcattacttgtttacacatgtgtcttccctagcaggttataaactgcttgagggcaagagagtagatcttcataaatttgttggattaaaagaatttagtaatttgtgcttgagattaaaagackttggatgctaaaactttgcaggaaatttgattttcagacataaaaaatgtatcacttactttgtgtgtttactctcaaacattatccacaagaatttgagtcagtttgtaataaatagtgcaaagggaaatggtggattataatacaaaactttttaagccaaagaaaatttaatttgaatatatagtcaaaataagaacaattacagagaaaaaaaaagaaaatctgatctctacacatcataactgacattgttgctttagtggaacctcagctttcgtgttgatattactagtagccaaagcataaaggagaga

SEQ ID NO: 321991 - DNA, 666 bp, Homo sapiens
ctttattatgtgcatttgaaatcactttcattgtatgcaaacattttctcttaaattttgcatttaataattcctaagaacttagtaatgttgttatgaactcttcatatatgtcactcaggagagctatgtaatttttgtccaccaacaatcatttaactatccccytgttttgggtaatttggaacgttttcccatgttttgctggttaataataatatatcaatatgagcatcttttttggtaaccctttagctaggagatggatgagatggcatatcagactccccattatgtttgaatgtgactagtttattcttgtcaggctttagggaatttcactgaaggaaaaaatctttgtcaatattataaaacatatagcttacttatgtttacttatgaagttgaatttgggtccacgtttttcaaccagttatatttcttctttggtgaaatacctttatattccttatgcccttccattttccaaggtccttctttaatcctccttctcctattagggatttaacattgtttactccacataaagtaatccctctcctttcctacagccttgaattctgtgaagatcaaagacacatggcaatgatttatgtacggctatactaaagcacttgggtatgaaaattctctctccagctagag

SEQ ID NO: 321992 - DNA, 666 bp, Homo sapiens
ctttattatgtgcatttgaaatcactttcattgtatgcaaacattttctcttaaattttgcatttaataattcctaagaacttagtaatgttgttatgaactcttcatatatgtcactcaggagagctatgtaatttttgtccaccaacaatcatttaactatccccctgttttgggtaatttggaacgttttcccatgttttgctggttaataataatatatcaatatgagcatcttttttggtaaccctttagctagsagatggatgagatggcatatcagactccccattatgtttgaatgtgactagtttattcttgtcaggctttagggaatttcactgaaggaaaaaatctttgtcaatattataaaacatatagcttacttatgtttacttatgaagttgaatttgggtccacgtttttcaaccagttatatttcttctttggtgaaatacctttatattccttatgcccttccattttccaaggtccttctttaatcctccttctcctattagggatttaacattgtttactccacataaagtaatccctctcctttcctacagccttgaattctgtgaagatcaaagacacatggcaatgatttatgtacggctatactaaagcacttgggtatgaaaattctctctccagctagag

SEQ ID NO: 321993 - DNA, 666 bp, Homo sapiens
ctttattatgtgcatttgaaatcactttcattgtatgcaaacattttctcttaaattttgcatttaataattcctaagaacttagtaatgttgttatgaactcttcatatatgtcactcaggagagctatgtaatttttgtccaccaacaatcatttaactatccccctgttttgggtaatttggaacgttttcccatgttttgctggttaataataatatatcaatatgagcatcttttttggtaaccctttagctaggagatggatgagatggcatatcagactccccattatgtttgaatgtgactagtttattcttgtcaggctttagggaatttcaytgaaggaaaaaatctttgtcaatattataaaacatatagcttacttatgtttacttatgaagttgaatttgggtccacgtttttcaaccagttatatttcttctttggtgaaatacctttatattccttatgcccttccattttccaaggtccttctttaatcctccttctcctattagggatttaacattgtttactccacataaagtaatccctctcctttcctacagccttgaattctgtgaagatcaaagacacatggcaatgatttatgtacggctatactaaagcacttgggtatgaaaattctctctccagctagag

SEQ ID NO: 321994 - DNA, 615 bp, Homo sapiens
aagtgcatgatcgggtcacatgtggagagattaatgtgattcagagcttggaaatrtgctgctttatgattattaacgagggtagcttggaagtgagaggactttgcaaacacatcagttgaaaaaatgtattttctaccttgtttatgagacacaaacatatataattcagttcaagggttgagattttctgttattgtgtgccagggattatttatcacaattgtgaataatttcccagtacaaattatcctcatcttatcatccaaatatacttcccttccacatcactcatgtcatgctgaaatctaaggccataaagtctaaacgatgaaataagtcttccttcagatggcagcatatggtgtgtgttggttggggttttttaaagcacagtgaaatttaccactgtcaaagactggcctcccagcttttttctcagttggtgactctggtgtctgaagctgatagaaaattatgcacttaataaaatatgagattgcaagggagagataaagccaaagtaagcagcagtccagcagaggagaacccactttcaacagccggtgccttcatgtctatcatgctgattgaagccatccagaggtaaaaaca

SEQ ID NO: 321995 - DNA, 615 bp, Homo sapiens
aagtgcatgatcgggtcacatgtggagagattaatgtgattcagagcttggaaatgtgctgctttatgattattaacgagggtagcttggaagtgagaggactttgcaaacacatcagttgaaaaaatgtattttctaccttgtttatgagacacaaacatatataattcagttcaagggttgagattttctgttattgtgtgccagggattatttatcacaattgtgaataatttcccagtacaaattatcctcatcttatcatccaaatrtacttcccttccacatcactcatgtcatgctgaaatctaaggccataaagtctaaacgatgaaataagtcttccttcagatggcagcatatggtgtgtgttggttggggttttttaaagcacagtgaaatttaccactgtcaaagactggcctcccagcttttttctcagttggtgactctggtgtctgaagctgatagaaaattatgcacttaataaaatatgagattgcaagggagagataaagccaaagtaagcagcagtccagcagaggagaacccactttcaacagccggtgccttcatgtctatcatgctgattgaagccatccagaggtaaaaaca

SEQ ID NO: 321996 - DNA, 557 bp, Homo sapiens
ttatatgacccataaccaagccgtctgctctcaagatctggctaccaggatgttcttcatagagttaattacaataaagagaaaatggaaaaacaaactggaaactgttaagagtttattttgaactaactccagactagcagtgggtttttctttcacctgctttgtacctggtatcttaactcggcactgaaaactgtcctctattatctgattattttctcattcccattgtctcttttctcttggaaggactcctaggagttggagattgggcccaagtacgtatattaatactctgtctttcaaatgttctcccatgttttctctacatctttggctttccatactgagagacgtaatgtatctcttctaaatgttaaagaacagttctttcattatggaaataatagttttaatttagagcaggagttctcaatcttggcaatattgacattttaggacacataattctttgttttgggggctgtcctgtgcattgtaggatgttgagcagcatccccggcrtctgcccactatgccatttgcacccccaa

SEQ ID NO: 321997 - DNA, 597 bp, Homo sapiens
attttgattgcaattgcagtgaatctagagatcaatttggggagatccaaattggggaggttctcaatattgaatttttgaatccatgaacatattatatctctccatttattttattcaattatatttttaagaatctggatgataagctgacttagggttaggtctgaaagatatctaagtggtcactaaacccaaatcatttattttatatgtaataaacattttttcatataggtgcctagtctttcttttccatccaactagccaaaacgtttttgattgtcagtctagtattctttttcttgctcattgaaggttaatttgagttaaataataaagtactcaaaggaaagagataaaaatttttttttaaatgttgagtacgcttagggttgaggccgattcttccctatagcacatgcattcgtgtgtgggcaaacacacacacagtgcacacacagacaccatsaaacctctgctcagagaaagatgctaaaatataggaggaaagtgactggaaaaagaagcaggagaactaaatataaatgtggactgcatatttgagttctctgccatgggtttcagtcaatgcca

SEQ ID NO: 321998 - DNA, 593 bp, Homo sapiens
gtcttccatatctggttcttggcaaaaggatatctttgcatattaagtgccaaatgcataagatacaaagtgcatgaaaaaaattaatcaatcaactctgagatgattagccaaggtcttttcatatgttgtccagacaataaatacaatgtttaagaaatggggatatgagaaatttttttttttgagacagtctcctctgtcgccctggctgaagagcagtggtgtgatctcagctcactacaaccattgcctccaggttcaagcgattattgtgcctcagcctcccaaatagctgggattacagacgagccaccatgcccagctaatttttgtatttttagtagaaacggggttttgccatgttggccaggctgctcttgaactcctgatctcaagtgattcgcctgcctttgcctcccaaagtgatgtgctgggattacagtcgtgagccacygtgcccagccgagaatgaatatttgctaatacaccaagaatagtccgtcccttagattaagtgaagtttgggtcaaaagagccactggtcatctttgaccaggaatgggattacagaaagtagtgtaagttatttt

SEQ ID NO: 321999 - DNA, 615 bp, Homo sapiens
ggaaaatcaccatttaagaaagccatgcctgggctagaaggttgctaaaaccccaagcatctcataattttcatcgtaactggaagccaaattcgtacctgctgaaatatgcagaactttcagaaagtccccctgctttaaattctcaacagagccaagtcataaaattgcacttatttctctggtccatttcttggcaggcaggcccttcagcatcctgtagcaaactccccaaacctcagcaatatcttagagcatttcccatcacagtgcctcctaataaagtgcaagacaaattggtagccgggggagagaagtgccttgtgttacattttgtgttcttttaactactccatctgtgatttacagctcaacagaggggtagagatattattcagggatgagggagctgggtgagtaaaatgttgagaatgaaaggcaaagtatcacgtagtagctgcacacacgaagacacttggctatttagtttgcaggaagcagaagctaagagaacsaaggtgatggaacagaggacagcatttgaatgtgtggctgaatttacataaacaaacgggaaaattgcacaagtgcatgaccagttttgcctgttagctg

SEQ ID NO: 322000 - DNA, 597 bp, Homo sapiens
cttgttgtactctgtacgtgatgaacaccacgaaaatagcaaggatgactagtctaatcctaaaatgcattattactcaggcctcaaatttggagtccatttatctgggctattctttcgggcattaaaataaagtgagtgagttttgtatttaagaaaacytttctgaggtggaaattatgtaaatcagaaatgtaataccaggttgtacacatttggtcatttttttggatgtgttgttttgttctccctaaacaagggcaatagtttaaatgcaaaattcctaagtgaattgaaaaggggagacactcaagattactagaagtcatggtgcttacacaaggaaatataaaatggaaaggttatatctgattatgtatagcactttctaagaaaccccctaactgcgaaatcatcaaatattttacaacaaaaaacttatgaaatatgtatgactgtctttcaaggtttagcccaggaaagagttttatgtattttgttaagtaaacatttattgtacaccgcgatatacttaatacttaaatagaagtagccaaataaaaattttaaaagttctttgccattgtcttttcccta

SEQ ID NO: 322001 - DNA, 616 bp, Homo sapiens
actgatctgggatacagaaggattgtaagaattagtatcctccctaatggagttttcattctagtatgagagacaaaagtaacacttaaaagctaaaattgaatgagttagttacaaagtctgtggggttgactcgagtagagggtggttgatcagtgtaggtttaatgaaattaaaatgagtaagattctataaatgcaagactggccagagaaagtggggagctctggggccagaacagcagaggaccaaaggcatcctacacagccaattaaggaattttcctactgcagcatggggtccagggagcttcatttgtaatcccttgttctgctttgtttcattcttggactctaatatggtttgactgtgtcctcacttgaatctcaccttgagttataacaatccccacgtgtcaaggttggtgccaggtggagatgattgaatcatgggggcagtttcccccatactgttctcctggtaagtaaataagtctcattagatttgatggttttataaaaggcagttcccctgcayaagctctcttccccaccactgtgtaagacatcccttttctcttccttcatcttccattttgaatgtgaggcctccccag

SEQ ID NO: 322002 - DNA, 550 bp, Homo sapiens
cccaccactgtgtaagacatcccttttctcttccttcatcttccattttgaatgtgaggcctccccagccaatgtggaactgtgagtccattaagtctctttcctttataaattgcccagtctsaggtgtgtctttatcagcagcatgagaatggactaatacagactccatcacagacctttgggctaaggactttacctctaggcacctgccctattacttctattaaatggtgtaaacacagtttgctcacccatgcaattgccttactgtgattcatcttgaagtctagcctgatgacagggatactatgcaccccacaaccaaccctactgagtaattggctccattaaaacaagagagaattgtgagataatctggatagagttagagttcacaccaaacatagagtttccaatttaatggattagtttcatttttgcaacattcagtactgataggatgggtcaattttggcagggcctagttgccatcttaaagcgaggtacggggtgctatttagagcactttgcagcaacaaagaggaca

SEQ ID NO: 322003 - DNA, 550 bp, Homo sapiens
cccaccactgtgtaagacatcccttttctcttccttcatcttccattttgaatgtgaggcctccccagccaatgtggaactgtgagtccattaagtctctttcctttataaattgcccagtctcaggtgtgtctttatcagcagcatgagaatggactaatacagactccatcacagacctttgggctaaggactttacctctaggcacctgccctattacttctattaaatggtgtaaacacagtttgctcacccatkcaattgccttactgtgattcatcttgaagtctagcctgatgacagggatactatgcaccccacaaccaaccctactgagtaattggctccattaaaacaagagagaattgtgagataatctggatagagttagagttcacaccaaacatagagtttccaatttaatggattagtttcatttttgcaacattcagtactgataggatgggtcaattttggcagggcctagttgccatcttaaagcgaggtacggggtgctatttagagcactttgcagcaacaaagaggaca

SEQ ID NO: 322004 - DNA, 577 bp, Homo sapiens
gataggatgggtcaattttggcagggcctagttgccatcttaaagcgaggtacrgggtgctatttagagcactttgcagcaacaaagaggacaaggtttgaggataattctaatagctcttatacaaagatattgaaccaagtaaatttataatatgtgggtctgcaaagtattcatgtttcttgagaggagtgcttcagattgagagacgggagcaatctgtaaagaaggaacccaatggatggacactggggaatgaatatcaaggacacagttaggtatgaatttaagctagatgttcacttaggtaactgtagcctggagtggaatgacaggttagaagaagtctcctaggctgggtgcagtggttcatacctgcaattccagcactttgggaagccgaggtgggaggatcacttcaggacaggagttcaagaccagcctgggtaacataataagatcctgtctctacataaaatttaaaaagttagttgggcatggtggcatgtgcctatagtaccagctactcaggaggctgaggcaggaggatctcttgagccaaagaggtcaaggctgt

SEQ ID NO: 322005 - DNA, 603 bp, Homo sapiens
aatgaacaggatagtctctctcctctgggatcttataatcatgtaaagaaacagatatgtaaaaactgtaaaaaagatatgtacaatataattataatataggaaaattaaaggccatacattttgtraataaacagctatgggaacaaaaaaatgtgcatttttttttctaattggcaaagtctaaatgggattgtggaggagcagtttgtatttaagcctgcaattgaactacatgtattatttttaaaactggagatttgaagggaacactggtggcaaatagaattgtatgaacaaaggaacagagatttggaaaggcagatggatgtcagcatggctagaggacaggtacacagctgatggggcagaaggtagctatgaaaggtttgcagaagtcagattgtcagtttcttttaaagcctgctaaatgtgtacactttattgtgtaaacagtggcaaacagtaaaggttttgaactgtaatgatgtagtggtctgggctaaactattcagagcaagcattttaggttacagtaactgaactgtgggtttttgtttacatgtatccagagttgttccctacctttgcaaggtcagtgtc

SEQ ID NO: 322006 - DNA, 528 bp, Homo sapiens
gagctatgactcttttaattggggaacagaacaaaagccaagacctgagtgctmagtgtgattgttactattggggtgcccttgcttctagagcttctcagctgataaagtaaagaaatttatgtgtgtatactaacttgtgcctgcgcacctatctataaatatttctatatgtaaacttctgtgtctacattaagctaaacatgagtacattttggtgtttccaagtctaatatattaccacctggttagtctagcctattccccttgtttttttctgtaaaatcctacaccaaagtgagaaacatggcttctaccttcctctatccattcacataattattaaattctattgtatgcttgtagctgaacaaaatttttaacccatattgctgtaggaaagacactttatcaactagagagtttgagtttatgtgcagttcctcttccttttagacttacagactccactcatttccaaaattactgttaaccacttttaccttcagtgaggttgtagtgtacatt

SEQ ID NO: 322007 - DNA, 592 bp, Homo sapiens
gtttatattttagcaagctgtaaagtccagaaatcaaattktgagtgggcaaacaaaatcaaagcaagtttcatctcatttagaaatgtggaagaatgagaacccttagtttaccttgcttttgtgcatgcagagtgctagctgtaatgggttagcacaaaaagacaaaatcctaaatcacagtcactttgccataatttttaatagttatgttctctcatagttctatggatgacatgctcattatagacagtctgaaactgaggagaaccagggttcttcctacatgtttatgttgaatgtggagaaggtgaggttactgcttctgctgcccttttcagctcaacatttgatctggccaatgtggttagctatactgtgtctcctaccaccacacatactcagaaaactgtggtagtaaacatagaatgaacttccttaaaagtagaaaaccattcattggctaaggtacataagaataagaatgaatgatgaaaacattggtagaaatgctgatggaagaactgattgatgcagatctattttggagaccccttaactgccaggggacatgaattgcctggctggttga

SEQ ID NO: 322008 - DNA, 547 bp, Homo sapiens
tgggaacaatgatatacaacacagaaaagaagctccataagaaaacagctgcaactaacccatctggaaagagacctcaatcaaaatgatacttagcgaaagaaaaatactttcagtgatcaaattatttgtctgaccaatgcttggtggaaagattccacattactagttatttgtaatgggtaattgcacartatactgtattgttcaatctggtgtgaatgaaagtggggagatcttgacaattgtcttggaacaatagatgtaaaattgagactattctgggaaaaccaggatgtttgggccccctggtaatagtctaatcattatacatctgtgctataagcacacaaataacatctagtaatgaaagaaacattcagctaagaaaacttgcagtcaaaaacttttgataaagctgtgaagacttgttaggtcatgtattaatttaagatctttaagatggagagcatcccatcaatgattaggagaaacacaaacattttatattgtgtttaatacacttttttatgtttaataaaaaaca

SEQ ID NO: 322009 - DNA, 615 bp, Homo sapiens
gaggagatgagatgctgtgagcagatatcactcttctaacatagagacctgcattcttacatgcaagtgatgttaaaggcacagttatagtataggcctgtaattggtaatgcctcttccctggctgggagaacagcttctcttatcgtgtcaattgccacatttatgccagctggttgcagaagtggcayatccctcaaactaaaaaccagggcccactttgatgctgctatacagatagaaaaaaaccatgagaaatagaatgtggattcttcctgggtttaggaagctaaggaaatcacttacgatagtatatgatgatgcctgcaggttcagagacaggatccattaaatgagggcagaaaagtcaggcaactactggttgaaggggtactatatgtcatgtcctgttctagatgctggaggtatccatggaacaaatcagtcagggtctctgctcttttggggcttctggttataattatgtgaattattctaataataattatgtaataaatcaaacacaaataaagtgatatgtaatttatattagctctttgggaatagggtgagtacctatttgcaaagggtggcaaatacaaagcagacttgtca

SEQ ID NO: 322010 - DNA, 544 bp, Homo sapiens
agcactccctgcttttcctttacccacagcagacatgagccaagccagttaggacattctgggttgctaaatccttctcaatacagcactctctcctgacagctagtgatgattaatcaatgtcagtgtatgatatttgaaaacttatgtttcatgcatacttatttttgcakgcatacttatttttgcccatcttattttctttattcatttcttttttgtttcttaatatttgttgaacattttgaaattccttgtcttagcaatattggaggaaattaacaaaagggagggatgtgcttcccttctggccagtgttcataaggcaatatgaagaactgagggatcaggtctagtcttttccacagcacttgaaacaactaaaattaaaagctgaacctccagaaggtgggcctggggctgctgtaccagtatttttttcatagagatgttctctgggagggctggaagctttaacaactatgaccagtgtctccaagacggtactttagtaccatgggcattgtctttaatcacagaagtg

SEQ ID NO: 322011 - DNA, 544 bp, Homo sapiens
agcactccctgcttttcctttacccacagcagacatgagccaagccagttaggacattctgggttgctaaatccttctcaatacagcactctctcctgacagctagtgatgattaatcaatgtcagtgtatgatatttgaaaacttatgtttcatgcatacttatttttgcatgcatacttatttttgcccatcttattttctttattcatttcttttttgtttcttaatatttgttgaacattttgaaattccttgtcttagcaatattggaggaaattaacaaaagggagggatgtgcttcccttctggccagtgttcataaggcaatatgaagaactgagggatcaggtctagtcttttccacagcacttgaaacaactaaaattaaaagytgaacctccagaaggtgggcctggggctgctgtaccagtatttttttcatagagatgttctctgggagggctggaagctttaacaactatgaccagtgtctccaagacggtactttagtaccatgggcattgtctttaatcacagaagtg

SEQ ID NO: 322012 - DNA, 647 bp, Homo sapiens
gggaggggagaaggaggaggaaagagatatactaagttcatgcaactgaggtcctggagctatttgcccactagttacatcctttccatttttaatgcctttttaactatttggcttttctttgtgtaaagtactgaaggccatccacagcctggtttttcaatacactcccagggctcctctttaactcatcaggtagcacataatcactaaatacaagttarttttaatatgatcccaaacaaaacataattagaagagcaatgtgctgtgaaaattatcataaaaagcagtcaaaagccaagtaaaaatgcatttgagttatctatggtttagggttatttgtggctctccgttagggcagaaccgaagttgactttagctatgatttcatggtctataaaaaaaaccactgagaattgggtatggattgcagttgtgttcaaatattttatgaaccttcttaaatatcaacatttactcaacttctttctgctataatggcctacctgtattacttcaaagtaatatacataggttattctcactagatccagaatgtgccacatctattcaatgggacaatgcagtttggaattggctgagggaatcttgaccttctaagattgaaatgtattaagcagctc

SEQ ID NO: 322013 - DNA, 557 bp, Homo sapiens
acttctctctgagctttaaaacaagttggctggagtggcttatggtcattacagactaaataggcaacataaaatccacttaaaaatagaaagaaagagaatgggactcatacatagcccagtgcaccatatttttytggactgcattttaatcatgaaatgtggcatgtacaggtaactatatgaaagcaagttagtgcatgggtatgtgtgtgttacagtaaaaattgcttctaggtctcatttcacctcccctcagggacacccccttgtaaaacctgccaaagacaagaaaaaaaaaaaaaaactctttgatttgaattggccagtgcaaaactcataattttctgacaaaaattccccaactttttttgtacatgagaacattacggcatttgacaaatttggcaactatcacttttaacatctaaatttgccttatatcccatagtcaatatttccagaaacctaggggttttttttccccctctatttcaccctggtagaaataatattatttggacaattctcagaagggaatgaataatgaaaattca

SEQ ID NO: 322014 - DNA, 557 bp, Homo sapiens
tggctggagtggcttatggtcattacagactaaataggcaacataaaatccacttaaaaatagaaagaaagagaatgggactcatacatagcccagtgcaccatatttttctggactgcattttaatcatgaaatgtggcatgtacaggtaactatatgaaagcaagttagtgcatgggtatgtgtgtgttacagtaaaaattgcttytaggtctcatttcacctcccctcagggacacccccttgtaaaacctgccaaagacaagaaaaaaaaaaaaaaactctttgatttgaattggccagtgcaaaactcataattttctgacaaaaattccccaactttttttgtacatgagaacattacggcatttgacaaatttggcaactatcacttttaacatctaaatttgccttatatcccatagtcaatatttccagaaacctaggggttttttttccccctctatttcaccctggtagaaataatattatttggacaattctcagaagggaatgaataatgaaaattcacatctattctccaaacctcatttatc

SEQ ID NO: 322015 - DNA, 526 bp, Homo sapiens
tacaagaaaccaagagaagatactgtttccagaaggaagtggttaattgtgggaaaaggtggtgagcaatccagtgaaacaaaaatactgtattggacatgtggaggaattgatgaccctgtttaattttcattttgatggcagtggcagaagcctaactsaatgggttgagaaacaaatgggaggtaaagaagtagagatgataaaggcagacaagtttttcctagaagattagctgagagggggcaaaagacagcgagaggggaatatgggatttgggaaggattttgttaacatggaaagttaattaatgcatctaagtcacagtttcttcatctgcaaaataggtataataagacctaattcatgaatttgttaggattaaataacatgtgtgaagtgcttagcacactgcctgacatagtaactactcaaaatacattagctattatgattatcatcatctttgataaaacttttttagatctatataatgatccttaccatataccaatatagttttttt

SEQ ID NO: 322016 - DNA, 526 bp, Homo sapiens
tacaagaaaccaagagaagatactgtttccagaaggaagtggttaattgtgggaaaaggtggtgagcaatccagtgaaacaaaaatactgtattggacatgtggaggaattgatgaccctgtttaattttcattttgatggcagtggcagaagcctaactcaatgggttgagaaacaaatgggaggtaaagaagtagagatgataaaggcagacaagtttttcctagaagattagytgagagggggcaaaagacagcgagaggggaatatgggatttgggaaggattttgttaacatggaaagttaattaatgcatctaagtcacagtttcttcatctgcaaaataggtataataagacctaattcatgaatttgttaggattaaataacatgtgtgaagtgcttagcacactgcctgacatagtaactactcaaaatacattagctattatgattatcatcatctttgataaaacttttttagatctatataatgatccttaccatataccaatatagttttttt

SEQ ID NO: 322017 - DNA, 582 bp, Homo sapiens
ttattcaggccttggttttattgaccatttttggttggctcttatctctgtgactgatcatgtatgcgtatttcaaatggataaataaactaaaaagtgtttaatactccaaaatgattagaagtgtattgttaaataccaaaaagaaaataattctggggtgtttcagcatgttattctgttaacrtagttcacgttgagtgtttgtattcatttgttgtttgtttgtttgtaagtaacaggttttgactaaaattccacggactgtggaacagcacacactggggtctatcggagggtggaaagtgggtggagggagtgggtcaggaaaaataactaatgtatactaggcttaatacctgggtgataagatagtctttacaacaaacccccatgacacaagtttacctatataacaaacctgccattgtacacctgaacttaagtaaaaaaaaaaaaaattaagtcatgtagatgcgtactttgaggtacaaccacgtgaatgattgtgccaaattattatgacagaaaagtctattgttgatttagaaaaagaattaacactgggcatcatttgaataa

SEQ ID NO: 322018 - DNA, 582 bp, Homo sapiens
ttattcaggccttggttttattgaccatttttggttggctcttatctctgtgactgatcatgtatgcgtatttcaaatggataaataaactaaaaagtgtttaatactccaaaatgattagaagtgtattgttaaataccaaaaagaaaataattctggggtgtttcagcatgttattctgttaacatagttcacgttgagtgtytgtattcatttgttgtttgtttgtttgtaagtaacaggttttgactaaaattccacggactgtggaacagcacacactggggtctatcggagggtggaaagtgggtggagggagtgggtcaggaaaaataactaatgtatactaggcttaatacctgggtgataagatagtctttacaacaaacccccatgacacaagtttacctatataacaaacctgccattgtacacctgaacttaagtaaaaaaaaaaaaaattaagtcatgtagatgcgtactttgaggtacaaccacgtgaatgattgtgccaaattattatgacagaaaagtctattgttgatttagaaaaagaattaacactgggcatcatttgaataa

SEQ ID NO: 322019 - DNA, 582 bp, Homo sapiens
ttattcaggccttggttttattgaccatttttggttggctcttatctctgtgactgatcatgtatgcgtatttcaaatggataaataaactaaaaagtgtttaatactccaaaatgattagaagtgtattgttaaataccaaaaagaaaataattctggggtgtttcagcatgttattctgttaacatagttcacgttgagtgtttgtattcatttgttgtttgtttgtttgtaagtaacaggttttgactaaaattccacggactgtggaacarcacacactggggtctatcggagggtggaaagtgggtggagggagtgggtcaggaaaaataactaatgtatactaggcttaatacctgggtgataagatagtctttacaacaaacccccatgacacaagtttacctatataacaaacctgccattgtacacctgaacttaagtaaaaaaaaaaaaaattaagtcatgtagatgcgtactttgaggtacaaccacgtgaatgattgtgccaaattattatgacagaaaagtctattgttgatttagaaaaagaattaacactgggcatcatttgaataa

SEQ ID NO: 322020 - DNA, 589 bp, Homo sapiens
tgtacaaatgtaaatgttctttaaaaatgaatacataatggcaggattcatatcaattttctgccagaattaccatgtttacctgaagtaaaatatgctcataaacaaagcagaaagtgcagctggtgcttacatctaggatgattaactggcatgtacagaatttttttttccttcaattgcaaagtgaatgcagtaaaattacagggcaatgggtttcttcccacacaagacaaggtgatctgaatgatatagaagagaaatgccacatgtggaaataatatatcaaggatttattaygtgtctgtggtcattcttaaggtcatttttgatgtctacacatttcagcatttgagaagttgtatattacatgcatacaaacccatattcaaatatacaattggctaaacaagtatttgttttaataaagtagtagtaataaaatatttatagcaaaggggacaagactcaggactgagaggaaaaactcaattaaaaaaaagacaacaatacttaaatctcttgatgcatctacttagcaatgtctacaatagcttttttaacactatcagaatatagagcataaatt

SEQ ID NO: 322021 - DNA, 589 bp, Homo sapiens
tgtacaaatgtaaatgttctttaaaaatgaatacataatggcaggattcatatcaattttctgccagaattaccatgtttacctgaagtaaaatatgctcataaacaaagcagaaagtgcagctggtgcttacatctaggatgattaactggcatgtacagaatttttttttccttcaattgcaaagtgaatgcagtaaaattacagggcaatgggtttcttcccacacaagacaaggtgatctgaatgatatagaagagaaatgccacatgtggaaataatatatcaaggatttattatgtgtctgtggtcattcttaaggtcatttttgatgtctacacatttcagcatttgagaagttgtatattacatgcatacaaacccatattcaaatatacaattggctaaacaagtatttgttttaataaagtagtartaataaaatatttatagcaaaggggacaagactcaggactgagaggaaaaactcaattaaaaaaaagacaacaatacttaaatctcttgatgcatctacttagcaatgtctacaatagcttttttaacactatcagaatatagagcataaatt

SEQ ID NO: 322022 - DNA, 589 bp, Homo sapiens
tgtacaaatgtaaatgttctttaaaaatgaatacataatggcaggattcatatcaattttctgccagaattaccatgtttacctgaagtaaaatatgctcataaacaaagcagaaagtgcagctggtgcttacatctaggatgattaactggcatgtacagaatttttttttccttcaattgcaaagtgaatgcagtaaaattacagggcaatgggtttcttcccacacaagacaaggtgatctgaatgatatagaagagaaatgccacatgtggaaataatatatcaaggatttattatgtgtctgtggtcattcttaaggtcatttttgatgtctacacatttcagcatttgagaagttgtatattacatgcatacaaacccatattcaaatatacaattggctaaacaagtatttgttttaataaagtagtagtaataaaatatttatagcaaargggacaagactcaggactgagaggaaaaactcaattaaaaaaaagacaacaatacttaaatctcttgatgcatctacttagcaatgtctacaatagcttttttaacactatcagaatatagagcataaatt

SEQ ID NO: 322023 - DNA, 589 bp, Homo sapiens
tgtacaaatgtaaatgttctttaaaaatgaatacataatggcaggattcatatcaattttctgccagaattaccatgtttacctgaagtaaaatatgctcataaacaaagcagaaagtgcagctggtgcttacatctaggatgattaactggcatgtacagaatttttttttccttcaattgcaaagtgaatgcagtaaaattacagggcaatgggtttcttcccacacaagacaaggtgatctgaatgatatagaagagaaatgccacatgtggaaataatatatcaaggatttattatgtgtctgtggtcattcttaaggtcatttttgatgtctacacatttcagcatttgagaagttgtatattacatgcatacaaacccatattcaaatatacaattggctaaacaagtatttgttttaataaagtagtagtaataaaatatttatagcaaaggrgacaagactcaggactgagaggaaaaactcaattaaaaaaaagacaacaatacttaaatctcttgatgcatctacttagcaatgtctacaatagcttttttaacactatcagaatatagagcataaatt

SEQ ID NO: 322024 - DNA, 557 bp, Homo sapiens
cacagctcatttattttcattgtgcccatgtggttttctgaagtcacactttgtgttgttttacatatgggaaaatggaaacctggctaacttgtctttagtaagtgattggtggagaaattagtagaaactacatctccaaattcctgatctaggtaatgctgtttcaacaagctaagttgcayttgaattttgaaatacccactctagattgcaattaccaaatagttgttatgtacccaatcacaggatatgcttttgaaatttttttcattagtacatggaagagagagttttatattgtggtaggtagaaatgcccagacaagacaggactgagataaattaatggccagtccatttattttgataaacacaaataggactaatgcaccttgagctttaggaactagcagggcatttctagttgcagcatagtcacactaaggtgcaaagagtcaatggacaagcaaaaatgtgtaagaagaaaataagattctttgtttgttttctttatttgacatatttaaaagaaggcaaaagtgtatcttctaaaaa

SEQ ID NO: 322025 - DNA, 260 bp, Homo sapiens
tgagacagcaaatatttggggaatattttatgtggtatttttggaaaaaggtgaaaatgttattaatttaaaatctattatgcttccaattgaagatgaaaagaattgcctagaaaagtctggaactcaaggaagaggtcagggctggagatataaatttagaaracattggaatataggtttaattaaagccagttggccagatgagatcctccatgtaaagattatagatagagaagataagagggatcaaaaccaag

SEQ ID NO: 322026 - DNA, 592 bp, Homo sapiens
aatattcctagattttattttttaataccaaccagaataggaggcctcaaaatacctgtgatggaaaaaatgcagtgcctgagtgcatgcagctaagcctgatcactagaatacatttcatttatattttataagataccaaagacttcagaactacaaagagaactatagttgctgcaaccagaaacctattcacatatacgtacttttataaatcatgtgcatatgtgtgtgggtacctycatgtgtgtgcatatataaatacatctaaaagctgagaaccaccttagtctggggcattaaaattttagtaaacttttttgatgtatatgttgaataagttgcaaagttgaagtctgttccctgcctccatgtggcttacgtacacttgctaatgagaaaggagcttattacaaatattcatagatgtgatatatatgtgtacatgtgtgtatatatatgtgtgtgtatatatacatatatatgtgtgtgtatatatacatatatatatctttctccccctacacacacatacacacacccctttattcgctctcttttttttttttttttttttttttttagttggagt

SEQ ID NO: 322027 - DNA, 592 bp, Homo sapiens
aatattcctagattttattttttaataccaaccagaataggaggcctcaaaatacctgtgatggaaaaaatgcagtgcctgagtgcatgcagctaagcctgatcactagaatacatttcatttatattttataagataccaaagacttcagaactacaaagagaactatagttgctgcaaccagaaacctattcacatatacgtacttttataaatcatgtgcatatgtgtgtgggtacctccatgtgtgtgcatatataaatacatctaaaagctgagaaccaccttagtytggggcattaaaattttagtaaacttttttgatgtatatgttgaataagttgcaaagttgaagtctgttccctgcctccatgtggcttacgtacacttgctaatgagaaaggagcttattacaaatattcatagatgtgatatatatgtgtacatgtgtgtatatatatgtgtgtgtatatatacatatatatgtgtgtgtatatatacatatatatatctttctccccctacacacacatacacacacccctttattcgctctcttttttttttttttttttttttttttagttggagt

SEQ ID NO: 322028 - DNA, 599 bp, Homo sapiens
cacaccaacatcatccctcacctcataaacctacacctagaaaaactatgtcaataatctagaatgtatctgggattttttcccaagttcatatgcttaaaaatatatacacactcatacatataccatcatatacttataaacacacaagcatactgtggatatacaggcttttgggctttgttttaaaagatgagatcataatatacacatcttctgtttcttgcttttgtcattagatatcttgtagatatcactctagatgaaaaggttctaactatttttagatctaattattaacttgttcctttgtataaactcgtaaatatttattgagcacctaccayatgccacactgaagcctgggatttattcaaatttcagaattgagaagggagtagagagattcatagtccagctctcttacagaatagatggaaaatcaaggctccgtaaatattcgtgatttattcaaagtcatgcagccagttgatgccatgtctcaaatcaaaatctagctcttgctagcccccaagtccagtcctcttttaatcatactattcagagtcccataaattagcatacaattacttacaatt

SEQ ID NO: 322029 - DNA, 599 bp, Homo sapiens
cacaccaacatcatccctcacctcataaacctacacctagaaaaactatgtcaataatctagaatgtatctgggattttttcccaagttcatatgcttaaaaatatatacacactcatacatataccatcatatacttataaacacacaagcatactgtggatatacaggcttttgggctttgttttaaaagatgagatcataatatacacatcttctgtttcttgcttttgtcattagatatcttgtagatatcactctagatgaaaaggttctaactatttttagatctaattattaacttgttcctttgtataaactcgtaaatatttattgagcacctaccatatgccacactgaagcctgggatttattcaaatttcagaattgagaagggagtagagagattcrtagtccagctctcttacagaatagatggaaaatcaaggctccgtaaatattcgtgatttattcaaagtcatgcagccagttgatgccatgtctcaaatcaaaatctagctcttgctagcccccaagtccagtcctcttttaatcatactattcagagtcccataaattagcatacaattacttacaatt

SEQ ID NO: 322030 - DNA, 599 bp, Homo sapiens
cacaccaacatcatccctcacctcataaacctacacctagaaaaactatgtcaataatctagaatgtatctgggattttttcccaagttcatatgcttaaaaatatatacacactcatacatataccatcatatacttataaacacacaagcatactgtggatatacaggcttttgggctttgttttaaaagatgagatcataatatacacatcttctgtttcttgcttttgtcattagatatcttgtagatatcactctagatgaaaaggttctaactatttttagatctaattattaacttgttcctttgtataaactcgtaaatatttattgagcacctaccatatgccacactgaagcctgggatttattcaaatttcagaattgagaagggagtagagagattcatagtccagctctcttacasaatagatggaaaatcaaggctccgtaaatattcgtgatttattcaaagtcatgcagccagttgatgccatgtctcaaatcaaaatctagctcttgctagcccccaagtccagtcctcttttaatcatactattcagagtcccataaattagcatacaattacttacaatt

SEQ ID NO: 322031 - DNA, 521 bp, Homo sapiens
taaatgtaattttaaataagagcttacaaaaaaaaaggaatatggtgataatagagcctagacaaagggatattacccagttagtagatgtgtatatgctgggcaaagggattgatatttaaataatgtacaggagtcatctaatcaaaatggtagaggtrgtgggtgaggaaggatcttttgtgaaaatggaacaacatgtataaatatataccatgatgggcaggagcacagagattttgagaaaataaagctgtggtcgcagtcacagctcaaggagacagtgggagaagggaattcggtgaactggtaaaggtggcaggatcatttggtacctcataggctctgattaagattcttcctatatctttagagctgttgaaactcactggagtcttcaacaactgagtgacaggattagatttgaaaagatcattcttgctatggtgtagagaatagtcattcttagatcattcttgctaaatcttccatgagaaagtgagtaacatagatttgaaaag

SEQ ID NO: 322032 - DNA, 521 bp, Homo sapiens
taaatgtaattttaaataagagcttacaaaaaaaaaggaatatggtgataatagagcctagacaaagggatattacccagttagtagatgtgtatatgctgggcaaagggattgatatttaaataatgtacaggagtcatctaatcaaaatggtagaggtggtgggtgaggaaggatcttttgtgaaaatggaacaacatgtataaatatataccatgatgggcaggagcacagagattttgagaaaataaagctgtggtcgcagtcacagctcaaggagacagtgggagaagggaattcggtgaactggtaaaggtggcaggatcatttggtacctcataggctctgattaagattcttcctatatctttagagctgttgaaactcactggagtcttcaacaactgagtgacaggattagatttgaaaagatcattcttgctatggtgtagagaatagtcattcttagatcattcttgctaartcttccatgagaaagtgagtaacatagatttgaaaag

SEQ ID NO: 322033 - DNA, 630 bp, Homo sapiens
agatgtggataatacagtccatgactatagaacaggaagtgctgaaagagcatgtttctgcacatttagaattaagagggatttggagcatctggagcagaatttgtttgttgggratgatgactcgggagaggcaggtaggggccaaattatgaaggtccatttttgtgatgtgatggcaaaaggaacaactgaataaattgagcagggaatcacagtcagatgtggagtccagagaagtctctgatggtgtggaggatgctccacatctctcatgaaattaattgagaaactgctatttttttcatctaagagttttaattatctttcatttagttcccagaggctattgggcataggcacctagtaagtaactgttaataacaacatgcttattttgggcatggcaatgtggaaatttattcctgccgagtaatcagtgccagttttatgctggcagggttttaaaagaatggagaagggattcttttgcctccattaggagaaagctgtgccttctcttcatcatatagtgactcattcaaggttggcacaaagtaactttaatcaattaatgtgaataatatcatacctttttaagcctaaaatggatattagaggctatcagcc

SEQ ID NO: 322034 - DNA, 615 bp, Homo sapiens
cagctattaatatcatttggcattctaaaggaagaacggctgaagtaaaccacaggtgcagatcaaatcttgatgtctgtctccccgcaggagacaaatagaatctctctttcttgtatgcttctgttatgttgagtctaaatctgaggtaatcatgatcatttcaacctgaggtatggtttactaaattaggagaaacatacaaaagtttgttgacttttaarctaaagaaggcaaaagccataagtgaaacaattcaagtagagtgctataatgtgactgtttctaatgacaacttgaattgattgtaaaataagtctggcagttaaaatgtattagtgttggctgagcatggtggctcacgcctataatcctagcaccttgggaggctgaggcgggcagatcatgaggtcaagagattgagaccatcctggccagcatggtgaaaccccgcctttactacagatacaaaaattagctgggcatggtggaggctgtgcttgtagtcccagctacttgggaggctgaggcagaagaattgcttgaatccaggaggcagaggttgtagtgaggtgagatcacgccactgcactccagtctggtgacagagtgaga

SEQ ID NO: 322035 - DNA, 615 bp, Homo sapiens
cagctattaatatcatttggcattctaaaggaagaacggctgaagtaaaccacaggtgcagatcaaatcttgatgtctgtctccccgcaggagacaaatagaatctctctttcttgtatgcttctgttatgttgagtctaaatctgaggtaatcatgatcatttcaacctgaggtatggtttactaaattaggagaaacatacaaaagtttgttgacttttaaactaaagaaggcaaaagccataagtgaaacaattcaagtagagtgctataatgtgactgtttctaatgacaacttgaattgattgtaaaataagtctggcagttaaaatgtattagtgttggctgagcatggtggctcacgcctataatcctagcaccttgggaggctgaggygggcagatcatgaggtcaagagattgagaccatcctggccagcatggtgaaaccccgcctttactacagatacaaaaattagctgggcatggtggaggctgtgcttgtagtcccagctacttgggaggctgaggcagaagaattgcttgaatccaggaggcagaggttgtagtgaggtgagatcacgccactgcactccagtctggtgacagagtgaga

SEQ ID NO: 322036 - DNA, 615 bp, Homo sapiens
cagctattaatatcatttggcattctaaaggaagaacggctgaagtaaaccacaggtgcagatcaaatcttgatgtctgtctccccgcaggagacaaatagaatctctctttcttgtatgcttctgttatgttgagtctaaatctgaggtaatcatgatcatttcaacctgaggtatggtttactaaattaggagaaacatacaaaagtttgttgacttttaaactaaagaaggcaaaagccataagtgaaacaattcaagtagagtgctataatgtgactgtttctaatgacaacttgaattgattgtaaaataagtctggcagttaaaatgtattagtgttggctgagcatggtggctcacgcctataatcctagcaccttgggaggctgaggcgggcagatcatgaggtcaagagattgagaccatcctggccagcatggtgaaaccccgcctttactacagatacaaaaattagctgggcatggtggmggctgtgcttgtagtcccagctacttgggaggctgaggcagaagaattgcttgaatccaggaggcagaggttgtagtgaggtgagatcacgccactgcactccagtctggtgacagagtgaga

SEQ ID NO: 322037 - DNA, 620 bp, Homo sapiens
atggattaaaacactaaacttgttaagcatgttaattctactgagttgatctatagatttaatgcaactccagtcaaaatcacagtagaatattttgtagatatagacaagctagtgctaaaattcatatgaaaaggcaaaggaactagaacagccaaagcacttcttgaaagaaatggagaaattatgtgctcaattttaagaattattaaaaagcttcagtaatcaagagtctggtatcagagacgagatcagtgggtcccatagatcaatgggacataaatagacctgcataaatatgccaactcatctttaataaagatgcaaaagcaacttactgcagaaagggtaatgttctaacaaatagtaatggaacaataggaaacaattggtatacagaagaaaatgcaacctaatcctcacatattatgcaaaaagaagctcaaaatggatcgtagatttaaatgtaaaacacaaaattataaaatgtttagaagaaaatcttcatgacctagagttagggagwgagtttgggcatatctaagaagaaaatatatgtatatatttgataatttaaattggactttatacaaatttaaaacttttgctctgtaaaagac

SEQ ID NO: 322038 - DNA, 600 bp, Homo sapiens
actgagttgatctatagatttaatgcaactccagtcaaaatcacagtagaatattttgtagatatagacaagctagtgctaaaattcatatgaaaaggcaaaggaactagaacagccaaagcacttcttgaaagaaatggagaaattatgtgctcaattttaagaattattaaaaagcttcagtaatcaagagtctggtatcagagacgagatcagtgggtcccatagatcaatgggacataaatagacctgcataaatatgccaactcatctttaataaagatgcaaaagcaacttactgcagaaagggtaatgttctaacaaatagtaatggaacaataggaaacaattggtatacagaagaaaatgcaacctaatcctcacatattatgcaaaaagaagctcaaaatggatcgtagatttaaatgtaaaacacaaaattataaaatgtttagaagaaaatcttcatgacctagagttagggagtgagtttgggcatatctaagaagaaaatatrtgtatatatttgataatttaaattggactttatacaaatttaaaacttttgctctgtaaaagacactataagagagtgaaaag

SEQ ID NO: 322039 - DNA, 509 bp, Homo sapiens
agtaatagtaataccaaaataattagagagtggtagagttccatcaccaggtctttaccytcattttaggaataggttaaggcatcaagagataacgtaattaataaaggattatgctgtgatctgaaacacaagtacagtatttgtatttctgagctaagactaaagtccagatttctttcatttcggtgcttgttcgtttataccacactgccccaaaggacactaactgtaatagtactttgtcctgacatttaggacgcactcacacccttttgtccagatgtttctgtcttagatttccttactaaacactaggattgtgaaacctttcctttcctttctagggacaaaatggtattcactggcatatctagtttaatgctttgcgtacagggtgtgccacagacaattgggttaatggttgtaactggttaattgattgacacttaattttcagagttcgaccataactaaagagagatgagctccttgaggagcttcccact

SEQ ID NO: 322040 - DNA, 509 bp, Homo sapiens
agtaatagtaataccaaaataattagagagtggtagagttccatcaccaggtctttaccctcattttaggaataggttaaggcatcaagagataamgtaattaataaaggattatgctgtgatctgaaacacaagtacagtatttgtatttctgagctaagactaaagtccagatttctttcatttcggtgcttgttcgtttataccacactgccccaaaggacactaactgtaatagtactttgtcctgacatttaggacgcactcacacccttttgtccagatgtttctgtcttagatttccttactaaacactaggattgtgaaacctttcctttcctttctagggacaaaatggtattcactggcatatctagtttaatgctttgcgtacagggtgtgccacagacaattgggttaatggttgtaactggttaattgattgacacttaattttcagagttcgaccataactaaagagagatgagctccttgaggagcttcccact

SEQ ID NO: 322041 - DNA, 613 bp, Homo sapiens
ttctgctcttcctaggctaagaataaacttgaagacaaagagtagattttggccagacactgatgctaaagtcaccccgatgctgtctttgcttctaaggtataaattaccttattttwagcaactttttcaccttttcaactctatccctttcctcagcctctttcatatgtgaaataaaatattcacttactactgaggatgattttttttaaacctattaaagaatactccatagctacagaggggaccatatcctttagagactccgttggggatgatcatatgcagaattattcttgtccctttgcctctgcttaatccccttcacaaagtctgtggctcaaacaaatgagagttggcagtactaaaggaataagttcccagcatacgtctgccatgctttagcatcatttcagattagaagcatggagcaaaggcagggagacgggtcaaacaaaatgctgagagcttccctccttttaaaaaacaaaattctagtcagggaattatttttaaataaaatgcaagcccccaagacataaataaacagccagcatataatactaacaactcaatgaaagatacttccccaggtcaactcatctggtag

SEQ ID NO: 322042 - DNA, 602 bp, Homo sapiens
tgcttaagtttatttaatggcgagagtcatattctgtatactgtttacctaattgccaggatgaattatggttatgtggcatatcttttcataagaaaaggtttaagaagttaaaaaagaaagaactctgcctttcttccctttctctttattttrcccttaaagaaccttatattaagctagcaatgtcctcatacacttcgtctactaactgccttgtgtttttctaaaagttaaaaatgcttaccatttgttaagactctcattgtatgaatgatctaattgaatcaccaaaaccactttggagatcagagagtttaaatacatagcttgtaagcaacagagctgagatgcaaacctaggtttatttgactccaaggtctgggctcaaccactccatttatgcttctctcaaacaccactgcacctgcttgagaattctttctcactgcaggtagttttcaaaaatagttatcatgaaagaaaacctcagtttgattgcctcatcccactgcccacatttccacggtcatattgggaatactaataatgaaatgttctaaagtactttatacttcctagttaacggcgcagaaggaagg

SEQ ID NO: 322043 - DNA, 510 bp, Homo sapiens
taatctttaaaaccagaatactctacgactgcacagagttaacaactgaacaatcatgtaatctgcaattatctatcataaaaatatcatttatttamaaagatatttaataagagcctcctatcgagttaaggatgggaaattccaaggtgaacacacaacagataagaatttacctttgtggtggccaatgcgcaagagaaaacatgtaaataagcaagcaccagtcatgagaagtgctacggtggaggctgagagaatgatgggctggttgaggtaaggctgagggcagaaggataagaaggaggtggttcagcaaagagcatagagaagagaatcataggcagagagatcggcaggtgtgaggcctcgaagtggcacagagcttggtgcgtgctggaaactgagaacacggtgaagctgaggtgaggtgggaggacgcagggtgtagaggttagtgcaggaatgtgataccagaagacatggaagagaatgagagaagtctggtta

SEQ ID NO: 322044 - DNA, 523 bp, Homo sapiens
cagtgcagtactttctaattttcctaggagtctaaatttcatttgttaaaacaattatggctacttattgagtagctaytatgctattattaggcactttaacagatatttgaaagatattatatcatctaacaagcagtcttacagagcaaggttataatggtcatttaatatatgagaaaatggacattcagaaaaattcaagtaacctctccaaggcatcagtctggaaattagtagaatccagttccgtttggcttgaaaacttggtcttaaactcccccatggtagattttgtaccgctctgacttccagctatagctcatacccaggacagtatctggcatataatgtgttgttaatatatatttactaccttcatacttaaatacatgtaatttccactatggatcaatgcttctcagagattctcaagtttactaccttttattgacatcttaaataaagatactatttgagtagattcacagggctatcctttaaactactgcccagctgggaa

SEQ ID NO: 322045 - DNA, 523 bp, Homo sapiens
cagtgcagtactttctaattttcctaggagtctaaatttcatttgttaaaacaattatggctacttattgagtagctattatgctattattaggcactttaacagatatttgaaagatattatatcatctaacaagcagtcttacagagcaaggttataatggtcatttaatatatgagaaaatggacattcagaaaaattcaagtaacctctccaaggcatcagtctggaaattagtagaatccagttccgtttggcttgaaaacttggtcttaaactcccccatggtagattttgtaccgctctgacttccagctatagctcatacccaggacagtatctggcatataatgtgttgttaatatatatttactaccttcatacktaaatacatgtaatttccactatggatcaatgcttctcagagattctcaagtttactaccttttattgacatcttaaataaagatactatttgagtagattcacagggctatcctttaaactactgcccagctgggaa

SEQ ID NO: 322046 - DNA, 523 bp, Homo sapiens
cagtgcagtactttctaattttcctaggagtctaaatttcatttgttaaaacaattatggctacttattgagtagctattatgctattattaggcactttaacagatatttgaaagatattatatcatctaacaagcagtcttacagagcaaggttataatggtcatttaatatatgagaaaatggacattcagaaaaattcaagtaacctctccaaggcatcagtctggaaattagtagaatccagttccgtttggcttgaaaacttggtcttaaactcccccatggtagattttgtaccgctctgacttccagctatagctcatacccaggacagtatctggcatataatgtgttgttaatatatatttactaccttcatacttaaatacatgtaatttccactatggatcaatgcttctcagagattctcaagtttactaccttttaytgacatcttaaataaagatactatttgagtagattcacagggctatcctttaaactactgcccagctgggaa

SEQ ID NO: 322047 - DNA, 523 bp, Homo sapiens
cagtgcagtactttctaattttcctaggagtctaaatttcatttgttaaaacaattatggctacttattgagtagctattatgctattattaggcactttaacagatatttgaaagatattatatcatctaacaagcagtcttacagagcaaggttataatggtcatttaatatatgagaaaatggacattcagaaaaattcaagtaacctctccaaggcatcagtctggaaattagtagaatccagttccgtttggcttgaaaacttggtcttaaactcccccatggtagattttgtaccgctctgacttccagctatagctcatacccaggacagtatctggcatataatgtgttgttaatatatatttactaccttcatacttaaatacatgtaatttccactatggatcaatgcttctcagagattctcaagtttactaccttttattgacaycttaaataaagatactatttgagtagattcacagggctatcctttaaactactgcccagctgggaa

SEQ ID NO: 322048 - DNA, 592 bp, Homo sapiens
tcagggtcacaagcatccttaccccgaggtgcagtcttccaaaaaggtcccattccactgtcagggcttaggccaccccactagcaccatttagagtctctctcttttcyaagaaaattccccatccccacagcttcccaatcatgaagtcttgatttttgacacccacccagttcatcaaccattgctagaaagttctatttaattcacgacttttcaaagtataagcattttctgcaccttacttctaggcagatgaccaaaacaaacataagactgtgtctcaagctgattctgtactattatacttcatcataactctaatcctcaaagcccgtgctcaatgatattgatgatctcccataacatatgctttattccaacttggattttacctctccctttccaacagtatccaaatgtataattcatctactactctttgtcttgctgtaggggattatttgtcaaactcagataagttcactttgaactctaaaagacttccagtaaacacagttctggtataagtctcctgcctgtgagcagacagaccctgaggacggttcatccctccttcaaggagatagca

SEQ ID NO: 322049 - DNA, 592 bp, Homo sapiens
tcagggtcacaagcatccttaccccgaggtgcagtcttccaaaaaggtcccattccactgtcagggcttaggccaccccactagcaccatttagagtctctctcttttctaagaaaattccccatccccacagcttcccaatcatgaagtcttgatttttgacacccacccagttcatcaaccattgctagaaagttctatttaattcacgacttttcaaagtataagcattttctgcaccttacttctaggcagatgaccaaaacaaacataagactgtgtctcaagctgattctgtactattatacttcatcmtaactctaatcctcaaagcccgtgctcaatgatattgatgatctcccataacatatgctttattccaacttggattttacctctccctttccaacagtatccaaatgtataattcatctactactctttgtcttgctgtaggggattatttgtcaaactcagataagttcactttgaactctaaaagacttccagtaaacacagttctggtataagtctcctgcctgtgagcagacagaccctgaggacggttcatccctccttcaaggagatagca

SEQ ID NO: 322050 - DNA, 554 bp, Homo sapiens
ccactgttaattgtgtactcttccttctagaaattttatttgtatgtattaatatatacgtagacatagatacagatatatcttttttatataatcaggatcaaacaattctcaaattctttctaaacaggttaaaagacagtatataaactgaattaatttgcttactgttctttattttctctatacttttgggatcattttcactcacaggttcaatgaaatggtggaaagttccttttgatctgtaggagataatacataattaaagaatattttacttcttattcttttgtgactggctttccattcagattttcagttctttcttgatttcatgtttctgaatttttgattccagctttctggctcccgcaggagtctcagagatgccaatttactatggtgcttggtaaagatgaaaaatcaagcttgaggtaatttttatttaataaatctccattggctccmaaggctatttcccagccatcttccaaaatatacatagtgttatgtaatattagttccactcacgataactccatgccagagca

SEQ ID NO: 322051 - DNA, 504 bp, Homo sapiens
ttttctctggctacctttgacgtatttttcttcattttgacattgaagaatctaatgactatgtgtcttggggttgttcttctcatggagtatcttactggggttctctggatttcctgagtttaaatgttgccctttcttgctaggttggggaagttctcctgggtgataccctaaagtatattttccaacttgattctgttcttcctgtttctttcaggtaccccagtcagcggtaggttcagtcttttaacataatcccayagttcacagaggttttgttcattccttttcattcttttttctctaatcttggctgcctgctttatttcggcaagatagtcttcaagctctgatatcctttttttccacttggtctattcagttattgatactcgtggttgcattgtgaagttctcatgttatgttttttcagctccatcaggtcatttctgtcctctctgagctggtgattttggttaacagctcctgtaatattttatc

SEQ ID NO: 322052 - DNA, 422 bp, Homo sapiens
gcctgttttttctgttgtgggcagcattgcaaaagtgatctgtatcctctcagaaaaaggaaaaaaaaatcacatctaaaaatgttcaatgtcattacattgaacactgaccggacaagtaagctggaactgtatggttatattcacaaattctgggatgtttgttttggctttgtgttayaattgcagctacgaaactaaaagtgaacaaattgctttctcatttaatttctttttatcatgtctaagtctcagtatttttatttgtagaattgtgttaataataatccacaggcttactatgaggaataaatcagatactgtacataaaacaaataggatatttgttgacatatagtattcattcaccagatgcttaatctttccttcctcttgtctatgttagcctgcgattgttattc

SEQ ID NO: 322053 - DNA, 526 bp, Homo sapiens
ggatatttgttgacatatagtattcattcaccagatgcttaatctttccttsctcttgtctatgttagcctgcgattgttattctagtgttggtctcaaataacttaaactgtcattagaattttgctttaattcatagggccaatagaggaggaggcaatggaaaaatcactaggtatgtttgcttagtctctcagatgctatagcacacaactctcagagacttggaaaaatggaaacacagagatgttgttttgtgttttgtttttgagcacagttcttatagtaaatgtgaatgtttactattatttctagggtttatgataaaagatggaaaagagaggctatactgatgaacgttgtcaacatgggggcttgtcagaaattaaacaaacttttaagaaagtaattgaatttaacaaacattattgagtaccttatctggcccaggcatggatcttaacctcaactcctcatcaagggtagaaagtagactcagtcaatgctaggcatggtggttcatgcc

SEQ ID NO: 322054 - DNA, 526 bp, Homo sapiens
ggatatttgttgacatatagtattcattcaccagatgcttaatctttccttcctcttgtctatgttagcctgcgattgttaktctagtgttggtctcaaataacttaaactgtcattagaattttgctttaattcatagggccaatagaggaggaggcaatggaaaaatcactaggtatgtttgcttagtctctcagatgctatagcacacaactctcagagacttggaaaaatggaaacacagagatgttgttttgtgttttgtttttgagcacagttcttatagtaaatgtgaatgtttactattatttctagggtttatgataaaagatggaaaagagaggctatactgatgaacgttgtcaacatgggggcttgtcagaaattaaacaaacttttaagaaagtaattgaatttaacaaacattattgagtaccttatctggcccaggcatggatcttaacctcaactcctcatcaagggtagaaagtagactcagtcaatgctaggcatggtggttcatgcc

SEQ ID NO: 322055 - DNA, 463 bp, Homo sapiens
tcaaggaattgattaatctgaattcaaaaataacttttatttagtgaaagtcaaagcacattattgtgttttaaaaagtcaaatgttgccaactcatgacttagttaagcctggaatatgaatgtgcaattgaagcagacattggctgtatgcacaatgcctgctgtttttcttgctgttagtcattatatgttatgtcctttgtcaggttggaaacaaaagattaatttcatttggtaggcttttaaaaatgtgtttgtctggttgtgtgtgtgtgtgtatatgtatatatgcatatatacacatatatacacgtatgtatgtatatatatgtatgtatatatgtatatatgtatatacacacacacatatatawatttagttctgaaatttaggcatatatatatatatatatatatatatgaaatttaggcgcatatatatatatatatatgcgcctaaa

SEQ ID NO: 322056 - DNA, 622 bp, Homo sapiens
agtgtactgcttctacatgtattttttattaaaaaaaaaaaaagttaactgtgaaacagcctcaggcaggtccttcaggaggaattccagaagaaggcattgttataggagatgacagcttcgtgcttgttatttaccctgaagaccttccagtaggacaagatgtggaggtggaagacagtgatactgacaatcctgaccctgtgtgggcctaggctaatgtgtgtgtttgtgtctttgtttttaacaaaattttaaaaattatattaaaaaatttaaaaattcaaaaaagtttrtagaatgaggataaaaagaaattatttttatacagctgtacaatgtgtttgtatttcaagctattattgaaaaagagtcaaaaagttttgaaaaattaaaacatttattaagtcagaaagttacagtaagctaacattaatttattattgaagaaagaagatttttctataaatataggtagcctaaatatagtgtttataaagtctacagtagtgtacagtaatgtcttaggccttcacactctctcaccactcactcactgacccacccagagcaacacgcagtcctgcaagctccattcatgggaagtgccttatataggtgt

SEQ ID NO: 322057 - DNA, 588 bp, Homo sapiens
ttagcacctaacatacaaaagtcttcaattaggctgggatcrgtggcttacacctgtaatcccagcactctgggatgccaaggagggaggaaagcttgagcccaggagttcaagaccagcctgggcaacatagcaaaaccccaactctacaaaacatacaaaaattagccagatgtggtggcacacgcctgtagtcccagctacttgggaggctgaggtaggaggatcacctgagcctgagaggtcgaggctacaatgagtcgaaattgttccgctgcattccatcctgggcaacagagtgagactctgtctcaaaagaaaaagtcttcaattattcttttgtattgttaaaagtgtatttgaaagcaagaatcactttatctccaactcttcttatgaaaggaaaacattccaactagatccagcagccagatttaccctccgacgaagcctgctaaactgctcaagtctaaatgcaaagcccttctctaaaaaagccctacaaacatcatatagtgaactgaaaagcatatttcaactgaaaattgatttcacctgctttccatcacaagaaagcctcaacagatt

SEQ ID NO: 322058 - DNA, 588 bp, Homo sapiens
ttagcacctaacatacaaaagtcttcaattaggctgggatcagtggcttacacctgtaatcccagcactctgggatgccaaggagggaggaaagcttgagcccaggagttcaagaccagcctgggcaacatagcaaaaccccaactctacaaaacatacaaaaattagccagatgtggtggcacacgcctgtagtcccagctacttgggaggctgaggtaggaggatcacctgagcctgagaggtcgaggctacaatgagtcgaaattgttccgctgcattccatcctgggcaacagagtgagactctgtctcaaaagaaaaagtcttcaattattcttttgtattgttaaaagtgtatttgaaagcaagaatcactttatctccaactcttcttatgaaargaaaacattccaactagatccagcagccagatttaccctccgacgaagcctgctaaactgctcaagtctaaatgcaaagcccttctctaaaaaagccctacaaacatcatatagtgaactgaaaagcatatttcaactgaaaattgatttcacctgctttccatcacaagaaagcctcaacagatt

SEQ ID NO: 322059 - DNA, 554 bp, Homo sapiens
ccatgtcagccaggctggtcttgaactcctgacctcaagtgatctgcccatctctcccaaagtgctgggattataggcatgagccaccatgctcggcctgggcacactcttaaaccaatctgtaatctctgttcctgaggttttagtaacctgatatttctctcctgttggagacaaccctgaaaatgagttttcacctcagagaacagaccaacaaaaggtcaggtgagcttaaaaaagctggtgggggggatttgggtccagaaagggcaggctggccatacattcaggggcatcagtgtgactgtctttgcaattaggagccaggccccacagagcttcccactgcatgtgtgtttgacctatgctgggccctgatgttgattcgtttccttcactgagcaggtggctcatagttgggctattatacccaggagaatgttccaggccagcccctagttaacttaaaataatcaaaaagtttagaatcaaatttgaaacaaatktattcagggtcgcatattgaggatcacctccataaggatagatttaaa

SEQ ID NO: 322060 - DNA, 488 bp, Homo sapiens
agagctgcccagagagggctccagggcagggcacagtcacagtgcagggaagagacaggacgccggggccccggctgtcagcgcggccgccatcgtatggctgaaggggactgaggccgagctgggcaagaactctgggcgcagattgtgaagctgactgcggggaggcctgggtcccgccacagccgcttcccaccggttccaaccagccccgttccctctctcgggatgtcggaccggcactctcaccatttctaggcttccagggggccctggcgtcttagctgtggatctcccaatacccgcaggtcgcagggccacacaggctgggcttctacgtgcagmggacacaaagcagacagacgaaaattggagcttcggcggcagcgagaaacaaaggccgcgccaaatcccggaagccgccctgtctgctccagctgcgggcctgattggacggccccccgcccagtgtccccgattggataacg

SEQ ID NO: 322061 - DNA, 611 bp, Homo sapiens
cagtctcctctccctgcagcgcaggctccactctctgatgtgacactagagtactgctgtggcattggggttcatgtaagatgtgaaccagcagctttgagctgtgtgttgtgggctgtgtttcagtggaagttggtaggcgtaaagagaggacactggccactaggagaacgcaagcagggtgctgcatgttctacattctgtgagaggttccgagagtaaatagaatctgatggccaaatctgtaaatgtaaacaagcatcttaggagtgaaagatcaaggctacaaagtatccagagcsataaccacaactatacctaccagtaaaatgcaagactggaatacagtattgttgtccttcctcttactgaagagctagaatcaggacaggtgatccaggttctggagctcgaccagagcagttccattttttatttagaatcagcctgagtctctcctgcctggcttatcattgggcaatcaacccagggtaactgggaaccctctcacaattacctagccatctttgaaacatttgagaatatccagagcagaattttatcaggctgacaagagtggttaatgctacttctttctcagtgtaaaagaa

SEQ ID NO: 322062 - DNA, 510 bp, Homo sapiens
aaaaaaaaaacaaaaaaaaaaaccaaaaaaaaaaccctgaggtcaaaataagtgaacaatgcatttaatcatgtcaaggtacggatatgtctgactcatgtgtcaagtcaggccatccaattacttgagagattctcccaccccatcctgttcacttaagtgctcaataatcattctctcaggagactctgaactatgccccagtgagtgccccaggtatattttactttgcaagtttttgcaccatctcactggggtcagttgtttttgtcttyggagtgctattttatttcacaaaccttttaccatttttatttcactatttttctgtcccctaagagaatgcaggggcaaaaattattttggtttccccttcaataccagcatctgattgtctgaacagcaatgtggctccaagaaatggaagctgggttgggtaaaggcaatattaatatctcaagggagtagctttccaaaaaaacagcacaccagaagatgactcagccacag

SEQ ID NO: 322063 - DNA, 599 bp, Homo sapiens
caggctataatacctaaattttatttgaattcattttgtccatttattcatcattattaattcagcacatgcttatagggtgcctgctatgtgccagaaatagtagtgtcagcacatagtgttttaaaaatataaaatataaaaagtgatttaaataaattggyatatcatatagttacccaattactgtcactttaatttctacagaaagaataagttaactctgatatgtaatgaaaatcatccatatgaaccttaatatttatttcagaatatgcttttcactttttcagtttgctggagttttgtacatttaagcctcgctcaactcctcggaaactgtcagaagtataatcatagcattttaaagctgtagctaatcttagaaataatccagtcagaaaattgctcaaaatgcaattttacagaagtttaatagtttgtctatttactcatttgttaaaggcagaggtatcgagggcgcaagcatgatgattctttgttcatcttttttatgacactatgccatatgtatttttccccagaagaactcagctttttcacttaacagttcaaatgttaaaatacaaactggaatg

SEQ ID NO: 322064 - DNA, 599 bp, Homo sapiens
caggctataatacctaaattttatttgaattcattttgtccatttattcatcattattaattcagcacatgcttatagggtgcctgctatgtgccagaaatagtagtgtcagcacatagtgttttaaaaatataaaatataaaaagtgatttaaataaattggtatatcatatagttacccaattactgtcactttaatttctacagaaagaataagttaactctgatatgtaatgaaaatcatccatatgaaccttaatatttatttcagaatatgcttttcactttttcagtttgctggagttttgtacatttaagcctcgctcaactcctcggaaactgtcagaagtataatcatagcattttaaagctgtagctaatcttagaaataatccagtcagaaaattgctcaaaatgcaattttacagaagtttaatagtttgtctatttactcatttgttaaaggcagaggtatcgaggrcgcaagcatgatgattctttgttcatcttttttatgacactatgccatatgtatttttccccagaagaactcagctttttcacttaacagttcaaatgttaaaatacaaactggaatg

SEQ ID NO: 322065 - DNA, 562 bp, Homo sapiens
ccaagattgaagacactagggaaggactacatatgttgatgaagatgagttcagtttgaatgtggtgagtttgagatgtctttcaggcttctaaatagatctgccatgtaggtggttgcactacgtgtcaggaatcctagtaagacgggaatgattttgttcagcttccaaatttgccaggagtgctggccttctgaaccaaacacatatcattgttggagacttagatttttaaaaagagatgctttcattaatgartgaactgaacacctaacataaccccaaagtcactcagagtatcttatgcatcacctcctatataaagccattgctgtttcagctgtcattcactctcatgtgtttgcagaaagctttgcattttcctgatgcagcttatctcttcaaatacttgccaatatcctcttcttccaagcctggggtgggaatgggtgtgttatacttcctatatccttgtaattaggagccacgtgactgggtctggctaatggactgtgagcagaaattttatgtatcttttacagggtgagagtagataattgct

SEQ ID NO: 322066 - DNA, 533 bp, Homo sapiens
cttatgcatcacctcctatataaagccattgctgtttcagctgtcattcactctcatgtgtttgcagaaagctttgcattttcctgatgcagcttatctcttcaaatacttgccaatatcctcttcttccaagcctggggtgggaatgggtgtgttatacttcctatatccttgtaattaggagccacgtgactgggtctggctaatggactgtgagcagaaattttatgtatmttttacagggtgagagtagataattgctggtaagaaattctgatgttctttgccctactgcaatgaatccttaaactttacattgagatgacagtcttataagacactggggcactggagctctcagagtctagatttttgaatgactatgtaaatcagaggacactctcccctatgtactctccaaacactctgatccgcaatggctatgtggtatgtccaaggaataaagctttcgtgctgaagcccttgaggcttttgtactgtttgctaccacagaatatcctacacaatgctat

SEQ ID NO: 322067 - DNA, 533 bp, Homo sapiens
cttatgcatcacctcctatataaagccattgctgtttcagctgtcattcactctcatgtgtttgcagaaagctttgcattttcctgatgcagcttatctcttcaaatacttgccaatatcctcttcttccaagcctggggtgggaatgggtgtgttatacttcctatatccttgtaattaggagccacgtgactgggtctggctaatggactgtgagcagaaattttatgtatcttttacagggtsagagtagataattgctggtaagaaattctgatgttctttgccctactgcaatgaatccttaaactttacattgagatgacagtcttataagacactggggcactggagctctcagagtctagatttttgaatgactatgtaaatcagaggacactctcccctatgtactctccaaacactctgatccgcaatggctatgtggtatgtccaaggaataaagctttcgtgctgaagcccttgaggcttttgtactgtttgctaccacagaatatcctacacaatgctat

SEQ ID NO: 322068 - DNA, 597 bp, Homo sapiens
ttggttaaaatagaagagtgatgttatgctatttatagaagaggtctcggtgctctagaaatatgctctaatgcccaatagttcactttattcagtcttcaaatctgatgaaaatgctagggattaggcagaaagccagccttgtaaactaggatctggcagacactccaagtcagaaacagatttcaatgctttgcttccttgtctttttcctgagaaactgtgtcaacttttcttcctaataatcttgataactcaaaacctgattgctagagctcaactrtcccttaatgagttgttatagcacttgtccttgcttcaaaggccaataaatcatttgtctaaaaatctttctagaaaagttttttttccctcaaaaataagcaggtaggcagtttccgtatttcataggagctaagcaaggaccatgtccactgtttgtatggcataggatattggagaccagtaagtacatcatgagggaaaaagatactcagttagctctttctccttctcaaagagagagcagacaattcaaaattgatattttagtgagtgttgcctgctgctgtaatgttatcttattgtttatacttg

SEQ ID NO: 322069 - DNA, 586 bp, Homo sapiens
tattggagaccagtaagtacatcatgagggaaaaagatactcagttagctctttctccttctcaaagagagagcagacaattcaaaattgatattttagtgagtgttgcctgctgctgtaatgttatcttattgtttatacttgcagaaactctcacatacaattgtgtctgaaaaatacattattaataatcyatcctaaaagcaagctcgtgtgtgatgtttcataatatccagagattttgtagaaaaacaaattgtcagttatctgggataatgaccatgaagcatgtgcttatttaagggtctccagacacagatggattttgaaagtatgatttgaaacactttttaaacaatcctttcagctttattctcaggtgttaagttaaaaaaatactatactgactcatggtttaacagcttcatcttttgcttggatcacttgtgagtaaacaaaagaaattccaagaaagaaaagctttttcataaattatcctaaaattatataagattcagtatcgcattttaaaagtgttcacgtaagtacagctctgcatgttttgactgagtattcatgtcctttt

SEQ ID NO: 322070 - DNA, 586 bp, Homo sapiens
tattggagaccagtaagtacatcatgagggaaaaagatactcagttagctctttctccttctcaaagagagagcagacaattcaaaattgatattttagtgagtgttgcctgctgctgtaatgttatcttattgtttatacttgcagaaactctcacatacaattgtgtctgaaaaatacattattaataatctatcctaaaagcaagctcgtgtgtgatgtttcataatatccagagattttgtagaaaaacaaattgtcagttatctgggataatgaccatgaagcatgtgcttatttaagggtctccagacacagatggattttgaaagtatgatttgaaacactttttaaacaatcctttcagctttattctcaggtgttaagttaaaaaaatactatactgactcatggtttaacagcttcatcttttgcttggatcacttgtgagtaaacaaaagaaattccaagaaagaaaagctttttcataaattatcctaaaattatataagattcagtatcgcattttaawagtgttcacgtaagtacagctctgcatgttttgactgagtattcatgtcctttt

SEQ ID NO: 322071 - DNA, 575 bp, Homo sapiens
aattgcaaaataagaatgtttacatttcaaactcttcaaatatgtttgcatttgagtgcatawgtgcattttatctttgatttcaaaagagaaagaaaacatttatctatcacaggaaataagacacaattacttttacttatataataccctttgataaaaaaatatcggaactctaagcactttaaaattattaataaagctatatttcacaagtacagaaataggttctttgaggtaagatatgaccaagtttcagtaccatacctgaatttaattaagtggatatttcaatcagaaattaatttctaactgaggcacttagctaaatgtctttttaacagtatttatgattgccgtagcatggttgcaagctagtatctgtgatgaaatgttgtccaacagggctgtatgaactcttggaaataatatcttaaattatatcttaaccaagtagtttcaccgaattcttacactagtttataggccattcccgttctacatggaaattccccagctctcattttgtacaaacagctagaaatagaaggcgtgttttatatcttcatctgctt

SEQ ID NO: 322072 - DNA, 620 bp, Homo sapiens
aataccctttgataaaaaaatatcggaactctaagcactttaaaattattaataaagctatatttcacaagtacagaaataggttctttgaggtaagatatgaccaagtttcagtaccatacctgaatttaattaagtggatatttcaatcagaaattaatttctaactgaggcacttagctaaatgtctttttaacagtatttatgattgccgtagcatggttgcaagctagtatctgtgatgaaatgttgtccaacagggctgtatgaactcttggaaataatatcttaaattatatcttaaccaagtagkttcaccgaattcttacactagtttataggccattcccgttctacatggaaattccccagctctcattttgtacaaacagctagaaatagaaggcgtgttttatatcttcatctgctttatgattttctagagctcctctttaacaaaatgcctttttatgtgcataagtaataatgttaaacataaaacatactatgtgtgagacatttataggagtgaccagtatgctttctttgtatttccgcaatagcagtaaccaaaaaagataaactttgacctctcatttgcattattagtaaagtatgga

SEQ ID NO: 322073 - DNA, 620 bp, Homo sapiens
aataccctttgataaaaaaatatcggaactctaagcactttaaaattattaataaagctatatttcacaagtacagaaataggttctttgaggtaagatatgaccaagtttcagtaccatacctgaatttaattaagtggatatttcaatcagaaattaatttctaactgaggcacttagctaaatgtctttttaacagtatttatgattgccgtagcatggttgcaagctagtatctgtgatgaaatgttgtccaacagggctgtatgaactcttggaaataatatcttaaattatatcttaaccaagtagtttcaccgaattcttacactagtttataggccattcccgttctacatggaaattccccagctctcattttgtacaaacagctagaaatagaaggcrtgttttatatcttcatctgctttatgattttctagagctcctctttaacaaaatgcctttttatgtgcataagtaataatgttaaacataaaacatactatgtgtgagacatttataggagtgaccagtatgctttctttgtatttccgcaatagcagtaaccaaaaaagataaactttgacctctcatttgcattattagtaaagtatgga

SEQ ID NO: 322074 - DNA, 559 bp, Homo sapiens
acaatagtaatgttggtgagaatttggatatgccaaacagaagctgggaagtgcttcctttaagggaaaaagtgaaagttctccacttaaggaaagaaaaaaaaagtatgctgaggttgaggttgctaatgtctatggtaagaatgagtcttctattcatgaaatcgggaagaaggaaaacaaattatgcaagctttgctgtcatacttcactataraagttatggctagagtgtatgataagggcttagttaaggtggaataagtattaaatttgtaggtggaagatgaacaggaagattgacagcaattgggttcagtactatctgcagttccaggcatcactagggggtcttctaatatatccctggagaataatgggggactactgtactttaaaatgaagtgtcaaatgcttctatgatagttactaacgaagtcagccaagaaggaaaaatactcaaaacttttattgttacaaattatgtctttctaagttatctctctccctatcctataatagcagcatatttcttacattgcatgaattactattattt

SEQ ID NO: 322075 - DNA, 575 bp, Homo sapiens
caataatgaaataagttgaactttgcctcttggtaaagccacatttatttcttttttaagtaaatttgacttttattgcagttccaattcatgcttttagtgatatacaacaatttccaaaatgttaaagtaatttcagtaaytgagccttcaatggcaatgcttataaattatatttattagtatggtcaagataagaaaggaatttggactttgattataaaatgcagcacctttctctgattctcttggctgaacttttcctcttcttttttccattcttttctttgctgtcttccatcttttttgctcgaatttctctcattaaatcaaaaagtaccttgtcaacattagctgtgttttagcagatgtttccacatagttaacattccactggtcagctctgttttttgcctcttttacagaaaccggccttttatcttctaaatctgatttgttaccaaccagtagaaatggaacattctcatcttcttttactcttaaaatctgctccctgaagtcagctgtagctgcaaaggattccatttctgtaatagagaagacacagagaaacc

SEQ ID NO: 322076 - DNA, 621 bp, Homo sapiens
acagcaccttaacccgataataaagtgattgaagttaacatcaccataatggggcagtgaataccatgggccttctgatatgatgcattgcaaaagacacatcatcacttctgtggtattgccaccaaaagtgcatagaataaatttcatcatgaggaaacatttgacaaacttaaattgagagactatttacaaaataactggcttatattatttagaaaatgtctatgtcatgaaacrcaaattaagattgaggaattgtttcagaataaagaagtttaaagacatgaaaatggaatgcaaggcataagatgatattttctttagctataaaagacattattgggaaacctatgaaatctgaattaagtctgtagattagataatagtattaagactagtgaatgttaatttcctgatgagagatcatgcctttatttttagaaaatatgcacctaaaagaaaaggagtaagccagcaacttactctctcacattgttcatgaaaacaataaagtgtacacacacacatatacacacacacagagagagagagagagagaaagaaagggggggtggagagagagttcagaaacctttggagattctcagtgaagttcat

SEQ ID NO: 322077 - DNA, 621 bp, Homo sapiens
acagcaccttaacccgataataaagtgattgaagttaacatcaccataatggggcagtgaataccatgggccttctgatatgatgcattgcaaaagacacatcatcacttctgtggtattgccaccaaaagtgcatagaataaatttcatcatgaggaaacatttgacaaacttaaattgagagactatttacaaaataactggcttatattatttagaaaatgtctatgtcatgaaacgcaaattaagattgaggaattgtttcagaataaagaagtttaaagacatgaaaatggaatgcaaggcataagatgatattttctttagctataaaagrcattattgggaaacctatgaaatctgaattaagtctgtagattagataatagtattaagactagtgaatgttaatttcctgatgagagatcatgcctttatttttagaaaatatgcacctaaaagaaaaggagtaagccagcaacttactctctcacattgttcatgaaaacaataaagtgtacacacacacatatacacacacacagagagagagagagagagaaagaaagggggggtggagagagagttcagaaacctttggagattctcagtgaagttcat

SEQ ID NO: 322078 - DNA, 538 bp, Homo sapiens
gtgtccatctggtccctatgtagaaagataattaaaaaccagagatgtggttgaacttgatgccttttaaggtctctttcaacagaggctctatgatttcataatattaagagcattgccattctgccctggaagtgactttaaaacaattagcatttataatttgcaaggatcatttacatrtatttccttaatacagtctgagaatttttttaattttccaaataaataaatttactttataatatgttttcttaagaaattatatatttaaaatttaatataataaacaacattttatatgataaattattagcccaaagttgaataatcaacaactggcaaagcctagggttgaagcgaggtcttgcaactccaagtcctttatgcctcttgactctattagttacacattcattgtatatttattgagcacatagtatgtactggatatggtagtatacactgtgaaaatagtgttaaatatggagaacagtctcctgtgcttagtgtaagagatattccagttcaagttctt

SEQ ID NO: 322079 - DNA, 569 bp, Homo sapiens
aatggcaagggaaaggctgttttcacatcaatgctttcctggcctcttccctggaggaatcaagcccactcagagcatgtatggtgcatagccttgctccaaatcttaatagaaaagttatctacttatttacaataaaacatgtgtcttctgttgttttcattaaagcatagcgtctgaaaaagtttaaccttttctttaacttgctagcagatttaaagacaccttaaaaaaatcctggcattattttttatattcaagaagttacagaggctaatgaactatttaagcaaaaaaacctgtgttaatattgcttgtacatttctgagctaaattattttagggaggatttaatatgacagtacttaaaagccttaccaaagacataaaaatctctttattgatgtatgacttttagaattcctgaaagactttgttccatataaaacattaattcttaagagttaacaaattttgtgttttaggctatccaacaacgtaggctttasttctgtccaaggcccaattctcgtcaaccttaaattcaatatgagtcaagattacaaaac

SEQ ID NO: 322080 - DNA, 551 bp, Homo sapiens
tagttatctttcaaggcacagctcagaagacacttcctctaagatgcccactttcaccacctgtgagaagtcatcacaccctctttggaatccccaaacattctgtatgactaatgtggcatttgtaatcttcacttttgtattataattgtctgcatatgtacaaactctgtattctgtgtacatatctcacaagtgtacatatttaattacatgaattaatacataaaaatacatagaaaacaaaataatattcttgaattcagagattttataagaagaaaaataaatattcctaatatagcayttaagctgaatatatctttaggcaaacatcaaaaggtataggaaccataaatgaagtcaaatcagcctgagctgtaattcatatgtctatttaaacttatgtaaatgagggcatttaagtggaaacatctgtctctctatcgatctacctatctacctatctatcatctatcgctctatctatctatactcacatatctatcatctatctatctaacatgtgcatcaatacaaacaaattataa

SEQ ID NO: 322081 - DNA, 575 bp, Homo sapiens
ggcagaatgaatcctctgtttactctaatttccacaagaggccaggacttccagtgtatccctcacaacttgaatgctgtcgcatgaatttgtggcccacagacaactcatrtatttactgctgttacggcctttttccctttcttttctctatagaattttagagtctgacatactaaatattttacaacttagtacatctatctgcttctctctattatcccataaactaaatgaaggttggtatctttttctgttctgggcactgctatatcttcagcccttagaatcaggtacttggcaggtactcaccagtatttgttaaatacttgaatgaacttccacttgtcatgaggaaatacatttttccctcagaacatcttcctactttttgaatacatacacaaaagcctacaataaaatcaatcaccagaacttaatatttgatttcattttgtttttttttctatttcaagactttcttaatgttatagaaaataattcaataaatcatcttctattgaaaggaacctcttttataattgtactttctaaatacacaaatttctttatat

SEQ ID NO: 322082 - DNA, 575 bp, Homo sapiens
ggcagaatgaatcctctgtttactctaatttccacaagaggccaggacttccagtgtatccctcacaacttgaatgctgtcgcatgaatttgtggcccacagacaactcatgtatttactgctgttacggcctttttccctttcttttctctatagaattttagagtctgacatactaaatattttacaacttagtacatctatctgcttctctctattatcccataaactaaatgaaggttggtatctttttctgttctgggcactgctatatcttcagcccttagaatcaggtacttggcaggtactcaccagtatttgttaaatacttgaatgaacttccacttgtcatgaggaaatacatttttccctcagaacatcttyctactttttgaatacatacacaaaagcctacaataaaatcaatcaccagaacttaatatttgatttcattttgtttttttttctatttcaagactttcttaatgttatagaaaataattcaataaatcatcttctattgaaaggaacctcttttataattgtactttctaaatacacaaatttctttatat

SEQ ID NO: 322083 - DNA, 618 bp, Homo sapiens
tatttggagcttcaaatttttaatagtgtcagagtctttcacagcacgctacaaatttcatgagtatcagatgtcaagatcaaacaaaacacagttgccagtaaaataaccaactatcaatttacttctgctttacagttaatgtgtgtgcacccacatcaatgaaaaaaataaacttaaatttcttatgtttaatttgattttgtatatttatttatttggttgttaaaaaactcaaggtctaccactttctagaaaaatgagaaacctcctggaaaaaatataataatactgatattcatcaatagtattgctatagttcaaagtgagggctgttattactgacaaattattttttcttttccatattttcagtttatattacctacactagtttgcatcattgtttataaggaactaacactggtagatggctgtttataaattgtgacctattatattgccctatgtggaaggtacagagatgtccctaagatacacttcatgtttttactactctatatgttgagcttgctttcaattggattctytacaatttatgtaaacaaatgtattgtcattttttcaagaatcagtgggcatagttacacacataag

SEQ ID NO: 322084 - DNA, 624 bp, Homo sapiens
ctgttttggtgagagggtgaaacaattaaggctaattgggtctgagggtgggagcaagcrgtggttaggtaagattcattaagcattaattttatgccaaggtttttccttagctgtcatcctaagaaccacactgttagccacaattaagtccatttatagattaggaaacttgcaaaaaatcacagacctgaagaatagcagttccagatttcaaaaccagatttgtgctcttactgggatactacaccgctttatgaagcagtagcagtgattctcacatagggcccgacacatagttgggactcaatgaatatttgtgatgtgatggatggatgaacactaacaaaattctcagcaaggttaaatgttttaaaaagtcacaagaagtccaaagagctctaaggagcttagggagacagaaagtgtttcatcctccatgtcaactactcagtgactgaaaggagaatgataccaatttcaacaagtgctgactgaacccacagacatctgtgagaaaaggaacacacgtttcaaatgcctcccctccagctccgtttgccgagttgacaagttaattactcagctatcaggagataacttggtagtagtaacacatgtaac

SEQ ID NO: 322085 - DNA, 624 bp, Homo sapiens
ctgttttggtgagagggtgaaacaattaaggctaattgggtctgagggtgggagcaagcagtggttaggtaagattcattaagcattaattttatgccaaggtttttccttagctgtcatcctaagaaccacactgttagccacaattaagtccatttatagattaggaaacttgcaaaaaatcacagacctgaagaatagcagttccagatttcaaaaccagatttgtgctcttactgggatactacaccgctttatgaagcagtagcagtgattctcacatagggcccgacacatagttgggactcaatgaatatttgtgatgtgatggatggatgaacactaacaaaattctcagcaaggttaaatgttttaaaaagtcacaagaagtccaaagagctctaaggagcttagggagacagaaagtgtttcatcctccatgtcaactactcagtgactgaaaggagaatgataccartttcaacaagtgctgactgaacccacagacatctgtgagaaaaggaacacacgtttcaaatgcctcccctccagctccgtttgccgagttgacaagttaattactcagctatcaggagataacttggtagtagtaacacatgtaac

SEQ ID NO: 322086 - DNA, 462 bp, Homo sapiens
tgtctttatacttatatgagtttcttgtagacaatatagtgtcttgctttattatccagtctgactttctctgcctttcaattggagtttttagaccattttcattttatgtaagtattggcatgatttgatttaagtctaccatcttgctatttattttccatttgcctaatttgttctgtattccttttacctctattttgaagaaaagttacaaaacattctttatttgtttttatgtaagtgatgtgtcttcccccaccccccttcccagctgcttttaaggttgttttcaattactgatttttagcagtttgattatgatgtgcctcggtgtgactttttgttygtttggtttttttttttttatcttgctgttttttttagcttccaaaaaaggatatgggattttatgaaattgatttaaaaatgtaaccattatttttcaaatgagttttctga

SEQ ID NO: 322087 - DNA, 520 bp, Homo sapiens
tgcatgtttgtttatgtagaaaatccaaaataattgacaaaaacttctgaaattaataagcaattatagcaaggttgcaggatataaggttaagacaaaaaagcccatcgctttcctatataacagctatgagcaagtggagtttgaaattaagaacacaataccatttacattgggcaacccaaaaatggaatacttaggtataaatctaacaaagtatgcrtaaggtctatatgaggaaaactatacaactatgatgaaagaaatcaatgaagaattaaataaatggagagatattccatattcatgcatagaaagactcaatactgtcaagatgtcagttcttcccaatttgattcaatggaatctcaatcaaaattccagcaagtcactttgtggataatgacaaactcattccgaagtttatatgaatgggcaaaagacatagaatagccaacacaatactgaaagagaagaataaagttggagggctgacactacttgacttcaaaacatacta

SEQ ID NO: 322088 - DNA, 581 bp, Homo sapiens
ctagacagttttatttggcctttacaggatgatttcgttgaaaaaacgagtgttgcttctaataaaaaatattgactagtcattatctagttaaataatctcactttccagatgaagaatggcacccaaagagcgactttgaaagttgacacagtaagttagtggcattgctgtgactaaaattcaggttccttacaaagaaaaagtatgtggctaaaagacttgctttctagcttttgcttgtttttccaactttgttccaagtcatgtgctaggttctagggcaacaaaaataaggttagcatctaatgtgaaaatcagatgagcaaatcaataattacaatacattattgtaaggacttcttggacttaagcacagggtgctaccagaatgccgaagaggagcatgtaaatctgacagcrgggaagagggtaggtgatagcagaatagaatcttgaagaatatttagatgtctgacacaaaaagagtagagtgtttcctttctctcacagagaatactatgtgcaaaggcactgaggtgagagaaaaaattatgttccagaagtggaaacagcatggt

SEQ ID NO: 322089 - DNA, 579 bp, Homo sapiens
taatgttattaagatctcaactctcatcaatttattacttagctacaattcaatattaatcaaaccccagactgtttttggtagaaattgacaaaataatttcaaaatatatttggaaatgtctacaatccagaatagccataaccatttttgaagagtggttgcaagaattacaytacgtaatttcaagacttactaccagaaagctacaataatcaagacagtatagtattggcaaataaatatatatgtgaatcaatggaatagaaaatagagtccagaaacagacttatacaaacacacaaacatacacacacacacacatacatatatgaccaactgactttaataaagacatatgtgatcatttggtttttaaagcaattcaatagggaaatgacagtaatttcaacaaacagtgctgaaacaactagatatccatatggaaaaataatgtgccatgatatttacctcatactgtatttataaattaactcaaaatgaatcatagacctaaatgttaaagtgataaacttctaaatgaagacatttataaaatctttgtgaccttgggttagg

SEQ ID NO: 322090 - DNA, 575 bp, Homo sapiens
gtaaaaatgtaaataataataattcatagactttttgtgaaaatgaatgagctcctgagtacagtatgtgacatataatagacacaccaaaaatactagtgacttttctaaatttgactatgcctttaaattgttctgtgaccctgagtgaattagtctacatgtgctcatattaacttcytcatccacaaaatgcatttgatattttcttgctgtttcctctgaattattgtgagaatctggcaagatggttatagaaaaagtacaaagaactatggagtattaggtaatattattttttataggctgttgcaatggagttgaccaaccaggtcagtcaggatatagtcatatcctttataaaatcatttcctattttttctctcactgataatatataaattcagtcaaaattgttcatgaatttattatatatatgggtttgcacctagaaaaacagatgacaaagtagtaagaaaatgatatctatgaagaaagcttaaataaatgagaattatttatcctgtaaagatgatttgcaatgagtttttaagtgtagaaacagggttttgctt

SEQ ID NO: 322091 - DNA, 575 bp, Homo sapiens
gtaaaaatgtaaataataataattcatagactttttgtgaaaatgaatgagctcctgagtacagtatgtgacatataatagacacaccaaaaatactagtgacttttctaaatttgactatgcctttaaattgttctgtgaccctgagtgaattagtctacatgtgctcatattaacttcttcatccacaaaatgcatttgatattttcttgctgtttcctctgaattattgtgagaatctggcaagatggttatagaaaaagtacaaagaactatggagtattaggtaatattattttttataggctgttgcaatggagttgaccaaccaggtcagtcaggatatagtcatatcctttataaaatcatttcctattttttctctcactgataatatataaaktcagtcaaaattgttcatgaatttattatatatatgggtttgcacctagaaaaacagatgacaaagtagtaagaaaatgatatctatgaagaaagcttaaataaatgagaattatttatcctgtaaagatgatttgcaatgagtttttaagtgtagaaacagggttttgctt

SEQ ID NO: 322092 - DNA, 544 bp, Homo sapiens
tccactctcattactttgacatagttctagagttcctaggtggcataataaggcaatgtatggatacatacaaacataatacataaataaatatataaaattgaaggcattcagattggaagggaagtcataaaactatcttcattttcaaatgacatagtcctgtaaccaggaagtcctaaggaatctacaaaaaaataacaaatgaattcagcacaatcaggatataagatcatacactcacaaaactgtgtttctatatactggcaataatgatccaaaaatgaaattaaaaaacaatttcattcacaatggtatcaccaaaaacaaagtattggaaatacagttttaagaagttgtgtcaggyttgtacattgtaaactgtaaagcattactgagaaaaattaaagatctaaataaaatgagagatattccatgttcatggattggcaggctccatattgttaagatagaaattcttctcaaatttgtctacagactcagtgaaatttctagcaaaattctggttttttttttaacagaa

SEQ ID NO: 322093 - DNA, 523 bp, Homo sapiens
gaaattgttggggagtcttctaggaaagcacataagagaaggacagacagctgatctatccctttttgcccttcgccctcatgttctgattcctgcttagaatcacctgtgtcttagactgtgggccatccgtgagaatggaaaccacatgattgtgacagtaaatggaaaagcagaaggaarctgggtccgtgatgacaatgtgaggtcacataccaatcctgaatgcctattttaagatttttttaatgtaaaaaataaatttctctcttctttaggccactgctatttctattctctgctactagccgcagaatgcaattcctaactgatatacaccacatttaccctatgctccagaaatctacatgcagatgactgggggcaactacaaatacttatggctagaaattactatttggaaaatgcatagaaataactgagaggattttcctgcatggacctcatttccaaggtgcatctcaaagacagtcttataccagccatgcagcgtggaggaatt

SEQ ID NO: 322094 - DNA, 597 bp, Homo sapiens
gtttccaagcctcccttgcagcttgaagatgtagacagaaattgttggggagtcttctaggaaagcacataagagaaggacagacagctgatctatccctttttgcccttcgccctcatgttctgattcctgcttagaatcacctgtgtcttagactgtgggccatccgtgagaatggaaaccacatgattgtgacagtaaatggaaaagcagaaggaagctgggtccgtgatgacaatgtgaggtcacataccaatcctgaatgcctattttaagatttttttaatgtaaaaaataaatttctctcttctttaggccactgctatttctattctctgctactagccgcagaatgcaattcctaactgatatacaccacatttaccctatgctccagaaatctacatgcagatgactsggggcaactacaaatacttatggctagaaattactatttggaaaatgcatagaaataactgagaggattttcctgcatggacctcatttccaaggtgcatctcaaagacagtcttataccagccatgcagcgtggaggaattctagaagcctttcaggaagagaaagtggctgctattg

SEQ ID NO: 322095 - DNA, 557 bp, Homo sapiens
cttcgccctcatgttctgattcctgcttagaatcacctgtgtcttagactgtgggccatccgtgagaatggaaaccacatgattgtgacagtaaatggaaaagcagaaggaagctgggtccgtgatgacaatgtgaggtcacataccaatcctgaatgcctattttaagatttttttaatgtaaaaaataaatttctctcttctttaggccactgctatttctattctctgctactagccgcagaatgcaattcctaactgatatacaccacatttaccctatgctccagaaatctacatgcagatgactgggggcaactacaaatacttatggctasaaattactatttggaaaatgcatagaaataactgagaggattttcctgcatggacctcatttccaaggtgcatctcaaagacagtcttataccagccatgcagcgtggaggaattctagaagcctttcaggaagagaaagtggctgctattgctgctgatactgctgcagtttagtggaaactaaaaggctggaatgatgacctttcaagaagaacaaa

SEQ ID NO: 322096 - DNA, 597 bp, Homo sapiens
gtttccaagcctcccttgcagcttgaagatgtagacagaaattgttggggagtcttctaggaaagcacataagagaaggacagacagctgatctatccctttttgcccttcgccctcatgttctgattcctgcttagaatcacctgtgtcttagactgtgggccatccgtgagaatggaaaccacatgattgtgacagtaaatggaaaagcagaaggaagctgggtccgtgatgacaatgtgaggtcacataccaatcctgaatgcctattttaagatttttttaatgtaaaaaataaatttctctcttctttaggccactgctatttctattctctgctactagccgcagaatgcaattcctaactgatatacaccacatttaccctatgctccagaaatctacatgcagatgactgggggcaactacaaatacttatggctagaaattactatttggaaaatgcatagaaataactgagagrattttcctgcatggacctcatttccaaggtgcatctcaaagacagtcttataccagccatgcagcgtggaggaattctagaagcctttcaggaagagaaagtggctgctattg

SEQ ID NO: 322097 - DNA, 559 bp, Homo sapiens
gcttacttgtgccaaatcctgcttactttatgttgaatgggtttagggagactcactagcatccttctttcatgatcccttgaaatcagaagggcaagagatgcaytcagtagccacatatgaggacccattataagattttgattctcttgattctgtgttctaagaagccagacacctgtgcatgagctgaaggcaattcctccagctttacagtcttccctactgactgccagagtcttcccaagtcctcacatcactacccaagggctcataaacactcttgcaaggtagatgagctctccatatggtttgtcgtttgagagaaatcctaggagatcagcagcttggaagaccataacagccatggatttgacttctgtttccatgttcttttccttccttttattgtctgcgtggatcatatattctcttggacaccagcttgaatcctaaaagccttccagaataatgtatttgctcttgttctttagggaagcttagcttcaaggcttttatggttatttcatcctgaatttgctgaggtttcatgggttac

SEQ ID NO: 322098 - DNA, 559 bp, Homo sapiens
gcttacttgtgccaaatcctgcttactttatgttgaatgggtttagggagactcactagcatccttctttcatgatcccttgaaatcagaagggcaagagatgcactcagtagccacatatgaggacccattataagattttgattctcttgattctgtgttctaagaagccagacacctgtgcatgagctgaaggcaattcctccagctttacagtcttccctactgactgccagagtcttcccaagtcctcacatcactacccaagggctcataaacactcttgcaaggtagatgagctctccatatggtttgtcgtttgagagaaatcctaggagatcagcagcttggaagaccataacagccatggatttgacktctgtttccatgttcttttccttccttttattgtctgcgtggatcatatattctcttggacaccagcttgaatcctaaaagccttccagaataatgtatttgctcttgttctttagggaagcttagcttcaaggcttttatggttatttcatcctgaatttgctgaggtttcatgggttac

SEQ ID NO: 322099 - DNA, 549 bp, Homo sapiens
attaagtatctgcttgtattttcttttattaaatataccacattctcaatagatcatttacttttcctttcagataattggtaggaaaatgtgctcccaagcttctgataatacatcaatatattgcaaatgcatttactagatcaaagaagccagtctcaaaagatggtatactgcgtgaattcatgtatagaatatttaggaaaaggcaaaactgaagagtggagaacaaatcaatggctgccagggttcgrggaggaagaacaggcttgcacagaaagaaacagagtgaggaaattttggtgggggaggggtcatcgttaggtataaccattttaggagtgtttgtatggacccatgtttttaatttaaaaacactgaattgtatacaaccaggaataaattttattctatgtaaaataataaaaaatgttaaaggccatgtgattttttgcatggtataaaatgggaagaactttggttaggtatctaataattatggatttgctacactacttaagataccatgtatttataccatctttagtt

SEQ ID NO: 322100 - DNA, 549 bp, Homo sapiens
attaagtatctgcttgtattttcttttattaaatataccacattctcaatagatcatttacttttcctttcagataattggtaggaaaatgtgctcccaagcttctgataatacatcaatatattgcaaatgcatttactagatcaaagaagccagtctcaaaagatggtatactgcgtgaattcatgtatagaatatttaggaaaaggcaaaactgaagagtggagaacaaatcaatggctgccagggttcgaggaggaagaacaggcttgcacagaaagaaacagagtgaggaaattttggtgggggaggggtcatcrttaggtataaccattttaggagtgtttgtatggacccatgtttttaatttaaaaacactgaattgtatacaaccaggaataaattttattctatgtaaaataataaaaaatgttaaaggccatgtgattttttgcatggtataaaatgggaagaactttggttaggtatctaataattatggatttgctacactacttaagataccatgtatttataccatctttagtt

SEQ ID NO: 322101 - DNA, 546 bp, Homo sapiens
catagtctgtctatttttattggaagtaggcaggaagtcactgggtagagctagacctggtaattaagatatagctaaacattcactcctgacaaatagaacagaacaaatcagacttccagaaagcctgttcactgggagcagagaaaaactataggatccaatctcactgataagtaggaaagtatattactaaaacaaaaaaagacaaagacagatttgaaawcaaattctaaatgcaccaattcttgtttctattatactttctgagcttcagttcctgctctgtgaaatgagaacaaaaatactttttttttctaaagggtgctgtgaataacaaataaattattctatgttacatgccttatatatatatgaggcattcaataaatactgaataaattcccttttctttgacccaagtcttttctgcttttctgtctcttaaaagccttataaatagttatttatccaactacttattaagtatgttctttctatcaactccagtgccaggcagtggatatcacggaagaatcaggcatg

SEQ ID NO: 322102 - DNA, 603 bp, Homo sapiens
atacagaaactaactggcccacagccaagaatgagctcccatgcagagaccacattccctccaaagtcataaagtcactcaaccctgcccgtgaaactacctggacactgttgtgagtgtgaagtgaaggaggcatttggaatgattgggcctttaaaccagtagtggctgtgtaatgcacgagactccacactggcagctactgacttactgtgatgagacagattaaagtggagtttccctgctaagccagcagaatggccactccgtggaaggatcagattcattactgaaaatgtagtgactacattttcttgtatatctgaatgtagtgtgaggatacacctccttactaaatatgaataccactgtgataaatatagttatgtaaatacacagggacccacacaagctatgacagagaaacttcaactaatttgtgggctcargtaatggtgtggaggtgatgtgtgagcagaaattaggagtaggagataactcagtaaccgaattaagggagcaccccaggcaaaataacagcttatgtgcaactgccaccagaggtagaaagaagcagaggaaggcctgaaccaaaacttacca

SEQ ID NO: 322103 - DNA, 594 bp, Homo sapiens
tctaaaatgcgataagattccattttaagaagtcgatgctgggcttttactgaggaacacaataaattaatcattaaatcaattgtattgattgaagcttgcaagacatgaaaaattgcagagcaaggaatatttccacgaagaggtaggaaaggacctcagcattctgggggaaggtaaataagtatgctatgataatactgtttcatttcttccctgggatatgagcttcatttatcaactctacaataaatatggtgaccatttaatttcaaacatttaccgtaaataatagcttccatttattaagtgctcactaagcactctattctatgcttagtgctttcatacattatgtcacgtaaccctaacaataaatctggttggagcacatctctatccccattttgtagaagagaatactgaggctgatgcgcatgagtaacttgttcagagtgacccatctaatgaaaatgtctggcttggaacccacttctgagtgaaccgaaagcccatgctcttaacactgaattctrtcttaaattaataaactaatagagagagaggcttgaaattctgcagcatgcttcccta

SEQ ID NO: 322104 - DNA, 495 bp, Homo sapiens
tattgagtccatttattttatggttctgaccacatgccaaaaccatttggagtcttcaagagtttaaatagcaatgtccaattaataaggcataaagccctgcagcttcctcacccccatgcatttagacagcccttctccgttctgaatgtctaattgataggagacacttgcaggcctgtgtttctacatctatgctgaggatgagagcagttagagtggcttccagaatgggttcctctgcttggaggcatttcccaaccctataytgagcagtcatgtcaaaaagaatgacagttcctcatggacattgtgtctgtggttggaataggatgaaagttctggtagttttatttccttctgagacattctggaacattttagcaatgaatttgtctcctggcttttttgaactaagaactccccacatattattttcataatgagacattctgctgagggactaatgaaatagcattgcagtgttcaaagtga

SEQ ID NO: 322105 - DNA, 570 bp, Homo sapiens
atttccatatctagcaaggtattgtgtaaaatgcaagatctctggaggcacaggcactgagtatgaatatcaaatgtgtcccaagactggctagttytttattttatttctattagaaagagctattcataagaatattgggcataagactgttgtgagaaccgaggaagataacatatataaatgtactttgttatgtattttattaatcagacactttttggctgcaagtgccaaaaacttaactcaaattagctttaaaaaccgtatttactgactccagtaactaggaaggatgaaacagatctctcctcacaagttgctagggcttaaaggatgcaatctgagtgctctccatctcttgcctttggctttatcctttcttttgtaaacagtctccttgaggtttacctaatcttagctagcaacactataggagacagcaagtctttgtctccacttctgcatctataaatcccacagattctcattggccagacttcatcctatccctaaccctcaagtcaattaataggactagaataagagaatttgtgtaactgactaagc

SEQ ID NO: 322106 - DNA, 566 bp, Homo sapiens
gaggttgttttccaaaaacctttttggaaggatggtgtcctgatggtagtcctctctctgtcttttcttttggcccacagtattcctgtgccttctggactgacggtccagtggtatccaaagggatactttgagctggaggtcatttaggtctgtatagggtccctaagaagtgtcagtgtagcagaccctgggagagaatgcagtggcagaaaaatgtatttctcattgaaacctctgggtaagaacattttaaagcttaatacaaccaggatctgtcagtgtgcccacagattgaggcctgaaataatctggaacccgaatactactcattaatgatgaaagtgctatgggaaagtgctatgggggtggagggagggaagcwgtagcttaaatatggacatacatggaggcagagtcatattttcaaaatcattttttttcttgagatcaacccatccaagcaaagtcattataaagctaaccaaggataacagctctatcaatcaaatcttttgccttcacagttgagtgatatctttttcttcccttcataaccaaaaccg

SEQ ID NO: 322107 - DNA, 566 bp, Homo sapiens
gaggttgttttccaaaaacctttttggaaggatggtgtcctgatggtagtcctctctctgtcttttcttttggcccacagtattcctgtgccttctggactgacggtccagtggtatccaaagggatactttgagctggaggtcatttaggtctgtatagggtccctaagaagtgtcagtgtagcagaccctgggagagaatgcagtggcagaaaaatgtatttctcattgaaacctctgggtaagaacattttaaagcttaatacaaccaggatctgtcagtgtgcccacagattgaggcctgaaataatctggaacccgaatactactcattaatgatgaaagtgctatgggaaagtgctatgggggtggagggagggaagctgtagcttaaatatggacatacatggaggcagagtcatattttcaaaatcattttttttcttgagatcaacccatccaagcaaagtcmttataaagctaaccaaggataacagctctatcaatcaaatcttttgccttcacagttgagtgatatctttttcttcccttcataaccaaaaccg

SEQ ID NO: 322108 - DNA, 499 bp, Homo sapiens
tttcttagcttcctgagtagctagaactatagccatgtgccaacacacccagccaattttttattttttgggagttgagttgctatgttgcccaagatagtcttgtactcctgaactcaagtgatccgcctgtcttggcctctcaaagtgttgggattacaggtgtaagccaccacacctggcctcaacaaatatttcttaaatgcctaatatatgccaggccttgtcttaagtgctgaggattcagcaacaaagaacacagaacagagagtactgttcttatggagttaatagtctagagacaacgtgtgttggcagagtcctggcatgaaagtcatgccacactaaaactggagacagggatagttgtgtaasataactacccgatggaggattagacctttggttgatagcaactaaccaaccctcaatcctaccagtagacagaagagcaataaacactcagcctcaccttgctcttgctctcgctctctaactt

SEQ ID NO: 322109 - DNA, 566 bp, Homo sapiens
gtaagataactacccgatggaggattagacctttggttgatagcaactaaccaaccctcaatcctaccagtagacagaagagcaataaacactcagcctcaccttgctcttgctctcgctctctaacttcctgctggtggtcctttttggccaaattgaactggaagttagaggacaggctagcccactaacagtttgtgcaggtcaggcttctggactacatagttcaaaagggtggagagtgactatggaggagaaacaaatggcatccaacacatatgtgtgaagttcaaccttcagaactcagtaagaatgtggtctggggaaaacagttgcrtaaagcagaatgccaattctggcattgatacttctcctgaaaataataataataacagcaagagaaaacatttattgaaaacatactctattgttgacatgagctgagagtctgtagcatatgatatcccataagctctctccttcaagcattattctaaagggctctagaagctggccatttgccaaattttaaacattttaaaccaatatatgaagagttaaactgc

SEQ ID NO: 322110 - DNA, 593 bp, Homo sapiens
ttcttctaattttttttttgtggatttctctgaggtgaagattttctttattaatctttgaaagaagtcccaaaggccaaggaaactcatctgactataagctgctgtgtgtttccctaccatgttgagaaagggtggctggttgatctaatgcattacattgcttcagcatatatttttttatttatttcatcctttattccccattatcatatctgtaggcttgcttttttaaaataaagtatcatctcttcaaagaaaaaagaaaaatgcttgaggcatcacattacctgacttcaaattttactacaaggctatagtaaccaaaacaccatggtactgctataaaaattgtcacatatataaatggaacagaatagagaacccagaaataaggggacataccaacaaccawtttttgaaaaaatcaacaaaaatatacattgggaaaaggacactcaattcaataagtggtgatggaaaaattgaactgccccatgcagaagaataaaactggatccataccccttaccatatacaaaaactaaccaagatagattaaagacctaaatgtaagacctggaagctacaaa

SEQ ID NO: 322111 - DNA, 576 bp, Homo sapiens
caaattaaaggttgacaaatttttctttcagcactttaaaaacatcacccattttcttctggcttccataggttctattaaagaagstactgtcagttttattgttactccttgctaggcaagtgtctttttttttctggctgcttttagcattctctttgtctctctacctcttcttatacacacacacgtatgtatatgtgtgcatgtgtgtgtgtaaatatatttttatatacatacatatatactctatgtctacatctatatttatctatctatagctatatatcatgtctttggttttcagaaatccaattagataagtttttaacctgcttggagtttatggagattcttgaattggttggggggttttctgtgatgcattttgaaaactctcttctagtagatcttcaaatatttcatttgtgtcttttgctctctgctcctcttttggtactctaaagacacaaataagacatgtgtttatatttcccatcttgatgtatcccatgtgtcctttatactttgtctattttttcctttctttttcttctgtctatgcttcagttttct

SEQ ID NO: 322112 - DNA, 576 bp, Homo sapiens
caaattaaaggttgacaaatttttctttcagcactttaaaaacatcacccattttcttctggcttccataggttctattaaagaagctactgtcagttttattgttactccttgctaggcaagtgtctttttttttctggctgcttttagcattctctttgtctctctacctcttcttatacacacacacgtatgtatatgtgtgcatgtgtgtgtgtaaatatatttttatatacatacatatatactctatgtctacatctatatttatctatctatagctatatatcatgtctttggttttcagaaatycaattagataagtttttaacctgcttggagtttatggagattcttgaattggttggggggttttctgtgatgcattttgaaaactctcttctagtagatcttcaaatatttcatttgtgtcttttgctctctgctcctcttttggtactctaaagacacaaataagacatgtgtttatatttcccatcttgatgtatcccatgtgtcctttatactttgtctattttttcctttctttttcttctgtctatgcttcagttttct

SEQ ID NO: 322113 - DNA, 576 bp, Homo sapiens
caaattaaaggttgacaaatttttctttcagcactttaaaaacatcacccattttcttctggcttccataggttctattaaagaagctactgtcagttttattgttactccttgctaggcaagtgtctttttttttctggctgcttttagcattctctttgtctctctacctcttcttatacacacacacgtatgtatatgtgtgcatgtgtgtgtgtaaatatatttttatatacatacatatatactctatgtctacatctatatttatctatctatagctatatatcatgtctttggttttcagaaatccrattagataagtttttaacctgcttggagtttatggagattcttgaattggttggggggttttctgtgatgcattttgaaaactctcttctagtagatcttcaaatatttcatttgtgtcttttgctctctgctcctcttttggtactctaaagacacaaataagacatgtgtttatatttcccatcttgatgtatcccatgtgtcctttatactttgtctattttttcctttctttttcttctgtctatgcttcagttttct

SEQ ID NO: 322114 - DNA, 507 bp, Homo sapiens
cggcgcccaaccttcctctgcagcgcccctaccgacccgcgctccgcagctcctgagggctttcgagcccagatggtcatctgagacgagaggtggcggcgaaggagagtctcgcctgtcackctcccggagcaggggcttcatgaggtggccatggaaacagcctggcagactcccatctctcctggtgccatctccggagcggaaagtggagcgccccgctggcgaccaaggccgcactgagagccctggtttggtcaacagttgggctccaaggtaccacttcccagacctccagcctccccactgatgatagatacacaaaggtcatcttgtttctttatgaggcaatggattgtgttcacctagccgagttgttaagcataagagaatgtatgaaaagtaattacaaggttcaaaatcctgagctttgataaatgatagatatgatgatgagcacatgttagtgatattactgctctgcgggacgtctgaatcagtaattgc

SEQ ID NO: 322115 - DNA, 542 bp, Homo sapiens
ctgagggctttcgagcccagatggtcatctgagacgagaggtggcggcgaaggagagtctcgcctgtcacgctcccggagcaggggcttcatgaggtggccatggaaacagcctggcagactcccatctctcctggtgccatctccggagcggaaagtggagcgccccgctggcgaccaaggccgcactgagagccctggtttggtcaacagttgggctccaagktaccacttcccagacctccagcctccccactgatgatagatacacaaaggtcatcttgtttctttatgaggcaatggattgtgttcacctagccgagttgttaagcataagagaatgtatgaaaagtaattacaaggttcaaaatcctgagctttgataaatgatagatatgatgatgagcacatgttagtgatattactgctctgcgggacgtctgaatcagtaattgctgtcttttaagcatctgttgtgtgccaaatactgcactaggcactttacgggcattgctcttgtttaagtcgtctggtcaaagttgc

SEQ ID NO: 322116 - DNA, 542 bp, Homo sapiens
ctgagggctttcgagcccagatggtcatctgagacgagaggtggcggcgaaggagagtctcgcctgtcacgctcccggagcaggggcttcatgaggtggccatggaaacagcctggcagactcccatctctcctggtgccatctccggagcggaaagtggagcgccccgctggcgaccaaggccgcactgagagccctggtttggtcaacagttgggctccaaggtaccacttcccagacctccagcctccccactgatsatagatacacaaaggtcatcttgtttctttatgaggcaatggattgtgttcacctagccgagttgttaagcataagagaatgtatgaaaagtaattacaaggttcaaaatcctgagctttgataaatgatagatatgatgatgagcacatgttagtgatattactgctctgcgggacgtctgaatcagtaattgctgtcttttaagcatctgttgtgtgccaaatactgcactaggcactttacgggcattgctcttgtttaagtcgtctggtcaaagttgc

SEQ ID NO: 322117 - DNA, 441 bp, Homo sapiens
tgtcagcaggcaagagagcttgtgcaggggaattcctctttataaaaccatcagatcttgtgagacttattcactattatgagaacagcctgagaaaatacccaaccccatgattcaattagctctcaccaagcccctcccatgacatgtgggaattatgggagctacaattccagatgagatttggctggggacacagccaacccatatcacatggatatgaggcagacaycttgacttttcagttcacaggtgtaagagaagccatgtcttttcctgatagagaggactaagaaatgcaaagctataatagattggactttggattgtctttcgtgaggagtggtggaagatgctctaccttcaggacgaagggaacaaagggatatttaatggccagaagagtgaactgcagtggagactgttgttgctcaccaagtt

SEQ ID NO: 322118 - DNA, 520 bp, Homo sapiens
tccaaacatgttgacatcctgtcttactgtcatactgggtagatagcagaaatctatattcaccgtgtcctttaccttaaagttaagaatgtacttaacagtgatttttttttttttaattgaggcggagtcttgctctgtcgcccaggcgcgatctcggctcactgcaagctctgcctcccgggttcrcgccattctcctgcctcagcctcccaagtagctgggactacaggcgcccgccaccacgcccggctaattttttgtatttttagtagagacggggtttcaccgtgttagccaggacggtctccatttcccaacctcatgatcctgccctcctcggcctcccagagtgctgggattacaggcatgagccaccatgcccggccagtggtttctttttttttactgctctatttacagttgcattttctggttcattcttaaccaactggttttcaagcactatgttacagttaaactgtattttccatttattatttcccaattatctttaata

SEQ ID NO: 322119 - DNA, 558 bp, Homo sapiens
ttcatagatggttctgcacgatatgcaggcaccacttgaaagtggatagctgcagcactacagcccctttctaggacatccctgaaggacagcggtgaagggaaatcttcccagtgggcagaactttgagcagtgtgcctggttgtgcactttgtttggaaggaaaaatggccggatacgtgattatatactgattcatgggctgyagccaatggtttggctgggtggtcagtgacttggaagaagcatgattggaaaattggtgacaaagaaattcggggaagacgtatgtggatgcacctctctaagtggtcaaaagcaagatatttgtatccaatgtgagtgctcatcaacaggtgacctcagcagaggaggattttaataatcaagtgaataggatgacccattctgtggacaccactcagcttctttccccagccacccgtgctgtcacccaataggcccatgaacaaagtggccatggtggtagggatggaggttatgaatgggctcagtaacatggacttctactcaccaaggctgacctggctacggcca

SEQ ID NO: 322120 - DNA, 567 bp, Homo sapiens
gcgcgaatctgagcctgtcggcggcgcagctccagcacttgctggagcagatgggagccgcctcccgcgtgggcgtcccggagcctggccagctgcacttcaaccaggtaaggccgccaggtccgggcagccctccgtactgtgggtgtccctagacttcactttgtatatgagccgtttttatttgggaaaagtgcaggagaaagaatcttgttatatttctcaagtagaaggcggtatctggtgacacttgcttttcactagacgaggctgaaggattaaaaggttaacgttgttaagggatttggcagccggaaactgcagttttacgcctgatgaactgagaggtccgactctggtgattktaacattttatagaaaactttatgaagtagttgagggtgtgacgccactttaacagatgctttttagataggaatgagttacttaaatcttgccagaaagataacggctcgcacacttcctacaaggttagcaaggaagattatcacatgccaccctggttaacagttgcccggtgcgtaaccagtgctatttgaaaacgag

SEQ ID NO: 322121 - DNA, 552 bp, Homo sapiens
atggtggctgagaagtccaacagtctgcaagctggagaccctggaatgtgagtaatgtggcttagtccaactcagaaggcctcagaaycaggaaagccaatgttataactttgtctgaggccaaaagtctcagaagctgggagaccactggtgtaagctctggagtccaaaggtcagcaagcctggagttctgatgttcaaggcagaaaaaagtctgtcccaggtcaggcatggtggctcacagctgtaatcccagcactttgggaggccaagacagaaggatcacttgaggtcaggagttcgagaccagcctggccaacatggtgaaactaaaaaatacaaaaattagccggcgtggtggctcatgcctgtaattccagctacttaggaggctgagacatggagaatcgcttgaacctgggaggcggaggttgcggtaagccaagattgaaccactgcattccaccctgagggacagagtaagactctgtctcaaaaaaacaaaaagaaaagtgtctcagctctcagagagagaccaattctccttctata

SEQ ID NO: 322122 - DNA, 552 bp, Homo sapiens
atggtggctgagaagtccaacagtctgcaagctggagaccctggaatgtgagtaatgtggcttagtccaactcagaaggcctcagaatcaggaaagccaatgttataactttgtctgaggccaaaagtctcagaagctgggagaccactggtgtaagctctggagtccaaaggtcagcaagcctggagttctgatgttcaaggcagaaaaaagtctgtcccaggtcaggcatggtggctcacagctgtaatcccagcactttgggaggccaagacagaaggatcacttgagrtcaggagttcgagaccagcctggccaacatggtgaaactaaaaaatacaaaaattagccggcgtggtggctcatgcctgtaattccagctacttaggaggctgagacatggagaatcgcttgaacctgggaggcggaggttgcggtaagccaagattgaaccactgcattccaccctgagggacagagtaagactctgtctcaaaaaaacaaaaagaaaagtgtctcagctctcagagagagaccaattctccttctata

SEQ ID NO: 322123 - DNA, 543 bp, Homo sapiens
tactggctgactttccacttctttaggggtcagtgacaggggtcaaggggagtaatcttttcttttatggacttcaacggtttggatgargttcacccacattatggagggtaatctgctttactctgtcagagtctactaattaaactgttaatctcatctaaaatatgtctttatggaaacatctagaataatgtttgaccaagtatctgagtacagtgacctagccaagttgacacaaaacatttatcatcacagctatccaataaaatttagtgaaatttagtactgtttggaagggcaaaggaatttatctctagagtcagttacagttcagtagaaatccattactcccaaacctctctgtgaccttagacactaagctaataataatttcttgacctctaaatatgggaataaatctttctttacttcctaggattattgtgagcattaaatgatttaatcaatattgtttaacacatcctagatgctcaataaatattacctgattattattttattattattttaaagcatatt

SEQ ID NO: 322124 - DNA, 543 bp, Homo sapiens
tactggctgactttccacttctttaggggtcagtgacaggggtcaaggggagtaatcttttcttttatggacttcaacggtttggatgaggttcacccacattatggagggtaatctgctttactctgtcagagtctactaattaaactgttaatctcatctaaaatatgtctttatggaaacawctagaataatgtttgaccaagtatctgagtacagtgacctagccaagttgacacaaaacatttatcatcacagctatccaataaaatttagtgaaatttagtactgtttggaagggcaaaggaatttatctctagagtcagttacagttcagtagaaatccattactcccaaacctctctgtgaccttagacactaagctaataataatttcttgacctctaaatatgggaataaatctttctttacttcctaggattattgtgagcattaaatgatttaatcaatattgtttaacacatcctagatgctcaataaatattacctgattattattttattattattttaaagcatatt

SEQ ID NO: 322125 - DNA, 543 bp, Homo sapiens
tactggctgactttccacttctttaggggtcagtgacaggggtcaaggggagtaatcttttcttttatggacttcaacggtttggatgaggttcacccacattatggagggtaatctgctttactctgtcagagtctactaattaaactgttaatctcatctaaaatatgtctttatggaaacatctagaataatgtttgaccaagtatctgagtacagtgacctagccaagttgacacaaaacatttatcatcacagctatccaataaaatttagtgaaatttagtactgtttggaagggcaaaggaatttatctctagagtcagttacagttcagtagaaatccattactcccaaacctctctgtgaccttagacactaagctaataataatttcttgacctctaaatatgggaataaatctttctttacttcctargattattgtgagcattaaatgatttaatcaatattgtttaacacatcctagatgctcaataaatattacctgattattattttattattattttaaagcatatt

SEQ ID NO: 322126 - DNA, 604 bp, Homo sapiens
ttgttcttttaaagaagatatgtgtcttaagcttttaaagacacttttaagcttaatgtacaggaaaacatcatttggttccttgctctgattaatttctactctcttttccctctgacccacagtttggggatatggattcctgtcagtgacgattattaatctggcatctctcctcggattgattttgactccactgataaagaaatcttatttcccaaagattttgaccttttttgtggggctggctattgggactcttttttcaaatgcaattttccaacttattccagaggtaaggatgttggctatttgtttctgtgaataattgtttcttttgaaygttttagcactttgtatgtttttagcctccataattcttacagcgttttatggtctagtttatagtgtcttggataagagaaagctgaatcacagcaattgtaaaggcttgtcccaagctgcagtggatatcactatcagagacaaaattaatattctaggaggccagccactaggacgtgctcagacagctctgggacacctcagaaggccttaaaactttattctgccttgcacttggcaaatttaatttttccacaca

SEQ ID NO: 322127 - DNA, 565 bp, Homo sapiens
ggagttttatctataagcccctgactggggttgctgcctttctttcaggcatgttctgccctgtgaggaagaatctagagagaaagtctggccrtagtcactttgccgtgctgtggtgaattccacccagtccaaacttcctggcctccttagcactgtcagggaaaaattgcctactcaagccttagtaatggcagacacccctctccccaccaagcttgattgtcccagatcgacttcagactgctgtgcttgcagtgagaatttcaagccagtgcttcttagctttctgggctctgtgagagtgggacccactaagctagaccacttggctccctggcttcagcttcctttccaggagagtgaacagttctgtctcgctggggttccaggcaccactggggtatgaaaaacactcctgcagttagctcagtgtcttcccaaacagccaccccagttttgtgattgaaacccaggtccctggtggtgtaggcacacgagggagtctcctgatctgcggattgcaaaaaccatgggaaaagcttagtatccaggctggatagca

SEQ ID NO: 322128 - DNA, 605 bp, Homo sapiens
atagcatttacctttatatctgaaagagagtagagaatgaggggacatttgtgttgaggtccaggaatcagacccatctgggtgttatgggttattttatgattactggaaacaaaaaagatttccttggcacacaatattcagggggaattcctgattcctccatccagctaaattctctttccatcgaactaaagcaagtggggactcctggaataatgcaaggctttgatggcaaagtccctgaacacggggaggggagtcacacacatccctctcttcctctcaatttcaggacraggaaggataagtccacattcttcctatcaaactctcactagagattagaaatagagactttgaactgtgccttgggcatctcctcaggcactggagcagatgtagctctgagaagaaaacagcatggccgcatccttttatccagctcctgctctataaattggcaaagggaactcatcttttattctagttctatataatttactccaaattaaggaggaattcttaattataaatgttaagcagaagttgcaaatatgtaagtttaatgcctctgtttaagagaggcattaataagagaagat

SEQ ID NO: 322129 - DNA, 605 bp, Homo sapiens
atagcatttacctttatatctgaaagagagtagagaatgaggggacatttgtgttgaggtccaggaatcagacccatctgggtgttatgggttattttatgattactggaaacaaaaaagatttccttggcacacaatattcagggggaattcctgattcctccatccagctaaattctctttccatcgaactaaagcaagtggggactcctggaataatgcaaggctttgatggcaaagtccctgaacacggggaggggagtcacacacatccctctcttcctctcaatttcaggacaaggaaggataagtccacattcttcctatcaaactctcactagagattagaaatagagactttgaactgtgccttgggcatctcctcaggcactggagcagatgtagctctgagaagaaaacagcatggccgcatccttttatccagctcctgctctataaattggcaaagggaactcatcttttattctagttctatawaatttactccaaattaaggaggaattcttaattataaatgttaagcagaagttgcaaatatgtaagtttaatgcctctgtttaagagaggcattaataagagaagat

SEQ ID NO: 322130 - DNA, 565 bp, Homo sapiens
ttagtgctatgataaaatttaatacatccattgtgcaccattgaaattatttgacttcactcactgactgctgtttctgctaaattgatatcttagatctaagagtgatttgccatattctagataggactaagcggcctggtgcaaaataaccctgaagtgttcacgactgacccctcagcccagacaaaatcatggagatgcagaccacacaccaaattgaagctgamaacgtgagatacctgggattatcacagccatccagagagcatccttctccatacacataaattaaggcatgtgccctatgccctttctccaatatgattttcctctaatccttggaaccactagaagaacactaactgcctgactctcctattctcctgacaataccacagatgaattaggaacccattttcctaattctctgtgtgttggtttgtttggacagttactctagtgaaatcgagtcttcacaacaaaagatagaggacccagactaagcaacttgcctaaacctgaggactagagtcacttttatcatggctcattgacatgatac

SEQ ID NO: 322131 - DNA, 620 bp, Homo sapiens
tatcttacctttccaaggagattttaagttccttaaaagaaaatatatcttaagtttttctagcttgttgcacttagagcaaaggtcctccataaaaatgttttgattgatttttcctactgtacacatgatgctaaggtcactgtgacccaatagttgaaaaattggccattaattttaaaaatacatactattgtgcttattttttattttccatcttatttcrttttctaaactaatagttattatccttaaatcacttctgagcaattaattttaactttttaaccaactgtactactactactaataataataatactcatttttctttcttcaaccctctctgcaggaagttttaatgtgaaaaataatttaagtcattaaaacaataaatactctgaattgaggtgtaatgggtgacctttatgatagtttcttctcactagagagattgactcacaagttacataaatacttagaaaagatatctatgggggaattcaaacatcagataatgattgaactttttgaatttaccatttcaaccttgaaatcctgtaattctaaattccacttgctgagtaagtagattctgaacaaccaaaagttgcctgttc

SEQ ID NO: 322132 - DNA, 574 bp, Homo sapiens
aaaatatatcttaagtttttctagcttgttgcacttagagcaaaggtcctccataaaaatgttttgattgatttttcctactgtacacatgatgctaaggtcactgtgacccaatagttgaaaaattggccattaattttaaaaatacatactattgtgcttattttttattttccatcttatttcgttttctaaactaatagttattatccttaaatcacttctgagcaattaattttaactttttaaccaactgtactactactactamtaataataatactcatttttctttcttcaaccctctctgcaggaagttttaatgtgaaaaataatttaagtcattaaaacaataaatactctgaattgaggtgtaatgggtgacctttatgatagtttcttctcactagagagattgactcacaagttacataaatacttagaaaagatatctatgggggaattcaaacatcagataatgattgaactttttgaatttaccatttcaaccttgaaatcctgtaattctaaattccacttgctgagtaagtagattctgaacaaccaaaagttg

SEQ ID NO: 322133 - DNA, 544 bp, Homo sapiens
tggtgcacattattggtgtactcatattttctgttactttctacattcttatcttacctttccaaggagattttaagttccttaaaagaaaatatatcttaagtttttctagcttgttgcacttagagcaaaggtcctccataaaaatgttttgattgatttttcctactgtacacatgatgctaaggtcactgtgacccaatagttgaaaaattggccattaattttaaaaatacatactattgtgcttattttttattttccatcttatttcgttttctaaactaatagttattatccttaaatcacttctgagcaattaattttaactttttaaccaactgtactactactactaataataataatactcatttttctttcttcaaccctctctgcaggaagttttaatrtgaaaaataatttaagtcattaaaacaataaatactctgaattgaggtgtaatgggtgacctttatgatagtttcttctcactagagagattgactcacaagttacataaatacttagaaaagatatctat

SEQ ID NO: 322134 - DNA, 542 bp, Homo sapiens
caaattttaaaaggcctaattaaatggagaaacattttatcatcaccggtcagaagacttaatttttttaaatggtgatactctacaaattatctagaaattcaatgaaatccytatcaaaatctcagctggctttttttttgaacaaattgacaagcttatatcataattcatataaaaatttaaggaatatagaatagccaaaaaataataaaaaatgaggatcaaacttgtttgacttatattcccagatttcaaaacttggcataaagatagacatacagattaatgaaatagacttgagagttcaaacacaaactcatacattcattaatgaggtaactaattttccacaagggtgccaagactattgagtggagaaagaatagtctttttcaacaaatggtcctgtgacaaccagatatccacatgaaaagaatgaatttggacccctaactaacaccacatacaaaaattaactcaaaagagatcaaaggcctaaatatccagctaggattataaaactcttagaacataacatc

SEQ ID NO: 322135 - DNA, 569 bp, Homo sapiens
aataataaacatttcctttcaaaggataaacaagttttattgaagagcttacactccttaggaattttaaattaacttaatcttcagtcacttacaaaaaaattcttttatattgtccttatattatgacatgtaaattattactttcttataaaatacataatccacactattgagtaatatacacacagtcatgattcactttgaaaagaagccaaaaaaattcttaataaaaatggtgtkggaatggaaaatagcttatctcatacactgttggtggcagtgtaaatcagtagagccttttcagaagacaacttggctgtattaataaagagtatgtacctttgattttcaaattctacaatttggaatccatcatttataagtataatcatatatgcacaaaactatgtttaagaatgtttgttacattaataatagcataattacttaacctttactgagcatgtactttggagtatggccaaattaaatccatattacagaatgatatgaaatctatctatttttgtctatgtgtttttatatatacatattataaaatatat

SEQ ID NO: 322136 - DNA, 600 bp, Homo sapiens
tgtgcttttgctccctaaagcctagaagtttgactttgtatggccattcttctatctattggagtgggcctacaattgttttcagagatgattgcatgatacatagacaaatagatagacataaaaaatgaacaatctgataactattcaacagtgaagtgcatttacatcatataatataagcagaatgatgcccaattgataaaagctatagtgagcatatttcaaaagraccagtcctcaggtaataactgatgaatcttctacttactccaaaatcttcaaaaataatcttctgtggaataaagtaaaagtatctagatgggtatcactaattatgctgtctgttatttcatacttaagatgtgtttcttacctcctttctaacagtctgtcctgcttttcctttctgttaattccatgttctagcagattaagaatctgacaatggagtcccccgtttcctactcctttgacatttaaccttcctctctctctaacatgtttgttcaaatcctattcagccttcaaagcccaactaaaacatcaccatgtttaggagatctttcttgatttcttcatactgataggctctctttc

SEQ ID NO: 322137 - DNA, 613 bp, Homo sapiens
ttttttctctaagaaaaatctactaattgatcatgagaaaaaaaataactggggccaataaaaacagcattatgctttttttttttttttttaagtattacttcttggtatgaaactgttttggaaagttccttactctgtaactaataaaaccactggaacaaatctggaggacaatcagttactttgcaattaaaaaaacctatgttttgtatatytcaggtctttggctcctgggtttaaataaaatacttacttgctaactctaaaagataggaatgctaattcagtttttggaaaaggctatatgaaaaatgaaacctttcctgtattctttgttttatatttcatgctatctcacatgtatacaattctcacttcagtatactactttaggcataataaagatttaagaaagatttattaaataggtctcctgaagttgtttaaatcaaacacgaatttgaccctgcagttcagcaacataggttaaatggccacacactggattacttgaaagccagggcaactaagaaccttggaaaccaaagaatgtatatagggccagccagtatatcagtaactgtatttagaattcacagaggataaccag

SEQ ID NO: 322138 - DNA, 415 bp, Homo sapiens
agggattagttcattttcatacaccatatcttgttcatcaaaggaattttatttttcatctttggaaaacaggttgaaccttttaagagcaatagtgtgagttttcctttgttattttttaacatcagggctaactctagatcaaatactctctctatatttcctcgtwctaatatagctgaatttaccctatcctcatttatcatttcaacaatcaaaaaggtcagaatgccgaccaatcgagaaagactacctagcctatctgaaggctagaccctgtaatttcacaggcagtgtcttctcagaatactattctattgctttttattattagaaaacaaacaaaaatctatcttattcactgacctagtaaacatgaacaaccccaaattttccattaactgatattagaaat

SEQ ID NO: 322139 - DNA, 590 bp, Homo sapiens
ctagaccctgtaatttcacaggcagtgtcttctcagaatactattctattgctttttattattagaaaacaaacaaaaatctatcttattcactgacctagtaaacatgaacaaccccaaattttccattaactgatattagaaattagaatatctttgatgctttgttggattcatcctacrtctttgctttcaaagtttttccaacccctgctccttttctctccactccctttatcttctttgctgattccgaactccactgtggctgtaatgcctccctaatgcctgcaacagtgcctcattgccatggaaataatcactttaaaaaacaatacaatacaatacaataagtaataatgaaagcttaggcaggctgtacagtaggaagggagggtagactcagaaatagaacccagacttactgacactaacagctactcccttaatgtagtccttagatcactaaattcctctcttattttcactctcattttcatatacatactctccgatgatctcaggcagcatatagattttgaataaagaaaatgccaaagtagcagtgagacaatgaaacttgttcgata

SEQ ID NO: 322140 - DNA, 561 bp, Homo sapiens
ttccgaactccactgtggctgtaatgcctccctaatgcctgcaacagtgcctcattgccatggaaataatcacttkaaaaaacaatacaatacaatacaataagtaataatgaaagcttaggcaggctgtacagtaggaagggagggtagactcagaaatagaacccagacttactgacactaacagctactcccttaatgtagtccttagatcactaaattcctctcttattttcactctcattttcatatacatactctccgatgatctcaggcagcatatagattttgaataaagaaaatgccaaagtagcagtgagacaatgaaacttgttcgataattatttgagatcatagctagtgtacaacctgtatgttcaggaaaagttagctctcaaaatgccctcctcagaccccctgaaatctgggtcaaaacggcattagattggatatttgtttttcattcttttttagttacatcatcacaatactttcatttttttttcccaaaccttagcagaaaactctgttgttgatcacatctgatttgagagatgcaga

SEQ ID NO: 322141 - DNA, 561 bp, Homo sapiens
ttccgaactccactgtggctgtaatgcctccctaatgcctgcaacagtgcctcattgccatggaaataatcactttaaaaaacaatacaatacaatacaataagtaataatgaaagcttaggcaggctgtacagtaggaagggagggtagactcagaaatagaacccagacttactgacactaacagctactcccttaatgtagtccttagatcactarattcctctcttattttcactctcattttcatatacatactctccgatgatctcaggcagcatatagattttgaataaagaaaatgccaaagtagcagtgagacaatgaaacttgttcgataattatttgagatcatagctagtgtacaacctgtatgttcaggaaaagttagctctcaaaatgccctcctcagaccccctgaaatctgggtcaaaacggcattagattggatatttgtttttcattcttttttagttacatcatcacaatactttcatttttttttcccaaaccttagcagaaaactctgttgttgatcacatctgatttgagagatgcaga

SEQ ID NO: 322142 - DNA, 590 bp, Homo sapiens
ctagaccctgtaatttcacaggcagtgtcttctcagaatactattctattgctttttattattagaaaacaaacaaaaatctatcttattcactgacctagtaaacatgaacaaccccaaattttccattaactgatattagaaattagaatatctttgatgctttgttggattcatcctacatctttgctttcaaagtttttccaacccctgctccttttctctccactccctttatcttctttgctgattccgaactccactgtggctgtaatgcctccctaatgcctgcaacagtgcctcattgccatggaaataatcactttaaaaaacaatacaatacaatacaataagtaataatgaaagcttaggcaggctgtacagtaggaagggagggtagactcagaaatagaacccagacttactgacactaacagctactcccttaatgtagtccttagatcactaawttcctctcttattttcactctcattttcatatacatactctccgatgatctcaggcagcatatagattttgaataaagaaaatgccaaagtagcagtgagacaatgaaacttgttcgata

SEQ ID NO: 322143 - DNA, 561 bp, Homo sapiens
ttccgaactccactgtggctgtaatgcctccctaatgcctgcaacagtgcctcattgccatggaaataatcactttaaaaaacaatacaatacaatacaataagtaataatgaaagcttaggcaggctgtacagtaggaagggagggtagactcagaaatagaacccagacttactgacactaacagctactcccttaatgtagtccttagatcactaaattcctctcttattttcactctcattttcatatacatactctcygatgatctcaggcagcatatagattttgaataaagaaaatgccaaagtagcagtgagacaatgaaacttgttcgataattatttgagatcatagctagtgtacaacctgtatgttcaggaaaagttagctctcaaaatgccctcctcagaccccctgaaatctgggtcaaaacggcattagattggatatttgtttttcattcttttttagttacatcatcacaatactttcatttttttttcccaaaccttagcagaaaactctgttgttgatcacatctgatttgagagatgcaga

SEQ ID NO: 322144 - DNA, 585 bp, Homo sapiens
caatacaataagtaataatgaaagcttaggcaggctgtacagtaggaagggagggtagactcagaaatagaacccagacttactgacactaacagctactcccttaatgtagtccttagatcactaaattcctctcttattttcactctcattttcatatacatactctccgatgatctcaggcagcatatagattttgaataaagaaaatgccaaagtagcagtgagacaatgaaacttgttckataattatttgagatcatagctagtgtacaacctgtatgttcaggaaaagttagctctcaaaatgccctcctcagaccccctgaaatctgggtcaaaacggcattagattggatatttgtttttcattcttttttagttacatcatcacaatactttcatttttttttcccaaaccttagcagaaaactctgttgttgatcacatctgatttgagagatgcagattgctggttgctgccaggaataatgtgtcacattatataaataaataaaacaagcgccatgggaatgagcagtaggcacctcacagaaaccaccgggtagcatccaattgacaggc

SEQ ID NO: 322145 - DNA, 593 bp, Homo sapiens
ccttcacctggagatactagagctaggggtcattagtgaagaaagccattggagctgcgggaaagggtgagcttgcctagagggtacatatagttcaggaacagaaccattaggacaayggcatttaaggaatgggtaaaggcagaaagaaattggtgaagaaaaataaggagtcatgttgtactgaaactattgcaggtaagatgcccaaatttttctttatcacagtctttacaaacttcagacttcatattaggaaggaaaaagttactctcccccacccgctggctattacttacagccaaagacatcttaactgtaaagtatctgatataattttaacaattatctcatatacgtatcaggaaagtaacaaccacaatgagatatcacctcacacccatcaggttggctactatcaaaacaaaaacaaaaaaagaaaataatgtcagtgaggatgtggagaaactggagcccttgtctactgttgacgggagtgtaaaatagtacagccactctgaaaaagtttggcagttcctcaaaatattaaaaattgagttgtcataagatccagcagttccacttctgggtat

SEQ ID NO: 322146 - DNA, 593 bp, Homo sapiens
ccttcacctggagatactagagctaggggtcattagtgaagaaagccattggagctgcgggaaagggtgagcttgcctagagggtacatatagttcaggaacagaaccattaggacaatggcatttaaggaatgggtaaaggcagaaagaaattggtgaagaaaaataaggagtcatgttgtactgaaactattgcaggtaagatgcccaaatttttctttatcacagtctttacaaacttcagacttcatattaggaaggaaaaagttactctcccccaccygctggctattacttacagccaaagacatcttaactgtaaagtatctgatataattttaacaattatctcatatacgtatcaggaaagtaacaaccacaatgagatatcacctcacacccatcaggttggctactatcaaaacaaaaacaaaaaaagaaaataatgtcagtgaggatgtggagaaactggagcccttgtctactgttgacgggagtgtaaaatagtacagccactctgaaaaagtttggcagttcctcaaaatattaaaaattgagttgtcataagatccagcagttccacttctgggtat

SEQ ID NO: 322147 - DNA, 593 bp, Homo sapiens
ccttcacctggagatactagagctaggggtcattagtgaagaaagccattggagctgcgggaaagggtgagcttgcctagagggtacatatagttcaggaacagaaccattaggacaatggcatttaaggaatgggtaaaggcagaaagaaattggtgaagaaaaataaggagtcatgttgtactgaaactattgcaggtaagatgcccaaatttttctttatcacagtctttacaaacttcagacttcatattaggaaggaaaaagttactctcccccacccgctggctattacttacagccaaagacatcttaactgtaaagtatctratataattttaacaattatctcatatacgtatcaggaaagtaacaaccacaatgagatatcacctcacacccatcaggttggctactatcaaaacaaaaacaaaaaaagaaaataatgtcagtgaggatgtggagaaactggagcccttgtctactgttgacgggagtgtaaaatagtacagccactctgaaaaagtttggcagttcctcaaaatattaaaaattgagttgtcataagatccagcagttccacttctgggtat

SEQ ID NO: 322148 - DNA, 626 bp, Homo sapiens
gaaggacattctaacacatgctacaacacggatgaaccttgagaacattatactaagtaaaataagccagtcacaaaaagatgaatactttatgattctacttaaatgaagtgtctagaatagtcaaattcayagcaagagaaataaagtagaatgatggctgccaaggggtacgggtaggggaaaatggggagttctttaatgggcatagagtttcagttttgtaagaggaaaaatttctgaagactgattgcacaaaaatatgaatgtacttaacactactgaactgtacacttaaaaatggctgacatggtaaatttaatgttctgtgtaatttactacaatggaaaattgtataaagcaactgaatggtgacagcaaaaacagattgactgtagaatgattttctatgattggttaaattaaatgatttttattttcttctttatcttcatggattatccaaaattactacaatgggatgtgtaccttttatagtcaaaatagaagttattccaatgaactagttcacactacccattatacgcaaattgatgtacatctccaatgtgctttcagagcaactgcattattctgttatattctgtgtcacgagtttgctgttg

SEQ ID NO: 322149 - DNA, 626 bp, Homo sapiens
gaaggacattctaacacatgctacaacacggatgaaccttgagaacattatactaagtaaaataagccagtcacaaaaagatgaatactttatgattctacttaaatgaagtgtctagaatagtcaaattcacrgcaagagaaataaagtagaatgatggctgccaaggggtacgggtaggggaaaatggggagttctttaatgggcatagagtttcagttttgtaagaggaaaaatttctgaagactgattgcacaaaaatatgaatgtacttaacactactgaactgtacacttaaaaatggctgacatggtaaatttaatgttctgtgtaatttactacaatggaaaattgtataaagcaactgaatggtgacagcaaaaacagattgactgtagaatgattttctatgattggttaaattaaatgatttttattttcttctttatcttcatggattatccaaaattactacaatgggatgtgtaccttttatagtcaaaatagaagttattccaatgaactagttcacactacccattatacgcaaattgatgtacatctccaatgtgctttcagagcaactgcattattctgttatattctgtgtcacgagtttgctgttg

SEQ ID NO: 322150 - DNA, 462 bp, Homo sapiens
taattcatttaatttaactgaacatcagctacatgtagggcactgtgttagtccctccagtggctacagggctaaatgaggtatggtttttgatcttaagaaatacattctaatagtgtattgtattgttctcmaaaatattctctgcccttccttatggagagaatatatgtccccataccatgttggcccataacaaattgtgtgaaaaaaaaaaagatgtattcctcccccttttttcttaattaataaatcttatgtttttatagcagttttaggttcacaggaaaattgaaaggaaaggacagaggtcccatgcacccctgtccccacatgttcacaacactactgacatcccatatcacagtggtacacttgttgtaattgatgaacctctattgacacatcattatcacccaaagtccacagtttctacatcagggctcattctcggtgttgcac

SEQ ID NO: 322151 - DNA, 462 bp, Homo sapiens
taattcatttaatttaactgaacatcagctacatgtagggcactgtgttagtccctccagtggctacagggctaaatgaggtatggtttttgatcttaagaaatacattctaatagtgtattgtattgttctccaaaatattctctgcccttccttatggaragaatatatgtccccataccatgttggcccataacaaattgtgtgaaaaaaaaaaagatgtattcctcccccttttttcttaattaataaatcttatgtttttatagcagttttaggttcacaggaaaattgaaaggaaaggacagaggtcccatgcacccctgtccccacatgttcacaacactactgacatcccatatcacagtggtacacttgttgtaattgatgaacctctattgacacatcattatcacccaaagtccacagtttctacatcagggctcattctcggtgttgcac

SEQ ID NO: 322152 - DNA, 554 bp, Homo sapiens
gggactggtttcatggaagacagtttttccacagaccgggggcaggggtggttctgggatgaaactgttccacctcagaacatcaggcattagattctcataagaagcgttcaacctagatccctcgcatgtgcagctcacaacagggtttgcgctcctgtgagaatctaatgccgctgctgatctaacaggaggcrgggctcaggtggtaatgctcactcacccatggctcatctccttcctgctgtgcggccaggttcctaactggccagggactggtactgtccatggcagaggggttggggatccctgctctagaacaactaatacgtagaaggtatgtaataaatatttattgaataaatgaatacaaaagtagctatatggctaaacataataaggtgacaagaaagtttctgcatatgtgaagacaaaacagtaaaagaagaaagccaccgtcaggatgactatgagttccatgagccttgaaaaaacgtattcatttactagatgacacggatttcgcttttgctaataagtgggcacaattctaa

SEQ ID NO: 322153 - DNA, 530 bp, Homo sapiens
accagtttcctcaacaaccatgacttaactatgtcattagaaggctatatttccttagtctggcttcagaaagctgattttggttacttgtaactgatataaaagtcagagtaagtactaaaatagatcattttaaattagtatagtctaggtaataacatcttaaacatctgatttattacttctatgtactttgaaaccacactttatatcaaagcacttcttggatcctatgttcatcttctttgaactgattatatccacttgaaattatcagcatgcatttgtatattgtaacagaaatgcaaagtcctcaaatatttttttcctcaggtatgytccttactctttattgcaccttacagagataacaagtattttttttcataagcagtacaagccacaagctaatggagtaaaactgtcctgaatctggaattatttgagctgaaataagtaaatttcaaccattattatgtttttagttgataaaattttaagatacataaggatagactggtaatttttgt

SEQ ID NO: 322154 - DNA, 547 bp, Homo sapiens
ggtcatagttaaactcacatctatattatttataatgtttcatttaatccactaaattttaggaaattacttttaaattggtgaacaaaacagktttgtcagaaacagatatctctatttatattattaatgttaggaactaaaatataataatctcacacattcacttagcagagtcattttcaaagtaacaaagaaaatgccttatttgctcttcaagaaaactatgggaagcaggccgggaagacatggttaattctattttacagatgagaacgattcagacagggtgaaatgacattttcaaggtcacttggcccatgaacatcagaatcggatctcaaagccaattttttttaacattaggatgttaccattgtagagtattgcttttttaattattaaaaagcactgaattggtaaaaagttgctttgcaaaaagaaaaattagaggaagtaaaaagaagacagtcaaaaggaccattagagtccataatgttatgtctgtagccagcagcaaatggagtctggcttatttttttcacca

SEQ ID NO: 322155 - DNA, 547 bp, Homo sapiens
ggtcatagttaaactcacatctatattatttataatgtttcatttaatccactaaattttaggaaattacttttaaattggtgaacaaaacaggtttrtcagaaacagatatctctatttatattattaatgttaggaactaaaatataataatctcacacattcacttagcagagtcattttcaaagtaacaaagaaaatgccttatttgctcttcaagaaaactatgggaagcaggccgggaagacatggttaattctattttacagatgagaacgattcagacagggtgaaatgacattttcaaggtcacttggcccatgaacatcagaatcggatctcaaagccaattttttttaacattaggatgttaccattgtagagtattgcttttttaattattaaaaagcactgaattggtaaaaagttgctttgcaaaaagaaaaattagaggaagtaaaaagaagacagtcaaaaggaccattagagtccataatgttatgtctgtagccagcagcaaatggagtctggcttatttttttcacca

SEQ ID NO: 322156 - DNA, 547 bp, Homo sapiens
ggtcatagttaaactcacatctatattatttataatgtttcatttaatccactaaattttaggaaattacttttaaattggtgaacaaaacaggtttgtcagaaacagatatctctatttatattattaatgttaggaactaaaatataataatctcacacattcacttagcagagtcattttcaaagtaacaaagaaaatgccttatttgctcttcaagaaaactatgggaagcaggccgggaagacatggttaattctattttacagatgagaacgattcagacagggtgaaatgacattttcaaggtcacttggcccatgaacatcagaatcggatctcaaagccaattttttttaacattaggatgttaccattgtagagtattgcttttttaattattaaaaagcactgaattggtaaaaagttgctttgcaaaaagaaaaattagaggaagtaaaaagaagacagtcaaaaggaccattagagtccataatgytatgtctgtagccagcagcaaatggagtctggcttatttttttcacca

SEQ ID NO: 322157 - DNA, 330 bp, Homo sapiens
ggattaccatgaggaatttgtgatggctggaatgtagggtgtgtgaccagatgtgaatcacagaggagcccacagaggagcttcrgcacataaactaaagagtttgattttattccttacgcagcaatgaatcactgattttttttggcagagctttctcttttagagcctatccacattgtgatactagcatattctggaaatgactgaagaataaatagatgacagtcacatatatttgcataggtcttatgccctgaaatctctaacagataaaatgcattaaggttctggtgatgagattagagagtaaatgagtcaaagtgataa

SEQ ID NO: 322158 - DNA, 551 bp, Homo sapiens
tagtccctttctggcaccttattacagatgaataaattgagactcacagaaattaaatgacttagccccagttatccaactaactccttaatgtgaggccatgattaggaataggcttctagtattcagtcccatattattttgactgygtaataccacgtgccactttgattttaaagtcaaatctcggcttgaactgtatggggaaaaaaatctccagctggctctgctgaatccccagaggggccctccactttatgtggctgctgaaaaatttatatcctagggtggcagaactcaggaaaggaaaggaaattaatgttgtggtatagttaaataacttagtgttttttttaaaaagacctatatgaactgattgtacacttaagtaacttctcgagggcctgtttgggagaactgaattcaagtagactggactttgtctatggaagaaggcttagatctttatagaattataagaatattccttagagctggtgaggggcatagagaggggagtgcaatagggaggtgttgattaagagtgcaaa

SEQ ID NO: 322159 - DNA, 551 bp, Homo sapiens
tagtccctttctggcaccttattacagatgaataaattgagactcacagaaattaaatgacttagccccagttatccaactaactccttaatgtgaggccatgattaggaataggcttctagtattcagtcccatattattttgactgcgtaataccacgtgccactttgattttaaagtcaaatctcggcttgaactgtatggggaaaaaaatctccagctggctctgctgaatccccagaggggccctccactttatgtggctgctgaaaawtttatatcctagggtggcagaactcaggaaaggaaaggaaattaatgttgtggtatagttaaataacttagtgttttttttaaaaagacctatatgaactgattgtacacttaagtaacttctcgagggcctgtttgggagaactgaattcaagtagactggactttgtctatggaagaaggcttagatctttatagaattataagaatattccttagagctggtgaggggcatagagaggggagtgcaatagggaggtgttgattaagagtgcaaa

SEQ ID NO: 322160 - DNA, 551 bp, Homo sapiens
tagtccctttctggcaccttattacagatgaataaattgagactcacagaaattaaatgacttagccccagttatccaactaactccttaatgtgaggccatgattaggaataggcttctagtattcagtcccatattattttgactgcgtaataccacgtgccactttgattttaaagtcaaatctcggcttgaactgtatggggaaaaaaatctccagctggctctgctgaatccccagaggggccctccactttatgtggctgctgaaaaatttatatcctagggtggcagaactcaggaaaggaaaggaaattaatgttgtggtatagttaaataacttagtgttttttttaaaaagacctatatgaactgattgtacacttaagtaacttctcgagggcctgtttgggagaactgaattcaastagactggactttgtctatggaagaaggcttagatctttatagaattataagaatattccttagagctggtgaggggcatagagaggggagtgcaatagggaggtgttgattaagagtgcaaa

SEQ ID NO: 322161 - DNA, 644 bp, Homo sapiens
ggctgccacatatgtctttatgcctgtttcatgataaatacgtgcaagaggccaggctatgcaaagtgccagctttacaagatcatgagcagctgttttgctacgtggtattgccartttagactcacacaagtggtaaagaagcatccccagtgtcctaaatccttgccaacacttagtgtcaccaggcttcttaatttttaccaatctggccagtggataatagcattgaaaagttatttttattgtgatttggagtccaatattttttctgtaagaaatgcatgtacaatgttataagaacatgcaaaaatcaaaatactttataaatgttcactttataaaaaatgaatgagaaaaacataatgcattttacataaagaaaatctgtaatgcttttgttattggctgggtattttcacaccttccaagtggtggctgttgataaattcagcaataatacctttatgtttattaatattaaatgataatgtcgaattaattaaatgaagttcaatttattgatagttattcattatatcctgctgttctaactcatcctggaagagaatagagtgaaagagaaattgcctttatatataaatgactcatagaatttcatatactgacctaaatagatttca

SEQ ID NO: 322162 - DNA, 616 bp, Homo sapiens
ggggttagggtagcagggctacaagaaaggatcagcagctcttgtgcacatggaatgtctgaacgctgaaacagaactacatcactaccacacagccaygctgctctatggagaacttttatcttttgcctttcactgtgtttttatagtgttctgggtgtcataacttccttttgctattgcttttcctggaagtgaatgtgactttatccattttgcagaaaaaaaaagcctgcacaatgtgaatcactaggcaattggctgttagaagaggatgtacaacctattatgctataggattcctgccctcaaggaatttactatcatgcaatcaaattcagtgggaaagagagaaactttaatgaatgactttatgaaagtaactctaaaaccactaagatatggtcatattgggggagttgcagggggagagaagtagggagaagggttgtcctctttctttctaacctcccctcagtctatcctgtagtttaaattccatgaaggtgctggccatgtctattttgatcactgcattgtccttagcacctatcataacatctagacaatagcaggtattcaataaatgttggaatgtgtgaatgaataagaattt

SEQ ID NO: 322163 - DNA, 616 bp, Homo sapiens
ggggttagggtagcagggctacaagaaaggatcagcagctcttgtgcacatggaatgtctgaacgctgaaacagaactacatcactaccacacagccatgctgctctatggagaacttttatcttttgcctttcactgtgtttttatagtgttctgggtgtcataacttccttttgctattgcttttcctggaagtgaatgtgactttatccattttgcagraaaaaaaagcctgcacaatgtgaatcactaggcaattggctgttagaagaggatgtacaacctattatgctataggattcctgccctcaaggaatttactatcatgcaatcaaattcagtgggaaagagagaaactttaatgaatgactttatgaaagtaactctaaaaccactaagatatggtcatattgggggagttgcagggggagagaagtagggagaagggttgtcctctttctttctaacctcccctcagtctatcctgtagtttaaattccatgaaggtgctggccatgtctattttgatcactgcattgtccttagcacctatcataacatctagacaatagcaggtattcaataaatgttggaatgtgtgaatgaataagaattt

SEQ ID NO: 322164 - DNA, 539 bp, Homo sapiens
attaataacttttctctttcagatatgccatgaattaaatcagaatcccacagagaacagtttggtcacagtttgaaggcattcccagatggttttaaagaaaaacgaattttaagagactgtgatataaatgactaattttatccttgaaagtattaatggtccccttatctcaatgactggccagcttgtattatctttacatcaagtatacataaatttaaacttatagtaaaagattttcttaataataaaactaggaggatggtgtaaaaatcagaaatagaggaggtgaattctggaaaatgtaaatcttttagctttctgcaaattgaaattaagaatttgcatgctgttaacacagttscttatcaggagtcaagtaaactaaaaaggagaaaagtttgcttagttccctatttaatattcaaagatctgactgcatccttttaggactctttgccaacttccactatgcccagtaaattcatatgacttcatattctttgccctatacttccccaggaattgttaaaaaa

SEQ ID NO: 322165 - DNA, 614 bp, Homo sapiens
ggtgggtctttcccgtgctgttctcatgatagtaaatgggtctcacgagatctgatggttttaaataaacttctttcttttgtaatttgcccagtcttgggtgtgtctttataaacagcatgaaaacagactaatacatattacttcttcatttttgaaaaacacttcaaaatattttctgaattcacattttttttagcactccattgtcttctagctacaagtctgctatagttcttatctttgttcttcagcatgtaatgtatctttttctatagttgcctccaagatttcctctttgtcctttgtttttagcagtttgaatatgatatacctgggtggattttgtttgctttttatctatcatgctttgcgctctctgaggttttttttttgttttgtttttggctctgtagtttggtgtttgtctttaatttttaaaaattcacagccatgatttcttcaaatgtttgytctgccctgttgtttctcttctctttctgttattctatttacatgtcagttagaccatttgatattttttcacctctcttggatactctgctgcattttttccaaacatttttctctatatatttctatttgagtagttt

SEQ ID NO: 322166 - DNA, 501 bp, Homo sapiens
agattgggtttcactatgttggccaggctggtctgcaactcctgacttcaagtgatccacccatctcagccttccaaagtgctgggattacaggcatgaaccagcatgcgcagcccttatcatgattcttataacagaccaaattatgtcataatgacattgcttatttatatgctaagcatcatataaatacaattattctrtgtacaccaaatctaaactatcaagtaacttttattgattgttatgtgtaaaacaaaacaatttcatctttattttgcaaagcacttccaagacatttcatataaatagtttaaatttacttttctctctatcttattttcctgatgcagatagttgccatattattgaatgtttgtattctattttagcaatgttatatgttctttaaatggattatcttatttagtaatcacttttcattcacattggagatgaagaaactaagttcactgaattgaagatttgaccagcttcaca

SEQ ID NO: 322167 - DNA, 532 bp, Homo sapiens
gaaggtgggttacagagggagctaggaggtaggtcaagagctctagagtcatgaagatcttgacctcttttaggtttgtactgtggatgtggagacaggtaaacgagttttttgtgttttctgaagaatcactaggatccccttgatgggtaggagaaaagaggaatggagtcatttcctaagtttctgtcctgagcgctgtcttgtgtcccattcactgacctatagagagctcgataatgggagtgatgcactggtggaggggtggagaaaacacagtccygtgatacatttaagcaagacattaaaagtgaaaagatgaaaattggtgtgccacacaagcagtaatcaaaagagagctaggatggctttgttaatgtcaaatgaagtagatcttagacaaggaatattactggggaaaaaagggacattttgtaataataaagatatcactttattaagaggacattccagtcctaaacgtttctgcacctaatgacagagcctcacatcataagaagcaaaacttgat

SEQ ID NO: 322168 - DNA, 623 bp, Homo sapiens
gggtgacactattgaatactaatggatgcaagagagctttctcaaaaatattctatattctgagtataaaacctgagtacatctggagtgtacccattatacaagagtatatgttacaaattaagatgtatgtgcacaattgataaattttattgtgtgcaacatrcatttcaatagaagaataagtttatataattcatacagaaatatttgatcttctacagagacctcaaagcttgatccattatacttcaatattgaataatttctaattctactaaaattgattttttaaattctagaatctaaaagctcttgattacttacaccttcattaagtgaaaaacattgagcaagtataatcacttcttttaaatttaaatttttattttaattggcacataatcaatatatttaggggtacaggatgtaatgtgatgttttgatatatgtgtaccttgtgtaatgattaaattaagctaattaacatatccattacctcacatactatcttttctttgtaatgagaacatttaaaatctaccatgttagcagttgggaaatacacaatacattattattaattatggtcaacatgctgtgcagtacatctcaaaaactta

SEQ ID NO: 322169 - DNA, 632 bp, Homo sapiens
catttcagttatctccactcagttggtggcttgtcttctcatttttatgatgtctctggatgaaaagattatgtttaaatttaaaatagttgcattttaaattctctttatggtaccaataagatatgtttgagaaatgttttccaattctgaaatgacaaagatattattatttagttcttcaagacttttatatccatagttattttataaagcctttaattacattctaaatttaggcaaaacacccatcytctcttagtcttaatttcttactcattacgttagagagcaaggtggttgtactgtatgagttctgctgctgctgctgctgctgctgcttgacttcacaacttcatcattttatgcctggaatacatagcagcttcttaatgggatgtctaatctctaggatctgattaaactcacatcaaaatttacttttctaaaatgctcttgaggtcatcatgaaactcctcaaactttgtcctggagccccccaaaagagcaacaatcccattcgctagtattcccctgcctactccagacccgagtatgcctagaacgtggttggccttcagatgtgtcagtgggacgagtgtgtgaagacacaattggttctcatcattgct

SEQ ID NO: 322170 - DNA, 610 bp, Homo sapiens
aatctttatgttgttgttgaaacacctgaatgttcaaaaacatcccatatcttgagctgttttatttcctaagatcctaagtgctactagttctctattttcagagaggaataactacagtgtccctcaaaagatgttttttctttcttttttccgaagcatgagaatttgtagctcgattcttgttactgcccgatgaaggtgactttctctagttgtgtggtctatcaggaattgccaaagatgctgttcctaggaagatctaaaacattgcattaccacagaggaggatttagaaatagtcttctgacrttcattttaatctattagacacccacagataaccgattgtatgagataccaggtaccagttcttttgcttctaagatgtaactatttagcttatacaatgctgtatactgtatatttgctacacctttccctgtaaccctgccaaacacacacctacagagcaaaacatgtgattgagaacaagaaaaaaatgaggtgtgattataaggcagttaaaaaggtgaatgacatccctttgaggtcttctgttctttagtctgattgtacagaggttggtattgcacaggagccgtgttga

SEQ ID NO: 322171 - DNA, 567 bp, Homo sapiens
tttattaatttgttaagaggtgttaggaaggcttcagagacaaaaatttcttagtacataagcgatttttgttttctaaagtgcatgatgtataattagtacctaatatttctactgaatcctgtttttgcttcataagaaagtagctactttcccctcttcttcacatttttctttttatatatatatatattcctctattcttaaagcagatagataaaatagccgtcattcatagttcttagtgtgaattgagaggaaagactatggaatttcactcaggtctagtattaagtagattacatttgtgagatacttaagggctccttaactcttaaataatatcaaaactagcattatttcatatgtaatctcttatttaagtttctttctatgacataattgcaaagattatggtctcgtgaattttccttatataatttttgtaaaagtctattatttagtaatagaagtatttttagtgyatttcttggcagatttattcagagagagctgcttaggtgtgtccaaacctgaaagtgaacattcatcatgttgaagcaggga

SEQ ID NO: 322172 - DNA, 561 bp, Homo sapiens
actcacatcaactatttctgggtctccagtctgctgcctacttgaccttgcagatttagacttgccagcctccaaattcatatgaaccaattctttaaaatctctctctctctctctcatacacacacacacacacacacacacacacacacacacacacacacacatcctattggttctgtttctctagagaaccatgactactrtagatttatatttttttctaattttcaagatagtataatattactaaaggttttaaataaagtattaataatgcccaatataatattgaaatacaaaaattattaaaattcatggttctctctatgtagataaaaagagatgctggatggatagatggacagacagacaggagagtagagcaagcaatatttctcccattccttctatttttctatggcaaatatcgatgagcagtaactgtggagcaaagtaggttaaagactgcaggcaagtttaaccgacacagctaaccagcatcctacactgcatcagggatatgcagctctttttatcagggaaggaaacatgttcaga

SEQ ID NO: 322173 - DNA, 561 bp, Homo sapiens
actcacatcaactatttctgggtctccagtctgctgcctacttgaccttgcagatttagacttgccagcctccaaattcatatgaaccaattctttaaaatctctctctctctctctcatacacacacacacacacacacacacacacacacacacacacacacacatcctattggttctgtttctctagagaaccatgactactgtagatttatatttttttctaattttcaagatagtataatattactaaaggttttaaataaagtattaataatgcccaatataatattgaaatacaaaaaytattaaaattcatggttctctctatgtagataaaaagagatgctggatggatagatggacagacagacaggagagtagagcaagcaatatttctcccattccttctatttttctatggcaaatatcgatgagcagtaactgtggagcaaagtaggttaaagactgcaggcaagtttaaccgacacagctaaccagcatcctacactgcatcagggatatgcagctctttttatcagggaaggaaacatgttcaga

SEQ ID NO: 322174 - DNA, 561 bp, Homo sapiens
actcacatcaactatttctgggtctccagtctgctgcctacttgaccttgcagatttagacttgccagcctccaaattcatatgaaccaattctttaaaatctctctctctctctctcatacacacacacacacacacacacacacacacacacacacacacacacatcctattggttctgtttctctagagaaccatgactactgtagatttatatttttttctaattttcaagatagtataatattactaaaggttttaaataaagtattaataatgcccaatataatattgaaatacaaaaattattmaaattcatggttctctctatgtagataaaaagagatgctggatggatagatggacagacagacaggagagtagagcaagcaatatttctcccattccttctatttttctatggcaaatatcgatgagcagtaactgtggagcaaagtaggttaaagactgcaggcaagtttaaccgacacagctaaccagcatcctacactgcatcagggatatgcagctctttttatcagggaaggaaacatgttcaga

SEQ ID NO: 322175 - DNA, 475 bp, Homo sapiens
tctcattttctcttctttaaatcttgagatgacatatcatttaaatccagtaaatcacacaatgatggttttcagtgtgttcaccagtaaaaaggtaaatgttaagaaatacaatttgccagtaaaataccaatacaatttaccagtaaaaaggtaaatgttaagaaatacagtcacgtggtgtgacaaatagttaagaagtgagaaaatacagttatttcaacattgaccatattagggagtgaaaaaaatactgtcctaatgaaatataagtatgggtaacatgtcaatttgtagtttaaatatatctactagattggaaataaagaaaaggaaatggacaaattttaactatattaatagaaaaactgacaagaaamaaataaaatatcacttctcttctagttatttagaggatttattgcttttcaaacaaataattaatgcataattcacataaataaatttgactcac

SEQ ID NO: 322176 - DNA, 531 bp, Homo sapiens
ggtccctctgtgtggcattccgtcttcctgggtttgggcagggaccttctggaaggagataggtcagatttctctatgaccatcttccacacagcaaggtggaggaaggttagagtaatcgttctaggttttatgactggctttggaggagaggggttctggtttctgtgactcaccttgggaaagagaaaccatagtttmtatcatctgccttgtgggagaaaggagagtaggagaaagaagggcagaaggccagaaagaggctttgcttttgaggccccttcagggtcctgcagttcaaagtaacgagccccaacagcagcaactatgtgcgagtcacagagactccttacctgtcgatggcggtaacaacagccagttcacactgctgttttgcctcagtctgaaagtctcattcatctcagttgtacacgtttacccacaaaacctactcagcttctacggttaaatttacagtagctcacagcaacttaggcattataaatttgagttcttatgtttgtttggcta

SEQ ID NO: 322177 - DNA, 583 bp, Homo sapiens
tttagcatatgtactaaaaatttaaattatttatctcagagctactaataacttacaaatatgaccctagaatagataagtatagctatttttataaattcttacaaaccagaaaactcctcttccaaatatgtygcgcttaattttctgctctgtggagcacagctagtgaggcagcaaagcccagtgacattttccacagtgtgagttgccaaccactagaagcctgtggcagtgttttaatctacagcaaacacgctaacaattggttgaagaaaggattatgtaattccaccttgatattcctttctgtggtgcttacatcagtgtcaaagaatcataaaggcagaactgggtgagtgctaaggtagcattttctcagttaggagccaatttaatctttatgctttctggagattactttagtcaatctctccattttcactaaactcctaaagaaatgaatcttctttgagtgtggctatttcagtgtgtgctggggccctcatttcagtggtcattatttctgcagagtggtctatattaattccaaagtctcctggagatcattagctagtaaaat

SEQ ID NO: 322178 - DNA, 617 bp, Homo sapiens
agcactaaatatatggcggaagataagccagtgctgaattttgtgggtcaggtgaraaaagttttaaaatgctgagggaggtttcaaaagcaagagagtgcaagagaatttgcagagtttgcagatttgatgggatttagaacagtagaaggagggggcatggatgaggaggtcagctctggaaggctgagtcaggatgaactaagcactaagaagagcctctatcttccccgaaactttaatcacagaactgaaatacaaagagaaataaaaaatcgtttagcccattttttttcttccttagtccaatgcccactgtcagtggagaaggaaagatgctgtaattacaaaagccaaggaagcaacatgatgtcttagagaaaaagtgacagcttcggatttctaggaatgaggtcaaattctcactccagaagtttcctcccctagtgacctaggacaacttatttagcatttctaaacctcagttttcttatgtatcaaatgggggcattaatagtcaaagagtaaaaaaggctccacaggctttttgaaaatgaaattcagatgagataatgtttagcttctttctcttacaccatctcttctccacctctaga

SEQ ID NO: 322179 - DNA, 580 bp, Homo sapiens
ttgccatagaagcattaacaaatttttatatctgttgacaaaaccttgctaaatttatgcacataaaaaaatagaagtaaccttttctgtgatcacataactgggggctggcattgcgagagaagagcctgctttaccagttacgacacagcagcatgcctctgacttaaagttcagtttttaaaaatatggatatgatcatagcaaataattccaggaaatatgtcataaattagcagacactgtaataaactgtctggactgttttgtctcagtcatgtcattttatcctatttagtttcaaaaatagtaatcagtctgttcaaagtgtcaactttagccacycaggatggggaaaacttgttttgacattatgccgtatgaaaaatgacaaaatgaatgggacaggctataagaagtagattgcaggctcaatattagtctactgtgtgcatgtctgtcaaaagaagctaataaaacataaggctgaagaactgaagtaatgaatgcaacaaagaatgtaataatcccattgttctctatgcaaatcggaccctatctgatatgtaatgctgatttc

SEQ ID NO: 322180 - DNA, 580 bp, Homo sapiens
ttgccatagaagcattaacaaatttttatatctgttgacaaaaccttgctaaatttatgcacataaaaaaatagaagtaaccttttctgtgatcacataactgggggctggcattgcgagagaagagcctgctttaccagttacgacacagcagcatgcctctgacttaaagttcagtttttaaaaatatggatatgatcatagcaaataattccaggaaatatgtcataaattagcagacactgtaataaactgtctggactgttttgtctcagtcatgtcattttatcctatttagtttcaaaaatagtaatcagtctgttcaaagtgtcaactttagccactcaggatggggaaaacttgttttgacattatgccrtatgaaaaatgacaaaatgaatgggacaggctataagaagtagattgcaggctcaatattagtctactgtgtgcatgtctgtcaaaagaagctaataaaacataaggctgaagaactgaagtaatgaatgcaacaaagaatgtaataatcccattgttctctatgcaaatcggaccctatctgatatgtaatgctgatttc

SEQ ID NO: 322181 - DNA, 580 bp, Homo sapiens
ttgccatagaagcattaacaaatttttatatctgttgacaaaaccttgctaaatttatgcacataaaaaaatagaagtaaccttttctgtgatcacataactgggggctggcattgcgagagaagagcctgctttaccagttacgacacagcagcatgcctctgacttaaagttcagtttttaaaaatatggatatgatcatagcaaataattccaggaaatatgtcataaattagcagacactgtaataaactgtctggactgttttgtctcagtcatgtcattttatcctatttagtttcaaaaatagtaatcagtctgttcaaagtgtcaactttagccactcaggatggggaaaacttgttttgacattatgccgtatgaaaaatgacaaaatgaatgggacaggctataagaagtagattgcaggctcaatattagtctaytgtgtgcatgtctgtcaaaagaagctaataaaacataaggctgaagaactgaagtaatgaatgcaacaaagaatgtaataatcccattgttctctatgcaaatcggaccctatctgatatgtaatgctgatttc

SEQ ID NO: 322182 - DNA, 607 bp, Homo sapiens
gagttaaagtgctttcagaataaatactcccgaaagtttgtactaggaatgataaagaaatggaagacatttcttaagtaacatgggagagttagagaaatatttgtctttgaatattttaggcaatattatgtagcaaaaggattagatttattttgatttcctgaactagttagtacaaacacaaacatatactagttaccaccaatgggtaaagggccctgtaagatatacatatatatataaataaaaacaataactgacagggattgccaactctagtgaaaataatttctttacttttcactccacacacccttttcttcaagaaaccttgtgtamaacttataaagggagagtgcgaaaagtttcctcatcaatagagtttataaagaaagttttaaagggatcaaatagtttgggataaagaccttttcttgagaatactaaacatgctaatgaagataaaattcatagacagattttgccaagaagttatccatgtacttgcacaaaagttttattcaatatagttaacaagtaattagaaaagcactcttttttataaaactatgtaaaactgtaacttcaaacaacatacagctat

SEQ ID NO: 322183 - DNA, 570 bp, Homo sapiens
ttgtactaggaatgataaagaaatggaagacatttcttaagtaacatgggagagttagagaaatatttgtctttgaatattttaggcaatattatgtagcaaaaggattagatttattttgatttcctgaactagttagtacaaacacaaacatatactagttaccaccaatgggtaaagggccctgtaagatatacatatatatataaataaaaacaataactgacagggattgccaactctagtgaaaataatttctttacttttcactccacacacccttttcttcaagaaaccttgtgtacaacttataaagggagagtgcgaaaagtttcctcatcaatagagtttataaagaaagttttaaagggatcaaatagtttgggataaagaccttttcttgaraatactaaacatgctaatgaagataaaattcatagacagattttgccaagaagttatccatgtacttgcacaaaagttttattcaatatagttaacaagtaattagaaaagcactcttttttataaaactatgtaaaactgtaacttcaaacaacatacagctat

SEQ ID NO: 322184 - DNA, 622 bp, Homo sapiens
tgtcagctgctctctgaaattacaccaattctgcataggcaattaaagccttgagattataaccaaacactcataagtttataaactctggagaggtgaaaagctgacatagttttagatgtaatgacatcttataagcaaatgctttcaacatttcaaacacagcatgccttgctatctggtgtgggaagaaagaagaagggaagggtcattctccttttaccttacaaatgtgtgtgggcaaatgaatggctttatgatgtccacatcgctggcctttgtgaaagagaattcggaattggatcaccaaactatcttcataaaaataggatactcagycgggtgcaggggttcagcctgtaatcccagcactttgggaggccaaggcaggagaattgcttaagctcaggagttcaagaccagcctggccaacatagtaagatcctgtctctactaaaaatgcaaacattagccaggcgtggtggcgcctgcctgtaatcccagctactcaggaggctgaagcaggagaatcacttgaaactgggaggcagaggttgcagtgaccagagcacaccactgcactccagcctggatgaccaaaaaaaaaaaaaaagatatttgc

SEQ ID NO: 322185 - DNA, 433 bp, Homo sapiens
gcatgagcagatgggaactggaactttaggtccctgtctgcatctcacaggagacatcagggtaaatgagacacaggcasaatgtgctctgccacaaaacactgctgccaagattctacatggctcccagctcactgcgagtaaacgcccacgtaccacatcttaccccctgccccgtgaccccagcccctgctactctggcacttgctcacagggctccagccacagaggcctttcaccagctctggaaaacttctgggtgctcccaccgcagggcttctgcacgaactgctcctctgcctggattccctcaggaatcacaggactttcaggcctcacctcggtcagcctgtcctcaatgtcacctgctcaaagaggacttcccggctcactcactaacatggcagccaccccctgacacttgctctccacc

SEQ ID NO: 322186 - DNA, 616 bp, Homo sapiens
ggtttgtttgtgagttctgcagtaaaaatttcacctggatattgtacaattaaaaatctaagccttccactagaaaaataatctctaaaccaggggcacacatatttctcaccattttgattttgctacttttaactcaaagcttagcagcacaatattcctgcctataaaaaagcagctcttactgacttccacttgcagtttctactaaagaaaatttatgttttaagagtgtcatttgtattgctttaattagttgttacttggaatgatcattatcaaacctattaaggtactgggtgtagtagaaagagctctgaacttggaatcacaagacaagggttcaacctctgctatctagcttgtgacttgggatgacttaattactccttctacacttcagcatatcattctgtgaattgaggggaaaatacgtctctaayagggcttctgtgagaatcacataagctaatatagtatatgaatatacctagcatggtaacctggtctgttataggttcttggtgaatatttccttctcctttccttccttgaaaagtttaatgttaaaaatgttatattgctgttggttgcatgtttttagtaggtattatag

SEQ ID NO: 322187 - DNA, 481 bp, Homo sapiens
gcctagactgaaaaaaagaacatgcagaaataagtccccccaaattatattccaaaggacataaacaacattttttaaattaaaatgccccattagatcaattttgacaccccagaatcataaaacagggagcactgaaaggaaaaaccatggtggtgcacatgccacttctattgtccatgatgaagcttctctgccaaaggacatagcccagtgggraggaggattgaagaagttttaaaagactattagatccaggttgctacacttaacaatctaagagaacatttgctcctagggtgaaggaaataacttacttgatgagagtagtgtttgaaataaatccccaaacttttcaacataaagtcccaccaccattcaaagttcagtaatagtcagaaagatactatcatgggagctatgtgtgaaaagaaatagagaaaaaaaacagactgaaagcaagcaagaatagagggaagga

SEQ ID NO: 322188 - DNA, 592 bp, Homo sapiens
gtaattgattaaagttactactttgacacatctgcagagacgagacttttttcctttctttctttctttyttttttgcaacagagcctcgctctgtcaccaaggctggaatgtagtggcatgatctcggctcactgcaacctcctcctcccgggttccagcgattctcctgcctcagcctcctgagtagctgggattacaggcacctgccaacacacctggctactttttttgtatttttagtagagacggggtttcaccatgttggccaggctggtctcgaactcttgatctcaggtgattctcctgcctcagcctcccaaagtgctggaattacaggtgtgagccactgtgcctggcaagacaagactttttttctaaacttctctggtaaggctggctttcaagtgagctttgatacctttgtttgaggctatatgctatcagaaactagagctattgcacagaatgatggagcagaaatatacaggatgattttaaattgtgcttaaaaactgccaataaaatggaagaggactggtataactctgagatgggctacgtggccacaattgtaaaaggttttgagcatc

SEQ ID NO: 322189 - DNA, 609 bp, Homo sapiens
tcaaaaaactaagaaaaacagccaagaaggtaataggaaattatgacgattaaaaaaaaatctggagtctatattcaagaaaaaggaaatatttattatagctaatgatggtgctaggttaactggggaaagaatgtaaaatattcacttactttagcaacaaaatgatgatctgtgaccttggcaaagaagtctcaggayggtagtggttcagaagtcataatggaatgctacaaatgaaacattggtgaagcggtggaggctgagggtataaacaactcttttgacttgtgaagaagaatgagcaccaggatgctggtgagatccacagttgcagctgatgaataagtggtggctggacctccttctgtccctctgagcactgccttctgcactcttgcaatgcaagcctggtgtctaactgtgaagcagataagaccaactctcactattcctcacaataacaacaacaaaagatgtagtcaagactaaaacagttatcacgttaattatttttattatactttaggtcctggaatacatgtgcagaacgtacaggtttgttacataggtatacatgtgccatggtggttggctgcacccatcaac

SEQ ID NO: 322190 - DNA, 528 bp, Homo sapiens
tacttttgcttctgctgctagctgggcttccrttctgttcacattctgttcacggaggtggcagcccccctgcagggctgtttgcccctttctgccctcccttgccgcagtgaggtaggtggctctcggataaaggtcattctaagcctgccagcatttggggagcatccctgtacttacaccatggtccacaagcatctaaaacgtgagctgcaccgttccacacagatgtggcaccaccctggggtctcccccaaggatgcttcagtgcctttatccatttcttggtctcagttcctggctagttcaccaaatgttctgcagtaagccgggctgtgcaaacctgctcccaaagactgagggagctgaaaggccaaagaaagaggctgacaattccagtttctcagaaagaaacatttaatagggacttaacaaacagaagccatgtctcaggcagctgcaagatggtggaaccctgcaacagccctccaggaaaaaattttgtatatatatataaaaaatatatat

SEQ ID NO: 322191 - DNA, 528 bp, Homo sapiens
tacttttgcttctgctgctagctgggcttccgttctgttcacattctgttcacggaggtggcagcccccctgcagggctgtttgcccctttctgccctcccttgccgcagtgaggtaggtggctctcggataaaggtcattctaagcctgccagcatttggggagcatccctgtacttacaccatggtccacaagcatctaaaacgtgagctgcaccgttccacacagatgtggcaccaccctggggtctcccccaaggatgcttcagtgcctttatccatttcttggtctcagttcctggctagttcaccaaatgttctgcagtaagcygggctgtgcaaacctgctcccaaagactgagggagctgaaaggccaaagaaagaggctgacaattccagtttctcagaaagaaacatttaatagggacttaacaaacagaagccatgtctcaggcagctgcaagatggtggaaccctgcaacagccctccaggaaaaaattttgtatatatatataaaaaatatatat

SEQ ID NO: 322192 - DNA, 548 bp, Homo sapiens
tgagtctggtgccaaaaggccagatttagaaaactgtccatgcgagcctgctcttgctcttctgagtcctaagtgcctctttgcagctggtaatggcaacaacgtcagagctaagtgcatgcagcccagtcccctggaattatcagaagaaaaccagctaagcttacaaagcctgagagccctctgtgtgcatgtcaagggacagrgaagagttttgttgttcttctgtggtgccaggactatgaaagtcccagggagggattggctgaaagggtaaagacagaggtaagtgtctgatatgactggatgctccctaagggcagacactagctcagttctacaacacttcacacctgacatagactaattgttcagtagcatttactcagcacttagtatgagcatgtgggtgttattcacatatttaatactaatagcaaccccattagtatctcatgttgttatgaatgagaaaacggaggcaaacagaggttaaataacttacatatggcaggtaagtggaaatgggtctcaaatatgcggttggc

SEQ ID NO: 322193 - DNA, 556 bp, Homo sapiens
cagtggtatactgagttgatcacgaccctcattctttcagcctccaacactcacccactttgttggtccatgcccaccccacttagccagcccttccctgccacttaatttgggatcatcccrtgaagctgccccttctttgaacccatgcccaaccctctgactcaagcccctgccctcccagcactgttgtgaccttggtacacttcacctcacccttgacctcctgtcacttcttcctccccacatttttcctggtctgtcaggggctgacgtggatgggtggaggatggaacggagagacaaacctacaatcagacctccagtggggaggaaaagaggttctgaaatcggacagagagaggacaccagagaggagaagataaatttaagaaatattttgaaggtggaactggcaggtcttgaagtgtgaatgctgtggaaacacagtggtgagataagcttcctgtccagaaagttgggacaaattttgcagatgaagtgacatttgagctaggtcttctatgtggagggatttgacagacaaggagagacc

SEQ ID NO: 322194 - DNA, 561 bp, Homo sapiens
acctttctcaaaatactttttcaaaaatatataacacattaaccttttcctatcattctgtaatgaacagaaatattatacgttgatgtcttcataactgagggaagtctatgcaaaaggccggttgcctgttttctaackgacctcagcctggtgtgaatttttaatactcttttggtattttatatcttctctgacttccccttactgttctcgataacactacccattacagtgcctctttccccttctaattttccgctagaggtttaaaatgacaggaaacaagtttactagaagggattacaggtaagcaccagattctgagtgcaagtctgaagggggcttccttcaaaatcagggcaaggccagatagagccagggacacgagctttctttacaaactttgaatggaatatgttttagctgctcaggagcctttttgctttcttcttgattcttaactttgtcctggataggtgaaactataacacttgagatccagaaatttgtggtacaaagcaacaggtcaagataagtcacaagaaagcgtacgcttgg

SEQ ID NO: 322195 - DNA, 514 bp, Homo sapiens
gttgcctttgtggctgagtcaggaatcctgctggccatggcatttgacagttatgtagccatttgtactcccttgagatacactaccatcttaacttctatggtaawtggaaaaatgaccctgacaatctggggacaaagcattgggacaatttttcctgtcatattcctgctgaagaggctgccatactgtcagaccaatatcatcccccactcatactgtgagcacattggggtggcccaattggcctgtgctgacataactgtcaatatctggtatggcttttcagtgccaatggcatcggttttggtagatgttgcattcattggtttttcctacactttgatcctccaggctgtgtttagacttccttcccaggagtcccagcacaaagctcttaacacctgtggttctacattggagttgttctcctcttcttcatcccatcattttttactttcctgacccaccgctttggcaagaatatcccccatcatgtccacatacttctggc

SEQ ID NO: 322196 - DNA, 635 bp, Homo sapiens
tcaaccagcaacatcatcattttcttcttttctctgtgaacagcaaatcatgttttattgtgttaaccaaaaatttgaagttataaccttattaacagagtaagtcattgaatcactgtgattctcagaattttttggatgtgaagaagcatatttagcagmattttatgaggactaaacgagattgtgtttgaagtaatttctaatctgccaagtatttcatataggatataactgttactcttatgcctcttccagatggaaacatagacgctattggtttaattgaaacccttttcagtgattgcctctctccttgcctctattctttggtgtctgaaattgctaatcactggtgagagcagcagcttgtcttgttagaaaaaaatgcagcttctgtcttcacagttatctctcaatagctctcaagttcatccatcctagtgtaagggctgattacttgtagctctgctgtgggcttttaagcccctgtgtgatgtccttcattaaaccattcagtcctgatggcctcatggttcctatcactgctccacatccaggttctgtcctccaaagaggtgatcctcaagagtggattcatccatttcctgaagactaccctcagttcatggtct

SEQ ID NO: 322197 - DNA, 565 bp, Homo sapiens
gtctttttctggcttggtatcagggtaatgctgsccttgtaaaatgagtttggaagtattccctcctttttaattttttggaaaagtttgagaaagattggtgttagttctttaaatgtttggtgggattcaccagtgaagccatcaggtctggcaaggcagggctaatgacagcaacctccctcagcttttgtttctctgagaaagtcttaacttctttctcatctttgaggtacagtttggctggacataggattcttgggtgacagccttttttttttttcgctctgaatatattggccactgccttctatgctccgaagtttctgatgagaaatctgctgataatcctattgtacatcacttgtatgtgatgttagttgctcctctcttgctcctttaaagatctctcattgtctttgattttaaagagtttgcttataatgtgtcttcatatgggtctctatgaattcttcttacttggaaattattgagcttctttaatttcgtatttttgtatttcatcaaattttggaagtttttagccactatttcttcaaatatt

SEQ ID NO: 322198 - DNA, 308 bp, Homo sapiens
ttggtagcattaaaaagagagtttattaaagtatttggattcaatatcaatatgtttactgtatattattatacataacaaagtgtgaagatatggcattatggcagctaagagaaaatatgactccaacttaatatttattgaacatctattatcagcttgctaccctgaaagatactaggaataaaacagtgaataaaayaggcacagttgctgctatctgacaatttaaagtaatgatgaaaagagaaacacaattccatccaataatatctccaagatggcagactggaggcattgttagcatg

SEQ ID NO: 322199 - DNA, 596 bp, Homo sapiens
gcctgtctgatctgaatagccagctcactgggtcaggagtgtgaccaggaggtgaaagactttcttgctggcctggcaggggagctgaggcagctccctccctttcccctgaaaagacttcagtgcttttcactgagaactcccccagctgcctctgtcaaggctggaacctctgcccatcatkgggtattgtatttacccacctgctttatccaagcaagtttttacctatggacacctcccctactgccctgaagcctgagctgttcaacccagtaaataaaatattgggaggaaaataaattaaaaatagtgtacactactggggaacaagataagcttcaagagatctctatcattccaaacccacaggagacagcgaacctgctcacacaccaaacacattgctactgcaacctgcatctgaaaaagccattatacaaagactctctataaccacggaacttgtacagagtcttcattccagaaagcacccagagccaaattaggttacaaaaactataatcattaaactcacatcctcaaggggaaaaaaagaaactacaaaaaccagctgaatccaaaataaattcaaa

SEQ ID NO: 322200 - DNA, 596 bp, Homo sapiens
gcctgtctgatctgaatagccagctcactgggtcaggagtgtgaccaggaggtgaaagactttcttgctggcctggcaggggagctgaggcagctccctccctttcccctgaaaagacttcagtgcttttcactgagaactcccccagctgcctctgtcaaggctggaacctctgcccatcatggggtattgtatttacccacctgctttatccaagcaagtttttacctatggacacctcccctactgccctgaagcctgagctgttcaacccagtaaataaaataytgggaggaaaataaattaaaaatagtgtacactactggggaacaagataagcttcaagagatctctatcattccaaacccacaggagacagcgaacctgctcacacaccaaacacattgctactgcaacctgcatctgaaaaagccattatacaaagactctctataaccacggaacttgtacagagtcttcattccagaaagcacccagagccaaattaggttacaaaaactataatcattaaactcacatcctcaaggggaaaaaaagaaactacaaaaaccagctgaatccaaaataaattcaaa

SEQ ID NO: 322201 - DNA, 596 bp, Homo sapiens
gcctgtctgatctgaatagccagctcactgggtcaggagtgtgaccaggaggtgaaagactttcttgctggcctggcaggggagctgaggcagctccctccctttcccctgaaaagacttcagtgcttttcactgagaactcccccagctgcctctgtcaaggctggaacctctgcccatcatggggtattgtatttacccacctgctttatccaagcaagtttttacctatggacacctcccctactgccctgaagcctgagctgttcaacccagtaaataaaatattgggaggaaaataaattaaaaatagtgtacactactggggaacaagataagcttcaagagatctctatcattccaaacccacaggagacagcgaacctgctcacacaccaaacacattgctactrcaacctgcatctgaaaaagccattatacaaagactctctataaccacggaacttgtacagagtcttcattccagaaagcacccagagccaaattaggttacaaaaactataatcattaaactcacatcctcaaggggaaaaaaagaaactacaaaaaccagctgaatccaaaataaattcaaa

SEQ ID NO: 322202 - DNA, 625 bp, Homo sapiens
taccaactgatgctagcatgggtcttggttgggagtgatatggctctggtattttcttcctatgctgtaatccttcactctgtgctgaggctgaactcagcagaagcaatgtccaaggctctgagcacttgtagctcccacctcatcctcatcctcttccacacaggtatcattgtgctgtctgtcacacaccttgcagagaaaaagattccccttattyctgtgttccttaatgtgctgcacaatgtcatcccccctgcactcaaccccctggcctgtgcactcaggatgcacaaactcagactgggctttcagagactgcttggactgggtcaggacgtgtccaagtaactccagctttaggaatccagtaagatgttaggaaatgacagaggttttagttctcaatagatcagggttataatctgcacttaccacactccctaggaaaaaaatggccaataaaatcatgaaaactgtcagcctcactaatcaaaatatgtatattaaaattacaagaaaatttcctattacctggaaaataagtaagaacaaaaaagtgaaatgtttctaactattactgctagcctaccccgagattaacactttcctacacaactggtag

SEQ ID NO: 322203 - DNA, 518 bp, Homo sapiens
taaaatcctctctagtgactttagtgagaatagtgaattaagaaattccaagagcctgcccctccaccaaactaacaaataaacaggcacaaattgttagaatgaactttaatggaactggtcaaaggtctgcatcaatgaggtgaacacttgatcaaaaaaaagatgacaatctcagtaggagacctctgtggcattctaactcactctggctctgttccttcttctccagtttggtggtagtcttcagaacagcatcccatgtttcctatgkgggttcacggtaccagaaggagcagaggagacctgttctctaagaattattggtgttttgacccatctgatggttcactgaaggacaggtgcaaagagcttgcctttattttgcctaactcagaatctctcaggatagaatggcagctgtctaggggccttgtcaaaaacagctggtgaatgtgttagcctctgccaccagagagaaggaataacagtcaggaaataacagacacacttaaaag

SEQ ID NO: 322204 - DNA, 640 bp, Homo sapiens
tgtgcttttctatatatccaagagctcaacaaattccaattaggataaactcaaagagatgtacattgagacatattacaatctaactttagaaagacaaaaacacaaaaagaaaaagaaaaaaaagaaaaatttaaaaagaaagacaaaaacaaagacagatacccaaaagcagcaggagagaaacaacttattacataaaagagattctcagtatgattaacagctgccttatcatcaggaaccgtagaggctagaagtyagtggggtgatgtactaaaattgctgggaaaagaaaaggtcaaccaatgtttctatatccagcaaaactatgcgcaagagtaaaggaaaaaataggacattcccagtggcacaaaaacaaaaaaaaaagagagagtccatagctagtagagctaccctacaaaaaatgttaatgggaatccttcagaatgaaatggaaggacacaatcgtaactcaaatttgcttaaagaaataaagaacgtaatatatttatgttatttaaaagataattacataaacaaaattataaatatatgttaatgggcacacaatgtataaagatgtaatttgtgataatcacaagataaagggaaacagctagacagaaacaaagttctt

SEQ ID NO: 322205 - DNA, 640 bp, Homo sapiens
tgtgcttttctatatatccaagagctcaacaaattccaattaggataaactcaaagagatgtacattgagacatattacaatctaactttagaaagacaaaaacacaaaaagaaaaagaaaaaaaagaaaaatttaaaaagaaagacaaaaacaaagacagatacccaaaagcagcaggagagaaacaacttattacataaaagagattctcagtatgattaacagctgccttatcatcaggaaccgtagaggctagaagtcagtggggtgatgtactaaaattgctgggaaaagaaaaggtcaaccaatgtttctatatccagcaaaactatgcgcaagagtaaaggaaaaaatargacattcccagtggcacaaaaacaaaaaaaaaagagagagtccatagctagtagagctaccctacaaaaaatgttaatgggaatccttcagaatgaaatggaaggacacaatcgtaactcaaatttgcttaaagaaataaagaacgtaatatatttatgttatttaaaagataattacataaacaaaattataaatatatgttaatgggcacacaatgtataaagatgtaatttgtgataatcacaagataaagggaaacagctagacagaaacaaagttctt

SEQ ID NO: 322206 - DNA, 565 bp, Homo sapiens
tcagaaggtaggtaataactaactccactgagttaaaggagcatgttctaacccaatgcaaataagctaagaaccacaataaaacattataggagctgttaaccagaataaccagtttagagaggaacataaatgacctgatggagctgaaaatgagaacacaacatgagaacttcacaatgcaactgcaagtaccaatagccaaataaaccaagyggaggaagaaatttcagtgcttgaagactgtcttgctgaaataagacagaaagataagattagagaaaaaagaataaaaaggaatgaacaaagtctacaagaactatgggattatataaaaaagactggacctacggctgattggggtacctgaaggagatggggagaatggaaacaagctgaaaaacatacttcaggatatcatccaggagaaattccctaacctagcaagacaggccaacattcaaattcaggaaatccagagaaccccagttagatattccatgagaaaatcaaccccaagacacataatcatcagattctttaaggttgaaatgaaggaaaaaat

SEQ ID NO: 322207 - DNA, 585 bp, Homo sapiens
gtgagtctgcaatgcaaagtgaaagcaagtttattaagaaagtaaagaaataaaagaatggttactccataaacagagcagccctgagggctgctggttgcccatttgtatggttatttcttgatgatatgctaaaaaaaaaaaaaaaaaaggcgggggtggattattcatccctcccctttttagaccatatagggtaacttcctgacattgccatggcatttgtaaactgtcctggtgctggtgagagtgtagcagtgagaacaaccaaggtcactctcgtcgccattttgattttggtgggttttggccggctcctttaytgcaacctgttttatcatcaaagtctttatgacctgtatcttgtgccacctcctatctcatcctgtgacttagaatgccttaactgtccgggaatgcagcccagtaggtttcagcttcattttacccagctcctagtcaagatggagttgttctgattcacatgcctctgacagcatgacatattaaggtgctgaaagaaaaaaaaaaacttttaacctagaatagtatatctggtgaaaatatccgctaagcattaagtcc

SEQ ID NO: 322208 - DNA, 564 bp, Homo sapiens
tttcttgatgatatgctaaaaaaaaaaaaaaaaaaggcgggggtggattattcatccctcccctttttagaccatatagggtaacttcctgacattgccatggcatttgtaaactgtcctggtgctggtgagagtgtagcagtgagaacaaccaaggtcactctcgtcgccattttgattttggtgggttttggccggctcctttactgcaacctgttttatcatcaaagtctttatgacctgtatcttgtgccacctcctatctcatcctgtgacttagaatgccttaactgtccgggaatgcagcccagtaggtttcagcytcattttacccagctcctagtcaagatggagttgttctgattcacatgcctctgacagcatgacatattaaggtgctgaaagaaaaaaaaaaacttttaacctagaatagtatatctggtgaaaatatccgctaagcattaagtcccccaggcaaacaaaagctgggggatttcatcatcaccagacatatcctacaagaaaggctaaagggagtttttaatctgaaagaaaacaatgtta

SEQ ID NO: 322209 - DNA, 601 bp, Homo sapiens
gaatttcacaatcagtagcttctgtaggcgacatgacaaaatgtcagatatgtcatgctaaatccagttttttacatgacctaagagatcctctagtccacccagtgactaactagtaacagccctgatataactgctttttcaaattacactagtgttctattttatagagccagacttctagacccacatgttctcactccttgcttttatttaacttagttatcagatactagataacagaattgctatttagtagctggacagggaggagtctgtgcagttgctaacacttctcgttaaacatggataaatgcattggtattttcgagattcagtttcaaaaaataaatgagtmggctacttggttaaagtgggtagattcctcatgtagctcattctttgatctatttaattttagttggttttgttcatggggactctggccgaagggcatactcaaacttttggtattatcctctttagagtcaacatattagcctgttctcatgctgctaataaaggcataccggagactgggtaatttataaaggaaagtggtttaatgaactcacaattccacataattggggaggcctca

SEQ ID NO: 322210 - DNA, 556 bp, Homo sapiens
aaataacaattgtgcttgcctcatagagttgttacaggattaaaaaagttaatatatgtgcaatgcttagagcaatgccttgcacatgctatgttctatacaaaagagataaattaatgtgaatcaatcttcctagcaattgggagagatggaattttaaccaaggtgtgttggactccaaagactgtgctctttcttcagcattgcrtataatattctgctatttaaagttagctcacttcctggacacatactcgcccaaaccaagcagcttctggaagcccgctctcagctcctaggtcctaagggcatatactatggggttaagggctgaggggatgacaatatgcagcacattgaggagaacagggatgcggggagcccttcttcctgccaggtggtgacagatactacaataatagctgtgtagaaaaagagaatgaggataaggtgagagctgcaggtattcagggccttagatgttgctttagcagagttcagcttcagcactgagtgaataatcaaagaataggaagcaaagaccagacccatgtca

SEQ ID NO: 322211 - DNA, 556 bp, Homo sapiens
aaataacaattgtgcttgcctcatagagttgttacaggattaaaaaagttaatatatgtgcaatgcttagagcaatgccttgcacatgctatgttctatacaaaagagataaattaatgtgaatcaatcttcctagcaattgggagagatggaattttaaccaaggtgtgttggactccaaagactgtgctctttcttcagcattgcatataatattctgctatttaaagttagctcacttcctggacacatactcgcccaaaccaagcagcttctggaagcccgctctcagctcctaggtcctaagggcatatactatggggttaagggctgaggggatgacaatatgcagcacattgaggagaacagggatgcggggagcccttcttcctgccaggtggtgacagatactacaataatagctgtgtagaaaaagagaatgaggataaggtgrgagctgcaggtattcagggccttagatgttgctttagcagagttcagcttcagcactgagtgaataatcaaagaataggaagcaaagaccagacccatgtca

SEQ ID NO: 322212 - DNA, 594 bp, Homo sapiens
tttgtcttttctgcttatcaactacttagtctttctaagcctccattttctcatctgcaaaatggatacataataatggtgccttttctcattgggttgttctgataattaaataagataatttatgttaaaaacttaacatagtgacagggatatagtaatcgatcaacaaatgttagctgttattatgttattttattgttgagatttctgtcattgctctatgctgtgtcttctaatactttatgcaytttctgtctggagctactaattatccctagagttagtgttccctgttggcactaggggaagtgtttttgtatctccttttgctcattgaccccaggctcaatgatcccaggggtgactccgacacctgcctccagaagaaggaagcgtgtagcttctcagtgtgcagatataagggtcctgtacagggcaggaacagtgacatctcctcatgccaccagctttctcttttcttttcattcttctttcctcagaataagcaaagtgagttttttttcagctcttccctaccattttctcaatccttcagctgatattgtgatacagtaggtgagtttaagagca

SEQ ID NO: 322213 - DNA, 584 bp, Homo sapiens
ctgaacaatttttgaacaaaaggtccacattttaattttgtgctagatcctgtaaattggtagttggtcctgcttgcaggctaaaacctgcaaaccttaatctcactggcttaggaacaccttcttttcatattagctcccatggttaaatgagaaaccttggaggcagaatagtgaatgttatttgtccagtacagcctccagttgagatggcaacttcctccttattgaacaggcctgctgtgaatgatactgttgatcttcactggatggcataccctttatcatacatatcttagacctttggagttgatagagaacatctaggccaatggactcattttgcaggtgaagagccaggacatttgggtgactcaccagagaatgaacagttagttcctgacaaagagggtaaaaccaaggccattgctctttcaaccactagaaattctatttgaatgagtgtgatgaactagggygggagtctgtctgcccagcctattaccttaagtaggcacctgtccacagtgcctggcatgtaacaaatatttggttgaatgcaggcatgtacatatgcacgagca

SEQ ID NO: 322214 - DNA, 550 bp, Homo sapiens
gaaataattactggcaagccaggggggatctatactctttttgattttatgagactcttatttgattccatccaatatacataagtattgccaggttttattaaatccacttttgtttatcaccagcaggtcaattatgtctttcccctagacaccccaccacagcccttacatgaattttaggttagagacctagtcttctggaaaaaaaaatcttgaatccaggttgaaaagacctaactctgccctcctaaccaccaacactgctgcaaagctataaagaatacmatcttggatagatttaaacaccaaaactgaaactgatttgacaatggtataaatttggacattcctcattgccctgtgtagttatttaagaataagcttatggttgtctttttttttctttcttttttttttttttggagatgaagtctctctgtgttgcccaggctggagtgcagtggcaccatcttggctcactgcaacctctgcctaccaggttcaagcgatcctcctgcctcagccctcctggtagttgggattacaa

SEQ ID NO: 322215 - DNA, 571 bp, Homo sapiens
acatggttgggttggtcaaatgaactgctattcaaatttaatacaacactgataaatgataaatggagaccatttatttacttcccattgagaaagctctagccagataaacagattcctgcaaattggtccctaagataaattttgtaggggccagaggcagtagtgtccttagacccmagcaagaaaaaccgtgttctaggccctccattttagaggacaccaacctgactcttcttatggggtgaaaaatctccaggccagcacccaaagcctgggtacccactatgtccccaagacccaggaccctggaattccctgactggtattaccaaagccacttcttggccctgagctagcttcttctgagaactgtcctcccaatgaaggacccaacaactggtataggcacacctgagatccagacgcagacagagggtggctgttagaaagtgtgaacagaacttggttttgtgggctgcggtgttcacacacaggtacaaaaaatcccctcttgtccttgaagatagctgggcacaggaagcaaagacggtgaaggtgtacaggccaa

SEQ ID NO: 322216 - DNA, 571 bp, Homo sapiens
acatggttgggttggtcaaatgaactgctattcaaatttaatacaacactgataaatgataaatggagaccatttatttacttcccattgagaaagctctagccagataaacagattcctgcaaattggtccctaagataaattttgtaggggccagaggcagtagtgtccttagacccaagcaagaaaaaccgtgttctaggccctccattttagaggacaccaacctgactcttcttatggggtgaaaaatctccaggccagcacccaaagcctgggtacccactatgtccccaagacccaggaccctggaattccctgactggtattaccaaagccacttcttggccctgagctagcttcttctgagaactgtcctcccaatgaaggacccaacaactggtataggcacacctsagatccagacgcagacagagggtggctgttagaaagtgtgaacagaacttggttttgtgggctgcggtgttcacacacaggtacaaaaaatcccctcttgtccttgaagatagctgggcacaggaagcaaagacggtgaaggtgtacaggccaa

SEQ ID NO: 322217 - DNA, 618 bp, Homo sapiens
gttgaattacagctgccaggcgcctgggaarcaaaaggcaaaagtgtggcgggtgaagccagagcttggggtgccggatgttggggtgccggatgtcagggtacccagatctgaatccatgctgctacctgacactagtataaacgtaagtgacaagtgatccctgctctgaccttcagtgccggaatccatagacagggataatggtgctgatctgtttagagcaggggtcagcaaactgtagcctgtaaactgcttttataaacaaggttttattggaacccagccacattcactcatctgtgaattgtttcatggctgctttcacatgtatagggttgtgtagttgcaacggaaactgtacacctaaaatacttactagccaggcctagacagcaggagtttgcctacccttggtgcagaacattggttctcaactctgactgcacatcaaaataatttatgaagctttaaaaaaaaaaaaaagtcaaagccttggcaccccctgaatcaacagacaaaatcttaggctgtggagatctgacatcatttaactccccagatgagctcagttggtgcctacagcaccaggcttcagggggctgggaccacccctga

SEQ ID NO: 322218 - DNA, 593 bp, Homo sapiens
ccatcacaacagtcttaaacaaagtcttccttaccattttaacaagtatgagaataattttttctttaacacactggtcaactatgagaagaacggatttctttctgttgggggaataacatttgacttaatcagagttcccaatcgtcagatcaattgcaaatgtataaagctactcttagctacataaaagcaggcacggttgggatttttggtccttgctctttagaatgcacaagggagagaaaataatattgctaagaaatcctaatacacrtattccttccaatacactgcccatgttacagcaccacagtagcactggaaaaattgcatttggtgtctcaggagggaatgcaggaatgcggaggcgaaaaagcacatcaagggagaaagtccatcccaaccagcgcttcgtctcctcctatttccttaggactagttccattaaaaaaagagaatactggaaatagacagatcttaaacaacagaaacctactgcctagataaatccaggcctggttggaacttttaatagtttgcacaatggtttttaaacttgactgtaactcaccgttttccttcaataaccc

SEQ ID NO: 322219 - DNA, 593 bp, Homo sapiens
ccatcacaacagtcttaaacaaagtcttccttaccattttaacaagtatgagaataattttttctttaacacactggtcaactatgagaagaacggatttctttctgttgggggaataacatttgacttaatcagagttcccaatcgtcagatcaattgcaaatgtataaagctactcttagctacataaaagcaggcacggttgggatttttggtccttgctctttagaatgcacaagggagagaaaataatattgctaagaaatcctaatacacatattccttccaatacactgcccatgttacagcaccacagtagcactggaaaaaytgcatttggtgtctcaggagggaatgcaggaatgcggaggcgaaaaagcacatcaagggagaaagtccatcccaaccagcgcttcgtctcctcctatttccttaggactagttccattaaaaaaagagaatactggaaatagacagatcttaaacaacagaaacctactgcctagataaatccaggcctggttggaacttttaatagtttgcacaatggtttttaaacttgactgtaactcaccgttttccttcaataaccc

SEQ ID NO: 322220 - DNA, 609 bp, Homo sapiens
taaatttataatatataacattttcttcccatgttaatagctcatgctctggattcttttaccaagattttcggtatataaatttaagtgatcctctgctgtggtccaaatgtttgcgtaccccttcaccaaaactcatatgttgaaatcctacatttgaaagtagggcctttgggaggtggttaggtcgtgggagaagagacctcatgatgaggttagcgtccttacaaaagatttcccagagagattttgaggaactaacagagctggaattcactcattaccacaaggggacctcactcaagtgaggtcactgtgagaaggtgctatctatgagccaggaagtcaaccctcaccagagggttgacagtaacttgatctgacagtaccttgatcttggacttcccagactccagaactgtaagaaataaaatttggttgtttataagccactcggcttaaggtattttgttacagcagtccaaacagactaagatatcctcttaattagtattatcttgctcaagaacagtgtgctagatttaaatatttctacaaaggcttcarttcttctttctttgaaagttggagtttaattcccttctactt

SEQ ID NO: 322221 - DNA, 613 bp, Homo sapiens
cctaatatctggagtaatttgttakgcaatcataagtaataaaaccaattaaaatcttcaaaattttctgaggggaaatcagtgatgtaccttgcatcttataattgcatatgattaacaggaaacaattcatgtaaataaatgtgagctgttaagactttgcccaaaatattgtttgactcagaatcaaatataagacttaatttatataatcagtgtccttattttaattataaataaatcaaacatagaattaagaagccactgaatatatacaaatatttattatttttatgtcatacaaattcatatttgccactaaaataatgttataatgttagataatattaaccacactatatcagaacaaaacacaacccctcagatatcattgtttcattcaacaacatttcattttaacacagattaaaaaaaatctcttcctggccatgaccactgtctacatgtagtttgcacattctccctacgtttgtgggttttctccagtcactctggtttcctcccacatctcaaagctgtgaacattgggtaacttggcatgtctaaatggttccagtctgagtgagggtagatatgggtgtgtgtgagtgtg

SEQ ID NO: 322222 - DNA, 599 bp, Homo sapiens
agtgtaaggagcatgcatcagatttctccttggcctcattccccgaaggccactccagccacaaaagggtcagaaggactcctccacctgytcttgcacctgtcacactaaagtgggaggaacaaccgaaagcatgagcaaatggactttatcgaagataaaatggggaagaaacaaatgcaccacattaatggcaatgaaagtgctcaatgtcaaatgttgtaagagacaggatatttcaagttcttaatatacaaatggcttggaagttttatcaaaattaggtcaaaaacatctgctaatttaatacatttctgatgttatcatattaatatacaagataatacgtaaactaaacttgatgatatttaatgtatagtctttaacactgaagacataatatctatgtgacttggagttaaatactcctaggttgagatctcaagtctgtcacaagtttagatgtccctgagcaaatcagcctctgtgagactcagtttactcatttgtaaaatgggaccaagaactctacaagtgctcagaacatctcagtccatggtaaaataagaaaaaaaaaaagcagaagacaaatatcttca

SEQ ID NO: 322223 - DNA, 599 bp, Homo sapiens
agtgtaaggagcatgcatcagatttctccttggcctcattccccgaaggccactccagccacaaaagggtcagaaggactcctccacctgttcttgcacctgtcacactaaagtgggaggaacaaccgaaagcatgagcaaatggactttatcgaagataaaatggggaagaaacaaatgcaccacatyaatggcaatgaaagtgctcaatgtcaaatgttgtaagagacaggatatttcaagttcttaatatacaaatggcttggaagttttatcaaaattaggtcaaaaacatctgctaatttaatacatttctgatgttatcatattaatatacaagataatacgtaaactaaacttgatgatatttaatgtatagtctttaacactgaagacataatatctatgtgacttggagttaaatactcctaggttgagatctcaagtctgtcacaagtttagatgtccctgagcaaatcagcctctgtgagactcagtttactcatttgtaaaatgggaccaagaactctacaagtgctcagaacatctcagtccatggtaaaataagaaaaaaaaaaagcagaagacaaatatcttca

SEQ ID NO: 322224 - DNA, 599 bp, Homo sapiens
agtgtaaggagcatgcatcagatttctccttggcctcattccccgaaggccactccagccacaaaagggtcagaaggactcctccacctgttcttgcacctgtcacactaaagtgggaggaacaaccgaaagcatgagcaaatggactttatcgaagataaaatggggaagaaacaaatgcaccacattaatggcaatgaaagtgctcaatgtcaaatgttgtaagagacaggatatttcaagttcttaatatacaaatggcttggaagttttatcaaaattaggtcaaaaacatctgctaatttaatacatttctgatgttatcatattaatatacaagataatacrtaaactaaacttgatgatatttaatgtatagtctttaacactgaagacataatatctatgtgacttggagttaaatactcctaggttgagatctcaagtctgtcacaagtttagatgtccctgagcaaatcagcctctgtgagactcagtttactcatttgtaaaatgggaccaagaactctacaagtgctcagaacatctcagtccatggtaaaataagaaaaaaaaaaagcagaagacaaatatcttca

SEQ ID NO: 322225 - DNA, 533 bp, Homo sapiens
ggttgaactctgatgaccacgaggtatgttttgacttccacacagggcctaggccatgccaacacagggtaccaggaaaagaccccctgttacaaagctagaaactcaaaggacaccacctccagcatcaggcctagccagcaatcactcagcttcatggaaggagagccaggaaacrtgcctgttttgacctgggcaagaggtagaaggaggttaaaaaaaaaaaattattctctgacaatttggaaacacaagttgaccttcaaacaggtcctttatactactttcgtgttcttaaaaacctcaagctaaaaattaattttaaaatgagtccccctacactggcactcggcagaagcaagcaaatatcacagttaaggatacattagacctttctcattaatgctcccaaccaaccaacacttattgatatggtttggctgtgtccccaccaaaatctcatcttgaattgtaactcccacaattcccaagtgttgtgagagggacccagtgggagataattgaatcatggg

SEQ ID NO: 322226 - DNA, 474 bp, Homo sapiens
acgtgcctgttttgacctgggcaagaggtagaaggaggttaaaaaaaaaaaattattctctgacaatttggaaacacaagttgaccttcaaacaggtcctttatactactttcgtgttcttaaaaacctcaagctaaaaattaattttaaaatgagtccccctacactggcactyggcagaagcaagcaaatatcacagttaaggatacattagacctttctcattaatgctcccaaccaaccaacacttattgatatggtttggctgtgtccccaccaaaatctcatcttgaattgtaactcccacaattcccaagtgttgtgagagggacccagtgggagataattgaatcatgggggcaggtctttgtcatgctgtttttgtgatagtaagtctcacgatatctgatggtattataaagagaagcttccctgcacaagtgctctctctttgcctgccaccatccatgtaag

SEQ ID NO: 322227 - DNA, 474 bp, Homo sapiens
acgtgcctgttttgacctgggcaagaggtagaaggaggttaaaaaaaaaaaattattctctgacaatttggaaacacaagttgaccttcaaacaggtcctttatactactttcgtgttcttaaaaacctcaagctaaaaattaattttaaaatgagtccccctacactggcactcggcagaagcaagcaaatatcacagttaaggatacattagacctttctcattaatgctcccaaccaaccaacacttattgatatggtttggctgtgtccccaccaaaatctcatcttgaattgtaactcccacaattcccamgtgttgtgagagggacccagtgggagataattgaatcatgggggcaggtctttgtcatgctgtttttgtgatagtaagtctcacgatatctgatggtattataaagagaagcttccctgcacaagtgctctctctttgcctgccaccatccatgtaag

SEQ ID NO: 322228 - DNA, 490 bp, Homo sapiens
attaagtttcaccaataaaagctttacacactctccaaagctgtttcttcagaaaaggaagasagatgttaatttaaatagtaggaaatggacagatttaaaaatcaaattagcctggtcaacatggtgaagctccatctctactaaaaatacaaaaaattagcctggcatggtggcacacacctgtagtcctagcgactcaggaggctgtgggaagagaattgcttgaacttagggaggcagaggttgcagtgagccaagattgtgccacagcactccagcctggacaacagagcaagactcagtctccaaaaaaaaaaaaaaaaaaaaaaaaagcaaattaggtcagaaaaatcatctgaaaagcaaattaggtcagaaaaatcatctgaaaaatatggcacctgccctagagttttaaaggaattcaggaacaaaagtgaaccaaggggaaccaccaaaacatacaacctgtcaatacagacagcca

SEQ ID NO: 322229 - DNA, 614 bp, Homo sapiens
tacttagaactcaggaatttcttttctttctctgtattttgtggtaattctaaaatgtgttgtggatattaacactattaaacatcctccctgagagcaagagtttagaagscttagagtttaatacttctgcttcttaactttatttattttatttatttatttatttttgggacagagtctcactatgttgcccaggctggagtgcagtggtatgatctcagctcactgcaaactctccctcctgtgttcaagtgattctcctgcctcagcctcctaagtagctgggattacaggcatgcaccaccacacctggctaatttttgtatttttagtagagacagggtttcaccatgttggccaagctggcctggaactcctgactttgtgatcctcctaccttggcctcccaaagtgctgggattacaggtgtgagccaccacgcctggcctgcttcttagctttaagtccatgtgtctacactgtatttatgttatcggcagaagatgaattacagagacatttgggaggtcctaaatcattgtaatatactagttatataagtgaggtgaaaaaccaaagagttaaatttccaatattgctttcttatttca

SEQ ID NO: 322230 - DNA, 613 bp, Homo sapiens
ttaaattttaaataatcattataactttgagctactattaatcctactttgtagacgaaaaacagaaaagttcagaaaagtcaaacaattcaccccagatcacatggtcagaggsacaattcaaatgtttattttcctccaaggccaccagccttccccttgacaaatggccttgttctcattcccaccttcatgtatcattagtttggcttcttttcctttctcactatccagatctctgcaaatcttctgggccatcagctcacattttactatttcctagaaattttcccagactagcaaagcttttgatcatactgctcagcatgaacgtgctctctgttgcatgtactacactgtgttatttggtgtgtgtgtgtggtgtacatgcacatgtgtccgtgtgtggtgtggtaaggtagcattatattctgaggagattacatccccatgattaaattgtgagctccttgtcccctatggcttctataacccctacagttgctacttataattaaatacataagtttcatacatatttaggtactggctcaaatgcttccttatcttttaatgggaaagaaaagatatacttacagccgaaccagattgg

SEQ ID NO: 322231 - DNA, 570 bp, Homo sapiens
ggaggggacataaataattaaaccatacagggttaactggtcttcatccatgaatctctcacaaaaatattctttttcattttaccacagtctctagaagttctggcatacgctttgattcaatctagcataatggcattaaatgcaatataaataataatgattctcaaatttttatttatagccaaaccttttaccttagacttaggcttatatatccaagcaccaagtcatctcctctacttgggcatcaaaaatgcaactcaaagtcaacatgttaaaacctaagacttgattccttcctatccttgacaaaatattttcctgcaagtttttgccatttcagaaaacagcaatttcattcttccagtggcttataccaaatgccacagttactcttgcgactattcttcttctcacatctatatccaatacctcactaaatattattagtttgaacttcaaaatacatccagaatctgcacaggaagcagagctttaggaacagtttagccactagcattccacrtatacaaagccaaggaaacatcaatagctctaacaatatat

SEQ ID NO: 322232 - DNA, 606 bp, Homo sapiens
attagcatatggtcaatttggtttcattayatatcatttcagttaaagttgcagtttccaagaacctatagatgaccttaagtgagggcttgctgtattgaaaactgttgaagccaagcagaggtacagcataggtattaatgataatattctcctatccttttgaattttccaagaaaaagttcttaaaaagttaaaaccccccacctaaaaaaaaattaaagcaacaatagaaaatggagctgttacaggggttctcaaagccagtatcaaagtcatgctgcctgaaacatcacctgaaactgactagaaattcaaattctctgaacccatttcagacctgctgaaatggcaactgggaatggcagggagggggaactcaggcagcaatcactgcgtataacaaatccagcaagtgattctgatgtgtggtgaagttctacgaacaaagtcctagaaaagcttaataatacagaaaagtctggcaagtaagatcaagaaaaaaaagaatacaaaataatcataattgtcaatacagaagcgatgacactttaaaatcaatgaaaaagccatatatttgtaaaaatctatatataaactagtgta

SEQ ID NO: 322233 - DNA, 606 bp, Homo sapiens
attagcatatggtcaatttggtttcattacatatcatttcagttaaagttgcagtttccaagaacctatagatgaccttaagtgagggcttgctgtattgaaaactgttgaagccaagcagaggtacagcataggtattaatgataatattctcctatccttttgaattttccaagaaaaagttcttaaaaagttaaaaccccccacctaaaaaaaaattaaagcaacaatagaaaatggagctgttacaggggttctcaaagccagtatcaaagtcatgctgcctgaaacatcacctgaaactgactagaaattcaaattctctgaacccattkcagacctgctgaaatggcaactgggaatggcagggagggggaactcaggcagcaatcactgcgtataacaaatccagcaagtgattctgatgtgtggtgaagttctacgaacaaagtcctagaaaagcttaataatacagaaaagtctggcaagtaagatcaagaaaaaaaagaatacaaaataatcataattgtcaatacagaagcgatgacactttaaaatcaatgaaaaagccatatatttgtaaaaatctatatataaactagtgta

SEQ ID NO: 322234 - DNA, 548 bp, Homo sapiens
ttatctttattgccatgcactgccagtaatgttttacatgtgtttatctactgactctaacacggacttagcacctaacattgcaaaaggatttttaccaggtgctaaggggcaaaagaaaatacattacacaaaagccatcttccacttgcttatagtctggtaagttttaaaaagatgcatagaagcaaagataacaaaaagcacatgagtagttcaagtattytaagcaatcgctttcaacaaagtgattataaaatgaatccaagaggtggctttcaatgtgaactcgaaggatggttaggattctgtctggtggatacagattaaaaaaaagatattcaaacaaaggcacaaagggagatggtgactgcaaaggaaggattctatagagggccttgactagtgattaagatggacctgatcctgaagacagttaagtcaactaaagtaaaaacacaaaatccttatgttttgcctagtattaaaaaaaaaaaaaaaacttatgtatttggtttgaataccatgttttctccacaacccaagta

SEQ ID NO: 322235 - DNA, 548 bp, Homo sapiens
ttatctttattgccatgcactgccagtaatgttttacatgtgtttatctactgactctaacacggacttagcacctaacattgcaaaaggatttttaccaggtgctaaggggcaaaagaaaatacattacacaaaagccatcttccacttgcttatagtctggtaagttttaaaaagatgcatagaagcaaagataacaaaaagcacatgagtagttcaagtattctaagcaatcgctttcaacaaagtgattataaaatgaatccaagaggtgrctttcaatgtgaactcgaaggatggttaggattctgtctggtggatacagattaaaaaaaagatattcaaacaaaggcacaaagggagatggtgactgcaaaggaaggattctatagagggccttgactagtgattaagatggacctgatcctgaagacagttaagtcaactaaagtaaaaacacaaaatccttatgttttgcctagtattaaaaaaaaaaaaaaaacttatgtatttggtttgaataccatgttttctccacaacccaagta

SEQ ID NO: 322236 - DNA, 536 bp, Homo sapiens
gcttctttactttggatttaaaagattaacaccaaagggttttcccacccttgaaacactgaggttagagacaggaggtaacaactgaacccattagagacaatgcaaactgggtaataaacaatctttatgctgcttcaaagaataacatatttccctttgttcatatcaactataaactcattttttaaatccctgaacataaataagatcaagtaaataagatatttaaagatgtcttaaagcacctttgaaagtaaagagagtttaaggtaaaagctstcatctcttgcaaatcctaaactttctactaaaataaaaaaataaataaataactccctttgcttagattaacaaaccccacctgggattccatggctccccaagtttcaggctacccaacagctttcatttcccaaagtccttcttgcttgatttccagaagaactgaacaaggggagaaaattagataggtgtttcttctaattctgatgcctactgaactgccagtagtgaaaagtaccttagcaatataa

SEQ ID NO: 322237 - DNA, 567 bp, Homo sapiens
gaaggtgttgacagcagagaaagaatgacaagagaacacagaatgaaacctaagtgtggcatttccttacgaataacatagtcagaaactagtgataaatccctgtgatcatttgatgttttcttcccttgccaagttaatgagagcacttactgtcaagcaagatttcaaaaaacctttgtttatcaagaacactatgtattttaaattaaccccgcttaaattgccttcagaaacaccaaaggagttaaacaccaatttaaacacaaaaggggaagaaaaggccaacacgaaaagcacaaaatcccctgtcctccatgccatgcccagctacactctgtcctccccacctccatccccatctctgagcaaatatatccttttaccattggtggcgcagctttttgtgcaattgcctctgagttttactagtaagtatcggaattccagctgactcctcttcagctgttscaagagtcaaaagagaataattattttctttgtgtctctgctcagttctcaggagacagaactaaaaatttcttgccagatggcaactgaggatgc

SEQ ID NO: 322238 - DNA, 597 bp, Homo sapiens
ctttactgaactaggaagaagtatatttcgtcaatgaaaatcattccttaatccagaagttcccaaacactgtcttacttcactgacatagtaactttktcatggtgccccaccccagctcaaaaaaataccgatggtggtttctattactaaattaaatcccccaaatgtctatctatattcaaatactttagtagccatttgaaaaaagtaacacacataaatttgaaataaaatttttattgtattcttaaataacaactacttcttaatgagatatgtgtgcctgctagacactctaaaattaatctaacctcagattcggatcagacaatgatgctcatttcttgttctacaatgacttttacacgtagcacttgctttgtaccacagtaactgtccaaagtccagcatcccaaacactataatggagtgtttctagttttcttactacttttttccccttcaatctccaaatctgcaaatgtttcctggataacttttagcaatacttttaatatctaaaaccaatcactggaataacatttccaggaatcctcaaggcagcagatttggagatttaaaaagaaagaagta

SEQ ID NO: 322239 - DNA, 628 bp, Homo sapiens
atactataattactaagcactgactattcatgtgccacacatttgctaagtccagctaataacaatgaatgcaggaccctgttcatgccaacatggagggcatcatataatagaagaatcaaaatgtaaacataactaaaatagaatgcaacatgttctataaaaataaatcaacaaagtgcaataatgtttaagtgtgtgtgcttctaacacagctagagtgttggctcagggttcacctcagtagttttggcaaaaaagaataaggaaaaaagaaaarggatctgatgtaatacagcacagaaaataaatttaaataataccagaaggaggacgtgacagactcctaattcctaagcaccactttatggtcagttcctaacactaccaggtaaaaacactggcaatttcccccatttgggggatgaaaatacttcccacgttcctgctacccagggtctcaaaagccagactagcttttgtcttttttatttcctaatctttgcagaaatggttgacctgagcccactaaataagccaaaaggagatgtttctgctcaaaggtagtcttctggataagaatggtaagggtgccaaaaagagaaacaagatggagtatggagtgtga

SEQ ID NO: 322240 - DNA, 628 bp, Homo sapiens
atactataattactaagcactgactattcatgtgccacacatttgctaagtccagctaataacaatgaatgcaggaccctgttcatgccaacatggagggcatcatataatagaagaatcaaaatgtaaacataactaaaatagaatgcaacatgttctataaaaataaatcaacaaagtgcaataatgtttaagtgtgtgtgcttctaacacagctagagtgttggctcagggttcacctcagtagttttggcaaaaaagaataaggaaaaaagaaaaaggatctgatgtaatacagcacagaaaataaatttaaataataccagaaggaggacgtgacagactcctaattcctaagcaycactttatggtcagttcctaacactaccaggtaaaaacactggcaatttcccccatttgggggatgaaaatacttcccacgttcctgctacccagggtctcaaaagccagactagcttttgtcttttttatttcctaatctttgcagaaatggttgacctgagcccactaaataagccaaaaggagatgtttctgctcaaaggtagtcttctggataagaatggtaagggtgccaaaaagagaaacaagatggagtatggagtgtga

SEQ ID NO: 322241 - DNA, 420 bp, Homo sapiens
ctcactcttttatacttgtttcgttttttcactgctcataatttttacyttatacttcagctcagctgttgttgcttcattttatttaattttttataggttatagcaaataagttttgtagagccctaactcactgttcaatgctgatcccaaattgggtattactgttaatataaaaagataaaactaaggttgagaaatatctgtacaatttgctctttgcctcaagttattaagtgcctgagaagtgatacaaactacttagcttttgcttttccaacttgctacaatagttacagagataatcaaatcctctgtctacttctttattccttagcaattcattcacttttcattggcaagctcattccaaagaaatacttagccaatttaaaaagggatgcaacatacttctttat

SEQ ID NO: 322242 - DNA, 605 bp, Homo sapiens
tatgtacattttaggtataattttatatcaaagaaagaactgatgtttttagtttagattgcaatatattggaatctcttgtttacttaagtgacaggaagcggtggagtttcattttaatgtaatgacagtgttttttaacaggctacacataatatcaaatcatgagtttgagggaccacaatgttaagtgtctgaaatatgcttcatgatkatatagattttctatgtggaataaataatgtttgagtaaatcaattttttgcttacagaataaaatactgtgtctgacaatattaaatttcatccacagcctacacattagcataatgtggattttccaagctacttttatacatgaaataatataagctgtaatgagtgaaagtaagcacggatttttcagcagtactttccagaaattttgatggaagatcagctttttgtagctggagaagttggattaaaaaatgaccacagagaaattgaaagatgtccagtagaaggtctgtagacttcattccaattcagcatatccatgaggtcaccaagaaattaagtcaccaagaagttaatttcctcaagaaaggacccttgaagaaagt

SEQ ID NO: 322243 - DNA, 605 bp, Homo sapiens
tatgtacattttaggtataattttatatcaaagaaagaactgatgtttttagtttagattgcaatatattggaatctcttgtttacttaagtgacaggaagcggtggagtttcattttaatgtaatgacagtgttttttaacaggctacacataatatcaaatcatgagtttgagggaccacaatgttaagtgtctgaaatatgcttcatgatgatatagattttctatgtggaataaataatgtttgaktaaatcaattttttgcttacagaataaaatactgtgtctgacaatattaaatttcatccacagcctacacattagcataatgtggattttccaagctacttttatacatgaaataatataagctgtaatgagtgaaagtaagcacggatttttcagcagtactttccagaaattttgatggaagatcagctttttgtagctggagaagttggattaaaaaatgaccacagagaaattgaaagatgtccagtagaaggtctgtagacttcattccaattcagcatatccatgaggtcaccaagaaattaagtcaccaagaagttaatttcctcaagaaaggacccttgaagaaagt

SEQ ID NO: 322244 - DNA, 605 bp, Homo sapiens
tatgtacattttaggtataattttatatcaaagaaagaactgatgtttttagtttagattgcaatatattggaatctcttgtttacttaagtgacaggaagcggtggagtttcattttaatgtaatgacagtgttttttaacaggctacacataatatcaaatcatgagtttgagggaccacaatgttaagtgtctgaaatatgcttcatgatgatatagattttctatgtggaataaataatgtttgagtaaatcaattttttgcttacagaataaaatactgtgtctgacaatattaaatttcatccacagcctacacattagcataatgtggattttccaagctacttttatacatgaaataatataagctgtaatgagtgaaagtaagcacggatttttcagcagtactttccagaaattttgatggaagatcagctttttgtagctggagaagttggattaaaaaatgaccacagagaaaytgaaagatgtccagtagaaggtctgtagacttcattccaattcagcatatccatgaggtcaccaagaaattaagtcaccaagaagttaatttcctcaagaaaggacccttgaagaaagt

SEQ ID NO: 322245 - DNA, 573 bp, Homo sapiens
tttagcatccaaaatatgtaaattactcacagaaataaatagtaataaaaacaaatactccaatttaaaaatgagcctgaatagatatttttcccaaaaagacacaaatatggccaacasgtatatgaaagggtgctccacatcactaatcatcagaggaatgcaaatcaaaaccaaaactaggtaccatttcatacctgttaggatgaatattataaagacaacaggtaacaagtgttgctgaggagtacagaagaagttaacccttatacactgctggtggaaatacaacttggtgcaaccattatgaaaaacactatggaggttactcaaaaaatgaaatcatatttttaaacaccttattttgacctgggtccatttcttatcatgtggctttgtagactacagctaatagttccttaaataaatgtactacatatatttggcgatggtcaggaaccacatagctattttaattagatatgtgcttgatgaaaaatcactttggaattttctagtggtaggaagaggtaaaattacatatgtgtatagtatatacatatgctggctggg

SEQ ID NO: 322246 - DNA, 573 bp, Homo sapiens
tttagcatccaaaatatgtaaattactcacagaaataaatagtaataaaaacaaatactccaatttaaaaatgagcctgaatagatatttttcccaaaaagacacaaatatggccaacacgtatatgaaagggtgctccacatcactaatcatcagaggaatgcaaatcaaaaccaaaactaggtaccatttcatacctgttaggatgaatattataaagacaacaggtaacaagtgttgctgaggagtacagaagaagttaacccttatacactgctggtggaaatacaacttggtgcaaccattatgaaaaacactatggaggttactcaaaaaatgaaatcatatttttaaacaccttattttgacctgggtccatttcttatcatgtggctttgtagactacagctaatagttccttaaataaatgtactacatatatttggcgatggtcaggaaccacatagstattttaattagatatgtgcttgatgaaaaatcactttggaattttctagtggtaggaagaggtaaaattacatatgtgtatagtatatacatatgctggctggg

SEQ ID NO: 322247 - DNA, 565 bp, Homo sapiens
gttatattagcctaaatgaatacttttcaataaattaatttattaaaaattatttaattcattgaaattattcatttaggcgaacataatagtaatacaaataaaaatttacatgtctaaaacagataatattatgaaaatatatccagtaattgagaattttttctccttagatttaggcctctgacttccttgaccaaaataatgtaggggaaaaatgacagcatgccaaaagcttgattttttataaataactgaaggctcttgtacccatgtctaatctcattataaacayggatgctcaaatacttgtgaacagtgaagagacacatcctgagccagatttaggcttcagtgaaatttattaaatacaccctaatgtttgaaagtagcgttggtttactttttaagggcttgaattaaccaaaagttgtcttgaatttttctgttacagaaccaaatccagtaaataaggtagatttagtaagtaatatggttttcatacaatgtcatttgatcttgagtaatcagcaaaaagaaaaatatagtttcctatttggcattt

SEQ ID NO: 322248 - DNA, 536 bp, Homo sapiens
taattattagtatgaactcatttaatcttcatattttgcaagtgaggaaatttgggcacagagactaagaaactttcccaaagttccccaagaagtaaaattttattttggtactatttactgtgcctcttttaccaccaccatgttcttaatacgcaaaggttttatttcttcttaatggataacatcaatgtattttcacttaagcaaatatttttacatttaagagaaagaatactcatttcagtagctattgattttcagctcttttgttatagcatacttcacatttttaaaactgtgtagttttccatgggtatggcctccatatttgacatgcgactgagaaaagaaattcagaagcttgtgctctgatagtgatgaacatacagaactttagtcccggaaccctaaaactcyaatgattactttgtttggatcagatttgttttttttttggtaaaactggaacattgtctatcaaaatgaactttgatcgctttttcattatttaatccaaacgtgatacaatttct

SEQ ID NO: 322249 - DNA, 536 bp, Homo sapiens
taattattagtatgaactcatttaatcttcatattttgcaagtgaggaaatttgggcacagagactaagaaactttcccaaagttccccaagaagtaaaattttattttggtactatttactgtgcctcttttaccaccaccatgttcttaatacgcaaaggttttatttcttcttaatggataacatcaatgtattttcacttaagcaaatatttttacatttaagagaaagaatactcatttcagtagctattgattttcagctcttttgttatagcatacttcacatttttaaaactgtgtagttttccatgggtatggcctccatatttgacatgcgactgagaaaagaaattcagaagcttgtgctctgatagtgatgaacatacagaactttagtcccggaaccctaaaactctaatgattactttgtttggatcagatttrttttttttttggtaaaactggaacattgtctatcaaaatgaactttgatcgctttttcattatttaatccaaacgtgatacaatttct

SEQ ID NO: 322250 - DNA, 619 bp, Homo sapiens
tttcatcttttgaaatatcaaaataatccaacctttcaaacagagttgtcataaatgtcctgtttatgaggacaagcttctgtagttttccacagaagggagctaagtaactrttttcttgtgtgtgcaatatttggagcaagaagcaggtcatttaagataagtgttcacaatgttccccatgatagcagcagtatgaattaagtgaagaaaagtgggaatataatgaaaatgaccacagagaaacttatcaaaagattcagttaagttaatattgttagtttcagaatgtgaattcgactttgagaattaaggtgccaggaggaagtggaaatagttttggggaaaattctgcatatgaaggtaacactatgaactgtagatgtagaacactattgtaaccgtgatactagagtatgtttttattataacctttgaaattgattgggctgtttcatgcacctatgactttttataaactatccctctagcgatattcttttatctgatttattcacatagagaacttgtattcaaccttcaaattaagttcaaatattaatccctcttttggactttactggtcccaggttagaattgacttttgaattgatttctt

SEQ ID NO: 322251 - DNA, 619 bp, Homo sapiens
tttcatcttttgaaatatcaaaataatccaacctttcaaacagagttgtcataaatgtcctgtttatgaggacaagcttctgtagttttccacagaagggagctaagtaactattttcttgtgtgtgcaatatttggagcaagaagcaggtcatttaagataagtgttcacaaygttccccatgatagcagcagtatgaattaagtgaagaaaagtgggaatataatgaaaatgaccacagagaaacttatcaaaagattcagttaagttaatattgttagtttcagaatgtgaattcgactttgagaattaaggtgccaggaggaagtggaaatagttttggggaaaattctgcatatgaaggtaacactatgaactgtagatgtagaacactattgtaaccgtgatactagagtatgtttttattataacctttgaaattgattgggctgtttcatgcacctatgactttttataaactatccctctagcgatattcttttatctgatttattcacatagagaacttgtattcaaccttcaaattaagttcaaatattaatccctcttttggactttactggtcccaggttagaattgacttttgaattgatttctt

SEQ ID NO: 322252 - DNA, 619 bp, Homo sapiens
tttcatcttttgaaatatcaaaataatccaacctttcaaacagagttgtcataaatgtcctgtttatgaggacaagcttctgtagttttccacagaagggagctaagtaactattttcttgtgtgtgcaatatttggagcaagaagcaggtcatttaagataagtgttcacaatgttccccatgatagcagcagtatgaattaagtgaagaaaagtgggaatataatgaaaatgaccacagagaaacttatcaaaagattcagttaagttaatattgttagtttcagaatgtgaattcgactttgagaattaaggtgccaggaggaagtggaaatagttttggggaaaattctgcatatgaaggtaacactatgaactgtagatgtagaacactattgtaaccgtgatactagagtatgtttttattataacctttgaaattgattgggctgtttyatgcacctatgactttttataaactatccctctagcgatattcttttatctgatttattcacatagagaacttgtattcaaccttcaaattaagttcaaatattaatccctcttttggactttactggtcccaggttagaattgacttttgaattgatttctt

SEQ ID NO: 322253 - DNA, 606 bp, Homo sapiens
ctaaataaataatgatatcaacagattttaacctatgaaataatattggaatgcatttgtgataaaaatacacatatacataygcagagggaaaatcttgttaattaataaaataaaaggaataatagatttgatgaaaatcgcctattggcatctatcatcccaatatttaattcatgcagaaaacattagtgggtggtaaaagtttgatgagaaacagagtatttatatagtctcaaagtatcgtccttcaatacacttattaagttggggaaaaaagtaacttcaccatagtgaaaactagaagacaccaccttaatcaaatgttcaaaattaacatcatcaaaatgggacaaatcaaatcattaccacctgataagatgcaatcacaaacattacctctgtgatattcctgccaaaaccatttaatcagaggaagcatcagagaaacacaaattgaaaggcattctctaaataactggcttaaaatcttcaaaagtgtcaaggtcatgagagaaaagaagacagaagaaggaggttgaagaagattaaaaatacagggcatctaaatgcagtatatgatcttaaaccagggctggctttatg

SEQ ID NO: 322254 - DNA, 626 bp, Homo sapiens
taacttcaccatagtgaaaactagaagacaccaccttaatcaaatgttcaaaattaacatcatcaaaatgggacaaatcaaatcattaccacctgataagatgcaatcacaaacattacctctgtgatattcctgccaaaaccatttaatcagaggaagcatcagagaaacacaaattgaaaggcattctctaaataactggcttaaaatcttcaaaagtgtcaaggtcatgagagaaaagaagacagaagaaggaggttgaagaagattaaaaatacagggcatctaaatgcagtatatgatcttaaaccagggctggctttatgggcatgtagtttgtgtagtggcacagggccctgtacttggaagagcctatgtttgatttaatgttctgctgttgtcctctcaattcttaacaatatttcaaaaggctcacattcattctgaagtgagccccagktccccactgagtagccagtcctgttcagattgaatcctttttctaaaaaaggacattatggggactattgacacaatttggattgggactacagtttaaatgataataatgaaatgttatgtcctgattttggtaattatattgaattacatcaaggaatgtcttt

SEQ ID NO: 322255 - DNA, 635 bp, Homo sapiens
gcattctctaaataactggcttaaaatcttcaaaagtgtcaaggtcatgagagaaaagaagacagaagaaggaggttgaagaagattaaaaatacagggcatctaaatgcagtatatgatcttaaaccagggctggctttatgggcatgtagtttgtgtagtggcacagggccctgtacttggaagagcctatgtttgatttaatgttctgctgttgtcctctcaattcttaacaatatttcaaaaggctcacattcattctgaagtgagccccaggtccccactgagtagccagtcctgttcagattgaatcctttttctaaaaaaggacattatkgggactattgacacaatttggattgggactacagtttaaatgataataatgaaatgttatgtcctgattttggtaattatattgaattacatcaaggaatgtctttgtaggaaacacacactaaaatatttgggtgttaggcaaaatgtgactgagtaactttcaaatgatttaggggaaatactttctgcactataattacaacctttctgtaagtttgaaattgttttagaataaaaagaaaaaaagcaattcatcatatcctctgtaaaatcaagaattggtgaattcaaacaac

SEQ ID NO: 322256 - DNA, 473 bp, Homo sapiens
gtgaacaagaacagcttggggattacaagcaagatggagttggttaggtcagatctttttcactgtaataattttctcatttataattttgcaatggcagtttcaascttgtctcaaaaataattttttttaactaaatttgattaaaagttgaacattgttcctatagagaaaatattttatttacatcatttgttagttaaaatattctcaaataggacaaaaatctcctttacgaaaaggttttgaagacccctttcttaaccagtgagctaagatagaaaaccatgaaaggctatgtttttatgcttatatatataatcccacaaaaagttaaaagttgatgaagacaatctaaggttccactcgatttcacgaaattttagacaagcttttatctcacctaggaccctgaccttccttttcttagaacatttactctagaaaacacataattgtacatcctttctctg

SEQ ID NO: 322257 - DNA, 473 bp, Homo sapiens
gtgaacaagaacagcttggggattacaagcaagatggagttggttaggtcagatctttttcactgtaataattttctcatttataattttgcaatggcagtttcaagcttgtctcaaaaataattttttttaactaaatttgattaaaagttgaacattgttcctatagagaaaatattttatttacatcatttgttagttaaaatattctcaaataggacaaaaatctcctttacgaaaaggttttgaagacccctttcttaaccagtgagctaagatagaaaaccatgaaaggctatgtttttatgcttatatatataatcccacaaaaagttaaaagttgatgaagacaatctaaggttccactcgatttcaygaaattttagacaagcttttatctcacctaggaccctgaccttccttttcttagaacatttactctagaaaacacataattgtacatcctttctctg

SEQ ID NO: 322258 - DNA, 602 bp, Homo sapiens
agtagtttcaaggctagtctarttttacttaaaatatatagagattatatatataggaaggttttcatacaatgtccattaaaattaataatttcaaattactgtcagaggcatgtgaatccatcttgaataggagctgggtaaaatgaggctgaaacttactgggctgcattcccaaacagttaaggcattctaagtcacaggatgagattggaggtctgcacaagatacaggtcataaagacctcactgataaaacagattgcagtaaagaagctggctaaaacccaccaaaaccaagatagccacgagtgacctctggtcttcctcactactacgctcccatcagcgccatgacagtttacaaatcccatgacaacatcagagagttaccctatatgatctaaaaaggggagacatgataatccaccccttgtttggcatatcatcaagaaataaccataaaaatgggcaaccagcagccctcagggctgctctgtccatggggtagccattctcttactcctttactttcttaataaacttgctttcactttgcactgtggactcaccctgaattctttcttgtgtgagatccaagaa

SEQ ID NO: 322259 - DNA, 570 bp, Homo sapiens
ctctgcttattttgtctggtgcaatgtttttctctttgataatgttgaaaactgattacaaatctcagtccacatattttccaatttggggaatatttctagaattctaaaaaaaaacaacaaaatatgaatttatttttattttactgaagggcacaaatgataaatggattgaccaaagtagtttcaaggctagtctagttttacttaaaatatatagagattatatatataggaaggttttcatacaatgtccattaaaattaataatttcaaattactgtcagaggcatgtgaatccatcttgaataggagctgggtaaaatgaggctgaaacttactgggctgcattcccaaacagttaaggcattctaagtcacaggatgagattggaggtctgcacaagatacaggtcataaagacctcactgataaaacagattgcagtaaagaagctggctaaaacccaccaaaaccaagatagccacgagtgacctctggtcttcctcactactacgctcccatcagcgccatracagtttacaaatcccatgacaacatcagagagtta

SEQ ID NO: 322260 - DNA, 580 bp, Homo sapiens
tgcctttaattcctatggcccaggccacaacgtgacctaatctgtgctgtaacaatcatatctgggtttcatagcatttgcacttatttttgtgcattctcgcctttggctgcaatttagcaaagtttacgctgtgtataaaactttttcaccaaatgtatgtctagaacttcagctatttctgttgcagttatcttattggaccgatttacaatgattatggaggcttgtcttcccttcgtggctgctttacattgtatcacttgcccgtaattttttytgacctccattgtcttttattttttcttgcaatagttgtgaatttttagcaacatatctgattttctcatgacaaaaaacaactacttagatgagaactacttgaaaaaaaaaaaaaaaaaaacaagagttcagaaataattgactctctgattactcctgcgccttgctttttttcctcctagattatgaaaaagtgtatgacttcctctgtattcctggcacctaatgcagtgcttaacaagttatcagtgtttgcaatgaaagtgtgttgagtcaatgaataaatgtcaccattaaa

SEQ ID NO: 322261 - DNA, 580 bp, Homo sapiens
tgcctttaattcctatggcccaggccacaacgtgacctaatctgtgctgtaacaatcatatctgggtttcatagcatttgcacttatttttgtgcattctcgcctttggctgcaatttagcaaagtttacgctgtgtataaaactttttcaccaaatgtatgtctagaacttcagctatttctgttgcagttatcttattggaccgatttacaatgattatggaggcttgtcttcccttcgtggctgctttacattgtatcacttgcccgtaattttttctgacctccattgtcttttattttttcttgcaatagtygtgaatttttagcaacatatctgattttctcatgacaaaaaacaactacttagatgagaactacttgaaaaaaaaaaaaaaaaaaacaagagttcagaaataattgactctctgattactcctgcgccttgctttttttcctcctagattatgaaaaagtgtatgacttcctctgtattcctggcacctaatgcagtgcttaacaagttatcagtgtttgcaatgaaagtgtgttgagtcaatgaataaatgtcaccattaaa

SEQ ID NO: 322262 - DNA, 580 bp, Homo sapiens
tgcctttaattcctatggcccaggccacaacgtgacctaatctgtgctgtaacaatcatatctgggtttcatagcatttgcacttatttttgtgcattctcgcctttggctgcaatttagcaaagtttacgctgtgtataaaactttttcaccaaatgtatgtctagaacttcagctatttctgttgcagttatcttattggaccgatttacaatgattatggaggcttgtcttcccttcgtggctgctttacattgtatcacttgcccgtaattttttctgacctccattgtcttttattttttcttgcaatagttgtgaatttttagcaacatatctgattttytcatgacaaaaaacaactacttagatgagaactacttgaaaaaaaaaaaaaaaaaaacaagagttcagaaataattgactctctgattactcctgcgccttgctttttttcctcctagattatgaaaaagtgtatgacttcctctgtattcctggcacctaatgcagtgcttaacaagttatcagtgtttgcaatgaaagtgtgttgagtcaatgaataaatgtcaccattaaa

SEQ ID NO: 322263 - DNA, 537 bp, Homo sapiens
gatattcaacataaattggtaattacagtaattcaataagttaaagccatatttttctcttcttaacaataaygaaaaatgctctatttagtggtctgctttgaataaacttgtgaaagaagtaaatgctttttgcaatccctaaaaccatggggaacatatatataaagtaaaacttgtgaatatcataaagcattgacagaaaggagttatccaaaaattcagaacttaatgtagaacagtgtattccactaagggttggagccagaatttgtcagatggttcagataaacatggctagaaaaactatccttaatatatcttcaaatttatttcatagccttaatgttaaagttatcaaacaagaaaaaaatattatgtattaaatgtaaaatgatagtcaaaatatgacaatgtgagactagggaaagcaaaaaaatgaatttataaaggaaaggaaaatacaatgtatacttttgaatgcagaaatacagcataattcctccaggtgtggtggctttaaagtctgttaaattt

SEQ ID NO: 322264 - DNA, 462 bp, Homo sapiens
tgcatttgaaagtgagggctcctgaattagtctcatccagggatgcctactgatgtgtagaagcttctaagaatatttccatatttgtaggtttttttgacttcttataaaaggccaatgaaaagcttaagcaaccaattgttaagaaaaattaaatctgctaacactttggcatagttactatcccaccccaaagacaaaaagaaagctatcctagataaartgtttataaggccctcaagtaaattaggtttgcttgtttttcggatctatccatgctgagtccaggcatggagaacactttctttgtcctattccttaatggcctccaccctgaattcaataatttaagctaagaaccagcccctaaattaaaatgaccaactatttaagatacccctttctgacattataactggctctgctgaaaccctttggaaaagagatttacatctgtaaagg

SEQ ID NO: 322265 - DNA, 462 bp, Homo sapiens
tgcatttgaaagtgagggctcctgaattagtctcatccagggatgcctactgatgtgtagaagcttctaagaatatttccatatttgtaggtttttttgacttcttataaaaggccaatgaaaagcttaagcaaccaattgttaagaaaaattaaatctgctaacactttggcatagttactatcccaccccaaagacaaaaagaaagctatcctagataaagtgtttataaggccctcaagtaaattaggtttgcttgtttttcggatctatccatgctgagtccaggcatggagaacrctttctttgtcctattccttaatggcctccaccctgaattcaataatttaagctaagaaccagcccctaaattaaaatgaccaactatttaagatacccctttctgacattataactggctctgctgaaaccctttggaaaagagatttacatctgtaaagg

SEQ ID NO: 322266 - DNA, 515 bp, Homo sapiens
cttagctctatgcttttgagaaacaaattttctaccttgtttcacctaagagttgtccctttagaaatgcaaatttagggtgtcctagccagctgcttaggacaatgaagtagatatttgggaaattgatagtctgaatggggggaaaatatatttaaaatatttaaaagccagccaggccagcaaatgagaatcctaatgaaagctataagatctgtttctgtctgtttgtctgtatgtctatatgtgttatgtgtgtgtgataacatttggtaaataaagctagtttatgaattgttattaaaataagaatggcttcaaaattgacaagtgaggcaaaacaaatgtatgacttgttatgtaagaattttcagaaaccacgtcagaattaaacaattagttgtggaaatggcttgaaatggtcrtagttaaaagacaaggaaatttgcttatttctgtggcctgcaataatttaacatcataaggatagtttcaggtgatggtatatacacaga

SEQ ID NO: 322267 - DNA, 553 bp, Homo sapiens
aggtgatggtatatacacagacatctcagaatgttaagaatcccatacaatattgaaacaagcaagatatgcttttaatgaggaaagttgtaaaggcataaaaatgtatgttaaaaataattttcaccatttaaaaatttacttaaaggtagttataaattgaagggatacaaaacagagataaaattaaataaatacagaaatttgggaagagaaataatttttaaaaataagtagatttttaaaagtttataaaaatcttgtatagttaaaaatgtcagatttggtagatttatttataaagttctattaaaattggctttagtattgataatacactaatacaaaagtaaaatttgattttctcttttgaacaaacattttgtgtaatattagtaagtgacagkaaaatatttttgttcacttttttagtaaactgcaaaaaattaaaaaagagacaagaatgaaggaaagtcaggttctctctcatgctgtcattctcaggtcttttgaatatttgcaaaactgagtctcctctctatgacaaagtaaa

SEQ ID NO: 322268 - DNA, 545 bp, Homo sapiens
ttttaataatccactgacagagaacaaacaagcaaactcttcataatatagaatacagagattaagtcttctgagaacattagagaaaagctgcccttgccacccacactaaagcaaaactttgggaccttgaacttcaggttaataacctcacaacttagtagggcccctccagactttaggaactttatrcactttagaaaccttaaggtaaagataaccagggaagtttctctccagaagcagatggtatcccagacatgaacaactttttcgcaagatcacggatcaacacttctctgctatcatgaggctctcatcgctcaattttgtccttgcttatgcctctgtgaatgatagaactaaaaagggggtctcttgtgtgcactcttggggaatacttttatttgtggaagatttcacagccagtctcatatatggatgagcttatgccttgaaagataaaaaataaagggccaatgtaagcaaaaacgtttaatgggatcttggttgctttataatccatcagaaacagaacactggtc

SEQ ID NO: 322269 - DNA, 545 bp, Homo sapiens
ttttaataatccactgacagagaacaaacaagcaaactcttcataatatagaatacagagattaagtcttctgagaacattagagaaaagctgcccttgccacccacactaaagcaaaactttgggaccttgaacttcaggttaataacctcacaacttagtagggcccctccagactttaggaactttatgcactttagaaaccttaaggtaaagataaccagggaagtttctctccagaagcagatggtatcccagacatgaacaactttttcgcaagatcacggatcaacacttctctgctatcatgaggctctcatckctcaattttgtccttgcttatgcctctgtgaatgatagaactaaaaagggggtctcttgtgtgcactcttggggaatacttttatttgtggaagatttcacagccagtctcatatatggatgagcttatgccttgaaagataaaaaataaagggccaatgtaagcaaaaacgtttaatgggatcttggttgctttataatccatcagaaacagaacactggtc

SEQ ID NO: 322270 - DNA, 588 bp, Homo sapiens
attttattctattactacatgttattatgctacacatttactgactatggaataaaggtgacactggaaggtattttttcaaaatcatgactccatcaaagatatttgaaaattcttttgatgttcacatcctttctatttctagttgtcattctcctaaatttatactttggactattaaaacagcgttctatggggcagtcctgcttctagtccattcaactcatctgaatttgttaaagctgtttcattcctctgtgaaagcatcttaaattatttcccacttttcaaaagatagagyctcaatattttgtttgccacagaaacctttaagatcatgagcattatagtataaccagatcaccctatacacagataattacaggaaaattgttctcaatttgtgggatctgaggtctgcaactagatcttttcactgagagtgggacaaaagctggaggaaccaaactagaagcaagcatataaataattcacaccagaataccaaagctgttattgttcctgctaaggaaaaatcaagacgccatgccagggtcaaagtgcaggcatggaaggaacagagtggta

SEQ ID NO: 322271 - DNA, 568 bp, Homo sapiens
aacacaacagggaattattgtttaactttatggtcctaaggcagtggataatatttctatcaaacaatagtataaacaaaaagcttaaaagtaaaagctggaaattagatgttcctaaggctttgaaaaactcagcagtattcccaggaatcttgaaggccacacacaggcagacagtgttctctccttcttaggaaagacataagaaggtcctaaattctcatcactgaataatcttgtggctttatgcaaacaggaagtaaaggcaaaggcagatttgasaaaaacctgactgagtgttgaagatatgccccaatatgcacacagagcttctcagcaaagactaactgcattttttccaaaaatcaattgttcatatacagtaaaggtctacttctgggctctatcatattccattgatctatatgtctatctttacatgaatagcacactgttctgattactatatgctatcgactgactgtctttccaaaattcatatgttaaacgctgatctccaccatggtgatatttggaggcagggcctttgggaggtgattagttcatg

SEQ ID NO: 322272 - DNA, 568 bp, Homo sapiens
aacacaacagggaattattgtttaactttatggtcctaaggcagtggataatatttctatcaaacaatagtataaacaaaaagcttaaaagtaaaagctggaaattagatgttcctaaggctttgaaaaactcagcagtattcccaggaatcttgaaggccacacacaggcagacagtgttctctccttcttaggaaagacataagaaggtcctaaattctcatcactgaataatcttgtggctttatgcaaacaggaagtaaaggcaaaggcagatttgagaaaaacctgactgagtgttgaagatatgccccaatatgcacacagagcttctcagcaaagactaactgcattttttccaaaaatcaattgttcatatacagtraaggtctacttctgggctctatcatattccattgatctatatgtctatctttacatgaatagcacactgttctgattactatatgctatcgactgactgtctttccaaaattcatatgttaaacgctgatctccaccatggtgatatttggaggcagggcctttgggaggtgattagttcatg

SEQ ID NO: 322273 - DNA, 572 bp, Homo sapiens
ttgaaatctttctattgtgttctcttccagataaattaaaagcaaaatatttaacacattattcaaatctctcttaagttggcccctgtctacttttcctgcctatttgcatgcattctatgcctctgcaatcaacctacgatacctccaaagtgcccagtgaaaaaaaatcaaaacattttaccctaaaatatatttatttgacatattttgagttggctgtcagagggccagcacaagaaatggtccttgaaagctgtcttttggggataatttgtatttgtaaagaatctacattaaagtagtgaggcctttccttgtctggatctaggaaagaacaactaggaatctgacacctttaaagatctaaagragacatttgccatctactccctctgaggtttcatttaccataacaagaccacctttgctagtcaaatttcctctcctctccctcctgtaacctatgttgtcactaaatcctaatttactgacataaccctgtttttggccatgctctgagcctccattcttcctgtaacatcaagatgctctataagcttctacacccg

SEQ ID NO: 322274 - DNA, 566 bp, Homo sapiens
tttacaaataaaataaaaaacacatagttactacttcattaggttgttatgaggactaaatgatgtaaagtatgtaaactacataaccttaaacttggcacatagtaatttctctttgtgtttgctgttatcagtattacatgtgtatcagccagaaagaattataagagaaattttaatagtgaataatggaaatccatcagatacaggatataattagatattgtctcattttgatttatttcttataatgatagacataccttagtcaaatttacagatgaggaaatggatactcaaaaagtaaaaactcactcaagtttgtgcaagtaacacatgccagaaaaaggtataaacacaaatttgtcttcaaarcctatctttgttttggactgaggcacactacatcacttataaattagctaccattttccttttcacataagcaaacttaaggccaagaagagaattacctacacattctatgaatgatacacgattagtaacaggcctaaactaagacccagggcccctaaatcagagttcagcacttacatgaaaccagg

SEQ ID NO: 322275 - DNA, 579 bp, Homo sapiens
tgtgactttaaaaaatctttttgaccttgcccattgtatgaaatacattttactttacaatgcagttcacatatacatcttttgtatacatgtgtatgtctgaaaaaatatctcataaaatcttagactactgagactctagcattttttattatgtcctttttatttaaagcaagcatatgtttatcacaatatcctaatgtgcttttgttgtcaaaacagacagagatttaaatgtataaaaaatgtactgctcttataggttgtacagacacacgtctaacagtgtaataaagataatagcaccattactagctagaggaatgcagactatacttgagtaatggcttcacagagaccttacaggatgtgttgtttaaagtgaaccttaaaaggtaactaaacatttgcagtcagaaccagtgtttamagttgtccaagcaaagtaggcaaaacccctaagtattatccaaagtggcatattcaggaaacttcaaaatagctggaaaatagggtataattgggagcttgtcaagaggtgagataaacaagtgaagtagacaaatgaaataacagtgg

SEQ ID NO: 322276 - DNA, 571 bp, Homo sapiens
ttaaaacatgggtccaattgattgttcacagtagaactcaagagctttccacattaatttttggctctcttctccttctcacttgtaaaaccaccaagggcaattaacataaacaggccagtgatacccttgactttgcaaggtaattaacacagcaggtaatacattctggggcagacagttccaaaaagagtgggtggaatcttaatgggagactaaggaagagtaagcaagttaataattccagaccatatataactcgcagatcattaaagtctcaaagctatttttaaaaactcaacaacctggaaagaattgttttaacattttcttcagtttcatcagtggctgggcttttattattattwtttttttctgatagtagtgtttagatagactttctaaaatcgtttaaaagccaacctaattgctagccttgcataactttctaaggcattatttaagccataatgaccttcacactggatatgttcttggcattaataaccaattgaaactattggtaggctcgggtgaaactagaggcctttaataaagcctgccattaatg

SEQ ID NO: 322277 - DNA, 582 bp, Homo sapiens
attggctcatgtaattatggaggctgagaagtcccatgacataccatctgcaaagtggaggaccaggaaaacctctggtgtcattcagtctgagtccaaaggcctaagaagtagggaagctgatgttgtacatcctagttcaacgccaaaggcctgagaactgggaagggtaggccatgggtcagacaggggaggtgttattatgtaagtcctggagttcaaaagcccaagaacaaggagctctggtgtctgagggcagaagaggatggatgtctcagctcaagaacagagagaaaatttaccattcttttacccttttgtcctatcctggcctccagtggatgggtgatgcctgtccacattgrtgagagtggatcttctttattcagtccactgattagattagtcaaatactaatctcttccagaagcccccttacagacacaccccgaaatagttgtaccagctatttgggcatctcttagcccagtcaagttgaagcataaaattaaccatcacaagtccactgcttgtcagcttggcattcatatgtatctccttaaaccatacttaatctctaaa

SEQ ID NO: 322278 - DNA, 478 bp, Homo sapiens
acttaaaaacatcactagtgaaagtrcaactaagagagtaggaagtagaattctgagacttggcaaagcaaatataaggaagcaagagcaaaaatgaataactatagcacacatgataatccataatcactcctaatactttaaagtatttcaatttatcaacaattcttgcctaccttcagaaatgtagctttcaaatacagaatcaaacatacatttgctgtgatgcagactgtcaatggagaccacagctgtatatgagtattggtttaggacttgactattttattcaaaatctaaaatataaattcacaatctagcatatctaatgacggatatttacagagtgtagcctttattttgtttgtacttaaattcccccttcacccttccagtgctctgctttgtactgcagggacaaatatttctcatgctcctcactgtgctctctggtttccaggtaagtctagttaatgcg

SEQ ID NO: 322279 - DNA, 538 bp, Homo sapiens
tccaacttaatccaccaatgggtagatggctaataaccctggggaatagtgcagtttgggggatgcagtgttggtctttgctcttggaagactggacacacaaaaatagctgcaactagatgggtgttgacaagtggaagtcctcattcctgagaatatacataatctcatccctgctaatatggccactttgtccatgagataattggagaacaatagcagtggctgaggaaggagactgatttatttttccaggataaatcatcatgaatattaaaattctcctgtaccgagatccatctgtcaaaactctatacaaattatttggtttcttgggagtacctttgttcttctaatgcacaccctggctaaatttcttgattttccttaaagtttccttccttagaaactgatatctccttgcagttaccttactgtctcccttttctgtgaggtcactgttgaaatgtggattgttgtaaagccagggacacattcgtttyttagtagattataattagatctgcagatgaaggcc

SEQ ID NO: 322280 - DNA, 632 bp, Homo sapiens
ccgcctccgcctaccaaagtgtggggattacaggtgtgaaccaccacacctggctaaatatttactttttatttgtttaaccagtatagaatacatgttgttatgggagaatggttatttccctcataaaataagatttaatgaacatatttgtgaaaaatgtcctagggtaatttatagccaataaatgtgaaaatatgagatgatattggggatcagaatctgtggctggagttggaaaagggaggaggaagtttcacaactaccatgcacatttctcaaaaataattttccctcrttatcagcacataaatttttatagcaatattttaggttactccaaaggactgattaaactcctatttaattccttttataatgttttagggtgaagatggttttccaggattcaaaggtgacatgggtctaaaaggtgacagagtaagtatagagaaaatgtacaccagtacacaaaatttaatatatatatatattttttcctttgcttatctttaaatatagtaagcatatgataaataaaatgtttgtactacctaagtctttactcatttaagtttttatacaaagatttaaggattttaatttttgtggagatagtgtagtatcaattg

SEQ ID NO: 322281 - DNA, 502 bp, Homo sapiens
ttattcaattctttttttatctttttacctgtgtttttttttaattaatgttttgttcagatagaaatcatagggaagtaaattgtttaggataatatttgaaaccatctggtatttgttacacattgttggacttcattataacttaaattttgttttagcactttcagattgaaaggtaaccttattgcactggaacaaaatagtatattcagttccctgcttggaggaataaacactccacaaaaaccatcattattagctaaagctctcaacacatattatatttattagtccagatatttcagcatgttagagtgaaaaaagaaattgtcttaaaatttaattctgaatttctttgcatatctaggtttacttactcattgagaaaagttaagtaactcatgatcccttgttttatrtttagactggggtaaatgaaataactgtatcaaaaagatttactctggttgaagggataaaatctaaatattgtgccagt

SEQ ID NO: 322282 - DNA, 593 bp, Homo sapiens
tgttgttatcttattgcttaattaacctctttatcattatatactgtattaggccattcttgcattgctatagagaaatacctgagactgggtaatttatacagaatggagggttagtgggctaacgactttgcaagctgtataggaagcatgatactgacatctgcttggcttctggagaggccttaagaaacttacaatcatggcaaatgcaaagaggaagcaggcatgtcacatggccagagcaggtgcaagagagcaaggggagacgtctcatgctacacacttcgaaatgaccagatctcaagagaactcactctctattgccaagagagtaccaagagaaatggtgytaaaccattcatgagaaatctgcccccgtgatccactcacctcccaccaggccccacctccaatattaggcattacatttcaatatgagatttgagtggggacacacatccaaactacatcatacagtgaccttcttttcctttccttttactttttgccttgaaatccactttctctgacataagtgtaactattactgctcttttatggtttacattggtatggaatatcttttttta

SEQ ID NO: 322283 - DNA, 617 bp, Homo sapiens
tactgctcttttatggtttacattggtatggaatatcttttttyatcttattttcagtctatgtgtgccttaataggtgaagtatatttattgtaggcaacagattattgggtcttctttttttatccattcagtcacactatgtcttttgattggtgagtttagtccatttacatttaagttattaaattattattaagtgtattaataataaacttaataataagtaagaacttttattattgataagtaagaacttattcctgccattttattgataagtaagaacttattcctgtcattttgttattcattttctgatcttctcttcctcctttcttttctttctgtcttttagtaaaggtgattttctctggtgatatgatttagtttcatgctttttatttttttgtgcacctgctatacgttttttggttagaggttaaaacgaggattgcaaatactatcttataacacatattttaagttgattacaactgaaaatattttgcatatactaacaaacatacaaacaagcaagaataaaactaataggctctacgccttaattttatccttcatttttttcactttttgttgtttctatttatatctta

SEQ ID NO: 322284 - DNA, 484 bp, Homo sapiens
cctgccattttattgataagtaagaacttattcctgtcattttgttattcattttctgatcttctcttcctcctttcttttctttctgtcttttagtaaaggtgattttctctggtgatatgatttagtttcatgctttttatttttttgtgcacctgctatacgttttttggttasaggttaaaacgaggattgcaaatactatcttataacacatattttaagttgattacaactgaaaatattttgcatatactaacaaacatacaaacaagcaagaataaaactaataggctctacgccttaattttatccttcatttttttcactttttgttgtttctatttatatcttattttatggtctatgtcttgaaaagttgttgtagttattattttagaatggttcatcttttagactttctttttaagataagagtagtttacacactacaattacggtgttataatattctgtatttttc

SEQ ID NO: 322285 - DNA, 484 bp, Homo sapiens
cctgccattttattgataagtaagaacttattcctgtcattttgttattcattttctgatcttctcttcctcctttcttttctttctgtcttttagtaaaggtgattttctctggtgatatgatttagtttcatgctttttatttttttgtgcacctgctatacgttttttggttagaggttaaaacgaggattgcaaatactrtcttataacacatattttaagttgattacaactgaaaatattttgcatatactaacaaacatacaaacaagcaagaataaaactaataggctctacgccttaattttatccttcatttttttcactttttgttgtttctatttatatcttattttatggtctatgtcttgaaaagttgttgtagttattattttagaatggttcatcttttagactttctttttaagataagagtagtttacacactacaattacggtgttataatattctgtatttttc

SEQ ID NO: 322286 - DNA, 547 bp, Homo sapiens
acatttaagttattaaattattattaagtgtattaataataaacttaataataagtaagaacttttattattgataagtaagaacttattcctgccattttattgataagtaagaacttattcctgtcattttgttattcattttctgatcttctcttcctcctttcttttctttctgtcttttagtaaaggtgattttctctggtgatatgatttagtttcatgctttttatttttttgtgcacctgctatacgttttttggttagaggttaaaacgaggattgcaaatactatcttataacacatattttaagttgattacaactgaaaatattttgcatatactaacaaacatacaaacaagcaagaakaaaactaataggctctacgccttaattttatccttcatttttttcactttttgttgtttctatttatatcttattttatggtctatgtcttgaaaagttgttgtagttattattttagaatggttcatcttttagactttctttttaagataagagtagtttacacactacaatt

SEQ ID NO: 322287 - DNA, 467 bp, Homo sapiens
gatatcatctcaccccagttaaactggattttatctgagagacaggtaataacagatgctggtgaagatgtggagaatgaggaacccttatatactgttggtaggaatgtatcttactacagagaacagtaaagagattcctcaaaaagctaaaaatagaattaccttataatccagcaatcccacwgctggtatatatccaaaagaaaagcaatcagtatattaaagagatatgatgcagccccaatccctgttgcactgaacaaagagggacgaatgtgggaataaagataaagataaaatagtatatttggaagaagaggtcagggggctccttgcttctagtgaacaagggccctgagctttttgctcccttcgtgtttattgagtaaaggagaaggggagaagggggtggttgtcagatagctgcttgattcagtgcgggcttgcatggctgcattttctga

SEQ ID NO: 322288 - DNA, 602 bp, Homo sapiens
tcagggggctccttgcttctagtgaacaagggccctgagctttttgctcccttcgtgtttattgagtaaaggagaaggggagaagggggtggttgtcagatagctgcttgattcagtgcgggcttgcatggctgcattttctgaacagtagtctccagatgttccagtagataacctcaaggaacatggctccagggagtgattgcactcagcatacrttctggcggcaggaatagtcatgagtttgcctacaccctgcattaatgataaacattttgctgtttgatcatattgcctccagtggaatgatgagttagtcgtgacccacatgcctttggctccttacatttccccctttctgtttatgtattaattgaatgaatgtaaggccaggctggacagctctcattttctgattggcagtccatctgattttacagactacaaacagaaaacagagacaaaacaacattattccaagaactgcatatgagatgttaatgtggtgctttatgtaggtccaaggatttaggttcttcaggccttgctggaattctatccagtcttctaaagaaggctgaaactcttgagtttgcttactt

SEQ ID NO: 322289 - DNA, 524 bp, Homo sapiens
ctctgtggctttgtagagtatagccctcctcctgacttctttcacaggctggcattgagtgtctgcagtttttccaagcacacagtgcaagctgtcgatggatctaccatttctggggtttggaggacagtggcccttttctcatagctccactaggtggtgccccagcagggactctgtgtgggggactctgaccccatattccctttctgcactgccctagcaaaggttctccatgaaggccccacccctgcagcaaacttctgcctgggcatccaggagttcccatacatcttctgaaatctaggcagacgttcccaaacctcaattcttgacctctgtgcactcacaggctcaataccacatagaagctgtcaaggcttggggcttgcaccctctgaagccaaggcccaatctctacattgacccctttcagscacagctggagctgctggttcacagagcaccaagtccctaagctgcacacagcatggcgaccctgggcctggcccacaaaaccattt

SEQ ID NO: 322290 - DNA, 551 bp, Homo sapiens
aaatgttgagcaatatcttggagtacaataaacgcacattaaatattttcctgacacatcttctgacattcatttaaatggaatctgtagacaaggggtgagtatagttaaacataaattaaagttttgggccaaaaaaagttttctgaagcatgttgtacctttgcaccttcttttcctgcagcaccaggaagaccttgctcaccaggagggccaggagggccaggatgcccacgttcccctattggaccagtctcaccggttggtccctaaattagataagcaaaatcactttagattgctcttttatttttggcaaagataacacaaactcaaaaacartattattacatttacaaaagtttatcatcctcacttattctcatgatgtcctacaaaacacttcacataaagcactgaaagtagcatatcaagtaagagtctaaaaagattttatataatcttggttagaatctgagtgtaaaaggaaagtacataaataaagtccaaaaagatgttttctttgcttaatacaataatttctgcagagt

SEQ ID NO: 322291 - DNA, 472 bp, Homo sapiens
cagaatatactcactaaataaaacttctgggcatatattctggtatttatttttctctaggctgtgggttattcattccacataattgtgtgaatataggtaaatttcttacccatgagagttaagttacttttaacagctggagaagtagatagaaaatattrggagaagtttcgaaagaactgaatattttattccctacaacatctggtcagactgaaaataataagattagaaaaaaaatgggtaggaactagcagtctcacgttagtatcacaatgttcccaataactatgaatgaattatttacaataataaaattgtataagtaggtaaagagtctgtaattattgcaattgatgctacagggaaagaaaatagagttctattttaaaaatctattaattcagactttcagggttctatttgagctatcattatgaatagcaaaagcaatcatttctggggggaa

SEQ ID NO: 322292 - DNA, 567 bp, Homo sapiens
tcttctttctatatcaaacagatgaagccaattctgtcccaaactgcataaaactgcatactagagaaatggggtatttttatttcatgctctaatgtttcacttgttagagaaacatagtataaaaatcactttgtttatcagtgaaagaaatactccttcttgtctctcctactagaatgcatgcttctcaagtgtaggcatttattatgcttctgatacctcttacagacaaaatgcatgcacgatcaatggctcaaaacatgttgaaagacacataacacaatgggctgaaaaagtctgataaaaaaatgagtcaaatgggtttctttgacaatgaaacaatattacatgagccaagcagttctcaacaatacatacaaacataaatsgtacaatactgaggttatatacgtcactaaactttatgttcctaaacaataatctaatatacagcttaaaataattataagaatgtttataaaaatatacatacagtgacttttgaaactgttttcatttctctgtgaaactttgcagagtcttcatgttacatttggagcaaaa

SEQ ID NO: 322293 - DNA, 644 bp, Homo sapiens
gtttaaaatttttattttcacatttaaaaacataaaaatagatattttgttattcagtctgtttattttctgaatagttattttagtataaccatatgctttctccatatggttgctataatggaaccttgagaagatatagcactgaattccagcacatttttcactatttgcatattttctcccctctacatacatctgggaagctaaggattgaagcttttttcagggttagaatgaagatattgtttgaaattttcttttgaatgattttaatctgcaaaagcagggctattagtatataaaagcatattcttttattaataacacattcttttattctcaccttttcacccttggagccagggtcacctttgagaccaggtaagccaggaggtccctaaataataacaaaaaaaaaccccaaaacaaaaacagagtaggtatgaattagagaatcctataactagtcacagacctagtttagttttgaaaatacggagttgmaaatagtaatgattaatgttgctttatttttaaggcttctaagtaaatttatatatttaaaacactatggtttaatttgtaaccataatattgataattttgattaaatgaatgtaaagttagaaatagaacatggt

SEQ ID NO: 322294 - DNA, 644 bp, Homo sapiens
gtttaaaatttttattttcacatttaaaaacataaaaatagatattttgttattcagtctgtttattttctgaatagttattttagtataaccatatgctttctccatatggttgctataatggaaccttgagaagatatagcactgaattccagcacatttttcactatttgcatattttctcccctctacatacatctgggaagctaaggattgaagcttttttcagggttagaatgaagatattgtttgaaattttcttttgaatgattttaatctgcaaaagcagggctattagtatataaaagcatattcttttattaataacacattcttttattctcaccttttcacccttggagccagggtcacctttgagaccaggtaagccaggaggtccctaaataataacaaaaaaaaaccccaaaacaaaaacagagtaggtatgaattagagaatcctataactagtcacagacctagtttagttttgaaaatacggagttgcaaatagtaatgattaatgttgctttatttttaaggcttctaagtaaatttatatatttaaaacactayggtttaatttgtaaccataatattgataattttgattaaatgaatgtaaagttagaaatagaacatggt

SEQ ID NO: 322295 - DNA, 565 bp, Homo sapiens
ctaataaataaatctctgtaactagtagggtttagctatgaaagtctgttgctaatgccccacaattcaaaatgcacaaaaatataacatyttgttcaagtaatcatttaagtaaaacagtacattcatttaccatgtttccactcaaaatcagtcacactagtggtctcagcaattgtgaggtggaaattgttcttttaaattgaaaaagaagtgaggcctaaatttcccttactttttaactctaatatttccaatattcctgacacaaatccactgctcttaaataaatgtgtcatattacatacaaacataatttcagggcagagactattttgtgtacatagtttcttactgtgagaatacacaaatattttaaattcttaaattacccacttaatggtggagacatcaagtacttttccagagtttattataagtagtgtgatgtgtaaattatttcatctctcaagatgaacagcaaatacttccagaatttttggataactcttacaaaaaaaaattgcatttatattatttataaagagaggtatcattcatctca

SEQ ID NO: 322296 - DNA, 595 bp, Homo sapiens
acatgaagaacaggttaaatatatttagacaaaatgcaatgtgactaaaagatactggtttttttattcttcattgtcagtgactggaaataaattttccaattaraaatgggtatacattcagccagaatcaaagctgatgttagaaatttgtaatctattagaaattatactattcttgattaaaaaacatcaacaacaacaaaaaacaaacaaacaaacaaaaaaatgaaggttagaattctgcttctatcgtgctgtcacataaaaaaaaatcaaaagaaaggagcaaaattaaaactgtgttttttagtgtaactcattttgactgggattgattcaaaatgattcagattgactgaattattctcataagagtcaaagttggcaaagtgttactataatatacataggctttaaattaaatggaaacaatgtggaaggaagtttctcagaactaaacacctggcattcatgcctattttcaagagtagcactgaaataatgacaactttccctctgcattcaaattctttaggaaacaagataagccgataaaagctaataatcctagagactagctcccacaacaatt

SEQ ID NO: 322297 - DNA, 580 bp, Homo sapiens
ccttctttaataatcgtatcatatttctaaacagggaagggtccctagaggaaattacatttaaatggtccaactctgtgtatatctagtatcctctgcttgagtctatcatagtacttaacatgttaacactctaacttttctaagtataattgtacttgttgatctcttccatttgctttaatagtcaacaacttgcataaggtttattgatgacacacatgcrtgaatgaggtcaaatttagtaactttccactaagaatataaaattgattggttttcaacatatttatcattatttcattcatttaatgattcttgatttggtgctactagtgctaattgttgatataaaagtgatttacaagcaattcatttaattaacttaagaaccccatggggtagaagatatccatatcccaattgaactcatttaaactttagaaatatcactggatagaggctagcaatattcccattttataaatgaagaacttaaagccaaaaaaaaaaaaaaggtaatgttcctaaagtcatccaccaagtaagtggtagtgattgtttctgaacccaggagttt

SEQ ID NO: 322298 - DNA, 580 bp, Homo sapiens
ccttctttaataatcgtatcatatttctaaacagggaagggtccctagaggaaattacatttaaatggtccaactctgtgtatatctagtatcctctgcttgagtctatcatagtacttaacatgttaacactctaacttttctaagtataattgtacttgttgatctcttccatttgctttaatagtcaacaacttgcataaggtttattgatgacacacatgcgtgaatgaggtcaaatttagtwactttccactaagaatataaaattgattggttttcaacatatttatcattatttcattcatttaatgattcttgatttggtgctactagtgctaattgttgatataaaagtgatttacaagcaattcatttaattaacttaagaaccccatggggtagaagatatccatatcccaattgaactcatttaaactttagaaatatcactggatagaggctagcaatattcccattttataaatgaagaacttaaagccaaaaaaaaaaaaaaggtaatgttcctaaagtcatccaccaagtaagtggtagtgattgtttctgaacccaggagttt

SEQ ID NO: 322299 - DNA, 580 bp, Homo sapiens
ccttctttaataatcgtatcatatttctaaacagggaagggtccctagaggaaattacatttaaatggtccaactctgtgtatatctagtatcctctgcttgagtctatcatagtacttaacatgttaacactctaacttttctaagtataattgtacttgttgatctcttccatttgctttaatagtcaacaacttgcataaggtttattgatgacacacatgcgtgaatgaggtcaaatttagtaactttccactaagaatataaaattgattggttttcaacatatttatcattatttcattcatttaatgattcttgatttggtgctactagtgctaattgttgatataaaagtgatttacaagcaattcatttaattaacttaagaaccccatggggtagaagatatccatatcccaattgaactcayttaaactttagaaatatcactggatagaggctagcaatattcccattttataaatgaagaacttaaagccaaaaaaaaaaaaaaggtaatgttcctaaagtcatccaccaagtaagtggtagtgattgtttctgaacccaggagttt

SEQ ID NO: 322300 - DNA, 585 bp, Homo sapiens
agaataaatatgtgtatgtgtatatgtatgtcttgtgtgtgtatgtgtatataacgttgaactggaaaatatatattacattatttcatttatataatatgcagaattgttacagatatgtttagcattttaacataagtggtaaacatgataaagaaacataagccaatgattaacaaaaatttaggatggtagttacttctgtggaaaaaaagtgggttgcaattgttacgagtggtatgtaggaagcttctaagttaatgatactgtattatgtagtgcatttaggttgaaagcctaaaataatataatattgagtcattctagcatatgttctttaacattatgagatagtacattagttgagttccctttgatttttgataaattattttaaaataacctcrtaaaaattttagcactgttctatcctctctttttaaattacaatttatagaaagatgatgagctattttaatccattctagtcactttgtaaacaaaattagaaggctttgtattcatgaattaataataacatgagaacggtggtgactatgcattgcttacaaagctattcacatt

SEQ ID NO: 322301 - DNA, 622 bp, Homo sapiens
actgtgtgaaaggcactgattggaagcaacctgaattactccctgctggttagaatatttagaatcttatagatctgcatttattgttctgctttgtgaagaacagcaaarggtatataagtcttcacaatagggaactcgagttatctgtgtaagaaacaacattttctgtttttccacatttctctggaggctaggggagctttactgtgcttcattacatgccaagtagtgttggaagatggaagttgttttttctcctgcccttactacccactctttactcagaaacttaacttttctcccaaaaccattagtcacacataaagctacttgttttgccttcaggagtttctgtgcctctattgtccacaccatttactaggaagaatgagatttattacatgaataccaataaagacaaaatgtccacttataaaatgtttggagaatatagttatgctcgtgaacaaactttctttacattaatgatttgcatttagctttgaagacagaactcagtgtactggtaataatgttaggtaaaaattaaagaatttgtttaaagaaactaaatatttaaaaaatatgtaagtgcagaaaatacttgtatataaaagtt

SEQ ID NO: 322302 - DNA, 622 bp, Homo sapiens
actgtgtgaaaggcactgattggaagcaacctgaattactccctgctggttagaatatttagaatcttatagatctgcatttattgttctgctttgtgaagaacagcaaaaggtatataagtcttcacaatagggaactcgagttatctgtgtaagaaacaacattttctgtttttccacatttctctggaggctaggggagctttactgtgcttcattacatgccaagtagtgttggaagatggaagttgttttttctcctgcccttactacccactctttactcagaaacttaacttttctcccaaaaccattagtcacacataaagctacttgttttgccttmaggagtttctgtgcctctattgtccacaccatttactaggaagaatgagatttattacatgaataccaataaagacaaaatgtccacttataaaatgtttggagaatatagttatgctcgtgaacaaactttctttacattaatgatttgcatttagctttgaagacagaactcagtgtactggtaataatgttaggtaaaaattaaagaatttgtttaaagaaactaaatatttaaaaaatatgtaagtgcagaaaatacttgtatataaaagtt

SEQ ID NO: 322303 - DNA, 596 bp, Homo sapiens
cataaagctacttgttttgccttcaggagtttctgtgcctctattgtccacaccatttactaggaagaatgagatttattacatgaataccaataaagacaaaatgtccacttataaaatgtttggagaatatagttatgctcgtgaacaaactttctttacattaatgatttgcatttagctttgaagacagaactcagtgtactggtaataatgttaggtaaaaattaaagaatttgtttaaagaaactaaatatttaaaaaatatgtaagtgcagaaaakacttgtatataaaagtttaattctttataaaattagatattttgggtgtaatatgcagctgtgaggtctctgatgtggtaattgggcagaagaacactttagtggcactaaaatttgagattcagctgtgctgtgtcatggaaatccatagaattttagtgagcaagcaggtgcagaaagaatacatctgggtaaaaaataaagaagagaagtatttgttaactctgtgcatcaatttggtgcttattcatgtttatgcaaatgaagtactctaattattttgtaagaaaagcagataaatgaaaatatgaca

SEQ ID NO: 322304 - DNA, 596 bp, Homo sapiens
cataaagctacttgttttgccttcaggagtttctgtgcctctattgtccacaccatttactaggaagaatgagatttattacatgaataccaataaagacaaaatgtccacttataaaatgtttggagaatatagttatgctcgtgaacaaactttctttacattaatgatttgcatttagctttgaagacagaactcagtgtactggtaataatgttaggtaaaaattaaagaatttgtttaaagaaactaaatatttaaaaaatatgtaagtgcagaaaatacttgtatataaaagtttaattctttataaaattagatattttgggtgtaatatgcagctgtgaggtctctgatgtggtaattgggcagaagaacactttagtggcactaaaatttgagattcagctgtgctgtgtcatggaaatccatagaattttagtgagcaagcaggtgcagaaakaatacatctgggtaaaaaataaagaagagaagtatttgttaactctgtgcatcaatttggtgcttattcatgtttatgcaaatgaagtactctaattattttgtaagaaaagcagataaatgaaaatatgaca

SEQ ID NO: 322305 - DNA, 608 bp, Homo sapiens
agaccatatgttaggtcacaaagcaagtcataaaacattcaaaaaattaaataatagcgaacatctacactgaccacattgaaaatcaataacaagaagaattttggaaactatacaaatagttagaagttatacaacatggttctggatgaccagtgggtcattgaagaaattaagaaagaaattgaaaagtttcttgaaacaaatgattatgaaaatgcaacaaaccaaaacctatgagatacagcaaaaatagtactaagaggagtttatacccacaagtgcctacatcaaaaaagaaaaaaaaaaacttcaaagaaacaatygacttatgtgtctaaaagaactagaaaagcaagaggaaaccaaaccagaattagtagaagaaaaggcataattaagatcagagcaaaaataaataaaattaaagaaaaacaatacaaaaggtaaatgaaacaaaaagttcgtttatttgaaaatttaaacaaaatagacaaacctttagccagactaaggaaaaaaatagagaagattcaagtaaataaaacctgagatgaaaaaggagacattagacattacaaccgatactgcagaagttcaaaggatca

SEQ ID NO: 322306 - DNA, 576 bp, Homo sapiens
  misc_feature (1)...(576): n = A,T,C or G
tagcaaaccaaatcaaattaaacaatatattaaaaatactattcattatgaccaagtagaatttatttctgggatgcaaggattcttcaccatatgcaaatcatcaatgtgatacatcatatcaacmgaatgaaggacaaaaacaatatgatcacttcaattgatgttgaaagagcatttaataaaattcaacatatttttatgattaaaaactctcaaaaaactggatatagaaaaaatatatctcagcataataaaagccacatatgacagacccacaactagtattaaactgaatggggaaaaactggaaccccttctctaaaatctggaacatgacaaggatgccaactttcaccactggtactcgacctacactggaantgctagctggagaactcagatgagagaaatgaatagaaagcattcaactttggaaaagaagaagtcaaattatccttgcttgcagggataaaatggaaaaaacctttgactccataaaagaactgttagaactaataaacaagttgagtagttgtgggatacaaaatcaacattccaaaaatcagttgcatt

SEQ ID NO: 322307 - DNA, 575 bp, Homo sapiens
  misc_feature (1)...(575): n = A,T,C or G
cccacaactagtattaaactgaatggggaaaaactggaaccccttctctaaaatctggaacatgacaaggatgccaactttcaccactggtactcgacctacactggaantgctagctggagaactcagatgagagaaatgaatagaaagcattcaactttggaaaagaagaagtcaaattatccttgcttgcagggataaaatggaaaaaacctttgactccataaaagaactgttagaactaataaacaagttgagtagttgtgggatacaaaatcaacattccaaaaatcagttgcatttctataagccaatagtgaacaatcttgaaaagaaataaaaaaagcaatcccattcacaatagccacatataaaattaaatacttagtaattaaccaaaaaagtaaaagatccctataataaaaactataaaacattgatgaaagaaattgaaaaggacaccaaaaaataaaaagatattccatgtttatrgatttcaagaatcaatattattaaaatgttcatgctatccaaagcattctacagattcagtgcagtgcctatcaaaatgccag

SEQ ID NO: 322308 - DNA, 519 bp, Homo sapiens
ctatgtagaagaatgaaactagaactctacctctttctgtatgcaaaaatcaaattaaaatggataaaaggcttaaatctaagaacccaaactgtataactactatcagaatacatgggggaaactctccaggacattgtcctgggcaaacatttcttgcccagtacctcacaagcacaggtaaccaaagcaaaaatggacaaatgggatcacatcaagttaaagaagactctgtacagcaaggagaaacagtcaacaaagtgatgagacaacccacggaaggagataaaatatttgcaaactacccatctcacaagggattaataaaccaaatatataaggagctcaaactccatacagaaaattyaatagattttaaaaatcagtaaaatatttaaatatgtatttctcaaaagaagacatacaaatgacaaacaagcatatgaaaagacatacaacatcactgatcatcagagaaatgtaaatcaaaacaagagatatcatcttattccagttaaa

SEQ ID NO: 322309 - DNA, 592 bp, Homo sapiens
tacatagtaactgcactactccaactgaaaacaggtggtgtcaccttattgacatcaagaaagactcagtgaggatcacacacttccatccttgtgaggctgtaacaaagctccctacatccctgcaaggatgatagcagacatagccactgaagatgctgggactttcatttccactgttggcagtgagctcttccctgtgttatcaatagaaatcaatgggaagcctaaacttctgcccctaattggcaggaaagtaacaaggcatccccttgtctctactggagtggtggcagaggcccatkaggaagtcaggacttttacccttgcccaggagtaatcaggtcactcccactgtggtattaatggagacttggtgggggaagccaaaccccatccctgtagtaaggccccgcacttgactgatctgcctttttcttttgacttttcagaagagttttaaaagactttcttgtttatctaacttcctctccaacacgttcaataaatctttaaaggggatttagtaaaaaataaaatgtagtgaattgaatgtaacatcctttctagatcagcacaggcggttgtgtgg

SEQ ID NO: 322310 - DNA, 545 bp, Homo sapiens
atatatgaaaatgcatccttcattataagagacaagaattaagaatcagcaattaactcatgttttaaaattatatctcatttaactagaaattgcagaggtccaactcagatgtaaatgaataagaatgtaaatacatggactttctcttactcaaaactacttcggtgttgtagagcaaatatataatctaaatctgaatatgtattgaattttctatgatattttctcaattccagaattgaggggaggtcttcctaggagtctgagttattcactaaaattataattgtcgatcattatccattccaaagtaataaacacaaatatattttaaaaatatgttataataaagaataaaaatttgctgcattatattatcatgattttaaaattagtaaatatgactgaaaatattttgaaagtttataatatcaatagcrtcaacattattatgtcaaaatagcttcacacaacagtttaatagttttaacatataatatttttatgtgatagttataggtttatatataagttttgggtca

SEQ ID NO: 322311 - DNA, 625 bp, Homo sapiens
aactgaatttgatatattgtgacaaccttattagtataatatgattacacttttcattataaatwctgtttattaatttacatcaaataagaaacactccatgtaagattgatttttaatgggaattcaaaaatttttttgataattctttcaaaaaagtgcatatacatagagctatgtttttcaaaggctgattacttctaattatctcattaaaatgccttgagactatgtaaaaacttaaaaataaattagtgcatttactcaccggttgaccaggatctccatcttcacccttgtcaccaccaacaccatcttgaccctataagaggcaataaaatatgaagcaagatatatctcagtatcaataaatcacactacttatcaggaaaaaagtatgttaggccatctcttgagaaaaattatcagatggacaagtaaaatcattatattcttttaaccttttttaaaaagattgtggtacctctcactctccgcaaaaaaatttgtaaaactgctactattaatatatcaaatttaaaatccagcatgctctttatataaggaagaaagaagatgttattagtatacaatgtcagcgaatcatttcaccatgaacaaatat

SEQ ID NO: 322312 - DNA, 613 bp, Homo sapiens
gcatctatttggggacagttgtagaaattggggggaagagctagatctaaaacacagtgaagtcaatgcactaactataactgaattaggcaatagcagtttgaaattttaggaaaartattcttcaaatacttatttacaatttctagcatgtatgtgtgtataattgcagagaaaataatcagtgccagaattgtaagtctgggagtcatttaaaataagagtgatgtttaaaagcatatttttggattaccacgtgatgtagtgttgagagaaaacagaagcctggactcaagtcttaatggagaattataatgggtgtaagttctgaaagcatctaataagagagaaaaatagtccatgaggttgtttgtgtgtgtgtgtgtgtgtgtgtgtgtgtgtgtatgtgtgtgtgtgtgtatctccagaggcatgccatcaaacagaacaagacataaacaagttcccttttgtgggatgtaaaagatcgagaatactgaaatccgaaagacaaagaaataaagagactgggattttacctgctgggtatttatacctttagattaattctaaattgattcaaaaagaaaaaaaatggactatagaggagtgg

SEQ ID NO: 322313 - DNA, 613 bp, Homo sapiens
gcatctatttggggacagttgtagaaattggggggaagagctagatctaaaacacagtgaagtcaatgcactaactataactgaattaggcaatagcagtttgaaattttaggaaaagtattcttcaaatacttatttacaatttctagcatgtatgtgtgtataattgcagagaaaataatcagtgccagaattgtaagtctgggagtcatttaaaataagagtgatgtttaaaagcatatttttggattaccacgtgatgtagtgttgagagaaaacagaagcctggactcaagtcttaatggagaattataatgggtgtaagttctgaaagcatctaataagagagaaaaatagtccatgaggttgtttgtktgtgtgtgtgtgtgtgtgtgtgtgtgtgtatgtgtgtgtgtgtgtatctccagaggcatgccatcaaacagaacaagacataaacaagttcccttttgtgggatgtaaaagatcgagaatactgaaatccgaaagacaaagaaataaagagactgggattttacctgctgggtatttatacctttagattaattctaaattgattcaaaaagaaaaaaaatggactatagaggagtgg

SEQ ID NO: 322314 - DNA, 601 bp, Homo sapiens
cagaccagggtcagaagaaatgaatggcaagtgattcctggctagagattatgtgtactatmatgaaggcagaagagaatatatctgccttatttacaggaaaccttatacaaaaggattgacttttagagtttaaggctagcaagggaattcaaattaaggggaactatctgaatcaactattgtatttaatatagtgaagtttactgtgaatagcacagcacatcctatgagtattgatagatttgaaatatcatatttatttgaagaagataaaaggtctccagagtgacatcaggggcatccttcttataataattatggcatccttttgaaaaacaagaacatatgaaacccaggcaagtaataaattagttaacaatttaattttgccttattaatgttgttacttttgttgtcattaattaagtaatgtagcaacagttccttaagtgactactctggtccacaggccagagatatataatagaatgcaaaatcagacacaattcctaccctcacatagtttattatctgatagggcaatttgataatatgcaaagaatcactaaatacatatataatggcaaactcaggttac

SEQ ID NO: 322315 - DNA, 615 bp, Homo sapiens
attattttgtttttatttttattttttacttttttgagagagagagtctttttttgtcgcccaggctggagtgcagtggtgcaacagggctcactgcagcctcaaactcctggacttgagcgatcctcccacytcagcttcccaagtagctgagactacaagcatgcctcaccatgtgcagctaactttttaaaaacatttatttgtaggacagggtctcactatgcttcctaggctgatcttaaactcctgggcccaacctttcacctcaacctcccaaaacctgggattacaggtgcgcgacccagaacctagctggtaaagtaatttttgattaatgtgtaattatagattttatatgtcagtgtatttccgttaccagtttatacaggtaatatttgagacaaaattgatttttgaattataaattcagttgtagtatactttgaagttaaacggacttgtctgttaacatattagtcaatattagaaagctagaagcagtgggaacccaagattttccattttaaacagtgacattacacactagcatgtaattatattaaaggtaaaatttaactgtttgatgataattaagacaatgcaatagcatgt

SEQ ID NO: 322316 - DNA, 615 bp, Homo sapiens
attattttgtttttatttttattttttacttttttgagagagagagtctttttttgtcgcccaggctggagtgcagtggtgcaacagggctcactgcagcctcaaactcctggacttgagcgatcctcccacctcagcttcccaagtagctgagactacaagcatgcctcaccatgtgcagctaactttttaaaaacatttatttgtaggacagggtctcactatgcttcctaggctgatcttaaactcctgggcccaacctttcacctcaacctcccaaaacctgggattacaggtgcgcgacccagaacctagctggtaaagtaatttttgattaatgtgtaattatagattttatawgtcagtgtatttccgttaccagtttatacaggtaatatttgagacaaaattgatttttgaattataaattcagttgtagtatactttgaagttaaacggacttgtctgttaacatattagtcaatattagaaagctagaagcagtgggaacccaagattttccattttaaacagtgacattacacactagcatgtaattatattaaaggtaaaatttaactgtttgatgataattaagacaatgcaatagcatgt

SEQ ID NO: 322317 - DNA, 632 bp, Homo sapiens
tcattcaaatggtgtgttcactcttgtctttatgatgtttttctttggtcactaycagtatatattctctttaaattatgtatttaaacatgttcctacttcttaaatgaaatatgttagatgatgatactgtcacatgcttcagcacttccttactaatttatactctctaaagaatatctgtggacattattttctaagttctttttttttaatttttttttccctttaagtgttcatgtatttgctctctgatagaaacataaattgggggagtacagagatatgtccttcaagttttttttttcacctagtatggaagtttatacattatccccagcaatttcattctaacagaccagtctggttctattttgtgatccatcagtctgatgcttttagggttggatttactgcctacattaacacataacggaaagaagatttttattagaattgatggaatcccaaactgaagagttaccatagtcctatgagatgaatttttctaactaaaaagaaaacactagaatgaaaagagaaaaagcttgtagtaataattgtagtatttaatgcataattcatttttatatgcagtgaaacaaaacaccaacaaacaggtgatagcactg

SEQ ID NO: 322318 - DNA, 632 bp, Homo sapiens
tcattcaaatggtgtgttcactcttgtctttatgatgtttttctttggtcactaccagtatatattctctttaaattatgtatttaaacatgttcctacttcttaaatgaaatatgttagatgatgatactgtcacatgcttcagcacttccttactaatttatactctctaaagaatatctgtggacattattttctaagttctttttttttaatttttttttccctttaagtgttcatgtatttgctctctgatagaaacataaattgggggagtacagagatatgtccttcaagttttttttttcacctagtatggaagtttatacattatccccagcaatttcattctaacagaccagtctggttctattttgtgatccatcagtctgatgcttttagggttggayttactgcctacattaacacataacggaaagaagatttttattagaattgatggaatcccaaactgaagagttaccatagtcctatgagatgaatttttctaactaaaaagaaaacactagaatgaaaagagaaaaagcttgtagtaataattgtagtatttaatgcataattcatttttatatgcagtgaaacaaaacaccaacaaacaggtgatagcactg

SEQ ID NO: 322319 - DNA, 632 bp, Homo sapiens
tcattcaaatggtgtgttcactcttgtctttatgatgtttttctttggtcactaccagtatatattctctttaaattatgtatttaaacatgttcctacttcttaaatgaaatatgttagatgatgatactgtcacatgcttcagcacttccttactaatttatactctctaaagaatatctgtggacattattttctaagttctttttttttaatttttttttccctttaagtgttcatgtatttgctctctgatagaaacataaattgggggagtacagagatatgtccttcaagttttttttttcacctagtatggaagtttatacattatccccagcaatttcattctaacagaccagtctggttctattttgtgatccatcagtctgatgcttttagggttggatttactgcctacattaacacataacggaaagaagatttttattagaattgatggaatcccaaactgaagagttaccatagtcctatgagatgaatttttctaactaaaaagaaaacwctagaatgaaaagagaaaaagcttgtagtaataattgtagtatttaatgcataattcatttttatatgcagtgaaacaaaacaccaacaaacaggtgatagcactg

SEQ ID NO: 322320 - DNA, 632 bp, Homo sapiens
tcattcaaatggtgtgttcactcttgtctttatgatgtttttctttggtcactaccagtatatattctctttaaattatgtatttaaacatgttcctacttcttaaatgaaatatgttagatgatgatactgtcacatgcttcagcacttccttactaatttatactctctaaagaatatctgtggacattattttctaagttctttttttttaatttttttttccctttaagtgttcatgtatttgctctctgatagaaacataaattgggggagtacagagatatgtccttcaagttttttttttcacctagtatggaagtttatacattatccccagcaatttcattctaacagaccagtctggttctattttgtgatccatcagtctgatgcttttagggttggatttactgcctacattaacacataacggaaagaagatttttattagaattgatggaatcccaaactgaagagttaccatagtcctatgagatgaatttttctaactaaaaagaaaacactagaatgaaaagagaaaaagcttgtagtaataattgtagtatttaatgcataattcatttttatatgcagtraaacaaaacaccaacaaacaggtgatagcactg

SEQ ID NO: 322321 - DNA, 580 bp, Homo sapiens
tgccccttgctactttaataattgtaagagtttagtcaactaacttagcaacctgaaactctttctttctctgaccaataggtatataaaggttttgtcaaagagttggtatgatgaattatcctaattgttattagtaagtaagctattcacagctgtttggaatatctgtggatcaattaaagatacatttttgccccaagctatcccagttcttaatattctgttcaccaaatcattgccaaactgatagatcaaatatacatcagttatgcyatttacacatatccatatattcatattaatctaaaataataatcatattaatgtaagtattcacattaacatgaagttagtaatcatattacaatatacacatgtgtgtatacacagtatccattctgtgatagttattacaagcaaagtacatttgtgttagctgtaatcatccaaaaatgatcttgtcataatttaataaaatcccatttaacagacaaggattttccaaagcaaatcttgatttatgcagtataaatgattttttctgtctagaagataattaataactgtttcattttat

SEQ ID NO: 322322 - DNA, 580 bp, Homo sapiens
tgccccttgctactttaataattgtaagagtttagtcaactaacttagcaacctgaaactctttctttctctgaccaataggtatataaaggttttgtcaaagagttggtatgatgaattatcctaattgttattagtaagtaagctattcacagctgtttggaatatctgtggatcaattaaagatacatttttgccccaagctatcccagttcttaatattctgttcaccaaatcattgccaaactgatagatcaaatatacatcagttatgctatttacacatatccatatattcatattaatctaaaataataatcatattaatgtaagtattcacattaacatgaagttagtaatcatattacaatatacacatgtgtgtatacacagtatycattctgtgatagttattacaagcaaagtacatttgtgttagctgtaatcatccaaaaatgatcttgtcataatttaataaaatcccatttaacagacaaggattttccaaagcaaatcttgatttatgcagtataaatgattttttctgtctagaagataattaataactgtttcattttat

SEQ ID NO: 322323 - DNA, 569 bp, Homo sapiens
catgaacactgctggggtgttacatgctgtgatatatttgctgtagtgctaaaataaaaattctgaattctggtaaacctctcatcctaaggattttagataagggattatgactctgtattagtgctagccatgaaatttaagtaacaaaacttatttttttgtttgttttgagacagggtcacactctattgcctcagctggagtgtagtggcgtgatcagggctcaccacagcctcaacttacctggctcaggtgatcctcctgcctcatcctcccaagtagctgggactgcaggtgtgcgccatcatccctggctcatttttwaaattttttgtctagttgaggtctcactatgttccccaggctggtctctaaatcctgggcttcagcgatcctccctcctcagcttcccaaagtgctgggagtacaggtatgagccgctccactcagcgggaacaaaacttaattgggcaaaaatttagggggcataattttttgcccaagtagaatacaaactactaagagattgtgaaaaatgagagagccttaaatctaatgttgacctg

SEQ ID NO: 322324 - DNA, 569 bp, Homo sapiens
catgaacactgctggggtgttacatgctgtgatatatttgctgtagtgctaaaataaaaattctgaattctggtaaacctctcatcctaaggattttagataagggattatgactctgtattagtgctagccatgaaatttaagtaacaaaacttatttttttgtttgttttgagacagggtcacactctattgcctcagctggagtgtagtggcgtgatcagggctcaccacagcctcaacttacctggctcaggtgatcctcctgcctcatcctcccaagtagctgggactgcaggtgtgcgccatcatccctggctcattttttaaattttttgtctagttgaggtctcactatgttccccaggctggtctctaaatcctgggcttcagygatcctccctcctcagcttcccaaagtgctgggagtacaggtatgagccgctccactcagcgggaacaaaacttaattgggcaaaaatttagggggcataattttttgcccaagtagaatacaaactactaagagattgtgaaaaatgagagagccttaaatctaatgttgacctg

SEQ ID NO: 322325 - DNA, 569 bp, Homo sapiens
catgaacactgctggggtgttacatgctgtgatatatttgctgtagtgctaaaataaaaattctgaattctggtaaacctctcatcctaaggattttagataagggattatgactctgtattagtgctagccatgaaatttaagtaacaaaacttatttttttgtttgttttgagacagggtcacactctattgcctcagctggagtgtagtggcgtgatcagggctcaccacagcctcaacttacctggctcaggtgatcctcctgcctcatcctcccaagtagctgggactgcaggtgtgcgccatcatccctggctcattttttaaattttttgtctagttgaggtctcactatgttccccaggctggtctctaaatcctgggcttcagcgatcctccctcctcagcttcccaaagtgctgggagtacaggtatgagccgctccactcagcgggaacaaaacttaattgggcaaaaatttagggggcataattttttgcccaagtagaatacaaactactaagagattgtgaaaaatgwgagagccttaaatctaatgttgacctg

SEQ ID NO: 322326 - DNA, 549 bp, Homo sapiens
acaaacacatgggtcaatgtcaaatacaagccaatctctgtcaagraaaagagccaaattcctgcatttccatttaaattacgttatccaactcaaataccaccatgccacttcaaatgaaaatagtttccctttaaacagagctttttacaaaactgatagagtataacagattaaacaactctttcagcaattttcttagctactacaaagtaaggcatctatgtataattataataaggggaacatttaacaattaattgagccagctaaagctaaatctccagagcttaggagttcaaatgcttgctcactaagaaaaaaggacagaggattttaatataactgcaggaaatctcagtccaattagattctaggtaaatataaatcttgttgcactgtgattggaactctgtcacagtcctccggactgattttagcatctggcttggagagtcaaaccaaagaactccttgccccactgtttctctccacacactactgaattaatcaagtacctccaggttctgtgctgaacaaagaaggtct

SEQ ID NO: 322327 - DNA, 619 bp, Homo sapiens
ctaacaacacattgccctttgtgttatgtgatcaatgtacaccaccttgcatcaaaaaacttttcatgcatacaacatgcttgctttttattagatcatagaaaaatgtgtatttctctttcagttacttagggttcaaaatccagtaatcaccattagcctatgtattcttgaacaatttactactcaccttctcagcttacttcccatagtttccttatggactatgttgcccaggctagcctcaaacttctgggctcaagtgatcctgccaactcagtctcctgaggagctgggactacagatgctcaccactgtgcctgactagacatacaatttttggcaacaggagagctataaataattttaggagtaaaaggagaaaagagaaaaagagcaaagtaattatatcacttgcattttcgaagaaatcagtctatctcttcttttttcttccacacaggttatttgttttttgtattctcttcagggttttatgcaaatgtccrttcattcttggctttaaccagttctcacaggcccataccattttacaaaccagctgtgtgactttggcctccatgtctttgtttcctcatctgtacagcagggaaacaat

SEQ ID NO: 322328 - DNA, 602 bp, Homo sapiens
  misc_feature (1)...(602): n = A,T,C or G
ccatgttatctgtgactgtggactaacttttctttgggtaaaatttctttgcctatgtgggtatcaaccattttatttcatctgaaaaaaaaaatgctaaagcatttgtccatatccatacttaactgttaaatattaaacagaaaagttatatttatcattaaatrccaataaaaacttttctgttgtcctgaatattttgttacaacattaaaaaaagtacacacacacaagaaaaattcagacaaactttaatgtattttattattaatgttttatttttatgtattattttaatgtatttatttttatgtatttatgtattttatgtatttattttaatgtattattttaattgtattttattatgtacatattttcctgtcatattttcccttcagaaacaaactgccaaagaaaaaagatgaaaaagcatgtttaagcaatatttaattgctcctagcatttaaacatgttataaaaatccttaaagatcattagtaaaaatgagttcttacaatacctatccactagtacactatacaaaaaacaattaatggaaggnnnnnnnnnnnnnnnnnnnnnnnnnnnnnnnnnnnnnn

SEQ ID NO: 322329 - DNA, 512 bp, Homo sapiens
gcttgaatcgcatgatctctaaattcacgtctggctttaattttctgtgattttgaacaaaattcttcaactagtgagtagtaggaattacataattacctgtgtctaactttctagcaatacttttgtgtctgaggtagctctgggaacacttactcagggaggggatgctctcttcttccctcagtattatagcagtggccagcttccactgaaggtgacattttaatttgtaaacctttaggatggcaccgttagccagtgccattgcacagatacagagaaaaaattagagattctcccacagcatcattttatctacttggttttgtttgaggaggaaatctagatataaacatgtaagaatggaaagagagcatagaaacaattttgttccaycccttcacttttcatagggttgggggactccactcaggttgcaactagcagttgcagactgaactgtaatcctagattacctaattgtaatctagtactgctgaaaccacaca

SEQ ID NO: 322330 - DNA, 594 bp, Homo sapiens
accacgcctggctaattttttgtatttttagtagagacggggtttcatcatgttacccaggatggtcttgatctcctgaccttgtggtccactccccttggcctcccaaagtgctgggattacaggcatgagccaccatgcccagactcctttttttcttctattttacctctatcactcagattgtgtaaatgctattgaactgttcttaaaattactgattctatgttttgtattcctcactccactcttaaatccagtgagmtttttatttctattataatatttttaattctataatattcattttcttctacatttttgctgagatttatgtcaagagaatttataaattcttgtcgaatcatttttatgatggttgtttaaaaattcttatcagatcattccaacatctgattcatcttggtgttagtatcagttgattttcttttctcattcaaactacaatttttctggttctcaatatggtggatggtttccaattctatactggacattttgactgttagttaagagacttcggttcctatttaaatttttattttaacatgcaatcatactgtttagatttag

SEQ ID NO: 322331 - DNA, 567 bp, Homo sapiens
tctcggaaactgtgagttaatacacttctgttgttttaagmtgccctgtttgtgttgctttgttctggcagccctaggaagcgaatataccaacgggtttggcttccttcttctccctttcgcagttttcccttagttgtcccctgcattatttctagggctgacagttgtacttagtgaaaaggagcatggaaagataagtgtatcccatcttgacaaatggaagttagatattgtttttatatgttgtgcattatattttacctcagtggagacattattctgaaacaatagttctccattactgtcattggctgccccttattgattatacatggtataagtgggaagcaagagatccaatggaggaaagagacaaaggtaacccctttgacaatggttgagggaggctccaggataactgcagtgcaccaggtggaggaggcagctgaccagatcaaagtcatgtgtctcaaaagttggacatggcattaccaagatccttctgccatcatactctttttttaacctgaacatgccctgatgcatctgtcccaaattcctttt

SEQ ID NO: 322332 - DNA, 567 bp, Homo sapiens
tctcggaaactgtgagttaatacacttctgttgttttaagatgccctgtttgtgttgctttgttctggcagccctaggaagcgaatataccaacgggtttggcttccttcttctccctttcgcagttttcccttagttgtcccctgcattatttctagggctgacagttgtacttagtgaaaaggagcatggaaagataagtgtatcccatcttgacaaatggaagttagatattgtttttatatgttgtgcattatattttacctcagtggagacattattctgaaacaatagttctccattactgtcattggctgccccttattgattatacatggtataagtgggaagcaagagatccaatggaggaaagagacaaaggtaacccctttgacaatggttgagggaggctccaggataactgcagtgcaccaggtggaggaggcagctgaccagatcaaagtcatgtgtctcaaaagttggacatggcattaccaagatccttctgccatcatactctttttttaacctgaacrtgccctgatgcatctgtcccaaattcctttt

SEQ ID NO: 322333 - DNA, 539 bp, Homo sapiens
gggaagggatttcagaattgattccgcatagccagcctgctaggacaaaaagaatatgggttcaaatctcagctctggccccagggtcctcacagctgtttggcccctgccaaaaactgtgaagaattaacggaagtatacaaagggagctttcagtcaagagttggggtctcacactctcataaaataagaccaactgtcttagtcttctcaggctgtcataacaaaataccatagactaggtggatttaacaacagaaattattcctcacagtctggaggcctggaagtccaagaccaagagctggcaawgtaggcttcattctgaggcctcatatcttggcttgaaagtggccaccatttctctgtgtgctcacatgaactcttctttgtgcacaaggcgggaggcagagaaagtgagctttctagtgtgtcttcttataaggataatcatgtcatcacgacggccctaccttcatgacctaatctaaccttgattacctcccaaagactccatctccaaatactatcgcaccggg

SEQ ID NO: 322334 - DNA, 646 bp, Homo sapiens
gcgtactccattcttccagctatggtgttggttcagagatggacaygtgacctaagctgggccaatgggagccttctcgggactgttgctgacacttaagagaaaaagtgtccttttccactggggttgctaagctaaagtaaaaagaaaacaaactaaaagaaacaagcttgtgctactggtagtggccatcttttccacaatgtggggagagcctgtgtgtcaggagaaatcatttctgctgctacaaatgacagagaacctactataaagtagcttaagtgacaaggaaaatgtgttgttcacataaaaaggtaaggaaagctccagggatggtgccttcagtgatttcatcaagggcttatattctttgcatctttccactctgcatccttaatgtgtcagttatggtttcaggctataattggccacagtcgttcctgttttaaacatccagacacagtaaccaacagaagaataacaaacagaagaataagaaacaatctcttcctagagtctccttgtaaaagagcaaacctgctccataatttcctctgcaaaattccccctctacaacattgaccagactttcatgacatggccatgaccaaacaaattactgacaggggattagtactaccatttc

SEQ ID NO: 322335 - DNA, 546 bp, Homo sapiens
cggagattaaaacagggaagatttcccagaggcggcaaaatttctactagctttgraaaaggagaaggatatgactattcatcatgagtattccaggtgagaaagggccaggaaaaagtgctccacttcccatagtggggatgggttggggggacaaccccctaccatgtgagttgagtcttcaaaaggacaaagccttgccccatggccagatataaaccgacaacagaagcaacctccgaaacttattggctttgtgaccatgagcaactcactgagccactctgcccctcagttttcccatctgcaagtggggaccgtagttatatcatgctcacgcaatagctgtggggactgagtgggctgcatcgtttgtaaattatgattagtctaagggatttcatcattaaaaagtagacgctactttctcattgccatcctaaaagctaaagtatagctttatattttcatgttcgatttctggaagatcttccccgcctataggacactgagacccaggactcccaggactcccaggaccagatc

SEQ ID NO: 322336 - DNA, 546 bp, Homo sapiens
cggagattaaaacagggaagatttcccagaggcggcaaaatttctactagctttggaaaaggagaaggatatgactattcatcatgagtattccaggtgagaaagggccaggaaaaagtgctccacttcccatagtggggatgggttggggggacaaccccctaccatgtgagttgagtcttcaaaaggacaaagccttgccccatggccagatataaaccgacaacagaagcaacctccgaaacttattggctttgtgaccatgagcaactcactgagccactctgcccctcagttttcccatctgcaagtggggaccgtagttatatcatgctcacgcaatagctgtggggactgagtgggctgcatcktttgtaaattatgattagtctaagggatttcatcattaaaaagtagacgctactttctcattgccatcctaaaagctaaagtatagctttatattttcatgttcgatttctggaagatcttccccgcctataggacactgagacccaggactcccaggactcccaggaccagatc

SEQ ID NO: 322337 - DNA, 566 bp, Homo sapiens
actggtggagaggttgcttttccagcacattagagtgcaaaggtggtgtcttctcaggggttaatgcctcttgcatctctctttctctcctatgccctacccaattcaaatggaaattttcctcttctctaccacaaatctctaaagttagctcagaggagacttgtctcagttatcagcggcaggatttgagggcgggaagagggacatggcaaacaaacgaatgaacgaaggtgttgtttcattctgtggctttaatctgggaggaggagattaatgggttattgatgacctctgcaatagccaactttccacctgggtcactgcccggggacaggtgtcagcagcttgggagttgcacaaaccaagcaaacacctgtgatttgctgggcgttaggggtagggggtargcagacacaaaaatcgagaaggtctctctattctggcaggacagtagcaaggatatagacaaaatcacttaaggcctaagaaatattggtggttgagggagatatgagccacaggatggaacatcaaactgccaccttggggctggagtgccggga

SEQ ID NO: 322338 - DNA, 567 bp, Homo sapiens
agtttgagtccgtcactgggcgcagtccgcgattccgaggctaggtgggaaaaaacaaaaacagccatcctcccagcccccgctgggtcagaggatccctctttcccctgcccgtccctcggaggcctscaaatattacctttctaccggcgcaaaagaatagagagcgatgagcagcgagggccgtggggagctcagcgggcttctggtcgccaagttcagctgagctgcaggcgcccccgcctgggagttgccccagccccaaaggagaaaagaagagagaatggggtccgaggcctctgtcacgctctctctcgaggcgcggcggtgagaccgcagggatttcctgagcagcaagtcgtgtgccccttggcacgctttatctgcttcgcccgggccaggagcgtgcctgcccggctgctgcccgcgccaccggccaatcagcgccggggccctggggccgcgccacgcgagcccgctcctcccccgcagggcacagctggattccggacaaagggccggggtcgggggaggggagcgccgctctgtttgctctctcgagggcgg

SEQ ID NO: 322339 - DNA, 550 bp, Homo sapiens
gcccttctcccctccagtgatccgaagccatggctgagaatagtgggaatgaggtgctaatgcccccgtcttgagtagattttccccccacggcacacacatctggtttccrttttcttctgcagcaggccccattgagcagagccttcctctttgaatctcctgaaaaatcatgtccagaggccaggttcagcccccaccctgaccccagtcctcaatgcagcaaaattcctttctcagggacccttggcccagtcttccctatggtccttgggaggcaggtggggccctcaccagaggggagagcaaaaggctggggtggtgtgggggacattagaggagtgctggctccctggagaactggggaagtaggaaggtttgggaacacctaaaaagaacaggaggagtgcatgagccaccaggaaaaatgagtgcctactgcctccagctgggaggactgcaagctcttcttgctctcacccagacccctgggcacagagacagtaagggccaagtggggatgggatggggaattttggggtcagattct

SEQ ID NO: 322340 - DNA, 550 bp, Homo sapiens
gcccttctcccctccagtgatccgaagccatggctgagaatagtgggaatgaggtgctaatgcccccgtcttgagtagattttccccccacggcacacacatctggtttccattttcttctgcagcaggccccattgagcagagccttcctctttgaatctcytgaaaaatcatgtccagaggccaggttcagcccccaccctgaccccagtcctcaatgcagcaaaattcctttctcagggacccttggcccagtcttccctatggtccttgggaggcaggtggggccctcaccagaggggagagcaaaaggctggggtggtgtgggggacattagaggagtgctggctccctggagaactggggaagtaggaaggtttgggaacacctaaaaagaacaggaggagtgcatgagccaccaggaaaaatgagtgcctactgcctccagctgggaggactgcaagctcttcttgctctcacccagacccctgggcacagagacagtaagggccaagtggggatgggatggggaattttggggtcagattct

SEQ ID NO: 322341 - DNA, 550 bp, Homo sapiens
gcccttctcccctccagtgatccgaagccatggctgagaatagtgggaatgaggtgctaatgcccccgtcttgagtagattttccccccacggcacacacatctggtttccattttcttctgcagcaggccccattgagcagagccttcctctttgaatctcctgaaaaatcatgtccagaggccaggttcagcccccaccctgaccccagtcctcaatgcagcaaaattcctttctcagggacccttggcccagtcttcccyatggtccttgggaggcaggtggggccctcaccagaggggagagcaaaaggctggggtggtgtgggggacattagaggagtgctggctccctggagaactggggaagtaggaaggtttgggaacacctaaaaagaacaggaggagtgcatgagccaccaggaaaaatgagtgcctactgcctccagctgggaggactgcaagctcttcttgctctcacccagacccctgggcacagagacagtaagggccaagtggggatgggatggggaattttggggtcagattct

SEQ ID NO: 322342 - DNA, 580 bp, Homo sapiens
tgaatgtaccacagtttatttatccattcacctactgaagtacatcttggttgcttccaaattttggcaagtatgaataaaacttctgtaaacatccacatgcaggcttctgtgtggacacaagtttttgacatttttgaataaataccaaggagtgtgctwgctagattgtatgttaagtgtatgtttagttttgcaagaaactgacaagctgttttctaaagtggctgtactattttgcattctcaccagtgatgaatgagaatccctgttgttccaattcttccttgccagtatttagagttgtcagttttctggattttgaccattctaatagatgtatagcagtatctcattgttgttttaatttgcatgtcactgatgatgtgatgtggagcatattttcatgtgcttctttgccatctgtgtatctttggtgaggtatgtgttaaggtctttggcccatttctaaattgaattgtttttcttattgtggagtttcaagagttctttgtatattttggataacagtcctttatcaaatacatcttttgcaaatgtttggtcccagtctgtggca

SEQ ID NO: 322343 - DNA, 580 bp, Homo sapiens
tgaatgtaccacagtttatttatccattcacctactgaagtacatcttggttgcttccaaattttggcaagtatgaataaaacttctgtaaacatccacatgcaggcttctgtgtggacacaagtttttgacatttttgaataaataccaaggagtgtgctagctagattgtatgttaagtgtatgtttagttttgcaagaaactgacaagctgttttctaaagtggctgtactattttgcattctcaccagtgatgaatgagaatccctgttgttccaattcttccttgccagtatttagagttgtcagttttctggattttgaccattctaatagatgtatagcagtatctcattgttgttttaatttgcatgtcactgatgatgtgatgtggagcatattttcatgtgcttctttgccatctgtgtatctttggtgaggtatgygttaaggtctttggcccatttctaaattgaattgtttttcttattgtggagtttcaagagttctttgtatattttggataacagtcctttatcaaatacatcttttgcaaatgtttggtcccagtctgtggca

SEQ ID NO: 322344 - DNA, 623 bp, Homo sapiens
atcttttaaattcatgttcttttaatttttaggcacaagatattttgctatgagtcaaaggtgtctcccaaaccccaaattttagaggcaatagaaaagatggcaaccaaagaagtttcctacaacctacatagcaaataaaaggaagaaaaaaaaacatcagctctaccctatcacaaatggagcctgtaacacattctaagataaaatgtagtagactatcaccaggaattatagataataagaaggagaaacaaacaaaaacaaaggagtgtataataataaaaacctaacaataaggctgactgaaataagctctgcattgccaaactgtattccactggaggagcccccatttgaagttttctcatctctttatmcttccttcctcttgaagctataaagcctcatgcaatatagtagtaattactgctgtgcattaatcttttataccccattacttcccagtcaccagataggattatatttcttagaatcccttgtttggctggggcaagtgacagtcctggccaaagagtaatgagcagaagaaatgtgcgtcacttccattagaataatttaattgttcatgcaaagactctccagaactttctcttttcttt

SEQ ID NO: 322345 - DNA, 519 bp, Homo sapiens
atattactaggggagaaagaatgagatgatattctttattaggtatgaagattcacttcggtaaaatgaaaaagttctgaagttggatgtgatgatggttgcacaataatgttgatgcacttagtgccatgaactgtatacttaaaaatggttaaatgataaattttaggttatttatgtcttaccacaataaaaacaaaacagccacaaaaacaaggaagttgaaaaaaacagaaaataagtaawacaaagagctagtttttcttaatttagttcaattgagaaacctctaagttagatgtatagattctgattttctcccattctgtgggttgtctgttaactctacttattatttcttttgctgtacagaagctttttagtttaattaagtctcatctatttatatttgtttttgttacatttgctataggattcttggtcatgaagtctttcctaagacaatgtctggaagggtttttccaatgttatcttctagaatctttatggtttcaggtc

SEQ ID NO: 322346 - DNA, 530 bp, Homo sapiens
ccagcaccatttgttgaatagggtgtcctttcccccactttgtgtttttgtttgctttgtcacagatcatttgtctgtaatgatttggctttatttctgagtttgtggttctgttccattggtctatgtgcctattttcatactagtaccatgctgttttggcgactatggccttatagtatagtttgaagttgagtaatgtgatgcctccagatttgttcttttttgatttgtcttgctttggctattcaggcactttttaggctccatatgaattttaggattgttttttcctagttctgcgaagaatgatagtggtattttgatgagaatttcattgaatttgtagactgcttttggcagtatggttattttcacaatattgattctactcatccctgtacaagggatatgttaccatttgtrtcatctatgatttcttttcagcagtgttttgtagttttacttgtagaggtctttcacattcttggttaggtatatttctaatttttgtattttatttttttctt

SEQ ID NO: 322347 - DNA, 355 bp, Homo sapiens
ccagcctccagaactgtgagaaataaatgtttgttttttcagtcacgcagtctatgatatttttgtcacacagcctgaatgaacaaaaagggttagtttagcttaaatgatttttaactggaagaaaattactggctctgaaaggaagcttagaatactccttcccyaagtcagagctcatgctccctgaaagaaagtagaaatgaggcaccgaagtgagcaagattagtcaaggaaacttctaactatagggcctattttttccacctgaggcatcatataaatgtcctagtgctgccatatcaaattaccacaaactaggtggccttaagaaaaattaattgcctcacaactc

SEQ ID NO: 322348 - DNA, 579 bp, Homo sapiens
tttgtttggggacttgggcaaaaggctagtagttgatgagagataaaatactacacattgggtacagtgtacactgcttgggtgataggttcaccaargtcttagaaatcaccactgaagaacttattcatgtaaccaaacaccacctgttccccaaaaacctataaataaaggaataaaaaaatttaaaaaaattctaataagaattaccaaaaaatacagaaaagacataaatgtacaatatcaaagatgaaacagaatatgtaagcacagatcccacaactataatacattaacagaatgaaggagaaaggcaatatgatcatctcattagatgcagaaagagcatttgacaatatttaacttattttcaggatataaactctcaccaaattatgtatagaaaaaaatctatgtacagaagaaattatgtatcaaagaaatctatgtttgtatcaaattacatatagaaagactctaccttaacacagtaatgttcacgtaagataatcacacagttaacatgtactaaatagtgaagaatcgaaagcctttactttaagatctggagcaaaacaa

SEQ ID NO: 322349 - DNA, 579 bp, Homo sapiens
tttgtttggggacttgggcaaaaggctagtagttgatgagagataaaatactacacattgggtacagtgtacactgcttgggtgataggttcaccaaggtcttagaaatcaccactgaagaacttattcatgtaaccaaacaccacctgttccccaaaaacctataaataaaggaataaaaaawtttaaaaaaattctaataagaattaccaaaaaatacagaaaagacataaatgtacaatatcaaagatgaaacagaatatgtaagcacagatcccacaactataatacattaacagaatgaaggagaaaggcaatatgatcatctcattagatgcagaaagagcatttgacaatatttaacttattttcaggatataaactctcaccaaattatgtatagaaaaaaatctatgtacagaagaaattatgtatcaaagaaatctatgtttgtatcaaattacatatagaaagactctaccttaacacagtaatgttcacgtaagataatcacacagttaacatgtactaaatagtgaagaatcgaaagcctttactttaagatctggagcaaaacaa

SEQ ID NO: 322350 - DNA, 569 bp, Homo sapiens
ttctcaaaataaaacatacaaatgttcagcaaatatttttaaaatgctcaacatttacaatccttaaggaaatacaaattaaaaccataatgaaatatcatctcatacttgccagaatggctattgacaaaacatagaaagaaaagtgttggcaaggatatggagaaaaggtaacattgcatatagttggttggaataaaattagtatagccattatggaaaatattaaggaagtttctcaaaaaactgaaaatagaattgccatatgacccagaaatctcayttcctggaatttacccaaaacgcttgaactcagtttctcaaaaagatgtctacatgctcatgttcattgcagcactatttacagtagccaagttttgtgcatcaacagataattggataaataaaatacaggatgggaaatatctgcagatggctgaggtggttactggcccacatggtggctgtggcagggactggcagacatagcagctgcaataggcaacagcggacaaatggctatgatggggcctggcatacaatgggtgcagcagtggcagtggtggcat

SEQ ID NO: 322351 - DNA, 576 bp, Homo sapiens
gggcatcaaacaaaacagaagcaaaacaaaacaacaacaacaaaaacaaacaaacaaaacaaacaaaggacagcaatttcaaagattgaaggaacttcagcccacacatatgagaaagacccagcacaagaacactrgcaactcaacaagccagagtgtttccctactttcagacacttacagtagtttcccagcaatggttcttaactgggctgaactgactgaaataatagaaattgaattcagaatatggatagaaacaaagattatctgcatccagaagaaggtcaaaacccaatacaaggaatataaggaacacattaaaatgatgaatgagataaaagacaaaatggcttttcaaataaagaacaaaattaatatgataaagctaaaaaacacacttcaacaattccataatacaatcccatatattaacagtagaatcaaccaagctaaagaacgaatctcagagcttgcagattggttctccagaataactcaggcagaaaaagtgaagaagaaacaataaaggaaaattaataaaacctgtgagaaatatggaattatataaagaga

SEQ ID NO: 322352 - DNA, 576 bp, Homo sapiens
gggcatcaaacaaaacagaagcaaaacaaaacaacaacaacaaaaacaaacaaacaaaacaaacaaaggacagcaatttcaaagattgaaggaacttcagcccacacatatgagaaagacccagcacaagaacactggcaactcaacaagccagagtgtttycctactttcagacacttacagtagtttcccagcaatggttcttaactgggctgaactgactgaaataatagaaattgaattcagaatatggatagaaacaaagattatctgcatccagaagaaggtcaaaacccaatacaaggaatataaggaacacattaaaatgatgaatgagataaaagacaaaatggcttttcaaataaagaacaaaattaatatgataaagctaaaaaacacacttcaacaattccataatacaatcccatatattaacagtagaatcaaccaagctaaagaacgaatctcagagcttgcagattggttctccagaataactcaggcagaaaaagtgaagaagaaacaataaaggaaaattaataaaacctgtgagaaatatggaattatataaagaga

SEQ ID NO: 322353 - DNA, 576 bp, Homo sapiens
gggcatcaaacaaaacagaagcaaaacaaaacaacaacaacaaaaacaaacaaacaaaacaaacaaaggacagcaatttcaaagattgaaggaacttcagcccacacatatgagaaagacccagcacaagaacactggcaactcaacaagccagagtgtttccctactttcagacacttacagtagtttcccagcaatggttcttaactgggctgaactgactgaaataatagaaattgaattcagaatatggatagaaacaaagattatctgcatccagaagaaggtcaaaacccaatacaaggaatataaggaacayattaaaatgatgaatgagataaaagacaaaatggcttttcaaataaagaacaaaattaatatgataaagctaaaaaacacacttcaacaattccataatacaatcccatatattaacagtagaatcaaccaagctaaagaacgaatctcagagcttgcagattggttctccagaataactcaggcagaaaaagtgaagaagaaacaataaaggaaaattaataaaacctgtgagaaatatggaattatataaagaga

SEQ ID NO: 322354 - DNA, 593 bp, Homo sapiens
acttcaacaattccataatacaatcccatatattaacagtagaatcaaccaagctaaagaacgaatctcagagcttgcagattggttctccagaataactcaggcagaaaaagtgaagaagaaacaataaaggaaaattaataaaacctgtgagaaatatggaattatataaagagaccaaatatatgacttattgatgtccctgaaagagaaggaggaaaagcaggcaacttggaaaatatatttaaagatataatccatgaaaattccccccgacctcactagagaggcctgaattcaaatkcaggaaatgtagaggacccctgcaagacactatacaagatggccatccccaagacacatagtcatcagattctgcaagtttaaaaagaaagaaaaaatgttaaaggcagcgagaaagaaggagcagatcacctacagagggaacaccatcagactaacaatggaattttcagcagaaaccccacaagagatcggggcctatattcagcattctcaaagaaaagaaattccagtttaaaaatttatatccagccaaactaagcttcataagtaaaggagaaataagatcc

SEQ ID NO: 322355 - DNA, 593 bp, Homo sapiens
acttcaacaattccataatacaatcccatatattaacagtagaatcaaccaagctaaagaacgaatctcagagcttgcagattggttctccagaataactcaggcagaaaaagtgaagaagaaacaataaaggaaaattaataaaacctgtgagaaatatggaattatataaagagaccaaatatatgacttattgatgtccctgaaagagaaggaggaaaagcaggcaacttggaaaatatatttaaagatataatccatgaaaattccccccgacctcactagagaggcctgaattcaaattcaggaaatgtagaggacccctgcaagacactatacaagatggccatccccaagacacatagtcatcagattctgcaagtttaaaaagaaagaaaaaatgttaaaggcagcgagaaagaaggagcagatcacctacagagggaacaccatcagactaacaatggaattttcagcagaaacccyacaagagatcggggcctatattcagcattctcaaagaaaagaaattccagtttaaaaatttatatccagccaaactaagcttcataagtaaaggagaaataagatcc

SEQ ID NO: 322356 - DNA, 549 bp, Homo sapiens
tctggtgttgagctaataaataaattgcaccttttcrttgtcatatacactggaaatgtataaatgcctaatactggtagatctacttttgacccatctcctttacaagttcttaatggatgttatatcacatcactgttgaatatggaaggacttggtacttaccgttttattgaccttgtgtctgctaaaaccacagaaaaggttggatttggcatcctattactagtgcaactgaggcaaatataaagacatacaaagctttgaggtgaaaatgtattttaacttagaagagggactctatctcaaatcaactagaaaaataatgaaagtacactctagagagcacttagagtgtaccttgcatctattaattttcacaataatcctatgaaaatttaaaacagaatttaaaatacctgagtaggattggctatgttcaaatccttgtgtatcacaactactgtcttatcttaggagagtgttcatacagtttcctcatctgtaaaatagatcccaacagtaacagcacttgagtgattaatctat

SEQ ID NO: 322357 - DNA, 608 bp, Homo sapiens
tgcttctggaggctagaaatatgaaatcaaggtatcttaagagaaatgcaggttctgggtggccagatctcaatatttttctaaaagtatcctgaaatattgttgtttttaaaatatacatgtataattttgaattctagaactgtggcaggtaattagaaattccttcttttttaataattattgggcagattaatcctgtatagcccaagtaaagatcatgtgggctcgattcaacttataatttttaaatatacatttacatgtacacacaaacatatacttctggaaaaaacatcacractctaaattataaacccaggcacatgcatgccaaggagacaatgacattctgtctttaaggaatcctgcagcatttatatttttctgagtactgcataacaaggccatttcttgctgaaggaatatttttattatctaccttgcatgttgacttgcttataagtgccttgttgttagatgtttgcttaagatttttcttttatgactgtagcttgacactaaagtgtgttacatggatcagcctggatgttgttaaagtcactctgaggggcttttttcagactttctatatttcgttgataaaa

SEQ ID NO: 322358 - DNA, 574 bp, Homo sapiens
tgaggcctgaaattctgccttttaaggaaactgcagggtgatgtcaatgctactggctcatgaaccacatacaggtatagagamgagaaatatgaaccaagttggtaacactttaatccctatatcagacattgagtgtattatggtgttataacctcttgctgcatgcatgaagttcatggataataagttcaactataatctatgctattttcataagaagaacagaaaaataaaacaactttaacacctctccctattattagaaaagcatcagagagaaaattcacagcatcttcctgtgaaaagaataatacttgttagtgattatattagtttggtgaggctgccataagaaagtattatgttggtgcaaaaggaattgtgttttttgccattacttttaatagactgggttgttaaacaacagaagttttcctatagttctgggctagaagttcaaaatcaagttctcagcagctttaattttttctgaggcctttgaaaaaataattttctaggcctctctttatggtttatagatgctgttttcttttgttgtctcttcacatca

SEQ ID NO: 322359 - DNA, 535 bp, Homo sapiens
ccacatacaggtatagagacgagaaatatgaaccaagttggtaacactttaatccctatatcagacattgagtgtattatggtgttataacctcttgctgcatgcatgaagttcatggataataagttcaactataatctatgctattttcataagaagaacagaaaaataaaacaactttaacacctctccctattattagaaaagcatcagagagaaaattcacagcatcttcctgtgaaaagaataatacttgttagtgattatattagtttggtgaggctgccataagaaagtattatgttggtgcaaaaggaattgtgttttttgccattacttttaatagactgggttgttaaacaacagaagttttcctatagttctgggctagaagttcaaaatcaagttctcagcagctttaattttttctgaggcctttgaaaaaataattttctaggcctctctttatggtttatagatgctgttttcttttgttgtctcttcacatcaycttttttctatgtatatgtctgtg

SEQ ID NO: 322360 - DNA, 609 bp, Homo sapiens
caagatgtgaattcactggagaaatcctggaaacttccttttcttagaacaaacawttttttctcccttctctcccaactttttctgacatcattttactagaaagaaatgaaagtccttttaacttatgtaggtagcatccatagcctataacggaaagaccgttgaggtctcaaaaagagaaattacttctcagctgagagtttcacttctagtggcacggagggtaggaaaaacttaaaacaagaattaaagagaagcctttttttttttatatttggccctaatgtgagtaaaagactcaaaaggcctagaaagaaaggaaaataaataattcttaaagctctctaagaactcaaccaactctacctgagaagggaaaaaagtgattcagatctaaagctcttgaatgcaatttgcttgtgctaaaagcaagagcctttgacatcttcatactagaaatggaagaaaatgcttttggaaaatatggaaatcattcctgggtgtcacactctttcttctctaagaaactcacattaacccttgaagcagagccttcactttagttactgtcttgatcatcctacccttagctagttaaatattgcc

SEQ ID NO: 322361 - DNA, 609 bp, Homo sapiens
caagatgtgaattcactggagaaatcctggaaacttccttttcttagaacaaacaattttttctcccttctctcccaactttttctgacatcattttactagaaagaaatgaaagtccttttaacttatgtaggtagcatccatagcctataacggaaagacygttgaggtctcaaaaagagaaattacttctcagctgagagtttcacttctagtggcacggagggtaggaaaaacttaaaacaagaattaaagagaagcctttttttttttatatttggccctaatgtgagtaaaagactcaaaaggcctagaaagaaaggaaaataaataattcttaaagctctctaagaactcaaccaactctacctgagaagggaaaaaagtgattcagatctaaagctcttgaatgcaatttgcttgtgctaaaagcaagagcctttgacatcttcatactagaaatggaagaaaatgcttttggaaaatatggaaatcattcctgggtgtcacactctttcttctctaagaaactcacattaacccttgaagcagagccttcactttagttactgtcttgatcatcctacccttagctagttaaatattgcc

SEQ ID NO: 322362 - DNA, 593 bp, Homo sapiens
cactggagaaatcctggaaacttccttttcttagaacaaacaattttttctcccttctctcccaactttttctgacatcattttactagaaagaaatgaaagtccttttaacttatgtaggtagcatccatagcctataacggaaagaccgttgaggtctcaaaaagagaaattacttctcagctgagagtttcacttctagtggcacggagggtaggaaaaacttaaaacaagaattaaagaraagcctttttttttttatatttggccctaatgtgagtaaaagactcaaaaggcctagaaagaaaggaaaataaataattcttaaagctctctaagaactcaaccaactctacctgagaagggaaaaaagtgattcagatctaaagctcttgaatgcaatttgcttgtgctaaaagcaagagcctttgacatcttcatactagaaatggaagaaaatgcttttggaaaatatggaaatcattcctgggtgtcacactctttcttctctaagaaactcacattaacccttgaagcagagccttcactttagttactgtcttgatcatcctacccttagctagttaaatatt

SEQ ID NO: 322363 - DNA, 537 bp, Homo sapiens
cactgatatagtttgaatgtgtgtctccacccaaatctcatattgaaatgtaaaccccagtgttggaagtggggcctggtgagaaatgattggattctgggggcagatttctcatgaatggtttagcagcatccctcttggtactctcctaatgataatgtgttattgtgagacctgctcatttaaaaatgtgtagcaacccctacctttctctctcttgctcctgctctggccgtgtgaygtgcctgctgccctttcatcctccatcatgactgtaagtttcctgaggcctccccagaagccaagtggatgccagcatcatgcttcttgtatagactgcagaactatgagccaattaaatctcttttatttataaattacccagtctcaggtatttatttatagcaatgtgagaacaaactaacacagacacactcaaaatatagcattcattaaacatatgaaaaattgttcaacttcactagtctaggaattataaacataagacaaacataaatgaaatatacaaaatgaccc

SEQ ID NO: 322364 - DNA, 550 bp, Homo sapiens
gggcactgatatagtttgaatgtgtgtctccacccaaatctcatattgaaatgtaaaccccagtgttggaagtggggcctggtgagaaatgattggattctgggggcagatttctcatgaatggtttagcagcatccctcttggtactctcctaatgataatgtgttattgtgagacctgctcatttaaaaatgtgtagcaacccctacctttctctctcttgctcctgctctggccgtgtgatgtgcctgctgcccyttcatcctccatcatgactgtaagtttcctgaggcctccccagaagccaagtggatgccagcatcatgcttcttgtatagactgcagaactatgagccaattaaatctcttttatttataaattacccagtctcaggtatttatttatagcaatgtgagaacaaactaacacagacacactcaaaatatagcattcattaaacatatgaaaaattgttcaacttcactagtctaggaattataaacataagacaaacataaatgaaatatacaaaatgacccattattttat

SEQ ID NO: 322365 - DNA, 537 bp, Homo sapiens
cactgatatagtttgaatgtgtgtctccacccaaatctcatattgaaatgtaaaccccagtgttggaagtggggcctggtgagaaatgattggattctgggggcagatttctcatgaatggtttagcagcatccctcttggtactctcctaatgataatgtgttattgtgagacctgctcatttaaaaatgtgtagcaacccctacctttctctctcttgctcctgctctggccgtgtgatgtgcctgctgccctttcatcctccatcatgactgtaagtttcctgaggcctccccagaagccaagtggatgccagcatcatgcttcttgtatagactgcagaactatgagccaattaaatctcttttatttataaattacccagtctcaggtatttatttatagcaatgtgagaamaaactaacacagacacactcaaaatatagcattcattaaacatatgaaaaattgttcaacttcactagtctaggaattataaacataagacaaacataaatgaaatatacaaaatgaccc

SEQ ID NO: 322366 - DNA, 556 bp, Homo sapiens
atatttttatacccctaagctgtttcttttgactagaaaactccctcatttcttactaacaaatagacataatactcacccttcaaggtcccactcactctctactgtaaagtgtgaagtttcctagtttaaaaagaatgtgaaatgatagatcactgttccctgaactagattatagcaaaaacaggctgaactccaagtcagtagcttgaaatcatcaaaacatgagctttgttaattcttcttgtcatatcaagatgtattcatctctattattgtccttttcctatatttactaacttttccattgaccttaggcaatgagtagcttgagtttaagaaccagaataaaggaaataaatgcataactgaggtcttgacttttgtgagattctaggaaacaggctatatcagcttatcaaagtactctaaattttcatgaagtaattttccagaatttcaactaatagaagggcctcacagyctttgaagtaaaagacttgaaaatgatattcagtctagcaaaattaaggcccttgaaatgcataaaacccaa

SEQ ID NO: 322367 - DNA, 631 bp, Homo sapiens
acattctacccaacaactgcagaatatacattgtgtttatcagcacatggtacattctccaagattgggcacaaaacaagtttcagtaaatttaagaaaatcagggttatatcaagtaatctcttagaccacagtaaaataaaattgaaaatcaactccaaaaggaaccctcaaaactatgcaaatatatgaaaattaaataacctgcttctaagtaatggttggatcaacaatgatatcaagatttcattggaacttcrttggaatttaaatttcaaggaaatttaaaaattatttgaacttaatgataatagtgacacaacttatcaaaacctgtgagacacagcaaaagcagtactaggaggaaaagttcatagcctaaaatgtctaaatcaaaaagtctgaaagagcacatataggcaatctagggtcatgcctcatggaactggagaaacaagaacaatccaaacccaaacccagaagaagaaaagaaataacaaagatcagagcagaactaaatgaaattgaaacaaaaaaaatactaaagataaatgaaacaaaaagatggatctttgaaaagacaaataaaattgatcaaccattagcaagattaaccaagaaaagagagaag

SEQ ID NO: 322368 - DNA, 579 bp, Homo sapiens
aggtgaatggagaagggaaacttcttggtttataggaatatcaaggaattgaaaacccagagagggtgggggacactaaggagctgagaaaaagaagataaaggacagaaagaaaactgaagtatggaggtaagagaagcagaagggcagagatttctgaatgtggagttctgactctctgcagtcctcctagaatctgccaaaccattaaataaaaattcccataaacattataaatagaagcaatgaagaagtaagcctttagggaaatcagtatctttggtggatttggcaaattgtcattgacaaatgatyttttggcaaatggaataggctttcaataaattgattttccttaaatcggactgcttccaagaaaaattatttaattagagaactttgcagaacattaggtttggtttggctgaatatgtagtatctgataggaaatattgctgtattatagagattggagctcatatcagtcaagaggctatcaacctctaagtgtctaacccactcacagcctcaccaccatgataagagctgattgatccaaagataactgtagacttaatg

SEQ ID NO: 322369 - DNA, 617 bp, Homo sapiens
tggctcttattaagggtcccaacttctgtagagaagccttcttcttagctaatttatttctgggttctaatcacaagttccccctaccattgtcctcaggcctggtaatggtagtcacttcctgctgttgccagccatggatttttcttaacctttttattttttwtttatttatttatttatttatttatttatttatttatttatttatttataagacagagtctcgcacagttgcccaggctggagtgcagtggcgcgatcttggcttactgcaagctccgcctccctggttcacgccattctcctgcctcggcctcccgagtagctgggactacaggcgcccgccaccatgccaggctaatttcttattgtatttttggtagagacggggtttcactgtgttagccaggatggtctcaatctcctgacctcgtgatcctcctgccttggcctcctaaagtgctgggattacaggcgtaagccaccacacctggccggatttttcttaacctttttaacaccttcgtaaatattcctgcattaaactctgtttacttattccttttgagtgtgccttctgcagatcttccctaacataggtgcaacaggacagg

SEQ ID NO: 322370 - DNA, 537 bp, Homo sapiens
gaagctttgtgcaagttacagaggcacaagttctaggagcaaatacatctgagtttctgaactcccccyctgccagttactagctgtgtcactctgagaaggtcatctaacttctttttttgtttgtttgttttttttgagatggagtctcgctctgtcgcccaggctggagtgcaatggcacgatctcggctcactgcaggctctgcccgccaggttcatgccattctcctgcctcagcctcatctaacttctatgaacccattttttcctttaaatttatagtatctaccttacattaaatagaaatattataactataatgtcaatttatatacacataaaatgagtaatcaagtatcaagtcacaacatgtgcttccttgtgaaaatctctctccatcagagcaactttctccatctgcaacccaagagaaactctgcaaagcacatcacaatacatcaggagccaaaggctgaggatttcatccttgcattgagaaaatatgtcaatataggaagagaatactgcacagaaa

SEQ ID NO: 322371 - DNA, 578 bp, Homo sapiens
ggcaccaagccattaactaggattccacccccactactcaaacacctcccgttaggccctatctcccatattggggatcaaatttcaacgtgaggtttgggggaaaatatctccaaactgtagcagggagtatgggcatttttaataataataagtcttctaattcatgaacacaggagatatttccattaatttgtatattctccaatttattttatcaatgtcatagttctcagagtacaaatcttttacctccttgggtaaatttattcttaaaatttgtatggaaccaaaaagacccaaaatagccaaggcattcttgaggaagaataaagatggaagcatcacacatttcaatttcaaactctattgtaaagccatagtaatcaaatcagtatggtactgtcatataaacagacacataaacaaatggaacaaaacagagagttcagaaatacasccatgtgtatggagccacgaatatttgagaagggtaccaagaatacaaactaaggaaagtaaattttttttcaataaatgatattggaaaaactggatgtccatgtattaaaaaacca

SEQ ID NO: 322372 - DNA, 540 bp, Homo sapiens
gtatctaccttacattaaatagaaatattataactataatgtcaatttatatacacataaaatgagtaatcaagtatcaagtcacaacatgtgcttccttgtgaaaatctctctccatcagagcaactttctccatctgcaacccaagagaaactctgcaaagcacatcacaatayatcaggagccaaaggctgaggatttcatccttgcattgagaaaatatgtcaatataggaagagaatactgcacagaaatacaaaatctagtgaatattatttatgagaaagtgatcatctaaaataagatgatgtaccaaaaaaattgaaaaccaataattttccattttaggaaatccagtatgatacaaactcagtaacatcttgaagcacatttatataaattctttggaataataaataataaacctgctaaaagaataagtatgtcttttatttctccttttagaatgaattcacctttttagatatgaaggtaggaaaagaaataattcactttcaaacaaatacagaatggtattca

SEQ ID NO: 322373 - DNA, 503 bp, Homo sapiens
aaaaataaattttaaaaaatgtattacttttatactgataaaatacacacaacataaaatttaccatcttcaccattttcaagtacagagttcagtggttttaaatatacatgacattgttcagcaatcactaacatcaatctccataaccctttcttcttgcaaaactaaaactgtgtccattaaactgtaacttccaatttccctgtcccaacagctcctggtaaccaatattctactttatctctgtgacgttgactattctacttyatataaatgcaatcatgcaggattggtctttttgttcctgatttatttcacttaccaataatgtttccaagattcatcatagttatagaatgtgtcggaatttccttccttcttaaggctgaataatttcttgttgtatgtatataccacatttgccttatccattctacgaatggatacttgggttgctttacattttagctgtaatgaatattggtgctatgaatgtgggt

SEQ ID NO: 322374 - DNA, 496 bp, Homo sapiens
tgggtctcctagagctctcctgtcagcctcttacattttcattcattatttgtatgtctttatacaatmattttgctttctatgttaagatatttcttttattttatcttccaggccatgaatgtattattagaaatcatagtttttgcacggcatataaacatcactataccttttgttgatctgcttatctctctttcttgttcagtgttctatttaactttctatttatttaactcttctgctttggcagaaatatcatcatcgctcatcagtagtaagtctggttattgtcatgtcttgaggtagtggtttcccagtgattggatggctggtgttgtgggaacagactattaaaactccctttttgagtggcatagaagaaggctcccaagttcccactcttttggaatctcatgtataggaaagatggctcatccatgtaacatgagtcttgagggccagggaaggcctcgtaaaattaccctaaggtagt

SEQ ID NO: 322375 - DNA, 509 bp, Homo sapiens
tgaattgagttgtttaagctctgtcattgtatcttcccgttaaggacaggacaaagtaaatgggtatatatatacacagaaaggtttgaaaggtttatggaacaagctcttgagatcctttcttttgaaagatttatggaaagaacaagctcttgagatccttcctttgtccttgacttttgagagtttgataatcgtatgccttgaaatagtcttgtttgaattgaatctgctttgtgtttgttgactttcttatacctctatattcatakcttttctcaaggtttgaacattcaaacctctcattcaaacctttctcaaggtttgaacgttctctactattacttcttagaaaaaactttctatccccatctctttctctacatccttttaaaggtcaataatgttttgatttttccttttgaggctattttctaaatcttttgggcatttttttttctttttttctcttttctccttagattgtgtattttcatgtaggttgattt

SEQ ID NO: 322376 - DNA, 537 bp, Homo sapiens
ctctcattcaaacctttctcaaggtttgaacgttctctactattacttcttagaaaaaactttctatccccatctctttctctacatccttttaaaggtcaataatgttttgatttttccttttgaggctattttctaaatcttttgggcatttttttttctttttttctcttttctccttagattgtgtattttcatgtaggttgattttgagcttgttgatttyttcttttgcttgacctattctgctgttgagagactctgatgcatattttagtttgtcaacttctcagttccagaatttgtgcttgatttttaaaattattttaatcttgtttgttaaatttttctgctgtaattctgaatttgttttctgttatcttgaagttcattgagcttccttgagacagctatttttaatttcctgagaggtcacatgtatccaccactccaggattcatcacagcgtcttatttagtctgttggtgaagtcatgttttcctggaagttcttgatgctcgtggacattgctgttca

SEQ ID NO: 322377 - DNA, 537 bp, Homo sapiens
ctctcattcaaacctttctcaaggtttgaacgttctctactattacttcttagaaaaaactttctatccccatctctttctctacatccttttaaaggtcaataatgttttgatttttccttttgaggctattttctaaatcttttgggcatttttttttctttttttctcttttctccttagattgtgtattttcatgtaggttgattttgagcttgttgattttttcttttgcttgayctattctgctgttgagagactctgatgcatattttagtttgtcaacttctcagttccagaatttgtgcttgatttttaaaattattttaatcttgtttgttaaatttttctgctgtaattctgaatttgttttctgttatcttgaagttcattgagcttccttgagacagctatttttaatttcctgagaggtcacatgtatccaccactccaggattcatcacagcgtcttatttagtctgttggtgaagtcatgttttcctggaagttcttgatgctcgtggacattgctgttca

SEQ ID NO: 322378 - DNA, 537 bp, Homo sapiens
ctctcattcaaacctttctcaaggtttgaacgttctctactattacttcttagaaaaaactttctatccccatctctttctctacatccttttaaaggtcaataatgttttgatttttccttttgaggctattttctaaatcttttgggcatttttttttctttttttctcttttctccttagattgtgtattttcatgtaggttgattttgagcttgttgattttttcttttgcttgacctattctgctgttgagagactctgatgcatattttagtttgtcaacttctcagttccagaatttgtgcttgatttttaaaattattttaatcttgtttgttaaakttttctgctgtaattctgaatttgttttctgttatcttgaagttcattgagcttccttgagacagctatttttaatttcctgagaggtcacatgtatccaccactccaggattcatcacagcgtcttatttagtctgttggtgaagtcatgttttcctggaagttcttgatgctcgtggacattgctgttca

SEQ ID NO: 322379 - DNA, 387 bp, Homo sapiens
aggagacaaactggacaataaggcaagtaagactaagtgtcagtgcacaagtttccataagaaaaagtgaaagacatggggtcaagatttcacaattttgagaggagacaggttgtaaagtgttacttaaaaaagtatgtctaaatagtatcaacattatctagcaaagtctagtgtgaaagctaatctgtaataacaaaaatatgaagcgtatattacataatatcaaaatataacacattccattatatggtattatattacattatgtcccattatcatattgtagtatygtgtattagaatctagttttgcagaactattgcctataaaatgtttgtccacttcctcccactgttcacttcactcccacccccaaaactgctt

SEQ ID NO: 322380 - DNA, 534 bp, Homo sapiens
tgtaatatactaatgtgccttgtgatcctcccagggatagaatgtaagttggataaggcacagggagtattataaagtagaacacttctcaatatatttgacttggactccttatataaagcaatttctgggacaaatattttataacacaggttttagtaaacctgccttaccatttttacattataattatttgactaattatcttaattytatttgcaatcttaactccgtttgccaggcaaactaattgtaacaggttctaggatggggagatcttttggaggaggacattattcttcctaacacaataaaaatatgcaggaacaacatagttttcgtatatatatacccaaagacaatcaaattacatatgtgtgtgtattatatatatgaatatatataaaatataatatataaaatttatatacaaaaaaattttatatatatataaaaaacactgtaacactgtggctccccaatcatgggaattttgttgtctttgtcattttatttgtaatacctattccaggg

SEQ ID NO: 322381 - DNA, 534 bp, Homo sapiens
tgtaatatactaatgtgccttgtgatcctcccagggatagaatgtaagttggataaggcacagggagtattataaagtagaacacttctcaatatatttgacttggactccttatataaagcaatttctgggacaaatattttataacacaggttttagtaaacctgccttaccatttttacattataattatttgactaattatcttaattctatttgcaatcttaactccgtttgccaggcaaactaattgtaacaggttcyaggatggggagatcttttggaggaggacattattcttcctaacacaataaaaatatgcaggaacaacatagttttcgtatatatatacccaaagacaatcaaattacatatgtgtgtgtattatatatatgaatatatataaaatataatatataaaatttatatacaaaaaaattttatatatatataaaaaacactgtaacactgtggctccccaatcatgggaattttgttgtctttgtcattttatttgtaatacctattccaggg

SEQ ID NO: 322382 - DNA, 534 bp, Homo sapiens
tgtaatatactaatgtgccttgtgatcctcccagggatagaatgtaagttggataaggcacagggagtattataaagtagaacacttctcaatatatttgacttggactccttatataaagcaatttctgggacaaatattttataacacaggttttagtaaacctgccttaccatttttacattataattatttgactaattatcttaattctatttgcaatcttaactccgtttgccaggcaaactaattgtaacaggttctaggatggggagatcttttggaggaggacattattcttcctaacacaataaaaatatgcaggaacaacatagttttcgtatatatatacccaaagacaatcaaattacatatgtgtgtgtattatatatatgaatatatataaaatataatatataaaatttatatacaaaaaaattttatatatatataaaaaacactgtaacactgtggctmcccaatcatgggaattttgttgtctttgtcattttatttgtaatacctattccaggg

SEQ ID NO: 322383 - DNA, 508 bp, Homo sapiens
atctcttctcctaatatttccacctggttttgaggctcagatttgacctatgcttagagtgcagaaagttgtgtcattaaaatgcagttatagtctcaaaagtgccactctcctatttgttccaaactgtagtttagtgctacarttgctgactttacctacaaaaatacattgttctcctgctagcactgcaaattctaatgagcaatggactggtaacaccaaattccattgtgaattagaattgtcagcacagttctgatggctgaatctctgcaactttgcgaaaggtactcattgcttcactgtgaagtagagaactgtgtagtttaggaagactgatttttggattgcaaattcagctcattaagggtagatggatgcttctgattcagtgtacataaagtcaatgtcatcatttttatttgtactttttgaaaccggaaaatgcatcttaaaacatattttaaaaagtcatcagtcacaatctttgattatcacaatttag

SEQ ID NO: 322384 - DNA, 616 bp, Homo sapiens
acttctacttgatcatggtggattagctttttgatgtgctgctggattccgtttgctagtattttgttgaggattttcacatctatgtgcatcagggatactggcctgaaattttctttttttgttatatctttgccaggttttagtatcaggatgatgctggactaatagaatgagttagggaggagtatctccatctcaatgttttggaatagtttcaggaggaataatactagctcttctttgcwtgtctagtataattcagctgtgaatctgttagctcattgacttttttggttaataggctatttattactgattcaattttgatactcataatcagcctgttcagggatttaatttcttttggtttcaatcttgacaggttgtatgtttacaggaatttatcaatttcctctaggtttactaggctgtgtgcataaaggtgttcataatagtcactgagggttgttttttatttctatgtggttggcaggaatgtccttgttgtcatttctaattgtgcttatttggaccttctttacttttttactttttttattagtgtagctaatggtctgtcaatcttatttcttctttcaaaaactaccaaatg

SEQ ID NO: 322385 - DNA, 370 bp, Homo sapiens
ggacttcaaccccatattttccgtcatgcaccgccctatcagagtttcaccacgacggccctgcccctgcagcaaacttctgcctgaacatccaggcattctcatacatcttctgaaatctaggtggaggttcccaaacctcaattcttatcttytatgcagccacaggaccaacaccacatgggagctaccaaggactggggctttcaccctccaaagccacggcccaagctgtaccttggcccattttagctgcaactggagaggctgggatgcaggtaacctcgaccggtcccagggtccccctactctatgcaccatgtcctgaagctacatagagtaggggggccctggacctggcccaggatac

SEQ ID NO: 322386 - DNA, 606 bp, Homo sapiens
ccaatttttaaattctataccctcttttcatcccaactactattactgccttagttcaggtcttatcatctcaggtcttgattaaaacagcctccaggccaggcgcgatagctcacgtgtgtaattccagcaatttgagaagtgggaggatcacttgagcccaggagtttgagaccagcctaggcaacatggcaaaaccccatctctatcaaaaaaaaaaaaaaaaaaaaccaaacaaacaaaaaaaaaacgagccaggcatggtgatggaaggaatgcttgagcctgggaagtgcaggttgaagtgagctgagaycaccaatgcactccagcctgggtgacagagcaagaccccatctcaaaaaacaaacaaacaaaaaatgacctataacctattggttcaaaaaaattgcttcatctcacatttcatagaacaattttattcaaattcttcacacatatataagacatgtgtgtctgcatcaaaactttggccattttttgaatcataatagttgtttagattacataagcatttttttgaatcagtaatacaatcactaaaggttttatcctaagccaaaatggcttgtcctaagttacgtg

SEQ ID NO: 322387 - DNA, 504 bp, Homo sapiens
gattccgtttcttggttgaactgagaagttaagttggatatcaaaatatttgtaaaaaacatttgttgcctttacccacctcctcatctcctattctttcttccattcattcttttggaaactatctagcagtttctctctggagggctgtattctctgctctcagaataagtacttcaaatgcttcaagtagggataacactgtctccatctccaggagtgggcatgtgattcagtgctggccagtcaaaggcatacattcccctgaccatgtgatttgttcagacttgggcatgaaacgttgtcagagccagtggggaacgagtgttttgccaggtcagcaggaagaagcacagatgcgctcattgtacgagttggacctggggggmttttggagctgctggtagccatttggcagcatataatgcctaaggaaaaatccgtggcatatatttgttattctttttggccactgagcaccttcgaacaactttcctatgttga

SEQ ID NO: 322388 - DNA, 536 bp, Homo sapiens
gggcagtttctagagattcttaggaggtggattatacaggacttggtgtccaccaagtgaggcaaagaaaaggttgaaattttcatttgggtgccttggaggatggggctgtcaatgcagagatgggaatacaggaggagcagtgtgtatacaggctgtgggtgggaacgatgggttagctttcaggattacagaggaatgaaatgctttcaaatgagtgcatctttgttccattcaaaaattgaatgccactgataatcatcgggcacctctsaagatgtgaaagattaaaattacattttaaaagcctaagttacaggccaaacgtgatggctcacacctgtaatcccagcactttggaaagccgaggtgggaggcttccttgaggctagggagtgtgagcaagaccccgtctaagttatggtattacatcacaaaaataccacgatttctgtacttaaaaataccatagaatactaaaaacaggtattctagtcaccattatttcatttttgacttttggaaacacacttcta

SEQ ID NO: 322389 - DNA, 509 bp, Homo sapiens
gctatttcaagccggtgaatggaacaaggtagacctcatctatttcccaagaatgatattaatttgcagcatgatatctgaaaaatcatttctctactctccatcattagaagatatagctcctttggaaggccaatgaaatatgtaggatgcctggttcctttgtagatattctgacacaagtctttggacttttctagactggtggcattcaygtaggtgggtgttcaaagatgcacaaaggacaatgttaatattcttttgaggcagctcttaagaactgaaacactccctatagaccagtcagcttagatgtcttctagagcaattaataaactccataacccaaataaagtccagggttcatgaagcccagtgtctagatgctgctttcaaaggaacacaatcatctgtagtggcttctaaataatatgggcttagggacttatattattggagggctactaaagagcctataatagctgcatttttttgttgttgcattttac

SEQ ID NO: 322390 - DNA, 599 bp, Homo sapiens
agcaggaactgacaggtgagcaacgccagcaaactgcaagtatttttcatgagaattctagttctattccgtttctatatatatatttgggcatttgggtgtaccactgtagccagtgttagtcttaagcaaaatggcataatatagctctccttcttaccttctgtcttctcctcttgttaccyctggataattagtacccctcaacactttatttaaaactcattcttactcctgcacccagtaaactcctaaacattcagtatctcacccccatttgtgaaataaaaacagctaatctggcataattcttatatgtgaagaactaatcctacaaaactgatgtatttctcctctgggaattatttgcattttaaagaacatctccttaaaaaagaaaaaagaaaaatactcccctatgagaattaagtcttactagtagttcaggcatcatataaagcaggcaggaagatgacccagaataaaggcattccctaatgccccaaaaatcataagaagaggttattcaagcacccctactctgcctcttcataatccctagcccaccactcgtacccaatatctctgcccactaacat

SEQ ID NO: 322391 - DNA, 555 bp, Homo sapiens
gagtatgttgagtttatcatgaatgcaactcttgactggacctgggacattaaagggcaatgaagcacttgaaaattctgatgacttctgttgtttatacattggagaagaattatatactgcatagtctgtggatgccactctggcattcccttaggatccacaaaattccctccctttttaaatatagtagtagtgaatttaggatttgggcttagacacatgtgaaaatatgacacaaatccttcctgatggatacttcaaaacacccagttataattatgtaaacactgaaaaaatgtctcaaaggaagtaagaggtttacatattaaaatgaacactagcattaccaatggtacgcaaatataatttaagtctattataagaaggttcaagatttattccaatttttcctgccaaattttgctgtcactttgtgctagggtatttaaagaaaagaaacatcttaaagaaagatktatgttttatattatccaggaagataattttctattaataattgtcccctggtgacatccggaggcttgacaagag

SEQ ID NO: 322392 - DNA, 641 bp, Homo sapiens
gttggctagtcaatgagtcaactaagaaattaactggccttggggtaaatatagagcctttccattcttttttttttttttctttttttttgagatggaatcttgctctgtcacccaggctggagtgcagtggcacaatctcggctcactgcaacctccgcctcctgggttcaagtgattcttctgcctcagcctcccaagtagctgggactacaggcgcacgccaccatgcccagctcatttttgtatttttagtagagacagggtttcatcatattggccaggctggtccctaactcctgacctcatgatctgcccatctcggcctcccaaagtgctgggattacaggcgtgagccaccacgcctggccaagcctttccattcttttcttttttaatttatttacttcagagactggagtaaaattacaaatacaaaagaaagataacttccttgaaagtttaagcaaacatttttctgtgcatgcctaatgtgaaagaagagttgaagggtcaacaggtctcatattcacaaaacagattccctagaaggacatcagaayaatgttcttctaattaaacaggaagacacgctacaacggtgccctttaatttcaagtctaggaggttgagttgaccat

SEQ ID NO: 322393 - DNA, 559 bp, Homo sapiens
ggagtaaaattacaaatacaaaagaaagataacttccttgaaagtttaagcaaacatttttctgtgcatgcctaatgtgaaagaagagttgaagggtcaacaggtctcatattcacaaaacagattccctagaaggacatcagaataatgttcttctaattaaacaggaagacacgctacaacggtgccctttaatttcaagtctaggargttgagttgaccataaactcaatatgaaccaaaggtgagaaatgatattacaagcctagaaattatcataggccattaaagatatactctgattagattgtacctgcacctcaataggctggaaagttaacagtgaggaagaatgaaggcagtgaggctgctttccttgtaaaagagaagaccagaggaacagtggcagtgacttaaaaaatctgaagagctgatatgcattaggactggacattgtctacttatgtagagggcagcccttgtaagtggaaattttatattacatgcctcattaagtgttgtggaccacggttgaaaactattaacttgggtgaagttt

SEQ ID NO: 322394 - DNA, 559 bp, Homo sapiens
ggagtaaaattacaaatacaaaagaaagataacttccttgaaagtttaagcaaacatttttctgtgcatgcctaatgtgaaagaagagttgaagggtcaacaggtctcatattcacaaaacagattccctagaaggacatcagaataatgttcttctaattaaacaggaagacacgctacaacggtgccctttaatttcaagtctaggaggttgagttgaccataaactcaatatgaaccaaaggtragaaatgatattacaagcctagaaattatcataggccattaaagatatactctgattagattgtacctgcacctcaataggctggaaagttaacagtgaggaagaatgaaggcagtgaggctgctttccttgtaaaagagaagaccagaggaacagtggcagtgacttaaaaaatctgaagagctgatatgcattaggactggacattgtctacttatgtagagggcagcccttgtaagtggaaattttatattacatgcctcattaagtgttgtggaccacggttgaaaactattaacttgggtgaagttt

SEQ ID NO: 322395 - DNA, 559 bp, Homo sapiens
ggagtaaaattacaaatacaaaagaaagataacttccttgaaagtttaagcaaacatttttctgtgcatgcctaatgtgaaagaagagttgaagggtcaacaggtctcatattcacaaaacagattccctagaaggacatcagaataatgttcttctaattaaacaggaagacacgctacaacggtgccctttaatttcaagtctaggaggttgagttgaccataaactcaatatgaaccaaaggtgagaaatgatattacaagcctagaaattatcataggccattaaagatatactctgattagattgtacctgcacctcaataggctggaaagttaasagtgaggaagaatgaaggcagtgaggctgctttccttgtaaaagagaagaccagaggaacagtggcagtgacttaaaaaatctgaagagctgatatgcattaggactggacattgtctacttatgtagagggcagcccttgtaagtggaaattttatattacatgcctcattaagtgttgtggaccacggttgaaaactattaacttgggtgaagttt

SEQ ID NO: 322396 - DNA, 524 bp, Homo sapiens
cagtggcagtgacttaaaaaatctgaagagctgatatgcattaggactggacattgtctacttatgtagagggcagcccttgtaagtggaaattttatattacatgcctcattaagtgttgtggaccacggttgaaamctattaacttgggtgaagtttctggaattcacagaaatggagataatttaatacaggattatgagaaagttgaagtcttgtgagaagttgactgagaagagttattctgccaatttttagctctgcggtgtttttaatcagaaagaaagcactgaataacagtatgatatgcttaccactggtctatttcaaaaggtacattattctatcattcctttgaaatctaaaaataccctgcttcttgtatgaataaaatattttatttagacataatagtgaaggaacctgtaggctttacttttattaaaaaaaaaaaaacactgcttttgccagttacaaaaatctggaaaatcataagcaatactgttggttgaactaatcataag

SEQ ID NO: 322397 - DNA, 609 bp, Homo sapiens
ggcagtgacttaaaaaatctgaagagctgatatgcattaggactggacattgtctacttatgtagagggcagcccttgtaagtggaaattttatattacatgcctcattaagtgttgtggaccacggttgaaaactattaacttgggtgaagtttctggaattcacagaaatggarataatttaatacaggattatgagaaagttgaagtcttgtgagaagttgactgagaagagttattctgccaatttttagctctgcggtgtttttaatcagaaagaaagcactgaataacagtatgatatgcttaccactggtctatttcaaaaggtacattattctatcattcctttgaaatctaaaaataccctgcttcttgtatgaataaaatattttatttagacataatagtgaaggaacctgtaggctttacttttattaaaaaaaaaaaaacactgcttttgccagttacaaaaatctggaaaatcataagcaatactgttggttgaactaatcataagacttggtgcttctatttttccccttccctgcatattgcttcaacttcttgctctttcctttgctaaatataactagcttcctgctattt

SEQ ID NO: 322398 - DNA, 609 bp, Homo sapiens
ggcagtgacttaaaaaatctgaagagctgatatgcattaggactggacattgtctacttatgtagagggcagcccttgtaagtggaaattttatattacatgcctcattaagtgttgtggaccacggttgaaaactattaacttgggtgaagtttctggaattcacagaaatggagataatttaatacaggattatgagaaagttgaagtcttgtgagaagttgactgagaakagttattctgccaatttttagctctgcggtgtttttaatcagaaagaaagcactgaataacagtatgatatgcttaccactggtctatttcaaaaggtacattattctatcattcctttgaaatctaaaaataccctgcttcttgtatgaataaaatattttatttagacataatagtgaaggaacctgtaggctttacttttattaaaaaaaaaaaaacactgcttttgccagttacaaaaatctggaaaatcataagcaatactgttggttgaactaatcataagacttggtgcttctatttttccccttccctgcatattgcttcaacttcttgctctttcctttgctaaatataactagcttcctgctattt

SEQ ID NO: 322399 - DNA, 511 bp, Homo sapiens
gaaaatcataagcaatactgttggttgaactaatcataagacttggtgcttctatttttccccttccctgcatattgcttcaacttcttgctctttcctttgctaaatataactagcttcctgctattttcgcagctgactgaagaatttcattaggaaggtggaaagctaacaacaccactctgatgaataaaatggtcagctgatatttcttcttgctccagtggaaaaaattacagctagaggtgctgggtgacaaaattgagttcattaaaataaccaattagtgtaataagcaaaaggcaaagtgttctcactgttttcctgaggcaggcagttaytaaaatcttcagttaaaagtataagaagggatgatttctcttcttgatttcaagtccatagtcttttaaaatattacagattagtcttccctgaccctatgcagttcaatatgtctctcctttactgatcaatcctgcacatttttagtgacttctcattgcctacaaat

SEQ ID NO: 322400 - DNA, 511 bp, Homo sapiens
gaaaatcataagcaatactgttggttgaactaatcataagacttggtgcttctatttttccccttccctgcatattgcttcaacttcttgctctttcctttgctaaatataactagcttcctgctattttcgcagctgactgaagaatttcattaggaaggtggaaagctaacaacaccactctgatgaataaaatggtcagctgatatttcttcttgctccagtggaaaaaattacagctagaggtgctgggtgacaaaattgagttcattaaaataaccaattagtgtaataagcaaaaggcaaagtgttctcactgttttcctgaggcaggcagttattaaaatcttcagttaaaagtataagaagggatgatttctcttcttgatttcaagyccatagtcttttaaaatattacagattagtcttccctgaccctatgcagttcaatatgtctctcctttactgatcaatcctgcacatttttagtgacttctcattgcctacaaat

SEQ ID NO: 322401 - DNA, 628 bp, Homo sapiens
atgagtacataaacatttacttaatactttgtgaaaattgtagagtaggtcatcatacaaatataaaatcatttatttagtccgttttctgctaaaggaaattgagragttactttttcctatttttaaaattataaatagtattataataaacattttgtttatatattcttggacatttataaaaatatgtctatggagtaaatttcttagaagtggaatttcttgctcatatagatttctgcatttttgatattgagagattgccaaataaatatttttaagaaatttcaactctttctccaaccaataacctttacattgtttttctgcttacaataatagttgaattaaaaatattaatgcatcacatattaaaaagaaatacaatactttggttcttatattccataacaataattctaaacccatgtagaagtgtcaggaaacttgttggtaaaaatcttgaatgaattcaaaattgtatttgaagatttgtgaaaatttgagaattccttagggagtagtcaaatatgaatagggccctgattcttgttaggacaaggaagaacggagtgtaagccattctattgccaaagggagatgaaagtcaatgagctaaatataa

SEQ ID NO: 322402 - DNA, 628 bp, Homo sapiens
atgagtacataaacatttacttaatactttgtgaaaattgtagagtaggtcatcatacaaatataaaatcatttatttagtccgttttctgctaaaggaaattgagaagttactttttcctatttttaaaattataaatagtattataataaacattttgtttatatattcttggacatttataaaaatatgtctatggagtaaatttcttagaagtggaatttcttgctcatatagatttctgcatttttgatattgagagattgccaaataaatatttttaagaaatttcaactctttctccaaccaataacctttacattgtttttctgcttacaataatagttgaattaaaaatattaatgcatcacatattaaaaagaaatacaatactttggttcttatattccataacaataattctaaacccatgtagaagtgtcaggaaacttsttggtaaaaatcttgaatgaattcaaaattgtatttgaagatttgtgaaaatttgagaattccttagggagtagtcaaatatgaatagggccctgattcttgttaggacaaggaagaacggagtgtaagccattctattgccaaagggagatgaaagtcaatgagctaaatataa

SEQ ID NO: 322403 - DNA, 495 bp, Homo sapiens
agctgtgttaatgttcacaggcagtactgaagaactgttccctttctgaacgcctagaagatctccaagcttggctaccatcttcagtagtactattattttttactatgtattctttaaaaactaatgtcaatagccatacaaatttgccaactaaaatcaagcaacacaacaatattgagtattctgttgagtctttcacaaaaataatagtttttttttaaatgagcacttaatatgtgccttttgtatgtagggttcatctcttyctagaaattcagaattgaatccagatctcctggcattaacatgagttgtctgtaattgtcacactaaatttttccactgtgtgctctgaagtacagcctggtactcttgaagttggctggtttcataactgcccagtttctggcacaacaagaggccccgagtatgtgtgtattctctgtcacaagaactcttgaatatctttctagtcttgaggtttgctggatg

SEQ ID NO: 322404 - DNA, 598 bp, Homo sapiens
catttgattaagcacaagtgaacgccaagccttctgctggagaaagaggttgggggatgaggagcaaccagctccaagtcttcatgtagaaagtagtgtttggtgggagctctgcaactcagcaatcattaagatgaggtcaaggatggtaactcaggggtgggcatagactggcatatccccttgagagtggggaacctgcaatccagggatagagagaggcacacccatctggaatggtmcctggcctgccaccctcaaggagcctagaaatagttggcctctatggaggtgggaggccggcagatgttacaaatatcttgaatttgtatctactgatattatgtgtggagtttcatggttttctttccttactgcattataatttccctctgtaatttgtgagccttctgaaacgtttttctaaaaagaacttaggggctcttgtccacatttgaggaaatctgcaagggaggaaggaaagactgaaaagttggtgatctgatagtaagagaatgagtatgcatatgggaagtggccaaggaaaccaacaacagtcagagcagaaataccaagaataaaagaatctgataaaatt

SEQ ID NO: 322405 - DNA, 598 bp, Homo sapiens
catttgattaagcacaagtgaacgccaagccttctgctggagaaagaggttgggggatgaggagcaaccagctccaagtcttcatgtagaaagtagtgtttggtgggagctctgcaactcagcaatcattaagatgaggtcaaggatggtaactcaggggtgggcatagactggcatatccccttgagagtggggaacctgcaatccagggatagagagaggcacacccatctggaatggtccctggcctgccaccctcaaggagcctagaaatagttggcctctatggaggtgggaggccggcagatgttayaaatatcttgaatttgtatctactgatattatgtgtggagtttcatggttttctttccttactgcattataatttccctctgtaatttgtgagccttctgaaacgtttttctaaaaagaacttaggggctcttgtccacatttgaggaaatctgcaagggaggaaggaaagactgaaaagttggtgatctgatagtaagagaatgagtatgcatatgggaagtggccaaggaaaccaacaacagtcagagcagaaataccaagaataaaagaatctgataaaatt

SEQ ID NO: 322406 - DNA, 598 bp, Homo sapiens
catttgattaagcacaagtgaacgccaagccttctgctggagaaagaggttgggggatgaggagcaaccagctccaagtcttcatgtagaaagtagtgtttggtgggagctctgcaactcagcaatcattaagatgaggtcaaggatggtaactcaggggtgggcatagactggcatatccccttgagagtggggaacctgcaatccagggatagagagaggcacacccatctggaatggtccctggcctgccaccctcaaggagcctagaaatagttggcctctatggaggtgggaggccggcagatgttacaaatatcttgaatttgtatctactgatrttatgtgtggagtttcatggttttctttccttactgcattataatttccctctgtaatttgtgagccttctgaaacgtttttctaaaaagaacttaggggctcttgtccacatttgaggaaatctgcaagggaggaaggaaagactgaaaagttggtgatctgatagtaagagaatgagtatgcatatgggaagtggccaaggaaaccaacaacagtcagagcagaaataccaagaataaaagaatctgataaaatt

SEQ ID NO: 322407 - DNA, 598 bp, Homo sapiens
catttgattaagcacaagtgaacgccaagccttctgctggagaaagaggttgggggatgaggagcaaccagctccaagtcttcatgtagaaagtagtgtttggtgggagctctgcaactcagcaatcattaagatgaggtcaaggatggtaactcaggggtgggcatagactggcatatccccttgagagtggggaacctgcaatccagggatagagagaggcacacccatctggaatggtccctggcctgccaccctcaaggagcctagaaatagttggcctctatggaggtgggaggccggcagatgttacaaatatcttgaatttgtatctactgatattatgtgtggagtttcatggttttctttccttactgcattataatttccctctgtaatttgtgagccttctgaaacgtttttctaaaaagaacttaggggctcttgtccacatttgaggaaatctgcaagggaggaaggaaagactgaaaagttggtgatctgatagtaagagaatgagtatgcrtatgggaagtggccaaggaaaccaacaacagtcagagcagaaataccaagaataaaagaatctgataaaatt

SEQ ID NO: 322408 - DNA, 488 bp, Homo sapiens
gggataccatgtggtctgagcttcatctgcttccttcctaaaatcccagatcatttatgctgcctagtggcccatcctccatactaaatcccagaccctgcatgtgcacacccatcctcttctcagagctgggtcctgattttcagtcttcctggggttcagcctctactcraatccccagtgcacttaatctcccatggacttctgaatgctgaccatttctgaattgctttgtctgtgcaaaattgcacatctagagagaggaagacttctttgggcttaagtttatccaggggtttgttcccctgattcacccattctggaaccagaagtttgcttctaaatctctggtaggggctcccagtttaagcatttacatttaacaatatagaacaatgaagacaagagttgaaacatcatgaagataacattgatgttttttagaatgaccaggaccatgttctctatggagaatcataccgaagaaa

SEQ ID NO: 322409 - DNA, 488 bp, Homo sapiens
gggataccatgtggtctgagcttcatctgcttccttcctaaaatcccagatcatttatgctgcctagtggcccatcctccatactaaatcccagaccctgcatgtgcacacccatcctcttctcagagctgggtcctgattttcagtcttcctggggttcagcctctactcaaatccccagtgcacttaatctcccatggacttctgaatgctgaccatttctgaattgctttgtctgtgcaaaattgcacatctagagagaggaagacttctttgggcttaagtttatscaggggtttgttcccctgattcacccattctggaaccagaagtttgcttctaaatctctggtaggggctcccagtttaagcatttacatttaacaatatagaacaatgaagacaagagttgaaacatcatgaagataacattgatgttttttagaatgaccaggaccatgttctctatggagaatcataccgaagaaa

SEQ ID NO: 322410 - DNA, 488 bp, Homo sapiens
gggataccatgtggtctgagcttcatctgcttccttcctaaaatcccagatcatttatgctgcctagtggcccatcctccatactaaatcccagaccctgcatgtgcacacccatcctcttctcagagctgggtcctgattttcagtcttcctggggttcagcctctactcaaatccccagtgcacttaatctcccatggacttctgaatgctgaccatttctgaattgctttgtctgtgcaaaattgcacatctagagagaggaagacttctttgggcttaagtttatccaggggtttgttcccctgattcacccattctggaaccagaagtttgcttctaaatctctggtaggggctcccagtttaagcatttacatttaacaatatagaacaatgaagacaagagttgaaacatcatgaagataacattgatgtttttkagaatgaccaggaccatgttctctatggagaatcataccgaagaaa

SEQ ID NO: 322411 - DNA, 520 bp, Homo sapiens
aaaatcttttgttaacaaggcagcagtgactgaagaaggcaagattgttatggagaagggcagcttacaaaggctaatcatagtggtccaataaatcaacaataaagtctgaaataatgtagtgacagtgggagtggtgaggagggaacaaatgagagtgatgtaaaatagatacagtcagtaggacttagtagaagtaagagaggtggagaagcctaggatgacttctggatttctggcttggataattttgtgaatggtgcaaccatgtcttatgcaatgccgaatagaccacctgctatgttctagtcacttagcaagctttttttgatagtaacatgatataatgaaagaggtagagactgagactcaaaagtctgaggtttcagtcttgactctcccactaayttgactctacctcttaaccattctgagacttcaatttaaaccatctttaaaaaataagagagttttcaccaaaaagaagaaaccaggcattatgtgtaccttcacactcatg

SEQ ID NO: 322412 - DNA, 361 bp, Homo sapiens
gtgcaaccatgtcttatgcaatgccgaatagaccacctgctatgttctagtcacttagcaagctttttttgatagtaacatgatataatgaaagaggtagagactgagactcaaaagtctgaggtttcagtcttgactctcccactaatttgactctacctcttaaccattctgagacttcaatttaaaccatctttaaaaaataagagagttttcaccaaaaagaagaaaccagscattatgtgtaccttcacactcatggagcattctgaccaaataaatgaacttgaatctgatcaggcctctatatctaccaggttagaggaaatacaaggatagaagaacatgtaaaataagacca

SEQ ID NO: 322413 - DNA, 616 bp, Homo sapiens
ctgtttcaatttataatatactgtgataccttattttcaatacatcattaaccctagcaaacttttccaacagtcgtctagctactaaattgattagatttattcatatatgctcattaaagcatttttttctaaggaatagtactatcacagtaagaatcacagatccttactaactttgctatttctctaatcaggactgtcccaacaacacttyttactgaagttctcatgatcatatcattcttcttcatttaaacaggtgataaattgattctcttagatggtatgtgaacatagattcatttcattggcccgccatgaccaactgctctgtaagatgaatccattctggcaaaaccccacactcactgtaatgtacctgccacatatactcagttgtcaaatcctattaataccactttcatgtttcctttagaatccaaccttctcccttctttcctgtcagttctgtctttgttcaagttctcattactactttccaggctacagtagtaatattctaatcccaggcacttgcctatatccccttacaatcaattctatggctataggatttggaatcaaatattaaaatcttagtgctgtcttttgc

SEQ ID NO: 322414 - DNA, 616 bp, Homo sapiens
ctgtttcaatttataatatactgtgataccttattttcaatacatcattaaccctagcaaacttttccaacagtcgtctagctactaaattgattagatttattcatatatgctcattaaagcatttttttctaaggaatagtactatcacagtaagaatcacagatccttactaactttgctatttctctaatcaggactgtcccaacaacactttttactgaagttctcatgatcatatcattyttcttcatttaaacaggtgataaattgattctcttagatggtatgtgaacatagattcatttcattggcccgccatgaccaactgctctgtaagatgaatccattctggcaaaaccccacactcactgtaatgtacctgccacatatactcagttgtcaaatcctattaataccactttcatgtttcctttagaatccaaccttctcccttctttcctgtcagttctgtctttgttcaagttctcattactactttccaggctacagtagtaatattctaatcccaggcacttgcctatatccccttacaatcaattctatggctataggatttggaatcaaatattaaaatcttagtgctgtcttttgc

SEQ ID NO: 322415 - DNA, 645 bp, Homo sapiens
tttaattttttgaggaaactttattctattttctgcagcagctgcaacattttgcattcccaccaacaatgtacaaggattccagtttttccacatccttgccaacacttgtackttttgtttttataatagccatcctaactggtatgaggtgctatctcactgtggtttttatttgcaatttcctcatgataagagacattgagtgtctctttatacatgtggaccaaatgtatgtcttatttgcagaaatgtctatttaagtcttcagccaattttaattgaatcattaggtttttaaagttgatttgtaggagtttaaacatatattttggaaattaaccacttattagatacatggtttgcaaatagtttctcccatttcataggctgccttcttgctagcttttgactttgggcaaagctccctcaatctaaaaatatctagaccctagctccctttccaaactcatttagtcttccttgcttgctagaatacatttcaagatgccttatataagactcatgaatagccaagactgaaaaaggagataaatacttttcaaacatattttcatgtaaagtctctttgcagctcttatttgaaagcttaagaagctagaattttttggattctagcttaga

SEQ ID NO: 322416 - DNA, 533 bp, Homo sapiens
aagttttgggatgactcttgcaccccatctctgactgtgccatttgagaaatcacaagtgagaatcatgcagctgagccaagtcaacacacagaaccttgagagaaaacagtgaatttgtatttcaaactacgaaaagttttaaggtggtatgtttatagcaacagataactggaacaggaactgacaagcatagagaaaatctgggttggtgagaattaaggaattcatgaaaaaagagataaaataaaatgataacacaatgcagataaacatgraattaaaaataagctaagacgatatacaccctaatttggtaagaaaatattaatacatgttcgatacaatgaatagctagctggtaaaagtcctcaagttctgtatcctgagaagaagattcttggtcttgaaaaacaaaacagcaacctctgaaaaagactattatgagggtaagagatattttcctcttgaggtcacacaacaaagttttgcagccacttccagcaatgtcaccatgtcctgaaggaaagggct

SEQ ID NO: 322417 - DNA, 554 bp, Homo sapiens
tactgatgagcattaactcatttcataagttacttacgttgtcctgatctataaaatgcttggaagggtaaactatagttagaatttagatccttctaattgcattaatttagaaaaacatagcctaggattttagaatatatttaatagttacaatyatttctccaaataccagcttttccttgaggtgtttaaagattgcaagaatatttagattattttttcccataaaaacaagtttttcttcaagaaatctcagagtggcataaatttattgttttcacaatataataataagatcaatagtccaaagacatgttgacttttttccaatctaatggctacttaagtgagctcactagttcctgttggtatatttaccaaaatataaacaaatacctttatttgtaactaaatgttagtattttgaacatcattttgttgagcccaatataaaatatgatttgcctttaagtcaactgtacatggatttttctgtaataagataaaagaatagaaagttatttaaggtggcagagagtcttgatgaagaa

SEQ ID NO: 322418 - DNA, 422 bp, Homo sapiens
gttaattatatgtgttgacttaacagggctaagggatgcccagatagcctgtaaacattattttaagtatgtctttgagggtgtttctgaaagagatcagcgttgaatccatcagtagacttagtacagaatatcaccctcatcaatgcaggtgggcaccatccaatgcattgagggcctcaagagaacaaagaggtggcggaagcgtgaattttctctatctgcttgatctgggccatccatcttcccctgccttgggacrtgggtggtcctggtttttggacctttggactccagaacttacaccagtagccccccaggttcccaagccttaagtcttggactgaattacaccaccagttttcctggttctccagttggcttcagtgtatagtggggcttcttgacctccatcatcacat

SEQ ID NO: 322419 - DNA, 422 bp, Homo sapiens
gttaattatatgtgttgacttaacagggctaagggatgcccagatagcctgtaaacattattttaagtatgtctttgagggtgtttctgaaagagatcagcgttgaatccatcagtagacttagtacagaatatcaccctcatcaatgcaggtgggcaccatccaatgcattgagggcctcaagagaacaaagaggtggcggaagcgtgaattttctctatctgcttgatctgggccatccatcttcccctgccttgggacgtgggtggtcctggtttttggacctttggacyccagaacttacaccagtagccccccaggttcccaagccttaagtcttggactgaattacaccaccagttttcctggttctccagttggcttcagtgtatagtggggcttcttgacctccatcatcacat

SEQ ID NO: 322420 - DNA, 422 bp, Homo sapiens
gttaattatatgtgttgacttaacagggctaagggatgcccagatagcctgtaaacattattttaagtatgtctttgagggtgtttctgaaagagatcagcgttgaatccatcagtagacttagtacagaatatcaccctcatcaatgcaggtgggcaccatccaatgcattgagggcctcaagagaacaaagaggtggcggaagcgtgaattttctctatctgcttgatctgggccatccatcttcccctgccttgggacgtgggtggtcctggtttttggacctttggactccagaacttacaccagtagccccccaggttcccaagccttragtcttggactgaattacaccaccagttttcctggttctccagttggcttcagtgtatagtggggcttcttgacctccatcatcacat

SEQ ID NO: 322421 - DNA, 601 bp, Homo sapiens
tattgatgggcatttgggttgattccatgcctttgctaatcaaaatcattttttaagtggtttgctatttcaaattttgtttaaaatgcatcaaattagacatcatggaaaaatgtttgttgaagtatcttatagttaaaaaaaatttaaatatcacatgggagggtatcttaatcttttcaggggttctactacaaactctttgctcatatttccttactttggttgtcatgaagcacagaattagcttcaaaagcttcctttaatcttagtgagagatatcaatttatgtttgtactttcctgtaccatgtctaaaatatgactgattccttttcaacatgtatcctggggttttcctgtgtgattagggagcaattcagatgctagactaatgggctctacttggaataagaagatagttcttgagaaaaaaggccatgggagtcctcccatgagtagttattgaggaaaggaraaggaaactaacattcgtggaatgcttgctatatgccaggtgctgctaagtgaccaccaactgttccctcttcttcctatacttacagtggcaccatatttcccagcgtcccttgcagtcagtc

SEQ ID NO: 322422 - DNA, 599 bp, Homo sapiens
tcccatggaaatgcaaattcatgggaccctccctgccctttccattaatgggcagcccaggtgattcttaagtagaggaccctgagaatcaaactttgaaaattcaaattgctgcttttcycttagctaatgacctatattaaattacatttactacagggaaggcagagttgccttttgctcaggtgtgtcagccagcggttagttttttgtcttgaaatgcaaacgttttacagcactttttttcaagtatgtgtggtacccattctcaatccctgatgctaggaaggagatggatttctattcaattagtttttaaaggatattctgaaagaaatggagccttactcttgagaggaaggaagtatgaaggggattgatagagttgttctctattttattttgcatctacaatgtaattacaactgcctttaagaagtgacttcttagtctgataaatgcaataacaacttgatgactgagaaagtgactcaataaattactgaaaatctatcacattactttgcaaacagacaaaatagtcaaacaaaaatcaaattattactctgagatttttttcatgggtgtgtttgatagtt

SEQ ID NO: 322423 - DNA, 599 bp, Homo sapiens
tcccatggaaatgcaaattcatgggaccctccctgccctttccattaatgggcagcccaggtgattcttaagtagaggaccctgagaatcaaactttgaaaattcaaattgctgcttttctcttagctaatgacctatattaaattacatttactacagggaaggcagagttgccttttgctcaggtgtgtcagccagyggttagttttttgtcttgaaatgcaaacgttttacagcactttttttcaagtatgtgtggtacccattctcaatccctgatgctaggaaggagatggatttctattcaattagtttttaaaggatattctgaaagaaatggagccttactcttgagaggaaggaagtatgaaggggattgatagagttgttctctattttattttgcatctacaatgtaattacaactgcctttaagaagtgacttcttagtctgataaatgcaataacaacttgatgactgagaaagtgactcaataaattactgaaaatctatcacattactttgcaaacagacaaaatagtcaaacaaaaatcaaattattactctgagatttttttcatgggtgtgtttgatagtt

SEQ ID NO: 322424 - DNA, 599 bp, Homo sapiens
tcccatggaaatgcaaattcatgggaccctccctgccctttccattaatgggcagcccaggtgattcttaagtagaggaccctgagaatcaaactttgaaaattcaaattgctgcttttctcttagctaatgacctatattaaattacatttactacagggaaggcagagttgccttttgctcaggtgtgtcagccagcggttagttttttgtcttgaaatgcaaacgttttayagcactttttttcaagtatgtgtggtacccattctcaatccctgatgctaggaaggagatggatttctattcaattagtttttaaaggatattctgaaagaaatggagccttactcttgagaggaaggaagtatgaaggggattgatagagttgttctctattttattttgcatctacaatgtaattacaactgcctttaagaagtgacttcttagtctgataaatgcaataacaacttgatgactgagaaagtgactcaataaattactgaaaatctatcacattactttgcaaacagacaaaatagtcaaacaaaaatcaaattattactctgagatttttttcatgggtgtgtttgatagtt

SEQ ID NO: 322425 - DNA, 599 bp, Homo sapiens
tcccatggaaatgcaaattcatgggaccctccctgccctttccattaatgggcagcccaggtgattcttaagtagaggaccctgagaatcaaactttgaaaattcaaattgctgcttttctcttagctaatgacctatattaaattacatttactacagggaaggcagagttgccttttgctcaggtgtgtcagccagcggttagttttttgtcttgaaatgcaaacgttttacagcactttttttcaagtatgtgtggtacccattctcaatccctgatgctaggaaggagatggatttctattcaattagtttttaaaggatattctgaaagaaatggagccttactcttgagaggaaggaagtatgaaggggattgatagagytgttctctattttattttgcatctacaatgtaattacaactgcctttaagaagtgacttcttagtctgataaatgcaataacaacttgatgactgagaaagtgactcaataaattactgaaaatctatcacattactttgcaaacagacaaaatagtcaaacaaaaatcaaattattactctgagatttttttcatgggtgtgtttgatagtt

SEQ ID NO: 322426 - DNA, 577 bp, Homo sapiens
aaccactgttaccactgctctctacttctacgagatcagcttctctagattccacatatcagtgagatcatgagacatatgtttttctgtgtctggctgatttcatttaacataatatcctttcggttgacccatgatggttgcaaatggcattttacgtttttacggctgattatttcattgtgtatatataccacattttctttatccattcattcattgatagacacttagattgattacatgyctttcccacaacatttttaggcttgggaaatcagatgaggaatagactctggtatatggatatcagaagtcagaggtgctgattctgacactaataactgtaacctctgaactcctgttaccttctctataggatggagctaatccctgctttttaatttaatatcaacaaatattaaaagctagtcctcaggaaatttttcatctaaagaaatagtggggccaggtgcagtggctcatgccagtgatctcagcattttgggaagccgaggtgggagaatcacttgagcccaggagtttaaggccagcctggacaacacagtgaaaccct

SEQ ID NO: 322427 - DNA, 586 bp, Homo sapiens
gtaacatatctgaccttgtctgaaataacatttagctcagttgaaaagtatttattgaacgaccatcttttacaaaattctttggagatcaaaagaagagatgctcttggtctttatcaaaactataagtaagtagggagaaagtcatacgaaagatacaaggcagaatgtgttaaataatagaaatataagtaaagtgagacaggagttctgagaagatgaactctagctgaagggaagagccaggagatagtaaaatctattttacccaacgtattacacatgtagagaggctgcagacaataagcctcactagtacataagagcttcacagtggcgaccttaagtgatcccatgtgtagtttagagcttaagatagctctccccaaccagtggatggggaaggagtggtaagcaaggtagggttcaggggagttggaaggaagaagaccagccaggaggaagttgctcaacagactttctctgyggtctagaataaacattgtgttatctcctcactctgtctttagggcctgcctttaactaagcaggagctcaagacagcgtaagtttcaaagacattatg

SEQ ID NO: 322428 - DNA, 586 bp, Homo sapiens
gtaacatatctgaccttgtctgaaataacatttagctcagttgaaaagtatttattgaacgaccatcttttacaaaattctttggagatcaaaagaagagatgctcttggtctttatcaaaactataagtaagtagggagaaagtcatacgaaagatacaaggcagaatgtgttaaataatagaaatataagtaaagtgagacaggagttctgagaagatgaactctagctgaagggaagagccaggagatagtaaaatctattttacccaacgtattacacatgtagagaggctgcagacaataagcctcactagtacataagagcttcacagtggcgaccttaagtgatcccatgtgtagtttagagcttaagatagctctccccaaccagtggatggggaaggagtggtaagcaaggtagggttcaggggagttggaaggaagaagaccagccaggaggaagttgctcaacagactttctctgcggtctagaataaacattgtgttatctcctcactctgtctttagggcctgcctttaactaagyaggagctcaagacagcgtaagtttcaaagacattatg

SEQ ID NO: 322429 - DNA, 542 bp, Homo sapiens
cacaccacatatatatgatacaacattatgttataataaatgtattacaatagcttattgtgttcatagtgttaaatagcaaaatacttatgttcagattaggctgytatgaaaatttctattttagtctattttagaaaatcatggaaagcacactcctgtacaaaatacaatcaacatagtttgtttcctgttataaaaaggtataatttggaaagtaacttggagttaaagaagaagttatcaggcagttatttttggctctggtttatgcagttttaaaaaaatatgtgaagtcaggtttgtgaagaaagttcttgtctctttagcttcctgtttaagtagtaaaaaagaagtctaggaaagtccactatgaccaagctataatgacagtttatccattggagatctttttttctcccctgcccataagcataacctcagaaagatgaaaccctcaccacagcacatgtgtacattttgctgaattgataaaaattgcataattcaaatcccaatcttagaagtcaggaattacactg

SEQ ID NO: 322430 - DNA, 559 bp, Homo sapiens
attgacatattgttctcaaaaatgccttgcagcataagttacttctaagtctgatccaattaaattctggatccygcaggagtaatttttctgattaatctttggggcttgttctaactggagcagggttcctcttagctttctctttttctggcactctttgtttaaacctctagcttgtgtatagtttagcttgtttttctaatgaacctatcaacttttacttaaatatttaccaccaaaatccctatgattttcaacagtgcccttggatttagacttcctcacactctgttccaaataaaggcaattctcctgaggagagctatggaactctgttcttaaggcctgcttctccctctgagcaaaacctgcactgctgctctgatgcagtagatgggaacaaagacttacttctctcagacatgctttacaagtggggtacagggtggggtcagtaccctctgttattgtaggcttgcctctcttagagtaaaatctctaccctatgagtaagttaaggcacaaatgattggggctcagtattcttggcctgctg

SEQ ID NO: 322431 - DNA, 612 bp, Homo sapiens
gacttgtttgtggcctaatatatggtctattcttgagaacaatcaatgtgctgaggaaaagaatatgtattctgcagccattggatgaaaagttctgtaaatatctattaggtccacttggtctayagtgcaatttaagtctgatgtttctttgttgattttctgtctggaagatctgtccgatgctgaaagtgacgtgctgcagtctcaagttattactgaattgaggtctctctctttagctctaataatacttgctttatatatttgggtgctccaatgctgggtgcgtatatatttaaaattatcatattctcttgctaaattgacctctgtatcattatatggtgaccttctttgtctcttcttgaaatctattttgtcttgaaatctattttgtctaataaaagtatagtgactcctgccctttttttggtttctctttccaccctattatattcagtgtatgcgagtcttcataggcagtgtgttttctgtaggcaacaaattactgagtcttgtttttcaatccctccagccagtctacgcatgaattgcttcattgtttagtctttctacataaaagtccacaccacagtcacagtattataa

SEQ ID NO: 322432 - DNA, 576 bp, Homo sapiens
cactgctgggggacccagtacaccctccgcagccactggcccgggtgctaagtccctcattgcccggggccagcagggctggccggctgctcccagtgcggggcccgccaagcccacgcccacccggaactccagctggcccgcaagcgccgcaggcagccccggttcccgctcacgcctctccctccacacctccctgcaagctgagggagtgggctccagccttggccagcccagaaaagggctcccacagtgcagtggggggggctgaagggctcctcaaatgccaccaaagtgggagcccargcaggggaagtgccgagagcaagcgagggctctgaggactgccagcatgctgtcacctctcacatatgtatatgccataatctcaaaaaaactgaatattgatgattatggaatagaagcatattgccgataagcgcatttcatttacaaagcttttattacaaaggttgctaatttacattaaaaatgtctgatacaaattttttgataacacacttggaatctttgcaggcgcttgcaaataaatacatgctgtcctgatttaccaac

SEQ ID NO: 322433 - DNA, 618 bp, Homo sapiens
gatagagaggtgatgcagatattgacgctgcagaaaaaggaagctggtaaccctgcaggagtaggagaacaggaatagttctgcagcttaacagctcctaaagaagaaagcactgctggaatgccctgaaatacaaaaaagccccatgggctgagtaagagcctaactgctgstcattgctcttaggcatatctactgatcacagcccaaattacaacatcaaaaatattctttcaatatacactgctggtgaaatccagggcaagaatctaaccatgaataaatatcttgtacagagacacagccctctgaaagcatccaaaaatgaagccaacagattatacccaacttaaatcagttaagccctcaagggaaataaagagcataaaatcacaaagccccatacaaatgacagcaaatccaggaacaagatgacagaatagaaggctccactaactgtacccccaacacgggcaccaattgaacaactatttacacagaaaaattccttattaagtaccaaacatcaggtgagcattcccagtaccttgttttaactctgtatcacttaaagaggcacaaagagatagagcagcaaacagtcttgaatcactgatg

SEQ ID NO: 322434 - DNA, 518 bp, Homo sapiens
acagtgtacagtgtgaatatttaaaatcacattttattatttagaatatttctactttatgcaagtgtcttgtaataatgtgagttacttagattaccaaagtgcctggagaatacagcagaaatgcctgataaaagcagttactaaattcttcaaaggatgttttaaagaagactsaatttttggagtgagttgatgtctcagttgtaaaataagccaaaattacttctgtgttttcttttgttttgtttttaccatgagcgattagcagtaggactggaaggtaaggtagatcacctttatggagtggacagtcttcaaggaattaaacacccatccctttctctctcttttaagaaagagaaaaaggtactctattggttctcgtctccacaattaaagggatggggtggggaaagatctgttcataaaatttgtgcgtacgtgaaaaaatggaagacaggtcttttctctgttgcatgcctgcttagtcactagatttgtccatatgcctcaca

SEQ ID NO: 322435 - DNA, 672 bp, Homo sapiens
tactttatgcaagtgtcttgtaataatgtgagttacttagattaccaaagtgcctggagaatacagcagaaatgcctgataaaagcagttactaaattcttcaaaggatgttttaaagaagactcaatttttggagtgagttgatgtctcagttgtaaaataagccaaaattacttctgtgttttcttttgttttgtttttaccatgagcgattagcagtaggactggaaggtaaggtagatcacctttatggagtggacagtcttcaaggaattaaacacccatccctttctctctcttttaagaaagagaaaaaggtactctattggttctcgtctccacaattaaagggatggggtggggaaagatctgttcataaaatttgtgcgtacgtgaaaaaatggaagacaggtcttttctctgttgcatgcctgcttagtcactagatttgtccatatgcctcacaccttgaatctggagaaaaagcactagggaatgatcgtagggtagtatatgtgaaaataggccagttgaagaggacataaaaactacccctcaaattcctcatcttgagggctatgaaaggttaatttcaccatgttgaggccrtaagtgtcaagtgacataatagcagtgggatttctggggttcaccacagcaccagagcaagga

SEQ ID NO: 322436 - DNA, 605 bp, Homo sapiens
gctaaataaaaagatacagaaattgtggcaagattctccttaactaggaaagtaagtttcagcgatgtcatatcttggcagtgccactctccattttgcaaagactgggagaaaataaactcaatgcataagaaatgtaattgagaacatttcctttgttccaaatatatgaawacctagttttaaaacattaggataatgagatgctaatgaagcaacactttatggattcatttataaatgatttacagagcacctttaataaatcaagcattataccagacactgaaaaagtaaagaaacattatagtgttcacttttaagaagttcacaatccagtaaacaggacaaggataaaaaaaatgcaagattacaagcatgcaaaatataaaggaagcacagataagagaacaatttaatttggtttagggctcatggaagacttcttaatcaaggcaatacctgaggtgagttttaaaagatgaattacagtttcgcaggcaggaaggaaggtgtaaagatataaggtgtttcatttggctgaagcattaagcattatcttggaatggttggtgtgatgcaatgaaaataaacattaagggtca

SEQ ID NO: 322437 - DNA, 547 bp, Homo sapiens
aaacaaattcaataaaattgcaagatacaaaaccaatatccaaaaatcaattgtgtttctatatatacaaactatctgaaaggcaatcaggaaaactattccatttacaacagtatcaaaaagaataaaatactcaggaataaaactaactaaagaggtaaaagtcttgtatattgaaaactaaaaacattgatgaaggaacttaaagatacaaacaaatgaaaagacattatatgtttatatacatagctatataaaaattcatacaacagtttcaacaatacaataacattgcaatgcyatcatttcaggttgtttggaattaaggatttcccccctctaatttgacatttctgcaatatttatgttgactttataataaacaggattgttgccatttataagaaagtattagtttatccataaagtgactctcatttagtaaaattaataattcttgcagccaactaatgggttaaaaatgtaacattctgaagtctttgaaatgaaattattggaatatggattatgaaaagattttgaagca

SEQ ID NO: 322438 - DNA, 651 bp, Homo sapiens
tatttttatttttattgtgcagtagtcaaagagtgtggtgggtacaatttgtttctttgaatttgctgagtattttatgtccaattgtatagttgattttagagtatgtgccatgtgcagatgagaagaatgtatrtgctgttgttttggggtggagagttctgtagatgtccattaggtccattcagttaagtgtcaagttcaggtgctgaatatctttgttagttttctgtcttgattatctgtctaatactgtctgtaggacgttgaagtctcccactattattgtgtggtttgccaaatctctttataggtctctaagaacttgctttatgaatctgggtgctcctgtgttgggtgcatatttatttaagatacttaagtctttttgttgagttatttaccattatgtaatgcctttgtttgtttaaagcctgttttgtctgaaattggactaggaactcctgctttttttctgttttctgtttgcttggtagatttttctctacccctttactttgaacctctgggtgtcattgcatgtgaaatgagtctcttgaaaacagtataccagtgggtcttgcttctttttccaagttgccactctgtgccttttaattggggcattcgtccattttcattcaaggttag

SEQ ID NO: 322439 - DNA, 547 bp, Homo sapiens
aaacaaattcaataaaattgcaagatacaaaaccaatatccaaaaatcaattgtgtttctatatatacaaactatctgaaaggcaatcaggaaaactattccatttacaacagtatcaaaaagaataaaatactcaggaataaaactaactaaagaggtaaaagtcttgtatattgaaaactaaaaacattgatgaaggaacttaaagatacaaacaaatgaaaagacattatatgtttatatacatagctatataaaaattcatacaacagtttcaacaatacaataacattgcaatgctatcatttcaggttgtttggaattaaggatttcccccctctaatttgacatttctgcaatatttatgttgactttataataaacaggattgttgccatttataagaaagtattagtttatccataaagtgactctcatttagtaaaattaataattcttgcagccaactaatgggttaaaaatgtaacattctgmagtctttgaaatgaaattattggaatatggattatgaaaagattttgaagca

SEQ ID NO: 322440 - DNA, 601 bp, Homo sapiens
agttaaaggactctgttggcctagatggaccttcatgaaacttaaaaagtgcctcaccttggaggacatatgaatttccatacaagtatgagttgccaagcagaactgtatgtgtgtgtacatgtgcacacataatgaaagacagcttctcgcttcttccctgaggatgcagacttacgccagagtgctttgtcaggtgaggccagaatgattctaaattgatcactttccttctcaacacatcaccaaaataaggacagtatgactctwaatttctgctttatattcccttcttggtgtgtctaacatgctttgtgttttcttccacatctgctctcgctttttaaagggataatagccattttagaaaatataaatgaaaatatatttaaacagaatataatagttttcaaatatgaaaaagcataatttttatcatgatgagatggaaattgagggcctaccaattaggcacaataatgttttgaacagtctgtgttttagtcattgaacttgtcttcagcaaattatacccccttcattttctgtaaacacttttctgtgtgcatctgtttccacaggacacatatccctgctgttt

SEQ ID NO: 322441 - DNA, 615 bp, Homo sapiens
ccatcaattattttatgttaggaatattttctagattatttaagaaacaatttgtgttaggttggtgaggagagataggtagtcttcctctaaagtatagttatttttataaaatcagcttttgaagctgatctcttcagaaatcaagaaaaataatcttttcttacagactctctatttacttattttctgtcagtttattaaatagagttcctaactactgcctattttctggtattactgccctatatgaacggcataaatagccttttactgacctcactcaaaattcaactttcattttactttgatctaattattaataactttgtataattctcacctcccaaacttttcccttcagttctgatattaaaaatattgccggccgggcgcggtggctcacrcctgtaatcccagcactttgggaggccgaggcgggcagatcacgaggtcaggagatcgagaccatcctggctaacacagtgaaaccccatctctactaaaaatacaaaaaattagcccagcgtggtggcggacgcctgtagtcccagctactcgggaggctgtggcaggagaatggcgtgaacccgggaggtgcagcttgcagtgagc

SEQ ID NO: 322442 - DNA, 615 bp, Homo sapiens
ccatcaattattttatgttaggaatattttctagattatttaagaaacaatttgtgttaggttggtgaggagagataggtagtcttcctctaaagtatagttatttttataaaatcagcttttgaagctgatctcttcagaaatcaagaaaaataatcttttcttacagactctctatttacttattttctgtcagtttattaaatagagttcctaactactgcctattttctggtattactgccctatatgaacggcataaatagccttttactgacctcactcaaaattcaactttcattttactttgatctaattattaataactttgtataattctcacctcccaaacttttcccttcagttctgatattaaaaatattgccggccgggcgcggtggctcacgcctgtaatcccagcactttgggaggccgaggcgggcagatcacgaggtcaggagatcgagaccatcctggctaacacagtgaaaccccatctctactaaaaatacaaaaaattagcccrgcgtggtggcggacgcctgtagtcccagctactcgggaggctgtggcaggagaatggcgtgaacccgggaggtgcagcttgcagtgagc

SEQ ID NO: 322443 - DNA, 615 bp, Homo sapiens
ccatcaattattttatgttaggaatattttctagattatttaagaaacaatttgtgttaggttggtgaggagagataggtagtcttcctctaaagtatagttatttttataaaatcagcttttgaagctgatctcttcagaaatcaagaaaaataatcttttcttacagactctctatttacttattttctgtcagtttattaaatagagttcctaactactgcctattttctggtattactgccctatatgaacggcataaatagccttttactgacctcactcaaaattcaactttcattttactttgatctaattattaataactttgtataattctcacctcccaaacttttcccttcagttctgatattaaaaatattgccggccgggcgcggtggctcacgcctgtaatcccagcactttgggaggccgaggcgggcagatcacgaggtcaggagatcgagaccatcctggctaacacagtgaaaccccatctctactaaaaatacaaaaaattagcccagcgtggtggcggrcgcctgtagtcccagctactcgggaggctgtggcaggagaatggcgtgaacccgggaggtgcagcttgcagtgagc

SEQ ID NO: 322444 - DNA, 521 bp, Homo sapiens
atggcacgtgtatacctatgtaacaaacctgtatgttctgcacatgtactccagaacttaaaatatgataattaaaaaaaaaaaaacagaaaacaaagcaaatctgagaatgttcccaaggagcaagaattgggttgtttgtaacacaggaatagtaggtgtgaagtaaattacacctcctgaattaatgtacaaaaaaaagagtaggttgcaggtattatattactttgcccatacgtatgtgtgtcttacgaatgaygactcctcttatataagcatattacaaaatcagaaatttccatatagacacaatgctaatttctactccatagttcataattttcacatatttttgcaaaaatgtctattatgactattttccccagtctaaaacaccatccaggaatatgcattaaatttagctgtcatgtttccttagtctattttatctggaacaatttcttcacattttttgtaattaatgacctgaatatttttaaaaagtataggctaataatttt

SEQ ID NO: 322445 - DNA, 614 bp, Homo sapiens
gtcctccctgaaagtgtgtagcaaaagctacctacacagaaacttatggattaacttcagatccatcttcattccatttgcttctaattgccttatactttatctgtgtatttcttttttattaatattataatctccaagtggtctatgttttcatggtgttacttaggttgtcaagatttgaaattactgttgagccactsaacatataaattacaaatgagttcttcctacattaaaaagttggcttaatgtattgtccataacaatgtattgtctaatgttagataaagatagaactttgccatcttcctaatgggggaaaaaaactattttttaaccaggtatttactttaaaataaaacttcaggctttttcaataaagttaatttttctatctttatttctgcaggttatagtagcaaactatattgctagaatatcagatgaattagaaaaacatctattcttcatatcctttctttatgacaataagaatgaaccactttttaccatagtgtttattatactgttcaaaattttgggttgagaaagtttcttcaaagaagatttattgcacggtgttcatgtggagtattatgtttggaattttg

SEQ ID NO: 322446 - DNA, 571 bp, Homo sapiens
cgtattttcttaattcatcttgagtttgaagatgagtatacaccagtgaaaacatcaccataaacaatgccataaacataaccattatctctaaaattttcctttctcccttttttgtgataacatttaatataagatgtatgtgcttaatacatctttaagtatacaatgcagtattgttatctatatgtattatgctacacagtaaggtctgtaggacttattcatctcacataactaagactgtgtaccctctgaccaatacttacctaattccctgttgtccctgaccatggtaagcatcactctattctctgcttctgagttgactattttaatttcctgatgtaagagaagtcatgtagtatttgttcttcgggtctggcttatttcatttagcataatgccttctaagtttctttattttgctccaaatgacaggattttctttctttaaggctgaataatgtttcattttttgtatatatatatatatatatatatatatatayacacacacacacacacacacacacacacacacatacatatattgtatatatactgtata

SEQ ID NO: 322447 - DNA, 509 bp, Homo sapiens
aatatctctagaaaacatagatgcaaaagctctcaacagaataccagcaaaccgaatataatagcacattaaaagtatcatataccatgactaagtgggatttatccctggaatgtaaggatgattcaacatacacaaatcartcaatctaatataccacattaacaggatggaggataaaaatcacatgatcatttcaatagatgcaaaaaaaatttttggcaaaattcaacactcttttgtgataaaaactctcaacaaatttggtattgaaggagcttacctgaacttaataaaggccatatgtgaaaatctcacagaaaacatcacgttcaatggtaaaaaactgacagctttttctctaagagtcaaaccaaggcaagcatgcttattttcagcacttctaatcaacacagtactggaagttatagccagagtaattaagcaagaaaaatacattaaaattatacaaatcagaaatgaagaagtaaacttgtttctgttcgcag

SEQ ID NO: 322448 - DNA, 560 bp, Homo sapiens
ctgttactttagtttaaaacttgaaaacactagactcaatgacatgttttcacatgtctaatgcacataatcactgtggctgaagcacctattttgaaaacacctacatatctagyagaaagtaggtgtaaaattcaataacatgttggcatctctagttatatatttcatctaaaactattaagagcgaggtatgagcatgaacagatttgattgcataatcatcctgtgactggtgaaatttggctaaaaggtttgacaacctttggaaatatttcccttacagcggctgccctgttgtctcactgctcgactgtacctgctaagtgtcttatttgaaaaagtaaagcaaagtttattcttatttaaaaaggtaataagagtagaaaaccataaggttattcacagttgccagactgataaatgggactaaagggaaaatagatcctaagcatagaaatcaatttaggtttcctactaagacatttgctgtattataatgtcatccttgatagattgactcttttatttcttatatctaaactacctactgtttttcc

SEQ ID NO: 322449 - DNA, 594 bp, Homo sapiens
atgagtactgaagaatattgacataggtggttttaaatttatatttcttacagctcaggggatgatgatcagagacctttgtgagacagaaagggatgaacagctgagactgggaataccgcttttactycaataagactagctgtacttttattttctttatttatgtgtctggtttatagaatgacctggtctcagcataaaacgatatggaaattgcttttcatttttttcaatgttgctttcacaattcactttcccagatctcccatttctcttgccaatattgcaagaatatctcatgtacttccagtgatttttcagctgttacaacagtctcatcctttcagctgttcaaatgtttttgtctttcaacaattaaaacagtttcattgttaaaatattctgtccaatctaaatcaaaattttaatctctcagctaattcagatctccttctgcccaactcctaggatagttagactaataatggggtgaaaagcatggtgtgtcctctagcccttgttattcttcctctccactagctcattctgctctttttggctcatccattgtcagagaacaaggggagagca

SEQ ID NO: 322450 - DNA, 594 bp, Homo sapiens
atgagtactgaagaatattgacataggtggttttaaatttatatttcttacagctcaggggatgatgatcagagacctttgtgagacagaaagggatgaacagctgagactgggaataccgcttttacttcaataagactagctgtacttttattttctttatttatgtgtctggtttatagaatgacctggtctcagcataaaacgatatggaaattgcttttcatttttttcartgttgctttcacaattcactttcccagatctcccatttctcttgccaatattgcaagaatatctcatgtacttccagtgatttttcagctgttacaacagtctcatcctttcagctgttcaaatgtttttgtctttcaacaattaaaacagtttcattgttaaaatattctgtccaatctaaatcaaaattttaatctctcagctaattcagatctccttctgcccaactcctaggatagttagactaataatggggtgaaaagcatggtgtgtcctctagcccttgttattcttcctctccactagctcattctgctctttttggctcatccattgtcagagaacaaggggagagca

SEQ ID NO: 322451 - DNA, 468 bp, Homo sapiens
aaggccctggtgctagaaagcttggggactgctgtaaaagaatacccgagtttgggtaacataaataaaaggttgattcggctcacagttctgcaggctatacaagaaacatggagccagcatctgtttctgccaaaggacctcaggaagttttcatggatgtggaaggcaaaggggagcaggcatcataaaacaagagaaggagcaaaaaagtgaggggaggggtgtcatgcttttttaaataagcacttcttgcatgagctaacagaatactcactsttgaagcctccaaccattgtgtaagaagtgttattttccagaaattactgtgctatgaaaaagttaaaattagccaatgcagagagaccactagaaaagcttgagcaaggaattaaaatagtcaggctgtgatccatttgttttctgattgaggaatcagggagaagtacttccaggggaaaaaagata

SEQ ID NO: 322452 - DNA, 609 bp, Homo sapiens
tgtgatcagttaaatcaagtcaaattcttttaaatatgtttaaggaaaatactagaagttgttattttactagaaaataacaaacatatctgagtaaaaccttaaatttttataactacacaatagtagattttctatgctaatatagtaaagggatatcttgccagactttagaattttccagttatgtacamgttttcttcggagagtttctaatgtgaacttacgggaatttgtacaaaaataattcaagaatagccctctctcagcccactctctctctatatattttttaattcaacttttattatagattagagcgtacacatgcaggtatgttacctgggtagactgagtgatgctgaggcctggggtcccaacaatcccatcgtgcaggcagtaagcatagtacccaacaggtggttcttcagcccatacccaagcatcaatatattttaatcaaactcagctacttgcctcaaaatataaaacaataatacaaaaaattcagagagggtggtggtggtgagtgtggcattggtagaaaaaccttttaataatctgaatattagaaatgcatttggtttaagagacaatgaaatatttaaa

SEQ ID NO: 322453 - DNA, 482 bp, Homo sapiens
agaaatggaagaaaataaaggygaaaggcaccttaagcacttcagtcagttttagaggtgtgtagaaataatcaaattataaattaagacttacgttttgccaacactatgataaaatacataacaaataaataataataaatagaaaacaaagcacagctgaaaacatctatcatggagtatttgtgtacagataaataacacaagaagaaaaatgtttaagtaaaaaaacaaaacacatgatacatacttaaacatgtttaaatggaaagactattggaatctagtacctactgatgtgcttgatataaaatatgcactctacctcacaaagttaaacatggaattaccatatgacacagcaaatctacttctaggtatatattcaaaagaaataaaagcagggactcaaacaggtatgtgtatgccaaagttaattgcagcattatttataataggtggaaacaatccaagtgaatgga

SEQ ID NO: 322454 - DNA, 596 bp, Homo sapiens
gagatcacatggaagggcctggggcagggtgggaaggaggagagtaaagagaaaccatgtggaggagggaaagagtatacagagattgaggaagagagagatggtggctgggggagagagagagaaagtaagaatgaatgtgtaggaaaactgagttggcctcagacaatgggaaatgacctcaataaatccacaaaatcatgaaaatataatatcattgtttttacctgtaaaggtttgctgtgatttattacataggaaacagatttttgaaactgatacattcactcctttattcatccaataaatatctgttgagtatctactctatagagcctatctgtagtatctatagttctaattctcatccctttgcaccaggacttctggttatttcatacttttttccttacccttctttatgaatttatgtcacattatcttttgattcaagatccttggcwacaaacttctaaattttaaattgaagtgtctgatcctttgagttgcagcttctctgaacttttaagaggtaagacgttgtaaattcattgttactagattctgtgtatttacattgtaacttattcattatt

SEQ ID NO: 322455 - DNA, 597 bp, Homo sapiens
ttacacactgacaactcttttcataagccagcttatttaatgaaattagtaatgagagagagagaaagaggtggggagttgggaaggagggagggagggataagttgcaagggagagaacactaaataggatgcgaaagaggtaagactaacaacactgatgaatttatctttccaaatatatacaacaaaggataatcatgaacaaatamattctggcacaggatccattaatgtacatatccaagtgataaagtgcatttttttgtgtgtgagaaaacctggattcttctatccctctgttctctcttttttttcctccttctccttttcctcccacttgttcctcatcttcctcttcctcctcattctttgttccttatcccccttcttcttctctttcttcttcttttttatttctttttctttctctttattctttctttttcaagtgccttattcatgtttagaactttggcttaatcttttaaaaattatttgaaaagtaattttcctgttgcatgcaaagacttcatctagcatgaactaagctagtttgaatgctagcaacttataactgctatgaaacaaatgactc

SEQ ID NO: 322456 - DNA, 598 bp, Homo sapiens
tctgttctctcttttttttcctccttctccttttcctcccacttgttcctcatcttcctcttcctcctcattctttgttccttatcccccttcttcttctctttcttcttcttttttatttctttttctttctctttattctttctttttcaagtgccttattcatgtttagaactttggcttaatcttttaaaaattatttgaaaagtaattttcctgttgcatgcaaagacttcatctagcatgaactaagctagtttgaatgctagcaacttataactgctatgaaacaaatgactcacaaagcattctcctctttgaaaaatgtaaaatatactgtaatagttwagcagtcttcaactgctgaatttaaattcacattttggattcattctgccgtagctgataagagtctgaggataaaggtgttgtgaggagtattcaatggcagttttggacagactgtaatgttatcaactccagcaatattctgtcatctgccttggcagcaggaaaagcaaagatctatctcacaacaacaacaacaacaaaaaagcagcagtaaaccaaaataaatgacaaaaaaaactactcagaa

SEQ ID NO: 322457 - DNA, 507 bp, Homo sapiens
ggataaaggtgttgtgaggagtattcaatggcagttttggacagactgtaatgttatcaactccagcaatattctgtcatctgccttggcagcaggaaaagcaaagatctatctcacaacaacaacaacaacaaaaaagcagcagtaaaccaaaataaatgacaaaaaaaactactcagaaagtcttgaatgtcattggccttgtctgggaccctgctatggggtcctgttatattatactccactaacaacagacaatttcagaaatgttaaaagaaaaaaaaaacatttttagccttgacaatggtcaaarttgtaagaaatatcagcaggatgacgatatccctattgatatggcatggattatgtaggatgatgatgtgagtagaaaagtcagcagcttctcaccctaagtccttattttctaaatgcacagtgtcagggcagaaatctttgatagatcagtttttaactttgaaatttcattgtcaacagaaagggcttaat

SEQ ID NO: 322458 - DNA, 611 bp, Homo sapiens
tataagaacatccccttccctaaatcaaatctacasgttccccatcagtatcttatacaatgtttgcctggggcagtcatttgtcatcctattgggaaaccttgatctgaaattctcccccaattttaagtagactttctaacagtagtgctatttttattctctttaaagcattatgtcctggtgggttttttaacctttatctgcaggtaaagaatatataggtttcagtatttcaacagtgggtcgatgccagatattcttgacctgtcaaattgtacttttgacatgatgatatgagataaatgggcattctaattctaaaacctctacttattaaacaaaacatcataattacctccacttttttcttaatatgcatcagccaacattcctttcaaagcttccctttcagttcctttattagttttatttttattctgaactcctttccgtttgtctgacacactcaaataataatataaaacatcttacttatatccagaaggataggacatcttttacaatgctacttagagaagatatgacagctgccttcctcacaatgcaaagctctcagtgtgactctaaaacaagtgttaccagcgtct

SEQ ID NO: 322459 - DNA, 576 bp, Homo sapiens
catttgtcatcctattgggaaaccttgatctgaaattctcccccaattttaagtagactttctaacagtagtgctatttttattctctttaaagcattatgtcctggtgggttttttaacctttatctgcaggtaaagaatatataggtttcagtatttcaacagtgggtcratgccagatattcttgacctgtcaaattgtacttttgacatgatgatatgagataaatgggcattctaattctaaaacctctacttattaaacaaaacatcataattacctccacttttttcttaatatgcatcagccaacattcctttcaaagcttccctttcagttcctttattagttttatttttattctgaactcctttccgtttgtctgacacactcaaataataatataaaacatcttacttatatccagaaggataggacatcttttacaatgctacttagagaagatatgacagctgccttcctcacaatgcaaagctctcagtgtgactctaaaacaagtgttaccagcgtctgcattaaacacataaaagtatcatttgataattacatatagt

SEQ ID NO: 322460 - DNA, 606 bp, Homo sapiens
ggcattctaattctaaaacctctacttattaaacaaaacatcataattacctccacttttttcttaatatgcatcagccaacattcctttcaaagcttccctttcagttcctttattagttttatttttattctgaactcctttccgtttgtctgacacactcaaataataatataaaacatcttacttatatccagaaggataggacatcttttacaatgctacttagagaagatatgacagctgccttcctcacaatgcaaagctctcagtgtgactctaaaacaagtgttaccagcgtctgcattaaacacataaaagtatcatttgataattacatatagtgatacaattaattaattggktcattagcaatgtcttaaaaatacttatttcttcaatgttaaaataggaacaagtcagtaataatcatttgaaaataagtattaaagggttgtacttttggctatgactgagtgatttatgatcaggaaatatgctctccaaaaacaactataaagttgtaccaaatggacagaaacaaatatttcagcacaccagaacttaactaaagttgtagagaagactgaaaagtgtttgttttta

SEQ ID NO: 322461 - DNA, 491 bp, Homo sapiens
tcaactgttgctgatgtcttccaagaaaactgtactttttaatctagggttcccccaagctgaaaaactctttttataccagaacaatgtcatactatgtcataatttgttactgtagtggcagtgtccaaagtctcttaagaagaatttcttccgcaatttcctctttctcttctctctccagaaaggatcacagttaatgcattgaccagataaaagaagagaagmcatgccattatttttctactcatcctttttgctatttaaaaaattcccatgcacataaacttgtgaaaaaaaggctaagaatatttgccatttaaaattgggaaccaattttgactttggctaaagacacggtgatatttgctaacggtagattagctttattatttcttacctttcagcacatatcttctaaggaaataattaccatattgtgaacaaaatattttctatatatttatataatttttattgtttatcttcat

SEQ ID NO: 322462 - DNA, 534 bp, Homo sapiens
tactgaagtaagtgatacaagaagaaaatatttagtgtcaatagaaatcaccctctaaataaattaaataaatgtgtttctgatcatgaaaactccttaggtctagtcatagattctttattcatttacatttaatgaaaagaaacttataaaatgactgtattaatactcattttagaaatgagaaaattgaggtccagaaaggtyaatggacaaaaacagttagtagtagaatttgtttcaagatctccctattccatgttgtcttcaagcatctttcatggctaaatgttgttgaactcatccaaaatattaccggaagacctgttaataaagtaaagctaaatttattaggtcttattgcagtcaggaagcacactattttgacagtgtctcaaaaggggagaaagaagagcttttccatttggtaagcggattaatgcacatctttctaggtgttgaacttattaggattgggcaaagtttgtgatataatagcttaggattggtggacacaatgaagtaactatttta

SEQ ID NO: 322463 - DNA, 621 bp, Homo sapiens
tcaaactaacttaaacaaaagacaatgcattttgatgcaattaaagtcaaacctaagtgtagaatacctttaggcaaagcgtttcaaattgttatcacattgtttctctctctctctctctctcacacacacacacaaacacacacacacacacaccacaacctatataacaaggaaggggggatcaagtaatcgatagttctagtaaaaccccatagattagaagaggggtagatattcacagtggtatgttatcagacaaaagcaatatgtgttaactagagctactctgcaagatactgccttagatacttagcacgagttagaggggttaaaggggtgattagccaatagaaaaataggtatgacacrttctttcttgaaggcatataaaagctgataatttagttagtaaaataagagatattcacaaataactataatacaaagtaaaatatagtaaggctattatagaatatttgtggcagcctttgaagagtagtgggtggctaatgttgttcctggttccttctgcttcaaggctatttctgtagtatcttctgtattgatttcctcttttatacattttatttccttttgtgtatctctcactgctagcta

SEQ ID NO: 322464 - DNA, 577 bp, Homo sapiens
tattttctaaaattgagtgtttaataaattgacattgtggaaaatacaagaaatattttagttcagcatatatagaatggcctaagcagagaagacaccttgaagtcaaagataatatgcaaaatttcctaaaatgtttttaaattcacatatagtgttcaaattaaaacacacaatcatttttctgtatattactcattttgtgtacacatgtatggtaattcacaaataccagttttgcttatataaataatcaaatttccatctacttttgtggtgttttcacatctcagacaagcatatcttgatatatgtgtgaaagaagctaaagtgctttttaaatttagtacatctttgtgtattttgtgtattatttaaataattaccttgaaattaattaatgcstaagacctttatgaaaaataataaaattatgcatacaatttgaaaaagtctccaaaattactaaaacatgaatgattccagtacctggtaagaatatatatcagtttttatattgtttctaattttctttatctgaagagatgactaaaaaggcacagcgtagtactaactg

SEQ ID NO: 322465 - DNA, 584 bp, Homo sapiens
aatagacttcttttctggatattttcacagggccaaggctttgttcagtgactttatttgaagctgatttcttgtcttgaatttcacargaaaggattttagggaagtatttttggtgtggaagctttagggtgtgatccagtaggtggcacttaggtgtactggtgagttggtaaactcttgctcagttgtgtggctcccctatattttctcacagtttcagccatgttttctctcaatgctctcaaagtgtgggttcctctcctccttgagtgctgcctgtagatcatggtttggtgcttcttggctgcccactgcccaccttggaggagaaagggaccttagtagtcattgtggccaaaggtcttttgcttgtctcctggagtttccacctaagagagataaatgtccataatcactcagtccaatcagtccaaaatggaaagcctgtgctgtgggcccaagccagggattccctgtctggtgatgagttgtggtttggggggacagtgagtgggacccatgggagagtgactggcctcctctccttgggtcaactgcagcttgttaagggtatggataag

SEQ ID NO: 322466 - DNA, 559 bp, Homo sapiens
ttacattatattatttcactcatttgaaaggcaaaaataggaaacgatattatatagacagaaaacatactagtgggtgcttagaactgtgaaggagtgttggggagagctagtgggtatgacgttagtttttgaaatgatgacagtgttgtaaaattgcctatggtaaccattgcacatatctctaaacacactaaaaacaattgaattgtataatttaaatatgtgagatatacgatatgtcaattatatmttaaaaaactgaaaaaaaataatgactattactaacatatatgttttgctgttctgaatccagagtttcccacaaaagctaattactccacttacaatgagaaacttcacacttgacataaatatgtgtaagacaggtgaagaaagggagtcccttgggtataatgtagcttattaataataaatgaaagtatcttcacccaacatgtatatagttagaaagcaaaattttcattatgaaataaaagagatggaagatgttaagaaagaacctataattttcagtcttatatttgaattaggatta

SEQ ID NO: 322467 - DNA, 565 bp, Homo sapiens
gagttcctcatgcaggctgcctgcatctaaacttgatgctgttagcggggcactgtgggagccagaacagcctcaccaactgcatgggaactgggtgagaycttttgctactggctatcccccacttccctggagaactatacagcacagcagattattattaactatataatcttctctggaacctaatcccattgacccgagaatcacaacaccatcccccacaatggtcatagcaagccctgcccaaggagagttcagacctgcctaaccctgcccctacctgatggtttttttctacccaccctggtagccaaacacaaaatacatatactcttgggagttttgtggccccgcacattgcctgagaaaccagaatacctactctggccaacttagggcaagtttatattacattgctaataccagacctggtgttctcttgaaagtaccacctcctggctggaggccaatcatctcaggccattatagcaactcaagacagaataatcctgctcccaggaaaaagaaaacaatgactaataccaccagctgcaacatcctg

SEQ ID NO: 322468 - DNA, 407 bp, Homo sapiens
gtaaacttgtcatctgactggagataaatatacaaaatatacaaaaacgtaaccgttgatagccaaaaaaactaaacaattcaatttaaaaatgggcaaatgggctgagcatggtggcttacgcctagaatcccagcactttgggaggccgaagtgggcagatcactcgaggtcaggagtttaagaccagactggccaaygtggtgaaatcctgtctctactaaaaatacaaaaattagctgggcatggtggcacatgtctgtaatcccagctgttgaggatgctgaggcaggagaattgcttgaacctgggaggcagaggttacagcgaactaagaccatgcatggcactccagcctgggcaacaaagcaagactctgtctcaaaaaaattaaaaaaagaaaaaac

SEQ ID NO: 322469 - DNA, 509 bp, Homo sapiens
tacagtccagtacactttccaggcatatcatttgaacaaatttcactatattgatgttaaaaagttttcttcaaatacaaatggtactttgtacactaagaggtagatcttttccaaatatacacggaragcattaatggcaagtcttaaaaaatactcacataaaccactaagaaaaaagaggccacaaaagtgatttgacaatatttagtaaaaaagatgttaataccctgaaacttgtaattgccttctcagttgtaataccataaattttagacatgtatgtgtatatcatgctaccatttataaaaactttcaaaatatgtgatgccatactgtatatcttctgagacacaaaactataaactattttttaaaaagacacctgatgatagaaactaccttcaggtataccattgcctgtaggcaggagaggggaaaacgctgcacagagaaaacatttctacttattagtaatgttttttcctctatgtttgccattggtacta

SEQ ID NO: 322470 - DNA, 518 bp, Homo sapiens
taaaaattgtacagtccagtacactttccaggcatatcatttgaacaaatttcactatattgatgttaaaaagttttcttcaaatacaaatggtactttgtacactaagaggtagatcttttccaaatatacacggagagcattaatggcaagtcttaaaaaatactcacataaaccactaagaaaaaagaggccacaaaagtgatttgacaatatttagtaaaaaagatgttaataccctgaaactkgtaattgccttctcagttgtaataccataaattttagacatgtatgtgtatatcatgctaccatttataaaaactttcaaaatatgtgatgccatactgtatatcttctgagacacaaaactataaactattttttaaaaagacacctgatgatagaaactaccttcaggtataccattgcctgtaggcaggagaggggaaaacgctgcacagagaaaacatttctacttattagtaatgttttttcctctatgtttgccattggtacta

SEQ ID NO: 322471 - DNA, 533 bp, Homo sapiens
agtatagcaagagtgaacttgctcaagtttccaataagttcctcatctccatctgagactacctcagtctggacttcattttccatatcactatcagcatgttggtcaaaacctttcattcaacaaggctttaggaagttctaaacttctgcacatcttcctgtcttcttctgagccttccaaactattcaaacctctacctgttacccagttccaaagttgattccacattttcaggttatttttatagtagtacccaactctgccagtagtaattctctgtgttactcagttctcacactgggtaatttataaacaaaagagatttgattgactcacagttctgcatggctggcgaggcctcaggaaacttacaattatggaggaaggaaacaggaagcaaggcaattttacatggcagcaggagagagagagtgcccacagagaaaacctgccagtcttaaaaccctcagatctcytaagagctccttcattatcatgagaatactatgggggaaaccacacccgtgatc

SEQ ID NO: 322472 - DNA, 509 bp, Homo sapiens
tacagtccagtacactttccaggcatatcatttgaacaaatttcactatattgatgttaaaaagttttcttcaaatacaaatggtactttgtacactaagaggtagatcttttccaaatatacacggagagcattaatggcaagtcttaaaaaatactcacataaaccactaagaaaaaagaggccacaaaagtgatttgacaatatttagtaaaaaagatgttaataccctgaaacttgtaattgccttctcagttgtaataccataaattttagacatgtatgtgtatatcatgctaccatttataaaaactttcaaaatatgtgatgccatactgtatatcttctgagacacaaaactataaactattttttaaaaagacacctgatgatagaaactaccttcargtataccattgcctgtaggcaggagaggggaaaacgctgcacagagaaaacatttctacttattagtaatgttttttcctctatgtttgccattggtacta

SEQ ID NO: 322473 - DNA, 521 bp, Homo sapiens
aatgagtaactgcatgtcaatgaattacttagataaagtgaaaaatttgttagagaaatctagcataaaaactgggccaggcttgatggctcatgcctgtaatccagcattttgggagcctggagtgggagcattgcttgaggacaaagtctgagaccaatccaggaaacacagcaagtctctataaaaatatttttaaaaacagagaagcaatactataaaatctaaaaaaactcttatctacttttttaaaataggctattattaagaactttccctcaaatgaaactctagcgcaagatggcttcagcaatgaaaatgattaaggaagggaaaacaccaatcctacataactaggtcaattggattcctacgtggaaaaataaagcataatgcraaacaaaccgaagtaaattccacaaggattgtagatatgaatgaaaaaggtaaaatagtctcttaatggtactataaaaaaacatttatatgactccttttcctcctcccaccccaaccaagtg

SEQ ID NO: 322474 - DNA, 589 bp, Homo sapiens
ttgcgttacattttcttcaaattgtgcacatgaaatacatactacttacatagtctcaaaaacaaatagttataggaatcaataatacatacctcctgcagtaattttacatttctaacattctcatctgattctttatgataaaaataaaatcttttttgttgtgagttctctatgcactgtaattacattgacaccttactgtagatggcacattttacaagttgaaagtacacagaatacgttttctctttccatttctaaaccttctagtgtttctattcatgtggtgaaatacattttcaaagcaaaatttgcctatcagcctcagttaagaggagtctatggaagtgagagagacagaggaccagttggaaaaaaaaaaaaaaagaatatgctattattttcctttatctttgaaaataacttggaaagtattttaaygtcaatgttaaaatattaacattaggaatattgttaaaggataaagaaaatattttagtattaaaaatcataggtgatatatattttgttttggacgacagaacattttcatatggaaagcagtggttactaggtgaggtgtgga

SEQ ID NO: 322475 - DNA, 575 bp, Homo sapiens
atattttatctagcaaactcatctatatagcacatcagtatgcataccttttctatgctgtgggtggaaaagtgattttagaaagtaaaatgttaacttgtgcagtatttactgtatggacctaggaaaagtcaaataaacaattatttcagaagtgactgctaaccatatctagagatccaggcttcaaagaaaataatagtttctgaatggttgcattgtcttttgatttgctgaattatttgctgtctttattttgccttcacttttgaaagacaattttgatgaatataaaattctargttgcattttttttctttctttcaacaacatttatttcactttactttcttcatctttgcatggtttttgatgagaaaacttctgcaatttttattgcttgttactgtttgggtaagatgttttctctatctccttccatcctagtcatgcttctttcaggattctgtttgcatttggttttatgcaatttgagtgtgctatgccttcatgtagattttttttggtgttcattctccttggtgtacttcctggatctgtagtttactatctgt

SEQ ID NO: 322476 - DNA, 575 bp, Homo sapiens
atattttatctagcaaactcatctatatagcacatcagtatgcataccttttctatgctgtgggtggaaaagtgattttagaaagtaaaatgttaacttgtgcagtatttactgtatggacctaggaaaagtcaaataaacaattatttcagaagtgactgctaaccatatctagagatccaggcttcaaagaaaataatagtttctgaatggttgcattgtcttttgatttgctgaattatttgctgtctttattttgccttcacttttgaaagacaattttgatgaatataaaattctaggttgcattttttttctttctttcaacaacatttatttcactttactttcttcatctttgcatggtttttgatgagaaaacttctgcaatttttattgcttgttactgtttgggtaagatgttttctctatctccttccatcctagtcatgcttctttcargattctgtttgcatttggttttatgcaatttgagtgtgctatgccttcatgtagattttttttggtgttcattctccttggtgtacttcctggatctgtagtttactatctgt

SEQ ID NO: 322477 - DNA, 548 bp, Homo sapiens
gaagcaacagaccaagccatctagcctagatgtgtagtaggctatgccatgaaggtgtgtgtgtacactctatgatgctcccacaatgatgacatcacctaacaacacatttctcagaacataccccattgctaagtgtcacaggactgtagctggtagagcaagacctgtggaacttcagcctgggaagagagatgcttgagtcaaccaccatggccttactcctggctgcctgtctgtttggggaggggagaggctgatacagggcaggagttgagaggattgcgatgctggggtgagggcagctgtgaagtgctgtgcattgggcgagtgcagagaacttttccttsagacacacagaaatcttcccctcacaggagacaggctgagctgtctcctctctatcacagatgaagctgagctaaagtactcaatgctctgaggtcataggttacaaggaccttgcctggggaggtacaaggtgttttgagcagtgccctctgcctgggccaggggtgtgaccctgactctccaggcatcactgccag

SEQ ID NO: 322478 - DNA, 548 bp, Homo sapiens
gaagcaacagaccaagccatctagcctagatgtgtagtaggctatgccatgaaggtgtgtgtgtacactctatgatgctcccacaatgatgacatcacctaacaacacatttctcagaacataccccattgctaagtgtcacaggactgtagctggtagagcaagacctgtggaacttcagcctgggaagagagatgcttgagtcaaccaccatggccttactcctggctgcctgtctgtttggggaggggagaggctgatacagggcaggagttgagaggattgcgatgctggggtgagggcagctgtgaagtgctgtgcattgggcgagtgcagagaacttttccttgagacacacagaaatcttcccctcacaggagacaggctgagctgtctcctctctatcacagatgaagctgagctaaagtactcaatgctctgaggtcatrggttacaaggaccttgcctggggaggtacaaggtgttttgagcagtgccctctgcctgggccaggggtgtgaccctgactctccaggcatcactgccag

SEQ ID NO: 322479 - DNA, 609 bp, Homo sapiens
agcatattgtcatgatgtcaactgggaggcagtacagcagttaggagcttgggttctggagctagaacaaggtttctcaacctcagcactactcacatttgaagccagattattctttgttagggaggctcatcccgtgcctcataggctgattagcagcatcctggcctctgcccactagacgccggtcacatttcccagtcatggcaamcaaaaatatctctaggcattgctaaatgtcccctggaggacaaaatctcttacgtttgagaggcactgagctgaaatgtctttttgaatccagatgatctaattttctgtgcctcaactttctggtaaaaggagacagataataaatctcgtaattttgttaggaagattacatgagttaatagttttaaagcaagtacaatagcacctggaatatattaagtgcttaataaatatcacaaacattagttatcattattcatgagtgagaaaactgacagtcagagaggtcagtacaccctcccctggctgcccagtaagctagtaagcagcagagtctggcttcaggcagaaatctgacttctaagttcatgcgctctctgtcttaccagggacttg

SEQ ID NO: 322480 - DNA, 609 bp, Homo sapiens
agcatattgtcatgatgtcaactgggaggcagtacagcagttaggagcttgggttctggagctagaacaaggtttctcaacctcagcactactcacatttgaagccagattattctttgttagggaggctcatcccgtgcctcataggctgattagcagcatcctggcctctgcccactagacgccggtcacatttcccagtcatggcaaccaaaaatatctctaggcattgctaaatgtcccctggaggacaaaatctcttacgtttgagaggcactgagctgaaatgtctttttgaatccagatkatctaattttctgtgcctcaactttctggtaaaaggagacagataataaatctcgtaattttgttaggaagattacatgagttaatagttttaaagcaagtacaatagcacctggaatatattaagtgcttaataaatatcacaaacattagttatcattattcatgagtgagaaaactgacagtcagagaggtcagtacaccctcccctggctgcccagtaagctagtaagcagcagagtctggcttcaggcagaaatctgacttctaagttcatgcgctctctgtcttaccagggacttg

SEQ ID NO: 322481 - DNA, 609 bp, Homo sapiens
agcatattgtcatgatgtcaactgggaggcagtacagcagttaggagcttgggttctggagctagaacaaggtttctcaacctcagcactactcacatttgaagccagattattctttgttagggaggctcatcccgtgcctcataggctgattagcagcatcctggcctctgcccactagacgccggtcacatttcccagtcatggcaaccaaaaatatctctaggcattgctaaatgtcccctggaggacaaaatctcttacgtttgagaggcactgagctgaaatgtctttttgaatccagatgatctaattttctgtgcctcaactttctggtaaaaggagacagataataaatctcgtaattttgttaggaagattacatgagttaatagttttaaagcaagtacaatagcrcctggaatatattaagtgcttaataaatatcacaaacattagttatcattattcatgagtgagaaaactgacagtcagagaggtcagtacaccctcccctggctgcccagtaagctagtaagcagcagagtctggcttcaggcagaaatctgacttctaagttcatgcgctctctgtcttaccagggacttg

SEQ ID NO: 322482 - DNA, 596 bp, Homo sapiens
tctcagggctgaggttttgcaagatttgaacaaaggagggtgatagggtgtgttagcaagcctccgagatgacctgccatggtccttgtcttctggtattcatgcccttgtgtgattttcycctctcccacactgagtatggatagcctttaggactacttagatattatgaagacaatgatatatgactttcaaaactagatcctaaaagacatagtgactttcaccttcccttttcttggctcactgtctctgggcaaagtcagccaccataccatgaggacactcaacaagtcctatggaaagacccacatgacaaggaactaaggctccctgccaaaaaccagggctaactctccaggcatgtgagtgagtcaacctggaagtgaacccccccagccccagtatgatctttagataactatactcatgagatacctacaggcagaatcacccaactaagccagcctggtttcttgatctacaaatgctgtgtgagataacaaattcttcttattttaaactgctaaattttttgtttaatttgttacacagcaatagataactcataccaaaggacaggatattttcaaggg

SEQ ID NO: 322483 - DNA, 537 bp, Homo sapiens
gaagtgctgagcagaagaataaaagacaagccatgcagaagcaaaacaaagccaaaggcgctcctttgctgactgcgggtggattcactgactctgagacgccatgtggctctgcctggratcgaggctcttgagaaagaatgccctagttggaggagcgtgtctgggatcacatcagcccatccatctgtttgtcctcccaactagatccgtctctgccctcctctagccccgagaggctgccttccacatgggcatcactgggctccagctcctttgccagtgcctacatttgggctcagccaatggaagcaggcaccagctggatatcagaggctgagaagtgagagagatcagagccctgcctctatggcctctctggccacgtgtctggcactggcttccttcctctaggctacagctcctcccaaaggcccctccttcactgcctcagtttcacttagcatctgcaaaaattatttcatcttcttggcccttcaggctaagctttccttatgacttcgcacggtggttagt

SEQ ID NO: 322484 - DNA, 537 bp, Homo sapiens
gaagtgctgagcagaagaataaaagacaagccatgcagaagcaaaacaaagccaaaggcgctcctttgctgactgcgggtggattcactgactctgagacgccatgtggctctgcctggaatcgaggctcttgagaaagaatgccctagttggaggagcgtgtctgggatcacatcagcccatccatctgtttgtcctcccaactagatcygtctctgccctcctctagccccgagaggctgccttccacatgggcatcactgggctccagctcctttgccagtgcctacatttgggctcagccaatggaagcaggcaccagctggatatcagaggctgagaagtgagagagatcagagccctgcctctatggcctctctggccacgtgtctggcactggcttccttcctctaggctacagctcctcccaaaggcccctccttcactgcctcagtttcacttagcatctgcaaaaattatttcatcttcttggcccttcaggctaagctttccttatgacttcgcacggtggttagt

SEQ ID NO: 322485 - DNA, 537 bp, Homo sapiens
gaagtgctgagcagaagaataaaagacaagccatgcagaagcaaaacaaagccaaaggcgctcctttgctgactgcgggtggattcactgactctgagacgccatgtggctctgcctggaatcgaggctcttgagaaagaatgccctagttggaggagcgtgtctgggatcacatcagcccatccatctgtttgtcctcccaactagatccgtctctgccctcctctagccccgagaggctgccttccacatgggcatcactgggctccagctcctttgccagtgcctacattygggctcagccaatggaagcaggcaccagctggatatcagaggctgagaagtgagagagatcagagccctgcctctatggcctctctggccacgtgtctggcactggcttccttcctctaggctacagctcctcccaaaggcccctccttcactgcctcagtttcacttagcatctgcaaaaattatttcatcttcttggcccttcaggctaagctttccttatgacttcgcacggtggttagt

SEQ ID NO: 322486 - DNA, 609 bp, Homo sapiens
accccaacatttggcaactaaatcacatttcttaagctaaattaaatttcttaagctactgacacaatttctagtattttcttttttgtaaacaaaaacggaagttggggggttacaaactcaaaagtcctcaggaggcaaggcagagaatatcagcatggattgaccagacctaagaccaaaagtagtgacagggatgatgacaaagtaaagtcaagctgtcccatctaaakatgttaaatgattaaaaatgctggattggccaaacaaaacctatttgtgaggaagggtctgctgctgggctgttggctttggaccccaatctatctttaggaaacgaggtggagactggagccatatcagagactgagaatggcaatagagcatggacatggatttccacattttgaactgatttaattcaatcgcatttccgaaaagtaagtgtgagccacaagagcccttcaggtgaggctgaaatataggcaatctaactcgtggtcatagaggacaagctccagaacaacttgctgggctctaaatcacatctatatccctcatctaagctcagtgcccaacatctctgtgcttttcgtgttctctgttctc

SEQ ID NO: 322487 - DNA, 566 bp, Homo sapiens
agtttcatagggaagtgaccaatttttttttctctttgcattgggaggatatccagaaacccttcaaaaacattacaagggcatkaccctactacagttatagtaactatataattctaatttatttgtgtagttgtttgttgaatatgtatctcttttgctagagtcttggtcatcatcatatcctaagaccaagaaagtcttggtcatgattacgtccccaattcccatcaggcctagcttctggcacaaaatagacaatcagtcattcaattaataattacagtctatgacagggaccagagacagacacccacacaagatcctgtcatgccatatttccagccacccacccctgctcactgggttgtagagtaccagtcagaacaccattagtcttttcattcctgcccaccactctcctgccttcccaaagaagtcccccagatggagttctgccagcatcaaccaactggatattctttgtttgcgttacagaggagactacaaaaattttaattgtgttttcagaggcaatctcatgaatagggttgccagatttagca

SEQ ID NO: 322488 - DNA, 566 bp, Homo sapiens
agtttcatagggaagtgaccaatttttttttctctttgcattgggaggatatccagaaacccttcaaaaacattacaagggcatgmccctactacagttatagtaactatataattctaatttatttgtgtagttgtttgttgaatatgtatctcttttgctagagtcttggtcatcatcatatcctaagaccaagaaagtcttggtcatgattacgtccccaattcccatcaggcctagcttctggcacaaaatagacaatcagtcattcaattaataattacagtctatgacagggaccagagacagacacccacacaagatcctgtcatgccatatttccagccacccacccctgctcactgggttgtagagtaccagtcagaacaccattagtcttttcattcctgcccaccactctcctgccttcccaaagaagtcccccagatggagttctgccagcatcaaccaactggatattctttgtttgcgttacagaggagactacaaaaattttaattgtgttttcagaggcaatctcatgaatagggttgccagatttagca

SEQ ID NO: 322489 - DNA, 596 bp, Homo sapiens
taaaaatattataaataaagataatattaagatgaaaagcaaaaattggagacctttgctgtcacaactgtttggtgttaaagcttcaaatatttctggctgccatcttctctcaacgtttcctaatcagtgcaagactgtgcttgctttgaggctggcttgtaactggcttcactagtgactcagaacaccacgatcactttccccttgattcaaaattaaatgcaatcctttcaaatccagagataaataatccaactgaatatgtatacccagttcaaaggcaagagagataactgaatgactgcgtatgtctccagaggtaacaggaagtagaatttgccttatccaaaatcytaagtcaaaactagaaaaatgttgttactgtcctctaaagaaccagccattctacatgacgtagatattagaatcatagaatttcaggtcaagaggagctttggggatgatggaaataaaatgtttctaatgcatctttcaaattagtttgggaaactctctaccacgccccttctaggagagctagcacacacattggcacattaaaggttctgagaagtctaaggataataacaata

SEQ ID NO: 322490 - DNA, 538 bp, Homo sapiens
tggcttcactagtgactcagaacaccacgatcactttccccttgattcaaaattaaatgcaatcctttcaaatccagagataaataatccaactgaatatgtatacccagttcaaaggcaagagagataactgaatgactgcgtatgtctccagaggtaacaggaagtagaatttgccttatccaaaatcctaagtcaaaactagaaaaatgttgttactgtcctctaaagaaccagccattctacatgacgtagatattagaatcatagaatttcaggtcaagaggagctttggggatgatggaaataaaatgtttctaatgcatctttcaaattastttgggaaactctctaccacgccccttctaggagagctagcacacacattggcacattaaaggttctgagaagtctaaggataataacaataatctgtttaatttgctttgcaattgtttccctaattggatcacagcatgctttaattattaaccccctacacccatcctttggaacaaataccctgcagacttcacct

SEQ ID NO: 322491 - DNA, 634 bp, Homo sapiens
tggtttgaataagctttaaaagaggaatgatgccaggttcagtggctcatgcctgtaatccaagcactttgggaaaacgaggtgagaagatcactttaggtcaggagttcgagaccagcctggtcaacatggtgaaaccccatttctactaaaaatataaaaattagctgggcatggtgatgcatgcctgtagtcccagctatctgggaggctgagatatgaaaatcgcttgaatccaggaggcagaggttgcagtgagccgagattgcaccactgcactccagcctgggggacagagcaagactccatctcaggaaataaataaakaaagaaacaaacaaacaaacaaacaaaagaggaatgagattagtgatggaaggctaaagcgtttttgactttcagagccactaacagggtcagtactgtgcagctcagtcagaatgcgtgtgttgactttctgtcagtgcctctgactattagagaaataggcgcttgggattgagaggatagaggcagacgaagcacagtcatgtgccacataccatttccaaggacagaccacatctatgactgcagtcccataagattataatggaatcaaaatattcttattgccttgtgtttaccatactat

SEQ ID NO: 322492 - DNA, 634 bp, Homo sapiens
tggtttgaataagctttaaaagaggaatgatgccaggttcagtggctcatgcctgtaatccaagcactttgggaaaacgaggtgagaagatcactttaggtcaggagttcgagaccagcctggtcaacatggtgaaaccccatttctactaaaaatataaaaattagctgggcatggtgatgcatgcctgtagtcccagctatctgggaggctgagatatgaaaatcgcttgaatccaggaggcagaggttgcagtgagccgagattgcaccactgcactccagcctgggggacagagcaagactccatctcaggaaataaataaataaagaaacaaacaaacaaacaaacaaaagaggaatgagattagtgatggaaggctaaagcgtttttgactttcagagccactaacagggtcagtactgtgcagctcagtcagaatgcgtgtgttgactttctgtcagtgcctctgactattagagaaataggcscttgggattgagaggatagaggcagacgaagcacagtcatgtgccacataccatttccaaggacagaccacatctatgactgcagtcccataagattataatggaatcaaaatattcttattgccttgtgtttaccatactat

SEQ ID NO: 322493 - DNA, 473 bp, Homo sapiens
gcacatcaataagcatgagactgcagatatctctccaatatattgatttcctttcttatgaatatatacctagctagatgattgctagataatatagtagttctagttttagtttttygagggacctccatactgttttccacagtggctgtactaatttatttgatacattcccactaaaagtgtagaagggttcccttttccccacagcctcaccagcatttgtcattgcctgtcttttggataaaagccactttaactggagtgagatgatatctcattgtagttttgatttgcacttctttcatattcagtgttgttgagcacctttttatatacctgtttgccatttatatgtcttcttttgaaaaatgtgtattcagatgttttgcccatttttaaatcagattattagattttttcttattgagttgtttgagctccttatatattctggttattaatcacacatg

SEQ ID NO: 322494 - DNA, 656 bp, Homo sapiens
gtatgttgtttcttttctctagctgcctttaggatcatttctttatcattggcttttgggaatttgattactaagtaccttgaggtagtcttatgtgggtttaatctgcttgctyttctataaccttcttgtacttgaatattccctaggtttggaaagttatctgttattatctctttgattaaatattctgacatgatatatctctctacttccactttaagaccaagaaatcttagatttgcctttttaaggctattttctacatctcataggtgtacatcattctttcttattatttttccttttctctcctctgattatataaattcaaatagcctgtcttcaagtttactaatttttcttctgcttgatccattctgagagactctaatgcattcttcactgcatcacttgaatttcacctccagaatttctgctttttttaaaaaaaatttaatctctttgttaaattgattaattaggattctgaattccttttctatgctatcttgaatatcatcaagcttccctaaaacagctattttgaattctctgtctaatgttcacatatctctgtcactctgagatctgccactggtgtcttctttagtttgtttggtgaggtcacgttttcctgtattgccttgatgctt

SEQ ID NO: 322495 - DNA, 656 bp, Homo sapiens
gtatgttgtttcttttctctagctgcctttaggatcatttctttatcattggcttttgggaatttgattactaagtaccttgaggtagtcttatgtgggtttaatctgcttgctcttctakaaccttcttgtacttgaatattccctaggtttggaaagttatctgttattatctctttgattaaatattctgacatgatatatctctctacttccactttaagaccaagaaatcttagatttgcctttttaaggctattttctacatctcataggtgtacatcattctttcttattatttttccttttctctcctctgattatataaattcaaatagcctgtcttcaagtttactaatttttcttctgcttgatccattctgagagactctaatgcattcttcactgcatcacttgaatttcacctccagaatttctgctttttttaaaaaaaatttaatctctttgttaaattgattaattaggattctgaattccttttctatgctatcttgaatatcatcaagcttccctaaaacagctattttgaattctctgtctaatgttcacatatctctgtcactctgagatctgccactggtgtcttctttagtttgtttggtgaggtcacgttttcctgtattgccttgatgctt

SEQ ID NO: 322496 - DNA, 656 bp, Homo sapiens
gtatgttgtttcttttctctagctgcctttaggatcatttctttatcattggcttttgggaatttgattactaagtaccttgaggtagtcttatgtgggtttaatctgcttgctcttctataaccttcttgtacttgaatattccctaggtttggaaagttatctgttattatctctttgattaaatattctgacatgatatatctctctacttccactttaagaccaagaaatcttagatttgcctttttaaggctattttctacatctcataggtgtacatcattctttcttattatttttccttttctctcctcygattatataaattcaaatagcctgtcttcaagtttactaatttttcttctgcttgatccattctgagagactctaatgcattcttcactgcatcacttgaatttcacctccagaatttctgctttttttaaaaaaaatttaatctctttgttaaattgattaattaggattctgaattccttttctatgctatcttgaatatcatcaagcttccctaaaacagctattttgaattctctgtctaatgttcacatatctctgtcactctgagatctgccactggtgtcttctttagtttgtttggtgaggtcacgttttcctgtattgccttgatgctt

SEQ ID NO: 322497 - DNA, 646 bp, Homo sapiens
atcttttcttaatacaattaggttcattttcaaacataccaaactctttttagttacatatgttcttccatatctactgcttggaacacaatgaaatgttttcaacttccttcttcttattcttctcatccacttttaacgagcaatctctagcctcaatttaattcttactataaaattccgtatctcttgaaattctttttggtactgtaatgttggccaagtccccttgatatccatttctgccattctcctccatattacttacattcattacacttaagtataattaacttttgaattatttgtctttatatctgaaattaaattttgtgtgcctgtatccccagtattagtgcttcagttttctcatcattaaagtgaagatttaattgtattcctaggattgcctgaaaattaagtgaaatcacacttagccaagtgctgatattactgccatgatgtattgaatgaattaaatgtaactctacccaattactataattataaatttgatacttaacatcatttagttatgatatrtgcaataactattttggttatgtttaaatatttgtaaattataaaggtagctatccatagaagttgcaaatgtagtaaatgattcctttttaatgtacaatag

SEQ ID NO: 322498 - DNA, 609 bp, Homo sapiens
tgttctcactaatatgtgggagctaagctatgaggatgcaaaggcaaaaaaatgatgcaatggactttggggacttgggggaaagaatgggagggaggcgagggataaaagactacaaatatggtgcggcatatactgcccgggtaatgggtgcaccaaaatctcacaaatcaccactaaataacgtacttaggcaactaaataccacctgtaccctaaaagcttatggaaaaataaaataaaaaattaaaattaaaacatagaatttacagctatttacatatgaatcatacataaaaattgactcttattttaacaggcattgatcttccaccttttcacgtctttcagaactaaatggcttagttatttcatataactgtatccaaagaagtttcctaacttaactctttctagctatgttcatgttgcatactaaaatctgaaattattgagtgaatatgaaaaagaattttatttacaatgatgayaaataggatttttatagtatagcatttgtataagtttggcttgtaaaagtctctgaattatggaatacatggcaaacaatagtaggaattagtcttttgttacattttaaagagctac

SEQ ID NO: 322499 - DNA, 530 bp, Homo sapiens
tcaggaaaaaaaccaggattgtctactctccccagtagagtgcaacattgtactaaaggttagagccagcgcacttaaacaagtaaaagaaataaaatrcacatgttagaaagaagtaaaactatctctgcatattgatgccatgatcttgtacacagataagcctaaggaatctttactaagatactagtataatttaaaaagggggagaagatggctgactagaagcaacttttgtgtgctgctgtcatggagagaagaaaaaacggtgaatggacagtagttcttcaagtggaacaaccaggtggatacattgggattcatcaaggaaacagtgtgaccaacagggaatggagaagagtgagataatacagctgccccccccaggagtggcatggagccaggggactccttcaaccacaggtaaatggtgagtgagtgaggccacagggacccacacttttgccatgggcttctgcatccctgggcccagaacattctttgtaagccctacaactgaggcctccaga

SEQ ID NO: 322500 - DNA, 569 bp, Homo sapiens
tgtactaaaggttagagccagcgcacttaaacaagtaaaagaaataaaatgcacatgttagaaagaagtaaaactatctctgcatattgatgccatgatcttgtacacagataagcctaaggaatctttactaagatactagtatratttaaaaagggggagaagatggctgactagaagcaacttttgtgtgctgctgtcatggagagaagaaaaaacggtgaatggacagtagttcttcaagtggaacaaccaggtggatacattgggattcatcaaggaaacagtgtgaccaacagggaatggagaagagtgagataatacagctgccccccccaggagtggcatggagccaggggactccttcaaccacaggtaaatggtgagtgagtgaggccacagggacccacacttttgccatgggcttctgcatccctgggcccagaacattctttgtaagccctacaactgaggcctccagactgacaaagagagctacatggaatccagaggtggcactcaggctcgtatggagttccaggagccttggatccccaggcatccccatg

SEQ ID NO: 322501 - DNA, 530 bp, Homo sapiens
tcaggaaaaaaaccaggattgtctactctccccagtagagtgcaacattgtactaaaggttagagccagcgcacttaaacaagtaaaagaaataaaatgcacatgttagaaagaagtaaaactatctctgcatattgatgccatgatcttgtacacagataagcctaaggaatctttactaagatactagtataatttaaaaagggggagaagatggctgactagaagcaacttttgtgtgctgctgtcatggagagaagaaaaaacggtgaatggacagtagttcttcaagtggaacaaccaggtggatacattgggattcatcaaggaaacagtgtgaccaacagggaatggagaagagtgagataatacagctgccycccccaggagtggcatggagccaggggactccttcaaccacaggtaaatggtgagtgagtgaggccacagggacccacacttttgccatgggcttctgcatccctgggcccagaacattctttgtaagccctacaactgaggcctccaga

SEQ ID NO: 322502 - DNA, 538 bp, Homo sapiens
acagagagaggagcccaggctctcttccctgtgagcccctaccacccagtgtttaccaagcaagatcaccagctctagacctcagaacagctgtcctacacccagctgagcattcccacttctggtggctctgtgtttccctgaagaagggtctccaagagacaatcaacagccccccagacactgtcacagcagcagttttgtccctgctgcctctgcactggagaagaaacaaagagcctgagggctttagtctcactttcagcacaacacagtcaccatatggagagaagcccaatctcttttccctgtgagccctaaaccatctgctcttcatcaagtggggctctcacctcaggycagaggtgcagccattgactatctggctgaacattaccagtagcagcatttctgcatttctctgaggtagagctctaagagtcaactgaaagccccgctgccattggctctgcagtggtactgcccttgctgccttgaaggtacaaaactcactcataatataagcacacagaaaaat

SEQ ID NO: 322503 - DNA, 538 bp, Homo sapiens
acagagagaggagcccaggctctcttccctgtgagcccctaccacccagtgtttaccaagcaagatcaccagctctagacctcagaacagctgtcctacacccagctgagcattcccacttctggtggctctgtgtttccctgaagaagggtctccaagagacaatcaacagccccccagacactgtcacagcagcagttttgtccctgctgcctctgcactggagaagaaacaaagagcctgagggctttagtctcactttcagcacaacacagtcaccatatggagagaagcccaatctcttttccctgtgagccctaaaccatctgctcttcatcaagtggggctctcacctcaggtcasaggtgcagccattgactatctggctgaacattaccagtagcagcatttctgcatttctctgaggtagagctctaagagtcaactgaaagccccgctgccattggctctgcagtggtactgcccttgctgccttgaaggtacaaaactcactcataatataagcacacagaaaaat

SEQ ID NO: 322504 - DNA, 578 bp, Homo sapiens
cagatggactttttttctttttttcttttttctcaagcaaatagaaaactgttaagcatgaagtgtagtgtaaracttttaatttatttagtactttaatcacactaaacatttatggattacaaattcaaacaaataatatgctgctttatattagaattttgaagtctgagattattaaaggcctgtacatgttactataattctgtagttataattatataacattacatatagcatatatattatatgtaactagttaattatatatgtagatatgtagatacacagagaaagagagagacaaaagaaagaaaaaatattaacatttatcatgatgactaaaagatcaaaagctaacacaatcccattagatttaccaatgaagacattcattttttaaacaaaaaaaccctaatatgttctcctgatttagtggaaagtttacttggttgcgtgtatctttagtggaattttattttgttttgaagatctcccattaacagtcatattccaaatattttaaaaatattaaacaagggaaaaatttttgtgggtggctcttaaggctgctagta

SEQ ID NO: 322505 - DNA, 578 bp, Homo sapiens
cagatggactttttttctttttttcttttttctcaagcaaatagaaaactgttaagcatgaagtgtagtgtaaaacttttaatttatttagtactttaatcacactaaacatttatggattacaaattcaaacaaataatatgctgctttatattagaattttgaagtctgagattattaaaggcctgtacatgttactataattctgtagttataattatataacattacatatagmatatatattatatgtaactagttaattatatatgtagatatgtagatacacagagaaagagagagacaaaagaaagaaaaaatattaacatttatcatgatgactaaaagatcaaaagctaacacaatcccattagatttaccaatgaagacattcattttttaaacaaaaaaaccctaatatgttctcctgatttagtggaaagtttacttggttgcgtgtatctttagtggaattttattttgttttgaagatctcccattaacagtcatattccaaatattttaaaaatattaaacaagggaaaaatttttgtgggtggctcttaaggctgctagta

SEQ ID NO: 322506 - DNA, 553 bp, Homo sapiens
tacatgcattcagaatatcctcttcctctctcttttctgaatggttctggttcttttgtccagaggatataaaaaagaagtaataaaaaagcaaaataaggacagaaaagcaaattttgtttacatttaaaaagaaagtcctatttttttttcaaaaagaggatatctgcaaggcaaaaggaaggaattgaagacagagtgraatttcaggtagataacgacttagagtagcccctaggatgagaggggttttaagggaaaagctgctcaaagttgaattttagaatatggtgctgtgtataaggatgaaattccactgctttccaggcttcctgctcaaaaaacttgcataaaatttacattatttttgaagccttttgcagttgaatgaatgctctttgaatgtgacacactgttaaaatgaatcttaaagagagaacaagacaagcagaataatttacgttatacaaataaaaccattttgaagagttatatctcccatgaccacaaaggcatgttgcagagtctcccctgcaacagcatgatcaccctg

SEQ ID NO: 322507 - DNA, 588 bp, Homo sapiens
aatatatccatcatgatgtattataaagaaccaacagatggaaaacattgtagtgaattttatgctgaaaataactagcataaaattatatttttatatcaaaaatatatgaactgacatgtttatttttgtgggatgcacwattttttagagtaggtatattaaacaagtgggagaaaaaattgtggaagggaatatgaaattttcctttttattttacatatttaatatatttgaattgtaaacatttatttatgtttttaaaataatgtgattatctggagagaggacttttatcatttcataattttacatctaaaaatttttaataataaaatttttatgaaatctgtgattttggtaaaaattaaaaatggtgttagtttattaacaaccttgtgatttgtcttaatcttcttgaaaaacacataaaactattatttccttgtattatacaaaacaggatcatcgtatacggcctttgagttctagttataatttcttacctatagcaaaatctatgttatctgcttcatgagagactacttgtacagagtttaaaagacaaaatagtctgggtgtggtggc

SEQ ID NO: 322508 - DNA, 588 bp, Homo sapiens
aatatatccatcatgatgtattataaagaaccaacagatggaaaacattgtagtgaattttatgctgaaaataactagcataaaattatatttttatatcaaaaatatatgaactgacatgtttatttttgtgggatgcacaattttttagagtaggtatattaaacaagtgggagaaaaaattgtggaagggaatatgaaattttcctttttattttacatatttaatatatttgaattgtaaacatttatttatgtttttaaaataatgtgattatctggagagaggacttttatcatttcataattttacatctaaaaatttttaataataaaatttttatgaaatctgtgattttggtaaaaattaaaaatggtgttagtttattaacaaccttgtgatttgtcttaatcttcttgaaaaacacwtaaaactattatttccttgtattatacaaaacaggatcatcgtatacggcctttgagttctagttataatttcttacctatagcaaaatctatgttatctgcttcatgagagactacttgtacagagtttaaaagacaaaatagtctgggtgtggtggc

SEQ ID NO: 322509 - DNA, 195 bp, Homo sapiens
tgtaagtgtgtaactgagctcatcccacattcaaggggagagaaattaagcttcacctccgagagggaagtgttcattgcttccataagcttatgttattaccagtcattaataaatacattggaggctaaatacatttgaaactgtgcaaatatcttgtttctccttaaamtgtactcacaaattttagcatta

SEQ ID NO: 322510 - DNA, 595 bp, Homo sapiens
tttttatccatattttcagttctgaccaaaggtartaccatcatacttttcttacctagttcagaatggcccttataagctcaaacacataatcaagagaaaatacaaaaccttgtatgacattctatctatccctgaatgaattttgtttcttttctagttcagtcacaatcgttcttttgtatcttgaaacttaaagactaaattatatgagcaatttttagtgatgctgtttatattagataataaaggaaccatagggagaaagattaaaacattatttgttaatagatacaaaatatatatatgcatatatataagcaagaagaaaatatggataattactacaatccttgtttatgcaaatgatctcatattcatagtcggcatctgtaacttttcttttcactacccagtcctcattcccttcatcctcagccagtgggacagctagtcatggttcttttcccggggggtaagagaatcttctgcctccactgaacagtagaaaatcaatcatgataaattattccagctaatacagtaaatcccttcttttcgccaaacgcttctgtggcagaaggaatacaaaaat

SEQ ID NO: 322511 - DNA, 595 bp, Homo sapiens
tttttatccatattttcagttctgaccaaaggtaataccatcatacttttcttacctagttcagaatggcccttataagctcaaacacataatcaagagaaaatacaaaaccttgtatgacattctatctatccctgaatgaaytttgtttcttttctagttcagtcacaatcgttcttttgtatcttgaaacttaaagactaaattatatgagcaatttttagtgatgctgtttatattagataataaaggaaccatagggagaaagattaaaacattatttgttaatagatacaaaatatatatatgcatatatataagcaagaagaaaatatggataattactacaatccttgtttatgcaaatgatctcatattcatagtcggcatctgtaacttttcttttcactacccagtcctcattcccttcatcctcagccagtgggacagctagtcatggttcttttcccggggggtaagagaatcttctgcctccactgaacagtagaaaatcaatcatgataaattattccagctaatacagtaaatcccttcttttcgccaaacgcttctgtggcagaaggaatacaaaaat

SEQ ID NO: 322512 - DNA, 595 bp, Homo sapiens
tttttatccatattttcagttctgaccaaaggtaataccatcatacttttcttacctagttcagaatggcccttataagctcaaacacataatcaagagaaaatacaaaaccttgtatgacattctatctatccctgaatgaattttgtttcttttctagttcagtcacaatcgttcttttgtatcttgaaacttaaagactaaattatatgagcaatttttagtgatgctgtttatattagataataaaggaaccatagggagaaagattaaaacattatttgttaatagatacaaaatatatatatgcatatatataagcaagaagaaaatatggataattactacaatccttgtttatgcaaatgatctcatattcatagtcggcatctgtaacttttcttttcactacccagtcctcattcccttcatcctcagccagtgggacagctagtcatggttcttttcccggggggtaagagaatcttctgcctccactgaacagtagaaaatcaatcatgataaattattccagctaatacagtaaatcccttcttttcgccaaacrcttctgtggcagaaggaatacaaaaat

SEQ ID NO: 322513 - DNA, 618 bp, Homo sapiens
aaaatagtgtagtctatcttgaatcaaattgcaataaaagaacaaaagataatacttgcctataatagacatttactcaggcattttaaaaatgcaaaaattagaatgtttgggggacttaaaaattattgaagatgggataaaagtcaacactgcttataagtacctgaacatggagagtattgccaataaattcaggtggacagcatatgaatgaatgtgtatcacataacttctactatgtggtctgtttctcttgttttattctaaagatttacatggacttggatcttttaagatggtttaaaaaataatattacattgttttcctagtctaataaccaactttaagaaacgcgatggaagggtaagaactttctatrtcttctcatacttctaaagtcaattggatttttattatgacgtgatattttagttaacagtatgctaaaaataaaattgactgaattacaagattttccccaacattcaagtctctttttgttaaaatattatgaaatgaattcagtaaatattttctatttccaatagcttaagtgagagatgagtgcaactactttaaaaaaaaaaaattaaaactaaactgggctgaagacc

SEQ ID NO: 322514 - DNA, 618 bp, Homo sapiens
aaaatagtgtagtctatcttgaatcaaattgcaataaaagaacaaaagataatacttgcctataatagacatttactcaggcattttaaaaatgcaaaaattagaatgtttgggggacttaaaaattattgaagatgggataaaagtcaacactgcttataagtacctgaacatggagagtattgccaataaattcaggtggacagcatatgaatgaatgtgtatcacataacttctactatgtggtctgtttctcttgttttattctaaagatttacatggacttggatcttttaagatggtttaaaaaataatattacattgttttcctagtctaataaccaactttaagaaacgcgatggaagggtaagaactttctatgtcttctcatacttctaaagtcaattggatttytattatgacgtgatattttagttaacagtatgctaaaaataaaattgactgaattacaagattttccccaacattcaagtctctttttgttaaaatattatgaaatgaattcagtaaatattttctatttccaatagcttaagtgagagatgagtgcaactactttaaaaaaaaaaaattaaaactaaactgggctgaagacc

SEQ ID NO: 322515 - DNA, 594 bp, Homo sapiens
agggaacattacaaaaattaaaataggcatatatgatgaagccaaaaacagaagttccagctttataattcccaaaatcatgaactttggaagaaaaagcaattaatggagaattaaaaattcgaaacaggtgaggaaaaagctcgtgatgtaaaatatgtactcagaaaaatgttgtaattctgcagagatactaggagaaatatatgaaatctgatttgaagtatagggatatagcaaggtttattatgtttctrataatccatgcagaaagtaagatacgatttgaagaaggaattttttcagaagacaatatcaataattttctagaactggcttaattgattatccaattaaacaacgataacaacatctacaaagggtcccaagcagggtaaacaaaaatctaatccatactaagacacattgtatcaaaattactgctagtaagtaaaaaatatatttttaaagtcattagtgacaaataacaaattacttgcaaaggaataatacatgtatcacaggtcccagaagatagtaaaataagagactcaaagtgctgaagagaaactactatgaatataaaaattgcca

SEQ ID NO: 322516 - DNA, 594 bp, Homo sapiens
agggaacattacaaaaattaaaataggcatatatgatgaagccaaaaacagaagttccagctttataattcccaaaatcatgaactttggaagaaaaagcaattaatggagaattaaaaattcgaaacaggtgaggaaaaagctcgtgatgtaaaatatgtactcagaaaaatgttgtaattctgcagagatactaggagaaatatatgaaatctgatttgaagtatagggatatagcaaggtttattatgtttctgataatccatgcagaaagtaagatacgatttgaagaaggaattttttcagaakacaatatcaataattttctagaactggcttaattgattatccaattaaacaacgataacaacatctacaaagggtcccaagcagggtaaacaaaaatctaatccatactaagacacattgtatcaaaattactgctagtaagtaaaaaatatatttttaaagtcattagtgacaaataacaaattacttgcaaaggaataatacatgtatcacaggtcccagaagatagtaaaataagagactcaaagtgctgaagagaaactactatgaatataaaaattgcca

SEQ ID NO: 322517 - DNA, 511 bp, Homo sapiens
ggaaaagcaccataatttctcacacccagccagactcctcctggaattggcagcctgtcccccaagcttcaggtcaaccctggcttgaaagtggggtctcactgggcacccacccctttcttcctcccaggaatctgtctgctccccaccatcaacatgttgtctgtgrcacccagcctgtccatgctgaggggtgcctacaggttcatgctgagccaccctcaggcccccagcctcactcccatgcttgccagcgtccaaagtccatagggcaccagggtggcagggtgggtgctggcatgtcagtgccaccctgagtcgtggctcacccggtcgggtcaagacagtgcccgggtttggctacaacttagctccacaccagtgcaggtgcttgaagcggggacaggccagggagctggagcagacacttcggagtctgtggtgggaggggggatttctgtgttcctgagaactcagaaatgcctgggtccagagcacggctgggtggctg

SEQ ID NO: 322518 - DNA, 558 bp, Homo sapiens
tatgtctacgtaagttaataaaagtactgtagttcaagttgaaggatgtagcaaactctgtatttagagtctaacattgctatataaatatgtataataaaaaaagataaaaatagatgaaagactgtaaatacatgtaaatgttaaactcaataatccataaaataagataatgaagtaagtaaaaacacaaaaatcaatacaaaagatcaaaactaattacctgaaaatattaacaaaataagtaaacttcttataagaaaacaataaaattgagggaggtattcatatatagtactaggaagggaaaaaggaaacatagttagagagataatataggtcaccagaagagaataatattatgcacaattttatgccaatagttttttgaaaatatagacattatgaaaatttattaatttattttaaaaaagataatctgaccataccaacagaacaggcaatgaacaaayaatccaaaatctttgataaacaacggcaaaaaagctggttttatataattgaaaagttgagtttactaaatatttatgaaaataa

SEQ ID NO: 322519 - DNA, 504 bp, Homo sapiens
atcaggagtggattggtgagggagcgtgaggcccctggaggctacagaaattgggaaagtccatatcctcttgagagttttctccatgaaccccatcaagtactcacaaaatttattggataaagccataggaaaaggtcctttatggtgtagacctaaagaacagatgcwatggtaggatgggcctgcaattccatttgtatttttctccactgtctcccttctgaaacataagctttaacatgtggaggtaaaaccaacaaacattgtcaccattagggcactgaagtaaacatactgcatctgaatgaagaaaatcaatcaatcaaacaaacaaacaaaaatttcccctggaggagggataaaaatacaatgtgggctgggaaatacacctgcaaaggggtagaagcactgagaatagatagctgagacacaggggctttgtgcttgtccaagataaaacttaaattagaaaagagtgaattctcttctcaacaccaggct

SEQ ID NO: 322520 - DNA, 504 bp, Homo sapiens
atcaggagtggattggtgagggagcgtgaggcccctggaggctacagaaattgggaaagtccatatcctcttgagagttttctccatgaaccccatcaagtactcacaaaatttattggataaagccataggaaaaggtcctttatggtgtagacctaaagaacagatgctatggtaggatgggcmtgcaattccatttgtatttttctccactgtctcccttctgaaacataagctttaacatgtggaggtaaaaccaacaaacattgtcaccattagggcactgaagtaaacatactgcatctgaatgaagaaaatcaatcaatcaaacaaacaaacaaaaatttcccctggaggagggataaaaatacaatgtgggctgggaaatacacctgcaaaggggtagaagcactgagaatagatagctgagacacaggggctttgtgcttgtccaagataaaacttaaattagaaaagagtgaattctcttctcaacaccaggct

SEQ ID NO: 322521 - DNA, 570 bp, Homo sapiens
acatacatacttacccgtattaggaaaagaatttaagggcaatttgatactgtgaatattgcaaacaagagagcaagtaaacttccacttacagctatataaaactggctggtaggacctgatgctctaaaaaggaaaatgttattaaaattcaagtagaatcagaaattgatattccagtaagaaggggaaagaaaacaatataaacttcattttttttgctatttttctctagaggcatttagcataaggtcctgaagaggtaaaggtcctgaagagctatgtagaaaaccataactaagagaatatggaatacaacagtgttttcttccatcagagctaaagaacaaatgttagagttcaggatcatgaaagtagacagaaattgagtttayaagatcacagagaaaactgaaatgcaaatgagccttacatcttgcatcactctttccttccagggtatttttgttctttgaacacagcatgaaaaaaggctaataactaagcaaataagtagtggctaagcgtctccgaggctaaaacagctttggcaggttattatggagatca

SEQ ID NO: 322522 - DNA, 570 bp, Homo sapiens
acatacatacttacccgtattaggaaaagaatttaagggcaatttgatactgtgaatattgcaaacaagagagcaagtaaacttccacttacagctatataaaactggctggtaggacctgatgctctaaaaaggaaaatgttattaaaattcaagtagaatcagaaattgatattccagtaagaaggggaaagaaaacaatataaacttcattttttttgctatttttctctagaggcatttagcataaggtcctgaagaggtaaaggtcctgaagagctatgtagaaaaccataactaagagaatatggaatacaacagtgttttcttccatcagagctaaagaacaaatgttagagttcaggatcatgaaagtagacagaaattgagtttataagatcacagagaaaactgaaatgcaaatgagccttacatcttgcatcactctttccttccagggtatttttgttctttgaacacagcakgaaaaaaggctaataactaagcaaataagtagtggctaagcgtctccgaggctaaaacagctttggcaggttattatggagatca

SEQ ID NO: 322523 - DNA, 544 bp, Homo sapiens
atctaaagttataattgccactctttgtcttaacaaaatgaatctgctaaaaatgaggarccaatttaaaaaatctatttcagtgactatcatgacatattatattctagaaagagctcaaagtagtgaaatgagaactaatatgatgtatattaggtaatgttatttttcttttaaactctgagttgccaaaaactaaatgtgacgcttgtaacagatataaaatttcactgtagtaatttcatttttcatttctatagatactgagtgtcaactcctccaccttcaaaacttcctctcattctggtaataaaggaaaaaataaaaatgtgtcaaactagataaatcataaaattgtttctagttattttttaaatatatattgctacattttaagatattttacatttatttgtgtaattaactatatacctatgtaaaatacaaactgaacaaaatgattgtgaaaattgcttttccaagtttcataattactcttttcaagttatccaaccacaattgatagcactgattattattatag

SEQ ID NO: 322524 - DNA, 544 bp, Homo sapiens
atctaaagttataattgccactctttgtcttaacaaaatgaatctgctaaaaatgaggaaccaatttaaaaaatctatttcagtgactatcatracatattatattctagaaagagctcaaagtagtgaaatgagaactaatatgatgtatattaggtaatgttatttttcttttaaactctgagttgccaaaaactaaatgtgacgcttgtaacagatataaaatttcactgtagtaatttcatttttcatttctatagatactgagtgtcaactcctccaccttcaaaacttcctctcattctggtaataaaggaaaaaataaaaatgtgtcaaactagataaatcataaaattgtttctagttattttttaaatatatattgctacattttaagatattttacatttatttgtgtaattaactatatacctatgtaaaatacaaactgaacaaaatgattgtgaaaattgcttttccaagtttcataattactcttttcaagttatccaaccacaattgatagcactgattattattatag

SEQ ID NO: 322525 - DNA, 544 bp, Homo sapiens
atctaaagttataattgccactctttgtcttaacaaaatgaatctgctaaaaatgaggaaccaatttaaaaaatctatttcagtgactatcatgacatattatattctagaaagagctcaaagtagtgaaatgagaactaatatgatgtatattaggtaatgttatttttcttttaaactctgagttgccaaaaactaaatgtgacgcttgtaacagatataaaatttcactgtagtaatttcatttttcatttctatagatactgagtgtcaactcctccaccttcaaaacttcctctcattctggtaataaaggaaaaaataaaaatgtgtcaaactagataaatcataaaattgtttctagttattttttaaatatatattgctacattttaagatattttacatttatttgtgtaattaactatatacctatgtaaaatacaaactgaacaaaatgattgtgaaaattgcttttccaagtttcataattactcttttcaagttatccaaccacarttgatagcactgattattattatag

SEQ ID NO: 322526 - DNA, 497 bp, Homo sapiens
tgaatttaaaagatggtttgggttctggaaaaaaaaagagagacaccatatgtatttggtatttacagtggctgcatttaggattatttcacagataccttaagacatataactagttcattgactttttattgtcttaagtttgaaaaaaaataagtcaaccttgagaatgactcagtgaaaatagtcaatagattgctgaccatcttctatctttttttctcaagcaaatcaagaaaaaacaaacwacaatgataaaacctgtcattgagctcccaagcaaaacaaaaagcaagcaaaatattatgtagcaaagtaacaaaatgattactttattttagagtatatttaatatgatttcacatgaaagaaaacacattttaataaaatagttattactaattttttcaactacaaaaagcactgaagtactctttccacaagaacagaataaataaggtgatatttatattattttcctatgtgacaaatgcttt

SEQ ID NO: 322527 - DNA, 535 bp, Homo sapiens
ttatagttaagatggtttttgtttcctctctaagacctatttgcctatttctaggtcttgaaaatattagaagctttgtttagttttaatttttaagtccagctatataagccacctcaagttactttttgtgtaaggtgtaaagtaggggttgagggccgggcgctgtggctcatgcctgtaatcctagcaytttgggaggccaaggcgggtggatcacctgaggtcaagagcttgagaccagcctggccaacatggcgaaacctcgtctctactaaaagtacaaaaattagctgggcatggtggcgggtgcctgtaaccccagctactcgcgaggctgaggcaggagaatcgcttgaacctaggaggcagaggttgcagtgagccgagatcatacccttgtactccagcctgggcaaaagagcaaaaactccgactccaaaaaaaaaaaaaaaaaaaaaaaaagagggggattgaggttcaacttttctcatgcattatccaaataaaaataccatatatgccttggtctgtt

SEQ ID NO: 322528 - DNA, 592 bp, Homo sapiens
aaactaaaaatagaactgccatatgatccagcagttctactgttgagtatacctccagaagaaaggaaataagtrtatagaagatatgtctgcactaccacgtttattgcagaactattcacaatagccaagcaatggaatcaacccaagtgtctatcaatggatgaatggataaagaaaatgtagtatgtatacacaatggaatattatttagctataaacaaggataaaatcttgtcatttgcagggacatgggtggaactgggtgtcatgttaagtgaaataagccaggtacagaaagacaaatactgcatgttctcgttattacgtgaaaactgaaaaagtagatttcatggaggtaaagcatagaatggtggtcatcagaggctgggaagggaatgggagagggatgaagagaaattggttaatggatacaaaaatacagttaaatagaaagaatacattctagtatttaatagtaaagtggagaaattatgtaggtttcaaaattgctaatgagaataattgtaatgttcccaacacaaagcaaagataaattcttgacctgatggatattctaattatcctgatt

SEQ ID NO: 322529 - DNA, 592 bp, Homo sapiens
aaactaaaaatagaactgccatatgatccagcagttctactgttgagtatacctccagaagaaaggaaataagtgtatagaagatatgtctgcactaccacgtttattgcagaactattcacaatagccaagcaatggaatcaacccaagtgtctatcaatggatgaatggataaagaaaatgtagtatgtatacacaatggaatattatttagctataaacaaggataaaatcttgtcatttgcagggacatgggtggaactgggtgtcatgttaagtgaaataagccaggtacagaaagacaaatactgcatgttctcgttattacgtgaaaactgaaaaagtagatttyatggaggtaaagcatagaatggtggtcatcagaggctgggaagggaatgggagagggatgaagagaaattggttaatggatacaaaaatacagttaaatagaaagaatacattctagtatttaatagtaaagtggagaaattatgtaggtttcaaaattgctaatgagaataattgtaatgttcccaacacaaagcaaagataaattcttgacctgatggatattctaattatcctgatt

SEQ ID NO: 322530 - DNA, 610 bp, Homo sapiens
tcatttttttaccagactatatatatctgtctttacttatttaagggatataggaaagttaaataaatgtgtaccgcttccaaaaatagatgcttaatctagtagaggataattaaatggaaataaatatattttttaaagtttggatttgtttagcaaatatctacttatatattaatgatgaaatatgacacttgtaaattatgaaataccttaagcattattattttaatttcaaactatatattcattactatatagaaattttatataaatacatgattctacacataaaaattgatagctatagaacttagtacctaaatacatcaacaatattagttactattgctttaatttagtatattacttgtttggttttgccaaaatttccatttcattatgtgatgaatagcaataaatasggtttgctctcaaaggtccattcttataaaaaatggaaactactttcctgcgcgtgttcacatttgtaactaaattcactcctgatttggcatgtgcttttccaatatgagcaattccaaatccccataatgaaagtatggaataatatagagacttgaatagattgaataaaagacttataagt

SEQ ID NO: 322531 - DNA, 533 bp, Homo sapiens
tgcagcttgagatgtgggagtgagcatggcttgcctgtcagcttgaggaraagtcttttggttctggcttgaggagaggaacaatggtcttctgagatttagagagagttgaataaattatcaattgttaagattttctcttttcttctatacctcagcacccgaacaagtccatcctatactaggagcagcagcagagagaatgggtggctgcagtatctaagactcagagggagcgaaatgttctctccagacgatggtggcctcaagaggatgggaaaatctctgctgttattgttccttttctttccctctctttgttctcttgcctcttagcctcatacataggcacagatgtgggaagtttatgacagatctaggtaaatgaaggcccagctctctggccaaaggatgaaaaaaaagaaatcgcagagaaccacagtgtacaacgggcatcagagagagagtcaaacctgggaaattaagcccagaaagttgtttatgaactcctgagctcaaccctgaagtttgca

SEQ ID NO: 322532 - DNA, 610 bp, Homo sapiens
tcatttttttaccagactatatatatctgtctttacttatttaagggatataggaaagttaaataaatgtgtaccgcttccaaaaatagatgcttaatctagtagaggataattaaatggaaataaatatattttttaaagtttggatttgtttagcaaatatctacttatatattaatgatgaaatatgacacttgtaaattatgaaataccttaagcattattattttaatttcaaactatatattcattactatatagaaattttatataaatacatgattctacacataaaaattgatagctatagaacttagtacctaaatacatcaacaatattagttactattgctttaatttagtatattacttgtttggttttgccaaaatttccatttcattatgtgatgaatagcaataaatagggtttgctctcaaaggtccattcttataaaaaatggaaactactttcctgcgcgtgttcacatttgtaactaaattcactcctgakttggcatgtgcttttccaatatgagcaattccaaatccccataatgaaagtatggaataatatagagacttgaatagattgaataaaagacttataagt

SEQ ID NO: 322533 - DNA, 610 bp, Homo sapiens
tcatttttttaccagactatatatatctgtctttacttatttaagggatataggaaagttaaataaatgtgtaccgcttccaaaaatagatgcttaatctagtagaggataattaaatggaaataaatatattttttaaagtttggatttgtttagcaaatatctacttatatattaatgatgaaatatgacacttgtaaattatgaaataccttaagcattattattttaatttcaaactatatattcattactatatagaaattttatataaatacatgattctacacataaaaattgatagctatagaacttagtacctaaatacatcaacaatattagttactattgctttaatttagtatattacttgtttggttttgccaaaatttccatttcattatgtgatgaatagcaataaatagggtttgctctcaaaggtccattcttataaaaaatggaaactactttcctgcgcgtgttcacatttgtaactaaattcactcctgatttggcatgtgcttttccaatatgagsaattccaaatccccataatgaaagtatggaataatatagagacttgaatagattgaataaaagacttataagt

SEQ ID NO: 322534 - DNA, 610 bp, Homo sapiens
tcatttttttaccagactatatatatctgtctttacttatttaagggatataggaaagttaaataaatgtgtaccgcttccaaaaatagatgcttaatctagtagaggataattaaatggaaataaatatattttttaaagtttggatttgtttagcaaatatctacttatatattaatgatgaaatatgacacttgtaaattatgaaataccttaagcattattattttaatttcaaactatatattcattactatatagaaattttatataaatacatgattctacacataaaaattgatagctatagaacttagtacctaaatacatcaacaatattagttactattgctttaatttagtatattacttgtttggttttgccaaaatttccatttcattatgtgatgaatagcaataaatagggtttgctctcaaaggtccattcttataaaaaatggaaactactttcctgcgcgtgttcacatttgtaactaaattcactcctgatttggcatgtgcttttccaatatgagcaattccaaatscccataatgaaagtatggaataatatagagacttgaatagattgaataaaagacttataagt

SEQ ID NO: 322535 - DNA, 469 bp, Homo sapiens
cttttagcattatgtaatatttctctttatttctgaaaaattttcttgttcagaagwgtaattttctgaaattaatatagttaaaacagccctcttttggttagtgacttttatctttatccatcctctaccctaatttatctttctccatcctggtttaccttctccattttttttaccctaacttatcaatggctgagatttctactgtttctcatagaccacatatagttggatcattattctttacctaacataaaattatcttttaattagtagatttagatcattcacatttaaaatggttatttatatggttgggttcaatcggaacatattgttagtaattttttatttgttacaattcgcttttgcttcttttatttttctgcactctctggttttaacttagcatctttttaagtgatatcattttatctaatttgtggacttattgtttatattattt

SEQ ID NO: 322536 - DNA, 565 bp, Homo sapiens
tgctgcacacacccaatatatagtatggtttgtttttcctcggttatcttttagaaaaactaaaaacattttcttattagcacaaattcagtttttagtagtttttaaaacatttctagcttgatcctcttaccaatctatatgacattctggagcatctgttgcaggtaagcaagtacttggatcctttttctcctttcagaggaaagaacctcttctcgactttttcgatatttgagacaggattttgtcctgcaacctcagttttctattgggctcaagaaaggctgttaatttgcattttgtctaaatttttcttattgtaagtgtgtgggtgatgctcttcttagtgctctccatttcccarctgaaagaagtctaatttaaaataaagataaatgaacaaaatgagacaataattaagagaggcttttctaatgcaatataattcttaggagaaagggtcttgatgaatatttttttctttacttcttattaacaaagccaatgctggtaacacacacacagacacacacacacacacacacacacacacacacacaca

SEQ ID NO: 322537 - DNA, 573 bp, Homo sapiens
aacatgtataatatatataaatcaaaatgtcatttaagtggaacagaaaattgataatattatrtgaaaaattttaataaactttccttagaataaaacctcaccatttctcattttcccctctcccaagtatagaaattatcaactcttattgaatgcctattatgtttcaagctttctatggggtgctcaaattgaaagagcgacaatttccaaggacttcttagactagtagagatgacagacaactaagcaatttcagtataatttaagtattgtgtgaaagattaatatacaagcttttataatagtacatcaaatatgttcttctcatgaaaagaatgatatgattaaagccatttatggtaaattgtcatctaagctgaactgtcaagttaaataggaattggtcatgtgaaagtagttttctctccacagatggactactatatgaaataccacagaggtacaagaaacaaggcacattcaggaagttatatttatccttccatttttcttggggcatgatgttcaagaaaggaaaggacagaataaaaacttggaaaagtaagt

SEQ ID NO: 322538 - DNA, 573 bp, Homo sapiens
aacatgtataatatatataaatcaaaatgtcatttaagtggaacagaaaattgataatattatgtgaaaaattttaataaactttccttagaataaaacctcaccatttctcattttcccctctcccaagtatagaaattatcaactcttattgaatgcctattatgtttcaagctttctatggggtgctcaaattgaaagagcgacaatttccaaggacttcttagactagtagagatgacagacaactaagcaatttcagtataatttaagtattgtgtgaaagattaatatacaagcttttataatagtacatcaaatatgttcttctcatgaaaagaatgatatgattaaagccatttatggtaaattgtcatctaagctgaactgtcaagttaaataggaattggtcatgtgaaagtagttttctctccacagatggactactatatgaaataccacagaggtacaagaaacaaggcacrttcaggaagttatatttatccttccatttttcttggggcatgatgttcaagaaaggaaaggacagaataaaaacttggaaaagtaagt

SEQ ID NO: 322539 - DNA, 563 bp, Homo sapiens
ctcctcatcaattaagatatctcattttttatctccctatttccttaactcaaaaaagtagttccttcatacattaattttttaatgcaaaacagtataagattaagaaagactaaattaataaacatggcaaaatacaaagatttaggccacatagctagtatgtaatgcctggtttattatctattttatatctaaaagccatggcagtattctgtgtttttaatttttccaaattacatatmtttctcttccttactttcctagtacttattcattgaactcctccctctccaatattaaattttgtcaaaaactaaaaaatcattcaaagtggtggttttcttggttgggcattatatatatttccattaagacaggcccaaagattcaaacaggaaagaacatattaaagcattttctgttacttaagcatatctaatatttaaccaagacacattcttgaaaaggcaaggtggtgttaactagaataatacaccccataaagattaactgaacagccaactatttatagtaaccaccactattgctttctaaataca

SEQ ID NO: 322540 - DNA, 563 bp, Homo sapiens
ctcctcatcaattaagatatctcattttttatctccctatttccttaactcaaaaaagtagttccttcatacattaattttttaatgcaaaacagtataagattaagaaagactaaattaataaacatggcaaaatacaaagatttaggccacatagctagtatgtaatgcctggtttattatctattttatatctaaaagccatggcagtattctgtgtttttaatttttccaaattacatatctttctcttccttactttcctagtacttattcattgaactcctccctctcyaatattaaattttgtcaaaaactaaaaaatcattcaaagtggtggttttcttggttgggcattatatatatttccattaagacaggcccaaagattcaaacaggaaagaacatattaaagcattttctgttacttaagcatatctaatatttaaccaagacacattcttgaaaaggcaaggtggtgttaactagaataatacaccccataaagattaactgaacagccaactatttatagtaaccaccactattgctttctaaataca

SEQ ID NO: 322541 - DNA, 553 bp, Homo sapiens
tattgaatacaataacaacaagaaataaagtatggattcggacttcccagaataagctggctattttgacacaagcatatacttttcaaacatcatcaagtaactgtgtcatgatttctttttttttttttctgagacagagtctcactctgtcacccaggctggagtgcagtggcacaatctcrgctcactgcaagctctgcctcccaagttcactcaattctcctgcctcagccttccaagtactgggaccacaggggcccgccaccacacctggctaattttttgtatttttagtagagacgggttttcaccatgttagccaggatggtctcgatctcctgaactgtgtcatgatttctatatatttttagtccagtagcatatggagtactgggattagactgaataacccaaaccatgttgatcagaattgacacttaataatagaactattggtttatatctaaattccttaattattttaataataaaatatagagctttttatttatttattttttacaacttccaaaagtctccttacataggc

SEQ ID NO: 322542 - DNA, 553 bp, Homo sapiens
tattgaatacaataacaacaagaaataaagtatggattcggacttcccagaataagctggctattttgacacaagcatatacttttcaaacatcatcaagtaactgtgtcatgatttctttttttttttttctgagacagagtctcactctgtcacccaggctggagtgcagtggcacaatctcggctcactgcaagctctgcctcccaagttcactcaattctcctgcctcagccttccaagtactgggaccacaggggcccgccaccacacctggctaattttttgtatttttagtagagacgggttttcaccatgttagccaggatggtctcratctcctgaactgtgtcatgatttctatatatttttagtccagtagcatatggagtactgggattagactgaataacccaaaccatgttgatcagaattgacacttaataatagaactattggtttatatctaaattccttaattattttaataataaaatatagagctttttatttatttattttttacaacttccaaaagtctccttacataggc

SEQ ID NO: 322543 - DNA, 617 bp, Homo sapiens
ttgtacttcatgcaattacttacacttaatataccaccataactgaaatttgaactgtgctgttgggggactggtgttatttaactaatctgtagtaactaaattttgtacaaagcaaaaactacttatrtaagaataaggtgtgatatggtaaatccaatttcaatgaacacttttatgtataaaaattctttatggtaaaattatttcagttgcttgggaagtggtcacatattgaattactcatacattttttcaacaattaaaaaactattaagtgattgtaacataatttctagaaagaaaaccaatccctgccctcacagtacttacactgttgtgaaggaaacagacaataaataagataaatacgttataaaatgcagataattataacagcaaaggaaaaaataaagcagggaagtatcacatagtatcagagaggtgaataaaattttatgtagggtgatcaggaatgatttcactgagaatctagttttattgtaaagattgaagggaaactaggaattgagacttacgtacatcttatggaggagcattccctgcagagtaagcagcaaatttttagttgtgcataggcctgagtatttgaggaa

SEQ ID NO: 322544 - DNA, 474 bp, Homo sapiens
attggatgactccaaggcagattcatttagagtagaggaagtgaaagggtaagaaatagctatacagaattgctgagagtaacatatctgtaacttyagaaaagaggagctttgagaaattttcttatgccatatgcaatttatttctatgctgatctcccatccgcattcacacatcatctcccagtcacacaaacacatcacatcaacagaaaaactcaatagagatctacattgctcgttggtgattttggagtcaagtgtgttctttttcaatatgaaaacaaatttaaaatttgtcattatttttgtgcttcctttttttttttttttttttgaaatggagtctggctctgtcaccaggctggagtgcgatggcacaatctcggctcactgcaacctccactttctgggttcaagagagtctcctgcttcagcctcctgagtagggattacaggcacgtgccaccatgc

SEQ ID NO: 322545 - DNA, 556 bp, Homo sapiens
tactgctcatatttctatcagcattttggtcacaaccatttatccagtctctaagaggttctaaaattcctcttattttcctgtattcttttgagaccccccaaactcttccaacctctgcccgttacccagttccaatgcttccacattttcaagtatcgttatggcaataataacataccatataccgcacttcttgataccagttttctgtattagtttgtttgcatggctataaaggagyacctaagactgggtaatttacaaataaaagaggtttatttggctcatggttctgcaggctgtagacaaagcatagtgccagaatctgcttcttgtgtgggaatcagaaagcttacactcatggcagaaggtaaaggggagatggtgtgtcacatggtgagagagggagcaagacagagaaggaggaggtatcaggctgttctaaaccactagatctcatgtgaattcatcgtgtgagaacttactcattactgtgatatagcaccaaaccatttatgaaggagccaccccagtgccccaaacacctcccact

SEQ ID NO: 322546 - DNA, 438 bp, Homo sapiens
atctgcttcttgtgtgggaatcagaaagcttacactcatggcagaaggtaaaggggagatggtgtgtcacatggtgagagagggagcaagacagagaaggaggaggtatcaggctgttctaaaccactagatctcatgtgaattcatmgtgtgagaacttactcattactgtgatatagcaccaaaccatttatgaaggagccaccccagtgccccaaacacctcccactaggtccttctacaacattggaggtcacatttcaacatgagattagaaggcgacaaaatattcaaaccttatccatctatctatctgcctatctaatgtttacatatatgacagtccatctcactgtcttgatgaaataagatttgctgcagtattaaaaaataattctctaccctcctaatgttttcagtattactgttaaacacctt

SEQ ID NO: 322547 - DNA, 438 bp, Homo sapiens
atctgcttcttgtgtgggaatcagaaagcttacactcatggcagaaggtaaaggggagatggtgtgtcacatggtgagagagggagcaagacagagaaggaggaggtatcaggctgttctaaaccactagatctcatgtgaattcatcgtgtgagaacttactcattactgtgatatagcaccaaaccatttatgaaggagccaccccagtgccccaaacacctcccactaggtccttctacaacattggaggtcacatttcaacwtgagattagaaggcgacaaaatattcaaaccttatccatctatctatctgcctatctaatgtttacatatatgacagtccatctcactgtcttgatgaaataagatttgctgcagtattaaaaaataattctctaccctcctaatgttttcagtattactgttaaacacctt

SEQ ID NO: 322548 - DNA, 514 bp, Homo sapiens
aatatttgttatatagcagtagataaataatgcagatttttgtatctgaaagtaggaagctgccttaataaatactgaaaaatgtaggcgtggttttggatctgggtagtgagtaaaagctgtaaggattttaaggaggatatytgagaaattataaattgcattggatagatgagaaatatggactttctgtatgctggtgataactgaaaagaaagtaacatgttactggaaatggagaaagtatccttactttgcagaacaaaaagcttagcaccactattgtctacaataatgtggacagtagaaaatttaaccaaagcatttgttgtaatagttaaggatacttataaacaaagtatttatggtgtagcctagtttattcttgctgcttttagtaaaatgtgagaagagagaaagaaattgagtaaaggactttttaaaaaaatataattttttggttttaaaaattctcagaatttccaaatggtgaagacgataaaattaagaaatg

SEQ ID NO: 322549 - DNA, 514 bp, Homo sapiens
aatatttgttatatagcagtagataaataatgcagatttttgtatctgaaagtaggaagctgccttaataaatactgaaaaatgtaggcgtggttttggatctgggtagtgagtaaaagctgtaaggattttaaggaggatatctgagaaattataaattgcattggatagatgagaaatatggactttctgtatgctggtgataactgaaaagaaagtaacatgttactggaaatggagaaagtatccttactttgcagaacaaaaagcttagcaccactattgtctacaataatgtggacagtagaaaatttaaccaaagcatttgttgtaatagttaaggatacttataaacaaagtatttatggtgtagcctagtttattcttgctgcttttagtaaaatgtgagaagagagaaagaaattgagtaaaggactttttaaaaaaatataattttttggttttaaaaattctcagaatttccaaatggygaagacgataaaattaagaaatg

SEQ ID NO: 322550 - DNA, 594 bp, Homo sapiens
cagagctctgtgtctagctaaaagattgtaaacgcactaatcagcactctgtaaaaacgcaccaatcagcactctgtgcctagctaaagktttgtaaatgcaccaatcagcatgctgtaaaaacagaccaatgagcactctgtaaaatggaccaatcagcgctctgtaaaatggaccagtcagcagaatgtgggcagggccaaataagggaataaaagctggccacctgagccagcagcagcaacctgctcaggtccccttccacactgtggaagctttgttcttacgctcttcacaataagtcttgctgctgctcactctttgggtccacactacctttatgagctgtaacactcactgtgaaggtctgtggcttcactcctgaagtcagcaagaccacaaacccaccgggaggaacaaacaactccggacatgccaactctaagagctgtaacactcactgcaaaggtctgtggcctcactcctgaagtcaagcgagaccacgaacccacaggaaggaaaaaactccggacacatctgaacatttgacggagcaaactctggacacacaatctttaagaactgtcacactca

SEQ ID NO: 322551 - DNA, 594 bp, Homo sapiens
cagagctctgtgtctagctaaaagattgtaaacgcactaatcagcactctgtaaaaacgcaccaatcagcactctgtgcctagctaaaggtttgtaaatgcaccaatcagcatgctgtaaaaacagaccaatgagcactctgtaaaatggaccaatcagcgctctgtaaaatggaccagtcagcagaatgtgggcagggccaaataagggaataaaagctggccacctgagccagcagcagcaacctgctcaggtccccttccacactgtggaagctttgttcttacgctcttcacaataagtcttgctgctgctcactctttgggtccacactacctttatgagctgtaacactcactgtgaaggtctgtggcttcactcctgaagtcagcaagaccacaaacccaccgggaggaacaaacaactccggacatgccaactctaagagctgtaacactcactgcaaaggtctgtggcctcactcctgaagtcaagcgagaccacgaacccacaggaaggaaraaactccggacacatctgaacatttgacggagcaaactctggacacacaatctttaagaactgtcacactca

SEQ ID NO: 322552 - DNA, 601 bp, Homo sapiens
ggtccattttacagagcgctgattggtccattttacagagtgctgattggttcatttttacagagtgctgattggtacatttgcaaacctttagctacacacagagtgctgattggtgcgtttttacagagtgctgattggtgtgtttacaatcctttagctagacagaaaagttctccaagtccccagctgacccagatgcccagtcggcttcacctttcactattacttactgggctatgagtccttgaccgtgcaaattttgtgttccatctctgtgaccttatcatcaagcaatattgacaatggatagtgctcaataaatatatattaaataaattagtgagagaacaggtaaatatatgccctgttattagaaacaaatacaaaataacacccaacatttcttgatcttaatgaaactcccttcacctttttcttctaaatcataaacatttttatatcttttattattagtgtgttyatttcattttcacaagggttgcattttttggtaataatagggattctgcttttattttgtttctttgctatgtctttcctatacttctaatagaaaataccaaagaattttacctct

SEQ ID NO: 322553 - DNA, 512 bp, Homo sapiens
actttttaaagcataatcattaatccttgtactatattgtcataagatattgtcttattctgctaaggctgctgtaacacaataaataccttagaccgggtggcttatcaacaacaaaaatttatttctcatggttttacagactgagaaggtcaagatcaaggaccagcagatttggtctctggtgatgtctattttccggttcataagtagtgccttcttgctatgcctatatatagtggaaaagggcaaagcagccctctggggcctctttcataaaggtactaatctcattcatgtgggccccacctatgacctaatcacttcccaatggcccacctccgaatcatcacattggccattaggtgtcaatctatgaatttggggggacacaaacattgaggctacaacagcaaatgtgaataacacagcttttcaggtgcttctattcttcacagcttctatycttcacagtttctaacatattgtaacagacgaatttctatgagaga

SEQ ID NO: 322554 - DNA, 578 bp, Homo sapiens
  misc_feature (1)...(578): n = A,T,C or G
ataattgagctgaactctgaatggatagtaagaattaaataagtggagaagaaaagaatgcacaaatgctcttctgcagaaggaagcatgagttattttagaattgatcaaaagcaaggacggagcaaaaaatgaagaaattgatagaaataaggccgtgaagaaatcagccatgggaagattaataagccatgttaggaatttaaggctttgccctgaatcatagtaaatcaatgaagctttttttgtttttatttttatttatttatttatttttatttttatttatttatttttgtgacagatggagtctctctctgtcgcccaggctggagtgcagtggcgcgatctcggctcactgtaagctccacctcccagttcccgccattctcctgcctcagcctcccaagtacctgggactacaggtgcccaccacyacgcccagctaattttgtttntgtatttttagtagagacgggctttcaccgtgttagccaagatggtctcgatctctggacctcgtgatccacccgcctcggcctcccaaagtgctaggattacaggcgtgagtcaccacg

SEQ ID NO: 322555 - DNA, 564 bp, Homo sapiens
caagtgtgagctggccacttacatgtggtaactaaagctgctctcatttatattagtgatttattaatatggactcatttaatccttgtgacaatcctataagaactattataattttaaattaaaatttttaaataaaactgagacaaaaataggctgagtttttgccatgatggcaaaactgatgtcagrgctaaattttgaaccaaggaagactggaaaagggattaatattctcaatcaccatgttatgccacttctcatgaatgaggtttcttacaaacaaaatgtagattgaattaggaacctttgattaaacttttagaaaccctagcatttaaaggcaagaaggtgcactcagaaatacaactaaaaaggggaatccagaaaggtaggaagaaaactggatgtgatgtcttgaaaattaaggcagagtgttataagaagtagagattgtcaagtactccttaaagagcaagtaagataatatctaagggaaaacccaaactttgggtttagagacctgtagtttattgatgactttaatgaggcttttccttaaat

SEQ ID NO: 322556 - DNA, 564 bp, Homo sapiens
caagtgtgagctggccacttacatgtggtaactaaagctgctctcatttatattagtgatttattaatatggactcatttaatccttgtgacaatcctataagaactattataattttaaattaaaatttttaaataaaactgagacaaaaataggctgagtttttgccatgatggcaaaactgatgtcagggctaaattttgaaccaaggaagactggaaaagggattaatattctcaatcaccatgttatgccacttctcatgaatgaggtttcttacaaacaaaatgtagattgaattaggaacmtttgattaaacttttagaaaccctagcatttaaaggcaagaaggtgcactcagaaatacaactaaaaaggggaatccagaaaggtaggaagaaaactggatgtgatgtcttgaaaattaaggcagagtgttataagaagtagagattgtcaagtactccttaaagagcaagtaagataatatctaagggaaaacccaaactttgggtttagagacctgtagtttattgatgactttaatgaggcttttccttaaat

SEQ ID NO: 322557 - DNA, 622 bp, Homo sapiens
gtatgtctaaactactcagttctattcatgtagtaggtatagggtaaccatttggtgaattaggaagttaattaagcacacaytgcatacttccctaaggccatagatatattctttaaacatttagagtaaagcacatttttgtaaattaaataaccttcaatttagtgcttaaagtaaaatcatttaatatccaactacactctagtgccacacgacctctatgtcctctgaaagaggtgcaatgaatgcataaatagcctcaaccagatgcataaatagcctcaaccagaggagaagggacataaaagattggaaggaaagaaggcatcaaggtgtagtgcagacatggccaagctgagatttaaggctgtgaccctttctagtctcctctccattttagagttagaagccaccttcaggttgtaggggggacacaagccagctagctagaagactagaattcccaacttgcctggcggctaggggtggccatgtgactgagttctctccataggaatatgagattgcacatatcattttcataaaagggaattcctttccctttttatttttattttcttctctaggaagttaaaatgctagcacagtggtgacccag

SEQ ID NO: 322558 - DNA, 622 bp, Homo sapiens
gtatgtctaaactactcagttctattcatgtagtaggtatagggtaaccatttggtgaattaggaagttaattaagcacacactgcatacttccctaaggccatagatatattctttaaacatttagagtaaagcacatttttgtaaattaaataaccttcaatttagtgcttaaagtaaaatcatttaatatccaactacactctagtgccrcacgacctctatgtcctctgaaagaggtgcaatgaatgcataaatagcctcaaccagatgcataaatagcctcaaccagaggagaagggacataaaagattggaaggaaagaaggcatcaaggtgtagtgcagacatggccaagctgagatttaaggctgtgaccctttctagtctcctctccattttagagttagaagccaccttcaggttgtaggggggacacaagccagctagctagaagactagaattcccaacttgcctggcggctaggggtggccatgtgactgagttctctccataggaatatgagattgcacatatcattttcataaaagggaattcctttccctttttatttttattttcttctctaggaagttaaaatgctagcacagtggtgacccag

SEQ ID NO: 322559 - DNA, 506 bp, Homo sapiens
ggaaattaatccagacaagtggcaagtaccagctaatgaaggacattgtaccaagcaaataaatttagattttaagttatgtatgaggatgtgccataaataattttaagcagaaaataacatgatttaaattggaatttagaaagatcatccttactcaatagtaaaggatgaatagatagttcagaatctatgaagataaaagtmcctagcatagagattaataaaatctggaaacatatgatttattttatttttactctcacaatgtctctattagacagaaatatacagacatgagttatgcatatcccaatagaaaagaacagccacaacaaaaccagtgaaatggtggtagatgattttttaaatgtgtttgtttcatagtaattttccagcaaatctagcatgctgaatttaggctttatccatagcacatatccaggcaaatatctgtgtcccattcctgtcaggtatctcaccagcaatctgacagcagcaaccca

SEQ ID NO: 322560 - DNA, 542 bp, Homo sapiens
ttcaccatgttgccccaggctagtctcgaactcctcagctcagacagtctgcccacctcggcctcccaaagttctaggattacaggagtgagccatcgcacctggcctacttagtatatacattttgtatatacatcaatcagctgttcatgctaagccagctacagtcttgctaattggaagtagaaggaagaccctttgtctacccttctgctgctagattaagtatttgagtrctttcaagatttctctatgaaccagggaactggattggacagaactaaatattacttaaagacatgtcccacatctccttaaacagtattgtgtgctctatcaagacccctccccttacatgcctgtcaactctgtttcactacaaatacttgcattagattattgggtcccttcgcattttttcctctattctcatttgtttccatgtgaaacctcacaccgagtatcctatctgaagctttgagaaccactgagaaaagtggaattcagtgaagagagaaggggcaggggttgtgaacaggtct

SEQ ID NO: 322561 - DNA, 522 bp, Homo sapiens
tcctttttatttttttaatccaagacttgtaatctttgacattcttcttcttctttttttttttttttttaaccgtagcaccttgatacattactcaataaatacagttacttttttttttttaactaggaagtgagaggaaaggaamtctttcatactggtaagtctggctattagaaacaaaacttctttttttgacaatagacgctggtcaggcttacacaaaattttgcaggcatttatctagttcttacgccaaatgagttcaagaaatcattatctagaagagacttcaaatcataagttcatcatggctgataaaatccagaggtaaataaattagggttccaattccctcttctttaaaccccaccttgggcagagttataagaaaaattgccagctaactagcattgttatttttaaacagttatcatcattattacatatgtatgtacatgtattttcagtgttcgttctataagtattaactggtctctagaaggctgcattagcacagct

SEQ ID NO: 322562 - DNA, 497 bp, Homo sapiens
tgtaagtacagaaaaatcattcaataactttcctggaaaaaagaagaaaaaaaaatatggcagtaatttaacaagaaagcaggtcagaaatgttaacgtttttggatagaggataccttaataagtttgaaaattgaggtgaaagtcagtgggaaagcaagatttacattacaatgggggaaaaggcaatgtaaaaatwataaatttgaaaaggaattgaggtgttgaagagagtgatgtcagcaagatgactgaataaaagcctctggcacttgtctcctccaacaaagataaccaaaacaatcaatgaacaactacattttggtgaaaataacaaaaggagagagtcagagtacaccaaaggatttacagaaaccctatggtgcacagaaattcaagatggccacatggagactaggaggaaaccctttacctgtgccatcctgttccacagttgggatcagttcagagccaggagcgacttctccctctgggga

SEQ ID NO: 322563 - DNA, 618 bp, Homo sapiens
accaaactgaaatcttggagctgaagaattcaatgagaaaaataaaaatacataatggagagcttcaacaagagactaaatcaaacaaaagaatctctgaacttggagacacatttctaaaaattacccagtcagagtgaaaaaaaaagaaaaaaagaaaaaagagtgaggacagcctttgggacttagggaacccactaagcaaacaaacattcacaatattagaggtaaagaagaaaaagaaacaaagatagggacagaaagcttattggacaaactattgttaaaaatttcccaagtcggccaggcctggtggaccatgcctgtaatcccagcactttgggaggccgaggcrggcagatcacaaggtcaagagatagagactatcctggctaacatggtgaaaccttgtcgctactaaaaacacaaaaagtagcagggcatggtggtgtgtgcctgtagtcccagctactcaggaggctgaggcaggagaatcgcttgaacccgggaagcagaggttgcagtgagctgagatcgtgccactgcactccagctgggtgacagagcgagactccgtctcaaaaaaaaaaaaaaaaaaaattcacaagtcttgaaaga

SEQ ID NO: 322564 - DNA, 618 bp, Homo sapiens
accaaactgaaatcttggagctgaagaattcaatgagaaaaataaaaatacataatggagagcttcaacaagagactaaatcaaacaaaagaatctctgaacttggagacacatttctaaaaattacccagtcagagtgaaaaaaaaagaaaaaaagaaaaaagagtgaggacagcctttgggacttagggaacccactaagcaaacaaacattcacaatattagaggtaaagaagaaaaagaaacaaagatagggacagaaagcttattggacaaactattgttaaaaatttcccaagtcggccaggcctggtggaccatgcctgtaatcccagcactttgggaggccgaggcaggcagatcacaaggtcaagagatagagactatcctggctaacatggtgaaaccttgtcgctactaaaaacacaaaaagtagcagggcatggtggtgtgtgcctgtagtcccagctactcaggaggctgaggcaggagaatcgcttgaacccgggaagcagaggttgcagtgagctgagatcgtgccaytgcactccagctgggtgacagagcgagactccgtctcaaaaaaaaaaaaaaaaaaaattcacaagtcttgaaaga

SEQ ID NO: 322565 - DNA, 512 bp, Homo sapiens
ttataattaaactgtcaaaatcaaagaccaagagaaaattttaaaagcagcaacagaaaagtgtcaagtcatatacatgggaattcattagaatttcagtgtatttctcagcagaaatcttacaaaccagaagagaatgggatgatatatttcaagtgctaaaagaaaaaaaataatctgccagtcaagaatattatacctaggaatgctatccttcaaaagtgaaagggaaataaactctttcccagataagcaaaaattgagaaaattcaacaccactacacctgtcttacaagaaatgtccataagaatccttcaagtaaaaacaaaataatgctaattactaayatgaaaacatataaaataaaaggtaaatattttttcatatccagactactctaataccaatatggtgctctgtaaatcataaatatagagatacatagatgatagaagacagacagatagattgaaggttaaaagtcaaaatagtcaaaataatgacagctaca

SEQ ID NO: 322566 - DNA, 633 bp, Homo sapiens
gtctcttttacttaaattcgactgattggggactttgattatatctgtcaaatcccttcacagtagcacctagtataagtttgattgaataacctgaaattgaagcctagtcaggttgttgtatcataaaagctattatagttgatagatcggaaggaagaagtaggctaaagacttattttggacttatcaggttgcaggtagtactttaaatcataagattacatgatttctccaagataaaaaatatagagtgaaatatttttaaaatgtytcaatacattctgttattgaaaactaattaccacatcgtgcattacacacacacacacacacacacacacacacacacacacggtcattgctgcaaacacatgtgaaagggtagaggtaggattttaggtgtgcctcttctatttaacttatcactgcaaactcaaaaggtatgaatacagtgactgacagtctcagggtcacaaaagaacgccaccttctgaggtcactaggggaaaatatactcaggtttaaaccctctttttccacttgctgtctccaaatcaagagtccttttatgctccctatctctctcacaataccttctttgcaacttaacttcactgtattccaagacag

SEQ ID NO: 322567 - DNA, 621 bp, Homo sapiens
acaatggtatgaacgtagaaatcaataactggataattttggaaaattcaataatatatcaatatccagacagacacagagagagatttattataataaattggcttacatgatttaaaggattgtagctagcaaagcaagttcaaaatcgatcgaaattccccactctctttttcacaagttcatgcttttaatccatctagatgattaaatcaggcccatgcagtttatccagtctcttttacttaaattcgactgattggggactttgattatatctgtcaaatcccttcacagtagcacctagtataagtttgattgaataacctgaaattgaagcctagtcaggttgttgtatcataaaagctattatagttgatagatcggaaggaagaagtaggctaaagacttattttggacttatcaggttgcaggtagtactttaaatcataagattacatgatttctccaagataaaaaatatagagtgaaatatttttaaaatgtttcaatacattctgttattgaaaactaattaccacatcrtgcattacacacacacacacacacacacacacacacacacacacggtcattgctgcaaacacatgtgaaagggta

SEQ ID NO: 322568 - DNA, 633 bp, Homo sapiens
cagtgtgtggtgaaaagggattgagaagtgaattagcagtaagtagagtaggcatctcatgtggaagactcttctgagaaataagaaaatctactcaaaggaaaaataattcaaatctgagaaagaacgatgtcaaaagtctgaatgatgtgagcttatttgaatgctgagggaattttttgcgttagaaagagtaagggtagaaaagtgaagtaggattaagaaaaacaatgaactcagtaagggagtggagaaccagaagaatttggacaccttcaaccggccccttgatagtgggattatagggaaatacaatgcctcaaattgaaagatttacataggtactattgtcagggacaaaacatttaccagcrcacatgtgaaaataaaagtaaaataaaagggcttaagatgttttcttggccttaggtattatggtgataacttagattgaataatattagatcacttgcagttggaagataaacagaaaggatacaggaaacaattggaccatgtttttttatctagcatctgagtgtgaagttgtgatgttgtaattccatactctgcaccatgtttttagcctatcgtcttggttctgagctaccaaacgaaatgaaatgggccatg

SEQ ID NO: 322569 - DNA, 518 bp, Homo sapiens
gatcacttgcagttggaagataaacagaaaggatacaggaaacaattggaccatgtttttttatctagcatctgagtgtgaagttgtgatgttgtaattccatactctgcaccatgtttttagcctatcgtcttggttctgagctaccaaacgaaatgaaatgggccatggcaagaattggtcaccatattgccattgctatagcagcagagtgatgaggaaaggggaaatgtcaagatttcccaatctaataataattaccttaaaagggctctgattatcagcccagggaggtgtaacccarcaacagtttactgtattgtgcataggtttacagaatcttttggtcactctatcagggagacactgaaatactaaggacataaatcagtaagtagatttcatatatattcagatttcatgggggagaatgttctgattctaaaatcaaaaaaaagggaggaagaaagacaggaaggaaaacactaaggaggagtaaaggaaggaagatggatata

SEQ ID NO: 322570 - DNA, 531 bp, Homo sapiens
gctttgtttttatggttatttgctgcttactcattgctccatcaagtgaatatgtaacatttggtccaccaaaaatcactatagtgaatattaaggtcttcatcactgaaagcatttattttagctttgggaactcaacatccacaatcacattgcattttagctggagctatgaaacatgctgygctatatcataagaatatttctttctccaccagaataaaataggaaacaaagtagtctttgggcagctgtttcaattccacctctccccacttagcctcagacctttcattagaaggtagggcagtgatagttgcttatttctctatttcctcacatacaacttggacaagagcattggcagaaaatcataggggaatcttataaacctgaatcacccaggagggcctgtatctttcatcactaataacagacaaccatgtgtcttagcattctatccttattgctagaatttccagcatctgtgatagatttgagactttagtctatttaaaggctggaaagtca

SEQ ID NO: 322571 - DNA, 630 bp, Homo sapiens
gtattaacttaagaggttgaaacggtcagacttggaatatgaaaaaagaatgtataattttgaaagaacaaaagtgcattgaaaatacaagcacagaacatgaaacaataaaagatagaccaaaaaattgcagaaatgaaacatgtaattatttatattttaaaagttaaatggatagatttaaaaaacaaatagatgatcacatckgaagatatcaaataaactggaagacagattgaggcctaaagcctgcctgaaagaaacagagacaccaataaatgaaaaatatgaaggagagttaaagagaaatggtgagtataataaaaagtcaaaaagatctaattggatttctaccaagataagacagagagagtagagaagataaattaatagctagaaatactactgttttccaaaacggatgaaaaaatgttccaggatatttagatcaataagcataaaacatttccattaggataaaaatgttatttatagtatacattactaaatctaccaaaaccaaataaaaacagaagactttttaaagaaaacggtattaatagctcttttacaaattgtctattaggttggcctatgaaggtctcaatggccacagtgcaaacagaaaat

SEQ ID NO: 322572 - DNA, 630 bp, Homo sapiens
gtattaacttaagaggttgaaacggtcagacttggaatatgaaaaaagaatgtataattttgaaagaacaaaagtgcattgaaaatacaagcacagaacatgaaacaataaaagatagaccaaaaaattgcagaaatgaaacatgtaattatttatattttaaaagttaaatggatagatttaaaaaacaaatagatgatcacatcggaagatatcaaataaactggaagacagattgaggcctaaagcctgcctgaaagaaacagagacaccaataaatgaaaaatatgaaggagagttaaagagaaatggtgagtataataaaaagtcaaaaagatctaattggatttctaccaagataagacagagagagtagagaagataaattaatagctagaaatactactgttttccaaaacrgatgaaaaaatgttccaggatatttagatcaataagcataaaacatttccattaggataaaaatgttatttatagtatacattactaaatctaccaaaaccaaataaaaacagaagactttttaaagaaaacggtattaatagctcttttacaaattgtctattaggttggcctatgaaggtctcaatggccacagtgcaaacagaaaat

SEQ ID NO: 322573 - DNA, 393 bp, Homo sapiens
agcatcaacaccaaaaattaaacactgacaacaatataatgaagtaatctacagaccttatgcaaatttcatttattgtcctaataatagtgttcctttttctggtccaggattcaatccaggatcacasatttcattcagttatgggatttccttcgtctcctttattctaggacaagtacaccatcgttctttatcctcatgacacttcttttttacttaaccaagtgataaatttaacatcgcaagtaatgagacacccaaatagtatgtgccacctgaaatgctgccttgtgaagggcatgaatcacttttgtggtgttcttgacataaattcataatcttattaaattatcaagaaatatcaaagccaaataaataaggattttgtaa

SEQ ID NO: 322574 - DNA, 393 bp, Homo sapiens
agcatcaacaccaaaaattaaacactgacaacaatataatgaagtaatctacagaccttatgcaaatttcatttattgtcctaataatagtgttcctttttctggtccaggattcaatccaggatcacagatttcattcagttatgggatttccttcgtctcctttattctaggacaagtacaccatcgttctttatcctcatgacacttcttttttacttaaccaagtgataaatttaacatygcaagtaatgagacacccaaatagtatgtgccacctgaaatgctgccttgtgaagggcatgaatcacttttgtggtgttcttgacataaattcataatcttattaaattatcaagaaatatcaaagccaaataaataaggattttgtaa

SEQ ID NO: 322575 - DNA, 616 bp, Homo sapiens
ctatagagtaagaccctgtcttgtctcaaaaaagaaaggaaaaagaaatgtattatgtgcaaagcattacacaagwcatttggagaaatgcataagcacattcttacaggtcattttggtagaccacaaatatatgtttgaaaaaaaatcaaagaaataattcatcccaatgtatgggaagtgacaaattagaagcagaataaataggggcattgaaagttcagagatgggagggaggaatcactgtggcccatgactttctgagaatgatttaccagggaagatgggttttatttagaatccaaaggctgggtaaaattttggtaatcggcaaggaaagaggaggacattttagtgctggtgattaatgtgagtaaaggtagagatgctaggctgtgtaagaagtgtttgtgatcaggatgacggaaatttttaaaaatgtttcaaatttaaaaaataaaaagggtagagggagtaacgtccagactgctgtgggtgaaaccttgattctatcctacagaaagaggaactattaaatatttttgaaaaataaaaatgtaacaggacaaaaatggtggataaaaatcaatgggtagtaatgtggatcacaggttac

SEQ ID NO: 322576 - DNA, 617 bp, Homo sapiens
ccaaataaataaatggcactgagcctgagttcttggatttagacaaacatttccaaaatagaactattaacctgtcactgaagtgggggcaagtagcccttcttatctggcaagtattaaagaatgttggatgaatgaattttactactgctgtatctcatgggagtaaattaggctaacaaaaaaaaatgtgtgggttgattaattacttgtgtttactggcaggacattcctaagatactctaccatgtactccctcagtttatattatgttggagatgtctaatatggttttaaaatccattattcagaaatagagtgagaaagtctacatcttttatgtgccaagccatgaaagaaagtggtcattgaaaaaataaaacatcctttgtcytaggtaagtttcacataaaattctgcatgctggaattcggaattgctttgggaaccagccaggcaacaaccaaagtggggacaggacaaaataaagaaggacatgaacgtactatgtacatttaatatgtcttgagttttaactaaagtaattctgaatgcatatccactggttcatttccaaacaattttgaaaagattatttatacttcatggataatgaa

SEQ ID NO: 322577 - DNA, 617 bp, Homo sapiens
ccaaataaataaatggcactgagcctgagttcttggatttagacaaacatttccaaaatagaactattaacctgtcactgaagtgggggcaagtagcccttcttatctggcaagtattaaagaatgttggatgaatgaattttactactgctgtatctcatgggagtaaattaggctaacaaaaaaaaatgtgtgggttgattaattacttgtgtttactggcaggacattcctaagatactctaccatgtactccctcagtttatattatgttggagatgtctaatatggttttaaaatccattattcagaaatagagtgagaaagtctacatcttttatgtgccaagccatgaaagaaagtggtcattgaaaaaataaaacatcctttgtcttaggtaagtttcacataaaattctgcatgctggaattcggaattgctttgggaaccagccaggcaacaaccaaagyggggacaggacaaaataaagaaggacatgaacgtactatgtacatttaatatgtcttgagttttaactaaagtaattctgaatgcatatccactggttcatttccaaacaattttgaaaagattatttatacttcatggataatgaa

SEQ ID NO: 322578 - DNA, 617 bp, Homo sapiens
ccaaataaataaatggcactgagcctgagttcttggatttagacaaacatttccaaaatagaactattaacctgtcactgaagtgggggcaagtagcccttcttatctggcaagtattaaagaatgttggatgaatgaattttactactgctgtatctcatgggagtaaattaggctaacaaaaaaaaatgtgtgggttgattaattacttgtgtttactggcaggacattcctaagatactctaccatgtactccctcagtttatattatgttggagatgtctaatatggttttaaaatccattattcagaaatagagtgagaaagtctacatcttttatgtgccaagccatgaaagaaagtggtcattgaaaaaataaaacatcctttgtcttaggtaagtttcacataaaattctgcatgctggaattcggaattgctttgggaaccagccaggcaacaaccaaagtggggacaggacaaaataaagaaggacatgaacktactatgtacatttaatatgtcttgagttttaactaaagtaattctgaatgcatatccactggttcatttccaaacaattttgaaaagattatttatacttcatggataatgaa

SEQ ID NO: 322579 - DNA, 575 bp, Homo sapiens
ttaatatatctcaaatccagcccctcctcttcattctcaactgctgctatcttatgccaggacaccataatttttccctgcattaataaaatagccgtagtatagggttttctgctttctttctgraagtgctctgaatttatcttctcatgccacacagactacattctgaagtccacttttgttccctttattatacttctcctgcggctctccagtgaatacaagatcaattccaaatcctttagcatggcatgcagggccatttctgttctattttctgtctgctttgggggctccattaagcaccactgttccatcgaataccctgcacactcctcacattgagtcactaactgtccctgaaacatctcattctctatcatcccttgtttttcgtaatgcttttttttcctcctggttgccctccttcaactctcatttatatagtaaaatattactcaattttctgtttaaccactttctcctcctcaaacctttccaagcaagaccagttctcctaatccctactctactaggcattcttacattgctataaagaagaaagttgccaa

SEQ ID NO: 322580 - DNA, 575 bp, Homo sapiens
ttaatatatctcaaatccagcccctcctcttcattctcaactgctgctatcttatgccaggacaccataatttttccctgcattaataaaatagccgtagtatagggttttctgctttctttctgaaagtgctctgaatttatcttctcatgccacacagactacattctgaagtccacttttgttccctttattatacttctcctgcggctctccagtgaatacaagatcaattccaaatcctttagcatggcatgcagggccatttctgttctaktttctgtctgctttgggggctccattaagcaccactgttccatcgaataccctgcacactcctcacattgagtcactaactgtccctgaaacatctcattctctatcatcccttgtttttcgtaatgcttttttttcctcctggttgccctccttcaactctcatttatatagtaaaatattactcaattttctgtttaaccactttctcctcctcaaacctttccaagcaagaccagttctcctaatccctactctactaggcattcttacattgctataaagaagaaagttgccaa

SEQ ID NO: 322581 - DNA, 557 bp, Homo sapiens
aaaccaatatcagatgagaatagcttgagtgaacatgatgctaatgacaccacagatggagagtagcataagaattagagataaatttagaagataaagtcgatagagctggtaattgactggatacaggggtaagggagagaaagtcgtattagacataatgkctggcagttagtcctgtgtgatatgttttatggagagagggaatcctgccatggaggggtctaggtttgggagtgaagatcatgagttcaattatggacttacggttttgtggtgtcttttagctatccaaatggacaattatagcataaaattagattacgtgagcttgacatagaaatttggaaattttcttaatgattcataattattattaataattcatgctcataattcatgagcatggataattgggtgaaagtatggagtgagacacagaaggcttcatttcaattctttgattaatgtaagactgagtgggatacatgaggaagtctgcagagggacagagattaattttatatggtgtattttacattatttagatatttgac

SEQ ID NO: 322582 - DNA, 627 bp, Homo sapiens
attgtatctattaccttgtaagtttgctggtaaggattaaacgagatatctagtacttagaacagtgaccgctcttctaaatagccactgtaaatgtaaagcgtaatctccaagaaggtaagataattctgtttaacccatcattgaatcacgagtaccacgaattatgtttgtcattagtagatgatgaataaatatggatggatgatgattaaatgaatgctggaatgtgttagactatgaagagagcatccagtaaatgtttaagcaatctagtggcacctttctctctctggatattgtggaaacaccaaagaaaattacttaatggtaaagagtacaccctctaaagtgggttgcctaaaatgatatctcagaatggccacctactagttgtttrcctaattcatttgagttaattaaccatgagaaagtttctcatctctctgtgattagttcactcctaaaatgaaaatactttgtgacgattaatggagttaaacataaagcacttaggataattctaggatacaacaagattttaataaatgctattactattatttttgttattcaaagtattttttttgacagtgtttgttcggggcgctcccctagcttctcgga

SEQ ID NO: 322583 - DNA, 608 bp, Homo sapiens
ggaatttaattaaacttttttctttcctaataggaccaggttgttgagatttagtgccataggtctgttacagggctgagaaattattggacagtggctatataggtgcagagtagtaatgaagttctctcaagtctgtttcctgctggtctccccctcctctcctgttccttcactctaggcatattgtatgtattaatccattttcatactgctgtgaagaaatacctgagactgtataatttataaagaaaaagaggtttaatggactcatagttccacatggctggggaggcctcagaatcatagtggaaggcaaaggaggagcaaagtcatgtcttacatggcagcaagcaagacagcatgtgcaggggaacttccctcgawaaaaccatccgatctcataagacttactcactatcacaagaacagcatgggaaaacccacccccatgattcaattacctctcactttgtccttcccacaacacttggggattatgggagctacaattcaagatgagatttgggtaaggacatagccaaaccatatcactgtatgacttgaggctcctcacactacacttctcaaagctttgcacattccct

SEQ ID NO: 322584 - DNA, 628 bp, Homo sapiens
tgctcagcaattgattttaaattatctctgttgcaataaagttttatttaattttatggcctggccttgcattcattgtgagacatcaaaggcttgcatccgtagcttggataaaatagttatagaagaaggagcagagatagtctaagaatgctggtctccagaccaaaagtaatgaacgggagtagagagggagagttgtttggaggcaaacagctgggcaagagagcagagggttgtgtggcaaatggaagtccttcctgrgatttccacagacacctggggagaaggacctattgaaagattggatctccagagcaaagcagaaaatgagactgaatttttgtctttgaaggttaaaggaatacaggaccttatgaacagatgaagcttccttcagacattaatgtagaaaactctccttgtctaatacacgacagtgacagtgctaatctggatcctgataattagagtaacatcaggatgggtagagccaatgcaagcaattaattatcagcactgacatttattgtctgtattcccatgggttcttaagcttctttacacataaaattttccataataaaaagtaagactaaaaagaaaatctttatacatttcacatctg

SEQ ID NO: 322585 - DNA, 635 bp, Homo sapiens
cacctttcaacttattttctctatctttgaccaatgaccttacaaacgtgaagtttgtcattctctggttttaaaaagaagtcatgaactcaagtgtgccaagatccaggccaacacatgagtgagttgaggactgttgaacttgagattttatggtatcctctctaaaggggcagacactacttaactttggctgattgttccccatagaaatacatggtcagtgtttcctggtcatctattttttttcaagagaagaggtacttatttgttcttttctaacaataacccacatgtaagtatttgtttaatatatcattccctactgtgctctcagcaccatgaaagctggggcctcagctatctttttcactgcctggcacataacatgcattcagaaaatattttttttcaacaagtaaatgcatgagtcaaatcaagagaagaacagaggagaaagtgagtcataatgyctacaatggccaaaatattggctaacatagctgaataattttgaaattttttatttttttcagagacaaggtattgttctgtccctcaggctggagtgcaatgtcacaatcatatctcactacaacctcgaactccggggctcaagcaatccacccacctaa

SEQ ID NO: 322586 - DNA, 566 bp, Homo sapiens
ggagggaatatttttctcaaattgtgaatttttagaatcagactaccttaatatagatcactgggtggtgcagatgtttgtcaarcttctcatgggggataactaaagaaaaaatagggacatttctcctatatttatgaaaaagcaaatcacagaggataacaagaaaaaacaggtacatttcttctatatttatgaaggatcaaatacataaacttgagaagaagatattataatttccattgttcaaatagggaaactgagtttcaaatatgagtaaacaaattaccggtattaactcattatcttctatagagcatgcctataatcttgacattttctcagggatgaagtgctggtctctggaaaacagcttcatctttttttcttcatcttgctcagaggcagaaggaaaagtggagagaccattagaatagcaagttttgttctactgaaacaaataagatccacccttggaagccttgttagaaaattttggatttcatgcttccatgacctcagtttacgtaaggccacattaggaaaaaagaataggcaggacattc

SEQ ID NO: 322587 - DNA, 566 bp, Homo sapiens
ggagggaatatttttctcaaattgtgaatttttagaatcagactaccttaatatagatcactgggtggtgcagatgtttgtcaagcttctcatgggggataactaaagaaaaaatagggacatttctcctatatttatgaaaaagcaaatcacagaggataacaagaaaaaacaggtacatttcttctatatttatgaargatcaaatacataaacttgagaagaagatattataatttccattgttcaaatagggaaactgagtttcaaatatgagtaaacaaattaccggtattaactcattatcttctatagagcatgcctataatcttgacattttctcagggatgaagtgctggtctctggaaaacagcttcatctttttttcttcatcttgctcagaggcagaaggaaaagtggagagaccattagaatagcaagttttgttctactgaaacaaataagatccacccttggaagccttgttagaaaattttggatttcatgcttccatgacctcagtttacgtaaggccacattaggaaaaaagaataggcaggacattc

SEQ ID NO: 322588 - DNA, 566 bp, Homo sapiens
ggagggaatatttttctcaaattgtgaatttttagaatcagactaccttaatatagatcactgggtggtgcagatgtttgtcaagcttctcatgggggataactaaagaaaaaatagggacatttctcctatatttatgaaaaagcaaatcacagaggataacaagaaaaaacaggtacatttcttctatatttatgaaggatcaaatacataaacttgagaagaagatattataatttccattgttcaaatagggaaactgagtttcaaatatgagtaaacaaattaccggtattaactcattatcttctatagagcatgcctataatcttgacattttctcagggatgaagtgctggtctctggaaaacagcttcawctttttttcttcatcttgctcagaggcagaaggaaaagtggagagaccattagaatagcaagttttgttctactgaaacaaataagatccacccttggaagccttgttagaaaattttggatttcatgcttccatgacctcagtttacgtaaggccacattaggaaaaaagaataggcaggacattc

SEQ ID NO: 322589 - DNA, 566 bp, Homo sapiens
ggagggaatatttttctcaaattgtgaatttttagaatcagactaccttaatatagatcactgggtggtgcagatgtttgtcaagcttctcatgggggataactaaagaaaaaatagggacatttctcctatatttatgaaaaagcaaatcacagaggataacaagaaaaaacaggtacatttcttctatatttatgaaggatcaaatacataaacttgagaagaagatattataatttccattgttcaaatagggaaactgagtttcaaatatgagtaaacaaattaccggtattaactcattatcttctatagagcatgcctataatcttgacattttctcagggatgaagtgctggtctctggaaaacagcttcatctttttttcttcatcttgctcagaggcagaaggaaaagtggagagaccattagaatagcaagttttgttctactgaaacaaataagatccacccttggaagccwtgttagaaaattttggatttcatgcttccatgacctcagtttacgtaaggccacattaggaaaaaagaataggcaggacattc

SEQ ID NO: 322590 - DNA, 618 bp, Homo sapiens
aataaaatgctactgctaaattagtaaatagtctaaaagctgtctacttcacagaaaaccttaatcaaatgtggaaatatgatatgcataattttacttctaagatatatatgaaagtagttccattataatttaaacttgaaaactgcctctcaaaacatgaatttttgaattcgttatgaattttttttcatatatgcactttatttcttgtctcaaaaaatagraacatttgccataaaaaagataccttcaatgtaaacctaaattattgaggtaagatatacaaaatgtgttaattatctagagtcaatatagcttttaatttttttttttcctgaagaatacctggagatcaggactgttctattttctaccttcgtgctttccttaaacaccaccagcttcggtaccctgcgcatttttaaccttccttctttaatatcccaagtttctttctttatcttctaaactgggtacattttcaaaacacactggtaagaaaacttacatctaattaactgttattgcccttagaaaggaatttaagaatgatccatttaaacttgtcattttaatggataagttagaagctcaagttaaattaaatacattaaa

SEQ ID NO: 322591 - DNA, 578 bp, Homo sapiens
cagtagatcgactttctatcttgggaagataagtatgcaccatcctttacccagggctgccaagatgtggccatgtgtccctgtgtctgccaatcagataccccactcaggacttgagaaagtggcacaaaaatacaaagacagacaaatcgcttgagaaaggggcagccaagatcccaaagtgctagagagagtttccagtgattgggattttctaagcagatagtttttaagggaaaatcatggctatgttcccaaacactcatctctcttcatttctgtcatattctgaacctagtgctacagactttcattcatttctggagccatcagattgccttcttgcaaacagcctctacctattaatttactagaattgacttgtgtcatttgcagtgaagaacactgactaatttgrttaggagttggtgagaaaagaatactgagaagagaggtgtcttaggaaaagttacctcagaagcaaacttcaaggcaagaatatgagtagcagtggtttatttgtaaggtgacttcagtaatcattgatagggaagtgggcaggtgaggcagaaggaaag

SEQ ID NO: 322592 - DNA, 607 bp, Homo sapiens
agtaataaaggcttgtacagagagcactaacactgtggtggctattgtgatgtttcaacttgcctttttatacaatcaaacacaaatacaggtgttgctgtgaaggaattctgtagttgtaataaagatcctaatgcattgtctttaagcaagagggattattctggataatgtgagtgggcctaagtgaatgagttgcaaagccttaaaagcagggttgatgtttctragagagagagagagagagagagagagtaattgaaagagaaagaaaaagaagaaatttctcttgaggacaatttcaacctgttctcagggagttccatcctgtttgtgatcttgctttcttgtagatgatagcttcaaccatagccacaggttcaaaactgtgccttcctgaatgtctgctctatggatttaggactttattccagtccccacaacccatgccatctatctatctatctatctatctatctatctatctatctatcatctatcatctatctatctatctatctatcatctatcatctgtccatccatccatctatcaagagagatataattttaatacctgtacaatcttaaatgttctgcacctccgg

SEQ ID NO: 322593 - DNA, 607 bp, Homo sapiens
agtaataaaggcttgtacagagagcactaacactgtggtggctattgtgatgtttcaacttgcctttttatacaatcaaacacaaatacaggtgttgctgtgaaggaattctgtagttgtaataaagatcctaatgcattgtctttaagcaagagggattattctggataatgtgagtgggcctaagtgaatgagttgcaaagccttaaaagcagggttgatgtttctgagagagagagagagagagagakagagtaattgaaagagaaagaaaaagaagaaatttctcttgaggacaatttcaacctgttctcagggagttccatcctgtttgtgatcttgctttcttgtagatgatagcttcaaccatagccacaggttcaaaactgtgccttcctgaatgtctgctctatggatttaggactttattccagtccccacaacccatgccatctatctatctatctatctatctatctatctatctatctatcatctatcatctatctatctatctatctatcatctatcatctgtccatccatccatctatcaagagagatataattttaatacctgtacaatcttaaatgttctgcacctccgg

SEQ ID NO: 322594 - DNA, 607 bp, Homo sapiens
agtaataaaggcttgtacagagagcactaacactgtggtggctattgtgatgtttcaacttgcctttttatacaatcaaacacaaatacaggtgttgctgtgaaggaattctgtagttgtaataaagatcctaatgcattgtctttaagcaagagggattattctggataatgtgagtgggcctaagtgaatgagttgcaaagccttaaaagcagggttgatgtttctgagagagagagagagagagagagagagtaattgaaagagaaagaaaaagaagaaatttctcttgaggacaatttcaacctgttctcagggagttccatcctgtttgtgatcttgctttcttgtrgatgatagcttcaaccatagccacaggttcaaaactgtgccttcctgaatgtctgctctatggatttaggactttattccagtccccacaacccatgccatctatctatctatctatctatctatctatctatctatctatcatctatcatctatctatctatctatctatcatctatcatctgtccatccatccatctatcaagagagatataattttaatacctgtacaatcttaaatgttctgcacctccgg

SEQ ID NO: 322595 - DNA, 571 bp, Homo sapiens
gtgagtagtaataatgtgttatgtagtgatagtaaactaatgcaaacaacatgtactagtggccagtcacaatttcttaaaaaccaaaccaaaacaaacaagaaagaacaaaacaaacaagaaacctggccctaggatgctctgatcaaacagtctatagtctctaccaccgcagttgatcccaacatcttaattttcctcttcctgtcatccattctagatttctttatctttggacagacatctctttgtctaatcttcttgacaaaggattaaaaaggaaatccaaatacaaataaataggaacagaggacctgacacccataccacacctacctcagatgcactgacttctctccctttgctaagatttttatccaytgtggagctggaaaggggcttggagattggacgtttctaagtgatctgatggaaaagaaaagatccagctctgggtggacatttcattacattgtcacctggtagtccatgttctggtgcaccatctctagcaggacccaacagcataaggagcttctttcaaaatgtgactagttctttgccaaagatg

SEQ ID NO: 322596 - DNA, 571 bp, Homo sapiens
gtgagtagtaataatgtgttatgtagtgatagtaaactaatgcaaacaacatgtactagtggccagtcacaatttcttaaaaaccaaaccaaaacaaacaagaaagaacaaaacaaacaagaaacctggccctaggatgctctgatcaaacagtctatagtctctaccaccgcagttgatcccaacatcttaattttcctcttcctgtcatccattctagatttctttatctttggacagacatctctttgtctaatcttcttgacaaaggattaaaaaggaaatccaaatacaaataaataggaacagaggacctgacacccataccacacctacctcagatgcactgacttctctccctttgctaagatttttatccattgtggagctggaaaggggcttggagattggacgtttctaagtgatctgatggaaaagaaaagatccagctctgggtggacatttcattacattgtcacctggtagtccatgytctggtgcaccatctctagcaggacccaacagcataaggagcttctttcaaaatgtgactagttctttgccaaagatg

SEQ ID NO: 322597 - DNA, 571 bp, Homo sapiens
gtgagtagtaataatgtgttatgtagtgatagtaaactaatgcaaacaacatgtactagtggccagtcacaatttcttaaaaaccaaaccaaaacaaacaagaaagaacaaaacaaacaagaaacctggccctaggatgctctgatcaaacagtctatagtctctaccaccgcagttgatcccaacatcttaattttcctcttcctgtcatccattctagatttctttatctttggacagacatctctttgtctaatcttcttgacaaaggattaaaaaggaaatccaaatacaaataaataggaacagaggacctgacacccataccacacctacctcagatgcactgacttctctccctttgctaagatttttatccattgtggagctggaaaggggcttggagattggacgtttctaagtgatctgatggaaaagaaaagatccagctctgggtggacatttcattacattgtcacctggtagtccatgttctggtgcaccatctctarcaggacccaacagcataaggagcttctttcaaaatgtgactagttctttgccaaagatg

SEQ ID NO: 322598 - DNA, 571 bp, Homo sapiens
gtgagtagtaataatgtgttatgtagtgatagtaaactaatgcaaacaacatgtactagtggccagtcacaatttcttaaaaaccaaaccaaaacaaacaagaaagaacaaaacaaacaagaaacctggccctaggatgctctgatcaaacagtctatagtctctaccaccgcagttgatcccaacatcttaattttcctcttcctgtcatccattctagatttctttatctttggacagacatctctttgtctaatcttcttgacaaaggattaaaaaggaaatccaaatacaaataaataggaacagaggacctgacacccataccacacctacctcagatgcactgacttctctccctttgctaagatttttatccattgtggagctggaaaggggcttggagattggacgtttctaagtgatctgatggaaaagaaaagatccagctctgggtggacatttcattacattgtcacctggtagtccatgttctggtgcaccatctctagyaggacccaacagcataaggagcttctttcaaaatgtgactagttctttgccaaagatg

SEQ ID NO: 322599 - DNA, 583 bp, Homo sapiens
gctacttttaccataactaaaactgctgaagaatctaccttgctatgggccacactgaaaactgtcagccttctaagtcacttattacatggaacaaaagcaatattcccagtgtaatatgcattgtttccaaaatccaaagagaccaactgagattatcagcaccctgcttctcaccacctatgatggactgaagtacaaatgaagaggtaatgcattcattttgtaatagttctttacatgaattatatgggctaaattacactaataaagattgtaaaattaattagcagttkttggtagccacatacgctctgaaggaagaaaatagacactattaaataaggtggcagagtaaaagccaaaagccattctttgcagcatttcaagagactcacatttctttcatgtgcaaaatgtgttgaagagaaaaatgtgttgaaaatcaggttcaagattttaaaggaagagaggtagagccaaaaggagactaaattcatatttctgtcaaattcttctatactgagttcagggccctattggggaggagtggaatattaagcctggatggagacattcggga

SEQ ID NO: 322600 - DNA, 581 bp, Homo sapiens
tatgtactgattataaccaggaaaacctgcctgggagtggatcttaagggtctyaactatggagaacagaatatgagcctggagaagagtgactatattcatataggtactataggttggtgcaaaaataattgcggttttggactgtgaatttcaaattattataactagactcaaacacatctttataaatcaaaataggaaccattatgatcagcacatttttgccaagaaataagtctgtttattcctataacataaaaatcagtgcttcaggatttgaagtcttggaaagcattttctgcatcctgttcattgtggaaatgttttccctgcaaaaagttgtcaagatgcttgaaaaagtgtcagtcagtcggcgagaagtcaggtgaatacggcagaagaggcaaaacttcgtagcccaatttgttcaacttttgaagggttggttgtgcaacttgtagtcaggcattgttgtggagaattgggccctttctgttgaccaatgctggctgcaggagctgtagtttgtggtgcatcccgttgatttgctgagcatacttctcagatgttatggtttc

SEQ ID NO: 322601 - DNA, 581 bp, Homo sapiens
tatgtactgattataaccaggaaaacctgcctgggagtggatcttaagggtctcaactatggagaacagaatatgagcctggagaagagtgactatattcatataggtactataggttggtgcaaaaataattgcggttttggactgtgaatttcaaattattataactagactcaaacacatctttataaatcaaaataggaaccattatgatcagcacatttttgccaagaaataagtctgtttattcctataacataaaaatcagtgcttcaggatttgaagtcttggaaagcattttctgcatcctgttcattgtggaaatgttttccctgcaaaaagttgtcaagatgcttgaaaaagtgtcagtcagtcggcgagaagtcaggtgaatacggcagaagaggcaaaacttcgtagcccaatttgttcaacttttgaagggttggttgtgcaacktgtagtcaggcattgttgtggagaattgggccctttctgttgaccaatgctggctgcaggagctgtagtttgtggtgcatcccgttgatttgctgagcatacttctcagatgttatggtttc

SEQ ID NO: 322602 - DNA, 553 bp, Homo sapiens
ttttccctgcaaaaagttgtcaagatgcttgaaaaagtgtcagtcagtcggcgagaagtcaggtgaatacggcagaagaggcaaaacttcgtagcccaatttgttcaacttttgaagggttggttgtgcaacttgtagtcaggcattgttgtggagaattgggccctttctgttgaccaatgctggctgcaggagctgtagtttgtggtgcatcccgttgatttgctgagcatacttctcagatgttatggtttcactatgattcagaaagctgtagaggatcagactggcagcagatcaacaaacagggaccatgaccttcgtttggtataagtttggctttgggaagtgctttggagctttttctcrgtttaaccactgagctggtgtagctaattgtcatataaaatccacttttcatggcatgtcacaatctgattgattgagaaatggttcattgttgttgagtagaataagagaagagggtgcttcaaaataacttttttttattttttatttttgctcagctcatgagggacccacttattgtgct

SEQ ID NO: 322603 - DNA, 627 bp, Homo sapiens
aagtttggctttgggaagtgctttggagctttttctcggtttaaccactgagctggtgtagctaattgtcatataaaatccacttttcatggcatgtcacaatctgattgattgagaaatggttcattgttgttgagtagaataagagaagagggtgcttcaaaataacttttttttattttttatttttgctcagctcatgagggacccacttattgtgctttctcacctttccaatttgcttcaaatgccgaatgactatggaatggttcactatgagttctttggcaactctcagctggttactgtcaacttccgatggccggccaccatgctccttatcttcaaggctctcctctcctatgcaaaacttcttgaaccaccactgcattgtatattcgttagcagttcctgggccaaatgcrttaatgttgcaagttgtctctactgctttaagacccattttgaactcaaataggaaaatctcttgaatttgctttttgtctgacatcatttccatagtttaattaatataaaataaacagcaagaaataagtcattcacaaaacaaaaactaaagccagaaatgcacattaaaatgatatataacataaccacatttattta

SEQ ID NO: 322604 - DNA, 511 bp, Homo sapiens
gtagatgttttgcattatgagctagttctaaaagactctcagatgattcttaaaaggatgattgcacttaatttcacttatagttttgattggtgatgacaaagttttcattaaagttgtaaatttccactcattgcaggaatgtcagatgatcaaaaagagtgggtaccaactgagctatatacaagcaaagtgtcactgttaaaaaaaaaaaaaagaaaaaagaaaaatacttcttgattctagagaataattgacagctyggaaaaaatccactcggccagttagctttcctcattctgcaaacattaaatagcatatttttattacaaacttgacagccaggccttaagaataagctctgaaatgcctgcgattacatgtgtaggcagggactgctatgactggctgggtttcagatttgagtgtttgtttagacagagcaagaccaaaaggtgttagatcagacctaatctccaccagacagctcagagggaggctacagatttct

SEQ ID NO: 322605 - DNA, 562 bp, Homo sapiens
attgtaagaggttttatttatttattacaacatggccagaggataagtataaacataacacaaactgttaattttaattttaattttaaaacatgttagagatttcatgtggtctgaattctttctcggtcacttccgtcttggtccctaccaccaaccttgcccttactcccagcccttcaagcagctccttaagggaaattgacaagagaaaaacayatttttgaataggctaaatttgaagtgttcattaaaacaagtagctgattgtaggcttctacatctcttgaaatgttttatggccggtgtatgtcatttaaaaaaccttcctttttccaaaaaaaaaaaaaaagaaaagaaaattataggatcaaattaaacgctcccatttctgctgtagagcttgtgatgtcgtcaagatccatttcatttttatgcccctataacttagttaaagtacattttctctgtctctcctctccgagtctgtttatacctgactctagaattatttctatcagggagatacaaggtcattttttatactattaaaataaacagt

SEQ ID NO: 322606 - DNA, 562 bp, Homo sapiens
attgtaagaggttttatttatttattacaacatggccagaggataagtataaacataacacaaactgttaattttaattttaattttaaaacatgttagagatttcatgtggtctgaattctttctcggtcacttccgtcttggtccctaccaccaaccttgcccttactcccagcccttcaagcagctccttaagggaaattgacaagagaaaaacacatttttgaataggctaaatttgaagtgttcattaaaacaagtagctgattgtaggcttcyacatctcttgaaatgttttatggccggtgtatgtcatttaaaaaaccttcctttttccaaaaaaaaaaaaaaagaaaagaaaattataggatcaaattaaacgctcccatttctgctgtagagcttgtgatgtcgtcaagatccatttcatttttatgcccctataacttagttaaagtacattttctctgtctctcctctccgagtctgtttatacctgactctagaattatttctatcagggagatacaaggtcattttttatactattaaaataaacagt

SEQ ID NO: 322607 - DNA, 562 bp, Homo sapiens
attgtaagaggttttatttatttattacaacatggccagaggataagtataaacataacacaaactgttaattttaattttaattttaaaacatgttagagatttcatgtggtctgaattctttctcggtcacttccgtcttggtccctaccaccaaccttgcccttactcccagcccttcaagcagctccttaagggaaattgacaagagaaaaacacatttttgaataggctaaatttgaagtgttcattaaaacaagtagctgattgtaggcttctacatctcttgaaatgttttatggccggtgtatgtcatttaaaaaaccttcctttttccaaaaaaaaaaaaaaagaaaagaaaattataggatcaaattaaacgctcccatttctgctgtagagcttgtgatgtcgtcaagatccatttcatttttatgcccctataacytagttaaagtacattttctctgtctctcctctccgagtctgtttatacctgactctagaattatttctatcagggagatacaaggtcattttttatactattaaaataaacagt

SEQ ID NO: 322608 - DNA, 562 bp, Homo sapiens
attgtaagaggttttatttatttattacaacatggccagaggataagtataaacataacacaaactgttaattttaattttaattttaaaacatgttagagatttcatgtggtctgaattctttctcggtcacttccgtcttggtccctaccaccaaccttgcccttactcccagcccttcaagcagctccttaagggaaattgacaagagaaaaacacatttttgaataggctaaatttgaagtgttcattaaaacaagtagctgattgtaggcttctacatctcttgaaatgttttatggccggtgtatgtcatttaaaaaaccttcctttttccaaaaaaaaaaaaaaagaaaagaaaattataggatcaaattaaacgctcccatttctgctgtagagcttgtgatgtcgtcaagatccatttcatttttatgcccctataacttagttaaagtacattttctctgtctctcctctccgagtctgtttatacctgactcyagaattatttctatcagggagatacaaggtcattttttatactattaaaataaacagt

SEQ ID NO: 322609 - DNA, 585 bp, Homo sapiens
gcttgctgcatcatctcctggtcagtagaagaagtatatagttctgtatttgtacctttttctgtttgctcaaataagaatcagctgttagaaatctaagatctctagctatgaaaagtcatgttctttaattggttttgaacagtatcatatagtattgctcaaaacaaattaaggaacatatatatatgaactaagtaaatattattggattataatgttggttgaaacatatatgtgaaattttcagaaatgaaattcagacgtagaagagactttaaaaatgaactgtgggaaatgaggagttgctactcaatgggtataaggtttcagtactcaagatgaaaaagtttttcagatctackgcacaacattgtgtttatagttcacaacactgtaccacacacaaacatgtgttgagagtagatctcgtgtttttaaccacaataaaaaagaatgtactctgttacccttatattttgtagattttggaactaagtctcacaaaatttaagtgatttttccaatattaaatagctaatgaatctcaaagccaacagctcttagtacattaccaaccttgca

SEQ ID NO: 322610 - DNA, 647 bp, Homo sapiens
tgtccaaggacaggagagaaagagtgtattcttgttgtagcagatagattgacacatacacctattctctatttttgttctctttggatccccagtagattggatgatgcctgcccacactgagggcagatcttcctgcttagtccactcaaactcacatgtaaatcttctcgggaaaacaccctcacagacasaccccagaagaagtctgtaccaggtttctagacattccttgatccagccaagttgacacctatcattaactgtcaaaatatgtaagtgttcatcctatagagggagagtcaatacatgtggatcttccatagaagaagcatatctcaagtattaaaatagcaaatatagcagagctgagagttcattcactgtgctgaggaagcaggtttgttcagcatgagactcaaatgaaatggctggagcattatgatacattttctgttctctccaagtatagcaggctatgtaagacactcttgtcccctgctcacatctgcatggatcaccttttctttaatttttgccacagccaccagttttgcacaagtgttatgtggtggcacttcacttcagctgcattgtatgccttttacctctggcccttgtgcaacttgggcttatgagggagctaa

SEQ ID NO: 322611 - DNA, 647 bp, Homo sapiens
tgtccaaggacaggagagaaagagtgtattcttgttgtagcagatagattgacacatacacctattctctatttttgttctctttggatccccagtagattggatgatgcctgcccacactgagggcagatcttcctgcttagtccactcaaactcacatgtaaatcttctcgggaaaacaccctcacagacagaccccaraagaagtctgtaccaggtttctagacattccttgatccagccaagttgacacctatcattaactgtcaaaatatgtaagtgttcatcctatagagggagagtcaatacatgtggatcttccatagaagaagcatatctcaagtattaaaatagcaaatatagcagagctgagagttcattcactgtgctgaggaagcaggtttgttcagcatgagactcaaatgaaatggctggagcattatgatacattttctgttctctccaagtatagcaggctatgtaagacactcttgtcccctgctcacatctgcatggatcaccttttctttaatttttgccacagccaccagttttgcacaagtgttatgtggtggcacttcacttcagctgcattgtatgccttttacctctggcccttgtgcaacttgggcttatgagggagctaa

SEQ ID NO: 322612 - DNA, 647 bp, Homo sapiens
tgtccaaggacaggagagaaagagtgtattcttgttgtagcagatagattgacacatacacctattctctatttttgttctctttggatccccagtagattggatgatgcctgcccacactgagggcagatcttcctgcttagtccactcaaactcacatgtaaatcttctcgggaaaacaccctcacagacagaccccagaagaagtctgtaccaggtttctagacattccttgatccagccaagttgacacctatcattaactgtcaaaatatgtaagtgttcatcctatagagggagagtcaatacatgtggatcttccatagaagaagcatatctcaagtattaaaatagcaaatatagcagagctgagagttcattcactgtgctgaggaagcaggtttgttcagcatgagactsaaatgaaatggctggagcattatgatacattttctgttctctccaagtatagcaggctatgtaagacactcttgtcccctgctcacatctgcatggatcaccttttctttaatttttgccacagccaccagttttgcacaagtgttatgtggtggcacttcacttcagctgcattgtatgccttttacctctggcccttgtgcaacttgggcttatgagggagctaa

SEQ ID NO: 322613 - DNA, 647 bp, Homo sapiens
tgtccaaggacaggagagaaagagtgtattcttgttgtagcagatagattgacacatacacctattctctatttttgttctctttggatccccagtagattggatgatgcctgcccacactgagggcagatcttcctgcttagtccactcaaactcacatgtaaatcttctcgggaaaacaccctcacagacagaccccagaagaagtctgtaccaggtttctagacattccttgatccagccaagttgacacctatcattaactgtcaaaatatgtaagtgttcatcctatagagggagagtcaatacatgtggatcttccatagaagaagcatatctcaagtattaaaatagcaaatatagcagagctgagagttcattcactgtgctgaggaagcaggtttgttcagcatgagactcaaatgaaatggctggagcattatgatacattttctgytctctccaagtatagcaggctatgtaagacactcttgtcccctgctcacatctgcatggatcaccttttctttaatttttgccacagccaccagttttgcacaagtgttatgtggtggcacttcacttcagctgcattgtatgccttttacctctggcccttgtgcaacttgggcttatgagggagctaa

SEQ ID NO: 322614 - DNA, 559 bp, Homo sapiens
attcactaagggcttaattttaaaaaatgttaataggagagggacatcccctatgatatggtttggctgtatccctacccaaatctcatcttgaattgtagctcccacaatttccayatgttgtgggaggaacccagtgggaggtatttaaatcatgagggcaggtctttcccgtgctattcttgtgatagtgaataagtctcgcaagatctgacagttttatatagaggagtttccctacacaagttctctcttctcttgtctgccaccacgtgagacgtgctttttaccttccaccatgattgtgaggcctccccagccatgtgaaactctgagtccattaaacctctttcttttgtaaattgtccagtctcagttatgtctttatcagcaatgggaaaatggactaataaaaccttgaagggaaaaaaaagattatttcaccaatattgtaaaaacagcagcaaaaatttttaaaaattatattttctaatatgcataatttatataaaaattttaaagaacatttaaactcactaaaactaccgccattccaaac

SEQ ID NO: 322615 - DNA, 532 bp, Homo sapiens
atctctaagttagtttcttctgaaagtgaaggctatctattgtttttttgatatatttaaagggaatgaagccagaacaatgaggggttatgaaatttccttactgctttacttggcagaaattcctagtgtattttcaatccacctaactccaatttatgctttatctttttcataaatctcatatagagtttcagaaagacatgagctatttgagaacaccaatttttttttttccacaaaaacttccaacatcacagctgttctttgaagcttttctttctctctaattcttaggagacaaggcaattttaacaactaacaatatggattaaatttacatagtccctcycctatttttccacgacggaagtattctgttttaacattcttgttgcaagtcatctcattttacaaggcttccctttcttatccctatgagcatgtgtaaggaatgaccccaaacactttttaaaccaattggtgagtatgaagtccataaactgtgggatgcagaagtggtacaagttca

SEQ ID NO: 322616 - DNA, 566 bp, Homo sapiens
ggagacacagattctaacagttgcaaacatgtgaccctgcctagactgaattattagtacaggccagaaaagagaagaagatttcagattgggcaatagtaggaaaatggaattaggtattgtatagtggattagaattgtttatttggaggacagtgtgtgtttctcttgtgatggtatgatatatttgacagtgcaagtatttaaatgagaatcaaatttatgtctackttaccctctagaagacaaggcagttttgtaaacataaaaaataagactatttctcgtctacctgtaataacctcttattgctttttttccattagtccctacagatcatcttagttatagctaatttctacataatcaagcttatctctaatactgacagatttaattttaaagggtagtatgaaaatctttttaaaacaatattgcacattacctattactcttcatgattcgggatatcacaatgaatagcaattattatttttcccagatgcatttatttattcagaaaaatgtgttcctttccaaaataattacaagctttccgagtttaa

SEQ ID NO: 322617 - DNA, 620 bp, Homo sapiens
tttacgaccatcaaagaaataaaggagtgaatcactttcttgaaatgagaagaggagtggcaggcattggtccactgcccacccaccccttttcctttttcattgcgaatacagctccatttattttctctatgcctagtattggggaattcattaagccttggaaatcctgttcccttttgtctgtggttggttgagatgtcatgtaacacaagcctgggcatgaaaggtaaggggcttttgaaaaaaggagaagttcctgaaataagaaaaaagaaatgtgagaagagttgaatcgttgtcytcttctgtactccactttgaacttggtcacaggagtttttgaagcctagagttgaggaagcatcttttgtgtataaagaaacaaatgtaaggctgaaaatccaaaatgctaaagatggcagaggaaagaagggagagattctgggagcttgaagatatttttggttcaccttctctcacaaacaaagactacaactacctagctacaaacttgttgttgtttgaatagatgatagatggagaggaggaatggaaagctggatgtctttgcttacttaggaaacggttgggtatttgctgtttggcaaaagaattgc

SEQ ID NO: 322618 - DNA, 620 bp, Homo sapiens
tttacgaccatcaaagaaataaaggagtgaatcactttcttgaaatgagaagaggagtggcaggcattggtccactgcccacccaccccttttcctttttcattgcgaatacagctccatttattttctctatgcctagtattggggaattcattaagccttggaaatcctgttcccttttgtctgtggttggttgagatgtcatgtaacacaagcctgggcatgaaaggtaaggggcttttgaaaaaaggagaagttcctgaaataagaaaaaagaaatgtgagaagagttgaatcgttgtcttcttctgtactccactttgaacttggtcacaggagtttttgaagcctagagttgaggaagcatcttttgtgtataaagaaacaaatgtaaggctgaaaatccaaaatgctaaagatggcagaggaaagaagggagagattctgggagcttgaagatatttttggttcaccttctctcacaaacaaagactacaaytacctagctacaaacttgttgttgtttgaatagatgatagatggagaggaggaatggaaagctggatgtctttgcttacttaggaaacggttgggtatttgctgtttggcaaaagaattgc

SEQ ID NO: 322619 - DNA, 599 bp, Homo sapiens
aatgcagagacaggaaaatatattagttttttttcccaagagtgatatgccttaattacacttaactcctcaggttattagctacataactaccggtggaagaacttataatcactctcgcgtgaaactaatgaatatgcttttacacattgaatagcattttatcatttactttagacacaaaaaaaagactggcttttctgtgaacatgatgataatatcatgtcatttattcaaatattagagaacctgtcacatttgttccataaatacttattgtgtgtttattatgtgccaggcactattctaggttgctggggttacagcagtgaacagaaaaatccgttttgggatagggaactgttcctactctcataggaagtaaatgaaatttmtatgtggattgccctagttgaaacttagggggaaaattttgatgtatgtcattaaggtggacatgactagatggcttatactttgattgaaacaagccttcttttacaaataattgataacaatcagttgcaaaatcaaaattcacaatggttatttgactactgaatttgaaatttagaaacatttctatagtaataagctag

SEQ ID NO: 322620 - DNA, 599 bp, Homo sapiens
aatgcagagacaggaaaatatattagttttttttcccaagagtgatatgccttaattacacttaactcctcaggttattagctacataactaccggtggaagaacttataatcactctcgcgtgaaactaatgaatatgcttttacacattgaatagcattttatcatttactttagacacaaaaaaaagactggcttttctgtgaacatgatgataatatcatgtcatttattcaaatattagagaacctgtcacatttgttccataaatacttattgtgtgtttattatgtgccaggcactattctaggttgctggggttacagcagtgaacagaaaaatccgttttgggatagggaactgttcctactctcataggaagtaaatgaaatttctatgtggattgccctagttgaaacttagggggaaaatkttgatgtatgtcattaaggtggacatgactagatggcttatactttgattgaaacaagccttcttttacaaataattgataacaatcagttgcaaaatcaaaattcacaatggttatttgactactgaatttgaaatttagaaacatttctatagtaataagctag

SEQ ID NO: 322621 - DNA, 620 bp, Homo sapiens
gtcacgtgctgggtgaggatggtgggtttcttctggggagtggaagaggctgtggttgaaaaagacaactgaagatgaattctttgttgatgagattatatttgtcttgttcttttttaaaaaatagccatacataaatgayttagccaaaggcatgaaatgtcatttgggttcaagtgattgtgaagcgtttttgatttaacgaaaaatcataaaatgatccagaaaaaataggagactgcaattcatagaaatgctattttgtgcgattttatctgatttggaatggggttgaggagaagtaattgatgaaatgttatgaaatgctagaatttaaataggcctgatgtaaataatgaagcatgctttcaggctttcaaaatacacaattctagtctcagtttaaaaagtggtcagttggagccaatgtaaacatatatagagactgatagcagcaaccatggcatagaatacatgtttccttcaaagttttaaattacctgtttgcctagagtctgaaccctgctagaaggcctttgaaaaagcattgaagggggagaaaaatccctcaaacaacttacatagtatttgtccatgggatttgaatggctcttagctag

SEQ ID NO: 322622 - DNA, 620 bp, Homo sapiens
gtcacgtgctgggtgaggatggtgggtttcttctggggagtggaagaggctgtggttgaaaaagacaactgaagatgaattctttgttgatgagattatatttgtcttgttcttttttaaaaaatagccatacataaatgacttagccaaaggcatgaaatgtcatttgggttcaagtgattgtgaagcgtttttgatttaacraaaaatcataaaatgatccagaaaaaataggagactgcaattcatagaaatgctattttgtgcgattttatctgatttggaatggggttgaggagaagtaattgatgaaatgttatgaaatgctagaatttaaataggcctgatgtaaataatgaagcatgctttcaggctttcaaaatacacaattctagtctcagtttaaaaagtggtcagttggagccaatgtaaacatatatagagactgatagcagcaaccatggcatagaatacatgtttccttcaaagttttaaattacctgtttgcctagagtctgaaccctgctagaaggcctttgaaaaagcattgaagggggagaaaaatccctcaaacaacttacatagtatttgtccatgggatttgaatggctcttagctag

SEQ ID NO: 322623 - DNA, 620 bp, Homo sapiens
gtcacgtgctgggtgaggatggtgggtttcttctggggagtggaagaggctgtggttgaaaaagacaactgaagatgaattctttgttgatgagattatatttgtcttgttcttttttaaaaaatagccatacataaatgacttagccaaaggcatgaaatgtcatttgggttcaagtgattgtgaagcgtttttgatttaacgaaaaatcataaaatgatccagaaaaaataggagactgcaattcatagaaatgctattttgtgcgattttatctgatttggaatggggttgaggagaagtaattgatgaaatgttatgaaatgctagaatttaaataggcctgatgtaaataatgaagcatgctttcaggctttcaaaatacacaattctagtctcagtttaaaaagtggtcagttggagccaatstaaacatatatagagactgatagcagcaaccatggcatagaatacatgtttccttcaaagttttaaattacctgtttgcctagagtctgaaccctgctagaaggcctttgaaaaagcattgaagggggagaaaaatccctcaaacaacttacatagtatttgtccatgggatttgaatggctcttagctag

SEQ ID NO: 322624 - DNA, 636 bp, Homo sapiens
cacatgcccatttctgattcatatcagagagatatggtggtttgagaccaggtcatgtgctcttctctcggaggtgtaagtggagtcacatcctgacccatgaactagagcagaatgggctactatccgagaaagtgggaactgatgtcaggggctcactgcaaaatgttgaagccttaacatatctacatgtttgatgtctagttctttatagagagtaaatatatgagtcttccatcattttgattcttgcttttgtcttgtgtactcttttgatcattatttttcatagtctgctttcttatataactcaacatttacaataaggtatcctagcaagcactttttaaaaamatatataactgcaaaaaaagaatggaccacttttctgggactgtgcctattgaagaaatgtgggctttattattatctcttagttttttgtgtaaccttttaaagtgctttatagctctctctcctcctatatttatctttcatttgaaacaagtgaaaaacgggatcaattcttggcatcagaaggaaatgaatacctagcaaaactgcatcactttggaaaccagtgcaatgaataactacccttaagctttcaacaacacaatttatagttgaattctt

SEQ ID NO: 322625 - DNA, 584 bp, Homo sapiens
aacatctatttctgagatttaacttattatcactaagttttcattttccccaaatatttctcttcaaggaacagaaatcattcggattcagatctgygtgcatgcaaagaatctgtatatgtgctctttggctgagcccatttgtaaaataaacaagaaacatagagctgttaagaaataagatgagccaggacttacaggcacagatgtaccctcatcttttggatatttatactgagttttcttaagcactcaaaactttggaaggattttaagatgcttcatagagtcatttgtctaattggatatctaggagagcaatatctaggaagaatgcactcatttcagaaaacgaaaagttatttgtaattataatagcgggcttttctgcctctttttggaactggtagtgagcatgctggctcagttcctcaccctatgcctccttttcttgcttttaaatcttctccattatctcctttattatctgctatttattttactgaaggtaatcactgctttattaatcactgcttgagtaaccacagtgggacttgaaatgagcttgtttggattgtaaaagt

SEQ ID NO: 322626 - DNA, 584 bp, Homo sapiens
aacatctatttctgagatttaacttattatcactaagttttcattttccccaaatatttctcttcaaggaacagaaatcattcggattcagatctgcgtgcatgcaaagaatctgtatrtgtgctctttggctgagcccatttgtaaaataaacaagaaacatagagctgttaagaaataagatgagccaggacttacaggcacagatgtaccctcatcttttggatatttatactgagttttcttaagcactcaaaactttggaaggattttaagatgcttcatagagtcatttgtctaattggatatctaggagagcaatatctaggaagaatgcactcatttcagaaaacgaaaagttatttgtaattataatagcgggcttttctgcctctttttggaactggtagtgagcatgctggctcagttcctcaccctatgcctccttttcttgcttttaaatcttctccattatctcctttattatctgctatttattttactgaaggtaatcactgctttattaatcactgcttgagtaaccacagtgggacttgaaatgagcttgtttggattgtaaaagt

SEQ ID NO: 322627 - DNA, 465 bp, Homo sapiens
ttgtgatacagccctcaggagaccctgagaacatgtcctcaaggtggtcagggctcagcctagttttatacattttagggagacatgagacatcaatcaaatacatgtaagctatacattggattggtccagaaaggtggggcaatttgaagcagggagggcctccaggttatcagtagatttaaaaatcttcygattggcaattggttgaaagagcaattatcaataaaaaggaatatctgggttacgataaggggttgtggagaccaaagttttatcatgcagatgaaacctccaggtaacaggcttcagagagaatagaccataatgtttcttatcagacttaaggtctatgtcaatattaaatgctggtctgctttttctgaatttcaaaagggaggagggtatcgtaaggcctgcctgacccttccttcctatcatggcctgagccagtttttcaggtta

SEQ ID NO: 322628 - DNA, 570 bp, Homo sapiens
ttgtggaaagactgaaccttggaggccacactgcagggctccaccggagatatgacaattgccaacatctgtatgggaattaagggatggagacatgaggttaattgccagggctttaagaggcaggagaggaggaggtggaagaattataagaatcatggtgctgttagtgggaacagccaaggctctggagttggcaaagaagattaagctgcgggtgacaggcaggtggagggaaacccagcacatcccacyggctcaaggtgacctttctttcttttcttttccttttatgattaaaggacaatcatgcttgtggttacaactgtcaacagaaaaggagggtagaaattaaaaagtctccaaacttccttggttcccctgagagagttcataagattgactttgattccagacatttttctggatacatacagtgatctatcataaatatctaactagcaggcaaatttttgtgtttccctcacctcagggagtcctcttacttccaagtctttccaaagtttctcatattccagaaaacatattttctaattttatttttatttt

SEQ ID NO: 322629 - DNA, 609 bp, Homo sapiens
aatcatatttcaaattgactttattctctatgtatgattttaaatggatgtatagctaacataagaaatgaacatagtgaaccattcaattgtacagtttatatataccatttggcccaartgcttttttacttacttttaaaatcttttcattaagaataaagttttgctttgagggtgggatggttggtaattttgtattctggcacatatacaatcctttagggattagcgttcataaacatagatagttctctgaaagcattgaacaggtggtagaatgaagtaggaagccggtgactgagaaaaatctaggctggttagcagatgccttcgcttggaaaatagggataatattcatacctacctcataaagttgctgtagaaataaaatggggggatacatatgcaaagcatatagcatagtgtctgctccataaaagggactccataagctatgccagttttatcactatgttaccagtccttcaggaggttatgggatgcttagaagtgtatttggaccctttcaaaacaaaatagatgagtacatgtttttcttcattaacacctacgcatttataattttatgtaaattcatgcatacta

SEQ ID NO: 322630 - DNA, 616 bp, Homo sapiens
cttcgcttggaaaatagggataatattcatacctacctcataaagttgctgtagaaataaaatggggggatacatatgcaaagcatatagcatagtgtctgctccataaaagggactccataagctatgccagttttatcactatgttaccagtccttcaggaggttatgggatgcttagaagtgtatttggaccctttcaaaacaaaatagatgagtacatgtttttcttcattaacacctacgcatttataattttatgtaaattcatgcatactaacatgtcatgcatgcctttctttagtttagtctttttattttactttgttgcttgggtcctccatcctcacatatcagcggcccgcctatgttaacctgggttcatatctagtatgtacttttaacatttrttattattttattattttttctagtgtatatttttaaaacaaaaaaccctacacaaatatgcaaagtataaaatttgcaaagtttttacatgtatatacacctatgaatgaatcaccaaaatcaagaaaatggaattatttttcactccccaaagtttcctcatgcacctttgtaacgcctccctatcatcccttctcaccctctta

SEQ ID NO: 322631 - DNA, 609 bp, Homo sapiens
tgtcttttgttgtcttatatccattatcttgaaaagtattgtttcatatattatgtcctacattattatttttttggttgttttgggcaggaatgtaaatttagttcctggtactctatcttgattggaagtagaattacagttccttcatgctcatgtctacatcctcgtataactacatacattcatgtrtacacacatgcacacatatataaatgaacatttaattatctcattctactaaaatggaattgtatacacatattgcatcttaattttcttacccatagatgccttgaaccctgtcctccacatcaatgggtataattataattcaatcactttaatgtccatataatattttgtaatatggatgtgacataattttaaaaaaccatctacttatggacacttcctttgtttctaatatttgacacttttaacaatgtagtaatgcctctctccttctctctctctctatatatatatatatatttaaaccatagcatcttaattcaacctaaaccagaaataagatgggtaaacaactattttgacatgaagatactgtttttatttttttaaacaaaattttttagatcataattg

SEQ ID NO: 322632 - DNA, 471 bp, Homo sapiens
atttaattatctcattctactaaaatggawttgtatacacatattgcatcttaattttcttacccatagatgccttgaaccctgtcctccacatcaatgggtataattataattcaatcactttaatgtccatataatattttgtaatatggatgtgacataattttaaaaaaccatctacttatggacacttcctttgtttctaatatttgacacttttaacaatgtagtaatgcctctctccttctctctctctctatatatatatatatatttaaaccatagcatcttaattcaacctaaaccagaaataagatgggtaaacaactattttgacatgaagatactgtttttatttttttaaacaaaattttttagatcataattgtagtgatcatgatgatgataagcatgtatagaacctatgtccaagtgctttgcatgtattaactaatctaatgctaaccaaca

SEQ ID NO: 322633 - DNA, 590 bp, Homo sapiens
atttaattatctcattctactaaaatggaattgtatacacatattgcatcttaattttcttacccatagatgccttgaaccctgtcctccacatcaatgggtataattataattcaatcactttaatgtccatataatattttgtaatatggatgtgacataattttaaaaaaccatctacttatggacacttcctttgtttytaatatttgacacttttaacaatgtagtaatgcctctctccttctctctctctctatatatatatatatatttaaaccatagcatcttaattcaacctaaaccagaaataagatgggtaaacaactattttgacatgaagatactgtttttatttttttaaacaaaattttttagatcataattgtagtgatcatgatgatgataagcatgtatagaacctatgtccaagtgctttgcatgtattaactaatctaatgctaaccaacacctttgaaattctataaggtattatcactattttacaaaaaagaaactgagtcagtaaaaggttaaaccaactgcccaaagtcagacagccagtaagtaggggaggtgggttttgaagc

SEQ ID NO: 322634 - DNA, 471 bp, Homo sapiens
atttaattatctcattctactaaaatggaattgtatacacatattgcatcttaattttcttacccatagatgccttgaaccctgtcctccacatcaatgggtataattataattcaatcactttaatgtccatataatattttgtaatatggatgtgacataattttaaaaaaccatctacttatggacacttcctttgtttctaatatttgacacttttaacaatgtagtaatgcctctctccttctctctctctctatatatatatatatatttaaaccatagcatcttaattcaacctaaaccagaaataagatkggtaaacaactattttgacatgaagatactgtttttatttttttaaacaaaattttttagatcataattgtagtgatcatgatgatgataagcatgtatagaacctatgtccaagtgctttgcatgtattaactaatctaatgctaaccaaca

SEQ ID NO: 322635 - DNA, 589 bp, Homo sapiens
gtgcctgtatatttttagcaggtgctcaccgccttctcactcacacagatgaaatctattaagtttataaatgtaaactttcaataacagtgtgactatgggacagtgatatttaagggatattttaaagggtggtgtagacatgattcacatgttatttcacaatgacatgtcattgttttccttcttcttttcagcttcttctctttcatatttcagtatgaaatagaaaatccaacaaccctgtttccattgaaaattgccaaataaatcatcagatctttctttttagaggcgttgccttcactatctggatgtaataattataacaactgggaacctgattcgggctgttggcttctcccgacatgttcagtcataatggggaaactaagaacrttttctatttccttccagcatacagcagtattaagaatcctaggaaactgacaacttcccacttctatagcatctgaaatacaacccaaaagaaactgagctcagatgtggcctcagggttggacatttgaaatggcaatgcatgggtcttggctcacagctctcagaatcccagctttgtatgtgtttc

SEQ ID NO: 322636 - DNA, 607 bp, Homo sapiens
gttatttcacaatgacatgtcattgttttccttcttcttttcagcttcttctctttcatatttcagtatgaaatagaaaatccaacaaccctgtttccattgaaaattgccaaataaatcatcagatctttctttttagaggcgttgccttcactatctggatgtaataattataacaactgggaacctgattcgggctgttggcttctcccgacatgttcagtcataatggggaaactaagaacattttctatttccttccagcatacagcagtattaagaatcctaggaaactgacaacttcccacttctatagcatctgaaatacaacccaaaagaaactgagctcagatgtggcctcagggttggacatttgaaatggcaatgcatgggtcttggctcacagctctcagaatcccagctttgtatgtgttycccttggacaatgtatgtgcttagtagatgaggaggaaaccgcatgcttctctccagctcggcggagaaaaatatttcttctctttttccttctaatgatttcattagtcatattgtttacattttactgaaaaaaattatatcccccctttaaaatacttgagcattgggc

SEQ ID NO: 322637 - DNA, 556 bp, Homo sapiens
atgactaatacaagcattaatccattatgctggacagttagataaatagattgcacccctaaaattcatgtctatcaggaacctcagactatggccttacttagaatctttgtagatgtagttcatcaagacgaggtcctatttgattagggtcaggcctaatctgatgattgatgtgcttctgagaggaggagaggacacacagaaagaaacacagcawgaaggacaccgtgtgaaagtggaagcagagattggagtggtgcatctatcacacgaggatcgctaagaactgctggcacccactagaagctaggacacaggtacacaacagattctccctcagagcctccagaagcagccacatctgccattgcactgacttcatctctaagctccggagctttgggagaatacatttctgttgtttgaagctacccagtttgtggtaattttttatagcctctttaggaggctatctatgatatagattttaaaaatgaaaatgggattagatcgtataagccatattcttttgtagcttatttcttttactgaa

SEQ ID NO: 322638 - DNA, 577 bp, Homo sapiens
ttttgcttttttagctatgacaaacagctgcagtgtctgtctctgcatttgtctccgtgtgcacatgcaaaaacagaagtctctttttaactttccccaactcagttcacaaactctggccttaagtgagagtacctcagccttcaccattccaaattcccccagaaacagcactggcccgattatgaatttgctaatctactaaatagagacaattaaatccacttttatttgtagcttcagcccagatttgaagccaagtctccagatgttgggtggcatgcatcatttaatagaaaataatatgaaaaggactgtactgagtccttgggtaaatgggttgataatatgagaaggcagttatacattccattaatcattacattgcttgagggagaaaatayaaaactttgctttgttacctattctcaaagggaatcgcgaatcccaactccattaaatacggaaaacactgcaaggaaagaatctcggttgtgaagcatagtgagaatttccaccaagcacacctaagttgtaatcacctttctttgaagaagctgttttatggggatgagtc

SEQ ID NO: 322639 - DNA, 630 bp, Homo sapiens
cattgtcaatctcatggtaggagagaatccctgagggtgcacggtttggtccaacatttggtccttagaatttctaagcaaacatatagttagataagcttgccgtgcaggaactgcctggtggagagaaggtaacagttacaattgcattcttaaagagcgaagtaagaggtgaacacacaaggaaaaacagaaaaggtaaagataacttttaggaaaatggggctctcagttacaatagctggttagacacttccaaattagtttctggaaaaaaaaaagatggttagacagttctaaattagtttttgagaataagattgacatttaatatgtatgctaattgatgtcagacatttcataaatatataccaatatggcctccaataataatgtccaaataatactttacactaaggctctttttggtgagtatgagtgagattggagcaaagtgagttagagggttctatttttaaatcacctattrgaatatctggagagaagatgtcagatcccctctctctaagagctgtctaagcacaggagtgagtcaccacagccatgtttatatggaaagaccctggcccttggcaagagctgattggactaagagtggacccctcatga

SEQ ID NO: 322640 - DNA, 556 bp, Homo sapiens
ttcctgtccatagaacagcaaattgagtttggaaaaatggaattgattattgctgtgtggatattgactgcttttgctagttctgcaatcgtttgtaaattcatttctgctttccttatctgactataaagattctttttgaaccatgtcaaaactagtcgttctctcattaggtaatacgttacataatkttttgacattttatcttttatttgtgtgtcatgattatgtcctcttataaaagttatccttgaatactagcgtgtactcttaagtctagttgcctgagttcaaagtcaattgcctggctctgccacttacttgaagggacttacttactttgctccagtttacctaaatctgagcctttgttgacaggcttattttgtagaatgagaataattgtagtattgtcagaggcatttgaaccagagctactccatcttgaataggggctgcgtaaaataaggctaagacctactggggctgtattcccaggaggttaggcgttttagtcacagggtgagataggaggttggcacaagatacaggtcat

SEQ ID NO: 322641 - DNA, 568 bp, Homo sapiens
atccatacccctttcctggaaaacttacgaataatccaccccttgtttagcatataaccaagaaataactacaagtacactcagtcaagcagcctatgtagccattctttattccttgactttcttaataaacttgctttcactttactctatggatttaccctgaattctttcttgcttgaggtccaagaaccttctcttgggggcctggattggaacccctttctggtaacagtatctaactagttgagttgttgtgtggattaaatgatatactrtgtgttaagtaccagtatctagttaagccctgaaaaataggtgctaccattattaattatcaatatttatggagcagcagctgtttgacatcagggagggaacaaaatatacatggcctctggattcatggaacctgcagcctggtgactactctgagaagctagtcacttgcaaagcaatttgaaacaccactgcaagaaaaagcacagtcatgcctctccattgcatgagttgctttcttgtaaagaagtgcttagtgcgagcattacatttagacttttactgtctt

SEQ ID NO: 322642 - DNA, 568 bp, Homo sapiens
atccatacccctttcctggaaaacttacgaataatccaccccttgtttagcatataaccaagaaataactacaagtacactcagtcaagcagcctatgtagccattctttattccttgactttcttaataaacttgctttcactttactctatggatttaccctgaattctttcttgcttgaggtccaagaaccttctcttgggggcctggattggaacccctttctggtaacagtatctaactagttgagttgttgtgtggattaaatgatatactgtgtgttaagtaccagtatctagttaagccctgaaaaataggtgctaccattattaattatcaatatttatggagcagcagctgtttgacatcagggagggaacaaaatatacatggcctctggattcatggaacctgcagcctggtgactactctgagaagctagtcacttgcaaagcaatttgaaacaccactgcaagaaaaagcacagtcatgcctcwccattgcatgagttgctttcttgtaaagaagtgcttagtgcgagcattacatttagacttttactgtctt

SEQ ID NO: 322643 - DNA, 591 bp, Homo sapiens
ggagcttgttaaaatgcaggtgctgtctcaggcttcctggatcagaatctgcattttaatatgatctccaggtgatttggatgcgcataaaagtttttaaagtatttctctggaaattctgactccctctccccacctaacccacagatatatctctagctggatgagttgcrtgttttaagcatgaaccagcctcaccactcagtactgtgaatttataagtattggttctattgcaatctccttgagaggtaggtctccttttcattaatttacccttagcaattagtattgtagcacatagcacattgtaaaccctctctaaatactggttgactggctgaatggatctgaatttcccagcatcattagctctatacaatttagcatcgagctggatttttccaatgaggcaaacacgttctcatgaagctcttcaaagacacacaaggagaaggttctaacacatgggcctgatgaattatgtgtttttgatgactcattaaaggaagagggagaggtgaaaccaagggttactctattccaggaggcagcgttgtgtaatgataaacacacacatttggatgcctc

SEQ ID NO: 322644 - DNA, 591 bp, Homo sapiens
ggagcttgttaaaatgcaggtgctgtctcaggcttcctggatcagaatctgcattttaatatgatctccaggtgatttggatgcgcataaaagtttttaaagtatttctctggaaattctgactccctctccccacctaacccacagatatatctctagctggatgagttgcatgttttaagcatgaaccagcctcaccactcagtactgtgaatttataagtattrgttctattgcaatctccttgagaggtaggtctccttttcattaatttacccttagcaattagtattgtagcacatagcacattgtaaaccctctctaaatactggttgactggctgaatggatctgaatttcccagcatcattagctctatacaatttagcatcgagctggatttttccaatgaggcaaacacgttctcatgaagctcttcaaagacacacaaggagaaggttctaacacatgggcctgatgaattatgtgtttttgatgactcattaaaggaagagggagaggtgaaaccaagggttactctattccaggaggcagcgttgtgtaatgataaacacacacatttggatgcctc

SEQ ID NO: 322645 - DNA, 591 bp, Homo sapiens
ggagcttgttaaaatgcaggtgctgtctcaggcttcctggatcagaatctgcattttaatatgatctccaggtgatttggatgcgcataaaagtttttaaagtatttctctggaaattctgactccctctccccacctaacccacagatatatctctagctggatgagttgcatgttttaagcatgaaccagcctcaccactcagtactgtgaatttataagtattggttctattgcaatctccttgagaggtaggtctccttttcattaatttacccttagcaattagtattgtagcacatagcacattgtaaaccctctctaaatactggttgactggctgaatggatctgaatttcccarcatcattagctctatacaatttagcatcgagctggatttttccaatgaggcaaacacgttctcatgaagctcttcaaagacacacaaggagaaggttctaacacatgggcctgatgaattatgtgtttttgatgactcattaaaggaagagggagaggtgaaaccaagggttactctattccaggaggcagcgttgtgtaatgataaacacacacatttggatgcctc

SEQ ID NO: 322646 - DNA, 554 bp, Homo sapiens
catgaccacagaaactttacaatgcgagtctttcctatcttcctgatcttatatctaacatcttcccacttctttccctgccacttcctactcacttttttcccctttgccttgaatgtcagaaacctcccagagttgagcacctggtgtattagtccgttctcacactgctataaggacatacctsagactcagtaacttataaaggaaagaggtttaattgactcacagttcagcatggctggagaggcctcaggaaacttacaatcatggtggaaggggaagcaaacatgtctttcttcacagggaagcaggaaggagaagaatgagagacaactgaagggggaagctccttataaaatcctcagatctcgtgaaatcttactggcctctcaagaatagcatggggaaaaccacccccatgattcaattacctcccaccaggtccctcccatgacacatgaggattatgggaactacaattcaagatgagattttggtggggacccagccaaactatatcatctgggtatgctgtcttcttcaactagaaa

SEQ ID NO: 322647 - DNA, 554 bp, Homo sapiens
catgaccacagaaactttacaatgcgagtctttcctatcttcctgatcttatatctaacatcttcccacttctttccctgccacttcctactcacttttttcccctttgccttgaatgtcagaaacctcccagagttgagcacctggtgtattagtccgttctcacactgctataaggacatacctgagactcagtaacttataaaggaaagaggtttaattgactcacagttcagcatggctggagaggcctcaggaaacttacaatcatggtggaaggggaagcaaacatgtctttcttcacagggaagcaggaaggagaagaatgagagacaactgaagggggaagctccttataaaatcctcagatctcgtgaaatcttactggcctctcaagaatagcatggggaaaaccacccccatgattcaattasctcccaccaggtccctcccatgacacatgaggattatgggaactacaattcaagatgagattttggtggggacccagccaaactatatcatctgggtatgctgtcttcttcaactagaaa

SEQ ID NO: 322648 - DNA, 592 bp, Homo sapiens
caagcctaacttttcagtatcaatctcatctatagactttggtttggctgtcttaatatgtttgagaaacaatcctcttaaagattgtaattacaacctgttgggattgtagctattttgtagttagcaataagaaatttgcctacatcaaatagggagtgatggcatgtgccctctcttctaagacacttacagtgtattagttatctattgctacctaacaaattactccagaacagtggctgaaaacaacagttattatgtcacatggtttcttaagtcaaaaattccagagcagcttagatgggtgtctctggctgaggtctgccttgaaggcccagtccagacatcactggggctgcagtcgtttgaaggcacgatggrggctggaggattcacctccaagaagggtcatggtgcaggttgttgccaggaggcctcagctcctcaccatgagaacttttccatgggctgcttaggtatcctcatgttattacatgtggctttccccagtgtgagtgatccaagagggcaaaatggtacccgcaacttcacttatgacaagcttcggaagtcacactctgtcttttta

SEQ ID NO: 322649 - DNA, 592 bp, Homo sapiens
caagcctaacttttcagtatcaatctcatctatagactttggtttggctgtcttaatatgtttgagaaacaatcctcttaaagattgtaattacaacctgttgggattgtagctattttgtagttagcaataagaaatttgcctacatcaaatagggagtgatggcatgtgccctctcttctaagacacttacagtgtattagttatctattgctacctaacaaattactccagaacagtggctgaaaacaacagttattatgtcacatggtttcttaagtcaaaaattccagagcagcttagatgggtgtctctggctgaggtctgccttgaaggcccagtccagacatcactggggctgcagtcgtttgaaggcacgatggaggctggaggattcacctccaasaagggtcatggtgcaggttgttgccaggaggcctcagctcctcaccatgagaacttttccatgggctgcttaggtatcctcatgttattacatgtggctttccccagtgtgagtgatccaagagggcaaaatggtacccgcaacttcacttatgacaagcttcggaagtcacactctgtcttttta

SEQ ID NO: 322650 - DNA, 491 bp, Homo sapiens
aaataaataaatacgtgcaacttagcagaaatatggtattttgctatttaagagcaaactggtaatcatgagataaacttttgatggaccttgaaatgcactaactcataggcttaatagcaacaattctttgttctatgtaattaacacactggctcaaaaaacaagtatctatttctggcagggagaataaagcagaaaacaatcacactatagttttctctggaatgtatcagcaaatatgtacccttctgtacacttagctggtgaacatccaagaagctatttgactttctcaagagatggtagattcctgctagagtctagttctcaacgatatttgttagtmtattatcttaaaagcctcctacatttaacttttgaaacccgttttatgaagcatttaaatgtgaagtttgttgaattatctgcaagtaatacggttattttatacatggaaccagtaggcgtgaatatgagaaaaagatggg

SEQ ID NO: 322651 - DNA, 634 bp, Homo sapiens
tctcctgaccttatgatccgcccacctcggcttcctaaagtgctgggattacaggtgtgagccactgcgcccrgccagaagagtattaatttctaaaattttcctcatgtcatgttttcctcttcaaatgatgccaatctgggctcccacccttcctaagactccacagaaattgtgttgtctcatttattgatgatttccttggtgctaaaactgctggaccttctctgtccttcaatagcaacagatgacacactgggatgagcctgctccatccttcccaagacattctccttcctttacttctattttcttcctctacttgaccttccaacatggcagtgctccaagaattggtctaccctcttcaattttctagctagaaaggtctcatccagtccatatgcctaaaaataacctacctgactcttaaatatttacctcctgccaagtcactccactgaactcaagatgcaattagatagccaattgcttatttcatatccagccattatcttagtagacacacttagtatgtgtgatccacagtttgtttccagcctttaccttcatctcacatcatgtgtacaaagtggtttccttctcagactctaccgtcttattaaatgaaatt

SEQ ID NO: 322652 - DNA, 489 bp, Homo sapiens
ttacttcatttctttttatgcctgcatagtattccacagatagcatatataccacagtttctttatccaatccaccgttaatcggcaactaggttgattccatgtctttgctatcgtgaatagtgctgcaatgaacatataagtgcatgtgtcttttcagtagaacaatttactttcttttggatatacacccagtaatggggttgccgggtcaaatggtagttctaagttctttgagaaatctccaaactgctytccacagtggctgaactaatttacattcctatcaacagtgtatgcattcccttccctttgctttgcagccaaatcagcatctgctgttttttgacttttaataattgacattctgactgttgtgagatggtgtctcattgtggttttgatttgcatgtttctgattattagtgatgtggaacattgtttcatactttaattgaccacttgtgtgtcttcttttgagaagtgact

SEQ ID NO: 322653 - DNA, 504 bp, Homo sapiens
gagcatattccatgggccaggctctgtctttttctctgtttataatcaacacaaatattctgcaaggtattttataatattgctrtgttacagctgaagacaccaaagcaatcacaagcatagtcgtttgctaaagccacacacagtcactaaatggccagaccagaattgaagccaactctttcaagtgacagagctttttctcttttcgttgtgctaacttaactcagtctcttacttctcagtgtctgttacaggatcaggcctggagtttgttatataattgatacctggagatgcctcggtggtctatggattggcacaattgtggcattgccttcccatgaattcaaggctattgctgtctttgaactgatataaactgtatttttaattggtaactagtaaaaaaggatttgaaggaaaagttccttcaggaagttaaacctggttatttatctgccacttttgttgtataaccatggaatgtacaatggcagttat

SEQ ID NO: 322654 - DNA, 580 bp, Homo sapiens
tttttcagtattaattgcatctgtgattaaagtatttgcgtgggagaagtacattctttgtgtttagactgatctggatttgtatctctgctttgtacgttgcaggtagcagttgtatgctgtcagacaagctagtgtctctgagtagggattatgataccattccccagtattgttaagatgaaatgagatggtgtgtctgaagtaacttgcataatgcctggcactgaatttttgtccttgtaacaacaaygacaacaacaacaaaattagcatttattatgcaagtgctgggaatattctaggcattttttgtttgtttgtgtttttgagatggactttcgctcttgtctcccaggctggagtgcaatggcatgatctcagctcactgcaacctccgcctcccaggttcaagtgattctcctgcctcggcctcccgagtagctgggattacaggtacctgccaccatgcccggctatttttgtatttttagtagagacgatgtttcaccatgttggccaggctggtcttgaattcctgacctcaggtgatccacctgcctcggcctcccaaagtgtg

SEQ ID NO: 322655 - DNA, 459 bp, Homo sapiens
gatccacctgcctcggcctcccaaagtgtggggattacaagcgtgagccaccgcacctggcctaggcaacattttacttgctttttatgaagaaactcatttagttttcacatgaggtcaactctattgctatctcctttttatacttaaggaaacagaggcatacagaaggcaaataactagcccaaaagcacaaagccagtcaacaactgcaagtaaccacagtagctgtaaataactgtaagtaattgtaartaacaataaataacaacccatgttcttggcttgtcatgctaccccacctcccactatggcagcaaagcagctggggcaggggcttcacaactgggagctttcaattacttgctatggcatttcatcaagatgggtgtgttatgataccatgtaactctagctataactcatgaatcattgtcttcctctccctccttatcatac

SEQ ID NO: 322656 - DNA, 459 bp, Homo sapiens
gatccacctgcctcggcctcccaaagtgtggggattacaagcgtgagccaccgcacctggcctaggcaacattttacttgctttttatgaagaaactcatttagttttcacatgaggtcaactctattgctatctcctttttatacttaaggaaacagaggcatacagaaggcaaataactagcccaaaagcacaaagccagtcaacaactgcaagtaaccacagtagctgtaaataactgtaagtaattgtaagtaacaataaataacaacccatgttcttggcttrtcatgctaccccacctcccactatggcagcaaagcagctggggcaggggcttcacaactgggagctttcaattacttgctatggcatttcatcaagatgggtgtgttatgataccatgtaactctagctataactcatgaatcattgtcttcctctccctccttatcatac

SEQ ID NO: 322657 - DNA, 459 bp, Homo sapiens
gatccacctgcctcggcctcccaaagtgtggggattacaagcgtgagccaccgcacctggcctaggcaacattttacttgctttttatgaagaaactcatttagttttcacatgaggtcaactctattgctatctcctttttatacttaaggaaacagaggcatacagaaggcaaataactagcccaaaagcacaaagccagtcaacaactgcaagtaaccacagtagctgtaaataactgtaagtaattgtaagtaacaataaataacaacccatgttcttggcttgtcatgctaccccacctcccactatggcagcaaagcagctggggcaggggcttcacaactgggagctttcaattacttgctatggcatttcatcaagatgggtgtgttatgataccatgtaactctagctataactcatgaatcrttgtcttcctctccctccttatcatac

SEQ ID NO: 322658 - DNA, 566 bp, Homo sapiens
aggctgagcatgaccaggacctgagtaaacaggataagcaagaaacagatgttgatgaggaccctcaagcgtctacatctctgcagttttcaaagaagaacctccttgaactgtaagtcttgacacatgcaagacagagcatttaataatgtgtggaggggaaaatagaatttaagcagataacttagggaaagtctggaagatttaaaatccatacatgtcttgaaccataaagcagtcctgtgcataggtaactacctacatgatctagcaataatgtggtgtaaggacattttagggatgtagacagagcatgggaaaaaagaaagagcaaactcttctttgaggcctgaaattaatatatatttaarccttctcagataattttctagacaggaaaaccataattatcattaagagtatgttgttaagcccttgtggatcttttccctattgtagacctctcctcccccagaatgatgtaaccactatcttaatatcaatatttaacattcattccacacagtgaaattaaaaatatatctttttttattaaacataaaata

SEQ ID NO: 322659 - DNA, 566 bp, Homo sapiens
aggctgagcatgaccaggacctgagtaaacaggataagcaagaaacagatgttgatgaggaccctcaagcgtctacatctctgcagttttcaaagaagaacctccttgaactgtaagtcttgacacatgcaagacagagcatttaataatgtgtggaggggaaaatagaatttaagcagataacttagggaaagtctggaagatttaaaatccatacatgtcttgaaccataaagcagtcctgtgcataggtaactacctacatgatctagcaataatgtggtgtaaggacattttagggatgtagacagagcatgggaaaaaagaaagagcaaactcttctttgaggcctgaaattaatatatatttaaaccttctcagataattttctagayaggaaaaccataattatcattaagagtatgttgttaagcccttgtggatcttttccctattgtagacctctcctcccccagaatgatgtaaccactatcttaatatcaatatttaacattcattccacacagtgaaattaaaaatatatctttttttattaaacataaaata

SEQ ID NO: 322660 - DNA, 595 bp, Homo sapiens
aacatatgaatttggagggaaaaacaattcagtcaataacacagaaacttacctagtttataaattggatcaatccctgacaaaacgtcactgatcaacttccactctgaaaatactccatgactaaccagcatcctaacctccccactttgagacactatgggactctatcaagatgatgttgatcctcgagtttaataagagccaatgtgggttctgtgacatcatcatctctctgcttctgattggtcaagtatcctctctctctccccacttttctccctctaatccagtggttctcaaacattagctgtacctgagkcccctggggagcttcttaaacctcaggctgctgggcccactcccggagttcctgattcagtaagtctgggagggggcctgggaatttgcatttctaacaagttccctgatgcttttgctgatgctggtccagggaccatgctttaagaacttctgccttagagatcctcttgaattgtctggggtcggggttagggacggtggctgagccattggcattttataaagttccccacgtgattctgacatggagacagcattgaaaacactgttc

SEQ ID NO: 322661 - DNA, 595 bp, Homo sapiens
aacatatgaatttggagggaaaaacaattcagtcaataacacagaaacttacctagtttataaattggatcaatccctgacaaaacgtcactgatcaacttccactctgaaaatactccatgactaaccagcatcctaacctccccactttgagacactatgggactctatcaagatgatgttgatcctcgagtttaataagagccaatgtgggttctgtgacatcatcatctctctgcttctgattggtcaagtatcctctctctctccccacttttctccctctaatccagtggttctcaaacattagctgtacctgagtcccytggggagcttcttaaacctcaggctgctgggcccactcccggagttcctgattcagtaagtctgggagggggcctgggaatttgcatttctaacaagttccctgatgcttttgctgatgctggtccagggaccatgctttaagaacttctgccttagagatcctcttgaattgtctggggtcggggttagggacggtggctgagccattggcattttataaagttccccacgtgattctgacatggagacagcattgaaaacactgttc

SEQ ID NO: 322662 - DNA, 633 bp, Homo sapiens
ctttctacagctgtcaagcctttgggtgggagagccccgccatccttcctatcaacatgcactgtgcattggcctcttcaacgtcttaggaacacgcccagtaacaacagagcattactcaaaaccagtaagtccccccttgatttccacctgccacaatattaaatagggctcagttttaaaataatacgtcgtggctcactactgatcaaaatttacccaacttgacattccctggaccagtgccatatatacaattccgaggcttcagactgatccattaatttctacttcactcacctgtcacctaracaatcattaatttattgtctgtttagtctttcctaatatttaactagaattcttttacttaactagaacttacattttaaaatggcaggttaactttaacccagacacttctgtcaaagaagactaagagaaataaattttagctaaaacagatgtaagatgatgatggaaaaattggcttaaacaaatgctttcattgaagaaattttcctggcacgttgaaacaagttgctgataaatcttcaggatatagcatctatctcccaagtcccataaaaattagattctctgctactttcccttgctcttccagagtctatc

SEQ ID NO: 322663 - DNA, 633 bp, Homo sapiens
ctttctacagctgtcaagcctttgggtgggagagccccgccatccttcctatcaacatgcactgtgcattggcctcttcaacgtcttaggaacacgcccagtaacaacagagcattactcaaaaccagtaagtccccccttgatttccacctgccacaatattaaatagggctcagttttaaaataatacgtcgtggctcactactgatcaaaatttacccaacttgacattccctggaccagtgccatatatacaattccgaggcttcagactgatccattaatttctacttcactcacctgtcacctagacaatcattaatttattgtctgtttagtctttcctaatatttaactagaattcttttacttaactagaacttacattttaaaatggcaggttaactttaacccagacacttctgtcaaagaagactaagagaaataaattttagctaaaacagatgtaagatgatgatggaaaaattggcttaaacaaatgctttcattgaagaaattttcctggcaygttgaaacaagttgctgataaatcttcaggatatagcatctatctcccaagtcccataaaaattagattctctgctactttcccttgctcttccagagtctatc

SEQ ID NO: 322664 - DNA, 592 bp, Homo sapiens
tttatcttttcaaaaagccaacttttcatttcattaatttttttgtctcaatttcatttatttctgctctgatttttattatatctttccttttactaattttggatttggcttgttcatgcttgtctaattccttgaggtacatcattaggttctttatgtaaagtctacttttctgatctagggatttattgctattaacttccttgttagtactgcttttgttgtatcacatagattctggtatgttgtatttccattttcctctgtttcaattcatttttaagtttctttcttaatttcttcattgacccaytggttgttcaggagcatgttgtttaattttcatgtttgtatgttttccaaggctgctcttgttattgatctctagttttattccattgcggtcagagaagatacttgacatgatttctatttttttgaatttatgcagacctaagatatggtctattctgaaaaatattccatgtgctgatgaaaagactatgaattctgcagcagtggggtaaaatcttctgtaaatgccagttaggcctgttagatatagtgtgtaatttaaccccactgtttc

SEQ ID NO: 322665 - DNA, 592 bp, Homo sapiens
tttatcttttcaaaaagccaacttttcatttcattaatttttttgtctcaatttcatttatttctgctctgatttttattatatctttccttttactaattttggatttggcttgttcatgcttgtctaattccttgaggtacatcattaggttctttatgtaaagtctacttttctgatctagggatttattgctattaacttccttgttagtactgcttttgttgtatcacatagattctggtatgttgtatttccattttcctctgtttcaattcatttttaagtttctttcttaatttcttcattgacccactggttgttcaggagcatgttgtttaattttcatgtttgtatgttttccaaggytgctcttgttattgatctctagttttattccattgcggtcagagaagatacttgacatgatttctatttttttgaatttatgcagacctaagatatggtctattctgaaaaatattccatgtgctgatgaaaagactatgaattctgcagcagtggggtaaaatcttctgtaaatgccagttaggcctgttagatatagtgtgtaatttaaccccactgtttc

SEQ ID NO: 322666 - DNA, 592 bp, Homo sapiens
tttatcttttcaaaaagccaacttttcatttcattaatttttttgtctcaatttcatttatttctgctctgatttttattatatctttccttttactaattttggatttggcttgttcatgcttgtctaattccttgaggtacatcattaggttctttatgtaaagtctacttttctgatctagggatttattgctattaacttccttgttagtactgcttttgttgtatcacatagattctggtatgttgtatttccattttcctctgtttcaattcatttttaagtttctttcttaatttcttcattgacccactggttgttcaggagcatgttgtttaattttcatgtttgtatgttttccaaggctgctcttgttattgatctctagttttattccattgcggtcagagaagatacttgacatgatttctatttttttgaatttatgcagacctaagatatggtctattctgaaaaatattccatgtgctgatgaaaagactatgaattctgcagcagtggggtaaaatcttctgtaaatgccagttaggcctrttagatatagtgtgtaatttaaccccactgtttc

SEQ ID NO: 322667 - DNA, 584 bp, Homo sapiens
atttataataatacatatcaagtattaaatgtttatatgaaccagaattacaatagatctcttgagaggaaagaataggaaaggcgtgcatttgtgatgtagcagagaggaaagagaaaaattcagattttttrtaccaaggaatttcagaataatgcctgaaactgaaaaatcaagaagtagcaattcaaacatcttatttaaagatatggaggtaaatataaaaataatgagccaaaaaatggtgaaaatggtgggaagtaaggcagggggattgctttagtgtgttgctttttccacacaaactgcagaatcatttaactctaaaaatgtacatgtgtaacagtaaaaactgagtatattaaaatgtcagttctttttattttttgttttgaaatgcctaggaataaacagttttgtcgttctctcttatgcattagtataaacaagtttttcagaaacttaatcacttaacctatcctttgtggttgaaaggtcagaataggttaagaattttaaatgtgaaacattgaaaggctgattaaaacatcttaaaagggaataatgtaaaagcatgatatatg

SEQ ID NO: 322668 - DNA, 551 bp, Homo sapiens
gaaacacaggtgctgtatcatgcaatgcgataataaagagctttaattgtattctcagtcatgggaaacatttgaaaggatttatgtaggctgattatatgatctgctttttgttttaaatattttttaaacattactttggttgatgtatggagaatgcattgaagagttaagaaaatggaaaagatggagatcagttaggctgttgcaataaatcagacaagtgataatgttagcttagcctaggatcagaggagtagaggtagagagaaatgactggatttggagaggatattttaaagtagaaataagaaggtagattaggtgtgaggataaaagaaaccatcgttgatgacttaggttttgttttgggtaactgarcgtcttgtgatatcatatgttgagattgtgaagactgaagaaggactttttgggatgaaggtgataggaattggttctgtttggtaatatttaatttgaagtggtgtcttagccgtgtgaactattaagctaattaagtaaacttaaattgctgccaattttgaaaagga

SEQ ID NO: 322669 - DNA, 585 bp, Homo sapiens
atctcatttgtgattaaaaaaataataatccttagcatatgtttttggttatactgataaatttagatgaattgagtttggaaggaacagttaatctctgagtgctacacaagcagttataatcttttctttctaaaattatcaaagggcatagtttttagcttgtacagaatataaaattactgagctctgttcattaatgtatygaaagacctcttgaaatgaggtaagaaactgtttttagaaaatagttttgtattacctcttaaatacctgacctaaatggtcaccaaggaaaaatttttttaaaatttgacgatgaaattcaaccttacgtaggtgaaatgttgagtgatcttacccccaaccataatgtttatctgaccaaaacctttgaatgatttcttttattaacagttacatagtctataattactccatgtagattcttgctgttgttgctattgttaatattattattttggctgagacatggagtgatcaaatagatatagacttaactcagaaccctggttttaatatacttctttaaatgaattgagtgtttattttaccagctgaata

SEQ ID NO: 322670 - DNA, 585 bp, Homo sapiens
atctcatttgtgattaaaaaaataataatccttagcatatgtttttggttatactgataaatttagatgaattgagtttggaaggaacagttaatctctgagtgctacacaagcagttataatcttttctttctaaaattatcaaagggcatagtttttagcttgtacagaatataaaattactgagctctgttcattaatgtattgaaagacctcttgaaatgaggtaagaaactgtttttagaaaatagttttgtattacctcttaaatamctgacctaaatggtcaccaaggaaaaatttttttaaaatttgacgatgaaattcaaccttacgtaggtgaaatgttgagtgatcttacccccaaccataatgtttatctgaccaaaacctttgaatgatttcttttattaacagttacatagtctataattactccatgtagattcttgctgttgttgctattgttaatattattattttggctgagacatggagtgatcaaatagatatagacttaactcagaaccctggttttaatatacttctttaaatgaattgagtgtttattttaccagctgaata

SEQ ID NO: 322671 - DNA, 585 bp, Homo sapiens
atctcatttgtgattaaaaaaataataatccttagcatatgtttttggttatactgataaatttagatgaattgagtttggaaggaacagttaatctctgagtgctacacaagcagttataatcttttctttctaaaattatcaaagggcatagtttttagcttgtacagaatataaaattactgagctctgttcattaatgtattgaaagacctcttgaaatgaggtaagaaactgtttttagaaaatagttttgtattacctcttaaatacctgacctaaatggtcaccaaggaaaaatttttttaaaatttgacgatgaaattcaaccttacgtaggtgaaatgttgagtgatcttacccccaaccataatgtttatctgaccaaaacctttgaatgatttcttttattaacagttacatagtctataattactccatgtagattcttgctgttgttgctattgttaatattattattttggctgagacatggagtgatcaaataratatagacttaactcagaaccctggttttaatatacttctttaaatgaattgagtgtttattttaccagctgaata

SEQ ID NO: 322672 - DNA, 638 bp, Homo sapiens
gacttgtttacgttgtagcccatgtaaatggtgcaccaagcgttgtgcagtgcacagactgaacaacactgtgtagaggccctacctctaccttattgaggtatttttctaatcaaagactgttttggtcctagytattatgcgaataatctctcacttatattacatagaagatctacaaaaactttttgggatattgaaaaagaccgaatgagtgaaaagctataaagctatgctgtacatttggacaggaagtctaatattatgaaaatgtctgttctttcctaattactcctggatgtcataaattctaattaagatgtaaacaggtttttctatttctttggtttatgacaacaactttataatatatttgaaaaaatgaataggagagatagcaaaaataaatcttaaaaaaagaatattaaaccctataatgagcactaacacatctctttgtcagctatatagttatcttattaacctgcttcctctgtctatcatctatatatctacctacctgcctatctatctcttttttggctatttttatggacatctgaagcattttttttctttcccttcccttcagagaagggcatcatcgcccccaacacgcatccacgtggttttcgtgg

SEQ ID NO: 322673 - DNA, 638 bp, Homo sapiens
gacttgtttacgttgtagcccatgtaaatggtgcaccaagcgttgtgcagtgcacagactgaacaacactgtgtagaggccctacctctaccttattgaggtatttttctaatcaaagactgttttggtcctagttattatgcgaataatctctcacttatattacatagaagatctacaraaactttttgggatattgaaaaagaccgaatgagtgaaaagctataaagctatgctgtacatttggacaggaagtctaatattatgaaaatgtctgttctttcctaattactcctggatgtcataaattctaattaagatgtaaacaggtttttctatttctttggtttatgacaacaactttataatatatttgaaaaaatgaataggagagatagcaaaaataaatcttaaaaaaagaatattaaaccctataatgagcactaacacatctctttgtcagctatatagttatcttattaacctgcttcctctgtctatcatctatatatctacctacctgcctatctatctcttttttggctatttttatggacatctgaagcattttttttctttcccttcccttcagagaagggcatcatcgcccccaacacgcatccacgtggttttcgtgg

SEQ ID NO: 322674 - DNA, 569 bp, Homo sapiens
ttgaatcccagcttgaatttctgaagccctacaatctcttgggtcttctttaaagttcttttcccaattcttgaaacttccctaatatacttttagtaatataaacatagatctatagatatggatataactaaagggaaaattctgtctctcttctgctctcctcctcctatttaatacccaaagcaagaaaggaagagataccattctgattggccaagatcccagacaasttttaggattctcatttactgttggatggtttcactctcatctaatggtagtggttatggtgttcatgataatagaggtgataagagtattggtatttgttatagtggcaacagcagcaactctgctcctgagtgtgccagaaggtgcttagatatactgaagtttctttaggtattaaagtcttctgggcttgaagtggggctcatggctcaggaaagaagatggtatagaattggtagggaataatatattctgagcaggcaaatgacatgagttattttatgcaaactctccaaagtcctcctcaaccaggaataatagaattccctctcttt

SEQ ID NO: 322675 - DNA, 558 bp, Homo sapiens
acacctacacaaatgttcaaacaaactgtgagctaggcatgggctcacacttgtaatcccagyactttgggaggctgaggcaagagaaccacttgagcccaggagtttgagactagcctgggcaacatggcaaaactcagtctctacaaaaatacgcaaattagccaggcatggtggcttgtgcctgtagtcctagcttctcaggaggctgaggtgggaggatcacctgagcctgggaggttgaggcagcagtgagccatgattgtgccactgcactccagtctgggtgtgacacagtgagacgatgtctcaaaaaaaaccacaggccaggcacagtggctcacgcctgtaatcccagcactttggaagaccgaggcgggcggatcaccaggtcaggagttcaagaccagtctggccaacatagtgaaaccccgtctctactaaaaatttaagaaattaaccaggtatggtggtgtgcacctataatcccagctactcgggaggctgaggcaggagaatcatgtgaacctggaaggcagaggttgcagtgagccaaga

SEQ ID NO: 322676 - DNA, 568 bp, Homo sapiens
acaaaccagcaatcctgaaaggacccacagaccttctgaaggaagcggactactcctgtaggacccgggagacaccctaaatactgtgagtgccccaactgcagaagtgggaaagggagaccctcctctcctgaacacacaccctcactggagaagctaaaggtctatttctgagaggtctctgactttacctggagctgagtcaagttagagaggctagcaaaatacaggcatagaggaagcagcagaaaggccctgggagcttgctgggtccccaagcwgcccattcctgcctggcaccacagggatccaacaggagggcggccagaggagcagggggtaaaactccacagggagaaggaaatctctagctgaactttgcaacaatttgaacgggggtgagaagcctcctggccagaaccaggggagggtgagaatccggtgtgcagacttcacaggcagaggaagaactagagcccttttgtttcacagctgggaggcaaatagcctcaggcaaattttcaagcccgtcttgccctctgcctggaaacagactcggagttgttga

SEQ ID NO: 322677 - DNA, 568 bp, Homo sapiens
agggaggagacccatcaaaattattgaaaagtttgattgaaggtgcctttaaaaatattgatgattttccaaggagaaaatttcttctaagcagatttttttaaatgyataatttgtttaaaagtgcttatttacaccatggaatacaatgcagccataaaaaagaatgagttcatgtcccttgcaggaacatggatgaagctggaaaccatcattctcagcaaactaacacaggaacagaaaatcaaacacgtgtttgttctcacgcataagtgggagttgaacaatgagaacactggtacacagggaggggaataccacacaccgggacctgtcgggggtggggggcaaagagagggagagcattaggacaaatacctagggcatgtggggcttaaaacctagacgatgggttgataggtgtagcaaaccaccatggcacacatatacctatataacaaacctgcacgttctccacatgtatcccagaacttaaactgaaatttttaaaaatatggttatttataaaagacttgaagcacttgacctcggatcagaggtatgttca

SEQ ID NO: 322678 - DNA, 517 bp, Homo sapiens
attctgtgaattcaggaatatgatcatcatgtccctctaaaaaaatagggagagatctcacttttgattttgctatgctgcatcaacaaagacctttagcttgaagaggaaaatgagaaatcatgggatttaaagaactcattccaggtagaaaaacaaagaccagaaaaaaaggtgtcccaagtcatgaagcagacccccacccactcctgcacactcaaggaaaggtaagacacagagagcatgtctagggaaaggatactaattggttagttccacatcttgcacacccaggtgcaggtgctccataggtagaactagaaatsgtaagacagctggaggtagaatccagctcccatggaggactgaagccctgaggacaagtgagatcctcaggacagctgcagagaatgactgagtgcagtgggctcaagatagagccctggagaaccccgatgtttaaaggaacaaaggggatgatgaacccatccaagaaactgagaagaaatgctcaaaa

SEQ ID NO: 322679 - DNA, 405 bp, Homo sapiens
caggtgaagatgcaacctcacgggttcaggttccccctcaggtgcacctgccaatattgaagctggagtctgaatgaagtgctgcttcagaatcctgttccctttccttgaacacatgtctgccaggccatgcaaggtgaagatgaaagataatggagttgactccagtctcccactcagctgatgaagaagaggctggtggcagagatcagcggccagcacagtacgggcrtggttggaaagttcccaccaagggtggtgagatgtgttccctttggggttatttattagaggcaactttttttttttttaaagaaaaggaaagtatgcttatatttgccttttctttttttaagtgtgtttacatttaaggagtacaagtgcagttttgttacatggatatat

SEQ ID NO: 322680 - DNA, 553 bp, Homo sapiens
ctggtgattaccttgcttttgttctttgtcagcattttttctcatcctcgcactctccagggcttaatcatggtgcctatctatagtttcaagagtacctctcagccagtgcttcttaactccagcactacygacacttggggctgaataagtctttcttgtggaggcagtgccttgtgcattgtaggatgtttagccacattcctggcctctacattctagatgccagtcgtgtactagcccccaacagttgtgacaaccccaaatgtctccagacattatcaaacgtcctctaaggggcaaacttcagcaccactgatcaaaaatgatgttcttccagtctgcacttgcagctctgaaatgaagaagctataattggccactccctattcatctccacatggagcttccatacgtcctcctgcacctggtctggaccctaacatcctcttcctgacacttttcctctttctgaaccactggcctcatcgccccccgatccttccttcttcttactggctgttcggcctgcttcagcatttcctgtgtgcag

SEQ ID NO: 322681 - DNA, 558 bp, Homo sapiens
caagtgattatcctgccttgaccccccaaagtgctgggattataagagtgagccaccacacctagccagttagtactttttagccaacaggggcttcctcttgttactatttttttcaaagagttgttataaattaatcttgaataaaattcagaactttttttatgycaaatgatacaaccaaatcttttctgggcttagatatattaaggtgtagaattattttaatgaatgttctagttccagtgttaaaccatttttgtatttctggaataagacgttgccacttaagatttatttaaaataatgacagccaattatctttatctattaatatatagggttatatcaacagcctttctatgtaagtgttttctaagaagtatcatttgtcttcaggatcaaactgcatatctaatcatctccttccatgatttaaaatatttcagtggctctctattgttagagattatttcctgtacatgcaaacttcttcatgacttgatccccacattgtatctctgaattttctgcttatctctggctccttttctttgc

SEQ ID NO: 322682 - DNA, 643 bp, Homo sapiens
gtaccccaaaaagttatagtagtaacaatataatcacgatcacagacccccataacagacataacaataatgaaacagtcggacgtgagaattactagaatgtgacacagagacacaaagtgagaagatgctgttggaaaaatggcaacggtagatttgctagacacacggttgccatgaaactttcagtttgtaaaaaatgcaattatctgtaaagcacaatgaagtgaagtgcaataaacaaggtgcacctgtactaagaaccacttccatcatgaaagaagcagtgcttggttctcaggaagagaaacttccctggatatggactgatttttttctgtccacaatgcttttgtcaaaaccagcatctctgggcttcttagtcatcttattcaccatcatggtaatccacacttcattacttctgtccgagaaagaagattttatagcaaatgaagtataacggcaggttcgtgctcatgtgatttactggggttaccayggttccatgaattagctggctctatgaaatgatagaatggctttttgaagcctcagttttggtagcagtgaggcggcaaccctttgacacaacaagttatatgtgccgaataagcaattgatacataggagcttctttctt

SEQ ID NO: 322683 - DNA, 536 bp, Homo sapiens
ttagtagatgtgatgtggtatctcatagttttcatttgcatttctgcaatgtctaattatattgagcatcatttcacatggttattggccatttgtatatattctttggaaaaatgtctattcaaatcctttgttcatttcaaatacttttttctccttatatagttgtaaagrttatttttatatactctagataaaagtctctcatctgataaatgactggcaaatgttatctcccattccacgggttgtattttcactttcttgatggtgttatttcagcacaaaagtttttaatttttttaaagtccagtttgtttatttttttctcttgatgcttttcttttgtgtcgtacctaagaaaccattgtctaatccaaggtcatgaagatttatgtcaagcttttcttctaagagttttatagtttgattttctatttagatgtctgaaaaactttgaattagttttggagtgtgtgtgcagtacaaaggagggatccaccttcattattttgtatttgaatatccagttgttc

SEQ ID NO: 322684 - DNA, 536 bp, Homo sapiens
ttagtagatgtgatgtggtatctcatagttttcatttgcatttctgcaatgtctaattatattgagcatcatttcacatggttattggccatttgtatatattctttggaaaaatgtctattcaaatcctttgttcatttcaaatacttttttctccttatatagttgtaaagattatttttatatactctagataaaagtctctcatctgataaatgactggcaaatgttatctcccattccacgggttgtattttcactttcttgatggtgttatttcagcacwaaagtttttaatttttttaaagtccagtttgtttatttttttctcttgatgcttttcttttgtgtcgtacctaagaaaccattgtctaatccaaggtcatgaagatttatgtcaagcttttcttctaagagttttatagtttgattttctatttagatgtctgaaaaactttgaattagttttggagtgtgtgtgcagtacaaaggagggatccaccttcattattttgtatttgaatatccagttgttc

SEQ ID NO: 322685 - DNA, 536 bp, Homo sapiens
ttagtagatgtgatgtggtatctcatagttttcatttgcatttctgcaatgtctaattatattgagcatcatttcacatggttattggccatttgtatatattctttggaaaaatgtctattcaaatcctttgttcatttcaaatacttttttctccttatatagttgtaaagattatttttatatactctagataaaagtctctcatctgataaatgactggcaaatgttatctcccattccacgggttgtattttcactttcttgatggtgttatttcagcacaaaagtttttaatttttttaaagtccagtttgtttatttttttctcttgatgcttttctttygtgtcgtacctaagaaaccattgtctaatccaaggtcatgaagatttatgtcaagcttttcttctaagagttttatagtttgattttctatttagatgtctgaaaaactttgaattagttttggagtgtgtgtgcagtacaaaggagggatccaccttcattattttgtatttgaatatccagttgttc

SEQ ID NO: 322686 - DNA, 536 bp, Homo sapiens
ttagtagatgtgatgtggtatctcatagttttcatttgcatttctgcaatgtctaattatattgagcatcatttcacatggttattggccatttgtatatattctttggaaaaatgtctattcaaatcctttgttcatttcaaatacttttttctccttatatagttgtaaagattatttttatatactctagataaaagtctctcatctgataaatgactggcaaatgttatctcccattccacgggttgtattttcactttcttgatggtgttatttcagcacaaaagtttttaatttttttaaagtccagtttgtttatttttttctcttgatgcttttcttttgtgtcrtacctaagaaaccattgtctaatccaaggtcatgaagatttatgtcaagcttttcttctaagagttttatagtttgattttctatttagatgtctgaaaaactttgaattagttttggagtgtgtgtgcagtacaaaggagggatccaccttcattattttgtatttgaatatccagttgttc

SEQ ID NO: 322687 - DNA, 631 bp, Homo sapiens
gacaagccacttgcaagctgtatgactttgaagtgaatcactttaagctctctgagcctcagttactttggctccaagaagagactattagtagaaacatccttgtgttatcttgaaaaaaaaacaaggcacaaacaacaaattgctgcttgtgacagtggtttgtcaggtctgagatactatacacactcacaacatcttcagagtcagaaggaactgacgtccattccctgtcttgcttcttgttatttgggagactctgggtaaactggccaaccacttctcatcttagttttcttgcatgttaaatgaggatcctggaatttacctcaatgattgttgtaagaattaaataaggtagcatgtatgaatcatgaagcacagascctggcactagtaaaggattaaatactaatcctttattttatttagatatcagtaaataccacccactgttattattactgaaaacaatattgaagacaattagcttcatttcatgtttaccatgtaaatttctaaagcctaagttctcaccgaagacccaagcttaagcgacagttggctggcacaacattggtggatttcttttgagtgtcacagactggcacacatgggaagagcttcagag

SEQ ID NO: 322688 - DNA, 571 bp, Homo sapiens
cccatgtctttccccttcaccaacactggttatgtcactaaaaacctcccagagaaccaagctggagcctcttgtgctgtgcttttaatgatactcactcagaattgagcctccagccctgaaattttcatttaagcacattgtgaaaatgctcattctaattgacatcatcaacataacacttcatctattattcacaggctccagcctgtctcctgattcagaaggtgcagatgacaagggcttcgtgttgcccagtwggtgaacattgagttctgttgattttctctgccatgtctcttctcttgtctgtttccctcctgctgtggccctgatacaggcttttcttatctggaccctctcagcagcttcctcactgtgttcgctgcctccagttcctattctcctaatgaaatgcacaaagagctacaggcatttgcttcaaatcgagttctaattgggccacttctgtactgcaatcccctgcagggatctatattcccttgggagtcaaatttaaactgccttgagagcattctgggccccagcaaactacttttccaacccacct

SEQ ID NO: 322689 - DNA, 572 bp, Homo sapiens
gtccacattcctcttaatatgggcaatcatagacattctctctctgcactctcagctctcttaccctttcttgctttataatactctcttagcaaaacttcaaacctgcacacacacaaaaatcttctctatgttgtgtctgcacccaggtaactaaacatggcaaaagaaacacagaaaaatcatggccttactttaaatgcatgactctgactctctaatgamccgacccttaatgtagtgccactatcatgatggctttccctggcccactgactctcccacttaagacaatggcacacccttcctctctcctcaaacctctaacactgtctccctcatcctcacactcaggtgatgccatagcttccagttcaaaaaatagaagtgataagaaaaggatttccacacatttctactcccacacctgcccacctaaaggcatctgtacctataccttctgcctcctttcctggcattgttcgtaaattctctacacgacattttagggctggcccttctctcatgcatgaggtagcatctatctcacctactcaaggacatggctactg

SEQ ID NO: 322690 - DNA, 572 bp, Homo sapiens
gtccacattcctcttaatatgggcaatcatagacattctctctctgcactctcagctctcttaccctttcttgctttataatactctcttagcaaaacttcaaacctgcacacacacaaaaatcttctctatgttgtgtctgcacccaggtaactaaacatggcaaaagaaacacagaaaaatcatggccttactttaaatgcatgactctgactctctaatgaaccgacccttaatgtagtgccactatcatgatggctttccctggcccactgactctcccacttaagacaatggcacacmcttcctctctcctcaaacctctaacactgtctccctcatcctcacactcaggtgatgccatagcttccagttcaaaaaatagaagtgataagaaaaggatttccacacatttctactcccacacctgcccacctaaaggcatctgtacctataccttctgcctcctttcctggcattgttcgtaaattctctacacgacattttagggctggcccttctctcatgcatgaggtagcatctatctcacctactcaaggacatggctactg

SEQ ID NO: 322691 - DNA, 520 bp, Homo sapiens
agcaacatggcatgaaaccatcttcttacctctatccttgaggctgaatgggcaacaaagcaattcactctctcattcaacaagttgaattcataccaccaccccaggagaggtaggttctataataatgcctacgccatggaagaggaagcaggggaaagcctacacgcccaagctcacctgkcagatcagaggtgaggacactgaaaaaagaggaaggaacaagacagacatggctcctgccctctggtgctgactggaggctcctggaggggatagacatcaaacatacacaaatccctatgtccctgtaaaggatctttgtgccaagaggaagcagatatgggtgtgaccagagggaataatggggcaggcgtttttgggttaggtgaccatggcaagatgtcttccatgaagtgagattggagtgaggcctgaaatttgagcagaagtcaggatttcaaagggtccagccagagtcatccaagcagaaggactgacatgggccaagtcctgaatg

SEQ ID NO: 322692 - DNA, 310 bp, Homo sapiens
tgctttagtggcaataggtagccaatggaggggtaataagacctcacagagtgtaagtccatctgagggcacagcttccaagacagggatactaacttggcctcctggcttgttccccaggggctttgtcagggggaaggttctgtgcaccctcttttcatctcagaggctgcttctcccagscctgaggatggtgagctgtccttgcctggcccaggagccatcctggattccccagtttcatggggtcctgtttccttctgcaggggctgggattgccgctttgccctgttgcctcaatgggctgatc

SEQ ID NO: 322693 - DNA, 596 bp, Homo sapiens
tctatgctaatgtttcatgtgcagcatttcataaaattctaacaaatctatgattggcatcaccactttaaaaataaggacmgtgggttttggagaaagtaaacattttagtccagcctctagggtcacagagttgctagttgtctgatgctgaagacaggtctgcctgcctttgactgtttcggttcttcccatgtatttgtagagtgtttctacacactgtgttctctaagatatgatatacccatgtgtattttatgctcaaagcaggtatgctatgaatgacatcgttacatatgagaatagaggtggcatgctgccatgtaaggcctatgtttctatatctgtttactgtaaatggatctacatgatatatacatatgcccgtaggaagataacttcttcaggcttaagagtagaggcatttttgtagccttttaatgtgttttttcattgcttacctggcatgacgttaatcttggcaactttaatatgactttaaattcaattttctttcctcctggatgccagccacacaaccctgtttacagggatcactaaacaaaagtgaaggaagaaggaaaacaggttccatc

SEQ ID NO: 322694 - DNA, 541 bp, Homo sapiens
atcatttggtacttaggtacatagaaattcaaagtattatgtctttttgataattgtcacctttttggaatgatatactatgtccttgcataggaatattcaacatctaatgagtcatttcccctcattagtttattggaatcatattaaatttatattaatttaattttattaatttaattattttagaattaatttaatatttaattaatatgattcttttaaaaatactaacagcttaccgggtattttttccctagaaytagacaaactagttctaaagttgatttggcaccccgcgcaaaaggagccaagaagattctgaaaaggtctggctctaccaggaattaaaagtatggtcaaacttcaattaactacaatgatgtgctactggttcatggatagaaagatggatacatggaatagaaatataagccttgaaatgaatccagatacacatgggaatttagtatatgataaaggtggcatctcaaatatataaagatttttttttccaaaagtgtattggaacaattgagga

SEQ ID NO: 322695 - DNA, 541 bp, Homo sapiens
atcatttggtacttaggtacatagaaattcaaagtattatgtctttttgataattgtcacctttttggaatgatatactatgtccttgcataggaatattcaacatctaatgagtcatttcccctcattagtttattggaatcatattaaatttatattaatttaattttattaatttaattattttagaattaatttaatatttaattaatatgattcttttaaaaatactaacagcttaccgggtattttttccctagaackagacaaactagttctaaagttgatttggcaccccgcgcaaaaggagccaagaagattctgaaaaggtctggctctaccaggaattaaaagtatggtcaaacttcaattaactacaatgatgtgctactggttcatggatagaaagatggatacatggaatagaaatataagccttgaaatgaatccagatacacatgggaatttagtatatgataaaggtggcatctcaaatatataaagatttttttttccaaaagtgtattggaacaattgagga

SEQ ID NO: 322696 - DNA, 621 bp, Homo sapiens
ggtcaaacttcaattaactacaatgatgtgctactggttcatggatagaaagatggatacatggaatagaaatataagccttgaaatgaatccagatacacatgggaatttagtatatgataaaggtggcatctcaaatatataaagatttttttttccaaaagtgtattggaacaattgaggaaccatgtgatgaaagataaagctggatccatatctctactacacgttccaaaataatataaatgtaaaaaataaaataaaataattaagaagaaaagataggttattttacattagagtaggaaagattgtctaaaaataatgcaaaagttcacagttataaaataaagctttgataaattgtgttaaattaataatacaaagctgtcacatgaccaaaataccacataaaaagtcaaaagacaaatgaaaaaatgctccccaaattgcaactcatagagaaatgcctaatcttaatatagaaaaagctactggaaattaagaaagaataatgcaacaagccaataaaaatttgatttcaaaaaatgaagacaatttasagattaagaaataaaaggtggcctattaaaatatgaaaagatgctcaatgtctacaaa

SEQ ID NO: 322697 - DNA, 433 bp, Homo sapiens
ttgttctgtcacccaggatggaatgcagtgttgtgactttgaytcactgcagcctcaaccccctgggctcaattgatcctcccacgtcagcctctcaagtagctgggactacaggtgcataccatcatatctggctaattttgtagagatgaggtctcactatgtttcccaggctggtcttgaactcctgggttcaagtgatcctcccaccttggcctcccagagtgctgggattacagtgtgagccactctgcctggtcaatttcagtctctttttatggctgaatagtattgcattgtgtatatataccacattatctttattcaatcatccattgatagacacttaggtcagacacctgaattcttaagacaatgtgtgtttcacagcaggagtggcaggaagattttgtctggcatgatattctagcag

SEQ ID NO: 322698 - DNA, 558 bp, Homo sapiens
aacccttctcttaagaaatgatgttatcctcaagatgcgataaagcaacagcatattaacagttgacagaactactccttcctcagccccaggactctgggtggttggtcccgtggtggctgtttctggggaaggaggaggcaggaagagcagggggcagagcccagctcagggaagatggaaaggcacagcatggttctccttgaagaagtctgtggttacccatttatatttagccagtaaaatgaaatgtgcctgcrgaggctgggtgtaaattgttatttattgctttgtgagaaaactcccacatggggttctctggcaagggaagctttgcaaaatatttttggcagaagcaaggtatggctttgatttccactttgcctctaatgtttgtcaacgtgtcaccgttgagagggaaaacaaaatcggagcatgcatttttggccaagtttgtttattagttagcatatatttattgagcaatcactgtatgctaggtgctggggatatagcggtaataaaggcagatgtggttcctgtccttacagatgagat

SEQ ID NO: 322699 - DNA, 593 bp, Homo sapiens
gcatgccaggcccagcctaagcctcaagaagccttatgagcctgcagtctcacttttggaagcttgccaccaccctatgaacaagccaggacagatagctggagaatgagagaacagagaatggggccaggccccaggcaggtgagaaagcccagccaagatcagcaaagccattcccagcccacagtggatggcaaatgcatgatcagctgacctagctccgatcagcagaaccacctagctagcccagagagtggtaagcagtaataaatggttgttttaagctactaagattttgttttgaagactctatttttttagagcagttttaggttcaaagcaaaattaagcagaaggtacagagatttcccctatgtctcctgcccctcccccattatccacatagcttcctccattatccacatcccctaccagagtggtacatttgttacaatagataaacctacrtcaatacatcatgatcacccaaagtccatggttcacgttcgggttcactcttggtgttgtacactctgggtttggacaaatgtataatgagatgcattcatcattatagtatcatgcagagtatt

SEQ ID NO: 322700 - DNA, 509 bp, Homo sapiens
agtcatagtgtatcactggatggcagattttttttttttttgaaacagactcttgctctgtcacccaggctagagtgcaatggtgcaatctcagctcactgcaacctctgcctcctgggttcaaatgattcttctgcctcagcctcccaagtagctgggattacaggcatgcaccaccatgcctggctaatttttgtattttagtagagacagggttttgctgtgttggccaggctggtctcaaactcctgacctcaggtgatctgtccgccttggcctctcaaagtgctgggattacaggcgtgagccaccacacccggcctggatggcagattgaggaatyaaaatgattttgataggctggacaaatggacaaaattgaatggaggtaattatatgctacagaaatcaactgtgcaaaatagttcacatggaaaatatcttaggaggtttggcgttgggagggtcaattgagtcaacaggagaatgaggcctttagaagtttaatg

SEQ ID NO: 322701 - DNA, 509 bp, Homo sapiens
agtcatagtgtatcactggatggcagattttttttttttttgaaacagactcttgctctgtcacccaggctagagtgcaatggtgcaatctcagctcactgcaacctctgcctcctgggttcaaatgattcttctgcctcagcctcccaagtagctgggattacaggcatgcaccaccatgcctggctaatttttgtattttagtagagacagggttttgctgtgttggccaggctggtctcaaactcctgacctcaggtgatctgtccgccttggcctctcaaagtgctgggattacaggcgtgagccaccacacccggcctggatggcagattgaggaatcaaaatgattttgataggctggacaaatggacaaaattgaatggaggtaattatatgctacagaaatcaactgtgcaaaatagttcacatggaaaatatcttaggaggtttggygttgggagggtcaattgagtcaacaggagaatgaggcctttagaagtttaatg

SEQ ID NO: 322702 - DNA, 564 bp, Homo sapiens
gtgcaatggtttgatttataatttttcaactttacaagggtgctatagcaacacatatttaatagaaactgtacttcaaattttgaattttgttcttttcttgggctagcaagatgaggtatgatactcttttgagatgctgggcagtggcagcaagacacaactcccagtcagccatacaatcaggagggtaaacaatggataccctacagtatactatgttgccagatgattttgcctaaccacagactaatatgagtgttctgagcatgtttaaggcagcatargctaaactatgatgctcggcatgttagttggattaaatgcattttcagcttagcatattttcaacttctgatgggtttgtccggacatagtcccctcatgagttgaggagcatctgtactgcccaccactccactcccttggtcctgccctggccccttggtattccctctgctgccagaacattccctatatgtggtaactctagtgaggaacaggctgaactcaaagccactaattccatttgacaaccagtcgggatatgcaggtctttatttg

SEQ ID NO: 322703 - DNA, 564 bp, Homo sapiens
gtgcaatggtttgatttataatttttcaactttacaagggtgctatagcaacacatatttaatagaaactgtacttcaaattttgaattttgttcttttcttgggctagcaagatgaggtatgatactcttttgagatgctgggcagtggcagcaagacacaactcccagtcagccatacaatcaggagggtaaacaatggataccctacagtatactatgttgccagatgattttgcctaaccacagactaatatgagtgttctgagcatgtttaaggcagcataggctaaactatgatgctcggcatgttagttggattaaatgcattttcagcttagcatattttcaacttctgatgggtttgtccggacatagtcccctcatgagttgaggagcatctgtactgcccaccactccactcccttggtcctgccctggccccytggtattccctctgctgccagaacattccctatatgtggtaactctagtgaggaacaggctgaactcaaagccactaattccatttgacaaccagtcgggatatgcaggtctttatttg

SEQ ID NO: 322704 - DNA, 598 bp, Homo sapiens
cagactcttcctttctgcagatcttatcatgtctggatatgatgcctgaaactgccacagttactttgcaaccatgcccagggccagcacggtcaggatgctaagtggagacytggtaggaactgggcttcttggtgacatcctcgaggcattgattatgtgctgcttggagccaccaacctgtggacttcctgataacataaggtaatatatttccttaatgtttcaattaatttcaagcagatttttctgtttcttgctgccaaagcattctagctggcccaatctgtctattccatccccagaaccagttttaattgccattgctttataatgtttcagcctacaatcaccttctttggggtgagagaataattctttaactttcttaatttcttccttaagtgatttaaccatgtgattccagttgagtcaattctagtcatctaaatttcttaatacaatttccatcttaaatgattttcaaaataaaagcacttaattatactgtaatttttaaaaacttttatataagttctagccatttttttctttccttttttcattttgattatggcatttcaaaattagattttcc

SEQ ID NO: 322705 - DNA, 563 bp, Homo sapiens
tacttgaacaatttactttatatctctgtggtagtttgtactgggtcaacttggttaaacggggagctttgtctcccataataccctccctttacggttctagttgagaggatgccagaaaaaactctgcatacaattagacagtggcagttagcaatggccattgctctctgaaggtcctggtcacatggtggcaactagacatasaggtgccagaggatccagattgttctcaccctccccactcagcttccagctatttggtctaattactggttctgctgaccaacagccccctcgggctcaccccagatgcttgtgtaccacagaggtgggggcttcccagagacctcccacgagcttcctcttcacagttctgcttcacaagctagacgtgcttggcttctcaaattggctggctagggactccctctctgattcttcaacttccctctggatctttgattctcataattatttaagatttaattcttacacatacacgcacacacatatacacacacacacacaactatattccctaaccataaccgccattaatg

SEQ ID NO: 322706 - DNA, 598 bp, Homo sapiens
cagactcttcctttctgcagatcttatcatgtctggatatgatgcctgaaactgccacagttactttgcaaccatgcccagggccagcacggtcaggatgctaagtggagacctggtaggaactgggcttcttggtgacatcctcgaggcattgattatgtgctgcttggagccaccaacctgtggacttcctgataacataaggtaatatatttccttaatgtttcaattaatttcaagcagatttttctgtttcttgctgccaaagcattctagctggcccaatctgtctattccatccccagaaccagttttaattgccattgctttataatgtttcagcctacaatcaccttctttggggtgagagaataattctttaactttcttaatttcttccttaagtgatttaaccatgtgattccarttgagtcaattctagtcatctaaatttcttaatacaatttccatcttaaatgattttcaaaataaaagcacttaattatactgtaatttttaaaaacttttatataagttctagccatttttttctttccttttttcattttgattatggcatttcaaaattagattttcc

SEQ ID NO: 322707 - DNA, 463 bp, Homo sapiens
tgtctccagggcctggtatagtgtacratccctattaggtactcaataaataaggaatggatactctgccggtaagaagtggcaaagggtgaacttggactcacaggtgctagctagatgcatttactcgtacacccaatgcaattacaggtcttgggtgatttaaaagctgtttctgcaggggccgataaatcttttacaaaggctttgccatccaacatacttattcagcttgtctttggctgtttatatgcactggataataccacctgggactctgagagtcctaccaacaagcctgcacggcaggagacaatcagacttgtttctgtttgctctctggtacctttgccaccaccaggagaatgagattcctgggttgggccactgctcccaggaagatgatgaaagagagctcgaatattaagcactgattgtggaataccagtgaggttttagggtt

SEQ ID NO: 322708 - DNA, 463 bp, Homo sapiens
tgtctccagggcctggtatagtgtacgatccctattaggtactcaataaataaggaatggatactctgccggtaagaagtggcaaagggtgaacttggactcacaggtgctagctagatgcatttactcgtacacccaatgcaattacaggtcttgggtgatttaaaagctgtttctgcaggggccgataaatcttttacaaaggctttgccatccaacatacttattcagcttgtctttggctgtttatatgcactggataataccacctgggactctgagagtcctaccaacaagcctgcacggcaggagacaatcagacttgtttctgtttgctctctggtacctttgccaccaccaggagaatgagattcctgggttgggccactgctcccaggaagatgatgaaagasagctcgaatattaagcactgattgtggaataccagtgaggttttagggtt

SEQ ID NO: 322709 - DNA, 415 bp, Homo sapiens
ccaagggttgctggagaaaatcagatcattataaattcaagttctccaaacttaatttggtgcctgaattaagcaattctgttactcatcttttgggggagggagaggaagattcatctccctccaccatctcaattattctaaacttctttgccctcatagagcccctactgaagccttcccctgcttctcactgtcagtgatgactctgccttctgcttcatggagacatgaacgccatcagacatgaacaccagcttcctatccctacaccctcatatgcctatctacactcacagccatcccctaccttccccygtacaaggccagcccctcaatccagtcttcctctttccctaacactttccatttgtctttctccgctggaaacttcctctcagactctaaacaagcc

SEQ ID NO: 322710 - DNA, 584 bp, Homo sapiens
atttacaccctctatattggaagacagcaggggaggagaggtttgggttggcagctgagttagatgtgcctatcacagaagtcatcaagatttcttgctccttaaaccactggcacaagcatcacctggagctttttagaaatgcagattataggtgctactccagacctattgaatcagagacygctgtttaacaagatccccaggtgagttgtgtgtacattaatgtttcagaggcacttcctagatcagagatctgcaaactacagcctgtgggccaaatccaggctgtgtttgtaaagctttgttggaacacagcatgtttatgtgtttatgaattgtcagtggctgtgtttgcactatgtagtggttaatattgagtgtgaatttgattggactgaaggatgcgaagtattgttcctgggtgtgtctgtgaggatgttgccaaagaagattaacatttgagtcagtggactgggagaggcagacccaccctcaattttgggtgggcaccatctaatcagctgctggcgtgaccagaataaaaagcagacagaagaacgtggaaagactagactggctga

SEQ ID NO: 322711 - DNA, 584 bp, Homo sapiens
atttacaccctctatattggaagacagcaggggaggagaggtttgggttggcagctgagttagatgtgcctatcacagaagtcatcaagatttcttgctccttaaaccactggcacaagcatcacctggagctttttagaaatgcagattataggtgctactccagacctattgaatcagagactgctgtttaacaagatccccaggtgagttgtgtgtacattaatgtttcagaggcacttcctagatcagagatcygcaaactacagcctgtgggccaaatccaggctgtgtttgtaaagctttgttggaacacagcatgtttatgtgtttatgaattgtcagtggctgtgtttgcactatgtagtggttaatattgagtgtgaatttgattggactgaaggatgcgaagtattgttcctgggtgtgtctgtgaggatgttgccaaagaagattaacatttgagtcagtggactgggagaggcagacccaccctcaattttgggtgggcaccatctaatcagctgctggcgtgaccagaataaaaagcagacagaagaacgtggaaagactagactggctga

SEQ ID NO: 322712 - DNA, 584 bp, Homo sapiens
atttacaccctctatattggaagacagcaggggaggagaggtttgggttggcagctgagttagatgtgcctatcacagaagtcatcaagatttcttgctccttaaaccactggcacaagcatcacctggagctttttagaaatgcagattataggtgctactccagacctattgaatcagagactgctgtttaacaagatccccaggtgagttgtgtgtacattaatgtttcagaggcacttcctagatcagagatctgcaaactacagcctgtgggccaaatccaggctgtgtttgtaaagctttgttggaacacagcatgtttatgtgtttatgaattgtcagtggctgtgtttgcactatgtagtggttaatattgagtgtgaatttgattggactgaaggatgcgaagtattgttcctgggtgtgtctgtgaggatgttgccaaagaagattaacatttgagtcagtggactgggagaggcagacccacsctcaattttgggtgggcaccatctaatcagctgctggcgtgaccagaataaaaagcagacagaagaacgtggaaagactagactggctga

SEQ ID NO: 322713 - DNA, 603 bp, Homo sapiens
ggccatgttcttctcatggtggatggtacgtgcttaagacggcgagtgggaactttccatgttcttaaagcccaagctcagaactggcacactgccccttctacccatgtctctttggtccatagcaaattggcctatagtcaaggaggggcagagaagtaccctctttccacagtgggaaggaaagggaatgaatatttgtcaacattcttcccaaaagtcctgactccaaatttcactttatcttctgaaacaacatccttgcattcaaggaatgagggcttcccttctagcagattcctgttcaaccaactacagtgtaacttggttttagataacaaaatatgagtataacaaaatgactattgtattcattatctgttgttggtaataaaccacccccaaacttagtgtcttcgaatgacaacaatcatttattttgctcatgaatctgtaatttggacagggygcagttggcatagcttatctgctcaggtatcagttggagaggtgggagtgactcaccctctgaggctgtaatctcccaaagactcactgcactcactcacatgtctggtagttgatattagctgtcagctggga

SEQ ID NO: 322714 - DNA, 546 bp, Homo sapiens
aaattccactctggtttctctctcttctgttaagtttggttaaaatagaatcactctccagctgctaaggtggtttctaggctcttatgagatcagaggtctcttaaccttttattcgaagtcagcgtttattgcaaaaggccactggcctgatgctgaacagcatctttccctggcatttatcagtgtcacggcagctgtccccaacagccagattccctatatcttcctttttccggcatatttgagttggtggtaggctaagacctaagacagaaaaatcacycctccagagtggagcaagcacttggggcatggtgatgagagaagtcagttgtgaaagcaaaagggatttatagagtagaggcagcctgggataggaggtaggggtggtgggaacgatgcatgagcctcatgcggtgacaagtaaagacttttgattgttttttgtttgtttgttttggggtttgtttttattacttacaccctagtcatgtagctgtgtggtgcttttattccagaaaccagacttaagcaaaagggctc

SEQ ID NO: 322715 - DNA, 549 bp, Homo sapiens
catcaaaattctatgaggatgccagagccctgagagagatctccatttcctcctgaggctgtgagagctaaggcacctcccaggttcactctgcagaaaaggcagtgcccagacaggacctgctcccctgcccttcacccttggctacctctgttgcccggccccagctgcctctggcagcctgcagatactggtccctgaagcatccttggccaccccattctaagggcagcatgtggacactagagaacccagccaagccattttcaggaggcaatgcctcctttttctctgacagtttggacagcagattctcacacagccaggccacagctggaattccactggctgagataacagctttaggagctggacaaatgtgtgatggaagacctygcttgtcttcaggaggcacttattttgttcctacttgtttttctgccagctcctcgggcaattgttatgactactttggtgcatttccaagagatgctagtaacactccaaaggcaagaaaccagaaaggaagtgaaatgcaataatgcagca

SEQ ID NO: 322716 - DNA, 521 bp, Homo sapiens
agtgaagagaggagttgacaacattgggtctccatttgggaaaagagagacaaygtgtcgggtttctaccttttctcacagtgagagtttagccaactgcaaagttagaacagtccacacaaggccaccctcacttctgacagcaactgtaagtgtgggtggttccccaaacaaccctcagtttcaataattcactagaaggactcacagaactctgttatactcatgattatggtttattatagggggaggaaagagattaaaattagccaagggcaggagctcattgggtggaatccagggacgtactaaatgtggagcttccattgtcctctccctgtggagccaggatgcattactgttccagtattggtgcatgacagtatgcagagtattaccagctagggaagctcactcaagccttgagtttagagtttttattggggctccattacatagtgatggttgactgattgattgcccatgtgtttgagttcagtctccatgtcaattgatacctc

SEQ ID NO: 322717 - DNA, 431 bp, Homo sapiens
tgttagtgcagttaactttgagtaaaatttaaattaattagccaaaggagtgrcaaaacaagctgaaatccataatttgaattttagttagtagtcccattttctcccaacaccttttaatttgaattgtgacaaatagcacacctgagatttgaatttccctctctcattctttgtctacctggctatagtcaaggaacaattattcatctgttcatccattaatccattcatccatctgcccatccatcgaccccccgatccagtgttcaccatgtgttatttgggcctaaccatgggcagcaaaagggaattaaggaatgccagccgcataggcggaagctgagtagttttgtcagttcttggattgtggggtaaaatgcattcatgtccttttattaatagctatgtggcttgggtcccctagcctt

SEQ ID NO: 322718 - DNA, 572 bp, Homo sapiens
aatgtaactctagttaggaaccaggtggcaaaatatagcaaagagtttagaagagatcgttctctctgtgactggcagaaacagaacttgacagtccatgaccttggcattagtgatggttccaaaattcttatgtggaayagcttactggtggcagtcccgttgggaggagatgctggaacacttattttatttcgaagatgattttgtgttcacacacattttaatttagattgtatgcttatttgtcagtaggttctaggagagtattgctggaaattgtgggagaaggaggggtctaaagcccaagcaagccatcctttgataccatctttcttgtcatggtcttggtgtaaacagaaatggctcaactgtagcagagagtctcttaaaagaagcgccagggaaatggactttgtggtcatttatacatggaagtaaaagcaggaaaaaagcaatatggtggacactggggcagggtgagttcttcctttagcactggagattcataactgtcattgggcatgactgtaactgtgagtctgttggtggtgtcaggtaacattggcagt

SEQ ID NO: 322719 - DNA, 500 bp, Homo sapiens
ggattttgccattggccagtgtaagttaacattgttatagttaacaagttaagtttacttgttatagtatagttaagttatatatatacttatatatatacttactatatatatataagttacatatatacttattctctctatataagttatatatatacttactatactatagtatagtatagttaagttaacaagttwtagtatgatatggttaggctttgtgtccccacccaaatctcatcttgaattctaatcctcataatctccatgtgtctagggagagacgtggtgaggagtgattggatcctgggggcagtttaccccatgctgttcccgtgatagtgagtgacttctcatgagatctgatggttttataagaggctcttcccacttcactgcataccctttctctcctgctgccttgtgaagaaggacatatttgcttccccttctgccattattgtaagtttcctgaggccttcccagccatgtggaac

SEQ ID NO: 322720 - DNA, 584 bp, Homo sapiens
tctaagggggccactgctaacaagtccttaaaaatatccacaatgttgcacaacatttattgagcattttgtagatggcagacagtttacacaataatatcagttatagcttgtgagcccttattaagtgcaaggattgtactaggcattttacctgcattctgtcatttaaagttcagaagagtcctaaaatccctatcgtgcacttgagaaatctctcgctcagaaagcatgatcagcttgcccaaggtacrcaacttgtagatggcaaagccaatattcaagctgaagcctgccagactgacagaccttcagatatcccatttgacacctgctggccatttgacacactttctccctaggtaccagtgtgcacaagccccaggtgtgcaggtctggactgtgaggtcctaagaggacccagagctccggaacccagagctgccacacccagagctccggaacccagaagaaagcatatgactcacacacaaacgtctggggcagctaacccaggcaatctgctttcctgtggatcaaaatctatcttagaattccctttgtatatgcacaaggtaatgcat

SEQ ID NO: 322721 - DNA, 584 bp, Homo sapiens
tctaagggggccactgctaacaagtccttaaaaatatccacaatgttgcacaacatttattgagcattttgtagatggcagacagtttacacaataatatcagttatagcttgtgagcccttattaagtgcaaggattgtactaggcattttacctgcattctgtcatttaaagttcagaagagtcctaaaatccctatcgtgcacttgagaaatctctcgctcagaaagcatgatcagcttgcccaaggtacacaacttgtagatggcaaagccaatattcaagctgaagcctgccagactgacagaccttcagatatcccatttgacacctgctggccatttgacacactttctccctaggtaccagtgtgcacaagccccargtgtgcaggtctggactgtgaggtcctaagaggacccagagctccggaacccagagctgccacacccagagctccggaacccagaagaaagcatatgactcacacacaaacgtctggggcagctaacccaggcaatctgctttcctgtggatcaaaatctatcttagaattccctttgtatatgcacaaggtaatgcat

SEQ ID NO: 322722 - DNA, 470 bp, Homo sapiens
cttcacggctttccctggctctatttgacaaaagtgttttgttgttgttgttgttcttttaccacaagtgactctgttttgaaactgacaactttcacatttmcccttttgatcaagatctaataatgtgttacataaatatatggtgaataaataaataaaatagaaggaatatttgtaggtaaggcaaaatctgtggatctgccttttccttatggatatatatatatatatatatatatatatatatatatatacttttttctgtttcacttatttatgtatttgtttatgtatttattttactttaagttctgggatacatgtgcagaacatgcaggtttgctacataggtatacacgtgccatggtggtttgctgcacctatcaacctgtcatctaggttttaagccccacatgcattaggtatttgtcctaatgctctccctccccttgcccccaaacccctga

SEQ ID NO: 322723 - DNA, 470 bp, Homo sapiens
cttcacggctttccctggctctatttgacaaaagtgttttgttgttgttgttgttcttttaccacaagtgactctgttttgaaactgacaactttcacatttccccttttgatcaagatctaataatgtgttacataaatatatggtgaataaataaataaaatagaaggaatatttgtaggtaaggcaaaatctgtggatctgccttttccttatggatatatatatatatatatatatatatatatatatatatacttttttctgtttcacttatttatgtatttgtttatgtatttattttactttaagttctgggatacatgtgcagaacatgcaggtttgctacataggtatacacgtgccatggtggtttgctgcacctatcaacctgtcatctaggttttaagccccacatgcattaggtatttgtcctaatgctytccctccccttgcccccaaacccctga

SEQ ID NO: 322724 - DNA, 583 bp, Homo sapiens
aaggccttggattaaatactatttttaccactgaactattgcatgaccacgagcaaattatttaacttttctgagaatcaactyctcaatggtaaaactgaagaaggaaagacaatattatatgtaaaacttctggcataaaataagaatccaatgatattggttctctttaaaaatggaataattttctatatgttcatttggttataagaggaaacagaaataatgtgctttgagttcaatataatctatgtcttaggacttcaagtgaacagtcttaaagtatacattatttacttgatggatgaaatggctacctagatttgttaatacgtattaagatgcatgtttcagaaataaaaaagttactataaaaattgctaatatacttataggatatttggctgtttaaagtatgatctatttgttatttgcattccacaaagtaagatgagcaattacatcagattatactaatcattggttaaatcttattttcttatttaaatcaaaattaagttatacaaatataaaaagggaacctaataatggcaagtttccgtctctttttggctgggattca

SEQ ID NO: 322725 - DNA, 598 bp, Homo sapiens
aaccatcattttcagcaaactaacacagaaacagaaaaccagacaccgcatgttctcactcaaatgtgggagttgaacaatgagaacatatgggcacagtgagggaaacattacatatgggggcctgtcagggggttgggggggaaggggagggatagcattaggacaaatacctaatgcagatgacaggttgatgggtgcagcaaaccaccatggcacatgtatacctatgcaataaacctgcacgctctgcacatgtaccccagaacttaagtataataaaaataaataaataaataaaaattttaaaaatgaaggtgattttgttaaggtctttagaacctccccacaactaccactggtctttttaatgaatgtggccccgtgaggggtttttcagtygtacgaaaataacacaaacctctttggatagcataatcttgaggtcagtgaatatccctgtccacagctgactcagaaagaacacttctacaagaagtatagaaaaattaaacattgcattactttcctggcctttcctcaggaggggccctccttttgagtcacagggtaaaggaagtgtacagaaaagttcctc

SEQ ID NO: 322726 - DNA, 593 bp, Homo sapiens
cacagaaccaccccaaggcaactgtggcagccgtttcccagagacacagcaggctaccccaacatggctctgctcacctctttctctaaagggcatcctgtttctgatcttagtctttcatcacctcatactcagtgtgtcctcattccctgcccacctccccccagtactctcacccctttggaacaaagcaratgggaatgctgttccttgctaaataagcactgtttgcaggtgagaaaggaaattaaaccacagaactgacatgcaactggagtggagtgagttatatgaagtcctgatggacaaagtcagatatgatcaagagaaattacaaaattaattccaaaatatggaaaataatgctacaaacaaagtttcacagagtaaaattcaatacaaaaaacatgctgaaagaagcaattgaagtggtttaaaaaaaaaaaaaagcacacagtgtaacccagaaccatgaatattttatagcatgcagccaacagcatttcaaaatgtctgaaatccacatcattttctcctcataacctaaaattaccctatggttttagtgcaaacattcaagtctgattttaaat

SEQ ID NO: 322727 - DNA, 617 bp, Homo sapiens
acaaaattaattccaaaatatggaaaataatgctacaaacaaagtttcacagagtaaaattcaatacaaaaaacatgctgaaagaagcaattgaagtggtttaaaaaaaaaaaaaagcacacagtgtaacccagaaccatgaatattttatagcatgcrgccaacagcatttcaaaatgtctgaaatccacatcattttctcctcataacctaaaattaccctatggttttagtgcaaacattcaagtctgattttaaatggtttatgaatatttttaaatgaactaaagaaatataaatggaatttacaagtttggaattacaagatttggtttttaaaattatgaaaatccagaaaaatctcattttcaccaatacctgctagcacttcccttgccaaatcattcatctgatttattagtgactaatgatactcattctgaagttacttgccttgtatgagaaagcatagaatctggtcctgctgctggctaacttatttgacacaaagtaaatcatttaaatcaatcagtttcccagtaagtaaaattattcaatttgattaggcaatctgtaagttcctggctagcctaagaattctgaaaacatgacacatt

SEQ ID NO: 322728 - DNA, 386 bp, Homo sapiens
caaaatatggaaaataatgctacaaacaaagtttcacagagtaaaattcaatacaaaaaacatgctgaaagaagcaattgaagtggtttaaaaaaaaaaaaaagcacacagtgtaacccagaaccatgaatattttatagcatgcagccarcagcatttcaaaatgtctgaaatccacatcattttctcctcataacctaaaattaccctatggttttagtgcaaacattcaagtctgattttaaatggtttatgaatatttttaaatgaactaaagaaatataaatggaatttacaagtttggaattacaagatttggtttttaaaattatgaaaatccagaaaaatctcattttcaccaatacctgctagcacttcccttgcca

SEQ ID NO: 322729 - DNA, 619 bp, Homo sapiens
aagggaggctgtcagacttcttacgtcttataggacaggaccaatcttatagatacgttttatagtataggacctattcagctgcaaatgtgcactattgaagacaagggaagaagaaccccaaaagcaattcaaatatcatcagagatgcctcttcagttacaaaaagtggagccattgcctgagtttcaactggttagacaggttctgcccaaagctgtgggtccatagagaggtacctccccaactagtggacctagaggcagagccacaagccaaagaggattattctgcagctgtaagacctcatgaagtttcccttgtagcctggacttattttgaatgtgttatgcctttcttctttcctatttcttttttttttttttttgkggaaatttctttcctttgtctgagccatctttgaattttggaagtacataatttgtttggtttcacaagctcacagctggagagcaatttgtctctggatgaatcataccttgagtctcacccatctctggggctatgatgatccctttaatgtattttgcatgtaagaaggacatgatttgggggtgggggcagaagctgaataatatagattgaatgtttgcatccc

SEQ ID NO: 322730 - DNA, 547 bp, Homo sapiens
ctgcaactttactgaatttatcagttctaatagttttcttgtggagtctcaaagtttttccaaatcttagatcatctcatcagcaaacaagaataatttgacttatttttccagtcaggatgcccattatatctttctcttgtctgactgctctagctaggatctccagtactattttgaatagaatccttgtcgtgttccagatcttagaggaaaggctttcagtttttccccacttaatatgatactagctgtgggtttgttgtatatggcttttattatgttgagatacgttccttctatacctagtctytctgacggtttttatcatgaagtgatgttgaggtgtttttttctggttttggtatcagggtaatactagcctcatagaataaatttggaagtattcgctcctcctctatttttgtgaatagtttgagtagaattggtatttattcttcattcaatatttggtagaattcagcagtgaagccatcaggtcccaggcttttctttactgggagactttttattacagctttgatct

SEQ ID NO: 322731 - DNA, 547 bp, Homo sapiens
ctgcaactttactgaatttatcagttctaatagttttcttgtggagtctcaaagtttttccaaatcttagatcatctcatcagcaaacaagaataatttgacttatttttccagtcaggatgcccattatatctttctcttgtctgactgctctagctaggatctccagtactattttgaatagaatccttgtcgtgttccagatcttagaggaaaggctttcagtttttccccacttaatatgatactagctgtgggtttgttgtatatggcttttattatgttgagatacgttccttctatacctagtctcyctgacggtttttatcatgaagtgatgttgaggtgtttttttctggttttggtatcagggtaatactagcctcatagaataaatttggaagtattcgctcctcctctatttttgtgaatagtttgagtagaattggtatttattcttcattcaatatttggtagaattcagcagtgaagccatcaggtcccaggcttttctttactgggagactttttattacagctttgatct

SEQ ID NO: 322732 - DNA, 547 bp, Homo sapiens
ctgcaactttactgaatttatcagttctaatagttttcttgtggagtctcaaagtttttccaaatcttagatcatctcatcagcaaacaagaataatttgacttatttttccagtcaggatgcccattatatctttctcttgtctgactgctctagctaggatctccagtactattttgaatagaatccttgtcgtgttccagatcttagaggaaaggctttcagtttttccccacttaatatgatactagctgtgggtttgttgtatatggcttttattatgttgagatacgttccttctatacctagtctctctgacggtttttatcatgaagtgatgttgaggtgtttttttctggttttggtatcagggtaatactagcctcatagaataaatttggaagtattcgctcctcctctatttttgtgaatagtttgagtagaattggtatttattcttyattcaatatttggtagaattcagcagtgaagccatcaggtcccaggcttttctttactgggagactttttattacagctttgatct

SEQ ID NO: 322733 - DNA, 598 bp, Homo sapiens
ttcatctggcttcttggcatccactcttgttcttctccattttgatcacaacactgcagtcatagatacmtttggaaagtgcaattaccttgtcagccccctgcttaataccttggatggctttccattcctcttagaatgatgagcaaactcattcgtgtgacctgtaaggtcttacttagcatggctcttttctaccttttagccttatttccaaatacatgctgctgactcttgctctccagacacattgacactctgtcagggcacagtccccacttactccctgtaacaggctataatttaaagggtagtaggatggagaatgaatttttaaaacgtgtagacaccttaggacgttcataggttgtggtgaagtaagtagcttcctttttatcttgtttattaattttcttattacttctcactagaatacaagctgcaataaatgtacttaaacaccatcatgtgcctgaaatcaaaattacaactttatatgcttatatgaaaaaagatagctttcttcatttaggcatgtaaatcagagcacatttgttttctttataccagtttttttcactttcagttcagcaaacac

SEQ ID NO: 322734 - DNA, 598 bp, Homo sapiens
ttcatctggcttcttggcatccactcttgttcttctccattttgatcacaacactgcagtcatagatacctttggaaagtgcaaytaccttgtcagccccctgcttaataccttggatggctttccattcctcttagaatgatgagcaaactcattcgtgtgacctgtaaggtcttacttagcatggctcttttctaccttttagccttatttccaaatacatgctgctgactcttgctctccagacacattgacactctgtcagggcacagtccccacttactccctgtaacaggctataatttaaagggtagtaggatggagaatgaatttttaaaacgtgtagacaccttaggacgttcataggttgtggtgaagtaagtagcttcctttttatcttgtttattaattttcttattacttctcactagaatacaagctgcaataaatgtacttaaacaccatcatgtgcctgaaatcaaaattacaactttatatgcttatatgaaaaaagatagctttcttcatttaggcatgtaaatcagagcacatttgttttctttataccagtttttttcactttcagttcagcaaacac

SEQ ID NO: 322735 - DNA, 681 bp, Homo sapiens
taactattaatatttgccttgccacccaataactttattctaaaagtatcaaatgtgatgtgggcaaatatactccagaaatktaaacttttagaaattatgatttcatgaaaacttttttagagaaatttaaatttgaaggacaatttttgtgaaaagtgatatggaccaattaaagcatctcatttctattttagaaataagatgctggtttgatgttagattttcttcaactgttgtctttaattgctttctaagtttatgcatttgagtttatactagaaaatgccttttgtatgcacctaatgtggaactgtagatcacttcaaagtgagtcagcttcaacattcacagaaatataatagtaaggaagcagtgtctaaactaactttcctgttgttcctggaaaaatagtcataatagggcaaaagcagttacttgctgtattattcagagcataaattatatactccaaaatataattagcacttgtgtctgtaacagatagctacattttctggttatgtatctatcaaattttcattttaatagtgatgactcataatgaaattatgcattcattgttccattcattaaaccatttcactggcgggctgtgcacgtaaactgcaaattctgtgtatgtgtgatcacaccactctcccccagtctccagttctt

SEQ ID NO: 322736 - DNA, 554 bp, Homo sapiens
ttactaacacataatacaataattatcttacatttttgagagaattaaaattaatactgaagtaccattcctagtttgtgcaagattttcttttcttggacatggaaaggtgtatttaaatgtaattcatttcactaagtcccagagaaatagagakagagagagagagagagagagagagagagagagagagagagagagagagggagagctaatatttactgaactttacactaagcatgttatataccttatttgatctcatttaattctcatgactgctctctgaggtagaaaccactaaccttatttgatctcatttaattctcatgactgctctctgaggtagaaaccactataatctccatgttacaaatgagaaaactgaggcttagacagcctgagataacacagcaaataagcagaggagccaaaacttgaacctattcaggctgaccgtagagcttactcccttaaacaagtatgtgataccatttttcaataagaacaatacagctccaccttacgttttgctagtcaaaatgtcttcacct

SEQ ID NO: 322737 - DNA, 483 bp, Homo sapiens
gagctgtggcttgggagattgatgccagagaatgcttccatcaccctgtcttctgtagtcctaactaattctcagacctgctggtcggaaaggattgtttcagcctcgcttacaatagcaggttcttacttctttacagtgagtgtcatgctttccctggactacaacatcaacatctctggccccacagctgtttcccttttatcttcctataagtcagagaaacagatgccctttgtccctgagaggttcagtctgttcttttctggctggcatagctaaattatactaagtttgggccaaaatgaagctggcagttaaaccaagcttataatgtagaggaaacaaattaatgtgctgatgattcatcaaaacctttgtcayggaggttgagccattgtcagatatttgcctgtttccagagtccttaagagtccactgcccagcacagattgaaatgaaccttgggctctcccctacagc

SEQ ID NO: 322738 - DNA, 528 bp, Homo sapiens
caatatcttgaaataattatagattcacagtatgttgcaaagaaatgcacaggaaagtctcatgcacccttcctccactctttaccaacattagtgtcatgcacaactgtaatacaatataaaaaccaagaaatggacactgctacaatctgtagagcttattcaggtttcagcagttatacatgcatgtatgtgtgtgtatatatagggctatacaactttatcacatgtttagcctcatgtaaacactactacaatcaagacacttaattgtaccatcatcacatgactctgtcatgtgactgacatctttatagtcaccacttctatcccttccactatgatccctaacccctggcaactacaaacccattctccagctccataattatgttatttcatgaatsttccataaataaaatcactaagaatcaatcctttgagattggctattttcatttggcataatttccttgaggttcatccaggttattccatgcagtggttcattcctttttattgctgagt

SEQ ID NO: 322739 - DNA, 473 bp, Homo sapiens
gcccatcaatgatagattggataaacaaaatatggtacgtatacaccatggaatactatgcagccacaaaaaaaagaatgagagcatgtcctttgcaggaatatggatggagttggmagtcattttccttaacaaactaatgcaagaactgaaaaccaaacaccacatgttctcacttatgagtgggtgctgaatgatgagaacacgtggacacatgggggaacaacacacactgtggtctgttggggggcatgggcttaatacttgggtggtggaatgatctgtgcagcaaaccaccacggcacatgtttacctctgtaacaaacctgcacatctggcacatgtaccagtgtacttaaaagttgaagaaaataaaagcaatgcttagaagagactccaatgatagagaaggacgattcttggaaagaggtcccagatggcttgctcaagcagttttgtgtatttgtcccaca

SEQ ID NO: 322740 - DNA, 473 bp, Homo sapiens
gcccatcaatgatagattggataaacaaaatatggtacgtatacaccatggaatactatgcagccacaaaaaaaagaatgagagcatgtcctttgcaggaatatggatggagttggaagtcattttccttaacaaactaatgcaagaactgaaaaccaaacaccacatgttctcacttatgagtgggtgctgaatgatgagaacacgwggacacatgggggaacaacacacactgtggtctgttggggggcatgggcttaatacttgggtggtggaatgatctgtgcagcaaaccaccacggcacatgtttacctctgtaacaaacctgcacatctggcacatgtaccagtgtacttaaaagttgaagaaaataaaagcaatgcttagaagagactccaatgatagagaaggacgattcttggaaagaggtcccagatggcttgctcaagcagttttgtgtatttgtcccaca

SEQ ID NO: 322741 - DNA, 572 bp, Homo sapiens
cattatatcatttttatgctgaagggatcttttttgagaagcaattttctgtaagtccctgggctgggtttggaaaatttggaagaaaccaaacactgacttatggttgtatctgagacacagatttcaaggacataaagtactcaaacaataaattatgttatatctaatttaaaatcaaagttcaaaattactttagcttgggaaaaatgctcaaaccatacataacatgaagtgcacaggtgaaatatgtcttctgcatctctaatgacagtgatgtcaatgaaactatgaaactctggcttttggttaataaccattttgtttgtggtactaatgactatgaattagtrggtaatgaacaagaactgaagtattgaatttgtataattattatagtttaccaggcaatgatctttaaaataataagctaaaagataatttcatgcccaaatataaattcttaaatgtcaccatatagacacagtggtgaatgattagtatgtgaagaaaacacagaatgtatacctgaatataaatttaggtcttgatggcaccacacagcctgaatg

SEQ ID NO: 322742 - DNA, 465 bp, Homo sapiens
tgtgtaagggatattataattattgcaaacaagaatcctgtaactgctggatacttgtcttagtaacatgtatgtccccaggcctcactagcctactggcaaggaagaaaataaatcagcaatttgtatccaaatggtgctggttcttagctcttcttagttcaagcaggttggtaaagtgtcctcctctggctggtattttggctcatctccaaggctgttgagtgcaataaaatctttgtgcactgggcattgctgtttcctctccagcccttccactacagagaagcactaccttgtctgsggtgctgccccctgctatgccttaaggctgaaaagtcatacatgaaaacagaattcaattcccttccatcaccacagtccaggagcctcaatatgggacagggaaaggggaaaattttcctccccactgaactcagacttgtacccttgcaccccatgttg

SEQ ID NO: 322743 - DNA, 521 bp, Homo sapiens
cctctgccttcttaaatatttctccctgagatctcacatcagaaagatggcagctgttcacttaggcttttgagggagtctagcattgggttttgctctgttagaccaaaccgtgtgatatggttttgttgtatccccacccacatctcatcttgaattgtagtccccataatcccaygtatcatgggaaggacctggtgggaggtaattgaatcatggaggtggttacctccatgctgttctcatgatagtgagtcagatatctcatgatatctgatggttttataagggatttttcccattttgcttggctcttctccttgctgccaccatgtgaagaagggcatgtttgcttccccttctgccatgattttaagtttcctgaggcctccctggtcatgctgaactgtgagtcaattaaacctctttccttcataaattacccagtctcaggtatttccttattagcagtgtgagaacggactaatacagtaaattgggactgcagagagtggagtgct

SEQ ID NO: 322744 - DNA, 622 bp, Homo sapiens
gcccagtttttatctttatcagcagcatgaatacaaatacagttagcttctagaggttttmtaatttttgcattgtacatttagctgtatgatccattttcagttagtatttgtaggagcaagatttgtgtgtagattccttttttttttttttttttttttttgcatgtgcacatccagttgttccagcatcatttgttgaacaggctctcccttctccattgaattgctttgttcctttggtgtgggtctatttctgggctcttcattctgttccattgatccatgtgtctgttgttttgtcagttccatgctgtcttgatttctatggctttgtagtaagtcttggagtcagggggtgtcagtcctccagctttatagttgttttgtgctttcatttttggaaggttatcaattattgactcaatttctttaatagatataggcttatcaagattattgtttcttgtgtgagttttggtagtttatatctttcaaggaattggcctatttcatctaggttatcaaatttatggcaacagttgttcgtgatattcctttatcatccttttaatatccatgggatcagtattgatgacccctctttaacttctgatacagt

SEQ ID NO: 322745 - DNA, 590 bp, Homo sapiens
tctgccctttctctgcttacgtttatagcaagacgtcttggaagagttgtctgtgcttggccgggcacagtggctcacatctgtaatcccaacactttgggagaccaaggcaggaggatctcttgagcccaggagttcaagatcagcctgggcaacatggcaaaaccccatctctacaaaaaaatacaaaaattagccaggcatggtggcatgtgcctgtggtcccagctacttgggagactgaggcaggagaccacttgagcctggtaagttgaggctgcaatgagccacgttcatgccactgcactccagcccaggtgacagagtgagaccctgtctcaaaacaaacaaaaaaaaccaacacaaaaaaagaagttccactgttttacttttgcaagactgaatttcctcataggcacctaaatattctactgggtcttttaaaggaaacttcctttcctattaaatttatagtcacatatattacacatrtatgtgaaatatgaacagaggatctggcaacctggatttgggagttgatgaggtctcgtattattgacatataattccataaagtgaagactcagaat

SEQ ID NO: 322746 - DNA, 572 bp, Homo sapiens
tttattagccaggcactgtgtctcacacctataatcccaacactgtgaaaagccaaggcaggyggttcgctggactcaggagtttgagaccagcctgggcaacatggtaaaatcacgtctctacaaaaagtacaaaaattagctgggtgtgatggcacgtgcctgtggtttcagctactccagaggctgaggtgggaggattgcttgagcccaggaggtcaaagctgcagtgagcggtgtgattgggccactgcactccagcagcctgggtgacagagtgagaccctgtctcaaaaaaaggaaaaagagaaagaaaaagagacaaagaaaacatttatctgagactttggaaactttttttcttgggggaaaaatatactcagtttatcgtttccctgttttctgtgtgagggagaggaaaagtcttaaataaacctctgggcacaggcccctcttgttttgggagaaacacttctgtgggctttggctgactgtgggttagaccagaccttattccggagtggaccaggcccagcaggaaaggcgacctcgaatgcacggtgttcccaaat

SEQ ID NO: 322747 - DNA, 562 bp, Homo sapiens
tagctgaagagaactaccagtggccaaaaacgtggtgaataaaggacgtgggtgagctgtcaggaggatccgggcagagactggcctaccctgtgcctggaggcagggagatgaagaggttgtgcttgggagggcctgcctgacccccagctccaactctggtcagcatctcccagcaaccagtggggacctaggaggttgcaggtggtcagccctaggactgggagcaaagaggagagacagggaggtgatgtctgaaccaagtcctggaggatgaacagatgcaaaggcagaggtggagaaaggtgtgtgygtgtgtgtgtctgtgtccctgagtggcccaagccaggagcaggacttgctccctgctctagggagataaaggggagaatatcacaacggaagggccttcctgctgctgagatcggatttcaattaaaatgattagctctgtttatttagactccacagctgcatacaatctattgcgtgttattgcgagtttaaagaaataaaggaggggcatggggggaggggaagcatttcagcccaaattgaaaaa

SEQ ID NO: 322748 - DNA, 565 bp, Homo sapiens
tggggctgtgtgcaaggtttgcaggggaaggtgacaccccatctgagtcttggtcaaacaaactggctgggagcaaaaaggaaaaagcattccagcccacaggactttgaagaacagtgctggccctgtccgtggtgctgacccacaggcccagcctggagcccagtttcaagctgagatcaagccagtccctgtttctyccaccaacctacccgctctaggctggcacacaggggtgggctggtgggatggaagtgaggtggtatttagctacatacttcattttcataatgaccttcccgtttctcctcgcttgtcagtctgtgaccattaaattcctcattagcaaacgagatttggatgagcccattaagatgagggatggcctcacagtgcagctgcctggggtgagctagaactcaccttctccctccctattagaaaacaatgcacctcacattctgtgcacatttctccaggtctactacctagtccacacaggccccttggagttattcagaggaccagcttaagggacggccagggcacaacagaaaagcaaaca

SEQ ID NO: 322749 - DNA, 546 bp, Homo sapiens
taatgaggccttattacctccttccctttgtacttgctatttattccctatgcctggcttactatctcacactctttgcctggttaatttcaatgagtttttcaaattttgtttagatgtcacttcctccaggaagtcttccatgaccaacccagtgtagaggaggctcttcttcttcttcttcttcttcttttttttttttttctgagacagagtctcgctctatcgctcaggctggagtgcagtggcgtgatctcggctcactgcaagctccgcctcctgtgttcacgccattcttctgcttcagmctcccgagtagctgggactacaggtgcctgccaccacgcccagatgattttttttggtatttttttagtagagatggggtttcactgtgttagccaggatggtctcgatctcctgacctcatgatctgcccgccttggcctcccaaagtgctgggattacaggtatgagccaccacggctggccgaggagtttcttcttctaaatggtctggcagtactctgtaactgcactctcctt

SEQ ID NO: 322750 - DNA, 535 bp, Homo sapiens
tctctggtcccacaacgatgactctgcctcttgtcagcccagccaagagcccagacgacccctctgtcctcgttccctgtcctcgttccctgcaggtaacatgagaagggctgatcaggagatgctctttaagaagttcgcacccctgctgacaccagaacagcccaaatcagagttcccagggccagacaggctcttcctgggccacagaggggaggcatcaggaaagctctgcagtggggggctggtggctccrgggctgggggatcacaggctggtgaaccccggtgggaacagaggtgaaagcctgccacattccgcctgtctccctaaccctccattgcctcgcctctattccagaatcaatgctgcagaatgtgttagctgcagataggcatggtctcaggtatgaacagacactttgaaacgactttaggtctttcttttctccagtgttttaaacatgttgattatccaaagaattgaaactcctagcacatccagtttttacaacagatttgcagctcattcctta

SEQ ID NO: 322751 - DNA, 587 bp, Homo sapiens
aggaggtggaggttgcagtgagccgagatcgcgccaccacactctagtctgggtgacagtgagaccctgtctcaaaaaataaataaatacataaataaataaataatggattgattgattaacacaggagccaatgaactagagccagtgagcccaggcggccagctgccttggaaggcctgtgggtataaaatagtttttatatttttaaatggttaacaaaaaaatcagacatttgcaactattttttggyttttggtttgtttttttttcccctccttttttttttttgagttattaagaaaaaacaacaaaaaacacaaccaaaagaactgacgagaggaagataaagcctcgggatcagccagagaccgagtggcatatgggatgaggcacaggtcaggtctagctgggtctgtggagcaaggtggtgggaagtcccaaggcctttgggcctgtggggtctgcggaaggagaggaggtcacttaagaaaatacatatactgtacacatctatacgacgcgtcccatgttgggggagtggggcgaggtcatgggagctggtccactctctcctcggaccagcc

SEQ ID NO: 322752 - DNA, 587 bp, Homo sapiens
aggaggtggaggttgcagtgagccgagatcgcgccaccacactctagtctgggtgacagtgagaccctgtctcaaaaaataaataaatacataaataaataaataatggattgattgattaacacaggagccaatgaactagagccagtgagcccaggcggccagctgccttggaaggcctgtgggtataaaatagtttttatatttttaaatggttaacaaaaaaatcagacatttgcaactattttttggcttttggtttgtttttttttcccctccttttttttttttgagttattaagaaaaaacaacaaaaaacacaaccaaaagaactgacgagaggaagataaagcctcgggatcagccagagaccgagtggcatatgggatgaggcacaggtcaggyctagctgggtctgtggagcaaggtggtgggaagtcccaaggcctttgggcctgtggggtctgcggaaggagaggaggtcacttaagaaaatacatatactgtacacatctatacgacgcgtcccatgttgggggagtggggcgaggtcatgggagctggtccactctctcctcggaccagcc

SEQ ID NO: 322753 - DNA, 541 bp, Homo sapiens
cagctgttcttgccaagggacatactccactcatgcaggtgtggcttttcttgggaaataaggggccccagaatgaaaaaaagtcattcgtagtccgtgtccaaagaaagcaaaataggagagtggaagacagagyaggagccatatccgagtgcatttctgggatcaactggaaaaggagactttggaaaggttgaaactctttttttttttttttttttcgagacaaagtcttgctctgtccctaggctggagtgcagtggtgcgaccttggcttcctacaacctccacctcccaggttcaagcagttctcatgcctcagcctcctacagagctgggtctacagatgcctgccatcatgctcggcttatttttgtatttttagtaaagatggtgtttcaccatgttggccagtctggtctcaaaatcctggcctcaactgattcacctgcctcggcctcccagagtgctgggattacaggcttgagccaccagacccgaccccctttttctctttaatattttatttattttttgagac

SEQ ID NO: 322754 - DNA, 611 bp, Homo sapiens
cacattctattcaacagcacatggaactttctccaagagagaccatatgataggccataaaatgagcctcaattaatttaagaaaattgaaattacatcaagcactctctcagaccacagtggaataaaactggaaatcaactccaaaaggaaccttcaaaaccatgtaaatacatggacattaaataacctgctcctgaatgagcattgggtcaaaaatgaaatcaagatggaaattaaaaaattcttcgaatgacaataatgacacaacctatcaaaacctctgggatacagcaaaggcagtgctaagaggaaagttcatagccctaaacgccttcatcaaaaagtctgaaagaacacaaatagataacctaaggtcacacctcaaggaactagagaaataagaacaaaccaaatccaaaaccagcagaagaaaggaaatagccaagatcagagcataactttaatgagattgagacaacaacaacaacaataccaacaataaatgaaagaaaaagctggttctttgaaaagataaataaaactgayagaccattagccagattaaccaagaaaagaagagagaaaatccaaataacctcacaaagaaa

SEQ ID NO: 322755 - DNA, 602 bp, Homo sapiens
cttgggtgatagtcccagacttaccatcaactaactgtgtctgctggaagttctttaacctctctctgcttcaacttgctcctttgtaaaatggggataaataacaattcccatactataagtttgttgtgaaaattaaacaagtggataagtaaataaagcactcagtgcatagtaaaattcaatatatagtagctatctccactatcatttttccaaactggtcacaccaagctcgcaaatgtgtggccagatctaggagtgagcatttaagaggaataaaggccacggccaacggagagaaaccagatgggaaaggtagtcccgatgacatcaggtgagaagcaagggagcttggagaagaaacacttggggaggaaaatgatcactatcttctaatasctgacccattggagggtctctggtttcttctgtgcagcctcaatggctattatcaactgctctgagatgatcatttctatacacacagactgtggtcttatccaatgaggtccttggaagaaattccagggacaaggagcatcatggtcatccatcaccctgccctggactttattatgagcaagaaccaatcagtagaa

SEQ ID NO: 322756 - DNA, 493 bp, Homo sapiens
acatgtgtgaaggcctgacaccaaaaatgggagcccctcctttgtccctccctccctttgtgaaggcaaatgtcctccaggaaggtcttcatctagaatgtgctccacatggggctgatgggtcccaacaagcttcgytatcttgtctggagttacagctttcacagtctggtcactgttagctcacctttcccctctgcccaccccagccaagcagttaagtctttagaagaaactgtgaaggcctgtgacagcctgtttggggatgcagtctaggaagaaatggccctgccctgggaaagcttaggaacctcttaccctcttaccatagttaccatgaaactatgtacgtacaccatctagaaacaagccaaatggcatttccaaggatgtttcatgattcttttctaatcactttgcctctcttaagttctttctctaattcattaagaatggtaattgcatttttccattttaaacttttcctttggtc

SEQ ID NO: 322757 - DNA, 493 bp, Homo sapiens
acatgtgtgaaggcctgacaccaaaaatgggagcccctcctttgtccctccctccctttgtgaaggcaaatgtcctccaggaaggtcttcatctagaatgtgctccacatggggctgatgggtcccaacaagcttcgttatcttgtctggagttacagctttcacagtctggtcactgttagctcacctttcccctctgcccaccccagccaagcagttaagtctttagaagaaactgtgaaggcctgtgacagcctgtttggggatrcagtctaggaagaaatggccctgccctgggaaagcttaggaacctcttaccctcttaccatagttaccatgaaactatgtacgtacaccatctagaaacaagccaaatggcatttccaaggatgtttcatgattcttttctaatcactttgcctctcttaagttctttctctaattcattaagaatggtaattgcatttttccattttaaacttttcctttggtc

SEQ ID NO: 322758 - DNA, 536 bp, Homo sapiens
tttatggaggactgaaggatgtttgagccctgcggctgtttcagagagaatttctgcagcttatgcatttaccttgccaaaagtttagctgagcaaacagagtcctctaaatcacacttgctgttgatttcctatcaggcctccgcagtttgtttggtggatgaagccctgtggatcaacagaggccaaggctatagtccctgcacctggccacaccaaagggctaggggctgcctttcagttgccgccactctggctcccagatttgggagttttcctctctttccagccaatgcaggrtaaaggcaaccagaggggcagttctctggccaggggagggaggaggcctccctggcttctgcccttggttccaggtctgcgtccattgtgggaatgagattgatggtgtcatttggctccccttccccaccccatcaggagcaaagaagcgattctggctcccttggtgacaattcagcaccactgctgcttaaaaagggaaaggagaaaggagatgggaaacaatgatggggaag

SEQ ID NO: 322759 - DNA, 526 bp, Homo sapiens
cttctctgctagcttcagaacccagctcatttaattctcacaaatcagttctatagaacaaaacataytgtggtggctgaatattaaagcaggatggagcgagcccagatgggtggacaggagctccagattccccctctgccctctgtttcccaacatgggtgtggcggtaaccgtagacgttgggggttgcaggcctcagcatctgggtctccacgttctctttgttctaggctttggttgaatcttgtggctttcaaacttcagggtatatgagcagtatgttgcaggatcgaatatacctacatatacaaatctctgtgggtgatttaggagatttgccagggtgattttgactatatgcaatgttaccctttcgagatgacttttgaacttaacctccacctgagaagtaattcaattagatttcttttttttctctctcatttcttttcctcgaaaaaattttttcttacttttcctttcctgttgaggtacaactgataagcagtaaagtgcacaagtg

SEQ ID NO: 322760 - DNA, 526 bp, Homo sapiens
cttctctgctagcttcagaacccagctcatttaattctcacaaatcagttctatagaacaaaacatactgtggtggctgaatattaaagyaggatggagcgagcccagatgggtggacaggagctccagattccccctctgccctctgtttcccaacatgggtgtggcggtaaccgtagacgttgggggttgcaggcctcagcatctgggtctccacgttctctttgttctaggctttggttgaatcttgtggctttcaaacttcagggtatatgagcagtatgttgcaggatcgaatatacctacatatacaaatctctgtgggtgatttaggagatttgccagggtgattttgactatatgcaatgttaccctttcgagatgacttttgaacttaacctccacctgagaagtaattcaattagatttcttttttttctctctcatttcttttcctcgaaaaaattttttcttacttttcctttcctgttgaggtacaactgataagcagtaaagtgcacaagtg

SEQ ID NO: 322761 - DNA, 356 bp, Homo sapiens
aaaacctttcagaagatctcttatgctgtttcctgccttttcctgatctagaagaatcatggttactccaactcrccttgtccacagagagctcatgtgggttgtggtgaccgctgcaccctcttctagggcctcactggtctccctcaattaacccttcgagaatccagcccaggtgtgaggtcctggccatccttcccaccagggctctctcccagctcctcagcatcccccttccccaaaaggtccccagaaggtaccactgcaccaagatcatgtctccaggccccaggtctatcctcatggtctgaagtaagtgccatcgtggcccctctagcaccaatgctcatgactga

SEQ ID NO: 322762 - DNA, 517 bp, Homo sapiens
taggacgctggaaacatgagtctggagctctggacaaagcccaacctgaatgataagtttgggagtggtccctgtataatagaagctatttaaggccgggagactggaggaagtcagcaagggagtgcctacctgagcccttcacctctgtgtgcaccccatcctaaatttggggtgtgttttcttcccaggctcagagaacccggtctcttagggttcacccggcctctttcctgccccactctccccgccctcactctgaggcaaattctacagccgagggctctccctcctgtcttgcctctgagcccttaccccatagcggggggtggggggcatcaccatgtgtgtctcccaacccacctgattactgcacagggggtgaccttgcaacactgaggcacagmgccaggacagccagaactgaccaggaagtcaggggccagggtctcattcaggacctgctcataaatcacacagtgaccttgagcagcctcagtttccacatttgtcaact

SEQ ID NO: 322763 - DNA, 592 bp, Homo sapiens
tgaagacttggccaacagcatctgaatatgatcccttccaactctgacatcctgactctgtgattctaatttggccttcagtttcccctgaagggaatcttgttggctctcagagagcttgatggttccttggggaaaacctgctagagaaaccagggtaggaaggcgcatgtgtgaaggttgtgcaaatattgaaacacttgaatattggttggaacatagctgcctccctgccacctgggcccttcccttcccccactgagaccccaccaaggttcatcaactgaaaaggttacctcctggcccaacaggggtggctggttggttcctttgcccccctagttgttaaagattttgactaccacccaggtgtgtgcgtctttctctggcaggtctccaacagacagacggcattttagaagtgtctctgtcttgcacgtccctccagcactttgcctttcattctaggaaaataaatacaatcccagtaaataaaarttaataactgcatctttatgatggtgtgttgaaggcatctaatgttggaatcactgttaaatccctggattatttataacccagatgttgacag

SEQ ID NO: 322764 - DNA, 521 bp, Homo sapiens
aatgccagctcagttcagctcagttcagaatattttcacattccaaatgtattcatgttgggcaggtgtacaaaattagtgagtacaaatggggctcagacagagagagaagtcagagggggccctccctgtgggggacgctccctggaagagagggactctggatagagccactagggcaggcagaggtgagcagctgcaaaggaggcactcgaggggctgtgaggcagcagagacagtagcaggaagcagstgtgtcttaacaggaccagagggatgaaaggggtcctctgaggctggagtccaaaacccacagaataacgtggggctcttcccgatacctctctgacccactgggaaataaaggtttaaattcaccaaagccagaacgggcaaggggcctgagtaacctcagaatcacgtagaaagcttatgaaaaatgcaatattgaatcagcatctccgggataggccccaggagactttttcgaatgcacctcccgtgagtctgatgtgcactaa

SEQ ID NO: 322765 - DNA, 525 bp, Homo sapiens
gatttattgattctttcttttatggattgcacttttggtgtcatgtctaagaactctttgccctaagagatattcttctatgttttcttctagaaggttttacatgttacatttaagaccgtccattttgaatttaaatatataaacattacatctctccctatagacatgtctatgtctctatctctatctatatgtagataaggtttaggttaaggtttttttttttttttttgcctgtggatatccagttgttctgataccatttattggaaaggctatcttttctcttccaacatttttaagcttcagtgtggtgtggkaaacaggcacttcagactgattttactgctaaggaagctgaaacccagggaagctgagggactggtttgaagtcacactgcaagccatcaacagatgggggctaacatccgggttttcatggtccaagtacattctattttaaagatgagaaaactgaggctacttagtgccaaaacaggccctggcttcccactaggggcc

SEQ ID NO: 322766 - DNA, 595 bp, Homo sapiens
tcacgtttattcatttaagacagaaaccttcccagtctaatgttgaggctgtcctaaagtcagtgtattacacttgataatttccattcacgctgaatctaacaagactatcttatttgtatctttttcacaacaaagctttcccaaagagtggtcctatatctgttcttttccttgttaaaaaatggaatcctgtgtggaayttttctgctaggtttggttccatttgtgagattttacttaataaactgataagcacgtaagtgccagacactaattctaagtgctgcaaaatacacgaaaacccatttcatccttaaaacaagcctgggaggcaagtacttttatgatctccattttgcaagtgtggcagctgagggaccagagatccgagaacttctttgaggtcacacagacagaaagtgatgaagtgaagcctcacgcagcaggcaggccaccacctctgcgtgctgcctcaatccctgaaacgcggcacatagtggaggacatggtgaaatgcctgagaatttttttttcatttacagaatagaagagtatattgatgctcttaggattttgaaactagaagagatca

SEQ ID NO: 322767 - DNA, 646 bp, Homo sapiens
tccttcctttttaaggctaaataacattccattgtctgttatgccacattttgtttatctatttatctgttaatggacatttgggttgcttccatcttttggctactgtgaataatgctaatattggaaccatccttataagctttattaagttaatacgggaagaagaggaatggggggggtcatgtaggggaacgagaataaacccagctggcagcatactcagcatcaatcactaggtcagctgctttctgacctgcttccttatagctgtttactgcctgttgccccagaatcatatagaccctgtaacaaaattaccattccccttaactgctctataaataacttgaacattatgaaatgctragttttccctttgagggcattcctttgggtctttcatacagatgaaactactgatgccagctggtctgaagggccccatgggagctcactcaccaaaaaaaatgcagtttctgcatcctgatgatttcattctccttaccccaaccaattaatgaccccaattttccagccccttgccctccatgatccccttaaaaaccctagcgcagaactcctcaatgagacagatttgagggtccttcctgtctcctcactcagcctccctatgatcattaaa

SEQ ID NO: 322768 - DNA, 646 bp, Homo sapiens
tccttcctttttaaggctaaataacattccattgtctgttatgccacattttgtttatctatttatctgttaatggacatttgggttgcttccatcttttggctactgtgaataatgctaatattggaaccatccttataagctttattaagttaatacgggaagaagaggaatggggggggtcatgtaggggaacgagaataaacccagctggcagcatactcagcatcaatcactaggtcagctgctttctgacctgcttccttatagctgtttactgcctgttgccccagaatcatatagaccctgtaacaaaattaccattccccttaactgctctataaataacttgaacattatgaaatgctaagttttccctttgaggrcattcctttgggtctttcatacagatgaaactactgatgccagctggtctgaagggccccatgggagctcactcaccaaaaaaaatgcagtttctgcatcctgatgatttcattctccttaccccaaccaattaatgaccccaattttccagccccttgccctccatgatccccttaaaaaccctagcgcagaactcctcaatgagacagatttgagggtccttcctgtctcctcactcagcctccctatgatcattaaa

SEQ ID NO: 322769 - DNA, 646 bp, Homo sapiens
tccttcctttttaaggctaaataacattccattgtctgttatgccacattttgtttatctatttatctgttaatggacatttgggttgcttccatcttttggctactgtgaataatgctaatattggaaccatccttataagctttattaagttaatacgggaagaagaggaatggggggggtcatgtaggggaacgagaataaacccagctggcagcatactcagcatcaatcactaggtcagctgctttctgacctgcttccttatagctgtttactgcctgttgccccagaatcatatagaccctgtaacaaaattaccattccccttaactgctctataaataacttgaacattatgaaatgctaagttttccctttgagggyattcctttgggtctttcatacagatgaaactactgatgccagctggtctgaagggccccatgggagctcactcaccaaaaaaaatgcagtttctgcatcctgatgatttcattctccttaccccaaccaattaatgaccccaattttccagccccttgccctccatgatccccttaaaaaccctagcgcagaactcctcaatgagacagatttgagggtccttcctgtctcctcactcagcctccctatgatcattaaa

SEQ ID NO: 322770 - DNA, 557 bp, Homo sapiens
gattagcctttgagtgtagccattatctaactagtaaacattgtacctgataggtaatttctcagcctctgacctcctcccgcctccctgcttctggagtccccagtgtctattctttccatctttatgtccatgtgtacccagtgtttgctctcacttatatgtgagaatatgcagtatttgttcttctgttcctgcactagttcacttaggaaattagcctccagctccatccatgttgctgaaagggacatgatttcattcattttcatggctgcatagtattccatgatgtatatatgccacrttttctttatgcagtcaaccactggtgggtaattatattagttcacgactcatgactttgctattgagaagagtgtgcaatgaatatatgagtgcagttgtctttttgatacaatgatttctttttttggggggttacatactccgtagtaggattgctggatctaatggtagttctatttttagtctagaaataacatttattcattcatctgctcaatattatgcacgtttaaggagtacttactgcg

SEQ ID NO: 322771 - DNA, 557 bp, Homo sapiens
gattagcctttgagtgtagccattatctaactagtaaacattgtacctgataggtaatttctcagcctctgacctcctcccgcctccctgcttctggagtccccagtgtctattctttccatctttatgtccatgtgtacccagtgtttgctctcacttatatgtgagaatatgcagtatttgttcttctgttcctgcactagttcacttaggaaattagcctccagctccatccatgttgctgaaagggacatgatttcattcattttcatggctgcatagtattccatgatgtatatatgccacattttctttatgcagtcaaccactggtgggtaattatattagttcacgactcatgactttgctattgagaagagtgtgcaatgaatatatgagtgcagttgtctttttgatacaatgatttcttttttkggggggttacatactccgtagtaggattgctggatctaatggtagttctatttttagtctagaaataacatttattcattcatctgctcaatattatgcacgtttaaggagtacttactgcg

SEQ ID NO: 322772 - DNA, 538 bp, Homo sapiens
cttttggaccaattaaaagtttaaaaaatcaactttaattattctattctcagtgctgtttatttatgtgtgtagatctaatttttagtctgataccaattcyttctgcctgaaaaatgccctgtaatttcctggcaagtgagtatgccagctatgaattctttccgtttttgtttctccaagaaagtctttatttctcctttatttggggaaaatatttttgtggcatatagaattctgggttgacagcttttttactttcagcactttgaaattctcactccattgccttttggtttgcataatttgtattaaaagtctcctaaattatttcccacgttcctctgtagttaatgtatctgatcagttctctattcccataggtttatcttttcaagaatgtcatctaaatgcaattatacactatgtaaccttttaaaattagtgtctttcactcagcataatgccttcctctaggttattgcatgtatcaacagtctattccttttatttatgagtaatagtgccttgtataaat

SEQ ID NO: 322773 - DNA, 589 bp, Homo sapiens
ggctatcttggcaaacataaactataaggtttgtccccttagccccaagtaactgccaaagagtattgtggcttcctggcttctggaatctatcctctaccctctcttttcagattcctgccctctgctcatgttccaaggagagaaatagtgcatataaggtttgtgycatttcaataagcttttcttctctccacattcttggaacttcaattccaattgcctctacatctctctaattagtccaagtgaagttctttccctgtggatatattgttggattgaattgactaatattttgtttaggattttttgcatctatttttacaacagatattactactttattatggtatctatatattgttttggtacattcatcaagcctttattgcaaggccagaaccaagggtgacttgacattaattttcatagtagtaagttatatcttagggttctcttcagcaggatacctagtgcctcaggtagggtaggtgtcaggctagaattgacactagaattatgattcactataagatgatatctgttttacaggaactgggggatggtctgtgtgtgtttatttgtt

SEQ ID NO: 322774 - DNA, 581 bp, Homo sapiens
accccacaacctgggacagatgtcatctgtatgcacaggcgggtcccgggttctggcccgactctttcttacagacagataatgttggattcttgctgacccctcctgaattcagtttcccataggacactggatctaatgggatttaaggatctaatgagattgtgcatgggaaagcaaaaagggctgctgccatccatattaagtttttggtattgccctaatctcttctgtttttatcaggcatcagycccttccctttgtctcagagatgccccaactagccctgcaaggatgggatgagtggaattaggagcacagggggaagacccacacacacagccccacagagccacagcctccccccacccccctctcagtgctctcctctggccactgtgtcaggtcgaggtgccatcctgcggtgcaggtgccagggaggacacaaccccattgtgtcctcttatgtgtacagaaggaagcacagctgacacacacacacagtgtgtgggtgctgatgtgtccacactgagcctttaagttgaatttttctccataaaactgtagttttcaaagtggca

SEQ ID NO: 322775 - DNA, 634 bp, Homo sapiens
ctgggtccctggcatgcacccacctgactctgtggtcacagccctgtttgccaaatcaaatagttccttcaggactcagaaaccgggccctgtggcttgcccctatgaatctcttccttctgatatgtttggttcatctgattgcaaatcctaatgattttctakatcttacgttattatttcagtaattcccagatgaggttttgtttgctagaactcatttcccaaatatctggaacatatatgaagaacaaccttccactgggacgggagtcacaggtcaaaggcttgaaaacacagtgaggattattttcagtccctcaagtgtatagacatttttaaagattaactgatcactttgtaggaattataggaacacatttgaaattagaagaaatggcacatttagggagcgaggtaaatgaggtaacaaataaagtttgtgagaggccattgttttgactatcctcctgcattaggccccctgcagaccagaccaaaccagaatggagtccactcatgctaagcgccacacaattaaactgaatttagaaatgggccagttttccaaaaaacaggagagtcccagcaacccatcaaaagactcccagtcaacaggagcaagcctgacaag

SEQ ID NO: 322776 - DNA, 634 bp, Homo sapiens
ctgggtccctggcatgcacccacctgactctgtggtcacagccctgtttgccaaatcaaatagttccttcaggactcagaaaccgggccctgtggcttgcccctatgaatctcttccttctgatatgtttggttcatctgattgcaaatcctaatgattttctagatcttacgttattatttcagtaattcccagatgaggttttgtttgctagaactcatttcccaaatatctggaacatatatgaagaacaaccttccactgggacgggagtcacaggtcaaaggcttgaaaacacagtgaggattattttcagtccctcaagtgtatagacatttttaaagattaactgatcactttgtaggaattataggaacacatttgaaattagaagaaatggcacatttarggagcgaggtaaatgaggtaacaaataaagtttgtgagaggccattgttttgactatcctcctgcattaggccccctgcagaccagaccaaaccagaatggagtccactcatgctaagcgccacacaattaaactgaatttagaaatgggccagttttccaaaaaacaggagagtcccagcaacccatcaaaagactcccagtcaacaggagcaagcctgacaag

SEQ ID NO: 322777 - DNA, 627 bp, Homo sapiens
atcctgtgcttaatattagttttgtcaatttcagtttttataaatacattgacttttaagcatctgagatttgatttgtrttttggtgatttaatcgtgatataaagaattattaaagaaaaatttgaatatgacttttacttcacaggattattttgatcataattcacgtgtaagatgcaatccactattagtgtaataaatacaatcaaccactcagatcagtctatgtgatacatgatatcaacagaatgaaagacaaataccaaaagatcatttatttcaattgatgctgaaaaagcatttgataaagttcaacatcccttcatgacaaaaaccctcaaaaaactgggtatagaagaaacatacctcaacataataaaagccatatatgacagacccacagctagtatcatacagagtgggggaaaactaaaagcctttttcctcttagatctggaacatgagaaagatgccagctttcactgatgttattcaacatagtactggaagtcttagagcaatcagacaagagaaagaaagaccattcaaattggaaagaagtcaaattatccatgtttacagatgatataatcttatatttgaaaaaacctaaagattccacca

SEQ ID NO: 322778 - DNA, 627 bp, Homo sapiens
atcctgtgcttaatattagttttgtcaatttcagtttttataaatacattgacttttaagcatctgagatttgatttgtgttttggtgatttaatcgtgatataaagaattattaaagaaaaatttgaayatgacttttacttcacaggattattttgatcataattcacgtgtaagatgcaatccactattagtgtaataaatacaatcaaccactcagatcagtctatgtgatacatgatatcaacagaatgaaagacaaataccaaaagatcatttatttcaattgatgctgaaaaagcatttgataaagttcaacatcccttcatgacaaaaaccctcaaaaaactgggtatagaagaaacatacctcaacataataaaagccatatatgacagacccacagctagtatcatacagagtgggggaaaactaaaagcctttttcctcttagatctggaacatgagaaagatgccagctttcactgatgttattcaacatagtactggaagtcttagagcaatcagacaagagaaagaaagaccattcaaattggaaagaagtcaaattatccatgtttacagatgatataatcttatatttgaaaaaacctaaagattccacca

SEQ ID NO: 322779 - DNA, 627 bp, Homo sapiens
atcctgtgcttaatattagttttgtcaatttcagtttttataaatacattgacttttaagcatctgagatttgatttgtgttttggtgatttaatcgtgatataaagaattattaaagaaaaatttgaatatgacttttacttcacaggattattttgatcataattcacgtgtaagatgcaatccactattagtgtaataaatacaatcaaccactcagatcagtctatgtgatacatgatatcaacagaatgaaagacaaataccaaaagatcatttatttcaattgatgctgaaaaagcatttgataaagttcaacatcccttcatgacaaaaaccctcaaaaaactgggtatagaagaaacatacctcaacataataaaagccatatatgacagacccacagctagtatcatacagagtgggggaaaactaaaagcctttttcctcttagatctggaacatgagaaagatgccagctttcactgatgttatycaacatagtactggaagtcttagagcaatcagacaagagaaagaaagaccattcaaattggaaagaagtcaaattatccatgtttacagatgatataatcttatatttgaaaaaacctaaagattccacca

SEQ ID NO: 322780 - DNA, 582 bp, Homo sapiens
cctggggggagaaaactggccacgaatggcaacaagaacatctgtgacgcgcgcaccccaggtgagggaaaagcaacagccaccactggattagtgactgccataggagaagcagattctcatgagggtagggtcagggcgggggagtgttcattctcacaaaaaggtgaagagaatattcagagaaacagtttgggtggataaaacaaagwtaccggcggaccaggaactccagaaggtacagtggaagggcttcaggattcggagagggcggagggttgggattcggaaaggatacctagagccatatggtgaaaaggagtgggaaggctggcctgggcttccctgtgagaccacgcccgcgaggatgagaggcagcccggaatcgtcccctcctacccgaggccagtagggaccacacctcctcagggggtgggactgctgcaatggctcagatcttaggtaatccttttaacttccaccgagaaagtcttggggttaggagaggcgggaccacactctcatctcttgcaagacagctcgggcagtgatactcatttttgcagggctatttgttcaatt

SEQ ID NO: 322781 - DNA, 568 bp, Homo sapiens
agggcgggggagtgttcattctcacaaaaaggtgaagagaatattcagagaaacagtttgggtggataaaacaaagttaccggcggaccrggaactccagaaggtacagtggaagggcttcaggattcggagagggcggagggttgggattcggaaaggatacctagagccatatggtgaaaaggagtgggaaggctggcctgggcttccctgtgagaccacgcccgcgaggatgagaggcagcccggaatcgtcccctcctacccgaggccagtagggaccacacctcctcagggggtgggactgctgcaatggctcagatcttaggtaatccttttaacttccaccgagaaagtcttggggttaggagaggcgggaccacactctcatctcttgcaagacagctcgggcagtgatactcatttttgcagggctatttgttcaatttcagtctttctcattagcttgtcagcacttttaaagcaggtactatttctgtgtttgttcacaattgtatttctgctacttagctcagtgtctaacacaaaggagatactcaaatatttgt

SEQ ID NO: 322782 - DNA, 582 bp, Homo sapiens
cctggggggagaaaactggccacgaatggcaacaagaacatctgtgacgcgcgcaccccaggtgagggaaaagcaacagccaccactggattagtgactgccataggagaagcagattctcatgagggtagggtcagggcgggggagtgttcattctcacaaaaaggtgaagagaatattcagagaaacagtttgggtggataaaacaaagttaccggcggaccaggaactccagaaggtacagtggaagggcttcaggattcggagagggcggagggttgggattcggaaaggatacctagagccatatggtgaaaaggagtgggaaggctggcctgggcttccctgtgagaccacgcccgcgaggatgagaggcagcccggaatcrtcccctcctacccgaggccagtagggaccacacctcctcagggggtgggactgctgcaatggctcagatcttaggtaatccttttaacttccaccgagaaagtcttggggttaggagaggcgggaccacactctcatctcttgcaagacagctcgggcagtgatactcatttttgcagggctatttgttcaatt

SEQ ID NO: 322783 - DNA, 582 bp, Homo sapiens
cctggggggagaaaactggccacgaatggcaacaagaacatctgtgacgcgcgcaccccaggtgagggaaaagcaacagccaccactggattagtgactgccataggagaagcagattctcatgagggtagggtcagggcgggggagtgttcattctcacaaaaaggtgaagagaatattcagagaaacagtttgggtggataaaacaaagttaccggcggaccaggaactccagaaggtacagtggaagggcttcaggattcggagagggcggagggttgggattcggaaaggatacctagagccatatggtgaaaaggagtgggaaggctggcctgggcttccctgtgagaccacgcccgcgaggatgagaggcagcccggaatcgtcccctcctacccgaggccagtagggaccacacctcctcagggggtgggactgctgcaatggctcagatcttaggtaatcctttyaacttccaccgagaaagtcttggggttaggagaggcgggaccacactctcatctcttgcaagacagctcgggcagtgatactcatttttgcagggctatttgttcaatt

SEQ ID NO: 322784 - DNA, 541 bp, Homo sapiens
aatcagggaagcaggacaaatctcttgagattctagtgaggatgttgctgtcaaggctgtgtatgaagagagacctcatgtttggagaccttggacagctccattcacgcagcattgagttttgctttaggctcatgcccrggctcaggctaacctcatggtgcttgtcttatattagaatatttttaaagctctctttgcgaaatctgatgtcagagttagaatgtcaactgcttgtcaaaacgtacataatttgatgccagattttttaatgtcaagcataatcacagatatcatccacatatgcccagagaagctacccaaaggaaactgaaaccatattgctaacatcactgactgtggcaagaaaatgtaatcaacaaaggcatcttgagattaagaaagttgaaacctcagtgaggctgcttctctgtaaaaaagaactccaaagacccacaacacagtgggacctgtccacagtcccaatccaattgatggtatgaaagcattgtttttctctaaagcattttcaggtctcagc

SEQ ID NO: 322785 - DNA, 580 bp, Homo sapiens
tgccacgctagacatataggatattagggaagcgcagaagastggcagctaaccaagactttttatcaactcaaattattttggaaataaaatttcagacatttacatccaattttaaaacatacatttccataaagagttgatttgctcattataagcaaatcatatttgtaacattacaaattgctctatgtcatattaggagcgtaatctgccataactcttcatttttcttttataaacatttttattataaaatataccaacaaaaaagaaacaggctatacagttcaatgattgcatcttgcagtaaacctcttcatgagacttcccccctactccagtttgccctccaggagagccttggaggaacgctccaggcaggtccgcctctctctgcaaaccaagccctgtgctgaggtggaggggagcagccgcgtggccgtttccaccccagcccccggcacaggcacaggcggctctctgtcactcacttgctctttgtcacttttctctatccccaccagtacttcaaataccatctcctgcacctgctctccctttcagtggattcaaatga

SEQ ID NO: 322786 - DNA, 580 bp, Homo sapiens
tgccacgctagacatataggatattagggaagcgcagaagactggcagctaaccaagactttttatcaactcaaattattttggaaataaartttcagacatttacatccaattttaaaacatacatttccataaagagttgatttgctcattataagcaaatcatatttgtaacattacaaattgctctatgtcatattaggagcgtaatctgccataactcttcatttttcttttataaacatttttattataaaatataccaacaaaaaagaaacaggctatacagttcaatgattgcatcttgcagtaaacctcttcatgagacttcccccctactccagtttgccctccaggagagccttggaggaacgctccaggcaggtccgcctctctctgcaaaccaagccctgtgctgaggtggaggggagcagccgcgtggccgtttccaccccagcccccggcacaggcacaggcggctctctgtcactcacttgctctttgtcacttttctctatccccaccagtacttcaaataccatctcctgcacctgctctccctttcagtggattcaaatga

SEQ ID NO: 322787 - DNA, 580 bp, Homo sapiens
tgccacgctagacatataggatattagggaagcgcagaagactggcagctaaccaagactttttatcaactcaaattattttggaaataaaatttcagacatttacatccaattttaaaacatacatttccataaagagttgatttgctcattataagcaaatcatatttgtaacattacaaattgmtctatgtcatattaggagcgtaatctgccataactcttcatttttcttttataaacatttttattataaaatataccaacaaaaaagaaacaggctatacagttcaatgattgcatcttgcagtaaacctcttcatgagacttcccccctactccagtttgccctccaggagagccttggaggaacgctccaggcaggtccgcctctctctgcaaaccaagccctgtgctgaggtggaggggagcagccgcgtggccgtttccaccccagcccccggcacaggcacaggcggctctctgtcactcacttgctctttgtcacttttctctatccccaccagtacttcaaataccatctcctgcacctgctctccctttcagtggattcaaatga

SEQ ID NO: 322788 - DNA, 580 bp, Homo sapiens
tgccacgctagacatataggatattagggaagcgcagaagactggcagctaaccaagactttttatcaactcaaattattttggaaataaaatttcagacatttacatccaattttaaaacatacatttccataaagagttgatttgctcattataagcaaatcatatttgtaacattacaaattgctctatgtcatattaggagcgtaatctgccataactcttcatttttcttttataaacatttttattataaaatataccaacaaaaaagaaacaggctatacagttcaatgattgcatcttgyagtaaacctcttcatgagacttcccccctactccagtttgccctccaggagagccttggaggaacgctccaggcaggtccgcctctctctgcaaaccaagccctgtgctgaggtggaggggagcagccgcgtggccgtttccaccccagcccccggcacaggcacaggcggctctctgtcactcacttgctctttgtcacttttctctatccccaccagtacttcaaataccatctcctgcacctgctctccctttcagtggattcaaatga

SEQ ID NO: 322789 - DNA, 506 bp, Homo sapiens
ggtttccttgggaaatcctaattagatttgtattccttctaacaaaaattctaagcctcctgaaacttgccaaatgattcaagttatggtcaaatagtaagaacaaaattttcagaccttctgaaaacatccctttggttgaataacatttgcctctaaagcaaaccaccttgggtgaaaaaaaaaaccccgattaataggattaataaataaccttgctttctgtttctatctccggaatagtacttgagttttagatcattacattaaaartcaaacaaaatttgctcagcaagtaaacatgatgattgtcaaaggaaacaactgtgtttccaaatggcccattgtgtggcttcctacttaacccactaatgctggttctcatcatgctgcttttctcctaccaactaagttgctttagttccgttttaaataagtccatggagattacttggaatcattttaaattatattgttcaacagcagagtggagtgactatggttaa

SEQ ID NO: 322790 - DNA, 563 bp, Homo sapiens
ttgaactacttaaaaggcttgaatgcaaacatagaggcaatcttttataagcatcatcaaagggcctcctacacagctcaatttactagtgcatttgtaaaatgtccaaaggggtatgcagaagtcatcattaagccaataaaaatagacctcaatctaatgaaataatcattttagtgctgtaagtgatttagttataactgaggtccatacacatgttaatctatgtttaggtcttcctatgcctttgtttttttcatttccatgtagaaaattttaaattttctcaggttcaatgtaaaatctcatttgcatatattaccgtaaagatagaatgggtaattccactatgatagtgtgatacaattgaacstccaggtttcagacacttccttaatccacagaagcagaattcctctagtttctgatattaagtagcataaagctgcaaaatgtttttcagacaccataattacaaaataaagctcctgaatgcttagcctttcctttggtgatttatttgccattctactttcttcacagtagtaaaattaaacctgtga

SEQ ID NO: 322791 - DNA, 518 bp, Homo sapiens
agcaaggctcagcaagcacagcctggggagcaaatccactcgcccagctgctgtggggcccatgagcaatgaatggcttcaaatcattcataaaaacaaataaaaaacaaagagaaatgcatgcagagaccgcacgtgtctacaaagcctacatttacccaccaaccctttacagacaatgtcgcctcccttgacacagagaacagaaatgaggaaagcaaaccaatgaagtgtaaatgaacagattaaaaagattagaacaaataataaatatgacacttagggactaaatatgttcatcaataaagtcatgctaaaaaaatacatgaaactaaacaaatactaaaagaaataattcaagagaaatamaatgcgtgtctacaaattaaaggatacaccttgtccaggaaaaataataacctagaaaagtccatcttaagatagataaaatcaatgctatgcaaattcaaagataagaagcctctaaacagagaagttaaagcaaagaaaaacaaagc

SEQ ID NO: 322792 - DNA, 604 bp, Homo sapiens
tgacagggggcactttttggaggtcagccctagggtatgaatagtgcctgcaggggtcaactcagcacaaatgggttgcctcagcaggtttctggagcccctggccatctactcccctgggctttgcccttgagcagtgtatctgagccctgtttgtgagttcttttcttctccacaacctccatatgtgagtgtgccagtggctcagcctggagaccttctcccttctattctttaattttctagaggatctcaactagttgcaggagtttaaatactatcagtgctttgcatagtgttgactactttcgggaactttagactcatctacccttgcatcatctcaatgtgtccatacaggtataacaggcatttcaaaatcaacaggccacgtgagtcctgcttctcgtgcctcctgctctgtaacaagcagctccacctgcagtgyactgtgctcaacaaacattcactctgtcctagttgctctgaccttcaacctcacagtcagcctttcttcttctcttatcctcatattatatatttactccataaaaatgcattaaacatgctcagattccaaccacattttactactctaatgcac

SEQ ID NO: 322793 - DNA, 570 bp, Homo sapiens
tcatgtggtattttgagaacttttcatcatttttcttaaaactcgaaaggagaatagacttaaggcaactgctgacatttggagagatgggaaaatatggyatcaaagataggtctgagctttgagcctcaggtattgagggctgaccatggtgtggctgatggagaaagtgaggtgtcaagaggaagagtggccatgctgggaacagggtggatgtgctcagtgtgaagctgatcgttgtgtaatttgtctcaaaggtgtacggagttttccatgtcatattttaacattcttgaattctggattgttggggtttttttttaagatataactagacatggatgtttcatttgctgtatataaatttaattggccctgctttctcactaagacttttgttttaattagcaaactcctcttctttgtaaatcaaggccaaggccacaatataaatttgcataataaatgcaagcagtttgaacttgatccctgaagatgtgagttctctgtgcacagaaaccagttgagctcccagctggagtttgtaggattaattttcaatgttcaaga

SEQ ID NO: 322794 - DNA, 615 bp, Homo sapiens
tcaatgttcaagaagtattatggccagtgtgtctctcctgcaggaactatttttgtacctttaacaatttcaagattagtgcttttatttttcttttaatctttagatcaatggccagttgcacaaaaatgtaattcctttgagaagaaagtctgtgagcaaagagaaatggctttcaaccctaacgcatcacaatgagacaaggaccctgtagatggccccacctggggttctctgtatatgtgccaagtgccttgtgctgctcaaggcgggagtcagcacttgtatgacccactgcagatgctgtttaaaaatacgcatggaattctctctctgatcttttctgtcacatcatctccttaaaactcccaaaaatatttagaggtgattacaaagggytgaggacaaaaaaattggaaaaaatacaatcacaaatcaatcaatcaaaggtgtttatttgaatacaggtcagcaatacatgattctcttatgagcatttatctaaacactcctggcatcccaacaaatacctcagtgtataagatgctttcatcgaatataatgcagttttcttcctgttcttgttcgttttttgcagtcttcatgtttgtttgc

SEQ ID NO: 322795 - DNA, 615 bp, Homo sapiens
tcaatgttcaagaagtattatggccagtgtgtctctcctgcaggaactatttttgtacctttaacaatttcaagattagtgcttttatttttcttttaatctttagatcaatggccagttgcacaaaaatgtaattcctttgagaagaaagtctgtgagcaaagagaaatggctttcaaccctaacgcatcacaatgagacaaggaccctgtagatggccccacctggggttctctgtatatgtgccaagtgccttgtgctgctcaaggcgggagtcagcacttgtatgacccactgcagatgctgtttaaaaatacgcatggaattctctctctgatcttttctgtcacatcatctccttaaaactcccaaaaatatttagaggtgattacaaagggctgaggacaaaaaaattggaaaaaatacaatcacaaatcaatcaatcaaaggtgtttatttgaatacaggtcagcaatacatgattctcttatgagcatttatctaaacactcctggcatcccaacaaatacctcagtgtataagatgctttcatcraatataatgcagttttcttcctgttcttgttcgttttttgcagtcttcatgtttgtttgc

SEQ ID NO: 322796 - DNA, 588 bp, Homo sapiens
gcctgccatgcacacaacagccttgtggaataggcttgtgttgggaagcctggataaaggagtttccagactggctgacttagcaggccagggctggattcactctcccctctccctgcsactgctacagctttgttttaaggaaagtagcggccccctcgatttgcctgcgggttggagatggtggccaaacgccctgtacctccacctctgtggatacctgagctattactggatatgtgagaagcaagggggagaaggcactaggacaggaaattagaaataggaagacttggggcttcagggggttggaggcctgacatccggtttcacctgaagtgtgtttggggtctcctggtcggctgctcctcaggctgacactggaactctgtaagtatgaagacctagtagagggcttggaaggctagcaggggccgcaaagcaggtaaatatctcattctcaagggagtgtgctcttttggggaagcccttctgcttcctcttggcaggaggaccaggagcagttaccctccagaggcagcacagagtaggggctcagacagcactgagtcagactgcctcactcat

SEQ ID NO: 322797 - DNA, 549 bp, Homo sapiens
taaaaaaaatgtttttagtctctgtctcttagggtaaactgcagtggcacaatcatagctcactgcagccttcaactccagggctcaagcaatcttcctgctgggactacaggtgtgcatcaccatgcctgggtaatttttttaattaattttttttgtagagatgagatcttgctatgttgcccagggtagccttgaattcctggactcaagagatcctcctgcctcagcctcccaagtagctgggacaacaggtgcatgccaccacacctggataatttttaattttttttttagagacaaggtctctaaaaaatgttgcccaggctggtctggtcttgaactcctggcctcaagtgatccttctacctcagccacttgagtcactggtctaatttctataataggtcttttatatccataacactcayggttgttttccttctctgcctgaattctgacagtttattggtactgaatgtgattctagagaagcagaacttgaaggatgagaatctgaatctcttctctggtctggctgaactgaaa

SEQ ID NO: 322798 - DNA, 642 bp, Homo sapiens
ctgctcatctgccatgcttcagcatcctgggcctccttcctgtggcctggcccagactgtccyacagcccctgatgagtaccagcacagagagtccagttttaaagccagggctttcatatgtcttcattactaatgaatctgcctgtcttgctgtctctaccttgttctcttgccagcggctctgggacacatcttactctcttgttctctctatctttttacaatcctgtctttctctcaatgtccgtctcctgggctcccatactcttctcccgcctgcctttgttctccctctttccacccctttttttctgccaagcttcttcctacacgcccgtggctgcctctgtcctcaccacgtccacatgccctgatgcctgctgcctctgcctgtccttccctgtctttgctcccttccctaccctcctctgtgcctcttcatcccacccccacattctgggtctcccggtggcattgtcccctctcttccctgtccatgcacaattctgctccttttctctgccctgtccctaactcggcttccccccactgccatctcctttcctggccctaccctcttctgctcctctatctgcagatttacgagtatcggaatggccaccaggaggtggagagcccc

SEQ ID NO: 322799 - DNA, 642 bp, Homo sapiens
ctgctcatctgccatgcttcagcatcctgggcctccttcctgtggcctggcccagactgtcctacagcccctgatgagtaccagcacagagagtccagttttaaagccagggctttcatatgtcttcattactaatgaatctgcctgtcttgctgtctctaccttgttctcttgccagcggctctgggacacatcttactctcttgttctctctatctttttacaatcctgtctttctctcaatgtccgtctcctgggctcccatactcttctcccgcctgcctttgttctccctctttccacccctttttttctgccaagcttcttcctacacgcccgtggctgcctctgtcctcaccacgtccacatgccctgatgcctgctgcctctgcctgtccttccctgtctttgctcccttccctaccctcctctgtgcctcttcatcccacccccacattctgggtctcccggtgrcattgtcccctctcttccctgtccatgcacaattctgctccttttctctgccctgtccctaactcggcttccccccactgccatctcctttcctggccctaccctcttctgctcctctatctgcagatttacgagtatcggaatggccaccaggaggtggagagcccc

SEQ ID NO: 322800 - DNA, 634 bp, Homo sapiens
ggggaggggaatctgttacagaacaaaggagataataatatatcatgcaaacacaaacccatctatatcttgattcaaatatmaattgcaaaaaacggcttgaaattactatagaaatttgaacagaaacaaggtcttagataaacagtccccaacttttttggtaccagggaccagttttgtgggagacaatttgtccacagacaaagggtggagaggtggggatggcttcaggatgaaactgttccaccttaaatcatcaggcattagttagattctcagaaggagtacacaacacaaatccctcacatgtgcagttcacaatagagttcatgctcctacgagaatctaatgctgctgcccatctgacaggaggtagagctcaggcggtaatgcttgcttgcctgccactcacctcttgctgtgtggctccgttcataacaggccacagactggaacccatctgcagccccagggttggggacccctgtcctagataacatttagtaaatacagttaattcttttcagtgcaataactttgttgagattgttttttaactggctagccatatacagaaaacagaaactggaccccttccttacaccctatacaaaaattaactaataaaaaa

SEQ ID NO: 322801 - DNA, 634 bp, Homo sapiens
ggggaggggaatctgttacagaacaaaggagataataatatatcatgcaaacacaaacccatctatatcttgattcaaatatcaattgcaaaaaacggcttgaaattactatagaaatttsaacagaaacaaggtcttagataaacagtccccaacttttttggtaccagggaccagttttgtgggagacaatttgtccacagacaaagggtggagaggtggggatggcttcaggatgaaactgttccaccttaaatcatcaggcattagttagattctcagaaggagtacacaacacaaatccctcacatgtgcagttcacaatagagttcatgctcctacgagaatctaatgctgctgcccatctgacaggaggtagagctcaggcggtaatgcttgcttgcctgccactcacctcttgctgtgtggctccgttcataacaggccacagactggaacccatctgcagccccagggttggggacccctgtcctagataacatttagtaaatacagttaattcttttcagtgcaataactttgttgagattgttttttaactggctagccatatacagaaaacagaaactggaccccttccttacaccctatacaaaaattaactaataaaaaa

SEQ ID NO: 322802 - DNA, 622 bp, Homo sapiens
tccattggtattttaatacaagaggcagtggcactcctgattttattttaatgtaatccttttaggcaattttagatgtaatatcccatctttttgtacagttcatatatttaagtttgtaaatatcaaatcgtcagccaattgccaatcaacaagtatacactgaacaacctcaggatacattatcagagtcttcaaaagtaatttccataaaaatgtaagtttctcaaaaatagatgtaaatgtacttactggtctaaacccacctttcccaacagatcagcatttttcttatgtacttatggagatgtttatttgaaataactgcatcacttctaaatcactttacccccattctctrcatgtccttgagattcctttatcatccacatcattgtgcttcatgttcagccctattagtttttagcttaatcctgtgcagtttagctcactgataaaagccttattgtagtgtttttaatacctacagcgtctctgtgattttgcacaaattaattgttcttttgtagctatttcagctttttagtactttgaagctgttactgaggaggcagacaaggggcaactgtggtttacagcacgacagcttaatttacatagg

SEQ ID NO: 322803 - DNA, 584 bp, Homo sapiens
aggaaataagatgaaaaaaataatgttaggaaaagagaaagaaaaaaataggaaaagagagaaggaaaaggaaaagatggagaaggagcaaacgaaagaaagagggatgaaaagaaagaaggaaagagagagagatgcatgaagagtgagtgagacacatggagacaatttatargagagagcaccagtacttgtggtaaggttgacatgaaaattcggaggtagtggaagctatatattacctggtatttaggtttttccagtttaatcttaaataatactattacagtgtgctttcttgatatctctgattttccagggtacttcattgtaaagaggagttaacagtagagcagtctcattggaatgattataaaattaaagaaacaaaagctgcctaaacatccatgactatcaaaagcattagtttaatggacatttgtttttaggagaatataacccatttgaaaatattaatggttacctactaaatttttctagatctgaacatgctaagtactatgtcattcgtgtatttattgaaaaattagtttcagttatgatgtgattctgaagatttgttc

SEQ ID NO: 322804 - DNA, 634 bp, Homo sapiens
tgctactttctgcctctggcttgctcagatctagtttgcctttctagggcctcaaaccaaagcgtgagagaaaaggtggctcaagcctacctggggcccattaaattaatcccaggtgacccttgccaaatcgcagccagcaaccagcagggcagcctctctgctgcttccctattaaactgtgggaccagttccccctcaaccaaggaagagaaaggaagtcatggggcctttctagggcctcaaaccaaagcttgggagaaaaggtgcctcaaggccacatgggacccattaaattagtcccaggtggcccttgacaaattacagccagcaaccagcagggcagcctctctgctgcttccctattaaactgtgggaccaggtcctcctcaaccaaggaagagaaagggagtcatgggaattggggacctggcctaacaaggtgcctcccaatagtacaacttaagtccatggtaggggaaagagcctggggaaaaaagcctcttgccctattsgtgcgggttccttcaacagggaaaaaaacactctcaattgttatatcctacttacttctaagaatagacagataccacattgttctcatttacactcctgatgactaaaccaaatgctc

SEQ ID NO: 322805 - DNA, 560 bp, Homo sapiens
ggcactggcaggtgcagggctggtacccttagcatgcacattcctgctggcagcagtagcagtgccgcaaataattacatcttcataatttattaatttattcataggtcatagttttaaaatattgtacccaagataataccatgaagaatgaaattaaattgtataaagaattcatatattctaaacaaaaacaataaagaygctgcctttttttaactaggctataaaaatggtatgaaatgtatagatacattgtcaaaaagtgtaatttacaaatttaaaaaaaagtttccaaaagaaaaaataatacactgatttacataaatgcaacacagaggcacacaaacatgttcacacacaccttcctaccacagcaattaattttatagaaattaacataaaaataaaattataatatacacataaaaacacattgcagaaccccgtctctactaaaaatacaaaaaaattagccgggcctgctggcgggcgcctgtagtcccagctactcgggacgctgaggcaggagaatggcgagaacctgtgaggcggagctt

SEQ ID NO: 322806 - DNA, 577 bp, Homo sapiens
gagaaagctgaaatttatggaaatcagatttttaaactgatgctaaaattttccaggataggctctctttcatacttacttaaaaaaaattaactargtattatcattaacttcatgtttttctttgagattattgtatatttgcatgtagttgtaagaaaaaatacagagagatatggtgtactattacccagtttttcagtgttcacatcctgcaaaactatggtaaagtattaaaatatattgatatagtcaagatacaggaatattttcattatgataaggattcttcatattacttttgtataacttcacttacttttctccagattctatctcctttttcaccctggaaaccatctcaatttctataattttttataacattgcctggaaggagaaagatctagttatgttaacagagattctttacagattcaaattttcccccacaaaagatatctttgcaaagccatttcaaaatacagcaaagaaacatattttggggtgaaaaaattgatgtccttctttatctgttgtcttatgccggagtcaggttggaaagaaaaccacatta

SEQ ID NO: 322807 - DNA, 577 bp, Homo sapiens
gagaaagctgaaatttatggaaatcagatttttaaactgatgctaaaattttccaggataggctctctttcatacttacttaaaaaaaattaactaagtattatcaytaacttcatgtttttctttgagattattgtatatttgcatgtagttgtaagaaaaaatacagagagatatggtgtactattacccagtttttcagtgttcacatcctgcaaaactatggtaaagtattaaaatatattgatatagtcaagatacaggaatattttcattatgataaggattcttcatattacttttgtataacttcacttacttttctccagattctatctcctttttcaccctggaaaccatctcaatttctataattttttataacattgcctggaaggagaaagatctagttatgttaacagagattctttacagattcaaattttcccccacaaaagatatctttgcaaagccatttcaaaatacagcaaagaaacatattttggggtgaaaaaattgatgtccttctttatctgttgtcttatgccggagtcaggttggaaagaaaaccacatta

SEQ ID NO: 322808 - DNA, 569 bp, Homo sapiens
gctcgccactcagctattggtgactttggtagagatggaccgtgtgtgtgtgtatgtgtgtgtgtgtctgactgcaacatagtagttaatttctaaaagttttctgtttggttaagttcctcttttctaatccattggctatagaaagcaggcttttgttgggctattttaactgtgcctgttggctttttcagattactgacttcagcactcattctgggttaagtgaggcaaaaagaaaaaccagagaactcaaaaacatgttagtctatgcccagaggtcacacgttgttgctccttctttcttccatcattcagtcttaagtttatattttatataacatccaaggtttttatactagcaggcagttttttttattttattttaatgaccaaatagagaaaaatatgtctattttcctaagagtggggtcaacaatgttattttttggtaacagtcacagctactaaagwagtgtaattgtacttaagtataataatttcataattcacttattttgaaatgaaaggctcaatgtcatcattttacacatatttagaatgttcca

SEQ ID NO: 322809 - DNA, 641 bp, Homo sapiens
gtgctgttcaaataacaggagaagggctgggggcagtggcttatgcctgtaaccccagcactttgggatgcccaggtgggcagatcaccagagttcaggagttcaagaccagcctggccaatatggtgaaaacccttccctactaaaaaatacaaaaaattagcgggtcacggtggtgggtgtctgtaatcccagctacttgggaggctgaggcagggagaattgcttgaacccaggaggcggaagttgcagtgagctgagatcacgccagtgcactccagcctgggtaacagagcgagactccatctcaaaaaaaaaaawaataataataataaaataactggagaacgagcagtctatacaactttaatagaggtgttaaattaagcaggaggccattagcagtgccgtctcattactttaagtttctaggtaacaaactgtagactaacttagcatgtaaacaaaccaaaactaactcaggagtgtggcaaacagccaagttcagctaatcacaaagagccaaccttcagccaattacaggcagtgaagccctaataaagcaaatgcctcatctcaccatggccaaataaggcagatgtccagctgcagccaaacagatttctctactttgcttctgt

SEQ ID NO: 322810 - DNA, 594 bp, Homo sapiens
ttaccatccattgaaagaggcaattcaatcccatctagttaaaaaggggataattctcagatcttttttttttatcaagctcttaccattggcttggcaatgtatttctgtcaatacctagacgataaatattttagtctgttaggactacttataatgtccatgagattacttataatcttattgattatggagccatactcagtacagaagtgaatgcgtatggctgtgttccaataaaacttaattcagaaaaacaggcagaggacaagatttgacttgcagattgttgttttctgattcctaatctgtagcagcatctacaaggtacacctaagctttttatttttattacttcccatcacagtttgaaacaaccaaggaaataatcttatgctctactgccctaaccaatgcatatttaagacatgaaaaatcaagctgcaataaaaaatcactttattactttaataaatatgaaaagcatattttcaaaatgtcttcagcataaaayttcagagaaagaagttaatagaaagactaagatctgttaataatattaaagagtaagattttttccctgaaccgctgcct

SEQ ID NO: 322811 - DNA, 575 bp, Homo sapiens
ttcaaagtcaacctccattacccttagctcaaggtgtttcttgcagttattcttccacactctctttcaattttacctcagagctgtggaagtactaatgcagtaactttgtgttgaaaacagtgtaatggaaaaatgaacttgctaaattaatgcttgattactgcactgcttatggtcttgattggaaggcattgaaattttaattcaactatattgcagaaaaacatgtaaaaaacacttgagcaatgagatttgtttccttaactgatacaggctaaaaacatagataataactttgaaagttggatgtacattaaccccagtacacaaaattaaagcatcgttttggttcaatattatgtcagagattaaaaaaatgtttaatttgctttatgataaaatatataccattctaaactctcaagtcaatgagccaaaaatagcatagagaaaagatagctagtactgttttatgtgcacatgtacgtattacatacacatatgtcagtctaggttactsacttcaaccactgagatttgatgttctaaaaattagaatagcatatgtttaa

SEQ ID NO: 322812 - DNA, 554 bp, Homo sapiens
tcaaacaggtcattaatgcttgtgagacttgccttaaaaataattccctcaactggcagcttctcccctctgggaacccaaagaataggagactgccaggggaagactggcagatgaattttactcatacaccaaagacaaggggcatccagtacctcatactacgggtagataccttcactaacttgatagaagcatttctctgtcgaacagagaaagcttctgaggtgataaaagtactaattaatgaaataattcctccctttgaacttcctaagtacctccggagtgataatggcctcctgtacctttgagacatccctcactcagggtgtctcaaagcactaggcatacaataccatctttattgtgcctggtgaccacaatctttggggaaggtagaaaagacaaattatattatcaaaagggactccagaaaactggctcaagagactcatctctcctggattactcttctcctcttagccctactatgkgttagaaacacccctttgaagctgggtttaagtccctctgaaatgatgtatggactg

SEQ ID NO: 322813 - DNA, 630 bp, Homo sapiens
ataagggggtcagggaccccttcccaagggattattcactcccctaaacagttatttctcttttaaagtttaactgcccccatacaagattaaatattttccactaggaggaaatagctctagccaatcacatagtaaacctccttgtaaaatttgtttcttcttgcttagaagccatcaaacttatgcaactggagccttggaatattggctctctttttaccagggaccyttagataggcccttagatctgactaccatttcccccaaaacaatgccccctgtcagcatgaagcagttaagagcagttgtcatccctatcctaatggcagttagatgtacctcttcagagggagggtttgatggcagtggctgctccagatagtctgccactgccatgatatcagctgcagaagggaggcacgaccaggcctcctgcttcctggagtaggcaggagccccacctactgggtggggctgcagacgccaaagttgtggctgcagatccaagcgtccctgtgctcttggtgggctggaagcaggcaggaaccctgctcccccgggcgcagctgccactgcccaaaccatggctgcagacctaggcctcctgctccacagagcaggcaagag

SEQ ID NO: 322814 - DNA, 630 bp, Homo sapiens
ataagggggtcagggaccccttcccaagggattattcactcccctaaacagttatttctcttttaaagtttaactgcccccatacaagattaaatattttccactaggaggaaatagctctagccaatcacatagtaaacctccttgtaaaatttgtttcttcttgcttagaagccatcaaacttatgcaactggagccttggaatattggctctctttttaccagggacccttagataggcccttagatctgactaccatttcccccaaaacaatgccccctgtcagcatgaagcagttaagagcagttgtcatccctatcctaatggcagttagatgtacctcttcagagggagggtttgatggcagtggctgctccagatagtctgccactgccatgatrtcagctgcagaagggaggcacgaccaggcctcctgcttcctggagtaggcaggagccccacctactgggtggggctgcagacgccaaagttgtggctgcagatccaagcgtccctgtgctcttggtgggctggaagcaggcaggaaccctgctcccccgggcgcagctgccactgcccaaaccatggctgcagacctaggcctcctgctccacagagcaggcaagag

SEQ ID NO: 322815 - DNA, 630 bp, Homo sapiens
ataagggggtcagggaccccttcccaagggattattcactcccctaaacagttatttctcttttaaagtttaactgcccccatacaagattaaatattttccactaggaggaaatagctctagccaatcacatagtaaacctccttgtaaaatttgtttcttcttgcttagaagccatcaaacttatgcaactggagccttggaatattggctctctttttaccagggacccttagataggcccttagatctgactaccatttcccccaaaacaatgccccctgtcagcatgaagcagttaagagcagttgtcatccctatcctaatggcagttagatgtacctcttcagagggagggtttgatggcagtggctgctccagatagtctgccactgccatgatatcagctgcagaagggaggcacgaccaggcctcctgcttcctggagtaggcaggagccccacctactgggtggggctgcagamgccaaagttgtggctgcagatccaagcgtccctgtgctcttggtgggctggaagcaggcaggaaccctgctcccccgggcgcagctgccactgcccaaaccatggctgcagacctaggcctcctgctccacagagcaggcaagag

SEQ ID NO: 322816 - DNA, 387 bp, Homo sapiens
attttcctttttctttgcatgtctcacattttgttgttgttgtggaatactggatatttcaaataatatagcataaactcactaatgctttttgctctattgtcttcagtaatgtcctcgagcaaaaactgcctcacagactaatccarttgaattcaggcacctctgatggagtagttacttatgtcagtgtcagagatttgttctaaccctaggagtgttatttctataactctttccctgttttactccagcaaactagttagcctgcaatttagcctctacctccaatgaatctatcaatccctcccaattgtcattcatcacaatttcctatttgtgatagtacctttaggcttgaactctctacattatgtgttgcaaatg

SEQ ID NO: 322817 - DNA, 663 bp, Homo sapiens
gcttgaataccttctgatgaaaacatctagtgtggtaagcaaaatctcagcttcaaatgagttatagcttaaaagaaaattccagttgaaaataatgaaaaactttttwaagaaattatttatcactaagctcttaattgtacaaggaatatcttctgaaaaaaatacaaatattatgactctaagtagaaaagtgatttaagtaattcagaaaaatcaaatggtgaaaaatgttttaagtataccttatccaaattatttttataagtcttttccaataacatatgtttatatctaagcctaaatgtatgcaaacacagctaaaacagctctgttaacaaagagaacatttagtaataaaaaagcattatattatgtttttattggcagaactattttcttctacgttgagtagtttccgtaataacagtatatcttatgattgatagtacctttgatttagtgaaataaaattgaatgatattataaattaaggtgatatatgtatatagcctaggtaacagcattttgcttcagcatcatttagagacaaaaataataaagtgattactttaaaatatagagatgaaacagagaattcgaggctaacagggtatgctgaaattagttgagtgcttctatgttaaaaaaaaaaaaacaaca

SEQ ID NO: 322818 - DNA, 663 bp, Homo sapiens
gcttgaataccttctgatgaaaacatctagtgtggtaagcaaaatctcagcttcaaatgagttatagcttaaaagaaaattccagttgaaaataatgaaaaacttttttaagaaattatttatcactaagctcttaattgtacaaggaatatcttctgaaaaaaatacaaatattatgactctaagtagaaaagtgatttaagtaattcagaaaaatcaaatggtgaaaaatgttttaagtataccttatccaaattatttttataagtcttttccaataacatatgtttatatctaagcctaaatgtatgcaaacacagctaaaacagctctgttaacaaagagaacatttagtaataaaaaagcattatattatgtttttattggcagaactattttcttctacgttgagtagtttccgtaataacagtatatcttatgattgatagtacctttgatttagtgaaataaaattgaatgatattataaattaaggtgatatatgtatatagcctaggtaacagcattttgcttcagcatcatttagagacaaaaataataaagtgattactttaaaatatagagaygaaacagagaattcgaggctaacagggtatgctgaaattagttgagtgcttctatgttaaaaaaaaaaaaacaaca

SEQ ID NO: 322819 - DNA, 559 bp, Homo sapiens
agcaatgtggcaattttaatgatattgtttcttctaataaatgagaatggaaaatttttccatctgtgtcatctctgatttctttcaattgttatgtagttcttctagagatcttttgattcattgatttgatgtattcctaggtattttatttttatgttttgcttttgtaaatggaattacactcttgattttgctcttatcttaaacattatttgtgtggagaaatgctgcttattttggtacattgattttgtatcctgaaactttactaacataatttatcagttctaggaagcttttggcaggtccttagagttttctaggtatagaatcatatcgtcagtgwaaacagatagtttgacttcttcatttcctatttagatgccttttattttcttcttttgcttgattattctgtttggaacttctagtgactaagttgaatgggaatggagaaagtaggcatccttgtcttgttccatttttcaggggcagtgcttcttacttttgcgcattcggtataatattggctgtgggtttcttatagttggttctt

SEQ ID NO: 322820 - DNA, 589 bp, Homo sapiens
ttttgacttttctcgtggttaataattcttcaaagttaaaccagcttgtcttcattgattcttttcttcatcagatgctcttgtggctctgctgtgctttttgagttgtttctgtgaaccagtatggccttaaggtgatcagcttgaaaggaaggggaaataaatgcttgaattttcttctatataaaaatgaatctggccttttctattgtgctgtgcctgccttttgttttccactgggttttatttctttctttggactttacatcttttttcaggttttttttgtgggggggtgttgttctttttctcccctcttacatgttttatctgttcccagaagaattgtatggtgctatgactgacacgcatagmtttccttctctacaatactgagccaggtcaatcatttattttatgtttgtctttttgctttcaatagcttgtagccaatgcagcctgtttgatttgacagctgcttttagaagtgtttctaacaaagagcaattttgcaaaatcagctcagaccccagctttggaaggctccatgttgtggaatcctgtttagttactctgagaggtagacaat

SEQ ID NO: 322821 - DNA, 656 bp, Homo sapiens
attacaaataaattattttctcgatttctttgttggatgttttgtttataacatatagaagtgctactgatttctgtatactgattttttttctacaacctgaccgaattcatctgaataaaacctgaatacataaggaactactcaatagccagaaaacaaattaactgattgaaaaatgtgcaaagtatataaatagaaatctttccaaggaatacatataacttgccaatagttttatttttaaaaaagtgaatactaccaatcatcagaggaatgcaaattgaaagcacaatgagatataacctcacacctgtgaggatgactattatctaaacgacatgagaactgctggtaagagtgtggagaaaaggaaaccaccatgcactgttggtgggaatgtaaattattatagccattacrgaaaaaactatggaggttccgtaacaacttagatctaccatatgatctagcaatcccactactcattatatatccaaaggaactaaaatcagcatgtggaagagatagctgcatttcaatgcttattgcaacattattcacaaaaaccaagacatagaattaacctaagtgtccatcagtggatgaatagataaagaaaatatggtgtacatacatagtgaaatactattcaa

SEQ ID NO: 322822 - DNA, 656 bp, Homo sapiens
attacaaataaattattttctcgatttctttgttggatgttttgtttataacatatagaagtgctactgatttctgtatactgattttttttctacaacctgaccgaattcatctgaataaaacctgaatacataaggaactactcaatagccagaaaacaaattaactgattgaaaaatgtgcaaagtatataaatagaaatctttccaaggaatacatataacttgccaatagttttatttttaaaaaagtgaatactaccaatcatcagaggaatgcaaattgaaagcacaatgagatataacctcacacctgtgaggatgactattatctaaacgacatgagaactgctggtaagagtgtggagaaaaggaaaccaccatgcactgttggtgggaatgtaaattattatagccattacagaaaaaactatggaggttccgtaacaacttagatctaccatatgatctagcaatcccactactcattatatatccaaaggaacyaaaatcagcatgtggaagagatagctgcatttcaatgcttattgcaacattattcacaaaaaccaagacatagaattaacctaagtgtccatcagtggatgaatagataaagaaaatatggtgtacatacatagtgaaatactattcaa

SEQ ID NO: 322823 - DNA, 593 bp, Homo sapiens
acgtatgcatgaaaatgtcaaaactcaatgcttaattatgtgtcttttattttctgtcaattacatatcaacaaaactgtaagaatgtgctaatgcacactgtggagtgtcaacagcaattaaacgtaacatggctggatcctgaaaacatagtgctaaatacatagtctaagaaacaatatgaaaaagaagaaggaattaaaatacaatgcaatagtgacagctgagttagtaagggatacaaattgtgtktttctaatgtatgtacattccaggaaagaagtacaaattaattattaagtactgaagtctgcatattatagtttctagggaacaatgaagtaataaaaatagaatgcaaaacttaaaaacaaaatgtgggagggtaatgaaatgaacttctaaaaaattatacaaaacaagtcacattttagttggtgtttctgttaagcagatcacaaggtgaagatttgggtgaatgtagttcgctagcgacctggggaaactgcaggaaaaagtgcaagttgggggttgctattgaaacaaccatttccctgctcttctcaccttccctgcacaaggaaaagcaagca

SEQ ID NO: 322824 - DNA, 545 bp, Homo sapiens
acactaataatagccagcaataaaactttcagtgttggaagaaacctgttacctggagcatggaatgagaatgaggctgaaatgagaacatatttcatggaaaaattggagaaattcaaatcagaacattctcatgtcatgtgccctgagggtaattaagaaaatgtcagatgtcattgatgaaccatttgccattatcttaaggaaatcatgcaggacaaggattctctgaggactggagaaaggaaaatgttgtgtccatccttatttttctttaatgaccttgctatatacaggtcaactgaaaaatccattctagaataaataattaatcccaaagaatcaaagttagtaattttcttgggcaactatatgtaatatgtttaacttaagaaaaatgctgaacaaaaaagctaaaacagcttgttttatttaatattctgtgcaatatcttkgttggcaaaacaaacaattttagaagtaatttttgaaaacaacttatttaggcacttatatatgcagtaagtattctgaacttaaaatat

SEQ ID NO: 322825 - DNA, 585 bp, Homo sapiens
aggcacatgctactaagtcaggttttcaattttgtctgcctattaagctaggttatgattcacccacaaggactcaaatatagaagtacagattccttctcaggccatattaaatttgctttaacaatgcacacctgcaatctatgtatgggtagaatgcattttaaggatgaatttaaaacaatgaataaatgaatgcatttatttaacatttgtttattctgtcaataatatggtttggctgtgtccccacccaaatctcaacttgaattatgtctcccagaatttcctcatgttaagtaggggcccagggggaggtaattgaatcatgggggctggtctttcccatgctattctcattgatagtgaataagtctcacrtgatttgaagcgtttatcaggagtttgtgctttggcttcctccgcattttctgttgccactgccatgtaagaagtgcctttcacctcccaccatgattctgaggcctccccagccatatagaactgtaagtccaactaaacctctttttcttcccagtctcaggtatgtcttttcagcagcatgaaaatgaactaatacagtac

SEQ ID NO: 322826 - DNA, 523 bp, Homo sapiens
ggctctgccaacataataaaacrggagaaaagcagagaaaaaatataattaaaaaaattttattcagaaaactggaagttagaaaaatatattatttgaagacatacatacaatatcaaataaaattctcattgaatcagagatccattcatgacatatctacaattttcttcatgcaaagtcatctcacttaaatatgtaatgttttagcaccctctataacatatttatagagcatcatttaatgctaatgcaaatagacactgtgctctatccaaagatagtttctaaaacagcaaaatgggtcttcctataaaataatttcacttgtaaggtgggcatctgtgacaataaaaaccaagacaccacttggtatcaataataactctttaaaacagtatttacactaatttggctaagaggtcctatacctagtatccatattactctaaaccatgtagagtcccactatgagaattctaaagtcattcactgtaacggaactaggcacactgctaaaaat

SEQ ID NO: 322827 - DNA, 602 bp, Homo sapiens
aaagaaattcttgaaatcctagaaaaagaattcaaaattatggtactaaggttcagtgagatacaagagaattctgaaaaacaatgcaaataaatcagaaaaagcaattaagaatataaatgagaaatttaccaaagaggtagatactataaaaaagaacaaaacagaaattctgggactgaagaacttcttcaataaaataaaaaatatactcaaaagcttcaacaatagactagatcaagcagaagaaagtatatcagaacttgaagatgggtcttttgaaataacccagtcagacaaaaaaaagaaaaaagaataaaaaagaatgayaacaatcatcatgatacacagaacatcataaagcaaccaaaatatacaaataatcagtatctccaggcaaagagagaatgaaagggttggaaaacctatttaacaaaataacagatgaaaaattcccaagtctagcaagagatttagacacctatatacaggaggcccagtgatccacaaacagataaaatgaaaaaggttcttctccatggtacattataataaaattgtctaaaatcaatgacaaaggaacattctaaaagcaccaagag

SEQ ID NO: 322828 - DNA, 627 bp, Homo sapiens
tattctggcatatattcctttatatatttccaggaatctcatgctttttgctcaagttttaactgttttcagtaagcaacatatttaaatgtctaaaattgaaaaattacaaagggattatgacagaaaatttcttttttatttctagccccagtcatctatcttctcttaggggcaggtatactgccggagatattctacgcacacctaagtaaatccatacaaatattttctcaagcttaaaaaaaaagcaacacactttatacactgtggcatatctcgyttttttcacttaaaatacatcttagacacaatattaattcacaaagtattgattcattctttttaaattgcatagtataaattagggatgttgcataatttatttaacctgaccctattgatggacatttacattgtctccaaacttttactattataagcaacattgcaatgaatatttgtgtacattatttcacatatctgaaaatatgtttatgagttaaattcctattaatgggattacttggctaaagggtaaacgccattgtaattatgataaatattgccaaattatcctccgtagagatcaaatcaaatgacagtcccaccaaaaatgtatgagag

SEQ ID NO: 322829 - DNA, 575 bp, Homo sapiens
aacattttaggttcatcaatgaaaggggctgagcaagtgtgctacttctcattcatcagttgttgaggataaccttagactttagtagttatgttattccacagcctctgggattgtacccagaagatgctcaccttctgcaatttaatataccatcatttcccaacacatcaggtgcttttacatctttgtgggacaaagctccatacaccagtgcatattgacatttgaaacctatttatagagatattatatgaccctactgcacatgtgggtgggacctcataaaaaaaaaaacctcttcaaaacagttcaaagatacacatgtcatctcctggtaagttaaaaaaaaaaattaagttacaatgtaaagttcacatattttcttcgaacaattcactytattatccaacttgccctgctaaaggtctgttacacagatttgtagccaagtacttgaagtagattattttcaacattttatgaaataaagaaacattgaggcatttttactgacaagagttacctaaatattctgcatcttcttgttttgaacgatatgcagattcaactaa

SEQ ID NO: 322830 - DNA, 575 bp, Homo sapiens
aacattttaggttcatcaatgaaaggggctgagcaagtgtgctacttctcattcatcagttgttgaggataaccttagactttagtagttatgttattccacagcctctgggattgtacccagaagatgctcaccttctgcaatttaatataccatcatttcccaacacatcaggtgcttttacatctttgtgggacaaagctccatacaccagtgcatattgacatttgaaacctatttatagagatattatatgaccctactgcacatgtgggtgggacctcataaaaaaaaaaacctcttcaaaacagttcaaagatacacatgtcatctcctggtaagttaaaaaaaaaaattaagttacaatgtaaagttcacatattttcttcgaacaattcactcyattatccaacttgccctgctaaaggtctgttacacagatttgtagccaagtacttgaagtagattattttcaacattttatgaaataaagaaacattgaggcatttttactgacaagagttacctaaatattctgcatcttcttgttttgaacgatatgcagattcaactaa

SEQ ID NO: 322831 - DNA, 577 bp, Homo sapiens
aaatgatatcttaaaataaagaaattggatactttgtactgtcacaactcctttttcttatggacacttgccatattttaagacttttctccatgagttctacaagtagattttttaagccctgtaatcttagtgcttgtcgttttcccttgtatttgtagcagctgcttcctttcatgatcctctttcttccttctaacttcctcattttagtgcctctcatcaccatcactcccctacttccagctccacatacactcaygcatgtgcacacaagcatacccacacatcatatattgttctgggcacttgtcactttgatgcataaggcttaatgatactatgttaagatatatatgaggtgacataaacatgtttagatcttggatgaggaaggatagaaataaaaataatatcatttccatctacttttacacatttaaagtgtctagagttgtcttggattttgttttacagaactttggattaactcagattctttatgtgctcattttttaaaagcttatatttcttcaaaccttacttaaatgtaagatggtattgtgttcaaaaatga

SEQ ID NO: 322832 - DNA, 551 bp, Homo sapiens
ttcccctgggctttgagaacctagctgtcatcatcatcattatcattatcgtcatcatccagattaatgtttctcaagttctgctctcactgtattgctttcacctaggatctgggtggctctgtaggcttgggactctcagtctagccctatgtgatctgactccaccatacctaacccagtactcccagtatgttcaagtgagttctcccatccaaccaataaagtgtgagtcctcactaatactggttaacctttacctcttcacagcttatgttgattgctctagcctctgaacccctgtcatttctgtagtctgtattttaagtcttcagtatgttatctacaatttcaaaaatctctaagcaaatcaagtttttcctaacccattttgcactcaaatctgagctgaactactgattctcacagtgttatttataatcatttttctcacttaatatgaacgttcaattttccactgcggatatattgatgtgcttgaycgtggggttctgtaccatatcctgcaggaggtgctttataaatatatg

SEQ ID NO: 322833 - DNA, 625 bp, Homo sapiens
gataaagacaagtaaaagcatagaaaggcctcccacttgtgttcaaattgcctcgctttgttgtttaactgtttgaatgacaagccacatgaaacaagattataaattcctggaggacagggcccatacattctttcacaagtagatattacttaggatgagattatttcagaacatcaaattattaattttcastccattcacctctgtagagctcagttctcatagacacagaaccacaattctcatcagatttcaaactagatattgcaaacatgatgacatttctcactgtgttttaactaacttcctgggaccgagggaagagctgcttctgcttcagtaacagcctctgatggctcccaaggaggtctccataagtattaccaattccagccagggtcacccagagggtggggccatccaatttgttcagggagtaggtaaaataatgtttttaactgttaaatgtttttttgcattggtattttaaaaaatttatttcctctactatttttccaaaagtctacatttagttatttgttacagtgaaaatgttcctatcttaacagagtgattcctttcactatcaggtcaagaaatgtcatcctgcaatgacatttac

SEQ ID NO: 322834 - DNA, 536 bp, Homo sapiens
aaaaaatttcacaagcaaaagttaaaatgacatcaaacttcttcaatataatacgtttttccttcctaaaagcaatagagcaaaacttacaatgttttgagggatataaagctaacattcatgactactatagtcaagcacgatgctgctcattgacaagtatatcagaatatgtataacaagtccttggaggtctacaactcacatatgttctctaacaaaataaatgaacaaatacacaaaccaagaagtaaaccaaaataagcaytcaaaaatggaaatcgtataaacaatacctttaaaagttacatctaattaatatttttaaatgaatacagaaatgcagaagggcatcaccacataatcaagaaaaatgcatttaaacatgttcaaacacatccaaatatggtaaaaaaaaactttatgcaatattatttccctgaatcttttttagaggaataaacaaaaacaaaaaagtaaattagaaggcaaattttatcacctaagagatgactgaggatctcacaataagggac

SEQ ID NO: 322835 - DNA, 536 bp, Homo sapiens
aaaaaatttcacaagcaaaagttaaaatgacatcaaacttcttcaatataatacgtttttccttcctaaaagcaatagagcaaaacttacaatgttttgagggatataaagctaacattcatgactactatagtcaagcacgatgctgctcattgacaagtatatcagaatatgtataacaagtccttggaggtctacaactcacatatgttctctaacaaaataaatgaacaaatacacaaaccaagaagtaaaccaaaataagcactcaaaaatggaaatcgtataaacaatacctttaaaagttacatctaattaatatttttaaatgaatacagaaatgsagaagggcatcaccacataatcaagaaaaatgcatttaaacatgttcaaacacatccaaatatggtaaaaaaaaactttatgcaatattatttccctgaatcttttttagaggaataaacaaaaacaaaaaagtaaattagaaggcaaattttatcacctaagagatgactgaggatctcacaataagggac

SEQ ID NO: 322836 - DNA, 523 bp, Homo sapiens
agccaggtgaattaaataacatataaactgcaaataaataacactataaactgcaaacaaatattatcaaagaatctctaacttcatctcatgtcataattagaaatgataattctggaattaaaggtttctatattctaaggagaaacctgggtcacatgccaaaaactggttgagaaaaccaaccatttcttcattcattcatcagaatgcgttgggtgaacaatttgtgccaggcactgctytaggtgctgagccattagacagtttgcattttaatgaggaaacagacaattagcaaggaactaaaaatatagagaacagaggtgtaaatgtcaaggatccatagtgcattctaacatttaaattcagtagcatcaataaagctggccagggaagcaagaagggaaccaagagggtatcctatacattaagtgaagaaagtacctacagaggggtcaattattccaaatgctgccaagaagtgggaaaaaaaaaaaaaaaaaagcactggtaagtaacc

SEQ ID NO: 322837 - DNA, 637 bp, Homo sapiens
tgtgtccacacaaagacttgtacacttgcatacccatgttcatagtggctttatttgtacacccaagaagtagaaacaatccaaatgtccatcaagagacgaatgaatatacaaattgtggtaaacccatacaatgaaatattagtcagcaatacaaaggggcatccaactagcaatagctgcaacttccccagcttgataaagaacatctacaaaacaaaacacccacagccaacatcatacttaatgtcaagaaactagaatctttccagttaagatcagaaataggcaaggatttcccctctcactactcctttttcaacagcataccagaagtccttactaaagtaataagacmagaaaaggcaataaatgtatactgattagaaaggaagttttatttcttcctttctttatttctttatttattaagaaataaaacttcctttctaatcaaaaatttagtcattgtgggtgatgaaaaaactcctggagctaataatcaattacagcaaggttacagaatacaaagttaatttaaaaaaaaaaaaaagtcaatcactttcttacgtatcagtaatgatcaagtggaatttgaagttaaaaacacaaatttacatagcacccacaacaataa

SEQ ID NO: 322838 - DNA, 659 bp, Homo sapiens
aactgaaggttaagaaaaaaagggtgctaatacaggcaaaatataggatgcatagcacatattaagtgttcaaatatttattgattttcactcatggaatataaagtattaatactatgttctacaacacagaagattgtatagctacaaattccaagaactgataatctagaaaagaaaataagacayacaaggcaatgaacgttatggctacagtgaccacgtaatttgttaaccaagcgaaaattttgtttagagaaacattattaataattttaccacaatacttgtaaacctagatattccaaggcaaacagggacatattatccttatgagagcctcctaggtaagagtacaaacttaaaaagatacttaggaaaaccaatgagagaagtgtgtagagtaagaaaagctacatctagaaagtaacattttctttcagctacaactaaactagtgactaattttgtctgtaagctgtaggagatcagtagcatttatgatggatgttaggtgaggtgggattttccaggcagggtaaaggcactaaaggaaaaacaaaagcaaacaggctcacagcaacagaaaacacaaggaaagtttataaaactcagaaaaacccaagtattggtaacaaaatgacaggagataaggccag

SEQ ID NO: 322839 - DNA, 659 bp, Homo sapiens
aactgaaggttaagaaaaaaagggtgctaatacaggcaaaatataggatgcatagcacatattaagtgttcaaatatttattgattttcactcatggaatataaagtattaatactatgttctacaacacagaagattgtatagctacaaattccaagaactgataatctagaaaagaaaataagacatacaaggcaatgaacgttatggctacagtgaccacgtaatttgttaaccaagcgaaaattttgtttagagaaacattattaataattttaccacaatacttgtaaacctagatattccaaggcaaacagggacatattatccttatgagagcctcctaggtaagagtacaaacttaaaaagatacttaggaaaaccaatgagagaagtgtgtagagtaagaaaagctacatctagaaagtaacattttctttcagctacaactaaactagtgactaattttgtctgtaagctgtaggagatcagtagcatttatgmtggatgttaggtgaggtgggattttccaggcagggtaaaggcactaaaggaaaaacaaaagcaaacaggctcacagcaacagaaaacacaaggaaagtttataaaactcagaaaaacccaagtattggtaacaaaatgacaggagataaggccag

SEQ ID NO: 322840 - DNA, 570 bp, Homo sapiens
ggctgtggttctgtatacaaaattatatatataatgaattggtgaatttatctgagacttctaggcagtttgattgcattagtccattctcacactgctataaaggactgcctgagactgcgtaatttataaaggaaagaggtttaattgactcacagttccacatggctggtgaggtctcgagaaacttataatcatggcagaaagggaagcaaacacatccttcttcacattagcaaaagggggaaaagccccttataacaccatcaggtctcatgagaacttactaccacaagaacagcagcatggggaaacctgcccccatgattcagttacctcccaccaggtccttcccatgatgtggggattatgggaactacaactcaagatgagatttgggtggggacactgccaaaccatatcaatgatataagtgccaactatttccttttaactatgactgagatttttttttaaaggcagtgtttaattttcaaggtctatgtaayccagaggttaaatcacaaagcgtgacccaccccccaagaaaaccctgcaaagatattgcca

SEQ ID NO: 322841 - DNA, 562 bp, Homo sapiens
ttccaccaatagcaagttttatatctcatctaatattcattgtggttaaagctactgtaaagatatmattcaaagtgcattttaagcttctagtatctatgtgagctgtcaaacagtcataattgtaaagcaaccataagacaatgtttaattcacattttcaagaagaaaatcttgttcttaaagcaaaaaaaatttgaagtaatttttgtttactgttttttaaattcaatgttatgtggattggcaacagttcttaaaatgaaattcaaaaacatctacagaatagtgttggttactctactgtgtgtgcttttataataacccattagctaattaatcaactgtatagttaaatgttacactaagaatcacatgaagatatctatgtagaacattggtctcaagtaataccaatgttacttttcaatttactatctatattattttcccaggggaaaaaaaggagtcaagatgtagaactggaagaggccttaaaacttaactttattcccaatgcagaaatgcttcctataacctacaagaacagacaacagctaag

SEQ ID NO: 322842 - DNA, 589 bp, Homo sapiens
taaatctttctaaaccaaaatgtatgttgaatttaatctagtatttctaacttatttgaaaactgtagcattttaaagagttatggtctttttttaaccaatggcctctttaaaaacatttaaattaattcattctaacatgtcttcaaacttaagatgtttctaaatgaaaattttactttaacaaaaaattttaattctaatttcattttatttaaggcatctgaatagattcaaaaacaaaagtgtgctaagtattcaayaaatttgttctaagacacttccagagtactagagaagtatcttagagagctttaagcaccagtgaaggctggtgatttgagataaaagtctaaaagaaagtcatgttttcagtggaaacactatcacaggagttaatataacaccatgattattcagcaactcaacgtcaggctacatgggcttaaatacatactggcacaaggacataaatatgtgaaatcaggacaatcctggacattctaggatataagattactgtgctaatatataaggagggtatcaatagcctgagataagtctccccactagtattttcatgtaaata

SEQ ID NO: 322843 - DNA, 598 bp, Homo sapiens
ataaaacattataaaacaagcttatctttttctcatttataagacagatagcaaaagctttgatatgatgaagacatcaaacttttatacttcacatgttacatctgtatctcctttaattttatgattcttgacaaatatttttagatatttagatttttaatatttctttttgctttgaagggccctccccaactaaaattagtttataaatcattattttatccaagctttgttgatcacaaaattttttttccacctcagagcagaataaagccccacaattctttcactacttgtctcaataattgccactacttactaactgaaggcaatataaaagacgaaaacatttttctactcaaggggagaaccatgctagaaatactcaatccttatttgaataatccactcagtcatatacttctctataatttggaaaaaaaatgttaactctgctatcatattcctctctcccttcyctaatcccaaagatcataactactcgtagtgtctggaaacatgttaaaatattcagatcctgggagaaaataagaccatcaatgattactaacaaaagcagcctacctaaaaatta

SEQ ID NO: 322844 - DNA, 562 bp, Homo sapiens
aatttaaattttagtgtccataaattgtttcatcataactcagccatactcacttatttatatattgtctatggctgctgttgagatacaacaacacttaaattgttacaacacagaccttacggcctgcaaagctaaaacgtttagtatccagatgttaacagaaaaagtttactgaacccccacccccactagaccagtcctractccttgctacattgccacaatccaatgagaccattctagtaagctcacattgttgcctctctgtctcgaaacagatctcctgtagcacttcacattccaccatcaaaccatcctgactccccaactcctgattcctcatccatctcctgatatctgcatttgccctgatggctctgacctcacttcttgaccacaactcacatttacttctaataatacatcagctcccgctaatcagatggaagagaccattggatcccattcagatatgaaaccccactccagcaagttaatccagtgggaatttccaagtgtattctggatgcacttctggaaaatttggtgcatttcactc

SEQ ID NO: 322845 - DNA, 608 bp, Homo sapiens
aaaattgacttgtcattcatgtttgcttccactgacacttcaaaagtagttmtttttctccttctcctcctcctccttcttctttattatgttttttaaattagttgctgcataaccacagggaagtgaatgaaaacatatttagaccctgactttgttatcccacagctttagaatattggagtgtcagaacttctaggattgacttaattatttaatttcagtgggtctcaactgggaagctccacccatccccaactctttgaaagccattgctataatccaaactctttattttaagacgaggatgctgcggcccaaagagattggctaatttggtcaagctctgtagtgacagatcttggacttgaatccatttatcttgttctatacagcatcctccttttcatatcatgttaccttaggtcaattgattcagttctgcatacacttgtgctttatcagcaaaaagcaaacacattaaaatgggctgattgctatagccccttataaattctaagattccttcagtaaactgtgtgtgggtataaggaaataaatgtagggggaagaggtggtaatatttggcttcaattgtttttttcctc

SEQ ID NO: 322846 - DNA, 572 bp, Homo sapiens
gcctgataaattactctatcttgtgcctgcctcaactctatagcttatgtcctgcatactacaagggagaatccttttcaatgtacttccaattttgagaaaaacaacaaacttccaggaaccaaattgctgccctgyagccaacaggcagttcctggcttctgactctagtttctctgtgtacctctaaattgtgaagattagtggcatagtagaggcagggtttcgccatgttggccaggctggtctcaaactcctgacctcaggtgacccactcagcctcccaaagtgctgggattacaggcatgagccattgcgcccagcctttatttcatagtaggtcactgtgggctgtcttgccttgagaaaaggcctttggatatgtgtacatttctggtcattccctgagccaaagaatacggcaggaattcttagaaacaaaggtacatctcaaacatcaagtacagtcatgcgcagcataacaaagtttctgtcaataaaggaacacatatatgatggccccacaaaattatagtactgttgaaaaatttctatcactggagtcatcatag

SEQ ID NO: 322847 - DNA, 621 bp, Homo sapiens
  misc_feature (1)...(621): n = A,T,C or G
nnnnnnnnnnnnnnnnnntgatatttattctaagtttaagtagagccattcaagggctgaaggaaggccatagtggrtaagatatttgattttcttgaaggaaaaaaaatgccttgaacaacatacttctaaataacaaatgaatcagaaaagaaatctccagagaaatattgaaaagattctgaagttcatgcaatgaaaaggtaacatcaagatttgttggatgaggcaaaaaagtgcttgcaggaaaatttatagcactgaatgaattcattagaaacgaagaagaatgtaaaatcagtaatctaagcttccacttcaggaaactagaaaaagaacaagagattaaatcccagcctaacaaaagagaagaaataataaaacttagagcagaaatcaatggaattaaaaacataaaatcaacagagacaaattcaacgaaaccaaatgccggttctttaagaagttgaatcctcataagcttctaccaacaaactaggaaaaatcaagagagaagagacggaaattactaatattataaatgaaacagatggcattcatacaaatcccataaacattaaaatgattaagtaatattgggtcttcctatccatgaacaag

SEQ ID NO: 322848 - DNA, 621 bp, Homo sapiens
  misc_feature (1)...(621): n = A,T,C or G
nnnnnnnnnnnnnnnnnntgatatttattctaagtttaagtagagccattcaagggctgaaggaaggccatagtggataagatatttgattttcttgaaggaaaaaaaatgccttgaacaacatacttctaaataacaaatgaatcagaaaagaaatctccagagaaatattgaaaagattctgaagttcatgmaatgaaaaggtaacatcaagatttgttggatgaggcaaaaaagtgcttgcaggaaaatttatagcactgaatgaattcattagaaacgaagaagaatgtaaaatcagtaatctaagcttccacttcaggaaactagaaaaagaacaagagattaaatcccagcctaacaaaagagaagaaataataaaacttagagcagaaatcaatggaattaaaaacataaaatcaacagagacaaattcaacgaaaccaaatgccggttctttaagaagttgaatcctcataagcttctaccaacaaactaggaaaaatcaagagagaagagacggaaattactaatattataaatgaaacagatggcattcatacaaatcccataaacattaaaatgattaagtaatattgggtcttcctatccatgaacaag

SEQ ID NO: 322849 - DNA, 521 bp, Homo sapiens
ccagtacacatgacactgcaagcccaagaaccatatccataytacctcaagttgaaggagtgggatagactggctcacataactgaattccttgagtagaactctcttcaaatatgaacacaaagtcacaaataatgtcatcagatccctgtctcttttaacactactcacacatcttcttcaagtggctaatgtatggggaacaattgtccaacatgctcatatcctagaataacctggagaacaaaaatgtcttttgaatagttcaggtaaagacctttagaaatctctggcttccctgccttgaggcatgtaccgatccccaaatgtaccgggggtcacagactgctaaaattgattaggaatacatcaggtgcccatttctgggagttaggataagtaaagtcaacatcaaccttaatgaataggataaaacatgtttattttagagaggagagaagcggtttccaagtaggcactggcagagcaaacagagcaaagcaaaacaaaaatgtgtctat

SEQ ID NO: 322850 - DNA, 521 bp, Homo sapiens
ccagtacacatgacactgcaagcccaagaaccatatccatactacctcaagttgaaggagtgggatagactggctcacataactgaattccttgagtagaactctcttcaaatatgaacacaaagtcacaaataatgtcatcagatccctgtctcttttaacactactcacacatcttcttcaagtggctaatgtatggggaacaattgtccaacatgctcatatcctagaataacctggagaacaaaaatgtcttttgaatagttcaggtaaagacctttaraaatctctggcttccctgccttgaggcatgtaccgatccccaaatgtaccgggggtcacagactgctaaaattgattaggaatacatcaggtgcccatttctgggagttaggataagtaaagtcaacatcaaccttaatgaataggataaaacatgtttattttagagaggagagaagcggtttccaagtaggcactggcagagcaaacagagcaaagcaaaacaaaaatgtgtctat

SEQ ID NO: 322851 - DNA, 522 bp, Homo sapiens
taatctcttactaagatttacagagggtattaaataaaagtctggggtattaaataaaagctatctgaatgctcagatagccacaacactagctttttttttttyctcccctgcctttcccgaagaggatgtatttctctgagtaatctaaatgaaaaacatgattttattcccctctttctctaagaaaatttctatataagcagctgatatattttccgtttcagtaactgttctgtaatggaattttaaaaagctgaaacagaaatttaggcttttttttttaacagctccctcagtgcttaaggtatctgcttatcaaagtggttttcaaagtgatgagttaaatactagctaagaagtgactggtgaaaacaaagcttttagcattcacacagaatgtggaattgtggactttgctgttgcctgtgtattagtatggagccaatagttgaggctaagttttataaccctgggcaaatccttttacaatgctatgcatcgattaatgggatggtgaat

SEQ ID NO: 322852 - DNA, 540 bp, Homo sapiens
actgggataacatagatatacatcgcgccagagtttttaatgattaaattagataatttatatatagtaagatcaagaaattttagccattattatcattttatgaaatctttgcaaatttgtctaattatttctttggaataaatgtctttaagtggaattttatcactggtaggcacacctatttatgtattacaggaagaagtaaaatgtaaaaatggccagatttacactgctgtcagcaaagtgtgagagcrattatttaccagaataatttcctatatagagtattgtaaatctaatcttggctttgtaagtctatcatgttgttgtttaaatctgcaatacttaattaatgagggcaaccacatttaataaatgcattgatcatttgcatatctgctaaaaagtattattccttttgttaatgttctattgaggggtttgtataatttttctattgatttatgggacttcataaaacatatattttaagcttttgccatgtatcttaaagtattttattgtacataagatata

SEQ ID NO: 322853 - DNA, 540 bp, Homo sapiens
actgggataacatagatatacatcgcgccagagtttttaatgattaaattagataatttatatatagtaagatcaagaaattttagccattattatcattttatgaaatctttgcaaatttgtctaattatttctttggaataaatgtctttaagtggaattttatcactggtaggcacacctatttatgtattacaggaagaagtaaaatgtaaaaatggccagatttacactgctgtcagcaaagtgtgagagcgattatttaccagaataatttcctatatagagtattgtaaatctaatcttggctttgtaagtctatcatgttgttgtttaaatctgcaatacttaattaatgagggcaaccacatttaataaatgcattgatcatttgcatatctgctaaaaagtattattccttttgttaatgttctattgaggggtttrtataatttttctattgatttatgggacttcataaaacatatattttaagcttttgccatgtatcttaaagtattttattgtacataagatata

SEQ ID NO: 322854 - DNA, 557 bp, Homo sapiens
tctatgatcattttaaactgctttgcaggcttattcaccactattcccaaatactgtatgtttcaacttctgtgtctcatccccttttctcctttcagaaaacacagttcttgagatcttcaagactctctgcagctcttactttgtctataaatccatgtctaatccttctccacctcactctcagacctcatgccctgtccttcttagcagtcagtcacttcttcctctgagatcmcaaaggagtgatatttttggagaattatcacaatgcattatggtgtgctgtttatctgtttatccttcccattagaatgttaggtctttgtggcttgggaataccttaataatctttgttcccaagtatctagcacaatgcacatgtatagtagatgttcaattaatgtttaattgaagtagcagtaagacccagtatgcaataagtgctttttaaaatctaagcactacatgaagcattttgtcctttcaatgatcctgtcacttaaaattattatacctattttacaggtgtgtaattgagacttagagagtttaag

SEQ ID NO: 322855 - DNA, 594 bp, Homo sapiens
ggttgctctcaaattactgaaagatagccatgcccatggtttatcttcatttgaagacttttccactttttagtcagagaaaatgcaagtataccacaaaagagaatactcagcattacagccagtgttasagcctataaatatctctagctgaaagcgtgactaagactccacagctgatattacccagctaagccaaaaagtgagcttcataccctcaaagccacctttgttgtttactaattgctttaacctgccaagctgtgcattcctgttccattactgctctttgatttatactgttagtctgtgttcctctgttctaacaatgatggcttgctgtaaaggtgattgtgtattctgtcccttcacttttctatgaaaatgaaatggtgcatttttagaagctgttttcccaaggacaatttttaaatgataacaacaactgtaaaaaccaccatacaaacactcataatcactgacgcagaattgtatctttaaaacaactaacagtgatttgttatattttttggcatggattcactatttttggattctaaaatggtgatgtcttgagaacagacctaagactga

SEQ ID NO: 322856 - DNA, 500 bp, Homo sapiens
attcagctagtttgttctatctgtactatattttttatttaaataaattccttgaaggtaaggattaccaagtctttgatctctcacaaaaagaaacatgaaggcttaatctagtacacacttagggaagatttttttgaatgaataaatgattgaataaaaaacagtatataccagtgcttcaaagatatataaaaataaatcagaattaatmttttacaatgaaaggatttatgatttcaaaagaagttgactctctacatctgggctgtatgatcacaaggaaatttagaaggctctaaatttagaagacttaaacataaatctaatctgaaaattaaactatacattgagaaaaagactgggtatttttgaattattatacaaaatatttctaaaagtaagattatgaataaagataataaatcaaataaacatataaatcagattttcctagcaattttgcatactttccaattgacatactaactagtttaaga

SEQ ID NO: 322857 - DNA, 566 bp, Homo sapiens
ctctccctttgtaaaaggaggaaacataacgtggtgtgtaaaaactcagaagccctgaagccatatgtatctgggttcaaattctatctccacaacttaattgcaatgagactttaggtgagttactaaaccattctaagtttcagttcccttgtctataaaatcagtataatgtatatataatacaatgataaatgaatttaaatgatccaaaatgtactagcttaccataaataaaatatttatgattatttctattattaataaaaatggcataaggagccataaggatctrggaaaggaaactctttggagttatagtttcattgaaagtctgggctgacataaaatgtctctctcaagaagatttctcaatggaggcctaggaagcttgttatttaacacttgggggaatctgtactctacttactattatcaccttgattcatgccattttgcttgtttgtttttctttcctaccattttgccatgtctcatatttgatgcatctcgtagtgccaatgcacttgagtactcagccttattaatcaaggaagtaatattta

SEQ ID NO: 322858 - DNA, 566 bp, Homo sapiens
ctctccctttgtaaaaggaggaaacataacgtggtgtgtaaaaactcagaagccctgaagccatatgtatctgggttcaaattctatctccacaacttaattgcaatgagactttaggtgagttactaaaccattctaagtttcagttcccttgtctataaaatcagtataatgtatatataatacaatgataaatgaatttaaatgatccaaaatgtactagcttaccataaataaaatatttatgattatttctattattaataaaaatggcataaggagccataaggatctaggaaaggaaactctttggagttatagtttcattgaaagtctgggctgacataaaatgtctctctcaagaagatttctcartggaggcctaggaagcttgttatttaacacttgggggaatctgtactctacttactattatcaccttgattcatgccattttgcttgtttgtttttctttcctaccattttgccatgtctcatatttgatgcatctcgtagtgccaatgcacttgagtactcagccttattaatcaaggaagtaatattta

SEQ ID NO: 322859 - DNA, 544 bp, Homo sapiens
gcctagcaagattgaagctaatgtgtcattacagaatactaaatgccaagttatatgtaccagttgggaagacaattagaagcttcaagaatctacttttttgttatacctcaaaccacaaagctaattatctgtttagtggttttattatacattgattacatatcatttgtggttattagtaaaagagactgggcttatattttgcagatataaattcattatatgtgttttttgagtccagcattgatcaacctcagcttttttctatgttgctattaacytgtggtttgaagcgaagaaagacccttggacaaattgaaattcaagccaaaagatacttcatgatttgcttttcataatataattaatgttgaaatatctaattatatacaacttaaaaagacattcattgtttaattttgttgctctttttttcttaacagatccaagcattttacttttctatttaacttagtaaggacattttaagataaattatgtctctagacacttatatccaattaaattatttgcagcctca

SEQ ID NO: 322860 - DNA, 544 bp, Homo sapiens
gcctagcaagattgaagctaatgtgtcattacagaatactaaatgccaagttatatgtaccagttgggaagacaattagaagcttcaagaatctacttttttgttatacctcaaaccacaaagctaattatctgtttagtggttttattatacattgattacatatcatttgtggttattagtaaaagagactgggcttatattttgcagatataaattcattatatgtgttttttgagtccagcattgatcaacctcagcttttttctatgttgctattaacctgtggtttgaagcgaagaaagacccttggacaaattgaaattcaagccaaaagatacttcatgatttgcttttcataatataattaatgttgaratatctaattatatacaacttaaaaagacattcattgtttaattttgttgctctttttttcttaacagatccaagcattttacttttctatttaacttagtaaggacattttaagataaattatgtctctagacacttatatccaattaaattatttgcagcctca

SEQ ID NO: 322861 - DNA, 544 bp, Homo sapiens
gcctagcaagattgaagctaatgtgtcattacagaatactaaatgccaagttatatgtaccagttgggaagacaattagaagcttcaagaatctacttttttgttatacctcaaaccacaaagctaattatctgtttagtggttttattatacattgattacatatcatttgtggttattagtaaaagagactgggcttatattttgcagatataaattcattatatgtgttttttgagtccagcattgatcaacctcagcttttttctatgttgctattaacctgtggtttgaagcgaagaaagacccttggacaaattgaaattcaagccaaaagatacttcatgatttgcttttcataatataattaatgttgaaatatctaattrtatacaacttaaaaagacattcattgtttaattttgttgctctttttttcttaacagatccaagcattttacttttctatttaacttagtaaggacattttaagataaattatgtctctagacacttatatccaattaaattatttgcagcctca

SEQ ID NO: 322862 - DNA, 564 bp, Homo sapiens
tctgagcatctgtttggagggtatggagcagtttttgataagcatacttgctagttaaatatggtcaggcagtaagtagtgatgaaaggttaaggacaaggatttgggaacagtggttagcttctgtggcttaagagcagactgtcagaccagccagctggatgcagaactttgccagcagctgcgggcctggagccactcaagagcctggagttatatgaagctaggaaaagtcagctaggaggggccatcaggccaaaaaagtttacatgaccatttaactcagccacaratgcagagagaacaagtaatacaggcggaccggaagtcaagctgaaagatcacaggagtaagaaaaaggcactcatgccaagcatcctgctattgagagaaaatataaactcttccttccattcatggagattccctctaactaggaaggggaatggtggctttgagtgagactgattatttgtatcactaagattgaagtcaccataaatgaagtatttgaatgattaagtgccacaaagctttagacagagttgtctatatagttggatt

SEQ ID NO: 322863 - DNA, 590 bp, Homo sapiens
attgctagccactatagacagctatcctggaatttattttatttgcaaactttcgaatgccacctgctcctgaaatagttatagcagaaactggcttagctataatacagttcaagtgtccaaagtacttccaacttgtgtcaaagacagggatggggtaaagtgggggcatggagcattagtcatttccatcartatgacaatgaggtgaccaagcgtgggctacacaaaacaattttatttccacagctggactctttggcagcatcttcccaacacagttccttgtcacatcagtttcccagagcattcaaacatgttcacttttgccttaggctggtgtgcaacttgccgctagtttgtccttcactcacattttctttctctgagggagatgagggattattcaggaaactggactcaagctaacctggacaaaagagttctacctggattcttggaaaataaatgattcctccacctattttttaatcaaaaagatcatatcatgcttacatccaaattttgtagtccttattaaaaagcttttggaaatgtcttttacttaagcaacagaattgcttattcac

SEQ ID NO: 322864 - DNA, 634 bp, Homo sapiens
gacttagtggaaggagcctatgttcctcaaagacttggcagaatagagccccatgctgattaatttatttgggccatgatgtgattaaaacaaacattcattatgttatgatgttgagacttgaaatttgtttcagaagcgagacttaaaaattaataaaagatttttcagatactgtaacaacataggcaagttaattttatgtaacttacactacataaaattatgttaatttacactrcatacatttatgttaattttatgtaattttatactataattttacctacattacattccttgatcacttatcctcactttacattttaatttcaaaattatgtgttacaccactgacctctctgtgaagcgtttggcagattgaacggaatcaggaaacctctccagcagcatagatacaatattgttttataagtctttgttctaatttatgctttaaaatgagacagggaggcaaaaggatgcttgtagatcacttattaatagcagtgttacatttcttgctcctttggggtagagaaattatattaaacaaagaaaaacaaatatactattttagcttcttacctacaaaatatctacctgctgtactgcaaaagaatcacaatgtttt

SEQ ID NO: 322865 - DNA, 681 bp, Homo sapiens
aacaaaaatactccacaattgaagagagagttgcttcaaattatttttggcacagtctactcgtttaaaaatgcattgactctccataacgtgttcattcagatgttatagcgacacagatgtcacacagttactcagacattactggtcagtactttgcatgcatgggtgctgcaactgctacactttatcttcttgtggagttggctttctattgcagaaaactgttattttcccttccttctatggttaatagaaattggcttgtcttcatggcagtaatcttatttgttgtaagcttccggcatttcttttttaaaactgtttttttttttttttttgatagaaatgttttaggaagcaagtttgaaaaactggaaactgatttatctccttaagaaatggcatttcttggcaatcttctttcagtccttgaaaacatttggaggttcttttggtctgtagcatttttttccccatcttctttcacccaatttattttttcttttgctccctcccacwttctctcttcctctcttctcttttctctctccctttcatatacataacacacacattttcgtgttttatatcttaaacttctttgcactacttagtccaagtcagtacagcttaatacattaaaaggtaagtaggttgtagttccctactgtattgcag

SEQ ID NO: 322866 - DNA, 681 bp, Homo sapiens
aacaaaaatactccacaattgaagagagagttgcttcaaattatttttggcacagtctactcgtttaaaaatgcattgactctccataacgtgttcattcagatgttatagcgacacagatgtcacacagttactcagacattactggtcagtactttgcatgcatgggtgctgcaactgctacactttatcttcttgtggagttggctttctattgcagaaaactgttattttcccttccttctatggttaatagaaattggcttgtcttcatggcagtaatcttatttgttgtaagcttccggcatttcttttttaaaactgtttttttttttttttttgatagaaatgttttaggaagcaagtttgaaaaactggaaactgatttatctccttaagaaatggcatttcttggcaatcttctttcagtccttgaaaacatttggaggttcttttggtctgtagcatttttttccccatcttctttcacccaatttattttttcttttgctccctcccactttctctcttcctctcttctcttttctctctccctttcatatacataacacacacattttcgtgttttatatcttaaacttctttgcactayttagtccaagtcagtacagcttaatacattaaaaggtaagtaggttgtagttccctactgtattgcag

SEQ ID NO: 322867 - DNA, 618 bp, Homo sapiens
ttatattaaatggtattatgttgggttktttatacgtacaaataaaaaccttgtcattgcttacaaaacttcatagttggttatattaatttcatatgactgtagaagtaattcccataaactatttagtatgttaaagcaatgcaaatctgttgtctcagtatcagaaattaagagtgggtcagtaaggctctaatccttctgtagactggagggaggtgccaatttttgtttttttcattttaaagcttttagaatgtgtttctctaatcacagctcctactctccagctcggaccctcttacctctctcttacaaggacacatgttacatggttcccacattggtaaccaagaatcatttccgcacctgatgatactttatttgatcacatattcaaagcccttttaccacatagggaattttgacaagatttttccagggataaggaggtagacatctttggggagccaatattctgtttaccacactgcatgaattggtgcaaattaactgtctttcctggacttcatttttctttctgggcaagtaatagattctaccatatacctgaggtccttctaacattctatacttacgcatttatgatcaacaaat

SEQ ID NO: 322868 - DNA, 618 bp, Homo sapiens
ttatattaaatggtattatgttgggttgtttatacgtacaaataaaaaccttgtcattgcttacaaaacttcatagttggttatattaatttcatatgactgtagaagtaattcccataaactatttagtatgttaaagcaatgcaaatctgttgtctcagtatcagaaattaagagtgggtcagtaaggctctaatccttctgtagactggagggaggtgccaatttttgtttttttcattttaaagcttttagaatgtgtttctctaatcacagctcctactctccagctcggaccctcttacctctctcttacaaggacacatgttacatggttcccacattggtaaccaagaatcatttccgcacctgatgatactttatttgatcacatattcaaagcccttttaccacatagggaattttgacaagatttttccagggataaggaggtagacatctttggggagccaatattctgtttaccacactgcatgaattggtgcaaattaactgtcyttcctggacttcatttttctttctgggcaagtaatagattctaccatatacctgaggtccttctaacattctatacttacgcatttatgatcaacaaat

SEQ ID NO: 322869 - DNA, 362 bp, Homo sapiens
tgtgtgatatggaaaatctgatgtgcagttacatggatagatatgtatgtaaaaattagttgttctcttacaactaaactaaactcttacaactaaactctgtgcaatttattatagttagataaatggaaatatttgaaaacaaaatgtgaggtacatctatacttgctcttattggaagaagctcaaagataatacactgcagaatttaaaattttctataaraaatttgttgcatcaataaaaggacactatgtacataaatacacacatatgtttacacaatttatgtgtgtgaatgaatgaattttacataccattatatgttttctcttgaaaaataaacaaaaactttcatttat

SEQ ID NO: 322870 - DNA, 588 bp, Homo sapiens
ctttctttgctatctagaatgtttgtttgcaagtcttatcatgtggagtttgtcttgtctatcagattagaaactcataaaaggaagggaatactgtgtttatttatttatatgttctgctgcagcacttagtactaacgtatatacaaaataaacttaatcctctcgattgacaagaaatctatattcctaaaaagtaaatgctgacaagagcattctggtttttctaatatttgcattccactgtatatatggtgagctatcaagatataatttatggctggacatgatggcttatccctataatctcagcacttgagaggccaaggcaggaggatcccttgagcctgggagtttgagcttacagtaagcaagaccctgtctccaaaaaaaaaaaaaaaaaaaaaaaaaaaaagatgtaatttgttatcttctacrtacttcactggttattagaagatactgatccaggtgaacaatatcatgtcaatctcacatatacaattttcacagccattaataatagggttacatttgtacttgctatcaatgattttgaaaaataaagttttcctcaagaaatagaat

SEQ ID NO: 322871 - DNA, 595 bp, Homo sapiens
caaactttctgttcttttttggcgtggatactgcctggctgtgcccttatcacctggatcatcttttggctctctggagatttcctgggctcactctcctgctgttggcaagaattgaggagttaggtctcagggctggggctaaggtactacttctccctcactctgttgaaaactgagaagcgcattttgactgtgctacttgtaatccttacccagacttcctcctccccgttaccacatctctcccttactctgactaaatatgccctttgagccaacctcaccaaactggttctctgggttggtaataacgaccttccagatatactctgagctccctccagcaggaacctcccagtctctgcctggccatctggcaaggaggccctgctggtgctggggtaacctacccaacctgggacactatccaagtcacctgacatggmatcccgctccctcctggaataggacagcctatgagttcccaggtatttgctatgagagtcccagctagtggtgtgttttctgataaacttcattgtgtaaatttcttatcatggactgcaaactaacatatagcatatgtcaacac

SEQ ID NO: 322872 - DNA, 575 bp, Homo sapiens
atgcttttaacaaacaccccactgaaagaaatcaatttacatcccgtgattattgcaccatcagagaatctttgcaatgttattaaccctggacatcctaaattacaaatggagataacacttaaaattgattagcagtgtattttgagataaaatggtgtttttgccttgctaatcacctctttcacagaaattattcttgctttccatgaagttatgaaaaataaattggagaaatcttttattaagattttaaaagcaaacamataactttcaggataatattcaaatcctttgtaatttcctttctccattttcatcaactgtgggaatgcttaaccacacaggaagaagttggtggacttggaaagttgctgaattctcttatttgaatcaatccacattaaacacaagctattgttttattagcaagtgaaagataaacatagcttacactgagtggatatggaagagaaattggtttcctctagcccagtgatccttgaacaaatgaatgattctgacagaaacctaaggagagaagattttcctgagattgggtggaaacaaaccat

SEQ ID NO: 322873 - DNA, 568 bp, Homo sapiens
agaaatggaaatagcccaaatttccaccaactggtgaatgaataaataaaatgttgaatattcatgtaacagaatgttattcaccaataaaaaggaatgaatattgacatatgttgcgacatggatgaacctggagactattatgctaagtgaaagaagtctgacacaaaaggccacatgtcacatgattccatttaaaagaaatgtccagaataggaaaatctatgcagatagaaaatatgttcgttttcaaggactgagcagaggtggggtgggaatagaaaaagatcacaaattggtccagagtttctttttggggtcataaaaatgttctgaaatttaatggtggtgatggttgcataaccctcrtataataaatatactacaaaacaatgaattgtacactttaaaagggtaaattttaggtatgtgaattataactcaataaagctcttttaaaaagtagaaattagctctctgcaacctagtgttcatttcctcatttgttcatttaccaagtctttgttgagcatgcattgagcaagggactatgctagtgttaggcata

SEQ ID NO: 322874 - DNA, 459 bp, Homo sapiens
ataatctggtcaacatatgctgacttcccaccaatcatgtgctgctgacccaggcgcaggacactgaagagtagaaattagatgcagtgcctgcctttgcacttttgtctcctatgagcttttaagtgtatggtatataggagttatttgtgtctatgtagggaaggtgtctatctaggtttctaagaaaaaaagtaaaaaagatgtctcaatatatatagaaaactagaaaaaagatagatactgaattaaaatatccaagcccacagaaacgcaaacatcacatgttctcacttatttgtgggatctaaaaatcaaaacaattgaactcatgaacacagagagcagaaggatggttacaagagtcttggaaggaygggggtggtgaggagcagggagggcaaatgaatacaaaaaatagttagaaagaattagtaagacctgctatttgatagcaca

SEQ ID NO: 322875 - DNA, 623 bp, Homo sapiens
cagagattgtcctagcagttgtatgcacagtgggctggagtaaggcaagatagaaagctgggtgggattgtggaaaaacactggagcggggtcaggaggtctggctgcaaaaacccagtgcttccctaatgactactgcatagtggttaagagtcaggctccagagctgcagtccctgcattcacatctcatctcaccacttagcagccattcctgaaaacaggaagatcttcagagagtgctcagcatcttgggcacatagcaagttctgccttgactgttaccttgaataagccttctctccaggctaactgcttcctgrgttcagtgtaaaaactcgatgagttgatttctaaagacaccttcagctctaaaattttctgatcccctgaatctgagtatgatacaaatgtttaacactgcctaaagagacctgaaaatcacattttagaatatttttctttccagtagacaacatattaattttgttaaactcaccttggctctcccagagcaaattataatgatttgttggttagagaaaagaattatatgcaaatcacattttacttaatgccaaaaaaaaaagctagtagcccagggcatttgaagccacactgctg

SEQ ID NO: 322876 - DNA, 511 bp, Homo sapiens
agctacttcaaaaattctgtccatcatcataaattctttttttgatgtttctgaggacaacagttgtggatcatgattttcacatctctgcttagtttcttgagggtgtrtgagactacagattggaagcatcacagacacaatggatacccatccttttccaggtagacattcttaatctccagtaccatctctttttctacaaaatggaagatgaaggagcaggtagctacaagaaagcactaaaacatcactgtgtggatactagtttagagaacatatatttagtggccatcactttatttcaaataattgtttatgtatttgatattctgttagggatcttaactgggttgtaagccaaaaagtatgtcttaaaatgatttatttcactatggatgcactattaactaacattaccatacagttaagttaaacgctatagctaattataaacatacaacataggaatgtttcactttgaaccaatccttctttatccaggagagtt

SEQ ID NO: 322877 - DNA, 511 bp, Homo sapiens
agctacttcaaaaattctgtccatcatcataaattctttttttgatgtttctgaggacaacagttgtggatcatgattttcacatctctgcttagtttcttgagggtgtgtgagactacagattggaagcatcacagacacaatggatacccatccttttccaggtasacattcttaatctccagtaccatctctttttctacaaaatggaagatgaaggagcaggtagctacaagaaagcactaaaacatcactgtgtggatactagtttagagaacatatatttagtggccatcactttatttcaaataattgtttatgtatttgatattctgttagggatcttaactgggttgtaagccaaaaagtatgtcttaaaatgatttatttcactatggatgcactattaactaacattaccatacagttaagttaaacgctatagctaattataaacatacaacataggaatgtttcactttgaaccaatccttctttatccaggagagtt

SEQ ID NO: 322878 - DNA, 545 bp, Homo sapiens
ggcgcatgcttatagtcccagctacttgggaggctgaggcaagagaactgctttaacccaggagatggaggttgcagtgagccgagatctcaccactgcatataagaattataggaggaagaggggaagagaatgatagaccagagaagaggctcagagccagatgcccacctgaggtgactgcttttgccctgaaatgtaattccaagggaaaggcaatgttctgtaccatcttattgacccaagtaagtgagctatcatccatactttytttctgaaaatgggttttgccttcacatccttccagatgttgcaggcctaagagtggaggtacatatttgtatgtacatgcagagaaaaaatgtttgtaataatgttcacgaaaaaaacaactagctatcatctttgggtggaagactttagtgattattactcccttctttctacttttttgtgtttgtgttttaaaatagtgaactgaaattattttttaatcataaaagatgggatttgtgttttattttttattttcatttgggaaaaaa

SEQ ID NO: 322879 - DNA, 574 bp, Homo sapiens
ctctgccaggctgatggggaatcctgagcaaaggctgtctattgggggagcccatgtagggcaggaatggcttgactctagtactcgccctgcacttagccattggcagggaacagaccccaggaagcatggccctggtatgaatgttccagtgkatccgaacgtggggcagctgcaaactgtcagtcaactgtgcccttgtgatggttaattttgtgtgtcaacttggtgaggcaactggacgagtcaaggctctccagagaaacagaaaaagggaaaaaaaaaggaaaaaagaagaagaggaagaaagagagagagagaaagaaagagaagaacaaaaagaaaaagaaatgaaagggagggaaggaaggaaggaaggaaaaaagggaaagggaggaaggaaggaaaaaagatatattataggaattggctctcacatgggtatgcaggcctagaactctcacaatatgccatctataagctggagaacagggattggggaaatctaccctcaccagtgtggcagggctgagggggcacgacctgctggagtaagtcctagggtccaaaggcc

SEQ ID NO: 322880 - DNA, 509 bp, Homo sapiens
tggagaacagggattggggaaatctaccctcaccagtgtggcagggctgagggggcacgacctgctggagtaagtcctagggtccaaaggcccaaaaaccaggagcttcattgtctgggggcaggagaagttggatgtcccaccttaagaagagaaagagaatttgccattctcccacctttttgttctactgcagttcttaatagatcagataatgyctacccacactgatgaaggtggatcttccttactctgtccacagattcaaatgctaatctcttccaggaacaccctctcagacacagccagaagtaatgttttaccagctctctaagcatcctttagcctagtcaagttgatacatgaaattaaccgtcacacccatgataccccgatatttggtaaaacattattctattaggttggtgaaaaagcaattgtggcttttgccaataaaaataatggcaaaagccagtggctggcaagatggctgaaaaagaacagttcca

SEQ ID NO: 322881 - DNA, 509 bp, Homo sapiens
tggagaacagggattggggaaatctaccctcaccagtgtggcagggctgagggggcacgacctgctggagtaagtcctagggtccaaaggcccaaaaaccaggagcttcattgtctgggggcaggagaagttggatgtcccaccttaagaagagaaagagaatttgccattctcccacctttttgttctactgcagttcttaatagatcagataatgcctacccacactgatgaaggtggatcttccttactctgtccacagattcaaatgctaatctcttccaggaacaccctctcagacacagccagaagtaatgttttaccagctctctaagcatcctttagcctagtcaagttgatacatgaaattaaccrtcacacccatgataccccgatatttggtaaaacattattctattaggttggtgaaaaagcaattgtggcttttgccaataaaaataatggcaaaagccagtggctggcaagatggctgaaaaagaacagttcca

SEQ ID NO: 322882 - DNA, 647 bp, Homo sapiens
gcctgacagtgtggaatcagttcacactaatttattctcagtcaggttgccatttagggcagtgtaatctgaagcaaaaattttgatttctaccaaaactgctttcaagattttattccctttcattatattctatccaaacagaatatggatcctgttttccaatagaaatatgcagaagtgaggaccattctgaatttttaaacttccaaaatataaatgaccatctcttgatgaatagttacataaaattttgaaaactatttatggtaaaagtacagagcaaagtatacacatcctggtccatggcaggggggtacttccaattcatatttctgatttcyccttatttcaacaattactactaggcctttgcacagcaaagtaaattagcactttttaaaactaggtttcctccagcttaaaaaaagtgaattagtttttttttcatttgtacttttagtaagattcatttaaaaatgactcaatttgtcattaataatgttttatgtgtttgtagctcaaagaacagaatgaagcaggagtctgattgttgtatatgaaatgtgtgctctgtattcttatagggtttcccagctccatttaaaatacagtttcaaaatactgagattacaattaattaagta

SEQ ID NO: 322883 - DNA, 570 bp, Homo sapiens
cctaagttcccattggccaatattgggttgcatgtgtgcatgttctagctgcaagcaaggctgggaagtgaatgcatcccaagcctcttccagaaaggaagaatggtggaagcaagcagccaactggtcaaccacacagaagttgatacgatcagagcttctcggaacaaagagattaacattctgctcctctacttattaccaccctaaacttcagaaaattacctagctactccactatgccttagtttcttcatctgctgtgtgaattaaatgcatgtaggaatatatgtagattcgtttcgatcatatctgccacatggtgttaggcatcattatttgaacctctagagtcgcacagggcctccagggggcctggggtccatgcaaatgctctggctaaaataagtgactgacaagttagatttaaggcctwaatgttgaatttgtataagactctaaccactgctgttatctttaatacttcagatttactactgattattgtaatacttttttaaaaaaggcttttagttagcagtcttgtctattaaatttatttctgaaaaa

SEQ ID NO: 322884 - DNA, 570 bp, Homo sapiens
cctaagttcccattggccaatattgggttgcatgtgtgcatgttctagctgcaagcaaggctgggaagtgaatgcatcccaagcctcttccagaaaggaagaatggtggaagcaagcagccaactggtcaaccacacagaagttgatacgatcagagcttctcggaacaaagagattaacattctgctcctctacttattaccaccctaaacttcagaaaattacctagctactccactatgccttagtttcttcatctgctgtgtgaattaaatgcatgtaggaatatatgtagattcgtttcgatcatatctgccacatggtgttaggcatcattatttgaacctctagagtcgcacagggcctccagggggcctggggtccatgcaaatgctctggctaaaataagtgactgacaagttagatttaaggccttaatgttgaatttgtataagactctaaccactrctgttatctttaatacttcagatttactactgattattgtaatacttttttaaaaaaggcttttagttagcagtcttgtctattaaatttatttctgaaaaa

SEQ ID NO: 322885 - DNA, 608 bp, Homo sapiens
gcaaacttacttataatgttttctaattgacttgacctcaaattgtgattaacatgctactctgatattttcatttagggtcctagtttaatatatgmaaacataaacagtaaattagcagtctaggtttctgccattttttgttggaaacctattagcaacctttatctaaaaatgggaggagagctttcacaaaatagctgaatttcaccaatccctaaatcagaggaatttacagcatctctggatgtttcttctggattgtcacagacacatatacacacacacaaagctgcttcattcattcaacatacttgtgttaattgatcttggggagacaatattgaataagacaaagtcactaccttctttgctaaggacattgccaagtaagcagataattaccatacagtaggacaatattacaattagggcataaatggagagcttaggtcagattgtcaatgaaagctttattttagaatgaaatcaaacatcagtccaaatatcctaaatgagttaatattgaaagacaaaaatttgttacttttagaagcaacaaattcctacagaagagcaaacctaatactaagccatctgttatttgc

SEQ ID NO: 322886 - DNA, 608 bp, Homo sapiens
gcaaacttacttataatgttttctaattgacttgacctcaaattgtgattaacatgctactctgatattttcatttagggtcctagtttaatatatgaaaacataaacagtaaattagcagtctaggtttctgccattttttgttggaaacctattagcaacctttatctaaaaatgggaggagagctttcacaaaatagctgaatttcaccaatccctaaatcagaggaatttacagcatctctggatgtttcttctggattgtcacagacacatayacacacacacaaagctgcttcattcattcaacatacttgtgttaattgatcttggggagacaatattgaataagacaaagtcactaccttctttgctaaggacattgccaagtaagcagataattaccatacagtaggacaatattacaattagggcataaatggagagcttaggtcagattgtcaatgaaagctttattttagaatgaaatcaaacatcagtccaaatatcctaaatgagttaatattgaaagacaaaaatttgttacttttagaagcaacaaattcctacagaagagcaaacctaatactaagccatctgttatttgc

SEQ ID NO: 322887 - DNA, 465 bp, Homo sapiens
acttttgactctaagtcccttggccataaagtcccaccaagggacataatggacccaggacaggtagcacaccaccctggcatcaatatgggrcaaaataaaagctaggccaggccgggtgtggtagctcacacctgtaatcccagcactttgggaggccgaggcaggcagatcacctgaggtcaggagttcaagatcagcctggccaacatggtgaaaccatgtctgcactaaaaatacaaaaattggccagacatggtggcgtgcacctgtaatcccagctactaggaaggctgaggcaggagaattgcttgaacccgggaggtggaggttgcagtgagccaagatcgcaccattgcactccagccttggtgacagagcatgactctgtcttaaaaataaataaataataaataataaaagcttggctattgatactgcctctggcataccttgacaaaaaag

SEQ ID NO: 322888 - DNA, 465 bp, Homo sapiens
acttttgactctaagtcccttggccataaagtcccaccaagggacataatggacccaggacaggtagcacaccaccctggcatcaatatgggacaaaataaaagctaggccaggccgggtgtggtagctcacacctgtaatcccagcactttgggaggccgaggcargcagatcacctgaggtcaggagttcaagatcagcctggccaacatggtgaaaccatgtctgcactaaaaatacaaaaattggccagacatggtggcgtgcacctgtaatcccagctactaggaaggctgaggcaggagaattgcttgaacccgggaggtggaggttgcagtgagccaagatcgcaccattgcactccagccttggtgacagagcatgactctgtcttaaaaataaataaataataaataataaaagcttggctattgatactgcctctggcataccttgacaaaaaag

SEQ ID NO: 322889 - DNA, 542 bp, Homo sapiens
gggttctggctcctgaagctgctctctcctgacccagctcaagctccctcacacyccctgccctgcaggtctccttcaccgaccacaacctgctggacttgctgctggcccaccaggtcctggtgaggcaggagaatagggtgtggaggcagggaacctaaggctgtttcatgccaacttcctagaactaaattgaaaggaaaaccctaactttccacacctaagtaacaaaaggaccagaggctactccatttgaccttttctgcacagcagatgcgaaattggctgtccccaacaaatcagactagttgtgggtggagtcttcgtttgcaacttggtaatttcactccagcctatgaatggttgctgtccacaaacaatcagactgattgtgggtggagtcttcgtttgcatagaagcataactttgtaacttcaccctagcaaacatctgatccaatcagatgttggcacaggagtgtgacctttgtaagttcacttcagcctctgattggctgttttccgcaaccaatcagattgcag

SEQ ID NO: 322890 - DNA, 614 bp, Homo sapiens
ggtttcactgtgttagccaggatggtctcaatctcctgagctcatgatccacctgcctcagcctcccaaagtgctgggactacagaygtgagccaccgcctctgctgcccaagctgcctctgttgcccaagctggagtgcagtggcgcaatcatggtccactgcagccttgacctcccaggctcaagtgatcctcccaccttaacctcctgagtagctgggactacaggcatgtaccaccatacctggttaattttttttatggtttgtagagatggagtcccactgtgttgcccaggctagtcttgaacccctggattcaagtgatcctactgacttagcctaccaaagtgctgggattagaggtgtgagccatagtgcccagccaaacatttttatttttatgaggtgcaatttatccatttttcctcttatggatcatgcttttagtattaagtctaagaattctttgcctagctctagatcctgaacattttctcacattttttcccttaaagttatataatttttcattttgtaattaagtccataatccatttcagttaattttctataagttgtgaggtttagattaacatttctttttttgcctat

SEQ ID NO: 322891 - DNA, 628 bp, Homo sapiens
gttcgtttgagaggacttccttatagttgcaatgagaaagacattgtagacttctttgcaggtactttgcagttgtattatgcttgggagctcatatcttttttcccttggtatctccttctatatcttagatgagcctgtttctgggcaaaggcatgcagttatattaggttctttaggggagagctcttcacttaaatttctaatatttatagattttrtatgtgtttttgttctatcaggcagattttaggagggaagtcagatttcagaataatttcatgagggttttactattgaaggaaataacttctcataatagttgctgtatttgtgtaagacaataacaatttatataatttaaaagtattttctaattcctagaaccattagcagtgaagtctgtgatttctattgtttcctagtatataattaacagcaaaaaaaaaaaaaaaaactggtggggagaattgtatgttttgggtgggcttcttggaccttacctattctggaaatacaagtatgtaggtgttgactgacttttgactgcataataattttcttcctgtcaagcatgtattcagttttgggactggcaaaacagaataaaaattttattagtatgtga

SEQ ID NO: 322892 - DNA, 523 bp, Homo sapiens
ccctgggcacattttccccattgtcttggtgattaatatttggctcccagttgcttatgcaaatttctgcagcaggcttgaattttttcctagaaaatgggcttttatattctatcacatcatcaggctgccaattttccaaacttttacgctctgcttccttttgaatgctttgccacttagatattttttctgccagataccctaaatcatttttctcaagttcaaagttccacagatctytatggcaggggcagatatcaattctccccaaagtgatctataaatgtaatgcaatcccaacaggatttattttttgtagaaatcaacaagctgattctaagattcatgtgtaaatgcaacaaatctagaatagccacaacagctttgaaaagggaaaacgagattggaagtttaacagcacccaattttaagacttattatgaagttactataaaaaattattggcatcaaaatagatgatcagataattgaatagaggacagaatctaaaatttaccca

SEQ ID NO: 322893 - DNA, 503 bp, Homo sapiens
tctcattatacttatgttggtattgctaaccatccaaattccctggcttctggactctagagctttgaaattagtgccttttaagtacataaatgtctcatccgctgataagggaagtagggcctgccaagcaagtgtgtttttccacagggatctatgccaggcagatggcgtgagcccaggtggccatcaaggcaacacagcggagagacttcggaaggcaagcatgaaaccatgccaagagagttytggtggtcacaactgaagaagccacatctgttgtcatgtccctaaaacaaatatggagctaagaatgaaaaaaaaaaaaaaaaaacccaagggatgaagtctaagtagcacaggagtatagtggatgctaacgaacaaaagaatgaagtaagatggtttaggactttcatgttaagtggcgctgggatgctgatgttattggcctataccacatgatgctttggtagacacagcctgagttataggaaaacgtt

SEQ ID NO: 322894 - DNA, 578 bp, Homo sapiens
agccaataaatatatctgttcctcaacttcactttaaaattttctgcttctactctttcacagtatgttgaatactgcttgttcttcaagaatcagatcaattttcaccaatttactaagccttctggacttcagcattcattttcccatatttactttatgtgccatacatttcacatataggattgttgcatctaaagagaaataatgtacagtattgctttccaaactatttcacatcatgacacatataatacataaaaatatttgtatggtacaatagagtaaacrggtaaggctgtttttgaatgatgccagggaaccacctagggaatttcaacaaccctgagattctgctcaactgcctggaggcaaatgagaattgaaagaacatctgtcatccttttgtagcataccaatatgcctgggaagttttgaaggagaagaagcctactcaagcagagtcttagacagtgaaattatcttggtgctgtcaccacacttcagaatctgagcctaaacttttctcagactctcttaaaatacaatatacaaccataagaagagtatttattgag

SEQ ID NO: 322895 - DNA, 598 bp, Homo sapiens
aataataataaaatttaaaaaaaaagaaagttgtcaatctggggtaacrcaaaaagaaggagtacaggtaaaaagccaaacatgaaaagtcaaagggtcatgaggagagaattttcaaatcaaggtagagagccctaacgagagttactctcaatactaaatgcaggcagctaaactggtgggcaagagccaggtaggaatctctgagaagggacagcaagggataggtcacaatctctctcttccagaaaagtcaacatggaaccaagtatatcagcacagaaatacttgaggactatgaaaccttaacaaaggtgagggaaggagactaattatgctagagtcatcaagttggtctgatgatgccatcctagtatagaagaaactgcaatatacatctgattatgcaatcccagtaatttatctttcaggaacattatctgtcaataataatggaaccatgctggttatatggccctaggttctgcaatttcatttcctaccttcagcagagccctattctgcttattccctgaagagaattaggaagaggaatgaaagaaaccctgactcgataatctattgttttagcctcccc

SEQ ID NO: 322896 - DNA, 598 bp, Homo sapiens
aataataataaaatttaaaaaaaaagaaagttgtcaatctggggtaacgcaaaaagaaggagtacaggtaaaaagccaaacatgaaaagtcaaagggtcatgaggagagaattttcaaatcaaggtagagagccctaacgagagttactctcaatactaaatgcaggcagctaaactggtgggcaagagccaggtaggaatctctgagaagggacagcaagggataggtcacaatctctctcttccagaaaagtcaacatggaaccaagtatatcagcacagaaatacttgaggactatgaaaccttaacaaaggtgagggaaggagactaattatgctagagtcatcaagttggtctgatgatgccatcctagtatagaagaaactgcaatatacatctgattatgcaatcccagtaatttatctttcaggaacattatctgtcaataataatggaaccatgctggttatatggccctaggttctgcaatttcatttcctaccttcagcagagccctattctgcttattccctgaagagaattaggaagaggaatgaaagaaaccctgactcrataatctattgttttagcctcccc

SEQ ID NO: 322897 - DNA, 618 bp, Homo sapiens
tgagaatgagacactctttctgaagttatgcaagatggaaaggatgtaattctagaattaataatgagaatcttgacataaggaaagaaaagcctgtctgagaatgaactaaaataaaagtgaataaaaagataagcaaaagatacagaaacagatttctgatgaaactcaaacacctaggtccaacaatgcccaaagccaattacccttgactttcagttatatcagcattgaatgactcttctctttattttctcaagtgaatttgagcaaagataaaatcaccctgcttctttaaggttaccactctgaattaaatcagccccaaaactattgaccaagacagcctgggcattccccagagttttactaaacttcaagtttgtttcttcttgactgtaggtccctgagytcttttcttagatttactttagaaaacttgcaattgtaaattatttctctgccctttgtgatgtaaattttctcccagcctcaggacagttttataatacaggatttttttttcaaggacctaggcaccatccctttgaaatataataattaaaaatgtaatacccctatctcccagtttctgtgggagagtaggagcctaactac

SEQ ID NO: 322898 - DNA, 624 bp, Homo sapiens
caggacagttttataatacaggatttttttttcaaggacctaggcaccatccctttgaaatataataattaaaaatgtaatacccctatctcccagtttctgtgggagagtaggagcctaactacaataagggacaattagtgaactcagatagcctaatcacactgaccaacttcccctccaatgtatttcagtacttttccatgagctcaacccagagtttaaaagccctccagccctttgtttcagtggagttgagttctttctctctttcctattgcaatagtgttgaaaaaagtcttccttgcctgtttaactctggctagtgcaattttgatttgacactattttatgttgggacttccttttgtgtaaagtaacrtgttcctttatttaagccaattgagtaatatctttttagctaaaaatattttaactggaatagagattgttgttacttttttctttaaaaaatcttaatgatctttggaagatttagagctctaaccttctacataatctttcattaaattgttgtgcctaattctgctttcattttcattccctagggcttcagagcaatttcctatcatggccttttacattactttgttcacttgccag

SEQ ID NO: 322899 - DNA, 624 bp, Homo sapiens
caggacagttttataatacaggatttttttttcaaggacctaggcaccatccctttgaaatataataattaaaaatgtaatacccctatctcccagtttctgtgggagagtaggagcctaactacaataagggacaattagtgaactcagatagcctaatcacactgaccaacttcccctccaatgtatttcagtacttttccatgagctcaacccagagtttaaaagccctccagccctttgtttcagtggagttgagttctttctctctttcctattgcaatagtgttgaaaaaagtcttccttgcctgtttaactctggctagtgcaattttgatttgacactattttatgttgggacttccttttgtgtaaagtaacatgttcctttatttaagccaattgagtaatatctttttagctaaaaatatyttaactggaatagagattgttgttacttttttctttaaaaaatcttaatgatctttggaagatttagagctctaaccttctacataatctttcattaaattgttgtgcctaattctgctttcattttcattccctagggcttcagagcaatttcctatcatggccttttacattactttgttcacttgccag

SEQ ID NO: 322900 - DNA, 585 bp, Homo sapiens
taagtcttaagtctagatctctcaatttccagtctagtcctctgttggctgaaactctattaaaaagaggaaggatactcatacaggagtgagagtcctgggacgtttaattctctttagttttttcatcaaatgagacaatatttggttattgcaaatatgtgcacggcagtcaattgtagttttatctctcactctagattataatggtatattccctaaagatcctaacaatgacctatggtcacattactaagaataatttgaatacaggatgccaagtcttaccattcatcactcattcacttcaggattctggtaatagataatacatacaaggagaaaaactttataaacctccaaaatayagggtttctcataatagcatgtgtaccccaccatcaggcaagaacatgcaccctcagaagttcaatgactgcatgttccaggctaccaaaacacatttagcctcaggtgagtttcacttgatatctccaagcaacataacatacatacctgtcacctcactctccatcagaagacaaagcaccctcgatcatccataatcacttactaccatgatga

SEQ ID NO: 322901 - DNA, 585 bp, Homo sapiens
taagtcttaagtctagatctctcaatttccagtctagtcctctgttggctgaaactctattaaaaagaggaaggatactcatacaggagtgagagtcctgggacgtttaattctctttagttttttcatcaaatgagacaatatttggttattgcaaatatgtgcacggcagtcaattgtagttttatctctcactctagattataatggtatattccctaaagatcctaacaatgacctatggtcacattactaagaataatttgaatacaggatgccaagtcttaccattcatcactcattcacttcaggattctggtaatagataatacatacaaggagaaaaactttataaacctccaaaatatagggtttctcataatagcatgtgtaccccaccatcaggcaagaacatgcaccctcagaagttcaatgactgcatgttccaggctaccaaaacacatttagcctcaggtgagtttcacttgatatctccaagcaacayaacatacatacctgtcacctcactctccatcagaagacaaagcaccctcgatcatccataatcacttactaccatgatga

SEQ ID NO: 322902 - DNA, 599 bp, Homo sapiens
tctcttagcagccattttaaaggtgggctatgtatgggggaaatatttgtgttacttctcattgccccattataactgtctctcctaccttccttctccaaaagcccagctcctttgaagcatatgttcctatttttacacttattacccttctttgtgctctttcaataccctagccactctccttaatttattgttgactttagcatctgctttattatcttaatacctgyccccacttctatctgcagcttttgaaacttcaacaatcacacaaattattcatcaaatgccctagtttccatcctttgacctcattagttctatggggaagggaaatgacagcagcatcctctatgggtcaaggtcaaggtgtgtagattggaggggagaggatcaacctccacatccaacttcaaggtattgagttgagcctggctttctcactgaaacttccttgatttctggactataattctcataatggcattgtaatgggtgtagacacaagttgaacaatcaaagaagggtagatctgagacgaaaagaaggcttcaagggcgagttcatgttaaatatgttttagactgacttatgaa

SEQ ID NO: 322903 - DNA, 609 bp, Homo sapiens
gtatcctatctgaaggctcatgtattcagaaatggcttggacgtttatcaatgtttagtgaataaatayacttcattcattttatgttcaagaaaaatgtttaaagtttatgtcttagcccacttgaactgctataacagaataccataggtagggtagtttataaaaaacaaaacagaataccacaggtagggtagtttataaaaaataaacaatgcaggatcaaggagccagcaggtaagaagtctctcattcatagatcgctgtcttctcattgtgtcctcacctggtaagggatctctctggggtctctttcataagagcactaatcccattcatgagagatctgccctcatggcctaatcacctaccaaaggctttacctcctaatgtcatcaacttgggggttaggatgaatttgtggaggtggcaaaagcatttagtcttagcagtataggtttgttaaataatttctgcttaaacctaattcaagtgtcactcaaatgtcaccttatcagtgaggacttactggactgcccagacaaattgtaatcccttttcctccctggaactctgtattccttttagcttgctttacttagtccctaa

SEQ ID NO: 322904 - DNA, 609 bp, Homo sapiens
gtatcctatctgaaggctcatgtattcagaaatggcttggacgtttatcaatgtttagtgaataaatacacttcattcattttatgttcaagaraaatgtttaaagtttatgtcttagcccacttgaactgctataacagaataccataggtagggtagtttataaaaaacaaaacagaataccacaggtagggtagtttataaaaaataaacaatgcaggatcaaggagccagcaggtaagaagtctctcattcatagatcgctgtcttctcattgtgtcctcacctggtaagggatctctctggggtctctttcataagagcactaatcccattcatgagagatctgccctcatggcctaatcacctaccaaaggctttacctcctaatgtcatcaacttgggggttaggatgaatttgtggaggtggcaaaagcatttagtcttagcagtataggtttgttaaataatttctgcttaaacctaattcaagtgtcactcaaatgtcaccttatcagtgaggacttactggactgcccagacaaattgtaatcccttttcctccctggaactctgtattccttttagcttgctttacttagtccctaa

SEQ ID NO: 322905 - DNA, 609 bp, Homo sapiens
gtatcctatctgaaggctcatgtattcagaaatggcttggacgtttatcaatgtttagtgaataaatacacttcattcattttatgttcaagaaaaatgtttaaagtttatgtcttagcccacttgaactgctataacaraataccataggtagggtagtttataaaaaacaaaacagaataccacaggtagggtagtttataaaaaataaacaatgcaggatcaaggagccagcaggtaagaagtctctcattcatagatcgctgtcttctcattgtgtcctcacctggtaagggatctctctggggtctctttcataagagcactaatcccattcatgagagatctgccctcatggcctaatcacctaccaaaggctttacctcctaatgtcatcaacttgggggttaggatgaatttgtggaggtggcaaaagcatttagtcttagcagtataggtttgttaaataatttctgcttaaacctaattcaagtgtcactcaaatgtcaccttatcagtgaggacttactggactgcccagacaaattgtaatcccttttcctccctggaactctgtattccttttagcttgctttacttagtccctaa

SEQ ID NO: 322906 - DNA, 609 bp, Homo sapiens
gtatcctatctgaaggctcatgtattcagaaatggcttggacgtttatcaatgtttagtgaataaatacacttcattcattttatgttcaagaaaaatgtttaaagtttatgtcttagcccacttgaactgctataacagaataccataggtagggtagtttataaaaaacaaaacagaataccacaggtagggtagtttataaaaaataaacaatgcaggatcaaggagccagcaggtaagaagtctctcattcatagatcgctgtcttctcattgtgtcctcacctggtaagggatctctctggggtctctttcataagagcactaatcccattcatgagagatctgccctcatggyctaatcacctaccaaaggctttacctcctaatgtcatcaacttgggggttaggatgaatttgtggaggtggcaaaagcatttagtcttagcagtataggtttgttaaataatttctgcttaaacctaattcaagtgtcactcaaatgtcaccttatcagtgaggacttactggactgcccagacaaattgtaatcccttttcctccctggaactctgtattccttttagcttgctttacttagtccctaa

SEQ ID NO: 322907 - DNA, 417 bp, Homo sapiens
gaggaagggactatgagccaaggaataggagcagcctctaaaaaaatggaaaaggcaaggaaacggactctcctctagagcttctagaaaagaagacaaccctgctgattttagcccagtgagatccatgttggacttctgacttatagaactgtaagataataaacttgcattattttaagccactaaggtaggcatttgttccagcagccacaaaaactaacatatgtgccttcamaagaatgagccccatgaaggcaatatcagtgttacattttaggctttactactaaaacttagcacaatccttgattcacagaaaatattcaacaaatatatgttaaatggatgaatgaatgaagacactgattaaccaataaatcatctccttctagttctgatatcgtcgcatatgat

SEQ ID NO: 322908 - DNA, 504 bp, Homo sapiens
caagttgctgactttgatgacagaggaagggactatgagccaaggaataggagcagcctctaaaaaaatggaaaaggcaaggaaacggactctcctctagagcttctagaaaagaagacaaccctgctgattttagcccagtgagatccatgttggacttctgacttatagaactgtaagataataaacttgcattattttaagccactaaggtaggcatttgttccagcagccacaaaaactaacatatgtgccttcacaagaatgagccccatgaaggcaatatcagtgttacattttaggctttactactaaaacttagcacaatccttgattcacagaaaatattcaayaaatatatgttaaatggatgaatgaatgaagacactgattaaccaataaatcatctccttctagttctgatatcgtcgcatatgatacattattattgaaataataccaacaatgataccacttattgagtgccttttcttagtcattcat

SEQ ID NO: 322909 - DNA, 541 bp, Homo sapiens
atttgcttatgtatctataacatgttaagctccttgagggaagatttgtgctttattcatcttacttttcttattgcctacgaggacacctggcacataggtgctaagcaattatatgttaaattgaattgaaatgaacaaatgaacaaaatgaacaaatgaacaaaactataagatgtttgagaatagtgattttaccttcctccttgattttaccaaagtagccataggaggaagattaaaaaaaaaaaaaaaaagaatagcttttggttgtgcctatttgacaactggaaacatttctgaaataaaacaagagcctgtattattgttgacctgtcactagaatgtccctaaagtttaaaaataaagttctctctattatggctcctgtgctggagctacatgtactctgcagtgggaacttatagacagaacttgtttatgcgtttctagtaaartgagttaatggctatgaaaaaacaatgttgagttcaaatattccaaacttctgctccagatcaaatactccagagattctctt

SEQ ID NO: 322910 - DNA, 512 bp, Homo sapiens
aatttccttcattaaaagacaattccacaaacatttctgcagcasttactatgtgccactcagtcactgaaatgggaatatagataatttcaactgcatggggataaagctgggcacaacgtttaggccagaatggggtgaggaacagtaaattgagttgctatatttagcaaacaaaaatacaagatgtccagctaacattagatttcagataaataatgtattactgttactataagtatgtcccatgtaatctttgaggaatatttaatctaaaagatcattcattgtttgtctgaatacattcaaattttaccatgtgtacagtatttaatctggcaacattaacagttaaagacatgtatacagaaaaggagactgaaaaaaagacattttgctccctaataagggcctaaaagatcactgcaatattagcttctaggactgagttcttctccagcgggaacccctgggaacagccaaactgactgtttacatgcagcacctactct

SEQ ID NO: 322911 - DNA, 567 bp, Homo sapiens
ttagttctgcctcaatataatataatatttgaatgggagtgaatttcctattgatgagtgttatagtttggatttataccccacccaatctcatgtggaattgtgatccccagtgttggaggaggggcctggtggtaggtgattggatcatggagggcgaacctcccccttgctgttctcctgataatgagttctyatgagatctggttgttcaaaagtgtgtagcaccttccccgtctctctcttcctcctgctccgtccatggaggacagatctgcttccccttcacattccatcacgattgcaagtttcctgaggcctccccagccatgcttcctgtgcagcctgtggaactgtgaaccagttaattatcttttctatataaattatgctgtgtcaggtagctctttataggaatgcgagaacggcctaatacattgagtaagataagttgggtgtttttctcacccaacgataatttcaacaggaaagtctggcctaaagtttatccctgcttcttctcctatgccagttatttttataaagaactacagtttgctatcagga

SEQ ID NO: 322912 - DNA, 567 bp, Homo sapiens
ttagttctgcctcaatataatataatatttgaatgggagtgaatttcctattgatgagtgttatagtttggatttataccccacccaatctcatgtggaattgtgatccccagtgttggaggaggggcctggtggtaggtgattggatcatggagggcgaacctcccccttgctgttctcctgataatgagttctcatgagatctggttgttcaaaagtgtgtagcaccttccccgtctctctcttcctcctgctccgtccatggaggacagatctgcttccccttcacattccatcacgattgcaagtttcctgaggcctccccagccatgcttcctgtgcagcctgtggaactgtgaaccagttaattatcttttctwtataaattatgctgtgtcaggtagctctttataggaatgcgagaacggcctaatacattgagtaagataagttgggtgtttttctcacccaacgataatttcaacaggaaagtctggcctaaagtttatccctgcttcttctcctatgccagttatttttataaagaactacagtttgctatcagga

SEQ ID NO: 322913 - DNA, 565 bp, Homo sapiens
gcattgcacttgagaccctggcagtctacctccagagtccatgtgcacaaccacttaactaatctgcttctccatacatatccttggtgctgttactgcaaactgatgagtgtaggtattgttaatagatatctttatttgacaaatgaggaaactgagtcacatactttagattaacttgtcaaatgccacaccattaagaagaaattgagccaaatttgactaagatattttgttcctaggatttctgtttctaaatactatgtatatttattttctaagaatgctattgcacaaaatcatctctagaaatcattaatctcctctttattgttgtaaaaaaaaatcacactgtttttcttcaggactgatttttttaagtgctgcaagtatcattttactgagtgactggccaaccacatcagattgtactgcccacctgcaaccatttaattacacagtgctcstaaagccagaactgctgacctgaatcctgtggtcttttctctccatgtggtaagctcttaatcaattgagtgttcaattcagtttaattcaatgtttt

SEQ ID NO: 322914 - DNA, 589 bp, Homo sapiens
gctactttaatacattaagcaatgacttcgctccatttggtctttgtgtatgaactcagggtgcttcccattttatggaaaacttgacacaacaattaccacccaaataacctataattttataaggtaatccaatgcatctaccaaaaattgtcaaaacaggaaaagaatggtatgtcaagggagcatcctttattagaaagtgagtgtgctgcagtgttcaaaccatggcttccaatgtcagattctctgtgttccagtctcttctctgcttcttactagaagagtgagcttagcaagttactgaaaccgctcagtgtcatagttttgtcatctgaaaatggatataagaatgataccaacctcatatgattgctgtgaagattaaacatgttaaaatacataaaactgataatcattcttaacaagaarcaagaatttaatgaactgtagcaagtactgttattggttatacatttttgaacaatagtgggaacttctaattgtctgcctaaaatgtgctaaggattagaaaactagacaattatgcttaacatagatttcagtaaaatctgagctaatagtatct

SEQ ID NO: 322915 - DNA, 571 bp, Homo sapiens
taaggtatggatcttattaccataaccaccatgtgtccacatgttgataagagatagcatcctcaaagagcaatcagaaaaaggttgataaaatcaaatttttaatacatgtccagaagaaaaagaaaaaatatcaaaaaataataaaattgtattaaaagatagatagacagatttcaatatattcttccatgaaatctttctcctttgaggtcctatgaagtgaaagaaattcamccataggaatatctgaacacaggtaattaacaggagagggcagagcattacatcagaacagagaactgtgattgcagtgccaaatcagatcagcagacattcaaagcaggttaaagaaatattagaaaggcactgcagtaacacagtaaaaatagggagatgtgtgtttaacaaagtggttgggagaaaaagtgttttttaattccctcatttctatataaaacgtatgtcaaaatataacttctccaaggcttcccatcaaaaatagcatcaggacgacctttacgagttcaatctggagccacaatgtcaaatatagtatcactagtcgcat

SEQ ID NO: 322916 - DNA, 609 bp, Homo sapiens
tttttagtcaaggaaactgattttcaattttaagaagtttcttcctattaaaagctttaccaaagactggagccaatatctcttgcaatgctgcagactaataaagctagaccttcacactgtttgcaaggtcaagtgtgtcacttctcatggtctacattttgctccctgctgactttcccctcaggataaggggaacaagcttggcaaagactaattggaaaatatcattttcaaaaccaagagcaaacagttatagaatctacggatatcttcaagagcttttttttccctcaagtggttaagaacaactattgaaagctccccagaaactgaacctgctgtcaggcactgaaggagcaacacaaagaagattgagattgaaaacaacacctatcattggacatatcttgctgtgaatctaaggagaaagaaggctactgtggaatggaacgaacatcattaacaggtgagcgtggccaaggtttccctcccaagayaactcatggggcttctgcctctctctgctatagttcttcctatctccactttctgaggaaaatcattcttgcagagaataactatatactgccatgatcaggtgggaat

SEQ ID NO: 322917 - DNA, 597 bp, Homo sapiens
cacttgccatgagtggagcctgcagactggaaattcctttggatgcatcagtgagtaaatgatgactgaatstgaaggcctaggatattcctgtacactactgtcgacttcataaatattttatacttaggctacactaaatttataatttttaaaataatgaattaaccttagcttactgtaacttctttacttctataagcttttttattgaaaatgttttgtgttttttggattttttttttctttttaaactgttttgttaaaaaactaagacacaaacactcacattagcttaggcctacatagtgtcaggattatcctcatcactgtcttctacctccacatcttgtccccttcagtggaatacctcccgaaggacctttctgaggctgttttatagttaactttttcttttataagtagttcactctgaaataatgataaaacgtgtaatatggtaggtatataaaaattattaacatatttattattatcaagtgttacgtactgcatttcattgtatgtgctataattttacatgactggcagcgcaataggtttgttgacaccagcatcaccataaacacatgagta

SEQ ID NO: 322918 - DNA, 626 bp, Homo sapiens
gggaacagctacttgatggagaagttcaaatatacacaataattatcaattaagttggctgtcttatacagacatagtccatggtgctcacaacaattacgatagtaacatcaaagatcactggtcacaaataatcataatagctataataataataaagtttgaaatattgcaggaattaaccaaaatgtgacagtgacataaagttaacacatgctgttagaaaaaaaatggtgtcaacagatttgctcaagacagggttgccacaaactttccatttgtaaaaaaaaaaaaaaaatgcaatatttgccaagtgcaataaagcgaagcacaataaattaagtgcaaaaaaaatgaggtatgcctgtacttagttttaaaaccaataggtagtcctatatatattcctatggaaaaatatttctagtaaaatactccatgatataaactgaagacagagtaatacataatgagtatctctcytatatatagttcaaaaataagcaaagctaatcaatgattcatgttagaagttaatgtagaagttatctttgcagtgggcagtgattggcagggagcataaggaaggcttctaatgttatgtgaatgttctaattctggatgtg

SEQ ID NO: 322919 - DNA, 543 bp, Homo sapiens
ggaggtaacaatagaagaaaaccaaaataaatttaaaattgcmtcagaaaaaactatagtttttagaaagatggaaattatagcataagaaagcaagtaaagtgatcaggtgataatataattttaaaatttcaaacatatcagtaaccacaatgaatataattgaactaaacttgccacttacaaagtaaagttgttgtaataaattaaaattctactatctgtagtttataataatttatatacaaaatgttatagcaagtgacagtgaagatgtgaatcagcaagaacatttatacctgctatataggagtataaattgttcaaacagttggggaaaaatttggagtataaattgttcaaacagttggggaaaagtttggcaaaaacctaataaaattgaacatttacataaatatttaccaaatagtttttttttttattttggtttattgacattctaaagaaagccttgcccctgtacgttagtacatatataccagaatgttttcatgccataattgcttttaatagccaaaaaaa

SEQ ID NO: 322920 - DNA, 574 bp, Homo sapiens
aaatctttgccttgttcttaacacattttaatgtctccagatataaagctagagtcatattccaatagaccctgagaagaaagtaattatgatgtcaagcattgaggaaacagcttatataccaaaaaactacaaaatttatgccacccaggttctgctacatatgggaaagtattctgaaggtgctagaccaagaaggcagaaacgcgtacttttaattggcaaaatttaccagtgtgagtttaactactacatattctgcaacaaatgagctagatcaaacagcacagaatacggtaaacctggaatcattattcgttcaaataattgaagatgagatgccaaaaatttcttgataaagaagaaatccaaagactaaatgagatggcaatgttagaattctgtatccacatgtagctcactcacatacacctagtcatattccatcattccctatgatgaggagaagagcaacatccactttgaaaaagtattttaaaagttgctgtctactaaatrggggtgctaatgagagaaactactttaaaaacagcttactatctcaatgaggaca

SEQ ID NO: 322921 - DNA, 341 bp, Homo sapiens
cttgctagtggttgtaaaatttttctttcttgctgtactaacaagattccaaactaatgccctcaatgttatttatgtagcctttattgtgccttttgttagatttttgatcctatatttgagtagccatgtaayattaaacatggttctttgcatcagtaactatttatttattcagcacctactttccaaacactatacatgaggtgctacacgaaaataatgtgttcgatgtagtgtttttcctcaagttattcacaccctagagtgggtggcaggcttgtgattcatcaaggtacaatgtactaagtaataagatgaaggtaaatgccggtaatttg

SEQ ID NO: 322922 - DNA, 341 bp, Homo sapiens
cttgctagtggttgtaaaatttttctttcttgctgtactaacaagattccaaactaatgccctcaatgttatttatgtagcctttattgtgccttttgttagatttttgatcctatatttgagtagccatgtaacattaaacatggttctttgcatcagtaactatttatttattmagcacctactttccaaacactatacatgaggtgctacacgaaaataatgtgttcgatgtagtgtttttcctcaagttattcacaccctagagtgggtggcaggcttgtgattcatcaaggtacaatgtactaagtaataagatgaaggtaaatgccggtaatttg

SEQ ID NO: 322923 - DNA, 533 bp, Homo sapiens
caatttttgctattactgaaataccgtcacagaggccacattattggctgtctataccattgcctgagtaaaattaggtttttaggtctttttggcatttamttcttttacagctgatgtggaatcaattattcctttatatgttcataagtacaaaatttcactatcttaattacttccaaacaaacaatttccaagcaagggtatgtgtgcctggtttttctgctcctccaattctaagatcgttatttgtttgccttctgtttctcacccaaaaatacagatggttgggaaagatacatcttattgagttgtcctatgcagtctctgtctatatttgcatttctttctattcctatcttgccttttttttttttttttacacagatttggttttcccttccctttgtgaaaaccagaattgagcagcattgtacatcagagatggtacccaggaaatgtctttgttcctcagtatttttcgtcaaaacttccatgcaaagacagtcccagcaaagttgacatacatccca

SEQ ID NO: 322924 - DNA, 596 bp, Homo sapiens
ttgctttttctccatgcttttgaagtatgactaaaagaatgagtcagttcagtggtgaaagtaacagctatttaatagcagttttctccaaagtacacttttcctcccctgaactccaactgaagctccccatttattcttcttgtcccttcagaagggcagtgttctgaaattggtaaaccttttgatgtctgtcttaggcttagtgttcgttgctggctcttccattctgcccagatgtacatagctacctgttcactgctgccttccaaactccactcacctgtgagactgcctgatgagcctcgctaccraggtttaccccacagtggagagcatccagcagagtgcctctgaaatctcatactgcttgcaaagaggtagaaccaaagcaggcctaccacggaatggaaaaccaagaccaccatttctttctctgccttttaagcattcatataaatcacgttcctccttattatgtatatagctgccacatttttgtctttctttcggtattgttgcatacccaatttttttcttaggaaacagcttaattttcaacaccagtttccccagacactctccacgcccacatc

SEQ ID NO: 322925 - DNA, 469 bp, Homo sapiens
tcagcaaacaaatatgcctatcacgagccagaattttaaaggatataaaagaataataaacagaatttccccgtatgttactgctccatggtgtacactatgtgaatttatctctgtgaactaaatgatctgtctgggttctatgctacatggaaaataaatctacatgtaagaccataagtgcttgtatcttaagtgaaatattggtgtttaagtaggaattccagtttggtaatgtataagtactgtttttttcacaacttgactttgcagataggctagttatggttattatttccccttccacctccttctataagggccaaaccaaagaaagagagggagaaggagagggagaggagaaagagacaggaagagggagagagaagaaaacaaagagggagggagagagggaaggaggaaggaaggaargaggtaagaagcttgaggcaacatacaaatagcagat

SEQ ID NO: 322926 - DNA, 600 bp, Homo sapiens
gaattgttcacaaaccctatttctgaaatggcagtctatagtaaccatgacatgagtttacatccactgtgacagatgctttctaaattatttgtaccactgctgtctgctaaactgaggataagttgaatagaggcacaacctgaatatctgtaatttatatgactctctgccaaggctgctgtcaacaaaaaccagtggaattcatctgcagtttcacatgaccttctgaatttttgcaaattgactatgcttatctcgagacagaacttttatttctccccttattagtggcaagttggggttgtactcctatctgcagactgcaacatgtgtctgtccagtaaagccactggcccggctccatatgtggtgagattatagcaatgggaagggcttttgtgggaaaactggaatgtagtccaggttttttcaccagatttcctcacattcttcagcttggagagctttctgtttcatatatagtcatggtcagttatttctttatcagaatccatttgtttattcatttmtactaattattttggcatatacattacaataacttaagaatactttatttggagattggcaaggttt

SEQ ID NO: 322927 - DNA, 542 bp, Homo sapiens
actcatcacacccggggtatgcacagaatgggcactgctttcggctggctgtggagtggtgttgtacaaggcatttaacatctcaaaatgaaataatatgtggaaaagttgtmaagtgctgttcagctgagaatcattatggctaatgctaatccaattctagttattttgctctacaatgaagactaggactggggagcactctgtaaacatacactgacttatgaatgtataattataaagtaatgaattctgcatttttcattttcgcttgataaatgtattcagcaaacatttattgagtgcctaaatgttttatggccatgaatatatttcatttgcatgtcaaattaaacatttcagagaggatagggatcactgagtatttatcgaatgtcttctctaactttgaaattattgtcccaatctctactctggcctcatgcctcagttctcccttagaattcccagaaagcaaggagttattgctgcacagctagccacatgctgcatcccgctttctgctgccaactgcttctgac

SEQ ID NO: 322928 - DNA, 542 bp, Homo sapiens
actcatcacacccggggtatgcacagaatgggcactgctttcggctggctgtggagtggtgttgtacaaggcatttaacatctcaaaatgaaataatatgtggaaaagttgtaaagtgctgttcagctgagaatcattatggctaatgctaatccaattctagttattttgctctacaatgaagactaggactggggagcactctgtaaacatacactgacttatgaatgtataattataaagtaatgaattctgcatttttcattttcgcttgataaatgtattcagcaaacatttattgagtgcctaaatgttttatggccatgaatatatttcatttgcatgtcaaattaaacatttcagagaggatagggatcactgagtatttatcgaatgtcttctctaactttgaaattattgtccyaatctctactctggcctcatgcctcagttctcccttagaattcccagaaagcaaggagttattgctgcacagctagccacatgctgcatcccgctttctgctgccaactgcttctgac

SEQ ID NO: 322929 - DNA, 544 bp, Homo sapiens
tataaacattttctctatgttagcaatgaaaatcctttccttaagtaatgagaaatggcaaaaaccagaatatacaatactccttacataataagaaaaagtatttgagcatcataaaatgaatacagaaaaatctcaaaatacaaaatcctaatttatttaaataaagtaaaatctattttgtttcagtggccagtaatgaacattaaagctaatgaayaaaaaccctctgtgactattcaagtgaagacaaatcaacaattaagggtgtagaggggcaaagtacatttgagactgccttattaatattaatcttaaaatgcatgaaagtatcagcacattgtaagaaacagtatatgacataagtattcaagaaaaagaaaaaataattgggctatatttttctgcaaaaaattttataagtatagattttagggaagtgtaatttacagaaatgtttgaattattcagatcttttaaaatggattttagagtaggcacagaaatgcagttatagaaaaaatgtgtatatataaatataatg

SEQ ID NO: 322930 - DNA, 562 bp, Homo sapiens
ttaggctctctttcctgctcctatagtcctaaactggcctatagtcctaaattagcaagcctacttagwttataaattacttaaattataatttacatccaatggtctaagtaggctggccaatgtgccagtcatatgtatactctttcccataagcatcatcatcatactttgctttctctctctttctttaaggtacaatctaggcttcacctcctctggggatacttactttaaactatgcctcctattcccccaaagacttcttgctttttagccgactgtcctgcttattctcacagcataccttagttcccgtaatagtggccagtgtgccatggcataggcatgctgagtagggtgggaaaaggagatgtttcatgatatgacataggaagagggaaagggttgagctagagctagggagtatattttcagcttggtcttcaatcagacatgttctttctcaccagaattcaccataccacacgagaggaatttcactagcctgaaagaacacagaaagtggagcaggccgtcagcattaggaatatgatattga

SEQ ID NO: 322931 - DNA, 386 bp, Homo sapiens
aacttgacatttataatttacatatagcaaatatgctttatactaaattaatgaagtgaagcttttgtttttatgatacaaagacaaatgtgtgctatctgtatgttaatatccagtatccagaagatagatgtcttttgcatttttaagcagcatagtttaagttcactaattcgtttttgcattcattagtttttttttaattttaataactcagtggtaagtrttctctcaggggtaaaatagatttgtaaaaaaggtcagtttttgtgctgctctttagtttgctgggataccaagaagagagaaatgtctgactcagtgctaaatatctcttatgttgaattgagctatcctatttctaagtgtgtgtcatcagaaattct

SEQ ID NO: 322932 - DNA, 557 bp, Homo sapiens
atacaaaatgggagatattaccactgacaccacagaaatacaaaaattatttaaggctactaggaacacctatatgcacacaaactggaaaatctagaggatatagataaattcctggaaatatacaacyctcctagattaaataataaagaaacagaaactctgaacagacaaataacaagtagtgagatttaaatattaatttaaaaaatgccaactaaaaaaacttcagaaccatatggattcacagttgaattctatcagacatttaaaggagaattggtgtcaatcctgccaaaagtattccaaaagatagagaaagagagaatcctccctaaatcattttatgaagccagtatcaccctaatactaaaatcaggaaaggacataacaacaacaacaacaaaactacagaccaatatccctgataaacatagatgcaaaaatcctcagcaaaatactagctaagtaaatccaacagcatatcaaaaagataatccaccatgatcaagtgggtttcataccaggggtgtagggatggtttaacatacacaagt

SEQ ID NO: 322933 - DNA, 492 bp, Homo sapiens
caggcagcattcaccataagctgacttaagagaccttgggccttaaaggaacgttggctggtaggctaaaagtagtcctatggcttgtggtggcagtggatatggggtgaggctcctctgcctttggaaaggggagaaaagagtgggaaagaatgaatcttgtggtttgagtgtcagctcagctgcaatatrttacaatgtgaaggaaatgtctagggcttttgactctaatccctgactcctggatggcattactggacacacccaggaactgggggaacttgatgccctgaagaaaaaacacaagcctagctggctttgccagctgtggattatggagccccagggccttgagcagacaaaggcagcaaccagggaattgttacagcctgccttgggtgagacccagcactatgctggcttcaggtctgacccagtgcagtcacagtggtgatggccacaagggtgcctctgtcactccacccccagctt

SEQ ID NO: 322934 - DNA, 492 bp, Homo sapiens
caggcagcattcaccataagctgacttaagagaccttgggccttaaaggaacgttggctggtaggctaaaagtagtcctatggcttgtggtggcagtggatatggggtgaggctcctctgcctttggaaaggggagaaaagagtgggaaagaatgaatcttgtggtttgagtgtcagctcagctgcaatatawtacaatgtgaaggaaatgtctagggcttttgactctaatccctgactcctggatggcattactggacacacccaggaactgggggaacttgatgccctgaagaaaaaacacaagcctagctggctttgccagctgtggattatggagccccagggccttgagcagacaaaggcagcaaccagggaattgttacagcctgccttgggtgagacccagcactatgctggcttcaggtctgacccagtgcagtcacagtggtgatggccacaagggtgcctctgtcactccacccccagctt

SEQ ID NO: 322935 - DNA, 607 bp, Homo sapiens
ctgtcttcttctgagccttccaaactgttccaacctctgcccattacccagttccaaagttgcttccacagtttcatgtatytttatagtaacaccccactctaggtatcaattttctgtatttgttctttctcacagtactataaagacataactgaaagtgggtaatttatggagaaaagaggtttaattgactcacattttcacaggctgtacaggaggaatgcctggggaggtctcaggaaacttaccatcatggcagaaggcaaaagggaagcaggcagaatcttcacatggcagagaaggagaaagagaggaaagggagaagtggtacacactgttaaacaaccagatattgtgagaactcagtgactactatgagaacagcaagggggaaatccacccccatgatcaaatttcctcccactaggtctctcccccaacattgagaattacaatttgacatgagattttggtcgggacatagaatcaaaccatatcatagaccaatggaacagaacagagaacctagaaacaaatccacatgcttacagtaaacttatttttgataaaggtgataagaacctacactggggagaagacagtt

SEQ ID NO: 322936 - DNA, 552 bp, Homo sapiens
cttggctgagaaattcaggtgtgaattgataagttgttgtaacttcactaagttttgatcaatttgaatttagaaygataaaacgttttttcattccttaagagaaacaaaccggattgagaatacctaaatagtttaatgtcaaaattaaaatgaagttgccacataattaataatatgcatacttgttacagagccaaaatctgcctggacatatgagccatttatatacataatgtacataatgataaggtaatttttattctaccacatcaagcatttctaaaatcagttttctatttctgtctccctcttcacctttttttttgaaacagagtctcactctattacccaggctggagtgcagtggtgcaatctcgactcactgcaacctccacctcccaggcctaagtgatcttcccaccttagcctcctgagtagctgggactacaggtgcacagcaccatcgtttggctaatttttttgtatatttgtagagactctaaaaggattagtccagttaaaataattctaaaatacccctaaagatat

SEQ ID NO: 322937 - DNA, 588 bp, Homo sapiens
catttccctctcaacaaatccacagtggccctcaaaaccaacaaccttgcaatcatggtagccgtgaaaaccatcaacctaacagccaatggagaaaagagaatgaattttgaggttctaaaaagccayatctacacagaattgtcactatttgacttatctaacagtccctcggaaacctccactcacagggcttacctatttgacctgactcagagctggctcaaagtgaacacccttttttgccaaggaaattgctgaaacagttcagtggcaattatttaatgttacagctgcctgagtcagtgatagcagctgaaacaaagaagaaattgaccaaaaaaaaacttataatgaaaggcagagagtatgtccacagaagttttgaaaaattctgatataaatcctgagaatctagaaggcaacatgtgtgggcagggctgtgtatatgtcaagtaacataggagaaggcactcatctctcacctgtggctgacctagaagctctaaccaagcaggaagttaaggataaggcagagttgcctaccattttcagaagtactgaaggcatgcccaacacacaatacag

SEQ ID NO: 322938 - DNA, 588 bp, Homo sapiens
catttccctctcaacaaatccacagtggccctcaaaaccaacaaccttgcaatcatggtagccgtgaaaaccatcaacctaacagccaatggagaaaagagaatgaattttgaggttctaaaaagccatatctacacagaattgtcactatttgacttatctaacagtccctcggaaacctccactcacagggcttacctatttgacctgactcagagctggctcaaagtgaacasccttttttgccaaggaaattgctgaaacagttcagtggcaattatttaatgttacagctgcctgagtcagtgatagcagctgaaacaaagaagaaattgaccaaaaaaaaacttataatgaaaggcagagagtatgtccacagaagttttgaaaaattctgatataaatcctgagaatctagaaggcaacatgtgtgggcagggctgtgtatatgtcaagtaacataggagaaggcactcatctctcacctgtggctgacctagaagctctaaccaagcaggaagttaaggataaggcagagttgcctaccattttcagaagtactgaaggcatgcccaacacacaatacag

SEQ ID NO: 322939 - DNA, 588 bp, Homo sapiens
catttccctctcaacaaatccacagtggccctcaaaaccaacaaccttgcaatcatggtagccgtgaaaaccatcaacctaacagccaatggagaaaagagaatgaattttgaggttctaaaaagccatatctacacagaattgtcactatttgacttatctaacagtccctcggaaacctccactcacagggcttacctatttgacctgactcagagctggctcaaagtgaacacccttttttgccaaggaaattgctgaaacagttcagtggcaattatttaatgttacagctgcctgagtcagtgatagcagctgaaacaaagaagaaattgaccaaaaaaaaacttataatgaaaggcagagagtatgtccacagaagttttgaaaaattctgatataaatcctgagaatctagaaggcaacatgtgtgggcagggctgtgtatatgtcaagtaacataggagaaggcactcatctctcacctgyggctgacctagaagctctaaccaagcaggaagttaaggataaggcagagttgcctaccattttcagaagtactgaaggcatgcccaacacacaatacag

SEQ ID NO: 322940 - DNA, 563 bp, Homo sapiens
taagcacatgtgtcagaataacaggatatttatggggcactaatctcctccttaattaaaatattataagattataaagggtttgtacatatcttaccttatggccaaactaattaaaatggataatttgtttataaaattttattaaaagttagctttagcattaataatgcactaatgcaaaggcaaaatttgattttcgcttttcaacaagaatttcatgtaatattgagaggtgaaagacttttgtttgtctttctagtaaactgcaggataaaagaagggagagagaagagacagattcagttggcttcatgctatcttcactgaatcttgtttggatagctgagtctcccttctatcagagtaaaggtttttgcctttttgaaatttttgagttattacttcacctaaatgaatcacctgtgattctatttagtgatataaagtgttttaaacctttgatatttgacaaacctccaaaaatgaaattctrcgttattttttacttcattaacctttaagtattaagtcccctgaagtccaaaataaatatattcaac

SEQ ID NO: 322941 - DNA, 589 bp, Homo sapiens
aattaggcaaggcaaagcaataaaaggcattcaaataggaaaagaagaagtcaaactatctctctgctgctgcygattatatacatagaaaaccttaaagacactgcaaagaaactcccagaactaacaaaaaattcagtaaagtttcagaatataaaatcaatgtacaaaaatcagtcacatttgtgtacaccaaaaacattttagctaagaaccaaatcaagaacacaattccatttacaatagccacaaaaattgaaatagctagaaatttatctaatcaagaagattaaagagctctacaaagagaataacaaaacactgctaaaagaaatcagagatgatacaaataaatggaaaaatattcgatgctcatagagtggaagaatcaatattgttaaaatggccatactgcccaaagccatttatggatttaatgttatccctatcaaaataccaatgttatttttcacagttagaaaaatgaattctaaaaattcatatgaaaccaaagaaagcctaatttaccaaagcaattgtaagcaaaaggaacaaagcttgagtcatcacattactcaacgtcaaacca

SEQ ID NO: 322942 - DNA, 522 bp, Homo sapiens
tatgtgattactgtgcattttatgcctgcatcaacacatcccatgtacccaataaatatatgtatgtacaatcatatatatatgtacaatcaagaaaaatcattagatttatattccaacagcaaacaatctgaaaaaactcaagaaaataattctgcttacaatatctacatgtaaaatcaaattaaacaccttgaaaatatctcaatcaaacaacaactagaaaacactgatgaaaaaaattgaatgtgacaccaaaaattggaaagatatttcatggtcctggattagaagaatcaatattgttataatgtccataatacacacaacagtttatgcatttaattcaattgctatmaaaataccaacgacattctccacagaattagaaaaaaattctaaaaaacacaaaagttaaaataagaaattaaaaaaacttacatcgaacaacaaaagttcaagaatagtgaaaataacaccaaactggaagaattacattatcttatttaaaattatactaca

SEQ ID NO: 322943 - DNA, 536 bp, Homo sapiens
ttcctaggcaatattcttatgcagtttccttggatatatgcygatttggaatttagacatcttcataatgggtaataaatatttcgagcaaaggagtgggggtaagaatatctcctggtttggagagaaagtagagagaggcagtgtgtttacaaacaaaaataggaccaggaatagtcaggatgcatcatactgttctgtaagcaaaggatagaaaggttagtggggcctagaatcaaccaccaagaacatttaatatctactgtgagcaagatactctgctatgtactgaatctgaagctcagggagggtgtgtgtgtgtgtgtgtgtgtgtgtgtgtgtgtgtgtatgtacctgcatgtgtatgtgtttatttctgtctgggtggtcatggaaattagagatagctcaatttgaatgaagggaaaagtaagggaggactaaacaaaaaataaatacttatgtataagatttggcttgacttgaataatgaagcaaagaattaaaaaccaacctctctatttaagatttacctt

SEQ ID NO: 322944 - DNA, 509 bp, Homo sapiens
tgccccctaatgcagatatggctgcaatgatcaaagacttagatcagaacactcaatccctaaatcacaacactcaactccctttgaatacttggaaagccttcccaagaaggacaggtaaaaacaagcccagatggtgaaaattacaataaatactgaactcctcaatgcctagacatttatgaacattcatttcacatagaaatggctggttaccctggaatttctctcacagatgcttcataccctttgtccrtttcttggtctcttggctactggctactcacttgtggtgagcaaatacatgcaagcttacacccaaggtctgagggagctgagaggttaaagaaagaggctttacaaatccagtttctcagaaagaaacattttaatagggactcaggaacagaagcaatgcctctggtggccaaaagaaaatttatctctgcatctgccttctagaaagtatttatatagcaaactctttttttcttggtaaaatgtgtgca

SEQ ID NO: 322945 - DNA, 665 bp, Homo sapiens
tgacaccaaaaattggaaagatatttcatggtcctggattagaagaatcaatattgttataatgtccatactacacacaacagtttatacatttaattcaattgctatcaaaacaccaacgacattcttcacagaattagaaaaawattctaaaaaccacaaaagttaaaataagaaattaaaaaaacttacatcgaacaacaaaagttccagaatagtgaaaataataccaaactggaagaattacattattttatttaaaattatactacagagctatagtaagcaaaatagcatgatactggaataaaaacagacacatagaccaatgaaatagaacagggaactcagaaaaaaatacatacatctacagtgaactcattttcaacaaatgctcccagaacatgcaatacagcaaggacagtttcttcaataaatggtgctgtgaaaactggatatccatatgcaaaagaataaaagtagacttctatatcttgccacatacaaaaagcaattcaaaatggattacagactttaagacttcaaactataaaactacttaaagaaaaacttgggagaaacattccaagataattgtctgggcaaaatttttttgagtaataccccacaagcacaggcaaagaaagcaaaaatggacaaatttg

SEQ ID NO: 322946 - DNA, 516 bp, Homo sapiens
gctgcaaaaaaaacgttcaatgttacctaacaagagcattccataactgacactaagctgataaataataatcttagaattttataatgcattcccattttcaaagtgctttcacagacctcatttgatcaacagtgagaatcataaaagcaatagttgaggctctatattaagagatttgacaaaagttatcagtttgagtgcctgaacaccataatccttcactcctcatcctattaagtgtgttttcctattctcctggttctattatttccacaaaggaaaatgttcaaccaaccagtaaccacatatttgccccccracccagcacacaacacacaatttggcccacagtttttctgtatgggtgagaaataaattgttaggcatggaagaaaaggcaatctacaaactgacaaaatgaatctgaggttaatccacagatgcatgacccaaatcaaaaatgatgaaactaaacaagctgagcccttgttctataaccatagctattatact

SEQ ID NO: 322947 - DNA, 516 bp, Homo sapiens
gctgcaaaaaaaacgttcaatgttacctaacaagagcattccataactgacactaagctgataaataataatcttagaattttataatgcattcccattttcaaagtgctttcacagacctcatttgatcaacagtgagaatcataaaagcaatagttgaggctctatattaagagatttgacaaaagttatcagtttgagtgcctgaacaccataatccttcactcctcatcctattaagtgtgttttcctattctcctggttctattatttccacaaaggaaaatgttcaaccaaccagtaaccacatatttgccccccaacccagcacacaacacacaatttggcccacagtttttctgtatgggtgagaaataaattgttaggcatggaagaaaaggcaatctacaaactgacaaaatgaatctgaggttaatcyacagatgcatgacccaaatcaaaaatgatgaaactaaacaagctgagcccttgttctataaccatagctattatact

SEQ ID NO: 322948 - DNA, 538 bp, Homo sapiens
ataaacttcctaaaagccatattatccttatagaaagactatctttgccatcaaatgaaactgatgtgatctatgaggcacaatgacaggaaagatgactctaggagatgtcctagggaaacctaaaatgcagtctctttgagktgtaattctttggccttttgaatacaatgaaacccaaaaatttgcaacaaaaatatatacagacatgtctttttgcatgagcactttgtttcttacattttcctaatttgtcaaataaaattaaacttcagggacaattattaaaatacataagcaagatcatctccttacctaacaaaacattttaaagtttacattctcatcatgaactgtgtaacaatataaccaccaccttccagaaaaaaaacactatttttacactgaaaaccatcaatgactataatttaagatgagattacctatatccttctgtaataactactagcagattaaaatctaacatgttttcattatttttcttatcaactagctattttgtaggtattgattttat

SEQ ID NO: 322949 - DNA, 569 bp, Homo sapiens
aaaaatcatgaagaaaactatacaaagtgtcaaaatccaattgcccattaccagtgaaaaagaaaaattgtgaaaagctgccagagaaaagggacacattgtgacgtagggtccagaggaacaaagacgaggatgacagtagatttctcattggaaataatgtcactcagaagacaatggaacagtgtttttaaagtaatgaaagaaaaactacttaaattgcaaaaaataataagctagagcaaaaagaataacaatgtattaaggggtttgtaatatatgtagaagtaaattgtgctataataatagaacaaagatcagggtgagataaatggaagtagatggttataagattcttatactatacctgaagattgtgataagttaaagatactcacaaaaaataaattaaccacaaaaaatcataacagagagttatagcttataagccaaaaaggagataaaacagattaatcaaaaacrcgaaactgatgcaaactaaggcaggaaatgagaggaaacaaaaacagatgaggcaaatagaaagcaaaattaatacaaaagattta

SEQ ID NO: 322950 - DNA, 649 bp, Homo sapiens
tacatactcttcaaagatattatatacagtgtggtgctgagctctattttattttctaaagagattagatgaaaggttttaaagttgatttatatatgtctaattctaaatactatggaatcaatgggaagatattttctggacttttctgtttactaaatattaatttttaatctgccattttaaattataatcaatgagctgcttttggtttagtaggaaatacgtatttcttcctgaaagtaactgatgaaaaaataaagtgaatgcttttataatttacctgaaagtttggaaacctcaaaagtttttttgaatttatgagaagttaaagttactctcaakctgttcttccttttcttctctggctcagtgaagagccaattaatgtcagcagtgttggctgtatttgcaacacggaccgttgtcttcttggagccaaggtgaagtgaaggctactttgagtcaagactgtgaaagaaaagagatttgaacatatttgctctttcctcgtagatttgtttctacctccacctcctcaagcttcaaggaaggtgtgaagacaaagtatattgtttataccggatactttagagcaagcaagggaagctgaaaatagcagcttaaaaatttgtgacagttttccctt

SEQ ID NO: 322951 - DNA, 591 bp, Homo sapiens
catgcagtaaataaatacacagcatatctgtggcattaacacttcatggtggaaaatgattaggaaaaaatatctgaaatggctccttaggtcggcaggggggtgggcggcgatcatgaaaaaacggttgagaaaaacattgaaatagaaattgagatgaatgtattctaatagctttcttttcttgttaatctgcatatgcattcataccatatacagtcttattgtggcagtaagaacttgactgcaatttttgccaaagtttggaactttatattttctttaaatgtggagaagtaattttcatttcaaggacaaattaattatagacctgctataattttcagggaggaattttatttttctagtaaagctctggcatgaattatacatagcgatatcatgattttaaagtgtaacttaaaaggatgaaagaggggtgttctggtggcttctctttcccttatgtatctctctcatgtatcacattcctwttaagcacaatattctgaatatcattcactgttttctatcgcaacctgcaatttgagagttaagaaaacatcctgttaattaatttccgaagcacct

SEQ ID NO: 322952 - DNA, 401 bp, Homo sapiens
taatggtattcattctgattcacacattattttgtcaaattattacaggttaatgagaaagtcctgttccttcagaaagtagcaacttaccaaataacgttatatccacatgtgtggtttatttatatgggtatgtttacatttacaataataattaagaatgattgaacttttaaaaattacatcttttctcttcggccagaaaatstttgctatctgaaattgttttgagatctagaagaaaacagggcagcccaagtaactgagaataaaggaattcaaactaacattttaaatagaaacttcacgtggatgtggagaagactgtggtgtttaaccactcaacatgtgttggactgccaccgtgttttaattgtaacaggtgaaatatttgccagtag

SEQ ID NO: 322953 - DNA, 543 bp, Homo sapiens
agttctggcttctggaatgttccacattaaaaaaaaaaaamaaaacagtgaggacaaaggatctgaggggaatttgtttgccatagtcaaagtggaaactggataaagagttgtagagattgactgatgtcagtaaaggaagggaagctgagaaaaccagattttgcccagagagaaagataggctaaattaaaaaaaacaaaacaagtaaagaaagaaaaaaaattggaagctttctcagcttatgtgattagagaaggaagagaaaaaggtaagtagtacatgatccccaaaagactatttttttctgaatgagaaagaaaaatgaatggcagtagggctacatgggctgtgatgatagcagctggggtgggctttgggcaaccaggacattatactagttctttcctataaagagagaattaggctttaaagagctgccaccaccttgaaaccatgttatgttttaaacatttgattgtaaattgacaaattataatggtatatatttatggggtatgaagagatgttatgatatgtgta

SEQ ID NO: 322954 - DNA, 583 bp, Homo sapiens
tttagctgaaaaggtaaatagtaatctgtaagtttgatcattctttattgtgggtttggggaaacagacaccctcatatactcttggcaggtatgcaaattagtacaagaggttaaaagagtaatttgaggaataatctaatacaacttaaaatgttcataactgaactattttgtctattccaattctagggatgattctatagaaactcttgtacaactgcacaaaagagaatatataacttgcagtaactgtttgtagtggtacaaaaattagaatcaatccaaatatctattattgcacaatataaaaaaatatatattgggttagcatattgtcatttacataagatacagaccttcatataataacataagaaagacttaaaataaattctaaaagatgacttccaggggagtaaagttcccatttttccttaagaatatatttttatatattgtacctgtccattttgaagaaaataktcccagcttcaaatcacatcatctgcaaataagtataattttatttcctccttttcactctgtatgccttatatttcttttccttaccactttgggct

SEQ ID NO: 322955 - DNA, 563 bp, Homo sapiens
aatttgaggaataatctaatacaacttaaaatgttcataactgaactattttgtctattccaattctagggatgattctatagaaactcttgtacaactgcacaaaagagaatatataacttgcagtaactgtttgtagtggtacaaaaattagaatcaatccaaatatctattattgcacaatataaaaaaatatatattgggttagcatattgtcatttacataagatacagaccttcatataataacataagaaagacttaaaataaattctaaaagatgacttccaggggagtaaagttcccatttttccttaagaatatatttttatatattgtacctgtccattttgaagaaaatattcccagcttcaaatcacatcatctgcaaataagtataattttatttcctccttttcactctgtatgccttatatttcttttccttaccactttgggctgtgtaagactttcagtgtgatgttgaagagcattgagakagaacatccttgccctgttgctgctctttagggggaaagtattcagtctttccttatgaagtg

SEQ ID NO: 322956 - DNA, 565 bp, Homo sapiens
tggtttattaaaccaaatggattgctatagaatgtcaggctcatagattgcagacaggtagtgagtctcaaggcatgtgcctttctttttcctgtggatgtgtcacgtcggaataacgaactgtccatcatagagggagtgattaaatacttttccttcccatcaaatgtaatttctgtaagactgcatcagttgaagcatacagctaggaaattatgttttccccactctccccctgccatgctaattcctagatatgcattaactgcacatgctgccaacactggcaaaagcaaatgcgtcagcaaagtgagctgatggaaccctgtgagtggtatttctcctccttttaagaagctccttgagttctgagacaaatatatatttgtgttcagatcaattcttggcyttactttataatttttcttatattcatgtattactttgttgaatggtagacttttgactggctctcagttggtaacttcagtgctttaggacaagttggagcagcatgcagtttctaagagtccttatgatttttaatgggctagactggtgaata

SEQ ID NO: 322957 - DNA, 565 bp, Homo sapiens
tggtttattaaaccaaatggattgctatagaatgtcaggctcatagattgcagacaggtagtgagtctcaaggcatgtgcctttctttttcctgtggatgtgtcacgtcggaataacgaactgtccatcatagagggagtgattaaatacttttccttcccatcaaatgtaatttctgtaagactgcatcagttgaagcatacagctaggaaattatgttttccccactctccccctgccatgctaattcctagatatgcattaactgcacatgctgccaacactggcaaaagcaaatgcgtcagcaaagtgagctgatggaaccctgtgagtggtatttctcctccttttaagaagctccttgagttctgagacaaatatatatttgtgttcagatcaattcttggctttactttataatttttcttatawtcatgtattactttgttgaatggtagacttttgactggctctcagttggtaacttcagtgctttaggacaagttggagcagcatgcagtttctaagagtccttatgatttttaatgggctagactggtgaata

SEQ ID NO: 322958 - DNA, 532 bp, Homo sapiens
tagacttttgactggctctcagttggtaacttcagtgctttaggacaagttggagcagcatgcagtttctaagagtccttatgatttttaatgggctagactggtgaatagtcataagacttagtaaaacatttggcaggaaaagttagaatttcttagggagattaatgaccattgcaatttttccttggattgttccacagggtgcctctggccttaatgaaaaccaagtgaaaactttgagccaaattctagaattattgttcgtgcctttkctcatgtggtcaaagaatcctaatgcaggttcgaggctctacttcattctgtggtcgattagtttgttcattcattcactgaataaacacacctatcacgtgccaggcaagaggatgcaatgaaacataaaatccataattgtactctggtatctcatagctgcaaggagtgacaggtgtgtaggcccatgggcaagccacaggataacaagtgaagacaaaacatcgtggtgattcaaatggaaatggccagtttt

SEQ ID NO: 322959 - DNA, 532 bp, Homo sapiens
tagacttttgactggctctcagttggtaacttcagtgctttaggacaagttggagcagcatgcagtttctaagagtccttatgatttttaatgggctagactggtgaatagtcataagacttagtaaaacatttggcaggaaaagttagaatttcttagggagattaatgaccattgcaatttttccttggattgttccacagggtgcctctggccttaatgaaaaccaagtgaaaactttgagccaaattctagaattattgttcgtgccttttctcatgtggtcaaagaatcctaatgcaggttcgaggctctacttcattctgtggtcgattagtttgttcattcattcactgaataaacacacctatcacgtgccaggcaagaggatgcaatgaaacataaaatccataattgtactctggtatctcatagctgcaaggagtgacaggtgtgtaggcccatgggcamgccacaggataacaagtgaagacaaaacatcgtggtgattcaaatggaaatggccagtttt

SEQ ID NO: 322960 - DNA, 544 bp, Homo sapiens
gagtgaaacgaggcactccagttcctgccccatgaaggggrtcaaggtcaagggaacaatcccgtctcatcagtagtggagagagatgttctaacaaacatgtttctctaaaagtggggccaggggagaccttattgatcactagacatagatgccacagagaaccaagctcagacaaacagagtagcgttgcattgccacagccagcagctggtacattttatttcaagggagcaaaaactttcacagaaatgaaatgcaaagactcagcttgtagggattgtattttctgcaagtacccaagcaatggctgaggacaccaccctgcaggaagaagacgcataccagcacaaatggcagtgaccaaggcagtgtgagtcactcaaggagcaccaaaatgaaccgtgcagaaactcagcgcttacacacaattcaggtttatcaccagctgcttagaagagcagtccaacactgacatgaaaatctgataggtgccttttatgcatcattattcacaaaaagaaataactctatatctatatcc

SEQ ID NO: 322961 - DNA, 563 bp, Homo sapiens
ccctctggttcccgcactcacttgcttgcatgcttcctctcaccaggagtggccagctgagtgaaacgaggcactccagttcctgccccatgaaggggatcaaggtcaagggaacaatccygtctcatcagtagtggagagagatgttctaacaaacatgtttctctaaaagtggggccaggggagaccttattgatcactagacatagatgccacagagaaccaagctcagacaaacagagtagcgttgcattgccacagccagcagctggtacattttatttcaagggagcaaaaactttcacagaaatgaaatgcaaagactcagcttgtagggattgtattttctgcaagtacccaagcaatggctgaggacaccaccctgcaggaagaagacgcataccagcacaaatggcagtgaccaaggcagtgtgagtcactcaaggagcaccaaaatgaaccgtgcagaaactcagcgcttacacacaattcaggtttatcaccagctgcttagaagagcagtccaacactgacatgaaaatctgataggtgccttttatgca

SEQ ID NO: 322962 - DNA, 544 bp, Homo sapiens
gagtgaaacgaggcactccagttcctgccccatgaaggggatcaaggtcaagggaacaatcccgtctcatcagtagtggagagagatgttctaacaaacatgtttctctaaaagtggggccagggragaccttattgatcactagacatagatgccacagagaaccaagctcagacaaacagagtagcgttgcattgccacagccagcagctggtacattttatttcaagggagcaaaaactttcacagaaatgaaatgcaaagactcagcttgtagggattgtattttctgcaagtacccaagcaatggctgaggacaccaccctgcaggaagaagacgcataccagcacaaatggcagtgaccaaggcagtgtgagtcactcaaggagcaccaaaatgaaccgtgcagaaactcagcgcttacacacaattcaggtttatcaccagctgcttagaagagcagtccaacactgacatgaaaatctgataggtgccttttatgcatcattattcacaaaaagaaataactctatatctatatcc

SEQ ID NO: 322963 - DNA, 544 bp, Homo sapiens
gagtgaaacgaggcactccagttcctgccccatgaaggggatcaaggtcaagggaacaatcccgtctcatcagtagtggagagagatgttctaacaaacatgtttctctaaaagtggggccaggggagaccttattgatcactagacatagatgccacagagaaccaagctcagacaaacagagtagcgttgcattgccacagccagcagctggtacattttatttcaagggagcaaaaactttcacagaaatgaaatgcaaagactcagcttgtasggattgtattttctgcaagtacccaagcaatggctgaggacaccaccctgcaggaagaagacgcataccagcacaaatggcagtgaccaaggcagtgtgagtcactcaaggagcaccaaaatgaaccgtgcagaaactcagcgcttacacacaattcaggtttatcaccagctgcttagaagagcagtccaacactgacatgaaaatctgataggtgccttttatgcatcattattcacaaaaagaaataactctatatctatatcc

SEQ ID NO: 322964 - DNA, 565 bp, Homo sapiens
tcttataaaccatgaattaatttttatgaattatgtccaaagagcttaagtaaaaagctaatatttcataagtaattccagccctctttaacagtacaagtctctggtgtgtaatatttaggtaatgattatcataaaatagacatcttttgagggcaattatgtgttctcaatacttctttatgagagagctgggaggaggatgtcattacatttgacagtatatttatctcaccaaatagtcatgatattctgatgtaaatgcagttatcttactatatgcgagtgtgtttccggatgcaccgagtactgattgtttcactaaacctgttcagacgtgaaagatggcatatctcagtcctgaaagtataggctgtttctagccatgtggagtcagtggttttgcttatgaaaacaaagctttacatctgcrgggtaaattttcccggggtcagacccaggcaggggaggagagataactcagagagatgagcagaagagggcatgtccgggaagtgacaagcacacttgaagagaaaggggaggatttgtacactggtgtttt

SEQ ID NO: 322965 - DNA, 558 bp, Homo sapiens
ttctagccatgtggagtcagtggttttgcttatgaaaacaaagctttacatctgcagggtaaattttcccggggtcagacccaggcaggggaggagagataactcagagagatgagcagaagagggcatgtccgggaagtgacaagcacacttgaagagaaaggggaggatttgtacactggtgtttttgtttttgtttttgtttttataaggaaattgggattgactgagacaggcccctaggagaagcagtgagctagctacrtactcctacctatatcttcttgttttgggattaatttaacatggaagatatgatggtaacttatattgctataatgtttttaggttttcacaaccattttggaatattttatttgaacctcccaatattcctataggataatgatggactgttgttcctcaatcatgcagagcaaacagaggcttacagtataattcagttagtgcaaaatgaaaccagaacccagaaccccaaaccaggcttccaaaatccagactctgccatcggatgacaggaccatgtctgaaacatcc

SEQ ID NO: 322966 - DNA, 663 bp, Homo sapiens
ccattacccaaattacataaaatgtacccattaagtaagttctcatcatccacaccctccacctgctcagtcttctgaggcttcaccctctgtatcattagggtgagttttctctgaggccactctccatggcttgcagatggccatcttgtggttgtgttctcacatcattttgcctctgtgcgtgcacgtgtctggtgtcttttttgcgtagaaattccttcttgttttaaggacaccagtcatagtagattagggctaccctgcagacctcattatacttyaactacctcttaagatgctctatctacaaatacagtcacattctggagtactggaaagtaggacttcaatatataaattttagaagacagcagatacagtttagctcataacacacacctaggcatatttagacaggagtctttgtgttgtttgcctttgtcactattaagaatgcaaaaaactcatgccaataagaaatgcttataaaacttttaaaagagccacacaaatgtacttttgattatgcaatgtcatcataaaggaatgaagaatgaataatttaatatttcaccccaatctgtttcacttacataacaccaaacatcattttgtttcagatttctttttctttccctttctgtctcctctttcatattt

SEQ ID NO: 322967 - DNA, 663 bp, Homo sapiens
ccattacccaaattacataaaatgtacccattaagtaagttctcatcatccacaccctccacctgctcagtcttctgaggcttcaccctctgtatcattagggtgagttttctctgaggccactctccatggcttgcagatggccatcttgtggttgtgttctcacatcattttgcctctgtgcgtgcacgtgtctggtgtcttttttgcgtagaaattccttcttgttttaaggacaccagtcatagtagattagggctaccctgcagacctcattatactttaactacctcttaagatgctctatctacaaatacagtcacattctggagtactggaaagtaggacttcaatatataaattttagaagacagcagatacagtttagctcataacacacacctaggcatatttagacaggagtctttstgttgtttgcctttgtcactattaagaatgcaaaaaactcatgccaataagaaatgcttataaaacttttaaaagagccacacaaatgtacttttgattatgcaatgtcatcataaaggaatgaagaatgaataatttaatatttcaccccaatctgtttcacttacataacaccaaacatcattttgtttcagatttctttttctttccctttctgtctcctctttcatattt

SEQ ID NO: 322968 - DNA, 634 bp, Homo sapiens
agcagatcgaagcagcagatattgacctagaagaagactgaagaggtgggaacctggagcttgggaagacaggaggatttycatgtaatttagattaactggtggcaggggaaaacatgtgctttggttaaatatgtcttccaaaaagcatgtgttggaaacttaatccccagtgcaacagtgttgggaggtagggcctaatgagagatggttaagctgtgagggcagaatgagtggataaatgctgttatctcaaagggggtttgttactgagggagtaggatttttttaaacaggggagttcagccccctttcacacacacactctctccctctctcccgaacctttcctttccaccatggatgactcagccagaaggccctcagcagatgccagcacctccaccttggacttcacaggctccagaaccaagagaaataaatttctgttcattacaaattacccagtcccaggcattctattatagcagcaagaataaactaagacactgtgaacaaagggaacctgttaatatatttatccaactcaatgaaaagattttgctggacagaatgacaatcttcatcccctgcgaacacttatatcagctacttttattgatacaacctgggt

SEQ ID NO: 322969 - DNA, 552 bp, Homo sapiens
aactggaactgtaatgcaactgtgattagggctttcccagtgattttaaggaatgttttatttcactggctaattttatctttccagagcaaattgacccatgcctattcaaataaattaaactttcattttgcttgacccatatatggaggatttataattaattttgctaattcacatgattttctacaaaaaatggcaaaacataccattgtgtttctgtgttaacaagcattaagtgacaatarccatttctttttttgcgcttcaagaaatgtgaacttgtttttaaaaagttctctatagttttgaagctaattttataatatgatgagttaatgtccatttggaatttgtatgaaccctgctagaaactttttttgaaattttaaattcaaatgtattagtgacatctccaggtgttaaatacgtttgttatttcatatttgaaaattaacaaattaaaaataaataacagcagtgaatttgtgaatgaataaaaaaaagaagaaaaaatccaaatagacatgagaagttagtatatgaaatttg

SEQ ID NO: 322970 - DNA, 589 bp, Homo sapiens
gggacttagaaaaatgccaaaatgttgaacaggaacaaagtacagattaagaggaaagctttatgcaagaggaacatggatttctaggcatcaaatgccagcatgatgcataattggcagtctgtgccttgatctgatgaactttgctgattgacaccattatgttggaatctacggtaaggctcctacctccattctgtgactgtttggttttaggcacatgcatgcattattttactgaatctttaygaccaagctatgagattggtattattttcccattttttttcaagtgatgataggtactgaggatcagatcattaagtaactttcctagggccagaatattaaactggtaagtggtggagctaagattctatttttgcaactccaaaaatccatagataatcatttgtacgtctgtgttatgaatgattgaaaaaaaatgaataagtgaatgcatattttgattagcttgtttgataatttacagcaataaattaccccattatttgtagaacacattttacaataattttcagaactgtacttacacagatgaggtagtactccccaaaatgtggaactt

SEQ ID NO: 322971 - DNA, 589 bp, Homo sapiens
gggacttagaaaaatgccaaaatgttgaacaggaacaaagtacagattaagaggaaagctttatgcaagaggaacatggatttctaggcatcaaatgccagcatgatgcataattggcagtctgtgccttgatctgatgaactttgctgattgacaccattatgttggaatctacggtaaggctcctacctccattctgtgactgtttggttttaggcacatgcatgcattattttactgaatctttatgaccaagctatgagattggtattattttcccattttttttcaagtgatgataggtactgaggatcagatcattaagtaactttcctagggccagaatattaaactggtaagtggtggagctaagattctatttttgcaactccaaaaatccatagataatcatttgtacgtctgtgttatgaatgattgaaaaaaaatgaataagtgaatgcatattttgattagcttgtttgataatttacagcaataaattaccccattatttgtagaacacattttacaataattttcagaactgtacttacacagatgaggwagtactccccaaaatgtggaactt

SEQ ID NO: 322972 - DNA, 538 bp, Homo sapiens
tcttttgagtaaatatgcattactagagaaagaaataatacctgccatataggaacctcaagggtcccttttagcattcatgggctatggtttttatctctttttttttttttttgatctaragtccctctttatcttcccatcacaggaagtccttgctcctctcccaccccacgttcccttgaggctgttcagctggcacatccctccggggagatgaagcagcagagaatgatctagcctagaatggttcctcactccagccactgattccgtgcaaactgtggtcaaacttgccacttccaccagctccgtgctgtccatccacatactttgtcaacacatgctggcttcaaagttacagtgtttaattcgggcatccctgcactaacaatgcctaggaaaaaaaactgatctcaaacatctgatttgctaacaaaaacagacagaatttccaactctttagcttgaactggagcacattcgtttggaaccctaccatgtggttagttcattccattttggtgaatgagggtag

SEQ ID NO: 322973 - DNA, 539 bp, Homo sapiens
catttgcagaaggaataaatttaaatatacaatttcccagtgagtcaaatgtattgttgctatctctgtatcataattgggatgcctgaatttattagaaaatatataaaataagttatatttaagccaaattaactttatttgttataattccagaaaaaattccctattttcaaacccaaagaatctttggaaaaactgttaatgactttttttaaaggtgaatattcttaagaaacaactaaagtttaatgaacatatttgaatgtaaattatttgtgaaaattactaaatattaaagaaaaattttataattttcaagtaataatataattatgggtcagaaatattttaataaataaaatcttctgcaatcctaggaaaaaagraaaagattataactaaaagctataattagttggtttaattgtctaatcactaccatttttctggcttcttctctactgactcaaaagaacaaaaagcaaaacaaagcaaaaaagaaatgaggaggatgagttctcattcattacccttta

SEQ ID NO: 322974 - DNA, 507 bp, Homo sapiens
  misc_feature (1)...(507): n = A,T,C or G
cccaggctacagagcagtggcacaatcacagttcactgcagccttgacctcccaggctcacatgattctcccaccccagcatccctcagtaactgggactacatgccaccacaccccgctaattttttttcttttctttttttgaaacggagtctcgctctgtcacccaggctggagtgcagtgkcacgatctcgactcactcaccctgctaatttttaaatttttttaagaaatgtcatctccctatgttgcccaggctagtctcaaactcctgctgcctcagcctcccaaagtgcaaggattacaagtgtgaggcactgtgcccagctgggagagatttttctattcaaacnttgcagtctgcaggcctgcaatctgagatataattttcaaatatattctctgtctctcatatgtatatatatacacacacacacacacacataagttttcaattcttccaataaagaattttggattgctaatctctaaagagcaatatgttt

SEQ ID NO: 322975 - DNA, 507 bp, Homo sapiens
  misc_feature (1)...(507): n = A,T,C or G
cccaggctacagagcagtggcacaatcacagttcactgcagccttgacctcccaggctcacatgattctcccaccccagcatccctcagtaactgggactacatgccaccacaccccgctaattttttttcttttctttttttgaaacggagtctcgctctgtcacccaggctggagtgcagtggcacgatctcgactcactcaccctgctaatttttaaatttttttaagaaatgtcatctccctatgttgcccaggctagtctcaaactcctgctgcctcagcctcccaaagtgcaaggattacaagtgtgaggcactgtgcccagctgggagagatttttctattcaaacnttgcagtctgcaggcctgcaatctkagatataattttcaaatatattctctgtctctcatatgtatatatatacacacacacacacacacataagttttcaattcttccaataaagaattttggattgctaatctctaaagagcaatatgttt

SEQ ID NO: 322976 - DNA, 507 bp, Homo sapiens
  misc_feature (1)...(507): n = A,T,C or G
cccaggctacagagcagtggcacaatcacagttcactgcagccttgacctcccaggctcacatgattctcccaccccagcatccctcagtaactgggactacatgccaccacaccccgctaattttttttcttttctttttttgaaacggagtctcgctctgtcacccaggctggagtgcagtggcacgatctcgactcactcaccctgctaatttttaaatttttttaagaaatgtcatctccctatgttgcccaggctagtctcaaactcctgctgcctcagcctcccaaagtgcaaggattacaagtgtgaggcactgtgcccagctgggagagatttttctattcaaacnttgcagtctgcaggcctgcaatctgagatataattttcaaatatattctctgtctctcatatgtatatatatacacacacacacacacacataagttttyaattcttccaataaagaattttggattgctaatctctaaagagcaatatgttt

SEQ ID NO: 322977 - DNA, 429 bp, Homo sapiens
aagattgtcccaaagtttaatgcagtgattctcaaaccttagtttgcatcagaattacctgaaaagcttgttaaaacacagattgctgggccctaccctcaaagaatctgattcagtagttgtctctattacacacttattgtctcatactttctgtaggtcaggaatcaggcatggcttagttgggacctctaacagaattgttcrtaggcagcaaagtgttggccaggactggggtctcatctgaaggctctactagggaaggatacactttcaagctcatgtgattgttggcagaattcaatttcttgaggatggttggctgagggcctcagttcctcactggtgattggctggtggccatcctcagtttcttgctgggtgggcttctccaacatggctacttgcatcatcaaaacttacaagctg

SEQ ID NO: 322978 - DNA, 429 bp, Homo sapiens
aagattgtcccaaagtttaatgcagtgattctcaaaccttagtttgcatcagaattacctgaaaagcttgttaaaacacagattgctgggccctaccctcaaagaatctgattcagtagttgtctctattacacacttattgtctcatactttctgtaggtcaggaatcaggcatggcttagttgggacctctaacagaattgttcgtaggcagcaaagtgttggccaggactggggtctcatctgaaggctctactagggaaggatacactttcaagctcatgtgattgttggcagaattcaatttcttgaggatggttggctgagggcctcagttcctcactggtgattggctggtggccatcctcartttcttgctgggtgggcttctccaacatggctacttgcatcatcaaaacttacaagctg

SEQ ID NO: 322979 - DNA, 616 bp, Homo sapiens
tatgggactataggacatagtggaaccctgttttaaaataaatactagaattgggtatgagaaaaataaaaatacatttttgtgtaagtattgatgacacctgttatagtcaaaacccaaaggggaggccgggcgcggtggcttacacctgtaatcccagcactttgggagacccaggtgggtggatcacatgaggtcacgagtttaagactagcctagccaacatggtgaaaccctgtctctaaaaaaatacaaaaattagccaggcctggtggcacgtgcctataatcccagctactcaggaggctgagacaggagaattggttgaacccgggaggyggaggttgcagtgagcagagattgcgccactgcactccagcctgggcgaaagagagaggatccatctcaaaaaaaaaaaaaaagaaaagaaaagaaaagaaaagaaaatacccaaagaagaaaaaggaatgcccagggcatgatattatccatgacacctctgtctcaaattgttcaatacatcctcatacacacacacaaaaagacttcaacctctaagatgacatcattatagctttataaacatgactctttttgtttaatccataactacatc

SEQ ID NO: 322980 - DNA, 523 bp, Homo sapiens
gaggtcaggagttcaagaccagcctggccaaaatggtgaaaccccatctctactaaaactacaaaaaaattagttgggtgtggtggtgtgtgcctgtggtcccagctactcaggaggctgaggcaggagaatcacctgaacccaggaggtagaggttgcaggaagcagagattgtgccactgcactccagcctgggtggcaaagtgagactccatctcaaaaaaaaaaaaaaaaatcaactgaacacatatatgagggtctatttctcaatgcttgtattttgttcaattgttgtataagtaaaactcagtgttcctaaactggggatgatttttgtgccccaggataaattcaggaatgtctagagacattttttggttgtcacaactagaggatatgggtgcttctggcatctagtgagtagaggtcagagaagctatgagacatcctawaagtacaggacagcactctttaagaaagaaatatctagccccaaatgtcatttatgtcaaggttcagaaat

SEQ ID NO: 322981 - DNA, 579 bp, Homo sapiens
aaaaaaaaagcctaggtcaagatgaactcacagtaaattctatcaaacatacaaagaagaactggtaccaattttaatgaaactgttccaaaaaaaaactgagcaggagagaatcctccctagctcattccatgaagccagtatcaccctgacaccaaagtctgacaagaacacaaacaaacaraaaaaaaactacagaccaatatccctgatgaagatagatgcagaaacccttaacaaaatactagcaaactgaatccaccagcacatcaaaaagataacacaccatgaccaagtgggttgtattccagggatgcaaggatggctcaacatatacaaaccaataaatgtgatttattacataaacacaattaaagacaaaaattacataatcatttcaatagatgtggaaaaagcatttgataaaattgaacatcccctcatgataaaaactctcaacaaactaggcatagtagaaaaaacatacctcaaaataataaaggccatatgcaacaaacttatggccaatatcatattgaattgggaagggctgaaaacaattcccctaagaactagaat

SEQ ID NO: 322982 - DNA, 593 bp, Homo sapiens
gaggataggtttccaccgccagcctaagttttgttctattaagggagaactacaggacatgtagggaggcccactcacttcatggtgagaaggattttcagattaaactttcctgcacacaaagggggaactgcaaaggtggaagcctttgttgttaaaggtaataatatataaaagcctttgggagaaaatatctgttggggattttttttcattaaaatacagtttaataaatgggaatgaagcacatatggatctcttgaatggaaagaatttgtttttgtttttgtttcagaggactgacaatatttattcaataaatatttgctgaatgcctactaygtacaagtcactttaatattaatcagtagacaaaacaaagatcttttccttcatggagcttagattctggaggaaaaagacagaaaataaaaaataagtcaactgtctaatgtgttaggtaataagtgctatggggaatgtctaagcagagcagggttagagggaatagagtgagtataatgattctaaaaatatatgcatagatttttgtgaatctatggatatatttttaatatatccatgtatattaa

SEQ ID NO: 322983 - DNA, 593 bp, Homo sapiens
gaggataggtttccaccgccagcctaagttttgttctattaagggagaactacaggacatgtagggaggcccactcacttcatggtgagaaggattttcagattaaactttcctgcacacaaagggggaactgcaaaggtggaagcctttgttgttaaaggtaataatatataaaagcctttgggagaaaatatctgttggggattttttttcattaaaatacagtttaataaatgggaatgaagcacatatggatctcttgaatggaaagaatttgtttttgtttttgtttcagaggactgacaatatttattcaataaatatttgctgaatgcctactacgtacaagwcactttaatattaatcagtagacaaaacaaagatcttttccttcatggagcttagattctggaggaaaaagacagaaaataaaaaataagtcaactgtctaatgtgttaggtaataagtgctatggggaatgtctaagcagagcagggttagagggaatagagtgagtataatgattctaaaaatatatgcatagatttttgtgaatctatggatatatttttaatatatccatgtatattaa

SEQ ID NO: 322984 - DNA, 557 bp, Homo sapiens
agttgtttaaatggtaggttgtttctctttatgatttcttcctgtgagcctttaaaaaaatctttttttggaggatgtctggaaataagtgtgaaatagaaaaaaaaattccyaaacacccacgaaggttttctaacttttgtgtatttatggttcacagtcttttcactgtacatcatctcacctgatacctaagtgggaagttacagtttcatcttggaatgcattttctcacatgtaattggaagggacagtgtgtaatattgatctccaggatgccttcttatgatatataaagtaccactagaaaggagttagaggtctgtttcaatattccaaccaagtttttttattttcttttccaaatggataaatctttactatgtcgctggttattaaaaatattaaaatataaaattatatcatgtagaaaatgaaaggtcatgttccttactcttccctataattctactcccaatgattgccagtctttagtatttatatatccttctaatcttttgtatgccactataaatatctttttttcataattggta

SEQ ID NO: 322985 - DNA, 477 bp, Homo sapiens
ctgtgttagagagataaattaaatccttctgggcgtcagaaattccacgttaagatgcaagtggcttaatctgcacaacatctagatctgtgctgcccaatatagtagctactaggtacttttgctatttaaatttaaattaattaaataaaaaattgatttcttcagtcacattagccacatttcaaatgctcaaaagccacatgtgactagtggttaccttattggacagagcagatatagaacattttattatcacagaaaattctactgggcagtaccgatctagaactgaacctccctatgcctacttcttactgcaatgaaggcagcatattgtactttcatgtctttgtgtttggttstcttgtgaggactaatcagtccaaattggattagtttgcaattgccacatcaattttaataaaaaattttcttgacctgagtttgaaaacattcttttgatagcttttaatg

SEQ ID NO: 322986 - DNA, 626 bp, Homo sapiens
aaaacttaggaactaagaaatgaaggacaagtagaagatgcttcatttttataaaccctacaaccctacagttgggggtgggcagtgccaaggcccttgcacccctaaagatttgctgaaaaaaatcactaaccttaggcagattgattaataagagaaaaggcatacaaatttaattaatgtgtatacgtggtagccttgagaacgaagaaccaacccaccagtgaagtacagaaacttctaggccatcttgaggttacagaaagaatgtgggtgcacagtcaaaaagcccaaaaccaggtcttagtggcaagacaggttaagagcaggaaaaaggaagaggcttggttagcaaaggtggtctattatgtagatggtgcctcacaggtagtagccctcagagaaaatagatggaaaatgtctgttttcagaactttaaaggtgtcagactctcagcttacctctcctagatctggagagacctagaaagggaaggcctggctgcattaatgaagattctctacaaatacaaattccacaccccccacaaaagaaaaaacagctttgcagagccacctcmctctgctggccctgcagctgtcatttcaaaatatgtcaaagaaata

SEQ ID NO: 322987 - DNA, 546 bp, Homo sapiens
gcttttccagtcacatagctaattaatggaagaacccattctagaattcagatttcttagtgcattcatggttctctgtctttaccctatgttttattattaaggtggaggagtgcttcttaagcactgggccatggcactctggtgtatcctagattattcacaggactattgcctgatttacaccacttgtgaatgaatttatgttgctccagtcagagaggtactcttcagtagtgtctattgggaggaatttgagctgagctgttgtggggaattacgtggagtcaggcaggcttgctgcgagtagtagcatttccagctcatkcccaggagagcttgggtttagtcaggacaagctgagatgcagcagaaatgagttttggtcaaacagtggcccctggatgaagggtggcccaatgggaaggtgatgatggctttgttcttctgggcattgttatgttgttgggatgacagcatcataattcttgatgatctgtttcgggttgttgtgagttgtttgggcctttctagtgtgccaccaaa

SEQ ID NO: 322988 - DNA, 520 bp, Homo sapiens
gggctacaggttatcccataatgytataaaatgcagtcagcaaaaaaggatagcttacatattataaggaaggcaaaaacccattccattccacaattccaggtccaaaaggaactcctctctccaacaaagaatctgtttgcccacgtaacctgagaatacagctgacagcctaggaatatcctcatgttatgtatgtggaagaactaacatgggagatcaatggccatggcaggcaagggattaatgcctcaagatgatttcactttgcctgactccaccaccgacctaactgtttctggtccaagtgtctggctgttaaaaacctccataataggaagattctgcattgctcgatggggaaagtctttcacagatctagtaggaggacttacttgtctggggcaatagtattatgatgaaactaaagggaagaccttatggatgtcagaaaatagtacctcatttcctgatttaaacccttttcttcagatttcctactttaaaccactcctggtat

SEQ ID NO: 322989 - DNA, 603 bp, Homo sapiens
  misc_feature (1)...(603): n = A,T,C or G
ctggtcttgaactcctgagatcaagtgatccaccagccccagcttntcaaagtgntgggatnacaggcgtgagccacccgcctgtgtctctattttttttttaagtttccttccagaaaaatatgtggatgagggtatactttgagtacttgcatatccgaagatttattttaccctcacacaccaacaatggtttaacgaggtatgaaattctaaagttacacttctgtatcctcagacctctggaaacgtgtgctctgcgatattctggaggtgagcactgsaggggagagctctgctaccgctcagcccgcgtccctgttgagataacctgagtgtttactgttttttgttgttgttgttgtttcttcaaaaatatttccctttgctttagaaattagatatttcaacaggatacaacagctaggtttatgttgttttaaattattcattcttgcagtggacaagtcctctcaaactcaatatttattgtattctagatcttaaatgaaagttgcattcatttataagcgggcatcttgctaaagtcatggaatagctccttctcccatgcatagcagagagcacagacctgaacaacta

SEQ ID NO: 322990 - DNA, 616 bp, Homo sapiens
ctgggccatttttggagacgtgaggcttgtaacactgattatctgtcccaatagcatgtgtaaattgctgaaatcagagtgaaattggcatcaagagtcactggaaaaattggccgggtgtggtggctcatgcctgtcatcccagcactttgggaggccgaggcgggtggatcacgaagtcaggagttcaagaccagcctggccgagatggcgaaaccccatgtctaataaaatctacaaaaaaaaaaaaaaaaaaaaattagctgggcatggtggcaggctcctgtaaccctagctactcaggaggctgaggcaggagaatcgcttgaactcgggyggtagaggttgaggtgagccgagattgcaccactgcactctagcatgggcgacagagcgagactccgtctcaaaaaaaaaaaaaaaaagtcactggaaaaattaacagagagctatgctccacctaaggagtactgctcctcccctctgcttgagagttttaataaagaatggtgggcttaggcgtgatatcttctaatttttcaaaacaaaaaaactggaaatctgatttttttttatgtgaaactccaaacttggaaatgttgtcaaccaattaata

SEQ ID NO: 322991 - DNA, 576 bp, Homo sapiens
tgttcgaatgagttagcaaaaacaagggcagtgcctgcagttcacagcagagcatgtctagttgttttgaaggcccaaagatgatggrgtggctgcaatcttatttgaaattcaaaatctttcccttactaattatgttatttgcctttgttttgaatgttttagcattattgttataggggaacctggagaatgttataacggcttcatattttcagaatgtttttcaattgtgatgtgaaaaccaaacaaagaaacaaaattctggtgtgtgtttacaagttatgtctttgagcaatgccattagagaatttaacaaaatgagaaccagcccttggacagaatgcactttgcagctccaaacactggaaacgtcttttaggatcagagggcttgaaaagaagatgaaagtggtgttaaaattaagaacaatgtagtacaaataatttagtcttcaatttctgagattttaatgagctgtcctttacagtcatacatttaaatagcctcttaatggatccccccacattctcaacccaaatcttagaattttctgtttcaaatcaggaatatcct

SEQ ID NO: 322992 - DNA, 607 bp, Homo sapiens
actctctcaatatttcacaaccatttccatgcagatggctctatagtctgggatggttgcctccatccttccttagccctatctcagatggtcagcactgcaaaaagtacaagtttctggccccagaggcaggtgaatctccatactaagagattcagaatcattaaaagctcagccataacttcagccctgagtcatatcagagacacaaagtgatgcctgtggaagcctggagacagccaaaagttagggagtgttgacaaggaagagaaaggagtagaagactggataaaattgtgraggaagtagggaaagataggaagcagaaggaaagggagaaaataaaggagaaagggaagagaaggggaggggaaggtaagaggagaggggaagggaggagggaaggggaggaaagaaacaagacaggaattacaggataacatctactatggcctcaggtgccatttggcttcatactttgactaactcttccctagacaccagacagatcatatcaacataactaatccctgttcttcttcgtaagattatgatcaataacagctttatgaattgtagggatatgtagttaagtgaaagcaaccag

SEQ ID NO: 322993 - DNA, 621 bp, Homo sapiens
atttggcgttttgggtttacataggtggaaggtacaatggtgctgccactttggaagctggttcacaacacagaagggagagtatttctacataaaaggtaatgccagattaaaacatccccctgcccatatatatatatatatatatatatgataactctcaaaacaaagttgcaaaacatgtatcagcagcaaacagtcaaagaaaggagtaacaactgggtaccacatcttcaaatgtcgtggttaatgaactaaataaatgatggcaatgctgttcttcattgctcatcaccaacctttcactgcccaaaaatggaactagggaaaacmtaagacaaaatttttgaaaatcccatgagtattcctcaatttagatagaagcatatcgagggggatgagcaagcaacctgggaaaattgtaggaacacaggcataataaaggctcatgcacttcctggtagaatttcaaaaatggaacaagatagctgtcctctatagcaagtagagtgaactgggcatttaaatttaatagaagatagacttttaaatctcataaaaaacacaatgaaaggaagaagagaacttaataatgacatgaattaattttaataggagctg

SEQ ID NO: 322994 - DNA, 571 bp, Homo sapiens
tataatacctctggtgcccagcagcacctagcagagtatctgggacataccagttactgggtattaggtattagtaatgggcattagcttatggaaactcctamgggtagtaaatgtgacttctgttgtactccttataaccaaattccataacaaaagactacatattcctgggaagtggaggctgcagtgagccgagatggtgccactgcactccagcctgggcaacagagcaagactccgtctcaaaaaacaaaaaaaccaaaaaaactatgtatttctgtgaaggagaattcggctcaagagacattacatacttgacttgtatcagactttacaactattgtattttttaggatatattagtagacagtaaatggatgtgattgtgtgcaaacacatctgtgatatccattttctggttcaattttattcattaaaccagaatctcagaattaggagggaagttagacattaaccagtaaaatttctgaatatgaaagatgagaaaactgaagagtttgggaacattcctaaagataaataattatttcatgatggaaccaggtta

SEQ ID NO: 322995 - DNA, 608 bp, Homo sapiens
acccaaaagaaaagaaatcaatatatcgaaaagatacctgcactcctgtttacttcagcattattcacaagagccaagatttggaagcaacctgagtgtacatcaacagacaatggataatgaaaatgtggtacatacacaccgtggaatactattcagctataaaaaaaagaatgagatcttgtcatttgyaacaacattaatggaactggaagacattaagtgaaataagccaggcacagtaagacaaacttcacatgttcccactcacttgtgggagctaaaaattaaaacaattgatctcatggagatagagagtagaatgatgtttactagaggctgggaagggttaatggggggaggggaaatggggtggttaatgggtacaaagatgtagttagaatgaataagatctagtatttgatggcacaacagagtgattacagttaaaaatttattacacatttttaaataactaaaagagtagtagcggaatgtttgtaacacaaaaaaggataaatgtttgaggtgatggataccccatttttcctgatgcgcttattagacattgcatgcctgtatcaaaatatctcatgtataccataaat

SEQ ID NO: 322996 - DNA, 612 bp, Homo sapiens
gtaaaaattacattcactttctcctcagaaaccattcaagcaagaagagaatggatttgagaggccgaaggagacggatcacttgagcctaaaagttcaaaaccagcctgggcaacatggtaaaaccctgtctctatgaaaaatacaaaaattagccaggcatggtggcacatgcctgtagtcccagctactcaggaggctaaggaaggagaattgcttgaacctgggaggcggaggttgcagtgagccaatatcgggccactgcactccagcctgggcaacagagcaagaatccatctaaaaagaaaaaagaactctgtctctaccaaatatatatatayatatatattagctatctcggtgtggtggcacacacctgtagtcccagctacttgtggggctgaagtgggaggatcacctgagcccagggagttagaggttgcagttacctgtgaccgcaccactgcagcactccagcctgagcaacacagtgagattctgtctcaaaaaaaaaaaaaaagaatggagtgaaatatttaaagtgttgagagtaaaaaaaggagaggaaagaaagaaaacaccactgtgaattctgtaccctgtgaaattatg

SEQ ID NO: 322997 - DNA, 544 bp, Homo sapiens
aagcctcctgcctgaatagccattaattgatggctatcataaatacatattgacagattgaaatgcctgatgtaggagatttggttactttaagtattttttgaagggtatactgtttaacttcccattgcaacaggggataacttatatgattatttcagcgatgattttttgaatatttttccattaaaagtacaactgtgtgaaacaaggcaaagacatttctcacacacaaagcagatgtcattagccactctgatacactatgctgctgattcataaaataggtaagagcagatcgttttcttcatcagaaatatctggaaaaaaaaaagccaccaagcactgtatgtgtcaatttctcacyttttttttaaaaaaaaaagagtgggctgctacagtggatatgttctacatctctttggggcagtgattacatacaattgtcataactcgatggaactgtctacaggatctgtgtattttcttttaagtaatttataactcaactttttttatgggaagctgtagttaacactggata

SEQ ID NO: 322998 - DNA, 544 bp, Homo sapiens
aagcctcctgcctgaatagccattaattgatggctatcataaatacatattgacagattgaaatgcctgatgtaggagatttggttactttaagtattttttgaagggtatactgtttaacttcccattgcaacaggggataacttatatgattatttcagcgatgattttttgaatatttttccattaaaagtacaactgtgtgaaacaaggcaaagacatttctcacacacaaagcagatgtcattagccactctgatacactatgctgctgattcataaaataggtaagagcagatcgttttcttcatcagaaatatctggaaaaaaaaaagccaccaagcactgtatgtgtcaatttctcacctttttttwaaaaaaaaaagagtgggctgctacagtggatatgttctacatctctttggggcagtgattacatacaattgtcataactcgatggaactgtctacaggatctgtgtattttcttttaagtaatttataactcaactttttttatgggaagctgtagttaacactggata

SEQ ID NO: 322999 - DNA, 507 bp, Homo sapiens
ctgttttctttcttttgagagcccttcttttatcaattccaattttgttaaaccaagacaggaccattaagagacctaaaactggagccccagaaacatgttctccactaccacagtcgtatggtcactcacactttcacctgcaaacaaccagcacaggcattctaaaagatctgttttctttgctactagattttatcaaattcatgtatcaaccctgttaattttgtcatgacttttgatcagtgtgaygtgatctggtcattaaattacagaaatttatattcatttttagattaggagatatttcaaaacagagtttcttgggaggacgggaaggcaaggattaagaaataattttaaaagtggtggggccttgatggattgaaaaaatttgagccttacctgaagcatggaagtattctttttgtgaggaccagaagacccacaaaaatagtcccagtgactctacgttaggggcagtgagaatttgtggtaaataactgc

SEQ ID NO: 323000 - DNA, 585 bp, Homo sapiens
agttattgatcaattaatgaataactcagacttttcatcaaggctaatctgtcagccagcctgaattattgaggtgttactgtgaaacagtatgagtgaagaagtttgtgaattggatcttgagctgggcatggtggctcaacgcctgtaatcccagcacttygggaggctgaggtgggaggattgcttgaccccaggagttaagagaccagcctgggcaatatgacgaaacaccatctctacaaaaaatacaaaaatgagccgggcatggtggcacatacctgtagtcccagctactcaggaagtagatgtgggagaatcgcttgtgcccaggaggtcaaggctgcaatgagctgagatcgcaacactgcactccagcctgggtgacagagcaagaccctgtctcaaaaaaaaaagaattggatcttgaggaacatgtcacccccatgtctttagttcagcaaaacttcacagagaaaggccacctcataaaatcgtgaggaagggcaaacaaaatataaggaagattcagaaccacaagcaaaaaatacagctaatggggttgtctaagtaaagaaagaaaat

SEQ ID NO: 323001 - DNA, 611 bp, Homo sapiens
acctcaaaattcatacgttgaaacctattccccaatgtgatgatatttgaggtggagagccttttgaagatgataaaatgaatggcattagtgtgcttataaaagaggccctagagagctgccttgcccatcyaccatgtaagaacaccacaagaaggcaccatctatgacaccaaatcttccagcaccttgctcttggatttcccagccaccagaactgagaaataaatttttgttgtttaaaacctgtattttgttttatagccacctcactagactaacactcaaaagacttaagacctcactagactaagactaagggtcaagagaaatcacccaaactaaagcacaaaggggaaaattttaggagaaaaaaaaatgaacaaaacaacaataacaggtaaaattgacatcctagaagaaaagagagaggggcaaaaaaaaaacacttggaaaaatattaacccaaaacatttgttacatttgatcaaaaccagtaacatacagactcaaaaagctcaatgaacccaagcaaaataaatacccaaacaccatacataggtacatcttactcaaattgctgaaaatcaaatgtaaaaagaaagcctgaa

SEQ ID NO: 323002 - DNA, 611 bp, Homo sapiens
acctcaaaattcatacgttgaaacctattccccaatgtgatgatatttgaggtggagagccttttgaagatgataaaatgaatggcattagtgtgcttataaaagaggccctagagagctgccttgcccatctaccatgtaagaacaccacaagaaggcaccatctatgacaccaaatcttccagcaccttgctcttggatttcccagccaccagaactgagaaataaatttttgttgtttaaaacctrtattttgttttatagccacctcactagactaacactcaaaagacttaagacctcactagactaagactaagggtcaagagaaatcacccaaactaaagcacaaaggggaaaattttaggagaaaaaaaaatgaacaaaacaacaataacaggtaaaattgacatcctagaagaaaagagagaggggcaaaaaaaaaacacttggaaaaatattaacccaaaacatttgttacatttgatcaaaaccagtaacatacagactcaaaaagctcaatgaacccaagcaaaataaatacccaaacaccatacataggtacatcttactcaaattgctgaaaatcaaatgtaaaaagaaagcctgaa

SEQ ID NO: 323003 - DNA, 611 bp, Homo sapiens
acctcaaaattcatacgttgaaacctattccccaatgtgatgatatttgaggtggagagccttttgaagatgataaaatgaatggcattagtgtgcttataaaagaggccctagagagctgccttgcccatctaccatgtaagaacaccacaagaaggcaccatctatgacaccaaatcttccagcaccttgctcttggatttcccagccaccagaactgagaaataaatttttgttgtttaaaacctgtattttgttttatagccacctcactagactaacactcaaaagacttmagacctcactagactaagactaagggtcaagagaaatcacccaaactaaagcacaaaggggaaaattttaggagaaaaaaaaatgaacaaaacaacaataacaggtaaaattgacatcctagaagaaaagagagaggggcaaaaaaaaaacacttggaaaaatattaacccaaaacatttgttacatttgatcaaaaccagtaacatacagactcaaaaagctcaatgaacccaagcaaaataaatacccaaacaccatacataggtacatcttactcaaattgctgaaaatcaaatgtaaaaagaaagcctgaa

SEQ ID NO: 323004 - DNA, 653 bp, Homo sapiens
tggatttctaaaatccttttttattaaaaaattaattataataataaaagaagaaaaggtatcccaactgacatgttaggaaaacattagaaaaagacgtaactaccaatttctgtatatttggtgatgtaccaataactacaaaatgcacctcagtcaatacaccaaggactcatattcctctaagcacttaatggagaattgaatactgttaaagcagaaatcaggactttaccaaagagttagtaaaggtgtccctttaaacatagactagaagtggtatatgtcagtggtaaggacttcatgcaagctattgaaccttggaatgttccacaaattatagctattaatttatttctagttccaacaatctaagaattcttatctaagacagattcttaattttttccttactyataataacctgtacattttaataatatagatactatagaagatgtttggtttaataaaatgtaatctttccaagtatgattttttaactgagaaaaaatctgtgaaataatttttatgtatattccttcatctcaaagttatatttttgacacccaaacatgatacaacttgaaaagtacatttttttttttttgagacagtctccctctattgcccaggctggaatgcagtggcac

SEQ ID NO: 323005 - DNA, 551 bp, Homo sapiens
atctttttgagtagatattgtgtactcttcctacaattacctggactagtttgactcawttattcaacagatttttagtacttacctactatgtgccaagtactgtgttacatgctagggatatatggtttattgtgcacatataactccttatctagaggcaatcgttaaatacatattatatgtttatgccaaaaggtgagcaatcatctaaacccttaagcaagctgttgggtattgtaatagctaatcagtaggataggggaacaccatggggatggctgtgtacaaaaactgcttttttatgtatggtatttcataatgaatacagataactttctttttctcttctcatcttccccccaaccacctcctatttttttctctcctttctctctctctccctccctgggatacacatggttgatgggctcatccaacagctatctcaagccaccccttgctgctgcctgttaccagaggttctgaaaagccagatatttgctctgccagattcactggcagctggggctggccacatgccctagttt

SEQ ID NO: 323006 - DNA, 601 bp, Homo sapiens
ttatttactatattaaatcatatgagaagcattctcaaaataagaaatgatgcttaatcttttaaagttatatttgtatgaaaatgttattgacatgactgttccaaaaattatgtaaatttttagaatctaatagttatcagtcacaattttagttattatgttaaaatgttatatgacacaaaataaaacaaattttctcatcaatttctggttataatacattctcattagattcttaatactggctattctaagtctttgtccatagacatttattgttttggtttttctctaaaagcacttccaattagatacagtctaaaactacttctcatggaaaaaactctgatgagtactactgaatgcaggtttctaataactttaatatcataccattggactgggtaaaaatttccaaaactctaatgcagaaayggataaattcatgaaattgttcaccaagatcaagcagcacaagaatttagtacatgagataataactaataaaaataatgtttataactttttacttaaaattttgttggttctttactttaatactttgttttccagatttaaggaagctttcctcttaagc

SEQ ID NO: 323007 - DNA, 579 bp, Homo sapiens
tcactttttttcttctgatccctccagaattcagaaactattcatgggtacctttatgacaatatatagctatgtgcataagttcaataagaatctatttcctttataacaggatacaattgaaaacattgattatatcactgaggttttgactaggatgtcatatttcaattgtttaaacatactgcaggtgaaatctaaagtttgccttgattcagctttttagtctcaagagtttttaacctatgaaatcaatcatcattctttctggacttatataaataatcaggtcaagtttgcaaacaaattagtcttgctttgattatctactttggtaaaaatagagatagtttttttaaaaagttataatacacctgttattacattgtaaccctgttcattgtattttaaaattttttattatctatctgtagactggacccaatcctaaattcttctagtttcctctaatatctggctatacagcaggtctcactcccttctycatggtcagtttatttgttttgttggttgccttcaggcctagattcatggctcaaaaccattatacaaacctgg

SEQ ID NO: 323008 - DNA, 591 bp, Homo sapiens
tggcaatgcaatttttaaaaaacaaaatgttatatagtattcaatttctagaaacttatgctaagagaatagttatacatatattcaaaaataagctatcagaatgttctttgcattgttttaagtaacaaaatattacaaataacctaaatatcaaactgcacaatacttgacaaaaattataaagcatatatactataggatcttatgaaatcattaaaatattctggagaagattatttagtgattttttaaaatatgaattctattttattgagcagaaaagtagactgccaaacagtatagtaaataattccttatttaataaaataggtgagagttttctaaagtttctataataaatacttaccaatagtatgaaaaatatgcttaaaattagggagaatttatatatatatatattatgtaaacaaaaagtctttgtctctccattttcccccacaatggagacactgacaatttcacttgtacttggcataaaawttttttttttcatgtggcaaataaaatattctaatccataattaggaaaatgttttttttaaatcatgacctttgaggtttctgttg

SEQ ID NO: 323009 - DNA, 617 bp, Homo sapiens
gatttatcatttcacctcactttctgccaatatgttctactcccttggccctttatcctttagtgcccagctaaaccctacaaatatttcacagtgcaaaccaaaacatgcctggcaaattacatactgattctgggactctcagctttgcctggagaggagtacttgttccaggaatggctggacagagcaggaattgtgttcctggagaagwactcccatccccatgctgctcatcctttatgcagggactttgagatcacccaatcaattaacaacatagggagctcttgtggttgtgaaagtgccattgatagtagatctggcagctggtttgcaattgcttaggagaacctcatgctactgctgatagctcctgaaagactttgcagtaagttgaaattctacagagtccctcccaagtggggttgagagcggctctagtctcagttaacttgttgccaggcaacccaagtgactcaacagacaatttggttttatcactttttgctttcactgcaaatggctagcaaatccacattcttggatgaatacatgcatcttctccatgactgcagtagacatctgaattctgttgtagaaaaaaagaaaagaaa

SEQ ID NO: 323010 - DNA, 563 bp, Homo sapiens
tgtagaaaaaaagaaaagaaaggaagaaaagggtgtaacctagagttaggaatgtcacctattaggcaatgcaggtgatccagaattgaggctataagagcttaraataaggcagtggcagtagaaatggacagggaggcaggcacactatgggtgacataggtgggatatggtaattgattacatagggtatgtcttagtccattttgtattgctataacacaactgtacaaatcaatatttatcataaattctcagatgtcaatctgcatgatgttggcagtgactacaaagcccattaggattcctagtcctctcatattcaccattggcatatgccccttatctaatggacaaaaataggaagcatagaataaaatctaacagtgctctgcacaagcagacggcacatggtctctcctcctttcccctccttgtatctgaagtgagcctcctcctgtcaatgcccctccacctggcactatccactttcctctcagttgcagtaacttcaagtgctctatcaagttcttctaacctcttcaaattagtgattaaatatg

SEQ ID NO: 323011 - DNA, 541 bp, Homo sapiens
gcaggtgcttccctctttacaccattatatgtcatctgaagttttgttctgattctgtattatttcatttctaaaagaaaagccccaaaaccaagtgctgttttcctggtctgtggaaacagagtctccgaggaattaggctagacatggtaagaacaaagttctgttgtgataaaagctttggcctgaggttccaaccattmagtttgccagctcagacttgatcttgaatgaaggcggggttctgtgactggagaccatttctctccttttgtatttgttggtgtgtccaaaaacctcagatctcccagcttcaggcttctttgagggcagtgctaaattggttgaaaccttatttgaggcagttcctgaaaagggtaggtgaaatttcctgctgataaaaggcatcttgtgtcttgttcatccttagcaaattgccaattagcaaagaagagagggcagatgaagtaccagccaatttgaaattggtgtggacttccatcaaggtatattaattcactttacctagatgattcgaaat

SEQ ID NO: 323012 - DNA, 541 bp, Homo sapiens
gcaggtgcttccctctttacaccattatatgtcatctgaagttttgttctgattctgtattatttcatttctaaaagaaaagccccaaaaccaagtgctgttttcctggtctgtggaaacagagtctccgaggaattaggctagacatggtaagaacaaagttctgttgtgataaaagctttggcctgaggttccaaccattaagtttgccagctcagacttgatcttgaaygaaggcggggttctgtgactggagaccatttctctccttttgtatttgttggtgtgtccaaaaacctcagatctcccagcttcaggcttctttgagggcagtgctaaattggttgaaaccttatttgaggcagttcctgaaaagggtaggtgaaatttcctgctgataaaaggcatcttgtgtcttgttcatccttagcaaattgccaattagcaaagaagagagggcagatgaagtaccagccaatttgaaattggtgtggacttccatcaaggtatattaattcactttacctagatgattcgaaat

SEQ ID NO: 323013 - DNA, 541 bp, Homo sapiens
gcaggtgcttccctctttacaccattatatgtcatctgaagttttgttctgattctgtattatttcatttctaaaagaaaagccccaaaaccaagtgctgttttcctggtctgtggaaacagagtctccgaggaattaggctagacatggtaagaacaaagttctgttgtgataaaagctttggcctgaggttccaaccattaagtttgccagctcagacttgatcttgaatgaaggcggggttctgtgactggagaccatttctctccttttgtatttgttggtgtgtccaaaaacctcagatctcccagcttcaggcttctttgagggcagtgctaaattggttgaaaccttatttgaggcagttcctgaaaagggtaggtgaaatttcctgctgataaaaggcatcytgtgtcttgttcatccttagcaaattgccaattagcaaagaagagagggcagatgaagtaccagccaatttgaaattggtgtggacttccatcaaggtatattaattcactttacctagatgattcgaaat

SEQ ID NO: 323014 - DNA, 552 bp, Homo sapiens
gggcagcacttggccatttccctcattgtcttctgaacatttatccttccagtgtccttttttcatctcacacattaatttctttctagccttgtctggctcttgaatccctgcctaacttgatttcttccacatctacatctgcgtctacatcctctgacattgctaatctctctttctataagagccgttgccaacagattggcctttttcttaagcctttaatttactttcctttttcattcctgagttctcctgctccttcggccagccggcagggccgggcaatggcagggcagggcaacagcacgggccttgccccyttgcactgctgtctgtctctcatttctttctgatttgtttaccttttttttttctttctcacacttttatttttttcctttctttttcctttgttcttctcctaataccggtctccagcccccttttattcagatacagccgggctggggagagggatttaacccttggcgttcctagctgctgcacttgttgcttttgctttttcttgttttgttccctggtcacagt

SEQ ID NO: 323015 - DNA, 552 bp, Homo sapiens
gggcagcacttggccatttccctcattgtcttctgaacatttatccttccagtgtccttttttcatctcacacattaatttctttctagccttgtctggctcttgaatccctgcctaacttgatttcttccacatctacatctgcgtctacatcctctgacattgctaatctctctttctataagagccgttgccaacagattggcctttttcttaagcctttaatttactttcctttttcattcctgagttctcctgctccttcggccagccggcagggccgggcaatggcagggcagggcaacagcacgggccttgcccctktgcactgctgtctgtctctcatttctttctgatttgtttaccttttttttttctttctcacacttttatttttttcctttctttttcctttgttcttctcctaataccggtctccagcccccttttattcagatacagccgggctggggagagggatttaacccttggcgttcctagctgctgcacttgttgcttttgctttttcttgttttgttccctggtcacagt

SEQ ID NO: 323016 - DNA, 552 bp, Homo sapiens
gggcagcacttggccatttccctcattgtcttctgaacatttatccttccagtgtccttttttcatctcacacattaatttctttctagccttgtctggctcttgaatccctgcctaacttgatttcttccacatctacatctgcgtctacatcctctgacattgctaatctctctttctataagagccgttgccaacagattggcctttttcttaagcctttaatttactttcctttttcattcctgagttctcctgctccttcggccagccggcagggccgggcaatggcagggcagggcaacagcacgggccttgcccctttgcactgctgtctgtctctcatttctttctgatttgtttaccttttttttttctttctcacacttttatttttttcctttctttttcctttgttcttctcctaataccggtctccagcccccttttattcagatacagccgggctggggagagggatttaacccttggcgttcctagctgctgcacttgttgcttttgctttttcytgttttgttccctggtcacagt

SEQ ID NO: 323017 - DNA, 553 bp, Homo sapiens
acaaactgaggaagtgcagtgcgttacagtgtagttaccatggtaacagcaccaacacctgcagcttgggtgacttttgatttgaggtttgaattgaaagccactgcagcttgtccttggctattatatcttgacacatactcccattcctcctaattggaagacaggagcctcttcttgtgctgggttctacagctttggaagataatgtctccttctgatgcctctctcacactcaccctgacatcaaggaaccctccaaattctttagaacaaaatgcagaaaaccccatctggctgttttgtgtcctgtagtgatagacaagcagatagaaatttcagtttattgacagaggcatcatgtcttcttatttagattctaaaatccacacattaagttagccaaaatcaaagttgaaggccatttgttacctctgtgtaacttagtctgcaygcctggtatggtgcttctttaggagacttccatcaacatttaagatacttttcaggcctttttcagatggtaggctgctgttttgaatgtgactggttg

SEQ ID NO: 323018 - DNA, 434 bp, Homo sapiens
tttatccattaaaatgatgttatttgtaaataatcttctactataattcatttaattgatctttctaaacagctgtgatcaaagttctcaagagtggatcgaaattagagcatcaaaagagctcaacttgtgtgtgtgtgtgtgtgtgtgtgtgtgtgtattgacaaaaccttcattatatcaacacttagatgtactgttgtcattttcaattcgtgagttcyaatcaaatgctttattctttcccacaaacttttagtttccccttcctgatggtgaacagaactctcattcagtaatcactgaagccagaaacacaggactcaatctcacctactccaccccttccatgctattctcattcccaagctgaatgctttttgtttattctgtttatttaatatctcttccttcaatatccttctattcatttg

SEQ ID NO: 323019 - DNA, 578 bp, Homo sapiens
gtgttaagaccaatgtgttggtatcaagatcaattgaagagaatagtcagaaacagattggtacatatgtgagcaagtgatttttaacaagagtgcagaataattcagtggagaatagatgattgtctttccaatatacgctactgaaagaattggatattttacgtgaaaaaaaaagaacttcaatacataatgcccactatatacaaaaattaactcaaaatggatcatacatctaaatgtaaaacttaaaactacataaaatttaaaagaaaaaatagcagaaaatgttatggcctaagtaaacttttttaatataacacaataaaataacacattgataatttgggcaccccagaattaaaaccacctactcattgaaaaacactgttaagaggatgaaaagacaccctacaaactgagacaaagtattttcaaatattatctgatacaggattcataataagaaaaaaatgtttaaaaaatgggcaaagaatckgaataggcatcacaccaaagacaatatgtgtatttcccataaacacatgaaaagacattcaacatcatcacttataagg

SEQ ID NO: 323020 - DNA, 567 bp, Homo sapiens
cctcttccacacctccagcaacttggagttgctgtaaggagaggccagtctgtctcccagaagtcccacccaccatctcccccactcatcaacagttgggtcccccagcttgggctcacagcacagctccccattcccaggctgatcataccaaatgattgcagcttggcatctctctagggtggagccctaggagacaagtgaaagacccctgaccacaaccactgctagggtcctttcttctactgtctccaacttagagaggaaatataagccctgagatcaccccagagctgtggtgtgtaacccrggaatgcaaagctgagatctgtagccagtattcagatgggagaagagcccacactttcagagcattgagagggggcatggctgtaactgtgaagaaattaatacagaggagtcacatggctgagtaagagcctacttactgaccattacacctaagcaccacctactggatcacaccccaaaacttcaacaccaaaaatactttgctaacatacccccctatgaaacaaaaaacaagaagtcagctacaaataaagt

SEQ ID NO: 323021 - DNA, 530 bp, Homo sapiens
ttctggcatttgaacttgggcaagttccctaccctcccagccttgtttttttattttccatctataaaatgccaatcacccttagccatataaatggtattctatggtttttaagtgsgataataaatatgaagcctaatcaagaatatatagttttgtagagaatatatgtaaacaactctaaagtctattcaggaagcatgaatatgtaagaaaatgtctactatgaccttatggtgataaatttaaaaatcagtgtatgtacagctaaccaagttaagattcatggtaattataaatgtacttgaaactcataattaaacaaacccaggagaaattaagcatcatgaaactcaccctgagtgattaagctacaaacccatccaaagtgcaatttggtgtttctataataatttgactccatggaacagatttttaatttgttaaagcacagagtaatttgcatatgtcctgctaaaaagcagacctctaaaacattcttaattaaattcattttgtgatatatttga

SEQ ID NO: 323022 - DNA, 576 bp, Homo sapiens
attagaagggcctctaaagtttgcctctagtttggaaaaccactgtttctatttatctgaatagagaagagaaaagctaaccttgggaccagttgttttaatttgcaggaaaacctagatttctaatgaataacaatgaatgagagagaattgatacaggcagatctgagatatccatatctgtctctgcagtacatggttaggaaatgctacatatgatttgtatttactgtgctgatgttgagagaggaacacctgggtgagatccagtaggttctaaataaatctagcttgatgatatctctttgagttataagtatatgttctatctgtagagaaagaaagggagaagctacattgattttaatggaaatgtcaggaagaggttgaatgagttgaaacataaatgagacagtcattacaaaatattcaaatgaaattttgggataataagaatgctcatttaaaaagcccgttcgattagtgtcaagctagaayagaaaaacacatttaaaaggctgtactttagtttgtgtctgtgtatttgccacacataagcttagacactttaataag

SEQ ID NO: 323023 - DNA, 593 bp, Homo sapiens
gaatcaggaaatgggacttttgtccctgctgccttccccatcccgtagtaccagtggaaaccacatggggagcctggactccaacccacaccagtagcaatgaggttccccacactctccaggttggagtgggatcagagaaggttcactggagagtcaagacttttcatccctgctcaacggtaaagaacactgcccacccaccaccacggtattagtggcgaccacatggggagatgtatcaagatgcccctcttcctctcagacacggtgttatcaaaagagatccagtggggagcttgaaccttcagccccacccagcaatggcaaggatccccttcttcccagatgtcaacagtgtctgactggggaacatggacttttaccatcatttggcaataacaggacagtgccccctcccttaaacatggagcagtgttacagagacctaaaacacaagatttcagtaagattcagaatyttataatacccaacatttccaggtcttaactgaaaatcactcatcctaccaagaaccagctatttcttcaactgaatttaaaaagacaatcaaaagaggaaaacactaagat

SEQ ID NO: 323024 - DNA, 653 bp, Homo sapiens
ccagaattcttgagtataataggtctggagcatgatttataagttattttgcaatgatgtgtctgaggtcatggtggccgcacctgtagtctcagctacttgggaaggtgaggtgtcaggatcctttgagcccaggagttccaggttacagtgagctgtgatgcgccactgcactgcagcctgggcaacagagtgagaccccatctttaaagaaaaaaaaaagaagaatctgagacattgtaagaaaaattccttcatctcctcatcaagtgtttattgggtgcctgctgtgtgcccagccatatgctagaggctggggatataggaataaaagctaccagccatgccctaggtcagtgcctagttctgggtcagcaaatagcatccaacttgttcagtgctattctatcattaaaacataagctggagttctatttgtttgcacattttacaaaaataatgtgtaaatagatgattctataaaaatgtccaaacaatgctgttaggtagacatcactctacacacttgttttgtgggtgacattgcctcactaaggagcagctccagcagccaaccagaatcaaagctgtcctctttcatggggcyctgggcttacccaggaaagaacaaaataaattgacacaatgtaggc

SEQ ID NO: 323025 - DNA, 585 bp, Homo sapiens
acactaaggaaccaaggctccttgtagaagtggagcatagtaacatacatcatcataaatatatatcttcatatacgtgataaatataaatatacatggtgaagctgaaatatctttacaccagaggcaagaaaactatcaaggactattggggtcatgtcaaaaggattcagaagtggctctgaatggccaaaaatagagcaatttgagccattgatgataatgatgattgcaatggattgaaacacatcaaaaatctttagatctatgaaattgataatgataataataaaaattcatgggtcatctttggtggatgctaagaaagcaactcattattttttaaaagtggyaaatttgaaaaagggattatccatttatttgcctttcctatataattttacctcaggtcatcaaataattgatcaaaggaagtttttttaatagacttgctctagctattaatgaagaaagaatgacagaattagaatatcaccattttgcaccccttaatggaataatgaagcaaggtaatgattgtcaatgagcatcgcaataaaagagacaaccagatgaaataacata

SEQ ID NO: 323026 - DNA, 498 bp, Homo sapiens
taggtattgacagaagctgattaataataaatcaggccaggcatggtggctcacacctgtaatcccagcactttgggaggctgaggcaggtgaatcacctaaggtcaggagatcgagaccagcctggccaacatggcaaaaccacgtctctactaaaaatacaaaagttagccgggtgtggtggcgggcacctgttatcccagctgctcaggaggctgaggcagggaatcgtttgaacctgggaggcggaggttatagtgagccaagatcacaccactgcactccaccttcagcaataagagcaaaactccatctcaaaaacaaaaataattatcagttaatcagcaaacacagtaagtactaattgctcaccagtcaccatgctagtcattggcatgatggggaaagcaacamaaaggggtaccaacaagacatgaccatgagtgtcagtcacaccatcactttgctgctgattcctacatcatcaaaagacaaaga

SEQ ID NO: 323027 - DNA, 552 bp, Homo sapiens
cttattgcctgtcccttttagtacaggaataatgaaggattttccccagagtaacaagcctttgcagtctttttctaagcatgcagtgctgcaaaagctctctatccctggaatttttatctgtgagcttgtccaagagaacttaayggttttccagacctttaaagtcaagtttgccctctttctctcagattaacacatatgagcatttaggaataaatagttaacagaaaattcagaaatgctaacaacagggagaaataaattatttacattatctctaaatgctagataacagagatttctacaattctgctggctttgtgtgggttttacagataaccatgcatggagattttgttggaaacccaaagagatactcatagatcatagcccatatttccgtctctgccatcatgacagaaagccagtgttgtccagcaggcggcacaaggaagcactaaagtctctagagaatggtgagtaatctccaactgaacagaggctgacagcaaccactttaaaaggctaatctaaatgtatgagccttca

SEQ ID NO: 323028 - DNA, 552 bp, Homo sapiens
cttattgcctgtcccttttagtacaggaataatgaaggattttccccagagtaacaagcctttgcagtctttttctaagcatgcagtgctgcaaaagctctctatccctggaatttttatctgtgagcttgtccaagagaacttaatggttttccagacctttaaagtcaagtttgccctctttctctcagattaacacatatgagcatttaggaataaatagttaacagaaaattcagaaatgctaacaacagggagaaataaattatttacattatctctaaatgctagataacagagatttctacaattctgctggctttgtgtgggttttacagataaccatgcatggagattttgttggaaacccaaagagatactcatagatcatagcccatatttccgtctctgccwtcatgacagaaagccagtgttgtccagcaggcggcacaaggaagcactaaagtctctagagaatggtgagtaatctccaactgaacagaggctgacagcaaccactttaaaaggctaatctaaatgtatgagccttca

SEQ ID NO: 323029 - DNA, 606 bp, Homo sapiens
acttggtattcagtatagtactctttctatacatactctctatgtattactctggtattcaatagagaatagatactagaaatttgctgtcagtctaattttcagcttatgagacaagtatttaaaatttgcatttacattgaagtctccaattttttctaggatgtgttgacatgagtsttgttaatgtgtgtgtgtgtgtgtgtgtgcatgcttttaaaaaattaattttcttggttttcacattgcaaaaatgaacttttaattttcccttccattccctctcccatccccttcggatgtacttaatgccacatacattggtcctcatgctttttgactctcctctcatttaaaaatgtctctgcctactcattctatattttaggagattcactttaccacttatttgatcttcagccatgttcattctattattcaacatgtccactgacattttaattttgatggttatttttgaaggattaagagcacttttctgctcctgggatagctagctctttttcacagaacaatatttttgtgatataatattctcttgactcactcacagtatactaattagaagatgtttaattatttttt

SEQ ID NO: 323030 - DNA, 575 bp, Homo sapiens
gtcttgaactcctggcctcaagcaatcctccttcatttgaggatggcctaagcaatcctaagccttctaaagtgctgggattataggtgtgagcyaccacatccggtctaaacttctgtttctgaatgcggcttttctggaccacaggccagtcagtatacactacttattcatagtcatgactgtttgtttaagtactgggcagataataatgaatcttgtttggtaattctatcacgaaatgttgtttaattgagtttatgtctttgagataaaaatttgtgcattacagaagggaaaataaactatatataagacatgaattttttcctagagaccatactggaatatgtcagaggtacataaaaaagtaatacattcagaataatctagcagcagagtagtgagtgcctgtaccagaaatacatcatacctcctcttaatggattaaaaattgctattcaatctatcatctgagcaagaagtcaactatattatagcaaagcttgaggggtattgacgttttaatgaccttccacttccaattggtttaaaaatgtttatactagaattct

SEQ ID NO: 323031 - DNA, 576 bp, Homo sapiens
tggctggcagaatagaatagacaagcatttccatcctaatcacctctcccactgcacagcccacaggagagaaggagagaagctaatcattgtcatatagagcctcatgggaagttaaccaccataaaatcttaggtttccagagatgagaaaggcctcagtttcttctgtactgtttgatgaaacactacagcatatgaaagctcacttatcccaaattactcactktatgctgaggccataggaatttgaatgactgtctccaagttacttgtcagttggaggaagtccaactttctcccaggcagagaacccaaggccacaataggctagagctagaattcaacaccctggtttctcaggttagaggccacagaatatgcctttcaatagggtagaaattatggcttgttccctgcccttcagtatttagaattaagtcctaacttggtgctctttcttcactgtgaaagtgaattcaatacacaccttttctgtttttacaatgctcagctggctaactggggaaaactacacatgcttcctcaatctaaaatcacttgtaaatgcacaatt

SEQ ID NO: 323032 - DNA, 576 bp, Homo sapiens
tggctggcagaatagaatagacaagcatttccatcctaatcacctctcccactgcacagcccacaggagagaaggagagaagctaatcattgtcatatagagcctcatgggaagttaaccaccataaaatcttaggtttccagagatgagaaaggcctcagtttcttctgtactgtttgatgaaacactacagcatatgaaagctcacttatcccaaattactcactgtatgctgaggccataggaatttgaatgactgtctccaagttrcttgtcagttggaggaagtccaactttctcccaggcagagaacccaaggccacaataggctagagctagaattcaacaccctggtttctcaggttagaggccacagaatatgcctttcaatagggtagaaattatggcttgttccctgcccttcagtatttagaattaagtcctaacttggtgctctttcttcactgtgaaagtgaattcaatacacaccttttctgtttttacaatgctcagctggctaactggggaaaactacacatgcttcctcaatctaaaatcacttgtaaatgcacaatt

SEQ ID NO: 323033 - DNA, 576 bp, Homo sapiens
tggctggcagaatagaatagacaagcatttccatcctaatcacctctcccactgcacagcccacaggagagaaggagagaagctaatcattgtcatatagagcctcatgggaagttaaccaccataaaatcttaggtttccagagatgagaaaggcctcagtttcttctgtactgtttgatgaaacactacagcatatgaaagctcacttatcccaaattactcactgtatgctgaggccataggaatttgaatgactgtctccaagttacttgtcagttggaggaagtccaactttctcccaggcagagaacccaaggccacaataggctagagctagaattcaacaccctggtttctcaggttagaggccacagaatatgcctttcaatagggtagaaattatggcttgttccctgcccttcagtatttagaattaagtcctaacttggtgctctttcttcactgtgaaagtgaattcaatacacaccttttctgtttttacaatgctcagctggctaactrgggaaaactacacatgcttcctcaatctaaaatcacttgtaaatgcacaatt

SEQ ID NO: 323034 - DNA, 576 bp, Homo sapiens
tggctggcagaatagaatagacaagcatttccatcctaatcacctctcccactgcacagcccacaggagagaaggagagaagctaatcattgtcatatagagcctcatgggaagttaaccaccataaaatcttaggtttccagagatgagaaaggcctcagtttcttctgtactgtttgatgaaacactacagcatatgaaagctcacttatcccaaattactcactgtatgctgaggccataggaatttgaatgactgtctccaagttacttgtcagttggaggaagtccaactttctcccaggcagagaacccaaggccacaataggctagagctagaattcaacaccctggtttctcaggttagaggccacagaatatgcctttcaatagggtagaaattatggcttgttccctgcccttcagtatttagaattaagtcctaacttggtgctctttcttcactgtgaaagtgaattcaatacacaccttttctgtttttacaatgctcagctggctaactggggaaaactacrcatgcttcctcaatctaaaatcacttgtaaatgcacaatt

SEQ ID NO: 323035 - DNA, 544 bp, Homo sapiens
atagggtgaactttctgcttcttttttattccttcctttttttttctttttttttctctctctctcctatagggtgaacttcttggctcaaaaggactgtgacaaatgtgaaaagaatttgagatagaggctttagaatccccaatgtgctgactggttaattaagcttagcattggaattcatctctagggtcacctactcaaccactgctcagcgtcctctgcgtctgtcttgtgcattctctcagataacatctgaagtccataatcccagtactttgggaggcctaagcgggtggrtcacctgaggtccggaattcaagaccagcctggccaacgtggtgaaaccccgcctctactaaaaatacaaaaattagccaggcatggtggtgggtgcctgtaatcccagctactcaggaggctgaggcaggagaatcccttaaactggggaggtggaggttgcagtgagccgagatcatgccattgcaaggtgaaaagctcttaaagaccaaaaaggcagtttataacctcaatacacttagca

SEQ ID NO: 323036 - DNA, 513 bp, Homo sapiens
taagatccagacctatcaaggagaacagttttcttcccctccctgtaagaccaaaatgtaaccacctgaatggaccctttttcaagatgatgactatctccaaggatcacttaatttccaaagagaactatttacaacttaatttctgttccccattcaatcattctcctgaataatcatttattcccatcaatagacttcctcttctccatgttcccataacctgttttatcagaatccaaggcccctttctttctgaaacctcaagttggcacataagcttctctaccttattgggaagttgagtcttcgttycgaaggctcctgtgtatacacgttaaatacacttgtacacctttttttcctattaaccaatctgcctcatgtcagcgattttccagccaacctttaaagggccaaggggaaagttctctcttggcccccacaacctcagtccttgtgacattacacagccactgaaccaaccttgcctgcattcactacatccggggc

SEQ ID NO: 323037 - DNA, 435 bp, Homo sapiens
ccagaaaactaaatcaaacaatatgctaaaaggcttacacaccaggatcatgtgggatttatcccagtaatgtaagggtgtatcaatataagaaaatcaatcaatgtaatgcatcaagttgatagaccaagtagaaaacacatgatcatctcaattgatgcagaaaaatgtctgacaaaatcaaatactatttcatgatttttaaaaaacattcagaaactagaaataaaagggaaattcctcaacatgtctaagggtatttatgaaaaayccacagctaacatcatactcaatgatcagactgacagtttttccccgaaagataaggatgcttgcttttaccccagctatactgcattatactgtaagttctagccagagtaaataggcaggaaaaataaatgaaagacatacaaattggaaaagaagaactaa

SEQ ID NO: 323038 - DNA, 565 bp, Homo sapiens
agcagcaaaaaagtaaataaataaattaaatttcattaaaattaaaacctttcatgaaagacattaccaagaaagtgagaagaaaaactacagaatggttggaagtgtttgcaaatcatttatctaataagggtctaatatcccaagtatataaagaactcctacaactcagcaagataaaaagacaacctaaattcagaactgagtaaagggcttgaagacttctatccaaagaagatatacaaatggccaataagtacatgtaaagatgctcaacaacattaatcattagtaaaattcaaattaaaaccataacttgataccacttcacaacaactaggrtgactataatttgtgttaaatggaaaataatagtaaggatgtggagaaattgaaacacttgtaaattgctgatgctggaaatgtaacatggtacagctgttttagaaaacagtttgaaagttcttttaaaaattaaatgcagaattactgtatggcccagaaattccaatcctaagtatacaccccaaaaaattgaaaacagagactcaaacagatgtgtgta

SEQ ID NO: 323039 - DNA, 495 bp, Homo sapiens
ggtaaatttgcaaagaattatcatcttttacatattaagtcttttaacccatggcatggacaatttcttcatttatacaggtattcttcaatttttatcaacaatgtttcattgttttcagtgtacaagtcttacgtttccttgtttaaatttttttctaagtatttcactttttaaaatgctattgtgaatacaattgtcttcttaattttaatgttcagattattttttgctaatactatgaatacaactgattttgcctactgatcttgtatcctgcatcctaggtaaatttggttgktttttttttttttttatgtaatgggttttgttgctgttattataaattcctttggattttctccacacaagatgatgttgtctgtgaagaatgagttactgattccttttcaacctagaaattccctttttgtccttactgtactggctaaaacctccaatacaaagttaataaatgtggttgatgctgacatc

SEQ ID NO: 323040 - DNA, 584 bp, Homo sapiens
tctctggtctgttgataatcattccttagagtaataaatctatctattaatatatgttgacaacacccattcttatatcttcagtcctaaacactcctcttaagcaaattaactaaggcacacaatatatattttaaaaattctttatttttcttccaaaatttttttatcccatatctttgccaaattggcataatctccatccttataattactcataactaaatccttgacccatcttcttagacaatatatctaaatctgatttgtagccaccacttacactgcttccaacctgatccaagccacagtcatatcttaccttcgccattgcaacaatctaccagttggccttctcagttttaattcctgccctgtgtagtctattcttcagcagcaagagtggttttcttctatgtaaatcaaatcacatcactcttgcttaaaattagactcaaagtaaaaaccaaaatctttagaaaaacctgtgggtccctgcaaaacctgcaccaactacacccactcatatcctcctccctgattttatgtgctatcrtgccttccttgatcttttgattccagat

SEQ ID NO: 323041 - DNA, 543 bp, Homo sapiens
ctaaacacttgggatttccaaacagttctgtcacatgtattggaatatttctggagaattatttaaagcaaagttattggtgtaaaaacattcatatgtgtctgcagatattcacataatttcttccaactgtgcattttctaattgagaaataaatatggtatatgatgaatggcagatatgatctgcttattccctttggttcttcatttggcaggtcaattttcagagtgaacaaacagaaaacacttctctaaagcaagactttcttcttactctgcatccaagccttaaataactcaattctaaagaatatttttgccaaggctaatcctcttgtgagcttagcttagaagtcgttccataaaaggaatagtgagtgtataacagaaggttaagcactgttgagaatggtcagttttgcttcatttcaggaaaaccaggtatagaaacccagtatggaaaacaaagttcttrtttggccagattggaatactctgaccaaaaaaaaacaatttttgatggggttgtttttttcttgta

SEQ ID NO: 323042 - DNA, 484 bp, Homo sapiens
gtgacatttgcttaaccagaagtggcttaaattgggaagattaaagtttaaagaacattttgtttaatctcattataatgaagtcaaggaaagaaagataaagattaaggataagcttyaatctctcgttattaaagatatagttgtgttcattttattttgatatatgataaaagtaatttcaactaaatttgtattgcttaccaattgattagaattggtttggatttcccagattttatttcatgagctcatttttcttttgctgagtaagttgtgctttttgtagacactaaaatagataattatcttgcatgaattataacaagttatattatgtaacagctaaagatgaaacacaattgaaataaaactagtccatgactaaatatggatcaaaatatttctgaagaaaaaagcaagacaaaaagttataggaagactaaggactgaaattctacttggaacatatattaacacaact

SEQ ID NO: 323043 - DNA, 484 bp, Homo sapiens
gtgacatttgcttaaccagaagtggcttaaattgggaagattaaagtttaaagaacattttgtttaatctcattataatgaagtcaaggaaagaaagataaagattaaggataagcttcaatctctcrttattaaagatatagttgtgttcattttattttgatatatgataaaagtaatttcaactaaatttgtattgcttaccaattgattagaattggtttggatttcccagattttatttcatgagctcatttttcttttgctgagtaagttgtgctttttgtagacactaaaatagataattatcttgcatgaattataacaagttatattatgtaacagctaaagatgaaacacaattgaaataaaactagtccatgactaaatatggatcaaaatatttctgaagaaaaaagcaagacaaaaagttataggaagactaaggactgaaattctacttggaacatatattaacacaact

SEQ ID NO: 323044 - DNA, 484 bp, Homo sapiens
gtgacatttgcttaaccagaagtggcttaaattgggaagattaaagtttaaagaacattttgtttaatctcattataatgaagtcaaggaaagaaagataaagattaaggataagcttcaatctctcgttattaaagatatagttgtgttcattttattttgatatatgataaaagtaatttcaactaaatttgtattgcttaccaattgattagaattggtttggatttcccagattttatttcatgagctcatttttcttttgctragtaagttgtgctttttgtagacactaaaatagataattatcttgcatgaattataacaagttatattatgtaacagctaaagatgaaacacaattgaaataaaactagtccatgactaaatatggatcaaaatatttctgaagaaaaaagcaagacaaaaagttataggaagactaaggactgaaattctacttggaacatatattaacacaact

SEQ ID NO: 323045 - DNA, 484 bp, Homo sapiens
gtgacatttgcttaaccagaagtggcttaaattgggaagattaaagtttaaagaacattttgtttaatctcattataatgaagtcaaggaaagaaagataaagattaaggataagcttcaatctctcgttattaaagatatagttgtgttcattttattttgatatatgataaaagtaatttcaactaaatttgtattgcttaccaattgattagaattggtttggatttcccagattttatttcatgagctcatttttcttttgctgagtaarttgtgctttttgtagacactaaaatagataattatcttgcatgaattataacaagttatattatgtaacagctaaagatgaaacacaattgaaataaaactagtccatgactaaatatggatcaaaatatttctgaagaaaaaagcaagacaaaaagttataggaagactaaggactgaaattctacttggaacatatattaacacaact

SEQ ID NO: 323046 - DNA, 433 bp, Homo sapiens
cttacccccatatcctagcctcccaatagctctctttcctattaatrataagcctcctctaatctccccagctcagaaggaaatcagcaaagaaatctccaaaggaccacaaaaacccctgggctatcggttatgtccccttcaagctgtaggaggaggggaatttggcccaacctgggtacatgtccctttctcactctctgatttaaagcagatcaaggcagacctggggaagttttcagatgatcctgataggtacacagatgtcctacagggtctagggcaaacctttgatttcacttggagagatgtcatgctattgttagatcaaaccctggcctttaatgaaaagaatgcagctttagctgcagcccaagagtttggagatacctggtatcttagtcaagtaaatgatagaatgacagctgaagaa

SEQ ID NO: 323047 - DNA, 433 bp, Homo sapiens
cttacccccatatcctagcctcccaatagctctctttcctattaataataagcctcctctaatctccccagctcagaaggaaatcagcaaagaaatctccaaaggaccacaaaaacccctgggctatcggttatgtccccttcaagctgtaggaggaggggaatttggcccaacctgggtacatgtccctttctcactctctgatttaaagcagatcaaggcagacctggggaagttttcagatgatcctgataggtacacagatgtcctacagggtctagggcaaacctttgatttcacttggagagatgtcatgctattgttagatcaaaccctggcctttaatgaaaagaatgcagytttagctgcagcccaagagtttggagatacctggtatcttagtcaagtaaatgatagaatgacagctgaagaa

SEQ ID NO: 323048 - DNA, 468 bp, Homo sapiens
tcaaaaccttaaagcaggccctagtacaagctccagctttaagccttcccacaggacaaaacttctctttgtacatcacagagagagcaggaatagcttttggagtccttactcagactcgtgggacaaccccacaaccagtggtatacctaagtaaggaagttgatgtagtagcaaaaggctggcctcactgtttaagggtagttgcagcagtggccatcttagtgtcaggctatcaaaagaatacaaggaaaggatctcactgtctggactactcatgatgtaaatggcatactaggtgccaaaggaagtttatggctatcagacaaccacctatttaaattccaggcgctactccttgagggaccagtgcttcaaatacgtayatgcatggccctcaaccctgccaattttctcccagaggatggggaaccaatcgagcatgactaccaacaaattatagcccag

SEQ ID NO: 323049 - DNA, 570 bp, Homo sapiens
gactgtgcgtaacaaaaactgtggaaagggaaactttgaataaggggagactactgtaaytgtaaacatcgtttacgtaaacacgtatggtaaaatgtcaagggacaccatctaaaataagtttaaacagaccggaattacttacaaactagcgccaagatttttaaaatgaagaagagaaacagataaatatacaagttcagtcaatgaaaaaagaagattaaaaaagcaatggaaaatcagaacaaatgaaagcacaaataacgattttaaaaataagtcaaaaatataaataattatcataaacgtaaatgaactaaacttctcaaattaaatacacaactaaccatgatagaaactaaacccagctataagggttaaacttttaaaacacttataaaaagctgtaacacaaagtattgtttaaaggaatctagtgtagttatataatatccaaaaatagatgttaaagcacaaagctatgccagcgttaaggaagtttgcaacaaaataataaaatcttcacctcaccaggaaggtacaaaatttctaaaagtgtagagagaaaat

SEQ ID NO: 323050 - DNA, 570 bp, Homo sapiens
gactgtgcgtaacaaaaactgtggaaagggaaactttgaataaggggagactactgtaactgtaaacatcgtttacgtaaacacgtatggtaaaatgtcaagggacaccatctaaaataagtttaaacagamcggaattacttacaaactagcgccaagatttttaaaatgaagaagagaaacagataaatatacaagttcagtcaatgaaaaaagaagattaaaaaagcaatggaaaatcagaacaaatgaaagcacaaataacgattttaaaaataagtcaaaaatataaataattatcataaacgtaaatgaactaaacttctcaaattaaatacacaactaaccatgatagaaactaaacccagctataagggttaaacttttaaaacacttataaaaagctgtaacacaaagtattgtttaaaggaatctagtgtagttatataatatccaaaaatagatgttaaagcacaaagctatgccagcgttaaggaagtttgcaacaaaataataaaatcttcacctcaccaggaaggtacaaaatttctaaaagtgtagagagaaaat

SEQ ID NO: 323051 - DNA, 570 bp, Homo sapiens
gactgtgcgtaacaaaaactgtggaaagggaaactttgaataaggggagactactgtaactgtaaacatcgtttacgtaaacacgtatggtaaaatgtcaagggacaccatctaaaataagtttaaacagaccgraattacttacaaactagcgccaagatttttaaaatgaagaagagaaacagataaatatacaagttcagtcaatgaaaaaagaagattaaaaaagcaatggaaaatcagaacaaatgaaagcacaaataacgattttaaaaataagtcaaaaatataaataattatcataaacgtaaatgaactaaacttctcaaattaaatacacaactaaccatgatagaaactaaacccagctataagggttaaacttttaaaacacttataaaaagctgtaacacaaagtattgtttaaaggaatctagtgtagttatataatatccaaaaatagatgttaaagcacaaagctatgccagcgttaaggaagtttgcaacaaaataataaaatcttcacctcaccaggaaggtacaaaatttctaaaagtgtagagagaaaat

SEQ ID NO: 323052 - DNA, 527 bp, Homo sapiens
agataaagctacagacctctaaagataagattgtttacagcagtatctcttgtaatcatacaaaattcaaaacaacccaagggatgaaaaattgtaacatacacataatttggaatactgttggcactgaaaacaatcacattgaataaatcttataatcataacattaagtgaaaattagtatgaaattaattatataaggtttaaaaatatttaaagctaagtaaaaatttagaaggagtttacctattggacgaaggcaggggatgtgaacaaggaatgaaacacaagcaaaatgatcatccatatttcctatgttggttgtgcttgttttttttttttttcaracattttcactgttttcttttttctttatttatttttatttttttccccttttcccttcccctttccctggccttcactgggttttgaaaacttttggcagttattttcttttcctctaacatttaactttctcctggcttccattgttgctgatgagaagttagatgtcagtcttatca

SEQ ID NO: 323053 - DNA, 556 bp, Homo sapiens
cctatttaataaatggtgatgggaaaactggctagccataygtagaaagctgaaactggatcccttccttacaccttacacaagaattaattcaagatggattaaagacttaaatgttagacctaaaaccatgcatgtcccattcttattccatttccctcctatgcttttctctgccacacattgccagtcaaatccactattctgggttatttggagtttatcatcctacgcatgttgttatacttttactacataaataatttacactttagagttccattgcagaaaacagaatctgctttagctaggttgaaaaagggatgtcttactacatattaaatagcttgtaaaacaggaagggctaaagcactcggctttaggctatgtttccaggaatgactccagaacatattacctacaaagcatttgggtaatgtgctatcattgctgccagaagttgctgatagaggaggttgctatccctactgctgatgaaagaattgaaaattactccgttgggaaaagagctgtttgaaactgtcaaattaggaaa

SEQ ID NO: 323054 - DNA, 575 bp, Homo sapiens
gaaaactggctagccatatgtagaaagctgaaactggatcccttccttacaccttacacaagaattaattcaagatggattaaagacttaaatgttagacctaaaaccatgcatgtcccattcttattccatttccctcstatgcttttctctgccacacattgccagtcaaatccactattctgggttatttggagtttatcatcctacgcatgttgttatacttttactacataaataatttacactttagagttccattgcagaaaacagaatctgctttagctaggttgaaaaagggatgtcttactacatattaaatagcttgtaaaacaggaagggctaaagcactcggctttaggctatgtttccaggaatgactccagaacatattacctacaaagcatttgggtaatgtgctatcattgctgccagaagttgctgatagaggaggttgctatccctactgctgatgaaagaattgaaaattactccgttgggaaaagagctgtttgaaactgtcaaattaggaaatttctgccaccatgctgactacaaaactaccagttagtaaa

SEQ ID NO: 323055 - DNA, 575 bp, Homo sapiens
gaaaactggctagccatatgtagaaagctgaaactggatcccttccttacaccttacacaagaattaattcaagatggattaaagacttaaatgttagacctaaaaccatgcatgtcccattcttattccatttccctcctatgcttttctctgccacacattgccagtcaaatccactattctgggttatttggagtttatcatcctacgcatgttgttatacttttactacataaataatttacactttagagttccattgcagaaaacagaatckgctttagctaggttgaaaaagggatgtcttactacatattaaatagcttgtaaaacaggaagggctaaagcactcggctttaggctatgtttccaggaatgactccagaacatattacctacaaagcatttgggtaatgtgctatcattgctgccagaagttgctgatagaggaggttgctatccctactgctgatgaaagaattgaaaattactccgttgggaaaagagctgtttgaaactgtcaaattaggaaatttctgccaccatgctgactacaaaactaccagttagtaaa

SEQ ID NO: 323056 - DNA, 589 bp, Homo sapiens
agacaagtctgccaccaaagccaaaaattatttctctatctcatttcctatccaaactgtgtccagttaagaatttcaacagagcatatcagaagatcctcagtgaaactgaattacaataagatattaaaataataaattgcctaaacatgttctgataataaaattccaacaatatagaaaatgtcccatatgttggatatagtctcattaacaatattttcagaaagaaattaaatgcaaattctaaaagtgtcgaagtccaaagacttcaaaatccaaaagaatttaaatccaaaataaaaatgtcttaaccttgtaggacaaaaaaattaatttatccccagtttctttttccgctcacactcaactaaaaaacagaaacaatgacaacaacaaaataataataataactggacaaatttgaagtttytttcttctaaataatcagacagacttgaagttctttcaacagctgcaagctaggcaatcactcattgaaatgactgaagtgtcttcagaccacaaactttgtgttaatttactcccaagtcttccctcaacctctccaaagatttcaggagttcat

SEQ ID NO: 323057 - DNA, 484 bp, Homo sapiens
ggtgcacagtctgaaagcttcaccttgacatgaggaatttaactaggaggacaaaactcatgccataattttgtttctgttgttcaatctttgggtagtattagcagccatgaattcagatatcgaaatgcaaagccaaatcaagaatatctattatgcttgtatattctattcaaatacccttgaatgaacaggaaatgaggcaatataatctacttccctgttataygttagactttcttccctgggattacttctcagaaatgacttcaaatgttgcctctcctgctggcaagcagaataatctatttttataagaaatttgagcttcagcagagtccagtagtatacattgccagtcagcccatcattgcatggcttgacctccagaatgtccactcatttcatagacccatattgccacttcaagagattgaactaaagcatcaacttgttgattccaatcaccttgagaaactagaag

SEQ ID NO: 323058 - DNA, 587 bp, Homo sapiens
cctgtacctaactgacataaaagggctgcttctccacctctaggccatttcacccacacatctgtacaaggccttggttcccccacaggaatttggtcaagaggcccagtccttcacatcacccttcttcatccattattgcctgtggtaggcagaattcyaaaggtgtccattccaagttcccatagtctgctcagtcaatcaaaaactaatccagttactgctctgaagggattttgcggataaaattaaccaggtgactttaagatatggagagaatcttggattattcagggagacccaaaataaccacacaggccctcaaaagcagaagagggagagttgcagcagaaaggaaagttgaagagatttgaagcaggagaaagacttgccccactgtcactggctttgaagtgggccatgagtcaggaaatgtaggtggagaataattcccagacagaagttgtcaaggaaacagagccctcagtcctaccaccacatacaagtaaattccaacagcaacgttagaagcctggaagtgggtcctttcctagagactccaaaaaggagcagagccttctgacgcc

SEQ ID NO: 323059 - DNA, 521 bp, Homo sapiens
tgggcacccattctctgtcctgccaccctgtgaagaggtgccttccaccatgattgtaagtttcctgaggcctccccagccatgaggaactgtgattcaaacttcctttttttataaattacccagtgtctcatatttcttcacagctgtgtgagaaaggactaatacacaacccacataacaaacctgcacttgtactccctgaatytaaaaaaaaaaaaaaaaaaaggttgcaaaaagaaaaaaaaataaaagcagatattttggaattcagtgctggtgctggaggctcatgagaacctttctctatctgaaattcccctaatcttagacaagccaagtatatttgctttggtattttcatatcttaggaagtttgagaagaagcagtttgtatttctctcgcttcctgaaaaatttcatcaaagatctggcgggtactctgcccatttgttcctttttcatgtcattttagattaaacatctaaaggcttctaattcttaaacatctaaagaattct

SEQ ID NO: 323060 - DNA, 589 bp, Homo sapiens
accctcagcataactttcaccggtattcaccttcccggaaacgcgccccagtgaaccagcaccgttttccctagtaaagcccttaagcagggttcccacgctcctgggcgtggaggggggcrccgagagcgcaaaggattcttaagacatgactgcgcaggcgctgtcgcatgcgccgcactcccctcgcatgcgccgcactcccgcgcatagccggagacggagactggccgggtagccccgcccccgtagttagcgcggtgcttctcttccgctccgggtcggctccgtttccctttccgggcgggcaggcggcggaccccagtgtctttatccctcttttgcacagtcagcttctgcagctctcccgggctagcatggcagcgtggaagagttggacggccctgcggctctgcgccacaggtaatgggggctcagcggtcgggacgctggcgggcgcgtgggacctggccccgccgtggggctgggattggacccgggtctggggcgaggcctgcggggttcgtggagatgcccacccattcccggcagcgtcctgccgcccccgccgcgccaccctgcctggccc

SEQ ID NO: 323061 - DNA, 589 bp, Homo sapiens
accctcagcataactttcaccggtattcaccttcccggaaacgcgccccagtgaaccagcaccgttttccctagtaaagcccttaagcagggttcccacgctcctgggcgtggaggggggcgccgagagcgcaaaggattcttaagacatgactgcgcaggcgctgtcgcatgcgccgcactcccctcgcatgcgccgcactcccgcgcatagccggagacggagactggccgggtagccccgcccccgtagttagcgcggtgcttctcttccgctccgggtcggctccgtttccctttccgggcgggcaggcggcggaccccagtgtctttatccctcttttgcacagtcagcttctgcagctctcccgggctagcatggcagcgtggaagagttggacggccctgcggctctgcgccacaggtaatgggggctcagcggtcgggacgctggcgggcgcgtgggacctggccccgccgtggggcygggattggacccgggtctggggcgaggcctgcggggttcgtggagatgcccacccattcccggcagcgtcctgccgcccccgccgcgccaccctgcctggccc

SEQ ID NO: 323062 - DNA, 573 bp, Homo sapiens
ccaccatgcctgactaatttttatatttttagtagagatgaagttttgctatgttggccatgctggtctccaactcctggcttcaagtgaactgcccacctcggcctcccaaagtgcggggattacagaccccgcctggcctaatttactgaaaaaatttttaaacttaaaatccaaatattgttttactttggaaaaatggaactgccaacgtattatttagctttttctttcccattttttgaatgccaaatacaatagcatgagaaaagytttctattcaaatagcaccttaagttcagtagtgcttactctgaacacataaagtggcattaaaatttttaagcatgtcagtttcatcagtttcatttactatgagaataaatcattttaatgtctctcaatatattttgtaatatttacctttatataagagtaacttccgtaaatcaaataacagataaactgaactatttggcatctaacaatgaaacttgtggacagcaagaaagagagaaagataaaagagaaagaaaaagagacagagaattttcctgagtatttcacatatat

SEQ ID NO: 323063 - DNA, 573 bp, Homo sapiens
ccaccatgcctgactaatttttatatttttagtagagatgaagttttgctatgttggccatgctggtctccaactcctggcttcaagtgaactgcccacctcggcctcccaaagtgcggggattacagaccccgcctggcctaatttactgaaaaaatttttaaacttaaaatccaaatattgttttactttggaaaaatggaactgccaacgtattatttagctttttctttcccattttttgaatgccaaatacaatagcatgagaaaagctttctattcaaayagcaccttaagttcagtagtgcttactctgaacacataaagtggcattaaaatttttaagcatgtcagtttcatcagtttcatttactatgagaataaatcattttaatgtctctcaatatattttgtaatatttacctttatataagagtaacttccgtaaatcaaataacagataaactgaactatttggcatctaacaatgaaacttgtggacagcaagaaagagagaaagataaaagagaaagaaaaagagacagagaattttcctgagtatttcacatatat

SEQ ID NO: 323064 - DNA, 545 bp, Homo sapiens
gggtttattattctgctgcctgtatttggcatgttttgcagtgcatgagctaactttccagataggacaaaactctgtatttttcattaaagggaagaattttgattactcaaaatttgttttctctctgtggcatttaaatattgtatgtgagtctaattaaagaattaggaaagagattgtatagtrcatccaaacaagttattttaaaatattaataaagatattatatttataaaattaatttttaaaattttataaaatatagcatcctggaaaatacacattatgtattttgccagaaagtagaaaatgatgagaataaatgactgcactaaattgaagacaagcagcaagtatttatttttaggcattgctattaagggcccagtgaggctaatttatttttagtgttttttcttttctgacttaagtatgtagtatttgtgccaaatttttgtgtagtgtgaaggacatgaatttgcttttggatcaccaaactccaatactttgggacatcctctacataatatagaaaatgaacc

SEQ ID NO: 323065 - DNA, 581 bp, Homo sapiens
tctgactcttagcttcctaaggaagacttcataatcatgtcataggttaggtgtccctgctgtaatctctgagcactggtacccatacttcataaatttttagtacagtttggtccatgcttttaaattatttgattactctatcttccacaacagctatgctgtgagctcaatgtggataagatccatgcttgtttctgctcaccattccatctgcagggctagcacaatgtctgttagagtggacattaagtaaatatttattgtatgaacgaaagaataaatgaatgaatgaaagatatttaaaagaaaataatctagcaaagattatttatgaagaattcaaaaagaagaaattttcttaacaggaagagatgatatcaattttcacaaacttttccagataaggaaaaaagagttaayacatgccaactcattttatgaggtcaataaaaccctgataacaagaccttaccaggacttaatggcaaatctctcaagctgacataaacgccctaatagaaatgttagcaagagaaatttggtgtttaaaacaattaatatatcacgaagttgaatat

SEQ ID NO: 323066 - DNA, 563 bp, Homo sapiens
gagttacattattgattctacagaggcttgctattgattataaggagctctgatagcttargcaaacttgctgcctcacacatgggttgattttttaaaaagaaaacaattgtattgagctataattcacataccatacattccacccatttaaaatgtacagttcaatagttttagtatattcacaaaattgtgccaccatcatcacaatcagttttagaacacttttatcaaccaagataaaataaaattaagaaagaaaccctgtgtgcatcagcagtcactcctgatctctcgctatcctcaactgtaggcaaacaattatctactttctatccttatttatttgcagattctgcacattctatataaatgaattatacaatacgttgtttttttcactgacttcttttacttatcataatgtctcctaactttctcaatgttttagcatgcatcagtactttattgctttttattgttgaattatattctattgaatttatgtgccatgatttctttgtccattcctcagtgaaagggttgtttctactttttggcca

SEQ ID NO: 323067 - DNA, 606 bp, Homo sapiens
agtggtggtttatgcctataatcccagcacactgggagaccaagggcatatttgcttgaggccaagagtttgcgaccagcctaggcaacatagcaaaaccctgtctctacaaagaaaaaaatgtcattagatttgcaatagatagataaattgatttaattcattcatagtgtaattctgtacattaagcatcaaacctaagtttatacagtgtcttgtgtggccaggatggaggatgaaattaacacctcaagaaaagtcagtatatgcttcaaagacctgttgatccrgattgtgtaagaattagtgatactctgatatattctaagcaacagtactcagatattatgtattaataaatactttcctgaaaaaattgtaagctgtctacataaacaactgttgttttccaagttgaataaaagggataaacctttcagtctaggctcatggcttttcagcaaaatttattaatttattattagtagcaaaagcctttttaaaatctccattagccagttttgtccaaatctttcttatccatatttgatatcaaggttttcatctcacataaaggcattttgcatctaagtcacttgagacagt

SEQ ID NO: 323068 - DNA, 606 bp, Homo sapiens
agtggtggtttatgcctataatcccagcacactgggagaccaagggcatatttgcttgaggccaagagtttgcgaccagcctaggcaacatagcaaaaccctgtctctacaaagaaaaaaatgtcattagatttgcaatagatagataaattgatttaattcattcatagtgtaattctgtacattaagcatcaaacctaagtttatacagtgtcttgtgtggccaggatggaggatgaaattaacacctcaagaaaagtcagtatatgcttcaaagacctgttgatccggattgtgtaagaattagtgatactctgatatattctaagcaacagtactcagatattatgtattaataaatactttcctgaaaaaattgtaagctgtctacataaacaaytgttgttttccaagttgaataaaagggataaacctttcagtctaggctcatggcttttcagcaaaatttattaatttattattagtagcaaaagcctttttaaaatctccattagccagttttgtccaaatctttcttatccatatttgatatcaaggttttcatctcacataaaggcattttgcatctaagtcacttgagacagt

SEQ ID NO: 323069 - DNA, 606 bp, Homo sapiens
agtggtggtttatgcctataatcccagcacactgggagaccaagggcatatttgcttgaggccaagagtttgcgaccagcctaggcaacatagcaaaaccctgtctctacaaagaaaaaaatgtcattagatttgcaatagatagataaattgatttaattcattcatagtgtaattctgtacattaagcatcaaacctaagtttatacagtgtcttgtgtggccaggatggaggatgaaattaacacctcaagaaaagtcagtatatgcttcaaagacctgttgatccggattgtgtaagaattagtgatactctgatatattctaagcaacagtactcagatattatgtattaataaatactttcctgaaaaaattgtaagctgtctacataaacaactgttgttttccaagttgrataaaagggataaacctttcagtctaggctcatggcttttcagcaaaatttattaatttattattagtagcaaaagcctttttaaaatctccattagccagttttgtccaaatctttcttatccatatttgatatcaaggttttcatctcacataaaggcattttgcatctaagtcacttgagacagt

SEQ ID NO: 323070 - DNA, 556 bp, Homo sapiens
aatgccactgatacatacacataaatttactaagcatagtcatactgtttcttcttctcatttacctttctggattccatttcaacattagcatttgcgtagttttaagtacttatataaatattcatgaaacgaatattctccctaactattgtgtatcatttgcactgttgccacaaacatatttttaaactggctataatctgtaaaagacaatattcttcatagttattatttaatattaacaaatttattaatttgattgacattataaaaataattagcaaattttctcttttcatttgcaaaagcagtgagtactcttttacttatgagtaacagaggtcctgagaaacataacaatttgccaaatgtctgggacagaagtagcagatgcacaaatgyttagattttttaaattattgttttaattctatcaatttcatattaggctacagaagaataattactagaagtatgtaatggaaaatggaaaaagatacaattcaagcaagtagttcacacaaaactttttctccattaatattgataaatt

SEQ ID NO: 323071 - DNA, 598 bp, Homo sapiens
tggaaaaagatacaattcaagcaagtagttcacacaaaactttttctccattaatattgataaattaacaagcacaataatcacatggtctttggatcatgttttgttttacaatttctttctgaactactgcacagcccttaaagatgctgatcccatctgtgacagttaagtagaatattttttcattacgtatgtctaactaggataatttaaaaaaatggaaaaatgctccctgaattttcttttagattaggaaaatgaactacatcatttgcagaaaactattgtcataagaaatatgatttaaaagattttcaaaaatttattatacaaaatctggagatacrttggcgactttctattagcttaaagtttattctaaaaaggctttaaaatatgtgcaatgaaaactcatctatgaaaaacatcttacattttaaataggccctttagatatctacatattgagtaatcatattattccaaccaccatgtctgtgtctattagcacaataaatttgattaacaggatatttagatgagaaaaacttttacactgtgcataagtaataatgggtttaaaaatttgtgttta

SEQ ID NO: 323072 - DNA, 597 bp, Homo sapiens
agtctcacttccacaatcaccagttatttaaaatattaaaagtagtgatttmtatcacatgcctgtttaacttcagcttggcctaatcagaaggcatatgaatactggagattaattgtgtattattgtgaacataatcagatagtgattctaattttagtttctgttccagatatataattttttcttgaacaaatcaatagagtttcatctacctgatgtaaatatattgaactgacaaatacttttttctctatttgtagaatctaccagaagccatttactttttctagcaaaaacagaggtaaaccttccttctcttgcctcttgtcaactcttttgctttctttcatgatgtagttttagaaattataattgcttggacgtacaacaaaataaaatgctgatctattatattgaaaactgattgaacatcatgaatcttgatatgtctggcagataattagagattaatcattttatcatcaccaccttggtgaaatttctaagagatttcatttttggaatcactccctacaaaatgaagtgcaagttgttgtgccatgactaccactatattgctcctatcattataaa

SEQ ID NO: 323073 - DNA, 599 bp, Homo sapiens
aagtaactcccagtataataaacacaaagagaaccaccactagaacaattgtacctaaaagtagcaagagataaacaactttaacatgtacaaagggaccaatataaaacaaaacaaaaaaatacctttcctcagaattaatggaggtcaaatatatccaaaatttagaaaagaaataaatgacaactaataattttatatccaacaaaagtattatttaaaatgaaggcaaataaagacattttaaagtaaacagataattttgttattgagaatttattgctagcatatcttccttaaaataattattaaataaagctacttcttcagggttaaaggaagtgatactgatggcagcagcggcccttctggagtggctgctgcaaagattccagatgcagcagggktggggtgcagtcagggcagcacactccttgaagccggtgggagccaggaacaagcagaagccctggccccctctgagttgaaggggtgggagccctgcagctgcccagtctaggctgtgaacccagcatctctgctctctcgggggcccggaaagcccaccctgtgcctacaggctgggaaatacctgctcc

SEQ ID NO: 323074 - DNA, 599 bp, Homo sapiens
aagtaactcccagtataataaacacaaagagaaccaccactagaacaattgtacctaaaagtagcaagagataaacaactttaacatgtacaaagggaccaatataaaacaaaacaaaaaaatacctttcctcagaattaatggaggtcaaatatatccaaaatttagaaaagaaataaatgacaactaataattttatatccaacaaaagtattatttaaaatgaaggcaaataaagacattttaaagtaaacagataattttgttattgagaatttattgctagcatatcttccttaaaataattattaaataaagctacttcttcagggttaaaggaagtgatactgatggcagcagcggcccttctggagtggctgctgcaaagattccagatgcagcagggttggggtgcagtcagggcagcacactccttgaagccggtgggagcmaggaacaagcagaagccctggccccctctgagttgaaggggtgggagccctgcagctgcccagtctaggctgtgaacccagcatctctgctctctcgggggcccggaaagcccaccctgtgcctacaggctgggaaatacctgctcc

SEQ ID NO: 323075 - DNA, 531 bp, Homo sapiens
ccccttgccactcctcacctgggtagcccttggcaggcatgggatctggaccaatagcacaagctgagtgcagcctgccaggccaatgatcccagcaggcccaagcaaaactcaggcaaaggcaccaccggccacagagctttccagtcagaaaagcgacamcccgaggattctgtgacaatattagaaagtaaatcaaagccatgtaaaggcacacagggcactggtatagagaataaagtaggtaattataaagaacaacacaaatttgggaaaaaaagatggtggaaaaaaaattccctggattgtgccctgtgcaaggacaccaagttaacaactatctacacagaaaacaccttcataagtaccaacaatcaagtgaacactcacaatactggttttaatttagtattgctgaaagggacaccaaagagattgagaaaaacaatcttgaatcactgatgccactcttctcccacccccgacagtggcaacattgtgtgaagagtgtttcagtgtacaaggggagga

SEQ ID NO: 323076 - DNA, 446 bp, Homo sapiens
taaaaaagaaaagtgagacatattgacctgttgcctacaagaaacacaggtaacctataaaggcacacataaactgaaaatatagggatgaaaaaaatatatcccatgccaatgcaaatcaaaacagaataggagttgctatacatatatcagamaaaatagaggtcaaaacaaaaactataagacacaaagaaagtccatatataatgttaaatagtcaattcaacaagaggatataacaattttaaatatacctgcacccaacattgcagcacccagttatataaggaaaacattagagctaaagagagagactccaatacaaaaatatagatttcaacacccactttcaacactggacacatctttcagacagaatctcaacaaagaaacattggacttagtctgcactacagaccaaatggatctaaaagatatttatagga

SEQ ID NO: 323077 - DNA, 642 bp, Homo sapiens
tatgttacatcaaaaacaagtcttaaaacattcaaaactttggaataacatcaagaatcttctctgaccacaatcaaataaaactagaactcaataacaagaggaattctggaatctgtacaggtacatggaaattaaacaatatgctcctgaatgataagtgggtcaatgaaaaaaattaaaaaatatttaaaaattattgaaacaaatgatagtggaaagacaacacaccaaaacctatcagatacagcaaaagcaatactaagaggaaaatttatagctatataagtgcttacatcaaaaaagaataacaacttcaaataaacaatctaatgatgcatctttaagaactagaaaaacagagcaaaccaaactaaaaattagtagaagaaaagaaataataaggatcaaagcataaataaacaaaattgaaatgaagaaaataatacaaaacatcaattttaaaaaattagttttttgaaaagttaaacaaaattgacaaaactttagccaggawaacaaggaaaataagagagagagaagatcaaataaacaaaataagagaagaaaaaggagacattagaactgagactgtagaaattcaaaggatcattagtagctactatgaacaactatatgcca

SEQ ID NO: 323078 - DNA, 651 bp, Homo sapiens
gccaggaacaaaaagacaaacattcatgrtctcacttatttggggaatctaaaaatcaaaataactgaactcttggagacagacagtagcaggatggttaccaggggctggaaagggtagttgaagaaggagtaggggagggatgcaagagggttaatgtttccaaaaatcatagttagaaagaaggaataagacctactatttgaaagcatagcagctatcatcaataacaatttaattgtacattttaaaataactaagattataactggattgtttgtaacacaaaggaaaaatgcttgggggatggataccccattatccatgatgtgattattatgcattgcatgtctgtatcaaaacatctcacataccccataaatttatatacctattatgtacccacaaaattaaaaataaacattaaaaaatactaacttatttcttctccttacttaagtgacttaaaaaccatcacataaaattataatttaaaattgtattgtaggccttataatcatataataatattttatgcaatatggcaaatgcgagggaagacatggaattataatggagcaaggaaatgatgccatactataagttaaatccacaggaaaaaatgaaaatgactggaagcaataaacatgc

SEQ ID NO: 323079 - DNA, 589 bp, Homo sapiens
gaagaccattaggttaaggaaaataagccaggaacaaaaagacaaacattcatggtctcacttatttggggaatctaaaaatcaaaataactgaactcttggagacagacagtagcaggatggttaccaggggctggaaagggtagttgaagaaggagtaggggagggatgcaagagggttaatgtttccaaaaatcatagttagaaagaaggaataagacctactatttgaaagcatagcagctatcatcaataacaatttaattgtacattttaaaataactaagattataactggattgtttgtaacacaaaggawaaatgcttgggggatggataccccattatccatgatgtgattattatgcattgcatgtctgtatcaaaacatctcacataccccataaatttatatacctattatgtacccacaaaattaaaaataaacattaaaaaatactaacttatttcttctccttacttaagtgacttaaaaaccatcacataaaattataatttaaaattgtattgtaggccttataatcatataataatattttatgcaatatggcaaatgcgagggaagaca

SEQ ID NO: 323080 - DNA, 651 bp, Homo sapiens
gccaggaacaaaaagacaaacattcatggtctcacttatttggggaatctaaaaatcaaaataactgaactcttggagacagacagtagcaggatggttaccaggggctggaaagggtagttgaagaaggagtaggggagggatgcaagagggttaatgtttccaaaaatcatagttagaaagaaggaataagacctactatttgaaagcatagcagctatcatcaataacaatttaattgtacattttaaaataactaagattataactggattgtttgtaacacaaaggaaaaatgcttgggggatggataccccattatccatgatgtgattattatgcattgcatgtctgtatcaaaacatctcacataccccataaatttatatacctattatgtacccacaaaattaaaaataaacattaaaaaatactaacttatttcttctccttacttaagtgacttaaaaaccatcacataaaattataatttaaaattgtattgtaggccttataatcatataataatattttatgcaatatggmaaatgcgagggaagacatggaattataatggagcaaggaaatgatgccatactataagttaaatccacaggaaaaaatgaaaatgactggaagcaataaacatgc

SEQ ID NO: 323081 - DNA, 651 bp, Homo sapiens
gccaggaacaaaaagacaaacattcatggtctcacttatttggggaatctaaaaatcaaaataactgaactcttggagacagacagtagcaggatggttaccaggggctggaaagggtagttgaagaaggagtaggggagggatgcaagagggttaatgtttccaaaaatcatagttagaaagaaggaataagacctactatttgaaagcatagcagctatcatcaataacaatttaattgtacattttaaaataactaagattataactggattgtttgtaacacaaaggaaaaatgcttgggggatggataccccattatccatgatgtgattattatgcattgcatgtctgtatcaaaacatctcacataccccataaatttatatacctattatgtacccacaaaattaaaaataaacattaaaaaatactaacttatttcttctccttacttaagtgacttaaaaaccatcacataaaattataatttaaaattgtattgtaggccttataatcatataataatattttatgcaatatggcaaatgcgagggaagacatggaattatamtggagcaaggaaatgatgccatactataagttaaatccacaggaaaaaatgaaaatgactggaagcaataaacatgc

SEQ ID NO: 323082 - DNA, 589 bp, Homo sapiens
tagaacataggtgaatatggattgtgttttttttttctgtggccagagaaacatgtttactttgtaactcctggttgtacattacctaagcagtgctgttacataaatcaccttcacatatccatgctattgctgagactgaaaacattagtctttaaaaaaaactgatttctgttgttattactcaaayttagttgttgattaccacaaacaaattaaaaacataacatatttattgagtctatcttatgggaaaacagatgaatgttttagcctaaattaaatttctgttatgatagtctcacatttctatgcaaaaattataattcccaattatgtaactcataatgacaatttaacatagtttgacaattatgttatacaacttgaaatacttagaaaaacattgcataagtatatgtgtaatctgagaatatgtttctaagtaacatgttaagtaatataataattattccagaggaaattaagttattgtttcattagcctgctaagatattgagatttcattcatgtatagtttatggtcaatcttccatgataatattcaatttagggaatgagaaagagc

SEQ ID NO: 323083 - DNA, 589 bp, Homo sapiens
tagaacataggtgaatatggattgtgttttttttttctgtggccagagaaacatgtttactttgtaactcctggttgtacattacctaagcagtgctgttacataaatcaccttcacatatccatgctattgctgagactgaaaacattagtctttaaaaaaaactgatttctgttgttattactcaaacttagttgttgattaccacaaacaaattaaaaacataacatatttattgagtctatcttatgggaaaacagatgaatgttttagcctaaattaaatttctkttatgatagtctcacatttctatgcaaaaattataattcccaattatgtaactcataatgacaatttaacatagtttgacaattatgttatacaacttgaaatacttagaaaaacattgcataagtatatgtgtaatctgagaatatgtttctaagtaacatgttaagtaatataataattattccagaggaaattaagttattgtttcattagcctgctaagatattgagatttcattcatgtatagtttatggtcaatcttccatgataatattcaatttagggaatgagaaagagc

SEQ ID NO: 323084 - DNA, 606 bp, Homo sapiens
ttactagtttcctttttggtccccccttaattccatctcattttctggcctggagttctgccctggaccctggttcccaatgcagccttatcctactttttgccacatctactgatcatcctcctgctattatccaagtttcttcaccctcctaccaatatactggggccctgcccacttttgaataacctgacacagagacaaatttccacctctacgtttcttttctctaccaagaaagtgcttaataaatgtgattacataaaataatcataggaagaattaaataaacctttattattggggcacacatcccaagtctattgaaatagaaatcaacccacatcgcataaatcaatattttgtaamctccagaggtgatgtctatattgcaaagattagcaaacctgaatatattttagaattgcctgagggccttaaaaatatatttctggaactccagtccagatatatttaatcagaatcttgggaatggatgcaggtctaggtagaatttctaagcttactaagtgattttaacatgtaatagaagttgaaaagctctgtattataaccaacttgtttgagactcagtgttccaaaact

SEQ ID NO: 323085 - DNA, 472 bp, Homo sapiens
ccactcccactcccactactggtcccatccatagttagataacataaattccttgagaaagtctcaaaggtttgacaatttttattatattttcacttacctttttatactttttatttaaaatagttttaaaataggccaaggtgggaggattgcatgaaaccaggagtttgaggttacagtgagctgtgatgacactgttgtgctccagcctgagcaacagagcaagaccgtgtctcaaaaaaaaaaaaaawgttatagatttacagaagagttgcaatgatagcaaagaactcctatataccttacactcatcttcctctaaccataatcatggtatattcatcaatactgagaatttaatagtaatacaatcctattattaactaaactacttattccaccaagttttccactattgtcttacttttactccaagacacagtttataccacattgcatttagtaataa

SEQ ID NO: 323086 - DNA, 523 bp, Homo sapiens
gttcagaattattcttctagtaaattattgtgttgtgtcacctctgattaatttatctgcatctgtgtcattaaaattatgccacagttgcactattttcttacttatgagcacacwttaactcattttttttttcctctaaacttcatactctaggaaatctaaacaagaactagtttgagttggagataatgtgaggttgggtaatgggaacaaaaatacaggtagaatgaataagatctactatatggtggcacaatagaatgactatagttgataatttattgtatacatttaaataaaaagtggaattggaatgtctctaacacagataaatgataaagctttaggtgacagatattccaactatcctagttttatcattacttactgtatgcctcaacacatataatacattgtatgatacatacattgtatatatatcaaaacatcacatgtaccccataaatatatacaactatgtgtaccccaaataattaaaaataaaaatgttaaaaagaac

SEQ ID NO: 323087 - DNA, 548 bp, Homo sapiens
ctcagttaccctctgggaaatcattgctgacaaaattatagccatttctattaccacaattaaccccatcatgttcaataaaattatgcaatgttgtttctagtgtatagtaaaccctcaaatatactatgtttaaattttagagtggtcagatgtgaaaaaattcttatcatttgtataagaaaaggtaaggacttggagatattaagtaaattgacatatcaaaaatggttaatagatggcagatgagtcatttaatcttgttctgcctgacacaaaaccaaagtttctgagagttgtgagatgctacctcctggatgtcatctaacaattgccatctgtgtaacataatccagctcaaacttatctccagcattatcggcctcttctctcccattagtcctctgtcttaacatgtttgtgttcccaaaattaccacacactttataaatgagaagcattctaagggttcartaaacatgtattaattaatgaatcaacatacagataatggacaagttagctttttaaaacttacagattttcaa

SEQ ID NO: 323088 - DNA, 577 bp, Homo sapiens
ctgaaagcagaaaatcaattgagaayatcaataaaaacaaaagctggttgtttgaaaagatcgataaaatcattaagccttcagcaagttttacaaaaaaaacagagaggatacaattactaatattataagtgaaatagaaaacatcactacagattctacagacagtaaaacattaataaaggaatattatgaacatttctatgcccaaaaacttgataacctagataaaccaattccttaaaagatacaatctgacaaaacacacaaaaagaattgaacaaagtgtataggcctataactgttaaggaaattgaatcaataattgataatattaaaaacagaaagcaccaggctcagatgaattcattggtgcatactaccaagcatttaagacacaaaccataccatgtctctacagtctctttcagaaagtagaaacagaggggtatgtttacttattctgtgaagccaggatcatcctaatacaaaaatcaaagacattacaagaaaactgcagaccgatatttcttatgaagacagatgcaaaaattctcaaaaattagcagatttcatc

SEQ ID NO: 323089 - DNA, 577 bp, Homo sapiens
ctgaaagcagaaaatcaattgagaatatcaataaaaacaaaagctggttgtttgaaaagatcgataaaatcattaagccttcagcaagttttacaaaaaaaacagagaggatacaattactaatattataagtgaaatagaaaacatcactacagattctacagacagtaaaacattaataaaggaatattatgaacatttctatgcccamaaacttgataacctagataaaccaattccttaaaagatacaatctgacaaaacacacaaaaagaattgaacaaagtgtataggcctataactgttaaggaaattgaatcaataattgataatattaaaaacagaaagcaccaggctcagatgaattcattggtgcatactaccaagcatttaagacacaaaccataccatgtctctacagtctctttcagaaagtagaaacagaggggtatgtttacttattctgtgaagccaggatcatcctaatacaaaaatcaaagacattacaagaaaactgcagaccgatatttcttatgaagacagatgcaaaaattctcaaaaattagcagatttcatc

SEQ ID NO: 323090 - DNA, 373 bp, Homo sapiens
ccatgcccggctaatttttttgtatttttagtagagaccgggtttccccgttttagccaggatggtctcaatctcctgacctcgtgatcagcccgcttcagcctcacaaagtgctgggattacaggcgtgagccaccgcgcccggcccattaggttctttgaaaagcttctgcaaatagagtattgacacaatacttattgctacaaacccacgtctaaaatattctttacatayatatgtcttatgttttagccaattatgtgatatatcccatagccatatttatgtaaactatttcaattatttgaaccaatcaactaatgcaagacatacatatatatgtatctacatctatgtataaatatacatgtg

SEQ ID NO: 323091 - DNA, 560 bp, Homo sapiens
tgaactgctcttaatatgaaaytgtggaaggttttcctttaccttttgagaaactggcctaggaaacaaagatttagtattttaccaagatatcttgcacttaatgttgtcattatttgattttttatcatttaagaaaaaacaagtcttctctattaaaaagttaattttttttttcctaaaactatgttacttactgtatttgcctttgaattttttggattatcactctggttaaatacataattattttgtgagaaaataggcttgcttatggaatattcctggagaaaactccagtgatagaggtgctcattttactgaacgagctgcaaaatagtcaagtatttcaaacacaatcgcatccaggaatctaactgaataaattggattggccaaaggtattatcacttgatggcaatcagatccaatcccactggggaacactaattgaccccttacaaatagtcattggaaggcctatgcccctaataatagaacttcatgtatctcacattcatgaattgtgacatgactcaatattgccaggctttaaagca

SEQ ID NO: 323092 - DNA, 560 bp, Homo sapiens
tgaactgctcttaatatgaaactgtggaaggttttcctttaccttttgagaaactggcctaggaaacaaagatttagtattttaccaagatatcttgcacttaatgttgtcattatttgattttttatcatttaagaaaaaacaagtcttctctattaaaaagttaattttttttttcctaaaactatgttacttactgtatttgcctttgaattttttggattatcactctggttaaatacataattattttgtgagaaaatargcttgcttatggaatattcctggagaaaactccagtgatagaggtgctcattttactgaacgagctgcaaaatagtcaagtatttcaaacacaatcgcatccaggaatctaactgaataaattggattggccaaaggtattatcacttgatggcaatcagatccaatcccactggggaacactaattgaccccttacaaatagtcattggaaggcctatgcccctaataatagaacttcatgtatctcacattcatgaattgtgacatgactcaatattgccaggctttaaagca

SEQ ID NO: 323093 - DNA, 578 bp, Homo sapiens
gaagctcatgatcatgtgttttcccacgtttcatgtgactttaaattttgtactttctgaaaattaagacagyatttctgtattcaaaactacctctatctttatagtttcttcctttgaggttatttctaggtgtttctctgcattgtaggagttttaaaagtttttagatatataatttgttttatatttagaaaagtcataaaaatatgtatataacttgtgaatttcaactggaaaataaattcattcagagaatagaaacaaaaccaggaagggggacagcagttctatttgtaaaacttgtaattaaaaattaatgtcagcatgtaggtgaactgtatattcaaaaatacagtaacctaatgagtcattctctgatacataatgaacattagcaaagataatataagaccttaaaaaggcctgtacataacaagttagagaatatctagaaaacatattgaatggggagagagctatgtatttgttacattttaattaaatctttaatcaaaacaaagataaatgatcaggtatgtggctttcaaaatttttaaaggcatgtgaaggagatt

SEQ ID NO: 323094 - DNA, 595 bp, Homo sapiens
taagggaattcagattgcttttaatggctttccttgctaatacctttattcaaggctcaccataagcaaaattagacaaaaatctaattgaatcrtaagtttttttttttaattttcaactgaatctttccttccctctttccctccttctctctcttctttgttctccacccccactctcaccaccacaaggcatattctagttccaacactataactaaatagaagtaaagtttcatgacattcataagagccataaaggagtatgtcacctccagtctgtagcatacaatgtatctaatagacacaagtagttaccatatgttttaaattgaaaataagaacttaaaatttggcaaagtttgggaacatgatttgtaggtagttacagtagagttagttttaggtgccaacatcacaaaatattcctgtctttcagtgatttatggtgacaatgagacagcattcataaaatgaggataataataaatctcttgtttggttgctgcatggactaagagaaataatatttcctgccttcatagagtatggcatatgacaactgtctaatccatggttagataaaggttaaaat

SEQ ID NO: 323095 - DNA, 633 bp, Homo sapiens
agtataaattttaataataaagaaagagatttgcacacaaccagcctgtaaaaacaaaaaacaaaaccccaaaacaaacaaaaaagccacccaaaacagtaacaacaatgtattatctttatttccaaagaagaaaacaatcaatgtacatctcaacttccctgtgaaatagataaaaggctgatgataagcaaataaagcaaaacaacatacaaaataacataattgctgttaagagttagacacatgtcaaataaaatttggaaaaaaggcagtaaagtaaaaataattaacaataaaattaaatattcaaaacaataagcatctaaaaatttcagattgtagaaataaactgtagaaagacrttgtgaagaaaaataaaagtattttctcattttatttcatatataagaaattgcttaaaagatagaatgttatcactgatgattaaaatagaaaatgaagaataatattttagcaactttaagaatagcaaaatatgtatgtagaatgtatgagaagtatttaaaaatatattcaaataaattatgatctatagagacatagataaactaatgaaaatcagaaggtgtaaaaaaaagacattctacacactatgatacaagtaacatc

SEQ ID NO: 323096 - DNA, 472 bp, Homo sapiens
aatgtttcttcttgtggctctgtgactgaggtctagttttcttgttggctgtcacctaaaaaccactctcagctccaatatcttgccmtgcaaccctctcaataggccctcatacacagcagtttgcttctttttgagtccagtaggagagtatctgtcttacactacaccttcgtttagagaactcacctgattaggtcaaatacattcagaaaattttcttattttattaacacaaagtcaactgattaataagctaatcaaaagagtgaggtttcatcttttttccagctcagcctatttactcaagaagaaaaaatttcatagaaatgtacatggagtaagtagaaaatgttggaaactattttaggttgaattgcatctctccaaaatttatatgttaccgtcctaaatcctagtacctttgtcctgagacagagtatttcaagagataattcagttaaaatgaaat

SEQ ID NO: 323097 - DNA, 628 bp, Homo sapiens
aagaccactatctgccagtgattggattcaggacatgctaccccataatatggtactttggcatttgggaaaacagtggaagcagtaagatacattcaccttctcttcattctttttcctgaagcaacccataaaacctaggagggtcgctctccgatcttctcttttccttcttccctgaaaaccttcatgtggcaggtgtcctgccctacctaggggaaaggaatgacacacagtgatgctaagaagaatctgaacaaacaggctttgccaatttattaccaatagatsgtacccttctgtcctccaatcctatctctgcacatccgtctataaaaatacacatatttctccatttttttgagtcttcattttgatggctcccatgtcatataaaattgatattaaataaatttgtatgcttttctctggttaatctgccttttgttatgggggtgtcagccatcagccttgtgattggtgaggaaaagatattatttttatccccgacggtttctggtacccaaaccggggaagctcagacacccactcactctgcagcctacagatgagatccggcgacaactgagaaaaagctgacagaaaggtaagaatttttacccaggtc

SEQ ID NO: 323098 - DNA, 609 bp, Homo sapiens
tttgtaataactgtccttatactgaagatgtgcttcagtgcattttttccaattagattatgtgattaatgaataaattgatataccttaagactatggttttttttcaaaataattgaaatagcaacctacacatctttgttagagtcatcattgttaattttccattcagggaagtagtctgattctttctaactctctagtggcatattcagcataagggaaaataattacaagagtatagatacactctctgtactgttgtcttttcctgccatttctcagtgtagctttgacaggtaatgtaagtttgccctattctatgggtagttagacracattttcttcataaattgtcagcatgttctctcttcaaagttgtaaggatgaccttaaacaaagacaaatgtcttgttagaatactaaatttcctctaaaaaaagtcttgttagaatactaaatttcctctaaaaagccctacccttcagaccaaatatcaagatattttcttaaaagtatacctaaaactttgaaacacaaataagagtagatctaaattagtgatttcctgaacttcaatatctgtacattgggatttacttaaaattc

SEQ ID NO: 323099 - DNA, 548 bp, Homo sapiens
ggctaattttgcactcacaggcaaagttgaagatttgtgacatagactatktggcatggcttgcaaaacctaaaatatgtattatctggtcctttatagaaaatgtttcctgaccccttcaacagaaatgaagaagaatgtactgccagagaatggaataaaaaccaatgtgcagaatatgcactattcagtaagataaaaaggaagaaagagtggaatgaagtgaagataagcagagagatggtaaaggtagcagaggaaatatatatgaaaatgtttacagaaatatggagcaattttaaaggtgaaaaatgtcttgatagtagtaattaaaattcttatcttatatattgaaaattggagacattagaaaggcaatacatgacaagccagaaggaggcaagatttaggtcaagtgcctaaataaatctagtatgataaggctccatgaaaacaaacctggttttaagggaaaaggatagaagcactgtgtgtacttttctgaggctcaagaaccatactaatctcgagcataatgtgtaaatggg

SEQ ID NO: 323100 - DNA, 548 bp, Homo sapiens
gcaatcacttcccagcaggccccacctccaacattggggattacatttcaatatgagatttgggcagggacacacatccaggctatatcaccataaatgtgtgtttgaagtgttaataaaaatttttatgcaaataagaattagtgtaggtgttctagttttaaaaatgataaagtggcttttattgaattgacctcctgcaaataacaattataaaataaatctgaaaataaatttttaattactatttgaaatctctggagaatgaataaaagcaggtagaagttggaaaaattcgacacttgaaaaaagcatactggaaaaaatcgattcttatatgttttttatattgagggaactcactggtctgtttggtgtgatgtaaatagaacytaagcagaaagatttttggcctgatgggctgaatttgtggctgccacaacaggtgaagtatctgcatcaaaattgtctttgaatcattgactgactcccaaactatgcaggcatgggaagactccaagcagctcaaaaaaaaaaaaaaatgcaca

SEQ ID NO: 323101 - DNA, 530 bp, Homo sapiens
tattaatagaatttaatatgtactactcatcacaaacagagcttgtttaggtttaataactatggtctctgtttaaaatatttgaatataagaatgagagaaaatattcagttataacaagtaactatcatgaagacctgtttcgtgcattaaaaacacaaaactatattgtgaaagattattctgcttcctaatgaaattatcatcaaagaagccaggacacagttgggaacgttaaaagggagatkcaataaaattattcagtaattttttagattatataattaatgttctctaattgtcaagacacatagtaatattataaactatctagtgacaactgacataatacaaaccatatataagtttgaatttatgcacatgctattttgcatgcgaggtccatgtccctgccttaactttaaccaccgtgcctcattctttttttttctggagatagtgtcactctgtcgcccaagctggagtgcagtggtgcgttctcggctcactgtaacctccccttcctgggt

SEQ ID NO: 323102 - DNA, 628 bp, Homo sapiens
agtgtcagtagctagtgacaaagaggctgaaaggttttcattgaatttagaatagggaggctatgagtgagcttacagagaatggtttctacaggtgcagaaaattgatcatgatcatttgaacaaatggaaatatagacaactttgtccaaatgcttggctgtggaaggaaggtaaaggcaagccacaagggggggtcttaggttttgaggattaagcctgtctaattatattatacatgagaggcagtatttgagcagggccttgaaaaagaggtgaaatttggacacaggaaaatgattggaaaaggcattacagataaagttaacttccattaattgacttgaagtaataacagtcaaccatttattgaggactttcatgtgccagacaatgaactaagggctctacatgcattatctcattgatccttgccccagccctttaagagagraggtaccattgttatttccacttagagatgtgaacactgaggaactgagaggctacctcactgtgggtgtctgtgtgtatagaggtccaggcagtcacaggacagtctggtcacacagctagaaggaagtgaagagagttggtaatgtgctgcttttaaaaatgtatttattgt

SEQ ID NO: 323103 - DNA, 577 bp, Homo sapiens
aaaactcatgtcggccccagccctgaggctacctgacctgacaaaactctttgcactctatgtgtcaaagagaaaaaatggcagttggagttttaacccagactgtagggccctggccaaggcctatctctcaaaacaactagatgaggtttccaaagkctggcccccatgtccaagggccctggtagcaatggccctgttagcacaaaaagcagataagctaactcttagacaaaacctaaacataaagtccccccatgctgtggtgattttaataaataccaaaggacaccattagctaatgaatgctagactaactagatagcaaagcttgctctgtgaaaatccccgcataaccattgaagtttgcaacaccctaaaccccgccaccttactcccggtatcagagagcccagttaaacataactgtgtagaagtattggactcagtttattctagcaggcccaaccaccgagaccacccctaaacatcagtagactgggagttgcacgtagataggagcagcttcgccaacccctgcaaagtgactctgaagaagacaacaagccccgcccca

SEQ ID NO: 323104 - DNA, 577 bp, Homo sapiens
aaaactcatgtcggccccagccctgaggctacctgacctgacaaaactctttgcactctatgtgtcaaagagaaaaaatggcagttggagttttaacccagactgtagggccctggccaaggcctatctctcaaaacaactagatgaggtttccaaagtctggcccccatgtccaagggccctggtagcaatggccctgttagcacaaaaagcagataagctaactcttagacaaaacctaaacataaagtccccccatgctgtggtgattttaataaataccaaaggacaccattagctaatgaatgctagactaactagatagcaaagcttgctctgtgaaaatccccgcataaccattgaagtttgcaacaccctaaaccccgccaccttactccyggtatcagagagcccagttaaacataactgtgtagaagtattggactcagtttattctagcaggcccaaccaccgagaccacccctaaacatcagtagactgggagttgcacgtagataggagcagcttcgccaacccctgcaaagtgactctgaagaagacaacaagccccgcccca

SEQ ID NO: 323105 - DNA, 577 bp, Homo sapiens
aaaactcatgtcggccccagccctgaggctacctgacctgacaaaactctttgcactctatgtgtcaaagagaaaaaatggcagttggagttttaacccagactgtagggccctggccaaggcctatctctcaaaacaactagatgaggtttccaaagtctggcccccatgtccaagggccctggtagcaatggccctgttagcacaaaaagcagataagctaactcttagacaaaacctaaacataaagtccccccatgctgtggtgattttaataaataccaaaggacaccattagctaatgaatgctagactaactagatagcaaagcttgctctgtgaaaatccccgcataaccattgaagtttgcaacaccctaaaccccgccaccttactcccggtatcagagagcccagttaaacataactgtgtagaagtattggactcagtttattctagcaggcccaaccaccgagaccacccctaaacatcagtagactgggagttgcacgtagataggagcagcttygccaacccctgcaaagtgactctgaagaagacaacaagccccgcccca

SEQ ID NO: 323106 - DNA, 585 bp, Homo sapiens
ttcaaactagttgctgtcactttggcagttggaaatcagtcatagggtgggggaggggtccttacatcatgaaataggccagcactacaaattaaggctttcttttttttcctgcagaagtggtggttaagcattttcatcataccagagattaaaatgtcctgtgctaagcaaagctctcctgctaggaagagtaaagacagaaacaaagtaatacagtttcttcacaagagatatgttattttctttttttttttgagacagagtctcgctytgttgcccaggttggagtgcagtggtgcgatctccgctcactgcaagctctgcctcccggattcacgccattctcctgcctcagcctcccgagtagctgggactacaggtgcccgccaccatgcccagctaattctttgtattttttagtagagacggggtttcaccatgttaaccaggatggtcttgatctcctgacctcgtgatccgcctgcctcggcctcccaaagtgctgggattacaggcgtgagccactgcacccagccagtgatatgttattttctagggaattttatgaatgcagccttttca

SEQ ID NO: 323107 - DNA, 577 bp, Homo sapiens
ctttcagtatccacacttcttttatttctgcaagcaactcagagaaagaaatatgtaagagtttcagtcaatactattttgtgtaccagcacatgtccagtaatgtccctgggcttgtatgcttgccttttccttgttgggtatattcccaatgataggattacctgccaacattgagaattttgttagtcatttgcaagtataataactttcttaaatgtccataaaatgaaatgtactagtaattaaggaaaatggggtaaacaaaactgtcataaaaagaaaaatgcttaaatgtcaacttttcaattctatagtgttctttatatattagtccaaacaactctgcaaaaagattgattatttcattctttcaccctatttgttgtgtacctactcagcacagcctttggagtcagccagcactgtgtttctgtcttgaataagttgcttaactctctcagctttgttttcctaatctgtaaaatgggtagataatrcacataaaactcttaaactcaggtctggcacatagtgagtacataaatgttaactgtgtgtaaggggcagtgctagg

SEQ ID NO: 323108 - DNA, 525 bp, Homo sapiens
aaatgaaacttttaaaccctagtatttaagactctaggctaaaaacaaaattaatattttaagcctttctattttaattggttgcagtgctgactgagatagggcaactcttcagttacrtaactccattttaaataaataaaaaagtttccagcactctgtaaccatcatccaccaggctggggacatgtaacggggaccaagactttgcttctgtcagaaccttatagtgaacagagataaacacaaccaaccaacaaagataaaccaaccaacatgaaggagaggtcaccttcagcagcccattcctggcccagtgtacagtgaactttggtttataaggatactactgtgagccttgcattgtcagggacaatctgccgcataacaaccttgtccctgagctccaaatagatccatgaaagaaagacaacaaagccagttgcaattgctcttggcaactctgagaaaatggatcatgtcaaaatggcaaagcaacctcctgattgggaaatgaaccctatg

SEQ ID NO: 323109 - DNA, 579 bp, Homo sapiens
tataaattttgtataatgcaagtgcttttcctaggttttagttttgttttaatttaggagtaagggtaaagaagctatttataaatagtactaagtccgtgtgttcttttctctaaatacatcttgatgtgttacgaagatcaaatgttctgaaaaagcaaatttcctctaaacctgagtcctctctttcactagcagagagaaaaagtctctgctaaagttactggatgaaaacagaaactgtatacttgactctattaaaggaaaaaataaaatgttttttataatattaagtcaacttgaaataaaagaaaaaagttagctattcaggcctgtccctaacatttgtggaagttcagaagtattgcaaatctagacccacatattaatgactacatatttataagacatcaatcaagcttaagaactgttaaagtgtattgaaattcctacattgacaacttcataacaacttaaaaaattaaattgaaatctgcattcttggactgccargagaggtccacaatggaatgtgaggattggaaagaggccccaggtcatagccaatttcattctctt

SEQ ID NO: 323110 - DNA, 654 bp, Homo sapiens
gagttgaatgaaaaaggcattctaggtgagagaaaaaaaacagaagcagaaacaaggagtcattagtggggactgagtttcaaatgagaggggcttggattaatgagtttttattgcattggtttgatgctaatatagaatgtatgttaaggaaaacatgagccatgaatggatatgacttatgcaaattttaaaaactatcacttcactattatagaacttttcaaatgtttctgactgcaggaattattattgtgtaggcatagatgttctgcaagcaaagacaaggcaagcataataacctctaaaatgaaacaggcacaacatctggggtagcatatgggcatagcatggaggaagctgacttgggcgtaagtttaaaaaacaaattccaatctatatgtgccagttggtagctgatagaattttctctgctcatccaggaagtatacaacagtaatagagccatagacatgttgggctctgggtgtgactgtaattcaaatggaggcaaagaaagtctaagttgctctgtgtgtcaggagttaataataatgattctaatttataattcttgtaattgrtacatactttttgttattcacctgattttcactgagaagctattgggttcactaatcaattgcacttgta

SEQ ID NO: 323111 - DNA, 588 bp, Homo sapiens
aatgtgaagcacaagcaatgggaaacaaaggctgttttgttgtttttttaatctagtgtcatagcagagccagggaggattttaaaaactggccatggagcaaaaacattatttaaccttgcaagctgaaatatccacaggctgtgaaagatcaaggaaaataaaaagaatattgttattgcgagaacatcacaaagagaggcaccatcctggagtcacccctgaaacaaataacagaatgagctcaatcagtttctctataagcctttgctatttcctccccccacacccccagcacacactccaggtcaagtagcagatcatttcttttataaaattcactagaatatgtgccctttctttgtattacatttcctcaaaaccacaaaataaactgtactatggagtgttttaatttcctatcatmtttggaaaatcatgctaataagatatttagtgaagagagtagttgcccaataagtggcaataatcttttatgagtgccactgtgaacacgatgaacaaatatgttgactttgaaagttctagtcttaccacgagcgcaagaacaatgacacaaatattcat

SEQ ID NO: 323112 - DNA, 580 bp, Homo sapiens
aaatcatatcaaaccagactagagataaaactgcagaaaaaagctaaaaaaattattcaagatttttcaaatccaaaatgaaccaccaagcactaggtaaaagtcctgggacaagagccagaagcaaggaagagattgttttgatscagaatctctaaccatttgatatggtttggctgtgtcccacccaaatctcaaattgtagctcccataatttggatatgggaggtaattgaatcataagggagggtctttcctgtgctgttctcatgatagtgaataagtctcatgagatctgatggttttataaaggggggttcccctgcacatgctctttgtcttgcctgccacaatgtaacacatgactttgctcctcctttgccttctgccctgattgtgagtcctccccagccacatggaaccataagtcccttgagcctctttttctttataaattttctagtctctggtatgtctttatcagcagtgtgagaacagactaatacaccatttctctagaatgcttgacttttttttaattgggtgcccctaataggcatactgatttacaaaatgcaaa

SEQ ID NO: 323113 - DNA, 465 bp, Homo sapiens
tataatcccaacctatgcttccagcctcacctccaccaccatcccctctacttcctctatttcaaaaatacatttgctctccaaaccctgatgcattttcctaactccctgactttgaattcatggtgttcataggcttgaaaggccctccgtctacttctcatctctccatgcctggtaagctcctgtattgtgtgctgattatctgtgtatgtgtccatttgcttgtctagaatgtgagctgaaggaatagagtcttactcagcttgtgctcccaggatgtagtatagtacacagtagatactccagaagtattcagtaaaaaacaaataaaggkgaaatgaagatgtgacatcattaaattcatcacacattcagaaagccttacagggcttgtcttattctggccctgagaattgtgtagacaatgagtatatttaaaaagcaagatctattccccaatat

SEQ ID NO: 323114 - DNA, 572 bp, Homo sapiens
aactggctcctgattcagcatatgtattgcaggtgggctgatttacaaacacattgctatcctggaaaacaggtaaccttcaaacctctctcctttcaccaacacacatgcacctatataaacataacaagacacccttgagctgccaccacgatacaaaagctgagtcacagacaggaatcaacagatttgggtggaaattttccatattttctttgttgtagttcaaattttcatggaaagyttggcccacctctgaaagtcttagaacagccttagatcaatgattctctaccctggcttgacatgataatgacctgaggaatttttaaaatatacttatgcctgagtctcaccttcggaacttctggttcaactgctctatgaggaggccaaggcactaagattttacagatgctctcctgtgactacaacgtgcatccgtggttgtgatcaagaggcctagctcatgagaccagtagcttaatcaccaaagctaccctagagagaagggtagtgtcaacgtcagcactgcagttgactgtaggagcagccaacagagggtggtgagg

SEQ ID NO: 323115 - DNA, 572 bp, Homo sapiens
aactggctcctgattcagcatatgtattgcaggtgggctgatttacaaacacattgctatcctggaaaacaggtaaccttcaaacctctctcctttcaccaacacacatgcacctatataaacataacaagacacccttgagctgccaccacgatacaaaagctgagtcacagacaggaatcaacagatttgggtggaaattttccatattttctttgttgtagttcaaattttcatggaaagtttggcccacctctgaaagtcttagaacagccttagatcaatgattctctaccctggcttgacatgataatgacctgaggaatttttaaaatatacttatgcctgagtctcaccttcggaacttctggttcaactgctctatgaggaggccaaggcactaagattttacagatgctstcctgtgactacaacgtgcatccgtggttgtgatcaagaggcctagctcatgagaccagtagcttaatcaccaaagctaccctagagagaagggtagtgtcaacgtcagcactgcagttgactgtaggagcagccaacagagggtggtgagg

SEQ ID NO: 323116 - DNA, 449 bp, Homo sapiens
ctctcttcctcctgccccagccatgtaagatgtgccagcctctcctgtgccttctcccatgatcataagtttcctgagacctccctagaagcagaagccagtatgcttcctgtatagcctgtggaaccgtgagccaataaaacgtttttctttataaattaaaaaaaaaaaaagaatcaaccaacataagcccctgtgtcaataggctaaaaaagaaaaattcatatgattatatcaattgatgcagaatagcatttggtgcttaatataacgccaattcaaataataaaaatatctcaggaaactagaaataaaggagacctttctctatttgacaaagaacgtatttttaaaaacctayagcaaacattgtacgtaatgatgaaagactggatgagttctctctaagattgcagacagggcaatggtgtccaatcacatcattccct

SEQ ID NO: 323117 - DNA, 661 bp, Homo sapiens
actggaaaaaatgcaagtgatgacataggagagcaatatctttaaaatgccaaaayaataacaaaaacaatggatgactcccaattctacacataataaaaatatccatcaaagtaagtgaaaaagacaattatagatgtagaattactgaataaatcatctctagcaacctgcactatcgggaatgttaaaggaagtttttcagggagaatgcaaatgacatcagatggaaatatgaatctatacagagaaataaagggtagtgaccacctgagtaaacacaattttcttattatttaatctatttaaaaatgacagtttaaacaaaaataataatgttttgtggctactgtatctctacagtatccaaaattcaggagaggagaaatggatgtacaccagtctagggttctattgaaatggtataatatcacttgaagatggacatagataagctatagatttatattatgaacattaaagcaatcagtaaaataatgaagcaactaaatcaataagaagataaaataaaatactaaattaattagagtaatttttttttttttttaaagacggagtttcgctcttgttgcccaggctggagtgcaatggtgtgatctcctgtcacagcaacttccgcctcctgggttcaagttattct

SEQ ID NO: 323118 - DNA, 661 bp, Homo sapiens
actggaaaaaatgcaagtgatgacataggagagcaatatctttaaaatgccaaaacaataacaaaaacaatggatgactcccaattctacacataataaaaatatccatcaaagtaagtgaaaaagacaattatagatgtagaattactgaataaatcatctctagcaacctgcactatcrggaatgttaaaggaagtttttcagggagaatgcaaatgacatcagatggaaatatgaatctatacagagaaataaagggtagtgaccacctgagtaaacacaattttcttattatttaatctatttaaaaatgacagtttaaacaaaaataataatgttttgtggctactgtatctctacagtatccaaaattcaggagaggagaaatggatgtacaccagtctagggttctattgaaatggtataatatcacttgaagatggacatagataagctatagatttatattatgaacattaaagcaatcagtaaaataatgaagcaactaaatcaataagaagataaaataaaatactaaattaattagagtaatttttttttttttttaaagacggagtttcgctcttgttgcccaggctggagtgcaatggtgtgatctcctgtcacagcaacttccgcctcctgggttcaagttattct

SEQ ID NO: 323119 - DNA, 661 bp, Homo sapiens
actggaaaaaatgcaagtgatgacataggagagcaatatctttaaaatgccaaaacaataacaaaaacaatggatgactcccaattctacacataataaaaatatccatcaaagtaagtgaaaaagacaattatagatgtagaattactgaataaatcatctctagcaacctgcactatcgggaatgttaaaggaagtttttcagggagaatgcaaatgacatcagatggaaatatgaatctatacagagaaataaagggtagtgaccacctgagtaaacacaattttcttattatttaatctatttaaaaatgacagtttaaacaaaaataataatgttttgtggctactgtatctctacagtatccaaaattcaggagaggagaaatggatgtacaccagtctagggttctaytgaaatggtataatatcacttgaagatggacatagataagctatagatttatattatgaacattaaagcaatcagtaaaataatgaagcaactaaatcaataagaagataaaataaaatactaaattaattagagtaatttttttttttttttaaagacggagtttcgctcttgttgcccaggctggagtgcaatggtgtgatctcctgtcacagcaacttccgcctcctgggttcaagttattct

SEQ ID NO: 323120 - DNA, 550 bp, Homo sapiens
atgaagatgaatagaggtgaaggtcactggaggtgagcaccacaatccattgctaamttaaacatggcctttatagtcaaggaccttattaactaatgagggctatggagaaagaatcagataattaaagcagaatgcacttagtattgatggggagaattagagggcactattgaaacatacagtaggggcatgtaaatcagacaggagttacatggaatgaaagtgtaagagacctgtaagaattatctaggaaaggaattgggggaaagagtgctccaaaaagaaagaataatattcataaatatatggagaggggagacctgtaagaattatctaggaaaggagttgggggaaagagcgctccaagaagaaagaataatattcataaatatatggagaggggagacagcctggtgcatgttggaaatgccaggcatttccatactgatggaggataaataactcagtctctgaatctgggattggtttcggaccgtcttcggcaaatttttggacctttgccccagcaacagtgtggtttgggaaa

SEQ ID NO: 323121 - DNA, 564 bp, Homo sapiens
ttccttgggcagcacaataaaaggtcagggatgttgaaggtatcctccactcctctgcttccgtgctgttgaagctgcaggttctatgctttctctgaatccttagagccatgtcaggccaaagaacgcygctttttttcattttttaaatttttttactacacccaggcatctgatatatgccagttccatcagcatgttgtgtgaaggagccactttcttatttaatttcagtatatttcctatattttcaatccttcttcaccttccggtagcaaattatagctggcaaagtttctttagagtatgagagtaaaatatattaaaatgcttttaataacatctataatgatttcccatagtcttgcaaaattattaattctggattccaaaacattttttaaagttagctattatactttttcttgtgctagactagggtagaatggaaagaaaagtgacacctgtcttcctgaagtttacagtgtagttaaaagagaaaaaaaatcacatagttatattgcattatgttatatgttatcatttttgaaaattagatataat

SEQ ID NO: 323122 - DNA, 564 bp, Homo sapiens
ttccttgggcagcacaataaaaggtcagggatgttgaaggtatcctccactcctctgcttccgtgctgttgaagctgcaggttctatgctttctctgaatccttagagccatgtcaggccaaagaacgccgctttttttcattttttaaatttttttactayacccaggcatctgatatatgccagttccatcagcatgttgtgtgaaggagccactttcttatttaatttcagtatatttcctatattttcaatccttcttcaccttccggtagcaaattatagctggcaaagtttctttagagtatgagagtaaaatatattaaaatgcttttaataacatctataatgatttcccatagtcttgcaaaattattaattctggattccaaaacattttttaaagttagctattatactttttcttgtgctagactagggtagaatggaaagaaaagtgacacctgtcttcctgaagtttacagtgtagttaaaagagaaaaaaaatcacatagttatattgcattatgttatatgttatcatttttgaaaattagatataat

SEQ ID NO: 323123 - DNA, 550 bp, Homo sapiens
gtccgtctcaaaaaaaaaaaaaaaagaaagaaagaaagaaaaagtagattctcccatttctgacaacatggatgaacctaaaggacattatgctaaatggaagaagcttattaaataaacaaattttctatcagtagttattgaacttctcttacaggttagaaacattttaatcactgaagatgcagagatgagcaagacagatacaaatcctggaagtaatgaagcatgtattttagtgaggtattcaaaaatagccaagcaaacaaaagtgataagacaragcaggttaaagtggaaaaaagtgatgggaggaatgggattgtttcagatatcatggtcaggtaaggccaccaacaatgtaaaggacatagcaagtttctctagagaggacacaggaagaagacagtggtcagggctgagctctctgagcagacggctcattatgaaaagctaaataaaacaatgagcaaagcacacgaagatccggctgagaacatgtcagggtgaaggatcagaaagtgtaaaagcctgtgtgtgtagcaaagtc

SEQ ID NO: 323124 - DNA, 550 bp, Homo sapiens
gtccgtctcaaaaaaaaaaaaaaaagaaagaaagaaagaaaaagtagattctcccatttctgacaacatggatgaacctaaaggacattatgctaaatggaagaagcttattaaataaacaaattttctatcagtagttattgaacttctcttacaggttagaaacattttaatcactgaagatgcagagatgagcaagacagatacaaatcctggaagtaatgaagcatgtattttagtgaggtattcaaaaatagccaagcaaacaaaagtgataagacaaagcaggttaaagtggaaaaaagtgatgggaggaatgggattgtttcaratatcatggtcaggtaaggccaccaacaatgtaaaggacatagcaagtttctctagagaggacacaggaagaagacagtggtcagggctgagctctctgagcagacggctcattatgaaaagctaaataaaacaatgagcaaagcacacgaagatccggctgagaacatgtcagggtgaaggatcagaaagtgtaaaagcctgtgtgtgtagcaaagtc

SEQ ID NO: 323125 - DNA, 550 bp, Homo sapiens
aacattattttataaagtacttttaggtttgaacttcttctagcactgtggcaaataaagctttcatttgaataggcttcagaaccccctgttttacagcctgcctctctccttgcgcaaaatgtctgcactatagctgtgtatccgaaagcagaaaaagtggtaagtttctctctcagtaaaatctctgcttaggaactaagcacttgttatagtaggggttggggagtgcctttagtcttcttgtctagcctatcstggcctggaccctccatcctatgaaagaaccagggccagggccatggatttaagaaatgttgacatctccctctgctgggaaaatactgtgacatagatgaagaaggattcctgtgttcttggctgcacctacataaagtggaatttccatcacattaggatggggtgggaaggaaatagagagattcatggctaaaatgatacagtctctctctgcttctgctgtttaaaaaattttcttcaataaatatttcttcacttgctgcatgtcctttagaccatttcctgaaac

SEQ ID NO: 323126 - DNA, 654 bp, Homo sapiens
cataccttccataaattatacagtaacatttttgacattaacarctgccaaaatgaatttagcgaatgtgagattaccagaagacactaggattattatcctttttttcttcaaaagtaatgacctgaaatgcagttaatcacaatctcctttcattccttaagtattcattgattctacacttgcataataattctcatagtatttgttcattgcatgtgacatgccattttttgtttctatttttttcttaacgagtcaaaaaggacgtgtacctatttgaatgactatgaggtgtaaaaaatatttacaaaataacgtctcacccgtcaactttgttctagctacagtttggaaatattgccattttatgtttgtatacaatgtaaaaacaatattttgtacatatgttgttccattgggacccttaaataaaacagtgggttgaggccatctgcattcacttctcttagacaatgtagtcaatagaagtggatagagagatcatttttaccttatcctcttaaaattcatagaggccaggcccaggaatgaatatcacattcctggtgttagtttattaaatggcttgctaggtagtcacacaattcctttattaatattattattttaggaataaaaagatctaagaat

SEQ ID NO: 323127 - DNA, 654 bp, Homo sapiens
cataccttccataaattatacagtaacatttttgacattaacaactgccaaaatgaatttagcgaatgtgagattaccagaagacactaggattattatcctttttttcttcaaaagtaatgacctgaaatgcagttaatcacaatctcctttcattccttaagtattcattgattctacacttgcataataattctcatagtatttgttcattgcatgtgacatgccattttttgtttctatttttttcttaacgagtcaaaaaggacgtgtacctatttgaatgactatgaggtgtaaaaaatatttacaaaataacgtctcacccgtcaactttgttctakctacagtttggaaatattgccattttatgtttgtatacaatgtaaaaacaatattttgtacatatgttgttccattgggacccttaaataaaacagtgggttgaggccatctgcattcacttctcttagacaatgtagtcaatagaagtggatagagagatcatttttaccttatcctcttaaaattcatagaggccaggcccaggaatgaatatcacattcctggtgttagtttattaaatggcttgctaggtagtcacacaattcctttattaatattattattttaggaataaaaagatctaagaat

SEQ ID NO: 323128 - DNA, 544 bp, Homo sapiens
tattttttcttttaattaaatactgaggatttgtacgtgtggattcggtgcggggggagatgcagtgattgttgaaagtggaagatttctaaaacttctatttaataaaggttaagatgagagatacagagaataatatatgaaaactcaaagaataaaggaaaagtaaaaaaaaaaaaaatcaagtgaaagaacccaatttaaaatttacaaagtattcaagtattcctggggtgtttaacttactgattcaagtaataggaaagtttgtttctgactccatccagctgtttcagcaatttctccaagagtgtctttctatgctggtctctgcctttcagccckttctttcttttttcactaactggatgaattctcaagcagactgcatccatatggaggtacagctagccttaaaagctccaagtttatatcatgctcggtacctatagtcttacaaaaatatgcctctttttcaaaacttgtatcaagagagtgttggagtcaactgcttatgcttgaatcaattgctttggtcagagaa

SEQ ID NO: 323129 - DNA, 487 bp, Homo sapiens
ggatctcatataacagattttctgcaaatgttgcacaatgagttcttaatgastagcatagggtaaaataaaagaactcacaatgcgtattagtccgttttcacactgctagtaaagacatacctgagactgcctaatttataaagaaaaagcggtttatggactcacagttccacgtggctggggaggcctcacagtcatggctgcaggcaaggaggagcaagtcacatcttacgtggcagccgggaagataagagcttgtgcagggaaactcccctttataaaaccatcagatctcatgagacttattcacactcatgagaacagcacaggaaagacctgcccccatgatccaattacctcccactgggtccctcccatgatatgtgggaattgtgggagctacaattcaatatgaaatttgggtggggagacaaccaaaccatattacagtgtatatttatatttatatttcatgaaagcagct

SEQ ID NO: 323130 - DNA, 487 bp, Homo sapiens
ggatctcatataacagattttctgcaaatgttgcacaatgagttcttaatgactagcatagggtaaaataaaagaactcacaatgcgtattagtccgttttcacactgctagtaaagacatacctgagactgcctaatttataaagaaaaagcggtttatggactcacagttccacgtggctggggaggcctcacagtcatggctgcaggcaaggaggagcaagtcacatcttacgtggcagccgggaagataagagcttgtgcagggaaactcccctttataaaaccatcagatctcatgagacttattcacactcatgagaacagcacaggaaagacctgcccccatgatccaattacctcccactgggtccctcccatgatatgtgggaattgtgggagctacaattcaatatraaatttgggtggggagacaaccaaaccatattacagtgtatatttatatttatatttcatgaaagcagct

SEQ ID NO: 323131 - DNA, 604 bp, Homo sapiens
agaggaatcttgaaaatatatatttgagcctctttgaagatttttatgtaatagaagaaaaatttccaattcatgtatttgaccgatgtactgtagaacatacaaagaccagtatttaaattactgaattatctctctttgtcagccaaagatgactttggctgttgattaagactgcaacagatgtgaatgttcaaaaaaagtgatggagccatctctgagagaagcaagaaattggctttatgcttgtccttggtgatggtggtggtttgttcttttaagaatgtatatagaacatttaaaaaagtagagaaaatatttgcacatatatctaatactccartctttttatggaacctattattttgcttacatctttttttttcttgccaattctctttccttcttctatccttgacttctctttgttgattgtgagtttattgacataaactttctcagagatgttcctaaggaagtgtttagtcttggtactttagttagcaagttggtgtttaagatgactaagaaaatatagcactacccagataatcccatcacctatgatctacttgttaaggaatcagagctccttacccagagt

SEQ ID NO: 323132 - DNA, 567 bp, Homo sapiens
tgttttcaagatcaaatgcaacaactatgaccaaggacaataggtcttcaatggtttccatattttcattaaattatataaggaaaggtatttatttaaaaatttttaaaaagcatgaattctatttttaaaaatctgttattttaaacttkacagcccaaaagtttaacattagttttaatcttacttagcatagccctagttgaagcttttcaaatttttatgtggtcctggaagcatgtatgtagtttcagaatattaaaaaaaatacatatggcttttggagaaattagcttacatgttattagggttttaaattattttttctcttgatgaatgctcctcagcagctatgatgatggggaggagtaagtttttgcagcctattggctagcactgggagtagtgctgaggtggggttagggaccaatgaatggatgaaagcttaagtattcattcatctatttaatattcatgtactggtgctactagaagcgacacatctcccaatttaaggatgttttggaatacaaagatgatgtcctgctttgagctcctgggtgtcat

SEQ ID NO: 323133 - DNA, 626 bp, Homo sapiens
ggacataatatgaattatgggaagatgaattactgctggccattatctcaaatttcttcctcctcagttaacattcaccttcaaggcccagttagattttcttgccaaagcctaatactcaaactaattgtgttttctaaatatggaagctggctttgagttttgtgtatagatcagtgtgtagaattggccagtaagttggttttgtaattacatttatttaataccgtttttcaataaatcaggaaaattattgattggaagatacattaggtaccactaagraaattatatatataatttcaagatgtactataaaatggattaaaattcacttatattaaagggtagaaaacatcaatattagaatctatgacatgtagactagctaaagattcataattgaataatgcttaacaagtcctccgtgatgtagcaagcatgggtactattgtctacactgcagaggtaaggcatgagagtcactcagtccacaagtacttattaagcatccagcaggtgccaggtatgatgccaaggtttcagcctgcaacagagaacaaagcaaacattgtctctttttgtggatatgtgaagggctcttaactggctaaactcacatgcta

SEQ ID NO: 323134 - DNA, 641 bp, Homo sapiens
aattatcctcaaaagtatgtaaataaaaaactaatgctatacacatattatttaaaagtcattattataatattggggtcaytaaagtcaaccaccagctgaaattaaaattttaaaaaaggtaaaagtgggaccaggattggggaataatttgatgacaattttaagcacaatctcttctgaattacttgattcacaaccatgacaaattttattttgataacacatttaacaatcccttgaaagtacccaaggaggtctacattttaaaaaacaagaagaaaataataaagtatatttgacttcatgtttcccaaacttgagtttggaaacagctcatgcgtatctatccatattaatttgggtcaaacagtcctgtgggtcaggtgagggcagttagcatggcaattgaagaacatcaactctgttcttgggttgtttgggttgaatcctgcctctgcctctccatatattcaactctagatgcctctgattttccctcatctgaatgattgaaatgataataactttagtggtcaaattaaatgcatgtgtgtgtagttgtgtgatgagaatgtgctcagtacataatgaagaggttgtgttggctctttatatttattaatgatgataatattgat

SEQ ID NO: 323135 - DNA, 582 bp, Homo sapiens
aattttaactttagaattaagtaagggggaagttataataaaagtaaactaaattaattttatatggctttcataattatcctcaaaagtatgtaaataaaaaactaatgctatacacatattatttaaaagtcattattataatattggggtcactaaagtcaaccaccagctgaaattaaaattttaaaaaaggtaaaagtgggaccaggattggggaataatttgatgacaattttaagcacaatctcttctgaattacttgattcacaaccatgacaaattttattttgataacacatttaacaatcccttgaaagtacccaaggaggtctacattttaaaaaasaagaagaaaataataaagtatatttgacttcatgtttcccaaacttgagtttggaaacagctcatgcgtatctatccatattaatttgggtcaaacagtcctgtgggtcaggtgagggcagttagcatggcaattgaagaacatcaactctgttcttgggttgtttgggttgaatcctgcctctgcctctccatatattcaactctagatgcctctgattttccctcatctga

SEQ ID NO: 323136 - DNA, 574 bp, Homo sapiens
atttgaattgcttgttggtgagtaagtgaggttccttagggtagaaatgccttcaggggaactgggcaacattaataatctttgaaccctggtaatgcttactggtcatcactcttgagaccaacataatcctgagataaattctaggacattacacacttatcaaaaatttatttaawccatattccgatattctcattgggtactttacaatcataagtaaagggagattctagagttcttggcagcttttacgatctcatggaattttcacttcttctgatatttgtattacctttgcctgtctcataattgttccagcgaagtaaaggcagatggtcacattcattttctgcttttgcttagtagccccgatgccatccttgaaatgttgcttggactaagtgcttccttagcccaaattggcaagaaagtgcttcctgaaaaatctaagtttttctgctttttaattcagtgccttaaggcagttatctattctctctccctttatctttctctctctctcccttcttcctcctattgcttctccttccccatcccatgtgtgtgtaaa

SEQ ID NO: 323137 - DNA, 519 bp, Homo sapiens
aggcaaagtcagttatgactataatgattcacagacctagcgtagctcatgatatttacgttcactctacctacaaagcagcaggaatttacctgatacattcagatactcatgggtgtgaggacacagaagtaaaatggtaaacacatacctgaacaccaccatctatcaataccccatcaccataaagagcaatcacatgcttaaggtttgtaattttccactcttgacattacttgtcttgcccaggagaagtttgcttaaatcttastataatgatacttatttgaccttaacatgtcctctctgtatcactgaatatataggagttttatactttagctcacctatgcacaattgaaaactatatttttattttgtattccctactattggccaaaggtatgacttaattcaattatcttttgagacctagtcaacacaacaaaaaaaggaataaacctttacacacggaagtctcttaaatttaatgctttcaggcagaatcaatcaactgca

SEQ ID NO: 323138 - DNA, 519 bp, Homo sapiens
aggcaaagtcagttatgactataatgattcacagacctagcgtagctcatgatatttacgttcactctacctacaaagcagcaggaatttacctgatacattcagatactcatgggtgtgaggacacagaagtaaaatggtaaacacatacctgaacaccaccatctatcaataccccatcaccataaagagcaatcacatgcttaaggtttgtaattttccactcttgacattacttgtcttgcccaggagaagtttgcttaaatcttagtataatgatacytatttgaccttaacatgtcctctctgtatcactgaatatataggagttttatactttagctcacctatgcacaattgaaaactatatttttattttgtattccctactattggccaaaggtatgacttaattcaattatcttttgagacctagtcaacacaacaaaaaaaggaataaacctttacacacggaagtctcttaaatttaatgctttcaggcagaatcaatcaactgca

SEQ ID NO: 323139 - DNA, 497 bp, Homo sapiens
cactcacctatggtcagctgtccggttaactgccccatgtgatttcttgcattcactgtgacattcctgtcagactgtaagaccagcggactatcctgggaaacatgtataaaataaataaatagaaaatagaaatatcgtcaaatttacaaaaaawtatactgcatttgtttggatattctgaaaaatttaatttgtttgctctatattagacagttaatttaacgtcccaatcattggtggacaatgtacaaaactgagagcctcataataattacttgacagaatatttcattttcataagtgggtactaactatcagatgcaagcatttccaaccctactgattgctgcacatcaacggtgtagtaacccttttcctttttctctcccagtgtcctctatgcctgcctgtgcagatattccagacgctatcccaatggcaaaagtccctttttaagtttaagttgcatctttcagatctcagcttaaatgcca

SEQ ID NO: 323140 - DNA, 609 bp, Homo sapiens
agtggaactacatcaaactaaaaacttttgcataccaaagaaaaaggtccgcagagtgaaaggcaacttactggatgagaaataatatatgctagctacatatccaaaaggggttaatatctaaaatgtataaagaatttctacagctcaatggcaaaataaaatagcaaaaggacytgaatagacattcttaggaaaacttttgaatggccattgggttaaaaagatggcaaaaatgattagtgaatcatcagaaaaatgcaaattaaaaattccagtagcacctgacacacatcttacagtgatcaaaaaggaagaagacaaggaaggaaggaaggaaaaaaggaagaaggaagttaacgtgctagggagaatgtgaagaaattggaacacttgtacgctggtggtgagaatgtaaaatggtgaaatggtgcaactgacatgaaaagcagtatggagattcttcaaacacttaaaaatagaacaaccatataatccagcaatcttacatctgagtatatatccaaaataatagaaatcagaatcctgaagagatattaatattcccatgttcattgcagtactaatcacaatacacaaaatatagaa

SEQ ID NO: 323141 - DNA, 609 bp, Homo sapiens
agtggaactacatcaaactaaaaacttttgcataccaaagaaaaaggtccgcagagtgaaaggcaacttactggatgagaaataatatatgctagctacatatccaaaaggggttaatatctaaaatgtataaagaatttctacagctcaatggcaaaataaaatagcaaaaggacctgaatagacattcttaggaaaacttttgaatggccaktgggttaaaaagatggcaaaaatgattagtgaatcatcagaaaaatgcaaattaaaaattccagtagcacctgacacacatcttacagtgatcaaaaaggaagaagacaaggaaggaaggaaggaaaaaaggaagaaggaagttaacgtgctagggagaatgtgaagaaattggaacacttgtacgctggtggtgagaatgtaaaatggtgaaatggtgcaactgacatgaaaagcagtatggagattcttcaaacacttaaaaatagaacaaccatataatccagcaatcttacatctgagtatatatccaaaataatagaaatcagaatcctgaagagatattaatattcccatgttcattgcagtactaatcacaatacacaaaatatagaa

SEQ ID NO: 323142 - DNA, 609 bp, Homo sapiens
agtggaactacatcaaactaaaaacttttgcataccaaagaaaaaggtccgcagagtgaaaggcaacttactggatgagaaataatatatgctagctacatatccaaaaggggttaatatctaaaatgtataaagaatttctacagctcaatggcaaaataaaatagcaaaaggacctgaatagacattcttaggaaaacttttgaatggccattgggttaaaaagatggcaaaaatgattagtgaatcatcagaaaaatgcaaattaaaaattccagtagcacctsacacacatcttacagtgatcaaaaaggaagaagacaaggaaggaaggaaggaaaaaaggaagaaggaagttaacgtgctagggagaatgtgaagaaattggaacacttgtacgctggtggtgagaatgtaaaatggtgaaatggtgcaactgacatgaaaagcagtatggagattcttcaaacacttaaaaatagaacaaccatataatccagcaatcttacatctgagtatatatccaaaataatagaaatcagaatcctgaagagatattaatattcccatgttcattgcagtactaatcacaatacacaaaatatagaa

SEQ ID NO: 323143 - DNA, 629 bp, Homo sapiens
aagtaaagttgttatccagaactcagataacttccataacccagattattccattgggtactttgaattacataatggaccataatttgtcaaatgcgtgacaacttgccacctcagttgccaccttccttattcctttcatttcagtacatagctccatatgttatacttctatattagaataaaaaatatgatagcacaggattaaatacattaaaactgtaaaggatactaaagtaacattgatgcatctaaaaaatatttggcattcactccccttattttaccatcaggaaacaggcccagtgttgagctgaaaggccttgagatcatctgactgaaaaaatagaacagatgtgcgagtgagtcaatcattccagaactttgacactacaaatgatcatgccactttyctggagagcttaaacttattcctaaaccattctcaatatccagggttccattgtgatagcccttttcaactgatcagagttagcatgccaagtgaaatccatgtacaatcacatcttgtctaaacttctcacttagattaggtgtatatagattattgaatgacatctaaaatgaaacacaggaattaaagtctgattttttttacttcaaattta

SEQ ID NO: 323144 - DNA, 568 bp, Homo sapiens
tatatttattcttttaattttttaattagaagtttcaattcttakgaatttttgtctattagacttttgctttgaggtaatttattaaatttatttttcaagactttcagcttacttttaaatattgacttcatattctgtgctgtgcattcaaaacttagtggaatgtcattaaatcagctataaattcaagatgatctataaaatctaatttagtaattcagttgacccaatggaacaaagtattacgtatttctagaattttggctatgtctttcttcggctttatatttccttaattaattttgaaagctaataggtgacttttcttatgatgtctcaaaggctttagttgtggtgcccagtgaattcagaatcttgtagcaagttgtaaatagtaggaaagtactgggtttatcgtgttcttaaaatttagagttttaccaagactttttatctacaatacttttaaaattgttactcttttacattgcatgatcaactcatctatagacactattatataatacacataaaactgtataacaagagaaactagatgcctttt

SEQ ID NO: 323145 - DNA, 568 bp, Homo sapiens
tatatttattcttttaattttttaattagaagtttcaattcttatgaatttttgtctattagacttttgctttgaggtaatttattaaatttatttttcaagactttcagcttacttttaaatattgacttcatattctgtgctgtgcattcaaaacttagtggaatgtcattaaatsagctataaattcaagatgatctataaaatctaatttagtaattcagttgacccaatggaacaaagtattacgtatttctagaattttggctatgtctttcttcggctttatatttccttaattaattttgaaagctaataggtgacttttcttatgatgtctcaaaggctttagttgtggtgcccagtgaattcagaatcttgtagcaagttgtaaatagtaggaaagtactgggtttatcgtgttcttaaaatttagagttttaccaagactttttatctacaatacttttaaaattgttactcttttacattgcatgatcaactcatctatagacactattatataatacacataaaactgtataacaagagaaactagatgcctttt

SEQ ID NO: 323146 - DNA, 454 bp, Homo sapiens
ggtattaaaaaactgaatgtcattcttctgaaattttagttttagagtgtgcttaaaaccacagtcttatgctttaaatagkatcttgtatttcatcataggtatccttgtttaatgctcaataaatttggaagaatgaattctgaatgaactaacacctagggaagccttgctgttattgtcagaatcatttacttgtctttgatattctgctaaatgacgagttaatgggtgcagcacaccagcatggcacatgtatacatatgtaactaacctgcacattgtgcacttgtaccctaaaacttaaaatataataataataaaataaaaaataaaaaacaaaatcagtggcataaccaaattgtataaaaatcttaattataatctttaatttctcattttctgtttttcctcagtaattcttgaaacttagggcttaaataagcctgactat

SEQ ID NO: 323147 - DNA, 454 bp, Homo sapiens
ggtattaaaaaactgaatgtcattcttctgaaattttagttttagagtgtgcttaaaaccacagtcttatgctttaaataggatcttgtatttcatcataggtatccttgtttaatgctcaataaatttggaagaatgaattctgaatgaactaacacctagggaagccttgctgttattgtcagaatcatttacttgtctttgatattctgctaaatgacgagttaatgggtgcagcacaccagcatggcacatgtatacatatgtaactaacctgcacattgtgcacttgtaccmtaaaacttaaaatataataataataaaataaaaaataaaaaacaaaatcagtggcataaccaaattgtataaaaatcttaattataatctttaatttctcattttctgtttttcctcagtaattcttgaaacttagggcttaaataagcctgactat

SEQ ID NO: 323148 - DNA, 454 bp, Homo sapiens
ggtattaaaaaactgaatgtcattcttctgaaattttagttttagagtgtgcttaaaaccacagtcttatgctttaaataggatcttgtatttcatcataggtatccttgtttaatgctcaataaatttggaagaatgaattctgaatgaactaacacctagggaagccttgctgttattgtcagaatcatttacttgtctttgatattctgctaaatgacgagttaatgggtgcagcacaccagcatggcacatgtatacatatgtaactaacctgcacattgtgcacttgtaccctaaaacttaaaatataataataataaaataaaaaataaaaaacaaaatcagtggcataaccaaattgtataaaaaycttaattataatctttaatttctcattttctgtttttcctcagtaattcttgaaacttagggcttaaataagcctgactat

SEQ ID NO: 323149 - DNA, 486 bp, Homo sapiens
ttacagtgaacacctgggaatcatttaattgactgcagatggtataggaygtataaaaagtagaaggttatggattattctcaggttccaaatttatgttttttttaattgactctttttttttttttaacttagagaatgttgtaatagtctgggataatttaataagaatgaatgtttgatgtaaagtgagttgtgcaaatcttgaaggatagattaacaaaatacttaggtttaatactacatatacatttcaaatgattaaatgcattgttgattttgagttcattattagttaattcatgttaataaatttataattaattaatccatttgaggaaattgtaagttgaagtagatgcctgtgatatcaggacaaggatgtcacgctttagaaattagagctctcagtctttgtaactcaggtgtaatgagaattatgtctgaaggaaagacactagtgatcatgttttgaaaagttgtatc

SEQ ID NO: 323150 - DNA, 486 bp, Homo sapiens
ttacagtgaacacctgggaatcatttaattgactgcagatggtataggatgtataaaaagtagaaggttatggattattctcaggttccaaatttatgttttttttaattgactctttttttttttttaacttagagaatgttgtaatagtctgggataatttaataagaatgaatgtttgatgtaaagtgagttgtgcaaatctygaaggatagattaacaaaatacttaggtttaatactacatatacatttcaaatgattaaatgcattgttgattttgagttcattattagttaattcatgttaataaatttataattaattaatccatttgaggaaattgtaagttgaagtagatgcctgtgatatcaggacaaggatgtcacgctttagaaattagagctctcagtctttgtaactcaggtgtaatgagaattatgtctgaaggaaagacactagtgatcatgttttgaaaagttgtatc

SEQ ID NO: 323151 - DNA, 486 bp, Homo sapiens
ttacagtgaacacctgggaatcatttaattgactgcagatggtataggatgtataaaaagtagaaggttatggattattctcaggttccaaatttatgttttttttaattgactctttttttttttttaacttagagaatgttgtaatagtctgggataatttaataagaatgaatgtttgatgtaaagtgagttgtgcaaatcttgaaggatagattawcaaaatacttaggtttaatactacatatacatttcaaatgattaaatgcattgttgattttgagttcattattagttaattcatgttaataaatttataattaattaatccatttgaggaaattgtaagttgaagtagatgcctgtgatatcaggacaaggatgtcacgctttagaaattagagctctcagtctttgtaactcaggtgtaatgagaattatgtctgaaggaaagacactagtgatcatgttttgaaaagttgtatc

SEQ ID NO: 323152 - DNA, 486 bp, Homo sapiens
ttacagtgaacacctgggaatcatttaattgactgcagatggtataggatgtataaaaagtagaaggttatggattattctcaggttccaaatttatgttttttttaattgactctttttttttttttaacttagagaatgttgtaatagtctgggataatttaataagaatgaatgtttgatgtaaagtgagttgtgcaaatcttgaaggatagattaacaaaayacttaggtttaatactacatatacatttcaaatgattaaatgcattgttgattttgagttcattattagttaattcatgttaataaatttataattaattaatccatttgaggaaattgtaagttgaagtagatgcctgtgatatcaggacaaggatgtcacgctttagaaattagagctctcagtctttgtaactcaggtgtaatgagaattatgtctgaaggaaagacactagtgatcatgttttgaaaagttgtatc

SEQ ID NO: 323153 - DNA, 570 bp, Homo sapiens
acaccattatggctatgctgaagcaagccactcatcataaggcttgagtacttcaaggtttactccattgatgaggcctccatagctcatgcttgattctaaggctgtcacctgcaatccttacttactcttacagtcatctgatcaatcccacatgagccctcttctccacatctccattagattttcatatccccctccttaattgtgttatgtctcaaggtttgttatccaaaacaccagcttttaatatttcttcaaggtgaactcaactcccagcctgtagacttaaacaccacagtctcagagtttgccyctagaatacttttggcattttcagagcttgaggatgcctttcctctgcacacatgctagctcctgaaaaggtgtaaggaaaagggactgaactacacaagcccacttcctcttccactcaaccaataaaaggaatcatctctcattccctggggagaagagagccacaagtgtatcacaagcaagaagaaatgagacccaacatccatacccccaaaatgtattgccttgggtttttgttgttgtttgcttagt

SEQ ID NO: 323154 - DNA, 593 bp, Homo sapiens
tgaactcaactcccagcctgtagacttaaacaccacagtctcagagtttgcccctagaatacttttggcattttcagagcttgaggatgcctttcctctgcacacatgctagctcctgaaaaggtgtaaggaaaagggactgaactacacaagcccacttcctcttccactcaaccaataaaaggaatcatctctcattccctggggagaagagagccacaagtgtatcacaagcaagaagaaatgagacccaacatccatacccccaaaatgtattgccttgggtttttgttgttgtttgcttagttttgtgcacttcttgctttcacatcagaaaaacaaatcttaaaaaaatagaacaaattcatttctttctctttgctttcctgtcacttaacacagaagtaactatggggtaatatatttcaacatctgacatcaataaacacaagctgtaatcatgctttttaactttgaatactgttgataaatgcagccattcatttgttttataatgtattcatttaytgaataactatttgtgttatgtagaaggtgtatctacagggttaaacatggtaggaattactaaa

SEQ ID NO: 323155 - DNA, 567 bp, Homo sapiens
ttgttgggaggtgggtttgtaacttagaggggagagatgtgttcawggtgaagaaaaggcatcatgtaattcatgcacttcacaattccatgccctattctatatggatgaaccaaagacaggccctatcctcatggatcttattgtaagtagaagaaacaaacaatgaatgaatacaaatgtaacattacaaatggatttttactatagagaaaagtataactgttaatgagagaagaaagattagcattattttaatagagtgtttagaaaagttatttccaaggaggtgacctttggagaattggagcaaatttgtttgcatccaaattgacctaaaatatatatacttatgatatatgaattctttttctggcttaattgtagtgtgcagtagtcttatggttcagaaatttaaaaagcatcaaaaaagtggaaagctacctcccatccatatttcacaaccacccagttaatatctccccccactcattaaatctctggagaaaagtatttcggtttgaggaaatagtaaaaatactatgaggccatagtgcttttgctatt

SEQ ID NO: 323156 - DNA, 567 bp, Homo sapiens
ttgttgggaggtgggtttgtaacttagaggggagagatgtgttcaaggtgaagaaaaggcatcatgtaattcatgcacttyacaattccatgccctattctatatggatgaaccaaagacaggccctatcctcatggatcttattgtaagtagaagaaacaaacaatgaatgaatacaaatgtaacattacaaatggatttttactatagagaaaagtataactgttaatgagagaagaaagattagcattattttaatagagtgtttagaaaagttatttccaaggaggtgacctttggagaattggagcaaatttgtttgcatccaaattgacctaaaatatatatacttatgatatatgaattctttttctggcttaattgtagtgtgcagtagtcttatggttcagaaatttaaaaagcatcaaaaaagtggaaagctacctcccatccatatttcacaaccacccagttaatatctccccccactcattaaatctctggagaaaagtatttcggtttgaggaaatagtaaaaatactatgaggccatagtgcttttgctatt

SEQ ID NO: 323157 - DNA, 592 bp, Homo sapiens
tctctcaaagtggtgagtccatgatttagaataaagcattttccaagttagaagatttagcaaagtaggtattgaacataggtaatatgtttcatggagacttcaaatctaattatagacaataattatatattgttcactgtgctgattagctactgtattggttcatttttacattgccgacaaagacatacccgagactgggtaatttataaagaaaaagacaattaatgtattcacacttccacgaggctggggaggcctcaccatcatggcagaaggcaaaaggcgcatcttatgtggtggcaggcaagagagaaggagagaaccaagtgaaagggktttcccccttataaaaccatcagatcttgtcagacttgttcactaccctgagaacagcatgggggaaactgcccccatgatttaactatctcccactgggtccctcccacaatacatgggaattatgggggttacaattcaagatgaggtttgggtggggacacagccaaaccatatcagctacttagtatatcctttggattaaaagtccacacacttttatgagtattaaaaaatatgaaaatggcca

SEQ ID NO: 323158 - DNA, 559 bp, Homo sapiens
aagtttttatcctctttgttttgactatcacatttaatcatggttacatagtagcaccaaaattaggacaaattacaagaatcacaggagagatcttaaattatatgagctcattgcatgcttcaaaaggtctcatttcagagaamaaaaggtttccaattgccaaaactttgctgcattttctctcccccaaaatataccccaattaagttccatctaaacaaaagatacaatagactgatttttgaatagatatgttatctacagtttatagggcagacagtccatttaaatagaaaaagtgattttacataaagcaagatagagtacaaaagcacagcttttgtaattttggtaatattgcaattttacaaacatgttgcatagtatgtgtaagaaaatagttccatttttcatatatctatatatacaagaaaacatttacatgaaagtacaaaacaaaataaatgaatagtggacctgatttaaagaattgtataaataacgagacactcaaactccagattacatatctccattgttaatgaatgtccttgcc

SEQ ID NO: 323159 - DNA, 569 bp, Homo sapiens
tggagtacagaaatccagggtggcaccttaaagggaggagcaaagaacgcagcctttgccacatcatttccctgtcaggatcagcttggaaccaaaagggacttcttgtagacaggtaagcagtaggcccccagaaatgcagtttgttattaccactgcaaacacctacagttcttggttgacaagttgttgttgtttttgttctccatagaacttttagcaatttcygtatgttattccaattgtattctggcctctatggttcctgatgacaaattattgatcttattgagaatcttttatctatgacaagttccttctctcttgctgctttatacattccctttttgtctttgtttttgccagcttgattaaaaagtgtcttgtctgactatctttcagtttatcctacatcatgtttgttaagcttcttggacaggcatatgcacgtgtttcatcaaatttgtaatgttttaggccattatttcttcaaataagccatgaaacagataacattttagtcagcaacagataacatatatgacagcgatcccttaatattgtatttt

SEQ ID NO: 323160 - DNA, 610 bp, Homo sapiens
ttattcctcttaaataggtaatatgtgtacacaacacatgattgcaacaaaatacaaatttcaaaggcacagaagcatttacagtgacaactacttctctttcccatccttgtcttccagctatccaaagtcctttgtacctaagacaaccaccattactaatttcttgtatatcgttacagaaatcttctaaacaatacgttctgtttgttttatactttctatttaacaatattcttattttgtttatacattatttacttcatgttccttagtttttgtccatgtttttctttagctacttgaacatattttaaatcgctattttaaactctatttattaaatccagtgtctgaatttcttcagggttggtttctgtccatttatcttgttccttttagtagccttttyatttctgtttctttgtatgaattgtgactttctgttgcaaactgggcatttgagtattataaagtggcaactctaaaatcagattctgccaccttttgcgaattgtgctggtttttgttgttgttgacacttttttaaaattgtaggaatttatttgcttagtgacttttgttaacttttttctaaagactgaaattc

SEQ ID NO: 323161 - DNA, 579 bp, Homo sapiens
tgataaatgtttgaggtgacgtatatactaattaccctgatttgatcattatacatggtataaatataccaaaatatcacactgcatgccaaaaatatgtataatgattgtgtcaattaaaataataataaaagcaaaaaagaaaaaaagaatatgtatttctcaaataacaagaagtccggaagtcacaatccaggacaaattaccttgctcagaatcaaggcctaggtttcttccagcttttttattttagcatataatttttattcttatacttataaagtacttgatctacctctaaattcatgcccaactctcaggaatgaagaacrgggaatggacgaggataaaagtcaaaagtcatggtctgagtcttctatccggaaaacaatggtcttaccacaaagtcccatcctgtagaatgctgcttgtatcttaatatctcaaagtagaccacatggacaccattagctgcgaaaagtgtttttttgttgttgttatagtaactattttctttcttttttcacttattattaaagaatgattcaccgaccgaaagacataggtatgaaaagtgca

SEQ ID NO: 323162 - DNA, 563 bp, Homo sapiens
atactatatacattatatataatayatactatatacattatatataatgtctatattatagacattatatatttttaagtggtccaacagattgatattgtaatttaacgtaacaaacgtctacgccgtgtgacttgtatctatattaaaaagagtaatttgattatttccttttatttgaatctcatcaattgtttacttttaaggacaaaatatataatttttttctgtaatattttagagattaatttacatgaatatctgagtttatccaaaacagcaattaagataactacaaataaaattaattttaattgaattttctgatataacaaaatcaaaagagtcaaatattttctgtggatcatgagtccaaaagtttacttttttgtttgtttgtttgtttgtaaggaatttggtacctctctgcagttcaacccatttcaaagtcacatttaactttagcttgatgctatacctatgtttcaaaattgtgcattttacaggaatctgtaaatctgaggtctgtgaaaatctgtggaatggttaaaatctcagtctag

SEQ ID NO: 323163 - DNA, 643 bp, Homo sapiens
ttaacatatcatttttcagtccattaagatcaatcctagtaaaaagatgcaagatttagcaaatacaagtagagaatatctagttaaatttaaatttcaaatacacaaaaatacaactttagtatatctctatctctatctatctgtctgtctatctatctatctatctatctatmtatatatatatatatatatctcccaaatattgcatgggacataggtaaactaaaaatgtatttattgtttatctgaacttcaaatttatcaggacactgtattttttctggctacacaattctggaaccactacgcacagagctggggccacttgtctctactctccattagctagctagctgttactgccttactgtcaaattctgataaatacacaatagatgagaaataggtaagtgtccaggcatggtggctcacacttgtagtcccagtactttgggaggctgaggtgaagggatttcttgagcccaggaatttaagaccagcctgggtaacatggcaagacctcgtatctacagaaaattgaaaatacattagctgagtatggtggtacacgcctgcggtcccagctactcaggaaaattaggaaggaggatcacttgagcccaggaggtaaaggctgcag

SEQ ID NO: 323164 - DNA, 624 bp, Homo sapiens
gtgtcttttcaaacagtcagtactcactcactacttatagtataatggatagaaggaaaggataaaaagaaagtggaaggtatggcaagtccaagggaagactctggtttggggacaacataaggtccttatgtgagatcagtggagcagagatggtatgggctaataagagactgcagagctatggaatgctgagctaagtggtttctcttcaatttcctaggcaacagggaactattgcttgaatatgtattcaattcttactgcaaaatcaaaacaactgaaaatctccatattcttctcattcattatttaactcattcaatctttaaggaacacctgctatgtgacaggcactttgatgagaactgtcctcaagaaacacacagcctagtggggcaacagacatgaatattaygccttttgaacctgacaagtgctgtgatggaactccccactcctcttcttttctctcgttctctcttcctcctgtgatgaagggtgcacacaatgctcatcagacaccagaggaggaatacctaatccagtttggtaggcaggatcatggaatctattcaactcaaagcaatgcaaggtctttcctgaatgataaataaaagtttt

SEQ ID NO: 323165 - DNA, 565 bp, Homo sapiens
tcatttcatgtctcaaaaagagtcccgaaagccattatgtgtccttgtgaaaggcatataatacctctggaccttagtttgtcattcttttaatcaaagagaagaaatttcagaatgatcacttctagttctaaaatgttaaagctctgtaattagaatcaaacttatatctattaaccacctactaagtgttaaattacataatcttatttaggctagaaacaggaaatggctgtgtctggcacgtatagctagatakattgtatttcagtatttttataaatcgaattatattgtcttaaacaccattttctggttggcaagtcatctagtttaattattgacagtcagagcaacttcctccgttttcccagagcattttacaagatatatggcacttacacagtccaaagattaagaaaaagtctctggttttcactacaatttatttaccaaacccttgtaccctattctgttgggagatttctccaatgcatcaacccactctagtcaaagctagacccagtgcacacagcacctatggttcagtctcaaagcagacatg

SEQ ID NO: 323166 - DNA, 581 bp, Homo sapiens
tttcactacaatttatttaccaaacccttgtaccctattctgttgggagatttctccaatgcatcaacccactctagtcaaagctagacccagtgcacacagcacctatggttcagtctcaaagcagmcatgcagccatccccagatgatgttttgtctccttgggatgttgataccagtgggaaaaatgtgactaccccataaaaatcgcaccacttttctttctagtttgagggaatgtgaatctttcctgccaagattaggacattctcttctcccctggctttgccagcttccatcctcatccatcttcatcatatctgacctgatgcatttgcaggccctatcttctaaattctaagatttctaccatatacacaaaaacgatcctcatttaaaataaataacaaaaaaagcaaggaattcagaatatgaaagcagatgaaagcctttttctaaaagaggacggaggaagaaagatgcattataatacttttgctatttaatccacagcagcagaaagaagagacagaaattcatgtcttaatactttaaattctttgtaaactaatgcagtttac

SEQ ID NO: 323167 - DNA, 538 bp, Homo sapiens
gttgggaacatccaagcacaccactgacggcaaaatgaaagttaatttaagagtggtatactaaactgtgacttaaatttggaagtggcaaactgatgatttatgccrgagaaagactgtgaatgaaaaagtatggagccacacagtgaacaagtgcatgcaaaatgtccagagaaaaaacacaactttcagttgtcttagagtggtgctttctcatcttggccaaacccaccacttgtctttgccttgtttctgcactctccaggcaacattccaattagtaatccggatttccctgagctacaagcttggatgagaatcccttggatgaaagatagaatgattttggtcaattagaaggaatgtcccctttgaaatgaatttactaagggtttgtttatatgtttctttctcttaggtgtttaattattatgagtcagccaacccaattttgtgaacaatgcaacacggacaagaatgtttgaaggcaccatgataatgccatcctatgagatttctttttgaaaaattaattagc

SEQ ID NO: 323168 - DNA, 538 bp, Homo sapiens
gttgggaacatccaagcacaccactgacggcaaaatgaaagttaatttaagagtggtatactaaactgtgacttaaatttggaagtggcaaactgatgatttatgccagagaaagactgtgaatgaaaaagtatggagccacacagtgaacaagtgcatgcaaaatgtccagagaaaaaacacaactttcagttgtcttagagtggtgctttctcatcttggccaaacccaccacttgtctttgccttgtttctgcactctccaggcaacattccaattagtaatccggatttccctgagctacaagcttggatgagaatcccttggatgaaagatagaatgattttggtcaattagaaggaatgtcccctttgaaatgaatttactaagggtttgtttatatgkttctttctcttaggtgtttaattattatgagtcagccaacccaattttgtgaacaatgcaacacggacaagaatgtttgaaggcaccatgataatgccatcctatgagatttctttttgaaaaattaattagc

SEQ ID NO: 323169 - DNA, 609 bp, Homo sapiens
ccaccaacccttatctcttaacccagacacctttctattgatttctatctttagataataacttaactctttcaaacaattaccaaccagaaaaaaaatctttgaatccacctgtgactttcaagtgccttctctccctgccactacttcaagttgtcccacctttccagacagaaacaatgtacaacttacatgtattaattgatgtcttttatctccctaaaacatataaagccaggctgtaacccaatcacctagagcacatgttctcaggacctcttgagactgtgcctcaggccaakgtcactcatatttggctcagaataaacctctttatatattttacagagtttgactcttttcatcaacaaagtagtgaaatgaaatttctatccccatccttgagagagacatatatgtatttatatgtaaaatatatagagaatatacacccacgtgttgcttaatgagggagatacattctgagaaatgtgttgttaggtgattttatcattgtgtgaacatcacagagtgaaatgagaaaaactaggcattatagcctacgacacacctaggattcatggtcttgcctgttgctcctaaactaca

SEQ ID NO: 323170 - DNA, 625 bp, Homo sapiens
gaaacccattttaaaatgtcacttcatcttgtttcatttaatttcactatattttattttattacatatatgcttcaatagttccttgataagtaaagttttataatatggatgtgctagatcatttgattattcacccgatgtaggacatttkgatagttgcaaaatgtttactgttacaagttaagcttcttcgaacagacatataaacatgttacatggagatatgttttatttatcttggataactgtcaatgagtacaattgtagggtcacatgagttgccatgaccaaaatcaaggtaatggatatattcataacctccaaaagtctccctgtgtccttttgtttgtgtatgtgtgtgtttacagtacgaacaaatcacatgaaatctacccacttaacacatttttagatgtacaatactgtattgttaacaatacacactatgtggtattgtagacccctgaaacttactcattttgtataactgtaattttttacccattgaaggacaacgttccatatccctctcccttcagcccttggtaaccaccgttctattttctacttttatacatttcactattttagataccttatatgagagaaatcaggcagtatt

SEQ ID NO: 323171 - DNA, 590 bp, Homo sapiens
tctataaccatctgatctttgacaaacctgacaaagacaggcaatggggaaaagattccctatttaataagtgatgctgagagaactggctagccatatacagaaaattgaaactggaccccctccttacaccttatacaacaattaaccaagaaggattaaaggcttaaatgtataacctaaaactataaaaaacatagaagacaggatatagatttcatgatgaaaacgtcatggcacggcaaaagatttcatgacgaaaacatcaaaagcaattgcaacaaaagcaaaaattcatgaatgggatctaatttagcttaagaccttctgcatagcaggagaaactatcaacagagtaaacagacaacctatagaatgaaagaaaatatttgcaactatgaatctattaaagatctaatatccaggctctataaggaactktaacaaatttacaagagaaaaataacccatcacagtgtaggcaaaggacatgaacagacacttctcaaaagaagacgtacatgcggccaacaagcaaatgaaaaaaagctcaatatcactgatcattagggaaatgctaatcaaaacca

SEQ ID NO: 323172 - DNA, 619 bp, Homo sapiens
tgtttgtttagaaaacattctccctatacaactttccttaagcaggatgagagaaatcctgacctgtgcactccacagggagcttcacagttcctgcttactgagcagatgatgttttatgagacaaaaataataattcttttttgccttcccttcttctttctctcttcctctggaaaacagaatcctatcaacatatgctccctactttttctgatgtctcatagagagttcctagcaacttaaatacttgaatgctctataaccttgcctaacctttttgacccaatccaatttcttgcagaaatcagagtaattcctctttagatacgagcatgaattagaggactrgtctccagtgaatgtctttgctgaatcttccacatgaagcatgaaatattattttatacatgaggttatttttctaccatcgttatgaaaggaatatttgtgctaacttgaagtgtcttggtaatgagatacacatttcattcttaattaaaatatatacttcttagacatttttctgcaagagaaatgaagctaagaaaaacattagattgaacaaatctttcttttccttgtactttcaattttctgaataatttttctcttcatt

SEQ ID NO: 323173 - DNA, 596 bp, Homo sapiens
gcttacaatctaatgatgaagacagttattcaacagacaaatagacaaatacatgtataattacatatggcataagtgctgtaggggaaaagtgctagtcactgtgagataaattcatattcttggtcacttgaatgcagaagcaaaggaaaataaagaaaatgattgcaaaaaagagatatatgaaacagagaaataggtatttgagaataagaaaactagaagtagtagtagctggcatttaaataaatacttgtaagtatttaagtcttgtaagtgttaatactaagtgaaagatctagaacattgactacttacaataaataaactcttacaataaataaggtaggtaacattactattwccattttgcaagaagaacactgaaacacaaagagattatttggcttgcataggggggtaaagttaaaatcagaaattagtctgtgtcaaagcatccgacatggactaattccactagttaaaattttataaaaatggttttatttttgtctattatatgatcattaaaaatatttttatggctactcacaagcatgttctctatattgttatttttctttgtctgcttcaac

SEQ ID NO: 323174 - DNA, 548 bp, Homo sapiens
tttaacaccaaactgagcaacatggcaagaccccgtctctacaaaaaaatacaaaaattaaccaggcatggtggtgagtggctgcagtcccagctgcttggtaggctgaggtgggaggatcacttgagcccaagaratggagagatcaaggctacagtgagctgtgatcatgccactgtactccagcctgagtgacagagtgaaacgctgtctcaaaaacaaataaataaatatcatagttatctactaaatggacccatgtgattgagcaaaaaggcctatgttctcaccttccccttaaaagtatttcatcaggaatatttttagttgaattcatatgcactcacgcatgcacacactcatacaacgtcatgtttatttttatatctacatatgtaattgataatttaaaaaactcaactgaatttgctttatctgtgatgaaatagtattgataaagtaattgtataataatattttggtttaggagacatatttaaccttatgagaacaaaatatcttttaattcccttatctatcttcatttt

SEQ ID NO: 323175 - DNA, 562 bp, Homo sapiens
tgtatacccctgcccatcattaatgcaaatgaaaaaattaaaaatatttgaactgcttattcttttttttcttttttctcttttcttttttttctttctttgagaatcgctctgtcacccgggctggagtgcattggcgtgatctcagctcactgcaacctcagcctcttgggttcaagcaatcctcctgcctcagcctaccgagtagctgggattacaggcgcctaccaagacgcccggctgttttttgtatttttagtagagacggggtttctccgtgttggacaggctggtctcgaactcttgacctyaggtgatccaactgtctcagcctcccaaatcgctgggattaccggcatgagccatggcactggtcccaagctatttattctcaacatactaaattctctagttcatttctgggccaatttatctttatacaatgtcttctataaaagaccaaaacatctgagtgtctgagtgaaaagtgggaaatttacccaattggccatcattaggctaacataattgtttagatgaaacattttatttaacttacacg

SEQ ID NO: 323176 - DNA, 411 bp, Homo sapiens
cagggtttacagttaactacatataaaaggaattggcaagaaggagaaatacaacacattggataatgtttcaaaatattatttttctagattggttgtggactccttttttctaatttattttcattctcccacactgtcaatgttggtgttaatcaagacattgtcaatgaacagcttctrttcttcctattttatttttagtgtctaaatatagttttatatctgtaattcttcacttttttgaggtcatgtacccttttgagattctgtggaaatccagggactttcttccttcaaaaagacacttaagcatatacatatagttttcattattcgaaggggttcatggagtttcttaagcctattaataaaaccaagggggacataactacctgggtgaagaccacc

SEQ ID NO: 323177 - DNA, 571 bp, Homo sapiens
ttttcttttcccttttttccattattttgaatccatatttattagcagtttagacacattaagagaactcacagaaaacttccatagcactatgctctcaactttatatgaactttatataagtgttcttatacatttgtaatgttcctagagtacatctgcagggttactcttcaattacattttggagctaagtgacatttacgagcattatttttattatatttgwaacagaacaaaacaaaataccaccacacattttggtattttactttaaaaatgtttgaaatctaacatcaaacataaaacatgtaaagaggatatattgtttttttattttccttgctataagtaagctaaagattataagttgtcattaatgatatttaaaaagatatttcagcagatattttgtttacaccttgaaaacatccaaatgggcaaggtgcggcggctcacccctgtaaacccagcactttgggaggccgtggtgggcagatcacttgaggccaggagttcaagaccagcctggccaaaacggtgaaaccccaactctactaaaaacacaaaa

SEQ ID NO: 323178 - DNA, 619 bp, Homo sapiens
tttctggaaataaatgacccaactctggatttagctggtcccttccatccccagatgccttcattagaggtttaggactgtcacgtgccatcttcctttccttccatcttaggaaattggttccttttacctacactattcacttcttttatacatattgactgatagtacataagaagcttcatccaattcctgatttaagcactaacttcaagagtagaaaaaatgatttcagtactagcctcacaggtagaaaggatgattcattcattaagcaggggtccagcagaggtaccaaaaaatgaagagagaaagcaaatgcagagactgaagagttctagagtgggcaaaataggatgtacagagaacakgagacaggtcaagtagaacccacagggtgtcaatcaaaggttttagttcccaagaatgggctggctggagctggtggtataaattctgtctctagaacatccaaactgtgtttttggcccttaatttaatttagttcatttaattttaaaactcagaccaagcagaatatgttgacttatgggtactatccctggaacagactgcctacatttgtgaccctttctagttggtggctttagataaacta

SEQ ID NO: 323179 - DNA, 558 bp, Homo sapiens
agctcctggtgtgatggaggaggcatggccctgtcctccaggacactcctgtctgatggggcaccatgacttctgtttcctgggactctctgtgtaacagaggggacacagtcctcttgttctgtaggagctgtgtgcctgaggaatgaagcatggcctccatcctgcaggagcctccaatctgatgggggatccatggccacttccctcagagagattccctatttgagagaggagccctgacctctgtcctcaggaaggacccctgtctgatggaggctcatcttgtcctctcactcaagaaaccccatttatggccttcacctttgaccccttcactttgaccccttccgctccctgattcatggggagctcaggtcccacaggcagcagctacggayggagatgggcacttataaacttggctgctgtggggcagggaggaagggaagacaggagactccttacaggagactgcaagaaggccctctgcagcaagtgagggtgacatagaagccttcctggtgaaggtgtctgtatgggatcctctgatggaca

SEQ ID NO: 323180 - DNA, 558 bp, Homo sapiens
agctcctggtgtgatggaggaggcatggccctgtcctccaggacactcctgtctgatggggcaccatgacttctgtttcctgggactctctgtgtaacagaggggacacagtcctcttgttctgtaggagctgtgtgcctgaggaatgaagcatggcctccatcctgcaggagcctccaatctgatgggggatccatggccacttccctcagagagattccctatttgagagaggagccctgacctctgtcctcaggaaggacccctgtctgatggaggctcatcttgtcctctcactcaagaaaccccatttatggccttcacctttgaccccttcactttgaccccttccgctccctgattcatggggagctcaggtcccacaggcagcagctacggatggagatgggcacttataaacttggctgctgtggggcagggaggaagggaagacaggagactccttacaggagactgcaagaaggcccyctgcagcaagtgagggtgacatagaagccttcctggtgaaggtgtctgtatgggatcctctgatggaca

SEQ ID NO: 323181 - DNA, 580 bp, Homo sapiens
gatgtaaaactacttagaaaactcaagtacaatatccagcatctatagctcctgaatttagtactagccaaatcttcagccaaaagagaaacattacatgggtcacccctagtcaagaatttgctaatgtactgaaacaagacgggggaagatttcaggacacatctgaagaaatagcaaccacttaaatccttcttgtgaaccttcctgcaaggcgtattgcggtggtcagttctgaccataaaggctggaagaaaatgagagaaacaggcaaaatctttttttttatgcaagacaaacttgcagacgaaacagaaatcgagcaaaaaaagcgctggggaaaagtatcagttaaaaaggcacccttttgtcagatttctaatgagggctccgtgggtaatttatgagtgtggcagagctgaataaacaaaggcaccagttgacaagtcaggagctcccggtggcacatacagctagaacgctcaactggacagtcaaatgcaggcaaaartgtgatagagcatttttattgtcatttcttctgtccgtcttatgctcacgtgacagtttacctgaaatc

SEQ ID NO: 323182 - DNA, 583 bp, Homo sapiens
gtaccatgtataagtggaatcatatagtatttacctctttgtgactggcttattacatagttttgcctattcttaatcttgattcatatacacagaatcatataatatgggttcttctgtgtctttttctgctccacataatagcattaagattcatccatgttgctgcgtgtctcattaattctattgcacaattaagtatacactacaatttatctttccattcccctgttcatgggcatttgggttgttttttattttgggctatttatgaatgaagctgctgtgcatcttcatatatttgttttgttttttttttttttttttggkggatatacttactcatttccttggggtatcacatctgggaggggaatttctggttcatcaggcagacagatgtttatctgtagtaaacactgtcaaaccgttttccagagtggaatgcatgagagttctagttgctctacaaccttaccatcatttggtattgtcactttagtaattttagtcttttaaagatgtgtaagggtatcttagggtgttttaatttgtattttccttgtaagtaatgatgatgagc

SEQ ID NO: 323183 - DNA, 557 bp, Homo sapiens
agcaagatctcatctcaatttaaaataaaataaaaatttttaaaaatgaagtaaatgctctatgaaaaggaaacccaagggcctagaggcagtaggaactggttttcagtagtaaagttgaggggcatgtggagtccatcttggctttcctctgacagccagtgaagatggaacccgtatccgcacactgaagctgctccctgggcttgctgcatgcctgcctgcaggttggttgagctttgcaggaaagccgcgttggcaagtgtgccaggaccctgaactgctttggggaccgacagaatgcaagtctgaggccgtagagacttagggaggggaagtgcagctgctgtttgctgccagatgctgggtgtgggtttgacacttgcttccccttggtgcagagagactcaggccctcgttggttcagagctagatgccattgagcagataygcttgcctggagtaaggctgggggccttagtgggtggcgttgtgggggtctgtgtgtttctcccaagtcctaccaaagacctcacctaggattgccacaagagcca

SEQ ID NO: 323184 - DNA, 580 bp, Homo sapiens
ttacaatatcgtaataaaactctgaatctgagtaaaaagcatgttatccagggtttatattaatatttgagatgacatcatttatcatgccttctaaaatgcaccaaatgattcacttcaaaatgaaatcagyctgctgaagtattcacccaagagattttaatagatttttctttcccagtaacgcaggaggtcagttctcagtaaaacacacaaaggcataaggtcatgagctattctctctgaaatctccttcatttcagccgttcccaagtgttagaattaattgctcaactgtaagaactgcgacccagagaagtttcaagaaccagccagatgggagagagttttacaacacacatgggcttacaccctagcaacaaaaagaccaaaggaggaaaaaactcacatttccattgttagcactgtgcctataattttcctttgttttaggggacaaaaactgagacagatgatgggttaaacttaatatacctgaattttcatagtgttgggtgctaggggttgtcaatatttgctcagaaaaagatggtaactgcttgtcatttttgcagagaag

SEQ ID NO: 323185 - DNA, 580 bp, Homo sapiens
ttacaatatcgtaataaaactctgaatctgagtaaaaagcatgttatccagggtttatattaatatttgagatgacatcatttatcatgccttctaaaatgcaccaaatgattcacttcaaaatgaaatcagcctgctgaagtattcacccaagagattttaatagatttttctttcccagtaacgcaggaggtcagttctcagtaaaacacacaaaggcataaggtcatgagctattctctctgaaatctccttcatttcagccgttcccaagtgttagaattaattgctcaactgtaagaactgcgacccagagaagtttcaagaaccagccagatgggagagagttttacaacacacatggrcttacaccctagcaacaaaaagaccaaaggaggaaaaaactcacatttccattgttagcactgtgcctataattttcctttgttttaggggacaaaaactgagacagatgatgggttaaacttaatatacctgaattttcatagtgttgggtgctaggggttgtcaatatttgctcagaaaaagatggtaactgcttgtcatttttgcagagaag

SEQ ID NO: 323186 - DNA, 456 bp, Homo sapiens
ggtccctcatgctgtcaaggaggctgcagttgttccttgtatcacatcctcttacaatgtgcaaaagtagcaagagacaggttcactctctctgtctttctctctctgtctttctctctctctctctaatgcctctctccttttatgtggaaagaaaatctccctagggagtttttccactggactctgcttactcatcactgcccagagggagacacatagctacccccaactacaagggaatgtgagataacaagagtctgacrtttccatcttatttcatgaaaggcagtctttgtcaggatgtcagaatcaggaggggaatggacctggggcaggcatccgggagtatctgctatggtggtctaatcagactacctcatctctaggtcccagtggagagcatttgacctcagccaagtcaatcagtgccctgacctggggtttcttaattaa

SEQ ID NO: 323187 - DNA, 490 bp, Homo sapiens
tgtcagaatcaggaggggaatggacctggggcaggcmtccgggagtatctgctatggtggtctaatcagactacctcatctctaggtcccagtggagagcatttgacctcagccaagtcaatcagtgccctgacctggggtttcttaattaaaaatgggcaaaaaaataataattaaaaatgctttatgctaatagaattgaaaaagctgcaaacctaaagctgccagcctccaaagttccagacttttggagaaatccagtttgataaaatcgaagctgaaacacagagagaggtggcatgagagatgggcagggattttcccatctgactctgggatccaggctgttgtggtctctgctctttgtgtttggttatgcaagccaaggaattccccttttagctgaggaatcatttataacacaaagataggcattatcacaacccccatgttttagttgaagaggagaagtatgtgatttgcccatgtc

SEQ ID NO: 323188 - DNA, 490 bp, Homo sapiens
tgtcagaatcaggaggggaatggacctggggcaggcatccgggagtatctgctatggtggtctaatcagactacctcatctctaggtcccagtggagagcatttgacctcagccaagtcaatcagtgccctgacctggggtttcttaattaaaaatgggcaaaaaaataataattaaaaatgctttatgctaatagarttgaaaaagctgcaaacctaaagctgccagcctccaaagttccagacttttggagaaatccagtttgataaaatcgaagctgaaacacagagagaggtggcatgagagatgggcagggattttcccatctgactctgggatccaggctgttgtggtctctgctctttgtgtttggttatgcaagccaaggaattccccttttagctgaggaatcatttataacacaaagataggcattatcacaacccccatgttttagttgaagaggagaagtatgtgatttgcccatgtc

SEQ ID NO: 323189 - DNA, 618 bp, Homo sapiens
ggaaaatggggagtaggggacattggaaggtggaaaggcctaaaaagctcaccttgaaaatccatcaagacattctttaaatttaaatgtaaaactgttactataccaatacttatggcyccttttccgagaaagccctccccgtgtctcttccctgctaattcctggccatctttctggccttaacaaggtgccgttttctccaccagccccacccaaacatctctccttctcacagaggtgggtcacccagagtggtccaaacttccctaatcaaaacagcctttacacatcctgtggcttacaattccttcctacccctgtgaccctcctcttctttccctatttaacattatgaaaactctcatcagtttgcattcaatgaatcctcacctactctgtgcaccttgtcccacaagcctcccctgattgtaaaccctccacagaggtctcggatgacaccttgtgagccaccaggctgtggggagattcctctcttccctcatcaatgtctttacccagtgaggttaagaaagccagggcaggctgaactaggaattcccttggttctaacagaaaatatggtcactttaaatgacctaattgtcctgtctaaac

SEQ ID NO: 323190 - DNA, 538 bp, Homo sapiens
aaccccgtctttactaaaaatataaaattatccaggcatggtagtgcatgcctgtaatcccagctactcaggaggcatggttgcagtgagccgccgagatcatgccattgctctccagcctgggcaacaagaatgaaactccttctcaaaaagataaaaaataaataaataaaaacacacctagcatcttacctgacatgtgaacatccagcaatgacatttgttgttgttaatgttattcattcttattatttttatggcaatatggcagtggggatacacaaaggaaaggaggatggctcaatcttggaaaacagggactgagctaccactttacatggtaaaaactttaaatgattttcagaagaaaaaagtgttcgaggagatgatgatatttcagtggtcatctagacctgcctgtcaaacaaaacatcaaacctagttcgtagtctgggccatgctggttttcaagtctgctgtttayagcaagctccagccagttccaactggcagacatattgcttcagccaggacggtc

SEQ ID NO: 323191 - DNA, 620 bp, Homo sapiens
ctttccttctttgtttctccttttctttgccttcatttttattctcgtcttctccattcttctccttacttctttcttgccttttctttcatgattccttgcttgctgctgtcctcctgcttccatccactttgtcctggatgtcctatgcccgaggaaaatgaacaccaccctacttaaaatgaatttagtgctgagagctccactggcacgagaacgggaagtctgtaaagtggggrcatttctcagtctgtaaaatgactgagaactttccaggtgtccaccaagttgacccactcaatcctcaagtgctcagaggacacagaacttcactgaatcttacctgccaccattgtgtgggatttctacctagcactggctttatgctaatggcattatgtgacctttttcctctgggcctcaaaacagccctcatacgtagatatgacaatgttcatcccctagatgatgaccctgagtctcaggatgggaggagattgtacaaggtggtccagggaaatgagtcaggggtggagctgcctgattgactctgttgccttacattgtctttcatcttttaaaggagaaaaaagggagcaaaaataagaaattatttagaa

SEQ ID NO: 323192 - DNA, 513 bp, Homo sapiens
gacccagctttccggtcaaccccatggtagtgacaaagaaagagccttcttagagtcaaaattgcccagaatcactttgtctggaattcttgggtgatgggctgtgatgtgctgattttttctcgcattcttcgtggatccagttgtcactgtttgtttggagtgtgtgctatgtaccagacactttgctacagrgctttcttccttggagccccaaatattttatgtcatcatttttgataaaaacaactttttagaatgttccactatgtcttctgtttttcgaaaataagttttctgaatgtgatctcatctttatgattcagggatagccttattaacacagttaacaaacagcacatcctataagaaaaaaatgtcatgggaacttctgtttgtcctaattactaaatggtacaagattgcattttgtgaaaaatctgtttttcatagttttctgccttattcacttcctgacaaggccttatgaccacccatgtttctgcctgcttg

SEQ ID NO: 323193 - DNA, 513 bp, Homo sapiens
gacccagctttccggtcaaccccatggtagtgacaaagaaagagccttcttagagtcaaaattgcccagaatcactttgtctggaattcttgggtgatgggctgtgatgtgctgattttttctcgcattcttcgtggatccagttgtcactgtttgtttggagtgtgtgctatgtaccagacactttgctacagggctttcttccttggagccccaaatattttatgtcatcatttttgataaaaacaactttttagaatgttccactatgtcttctgtttttcgaaaatragttttctgaatgtgatctcatctttatgattcagggatagccttattaacacagttaacaaacagcacatcctataagaaaaaaatgtcatgggaacttctgtttgtcctaattactaaatggtacaagattgcattttgtgaaaaatctgtttttcatagttttctgccttattcacttcctgacaaggccttatgaccacccatgtttctgcctgcttg

SEQ ID NO: 323194 - DNA, 547 bp, Homo sapiens
aacatcttttttcttttttytttttttttttttttcaaaaccagggtactaaagaacaccctctaaattcagtgctaggctcgttactttttcagatttaaactctcaccctgaacatatctgttatacttcaaggtgagttagaaagtgagtggaaagaatgttcttagaagttatttctgtaacagcatgggtaacatcaaacttatacaggaaagtaacggtaaaccacaacaaatatatttcattaaagtcaagctgaatgtatacccaactcaacttcccccatgagccctattctaaaaatgcctggggctaccccaagaccactcaaaatgagaagatagacaaagaaagaagtcagaagataaaaaaaaaaatgtcttaactgattatgtttttatagtcttacttatttttttggcggttttagaaaaaaaaaaaagtgaccatgtgaacacattgatagggtcctccctgggtttttagaagcaggttttacaagcaaggggtcctgaaacaagcttcatcagtttcacagaaaatc

SEQ ID NO: 323195 - DNA, 508 bp, Homo sapiens
tttgttcttcatctgaagctgttttgtacccttgtatttgttgctatgtgtgcattctttgataagaaaattttaaaactagaaaaggtattttaagatgatagtatattctaagagcccctatggaagtcttgaagtgcatgggaaatacaaaatgtattaggtagtgttctaacaaaataacctcttaaatcagtgtttctcaatgtgcttgctcatgggaaactacttggggtttgcaaacccctttgggccatgaaaagagtggtttaaatggttacagtttatattttcgtttttatagtttataytgtagtttatataggaagccaccaatcacccaacagcactgtattttgtgtttttcgaaaaattgtatatatgcttctatgtggtagacattaaaagtgttaaaaggccgggtgcagtggctcatgcctgtaatcccagcactttgggaggccgaggagggcagatcacgaggtaaggagtttgagaccagcctgac

SEQ ID NO: 323196 - DNA, 614 bp, Homo sapiens
gtttttagaaatatcagatatccttgactttatccttcctttatctccacaactgagaacgtcttgctgaacacttgacctttattaaatgtttcaagcttctgacttagtccacttttacattagtttctttaacttattaagaaaggcccatgagtgaaaaataggcagagtagagaaaaaaaatatgcagaagagagaactagtgctttagcaatttggtgggaattaaaaatagcctactctgtattaaaagcaagtcaactgttggagatactttttaatagcccttgttttatttcaagttgctctggtttagttttctccatcagtttttgttttatttaatgtgtatgcatttctgccttgtgatatgccaaccaccaaaaaacccagattcagatccagtttatagattgagttcagaagtttgtttaccaaccccacacaatttcagagtcagtatgatgtgaaggaagaacattagatttcaataaacctggatgtcartcttacagctataacatataggataccatggcaaatcatttatcctggtttttcctcagtttccttttctgtaaaatgaggataatactgtaccctgtataaaa

SEQ ID NO: 323197 - DNA, 611 bp, Homo sapiens
gatgcctagttgtctctttatgttgattagtagtaattgttggtcactgcctagatacattctttctttctttcacttcctcccttcctttttttttttttttgagacggagtttcactcttgttgtgcaggctagagtgcagtggcgtcatctcagctcactgcaacctccacctcccgggttcaagagattctcctgactcagcctcccaagtasctgggattacaagcgcccgccaccacacccagctaatttttgtatttttagtagagatggggtttcaccatgttggccaggcttgtcttgaattcctgacctcaggtgatccaccctccttggccttccagagtgctgggattacatgggtgagccaccgtgcccagcccattatttctttaagagttataaagtgatatgattctaacttcctactttctttgttgactaggcatgtgtaattcttaagtgtttgatgccatattttagatattcttctctattttgtttttgtttctttccctgcttataaatatttaatgagtttcttataacttttgtatggttttccatcctgtagctttttgaccatttgttgatagaaacaaaactg

SEQ ID NO: 323198 - DNA, 611 bp, Homo sapiens
gatgcctagttgtctctttatgttgattagtagtaattgttggtcactgcctagatacattctttctttctttcacttcctcccttcctttttttttttttttgagacggagtttcactcttgttgtgcaggctagagtgcagtggcgtcatctcagctcactgcaacctccacctcccgggttcaagagattctcctgactcagcctcccaagtacctgggattacaagcgcccgccaccacacccagctaatttttgtatttttagtagagatggggtttcaccatgttggccaggcttgtcttgaattcctgacctcaggtgatccaccctccttggccttccagagtgctgggattacatgggtgagccaccgtgcccrgcccattatttctttaagagttataaagtgatatgattctaacttcctactttctttgttgactaggcatgtgtaattcttaagtgtttgatgccatattttagatattcttctctattttgtttttgtttctttccctgcttataaatatttaatgagtttcttataacttttgtatggttttccatcctgtagctttttgaccatttgttgatagaaacaaaactg

SEQ ID NO: 323199 - DNA, 611 bp, Homo sapiens
gatgcctagttgtctctttatgttgattagtagtaattgttggtcactgcctagatacattctttctttctttcacttcctcccttcctttttttttttttttgagacggagtttcactcttgttgtgcaggctagagtgcagtggcgtcatctcagctcactgcaacctccacctcccgggttcaagagattctcctgactcagcctcccaagtacctgggattacaagcgcccgccaccacacccagctaatttttgtatttttagtagagatggggtttcaccatgttggccaggcttgtcttgaattcctgacctcaggtgatccaccctccttggccttccagagtgctgggattacatgggtgagccaccgtgcccagcccattatttctttaagagttataaagtgrtatgattctaacttcctactttctttgttgactaggcatgtgtaattcttaagtgtttgatgccatattttagatattcttctctattttgtttttgtttctttccctgcttataaatatttaatgagtttcttataacttttgtatggttttccatcctgtagctttttgaccatttgttgatagaaacaaaactg

SEQ ID NO: 323200 - DNA, 597 bp, Homo sapiens
tgatactgcaagtggccccttgttgaaccaatgctatagcttgcttctcaaggttgtttcctccttgagtttttctactgaacctgtaatcagttttaacctgtctactaaaacaaagatggattctaaaccctgttgttcaaacctgagtgacatatttatcttcagtttctctaatatgctaattttttcttgtctcaagctctttgcatatactttctcccttgaatgggctgaacgkctttggaatccttcttatatctctgttcttgacataaatgttagctgaccagagattcagagacacttttcctggttaatcaatctaatttagacgctcacccattttcttctattaaaccatctgccttttaatagtagttaacataaactataatttataagcctaatgatatatcataagatagcagatattttatatcatatatgccttgttatatatatataaatatgtgtaagctagatatgtgtatatatgtgtgtgtgtatatatatgtatcttatatattataagttcatccattaagttgtgaggcacttactgagcactgtatacctagtaccttcgagaacacg

SEQ ID NO: 323201 - DNA, 503 bp, Homo sapiens
ataaagaaaactgaataataattttggatacttaaatatgtatcaaatattttctagtcaaaatcctctcacaagtcttgctgtcctcaaaacccaaaatcattttgtactgtttgaaactcagcttggctttgctaatcaaattatacataagtgataaattcctcatattaatgattacattcctcatgacatgtttttttgaatagctttatattttaattaggactaagacatatctggtgtaattgataagaaatcctttctctagctgtttgtacagaaaatacaaaattaagaatataattttttttgttttaatttgcagttaaacccctgacatgttatatattttttcatatagtttatagagtgaaaaaatgctactgagatggttaggaatctaaaggaaaatttcacaagaaatttaggttasggaaataattgttttgttttatcccatctaccattactagtttttgaatttttgaattatttatgtt

SEQ ID NO: 323202 - DNA, 640 bp, Homo sapiens
aatttctcaggctatatttttgtgagccagaattttgtctccagaatttaggaacttaataagtatgcagtgagtaagcagacattcatcatagaaccaactgaaagagagaaagggattcacttcagagcagatcctggcataaatgatgttacttgcaattaagtaagccaagagaagaaatataacttagaaatagctaaataggtaggcaggtaggtaaataccttgataccattttaagggtaaaagttgacattaaaatatgttgagaataatggtagaagtaatagcaactttaaggaggctacagataaaaacataaagcaggttaaaagacaaattaaatcaaaataaaatttaaaagctacagagttcaagttatacaaggcaacagtaaaatacattacacaagtaagcaaaaaagctgaagaggcaacattggccaggcacggtggcttacgcctgtaatcctaacactttgggaggcygaggagggtagatcacctgaggtcaggagttcgagaccagcctggccaacatggtgaaaccccgtctctactaaatatataaaaattagctgggcatggtggctcacacctgtaatcccagctactcaggaagttgaggcagcagaatc

SEQ ID NO: 323203 - DNA, 605 bp, Homo sapiens
tgagccccaggtggaggcacacacctgggaccctgagcagcctgagggcttcctcagagccaagtgtcagggtggagtgaggagctgtgaagccccttcacatctggccttgaagacagggccctctagaatggctggctcgctttctctcacccaaggctccaaggggctagtcttgtccgctgatgcctacagatatgaaaagatacactctttccaggtgattacattccagcccaaatatctggaaatcaggagaaacctcttctgatctgcagcccctcagttttcaatgacagagtttactaaccaaaatccaaaattatggatagagctgaatgtttacagttctagagttacatttttcttcccagatggttagtacaatatagtgtactcttaggagagctgcttagcctcagtttttttttttcatatgcaacaggaataagaatctctgtcccatattttcttatttataggaggctgtatcacacatatacatgaaacacatgmaacaaagcaattaatgaagttcactcagctgaggtaaatgctgcatacaattcttggcttaaccaaaggaagcaaagattacaataagc

SEQ ID NO: 323204 - DNA, 574 bp, Homo sapiens
tattctatattgattgtagagagattagttaatatagtaaagaactgaaaacaatgaattaaagacaaattgaggaggttgggcagtttgataaagttgtaaggaagaagctgaacatgtaggcttgcaagaaggatggaattcagtcagtgctgacaagcgggaaggatgctgtctacatggacagaagatgtttcctgcatcgctgcagagttttgttcaaggatggatatgtaacctaactgggcagaaaaaataatgcaaaacaagtggttctgaccttcagaaaataacccagagtaatgaagggtagacaaaaacataaatatattttaattagaattagcaagtattgaaataaagatataagttaagtacttgggaacagaggaraggggttgtttactcagtttgtgggcatcctggaagacttcaaatgagtgataatatttgagctggatgagtaggaattatttacttagaaaggagaaaatgatagaacagaaacacccatgtaaacgtatgaaagaatgttatgtcagtaaacgtttaaaattttggtatgaatggagaa

SEQ ID NO: 323205 - DNA, 577 bp, Homo sapiens
aatcaatgaatgagctgggacaattgtttgtttactcttaaaaataaagaaatgaattttgtaccctatacaaaaatttctagtagatcatagacttaaatgcgaaaagcaaaatttttaccttataagagtgaagaaaaatattttaatggccttactgtaggaaaatattttttacataagacaaaawaagcttgcaacagctttgaaactaaggacatttgttcatgcaaagtcactgtaaaaagaacaaaaagacaagttacaaatatgacaaaggattaatatccttcaaatataaagaactccaacaattcagtaagaaaatcatattctaagagaaaatggatatttcacagaaaagaaaacataccaataaacataaaattcttcttagtatctaggatatttagtgaaaaaaaatcaaaattacttttggattctacttttcatctgaaagatttacatacatttaaaaaaatgtataacagtagcaaccactgatgaagatgtagaacaaaaagaactcttatacatctaggtgggagtaaaaattagtagcactctttggtaactt

SEQ ID NO: 323206 - DNA, 569 bp, Homo sapiens
ctagtggcctctctcaacacacccctaaagcagttttgtaacattgtgcctctagtgagacattttcccatgaaccacttctastggcaccctagagggttagcaagttccacctgtgatgcctcatggcaacctctctaccattcagtgagccacggtcaaaccgtgtccaacaaggtctagagctcagccctgggaagggtgagctcttttctctaagcacattatttcagccctaggtaggcatgactgctccttatatctgctattcatatattatttggagatgtctttatttcttactatacaatcgtcattaagcaatcccttgttacagttaacattaaatttcccctgtccaaattacgatgccagtttctcttttttgattggaccctgactgacaaagaatgatgccaatagcatgatccgtaagagaaaaaaaaagataaattggatttcatcaaaattaaaaacttatggtctgcaaaaaagaaatattagtccaggagaaaattttttaattcacatatctggaaaagatgttatatctagaatatataaaaagt

SEQ ID NO: 323207 - DNA, 509 bp, Homo sapiens
ttggcctgaacttcagtgaccatgggcaaggatgacttagrgaatggttgcctctaaaccttttctgtaaaaggccagatggaaacattttggtctttgcagaccatacactttctgtcagagttactgattctgccattgtagtgcaaaagcagccttagatcatacataaatgagtggtcatggccagtgttccaaaaaaactttgtttagaaaaacagtgtattagatttgacccatgggtcaccctttactgactcctgatttagagaattgagtgatccacacccttagtaggagtcaaccatgtgaatgtcctagcccatgagtttttacagtcatactcagaattcataaacaaaagagcccagactgatagactcaatggctctacatactcactcttgcaaatcacacttagttcattggactcagttctgtcctccttacttcaaagaaagttaatacaattattgaaggtcagaaaaaaacacccaggacggtgaatg

SEQ ID NO: 323208 - DNA, 333 bp, Homo sapiens
tttttgttcattgaagctagatgctctgtaaataagagatcattaacacatcataacatgtgttaattacacatgctaaattatggatcagttcygagaagaaaaatttccacaaaagttacataagtaaagataaatttctcaagtgtatcctggatgaaattacacggaaagatatgcatttcctgcctgaatattgaaccaaattaacttagagctctagactcctctaaagctttcagtagaaaaaaaaaaacaatacttctagacttttatactttcaagtataaaaatattaactttatactttatgtttttatctgaaataatgta

SEQ ID NO: 323209 - DNA, 600 bp, Homo sapiens
tctttgttgaacttttgctagaatttaatgaatcaattcatgtaaaacatcagaatgcctaacttgtactatgtgctacaaatgtgtaagctattgttactattataagaatgtgcaatgcaaatgaaatttctttagttgttaaaatcaagccagttttcctcaagagcttccacaatgctatattggaagaggatgggtggacgtatttgaaaattgaacttacatatttacatcgtcacactctttcctgrttgaatagtcccttttggatatatttttttttaactatttgaaacagggataaaattatatgtctcgttcctttcttgtgcttgatctacctcttccttttccctgccatgtacttcaatgaggattacaattgttgataagatttcttctaatcttgcagtaaaggcaaaaatggaaacacaactcttatcaggaaaaggaggaagcatgccagggttttatattgaatctaataagctacacacagacacacagacacacacacacacacatacacttgggtaaagccttcattaaattaccatacaccacagagattctaaataactgtatatgtgactttca

SEQ ID NO: 323210 - DNA, 411 bp, Homo sapiens
cagttaaccaccagaatcattaaagatattaataataaatgatagagttttttcactaccaagtttgagttggtttgtctgcatacacagataactggaacaatcataaatagcttaatatttggaggtatctaaattagagatttacaaactatggccaaagtaggcttgctgcctgttttggtaaagaaactttgattggaatacagccatgctcattcatttacatgttgccaatggttgctktcatgcaagtgtcagaattgaatagttatgacagaggctaaaatacttactacatgatcccttgcagaaaaaataattgctaaacactacgtaatagccaactggatgacttctctttttctacttttgacagtggatatttaccatgctggaacctaaagtact

SEQ ID NO: 323211 - DNA, 515 bp, Homo sapiens
actagttatgccaaccatacaaagtaaatattgacttagtaagaactgacaaaaaaaatatggaaaaagtgatttgggtttatccacacacacacacaaaaaatggaaaaagtgattttgtttagtccaaatctgaggttcagcacatcttctaggtattactttactctagtctttctaaagaaatactcaaaagaggcctccaaaaatatatgttatattcttctttttcttaaggccrtagaacttgtagattttcagagcactttgatgcttcatttagacaaagattagctaaaatgaaatcttacagacttcattgtttccatatgctcatgaactctctcttctttactttggctgagtactctgtttctccaggattagagcataatagtaagtagatgtatttgttagtttcatgtaactctggctgctgtatacatcaatcaaaagatgcatagtggctctaacaaattagatacttaagttttgctcatgtaatatccaaaata

SEQ ID NO: 323212 - DNA, 612 bp, Homo sapiens
cgttctgcaattttggttatataaaagttgctgggcatggtggctcacatctgtaatcctagcactttgggaggctgaggcaggcagatcacaaggtcaggagtttgagaccagcctggccaatacagtgaaaccccgtctctactaaaaatacaataattagctgggtgtggtggcagatgcctgtagtcccagctactcgggaggctgaggcaggagaaatgcttgaacccaggaggcggagttgctgtgatgagccaagatcgtgccattgcactctagcctgggtgacagagtgagactcttgctcaaaaaaaaaaagttaaaacaaaagcaatgctttctgtgggtccaccaaatatttttctaagtctgggaggaaagcattatttaagaagttggatgatttccccagattttgcatataaaatgtcccacttcagagwtctgtttggtcacaggggtgccctgagatggggtcagtttgctcaacttttcctattaaaaacatttttttcttttttctccaaaaccataattttcataaaagcacagtttattcacaattttcatccatatctagaatttcagccagggcaccgaattgattta

SEQ ID NO: 323213 - DNA, 606 bp, Homo sapiens
tgctgtggtaggagttactaagaaattattttaggcagagaggaaaatgggtccttgggaagttttcgtttttaaagacatttcttgtttagctggaaagccccagcttagagcctggtggcaatctttgatatacaaatgcaggcaattagaaactgggtccacccaaacaaggcaattcccgtggccttcttgtccttgccccacgtgtgcctggcaacacagccgcccccacatatccccacgtgtgtagaacatcactgcaccccgcatttgcattagaaggctagggtgggagggccagcttttttcgcaggctacatgaataacatgcctggttaaaccartcccacaagccctgtgccaagcagacaccgcttcctccagcctctatatatacctggctggtttccgttcaatttggggtctcctcttttgcctttggagacccactccctctatcgctgtacgggacagcttcttccttctgccgtcttccttctttcttgcctattaaactctccactccttaaaatcactacatgtgtgtccatgtctttttatctaaactagcatgaggaccaagaaccctggtgttcctctact

SEQ ID NO: 323214 - DNA, 635 bp, Homo sapiens
tgttctaaaatttttatgtgatgcagggagcagttatatacataatatatctaggtcaaaacttttatcagccaaatagaaccagccaaatatcattcatcataatttcctcatgcacaacaaagaacagaatataatattttgttacttttatgtcattcctaatgtgaaatttatcatcactgattcacatacaaagatcctagaaccacaatattcaaataaggtttagctttttcccccacttctgaatttcccttctctttttcaatctctaaagatctgctaccagcacactctgctagcacttatcacacatcttgagaagggaacacttgataaaatctckttctttgaccaatctgaagcatgtcatgagccagtgctaagaaaagaaaaagcactccaggcacaaatggtttcacaatggtgcttcaactcctgtgccaagacgtatgcagtgggtcttttatcatgacagttattgttccagtgatgctttgttagggagaatgggtaggaaaagaaagaccccaggagttagcacaatttccacattgataagaggggcatttgtacaccactgcagcagatctataagagctgatggaaatgtgcccttttcaaataacttt

SEQ ID NO: 323215 - DNA, 582 bp, Homo sapiens
ttctcatttgttcactattgtcataatttggcttctatctaaatgaatttttttaaaaatgtgcacctagatttgtctggcactgggcctgaggtaaasagctggttcaggagggtaatgtgcaggaaataaaagaatccagatttgtgaccttaaaattgactgaccttcctatgagtctttgtttccaggtgtatttgttttcaatcactggccatcattttccatcagatatcttctttatcattagaaaattatctttattactctaagtccctgaacaaataatgtgcattccaataaacacttacagtcaattatgaatcaagagcaaataaaagttcctttgcattcatagaccttcttagcaatacattcaaaagtattttacttttggtacctttaagtctgatgagtacaacatccctggtttacaatttcaaaattaaaagagaaaaagggaaactggatacaaagaagactgagtcatgagtgaaaagtgcaaatttaaattgtaattagtagctttatctgatgaatacatttgcaattcagtgagacgtgataaagagaattatgtaa

SEQ ID NO: 323216 - DNA, 588 bp, Homo sapiens
atcaaaagtaaagaaagatcagggaatgaccttgtacagaacttattcagacaaatctgaatttgtcatttcatagaagaacaaacaacacaagttagttacactkgcctagttactttgagtataatttttaaaattttgccattaatttttctaaataaaaaacttggtatttaaaaacacttgctagattagacaattattctggctatctttggaaatgctctatgaaatattctgtgacaaatagtaaccactcttatcagcaatttagagtgctcaatatattttttaaaaatattacttttacctgtaaacttttatacaagtaaattcaccaacctaacactcttcattagatcacaagaactaaaattgttctttaacgttaggaagtgtgtttttgccttgagatagatgaactaggcattctttctatgaatagtcagtggctgatcactgaatacaattttctgctcagcactctagcagactggcataattagagagagaaaaaggcaacacaaaaacccaagatcataaagttagtgaataggagctaaccccatggtttagatgtatgtgtta

SEQ ID NO: 323217 - DNA, 591 bp, Homo sapiens
agcctagatgcctcaggtttatactgcaatacaaatagaataagggtctacgaaatgggtgtcttttctcatagagagttttgtgtaaattcagtttaaagagaatttggctcaaaatatctgatgagtgtgctggaactcttagcctctcaacctatataacttgcttttttgtttgtttttttgttttgttttgttttttcctgatataggtcctcatggattaggaaagcaatgtctttcctaatgtccatcgcttccttcttttggctttagaatatctgcaccaactttacagactttactatctcttctgcccttttgaaattttctctagctccagcttggaagggtgcttcatcatctcaacaccatttccactgttaggtaagttctggcatgtttatrttatcttcaaaagacaaatccaaagtttgttaccactcaacttctgaaaggacagatcctggaagactgccacccttcaaagttgtaaaagaaaataaaatttaaggaccctctaaatttattatgccaaggggtggggtgggggtgttaagcactggtgtctgagtcacataacatgtttgc

SEQ ID NO: 323218 - DNA, 540 bp, Homo sapiens
cagtccttggaagagctgatatgtgtccattgtgtaataaggatgttacattgtgtaataaggttgtcgtaatctattctattcattcactgtttattttctgttttcatcagtcatatccagaagatcctctttcagttaagacactatcattggtgatgatatgaacgtttccttaccattgccattcacatggactggaaaacaattgaggtgtaacagtctctgtgttctagaaagtgatttattagaggtatatccatgaatcacagaggaatattttctctgtagatttcgaaaaccagtggtcttatatttaaaatgtcagcttggggaaacctcactagcttcccctattatgaataagctggtcrttggcaggagctatcccaaggggccattcagaggccattatttcaccgtgaagcctctgttaaaaagagtaattggtatcaataacacttacctgtgtttgcagagggaaggttacccagccataacaagcccagtatcacacagccactacttaaaacaatgcag

SEQ ID NO: 323219 - DNA, 532 bp, Homo sapiens
gtaatattaaaaaataccaaatataatgctatcattgtttcacaaatagtcatctcgattgcaaatactcctgattttcaaaatattagactattcattgaattacaaagtatggtccagtttcaaaatatcatttccaatcttgtttaattctttaatatctttaagcagtttaaaataaattctatatccctagtgccttctttttgataaatagtagagcatatttcctactttcaacctcttaacagttgcctggtgttctttccatctccactctaagttaaaamatagttataaatccttttaataggtgtactgtagccttgattttacattctaaccaaggtgttttatgacatgtctgggaatacacacttttacaaattccttgccaaatattaattagtaattttatagcagcatttcccttgaaaggtgtattccccagggaatacaacattaaaaagaaatattaaggggaccctgtcatcatattctgggttttaactctgcaacaaggactaaaaca

SEQ ID NO: 323220 - DNA, 518 bp, Homo sapiens
gtgtgttggggtggcatgagtactggagcaacctggccgctagagtagggcaacactcctctgttacagagtgcagcatcatgcccatgtctctacagtgagggtcatggtatttttctgctcacaagtagagagctcttgagcaaaaaaaaattcttttgtcacaagaagcactttcccatgttgcatttaactttctcctaggggcagcatgccatgaaggctagtcttctaggaattctgttgctccccaggatcccaccagtaatctgtggttgtcacagtttctgtaagttctgagaaatgttttcaggagatctagctatttggaaacacaaggtctgagatcccctrggcaggatagtggccccaacaagtgcacaaccaatattgtacccattgccttagttctggttttaagtgaaggtgagcaaatcggttgagctgacagcctggtgccctgctctcaatatatccccaaatcattgctaacaatagtgcctgcgcttgcgaggtta

SEQ ID NO: 323221 - DNA, 607 bp, Homo sapiens
cctcatttataatgtctagtctgttgcttaagctttttgtttgttttttgcaaacaatctatagaggtggcaattttcaatctgcttagtcttttataagccttgtataccaattgaagactaatcccattgttttgtagggtttttgatccccatttttctaatagcctcagaaataaacaattgtattctctagggtacatctgttattcatattcaccacaatgaaaagaaacctggtaatgaaaccatcaatcaataaattcccacttttcctctacacctctgtagtctcttctcttcacccttccttcactctagatcataagtgagagctagatcataaagamcaaaacactgcaaaaaaaaaaaagcataaaatgaaaagcacaaaaacaagacaaatctattttaatgggcaagaggtgatagtgtgtgaaggctagagacactaataaatgtatcatgctaaggaatataatcttatctaccagtttatgagcatctgctataatatcttctgtataaacatactcttctccagtctatatgacaattcggtaaattgtctattattatgtctacctcaaagattaagaaattgaat

SEQ ID NO: 323222 - DNA, 458 bp, Homo sapiens
ctgtagtctcttctcttcacccttccttcactctagatcataagtgagagctagatcataaagaccaaaacactgcaaaaaaaaaaaagcataaaatgaaaagcacaaaaacaagacaaatctattttaatgggcaagaggtgatagtgtgtgaaggctagagacactaataaatgtatcatgctaaggaatataatcttatctaccagtttatgagcatctgctataatatcttctgtataaacatactcttctccagtctatatgacaattcggtaaawtgtctattattatgtctacctcaaagattaagaaattgaattctattgaagtgacaaatctagatttattcttaattctcattgcttcaccaaactacaatctttctactatgccacatgtaacctttatgtgctaatgagttttgaatttcaccctaaagtcagaagaagatttta

SEQ ID NO: 323223 - DNA, 524 bp, Homo sapiens
taattacagaaaggtttataacttctaaaaagaaaaaagtaattgtcttgtatgttaggctcagccagaatttagaccataaacgcgtatcttcgaaaacatcactacactgctaaaggccacatttaaagacrtggataatcataattatgaattattataccagagcatattatgcaataatgaagatatttgcagcttattcctgtaaccctggctactgaggagactgacacaggaagatcacttaaggcaggagttcaagactagcctggacaacacagtgaagcccagtcactaaaaatataagaggaaatctaaaaattaggtgggcatagtggctaaatcccatctacttgagaagctgagacaggaagatcccttgagcctgagtggtaaaggctgcagtgagctatgatcacaccactgcacagcagcctaggcaacagagcaaagccctgtctcaaaaaacaaattactttctattttatttagaaaaatagaaataaagagatcagtgcctt

SEQ ID NO: 323224 - DNA, 524 bp, Homo sapiens
taattacagaaaggtttataacttctaaaaagaaaaaagtaattgtcttgtatgttaggctcagccagaatttagaccataaacgcgtatcttcgaaaacatcactacactgctaaaggccacatttaaagacatggataatcataattatgaattattataccagagcatattatgcaataatgaagatatttgcagcttattcctgtaaccctggctactgaggagactgacacaggaagatcacttaaggcaggagttcaagactagcctggacaacacagtgaagcccagtcactaaaaatataagaggaaatytaaaaattaggtgggcatagtggctaaatcccatctacttgagaagctgagacaggaagatcccttgagcctgagtggtaaaggctgcagtgagctatgatcacaccactgcacagcagcctaggcaacagagcaaagccctgtctcaaaaaacaaattactttctattttatttagaaaaatagaaataaagagatcagtgcctt

SEQ ID NO: 323225 - DNA, 543 bp, Homo sapiens
gcttgtcttgtatacttcagccacatctatatttgaytatctcatacttgcataatgtatacatgaatggagtagcactggtgttaggaggggtgttttgtatggactcataattacgacctcactctctcaccacaacactaatgatgctgccttatagtagcggagactaaagtttttccactagttttctagtgttgacttttatagaaattgtgactagaaaccattcgtattacagagaggactttacatatggtatgaactcatctgagcagtggcaagacacagcccatttattaaaggcaggatacttggcagactgtttaaaattactaggcgtgccatggctgtgattgccaagttctgttgttgtttgtttgtttgtgcaacctcagactcatgctaacattaatactcacaagtgtgtaccagtgtcttttaatactttgccccatacttgctctgaagctgtgggaactcactttgccagcacagaaatgtcttctggaagtgtggaagacttggctctcctagggggca

SEQ ID NO: 323226 - DNA, 543 bp, Homo sapiens
gcttgtcttgtatacttcagccacatctatatttgattatctcatacttgcataatgtatacatgaatggagtagcactggtgttaggagrggtgttttgtatggactcataattacgacctcactctctcaccacaacactaatgatgctgccttatagtagcggagactaaagtttttccactagttttctagtgttgacttttatagaaattgtgactagaaaccattcgtattacagagaggactttacatatggtatgaactcatctgagcagtggcaagacacagcccatttattaaaggcaggatacttggcagactgtttaaaattactaggcgtgccatggctgtgattgccaagttctgttgttgtttgtttgtttgtgcaacctcagactcatgctaacattaatactcacaagtgtgtaccagtgtcttttaatactttgccccatacttgctctgaagctgtgggaactcactttgccagcacagaaatgtcttctggaagtgtggaagacttggctctcctagggggca

SEQ ID NO: 323227 - DNA, 543 bp, Homo sapiens
gcttgtcttgtatacttcagccacatctatatttgattatctcatacttgcataatgtatacatgaatggagtagcactggtgttaggaggggtgttttgtatggactcataattacgacctcactctctcaccacaacactaatgatgctgccttatagtagcrgagactaaagtttttccactagttttctagtgttgacttttatagaaattgtgactagaaaccattcgtattacagagaggactttacatatggtatgaactcatctgagcagtggcaagacacagcccatttattaaaggcaggatacttggcagactgtttaaaattactaggcgtgccatggctgtgattgccaagttctgttgttgtttgtttgtttgtgcaacctcagactcatgctaacattaatactcacaagtgtgtaccagtgtcttttaatactttgccccatacttgctctgaagctgtgggaactcactttgccagcacagaaatgtcttctggaagtgtggaagacttggctctcctagggggca

SEQ ID NO: 323228 - DNA, 543 bp, Homo sapiens
gcttgtcttgtatacttcagccacatctatatttgattatctcatacttgcataatgtatacatgaatggagtagcactggtgttaggaggggtgttttgtatggactcataattacgacctcactctctcaccacaacactaatgatgctgccttatagtagcggagactaaagtttttccactagttttctagtgttgasttttatagaaattgtgactagaaaccattcgtattacagagaggactttacatatggtatgaactcatctgagcagtggcaagacacagcccatttattaaaggcaggatacttggcagactgtttaaaattactaggcgtgccatggctgtgattgccaagttctgttgttgtttgtttgtttgtgcaacctcagactcatgctaacattaatactcacaagtgtgtaccagtgtcttttaatactttgccccatacttgctctgaagctgtgggaactcactttgccagcacagaaatgtcttctggaagtgtggaagacttggctctcctagggggca

SEQ ID NO: 323229 - DNA, 617 bp, Homo sapiens
attataaaattatttcgttgtgttttagatatgacttagaagagctaaatataattaaaatgttatgatcagttactatagattcatttaatttaaagaagtacaatgtttttttagcttaaaaaatcaggaaaaattaacacaaaatatggtgatggraaaattttttgtgataactttacttaatggtatttcctctaactttgggcattgatgattagagagagatttgaacatttggctgtttataaaactgcaattaaactgcttcaaaaatatacaatgatcatatagaaaattttttttgaaaatataactttcgcaaccaacttcttagcgcagacataaattatatatatattcttaaaattataaacataataataaatgatataatctgcttaaaatgtagtataccaaaagtaatatgtcatatcttcaatataatcaaagtgctcaactctgagctatcaatttgagatactccaaaaagaaaatgattgggcccaaatttattacgattacctaatgatctcaattctaatcaattactgaagtgcatatctgcttaaaacatatattttgtatactttatttaatgtaacttaaatttattt

SEQ ID NO: 323230 - DNA, 617 bp, Homo sapiens
attataaaattatttcgttgtgttttagatatgacttagaagagctaaatataattaaaatgttatgatcagttactatagattcatttaatttaaagaagtacaatgtttttttagcttaaaaaatcaggaaaaattaacacaaaatatggtgatgggaaaattttttgtgataactttacttaatgrtatttcctctaactttgggcattgatgattagagagagatttgaacatttggctgtttataaaactgcaattaaactgcttcaaaaatatacaatgatcatatagaaaattttttttgaaaatataactttcgcaaccaacttcttagcgcagacataaattatatatatattcttaaaattataaacataataataaatgatataatctgcttaaaatgtagtataccaaaagtaatatgtcatatcttcaatataatcaaagtgctcaactctgagctatcaatttgagatactccaaaaagaaaatgattgggcccaaatttattacgattacctaatgatctcaattctaatcaattactgaagtgcatatctgcttaaaacatatattttgtatactttatttaatgtaacttaaatttattt

SEQ ID NO: 323231 - DNA, 617 bp, Homo sapiens
attataaaattatttcgttgtgttttagatatgacttagaagagctaaatataattaaaatgttatgatcagttactatagattcatttaatttaaagaagtacaatgtttttttagcttaaaaaatcaggaaaaattaacacaaaatatggtgatgggaaaattttttgtgataactttacttaatggtatttcctctaactttgggcattgatgattagagagagatttgaacatttggctgtttataaaactgcaattaaactgcttcaaaaatatacaatgatcatatagaaaattttttttgaaaatataactttcgcaaccaacttcttagcgcagacataaattatatatatattcttaaaattataaacataataataaatgatataatctgcttaaaatgtagtataccaaaagtaatatgtcatatcttcaatataatcaaagtgctcaactctgagctatcaatttgagatackccaaaaagaaaatgattgggcccaaatttattacgattacctaatgatctcaattctaatcaattactgaagtgcatatctgcttaaaacatatattttgtatactttatttaatgtaacttaaatttattt

SEQ ID NO: 323232 - DNA, 617 bp, Homo sapiens
attataaaattatttcgttgtgttttagatatgacttagaagagctaaatataattaaaatgttatgatcagttactatagattcatttaatttaaagaagtacaatgtttttttagcttaaaaaatcaggaaaaattaacacaaaatatggtgatgggaaaattttttgtgataactttacttaatggtatttcctctaactttgggcattgatgattagagagagatttgaacatttggctgtttataaaactgcaattaaactgcttcaaaaatatacaatgatcatatagaaaattttttttgaaaatataactttcgcaaccaacttcttagcgcagacataaattatatatatattcttaaaattataaacataataataaatgatataatctgcttaaaatgtagtataccaaaagtaatatgtcatatcttcaatataatcaaagtgctcaactctgagctatcaatttgagatactccaaaaagaaaatgattgggcccaaatttattacgattacctaatsatctcaattctaatcaattactgaagtgcatatctgcttaaaacatatattttgtatactttatttaatgtaacttaaatttattt

SEQ ID NO: 323233 - DNA, 503 bp, Homo sapiens
tggctgtttataaaactgcaattaaactgcttcaaaaatatacaatgatcatatagaaaattttttttgaaaatataactttcgcaaccaacttcttagcgcagacataaattatatatatattcttaaaattataaacataataataaatgatataatctgcttaaaatgtagtataccaaaagtaatatgtcatatcttcaatataatcaaagtgctcaactctgagctatcaatttgagatactccaaaaagaaaatgattgggcccaaatttattacgattacctaatgatctcaattctaatcaattactgaagtgcatatctgcttaaaacatatattttgtatactttatttaatgtaacttaaatttattttgktctattgatctttgttataaaaattaaatcaacaaattgctggctgtttgaagatgtattataaatcaaataaatctggttgtaatggactgaatgtttgtgccccttcaagattcatatg

SEQ ID NO: 323234 - DNA, 632 bp, Homo sapiens
ggacaggattatgactctgataaagaatgatgatgcacagaagctcccctgaacattttggagccaattaaaacttccccacagtagtctcaagtaaaatttgcagtgcggaacaagctaattgactttgtagttaatattgaagtgacttattcagtctttaacactccagatgmacagggtactaagatgactatgtctttgacaaggattgtaggtaaaatgcagcaaaaacatatcttacaacccttggaatgtcttctgggggacttgtaattaggacagtttcctttatgtaccagaatgtccaattcttttcttggaatgtgacttgccttgtaaaataaatgctcaagtaacttcttctccagagaaacagcaattactcttacaggtcccactggaacaggcactgtggctgcagatgattctcacttgtcctgaggataaaaaggaaaaaaattcttctcctcagaaaattatgaacaagtgagtaattgcatatagccatatgggactccaggcaaaattagaaatttacagacggtgcgtatggagaccaaagaagggacaaaaataccccataaaagcaatattcactaaatagagaagctttaaaggtaattcagcct

SEQ ID NO: 323235 - DNA, 563 bp, Homo sapiens
tctttttcatctggtctgtaaacgagttaatgtcactcccaccataagttatgccacacatgatggcataggatgtctaacagcagtgcaaatacaggtaatggatcaagcaccactgtgcatcaagagacacaatagcagcacactccaaactatcacccataatatggaatgacttcctcatcaacaatttaaccaaaccttycaactgattgacaatgtgtggctaaagtggcagagtagctctcatctacctggtggggcctatcattcccccctgggattggttatgggtctgcagcatgcatgattggccttaccctaaaactgaacttccagatgcacctggggttgaccctacctaccaagatgcattcttcctcatttagacactctccctagcatctggcaagtataaaggccaggcaccacagaaatgggcatcctggtggatttatccactagccgtattttctccctggggcgaccatggatgtagaattacaggtggaggccctggctaagcagatggctgctttctttaataacacctgccaaaacat

SEQ ID NO: 323236 - DNA, 566 bp, Homo sapiens
taagaactttttagattaagtatatatttataaatattaaaaaagcaacataagaaataaaagcactcttgctaatttctcttctgaaaaatttatatttaaaagaatttcttcaaaacatattaamtgatttattgttaacttttttttttaattttcaaagagaatatacttatttagcacaggtagacatgaatactgtctagaaattttatctcgttagaaagatttcagtaattagcatttgagaagcaagatgtatgcctaaatagagaaagtatctttacttaaatttgtttgtaataattaatatgttgaataatttacctgagggtaattttgtagctattataaaaatatatagaggttatatgggactgaaaccacacctagttgaatgttattcattacaaatttttatttaaatgtctgttgatcacagcatacaatgtccttttttctctatattctcctgatagaagattcattattcatttactcagccatttattaaacaaagtgtattaaaatccactgagaaagcattgcaagggatatgaatatta

SEQ ID NO: 323237 - DNA, 662 bp, Homo sapiens
tatattacacttatattcaatttttatatgtcatagtgcagtggtgcgatcttggctcacggcaccctccacctcccaggttcaagtgattatcctgcctcagcctcctgagtagctgggacyacaggcatgtgccaccacacccagtcaatttttgtatttttagtagagacggtgttttaccatgttggccaagctggtctcgaactcctgacctcaggtgatccacctgccttggcctcccaaagtgctgggattataggagtgagccactgcacccagccaagaaatatatattttttaaacatattgtgactccaaaatttactacagtccagaatattattttaatcttaattctgtgtctgcctttaataagatggcaggttaacgagaagcaaagaccgtctttcatcctaaattgctccaataccactgagtaagacattttaactggaaacccctactctaattcaaatttctgtcttctacctcttaactcatagtaatgagaaacacagtaccttacctggggtgaaggatgtactctgatccaactactatgttaacaccttcttaggatatattttccacattttttcctttgggtaaccattttctattcacttctaatatggttcggctctgtgtctccactcaaa

SEQ ID NO: 323238 - DNA, 662 bp, Homo sapiens
tatattacacttatattcaatttttatatgtcatagtgcagtggtgcgatcttggctcacggcaccctccacctcccaggttcaagtgattatcctgcctcagcctcctgagtagctgggaccacaggcatgtgccaccacacccagtcaatttttgtatttttagtagagacggtgttttaccatgttggccaagctggtctcgaactcctgacctcaggtgatccacctgccttggcctcccaaagtgctgggattataggagtgagccactgcacccagccaagaaatatatattttttaaacatattgtgactccaaaatttactacagtccagaatattattttaatcttaattctgtgtctgcctttaataagatggcaggttaacgagaagcaaagaccgtctttcatcctaaattgctccaataccactgagtaagacattttaactggaaacccctactctaattcaaatttctgtcttctacctcttaactyatagtaatgagaaacacagtaccttacctggggtgaaggatgtactctgatccaactactatgttaacaccttcttaggatatattttccacattttttcctttgggtaaccattttctattcacttctaatatggttcggctctgtgtctccactcaaa

SEQ ID NO: 323239 - DNA, 621 bp, Homo sapiens
tgtacttatgtttagagtcggtgagttttgataaatgtgtatacccacatattgatatagatacagaccattttcatcacctacaaattttacttctgtttctatgttattaatcttcctacctcctttatagtccactgtgagtagtggctttttgtcattgcagtataggtttactaggatttccatatgggaatttctttccagagttttgcacacagacatatatacatacacatgcacacttatatatatatatatctatatgtatattcttatatgcatgtaacaaatayacatatattcttatatgcatataacatacatatatacatatgttttatgtatttgttttatatataaaacaaatcccaaatttcaataaaaaataaaactagacaagtcaggaaaggagaaagaatataattctgctgtgaaagttagtaattagtcaacatagatatattattagtggagtcaaatgatacgcaaaatgaaaataagaggcagaaatgccaagaggcagaatccaaagttaggctgacatttcagggatcaaagttagagcaggtgaaagagaagaagtcatgatgtaatcagtcagttttgcttgtagttttt

SEQ ID NO: 323240 - DNA, 621 bp, Homo sapiens
tgtacttatgtttagagtcggtgagttttgataaatgtgtatacccacatattgatatagatacagaccattttcatcacctacaaattttacttctgtttctatgttattaatcttcctacctcctttatagtccactgtgagtagtggctttttgtcattgcagtataggtttactaggatttccatatgggaatttctttccagagttttgcacacagacatatatacatacacatgcacacttatatatatatatatctatatgtatattcttatatgcatgtaacaaatatacatatattcttatatgcatataacatacatatatacatatgttttaygtatttgttttatatataaaacaaatcccaaatttcaataaaaaataaaactagacaagtcaggaaaggagaaagaatataattctgctgtgaaagttagtaattagtcaacatagatatattattagtggagtcaaatgatacgcaaaatgaaaataagaggcagaaatgccaagaggcagaatccaaagttaggctgacatttcagggatcaaagttagagcaggtgaaagagaagaagtcatgatgtaatcagtcagttttgcttgtagttttt

SEQ ID NO: 323241 - DNA, 572 bp, Homo sapiens
aaatgtggctataaggattttgatgctgactcctagccaccatttactctctccaacatgggagcagaccagtaacctgggccatgtctatccttggcaccgaataacaacaaaacctaactacaagatgattgattagtcatgcctttggaaaaagatctttatcaggtatcaaagaaaaaatgtgatacctgttaaaatggagtaacttgtgtttcaatttaaaaatgaagagaaaaaactatgacaaatagagttcaggaaggctatgaaaagagtgttctcaygcataaatgcctgataccaaaaactgtcacaacggacaaagaaacaaacttgcacaaatgctatcaccaccttgtacaaaaaatagttctgtgaggacatctgcctggtaactgcctgtctaaactaagactgacatcacccttgctatttatgcctataaccaagggtagttatctcaaaacaatgacttaatctttctcatttttttcttttaaagcctttgtctttatctcttggaatatacacacagttcactatggagcgaatattatcattgcaatgca

SEQ ID NO: 323242 - DNA, 572 bp, Homo sapiens
aaatgtggctataaggattttgatgctgactcctagccaccatttactctctccaacatgggagcagaccagtaacctgggccatgtctatccttggcaccgaataacaacaaaacctaactacaagatgattgattagtcatgcctttggaaaaagatctttatcaggtatcaaagaaaaaatgtgatacctgttaaaatggagtaacttgtgtttcaatttaaaaatgaagagaaaaaactatgacaaatagagttcaggaaggctatgaaaagagtgttctcacgcataaatgcctgataccaaaaactgtcacaacggacaaagaaacaaacttgcacaaatgctatcaccaccttgtacaaaaaayagttctgtgaggacatctgcctggtaactgcctgtctaaactaagactgacatcacccttgctatttatgcctataaccaagggtagttatctcaaaacaatgacttaatctttctcatttttttcttttaaagcctttgtctttatctcttggaatatacacacagttcactatggagcgaatattatcattgcaatgca

SEQ ID NO: 323243 - DNA, 614 bp, Homo sapiens
agccccaatactagtcaatgctttatctatgttttttccttaaggttatctgtaacaakgacatcttcctgcaaaaggcaattttttttataatttcaatttttttattttggattcagaggatacatgtcaagtttgttacatgggtatattgtatgatgcagaggtttgggatatgaatgatcctgtcacccagatattgagcatagctctcaacagttagtttttccacacttttcctccctcttttcctccccaccctagtaatccccagtatatatttttgtcgcctttatgttcatgagtacccaatatttagctcccacttataagtgaaaacaaatactatttggttttctgttcctctgttaattcactgaggataatggatggcctccagctgcatgtatactcttgcaaaggacaagtttttgttttcttactaccgcttactacttcttggtgtatatgtaccacatttctttatccagtatatcattgatgggtacctaggatgattccatatttttactattatgaatggtgctgggataaacatacaagtgcatgtgtcttttggcagaatgaactattttcttttagaaatataccca

SEQ ID NO: 323244 - DNA, 452 bp, Homo sapiens
atctttattataactcagcctacaattgaagtaaatgtgtaaatcaatttggaaaatattgacattggggagaaaatttactttttattttgaaatatcactttggctcagttttttaaaaaaatatgtaattgtatctctctctaatgtattattttctctataggtttactacacatatattttattattyttaaagacttacggccaaacatggagttttttttaggtttataaccttataagaacagaaactttgatggaatacaaattttccttctttacgatttaaccttaaataagcaaatgtgaaatagatagatcaatattattgtctttgcatataaaatagtctaaggaatccactattaagattaaaagacaagtttagtaatgttgtaggatatatatgaacaatacacaaaaacaacttgtatttctatatactagca

SEQ ID NO: 323245 - DNA, 452 bp, Homo sapiens
atctttattataactcagcctacaattgaagtaaatgtgtaaatcaatttggaaaatattgacattggggagaaaatttactttttattttgaaatatcactttggctcagttttttaaaaaaatatgtaattgtatctctctctaatgtattattttctctataggtttactacacatatattttattatttttaaagacttacggccaaacatggagttttttytaggtttataaccttataagaacagaaactttgatggaatacaaattttccttctttacgatttaaccttaaataagcaaatgtgaaatagatagatcaatattattgtctttgcatataaaatagtctaaggaatccactattaagattaaaagacaagtttagtaatgttgtaggatatatatgaacaatacacaaaaacaacttgtatttctatatactagca

SEQ ID NO: 323246 - DNA, 586 bp, Homo sapiens
ggatactgatacatttctattgtgtgtaagttacccaatctctttgtactgtttcgctgtagcagtacaaagggcaaaggcaatagattggtttcattttgctaaggttcttgtgggtctggaggtstggtgtgccttcagacagtctagaaaacatgggtggaaacctagcttttgaaaactaactctcccttttcactcttggtattctaaatatggaaattgctgtgacctattgtgttttgtaaattttagaaattaattactcttacttctaataggatatcttgtgctgcaaaatgtaagttatgactgaatccactggcaagagaaataaacaaggctactgctgaatcttgtacattgatgatgtaaaatacatagaaaatgacaaatccttacaaacttgagttatacaagtcaatgccagcagtctctcagctattatgtttcaagcacttcacctcgtctgtatttcacttggggttttaagtttgggtgcaggttttaaggtaaataaagcctgaattccaagctgcttctgtactcatgatgaccctgactttattagtaatgggatctaatg

SEQ ID NO: 323247 - DNA, 586 bp, Homo sapiens
ggatactgatacatttctattgtgtgtaagttacccaatctctttgtactgtttcgctgtagcagtacaaagggcaaaggcaatagattggtttcattttgctaaggttcttgtgggtctggaggtctggtgtgccttcagacagtctagaaaacatgggtggaaacctagcttttgaaaactaactctcccttttcactcttggtattctaaatatggaaattgctgtgacctattgtgttttgtaaattttagaaattaattwctcttacttctaataggatatcttgtgctgcaaaatgtaagttatgactgaatccactggcaagagaaataaacaaggctactgctgaatcttgtacattgatgatgtaaaatacatagaaaatgacaaatccttacaaacttgagttatacaagtcaatgccagcagtctctcagctattatgtttcaagcacttcacctcgtctgtatttcacttggggttttaagtttgggtgcaggttttaaggtaaataaagcctgaattccaagctgcttctgtactcatgatgaccctgactttattagtaatgggatctaatg

SEQ ID NO: 323248 - DNA, 615 bp, Homo sapiens
taacgctgttagattatatggggactacacaaaagcccaaggttggttcaggtcaagtctggccaccaactgacctttatctgcaattctgaaatccacagaaaactctgaaaactgaaagtgcacataagggattgtgaagctgtatttatactttccagaggatattttctctctaacacttttccccacctacatacaaaaatagaatgccattaagaatatcaataawctcctttaaaatacttctataggcatttttacttagttattaagaaggcagaatgtgagacatatttggatgtgttgctattagtaattaaataatagcagagtccagtagtttaataaataaatcttttcaagaaaaaaagatctatgaaaggagataattcgaagtgagaaaattaaaagtaatctggaaacttcctttattgtaagtttcaggtccaaataagattaaactggaggacttaatttatgttccagaaataatcaatggcccagttattcaggcatagagtttccaaactatgtgttatggaagctgttaagatatcgaattgggacatatttatattcattaattcttttcttaaatagaggaaagtagaa

SEQ ID NO: 323249 - DNA, 615 bp, Homo sapiens
taacgctgttagattatatggggactacacaaaagcccaaggttggttcaggtcaagtctggccaccaactgacctttatctgcaattctgaaatccacagaaaactctgaaaactgaaagtgcacataagggattgtgaagctgtatttatactttccagaggatattttctctctaacacttttccccacctacatacaaaaatagaatgccattaagaatatcaataatctcctttaaaatacttctataggcatttttacttagttattaagaaggcagaatgtgagacatatttggatgtgttgctattagtaattaaataatagcagagtccagtagtttaataaataaatcttttcaagaaaaaaagatctatgaaaggagataattygaagtgagaaaattaaaagtaatctggaaacttcctttattgtaagtttcaggtccaaataagattaaactggaggacttaatttatgttccagaaataatcaatggcccagttattcaggcatagagtttccaaactatgtgttatggaagctgttaagatatcgaattgggacatatttatattcattaattcttttcttaaatagaggaaagtagaa

SEQ ID NO: 323250 - DNA, 473 bp, Homo sapiens
cacagttctgcaggttacatagaaaatatagctgggaagtccttaagaaactttcaatcatggtggaaggtgaagaggaaggagtcacatcttacacggctggagcaggaggaagcrggggcggggggaggtgctacacacttttaaacaaccagatctcatgataactcactcactatcatgagagcagcaagggagaagtccacccccatgatccaatcacctctcaccaggcccctcctccaacactggggattacaattcagcatgagatttgggcagggacacaaatccaaaccatatcaatcagtactcttgtgatagtaaagccaggtaggactgggtctcaaaacaacctctggatgagtggaaaggcataaaaaggaggtagagtaagccatgaggagggggaaaaatatgatagatggtagggggcttttaatgggaggcttcaaaagactgtcgtattacaa

SEQ ID NO: 323251 - DNA, 473 bp, Homo sapiens
cacagttctgcaggttacatagaaaatatagctgggaagtccttaagaaactttcaatcatggtggaaggtgaagaggaaggagtcacatcttacacggctggagcaggaggaagcgggggcggggggaggtgctacacacttttaaacaaccagatctcatgataactcactcactatcatgagagcagcaagggagaagyccacccccatgatccaatcacctctcaccaggcccctcctccaacactggggattacaattcagcatgagatttgggcagggacacaaatccaaaccatatcaatcagtactcttgtgatagtaaagccaggtaggactgggtctcaaaacaacctctggatgagtggaaaggcataaaaaggaggtagagtaagccatgaggagggggaaaaatatgatagatggtagggggcttttaatgggaggcttcaaaagactgtcgtattacaa

SEQ ID NO: 323252 - DNA, 473 bp, Homo sapiens
cacagttctgcaggttacatagaaaatatagctgggaagtccttaagaaactttcaatcatggtggaaggtgaagaggaaggagtcacatcttacacggctggagcaggaggaagcgggggcggggggaggtgctacacacttttaaacaaccagatctcatgataactcactcactatcatgagagcagcaagggagaagtccacccccatgatccaatcacctctcaccaggcccctcctccaacactggggattacaattcagcatgagatttgggcagggacacaaatccaaaccatatcaatcagtactcttgtgatagtaaagccaggtaggactgggtctcaaaacaacctctggatgagtggaaaggcataaaaaggaggtagagtaagccatgaggagggggaaaaatatgatagrtggtagggggcttttaatgggaggcttcaaaagactgtcgtattacaa

SEQ ID NO: 323253 - DNA, 544 bp, Homo sapiens
actaactgcttcctccccctgcccctcagcactccagcttttgctgactccaaagtactgcactattctttgatgtaatactgcacttaaccccacccacatgattgtaaacaatccctttgttgaactctcttctctgatcctttttgagcattttgttttctgcttggtcactggggaaaacaataasacaccctaagttggctaacatcagaattgaaaacatttcttacttgaaaaaaacgtaatgtggtaaaaaatatttaagtaattcttatggtatcggattacttagtgatatggtttggctctgtatccccacccaaatctcatcttgaactgtaatccccacgtattgtgggaaggacttagtgggaggtgattggatcatggggacagtttctccatgctgttctcataatagtgaaggagttcgcaggagatctgatggttttaaagtgtggcactttcccttctttctctctcctgccaccttgtgaagatgtgccttgcttcccttcaccttcctccgtaattgcaagtt

SEQ ID NO: 323254 - DNA, 544 bp, Homo sapiens
actaactgcttcctccccctgcccctcagcactccagcttttgctgactccaaagtactgcactattctttgatgtaatactgcacttaaccccacccacatgattgtaaacaatccctttgttgaactctcttctctgatcctttttgagcattttgttttctgcttggtcactggggaaaacaataacacaccctaagttggctaacatcagaattgaaaacatttcttayttgaaaaaaacgtaatgtggtaaaaaatatttaagtaattcttatggtatcggattacttagtgatatggtttggctctgtatccccacccaaatctcatcttgaactgtaatccccacgtattgtgggaaggacttagtgggaggtgattggatcatggggacagtttctccatgctgttctcataatagtgaaggagttcgcaggagatctgatggttttaaagtgtggcactttcccttctttctctctcctgccaccttgtgaagatgtgccttgcttcccttcaccttcctccgtaattgcaagtt

SEQ ID NO: 323255 - DNA, 597 bp, Homo sapiens
cttgtcaaaaaaaacaaaaacatgcacactactgagaagtagtaggggaaaggcagccctggcccccagaagctggtgtagcacacacagttatgtcaagttattctcctgttaaacaatctcacagaatgccaacgtcaaacgagtttactctgagaccatgataaagtgaggtaaaacaagtccacttcataattttatccaaggaaagataaaaccaaggtcactatgctacccacaaaatgccagatattttgtctcttagccaaaatgtgtgactgctactttataattaatctaccatctctataaataagatatattaagatacccaattatagaattgcccccactttctgacagcrttcaatcgagagtgaacacctgctttgtggaccctctctgacatcactcaaccaaagcccaaatcctgtaagaaggtctttctaacacccgctctcttagacaccccatagtttcctacagtatatgttctccttctgcaacaaatcataaactcaatttgtttgattataggtgtgttcctggtggtatttgcctagagggtattgacaatacaaagttagattcaaaata

SEQ ID NO: 323256 - DNA, 478 bp, Homo sapiens
catgctaataaatacatactggagactgggtaatttataaaggaaagagatttaattgactcacagtttcacaggactggggagacctcaggatacttacaatctggcagaaggggaagcaaacacattcttcttcacatgacagcagcaaggagaagtgccaagcaaaaggaagaaaagtcacttataaacccgtcagattttgtgagaactcacttactatcacaagaataagacggggaaaactgcccctatgatttaattatctccgcctggtcccycccatgacacgtggggattatgggaactacaattcaagatgagattgggtggggacacagtcaaaccatatcaggaagggttcagagaagccagggcaacaaagagtcatttagaggatgtggaacagtgactatcaaccagtaaagaggtactttaattttaacatttagtacaggctttcctgtgagtaccacct

SEQ ID NO: 323257 - DNA, 629 bp, Homo sapiens
tataccctccccaaccttaaggctcatatcattgctgttataaactgaatcatgtcccccaccctcaaattcatatgctgaagtcctaactcccagtaccatagaatgtgatttggatatgggatatttaaagaggtggttaaggttaaatgagatgattagagtgggccttactccaatattactcatgtccttataagaagaggagattaggacacaaacatacacagaggaaagatcctgggaagaaaaggggagaagacagccatctacaagtcaaggagaaaggtcccagaaggaaccaaccctgccaacacctagatcttggacttctagactccagaactgtgagaaaataaatgtctgttgtttaagccrcctagcctgtggtatttgttaaggcagccccagcagactaatacaatcagacagcaatccttccttgttgctgttgtctgcagccctctttgaagatcttattttttgattgagtcctgttgctgtctcctacatgacctctgtcattaatccttggtgattgatttctatgtgtgtaagctttccaacaccttggcctctcagttcctggttcatcattctggcccagccatccactcccatggtcatag

SEQ ID NO: 323258 - DNA, 508 bp, Homo sapiens
ataatattttatttttaaataagataaactataggaactatctgaaaggatgatccagttaaatatattctcctgtaaagccctgctagatttcttagtataccacattctaagtccatatacatacacttaacacaaaaataagcatgactaataacaaaaaacttactttatccactggcaacccagtgtaaaattatctgaataaatgatatgaataataatttattcataggccagagagaccctacataaaagcagatytttcaggcagaggtcatgaggctttggaatacacattgtaaaagaggaaattctattcttctccagacttaacagtgttgtaagtcaggtcacatgctggctttccctgtcctccaggaagcacttgtatctatatgattttggggtcaacatgtaagacctctatcttgaatatacttcttttttatagcctatgtattagccagcattctccagaaaaacaaaatcaataagatatatagat

SEQ ID NO: 323259 - DNA, 541 bp, Homo sapiens
tcataatcctggtgcgcttttatcaccatgttttcaggaaaaattttagactgtgattaaatgaacatgctaacccaaaacaaaagcaaaacaaaacccccactgtggcatatacatgtgagtgaggggaatgggaatcgacccttgtttattattgactgttgtacctaaaactataygctaattcctatgagtgaacagaatatggcattggtatctcatgtagttacaaagagttgatttgattcaaacttgttgataggcagaattattgttgtggatttggtaattagacataaatgggaagtcctaaagaccatgtttacttaaatcacaatgtgtatgctcactctatggtgaatgcagaagaggacattagcaggtgtggggggccgaatttaaaatggtcctgatgacctttgctgctggcctcactcccatgattgtggtactttgtgtggaaaaatggagattatcagggttggcctaatctaatcatgggtcattgaaaaccagagatttctctggccagttgcaaaag

SEQ ID NO: 323260 - DNA, 475 bp, Homo sapiens
tggctgtatgaatgtcttcttttgagaagtgttgtgttcatgtcctttgcccactttttaatgcggttgttttttttttttttttgtaaatttgtttaarttccttgtagactctggatattaggcctttgtcagatggatagattgcaaaagttttctcccattctgtaggttgtctgttgactctgatgatagttccattggctgtgcagaagctctttagtttatatacttgcattttgatagaaaggtagatataagctttctaagaagctgtaaccttgaagaaaatggacagtaggcaatcttagctggtatgtaagtaatcaatgctttttctgatcataactttaatgcacagtaatttaatggacagtactgctaatttagttttttccagcatcatttgtacaaagtctcctaaaatccatcacagttgagaacagtctagacagttattatgacacaatcaaaa

SEQ ID NO: 323261 - DNA, 475 bp, Homo sapiens
tggctgtatgaatgtcttcttttgagaagtgttgtgttcatgtcctttgcccactttttaatgcggttgttttttttttttttttgtaaatttgtttaaattccttgtagactctggatattaggcctttgtcagatggatagattgcaaaagttttctcccattctgtaggttgtctgttgactctgatgatagttccattggctgtgcagaagctctttagtttatatacttgcattttgatagaaaggtagatataagctttctaagaagctgtaaccttgaagaaaatggacagtaggcaatcttagctggtatgtaagtaatcaatgctttttctgatcataactttaatgcacagtaatttaatggacagtactgctaatttakttttttccagcatcatttgtacaaagtctcctaaaatccatcacagttgagaacagtctagacagttattatgacacaatcaaaa

SEQ ID NO: 323262 - DNA, 510 bp, Homo sapiens
gttctgtgttgtaacctgtctgagactcaataatatttgcgtaaaagtccacagtattttagagctttttagaacagaattagaaccctggractaccagttgagtggatctcccaggatatcatgcagtctcactgccacaggactacattaaggaaatgagcaaaattgcaaggtcaaaatcatttggcaaggaattcttttcctttgcttacatctaattggtctctagccatgagatatgctcatatagaattaacttcagattttaaaaatatgggaaatgtgagttctggttttaattgcttccttggcaattaaacgtctctactgggaaaatataaagttaaatacatagttactgcaggtatcatcattttggaacttgacaatattgtgcacactgaagtgatcacagttgaactcacatctcttatttgcgtttcggtaccttttcacacaacttttcgtctcgtaaaaaggtggtcgttgaaaattttgaagcatgac

SEQ ID NO: 323263 - DNA, 460 bp, Homo sapiens
tacttgggcgtatcatatattccttctgcccatattctatcaattaaagcaaaccatatggccacgcatgctgtctgtcaaagggtgagagaagtatctccttccacagggaggtgctgccagtgacatgaccataggagggatataggtcctcttacagagaggacaagagatcattgtgaacaataatatcatccattacagatgttgagatggctcactgaagatagggacagaactagaactgggcacaattgcagtcgtctctgcttctctttgttttagccacattctttccagctatgaacaggaagtcaacagcagtcctagatttatacttccccaattagcaaaataaataaataaatwaaattaaactaaaatgaaatgacttctctttgctttacaataacatgactgactggccattcccatgtgtctaaaagtagggtcgctaaaa

SEQ ID NO: 323264 - DNA, 591 bp, Homo sapiens
agagctaatactctttcctttccattgactcgaagatggagagtttcaaataaatatggaggctcacacagtcaatgacctggcagaacagcatctgctttttgggggcagctggatatttaaagatttaataaggattaaatatttaaagattctaataaaactcatgttgatattggagattgtaaacctttccaaagtaactgctgaaggaggtaataaactctgatggcaagtagactccagacaatgagtccaygtgcctaacccagtgtcttctcctgtggctctactgattgcttttgtctacacattacaagctggcctgcccacccaggccactgtgatcctttgcctgggccctcgcaagttcccattctctgttgagacaagcctgtgactgatcgctgtctgctggggagatctcctgttctagggctgtcagtgatttgcctggttctgacatttattatctgcacacaactctcacaagcctgaggctgcccagactcaacagctcctgcccagtcacacctcctcaaatgtcttgctcacaaccttacctgtgtcagcctgatgtgattgattgga

SEQ ID NO: 323265 - DNA, 552 bp, Homo sapiens
aaaacaatagtacccagagctccactatttgatgagcttaatatacaatcttatgtgtcccagtccctactttacctacaaccaaaagttggcaaaatgagtttggttaaacaaggacaagttggaagtagagtggatgtatgatgagtgctgccgtcatttggtggtgggaacawgattatgaaaaaacagaagggtagcctacagccctgcaccttaggaagattaggtagccccacatgctcctgtagtggcttctgaagctgggtaggcagctgcagaattgattagactctgagaacaggctgtggctctgtttcaccagctctaacatcaggtctaaggtctctctcctatcatcagcccttcagctcttgcaacagctttcctgcccatggctctggagagggccagattagcctctcgctgctcatggttctcatgcaagttattgtcttgcttccatgggaatggactctccacacaaataagtgaaagacatcacaattagctgacaaagtccatagtttctcctggaggagattggagtgg

SEQ ID NO: 323266 - DNA, 570 bp, Homo sapiens
ccttcagctcttgcaacagctttcctgcccatggctctggagagggccagattagcctctcgctgctcatggttctcatgcaagttattgtcttgcttccatgggaatggactctccacacaaataagtgaaagacatcacaattagctgacaaagtccatagtttctcctggaggagattggagtggtctctttttcaatgacttcctgctatctcactgcgtttttgcatagatttctctagagtggcactacccaataacgtaggtagcccstagccacatgaggctatgcagcatttgcaatggggttaatgagacagatgaagtaaatttttcatctaatttcatttcaattaatttaaacttaaatgaccatatgtagctgatgattgctgtgttggataatatagttctagaggttgttctcattatattgttgttttgttaatttattttgggctaatatttattggacgttttctatgtgccaggcactatacttagagttttgtatatattcatccagtttttgcagaatgcgatgagactgataatattatttacattt

SEQ ID NO: 323267 - DNA, 593 bp, Homo sapiens
ctcaccagaacaggctgaaactcttgaatgctttgcatcctcatatataagaaaatcatcagtgcttaaaaatcaaggaagtcattcaaaacaaattcagcctttggaccttactggcaggtaggttatrtttcagtcagatcaatatctttctaatataggtatttgaaagtaatatatgctacttataataatgatatagtaagcttcttatctgcaagtacaggtactataacttacaccttaaaatgctttgtttgattgtttcattcagcaaaattcttggcactgttttgggatttcactgaattttgatgatgatattggattaagcattttagatttaattgtaaaatgacacaaaaatctaatcatctatttccaatgttcaatatacaatttttataaatacatgaaacaattcatataaaaatataaatgttaaggtcactcacagcaaaatatggcacattagaattatttattaaatgctttatacatataaaggtaggcacttcataaaatttgcattttggtaaaaggcaacaatttgatgtcagtatcttaattgtgtcattaacttaagagaacag

SEQ ID NO: 323268 - DNA, 662 bp, Homo sapiens
gagtttcacaacaacctactagggagactaagtcaaatatttttatttctatttagaaatcataagattaggctgggcacgatggctcacgcctgtaattccagcactttgggaggccgaggccrgcggatcatgaggtcaggagtttgagaccagcctggccaacatggtgaaaccctgtctctattaaagatacaaaaaattagccaggtgtggtggtgtatgcctgtaatcccagctactcgggaggctgaggcaggagaatcgcttgaacccgggaggcagaggttgcagtgagctgagatcacaccattgcactccagcctgggcgatagggtgaaactttgtctcaaaaaaatcacaagcttaaacaacttctcaagttcataatagaataaaactagaaactggagccttggtccttgaaatgtttattgtacaccaccaagattcactactatttggacaaatagtcaacaaatatcaacttattatctccagagaaaacaataggcaatgctatacacacaaagtatgtgtgaacacaaagtattttgaaaatatgtttgtatatttattcatatttattctgtgaaacctttaactaagtcttggagattcatctttcccacatgacagaaaatcaaccatgaagccataca

SEQ ID NO: 323269 - DNA, 662 bp, Homo sapiens
gagtttcacaacaacctactagggagactaagtcaaatatttttatttctatttagaaatcataagattaggctgggcacgatggctcacgcctgtaattccagcactttgggaggccgaggccggyggatcatgaggtcaggagtttgagaccagcctggccaacatggtgaaaccctgtctctattaaagatacaaaaaattagccaggtgtggtggtgtatgcctgtaatcccagctactcgggaggctgaggcaggagaatcgcttgaacccgggaggcagaggttgcagtgagctgagatcacaccattgcactccagcctgggcgatagggtgaaactttgtctcaaaaaaatcacaagcttaaacaacttctcaagttcataatagaataaaactagaaactggagccttggtccttgaaatgtttattgtacaccaccaagattcactactatttggacaaatagtcaacaaatatcaacttattatctccagagaaaacaataggcaatgctatacacacaaagtatgtgtgaacacaaagtattttgaaaatatgtttgtatatttattcatatttattctgtgaaacctttaactaagtcttggagattcatctttcccacatgacagaaaatcaaccatgaagccataca

SEQ ID NO: 323270 - DNA, 662 bp, Homo sapiens
gagtttcacaacaacctactagggagactaagtcaaatatttttatttctatttagaaatcataagattaggctgggcacgatggctcacgcctgtaattccagcactttgggaggccgaggccggcggatcatgaggtcaggagtttgagaccagcctggccaacatggtgaaaccctgtctctattaaagatacaaaaaattagccaggtgtggtggtgtatgcctgtaatcccagctactcgggaggctgaggcaggagaatcgcttgaacccgggaggcagaggttgcagtgagctgagatcacaccattgcactccagccwgggcgatagggtgaaactttgtctcaaaaaaatcacaagcttaaacaacttctcaagttcataatagaataaaactagaaactggagccttggtccttgaaatgtttattgtacaccaccaagattcactactatttggacaaatagtcaacaaatatcaacttattatctccagagaaaacaataggcaatgctatacacacaaagtatgtgtgaacacaaagtattttgaaaatatgtttgtatatttattcatatttattctgtgaaacctttaactaagtcttggagattcatctttcccacatgacagaaaatcaaccatgaagccataca

SEQ ID NO: 323271 - DNA, 625 bp, Homo sapiens
aattcattaatctacactctgccacatggccacttctatctacaagggaagctgatgacacaggtacttctcttagagscttctatagtacagaaaggcatggaagagggtactcttgaatgaatctactcatcatatctcccctacataatgttggactgcaaggtatgtcttaatagggagagctttgaaactaatcctgaaaaataagtctagaatacagtgagagaaagaaaatcaagacagaaagaagcacacagtgaaaattctgcaaggtgcattttgtttttctctttgccaatgtgaaatgtaagttaaagtggacctatgtaatattcaaatttgggaaaactaacaaacccatctgagtgcatattaggtatttgataaatatttgttgagtaactgaatggatgaattgtagtcctgcttcttcttttgcaaaagtaaattgcgtctttaagttaaggctgtgttatgtaaacaggtgttcaggtttgaaaatgaattcacttcagctcactagagtgaaaggtaaaagcttgagagtatacttccaatcctgatcactagaattaaatctcagacctattcttattcaggtgattagttttagcatttgaag

SEQ ID NO: 323272 - DNA, 615 bp, Homo sapiens
acaggcagtagtgcagtactccatgactagcagcaatagggaagctttggcagtcctaggtctaaaaggggaaggagagaagctagaaatatagctgtttggagaaggcatcccatgggaattggacttttgtttgagaggcaccatccagataaatacttcaagtaagtattccatcttcactctcctttttctttctgctttcctgaatggcctctccattggccaaattcaaccagaagcacaactgtcaagggaagtccttggtgcagtccaagcagtgtagactcctgggcagaaatagaggggagggtgtggagagtggatttgtaaagggaaggggaatgtgtacacagtacaaaaaargtttaatgtcaatggtcatcttaccttttatttctattagacattttgttcatccaacacttttagatatcttatgtcatgccagatatttgctcaaaaaatcattatataatgaagtgacgtgtggtcctcatttttaattctgctgacattgtaaagaacttgtgccaatatcatggtcaattcacataaaaattaaataatgaattcatctaaattgttcaatataattattgtattaattcattt

SEQ ID NO: 323273 - DNA, 615 bp, Homo sapiens
acaggcagtagtgcagtactccatgactagcagcaatagggaagctttggcagtcctaggtctaaaaggggaaggagagaagctagaaatatagctgtttggagaaggcatcccatgggaattggacttttgtttgagaggcaccatccagataaatacttcaagtaagtattccatcttcactctcctttttctttctgctttcctgaatggcctctccattggccaaattcaaccagaagcacaactgtcaagggaagtccttggtgcagtccaagcagtgtagactcctgggcagaaatagaggggagggtgtggagagtggatttgtaaagggaaggggaatgtgtacacagtacaaaaaaggtttaatgtcaatggtcatcttaccttttatttctattagacattttgttcatccaacacttttagatatcttatgtcatgccagatatttgctcaaaaaatcattatataatgaagtgacgtgtggtcctcatttttaattctgctgacattgtaaagaacttgtgccaatatcatggtcaattcacataaaaattaaataatgaattyatctaaattgttcaatataattattgtattaattcattt

SEQ ID NO: 323274 - DNA, 428 bp, Homo sapiens
ggatgttaatgaacaactaaaaatcacccagaattgcttctgaagtgaaagtcaagtgcaacaaaaagaaaagaccatctagaaagaaaatcagaatgaatatatttattatttagagataagcatttctttaactggctcccaagattttttttttaattaactaatgacctaatttagctccttgagactcagatttcatygaaaaccacaccatcctggtcataccattttggggaataagtatgaatagagccagcaccggccccctgaggtagcctggatgtcaataccaggtttactatcagttgaagttcttcactccctcctccgctcgcccactcactctttgtgttccttataattgcacttttaattttgcattgtgattacgttcttttctgttttatttactcttccttaaatct

SEQ ID NO: 323275 - DNA, 626 bp, Homo sapiens
caattaaaaactatgaagctacagcctttgttcagttgtctgactcatactttagattatggactacacttagaatatgctactcactayaaactcacttcctctaattcttaaagttcttttaatattccttcatgtcaaatattagttgcttacttaatatattcaatcatttttaccatgtcccaaatatcatgtaggtactccctgaggactacaaatatccaagggacagtcttggctctcaaagagcttagagtctaatggaggagacagacatttacacaaatctattacaaggctacaagaggggtattggattaggtaccaaaatggctggaggtgggaaatgattaattctgattggaaaatttgccagggtcctcttctccgggtatcagctctttacctagatctggaaagatgaggagggtttctgcagcttaagtgagggtttatctatcctcaggcaaggaggtaagggaattagcaccgtgtgttcaggtggtggcaagggatgaggagggtggtctccaaatgcattttcacaggtaaagcaggagttgaactctgaatgctttatccctttggatggctttcaagttcctttctagtcaatagggaag

SEQ ID NO: 323276 - DNA, 539 bp, Homo sapiens
agaatcctgagacccagagaggttagacatcctgaagtaaatgcattacaactttctggcgctacaaaggaaagcccacttatttgcaatgcttaaatcccctgctggctctcttcctccttccctccctccatttctctccccttcttccctttctttcaggtcttgatcctccagggcagttcttatttatgtgattgttttatataaagaaatgaaaaacataataaagraaaaaggacagtgagatttgataagatgcagcaattgtctgccttcctgacagacaatgtttgtagtccagcatcattaactgcacagagaaatcgaggtgtttttctaaataagtaatactggatgtgcgagtctgtggctgtttaatttatcatgatacaatattgcagggcacacctgtgtgagtacacacttctggatattgctgtgcataaatacagctagctggatccttgtctgtgtgacctggcagtagtccaaaaaggaaattttcattgatcttccagtttaattatatctgtggc

SEQ ID NO: 323277 - DNA, 539 bp, Homo sapiens
agaatcctgagacccagagaggttagacatcctgaagtaaatgcattacaactttctggcgctacaaaggaaagcccacttatttgcaatgcttaaatcccctgctggctctcttcctccttccctccctccatttctctccccttcttccctttctttcaggtcttgatcctccagggcagttcttatttatgtgattgttttatataaagaaatgaaaaacataataaagaaaaaaggacagtgagatttgataagatgcagcaattgtctgccttcctgacagacaatgtttgtagtccagcatcattaactgcacagagaaatcgaggtgtttttctaaataagtaatactggatgtgcgagtctgtggctgtttaatttatcatgatacratattgcagggcacacctgtgtgagtacacacttctggatattgctgtgcataaatacagctagctggatccttgtctgtgtgacctggcagtagtccaaaaaggaaattttcattgatcttccagtttaattatatctgtggc

SEQ ID NO: 323278 - DNA, 563 bp, Homo sapiens
ataggtttaagtgaaaaatgacacttaaacatttgtgcatatttagttgaaaggaattatgttcacatgcagatcatatatttggctcatttcataaacacacgttttatgccatgcatttgagaaatgtgaaggcaagccaagttttgtacagcccacatcattttacacatttggtaaggttaatagtaaaattctaagcaactgatttaggtgctttttaaaatttgaagatcctacagctgattatagaatttgaggaagtgggacagcctcggcaaatttcttcctttctttagttaccagagaagagtagaggtaagaattgctaggcaggaaagaatggctttgctagtctccacagttctttttccccaccatgttccttcaggcaaaagttagcctatatttctaagtgtctggatataaacatgcctgtattaaaatattttccttgtttataattttatgatttatctatatatctttatttttggctactgtggctttttacagctttctmatttatatagccatttgtttaggctgtcaaaacattttta

SEQ ID NO: 323279 - DNA, 546 bp, Homo sapiens
cctggtttcccatctttattttggaattttaccttccctccccctttttctctcttttcttcctccccttatatgtaggagttccagcattctgtttttggcctctgcttgtttctgtactgtctctgcagctaccacatccattcagtgctctcactgcccgtgctcaacagatgagtcccttctttatctttggccctaggctttctgacaaatttgggttatgtcataccagtttcctgttcagtgtctccattttgtgttcaactgatggcacaaactcatattaagatctagattcatctgctttttattttttcagttttctacttgctctagacttcctggtcactaccatcttacccatttatgtctacctccccctgcttcccccataatcagtcagacacaaagtcataactattccacctctgaaagatctactgcactctagaagctgctctatcctcactgcractgtcatttttaaaggcccttcttagccttacttggtaccattgtactagcttcctacctggtctttcc

SEQ ID NO: 323280 - DNA, 576 bp, Homo sapiens
tcccttttgtgtgttccagtagtgccctgctgtatacctgtcatggtatctatgacactatgtggacattgcctacctgtctgtktttttaggttatagcatatgactattgggaggtggaccatgccatcttcatcttggaattccagtgctggttctagtaccttagcacgtggctgttgattacatgaatgaagaatgaaaaacctctaatatttaaacacaatagaattaatgccatgtgtaaattatttaatagtaattttgtattgtaaatgtacatagatatttctcattcttactaactctgataaagttctcaactctttagtatttaaactcacatttagttaactgaagtgttttaggtaaagaacataattctttctctttccagttgttgctgtgttgaacacttgctcccgtctacttacttctctataatccactggtaagccacatctaatgaagagaatgtttaaccataaagtcttaaggaaaaattttattatttaaaagattataaaactttattactgggctgtttacacaacattttaattgtttctcataaaa

SEQ ID NO: 323281 - DNA, 576 bp, Homo sapiens
tcccttttgtgtgttccagtagtgccctgctgtatacctgtcatggtatctatgacactatgtggacattgcctacctgtctgtgtttttaggttatagcatatgactattgggaggtggaccatgccatcttcatcttggaattccagtgctggttctagtaccttagcacgtggctgttgattacatgaatgaagaatgaaaaacctctaatatttaaacacaatagaattaatgccatgtgtaaattatttaatagtaattttgtrttgtaaatgtacatagatatttctcattcttactaactctgataaagttctcaactctttagtatttaaactcacatttagttaactgaagtgttttaggtaaagaacataattctttctctttccagttgttgctgtgttgaacacttgctcccgtctacttacttctctataatccactggtaagccacatctaatgaagagaatgtttaaccataaagtcttaaggaaaaattttattatttaaaagattataaaactttattactgggctgtttacacaacattttaattgtttctcataaaa

SEQ ID NO: 323282 - DNA, 534 bp, Homo sapiens
ggaatttacatcagaacccccctatacatttatatagattagtacctttgtaaattatagtaaaatgtatatagtctttattccatagtttggggtcagtccatttttttaagtacttctgttatttccacaaaatcccaagttcatgaatctatctaggtattattgcatatggatttctaggccaagagaatgccatccaatcattttagtgaagwccttatcatctcaagagggcaaaactaagcatacttttctcctaataaaatgttatcccgaccaaatatatttctatctggcatgctgaactttgtagtgttagttagtctctacattcatatatgaaattttaatatttcaaaatctggacaaataagatttttgtaaaaagcccaatagactcttaatgtaagccaagctgagaatttggccccaaatatcctttattattgataatcaaggtagacttggaattcataatcatttccctgtggcagcaatcaagttttatatttgaaaagaactgtgaatgat

SEQ ID NO: 323283 - DNA, 461 bp, Homo sapiens
caataagaccacataactaaaaaccaagagggaaacacgtgcctgtgcatgcacatgcaaggctgtgtgtgccacgccccacctgccatatgaacagaagacacacacactctgtagttagctgaaaagaacttaaacataatcatggttaatatatttaatgtaattggtgaaaagatgcagaaggtagataaaagtcttgtaatatcaccagagaattagagtctataaaaaagaaataaatggaaattttggaactactacataaaaatctgaaattaacaattcattatatgggttaracaccaaatgagtgtagcaggacatagtagaagacaggattagtaaagtgaaagacagatcaacataaataaaaacctaaaccatacctaggcacatcacagaaagaacaccaaaaaccaaagtaaagagaaacctctcaaaagcagtcagaaaaacag

SEQ ID NO: 323284 - DNA, 546 bp, Homo sapiens
ttatttcacctttttccctcaaccacatctatttctttttccaacagtttctccctatttcgaatgctccctattcgaatgctccctatttcgaatctgtattgtgtgtactacatggcaataactaaacttacttccctgttttctatatggtcaggcatgaggtaaccccaatttaacttttgccagcatcatggcccaccattccccctttagtttatttgctgtcttgtaaacataccattctatgtctggcttatgtccctttgtacctggggtttttctagcctggagtgatctttgtacatcccatccttcttaattggcaaacttcctgcctgttatccagataaatgttatattatctttcaaatcatgacatgatccgctcactccagcacccacaattaactactctgtccttaaaagttccgtatttctgacagctattgtgttgtagkcattttcatgtatgtttacattcctcatgccactgctgaccctcctgaattagactctgaattctacggaagcaggaccatagct

SEQ ID NO: 323285 - DNA, 564 bp, Homo sapiens
aaacatctgcagtgaaagaagtctgggacaaaaagcagtttctgctcttgcctcctgttctttcagaaaacaccagtcttctagggcagtaaattagtagtgagtcactagctgtataatacgtgctgcttgtctcatgagacattaaaccgaggtcccttctgctcacatcgtgcacctgtcaccaaatgtccaataaaaatcctgttctctgagggcatgtcaggaaggagcagggcaaagacttgcccaagccttcctcagcagtccaggagagcccccaggcaaggtactccctgtggcctgccccaaggctgagtcatcagaggccctcatccgcaaatcccacctgatctatggctgctggcaatcasacacagagaaatgaatgccaaataagggctgtgtgtgacacactcaagtttactccctctccgaggtggtctggggaatttctgaggtagatctcacctaggtagtggggaagaatgggcatgggccagaagtcaggagacttggtttcaaagcttttgtcatgtagtcagtgtgtgacctgagacaaga

SEQ ID NO: 323286 - DNA, 603 bp, Homo sapiens
aatctcttctaagttgcaattctacacatagctcctctgcatgggtaacttaaatacataagtatgatttgttttgtatctaaaatgtagtttttctaatttgcatattattattatatagttcatatgttttaatagtttgtgatacaaatctaatatttagtagtcataatgctaatcaaatataatmatgtcagtaatttaaaattggtggttagatattactacttaatagattttcttacctgcagtttcctaaaaatatgctgataatttgtagtgcttggaaagagctctacagatctttaacagggagccagatggccttttaccatgacctttgcccaatactattagcatccaagggagctgagaagctctggctcattatccacaaccagatgttttcttcttctttatcactgttgctaagtggcagttaatgtctggcacattgggtatttgcttgaacctatgaaccataaaattctgctcttaaaatacaaataccacccactagcagaaacttctccctttgcattttaatccaatcattctctcttagaaagcccgctatagtcttgtagacactttatttaatta

SEQ ID NO: 323287 - DNA, 551 bp, Homo sapiens
accttttaacatctctttgtaacctttctaaatccatcagaatagtctgtgaatgtataaaagtctaatgtctttaaatgatgttaaaggatcatcttatgtgtgaacttcatgtactaaagcaaggatggtaaatgcaatttaaatgtttatgtcagagctgataagattgatatacaaatagacagacaaagggacagattatgttccagtaattggtgaccttcattcccctgagttttatcaattgatcctctgaaaattaaaaatggatgcttgaataaatagaactattgcactcttatgaccgctagtcatacaaaacagataaattcaatatagtaggaaagagttcatagtagtttgaccacatgtaatagttgtgaaggagagaacatttgtgaccaaagtgaatagaaaaagataaaaatatacttgagagctagtgctgagaagggaaacaaatctcttccatctacatcacactcatatctccattggactctatytctctttccaattaaaaatgtctgtcactgagaaatacaaac

SEQ ID NO: 323288 - DNA, 605 bp, Homo sapiens
aattttaaaattctaaccttagaacatgatcttggtaatgccattgtttgtcattaccacattaatatatagcaacatsctaagcattgaccctgatggcctgaattgctgctggagcaaggtggcaagttaattgattcatgtctaccttcttcaaattcaagagttggtgacacggcatttagaaaaataagtattcagaaaagccttcttatctaagagtattttttagaagaaattactaaccatctaccaggatccattcaaagtttctttaattattattatttaattattaataataattaaataattatttaagtattatttaggctctattgagcctaaattttagtagtgcacaagtcttccctaatagataatgtatttctaagctttctttggaactaagtgtgcctatatgatgcaattctggtcaatggaataagtgcaaattatgtttacaacttctagattaagcctttgaaaagaaaaaaattctattttactttctttttagcatatacatgacaacatctatagcaacaaacttggacccaggaacacttttgatccagattcttttaattactttttggcaaaga

SEQ ID NO: 323289 - DNA, 584 bp, Homo sapiens
aaaacatatggaaggaaaaaattaagtcctgaggcataaaaagtcataaagataaactttacctaccacacttttttcctaggttcagtcctggcatttacataaaaccctcccaaaactcctttccactgtacacttaacaatgatctcatgtcatctttggtatatgtacataggttactgatttgttctatctccctgttgccagacaataggaagagcagagagagttgagttgctatgtcttaggtctacaaatrggaccatttggaaaggcatttttcctgtggaacctgtcttctctgactgaaacctattcagtaagactgttcattcctgacctcctggccccttgacactgatcggtcctgaagaggatggcaatatattgcctgtcaaatttatattagaaagccatagcataaggtcgttatttttatattgcacacaatgctttatgtcaaagtttgataaacatgaaatcacattttcaaaggctaaaaaacaagtgtcagtcagtcaaaaatagttgaccactgtgagtgtctcactggttgaccttgaactcctccatgactcggagg

SEQ ID NO: 323290 - DNA, 645 bp, Homo sapiens
ttggaagccatctcagcagagagtctagatcaagcttgttgaacccacgccccatgagccacacgtggcccaggacaactttgaatgcagcccaacacaaattcttccttaaaacattatgagatttttttttttgcactttttttgattttagttcaccagctattgttagtgttagtgtattttaggtttgacccaagacaattcttctttcaatgtggcccagggaagcccaaagattggacacccctggtctagataataaagaagtgaaagacgcccagcacagctagcaaaagaggctaagtagagagtcccttttgatggaaagagaaagagacaatgttatgacatggaattcaagagaataaagcatttcaagaaggaggaaagttgctgcaaggtcaagtcagatgaggacagacaagtgaccatttgtttcacactatggacattattgtgaccttgacaagtaccatttcagtggattgtaatgaaaggggagaaaaactttactggagtggattgaaaataaaagagatgataaaaggaactcactaaatataggcatcttttgataagttttgctttgaaggggttakaaaaatttagtaataactggagtataatatgaggtcaaaggag

SEQ ID NO: 323291 - DNA, 493 bp, Homo sapiens
agtcagtcagcctgtaatttgaaaaaattgtggcatcccacccaaaactacatcaaatgattagtatgatcctgatgaatgttagggctttagatggatgaataccatgattgaagtaatcctctaacacatccaggatctcaggaatctctcagatccaaggataatagatccagaattaattatttgaagccattggctacatttcactgaagttttaaatccttgcgtttgttttatgatcaacatagtctctacattggcggtaaatgggaatctcatcctgtttatcagctaccatttagatataaagtaaggtaacgcttacattttgttttatatttgagaaggccaaaaagaccattagttttgttttgttttgttttagattgggtcgcactatgttgcscaggctggtcctgaattcctgggctcaagtggtcctgccccctcagcttcatgagtagctgggattataggtgtgtgctgccat

SEQ ID NO: 323292 - DNA, 608 bp, Homo sapiens
tatgtcaataccatgctgttttggttgctattgttttgtaatatattttgaagtcaggtagtgtgatgcttccaattttattccatttgctgaaaattgctttagctatttttatggtttcatacaaaatttaggattcttttctctatttctgtgaagaatgtcattggtattttgatagagattacattgaatctstagttattttgggtagtatggacattttaacaatattaattctactaatacgtgaacaaagaatatttttccattatttttgtccattatctgggtggggacataaccaaaccatatgattccaccccctagcccctcccaaatctcaaatcctcacatttcaaaaaaatcatgccttcccaacagccccccaaagtcttaactcactccagtattaactcaaaagtccacagtccaatgtctcatctgagacacggcaagtcccttccacctatgagcctataaaatcaaaaacaagttagttacttcctagatacaatgagggtagaggcattgtgtaaatacagccattccaaatgagggaaattaccaaaacaaaggggctacaggccccatgcaagtccaaaatc

SEQ ID NO: 323293 - DNA, 577 bp, Homo sapiens
aatttttgacttctgtgcacccacaggtccaatatcagatgtaagctgtcaaggcttggggcttgcaccctctgaagcaatagcctgagctgtacattggccccttttagccacagctggagctgaagcagctgggatgccaggcaccatgtcctgaggctgtatagagcaggggatcgttgggacctgcccaggaatttttccctcctaggcctccagacctgtaatgggaggggcttctgtgaaggtccctgacatggcctggagacatttttcccattgtcttggtgattaacatttggctyctcattacttgtgtaaatttctgcagccagcttgaatttctccccagaaaatggggttttcatttctattgcattgtcaggctgaatattttccaatcttatatgtactgcttcctcttgaacacttcaccacttagaaatttcttccccagataccctaaatcatctctctgaagtcaaagttccacaaatgtctagggccagggcaaaatgctgccagtctctttgcatagcaagagtgacatttactccagttcccaaaaagttcctca

SEQ ID NO: 323294 - DNA, 508 bp, Homo sapiens
ttatgatccaactgaggatgcctagaactgaacttcacacccaattagtagtgggccaagcttccttgtcacagccctgggttttagtttgggtgagggttgtcactgcatagccagaatctgaacaatttaagagccctctaaagggaaacagcccattttataaaacacagacataaaktccaaccaaaaaggtgatgtacttcttttataagctatagttcataactttattacaacattgctttaagttcataactttattaattttccacttgagaagtgattatttcagaagttattatttatttcactttaatttgttactaccatcctttgtttcagaaagaattcaatttatttggcttaatggaaatgcaacaaatcaaatgtaagcatgaatggatgaagaaaagaagatataatgcacataggataattatctatgtataaattcatggtagcactttatttaaatgtaagtaaaattagaaaatcgtagcacata

SEQ ID NO: 323295 - DNA, 591 bp, Homo sapiens
gctctgaagggcaggttccctgcctgcctgctgtgtcaggattcagaaatatagtggctgtaacttatgatccaactgaggatgcctagaactgaacttcacacccaattagtagtgggccaagcttccttgtcacagccctgggttttagtttgggtgagggttgtcactgcatagccagaatctgaacaatttaagagccctctaaagggaaacagcccattttataaaacacagacataaagtccaaccaaaaaggtgatgtacttcttttataagctatagttcataactttattacaacattgytttaagttcataactttattaattttccacttgagaagtgattatttcagaagttattatttatttcactttaatttgttactaccatcctttgtttcagaaagaattcaatttatttggcttaatggaaatgcaacaaatcaaatgtaagcatgaatggatgaagaaaagaagatataatgcacataggataattatctatgtataaattcatggtagcactttatttaaatgtaagtaaaattagaaaatcgtagcacatattgtttgagaaacaaaaat

SEQ ID NO: 323296 - DNA, 591 bp, Homo sapiens
gctctgaagggcaggttccctgcctgcctgctgtgtcaggattcagaaatatagtggctgtaacttatgatccaactgaggatgcctagaactgaacttcacacccaattagtagtgggccaagcttccttgtcacagccctgggttttagtttgggtgagggttgtcactgcatagccagaatctgaacaatttaagagccctctaaagggaaacagcccattttataaaacacagacataaagtccaaccaaaaaggtgatgtacttcttttataagctatagttcataactttattacaacattgctttaagttcataactttattaattttccacttgagaagtgattatttcagaagttattatttatttcactttaatttgttactaccatcctttgtttcagaaagaattcaatttatttggcttaatggaaatgcaacaaatcaaatgtaagcatgaatggatgaagaaaagaagatataatgcacataggataattatctatrtataaattcatggtagcactttatttaaatgtaagtaaaattagaaaatcgtagcacatattgtttgagaaacaaaaat

SEQ ID NO: 323297 - DNA, 695 bp, Homo sapiens
ttgttctcaatgtctgtacacttcaacagttattatgcaaattttgcccaaagcaacattttcatatatatgccccttcatttatatgacaaacttatattttgcatttttattgctctttagggtataagtctttacacagtaaatacaaatttttcaaaacagtagctgtaccaggtttacacttgctttggaagagcagggtcatcaaggttataccaaattgcytgatgatcgattatcctagacagcatttcccaaaatctttatacagtatgtcacaagcaggtcaaagatcatgtcactcttctgctgagatctccttctatagatgctcactctcactctgaattatgtaccagaagaaggcaggagggtttacagaggtttcatgtaagtcacaggaaaagtcttaagaatgcaggcaactagattgcaattgtaatgttccctacaagcctagcaacatacagcaagtcaaaggcaaactaagacataaaataatggaatggcaaatattaaacaaggtggacctccttgattcagcaaactgataagtgctttcaaattgactcattatttaaagaaagcaaaacagttattttatcaaatgagaaaatactgctaatacaaactttccttcatttctaagaattaatattctttctatggtgcgctattttactgtgatatag

SEQ ID NO: 323298 - DNA, 591 bp, Homo sapiens
cctttgaatatttttgtagccctacctctttctttaccttctttttaaggccaatagttcttacattggccctttggatgctattttctagatcccataggtgtgcttaattgtttttaaatcttttttctttgctttctttgactgtgtattttaaaatagcctttctttaagctcactattttctctacttgatcaattccgttattaaaatactttgatatattctttagtatgtcaattgcatttttcagctccaaaatttctgcttgattttgtttaatgatttcaatctctttgttaaatttaaatttatctgatagaattttgaattcctttcctgtgttatcttgaatttctttgagtttactctacacagctattttgaattccctgcctgaaatgtcacatatytctgtttttttccagaattggtccctggtaacttacctatttcatttggtgaagtcacgttttcctcaatggtattgatgcttgtggatactcattggtgtctgggcatcgaaaaggtgggtacttattatagtcttcaacatctgggcttgtttatacctggctttcttaggaagg

SEQ ID NO: 323299 - DNA, 577 bp, Homo sapiens
ttctgcttgattttgtttaatgatttcaatctctttgttaaatttaaatttatctgatagaattttgaattcctttcctgtgttatcttgaatttctttgagtttactctacacagctattttgaattccctgcctgaaatgtcacatatctctgtttttttccagaattggtccctggtaacttacctatttcatttggtgaagtcacgttttcctcaatggtattgatgcttgtggatactcattggtgtctgggcatcgaaaaggtgggtacttattatagtcttcaacatctgggcttgtttatacctggctttcttaggaaggctttccagtatttgaaaggacttgagtgttgagatctaagctgtatctgctttagggagtgcccaagcccagtaacactgtggttcttgcaggctcatagaggtacctccttgacggtctyagataagatccaagagaattatctggattaccaggcagagactcttgttctcttcccttactttctctcaaacagtttctctctctctgttcagcgccacctaaagctgaaggtggagtgacacagca

SEQ ID NO: 323300 - DNA, 554 bp, Homo sapiens
ctgggggaaagagagtctattcgttaatggtgctggaaaaactgaatatccatatgcagaagatgaaactagacctctctctctttccatacacaaaaaataaaatcaaagtggatgaaaaaatgtaaatctaatatctcaaactatgaaacaactataagaaaacattggagaaaatcttcaggccattggtctgggtaaacattttttgaataataccccaccaacacaggcaaccaaagcagaaatgtacaaatgggatcacatcaagttaaaaaacttctgcacagcaaggaaacaataaacaaagtgaagagacaaaccacrgaatggaagagagtatttccaaactactcatctcacaaggaattaagaactaaaatatgtaaggagctcaaacaactctgtaggaaaaaaaaattaataatttgacataaaaatggacaaaatacatgaatagatgtttctcaaaagacatacaaatggcaaacaggcatacaaaaaggttctcaacatcactgatcatcagagaaatgcaagtcaaaactacaatg

SEQ ID NO: 323301 - DNA, 566 bp, Homo sapiens
ttggctgcatattctaaaacttcattcaaaccaaacaatacaataggtccttttttgggtttggaataattccctcaacgtaatatctagacattaatccatgcttttgagtgtacctgtaatttatttattactattgtttgttaatatagtatttcattataaacgttatttaaaaaataacctgcttgttgatggatgtttgaactgtttccattatttggctattatgaataaaaacttcctgtattagtctgttttcatgctgctaataaagacacacctgagtctgggtaatttatgtatattttattttattttactatcattaattttttttgagatggagtctcactttgtcacccaggctggactgcagtggcatgatcttagctcactgtaacctctgcctcctgggttcaagcaattatcttccctcagcctcgtgagtatctgggattacaggcatgtgccaccacacccagctaatttttgtattttyagtagagatggggtttcaccatgttggccaggctggtcttgaactcctgacctcaagtgatcca

SEQ ID NO: 323302 - DNA, 630 bp, Homo sapiens
tgatgaaattgaagcaatatattatggcaatattttatattttcttgctttctagtatttgagatgaagatattttggtgattttgataatgccatctcatttacctggccataatgctgacattgggaaaatttatgtgaagagaacattatataatacattgctttgatttacagataaatttgatttttttaatttataaaatttcagcatgaatttcagtttggttgtgcctaaaatgcataaatttgcaatatttttcttcttgctttggggatggtctttcttttatggaataaaccatgaaatgttttaggttagcataatagatgtgatagccatacrtgtagaagatcaaaaaatttagggatagatgaagagggaggttaaaaaaagaggcaaaaaagaagaaaaaaagaaggaagaaaaaataatgaaataaaagaagcaagtagggaaataaagttacatatgtaatattttgcagcctaatttcattatgttagggcagataatacatctttatcttttaattctgtggtatccagaatcatgctttgttacgtcgttataagcccataaatttgtacgaagtgaagaaagaggataggcaggcataagggcttact

SEQ ID NO: 323303 - DNA, 630 bp, Homo sapiens
tgatgaaattgaagcaatatattatggcaatattttatattttcttgctttctagtatttgagatgaagatattttggtgattttgataatgccatctcatttacctggccataatgctgacattgggaaaatttatgtgaagagaacattatataatacattgctttgatttacagataaatttgatttttttaatttataaaatttcagcatgaatttcagtttggttgtgcctaaaatgcataaatttgcaatatttttcttcttgctttggggatggtctttcttttatggaataaaccatgaaatgttttaggttagcataatagatgtgatagccatacgtgtagaagatcaaaaaatttagggatagatkaagagggaggttaaaaaaagaggcaaaaaagaagaaaaaaagaaggaagaaaaaataatgaaataaaagaagcaagtagggaaataaagttacatatgtaatattttgcagcctaatttcattatgttagggcagataatacatctttatcttttaattctgtggtatccagaatcatgctttgttacgtcgttataagcccataaatttgtacgaagtgaagaaagaggataggcaggcataagggcttact

SEQ ID NO: 323304 - DNA, 597 bp, Homo sapiens
ctggactcaatctatattataaatcaaatggatctattataatagatatttatggaacattacatccaacagttgcagaatagaatacacattctgtttctcagaacatgaatcattctcaaggacagaccatatgttaggtcacaaaacaattcctaaaacattcaaaaaattaaaataatatcaagaatcttatctggtaacaatgaaataaaactagaaaataataacaagaaattaatgaaataaaactagaaattaataacaagaaattaattaataaaaacaaattaataaatcttggragctatgcatgtatatagaaatttaaaaatatgctcctaaatcatcagtggttcattgaagaaattaagaaggcaattgatacattttttgaaacaaatggtaatagaaaaacaacataccaagacctatgggatacagcaaaagcggtactcagacgcaagtttatagccataagtgctgcattaaaaaagggaacaggcttcaaataaacaatctaacattgtatattaaagaactagaataccaagagcaaaccaaactcaaaactagtagaagaaaataaataataag

SEQ ID NO: 323305 - DNA, 597 bp, Homo sapiens
ctggactcaatctatattataaatcaaatggatctattataatagatatttatggaacattacatccaacagttgcagaatagaatacacattctgtttctcagaacatgaatcattctcaaggacagaccatatgttaggtcacaaaacaattcctaaaacattcaaaaaattaaaataatatcaagaatcttatctggtaacaatgaaataaaactagaaaataataacaagaaattaatgaaataaaactagaaattaataacaagaaattaattaataaaaacaaattaataaatcttggaagctatgcatgtatatagaaatktaaaaatatgctcctaaatcatcagtggttcattgaagaaattaagaaggcaattgatacattttttgaaacaaatggtaatagaaaaacaacataccaagacctatgggatacagcaaaagcggtactcagacgcaagtttatagccataagtgctgcattaaaaaagggaacaggcttcaaataaacaatctaacattgtatattaaagaactagaataccaagagcaaaccaaactcaaaactagtagaagaaaataaataataag

SEQ ID NO: 323306 - DNA, 552 bp, Homo sapiens
ataaagggcatccaaattggaaaataagaagttaaaatatccttgttggctgatgatatgatcctacatttggaaaaacctaaggactccacaggaaaattatttagaactgattgacaaatttagcaaagttgtaggatataaaatcaacatacaaaaatcaataacatttctatatgccaacagagaacaatgtgaaaaagaaataaaaagataatcctctatacaatagccgcaaataaaattaaacatgaaggaattaacctaaccaaggcattgtacacaaagcctatagttcaatgagaaaacagtttggtagataaggcagctctacgaggaaaagagcttgtagggatatattgataagtataggactyggtaaatgttatttactgaatgttgttcttgtatttgataaacctccaattctgattctaaaaattatatttccatttagaattttcataacaatagtgaattgcaactctttcagtcttccaaacaaatcctttttattatctttattattcaatgagaagcaaaattcaagtt

SEQ ID NO: 323307 - DNA, 279 bp, Homo sapiens
  misc_feature (1)...(279): n = A,T,C or G
aatcgttccangttgtgatagaaaagttttctaggatatgggagaaagggatgaaagcacatgtggcatatatttactatccctggagaatatatgtaagmaacatctagtataaaaagagaaaagaatcatgtgcaaaaatatggaggtgatccttaatgtactgtgttggaaggatactcaataaattgacagttttgatttataaaaatttatgttagaaactataagaaaatgatttattctttttctctgcacctcactgtttgtcaaccagtg

SEQ ID NO: 323308 - DNA, 476 bp, Homo sapiens
actgctattatgattattgaataatttaattcaatttaggttctaattttttgcagtttccatatcctaagccaaataaatcaggtatccatctgatccattaatatactgtgcatatagactttttaaagctcttttttttacattgttttgcctctcaatacatctctcttcccactaattggtgagctcttttataacagggacattctcttgtatttggagtgtctcaaacagtgactaagaagcatacagtagctgttgaataaatatttgttcaaaagataaaagtamatttaaaataaaacattctctaatctcatttattgaaagaattgtgctttcattgaacagaaaaagctcacaaagcatttctattgcacttgtttctgacttaactagctctgtgattataacttcctttattgctctgttaagttctttgttcaagacacaaagttataaaaaatagcatt

SEQ ID NO: 323309 - DNA, 540 bp, Homo sapiens
gcattcagacactctgtgtctttgacaggataatttaaatttacatttaaagaaatattgataggtaagaacccactattgcctttttgagaattcttttcagttttgttactcatttgtccctttcttcctcccttgctatcttcctatgtaatttgttgatttattttagtggtaggctttgatttcttcactatatcttttgagtatttgccagggattatttcttcgtggttgccatgaaccttacataaaatattttagagttgtaagagtccatgttcaattgataacaacctaacttcagttgcatgcaaaattgctacacttttacttcccttatcaccacacagtaaattattgatgttacactttacatgcttctatgttacatatgcatttaaaattattgtagctatcataatttcaaaatacttgtttctttcaacttttatactagagttaaaagtgatttacayatcactatccagtattagaatactctgaatttactatatatttacatttaccagtgaattt

SEQ ID NO: 323310 - DNA, 530 bp, Homo sapiens
gttgcatgcaaaattgctacacttttacttcccttatcaccacacagtaaattattgatgttacactttacatgcttctatgttacatatgcatttaaaattattgtagctatcataatttcaaaatacttgtttctttcaacttttatactagagttaaaagtgatttacacatcactatycagtattagaatactctgaatttactatatatttacatttaccagtgaattttatacttttatgtgaatcttttttttttcttctctgtgtcatttctttggaacttgaagaactccctctagtatttcttgtaaagcaggtctagtagtaataaactctcagcttttatctgctgagaattttatatacagcctatggacatacagttgtatatgacaattctcttttctcttgctgctttcaaaattatctctttgactttggcttttgacaatttgattatagtgtgtctcaggacaatctattttgcattgattttgcttgtgtgaacttttaagcttcctgaa

SEQ ID NO: 323311 - DNA, 533 bp, Homo sapiens
ttaactacttttattatttttagcattttaatattcactagtaacagaatttagtacctaaaatattcttaaaaattaagtagagttttttacagctttgacctttcaaatatttcacattcaaatttgttggcaattctttctatccccacaggttactgaggccataaaaagaaaagggaattgcataactagtgaattagatgcattataggaaaaggccaaagtctatggctccataattcatggaaagcgtaagatatccaaatgtctagatgacaagatatgtactatgaggagtagtaaaaggaatatttttcatctttactattaacaatagatttgcaaaactcttggagttgctctagaattcaacctcaaaacagtgttttacataataatctaggattagaaaccaaggtgtgcatgttgctcagaggttgctgatgctgttcctacccctttggatgctgagtagacagcactgatgaatgttgccctataaagattgttcrgtaccagtgacagaagaa

SEQ ID NO: 323312 - DNA, 619 bp, Homo sapiens
tgattattaatatactctaaatgacacaatacacagttacaataaataacatcaattacattggtaacttatagatatgtgttgtttatttttcaaaacaggtataactcactgaagtgcaaaattattaatcctttaatatttcatctgtgytgttctatttaaatttaaattaacaacattaaattaaaattttagttcgttagtcatgctagccactattcttttacccagttgccacatgtggctagcagctaaaatattgattagtgcaggtgtagaacatgtccatcatctcagaaaggtttatcaaatcgtgctgttagttgttaataaccacaataagcatacaaaacaaagttgaaattattaaggaaatcaagagatttaaattccattattacttgcactcaattctcaaaatgaatttaaactattcataaaataatatatagcttaattttgagaatatgaaatgtacacacttctatgtataaataagcattacaaagtaaagattacttttttatactaaaattaaaatatgtcattaaacttgacttcatttcctttttgataatcattgaaatagagaattaaatgatgtttattaagactc

SEQ ID NO: 323313 - DNA, 576 bp, Homo sapiens
tagccattactttaaatgtttttattatgtcaatgacattattttaaaaagtgtttcagacccgttttggcagaaacatggatttccacrtgagtattaatatgataatagagcaataatgcatctatttaagagaatgcgttcagagacaatggcattcatactcacagagactaaatatttttgttttactgcttaaatacctgaggttgaagtgagttaaaattgatttttgtttggaaggatgtcctgatctccacatgcatacagataattggtcatgtgaacggaaggaacatattttgctcaagagctttgaaattgagttatttttatttgcctactaaacatctcattgaagcttaatgaggcaacagatctgccaaaaatctctgaaactgcaaatgaattcaaagattactgttagattatttgaatgttgctattgtcattcatctaacagttgtgaaatataaaagtgctactgtttctaattaccatgattagctacagatcatcttacattaacaatgggattactcagaatagggtaaaaaatatatatctggaaaaatg

SEQ ID NO: 323314 - DNA, 681 bp, Homo sapiens
ttagccattactttaaatgtttttattatgtcaatgacattattttaaaaagtgtttcagacccgttttggcagaaacatggatttccacgtgagtattaatatgataatagagcaataatgcatctatttaagagaatgcgttcagagacaatggcattcatactcacagagactaaatatttttgttttactgcttaaatacctgaggttgaagtgagttaaaattgatttttgtttggaaggatgtcctgatctccacatgcatacagataattggtcatgtgaacggaaggaacatattttgctcaagagctttgaaattgagttatttttatttgcctactaaacatctcattgaagcttaatgaggcaacagatctgccaaaaatctctgaaactgcaaatgaattcaaagattactgttagattatttgaatgttgctattgtcattcatctaacagttgtgaaatataaaagtgctactgtttctaattaccatgattagctacagatcatcttacattaacaatgggattactcagaatagggtaaaaaatatatatctggaaaaatgcaggtgcaggccactggamaatgagtgcaatacctctatttttaaaaatactcgtattcttaatataataacaactaccaatagattatgacaaaaaaggatat

SEQ ID NO: 323315 - DNA, 637 bp, Homo sapiens
cattcatacagagtatcttcaatttgtggatttcaaatgcaaamtagagacttcacattgcttagaaaatggtcctttgggatctaaacttattataattgaagtgtgaagtcctaattgtgttactttgtgtaatgtatcttctatatagatattactcaatgcctgcaaattcaagaagtgggaaatggagttggtataatgcaagggagatttatgctaagaaggttctgtgttgtcacgattaaaaattttccacacattatatgaatcctattgatcattgcaggaagcagaaaagtgtgctgttcattgattttctgtggctactgaatgcattaggtctgacacttttgatgggtaggcaggttttcaaaggaagttcagtgaagctaatcttagttcagaggaatattcacaatggaataagaaaccttgtaattgcaagagaaaatacaagagtgagaggactatattatgagccatatcagcataaaaatttgacaagagacactttccaggagaccataataaaacatatcaacgttttgaagctgtttttcacaaatgtggcaattattagataaattgggttttggctttttcacccttcagccaagacagtgaagcaaagcaa

SEQ ID NO: 323316 - DNA, 629 bp, Homo sapiens
aacgcattacaaggtacttatggtgatcagttctgagacagaatggtagaaatgagataaaatgtaaatgaagaaaaatgattcttaagtagcaaggtataatctaaattaccttctgtcaagctttaaaagacatacagaaagagctacataacctttatgctccacaaatttgtatgataagatttatttatttgtcttaaatgttgctgacaccccaaaggcaaatccctggaaatcaagagttatggctgcagatttttgcctctgtaaaatataaacaaatttagtgagagtggccattgaaartataaaccatggtctttattttcagtgatacagaaaaaaaaataaagctgtttttctctatttcatcatgttagatgctttatcttccagcaaaccaaacagtccgttcatgggttttgccttcacaactctcttcaggaatatgtgacccacgctgctaaaaagaactgcctgagactgggtaatttataaagtaaaggggtttagctaactcacagttccacattgctgggtggtgagtggtgctcaggaagcttacaatcatggtggaaggggaagcaaacatgttcttcttcacatggtggcaggagagagaagtg

SEQ ID NO: 323317 - DNA, 639 bp, Homo sapiens
ccttggctcatggccataccaatgcagcctcagcttccttcatcatatctccttctctgactccttctctgactttgacacttttgcctctctcttaggatctttctaattatattctgcccactttcataatccaggataatcttcccatctgatcactgtttatcatgtatgcaatgatccctttcccactttagctaacatattaacaggttttgggaaataggttgtgaacatctttgtggagtcactgttctgcctacaaactgtatgaaaaacatttcagttaattttcacaacctgattcaatakgtgctataccatgacagtgctgaggcttagaatgtgctagtgatttccccagtccccagcagagcagattcatatccagagatcatattaagaatctttatgtttatgtattttgccatctctgccaattgatattcaatgcccacaacagatcttaaagtctgccatgattttataaaatacatttagataatgaactattagcattacatccatttgggcttctattacccagaaaacacaaacctttgaaacttaaaccaaaacaactattaatattctacaaaatttgtgatttgaagtgagtaatacagatttgaataaatt

SEQ ID NO: 323318 - DNA, 563 bp, Homo sapiens
gacatagtccatttggttaattttatcctacttatttaatgtattctagcgcttataacagttcctggcccatgagtatatgctaaataaatgtttagatgagtaaatacagtattacttgagactattatattaaagtcctagaatttatttattaacatttatacattctaaccacttgtacaaatagtaaaatagtaaaataatagtstctttcaataacttagaaaaagcataaaatatttacatacaatccacatattaaaatataagaaacaaaagatactgcgagaagcatagaataaaacaaaataacttggaatatactttacagcataaatgaatactgggaactacaacaaaactatatgtaattttaaaaagccttgtcaatgtcatgtaccaccccattgacaatagatatatcataagcttacaggaatatttaaggtaaaataaaatgtccccatattcatacatctttgaagatgaggaattactaaaaagtaaaaatttaatatcttcaggacaaatagtttcaatcaccaaaacaaaggcaatct

SEQ ID NO: 323319 - DNA, 595 bp, Homo sapiens
actggaaacttgtatttttatacttatataatagatcatactcataatcagatttcttcatgtttattcttccctcatatttatagttaaatgctttggtaactaactaaattagttaccaaagttcttattacttcatgggcagaagtccattactttctataatgaaacttctgtattttcgctmttttcttccttttttatctctagcactgacactctgctttcctgcataataccttatggcttgagattcttcatgattccaagttcttcatgatttcagctttctgtcatagatgtctttatgtctctcagcttcaatgcactctaacttgtattgccttttatcttcttttacacattaaatcttactacttatgacagaacatccctcttagagcatttaacccatgttaccttatagtctaccagacaggttagacagagatagatgttatttgaattattgtaatctgtgcagcacagcaacatggccatttccctttagatagttgctccaggcatgtcaggcattcaataaattctgctctaatatgtgggcagtactatttccagaaaatataagccacaa

SEQ ID NO: 323320 - DNA, 476 bp, Homo sapiens
tcgtaacagaaacttaggagtttatcaaaataatttatggatccaaaagtgcrttcaaaactaaaatatttttaaattagtaaattgagaattagaagggtagaattgatgaagacatacaatataacatttttcggaggatacagatttctaaaatttcattttagatcaacttttcatagaaagatgttccactgcaatttcaaatgtggtacttcactcaatttatagaataaaaggctttaaattaaaatactacctctttctttaacttccaagatcacttattgcaggcttttcagaatgttccttagagaatacctctcttgctgctaaatatattttatttaacttgcccttcaataggatacagacacaagatggtccttttgcaataactgtatagatctttactgattatttattttgaataaggtgctgtgaaattttgaatgttgtatatcaacaaagaaatg

SEQ ID NO: 323321 - DNA, 476 bp, Homo sapiens
tcgtaacagaaacttaggagtttatcaaaataatttatggatccaaaagtgcgttcaaaactaaaatatttttaaattagtaaattgagaattagaagggtagaattgatgaagacatacaatataacatttttcggaggatacagatttctaaaatttcattttagatcaacttttcatagaaagatgttccactgcaatttcaaatgtggtacttcactcaatktatagaataaaaggctttaaattaaaatactacctctttctttaacttccaagatcacttattgcaggcttttcagaatgttccttagagaatacctctcttgctgctaaatatattttatttaacttgcccttcaataggatacagacacaagatggtccttttgcaataactgtatagatctttactgattatttattttgaataaggtgctgtgaaattttgaatgttgtatatcaacaaagaaatg

SEQ ID NO: 323322 - DNA, 589 bp, Homo sapiens
gcctctcttttcttgctttttattctcactgtctctctcttctcattggttcattttttttctttttcctccctcttactacttctgtctctttctyattgaaacataatgagatagaaataatttctaatagctcatattgaggaaatgattaatgcaacatcttaaaaataaatatatacattatatacatttcccagggctgccataggaaagtaccacaaattaggtggcttaaaacgatggaaatgtattgtctcacgtttctgggggctttaaatctcaaatcaaggtgtcagctggaccatgtttctctgaaacctctagaagagagttccttcttgcattttagcttctgataattgtcaacagttttcacagtctttgacattctttaacttgaagatgggtcacttcaatctctgcctctgttgtcacttgacattctccctgtgtgtatttctaattttcttataagtacaccaatcacactaaattaaggcccaccctactccagtatgatctcatcttcactaattacatatgcaaagattcattttctaaataagtcacattcagaggttctggg

SEQ ID NO: 323323 - DNA, 598 bp, Homo sapiens
ggcctgtatcagtagccaagtagccagggattcatcagggaaatagaaccagcaggaaaatttaaagaaaaaatatatgtatttatatgtatatatgtttatatatatttatatgtatacatatatttatatatatatatagagagagagaaacatagagagagaaaaaacagagagagagagagacttattgcaaggaattgacttacatgagttggaggctggctaggcaagtctgaaattcatagatcaggctatgagaaaggacaggctggaaactctggtaggagctgatgctgcagcccacaggaagatcttctgagggaaatcctcagttctgcacagtttaggtttcctgaagatagatgcttggaaagcaactattttatgaataaatgcaaataaaagcccatagcagctgtagaagtccaagacctaaataactcacttgaaacaaatatgctttgtgatgaaacttcttaaatgtttggastgatgatcctaactctaacctgaaacttttttgctaatcctttccagaaaactactgctaagaaaggagtatgtaaataatatatgtgaagggttgataacattc

SEQ ID NO: 323324 - DNA, 585 bp, Homo sapiens
catcttaattatccaggatttttttttgtcatgcttctttacatttacaaaggtttttctggcttttctttttgacattgtttatttaacaggtgctttttaataaggaaaaaatataaaatattaagttaaaattagacatcttgaggacaaaatatcaagataaaagctataacattactaattgtccctggatatgaactgttttggtasctttatttaatatgtgaggtttgcaaactatgttctttttctctcttacgttggcttgatgactttattttctttagagaaatgagatgttgcaatacagcatatcacaacattgctctatccatatcatattaaccagcatgcaattgcatcttacctattacacattttcaaacaaaattatattccacttccaatgccaaatgttagaatatcctccacttgtccttttcaagtaggagggaaaaaacagaaaatatcaaaatatcttcaaaaaacaatctccagtaagaaagccagtgtctccttaaaatagtaaaacaaaatttatatatttcctatttagggtacagttaaagatgccttacataa

SEQ ID NO: 323325 - DNA, 550 bp, Homo sapiens
ttatacagctggctatagcagaaaagatatttgagtcttcctctttccttttccagagggtatgttggagagtctgatagtgactctatggcacacctggatttaggaagtatgtatatacttttgccttgtttccaaggaatatatttgaaattgtaccctaactagtcyacagattttttttgaggtgaccctggatccattcagattaaatgatttgctgtcattgatattctgcaatgtatgtatacacatgggaaaaaagagttgtcatatttgaacagtaaaaaaaacagcaactaagccctggacatatatgtgcatatatagggagattatatgtatatctccacatacacattgtatgttatataaatataagtatatatattttatatatctatgtgcatgtgtgtgtatatgtatttaattggtttgaatgaacatttagttcacagagggcttatgtggtctaaatttctttaaaggtagcatgtaggtggtagtttttcagtttcttatctcaaaataaaacctgaaattttaaaaa

SEQ ID NO: 323326 - DNA, 605 bp, Homo sapiens
ggttctgtctaggcagcaggcaaggtgaacccagtgggtggttacaaatttgggggttcctccagggttgcccttgtggctacctgcccatggtttggtagcccccatacagtgacagatccagaggccagcccaagtggccacctagttctcttggactgggggctgacgctggtccagtgtcttctggcaaggcgctgcccacccaatgtgcatggacttaattgcaacagagaaatggacttggggagacatcccacaactgtagttccatggtggggtgtctatctatagccccatgatgaggtgtctatctgtagctctaccacggggtgtctgtctgtagccccattatggaatgtctgtmtgtagccccagccaccatggagtggctatacctgtagtcctaatatggtttggttctgtgtccccacccaaatttcatctcaaattgtaatccccatgtgtcaagggtgggacctgtaatcctcatgtgttgagggagggaggtgattggatcataaggtcggtttcccccatgcttttctgttgataatgagtgagttctcacaagatctgatgattttataagtgacagtttctcc

SEQ ID NO: 323327 - DNA, 605 bp, Homo sapiens
ggttctgtctaggcagcaggcaaggtgaacccagtgggtggttacaaatttgggggttcctccagggttgcccttgtggctacctgcccatggtttggtagcccccatacagtgacagatccagaggccagcccaagtggccacctagttctcttggactgggggctgacgctggtccagtgtcttctggcaaggcgctgcccacccaatgtgcatggacttaattgcaacagagaaatggacttggggagacatcccacaactgtagttccatggtggggtgtctatctatagccccatgatgaggtgtctatctgtagctctaccacggggtgtctgtctgtagccccattatggaatgtctgtctgtagccccagccaccatggagtggctatacctgtagtcctaatatggtttggttctstgtccccacccaaatttcatctcaaattgtaatccccatgtgtcaagggtgggacctgtaatcctcatgtgttgagggagggaggtgattggatcataaggtcggtttcccccatgcttttctgttgataatgagtgagttctcacaagatctgatgattttataagtgacagtttctcc

SEQ ID NO: 323328 - DNA, 605 bp, Homo sapiens
ggttctgtctaggcagcaggcaaggtgaacccagtgggtggttacaaatttgggggttcctccagggttgcccttgtggctacctgcccatggtttggtagcccccatacagtgacagatccagaggccagcccaagtggccacctagttctcttggactgggggctgacgctggtccagtgtcttctggcaaggcgctgcccacccaatgtgcatggacttaattgcaacagagaaatggacttggggagacatcccacaactgtagttccatggtggggtgtctatctatagccccatgatgaggtgtctatctgtagctctaccacggggtgtctgtctgtagccccattatggaatgtctgtctgtagccccagccaccatggagtggctatacctgtagtcctaatatggtttggttctgtgtccccacccaaatttcatctcaaattgtaatccccatgtgtcaagggtgggacctgtaatcctcatgtgttgagggagggaggtgattggatcataaggtcggtttcccccatgcttttctgttgataatgagtgagttctcacaagatctgatgrttttataagtgacagtttctcc

SEQ ID NO: 323329 - DNA, 640 bp, Homo sapiens
gaatgaaatttctgtgttgctttgtgtccttaagagcttaaccttgtgaccatgtgggacactttctcttggttgccatcatccaccagaagatgggaattgccaccagaagactagaattttgagtttgtatcatggttagccctaaaaattcttgggcagttaaaagcctttgcaaattgtctgctctagactccttctgggaacagcaaaagaaactgctcagtgctatttagcttagtagttaaggctttgtcctttgaccatggcagcccaggttcaattcttggcttcaggattgatttctttctggtttgttatttgtgtaactttgccatttactgatattttttcttcccctcatggatagcttctgatatcctgtctttatttttcctttcccgaactacctttggggagattctaattcttttaaaaagaaactgcttrccatcactttgagacatcttatgcgttcatggttaagttacaaccttatttaacactttttattaatttaatgtaggttgttacctgtggtagaagtcaaaagccagaaatattggctttcctggctggagtctggtaataagatttaaaaagactttttttttttttttaaagagctctatggttaaaa

SEQ ID NO: 323330 - DNA, 536 bp, Homo sapiens
gtaatccaattaaaaaactggcacataaaaaatcttacaactactgaatcttttstctgtctatgtatctatatgtgttgtgggtgagctctgattgtcttagaaaataaacacaagaaaatagaaactttttaatgtctttttgttccttgactttagcaatctcttggaaataaagacagttttaaagattattgttaaaacaacaatgtcttcaacatttagacatttgctttaaattaggtaagatattaggtttgctaaatgcttgaaggtcataaactgcttctttgacttttgaaaattgtttcacttacctaaggtctgaggacatgtggagttaaccatgccccctagctatgctgaaaaaagtcagaccttatctgcacttctatctgatgtcataggctccacaccttgtacataattaaaacaatatcacttaccaggtttttcaccaaaaaatgaaaattgctaaaagttaacaatgtaacatgtactcgggactactgaaaaaacatttttatatgcacgat

SEQ ID NO: 323331 - DNA, 606 bp, Homo sapiens
aattgttgtatgctacagaagtaacaaattcctagtctattgtaggttttttagtggctctcctaagacttttgtctcagacaattttgtcgtgctttgattcttttcagaaggcagtttataatcagatgtaggactctgatgggtactcttaaatgcagatctctgataactttaaaaattgtgctattagaatagaggagaaaacaaaacttctaggactgtcgtgaagaggggatgtgttaaacattgctaayctttttgccttcagagtcaagaaaatttatttcttttgcgctatttacttttactaagtgaaaatagtatactcctgggagcaaaatttggaacatattgctttccctctacctgatttctccagaatttagaaactgtttgtgagtattctcaacttatggctgtatagttatttgcataagtgcaataagaatctgttttcttttgtaatacatcacaattagagaaactggttattttaccaaggctttgattggaatggcatgctttctttaaataaacaaatttgacttctagagccaataaaagccccttggaaaatctggcctaataccttgtctacacaaa

SEQ ID NO: 323332 - DNA, 532 bp, Homo sapiens
acaatgaatataagatatgcaatggatttacagtatacaatagaacataacttgccaataaaataaactacagctatatggaaaaacttggatttatatctcaaatataatattaaacaaaagaagccagatattcattggattattatactcataaaaacttcaaaaatatataaaactaatcaacgtggttagaagtcaaaatcaagattattttaatggttggagacaattgttaatcactaagagtggtgcgaggggaaagaaacttgatcatgagaagtgttaaaattttaatcttagaagtgtttatatagctgttctatgtcaaaatttactgttgctgtagaacaaatctatgcacttttatatgtcttatatgtcaagaaacagaaaatgagatatatagacagaatttgaaaactaaaagakataaatgataaaatttctcaaaacccaacttggagatttaaggagatctgaaaatagctaaattgaggttaagaaacagaaaaatcgaaggagaaagccc

SEQ ID NO: 323333 - DNA, 579 bp, Homo sapiens
caaagctattatgcatagcttcatgctttcattgacatattttggactgacatattttgtattagatatatttatgacaggacatgtgggtaagttccaaaaaaccttataaaatattctaaagcttcaaaatttctkcatttacatacttgcatgaaactacagtgttacatgtgtgggtggattccaaccagatataagggcaagatcttccataaatttacacaggcatttaagatgatcaaattatcaaagcattcagttatagccatacatctatttttttgtaatttttataattttaagagtatttataaatagtattaaagttattaaagtttaaataaaatatgaatatataccttctttatgttagcttagcaactgattattgtattgaatttttaaaaatctagactactttattcatcttctagggctgctgtaacaaagtttcataaactggatggcttaaaccagtggtccttaacattttttgggtgggtgaccaggaaccagttttgtggaagataacttttttccagggggagaaggcagggaagtggtttcaggatgaaa

SEQ ID NO: 323334 - DNA, 579 bp, Homo sapiens
caaagctattatgcatagcttcatgctttcattgacatattttggactgacatattttgtattagatatatttatgacaggacatgtgggtaagttccaaaaaaccttataaaatattctaaagcttcaaaatttctgcatttacatacttgcatgaaactacagtgttacatgtgtgggtggattccaaccagatataagggcaagatcttccataaatttacacaggcatttaagatgatcaaattatcaaagcattcagttatagccatacatctatttttttgtaatttttataattttaagagtatttataaatagtattaaagttattaaagtttaaataaaatatgaatatataccttctttatgttagcttagcaactgattattgtattgaatttttaaaaatctagactactttattcatcttctagggctgctgtaacaaagtttcataaactggatggcttaaaccagtggtccttaacattttttgggtgggtgascaggaaccagttttgtggaagataacttttttccagggggagaaggcagggaagtggtttcaggatgaaa

SEQ ID NO: 323335 - DNA, 535 bp, Homo sapiens
gttggttactccataaccagtggagtaaatacaaggcaataaaaacaaatggtgtcacaaacaaggtcatgcaaccatgaccaagaacatctcatcagctttaaataactgctscttgggtaactatctagttctatgatatggcaaaggctaaggcagaactgccaattgctagagggtttgcttttttcctgttatatactctgttgactttgctaaatattaccatttcttctcaccttaaaatgctcttctgaggcaagatgataattgttaagtgactatacgctaacatgatatatgtccagattcagcttggctttggcaggtggtctctgaggtttcctgctgtaacaacacagtctaactggtcagtgcttgaattccacttaccaataataaggctacagctctctggtcactgcctcagcttggtgaccttcactggatgcctgagacagtcatatgaacattgtgattgtgcacttctgggctgggaagatcatgttaaagtttgcagaaagaaaggagacag

SEQ ID NO: 323336 - DNA, 535 bp, Homo sapiens
gttggttactccataaccagtggagtaaatacaaggcaataaaaacaaatggtgtcacaaacaaggtcatgcaaccatgaccaagaacatctcatcagctttaaataactgctccttgggtaactatctagttctatgatatggcaaaggctaaggcagaactgccarttgctagagggtttgcttttttcctgttatatactctgttgactttgctaaatattaccatttcttctcaccttaaaatgctcttctgaggcaagatgataattgttaagtgactatacgctaacatgatatatgtccagattcagcttggctttggcaggtggtctctgaggtttcctgctgtaacaacacagtctaactggtcagtgcttgaattccacttaccaataataaggctacagctctctggtcactgcctcagcttggtgaccttcactggatgcctgagacagtcatatgaacattgtgattgtgcacttctgggctgggaagatcatgttaaagtttgcagaaagaaaggagacag

SEQ ID NO: 323337 - DNA, 535 bp, Homo sapiens
gttggttactccataaccagtggagtaaatacaaggcaataaaaacaaatggtgtcacaaacaaggtcatgcaaccatgaccaagaacatctcatcagctttaaataactgctccttgggtaactatctagttctatgatatggcaaaggctaaggcagaactgccaattgctagagggtttgcttttttcctgttatrtactctgttgactttgctaaatattaccatttcttctcaccttaaaatgctcttctgaggcaagatgataattgttaagtgactatacgctaacatgatatatgtccagattcagcttggctttggcaggtggtctctgaggtttcctgctgtaacaacacagtctaactggtcagtgcttgaattccacttaccaataataaggctacagctctctggtcactgcctcagcttggtgaccttcactggatgcctgagacagtcatatgaacattgtgattgtgcacttctgggctgggaagatcatgttaaagtttgcagaaagaaaggagacag

SEQ ID NO: 323338 - DNA, 535 bp, Homo sapiens
gttggttactccataaccagtggagtaaatacaaggcaataaaaacaaatggtgtcacaaacaaggtcatgcaaccatgaccaagaacatctcatcagctttaaataactgctccttgggtaactatctagttctatgatatggcaaaggctaaggcagaactgccaattgctagagggtttgcttttttcctgttatatactctgttgactttgctaaatattaccatttcttctcaccttaaaatgctcttctgaggcaagatgataattgttaagtgactatacgctaacatgatatatgtccagattcagcttggctttggcaggtggtctctgaggtttcctgctgtaacaacacagtctaactggtcagtgcttgaattccacttaccaataataaggctacagctctctggtcactgcctcagcttggtgaccttcactggatgcctgagacagtcatatgaacrttgtgattgtgcacttctgggctgggaagatcatgttaaagtttgcagaaagaaaggagacag

SEQ ID NO: 323339 - DNA, 552 bp, Homo sapiens
gtgggcatttaggttgattccatgtctttggtatggaaaatagtgttgtaatgaatatatgcatgcatatgtttttatggtagaatgatttacatttctttgtgtatatacacattaaaggtattgctcagtcaaatagtaattttgttttaaggtttttttcttaraataacaaatatgatagaaatggagaagaaatgaatggttaggagtgtctgggagaatgtgagtgtggtcataacacaacacaaagttgtgatgacactgttctatatcttgactgtggtggtggctatatatactaacacatgttataaaattgcataagattaacacacacaaatgagtctctataagactgagaaaataagattgctggattttgtcaaattatgtgacgttgtgtcaacgtcagtttcctgggtgtgatactataatttggcaagatattaacattggtataaacagggtaaagaatacatggtatatctctattatttcttacaaccagatgtgactctcaggtgtctcaaaatgaaaaattgagttaaa

SEQ ID NO: 323340 - DNA, 552 bp, Homo sapiens
gtgggcatttaggttgattccatgtctttggtatggaaaatagtgttgtaatgaatatatgcatgcatatgtttttatggtagaatgatttacatttctttgtgtatatacacattaaaggtattgctcagtcaaatagtaattttgttttaaggtttttttcttaaaataacaaatatgatagaaatggagaagaaatgaatggttaggartgtctgggagaatgtgagtgtggtcataacacaacacaaagttgtgatgacactgttctatatcttgactgtggtggtggctatatatactaacacatgttataaaattgcataagattaacacacacaaatgagtctctataagactgagaaaataagattgctggattttgtcaaattatgtgacgttgtgtcaacgtcagtttcctgggtgtgatactataatttggcaagatattaacattggtataaacagggtaaagaatacatggtatatctctattatttcttacaaccagatgtgactctcaggtgtctcaaaatgaaaaattgagttaaa

SEQ ID NO: 323341 - DNA, 552 bp, Homo sapiens
gtgggcatttaggttgattccatgtctttggtatggaaaatagtgttgtaatgaatatatgcatgcatatgtttttatggtagaatgatttacatttctttgtgtatatacacattaaaggtattgctcagtcaaatagtaattttgttttaaggtttttttcttaaaataacaaatatgatagaaatggagaagaaatgaatggttaggagtgtctgggagaaygtgagtgtggtcataacacaacacaaagttgtgatgacactgttctatatcttgactgtggtggtggctatatatactaacacatgttataaaattgcataagattaacacacacaaatgagtctctataagactgagaaaataagattgctggattttgtcaaattatgtgacgttgtgtcaacgtcagtttcctgggtgtgatactataatttggcaagatattaacattggtataaacagggtaaagaatacatggtatatctctattatttcttacaaccagatgtgactctcaggtgtctcaaaatgaaaaattgagttaaa

SEQ ID NO: 323342 - DNA, 552 bp, Homo sapiens
gtgggcatttaggttgattccatgtctttggtatggaaaatagtgttgtaatgaatatatgcatgcatatgtttttatggtagaatgatttacatttctttgtgtatatacacattaaaggtattgctcagtcaaatagtaattttgttttaaggtttttttcttaaaataacaaatatgatagaaatggagaagaaatgaatggttaggagtgtctgggagaatgtgagtgtggtcataacacaacacaaagttgtgatgacactgttctatatcttgactgtggtggtggctatatatactaacacatrttataaaattgcataagattaacacacacaaatgagtctctataagactgagaaaataagattgctggattttgtcaaattatgtgacgttgtgtcaacgtcagtttcctgggtgtgatactataatttggcaagatattaacattggtataaacagggtaaagaatacatggtatatctctattatttcttacaaccagatgtgactctcaggtgtctcaaaatgaaaaattgagttaaa

SEQ ID NO: 323343 - DNA, 566 bp, Homo sapiens
tacaatataaaattatttactatattaagggccaataaaatataacgtatctgtattagcagggtgtggtggtgagcacctgtagttccaactactcaggagaatataaaccatgttgagcctgggcaacawaaaacaggacatgaaaccttgtctgtacaaaaaaattttttaaattagctaagtatggtggcatgtgcctgtagtcccaggtacttggcaggctgatacaggaggatctcttgaacccaggctatcaaagcaacagaataaaaccctgcccagatgcctcttgacttaagatggtgttgctgcttgataaatccattgtaaagtctaaaaagctttaagttgaaccatggtaagtcggggattgcctgtaataacaactctttgcattctctttaagaaaacagaagatgtagaagcaatccctactcatcttatgagtccataattgacttaataccagaattatataacaatattaaaacaataaaataaattcatggaccaatattcctcataatcatagacacaaaattcttaacaaaacagaggtgaaa

SEQ ID NO: 323344 - DNA, 566 bp, Homo sapiens
tacaatataaaattatttactatattaagggccaataaaatataacgtatctgtattagcagggtgtggtggtgagcacctgtagttccaactactcaggagaatataaaccatgttgagcctgggcaacaaaaaacaggacatgaaaccttgtctgtacaaaaaaattttttaaattagctaagtatggtggcrtgtgcctgtagtcccaggtacttggcaggctgatacaggaggatctcttgaacccaggctatcaaagcaacagaataaaaccctgcccagatgcctcttgacttaagatggtgttgctgcttgataaatccattgtaaagtctaaaaagctttaagttgaaccatggtaagtcggggattgcctgtaataacaactctttgcattctctttaagaaaacagaagatgtagaagcaatccctactcatcttatgagtccataattgacttaataccagaattatataacaatattaaaacaataaaataaattcatggaccaatattcctcataatcatagacacaaaattcttaacaaaacagaggtgaaa

SEQ ID NO: 323345 - DNA, 566 bp, Homo sapiens
tacaatataaaattatttactatattaagggccaataaaatataacgtatctgtattagcagggtgtggtggtgagcacctgtagttccaactactcaggagaatataaaccatgttgagcctgggcaacaaaaaacaggacatgaaaccttgtctgtacaaaaaaattttttaaattagctaagtatggtggcatgtgcctgtagtcccaggtacttggcaggctgatacaggaggatctcttgaacccaggctatcaaagcaacagaataaaaccctgcccagatgcctcttgacttaagatggtgttgctgcttgataaatccattgtaaagtctaaaaagctttaagttgaaccatggtaagtcggggattgcctgtaataacaactctwtgcattctctttaagaaaacagaagatgtagaagcaatccctactcatcttatgagtccataattgacttaataccagaattatataacaatattaaaacaataaaataaattcatggaccaatattcctcataatcatagacacaaaattcttaacaaaacagaggtgaaa

SEQ ID NO: 323346 - DNA, 566 bp, Homo sapiens
tacaatataaaattatttactatattaagggccaataaaatataacgtatctgtattagcagggtgtggtggtgagcacctgtagttccaactactcaggagaatataaaccatgttgagcctgggcaacaaaaaacaggacatgaaaccttgtctgtacaaaaaaattttttaaattagctaagtatggtggcatgtgcctgtagtcccaggtacttggcaggctgatacaggaggatctcttgaacccaggctatcaaagcaacagaataaaaccctgcccagatgcctcttgacttaagatggtgttgctgcttgataaatccattgtaaagtctaaaaagctttaagttgaaccatggtaagtcggggattgcctgtaataacaactctttgcattctctttaagaaaacagaagatgtagaagcaatccctactcatcttatgagtccawaattgacttaataccagaattatataacaatattaaaacaataaaataaattcatggaccaatattcctcataatcatagacacaaaattcttaacaaaacagaggtgaaa

SEQ ID NO: 323347 - DNA, 548 bp, Homo sapiens
tatggccactcatacaacaatcacagagtagagcttgtgaacagatgcatggactgctaaccctaaaatattttctatctagctcattgcagaaaacgtttgctgaccccttatgtataaaattataattataattaatttttgtcttttaaccttgtatcctgtgatcttgctaaagttactaattaattctagtagttgttttgtagattcccaggggaagtgttgactctactgagggaagaaaggtattagacaacgaagtagctactgcacttaggaaacacatttcagcagtttccgggacaagatgtgtaggacttgatcccaagtgggttaaacaaarggcagtagagcataaagtttcataatgcaatatatataaatatgaggacactctccaatgatgcgggagttaagtctttgataaagacctcaagagatggaactaatatattgcaagaacagatattacgctcctggcatctgtgtgggcattagttctctgcccccaagttctaagtgataatgccattaagcccataaaa

SEQ ID NO: 323348 - DNA, 548 bp, Homo sapiens
tatggccactcatacaacaatcacagagtagagcttgtgaacagatgcatggactgctaaccctaaaatattttctatctagctcattgcagaaaacgtttgctgaccccttatgtataaaattataattataattaatttttgtcttttaaccttgtatcctgtgatcttgctaaagttactaattaattctagtagttgttttgtagattcccaggggaagtgttgactctactgagggaagaaaggtattagacaacgaagtagctactgcacttaggaaacacatttcagcagtttccgggacaagatgtgtaggacttgatcccaagtgggttaaacaaagggcagtagagcataaagtttcataatgcaatatatataaatatgaggacactctccaatgatgcgggagttaagtctttgataaagacctcaagagatggaactaatatattgcaagaacagatattaygctcctggcatctgtgtgggcattagttctctgcccccaagttctaagtgataatgccattaagcccataaaa

SEQ ID NO: 323349 - DNA, 553 bp, Homo sapiens
ttcccaggggaagtgttgactctactgagggaagaaaggtattagacaacgaagtagctactgcacttaggaaacacatttcagcagtttccgggacaagatgtgtaggacttgatcccaagtgggttaaacaaagggcagtagagcataaagtttcataatgcaatatatataaatatgaggacactctccaatgatgcgggagttaagtctttgataaagacctcaagagatggaactaatatattgcaagaacagatattacgctcctggcatctgtgtgggcattagttctctgcccccaagttctaagtgataatgccattaagcccataaaaaatggtgcatatacagtgtttttttttcttttcttytcttttttttttttttttttttttaacacagctgaggaacatgaagcttgggaagcctgccttgtatagaaaatggttagcaggcctgttcattatccccaagagaaaaactgtatcattcatcaatggtgtccactgcaaatgcagcactgtcaaaagtccagagtgcaaaggtttct

SEQ ID NO: 323350 - DNA, 514 bp, Homo sapiens
ttagcactaaggaaatcaagaaatttagtattcagaaaggaagaggtggaggaaaaatgagatcaaagaccactgtaatggtattctcagatgcctgtcackttaatcattgagaaaaagaggaaaatacgtagatatagtatttttactttttatacaaaataacatgcataactttagtgacaaactttctagaactcaaatttgagattcaagcaaaatgtgtcacaaaactctttactaatgaagatactgttaacttctcagcatacaaaggttatatgtgacactttttaatgatgaaaacctctgaatttgaaatagctgttcctcaatttaattaaaaggaatctttcctagacctttgaaggaacagtcagcaaaatcattagccagtacattagcaggatgaaagatattttttttcattagacgtaagaaacattagagtttgtaacattgctaagacaactgtaccattttaaaaagagaatcatggagcaatgctgttaat

SEQ ID NO: 323351 - DNA, 577 bp, Homo sapiens
tcatgttgaattgtaatcctcagtgttgaaggagggacctggctgaaggtgattggatcatgctggtggatttccccattactgttctcattagagcgaatgagctctcacgagatctggttgtttaaawgtgtgtaacacctcccccttcactctctctcctgctctggccatgtgaatactgtgcttgcctccccttcaccttctgccatgattgtaagtttcctgaggccatccaagccatgtgtcctgaacagcctgtggaactttgagccaatgaaacctcttttcttcatgtactactcagtctcaggtagttctttatagtaatgcgagactggaccaatacacaggttaaattgctgacagggcatatggaaatgttctcctctatcacttaaagataaatgaaaacaagagaaggaagcaactcccaaatagtaaggagaatgtgaggaaagtgaacagcaaaattgagatgttgcgttaccagtaacaacaataaagaatagccacaggctcagaagagacttgaatcagaaattagaggtgatctttctgcagagatctgaaggga

SEQ ID NO: 323352 - DNA, 596 bp, Homo sapiens
aattaaacaacatataattaaatctcaagataggacagtccccacccatgcatacacatgtattcagaattcatagaacacaaacacaattacttctcttataatggctttttcagacatcagagagcatttctcatacagtcttayggatttcagcacaggtattatgagtttatcatacagatgaaaaatgctattatatgagcatgttctttgtgttactagtctctccagtgcagtttctcttgtgggacaaaaataacttggatggttttaaaaattaaaaatctgaaccaaataacaaggaaataaggcaatacaagccagggacaatattttcttaaaactatcttcctgggttttaattgtattttcctatcaggtaatacgcatccagcgagaatccataataggtatttcaaagagaggaaatttaatacagagaactgattacatagctgttggaagttgaaagaatcaacagagtaagtggaagaatttggggattaataacagcaagaaacagcttaaatcaccacagctgaagaaatcagagatgtgaatgttgtatttggggatttcttgtggtccttgtt

SEQ ID NO: 323353 - DNA, 596 bp, Homo sapiens
aattaaacaacatataattaaatctcaagataggacagtccccacccatgcatacacatgtattcagaattcatagaacacaaacacaattacttctcttataatggctttttcagacatcagagagcatttctcatacagtcttatggatttcagcacaggtattatgagtttatcatacagatgaaaaatgctattatatgagcatgttctttgtgttactagtctctccagtgcagtttctcttgtgggacaaaaataacttggatggttttaaaaattaaaaatctgaaccaaataacaaggaaataaggcaatacragccagggacaatattttcttaaaactatcttcctgggttttaattgtattttcctatcaggtaatacgcatccagcgagaatccataataggtatttcaaagagaggaaatttaatacagagaactgattacatagctgttggaagttgaaagaatcaacagagtaagtggaagaatttggggattaataacagcaagaaacagcttaaatcaccacagctgaagaaatcagagatgtgaatgttgtatttggggatttcttgtggtccttgtt

SEQ ID NO: 323354 - DNA, 596 bp, Homo sapiens
aattaaacaacatataattaaatctcaagataggacagtccccacccatgcatacacatgtattcagaattcatagaacacaaacacaattacttctcttataatggctttttcagacatcagagagcatttctcatacagtcttatggatttcagcacaggtattatgagtttatcatacagatgaaaaatgctattatatgagcatgttctttgtgttactagtctctccagtgcagtttctcttgtgggacaaaaataacttggatggttttaaaaattaaaaatctgaaccaaataacaaggaaataaggcaatacaagccagggacaatattttcttaaaactatcttcctgggttttaattgtattttcctatcaggtaatacgcatccagcgagaatccataataggtatttcmaagagaggaaatttaatacagagaactgattacatagctgttggaagttgaaagaatcaacagagtaagtggaagaatttggggattaataacagcaagaaacagcttaaatcaccacagctgaagaaatcagagatgtgaatgttgtatttggggatttcttgtggtccttgtt

SEQ ID NO: 323355 - DNA, 596 bp, Homo sapiens
aattaaacaacatataattaaatctcaagataggacagtccccacccatgcatacacatgtattcagaattcatagaacacaaacacaattacttctcttataatggctttttcagacatcagagagcatttctcatacagtcttatggatttcagcacaggtattatgagtttatcatacagatgaaaaatgctattatatgagcatgttctttgtgttactagtctctccagtgcagtttctcttgtgggacaaaaataacttggatggttttaaaaattaaaaatctgaaccaaataacaaggaaataaggcaatacaagccagggacaatattttcttaaaactatcttcctgggttttaattgtattttcctatcaggtaatacgcatccagcgagaatccataataggtatttcaaagagaggaartttaatacagagaactgattacatagctgttggaagttgaaagaatcaacagagtaagtggaagaatttggggattaataacagcaagaaacagcttaaatcaccacagctgaagaaatcagagatgtgaatgttgtatttggggatttcttgtggtccttgtt

SEQ ID NO: 323356 - DNA, 565 bp, Homo sapiens
tcgtagcacatagcagagtatagaagggtaagggaatggctgagaggcaatatgtgaaaaatcaacatataatcaatacttttatctataatatgtaaataactgacatacacatttttcacacaatctgtctctccaaatactgaggcaagaagttcaaatcccatagcttgatgtacagaaatttaaatcatatagttcttaactatttcttcattaggtacttcmactcttacgataaccttatcaaggtcaaattttctttatacaaattttacctgctgagagaatattagatatcattagaaaagaagccattaaaatagataaatttacaagtaactcatttagataatttaaaaataaaattttgaattcaccacagaatgtcatttttttcattttttaattcaggaagtaaaatataaattgttttagctattcttcagtaaaagtaaatcaaatagcttttgagtctaatttcgtgtacaaatatgttagatatttccaaataaatttgtctttaaaataatttatgttgtagtaattttttgaagtactacgc

SEQ ID NO: 323357 - DNA, 565 bp, Homo sapiens
tcgtagcacatagcagagtatagaagggtaagggaatggctgagaggcaatatgtgaaaaatcaacatataatcaatacttttatctataatatgtaaataactgacatacacatttttcacacaatctgtctctccaaatactgaggcaagaagttcaaatcccatagcttgatgtacagaaatttaaatcatatagttcttaactatttcttcattaggtacttcaactcttacgataaccttatcaaggtcaaattttctttatacaaattttacctgctgagagaatattagatatcattagaaaagaagccattaaaatagataaatttacaagtaactcatttagataatttaaaaataaaattttkaattcaccacagaatgtcatttttttcattttttaattcaggaagtaaaatataaattgttttagctattcttcagtaaaagtaaatcaaatagcttttgagtctaatttcgtgtacaaatatgttagatatttccaaataaatttgtctttaaaataatttatgttgtagtaattttttgaagtactacgc

SEQ ID NO: 323358 - DNA, 506 bp, Homo sapiens
tgtcttctcatatttctgtaagtctggagactagaagttcaagatcaaggtmatagtgatcttgaggctggtttgttctgagggctgttggggaaggaactgctccaggtctctcctcttggcttataggggacatcttcatgttcaaaaagtgctctccctatatcttcacatcatctttcttctatatatgtctgtgtccaaatttcctttttttgtgatcacaccaagtatattgaattaggacctatctcaatgacttcaacttaactgaattagctctgtgaagaccctgtgcctaaatatggtcccattctgaggtaccaggagttagacgttcagcataaatattggtgggcaggtacggggacacagtttagctcacaacagttttttctttctgatccttatatatttttatacacttttttgttgtattgccctaattacaatgctcaatagaaatagtaaattggccatagctttatccttaacttgtgagtaga

SEQ ID NO: 323359 - DNA, 527 bp, Homo sapiens
atagctttgctttagctatgactcagtgtgacacattaccattgaattttcttttgtaaataatatatgaattttgaaagataaaattatctcatttatataaaatgatatatttagtttgaattctatcattctatttggcaatatacttacgagatatatagcttttatttagtcttctaagaatttatttattttttgtccatgtttttattttccttttaaatgatgggcattattttagtttatctctatttcttttattggtgaccttaaaagcagtccatttatttactcttcacttaagaactttgcatatgagaaacaatatgaaatttagtgtcatccttttcttctgattatccttattaccaacacttaattttactaggatatattcttattagctcttttcattgttgtctttaaaatttcagatacccttgaatatattacataattgattcsattttacaaccatattttgaccttctgctttgacatatagggaaattgatattatacaa

SEQ ID NO: 323360 - DNA, 555 bp, Homo sapiens
atttttacgtgtcttccatcaatgcctagtttattgagaatttttaacatgaatggatgtagaattttatagaaagcctttcctgcatctattgagataataatgtcttttttatatttagttctgtttatgtaatgaawcacatttattaatacgcacatgttgaacaaaccttgtatactggtgatcgtggtggataagcttctgcacagcaaaataaactatcatcagagtaaatagacaacctacagaatgggaggaagttttttcaaaccatgcatccaacaaaggtctaatatccagcatccataagaaacaaacaaatttaaaagagaaaaaactcgttaaaaagtgggcaaaggacatgaacctacaattttcaaaacgagacacatatgcggcaaaaaatcatatgaaaaaaagctcagcatgactgatcattggagaaatccaaatcaaaaccacaatgaaataccatttcacaccagtcagaatggctattatttaaaagccaaaaaataacagatgctggtgaagttgtggagaaaaaggaat

SEQ ID NO: 323361 - DNA, 576 bp, Homo sapiens
tccacttaaaaaatttaggggcaaatatttgcacaaatggtagatacagagaaagaaatccaaaaggcaaataggaatatgaatagatgatcaaaaccaccartaatcagagtagagcaagccaaaacaatgaaacattttatgccaattaaattatcaaaaaattgagacaaattattcaaagtactagcagggatgggtgtagaaactctcaggtatagctatagagaatataatagatgcagctattctcttagaacttggttaaattaagtgttcttaaatattacaagcattattaatgctgatactgctgaatatctgtaagaaattctcctatagataaataaatataatcagctttctatatccatgggttctgcattcatggattcaaccaaccgtgaattgaaaacgcaacaggctgggtgcagtggttcacgcctgtaatcccaacactttgggaggctgaggcaggcgggttgcctgaggtcaggagttcgagaccagtctggccaacatggtgaaaacctgtctctactaaaaatacaaaaaaaattaaccaggcatgatggc

SEQ ID NO: 323362 - DNA, 576 bp, Homo sapiens
tccacttaaaaaatttaggggcaaatatttgcacaaatggtagatacagagaaagaaatccaaaaggcaaataggaatatgaatagatgatcaaaaccaccagtaatcagagtagagcaagccaaaacaatgaaacattttatgccaattaaattatcaaaaaattgagacaaattattcaaagtactagcagggatgggtgtagaaactctcaggtatagctatagagaatataatagatgcagctattctcttagaacttggttaaattaagtgttcttaaatattacaagcattattaatgctgatactgctgaatatctgtaagaaattctcctatagataaataaatataatcagctttctatatccatgggttctgcattcatggattcaaccaaccgtgaattgaaaacgcaacaggctgggtgcagtggttcacgcctgtaatcccaacactttgggaggcygaggcaggcgggttgcctgaggtcaggagttcgagaccagtctggccaacatggtgaaaacctgtctctactaaaaatacaaaaaaaattaaccaggcatgatggc

SEQ ID NO: 323363 - DNA, 600 bp, Homo sapiens
gtaattaacttgattttggttttacaggtgtataggcagaagggacttgccttgactcagatgagactttggacttggacatttgagttaatgctggaatgaattaagactttgcaagacagattgcaatgcatgattgacataagggacatgagatttggaaggggccagtgcagaatgatagagttaggctttgtttcctcacacaaagctcatcttgaataatccccataatccccattatccctacgtgttaagggagagaccaggtggrggtaattgtatcatggggacacctttcctcatgctgtattgtgatactgagtgagttctcatgagacatgatggtcttataaggggctcttcccacttctctagccacttctcctttgtgccaccttgtgaagaaggtgacttgcttccccttccccttctgccatgattggaaaattccaacttgtctctgcagctacaaggcatccattttactgcagctatagtttataaatacttgccacctgttgagaagatcccctgtctgttccatctccaatattgaggatgaatataataagtggaattttgaaactaaaattagca

SEQ ID NO: 323364 - DNA, 476 bp, Homo sapiens
ggctatattcaccagtttgaaatatgatgccaacaactttacctaatcatagtcagatccccatcttaaataatgcattatgtcacttgagccacgattgcaaaatcatataaactttctccctgctctccccttctgagactacacttctgtcaagagagtgatcttccttattaccatagatctgataaactgagtttaacttgatcaacagattaaggatgagcttaacttgatcaacctsatatatatgggaattgcaaattgtaatgaaattagggtagaaatctgttttctacctggacaatcagaaggttagatatgtcaaaatagtaaattattataagcaaaagtatttttagtatgttgtattttatgaaagttgaatttctatatattataatttacctgaatccagtagttatctcttgcaataatgaacattaaatttacttttcaagtcttttgtaattagt

SEQ ID NO: 323365 - DNA, 622 bp, Homo sapiens
tggctatattcaccagtttgaaatatgatgccaacaactttacctaatcatagtcagatccccatcttaaataatgcattatgtcacttgagccacgattgcaaaatcatataaactttctccctgctctccccttctgagactacacttctgtcaagagagtgatcttccttattaccatagatctgataaactgagtttaacttgatcaacagattaaggatgagcttaacttgatcaacctcatatatatgggaattgcaaattgtaatgaaattagggtagaaatctgttttctacctggacaatcagaaggttagatatgtcaaaatagtaaattattataagcaaaagtatttttagtatgttgtattttatgaaagttgaatttctatatattataatttacctgaatccagtagttatctcttgcaataatgaacattaaatttacttttcaagtcttttgtaattagtgtcattgttatgmctgataattcttgacctatattttttcattttcctctttaaggaagtattcaaataaatctaaagagtataaaattacctgtacaaattacttataaaattgttttaagagttactatgttttaaaggtatc

SEQ ID NO: 323366 - DNA, 586 bp, Homo sapiens
gtgtgatttatccctgggatgctatgatgtttcaacatataaaaataaatcagtgtgtatactacacttaactgaacaaatgataaaaataacatgattatagcaataaatgcagaaaaagcatttaataaaatttaacactttttcatgataaaacaaccaaccacytaaaaatagaaaaaaaatacttcaatctaacaaaggtcatatatgaaaagactatggcaaacatcatactcaacatgtgaaataataaaagatattcttgtaaaatcaggcttagttcaggaaccaaataaggttgccaactctcaccaattctattcagaataatacttaatgtcttagagcaattaggcaaaaacgtaaaaagagacaaaaggcatctaaatcagaacagaagaagtaaaatcatgtttgtgtgaaaatgtcatgatcttatatgtagaaaaccttaaggattagacagaattgttagaactaataattgaattcagcaaggttacaagatataaaatcaaaatacaaaatcagttatttttctgtacactagcaataatccaaaaataaattcagaaaacgattt

SEQ ID NO: 323367 - DNA, 603 bp, Homo sapiens
aaaacccttgtctactgtttgtgagaatgtaaaaaggtgctactgctttagaaaatagtatggaaattcctcaaaaaattaaaaatagatttaccatatcattcagcaatttcacttcttcatatatttccaaaagcactaaaaacacaaccttgaaaagattattgcaaactcatgttcactgggggattattagccaagacatgatagcaacctaaatgcccaccagtagaggaatgagtaaagaaaacgtgaactatgcaatgggatattattgagccttaaataagaaggaaatcatgttataaactacaacatgggtgaaaattgaaaacgttatgctaagtgaataaagaaaatcacagaaagacaaatactggctaattcaatttaygtgaggtatctaaagtagtcaaactaatagaagcaaaaaatagaataatggtttccatgagctaagaagagggagaaatggagagctgttttttaatgaatattaagtttagttatgcaatccaaaaaaattcgagagaccttattgattacattgtacatatagttaccaatactgcagtgcatacacgaaactgtgtcaaaagggta

SEQ ID NO: 323368 - DNA, 565 bp, Homo sapiens
gtattggtggggagggcttcagagcatctgatatcttggatcaagatggaartcaacttgggatatgtgaaggggtaaattcagttacatttaagactttgaggtgttagtctcaatacttctttcctcttctagccattcatgtatattcttgcaaaaaactagccataatttgtgtgtgaaatgaatgtcagtcctaccttttagcctgtaaactgtgtggataagggcctataaccaattggctgtgctcctaactgtttttctgagcacagatcctagcacacagtaaatttgtgtcataatgagtaagtttagctacaagatctagatttgttttcttgtctggacttgaacgaaaaaggattttaatatgatacatataacattagtccatgggatggatatatgagactgtaccagaaagggaaagagtaaagattagtcagacagtaacaaatttttattcagtgtattttcttcttgattttattttattcaaaacttttatttaatgaatacgtataacttttataaaccctatgaaggcgaggatgtttgtttt

SEQ ID NO: 323369 - DNA, 591 bp, Homo sapiens
ttccacatctgacacattaagggaaaaaaagatctccccagcataatcttctttactcttccccttcctcagtgaccctgaaagtcacatatttaggggcattatcctcaaatggaaggattttagattgataggtcaacacatggactcttttccaaaaatatctgctttggaattcgcataaatgagaaaaatatttttctgtgttarttcactggatttaggagttgctgtagcaggtagtttcagttaccctaagatatttcacttatgaagctaaactggcttaaatattaaaaaaaaaacacacacagaggaaatactaaatccaaaggattgttaaccggttagggtgaatatgaagcataatacctgtcctgtttgaaacattgtactgttccttgaccttatacatactgttctattcagcgagtaacctgagaattcttcattattgtcacaataaggctggaacattttcacatgcaaataccttagtcctttgttcctaataaaaggactctttttatagctatggatcaacttctaccttctaccagctactcaaagctttcctctatatacactgat

SEQ ID NO: 323370 - DNA, 591 bp, Homo sapiens
ttccacatctgacacattaagggaaaaaaagatctccccagcataatcttctttactcttccccttcctcagtgaccctgaaagtcacatatttaggggcattatcctcaaatggaaggattttagattgataggtcaacacatggactcttttccaaaaatatctgctttggaattcgcataaatgagaaaaatatttttctgtgttaattcactggatttaggagttgctgtagcaggtagtttcagttaccctaagatatttcacttatgaagctaaactggcttaaatattaaaaaaaaaacacacacagaggaaatactaaatccaaaggattgttaaccggttagggtgaatatgaagcataatacctgtcctgtttgaaacattgtactgttccttgaccttatacatactgttctattcagcgagtaacctgagaattcttcattattgtcacaataaggctggaacrttttcacatgcaaataccttagtcctttgttcctaataaaaggactctttttatagctatggatcaacttctaccttctaccagctactcaaagctttcctctatatacactgat

SEQ ID NO: 323371 - DNA, 571 bp, Homo sapiens
tatatggctattattctaagggttgtagatatgctaaaatgagtcatttaatcacagattatcttayaaagtaactctaagtctcataaacatatagcaaataacaattatcttatgagtagtaagcaagagtcaagtaatttggttgtttgtgtatattaacaaatatgccattgttttgtggaaattccaagactatacaatataaaatctcaaaagggataattaaaaacagtaaaatgcactattgaatatgtaaaatatttacatacatactcagcttatgtagagcacagcttcaaaaacaagaaagacattttattatgtttcaatcacagtgtcaatcaaaagttaaatggaatgtcattaatggttacttctttcaatatgaagtaacaagagcaatttacaactaatttgtatatttaaatctcaaatattagaaaatattactttaactaaaataatagtttagattcttgtaatattgctatatgtatatggtctcaataaagtggttatttttgctgcctgagtatacaaaggaactagaaactgcttaacaataaaa

SEQ ID NO: 323372 - DNA, 569 bp, Homo sapiens
aactccagcctgagtgacagaacaagactccctctctaagaaaaaaaaaaaaaaaaaaaaaaaaaccacctaaaawtggagcttttacaggatccatcaatatcactccttggtatatatccaaaaaaaggggaatcagggtatcaaaaaaatatctgcacttttatgtttatggcaacactattcacaatagccaaaattgggaagcaacccaaatgtccatcaacgcatgaatgaataaagaatatgtggtacatatacatagtaaagtactattcagccattaaaaaggagattctatcactcacaacaacatggatggaactggaagtcgtcacattgaataaaataagccaggcacagaaacttcacgttttcacttatttgtcagagctaaaaattagagcagttgaagtcatgaagatgtggagtagaaggatagttaaagagcctgggaagaggagtggaggagtggaggaaaaatgaagattgttaatgggtacaaaaaatagagtgaacgagacctagtgtttgttagcacaacagtgtggctacagttaacaattatt

SEQ ID NO: 323373 - DNA, 569 bp, Homo sapiens
aactccagcctgagtgacagaacaagactccctctctaagaaaaaaaaaaaaaaaaaaaaaaaaaccacctaaaattggagctwttacaggatccatcaatatcactccttggtatatatccaaaaaaaggggaatcagggtatcaaaaaaatatctgcacttttatgtttatggcaacactattcacaatagccaaaattgggaagcaacccaaatgtccatcaacgcatgaatgaataaagaatatgtggtacatatacatagtaaagtactattcagccattaaaaaggagattctatcactcacaacaacatggatggaactggaagtcgtcacattgaataaaataagccaggcacagaaacttcacgttttcacttatttgtcagagctaaaaattagagcagttgaagtcatgaagatgtggagtagaaggatagttaaagagcctgggaagaggagtggaggagtggaggaaaaatgaagattgttaatgggtacaaaaaatagagtgaacgagacctagtgtttgttagcacaacagtgtggctacagttaacaattatt

SEQ ID NO: 323374 - DNA, 569 bp, Homo sapiens
aactccagcctgagtgacagaacaagactccctctctaagaaaaaaaaaaaaaaaaaaaaaaaaaccacctaaaattggagcttttacaggatccatcaatatcactccttggtatatatccaaaaaaaggggaatcagggtatcaaaaaaatatctgcacttttatgtttatkgcaacactattcacaatagccaaaattgggaagcaacccaaatgtccatcaacgcatgaatgaataaagaatatgtggtacatatacatagtaaagtactattcagccattaaaaaggagattctatcactcacaacaacatggatggaactggaagtcgtcacattgaataaaataagccaggcacagaaacttcacgttttcacttatttgtcagagctaaaaattagagcagttgaagtcatgaagatgtggagtagaaggatagttaaagagcctgggaagaggagtggaggagtggaggaaaaatgaagattgttaatgggtacaaaaaatagagtgaacgagacctagtgtttgttagcacaacagtgtggctacagttaacaattatt

SEQ ID NO: 323375 - DNA, 587 bp, Homo sapiens
caacaacatggatggaactggaagtcgtcacattgaataaaataagccaggcacagaaacttcacgttttcacttatttgtcagagctaaaaattagagcagttgaagtcatgaagatgtggagtagaaggatagttaaagagcctgggaagaggagtggaggagtggaggaaaaatgaagattgttaatgggtacaaaaaatagagtgaacgagacctagtgtttgttagcacaacagtgtggctacagttaacaattatttaattgtacctttaaaaataacgagaagagtataattagattgtaatataarggacaaatgcttgaggtgatggataccatttttaccctgatgtgattattatgtgttctgtaaatgtatagtagcaaaatatcgcatgtccctcataaatatataaacctactatgtactcataaaaattaaaaattgaaaaataattttcaaaaagtatttccttgattcttaaaagcatggtatgaagaaaacagggcaggttttacacctctgttttactaatcatatttcaatattgaccaaagcataagaaaaatattttttcttact

SEQ ID NO: 323376 - DNA, 587 bp, Homo sapiens
caacaacatggatggaactggaagtcgtcacattgaataaaataagccaggcacagaaacttcacgttttcacttatttgtcagagctaaaaattagagcagttgaagtcatgaagatgtggagtagaaggatagttaaagagcctgggaagaggagtggaggagtggaggaaaaatgaagattgttaatgggtacaaaaaatagagtgaacgagacctagtgtttgttagcacaacagtgtggctacagttaacaattatttaattgtacctttaaaaataacgagaagagtataattagattgtaatataaaggacaaatgcttgaggtgatggataccatttttaccctgatgtgattattatgtgttctgtaaatgtatartagcaaaatatcgcatgtccctcataaatatataaacctactatgtactcataaaaattaaaaattgaaaaataattttcaaaaagtatttccttgattcttaaaagcatggtatgaagaaaacagggcaggttttacacctctgttttactaatcatatttcaatattgaccaaagcataagaaaaatattttttcttact

SEQ ID NO: 323377 - DNA, 609 bp, Homo sapiens
atattagaaaccatggcttaggagtcatgcagctggagcctacaagattttgaccctccctaaactgctctcatgatcagtgcttaagatattttgtaaactgtgcccttgacggatcggctgtcaccacccagatggacaaactggcttatctgattttgtggctctcacccaggaactgacttagcacaagaaaaccaccaccattgtaagatgacagagactaaaagtatttccatgtggttacaggtcatgttcccaaggacgtgaaacaagatggaggcctgtagctgagtttgttactggccatkttgttgggctgctttgaacagcaggctaatggggtcctgggcctgcatcctaacctaagataccctttctttgacagaactgtacaggaagacatgcaaagcaaaccagattgtctacagcttaagaccaacctcacaaatccttttccattgattacaactttatagataatataaacaatgatctttgttatctcttttactggtttccataggaacagagaagccaaaagcctgactggtaagaaatttttaccctcttgccagcatatcaggcttctgggttcccttcccccag

SEQ ID NO: 323378 - DNA, 609 bp, Homo sapiens
atattagaaaccatggcttaggagtcatgcagctggagcctacaagattttgaccctccctaaactgctctcatgatcagtgcttaagatattttgtaaactgtgcccttgacggatcggctgtcaccacccagatggacaaactggcttatctgattttgtggctctcacccaggaactgacttagcacaagaaaaccaccaccattgtaagatgacagagactaaaagtatttccatgtggttacaggtcatgttcccaaggacgtgaaacaagatggaggcctgtagctgagtttgttactggccattttgttgggctgctttgaacagcaggctaatggggtcctgggcctgcatcctaacctaagataccctttctttgacagaactgtacaggaagacatgcaaagcaaaccagattgtctacagcttaagaccaacctcacaaatccttttccattgattacaactttatagataatataaacaatgatctttrttatctcttttactggtttccataggaacagagaagccaaaagcctgactggtaagaaatttttaccctcttgccagcatatcaggcttctgggttcccttcccccag

SEQ ID NO: 323379 - DNA, 553 bp, Homo sapiens
aaataatctgtacaacaaaccgccattacacaaatttacctatgtaacaaacctgcgcttgtacccttgaacttaaaatagaagttaaaaaaaagaaaaaaaaaaacttcaagcacctcaatatttagaatatattgtgtttttttaaagcctagcagaagcaaaatatttaacatatattagacataaaaataatgtatttattgacttgmttaatcaacaaaataaaatagaactaaataaactacatcacttggtcttatatttctgttttgagataaatagttgatactcttaactaaatatgcttggaaaaggtgtatgcaaactgacaaagatttttttttaaatttatacagtaaaagataattgggaatactggacttgatttattccaaaatttgatgtttactgtaggcctgtaatttatgcaaaattttggaatggctttactaacaatttagtaaaaagatggatctatattcttggtactaaaattgtggtatctgaacatcaaatttctagtttattttatatataaacaaattatttg

SEQ ID NO: 323380 - DNA, 573 bp, Homo sapiens
tgaattagacaatccaaactattctactattagaaactgcataaattacaacaaatacaattcctaatgctttctctcaaagcttgctagaaaggcaggcataaagataacgaggctcctttctcctcctaaatcagttaaccaattaaaattaggccctatttagataaaattgcaagatcattctcaatgacatttgatcagkccaaaataatatacccaggcatactgacatcaacaattctattataaagcagaccagactgattacttttaagcaaggaccaaaaatggtaaaatttaaccaaacagagcttctaatcggctttttagtgcctcattcttaaatatgagtagatggtcagtgttcacctggccaaggtaatggctatgtggtaggcctaaaaagtaaccagtcaagattagaccaagtcaaggtttttgctgttctattgttaattttcttcaagaagatgacattttaaaaaattccttagtgaagccatatagttctgggcttttctttgttaacaggtttctattattaattattattattattgcttccatctt

SEQ ID NO: 323381 - DNA, 573 bp, Homo sapiens
tgaattagacaatccaaactattctactattagaaactgcataaattacaacaaatacaattcctaatgctttctctcaaagcttgctagaaaggcaggcataaagataacgaggctcctttctcctcctaaatcagttaaccaattaaaattaggccctatttagataaaattgcaagatcattctcaatgacatttgatcaggccaaaataatatacccaggcatactgacatcaacaattctattataaagcagaccagactgatwacttttaagcaaggaccaaaaatggtaaaatttaaccaaacagagcttctaatcggctttttagtgcctcattcttaaatatgagtagatggtcagtgttcacctggccaaggtaatggctatgtggtaggcctaaaaagtaaccagtcaagattagaccaagtcaaggtttttgctgttctattgttaattttcttcaagaagatgacattttaaaaaattccttagtgaagccatatagttctgggcttttctttgttaacaggtttctattattaattattattattattgcttccatctt

SEQ ID NO: 323382 - DNA, 526 bp, Homo sapiens
acaatgggggtacaggcttagggtaaatacactcattccaaatgggagaaattggccaaaacaaaggaactacagggcccatgcaagtttgaaatccagaaggacagtcaaatcttaaagctccaaagtgatctcctttgaatgaatgtctcacatccaggtcatgctgatgcaagaagtgggttcccatggccttaggcaggtttgcccctgtggctttgcagggtataacctccatcycagctactttcacaggctggcattgagtgtctgtggcttttccaggtgcatggtgcaagctctcaatggatctaccattctgggatctggaagatggtggccatcttctcacagctccactaggaagcagcaccccagtagggactctgcctcctcaaccccttccagactttgggcaccaacgagcatgggaaagagtccaagggggagctgaggacagctcggcattgcctgtagtgacttctcagcattaacagctgtgggcgccgtccacagcaggttgatg

SEQ ID NO: 323383 - DNA, 565 bp, Homo sapiens
tcatactgtaaaccttagcctaaggagcttcttaaatatcctcctgtacccccatcagtgcatttattattaccttgatgaaaacagttttatttggcacctccttggaaacagtcaagttgtggttattctctaatcggactttgtagcaatctaatcccatttaagacaaaatttagataaacctgaaattagaggtgttgaggtggacaaatagaatctttgaarcaactgtttcaggtgagatctttgcttgttttccacgtgatacaagctggttgtcttataacgagagagagacagttgtttcttttggctggtaaaatcagggatatttgatgattgtctatctatttatctatcatctatctatctacctacctgtctatataatctgtctaccatctgtcaattaaatggcaaaaatttctgtattgtacacatcagcattctactttgtttccatcaaggtcctgacttaggcataaatatgcgaatgtgtccattcggtgtcttttgaagctctgtcaccattacaattaaatttcagcctgatttttagcac

SEQ ID NO: 323384 - DNA, 531 bp, Homo sapiens
attgtagcgtcattatttatgtgaagtgcaatgcttttaaaatttgaaaacagagtttttgtctagttatttcttcttatttttagtttctctcactatgatcagagagacaggattctataatttcaattctctgatatttattgaaacttactttatgacaaagaccgtgattaatttttagacgtactaaataacttcttgcaaataatttgtattattccatatttggggtaccagattataaatatattgtatatgtcaagtgagcagagaacagtagtacttgtagaaaaaatgttaaactatattaatttccgtcccaaagaagaaaacatcagcacttttatagatgtggtagataaaaacctttgaattartaatagaattcttggacttttgaaaagaaatatagtttctcagctacaggttacattctcaaccacctttgcagctatgtattgccatgatagcaattttaaaccaatgagatatgagaggatgtgatatgtgaaacttccttgatgggct

SEQ ID NO: 323385 - DNA, 613 bp, Homo sapiens
ttgggccacacagtaggaggtgagtggcaggtgagagatcattgccacccgagctttgcctcctgtcagataaatggtratattaaattctcatatgagtacatatcctattgtgaactgggcatgtgagggatctaggttgtgtgctccttataagactctcaatgcttgatgatctgaggtggagcagtttcctcccaaaatcaccccactccccaagcgacccttgaaaaaaattatcttttttaaagccagtccctcgtgccaaaaatgttggcaatcactgctatgacttcttgttcttgttcttggatattgatctctttcactagctttgggaagttccctcttatttatttgaataaactttctactcctatctctttctctacctcctttttaagaacactaactcttagatttgcccttttgagcccatttttttagattctgtaggcatgccatcttttttcattctttttcctttggtcttctctgactgtgaatttttaaataacctgtcttcaagttaaataattctttcatctgtttcactcatttggcttttaaaggactctgatgcatttttcagcatgccaattgcattttctaa

SEQ ID NO: 323386 - DNA, 627 bp, Homo sapiens
tcaattaatctttgctgagtaaatgctactcttgctggcaagtcgggggcatggttgcaactgtttacagcactctgcttggggtctgtaagtggccgggacactcagcccactcagctggactggcaaagaacaatatctgtgtgtctgtgtacttcattcatccatcatttgggtcagggtctgggggcagacccctgcatctgaccatctgggtctccagctacccatgtagggaagagyttctaagtgctgaactgccccccaaattctctaaacttatataagagagaaataaacttctttcttatttaaatcgctatattgcatttcttaattataacagcttagcatgtactccaaccaatacaaatgacattttaaaatctatttttacagtttttaaaaaatatttacttttcttaaactacttgatgttttatacatttgacatattcttggattcagttaactctcacttgctttcctggcatgtccagatatggatttggaagagagacatagaaatataagccacttccctatcttattcttgcacttactattttggttttcttggacaccctaaaggcccatgagtgggaaagtaaatcaattcattatttc

SEQ ID NO: 323387 - DNA, 613 bp, Homo sapiens
ttgggccacacagtaggaggtgagtggcaggtgagagatcattgccacccgagctttgcctcctgtcagataaatggtgatattaaattctcatatgagtacatatcctattgtgaactgggcatgtgagggatctaggttgtgtgctccttataagactctcaatgcttgatgatctgaggtggagcagtttcctcccaaaatcaccccactccccaagcgacccttgaaaaaaattatcttttttaaagccagtccctcgtgccaaaaatgttggcaatcactgctatgacttcttgttcttgttcttggatattgatctctttcactagctttgggaagttccctcttatttatttgaataaactttctactcctatctctttctctacctcctttttaagaacactaactcttagatttgcccttttgagcccatttttttagattctgtaggcatgccatcttttttyattctttttcctttggtcttctctgactgtgaatttttaaataacctgtcttcaagttaaataattctttcatctgtttcactcatttggcttttaaaggactctgatgcatttttcagcatgccaattgcattttctaa

SEQ ID NO: 323388 - DNA, 531 bp, Homo sapiens
aatacagctaggctaactatttgaaaataattacatttggacccattctcacaaatatcacttccaacagaaatagtataaagattaagactcaagtgattgacattcttctcccatctgatcactaaacagctaggaacattaagttctggcaagtgcaaatttgcttatatttgaaacaaggctaagactctatgctttggggatttaactgaactgactttgatttcaggctatactgttaacattgtgagtttagttactcagtcactttgtctttacctccttacattataaaaagtaatagcataactgtgtcatcagtttcttaaagttgaaagggaataaatgaattaatytatgtcacaaaccaggaatttggcaaatctttaataatgattattttattctgttctttaatagatgtttcatatgaatataaaagaaaattaacttgtggaagtattttacaaaagtaaaaaactatagaaacaatggatttttttttttacaatcaccagcatccacatg

SEQ ID NO: 323389 - DNA, 596 bp, Homo sapiens
ttgcctatattatccatatagaatctgcactttctagctacaataaatcttgtttttttttgtacatttcaggaccaattaatgtaaaagatacaagtaatattatcaatcaagtaatatttatttcatggatatcatttaaattctgattcttctagtggacaagaaaaacagtctatgtgtagtaaaaataaagggcttttaaaattaccatttgtcaccaattatcttaccaacwttgaataaaattcaatacctatttttaaatatcaagaaaagaatatactcatggttatgtgcataggggtgtgtgtatattgtgactgttatttcaaaatcatactttttgttactacagactgaggaagaaagtattgtaaaaacacaaatttcattaagtaactcatttaatacattattatataagtatttatatgtatgattatatatatattgcctctggaaattacacttaataaatatgtacaaaatatttgttaaacattcatgtgagagaatagaatattttctgaaaaattaaaaaaatatattttctagaaagaagagtcttcaaaatagttatttcaaatcaggat

SEQ ID NO: 323390 - DNA, 538 bp, Homo sapiens
gttatttcaaatcaggatatgccatctttactaagaaaagatttatgttcagctaaactcattttgtttcctcatgaataaatatggaattattccttggaacatctaggaaagcagtgaaaatccttctgccattgtggataaaatacaagaaacagtaggaaaaaaatcaaaacaaaatatgttttatgtttcactatttttgcaagttaaatgaatattttcacagtattcataattataagatattgaagattattgtggctgtgcagtaatttactcaagtgcctaacaacagcatagaaactacaaaatccaaagaactgacaaactcactagttagtacaacagcaacaataacaaggcaattattagatcccgaaatgtgtatttttaaaaacagacccccatatagcaaagacagagtagcaatagtattctatttctggatgggttgcttaactgaaattktcaactcattttacttctctgagttactacatctttaaatataataatctttacaaagacataaatt

SEQ ID NO: 323391 - DNA, 522 bp, Homo sapiens
ggtaaaaaactctcaacaatcccttctttcagagagaactactgttaacattttaacagacaacttcattcttttcctattcttttttataatgcttacaggaatgttaaatacttagacagatcttaagtacactagaattatctgtccctgaaataagttaggttgccctgccgcagaatttgtatctatagtttatttggattatttttgaaaaaagtaaaataacaatacccttacgaattttttggtgcatagcatctcagcttcttttatcattaaagatgtatgtataaaaaaaaaatgagtgtatatcaagttgttcatttcttagtttctggggtcttcttaaccagtacatagaactctttatgaattaactttagcttatgttkgaagtagtagtttgtttatagtgtcatggattttaaaatcaaactcagtttttatttcttcactaaaacctattttcatatgatatacatgttaaatttcccttttattttggtcatgcatcaaaat

SEQ ID NO: 323392 - DNA, 615 bp, Homo sapiens
gagccgagagaccaaagaatgactgggacaagtccagcttgaggagcagatgagtttattaggacttaattacaggagagtcttggatggcaacaggacaccactagagctctgtgccacctcccatctctaaactgcttttaagctaatttcctggctctttgcctattgtgtttgagcaataagactgtttttcttggtaygttctcagatactctctagaatatttagattctcagggatacgtgctcctcgcctgcacaccatggtgttgactcattgcccagccttcaggatttgggcagtggacatacacccttaagcaaccttgtgggggacctgtcatactacagggattggattgaacctgtagattgttttgtctagtatggacattttaacaatggctatggttcggatctgtgtccccaccaaaatctcatgttctattgtaatcctcaatgtggaggttgggcctggtgggaggtgattggatcatgggggtggatttccccttttgctgcttgtgatagagctcttatgagatctggtcatttaaaagtgtgtggcacctccccaccctccttctgcgctagccatgtaagatgtgcttgc

SEQ ID NO: 323393 - DNA, 615 bp, Homo sapiens
gagccgagagaccaaagaatgactgggacaagtccagcttgaggagcagatgagtttattaggacttaattacaggagagtcttggatggcaacaggacaccactagagctctgtgccacctcccatctctaaactgcttttaagctaatttcctggctctttgcctattgtgtttgagcaataagactgtttttcttggtatgttctcagatactctctagaatatttagattctcagggatacgtgctcctcgyctgcacaccatggtgttgactcattgcccagccttcaggatttgggcagtggacatacacccttaagcaaccttgtgggggacctgtcatactacagggattggattgaacctgtagattgttttgtctagtatggacattttaacaatggctatggttcggatctgtgtccccaccaaaatctcatgttctattgtaatcctcaatgtggaggttgggcctggtgggaggtgattggatcatgggggtggatttccccttttgctgcttgtgatagagctcttatgagatctggtcatttaaaagtgtgtggcacctccccaccctccttctgcgctagccatgtaagatgtgcttgc

SEQ ID NO: 323394 - DNA, 502 bp, Homo sapiens
gtctctcttctgctgcattgaatctgcttttaagcctaccaagttatctatttatttaagttataaaatttatattttatcttcattcttgttattttctagttgtcaggtgaaattctttaccttttttttctttgaatgtattgatcacagatgatttaaaggactgtgcctaataactccaatatcttgattatctatgggtaarttttgttttctgttttttctcccttggtgtttggttctgccttttgacatgcttgatttttttttttagttgattgttggacataatatgtaaaaatttattaagctctcgatgctatttttttttcagagagaatttaattttctttcagaaggcagttaatgtagggatggataaccttaatccaatttagcattgatatgattagagactaatttttgttttttttttttttgtatgtcctgttctattttttttttttcctccctttattcttatgctcctaggacatag

SEQ ID NO: 323395 - DNA, 603 bp, Homo sapiens
atagccaaagcaagtagacaagagaaaaaaattaagggcatccaaattggacaggaggaagtcaaattgtcctgtttgtttgcagatgacatgatctaaatatatagaaaacactgtagactctaccaaaaaactcagaactggtaaatgaatttagtaaagttgtaggatacaaaatcaacatgcaaaaatcagtagtgtttctatatacaattagtgaacgagatagaaaagaagtcaaggaggcaatctcatttacaataactatgagaaaaaaaatacctagagataaatttaacmaaggaggtgaaagatgtctacaagagaaactacaaaacactgatgaaataaacagaagaggatataaaaaatttgaaaaatctcccatgctcatgtattggaataattactattgttaaccatactactcaaagcaatctacagattcaatgcaatccttattgaaataccaatgacattcttcataaaaatagaaaaaaaatcctaaaatttatatggaaccacaaaagatcccaaatagccaaagcaatcctgagcaaaaagaaaaaagctggaggcatcacagtaccaaacttcaaaata

SEQ ID NO: 323396 - DNA, 585 bp, Homo sapiens
agaagagtcagggttagattctgaaggcacacaggcaagaacaatacccagtgtcactgcctcactaaattttcagtgtctataaagatggggaaccttatttatctatttttgctctacaccatctagcacagtaataaccctatgaaagtaggaatgttattcatgttttataggcaagataataggcttagaaaacttaaggaattgactcagtgtcactcaataaatgatagagccatgagtgttgaaataaatatatgattatgattatttagagctggaattaatttttaaaatctgtttagataatataacattgagagcttagactcctggagctacatgcttcctcatttacttctagaggagaagasaaggagtttccccagccattaaacaacacttcactgtcattgagcctaatttggatactgctcatccctgaatcaatcacagtagctaggtgaatgacaagcactgatgggcttgaaccttgggcctctgttaaattcccttccttgaattaataatgggatcaaagggaaaccggattatactgattggcttaggccaattgcagcc

SEQ ID NO: 323397 - DNA, 576 bp, Homo sapiens
ttaattatcttaccccagaccttctttctggctgatggaccttaactctatgtgtattatttctggtaacaaattcccccaaaacgtggtgaatgaaaacaacaatcattttrttattatttcttctgatcctgggggttgactaggttgagctgggcagttctcactaggagtttgtcatgtagttacaatcaggaggtgattgaggctagagccatccaaaagcttcctcactcataagtctgtcagttaatgccagctgttggttgggatgtcagttcaggctgtcagccagaacacctatacatgggttttccgtgtgacacgggcctcctcaccgtatggtggctaggtttcaagagctcgcatcccaatagtatcccaggtaataagtctatcacctttatgccatagtctagaaaacatcacttcaaccatagtcaccaacccaccaacattcaagggtagaaaacataggtcccaccttttgatggaaggagtgccaatatcacattggagatgagcgtgtggaacagaaatcttgctgcagccatcgtggaaaattctgtctgccat

SEQ ID NO: 323398 - DNA, 598 bp, Homo sapiens
tttttaaaacattacttggagtgttttttaaatgtggcatttcatatatcatctttaatagtctttgtttcatggatagatttctggctcgggtaggtactaaggcctgttttatttagatgtgtatttaaataccacagaagaatacctgaacatctctttagaatttattaggttggtgcaaaagtaattgcagtttttgccattacaacctaatatttcaccttatwgaggtatattacatgtccttagagtatagaaaaatattggctacccagtaattatttgaagaaagaccattttatctacttttggttgacacccatagggatagctctgtgcaagtagctgtaaaaatatagtgtttgtactaagtgtaattcttagatttaagagcctacttccatacagtattcaggatttagggagacagatcaatcataccaactcttttcagcaagtagatgaacatctctgcaaaattgttaattctctttcaaacccacttagtcaagctgtttgatttagtagcccctgcatacaccatttagaatgaaaaggtagatatagttcttcccatgagatttgtcagtactcc

SEQ ID NO: 323399 - DNA, 579 bp, Homo sapiens
aactgataaaactgaccaaatgatgctccaccctccaaaagcactctactttgggatctaggttgtcagagtggttagttactatttaatgagtcctctgggtcatttccagatcacattcttactttgtgttgtgtgttcatagaaattccaaataataagttttatttttgtcataattcatatgtacattccagactatagtccttgaacttatttcaaaagcttttcattaaatgatacactagtggtctgaaaagggtaataaaactttgaacaagacaaagaatacaaaagagtctctcaaagcatagggacattctggttcctttcttacgatcctataaaacccaagctaccatttaggaaaaaaaaaaaaaacatgatatagattatatacataagtcttcagacttggttagtctgctctagggtcatactcagtctcacaactccctatggtaggcattacctcaacacacaggtaaagaaactaagacttaggttacwtattgcctgtggtgacaatagcagaatggggatccaaacccagatctcattccagtcagattcaaaaaa

SEQ ID NO: 323400 - DNA, 613 bp, Homo sapiens
acaactacttggaggtagcatatctccttagtgtctcagagagggtaagagagagggtgatctcactgttatttttaactgtaaactgtaaaaacttttaatgggaaaagtaatgcttatcccaggagttctaaatgctgccttctacctagttcaccccatttattaaaataccacaataattctttttctaaaatgcgatttgtaaaaatctgcttcttcaatttattgcagtgatacccagctcagatactgtaatgaagtccatgaagaaatataaatagaaatccactttatgaagaacttggctgtaagatttattctgattaacatggatcatctatattatattgagtttcccactttaatattgtagcttggatctgttttctgttgtgagacttaatatacaaaacatagccatgaaatctctatcaagtagaagtgcaagcaataaattaccaaactgagttagaggtctttgagccctgaaaaccaaargacaccctgagtcttaaaagagtgggtaagctactaggtatgggtgaaaaatcaacagagttaaactaagatgaccaccaacacgagcatgaacaaggataagaaataagac

SEQ ID NO: 323401 - DNA, 599 bp, Homo sapiens
acagtaattatagttaataataatcgattgtatatttgaaaagagctacaagaactgtaatgctcccaacacaaagaaaagataaatgtttgagataatggatatcccaattaccctgattagagcattatacatagcataagggtatcaaactatcatgtgkatccccaaaatacgtacgactactatataccaatataaaatacttttaaaaaacaaataagacaggaagcagaggctattggagtagcctgtgatggggatcagacagcctgagccttatcatcataattccactatcaaaagatgggataatttgggcaagtcaagtcctccgtttcctcctcaataagctgaagcatctgtattcagccctttctagtttctcttggagcacagactgtttcactgaaagtaaggcagcacaaagtcttcaagaccaggtaaaaaggcaaaacaacaataagcccaggtgttcatttcactttgattgtggtagtggagaaaacaaagagataaagaatgatctaaattaggcagtcatatgaaaccctgaggctgagtccatttgaaatttgagaatggttttcgggagaagg

SEQ ID NO: 323402 - DNA, 603 bp, Homo sapiens
ttcctcctcaataagctgaagcatctgtattcagccctttctagtttctcttggagcacagactgtttcactgaaagtaaggcagcacaaagkcttcaagaccaggtaaaaaggcaaaacaacaataagcccaggtgttcatttcactttgattgtggtagtggagaaaacaaagagataaagaatgatctaaattaggcagtcatatgaaaccctgaggctgagtccatttgaaatttgagaatggttttcgggagaagggatgttgcaatttgtctctagagctgtccaaatttcggtttgttctgattttagaaatttgccctcatttctttgaacattggtataggtagggagaaaaaaggggattgggtgacaaacttcgtctaaaattatctgcagctctctttaagtagtggctgtagtatttctcatgctcctattaatttagatgtgaaacaagttactgtttgattacctcttttaaagtcctctagaaataaagaacaaaattatctcaatctccaccttctcctctgaccaaaaaaacacaaaaaaacaaaaaacaaacaaaaaaatctgagcccatgttgaaatcattaa

SEQ ID NO: 323403 - DNA, 570 bp, Homo sapiens
agatggtgggaagcataaacaaactttacctactccctcctctaagttccttcatctagctgctaccataaacatcacaagatgacatatggcaaagttaaccaacaaacgaccccaggatctctctccccaatataaacccatcatcttgtwagctcaaggctgtctcctctgtctgtaatggaacagccagcaggttaaataaaggcttgcctgaacttgggtctctctctctctctctctctcgtcctttctcttggctgaccttacaatgacaaattttattgaaggccttttctgcatctattgagctaattgtgtggtttttgttgttagttctgtttatgtgatgaattatctatattaatttgcatatgttgaaccaaccttgcatcccagggatgaagccaacttgattgtggtggataagctttttgatgtgctgctggattcggtttgctagtattttattgaggatttttggcatcaatgtttgtcagggatactggcctgaagttttcgttttctgttgtatctctgccaggttttggtatcaggatgatactggcc

SEQ ID NO: 323404 - DNA, 561 bp, Homo sapiens
aaactggctattctagttatcaacatcgaaattgttttatcatgatttttcgcttctttgcattgggttagaacatgctcctttagctcactgaagtttgttattatccaccttcagaagcctacttctgtcaattcagccatctcagcctcagcccagttctgtkcccttgctggagaggtgttgcagtcatttggaggagaagaggcactatggctttttgagttttcagcatttttgcattgattctttctcatctttgtgggcttatccacctttggtctttgaggttgctgaccacagaatgggtttttggggggactttttgttgatgttgttgttgatttccatttgtttttctttaacaaacaggccactgactgttagcaaccatagggctgctgcagtttgctgggggtccactccagaccctagtgactttggtccctcccacatctggagctatcaccagtgaagactgtgaaacagcaaaggtggcagcctgctccttcctctgggagctctgtcccagaggggcacagacctgatgccagcctgaat

SEQ ID NO: 323405 - DNA, 561 bp, Homo sapiens
aaactggctattctagttatcaacatcgaaattgttttatcatgatttttcgcttctttgcattgggttagaacatgctcctttagctcactgaagtttgttattatccaccttcagaagcctacttctgtcaattcagccatctcagcctcagcccagttctgtgcccttgctggagaggtgttgcagtcatttggaggagaagaggcactatggctttttgagttttcagcatttttgcattgattctttctcatctttgtgggcttatccacctttggtctttgaggttgctgaccwcagaatgggtttttggggggactttttgttgatgttgttgttgatttccatttgtttttctttaacaaacaggccactgactgttagcaaccatagggctgctgcagtttgctgggggtccactccagaccctagtgactttggtccctcccacatctggagctatcaccagtgaagactgtgaaacagcaaaggtggcagcctgctccttcctctgggagctctgtcccagaggggcacagacctgatgccagcctgaat

SEQ ID NO: 323406 - DNA, 561 bp, Homo sapiens
aaactggctattctagttatcaacatcgaaattgttttatcatgatttttcgcttctttgcattgggttagaacatgctcctttagctcactgaagtttgttattatccaccttcagaagcctacttctgtcaattcagccatctcagcctcagcccagttctgtgcccttgctggagaggtgttgcagtcatttggaggagaagaggcactatggctttttgagttttcagcatttttgcattgattctttctcatctttgtgggcttatccacctttggtctttgaggttgctgaccacagaatgggtttttggggggactttttgttgatgttgttgttgatttccatttgtttttctttaacaaacaggccactgactgttagcaaccatagggctgctgcagtttgctgggggtccactccagaccctagtgactttggtccctcccacatctggagctatcaccagtgaagactgtgaaayagcaaaggtggcagcctgctccttcctctgggagctctgtcccagaggggcacagacctgatgccagcctgaat

SEQ ID NO: 323407 - DNA, 594 bp, Homo sapiens
ggaaagctggatttgattgtgattcattcttgttaagtggtcttgaattagccatttgcccccattggcttccrtttcttcatttgtaaaattaagtcaataatacctggccattcatttgtaagtctctcagtttataagtgaatatgtgttggatttcaaaaactattaatatcgattaaacatcttctgggaacctttttcatatatgccctctgttataacttgagccagattgacacaattggtattagaatgaggagactgtgttgcagagaatttatttgactttccaacagtcacttagctagtgggttacaaggctacagtttgaacacagctcgcaaacccattgctttttaaaaaccagtaataccactacttattcactttatcatggtatttaaatttcaagcatgaccaaataaacacatgcttatgcttacaaacataaatgctactgaaacaaaagtttcagaaaacattattcatactgcatttcaatatattatacttttgaaatcctagtcacaatcccctaaactgattttgtaaccaactaactcacaagtcgcagttagaaaatagtcttag

SEQ ID NO: 323408 - DNA, 501 bp, Homo sapiens
ttctcactttgttcaggtttccagtcttaaaagctgtgtcagctagaaagaaggtgtttgatactatgagactagctactcctgatgcaggtttcagctgcacccaactgttaaagaatgctgggaggtttattcatcaggtgaaatcacttcttccattctggaagtgagctcacaaaagtcactccctgctgttataacccatagtgatagtgtggggaagaacaagattatttcacaaaattctcacattatgtctatttaaatgttaaacaaattcaccaggattggactgtcataaacataaatraataagcaaagaagaaattaatgtgccattactgatgctgtgcttaatttcaaatcatagtctggtcatctgattcttttatgccaatatttaactatattcaaagaacctgtaacattgtttcccagagtataatctgtaaacgacctgcctcaaaaacccaagatgcttgctgagaatatagactctga

SEQ ID NO: 323409 - DNA, 456 bp, Homo sapiens
tgcttttaatttttttaggaaccttcatactgttttccgtgatagttacactacatgccttctatattttaaaacctaaacttaagcagagtttcktgtgttatgcattcattgtcccacaaatataagtcatatctgcttgtgattttctgtctatgcatgcctcaattccaaggcccttggaatgtctattttccttagagagatttaaaaaacatatccaacacttactatgtactgttacagttcttattcacttgtctcatcaatccacaacatctctaggttggaactaatattataactattcttcagatgaataaaatgaggcatcataaaggctaagtaacttgcccaaggtatcataactaattaatggtagagccagggtataaacacagaagctgattccaaaatgtatgctcatgcccatgaaaacgtggagtcttttctcaa

SEQ ID NO: 323410 - DNA, 477 bp, Homo sapiens
tctactaaaaatacaaaaatagccaggcatggtggcgcatgcctgtaatagcagccactcgggaggctgaggcaggagaatcgcttgaacccgggaggtggatgttgcggtgagccgagatcctgggcaacaagagtgaaactccrtctaaaaaaaaagtagagagactggtttttcagctaagcgctcattttggtgaacagtgactaaaaagtttgcataagaagagtgagttaagaaaattggtctcttgaaattcaggaagagaagtttggaatgtaattcttttagaaagcaaagctactgcatgcttttgaacacaagaagttgattttcaagaagtttaatttgcaaggaaagtggtttgaaggaagcgatttgagacaaagaggaaaatgatgtgtttataacaatttagatttattcagagagtcaacagattcttgcaattcttgcagagcacttgttatgagatgc

SEQ ID NO: 323411 - DNA, 601 bp, Homo sapiens
ctgaggcttgtgtaggcagttttaccctcagagtgtaaacaaagctgycaggaagttcaaactgggcggagcccactgcagctcagcaaggctgctgtggccagactgccacatttctgctctctgggcagggcatctctgaaaaaaaggcagcagccccagtcagggacttatagataaaacccccatctccctggaacagagcacctgggggaaggggtggctatgggtgcagcttcagcagatttaaacattcctgcctcacagctctgaagagagcagcaaacctcccagcacagcattcaagctctgttaagggtcagaatgcctcctcaagtgggtccctgacccccgtgtatcctgactgggagataactcccagtaggggctgacagacacctcatacaggagagctctggcaggcatctagcaggtgcccctctgggacaaagcttccagagaaaagaacaggcagtaatctttgctgttctgcagacttcgctggtgatatccaggcaaacagggtctggagtggacctcagaaaactccagcagatcttcagcagaggagcctgactgttagaaggaaaactaacaaaca

SEQ ID NO: 323412 - DNA, 601 bp, Homo sapiens
ctgaggcttgtgtaggcagttttaccctcagagtgtaaacaaagctgccaggaagttcaaactgggcggagcccactgcagctcagcaaggctgctgtggccagactgccacatttctgctctctgggcagggcatctctgaaaaaaaggcagcagccccagtcagggacttatagataaaacccccatctccctggaacagagcacctgggggaaggggtggctatgggtgcagcttcagcagatttaaacattcctgcctcacagctctgaagagagcagcaaacctcccagcacagcattcaagctctgttaagggtcagaatgcctcctcaagtgggtccctgacccccgtgtatcctgactgggagataactcccagtaggggctgacagacacctcatacaggagagctctggcaggcatctagcaggtgcccctctgggacaaagcttccagagaaaagaacaggcagtaatctttgctgttctgcagmcttcgctggtgatatccaggcaaacagggtctggagtggacctcagaaaactccagcagatcttcagcagaggagcctgactgttagaaggaaaactaacaaaca

SEQ ID NO: 323413 - DNA, 607 bp, Homo sapiens
gtattgtgccacttcatcctagcctggatgacagaacaaggccctgtgtataggcaggggaaagagtgaagagtgaagagtttaggatcctgggaaattactgagaaaattgcctgatggaaactaagtctggatcacaactctcatgcttgctgatcatatgacctggacaggtcccttcgtcttcctgctccacagtttcccatttgaaagataacaggattgtatagttaatgtggtccatccctcccagccttaagcactctgtgactcctcttttgttaaccatcgtaacaacaatgatggtctcaactggtctcgtgggcaccctaactcagccatgcacggtaccrgcatcatttccccaggatcacagcatcaaggcaacttggcaaaactggaaatagtagagagaaaaacagaaggaacctaccctcagactttctgtaggaattttagccctgaattatgatggaagagcaatacaagtaccctgtaatattttatatacttattccaaatattagaatgctttgaggaaatagtgaggctttcaaagtcaaaacaaaacctattttgaaagaaaaaactcactgttaatgtttat

SEQ ID NO: 323414 - DNA, 519 bp, Homo sapiens
tacatgaatttgatttcaagtgtcttcaaatcagaagtaatgatcccagtgcaagacaaagcatttaacttttaagatacttaatggccactttgacaatacgggaagcattccacatgcttggacacaatttccagctctaacactccataaccacgcaagctttggtatgctgcackctctccaaacagtatggctaccctgaggctctgaataaaaccttggacactttatatgttcctccttcacagagcaaaagaaacaaaaccaattagatttaaatttacatgtacacacacacacacaatccccaacttcttagaggagttaatgcagcccttaaatgatagatttatttcctttctgtggctcacacacactgctgaaaacttggctcagactgtgatgcatttgacaaggccagcatcacttggggcaatacagaaaaagggttgcttatattttattccctccaattcagctcttttctctcttgctatgcttctttattgccttcca

SEQ ID NO: 323415 - DNA, 627 bp, Homo sapiens
aggagaacacatagtccaaaaccrttagagaaaacagatcccccaagcctggagtgaaatcagaaggattcagcaatggaaataatacaaataggtatcagaaatgagacgtggagccaagaatctggccagggagataaaagcaggatctgggaaacagcctagaactgtcttccctgggtatccatttagatgaagttttctgaatacggggttggaagttcatagcattaaaaatgaaaactaaatatgagtgtgtgtgtgtgtatgcctgtacttattttataaatcattcttatcaaagactccttcagtataagattacaaccttccttttatctttttctttttttggtgtttaataccctctgttttataaaataatgataaagaattttgcaaaaacaatgcaaagaatttgttttgtttaatgttttcagtgggaataagaaatatcgacaaacctgggctatcccttccattagtttttcttgtaatttcagtagtctgtgaaattttaaaatctggaaatggttggcccagaacatgcattcatatttgtaatttttgtgaggtagtcaggatgatatatttggaccaaagaaaaaagtttgaaaagaatcaatt

SEQ ID NO: 323416 - DNA, 539 bp, Homo sapiens
cttgtgccagtccagatgtacaaactaactctcttctttaatttctataaaattcactcatttattttggtgtctaacaaactctactaaaaatttgggttatgaaaagtaattatattgttaaaagagaaactttagctgaattaaatttaagagtttaattgagcaawgatccacgaatcagacagcctcctgagccagagtaggctcagagactccagtgtgaccacatggtggaaaaagattcatgggcacaaaaaggaaagtgatatacagaaaatggaagttaggtacagaaatagccagattggggccgggcacggtggttcacgcctctaatcccagcactttgggaagctgaggtgggcagatcacgaggtgagggtgaagggttcaattaaacaggaagaactaactattctaaatatatatgcacccaatacaggagcacccagatttataaagcaagtttttagagacttacaaagagatttagactaccatacaaaaataatgggagacttcaacacctcactgtc

SEQ ID NO: 323417 - DNA, 539 bp, Homo sapiens
cttgtgccagtccagatgtacaaactaactctcttctttaatttctataaaattcactcatttattttggtgtctaacaaactctactaaaaatttgggttatgaaaagtaattatattgttaaaagagaaactttagctgaattaaatttaagagtttaattgagcaaagatccacgaatcagacagcctcctgagccagagtaggctcagagactccagtgtgaccacatggtggaaaaagattcatgggcacaaaaaggaaagtgatatacagaaaatggaagttaggtacagaaatagccagattggggccgggcacggtggttcacgcctctaatcccagcactttgggaagctgaggtgggcagatcacgaggtgagggtgaagggttcaattaaacaggaagaactaactatyctaaatatatatgcacccaatacaggagcacccagatttataaagcaagtttttagagacttacaaagagatttagactaccatacaaaaataatgggagacttcaacacctcactgtc

SEQ ID NO: 323418 - DNA, 568 bp, Homo sapiens
tactgccagtgaaaacgttaacaatcacactgctataatacaccacggactatccattttctacatagcatcagtgattaagtcctcatttctagtctaactgaggacatagataaaatatcttatctggagtcmcttcctcagtgcttccttgctatcaattttcttaggtcagattcccagggaagtaggctatgagacagagaaatatacgctgaacttcttttggattaggtagagggaaaagctgagctgcaatgcatttgcaatagagtctttgaccaatctcacaggaaactctgatgccaatatggtccctgtattaaagcaaggggttcaagcaattgaactcccacatccattagtcattggatgtataaagcagcagaagagagagaatgagcacttgaccgtgaacctctctcagggagtgagtcaactatgaactcttggcagccaacataacatttttgaaagttgaagggatgagtgacttagtcctgaagggggtatctgtgtggcacgttatggctgtgccacatcatgtctttccattcattctgagaga

SEQ ID NO: 323419 - DNA, 545 bp, Homo sapiens
acacacactgaggcctatcgcagttgggggtgaggggagagagagcatcaggaagaatagttaatggatgctgggcttaatacctagatgatgggttgatctccgcaccaaaccaccatggcacaagtttacctatgtaacaaacctgcacatcctacacatgtaccattgtacttaaaataaaagttgaagtaaaaaaaaaaaaagatatttccttaagtgggtgggggaggaggcagagtgcgtgcacacacataaaagatyaccccttattattaattctgtagcaattttcttagataaataacacatttttctttctttcaccattagctacccaaataaacaggtaactagatttccacttccaatcatgaaggagtattagaatccagaattaatctcctgccataattagaaaactaaaaaatagatagaaaataaacactattttcatatgttggactatataggtagtgcagggctatgacggcagagacagaatggacacgatatggtaaactttgtaattgttcacattttct

SEQ ID NO: 323420 - DNA, 610 bp, Homo sapiens
tgagtctccaacttctgtccaattcaaccctaaggactctctagatccaggggtgtttctggaacagyaatattaaggcatcacccaagagtattacaagaggagcaaaatagagattctcctttgcagacttgaataaagcttgaaccagtttgctgtaaacatgaatgcattacaaattgggggcagttgctttgtggcagagactggaggcaatggctcagaggcagaatgaatattcagatataacctgcatgtccaacagcctttgttattacatatgccagcacattagatattaatttaacctgtgaggtcatagaatcagaagggatgatatgaagagatcacagggctttctgattccctgttaaattgcctctaagctatttaacatttaggatttataagtttccacatcacaaaactctccttgctcttccatctgctggaagcagtgtcagagcacagtccagacctgcttgttaattggtggatagatgctacgtgcagttggcatcaagacttccatgggtgactgtaagggacagagtacagccaggttgggggtgcagggctccgagcttcatagtgaaggagcagcaaggca

SEQ ID NO: 323421 - DNA, 610 bp, Homo sapiens
tgagtctccaacttctgtccaattcaaccctaaggactctctagatccaggggtgtttctggaacagtaatattaaggcatcacccaagagtattacaagaggagcaaaatagagattctcctttgcagacttgaataaagcttgaaccagtttgctgtaaacatgaatgcattacaaattgggggcagttgctttgtggcagagactggaggcaatggctcagaggcagaatgaatattcagatataacctgcatgtccaacagcctttgttattacatatgccagcacattagatattaatttaacctgtgaggtcatagaatcagaagggatratatgaagagatcacagggctttctgattccctgttaaattgcctctaagctatttaacatttaggatttataagtttccacatcacaaaactctccttgctcttccatctgctggaagcagtgtcagagcacagtccagacctgcttgttaattggtggatagatgctacgtgcagttggcatcaagacttccatgggtgactgtaagggacagagtacagccaggttgggggtgcagggctccgagcttcatagtgaaggagcagcaaggca

SEQ ID NO: 323422 - DNA, 610 bp, Homo sapiens
tgagtctccaacttctgtccaattcaaccctaaggactctctagatccaggggtgtttctggaacagtaatattaaggcatcacccaagagtattacaagaggagcaaaatagagattctcctttgcagacttgaataaagcttgaaccagtttgctgtaaacatgaatgcattacaaattgggggcagttgctttgtggcagagactggaggcaatggctcagaggcagaatgaatattcagatataacctgcatgtccaacagcctttgttattacatatgccagcacattagatattaatttaacctgtgaggtcatagaatcagaagggatgatatgaagagatcacagggctttctgattccctgttaaattgcctctaagctatttaacatttaggatttataagtttccrcatcacaaaactctccttgctcttccatctgctggaagcagtgtcagagcacagtccagacctgcttgttaattggtggatagatgctacgtgcagttggcatcaagacttccatgggtgactgtaagggacagagtacagccaggttgggggtgcagggctccgagcttcatagtgaaggagcagcaaggca

SEQ ID NO: 323423 - DNA, 578 bp, Homo sapiens
taaaattctcagtggtgatcttccttagctctctgatttgcaacaaacatgcttatctacagtgacacacactttttccttcttttctctgatttcagaggttgtgtctctcctgctccaggaaacacatttacgtatgctctgggattcacttcttttcccttcagctgggaccttccrttatcagttcccctttttatatgtcacatctcctttaaactggctgctcctcagccaatcagcatgctcaggctcttctgttctgaaaagattttaaactccgtctgatttcttttctcctcttattccatgaatcttcaatgagttatctctacttttcaatgcccactttttaatattcacttaattctcactccactgaaatagagcctctcaacaaatctcatggacttcctctcactagtgacttcctaaatcctgacttcaagggaaactttttagtatctaacttatcaggcttctgtgctgacctgggatgtgctggccattaacatgtttcttacatgtttcttttactcctttgactttgttctgcacacatggccttcattttcagt

SEQ ID NO: 323424 - DNA, 570 bp, Homo sapiens
acattgatacttcctcagtgcctttattcatagtcaaaatgggacacatgatgctaatagaagaggcatgcaagtgttattagaacctgtatgtacatcaaggcaaaaggagatagtgytaaccatttgctgcttactatggtcttgaaccctgtcctcaggcttcacctcaggtgcttaatactttgcctcatgactgctcaagtcttacagtcctctgttctaggtctttctccttgtttttttatttcatgccccttcctattatgactctagttttgcttggctagaaagagatctcagtcttaatggctttctagagaatattgacaaactccattgcaagcgctcagtaaattactgagtttagcacattaatctctatttaacagagctaaagtcctaataaaaggtaattattagacatttagaataagaagaaaatttctcaggcatatagtgcagtcttcaagacattttctcatagctaaaatactgaacatggattcttcttcctattagtattcttttgttgtaggaaacaattctctatgcttaataataaataat

SEQ ID NO: 323425 - DNA, 373 bp, Homo sapiens
aacttgaaggctcacattgatacttcctcagtgcctttattcatagtcaaaatgggacacatgatgctaatagaagaggcatgcaagtgttattagaacctgtatgtacatcaaggcaaaaggagatagtgttaaccatttgctgcttactayggtcttgaaccctgtcctcaggcttcacctcaggtgcttaatactttgcctcatgactgctcaagtcttacagtcctctgttctaggtctttctccttgtttttttatttcatgccccttcctattatgactctagttttgcttggctagaaagagatctcagtcttaatggctttctagagaatattgacaaactccattgcaagcgctcagtaaatta

SEQ ID NO: 323426 - DNA, 570 bp, Homo sapiens
acattgatacttcctcagtgcctttattcatagtcaaaatgggacacatgatgctaatagaagaggcatgcaagtgttattagaacctgtatgtacatcaaggcaaaaggagatagtgttaaccatttgctgcttactatggtcttgaaccctgtcctcaggcttcacctcaggtgcttaatactttgcctcatgactgctcaagtcttacagtcctctgttctaggtctttctccttgtttttttatttcatgccccttcctattaygactctagttttgcttggctagaaagagatctcagtcttaatggctttctagagaatattgacaaactccattgcaagcgctcagtaaattactgagtttagcacattaatctctatttaacagagctaaagtcctaataaaaggtaattattagacatttagaataagaagaaaatttctcaggcatatagtgcagtcttcaagacattttctcatagctaaaatactgaacatggattcttcttcctattagtattcttttgttgtaggaaacaattctctatgcttaataataaataat

SEQ ID NO: 323427 - DNA, 573 bp, Homo sapiens
gtattatgtatgccacacttgtgtatcttcaccctcactattccagcatgtgcttactgtgcttctaatttccagcatcgacttctctttgtctaaattttctttgcccatgtgcttagcaggccagtgatgccccttgatgarcactcattcaataactggtggagtccacgatgtagccccagtggtgaggttactcaccactttgttaagacaactttgaggtccatgttccatgctggctgccagagttcctcatttggaacatttcagctaccacagtggtaatgtccttgtacatacacttttttggctgctttctatgccttgttttacttttccactgtcctttctgtgtctcctgacatcttcacccacataaatgaccagcacttgaatccctgtctctaggtctttttccaaggaaatccaacctaaaacaccaattcaagcagaattttattgaaaaacaatatttattgaaaactgactgaaaatatgtccataagcaatattatttattactgaggttggtgtgatcacaaatgagtattttcttccttttgcttatct

SEQ ID NO: 323428 - DNA, 573 bp, Homo sapiens
gtattatgtatgccacacttgtgtatcttcaccctcactattccagcatgtgcttactgtgcttctaatttccagcatcgacttctctttgtctaaattttctttgcccatgtgcttagcaggccagtgatgccccttgatgaacactcattcaataactggtggagtccacratgtagccccagtggtgaggttactcaccactttgttaagacaactttgaggtccatgttccatgctggctgccagagttcctcatttggaacatttcagctaccacagtggtaatgtccttgtacatacacttttttggctgctttctatgccttgttttacttttccactgtcctttctgtgtctcctgacatcttcacccacataaatgaccagcacttgaatccctgtctctaggtctttttccaaggaaatccaacctaaaacaccaattcaagcagaattttattgaaaaacaatatttattgaaaactgactgaaaatatgtccataagcaatattatttattactgaggttggtgtgatcacaaatgagtattttcttccttttgcttatct

SEQ ID NO: 323429 - DNA, 573 bp, Homo sapiens
gtattatgtatgccacacttgtgtatcttcaccctcactattccagcatgtgcttactgtgcttctaatttccagcatcgacttctctttgtctaaattttctttgcccatgtgcttagcaggccagtgatgccccttgatgaacactcattcaataactggtggagtccacgatgtarccccagtggtgaggttactcaccactttgttaagacaactttgaggtccatgttccatgctggctgccagagttcctcatttggaacatttcagctaccacagtggtaatgtccttgtacatacacttttttggctgctttctatgccttgttttacttttccactgtcctttctgtgtctcctgacatcttcacccacataaatgaccagcacttgaatccctgtctctaggtctttttccaaggaaatccaacctaaaacaccaattcaagcagaattttattgaaaaacaatatttattgaaaactgactgaaaatatgtccataagcaatattatttattactgaggttggtgtgatcacaaatgagtattttcttccttttgcttatct

SEQ ID NO: 323430 - DNA, 573 bp, Homo sapiens
gtattatgtatgccacacttgtgtatcttcaccctcactattccagcatgtgcttactgtgcttctaatttccagcatcgacttctctttgtctaaattttctttgcccatgtgcttagcaggccagtgatgccccttgatgaacactcattcaataactggtggagtccacgatgtagccccagtggtgaggttactcaccactttgttaagacaactttgaggtccatgttccatgctggctgccagagttcctcatttggaacatttcagctaccacagtggtaatgtccttgtacatacacttttttggctgctttctatgccttgttttacttttccactgtcctttctgtgtctcctgacatcttcacccacataaatgaccagcacttgaatccctgtctctaggtctttttccaaggaaatccaacctaaaacaccaattcaagcagaattttattgaaaaacaatatttattgaaaactgackgaaaatatgtccataagcaatattatttattactgaggttggtgtgatcacaaatgagtattttcttccttttgcttatct

SEQ ID NO: 323431 - DNA, 586 bp, Homo sapiens
tccttaaagaagtaaaaatgacccatgcggtctggagggaaaaagtaaatttaagaaaagaataagttaactttgaagcaggagattcatattactcagaggtrtggagatgtcatttgaagttttctatagaggtctcactagggccatattaaaaacaagaatgggtggggctttatggctcgtgcctgtaatcccagcattttgggaggccaaaatagaaggatcatttgaacccaggagttgagaccagcctgagcaaaatggcaaaacaccatgtctacaaaaaatttagtcgggcgtggtggtgcatgcctgtagtctgggctactcagaggctgaggtgggaggatcacatgaacttgggaggtcaaggctgcattgatccatgattgagccactgcactccagtatgggagacaaagaccctgtcttaaaaaaaagtcataaatacagaaagcaaattgataatccatcattttggaaaagagatagaccctggatcatgatctgggatttgaagatacaaagctttagggccctgggtgacctgcagttacgtggatggccacatggggaaagcaaa

SEQ ID NO: 323432 - DNA, 586 bp, Homo sapiens
tccttaaagaagtaaaaatgacccatgcggtctggagggaaaaagtaaatttaagaaaagaataagttaactttgaagcaggagattcatattactcagaggtatggagatgtcatttgargttttctatagaggtctcactagggccatattaaaaacaagaatgggtggggctttatggctcgtgcctgtaatcccagcattttgggaggccaaaatagaaggatcatttgaacccaggagttgagaccagcctgagcaaaatggcaaaacaccatgtctacaaaaaatttagtcgggcgtggtggtgcatgcctgtagtctgggctactcagaggctgaggtgggaggatcacatgaacttgggaggtcaaggctgcattgatccatgattgagccactgcactccagtatgggagacaaagaccctgtcttaaaaaaaagtcataaatacagaaagcaaattgataatccatcattttggaaaagagatagaccctggatcatgatctgggatttgaagatacaaagctttagggccctgggtgacctgcagttacgtggatggccacatggggaaagcaaa

SEQ ID NO: 323433 - DNA, 586 bp, Homo sapiens
tccttaaagaagtaaaaatgacccatgcggtctggagggaaaaagtaaatttaagaaaagaataagttaactttgaagcaggagattcatattactcagaggtatggagatgtcatttgaagttttctatagagrtctcactagggccatattaaaaacaagaatgggtggggctttatggctcgtgcctgtaatcccagcattttgggaggccaaaatagaaggatcatttgaacccaggagttgagaccagcctgagcaaaatggcaaaacaccatgtctacaaaaaatttagtcgggcgtggtggtgcatgcctgtagtctgggctactcagaggctgaggtgggaggatcacatgaacttgggaggtcaaggctgcattgatccatgattgagccactgcactccagtatgggagacaaagaccctgtcttaaaaaaaagtcataaatacagaaagcaaattgataatccatcattttggaaaagagatagaccctggatcatgatctgggatttgaagatacaaagctttagggccctgggtgacctgcagttacgtggatggccacatggggaaagcaaa

SEQ ID NO: 323434 - DNA, 586 bp, Homo sapiens
tccttaaagaagtaaaaatgacccatgcggtctggagggaaaaagtaaatttaagaaaagaataagttaactttgaagcaggagattcatattactcagaggtatggagatgtcatttgaagttttctatagaggtctcactagggccatattaaaaacaagaatgggtggggctttatggctcrtgcctgtaatcccagcattttgggaggccaaaatagaaggatcatttgaacccaggagttgagaccagcctgagcaaaatggcaaaacaccatgtctacaaaaaatttagtcgggcgtggtggtgcatgcctgtagtctgggctactcagaggctgaggtgggaggatcacatgaacttgggaggtcaaggctgcattgatccatgattgagccactgcactccagtatgggagacaaagaccctgtcttaaaaaaaagtcataaatacagaaagcaaattgataatccatcattttggaaaagagatagaccctggatcatgatctgggatttgaagatacaaagctttagggccctgggtgacctgcagttacgtggatggccacatggggaaagcaaa

SEQ ID NO: 323435 - DNA, 610 bp, Homo sapiens
agaagaaaatcattaatattttactccacgatgtcatgccaataaaaagggtaattcatactaattcccttgtgggcttaatcatttttctttcaatrttaggatgaatattagagtcttcattagaataactccttgaaaacagttaataatatttaattattaattagtaataagtaatagtacttaaattaattcttacatgcgggggctgtcccgcagaccctgacccaacgacagatgaataatatatgctgacacagatattctgcctgtcagtctggctaagggtctgagcccctcacagataccaaggaaggtgctgtaaagagtagcagcggcagccccctcagccagtgaagctcgcatttattcagtatagattaaatgacaaaggtcttgagtaaacaccactagagggtaattgacccagttgctaactccccagagtagagagaaattatgcaccagcagttgatcaaaggttggtcttgggaccacatgagtaaacaagctatttagataaactcctctgcattcctttgtacctactgtgaactatttacacaaggtaaggattagactgctttcagccataacactgtcctaa

SEQ ID NO: 323436 - DNA, 511 bp, Homo sapiens
aagtttaaaactttttatgtttcaagtttaccaagtctcacccaacagaaatgaattttttctatttttctcctctcctttgagaagtcactttctatttttctataatattaacatatatcaagtattgctagtggctgattgtcccctgatatgcattctcaccttctctgtactaaaaggcacaactgcagaatttggacatgctgtcctttttccttcccaccccccacccccacactggctggagtggagatatcctggaccatgtgggtgagtgcctcatcccagtgattacagagcaacaaggcagaagagtccatggccattcagcttaccttcctaccactgcttrtacctggatataagaaaaatgcacttctgtcttatataagccactgtagttttgggcttctgttacagcaattgagactacgtcctaactcataaaaacacctgacatatgccaggcaagagttcagcacttcatgtactttagcccatcttcaca

SEQ ID NO: 323437 - DNA, 511 bp, Homo sapiens
aagtttaaaactttttatgtttcaagtttaccaagtctcacccaacagaaatgaattttttctatttttctcctctcctttgagaagtcactttctatttttctataatattaacatatatcaagtattgctagtggctgattgtcccctgatatgcattctcaccttctctgtactaaaaggcacaactgcagaatttggacatgctgtcctttttccttcccaccccccacccccacactggctggagtggagatatcctggaccatgtgggtgagtgcctcatcccagtgattacagagcaacaaggcagaagagtccatggccattcagcttaccttcctaccactgcttgtacctggatataagaaaaatgcacttctgtcttatataagccactgtagttttgggcttctgttacagcaattgagactaygtcctaactcataaaaacacctgacatatgccaggcaagagttcagcacttcatgtactttagcccatcttcaca

SEQ ID NO: 323438 - DNA, 511 bp, Homo sapiens
aagtttaaaactttttatgtttcaagtttaccaagtctcacccaacagaaatgaattttttctatttttctcctctcctttgagaagtcactttctatttttctataatattaacatatatcaagtattgctagtggctgattgtcccctgatatgcattctcaccttctctgtactaaaaggcacaactgcagaatttggacatgctgtcctttttccttcccaccccccacccccacactggctggagtggagatatcctggaccatgtgggtgagtgcctcatcccagtgattacagagcaacaaggcagaagagtccatggccattcagcttaccttcctaccactgcttgtacctggatataagaaaaatgcacttctgtcttatataagccactgtagttttgggcttctgttacagcaattgagactacgtcctaactcataaaaacacctgayatatgccaggcaagagttcagcacttcatgtactttagcccatcttcaca

SEQ ID NO: 323439 - DNA, 511 bp, Homo sapiens
aagtttaaaactttttatgtttcaagtttaccaagtctcacccaacagaaatgaattttttctatttttctcctctcctttgagaagtcactttctatttttctataatattaacatatatcaagtattgctagtggctgattgtcccctgatatgcattctcaccttctctgtactaaaaggcacaactgcagaatttggacatgctgtcctttttccttcccaccccccacccccacactggctggagtggagatatcctggaccatgtgggtgagtgcctcatcccagtgattacagagcaacaaggcagaagagtccatggccattcagcttaccttcctaccactgcttgtacctggatataagaaaaatgcacttctgtcttatataagccactgtagttttgggcttctgttacagcaattgagactacgtcctaactcataaaaacacctgacatatgccaggcaagagttcagcamttcatgtactttagcccatcttcaca

SEQ ID NO: 323440 - DNA, 608 bp, Homo sapiens
tcaggatgggaagatattcccagctgttgccttcctcttcctttcttctcctggctatagatcctttggtgtgttgaggaggagaagggggacagggacacgtttttttttttagtggctattgttgtagtctttcctctgggctcggtcctgtttctctaacaccaatcacattcaatgccttctgagttctaggccttcaactgttggttctggggagggagagttgtgagttttctgcggagactggggttcttgcaaaagatccattctgaacctacctcttcycatcctgtctcattccctgactaagtagtaccccgcagcttgctcctggagtatgcctctcttgttgctcgcaagatcgctcaacttgcctcctcttccacgatgtccatctgacccacaggaaactcatggagcagctttgccttgtcaaattgtgagcttgggagctgctccacagccacactgcttcttcctttccctcccctcttttggattttttttcctcagctcaaagaggctcagaaggcaaatcatctagcagtctatataaatatacttccaattgtgggagaagatatcagttaccctgatgcacgaag

SEQ ID NO: 323441 - DNA, 608 bp, Homo sapiens
tcaggatgggaagatattcccagctgttgccttcctcttcctttcttctcctggctatagatcctttggtgtgttgaggaggagaagggggacagggacacgtttttttttttagtggctattgttgtagtctttcctctgggctcggtcctgtttctctaacaccaatcacattcaatgccttctgagttctaggccttcaactgttggttctggggagggagagttgtgagttttctgcggagactggggttcttgcaaaagatccattctgaacctacctcttctcatcctgtctcattccctgactaagtagtaccccgcarcttgctcctggagtatgcctctcttgttgctcgcaagatcgctcaacttgcctcctcttccacgatgtccatctgacccacaggaaactcatggagcagctttgccttgtcaaattgtgagcttgggagctgctccacagccacactgcttcttcctttccctcccctcttttggattttttttcctcagctcaaagaggctcagaaggcaaatcatctagcagtctatataaatatacttccaattgtgggagaagatatcagttaccctgatgcacgaag

SEQ ID NO: 323442 - DNA, 608 bp, Homo sapiens
tcaggatgggaagatattcccagctgttgccttcctcttcctttcttctcctggctatagatcctttggtgtgttgaggaggagaagggggacagggacacgtttttttttttagtggctattgttgtagtctttcctctgggctcggtcctgtttctctaacaccaatcacattcaatgccttctgagttctaggccttcaactgttggttctggggagggagagttgtgagttttctgcggagactggggttcttgcaaaagatccattctgaacctacctcttctcatcctgtctcattccctgactaagtagtaccccgcagcttgctcctggagtatgcctctcttgttgctcgcaagatsgctcaacttgcctcctcttccacgatgtccatctgacccacaggaaactcatggagcagctttgccttgtcaaattgtgagcttgggagctgctccacagccacactgcttcttcctttccctcccctcttttggattttttttcctcagctcaaagaggctcagaaggcaaatcatctagcagtctatataaatatacttccaattgtgggagaagatatcagttaccctgatgcacgaag

SEQ ID NO: 323443 - DNA, 608 bp, Homo sapiens
tcaggatgggaagatattcccagctgttgccttcctcttcctttcttctcctggctatagatcctttggtgtgttgaggaggagaagggggacagggacacgtttttttttttagtggctattgttgtagtctttcctctgggctcggtcctgtttctctaacaccaatcacattcaatgccttctgagttctaggccttcaactgttggttctggggagggagagttgtgagttttctgcggagactggggttcttgcaaaagatccattctgaacctacctcttctcatcctgtctcattccctgactaagtagtaccccgcagcttgctcctggagtatgcctctcttgttgctcgcaagatcgctcaacttgmctcctcttccacgatgtccatctgacccacaggaaactcatggagcagctttgccttgtcaaattgtgagcttgggagctgctccacagccacactgcttcttcctttccctcccctcttttggattttttttcctcagctcaaagaggctcagaaggcaaatcatctagcagtctatataaatatacttccaattgtgggagaagatatcagttaccctgatgcacgaag

SEQ ID NO: 323444 - DNA, 633 bp, Homo sapiens
ttcctatgaaagtatttatcaaatattacttaataacaaattaaatgtctgaatataccttaaccagaagttgaataaataaattttaaccaactctctctcctscataaaattctaagactttaggacttactggtaatttatgctaaacgtttacatgttttaacaagctcttccagagaacagaaaatgagaaaatcttcactaaattgttttataaggataaaaaaattagagaacaaaaaattataggtcaatttctcttataaaatagtgcatatatcctaaataaaatgttgtcaatccaaattaaaagatatataaatatagttcattataatcaagttgaatgtatattagagatgttaaaaatcaattagtataattttccactttaagtttgaagaagaaaacgatttagctgtctcaacagatgagttaaagcattcaataaaattaaacatctattcataggaaaagttaaatctagaagggagcacatttaacctgataaaaacatatccataaaaatctatggtaagcaccataaatattgatggaaaaaacattttaaaaatctatatgctacaagtatgctagcaaatgttctggttcaagtaagccttctaaaaa

SEQ ID NO: 323445 - DNA, 633 bp, Homo sapiens
ttcctatgaaagtatttatcaaatattacttaataacaaattaaatgtctgaatataccttaaccagaagttgaataaataaattttaaccaactctctctcctccataaaattctaagactttaggacttactggtaatttatgctaaacgtttacatgttttaacaagctcttccagagaacagaaaatgagaaaatcttcactaaattgttttataaggataaaaaaattagagaacaaaaaattataggtcaatttctcttataaaatagtgcatatatcctaaataaaatgttgtcaatccaaattaaaagatatataaatatagttcattataatcaagttgaatgtataktagagatgttaaaaatcaattagtataattttccactttaagtttgaagaagaaaacgatttagctgtctcaacagatgagttaaagcattcaataaaattaaacatctattcataggaaaagttaaatctagaagggagcacatttaacctgataaaaacatatccataaaaatctatggtaagcaccataaatattgatggaaaaaacattttaaaaatctatatgctacaagtatgctagcaaatgttctggttcaagtaagccttctaaaaa

SEQ ID NO: 323446 - DNA, 551 bp, Homo sapiens
ttgactcaacaaattctgactgctgtggtagatcttcttctgtctcaaattctcccccttctcgattcatttcaaatgtcaattgtccataaaataattgatgtatgcacacaggtatgttgcattttttttccaaacagacaatgatattataaggcaaaattacaacaaatttagtttaaagatctcactgacttttatttgtgattctataacatagagtgagtattctgatgagttgagaagacaaatttggctttataagcagaaaatggctgaagaaagcagaaatacagaacacaaggcgggttggttattggaaagttaccatcctcatagggttaaaactgagggaacttccttactatgctgagtcaggcagactggaatctcctgtgttttggaaaactggcccatttcaaaattgtttgattaccgtcccttagtctaagtgactccattctggtttgatcyggtctgctaagagcaagtgcaagaggctagttcacagcaacggcctccactaaactttgtttaacaacatgcaaagc

SEQ ID NO: 323447 - DNA, 485 bp, Homo sapiens
caatatgtgtccctaagtgtgcttctaggaataggatgagaggtaattaagtgagatattgggaaccaccagtttacacacaagaatctgttcacataaaacttacttgtagttcatagattrcaaaatggaagcaggcatattaggcacttatttactccagtaatagccagatttcttttttgcataaactttttatgcaaaaaactttctaatctgttagtatatgaagaattttgataataatgagggaatacattcatggaatagttacaaaatcttacagttaatatatattttaaagtaaaaatattaaaactaacaaaagacgtatttttaaaaacaagatgctatatttctctggtgtaaaggcctgtttaccttcacacagtgaagctgatattaactctgtggttgcaagaggagcaagggtaccataccacgtaggttttcatccctaggaggcttgtgaagttcaagacaag

SEQ ID NO: 323448 - DNA, 625 bp, Homo sapiens
taaagaaggtgggaagcactagacacttgggcaaagaagcctcctacagttgttcatcccggaggcaagtgcaaaaagctatgtgagcatagatgccataaacaagaaagatgatcaaaggcgatgcaccaggcaggaaagagttaaaaatatttctttctggttccattctggagcattttattgcaaaatcacattcatatagtttctgctcatctgagagagaagataaaaaagatcttagagcaagtagtatgtttcctgctgaatatcaatctcccacagccctctcttgaccagcttttatgagaacacaaaagcccatctgtgactatggccaatcccctattaaaaggtctcatgagaacaggtatctctcttwctcagcacttggcatagccacaattttgaattttgttaaacataattacatgatgattttctataatactagactgtaaaagccacgagaccaggactggacttatttttcccatctttttatcttcagcactgagcacaatgcctgtcacattaaaatgctcaataaatacaactcaaaaagagaaccaataaatgataatacaactattagctaagtagctacataaactgagatacacta

SEQ ID NO: 323449 - DNA, 625 bp, Homo sapiens
taaagaaggtgggaagcactagacacttgggcaaagaagcctcctacagttgttcatcccggaggcaagtgcaaaaagctatgtgagcatagatgccataaacaagaaagatgatcaaaggcgatgcaccaggcaggaaagagttaaaaatatttctttctggttccattctggagcattttattgcaaaatcacattcatatagtttctgctcatctgagagagaagataaaaaagatcttagagcaagtagtatgtttcctgctgaatatcaatctcccacagccctctcttgaccagcttttatgagaacacaaaagcccatctgtgactatggccaatcccctattaaaaggtctcatgagaacaggtatctctctttctcagcacttggcatagccacaattttgaattttgttaaacataattacatgatgattttctataatactagactgtaaaagccacgagaccaggactggacttatttttcccatctttttatcttcagcactgagcacaatgcctgtcacattaaaatgytcaataaatacaactcaaaaagagaaccaataaatgataatacaactattagctaagtagctacataaactgagatacacta

SEQ ID NO: 323450 - DNA, 533 bp, Homo sapiens
tgcctcaggctgttcctgcaggtgtccccagtatttcctgcttattgagtggtttagacaagatggaactgactccaccctgcatggtgctcagtgtgctgcgtggaccattccaacagctggggagaaacaagttcctcttcgcacccggtgtgataataagtgagatccctatgaacaagcaaggaaggaagcttcctgacacagtgcaccatggacatttagcatgtaactcttctgttatttgtggaaatgaggttataagaggaaaatatgtagacgtgagagcatggagtttgggcgtcctttctggcaacccagaggcatattcttctgggttctcttctgcattctatttgtaaacagaattatstaggtaagaaaaatgttactttagtagacagaatcgtaaaaaataaagtaaaaaaatattttaagcatcataaatgtggaataagaaaatgagatatttaggttaagcttgaatggtttagattcattttaaatcaagttttagtatttcttttcaaatc

SEQ ID NO: 323451 - DNA, 583 bp, Homo sapiens
ccaggtgtggccttcaccaccgcactgacaactaactgtgtgggacacagcttcatcgctgggagacgcctgaatgccagagcttcctcagcctatcttcccwttatcgctggatgatgacctaggagacagtcatggccaattctgccagtggaatagcgtggataatactaaattacccatgttattcaacaatgactgttttagatgtacttgactgtacttggaattatgaaagtataccgcacacagtatcattccctattagccaccaaatgcagctaacaggaccctgtatttaaatagaggagatactgatatcccatcccagttggtttttcctcttatttttgtggaaaaccatttgaaggtgattcctgaacaatttcaattaatgacacatgcataaatcaaagtgggaaatgatgggtaacttacagtgatgcaaaggtttttcttctcacttaggaataatgtcttttcatttgatgttaacattttaaagatctggctgggaattgaatggacttgctttctcttttagttttgctgagtagaggaggtggggggagtaacagttccc

SEQ ID NO: 323452 - DNA, 583 bp, Homo sapiens
ccaggtgtggccttcaccaccgcactgacaactaactgtgtgggacacagcttcatcgctgggagacgcctgaatgccagagcttcctcagcctatcttccctttatcgctggatgatgacctaggagacagtcatggccaattctgccagtggaatagcgtggataatactaaattacccatgttattcaacaatgactgttttagatgtacttgactgtacttggaattatgaaagtataccgcacacagtatcattccctattagccaccaaatgcagctaacaggaccctgtatttaaatagaggagatactgatatcccatcccagttggtttttcctcttatttttgtggaaaaccatttgaaggtgattcctgaacaatttsaattaatgacacatgcataaatcaaagtgggaaatgatgggtaacttacagtgatgcaaaggtttttcttctcacttaggaataatgtcttttcatttgatgttaacattttaaagatctggctgggaattgaatggacttgctttctcttttagttttgctgagtagaggaggtggggggagtaacagttccc

SEQ ID NO: 323453 - DNA, 513 bp, Homo sapiens
ggttttaagctacatctgctctactgcttacttaaaattttacttttctttgctttttagaaaatggaaggatatttccaggactgaagaacgtcaactagcagctgtggttaaacagtataggaagcatatatacagatttgtatggcatttttcagtacatggagggatgaatatgtcttgactgacattagaattgactccacctaaatattcaataataatagttgccatcaaaataaacagttaaaccggatatagcattttgtggcaaaacttgtggcaaaacatttcacctaccgtatgtgacaaccaataaataacctctccatgatgtttaaaaaagtgtcyccaaatgtgacacaatatatatgttgggtactagcagctgagccctccccattcccagctatcagccccacctttaattcagagcagcacagcttcccttacccgctgcttaagtgactgttaatggacctgagcagctgctcaaggtctaatgatctgcat

SEQ ID NO: 323454 - DNA, 598 bp, Homo sapiens
tttttctgactttagtaaagtttcttaacatttctaagcttgctttatctgcaaaatrggtataaatgtaatttctatttatactcttgctgatgaatcaaatgagataatccatgtaaagcaacttagatagtatatacttattatgtagtaggtactcaataaatattagctagcaataatcaatatattaaacttcttaccaaatattgtcattttctactataatctgccctccattcataatggcgacgtttccagaggagtaaatgttttaaaattcttaataagttttagaataccaaagagccattctttgattcagagttccactactttccacctgtatggccatatgctatttatgtaatctccctgagcctcagttttctgtatgtgttcaatatgtctatttcttttttccttttctattctttacagatttccaaatgcaaatttcaatttggcttgacaaaaatgaaaactataatcttaataattcatattctcactaaatgtcttatgtacattagacatttttccatgcttgacaataaagttgatgtatatattgagcaatcttgttcaatattggaaa

SEQ ID NO: 323455 - DNA, 564 bp, Homo sapiens
catcttatgcagtcagaatggctattattaaaaagtcaagaataatagatgttggtgaggatacggagaaaaaaggatgcttatacactgttggtgggatgcaaattagtacagccagtatggaaaacagtatggcaatttctcaaagaactaagcatagaattactatttgatctagtaatctcactattgggtatctacccaaaggaacagaaatcattacatcaaagagatacctacacttgtatgtttatcatagcattctttacaataccaaagatatggaatcaacctaagtgttcatgatcagatgattggataaagacaatgtggtacaaatataccatagaatactacttagtcatagaaaagaatgaaatcatgtcttttgtggcaacaggaatacatctggaggccattatcacaagtgaaatgactcagaaacagaaagacaaatagcaaatgttctctgataagtgrtagctgaataatgtgtacacatggacatcgagtgtggaataatagatactggagaatttgaaaggttttgaaagtaggcagcag

SEQ ID NO: 323456 - DNA, 353 bp, Homo sapiens
atactgagacactagctggggcagccaagggagtgctggcatcaccacttctttaaccccaggctgcacaacttgaggctttaaaaaagtccccttccttctgcttgaggaggagagaaggaagcgtggggaagactttgtcttgcatctaggataccagttcagccacagcaagacagggaactggttggaggtktgaagacctcatcccaggatctatcttgcagacaacatttctagccataccatgggacagaagggaacctgctaccttgaaggaaaggacccagtcctggcagcattcatcacctgctcactgaagagcctgtgggccctgaataaccagcagcagt

SEQ ID NO: 323457 - DNA, 575 bp, Homo sapiens
aaaataacataaaatacattcaaaattcattaaagctgattaaaccaataccaaacaagtaaaactgcctaagtataataattggttcttacacaggaaaaaaaatatcatcctattgtgttagggaaagactttcatgaaaacagactagaaatttgggcttaatatataagtaggattctgaatgactaaaccaagcaataaacatgttatagaaagtattaaatgaagaggtggttgagaagtagaggcagtgtttatactgtaaatattatggtataaatccwtatgtagattttattttgaccttgactatttaacatagagctattttgaaaatgcacattttgtcaaaggtgttttctttaccagctttaatagaaaatgagagtatttatttataattcctcaggcaaattcaattctgcttactgcctttgggttagcacattactttcaggtcatagttagcagcaatataatgcaagtattttgtgatttagacacgagctagaatttaaattgcatcttctgatattttgctgtttcaggataaaaatgaaacaaaactcatg

SEQ ID NO: 323458 - DNA, 525 bp, Homo sapiens
agaaagataacttatttttaaatttttatttcctgcattttcatgattatttccttttcaacttgacatcacaatagacacagacaaaacctatgctatgaatgttttgaaaggtatttcttttcactttcctaaacatgagggggaaaaaaatggcatttcacattgagtaactgacatcagggatgtgactgtcttgcaaatctcaagttgtatgtctagaatcttttaggagtagaggccattagtgccaatttggggcttagaacagaagaattagcaatgacaataattgttacaattttgctgtacaatttttaaaagtacacctggagtagctatatatgtatgtttatatactgatatttagatagacattgagagagataatttttaattatacctaaaaatagtgctcttatttaattctaacttagaaacctagagasacttcaaaaatactatggtttcatgacaaataatacaattttttctagtatttagacatccttgaaaatgtagttt

SEQ ID NO: 323459 - DNA, 635 bp, Homo sapiens
tctaggtttgtgtaagtatgctctgtgatgtttacacaatgataaaattacctgagaaggcatttctcagaatctatccccattggtacgtgacacatgacagtacatagcagatatggaacacatagttgaatctataaatctaactattagggaagagatttgagataatgaaaacaatttaagagtcatcagcacaaaaactttttatatgtctgaataagaccatgatgaagtgaagataaagagaaaagagaagtgactccagaactgagccctgcctgggtcattcacttgttaaggatgaaggcaatgaggaggaatcaacacaggagagtgaaaaaggagcagttagaggggtcagagtaacacagggagtgtgatgtcctaatacaccacacatatgccaagagagtctgaaaagctttattattcctataatgtggttatcaaactgatccaaagtggcttgagagctgagaaaaragagtcggtgggggaaacattatggctaagaggtggggctaggttgacacttcctagacttccaaaggtgtgaaactcccattggtgccaaagaacatagcatgcaggctttcttatcagcttgctcagatgcagaaaaaaaaaaaaag

SEQ ID NO: 323460 - DNA, 518 bp, Homo sapiens
gtaataaccatcttcgctttagctaatggtacctggaaattcacccaggcaatacaaagaatgctttgacactgtgaaaatctcttgccttgagttatttctaagttcccttctgtaccataggaatagccattccttatagagtactttccaaaatgaggcagaagcacctgtacttgtgtcaaaaaacaaacaaacaaacaaacaaamaaaaaaaacttctttctaaaggataaaacctattttgtcctttgtaattagaaagaaaccttagcaggttttatatgagattctacaaattttacctacattgatccccttaaagaaaaatgcatgacatatttaaaatgctatgcctcaaggtcactgccaagcattcttattttatgtagaggtgctatgtgcctctattcagattttattttgcctgtttgttaacctccagacacaaatgattctttggaaggaacatcttaaattttatatagttttagagagccttttgcttcctttctttt

SEQ ID NO: 323461 - DNA, 518 bp, Homo sapiens
gtaataaccatcttcgctttagctaatggtacctggaaattcacccaggcaatacaaagaatgctttgacactgtgaaaatctcttgccttgagttatttctaagttcccttctgtaccataggaatagccattccttatagagtactttccaaaatgaggcagaagcacctgtacttgtgtcaaaaaacaaacaaacaaacaaacaaacaaaaaaaacttctttctaaaggataaaacctattttgtcctttgtaattagaaagaaaccttagcaggttttatatgagattctacaaattttacctacattgatccccttaaagaaaaatgcatgacatatttaaaatgctatgcctcaaggtcactgccaagcattcttattttatgtagaggtgctatgtgcctctattcagattttattttgcctgtttkttaacctccagacacaaatgattctttggaaggaacatcttaaattttatatagttttagagagccttttgcttcctttctttt

SEQ ID NO: 323462 - DNA, 583 bp, Homo sapiens
ctgtaccattgtattatcagaaaaatcatcagcgatttccttatatcaggttattgtatttctcacagttttggcatattatatgttgatgaactattctctcataatctgagaagtatctgtgacattttatgatttaaataactttcatcataacattttatgaacttatatcaatctataacatcagcagtacaaaaatgcattttgaattgtgctgatttattttaaatgatttagttaaattgcctcatttaaaagtcaagatgttttatttagttataagattctttgaattgcagtttttttttttttttgagaaagtagggaaacttacggaggttacattttttctgttctttattttgtgtagayaatatctattctatatattagatgtaagagatgacactgagtttaaaaaatcatcaaaatctgaggaaaaaattacagagttatgagaattcaattcataatgggatgacgatatgattctgccattaatacagcagtaataggaggaaaagagccaagaggaatatttaaaaggttgaaatatatgatttttgaaatgatgatgcag

SEQ ID NO: 323463 - DNA, 569 bp, Homo sapiens
ttggtcattttaaatctgaaattcttgtgaaacatccaaggtgacatgtcaagattgtagcatatctggaatacaaagtaaacatttaaattggaatatgtatctgtgaatattatcatttttagcatcataggtataaatgaggccatctagacagaaagtttttaaaaaactgcaataactaggtcctaaattccttaacttagaaacttacgaaaatacagacatgtaacctcaacactctgaatctcttcttcagtcagtctaggtttcagggkccaggaatatgtagtttttagaaaagttcccaggctcactgaataaatcttaacaacatgattgtaaatatgtaacaaacatcaaaaacttttgatgctaaattaaccaattatttatcacagtgaaacatatttaacatgttttactctaaatttgacagacaaaagaaaaaaattagctgtattggcaaatatataaacaaggtaattcacaaactttgaatacgtgtataaaatctgaacacctcccccaaattgaataaacattcctttttagcctctattaattat

SEQ ID NO: 323464 - DNA, 569 bp, Homo sapiens
ttggtcattttaaatctgaaattcttgtgaaacatccaaggtgacatgtcaagattgtagcatatctggaatacaaagtaaacatttaaattggaatatgtatctgtgaatattatcatttttagcatcataggtataaatgaggccatctagacagaaagtttttaaaaaactgcaataactaggtcctaaattccttaacttagaaacttacgaaaatacagacatgtaacctcaacactctgaatctcttcttcagtcagtctaggtttcaggggccaggaatatgtagtttttagaaaagttcccaggctcactgaataaatcttaacaacatgattgtaaatatgtaacaaacatcaaaaacttttgatgctaaattaaccaattatttatcacagtgaaacatwtttaacatgttttactctaaatttgacagacaaaagaaaaaaattagctgtattggcaaatatataaacaaggtaattcacaaactttgaatacgtgtataaaatctgaacacctcccccaaattgaataaacattcctttttagcctctattaattat

SEQ ID NO: 323465 - DNA, 607 bp, Homo sapiens
ccctagcctgaccaagcttggtacaggctagaagctttttgctcacagctgtagaatatggagaaaccttgacttccatccctgttccccaacttcagcagtcattgctgggataacattagctcctttcctggagttccctgggattacagcccaagtattacagttgcagctgtatgataacaacatagacaaatagcttccagtcctgatgagccacatcagcattctaccaggtttgatagcctaccatacttgttttttgcatatttttatagaaaaagtttgagttcacaaattattctcttctgcaagagaccagaccactttcaccaaggctagtttgcaagggagttgttttggacggattaatggttaccttatagtctgtcaccctttgaactggtgatctctgtgcatcacagcccactttgtcagcattacctatcatctcagcccattggatatgcaaggctagttgctgacttcctcaagaagacacagcaggaataattggttgctgcctaggaaaaaatggtcatcaataatacctgaaactctctcaataatatggaataayaccatgtctgataccatgtagtactat

SEQ ID NO: 323466 - DNA, 573 bp, Homo sapiens
aaagaggccaaagtacagctcagcccatgtttacagaggatgcaagccccaaaccttgacagcttccatttggtgttgagcctgtgagtgcacagaaatcaagaaytgaggtttgggaagctccacctagatttcagaagatgtgtggaaatgactggatgcccaggcagaagtttgctgcaggggtggggacttcatggagaacctctgctagggcagtgtgcaaatgacatgtggggttggagccccacactgagtccctactggggcactgcctagtggagctgtgagaagagggccaccatcctccatacccaagaatggtagatccatcgacagcttgcattgtatgcctggaaaagcctcagacactcaatgccagtcacgaaagcagccaggaggggggctatactctgcaaagccacaggggcagagctgcccaagactatgaaaacctacttcttgcatcagcgtgacctggatgtgagacatggagtcaaagaagatcattttggagctttaaaatttgactgcattgctagattttggacttgcatgggccttgttttggcc

SEQ ID NO: 323467 - DNA, 573 bp, Homo sapiens
aaagaggccaaagtacagctcagcccatgtttacagaggatgcaagccccaaaccttgacagcttccatttggtgttgagcctgtgagtgcacagaaatcaagaattgaggtttgggaagctccacctagatttcagaagatgtgtggaaatgactggatgcccaggcagaagtttgctgcaggggtggggacttcatggagaacctctgctagggcagtgtgcaaatgacatgtggggttggagccccacactgagtccctactggggcactgcctagtggagctgtgagaagagggccaccatcctccatacccaagaatggtagatccatcgacarcttgcattgtatgcctggaaaagcctcagacactcaatgccagtcacgaaagcagccaggaggggggctatactctgcaaagccacaggggcagagctgcccaagactatgaaaacctacttcttgcatcagcgtgacctggatgtgagacatggagtcaaagaagatcattttggagctttaaaatttgactgcattgctagattttggacttgcatgggccttgttttggcc

SEQ ID NO: 323468 - DNA, 613 bp, Homo sapiens
ggatggagctggaggtcattatccttagcaaactaacacaagatcagacaaccatatactgcatgttctcacttataagaggaagctaactgatgagagcatatgtacacatagagagaaacaatgcatcctggggcctattggggagtggatggtgggaggagagagacatcagaaaaagtaactaatgggtactaggcttactacctggatgatgaaataatctgtacaacaaacctacatgacccaagttcacatgtgtaaccaaccygcacatgtgcccttgaacttaaaagttaaaaaaattaattaattaattaatataactgcataagtggcagttctaatctatatgcaaacttataatttaataatactagtaaattaattataaaaaataaagggaagtgctaggaaaagggatgataattggagggtacaaaatctgtcagtattcagaaattattgtaaagctataataaaattagtatgataaaattgctatattaaaacaatagacaaatatatgtatgtagcatgacaaagagtttctaaacagataaatatgtatatgggaatttatatgtgcagaatcagcatgcaaataagtaag

SEQ ID NO: 323469 - DNA, 554 bp, Homo sapiens
tggggtacattgtaatgtttcaatagatataatgtgtagtgatcagatcagggtaattagaatagccattatcttaacatttatcatttctttgtgttgggaatattcaatatcctcttcctagctatttgaaaatatataatatattattgttaactgcagtcatcctacagtgctatgaaacagyagaatttattctacctatctagctgtaattttgtgccttttagcaaatctctccttattcctctccttcccagcctctagccttctccattctaccttttactctgaagaccaactttttttagtttccacataggagtgagaatgtgtgctgttttctttctgttcccagcttattgcacttaacataatgccctccaatttcatccatgttgccttgaatgacaagattttattcttttttgtggctgaagagtgttctattgtatgtatataccacatattcctaatccgttcatctgttgttggacacctatgttgattccatatcttcctattgtgaaaaatgctgcgataatggaaatgca

SEQ ID NO: 323470 - DNA, 554 bp, Homo sapiens
tggggtacattgtaatgtttcaatagatataatgtgtagtgatcagatcagggtaattagaatagccattatcttaacatttatcatttctttgtgttgggaatattcaatatcctcttcctagctatttgaaaatatataatatattattgttaactgcagtcatcctacagtgctatgaaacagtagaatttattctwcctatctagctgtaattttgtgccttttagcaaatctctccttattcctctccttcccagcctctagccttctccattctaccttttactctgaagaccaactttttttagtttccacataggagtgagaatgtgtgctgttttctttctgttcccagcttattgcacttaacataatgccctccaatttcatccatgttgccttgaatgacaagattttattcttttttgtggctgaagagtgttctattgtatgtatataccacatattcctaatccgttcatctgttgttggacacctatgttgattccatatcttcctattgtgaaaaatgctgcgataatggaaatgca

SEQ ID NO: 323471 - DNA, 554 bp, Homo sapiens
tggggtacattgtaatgtttcaatagatataatgtgtagtgatcagatcagggtaattagaatagccattatcttaacatttatcatttctttgtgttgggaatattcaatatcctcttcctagctatttgaaaatatataatatattattgttaactgcagtcatcctacagtgctatgaaacagtagaatttattctacctatctagctgtaattttgtgccttttagcaaatctctccttattcctctccttcccagcctctagccttctccattctaccttttactctgaagaccaactttttttagtttccacataggagtgagaatgtgtgctgttttctttctgttcccagcttattgcacttaacataatgccctccaatttcatccatgttgccttgaatgacaagattttattcttttttgtggctgaagagtgttctattgtatgtatataccacatattcctaatccrttcatctgttgttggacacctatgttgattccatatcttcctattgtgaaaaatgctgcgataatggaaatgca

SEQ ID NO: 323472 - DNA, 576 bp, Homo sapiens
tgtgatgatttttaatattccaaggtaaccagtgatttttactgtaaaatgttcactaatctattttcctgattacatatttgattttattctaayaaaatgaccgtgttttcttgttatatttcatatacaagggatacaaagttgaatttaataacaatgggctcattttacagaagaagtaaaaccctaaactaactttttgaatgtgaaatatccctgaatttatcctccatacataagctaattatcgtcttcaactaagatattaatgtaaataattagtttagatttactgaatttgacacatggcttgtaaagcagaattatagacaaacatctagaagaaaaagtttacttgattgtattacttattatttagttatgttattaactactgtatatgaattttctatttttattattgaattattcatgtgcagcaatactgtttttctcattcaattacttaaatgaattatgtaaagataaatttatagtggcatatattaaaccattgacacaataacttcaatacaccaatcaaatgtcatttgtcatcatatgatattctaa

SEQ ID NO: 323473 - DNA, 606 bp, Homo sapiens
cttgtaaagcagaattatagacaaacatctagaagaaaaagtttacttgattgtattacttattatttasttatgttattaactactgtatatgaattttctatttttattattgaattattcatgtgcagcaatactgtttttctcattcaattacttaaatgaattatgtaaagataaatttatagtggcatatattaaaccattgacacaataacttcaatacaccaatcaaatgtcatttgtcatcatatgatattctaaatttacctaagaaatcatcagtatcgattattacaaactttttaaaattaatttttaagagatcctgacttcttttaaaaaaaagtgaaagtcatgcctaataccttcgtctttaaaaatctttatctatacctttataattggtcacatctattaaaaaaaaaaggaatttggtccaaattgattttatctccatttgaaccccagaacatcagtgaagggtatcagaatattccattccaaaatatgtctctttagcatacagattattttgagctaaaggacatgaagactagtggatgcgagaaaaactctttatctcctcctaactgcccaaaaata

SEQ ID NO: 323474 - DNA, 412 bp, Homo sapiens
aaagtctctggagacatgtgcatacggatttgatcttcatcttcctacactaggtatgctacatatgcttctttcagatttgggatttaggtgaaattaggacagtcttatttatctacaagattacaataagaattaaatgagacaatgcaaaygccctgcaatttgtaaatcttcaaaaatcaatttattgttatcataattatgattaatactaaaatttgtgatgtgacacattccatatgactgttagcatatatatatacacacacatatatatacacacatatatgtgtatatacacatgtgtgtgtgtgtgtgtgtgtatatatatatatatatatacttcctatgctgtagatgataatgcagaaaatagtctgatatgtactttgttgaagtttctcttaac

SEQ ID NO: 323475 - DNA, 621 bp, Homo sapiens
attatttggggattattttatatttttccattggcccatcctctatttataaggcagtgttacaatgtcttaattgtagaattttattgtttgttttaatatctaataggacgagcttctactttcaaacacacacacacagctgctctttgaatcaagaatttgtattcatgctactagattcctggacagagctcttcagcaccacacacactatctataatctgaccacgaagatccagacttggagcaaactgacaaaagaagatctgatctctgtatctcaaacaccaacaaggtgttcaggagaaaaatgaaatagagaaaaagaactagaaataaaatttcagttattatttagcttaatgagtgcctgtcaatccaaaaaaaaaaaaagcattgatcatatctaagggacgtatataakactgatgtccctcaggaaattctagctctttcaactttgactgaaatattgagtgggcacttaactccattgagcatagaagatgagtttcagaaataaagtagatgatgcttgtgctacatcatttaataaaactaaatcagactacgtcaatttgttggtggctttaacaacatactaatatagtaaagcac

SEQ ID NO: 323476 - DNA, 621 bp, Homo sapiens
attatttggggattattttatatttttccattggcccatcctctatttataaggcagtgttacaatgtcttaattgtagaattttattgtttgttttaatatctaataggacgagcttctactttcaaacacacacacacagctgctctttgaatcaagaatttgtattcatgctactagattcctggacagagctcttcagcaccacacacactatctataatctgaccacgaagatccagacttggagcaaactgacaaaagaagatctgatctctgtatctcaaacaccaacaaggtgttcaggagaaaaatgaaatagagaaaaagaactagaaataaaatttcagttattatttagcttaatgagtgcctgtcaatccaaaaaaaaaaaaagcattgatcatatctaagggacgtatataatactgatgtccctcagkaaattctagctctttcaactttgactgaaatattgagtgggcacttaactccattgagcatagaagatgagtttcagaaataaagtagatgatgcttgtgctacatcatttaataaaactaaatcagactacgtcaatttgttggtggctttaacaacatactaatatagtaaagcac

SEQ ID NO: 323477 - DNA, 618 bp, Homo sapiens
tacccacatttttccacatactttaatcgttagattaattttaatatctaatacaatgtaaattctataaaatagctgttatgctatattgtttaagaaacaatgataagaaaaaaagactatacatgtttagcactggcagaacccatgcttttyccatttttttccttttatattctccaaaaattatagtttattctttcttattaagaggcaaatggaatgggcaaatattttcaatccacagttggttgaatccatggatgcggaacccattgatagggaggtctgactgtatatattttacaaagatgtttgactcaagtataacacacacacatacacacacacacaatatacacacatgtacatatattctactacaaatgttcacgcacacatgttcagtatatagaaccatgtatgtttacatatgtataaccctgtgtaccaccatatgaaagaagatatagggcattttttagtatcacagaatgatcctttatgttcctacccaacagacaccatcatccacatactgtgattactactagtcttatttctcacatagtaaaaatttcatttgtttttgagcttcatattaatataaatacaata

SEQ ID NO: 323478 - DNA, 622 bp, Homo sapiens
gatgacaggtctctaaaaagattagtcctagttcattcctatcaatctcattgtcgatgctctgtccccacacaccatgctacatcatctcatccttgttatttcttgaccaagccaagctcactccacagcatgactttgtacttgctgcacagctatgttctccttcctatctgcatgcttttgccactcatatggttaggtctctgcacaaatgtcagttcctcagagtttttctctacccctgtcactcttaactgttaatctgtttttgtttcttttccatagttcctcattacaactgaaattttatatatatatatatatatatatatattttttttttttactaatagtttgtgtgttgtctcttttccctgataaaatttaagcctctcaggagcaaagacttcatcttttttatggttgtgtcctctgtgagtagaagattgcctaatgcctgctaaatatttgwtatatatttttatataataaataaatattgctcaatttagatagtaataatgaagtggcagacaattgactcttatggaattaaggaaaacattggcaaatttaagtcatattttattttatagatttttgccaggaaaaaaagatt

SEQ ID NO: 323479 - DNA, 622 bp, Homo sapiens
gatgacaggtctctaaaaagattagtcctagttcattcctatcaatctcattgtcgatgctctgtccccacacaccatgctacatcatctcatccttgttatttcttgaccaagccaagctcactccacagcatgactttgtacttgctgcacagctatgttctccttcctatctgcatgcttttgccactcatatggttaggtctctgcacaaatgtcagttcctcagagtttttctctacccctgtcactcttaactgttaatctgtttttgtttcttttccatagttcctcattacaactgaaattttatatatatatatatatatatatatattttttttttttactaatagtttgtgtgttgtctcttttccctgataaaatttaagcctctcaggagcaaagacttcatcttttttatggttgtgtcctctgtgagtagaagattgcctaatgcctgctaaatatttgttatatatttttatataataaataaatattgctcaatttagatagtaataatgaagtggcagacaattgactcttayggaattaaggaaaacattggcaaatttaagtcatattttattttatagatttttgccaggaaaaaaagatt

SEQ ID NO: 323480 - DNA, 551 bp, Homo sapiens
gttttagcccaacgagaaccatattggacctcagttctacagaactgtaaggtaataaatttcaggtgttttagaccaccaagtttgtggtaatgtgtcacagcagcaacagaaaactaattcaaggagtgactttctttgttgcccactctatccatgccactagtgaaataataagtgtaagatatattctggaggtgagaatcaacttgacagaaattttgagttacataactgccatcatggggcactcaatgactgggcctacgagatagagatgtttttatgaagcttagaggcctatacatttggagaaataatcagagatcagatggcaattttttttgtgcttctgactttagaagctctgctatttgcctcatgaactgaaaatgcagaaatagttacttagagtacctgtgggttcagtaaaagtttcttcaygtcctccaatatagatcgtaaataataaaggacatcttaaatgaaaatttaaagaatgcaccgtatttccccagaaattcagctttacctataacttgtttttaaat

SEQ ID NO: 323481 - DNA, 607 bp, Homo sapiens
actgattccccttttctgggggaaaatctgactttttctcttattaaatataacattatagtgggtctgtgtaccaacttctaaactaaagcaaagcattttcttcctttctctgtaccttagcattggctataaagtcatcaaaaatcattgcatatgactaaattcaaatattagcacattactcttggcctgataacaaggtaactgtcagacataagcacaaactaatagcttagttacatgacaaatccattaacaagggaaagctagtcaatttatgtctgctttctagaaaagtatgttggtgcaacgttgatgcrttgatttttgaaagactttcaactgtatgcagacagaattgtgaaatcaatgatgtaaataatttgataggagctggagaatatttatacagatattctgaatagctctctctaagtcaaaatgtatgtatcatttgggaagagttatttaatgacataaactacactcttactcataaatataaatataattcctatattatatccatagtaatgaagaaacagttgcaacccagaggtagtctgcaaattctgttttctatattattctgttatttcaaaca

SEQ ID NO: 323482 - DNA, 607 bp, Homo sapiens
actgattccccttttctgggggaaaatctgactttttctcttattaaatataacattatagtgggtctgtgtaccaacttctaaactaaagcaaagcattttcttcctttctctgtaccttagcattggctataaagtcatcaaaaatcattgcatatgactaaattcaaatattagcacattactcttggcctgataacaaggtaactgtcagacataagcacaaactaatagcttagttacatgacaaatccattaacaagggaaagctagtcaatttatgtctgctttctagaaaagtatgttggtgcaacgttgatgcattgatttttkaaagactttcaactgtatgcagacagaattgtgaaatcaatgatgtaaataatttgataggagctggagaatatttatacagatattctgaatagctctctctaagtcaaaatgtatgtatcatttgggaagagttatttaatgacataaactacactcttactcataaatataaatataattcctatattatatccatagtaatgaagaaacagttgcaacccagaggtagtctgcaaattctgttttctatattattctgttatttcaaaca

SEQ ID NO: 323483 - DNA, 597 bp, Homo sapiens
actttactctttatgtataaggccactggaggacaaagagaaaagctggacctgttcatgtgaatgatgaagttatatttttcttgttcctagaaayagatgatgcaagaaaactcttttcttaacattatgcacttaatttgaatgattaattaggttcttagtttaaatttccttatatgataacctcctattctgtgacatttagcaagcacaacttaaatatatgaattcacagaagccacatgccttcaattacaagtcactgcagcattgataaatccttcatacaggaattacttgattgatgcttttcatggatagttggcaagaagataagaagagggatattaatagcactttctatattggttttagtgaactgataaacagagagggaatatgacaagcgataccaacaatcaaatctatcagactgttgaaaattgaaactactcttcaaaaacagaagttaagctagaaaattcttttgagtttgcagaattcaaattttcattttcatgtctcacatttgcaaaaaaatgaaatcaaataacatgtattaatttagaaactcaaaattaagcttaaattatt

SEQ ID NO: 323484 - DNA, 599 bp, Homo sapiens
tggtgctcttggggttaccacgtagaacttagttattttgaagaccttgctgaaaaacatcagtaacggtttaaaaaatattactaaaatgttgtttcatttttgacatgagacttcaatttaagtagaaatctctcttccagtgtgcttttrgtatcacttttaatgcgctgttagtgtccttgccccacctgcacctccaggccaacctgtattgtgtcatgaacataagccacaccaggccacttacaaaggcatcaagccatgtaccagtttgataaactttccattgacttctctgtattcattaagactcagctgttagaaacatacctacctaccttttccaaaagcaccatctcacccgtgataaagccaccataaactcaactaacttttcaaagtcaaatcttaaatggcctattttactcatggctgaagtcacctaatcaagtcctcaccagggctgtgttttccaactgttattttgagcatcaaatttcacttcctttctctttctcaatgtatctgctcagtgtatcacatgctgaagtttaaatagctaataagtaaccctagcttcctgcctgattacaaaa

SEQ ID NO: 323485 - DNA, 647 bp, Homo sapiens
taaatttatttaatttgttgtaatactgttttctgattatcatttcacatttcagccatttttctcacagtgagaattcctttttctcaatcgtgttttttaaagcagaaaattgaggctcttaagcattggttattcactttagtacacattataaagttttggattaactattgcatgactaaatgcaccaaaaaaacaaaaatgtttgcyttcagacttcggatgcttaattttaaagtaagctgatcatgatgacatagtatttttagctaatctctcacagaacaaaagcagggaaagtttaactgttaaaaacagagaaagtaactcatatttttaataatcttctagatgacatatttttatattttactcacaaaggtaaatagattataattgacatacgtcataaatatctgaaaagagctgctcttaggtatgaaagggtaactctatacccttgtctttttgtttgccttaactttcatgattgccagtactttccatctttcatttctttacagtgataattttcaccatgtgccttttttgcaaacattaattcagctaaaactagacaacaaaatttataaattcactttaaccaagtacatctttattaaattatgacactaaccagaaac

SEQ ID NO: 323486 - DNA, 623 bp, Homo sapiens
ttgctgtggaaggttattcatttgtaagatcatatacgataagatgcactcaccttgttaagctttctttgactgtcaccttctgtcttcctcctataaaaaccttgtgattacattaggcccagctggataattcaggatatactctctaactcaaggtttgtaattaaattacatmtgcaaagtaccttctgccatgtaaagtaacatgttcacaggttgcaaagcttaggacattgacattttgggaagtgtattccacctaacacaagaagtaaacactccactttgaccatacacaactttttgttcctagagcgaataaaataaaatatgttaaagagatgttactttgtttgttttattcattgtacattttcaatgtggtctgtaccacaatttcacacagacccaggtttcctcctagcatcgctttgctattgccatttttgaatctcctaatcataatcaatttcacttccagcattcttgtgtttttcttttcctttgctgcacttttgtctttgttggaccattctctcccttgattatacttttttttttcttgtaaaatgccacatggatttatcactggggttaccagtgataaaggaggcaacaca

SEQ ID NO: 323487 - DNA, 586 bp, Homo sapiens
ggttctgaattaaggaggaaaaatgtgatttatttgccacataaattctcaatgctaataaactttccaaagtataaaaacaattgtgatgtcttattgcaggagaaaagtctcacttacrttcctcaagctaaaaaagcaagaaaacaaaagtggattgtccaggaagctgggcttcaaacatttgaaatatttttaaggagaaaacatgtttgctccttttgaatttccagctttcccaggcagtaagctccatgagcacaaagtacatagcttattatgatttcatcaaaaacttccagaatagtaccttatctataatcaatgttcaaataatattgttaatattaacctccttgtcattgtcttctactttaaaaaattctgggttttttttatatgaatccatgttttaaatactttcatgctaaattttctgataaaaatgcatacaataggggtgatttcaaatttttaaatatttaagagtatattttatgtctatgtagttcagattttatttgtgcatttaaaacaggattttagttgtaatgtgcttctgatactgataattattcaggaggta

SEQ ID NO: 323488 - DNA, 586 bp, Homo sapiens
ggttctgaattaaggaggaaaaatgtgatttatttgccacataaattctcaatgctaataaactttccaaagtataaaaacaattgtgatgtcttattgcaggagaaaagtctcacttacattcctcaagctaaaaaagcaagaaaacaaaagtggattgtccaggaagctgggcttcaaacatttgaaatatttttaaggagaaaacatgtttgctccttttgaatttccagytttcccaggcagtaagctccatgagcacaaagtacatagcttattatgatttcatcaaaaacttccagaatagtaccttatctataatcaatgttcaaataatattgttaatattaacctccttgtcattgtcttctactttaaaaaattctgggttttttttatatgaatccatgttttaaatactttcatgctaaattttctgataaaaatgcatacaataggggtgatttcaaatttttaaatatttaagagtatattttatgtctatgtagttcagattttatttgtgcatttaaaacaggattttagttgtaatgtgcttctgatactgataattattcaggaggta

SEQ ID NO: 323489 - DNA, 548 bp, Homo sapiens
caggtgatgtgtgatgagcagcgtagcagtcctgactctaagtcagcagtgggaagcccagatgcaactcttctatacctcagaatccacagagaaggtccagaattggcaacaycaggtacctttaaacatacaggagaatcaaccaccacctggtagaagccaggtgtttcatttccaaagaaggtaaaccagagggctcttgactaagacactcagcagaggtgaaggcagtggtgcagtgtgaacactgggtaattaaaagaaactccatgttctaaatggaaaaccctattcccactcagctcccagaaagctggcaggtcagctatgacctccaaatagagaattgaaattgagggatctgacagcccaagaggaaacaaaaagatatcagtaagcctggtcaaatcatcctacagtgaagccctctaattaacaaggcccttcacacatgctgagtttccaatgagctctttggcgattgatatggtttggccatgtccccacccaaatttcatcttgaattgtggctcccacgattccca

SEQ ID NO: 323490 - DNA, 566 bp, Homo sapiens
gtgcttgattgaggacagatcaatagaatttacccagtctaaacaacaaagacataatattgtgggaagaaatgatatatatatatgtgtgtgtgtgtatgtgtgtgtgtgtgtgtgtgtatacatatatatatatacacatagagagagagagtcagtctcaggggcccataggacaataacaaaaaaatcagtgtttgtatcactgcatatcattgcagtctcagaaggagaggagaaagaatgaggctgagagaataactaaagtaataatgcctgaagacttccaaaattyggttaagacacaaaccagcacatccaagaagctgagaaaaccccaaacagaataaacccaaataaatccatgccaagacacatcataattaaacttttgaaaactaaagacaaagaaaaaaatatcaaaagcagacagagagaaacaatacatcacctgtagttaaacaccaattcaaatgacagtggatttatcatccaaaactatggaggccatttgggaggcctacgcgagcagatcacttgagatcaggagttcaagaccagcctgg

SEQ ID NO: 323491 - DNA, 562 bp, Homo sapiens
tttttacacttaacaccaaaagcatgacatataaaaggaaaatgtgatcatctagatcttaccaaaataaaaatcttttgctcagcaaaagatcatgtgaagagaataaaaagacaagctacagattgagaaaaatatttgcaatatctagacatacaaagatctcccaaattctaaaacatacaaacaatccaatgagaaaataggcaaaaggcatgaaccaatattccaccaaaarggatatacagatgggaaataatttaatgaaaggatgttcagtatcattagtcatcagggaaatacaaattaaaaccaaaatgagatatcactacatacctctcagagttgctaagatttaaaaaataatgacaacaccaaaatacttgtgagaatacgaagaaatcagatcactcacattgctactgggaaggtaaaatagtacagccacggtagaagacactttggcagcttcttaaaagactaaatatgcaactataccatatgacctagcaattgccctccttggcatgtatcccagaaaaatgaaaacttctgttcacat

SEQ ID NO: 323492 - DNA, 541 bp, Homo sapiens
accacagtgaccaaccatccaggtttgccagggacctgggcattttctggggtgcagggctttcagtgctagaaccaggaccatmgcaggcacaccgggaccaggtggtcaccccaggagggccacaggcattccttcagcatttcctcagccccgtggattctctccacatattcactcacacataccaataaaagcaagcttgcccagccccaaacacctcaagaacagaagccgggctcactgctcactgcccagtctctggctacagaatccaaggggtagcacctgagggaacccctcatcgcaacagccatgtggctgctgcagaagttgaaacctgtgaagaaatccaggctcagggcctataccttctccccactctggtcctgctgcactgcctggtgaggtctcctcatcacagccagggcttgggccaggctgcccccaacccctgcctgcagcctcaggcctagcccccagcagctctctctcactcaggggctctgcaggggtggaaggacacagctgtggaacctgc

SEQ ID NO: 323493 - DNA, 498 bp, Homo sapiens
atacatacaaatatacacacatatttacatgtatatataaaatatatatttacatatatgtaaagtcacacatatatacatatatacatatatgggcatattacatatatacatatgtgtgtgtgtatacgtatatgtatatacgtatcacagtgaaatttcaaagcttcaaagacaaagagaataatctgaagaagcatcggagagaaaggacaaatctattaaggaatgacaataaaactgatagcagatttctttttagcaatagtagatgataaaaaacaataggatagcctgaaagtgctgagaaaaaaatacccatctatttagaattctatgcccaaatttctcttaaattctcattcaagacaggcaamataaagacatttaaaaataaacaggccaggcgtggtggctcatgcccttactcccagcactttgggaggctgaggcaggcagatcacctgaggtcaggagttcgaaatcagcctggccaac

SEQ ID NO: 323494 - DNA, 498 bp, Homo sapiens
atacatacaaatatacacacatatttacatgtatatataaaatatatatttacatatatgtaaagtcacacatatatacatatatacatatatgggcatattacatatatacatatgtgtgtgtgtatacgtatatgtatatacgtatcacagtgaaatttcaaagcttcaaagacaaagagaataatctgaagaagcatcggagagaaaggacaaatctattaaggaatgacaataaaactgatagcagatttctttttagcaatagtagatgataaaaaacaataggatagcctgaaagtgctgagaaaaaaatacccatctatttagaattctatgcccaaatttctcttaaattctcattcaagacaggcaaaataaagacatttaaaaataaacaggccaggcgtggtggctcaygcccttactcccagcactttgggaggctgaggcaggcagatcacctgaggtcaggagttcgaaatcagcctggccaac

SEQ ID NO: 323495 - DNA, 543 bp, Homo sapiens
ttcaaactgattaagattaaataaatttatctataaggttttattaagaattggatttgacatcaataacgcactaatgcwacagtaacatttggcttatcgggtataaaaatcatatagaaagcattgtcaaatatgaaatagtgtttggctttcgtcaggctatatttgtataaatgtgttactggtatatgttccaaaattatttttaaaactcctataattctgatatgacttaatgtgttattaataattattacataaaatcattgtgtgccacagaggcaaccaaaatttcctagtcaattgtggatttaatagtggctgtcctaagactttttatcatctacaattgttgtcctgttttaatcctctttagaaggtggtttataatcaactacaggactttgacagatgttcttgaatgcaagtttctgataactttggaaattgtaacattagaatagaggaaaacactttcaggactcatagagagctgaaatgttcctgaatatcaaacagaagttaactgcatgtactaaa

SEQ ID NO: 323496 - DNA, 559 bp, Homo sapiens
gctggatgaggggtgaaatgaggagttagtgtttatcaggtgcagggtttcagctggggaaggtgaaaaggctttggagatggatggtggtaacagctgcacagtaatgtgaatgtagttaatgccacaaaactatacacttaaaagtggttaaactaatacattttgttatatatatttgccacaatataaaatataatctggctgggcgcagtggctcatgcctgtaatcccagcactttggaagtccaaggcagggtgcatcacttgaggtcaggagtttgagaccatcctggccaacatagtgaaaccccgtctctactaaaaatacaaaaattggccaagcatggtggcacatgcctataatcccagctacttaggaggctgaggaggggaaatgcttaaacccaggaggcggagkttgcagcaagtcaagatggtgcactgcactacagcctgggtgacggagcgagactcagtctcaaaaagaaaaagaaaaggcaaagaaaaaatataatctaacttaaagacataatataagacataccagtcttgaatt

SEQ ID NO: 323497 - DNA, 588 bp, Homo sapiens
caaggttgttgggctacaacttggtttaatacatttagggagacataagacatcaatcaatacatgtaagatgcacattgatttggtccagaaagacagtacaactggacacgggggcatccagatcataggcagattcaaagattttctgactggcaattggttgagttactatctaaatacctagaatcaatagaaaggaatgtctgggttatgataaggggttgtggagaccaaaattttatcatgcagatgaagcctctgggtagcaggcttaagagaaaatagattgcaaatatttcttatcagacttaaagagtctgttctatcagtcttgagatctctgcattgatattaatgctgatcagctgggtctgaattccaaaagggaggagggtataatgaggcatgtctgactctcccttttcattacacagcctgaactagttttttaggttaastttggaatgcccttggccaagaagacagggtccattcagatggttggggggcttagaatttcatttttagtttacactgcttattcaactattttaacctacaaaaacagcaatttcataagactca

SEQ ID NO: 323498 - DNA, 566 bp, Homo sapiens
gtagaaaattttggatttagaagcctcactttgccctaggtttgttgttgctgtaagttatatgctcaaaacatctttttggttttctgggtataattcctattttttggtgtgctcatttgtgtgtgcgttttctgtgtttcacctttcatacacagatggaatcactggcaaactgcaatatagcaaaatcaaagcattttatttccatatctgtcatgatattacatggctgtcatgatttatagtagattttcagaaagcaaagcctycgtttaagaagaagaaaaagcaggaagacatttagaaatccctacaaagagaagaaaagagtcctaaaactcagtatcactgaactgagagacaatctgaattctaaccccagctcttccataaatttgttgtatggcctcgggcaagaaaacatttaatttctctgggccttagtttataattttgatgataatttcaatctcattaatatgtagaattttggggaaagggtgatggcatactattctggaggggaaaaataaagaatgattgattccattcccccctactca

SEQ ID NO: 323499 - DNA, 584 bp, Homo sapiens
aggctagtgtaaatttcacttatttctcaattttacagattaatgttttggactttctagtagctagccctggcttacttattactattcttgggatgaatattttagtccatgttgaaaaccaccatttaaatttcctgtaatatataaagagtactttcaaacaagtgggttggataagtaaaaataaaaactagtagaaaaaaataagcaaaagatatgaatagatagctcaaagaaaaaccaaatctaaatgcccaagaactatgtaaaagtatgttcaaattcattcataatcaggaaaattaaaagtagcataaccatgaggtatcactttacacccataaaactgcagaacctaaaaaaaaactctaacatttgcattcaggkagatataagggacagtactaaaatatatggagggtgaattttgaaattgattacagcatttattgaaagcaatctggcaacatctatgaaaattaaaatatatacacttatcaacttcccaatcccactcccagaaacctaccctatgttaggcaaacatgataacactacactacaaaaacctgcagaaatct

SEQ ID NO: 323500 - DNA, 446 bp, Homo sapiens
tgctgtcatctaaaacaattagaacaaactaagcttattaaaattgtcatttctgaacttgatgcaatccagtatctccttcccaactgatgttcaatatttctcctacttrtgatgacagagaataagcttcagtgcttaaaatatgtccaaatattagcacttttcttttaaattctatacttacaagaaacaaaaccaaataaatggagccgatggatgtttaaagcagcatccagttctgatacacaattgaaactagcctaggagcaactgtaatgatgttttgaaatgaatcacgttctaatcttttacagaaaattatttaaattaaaaattagatgggtatagcttagcaatcagaaatcttcctgtgaagccaccacaaattcagcctgaaaggtcattgcaaattctcccagctctctaaagataattagtctctt

SEQ ID NO: 323501 - DNA, 646 bp, Homo sapiens
tctataaagacataaagtacattagtagttgcctcayattaagcagggggcagaaatgggaaattactattaatggataaaggtttttgaggggggaggtgactaaaatgttctaaaattgatcacagtaatacctgcaaaacacaatgaatatactttaaagagcattgacttgtacactctaaatgaatgaattgtatggtatgcgggtaatagatctataaatctcttctttcaaaagaagaaaaaacattttacatcacaactcagctctctttccatctttctctctctctctctctcacacacacacacacacacacaaaatattcaaagttttacaaaatagcacttaccctttatagccctctattattttgtattctattttattctagttcgttaaaaaaatttcttgatctatgttctggttacatagtgctgcataacaaaacttagagcttaaaaacaacatgttaatattatttcaagagtttctgtgggtcgaatggccccactgggtggttcttgcttggagtttttcacgcacttgtagtcagaaggctgaggctgcagacttctgaagattcatttgtgttggatatcctagaggactcatatggttggcaatagatgctggctggca

SEQ ID NO: 323502 - DNA, 431 bp, Homo sapiens
ttctcatttccatctgagacttcattagcccatatttttatcagcattcaactcacaatcactaatttaacaagtctgtaaaaagttccaaaccttccctcaacttcctgtattcatctgagccatccaaactcttccaacatctacccattacccagttccaaagccacttccacattttcaaatatctttatagcaacatctcactctcwgtaccaattttctgtgttagtccatttatgttgctataaaggtatacttgaggcagggtaaagaaaagagctttatttggctcacagttctgcaagctgtacaagcatggcacctgcatcttcatctagtgagggcttcaggaagcttgcagtcatggtggaaggcaaaggggagccagcgtgtcacatggcaaaaaagggagcaagagaggaggtgcc

SEQ ID NO: 323503 - DNA, 646 bp, Homo sapiens
tctataaagacataaagtacattagtagttgcctcacattaagcagggggcagaaatgggaaattactattaatggataaaggtttttgaggggggaggtgactaaaatgttctaaaattgatcacagtaatacctgcaaaacacaatgaatatactttaaagagcattgacttgtacactctaaatgaatgaattgtatggtatgcgggtaatagatctataaatctsttctttcaaaagaagaaaaaacattttacatcacaactcagctctctttccatctttctctctctctctctctcacacacacacacacacacacaaaatattcaaagttttacaaaatagcacttaccctttatagccctctattattttgtattctattttattctagttcgttaaaaaaatttcttgatctatgttctggttacatagtgctgcataacaaaacttagagcttaaaaacaacatgttaatattatttcaagagtttctgtgggtcgaatggccccactgggtggttcttgcttggagtttttcacgcacttgtagtcagaaggctgaggctgcagacttctgaagattcatttgtgttggatatcctagaggactcatatggttggcaatagatgctggctggca

SEQ ID NO: 323504 - DNA, 517 bp, Homo sapiens
gcacctggccctaactgtatttttggacccattagtcaacctctcttcatcctccccactttctagcctctggtattcaatattgtactctctatctccatgagatccatttttttagctctcacgtatgagtgagagtatgtgatatttatctttctgtgcctggcttatttcatgtamcataatgacctccagttccattcatgttgctgcaaattacaagacatcattatttttatgcttgaataatatatttcattgttgtatgtatcacattttctttgtgcattcatctgttgatgaatacttaggttgattccatatcttggctatggtaaatagcgctgtaataaacatgagaatgcagatgtcttttcgacatactgctttcccttcttttggatatatactcagcagtaggattgctggatcatatggtagttctattttaagtttttgaggactctccatacaattttccatagtggctgcattttcttcacattcccaacaactg

SEQ ID NO: 323505 - DNA, 364 bp, Homo sapiens
ctgttgcccaggctggagtgcagtggtgcaatcttgactcactgtaacctccacctttggggttcgagtgattctcgtgcctcagcctcccaagtggctgggacttagaggcatgtgccaccacacccggcaaatttttgtatttttagtagagatggaggttcaccatgttggtcaggttgatctcraactcctgacatcaggtgattcacccacctcagtctctcaaagtgctgggattatgtggcgtgagccaccatgcccagtggaatttatattttaatgtggggcctggtaacatataagtaaacatatttgatgttgttaaatgctatggggaaaaatgaagcaggttaaagagtgt

SEQ ID NO: 323506 - DNA, 573 bp, Homo sapiens
tctactttcctaaggtggaagctcagatgattgattttacatctttcttttctaatacatgcatacaacgctataactctccctctgagcactgctttcgctgtacttcacaaattttggtaagatatgttttcatttgtagttagttcaaagtattttttaaattcttttgagatttcttctttgacctatgtgttattcagaagtgtgttgtataatctccaagtatttggggattttttatctttctgttattgatttctagtttaattccaycatggtttgagagaagacattttataatttctattgttttaagttatattttatgatccagaatgtattctatcttgttggttgttccatatgagcttggaaaaatgtatattctgctgtttttggatgaaatagtcaatagctgtcaattttgtccagttgattgacggtgttgttgagtttaactgtgccattactgattttctgcatgttggatctgttcatttctaatagaggggtgttgaactctccaactataatcatggatttatcgattactccttgcagttctatcag

SEQ ID NO: 323507 - DNA, 634 bp, Homo sapiens
ggcctttcaaagtgctgggatcacagacatgagccaccatgcccagcctcttcatctctttaatctataatatgcctttatattaaagtgggggttttgtatccaacatgtaattgggttttgcttgttgatccatcttgacaatcyctttcttttaatttgtctgttgagaccattcacattcaaatttattgttgatagatacagagaaagatggtggaaaaggattttccagcaattatccccctgcagaaatttcaattggaacaactatccaagcataaaaatgccttcacaagagagaaaaaacaaacaaagaaatgggagatgacagaacctggttgtagcaaaataataagaaaagatgtattgaagaaggcaaatgggacacttacacattatctccatcacccccgcctaaccccaggcaatacagcatagagagagagaaagagagagacactgtccactgggtaaaagagagggcagtgagcacaagactgccttgaaccccaacgctgggcctattgtagtaaaactcagcaccaggcagacccccacagtttcatatttcaaaccagtacccatggattgagcctaaagactcactaaaatgccaggctgaactacatag

SEQ ID NO: 323508 - DNA, 593 bp, Homo sapiens
ctattaatttaatcacattaatgtaatcaaatcctttcccacctgacctccagtctcccacttttacattcttatccatgaactctgatcacctataatatatttaatacatraggaacccgtttttgaacatttttaaagaggaaatgaatctcattttacttatgttgtgatgtaagggaaatagattgtaacagtaacgtttaactttcattttagatgctgcaactacaaagaaaaacggactttcactggctgactgattgtctggaaaccgttttgggatttctttcctaagcttcttaattagaatctttacattatagagaaaatgattttgagagttgagtgtggtctgtggagtgtcctattagtaacgacttctgagtaggtttaagtcacctcttttattgaaatgtgaaaaggtgtgacatttataatagaaaactctttgaaagtcgcaccgttcattttagaggaattttaaatgtcaccccaaattttacgattttaattaattttaattaatttccaaattttaaccaataggcataatattcaagatcttatctaaaaattattacatggcaata

SEQ ID NO: 323509 - DNA, 593 bp, Homo sapiens
ctattaatttaatcacattaatgtaatcaaatcctttcccacctgacctccagtctcccacttttacattcttatccatgaactctgatcacctataatatatttaatacatgaggaacccgtttttgaacatttttaaagaggaaatgaatctcattttacttatgttgtgatgtaagggaaatagattgtaacagtaacktttaactttcattttagatgctgcaactacaaagaaaaacggactttcactggctgactgattgtctggaaaccgttttgggatttctttcctaagcttcttaattagaatctttacattatagagaaaatgattttgagagttgagtgtggtctgtggagtgtcctattagtaacgacttctgagtaggtttaagtcacctcttttattgaaatgtgaaaaggtgtgacatttataatagaaaactctttgaaagtcgcaccgttcattttagaggaattttaaatgtcaccccaaattttacgattttaattaattttaattaatttccaaattttaaccaataggcataatattcaagatcttatctaaaaattattacatggcaata

SEQ ID NO: 323510 - DNA, 593 bp, Homo sapiens
ctattaatttaatcacattaatgtaatcaaatcctttcccacctgacctccagtctcccacttttacattcttatccatgaactctgatcacctataatatatttaatacatgaggaacccgtttttgaacatttttaaagaggaaatgaatctcattttacttatgttgtgatgtaagggaaatagattgtaacagtaacgtttaactttcattttagatgctgcaactacaaagaaaaacggactttcactggctgactgattgtctggaaaccgttttgggatttctttcctaagcttcttaattagaatctttacattataragaaaatgattttgagagttgagtgtggtctgtggagtgtcctattagtaacgacttctgagtaggtttaagtcacctcttttattgaaatgtgaaaaggtgtgacatttataatagaaaactctttgaaagtcgcaccgttcattttagaggaattttaaatgtcaccccaaattttacgattttaattaattttaattaatttccaaattttaaccaataggcataatattcaagatcttatctaaaaattattacatggcaata

SEQ ID NO: 323511 - DNA, 593 bp, Homo sapiens
ctattaatttaatcacattaatgtaatcaaatcctttcccacctgacctccagtctcccacttttacattcttatccatgaactctgatcacctataatatatttaatacatgaggaacccgtttttgaacatttttaaagaggaaatgaatctcattttacttatgttgtgatgtaagggaaatagattgtaacagtaacgtttaactttcattttagatgctgcaactacaaagaaaaacggactttcactggctgactgattgtctggaaaccgttttgggatttctttcctaagcttcttaattagaatctttacattatagagaaaatgattttgagagttgagtgtggtctgtggagtgtcctawtagtaacgacttctgagtaggtttaagtcacctcttttattgaaatgtgaaaaggtgtgacatttataatagaaaactctttgaaagtcgcaccgttcattttagaggaattttaaatgtcaccccaaattttacgattttaattaattttaattaatttccaaattttaaccaataggcataatattcaagatcttatctaaaaattattacatggcaata

SEQ ID NO: 323512 - DNA, 578 bp, Homo sapiens
ttgtccttttcttcatgtctatatgtactcagtgtttrgcgtccacttataagtgagaacatgtgatatttggatttatgttcctgtgttagtttgctaaggataatggcctccagctccatccatgttgctacaaaggacatcatcttactcttttttatggctgcatagtattccatggtgtatatgtatcacattttctttatctagcccactgttgatgggtatttaggtgaatagtgctgtgatgagcatacaagtgcaggtgtctttatagtacaatgatttatattcctttgggtatatacccaataatgggattgctgggtttgatggtagttgtgtttgaagttctttcagaaattgccaaactgctttccataatggctgaactaatttacattcctacaaaaatgtgtaagtgtacacttttctctgcaacctcaccagcatatattatttcttgactttttttaataatagccattctgacctgtgtgagatggtatctcattgcagttttgatatgcatttttctaatgattaatgagcatttcttcatatggttgttggcaaca

SEQ ID NO: 323513 - DNA, 568 bp, Homo sapiens
tcaataatctaaattcccatcttagaaaactagaagaacaaaagcaaattaaatctaagccaaacagaagaaaacaaataataaaaatcagagcagaaatcaataaaattgaaaatcaatagagaaattcaacgaaaccaaaatctgggtgcttaaaacaattaatattgatgagcctctagccaggctaattaagaaaaaaaaaagaagacaccaattactggtataataactgaaaaggaggccatcactgctgatcccctttrtcctaaaaatagtaaaagaatattatgaacaactcaaccccacaaatttgataacaaatttttggttcaaaaatttgaaccaagtttttgaaagatacaatctactgaaactcacactaggagaaatagataatctaaataggcttatacttattgaagaaattgaatcaacaataacaacttaccaaaacagaaagccaccaagcccagataacttcactggggaattctaccaaacatttgaggaagaaataatactccgtacaatctcttccagaaaatagaagcagaggaatattttc

SEQ ID NO: 323514 - DNA, 525 bp, Homo sapiens
tgccttttgtgctgcgagatttgcatctgtagagaaaatctacattggtgaaataaacacccaggctctctctgagtcccccttaaccagctctaggaaagattaactcacagtaaaaggagactaaaagtctgggacttttaaaggtctagcagagaaacttttaccactggctactaactgttctttctaatggctgggctgctacccgtgaggtttcatctgcataacaagatagcctttgcttgcaatgcattcctctctcactcttacataacctgtgatgctacctcctcccagaagccctaagcccctactcttctgtaacttcaggctggtataaaaatgtcagccatctgacccctcctttttttttttttttttttttttttgkgaaacggagtcccactctgttgcccaggctggaatgcagtggtgtgatctcggctcaccgcaacctccacctcccgggttcaagcgattctcgtgcctcagccttcccagtagctaggattacaggtgtgc

SEQ ID NO: 323515 - DNA, 644 bp, Homo sapiens
taaaagacataatgacaggaggggacagagcaaggtaatgtcgctcccaagagtcagcatattaatggggcctttcagtttgataatgtaattaaccttcttaaatcctactctcagtaaaattccaaggagcagaagctacaagaataatgtccttttcaagtaaccttactagcatcagggcattcacttgagaaatggtggtgatggtcaattcctgataaaagactttaaaacactgtttctaaaaaggtctgagctgccaaatatcagattcacatgaccaagcctatgttttcatcttcttctcttgatgaaaataatttctcctttctttcacaacctttcattttctacattttattgaatttgaagtcttgaaatgcaaagactagagagtcccatggtcgattctataaaatccaaatcatctccttcattggatgctttatgtctacaaccagccttcaatacataaaacatgagwctgtccaacaaccaggtggcattggttagatagtatctctatgtatttacaatattattcttttatgcaatgttacttaaaggccaaattttaaacattaatagttcagacagcacttcaccagttttaaatccactggactgaggcactcaatgtt

SEQ ID NO: 323516 - DNA, 593 bp, Homo sapiens
tatatgattctattttatctcctcttttggtgtataatttatgctgatttttataactttttaaggagytgccatagatcaacaatagatatttttaaatgatctaaatctatcctcaaataactctgtactcgtttattacaagtgcaggtacctaataacaaagacttcctaattcctcccttcccttgcagcattgctgtcattcagttcacccgatacattgctactactattgctttaaatgaagttatattttagattaattaagtggattgcttgaggttaggagtctgagaccagcctggtcaacacggtgaaaccccgtctctactaaaatacaaaaattagctgggcgtggtggcgcacgcctgtaattccagctaccagggaggctgaggcaggagaattgcttgaactcaggaggtggagttgcagtgagacaagatcacaccactgcactctagcctgggtgacagagcaacactctgtctcaaaaaaaaaaaaaaaaaaaaaagtgagaaaaagaaaatatttaactttaccttcaattatgccttttttttatgttgcttctttgtgtatatacgagt

SEQ ID NO: 323517 - DNA, 591 bp, Homo sapiens
acacatttttcttattatattttgccttcccagtgtctagtggtgtgcctcacacacagagggaactcggtaacatttgttgactgaataaatgtaaggtattttctacataatgcagacttgttaatttattctgctattaataatttattgccgggtgcggtggctcctgcctgtatttccagaactttgggaagccgaggcgggtggatcacctgaggtcaggggttagagaccagcctggtccaacatggtgaaacmctgtctctactaaaaatacaaaaattagccagacatggttgcacatgcctgtaattccagctactcgggaggctgaggcacaagaatcgcttgaacctgggaggcggacgttgcagtgagccgagatcgcgccactgcactccagtctgtgtgacagagtgagactctgtctcaaaaaaaaaaaaattattgagtgctgtttatctgccaggcactacactgggcactggacagctaacagtgagccaggcaggaagggccatgctctgggggtacttacattacagtaagagagagacacaaccttgagcaatgcataaataaaatcat

SEQ ID NO: 323518 - DNA, 589 bp, Homo sapiens
ttgcttaaagctagcatattacccttttgtaaagctgaattaatgaactaaatttctccacaatctttccaataagtaattgctaatatctaagaataacattttgtttatttgagtacttgtgtcctgtccagagccttaaatatgattgcacagccattgtcacatctgagggttcaacaaagcaacctkcaaccaaaggagcaggagagatgaactccagcccagctacagactatgttctctaaccccttgatctaagaaatctcagcaatggcaaaaatctggatatcaccaattaatggccggtgtcctagttctgtctgcctttggccaaaagcgggtactgaaaaaagagaaaagcagccactggcttccaggaactggctgggcactcacagctatgtcttggtgcttccttggtaaatatgaacaatttcttagaagaacattaacaccggacaaggccactctagaaccctcataggtcaagataaaaacaagaccactctgtaatcagatctgaacacaaacaaaacatgaacatgggctgagccataaaatatcaaattccatcctggataacatg

SEQ ID NO: 323519 - DNA, 478 bp, Homo sapiens
atagcagagcctaaaccaccggggagtagggaaatatccaactccagcccctctatccttcccattgcacctaaagaggaaaaacccccaaaacccaaggagcacatgtggagatcatggcccaggggtagaggctcactgtgggactgggtcctaatcatcagattatacaaagcatcccccttcccctgcaccttaccacaataccagtagggctcctgtataataacagatgaacgcaacggaaagaactgtatgacccatgccttatttaagaagaagtttctaggaamacccaaagacaacagcggggaataaaaacaaggacatcagagggagatgttagcctctaaagcctctagctacagcaaacagtaaacacagctcaattactagccagataaacataaaacctcacagtaatggcctgtatgcctcatttatttagtacatcacatcctactgtcaacaacaaaaa

SEQ ID NO: 323520 - DNA, 525 bp, Homo sapiens
ggaagtcagtagtctatttaataggtgaaactggcaaatcaacagacacttaactacacagtctaataatttcaacagggaaaaaatgcagtgtgttctggaaaaacattaaaggaagatccaatctaatcttgggagctcagggagrtttcctggaggagttgatatttaattcaagttctaagtaaaaagacaggagtatgaagcaagagaaggttccaagcaaagaaagcagcatatgcaaattattgtgattagggatataatgtcatttgagaaaccactatcagttgggtggcttgaagacacagcatgggttgaaaagtgatctgagcagatgcaatgatataaatatggctatatcaaaaagggttttaaatataagctaaaacgcttgtttgaacattatcctgaggaaaatggggggatctattagttattgaacttcagaagagacatgattagatctgagttttggaaagatcattatagatgcagtgaaatgaattgactggtgtgggaaaa

SEQ ID NO: 323521 - DNA, 530 bp, Homo sapiens
tcaagttctaagtaaaaagacaggagtatgaagcaagagaaggttccaagcaaagaaagcagcatatgcaaattattgtgattagggatataatgtcatttgagaaaccactatcagttgggtggcttgaagacacagcatgggttgaaaagtgatctgagcagatgcaatgatataaatatggctatatcaaaaagggttttaaatataagctaaaaygcttgtttgaacattatcctgaggaaaatggggggatctattagttattgaacttcagaagagacatgattagatctgagttttggaaagatcattatagatgcagtgaaatgaattgactggtgtgggaaaagaggaaaaggaatatgaggtagaaaacagtggcagttcctagtgagatgtgttgatggttggaatgaggagtgagatagtgggagtagagagaggtggacagatctgatatttaggaggcaaagtctgcacagatttggggatagaagaatttcgtccatttagatttgttcagtcta

SEQ ID NO: 323522 - DNA, 580 bp, Homo sapiens
agcttctctccccgcagtggagggcaaacaccacagaagaaatcagccatggccatgtcttggaggcagcttggcaatggacaatgttgaatataggacagaaatgtgttccaacgaagtaagtccatcacactcagtgacaacatgatatcatggtgacatcctgaggcaaggattactcccaggtccagctcgctccccaccatacttagtctgtcaaaaagctaacttattaatgcaaatttayattaaccagaatgccaactccagctgcaaagtggagacgatcccactgacatatacatacattaagtaatctaaggagaatccatccaccctgtcaataactgaagatcagttccatgtagagtccttcatgccagagacaaagtaaatgagaaaaattcacaaaacaaattcacaaatatttctaagacatgcaatggcataaagattataatagtatctatatatacctaaaatactcaacttaaatggcatgatgtaataaagcaatcaatgaaacataacttacaagagaattttatgcttagagtctatgattagaagagaactttct

SEQ ID NO: 323523 - DNA, 580 bp, Homo sapiens
agcttctctccccgcagtggagggcaaacaccacagaagaaatcagccatggccatgtcttggaggcagcttggcaatggacaatgttgaatataggacagaaatgtgttccaacgaagtaagtccatcacactcagtgacaacatgatatcatggtgacatcctgaggcaaggattactcccaggtccagctcgctccccaccatacttagtctgtcaaaaagctaacttattaatgcaaatttacattaaccagaatgccaactccagctgcaaagtggagacgatcccactgacatatacatacattaagtaatctaaggagaatccatccaccctgtcaataactraagatcagttccatgtagagtccttcatgccagagacaaagtaaatgagaaaaattcacaaaacaaattcacaaatatttctaagacatgcaatggcataaagattataatagtatctatatatacctaaaatactcaacttaaatggcatgatgtaataaagcaatcaatgaaacataacttacaagagaattttatgcttagagtctatgattagaagagaactttct

SEQ ID NO: 323524 - DNA, 612 bp, Homo sapiens
gacacattaaattagcatatataaatcaatcattttcatatatgtaaacaataaaaagtatatataggaagaaaagacccacatataataataacacataataaaataaccgaaataagcttagtaagaaaagtgcaaagtctatattttaaaaactttaaagcactcctgaaagaccacatatcaaaattgaagacatgaaaagatagagtatattcttggttagaagacaactctgtaactgagcttgggattacaataaggagtaggtttgagaagtggaaaaatcggggttccattttggttgtgttgagtttgacgtttcggggagaggccttaggcactggagaagtgagtgtggagcactgtggagaggtcagcatgaaagttatgaattggagcattctcaacatatgtcacttagcaacagcgtgtagatgcagaaaggagaggaacctaggacagaaacctgaaccttccaacatttatggattagctgagagtgaaaagccaccacagaagactgagaccaaaccaaatggccagtgaaaaggatggaagagtatgagtgtgawattctggaagcaaaggacaatcaatttgttcaaagag

SEQ ID NO: 323525 - DNA, 468 bp, Homo sapiens
aactttcataatatcagctacattattaaccacatcaaattgggatcagaatagccaccagattgattcattttccatgtgcacaatctgttacatattcagaacaatcattaatgtttcttaactcttcttgaaaccagtacagagccttggattttgtctagggtgaattacttcattcaaaaaaacaaaccaacaaatcagaaactaatttttcagcctgtcataaatatgactacagaacatgtatgttccttcctggatacatttgacttyatcttgtcataacagcttctaatgaatcttaaaaacttcctcaaagtgttcagcaagcaaataaaatcagttttccatgcacattatagctaaaacaagatcctacctgtaaattataaacaatgattgtttcttactagcttatgatatctgtgaagatttttcctgtttcttagatttttactgaactac

SEQ ID NO: 323526 - DNA, 593 bp, Homo sapiens
tatcagtgaatcttgagtgtcttaaaaatagtgggaagacatttcggtcagggagagtactgctgtggagacacagagacttgaaatacgtaagagggttcgaaaaccaaaaacaaatttggtttgacttgagaggggatacaaggatgaggtgggtacaaccaaaaatgagacaggaactaccttataaaatactggttatgctgtgctaagacttgtacctgaaatataggagatgcttaataaacacttatttagtaaacaaatcactttctactagtacagtaaattttatttccatttamatatttcatatttaataatttactagtttacaccttggtttattgatggacagctaagtatccatactttgtgttttcagcattccatctggggtagatccttaatctgtcattgtaacaattagaaaagttccttctaatatgagcaccaaaggtggagaattcttaaagttaatatgtataaacaaaatgttcacatctgtttgtgtttttcttttttctttttctaggttcagacattgttcaatggttgataaagaacttaactatagaagatccaggtaaata

SEQ ID NO: 323527 - DNA, 589 bp, Homo sapiens
aggatcgaaataaaattccttgtcataggctttacaagatcttatatgatctggccaccccagttacttctctgtcttcctttcctatttccttgcccatctttacacatcctcctctagttcacagacctccttgttgctcctcaaacataccaagcatgcgcaggccttaggctttgctaggctctctgactggaatgctcagaacccttcctccagagagcagaacaccccacttccttccttcagttggattctagccaaagccactacatcagagacaccagccctgactacactggtgtagaagaccgygtatcttttagttggctttcataaaaaccatttttatttagtactcatcaccacttaccatataacatatttacctatttttttattgattattatcttgtctagtgaatattttaagctctaggtaagtatggacatttttgtctgtttgcttggttggttttagtggtttgtttgcttgatctactctctgacagtgacttaatttctgagatattgcaaccaactaaaaaatatgagagcggaaatggataaaaggatcttacattagttc

SEQ ID NO: 323528 - DNA, 409 bp, Homo sapiens
ttcaatgtctctcttggaacatgttctgtattataaaacatatagcaaactaatatagagaattgtggaagataaatgtaattcactggccagaaactccactaattttttatttgtctaatctgggttccacttcttttcattccgcagaccccctatttttggccatcaaattgttgggagccggaaaacacagattatggtcagtgccatctctcattattttattattgacagcctgtatgtstagatggatgtgtacttgcgttttattgcttttttcattaagaaaaggaaaccacagttctcaggatgggaccaatatttttaacattgaattgataagcggctttgtttggaaagtcaccagacctcgtgacaactttctctgtggtatggtgccctctgc

SEQ ID NO: 323529 - DNA, 409 bp, Homo sapiens
ttcaatgtctctcttggaacatgttctgtattataaaacatatagcaaactaatatagagaattgtggaagataaatgtaattcactggccagaaactccactaattttttatttgtctaatctgggttccacttcttttcattccgcagaccccctatttttggccatcaaattgttgggagccggaaaacacagattatggtcagtgccatctctcattattttattattgacagcctgtatgtgtagatggatgtgtacttgcrttttattgcttttttcattaagaaaaggaaaccacagttctcaggatgggaccaatatttttaacattgaattgataagcggctttgtttggaaagtcaccagacctcgtgacaactttctctgtggtatggtgccctctgc

SEQ ID NO: 323530 - DNA, 472 bp, Homo sapiens
ataattgttaacaaaagtccatagtttatattagggttaattctttgtgttatacattctgggggttttcagaaatgtataacatttatccaccatttagtttcactgccctaaagattctctgtgttctgcctrtttatccatacccctaccctaacccctggcacacacttatcttttcactgtctccatagttttaccttttacagaatgtcatagggttggaattacacagtgtagagccttttcttctttcacttaacaagatttgttatagtttctccatgtctttgcatggcaggatatttcattgctttttatcactgaatattccattttatgaatataccatagtttatccagtcacccattgaagaacatcttaatcaattccacatatggcaattacgagttgagctgctataaaccttcatgtacagaatttttttgaagacataagtttccaattcat

SEQ ID NO: 323531 - DNA, 562 bp, Homo sapiens
aagtttactggtttctctaatcasagtcataatttactattttacttaagaacaaaactattccttaatatccagctgtaaaatgaggcccacatggttaatattctcataagatccttacacatcttctgggataattctctttcaatttctgccaggtatatgatgatattctgtcattattatttcaacatgacactctaattcacacgtctttagatttaaacacacatacctactccccatctgtatttaatgggcaagctgtgtgattattaggggtgacctaatttgatttactgaaccaaacagagagctcattggaattaaaggactcctgtcttataaagaaccctggcctgcaagttagggagagacattagattatctttcatgtgctagtatgatttagagacctgatagggagaactttaactcaatcctctgggtctagctccctaagtataatgaaaggagactcaattagaaaaatgtctaagtctcagctttcctctaagatacctatgagccatgattgagtcaggaagaacttgaattgtca

SEQ ID NO: 323532 - DNA, 562 bp, Homo sapiens
aagtttactggtttctctaatcagagtcataatttactattttacttaagaacaaaactattccttaatatccagctgtaaaatgaggcccacatggttaatattctcataagatccttacacatcttctgggataattctctttcaatttctgccaggtatatgatgatattctgtcattattatttcaacatgacactctaattcacacgtctttrgatttaaacacacatacctactccccatctgtatttaatgggcaagctgtgtgattattaggggtgacctaatttgatttactgaaccaaacagagagctcattggaattaaaggactcctgtcttataaagaaccctggcctgcaagttagggagagacattagattatctttcatgtgctagtatgatttagagacctgatagggagaactttaactcaatcctctgggtctagctccctaagtataatgaaaggagactcaattagaaaaatgtctaagtctcagctttcctctaagatacctatgagccatgattgagtcaggaagaacttgaattgtca

SEQ ID NO: 323533 - DNA, 520 bp, Homo sapiens
ccaccaaatcagcaggggcccccaacatcttatctgtcctaatccatctgggggcggcctgaaacactgacaaaaggtgtttgtctttgcatcacccgattcagaactcacatgaggcacaagagatggacgatcctcaaaaaccaccgtagggcacgcaaagccaccaggacacgcaaaagatcacaatggaggcaaataacacagtgcccaaagctgcacagaaaagctaggcacagattttctctgggatataaaagcatccaaaacatccctgcatagtgggaaactcagaaactcacacatatgcccagggcagaatacactctcagaaaagacctcacaattttcccaaactttcacacctggttgagcagtagtttcagtgcaaacaagaaggaaaaactaaggcagagttgtaaaaagcctggcgaagtgttgaaggagggcccagcacacaaagggtcaactggcagactgagagaggaytttcatttttgttttgtatttcctttctgcc

SEQ ID NO: 323534 - DNA, 553 bp, Homo sapiens
gcaataggtaatggcttaaatcaatgcaaaggcaatagaaaggccagagaagacatagaaacaaatagttctttggacaatggtagcatctaaagtaatgggcagcatatggtaggaaagggaggaggagtcaaatattgcaacccacaacaacaaagttaatcccagataataaggaaattgatagcaaaatttgtttgaaggaaaggcgagaaagtaaattatgaaatgttaattttcaggtaacagcctgccattgaagcaaagtaatgatagcatatcctttctccacatgtaacttggagaatgagagagaataagaaaagtggtaatagtaaaaacaaagataagattacatgccaacaccaggtgaatgggacaacagtaaagacacacacagttttctgtgcaaggtctcaaacagaattmaacagaatatcaggttagtttatttggtttgatagactttcaaatagtccgtttttattaaaaaagaatgtccctacagtcaaatatttatccatctgtattagttcattttcacgctgctata

SEQ ID NO: 323535 - DNA, 599 bp, Homo sapiens
atctagcatctgtattttaaatataattacattttccaacagcatcgtttctgtcattttttgacaaagtaaaaaaaatcagtatattatataaattttcattgatatattaattaaatttgctgtatcataatgattaatggtatgcatttctgaatacaggattaagcttgatacaataaacaaataagatggatgcccctgtctgagttcaactacagatggagaatagaaaaaatacacaggttgcttatttaggaactacatatagtcatctattatacttaaaattctgtgtgtttgtgtgtgtgtgtgtgtgtrtgtgttagaaggcaatgtccaaaattttgaagggcttgaataatataccttctcttgggaaaataatcttaagtcttccatgctaaaacaagttaaaagttaaaggaatgtagtgtgagtaactgatatattctttttaaacacacacatgtgcacacacacatacatgtgaacatacacacgtgcacacacacatacatgtgaacatacacacacgcatacacacactttacttcctaatagctcattttagatcccgtgtatttgttcaataattc

SEQ ID NO: 323536 - DNA, 569 bp, Homo sapiens
gaaaatattaaattggctcacaagatccatcctagtatctcctcttttccagagcaaatgtgtacacccttctttttcaagcacactagacacttatgtaagtgtcagaggcatttcaacagaagaccstagtgccacacgtgcagttcacttaacttttactaattaggcttaaagaagagcatctttgtgaaaatttattatatcacaatgaagatccttactgcattttaaaaacagggaatttttctctcagaccatactatgtctacattattctaattcagcatattgaaaggacactattattcttgccacaagattaaatactaaatgaccaggaaataactgtttttatttttaaatgttgaaatatgtaatatttatgtctttcataaacatacacaaatattatagtagaatccgtaagcatgatcaaaacaaaaataattgcatgttttgaataataagaagaatgaactggaggttttagatcttaacatgtgtctcgaggcttggacaacaggacctttgaggaacagtaggatgacaagaacacacacgagttt

SEQ ID NO: 323537 - DNA, 569 bp, Homo sapiens
gaaaatattaaattggctcacaagatccatcctagtatctcctcttttccagagcaaatgtgtacacccttctttttcaagcacactagacacttatgtaagtgtcagaggcatttcaacagaagaccctagtgccacacgtgcagttcacttaacttttactaattaggcttaaagaagagcatctttgtgaaaatttattatatcacaatgaagatccttactgcattwtaaaaacagggaatttttctctcagaccatactatgtctacattattctaattcagcatattgaaaggacactattattcttgccacaagattaaatactaaatgaccaggaaataactgtttttatttttaaatgttgaaatatgtaatatttatgtctttcataaacatacacaaatattatagtagaatccgtaagcatgatcaaaacaaaaataattgcatgttttgaataataagaagaatgaactggaggttttagatcttaacatgtgtctcgaggcttggacaacaggacctttgaggaacagtaggatgacaagaacacacacgagttt

SEQ ID NO: 323538 - DNA, 547 bp, Homo sapiens
tgaacttaaaactgctgtaaaaaatgaaatcstttaacttattttagggtatcgagataaatcataaaggagaggcaacaactgagtccacataacatcttaacaaatgtcactggtcatccgcgactaattacaattttcaaattcagtaatatgcgtgtaaataacacatgtgaacaggggccagtcctcactctcaagcatggatgtaggctgaatgaagttatttcaatgccaggagtgcagactataaaggctgtacagggtcagagagagaggttttggtagaactgcagtgctcagggaaaccttcagaagacaggcaagctttccataggaagggaaatgacaaaaataacttcgagaaataaagagtatgtgtattccatgtacaaaaatgagtatttgataagtcacggtggtcgaagttcagaccccaggcttaagtgatgatgagttggccagcttggttagttaagaacattcccataagggggaagggggaagatgacagataagtaaagggagcttaatcacgtggtatttt

SEQ ID NO: 323539 - DNA, 547 bp, Homo sapiens
tgaacttaaaactgctgtaaaaaatgaaatcgtttaacttattttagggtatcgagataaatcataaaggagaggcaacaactgagtccacataacatcttaacaaatgtcactggtcatccgcgactaattacaattttcaaattcagtaatatgcgtgtaaataacacatgtgaacaggggccagtcctcactctcaagcatggatgtaggctgaatgaagttatttcaatgccaggagtgcagactataaaggctgtacagggtcagagagagaggttttggtagaactgcagtgctcagggaaaccttcagaagacaggcaagctttccataggaagggaaatgacaaaaataacttcgagaaataaagastatgtgtattccatgtacaaaaatgagtatttgataagtcacggtggtcgaagttcagaccccaggcttaagtgatgatgagttggccagcttggttagttaagaacattcccataagggggaagggggaagatgacagataagtaaagggagcttaatcacgtggtatttt

SEQ ID NO: 323540 - DNA, 643 bp, Homo sapiens
caggtacagaaataactgcagccaaagacgatctgcagttcatttggccaggaaccaaagcaaaggcatttcgcaaaaaaaagattacttgggtgcctcagatacagtctttgtcttacaccttttctgtcctctgaactagaaaagatcttactgaactgtgttattcagcttttcaaaaatgtattgtaacttgaatattcttaataatccttatgatactttaaaacttctctgagaagttatccaagaaatacgtcataaagaaaacccttttttccccacaaatccttctaatataaatgcatacccattaaatcatgttttcttatttcttatgaaacatatagacaattttagatgacaaatatgactctacaatgtggaaaaaatcattctggaaatgagcattatgaagatcaagtatttgactagcaaaacccaaatataccttcctacatatccaaaattagggagctggtgaactttgtttccrtactgttacgcttggtttaatacatgcaaaatcacctcacagtaggatctgaacacaaaagaataaacctattgaaatttccagatttggggcctgttacctttgctgaattcaggcattatatgatcactaagttacctgttgggt

SEQ ID NO: 323541 - DNA, 566 bp, Homo sapiens
tctcaaatgtcagagtgccatatttagggttagggtgtcctgaatccaatcaatcaggaatggcatgattgcatatatgttcgttttaatgggccgttgaaaagaaagcattccttcactctcgtgcttggcaagaggaaaatccaagacagctccgaaagaaaagccttactaactccaaaggtgaaagaagggtacgttccttgcactgcttctcttcttgagtgtagggaatagcacataatttggcatctcaaattttctgacacagcttctgtaacgaaaaagtgaatgacacaaccagagtcatccaagacaagataaaactgccaattacctcccttcataaaacaactgtggaattaaaytgagaaaataaggttttaaaatcagcagtctttgccgtttttatttgtgtttataacaacgtcagtgcttttaaagatgatccagtaagtttcttcatagagttcattttgagaatcaaggtggccatggcccaaagggaaatcaacctctcttttagcaaacctataaatatgagtcatggcaaattgaaagtaatg

SEQ ID NO: 323542 - DNA, 571 bp, Homo sapiens
ccaggcatgaaatctgagttattttattagtgatggtggctgatggatgaccacagaataccaaactccagctacagstgtggctgcttagttacaatgtatctgccaaaagatgcaaggaaaactccacattggttcaagattataaaaaatccactttagatacatttgtttctatattaaatcaactcaataaaaattaactatgctaggaatctagacacctaatttcctctgaaatatttacactcgttgacaataagcattaattagtgccagtgtgggtactggtactcagtttatgtttattgaagcaaaataaagctctaagtaggtggaaaatttttttcaatcacagaaataggttgagtattaaatagaacaaattgtattgtccaagcttatgaaaataaggaagaactacttttacttttgtagaagaaaaaaagaatgacttttttcctagagtcagtgaagatcttcaaaaaaacaataatttcagttgtttctaaatcaaatgttaaaccaattgttagtcttccaagaaagttacgtgtaccagaaaaattat

SEQ ID NO: 323543 - DNA, 534 bp, Homo sapiens
atatgggcttaagattgcagtcaaccatgatgtgttctattcacttggatgacttctgtacataatattgtattattgatctatcctccagtttgataaagacctttttctaataaagaccttttatgaagggatagtaaattttcaaattgacataaargggagtatcatttctccccaaatagaaaactaattttataaatccagaaataatatgacattttaattaaagtgaaatcacaaaaataactcaaaccgtgaactttctccccattatatcagtatagctttatttcattgtacatgagtagatataattcatccttttcttttggaaattgctaagatgcaagttaaattttttcatgtggcaccatatttcaggaaatccagtggtaaagtttgaaaatcgatcatttgctcttcaaccatattatttttattcattcatatgtttattcatttactcaagtaatatttattgtgtttggagcacttttttttacctgggaaagacagttaattttaaagcac

SEQ ID NO: 323544 - DNA, 549 bp, Homo sapiens
taaggatttatttccaaaggggtcaggtgtcttcttcagggacaggctccagaacccaagctgagactccataaacaccactctttctatgatgccacctttataaagaataccccaggaggtatcatgtttgccgttttgtcatacatatccttcctccctgctttggtaaatatctgatggctgagttacatgtcagtacacttagaaatacctgattataaatagtkgatttaattcatcccatgaattagtttgttattctttcaaaaagtaggttttatggttgtaacagctttgcaaatggttcttcatgactacactgccaattatatgttacttaatctaataacatggttgatattgcctttcacaagagttcaggatggcatgcatgcctgtgagtataaacaactgcatgtgtggcgaaaaccttatacgatttcgtttttgaatcattttaatgacatttaattgtccatgaggagttataatgacataactatgttggaaatcacattcgataaaattgtagttttaaaacttagt

SEQ ID NO: 323545 - DNA, 549 bp, Homo sapiens
taaggatttatttccaaaggggtcaggtgtcttcttcagggacaggctccagaacccaagctgagactccataaacaccactctttctatgatgccacctttataaagaataccccaggaggtatcatgtttgccgttttgtcatacatatccttcctccctgctttggtaaatatctgatggctgagttacatgtcagtacacttagaaatacctgattataaatagttgatttaattcatccsatgaattagtttgttattctttcaaaaagtaggttttatggttgtaacagctttgcaaatggttcttcatgactacactgccaattatatgttacttaatctaataacatggttgatattgcctttcacaagagttcaggatggcatgcatgcctgtgagtataaacaactgcatgtgtggcgaaaaccttatacgatttcgtttttgaatcattttaatgacatttaattgtccatgaggagttataatgacataactatgttggaaatcacattcgataaaattgtagttttaaaacttagt

SEQ ID NO: 323546 - DNA, 549 bp, Homo sapiens
taaggatttatttccaaaggggtcaggtgtcttcttcagggacaggctccagaacccaagctgagactccataaacaccactctttctatgatgccacctttataaagaataccccaggaggtatcatgtttgccgttttgtcatacatatccttcctccctgctttggtaaatatctgatggctgagttacatgtcagtacacttagaaatacctgattataaatagttgatttaattcatcccaygaattagtttgttattctttcaaaaagtaggttttatggttgtaacagctttgcaaatggttcttcatgactacactgccaattatatgttacttaatctaataacatggttgatattgcctttcacaagagttcaggatggcatgcatgcctgtgagtataaacaactgcatgtgtggcgaaaaccttatacgatttcgtttttgaatcattttaatgacatttaattgtccatgaggagttataatgacataactatgttggaaatcacattcgataaaattgtagttttaaaacttagt

SEQ ID NO: 323547 - DNA, 483 bp, Homo sapiens
taatagtatgtgttctttgttttctgaagaggaagaacttggaaaaccaggcatgtcctcacaattttggtattcmtatcacatagcacatatcagttgaaataatatgttttgtttggaattaaataattccatgataaaatgaagtcattttaggacaattacagcataaatattagtactgggccaatcacaacaaaatatcaaatattaataatacatttatatttatatgctgaagaattagcatagtgttacatgaggcataattacaaatatgttcttaagcattgattttatatatgcattttataaaattagaatagtatggtgaatgaaatatttattaacacaataaatactgctataatactcacattaattaattattatcagttataggagtatacatttttccctttttaagagtaggactataaagatatgtctccattgtgtttggtgttcagaaagtagtaattt

SEQ ID NO: 323548 - DNA, 483 bp, Homo sapiens
taatagtatgtgttctttgttttctgaagaggaagaacttggaaaaccaggcatgtcctcacaattttggtattcatatcacatagcacatatcagttgaaataatatgttttgtttggaattaaataattccatgataaaatgaagtcattttaggacaattacagcataaatattagtactgggccaatcacaacaaaatatcaaatattaataatacatttatatttatatgctgaagaattagcatagtgttacatgaggcataattacaaatatgttcttaagcaytgattttatatatgcattttataaaattagaatagtatggtgaatgaaatatttattaacacaataaatactgctataatactcacattaattaattattatcagttataggagtatacatttttccctttttaagagtaggactataaagatatgtctccattgtgtttggtgttcagaaagtagtaattt

SEQ ID NO: 323549 - DNA, 566 bp, Homo sapiens
cgccacttcgttttgtggtctactttcaggagcatttgtacactgcactttcagatgttacgcaattattcgtcacatacacctcctgctccaccgttcctatggatgatgctcacattccttttccaccagggattcaagctcaggtgacaaacgagtgcccacatcatcaaaacattgtggcaggacacttgtcatggtgtggaaacgcgggtgacagtgtttattccaaaatgagttagccaaaagacaaaaagagagaaagaaaaaggaaagaaaggctaaagaggttactcttaaggaatgttcttcaacatgatttcctttttcatgtggagaaggcttttgttttgttttgatttccctgaaaaatctctgttscagcccagagctgactaacatgactggagagagtcaagtaagccaacccctgaggacaggagggccagatcacgtgggcttaggacgccacggagaagggatctgtgtcatttcctctggaaacccactggatcagctgggaagtgctggttctcttggcaagacaagcctgagacacattatcc

SEQ ID NO: 323550 - DNA, 512 bp, Homo sapiens
ccaccttgacctccttaagtgctgggattacaggtgtgagccactatgcctgggctaaaatctatattttacttgaaaaaattgctattgaattattccactgcaakgtaaaatgaagaggttaagtgtgggcataccacagctgcacatggcttgttacaagccatttttaggcagactggttagccatcactgcctaagactgatttagaaatttacagttacacttgttcactcaatattctgcacactattgtgaatgaggcattcttaatccaatttcccttgaagttattacatagaacataaataagaaaagctattgttattgtttttcatcattggaaagtcaaatcagtctgaggctgagtgataagaagctgtacttctaataaaagtgagaagattcttgggtagaaagcactcagggaaagtttttcttcagtgtttatcttaaatctaggccttgaaatccattttgttgaagatgacagacatctatcattacagta

SEQ ID NO: 323551 - DNA, 629 bp, Homo sapiens
cttgatcatccacataaagctcatttaaaatcctgaaaaatctgggaaactatttatagctctttattgcatattaatatggatggtttcccactaaactatttcaacaaactacttctgtggatttgatacctgaagaaaaaagaatagaagtaaattaacaattttactgattcttgacactttcttttctcagaaggtattaaataaaataactatttcatttccttttgaaagacaatgtaaaataattactaaagtgatttcttcatgaaatttgattatgtctactactgtggaaaactcacttccttcctgacacgatgcccaacatcacctcccattcctggtcactccagctgctccgggatgccccagcctctgctggctgcctctgccccgccaaaaaaataacagtygctcccctcagccagttccagctaacctctttaagcttcggccttgaacagaaaaataatgtaggcagacatatgaatagtataggaatagtacagacaattctagatattgctataaatcaaaggttttcacccttggcatttctgatactgtatggcagacacttctttgtcatgtgagatatcctgtccactgcaggacgatgatca

SEQ ID NO: 323552 - DNA, 629 bp, Homo sapiens
cttgatcatccacataaagctcatttaaaatcctgaaaaatctgggaaactatttatagctctttattgcatattaatatggatggtttcccactaaactatttcaacaaactacttctgtggatttgatacctgaagaaaaaagaatagaagtaaattaacaattttactgattcttgacactttcttttctcagaaggtattaaataaaataactatttcatttccttttgaaagacaatgtaaaataattactaaagtgatttcttcatgaaatttgattatgtctactactgtggaaaactcacttccttcctgacacgatgcccaacatcacctcccattcctggtcactccagctgctccgggatgccccagcctctgctggctgcctctgccccgccaaaaaaataacagttgctcccctcagccagttccagctaacctctttaagcttcggccttgaacagaaaaataatgtaggcagacatakgaatagtataggaatagtacagacaattctagatattgctataaatcaaaggttttcacccttggcatttctgatactgtatggcagacacttctttgtcatgtgagatatcctgtccactgcaggacgatgatca

SEQ ID NO: 323553 - DNA, 548 bp, Homo sapiens
actaaaatgtgaaggtatgcccattcagaatggcgagctatcatactgcattgttttaacttggttcgaatatacttactggcacaaatgtattgtatttggactccttacgtatattttacctgcttttcaattgaaggattatttaaaattttcttgtagctctagaagtgcatcttacaaattaagagaaacaattctttgtctttcatacttattagaaatattttaacttgtcgtttgccttttgaatgttaagttttaggaagtccaatttttcattcagttttatatgtgatttctaaattacgtgtcctgcctagaaagacacttagacaatatttatcatttttattttccatattaatatttacattggtgatctaacatatttattttgctacaaacagcaaagactagatttactattktataaaacagtgtcaacattcagattttcatgaccaaatcaagaagatatctttgtctgctaataatagtgtcatgttgcaaactatgtggctgtctgcttgttcttctgttccctt

SEQ ID NO: 323554 - DNA, 597 bp, Homo sapiens
gttctattagacatctgaatgtacaaagatatacaagccccgagccccattgcgaggtaacttcagggcaggtgtgagttcaaaggagtacaggcttccaattgcagtaggtggccagtgttacaggagttcatgcacacaaagaaaatgtaygtgggttgttgtttggaatgcctagggaagatttcctgaaataaatataatgtgcactgcgttttgaaagacgcatactattcagaccggtagagggagaggccgggaataagaggacaacattctcttgtaaggtcaggtcaaggagtaacccacagatctgtgcaactgaacaaggatacttttcaggggacaaacgggagggactgaaggacagaatgcagtttggagtccgatcatggactttcttgaatttcagggtcatgggtactagaactgtttatgttgccggagatagaagccagggctaggacagcagcagatgtgtcagtgttcccgagaggggagcctggggcaggaaaggatcgtgcattggtctatgtgaacgctcaagacagcctgtgccaggacaggagccttcgtaggaacatttactattaggat

SEQ ID NO: 323555 - DNA, 597 bp, Homo sapiens
gttctattagacatctgaatgtacaaagatatacaagccccgagccccattgcgaggtaacttcagggcaggtgtgagttcaaaggagtacaggcttccaattgcagtaggtggccagtgttacaggagttcatgcacacaaagaaaatgtacgtgggttgttgtttggaatgcctagggaagatttcctgaaataaatataatgtgcactgsgttttgaaagacgcatactattcagaccggtagagggagaggccgggaataagaggacaacattctcttgtaaggtcaggtcaaggagtaacccacagatctgtgcaactgaacaaggatacttttcaggggacaaacgggagggactgaaggacagaatgcagtttggagtccgatcatggactttcttgaatttcagggtcatgggtactagaactgtttatgttgccggagatagaagccagggctaggacagcagcagatgtgtcagtgttcccgagaggggagcctggggcaggaaaggatcgtgcattggtctatgtgaacgctcaagacagcctgtgccaggacaggagccttcgtaggaacatttactattaggat

SEQ ID NO: 323556 - DNA, 597 bp, Homo sapiens
gttctattagacatctgaatgtacaaagatatacaagccccgagccccattgcgaggtaacttcagggcaggtgtgagttcaaaggagtacaggcttccaattgcagtaggtggccagtgttacaggagttcatgcacacaaagaaaatgtacgtgggttgttgtttggaatgcctagggaagatttcctgaaataaatataatgtgcactgcgttttgaaagacgcatactattcagaccggtagagggagaggccgggaataagaggacaacattctcttgtaaggtcaggtcaaggagtaacccacagatctgtgcaactgaacaaggatacttttcaggggacaaacgggagggactgaaggacagaatgcagtttggagtccgatcatggastttcttgaatttcagggtcatgggtactagaactgtttatgttgccggagatagaagccagggctaggacagcagcagatgtgtcagtgttcccgagaggggagcctggggcaggaaaggatcgtgcattggtctatgtgaacgctcaagacagcctgtgccaggacaggagccttcgtaggaacatttactattaggat

SEQ ID NO: 323557 - DNA, 583 bp, Homo sapiens
ttttctttcaaatacccttctagtctagtgtaacggttgcaaaatattccatttcctttcttttcccttttttttagtttccttctgcttcatgccttgtttttcttccatattctcccttttatctttcacataaaggtttttcctcaaatatctggcgatccttgccaatctgttgttatttaaaagtaatgcacctgactattagtatttcaagcttcctctttcctctcttaggctagttatttttctcagaaagaatgcctctagtcactagtttgaatcaactctcaaattctactgaatacccttactrccatttttctcctttcttctttgttcttgttaatatatgttttcagcctctctatgtgggacttgtgaaaaaatgataagccaataatatgcaacttaacatatttcatagtaagtccataaagatagctgacaaagagtcaacctttaagtctttggaaaattttaaagaccaaactaaaaattcagatttatgtctaggtcatttatgaatagcaaggcagatttgttcatgaagtgtgaacaaaacagaatgtaaaaaaaaaaa

SEQ ID NO: 323558 - DNA, 570 bp, Homo sapiens
cttccactttctccgggaaatctcagtagttaacacatctacaggtctgtccttatctggaaatgtatttcatctaaaccgagaagctccaattcaggtaagccaccaggggccagcccacactctgcccctgtcctgaggtccagttccttccatactttgttccaccctttccaatttgaagtccattctctgagatgaggaaggcagaaataaaacagcagtgacgtgtgtctgccttgtcttggccaccagtcacattacactgactgctctaagctgtggcgccatggctaccagtgttggttcagatccctgtctcctgcttactggctgtgtgaccttgggaaagttagggaacttctctgtccctcacagtcctcatctaaaaactgggaatcacatcagtgcctacctcacagagctcctgcgaggatctgagcaaacgaattaacacaagtagaagacagggcctggctcaataaatgttcacttttattttgtycttttcctatcctgactaaaactaaaagaaccctcttctgtgtgtgcaaagttcgtagaaacttc

SEQ ID NO: 323559 - DNA, 576 bp, Homo sapiens
gccatatggattcatatcacctcatattcttgcagtaaaaagcatgaacaccagggttacaagggagtccgcatgatgtttgtaagaagggatgtgagcagtaagaatgaggttcaaactccaccctccttgggtaacccttgcatcacagctgtgtgggtattaatagtgtgtgacccatttaatcctcacaacagttcagttgttcttcctaaataatagcaaacctttatagagtgcttattatattccaggcaatatcctaagtgcttcaatacgtaatcccacctgatactcaaaacaatcttatgaaaaagatactattattatcccattttacaaatgagaaaaccgtaattcagagggcctaaagtaacctgctcaatatcacayagctagtaagtagggatgaatttccaaatgatgttattaaatttagaaattaaggggaaatggctaaatgtaaaagaagttagaaatacaaaggggccaaaaccagaaacaactcaatgtcctccaacaagagtatcaataaacaaattgtagtttatttaaacaacaaaatacaactcagaa

SEQ ID NO: 323560 - DNA, 576 bp, Homo sapiens
gccatatggattcatatcacctcatattcttgcagtaaaaagcatgaacaccagggttacaagggagtccgcatgatgtttgtaagaagggatgtgagcagtaagaatgaggttcaaactccaccctccttgggtaacccttgcatcacagctgtgtgggtattaatagtgtgtgacccatttaatcctcacaacagttcagttgttcttcctaaataatagcaaacctttatagagtgcttattatattccaggcaatatcctaagtgcttcaatacgtaatcccacctgatactcaaaacaatcttatgaaaaagatactattattatcccattttacaaatgagaaaaccgtaattcagagggcctaaagtaacctgctcaatatcacacagctagtaagtagggatgaatttccaaatgatgttattaaatttagaaattaaggggaaayggctaaatgtaaaagaagttagaaatacaaaggggccaaaaccagaaacaactcaatgtcctccaacaagagtatcaataaacaaattgtagtttatttaaacaacaaaatacaactcagaa

SEQ ID NO: 323561 - DNA, 603 bp, Homo sapiens
tgagatatgtgaaaaaccctgctctgctttatagactgtgaccttggagaaatgacctaattgctctgaaaatgcttattgatctgttaaaaataaaaacatgtagaaaggtaattttattattaayagattgccttacttaatattcactaaaatcctatgcgatgagtgtcattcctctcacagaaatgaaggaaactgacacctcacagccagtaagtagtgaagttgggattcaaatcctgacttgtcggattctctaatccatcatctttttccatagacctccatcagaccttgaatggaatttttataatattaggcaatgatatgcaagaggactgagaaaggaaagaacctgatagcagaggcatagccagggagcctggtgcactcatccagggatgagtcctaaaccaaagcaaagacagctggaatcgagagagattttgtggaggctgagccaccttcacagggggtgagaaagagaggagtaagaaattgggaaagatcaaacaaaactgagattgttgagcctaaaggaaccaggaagtgatggaagagatgaacatattgaggaaagggagccttcttgagcagagg

SEQ ID NO: 323562 - DNA, 602 bp, Homo sapiens
atctaatcatggtaaccaaggtgataactttcatctttggtatattttttagtgaggtgattgtttcttgctttttgtctttcagaaaactaagatttaattacttatattaatgtctgctgaggtagataataatctaaaaagattttggttattggtgaatggggcactctttagtttctccttcctattgttggaaggatctgcttggcttaattcctcccccttcaccccacaatgatgtttactagcaaagttctttgaaacataactggttaatcayctctcaaattttaagaatgattaaagtttcttttctggtggagtggatgtagggggatgtttgcttaatagaaacaaaatcattaccttctgaaagttcagcttcctatttatgttggtattcctgcctttagcaggtttatacaatacctaatgtagaatgtgtggcccaggatcattataagactttctgttttcttttttttcccaggcaagtgaaaattacatcctgtgtagtgataccaggtcacagctcaaatttcttgaaaagctggatcaattggagaagcagagaaaggatttggaagaaagagaaatgt

SEQ ID NO: 323563 - DNA, 558 bp, Homo sapiens
ttcctgcctttagcaggtttatacaatacctaatgtagaatgtgtggcccaggatcattataagactttctgttttcttttttttcccaggcaagtgaaaattacatcctgtgtagtgataccaggtcacagctcaaatttcttgaaaagctggatcaattggagaagcagagaaaggatttggaagaaagagaaatgttacttaaggcagccaaggtaagggccagtgtgatttatgagtgaatgtggcctggcagtgtggtcagaggtggctttatcgttggttgactgtcttggttttattaggcctttagatttctccagaggatttcctaaaacgaaattactaataggatgtctcacagccaggatggtgtggtggctttcagttaatttagtttaatgagtcataatcttttgtcttctcacatttcctgtgtgctctccccatcctcaaacscaggtaaaatgtttcgtaaaatttcagggtctttttaggaatccaatttgatacatgccaagttgaagttgatagggaaaatttggaaagtagacagg

SEQ ID NO: 323564 - DNA, 569 bp, Homo sapiens
agatttagtaaagttaatttttactgcttcatccaaggatgtttcaaagtgaaattgggtctatttttttttatttttattttttagagtaagagtcttgctctcttgctcaggctggagtgcagtgacatgatactagctcactgcagcctcaaacttacgggctcaagggctccttccacttcaccctccaagtagctaggactaagaggtgtgtgccaccatgcccagctagttttaaaatatttttttgtagtgacagggtttcactttgttacccaagctagtttcccaactcctggcctcaagcgatcctgcacccttggcccgccaaagtactgggattacaggtgtgagccactgtgcttggccttctgttgttttttttttttttttctccaagcacatagcactgtaraatgtgatgatggctgtttcactttgccattgcctttcttaccggtagttttacccattgttgcctttgcaccatgtgtgcaaacattagcttagtgaaaaaggctttctctccaagatgttagtattaatggaaaataatttagatcaca

SEQ ID NO: 323565 - DNA, 593 bp, Homo sapiens
gtagagaacttaaaccctaaggtctccaaactgagtaacttcctgttccccaccctaagaaatttaagacacgcgtgccttcaattcttaattgttcttaacagattgtaataatgtagtattactyaacccatcagctcttctctttgcttcctgtgatctttaaaacaaaaaaaatcaccccttcattgtattctctatgaataaacatctctatcatttatgcttacacatttcataggtggcatgaagaaaaaagcctatatttaattgactttatcatttgtgaaaagtttgctatgtctacaatcatgaattatatactttgtctcttttaaaagatttgtagacttaaaattgtttctatttctcccatccctcaggatgcaaaaatcgaagcagaagaatttactaggaaactgtatgttgaactcaagtcttcacctcagcctcacctggttccttttcttaaggtagagttatgtgtcacttagaagaaataatttggattagattactctaaaataattaaaaatgggaatatttcaatatgacagcaattgaatgtgaagatactgacagtgtgggagaaa

SEQ ID NO: 323566 - DNA, 593 bp, Homo sapiens
gtagagaacttaaaccctaaggtctccaaactgagtaacttcctgttccccaccctaagaaatttaagacacgcgtgccttcaattcttaattgttcttaacagattgtaataatgtagtattacttarcccatcagctcttctctttgcttcctgtgatctttaaaacaaaaaaaatcaccccttcattgtattctctatgaataaacatctctatcatttatgcttacacatttcataggtggcatgaagaaaaaagcctatatttaattgactttatcatttgtgaaaagtttgctatgtctacaatcatgaattatatactttgtctcttttaaaagatttgtagacttaaaattgtttctatttctcccatccctcaggatgcaaaaatcgaagcagaagaatttactaggaaactgtatgttgaactcaagtcttcacctcagcctcacctggttccttttcttaaggtagagttatgtgtcacttagaagaaataatttggattagattactctaaaataattaaaaatgggaatatttcaatatgacagcaattgaatgtgaagatactgacagtgtgggagaaa

SEQ ID NO: 323567 - DNA, 618 bp, Homo sapiens
aaaaaaaaaaaaaaaaaaaaatatatatatatacatatatatatattcattaaaacctgctaatatttcagatttagtgaaacataacagaagaaatgggaacgggaagaggaaacatatacatagagcaaaagatgaatttagtgagcgagaaaggtaaaagagagcaaaagggaacagtttatagagacatagatggagaaaaaccgaattggaattgttaagggcatataggagcagtattcccacatctagccacctcctcccctgttgcttcttctccttattaaaacaaaaacaaaaacattactttttggctcttatttgtaagatttaattattcatctcagttaaccctcacagcaaccctaattaagacaataatactattgtaagttatagatgaggaataaaactgaaagatagtgaccaagagatggacctgtaatcctaactctggtacaatgctaacaacggttattctaacaccrccttgcttttattcttcttcaatattatccttcttacgagtgtatatttagatctttagaaaataacacatttcaacaattactgtagaatgctgtcatttgaaactctgcttgcctcttacactta

SEQ ID NO: 323568 - DNA, 354 bp, Homo sapiens
taggtcttattatagacaggtttcaaggagaggaaacacttctttctggtgagcaaaacatttacagaagtttatcataagaattgtcgctattagactcatgatcttattacaagtatggcataagaagaaaatgtaatgctgtgaaaacataaataagagattggattaatttaggagactgaagaagtttcagaaaaacctgagcatttgattaaaatagtaaggatgagcagaatttccaaacattgaaaagacrtattaaaaatcgaagatccatttgtatctatagacatacctgtattgaccaacaaaacataaaagttggatggtacagctgcctgccaagatccc

SEQ ID NO: 323569 - DNA, 592 bp, Homo sapiens
aagcaagttagtagggttttttcctcctttatctctgacatttgatctgaaagcaagccgagaccaagaactgcacagagagcatgggtagcacattctcttaacgaaatygtatttttaaacaaaggaaatgggaaaaggaaattcttcagctacagaatgcagaagaaagctggtgggttgttttttctttattttatttggcttttgttccttcccaaaacctgctttgagttcagcccagttgttctgttacagtagcatagacacctaaaacttgaagggaaatgtatcactcatattgctggtgaaaatgcaaaatagtacaaacactctggaaagcagtacagcagtttcccataaaattaaatatgtgcttaccacagaactcaacattttcactcttgagtaaatatcctatcaaaatgaaaacatgtttacacaaaaacttgtagaggaatatttatagtatctttattcacaatggccccaaattagaattcaaatatccttcaaaataaaaagtgtggtatatccatgttaagaataccactcagcaataaaaaaggaaaagggtagtaataaatgcaac

SEQ ID NO: 323570 - DNA, 472 bp, Homo sapiens
ttcttgtgtcaaaaatcaaagaaatgctcaaggaacaatgaagttttgttaaatatatacagaaacaaacttgaaggagctcccactggccaaatcatggacaatttgagtgtcaaaataaataaagatagtaaggaattaggatgcattgaatgacataaggaatcagaagtccaatacaaatattaattaaaagtttaattaggaatgagagatttacacagcttcsaaataactgcctcaatacttgttaataacaaagagtaaaaagaataactttatagtggagaagccaaaaagtcttggccttaatcaagagatcaaaataaacatcatcattaatgaaaaaaatagaaaacctttaccacctgattaaaatgcaatgaaaagaacacagcaccacttctgtgatatatctgccaaagatgtgtgaactaaatctaattatgaagaagcgtaagacaaacccgca

SEQ ID NO: 323571 - DNA, 594 bp, Homo sapiens
ctccaggcttcccctcattcattakgcttttggcttcagccacattggtcttctttctgtttctgtaagagttaaaggctttgcaatcacttctctcagatcttcaaatgtggccactttctcatcatttatatcctaattcaaatatcacttcctcacaagggtctttcttgacctccccacctaaagcactcatttctatccaatagcactcactattgtttgcagtttttcttctccagaaatttagcagaacctgaaataacataatttgtttacaagattaatgtctatgtgtccacatggaggcaaagacttatctaccgtttatcgaaaatattctcagtgatgagaatagtagcacatagtaggtgatccataaatatgttaactaagttattctggatatgcagctgcaggcaagtcaagccttggaagtctaaaggctttttggaagacttctaagaagattccaaaaagtcaaagcaaatgtgtggttttctaaatgtatttagtgacctctgctggaatacttaccaagggaaccaaatacaagtcttcatttgttcctacttgccctctcacttcttttca

SEQ ID NO: 323572 - DNA, 604 bp, Homo sapiens
tgcttgggaagtgaccaataaaggtttgtactgctcctgaaggtggatcagtacaccttcactaggtgactgaggaatgtagagtaagatttcacagataactctctagtgataaccaattgctagtgagtgaggaaagcatttaaacggaatatayatttaggctacatttaaccttgtctattacaacaggctatgaatacagacttgtgtatgtgttgaagagggagaaagttgaaaatattagccattgccatggaatgtgcatttaaattaaaatttaaaatccatattatgacaacatagaaataaaaagttaatatttacattttttgttttaaaatttttctcagcaaaatagtataattaaacattttattttaggaagatgtatatgtgattagaaccagttggaaacctcaactctacattctgttagtaattatatgaaatgcttaagaatgtttcatattcacaattagcttggaattaatgttttaattcaggagcttctcaaaaggcaaaatactgtgctcctttcagaatgaaagtaatttttttcttcaatgctatgcttatgtaggaattataaaataaagaaaat

SEQ ID NO: 323573 - DNA, 553 bp, Homo sapiens
acagtcaaatgtgatgagtgtgagactaagggaaccaggtgtcctaagactatacagtgtaccgtggaatggggagtggtttctaacctagttacctagaggtttgggaaaaacctctctaatgatgagatgtttgagctgacacttgaaggataaatagctaaaggggagaaagcgttctatgtgagagaactatatatgccaagatgcagaagtgttctctgttcgaagatctgagcggggctcagagagggaaaaggagaggagtatgagagaagatgggagagacctgcagggactagattgtgaagctcagggggagttaatagccttaaggagttttgtctccagggtatgaacaatgaatgaggagtcactgaaattctatccacagtagtgggaagtactaagtagtcagrtatgttttggaagaagcactgttaccagttgagggagaggagaggagggaaattagactgtggtgtgacccaggatggaaagttttgcccaaatgtgggggaaaaatgtttactctctcctttgcccaggtctt

SEQ ID NO: 323574 - DNA, 553 bp, Homo sapiens
acagtcaaatgtgatgagtgtgagactaagggaaccaggtgtcctaagactatacagtgtaccgtggaatggggagtggtttctaacctagttacctagaggtttgggaaaaacctctctaatgatgagatgtttgagctgacacttgaaggataaatagctaaaggggagaaagcgttctatgtgagagaactatatatgccaagatgcagaagtgttctctgttcgaagatctgagcggggctcagagagggaaaaggagaggagtatgagagaagatgggagagacctgcagggactagattgtgaagctcagggggagttaatagccttaaggagttttgtctccagggtatgaacaatgaatgaggagtcactgaaattctatccacagtagtgggaagtactaagtagtcaggtatgttttggaagaagcactgttaccagttgagggagaggrgaggagggaaattagactgtggtgtgacccaggatggaaagttttgcccaaatgtgggggaaaaatgtttactctctcctttgcccaggtctt

SEQ ID NO: 323575 - DNA, 540 bp, Homo sapiens
gaagctttccaaatggcttttctctagagcaaaatgaaaaggatcccatccttcccgagacctaacgatgtttatctttcgtgatactgtttttgttcttcctctttttctcctaccccccaccacttttaaagatccatcaaggcccagcatggtgattcacacctgtaatctcaacacttttcaaggctraggtgggagaattgtttgagaccaagagttggataccagcctggggaacatagggagaccctgtttctacagaaatttaaaaaatttctctagctggccatggaggctcacacctgtagtcctagctacctgagaggctaaagcaggaggatcacttgaatccaggcgttctagtgaggcttcagtgagcaagattgcaccattgcactccagccggggtgacagagtgagaccctgtttcaaacaaacaagcaaaagcaaaaagatccatcaatttgttgctccattcctttacttactatcttgctgtctacagctaaagtcagactgcatgatttggaattccaa

SEQ ID NO: 323576 - DNA, 540 bp, Homo sapiens
gaagctttccaaatggcttttctctagagcaaaatgaaaaggatcccatccttcccgagacctaacgatgtttatctttcgtgatactgtttttgttcttcctctttttctcctaccccccaccacttttaaagatccatcaaggcccagcatggtgattcacacctgtaatctcaacacttttcaaggctaaggtgggagaattgtttgagaccaagagttggataccagcctggggaacatagggagaccctgtttctacagaaatttaaaaaatttctctagctggccatggaggctcacacctgtagtcctagctacctgagaggctaaagcaggaggatcamttgaatccaggcgttctagtgaggcttcagtgagcaagattgcaccattgcactccagccggggtgacagagtgagaccctgtttcaaacaaacaagcaaaagcaaaaagatccatcaatttgttgctccattcctttacttactatcttgctgtctacagctaaagtcagactgcatgatttggaattccaa

SEQ ID NO: 323577 - DNA, 556 bp, Homo sapiens
ttagtgggatcagtccttgcagtagtctacacagcaatccaagagctaaacatctttggccgcctacacactaggtgacagcttaggtgcaagaagataagacccataccattgcaaatgagatcaccttagcttagtagctgcatgccccacaggagcctctatctcatgtaaatctccgcaaaccagctttcatgctccctgcaaggaatatgcccaattatgagtcatcttataagagtcattcagagattcccaaaaactctggcgccttatcaagtatttatagatttttcagttcagatataatttctcaatcaggggtcactgtwaccataaacaaccatccctaataacatgacttatattccacctatatcaggtttccagaggaacagatctagaaagttaacctgaagtaaaatttgcccgtaaaaaaggtgataaggttttcttaaaccctcaggctacaaattctgactttcatgtttatgattctagcattcagagttgattgcttagcttattcagaggtggtcattccacttaatgataa

SEQ ID NO: 323578 - DNA, 592 bp, Homo sapiens
actgaatcctcattgagtatctaactccatggtaaaattctcaagatgtttagatctttggtgcttagccatgttaaagatctttctttgggttagattgtgagctgasgcatcctagagtggcttagggttctaatgcctgtttttgcgtttacagtctctggctgatgaacttgctcttgtggatgttttggaagataagcttaaaggagaaatgatggatctgcagcatgggagcttatttcttcagacacctaaaattgtggcagataaaggtaatttcacttaatgcccaaagtgatctaatatttttttcatggccccaaaacacatttggaatgcatcttacagcataatagatttatttgtaagtaggaaaggttgaagttttggaacagttatttcaataactgttaataagatatttataatgtagtttagcaaattcagattattgcaaaattgttatataattataaaatgtttccctctttttcctcattttataaaaagctcttatttctctactgtattctactttttatttctcaaatattttatattcacttattaatggacagctacctaaaat

SEQ ID NO: 323579 - DNA, 592 bp, Homo sapiens
actgaatcctcattgagtatctaactccatggtaaaattctcaagatgtttagatctttggtgcttagccatgttaaagatctttctttgggttagattgtgagctgaggcatcctagagtggcttagggttctaatgcctgtttttgcgtttacagtctctggctgatgaacttgctcttgtggatgttttggaagataagcttaaaggagaaatgatggatctgcagcatgggagcttatttcttcagacacctaaaattgtggcagataaaggtaatttcacttaatgcccaaagtgatctaatatttttttcatggccccaaaacacatttggaatgcatcttacagcataatagatttatttgtaagtaggaaaggttgaagttttggaacagttatttcaataactgttaataagatatttataatgtagtttagcaaattcagattattgcaaaattgttatataattataaaatgtttccctctttttcctcattttataaaaagctcttayttctctactgtattctactttttatttctcaaatattttatattcacttattaatggacagctacctaaaat

SEQ ID NO: 323580 - DNA, 594 bp, Homo sapiens
tagtgccaaagctgacatttaaactgctggcttagcatctctcaaaaggaaatgacttgttaagaagctgtaagaatgaaagcataaactcacttaaaatcatgaacctctatgaaggtttatgtgttctggaaatgactgactagctccagagtgtggggcactttaccgtctagtatgcagcctyggccctctagggcctgacattttattagggaaagctactgaaggcatacaataggaaactcaccctaggaacagccaaggtgctatcaaaaaataaatgtactatgtggaaagagaattccttcttttaacttctccaagtattgcagttatcttttatgtctagtataatagtaatcagtcttttcttcatatctataaataaagtgaatatttaataactatataaatgcatttattaataatgtccctaaagattgtatatgtgatatagttgtgagtccattataaagcttgttgaatgaatatatactaggaaatattaagtaaggttatttaagaataatctttttagtcttcagttctgttttgcatagttggattttattaataaatcgcttgtttatt

SEQ ID NO: 323581 - DNA, 518 bp, Homo sapiens
gtttaaaataaaattagagaagagggatcacaaaccaaaagctctattccaaaaacaagttctgagtatacgggtaaaattcagtctatactaaggtaatctcaacagtcaaggtcaaaaatctctctcacgatcttcagtgtgatggatgggcattgtcagcttagattgtaagtttaatttaaggataatttcttgctttgcctttggctgcttcctgatcagcaactccaaatgcacgtggaaaaaaaaattaactcargagcttaagtgtttctagaaacctgacagttaatgtaggcccatggagactgagatgactgtgatgatttcaggagagatttacccagctccagctgattatttcatgaagccatgcaaatagaatccagagtggccagatctgatttttgaagagaaatccaaaggtttatgtgaaatctcttttgaaagatgtttgactcttttgtggcaacactgcatgtaccaatctaaactcatcgcaccatattgcggcc

SEQ ID NO: 323582 - DNA, 624 bp, Homo sapiens
aatttctgtttggttcattcttgtygtatctatctcttgggtaaatttctcattcatatcctgaattgtttttctgatttctttttattgtttatctgagttctcttgtgtctcactgagcttccttaatatcaacattttggattcttttttccagaattttataaatgtcttttttttccactggcttatgttgctgaagaattattaaattcctttggaagtgtcatatttcttcacctttttatgtttattttgttcttgcattgatatctctgcatctggtgtaatgattgctgcttccagttttgtaaatttgtttttgtaggggaagacttttttctgaagatgtatcttggtgttgattgagtagggcactttgattttgatttctaggtgcatacagcagcatagtcttcatattattttttttcagctgccaacagtatcatcagtgtctgtgattttttcagtggcttagggtgcatttgttagtgaaggtggtgatgaggttgtgctggagacaagaatatcaagtgggccagtccttggccccagtggtggtggtgggcctagcattcctgtccttgggccccatggctgtgtacattggcactgatggta

SEQ ID NO: 323583 - DNA, 517 bp, Homo sapiens
tgggtggggacacagtcaagctgtatcagggtacaagctcgggttycttacatatgtatgttgcatagtggtgaagtctgagcttttagtggaccatcacctgaaaagtgaatgttgtatccaatccgtagtttttcagtcctcaccatactcctatcctcccacctttctctagtctcaagtgtctattatttcattctatatgtctatgcttactcatcgtttagctcccacttggctctcactaaatgagaacatactgtgtttgactttctgtttctgagttatttcactgaggataatgtcctccagttctaaccatgtttctagagaagacatgatttcattcttttttatggctgagtaatatatatgtatataaatatatatacaccacattttctttatccaatcgtccattggtagacatttaggttgattccatatctttgctattgggaacagtgctactttgaacatactaatgcagatatcttttttaatatgatctctttca

SEQ ID NO: 323584 - DNA, 610 bp, Homo sapiens
cctctgtcccacaaatgtctcatcrataaatccagtgtgtttgctacttcttgctcactagttccagtcagcatgtcatcaatgtaatggaccactgtgatatcttgtggaagtgaaaggtgagcaagttctctccaaataagattatggcacaaagctggagagttgatatactcctgagttcatcattttctttcatcactttgtccagcgaacttacaagcaaccaaccaacttcactatgttccttgattctccacatatagtcaaaagtattatgtatacagtagctaaattccttgcctctcacaagcgttgaatcaagagtgtcaaatgcatttattttgcataactctctaaacaattgatgccaaggattatcagtgttctccataccattagaagaagagtccttagcatatttgggtctaatcatattaagcagccaactccagaaaccccaaaaccaatgaaagaactccatccttaatattctgttcctctagaaccactcctggtaccaaaatctgtattagggttctacagagaaacagaattaataggagatatatatctatatctatatctatatctatatctatatctatat

SEQ ID NO: 323585 - DNA, 556 bp, Homo sapiens
gagatgctgtgtgggtagtggtgtctaggaggtgcatgcaaggtttaaagagtggaatgcataatttacaagggaaattgagatcccaaagagtaccggaaaacatttcttagtgaaggcagcatagagaatgttagaaatgtgatagaacaatgcctattgtactatcaggatgcaaataaatgaaatgttagaaagggcttgcatttgaagttctggtgaaggaagagttagatgagaaacacaatggaactgactggtctcaagacttcatggctttctagtgtagggatattttcaygttgcagccaagaactgactggaggtcaatgccaattggcttacattctctatttgtgtaataggttcagctcttctttatgatcttagcttatgtatcatgtggcacatattaggcagtcagtaaatattatatagtaatattacatgttattcacagtgtataaatacatgaagcaatgaatttcccaaggagaaaaactattgaaaagtggtttggggctcaggaaaatttcatcttaaaaggaaacagtgg

SEQ ID NO: 323586 - DNA, 590 bp, Homo sapiens
tatgctttatttgggtcttattctaggattttttttctttactrtagaataaaggagcatatattagaaaaatatggaggagaaaagttaaacattcctcaaaccaaaagtttagcatagtccccaactagaatccctgtgatttcacacacctagagagaagcaaagaattttattttctctgtaactatgacacagcaattctgctttgcactaaaattcttgaaagttaaaaggtcagacatgttgctatttgaaggcaaacgtcagccttttgggggaactatactggaatctactggagagtcacttattggagcagttccagttggtattcagtaatttgcatcataggtgaaattgcactaaaagaagaaaatatttttaaaaataatgtaagaaataactgcaatgtcttttttttttttttaaacagtggctgtgtggagtggtgtgaatgtggcaggtgtttctctccaggaattgaatccagaaatgggaactgacaatgatagtgaaaattggaaggaagtgcataagatggtggttgaaaggtaagtgaaagggagcttgattttagatgattaatt

SEQ ID NO: 323587 - DNA, 575 bp, Homo sapiens
ttgtgtgtgtgtctgtggctgccttatgataataaatgagcatctcaaaatattcattttaactgtgtagacataaattatgagacaaactttcatctccactcaccctatgaaagtcatgtgctttgatatctctgtgccttctcctctactttttttctctgcctggtgagtcccctttcctgttatttgcatgacaaattccagatcattaatcaagatctagctaacacrtcatctcttttataaaacgtcttaccaaatcctgcaggagaagataaatccgctttcttcacctctcaccaaaccctattcacatctctcctaaaaataatgagttcccatcatgtgtcagattctgggctaagaactaaaagaagctaatacttattatgtatttactatgtgccaagctgttaaatgcagcacctatttatgaattctttttgagatggggtcccactctgtcgctcaggctagagtgcagtggcacattcataggtcattgcatcctcaaactcctggcctcaagtgatccccccgcctcagtcttctgagtaactgggattacagac

SEQ ID NO: 323588 - DNA, 440 bp, Homo sapiens
tacaaaattgataagtgtcagggatttaaatacagtcttcatggacttagtctgctgccttctttatagatctgccaaccctggaaatatagctcagctttacttctagagatcttagccccaggaatcttgactgacagcaccaattgccttccctctggatctattgcagcagctgctcctaacttacaggactggcagaaactggtaccagtgtgaagtcatttctgcccaacaggtgcctttaatgggcaatttttgtttggggaatccctatccctattaataggaatccatattcaattgctcatagaatcagacacctatctgtctgccaatctgaaactattctggtaagtgggaggtacatataaaggtaaaacagaatggaaaggttgctgaatacaggmaaaagtggtatgtagtaacattaacactaa

SEQ ID NO: 323589 - DNA, 562 bp, Homo sapiens
tcttcctcttctccttcttcctgttttgagcatggtctctgttcttctttatccatgtcatggccatgattaacatgatctcatccagccttgacctcagctgggtcaaacacacatacatagttttcctccaagttagcagagtttggtgttctttactcctatcctggcacactctcaactgtgattgctaagcttctaagccagagatgtttgagtcagtggatctctaatatgtctctggattttttgaagggctaatctaacattcacacagggattggaaacacataaagttatggagcatgggctcatgggttagatatttcagtcaccaagtttttaaataatatcacatcagacatagttatcttattawacaattaagtagaacaaagcttgaagacagctcacatccaagcaggggcaaacttctaaaacaccaaggacttgtatgctaatccttcttagatgtctagaagaggaaatagaactctaacaaaaacggcatagtcaaggctaccactgacctttcacatgtcactcccattctgcagcaagg

SEQ ID NO: 323590 - DNA, 555 bp, Homo sapiens
aggtttttgaatgcatagatgagcgagcttacttaatctttatcataatcctatgaagattctgttttcagtctacattttatagatgagaaaactgaggtctagaaacttaaataactcactcagagttaggcacctgttacacagaaccagcatttaaaaataatgcctagaaagtataaacaacatgcacaagacacrccaattgctcatttcagagcaggacccccaaatcaggtcttgtgcttctctttcttgtgaatcactagtgtggaccatacctctccaatcacctctcctaccagctttctgtttctcttttctgcagaaacagacgtagctaaagaaatttccaaattaaaacctggcaatggtttctatattcttgtttcctaaacctataaatcaaaagtgtctaaacaggtcataaatgttcctcagcaatataatgggaaaagttctgatttatagtgccggtggaataattttaaataattacataagagttttgaaaaaatgcaattaacacctttagaagttttttgagatgaaaat

SEQ ID NO: 323591 - DNA, 543 bp, Homo sapiens
  misc_feature (1)...(543): n = A,T,C or G
ggctcccatcccaggctagagactccatctctaatttccccaagtctgtcaatgagaggcagggactgaaatcccaagttctgtctcaccggatattttccaggaatgcctctcttccaaatcatcagcgacatttaacatgaccctgagcagcaaacttctgccccagaggaaagcagaaaaccaatttatgtaaaattaaaagcgatttgcttgatccatcacttgcttccactcccgtcccactttcaactgcaacacattcagctggaattacaggctacctcttcgtcctgcactggggcatagaatctatctatgcacaaccatggagaacaaacattacagagaaaataatgactntggaagcaccaggcaccctacccaaacacaagctacatgtgtgttcacagatggaaactaacggctgtttaccctgaaggccccataagaaaaatgcagtcaccataacagtaaaatgcaayttactattcaacatgaaacaaagtgagataaagagagggctagggactgaattccaac

SEQ ID NO: 323592 - DNA, 601 bp, Homo sapiens
ctctccttcccaacaccgtacttggggaggagaggggtaaaaagtcccgtttccactgaccgtccttcatgcagttctgacagttgagttagctacattcagagccggttcagctgggagtaccccgtggcaattcctcagtctgctgcacgtccaaacccaaaccccgctcactacttaattaaccagccaagtaatgcaacagaggcttagaatccccaacctgccagagtgttccattcgctcgctcgcctrctccggtgtggggctctgtgcctctccctccccctttactgtgtgtgaactcgtcgaatttgaacagctaagctgaaaatagcctagacagatatagaaacaaactatcagaagcaaagaaacatccacatgggttacactgagatggaaggctccttgtatatttcacacgctctgaaagtgacagaaatcacaccccagatacgtcccccgaacggagtgatggcgagggcttcaccaaagtggctgcgtgaaggccagaccggcagaaaatgaatcgcaaacgaaaaagagagagagagaaacacacaagcaggacttcctccaactctcaactacaccccac

SEQ ID NO: 323593 - DNA, 555 bp, Homo sapiens
tttaacagtctcatgcagttgtcataatctgaacacaaattccagccctyattgtacagaggaggaaactgaggcttagaaaagcaaagtgatttctcccaagaattaaacatggccaggtgcagtggctcatactcataatcccagcactttgggaggccaaggcaggaagactgctttgaggtttgagaccaccctgggcaacacagtgggactccgtctccaaaaatacacacacacacacacacacacacacacacacacacacacacacacaattagccacgtgtgatggtgcatgcctatagtcccaacaacttgggagactgaggtggcaggatcacttggagaccagaagttcaaggctgcagcaagctgtgatcgcaccactgcactccagcctaggcaacagagcaagaaactgtcttaaaaaataaaaaataaaataaaaaaaaaatatatactacaggcttccaagaggaagcagatactggataattataaaaaaaaaaagccataataatataaaatgaatacctgtggtgggggggaggg

SEQ ID NO: 323594 - DNA, 582 bp, Homo sapiens
tgtagcctgtctgtgtaatttatttagtattttaacaaacagctgtcacctatgttggctgaaaaaatgcaagtctaaccattttaatgttggagcaattaaaaccatgtatgaaaaaaatattacattggattttacaacatatgtgcatcatagctagaaacacttctaagaatatatttaagaaaacctcagttggcgagtagaaaatatcagaaagcctacttagtactatatgggattgtgttatcatagctcrtacaggatgtttggtggcgttgtgtacagtggtatttgttctctccatcatgaggtaactccagccacaattttttccatttacgcatggtaatgttttgtccatttaagatgcaattaaatttcattgtattgtattccagtttagaaatacagcaaatgtttttatatatacattaaatttaaaatatatacatatacatacacataaattataaatatgtatcttatttttatatatttaaattataaaataaatggtggagtaaaattagcaagatgacagagtgggaagccctggtctcttttctctctacaaatgca

SEQ ID NO: 323595 - DNA, 582 bp, Homo sapiens
tgtagcctgtctgtgtaatttatttagtattttaacaaacagctgtcacctatgttggctgaaaaaatgcaagtctaaccattttaatgttggagcaattaaaaccatgtatgaaaaaaatattacattggattttacaacatatgtgcatcatagctagaaacacttctaagaatatatttaagaaaacctcagttggcgagtagaaaatatcagaaagcctacttagtactatatgggattgtgttatcatagctcatacaggatgtttggtggcgttgtgtacagtggtatttgttctctccatcatgagrtaactccagccacaattttttccatttacgcatggtaatgttttgtccatttaagatgcaattaaatttcattgtattgtattccagtttagaaatacagcaaatgtttttatatatacattaaatttaaaatatatacatatacatacacataaattataaatatgtatcttatttttatatatttaaattataaaataaatggtggagtaaaattagcaagatgacagagtgggaagccctggtctcttttctctctacaaatgca

SEQ ID NO: 323596 - DNA, 471 bp, Homo sapiens
ctctgattctcacaagtgcaaaatattccctaatctttccccacctttctgcattcaactgcacatcctagaacaataatattgaagatctatttaatgttttacctttgcagtgatatgtcttgtcattcccttgatgatcygaagaagcattttgaaggtttaattctacttggaatatttcctgtttggttcctgaaatggagattttattgcccttaagtttcctttgctgcctctttgggtcctgggccagactcacttctgagtaggttcctctttgtttattcatctctgcagctgtgtgatgtcagggactgtgctctatgataactgcacttaagaagctataagtggtgtatattttgacaggatccctggtataggcaaactgcatgtgttggaggctgagtagtaatgttcattttgctgttgaccaatataaaagtctggtactaatttcctaaagtt

SEQ ID NO: 323597 - DNA, 471 bp, Homo sapiens
ctctgattctcacaagtgcaaaatattccctaatctttccccacctttctgcattcaactgcacatcctagaacaataatattgaagatctatttaatgttttacctttgcagtgatatgtcttgtcattcccttgatgatccgaagaagcattttgaaggtttaattctacttggaatatttcctgtttggttcctgaaatggagmttttattgcccttaagtttcctttgctgcctctttgggtcctgggccagactcacttctgagtaggttcctctttgtttattcatctctgcagctgtgtgatgtcagggactgtgctctatgataactgcacttaagaagctataagtggtgtatattttgacaggatccctggtataggcaaactgcatgtgttggaggctgagtagtaatgttcattttgctgttgaccaatataaaagtctggtactaatttcctaaagtt

SEQ ID NO: 323598 - DNA, 602 bp, Homo sapiens
aatgactaatgcttaaatcaaactatatagagagggaaaagtaatttttaaaacatcatctagttaaaaatagggagggcagaaaaagtagatttttaaaacacaagctaaatggtacatgagcactcaggggcggtggcttgtgtcagtaatcccagcaacttgggaggccaagatgtgttgatttcttgagctcaggagttcaagaccagcctggtcaacatgatgaaaccccgtctctacaaaaaaatacgaaaattagccagcatgatggtattggcctgtagccagctactctggttgctgaggtgggaggatcgcttgagccttggaggtgaggtcgaggctgcagtgagccgagatgaaatttactgaaattggggaaatatacttcataatgataaattaattttccaaaccattagtaatatattttttatcattgcatatacctaatgatacaagttcaacatatarttgaataaagtgaacaagtaaacaatcataaatgggatttttaaagactcttctcttgatgcttaatacaagacaggccagtgagcctatagaaagatttaaactagacaagtaaccatcactca

SEQ ID NO: 323599 - DNA, 585 bp, Homo sapiens
ctcttcctccccttgccccccaccccccgacaggccttggtctgtgatgttcacctccctgtgtccatgtgttctcattgttcaactcccacttattagtaagaacatgyggtgtttggttttctgttcctgtgttagtttgctgagaatgatggtttccagcttcatccatgtcgctgcaaaggacatgaactcattctttttatggctgcatagtattccatggtgtatatgtgccatattttctttatccagtctatcactgatgggcatttgggttggttccaagtctttgctatggtaaatagtgctgcaataaacatacgtgtgcatgtgaggacaagtaattattttctgtttttctcaatacattaattattagttcctccgttagttgtgaagtcctaattagggaaaaggagttaggctggcgggagcagggaaaagcagaaagagaaagcagataagctatgagtctgcctttcttcatggtccaggatatgggccatgtgctaaactattaccagacacctgcaagttacctcaccgcaaccttggcattatcagtactggacaaagccctct

SEQ ID NO: 323600 - DNA, 585 bp, Homo sapiens
ctcttcctccccttgccccccaccccccgacaggccttggtctgtgatgttcacctccctgtgtccatgtgttctcattgttcaactcccacttattagtaagaacatgtggtgtttggttttctgttcctgtgttagtttgctgagaatgatggtttccagcttcatccatgtcgctgcaaaggacatgaactcattctttttatggctgcatagtattccatggtgtatatgtgccatattttctttatccagtctatcactgatgggcatttgggttggttccaagtctttgctatggtaaatagtgctgcaataaacatacgtgtgcatgtgaggacaagtaattattttctgtttttctcaatacattaattattagttcctccgttagttgtgaagtcctaattagggaaaaggagttaggctggcgggagcagggaaaagcagaaagagaaagcagataagctatgagtctgcctttcttcatggtccaggatatgggccatgkgctaaactattaccagacacctgcaagttacctcaccgcaaccttggcattatcagtactggacaaagccctct

SEQ ID NO: 323601 - DNA, 559 bp, Homo sapiens
gatggaggccaaaaggacaggaaagactraaaccttctagtatgggcttatagtagggaagtgaaaacatattagaaactggagaaagtaaaaatctttctatttagtaccagaaagtttagcaacacttttgtctgtagcattgtggaaagtagaaaatgtacttaatgatttaagagaatgctctaaacttatttccaactagagtgttgaatatcttgtctgatttcttcctactacttatattacaatgctatagaacacacataagctaatggaagggctgttgagcaaaagaagacagaacttgatagttttgagattcctggactctcaaatgttagcatgtcaaaaatgctaaaattgagaaatagattctgagcaaagatccaatctagagtgctctcaggaaagcatgattctaaacaagaaggtgtgggtgtgactgaaatttcctgtaaatatcatagaaagaacacaagtagtgcctcaattcagtcagatgaagatctataaaggtcaaataatagggcttctaggaagccccagggtattgtcc

SEQ ID NO: 323602 - DNA, 562 bp, Homo sapiens
caggagttttgagactagcctggccaatgtggtgaaaccctgtctctactaaaaatacaaaaaattagccaggcatggtggcatgggcctgtagtcccagctactcaggaggctgaggcaggagaattgcttgaacctgggaggcagaggttgcagtgagccgagatcatgccattgcactccagactgggctatagagtgagactccttctcaaaaaaacgaacaaaaaaatgggtaggaatgattatctagaggaaattttgaggtactaaacttctaggaggatgcactttgacaaactggtaactcctcttcatacttgcttgtttttattttgctttttgtttttcttaagatggatcttcctgaatgagtccaccatkgatttacatgtgcaaattcatgttaaaatacagtatttgggaaaagacaagagtaaagaacacatatttgggtgcgttgtatagagaaatcttcaagtccatattcatcaagaaagaaagagtagcaatgactttcacaagctttgatttggaaacagcacatccaccatctctgaat

SEQ ID NO: 323603 - DNA, 470 bp, Homo sapiens
acattcaacaaaagtgcatataacttacctgagtttagcttgcagaaagaaaactaaattattgccagataaaataaacaactggaaacacttgatcttagctaaaaggccaagaagcaataaacgactataaacagaaaactgggtgtgttgttatctaatatcagtaamgtaaaatattggtattaaatatctcaatgtaggtgaattaataggttcattatattgttatgacattttgaagtaattggcgattattttacaaccaagagaaatgtataaaattaattttgcctggctttatgtgaattgtcatttctattcttttcttaaaggcatgcacaggggaaaagtttctgcattttacttttctattcaaaatattttatctcaccacgggaaagagaacaaaaaacaaatgcccagttttattttattcaggaatcctttgtgcattgaagactttagat

SEQ ID NO: 323604 - DNA, 557 bp, Homo sapiens
ttgttattggtgtatagaaacactactgatttttgtatgcagatttttgatcctgaaactttactgaatttgtttatttgttcaaaggcatgttgtttaattttcatgtatctgtgcagtttccaaagttcctcgttatcaatttctagttttattccattgttgtcagaaaatttacttgatataatattgacttttggaaatgttttgagacttatcacctagcatatggtctgtcctgatgaatgttccatgtgctgataagaagaatgtgtattttgcagcagttggatgaaatgttctgtacatttagttaggttcrttaggtctatattatagttttactctgatgtttcttttatgattttctgcctgaatgatctgtccattgcttaaaatgtgttgttgaactcccctgcccttattgtattcatctatttctcccttcagatctattaatatttacttaatatatctgagtgctgtaatattgggtgcatatgtatacttataaatactatattatattgctgaagtgacccatttgtcattatata

SEQ ID NO: 323605 - DNA, 557 bp, Homo sapiens
ttgttattggtgtatagaaacactactgatttttgtatgcagatttttgatcctgaaactttactgaatttgtttatttgttcaaaggcatgttgtttaattttcatgtatctgtgcagtttccaaagttcctcgttatcaatttctagttttattccattgttgtcagaaaatttacttgatataatattgacttttggaaatgttttgagacttatcacctagcatatggtctgtcctgatgaatgttccatgtgctgataagaagaatgtgtattttgcagcagttggatgaaatgttctgtacatttagttaggttcattaggtctatattatagttttactctgatgtttcttttatgattttctgcctgaatgatctgtccattgcttaaaatgtgttgttgaaytcccctgcccttattgtattcatctatttctcccttcagatctattaatatttacttaatatatctgagtgctgtaatattgggtgcatatgtatacttataaatactatattatattgctgaagtgacccatttgtcattatata

SEQ ID NO: 323606 - DNA, 422 bp, Homo sapiens
ctttatatttattttgctttttaaattttgcttcctttaaaattctcactttgtctggagctttgaacatttaaattttatatgtcttgtggtratctcatttgggttgaatctgcttgctaatctttgaccttccggtatttggttattcatatctttctctgggtttggaaagttttctgtttgtccacagcctcccagaccagtgctgtgccagggcttgcccaagggccatggttgctatggcctgcaaccactgaaattttcttgggaccaaggccactttagtcagctggtgataaagtgggctgagactaaggttcttcctgcctaagcagtggattcacctctggcccacggtgggtcaaaatgctccccatatgagcactggtttggaatcaagggccatggggtctctgtct

SEQ ID NO: 323607 - DNA, 469 bp, Homo sapiens
ttgcagaaattgcattttttacaaattgaatgtttatggcaactttatgtcaagtaagtctatcaacaccattttttccaaaagcatgtgttcaattcatgtctctccgtcacattttgcaactgtcaaattaatttaaaatattttcattaatattatatatcttatggcaatctgtgatcagtgcctgttgatgtcaattttgtaattgttttggggcaccaggaaccatgcccatataagatggtgaaccgattagtaaatgtcgtgtgtgttctgctccactgaccagctgttcyccatctcgttctccctcttctcaagcctaactattacctgagatacaacaatgccaaaatttggctagttaataaccctacaatggcctcatgtgttcaagtgaaaggaagactctcatgtctctcactttaaatcaaaagctaggaggacatgtccaaaactgagatga

SEQ ID NO: 323608 - DNA, 469 bp, Homo sapiens
ttgcagaaattgcattttttacaaattgaatgtttatggcaactttatgtcaagtaagtctatcaacaccattttttccaaaagcatgtgttcaattcatgtctctccgtcacattttgcaactgtcaaattaatttaaaatattttcattaatattatatatcttatggcaatctgtgatcagtgcctgttgatgtcaattttgtaattgttttggggcaccaggaaccatgcccatataagatggtgaaccgattagtaaatgtcgtgtgtgttctgctccactgaccagctgttccccatctcgttctccctcttctcaagcctaactattacctgagatacaacaatgccaaaayttggctagttaataaccctacaatggcctcatgtgttcaagtgaaaggaagactctcatgtctctcactttaaatcaaaagctaggaggacatgtccaaaactgagatga

SEQ ID NO: 323609 - DNA, 547 bp, Homo sapiens
gagaacattaaaaaacccctcttccagctgttttgtaatatacagtgccttactgttaaccatagttaccctattgtgcaatagaaaactagaatttatttctcctatgtaattgtaactttgtacccattgaccaatctgtctctgtcatcctcttacctccctcctcctcatctctggtaactgctgttctactctctgcttctatgacaccaacgttttctttctgaagattctacatatgagtgagatcatgtggtatttgtctttctgtgtctggcttatttcacttaacatgatttcctccagtttcatccatgtgattgcaaatgacaagattttattatttttatggctgaataatattccattgtgtgtgtgtgtgtatatatatatatakagagagagagagagagaaagagagagagagatagtatgtgtatagacacacacacacacacacacactactttttttctgtccatttatctatttttggatgtgtacgaggattcaatatcatatatatccagtagtgggattgctg

SEQ ID NO: 323610 - DNA, 497 bp, Homo sapiens
accttggacttttcagcttccaaactataagaaatacatttctgatgtgtaagtcatgcagtctatggtattttattatagcatcccaggccgactgagacacaaaccttgagttttcagaaacttagygcacatctcgtgtctttgcctgcctctaatccactccctcctatcctaacaataacctttccattttccttggggacacctgttacccaaccctcaaaccatgtgatttactccattcttcaactgctgggtggtcatatgatccagtcctggcctatcagcatgttttatttagggatgagaatataaaccaagttagcctaaaggggctcagttatgggaccttaactgatttttaaatgattggggacaacaagctccttgtcagtccccagaatgtgaaggtgaggctagagatgctgtagcttctatctggagacaacagccaaaaagagaagtcagcacacagttgagaagcaaggggagca

SEQ ID NO: 323611 - DNA, 618 bp, Homo sapiens
attagaagcatcttctgcataataggcataatgccaactgctttgaaaatttgttgtaataattagagaaagtaatatattatcacactttggaaataatatattattgacaaacattacatcctttaccccttttccttccccaaatggaacccaatttaattaataagtatattgagtcttcactagactaataacttctggaatttgggatatataaaaaaaactatctctactgtgaaatcagaaataaaggaatgcagatgctttcctcttgggagctcagactttgtaaaatcagaagtaggtttaggcctctgcagggcagacaaagccagaagcagccattccatttccttgggtcaaggggaggcagccaggmccactgcactgtctgaggctggggcctccctttttccccctgcatcccctgggagcctctggaaccagtgcctctattgttacgcatctcagttttttcatctgcatgattgagaactcaatcatgttgacctcataggcaggaatactaaataattttcataaagatctatgaaatcaactaagttatgtctaaaagccacactatttgttttacagatctgcagtgcaattgtg

SEQ ID NO: 323612 - DNA, 618 bp, Homo sapiens
attagaagcatcttctgcataataggcataatgccaactgctttgaaaatttgttgtaataattagagaaagtaatatattatcacactttggaaataatatattattgacaaacattacatcctttaccccttttccttccccaaatggaacccaatttaattaataagtatattgagtcttcactagactaataacttctggaatttgggatatataaaaaaaactatctctactgtgaaatcagaaataaaggaatgcagatgctttcctcttgggagctcagactttgtaaaatcagaagtaggtttaggcctctgcagggcagacaaagccagaagcagccattccatttccttgggtcaaggggaggcagccaggaccactgcactgtctgaggcyggggcctccctttttccccctgcatcccctgggagcctctggaaccagtgcctctattgttacgcatctcagttttttcatctgcatgattgagaactcaatcatgttgacctcataggcaggaatactaaataattttcataaagatctatgaaatcaactaagttatgtctaaaagccacactatttgttttacagatctgcagtgcaattgtg

SEQ ID NO: 323613 - DNA, 612 bp, Homo sapiens
aagatcaacgggaggctagattcaagacagggatgagggtcctggaacatttctttgaatatcagtagacatttacatgtcacagtaatgaattgtgggttacatggtatgtgatgagtcaggctgggttaaggtacagaaatacttctccatgaaaaaaggatttataaagcaaacaacagtgtaattaaatatcagacaagtgtttaatttacttatgaaaataaattgaaataaggatttaaaaagtctcttaacgtatttgcaaagcaagagttactatcctgatcacaggggaagggaatttggggatgacctagtccatttatctcacatgttgaagaaactgaagctcagaggagtcagctggaatcaagaccccaagtctcaccaaatctaaatcatatcttataatgctttcttctagcaacattactcttcttccttagctcctttagtctgcatttaaataataataataatgtatttcctttctaaacctgtagaattcagaatttttactaatttarcttttgagagactggattagtattaacgaaaactacaatatctccacactctaatgggtgtggccaagaagacaagagacta

SEQ ID NO: 323614 - DNA, 588 bp, Homo sapiens
aaggcaagtcaacattccatagaaaaatgtgatgtgaatcagaaaatgatgtgcaagattaaaaacttgtggcatatgattgtgttgtgaggctatgggaaagaagggtctttattgaagagctactatggcagctttagttccaattttcacaggaatgggaagagtaaaaatgggtgtcagggaggctgggtgccctgttcagtgatgaagcatcatatgtgagagtcttgtatgggccacctgcccagggctgtctgggaggcaaacaggggaacctggaggctgagagaggagaaggggtggttgtaggaaggagaaggttcaaaatccccaaatggttgtgagcaacacacattctgtctccattgcctgtcttcctcacttcagtttctcatgggctstcttcctttcctcccattgtcagccactctcctctgccaccagcttaaactgtctgaagctcaacttcaatcatactaataatagctaatacttacaaaacccttcttctgtatactgttttaagctctttataaatgtataaatgaatttaatctgcacaatcctgagaggtaggtaccatta

SEQ ID NO: 323615 - DNA, 460 bp, Homo sapiens
tcattgcttgttattgatttattcaggtcttggatttcttcatgtctcaatctttgtaagttgcatgtgtctaggaatttatccagtacttctaggattcctgacttattggcatatagttgttcataatagtctttaatgatcctttgaattttggcaatatcagttaaatgtttcctttttcatctctgacttttttttaatttgggtcttctctcttagtccagctaaaggttggtcaattttgtttatctttaaaaaaaaacagcttttcattttcttgatcatttctattttttggcttcaatttcatttatttctgctctratctttattatttcttttctcctaattttgggtttggtttgctcttgcttttctagtttttaaagacgaattgttaggttgtttattggacgtttttgtactttactgatgtaggtacttactgctatcaaca

SEQ ID NO: 323616 - DNA, 628 bp, Homo sapiens
ccttcttaattgcttcattgacccactggtcattcagaaacatatagtttaatttccatgtgtttgtatagtttccaatgttcttcttattattgatttctacttattccattgaggtcagagaagatacttaataaaaytctatgtttaaaaaagttttaaagacttgttttgtggcttaacatgtggcctatccttgagaatgatccatatgctgaggagaagaatgtgtatcctgcagccattggatgaaatgttctgtaaatatatattaggtccatttgttatataaagcagattaagtctgacatttctttgttaattttctgtcttgatgatctgttcagtgctgaaaatggagtgttggtaactccagctattattctactgggttctatcttctctttagtgctaatatttgctttatatgtctgggtgctccagtgttgggtgcatatttataatatttactattgttataagcttttgctcaattgatccttttatcgttgtatgctgactttgtctccttttatagtttttgtcttgaaatctttttttctaatgtaagtatagctactcttgctattttgcagtttccatttgcatggaatatcttttccatttc

SEQ ID NO: 323617 - DNA, 628 bp, Homo sapiens
ccttcttaattgcttcattgacccactggtcattcagaaacatatagtttaatttccatgtgtttgtatagtttccaatgttcttcttattattgatttctacttattccattgaggtcagagaagatacttaataaaactctatgtttaaaaaagttttaaagacttgttttgtggcttaacatgtggcctatccttgagaatgatccatatgctgaggagaagaatgtgtatcctgcagccattggatgaaatgttctgtaaatatatattaggtccatttgttatataaagcagattaagtctgacatttctttgttaattttctgtcttgatgatctgttcagtgctgaaaatggagtgttggtaactccagctattattctactgggktctatcttctctttagtgctaatatttgctttatatgtctgggtgctccagtgttgggtgcatatttataatatttactattgttataagcttttgctcaattgatccttttatcgttgtatgctgactttgtctccttttatagtttttgtcttgaaatctttttttctaatgtaagtatagctactcttgctattttgcagtttccatttgcatggaatatcttttccatttc

SEQ ID NO: 323618 - DNA, 635 bp, Homo sapiens
tgcattgctttccactgtgtcagggtagcagtgagtaccaatgcaaagtcccacaattactttactctgcttctcctgagcacatagattttcttcctatgccatgtgacactgctgggggatggtggaagggtgttgtaggcaactcaagactgtcctatcctattcagtgcatgtttctttgatataatgttaaaaccaggtactgtgattgctcacttgcgatatttggttcttatgaaggtgcttttttgtgtggatagttgttcaatttgatgtttctgcgggggagataatcactgaaaggttctatatggccatcttgctctgcttctgatctctgagacagatactcttttaaagcacctatagracatttgtgaaaattgactatatgttgggttataaagcaagttccaataaatttcagaggatttaaatcatatagaatctgtgttctgaccacagtgaaattaagattaaaattaataacaaaaatgtaactagaaaaagtcatgattgtaccaagaaagttcactttcactacgtggaactaagaaatagatttgttgataatccatgagtaaaatgaagtcataatgaaaattatatgccttcattaaaaaataaggttc

SEQ ID NO: 323619 - DNA, 562 bp, Homo sapiens
aagaagaatcaataccatttttccactaactcttccaaagaatagaaaaggagtggggctacatttcaactcattctattaggccagtatactcttacataaaaccagacaaagacattacaagaaaaaaatcacgtcaatatatttttgaatatgaatgcaaaattcctcaataaaataccaayaacttgaatccagacatatttaaaaagtagtatacaacataaccaggcagaatttattccaggaatgcaaggctgatttaaaatctgaaaatcaattaattcaatacaccatattaatacaataaaaaccaaaaagcacaagataatcaaattgatgcagaataaacattggcaaaattcaacatgcttttatggttaaaaaaacactcaaaaaactaggaatatgagtgtatttcctcaaccaggtaaagggactctatgaaaaacccatagctaacattatatttaaagatgaaaggctgaatgttttcctcctatgatcaggaaggaggcaatgatgtccattctcactacttatgttcatcattgtgctggag

SEQ ID NO: 323620 - DNA, 595 bp, Homo sapiens
tgtacttagaatttgtagaaggtcttttgaagaaagatgggcacaaagaaatccagactgtaaagactggaataaatactgaatccttcaatacagagacattaccatacacccacaagcactaagaacatttggggaaatatcacctcaccaaatggaccaaataagtcaccagagaccaaccctaaagtgatggagatgtatgacctctcaggcaaaaaactcagaatagctgttttaaaggagtttaataaacttcaagagaacactttgaaataattcagaaatgtattagagaaatttaacagagacattgagataataaaaattcaaacagaaatcctgcaactaaaaaatttaatgactaaaataaaaaatgcaacaaagcatcaacagcagaattgctcaagcagaagaaagaatcaatgcactcaaagacaaactatagtmttgtaaaaaatacaaagtcagaggagaaaaaagaataaaaggatggaagaaagtttatgggatctataggacaacatcaaaagagagaatacttgggtcgttgtagttaaaaggggaagtgggaaggacaaagggttagagagct

SEQ ID NO: 323621 - DNA, 587 bp, Homo sapiens
ttgttttcctcacaatacatcccctttcctccactcatatttctgaatcctgtagtcatcattcctttcctttttatatataattttaatgggtatatacatatcttataaagcatatttttaattattttttacatccccaacaattttattagtgtgtataatcctttgggactaaatttttcactttctactaaatatgcaagatccacctttatcattttgggtcactgtagttcatttgtttggaccactgtataataatccattttgtaaatataccattgtttattcatccactcttttattgatgaaatatgagttgcttctaagattttgctactgagarctatgaacagtgtttctataaaattattctgttatacatctgccaaagttgctcgtacatgtttaagaatagaatcagtgggttatagggaatatgaatgttcaactttgggggtaatgccaaaatgatttgcaccaaattaaaatttgattgcaccaaattacactcacacaggcaatgtgtaaagaaatcctgtggctccacattctctcttacatttggtaatgtcaaacttagt

SEQ ID NO: 323622 - DNA, 570 bp, Homo sapiens
gccagcctggagtttattgcttcaacctgtgaattctaggggacacaaaaaattcagtctataatacatggttatactggagttagccattggtataaagctggtgctttgttctcaaaccttagccttctaagcwctcttgatgtttgttgctgcctgatttgatttataatattagttctgattagttcatcatcagttcctaagtattctgactaaattctgaattctctaaattctgtgatgggcaaagtttgggttataattgcacagactacaatgccagcttcctgcaggcatggattaccaagtattaggagagtagcatgtaattcaggtaattatgttctttacagagtataagcatactctttaaaatataacacgtattttttcttaatcataaatgtaatggatgtttattatagaaaatttatggaagcaaaatgaagaaaatcaaaatcatccaaatgtaatcatccagggtttagttacttttaatattttgatgtagatcatccccatccattatatatacatatgtaggtattgctacacagtgttttttta

SEQ ID NO: 323623 - DNA, 570 bp, Homo sapiens
gccagcctggagtttattgcttcaacctgtgaattctaggggacacaaaaaattcagtctataatacatggttatactggagttagccattggtataaagctggtgctttgttctcaaaccttagccttctaagcactcttgatgtttgttgctgcctgatttgatttataatattagttctgattagttcatcatcagttcctaagtattctgactaaattctgaattctctaaattctgtgatgggcaaagtttgggttataattgcacagactacaatgccagcttcctgcaggcatggattaccaagtattaggagagtagcatgtaattcaggtaattatgttctttacagagtataagcatactctttaaaatataacacgtattttttcttaatcataaatgtaatggatgtttaytatagaaaatttatggaagcaaaatgaagaaaatcaaaatcatccaaatgtaatcatccagggtttagttacttttaatattttgatgtagatcatccccatccattatatatacatatgtaggtattgctacacagtgttttttta

SEQ ID NO: 323624 - DNA, 570 bp, Homo sapiens
gccagcctggagtttattgcttcaacctgtgaattctaggggacacaaaaaattcagtctataatacatggttatactggagttagccattggtataaagctggtgctttgttctcaaaccttagccttctaagcactcttgatgtttgttgctgcctgatttgatttataatattagttctgattagttcatcatcagttcctaagtattctgactaaattctgaattctctaaattctgtgatgggcaaagtttgggttataattgcacagactacaatgccagcttcctgcaggcatggattaccaagtattaggagagtagcatgtaattcaggtaattatgttctttacagagtataagcatactctttaaaatataacacgtattttttcttaatcataaatgtaatggatgtttattatagaaaatttatggaagcaaaatgaagaaaatyaaaatcatccaaatgtaatcatccagggtttagttacttttaatattttgatgtagatcatccccatccattatatatacatatgtaggtattgctacacagtgttttttta

SEQ ID NO: 323625 - DNA, 614 bp, Homo sapiens
gatttttttgaataaggtctaaaagacaaaggcaacaaaactaaaaatagacaaatagaattatgtcaaactaaacagcttttgtaccacaaaggaagccatcaacagaatgcaaagatagcctacagaatgggagaaaatatttgtgaactatgcatctgagaaggggctaatatccggaatatataaggaactcaaacaactcaatagcgacaaacaaacaaacaaacaagcaaacaaaaccccccaaataatctgattttaaaatgaacaaaaaatctgaatagacacttctcaaaagaagaccaacaggtatatgtaaaaatgctcaacatcactagtcatcgtggaagtgcaaatcaaaaccacaatgagatgttatctttctccagttggaatggctgttatcaaaaagacaaaaaawaataataaatgctggcaaggatggggaactcttatacactgtttctaggaatgtaaattaatccagccattatggacaacaggatggaagatcctaaaaaaataaaaaatagaactaccataagatccagcatcccactacttgatacatatctaaaggaaatgaaatcagtatgtcaaaaagttttctg

SEQ ID NO: 323626 - DNA, 599 bp, Homo sapiens
gagtgtgtgtgtgtgtgccctctgatgtaaaggcattctggccatgattggtttctgcctcaggttctgtgctgctagaatagactccagcctcttgagaccctgacttagaataagtggattgaaaagggatgaatgaatgaatacaaatgatcatgaaatamaaatttataaaatatgtgataatcatacaattgcatgacaataaaaagtatgggacaaaatctttcagagggcctaccatattggttagtatttggttttgaactgtgtggttgtaggaggtactccttacaatttttgcttgcaaacatttattccttgatttaatccactaccattacaaccattcatggatccaccaaaaattgggtaaataattatcatatttgtttttattaatatttcttaaatgtatgcatagctcacatttatttcaatgtttaacattagaagtgttttaggcctttacttagaaatttggtgatatgtttgtgaccagaaatatgctgtaggaacttaactcttgtttatatcaattagcctatgataaaattggtttcattatatgtcatttctcttaaagctgcagttgccaa

SEQ ID NO: 323627 - DNA, 599 bp, Homo sapiens
gagtgtgtgtgtgtgtgccctctgatgtaaaggcattctggccatgattggtttctgcctcaggttctgtgctgctagaatagactccagcctcttgagaccctgacttagaataagtggattgaaaagggatgaatgaatgaatacaaatgatcatgaaataaaaatttataaaatatgtgataatcatacaattgcatgacaataaaaagtatgggacaaaatctttcagagggccyaccatattggttagtatttggttttgaactgtgtggttgtaggaggtactccttacaatttttgcttgcaaacatttattccttgatttaatccactaccattacaaccattcatggatccaccaaaaattgggtaaataattatcatatttgtttttattaatatttcttaaatgtatgcatagctcacatttatttcaatgtttaacattagaagtgttttaggcctttacttagaaatttggtgatatgtttgtgaccagaaatatgctgtaggaacttaactcttgtttatatcaattagcctatgataaaattggtttcattatatgtcatttctcttaaagctgcagttgccaa

SEQ ID NO: 323628 - DNA, 615 bp, Homo sapiens
atatgctgtaggaacttaactcttgtttatatcaattagcctatgataaaattggtttcattatatgtcatttctcttaaagctgcagttgccaacaatgttagtgaggacttactgtacaagagtatttgccatcctaaatatatattattttaaaaatctgaaaatatccttgatgttgaagagtgagaaactatttcagtgaaaaattaaacagattatccttacattgaaatatgttgtgttaattaaaatcatattttaaataatatttaatgacatagagaaatgcyaatggcataatgtgaactgaaaaactaggatataatatttaatacaagtgtaacattaggtgacagtgtgtgcctgttacttcctcccaactttccagtgaaaaactattttgtctctaagaaatatgatagaactctcaaaagtacatagagttagctttgcaaactgtataatatacagtaagttacagttttacttattctgtaaatgcaaaagcagaaaatattttattaagatataatataaaaatcaactgttgccaagtccaaattgtcacaaccctttgtattaatgtgatggaaaaaaaagactagaaggaaa

SEQ ID NO: 323629 - DNA, 523 bp, Homo sapiens
aaaacacagtttttcaagaatatatctaaggtttatgaagagccttggaaaatgagggcagcaaaataatgtttttgggaattagcaggttgcctgctacctttgtgttctgtttagggtgataayagtaataagaatgaacatttattttacaatcactatgtgccaggtattgtgctaatcattttacatgcactactttttttaatgcccatagcaacccaaaaaacactttatagaaaagggaactgagttacagagtttaaagaacaaaggtcacacaggtggcaagtggatgaagctagtttgagtgcattttcctcgccagttacgtctgctatgagcagcccaagttggcctcactgagcaagaacaactctctctgtggtggagtattaaaggtataaatgatggcttcccagagaggatggtagataagattgcataagaaagttagaaagaaacagagtctgtaaggatgaagggaaatcaatatcaatgatgatgacacatgacagtggag

SEQ ID NO: 323630 - DNA, 528 bp, Homo sapiens
atatctcgtttacctctctatctccaacacttagcacaatacctgaaccatagaggagctcggaacatatttgttgaataaaagaatggagcagagaaataatactcttgatagttcatgttagaaagaaatcaccatgataatgttctatgtctcaacagggattttccttttacaggcrtgtatatttgctaaaactcattgaatagtacacttaaaattcatgcaatccactctatgtgaattttgcctagggaaaaaatactataatcgaaccctgaactctaattaatgacaagcaggatgatatgcttaagagtaaagtatactgaggtctgcaacttaccttaaaatgtactaaaaaataagatggcttgatgaaaggatagaaggatagataaatggatagcaaatatagcaaactgttagttgtagaatctgcatggtgggtgtatgggtgtacactccacaattcttgcaacttgtctatatgtttgaaaaagttcataataaaatgttggaaataag

SEQ ID NO: 323631 - DNA, 512 bp, Homo sapiens
cataaatttattatacatgcaattctatataacagattagaacagctagaaagtgtttaactgcaagtaasagaaaaactaacttacagtgtatccttataagtccatccatctctggacatttttaagcaaatcctagacataaaacttcagtgagtatactgaaatgcttggccgaaggtaatggccttgctatcacaggtcttggaggaaagattctaatcaataggcaaagtcagcaatttgttgtgtaggaacagtagttctgagtatggaggcctgtataagagttctgactctgccatttaccagctgcgtgatcttgggctaacttgccagctcagcctctctgagcctctatttagtcatagatagaagggatataataacactctaatcacaaatttgttgcagagttcagatagacttttgttatgcttcataattatgaaaagtttagctagtgatctattttagttaacaacttggttaaaaatgagtactatagttat

SEQ ID NO: 323632 - DNA, 547 bp, Homo sapiens
atttgatgacagacattatgtattttctcttgttcagtgctagacatattcttaaattttgtttgggattcagataagttaaacagtttgatcttttgaggtcttgtttttaagaattgttaggtgggaccagagcaatttagcttatttgtttgagtgtattcctggaccttttagtcagttcagttgagctatatgtttatctctttgccactacagcayggtcttgacttctctagctttgtatcaagtcttaaaattggctagtatgagtcccttcagattcattaaaaaaaaattttaaatttattctgaaatatttgcctttttaaatatattttagagtcagcttgtttatatctacaaagatgactactgggattttgatcataattgtgttaaatctatagatcattttgggggtggattaccatcttttttgtttgaatcttccaatccattaatgtggtgtgcctcttcacttatttggtttttttgattcctttattaacacttcactctcctctcctctgccaccttttattat

SEQ ID NO: 323633 - DNA, 628 bp, Homo sapiens
cccagtgagtttttaatttcagttataatatttttaaattctaaaattttcatttggcttttccttgtatcttgtttccttgctgagactttttatttttccatttgttccaaggaaaactatgattagtttttggggattcttttttaaaaaatataaagcagctgctctaaaggttttgtcagctatttccaacatcygtgtcatcttaatgtcggtgtctttgattgtctttgagattttccttgtttatcatatgctgagtaattttgcattgtatcctagatgttttgaatataagactctgtgagtcttcttaaatcctgtggagattgccaatattttgttcttgcaggcaatgaacctggataggttcaggctgttagttccaatctaccttctgtaggttgtgctttcaatatttgttaaaatgtcaaagcctttagtgaatttgacttatgtgtgtgccacccagaggctaatctgaagtctaggtgatggtctatctgtccagttcccaaattctttgttatgctgtttagaattagatccaagcatgcttagaggtgagcaactatatgggtttgctttcccaagctcctctgtcttggccatcttcctggtactt

SEQ ID NO: 323634 - DNA, 476 bp, Homo sapiens
ataataaatgtctgaaaaatgcctaacatcatcagtattcagtgataagcaaataaaaacaagatacaattttctgcctacttaattgggaaatacttttaaagtggtttaaatggaaatatccagtattggtgagaagcagatgggcacccttacacacttctgtgggaggctaaattgattccatatctctgaagatacatttagaaatagtatatgccaaaaactttaaaatggttttaaacttttgatgaggtaataatacctttgggaatttatctttaggaaataattaaagatgcaaataaggatctatgtacaaagaaattctttgtggtgtaatttacaaacaagcacaaaaaataaactacctatatsttctacagagaagaaatggaataggcatatagtgggtgggatggtagggagctgtcagaagttatgctgtcagagaatgtttaaccacacaggaaaat

SEQ ID NO: 323635 - DNA, 525 bp, Homo sapiens
tgtttgaatttcaaggttaaaaaagtcaggattcaaggatagctctgaaagatcaactggtaaatgtgttaacagtgaaagaaaaagaaagccaaatgaatgctaaaaccttttttgaagcagaacagaaacaaagcttttgatcctttatcacggaacaacaaaaacattctcatgatctacatgtgttctgagtgttcctatatccgtctatgtgcacacgggtgtccgtatgcccatgctcagacacacatggtcagattcacacacacttccatttctctaaaagctgtatttcctccccctgaagatttttcctttttatttmtttcttttcttttttcttcttctctctatttttttgatatttcaaagctggcagttcaggaaatggctggaactgccacatctctgttcttgttaaagaaatcaatgctaatcctattactggcagttatcacctatcccagaactcacagctaaaagaaaaaaacacactgagatgtcagagtaagaaaaaaggac

SEQ ID NO: 323636 - DNA, 534 bp, Homo sapiens
ttggagaaatggttagagttttggaggcacttgtgatgaagtaatttgtgaaatgaggagtgctgctggctgctgataagcacaactgggtatccatcctgtctcaaaggccaaggctaggaagatacatcttcagcccacctctctcctctctacttacaaccacatttgctgcaagcagtcccatgtaccaggcctgrgtgagcctcaggttagcctcttggcagcctaatcacagctagactggatccagacagtggcatacagggaggtatctggcctagagttgaccttggtattggcatgttttctagattgggcaagataaattggttccttgaggagcttgttgccttgaggggagctgagaagcagctgtggtaacaagagtagaaaatcatcctcacagacttctctctaaatgggcccacactgtccccactgagagtgagtgagaagacttcctcaaggggtgctttggtgacccaagtgaaggaccctgagtcatgttttgggccatggcattgaagaagc

SEQ ID NO: 323637 - DNA, 505 bp, Homo sapiens
gggtgagcctcaggttagcctcttggcagcctaatcacagctagactggatccagacagtggcatacagggaggtatctggcctagagttgaccttggtattggcatgttttctagattgggcaagataaattggttccttgaggagcttgttgccttgaggggagctgagaagcagctgtggtaacaagagtagaaaatcatcctcacagacttctctctaaatgggcccacactgtccccactgagagtgagtgagaagacttcctcaaggggtgctttggtgacccaagtgaaggaccctgagtcatgttttgggccatggcattgaagaagcagtacttctargcaagagtagtgactgcagtggtggttagtgccatctctaatgggaaggccaatctcagcagacatatgggaagggctgtgaggtgcagccacattacccctgagatctttcctccattatcaaccctggacaaatgaaagttgggcttgttaaggga

SEQ ID NO: 323638 - DNA, 651 bp, Homo sapiens
tcacaactgccctatgaaatagctacaacttttatctccattttacaggtggggaaactgctgcaagagaggttcagtcccttgtgccgggcagcacagcagcagtgagtagacagcagttagcttggcttcaggtgtgcctgaacattcaggagctgactgtggagagattttctctgtaggcacctctaggctctggacactgatgtccaggatcctgtctttgatggtactgaataaggtgctgtcatcatcagcaagggtacaacagaataatgtttcctactaaattaacaaaatgctggaataatgtgtagtttctgtgaatttctttagaagcaagtcggccagacaacctttatgatcttacctttgtactcaggaaaaaatataaaattacgaaggaattttttaggaagctaaaataggtcaccttcccactcttagtactgagaaagacatttttagagcttgctttccaaacaagcaaattgaactgaagaagtmactttcatttgaaaatcaggtgaaagtcaacaacattgatgattacaaaattaacaacaataattccctgggagagtaccttcacatgtcaactaattcatagggtgaaaaaaaaaatagacaaaattcagttcaacaacaggt

SEQ ID NO: 323639 - DNA, 532 bp, Homo sapiens
tggtaaggatttttccacatcaaaggtagagttgtgagatggacaaacacattgccgatagctctagtttcatattttccccaccagagacaaactgatacctgggctctctgaccccaaagggaaaagtcctgagcaagaagatacctgattaatctagtagttatcagatgtctattcctgagccaagaaagcgagccgtggttgggggatacagaggcatcaaaggtactaggattggccaagtctgagcacataccctccaatytggccagggagggagattgcagaggtgaccatgatctttcccaccttgtgactttgtacctccttctatcaagaggtagagtctacttccccaccacttgaatctagggtggacttagtccttgattgagtgtcaaaagaatgcagcaggagtgacgtggtaccagtttcaagcctcggtctcaaaagatcatgcacaattccactctttctcagaaacctgccaccaccatgtgaacaagtctgggctagcctgtgtgataat

SEQ ID NO: 323640 - DNA, 532 bp, Homo sapiens
tggtaaggatttttccacatcaaaggtagagttgtgagatggacaaacacattgccgatagctctagtttcatattttccccaccagagacaaactgatacctgggctctctgaccccaaagggaaaagtcctgagcaagaagatacctgattaatctagtagttatcagatgtctattcctgagccaagaaagcgagccgtggttgggggatacagaggcatcaaaggtactaggattggccaagtctgagcacataccctccaatctggccagggagggagattgcagaggtgaccatgatcttkcccaccttgtgactttgtacctccttctatcaagaggtagagtctacttccccaccacttgaatctagggtggacttagtccttgattgagtgtcaaaagaatgcagcaggagtgacgtggtaccagtttcaagcctcggtctcaaaagatcatgcacaattccactctttctcagaaacctgccaccaccatgtgaacaagtctgggctagcctgtgtgataat

SEQ ID NO: 323641 - DNA, 543 bp, Homo sapiens
tttctggttgggtaggaaaggcaaggaagtagggaagacagattaaattaaattaagttttaattattaaaactactgtaagcactactgttccctgctccaaacagcagatggtgtcatcagtttatcatagctgggttgcagttcagaatggccagagtgaggacagtggaagtgagtatgttctttcagaagctggggagttatgggttatttgcaggctatgtatctatgtcttaggtaygagtctgtaaaatacatatgttccctaaaacatctggcctccaattttacaataattaaaaatggccatggattttccaactggctgatgaaagggaaaaataataagaaaaagcaaaagaaggtttaatacatttataatttaacatgtgtgttgttctacattattagtcataaagaatttttgggctggaaaatcctgagtgtttttgtgtctaattttctgaatgtagtcttaggtcctgagatagataatctcttttttttttcctcttagattgcttttttattttaagtaaa

SEQ ID NO: 323642 - DNA, 457 bp, Homo sapiens
atagcatagcatttctgaaatgtattcacataaaccttggtattagcgtagatcaaaagaggtcatgtactgtctaactttgcaagaaagtatgaagatttagcatacagcctkgaatctctcacaataataaatgagtaaaaattgtatggccaagtgaatatagtcagccctctgcatctgtaggtactgcatccagggatttaaccagctgggggtaaaaaagtattaggaagaaataaaatgcaactgcactgaacatatatagactttttctcttcttattattatattgtattattatgatacaatataacaataatttacatagcattcacattgtattaggtattataactaaccttgaacatatatagactttttctcttattattatattgtattattatgatataatataacaacaatttacatagcattcacattgtattaggta

SEQ ID NO: 323643 - DNA, 584 bp, Homo sapiens
aacatattgtaaaaaggaaaggtattaaattaaccagaatataatcatggtatcattaccattactcacaattttagcaatctgatgaaaatgttttataaaatgtatttctccaaaaattaaaactaagcaggtcatccacgtatagcacctaaaaaatataaaccagactttcagaaacttttgatgatgtttagtttgaaatggaactcacattattctgtgttgcaagtgaacagaaatctgtatgtggctacatttttcatgaagaaattatgaaagaagagtgatatgaacatyaagaattaaccaagtcaaactataaacaccaactttatctcttccacatgtatcccatgaatctgaagaaacaaaaaatttttagcatctacatatgctgtactcaaataatatggtttcaaaagaatggaatttttagagtaatgcttctgtgtgttttcttaagtcacttcccaataaactatttgtaaggtgacagaaaatttgaaaataaaaacaaatacccacatctaacaatcatttcagcttgtttgactgtggtaatgaaccaaatacagtcagtt

SEQ ID NO: 323644 - DNA, 621 bp, Homo sapiens
cccttggttttggctgctctcagcttttcatatgccttcctcactaaggttaattatttctagcttttgatttaaagtgagagccatatgactttatctgtcatttgaacatttagctgttattatagggttattaattggcctgayttcaatattactgtgtctcagagaatagagaggctctaggagagaggggtagatggggaaatggctggtttttcagtcgaaacacatacaacatttattaagtttgccatctgatatgggcatggtttgtggcacctgaaaacaatagtaacatcaaagataactgatcacagatcactgtaatagatgaactaataatgaaaaattttgaaatattgttacaattaccaagatttgacacagagacacagagtgagcacacaactgttggaaaaatggtgctgattcatgggggaaacaacacacattggggccaattggaaggtggagggtgggaggagggagaggatcaggaaaaacaacgaatgggtagtaggcttaatacctgtatgatgaaatcatctatacagtaaacccccatgacccaagttttctacgtaacaaaccttcatgtgtacccctgaacttaaaagc

SEQ ID NO: 323645 - DNA, 583 bp, Homo sapiens
atctattttaattatacagtttttcacttttaatctatcaatgtaaatgttgcttacatttatggatcatttattagtaaatcatccttgcatacctgggaaaaatccaatttggcaatgatgtttgtcttctttaaatgttggtttcaatttgctactgtcctgtttgggattaccagctctatattaaaagtgaaatacatctgtaattgtcatctgttttggtgtcttcatttgatttggatgtcaggattatgctgggctttcagaacttgctggggaattatcctctgtttgtattaattttaaaagattgcaacagattggaataatctattyctcaaaattttggtagagacttatttattggcaaatcacttgggcttgttgctttctttgtgggaagattcagacttttaatttctccctcggtttttacaagtaatattttcctagaaatgtctatttttacataggtcacatataattaacagtattctcattttccttttaatctctgatttatgttatatatctctttttcattctttatatattgaattctgtatatgtccatgaactg

SEQ ID NO: 323646 - DNA, 570 bp, Homo sapiens
ttttaaaagtatggctgaaaattttctgaatttcatgaacactataaaaccagagacccaagaagctaaagaatagcgagaaagaacaaacataaaraaatcatactaatgcgcatcataatctaattacagaaaactaatacaagagaatatttgtatttaggccagaaaaaaagaacacattatatacaaaagaactaaaataagaataaaagtaggcttattgccagaaccatgtaaaacagaatataatggagatatgtctttcaacttaaagaggaaaaaacacatggcagtatagacttctttgcccagagaaaatacctttaaaaattgaagaggaattttttttttcagataaacaaagggtaagagaattatttgccaccagacctgtactaaaagaaatattgaggaaatttcttcagggagaagaaagacaaaaacagattgaaatctgaatctacacaaaagaaattaggagtcccagaaatagcaaacaggtgggtaaatctaaaaatttaaagataactgaatatataaagtaataatttaaaaaacatattgttg

SEQ ID NO: 323647 - DNA, 582 bp, Homo sapiens
gattttttatattttacactaactagacgctacagaagaattagctgtacttctagaaacccactctcttcaccttgagcaactctgtggtgagcctttggcagcaatatataccacccaaacatgagacacctgtctggtaacaaataagtaaataaatacctagcttaaaactacacatgattcaaatgtaataaggagagtaaagagaagagaaaaatacatcttagaaatacctaacatgactttccctcacaaaaaaatgcaggaatataaagcaggtcctttgcatccttaaattcatgatgagtgtgaaaatttgaaattgcttacactaggaattgctaattttgcattctgaatgatgaaatatatcatagcattacttccccaaaaaatgccagtatgcatcattttatttttaatcagaaaattaataatcaaaataaatgcataycagggactggctaatatgagcatgaaaaagcatctctagtaatcatttacaacatctgcaaaccattaatgtcttcctcatgcagaaaagtgatataaattaaataaaacacaaaaactcacata

SEQ ID NO: 323648 - DNA, 554 bp, Homo sapiens
ctctatccccagtaccatgagagccttgaaaactagaaggctcaaaaatcacaataaaatccagcagcctagcagccaccaggaggggcaaaatagggttggacctcctccaaaaccccattcccagaaattgtcattattgacctgtctggcagttccctggaaaacaccactcctttacttgtctttatttgacctaagagcttgtccagtgccaataaccttttccccagatagcatttgtcaaaaacaaacagagccaactgtttaacatcagcttgcctgaggtggcagtaacagttggggcaaacaacaagctgaccagaatcttaaaaggaaaagctaggtaatgaaatgtcaataggggattttgataagatccaacatattccttgaactccagatggccaagctcatgcaagtactcagtaaaraattgaaaaggtgacctaagctttgacttcttgctacactttaagctctgtacaagtgggaactaaaagctaaagtagagttataaactgcctgtctaagcattgaaggcatgccccatc

SEQ ID NO: 323649 - DNA, 558 bp, Homo sapiens
agttccatctggaactttgtaggattggtcctaagaagatcccgccgaatctcttcaccacttyctagcagagcacagtaaaaccggggactaagcaaagtggctgacatgtagtaagtgctcaagaaatggatgttgactagatgctacctctcatctttgcctgtctgaactctcaagcaccggatgcaagtagactgagagcctccgccaaccagtaagatgactttggtcaaagaattctgctctagagttacttttgttcttgtcttcaactccagatcacagcaattcatacgtgccatctctgttgcagagttttcttgcaaagcctttcttaaaagctttctgtcaaatagcttgtcctgaagcaataggaaaagaatagcgtaattcacagattatttatttgaaaggaaggaatgattatatagatgtctttgtccatttcagactgtcaatagcgatgagagaaacagtcaactagcagtccactcgtgaatgtttcttctgtttttgccatggaaggattttgaagaacattcattcaacaaattt

SEQ ID NO: 323650 - DNA, 604 bp, Homo sapiens
taccacatacctagtcctgggccaagttttgacaattcaagagtgagcaaggtaacactcaagatatttgtcttcaagaagcttacagtctagtgagaaagaaagacactaacctggggactttgagcataaatctctggaatattcacattccttgtataacaagtaktctttcatccttggacactgggtttctcatctgttgaacaaaattggcttaaacctgtaatctctgttctgtactggaagtggaaaatattagcaaggcatcctgacaagtctgccataagtgctggcctaagtagttaatgagcagtttcagtattgagcaagtcaccttgactacattctttttccagcccacccccttctttatgcatacaaaaaacatttctattgtaagaaatgtaatgctttcttacacatatttttttatctgtctactagactaccaagtcaaggaccacttctcacttgtatatccagcaatctactcacttctcatttgtctttgtgtatccagcagtctagcaaagtgtctagtagttagaaaaaaggtattcataaatatttcttaaacttagtaaggttacctttatattat

SEQ ID NO: 323651 - DNA, 604 bp, Homo sapiens
taccacatacctagtcctgggccaagttttgacaattcaagagtgagcaaggtaacactcaagatatttgtcttcaagaagcttacagtctagtgagaaagaaagacactaacctggggactttgagcataaatctctggaatattcacattccttgtataacaagtattctttcatccttggacactgggtttctcatctgttgaacaaaattggcttaaacctgtaatctctgttctgtactggaagtggaaaatattagcaaggcatcctgacaagtctgccataagtgctggcctaagtagttaatgagcagtttcagtattgagcaagtcaccttgactacattmtttttccagcccacccccttctttatgcatacaaaaaacatttctattgtaagaaatgtaatgctttcttacacatatttttttatctgtctactagactaccaagtcaaggaccacttctcacttgtatatccagcaatctactcacttctcatttgtctttgtgtatccagcagtctagcaaagtgtctagtagttagaaaaaaggtattcataaatatttcttaaacttagtaaggttacctttatattat

SEQ ID NO: 323652 - DNA, 604 bp, Homo sapiens
taccacatacctagtcctgggccaagttttgacaattcaagagtgagcaaggtaacactcaagatatttgtcttcaagaagcttacagtctagtgagaaagaaagacactaacctggggactttgagcataaatctctggaatattcacattccttgtataacaagtattctttcatccttggacactgggtttctcatctgttgaacaaaattggcttaaacctgtaatctctgttctgtactggaagtggaaaatattagcaaggcatcctgacaagtctgccataagtgctggcctaagtagttaatgagcagtttcagtattgagcaagtcaccttgactacattctttttccagcccacccccttctttatgcatacaaaaaacatttctattgtaagaaatrtaatgctttcttacacatatttttttatctgtctactagactaccaagtcaaggaccacttctcacttgtatatccagcaatctactcacttctcatttgtctttgtgtatccagcagtctagcaaagtgtctagtagttagaaaaaaggtattcataaatatttcttaaacttagtaaggttacctttatattat

SEQ ID NO: 323653 - DNA, 575 bp, Homo sapiens
tgataaaacaatgtcattcttctcactaaatttgtttttattttggaaaatatagctatgtttcccaaaatattatccaatatgtaagggtttacaatagtttcttaaatgagttaaacattttttaaatttctcagttttatattctaatatggkaaatatcaataaacataagctctttgtgatccacaataatgactgagagtgtaaaggggtcttaatgtcaaaatatttagcaaccactggtactatatacaaaatatagctataagtagtgtgtgtatatatacatatatatgtgtgtatattcatattaatacagtgatttgatcctcacaataactattacagataagtactgtgtttatccttgttttacagacaaggacactgaggttcattaagagtaaacaacatgccccactgctggttgaagtgagattcaaacctgggcattctagctcaagtccgtggttgggcactgcttctcagggctcaaatttctccagagttgtctgtcagtatccatgcaggattggttccagatcccaggcaaataccaaaacctgcagatg

SEQ ID NO: 323654 - DNA, 593 bp, Homo sapiens
gcaagacctggtctcaaatatatatatatrtatttttatatatttatatatacataatatttatatataaatatatattttatatgtgaatatatatttaaatatataaatatttataatatattatattatacataatatgtattatatattatattatatataatatgtattatatattatatattatatgtattatatattatataagtatactatgtatttatctacatatttatatgaatatatatttataaatataatatttatattataaacattatatttaatatatgttataaatatatataatataaatatatgtataaaatataaatgtatatttatattttatattttttacattttatatattttaatgtttaactttttaaatatttatatattaaatattttatatatttttatatatttaaatttgtatatatttatacacacacacataaacactgaactaaacagtacctaatatttggtatcttctctaaaccctattaaggagacattttagaagactgactgatgaaacgaacaggctatatacctatcatttcacactctagggcatatgc

SEQ ID NO: 323655 - DNA, 561 bp, Homo sapiens
actcgaaatgcttctgggcagtatttgaatacaaattgattttactactgtattcaagttttccaaaatgattgccccacacttgaagccttcaatctgaattgatagaaaacctcagaggaagtgacctcattaaaaatatagttcctcgtcattgacaaaccggcatcaccctcttctctcgtacctatacttggtcacctcccctggttcttcactcatgcaggaggatgtaagttatttactgtgattgtgaagaggaaatatatggatctagttttcatatccaaaatttgtacttactttaaatcagtatgtagtattagtgatttcagttaaaacaactcacagacatagttgttggcaaccctcatgcatacctgggratgctgcctaaaaaccaaaatgctgcaaaagtcatatgcatttcagtcacactctgtttcatatggcaccaataacaaatactgctggaaagcattttcaaagatcccaggttctcttaagaattccaggtctaattaccaagtaggctggacggtctaaaaacatttatggata

SEQ ID NO: 323656 - DNA, 577 bp, Homo sapiens
cacggctgaatcagcactctgaaaaattgaaaccacatggtgtccttacccccaggtaccattagcatataagaagaaaagccaaatttgcttttacaaaaagagaaattgaggcaaaacaccataaggaactgatagtagagttagaattatgacccagagatcacttctcttaatctctccaagctggtaggtaaatttacttccaacagtagaggtatggagttcacaggattacaagacacagattcagatgtgcaaaccttttaatatttttccacaaagtaatatatgtactttgaatcccctatgtgcctggtgttaggaawtgtaatcatgatcaattgcagatatatccagtgctataagatttgccattagtaaattcaaaatttcccccatggctctttctccccagggtgcatccaagttccatgagttacgccagattgtgtcaatggagcgtggatggggcaaagagaggcatccatcatctgctgctaagcacattattgaatctggtgcttcgctattgctcttcttctgtgtttgcatccattgaggtgactgaatgccc

SEQ ID NO: 323657 - DNA, 577 bp, Homo sapiens
cacggctgaatcagcactctgaaaaattgaaaccacatggtgtccttacccccaggtaccattagcatataagaagaaaagccaaatttgcttttacaaaaagagaaattgaggcaaaacaccataaggaactgatagtagagttagaattatgacccagagatcacttctcttaatctctccaagctggtaggtaaatttacttccaacagtagaggtatggagttcacaggattacaagacacagattcagatgtgcaaaccttttaatatttttccacaaagtaatatatgtactttgaatcccctatgtgcctggtgttaggaaatgtaatcatgatcaattgcagatatatccagtgctataagatttgccattagtaaattcaaaatttcccccatggctctttctccccagggtgcatccaagttccatgagttaygccagattgtgtcaatggagcgtggatggggcaaagagaggcatccatcatctgctgctaagcacattattgaatctggtgcttcgctattgctcttcttctgtgtttgcatccattgaggtgactgaatgccc

SEQ ID NO: 323658 - DNA, 320 bp, Homo sapiens
tatccttttattcagaccatgagacctttgggtcttccaattctcaatatcacatctgatcatttaccatgaaaaaatatttggctgtatccacatctttgagggagtctcagggactctgggagggtacctaaggtctatctcacttagatacaccaygcagcaatttcagttcctctctcttatgcatggtggagtagacaagtttggagcttgctcaccttccacccctggaaattaccttggaaagtgagggcatagcaggatgaaagtctggctcagagagcagcataagtaacttactctctttcttcctgtcc

SEQ ID NO: 323659 - DNA, 548 bp, Homo sapiens
gcagtgactttgcctgatacaaaattcctacgcatttgtcgaatgggctcctatctttctgagtagcacacaccctgctcctctgaattgaggcaaaatttgtcttaccttctttagggccttctgccgggttctgaatcagagggtggaacctatgttctgtaatccaagaacatgcatgccattccattctcattcagtggaaactctycctgcattttggcctatggctttttcatgttttttatttacagcactgtcatcactttgactttttgtttaaattcatggatattttaatttagtgggaaatttggaaaagccatattagacacagtgtctgccaaaattataacttgtaaacattggtctcttattttgtttttaataaaaagctgtgatatttggaagaggacaccatccttttggacacattctgtacagaatctaggtttatgtttaccaattttttcccatctccttttattaggacaaagatatgaaggaaatggtatttgctgaatattgagtagctcatatatgacagc

SEQ ID NO: 323660 - DNA, 489 bp, Homo sapiens
ctgctctctcccttattcacctggaaaattcctacttatcctcaaagatcccctcaaatgatacttcctctgcagtcttccccaatcctgtctgtcaggatacagcagatacatttggtgcccagctgagatccccttgaagctctctttccatttctacacatcagtcccccagctcctgcacagttttgcttataacagtcctgtccctgcacccragacccttttgggagtctgcccttgggctgctggagttactctgcctgcatctagagagatagagagtgcttgggagtttatgtcttccccctgtagggtagctcatagtcaataactgcttgatgcagagtatgaaagcctcatgccctttgtctccagttgaacatactctgaggtgttatttaaactctgcaacttccctacagtatcagactaagactgcaactttgcctaacatttgcacactttctcagtttcttttccttcctt

SEQ ID NO: 323661 - DNA, 577 bp, Homo sapiens
tggatccaaagcatcagtatttttaaatagttatcagtagattccattgtatagctgagattattattagaagaacagatatcctagaaaatacacagacatcccacattttattgcacttcacattattgtgcttctcacatactgcattgtccacaaatcgaatgtttgtggcaaccctgtttcaagctagtctattggcgccattttttaaaatagcttgtgcttccttctgtggcacattttggtaattatcaagatatttcaaattttttccttattattctacccattatggggatctatgatcaatgatacttcatgttactattataattgttttggagtgccatgaacagctcccatgtaagacggcaaacttaattggtaaatatttgtgtgtgttctgactgctccaccaaccagccattcccctatctctctccctctcctcaggcctccttatttccygagacacaataatatcgaaattaggccaattgataaccttaaaatatcctctaagtgttcaagtgaaacaaagaggcgcatgtgtctcactttaaatcaaaaacta

SEQ ID NO: 323662 - DNA, 582 bp, Homo sapiens
taaatatgtggaaaaaggtaaaagaaaagagattggaggaattctgggacttctacacgtttggaattaagaacataaggagcagaagaagtctctgtaagaaccatttaggtctgatcctaatgcagctatgactttaaattgaaaccaacactcatttaccattctgaaaattctaggacccttaagaatgatgataatttctattctgtctgtgtgctagaaataaaacaatgaagcctgcatggcagcacaatctctttgctccaaggtttactgaatattttaagccactgttgagacctactggtcagaaaaaatgatttctttcaaaatatcactgctcgttaacaatgcacatagtcacccaagagctgtgatggacctatgcaaggagatttatgttgttttcctgcctgctaacacaacatcctttcttcgrcccatggattaatgtgtaatttttatttgcacattttattatttaagaaatgcatttgttacagctatagctgccatagacagtgattcctctggtggaactgggtgaaataaactgaaaatattctgaagaaaaattca

SEQ ID NO: 323663 - DNA, 503 bp, Homo sapiens
gacctaagcctggacaaaataatacttgcttcatatgcttcccatatcttagggatcattgtccttcattgcttatatccagtgttttgaaaatattgtttcatacatttagtctaattattttattcaggcaggagggtacatctggtctctattagtctaccttggccaaaagtggaagtcctgtctgccactcttttactctaactttgagttaaactgaccaccggccagtttcacaatatgctgtgttctcacctacttctggcctttgaagattctggctgtttcaactcttttatatttctttttttttctgatctggcacattctttagcatattttatatcttttcatggaaattctttcattcaytcatttattcagtttgtagctacgaaatctcactaggtgtctttgtgctatcatcttctttgattctcacaacgtttacaattaaactttctcaaattcgtatggttaatggatggaagaagggcttt

SEQ ID NO: 323664 - DNA, 626 bp, Homo sapiens
agttttgttttgtttccatctgcaaatttcattccctgtctctttctctcaaaattaatggcactagatattgggatcatgaggcaaggaggaccaataataacagcactttttcctatccaaggtctgaaccatttgagacataataaaaaagttggcctgtagaaaccaatattttgctttttttactatggaaagctagatcgaaggccatggcttataactgctgacaagtaagcttctccctattaagcatcaaatttaggctttctcatcaaccgaaaacttatgctccctacaggcagtttgcattcaagtaagagaaaaaagaccagggttctgcttacttttcctattcctatttaccatccaggtaagtgattccayctagcctgggcaggagtgatggatggagcccagagagtccaattagggtgtcttccagagaagaaggaggaagtattctcttcaaacaatgtcagctgaaaccttcaacaatgaggttgaaaggatcattttgtgtctagttgaatgaagcaactgaagataccataacagatggaggaagccagtgggaattttaggctgaatgacatccacagacctatttaaaatctctgtatttt

SEQ ID NO: 323665 - DNA, 645 bp, Homo sapiens
ccttgatttttttttttggtggggggcaacaatgtacaccttcctgaccaaaaggtcatgaattttaaagcatcatttctcagaaggaaagctgctgtcagtagaagaaagggagctaattattagttacacaggactatactgcccatggtgagaatttttgcatgtcttgccatggcacattaaaggtcaggagtatttcctggtcactgtgataactagaaaatattctctaccatttccaagtgctcacctacagagtaatgttctctgttgagaaacccttggaccaagctgttttagtctgttgggctgccatagcaacctaccatggacaaggtggcttaaataacaaaactttattttctcacagttctggaggctagaagtccaagattaaggtgttggcaggtctggtttcttctgcggcctctccctttggcttgcaggtggatgcctccttgctttgttctcacatgaccattcctytgggtgcatgcacttctgctatttctgtgtgtccaagttctctcttcttttaaggctaccagtcagattggattaggccccacaatgaaggtctcattacctgtttgaagaccctatctctaaatatagtcacattctgaattactagtcattaga

SEQ ID NO: 323666 - DNA, 621 bp, Homo sapiens
ggcacactcattcatttacatgttgtttatgctgcttttgtgacatcacagcaaagatgagtagttgtgaccragactgttgggtctgcaaagcttgaaataattaccacctggtcttttacaaaaagttttccaattgctgcttgggaaaggacaccagttcctataatacgcagagctaaagacagagatagccagtaaagaaattcggtagaagggcatgtcaaagcttactagttggccccaatatccattctgcccttcttagaaaaatagaactgattttcagttggactttttcacttggaatatagattgtgtttcacagtctcttgcagatagaggtagcttttaattaaattctggctaatgggattgtattagtctatcttcttattgctatgaagaaatacctgagactgggtaatatataaagaaaaagaggtttaatggactgactcacagttccacatggctggggagaccttacaatcatggcagaaagtgaaggaggaagatcttacatggtgtcaggcaagacagcatgtgcaggagaactgccctttaaaaaccatcagatctcatgagacatattcactatcatgagaaaagcaggggaaa

SEQ ID NO: 323667 - DNA, 536 bp, Homo sapiens
ccaaacaagatttacacattaaatttagtttctatgtctaattatcttgtattctgtaggttccctcctagtactcactttgtttttctagcaatttattagttggggaaaacagattatttgttcaagtgtctgcattttggattttcatgattgcattactgtgatgtcattaaaatgctcctccattctgtgtatattatgtaaactagtagttatatttgaggcaattagatttcttcatttgtttgttcatttgttttacaagaatactttctagttggagagttgaatattaccatatctcaaaactatgtatttacttcttgacttactaactstactttagaaatttaccctcaggaaacacccccaccccacccataatacaaaataacatacatagcagagacatctccaataacaaaatatttggaacaacctaaatgcctgtgtttaggaaattgatgaactagaccatggtaccgccacacaatgtaccataagtcatacaaaaaagcaaaaacaaagagaaa

SEQ ID NO: 323668 - DNA, 561 bp, Homo sapiens
ctagtttttcttggttagtgtattgaaccagctatttttgaggtatttgtagctcaaaaaattttttttagctgaatccasaaagctttaattattccatctattcctagggtggtgttatcttatgtctattatggattttgatgtttttcatactaggatttaattaggcaacagtgtgtagaagatttgcttcctttccttctgcacaagggaaattatataacagaaaaattattttgtgtaagaacagatactttctcatttgtagcatggtaagaagtgtggtttctaaatatccagatggagaatcaggaatggagaatggcactttgaattttccagatcatttggaactgaagcctaatagaccagaaagagaaattttcatcatgatatgcctaagttaatctgattcctattcaggccagacctaaaagggtttttattgtatgttgtctgccaggaatagctattaaacagaggcggcaaagtataataccaattatactataaatctagtataaataccaattttggtattccttatgtaattagata

SEQ ID NO: 323669 - DNA, 572 bp, Homo sapiens
tctggtacctgaacaacacttttgatagtgaggatgattaattaaggtacagggcagtggcttaaacaagtatacttgcctgtccctcaccaccatcagaacctcctaggactggggcccaagtggttatatttataaaactttcaaaggggttttaatggtcagccttgcctgagaactccttgaaagcctcctacatacttttgacgtctaggcaatatgcatacttgacttaaacttttctcccaagtgcagccagctagaaaacccatgcattcctcagtgacccagctccagaatgagttttgtctgttttyttgtgcttgcttttgtgtcactcttgaatgccaatatgttcattattctcaactctcacttttgtataatcatgctgttggcgctattttgatcctcttccatctggccctattgatattcaatgagagaaaagtgaacaacatccagctatctaggctcctatggggtctacccttcatctcccctccctctgcctgctcagaggttgactctgtttgccttgaagaaaggctgagtcaatactcccttctttc

SEQ ID NO: 323670 - DNA, 572 bp, Homo sapiens
tttagccaaactagccgtcaaatggaaggccataatgacaatcttcttcacaaaggcaaggcaaagactccaaaggtttgtcctccatagaccttttcttagaaagttactaagacatgttttccaataaaacaaggaacgaagtcaagaaaagcaggacacggttttcaggaactactggattaaaagcaggaaaacagtggcatctttgtcccaaatgcattgatttgaagaaaccctagaaaattgacattggaatagatggagccctctagataagccttggaaaattttgaggttctgttagaggaaaaagacctacgataaaaacagatggctttcaacttaactgtaggatcattttttcttttgagtggcgtaggaattatgatattggattatgatgtatataggacatgtaacaaagaaatgtaaatataacacacactgctctcagagtttaataatttgtatgtgggcacatagtaaagatcgctaattkgtttttaacttctagaatcaaattataaaccaagcacagaaaatgattataattctagaatggaatatta

SEQ ID NO: 323671 - DNA, 572 bp, Homo sapiens
tttagccaaactagccgtcaaatggaaggccataatgacaatcttcttcacaaaggcaaggcaaagactccaaaggtttgtcctccatagaccttttcttagaaagttactaagacatgttttccaataaaacaaggaacgaagtcaagaaaagcaggacacggttttcaggaactactggattaaaagcaggaaaacagtggcatctttgtcccaaatgcattgatttgaagaaaccctagaaaattgacattggaatagatggagccctctagataagccttggaaaattttgaggttctgttagaggaaaaagacctacgataaaaacagatggctttcaacttaactgtaggatcattttttcttttgagtggcgtaggaattatgatattggattatgatgtatataggacatgtaacaaagaaatgtaaatataacacacactgctctcagagtttaataatttgtatgtgggcacatagtaaagatcgctaattggtttttaacttctagaatcaaattataaacmaagcacagaaaatgattataattctagaatggaatatta

SEQ ID NO: 323672 - DNA, 439 bp, Homo sapiens
aagaaatttatgtcattcctgcagtgtgtaagaaatgctaaatctggtgataggctagtgagttaatgccaagttctggggttcaaactggaggggtagaaggcatccaccagcacccccaagacccatcacccaatcaaagcagatatgacttcaycttgaagtcccctaaaacaaacaaaaagatgccattgtgttttgaacagataaaaatctgatcaaaacacaccctaaaatttgtgaagagaagatttggagagcatgctttcattaggaaaaccaggcctgggcaggtaaatgtagggatggattaagagtgagggggtaaggctgggcatggtggctcatgcctgttatcccagcatgtttggaggctgaggcaagaggattgcttgagcccaggagtttgatactagcttggcaacatagcaagacgccc

SEQ ID NO: 323673 - DNA, 569 bp, Homo sapiens
ttactgtcttcttttgtgttgagtttttatagtaaaatgtttgcattcatttctcatttccttttgtatacagcaacactcccttattcgtagttttgctttccatggtttcagtcacctacagtagagtacaataagatattttgagagaaagggagagcccacattcacataacttttattacagtatgtcattataatcattccattttattattagttattgttgttaaacttttactgtgactactttataaattaaactctatcatatgcatttatatataggaaaaaacatggtatttatagggttcrgtactatctgcagcttcagcacccactggggatcttggaacataaaccccactgataaagggggactactatgtttccatatctattttttgtggttaccatgaggattacatttaacacccaaacgttataacacactaattcaaatttataccagcttaatctcaatgacatacaaaaactttactcctttacagctccttctccctccttacagttgttgatgttgcagaattacatttttatatcttttg

SEQ ID NO: 323674 - DNA, 569 bp, Homo sapiens
ttactgtcttcttttgtgttgagtttttatagtaaaatgtttgcattcatttctcatttccttttgtatacagcaacactcccttattcgtagttttgctttccatggtttcagtcacctacagtagagtacaataagatattttgagagaaagggagagcccacattcacataacttttattacagtatgtcattataatcattccattttattattagttattgttgttaaacttttactgtgactactttataaattaaactctatcatatgcatttatatataggaaaaaacatggtatttatagggttcagtactatctgcagcttcagcacccactggggatcttggaacataaaccccacwgataaagggggactactatgtttccatatctattttttgtggttaccatgaggattacatttaacacccaaacgttataacacactaattcaaatttataccagcttaatctcaatgacatacaaaaactttactcctttacagctccttctccctccttacagttgttgatgttgcagaattacatttttatatcttttg

SEQ ID NO: 323675 - DNA, 616 bp, Homo sapiens
tgcccctggaaaaaaaagaattgctcattccatagttttcctcttctcagtaaatgacagcttcattctccaagattctcagggcaagcatcctggtcattattgatttctctctttatctaacatcacaggaatacataagaaattcctataagcttatcttcaaactatatgtagattaccacttcttttctccaactcttccaytaccatactaatccaatccacgacaatccaagggtactgccatagcctcctctcagatctagctcccacctcccatctttgcttccctgtattggattcttctcccagcagctggaatgatccttctgaaaagtaatttaaagtatattatttctcattattaaatataaggtctcactctgaataagactaaaatctttagcagggcctacaagaccctatacgaccttgcccttatctcatctctactattttcccctccactcacttcactgtcattacacaggcctccttgctgtttctcaaacaaaccaagtgcacttctaccccagggcctttacacttgctggtctttctgcctggaaagtgctgctccatatacccacaggactcttctctctcacttttt

SEQ ID NO: 323676 - DNA, 633 bp, Homo sapiens
gtggcctctgattcctgttcccttccaatgattttataagcacccaattccctgcattagatccctttcttctaaagaaaatacttatgctgtgtcttgggtcagttttcctggaagcagactctgagatgaagatttatgtgccaatgattgaktaaggaagtgcttccaggaaaaaccactcaggagatgagggaggtgggactaggaaagggaaaaagttaagtgagggtgcaattttaggcctacccagccagatccttcagaagtgctctggaggggaaattacagctcagaggttgtcctaaattgaggtaagacagctgggctttcaaaccctcacgctgtcgttactgggtatgaaccatactgtggggtgcagcggatgccctgtgcttgcagacaaagtggctccaggaacccgagggcagtcctctggagaggtgtgggtggttaaaagtaaagacctacagaaaatgggggaaggacacacagaaatattaaaagtgatctgtggggatggaggaggaacacggaggacggggtgttctgctgttgggatatttctgttatttgcaccaaaccttaaaagatacaatcagcaacagaagttcacaagttattggttacaca

SEQ ID NO: 323677 - DNA, 633 bp, Homo sapiens
gtggcctctgattcctgttcccttccaatgattttataagcacccaattccctgcattagatccctttcttctaaagaaaatacttatgctgtgtcttgggtcagttttcctggaagcagactctgagatgaagatttatgtgccaatgattgagtaaggaagtgcttccaggaaaaaccactcaggagatgagggargtgggactaggaaagggaaaaagttaagtgagggtgcaattttaggcctacccagccagatccttcagaagtgctctggaggggaaattacagctcagaggttgtcctaaattgaggtaagacagctgggctttcaaaccctcacgctgtcgttactgggtatgaaccatactgtggggtgcagcggatgccctgtgcttgcagacaaagtggctccaggaacccgagggcagtcctctggagaggtgtgggtggttaaaagtaaagacctacagaaaatgggggaaggacacacagaaatattaaaagtgatctgtggggatggaggaggaacacggaggacggggtgttctgctgttgggatatttctgttatttgcaccaaaccttaaaagatacaatcagcaacagaagttcacaagttattggttacaca

SEQ ID NO: 323678 - DNA, 638 bp, Homo sapiens
aacttttacccctgaacttaaaataaaagttaaaaaacaaacaaagaaacaaaaaacatcaccatactcataaaaagaaaacaacccatcatgagttagaggtagacaaaataatagactacagaattatatttacaaagatggggtatattagaacaattaaaaactaatgtaactgtttaacataattaaagaaaaaatgagagctatcmaaaacatggcaaggtataagagttatcaaaaatagaaatcattttttgaaactacattaaatatttagagactaaaattagaaattcaatgacagcttaaacagcagattagacacagctgaaaagaaactttgtgtagtgaataacagggctgaaggaattaactagaatgcaactcaagagacacagaaatagaaaacatgaaatagaaatcaaaaaccatagagcacagtttgagaagtttgaactacatctaatgagagttgcaggaggtaatggggagaagcaatattttgaagagattatagctgaaacttttccagaatccgttagactcatgaatctttagattcaggaaacccagtgaatctcaagcagcataaatgcaaacaaatcttaacctagatgcattgtagtgagaatata

SEQ ID NO: 323679 - DNA, 638 bp, Homo sapiens
aacttttacccctgaacttaaaataaaagttaaaaaacaaacaaagaaacaaaaaacatcaccatactcataaaaagaaaacaacccatcatgagttagaggtagacaaaataatagactacagaattatatttacaaagatggggtatattagaacaattaaaaactaatgtaactgtttaacataattaaagaaaaaatgagagctatccaaaacatggcaaggtataagagttatcaaaaatagaaatcattttttgaaactacattaaatatttagagactaaaattagaaattcaatgacagcttaaacagcagattagacacagctgaaaagaaactttgtgtagtgaataacagggctgaaggaattaactagaatgcaactcaagagacacagaaatagaaaacatgaaatagaaatcaaaaaccatagagcacagtttgagaagtttgaamtacatctaatgagagttgcaggaggtaatggggagaagcaatattttgaagagattatagctgaaacttttccagaatccgttagactcatgaatctttagattcaggaaacccagtgaatctcaagcagcataaatgcaaacaaatcttaacctagatgcattgtagtgagaatata

SEQ ID NO: 323680 - DNA, 638 bp, Homo sapiens
aacttttacccctgaacttaaaataaaagttaaaaaacaaacaaagaaacaaaaaacatcaccatactcataaaaagaaaacaacccatcatgagttagaggtagacaaaataatagactacagaattatatttacaaagatggggtatattagaacaattaaaaactaatgtaactgtttaacataattaaagaaaaaatgagagctatccaaaacatggcaaggtataagagttatcaaaaatagaaatcattttttgaaactacattaaatatttagagactaaaattagaaattcaatgacagcttaaacagcagattagacacagctgaaaagaaactttgtgtagtgaataacagggctgaaggaattaactagaatgcaactcaagagacacagaaatagaaaacatgaaatagaaatcaaaaaccatagagcacagtttgagaagtttgaactacatctaatgagagttgcaggaggtaatggggagaagcaatattttgaagagattatagctgaaacttttccagaatccgttagactcatgaatcyttagattcaggaaacccagtgaatctcaagcagcataaatgcaaacaaatcttaacctagatgcattgtagtgagaatata

SEQ ID NO: 323681 - DNA, 591 bp, Homo sapiens
taaaacttttagaagacgtaaatatataagaactgtttggcacagtagctggcacagagcaagtacacaataaataacagacattgtcattagtaatacataaaatttataaaattaaaatatacaaaaatgattaaaaagtagactattaacataagtgatataataaagcaggaatacaagttagcacaggctcaggggccaaaatgttactgtaaagtcattgatccagcaaaattattcttagctctctcctgacattttagtttgatttaagtggtgccatttatgttaatgaacattaaaggattaatgaaacatcacaatggtaccataaattgcatttatatttttcatctaggatactgttgtaaaattggaactcgtgcaaataccactaacaagagaacagataactcatagtatattcatacactgaaatactatgtagcaatgaaaatgaatgaactagagctattgcatcaacacagacaaatcttagtagcatgctgttaaacrggaaaaaagcaagttacaaagaatatagagtattaaactatttttataatgttaaaacacaaaaaggcaaca

SEQ ID NO: 323682 - DNA, 541 bp, Homo sapiens
tctttaactcaagttccttctgaagagaatgaatcttctcttccaattcctttccaggaagtatatttttcctcatattttcaagctcactcttccatttctctttagcttcagaaacagcaaatgatatctaaagaacataacaacatgcattttgaaagtctttatgattctcctccttcgcaaaaaaattaaggtaactattttggttaacctctgaagctaggaaatgtaaaatcaaaattaaaaggaaacatgattttagataagacattattctaaaaactatacttacactaaaattggtcaaaatatatacataaatatgtttatatgtatgtatasacacataaacactcacacatataattatataattagccaaaactaatgtgagaaaaaatttcatattacttttcttaatacagatacaatctcaaattttatctgtgcccccaacaaattaagtatcttttacctaaagcaaaagcggactcataaggattttttactattacttaggaatatagcacacacctgc

SEQ ID NO: 323683 - DNA, 558 bp, Homo sapiens
taattatagtataacttatgtaaagtgaatgaatcctaagtgtacagctcaataaatttttacatatatacattctgtaaccaaatcaagttatagaacattttaagtccagctggctccttcatcaccctcccctgtgacactcttcctccagaggtaaccaccattctaatttttatcagcatagattcatttttcctgtgcttggattttgatgtagatggaatcatttggtacataatttcttgcatctcatttctttctctccagtggtgtgtctatgagattcttccatgtcattgcatgtattagaagtttgttcttttgcgctatcatgtggtatttcacattgtgtgaaatcactatgaaatatgtatctattctcccatggatgaatgttggggttatttccacagagcatgctcataatcactaggatgtactgtcactcaggtatgggtrggattccctgagtcttctgagagatttgcatccttagcatgtgggcagaatggtatcactgactgtgttagtttctgattgccgctgtaacaaatt

SEQ ID NO: 323684 - DNA, 558 bp, Homo sapiens
taattatagtataacttatgtaaagtgaatgaatcctaagtgtacagctcaataaatttttacatatatacattctgtaaccaaatcaagttatagaacattttaagtccagctggctccttcatcaccctcccctgtgacactcttcctccagaggtaaccaccattctaatttttatcagcatagattcatttttcctgtgcttggattttgatgtagatggaatcatttggtacataatttcttgcatctcatttctttctctccagtggtgtgtctatgagattcttccatgtcattgcatgtattagaagtttgttcttttgcgctatcatgtggtatttcacattgtgtgaaatcactatgaaatatgtatctattctcccatggatgaatgttggggttatttccacagagcatgctcataatcactaggatgtactgtcactcaggtatgggtaggattccctgagtcttctgagagatttgcatccttagcatgtgggcwgaatggtatcactgactgtgttagtttctgattgccgctgtaacaaatt

SEQ ID NO: 323685 - DNA, 589 bp, Homo sapiens
attcaattctcttctcccctggctacattcacccattacctgctggtgttcgtggacccttctgtgccgaatcatcagcaaggcaggggacagtgccgtgggggcagagacagtattattctggcctcctggggaccagaactcccctccagctctggacaaatgtgttgagtttcctcacatgtagaataaactgctctattacctacttaaaaaaaaacaaaacttgccgagcacttattctsacttataactcttagtctttctccttgtgggattcacacaactgggggtggggcgggtggcatggagcagaggcaagaaaatcaatgtccagcaggccctatctcagtgcctggcacataggaaactcttttgatatttattgtatccagacgctgtgggagcccagaggaggtagcttgaaatcacatagggatgggggaggtagataagccatgcctcccaaaagtacagtcattaattaattctccacatatttattgagcactgattatatgtcaggagatggggatagaggggtgaacaaggcattgatagtgacctcgtctttacagagcctaccttc

SEQ ID NO: 323686 - DNA, 604 bp, Homo sapiens
ggcataggggaagctttgggacctgggtttttgcctagagaaggcaccttagtgtggggtcgtgggtagccagragcctaagtggtacacagcagagcaagagtactggggagaagatggcagtgggagggtaaagttcaccaccgtagcgttgactatgccaagttccagggccaatggctctgcagagaactagcaaggtcatgggagtcagagtggtacaaggcaaagaggacagggagccaggaccctggggtgctgaggccagctctgttaatgagagtctctgagcaagttaatctccctatgatgcctcatctaccacatataaagcttggctgaaaatgtaataatctctatggtctttttcagctctaataccacatgtgactctagactgtgccactaagtgaatcttgctgtacctaagtgggtggcttagagctaagaggctcttgactggagagcaggcgtgacctgagccactgatctctgccctccacattaccccttctcctcgccttaattctcttgatgaccaagggagcttttagcctctccttccctcatttatccttttaagcaagaaaggagggaggctgca

SEQ ID NO: 323687 - DNA, 604 bp, Homo sapiens
ggcataggggaagctttgggacctgggtttttgcctagagaaggcaccttagtgtggggtcgtgggtagccagaagcctaagtggtacacagcagagcaagagtactggggagaagatggcagtgggagggtaaagttcaccaccgtagcgttgactatgccaagttccagggccaatggctctgcagagaactagcaaggtcrtgggagtcagagtggtacaaggcaaagaggacagggagccaggaccctggggtgctgaggccagctctgttaatgagagtctctgagcaagttaatctccctatgatgcctcatctaccacatataaagcttggctgaaaatgtaataatctctatggtctttttcagctctaataccacatgtgactctagactgtgccactaagtgaatcttgctgtacctaagtgggtggcttagagctaagaggctcttgactggagagcaggcgtgacctgagccactgatctctgccctccacattaccccttctcctcgccttaattctcttgatgaccaagggagcttttagcctctccttccctcatttatccttttaagcaagaaaggagggaggctgca

SEQ ID NO: 323688 - DNA, 577 bp, Homo sapiens
gatgcctgtttaaaattttgtcaagttgaggatagtgttgaagttatcttggtcaaaatcaagaatgttaattacaagtatttttcttaacagtgctttattttcttgactctaacacaacatttgtagagggaaggggacagtactactcattacatttacttcatggcaatatctactataaattagcttcttcctcctgttttatatttacattttgcttaatcccttcttcttagtgctgagcacagtggttgctccatatatgtgtgataattagaaagacaaagtaattaactaaagartttagaataaaagaataaagaaaggagtgaatgaatacaatttgatgatgcactcattggtgaaatgataaaggcaatatgtcaaaatgcattggtattgtaggtagtgacattagatgttcaggaaaaaacacaaacttcctaatttctaaaatcagaggaccctgttagagacttaagatttaatttcattacaaagtgtgtgtgtgtgtgtgtgtgtgtgtgtgtgtgcatgcgcctcaagttaaataaaaacttgagatttatttata

SEQ ID NO: 323689 - DNA, 647 bp, Homo sapiens
ttaatactatcattagttgggaaaatgctacatatttggaatgtactgttatatataatctacttccaattaatattctgaaatctgtggtattttaaaattttctgttataataaaatataacaaatgaaccataatgcatgcatatgttcttgctctgaaaacataagtaacatttatcaagtagtttagctatggttccaaatttaatttaacacatatttacagaacacaagtagatgacagtctgtaagtatattagtccattgtcacactactaataaagacatacctgagactgggtaatttataaaggaaagaggtttaactgatttacagttctgcgtggctgaggagcccacaggaaacttacaatcatggcagaagaggaagcaaatacgtctttcttcacatagtggcatcaaggagaagtgaagaaagaagtgggggaaagctccttataaaacaatcagatcttgtgagaattcactcactatcatgagaacagcatggaggtaaccgcccccatgattcmattgtctcccactgggcccctcccacaacacgtgaggattatgggaactacaattcaagatgagatttgggtggagacacagccaaaacatcaaaagttatttaagtagcta

SEQ ID NO: 323690 - DNA, 436 bp, Homo sapiens
tggggcaaattgcaatcatggcccaattatcctccacctagtctctctcttgacatgtggggattatggggattataattcaagatgagatttggctggggacacaagcctaaccatatccaaatctaacataatatgaatagtataaaataagtaatatgtatckaaaaaattaataccataagtaagcatattacaagtcattgggcataccaaggacatttaaagtgcaagcatgccgctggggaattgaaactaaccttgaagccacttgaaccatcctagctctaattaaactaaatacattcttactaataaagcaaggaaaactgtcactaataactataccaattattccatatggtatggaacagagaaatctaatttagattttaaagagtataacaagaaaaaataaaatacaaattgtcataga

SEQ ID NO: 323691 - DNA, 507 bp, Homo sapiens
aaggcatcagccagctatgttctctcctggaggtcagtgccctccttcaggcctatggtgataccattccatttcttgctagttgtcatctgaaaattgctttgagctttaaatgctgccttatgtcccttccacataaatcgctccattttgaagacaaacaattgagaactttttgtacataaaatcctacctatgcttcaaatctctttctctaggaaaagctctagtcttttttaaaggctcatctgattaggtcaggtcctccaacattaataatcctttcttaaggttagcaataccatatgccataacctaagcacagaagtgatatyccatgatattctcagtcccaggaataatgcagggcatatacaccatggggcaagaatcttgggagccatctcaaaagtctgcctaccacagaaccactctgggtaaatgatcatttatacaactctattttttttttcccatgaaagtaatgtgtagaacccaagaatgttg

SEQ ID NO: 323692 - DNA, 574 bp, Homo sapiens
tgctctggtctttttctttccccaggttggctaaagttgctttaaaaatgatccagctctttttggtttttgttgttatcattgttttcacaattattctcatatgtgtttagacaaaatagtggacacttgcacttaatttttcaagcttcattaaaaaagtgctctaagattcagggatttttctaattagtcagcacctgacgccatttggttaatcaagggagccagaattgaaatgaattgtctgcgttcagactctgcactggcatagagatggtttgaaaatattagcaactgcccctgcccccaattttctgggctgaccctgatttcaagtgctgtattctgttgtgttatttccatgaactctctgctctgcacagtccagaaatcacagcattttatcatccaaactacctctcctgtcctggaaataaaacaaaaatattgtgtctggccayaggccccatggtttggaaaaaaaagttacttgtaccccaagagtgcggaaatcaccggagcctgagggaggtaagtgaattgctcctgctcaggaatcttcctcaagtct

SEQ ID NO: 323693 - DNA, 528 bp, Homo sapiens
ctgtctggaactaacaccagccacccaggctatctgccccatgccccaactcacgtgtagactttggctccttcatggtgatttctgttatttggttctgcgggggctcatgtcctaaggaaaaaattacattttggctaactagggtttaccacacctcacaaaaggattgcaaactcaaaggcttacaggagcctagaacataaaataaatatatacgaaacaggactgggggaactgaggcaaactgggatggagcgccaagcgtctgcaccagcagacgagtgccctgcaggaacccgagcccaggccagcctcatctcctgacttttcarctgaagctgcaaaaattgagggttttatttccaggcttccaattttaaaatgttgacaacttggacaaaatgtatacaataccacactgtgtggcccatagtagctgctagtttcttctttgcggacagggacccactgaggcagaaggcaccaaatccaggtggctcctagcttgattggggtgcctgtcct

SEQ ID NO: 323694 - DNA, 496 bp, Homo sapiens
tagtgtctaccttaaattgtagttttattgcatcctggacaatgcaaggaccttgggacactataattacatttttacccctcccacttttgatgttattgttgtcatatactttaattatacatatattctaaatacattttaaaatgtcatcatcctaytagcaaactaacacaggaacagaaaaccaaacactacatgttctcacttataagtgggagctaaatgatgagaactcatgaacacaaagaaggaaacgacagacactggggtctacttgagggtggggggtgggaggagggagaggagcagaaaagattactattgggtacggggcttaatacctgggtgatgaaataatctgtaaaacaaacccccatgacataagtttacatatgtaacaaaccttcacatgtacccctgaaactaaaataagtttcaaaaataaaatgtcattattattgtttttcatatggttaatattcactttgattta

SEQ ID NO: 323695 - DNA, 496 bp, Homo sapiens
tagtgtctaccttaaattgtagttttattgcatcctggacaatgcaaggaccttgggacactataattacatttttacccctcccacttttgatgttattgttgtcatatactttaattatacatatattctaaatacattttaaaatgtcatcatcctactagcaaactaacacaggaacagaaaaccaaacactacatgttctcacttataagtgggagctaaatgatgagaactcatgaacacaaagaaggaaacgacagacactggggtctacttgagggtggggggtgggaggasggagaggagcagaaaagattactattgggtacggggcttaatacctgggtgatgaaataatctgtaaaacaaacccccatgacataagtttacatatgtaacaaaccttcacatgtacccctgaaactaaaataagtttcaaaaataaaatgtcattattattgtttttcatatggttaatattcactttgattta

SEQ ID NO: 323696 - DNA, 520 bp, Homo sapiens
cctttattgatatttactgtaggaatgtcaggaccaccaaaggtaaattggctctgtcctgggcaaattgggatgtatggtcacgaaaatgtctgatgatttgtccatgctattgcctgggtcaactgggcctcttttgtgtaattaacctcacttactcaaggtcttyactgaaataatccctattccattcctggtaattttctttctacagaggactgttatttccaaggaccttacattagtaaatctgatgaccagttatcactgttcttatagctgtacttctcagcagcatttgacacatttggccattctcctttttgaaacactttttttcacgtgacaacctgaacactgcacacttatggatgtctccctgcttcactagctacctttttttcagaatcatttgctggtttctcttgccagacttctccagtttcagagaagtctgcccctgtggtcctcttactttctgtaccaacatgccaacatttcacgacttcattctggttct

SEQ ID NO: 323697 - DNA, 520 bp, Homo sapiens
cctttattgatatttactgtaggaatgtcaggaccaccaaaggtaaattggctctgtcctgggcaaattgggatgtatggtcacgaaaatgtctgatgatttgtccatgctattgcctgggtcaactgggcctcttttgtgtaattaacctcacttactcaaggtcttcactgaaataatccctattccmttcctggtaattttctttctacagaggactgttatttccaaggaccttacattagtaaatctgatgaccagttatcactgttcttatagctgtacttctcagcagcatttgacacatttggccattctcctttttgaaacactttttttcacgtgacaacctgaacactgcacacttatggatgtctccctgcttcactagctacctttttttcagaatcatttgctggtttctcttgccagacttctccagtttcagagaagtctgcccctgtggtcctcttactttctgtaccaacatgccaacatttcacgacttcattctggttct

SEQ ID NO: 323698 - DNA, 468 bp, Homo sapiens
tgtaaaatacatatccatgaagccatactgatacaaattattgaataaataaatcaaggaattccaaataatttatgtagctactccctgctccaggaggtggacttcactctcctctccactttcaaatgtaagccatgctcattgagttgcttcctaaaaatagagtacaaagaggcggaaaacactcgctttatggaggagaaacctcgccagcactatctcagcccwgggataatcagtgatgagtcatgttgatggcgtgtaccttgatatgatgtgataagactggcacttcacctctggtcttcttcccccaaccatgagaaaaacatcagataaacccaactgagggacattctacaaaccaccagtactcctcaaactctcaaggtctgagaatttggagaaacaaagaaagtcagagattgtcacagaccaagaagcctaaggagacacaaggctgaa

SEQ ID NO: 323699 - DNA, 401 bp, Homo sapiens
tagaaatgatggattagaggaaataaattccactgaaaggagaacctttcagggtcaagctgaagatatctatctttggggtattagtagatcctgggcacaggccacagattgagaatctggggtgggacctgtcacaggagtctcctaggtrcagagttttagaaagtcacatgagactagaattatacaattggagacttgaggggcttcagacacatggcgggtttcctttccaagaccttagctgaaatctcaaactttacaggtcaggaggctaaataattaatcccaaatctcagaaagctgagaattttccacagtcttaatatgcttggtagacaaaaatctgcctggggagtgagcaatgaggagccctaggaatgataataattgacact

SEQ ID NO: 323700 - DNA, 587 bp, Homo sapiens
agcgggtgacaccgttaatcatttggtgtgataggagtaaacggaagagggaagagaatgctgtaaacaggattagtgtcttgtccttcagaattaagtttctcaggttggcctttgtgattggagttgatgggaaggtgacaaatgcatgtggatatgcgggcatttatccagctgccagaatggatggcgtggttcttcctcatcagcagttatttgagcactgatagctcagactcctctatcctcaggggctggagatagggctctttgactagcaactccccagcagttctaatcaatattgcatgggatcaataggcatgtattcattgcttagataataaaatacttcatgattgactattccagcggtttcatgagtgccctgattgtttaaggggtttctgtgctgtagcttaaacaggagtcaatctcttatagatrtgaggaaggttaagtattttcctgcagtctatggtactgagccagaggcaggaggagaggtcactggaaccatagaactgtcacagagtcataaggcctcagtgtgccttatgcccagctatcagggcaattggagtgtt

SEQ ID NO: 323701 - DNA, 602 bp, Homo sapiens
gggtgaacatttgctataataattgtgtttagttaaaaaatattcagctcaaagccatgtgtatatactgcatcactttatattatatataagtgaatgccatgatatgtactggtcatcaagttagtttttattaatttataagtatagtatcgatcttgtatttactggtcatacaatatattccatgtattaaatgtattttttaaaatcctgaggtgtggagaaattaatttgccaaagtacacattgaatagtttcacataatatagtattatattataataaaattcataactatcactaaaagacaggtaaataaatattactaactataatttaaaacatttttacaagtagctttaatattgaacccaaattttgctgttcaagtcagtttcatatattcagtatcacgattcctwacacgtaattcagagatacagcctttctaatgttaacacttatgaaagaaagaaatgtgtgtgtgtgtatgtattcatatttaatgagcacagcagaattaggcattatgctctatttttcacatgcaatgtattgtttaatcttcacgtaaaaaccttaattaaagaaagcgcagt

SEQ ID NO: 323702 - DNA, 618 bp, Homo sapiens
cattttccttcagcacacaatcagataaacatgtcactccattgcaacaagttcctagtttttcaagccatgtgcttgccaataaatctctttgggagactttatcaggtttgatcagtaccactagggtgaataataccttaatcatgcctattggaggtgtttaacacaatgtttggcatcctcagaatgtgaaatgttcaactactatcaaaactttaattaactgaataaccctgaaaatgtgtgcaattttcaggtatctgcaatrtttgtccatacattataaattttatgtatcaaggtataatttattgctttccaaactagtatgaatgtaccaaatactttccctacaatcctggaattttatactgcattaaatggacgaggaatgttcatgtaatgaatacagaaataaaataagaaactccaagctatcctctataatttttaaatacgtttacaatgtacaaactttgatgggcttaagttctagaaagtgttgaaattttttaagagaaattgaaatctcactttctgaaaaatattaccagaaggaaatttagatgtgtattattaatttggcaaaatgtttgagcattttaaataaggcaa

SEQ ID NO: 323703 - DNA, 618 bp, Homo sapiens
cattttccttcagcacacaatcagataaacatgtcactccattgcaacaagttcctagtttttcaagccatgtgcttgccaataaatctctttgggagactttatcaggtttgatcagtaccactagggtgaataataccttaatcatgcctattggaggtgtttaacacaatgtttggcatcctcagaatgtgaaatgttcaactactatcaaaactttaattaactgaataaccctgaaaatgtgtgcaattttcaggtatctgcaatatttgtccatacattataaattttatgtatcaaggtataatttattgctttccaaactagtatgaatgtaccaaatactttccctacaatcctggaattttatactgcattaaatggacgaggaatgttcatgtaatgaatacagaaataaaataagaaactccaagctatcctcyataatttttaaatacgtttacaatgtacaaactttgatgggcttaagttctagaaagtgttgaaattttttaagagaaattgaaatctcactttctgaaaaatattaccagaaggaaatttagatgtgtattattaatttggcaaaatgtttgagcattttaaataaggcaa

SEQ ID NO: 323704 - DNA, 557 bp, Homo sapiens
ggaaaagtgattatacagtaactttccaattttgagatgaaattaaaggaaaagggaagataattatgattttttcctaagagagaaattaaaaccccaatacagctgggcacggtggctcacacctgtaatcccagcactttgggaggccaatgcaggtggatcacctgaggtcaggagttcaagaccagcctggccaagatggtgaaaccctgtctctactacgaaaaagattaaataaaataaaaaaattagccaggcatgttggtgggcrcctgtaatcccagctacttgggaggctggggcaggagaattgcttgaacccaggaggaagaggttgaaataagctgagatcacgccactgcactggggtacaagagtgagactccgtctcaaaaataaaaataaaaataaaataaataaaaccacaatactatcatatgtaaaatgtcagaggttaacttataccagtataaaatttggcagacactgatattatataactgatcataaactataagtaactgattactatcaaataagaacaatataatgat

SEQ ID NO: 323705 - DNA, 602 bp, Homo sapiens
gtacagaaaagaagacctatggtcctgagtagacaatgcaatatcacaaagtttttgatttgttccttaaactacaaaattaacccaaaactgaatccaaaataggcttttaatggaaataytttaaaagtttaatactaccatatgaatgtatggtcaagacatacattcataatagtatgataatataatatattactgttattcttattctttagggaagggatggagctgaaacatttgacagtaaattgtagaaatcatgaccctccatccctaaaaccttctctcataaccacacctcaaatttttaaaatgtaacatagctatatcactgtcatgtaatatagtttatattcctatttcactaattatcttccgagtgtcctttatagcaatgttgccctctgaaccaggatccaatgcagaagtttacatttagtcatattgtatgttttctctcctttgatatgtagcatttcctcccttttctttgtgttttatgaccttggtgtattaaaagagtacagacacaatgttttgtagtatttctctcaatttgggtttttcctgttgtttctttataattatgcttttgagtt

SEQ ID NO: 323706 - DNA, 534 bp, Homo sapiens
agagtgggaatgcttagcgttttctttctctttctgttgctgatgcagtggcaggaagaagacacttgaatgtgcttcagtacatttggccaagagcatgtagaggggaggascagaaccatcagatgggaacagtttagtagatgccatggcggggtgctgctgagagaaaagggggtcaggtagagacagtcctgccctcatggagctgaggtgtgatgagagagacaagtctcaaccacacaaatgagtagataattacaccttgagatggccattagcaagggaagtgaatctgtggtgagaggtagggtagtaagtaggtaggagcaggattcaggaaggtctttggaaagcagttgaacctgacattgaaagattaagaaggaattgacctcataacaagtagaagaaagtgttccaggcagaatggtggaggggggcagtgtgtgtgtgtgtgtgtgtgtgtgtgtgtgtgtgtgtgtgtgtgtgtgtccgtccgtccgtccgtcctggggcaggaaagaacttggt

SEQ ID NO: 323707 - DNA, 553 bp, Homo sapiens
aagcaacaaaataaataatgttgtgtggtcttataacgcaaagaataaattaaatatccttgagtctacagtgatataaatgattgaataaataaatggagagaagagataaaacttccttacagaattccaaataatatatgtaaatacttycctcttcccggaggtgaagctaacttcccctccccttgatatgggctagacttaaacaataactttataatggagaaatctggcagatttcccttccctcaaccaagtgatcaaggttcatgtcacaggaatacctcatgctggccccatgggcccccgatgggatgccatgaacatggcaatccacctcagtggtattctttccaaatgctcctcatgagaagtattagactatcccaaattgtgagacattctataaaatacctgcttaatatgtctcaaaactgtcaaggccatgcaaagcaagggaagactgagaaatggtcatagattggaagagactaagaagacagcacaatcaaatgcaacgtgtgtcctagatggaccgtggaataggaaa

SEQ ID NO: 323708 - DNA, 553 bp, Homo sapiens
aagcaacaaaataaataatgttgtgtggtcttataacgcaaagaataaattaaatatccttgagtctacagtgatataaatgattgaataaataaatggagagaagagataaaacttccttacagaattccaaataatatatgtaaatacttccctcttcccggrggtgaagctaacttcccctccccttgatatgggctagacttaaacaataactttataatggagaaatctggcagatttcccttccctcaaccaagtgatcaaggttcatgtcacaggaatacctcatgctggccccatgggcccccgatgggatgccatgaacatggcaatccacctcagtggtattctttccaaatgctcctcatgagaagtattagactatcccaaattgtgagacattctataaaatacctgcttaatatgtctcaaaactgtcaaggccatgcaaagcaagggaagactgagaaatggtcatagattggaagagactaagaagacagcacaatcaaatgcaacgtgtgtcctagatggaccgtggaataggaaa

SEQ ID NO: 323709 - DNA, 584 bp, Homo sapiens
gactatagttaacaaaaacatattgagtatctcaaaatagccagaagagaaaatttgaaatgttcctagctcaaagaaatgatacatgttcaaggcgatggatatcctaaataccctgatttgatcattacacattctatggctgtgtcaagatatcacagataccccataaatatgtgtaattattatgtatcaaaaactttatataaaaaacattaatttgctgtatttttgattctacaattgggcagcactttattccataaaatagaatgagtgttctgatgagccaagaagaggaggttggttttacagacagaaaagggctgtggaaagcagaaaaaaacaaacaaaaaaaatgtggattggtcatttcaaagtttcttttcatgtaaaggttaaagcagaggggwctttcttgtcctgctggcactggatctaggtcagtgttggagacgatgtctgggactcagggccttcgcagatcacagaggctggtcttgcacaacctctaaaaggccaggccaggccatggcttacctaagagctcagcccagggaagccctaggtcctttcctggcatc

SEQ ID NO: 323710 - DNA, 594 bp, Homo sapiens
tttgtggctgtcatgactactgaaaatgtcgtaactgttggcagcaagaacatgacctcttgctgtcccaaaatgaggaaatgaaagggaaaaaagaggaaatgggatgaaatgaaaaatggatgcaaacaacagagagtgagcaagaaacattgagaaagatgaaaaaaatgagctgtttatctctcctctgcttctgggccctctcctttgtgctaccctagtgatgtgctctattggtccattcttacrttgccataaagaactgggtaatttataaagaaaagatggttagtcagctcatggttcctgtgggctgtacaggcgtctgcttctgggggaggcctcaggaaacttacaatcgtggcacaaggtgaaggggaaacaggccattagcagcaggagaggggcaaaggagatgctacacactttcaaacaagcagatttcctaagaaattgggggaatggcgctaaaccattaaaaaccacccctgtgatccaatcacctcccaccaaaccctccctccagcactcgggatcacagttcaacatgagatttgggtagggacacaaagccccaccataccattccac

SEQ ID NO: 323711 - DNA, 594 bp, Homo sapiens
tttgtggctgtcatgactactgaaaatgtcgtaactgttggcagcaagaacatgacctcttgctgtcccaaaatgaggaaatgaaagggaaaaaagaggaaatgggatgaaatgaaaaatggatgcaaacaacagagagtgagcaagaaacattgagaaagatgaaaaaaatgagctgtttatctctcctctgcttctgggccctctcctttgtgctaccctagtgatgtgctctattggtccattcttacgttgccataaagaactgggtaatttataaagaaaagatggttagtcagctcatggttcctgtgggctgtacaggcgtctgcttctgggggaggcctcaggaaacttacaatcgtggcacaaggtgaaggggaaacaggccattagcagcaggagaggggcaaaggagatgctacacactttcaaacaagcagatttcctaagaaattgggggaatggcrctaaaccattaaaaaccacccctgtgatccaatcacctcccaccaaaccctccctccagcactcgggatcacagttcaacatgagatttgggtagggacacaaagccccaccataccattccac

SEQ ID NO: 323712 - DNA, 533 bp, Homo sapiens
tgccgcatgtttcatctgcatcacagctggatactgtctttcttcatcagtctttgtctccagggccattatctttctcagcgatgggatctcgggtggtcataccagtacacccctctcaggtttctctaactttgaactgtgggaggaagctttgaatattagtttcttctctcctatggccttgctctttagacaacttaaccatctccttttagtcatcaactttgcactatgatggctctcatcaaagacaattttgtgacaattttgatagaattctactttacctgaacaccagaataatagacacttatttctctattgttgcataactaaggcaatcactcagtgatcttttatacagcaacaaaaacaacagcaaaaatcagcttctctactttaaaaasaaaaataaaacatctatataggcatgcagacattcattgaaaattgtttatagaaataaaatgtgagaagactccaaagatacaacattagggggactgtaaagtaaattaggatatgtctac

SEQ ID NO: 323713 - DNA, 536 bp, Homo sapiens
atatgtataagtttgttacctaggtaaacttgtgtcatgggggtttgctgtacagattatttcatcacccaagtactaagcctagtacccaaaagttatttcttctgatcctcgccttcctgccacactccaccctcaaataggtcccaatgtctgttgctcccctctttgtgtccgtrtgttctcatcatttagctcctccttataagtgagaacatgaggtatttggttttctgtttctgcgtgaatttactaaggatagtggcccccagctccattcatatttctgcaaagcacatgatctggttttttttaaggcagcatagtattccatggtatatatgtatcacattttctttatctgatctgccactgatgggcatttaggttgattccatgtctttgctattatgaatagtgctgcaataaacatatgtgtgcatgtgtctttatagtagaagaatttatattcctttgggtatatacccagtaatgagattgctgggtcgaatggtagttttgtttttagctcttta

SEQ ID NO: 323714 - DNA, 577 bp, Homo sapiens
ctgctgggcagacagtcagcggtatcttgtcagaatcagctgttgaaatgcagtggggcgtatgaccatgctccccatttaacagatggagtagttaggcccaagggtcacacagttgggttagagctagggacaaagacctttctactcaaaacccgaggcttctctatgtacatttcaaaaggcttaaattttggcttatctttttacccagaaagtctacttctgggaattattataaggaaataatgaatgggaataaagagttagaaacaataatttttaacccagtatatttttgtgaaaaaaaaatgggaataatgtgaaagtctaatagtatgcagttagtgaaatcaataatgrtacatacatacaatggaatactatgcagccattacaattataccacagaagaaaaggcaatggcctggaaaaatatattgttcataatatattgttacataaaaagtaggctataaaactgttgtttaacaaaacagatctagaaagattaagagatgtatacagcaacattttacctgtagtttcctctgcatgatggaattgtagatgattt

SEQ ID NO: 323715 - DNA, 598 bp, Homo sapiens
cgacagcgctaacttgggtaatatccttttaactctgattgaattatatgttaattccttgcggtggtcttagatttcagacgctattagcaaattatggaggaaaagcaagatcrtatgattcatgaactatcacagcagcaacagtttctaatttccacccatcctctgtgtcatgtgatatgtttcagaaactcacttaaaattgagaaaataagccattcctaattgtacttaagtaaggaaatagctcatttatgaatctaagaagattaaagaatatggctttagtgtgtttgtttagaatctatgccaaaatttttttccgaagcataaatctggttttttttcttttccttaaaaaaaactttaataaagccaaagaaagaaagaaaggaaagaaagaaagaaagaaagaaagagggctccacatgcagtttcagcactaagggatcctgacaagtaattcacctctgctttgaatgtgggatttttgcactctatgatatatacctttggagtggttttgttttctttgtggttttttttttgtttgttttttgttttttgttttttttgtgtgagacagtggattttt

SEQ ID NO: 323716 - DNA, 436 bp, Homo sapiens
agtgttttaaatgaaactttcacattcattccttttccaattggacggatgcacagcaaaattcagtggtgtagcatctcacaatggacagattcagtttgacagtgggtaaaattttgttccctgtgttttaaggttcaaagtgataaaacaaacctggtacggaaataactgattgtggaacgcgaaggacctgtgatcatgcaaargtgacagagcaggtaaaatgttttggacaagagggagagagtttgcaggtaaagaacctataaggggcagaaagaggaatgcaggacacttcgggatgtgggtcacattttgtcctggaatcagtacttaccagcttagtctgaggccttgggacagaagtgctgctcataaaagtaaattgtgtttctgcaatgaaatctctgaaacttcaggagaagagcacttg

SEQ ID NO: 323717 - DNA, 500 bp, Homo sapiens
agatcaggccaatatatcaaaattaaagaataatgcatgaatgcatcaggacatgcaaatttaatgaacactttatttctgggaaagaaaagtcatgcaaaaatgaaatagctatgaaagtcagggacatcagaatgccacgtggtgaaaagaggactatattaggtatctattgcagtgcaacagattatccccaaaacttagtggaaaagggagaaagagaaggacaagaaaaagaaaatcaaatagctgctctggtggcctaggaatgttgcctaatatcaaaacaaggaacaagggaggccaaaccctcaggatatttcagggcaagagatgattgtggcggccaggcatggtgctttttaaagctcccaggtgattgtgtcaggcgtcagggttgggaagctttattccagagtgtgacttgccaatctacatttactttagtcacagtcaacrtggttagtagaggtgttgggggtgtataatgaacactcacc

SEQ ID NO: 323718 - DNA, 608 bp, Homo sapiens
ctttgtttcttacatttgttgccagagaggctgcaaaaaggcggttacctaagccacagaggccttgatttagcagtgaagaccacagggagtcactcagaatggtttatttgtgcacataggtggagctcctttgtctacctctgacagcaaggtatccctgactcccattcccctgggagcatctatgaggmtgcacatatctcattgaaaatctaaggagataaagttttatatgctagaattgctcctagggacagagacagagagtaagaggtagaaagagagattaacaccccatccacaagacaggccatcctggactgcctgtgatgtgggaaattggtcaagatgagagtttatgaatttcgatcagaaaatttaaatgtaggaatagaatttaaaaaggtattgattttttggcatggagggattggaaataatattttgctaagaggcttgaggctaagggtttgatgcccaaagatcatgtttggccagcaagagaagtttcctaaattgtctcaaggggcacagctgtctgccttgcagccagctattttcttgttattcctctctaaaggagtcctgattattttcagatgtca

SEQ ID NO: 323719 - DNA, 577 bp, Homo sapiens
taacagttaagcttagagacagggtcagctctaaatcaccctgttgagtaagtatgtcattgctgcttccctgagagcaactcaagtccaagatttcccattgttcaaatgtgatttttaaaattcctgctttgcctacattatagtattgatgtaagtataaaattcaggacagaaatggatagcactttagaaatgaaaaaaattgttgtacaaatgcaaggtcttattactttacttggctgcagaattcaaayggaccaggagaatgcatcttgattggaataatctctgtgataacagcttcagtcaatctttggaaagatggtactctctgagagctctgtccatctcctcaaataagaactcttataacattcacgaaagacaggcaacattaagccatttgaactgcatttgtaatttcccagatgggtcaatccagaaaccaaagcccaattttagagctttaatgttgttaaaagaatctaattcatctcccttattttacagatgtggaaactgaggtctatagaaaactcagtgaaagtcaaaaccgttaggcaagtcacaattg

SEQ ID NO: 323720 - DNA, 483 bp, Homo sapiens
tttgaactaatttcactcccaccataagtgttcctttttctccacagcctcaccagcatctgctattttttgacttttcatagtagccattctatctggtgtgagatggtgtctcactgtggttttgatttgcacttctgtaattatcagtgatgttgagcttttttttcatatgattcttggctgcmtgtatgtcttcttttgaaaagtgtctgttcatgttctttgcccacttttatggggtgttttttttcttgcaaatttaaattccttgtggaagccagatattagatttttgtcatctgcatagtctgcaaaaattttttcccattttgtagattgtctgttcactatgttgattggttcttttgccgtgcagaagctcttttgtttagttagatcccagttgtcaatttttgcttttgctgcaattgcttttagtatctttgccccttcctatgtccagaatagtattgcctaggt

SEQ ID NO: 323721 - DNA, 577 bp, Homo sapiens
cagtttctggtccattcttttaaatatttgagaatctaccaggtagcatttaggtgctattaaatacaacagtgaaaagtaagcgctagactttgctttcttgcagcttagagtcaaacagaaggtacagttactgattaaatcatcgcacagtaatggctagaaacaagtaactgctaaagccgaacaaaaaagaagcagaaaagacatctaattttaattgagagttacagaggtgtgaagggtcatagtgttaaaatggagtaaagtttgcatatatattattattaacccattattcatacaatcactacctccttgatgttgattttattattcaagaaatttctagttataagatgatacatgccaaggagctctaagtttgtgtttagtttatatatcatttatttagagtttatgttctgagaagtattctaagcactttacaaatattaatatttatttctcaaaaaatcccatttcttatctttattttgaagataagaaaatagaagtgtagataacacaagttcaastcataattcacctcttagggagattaaaccttggacag

SEQ ID NO: 323722 - DNA, 579 bp, Homo sapiens
tgtatacctgtgtaacaaacctgtaccttgtgcacatgtatcctagaacttaaattatataaaaaacaaacaaacaaaaacactatttctccacatcctaaagataatgckctggatatgatccatctttttaatatttgccaatttgatatgtgaaaaatgtactctggatgttgcttttattttaatttccctattaagtaatcagcttgaacatctccatagatattcattgacattatttttctttttatgtgaatgagatatattttcagtgggttcaccaatgaaaaggtggtggcaatgaattgttaggcagtgtctgaactgcaaattgagacactggtgcccaaggcttaaatccaacactttccagtgatgttcaaactacagccaagagtagcgtacatatcctagaaatgctgggtgtattttacaccctctgggagaaaaatttattaatttctttggcatttttgttcttctaccaccctttcactttgtaacctttggcatatgtcttctcaactctcctcagtttacttctttataaaacaaagcctggcagaggtggcagat

SEQ ID NO: 323723 - DNA, 579 bp, Homo sapiens
tgtatacctgtgtaacaaacctgtaccttgtgcacatgtatcctagaacttaaattatataaaaaacaaacaaacaaaaacactatttctccacatcctaaagataatgcgctggatatgatccatctttttaatatttgccaatttgatatgtgaaaaatgtactctggatgttgcttttattttaatttccctattaagtaatcagcttgaacatctccatagatattcattgacattatttttctttttatgtgaatgagatatattttcagtgggttcaccaatgaaaaggtggtggcaatgaattgttaggcagtgtctgaactgcaaattgagrcactggtgcccaaggcttaaatccaacactttccagtgatgttcaaactacagccaagagtagcgtacatatcctagaaatgctgggtgtattttacaccctctgggagaaaaatttattaatttctttggcatttttgttcttctaccaccctttcactttgtaacctttggcatatgtcttctcaactctcctcagtttacttctttataaaacaaagcctggcagaggtggcagat

SEQ ID NO: 323724 - DNA, 629 bp, Homo sapiens
tggatcttaatcgtcttgggctcatcagacctcgcagtaaatgacatagagtaagtcatctgtaaatatttgttaaactgaattgaatcaatagagagagtttggagatttctaagagcagaaagwattgccttaaagttacacctattttgttggaatagcaaataagcacatggaaaatgctctatatcattagtcattaagggaatatatgagaaaatcacaatatgaaagcactacgcattccctatggtgactaaaatgttaaaactgacaataccaagtgcttatgatgttgtggaacaactggaactctcataccatattgccaggaatgcaaaatggtataaccactttggaaaatagttcggcagttttttcctaataaaattaaacatatatcttttatagtacccggaaatcccaccctaggtatttatataagataaacgaaaaaaatatgtccactcaaggatgtatatgtgaattttcacagtagctcagttaacaatagccaaaactggaaacaacacaaatgtccttcaactggtgaatgaatcagcaaattgtgatatgcccatttattggaatactactcagcaataaaagggaacaaactaccgacacaa

SEQ ID NO: 323725 - DNA, 570 bp, Homo sapiens
tggccttttcaattaaataaactcaaaattccctcttttgctttggctggtttgtgtcgataagagtcattgaaaagcagtgttagcagagggaagcttcctgtcagattctctgagcatttcatgaagatttcatttccacccactctgcggtgcacttacaaccctctgctcccagctgtccaggggcagtctgcctctctggcttgctggctctcaacacctctctgagtgagatatccgaccccctaggtcttctctcctccccttggcaacccacccctctaaattccagcccctgaggatccaagcccatggcctggtgttaactcccatccyctttatgactgtaatgtgtcccagacacaacagttgatgttctttaagctttgatgagtacttcctatttgccagactctgtgccagcctcattacatacataatctcatcgaatcttctcaataatgctgttgggtaggttttatgattattattcccattttcaagaatagaaaccagtggcttagggagatgaagtaactggcctgagaccaaacagctgagtcacac

SEQ ID NO: 323726 - DNA, 446 bp, Homo sapiens
agatgttgaatgaatgaatgaatgagtgaatcctaggatttttctctgagaaaggacatggaatacccactttggctggatcttcagagatttctcctgtatacagtacttgccaagactatctactgatgcctgaaaaatgataagggtatctggatttacggaaatttgtagattccgttttttgctcagcagatatygtggaaattcctctgtgatgaggtttaccaaatgctttcttgaaatacttgtggaacaaaattgcagtttgggctttcatcttccttaaactgtacaattaactactgatttttcccttaaggatttggataatggaaattttcctttaatttttcttccagccctccctctaaatttcataataatgaatgatgcacctcaaaatctaaatgccaaacaatggaaattacagaaagtacttgatg

SEQ ID NO: 323727 - DNA, 578 bp, Homo sapiens
atgatggtttcaataagagttttataaaaaatatatggaaacttttttctatatgactatttcttatattgatttttgataaatgccatagtttatagatgacatttctatggaaacttagggtgtagtttaaccatcagcagtgaaatgaatttgagcccatagcttttggaaggaccctggaaatggtacatttcaataataatgaccacaaaattatatccaaatagaatataactttggctgcatttctttgacatttggctwaatagctctgttccggtatacacattttgatttgacattgggctttcatgatagttagaatagtctaaattccatatatgtgtaatgacctaaaattgattccagcacatcctaaactaaacattagtagaaatcactctgggggatgtgaaaggtattctaaaagacctctggtttataaatcagtttaagcacccaacccaattaaacaagtttcttttgtactctgggacttcttcgagatatgaacatgataatatatcattacagactggattccctggtaagtagactctgacctagagattaat

SEQ ID NO: 323728 - DNA, 611 bp, Homo sapiens
catgactccaggtaactcaaatgaaccacagattatattctggcaaccttcaggcagacttaggcagaaaaaaatggactctttactctgcatactctcattttaagtattcaaggtcttctttgaatagatctacagtgaatagtcaaagtcatttcagccctggcactgtcttgttaagccatgtggcctactgtaacgcatcattgccactgtcactgactctgaaaaatgagcattctaaaacctatagctcccttagcctgaataatttggcagttctagacccagggtgctccaatgctggtaggttttcctcagttttctgctctggcaattaaatacttaggactttacgagaactcttagagtcatttgttgctctgagcaaatgattaaaaaactggggcagaacctcctcaaggaccacagktcaaggggagtcaatgttaagattaaagtcaggagcttgtctttgactcaaggcccatccccagcactgccttggcaccctggcccagaaaacccaatctcttcttctgtcaggtgcatagtgcaggtagcctgcttccttctttcctctccttttgttctacctgggttgctgttct

SEQ ID NO: 323729 - DNA, 524 bp, Homo sapiens
tggcagtgccaggaggcagcagtgaagatgggggcaggaggaggggtctccatgaacagagagtaactgacaaacacctgagctgtctgagggtgctaaaagatggtttggtcttcagcagagtgtttagaaacgcattgtaaattaagaaaccaaaattatttccatggcaaacataaaattgtatgagaaagaaaatataacataggacaacataatgagtccttgtgattaatatttaaataaccataatgataattaacactgaatactgatttagctcttgagagtgatacaactatattcatgggggtgggaggaagaggaagcaggaatgtgtgcatgtgtgtaggtgcgtgtgtgagagataggaaagagagggaaagagagagacagaacaagagagaacaggtgcagtgttggattgttggatgctaaaatggagctagacacatttggmtcattgttaaaaatacggatttaggagccagactgagttcaaatcctggctccacaatttattg

SEQ ID NO: 323730 - DNA, 529 bp, Homo sapiens
ttggatcattgttaaaaatacggatttaggagccagactgagttcaaatcctggctccacaatttattgccatcattactatgtaatcttgggcaagatatgtaatcattctatgtctcagtttccaataygcaaaattaggataataatagtatctgcttggctgggtggggtggcacatgctggtagttctagctgctcaggaggctgaagtgggaggatctcttgagcccagaagttagaggatgctgtgagccaagatcacacgactgcactgcagcctaggtgactgagcaagaccctgtttcttaaaaaaaaaaaaaagtatctgccacatagtgtcattgagaagattaaaatagtacatatgtgtaaagcacctgaaatattctctgggatactgtacgtgctttataagtgtttataagtgctatcattttgattttctatagtagaatgccagtagataacagggatactatttgaaactgaaaatctgtatgagcatgttacttagaaatagagaata

SEQ ID NO: 323731 - DNA, 521 bp, Homo sapiens
attgagcaaaaaatgtcacaggcccggtggaaaaaccttttcacagcctttcagggggaagtttacttccagcttttttcccttgcattagctcctgtcatctacaaaacaacagaacccagtggtgtcaattatatttgattgactgagtaaagcacacacacaaataagcgaaaacaatggacacaaaaatctatatatgactccccttgtcagagagaatgcttgtctcctccattttcatgcggcacggtgtcctgctgctcttggcttaaatgtttccttcagcccccaaactatcaccaattaagttagcagggtcttcaaaggtgtcaaacgactccctaggcaatcggctctaactgctgttcaataaatraggtctaatttatcagtttaacttcacttctaaaaacctaatgcttcacagtgctgggctccatttacctacggtgtgaggcgctgcggcagacagcatggagggtgaaagctatggcgcatctcctaacaacagcacactt

SEQ ID NO: 323732 - DNA, 556 bp, Homo sapiens
ctaattatgtctatataatgtagatataaagcatagtttcatatatataaatatgtatatatgaagtatactttactttcattaaataaaaaaggaaactacaaaatactatttgcagcatacaatctctgacttactataacttgtgatttttcaaatttacagtggtgagaaagtgatatggattcagtagaaactgtactttgagtatccatacagccattctttctcactttcagtacagtagtcaatacattacatgggatattaaaactttatcataaagtacaatttgtgttagatgattttgcccaactgtaggctaatgtaagtggtctgaacacgcttaaggtaggctaggctaggatacgatgttctacaggttaggtgtattaaatgcatttttaccttatgatattttcaatttgtgatgtgttcattgggatgtaaacccacggtaaatttaggagcatctgtaacctcatttttttttttgagtcggagtcttgctctttygcccaggccggactgcagtggtgctatctcggctcactgg

SEQ ID NO: 323733 - DNA, 506 bp, Homo sapiens
aatcatggactcctaaacatgtggaggggagagattttaaagaatcatccaattcaaaaagccttattttataagtcagaaaactgagggagcggacaatgatatacagcaagtcctcatgtgatggcatggacagattcttggaaattgcgactttaagcaaaatgaagtataatgaaactaattttaccattttagttcctatgacatatttctggtcacaaaaacagcaccaaacttctaaataaagaccaaacacttctaaagtgaaacattgaaacaaatatgagctatacatacatttaagaaagactaatacaaacaagtaagataattatttatctgatcattccagtcagggtttgggtggctggagcccatcctggaagttcagaacacagggcgggaaccatccctggacaggacaccaccttaacacagggtgcactcacacccacacacattcactcatgstgggacaactgagacacagcagttcacctaat

SEQ ID NO: 323734 - DNA, 525 bp, Homo sapiens
aggtacagtcaggcaatgaaataattgcaccctctgagacttcatgtgtcaagatgaagaaaatcaattcctatcacccagggatctatcacttcaggagagcactaaaaactgttggctaccctgtggtactagagtctttaaaggtaatttttacaagaaaaacgacacaaattaggagtcacgtggagcccattctttaggaatctatatgaagggcagagagcggctaaaataaaccaagagaggaattttcctctgtactatcctttycaggggcatttactgaagaaacaaagccaggacacactcaaatgcctgctggatgtagaaaaacttgcatatgctgaatccattagaaaaccgttcaataacagtcttccttgtgaaaatattaggcttgtaatggttccaagttcagcatctccacaggttatctgttacataagtggctgtggcggatgtaggatggctggacagcatttgcagttctaatgggcttctatattttccagttgggtaaga

SEQ ID NO: 323735 - DNA, 497 bp, Homo sapiens
tccaatggcgtggtgcctggcacacataggaaacattttacatgtgtatataacatataaaaaacatgtttttatgtaatatatattatacacacacacacacacacacacacacacacacacactactagaagttaccacagcacaaaataaactatccctaagcatgactcccactaaagaaagactgtggtaatagtgttgtctactttttgaacttgagattgtcttacttgaaaaagcataatctcttgttgacaaygccacagtttacttctactaggaaagtttatgaagccagagagaatacagttaaatgcatgagaagcaattttctttgccacaaacacaattaaatctattttaacacagtactattattttttaagactgagattggtattttgtggttccagttttttaaaaagataactcacagtcacattctccaaagggaggtagtaatttttttttttaactgcaaacactggattgtg

SEQ ID NO: 323736 - DNA, 497 bp, Homo sapiens
tccaatggcgtggtgcctggcacacataggaaacattttacatgtgtatataacatataaaaaacatgtttttatgtaatatatattatacacacacacacacacacacacacacacacacacactactagaagttaccacagcacaaaataaactatccctaagcatgactcccactaaagaaagactgtggtaatagtgttgtctactttttgaacttgagattgtcttacttgaaaaagcataatctcttgttgacaacgccacagtttacttctactaggaaagtttatgaagccagagagaatacagttaaatgcatgagaagcaattttctttgccacaaayacaattaaatctattttaacacagtactattattttttaagactgagattggtattttgtggttccagttttttaaaaagataactcacagtcacattctccaaagggaggtagtaatttttttttttaactgcaaacactggattgtg

SEQ ID NO: 323737 - DNA, 555 bp, Homo sapiens
gctaaacaagggatggattattcatgcatccccttttcagatcatatagggtaactttctgaagttgccatggcatttgtaaattgtcwtggtgcttgtgtgagtgtagcagtgaggaagaccagaggacactctcaacgccatcttggttttgatgggtcttggccagcttctttactgcaaactgttttaacagcaaggtctttatgacctgtatcttgtgctgacctcctatctcattctgtgacttagaatgccttaaccatctgggaatgcagcccagtaggtctcagcctcattttacccagctcctattcaagatggagttgctctggttcacacacttctgaaactttgatgtgttttatctgatgcaaccagcgtggtggtcctataaagaattgtttctatccctattttacagatgagagaataggactttagagaggttaagtaatatgctgaagatcatatagctaataagtggcacagccagaattttaactggatctgaagaccccagtatccatgctctaatatcatccaactgctaaa

SEQ ID NO: 323738 - DNA, 568 bp, Homo sapiens
cacctcaactgtggcaaagcatactttcattttataagcctagaggttctcataacagggctgtaagcccataaacacagtgacacatttacacggatcaagttcaaagatttaaaaatgtatctaatgtaccacatggatgtgacttagaaatagcttgctttcaattcttattgaaaacaaattgtattgaatatgctgcaacccaatccaagtttggcaaactaatgctttgacctgaattaatattttattaagaaatattaggaaatcaaaggactttgagagaaaaaaataaatttggtcatgaattttccacaattacrgagttccatagaacacatgcaaacaaaccccagaaagccctaaccagcacatttatcttgtgcttgtacaccagtgttctgctttgtaaactcctagcctgctgggactcttctttctgcaccttttttttcaggctcagtttctggtgcatccggataatttgattgacaaaaatgacctcttgaggccaaaaaaagtgagtatttccagatttagattaccattgaaaagaagaagatta

SEQ ID NO: 323739 - DNA, 568 bp, Homo sapiens
agtgagcatcttactaaagctaacattctctgagagccttcagagatgtctaagttaataaaatcaagttctttctctcgaggagctcactgtcagtagcctaaacctcttctttaagcagatctgtgactcaagagcaaattttgtgttaattctattgattttttttttttttgagatggactctcactytgtcgcccagcctggagtgcagtggtgtgatctcagctcactgcaacctctgcctcctgggttcaagcaaatttcatgcctcagtcccctgagtacctgggactacatgcctgtaccaccacccagctaatttttatatttttagtagagacggggtttcaccatgttggccaggctggtctcaaactcctgagcccgagtgatctgcccatcttggcctcccaaagtgctgggattacaggcatgagccaccatgcctggcctaattctactgatttttttttcttcaacttttattttaagttccagagtacacgtgcggaatgtgtgggtttgttagataggtaaacgtgtgccatggtggtttgctgcacag

SEQ ID NO: 323740 - DNA, 568 bp, Homo sapiens
agtgagcatcttactaaagctaacattctctgagagccttcagagatgtctaagttaataaaatcaagttctttctctcgaggagctcactgtcagtagcctaaacctcttctttaagcagatctgtgactcaagagcaaattttgtgttaattctattgattttttttttttttgagatggactctcactctgtcgcccagcctggagtgcagtggtgtgatctcagctcactgcaacctctgcctcctgggttcaagcaaatttcatgcctcagtcccctgagtacctgggactacatgcctgtaccaccacccagctaatttttrtatttttagtagagacggggtttcaccatgttggccaggctggtctcaaactcctgagcccgagtgatctgcccatcttggcctcccaaagtgctgggattacaggcatgagccaccatgcctggcctaattctactgatttttttttcttcaacttttattttaagttccagagtacacgtgcggaatgtgtgggtttgttagataggtaaacgtgtgccatggtggtttgctgcacag

SEQ ID NO: 323741 - DNA, 566 bp, Homo sapiens
gggtggcagtatataaccccactcacagcacatgctctgaattcaactgcctgggtttgagtgtcagcgccactgttaactatgaggcatccagtgcacgattgaaactctgcgtctgtttcctcatctgtaaaatgagaaggagsgtgcaagtagctcagaggttgccgtgaggaataaatgagataccgtacattggcactttgcactgtgcctggcagagagaaggcacactgctgtcgttttgatttgggccttcacaggggcaccattgacagagggctctggaagcagaatctgtgaagacactcttaagcagtagggagcacagcttttccaacaagaccaaagcatctggaaatgaggcattaggcaggaaaggatggggtgtgtctgttaggattcagtttccacatgggaattcacagctcatggtttcaaatcagatcctagacggtaaaaacatacaaaaaacataaaatcttttcacaccctagtcaccagaagaattcagaaatttctttctcagggagattctagagtctgactcttcaggccaaattctg

SEQ ID NO: 323742 - DNA, 566 bp, Homo sapiens
gggtggcagtatataaccccactcacagcacatgctctgaattcaactgcctgggtttgagtgtcagcgccactgttaactatgaggcatccagtgcacgattgaaactctgcgtctgtttcctcatctgtaaaatgagaaggagggtgcaagtagctcagaggttgccgtgaggaataaatgagataccgtacattggcactttgcactgtgcctggcagagagaaggcacactgctgtcgttttgatttgggccttcacaggggcaccattgacagagggctctggaagcagaatctgtgaagacactcttaagcagtagggagcacagcttttccaacaagaccaaagcatctggaaatgaggcattaggcaggaaaggatggggtgtgtctgttaggattcagtttccacatgggaattcacagctcatggtttcaaatcagatcctagayggtaaaaacatacaaaaaacataaaatcttttcacaccctagtcaccagaagaattcagaaatttctttctcagggagattctagagtctgactcttcaggccaaattctg

SEQ ID NO: 323743 - DNA, 587 bp, Homo sapiens
ctcccattctgtaggttgtctgtttattccattagtagttttttctgttgtttagaagctctttagtttaattatatcccatttttgcttttgttgcaattgcttttggtgtctttgacatgaaatctttgctgttcttatgtccagaatggtattgcctatattgtcttccaaggattttgtggtttgggatttwacatttaaatttttaatccaccttgagttgattttttgtatatggtagtgaggaaggggtcaagcttcagttttgtgcatatagctacccagtatcccaccactattgaatagggagtccttccccattgcttgtttttgtcagctttgtggaagatcagatggttgtaggtgtgtggtcttatttctgggctgtctattctgtttcattggtctttgtgtctgtttttgtcccagcaccatgctgttttggttactgtagctcagtagcatatagtttgaagttggatagcatgatgcctccagcttttttctttttgcttaaaatttccttggttattctgtctctgtttttggttccatatgaatcttaagatagttttttttgtagt

SEQ ID NO: 323744 - DNA, 611 bp, Homo sapiens
caaatataccataatttatttagtcagtcctcatctagattgttccaggcttatgctagtaagacaatayggacataaatatccttgaacacacactttccctcaccaaacctatttttcaggatacattcctagaagtagaattgccaggtcaaagaggatgtacatttgaaattttgacatattagcaaattgtcctccatagaggccatgccagttaacacacctaccgctgattattttcagctccaacttgcaaattttagaatataacatcacatggcattttttccaaggatagtgatgggattttggctgattcattctctccttttccctcatgcccctggtggccaatcacaaggatgtggaagtcagctgcctgggaatagtctgaggaaagagaaccaagtgaagataacttatccatagaggcactgaccccggagattcaccttattacacctggatctggtttaagtacaaaaatgtgggtcttctctttgtgatttctccacgttcacacagcccatacataggtgtcaggagtcgaacttgaaccctgctccagagcgttcttgtgactttggagatcatagatttgtaagcat

SEQ ID NO: 323745 - DNA, 524 bp, Homo sapiens
taacagggtgataccctgtctcaaagaaaaaaaaaaaaaaaaaaaaaaagacaacaaaaacacacacacacacaaaacaaacaaaaaaacccaaaagcccaaattcataccctcacagagcttactgtatagtgggggagactcaaaataaacaaaatggatatgttacataaggaaagcatagtgggtaggactgtgcactctccargccgacctcctggtgtttcagtcctggctccgctgcttggccattttgtaatcttgggcaagctacttaatttctctgtggctcagtttcctcatctgtgaaatgggatcaacaggtgactcactctgccatgctgctgtgagggttaaatgaaatagtgcatgcaaagctcttagaacaggtccagcatgcagcgagccttccagaagggtttgctgtgattttgttgacattagatggtgagaagtgctctagagataaatgaaaggaaaggatcgaggagtaggggatagtttaagtttcagatagggccatc

SEQ ID NO: 323746 - DNA, 524 bp, Homo sapiens
taacagggtgataccctgtctcaaagaaaaaaaaaaaaaaaaaaaaaaagacaacaaaaacacacacacacacaaaacaaacaaaaaaacccaaaagcccaaattcataccctcacagagcttactgtatagtgggggagactcaaaataaacaaaatggatatgttacataaggaaagcatagtgggtaggactgtgcactctccaggccgacctcctggtgtttcagtcctggctccgctgcttggccattttgtaatcttgggcaagctacttaatttctctgtggctcagtttcctcatctgtgaaatgggatcaacaggtgactcactctgccatgctgctgtgagggttaaatgaaatagtgcatgcaaagctcttaraacaggtccagcatgcagcgagccttccagaagggtttgctgtgattttgttgacattagatggtgagaagtgctctagagataaatgaaaggaaaggatcgaggagtaggggatagtttaagtttcagatagggccatc

SEQ ID NO: 323747 - DNA, 524 bp, Homo sapiens
taacagggtgataccctgtctcaaagaaaaaaaaaaaaaaaaaaaaaaagacaacaaaaacacacacacacacaaaacaaacaaaaaaacccaaaagcccaaattcataccctcacagagcttactgtatagtgggggagactcaaaataaacaaaatggatatgttacataaggaaagcatagtgggtaggactgtgcactctccaggccgacctcctggtgtttcagtcctggctccgctgcttggccattttgtaatcttgggcaagctacttaatttctctgtggctcagtttcctcatctgtgaaatgggatcaacaggtgactcactctgccatgctgctgtgagggttaaatgaaatagtgcatgcaaagctcttagaacaggtccagcatgcagcgagccttccaraagggtttgctgtgattttgttgacattagatggtgagaagtgctctagagataaatgaaaggaaaggatcgaggagtaggggatagtttaagtttcagatagggccatc

SEQ ID NO: 323748 - DNA, 583 bp, Homo sapiens
ttacagacaaaaatctctcttgaacatagccaccaaaatcattaatatattaaattctaaaatatatataaaagggtataatacacttataaagtagggtttatcccagaaatgcgtgtttgctttaacatttttttaaaaaagcatgaaggtagtatattagatgagattgggtgcattcagggtggtatggccacagacaagctagtatatcagcctaacagaataaagcctaaaaatcctataattatctcaatagattcagaaaaccaatttgataaacacttattgatcatagaaaaatctcaacaaccgagaattaaaggaacatctttaatctgataaagggtacctactaagaaattataaatagcatctttatgtatggaaagcctaaactctttcccttaacmataataaaatgccatatctgatcttaccacctcttttgaaaaatctactggaagtgatattaattgcagaaagataagaaaaaaagccaaatgattataaaggaaacagtaaaaccctcttcatttgtcatgacattttcgtgtatctagaaactgctagtgtaattaat

SEQ ID NO: 323749 - DNA, 575 bp, Homo sapiens
ttctgtgaaataaatatttattaagtaaaacatacacatccctgtgccagacaacataggagatactgtggtaacagagttcctgacctacaggacctgtaagaataaaagcacaaccaaaatatgaaatgtgtaatacagtaaaagtggccttacatccttcgcatcaagaagtgaaattcattcttcaatccttaaatgaaaactggctctctctatttcttttatcaatggaatgagatagtctagccmataggtgaatggaagaacaggttgaaaaaaaaagaaacagggcacaccagccagcagctggtgcagctgccggacatgaataagaccgtctggagccttcctgctgagctgagctcccagctgaatgcagacacatacatgaccataggcaaactcagcagagaaacctcctagccaatcctcaaaatacatgaaaaataatattggctatttgttatccactgaggacttgggggtggtcaacataaagtggtatttaaccagaaacaaaacacatgttctataaaagagcaaaaaatatatttcatataaggaacgacaac

SEQ ID NO: 323750 - DNA, 531 bp, Homo sapiens
tttattaatttcaaagaatccttttatttctgacttaattttgttgtctatccaaaagtcatttagaagcaagttgtttaatttctatataattttgtagtttggggggattttcttggtatttatttttattctcattccactgtggtctgagtgtattggtggtatgatttcaaatttttaaaatttattgagacttgctttatgattcagcatgtggttaatcttggagtatgttccttgtggagaccagaagaatgtayattttgtgattgacgagtgcagttttctgtagatgcctattaggtccaaatggtcaagtgtcaaatttaagtccagtattttttttgttacttttctgccttcatgatctatctaacactgttagtggggtgtcaaagtacccactattattgtgtggctgtttaaccctttttataagtctagaagtacttgttttatgaatccaggtgttccaatgtttagtgcataaataggtgcatatatgtttaggataactaagtctgcttg

SEQ ID NO: 323751 - DNA, 531 bp, Homo sapiens
tttattaatttcaaagaatccttttatttctgacttaattttgttgtctatccaaaagtcatttagaagcaagttgtttaatttctatataattttgtagtttggggggattttcttggtatttatttttattctcattccactgtggtctgagtgtattggtggtatgatttcaaatttttaaaatttattgagacttgctttatgattcagcatgtggttaatcttggagtatgttccttgtggagaccagaagaatgtatattttgtgattgacgagtgcagttttctgtagatgcctattaggtccaaatggtcaagtgtcaaatttaagtccagtattttttttgttacttttctgccttcatgatctatctaacaytgttagtggggtgtcaaagtacccactattattgtgtggctgtttaaccctttttataagtctagaagtacttgttttatgaatccaggtgttccaatgtttagtgcataaataggtgcatatatgtttaggataactaagtctgcttg

SEQ ID NO: 323752 - DNA, 531 bp, Homo sapiens
tttattaatttcaaagaatccttttatttctgacttaattttgttgtctatccaaaagtcatttagaagcaagttgtttaatttctatataattttgtagtttggggggattttcttggtatttatttttattctcattccactgtggtctgagtgtattggtggtatgatttcaaatttttaaaatttattgagacttgctttatgattcagcatgtggttaatcttggagtatgttccttgtggagaccagaagaatgtatattttgtgattgacgagtgcagttttctgtagatgcctattaggtccaaatggtcaagtgtcaaatttaagtccagtattttttttgttacttttctgccttcatgatctatctaacactgttagtggggtgtcaaagtacccactattattgtgtgrctgtttaaccctttttataagtctagaagtacttgttttatgaatccaggtgttccaatgtttagtgcataaataggtgcatatatgtttaggataactaagtctgcttg

SEQ ID NO: 323753 - DNA, 531 bp, Homo sapiens
tttattaatttcaaagaatccttttatttctgacttaattttgttgtctatccaaaagtcatttagaagcaagttgtttaatttctatataattttgtagtttggggggattttcttggtatttatttttattctcattccactgtggtctgagtgtattggtggtatgatttcaaatttttaaaatttattgagacttgctttatgattcagcatgtggttaatcttggagtatgttccttgtggagaccagaagaatgtatattttgtgattgacgagtgcagttttctgtagatgcctattaggtccaaatggtcaagtgtcaaatttaagtccagtattttttttgttacttttctgccttcatgatctatctaacactgttagtggggtgtcaaagtacccactattattgtgtggctgtttaascctttttataagtctagaagtacttgttttatgaatccaggtgttccaatgtttagtgcataaataggtgcatatatgtttaggataactaagtctgcttg

SEQ ID NO: 323754 - DNA, 575 bp, Homo sapiens
ggattgctgggttaaatggtgtttctgagtctagatccttgagcaatcaccacgttgtcttccacaatggttgaaccaatttacactcccaccaacagtgtaaaagcgttcctatttctccacatcctctccacatctgttaaaacctgactttttttttttttttttttttgagatgaagccttgctctgtcaccaggctggagtgcagtggcactatcttggctcactgccacctctgtctgcagggttcaagcaattctactgcctcagtttccagagtagctgggactacaggcacgcactgccacccccagctattttttaaatttatttatttttgtattttcatagagacggggtttcaccatgttgcccatactggtctccaactcctgaactcaggcaatctgcctgccttggcctcccaaagtactaggattataggcrtgagccaccgtgcccggccatttctcactttttaatgatcatcattctaattggcatgagatggtatctcatcatggttttttgatttggatttctctaatgaccagtgatgatgagctttttttc

SEQ ID NO: 323755 - DNA, 590 bp, Homo sapiens
cagccattgcttttttctttccctttatatttgctataatttccttgaattatatttaccttgtcattcaccacaatttccctgtagrtgcttaatttttaatataaataatagtatattgaaaaaccacatttttactcaagttccctctggctctctcttcttcttcaccaatttattctttaataacaacgtctgctttatcattggctcttccttagattacttattttaaaaatttttctaaactttctgttcttcatagataaatatcctttgctttgtataaaaattttgaatacatacaggctgccttgactagcaacacattcttagtcattataaattctgtgatggatatgggaccgatcagggggccatctccttttgacatatatttgttccattttgtatattggtgtacaaatgagacacgtttaaaaatctactattaatgaaggggaaatagcttctgaaatcctgcaaacacataaataaactcagtaaaatcaaatattttcattcaaactttattcattaagtacctattaacgttagtaactgtgttagtcatgagtgtactaaaaaat

SEQ ID NO: 323756 - DNA, 548 bp, Homo sapiens
caagaaatactacaaccactgacactcttcagctttttattcctagtcatgttatggcaagtgcagaattagcaagtgccttgcaatctaattatggtgatgggatatgttctttgttgtatatcgggaaaggagagttttgcaaagttggatactgattttggggaattatcaaacattgttctttttagattgtaaaataatttcaggatttgcatctttgattacattttcttttcctccttctattgccagccagtttcctagaaatgcaacaaaaataaatttggcaaagcaggtgataagagcaagttttgattggtaccattgttactctgttgtgtcagacatcatgttaaacaatttgctcaactactacaaagagataaactatacttttggggtayactctaatgtatgcaattcttaactgctgatctacactcacattttacatttgtattaagatccctataatatcaaacttcaaacctacataattaaatcatgacattgaatcatgaaagccaaacatattctatcatggg

SEQ ID NO: 323757 - DNA, 548 bp, Homo sapiens
caagaaatactacaaccactgacactcttcagctttttattcctagtcatgttatggcaagtgcagaattagcaagtgccttgcaatctaattatggtgatgggatatgttctttgttgtatatcgggaaaggagagttttgcaaagttggatactgattttggggaattatcaaacattgttctttttagattgtaaaataatttcaggatttgcatctttgattacattttcttttcctccttctattgccagccagtttcctagaaatgcaacaaaaataaatttggcaaagcaggtgataagagcaagttttgattggtaccattgttactctgttgtgtcagacatcatgttaaacaatttgctcaactactacaaagagataaactatacttttggggtacactctaatgtatgcaattcttaactgctgatctacactcacattttacatttgtaktaagatccctataatatcaaacttcaaacctacataattaaatcatgacattgaatcatgaaagccaaacatattctatcatggg

SEQ ID NO: 323758 - DNA, 594 bp, Homo sapiens
taaacttaactttcagtttttagactgggaaaaatgtgccaattctttccaaggacatcgtattaagtgaaacagaaaatacaggaaagcattctgctkctaggacaggttatggacagctctgtgttgtgtgtgctggagaatgttctggagcttttatctttacagctctatagcaagtaactggagacatttttccttgttgataaatgagtgaagggccaggggaaggaagttagaacaaaaattactcttagaattcttctactttaagaacaataatacctagcacgtaggtcttgccatgtacttggttttacaaacatttaattctcagcacaaccttgttatttaggaatatccatatcctatttacagttgtggaaatctaggctctaagaggtgagcattcagcccaagatcatgtagttgataatttgtagctggaagtcaaatgcagacctttatgtttccaaaacctatgttcaaatttgttggcctctactctgtttgtttaaaatccagagtactgtttcatgtagatgcattctgtaagatttttgtgtgtgcctgtttttgttgctattggtatca

SEQ ID NO: 323759 - DNA, 594 bp, Homo sapiens
taaacttaactttcagtttttagactgggaaaaatgtgccaattctttccaaggacatcgtattaagtgaaacagaaaatacaggaaagcattctgcttctaggacaggttatggacagctctgtgttgtgtgtgctggagaatgttctggagcttttatctttacagctctatagcaagtaactggagacatttttccttgttgataaatgagtgaagggccaggggaaggaagttagaacaaaaattactcttagaattcttctactttaagaacaataatacctarcacgtaggtcttgccatgtacttggttttacaaacatttaattctcagcacaaccttgttatttaggaatatccatatcctatttacagttgtggaaatctaggctctaagaggtgagcattcagcccaagatcatgtagttgataatttgtagctggaagtcaaatgcagacctttatgtttccaaaacctatgttcaaatttgttggcctctactctgtttgtttaaaatccagagtactgtttcatgtagatgcattctgtaagatttttgtgtgtgcctgtttttgttgctattggtatca

SEQ ID NO: 323760 - DNA, 612 bp, Homo sapiens
tttgttcaaatgaaaccttacctgcagtagggtttgtttagaggtggcaaakttaacttctagtgagaattatcttgaggaggtgaatctcatcagtggaatcttgccatttgtgatgcaaagaaaaacattaaaatcaagggagctcagaagggttgagtccagctccagaaatacagcatctccggtcccatttcaaacctgctgaaatataatccacattttaggaagatctcagccattcttatttatattaaaagttgagaaccactgtcgtaaaacaagaggtgcaggggaacttctaatttattcttataaaataacgtttggtcctcaatatatgttgtttattaaaatcaactatgggacttaaaaaaatgaagtagctgtgggtttattgcagacctgtgaatcataaaatacatggtgtgggacatggcacatggcatagataattgagaaaaattaatacaccacccccaagacatatacataaacacaaatacacttaatatgctctctccccccccaacataactacattaaaatgtatgtgggtgattctaacatgaccacagttgagaaaactgagcgaagtctcttgatgcagaa

SEQ ID NO: 323761 - DNA, 612 bp, Homo sapiens
tttgttcaaatgaaaccttacctgcagtagggtttgtttagaggtggcaaagttaacttctagtgagaattatcttgaggaggtgaatctcatcagtggaatcttgccatttgtgatgcaaagaaaaacattaaaatcaagggagctcagaagggttgagtccagctccagaaatacagcatctccggtcccatttcaaacctgctgaaatataatccacattttaggaagatctcagccattcttattyatattaaaagttgagaaccactgtcgtaaaacaagaggtgcaggggaacttctaatttattcttataaaataacgtttggtcctcaatatatgttgtttattaaaatcaactatgggacttaaaaaaatgaagtagctgtgggtttattgcagacctgtgaatcataaaatacatggtgtgggacatggcacatggcatagataattgagaaaaattaatacaccacccccaagacatatacataaacacaaatacacttaatatgctctctccccccccaacataactacattaaaatgtatgtgggtgattctaacatgaccacagttgagaaaactgagcgaagtctcttgatgcagaa

SEQ ID NO: 323762 - DNA, 621 bp, Homo sapiens
aactaacatgttacatcattgtatgtatgagaagataaaaaatgaagaattaatgactgatttatccttatgtgggaaattagaggtgatgtaaaaatgaaaggaaattacatcattctttcagacaaagcaggctggtccaggtattagccacatttaagctctcatcagaagatcaaatgaggaattgtttctttttaggctttctcagactgttggcagaactcatctccttgtgaccataggactgaggcctccattttattcctggctgtcatctggggcttgcaagcctctagaggctgaccacagtcctctgccacctagccctcttcatagtcaggaaagaaaaacaaaaaacaaaaaacagggctttcagccatacaattgcaagagaatgagcttggaagtggattatcccctagtggagtttccagtaagaatgcagtccaactgacgaattgattgtgggcttgtgaaatcctgagcagaggatccagttaggacatgcctgggatcctgamccacagaaattataagataataagcatgttttttaaacttctaagtttgtgcaatagaaaattaatacaatttcagtatcataagtgggtgataatt

SEQ ID NO: 323763 - DNA, 567 bp, Homo sapiens
catgtaataaaattcagccacatatagagaatgcagatactaaatgccctgtgatatcttgtattaagataccaacagttattgatgagaactatctacaacatcaagacttgattaggtagaaatagatcctaagacacagaaaaatactgttgaagctataagataatttagtcaaaaaacagctaattatttgtttcaaatttcatatgtatagaaaaagtcttaaaatatctcacccaataatcatacaaaaatagtggtataaaggagaaattaattcgaggtcatactgacttaacagcagaaaagaggcttgagctaaatatcttaactcctggttcagttagtattctamtacattacactggttttacatcattattatccttgagtgatcatccatttattcattcatttgttttttcaacaaaatgaatgccaacagtgtgatattcgaagtaactttttaggtaatgtgggaaatataatgataataaaaatgtatactattaacaacactgcacacaagtaaatagtacaaaatagatctcaggtttttctttt

SEQ ID NO: 323764 - DNA, 594 bp, Homo sapiens
gcctaaaaacaaagatttctatagatttcctttggtaatgtagcattaatgtggcatctttctcctaaaagcctgaggctttctataaccatgactaaattcccaacatgccactttcaggaaaacagaagaagctgttaatctgccgagagctatgaaaagtgagattctaagcagttgagcagattgtaccaggtgagagtaaaccaaagcaaaaaaaacccgaagtaacagcagagcataattaaacactaggtcctgtatagtctaaacctttgacctgtagacactgtgcttcagcctggtcataagggaaaataagcctaatgcctatcagctttaaatctttcagaaaaataataatataccaaatcatattatataatgcataataacaactttcaaaaacctgtcccagaatttatgattcyttggggaggtggggaagagctacttatagtcaatctgtgcatacaacagaaaaagaaataatgaacaattgtacttgacgaatatttactcctcctctccttttgagatatagtgcaacatactatcagaagtatgttattgtcactatactaaaggagtttt

SEQ ID NO: 323765 - DNA, 509 bp, Homo sapiens
atacaaatagacaaggagaggcttcacaattttgtaaaacctttaggggacagaaaaggagaaagatgtttcttcatctttggaatacagtagacatgaccctaaccccacaaattcagaaccctgggcaggtccctgagagccaaatgagacscatatttcagagcagagatagctggcttgagtcttgggagaggctaaagctacaggacactaggtgatagatgaggcagcattgctggaagtgagcacaggaagcattttaagatggcagaagcaacagcagaacagtaatttggataaaccctaagacagattcctgtactaacttccctccttcacctcctagctctgtgtgcttgttcaagttacatgacccactgaacttgtttctttaactgaagaataagactatcaacaccaaacttaaataatttttatacatatttggctaggaaaacagagccacttaatgtgttctaagtatgaagggtttaatatgaaaaagt

SEQ ID NO: 323766 - DNA, 482 bp, Homo sapiens
gacaatgataataaagaaaagaaaaaaaggccttatcttttatttacacaagttttacttgttctctaaggtctatgccaagtgattctccttcacaatttcctgtcctttttctctggatgaaatccatccccttttcgatctcttataactcctttctcatgtttctctgatccactgtggtttattctttcatggattggagctcttctagaggctcatatccttgtgttatgtttctgctaggctgtcagcttcttaagcmtgacttctcattctgtggttctcttgaaaagagtaggtgcccccaaaatatttattattagcatcaagctcttatgaacacagaattacaaacaaaaatggctaaacttaaattatctgtgatatctttgatgtctaaaattgaagcattgttatttttaaagaaattctcacactacaaatgtatattttattttttatttacatgttgaaaaaat

SEQ ID NO: 323767 - DNA, 548 bp, Homo sapiens
cagtatttctcctggcttgggatgtgcagttcgaatatcggggtcaggctcctctccctttggaaagaggagggaagaataggaaacgactacgccctgtggcttgagtccccgttcagccacagtacacagaaaccaggtaaactcctaattgtttgactctagtacctgacttccmgatggcacttctagacccatgtctgggagaccttgctactctgaagggaaaaacacaggcctggctgtatttgccactatgtgatgtagagccctggaccttcagtgtacataggctgaagccaaggagtggttacagtaggcttcatgtgagacccagcctgtgtgctggcttctggtgtaacctggcacatcataatggtggtggtgacaggggtgctcttgccattttatcttcagctttaggtggatcagagcgaaagagagagactctatatgcttgggaaaaagtaacgagaaagaacaaattctctgcctggtaatccgagaattctcccgaatcgtgtccaagattatcaaggcagagcttc

SEQ ID NO: 323768 - DNA, 548 bp, Homo sapiens
cagtatttctcctggcttgggatgtgcagttcgaatatcggggtcaggctcctctccctttggaaagaggagggaagaataggaaacgactacgccctgtggcttgagtccccgttcagccacagtacacagaaaccaggtaaactcctaattgtttgactctagtacctgacttcccgatggcacttctagacccatgtctgggagaccttgctactctgaagggaaaaacacaggcctggctgtatttgccactatgtgatgtagagccctggaccttcagtgtacataggctgaagccaaggagtggttacagtaggcttcatgtgagacccagcctgtgtgctggcttctggtgtaacctggcacatcataatggtggtggtgacaggggtgctcttgccattttatcttcagctttaggtggatcagagcgaaagagagagactctatatgcttgggaaaaagtaasgagaaagaacaaattctctgcctggtaatccgagaattctcccgaatcgtgtccaagattatcaaggcagagcttc

SEQ ID NO: 323769 - DNA, 539 bp, Homo sapiens
tttcacgtctcaccggggctctgcggcacccagccccggcgctcaggcagcccagagggagctagtccctgatcaagtcccgcaggcgccggctggccgagccgagtgcggggcccactgagcctgcgccaacccagaacccgcgcctgcccgcgaacgcggcgcgcagttcgggctcccgccagcacctctcccttcacaccttccggtgagcagagggagctggctcsggcatcggccagccccagagaggggccctcatagcgcagcggcaggctgaagggctcctggcgtgtggccagagcggaggcccaggaggcgcggaaagcgagccagggctgctagcacgttttcacctctcatcactactatcatgatcactactatcatatttgtgagtattatttcatactgtgtatatatctcaatttgttattctagtcaccagttagtggacacttagaatggttataattttgggctatcatgaatactgtttgctatgaacactccatgtataagtctttgtgtgaacatat

SEQ ID NO: 323770 - DNA, 583 bp, Homo sapiens
gatctcttttgtaactgtgagctatacaacctggggttagggaagggatgatgacagcatgctcttgtctgctccagctggtgtctcataatgtcccctgccccccaccaaccccaactttactgtctctcgacctagttcagcaccaggacttgcctaagagctgcagtccttatggccttgactgcctttcaagtttacttggagacacagagtactgtagcagccactcaagttcagactgctgggatcagagattcccctctggctagggctggtttaaatgctcccactgtgggagtgtccctaagttctatctggtttttctttctgctctaacaggatagcaatgagttcaatgcctcacaactactgtgttctcttcttcccagcacccagagatactcttggcagcatgctgasggtggtgttgtggggggcttccatgattgaagactgtgttttctatctcttcagtgtctctttcagtgatataaaggtaaaaccaggtgctgtaagtgctcacctggatttttggtgcttttaaaggtgttttttctgtgtggatagttgttaacttggt

SEQ ID NO: 323771 - DNA, 650 bp, Homo sapiens
tctacacaaagcagtatgtttttatttataccataattatttttatgggtatgataattagtattcccttattataactaatcaactccaaattaataaatttaacggcattattttagttcacatgtcatccttccaatataggatattattgaccactctcttttcttcatgatattttctcagtccttgcatttagacacgtaataatgttattttcatgtaaaatgttctcttttkgcctataaaactacatatataattgccataatttcattctagatttttttatcttagaaacttcatcactttaatatctgtctctgcaagcctaaggaagtaagtgtgagtcatatctaacattcccaggaaagacacctgcataggcctgtgatgtttaacagtgacccaacagcagttaataggaactgtctgaggaaactctggaattggggtataaaaatgactcaagtggagtagggtaccatttatatttaacagacatttagtaggcagcaataatgtctcagatatggactaggccataaatatacacaaataaataagacaaatgactcacattccagcaaaaagaaaatatgaaagtaaggtgatgaactaatatgtagcaaacctattatttgccaaaa

SEQ ID NO: 323772 - DNA, 490 bp, Homo sapiens
taatgcactctattccaaaacaaccactcgtccatgacacacacacacacacaaacacacaaacacacacaaagcatgacattttcaaggaactaaaatcmtggtaggcattcatgattgtgcaagagacacaaatcgcacaaggacacaccttaaagaaactcatagtcaacattaatattttttttcttttttctcttttttattatgtctgcaacaaaaagtttatggaggcttctaagtaagagtgaactgatgatattagtattttataagcatagttttttcatttgtactccaagaagaatgaattaaatgaaagaaaataagcatcataaatctgactttgattttttaagcataaaagacaaaaaacattcctatgcatagttaaaaattatttttattttctcaggtcttaaatagactttttttttccacattctgcaccagagcacaaactgaatccctggttactcggtaaaacttc

SEQ ID NO: 323773 - DNA, 544 bp, Homo sapiens
agaacaatcttgaaccaatgaagtctcaccccaaggctcaggtttttaacaaatgttttataatgggatatactattaaacacaggtcatatctgaattcaaacttattaytaactttgtatcttctatacagtcacacatgctcaaaacatatatacaaatttgaggatttgctttttagctcttcttattggttactgcacttgttgtttgtgattctaattcttagtcaaaattacacaggaaatttggcctaggataaacagtactcttaaaggaaaataatcttcacaaacatcacatagaatgatgttaaatttttttctggatttttttccctttttaaattttatttcttattgttacatagtagatgtacatattttggggacacatgtgatgtaatttaatacattcatataatttgtaaagatcaaatcagtatacttggaatatcaatcaccttaaatacttttctttttttatgctagaatcatttgacttgttctcttctggctatgttggaaatatacaagagaatatt

SEQ ID NO: 323774 - DNA, 611 bp, Homo sapiens
cagcataccatccagaagcctggggatcactcagcccagcccactagtggtagcacctaagcatgcctcctggggtctgaggccaggcccactcaacctgccacaactattacagctggcacccactccagtatgccacctgcaggtccagggaccagcttgtacaacccatcacatacactgccaacaccagcatggaccacatgggtctcagagggttgtcccaacactgctaccactactgctcatgccatgaccactgcccaaggacttgggaaaccatccgcccacccagcccactgctgccatcatccccagcacccaagcaagccacctggaggctcaagaatcagcctgcttggacctactggcatcatcaccagcaatatgctgccatggggctcaagggcaagcatgttcagccygctgtgatcattagggcccaaagctggcctacctgtcatcccagtccccagaataacttcgccacagcctctactaacaatcacagcctaagccaccaaggaaatcatagacccttctgaggctatttacataccccccccaaaaaaatcataacaccagactgtactactgtatgtatccagaat

SEQ ID NO: 323775 - DNA, 585 bp, Homo sapiens
gggagaatctcttgaacctgggaagtggaggttgcagtgagctgagatcgcaacactacactccggcctgggtgacagaggctccatatcyccccccccaaaaaaaaaaaaaaaagagagagaatggaatgagtgaaatgacccagggacaagcaagatgcatatagaagtacaaaggaaataaaccattcctggtcctgcaatacaatacccagcgtcctacatccttccttccttcttcgctctccattgcttccaacccactgtctcatacctggcaacagtgcatcaagcctgtggttgtatgaagcggggtctaaagcctagtttctctgtatccactgtttaaccttaagcaaaaacaatgggtaagacctgtttgatagcacagtggggtgactatagtcaacagtaatttaattgtatattttaaaataactaaaagagtataattggattgtttgcaacacaaagagataatgcctgaggggatggatactgcattctccatgatgtgattactatctattgcatgcctgtatcaaaacatctcatgtaccccataaatatacatagttaccatgt

SEQ ID NO: 323776 - DNA, 571 bp, Homo sapiens
gctgctctaaaaaggagctgagtgtttgaatcctttctctacccttccagtggattaattcatggttcctgacattctacttttccagtcactcttccatctgggtcagaatcttggggctcacgcactttagactccagaagaagctacttggcaaaagccagaaattccagatctcaagcctacttgcaatgaacatgttacatttaaatacccactttatgttttagataatcatcaatccctcccaaagatggatattgttaatatgaggaatatctcacagatgactttggtagatgtgtttcttaattaaagtattactcatttcttctttttcaaagcttttaatttatcatctaacaggcgtagtgatccatggaattacccccctcttgatttttccccctttttacacggatatgcttattaccattcatagcataagccaagtgctatggttattaagtgstgtcatttgtaccctaatgactttgtgcctttcacaccattaaaaaggaagttggctactatgaagcactaaatgaagccccaaacaaagactgaggat

SEQ ID NO: 323777 - DNA, 526 bp, Homo sapiens
aaatcccagaaaatagtgtctccaacacagaagtaaagttaagagaagtcttataatgacaactttacagcatgcccagaaaacaaactattcatactcaagtaggagataaaggagtgtaggagagatctcattgggagcaaaggggatttgctatataattgaaaaaatgaaaaatgtgaagaataggtaaaggaatatgctgcttctatgaatcagaaaaaaacaaaaataaaaaacttgggaagaattgaaagcaatacaataaatgctaaattataacatgtcatgactttaaatcactggatgtaaaagaaaaaagaatgaagagagaatgagtgtaagccatctggacttgatgctaaaaatacactttctagtgacacaggtgttattacattacacttacactggctgtaattatattttacagaataatttaaatttaaattttatccaattcatttctattcmtcctataaattaacaactattctgagctctaagaaacataacacagtgcatg

SEQ ID NO: 323778 - DNA, 594 bp, Homo sapiens
ccagttttacctcttgcccaattctcttcaattacttgaacaaatggcagtttttcttgccccaggggccttagcacatcctgacctgccttgagattctctgtccctgctttttgaaaagctaagatctcattttttttccattatctgtatagatatcacttcttcagagtggcctcttctgaccattaccacttctgtttcagtctctccgagcactctgatgatttagatcatcaaatcattcctaatgtttacttattggtaccttgcattaggttgccaactccataaggctaatgacaccaggtatccagctygcttttatatgtccagagcctaacactgtgactgaaatattaaaacatttctccatttcttgaaagaaatgaagactttgcctttccataaaaaaaaacagctacctttatttataaatgagaatttgatttcttgagagtgagggtttgttcccatgctcttttcttatgtgtcatttactctgggttcagggtccttggatcttcgttgaagaaagaaagtgcttcttgaagcattcggtatgtattagtgctaacgtcgtggtaatgatga

SEQ ID NO: 323779 - DNA, 594 bp, Homo sapiens
ccagttttacctcttgcccaattctcttcaattacttgaacaaatggcagtttttcttgccccaggggccttagcacatcctgacctgccttgagattctctgtccctgctttttgaaaagctaagatctcattttttttccattatctgtatagatatcacttcttcagagtggcctcttctgaccattaccacttctgtttcagtctctccgagcactctgatgatttagatcatcaaatcattcctaatgtttacttattggtaccttgcattaggttgccaactccataaggctaatgacaccaggtatccagcttgcttttatatgtccagagcctaacactgtgactgaaatattaaaacatttctccatttcttgaaagaaatgaagactttgcctttccataaaaraaaacagctacctttatttataaatgagaatttgatttcttgagagtgagggtttgttcccatgctcttttcttatgtgtcatttactctgggttcagggtccttggatcttcgttgaagaaagaaagtgcttcttgaagcattcggtatgtattagtgctaacgtcgtggtaatgatga

SEQ ID NO: 323780 - DNA, 565 bp, Homo sapiens
agaaatcaatcaaagctcctggaattaaaaactcatttaagaacttcaaaatacaatttaaagcttttaatcaatagacttgaccaagcagaagaaagaatttcagagcctgaagacaagtcttttgaataaacccagtcagacaaaaataaaaaaaaaggaattttaaaaaataaacaaggcctttaagaaatatgrtattatttaaggcaactaaacatgaattcttgacattcctgagagagaaggagaaaaagtaaacaacccagaaaatatatttgagagagtaatttaaggaaacttccctaattttgctagaggttgacatccagatacaagaaatccagagaacacctgcgagatactacaaaaaatgaacatcaccaaggtatataggcaccagattgcctaaggtcaatgctaaagaaaaaaatattaaaggcaactagagaaaaaaggcacatcacagactaagggaaccccatcaagctaacagtggaattatcagcagaaaccttataagccaagagagatcaaggacctattttcagcatttttaaagaaa

SEQ ID NO: 323781 - DNA, 539 bp, Homo sapiens
  misc_feature (1)...(539): n = A,T,C or G
tctaggatgcccttccttgcttgttagtctccantgtggttcttctccttgaccgctttatcttgcaatgtcccagggcyccgtccttgggactccactctgggacatgttggcatctggactgggccaggttattctttgacatggttggagggagacagtctatgcataaatgtgtattgtaacaaaggccaggagctgcctaagacaatatggacatcagatataaacagtaagtttaagatcctagtcagacatagaattagggcataaaaatacaataaatttggggatgtaagttaggggaggtgaaagagccaggaccaactctacgaacctcatgaggatatgcagggctccctcttggtagagaggctcttattcagcaacaacattgactgataaaatgcctgaaggctgccttattttctcaagctctttggtcatctgttcttttgaaaaccaaagccactcactcacacagcaagtattcagagagcttttactgcagcccagaatcacattagacaatctgaatt

SEQ ID NO: 323782 - DNA, 539 bp, Homo sapiens
  misc_feature (1)...(539): n = A,T,C or G
tctaggatgcccttccttgcttgttagtctccantgtggttcttctccttgaccgctttatcttgcaatgtcccagggccccgtccttgggactccactctgggacatgttggcatctggactgggccaggttattctttgacatggttggagggrgacagtctatgcataaatgtgtattgtaacaaaggccaggagctgcctaagacaatatggacatcagatataaacagtaagtttaagatcctagtcagacatagaattagggcataaaaatacaataaatttggggatgtaagttaggggaggtgaaagagccaggaccaactctacgaacctcatgaggatatgcagggctccctcttggtagagaggctcttattcagcaacaacattgactgataaaatgcctgaaggctgccttattttctcaagctctttggtcatctgttcttttgaaaaccaaagccactcactcacacagcaagtattcagagagcttttactgcagcccagaatcacattagacaatctgaatt

SEQ ID NO: 323783 - DNA, 539 bp, Homo sapiens
  misc_feature (1)...(539): n = A,T,C or G
tctaggatgcccttccttgcttgttagtctccantgtggttcttctccttgaccgctttatcttgcaatgtcccagggccccgtccttgggactccactctgggacatgttggcatctggactgggccaggttattctttgacatggttggagggagacagtctatgcataaatgtgtattgtaacaaaggccaggagctgcctaagacaatatggacatcagatataaacagtaagtttaagatcctagtcagacatagaattaggrcataaaaatacaataaatttggggatgtaagttaggggaggtgaaagagccaggaccaactctacgaacctcatgaggatatgcagggctccctcttggtagagaggctcttattcagcaacaacattgactgataaaatgcctgaaggctgccttattttctcaagctctttggtcatctgttcttttgaaaaccaaagccactcactcacacagcaagtattcagagagcttttactgcagcccagaatcacattagacaatctgaatt

SEQ ID NO: 323784 - DNA, 541 bp, Homo sapiens
taaatgaaacagagaggtgggagtgtcagagaaactcaagaaagctacagctttatttcagtcaaaattgcttaagtgttggtgtctttaattattggtcaaaaatgaacttagcattagtgcattttctttgctccatagagcggccagcctttcactttgctactttctgaccaggtctctgggggtacttgagatttctctgtctccccatcctcttgaatcggagatagaaatgaggaccctatgaccttaacaagatcctgaggtgacttgtagactcagacaagctcatgaaccactctcttgggtgatcatgctttcaatrtggtggttagtttgtcggccattgcaaagcgacatccctgggcattcacctcactacaaattgactctgatctatcttcctatctggagctatacttgctagaattatactgatgttggcttgaacttttttgagaccgagtctagctctgtcacccaggttggagtgccgtggcatgatctcggctcactgcaacctccacctcctgggctg

SEQ ID NO: 323785 - DNA, 529 bp, Homo sapiens
ctggagtctgctggtgacctaatatcacaaatcagaaaacgcaacacccatcggaaaagtggattcttacagtacacatttttattgttcttgctgttatatttcaaacatttaaagtacagagaaaacgtccacctacyaataaatcatttataagaagcactttaaggccctctattttgtttattgaagcaatatttaacactcccagagataacagtgggttttaggaggatctcatgtatattttgattctacatagtcttgcaatatacatgatatgcaaactggaaaggacaaagtaaagaaaaagaagaaatgagttcatatcaacacttatgctaaatgtaaagcacaacttctatctgggtgtatgtgtatatatataagaaaatgtggcacatatacaccatggaatactatgcagccataaaaaaggatgagttcatgttctttgtagggacatggatgacgctggaaaccatcattctgagcaaactatcgcaaggacagaaaaccaaacaccaca

SEQ ID NO: 323786 - DNA, 567 bp, Homo sapiens
aattctcccccacacatttcattggctagaactgatcgcatggccccacctgactccaaggaggctgggaagtgaagtcttcctgagtgtttaggaaaaagagaaccagatatggaaaagtacaaatctttccacctcaggaccctaagttcttagtcattccagtgtcagaagaaattaatgtgatggaatacttcaactatcactccttgaagtttcatcactctctctcattggacttatagtaaacccctatcttagttcccatgtcgcctaagaaaacaatagttcagcatggtagagtaacttgtccaaggttcttttagctaataagtgacaaagccagactcaaacccatatcttcctgactccaaaaactgtatttaccttaaacagttgttgtgaggattgattaaatcagaaatccattcattcatttgaatattcattaaacacctacmtgaaccatttactagtcagtatgtagagaatttggcagacactgctctcctagaatttaaaactgtatgaggataaaataacaaacaagaaaaatggtcaaataat

SEQ ID NO: 323787 - DNA, 582 bp, Homo sapiens
ggtaaattttcctcagtcccaggacaagtcatgcagacagagctgaactatttcagaggacgtgggggctcccatgacagacagattattttatatgggggtatcaaaacatctggaaggaaacaaaagaaacaatcatactcatctctggatatcccgcagatgctcaataaatgtctcttgaataaaatataaaatgatttaaataaacttagaaagtggagaactgaaatcaaacttttaattatgattttatcagttttgatttgtttsgtcttgttttaaaatgaccatttgatgggggtaccatcagaaatgcttagtgggcaatggtagactaagaaaagatgtgaaaaggggttgacctttaagaactcaaacagttgcctatgacctgtggaaatttaacgttaagtaaaggccttccccagtaaaatgtggctgaccaccatgacaccgtggccccattactgtccccatctaaatctcggaattctcaggcctagtaatcatataccctactgaactcccccatgtccatcacatcactgaacacatggacgcccccatcatttagtccat

SEQ ID NO: 323788 - DNA, 277 bp, Homo sapiens
gctattttatatatatatacacacacacayatatataaacacatatatatatagatacatatatatatataaaataatcctaaaaacagcttatcctgggtagattttattttattttacaaaagagaaaatgagctttagaagtgttaattaagcctaatgtcactccattaacagctgcagcttcttgtacattactgtgctgccccttctgtctccatcctctggtcttctctgtatgagaggtgaaacaagaagccagagtattgccttgttc

SEQ ID NO: 323789 - DNA, 505 bp, Homo sapiens
aaatgatctagaatagccaaaataacatgaccaaaagaaaatatttgacgcctaacactacttgatcacaagacatacacacagctatggtaatcaagacagtgtggtattattgtaaggatggacatacgaatcaataaagcagaatagayagtgcggggtccaacctgcagactctgacccagtgacagatgaaagatgtacactgacaaagatattttgcctatcagtgtggctaagggtctctgctacctgaatctgcagcctcgccctgataagctggcgaagtttgcatttatttagtacagattaactgacaaaggtctggagtaaacaccactagagggtaattaacattgccaaccccctgagcagagagcacatgcggatgaccaaaggttggtcttaggaccatatgagtaaacaagctatttagataaacttccccacattccgttgttatttgctcttttgctatcaactcatggtaaaaaggattaggctg

SEQ ID NO: 323790 - DNA, 505 bp, Homo sapiens
aaatgatctagaatagccaaaataacatgaccaaaagaaaatatttgacgcctaacactacttgatcacaagacatacacacagctatggtaatcaagacagtgtggtattattgtaaggatggacatacgaatcaataaagcagaatagatagtgcggggtccaacctgcagactctgacccagtgacagatgaaagatgtacactgacaaagatattttgcctatcagtgtggctaagggtctctgctacctgaatctgcagcctcgccctgataagctggcgaagtttgcatttatttagtacagattaactgacaaaggtctggagtaaacaccactagagggtaattaacattgccaaccccctgagcagagagcacaygcggatgaccaaaggttggtcttaggaccatatgagtaaacaagctatttagataaacttccccacattccgttgttatttgctcttttgctatcaactcatggtaaaaaggattaggctg

SEQ ID NO: 323791 - DNA, 579 bp, Homo sapiens
atctacaataaaagctattgtattcattactgaaatttattaagcattaaaattaaaaaattaaatgraaagatatatcaatttctttcttttttgagataaggtcttgatctgttgcctaggttggagtgcagtggcaagatcaaagctcactgcagcctttaactcctgggctcaggcaatgctcccacctcagtctcccgaatagctgggactgtaggcacatgccctcatgtctggctggctaatttttgtattttttttgtagagaaatagctccagaaatctgcacatgaccaaatcctaagctgtgcatgtttactgtgaaaatccacaaagccaggaaatagaacatctgtcagcagaagaacaactaccagctacatggtccagctaatttttgtatttttttgtaaagatgaggtctttctttgttgtccaagctgctcacaaactcctgggctcaagcaatcctctcacctcagcctcccacagtgcctggattacaggtgtaaaccaccatgcctggctttcagtttcattgattagaaaacttattgttaagttattgattctcct

SEQ ID NO: 323792 - DNA, 643 bp, Homo sapiens
ttgctttaatatctatatttgttggatatttttatctttctctgtggagtctgtcttcagatttatagtctacattccattggtttgtaccagagatttcgtttcttgtccaggtgtcttgaatcatatacattacaaaaagacacaatggcttttactgtctttttaatgttcagatatctaatccatccaatgatggatttacaatgtcactgcaaaggaaatcrggtcaagcagcaggtaacccttccagccttctccaaacagcttccaaagtctgttttaatttcattttaaatcagttatggcagtgctttgagtacaccaatatatgcttgtttgatctttcctctccttcctttaggaaatctctttttggtcacactggtaccctttacatgtgctgttgctcttgcctttgctgtgactcatactagaaatagccaatttttttactcagggtttgagaggacggtgaaaatgacatcaacttcctcagcaacttaattatcttacattggaatcagagactcatatcaccatggaaactcagaatcacagaaccatagaatctttgctgctaagagcacccacagagtacaatttctcttcgtaacttgaagttgtaaaggatccttgcctg

SEQ ID NO: 323793 - DNA, 539 bp, Homo sapiens
tccttttccaccttatttgaatgactggattttaaaaaattaattccattgttctctattggctttttaattttacattctactgattttagttatttctctagaaactgtaatatccatacttaatctacacaactctaataaaaattagtacttttattattgctattttatacaaacaatactcatttagcttcatctacagctttactctttgatttttattttttcctatatctcaaagtttctttctcagatcattttccttctgcttcaagarttttttttaaatattaactgacttagaataaaaaacatataattaaattgtacagtttaatgagttttgaaacatgtatatacttgtgacataatcaccacaatcaagataataaacatatccataacctccctttataatccttcttttcactctatcccaaatgtattcccaggaagtcattgatgtactttctgtcactatcagtgttttgcattttctggaatttccataaatggaactgtacagtacgtatttt

SEQ ID NO: 323794 - DNA, 615 bp, Homo sapiens
aactacatggattcagtactagactggagatgacagaggatagaaacagtgaacttggggacagatcaatagaatttacccaatatgaacaaaacagataaaaaatagacttaaaggaactaacaaagacaggcatccgggaaaatastaaaataattagtatcattaaagtaccaggaaaggagaaagatactggattaaaaaaccattcaaagaaatacagctagaaatttcccaaatttggtgaaagacataaacctaaatattcaaaatgttgagtgaaccccaagtaggataaacctaaagaaatccatgccaagaaacatcataattaaacttctgaaaactgcaagaaaaatatcttgaaagtagccagagacaaatgacacattacttataggagagcaccaattctaatgacagcagattcctcatatgaaatcatgatggtcagaggaagaggcccattttcaggtgtgaaagaaaactttctgccttaaatttattatccggcaaaaatatcatttaggaatgaagaaaaataaagatactctctgataacggaaaactaagagaatttgttgttagcaaacctacccttcaagaatggctaaa

SEQ ID NO: 323795 - DNA, 615 bp, Homo sapiens
aactacatggattcagtactagactggagatgacagaggatagaaacagtgaacttggggacagatcaatagaatttacccaatatgaacaaaacagataaaaaatagacttaaaggaactaacaaagacaggcatccgggaaaatactaaaataattagtatcattaaagtaccaggaaaggagaaagatactggattaaaaaaccattcaaagaaatacagctagaaatttcccaaatttggtgaaagacataaacctaaatattcaaaatgttgagtgaaccccaagtaggataaacctaaagaaatccatgccaagaaacatcataattaaacttctgaaaactgcaagaaaaatatcttgaaagtagccagagacaaatgacacattacttataggagagcaccaattctaatgacagcagattcctcatatgaaatcatgatggtcagaggaagaggcccattttcaggtgtgaaagaaaactttctgccttaaatttattatccrgcaaaaatatcatttaggaatgaagaaaaataaagatactctctgataacggaaaactaagagaatttgttgttagcaaacctacccttcaagaatggctaaa

SEQ ID NO: 323796 - DNA, 591 bp, Homo sapiens
agcatgttgtttaatttctacatatttgagaattttcccagatttcttctgtttagtattagggtaatgctagcctcatagaataagtttgaagtactgttattgatttctagtagtatgccattgtgattgaagaagatacttgttatgacttcaatcttcttaaatttgttaagacctgttttgtgcctaatgtatgatctattctagaaaatgttctgtgtayacttaagaaaaatgtgtattttattgttggatggattgttctgtatatgtctgttaggttcatttggtctaaagtacagtttaagtccgatgtttccttattgattttctgtctagatgacctgtctgttgttaaaagtgcagtattgatgtcttctattattattatattgcagtctgtctctctcttcaaatcaatagttcctttttgtatttaagtgctctgatgtttggtgcctataaattcacaattgttgtagcctcttgatgaattgacccaatcattatcatataaagactttgtcttttctttataattttaacttaaagtctatctttttctgacaagggaatagctacttcttc

SEQ ID NO: 323797 - DNA, 565 bp, Homo sapiens
tagctgtgttagtatcacaaaatatacactttaagacaacaaatattattagaatgaaaggtacatttcaaatgatgctgccaaaggattactacagcaaaaagatgtaacaatgataaatgtatatcacctayagaaagagccccacaatacataaaactaaaactgagaaaaataaaagaaaaaatgagacaaattaacaattacagctagtgattttaatactcctcttaacaattatttattttaaaaatagacaaaacaccaataagtatcaaccaatctgatctaatcaacatctataaacacccatctaataacaaaatacactttcacttcaaggacacatggatattcatcagaatagactgtattcttgacctgaaaacacattgcaatgattttataagaatggaaatcattcagagtatattaaccaaccataatggaattaattagaaataaataataaaaagacatctcagaagtccccccaaatattagaaaattaaacacacttataaaataacctatgtgtcaatgagaaagtcaaaagaggaattag

SEQ ID NO: 323798 - DNA, 565 bp, Homo sapiens
tagctgtgttagtatcacaaaatatacactttaagacaacaaatattattagaatgaaaggtacatttcaaatgatgctgccaaaggattactacagcaaaaagatgtaacaatgataaatgtatatcacctacagaaagagccccacaatacataaaactaaaactgagaaaaataaaagaaaaaatgagacaaattaacaattacagctagtgattttaatactcctcttaacaattatttattttaaaaatagacaaaacaccaataagtatcaaccaatctgatctaatcaacatctatamacacccatctaataacaaaatacactttcacttcaaggacacatggatattcatcagaatagactgtattcttgacctgaaaacacattgcaatgattttataagaatggaaatcattcagagtatattaaccaaccataatggaattaattagaaataaataataaaaagacatctcagaagtccccccaaatattagaaaattaaacacacttataaaataacctatgtgtcaatgagaaagtcaaaagaggaattag

SEQ ID NO: 323799 - DNA, 608 bp, Homo sapiens
tctaataagttactggtggcatgaagcaaaggtattgatttttaaatatgttttaaaacttctgacctgtacaaaaaggtatgcaatcagaaataaaaatagtccaggcatggtggcttatgcctataatcccagtgccttgggaggctgaggctagaggattgcttgagcccaggagtttgagaccagcctgggcagcattaaaaggtcccatctctaaaaaaytttttaaaaattagccaggcatgttggcacatgcctgtagtccaagatactcgggagactgaggcaggagagtcacttgggcctaggaatttgaggtcacagtgagccttgatggcaccactgcaatccagcctgggtgacagagtgagatcctgtttcaaaaaattaagtaaataaaaataaacaccttctgatcagtggtgaaatttttttaagaagtaaaaattaaaaagcatttctctatcttcaccctcaatcccaagattctcctcaaattaacattgtttccacatttttctatataattttccagaaaacatatcccttatagaatggaccattctataattctgttctgtagcttactatttcatgtatctcaa

SEQ ID NO: 323800 - DNA, 591 bp, Homo sapiens
tgtcccctctcctgccattctgctattgagtccattcacagagttttaaaattttagttattgtatgttcccattctaaaatttccattttgtttttctttatatcttctgtttatttgctgagatgttctgtttttcatttgtaattgttcattgaggcatttttacaaaggctgcttaacaatctttgtcagataattttaatatctctgtcatcttgattggcagctaatgattgtcttttttccttcagtgtaatatcttcctggctttttatgaatgttttttaaattgaaacctggacattttgtgtattatattatgagacctagatcttaattaatccttctgtggtagctggcttcctgtgacagcactccagcagaggaagtgrgggtgacaccacattgttactttcaggtataggtaggagtccagtttaccactcagcctccattgatgcccaaggtgaggaaggctccgcacttcttggggaatgggagtttcagctccccacaagttctccaccggctgggagggggaggagtactgtgttactgcctccactccatgtggcctgtgctggtgttg

SEQ ID NO: 323801 - DNA, 591 bp, Homo sapiens
tgtcccctctcctgccattctgctattgagtccattcacagagttttaaaattttagttattgtatgttcccattctaaaatttccattttgtttttctttatatcttctgtttatttgctgagatgttctgtttttcatttgtaattgttcattgaggcatttttacaaaggctgcttaacaatctttgtcagataattttaatatctctgtcatcttgattggcagctaatgattgtcttttttccttcagtgtaatatcttcctggctttttatgaatgttttttaaattgaaacctggacattttgtgtattatattatgagacctagatcttaattaatccttctgtggtagctggcttcctgtgacagcactccagcagaggaagtgagggtgacaccacattgttactttcaggtataggtaggagtccagtttaccactcagcctccattgatgcccaaggtgaggaaggctcckcacttcttggggaatgggagtttcagctccccacaagttctccaccggctgggagggggaggagtactgtgttactgcctccactccatgtggcctgtgctggtgttg

SEQ ID NO: 323802 - DNA, 545 bp, Homo sapiens
gtcaattatctcctaaaggccctgtctccaaatacagtcacattgcaggtgtgaaagggaaataaatcttggggccccaaaatcaccaagctaaagggaaaagtcatgctagacactgcttagggcaaacctgcctcccattctattcaaagtcatccctctgatcactgagataaatggctatctgactgcatttatctctgataatgcataatccctgatctcccaaaatttcatcaagatctaaagtttattttgctgtacaacttctttttttgaagttttacttgctaccaacacaaggaaggcaagttttcccacttccatrattttggaaggcaggtaactccttatggagtttaagctgacttctaacagggaagacaagtttcgttttttttctgctcctaggatggtagagagcagtcttccatctgagacccatccctaggtaagtaaatgaactggggtttgtcttggctgaagttaagattaacaaccagctggtcttaatttcttcttaccgttagagcactcaataatca

SEQ ID NO: 323803 - DNA, 613 bp, Homo sapiens
aaagcatcacgtggtctagcttcataataattctccctttttgaaaacccaggattcagtgtgggctctgcccagagattagagatcccagttaaaagataggtagtccccatctaaataaaattggtctccttatagaatcctatgattgatttctataacttaatgtttgatttggcatacatctttaatctccctctagtaccaccagactttttctctctgtaccttgagatgtagattttgctatctgatttttcacctaaaggtagtttctttcaatatgcagatttagggttatttatctgacaacttccagagtaatgaaacaggttatcaagagtttgcaagtctaygggtaaaaaaaaggaggactgatgaatctataagttgtacttctatcagtatgcctaatacgtctatgtatttatgtgttgtgtacatagttttactattaaaaatacataaaagagctccaattagcttaaagaaaaataaaaatgcttaaatcaaatactttatcagaagaaggaaagactagtcaaatgctttttcaagtttatgtaacttaaggaaaatatttaataaataagctagctttaaaattattggt

SEQ ID NO: 323804 - DNA, 613 bp, Homo sapiens
aaagcatcacgtggtctagcttcataataattctccctttttgaaaacccaggattcagtgtgggctctgcccagagattagagatcccagttaaaagataggtagtccccatctaaataaaattggtctccttatagaatcctatgattgatttctataacttaatgtttgatttggcatacatctttaatctccctctagtaccaccagactttttctctctgtaccttgagatgtagattttgctatctgatttttcacctaaaggtagtttctttcaatatgcagatttagggttatttatctgacaacttccagagtaatgaaacaggttatcaagagtttgcaagtctacgggtaaaaaaaaggaggactkatgaatctataagttgtacttctatcagtatgcctaatacgtctatgtatttatgtgttgtgtacatagttttactattaaaaatacataaaagagctccaattagcttaaagaaaaataaaaatgcttaaatcaaatactttatcagaagaaggaaagactagtcaaatgctttttcaagtttatgtaacttaaggaaaatatttaataaataagctagctttaaaattattggt

SEQ ID NO: 323805 - DNA, 613 bp, Homo sapiens
aaagcatcacgtggtctagcttcataataattctccctttttgaaaacccaggattcagtgtgggctctgcccagagattagagatcccagttaaaagataggtagtccccatctaaataaaattggtctccttatagaatcctatgattgatttctataacttaatgtttgatttggcatacatctttaatctccctctagtaccaccagactttttctctctgtaccttgagatgtagattttgctatctgatttttcacctaaaggtagtttctttcaatatgcagatttagggttatttatctgacaacttccagagtaatgaaacaggttatcaagagtttgcaagtctacgggtaaaaaaaaggaggactgatgaatctataagttgtacttctatcagtatgcctaatacrtctatgtatttatgtgttgtgtacatagttttactattaaaaatacataaaagagctccaattagcttaaagaaaaataaaaatgcttaaatcaaatactttatcagaagaaggaaagactagtcaaatgctttttcaagtttatgtaacttaaggaaaatatttaataaataagctagctttaaaattattggt

SEQ ID NO: 323806 - DNA, 568 bp, Homo sapiens
gtcatttctctgtgtacacctgcccctgatgtctcctcgtgtgtcctactctctaggtcttgtaagaacaccagtcagattagattaggacacatcctaatggttttattttaattactctttagaggcagtatgtccaaatacagtcatattctgaggtattggtgattagggcttcaacatatgaatttggtgggaaggtacaattcagtccataacagtatgtaaaaagggtaattgtacccaccaagaattcctttytaaattgcagtgagtcttgtaagaggccatgactattttcttttgctactgagacttatatgatatctagtttatatttatatattttatgtaattaacacctttatgtacttctcattaagaagcagcagaagtcatacataccagaaagcaacagaaaaaagtttattttacactttagaactcttactgaacactgtatttttggttataacttgtattttctttaggggaaaaatggtaatatttaatgtagaaagtcttagtaaatggcattctatatatagtaattattttatatttacaa

SEQ ID NO: 323807 - DNA, 531 bp, Homo sapiens
ggtaagttatttgatctctttgggcctcaattttctgttctataaaaaagaatagtaacagtgactaccttgtagttgtgaggacagaatgaatcaatagatttaagcactcagaatactacctggcacataatatgttttcaatgaaagtcagatgttattattataygtattattactgatcctcagacaagtatgtgctccttcctccctccctccttccctcccttcctttcttcctctttttttgagacagggcctcactctatcacccaggctggagtgcagtggggtaatcttggctcactgaaacctctgcctcctgggttcaagcgattcttccacctaagcctcttgtgtgccaccacgcctggctaattttgtatttttttgtagagacagggtttcaccatgttggctaggctggtctcaaactcctgacctcaagtgatctgcctgcttcggcctcccaaagtgctgggattgtagacataagccattgtggccagcccttctcactttcttaattct

SEQ ID NO: 323808 - DNA, 531 bp, Homo sapiens
ggtaagttatttgatctctttgggcctcaattttctgttctataaaaaagaatagtaacagtgactaccttgtagttgtgaggacagaatgaatcaatagatttaagcactcagaatactacctggcacataatatgttttcaatgaaagtcagatgttattattatatgtattattactgatcctcagacaagtatgtgctccttcctccctccctccttccctcccttcctttcttcctctttttttgagacagggcctcactctrtcacccaggctggagtgcagtggggtaatcttggctcactgaaacctctgcctcctgggttcaagcgattcttccacctaagcctcttgtgtgccaccacgcctggctaattttgtatttttttgtagagacagggtttcaccatgttggctaggctggtctcaaactcctgacctcaagtgatctgcctgcttcggcctcccaaagtgctgggattgtagacataagccattgtggccagcccttctcactttcttaattct

SEQ ID NO: 323809 - DNA, 531 bp, Homo sapiens
ggtaagttatttgatctctttgggcctcaattttctgttctataaaaaagaatagtaacagtgactaccttgtagttgtgaggacagaatgaatcaatagatttaagcactcagaatactacctggcacataatatgttttcaatgaaagtcagatgttattattatatgtattattactgatcctcagacaagtatgtgctccttcctccctccctccttccctcccttcctttcttcctctttttttgagacagggcctcactctatcacccaggctggagtgcagtggggtaatcttggctcactgaaacctctgcctcctgggttcaagcgattcttccacctaagcctcttgtgtgccaccacgcctggctaattttgtatttttttgtagagacagkgtttcaccatgttggctaggctggtctcaaactcctgacctcaagtgatctgcctgcttcggcctcccaaagtgctgggattgtagacataagccattgtggccagcccttctcactttcttaattct

SEQ ID NO: 323810 - DNA, 483 bp, Homo sapiens
aggtttaccatactcctttgtaggctagatatgtgtttgaaattggctatgtttgtagtggattgaatagcctcccccaaataatcacgtttattcaaaacctcagaatgtgaccttgtttgaaaatagggtctttacagatgttatcagttaaggatcttgagatgaaatcatcctgggtttagggtgggacctaaaaacaattacttgtatccttataaaaagggggagaggatgcacaggcaaagagaaaatggccatatatagactgaagcagagattgaaattatgcagctacaagttaakaaatgcctggggccaccagaagctgaaagaggaagaggattctttcttagagctttcagggggagcatggccttgatgacttctctcaatgtcctaaatgaaattgataggaatcatggagagaatacacctgaagaggccagtttcactctctaaaagccatgcaaggaagattgg

SEQ ID NO: 323811 - DNA, 548 bp, Homo sapiens
gaagtattatccttagtaacctaaaattttagtgaaaccctaaaaagaaatactgaactatcagatatgggcatttatagataagaacaattccacaatttttagaaacatatttccccatatcacaacccttccttaattggaaatgacccaaatattcaatgagcatcaaaattaattttaagcttttaatttacacaaaaagtttacctaaaacatttatcccatttactgtactcaattctttcatttttaacagtttatctagattacttctgtaaactgagatattagacactatcacttaaagttagttatttccttgctaaccatgtttctaatagccagtgaatatcaagtgctcacctraacctgagagtctcagaattaaatatataagtattttgccaataactcagaagacgtagctaacattaaattgctcttatttgtcaaaaaaaaaaggcacattttgttttggctgggtttgtagttttataacattctatgccaaacattgacatctcaaaatatttagcaaacacaaa

SEQ ID NO: 323812 - DNA, 548 bp, Homo sapiens
gaagtattatccttagtaacctaaaattttagtgaaaccctaaaaagaaatactgaactatcagatatgggcatttatagataagaacaattccacaatttttagaaacatatttccccatatcacaacccttccttaattggaaatgacccaaatattcaatgagcatcaaaattaattttaagcttttaatttacacaaaaagtttacctaaaacatttatcccatttactgtactcaattctttcatttttaacagtttatctagattacttctgtaaactgagatattagacactatcacttaaagttagttatttccttgctaaccatgtttctaatagccagtgaatatcaagtgctcacctaaacctgagagtctcagaattaaatayataagtattttgccaataactcagaagacgtagctaacattaaattgctcttatttgtcaaaaaaaaaaggcacattttgttttggctgggtttgtagttttataacattctatgccaaacattgacatctcaaaatatttagcaaacacaaa

SEQ ID NO: 323813 - DNA, 487 bp, Homo sapiens
aatgccagtattccttccttccagatttgcgtgtaagaccagataatcttccagaccaaacagtatctgttgatgagtattaggctcgaatgagaaggagagagaagtggagcactggattgaagagaaagcaaaaaaccttcctagatcaacaaggaaatagcctcttctagaatccagatagggccctggactcctgtgggataatgtagtgggtgaaaaaattggtartgaagtcctcggatatggggatgcacttggaagtcttgggaacaaggaagagagacatcctgtggtggtgatttttagatccaacacccaggggcttgggtgcctttggggggattagtagaagagatcgacacattgagggaggttcaggataactgtctgaaaatgagagatttttattgcttatactgatgtcccaatagggtctgtatgtgcttcaaataggtagaaaagaatgaagtccgagcctgaagat

SEQ ID NO: 323814 - DNA, 543 bp, Homo sapiens
caaatatttggttaaacacgatttctaggtgcatctgtgaggattttctggacgagactaatatttgaatttgaatcagtggactaagtaaggcagactgccctccccagtgtgggtggccctcatccttctctctgcctgacactcttctagctggaacatttgtcttctcctaccctcggactcagactatgactggaattgatatcattgactctcctagttcttcagactcagattgctctcscgggacttctcagcttccaaatcacatgaaccaattcattataggaaatttttttatatatcctattaattctgtttctctggagaaccctgattaatacagatttattttcctacactccagtaactctccactactccctccctcaacccctggtaactatcctactttctgtctctataaatttgactattctcagtacctcatataagaggaatcatgcagtatttgtccttttgtgactggcttatttcattagcataatgttttcaaggtttattcatgttgtagcatgt

SEQ ID NO: 323815 - DNA, 617 bp, Homo sapiens
tttccatcactttagaaatggtcttccatgccccagggcaaatctctagtctaacttctatcactacagttagttttgcctgttttggagcttcacataaatgaaaccacatttgtatcttccttctttccttcaacatgtcagagtgattttccatgttgtagtgtaaactgatgtttccatcagcttattctttttgttgttgtctattattccrttgtatgaatcgacgactatttattcattctcttgttgatggacatatggaatgtttccagttaagggctattttgaaaaaatctgcaatgaacagacttgcgcatgtcttttggtggatatatgcatttatttctcatacacctaggagcagctggggtcatgcaataggtaggtgtatgtttagctttagtgaacattgctaaacagttttccaaaatagaatgttccaattttgatcattctttttaacagctgcatagcattacattagttattcccatcatgtatttaaactagtcccactcttaataaagatgaaagttattttcaaatcatttgcttggaacaaaatatgctccaaataataccccttgacataaattatcttgacacatata

SEQ ID NO: 323816 - DNA, 577 bp, Homo sapiens
cctcccttttttcctttccctctctcatctacagtatctagcataatgctggacatgtaatataaggagaactaaatcaatgctaattagttcaatgatgttkctagagttctttgtcctgaggcttcagtctaaattctgggaatacatattgaatggggaatttgtcaagtggtttataaattctcagatcagagtagaaaactctagggacgagcatgctttgtgtcacctcccccacgggtaagagcccaggttgaagggtcttcctggtccaggagtgtggtcttttggtataagctacactcttgggattgccctaagccccgcaagatttctctacaagcagggtaccagggagagaacacataaaactctgtgtgccagaaccaaatttggacttgacagtgtttttcaaaaaataagaaagaatattaggcactctgtagaaggcattatatttttgaacagagaaataacccactttagtaaaggaaaactttagatgatctcaaaccttaattttggtcctagagtcttccttgtagataatatagagacatttttgcgtgaaaat

SEQ ID NO: 323817 - DNA, 592 bp, Homo sapiens
  misc_feature (1)...(592): n = A,T,C or G
tatgttaagggatttgagctttatcctgaggtaaactgaacaagcaaggtggtattataataggatttgcctttaggaaccatcactcttaccataatgagcagaaagaattggaaagaagtgtcagtggatataaaaaaataaagttaggtgagagattcagttatcaaaatgggttataatgataacagcaatgataataatggtaataattgtcactgcaactaatactttcttgagctatgtgctggtccttcttctaagcccttcacatgtatgatcattaattttcacaatgctatgaggtttattatcatctctgtctacaggtgataaaactgaagcataaacagattaaatgacttattcacagttattatgagrtagagtgggagtatgaaccctggttccagggatagttctctcactgtctcatgataccatagttggatgagggtggtggctctacactgtctcactataccataatactctacactgtctcatgataccngtgattggataagggtgatggcaaaatggatgggcataggtagatgattcaagaaatatgtagaaggtaaaataggat

SEQ ID NO: 323818 - DNA, 592 bp, Homo sapiens
  misc_feature (1)...(592): n = A,T,C or G
tatgttaagggatttgagctttatcctgaggtaaactgaacaagcaaggtggtattataataggatttgcctttaggaaccatcactcttaccataatgagcagaaagaattggaaagaagtgtcagtggatataaaaaaataaagttaggtgagagattcagttatcaaaatgggttataatgataacagcaatgataataatggtaataattgtcactgcaactaatactttcttgagctatgtgctggtccttcttctaagcccttcacatgtatgatcattaattttcacaatgctatgaggtttattatcatctctgtctacaggtgataaaactgaagcataaacagattaaatgacttattcacagttattatgaggtagagtgggagtatgaaccctggttccagggatagttctctcactgtctcatgataccatagttggatgagggtggtggctstacactgtctcactataccataatactctacactgtctcatgataccngtgattggataagggtgatggcaaaatggatgggcataggtagatgattcaagaaatatgtagaaggtaaaataggat

SEQ ID NO: 323819 - DNA, 592 bp, Homo sapiens
  misc_feature (1)...(592): n = A,T,C or G
tatgttaagggatttgagctttatcctgaggtaaactgaacaagcaaggtggtattataataggatttgcctttaggaaccatcactcttaccataatgagcagaaagaattggaaagaagtgtcagtggatataaaaaaataaagttaggtgagagattcagttatcaaaatgggttataatgataacagcaatgataataatggtaataattgtcactgcaactaatactttcttgagctatgtgctggtccttcttctaagcccttcacatgtatgatcattaattttcacaatgctatgaggtttattatcatctctgtctacaggtgataaaactgaagcataaacagattaaatgacttattcacagttattatgaggtagagtgggagtatgaaccctggttccagggatagttctctcactgtctcatgataccatagttggatgagggtggtggctctacactgtctcackataccataatactctacactgtctcatgataccngtgattggataagggtgatggcaaaatggatgggcataggtagatgattcaagaaatatgtagaaggtaaaataggat

SEQ ID NO: 323820 - DNA, 606 bp, Homo sapiens
ttgtaaaacagcatgagaaggtcagtgacctggtagggcagattagacaaaagcaaagacaaaataggccaacaaactaacaattgccataattaaaacataatgaggcatgggaggcactgtgagtatttagattcctaaacttgtctgcatattgaaatctcctgaaaatattttaaaaattcaaccacgatctctgggatgggacacaggcaccagtaggttttgaagctccccaggggatttcagtgcgcagacaggtttgggaaccactgatagagagaggaagggagctcttgtttatccaaaaacaattcaggaatattttgagctgagccttgaaatcacgctactcaaagtgggktccctgggagcttgttagaaaagtagaaacttgggacccatccccgagctactcaatcaggcctgcatttaaaacaagatcctcagctgattatggatacagtaaagtttgagaagcactgcaaaggcaaactcagacaggctgtgctaggaaagcaggtatgaactgagtatacagtatatgtagaggagaagagggaggaaagatcggggaagtgcaccagggccaggcacgttgaaggc

SEQ ID NO: 323821 - DNA, 609 bp, Homo sapiens
atttctacccctggatttgcccagaccctgatatactactttcctataacctttactctttctgccttatgaatcatcaagtcagataagatccaactaaaaagtattcatacattcaatatatattcatcttgggtttcagaaggttttggtatccctctattaattgttctgtttcaaatgaatgtccaataaacagccagtaattgacatccaaaggaaatgtaccagcagcctcaggacatcctgaggccagaaacaggctggtcttgttgaccctttctgggacctatcaaggggttcatgccaccccacagttgaagacagataccaagaaagatagccatgatgggaaccatgagaacattcagaaccagaaatgctccatatgggtagtgatatgcttaatctgaactacaggggatggcccagttggtcacaagaaagtttacagactgtagagcatgcctaaacttccagactaggacagtctgcccttataacaaaatctctgctttacctaagtgctctcagtactgatcaagcctttatctcatgcaaccttgaygtgaatcctcagaggataaacacccaggcatggttatgggg

SEQ ID NO: 323822 - DNA, 596 bp, Homo sapiens
gacatacttagcagttagtacaacccccatattggctccccaactagtaggatgagggctattatggtgggaaaggccaaatggaagccatcagagctgcctctacctagaaaaatagtaaatcaaaaacaatattgcatccctggaggaatcacagagattagtgccaccatcaaggacttgaaagatgcaggggtggggattcccaccacatccccattcaactctatttggcccatgcaaaagacagatggatctttcagaatgaccatggattgttgtcagcttaaccgaggggtgactccaattgcagttgctgtaccagatgtggttttattgcttaagcaaattaagacatctcctggtaccttgtatacagctattgatttggcaaatgcctttttctccattcctgtccataaggtgcacgagaagcaayttgccttcagctggcagggtgaggaatatacctttatcatcctacctcaggagtatatcaactctctgtctttgtgtcataatcttattcagagagaccttgatcgcctttcacttccgcaagataccacactggtccattacattgatcatattat

SEQ ID NO: 323823 - DNA, 596 bp, Homo sapiens
gacatacttagcagttagtacaacccccatattggctccccaactagtaggatgagggctattatggtgggaaaggccaaatggaagccatcagagctgcctctacctagaaaaatagtaaatcaaaaacaatattgcatccctggaggaatcacagagattagtgccaccatcaaggacttgaaagatgcaggggtggggattcccaccacatccccattcaactctatttggcccatgcaaaagacagatggatctttcagaatgaccatggattgttgtcagcttaaccgaggggtgactccaattgcagttgctgtaccagatgtggttttattgcttaagcaaattaagacatctcctggtaccttgtatacagctattgatttggcaaatgcctttttctccattcctgtccataaggtgcacgagaagcaacttgccttcagctggcagggtgaggaatatacctttatcatcctacctcaggagtatatcaactctcygtctttgtgtcataatcttattcagagagaccttgatcgcctttcacttccgcaagataccacactggtccattacattgatcatattat

SEQ ID NO: 323824 - DNA, 589 bp, Homo sapiens
gtctaccacagcatgaggttcatttctgtctttagttgaatgagatgaagacaccttatgaattaatactctttctctttgtatattmtttcttgatactcagccacaatctgcctctaattttaatctttgtatttttattttattttattttagcattatcttctccatttcttctctcttttttgaaattatactttaagttctgggatacatgtgcagaacatacacatttgttacataggtatacacgtgccatagtggtttgctgtacctatcaacccatcacctacattaggtatatctactaatgctatccctgccctggtctcccatcctgtgacaggccctggtgtgtgatgttcccctccccatgtccatgtattctcactgtccagctcccacttattagtgagaacgtgtgctgtttggttttctgttcctgtgttaatttgctgagaatgatggttttcaccttcatccatgtccatgcaaaggacatgaactcatcctgttttatggctgcatagtattccatggtgtatatgtgccacattttctttatccagtctatcattgatgggcattt

SEQ ID NO: 323825 - DNA, 588 bp, Homo sapiens
gggtattcatttggatgaattctcatctgaagactctggaaaaatttgcttctaaactcatttttttttttctgagacgtgttcttgctctgttgcccaggtggagtgtagtggtgagaatatctgctcactgcagcctcaacctcctgggttcaagcagtcctcctgcttcagcttccacatagctgagaccatagtgaatgccaccactatacacaactaagttttatattttttttatagaaatgggtctctcactctgttgcccaggctkttctcgaactcctgggctcaagtgatcctccctccttggcttcccaaagtactaagataacagatatgagccactgcatctggcctaaattcatttttttgttgttggaaaaattcagttctttgtagttgtagggctgaggttgtctgcttgtgctggctgttagctgaatgctgctttcagcccctataggccacccacattctctaccacatgtgttagtcagggttctccagaggaacagaaccaatatttatatttatattacttgaatatttgttaatatttatttattataaggaattggctcacgt

SEQ ID NO: 323826 - DNA, 588 bp, Homo sapiens
gggtattcatttggatgaattctcatctgaagactctggaaaaatttgcttctaaactcatttttttttttctgagacgtgttcttgctctgttgcccaggtggagtgtagtggtgagaatatctgctcactgcagcctcaacctcctgggttcaagcagtcctcctgcttcagcttccacatagctgagaccatagtgaatgccaccactatacacaactaagttttatattttttttatagaaatgggtctctcactctgttgcccaggctgttctcgaactcctgggctcaagtgatcctccctccttggcttcccaaagtactaagataacagatatgagccactgcatctggcctaaattcatttttttgttgttggaaaaattcagttctttgtagttgtagggctgaggttgtctgcttgtgctggctgttagytgaatgctgctttcagcccctataggccacccacattctctaccacatgtgttagtcagggttctccagaggaacagaaccaatatttatatttatattacttgaatatttgttaatatttatttattataaggaattggctcacgt

SEQ ID NO: 323827 - DNA, 528 bp, Homo sapiens
tactagtctagggtggcctcattcataggtgtagagtttggtcacctgggcacacaagagtggatattgcctctccagcaggctaaccctagctagtttcaagcaggtgccaaatgagtgagtggaggcatgtgaatcctctcatggctcactcttggcactggcacgcaactacttctgaagcattttcttggcccagtttcaaggaatgaggaaatagtctctattcttaatgagaggaactgaaaagtcaaggagagtggatatagaaaggcatggaaacaatgggaacacaactattctattatgaaaggtattatgtgcatacacttcaaaagttaagaaacttactcaaggtcataaagctagaaagcagcagagacaggatttgggccttaatcttctgaccgaaaatctcattctctttcaacacttctttctaatattgctgattgatstgtgcagtccagatgtcacagtgtaattagtttctaaaataaatctgttcttagattacttttgaatgac

SEQ ID NO: 323828 - DNA, 607 bp, Homo sapiens
attcattttctttgacgtggatatttcagagtataaatatgcaagtttatttatctgttctattgatggatatttaggttattttcaattttcttttgttacaaacactattgctatgaacatccttctaaaaacactgtattgatatataatttacacaccataaagctcattaatttacagcatacataaagctcaatggtttttagtgtttttacaaaggtgtgcgactrtcatcagaatctaagtttacaacacatcatcagccttaccaattagcagtcactccttcttctcaaccttgtttcccccgtccctggaaaccacaaatctactttccatctgtatagatttccatattctggatattatacattaacgggatcatataatacgtggccttttgagtttggcttctttcacttagcatgatgttttcaaggtccatacgtgttgtgtgtgtcagtaattcattcttttttgttgacaaatggtattgtatggatacaccacattctgttcattctttcataggttgatggacatttgggttgtttgcactttctggttgttataaataatgctgctattcaggtacaagtgttgt

SEQ ID NO: 323829 - DNA, 537 bp, Homo sapiens
ttcttttttgttgacaaatggtattgtatggatacaccacattctgttcattctttcataggttgatggacatttgggttgtttgcactttctggttgttataaataatgctgctattcaggtacaagtgttgtgtggacttaagttttcawacgtttcatatgaagataactattagtgaaattgcttggttttgttgtaattctgtgtataacattttgaggaacttataaattgtttgacaaagtggctgtaacttttagattcttattagcaatatatgggagttccaatatctctacatccttgccaacacttgttattgtatgctttcttgatcatagccatcctcatggtatgaactggtatctcattatgattttgatttgcatttccataatgactagttatgttgaccttcatgtccttatttgtcattcatacatcttctttggagaaatgtctgttaaaatcttttgcccattttataatttgactgtctttgtattgctgaattgtaagaattctttattctgc

SEQ ID NO: 323830 - DNA, 537 bp, Homo sapiens
ttcttttttgttgacaaatggtattgtatggatacaccacattctgttcattctttcataggttgatggacatttgggttgtttgcactttctggttgttataaataatgctgctattcaggtacaagtgttgtgtggacttaagttttcatacgtttcatatgaagataactattagtgaaattgcttggttttgttgtaattctgtgtataacattttgaggaacttataaattgtttgacaaagtggctgtaacttttagattcttattagcaatatatgggagttccaatatctctacatccttgccaacacttgttattgtatgctttcttgatcatagccatcctcatggtatgaactggtatctcattatgattttgatttgcatttccataatgactarttatgttgaccttcatgtccttatttgtcattcatacatcttctttggagaaatgtctgttaaaatcttttgcccattttataatttgactgtctttgtattgctgaattgtaagaattctttattctgc

SEQ ID NO: 323831 - DNA, 553 bp, Homo sapiens
tgactagttatgttgaccttcatgtccttatttgtcattcatacatcttctttggagaaatgtctgttaaaatcttttgcccattttataatttgactgtctttgtattgytgaattgtaagaattctttattctgcatataagttccttataagatatataatttgaaaataccttctctcattttgtgggttggcatttcacttccttggggtgtcttttgaagcacaaccttttttaattttgataaagtccactttatttttgtttcctttcttgggctttgacactaaagagttgcacctaagaaaccattgcctaatttgaagtccccaaaagatgtgtactggcattttgttctgatatctttataggtttagctcttacatttaggtctttgatttatttttgagttaatttttatatgtgatgtgtgacaggggtccaacttcattcttttacatgtggatgtttgttgccccagcaccatttgttgaaaacttctttctctcttgaattatcttggtgtatttgttgaaaaccaattgaatgt

SEQ ID NO: 323832 - DNA, 553 bp, Homo sapiens
tgactagttatgttgaccttcatgtccttatttgtcattcatacatcttctttggagaaatgtctgttaaaatcttttgcccattttataatttgactgtctttgtattgctgaattgtaagaattctttattctgcatataagttccttataagatatataatttgaaaataccttctctcattttgtgggttggcatttcacttccttggggtgtcttttgaagcacaaccttttttaattttgataaagtccactttatttttgtttcctttcttgggctttgacactaaagagttgcacctaagaaaccattgcctaatttgaagtccccaaaagatgtgtactggcattttgttctgatatmtttataggtttagctcttacatttaggtctttgatttatttttgagttaatttttatatgtgatgtgtgacaggggtccaacttcattcttttacatgtggatgtttgttgccccagcaccatttgttgaaaacttctttctctcttgaattatcttggtgtatttgttgaaaaccaattgaatgt

SEQ ID NO: 323833 - DNA, 548 bp, Homo sapiens
aaatctttctacttctctccatctatagagccctactctactcctagctatgtcatctcaamcttgtgtgtctcctggcatctgttctttcttccttttatgccattcttcatacagtggacacatttttgcaaaacgtaggttgagtcatgccatttccccatttaaaactcttgatgatttattgttgctcttttataaaaatcctcaaatcagcaaagaagcggctgacatgttcagtaaagaagtatgtatattaaataagaaccaatatagaaacaatacagaaatattagagaaatgagtgacaataaaaatgagtgaaaggatagaaacttagcctctgttctaatgtcaactggttatacaacccacttaaccttttaaaagagactccaatatctaggcctgttcagttcaaaattctaaggatttatgttttgtcttttcggatgctgaacattaaaggagaaaaatacgtcatttctaaataaacatacctttagtttgcgtaatgctgtatggtttaaaaaatgtttgtacatgag

SEQ ID NO: 323834 - DNA, 611 bp, Homo sapiens
aaaacttgtacatggatgttcacagcagcattattcataatagccaaaaagcgcaaacaacctaatgtccatgaattgatgaatgtatgaacaaaatgtggcatgtccataycatggaatattattgagccataaaagggaacaatacatgctacaacatagatgaaaggacatctattgtattccatttatatgaaatgtccaaaataggtaaagtcacatagataataagaaggctggtggtttccaagggctggtggaatgaggaaatgaagagtgactgctaatagttgagtggtttctttctgaggtgatgaaaatattggttacacaaccttgtgaatgtacaaaaaaccattgaattggatactttaaaatggtaaattatataggatgtgaactataacttaatattgccagtgggaatgtaaattggtacaatcccttaagatgcaattttgcaatatttatcaaaattacaaatgcatctatccttaaacccagaaaattccatttctaggaacttatccttcatatacgttccaatatgtacaaaatgacatatgtgcaaagtattcacttcaccattctttgatatatcaaaaggctgg

SEQ ID NO: 323835 - DNA, 611 bp, Homo sapiens
aaaacttgtacatggatgttcacagcagcattattcataatagccaaaaagcgcaaacaacctaatgtccatgaattgatgaatgtatgaacaaaatgtggcatgtccatatcatggaatattattgagccataaaagggaacaatacatgctacaacatagatgaaaggacatctattgtattccatttatatgaaatgtccaaaataggtaaagtcacatagataataagaagrctggtggtttccaagggctggtggaatgaggaaatgaagagtgactgctaatagttgagtggtttctttctgaggtgatgaaaatattggttacacaaccttgtgaatgtacaaaaaaccattgaattggatactttaaaatggtaaattatataggatgtgaactataacttaatattgccagtgggaatgtaaattggtacaatcccttaagatgcaattttgcaatatttatcaaaattacaaatgcatctatccttaaacccagaaaattccatttctaggaacttatccttcatatacgttccaatatgtacaaaatgacatatgtgcaaagtattcacttcaccattctttgatatatcaaaaggctgg

SEQ ID NO: 323836 - DNA, 611 bp, Homo sapiens
aaaacttgtacatggatgttcacagcagcattattcataatagccaaaaagcgcaaacaacctaatgtccatgaattgatgaatgtatgaacaaaatgtggcatgtccatatcatggaatattattgagccataaaagggaacaatacatgctacaacatagatgaaaggacatctattgtattccatttatatgaaatgtccaaaataggtaaagtcacatagataataagaaggctggtggtttccaagggctggtggaatgaggaaatgaasagtgactgctaatagttgagtggtttctttctgaggtgatgaaaatattggttacacaaccttgtgaatgtacaaaaaaccattgaattggatactttaaaatggtaaattatataggatgtgaactataacttaatattgccagtgggaatgtaaattggtacaatcccttaagatgcaattttgcaatatttatcaaaattacaaatgcatctatccttaaacccagaaaattccatttctaggaacttatccttcatatacgttccaatatgtacaaaatgacatatgtgcaaagtattcacttcaccattctttgatatatcaaaaggctgg

SEQ ID NO: 323837 - DNA, 611 bp, Homo sapiens
aaaacttgtacatggatgttcacagcagcattattcataatagccaaaaagcgcaaacaacctaatgtccatgaattgatgaatgtatgaacaaaatgtggcatgtccatatcatggaatattattgagccataaaagggaacaatacatgctacaacatagatgaaaggacatctattgtattccatttatatgaaatgtccaaaataggtaaagtcacatagataataagaaggctggtggtttccaagggctggtggaatgaggaaatgaagagtgactgctaatagttgagtggtttctttctgaggtgatgaaaatattggttacacaaccttgtgaatgtacaaaaaaccattgaattggatactttaaaatggtaaattatataggatgtgaactataacttaatattgccagtgggaatgtaaattggtacaatcccttaagatgcaattttgcaatatttatcaaaattacaaatgcatctayccttaaacccagaaaattccatttctaggaacttatccttcatatacgttccaatatgtacaaaatgacatatgtgcaaagtattcacttcaccattctttgatatatcaaaaggctgg

SEQ ID NO: 323838 - DNA, 566 bp, Homo sapiens
cactttaatctctagtggaatcaatgaaatttagcagaaaaaagtgaaaattttagcattaaattcaaagaataacttttgagagaactgtttgactcattatgtcaagggttgaacttttcatttaaacaccctgtagaagaccttgaaggactgagaatttccgctgtggttttgtgtctttctcccccrtaatccttcctattctccttgataaaaattaagaagaaataattgatgggtgctaatctgcaggaacaattcctcctttaaccaacttcccctgaaactagctaaacttgcacagattcttacgtcctatgtttttaaaataaaagcatatgttaatagtgctctggaaatgtgcaaattgaagagttaattctattttccatctatgtattgaacacataatgtgcagtacaagctagttattttataaaatctctcaattggagtttgatgtttcttcacaattagatagaggttatggatttgtgcaggaataccacaaaaagtgatgtggtatgtttctcggtgcttcctattaagaggcacatgatgct

SEQ ID NO: 323839 - DNA, 602 bp, Homo sapiens
actttaatctctagtggaatcaatgaaatttagcagaaaaaagtgaaaattttagcattaaattcaaagaataacttttgagagaactgtttgactcattatgtcaagggttgaacttttcatttaaacaccctgtagaagaccttgaaggactgagaatttccgctgtggttttgtgtctttctcccccgtaatccttcctattctccttgataaaaattaagaagaaataattgatgggtgctaatctgcaggaacaattcctcctttaaccaacttcccctgaaactagctaaacttgcacagattcttacgtcctatgtttttaaaataaaagcatatgttaatagtgctctggaaatgtgcaaattgaagagttaattctattttccatctatgtattgaacacataatgtgcagtacaagctagttattttataaaatctctcaattggagtttgatgtttcttcacaattagatagaggttatggatttgtgcaggaataccacaaaaagtgatgtkgtatgtttctcggtgcttcctattaagaggcacatgatgctgaattgctttcttatgggataactttgttaaggtaaa

SEQ ID NO: 323840 - DNA, 500 bp, Homo sapiens
acatgtggaggcagaaatgcaaacaaacagaagctatgatagaggtatggacagtgggggctcaaggaagaatatgactcaattctacctggggtggcagagtggggctggggacagcattccatcatcaccaattgtatagagaagttgcttgagctgagttttgaaagatgagtagattttgactgatacaaaatcaatcaaaaaattgatgacttctttggattttctgatgggtttttgactccatatagatggaaaagaaaaggtccaagactgtattttcataatctctacccagtgtcttatagcccactaccctgactctccatatcagaccctgcctaccgtgctgctgtcaaatttgattttaactacatatctcagagctctccattgccctaagaatcacaaccaaaaatatactgrtttactttctttcatttacatgtgcttttaggtaatatggttcctttaatagagctaatgagagatgagta

SEQ ID NO: 323841 - DNA, 658 bp, Homo sapiens
aaacaagcagggttttagttgttaaaaaggacagaccaaatatttggtacttttactcgcttaatacatcaaacatgggtcttctgtgctacttgtcagggggattctgaatatgaagatcaaaccttgcattacccatacctcctaagtgagagcacctcaacattttgtgcttaccttacaactttcatctaaagatctccaagatctgtgaatacttatgttttaaattacaggaaaaagttaagttgttgcttgccaatatgtaataaattaggacactgttttccagtttccagttccattttaacttgtagagaataaacgttttcaatcyttcaacagactttggagtcttttcatccttaataaatgttaaaggagagataaaaccccattgatatctcagcattataagcaatggcattagcctcattaaagtgaggaaatattttactacaaacttttataacatttttctttttaatcctcattcatccctgattttgccctttccctgcatgcatcttttttaaatctccacatcttttggtggctacatccgtgtattagtccattttcacactgctgataaagacatacccaagactgggtaatttataaagaaaaaggtttaatggactcacagttccatgtg

SEQ ID NO: 323842 - DNA, 596 bp, Homo sapiens
tgtcaaaaaagagcattgctatgaatttttattcccttcctcttcaacaatacatatgatgattcctcttgtttccatgtcgaaagtgtatttaataatatctctataaaagaatcaaattcttcaagggatggtatcaatttcaaaacatagttataataagtgccataataatgaattaatccaagttggaatttcttttcttgttcaaagtaatgttgccacttttaaaaacaagttttgtagctacttaggaggctgaggcaggcagatggcttgagctcccaggaggcagaggttgcagtgagctgtgattgcaccactgcactgtagcctgggtgacagagcaaggccatgtctcaagaaaagtaaataaataaaaacaaaataaaattaaaacaactttgataattaaaggaataaatttttcaagtcattctctaakgcatttaataatttccttaaacaactacttcaaaaatgttcttcttttaatttgcataatcctcttgctaaagtaattgcaaaatatgaaaaagaaataagtagcctttacttaataaactttttaagtacctcaacaagaatttgggggg

SEQ ID NO: 323843 - DNA, 621 bp, Homo sapiens
atgggaaagcctgagcgtggtacttatgtaccaaaagggcacctagggtgaaatttcactttctacccccattccactctgggttggactgaaaaacacgcactggtgcaattaaggatgtaaaaaaattaaccaaaccagcggatatagctaagaactcaagtaaggctaagcttgctgttgaacagtgacgcaaagtcaccccggtgtgtcttcggtgggacagtgatcatataaaatcagatgttgacatatgaaaacagtgtttctgatttgttaaattaccacattaacagcaagtgctgctggtttgatttgcacctgatatgataagaagctaattatatgacagggcgacccaygtggcagggcaatttcagtcctagcaacacaatatttacctggacagcaaacagtcaagctgctaattcaagatgcaatcttttccagaaacttagccaatgcggtaaaaaacaacgttccccattcctcacacagacactcgccaggtctaggaaataaactataacttattttttggtcaactactgatttagaaatgatttactgatgaccttttataataagtattttatattaaatagtcttaagtaaaaatgt

SEQ ID NO: 323844 - DNA, 621 bp, Homo sapiens
atgggaaagcctgagcgtggtacttatgtaccaaaagggcacctagggtgaaatttcactttctacccccattccactctgggttggactgaaaaacacgcactggtgcaattaaggatgtaaaaaaattaaccaaaccagcggatatagctaagaactcaagtaaggctaagcttgctgttgaacagtgacgcaaagtcaccccggtgtgtcttcggtgggacagtgatcatataaaatcagatgttgacatatgaaaacagtgtttctgatttgttaaattaccacattaacagcaagtgctgctggtttgatttgcacctgatatgataagaagctaattatatgacagggcgacccatgtggcagggcaatttmagtcctagcaacacaatatttacctggacagcaaacagtcaagctgctaattcaagatgcaatcttttccagaaacttagccaatgcggtaaaaaacaacgttccccattcctcacacagacactcgccaggtctaggaaataaactataacttattttttggtcaactactgatttagaaatgatttactgatgaccttttataataagtattttatattaaatagtcttaagtaaaaatgt

SEQ ID NO: 323845 - DNA, 594 bp, Homo sapiens
acattctttgtgattccatttatataaagtataaaaacaggcaaaaccaatctatgcagctataagtcagaatagtagttactcttggagaaaggaggggtagtttctggaaggacacacaagggaaatgtcagggtattattaacatgctgtttcttgatctaggtgctagttatatttaaaatttcactacactgaatcatgatatcacaagtacggtcatcccttggtatccatgggggattggttccaggacctccctaggatactaaaatttgcagatgttccagtccctgatataaaatggtataacatttgcatataacctaaatcattgcatactttaaatcatctctatattacttattaatacctaatacattgtaaatgctatgtaaatagttgttacacagtactaaacgtttagggaataatgacaagaaaaataagtctgtgcatgttcagtatggacaaaatttttttcgaatactttagtttggatgcacagatggagaatctatgactacagagggccagctgtatacatatatgcacttttctgtaagtttattyttcaataaaaagtttcaggtc

SEQ ID NO: 323846 - DNA, 609 bp, Homo sapiens
attgtttgaattttctggaataatatataaatggaatcacactttttcatctggttttgtctactcagtctaattattttgagatttatctttagtgttgtatgtatccatttttagtgctaagtagtaatccattatatggatataccacagtttgcttacccattcctccaattgatggatgtatggattatattctgcttttggctactacatataaatctgttatgaacatttatgtctttgtactttcatttcttttgggtaagtacctagttgtgggatagctttgtcatgtagtagtttttaagaaactgccaaactgttatccaaagtgattttaacattctacctaccccgcaacagtatgtgagaattccacttgctctgcatccctcctaatacttgatgtggtcagtatttttaattttagccattctggtagggatgcaatggtayttcattgtggttttaattatttttttgagccaaagaacacgcacgaaggcaaaggtgttggtgtgtttttgggaggtggggcatacagctttatgtatacttttactgacaaaatttaacataaaattattcacttataattctgccttt

SEQ ID NO: 323847 - DNA, 579 bp, Homo sapiens
ttatggggaacccataagcactgtgaaacccgaatgtctcccgaaccatccaagaaatacggctctacttattatagttcacagttcagtatatgtgcttgtaggttaattcactggaaatggatgctctctctacctcttgctaaataaaaattagaggaggatggccaggtgtggtggctcgcgcctgtaatcccaacgctttgggagggggacagatcactggagctcaagagttggagaccagactgtgtaacatgatgaaaccccatctctacaaaaaacattcgcctgtagtcccaactactcaggaggctgaggtaggaggaytgcttgagccaggaaggtggaggctgcaatgagccatgatcgcaccacagcactccagcctgggtaacagagcaagaccctctctcaaaaaaaaaaaatataggaggccattgtttgttgctgttgttgtgagtgcagtagtgagaagggtggaaagagctgaacaaggggtttgatctgtaactgactgcgaacaatcggttgaggtaactcactaccttcagaccagccaggaggctactgttttga

SEQ ID NO: 323848 - DNA, 579 bp, Homo sapiens
ttatggggaacccataagcactgtgaaacccgaatgtctcccgaaccatccaagaaatacggctctacttattatagttcacagttcagtatatgtgcttgtaggttaattcactggaaatggatgctctctctacctcttgctaaataaaaattagaggaggatggccaggtgtggtggctcgcgcctgtaatcccaacgctttgggagggggacagatcactggagctcaagagttggagaccagactgtgtaacatgatgaaaccccatctctacaaaaaacattcgcctgtagtcccaactactcaggaggctgaggtaggaggattgcttgagccaggaaggtggaggctgcaatgagccatgatcgcaccacagcactccagcctgggtaacagagmaagaccctctctcaaaaaaaaaaaatataggaggccattgtttgttgctgttgttgtgagtgcagtagtgagaagggtggaaagagctgaacaaggggtttgatctgtaactgactgcgaacaatcggttgaggtaactcactaccttcagaccagccaggaggctactgttttga

SEQ ID NO: 323849 - DNA, 508 bp, Homo sapiens
tctggaatatgttattgaacttgtgaacaaaagacattctaggatttgagatatcaattcaacttgtttcttgcaccattatgataaaaaggagaattctttgtagtttattatctcacatctacattatcttaatttatcttcccaactctgcaaagcaagcagagctgatattctgtttgagagtgtgtggatatgaaattgaagatcagggcctgaatagcttctcaggttcccatagccatttccagagctgtctcatgttttctgaccccaagtccaagttctctccaacacagtctttcccgggcagattataggggttctacccacttcaacagcaggtcttcaaataatgtttcattcaatattatttcrttataacattgatgagaaggaaaaaaatagatttctccccagagccgctgtctttgtggagtttgcatgctctccccgtatctgtgtgagttctctctgggtcctgcagtttcctcctatatcccaaaga

SEQ ID NO: 323850 - DNA, 561 bp, Homo sapiens
aaaggagcagagaagttcctgtacctctgaaatcacccagtgtaagtggcaatctgcttggtcttcacaaataaggctggcagcaggcaaggattaattctgatgtaaattaactacatttctattttgattaaatataaacttgttaaaattaaaatagctgttcttcttgcttggatttcaatttgtaactgtgaaagagaataaagtttgaggagcagtgctctcaacgttatctttctgaagggacagggttttayagaatgcccagtccaaccccaccttcctgtcttccaatgcccagtccaaccgcagcttcccatctttccttctggtcgagtcatggagccacttggtgtgtctcctctgcaaagctccaatcagaatatttaattgtctacaaaggatgttctatggattatctgtcaagtgttttgggactattaactacttgataaatgctaataagatgcatcaaggaagctgatattatttgttcacctaacatatattattccatctctctgtataattacgttaggttttattgttgtttacaga

SEQ ID NO: 323851 - DNA, 561 bp, Homo sapiens
aaaggagcagagaagttcctgtacctctgaaatcacccagtgtaagtggcaatctgcttggtcttcacaaataaggctggcagcaggcaaggattaattctgatgtaaattaactacatttctattttgattaaatataaacttgttaaaattaaaatagctgttcttcttgcttggatttcaatttgtaactgtgaaagagaataaagtttgaggagcagtgctctcaacgttatctttctgaagggacagggttttatagaatgcccagtccaaccccaccttcctgtcttccaatgyccagtccaaccgcagcttcccatctttccttctggtcgagtcatggagccacttggtgtgtctcctctgcaaagctccaatcagaatatttaattgtctacaaaggatgttctatggattatctgtcaagtgttttgggactattaactacttgataaatgctaataagatgcatcaaggaagctgatattatttgttcacctaacatatattattccatctctctgtataattacgttaggttttattgttgtttacaga

SEQ ID NO: 323852 - DNA, 525 bp, Homo sapiens
tatttgcttttgctggtcatttgggaagactatcaactgagatttcttaaggcattgtttttgggttttttttttatttttttgatcacactgattgcattaatttaggttacacacctgtaaaggaactgaagcagctacattgtctggggtaaatactcggggttcatyatctcatgccaggaaaatttagtacatggacacacacgaggagttaggagcagaggttttgataggcaaaagaaagagaaaggaaaacagctcactctacatagaggcttaatgacatggggtttactaaagaatagcagaatctctgaatgatagagtctctgtgtctgcctttgacccttttcaaacacccctgttgtttaagaaaacattttcctccaaagtaggctgccttcccctccctacacgggctgtgttttccacctgttatctttcttttctgtgagcttcttcactttcctaaagaaaagattctgcagtaacttgatttccttccccatgatgcagtaaaaa

SEQ ID NO: 323853 - DNA, 506 bp, Homo sapiens
ttgtttctagttctcctagaatttttttcttgtgtttggttggaggtgttggtttttttgttttaatcttcatgtagcatattctccttgttctacaggtgaagtagaaagtgtgcaaactaagcaagtcaagagtgagcacaggacccttaatttcattaaacactgtgtaactggtaaagattaatgtacatatctcttgctaattctttccaattacttagttcatataaattcccaagcctggttaattatgctgaagtcaggtagtaattttgaacagtgttccaacaacaagggaattttcctggtgtaaccttgccctctcacacagactctcagcagattaggccctcagcctggagtgcattcattttccactcaggcctaattgctgccgactggctgccacaggtacctggatagcctgagtttaaagagkcagggacttctgagaacaaataaggaaagattaattgtttgttttgttccctcccaagagaaat

SEQ ID NO: 323854 - DNA, 609 bp, Homo sapiens
aaatgttagctttgtctcttcccaatatccactcctactctggcaataaagagtttggggttgaaatttaatttactttcttctataayaaaatgaagttgcatttcatatttttgaccttctcttcttctagtagtagaaaactcaactaatttctcaaggttttcacataagagacagtcttgacaagcagaaggagtttaaggtgcaagaggcacacttgaaatgctggtgtgctcagtcgggtgtgtgccttgactaatttacttactctgtgccccttccagtatctagtgtgacagagaatacctactccatgctttgcccctgaaatatgagctttcatttccaaggtgggaaaagagtatttggcatcagccttgtcagactcaaaaggaagttgaaaagaaagaagaccttcactctacaggttgctgttggtggaagaccagttcaagtatgggaacagagagccattgcctctgaaattgccggtgctcatgctttgtcccatacaaatgagagctgtgtccatgaggtcaaagggaatccgtaagcttaaagtgcagatgatatcgtggggaatatacttgaatacttctaaaccaa

SEQ ID NO: 323855 - DNA, 572 bp, Homo sapiens
tttagcttggcagcttgccacataccccaagaaaattggtattccattagtaaagaagaagggaagactggatcttgcatagatgcaaaaagactggtgtaatctggaaaactcccagaaaagggtatattcattcttgtgtataggtccctgaacaaatgtctgtaatttaactcccaagttatagaaggattcatttcaatgttagatttgggagaagggctagggtacatatgttyttctttccctgaactcagagaacaggttccagcttggaccccctgtgtagtccttaccagccatgtgtagacagccctaatttctcatctttcttgctattgtgttctgtcccagtaggctactattcctacctgtgtattttagtgaacaacttcattgactgttttttgttgttgttgcagccaagaggccaagcccctcctcctaactttctttatagatatgttttttattttatagcctatgagccatctccacaagggccacttttcatacattgtttctctgaggactagctacacatcttataagtctgttgtcacactctctaa

SEQ ID NO: 323856 - DNA, 579 bp, Homo sapiens
tttgaagctagagacacctaatatgaaatgaaacatatagtcattaaaattagctcaatgagttagttaagaagcagtttagagatagccaaagagaggatttaatgcgtggtccctggatctgatgaacactactacatatgttgtagttgtagtcaaaatacaaatcagattgtgtcatgtacagtgagayaccccatctaccacccacccacataagatcactcaatgactcccaagtctacagagaaaagaaaaaaatccttcacatgatccagaagcccttcctaacctctccaggttaggtgcccccattgcttagctttattattttctgtgaccttccttaagggtttttttaatgtcatgcttctactttccacaggcctttgaacaagctggaatatcctactcacattattctcattagctaattcaactcccagctcaagggtcacttccccagggaagctttccttcaccctacaggttaataggggtgctttgttactaatgatcaaggaaactagctactcccctttaaggtactaattcagtttgtaatttcacattcattgc

SEQ ID NO: 323857 - DNA, 579 bp, Homo sapiens
tagcagatatccatttgaattccttgagtagtgcagtttttaccaaggcacaggctagacacatcttgcaaatggtgtcacacacaaaaagggggatgcatggtacaatgggttcttcagagcacatctgatttttatttttcaggtggtcaggatccttcttaaatctgtttagtggctgcctttttttttttttttttttgagacagagtcttgctctgttgcccaggctggrgtgcagtggcgcgatctcggctcactgcaagctctgcctcccgggttcatgccattctcctgcctcagcctccccagtagctgggactacaggcgcctgccaccacgcctggctaatttttttgtattttttaatagatacggggtttcactgtgatagcaggtatggtctcgatctcttgacctggtgatctgcccgcctcagcctcccaaagtgctgggattataggcgtgagccaccatgcccggcctactggctgcctttttaaaagtgttcctttgctaacctgattatggctcattttgtgaaattttgaccaggtgcagggaagtggtaagtagaag

SEQ ID NO: 323858 - DNA, 579 bp, Homo sapiens
tagcagatatccatttgaattccttgagtagtgcagtttttaccaaggcacaggctagacacatcttgcaaatggtgtcacacacaaaaagggggatgcatggtacaatgggttcttcagagcacatctgatttttatttttcaggtggtcaggatccttcttaaatctgtttagtggctgcctttttttttttttttttttgagacagagtcttgctctgttgcccaggctggggtgcagtggcgcgatctcggctcactgcaagctctgcctcccgggttcatgccattctcctgcctcagcctccccagtagctgggactacaggcgcctgccaccacgcctggctaatttttttgtattttttaatagatacggggtttcactgtgatagcaggtatggtctcgatctcttgacctggtsatctgcccgcctcagcctcccaaagtgctgggattataggcgtgagccaccatgcccggcctactggctgcctttttaaaagtgttcctttgctaacctgattatggctcattttgtgaaattttgaccaggtgcagggaagtggtaagtagaag

SEQ ID NO: 323859 - DNA, 579 bp, Homo sapiens
tagcagatatccatttgaattccttgagtagtgcagtttttaccaaggcacaggctagacacatcttgcaaatggtgtcacacacaaaaagggggatgcatggtacaatgggttcttcagagcacatctgatttttatttttcaggtggtcaggatccttcttaaatctgtttagtggctgcctttttttttttttttttttgagacagagtcttgctctgttgcccaggctggggtgcagtggcgcgatctcggctcactgcaagctctgcctcccgggttcatgccattctcctgcctcagcctccccagtagctgggactacaggcgcctgccaccacgcctggctaatttttttgtattttttaatagatacggggtttcactgtgatagcaggtatggtctcgatctcttgacctggtgatctgcccgcctcagcctcccaaartgctgggattataggcgtgagccaccatgcccggcctactggctgcctttttaaaagtgttcctttgctaacctgattatggctcattttgtgaaattttgaccaggtgcagggaagtggtaagtagaag

SEQ ID NO: 323860 - DNA, 486 bp, Homo sapiens
tgctgaacccctttcaactccagttgggatggcaccaggttcaagaggctgaagaagagatgcagagccagcaaaggagacatggagttttattgtttacatacaggggaaatggaagaggaccagggaagataaccacacagcccagtggcagagagctgggcaggaaaaccacaaccacttgcaaaaagcatgcagtttatatagcatttccacttaacacctcccctctaacaacctccacctggcaaccttcattccagatgaaactcagggcctcgattctctgtacacttatgttctatgggaggggatgggggctcagatgttccttacagacaaggaacagaatcttcctattggccagtactggattccctagcccagtacacacattcaggtktgtctgctatacagggtcatcctcagggtgaccctgtcatgcttaagttattgctatcaggtgtatttatcatgcatatggtt

SEQ ID NO: 323861 - DNA, 582 bp, Homo sapiens
cttgacacccttgtgtaaacagcctttctgattcatgcagataagtaccagatgctatgacaccataaactcaatccccttttccttgtccttccctctcatgataacactgagcccacacagataatccaggataaccccccttttcagaatccttaatttaatcacatctgcaaagccccctttcccatgtaagcgaatacaytcacagattctggggattaggacttgggcatctttgagggaaccattattctgtctactactaacacctttactggccgactttatttttcactcctcctaagagctcttcagtgacagctgagccaatatctcccattacctcattatatgaggtaaaaatggctacccacctatctttgccatgtcgaatgtcttttcctgtgtgttctgatctattcaaaccaagacatttcaagttctcctttttccatgttagctccctttcttccctaatctctttgttcttagaactcctgtccatttagaatacagatttctgcttaaattttggaaacatatgagataaaactgttatccctaaattttatctaatta

SEQ ID NO: 323862 - DNA, 582 bp, Homo sapiens
cttgacacccttgtgtaaacagcctttctgattcatgcagataagtaccagatgctatgacaccataaactcaatccccttttccttgtccttccctctcatgataacactgagcccacacagataatccaggataaccccccttttcagaatccttaatttaatcacatctgcaaagccccctttcccatgtaagcgaatacattcacagattctggggattaggacttgggcatctttgagggaaccattattctgtctactactaacacctttactggccgactttatttttyactcctcctaagagctcttcagtgacagctgagccaatatctcccattacctcattatatgaggtaaaaatggctacccacctatctttgccatgtcgaatgtcttttcctgtgtgttctgatctattcaaaccaagacatttcaagttctcctttttccatgttagctccctttcttccctaatctctttgttcttagaactcctgtccatttagaatacagatttctgcttaaattttggaaacatatgagataaaactgttatccctaaattttatctaatta

SEQ ID NO: 323863 - DNA, 541 bp, Homo sapiens
catctcagccttgttatctgagcatttaagcctcccagccrattctaggtggcataggtaagtctttataaaagaaatgcaaccacttaaatttccttacataaaatttgatcccacacaaacatttccctccacttaccactaatatctatctcatatcatactaatatatttgtagatcattttttcactggacatttataatattctacaatatagtataaataaagtgcgtttaattgcaaatcaaagtttcaaattttgcaaatgaaagattcatgatgtcattgaaagtgatgtttacaactgttcagatcacatccaaagctgttaacaaataaggattttctagagttgcaccagttaacaaaaaaaaggcggggggggagaataattacacatctttaatcatgtttgggtttgttgaaattcttgaatatgagaagtcgtgacttgaatcaaattagggaaattttcagtcattatcttttcaaataatttctaagccccattctatcttcttaccttcttgaacaccaat

SEQ ID NO: 323864 - DNA, 601 bp, Homo sapiens
ttgggaatgtcagttctatgattaggttacaaattattctgactttgtcctgctagtagactctctctacttcctcctcagcttgcagtttgatgaagcaaactgccatattggagaggctcacatggcaatgagccgagggtgacattcagctaacattcattgaggatctaaggacttcagtctaacagctcatgaggaaccaaatcctgtaaagaaccacatgaacttgaacttccctaatcaggcttaagatgaccacagcccagtcaacactttgattgcagcttgtaagaggccttaaagtagaagaactagttaaattctgtctagattccatcaaaggacttcaaacaatgaaaatatagtatttttgaatagtggttstcaaacttaagcaagcatcagaattacccagagcatttgttaaaacatagattgctgagtcccatcctccccttatatgatgttgatgatgctggtctcgggggtcacactttgtgaaccactgttttagaacatgactctggttacatatggaaaaaaataatgagggaggagggcaagcaagggacctgttgaaggctattgtaagaatcca

SEQ ID NO: 323865 - DNA, 608 bp, Homo sapiens
gccttacaattgttccttggtcttcagctaccactgcacaattcactattactagagataaatgagcaagaaagaggtgaagttgagaattcccataaatctcagcttaccactttcctgtatatcacctttttacagatggacacatayctgtgttatacatgacaatgtcatccaatatgtgttttccaattgtaatgggttgaataggcccccaaaatatatgtccacccagaacttgtgaatgtgatcttgtttgaaaagagggtctttgtggatataattaaggatcttaagatgagatcttcctgattaaccaggtgaaccttaaatccaatgacagtgcccttttgacagacagaaaaaaaaaagagagagaccagaggagaaagccatgtgaagacagaggcacagtaatgggaccccaaataattaggcaagttaaaaagcctgactctgcttctaaaagacaaagcatttattcattcagcagatgttttatgaaagacccagaatttgatgggtatggtccagtcaaataatataagctggggtagtaggagggtgtttctgtgatgaagtctaccagaataccttgggcttatcct

SEQ ID NO: 323866 - DNA, 608 bp, Homo sapiens
gccttacaattgttccttggtcttcagctaccactgcacaattcactattactagagataaatgagcaagaaagaggtgaagttgagaattcccataaatctcagcttaccactttcctgtatatcacctttttacagatggacacatacctgtgttatacatgacaatgtcatccaatatgtgttttccaattgtaatgggttgaataggcccccaaaatatatgtccacccagaacttgtgaatgtgatcttgtttgaaaagagggtctttgtggatataattaaggatcttaagatgagatcttcctgattaaccaggtgaaccttaaatccaatgacagtgcccttttgacagacagaaaaaaaaaagagagagascagaggagaaagccatgtgaagacagaggcacagtaatgggaccccaaataattaggcaagttaaaaagcctgactctgcttctaaaagacaaagcatttattcattcagcagatgttttatgaaagacccagaatttgatgggtatggtccagtcaaataatataagctggggtagtaggagggtgtttctgtgatgaagtctaccagaataccttgggcttatcct

SEQ ID NO: 323867 - DNA, 557 bp, Homo sapiens
cttagaagtgcttttgctgcatcccagaagttttagtatgctgtgtttccattttcattcgcctgaatacattttttaattttacttgtaatttcttcgttgacccattggttgttcaagatgttcaattttcatgtgtttgtgaatttttcagagttcttcctgttatttttagttttgtatcactgtggtcagaaaagatacttgayatgatttcaatcttcttaaatttgttaagacttgttttgtgacctaacgcatgatctagcctagataatgttccatgtgcactttagaagaatgtaaattctgcaactcttgaatgaaatgctctgtatacatctgttaggtctatttggtctaaagcagagtttgagtccaatgtctcaatgctaattttctgtctggatgatttttccattgctgaaagtggggtgttaatgtcctatactgctactgtacatactattattgtctatttctccctttaaatctgttaatacatgtgttgtatatttaggtgctctaatgttgggtgcatatatatttataattgt

SEQ ID NO: 323868 - DNA, 608 bp, Homo sapiens
aatgcatcatcttattgcattaaagtgtccttaatgcaatatctccattcgagaaagagactgacagtgagagagcaatgcttcctccaaaggaatggcttttgcatatgatcactgtaaagatttctagctaatgtggcaaagctcaggctcccctctttgaaataaacacaaaactcaatgtgaagaaaaatcataagtacaaaatataaatggaaatatgaaatataaaggtatatgtgtgatatggtttcactctgtgtccccatccaaaatctcatctcaaattgtaatcaycacatgtcaaaggagggacccagtgggaggtgatgggatcatggtggcgatttctcctatgctgttcttgtgatagtgagtgagttctcaggagatctaatggttttaaagtttttggcagttgcctccttactctgtctctttctctctctcctgctggcatgtaagtcatgccttgcttccccttcacattcctccatgattgtaagtttcctgaggcctccccagtcatgcagaactgtgagttaattaagcctcttttagttatgaattacctagtctcaggtagttcattatagcagtgtaagaac

SEQ ID NO: 323869 - DNA, 608 bp, Homo sapiens
aatgcatcatcttattgcattaaagtgtccttaatgcaatatctccattcgagaaagagactgacagtgagagagcaatgcttcctccaaaggaatggcttttgcatatgatcactgtaaagatttctagctaatgtggcaaagctcaggctcccctctttgaaataaacacaaaactcaatgtgaagaaaaatcataagtacaaaatataaatggaaatatgaaatataaaggtatatgtgtgatatggtttcactctgtgtccccatccaaaatctcatctcaaattgtaatcatcacatgtcaaaggagggacccagtgggaggtgatgggatcatggtggcgatttctcctatgctgytcttgtgatagtgagtgagttctcaggagatctaatggttttaaagtttttggcagttgcctccttactctgtctctttctctctctcctgctggcatgtaagtcatgccttgcttccccttcacattcctccatgattgtaagtttcctgaggcctccccagtcatgcagaactgtgagttaattaagcctcttttagttatgaattacctagtctcaggtagttcattatagcagtgtaagaac

SEQ ID NO: 323870 - DNA, 638 bp, Homo sapiens
ttcagcaaagcttctgataaatagctaatagtaattaagtggtgttgaaggactcatacattacagagaacatttagacatgttattggttcaatgratactgaccttaacatggactacagctgcttcagacaggactgatattgaccttaacatggactgcagctgcttcagacaggattttgcctggtcctctcctgttgtcatttttatcaataaattaaagatttcgaatttgttgatgtcactaagtgaggcagaatggtaactgtacaatgtgatagaattagggcccaatatttttaaacacatagaaataatggtgtcaatctaggaagacaaagtctaataaacaccagaccttattctcgtcttaaagagaagtgtacacactgtatgagaaatcaaggtgttgctcagtttaaaaattgtacttttaatgaaagtaatggtaaatgcattgagagctattataaagatcatccactaatcctcagaatcacacttcaaagtaggcattatctccagtttaaggtgaagaaacagggtaagtgagttaacttgccacagttctcacaagaagtttagactgaaattaaatttgtctaattctgacattcatgctctttctaaagctg

SEQ ID NO: 323871 - DNA, 452 bp, Homo sapiens
atgtgggattggagccctcagacaaagktcccactgggtagtggagctgtgagaagagggccacctttctctagatcccagaatggtagatccactgacaacttgcaccgtgcacctggaaaagccacagggactcaacaccagcttgcgaaagtagccttgggggctgtaccctgcagagccacagaggtggagctgcccaaggccttgggagcctgccccttgcatcactgtgccctggatgtgagacatggagtcaaaggagatcattttgaagttttaagatttaatgactcccccactgggctttggacttgcatggggcctgtaacctctttgttttggctaatttctcctatttggaacgggtgtatttatccaatgcctgtattgccatgtatctaggaagtaactaacttgtttttgattttacaggctcacagaaaggactt

SEQ ID NO: 323872 - DNA, 600 bp, Homo sapiens
tcttccccagcacttaatctgaaacagtgctgctcccatgtagccacttgagcacactattgttttatttttctgtaataacttactcctactttgaaattattttatttatttattatctgcctttgcactagaatttaagcttcataaaggactgctcacagttatagcccaacaaactggcacaaagttagtacttatttaatagtggtcctcccacttcagcctcctgagtagctgggactacaggcgccgagctggtaaatttttttttcattatttttagtggagacaacatctcactatgttgcccaggctggtctcaaactcctgagctcaagcaatccttccacctcagcctctcaaaatgtgaagctacatctctactctaaaattctttgggaatatatgttaagtcctacttatgatgaactttagaaacaaccttagtttctttaaatacaattaggcaacaaacaggcaatcaaaatggatcaaagtcctaaaacacatacaggcttktgctattgacaccgcaccaccatttctcctttgttcattgcctttttcttcatatatttgtatatacttccttctctc

SEQ ID NO: 323873 - DNA, 452 bp, Homo sapiens
atgtgggattggagccctcagacaaagttcccactgggtagtggagctgtgagaagagggccacctttctctagatcccagaatggtagatccactgacaacttgcaccgtgcacctggaaaagccacagggactcaacaccagcttgcgaaagtagccttgggggctgtaccctgcagagccacagaggtggagctgcccaaggccttgggagcctgccccttgcatcactgtgcmctggatgtgagacatggagtcaaaggagatcattttgaagttttaagatttaatgactcccccactgggctttggacttgcatggggcctgtaacctctttgttttggctaatttctcctatttggaacgggtgtatttatccaatgcctgtattgccatgtatctaggaagtaactaacttgtttttgattttacaggctcacagaaaggactt

SEQ ID NO: 323874 - DNA, 604 bp, Homo sapiens
tagatagctaatgtttttcttttcaaagaaaaatcctcaaacttacataaaagtagagaattggtataatgatcttctgtatacccatcacctagctccagcacctcttagcaacccacactttcactggaggcctagggagggacccagtggtgctcaggtagaaaggacccagctttcccaagacataatggagctcatggtgtaagaagccttcaagggtcacagcgacttgaaagagaataaaactagatgtatctggaatagactgtgatttaaacctcagtctagctaaaccaaatactgtgttgtacccaatgtatatcattcgtgtgtgaattccaggatttcctcatacacaagctgacacttcaaaaatagcccagggatgtctatagtattgtagggccacagagagcagtgtggcatttattacatgtcaaaataagaaaggctgtgccacatcacaygtaacttttccaaagccccagtaacatcccatagttaccactccaccccactttacatcaatcttctacttggaaaacaactttctatgttttatttctaaaatctttactagtaaaatgtgaaaactaaacaa

SEQ ID NO: 323875 - DNA, 604 bp, Homo sapiens
tagatagctaatgtttttcttttcaaagaaaaatcctcaaacttacataaaagtagagaattggtataatgatcttctgtatacccatcacctagctccagcacctcttagcaacccacactttcactggaggcctagggagggacccagtggtgctcaggtagaaaggacccagctttcccaagacataatggagctcatggtgtaagaagccttcaagggtcacagcgacttgaaagagaataaaactagatgtatctggaatagactgtgatttaaacctcagtctagctaaaccaaatactgtgttgtacccaatgtatatcattcgtgtgtgaattccaggatttcctcatacacaagctgacacttcaaaaatagcccagggatgtctatagtattgtagggccacagagagcagtgtggcatttattacatgtcaaaataagaaaggctgtgccacatcacatgtaacttttccaaagccccagtaacatcycatagttaccactccaccccactttacatcaatcttctacttggaaaacaactttctatgttttatttctaaaatctttactagtaaaatgtgaaaactaaacaa

SEQ ID NO: 323876 - DNA, 609 bp, Homo sapiens
tataacttaagattctttatttgacttaaatccaagcattttctctaaatctgtcttaaacccattttcagaaatgaaactttgagcagttctggaatctgaagaactcattcaaaacattaacatatttcaataacatttactcatatatcatattttactaaattctatgaaatgctttaaaatcatattcactgaaaaactaacgaaaattttgtttctagaaggtaaaatgcaaaccaaacttaaatgggcaaaattttatcaaaaggttagcttcttcaaaagttactaaggagtcaataggtattcataaaagcagaacgttttctgctccctaactagaatgtacactccttgagagtaggtactctgttttttctctttgtaacgctaatgaggatcttgtacrgtgcctgatacacaatggacactcagcattgcatgttcagaatgaattaattaataaataaaacataaggcctggcaatattcagaaaacttcacctcttaaattctaattatccacaaaggtaagcaaagaatgattcggtaatatagaacaaaataatgattcggtaatatagaacaatccaagaaaccaggcag

SEQ ID NO: 323877 - DNA, 622 bp, Homo sapiens
aacatgcattatcatacttcatcctttcaaatccctgtgaggtacttgtgattactctgcatattttacaaatgaggaaaccaggtctcagattaataatgtgcccaaggtcacatagctgggagattgtagaatctaggcttcatggctccagtttctacgctcttaaatatgatgcttcagtgttcccagtattggatagaatacactcgtgaaataaaaataaaatcctaaactctccaagcaactgaacaaacccccttggccaaggagaccccagaaaaacttacaactaagtttcctaggcatgaagggatgggaggttggtcaagcctcattacacacccccttccttgataactaccattagacttttttccctcaaagttaaacagaaatcagccctagaaaacaaagaatggaagactcgctcctcctctaagttcaaccaaccacctggcactgctactgaactcctttcccctttcayggtttggacacagccattgaccagcattcctttctgataagggaccaccaaccacagactggttctggccaacccatagaggccactcacagggcacatctgtgccctctatttcattttttgatgtataga

SEQ ID NO: 323878 - DNA, 595 bp, Homo sapiens
agggaggtgctttgtctctagctctctgtaactaatcagctctgcttcaagggccttgaggagctatttttcttccagccacagttcttccatttaaaatggtaatcccaggtctcattttgtattttctcctgtgcaaggatatgaaggtcacccacttagccaactcttcagttcatgcgaaaatgcatttagaagcagcaactaaggcaatataaaagtgaagatgaattgaagttatttatattcagtaaaaatctgttgtaggagtaaggtaagaaaaatgtgtctccacagcaggaatgctttatacacggttaaggaaaacccatgagccacaaaccactaaccaagattacaaactcacttcattccagaagctgctgagacaggtaaggggcggatgaaggatggtaagtatgtgcctaaggtgcttccaaagcggaagcaccaaagtgactgagaaaaaaacttgaaacaagtatataggtatactacctcaaagtgataaccagtgggaaaagaagaattcgaygagctcatgtttatgcttactcaacagattagttttggtttaaatttgaatcacagaata

SEQ ID NO: 323879 - DNA, 530 bp, Homo sapiens
ggtacagtattatgtcttcgtatatatttatattgtggaatgattaaatcaagctgcttaacacatctcttatgtcacatatttatcttttgtgtgagaacactgaaaatagactttttagcaatcgaaaaaaggcaaacccttaaaagcagagagtagaatgctagttaatgctggaggcaagggatagggaatggggagatgttgttcacagggtacagtttcagttagacacaaagattgagttttagagattgactttatagcagagtgactatatttaaaaatgacttcttgtacatttcaaattttctatttaaaatacacrtagtatctgtattcccagttcttaaaacatgacctattaaataacagatttgcaagactgaatgatttttttttaccttgtcctgatctctagattttttttaaactttatctcattaattgctaattctctctttatgaatgttaaatacttaaaatagcaccaaacataactaaacaaaacaaaaacaaaatttgttttt

SEQ ID NO: 323880 - DNA, 421 bp, Homo sapiens
gactatatttaaaaatgacttcttgtacatttcaaattttctatttaaaatacacatagtatctgtattcccagttcttaaaacatgacctattaaataacagatttgcaagactgaatgatttttttttaccttgtcctgatctctagatttttttwaaactttatctcattaattgctaattctctctttatgaatgttaaatacttaaaatagcaccaaacataactaaacaaaacaaaaacaaaatttgttttttatttcaaatggcatgttccattgcgttctaagactggactgtcttggagataaaggagacttcattattttatgtaatattcctttgagaaatcctgagctttgtgcaaaaatgacatacttcattttttttttgcataattttgtcactccatagagccca

SEQ ID NO: 323881 - DNA, 530 bp, Homo sapiens
ggtacagtattatgtcttcgtatatatttatattgtggaatgattaaatcaagctgcttaacacatctcttatgtcacatatttatcttttgtgtgagaacactgaaaatagactttttagcaatcgaaaaaaggcaaacccttaaaagcagagagtagaatgctagttaatgctggaggcaagggatagggaatggggagatgttgttcacagggtacagtttcagttagacacaaagattgagttttagagattgactttatagcagagtgactatatttaaaaatgacttcttgtacatttcaaattttctatttaaaatacacatagtatctgtattcccagttcttaaaacatgacctattaaataacagatttgcaagactgaatgatttttttttaccttgtcctgatctctagattttttttaaactttatctcattaattgctaattctctctttatgaatgttaaatacttaaaatagcaccaaacataacwaaacaaaacaaaaacaaaatttgttttt

SEQ ID NO: 323882 - DNA, 412 bp, Homo sapiens
gacatattttaatttcttccatcccaccccaccataatattcttacctctatgacagtgctyatcaaaatttgtagctattatttgtttaaatgacttcattatgcttcttaagaggcataaactttctgctatattcatctttgtatgcctgtcacacattacattggctgagacaaggtaaatatttaatacatatctattaaataagaaacttaaaaaaataaaagagtgaatgaataactgtatctaggaagtatgaaagtgacttatcttttagcatttttcatcaaggaattaagaaatgtgtggggaaaaagttaagaggccccagttaaaatggcttttatcccaaattcaggcaataacaaaagttgacgaggatatacagaaaaaggaacacttgcacactg

SEQ ID NO: 323883 - DNA, 412 bp, Homo sapiens
gacatattttaatttcttccatcccaccccaccataatattcttacctctatgacagtgctcatcaaaatttgtagctattatttgtttaaatgacttcattatgcttcttaagaggcataaactttctgctatattcatctttgtatgcctgtcacacattacattggctgagacaaggtaaatatttaatacatatctattaaataagaaacttaaaaaaataaaagagtgaatgaataactrtatctaggaagtatgaaagtgacttatcttttagcatttttcatcaaggaattaagaaatgtgtggggaaaaagttaagaggccccagttaaaatggcttttatcccaaattcaggcaataacaaaagttgacgaggatatacagaaaaaggaacacttgcacactg

SEQ ID NO: 323884 - DNA, 412 bp, Homo sapiens
gacatattttaatttcttccatcccaccccaccataatattcttacctctatgacagtgctcatcaaaatttgtagctattatttgtttaaatgacttcattatgcttcttaagaggcataaactttctgctatattcatctttgtatgcctgtcacacattacattggctgagacaaggtaaatatttaatacatatctattaaataagaaacttaaaaaaataaaagagtgaatgaataactgtatctagraagtatgaaagtgacttatcttttagcatttttcatcaaggaattaagaaatgtgtggggaaaaagttaagaggccccagttaaaatggcttttatcccaaattcaggcaataacaaaagttgacgaggatatacagaaaaaggaacacttgcacactg

SEQ ID NO: 323885 - DNA, 412 bp, Homo sapiens
gacatattttaatttcttccatcccaccccaccataatattcttacctctatgacagtgctcatcaaaatttgtagctattatttgtttaaatgacttcattatgcttcttaagaggcataaactttctgctatattcatctttgtatgcctgtcacacattacattggctgagacaaggtaaatatttaatacatatctattaaataagaaacttaaaaaaataaaagagtgaatgaataactgtatctaggaagtatgaaagtgacttatcttttagcatttttcatcaaggaattaagaaatgtgtggggaaaaagttaagaggccccagttaaaatggcttttatcccaaattcaggcaataacaaawgttgacgaggatatacagaaaaaggaacacttgcacactg

SEQ ID NO: 323886 - DNA, 561 bp, Homo sapiens
aaaacaaaaatcaaaaacgaaaaaacatggccaacaatattgtccaaattgcatttgtaccccataaataaataatttttaaaattctgyctatataaactaacttcaaatacagcataggtaagataaaagtaaaaagagagaaccagtaaaataatttaaaaatgcaagtgaggttatagtaatatatcagctacataaattttattttatttattattattattattattattattattttgagacagagtctcgctctgtcacccaggctggagtgcagtggagcaatctcaaactcactgcaagctccacctcccaggttcatgccattctcctgcctcagcctcccgagtagctggtactacaggtgcccaccaccacgcccagctaatttttttgtgtttttagtagagacggggtttcacctgttagctaggatggtctcgatctcctgaccttgtgatcctccagtctcagcctcccaaagtgctgggattacaggcatgagccagggtgcccggcccagctacataaattttaaaaagtaaaaaaagtcaa

SEQ ID NO: 323887 - DNA, 561 bp, Homo sapiens
aaaacaaaaatcaaaaacgaaaaaacatggccaacaatattgtccaaattgcatttgtaccccataaataaataatttttaaaattctgcctatataaactaacttcaaatacagcataggtaagataaaagtaaaaagagagaaccagtaaaataatttaaaaatgcaagtgaggttatagtaatatatcagctacataaattttattttatttattattattattattattattattattttgagacagagtstcgctctgtcacccaggctggagtgcagtggagcaatctcaaactcactgcaagctccacctcccaggttcatgccattctcctgcctcagcctcccgagtagctggtactacaggtgcccaccaccacgcccagctaatttttttgtgtttttagtagagacggggtttcacctgttagctaggatggtctcgatctcctgaccttgtgatcctccagtctcagcctcccaaagtgctgggattacaggcatgagccagggtgcccggcccagctacataaattttaaaaagtaaaaaaagtcaa

SEQ ID NO: 323888 - DNA, 383 bp, Homo sapiens
tggccaggctggtcacaaactcctgacctcaggtgattggcccgcatcagcctcccaaagtgctgggattacaggcgtaagtcatcgtgcccagctaagattactaatatttataagctctaccttctttcttggagaaatgactttataatttcactttctaattcagttacctgttgaaactaaattaaaatatattcatatgcaaaatgcaagtaaataaaaacagcagctttctctatgctaaaaggaagttcctttggagctcatttccttgacaatgsaagaaagtacttcactgcactatcttcattatgcaaataaaggtgcattttagctctttgaagaagaagaggaagaacatgtctctcaaatggcaggaa

SEQ ID NO: 323889 - DNA, 453 bp, Homo sapiens
ggtcaggtatgactggtgctagaatgaggatgaagggaagagaaagggaagaaataattctccactctttgtttccaattttagttctttaaagtaaaagtacaaaacattttgtagagatgtagtttgtggtggcayggttgaaaaacttctgcagtttatgattcctccactacagtgtgataatgttttaaatagcatttaaaatgtagattctgtccaatccttacaattaacttttttattgtttggaatccatgaagttggtatatgcatgagcagatacatatttatttaagaaaaaaaattaggccttacagaaaattgtttctcagagacatgataaaagttaccagataatgtctctcagactatatctatgaaaaaatacataaccaaatagacaccaattgcaaatgaattaattacattgaaattctaataactttcatt

SEQ ID NO: 323890 - DNA, 594 bp, Homo sapiens
gaggcacttaccaccttttgaacagcattagtttggaggaatgagttttagagcctaggaagcctgctgctgtctcatccttcccaggtagctcagggaaggagtggcagcccactctgtgtcagttgccactaaaccctgatgaccagtcagtttgctctggtgaggaaagcacagcaggtgacttagctcagtcaagacaaacctgagacccaaggatggaattgtgacttctaaggttagaaagcagaggcgaatgagaacctttatttggttcttatagtttctatttctctgctaggttttcacattatttctctattatatgcatatttccccttaagtccttgaatgtatttaggataagcctcaaaatccaaattctgtcttycctgtggtgggcagcaaagcaattgttcagctctcaatcttccatctattgctttacactgagaattttggagcctccctgattcgggagcagctcaggaattgccaaataatttaggcagaatgtatttgtagaccttgacaggcagaggttccttcatttccacaattgccaccgtaattttccaggctctcggcctgcat

SEQ ID NO: 323891 - DNA, 594 bp, Homo sapiens
gaggcacttaccaccttttgaacagcattagtttggaggaatgagttttagagcctaggaagcctgctgctgtctcatccttcccaggtagctcagggaaggagtggcagcccactctgtgtcagttgccactaaaccctgatgaccagtcagtttgctctggtgaggaaagcacagcaggtgacttagctcagtcaagacaaacctgagacccaaggatggaattgtgacttctaaggttagaaagcagaggcgaatgagaacctttatttggttcttatagtttctatttctctgctaggttttcacattatttctctattatatgcatatttccccttaagtccttgaatgtatttaggataagcctcaaaatccaaattctgtctttcctgtggtgggcagcaargcaattgttcagctctcaatcttccatctattgctttacactgagaattttggagcctccctgattcgggagcagctcaggaattgccaaataatttaggcagaatgtatttgtagaccttgacaggcagaggttccttcatttccacaattgccaccgtaattttccaggctctcggcctgcat

SEQ ID NO: 323892 - DNA, 568 bp, Homo sapiens
agtatagcaggttactgatgtcagtctttaagaatgggaatttgaaaattgtgccatttcctgccaaatcattgccacttaaaactaaagggactgaaaaatttttaagataatacaacttcccctatgtttatcctgcatctcaaacaataaaatctattacataaagtatttaagtggtacagggagaaattaaagaaattaaattaaagagcccttttctttaatrttctacgttgtttaatgaagagcatagaaaaggaaatagccacaagaagagacatgagaaagatacagattaatggaagtagagattccaaataagataaccaggagaaacatgactctcacaagaaaccacaaagatagtgaggaagacgctgaatttttcaccatataatacttgggactccagctatacgtcaaaagccaaggatcaagataacttcagcaggctgaaaggccctgctcctccaggtgtctgacactggggttataggtacacagtgccaacaacatccctttgaggtgcttggttaaagatgctgcataatggaacattgatttt

SEQ ID NO: 323893 - DNA, 546 bp, Homo sapiens
aatagccacagagggtcttcacagagtatacagcagagtactgatcagtgcatgaatgttagaaaattccctaaaataagagacagaaccatccaaaaggattaaagacttaagtgcttggcattcacacagggcaagaaacagtgacacagaagtgacacagatattagaattagcagaagaatactttaaagtggtaattatagccgggtgtggtgcctcatgcctgttaatcccagcactttgggaggctgaggcaggcagatcacctgagatcaggagtttgagactggcctggtcaacatggtgaaacccaatctctactaaaaatacaataattagccagacatggtggcagatgcctgaaatcccagctacttaggaggctgaggcaggagaattgcttgaacctgggaggtggaggttgcagcgagccgagatcatgccattgcactccagcctagttgacagagtgagactctgtctcaaaataataataatgaagaayaaagtggcaattatacactcaaaaattaagtagagaca

SEQ ID NO: 323894 - DNA, 620 bp, Homo sapiens
aattgtgttgcccatgctttctccaagaaaatcaaatcagattttctggggaggggaccaaggcttcagtatttttttttaatctgttcaggtcattccattggcacccatgattgaaaactactgacttaacaaataaacagggtttatagttttgtgggaatctttgaccatgtctgacttaagcaagatggtggcctcatatagtcaaatgctgcaatgataagtggtatatgtgcaaggcattgtcatttaaaggagaaaattatttgtcttttcccccttactcttcttatgttcttctgatcgcttcaaagaaaaagtctcagtttgttgcttggtgggtctgtaacacatctgtatacttgcttatctttcctttaagtcaaagagaatgcagatttcagggccagagacttcatctagtataaattagaacttaatgatatagttttttaaatttgttacttatatatttgtaaagctattgtccagcaagtaatactgactgaagcaacattaaatttcctttttaaataaattagktgaataaatttaaagaatgcataaataattataggtactatactcaatatgtgagaaagcatcataaaggtctt

SEQ ID NO: 323895 - DNA, 582 bp, Homo sapiens
ttataacactgtttgatagcaaaataagcaattaaatytcacttcacaaatcttatacatcagggttctttcccctttagattttcttcaggagagcaagcctttctgttatcatttaaaatcagtctttgagtaagtaaaagttttggattttacttagcttctacaaaaatggttattttttatattgtagcacactattctaaggagtcttaaatatagactattaaaagatagtaaaatatttcagagtataacttaataccctactatccactaaatacagggtaaaatgattttagcaaaactattaaaatcaatatagctagatatataaactgtattcttccaaacctttgtgataacagaaggtggcaataatggcttgctcttcatattttgggtggttggggagtagagggtcaaagggtaactttttccttggcctgtacattcctgacatgctaataaaaggatgacatattaagaattgcatgttttattgtagcaataggcactataaccttatgccaaaatcagaataaaaatattactaacaaggcaaccgtcagataaaatttg

SEQ ID NO: 323896 - DNA, 551 bp, Homo sapiens
tggtgggtggattacaactagaaaggaaggtatcccagtgttcttttggaggctcagtccctggagctggtcttggctggtggcctctgtccatagatctgataccaccacaacccaccagtgtgtcccagcatctgctctgttctcttccccagagctaaccaggggacctcaggactaacaaggatagtagcaggaggagragccacatggctgaaacctgggaaaaccaggccaactacaatcagtccatggagcttgtatttggggattttgtttaacagagcaacagtgaatctcagtctggaaaatttagctttattttcttcaaacttagaagtccaactctgagctgccagttcaagtgtctggtgagagattcagtccagttgctgttggggcccctcccttcctaggctgcacaggaatctggggaggcttatcttgctcagaagatagtgagcaagagtctccaattgcctggacatccaggttgcctctcatctcttatggccaaacccacagcaatcccttgaagtctgatggctctt

SEQ ID NO: 323897 - DNA, 515 bp, Homo sapiens
tgggaggggatggggcagaatatggtttggctgtgtcctcacccaaatctcatcttgaattgtagttcccataattcccatgtgtcatgaaggggaaactggtgggaagtaactgaatcatggaggcaggtctttcccttgacattctcatgacagtgaccaagtctcacaagatctgatggttttataaagggtagttcccctgcacatgctctcttgcctgctgccatgtaaaacaggtctttgctccttctttaccttccaccatgactgtgaggcctccccatccatgtggaactrtgagtcaagtaagcgtctttcctttataaattacccagtctcaggtatgtctttattagtagcatgagaacagactaatacaccaccctaaatttctcttggttagtgtttatatggtaaatattttctcttcccttgtttttaacctatctctgtctttatactggaaaaagggtttttgtaaactgttaaagagttggttattatttttattt

SEQ ID NO: 323898 - DNA, 515 bp, Homo sapiens
tgggaggggatggggcagaatatggtttggctgtgtcctcacccaaatctcatcttgaattgtagttcccataattcccatgtgtcatgaaggggaaactggtgggaagtaactgaatcatggaggcaggtctttcccttgacattctcatgacagtgaccaagtctcacaagatctgatggttttataaagggtagttcccctgcacatgctctcttgcctgctgccatgtaaaacaggtctttgctccttctttaccttccaccatgactgtgaggcctccccatccatgtggaactgtgagtcaagtragcgtctttcctttataaattacccagtctcaggtatgtctttattagtagcatgagaacagactaatacaccaccctaaatttctcttggttagtgtttatatggtaaatattttctcttcccttgtttttaacctatctctgtctttatactggaaaaagggtttttgtaaactgttaaagagttggttattatttttattt

SEQ ID NO: 323899 - DNA, 515 bp, Homo sapiens
tgggaggggatggggcagaatatggtttggctgtgtcctcacccaaatctcatcttgaattgtagttcccataattcccatgtgtcatgaaggggaaactggtgggaagtaactgaatcatggaggcaggtctttcccttgacattctcatgacagtgaccaagtctcacaagatctgatggttttataaagggtagttcccctgcacatgctctcttgcctgctgccatgtaaaacaggtctttgctccttctttaccttccaccatgactgtgaggcctccccatccatgtggaactgtgagtcaagtaagcrtctttcctttataaattacccagtctcaggtatgtctttattagtagcatgagaacagactaatacaccaccctaaatttctcttggttagtgtttatatggtaaatattttctcttcccttgtttttaacctatctctgtctttatactggaaaaagggtttttgtaaactgttaaagagttggttattatttttattt

SEQ ID NO: 323900 - DNA, 515 bp, Homo sapiens
tgggaggggatggggcagaatatggtttggctgtgtcctcacccaaatctcatcttgaattgtagttcccataattcccatgtgtcatgaaggggaaactggtgggaagtaactgaatcatggaggcaggtctttcccttgacattctcatgacagtgaccaagtctcacaagatctgatggttttataaagggtagttcccctgcacatgctctcttgcctgctgccatgtaaaacaggtctttgctccttctttaccttccaccatgactgtgaggcctccccatccatgtggaactgtgagtcaagtaagcgtctttcctttataaattacccagtctcaggtatgtctttattagtagcatgagaacagactaatayaccaccctaaatttctcttggttagtgtttatatggtaaatattttctcttcccttgtttttaacctatctctgtctttatactggaaaaagggtttttgtaaactgttaaagagttggttattatttttattt

SEQ ID NO: 323901 - DNA, 471 bp, Homo sapiens
tgtcccataactcactgatgctgttattttttcaagtctgtttttttttttctgtttcatttgggatcatttacatctgtataacttcatgttcactgatctttcttttttcagtgtttaatgggctcttgaattcagtatatttttcatttcagctaytgcatttttcattgcttgaagttccattcaattcttctttatttcttcgatttctcccctcatgtgtccacattttaaaaatcatttgaacaaatgtagcatgtttataatagctttttaaatacacttttctgataattccataatctctgtcatttccagatttatttgttactaatggatttttctcccaggtatggattgcatttttcagattcctattctgtataatttttttgtataaaagaacattttatataagtaaataaaatttctgtataaattttattttctgtataaaatataaactat

SEQ ID NO: 323902 - DNA, 573 bp, Homo sapiens
cattttgtaacctcagtttatttgtctctattggactcgtaagctcaaggaaaacaaagattgtacmcattgtcttcatcattgctgtaaccccaacaacctagcgtgttgctcgtaaatctatgttgaaaacaagtgaaattagtctcaatatccataaaatacaccatgttctgtataaatcaaagcaccggaacatatctgatggcttaatttgcactcaaagtaagtatataattagaaagttgaataaattaatgaaataaagatgtcatacttcacaaagttgtatgtagaacatcagatcctaaatcataaggcataaactgctaatggccagatttgcttcaccatatgttaatgagcgtacaagtaatcactgtgcttataagtaatataagtatcccctattcttatttaatcctggctccttttagagggaaagtaaagaaataaactgaaaaaaaaatgtatatatatatatatggtactacccttgaccttaaggaacacactatgttttggaagccttcattgtaaaatgatcgtaagtactaacacaggtattcttac

SEQ ID NO: 323903 - DNA, 573 bp, Homo sapiens
cattttgtaacctcagtttatttgtctctattggactcgtaagctcaaggaaaacaaagattgtacacattgtcttcatcattgctgtaaccccaacamcctagcgtgttgctcgtaaatctatgttgaaaacaagtgaaattagtctcaatatccataaaatacaccatgttctgtataaatcaaagcaccggaacatatctgatggcttaatttgcactcaaagtaagtatataattagaaagttgaataaattaatgaaataaagatgtcatacttcacaaagttgtatgtagaacatcagatcctaaatcataaggcataaactgctaatggccagatttgcttcaccatatgttaatgagcgtacaagtaatcactgtgcttataagtaatataagtatcccctattcttatttaatcctggctccttttagagggaaagtaaagaaataaactgaaaaaaaaatgtatatatatatatatggtactacccttgaccttaaggaacacactatgttttggaagccttcattgtaaaatgatcgtaagtactaacacaggtattcttac

SEQ ID NO: 323904 - DNA, 573 bp, Homo sapiens
cattttgtaacctcagtttatttgtctctattggactcgtaagctcaaggaaaacaaagattgtacacattgtcttcatcattgctgtaaccccaacaacctagcgtgttgctcgtaaatctatgttgaaaacaagtgaaattagtctcaatatccataaaatacaccatgttctgtataaatcaaagcaccggaacatatctgatggcttaatttgcactcaaagtaagtatataattagaaagttgaataaattaatgaaataaagatgtcatacttcacaaagttktatgtagaacatcagatcctaaatcataaggcataaactgctaatggccagatttgcttcaccatatgttaatgagcgtacaagtaatcactgtgcttataagtaatataagtatcccctattcttatttaatcctggctccttttagagggaaagtaaagaaataaactgaaaaaaaaatgtatatatatatatatggtactacccttgaccttaaggaacacactatgttttggaagccttcattgtaaaatgatcgtaagtactaacacaggtattcttac

SEQ ID NO: 323905 - DNA, 521 bp, Homo sapiens
ttctcaggaaaagctaatttgtaattaaaatattacaattaatctttatgcttgggacaggcagatttcaggaggagattgctgtattctcccttctttcctttgcytccattcttttctctcttctccattctgtttcttttgccctcctcatctcaccttacctttctcttcccatatttttcttcatcttttttcttttttgttacgtcttccatttctcccatttttcatcatctacctgtctacacttatgttcttatatttatgtaccttattcacttttcttctgtctttcctttgttgaacctgaaagaggactctctctagcctcacatagtgatctactattttctgcctgtctgtccttgtgctcacttttatgaagcaaagtataggagaaataaattcaagggtgtcgttatcttatgacacctcaactcttctactctgagactaccaccggccattctggactctactctccttgggggggagtgaaaaataagctaagttataag

SEQ ID NO: 323906 - DNA, 599 bp, Homo sapiens
attacttcagcttttaatattttggtgatttttcaaaaagttttcagtagccagatatcacgatggtagattttgcattgcatacagattatttgataatctacagtgtttayttgctatactactatattcagaagaaaaaaagcctaggctatttaactcttattctaaaattatgtctattaaaatacaagatttaagattaacttctactttgtatctagactttttttccagactccaattaatgcagtttagatgtacaaccattttcaagtttttgtaaagactcagtccacttgaaggatatggccaaacagctctgtaaatgcagtagctttcagtggggaaagctctgccttcttaggaggtggaatcaaattatagttttacaaacgcaacactaacatacctcttctcttactcctcaaggaaagagaaaactttcttcttcagaagctagagacattaagcatcagtgtttatctaaataggacaaggaaaggctccaagattccactaggaaaggttggctagaagcctatatgggtaattttgtcataaaacctgttattttccaagaatatacaagtacatta

SEQ ID NO: 323907 - DNA, 586 bp, Homo sapiens
aactgggtaccctgtattttatctgaaaactataargtgaaaaaggagaagaaattatttttttaattatttatttataattctataggggagatagagattgctcaagagagcaattaattttttaaagactcagcttgttgcaagagatgatgaaattggttgtgtaatttgcctcactttcctcttccttttggtaagtgcaaatacaatttatactccaaagtaccagtgtgctatataggatatttgctcccttttaaaattatcttccttgaatttaaaatatctgcaaattaaaataacaaaacaatgtctattccagcagtgtgctggagccacacacaatagggcaagtggctggcttggagagtgtggaagactcattccaagttccctcgaatagattttctttagctatcatcaaatttagaggagaaactcaggtggtgattatttcggaagagaaggcttgagaagagaagtttgtttatataaacattttgatacttgaaaatattgctctttctctttttttcagaaatgataaaaaagaaaaatatttacattcctgtgatcaaagttg

SEQ ID NO: 323908 - DNA, 610 bp, Homo sapiens
gtattttatctgaaaactataaagtgaaaaaggagaagaaattatttttttaattatttatttataattctataggggagatagagattgctcaagagagcaattaattttttaaagactcagcttgttgcaagagatgatgaaattggttgtgtaatttgcctcactttcctcttccttttggtaagtgcaaatacaatttatactccaaagtaccagtgtgctatataggatatttgctcccttttaaaattatcttccttgaatttaaaatatctgcaaattaaaataasaaaacaatgtctattccagcagtgtgctggagccacacacaatagggcaagtggctggcttggagagtgtggaagactcattccaagttccctcgaatagattttctttagctatcatcaaatttagaggagaaactcaggtggtgattatttcggaagagaaggcttgagaagagaagtttgtttatataaacattttgatacttgaaaatattgctctttctctttttttcagaaatgataaaaaagaaaaatatttacattcctgtgatcaaagttgaataataaacagagtactaacttgatgagctaatgtc

SEQ ID NO: 323909 - DNA, 586 bp, Homo sapiens
aactgggtaccctgtattttatctgaaaactataaagtgaaaaaggagaagaaattatttttttaattatttatttataattctataggggagatagagattgctcaagagagcaattaattttttaaagactcagcttgttgcaagagatgatgaaattggttgtgtaatttgcctcactttcctcttccttttggtaagtgcaaatacaatttatactccaaagtaccagtgtgctatataggatatttgctcccttttaaaattatcttccttgaatttaaaatatctgcaaattaaaataacaaaacaatgtctattccagcagtgtgctggagccacacacaatagggcaagtggctggcttggagagtgtggaagactcattccaagttccctcgaatagattttctttagctatcatcaaatttagaggagaaactcaggtggtgattatttcggaagagaaggcttgagaagagaagtttgtttatataaacattttgatacttgaaaatattgctctttcyctttttttcagaaatgataaaaaagaaaaatatttacattcctgtgatcaaagttg

SEQ ID NO: 323910 - DNA, 564 bp, Homo sapiens
gttttgtaaatgataatcctgtcattagagaagtgcagagtgaggtctgaagtcaagccaagtatgtgaaagagccaggatgagagtaatgaatgtcttatttccctttctatgtgcaaataacacaactcctattttcagtagcataacacagaatcagaaaattaggggtttatgagagtttgcctagttattttttcccattttccaagtttttcttgtttaatatcaagaagaaagwataaacattgagtacctaatggtaaaggaaattattctggtagctaaggatacaaaggctctgtaatattcttctcaccattgagaaatttatcatatgtttgggaatttaagcatagatacgtggatgataaagttactcagatgtcctctggaatttaaatcttttattttacttactaagaaactatggatttgagagccaaaactttctagcacaaagcccagcaccatggtgctggatctgtgtcaaaaccaggttgtttgtttcccacttgttttctttacttttttctttctttttccaggagattgtcaagattg

SEQ ID NO: 323911 - DNA, 543 bp, Homo sapiens
aagttcatggaccggtttatttcattattgtgtttttatacattcattaggaatcaatgttttaaatatgttttttattatgattttatttggtattttattatttttgacacttgaagtaatataatagtaaagagatgattagggaatcatcaagcatagtgtattataaacattctatcaattaaatttayatattatgtcattttggtcacaaatatttccaggaaattggaaattatacaaagtataattaataattgtttttcttttgcctctattgcatcacttcctattcttccagcagcaatctttattttcttttgtgcattttcttcttccccaatcccatatcatacattcctggtgaagctctgccagaagccgcagggatagccatatggtacagacccagatctatggacatatcctaaattcttggccacagccatagcatctataaaggggatatacctagtggaggatatgcagccatatatatctacttcacttagacctgagaagaggaaagagcagatgttc

SEQ ID NO: 323912 - DNA, 543 bp, Homo sapiens
aagttcatggaccggtttatttcattattgtgtttttatacattcattaggaatcaatgttttaaatatgttttttattatgattttatttggtattttattatttttgacacttgaagtaatataatagtaaagagatgattagggaatcatcaagcatagtgtattataaacattctatcaattaaatttacatattatgtcattttggtcrcaaatatttccaggaaattggaaattatacaaagtataattaataattgtttttcttttgcctctattgcatcacttcctattcttccagcagcaatctttattttcttttgtgcattttcttcttccccaatcccatatcatacattcctggtgaagctctgccagaagccgcagggatagccatatggtacagacccagatctatggacatatcctaaattcttggccacagccatagcatctataaaggggatatacctagtggaggatatgcagccatatatatctacttcacttagacctgagaagaggaaagagcagatgttc

SEQ ID NO: 323913 - DNA, 612 bp, Homo sapiens
tagtgctttcgtctcctcctttactgtctgaaccttgatccacagcacaatagcatatactttcccaattgagaggttagattctgcggtaagtagtctattccttgactctactctggacccttcctaaaggtagagcaagacttgaatgtttatccttacaggctgggcacggtggctcacgcctgtgatgccagcactttgggaggccgaggcaggaggatcacgaggccaggaaatcgagaccatcctggtcaacacggtgagaccccatctctactaaaaatacaaaaattagccgggcaccgtggtgagcgcctgtaatcccagctattcaagaggctgaggcaggagaatcgcttgaacctgggaggcagaggttgcagttagyggagattgtgccactgcactccagcctatgtcaaactgctcttaacaggattatcattttccaactacttactcgccttcctcattaatgtcattttttcttctgcttctactctcaaggagaactgaaggaaaaccaagagagactacttcaaaccagattctgtggcaaaaggaagcttaagtggtatggccagaggattggaagcatttgaagtaatg

SEQ ID NO: 323914 - DNA, 547 bp, Homo sapiens
aaatttgcagaagtaattcagttctgtataggtcaactttgaagtaatcaaagagagattatcctgggtcagcccagcctcataaggtgagtcgtataaaagaggatccagacctctgtggcacttataaagaataaattataaaactgaattcaattgacaaatagctgtaaatcactttgggaaaaaagtacataagccattataaaatgtaacatggaagattggtatttcacatcactatcaattcctaatatttttacaaatgttaagtactaatgttayatataggactttcattgaaaacaattgtatttctttctcccctcctatttttctatttcctaccatgcatttatccaaaactatgtttgttcaatagccactttctttctttctttttttttttttttgaaacggagtcttgctctgtagcccaggctagagtacagtggtgcaatcttggctcactgcaacctccgcctcccaggttcaaacaattcctctgccacagcctcccgagtagctgggattacaggcgcctgcc

SEQ ID NO: 323915 - DNA, 547 bp, Homo sapiens
aaatttgcagaagtaattcagttctgtataggtcaactttgaagtaatcaaagagagattatcctgggtcagcccagcctcataaggtgagtcgtataaaagaggatccagacctctgtggcacttataaagaataaattataaaactgaattcaattgacaaatagctgtaaatcactttgggaaaaaagtacataagccattataaaatgtaacatggaagattggtatttcacatcactatcaattcctaatatttttacaaatgttaagtactaatgttatatayaggactttcattgaaaacaattgtatttctttctcccctcctatttttctatttcctaccatgcatttatccaaaactatgtttgttcaatagccactttctttctttctttttttttttttttgaaacggagtcttgctctgtagcccaggctagagtacagtggtgcaatcttggctcactgcaacctccgcctcccaggttcaaacaattcctctgccacagcctcccgagtagctgggattacaggcgcctgcc

SEQ ID NO: 323916 - DNA, 635 bp, Homo sapiens
cagagtgcctcaagtctgccaaccttgctgagctgttctgcagcattttagaaatgcatatgatagcaggaagcactggagaaaatcatgcctactcatatttgagctggaaattaattttctaagctgtgaagttcttcaacttcttttgcaaagctaggtcacctgttttcttaatctaatcatctaaccttcccctaaagcatagaagtttacttttctttgcattaagttctacccagataagcagtgcaaggaaatatcctacatctttaattctaacgctccataaattgtaaggcaaacaatcattttagtaatagttttccagggggaacatgaagaaagaaatgctatcatacaacgcacgtggattagtgttttactgaaagtttattgccaaacaattcatgctttgtggtagtttgggtgagccttgtctagaarcagtctagccagagagaaaattctaaaactgccagcgcaagcataacaataatatctgttagggtgttgcatattgatatgaaaaggagatggtcagctcttgggtgggagacctcacaatctgctagccagaataaaggccacataggaagataggaattgatctatttaacttacaacagaaagta

SEQ ID NO: 323917 - DNA, 574 bp, Homo sapiens
tattatgcagaagtgtatggatgactcagcataatctcttgcaacagtttgaaaaacaaatcaaatctgggatctatagaaaaaggcaagtatgtgttatttaatttccagtattaaatggacttgagatatttcccagcctacaaatttactgtggagtataaacttgtgaatctttaaagaaagatcaaaatattggtacattttagatatttcatgatttatttaaaatatatataaactayacttaaaatacagaatatgaaatactttttgcagtttttcagtatcttcagttaccttaatatttattgttcagattttgtgtgtgaaagttttggaaaaaatgtgtaaagttatcatataagggctgagcatactgaaatatagagatgtgcatatatatatgcacacacacaatattttagtgaaaaatagttcattagtggataatgaacataataatttgcaagattgtgatataattagaacaacattcatatcagttataaacatataactaatagagtttgaatattggctcaaactagaactaatctagtttaaatattga

SEQ ID NO: 323918 - DNA, 572 bp, Homo sapiens
ttaggctttcctttgttcaaggagctggggtgaggaaatttaaattaaagcaatggaagtggagtgaacaactgtagcagtgtgcttgagactttgctcattttagaactgaaagtccacattctaggaaacccctcagtcctcagcacgctaggatagttgctcaccgtgaaatatgaaaaacgatttccataaagaggagtaatttcaagtggcagaaattaatcaggtagcaatcattttataagctcctacttattggttaagttttcatctttctttttgtttgttttgttgttcttgttttaagaatgggtggattcaagaactctatggtttgaaggcaaataaatttacaccaaaatcaaatatttatattcttagttgcataagattttctgagttaaaatttgagaagagtctggcttaatgaaggtagtgggtctttctgcaattttttttattttttacttctctggtgtacttgatctgcaattatttagacaagaaaaagacaatrtattctatgccagaggagatacatatctgataagacaagaaaaaaagattga

SEQ ID NO: 323919 - DNA, 544 bp, Homo sapiens
aattcaacaacttagaagaaatggaccaatttcttgaaaataaaaaccatctaatacttattccaatatatctcagtgttaaatgcaaaaattctcaacactttattagaaaattaaatttcacaatgtataaatatgattatacccaatgaccaaatgagatttattccagctaggtragctaatttaatattcataaatcaacaaatactttctatcatatcaacatgctaaatatgatcatgtcaattgacagagaaaaagtaatcacaaaatctaacacctgctcatggtaaaacctcttagaaagttcacaacagaaagaactatgctaacctgataaaagaacatctacaaaaatatctaaatttagcatcatacacttatttttcttttttccagagatggggtatcattctgtcatccaatcctaagcacagtgacacaatagctcatatcagccttgaattcctgggctcaagcaatcctcctgcctcaacctcccaagtaggtggaattacaggcacaagccaccacactctgc

SEQ ID NO: 323920 - DNA, 544 bp, Homo sapiens
aattcaacaacttagaagaaatggaccaatttcttgaaaataaaaaccatctaatacttattccaatatatctcagtgttaaatgcaaaaattctcaacactttattagaaaattaaatttcacaatgtataaatatgattatacccaatgaccaaatgagatttattccagctaggtgagctaatttaatattcataaatcaacaaatactttctatcatatcaacatgctaaatatgatcatgtcaattgacagagaaaaagtaatcacaaaatctaacacctgctcatggtaaaacctcttagaaagttcacaacagaaagaactaygctaacctgataaaagaacatctacaaaaatatctaaatttagcatcatacacttatttttcttttttccagagatggggtatcattctgtcatccaatcctaagcacagtgacacaatagctcatatcagccttgaattcctgggctcaagcaatcctcctgcctcaacctcccaagtaggtggaattacaggcacaagccaccacactctgc

SEQ ID NO: 323921 - DNA, 595 bp, Homo sapiens
ataaaccttaccctaaatttcccactttgcacaaaaattaactcaaaatagagcacggacttatatgtggaamaaaaaactaccaaactttttaaggaaaaaaaggggaaaatgttcaggatctagagcttggggctacttgatgaaagcacagtctataaaagaaaaaggtgatagtttacatatatctcattcaaattagagaatttttctttacaaaagacgtatgagggtgacaagaagaaaatatttgcaaatcattagcaccaaaaatacattaaaaattctcaaaattcaacagtaaaacaaacaatccattagaatatgaataaaatacatatatagacactttaccaaagagaatatatggatggcaaataagcacatgaaaagatctattcaccatcataagacacgaggaaaatgaaaattaaaaccacgtgagctatcactgacacctatcaaactgaataaaaccaaaaatagtgataatcaaatgattgtgtggatgaagagaaagtggatcatttccatttcttatgaaagtgagtagtgttacagccactctgcagaactatttttcaattttttagaa

SEQ ID NO: 323922 - DNA, 595 bp, Homo sapiens
ataaaccttaccctaaatttcccactttgcacaaaaattaactcaaaatagagcacggacttatatgtggaacaaaaaactaccaaactttttaaggaaaaaaaggggaaaatgttcaggatctagagcttggggctacttgatgaaagcacagtctataaaagaaaaaggtgatagtttacatatatctcattcaaattagagaatttttctttacaaaagacgtatgagggtgacaagaagaaaatatttgcaaatcattagcaccaaaaatacattaaaaattctcaaaattcaacagtaaaacaaacaatccattagaatatgaataaaatacatatatagacactttaccaaagagaatatatggatggcaaataagcacatgaaaagmtctattcaccatcataagacacgaggaaaatgaaaattaaaaccacgtgagctatcactgacacctatcaaactgaataaaaccaaaaatagtgataatcaaatgattgtgtggatgaagagaaagtggatcatttccatttcttatgaaagtgagtagtgttacagccactctgcagaactatttttcaattttttagaa

SEQ ID NO: 323923 - DNA, 585 bp, Homo sapiens
gaagttaccctgttacagtatcaagaaaactgcagaaaacacaagtttcgtgaatcagagacaaaagtatttcttacccacagcaacgacagtacccagaacatcagcattttcaccagttccctgaacctcagttcccacagggtgacacaaagagggacaagtcagcctgaacacagagtgagttgtattacaggagaacaaaagccttttatatgggaatgattttttataatgatcttttatcatgggaagttaacaaaccagtctgatctttactctgaataacatattattttcattatactggatggtatgtaaacctgccatctcttctagagggagacactgtctctatattttaaggctatkctctacccaaatattcgtgaagagagtctaaagaaaaggcagtcggtgactccgcttgtagaatgtatagaaacacaaaaaccatgaatactattctaagcatttttaagtgctgcaaatatacatactcatttcatcctcacaacaaaccaataaggtggataatattataaagaacagtttatatatagggaccctgagccacaggaaggc

SEQ ID NO: 323924 - DNA, 607 bp, Homo sapiens
tttccttctcctctcatacttcacaggaaaggcagatttagactgagatgcaatggactttgtattggtacacattttgtcagagaatataggaatcttctctgatccacccagctcctcagtcattgacagtttattctcaaataaataactgggcaaatcagattaaatgaaagactatacaatgactaaaagaggagcaagatatagcaagatatctttgcattatcaacattatcaaagtgtcattgccatcaatcccttcacttttaatacagatatatctgccaaacccatccactctgttctatttttactatatccactttctgcactcaaacctgtatcagctctcaccagacaactataatagcttcataactgatctccatagatccactcttactctttcaccatgacatttccaatccacttatcacagaagagtcacagcaatgtttttaaaatgcaaataagatcctctgrcactgccaaggtttccctttgtactttgaatcaaaacaaagattcctaacacagcttttttaaaaggctgaattatctgacctccacagtatcagctcccatggattcaggtatttcttct

SEQ ID NO: 323925 - DNA, 612 bp, Homo sapiens
agcagttctcctgaaaagacaaatttaattttcagtcgtgcctcactggttttagtaccatttcatgagggaagaaaaagtaaaacatctcgggctaaattaaaattatgcctaaattgagtaataaacaaattcctcacttgtccttagctttcatctctatttccttgatttttttaatggtgcttaacctattgtatatgtaatcatttaacatttgctgtgcacctactaggcaccaagctctggtctaggtatttgagctgataatagggaaaatgagatatagtccctcactttgaggggtcactgcttattggaggataccagcatgtaaatttcccacmatgaggaaatacacactgttggtgagagtggagactgacagatccattttggaaaaaaaatgtctttttcttctaaagttgaataggcatgtagtcttacatatagcaactccaccgctagatatatgccctaaactaattattgcacatgttcatttctggaatgctcaacaatgctcataacataatatttaaaaattgaaaggaactcaagcatttacctttaagaaaatatacaaataggaccagtgcggtggctcactcc

SEQ ID NO: 323926 - DNA, 605 bp, Homo sapiens
aggattctccagactacatttgctgatttcaggatatgttgtacaatgtttaaacaaataatggcaaaaatgagaacataaagaaaatccgaatttgtttttattatctatttctaatatgattgtgtgtggttgtgcgttgctttgttttaaatttaatctagtcatttctgctgtccatttgattatactttgctatgttgggggagtggaatatctaaatgaagaaagatatacagaaagatatgaatgacactttagagttagttaggattgaaactcctccttgatgggtagaaagtgtcagtaacataattgtcaagagaaattagcaattccagaggagctaggctgacagcaaaactaaactttatatttgtgccattcatattatctttgcatataaccagcatgttctgattcacatagcaayggaaagatcacattctgaaaactcaatctaaagtggtgaaagagattggagtactttaaaatacaaataaacgcatcaatgggcaaatggccatggtgaaaaatttaaggaagaaacaatgattactgtggctattggagctctgaaaaagatatactggtttaagtaaatg

SEQ ID NO: 323927 - DNA, 493 bp, Homo sapiens
attggctgctgcctgcaatcaatttctattgccattggcaagtgaaacccacaacacccttctctcaaggcttggcataaaaacacaactgtgacttggctcagagtgacctgcagtttctattctttgctagactactggtgtggagggaaaaatgcacaggcacagagcaccagaggcaggctagggatgcggtgagacaaggatgtcacttaccgtttcttgtgcatggtgccagagaaaatatcaggatgcaaagggaactatgtaaagggcagaaacaggatttaatattacaaaccccaaatccctcrcccaaaacatacaagaagctgccaaaatttagctccttttctatgagaacttgggtttcccatcttgggacatcacattggttataggggttcatggtggaaggcagggttttgatgggaagaattaatgttttaaaagacaggttataatacatggagtacagtggctgtagaaaaga

SEQ ID NO: 323928 - DNA, 523 bp, Homo sapiens
acacacaaaaaatattaaaggcagctagagagaaggagcaggtaacctacaaagggaaccccatcatgcaaatagcagacatttcagcacaaacactacaagccaggagacactgaggacctgtattctgcaccaaaaaaaaaaaaaaaaagaaattccaatcaagaatttcatatctagccaaactaagcttcataaacaaaggagaaataaaattttttttcagacaagcaaatgctaagggaattttttttaccacaagatctaccttatacatggtccttaaggatgtactaaacatcggaacaaaagaccagtaccagtcaccacaaaaacacacttaagatcatagaccattgacactataaggcaactatacaattaaatctacatagcaaccagctaacaacacaatgacaggatcagattcacacatataaatrttaatcttgaatgtacgtgggctaaatgccccactttagaaggcatagtgttgcaagttggataaagaagcaagaccaaa

SEQ ID NO: 323929 - DNA, 581 bp, Homo sapiens
ctgatgcatgacgtcaaggaaacctaaataaaaaatggagagatatttcatattcatgagtagaagaatctaatgttgttaagatgtcagttcttcccagcttgatctgtagattmaatttaatcccaataaaaataccaccaaattaccttgtggatattgccaatcttactctttttttttttttcctctttgagacagagtctcactctatcacccaggctggagtgcagtggcatgatcttggctcactgtagctctgcctcccgggttcaagtgattctcctgcttcagcctcctgagtagctgggattacaggcacctgctgccactccaggctaatttctgtatttttagtagagacagggtttcaccatgttagccaggctggtcttgaactcctgacctcaggtgatccacctgccttggcctcccaaagtgctgggattacaggcatgagccaccttgcctggccattgccagtcttattctaaagtttatacggagagacaaaagacccagatggacaacacaatactgaaagagaagaacaaagttcgaggattggctctacctggttt

SEQ ID NO: 323930 - DNA, 565 bp, Homo sapiens
ccacataaaatcaaagaatcattttcaatttatggttatattcatacgtctctgcattttaagggaaatgagggtaagaaaagaaataaataataaggtgaaaaaacataggtctgaacaagctaaggcatgtgtagtgtcatcaaaaggggcatcacctcagaggagccacaggaggcatttgaaaacataaatcagatcacaacacragccaacacaaacttcttcaaggactttctatcctatgtcctatttaggacataattggctgtgtccccactcaaatctcaccttgaattgtagtaattctcatgtgtcaatggcggggccaagtggagataattgaatcatgggatcagtttcccccatactgttctcctgctagtgaataagtctcaccagatctgacggttttataaaggggagttcccctacacatgctctcttgcctgctgccatgtaagatgtaactttgctcttcctttgccttctgccatgattgttgggcctccccagccacgtggaactgtgagtcaattaaacctcttttctttataaattaccc

SEQ ID NO: 323931 - DNA, 640 bp, Homo sapiens
  misc_feature (1)...(640): n = A,T,C or G
ctagatgatattataatcagttttttaagaatttatcaagatatcatcaaagcaatatatttcctctcctcttatgtgaatattaatagatatttaatatggtgtaaacattgtatagttatgtagttttccagacagcaacaatagttagaattgcaaaatttgcttgcacaggcaacttgtatgatgaggtaagacaacttgtatgatgtctaaatatattactttactgattgggtagcgtgttcttcaactgatggagagaatattagttttataacctgatagmaacttaggtcaaaaaattgagagtttttaaaccactgaaatggtctctgactttatcgatatccctttaacctttgctgggaaagctatacgattcctcacaatctagagagtttccattagagtcagcctttgccttgagacttctcctggaaagtatctgactttctctcctattaattctaaatgaactttgctgatgagagagattataaagatgaccactatttgtcatggtaatcaaaaatttcatctcggtcggcaaattcctgaatcaaatatcagctgtttacaatagccatccactggtcagtaattactatactaattctanngttactttanntgtgtc

SEQ ID NO: 323932 - DNA, 640 bp, Homo sapiens
  misc_feature (1)...(640): n = A,T,C or G
ctagatgatattataatcagttttttaagaatttatcaagatatcatcaaagcaatatatttcctctcctcttatgtgaatattaatagatatttaatatggtgtaaacattgtatagttatgtagttttccagacagcaacaatagttagaattgcaaaatttgcttgcacaggcaacttgtatgatgaggtaagacaacttgtatgatgtctaaatatattactttactgattgggtagcgtgttcttcaactgatggagagaatattagttttataacctgatagaaacttaggtcaaaaaattgagagtttttaaaccactgaaatggtctctgactttatcgatatccctttaacctttgctgggaaagctatacgattcctcacaatctagagagtttccattagagtcagcctttgccttgagacttctcctggaaagtatctgactttctctcctattaattctaaatgaactttgctgatgagagagattataaagatgaccactatttgtcatggtaatcaaaaatttcatctcggtcsgcaaattcctgaatcaaatatcagctgtttacaatagccatccactggtcagtaattactatactaattctanngttactttanntgtgtc

SEQ ID NO: 323933 - DNA, 300 bp, Homo sapiens
gtccaagagtcccctggttggcttggaccaagcatttagagtgaaatagatgttgagggtcaattgcaagcccactatattccccctccagctctgccttcatctctcacataagcactggctrtcccgccattccatcttctatcaaacagtagctgacagctgatactatgcaatggcgctcaaccctaggtgttcaggatagtcagccggtgactgtttttaaaaacacctagcctaggctgcaccacagataaattatagtggaatttctgagggtaagggcaggtgaccccagtt

SEQ ID NO: 323934 - DNA, 502 bp, Homo sapiens
tctattcaccaaatgatgtgccatttcaagtgcacatgaagcagttgacaaaatagaccatgtgcttgaccacagataaatttcaagatrtttaaatcacacagagtatgttctctcatctaaatgaagctaaatgtcatgaattctgcccatattccccagggcagaactgagctacttggccgagaagctacaagagtaactggaaaacatttgctgaggaaggacaacagaaacagcaatactgatgaggaggccactgtctgtcatgtgacactgtcaagggctggctaggtgcagattaactcccttaaatgtaagaaaagtgaatgggggccagacgcagtggctcatgcctgtaatcccaacactttgggaggctgaggcatgtagatcacctaaggttaggagttccagaccagtgtggccatcacagtgaaaccctgtctctactaagaatatgaaaattagctgggtgtggtggtgcacgcctgtaatccca

SEQ ID NO: 323935 - DNA, 502 bp, Homo sapiens
tctattcaccaaatgatgtgccatttcaagtgcacatgaagcagttgacaaaatagaccatgtgcttgaccacagataaatttcaagatgtttaaatcacacagagtatgttctctcatctaaatgaagctaaatgtcatgaattctgcccatattccccagggcagaactgagctacttggccgagaagctacaagagtaactggaaaacatttgctgaggaaggacaacagaaacagcaatactgatgaggaggccactgtctgtcatgtgacactgtcaagggctggctaggtgcagattaactcccttaaatgtaagaaaagtgaatgggggccrgacgcagtggctcatgcctgtaatcccaacactttgggaggctgaggcatgtagatcacctaaggttaggagttccagaccagtgtggccatcacagtgaaaccctgtctctactaagaatatgaaaattagctgggtgtggtggtgcacgcctgtaatccca

SEQ ID NO: 323936 - DNA, 558 bp, Homo sapiens
ttagtatggctttaagaattcaatctttccccctctcctttatggaatgtgtgtttcctctatttgtacacttaaccttttgtcctaagtttttatttttatggatactaatgagtaactttgaggttgacactagacccaaacagatgcaaacagccactttctgtcctcttgtgacacagttgaaacactttatctcttgtctgctgtttggagtgtcctgaaagaaacactgaagtggcagtcaacagagcaagggtaacaggatctttaaataatttaaagttgtctgatcttgacataaaagtgaaccctttctttaaaatttctagcaactgctcttaagtcataggttcctcattttttctttgctggtagtgggagaaaatagttgatctgtgatttttgttttcatctccccaaactatgttataaaggcagtaatttgatgctgaagattatgattagaaatcctcagatgggttatatattggggctttatcttttaatattaaaaakaatgtctttcctggactactttattcagtacgtaagcac

SEQ ID NO: 323937 - DNA, 590 bp, Homo sapiens
cagattaaagtttgagaaacactggactaaggcataattattatattagtgtgcgtgagtgtgtgtctgtctatctgtgtttgctgcatactgtarataataggcacctcaagagcaaagtctgcatcatcttcttatcttcgtcagtggccagcccagtggtttactgtggcacagtaagtcctcaatgagcacttgttgagtaaatgtttgtatcatattgagtccagttttgtatttttctctgatttattggacattaatgagtcttttttctataactggtattttaaaaattattttaagtatattactttatactttattctctagtattcagtcttttctaatctttttttttctattttggcttatgttttatcagtgactaaattcataaataattctctaaaatgaagagattggaaaggacatatttaccaagccattgcttttgctaaataacatttaatagggttttaagtataatgcatgtgaactctttttaaagtttgatcatctttcagtggattcagaaaagaaatcctgtcatagaaaatttggaaagacatttccttttcaaagaaaat

SEQ ID NO: 323938 - DNA, 506 bp, Homo sapiens
ttgtcatgtaacttcttctttaatagctccattcacaatcagacaaatattgaacttaaacccagtgatataacatgatcttgtttcccagtgtcttgccagaaatgaggagttgtatgtctggtaccactttatttgggatctataccaagctgagcaacacctgggggatgccagggaactctcccctcactgaaaaaagatattcaccaacagttgggaggacctaaaataaaaaggaccatcaggatatggcttcccagctcttactcactcaacaaatatttgggggatcctcttttgccccaggcattgatcttagtgctgggaataaagtgataaagaaaacacataccttggcctggaagcattcacagcttcacgtgttagccttcctctctgggatctttctgtcccggagacaagtctttttctctctgtcccagttgctttctattttaycaggaaggtggcaggtctttactgcggtgtttatacatctcctt

SEQ ID NO: 323939 - DNA, 503 bp, Homo sapiens
acagcagattcccagggcaacagagttagagtagctaaaggtcagctcctcaagtatcaggtgaaagggttttattaactctttgcccacatttacgcttggaaaacgcataacagttagaawaaggctattgttgtagctcaaactggaggtaagagaacgtaaaataagatgtcagcagtaaaaatggaaaaggaagggccatgacagatatcaataataggaagttgacaatagtaaaatgaagcattttagatgacgtctttgatccattatcactccattaattgtatacaagacaagaagtgtcaaattttatgaaaatttgcatatgaaagttgaggagagtatcatgaatgatttaaatcgtgaatgatttcagtttcaagcctgggaatctgaaagaaaggtggctccatgattagaatgtcaacacctcaagcaatttagatattttttaacaatgacgtttggcttttagacatgttccttgtaacagtaag

SEQ ID NO: 323940 - DNA, 503 bp, Homo sapiens
acagcagattcccagggcaacagagttagagtagctaaaggtcagctcctcaagtatcaggtgaaagggttttattaactctttgcccacatttacgcttggaaaacgcataacagttagaaaaaggctattgttgtagctcaaactggaggtaagagaacgtaaaataagatgtcagcagtaaaaatggaaaaggaagggccatgacagatatcaataataggaagttgacaatagtaaaatgaagcattttagatgaygtctttgatccattatcactccattaattgtatacaagacaagaagtgtcaaattttatgaaaatttgcatatgaaagttgaggagagtatcatgaatgatttaaatcgtgaatgatttcagtttcaagcctgggaatctgaaagaaaggtggctccatgattagaatgtcaacacctcaagcaatttagatattttttaacaatgacgtttggcttttagacatgttccttgtaacagtaag

SEQ ID NO: 323941 - DNA, 581 bp, Homo sapiens
attactgaccttttctgatttgtggagaagaaagagaggttagagtgaaatctaaagaaattcattttgttactgtcaagcgatgaaatctgtaacagctgttcatcctcaaagatggaaccgactgatattctttatcctcatgaaagagccaataaataactttcagggagcatcaatttttatctttcatttcctttgccaactagctcctcttctagattgctagamgtaaaacaaatgtagatttcagtttccttgagaatttctgttgttcattgggctgttttgtttcattttgtgtcctagattggttcctactttggcagtattttaacaacaactgacattgacaaggattctaatactgacattcttctagtcggagcccctatgtacatgggaacagagaaggaggagcaaggaaaagtgtatgtgtatgctctcaatcaggtaatggtgtctgagtttggtagaaatccaggaaaatctcttccttctcttcattttttaataataaattccaatttttcactcactttgaaaaaacagagcaaagaagctatcaggattcattcact

SEQ ID NO: 323942 - DNA, 588 bp, Homo sapiens
gaagaaagagaggttagagtgaaatctaaagaaattcattttgttactgtcaagcgatgaaatctgtaacagctgttcatcctcaaagatggaaccgactgatattctttatcctcatgaaagagccaataaataactttcagggagcatcaatttttatctttcatttcctttgccaactagctcctcttctagattgctagaagtaaaacaaatgtagatttcagtttccttgagaatttctgttgttcattgggctgttttgtttcattttgtgtcctagattggttcctactttggcagtattttaacaacaactgacattgacaaggattctaatactgacattcttctagtcggagcccctatgtacatgggaacagagaaggaggagcaaggaaaagtgtatgtgtatgctctcaatcaggtaatggtgtctgagtttggtagaaatccaggaaaatctcttccttctcttcattttttaataataaattcyaatttttcactcactttgaaaaaacagagcaaagaagctatcaggattcattcactccaccaacccctcagttttgaaatgaccattta

SEQ ID NO: 323943 - DNA, 244 bp, Homo sapiens
aaacaacttgttttctaaatggtggtaartcaagatgcaactttaaacaaaaacaacaaaaagaatattagagttggatttgtttaattactggcaaaatgtttttccaaggaataggtgaagatgtgcttactcatttccatgagaaccagagatgctgcttatgtatgggataatccagaatcaatcaagcccatagaaccaaggagtcagatatctcctgaattcttcacttaaaaaaatg

SEQ ID NO: 323944 - DNA, 583 bp, Homo sapiens
atgagacgcttaagaaaaaaataccgattcagaggtagagtttagaaattgagctacaaatgggcccagttttccttcctgtaggtttctaccatgactcttctctcccttctcttgccccctcttgggaaagactgatattgcagagaaccctaatactttaccattcccacatttccgagatcctttgttccattgaggtgaccctagtttccgagagtcagacttgttctgtgtgtgtgttctcaggtgcatcaggtcagcctgtgcttcctcttcctccctccgttctccactttctaaggcagctttttaatgatgttgaaatatgctcgaatcaaagctataaaggccattggctaaagaagagaaatttactctgtaaccaaatacaagcagaatgagaaaagccattaatccttaaaatctgtttttcttgatttgttccatatgtgcatgtatatgctctgaaatagcctcctgactagaaagatcaatgaggtataagaayataaaataatgattttgagttttatatgtaactttatttcagtcttatttaatttttgcaaagtaattaagt

SEQ ID NO: 323945 - DNA, 627 bp, Homo sapiens
catttgactgatttaatgtttattaaactcatatgggcatatatattaaaatacagggcagacataatggataacaggcaaataaaatgtcaaaatgaagtcaatgcctcaggtcaggaattagccctagaatcagagcctaaaagattgttgtgtggtttggaggctgtagagagcataggagactttaagattatagtactgcaatcaatacagtgatcttccttttttttttttttttctgaggrctttactttgggagaagtttctgaggcactgaaaaagcagactggactgcgtaatgttgccacacctacattaaatttggaacataatattgtgcacattattattatacattacattttgtcttcatgtgtctgtgtatatttatgtctctcttaatattttgatatctatgtatatataattttctaaaaggatggtggttgaaaatttcaaagttgaactcaaacttcaaagtgaaatgtattgtgcattccaaggctgaataggtctctgtagagagtgagtggaagggtaaggttataaatatcctgctggacaatagagaacttgttgaaatcagtgtaaaatcattaaaaatgaaatgggcttttacgtatc

SEQ ID NO: 323946 - DNA, 627 bp, Homo sapiens
catttgactgatttaatgtttattaaactcatatgggcatatatattaaaatacagggcagacataatggataacaggcaaataaaatgtcaaaatgaagtcaatgcctcaggtcaggaattagccctagaatcagagcctaaaagattgttgtgtggtttggaggctgtagagagcataggagactttaagattatagtactgcaatcaatacagtgatcttccttttttttttttttttctgaggactttactttgggagaagtttctgaggcactgaaaaagcagactggactgcgtaatgttgccacacctacattaaatttggaacataatattgtgcacattattattatacattacattttgtcttcatgtgtctgtgtatatttatgtctctcttaatattttgatatctatgtatatataattttctaaaaggatggtggttgaaaatttcaaagttgaactcaaacttcaaagtraaatgtattgtgcattccaaggctgaataggtctctgtagagagtgagtggaagggtaaggttataaatatcctgctggacaatagagaacttgttgaaatcagtgtaaaatcattaaaaatgaaatgggcttttacgtatc

SEQ ID NO: 323947 - DNA, 582 bp, Homo sapiens
aatgggattgctggattaaayggcagatctacttttggttctttaaggaatctccacactgttttccacagtggctgtactagtttacattcccaccaacagtctaaaagtattctcttttcactgcatccatgccaacatctattactattatttttttgattatggccattcttgcagcagtgaggtggtatcatactgtgtttttgatttgcatttccctgatcactagtgaggttgagcatttttccatatgcttgttagccatttatatatctctttttgagaattgtctattcatgtccttagtccactttttgatgggattgtttgttttttcttgctgatttgttttggttctttgtagattctggatattagtcctttgtcagatgtatagattgtgaagattttctcccattctgtgggttgtctgttaactctacctattatttctttcgctgtgcagatgctttttagtttaattaagtcccaactatttatctttgtttttgttgcatttgcttttgggttcttggtcatgaattctttgcctaaccaatgtctagaagagtttttctg

SEQ ID NO: 323948 - DNA, 507 bp, Homo sapiens
aaacataattggtaattctaagaagttactcaaaatgaacttttgaagaaggaagcccagacctgtttttgatcagggcagagccctctggctcccaagactcatccgttgcttcyctttgatcaaggcataatttgggtgcctccctaagaaattttctttttctgaagggcttacggagggaggggctggtgtgattggaaaatggagctgacatttctgggttggtgggattaagtgctgtttggcaatgacttgataactgaggtatagaaaatgtcagccaactcactgaataacttcatttcgacacataacactaaagatagttggaggtcacaccaaaggaacctgctccacaccttgtaacctagactttccctatatggagagaagtgagcgatgcaatctgtcatctgggtgtcctgaacacggaagagcattacatatgggtaaagcagcggtgagcaagcagggactggaggtgggcgtgtgccagcaccttct

SEQ ID NO: 323949 - DNA, 507 bp, Homo sapiens
aaacataattggtaattctaagaagttactcaaaatgaacttttgaagaaggaagcccagacctgtttttgatcagggcagagccctctggctcccaagactcatccgttgcttctctttgatcaaggcataatttgggtgcmtccctaagaaattttctttttctgaagggcttacggagggaggggctggtgtgattggaaaatggagctgacatttctgggttggtgggattaagtgctgtttggcaatgacttgataactgaggtatagaaaatgtcagccaactcactgaataacttcatttcgacacataacactaaagatagttggaggtcacaccaaaggaacctgctccacaccttgtaacctagactttccctatatggagagaagtgagcgatgcaatctgtcatctgggtgtcctgaacacggaagagcattacatatgggtaaagcagcggtgagcaagcagggactggaggtgggcgtgtgccagcaccttct

SEQ ID NO: 323950 - DNA, 487 bp, Homo sapiens
caaaacttaaaaaaataataaagggcaacactacaatggaaaatagcgttgtcatctgtttctcgttatttcttatctgtttctcatccttcatttcgataggtgcagttttatttttagactcttgtctttatggcttgagggctcttgctgtggttttccacaagttttaccagctttctccgcagcatgtcttaatgggagggttgtttgggtgattaacctgatgctgagtttaagcgctgcttggcaggttgctgggtttatgcttacagcatgtgtgcagagtgttatgttttcaagcagagcttcggagattcatttgttccactcagtatttcccctgaggaaagcttaacagctctgttttttgaaacatccttgtgacaggtctgattcatkactatcagagctggagcgaatttccgatcatctattttggaagaaatgcctctttcattgggagcaggttggaggggtccatttt

SEQ ID NO: 323951 - DNA, 573 bp, Homo sapiens
ttccccctttctacttcccactatgtactttgtctccaatcattactgtataattttgacatgtcaagaatggtatgtaaataataatatagtgtgtaacttttaaagcatttttgaaagtgaagattaaagcctaagtaaggtataattactacttttgccaactttataaaaactatggctgggcaccgtggcccatgcctgtaatcccagcatgctgggaggctgaggtgggtggatgaccagaggtcaggagtttgagaccagtctgaccagcatggtgaagccccgtctctactaaaaatagaaaaattagtggggcatgcttgtaatcccagatgtttgggaagctgaggcaggagaattgcttgaacccaggaagcagaggctgcagtaagccgagattgctcctttgcactccagcctgggtgacaagagcaagactcaaaaaatacaaaaaaaacaaaaaacaaaaaacaaaaaaaaaacaactgtraagatttttatatcctttgaagattttctgatactttaagaaattataagcttaagaaaatttacatatataacata

SEQ ID NO: 323952 - DNA, 529 bp, Homo sapiens
agattaccaaaggctgagtcaataaaatccctcaaaaaattacaaatgtatttatacaagaaagcaaatgaaagcatccaggaaaaaaatgttcacaaacacaaattcaaaaacatacaaattaaagcaaatttgaggtgccacttacaactaaagaaacatcataacatgataatatatactaatgtgtttgtagtgaatctgacttatttctacaacagcttaggaagtgatatgacaatactaatgaatgtctactgacagtatttcagggagcgcaactccgcaatgtaaatggtggccctgtaaacaaaagtgtttttatccaataatctttgctcctggaattttttctgaacctcaaagggcacatagaacaggagattaaagttcatggcatgctcaaaaacaattgagttcttcaccagcaatcctcaaaaaagaaaatcctaaaggttgttcttgagaatagaaatayattaaattcagaaagaatggcttagatataacaataaataaagaaaaaaga

SEQ ID NO: 323953 - DNA, 494 bp, Homo sapiens
ttttagaactttgtgttttgtggaaataaattttaagggaacaagaccagaggtaatgagaacagaaggaggctattttatggtccaagaagcagatgacaaaaggctaatctgggtctgtaatagtagagatgaagaagaagagataaaatccagcatatttaagaattaagaaattattaataaattggagacagtatagcatatgatcaatcacaaggttctgaattaagattctctgggtttaaattttggtaacttcctccacttaccacctatgtgaatttaggcaacttagttacatttcctggtatctcaatttccatgataaaatcrtatgataatagtatacacttcacagggtttcagaaacgattaaatgtgttaataactgtgaagtgattagaatagtgcctatcacaaactaaattttctatagatggaccctataaaaatggaaagaaaaataaaccccacacaaacaaccagtgaat

SEQ ID NO: 323954 - DNA, 538 bp, Homo sapiens
tatgtttactgcagcacatattttgatgtgcaatagcacatatttacaatacatatttacaatagcaaagtcatggaatcaactttcatgtccatcartggatgattggataaagaaaatgtggtacatatgtaccatagaatattattcaaccatgaaagagaatgaaatcatgtcttttggagcaacatggttggagctggaggtcattatcctaagtgaaataacccagaaatagaaaatcaaataccacatgttctcgcttataagtgggagctgaacaatgggtatgtatggacataaagaaggaaataacagacagtggggactccaaaaatggcgaggatgggagggggatgagggttgaaaaattacctgttgggtacaatgttcactatttgggtgatgcgtacaccagaggcccaaagcttatcattatgcaatatatccttgtaacaaaccttcacatgtaccctttaaattcataataaaaatatttttaatgtaaaataatgtttccttatgattaacttaaaaa

SEQ ID NO: 323955 - DNA, 538 bp, Homo sapiens
tatgtttactgcagcacatattttgatgtgcaatagcacatatttacaatacatatttacaatagcaaagtcatggaatcaactttcatgtccatcagtggatgattggataaagaaaatgtggtacatatgtaccatagaatattattcaaccatgaaagagaatgaaatcatgtcttttggagcaacatggttggagctggaggtcattatcctaagtgaaataacccagaaatagaaaatcaaataccacatgttctcgcttataagtgggagctgaacaatgggtatgtatggacataaagaaggaaataayagacagtggggactccaaaaatggcgaggatgggagggggatgagggttgaaaaattacctgttgggtacaatgttcactatttgggtgatgcgtacaccagaggcccaaagcttatcattatgcaatatatccttgtaacaaaccttcacatgtaccctttaaattcataataaaaatatttttaatgtaaaataatgtttccttatgattaacttaaaaa

SEQ ID NO: 323956 - DNA, 464 bp, Homo sapiens
tgctagggtctctaggttttttaagtataaaatcatgtcttctgtgaaaaaggctaatttgactacctcctttccaatttggatgtctttatttatttctcttgcctaacttctctgtccagaacttccactatgatgttgaataaaagtagtgaaagtgggcatccttgtcttatttcagatcttagaggaaaggctttcagttttttgctattygatatgattttagttgtggtgtgtcatatatagcctttatgattttgaggtatgttccttctatacctagtttgttgagggtttttttttaaatcataaaaaggtgttgaattttactgaatgcttttatgcatctattgaaattatcatatggtttttgttcttggttctgtttatgtgatgtatcatgtttgttgatttgcatatgttgaactactcttgcatccctgggatgaatcccacttgat

SEQ ID NO: 323957 - DNA, 490 bp, Homo sapiens
ttatttctcttgcctaacttctctgtccagaacttccactatgatgttgaataaaagtagtgaaagtgggcatccttgtcttatttcagatcttagaggaaaggctttcagttttttgctatttgatatgattttagttgtggtgtgtcatatatagcctttatgattttgaggtatgttccttctatacctagtttgttgagggtttttttttaaatcataaaaaggtgttgaattttactgaatgcttttatgcatctattgaaattatcatatggtttttgttcttggttctgtttatgtgatgtatcatgtttgttgatttgcatatgttgaactactcttgcatccctgggatgaatcccacttgatcatggkgaatgatctttttaatgtgttgttgaatttgttttgctagtattttgttgaggatttttgcatctatcttcatcagttatattggcctatagtgtttttttttcttattatg

SEQ ID NO: 323958 - DNA, 551 bp, Homo sapiens
tgattttggtatcagagtatggctggccctatagaatgagtttgaaaatagcccctgatctttaattgttttgaagtctttgagtagaattggtttcrttatttggatgtttgatagaattcatcagtgaattcatcaggttttgggcttttctttaatgagagactctattatggctttgatttcattcctcatgataagtttgttgaggttttctatttcttgattgctcagtcatggtaggttttacgtgccttggaatttatacttttcttctagtttttccaatttgttggcatattgttgtttgtaataatatagagacttttaatgcttctttgtatttctgtggtctctgttgttatatctttttttctgtttctgattttttttttggatcttctctttttattttttagtctggtgtattaatctgttttcacattactatatagaactgcctgagactgcgtaatttatgaagaaaagaggtgtaattgactcacagttccacacgatgtataggaagcatggctgggaggcctcaggaa

SEQ ID NO: 323959 - DNA, 557 bp, Homo sapiens
cacatacctcttgtcttctatgacttgtttcattgtaagtgtcagtgtgtcggctgtgacctgattcaaccggatagagacaccataatttttggctactactcggaccatgtttccatgctggtctccattgactggtaatcccaccatgggcacaccatgacggatggcctccattacgctgttctgcccaccatgagtgacaaaaagacggatgctggggtgagctgtggcaaataagaaagagagtggaacacttcaggatgaaaaattttggaataccaggyaaagcagaaaagtcagatgaaacaccaatgaaatcaaggtctgttgagaaaatgaattcactgattttgcttgggacacacaagtgtgaacattccaggatacaagattcaagcctccctttctgtagagattcctcacctcagccccaatccatctaagactctgaatgcagggaaagctggagagaagaatgataagccaaggcatatttctccatccatgcagccatccttctctcttcacctcatctctccatttacttcctgctc

SEQ ID NO: 323960 - DNA, 541 bp, Homo sapiens
tgtaatggcacattactaaacaggtggtcagaaggccacagaacaggggcaacatactcccagatatatgctcttggagtttacatattatcttagattgtgttggggtgactctgttcagtgtcaaatgtagtagggtcaaggcaacatgaccacatacatatcacctctggttggaaacttcaggcctcgcttgggttagaaagaaaaagagaaagtggctgttttcaccatttttgaagtacagcctgattcccaaagaattccagctggctgttcttttcctgtcctctgagcattacctttacctatgagtagctactacgtaggctgrtacaaatgcccagctagaggtcagaacactgacgagcaccaaaggcaggtcaatggaaagagaagagcagacctaagcagtccttacccaggaggtcactctgaggaagccagtccacaattttcacatttgtggccaaatgaacatctctgggccaatgagaactctgacatgtccatatcactccttgagggaggtgggcaaagg

SEQ ID NO: 323961 - DNA, 573 bp, Homo sapiens
tgcctgatacccagttccaaagttgcttccacattttcaagtatctttatggcaatgccccactcctgataccagtttattgtattagtccattcacactgctataaagaaatactcaagactgggtaatgtatagaggaaaaaggtttaattgactcagagttctacgtggctgggaagatctcaggaaacttcaaatcatggcagaaggtgaaggagaaacaagaatttttttcacatggtggcaggagggagaagtgcaagcaaaggaaatcccatatgcttataaaattatcagatctcatgagacctcactcactatcatgaaaacakcatgggggaaacaacccccatgatcctatcacctccttcccttgacacatggggattacaggtcctctcttgaaatgtggggattacaaatcaaaatgagatttaagtggggatacagagccaaaccatatcaaatcccaaattttcccccatcttcctatttctgagccctccacactttttcaacctctgactgttacccaggctcaaagttgcttccacatttcagttgtaatgccc

SEQ ID NO: 323962 - DNA, 595 bp, Homo sapiens
acatagtcatacagaaataatctgaaatataytttgatttagatatcgtcaattaaggtctagtcagggaatataaaccatttttggtcgttcagtagggggaaatataatacaggaaactagttactcaggtgatgctaaaactgagaagccaaagaggagatggtgaagtaccacagaggttggcaatggctggaagatccttccactctagcatggttgaagcacaggagggggaagtgttccacagcccagctcaggttaccgggcagagctgggaactgggagaacagaggagaggactgcctgttggagttgaaggtctcaagagaaacagcgctgcctaagatgctacccaggcagggagatgaaaagacacaaatcttagcatctcccctcttccattgatgagctggtgagcctcccactggctgatcttacctggaagccacttcacaagaaatccagttcctaaaagtacagattagagcaggggaagtgaggacagtggaattgagagcaaagggacaaatgaccaacacagttgcagtcaggtgtgccttgaaagcctggcccaaagtcctttacatggttg

SEQ ID NO: 323963 - DNA, 595 bp, Homo sapiens
acatagtcatacagaaataatctgaaatatattttgatttagatatcgtcaattaaggtctagtcagggaatataaaccatttttggtcrttcagtagggggaaatataatacaggaaactagttactcaggtgatgctaaaactgagaagccaaagaggagatggtgaagtaccacagaggttggcaatggctggaagatccttccactctagcatggttgaagcacaggagggggaagtgttccacagcccagctcaggttaccgggcagagctgggaactgggagaacagaggagaggactgcctgttggagttgaaggtctcaagagaaacagcgctgcctaagatgctacccaggcagggagatgaaaagacacaaatcttagcatctcccctcttccattgatgagctggtgagcctcccactggctgatcttacctggaagccacttcacaagaaatccagttcctaaaagtacagattagagcaggggaagtgaggacagtggaattgagagcaaagggacaaatgaccaacacagttgcagtcaggtgtgccttgaaagcctggcccaaagtcctttacatggttg

SEQ ID NO: 323964 - DNA, 435 bp, Homo sapiens
agagtttcagttacattaactcatatgtctgcatccttgtgataaggttcattctttcccaggaagggttctgaatttacrtaggtgacccgtgcaagttgaaagcttaatcttctttgcagttctgctactcttatggttaagtcctgggtctggtcttcagcactccttcttcaccttttcctcagattctaagatgtgagagccacttcatatgataccatgaagatcctttggctttcaatttagttgttaattaccagttaatttctattagccttttgctatctttttcaaaggattaatacatcttagctatagccacccattccactgtttctctagttattatttgtccaatatttctcaaatgcctgataaatcacattcttttgtgcattctctttcgtcaggataccttcttggtttaccact

SEQ ID NO: 323965 - DNA, 577 bp, Homo sapiens
  misc_feature (1)...(577): n = A,T,C or G
gtgttagaattaatcttagcatccatgtttactgtttccttgtgaagcytacccactctttgctaacctcctcccttttgactggcattacgttttagaaaatgtgtaggttggtgtcagggtggaggaaagagcacaccatggggacttttcccttctggggcctccacaatctgcatgtaatgaaatgctgcatgtgtgataaagataaacaagaagagcacataacacccacagaacccatagcttcccaagagatgaaataccagattgtagcagagctatctcctgaaatcctgctgccagtttttatggagtgctaatgagtctgtaaatattgtgcttgtgaagcaggctcactgtgtactggttcccactttttctgagtatagtgaaacagatcatttctccccatatgagttagatgaagtggacctattatnttatagattggcagcaagggacaacagaagtccaggattcattgccagctgatcccccaaggctcagggacttccccagggtggatggcatctcatctgcctgtgccccacttgcaccacagctgaggcacaca

SEQ ID NO: 323966 - DNA, 590 bp, Homo sapiens
gtcatttcctgaccccctgctgctggggtccggtggcaagacatagacacagtgccctgactctgggctctcatttccacctcttgaacacagctctctgctgtgttctggtcctggcttcctgacttgcgatttatcttggtagtatgacatgcagaaatattatgtatgctgggttggctcttcaaaagtgaccaagacattgccacattttgaccttctgttctatttgggttgaggctaaagaaaaagtgagagaaaaaaatcatctgccttcagtttctaggactagtagctttatgttgtgcttatacagacattaacctgtcaggagtattactgagtcctaccaataatttcaataaactgtaaattattggggaaaattagtattagttaacctaattaactctaaggatactaatcaattatatggctgaattagaaaaaaaaaaaaatcaaggccaggcacagtggctcctgcctgtaatcccagcactttgggaggccaaggagggtggatcacctgaggtcaggagtttgagaccagcctgaycaacatggcaaaaccccatctctactaaaaatat

SEQ ID NO: 323967 - DNA, 552 bp, Homo sapiens
aatgcttaccatttttataagatacaccccaatttaacagatgttaaaatgaaaaatatgtcccttggaatcactgaaatgtgaacattaaggatataatccttatacattataaatattgacattaaaaaaagcctgctacattattcttttaactgtgtccaaagaatctaaatactataaagatttaatattcacatgatccagttagaaaatatactagatgagcatgatgtactctgacatttggaaaatttaaatctttttcccccttgaatctagattttcaacctattaccayacaagatttaatctaaatgtatataaggtatttatgtaaaaatatagtagtctttaaaccttttacttattcccctatcatacattttttgtatacatacaagaaaaatatgcatatgaactggaaatttgctttattctctgtattcataaggctgtaaatctgcactatcccaatatggtagccactagcacctgttgctatctaaatctaaatgaacaaaaatgaaaaagttaaaaacttagtttccc

SEQ ID NO: 323968 - DNA, 524 bp, Homo sapiens
gtgtataaatataggacttaagttacttataaagctggttgactgtctttttagggccacttcttacaaagaaatgcaattttataatttctccaacattactgcatggaacctgaaaaagggragcaaaatccagttttgaggtggacgtcacagattgcacaaggaatttttcaagagaagacagaaatatggacattggtgataggtcctatctttataaatttattggcaaccaatttttaaatttttaaatactctgagttgacaatgtataagataatctatacatgtatgcctggacaatttggctggttgtaagtctatatcttcaatcatgattcatgagaactcattcaaagtgtgcactggagaacactaaggatgtatcatactaatgtatgttattagtttatctatgaaatcttacctctacaagtcaattgtaggcaacatgaaagaaacaggctacatttttcaacttcctttggatgtcctctgtgtggttgaatacatagcagatt

SEQ ID NO: 323969 - DNA, 489 bp, Homo sapiens
ggggtgaaggaagtgagatctgagcaggtcaaggatggtctgtggagcaagtggcaaacactggtcatggctcttggcattggggaatgctctagatcccttgagatgcatgcagggccatgaggcactggtccttgtggtaaggtgggacagcctggaggtaaggatggaggagagagagtacatggtgtgcaggagccttcttgggggatgcaggctgcctcctgcagtacacwtgggagtttttgcaggcagttcatgtagaaatgaacttcaagggaagcctttcaaggtaaaaagaaattcagtttgctgtctgttatggtttgggtctgtgttcctgcccaaatctcatgtcaaattgtaatccccaatattggaggtggagcctggtgggaggtgattggatcacggaggaagaaatcccctttggtgctgttctcatgacagtgagtcagttatcatgagatctgattgtttaaaagtatg

SEQ ID NO: 323970 - DNA, 577 bp, Homo sapiens
ggattctgccctagagtgggctaggacaggaggaaatacttggaatatcaggtgcagccaygtaagcagctcattagaagggctcatttactttccagtagacatttctctcactggggctggtttccttctttggctctgggagtactgccaagtcacttttccctcctgggaggagagggggtcaagggtggattggggagacagcctctccttcctcttgtgtgcccacctgctggaaatagaaattgtgtctcttagtttcaaatggtgttgcccacgagaagcagtcatggggcaggcagagtacaaagctttcccccttgctctgttgttggggattggcagggagtggggagggaggaaggattagtaggctggggttgggaaggggtagatgtctgagggtttcctctgtggaaagaggtgagcagggtggaccttagggagggcgacaggtctcatctacttaatatcttgtctcatctcctcctcctaacctctgcaaggggcagggggtggggaaggggagtcccagttgattccctgcaaaatatgcctgcaaatgaggcagctg

SEQ ID NO: 323971 - DNA, 577 bp, Homo sapiens
ggattctgccctagagtgggctaggacaggaggaaatacttggaatatcaggtgcagccatgtaagcarctcattagaagggctcatttactttccagtagacatttctctcactggggctggtttccttctttggctctgggagtactgccaagtcacttttccctcctgggaggagagggggtcaagggtggattggggagacagcctctccttcctcttgtgtgcccacctgctggaaatagaaattgtgtctcttagtttcaaatggtgttgcccacgagaagcagtcatggggcaggcagagtacaaagctttcccccttgctctgttgttggggattggcagggagtggggagggaggaaggattagtaggctggggttgggaaggggtagatgtctgagggtttcctctgtggaaagaggtgagcagggtggaccttagggagggcgacaggtctcatctacttaatatcttgtctcatctcctcctcctaacctctgcaaggggcagggggtggggaaggggagtcccagttgattccctgcaaaatatgcctgcaaatgaggcagctg

SEQ ID NO: 323972 - DNA, 577 bp, Homo sapiens
ggattctgccctagagtgggctaggacaggaggaaatacttggaatatcaggtgcagccatgtaagcagctcattagaagggctcatttactttccagtagacatttctctcactggggctggtttccttctttggctctgggagtactgccaagtcacttttccctcctgggaggagagggggtcaagggtggattggggagacagcctctccttcctcttgtgtgcccacctgctggaaatagaaattgtgtctcttagtttcaaatggtgttgcccacgagaagcagtcatggggcaggcagagtacaaagctttcccccttgctctgttgttggggattggcagggagtggggagggaggaaggattagtaggctggggttgggaaggggtagatgtctgagggtttcctctgtggaaagaggtgagcagggtggaccttagggagggcgacaggtctcatctacttaatawcttgtctcatctcctcctcctaacctctgcaaggggcagggggtggggaaggggagtcccagttgattccctgcaaaatatgcctgcaaatgaggcagctg

SEQ ID NO: 323973 - DNA, 577 bp, Homo sapiens
ggattctgccctagagtgggctaggacaggaggaaatacttggaatatcaggtgcagccatgtaagcagctcattagaagggctcatttactttccagtagacatttctctcactggggctggtttccttctttggctctgggagtactgccaagtcacttttccctcctgggaggagagggggtcaagggtggattggggagacagcctctccttcctcttgtgtgcccacctgctggaaatagaaattgtgtctcttagtttcaaatggtgttgcccacgagaagcagtcatggggcaggcagagtacaaagctttcccccttgctctgttgttggggattggcagggagtggggagggaggaaggattagtaggctggggttgggaaggggtagatgtctgagggtttcctctgtggaaagaggtgagcagggtggaccttagggagggcgacaggtctcatctacttaatatcttgtctcatctcctcctcctaacctctgcaaggggcagggggtggggarggggagtcccagttgattccctgcaaaatatgcctgcaaatgaggcagctg

SEQ ID NO: 323974 - DNA, 574 bp, Homo sapiens
tgcacgaggcagccctaagatgtctagggctgaaataacaactatttctatcacagcctgatctgacaaatttataaatcttaaaacaactttaggagcaacactttgaaacaaaagagatgaaaacaaaacaaaacaatgctttgagtttatatacataaatggtctaggtaataactggccccraaaagcgatcacaagccttccctggaagtattgctcttaaacttggaaattatgctattatcagcagttgactggaagcttcaggtccatctgaactgtgactctgctggtcggctcctaattaacctctgtcctgctgactgtataattcagcaggggcctgcagatgctccgcttttaagttaactgaggccgtctgctcattcaagctaatcctgatagtgccttaacaagaaggaaaaggaaaagattagatgtacctgaagctacaaatgagaaagctgtgtgggtggaagaagaggaaccattattttccccttttgtctgtttgaggcccctattttttaagctgtccagtgtaactaattaggagaaagaattctgaata

SEQ ID NO: 323975 - DNA, 550 bp, Homo sapiens
  misc_feature (1)...(550): n = A,T,C or G
ccacagagactattgtttaaggaaattcaaatattctgtatcttggctggtgtcccatagaggagtacagaaaaagttcttaaccaaccatctcttccactacaaataaaatatcaatttggatnttaatgttgtgaacatccaagaattttgttcatgaaataacttccaaaactggaaagtaaagttctttaaagttctatcttaaaaaatattcacagataacatgggtttattattagccaacattggagaacacaaaatatttttaagaaaatatcccttatgagaaaaaagtaaagctaaagagtatttatgatactgaaaatgttcaggccccatgcaagagttggccacagtaatccaaaacatttagaaatattttccaaatgttactattaaaaagggaaggaggggagaraaaaaaaccaataaaaacaaaaacctggtccttaatcatgaacatcccactaggcattacaaaaggattagattagttctatatctaaaccaacttctttaaaaagtacaactcatggctgggcactgt

SEQ ID NO: 323976 - DNA, 579 bp, Homo sapiens
caacttcttgttcaaactatacagatgatgtttaaagtgttaattaccatttttacaagaatccttgctgctttcwtggaaaggaagtatctgatggccggaaccagcggctgtccacagtttgtgactgacattcgaaggctgagaagggtccaccttgaggtctacttgatgttcactagtcctcaccaagtcagaatgagattgagttgtagggtaagtggcatcctgatggataactgatggattcagtttgttgaaagtgttaaatgacatttgtactaaagcttcattgatgaagaatgagttttcatgacataaactctcagatcgattaagttccattacctgtgtaaagaaacagaggaaaagtacaataatttttctaacttatacaagtttcataaagtatttattcctgagagaatcttaggaatcaagatttcagtaaaagtgaggtcaagattaccacttcttttctccctcccctctcccatactcttttaatgagctagtaccaaaaacttcaatttgctatgcatggcatatctttaacaacaacaacaaaaaaagtggcac

SEQ ID NO: 323977 - DNA, 530 bp, Homo sapiens
gcttaagtgtcactaaattccccttttatttctgggaaaataaaagaggaccatttggtgttgttatcattccatgttgtttgcctgccaacaatgcactgagctgtmcacagaaacataatttaggagcagtctttgctcaatgtgctaaaaaaatatgattattgttagtattttcattatttaacatttattgagcaccaaccatgcactaagtactcttcaaaacatacaattagtcatggttgatgcccaaagggcttactatttcaaattagaaagacacatctaaaattagatgctaacatttacaaataacaatgctttgtgaaagaactgaatatcccagacaattcaaatatagtgcttcatattatgtgttctccaaactcatctgtattcccatgagacctagaaacgtatactcaccagaaactttatgtagacaggaaagaaattattgtatacatgctacttataagcaatgttttaaaagtttgggacagctgcattgtgctcttatttcagat

SEQ ID NO: 323978 - DNA, 530 bp, Homo sapiens
gcttaagtgtcactaaattccccttttatttctgggaaaataaaagaggaccatttggtgttgttatcattccatgttgtttgcctgccaacaatgcactgagctgtacacagaaacataatttaggagcagtctttgctcaatgtgctmaaaaaatatgattattgttagtattttcattatttaacatttattgagcaccaaccatgcactaagtactcttcaaaacatacaattagtcatggttgatgcccaaagggcttactatttcaaattagaaagacacatctaaaattagatgctaacatttacaaataacaatgctttgtgaaagaactgaatatcccagacaattcaaatatagtgcttcatattatgtgttctccaaactcatctgtattcccatgagacctagaaacgtatactcaccagaaactttatgtagacaggaaagaaattattgtatacatgctacttataagcaatgttttaaaagtttgggacagctgcattgtgctcttatttcagat

SEQ ID NO: 323979 - DNA, 530 bp, Homo sapiens
gcttaagtgtcactaaattccccttttatttctgggaaaataaaagaggaccatttggtgttgttatcattccatgttgtttgcctgccaacaatgcactgagctgtacacagaaacataatttaggagcagtctttgctcaatgtgctaaaaaaatatgattattgttagtattttcattatttaacatttattgagcaccaaccatgcactaagtactcttcaaaacatacaattagtcatggttgatgcccaaagggcttactatttcaaattagaaagacacatctaaaattagatgctaacatttacaaatarcaatgctttgtgaaagaactgaatatcccagacaattcaaatatagtgcttcatattatgtgttctccaaactcatctgtattcccatgagacctagaaacgtatactcaccagaaactttatgtagacaggaaagaaattattgtatacatgctacttataagcaatgttttaaaagtttgggacagctgcattgtgctcttatttcagat

SEQ ID NO: 323980 - DNA, 630 bp, Homo sapiens
aacaggtatcacattataaaactctttgctaattttggaagtgaaaaatgctagtttactatggttttaatttgaacttctgatacttgacattttataattttaaacttattatattttctatgatttttccacttatatgttaggatcttagaatgttttgaataaacaaatgccaggaaaataataatccatgagtatgcagcatagaaaatatctaataatgcatgagtagtgtaaaaactgacacagataaggcatgcagtgtatgtaagcaacactaagtgccctacgatgccaggcccagcccctggtcttctctctgcctggccattgttctggctgtaacatctttacctcgtgccagctgcccttccacttctatgagcccctcatgacctstcagagtggttggtcttccagagtctgctggggtacaagactcatttttatttataaatttttgtagagatgggggtcttcctatgttgcacagcctggtctcgaactcctgggctcaagcaatcttcctgcctcaccctcccaaagtgctgggatttcaggtgtgaggcactgtgcctggcccaagactcctgttgaacaaaatattttgtttctgtaagggcgaga

SEQ ID NO: 323981 - DNA, 603 bp, Homo sapiens
agctcagttcactaactttgaggcttttttaccttctagtataaggcatttataagtctaatagtcctttgaatattgttcttgctaggcagaacaacagcacccaaaatatgtgcatatcctaatgcctcctacctgtgaatacattcttacacaacaaaaggaacttcacaggtgtgattgattagcttacagaactcgtgctggaaagatctttcagaatttcctggttggcccagtctragggcaaaggtgctataagtgaaagacagaagcagactcggagagattggtagatgctatgctgctggctttgaagatgaacaaagaggctagaagccaagtaatacaggtggtctctagaaactggcaaagtcaaggaaaaagatgttctcttagaacctctagaagtaaatgcaagtccgcaaatactttgcttctattttattaaagccaatttcagaattctgatctccagaactctgtgaaggcatttctgttgttgaagatgctaagtttatggtaattttcttacagcagcaaaggaaatgaatgcatttcatttgtcgcatctaaaacttttatggttttacaaattttatc

SEQ ID NO: 323982 - DNA, 479 bp, Homo sapiens
atatggaaagtaaatgacagaggagggattttaatccagtctatctctgaaacttgataatcgttaagtattctctgatgtatgccaagtttgcccagtttcctggtgtatacatgcctggccactatcgtagagctcattacaaagtggattgctgattatattatttaatttagtggaaattttaaaactaacttgtataggaggtgtcaaactatctaaatgggcaatattcattccttccaaagttctgtatggtattggagaggcagtatatttgtttatttgttgggaaaatgatttctggagagccagagcttcttttgtacaatcctagcttcacctcttatacattttgtgacatttagsaaataacataaactttattgtattttaatatctccatctgtaaaaaaagagcctttaatgtgtacttcataaggttgttgtaaggacaaaaaataataaatataagttaa

SEQ ID NO: 323983 - DNA, 584 bp, Homo sapiens
  misc_feature (1)...(584): n = A,T,C or G
gatcacttttttatgtcaaagcatatttaaaaaagtaattgtattttccatwttcaaatgtcatttttacccatatttatgaaaaagaaggaagcattatttcaaattatgttttaggtattgttacaggtataacaatgtgatgatgttataggtataacgatacctataacaccacttactgagcatttactgtgtgtgctacactgtgttaggagatgtagatatggatattaatgtaggaatagacatgtgtataaacatttatgntataaatttaatttgggctcaagaagtatcctgaatgctaacaaagtaaatattagaaaatgtggaccttaaagggtagctttctattcaacagttgtgagttactttaaggcttggatacattatgaacttgattttgtaatgaatgccctcaagaattcctttcagagagaacaaagttattacttctctaattttaacacatttagttcaagtgtttttatgaaaatcagtcaatcaactcttaatttctcctttgttatttcacaacatgttttatttttccctaaagaatcagtaaattgatagattgt

SEQ ID NO: 323984 - DNA, 584 bp, Homo sapiens
  misc_feature (1)...(584): n = A,T,C or G
gatcacttttttatgtcaaagcatatttaaaaaagtaattgtattttccatattcaaatgtcatttttacccatatttatgaaaaagaaggaagcattatttcaaattatgttttaggtattgttacaggtataacaatgtgatgatgttataggtataacgatacctataacaccacttactgagcatttactgtgtgtgctacactgtgttaggwgatgtagatatggatattaatgtaggaatagacatgtgtataaacatttatgntataaatttaatttgggctcaagaagtatcctgaatgctaacaaagtaaatattagaaaatgtggaccttaaagggtagctttctattcaacagttgtgagttactttaaggcttggatacattatgaacttgattttgtaatgaatgccctcaagaattcctttcagagagaacaaagttattacttctctaattttaacacatttagttcaagtgtttttatgaaaatcagtcaatcaactcttaatttctcctttgttatttcacaacatgttttatttttccctaaagaatcagtaaattgatagattgt

SEQ ID NO: 323985 - DNA, 584 bp, Homo sapiens
  misc_feature (1)...(584): n = A,T,C or G
gatcacttttttatgtcaaagcatatttaaaaaagtaattgtattttccatattcaaatgtcatttttacccatatttatgaaaaagaaggaagcattatttcaaattatgttttaggtattgttacaggtataacaatgtgatgatgttataggtataacgatacctataacaccacttactgagcatttactgtgtgtgctacactgtgttaggagatgtagatatggatattaatgtaggaatagacatgtgyataaacatttatgntataaatttaatttgggctcaagaagtatcctgaatgctaacaaagtaaatattagaaaatgtggaccttaaagggtagctttctattcaacagttgtgagttactttaaggcttggatacattatgaacttgattttgtaatgaatgccctcaagaattcctttcagagagaacaaagttattacttctctaattttaacacatttagttcaagtgtttttatgaaaatcagtcaatcaactcttaatttctcctttgttatttcacaacatgttttatttttccctaaagaatcagtaaattgatagattgt

SEQ ID NO: 323986 - DNA, 575 bp, Homo sapiens
taacacctacaccatgttcctacttgccagaaaacctacacataatcacacctttgtgcaagagaaccaggcagtatggactctactccagtgtgrctgtctagaaggaaaagaaaaataaattccaatcatagacacagaactttcagtctgtaccataggttcaatcatctgagctctcaatgttggtcagaataaattacattttaaactttatgaatactttactccaacagtaatctgtcaacatcacatgggtgttcattttttgatgggctactcatttttaacttaacatctattgtattcggtgaaggtggttctgtacgttgattatttgaacttggttgatttaagattatgatttaagattaatttttataaatagcccatgtatacaacagaagaatatacatttgctaattatttagtgcagaaatacacattagatgaagcttgttaactgtacagttatactggcagaaatttaaaattatatatatatttttctgtttgattgcaaaattgctgacagatgagttgttaaatcttctaagatcaaggatggctcaatt

SEQ ID NO: 323987 - DNA, 590 bp, Homo sapiens
ttgcaaatggcttccactggaggcattataggcccagatgatcttgtttgaaaaggtttaaagcctgatgcctaagatttgaggaaagatttgtgagaacctcttggactttgtgaaatggaaatcattacattaaaagtttaagatgtgttttctgtatactcaaacctttcagttaggtattatgatgcaatttttagcagaagtaaaccagggtttgaatgaattgagatcacataggtagtaaattgcagagccatggtcctagtcccaaatctccaatttctccagctgyggagcaacttctcactggatcttggagtaaaggatagtgaactatgagctagatgatgtatcaagttaactaatagtaatatcatctagctcatagttaacatggttccaagattgacaagaagtaaggaatgtaaaaaataaggaatgcccaattgaagcacaggcttttttcagttctatgcaagaaatacatgtatagttttatatttctgcttgaagtgttacatgtttagctacacaactgtgactttaaaacactttatgattttattgaatttcctgcaagttataga

SEQ ID NO: 323988 - DNA, 625 bp, Homo sapiens
tcatcaatatcactgttttttatgtccacatcttgtcccactggaaggtcttcagggccaataaagctgtcatctcccatgatgacgatgccttctggatacctcccgaaggacctgagactgttcatttattttttgttttttttttttaagttttcaggtaatttttaatctcaataggcttaaggagcacacactaaaataatgataagtataataaatacaaaaaccaatgatagaattattattattatacataactgtatgtgtgagaattttatgtgactggcagcacagtagatttgttcacaccagcatcctcacaaacacwtgagtagtacgttgcagcaagttatgacagcagcaatgtcactaggtgatagtttttcagttcctttataatctcatgggaccacaccatcgtatgtgcctcagtgttaatggaaatatccagatgcagtatatgattgtattctcatcttgcccttcaccaaccatccagtaaaggctctgctcctctcttcgcactgattctgttaatattttgggtttacttctagtcttctgttgtttcagtgctgtccattgagttatatgtatgttttttgtttgtttgtttgttttt

SEQ ID NO: 323989 - DNA, 543 bp, Homo sapiens
gttcatttattttttgttttttttttttaagttttcaggtaatttttaatctcaataggcttaaggagcacacactaaaataatgataagtataataaatacaaaaaccaatgatagaattattattattatacataactgtatgtgtgagaattttatgtgactggcagcacagtagatttgttcacaccagcatcctcacaaacacttgagtagtacgttgcagcaagttatgacagcagcaatgtcactaggtgatagtttttcagttcctttataatctcatgggaccacaccatcgtatgtgcctcagtgttaatggaaatatccagatgcagtataygattgtattctcatcttgcccttcaccaaccatccagtaaaggctctgctcctctcttcgcactgattctgttaatattttgggtttacttctagtcttctgttgtttcagtgctgtccattgagttatatgtatgttttttgtttgtttgtttgtttttgagacagagtcttgctctgtcacccaggctggagggcagt

SEQ ID NO: 323990 - DNA, 543 bp, Homo sapiens
gttcatttattttttgttttttttttttaagttttcaggtaatttttaatctcaataggcttaaggagcacacactaaaataatgataagtataataaatacaaaaaccaatgatagaattattattattatacataactgtatgtgtgagaattttatgtgactggcagcacagtagatttgttcacaccagcatcctcacaaacacttgagtagtacgttgcagcaagttatgacagcagcaatgtcactaggtgatagtttttcagttcctttataatctcatgggaccacaccatcgtatgtgcctcagtgttaatggaaatatccagatgcagtatatgattgtattctcatcttgcccttcaccaaccatccagtaaaggctctgctcctctcttcrcactgattctgttaatattttgggtttacttctagtcttctgttgtttcagtgctgtccattgagttatatgtatgttttttgtttgtttgtttgtttttgagacagagtcttgctctgtcacccaggctggagggcagt

SEQ ID NO: 323991 - DNA, 581 bp, Homo sapiens
cctcacaaacacttgagtagtacgttgcagcaagttatgacagcagcaatgtcactaggtgatagtttttcagttcctttataatctcatgggaccacaccatcgtatgtgcctcagtgttaatggaaatatccagatgcagtatatgattgtattctcatcttgcccttcaccaaccatccagtaaaggctctgctcctctcttcgcactgattctgttaatattttgggtttacttctagtcttctgttgtttcagtgctgtccattgagttatatgtatgttttttgtttgtttgtttgtttttgagacagagtcttgctctgtcacccaggctggagggcagtggcacaatctccgctcactgcaatctctgcctcccaggttcaagcaattctcctgcctcagcttcccaagtagctgagattacaggcacgcaccatcacactcrgctaatttttgtatttttattagagatggagtttcaccatgtgggccaggctcatcttgaactcctgacctcaagtgatccgcacaccaaggcctcccaaagtgctaggattacaggcgtaacccaacgt

SEQ ID NO: 323992 - DNA, 373 bp, Homo sapiens
tacaacccttcctgaaccaaattctttgggctccatacaggctggcatccttcccctgccaccttcccaaccaactcttcctgctagcttaagtgtccatgggatcgtgggttgtgcaccagaattccagaggtctgtggttagtgttggccactcctcacatgttcaacttgcctctttcttttttttcctatcattgaacttatttatttattcatatattcattattatactttaagttctagggtacatgtgcacaatgtgcaggtttgttatatatgtatacatgtgccatgttggtgtcctgcataaactcatcatttatattakgtatatctcctaattctatccctccccgctccccacaaccca

SEQ ID NO: 323993 - DNA, 570 bp, Homo sapiens
ggattctggcttgtaaatcaaaaggaagctccagaaagcaaccctttcccagcctaggacttggcaaactggaatgctcttatggaaattttgttaacaatgtaagttcctggatgycactttcagagattctgatttaatagtctgtggctcaaagtgtttcattcttaacagactcaagtgagccccacttcaagtagcactgctcatactcacaaacaagctgcaccttaatcatccctactgacaaaataacctggttttagttaacctaaagaacataaaccccaatatttattggtgccctcctccctaggctcagttagttcttccttaaatctaagctacaactcctctacccacagggcctgccagattcaagttcatatttgcttgctgtatcactcaggtagaactacctatcaatgatttccaaaaagtagcactcagcttttggcatcttctgtcttgtgttacttagtttgaccctaggattattgcactaataagcataaacaatttctcacctttggtgagaaattatttgttaccctgggctaaaaagcacat

SEQ ID NO: 323994 - DNA, 561 bp, Homo sapiens
attaatgggcatatttcagtttttgtggttcattttcaagagtttaattcaggttgcctgtttttcaaaataaagctagcttataatgaatagattgtaggaaaatttgatcaagtgtgtagtttagtttcactaaattcaatctgttaacagacagcatatgttgattgagaagagtcatgatggactattgttaagtatcctgaaaayttagttttttcttgtctcactttcacattggctggttaggggttacgtggttatttaataaatttgactctactgccgttcacaagcagagcaagtgccacagacatttctacatggtcttccatgacataaggagaattccacacccttgcagcacacacaacttattgccactgtatacatatacttcaacacatcactcatgtgtccacagaccaacaagaccccaaacacaatatggctgagaactcttacaagtaataaagatggagaggcttttcaatatcgtaaaccatgagcaacgacatttccatgtctcctgatgcgggttgtttatagaaaggctgtttc

SEQ ID NO: 323995 - DNA, 515 bp, Homo sapiens
ctacatggtcttccatgacataaggagaattccacacccttgcagcacacacaacttattgccactgtatacatatacttcaacacatcactcatgtgtccacagaccaacaagaccccaaacacaatatggctgagaactcttacaagtaataaagatggagaggcttttcaatatcgtaaaccatgagcaacgacatttccatgtctcctgatgcgggttgtttatagaaaggctgtttcaatggtccaccattttctactccagttagcaaagsgtggtcagctgtagattgaaaatgtttatgtgaaaaagaactaaagataaaaagcacatgattatctcaatagctgcagaaaaggcttttgataaaattcaacatcccttcatgataaaagctctcaataaattaggtattgaaggaatctacctcaaaataataagagccatataggacaaatccacagccaacatcatactgaatgggcaaaagctggaagcatttgccttgaaat

SEQ ID NO: 323996 - DNA, 605 bp, Homo sapiens
gatataaatgatggtctcctgaaagtgctcagataccccatgtggtactttttcacctaagttcatgattgtcctaggagacatgcatttacattcttttagcttgctctgaacctcatgctttcctttagtgcttttcttgaaggatttctttggcattgtagtttcaaaagttgtattttgtttccaacattgtgtggcttatctctgtgatatttggggggcttttgtatagctatgactcttcttaaaaattgaggtggggygcatgttctcactcagtgggaattgaacaatgagaatacttggacacagggtggggaacatcacacaccagggcctgtcgtggggctgggagagtggggagggatagcattaggagatatgcctaatataaatgacgagttaacgggtgcagcacaccaacatggcacatgtatacatatgtaacaaacctgcacgttgtgcacaagtaccctagaacttaaagtataataaaataaataaataaataaataaataaataaatggtgacctattgagaacaaggacaaagaatagcttcaaaactctattttacaaaaagggttccgcttgagatattt

SEQ ID NO: 323997 - DNA, 565 bp, Homo sapiens
ccccatgcccacccctggaggaggatacagagttgaccctggctggaaactggtggactagagctgccactgcacaaaaaatcttgtgacagtcatttacttttgcagatgctctatttctttacacattaaacagatgataccaactgtccagggattagagaagcataaaatacttagaaatatggcatgtttttcatttaaacaaatatgacaaagcttacacatttttagtgtctactgacacctgcatattagtcaccttgggaatttactcatttatccaagtgatactgaagcaattttaaraataattttagtcagggataagtccttctcctttcaggataaattgctttttgaaacaagctaggctcattcaagtttagcagataaggtaagtgagcaaagctaatgaaggctctttggagtcaaaatctaggtgaaacaataatgagatggatttttctttcctcatgaacagatactaaagtcaatttcaataaaggagtcttaaaaagattcggagtcattctgtcattgatgggataagtgaacagtcatc

SEQ ID NO: 323998 - DNA, 488 bp, Homo sapiens
tacatacttttaaatttcaattataaggaaatcttcttattgtttaataaccaatttgatctattgaagtgttctgtgtcttatgtcaattatatataaaggaccctcctaaggcataaaaaataactagtattacatttcttagtattttctgtggctcatttgagggagaggtatggatattgcaagagggaaagaagttgggaagggmaaagacgtggaaattaaccacactatgccttgttattctcctagggtctcatgattccttcagcttctacattgatgaagcctctccagtaggtcctgagcagccagaaactgtccagaattttgtctctgtgtttggaactgtggccaaaaagctcatgcggaaatggttagccactcagacaatgaattttactggccagctaggagctggaattcgttattttgatcttcgaatttccaccaagcccagagaccccgacaatgaactctatttt

SEQ ID NO: 323999 - DNA, 531 bp, Homo sapiens
agcaggggttaggactttaacgtgtattcttgtggaccacagatcaacccataacaccatgtattttgactccatgtctagttgtcttttcatagcaccctttttcacatttgtgtagtgctttatagattgcaatatcctttctctaccatttgcagagtcttttaatatccctaattccatttgaaatgcataacaacactgagaagtagatattgtcttacagatttaaaaaatgaggttcaaaaaagtgatatatttttcttaagaccccttcaacartgaatgataacacagatactcaaactctattcttaaactatatcctatgccttttatactacatacgcagccttataaggaatggttaccctgagaaagtggtcacttcattggtcaagcccagccaaacatgtaggatgttcattacctgtgaggtataatttgagcaatcacagtttttcctgcgagtgtgacacaacatactgaattgtacatattatttattcttttgagttaaaatattaaaca

SEQ ID NO: 324000 - DNA, 609 bp, Homo sapiens
tactccttgcattttgttatgtgtcttctggttgtgttgtggtcttctcttccttttttctttccttcctgtcttcctctagtgaagttgactttacctggtgataggatttagttattgcttcttattttttgtgtatccatygcatgtttttggttttaggttaccaggaagtgtgcaaataccatcttataagtcattattttaacttgataacaactttacattatttgcataagtaaacaaacaaaaagtaaactaataaaaatacgccttaacttcatccccccacttttaaacattttgttgtttctacttatattttattgtactgactgtgccttgaaattttgttgtagtttttatttttgattggttcattgtttagtctttctactaaggataagagtagtttacataccacagtggcagtgttataatattctttgtttttctgtgtacttaccattaccagtaagttttgtaccttctactgattatttattgctcattaatgtccttttctttttgattgaagtactccctttaacatttcttgtggggcgggtctgggattgatgaaatccctcagcttttgtttatctggga

SEQ ID NO: 324001 - DNA, 571 bp, Homo sapiens
tccagtgaaatttaaatttcagataaacagtatttctttagcatatttctcatatatttaatcagacatactttcactttaaaaaaagtttatctgaaattcaaatgtaactgggtatgtcctatatattttttcctaaatctcacaattctatccacactgcctttctatctttttcagctgggctatctataaggggcgagatctacctccctccatacccttgtgttcagacaccttatgaatatctgcagtcataatgtccttcaagaaagaaaacattggtcagctctaggtcctgcaaatgckttttgaaggacgaactcaaatacagatgggataatcaagtaaatatcttcataggatcaatgccaccatgttcaacacttccctttgccagcctgttgtgaggtccaagtttccccattaatcccttatatagcatttcccagtaactgggacaaccaaaaacacaccgacatattagaaatgctcctgaaaagtggcaacaccgcctaactcagtaccaggacctcttttaaattcaatttcttttttctttcagagagat

SEQ ID NO: 324002 - DNA, 559 bp, Homo sapiens
gcataacatcctaaattcaaggcacagcttcactccttggcattcacccgaagtccctaagctggtggcttctcctttcctggttgctgtcactggacctcctgatggcctgtcttaggacatagactgggtatgtttccataaatttttgccyccttctgctcttaattcaagtctcacttcctctctctcttttctgttcgcagacagattcgctcattctctttctcttcccaacctggacaatcatattgtatcctggtcccatttcctgctgtcagtcaattccaactcttaatcttctgtggataagtagaaggctgtttttttttgtttgtttgtttggtttggttttttttctaattggtggctcaacccttgtgtttctatactaaagggtaaagaggtgaacctaaaatgccttccattaatgtacttctggtgaggaaagttagcacaaagtggaacaaaagtcactaagttcagtctattagttactcagtacatataaataaaaagcagatgctagggcagtgtttctcaaagtgctgttaaacag

SEQ ID NO: 324003 - DNA, 559 bp, Homo sapiens
gcataacatcctaaattcaaggcacagcttcactccttggcattcacccgaagtccctaagctggtggcttctcctttcctggttgctgtcactggacctcctgatggcctgtcttaggacatagactgggtatgtttccataaatttttgcccccttctgctcttaattcaagtctcacttcctctctctcttttctgttcgcagacagattcgctcattctctttctcttcccaacctggacaatcatattgtatcctggtcccatttcctgctgtcagtcaattccaastcttaatcttctgtggataagtagaaggctgtttttttttgtttgtttgtttggtttggttttttttctaattggtggctcaacccttgtgtttctatactaaagggtaaagaggtgaacctaaaatgccttccattaatgtacttctggtgaggaaagttagcacaaagtggaacaaaagtcactaagttcagtctattagttactcagtacatataaataaaaagcagatgctagggcagtgtttctcaaagtgctgttaaacag

SEQ ID NO: 324004 - DNA, 557 bp, Homo sapiens
gttactcagtacatataaataaaaagcagatgctagggcagtgtttctcaaagtgctgttaaacagaccacttgcctcagcctcatttgtgaaaaggcagtattgggggtgatgtaaaaggctgctagataaaatgcacattcctgggctctaccccagactgacagccaaaatctctgaggatctactaagaatctgagctttttacaaatgtccagttcttcatttaatgtatactttacaatttaagagctgttacacacctgtctctattatcctttgaatacagttgttctttatcatgtatttgttgagtgtctaagatctaggtttcctctatctttgatacagtattgaatatgtgctcttgtaggcactggagmtatagcagagaatgaatagacaagtttcttactcatgaaccttacattcttctgggagaaagagatttgtggtcatcattgcaagaaaataaaatgaaaattaatgaagagttccagctacttcatgaagaataaaggttcatacatagacacagtgcctctatacacatatat

SEQ ID NO: 324005 - DNA, 638 bp, Homo sapiens
caaaccaaaaccagaggcaaatgtaaatgtcccctcttttaataagaagtcattaataagttcatatgtctccattctaactcaggttggataatgagwtgatcaatttaaagcaacttagatgaaagagagaagcagatttgtaaagcaaatatactggagggtcatatcctcctgtctccatcatttgaaccttagaccattaaagcaagaagggattctcaagatgaacaagaataaatatgaggaagacctaggagactggggctcaaggggttaaaatgacagctacaggatcaccagcagttttgggctatgatattctgtctctcagattgaagcctttgccactattgtctgttgtttgtgatgtcattatgctttagaaaagtcaaacatttttcccagggttgagtttttaagtagaaattactgtggcatttcaacattccttttaaaaagttccttccttggtttgacatctactgtccttgcaggatttcccacctgtccctctcctctggacctcaggctttcccaacaacaaaagtgtatagctcctgccttccttttcctcagagagtccccctccctgagcatcttcagtttctttcttggtgtctggttgtccccttttt

SEQ ID NO: 324006 - DNA, 601 bp, Homo sapiens
atccattgatgaacacgtagactgattccgtgagtttgctattgtgaatattgctgcaataaacatacaagtgtagaaattatatawtttttttttcctctgggtagatacccagtggtgggattactgggtagaatggtagtgctatttttagtttttgagaaatcattgtactgttttctatagaggttgaattaatttacatttccaccaacagtatataactgctctcttttcttcacatcctcaccatctgttgttttttgactttttagtaatagccattctgactggtgtgagatagtatctcattgtggttttaatttgcatttctctggtgattagtgatgtggagcatttgttcatatgtttgttggctgcttgtttgcttccttttgaaaaatgtctgttcatgtcctttgccctctttttcatggggttatttgttttttttgtattgagttgtttgagttccttgtagagtctagatttagttcttggttgaatgcacagtttgtaaatttttctcccattctgtagttgtctgtttactctgttaattatttcttttggtatgtaaaagctttttagtttaaagttt

SEQ ID NO: 324007 - DNA, 592 bp, Homo sapiens
gaagtgaggtgagctatgaagatgtttcaggaaagagcattccagcaagagggtgcagaaagtgccaagaccccgagccagggtatttgaggaggagcaaggagatgggaaataacagaacccagattgggtagggtcttatacaagtaactgtaataataactttggcttttattcgtattaagctagggtgtctttggatacttttgaacagaggagaaaaactcttagtttttcaaggatgaccctagctgctgtgttaaacgtagatcacccaggggctgtgggcagaagctgggaggccattaggaggaaggtacaaaattagtaacatggatgtgatgtcctgtgtaataaacaacacggatgggtttagaacagtctagcaatagtgsaggtggtgggaattatccagattctgaatatattttgaaggtagagcagatgtaatcagctgaaggattagctttaggatgtcaaagggctcaaaggtgtctcctgagcaactggaaaggtggaattgtgacttactgaggtagagagagacctagattggaatgtctgtttgggtgagcagcttgagcactttgtg

SEQ ID NO: 324008 - DNA, 506 bp, Homo sapiens
cttattgagttactgcctgaggcgtttgccaatctttcctaacagaagtgtttctctgaactgtaaaacttcctgcacattgcacacacagagagaataggacacatagtgacaccagatagaaagaaaggaaaattttatgacaggatagctgaagatcctttaccaacactcagacaggctgtcagaggctgggttcagtccagaagcctttgaataatgccacggtgtgccctggacagtaatcctcagttgcatcagacttctcccagcctcacatgatggttaggacctctgcgaataaaactggtttgaaggaagccttgagattaaaagacagatttgaggttcactccatactcaccaatctgatgtttctatcttctgttctgatcctgatcccagatgagaacccccaaatgaaatgtctttgttgtctgggcatctacccatggttctttgtcttgcactgaaaaagaattcrggacacaaacacacacaagcag

SEQ ID NO: 324009 - DNA, 577 bp, Homo sapiens
attttcttgaatgctatttctgcatatattgtgatatatacttttttgcttaaaattaccttcacatggtgaattacacttattgacttgcatattatgaaacattattgcattcatagaataaagctcatatgactgtggcaaagtaactttatttscttatgaactcagcttcctagtatttcatggaggatttttgtttctatgttcaccaggaatataggcctgtagttgtttttgttgttctgtcttcactagattttgagagcaacatgatactaattttatgtaataagttagggtggaatcccaccatgattttttttggaatacaatcagtatgattaggaccagctcatctttgcatacgtggtaaaattttctgcagattcatctgatccagggctttttgtggttggtagggtttcttttaattactaattcattatacaattttatgcatttttgctctcaagacttctgtttattcctgattcaaacttggaagttgtatgtattcagtttatctattttctctaaattttgtactttgaatgcacagagatgttcgtacaag

SEQ ID NO: 324010 - DNA, 577 bp, Homo sapiens
attttcttgaatgctatttctgcatatattgtgatatatacttttttgcttaaaattaccttcacatggtgaattacacttattgacttgcatattatgaaacattattgcattcatagaataaagctcatatgactgtggcaaagtaactttatttgcttatgaactcagcttcctagtatttcatggaggatttttgtttctatgttcaccaggaatataggcctgtagttgtttttgttgttctgtcttcactagattttgagagcaacatgatactaattttatgtaataagttagggtggaatcccaccatgattttttttggaatacaatcagtatgattaggaccagctcatctttgcataygtggtaaaattttctgcagattcatctgatccagggctttttgtggttggtagggtttcttttaattactaattcattatacaattttatgcatttttgctctcaagacttctgtttattcctgattcaaacttggaagttgtatgtattcagtttatctattttctctaaattttgtactttgaatgcacagagatgttcgtacaag

SEQ ID NO: 324011 - DNA, 636 bp, Homo sapiens
agagtgataccttcactttttctattgcttggttgctttggctattcagggccttttctggtatcctgtaaattttagatatatttttaaaaatttgtcagttatgtctctggtattttggtagaggttgcattatagctgtacataattttgtataatacagatgtttaacaatattaatgccaacttatgaaagtaatatttttccaattgtgtatttctttaatttcatttaaagatagttgtcaatgtatagaaattctatggacacttggatgttgcttttgtattctgcaagtttaataaatttgtttattagtcctactaatttttagtaataggcttttgtttacttaaaattrtgtatagaaatgaaaaattacacaggaataatttaacattttttctaatctcagtgctttgattttacttactaatttttctgtcttggatagttcatactatgtctaataagactgaaaaaagtgggcatttttgtcttcttgctcttagagtaaaagcttacaagatttccctgtttagtatgttattagctgtgctttttatatgtgtgttatatgtgacatttattggcttgaggtttatttgtcctatacctacttttttcagaaattt

SEQ ID NO: 324012 - DNA, 363 bp, Homo sapiens
ttatctttactgatgatataattctctaccaagaatactttaaagatttcaccraaagactcctaagcctaaagacttcaaaaaaatctcagaatacaaaatcaacccaaatgcatagaatttctgtacaccaataaactgagaaccaaaataaaaaacagctctatttacataccacaaaaaaatacctagaaatacattaaatcaagggggtaaaatatctctacagagaactacaaaacattgctgaaagaaatgagagagaatgcaaataaatggaaaaatactggatgctcatggattcaaataatatagttaaaatggtcattctgcctaaagcaacctacggattaagtgctattt

SEQ ID NO: 324013 - DNA, 623 bp, Homo sapiens
aagggggtaaaatatctctacagagaactacaaaacattgctgaaagaaatgagagagaatgcaaataaatggaaaaatactggatgctcatggattcaaataatatagttaaaatggtcattctgcctaaagcaacctacggattaagtgctatttttatcagactatctatgatgcttttttatagaattagaaaaagaaaatattccaaaatatatacaagagaattaaagagctcaaatagccaagactgcttcagactaaaagaataaatctgtgtcgagcgtgatggctcacacctgtcatctttgggaggctaaggtggatggatcacctgaggtcagaagtttgacaccagcctggccaacayggtgaaaccagtgtctactaaatacaaaaaattagccaggtgtggtggtgcgtgcctgtaatctcagctgcttgggaggctgaggcaagagaactacttgaacctgggaggtggaggttgcagtgagccaagattgcagcagagtagccagtataacatggttctggtacaaaaatatacatatagaccaatgaaataggagagagtcctgagctaagctacactttacaaccaggttatttttacaaagcc

SEQ ID NO: 324014 - DNA, 597 bp, Homo sapiens
gtgtccaaacctcaacatcatatagtatacatgttttacaaatctgcacatgtaccccttagatataaaataaaaacaaaatgtttttggtataatgaaatgttctatttttccagctctgggttaatagttgaaattaagagtgaaagacaaattttcacctcttaaggcgtggggtgaatgtttctataccaggtctcctcacatgttataagctaacctctctgaaaactcttgggctatagtccaaaaagtgtttcattttcaagtgtgcagctaaaacacattacacctttattatttatgaattaamtgtactctagacttatagacttcatttgttactctactctttttggggaaaaagtggtaagtagtggtttaatcatttttttcagaatgaactatttttgaaagtgtgagacaaaaaattatgctaaattactgaattagaaatataaaacattttttctaaaaaaaaaaaaaagcacaaaagtcttatggtcgtattccaaaaataattaaacagaaagtggaggttaagaccacagtgctgcaaatgctcattccatcacaatcattcttgtgaaaaataga

SEQ ID NO: 324015 - DNA, 597 bp, Homo sapiens
gtgtccaaacctcaacatcatatagtatacatgttttacaaatctgcacatgtaccccttagatataaaataaaaacaaaatgtttttggtataatgaaatgttctatttttccagctctgggttaatagttgaaattaagagtgaaagacaaattttcacctcttaaggcgtggggtgaatgtttctataccaggtctcctcacatgttataagctaacctctctgaaaactcttgggctatagtccaaaaagtgtttcattttcaagtgtgcagctaaaacacattacacctttattatttatgaattaaatgtactctagacttatagacttcatttgttactctactctttttggggaaaaagtggtaagwagtggtttaatcatttttttcagaatgaactatttttgaaagtgtgagacaaaaaattatgctaaattactgaattagaaatataaaacattttttctaaaaaaaaaaaaaagcacaaaagtcttatggtcgtattccaaaaataattaaacagaaagtggaggttaagaccacagtgctgcaaatgctcattccatcacaatcattcttgtgaaaaataga

SEQ ID NO: 324016 - DNA, 547 bp, Homo sapiens
tttattggacacatttctctgtagattttgatataaatatgagatagatagataaacatatacaaacacacagggttatgtaaatatgtctaggtgatgtcaatctgtatttttttctaaaacagccccaaaataaaagtaaatcagaggtcatttttctacacattctctttagaaacagtgaacccaatcagtcaatgagctcagctcaggtgaatccaatcagccaattagctcagtccaggtgactttaataagctagttagctcgactcaggcagatccaattatgcaattgtctaaatagggactgcagattcatcaagtcaggcctaatatagtgaatgcaaatagcatgttgatacagtgagaaacaaagcaatagyctgaaatgctagcctggaaatatagcattacatagctgtactgtcagcttactgtctagatttattccctgaacctgaagctttctttacacttatacaaacaacattgcttggctctgtttcattatgagatgttattgtgccatagagtaccgaagttag

SEQ ID NO: 324017 - DNA, 607 bp, Homo sapiens
tatgtatttatcgatataagatatgtgaatagtgaaacatatacacccagaatggttcacatagttgtatctagctagagtccatttgtgcttatgcctggtaaaaaaaaaaaatcctcagaagaagagaagatcaaagttcattttcctttcctacccatccagaccaggtgaattcwataagccaattagctaagctcaggtgattttaatcagccaattagctcagcccaggcaaatataatcagacaattagctaatttggggaagcagaagcatcaagaaaggccccaaatggtggatataaataacagaggtatacagtgaaaagaaaaaagcagggccttcaaattccaagctttccatgaaaccttacataacagtactggacgcttacttcctgggctgtgtccctcaatgctaatctttgttgatttttatacataacattgcatagctgggttccagcctgagatggtatagagccatataggtgaacgtaagtctatgtctgcaacatcagttttcgctggaggagaatgtctcttgaacttattttctcttgaacttattttgtatacataaatatttgcatagacaaactcat

SEQ ID NO: 324018 - DNA, 607 bp, Homo sapiens
tatgtatttatcgatataagatatgtgaatagtgaaacatatacacccagaatggttcacatagttgtatctagctagagtccatttgtgcttatgcctggtaaaaaaaaaaaatcctcagaagaagagaagatcaaagttcattttcctttcctacccatccagaccaggtgaattctataagccaattagctaagctcaggtgattttaatcagccaattagctcagcccaggcaaatataatcagacaattagctaatttggggaagcagaagcatcaagaaaggccccaaatggtggatataaataacagaggtatacagtgaaaagaaaaaagcagggccttcaaattccaagctttccatgaaaccttacataacagtactggacgcttacttcctgggctgtgtccctcaatgctaatctttgttgatttttatacataacrttgcatagctgggttccagcctgagatggtatagagccatataggtgaacgtaagtctatgtctgcaacatcagttttcgctggaggagaatgtctcttgaacttattttctcttgaacttattttgtatacataaatatttgcatagacaaactcat

SEQ ID NO: 324019 - DNA, 345 bp, Homo sapiens
gatgtaaagtattgtttcctgggcacacagctaattagcccaaatcaagctgaaatatgcttgatttaaaaattktaattttcccactgttgacaatattgacataacagctaaatcttagtctcagagctggtagtttggaataaattaagacaagtactattgaggaaggatgggtagtcaagaaagtgactatgtctttgggatgcagcaaacatggccactgtacagtggctgcatattgccaacacaataagccccagcattcacattgtattccagcttattcaagcaaagctctctccaatagagaaaatcccctggtaaagagcatgaagattttga

SEQ ID NO: 324020 - DNA, 585 bp, Homo sapiens
ttagtaaaacacacctccctgtgttctgattcaataaaaaaggtttattacttaggcagacactaatatcagaaagaagttgctaaaacaggccctgttcaaacatctttctaggttttgtcatccacaagttgaaactttgctgtatttaaacaacactgttttctgtgccccaactgaggaggtctcaggaggcactaaggctttcatcaattttttagctgaaagggaatataggctttcaaaatttaaagctcagctctgtcaaactgcagtaaagtagataggtctagtcagaaggtacmagaacaccaggtaaagaaataattaaactcattttctccttttcctttcccaaaactcttaaatagttggggggatcttagacattactggtttttgagaactctgggtacctgggaatggtgaaatagctaatcttttataccatcttattaaaaaaactgaagcacctaaaaacttactcgctaacttgggaagctaaaactaaaaggcctttaactaactaaaggcagccttacttaaagtgccaaacctcagtcttcccataaggaaggcatttaa

SEQ ID NO: 324021 - DNA, 585 bp, Homo sapiens
ttagtaaaacacacctccctgtgttctgattcaataaaaaaggtttattacttaggcagacactaatatcagaaagaagttgctaaaacaggccctgttcaaacatctttctaggttttgtcatccacaagttgaaactttgctgtatttaaacaacactgttttctgtgccccaactgaggaggtctcaggaggcactaaggctttcatcaattttttagctgaaagggaatataggctttcaaaatttaaagctcagctctgtcaaactgcagtaaagtagataggtctagtcagaaggtaccrgaacaccaggtaaagaaataattaaactcattttctccttttcctttcccaaaactcttaaatagttggggggatcttagacattactggtttttgagaactctgggtacctgggaatggtgaaatagctaatcttttataccatcttattaaaaaaactgaagcacctaaaaacttactcgctaacttgggaagctaaaactaaaaggcctttaactaactaaaggcagccttacttaaagtgccaaacctcagtcttcccataaggaaggcatttaa

SEQ ID NO: 324022 - DNA, 585 bp, Homo sapiens
ttagtaaaacacacctccctgtgttctgattcaataaaaaaggtttattacttaggcagacactaatatcagaaagaagttgctaaaacaggccctgttcaaacatctttctaggttttgtcatccacaagttgaaactttgctgtatttaaacaacactgttttctgtgccccaactgaggaggtctcaggaggcactaaggctttcatcaattttttagctgaaagggaatataggctttcaaaatttaaagctcagctctgtcaaactgcagtaaagtagataggtctagtcagaaggtaccagaacaccaggtaaagaaataattaaactcattttctccttttcctttcccaaaactcttaaatagttggggggatcttagacattactggtttttgmgaactctgggtacctgggaatggtgaaatagctaatcttttataccatcttattaaaaaaactgaagcacctaaaaacttactcgctaacttgggaagctaaaactaaaaggcctttaactaactaaaggcagccttacttaaagtgccaaacctcagtcttcccataaggaaggcatttaa

SEQ ID NO: 324023 - DNA, 584 bp, Homo sapiens
taatcttgtctgcctgccttatttcagcaagatagtctttaagctctgatattctttcttctgcttgattgctttggctactgatacctgtgtatgcttcacaaatttctcatgctgtgttttcagctccattaggttatttatgtttctctctaaactggttattgtagttagcaactcctgtaatcttttaccatggttcttagcttctttgcattgggttagaacatgcttctttacctccttgaagtttgttattacccaccttctgaagcctacttctgtcaattcatcaatctttttctctrttcagatttgtgccctttctggagaggtgttgtgatcatttggagaagaggcactttggccttttgtgtgttcagcattttttggttgattctttctcatcttcatgagtttgtctggttttgatctttgaggctgctgacccttggatgaagtttttgtcaggactttttttgttgatgttgttgctgttaccttctgtttgtttttctttcaatagtcaggttcctcttctgtaaggctgctgtggcttgttgggggttcacttcaggcctatt

SEQ ID NO: 324024 - DNA, 622 bp, Homo sapiens
tctgtatctaagtctacagagaaaaacatccaagaaactctgaaatttgctttaagcattgtagtctatcttcgagtaataacgcctagattttcttgccttactcaaaaactcacttcttcagccagtaaaagaaatacaatacagatattatattttcatttcccatgggaaaaaaaatcctctacattgatggaagctgtaaagagaatattttagcactttcaaatttgaaggagggattttaagctgagactactttatctctagtcctgtgttcatcagaaaaaaagggtcactttgacctagcaattaatgttttacatggccttattgtatttttatctcctagaagttagaaacaaagaccaaggcttccttcttatatgytaaattcagagagacgcacaaagagcatacctacatttgtgtactaatttagatatagggcagataagcttatacatctatgaaagtatctttgtatattactattatattataaatagtatgattaatattaaactattgtatattactattatctttgtatattactatcagtatatagtatacacttctactctctacatatctgttcttttttttttttttttgaggt

SEQ ID NO: 324025 - DNA, 591 bp, Homo sapiens
aatgaacacacacatactagattatatgagtaaatctatgtaaatatttatgtatatacaggatgttcaccaacagacattttagtaccccactacatactaaaaatgcagatgtggacttactccccaatctctggcacaatagcaatttagaatggaacacagccatacaatgtttgtataaacgttttcaaagcttcgtctctwaaggcaaggtctggaaggtgagctaaccataaagctatgtaaatctttatgtccaggttagcatttcagagtcctgctttgcttctcagtgtatgaacgtgctaatctccttcaccattttgggcctgccttgaagtatccattgtcaccattttgataatttgctgattgggtctaactggcctatgctaattggctgattggaattacctgaactcagctacttggacagttgagttcacctgagctaaactaactgattaaaaatcacctgggcttaaggctgggtgcagtgattcatgcctgtaatcccaccattttaggaggccgaggcagatggatctttttgagtgcagaagttagagacaaaaaaaagaagttcaa

SEQ ID NO: 324026 - DNA, 591 bp, Homo sapiens
aatgaacacacacatactagattatatgagtaaatctatgtaaatatttatgtatatacaggatgttcaccaacagacattttagtaccccactacatactaaaaatgcagatgtggacttactccccaatctctggcacaatagcaatttagaatggaacacagccatacaatgtttgtataaacgttttcaaagcttcgtctcttaaggcaaggtctggaaggtgagctaaccataaagctatgtaaatctttatgtccaggttagcatttcagagtcctgctttgcttctcagtgtatgaacgtgctaatctccttcaccattttgggcctgccttgaagtatccatygtcaccattttgataatttgctgattgggtctaactggcctatgctaattggctgattggaattacctgaactcagctacttggacagttgagttcacctgagctaaactaactgattaaaaatcacctgggcttaaggctgggtgcagtgattcatgcctgtaatcccaccattttaggaggccgaggcagatggatctttttgagtgcagaagttagagacaaaaaaaagaagttcaa

SEQ ID NO: 324027 - DNA, 591 bp, Homo sapiens
aatgaacacacacatactagattatatgagtaaatctatgtaaatatttatgtatatacaggatgttcaccaacagacattttagtaccccactacatactaaaaatgcagatgtggacttactccccaatctctggcacaatagcaatttagaatggaacacagccatacaatgtttgtataaacgttttcaaagcttcgtctcttaaggcaaggtctggaaggtgagctaaccataaagctatgtaaatctttatgtccaggttagcatttcagagtcctgctttgcttctcagtgtatgaacgtgctaatctccttcaccattttgggcctgccttgaagtatccattgtcaccattttgataatttgctgattgggtctaactggcctatgctaattggctgattggaattacctgaactcagctacttggacagttgagttcacctgagctaaactaactgattaaaaatcacctgggcttaaggctgggtgcagtgattcatgcctgtaatccyaccattttaggaggccgaggcagatggatctttttgagtgcagaagttagagacaaaaaaaagaagttcaa

SEQ ID NO: 324028 - DNA, 407 bp, Homo sapiens
cagcaacaaggactaatgcttactttgtataagttaaatgcagatggatggacgttatagcacgcctccatttgtgtactactctctagacagagtttataggccagaacattgtatacatctatggaattatctttatatatcactatcagtatcaatacctatcaacccttccaycttctacatctttaatttttatgaataaaaatacaaaataaatatatctggatatagatattcataggtagataaacacacatactgaattatataagtacatctatgtaaatatttaggtgtacacaggatgttcacaaaaagacattttcaataccttagtatataatcaggatgtggatacgaacttactaccctactctatgccacaatacaaacccagaattgta

SEQ ID NO: 324029 - DNA, 560 bp, Homo sapiens
cacagcccattgctgaggtcctgaatctcacacccagaagcagttgaaagttggaaaattgactctcatatgtgaatccggtccacaggtgggttggtgactctcagaccaagactcagcacwctcgtgaggttgtgactccgctaaggagacaggctgcgggacggattgaggctttcacgcgtggctccagtccactgttgagactgtgaatcacgtacttagactcaacatacaggaggtgtttcctctcatacctgtaattgagaaatgtgcaggattgttaatctcatccctggcctttcatgcaggtgtgattgtgccctcaaaaggcattgtgaaatattggcgggcccagctcaaaggtgatatgaaatatgcctctccagcatttgagttattttacttttctgtgagagcccagtccacagatgggattgtgacattgctagacccaacaactaggtaatgtgactctattctcctgcattggcattgtccaaagaaggcaaataacacattacttgtcttcgcactcaggtgatgactcttctcctgcc

SEQ ID NO: 324030 - DNA, 560 bp, Homo sapiens
cacagcccattgctgaggtcctgaatctcacacccagaagcagttgaaagttggaaaattgactctcatatgtgaatccggtccacaggtgggttggtgactctcagaccaagactcagcactctcgtgaggttgtgactccgctaaggagacaggctgcgggacggattgaggctttcacgcgtggctccagtccactgttgagactgtgaatcacgtacttagactcaacatacaggargtgtttcctctcatacctgtaattgagaaatgtgcaggattgttaatctcatccctggcctttcatgcaggtgtgattgtgccctcaaaaggcattgtgaaatattggcgggcccagctcaaaggtgatatgaaatatgcctctccagcatttgagttattttacttttctgtgagagcccagtccacagatgggattgtgacattgctagacccaacaactaggtaatgtgactctattctcctgcattggcattgtccaaagaaggcaaataacacattacttgtcttcgcactcaggtgatgactcttctcctgcc

SEQ ID NO: 324031 - DNA, 554 bp, Homo sapiens
ctcatgcctgtaatcccagcactttgggaggctgagtcgaggggatcatctgaggtcaggagttcgaggccagcctggccaacatggtgaaatcccgtctctattaaaaatacaaaaattagccaggtgtggtggtgcacacttgtaatcccagctacttgggaggctgaggcaggagaatcacttgaacccttgaggcagaggttgcagtgagctgagatcacgccattgcactccagcctgggcaacgagagtgaaactctgtctcaaaaaacaaaaaacaaaaaaagctccaaaaaaccaaaatgagattgtgacatatcactggaccgagcaccttggtgatgtgactatcctctcttgcttgagtttcacatattattgttactgtgacatacctctgtgacaaacagctatgggtaggaaaacttctgcctggactcagcccaaggcrgcctcatgacttttttaaaagatatgtgactttaaaaatgtgactgtcattttctgcctatgctttgccctcaggaaagattgtggcatattactgaact

SEQ ID NO: 324032 - DNA, 471 bp, Homo sapiens
tataatcccaacactgtgggaggcttaggtgggtgaatcccttgagcccaggagttcaagacccacctaggcaacatggtgaaattccatcccttaaaaaaaaatacaaaaattagctgggtacagtgatgtgcacctgtggtcccagctacttgggaggctgaggtgggaggatcacctgagcccaggaggttgaggtcacagtgagctgagatcgccctcctacactccaacctgggcaacagagccagaccttgactttaaaaaaaaaaaaaaaaaaaaaaattctgggtttctggcatctcaaaaaaaaaaaaaaaaaggaaaggtcagggcacatggctgctacagtcctctattaagcaatgtgccacagcaggggtscctgacccctgggccatggacatgtactggtctgtggcctgttaggaactgggccacagagcaggaggtgaatggtgggtaacaatt

SEQ ID NO: 324033 - DNA, 471 bp, Homo sapiens
tataatcccaacactgtgggaggcttaggtgggtgaatcccttgagcccaggagttcaagacccacctaggcaacatggtgaaattccatcccttaaaaaaaaatacaaaaattagctgggtacagtgatgtgcacctgtggtcccagctacttgggaggctgaggtgggaggatcacctgagcccaggaggttgaggtcacagtgagctgagatcgccctcctacactccaacctgggcaacagagccagaccttgactttaaaaaaaaaaaaaaaaaaaaaaattctgggtttctggcatctcaaaaaaaaaaaaaaaaaggaaaggtcagggcacatggctgctacagtcctctattaagcaatgtgccacagcaggggtgcctgacccctgggccatggacatgtactggtctgtggcctgttaggaactgggccacagagcagraggtgaatggtgggtaacaatt

SEQ ID NO: 324034 - DNA, 585 bp, Homo sapiens
tgatggttacctacccatgctctgctcttctgctgctactttctgggctctgagatgaccacagaggccagggtcaaatgctgggccactcaccacatactgatgatgctgtcaaaatgtggttacccttctgctccacctcaattatctrtggaaaacctaatttaaggggtatatggtgttttgtctgcccgcatttcttcctgtaagaaacacgctttcccctcttccctagtaaactgtctcagtccttacgagttggtggagctggactgcctcacttccatccccaaggtcaggtacatgcccagatctggtcagaggacttcatgtgtcaaggtacaactactgcctcagccatgagcacttgactcatacagtgcccattagcgtccacctggggactttttctgtgctactggaacaaaagtgcatgtttcctcaccatctttggctgttagccctatgtgaacatggaggtatcttgctgccatgcgatgaaaagcttatacacaacgcagagggtaagtcagagaaactagttaatgacataatttgagatccaaatctgcctgacttttcagc

SEQ ID NO: 324035 - DNA, 585 bp, Homo sapiens
tgatggttacctacccatgctctgctcttctgctgctactttctgggctctgagatgaccacagaggccagggtcaaatgctgggccactcaccacatactgatgatgctgtcaaaatgtggttacccttctgctccacctcaattatctatggaaaacctaatttaaggggtatatggtgttttgtctgcccgcatttcttcctgtaagaaacacgctttcccctcttccctagtaaactgtctcagtccttacgagttggtggagctggactgcctcacttccatccccaaggtcaggtacatgcccagatctggtcagaggacttcatgtgtcaaggtacaactactgcctcagccatgagcacttgactcatacagtgcccattagcgtccacctggggactttttctgtgctactggaacaaaagtgcatgtttcctcaccatcttkggctgttagccctatgtgaacatggaggtatcttgctgccatgcgatgaaaagcttatacacaacgcagagggtaagtcagagaaactagttaatgacataatttgagatccaaatctgcctgacttttcagc

SEQ ID NO: 324036 - DNA, 607 bp, Homo sapiens
cttggttttgtagcagctgcagtttgagcacgtacaccaaaaataaaattctaagccccctaactgactgaagggacccctcctattggccaaagggatattccaaagttaacctgaaaaacgagctcaggtcatgatgggaagaagggtcacacaggccttgttataccccctccctctggaattcaggtacagctgaccagcactaacattcaaacacagatcttggcctggctcagtgcctcatgcctgtaatctcagcactttgggaggctgaggtgggcagatcacgaggtcaggagttcgagaccaggccgaccgacatggagaaaccccatctctactaaaaatacaaaattagctaggcatggtggtggcaggcacctgcaatcccagctacttgggaggctgaggcaggagaatcgcttgaaccaggytgcagtgagccgagatcatgccactgcactccagcctgggtgacaaaaacaaaacaaaacaaaacacaatattggtctccacaacctcctgtcttacccagatactcctttctattgattccaggtctttagctaataactctttcaaccaattgtgaatcagaaaatct

SEQ ID NO: 324037 - DNA, 606 bp, Homo sapiens
caggtgaacttcccacctcactcagccctacaagcgggtgtcaccatacccagcttttttttttttttcctttttaaagtggggtggtgccatcacgactcagkgcagcctctatctcttgggctcaagtgatcctcccagcatagctcctgctaattttttatttttgtagagatggggtctccgtgtttcccaggctggtcttgaacttttggcctcaagcagtcttcccaactcaggctcccaaagtgttgggattatcgacctgagccactgtgcatgcatggccaagaatgcttccccctccggcctctcccccccactcttttttttttggagacatggtctctgttgcccaggctggacgtgcagtggcacgatcttggctcactgcagccttgacctcccaggcttaagtgatcctcccacctcagcctctcaagtagttggtgggactactggtgtgagccaccacacccaactaatttagaaacaaatttggtagagatgaggtgttgttatgttgacatggctggtctcaaactcctggactcaagagaaccttccagctaatcctctcaaagtgctaggatgatagatgtgagt

SEQ ID NO: 324038 - DNA, 412 bp, Homo sapiens
  misc_feature (1)...(412): n = A,T,C or G
tattctagagatgcttagttgcattgaatgagtttcattcctgactggcatgagccgtttaccctaatcatccttccacactgtacctcatcctgttaactatacaagacctcaaaatgagagggggggacataatgcttctcaatttcataggttttgcctttttttggagtagggaaaattacagttccttattcccattccccttgcatttttttttcattattaaaatgaagttgtcattgtcttttaaatatgaaactacttttcccaggaaggacaattggttggaaagactgttctatagctgccagagactggataagcgtgaccrgtcaacaattccacgcaatctcctgaagacagatgctattcctttnggcagtgggcccatattgggaagctgcacaan

SEQ ID NO: 324039 - DNA, 487 bp, Homo sapiens
agactggaggtgcggggcaagtatggaagcatggagaccattaatttatgggggcaatggtagagggaagagaaacaatgctattaactggagtaggarcacacagagaacaagccatgttttaagatttctaatgaaatgtgcagatgagattgttgggtaagctgttaagaattggattttgaactaaggagacagtctaagcttgagagatttgcagatgattagtacacagaaaaggccctctttccttttcagtctctatactctagagcctttgtaagcaaccaaaccagagagaagcctctggagaatagtgagtgaagaggaaggaaggcctgggtcagaatcctagtttagcatttttgtgaaaggatagaagaggaagccattcaaaaaaatacagggacattgagaagggaagtgccctagatataggacatccagatgggagtagtcagccttgtcagatgctctagggattata

SEQ ID NO: 324040 - DNA, 490 bp, Homo sapiens
gtgactttctggtttgccactccaatttgagtactaattaagtggtagtcacatcttcaacataaaaaccaaaataatggcatcctcgtggaaggaattttgtcagaaaartgctgtgtactttgctgtcttcctaggatttgttctgtttttgtttgtttgttttttttaatggttccacaggctgcataggaatacaagctaaccaatattttaattacagatcattaagcagctttgagtctggaaaatttgtcgaatgtaccgagcaattagaattgttaccaggagaaaatatcaatctacttgctggaggatcaaaagaaaaaataggtaggtatttgagaaaatagttttaaagttattttagtggacaagttgctcaaaatgtttggcttagtatattttactggaaaatctggaagttattttacatttttgggggggcagaatgccatgtgaagcaacaaatttagggctgccctattta

SEQ ID NO: 324041 - DNA, 598 bp, Homo sapiens
ttaccataacagtcttctcttagaataagaaaaaacctttctcttgaactggcaggataaaataaaggcactgacccagaatccactgttattcttgtatagatcataaatgcctacagtgaagagcattacactatctttggygacatctctaaaggaggtctgcccaattagcagtgacagctggtgggaatgcaaaatcatacagccactttggaagacattttgttggtttcttacaaaagcaaacatgtttttgccatataacccagcaaacacactctttggtatttacacaaaggagttgaaaacttacgtctacatgaaaacctgtatatggatgttgatagcagctttatccataattgccaaaacttggaagcaaccaaatgtccttctgtaggtgaatggctaaataaactgtggttcattaagataatgaaatatgattcagcactaaaaagaaatgagctatcaagccaaaaaaagacctggagaaaacttaagtgcatattactaagtgaaagaagtctatctgaaaaggctatctactgtatgattctaaatatatgatattctagaaaaggcaaaagtatca

SEQ ID NO: 324042 - DNA, 470 bp, Homo sapiens
ccgccggcccacccgggccgctagtcatgttcacgtacagggagcgggtgagcgggctccgcagcgtccacatcctccgcgccagccacacggacgccaggctcaggcacagccagcccgccagcagtctcatcgggggccgcggccgctcgctcggatcaccgccggcgccggggcgaggaggaggaggcaccgccgcctccggccaccgccgccaccgcccgagctcgagccatcgcggccgccttgcccatccagcccccttcagggcaaaggctgggggtggggaggagcagccggcgcgcagcctcggcacctcccccttcccttccggccagcggaacgccgctgccccctgcaccagtttccatccggagcacttacragcggccgcgtcgctttctcccccggcgccctccctccgtccaatgagcgggccgctgggaggcgggacaaagggagcgcgcatc

SEQ ID NO: 324043 - DNA, 559 bp, Homo sapiens
tcagggagcaagggagaagtgtgggccgcacctgccgaggggtcgggagtttggaggaggtggaggttggctacaggatcccgatggggatggagtgttcaaatctaggcctgtagccgtgaccctggcgtgagttggatggaggaaaccccagtatcgcgagcctggaccaaggcgcggcgcgtgctgcctgtggtgtttgctgagtgacggccgccgcgcccccgcgtacctggrccgagtgcctggccgctggcggagtagtgtttccgtgcacggggctgctgcgtgcgcgtgtgccgttctctagcgggggattaggatggtgccgcagagaaggctgcgcggtggtgcctgactctgacgctggctgtagcgggtctctggggtctttgcggtttgtgtctgcgtttgtgacgtacctgacatcggatctgtgactgtggctctgcctcatccagcgttatttccagaatccttctgatagggcagcgcttctggttctggttttccatggagacggtttgtgggtccctatgaaactgagtgttgggatttt

SEQ ID NO: 324044 - DNA, 580 bp, Homo sapiens
atgtcatacagtaggactgcatacagtaaagaacgtgaaatctggaactgacagatttaactaggagcgttacccgattgacttacttcacttctttgaacagcatttttctcatttgtaaaatggggataacactagtaccaaccttttagatttgtggtgaggatcaaattaaatcacatatgatgctgcctgacgcacagtaagcactaaaaagtagttatgatgaaaattatcattactatttacggctcacatttatttccatacatcacatgtaactgtttattaacgcttaattaaaaatttttgtctatatataacaacactctacacttataatgccaacactgcctttaaaaagataaacattactactgatacactatgcaacagagtttttccaaattgaagkttgtgcatgaagttttattaaatttatttagtgctggtttgaaataacagtatttttttctttcttctttataaggaagtcatagtcaaaaaaagaggctaataacagaaattttacatgtcattatttggaacatgggtcataaaaataaaaagtcattgggtt

SEQ ID NO: 324045 - DNA, 558 bp, Homo sapiens
cgttgtgtgtatatctgcaactattttctctggttaccatggagatcgcatttaacttcctaaagttataaaattctaatttggatttataccactttaacttaacatacaaggctgggcggyggctcacacctgtaattccagcactctggggggtcaaggtggctggatcacaaggtcaggagttcaagaccagcctggccaggatggtgaaaccccatctctactaaaaatacaaaaattagctgggtgtggtggcgggtgcctgtaatcccagctactagggaggctgaggcagagaactgcttgaacccaggaggcggaggttgcagtgagctgagatcgtgccactgaactccagcctgggcgacagagagagactctgtctcaaaaataaaacattaaaaaaaaaaaaaaaaaattccactcctttatagctaggtcctcactcctcttgattgttggtgtcacgaaattacatgtttataatgtgctgccccaagccataaactaataattattttaagtgcatttgtgtcttaaaagtaaaaaacaaaa

SEQ ID NO: 324046 - DNA, 558 bp, Homo sapiens
cgttgtgtgtatatctgcaactattttctctggttaccatggagatcgcatttaacttcctaaagttataaaattctaatttggatttataccactttaacttaacatacaaggctgggcggtggctcacacctgtaattccagcactctggggggtcaaggtggctggatcacaaggtcaggagttcaagaccagcctggccaggatggtgaaaccccatctctactaaaaatacaaaaattagctgggtgtggtggcgggtgcctgtaatcccagctactagggaggctgaggcagagaactgcttgaacccaggaggcrgaggttgcagtgagctgagatcgtgccactgaactccagcctgggcgacagagagagactctgtctcaaaaataaaacattaaaaaaaaaaaaaaaaaattccactcctttatagctaggtcctcactcctcttgattgttggtgtcacgaaattacatgtttataatgtgctgccccaagccataaactaataattattttaagtgcatttgtgtcttaaaagtaaaaaacaaaa

SEQ ID NO: 324047 - DNA, 558 bp, Homo sapiens
cgttgtgtgtatatctgcaactattttctctggttaccatggagatcgcatttaacttcctaaagttataaaattctaatttggatttataccactttaacttaacatacaaggctgggcggtggctcacacctgtaattccagcactctggggggtcaaggtggctggatcacaaggtcaggagttcaagaccagcctggccaggatggtgaaaccccatctctactaaaaatacaaaaattagctgggtgtggtggcgggtgcctgtaatcccagctactagggaggctgaggcagagaactgcttgaacccaggaggcggaggttgcagtgagctgagatcgtgccactgaactccagcctgggygacagagagagactctgtctcaaaaataaaacattaaaaaaaaaaaaaaaaaattccactcctttatagctaggtcctcactcctcttgattgttggtgtcacgaaattacatgtttataatgtgctgccccaagccataaactaataattattttaagtgcatttgtgtcttaaaagtaaaaaacaaaa

SEQ ID NO: 324048 - DNA, 558 bp, Homo sapiens
cgttgtgtgtatatctgcaactattttctctggttaccatggagatcgcatttaacttcctaaagttataaaattctaatttggatttataccactttaacttaacatacaaggctgggcggtggctcacacctgtaattccagcactctggggggtcaaggtggctggatcacaaggtcaggagttcaagaccagcctggccaggatggtgaaaccccatctctactaaaaatacaaaaattagctgggtgtggtggcgggtgcctgtaatcccagctactagggaggctgaggcagagaactgcttgaacccaggaggcggaggttgcagtgagctgagatcgtgccactgaactccagcctgggcgacagagagagactctgtctcaaraataaaacattaaaaaaaaaaaaaaaaaattccactcctttatagctaggtcctcactcctcttgattgttggtgtcacgaaattacatgtttataatgtgctgccccaagccataaactaataattattttaagtgcatttgtgtcttaaaagtaaaaaacaaaa

SEQ ID NO: 324049 - DNA, 564 bp, Homo sapiens
aggcacgtcagcctcattttcatttttatgccaaaggtgctcttgattttgttgttatcaaatgacagaggaccttcccattgaaaatgttctctctcatctgacaataaacaaaatttcccagtgcctcaggatcctggaaataggttttacgtgggcctgtctgtattcagagatttgaggagaaaactgtttaggtttcaaaatagtcaaggatagcataacatgtgctttcaataaacataaatcaagatagaaaaaataagatgaaattaactgaatgaatttagacatatcttctattttagctatttatttaagagatggggtcttgctgtgttgccccacatcctgatattggtctagctggtcttaaactgctaggctcaagcaatccttctgcctcagccttctgagtagctgggactacaggcacaaaccaccaagcctggcgatgttatayacttcttatttatttatttgttcatttattttgagatggactttcactcttctcgcccaggctgaagtgcaatcgtgtgatctcagctcactgcaaactcc

SEQ ID NO: 324050 - DNA, 607 bp, Homo sapiens
gatataacatagatttgttgtttgattcatgatacttttatttttgacaacttgtaagactgcgaagggcactagatgtttggaagaagacatgagttaattagcaatgagatcctgggggaaaacattttaaaacttcttttagcttgttccagtgttctgcttcctatgtgttaaatgcttatacaaaaaaagaaaagtttctgtttttaatttcccaatgaagctcaatttcgagaaaacaaatccaaagaattactacttttataaagtcagttsagcatactggttaggagacagactatcaggctttttacaacttattagttaagtggacagattttgggtttaaaatgcaggctctactgggtaattttgggcaagttatcaaatctttctagagcttttacctacaaaatggtgctaatcatagtatcttcctcctagggttattttagagtattaaataagttaagaaatggaaagtgcttgtcaggtacatagtaagctctcactaagtgttcactatcatttttactatttcttgaagaagcaactaaaaagctagatcattagtgcttaaacttccaatatactccataataaa

SEQ ID NO: 324051 - DNA, 539 bp, Homo sapiens
ccttcatcatggtctctgggtctctctgagacaaaggcctgcttctggcccagcagccggcagctgaggaattttcagtgtgaatcaagcctaaaattggtgcacgttgaagacaagcaggctaaggagaacaggcccctcaagctgccatcctgagactctgtccactctctcagactctcatctggatttcaggtagagacaaaaagaaaaaaggcccacagcccacactgcccattgtcacttagccacgccacagtagcgagagctgggyctgggagaacagagtagcggcagcctctgttgaatcccttcaggtgcaggcactgtgctaagggcttcatggacactgccacactgaatcctcccaataacccctgcctcctgacatcagctgtagtcaaagctatgcaagtgttagtgctagctccactttgaagatgaagaaactggttaataagaaagttaatgagctttcccaaggttatgtggctatcaaacatgggtgttctcaagagctctccactttatggacagcc

SEQ ID NO: 324052 - DNA, 598 bp, Homo sapiens
tattgcctgccccaatcccctgtctctcccagaggagctgcaggaaactctcccctgccttctcagcacctttcaatcttgggaagcgctctgtaacaggcaggggctgcccagaggctgcaagtctgtccagaccgatttgtgggagaacagctaggcctgcttctgacaccaccccacagggaagctgctggggaacagggctcttcctgaatggcaagttccaggactctaggaatatatccaccatcatcaggccctgttgcccctcactatgacagaaccatgggcaaggggttttctgctctgggtggtgtgccactacccataactgtcaaatgcccaacactccctttcaggttttccaaacatttcaygtgttactgaacagtaacaacagttcctcttgacaaaacaccaactttgtgctggacatttttatatattttctcatgaagtcctcatgataggaatgaataacccagttatcctcattttacaaataaggagactgaggcttagggaggttaactgactacttggccaccatctcagagccagtaagcagcagagctgggagctaaaacagaaccccact

SEQ ID NO: 324053 - DNA, 598 bp, Homo sapiens
tattgcctgccccaatcccctgtctctcccagaggagctgcaggaaactctcccctgccttctcagcacctttcaatcttgggaagcgctctgtaacaggcaggggctgcccagaggctgcaagtctgtccagaccgatttgtgggagaacagctaggcctgcttctgacaccaccccacagggaagctgctggggaacagggctcttcctgaatggcaagttccaggactctaggaatatatccaccatcatcaggccctgttgcccctcactatgacagaaccatgggcaaggggttttctgctctgggtggtgtgccactacccataactgtcaaatgcccaacactccctttcaggttttccaaacatttcacgtgttactgaacagtaacaacagttcctcttgacaaaacaccaactttgtgctggacatttttatatattttctcatgaagtcctcmtgataggaatgaataacccagttatcctcattttacaaataaggagactgaggcttagggaggttaactgactacttggccaccatctcagagccagtaagcagcagagctgggagctaaaacagaaccccact

SEQ ID NO: 324054 - DNA, 548 bp, Homo sapiens
gagtgcagccatagggatagcctatccagaaaaaaagacaaacacacacacacacacacacacacacacacacacacacacacagagagagagagagagagagagagagagagasagagagacagagagaaagagactgacctccagtctcagttgatccatcagtaactgagaaaagacaacagatcctgagaacatggcaacctgaaagagattatcatctctaacctatctgttcaatcctaaattagagaactgctgaggcctttgggcagatgggggtacatgcgggaaacaaggctgaaaaactggtgtggggatctcccttattagagaccagcttcagagagctttggagcaaggatcaaaagccatggatgccggaaagaacttggccaaggaagaccagtggatccctagtgtgtgtgtgtatgtgggtggaatttggcacgtaatggagcgcaggtagaaactggctttgcctgattgacccaggtcagaccaagaagtggctgaaccagtgggctgcaaccccctgccctgtagcc

SEQ ID NO: 324055 - DNA, 548 bp, Homo sapiens
gagtgcagccatagggatagcctatccagaaaaaaagacaaacacacacacacacacacacacacacacacacacacacacacagagagagagagagagagagagagagagagagagagagacagagagaaagagactgacctccagtctcagttgatccatcagtaactgagaaaagacaacagatcctgagaacatggcaacctgaaagagattatcatctctaacctatctgttcaatcctaaattagagaactgctgaggcctttgggcagatgggggtacatgygggaaacaaggctgaaaaactggtgtggggatctcccttattagagaccagcttcagagagctttggagcaaggatcaaaagccatggatgccggaaagaacttggccaaggaagaccagtggatccctagtgtgtgtgtgtatgtgggtggaatttggcacgtaatggagcgcaggtagaaactggctttgcctgattgacccaggtcagaccaagaagtggctgaaccagtgggctgcaaccccctgccctgtagcc

SEQ ID NO: 324056 - DNA, 548 bp, Homo sapiens
gagtgcagccatagggatagcctatccagaaaaaaagacaaacacacacacacacacacacacacacacacacacacacacacagagagagagagagagagagagagagagagagagagagacagagagaaagagactgacctccagtctcagttgatccatcagtaactgagaaaagacaacagatcctgagaacatggcaacctgaaagagattatcatctctaacctatctgttcaatcctaaattagagaactgctgaggcctttgggcagatgggggtacatgcgggaaacaaggctgaaaaactggtgtggggatctcccttattagagaccagcttcagagagctttggagcaaggatcaaaagccatrgatgccggaaagaacttggccaaggaagaccagtggatccctagtgtgtgtgtgtatgtgggtggaatttggcacgtaatggagcgcaggtagaaactggctttgcctgattgacccaggtcagaccaagaagtggctgaaccagtgggctgcaaccccctgccctgtagcc

SEQ ID NO: 324057 - DNA, 350 bp, Homo sapiens
ggtggctgaacattaactagccactggggcaagcaaatagccagtgtagctcccgatggccacacactgcccacccccaaagtgaaacagattctctggctcaagcagatgaccagggggacagaggtagactgttttcctcaatttttaargctagaatgttttctcttggaggatctttgagttggaaagggccccctgcatgcccaatgtggtcactggaataggagttgggggggaaccagaggggaaggggctggtcccattctgaaccacactccctcaaaaactcctgtaccctcggagaagactccctggatttgagaagcaaaccacccagggacagggga

SEQ ID NO: 324058 - DNA, 350 bp, Homo sapiens
ggtggctgaacattaactagccactggggcaagcaaatagccagtgtagctcccgatggccacacactgcccacccccaaagtgaaacagattctctggctcaagcagatgaccagggggacagaggtagactgttttcctcaatttttaaggctasaatgttttctcttggaggatctttgagttggaaagggccccctgcatgcccaatgtggtcactggaataggagttgggggggaaccagaggggaaggggctggtcccattctgaaccacactccctcaaaaactcctgtaccctcggagaagactccctggatttgagaagcaaaccacccagggacagggga

SEQ ID NO: 324059 - DNA, 586 bp, Homo sapiens
aggtactcttctatggtgtctagggacaaaacagacycggacctggctctcagggaacatatattctagaaaaggaaaagaaaaaatgaacacacaaatacaggaaaggtggtaataaatgaagaattaatgtcagagcgtggagacggcaagtgatgaggactgctatttaagacagggtgtcatggaaggcctcttggaagaggtgacatatgggcagagacctgaatggagttcttttcttgggtaagggtgagtctgctctgagcctaccccacggtggatttcagagggctgggaggtgagttgccagtcaaggtctgggcctggccatggagtaggctgggctgagtctgagcatggaccaacagagtctttcacataaagcataagccacactgcccaggtaatggtgtcatcctgttttgggacttgtacatcctcattctcctcatctcttcctgtctttgggtcctggctatatgacatacccacagggtggggattaaccagataagaaatgctgaacaaagcctcagctgtctcctgacagggacagacacccagggcaccaactccacagacc

SEQ ID NO: 324060 - DNA, 590 bp, Homo sapiens
aaggcttgaacttgacctcttctgagagtcccttcatctctgaccttctctaacagcactcagacaagtcatttactctttctggttcccctcattcattcaacatccatttactgaacatcttttgtgggccagccctgtgggggatgaaagagatgaatacagtgcagtttgtcctttctcgcaaggagtttaaatcttgttcttcaggtgagttactcaaagtcttaaatctcagtgtcctcaaccgtaaaacaggtttgataacaaccctcacagctaacaccaactaagtatttaccaacattccaggtgctatgaggggttccacatcccatcctcataacccaaaggtgggtaccatcatctttcccacttaaaccaagaagtcaagcaaatttccctaggtcactgtgatgarcagaataatgccccctctcccaacaaagaggtccacatcctaatccctggaactttacagggccaaagggactttgcagatgccattaaggttatgagatgtggagattatcctggattatccgggtaggtccaatctaatcacatgagtccttaaaagcagagaacct

SEQ ID NO: 324061 - DNA, 590 bp, Homo sapiens
aaggcttgaacttgacctcttctgagagtcccttcatctctgaccttctctaacagcactcagacaagtcatttactctttctggttcccctcattcattcaacatccatttactgaacatcttttgtgggccagccctgtgggggatgaaagagatgaatacagtgcagtttgtcctttctcgcaaggagtttaaatcttgttcttcaggtgagttactcaaagtcttaaatctcagtgtcctcaaccgtaaaacaggtttgataacaaccctcacagctaacaccaactaagtatttaccaacattccaggtgctatgaggggttccacatcccatcctcataacccaaaggtgggtaccatcatctttcccacttaaaccaagaagtcaagcaaatttccctaggtcactgtgatgagmagaataatgccccctctcccaacaaagaggtccacatcctaatccctggaactttacagggccaaagggactttgcagatgccattaaggttatgagatgtggagattatcctggattatccgggtaggtccaatctaatcacatgagtccttaaaagcagagaacct

SEQ ID NO: 324062 - DNA, 590 bp, Homo sapiens
aaggcttgaacttgacctcttctgagagtcccttcatctctgaccttctctaacagcactcagacaagtcatttactctttctggttcccctcattcattcaacatccatttactgaacatcttttgtgggccagccctgtgggggatgaaagagatgaatacagtgcagtttgtcctttctcgcaaggagtttaaatcttgttcttcaggtgagttactcaaagtcttaaatctcagtgtcctcaaccgtaaaacaggtttgataacaaccctcacagctaacaccaactaagtatttaccaacattccaggtgctatgaggggttccacatcccatcctcataacccaaaggtgggtaccatcatctttcccacttaaaccaagaagtcaagcaaatttccctaggtcactgtgatgagcagaataatgccccctctcccaacaaagaggtccacatcctaatccctggaactttacagggccaaagggactttgcagatgccattaaggttatgagatgtggagattatcctgsattatccgggtaggtccaatctaatcacatgagtccttaaaagcagagaacct

SEQ ID NO: 324063 - DNA, 563 bp, Homo sapiens
tggttttaatagaataaatgttattggtctttggtgctccagtaaataagcacagctgctttttaattcttctcacttcacagagaaaagaaatgctaaggcaggagctccctcaacttcctgtcctcatcattatgccctagaatttctctacagacttccyatccttactgtcctcctgtctgtcttagggaaggagatgcacgttcatgtcaagctcaagctacccatcccctaaggggttgtgttccttctaccacttcctccttcctataccttcaacttttccattcatcagggatctggataacttctcaatggatccagctactcccatgtagaaatgaacaataaaagcaaagcccttccaggagggctctctccctccctacctctcactcctttttttctgtagcccacatttcttttgggctgggaggggggttcttcatggatttcctcaatcccacacatttcttaactccactgcaatgtggcttttctcccaccagtctattgaaactgctcttgccaaggtcaccaacaacttgccagactccatg

SEQ ID NO: 324064 - DNA, 563 bp, Homo sapiens
tggttttaatagaataaatgttattggtctttggtgctccagtaaataagcacagctgctttttaattcttctcacttcacagagaaaagaaatgctaaggcaggagctccctcaacttcctgtcctcatcattatgccctagaatttctctacagacttcccatccttactgtcctcctgtctgtcttagggaaggagatgcacgttcatgtcaagctcaagctacccatcccctaaggggttgtgttccttctaccacttcctccttcctataycttcaacttttccattcatcagggatctggataacttctcaatggatccagctactcccatgtagaaatgaacaataaaagcaaagcccttccaggagggctctctccctccctacctctcactcctttttttctgtagcccacatttcttttgggctgggaggggggttcttcatggatttcctcaatcccacacatttcttaactccactgcaatgtggcttttctcccaccagtctattgaaactgctcttgccaaggtcaccaacaacttgccagactccatg

SEQ ID NO: 324065 - DNA, 629 bp, Homo sapiens
ctgccgcaaaccccttcaactcccaaccctctgattaggccggaggagagagactgactgcccagcccatggcacgtggctctagaagtgagtgggaggtactgaaagtctgcaggcatccttggggatgggagagacacaaagaaaatgaggtcagcatctggaagttttgtcgccaacgaaaggtctgtacaaaagaagtgtgaggccaaagctcttccagaattgagctgtccagctaaagtgctatttacatgtcagagyctgtccactgcagaagggcagtgagaaagttctggaagctgtgcccctcccattgcctgtcctgggaaggaagctacaatggtgcagaggctggaaggccaagtccccatgctgacctgacccagcatccaagggtcagtatcgccaacaacccagcccgtggggtctgacttcgccctcactgggcatgaaggctgtccgggcccccctggcagcagtgacctggaaagccagccctggggcctgggctttgggtgccccaggcaggcagggatgactcagggcagcagcaggtgggtgagcaggggtggcgcctccacctggggctaaaaacagtgcaaggcctatgagtcagggacctgcag

SEQ ID NO: 324066 - DNA, 559 bp, Homo sapiens
cacccagcacagcaggcactgctgcacattcctcagctatgagggagcagagcggcacgcacaggagcagtgggtccgggtctggcccctgggtggtgggactggaaacaggtcacttcacctccctcttctcctagcagaagggccttggcttctggtcctgtgaggcctgagaacaaccctgattggctgggaatgtacagtgcttgcaggcaggcggcagtgatctggtcatgccactgagtccaggcttccaagcccgcagacctcctgctcccttctctgtccttgtccccacccttggttccttggtcttggtttcaaggtggaatgagcccactggtgggctccccaaggagtgtgtggcatcctatgggaagggaaggggcayccacacgttccttggctgggtgggagagctggcaacatgaatctgtccctacctcctcctatcatctctccccatctctaaaagccaacttggggcctcatcctttttgagagaagatcacctcaaatatcccggacacagttgcagggagcccaggggctctgttct

SEQ ID NO: 324067 - DNA, 547 bp, Homo sapiens
ttaactgttttagttacttaacagctgaatatcatttatgacttaatgaagggtttctataaactctctaactttcccaaattaataactgagaacagacacaccaaagataaggtgagtatttgagtcactttttgttcaaatatacactctacaccagcctgcccttgccagtctaggaagtcatagtattggttcctgttggacaaggattggccacatttttttctttaaaaggcagataataaatatttaggcatttcaggccacacgatctttgttgcttctcaactctgctgtcatacagcagccatggatagtatttaagtaaataagcaagactgtgttccaataaaactttatttacaaaaataaatagagtagtgaacttggccttcaggctgtagtttgccaaccccctgctctaggagctgtgccatctgtccctaattggctttgcacactggtgtggtgttccactagctaccgttcatctgtctgaggtggtgkttttgatttttgaaaagctcagatctctactttgatg

SEQ ID NO: 324068 - DNA, 619 bp, Homo sapiens
atgtaaattcttaatgctttgaagaagcacaaatggactgtatttacctccattgccctgacttcaagcattttcaaccatcaagaaaagtaaatcatttaaatttagaactgacaagaaacagactcagctatctcctaaatacatgcattaagaatagtctgccaagggttttgtgtaaaggcaaaagataataaacttaaagcgtatatactagtcaatgaaagtcctacatatacaacagtgtgatccaatttccagaaacaaatgccttgtgttaaatataaaattaaggctaagtaaattagtttattttttgagtgaagaagttcaattctcatctatcttaaaataaaatacatctatctgagattacgtgccacaaagataccaactttatacttttccccrattttctggtttaggacaataatggcaaacatatctacattcacttcacatacaatcctggagaatctggcatttattacaccactcagttatgtacactttgaggctcatgaaagcctgaagaatattcaagagccagacaaaaaacaactagtaaaaaatgtttatacttctcttgacaactcagtaagaaaatctgtacatgaat

SEQ ID NO: 324069 - DNA, 544 bp, Homo sapiens
ggttctgttggtgagggtgtgaggaatcaggcaatttcatatgttactagtggtaattcaaactggtccaccttttctggagagaaatttggcaacatctaagaaaacaacatgcatacttactttttgatctaccaatcacacatgtaggaattcacctgaaaagataaaccttcaacaatacaaaaatacataggttattcattgcagtgttgtttacataatgaaatactggaaacaactcaaatacccatacattggagggttgttgaaagttgacatrtccctaaatggcatattatgtacttgtacacacaaaaaaggagaagttccttatgagctgatatggagtgatttccagaatacattgctatgtaaaaaagcaaaatgcaaaagaattgtgtttatagcgtactacccttcatttaagaaagaatataagaaaatgtgcatactcatttgtacaaaagaaatacgggacacataaaccagaaactaatgagcttggctacataaaagggttggatggaaatgtaatgtaaaa

SEQ ID NO: 324070 - DNA, 564 bp, Homo sapiens
tgttgataaactctatgactcaatttttttaaataaatagagtaaaactgattttaaaagtgtatgtggaaaggcaaagtaagtaaattatctaaaataaaatttttcaaaagaataaagttggaagattcacgtaactcaatttttttttttttttttttttttgatgagatggagtttcactctttttgcccaggctagagtgcaatggcacaatctcagcttactgcaacctctgcctcccaggtagaagcaattctcctgtctcagcctcccaagtagctcggattacaggaatgcgccaccacacctggctaattttttagtatttagtagasacagagcttcaccatgttattcagactggttgtgaactcctgacctcaggtgatccacccgcctcggcctgttggaattacaggcatgtgccacgacgcccagcccacataactcaacttaaagggtaaggatgtagctgcagtaattaagacagtgtggtgttggtggagggacagatacatagatccatgaggcagcatagaaaatacaaaaatagacccactc

SEQ ID NO: 324071 - DNA, 564 bp, Homo sapiens
aaattggcagctaattagaaaaagtatgtttattttaaatataaattactaaggstagtttctctgcattattccctacacgataatataaatttataatgactccatttgtttctacaaatgtttatctaattaatgaaatctctttaattattccaaatttaaaaggttgatttaaaagaatttcctaaactcagttgagcactaaaacaaattctcaatacatttctgttaacttaatgtagcaaacatttccttccctctccttcagaaatgatagatctcatatatgactgaaaaccactggttaaaaaaacaaattcagtatctattaaacttaggtaaaatatacaaataattagtgccagactttaataaataaaccacctgccttgatctgaattggtgcaggaactgagcagaataagtagcagatactcttgtttgcaaagcttaggcttcaagttatttctattttaatatttttaaatctgacaatataaagtatccttaatacttactatgcatttttcaatttcaaatatactctagtaaagtagaaaa

SEQ ID NO: 324072 - DNA, 627 bp, Homo sapiens
tgacaatataaagtatccttaatacttactatgcatttttcaatttcaaatatactctagtaaagtagaaaataagtcataattattctatattcaaagatatattttgattgattttatttcttaaaatcaatatttcacaaaacttttttcaataagacctgtcacgatggcctaaaacttctgatctcacctttttcaagattattcttttgtataattaactctgtaatactttaaaatttttcaagcattaaaaactaaacacattttccaatatttatttttcatgattcattaatatatttaatgactttagctttgaagtattcttctaatttggaaaccaagtacttttcaagcttttgcttctgaggtgttctgggaataatayagtagtcacttaaatttaaatataattcctcaataaatgctctgacatttactatgtaacattttggaaagttttacttactgagacatctttcaggtttttctcaaagaagaaataacaagactctttagaaaaattaaacgtgtatacatcagctggtcctgctcctgacaacaatgcttttctcagttcaccaacatatttccctttttccattgccatgtcatcagctt

SEQ ID NO: 324073 - DNA, 627 bp, Homo sapiens
tgacaatataaagtatccttaatacttactatgcatttttcaatttcaaatatactctagtaaagtagaaaataagtcataattattctatattcaaagatatattttgattgattttatttcttaaaatcaatatttcacaaaacttttttcaataagacctgtcacgatggcctaaaacttctgatctcacctttttcaagattattcttttgtataattaactctgtaatactttaaaatttttcaagcattaaaaactaaacacattttccaatatttatttttcatgattcattaatatatttaatgactttagctttgaagtattcttctaatttggaaaccaagtacttttcaagcttttgcttctgaggtgttctgggaataatatagtagtyacttaaatttaaatataattcctcaataaatgctctgacatttactatgtaacattttggaaagttttacttactgagacatctttcaggtttttctcaaagaagaaataacaagactctttagaaaaattaaacgtgtatacatcagctggtcctgctcctgacaacaatgcttttctcagttcaccaacatatttccctttttccattgccatgtcatcagctt

SEQ ID NO: 324074 - DNA, 557 bp, Homo sapiens
tttgagggtcattagcatttttaaaatattattaccaaagagttaaaaaaatctatttcctaaaatcacagccaagatcctaaatgtgggtgtgaaccttgcattacaaatttttagactctggtcctgttttgttacaaatgtaatayatgttcactggggaaaataaataaataaataacccaccactaccccattgccccaaggcaacacacatacccatttacctaaccaatctccttcctctgccccagacttcttccctggggtcctgagaaaagatgtatttagaaagtactatttatattttctataaagaggtcattttaaacctctgaacaaatccaagttactaagattcaaatggtaaccggaattttctaggacacgttgtttttctattactattaaatatagaaagtggcattaaatattacaaacctgtgtataaatttgacagcaatagcaagtaaaattaatatcagttttacccaatatctaatggaaaagtatccctgaggactgaagaatagcacacttaaattttacttataaaa

SEQ ID NO: 324075 - DNA, 590 bp, Homo sapiens
cttaacagaactgaagagaagagataagatagtacctgaaacagcattaactaagcagcagtctttttcaacaagaactcagtaattatgatttcttaagcctcaaaatttttgacacctctcttatttcaattccaaaagagtgagggtgttcctatgaaacatcaccaattaagcttatatacagtcttttctacttaaaaaaaaaaagtgtttttcagaactgaaatgtaactaaaagcacttgtgtgaaaaaggaataagacttataaacaatgtacttttttccccccactcacaaacccatcatttacttaaaaccgcacccrtttatctgcctatttcttaatggcaaacaagatgacaagtgataggactgagcaacttagtctgaggaaaaaaaaaaaaacaaaacctataacatatcctcaaattcagcaatacaaaactatttaggaactatataaaattaccaacatttcacaatttttaacctataaaaatgacaatttcatacagttcaaataatagtaacagttataaatagcacataagcactttcattcctaattggatgagtaattacatat

SEQ ID NO: 324076 - DNA, 620 bp, Homo sapiens
ccaataaaattctcattcactgctcaggtaaaattagaagtaagttaatagcattctctcacacaagaccagattgaactctttgcttacttcaacattttagtcacttctgtaggattagcaragctatggaaatgaacacaaattcaggatacaatgtcctccaggtaatatttgtttttgattacttaatctcaagcctaattatcatttgcaacgacattactaatgtggaagccttttcagaatctatagagctaatcgatttccttttttgttagtcttaagggctaggtgaagataaaactgctttagtttataggctgcgacaataatgataatattcagaaggcagtttgaactcaggatgccaatcataaagagtagttgggaagtctagctcattatctaggattaaacaaacagtattttaaacgcaaaattagtttacctaattttgtgctacgtgtcagagatactgttaacaaactaatcataattaaatcaatcttaagagcaaatttcggtactgctgaaagaaaatctttgcaacatctttaaacactctgggatttcccaatggtacacaagtttaatgtaacatgaagttactggtagta

SEQ ID NO: 324077 - DNA, 620 bp, Homo sapiens
ccaataaaattctcattcactgctcaggtaaaattagaagtaagttaatagcattctctcacacaagaccagattgaactctttgcttacttcaacattttagtcacttctgtaggattagcaaagctatggaaatgaacacaaattcaggatacaatgtcctccaggtaatatttgtttttgattacttaatctcaagcctaattatcatttgcaacgacattactaatgtggaagccttttcagaatctatagagctaatcgatttccttttttgttagtcttaagggctaggtgaagataaaactgctttagtttataggctgcgacaataatgataatattcagaaggcagtttgaactcaggatgccaatcataaagagtagttgggaagtctagctcattatctaggattaaacaaacagtattttaaacgcaaaattagtttacctaattttgtgctacgtgtyagagatactgttaacaaactaatcataattaaatcaatcttaagagcaaatttcggtactgctgaaagaaaatctttgcaacatctttaaacactctgggatttcccaatggtacacaagtttaatgtaacatgaagttactggtagta

SEQ ID NO: 324078 - DNA, 593 bp, Homo sapiens
aagccatgtgggaagggaataaaaacaaggggggagaaaaaaaggacaaacactggaacatgaaaaacctctacctgaggttagggaggctagctgaggataagaggaaaaaagcagaacaattgtctttcaatatatgtgaataacagtgaatgaaaaaaggtaggtaatgtaaaaggtaatgtaaatcaaccctatcattaacactagcaacaaagtaaaaagagaaaatggggagaaagtggtctggtgatayaaatgcaataccaacttaatactaaaaccttttatagcagtcctctccttatccaagggtgtatatcccaaggccccgtgaggaggctgaatccaactgccttcaatctgagcatgcttctgttcacattttctaaccacaaatttaattccttttttatcttaactaagcttttataatgcactatggctataagtttggcagtttgaggtgtgacagtaaaactagcataaatttctttttgcttattcacaattttacagatagatttgttcttaccatagttcttaacaacatcaacataggatttcttttcttccttattaagtggagaact

SEQ ID NO: 324079 - DNA, 593 bp, Homo sapiens
aagccatgtgggaagggaataaaaacaaggggggagaaaaaaaggacaaacactggaacatgaaaaacctctacctgaggttagggaggctagctgaggataagaggaaaaaagcagaacaattgtctttcaatatatgtgaataacagtgaatgaaaaaaggtaggtaatgtaaaaggtaatgtaaatcaaccctatcattaacactagcaacaaagtaaaaagagaaaatggggagaaagtggtctggtgatacaaatgcaataccaacttaatactaaaaccttttatagcagtcctctccttatccaagggtgtatatcccaaggccccgtgaggaggctgaatccaactgccttcaatctgagcatgcttctgttcacattttctaaccacaaatttaattccttttttatcttaactaagcttttataatgcactatggctataagtttggcagtttgaggtgtgacagtaaaactagcataaatttctttttgcttattcacaattttacagatagatttgttcttaccatagwtcttaacaacatcaacataggatttcttttcttccttattaagtggagaact

SEQ ID NO: 324080 - DNA, 603 bp, Homo sapiens
tgtgtgacaatagacctgtgctgattgtgatgcatttctgaagtgtgaatatagtttttacttccaattgagctggcaatttttcttcccagaagagcctgttgacttagaggtagtggctgagtattcaatgatttaatcatgtacaaatttgccttattctttttttaattaaagcataaaatagttattttaaactatgtttataaattactgtatgggtatttcctgcttaagaaaatctgcaaaacaaacacatatggaaatgattttctggttgaaaaataattgtttgctttatattaaacaaatacatttattttatttgtattaaaaaagaaattcctgcaatggcaagattctttagtgcaactaaaatcaaatcagaygaatttttgttttggcgtatacagttatatccaagaacatcaattctattactatattattgtcaaatattatagatttaccttcaactcaaagtaactgctttccaggttgtcaacagatgtttcagccttcaattttctataattccaacttttataaagatgtatggttgtgaaaagataatttttagagacctgtgctcacatgtctcct

SEQ ID NO: 324081 - DNA, 624 bp, Homo sapiens
tttgtccatgactcaggacctgtaatgatttcttgctctgggtatctctaagatctatcacaagtatctctagatggagctatttaaccttttctcttataaactaaagtcataaggaatgtaaccaaaggaacatgctcatgctatttgtttctaggattccaggccttaacgtttgaagattgcttaatgctgggggttcctgataatgtgcactgacttctttcctcttttatttttttccttatcaaaaaaggccagttatgctagtaaacaccatgtatgagcaaaattattcttttttttggtctgagtcaactgagaccatgaacaatagcatttttatttaaaccattgttttttttcctaaaaatccagagtgttcctctatscaaaataacattgttttgtgaaatggtagctttaaagaaatctatactattatattagcaaaaacagaaacaaaaaatatgcataaggctgttaaaaaataaattatggtttaattttaattttaacgatgagcaagttgggcttcagtcatagaccaatatttatttttaataataaggatatcatctgatatctatctatagctattggtctatcagtttatgtatctat

SEQ ID NO: 324082 - DNA, 598 bp, Homo sapiens
tgttggccaggctggtcttgaactcctgacttctggtgatcctcccacctcggcctcccaaagtgctgggattacaggcatgagccactgcacccagcctacattttgctttttaaaagacattatttagyctttcacaaaagtccaaagtccctggaagttggatttgatgatcaacatattttgagaacattgaactcaaaccctagaattcaaaagccttaacatttcagcttccccatctgctggacactcctagctctttgtgcgtctatgtcttgaaatacatcccacttcaagaaaaaagaggcaattttaactctaacatttcttttaaaatagcccaaacatggtgaaatggaaatctagagctccctgtggacatttgttgttgttgcctattgcctcccaagcattcacactctttcctgtttgaggatattccctaattgtacgatggttggcagggtctctttgagtgaagacataagatctattctttattggttggatattcctgctcaggacttataaagaatacaaaactaaaggagtgatttagagttcacggacagtagcatgcagtgcagtgcaataa

SEQ ID NO: 324083 - DNA, 598 bp, Homo sapiens
tgttggccaggctggtcttgaactcctgacttctggtgatcctcccacctcggcctcccaaagtgctgggattacaggcatgagccactgcacccagcctacattttgctttttaaaagacattatttagtctttcacaaaagtccaaagtccctggaagttggatttgatgatcaacatattttgagaacattgaactcaaaccctagaattcaaaagccttaacatttcagcttccccatctgctggacactcctagctctttgtgcgtctatgtcttgaaatacatcccacttcaagaaaaaagaggcaattttaactctaacatttcttttaaaatagcccaaacatggtgaaatggaaatctagagctccctgtggacatttgttgttgttgcctattgcctcccaagcattcacactctttcctgtttgaggatattccctaattgtacgatggttggcagggtctctttgagtgaagacrtaagatctattctttattggttggatattcctgctcaggacttataaagaatacaaaactaaaggagtgatttagagttcacggacagtagcatgcagtgcagtgcaataa

SEQ ID NO: 324084 - DNA, 540 bp, Homo sapiens
aatttgcataagtaactaagagccaaatattattcaccaagacaatggggaaaaggtctccagagcatgtcagcgaccttcacagccattcctcccatcacaggcctggaggcccaggagaaaaaaatggttttgtgggccaggcccagggctgtgctgctttatggaacctcagaacttggtgtaatgcatcccagccacatcaactccagccttggctaaaaggggctaaggcacagctcggaccattgcttcagagggtgcaagacccaagccttggtggcttccatgtgatattaggcctgcaggtgcacagaattcaagaattgaggtttgggaacctccgtctagatttcagaggatgtatggaaatacctggatgtccaggcagcagtttgctatgaaggtggarccctcagagaaaacctctgttagggcagtgtggaagggaaatgtggggcttgaccccccacacagagtgcccactggggtactgcctagtggagctgtaagaagagggccactgtcctccagacccca

SEQ ID NO: 324085 - DNA, 279 bp, Homo sapiens
tgctatggagcctcagacaggactgaggcagaattccaatgatacatactgttagatgagtttccccagtctcagccgtcctggtcagcctccttagttcaaatactttgtgctctaagatgtcttttaatttatataaggcctcagtgagaccatatatttgtatggtatttttttttttaaaaaaaggagatgagtaacttgycagttcagaaacagggaatagcaatgaagtattaaagcaagaccatggcatgacatcctgcaggggaaagggct

SEQ ID NO: 324086 - DNA, 589 bp, Homo sapiens
gaactgtacttgaatcatggtttcatcattgcttaaccatatccttaatttctccagtcctcaaggtcttcatctgtaaaaattggttaacacgatacctgctctctgtatcaacacaaaagtaaataaatttggtaaaggaaaaactttagaggaacataaaataatctgttcaatgttttatttccttttgtttgtttattgctggggtaggggcaactctccctttgcaataagtggttattgttatctcaatacagtgcttatgaatttccctgggacaaggttctctaaggatctattaggaagggatactagttaacacttaaaatgagagcttttcgtaaagaaagtattgatggcatagtgtgatttttctgtcctctcgccccctcttgtgtctctcttttcttattcagtaactctacccccttcctcattgcaggacaccaacatagcatgaggagcttccagccttccctttctctctsccccacagaacctctaggtcctgttctctagaaggaaacttatgtactcattcaaaccaaggaattaatggcacacgtgagcttaattagccactctt

SEQ ID NO: 324087 - DNA, 631 bp, Homo sapiens
ttatgtactcattcaaaccaaggaattaatggcacacgtgagcttaattagccactctttccacatagaaggctcatttgagctaaagygtccttatggtttaaagacgatgataacacactagactaattgaaaaatatgtgtaggggtcagatagagaccaataccactttattgcagctaaagctgaactggagggtttggcctggatctggtaaaatgcttcctccacccgcattcctcaccacattgccaagttcacatcttaagaccccaatgtgggagtgtcagtttgcagagaaggctcactcaatcagctatatatctcatgcctactaagagctggaatagggaggagaggccatacatacacagagatgtttagtacataaccccacctgatagaaaaataggaattaacaggagtcatattcatactgtctgatattgtttggttcggtgtccccacccagatctcatttagaattgtaatcctcatgtgtcaggggaggaactacgtgggaggtgattggattctgggggtggttttccccatgctgttctcatgatagtaagtgagttttcatgagatgtgatgattttataaggcagttttccctgcttttgctca

SEQ ID NO: 324088 - DNA, 533 bp, Homo sapiens
tcaagacttcaagaccaacttgactgacatggtgagactctgtctttactaaaaatacaaaaaaaaaaaaaaaaattagctgggcatggtggcctgcgcctgtaatcccagcaactccagaggctgaggtaggaggatcgcttgaacccaggatgcagagattgcagtgatccgagattgtgccactgcacttcagyctgggagacagagtgagactgtcttaaaaaaaagaaagtcattcacaatttttttttcttcatgtaatgataagggccagtgcaacagcagacaatacatctaactctaatcagaatatttcaagttcattcttagctagaactaatatttacaacatactgtaagtcttttgaaatctgaaacaatattttactttaccttatagaaaagatctgtcatggtgcttagcacacagtacatcgaggattcttaataaatgaatgaattatcccatcatattccatttcctctcttcctaaggtcaccttatgtattagtccattttcacactgctg

SEQ ID NO: 324089 - DNA, 508 bp, Homo sapiens
taaattactcagtcttggatagttcttcatagccatgtgagaacaaatgaatacacactcattcayaattttcaataccagccagtcatttgcagactcatggatttgatggatcatctgtaagattttatgaggtagtagcacaaaaggctgttatactttattttacacactaagaacacttaaaaaacacacaagtaaaattatcactttatataccaaagggtattgtaacactctaacaaatagaggagattaataagttatattaaaagactgttttaaaacaatagaatagatttttctacttataaaaactgtcatctaccttatgcttcttacttgaccctggttcagggaatacttggttgtagattggcagtggcaggatttggaaccactgccttaagcaacaatctccttgcattctttttttgccaccttcacagtttacccacaatgctctttgtttctgctagcttacctgctggagaatggcctgataaat

SEQ ID NO: 324090 - DNA, 508 bp, Homo sapiens
taaattactcagtcttggatagttcttcatagccatgtgagaacaaatgaatacacactcattcataattttcaataccagccagtcatttgcagactcatggatttgatggatcatctgtaagattttatgaggtagtagcacaaaaggctgttatactttattttacacactragaacacttaaaaaacacacaagtaaaattatcactttatataccaaagggtattgtaacactctaacaaatagaggagattaataagttatattaaaagactgttttaaaacaatagaatagatttttctacttataaaaactgtcatctaccttatgcttcttacttgaccctggttcagggaatacttggttgtagattggcagtggcaggatttggaaccactgccttaagcaacaatctccttgcattctttttttgccaccttcacagtttacccacaatgctctttgtttctgctagcttacctgctggagaatggcctgataaat

SEQ ID NO: 324091 - DNA, 508 bp, Homo sapiens
taaattactcagtcttggatagttcttcatagccatgtgagaacaaatgaatacacactcattcataattttcaataccagccagtcatttgcagactcatggatttgatggatcatctgtaagattttatgaggtagtagcacaaaaggctgttatactttattttacacactaagaacacttaaaaaacacacaagtaaaattatcactttatataccaaagggtattgtaacactctaacaaatagaggagattaataagttatattaaaagactgttttaaaacaatagaatagatttttctacttataaaaactgtcatctaccttatgcttcttacttgaccctggttcagggaatacttggttgtakattggcagtggcaggatttggaaccactgccttaagcaacaatctccttgcattctttttttgccaccttcacagtttacccacaatgctctttgtttctgctagcttacctgctggagaatggcctgataaat

SEQ ID NO: 324092 - DNA, 593 bp, Homo sapiens
gcgagacgtgctctcagatggtatcgctgcttctcccagcacctggtcctaaatttaggtaagaaagacagcaactgcgagaggttttaataaatcttgcacagcttcagctcaggcttacttaaacagtagtttccttagtatcaccacaagcaagtcagtgcagtaggagaacacaaatacaatgtagactagtgatgctgtaggtttttcttcacatttgatagtactctaataggggaaaaatttttaccgggcaaatgtttttctattaggttgtgtatcattttggaaaattaaactgaacattctgtttatggatagtggtttaattagartaatgacaaaaactggaacacaattgataataaataggaatttgtctttccatggaaacatacattcattttatgtatggaacaactctcttattgtattagtattaattgtgttaaatcttgaaattattttatcttccttagtttataatatgagaacattcttctaaaattttcttatgttttctttgctgtacctatgagttgaattataacacactatttctttcttaaaataagaggaaaaacaaaggt

SEQ ID NO: 324093 - DNA, 545 bp, Homo sapiens
acaaactggtccttggttttttttttttaaagtaattactgtagaaacttgattttctctgaatcttatgaaatggacagatgcatctcatatccaaaaaatgtttggaatggaagagttcacagatcaaacccaacccatttttcgtcaatataaagtgagtaagaacttgcagagtactttttgtaggtctcacaataaattaatggcagcactaggccttaaactcaagttttaaactttagctatcctttttactcttataagaactaagcgaatcttctatgagaaacagtagagaggaaagctcattgaccggtaccctttaatggaaaggaagggagaatcggcagtggaaaggcattcggtttgcattatttctgctaagaggcaggttcagaccaaagactatgaaactgttgagacagcaacatactcaattgtggagtatccagatttagccagtaaaactacagatgtctagttcaactkaaactcatgataatttgttaagtataaatatatcccagacaatatttgggggc

SEQ ID NO: 324094 - DNA, 532 bp, Homo sapiens
tccttcggttaggactaggaattacctttggatagattttgggtcatattaggcatgggatgagattagagacaagaaagaaggagcttaatcaaaccatattattcaggtaggaatacttaaaaaaattcatttccttttctgaaaaatttccatttaaaaagaggattaataccaagtgttgtggtaaatactaagaagacaactggatattagtgacaatatgatagyatggaaatcagttccatgaaatcaaagaaagaaagtataccagcatacctcattatatcgcacttttgttattgtgcttcactttattgtacattatagatagtgcattttttaataaattgaaggtttgtagcaactctgctttaagcaactctataagcaccatttttccaaaagcttgtgctcacttcatttttttttggttcacattttagtaatttttacaatattttaagttttaaacattattattatatctgttatgtttatctgcgatcagttatctttgatgttactattg

SEQ ID NO: 324095 - DNA, 570 bp, Homo sapiens
tgacaatgtacctagtcatctaagagctctcatggagatatataagattaattgttttttttttaatgcctgctaacacaacatccattctgcagcccgtggatcaaggagtaagtttgattttcaagtactattatttaagaaatgtgcttcataagttacagctgcaaaagatagtggtatctctgatgaatctgtgcaaagtaaattgaaaaccttttctaaaagattcatcattctagatgccattaagtacattcatgattcacaggaggaggycaaaatatcaacattaacagaagtttggaagaagattattccagccttcatggatgactgagggattcaatactttaatggcaaaagtaactgcagatggggtggaaatagcaaaaaaaaaaaaaaaataggattaaaagtggaacctaaagagtttacttaattgctccagtcttatgataaaacttgaactgatgagttgcttctcatggatgagcaaaaaaaaagtggtctcttgagatgcaatctattcgtggtgaagatgctgtaagcattgttgaaatgacaaca

SEQ ID NO: 324096 - DNA, 609 bp, Homo sapiens
actatgtgatttatataaatgacagaattggggttattttatgtttttaattccayagatgattttttattctaaaaggatctctttaagtagtaggaaatcttcctgaggtattgcaaacataatataatttatacatttttaaagttactcggctttaaaaaatcctccacatctgttgcatacaagtaaggtacattcgtaattaccaagaagaattatacaaataaatgatgttaagaaattaaaagatgactttggccaagtgaaaaactgcctagtaggttaagttctgatgctcttctattgcattaaatgattatttcatcttttgtaacaagagtaggccatttctatttcaaagaaaaagatttagttttagataaaatactgaatttctgggtctagactcatattgtcatattttgttgctattgagtcaattttaaatactaattagctaaaggggttattcccttttctttgtgctacttgctatgaatgttgcattttttgtactttgaagagttttttttttttggttattttgtttctaaaaatacctctacaaagcaggttaatccgcttttacttctagtacatgtaaca

SEQ ID NO: 324097 - DNA, 477 bp, Homo sapiens
gactgaaaaactgaggatcaggaatataaggtattttgtctcaggttaagtagagcttagattccaacctagatagatctggttccaaagtctactgtctcttcattgtatcacaaccctccacttccccgccactaccactaggccccatagcagagagagtcaggaaatcaaagaagaaggagaggagaagaaagccacatcaagacaatgatatccaagagcgtctgagtcccagagtagtagagagaaatctggcaagtggagggaagctaacagtccccttaacactgaaggtgagakctgaccttgggaaatgatgctcgtcactctaccataccagaatgatcattagacattgacctttggagccaacaagatttaagtttagatctgagatcgaaaatgtactagccacataccatcactgagcctggttttcttctcaataaattctgataataccagaaggctttg

SEQ ID NO: 324098 - DNA, 579 bp, Homo sapiens
tggcatgggaggaagaagatatggctgtggaacaaaaattggccaagggccttggtattgctggtccaaagacccagaaccaaaggctatcctcctcctttttgttgcaatcttatatcttgctttatttctgataattaaatgaagtaaattatgtaaagcccctgggttcaagagaagagcatttttttctctactgagaaagaagaaataaggatagggcaaaaaagaggatgaagtgtctgaggtgtgggtctgaggcagaatcagaaatgcctatctgctccagggaagtcatatattgtatctgaatggaaaaaaacattgtgttcaaatattattgttrtaaagttatataggctcgtcgaagaaaatgttcagtgtaaagaaaaggaaattagagatagaaaaatcatctacagactcagcacccaaagacattaactgttgctaacatttcagggtgttacttttcagataaagaatgtaactttgccagatgtggtggctcacatctgtaaacccagcactttaggaggctgaggaggcaggattgcttgagcccaggggttcaagacc

SEQ ID NO: 324099 - DNA, 391 bp, Homo sapiens
tctggttagggagattctaatatattcgcttccttccttgtgactccttcctgtattttctaaatcttctacatcaaacactttattttcataaaatgtcataaagattacaaaacacaggaaggaagaatttcttctacttgaaaactgagacactcttctttgtctttctcatagcatctgccccaacatctcttgtgctgttgaatgaatgaacgagctaagagtagagaggggtttatggtgcaggtataggcagggcagcctgggtttatatcttatgtatattttttaaatatwaagtacaaaagttctgcctcagtttttgttatttttagttcatttgtttgtttttataatgatgctcatgttgaagcctttgttttaaatg

SEQ ID NO: 324100 - DNA, 549 bp, Homo sapiens
acattgtactgcatgtctttcggtgaacatacatccacatttatgttggatgtatataccttagatgtgttttataccagctagtttgtcagacacatgcccatttattaatcccatagatgcatggtatcctctctgaatatataccrctttagccagaaatcctgaaggcacaagtacttaatcatgcacccaaatatcaatgaggcagaaatagaggggatggtcagagggatacaatgtcaccaattaatgaggaggtgggtaaggctcagggaaaatttacctccaacctaggtcagaaaatccagctaattattactttattgtgctttgattcatacttaatatcattctgaatccctccccttaagctatccttctatgtttcccctgcataatgccttaaatagtaataaattgcaacattagttaacggcattacatcatgtgaattttaaacaccacaacttgggggaaataaagctttattaggagtcgagttataaatctgcgttagacaaagctgcagatatttttggaaagcgc

SEQ ID NO: 324101 - DNA, 549 bp, Homo sapiens
acattgtactgcatgtctttcggtgaacatacatccacatttatgttggatgtatataccttagatgtgttttataccagctagtttgtcagacacatgcccatttattaatcccatagatgcatggtatcctctctgaatatataccgctttagccagaaatcctgaaggcacaagtacttaatcatgcacccaaatatcaatgaggcagaaatagaggggatggtcagagggatacaatgtcaccaattaatgaggaggtgggtaaggctcagggaaaatttacctccaacctaggtcagaaaatccagctaattattactttattgtgctttgattcatacttaatatcattctgaatccctccccttaagctatccttctatgtttcccctgcataatgccttaaatagtaataaattgcaacattagttaayggcattacatcatgtgaattttaaacaccacaacttgggggaaataaagctttattaggagtcgagttataaatctgcgttagacaaagctgcagatatttttggaaagcgc

SEQ ID NO: 324102 - DNA, 559 bp, Homo sapiens
gcaccacgttttgtttaccgttcatccagtgaaggacatttggtttgtttcccatttttagcaattatgagtagagctgggataaatattcatgtgcaggtttttatgtgaacataagttttcatttctctagggtaaatacccagaagtgagattgctagatcatatgatgtgtgcatttaactttatgaaaaactaccaaattttttttcagagtggttgtaccatttgagattcccaccaacaacatattagagttccagctgctccacattctcgtcatcacttgatagcatcagtatttttttgccactataataagcatgtactggtatctcatcatggttttaatttgcatttccccaattgctgatgatgaaacatcttttcatgtgctaatttgccttctgtatattcttttcagtgaagtatctattcaagatttttgctcatttttcaaagttaggtttttgctttgttaatgttgagctttgagatttctttacatattctgtatatgagtccttkgttgtacatgtgacctccaaatattttctcc

SEQ ID NO: 324103 - DNA, 595 bp, Homo sapiens
aaggactaccatgagtcagagactctgccagcactgggcaaagaaggaagaaggccttgtctgggacatcatggtgcttaaagtctagagaagtgtccagagaagtcaacaagtgggaaggtatggtgggtcagggtgattcaggaggcacagctgggccataggagagagaacccggcctaacttaggcaccagaaagcatctagtaataaaagtgatatctgtgctgacacctatggaacatgcaagtatttagcataggagaccaggacagtgttcccagcaatgggacaggtatgagtgaaaaccaagaggtgaatggcacagaccacggaagggtggagagagaggtttaattgtgactggatcttgagttatggtgtggggctaaaaggcaagactcagagtgggcaggggagaatgcagcaggattgagagaccaggcctagggtagggaaggaaaagaratccatatcccctgaggtcggtccattcctgcacctgacactgagctgggccttgaggatgtagcaggggaggaaacagagcagctccctgattccatggccttccagtctctcagggagcaaagcaa

SEQ ID NO: 324104 - DNA, 645 bp, Homo sapiens
atctctatttctactaagtctattaaatgaactctgtttcatttctactttaagtatgagtgcccagccaaaccacccaaatcccaggggaactgtactgtttctttggaaataagaatctgtcgtatgagttcagccttgttctttagtcgacataccgattatgatttctagttgtctaatttaagattatgaactcctccatgacaagcacagagactactatcaggctctgttcataccagagtcccgcacatgtttaagaaattttactgattcaagagaagtgctaaactgcaaattttctgggactatgaattcctcaaagaacagctatcattgtaatagawggagctcccctcttaataaaaacagcagaaacaacatcagccaggaggtctaccacaatgaggatgacgtggacatcttattgaacaacgtacgtggatcataccattcccatcatttatttgtcattctcacaacagcctcacatcatgttctgaatgcctattttactaatgaacacactgagaggttaataatttgctgaatcaatattcatactcagtgtcctttggtcccaaagccctggatttttccactacccagaaaacttgagaatagatgctagttttgcataaa

SEQ ID NO: 324105 - DNA, 537 bp, Homo sapiens
attatatcaactacacagcttctgcaaagcaaaggcaacaaccaactgagtggacagaaaaccaacagaatgggagaaaatatctgcaaacaatgtatctgataaggggctaatattccatatttataaggaagtgaaacagctcaatagtaagaaatcaactgaattttaaaaagacgcaaagcacctgaatagatattccccagaagatgagatgcaaatgttcaacagtatattaaaatatgctctttatggcttatcatcagggaaattcaaatcaaagccacaatgagctatcacctcacacctgttagaatagctagtatcaaaaagacaaaaaagtaactgttggtgaagatgtggagaaaatgaagcccctgtatgctattggtgaaaatgtacattagtgcagccattatgagaaacagcatggggattcttcacacattacatactactaatycaaattaaatacagaactaccacatgatccagcaattccatattccgctatgggtatacatccaaaagaaacga

SEQ ID NO: 324106 - DNA, 622 bp, Homo sapiens
ctagctgatgttattgcttgtgctacatggaaacatttgtgattcaagcatttatttttttaagccaggatagattcccctgctagaaagctttctcttttttttttgagaatgaaccctccattctgctctctataggaagaaagtggagggttaagtattaagacgttgtggtgtctcaggcaaactctccaaacttctaaaaaccagaaggaaagctggtcatgtggccatgagcagrgggatagtgggacattaaatgggaagcagtacaaattcaattttatttgccaaaaggtagtcactgtgctttcaagcttcttagcggacatattgtgtagcatggtcttatgtatttttttgatacataataatcacacgtatttatggggtgcatgtgatattttgattcatgcatacaatgcatttttaaaacacagctcagttaggaagtagcaattatataagcatgggacttagggatattgaaatgaaacagtgactcacacttatgccaattaatgactgctttaatgactacattcagaacagaggggtcctggtctcatggccattcacctcaggagtccagttccgggcaccacaagtttagttttaaaag

SEQ ID NO: 324107 - DNA, 622 bp, Homo sapiens
ctagctgatgttattgcttgtgctacatggaaacatttgtgattcaagcatttatttttttaagccaggatagattcccctgctagaaagctttctcttttttttttgagaatgaaccctccattctgctctctataggaagaaagtggagggttaagtattaagacgttgtggtgtctcaggcaaactctccaaacttctaaaaaccagaaggaaagctggtcatgtggccatgagcagggggatagtgggacattaaatgggaagcagtacaaattcaattttatttgccaaaaggtagtcactgtgctttcaagcttcttagcggacatattgtgtagcatggtcttatgtatttttttgatacataataatcacacrtatttatggggtgcatgtgatattttgattcatgcatacaatgcatttttaaaacacagctcagttaggaagtagcaattatataagcatgggacttagggatattgaaatgaaacagtgactcacacttatgccaattaatgactgctttaatgactacattcagaacagaggggtcctggtctcatggccattcacctcaggagtccagttccgggcaccacaagtttagttttaaaag

SEQ ID NO: 324108 - DNA, 509 bp, Homo sapiens
tagtgtctctgtaggtcactaggttgagaaagattctgaagctcccttgtaacgcagtgggtgatatggttaggctttgtgttcccacccacatcacatcttgaattgtaatcccttggtattgagggagacacctggtgggaggtgattggattatggggggcagtttctctcatgttgttctcgtgatagtgagggaattctcatgacatctgatggttttatagatggtagtttttcctgtgctcacatatgctctctcmcctgccaccacgtaagatgtgcctgcgtccccttttgtcatgattgtgttttctaagacctccccagctatgtggaattatgagtcaatcaaacctcttttctttataaattacccagttgcaggcagttcctcatagcagtgtaaaaatggaccaatacagtgggagaagatgccaatgaattgtttctcatcacaacatactccaaccctgtgctggtgaatgccttgttatttctgcgaacct

SEQ ID NO: 324109 - DNA, 509 bp, Homo sapiens
tagtgtctctgtaggtcactaggttgagaaagattctgaagctcccttgtaacgcagtgggtgatatggttaggctttgtgttcccacccacatcacatcttgaattgtaatcccttggtattgagggagacacctggtgggaggtgattggattatggggggcagtttctctcatgttgttctcgtgatagtgagggaattctcatgacatctgatggttttatagatggtagtttttcctgtgctcacatatgctctctcacctgccaccaygtaagatgtgcctgcgtccccttttgtcatgattgtgttttctaagacctccccagctatgtggaattatgagtcaatcaaacctcttttctttataaattacccagttgcaggcagttcctcatagcagtgtaaaaatggaccaatacagtgggagaagatgccaatgaattgtttctcatcacaacatactccaaccctgtgctggtgaatgccttgttatttctgcgaacct

SEQ ID NO: 324110 - DNA, 509 bp, Homo sapiens
tagtgtctctgtaggtcactaggttgagaaagattctgaagctcccttgtaacgcagtgggtgatatggttaggctttgtgttcccacccacatcacatcttgaattgtaatcccttggtattgagggagacacctggtgggaggtgattggattatggggggcagtttctctcatgttgttctcgtgatagtgagggaattctcatgacatctgatggttttatagatggtagtttttcctgtgctcacatatgctctctcacctgccaccacgtaagatgtgcctgcgtccccttttgtcatgattgtgttttctaagacctccccagctatgtggaattatgagtcaatcaaacctcttttctttataaattacccagttgcaggcagttcctcatagcrgtgtaaaaatggaccaatacagtgggagaagatgccaatgaattgtttctcatcacaacatactccaaccctgtgctggtgaatgccttgttatttctgcgaacct

SEQ ID NO: 324111 - DNA, 531 bp, Homo sapiens
tgtggactcagaggatttgttttttttgtgtgctcagtcactgactcctggggctttaattggctttttgttgccaggacaccctgaagaaataattttatatgacccctgagaggtctkgcagtcattgctttttcaaacatctatttgaatattcaaacattcacttaaatgtgagttgaaggagattggactttgcctgcgattctgaacatgtaagccacctccagtcttcctgctttgcccatggctgtgccttcttctcatgatgccctcgctttcatcccatttgccaagggaagagccatcccgtcttaatatgctgctcaaatattaacttctctgtgaacattttcctgaatgctcccacactcctgacaagtatagagtggtcgttctacctctaaggtcctaacttggtgtttgtttcagtatctgtcttttgcactgtgttcttattgaaacatgaacgtgtccactcaggacaatgtaattatttgaggagggaatcctgcatggtggttaagaccg

SEQ ID NO: 324112 - DNA, 624 bp, Homo sapiens
tgaacaccatctgatgtgactaagagattacagttcaccatcccaaggagaatggtctttgtccactgtgygtgttcacagctctgtgctgggcaaacaacatttgctgtgcctggcaggtctgccctagcctctctgaagcattttgttcctcactgcagaggttgggctgagttgcagcttctccagggtcccctaggccatccagaacaaaggattccaggaacagaattcctataccatttatctgggctcattaactagctattctttcagttaatgttttttctgtcaccttctgctgtgctagggactgagtacatatgtcagcaggtagacaagacccctcaactcccttaggtttcctgcttgcgtaagttatagttgaatatgcaggtcaacacataaatgaaggtgatagtttgagatagtgttaagtgctatagagaaaatacagcagagtgatgtgttagagaatgtctgcggtggcagcctgtattcagtctctctttccatgattcagcaaatgcaatatttcctaaggagtgctctgttgaacatccactggactagatgcccaactaaggaaaaatgaggggccctattggaaacacagttggaaga

SEQ ID NO: 324113 - DNA, 566 bp, Homo sapiens
cccataaattttaggcaaaacagaaaaaattgcactgaatgagcaaataaaaatcttatttagttaattcagtttaactccccaaatatcctaaaataccttctatgttttaggtgctggaaatagagaagagagcaaaatacaatcctttctgtcatggagccattggcgtrtcctgctggatggccgccacagctttctcactggccttgccatgcaatttctccttcacagagcagccagagccagacttgataaggtcaggcaaatcatagagctgctttgttgggtttccccggtggctcttcatctcatacagggcaaacaacaaaaatatttacagtggtctgtaactgcactgtcccaaactgcagccactagccaagtgtggctttttcaattaaaattatttaaaattaaataaaatgaaaaatttatttccttaattgctctagccacatttcaaatgccccacagtcacctgtggttagtagctaccatcgtgtgtacacccacatagatcattttcatccttgcagaaagttctgttggttacagaatgccct

SEQ ID NO: 324114 - DNA, 500 bp, Homo sapiens
aaataaactatccctgcccatattcacaattgtccagccaggatttgaacctgcatccagtgatgtactgggtaatatttaactcctggctccctgaagattaaaataaagcactggtttgtwgtgtctgcctgtttacatggtgtaaatacctccaccatggctgatttgaagctgtcagtgtgacacaactgaccttagagttgggaagagatgcacacagtctcctctcattggctggtacagactggctctggcacaccactgcatgtgaccttgaagtccaagcccatcccagggtaccatgtggtcactgctggaaagaactggactctaaacagtctggtctttctagggaccaggtggccactacaatttggaatccttgtgtctcactggtacctctatccttacaaaccaattgggtttacgttcaacctgtttggattatagcatttttttcctaagaggatcatgtttattggacttgacagaaaaag

SEQ ID NO: 324115 - DNA, 509 bp, Homo sapiens
gcttataaccatttaaatatcatttatttttatattgctttgcctttttattgatttgtgtgtatgtgtgtgatataaatcctttgttagatgatttcaaacataatatccattttatagtttatcttttcattcttttaatggatatttaaaatataaacagaagtccttaattttaatattagtttataatcttggcctttagggttagtgctttttaaattcagcttaaggaatctgtttttaaccctaagttcatcaagattctcacttgtattaactcctagacattttagtattttatatttagatctacatgtgaaattaatttttgtgtttgttttcakttgaacatttagtttttgtccatgtggacaaaattaattgacttggcatcatttattgaaaagcccatttttttccgcttcactctagggtcatctatgccataaagtgagtgacacgtgcatgtttctgaactccctgataatagtttggatatttgtccc

SEQ ID NO: 324116 - DNA, 509 bp, Homo sapiens
gcttataaccatttaaatatcatttatttttatattgctttgcctttttattgatttgtgtgtatgtgtgtgatataaatcctttgttagatgatttcaaacataatatccattttatagtttatcttttcattcttttaatggatatttaaaatataaacagaagtccttaattttaatattagtttataatcttggcctttagggttagtgctttttaaattcagcttaaggaatctgtttttaaccctaagttcatcaagattctcacttgtattaactcctagacattttagtattttatatttagatctacatgtgaaattaatttttgtgtttgttttcagttgaacatttagtttttgtccatgtggacaaaattaattgacttggcatcatttattgaaaagcccatttttttccgcttcactctagrgtcatctatgccataaagtgagtgacacgtgcatgtttctgaactccctgataatagtttggatatttgtccc

SEQ ID NO: 324117 - DNA, 592 bp, Homo sapiens
gtcctcttttctctgtgcttcagtaaatcctctcctaactttactttttgaaattagatccacataataaatcccgactctatgattttatacaattagaatattgatttcacattgttttgttttgtttttgaatttgcctttttatttttcacaacatagacatttaagtttctcaatgaaggcttaaaagtcatttgatgstttgaggtgaactatgatgggctcttttatattttcctaaatgaagaaaatgttggaatccaccctatgacagattattgcttaagcttaagaatgactgttctggctcttgataattaaactctcctttgctagtaatttcaggtctattaatcacctgtttgaaaactgcttcttataaaatgtttctatagacttctatccttatgcatttcaggttatgaaacaccagaggttagcaatgccccctccaggagttttggggagtgtcttttttgatgttatatgctaggcattcaattgatctgtcaaccctaaagtcagtggggctgtggtttgtgtcataatgatagtttttctatgatgaaacaaaaattgtatttgggaa

SEQ ID NO: 324118 - DNA, 592 bp, Homo sapiens
gtcctcttttctctgtgcttcagtaaatcctctcctaactttactttttgaaattagatccacataataaatcccgactctatgattttatacaattagaatattgatttcacattgttttgttttgtttttgaatttgcctttttatttttcacaacatagacatttaagtttctcaatgaaggcttaaaagtcatttgatgctttgaggtgaactatgatgggctcttttatattttcctaaatgaagaaaatgttggaatccaccctatgacasattattgcttaagcttaagaatgactgttctggctcttgataattaaactctcctttgctagtaatttcaggtctattaatcacctgtttgaaaactgcttcttataaaatgtttctatagacttctatccttatgcatttcaggttatgaaacaccagaggttagcaatgccccctccaggagttttggggagtgtcttttttgatgttatatgctaggcattcaattgatctgtcaaccctaaagtcagtggggctgtggtttgtgtcataatgatagtttttctatgatgaaacaaaaattgtatttgggaa

SEQ ID NO: 324119 - DNA, 592 bp, Homo sapiens
gtcctcttttctctgtgcttcagtaaatcctctcctaactttactttttgaaattagatccacataataaatcccgactctatgattttatacaattagaatattgatttcacattgttttgttttgtttttgaatttgcctttttatttttcacaacatagacatttaagtttctcaatgaaggcttaaaagtcatttgatgctttgaggtgaactatgatgggctcttttatattttcctaaatgaagaaaatgttggaatccaccctatgacagattattgcttaagcttaagaatgactgttctggctcttgataattaaactctcctttgctagtaatttcaggtctattaatcacctgtttgaaaactgcttcttataaaaygtttctatagacttctatccttatgcatttcaggttatgaaacaccagaggttagcaatgccccctccaggagttttggggagtgtcttttttgatgttatatgctaggcattcaattgatctgtcaaccctaaagtcagtggggctgtggtttgtgtcataatgatagtttttctatgatgaaacaaaaattgtatttgggaa

SEQ ID NO: 324120 - DNA, 522 bp, Homo sapiens
gtgaatgatcccagactgggttgataggaaggaagtaaattaataccaaatgtgaagggtagtgggcttgttttatttttatattattattttattatcactattagttgagacagggtctcattctgttgcccaggctggagtgcagtggcgccatctttgatcactgcagcctcagtcaacctcccaagcgaacctccagcctcagcctcccaagtagctgtcactacaggcaggaggcacaacacccggctaattaaaaatacatttcaaaaatataaaaacaaaacccaaaamctttgtagagagggtggtctcttactcttggcctcaagtgattctcccacctcggcctcccaaagtgctgggatcacaggtgtgagcagctgcgccccgcctggggttgctcttgaggagccaaactttgccagattaggctgacagtgagaaaataaattcttccacggtagatactgggtgaaaaagtgcacgtcagcgggcaagggtaagtaacgacaataa

SEQ ID NO: 324121 - DNA, 631 bp, Homo sapiens
gggaatttgagaacaaagacacggtgcggtttctgagactcctggaaccaggggctgcagtgctgaggacctcaggaaagccctgcccaggccacccctcaactcggattctcactccatgatggccttgtttctctctggctctctggcttggactggctgtctttactcttcagtcacaagtcccaggctccctcccacattatcatgtcaccatgtgagcacccacaggtggactgaactctttcagttccagcatcaaaagtcccagggaaggagctgattgggccaagggcctccttgcctaggacagaggctgggggcagtgtggcagctccctctggtggaggggcagttctttggaaagaggttcccrgtggttggtcagatggtgcctgctttggtggctgtgtgaccagaagggtggctggtgtcttggggaagggagctgtgtcccggtgtgagccctgactgctttatttatgcccccgtagtgtggaaggggagtatgtcccagtggaaggggacgaggtcacctataaaatgtgctccatcccacccaagaatgagaagctgcaggccgtggaggtcgtcatcactcacctggcaccaggcaccaagcatgagacct

SEQ ID NO: 324122 - DNA, 631 bp, Homo sapiens
gggaatttgagaacaaagacacggtgcggtttctgagactcctggaaccaggggctgcagtgctgaggacctcaggaaagccctgcccaggccacccctcaactcggattctcactccatgatggccttgtttctctctggctctctggcttggactggctgtctttactcttcagtcacaagtcccaggctccctcccacattatcatgtcaccatgtgagcacccacaggtggactgaactctttcagttccagcatcaaaagtcccagggaaggagctgattgggccaagggcctccttgcctaggacagaggctgggggcagtgtggcagctccctctggtggaggggcagttctttggaaagaggttcccggtggttggtcagatggtgcctgctttggtggctgtgtgaccagaagggtggctggtgtcttggggaagggagctgtgtcycggtgtgagccctgactgctttatttatgcccccgtagtgtggaaggggagtatgtcccagtggaaggggacgaggtcacctataaaatgtgctccatcccacccaagaatgagaagctgcaggccgtggaggtcgtcatcactcacctggcaccaggcaccaagcatgagacct

SEQ ID NO: 324123 - DNA, 619 bp, Homo sapiens
ttcaagcaattctcgtgcttcagcctcccaagtagctgggattacaagcgtgtgccatgacgcccggctaatttttgtatttttagtagagacaggtttcaccatgttggccaggccactcttgaactcctgacctcaagtgatcctcccatctcagcctcccaaagtactgggattacaggtgtgagccaccgtgtccagccctttggcccacttttaaatggagttttttgtttttttttcttgtatatytgtttaagttccttatagatgctggatatcagacctctgtcagatgcatagtttgtaaacattttctcccattctacaggttgtctgttcactctgttgatagtttcttttgctgtgcagaagctctttagtttaattagagtcaactagtcaacttttacttctttgcaattgcttttggcatctgtgtcataaaatctttgcctgttcctatgtccagaatggtactgcctaggttgtcttctagggtttttatagttttgggtgtccctcttctactttaacagcctttgtgactgattatgttgcatcctgccccgataatccagggtaatcttcctattttaaagttatatatgatcagcaa

SEQ ID NO: 324124 - DNA, 460 bp, Homo sapiens
tagccacttcatcagtggtcttacctcagtcttgtggagaacttgctgcagcttctacaccagcacttgttgcttcaacttgcacttttatgttatggagatgatttctttcctaaaacctcatgaaccaacctctgctagcttcaacctttccttctgcagcttcctcagccttcatagaattgaagagagttagggccttgctatggattaggctttggcttaaaggaatattgtggccgatttgtatcaagaccactaaaactttctccttatcagcaataaggctgctgtgttttcttatcatttgtgtgttgtctggagtagcacttttaatttcctttaagaacttttcctttgctttcacaacttcgtagtttggcacaagaggcctagcyttcagcttttcttggctttggacatgctaaacccaaccatttctagcttttcatttaaagtg

SEQ ID NO: 324125 - DNA, 548 bp, Homo sapiens
gagctagcagtgtaattccacaaggcacagaatgggcattcactgcatagcctgactggaagtggagcatcctttgtgagaaaaggaaacctctgagacagtgaatatgttcccattytgaaaagcttgatgcaatcaaaatagaagaaagagcaccgctgaagagaataagagaagagatctttgttttgtttttgcttgtttctttgtggtagtgacagcgtatttcatgtaggaacctgtgacaaagctccacataataaacatcagaaagtcaaggatgatggttttggccaaggagcaaatgacacatgccacagctctcctggcaggtccccttttcgagattgtgtcctcccggataggactctcaagcagctgcaacaggcatcttccagctgggaaaggccacttgacctctttttctctttcgaaagccgggcagctgtgagtccaggcttgtcactcctgggtgcaggctcaggaattgaaggcgggtctgccaagccacacaccctcgttgaaacacctctgctctgtggccaggc

SEQ ID NO: 324126 - DNA, 548 bp, Homo sapiens
gagctagcagtgtaattccacaaggcacagaatgggcattcactgcatagcctgactggaagtggagcatcctttgtgagaaaaggaaacctctgagacagtgaatatgttcccattctgaaaagcttgatgcaatcaaaatagaagaaagagcaccgctgaagagaataagagaagagatctttgttttgtttttgcttgtttctttgtggtagtgacagcgtatttcatgtaggaacctgtgacaaagctccmcataataaacatcagaaagtcaaggatgatggttttggccaaggagcaaatgacacatgccacagctctcctggcaggtccccttttcgagattgtgtcctcccggataggactctcaagcagctgcaacaggcatcttccagctgggaaaggccacttgacctctttttctctttcgaaagccgggcagctgtgagtccaggcttgtcactcctgggtgcaggctcaggaattgaaggcgggtctgccaagccacacaccctcgttgaaacacctctgctctgtggccaggc

SEQ ID NO: 324127 - DNA, 577 bp, Homo sapiens
cagtttgaatccatttagtcctgggctttttttgttgggtaatttttttattactgattcaatcttggtaggttttatgtttctgggaatttatccattttctctgtgttttctaatttgtgagcaaatagttgtccatagtagtctctgatgatatttttgtaattctgtggtatcgcttgtaatatcttctttttcatttctgattttatttgggtcttctttccttgattaatttagctaaccgtgtatcaattttttttatcttttgggagaatcaatttttcatgttgttgagtctttgtatttttttaagtccctactttatttagtcctgctctgatctttattatttctttttgtctatttttgggcttggtttgttcttgcttttctatttctttgaggtatattgtttgattgttactttgtactctttctrctttttttgatgtaggcgtttattgctgtaaacttccccctttgcactgcttttgttgtaccccatcagttttgctttattgtttcttcatttttatttctttcagtttttttaaattttcatattaatttcttt

SEQ ID NO: 324128 - DNA, 577 bp, Homo sapiens
cagtttgaatccatttagtcctgggctttttttgttgggtaatttttttattactgattcaatcttggtaggttttatgtttctgggaatttatccattttctctgtgttttctaatttgtgagcaaatagttgtccatagtagtctctgatgatatttttgtaattctgtggtatcgcttgtaatatcttctttttcatttctgattttatttgggtcttctttccttgattaatttagctaaccgtgtatcaattttttttatcttttgggagaatcaatttttcatgttgttgagtctttgtatttttttaagtccctactttatttagtcctgctctgatctttattatttctttttgtctatttttgggcttggtttgttcttgcttttctatttctttgaggtatattgtttgattgttactttgtactctttctgctttttttgatgtaggcrtttattgctgtaaacttccccctttgcactgcttttgttgtaccccatcagttttgctttattgtttcttcatttttatttctttcagtttttttaaattttcatattaatttcttt

SEQ ID NO: 324129 - DNA, 592 bp, Homo sapiens
aacttggaaagcaatgctccaggtggtttttacatgatctctttgtaatgtttgcttctgcctagtgaatgtcccaggccataacattttaggcactttgcttatagctggttgcaatcctacagtctcatcatacatagggcaataaccaggaacagagcaatcagaaccttccccactcaccccccgacccaccaccccaaatacaaagagagctcacattacggtagtctataaatcttattaatrtgtttattgagattataaaatataataagttatatatatacagaattagacaaaaataatattgacaattaagacttcactgtctaagggccacagacctaccctggggtgttttctaaatgttttaaagtattgcagaattatgaatatctccacacaaaaatggcaggatggagtcccagctttggtcagtgagaattattatgatctcattgttctgaatcccataacataggctaaagcttgtcagagtaaatcccatgtttccaaataagtaaatgacaagggaatttgtaactatataaggaatagctccctaaaaatggcaggtggagagccaatg

SEQ ID NO: 324130 - DNA, 644 bp, Homo sapiens
ttgagaactgttccactagcttagctatgtttttatatatatgtataatttatataaataggaaacctggggctctgagaaattaagtgacttatttaatgtcacagggctagggccagggcagtgrtaagaggaataactaagtcttttagaagaagaagaggtggacacaagagagaagctccccgctggaagctagaactccagaactgagagattccagagtgggaattactggcagcactaatgtgtctttaggaattgaaaaagcaagctagaaggaaaaaaataaaagtcttgaaattctctcaggaatgagaagtagaaggaacaacatggttcaaaactggaaaaatggcagactaggaagtttacctggggagttgttagttacgaatatggattaccctgctccaagagtgtctttgtccttggactagcactcccctccccaagcctttggcaagttcctactcatctttcaagaaatagctcatcttgagtgcatttcacaccattcctccttccaaaaaggaatgagggtggacttgaaaaaaaatactgaagaggaaaattcatttgggtgtttttcaaagactacctaagtctattcatactattgcttttttttgtttgtttttaaa

SEQ ID NO: 324131 - DNA, 577 bp, Homo sapiens
tctgccactttaaaaaggcctgcttactcaaaataggacgatcaaatgtttgtctgttttgctagctgtgaaaaaaaaaattctcacgctctctaatagtgaatagggtgcaattttcagggttgtaaaatggttccaggctgggcacagtggttcacatctgtagtctcagcactttgggaggccaaggaaggaggatcgcctgagcccagaagttcaagaccagccttagcaacatagtgacaccctgtcyctacaaaaaataaacaaaattagccaggtttggtgatgtgcgcctgtagtcctagctacttgggaggctgagatgggaggattgcttgagctggggaggttgaggctgcagtaagctgtgttcatgccactgcactccacctgggtgccagaataagaccttatctcaaaagaaaaaaaagttttcttttttccccagtggttttctgcttcaggtttatctcataaaacctattttgtttgtttcagcattctaatcttttagttgcctattttctccactgtttttaaaaacagatgccatttcctcatgtttacacataaa

SEQ ID NO: 324132 - DNA, 580 bp, Homo sapiens
cagttacttagaagaaaggaaaaaccagactagccttatagaatgctggaaggtaatagggagctctacaggagaagatttttaatccaagaatttctccctagtgaagatgcctttcataagtgaagacaatggaatgacagcttcagacattcaggcgttgagaaattataccacttacgtactattctggagaaagaaatgacttaaagattaatcaactaaragatgaaagaaaacagtttattaaatcaacctcatatcaaaagcactgaacactgaaacaacttaaacattaaataattataactgtttataagatggattgagatgttaaattcctgaaaaggataaataatggaaaaagcagccccctcgctcttccttcctccatcatcatgatgtgtacagttgactccatttctcaccctgtcttctcacaagtctttcagggtcaagtgatttcaggccaagaaacaaaagcaaaattgtctcattccccagtgcattcagatgaaaactgataataaaatcaggtacagttccaagaggagacactggagaggaaccacgctgggtc

SEQ ID NO: 324133 - DNA, 558 bp, Homo sapiens
agcactgaacactgaaacaacttaaacattaaataattataactgtttataagatggattgagatgttaaattcctgaaaaggakaaataatggaaaaagcagccccctcgctcttccttcctccatcatcatgatgtgtacagttgactccatttctcaccctgtcttctcacaagtctttcagggtcaagtgatttcaggccaagaaacaaaagcaaaattgtctcattccccagtgcattcagatgaaaactgataataaaatcaggtacagttccaagaggagacactggagaggaaccacgctgggtctgtaaggaattgcaaatgagatggcacacatatttatgctgtatcaaggtcactgtcatcttaccatatcagactgaaaatgtcaccaccatctggacagtcagatatgttttatcgggaaaatggtttttctctttgtgtatatgctctgcagtagtagggtggtttagtaacaaatatgtgagaccttttatttgaaaaaaattgtttttaaataatgggaaaagcaatatgttagtagtaag

SEQ ID NO: 324134 - DNA, 616 bp, Homo sapiens
taaacattaaataattataactgtttataagatggattgagatgttaaattcctgaaaaggataaataatggaaaaagcagccccctcgctcttccttcctccatcatcatgatgtgtacagttgactccatttctcaccctgtcttctcacaagtctttcagggtcaagtgatttcaggccaagaaacaaaagcaaaattgtctcattccccagtgcattcagatgaaaactgataataaaatcaggtacagttccaagaggagacactggagaggaaccacgctgggtctgtaaggaattgcaaatgagatggcacacatatttatgctgtatcaaggtcactgtcatcttaccatatcagactgaaaatgtcaccaccatctggacagtcagatatgttttatygggaaaatggtttttctctttgtgtatatgctctgcagtagtagggtggtttagtaacaaatatgtgagaccttttatttgaaaaaaattgtttttaaataatgggaaaagcaatatgttagtagtaagtatctgggtaagtctatcttagcctttgttaacaaaaactaagaattgatggggccttgagattgaggtagagatgaaag

SEQ ID NO: 324135 - DNA, 557 bp, Homo sapiens
tggaattgcattgaatctgtagatcaaattagggagaactaacatcttaatgttgactatttctatgcattaaagtagagtatctcctcatttaattagatattctttctttcatcacaattttttatttttcctcacatagatcttgtatacttttgttacatttgtacctaagtattactttattgtgctaatgtaaagaagatcgtgtttttcatttctaatcccaagastttttactggtatacagaacctaaacattagcaaagtcaaaccattgaggccttgataacattgacatttcgtgtaattaccttttatatagtaaattatctcttatatagtaagattttatataggctttcatatagtaagattgtatgctgcaaacctgctataatcacttagcatctccaggagtttgtcttttgtttgctgttgttgcttttatcaattcgttaggattttctatatgcacgtttagtttgcaaacaaaggaagaaaggaagttgtaaatcagtatgccttttatttccttttcttgtcttattgttcta

SEQ ID NO: 324136 - DNA, 574 bp, Homo sapiens
tcccttgttgtttctgattgtgtttatttggatcttctctcttttcttatttattagtccatctagcagtcaattttattttttcaaaaaacagctcctgtatttttgatcttttgaatggttctttatgtctcaatcttcagttcaactctgattttggttatttcttgtcttctgctagctttgggactgattttctcttagttctctagtttttttagttgtgaggttaggttgttaaattgagattgttctaactttttgatgtgggcctttagtactataaattttcctcttaacactgccttagctatgtcccagagattctgrtatgttgtatctttgttctcattagtttcaaagaacttcttgatttctgccttaatgtcattatttacccaaaattcattcaggagtaggttactcaatttccatgtaattgcaggttttgagtgaatttcctaatctttatttctaatttgattgtgctgtggtctgagagatcctttgttacaatttcagttcttttagtttcagttctttgctgaggagcattttatttctgattatgtga

SEQ ID NO: 324137 - DNA, 607 bp, Homo sapiens
ttgtctgaaactaggattgcaaaccctgcttttcttctgttttctatttgcttggtagattttctctttatccctttattttgagcctctgtgtgtcattgcatgtaagatgggtctcttgaaaacagtatataaatgggacttggttctttatccagcttgtcaccctgtgctttttatttggggcagttagcccatgtttctccctagtttctggtggctttttggctggtagctgcatcagtccaatctctgttctatcttcacatggcactcttctcttatgtctttatttgttgtttgtttgtttgtttttataaagacamcagcattggttgtagggctcaccttaatctagtttgacctcatcttaactaattacatcaggaaataccctgtttttatatcaggtcaaattctcaggttccagatggacttgaattttagaggaacactatttaacccagtattatcctcaaaataacttcaacttttctctttctccaatttaattcatctctctcagctaactttatgtttttttctcattctgaaaacataaatattacatgtgaacagaagaaatgtgaatcattaagaccatgag

SEQ ID NO: 324138 - DNA, 592 bp, Homo sapiens
cctcaaacatacacagtaaaattaattttaaaaaagaagttcatcaaagcatgccatttagagagtaaaaaggcaagccatggagtaagtagcagaagatattggcaagacatacacatccaacaaaggatacatatccagtatataaaaataaagtgctkgaaatcaataagaaaaatacaataacctaagagaaaaaggcaagtgacttaaatagagacttcagaaagagggtattcagatgtctactcatcatattaaagatactcaattattagttatcaggaaaatttagtcaaaacctacaatggtatatcatcacacaaccaccacgatccttaaaattataaagattgacaatgctaaattttaacaagaatatggaccagcaggatctcatgcacaatgctgtgtgagcataaattattgcagccatgttaaactgtttggcattaccttttgccttagcagtgtcattcctatgcatatagagagcaaaacatgtgcacctagaaaatgtataagcatattcttagtaacattattcataacagccaaaaatgcaaaagccccaaatgtccagcaagagtag

SEQ ID NO: 324139 - DNA, 610 bp, Homo sapiens
gtaatttatgtttttaaaaaaattattttcaagtttgtttgtgatgaaccaaatcccactgctgactggtggaatttttaggtggataataaaaacaatattttataaagaaaacagctcttatttatttaaggaagatgctctaatgagggtcaaaatcatattttgcagtgttaattatttctctatgagaggcctattatgttagctccatgcatgtatagctatgaatatatagctatgtatayatttgtatatgccttatagattatggtacgttagagagtcttaccatgttcctctacaggatgtctatttaaggttttctattaaaaatacttttaatcaaatcaattagttctttttctgcttaatcatacacttatccctgtttgaaataatacatgcagtggaaatccactgatactcatccaccaaaaatattttagtcattttctctttggagccagataaagttgaaattcattgtaggtggcttagagtgtattattaggtatttttgtgctgtctgactttctgaaactccaaacacttttaacgattaaaacaattttacttaataagaggctttgtggtgaaatgattgact

SEQ ID NO: 324140 - DNA, 595 bp, Homo sapiens
ttccttacaagtggctgaaggactagctagacagaaagttgctatttggaacttggtcctgaatgagcacacagtgtaactccatttatggccacttagctcgttaacagtctcatggctagagtacccagaaccattctatatctcaccgagccttggatgaccagaatccataagttaaatgtgggcagggacacataacacaaatrggtcagtgctactattcagagcttggggttatgctgcggatggtttgtcatcttacatgaaggacgagatctgagtttgtaatattataggccccctgattccaacacaagcagagatgctcaattattccaggcactgcgctagacactttgcctaaagcaattatcatcatcacaataatcctctgatgaggactttattattctccatttagatatgaggacactgatcttcatagttaatgaatgagccaaactattgagattttttttttaaatttaggattacttaaatccagtgtttggtatcttcctactaacccagtctttcttaaagcatttagggtttcaaatgaaatagatctatccccgttatgtttcaaaga

SEQ ID NO: 324141 - DNA, 557 bp, Homo sapiens
tggaattgcattgaatctgtagatcaaattagggagaactaacatcttaatgttgactrtttctatgcattaaagtagagtatctcctcatttaattagatattctttctttcatcacaattttttatttttcctcacatagatcttgtatacttttgttacatttgtacctaagtattactttattgtgctaatgtaaagaagatcgtgtttttcatttctaatcccaagactttttactggtatacagaacctaaacattagcaaagtcaaaccattgaggccttgataacattgacatttcgtgtaattaccttttatatagtaaattatctcttatatagtaagattttatataggctttcatatagtaagattgtatgctgcaaacctgctataatcacttagcatctccaggagtttgtcttttgtttgctgttgttgcttttatcaattcgttaggattttctatatgcacgtttagtttgcaaacaaaggaagaaaggaagttgtaaatcagtatgccttttatttccttttcttgtcttattgttcta

SEQ ID NO: 324142 - DNA, 454 bp, Homo sapiens
ctgactgacttaaatagtgtcaaatgccttgcttaagccagaacaaataattgtttcccactcttccttttatcgttttttattttaacaagattttatgttttctctagagtaccctcctactgtcttaaaaattttctagtatatccgaaggaaattcaaatctgacttggcaatgtctttgtttatagacaaagacatttcatttggtttcacatatacacactttgtgtatatgtaacacaccttgtgtacatgtaacacattttgtatatatacaactaaaygaaatagaaatcattttctgtttctgtgaaaatttcaaagtaatcaggagaccatggattttggtgtgccatttagccgggattctaataaataaaatattatttaaagggttgataagcggagagaatgagcttctgtaaagttcctcattggtttcgatcaaaag

SEQ ID NO: 324143 - DNA, 510 bp, Homo sapiens
aaactagactatattttatcagcccacaggataaggctgttcctattctttatatggtactgtttaaaaccaaataacattgagtctgagaaataaactgatgttttaccattatgtcatgttgttttgatggggccatgaaaatagattataaaactgtgaatagggatgagctttctcctgaaagaacatgctcactatgactcaggctccataaagaagtcaagacttagggttcaagccttagtttgggtgagaagtaaacttccttttttatctagagttgaaaagagatttartctgattccagtgtgtgaatatcctggagaatttcagtgtgggggttcagatacttccaaccacatgaaggacagtgggcaatgaagccaggtaaagagtcctagtatgaggctgggcatggtagctcacatatgtaattccagcactttgggaggccatagctggaggattgcttgagcccaggggttcaagaccaggctgggcaatata

SEQ ID NO: 324144 - DNA, 570 bp, Homo sapiens
actttattgcaactgatttgtaatctttgtgcattttccacataaaatattttctgtaatatyatgtaaaagtgaaaaatggctttgttgagtaggcgttgttaaatttataagttacaagcaatactaaagcctgaaatttagatgaacacctggaatcatggaaatcttaagtttagtaaaagtcatgggtcttttttttttttttttttttttttgagatggaattttgctcttgttgcccaggctggagtgcaatggtgcgatctcggctcacagcaactctgcctcctaggttcaagcgattctcttgcctcagcctcccaagtagctgggattacaggcatacgccactgcgttcggctaattttgtatttttagtagagacgaggtttctccatgttggtcaggctggtctcgaactcccgacctcaggtgatcctcccaccttggcctcccaaagtgctaggatttcaggcatgagccaccatgcccgacctaaagtaatgggtcttgtatttgtagagattcacattttttgacagcaaagtaatatattactcaatgaaa

SEQ ID NO: 324145 - DNA, 570 bp, Homo sapiens
actttattgcaactgatttgtaatctttgtgcattttccacataaaatattttctgtaatatcatgtaaaagtgaaaaatggctttgttgagtaggcgttgttaaatttataagttasaagcaatactaaagcctgaaatttagatgaacacctggaatcatggaaatcttaagtttagtaaaagtcatgggtcttttttttttttttttttttttttgagatggaattttgctcttgttgcccaggctggagtgcaatggtgcgatctcggctcacagcaactctgcctcctaggttcaagcgattctcttgcctcagcctcccaagtagctgggattacaggcatacgccactgcgttcggctaattttgtatttttagtagagacgaggtttctccatgttggtcaggctggtctcgaactcccgacctcaggtgatcctcccaccttggcctcccaaagtgctaggatttcaggcatgagccaccatgcccgacctaaagtaatgggtcttgtatttgtagagattcacattttttgacagcaaagtaatatattactcaatgaaa

SEQ ID NO: 324146 - DNA, 570 bp, Homo sapiens
actttattgcaactgatttgtaatctttgtgcattttccacataaaatattttctgtaatatcatgtaaaagtgaaaaatggctttgttgagtaggcgttgttaaatttataagttacaagcaatactaaagcctgaaatttagatgaacacctggaatcatggaaatcttaagtttartaaaagtcatgggtcttttttttttttttttttttttttgagatggaattttgctcttgttgcccaggctggagtgcaatggtgcgatctcggctcacagcaactctgcctcctaggttcaagcgattctcttgcctcagcctcccaagtagctgggattacaggcatacgccactgcgttcggctaattttgtatttttagtagagacgaggtttctccatgttggtcaggctggtctcgaactcccgacctcaggtgatcctcccaccttggcctcccaaagtgctaggatttcaggcatgagccaccatgcccgacctaaagtaatgggtcttgtatttgtagagattcacattttttgacagcaaagtaatatattactcaatgaaa

SEQ ID NO: 324147 - DNA, 522 bp, Homo sapiens
tcttgtcatcttccctttctccccagagataattattatggtcagtaaattatcctgccyatgcattcatttatattttgattgtgtgtgtattaaagacttagatgtagtaatttgcacagtttaatactgtttatataaaagttactaaaacaaaaacagcaatatatatttttatgaaaacattttaaaaatatgaattactgaacatctctcctatgcattaactcagaatgttttggatttggaaccaggaatatatattgtgtcccagatgattttgatatgtagatagctttgggaaatttgattattgtcagatcccaaactaatttacaatgtttaattagatttataatatctagcttgatgggctagagattcaatattgaatataggcaataaacatccgaggatgaaatctgataagctaaacagatcaacttttcagtgatctttaaaatacagcctgttatgttttcctcttatcatattagtatattagtttcacatgggttttca

SEQ ID NO: 324148 - DNA, 522 bp, Homo sapiens
tcttgtcatcttccctttctccccagagataattattatggtcagtaaattatcctgcccatgcattcatttatattttgattgtgtgtgtattaaagacttagatgtagtaatttgcacagtttaatactgtttatataaaagttactaaaacaaaaacagcaatatatatttttatgaaaacattttaaaaatatgaattactgaacatctctcctatgcattaactcagaatgttttggatttggaaccaggaatatatattgtgtcccagatgattttgatatgtagatagctttgggaaatttgattattgtcagatcccaaactaatttacaatgtttaattagatttataatatctagcttgatgggctagagattcaatattgaatataggcaataaacatycgaggatgaaatctgataagctaaacagatcaacttttcagtgatctttaaaatacagcctgttatgttttcctcttatcatattagtatattagtttcacatgggttttca

SEQ ID NO: 324149 - DNA, 522 bp, Homo sapiens
tcttgtcatcttccctttctccccagagataattattatggtcagtaaattatcctgcccatgcattcatttatattttgattgtgtgtgtattaaagacttagatgtagtaatttgcacagtttaatactgtttatataaaagttactaaaacaaaaacagcaatatatatttttatgaaaacattttaaaaatatgaattactgaacatctctcctatgcattaactcagaatgttttggatttggaaccaggaatatatattgtgtcccagatgattttgatatgtagatagctttgggaaatttgattattgtcagatcccaaactaatttacaatgtttaattagatttataatatctagcttgatgggctagagattcaatattgaatataggcaataaacatccgagratgaaatctgataagctaaacagatcaacttttcagtgatctttaaaatacagcctgttatgttttcctcttatcatattagtatattagtttcacatgggttttca

SEQ ID NO: 324150 - DNA, 451 bp, Homo sapiens
tctgctttgaaactgcattgcatgtgattttgagtaacataagtacataaccaagaaaatgagcatctctgggtatattgaaacatccagtgtctggacctggaagtataatctcagacctcagatggacaatatttccatgactgggcccaaagccatgccccatttggtgagcttcctaacycacctttctattattaattactgttcaatctaaaacaggtgtcatcctagtcttaaataccaaccttgagtctcctaaatgccgagcttgataaaagggcttcaatgtgaagtttgaaagaaagaagaaaaaaaatttaagtctagataagactgcaagaccagataataatgagaacattatatttaacatttttaaatgtatgtagttttcaggaatttcaggaattttccagaaataacacagaatgtttttttaaaaagtgac

SEQ ID NO: 324151 - DNA, 483 bp, Homo sapiens
aacagatgaaaatcaatcaatgtaatatatcacattaacaaatcaatcaatgtagtatatcacatttacaaaacgaagggtaaaaaaaactcagtcgtctcaattgatataaaaaagaacctgacaaaattcaacaaccttgaataatacaataaaataactcaataaactaaggatagagggwaactaccctaacataataaaagccatatatgaaaaattcacagctcacgtcatattcaatggtgaaagactgaaagctctgtctccaatatcagaaacaagacaattatgcccacttttgccatttctattcaacacagtcctggaagcttaagccagcactattaggcaagaaaaatcagtaaaaggctacacactgaaagaaagaggtaaaattatctccgtctgcagacataatcttaagtgtagaatgctttaaagatttcaccaattattattttttaaactactagaactaac

SEQ ID NO: 324152 - DNA, 532 bp, Homo sapiens
gggaaccacccccatgattcaattatcttcccctggccccactcttgacatgtggaaattattacaattcaaggcgaaatttgggtggggctacagccaaaccatatcaatactattaagacagaaagagctgcaaaaaagccctggaacagcccttctctcatgctatgatagtaaaccataaataatactgcayactgtatctgtggaaataacagactttaatactgtaacaaacaaaatgaaagatgcaagcatattgattcttaccacattttaattcatattacctctttgggttttttaaaggtagataattcttaaagaatgaatggaaattatcaaatacttagatagatgataatgcccatcatgggtaccgtttcagatagaatatctttgctaaagtaaatcattagatgcttagctaatgacatagcaaatattttgttttgttttaattcacttctataagcaaatatagtaagaagccatttggctttatgtgttagggacaacaatatatattgct

SEQ ID NO: 324153 - DNA, 584 bp, Homo sapiens
agttttggaaaaggcaatatttggctggtaaaaatacattattcagaaagaaccaattgggagagagtgggcaaacaggaatagaagttttcactttgggccatgggtttcaggctttttggcttgaaggtggagtttcaagacagggacctgcctctgtctgcctagaatttctctgcctcctacctctatcatatacacatacacatagtccttgcaatgttccagtagatatgaaaaaaattgataataactgagagagaagaaactatttaaggaggaatatccaaaaattaatgagatattagaatgcaatgtgcagattgagcttggtgtcattagattgtggcagtaagtcaattcattataacataatacagagaaaacaaatgtacagataacagctgagttggtcaacatgtaattatacacatctagaagttttccaatttttctattcatgaatggcatggttagtaacttagagttagaagaaagacaaggttatagagctttgaggaaagaagagccaataagagttgaatgacagagtgaatttaccaragaagtatagagtaggattg

SEQ ID NO: 324154 - DNA, 547 bp, Homo sapiens
tatggagaaaccaaaacatatggatgtgttatgacttctctgtatcaaaaacgcttttacagagtctcagaactaagatctaaagaggcttttagtttaatgctttcagtcattagattacaatggtttctgacctggggccatatttaatacctgaatatattattaaagtgatctaaaattttccctgaagaccttcaagaacaacccatgttgtttctttgctttgataytattctacttagaaggtggagaaacagtcttttcctgatttttttttaagagctgaatcttgctatctcgaagtaggtacaaagagtatgtaatttgccaatataggaagaatttccaatcacccacaatgacttgactttgagtcttggaacaacagttttacaatttcattttctcaaatggttacaaggcctattttctaaaattgggtttatatggtgccaagataaaagggtctatagcaaataaagcaaactctctttaatctaattgttcaggtactagataacttttagagctgtgattattttgc

SEQ ID NO: 324155 - DNA, 647 bp, Homo sapiens
atctgcttaataaggaagttacagaagcaatagtagcagtagcggtggtaactggcatttattgagggtctactaccctcaaaaaatgtcagataggtgattttatctaattttcacaactccaagaaataaatataattgctatcccaatttttgtgatgtgaaaactgagtcttttttaaaataagyttatttttatagatttgggggtatgagtacagttttgtaacatgtatgtagtgtgactgggtgaagtctggcctcttagcgtaaccatctcccaaattatatacattgtactcattaaatatttgtcatcccatacgccttgcccactctgccaccttctcagccttctgagtttccaatgtctatcattccactctctaccaccacgtgtacacattacttagctcccacttaaaagtgagaacatgtggtatttgactttatgtctccgtggtatttcacttaaggtaatggcctccagttccattcatgttgctgcaaaaggtattatctcattcttttttatggctcagtagtattccaaggtgtgtgtatgtatatataaaatgagttgtatgtatatagattatatataccacattttatttatcctatctgccattgatgattctatatct

SEQ ID NO: 324156 - DNA, 576 bp, Homo sapiens
agttgtatgtatatagattatatataccacattttatttatcctatctgccattgatgattctatatcttygctattgcaaacagtactgcacaaaagcagggatctttatggtatgatttattttccattgggtagatatacaattgtgggcttgctggatcgaactgtagttctatttttagttctttaagaaatttccatattgttttctatagaggttgtacaaatttatattcccactaacaatgtataactattttcttttctctgcatttttgccaacatcttttttgtgactttttgataatggttattctaactgcataagatggtgtctcactatgatttaatttgtatttctcttatgattcatgattttgagcatttttatatgctttttggccatttgtttgtcttctttttttaaaaaaaatatttttattttaagttccagggtacacgtgcaggttccagggtgtgcaggtttgttaacataggtaaatgtgtgtcatgttgatttgctgcacctatcaatccatcacctaggtattaagcccagcatgcattagctatt

SEQ ID NO: 324157 - DNA, 576 bp, Homo sapiens
agttgtatgtatatagattatatataccacattttatttatcctatctgccattgatgattctatatctttgctattgcaaacagtactgcacaaaagcagggatctttatggtatgatttattttccattgggtagatayacaattgtgggcttgctggatcgaactgtagttctatttttagttctttaagaaatttccatattgttttctatagaggttgtacaaatttatattcccactaacaatgtataactattttcttttctctgcatttttgccaacatcttttttgtgactttttgataatggttattctaactgcataagatggtgtctcactatgatttaatttgtatttctcttatgattcatgattttgagcatttttatatgctttttggccatttgtttgtcttctttttttaaaaaaaatatttttattttaagttccagggtacacgtgcaggttccagggtgtgcaggtttgttaacataggtaaatgtgtgtcatgttgatttgctgcacctatcaatccatcacctaggtattaagcccagcatgcattagctatt

SEQ ID NO: 324158 - DNA, 576 bp, Homo sapiens
agttgtatgtatatagattatatataccacattttatttatcctatctgccattgatgattctatatctttgctattgcaaacagtactgcacaaaagcagggatctttatggtatgatttattttccattgggtagatatacaattgtgggcttgctggatcgaactgtagttctatttttagttctttaagaaatttccatattgttttctatagaggttgtacaaatttatattcccactaacaatgtataactattttcttttctctgcatttttgccaacatcttttttgtgactttttgataatggttattctaactgcataagatggtgtctcactatgatttaatttgtatttctcttatgattcatgattttgagcatttttatatgctttttggccatttgtwtgtcttctttttttaaaaaaaatatttttattttaagttccagggtacacgtgcaggttccagggtgtgcaggtttgttaacataggtaaatgtgtgtcatgttgatttgctgcacctatcaatccatcacctaggtattaagcccagcatgcattagctatt

SEQ ID NO: 324159 - DNA, 576 bp, Homo sapiens
agttgtatgtatatagattatatataccacattttatttatcctatctgccattgatgattctatatctttgctattgcaaacagtactgcacaaaagcagggatctttatggtatgatttattttccattgggtagatatacaattgtgggcttgctggatcgaactgtagttctatttttagttctttaagaaatttccatattgttttctatagaggttgtacaaatttatattcccactaacaatgtataactattttcttttctctgcatttttgccaacatcttttttgtgactttttgataatggttattctaactgcataagatggtgtctcactatgatttaatttgtatttctcttatgattcatgattttgagcatttttatatgctttttggccatttgtttgtyttctttttttaaaaaaaatatttttattttaagttccagggtacacgtgcaggttccagggtgtgcaggtttgttaacataggtaaatgtgtgtcatgttgatttgctgcacctatcaatccatcacctaggtattaagcccagcatgcattagctatt

SEQ ID NO: 324160 - DNA, 451 bp, Homo sapiens
tgtaagctcacggtcattaggcacaaaaacacattaatgatccatgggcaatccacaaattaaaaaatgataatgtatatatacgttttggaactataataatatacgattatagatataaaatcatattgtagttccgaagcgtttctgttttaaatraaattaagaaaaccccaggtttaatgctggatttgaagaaaagaggcaaaaattttcaatgttaatgtacagttttcatttgccttgttttttttttttttttggcaatgagtatatattgggctagtacatttagcttactaataccttttctgacttcttccttgctgataaaatccagtgatcaacaatgttagtcataaccaatcaaatctcttctgttctctaattttcacctctctcaagcagccagaagctggccctatggttcagttttggccaatgaaacaca

SEQ ID NO: 324161 - DNA, 601 bp, Homo sapiens
atgttaagacaataagcagctactacttatttagataatactatgggattagcagtaggctaggcactttatatatatgatgccttttattccccatgagtaaggtattaataatctattttaaaaggagaaaactaaagcctgcagatacaaagtagcttgtcccaaatcacaaagcttataagttaaactttgactgttcyaattcaaaaaaatccttgcaactctcaaatgccaggatgctatataactgagctgaatttaattaccaaaaaaatccaactatggaccgtcaaggtttgggattttgtcaattctattgtgaagaaaggaagaaaaaaagatacagcaatatttgaatttgtgactaataactctgaaccctcatgtttggccttttggaacctcacaaaaagaactttattgtctctattgtaagaaaggaaaaccaaaacttttgagtccacactatatgtcagttctttggaaatgttggaaatgattatgaaacatgtttaaaaaaaatcacaaaaatactaagagactagtttaaaacccatcatctttttattttaagatgctgtcttccagcaccacttca

SEQ ID NO: 324162 - DNA, 601 bp, Homo sapiens
atgttaagacaataagcagctactacttatttagataatactatgggattagcagtaggctaggcactttatatatatgatgccttttattccccatgagtaaggtattaataatctattttaaaaggagaaaactaaagcctgcagatacaaagtagcttgtcccaaatcacaaagcttataagttaaactttgactgttctaattcaaaaaaatccttgcaactctcaaatgccaggatgctatataactgagctgaatttaattaccaaaaaaatccaactatggaccrtcaaggtttgggattttgtcaattctattgtgaagaaaggaagaaaaaaagatacagcaatatttgaatttgtgactaataactctgaaccctcatgtttggccttttggaacctcacaaaaagaactttattgtctctattgtaagaaaggaaaaccaaaacttttgagtccacactatatgtcagttctttggaaatgttggaaatgattatgaaacatgtttaaaaaaaatcacaaaaatactaagagactagtttaaaacccatcatctttttattttaagatgctgtcttccagcaccacttca

SEQ ID NO: 324163 - DNA, 601 bp, Homo sapiens
atgttaagacaataagcagctactacttatttagataatactatgggattagcagtaggctaggcactttatatatatgatgccttttattccccatgagtaaggtattaataatctattttaaaaggagaaaactaaagcctgcagatacaaagtagcttgtcccaaatcacaaagcttataagttaaactttgactgttctaattcaaaaaaatccttgcaactctcaaatgccaggatgctatataactgagctgaatttaattaccaaaaaaatccaactatggaccgtcaaggtttgggattttgtcaattctattgtgaagaaaggaagaaaaaaagatacagcaatatttgaatttgygactaataactctgaaccctcatgtttggccttttggaacctcacaaaaagaactttattgtctctattgtaagaaaggaaaaccaaaacttttgagtccacactatatgtcagttctttggaaatgttggaaatgattatgaaacatgtttaaaaaaaatcacaaaaatactaagagactagtttaaaacccatcatctttttattttaagatgctgtcttccagcaccacttca

SEQ ID NO: 324164 - DNA, 459 bp, Homo sapiens
agagatttatgttttatgttatttatattgactcttgtttgccactgaatatcactcatatatacctaatctcagagcaatagataaatgaaagaggtaaaacaaaaataacacacaaagagaagacaatgaaacctaacatattgacacatatttaagcctgtaatggacatgcattagtttagtctgcatggtattcatttgcattgaggggaaagctaattggccattgttggaatcgggcatgtggcttgcagtcaatgtgtagttctcattcatatttatccttggcccaggatgggccaatggrccaaagaaatatttttctctgagatttgaatcttgagcaaagagacaccaagtgtgaaaatgtttgaagctaatttatatcaacactgctggcctgaagacattattcattgtttcctgtgtcccacttctagaaagaagataacaaga

SEQ ID NO: 324165 - DNA, 579 bp, Homo sapiens
ttttacttgaactttgctgttatgctggtatatataaggatgcctcatatttggattactgtataacattttccttgagtaaagtttatttccccctgaatccatctttttaatacactgccagactaatctgccaaggaycacatcaggtttagtagaattaaatttgctcagccttccataagtaaccaaaatcaaatgttataaccagatgccctgttaagtccatacctgtattttctttgcattggtcagtattaattactttctttaactgaaagcatgtaacttgccacttgccagagaaacccttcttattgccttaagagacacatttcaggcatttaaacattgctacctccacttctctccctcctcatttcccaaccacttctccctttccaaacagaatctaaattaaaccacaacaaccagctttttagaattcataatcattgcacaacacacacacacacatacacacacaactttcctataactatctaacttaacccttctataacgtttctccctattttgtgtgtgtgtgtgtgtgtgtgtgtgatgttattttgtttt

SEQ ID NO: 324166 - DNA, 591 bp, Homo sapiens
taatactgcaattttctttttaaaacattgctttgccctttactatatcagtatatgctaatgtcattaattcatttttttctatgtacagtattttaccatagagtacattacacattttatttatctgttartctgttgatggatgtatacattatttttaatttcctcctattacaaaatgagctaaaatggaaattcatacatatgtatgtatatatatatgtgtgtatatacatataatatgtgtgtgtgtataatctttgcatgtaactgtaaacaatttttaagagtttatatgtataatagaatggctgctttgaaagagaaataattaactcaaaactggctattcccaatttttttctcaaattattgtatcatttctactcccagaactagtatattacaatttctttcaccaagatcctttccaatatgtgacactcaatttaaggcactttggtcaatataagtaagaaaagtgtcttctttgtaaactggcacttctcaggttggttaagatttttggcatattctaatactttttggactcatgggttcttcaatcaattaataatcattaaatgt

SEQ ID NO: 324167 - DNA, 619 bp, Homo sapiens
tctgttgttttatttccccctaaataatactaatcattttccctcctttcaaccgcatctcgggctgctgagttagtagattccctatagactaccttacatcttacattatggttcttacagcaccatgcawtagaaaagatttgagagactccacagcgtatacccacacaaggcttttaataaaggtaatggtacaacagagaaaggaagcccaggtaagcataaagacagccaactacttccagcctcagctccagggtcttttctctgttgcacatcttcagacggcttcatcttcaaattgttaacgaacaagttacgttcatagattctgacgtttcaataaagcaaaggcagatattttctaatgagctcttttgtactcagctggtcataaaatcaggctaggttaaagccaagtgcaaacaatcagacctcatattttcaggaaataatatagacaagcaagtacagaggggttccagggaaggtttggactttatatacagcacattttaaattactagctagtcaatgctttatctctgtcttagccaagggtcagcagcagacttctaatagtctctgtatataatcatagtgctatcagatacca

SEQ ID NO: 324168 - DNA, 619 bp, Homo sapiens
tctgttgttttatttccccctaaataatactaatcattttccctcctttcaaccgcatctcgggctgctgagttagtagattccctatagactaccttacatcttacattatggttcttacagcaccatgcaatagaaaagatttgagagactccacagcgtatacccacacaaggcttttaataaaggtaatggtacaacagagaaaggaagcccaggtaagcataaagacagccaactacttccagcctcagctccagggtcttttctctgttgcacatcttcagacggcttcatcttcaaattgttaacgaacaagttacgttcatagattctgacgtttcaataaagcaaaggcagatattttctaatgagctcttttgtactcwgctggtcataaaatcaggctaggttaaagccaagtgcaaacaatcagacctcatattttcaggaaataatatagacaagcaagtacagaggggttccagggaaggtttggactttatatacagcacattttaaattactagctagtcaatgctttatctctgtcttagccaagggtcagcagcagacttctaatagtctctgtatataatcatagtgctatcagatacca

SEQ ID NO: 324169 - DNA, 542 bp, Homo sapiens
tcattaacactgcaactattcacgttaagctgtaacttgaattaggctagcaatattaacatgtagcgagatatttgagaaacctgctactttgaataattctgacttagaatatgaattattttggatgactaaaggtaatattttctaaagtagcttaggtattacagtaatacttattaaccttttaaaatgtggtttaaaggcaaagttcagcccctgaatactaaaaataattgaacatacagtacttgcggatcactctgtatgagacaaagggagtagtatgaagttttatgttttttcccccttaaatraaatctacattagtcttttaaaaatatgtatttttaataaccctagctgacagaactccatcgcaaggttattgacttattttggcagaatgtgtttattattttgtacctctgtacacaagcacgtatgtctcacttgacattcagtgcgtcttaatgaaaaagaacacaaattgctcaatgcatatctggtttccagttatttctacccgaagattatttggt

SEQ ID NO: 324170 - DNA, 542 bp, Homo sapiens
tcattaacactgcaactattcacgttaagctgtaacttgaattaggctagcaatattaacatgtagcgagatatttgagaaacctgctactttgaataattctgacttagaatatgaattattttggatgactaaaggtaatattttctaaagtagcttaggtattacagtaatacttattaaccttttaaaatgtggtttaaaggcaaagttcagcccctgaatactaaaaataattgaacatacagtacttgcggatcactctgtatgagacaaagggagtagtatgaagttttatgttttttcccccttaaataaaatctacattagtcttttaaaaatatgtatttttrataaccctagctgacagaactccatcgcaaggttattgacttattttggcagaatgtgtttattattttgtacctctgtacacaagcacgtatgtctcacttgacattcagtgcgtcttaatgaaaaagaacacaaattgctcaatgcatatctggtttccagttatttctacccgaagattatttggt

SEQ ID NO: 324171 - DNA, 557 bp, Homo sapiens
taagggttcctacccttcttagactatataaggtaacttccggatgttgccatggcatttcttaactgtcatggcattggtgggagtgtcttttagtatgctaatgattataattagaatataatgagcagtgaggatgaccagaggtcactttcattgccatcttggttttggccagcttctttaccgcatcctgttttatcagcagggtctttgtgacctgtttcttgtgccaacctcctatcttattctgtgacttagaatgcctaaccccctgggaatgcagtccagtaggtctcagccttattttacgcaacccctgttaaagatggacttgctctggttcaaacacctctgacagatggatctggatwtacataaaatgacacaaatactgattttctgaatatctgttggtaaaatcaacaactaaaaatgatcctctccctgccctccaaccgcctacccacccattgtcaagccacggaggctccccgcaggggccagcacaaagatctgaatgcagagcttccaaaggtcaggaattagaccctcag

SEQ ID NO: 324172 - DNA, 545 bp, Homo sapiens
ttgttttatatttttgaaaatctctttaatgaattagaagacagctggattctcacatctgcatctgcattcaatctgttgatatctgtggttttgtttgtagtatataaagaaaaccagccttacacagcagggcgcagactcagggctgaaaacctaaggagccacccactcttgaggtcctgcaagggtagggttgtccctgagagtgagggcctccttaaattttgcactcaagggccctgccttgtctcacttgggtcctagcctggtcaggcgggaaaaaccactggcttaagatatgctccagggattgcaaggagggtctcctacctggaatataggccaagatacaaagtcatgaatgagygcaaggtctgaggaaccgcactgggcccagatctgagcaagccttttatgctgcatgaagaaacaggcctttatctggaaggctatgaggagccacagaagagtcaagcagggagtgatgggatcagatttgcatttttagattcattcatttgtttgttaattgatatgtattg

SEQ ID NO: 324173 - DNA, 517 bp, Homo sapiens
aatataaattattctaccataaagacacacacatttgtatgttaattgcagcactgtttgtaatagcaaagacatgaaatcaacctaaatgcacatcaatggcagatgggataaagaaaatgtggtacatataaaccttggaatactatgcagccataaaaatgaatgagctcatgtccttgtcaagaacatggatggagctgcaggccattatccttascaaactaatgtaggaagagaaaaccaaatgctgcatattctcacttataagtgagagctaaatgatgacatatgaccacaaaaaagagaacaacagatgttggggcccacttgagggtggacggtgggaggagggagaggttcagaaaaaaaaatatttattgtgtactaggcctagtacctgggtgatgaaataatctgtacttcaaacccctgtgacatgagttacctatataacaaacctgcacatgtacccctgaacttaaaagttaagaaaaaaatactggtggtagagtca

SEQ ID NO: 324174 - DNA, 491 bp, Homo sapiens
acaatttggaagtaacttgtctagaggtgatggtggaagaatgaaggaaggagcttctacagtgtgagccaaatatagggccaacaggaacttgacagttaagtcaagaagagcagaaacgaagatggaagaaggacttcaaggaatgagtgagaaagcagagactagagtccatccccagagcataatatgaggttatgaaggccaagagaggagagagattaaggaggagctagcttgcaagattcagtgctgattgttgtaatggccagcctgtatttaarccctttgcatgagcaaggcatgttttgaggaacttttcatcaatgactttgtttaattctcacagcaagtctatgagatgggtgccactattattctcactctataaatgagttacctgaggctccaagaaagcctacagcttattgaggtcatatggccagaaagcagcagagctaggactcacacccattgtcttggaactcaca

SEQ ID NO: 324175 - DNA, 339 bp, Homo sapiens
ttatgtgtgtgtgtatatgtgtgtgtgtgcatgagtgtgcatacacatgtgtgcataagattgaaagacagagagattttgcaagcataccaaagaatttgaaatttctcctaagggtcatggcaaattgtttgctatgggttgaatgcgacccaaaagttcacgtgttggaaacttaatccccaatgtgacagtgttgggaagtagggcctaaagggaggtgtttaggtcatgratagattaatgccattatacaaatgggagtgggtgcactctcttgtgctctggcccttccaccatgaaatgacacagcaagaagggcctcaccagatgccagca

SEQ ID NO: 324176 - DNA, 634 bp, Homo sapiens
ttctcttaaatgagacttttattctcttaaattctcttctatctttaagggccctttatatttcctttttctgtggagaaagtggaaatgccaataaatacaacgatgcatacacatgtatagggtttwgttattgatgtagcttgtttttgccatcatgctgtacatgatgttctttaatttgctttgctcatttaaccatacctcctggccatggctctgaagagaagttgctggcagtgcagaagaagggccaggactggaatgtctgcttctctcttcatccttttgccattgactcctgggggaaatatctgtagaccgaagcagtgaaatctaatcaattctctttctgacactaattaaggcttcaaagagacagataaccacttgggataatttagtcacagtgaaacttgggaaatggtcagtaatatttcatcctctgaaagtggaccccaagaaagttctggctctttgagttgttgtcttggtaattttcagggtaacgtgtataggaaaacccagattatgcagatgaaaagaaaacaaacatgctcttctgcatcctttgcagatttgaaactttgggcacaggtttgatttatttcaatgagatgttgctattagcatg

SEQ ID NO: 324177 - DNA, 634 bp, Homo sapiens
ttctcttaaatgagacttttattctcttaaattctcttctatctttaagggccctttatatttcctttttctgtggagaaagtggaaatgccaataaatacaacgatgcatacacatgtatagggttttgttattgatgtagcttgtttttgccatcatgctgtacatgatgttctttaatttgctttgctcatttaaccatacctcctggccatggctctgaagagaagttgctggcagtgcagaagaagggccaggactggaatgtctgcttctctcttcatccttttgccattgactcctgggggaaatatctgtagaccgaagcagtgaaatctaatcaattctctttctgacactaattaaggcttcaaagagacagataaccacttgggataatttagtcacagtgaaacttgggaaatggtcagtaatatttcatcctctgaamgtggaccccaagaaagttctggctctttgagttgttgtcttggtaattttcagggtaacgtgtataggaaaacccagattatgcagatgaaaagaaaacaaacatgctcttctgcatcctttgcagatttgaaactttgggcacaggtttgatttatttcaatgagatgttgctattagcatg

SEQ ID NO: 324178 - DNA, 607 bp, Homo sapiens
gcttttacaagtgtgattgctcagaaattgtgggcccatgtaaggttgactgcagcaattattagtttctccttccctcccccttcagaaacagacagcatgaatatttagtgattttattccatggataatttctttccgtattgagttgtcctccataatcgtgattcttttttaaaaaaaggaattaaaattatttcaaagaaagtgtcactatgatgatagaaaggaacaaagaaataggagcatctataaaaactagaaaacaatctggaaagactggacraaatgatggaggagtactttggcaacaatcacattaatctagcgaaggtcaaagaagagacatcatgaactcaaaccgaagaaattcacatgtgaattctgagcatgagtcttagaaacagactttagtgtactgttattcacctttgtttcttccagaaagccatggcaaataacagcgcaaaattgtgatagcaggagaaatgtttgtaatttcatgggaacaatctgttttcaaacatcccaaactatcccaaatatagcaatagttttatgtaaatggtgcttgcaattataaacctttcttccctggccataaaat

SEQ ID NO: 324179 - DNA, 549 bp, Homo sapiens
tggccaatctgttaaggagtgattggtcaagagaacttttaccacatgatgcttgatattaaatgattgtaattattaaggatattagctacctccatcagtggacagcaataattgatgttaactctctagcaatggaacattcttctatattagttggtcttatcttggttcacggattttgttgaaaatctgatatgttatagaccttcttatcagaaagatgtatactcacatgcatacatacaaaattgtagggttttttttatccctgaatytcatttgtagattatttattcacaaactccgtgttacagtattaaaacacacagagtaaaatgtaaataggcagtacactggcttgtcattttctaatcaagaaaataaagcatgtagtatatttatctgataaaattgattaatcttaaatgccactgtctggttcttgggaaaagaaacacccacaaagacacacccacatttgctcagttcccttcagagaatggcaaaaatcatgtcagtctgattcatctttcaggaaggaagagg

SEQ ID NO: 324180 - DNA, 597 bp, Homo sapiens
gtgcataatttgtattatttagcaaggaatttttagataggaataaaaaaaagtactaaaaaatgataaattagatgttatcaaaattaaaaacttttgctccatgaaaaacactttaargaagtggaaacaagagccacagactgaaaggaaatgtttacaaatcatgtcttttaaaggacatgtatctagaatatatcaatacctctcataactcaaaaatacaaaacaaactgaattttaaaaatcaaaaatttttaatgggcaaatgaggtaattggatacttcaccaaagcagatatacacatggcaaaaaagcataagcaaagatgttcaacatcaatagtcattagcggaatgcagatgaaaaccccaatgagataccactgcacacattaaaatggctgaaattaaaaaatctgcaataccaagtgcgatataaatgcaaagcagctagaaccctcatttactgctgttggaaatgcaagatgctacagctattgtgaaaaaaaagtagtataagtatcttataaataactttggaaaacagtgttttgactataaggttaaacacaaaagaacagtatgtaaacactg

SEQ ID NO: 324181 - DNA, 559 bp, Homo sapiens
ctttgtaaagctttccaaataattccactgtgcagtgagtctgagaaccaggggtcttgaccaatgtttctggagcagtaattctggaataggactgggattctgcatatctgacacacttgcttcccagtgatacagattctcttggtccttggactgcactgaataacaaggctataggggaatcctatkccttcatttttgaagtattagcacatgagttacgaaatcactttgggggcctgcttcattatttatgaaaatgagggtttaggctaaatcatcttcaagcttactttgccactccagaccttgccttattactagcaagaccaggagtctcttgtgttccacaaggggtcagatcactgctgcttccagcatttattgaacatttggctgtaaggctgtagaacagtagctcctactccccatggggcggagtgaggcagggcaggttaaccctctgtgtgcaccaaaatcacatggaatgctcattttaaatgtcctagagccctccctccagagatgctgatctcatgatctgggctagagccta

SEQ ID NO: 324182 - DNA, 583 bp, Homo sapiens
aaccctaaacagctaaaattgtgtcttttgatacttccatggggcttattctaatacaaaatgtccattctaacctctcagctagctgtcagctcattagtttacccaaatatgttcaaacaagatgacctgtttttatactctactggctcttctttcctctcttttctttctctaaaatcacgtttttgcctttgatctttgactgcatcttttattcaacttcctcacagatgagttaacaatttgcatccttaataacaaacagtaagaaactgtatgcaacataaccataaaaggtctctgaattattctttgatggtgcctcaatcaaaaaaatgaggcaggaaaaattctaattatcatatcctgtgatggctcagtaggcaattgtggcagaggctattagctatcccccaatatccactttcctcttatgtacaatagtcagttgtcccccrctttatctattgttttgctttctatggtttctgttggccatggacaactgaggtctgaaagtattaaattgaaaattcccgaaaaaatttataactttaaaattgcatggtcttctgagtag

SEQ ID NO: 324183 - DNA, 570 bp, Homo sapiens
tggctccttcttcaggaatgatggactggaacctcagttttgctttgctttgttggttttctttttttggggggggtgggatagggtctcgctctatcccccaggctggagtgtagtggcatgatcatagctctctacagccttgagccccgggctcaggtaatgctcccacttcagcctcctatctggaactacaggcacaaccatcgtgcctagctaactttttgtwttttttgtaaagacagggttttgccatgttgcccaggctggtcgcggactcctggacccaaacaatccacctgccttggcctcccaaagtgttgagattacaggcatcagctattgcgcccagctgcattcttggttttctgaaatggagccataattaagattgatgacttgtgtgcactatgctattaaaggtgacatttttagataagaacaaaacattccagaggaaaatctttaccaagaatgattttctaaaaaaaattaagaaagaagtcaacaacttctaaggtattatggcaaagtaaaaccatttgacttttgtttcttttcctcagtatc

SEQ ID NO: 324184 - DNA, 563 bp, Homo sapiens
acagatttttaaaaatcaacattatgttctgactttaatataaaggagaaacagaatgaaagaaatttataatttcaatatgtaaatgcttggtacagtcacactaaaaggtatagtgaagttgttagatattgaacaccatgaacaaaatagctacaaattcagaccagtgggttgtctgtggtggtgacaactcaaaaccctaagttcaacaattgttagtaatgtgatattccacaatggtaaacaacttttgataaagttcagcctaaaccaaagtacaatcttctcttgatttttatgttatggcacacttgaaaaagtcagtggatatgtaaaacaagctgcaatctaggctcatctgatacacatccacttcctcaatgcattctaaaagtactgtaaattctygactttcctaaggcataggtctctatgggccaccaaacatgacattcccaatatcatagtggaatagaaggctgaatccaccatgataatcccaggtatttcagacagacaggagtgagcacacattgtagaaaggaggatggggtggaaga

SEQ ID NO: 324185 - DNA, 531 bp, Homo sapiens
tccatttccacttaattaccaatgaaggcatattgattttcagtgtccacctcttctccctttggtcaagattcttttgtcctgaaaatgttttcagtcatatcaaactagtgtgctgctctacaaggccatggtccagaggcatgctcagtagtgattagaactcacccatgaggacagccaacacacaaagcttacagtgtgcttggcatggggctaaatgctttacatgtattatctcgtcttatcctctcaacaactctgatggaggtttcttaattatcatcattttccasatgtggagaatgaagaacaggaaggttaagtaacttgctcaaagcaatgcagtttgtaaagcagtagagatgagacttcaaactagttgtacatttaaccaccatatcattggtttctaaactctagcatgctctagagtcacctgtaaagcttgtgaaacctaaattgctggattccacccaaagagattctgattcagcaggtctggcatgggacctgataatttgcatttct

SEQ ID NO: 324186 - DNA, 531 bp, Homo sapiens
tccatttccacttaattaccaatgaaggcatattgattttcagtgtccacctcttctccctttggtcaagattcttttgtcctgaaaatgttttcagtcatatcaaactagtgtgctgctctacaaggccatggtccagaggcatgctcagtagtgattagaactcacccatgaggacagccaacacacaaagcttacagtgtgcttggcatggggctaaatgctttacatgtattatctcgtcttatcctctcaacaactctgatggaggtttcttaattatcatcattttccacatgtggagaatgaagaacaggaaggttaagtaacttgctcaaagcaatgcagtttgtaaagcagtagagatgagacttcaaactagttgtacatttaaccaccatatcattggtttctaaactctagcatgctctagagtcacctgtaaagcttgtgaaacctaaattgctggattccacccraagagattctgattcagcaggtctggcatgggacctgataatttgcatttct

SEQ ID NO: 324187 - DNA, 579 bp, Homo sapiens
cttctacgttaatcttcaggctgtttcttttattttgagcacaacctcaacctgtaagagcttccacaaaaagaattattctaaacttttaaattgtgctgattctttggagggttgttttgtcaggtaaaagttacattgktatctgttttatcttcatttctttttctggtttgagagagaactgaggaaaagaacaagatattgtgtagattatttttcttctggtctttggggcaagccaagatcttggttataaagaagtacagaaatcagcaacagtaatatttggagtgagggatgtgtgagctgactttacatacaggccttttttaaatggaaagagtcaacaaaatagagagcaacttggaagggggagaaaaaacaaactgaaacaaaacaaaattgctaagcagaagagccaaatatgatagaagatgagtgacagctaattaacactttccattgattttatagaagacaaagtttctgtataaaaaaatgtggaaatttgcaattaagtagaatagattggagaggagagagagagagagaaatggagcaagaacattgaaaaat

SEQ ID NO: 324188 - DNA, 547 bp, Homo sapiens
gtcgaagatcagatagttgtaggtgtgcagttttatttctgggttctctattctgttccgttggtctatgtgtctgttttgtaccagtaccatgctgttttggttactgtagccctgtagtatagtttgaagtcaggtagtgtgatgcttagagggcacattttaaatagggtatttagagttatgatgtttcatttggtgctattgtcatgagaacattttctttaattgcatttcctaactgattattgcttgtacagaaaagctaaggtattcatgtgctaattttgtagccattcacattagtaaatgtcctggggaagtaccaatttgaaacattcctcagttaccaggtcataatgtgtttgtggtaaatttttactgtcttgtgacaaagtttcaatagtttactcaaacccaaaatacaacaraaatagagaatctttcttttattgtatcattcaccaaaagtgtctctgattcaaacttagtaaatctactttatctttgtataaaacaaagatatatactttgtcatagatatatg

SEQ ID NO: 324189 - DNA, 585 bp, Homo sapiens
tttctttgtttattttattttctatgagatttctttgtattttaattattctactgagttttcaatttctaatagtttattcccaattgtcaaaatatctttcttttttttttttttcttttttcggagacggagtctctgttgcctaggctggagtgcagtgacgtgatattggctcactgcaacctccgcttcctggcttaagcaattctcctgcctcagcctcccgagtacagattacaggtgcacactatcacgcccggctaatttttgyatttttagtagagatgtggttttactatgttggccaggtatcctgacctcaggtgatccacccgccttggcttcccaaagtgctgggattacaggctttagccacctcgcccagccaaaatatctttcttatttactgattataccatctcaccatttattattaatctcctctgcatcccttctctttctttccatgtggttccccttaggcaacaatgggtaaagtccctctcagtcttcaaatcttttcagcgttccctcctgaatcgctcttactctggagaaagttctcacacattattttatctc

SEQ ID NO: 324190 - DNA, 567 bp, Homo sapiens
gtgagtttgcaaaaaggtcttagaaatgtcagtcatggtttctactccatataaaactcccctctttatatgaagcagcaaaccaacagcctctgcaggggatgcaggagcgattctgccctgtgattcctacccaatcactcatattatggtcaagctggttcagagtccacctctcagaaactggaatatggaaacactgaaraaactgtaaaaccttttagaatcagaaactgagatacagggtagagtaggactatgaagacaatagggagttccaagttacgagcaggacagaaatgctagtagcataagctaaagaaaaatacacagtccggggtgagtgggaatgcttgctagtgggtagtggagaaggtggtgacattatatatgtgtgtgtgtgtatgtgtgtgtgtgtgtgtgtgtgacatatatttatctatctatataagtatataaaatgccattatatgacatacatacactatgtcatatgactatatatatatatattgagagagagagagagagaggaagagagaaagacagacagagagaggctgactc

SEQ ID NO: 324191 - DNA, 624 bp, Homo sapiens
ctcatatgtacactaaatttcaggagcatagttacagacattcttccctggcttatgatgtgaagctcatttcaagtttacaarcttccaagaagttcaatgtggttcaagtgaaaggactccgtggtgcttggccatggagtggttactgtcactaccatggtttgacttatcaaatcctctgcctccattccttccctgtctccagggtgtagacagcctatttctaattcgcatcactgtcatctctctgcatgtcacttatttattaatggggcatacacagctgatgatttacaaaaatatgccaagtccatgagtgtgcttaaccaggacatataattatagaaaatattaccatcagctgagtaatgtattctctattctttatctccagttaatcagaaactgcatatcctgggctcagaaagtccatttcgaggtgtgaatctgattcacaataaagaatgattttcctaattctgtaaaatgaagtgatatcattgccctgttcgtgcagttttagcttggtaaaggtagccccttaaaaactaacaacgtaaaattggtgttaataacaacacctcttagagaagagttataaagcaatgcatataaaacatt

SEQ ID NO: 324192 - DNA, 624 bp, Homo sapiens
ctcatatgtacactaaatttcaggagcatagttacagacattcttccctggcttatgatgtgaagctcatttcaagtttacaaacttccaagaagttcaatgtggttcaagtgaaaggactccgtggtgcttggccatggagtggttactgtcactaccatggtttgacttatcaaatcctctgcctccattccttccctgtctccagggtgtagacagcctatttctaattcgcatcactgtcatctctctgcatgtcacttatttattaatggggcatacacagctgatgatttacaaaaatatgccaagtccatgagtgtgcttaaccaggacatataattatagaaaatattaccatcagctgagtaatgtattctctattctttatctccagttaatcagaaactgcatatcctgggctcagaaagtccatttcgaggtgtgaatctgattcacaataaagaatgattttcctaattctgtaaaatgaagtgatatcattgccctgttcgtgcagttttagcttggtaaaggtagccccttaaaaactaacaacgtaaaattggtgttaataacaacayctcttagagaagagttataaagcaatgcatataaaacatt

SEQ ID NO: 324193 - DNA, 539 bp, Homo sapiens
tatgatgcaactatgctgctataacccaaactgcactaatccctttcccagaattcagctttcaggatttaaacatttgggattgtgtctttcaggattgcatggatcctaagctagggggttgggggtagatagggatcaatagggataaagggaattatgagtaacacaggcttgtgctcagaacaaaaatctgccccaaagagaataaacaagaacaggagttggcaatttctttctgtaaaggaccagttagtaaatatttagcctttttaagccatacggtctctgtcaccactgcccagctctgctgtggtagagcaaaagcagccacagacaataagtaaacacacatggctgagttccaataaaactttatttacaaaaacaggtggcaggccagatttgactgtgggccatagcttacgagcycctgaactagtgctgtagacatgtgctaagacaacaggagagcccaagagcatgtgtctggaacttgcaaatccattcctaccttgcctacctgatacgatttggat

SEQ ID NO: 324194 - DNA, 601 bp, Homo sapiens
aatttgctaatgaatgaatgcacttcttgttcttatagcttttgtaattgcattgaartccatgtgcttgctgacagtttcagcaaacgttccgggaactgaagctggccaggttacagagggctcagcctccttgggtgaccatgctgagggccttgatgacctgtgaggcatggccaggatgctgattttcttggtgtctctatctgtgctgcttttctcagcgtcctcccgtccactgcagccaggaggatctgggtcagcccaacaggagaatgtgctggcagccaggggttctggacctaggacatttttggaatgggctttgcagtgctagaagagagtgcattctgttctgtctgcaggatgggtgatgagggagtcagggggaagtataagggagaaggggacagagatgactggcgagtggcagaagttgcatgtttcatattcagtcgtgtttataagcatttgctccagctccccccatccttggatatgccctctctctcctccgcctgtgcagatcctagacacccccctcctatgtatccccccagatctctgcaactccgtgtttcatagctacgatgaagcactt

SEQ ID NO: 324195 - DNA, 601 bp, Homo sapiens
aatttgctaatgaatgaatgcacttcttgttcttatagcttttgtaattgcattgaaatccatgtgcttgctgacagtttcagcaaacgttccgggaactgaagctggccaggttacagagggctcagcctccttgggtgaccatgctgagggccttgatgacctgtgaggcatggccaggatgctgattttcttggtgtctctatctgtgctgcttttctcagcgtcctcccrtccactgcagccaggaggatctgggtcagcccaacaggagaatgtgctggcagccaggggttctggacctaggacatttttggaatgggctttgcagtgctagaagagagtgcattctgttctgtctgcaggatgggtgatgagggagtcagggggaagtataagggagaaggggacagagatgactggcgagtggcagaagttgcatgtttcatattcagtcgtgtttataagcatttgctccagctccccccatccttggatatgccctctctctcctccgcctgtgcagatcctagacacccccctcctatgtatccccccagatctctgcaactccgtgtttcatagctacgatgaagcactt

SEQ ID NO: 324196 - DNA, 491 bp, Homo sapiens
ggctatacaaagaattatctgggacacttttgaaaatacagatttcatcccaaacccaggctagcgaatgagaatatctgtctttagaaccttcattctctgagatttttgcaaagtgctcagctgggctagaggtagtcctctctgccctggcctgtgatctgcactgggtcaccactgaatccacaaagccatagccagggtatattagacagccatttggaacctgcctgctttttttctaaaacatgccttttgatatcctaagatatcttcctagttcttgccgtcatcacatcwcatctcactacttctgaaatattgccattatccctgattcgatttttaaaattcagattattttttcctagatattcaaggtactaagctcttttcataattgtaacacatattaaaagacctgagtcatataagcaaggtcataaggcagtaacagagtagaaaataatgatgatgacaattggaaaaaa

SEQ ID NO: 324197 - DNA, 597 bp, Homo sapiens
cattgccaaactcatgctaatctagatttttctcctatgttatcttctaggagttttataattttgtgttttagaatccactttgagttaatttttgtgaagagtataaggtctgtgtctaggtttatttatttttgcatgtggatgttcagttgttatagtactatttgtagaaaagactgtttttgctccatcgtcttgcctttgctcctttgtcaaagatcagttggctctatttatgtaggtctacttctgggctcctcattctgtttctttgacatgtttgtctgttgttttaccaataccacactgtcttgattactgtagctttatagtaagtcttgaaatctggtaatatctgtcctccagctttgttattctccttcaatattgtgatggttattgtgagtcttttgcctttccatagaatcagtttgtcaatatacactaaaataacttgctggaattttgattggggttgcayttaatgtatagattcagatgggaagaactgccagtatttagcctctctatccatgaacatgagatgtctctatttatttagttctttgatttttttcatcagagttttgtcat

SEQ ID NO: 324198 - DNA, 640 bp, Homo sapiens
gtgactcaattgctcctgaaaaaggcactggaatcaaacacagacacactgggttcacagttcaaagacacacattgttcacggttgagccttcagactgtttctgcctcccttgtcctctggtatggcagtcaccacagcctcccagtgacggatgatggttccttcttctcccttactctggaagcctgtgggaggcaccctactggtgttagcttcccatgcccagtgcccccagatcactgctgacacatagcagtctcttgatacgtgtttgaagattgaatgtctgccatgaattctgatctagggctgccttatctgtaaaatagaatgaagccctgccctgcttagttcacaagatcattttgagtaggaagaaaaggaggggaagtgctttgtagttgtaagcactatagaaatatkatatactatatgatattgtgtatataatgatgctttcctaactactctctttgaggctagaaactgtcttattttgacaccaatgtgcacacttgactactaatattctgttggctgatgtcatacttttagtaaaatttatgcaaatttgttaattaattataattaatataatattaagatcattcctttctatactgttagtatatgtaag

SEQ ID NO: 324199 - DNA, 552 bp, Homo sapiens
tcatttcttagagtttgcaatacacrtttacaaataatataaacccattttgaaacaacacttaccacttcagaatagtatgaatagcttataataacaatcctaaatcctccctcccatttcttgtatcattgctgtcactcatttcacttacatataagcatacatacatatatatacacacataagatagatacataagcatatataataaaatacattattgctgttgttattttgaacaaattgtaatctcaggccaatcaaaaataaggaaaataaagaattttaatttaccttcactcattatttaatcaatgctcttcctttcttgctataaactccagtttctgacttaaattattcatcctctccctaaagattttcttttaacatttcttttcttttgaaaatagaatcatgctttgtcattcaggatggaatgctgtggcataatcaacactcactgcacctcaacctcctgggctcaagcaatcctcccacctcagcctcccaaggagctaggactacaggcacttgctcactacacct

SEQ ID NO: 324200 - DNA, 552 bp, Homo sapiens
tcatttcttagagtttgcaatacacgtttacaaataatataaacccattttgaaacaacacttaccacttcagaatagtatgaatagcttataataacaatcctaaatcctccctcccatttcttgtatcattgctgtcactcatttcacttacatataagcatacatacatatatatacacacataagatagatacataagcatatataataaaatacattattgctrttgttattttgaacaaattgtaatctcaggccaatcaaaaataaggaaaataaagaattttaatttaccttcactcattatttaatcaatgctcttcctttcttgctataaactccagtttctgacttaaattattcatcctctccctaaagattttcttttaacatttcttttcttttgaaaatagaatcatgctttgtcattcaggatggaatgctgtggcataatcaacactcactgcacctcaacctcctgggctcaagcaatcctcccacctcagcctcccaaggagctaggactacaggcacttgctcactacacct

SEQ ID NO: 324201 - DNA, 552 bp, Homo sapiens
tcatttcttagagtttgcaatacacgtttacaaataatataaacccattttgaaacaacacttaccacttcagaatagtatgaatagcttataataacaatcctaaatcctccctcccatttcttgtatcattgctgtcactcatttcacttacatataagcatacatacatatatatacacacataagatagatacataagcatatataataaaatacattattgctgttgttattttgaacaaattgtaatctcaggccaatcaaaaataaggaaaataaagaattttaatttaccttcactcattatttaatcaatgctcttcctttcttgctataaactccagtttctgacttaaattattcatcctctccctaaagattttcttttaacatttcttttcttttgaaaatagaatcatgctttgtcattcaggatggaatgctgtggcataatcaacactcaytgcacctcaacctcctgggctcaagcaatcctcccacctcagcctcccaaggagctaggactacaggcacttgctcactacacct

SEQ ID NO: 324202 - DNA, 617 bp, Homo sapiens
atgcttgctctttctcttcaatctgtatttgttttttgttctttgccttttagtatgccttgtaattttttttttttttttgagagccagacatgtattggataaaagkagctgctgtaattaggccttttgtaatgtagtggtgaaatgttgggagagtgtaaatgttctacagtcctataattaggtctcagtcttttggtgaacctatgcctttggactgtaaccttcacaaatgtttctgatttcccactcttaagtgggggcaggatggctagatgggctatagttgagtatttctctgctctcatgtggaagctaaagttggctgcagttgtgcattttctctttcacaggttagttagactatgttaaaaccctgtcaagttaggctctatttcattcctcttcagggtagacctcattaagcagaatgcagtgccatgcatacttcaaaatggtttcttttcccctccccttgctagaagcattgggggatttttctccaatatttagaatgtgaacctggtcaaccttgagagataagaatacaaaagcatgggggctccctataactggaacttcatggaatttttaactctcagacttgttcacac

SEQ ID NO: 324203 - DNA, 640 bp, Homo sapiens
cttgctctttctcttcaatctgtatttgttttttgttctttgccttttagtatgccttgtaattttttttttttttttgagagccagacatgtattggataaaagtagctgctgtaattaggccttttgtaatgtagtggtgaaatgttgggagagtgtaaatgttctacagtcctataattaggtctcagtcttttggtgaacctatgcctttggactgtaaccttcacaaatgtttctgatttcccactcttaagtgggggcaggatggctagatgggctatagttgagtatttctctgctctcatgtggaagctaaagttggctgcagttgtgcattttctctttcacaggttagttagactatgttaaaaccctgtcaagttaggctctatttcattcctcttcagggtagacctcattaagcagaatgcagtgccatgcatacttcaaaatggtttcttttcccctccccttgctrgaagcattgggggatttttctccaatatttagaatgtgaacctggtcaaccttgagagataagaatacaaaagcatgggggctccctataactggaacttcatggaatttttaactctcagacttgttcacactgatcctccaacaatttatcaattaa

SEQ ID NO: 324204 - DNA, 617 bp, Homo sapiens
atgcttgctctttctcttcaatctgtatttgttttttgttctttgccttttagtatgccttgtaattttttttttttttttgagagccagacatgtattggataaaagtagctgctgtaattaggccttttgtaatgtagtggtgaaatgttgggagagtgtaaatgttctacagtcctataattaggtctcagtcttttggtgaacctatgcctttggactgtaaccttcacaaatgtttctgatttcccactcttaagtgggggcaggatggctagatgggctatagttgagtatttctctgctctcatgtggaagctaaagttggctgcagttgtgcattttctctttcacaggttagttagactatgttaaaaccctgtcaagttaggctctatttcattcctcttcagggtagacctcattaagcagaatgcagtgccatgcatacttcaaaatggtttcttttcccctccccttgctagaagcattgggggatttttctccaatatttagaatgtgaacctggycaaccttgagagataagaatacaaaagcatgggggctccctataactggaacttcatggaatttttaactctcagacttgttcacac

SEQ ID NO: 324205 - DNA, 590 bp, Homo sapiens
tttcttttactgtcataatttctgcaaatgtggtttcagttttagcactccctacacattttctacttggsgtgtaacagtctattgtcagcaaaataaaagctaggtcttaagtcaatgtgaattattggacctgaatttgtgtgcatgccgacacatatacacaccatgcacacacatatgtatatttttaaaaagataaatgcatatatatctgcatatttaatggatgagaagacttttcttctttatatcacttgtgaagagctttgttctcatatgctgatttggaaatctcagaatattttttgatcctagtattcaataatgagtaatcaatcatgaaacctctgttgaagtttatattctaaaatcgtcatttatttttaaaaattcatttgaaaacatttagttgtggctataagttgttagtagaaaaaattagaactgaaactcacttgttaccagaactaaagaaaaaaggcaaaaaggattttatctctgctttgcatccataagggaaatgaacataactaatattcggtggaacttttatgtaaaaatacagctcttgaatttgtgaaagcaaa

SEQ ID NO: 324206 - DNA, 492 bp, Homo sapiens
cgacacatatacacaccatgcacacacatatgtatatttttaaaaagataaatgcatatatatctgcatatttaatggatgagaagacttttcttctttatatcacttgtgaagagctttgttctcatatgctgatttggaaatctcagaatattttttgatcctagtattcaataatgagtaatcaatcatgaaacctctgttgaagtttatattctaaaatcgtcatttatttttaaaaattcatttgaaaacatttagttgtggctataagttgttagtagaaaaaattagaactgaaactcacttgttaccagaactaaagaaaaaaggcaaaaaggattttatctctgctttgcatccataagggaaatgaacataactaatattcggtggaacttttatgtaaaaatacagctcttgaatttgtgaaagcaaatataagccaacactccttttttttwaaaaaaaaaattggttattacctaattt

SEQ ID NO: 324207 - DNA, 457 bp, Homo sapiens
caatcctctgaaaccctgtcactgctttatcaactaagtttatgtaattttctaatttccttgttgwcatttcaaccatgtttatagcatcttctccaggagcagatttcatctcaagaaaccactctctttgctcatccgtaagagtagttctttatctattaaagtgttattatgagattgcagaaattcaatcacatcttcagattccagttctaattctagttctcttgctattctcactacatctgcagtgatttttctccaccgaagtcttaaactcttcaaaaccattcatgacagttggaatgaacttcttccaaactcttgttaatgttgatattttgacttcctcccatgaatcatgaatgttcttaattgtatctagaatggtaaatccttctgagattttcaatttactttgcccagatccatcagaggaatgatccatcactat

SEQ ID NO: 324208 - DNA, 457 bp, Homo sapiens
caatcctctgaaaccctgtcactgctttatcaactaagtttatgtaattttctaatttccttgttgacatttcaaccatgtttatagcatcttcwccaggagcagatttcatctcaagaaaccactctctttgctcatccgtaagagtagttctttatctattaaagtgttattatgagattgcagaaattcaatcacatcttcagattccagttctaattctagttctcttgctattctcactacatctgcagtgatttttctccaccgaagtcttaaactcttcaaaaccattcatgacagttggaatgaacttcttccaaactcttgttaatgttgatattttgacttcctcccatgaatcatgaatgttcttaattgtatctagaatggtaaatccttctgagattttcaatttactttgcccagatccatcagaggaatgatccatcactat

SEQ ID NO: 324209 - DNA, 457 bp, Homo sapiens
caatcctctgaaaccctgtcactgctttatcaactaagtttatgtaattttctaatttccttgttgacatttcaaccatgtttatagcatcttctccaggagcagatttcatctcaagaaaccactctctttgctcatccgtaagagtagttctttatctattaaagtgttattatgagattgcagaaattcaatcacatcttcagattccagttctaattctagttctcttgctattctcactacatctgcagtgatttttctccaccgaagtcttaaactcttcaaaaccattcatgacagttggaatgaacttcttccaaactcttgttaatgttgatattttgacttcctcccatgaatcatgaatgttcttaattgtatctagaatggtaaatccttctgagattttcaatttactttgcccagwtccatcagaggaatgatccatcactat

SEQ ID NO: 324210 - DNA, 591 bp, Homo sapiens
ttgcaatatcttttgggtatgcctgtatgataaaaatggaccatggggactggcacaaaatgtgcttgctttgaagcttaaagagagtttagagttagtgtgtagttcttccaagggaacttctctttggaatggagagtaygactttaagttttgagtcctactgccatttcctgggaggtagtaagctgaagtcatatagctggaaactctgccaaaataagattatttcttccactatagtgttttgtcaggaagaacttgaaaaatgaattgaaactggaaatcaagtacaactgacaataaagaatattgccccattaggaacacaacaaaccatttgcagttaatggagtcttgattctgtattttcttgtgtttaagtattgggctctagcccagagaagccaaattcaaaaaaaactaaatgccagatatgaatagacccttgatcacaagcaatttatttcaacatttgttgtaatgatggacttacattttacttggtcctttttacttaattggcaattattaactctcacatattattaactaataaagttatacgatctttccagtaactaattcata

SEQ ID NO: 324211 - DNA, 384 bp, Homo sapiens
atcaggcagagactcttgctcttttctcttactttctcccaaagacactgggtctctctctgttctgatccacttggaactggaggtgacatgwcacaggcacccttgtggccaccaccattaaaactgtgcctcatcagactttaagcagcacagcattgtgtttcactcaaggcctactctagccactccctggttactgtctatgttcactcaaggcccttgggctctacaatccataatggcaaaggctgccaagcctgtatccttcccttcagggcagtaagttcccgtagtccctgagaaggtccagatgtgccatccaggagccagggaccacagtcaaaaaccttagaaatataactggtgttctattgtactgca

SEQ ID NO: 324212 - DNA, 607 bp, Homo sapiens
gctgcagtgagccatgatagcttcactgcattccagcctgggcaacaacagagtgagaccgtgtctcaaaacggaaagaaaaaataaatagatatggagatcaggaaaaaaaaaaataatcctgccagatgtggtggttcacatctgtaatcccagcactttgggaggccaaggcatgaggaacacttgagcccaggagtttgaaacgagcctgggcaacacaggaggacatcatcwctaccaaaaaaaaaaaaaaaagaaaaaaaagaaagaaaatttaattagccaggcatggcagcatgtgcctgtattcccagctacttgggaaactgaggaaggaggatcgcttgagcccaggaggtgcaggttacagtcagtcattattgcaccactgcactctcagcctgggtgacagagcaagaccttgtctcaaaaaaaaaaaaaaaaaaagccactttgatacagcgctaaatgaagccctcactcaggagttgatatttagggtgagatctaaaatgtgtgaagagccaggaaagaacattcagattaattgaccaatatgttcctgtggatcaaattctttaattctttcttcagtttaacaatt

SEQ ID NO: 324213 - DNA, 587 bp, Homo sapiens
taaagacagaacatctcaaagatgtgtgtagaaggatgtttactatagcattacttacaacaggaaaataaaactaactgtcccatataccaaattggtaataaataatagtaactccacatatggaatccaatgcaactgtgaaagcaagttttttttattagtaagaagatgtaaagataatataaacacgaagtaaagaaaacaagtgacaaaaaatctttacacgatatgattccarttttaagtggttatataaaatgggcagtgaatacaacaaaatgttaagagtggttaatggctgaattccttttttaatctcaaggcaattaatacttacctgagtgttccttcagtgccaatatgataaactgggaaaatgtgttggaggacacttgtcaatgactgcctctcccatggaaaggacaggtcttgtctcatggaggatggttctcttttaacagagccttcctgaagccaatgcctgaagtacaaagcatagtgaaaggccagtagcacagacattttgaaggtttcacagatcataccaagaaagaactgaggctttagttagtgtttactatggt

SEQ ID NO: 324214 - DNA, 578 bp, Homo sapiens
aaaactatcaagtggcacgcaagtggtataaggtataattagtcacaatactagcatggaactctcagaatattaagattggacatcaaattcttccaagaagctcctcaagagtcattctcaaggagtgtatcatacaatcccagagacagttgctccagctgtggcctgacattagtgatgtgccattagggcaaggcatcgagtttgcatccctgtgcaacacaccatgtggtgccgactaccaccgactaatggacaccaactgaggtgggytggataacagcactcatacaacccaaattcccccctggaaagccatctgtagaacttactctgatattctggaaataaggcgtttcctaggttcacaacggagaacttaggtgagtaatgatggtgcccactacataccattacatgttaggcccctcataaatatcttctgtaagcctcacagtgtccctgctattaccctactttacagtttaaaaatgtgaggctcagggaggtttagaggctttcccaccagttaaggtacaaagagcaaattaagggatgatgacacagttttttgt

SEQ ID NO: 324215 - DNA, 578 bp, Homo sapiens
aaaactatcaagtggcacgcaagtggtataaggtataattagtcacaatactagcatggaactctcagaatattaagattggacatcaaattcttccaagaagctcctcaagagtcattctcaaggagtgtatcatacaatcccagagacagttgctccagctgtggcctgacattagtgatgtgccattagggcaaggcatcgagtttgcatccctgtgcaacacaccatgtggtgccgactaccaccgactaatggacaccaactgaggtgggctggataacagcactcatacaacccaaattcccccctggaaagccatctgtagaacttactctgatattctggaaataaggcrtttcctaggttcacaacggagaacttaggtgagtaatgatggtgcccactacataccattacatgttaggcccctcataaatatcttctgtaagcctcacagtgtccctgctattaccctactttacagtttaaaaatgtgaggctcagggaggtttagaggctttcccaccagttaaggtacaaagagcaaattaagggatgatgacacagttttttgt

SEQ ID NO: 324216 - DNA, 579 bp, Homo sapiens
  misc_feature (1)...(579): n = A,T,C or G
taattccatctgatcattccataatactgaatgacaaaagagttgcaaaacgttatatatagtagacaccaagtggagatatgaattggatatataaacatggagctggaagagatgtgtgctgaaagatacatttggcagttatctgaatacattttttgaaagcatgagtattcacagtcatcaaggagagttagtagtgaagaaaacccaatttagaaccctgggatttccaacacttacagatcaaattgagagagagagaatcaagcaaataaaatccasaaaagcagcctcactagtaaagagagagagagggaagtaaggagagctctcatgtggcttgtgttcactgattcctactctaaatgtgtgcatgagaggtcatnangcccaaagctatgtcagccagttggaagcatgagggtgcgcggttgtggatataaagccaatatgctaagggtggaggatgaggagagagaaaacatgacattttatagccaactaatccagagactcactatatctataattctgttatatgcggatagcgtgtgttttgtgatgtcattggtagtt

SEQ ID NO: 324217 - DNA, 542 bp, Homo sapiens
ctcttatattgttacgtttaaagttttgattcccttgtaagttatttttgtgaaaagagtaaaggaaacatccagttatatttatttttcaaayggctgaccattatcccatctccatttatttaataatccctttttctctgttttgaaatgctatctttactgacatgtattcctgtataaggatttgtcagtctttattaaatgaattgaattcaagcatggctaaaatcaattactttttcatggttgtcttaggacctgggatcagattgggacagtcagtatctaacttatttatctatttattattttaaattatttcacatctaagtctttacagtgttctaaacagccacctcccccaaaataggtccaatacttatgatgtatataaacaatgaggaaataattagagagccagtttatacactcccttaaaataccaggaggattaattggctagtgatgagataataaatctccaactgataattaaatattagtgttctgtgtggatatatggagtaagtgcatgcaag

SEQ ID NO: 324218 - DNA, 542 bp, Homo sapiens
ctcttatattgttacgtttaaagttttgattcccttgtaagttatttttgtgaaaagagtaaaggaaacatccagttatatttatttttcaaatggctgamcattatcccatctccatttatttaataatccctttttctctgttttgaaatgctatctttactgacatgtattcctgtataaggatttgtcagtctttattaaatgaattgaattcaagcatggctaaaatcaattactttttcatggttgtcttaggacctgggatcagattgggacagtcagtatctaacttatttatctatttattattttaaattatttcacatctaagtctttacagtgttctaaacagccacctcccccaaaataggtccaatacttatgatgtatataaacaatgaggaaataattagagagccagtttatacactcccttaaaataccaggaggattaattggctagtgatgagataataaatctccaactgataattaaatattagtgttctgtgtggatatatggagtaagtgcatgcaag

SEQ ID NO: 324219 - DNA, 542 bp, Homo sapiens
ctcttatattgttacgtttaaagttttgattcccttgtaagttatttttgtgaaaagagtaaaggaaacatccagttatatttatttttcaaatggctgaccattatcccatctccatttatttaataatccctttttctctgttttgaaatgctatctttactgacatgtattcctgtataaggatttgtcagtctttattaaatgaattgaattcaagcatggctaaaatcaattactttttcatggttgtcttaggacctgggatcagattgggacagtcagtatctaacttatttrtctatttattattttaaattatttcacatctaagtctttacagtgttctaaacagccacctcccccaaaataggtccaatacttatgatgtatataaacaatgaggaaataattagagagccagtttatacactcccttaaaataccaggaggattaattggctagtgatgagataataaatctccaactgataattaaatattagtgttctgtgtggatatatggagtaagtgcatgcaag

SEQ ID NO: 324220 - DNA, 542 bp, Homo sapiens
ctcttatattgttacgtttaaagttttgattcccttgtaagttatttttgtgaaaagagtaaaggaaacatccagttatatttatttttcaaatggctgaccattatcccatctccatttatttaataatccctttttctctgttttgaaatgctatctttactgacatgtattcctgtataaggatttgtcagtctttattaaatgaattgaattcaagcatggctaaaatcaattactttttcatggttgtcttaggacctgggatcagattgggacagtcagtatctaacttatttatctatttattattttaaattatttcacatctaagtctttacagtgttctaaacagccacctcccccaaaataggtccaatacttatgatgtatataaacaatgaggaaataaytagagagccagtttatacactcccttaaaataccaggaggattaattggctagtgatgagataataaatctccaactgataattaaatattagtgttctgtgtggatatatggagtaagtgcatgcaag

SEQ ID NO: 324221 - DNA, 470 bp, Homo sapiens
ttttgtttgacagaagtatagtcacctctgctctcatttggtcactatttgtacagaatatctttttctatcacttcacttttagcctatgtgtatccttaaatctaaaatgagtctcttgtagacaacatatagttgggtctcttaaaattaaccatttaatcactctatgtcttttgattggggactttaatccatttatatttaaagtaattattggtagagaagaacttacaattgccgttttgttgtttcctgcttagtagttcttttgttcttttttctcctctcgatgctcttcttggcattttatagattttttttgtagatatagwctctatactctctctctttttcttttttgtatcttctgtatgtatttttgtgtgtggttaccataaggcatatgtaaaatattttattactaaaaccatccattttaagctgataacaacttagaagtattaagt

SEQ ID NO: 324222 - DNA, 608 bp, Homo sapiens
aagaaatactaagtaaataagtgagagaccactgtttttacctatcaaatttacacatttaaaacaactgaaaagacctactaatggcaaagtatggaaaaagtgtgaagtggaagtacaatgggtacaaaccttcaggaaaacaatcttgcaatacttaatttttaaaaatgcatataaccatagacccaatgaaggcattaaatatacaaaattatttgacaggtatacaaaaatatatgtacaaggatacctggttgcagcactgtttaatacagtgaaaaagacaaaagaaaagacaaaaragtaaagaaaaaagaaagagagaaaggaagagagagaaaaagaaagcaagaaaaagaaagaaggaaggaaggaaggaaggaaggaaagagagaaagaaagaaagagaaagaaagaaaaagaaagaaagaagcaagcaagcaagcagggggagggaggaaggaagaaaggaagggatctaaattatctgtaatagggattagtctaataatttatggtctagctgaacaatggaatactatgaggctaataaaaataataatttactgctgtgaaaagatgccttccatataagaagtgaaaag

SEQ ID NO: 324223 - DNA, 521 bp, Homo sapiens
aaaaaatatttactttatcaactattcttggattatttaagcactaaattaatcactgtctaagcagaaaaatataggatcattttagacttgcaagaaggtgaaatttaaaacaggaaattaaatttattacaaagttgttaggagagttagaggaacaaaaaaggaaagattaattacccaatgaaggtaaatgagggttagagaagcaaaagaaaaatgatattacctgatgcctatgtttgctacgattctgaggctgctgtagctggaaggaagttgactaagcagttactcttctgctaagcatctactctcacaggtggctgccaccatgacagctaaatctaccatggctggttgaaccgacagaaattagaaacaaattgcttctattycactaactgtccagtctcttgtcagtgcctcacattagcaggaacaaacaggaagccagatggcaaggagattatgaaatatagcttgcagacttccagccccaaagataagtgtatacaggg

SEQ ID NO: 324224 - DNA, 545 bp, Homo sapiens
cctccacactccagaacaactaattgccaacgaggagttagtgatgcaatggcaaggtgggtggctttgtatgaacaagaacaaacaaggatcttgcctgaaggacacatacattccaccaactcctatgccaggagactcatttcctttcaaataccacccattttacagaacgtgtcagtgccctgagtaagccccaccagctctgtgtctttagtttccaaaccgggctgaaacagtgggtgtttaatcattgtttttatgagctcctgtatgtcagcactttgacagatgttttaaatagatcaactcatttaatgcactagtacaaacatgtgaaatatccccattctactggtgtgaaaactgaggccaggagaggtcaaattggaaattctacatccctgatcagagccactaaccaagatgcaaaaagcaacgaagaacctscacagctagtaactgacaacacgtaggtctttgttagtggccaacttatttgaccggagcatccttatggttattgaaggaaggttgtacattat

SEQ ID NO: 324225 - DNA, 626 bp, Homo sapiens
cacttgttgttattttcagcaagaaaaatcaaaagaatgcatgcacatggttaaaaagtaaaaacatgagagcagagggaagaaaataaaaagtaaaagctccttctcaccccmatttcatcttcagatcctctctccaaagacaactgccaataaagcatctcttctgtcttttgtacaaacaagtttacactccgagaactatgccacttgtgtctccctttgttattggtatatactatttcatggatacctaaacccctatagtgcatctggacctgattcaaaggttttgatggacaaccagtgctattattaatgaaatattgataataaaaactcacctttattaggcattaattatgtgccactcactcatctaagcactttatatgtatttattcatttaattctcacaaagttcacatttggtattcggttgggtacctcgctttgcccaccatctccccaatccactgtgcacctgacctgcaggaagagcagcagcagcagctctgttgtctctggcttccatgtggggtcagcccatgggtggcacggagggtggagagcaaagttggttgtttggcctctcacctgctgttgctccctttgtgggccagctc

SEQ ID NO: 324226 - DNA, 521 bp, Homo sapiens
ctaataaggagtcctttgtgcccagctgttataaaacaggatttttcacaagcatttactctctccccacaatgaagccttaaagtgcaaaagttcaccctgagcattgcccactgcttttctttaaaccttccaagagacacacaaggctcttatttttcagggcccatctggccataaattgcaatagacattaatttatgaaaacaaatgacaccagcctactccacgacattttcaaatgggagtattagggcagggcaataaagcaggaataaaataaaaacactcagaccctgtagctgccctggcaatgccccaagccacacagggaccctcaatatccctgttccaacacactctgctcttgcaaagttacggttatttgatcataagacatgaaattcrcttttttggccagagtgtggcaggaaattaaacatatccaagcctttctccatgtgaccagaatcaccattctacctgcagagtttacatcaatggtgataaccacagataga

SEQ ID NO: 324227 - DNA, 574 bp, Homo sapiens
tacggcagcacagtgtaaggttgaacactagctcaacaagttaatagggataggattcctgcgatggcagagtttctccagaggtcacttgactgttactcagactctaagaagagctgttgtcagcccaaatatggccatgctctgttcttatgactatgacttgttcctgcgatttgtaatatttggaatcagcatcctttgagaattagaacttacgacaaattttctttcacctctttcttcttctcagactctttcctattcgttcctgcttcaagacttttgtacttgctgcccttgtgcctaaaatgctcttgtatcagctctttacctggctgatttcccttcacccttctggtcatagattaaatatcatctcctccaacaggccttctcttatggccgcatctaaagcaaagacaattccctatgagattctatcccattactctgtttgtttacataatagcaattaacacattatcaaattttaataattatcwgattatcaaagaggaactcaaaagggaaattagaaaatattttgaactaaatgaaaataaaaatttgt

SEQ ID NO: 324228 - DNA, 468 bp, Homo sapiens
gataccataatcatcaagaaagtgmaaaaagaagagtaaattaaatccaaagtaaacaaaaaagaaatgataaaaatcaaaacaaaaatctatgaactataagagtaaaacaatataaaaaattaattaaacaatgaaataatagttgtttctttaaaaacatcaataatcaacctcaatcagactgatcaggaaaaatcagagagcaagaaaggacacaaattaccagtatcaggaatgagaggtagcatcactacagattctaccatatgaaaaggacaataggaaaatattatatataactttatgccaataaattgacaacctaagtgacaggcaaattttttgaaagatattgtgttaatctgttctttgtgttgctatataaagaaatctcagaaactaggtaatttataaagaaaagagatttgattggctaatggtgcttcaggctgtacaagcatggca

SEQ ID NO: 324229 - DNA, 468 bp, Homo sapiens
gataccataatcatcaagaaagtgcaaaaagaagagtaaattaaatccaaagtaaacaaaaaagaaatgataaaaatcaaaacaaaaatctatgaactataagagtaaaacaatataaaaaattaattaaacaatgaaataatagttgtttctttaaaaacatcaataatcaacctcaatcagactgatcaggaaaaatcagagagcaagaaaggacacaaattaccagtatcaggaatgagaggtrgcatcactacagattctaccatatgaaaaggacaataggaaaatattatatataactttatgccaataaattgacaacctaagtgacaggcaaattttttgaaagatattgtgttaatctgttctttgtgttgctatataaagaaatctcagaaactaggtaatttataaagaaaagagatttgattggctaatggtgcttcaggctgtacaagcatggca

SEQ ID NO: 324230 - DNA, 468 bp, Homo sapiens
gataccataatcatcaagaaagtgcaaaaagaagagtaaattaaatccaaagtaaacaaaaaagaaatgataaaaatcaaaacaaaaatctatgaactataagagtaaaacaatataaaaaattaattaaacaatgaaataatagttgtttctttaaaaacatcaataatcaacctcaatcagactgatcaggaaaaatcagagagcaagaaaggacacaaattaccagtatcaggaatgagaggtagcatcactacagattctaccatatgaaaaggacaataggaaaatattatatataactttatgccaataaattgacaacctaagtgacaggcaaattttttgaaagayattgtgttaatctgttctttgtgttgctatataaagaaatctcagaaactaggtaatttataaagaaaagagatttgattggctaatggtgcttcaggctgtacaagcatggca

SEQ ID NO: 324231 - DNA, 500 bp, Homo sapiens
tagaaaaagaaagcaaacatctaagtacattcagggatctctgtaacattcagacacagaatgttagaacttagaaggatcttaggcaatatggttcaatycttgccagcttcacaagttgtagcattagctaggtgagcttggacataccatttacactctctaagtttcattcagtgacagagccaggtttgggacccagatattctgatacttttcttccatgaagcctttccaattacataacctacaagtgtgctcactctttagtgcaaatgtagaaaaacaagctttgtgtccatcgggcatgagcagtgtaccccctattgaaagtatttttgccagacttggttgctcatgcctgtaatcctagtgactcagaggctgaggtaggaggatctcttgaggccaagagttcaggaagagcctgggcaacatagagagacccaaaatctaaaatcaataaatcaataaactatagtcaggtgtggtggggtgca

SEQ ID NO: 324232 - DNA, 500 bp, Homo sapiens
tagaaaaagaaagcaaacatctaagtacattcagggatctctgtaacattcagacacagaatgttagaacttagaaggatcttaggcaatatggttcaatccttgccagcttcacaagttgtagcattagctaggtgagcttggrcataccatttacactctctaagtttcattcagtgacagagccaggtttgggacccagatattctgatacttttcttccatgaagcctttccaattacataacctacaagtgtgctcactctttagtgcaaatgtagaaaaacaagctttgtgtccatcgggcatgagcagtgtaccccctattgaaagtatttttgccagacttggttgctcatgcctgtaatcctagtgactcagaggctgaggtaggaggatctcttgaggccaagagttcaggaagagcctgggcaacatagagagacccaaaatctaaaatcaataaatcaataaactatagtcaggtgtggtggggtgca

SEQ ID NO: 324233 - DNA, 614 bp, Homo sapiens
tagaaaaagaaagcaaacatctaagtacattcagggatctctgtaacattcagacacagaatgttagaacttagaaggatcttaggcaatatggttcaatccttgccagcttcacaagttgtagcattagctaggtgagcttggacataccatttacactctctaagtttcattcagtgacagagccaggtttgggacccagatattctgatacttttcttccatgaagcctttccaattacataacctacaagtgtgctcactctttagtgcaaatgtagaaaaacaagctttgtgtccatcgggsatgagcagtgtaccccctattgaaagtatttttgccagacttggttgctcatgcctgtaatcctagtgactcagaggctgaggtaggaggatctcttgaggccaagagttcaggaagagcctgggcaacatagagagacccaaaatctaaaatcaataaatcaataaactatagtcaggtgtggtggggtgcacctggagttccaactacttgggaggctaaggcaggaggactgcttgagcccaagagtttgaggctgcagtgagctatgattatcactgtactccagcccaggtgatgaaacaaa

SEQ ID NO: 324234 - DNA, 493 bp, Homo sapiens
tatttcaacaacaatcagcatgggactcactttcatgtttctctcccttctctagcagccttcagattctaggaagatgatgygtataaaagaaaaaaaaaggcatttctcaatgatctttttagtacaaagaaaagtgatgggagacatttaagacaaactgcccacttcccgcacaatatgaggcaaaacaccaacttcaggggacgggagaatggaaatcttagctcttccctatcacctcccagccagtgggaagtcagaaagaatggtgactcctcacgcttacagagggcagtgttatttcaaagactatggtgagttccccagctctcagcaagggtaccatctcaccactccccttggtgccctcgatggagcttctcaatcaacaccaaaggagacgcgatctttagggaaactccaagcctcaggaactacctcattaaactggtgtcttagctgaagagacagtggtgggggtgaattggca

SEQ ID NO: 324235 - DNA, 493 bp, Homo sapiens
tatttcaacaacaatcagcatgggactcactttcatgtttctctcccttctctagcagccttcagattctaggaagatgatgcgtataaaagaaaaaaaaaggcatttctcaatgatctttttagtacaaagaaaagtgatgggagacatttaagacaaactgcccacttcccgcacaatatgaggcaaaacaccaacttcaggggaygggagaatggaaatcttagctcttccctatcacctcccagccagtgggaagtcagaaagaatggtgactcctcacgcttacagagggcagtgttatttcaaagactatggtgagttccccagctctcagcaagggtaccatctcaccactccccttggtgccctcgatggagcttctcaatcaacaccaaaggagacgcgatctttagggaaactccaagcctcaggaactacctcattaaactggtgtcttagctgaagagacagtggtgggggtgaattggca

SEQ ID NO: 324236 - DNA, 621 bp, Homo sapiens
gatgaagaaataccacagacaggtgaaggaattcattcacaatctcatggtgtgaggatcacttgatggttaggagttatggttgcagacagaaatgaacgggcctgaagaatggaagaaacaggtgagaaagccaagatgctgatttctactgagttttagaaaccatgatcaatagtattagtgactcttaaggagggcgataaaagggacagagtccaggatgttcccagatttctagcatgggagactggttacatctcrgtgacatgtattaagatgggagataccagagagggaacaggtcaagagtttgagactatgtgtcttatttgagaaggaaattcagttgcaacacccaataatcaattagggttggaacccaggagacaggttccgatttgagagacaacatgtactgtgggtgacaatcaaagccatgggaatggatgaggtctttgagaaagaatttgtaaaagggagtggagaacagagcatctgaaagagatgggtgcttgaggggcagagagagaaaaaagaaatggggaaactgaggagtggccacttgggttgggggtagaacctggaatagaatgttggagtcaagaatagctcactgca

SEQ ID NO: 324237 - DNA, 554 bp, Homo sapiens
ctgcactgcaagcaggtgtggttcagctggggctctgggagaggccagcagaccaaggggtgcacaagagccctgtctgatgggcaaaacctcccctcacagttcaggtctgacagttcccctagggctaaaatcttctatgggaagaaggcaagcctaaggggatgggcatctacagccaasctctgctacagatgctcctgcaccaaaccctctgggctctacagggactagagtactgtccctaccatttctctggcagctctccctgccaactcaagtgtctctggttgtagaggggtctccctctgccaggattcaggagatccatggcgagagcaggttgctccttgccagatcaactcacatgttctcccagtcactgggggccaagaacaagttctggtgtacagcagccccatgtgggatttccagcttctttctccttcagcccagcttctgtgtcttccctctgtccactctcagtgcctttcctctgaagatctgttaggagcatgccagtcatccaggtacctcggtggcagctgttccac

SEQ ID NO: 324238 - DNA, 554 bp, Homo sapiens
tatgtcacattggtgagtgcaaaataagccatgtaaaatgctacacactgttgtgtccagatccttaaaaaaaaatatgataaagctatcgaaggtgttaatacacggaaactctttctttccatattagttagttctaagttctgagtctagggtatgaagtctacgggtttgtataacttgactcggggctgactttgatgggacaaagaacaagaatacatgtgaaatcatggaggagagacactgacagaaagtcacagagatgaaagaagaatgaggaacyggtgagcacagacttcctatagtgacatggattcatggaacaacagaaggaacacactgactatatcaacccaggccagtaagataggtcagggcgaggcaactaggaattgctgtggcagaggctgctcaatttcttccaaatcatttctctttttcttccctaataatacactttttagctgagcatattgctactcataaaaaagataggattttccagccttctttgcaataagtgtggccaaggaactgacttcttgcctatg

SEQ ID NO: 324239 - DNA, 554 bp, Homo sapiens
tatgtcacattggtgagtgcaaaataagccatgtaaaatgctacacactgttgtgtccagatccttaaaaaaaaatatgataaagctatcgaaggtgttaatacacggaaactctttctttccatattagttagttctaagttctgagtctagggtatgaagtctacgggtttgtataacttgactcggggctgactttgatgggacaaagaacaagaatacatgtgaaatcatggaggagagacactgacagaaagtcacagagatgaaagaagaatgaggaaccggtgagcacagacttcctatagtgacatggattcatggaacaayagaaggaacacactgactatatcaacccaggccagtaagataggtcagggcgaggcaactaggaattgctgtggcagaggctgctcaatttcttccaaatcatttctctttttcttccctaataatacactttttagctgagcatattgctactcataaaaaagataggattttccagccttctttgcaataagtgtggccaaggaactgacttcttgcctatg

SEQ ID NO: 324240 - DNA, 636 bp, Homo sapiens
aagctcaatactttcaagaacccatcaccttccaaaggcagaggctaagtctgggtgttcacagaggacaaaagcctgtgggctctcaggccacctgttcacctgagtgcccacagagacattcttcaagcatctggttatcagtggctatcaatccaagcagattgctgctraattgtcctttgctcctgtcacctgcctgtttaggcccaggggcttttcttactgcatttgcagatacaggttccattatgttgttctgtgccctgcaaaggcatggaaatctcagtaagggaccatatgctgagactcacagcacagatatttcctgcctgggattctgtataagaagcagggcctctctttacatgacctacgaaaagtatgatcttaccactttccctttcattatcttccccacttctggctgtgggaacattttctaggatggatctttccaggcatttttttttctgtgttttgagttctccccatctccctgaggttgtgggctttaaagacaaaagctacaaatagccttttatttctattctctagcactatcttagcccttctttgccctgagaacataacactgaattgaaaagtgtgtgtgtatatgtgcccatgcagcta

SEQ ID NO: 324241 - DNA, 535 bp, Homo sapiens
agcccagcccctatcaatagctgaataattctgagcttagtaatcagcatatgggaggcctccactaagtrtctgtcaagctgaatccatccacaatctcaggaagatgctaccagtaatttgcaccttcagcacgtatttgttctaaagcatggctaccaactttttctgtgtgcgtattatttttaaaaaccaagaaattttataaaccactgtcttatgattaatatctattgattaatagaatacatcagaacccaaagctatatgaattcagcaccccctgaaatatgactcatattttttaatcagaatatctactgtgtttaaaaagtcatagtacatatatgtgctcagtatatcatctattaaatctattataatactctgtttaaaatgcaaatttctgagacccaaccctagaatctctgatccagtggatttggaagtagagtcacagaatcaacattttacccactggtgtgtgtgagtgttcttgttcttgtttttgtttgagatggagtctcactctgtc

SEQ ID NO: 324242 - DNA, 535 bp, Homo sapiens
agcccagcccctatcaatagctgaataattctgagcttagtaatcagcatatgggaggcctccactaagtatctgtcaagctgaatccatccacaatctcaggaagatgctaccagtaatttgcaccttcagcacgtatttgttctaaagcatggctaccaactttttctgtgtgcgtrttatttttaaaaaccaagaaattttataaaccactgtcttatgattaatatctattgattaatagaatacatcagaacccaaagctatatgaattcagcaccccctgaaatatgactcatattttttaatcagaatatctactgtgtttaaaaagtcatagtacatatatgtgctcagtatatcatctattaaatctattataatactctgtttaaaatgcaaatttctgagacccaaccctagaatctctgatccagtggatttggaagtagagtcacagaatcaacattttacccactggtgtgtgtgagtgttcttgttcttgtttttgtttgagatggagtctcactctgtc

SEQ ID NO: 324243 - DNA, 535 bp, Homo sapiens
agcccagcccctatcaatagctgaataattctgagcttagtaatcagcatatgggaggcctccactaagtatctgtcaagctgaatccatccacaatctcaggaagatgctaccagtaatttgcaccttcagcacgtatttgttctaaagcatggctaccaactttttctgtgtgcgtattatttttaaaaaccaagaaattttataaaccactgtcttatgattaatatctattgattaatagaatacatcagaacccaaagctataygaattcagcaccccctgaaatatgactcatattttttaatcagaatatctactgtgtttaaaaagtcatagtacatatatgtgctcagtatatcatctattaaatctattataatactctgtttaaaatgcaaatttctgagacccaaccctagaatctctgatccagtggatttggaagtagagtcacagaatcaacattttacccactggtgtgtgtgagtgttcttgttcttgtttttgtttgagatggagtctcactctgtc

SEQ ID NO: 324244 - DNA, 640 bp, Homo sapiens
aaatgaccatagcttcccatgcagtctcaaattgcctctcaatgcagcctccaggagctgccaccgttgatctattgttaggcgaggttgagcctcctgggcatccattaggttatactgaaataggcaattgcagacctggcagatrggagttagaaaagagcaggggagctcctctgacattttgagggtgatggcatgagcagctaatctggtgcctaatgagcagggccacatcgaagatcgaaatgcttgaaccatggttgacctcaaattctaaggggtcatggcagtacactgttctctctgctactcaaagtagaagccacctctacagcccatcaagttccctgtccagtctctccttgagaacttccaggagcagggagctcactactttttgagtctgcttcattgccaggcagctctattaggaaatttttccttgagttgaggaaaaaacctacctgtctgtaacatgcacccacagagtctaattcagtcttctgagaccacacagtgggaaagaaataactagggaattgattaaaatcctgttgtcagatagaagagctgacagggatacccagtttactaactagcctgcagctattcagctcctgtggaagtccaacaaggt

SEQ ID NO: 324245 - DNA, 640 bp, Homo sapiens
aaatgaccatagcttcccatgcagtctcaaattgcctctcaatgcagcctccaggagctgccaccgttgatctattgttaggcgaggttgagcctcctgggcatccattaggttatactgaaataggcaattgcagacctggcagatgggagttagaaaagagcaggggagctcctctgacattttgagggtgatggcatgagcagctaatctggtgcctaatgagcagggccacatcgaagatcgaaatgcttgaaccatggttgacctcaaattctaaggggtcatggcagtacactgttctctctgctactcaaagtagaagccacctctacagcccatcaagttccctgtccagtctctccttgagaacttccaggagcagggagctcactactttttgagtctgcttcattgccaggcagctctattaggaartttttccttgagttgaggaaaaaacctacctgtctgtaacatgcacccacagagtctaattcagtcttctgagaccacacagtgggaaagaaataactagggaattgattaaaatcctgttgtcagatagaagagctgacagggatacccagtttactaactagcctgcagctattcagctcctgtggaagtccaacaaggt

SEQ ID NO: 324246 - DNA, 549 bp, Homo sapiens
caatgcagcctccaggagctgccaccgttgatctattgttaggcgaggttgagcctcctgggcatccattaggttatactgaaataggcaattgcagacctggcagatgggagttagaaaagagcaggggagctcctctgacattttgagggtgatggcatgagcagctaatctggtgcctaatgagcagggccacatcgaagatcgaaatgcttgaaccatggttgacctcaaattctaaggggtcatggcagtacactgttctctctgctactcaaagtagaagccacctctacagcccatcaagttccctgtccagtctctccttgagaacttccaggagcagggagctcactactttttgagtctgcttcattgccaggcagctctattaggaaatttttccttgagttgaggaaaaaacctaccygtctgtaacatgcacccacagagtctaattcagtcttctgagaccacacagtgggaaagaaataactagggaattgattaaaatcctgttgtcagatagaagagctgacagggataccc

SEQ ID NO: 324247 - DNA, 600 bp, Homo sapiens
caacagaagtgactctgactagcttagatataaggtagaatctattttaaagctatgggatagttctgtgaatcacagaaaaaaaaaaatgaactgttagacctcagaaaatgagagggcctaggatagcattcaggcacaaatcaactatctccatcaggacgatctctggacttacccttgtgtaacttctcttaagattcaaattcctcagagagcaggwcttgttggccctatttatctccggcccttggccacattgccagtcaattgagaggcccaccaaaactgcatgcagtgccagaagagtgttaccccaaaggaaattcaaggtgctgttatgcaaagggagaactcatgctgcagacgtaaaacaacacgactgccatgtatgatatctaactagaactttctgcccatcactcatcaagtgtacagactagcacttaaagtttcggtgataatagtggtgatggaaaagattacaatctcagacagccctatcttcctatctagccatcaaaagcacttgggttcactgtcaatgatccatgttattcatttatacatgaaagtagatccttcgcctagcttggcctg

SEQ ID NO: 324248 - DNA, 418 bp, Homo sapiens
tatttatctccggcccttggccacattgccagtyaattgagaggcccaccaaaactgcatgcagtgccagaagagtgttaccccaaaggaaattcaaggtgctgttatgcaaagggagaactcatgctgcagacgtaaaacaacacgactgccatgtatgatatctaactagaactttctgcccatcactcatcaagtgtacagactagcacttaaagtttcggtgataatagtggtgatggaaaagattacaatctcagacagccctatcttcctatctagccatcaaaagcacttgggttcactgtcaatgatccatgttattcatttatacatgaaagtagatccttcgcctagcttggcctgcctgggcttcaatctacctccctctttcccattaatatgttttgcactgttg

SEQ ID NO: 324249 - DNA, 600 bp, Homo sapiens
caacagaagtgactctgactagcttagatataaggtagaatctattttaaagctatgggatagttctgtgaatcacagaaaaaaaaaaatgaactgttagacctcagaaaatgagagggcctaggatagcattcaggcacaaatcaactatctccatcaggacgatctctggacttacccttgtgtaacttctcttaagattcaaattcctcagagagcaggacttgttggccctatttatctccggcccttggccacattgccagtcaattgagaggcccaccaaaactgcatgcartgccagaagagtgttaccccaaaggaaattcaaggtgctgttatgcaaagggagaactcatgctgcagacgtaaaacaacacgactgccatgtatgatatctaactagaactttctgcccatcactcatcaagtgtacagactagcacttaaagtttcggtgataatagtggtgatggaaaagattacaatctcagacagccctatcttcctatctagccatcaaaagcacttgggttcactgtcaatgatccatgttattcatttatacatgaaagtagatccttcgcctagcttggcctg

SEQ ID NO: 324250 - DNA, 600 bp, Homo sapiens
caacagaagtgactctgactagcttagatataaggtagaatctattttaaagctatgggatagttctgtgaatcacagaaaaaaaaaaatgaactgttagacctcagaaaatgagagggcctaggatagcattcaggcacaaatcaactatctccatcaggacgatctctggacttacccttgtgtaacttctcttaagattcaaattcctcagagagcaggacttgttggccctatttatctccggcccttggccacattgccagtcaattgagaggcccaccaaaactgcatgcagtgccagaagagtgttaccccaaaggaaattcaagrtgctgttatgcaaagggagaactcatgctgcagacgtaaaacaacacgactgccatgtatgatatctaactagaactttctgcccatcactcatcaagtgtacagactagcacttaaagtttcggtgataatagtggtgatggaaaagattacaatctcagacagccctatcttcctatctagccatcaaaagcacttgggttcactgtcaatgatccatgttattcatttatacatgaaagtagatccttcgcctagcttggcctg

SEQ ID NO: 324251 - DNA, 639 bp, Homo sapiens
agcaactacctgggctgaattaagacctgaaggccccaagggaatgaggctagtgatagccagaggtgtggtgcagggtkcagggtggggagcatgtcctaacagaggaaaccacagatgtggtatccattgcttcttatttgccatcagtgactgcatggttgaccaccaaactctatagggtcactctgaagaatagaaaaagctgaagtggtctagaagaaattagattttctataggaaagacataaagaaaacttggcagaggtatctgtttttaaaaatacataaatctcggcctcgaccaacacttatttgatgtgaccctttcacccaagaccatttcttcatcccactagaacctcagttctcagcactgagcaatatcagctgacagcctttcatccagcaggacaacagaactgtgggaccccagcagagacaaggctgtcagtgaggcctgtcctggtgggctgtcatcccacgtggagaggtgagaaaagtagggtggaagaggaaacgatgctgaagactgaggaggcaggtggaattcaaagttggtctttttttttcttttccaaattaaagagatgttttctctgccacagcttctgggccctgatacagcaataagtcaaa

SEQ ID NO: 324252 - DNA, 639 bp, Homo sapiens
agcaactacctgggctgaattaagacctgaaggccccaagggaatgaggctagtgatagccagaggtgtggtgcagggttcagggtggggagcatgtcctaacagaggaaaccacasatgtggtatccattgcttcttatttgccatcagtgactgcatggttgaccaccaaactctatagggtcactctgaagaatagaaaaagctgaagtggtctagaagaaattagattttctataggaaagacataaagaaaacttggcagaggtatctgtttttaaaaatacataaatctcggcctcgaccaacacttatttgatgtgaccctttcacccaagaccatttcttcatcccactagaacctcagttctcagcactgagcaatatcagctgacagcctttcatccagcaggacaacagaactgtgggaccccagcagagacaaggctgtcagtgaggcctgtcctggtgggctgtcatcccacgtggagaggtgagaaaagtagggtggaagaggaaacgatgctgaagactgaggaggcaggtggaattcaaagttggtctttttttttcttttccaaattaaagagatgttttctctgccacagcttctgggccctgatacagcaataagtcaaa

SEQ ID NO: 324253 - DNA, 584 bp, Homo sapiens
ttagtctcacacataaggatctttagattccttaatagagtgtggcttctgcatttatagcctctcactgaaataagggtggttcctttaggatctccacagttggattaatcaaagccatgttcattgcacctctaatcacaatagctaagataaggaaactwcctaagtgttttctgatagatgaatggatagttatacacacacactatatatatatacacacacacacaatggaataatatttagtctttttcaaaaatttttaattatttttaaaattttatttaattaattaattaatttatttatttatttatatttttagagacaaggtctcattctgtagcccaggctgaagtgcagtgttgtgatcatagctcactgcagcctcgaactccttgtctcaagcaatccccagctcagcctcccaaaatgctgggattacacatgtgggccacctcacccaaccctatttaatcttaagaaggaagaaaatcctaccattggcaaaaatataaataaacctgggggacattatgctatgtaaaatcagccagacatggaaggaaaaatactatatg

SEQ ID NO: 324254 - DNA, 584 bp, Homo sapiens
ttagtctcacacataaggatctttagattccttaatagagtgtggcttctgcatttatagcctctcactgaaataagggtggttcctttaggatctccacagttggattaatcaaagccatgttcattgcacctctaatcacaatagctaagataaggaaacttcctaagtgttttctgatagatgaatggatagttatacacacacactatatatatayacacacacacacaatggaataatatttagtctttttcaaaaatttttaattatttttaaaattttatttaattaattaattaatttatttatttatttatatttttagagacaaggtctcattctgtagcccaggctgaagtgcagtgttgtgatcatagctcactgcagcctcgaactccttgtctcaagcaatccccagctcagcctcccaaaatgctgggattacacatgtgggccacctcacccaaccctatttaatcttaagaaggaagaaaatcctaccattggcaaaaatataaataaacctgggggacattatgctatgtaaaatcagccagacatggaaggaaaaatactatatg

SEQ ID NO: 324255 - DNA, 584 bp, Homo sapiens
ttagtctcacacataaggatctttagattccttaatagagtgtggcttctgcatttatagcctctcactgaaataagggtggttcctttaggatctccacagttggattaatcaaagccatgttcattgcacctctaatcacaatagctaagataaggaaacttcctaagtgttttctgatagatgaatggatagttatacacacacactatatatatatacacacacacacaatggaataatatttagtctttttcaaaaatttttaattatttttaaaattttatttaattaattaattaattwatttatttatttatatttttagagacaaggtctcattctgtagcccaggctgaagtgcagtgttgtgatcatagctcactgcagcctcgaactccttgtctcaagcaatccccagctcagcctcccaaaatgctgggattacacatgtgggccacctcacccaaccctatttaatcttaagaaggaagaaaatcctaccattggcaaaaatataaataaacctgggggacattatgctatgtaaaatcagccagacatggaaggaaaaatactatatg

SEQ ID NO: 324256 - DNA, 567 bp, Homo sapiens
gagaacaaagaccattgtgagaaaagctattaaatcctagggctcataagaattctaatttcttctctacaatagtactattcacccccttttttcttcctcaaatcccataaggaataaggcagatgccaaaggagacacatcctggtggtgattcgatgattattaataaagggagggaggggctattagaatagggagggaaagagcacaatccgaagtcttccccagttgactctgaagcactttctccatgcctataatcactgctctaagagcagcaatactataytctgctcacatgacctctgggcagtttactctctcaagtctatgttggacatgttaggtccacagtggttgagattagttgtgtcctagctaagacctctttgcaagttgtttcaccatcaaaattatgtttcaactattttcattcctccctatctcaaatctcctaaccacccaaagaaactcacacaaatccaaaccactttgcacgactcaacatgcaaatatttccatgaactgagacagagaaagaggtaagtctatatgtgttagccg

SEQ ID NO: 324257 - DNA, 625 bp, Homo sapiens
cctggtggtgattcgatgattattaataaagggagggaggggctattagaatagggagggaaagagcacaatccgaagtcttccccagttgactctgaagcactttctccatgcctataatcactgctctaagagcagcaatactatattctgctcacatgacctctgggcagtttactctctcaagtctatgttggrcatgttaggtccacagtggttgagattagttgtgtcctagctaagacctctttgcaagttgtttcaccatcaaaattatgtttcaactattttcattcctccctatctcaaatctcctaaccacccaaagaaactcacacaaatccaaaccactttgcacgactcaacatgcaaatatttccatgaactgagacagagaaagaggtaagtctatatgtgttagccgcctttctttccctactgtgcccaaagcacttgttttcacttgctcagtgagactcaaaagactaggtggccattctttttctctctgcagattagaaatcttacttttagcaaggttttgattctgttaaaatttcatttcaagaaatcatttagaagaaccctgtggcttgttgtaaaatttgcttgcgcagaaaactga

SEQ ID NO: 324258 - DNA, 584 bp, Homo sapiens
ttagtctcacacataaggatctttagattccttaatagagtgtggcttctgcatttatagcctctcactgaaataagggtggttcctttaggatctccacagttggattaatcaaagccatgttcattgcacctctaatcacaatagctaagataaggaaacttcctaagtgttttctgatagatgaatggatagttatacacacacactatatatatatacacacacacacaatggaataatatttagtctttttcaaaaatttttaattatttttaaaattttatttaattaattaattaatttatttatttatttatatttttagagacaaggtctcattctgtagcccaggctgaagtgcagtgttgtgatcatagctcactgcagcctcgaactccttgtctcaagcaatccccagctcagcctcccaaaatgctgggattacacrtgtgggccacctcacccaaccctatttaatcttaagaaggaagaaaatcctaccattggcaaaaatataaataaacctgggggacattatgctatgtaaaatcagccagacatggaaggaaaaatactatatg

SEQ ID NO: 324259 - DNA, 625 bp, Homo sapiens
cctggtggtgattcgatgattattaataaagggagggaggggctattagaatagggagggaaagagcacaatccgaagtcttccccagttgactctgaagcactttctccatgcctataatcactgctctaagagcagcaatactatattctgctcacatgacctctgggcagtttactctctcaagtctatgttggacatgttaggtccacagtggttgagattagttgtgtcctagctaagacctctttgcaagttgtttcaccatcaaaattatgtttcaactattttcattcctccctatctcaaatctcctaaccacccaaagaaactcacacaaatccaaaccactttgcacgactcaacatgcaaatatttccatgaactgagacagagaaagaggtaagtctatatgtgttagccgcctttctttccctactgtgcccaaagcacttgttttcacttgctcagtgagactcaaaagactaggtggccattctttttctctctgcagattagaaatcttacttttagcaaggttttgattctgttaaaatttcatttcaagaaatcatttagaagaaccctgtggyttgttgtaaaatttgcttgcgcagaaaactga

SEQ ID NO: 324260 - DNA, 505 bp, Homo sapiens
taatactgtattgtatacttgaaatttgctaagagagtagatcctaagtattctcaccacacacacaaaagaaagtaattatgggaagagatggacatgttaattagcttgactgtagtatttggtatattatgtgtatgtataccaaaaatatcacattgcacaccttaaatatataaaattttcataaaaataaaaattaaattaaacattttaaaaagccaagttttcaagtatcccaatttctaaagtgtaagtaaagttagtagaggccaggcaaagtggctcacacctgtaataccagcattttgggaagccaaggcaygaggatcacttgaggtgaggagtttggggccagcctggacaacatagcaagaccccatctctacaaaaattttttaaaaaattaaccaggcatggtggcaggtgcctgtagtcctagatactaggaaggttatggcaggagaatcacttgagcccaggagttggaggctgcagtgagcta

SEQ ID NO: 324261 - DNA, 621 bp, Homo sapiens
aatccctgctctgtgttagctcccattatagtgagtgaaaacctaaatggaaattttcttggtcatcattaattaatttgatctagaaactattgggtatagaccaagtaaaatatagataagatacaggtcaagtaaaattttatttgagattttgatttctacatccaatagaaaccaaacccaaacaaatagctttcagaagtgtcaaattcttttcacatttctggcttttccactgatttttctcttttatcaatcatggccaaaattggaagacaatcatgtctagcctgkgtgaatttagaatctcactaagagattctacagtgtctggtgcctagggcttggcaaaagacccttcacactttgttgctcaatcaacattggatgatggacatttctgacctgaagatggatttctcaatagtagatactagtaatcctgccctgggaggagaaaagggatttttcctgctcttccttcccccgtttatggaataaaaggaaaatgactatggaaattaataaccggaagacattttactggctcagtttcaagatattaaaaaagggatgggttctttggcgttcagtattaattctaacatctctgactgc

SEQ ID NO: 324262 - DNA, 557 bp, Homo sapiens
ataaaaagaagatacattaatgaggattatcttataaaatcagyacttttttcatctttgtaagttatcatctcaaagatgagcattctcttcagccatgatgcttggctcggtagtgggtcagcacatgctggtgtaagcctccctctgcaaggttcaggaaaccttttaagacaagtgtgaggggttttgcctagcgaagggaaaagagtcctggctctagggtcaaggagagggaggtttagttcctttctttggagcatatgtttatgtggactcacacaaaggccttgatctcccacacacctgcagatctggttacgcagaagattccaggaaaccagagctaaatattttcctatttacataatgaccatcagagtgaaagtactggatgcaggagagaaagaagggccaaagctccacagctctggactcgctagagaattcattcaaatatcagaattattcaagttgtggctggcataggaaaaatgacaggggccaggagcatgggatacgtaagagtaccaattgaaactaaaaccaccaaaagt

SEQ ID NO: 324263 - DNA, 513 bp, Homo sapiens
ggggtgtcctgatgagttggtttgtgaacctcaaggctggagaggatggctctggagccttgccctgaagagtcctccagcggctgagaggagcgggctggggtaggcgagcggggagagtgtaggttccggggtccaccagagggactgaagcctcagcgctccaggtggatgtcccgggcagctttggtcctcggcggccgccgggggcgacttacctgtgtgtaccggagcgcggcggccgggagcggtggcgagggcggcgagggctggaggggcgcggggaatgcctgtgcgtccggagtagaggttgctcctggagagcgrcaggagccctgaactcgcaggccagctcgggcgcagtggctggcaaggcggaggagccgcgcgcttttaaaggggcgctcgcattcctggggattcctccggccaatgggcggcggccgggcaggaagcgggaggtgggggccagtctgggctcctctctccgccccccgctgcctggcgcgcaac

SEQ ID NO: 324264 - DNA, 513 bp, Homo sapiens
ggggtgtcctgatgagttggtttgtgaacctcaaggctggagaggatggctctggagccttgccctgaagagtcctccagcggctgagaggagcgggctggggtaggcgagcggggagagtgtaggttccggggtccaccagagggactgaagcctcagcgctccaggtggatgtcccgggcagctttggtcctcggcggccgccgggggcgacttacctgtgtgtaccggagcgcggcggccgggagcggtggcgagggcggcgagggctggaggggcgcggggaatgcctgtgcgtccggagtagaggttgctcctggagagcggcaggagccctgaactcgcaggccagctcgggcgcagyggctggcaaggcggaggagccgcgcgcttttaaaggggcgctcgcattcctggggattcctccggccaatgggcggcggccgggcaggaagcgggaggtgggggccagtctgggctcctctctccgccccccgctgcctggcgcgcaac

SEQ ID NO: 324265 - DNA, 553 bp, Homo sapiens
ggattttgtttagttgcattgttgtctttttatatcaaaggaatccttctattaccccaatttcctcccttctggtccagtagcaaaccaggaccataacagacaggttcctaatgctctgcagatgaagggatgtcaggaaaataaacaaatttgctctcttctgttgcattcctttccttaagggaagaaactaaaagaagatgacttagaactaaacacagaagttttccaacaacacctatcttgccagctcctgccgagatcactagctttaaaagtgctcttcgggcctgagttcaggatggctcttaagcaactctgtctctgtgcagagctgccattgcatttcttcagctgttttccagttgcctgaaagaagcacccacttrcctgggccaggaacgaggagcacagagaaacacagagtagaactgtttcttcctccagagtgtttttttgaaaaaaaaaaaaaaaaaaaagccttccccagagcatagtctacttctctacttgatgtctcacagagcattggatgcagaagtttggggat

SEQ ID NO: 324266 - DNA, 549 bp, Homo sapiens
cttggcaagctcatagcagatcagagggtcaggaatatgagtgctgtctgtctagcctcagccaaaaagagccatgacccaccatgagtcatgaaagaaaatgtctaggtttgaaactttctaaaaatatgwagttaggaatattaccttatatatccttatatttccctatacctaatgccatgtctaaacttacagctgagtgaatgccttcacttggttctcctggatttcatatattttccagatcatgaggaaagccccacatacaggaaatgcacaaactgactatttcagctgcagggatggtccctagtgccaaggtatattctatgtgcagctggagccaaggttgaaaggcctagaatgataagacacagtctaaaacagcagctccaaacttttggaaaagtcattaacccctctgagaatcctgaagaaactctggactctctcatcagaaaaaaaatgaagaaataatataccaaagaaaaagttacattcatccacagaccactactactacccagaaggagccctggctctaat

SEQ ID NO: 324267 - DNA, 599 bp, Homo sapiens
agatttcttccaagaattcaagattggtttaacatctgaaaatcaatttatataatatgccacaacaataaagaaaaaaatcacaattacttcaatagatgcataaaawaatggataaactccaacactcatgattaaacaaaaaaagaagaaaacgcttaaaccaggaacaaaaattaacttcctcaaactaccagaaacttacagctaacatcatactaaattgtaaagaatcaaatggtcttctttcactctcagatgtgaaaatctcctatgtagaaaatcccaaggtatcgacaaaaaacaaaaaaaaaagctattagaactaataaatgggttcagcaagtttgctggatacaagatcagtatagaaaaatcgattgcatttctatatattaacaatgaaaaaccaaaataaaattaagaaaattctatttataaataacatcaaaaggaataaaatttttaggaatagatttaacaatttaagtataaaatgtatatgctaaaaactacaaaacactgttgagtgatactgaagattaaaataaatggaaagatacaccatgcttatgaattggaggatttaatatcgttaa

SEQ ID NO: 324268 - DNA, 422 bp, Homo sapiens
aataagaactaaggagattgaatcagtaatcgaaaacctcccaacaaagaaaatcctagaaccagatggcattattggtgaactcaatcaagcatttaartgattaacaacaatccttctcaaattcttccaaaaaaatgaagagaaggaaacacttccaaattcattttatgaggtcagcatcacactgataccaaagccagttaaggatgctacagcaagataaaattacaggttgatactcctaatgaatgtagacacaaaaattctcaacactagcaaaccaaattcaatagcacactaaaaggattttatgccataatcaagtgggataatcccaggaatgcaaggatggttgaacatatgcaaatcaataagtgggataaactacattaacagaatgaagatttatgatcatctca

SEQ ID NO: 324269 - DNA, 598 bp, Homo sapiens
gaagtggagaaaaagcccccaccatcggggccgggcaagcatagagcccccaggactggcagaaccatctgggtgaggccacgtgggagccacacgcctgtagcctgcaagggcaggggaggcacagaggggcttctggccaactgcagtgaccccaggagacctggggccttcagtggaaggggccygcagatgtgcctccccggctgctgatggcagcagctgctcagcccaccccccctcggccctctctccccctcccattccctgcggatcctggacccagcagcctgagtgttcccttggtccccatcagatctgtggtctcggtccagagctttgcaccccagcatctgcccctccgagcacctcctggcttcttagtaatgacttctggggatggatcaacccttggtctgggcttgtggccccctggccctccccatacttgaggagggaagcagccacgcaccatggagtgccccagcctgggcgctcaggtcagtgcctttggtggaatctcaggtgcgtgccccagctgtcaggcgctgatttgtcccatcgtggatggggttctcccgcactcctgcttctggct

SEQ ID NO: 324270 - DNA, 394 bp, Homo sapiens
ctcaacactgcatcctggtgcctggcacacagtaggtcttgagtttgtattaatacttgttgaagtgacggacagatggatgggcagatggacacaggaatggttgtcagagaaggaaacaagaagtggccttgccaagaacagatcacgtcatcaggggttgagaaccagcatgcactgtcccctgctttgatgggacagggamatcacaggcctattctggcaggatgacagattctaggatatctgggataggctggaggtgttgagtttccccaccagccctgggtatcgtgagggaccctgctgtcctctctgtccagggagacaggactggagattttccctgaacagtaggtgttggcccaggaagcctagggtgctgtgtcaatcc

SEQ ID NO: 324271 - DNA, 552 bp, Homo sapiens
gcaggcaggtgctcagaggaggtcagagctggctcggcccccggggcccctcaccccctgctctgtctgcccgagacgtggggcccttggaggagggtgacccacagtgtgacccactacagagacagtagggggacaaggctggggcggccrggcctgcatctgccctgcacccaccaccccatgccctcagggcggtgcggacaagcctgggtctgctgtgtgcggagctgcgaggaggcagtgggggcgagcctgcgaagaagcgaagcaagctggagaggagcgtctatgcgggcctgcagactgcctccgtggtgagtgccgaggcgcccgccttgccccagggcccttcaggtcccttcaggtcccttcctggcaggtagcagactctccccagccctgtgccgaaacccattgctcagatgagcgaagcaaggctggggagctccgagcgccgacagcaggaggaggagggtgaccctgcggtgtaacacaggaaggtctgaccgggtggccctgccgccacttgcccacgtcactccaccctcc

SEQ ID NO: 324272 - DNA, 552 bp, Homo sapiens
gcaggcaggtgctcagaggaggtcagagctggctcggcccccggggcccctcaccccctgctctgtctgcccgagacgtggggcccttggaggagggtgacccacagtgtgacccactacagagacagtagggggacaaggctggggcggccaggcctgcatctgccctgcacccaccaccccatgcccycagggcggtgcggacaagcctgggtctgctgtgtgcggagctgcgaggaggcagtgggggcgagcctgcgaagaagcgaagcaagctggagaggagcgtctatgcgggcctgcagactgcctccgtggtgagtgccgaggcgcccgccttgccccagggcccttcaggtcccttcaggtcccttcctggcaggtagcagactctccccagccctgtgccgaaacccattgctcagatgagcgaagcaaggctggggagctccgagcgccgacagcaggaggaggagggtgaccctgcggtgtaacacaggaaggtctgaccgggtggccctgccgccacttgcccacgtcactccaccctcc

SEQ ID NO: 324273 - DNA, 578 bp, Homo sapiens
gccactgctgggccaaggaggaagaaggaaggctgggcacacttacatacacctagtgcaaaccccactgctgctgctgtaggctgctatgtgacaaatgcatgagtaaactgctctccccacagctacctgcttatacttctccagctaagaggggaaccaccttccccggtggcaggtatgcagcatagacactrctgcccacaccagagcattctgccatggcctggggaccagcatcccttgcttatcacagccaatatctgaatgtaccaccacggggcctgaggacaagtcttccagactgggcccctctacccagtacttgagcatgccatccagaactatggaaaccttccagccaagcctactactgctaacacctgagcactcctcccagactctgaggttgggctgattcaactttccaataccaccgcagccagcacacacccacacatgatcccaatactggaataatcagccctcctggaaccaataatactgtaagctgccctgggttgcccaaaaggcattctcagtccattgctgccaccactagggcccaaagactggcc

SEQ ID NO: 324274 - DNA, 578 bp, Homo sapiens
gccactgctgggccaaggaggaagaaggaaggctgggcacacttacatacacctagtgcaaaccccactgctgctgctgtaggctgctatgtgacaaatgcatgagtaaactgctctccccacagctacctgcttatacttctccagctaagaggggaaccaccttccccggtggcaggtatgcagcatagacactactgcccacaccagagcattctgccatggcctggggaccascatcccttgcttatcacagccaatatctgaatgtaccaccacggggcctgaggacaagtcttccagactgggcccctctacccagtacttgagcatgccatccagaactatggaaaccttccagccaagcctactactgctaacacctgagcactcctcccagactctgaggttgggctgattcaactttccaataccaccgcagccagcacacacccacacatgatcccaatactggaataatcagccctcctggaaccaataatactgtaagctgccctgggttgcccaaaaggcattctcagtccattgctgccaccactagggcccaaagactggcc

SEQ ID NO: 324275 - DNA, 454 bp, Homo sapiens
ccatgaaaaggaaataaatcatgtcatttgcagcaacctagatggaactggaggtcattatcttaagtgaaaaataagccaggcacaaaaagacaaatattacatgttctcacatacatgtggaagctaaaaaacttgatcacattgaggtagagagtcaaaatatagataacagagactggaaaaagtgagtttgggggaaatgaggaggataaagagaagcaggttaatggatacaaacatacagttaaaatgaataaatccaatgtttgatagcagaacagggtgattgagtttacaaaaatgtgttgtactcaagtgatggatactgtaaataccctgtgataatagtgactcgatttcagtgcattatatatatgtaacaaaatttcacstgtaccccataaatttgtacatcataataataatgataaaatgatcttgcttgaaaaca

SEQ ID NO: 324276 - DNA, 586 bp, Homo sapiens
aaaagcaaacatagaaaaatgaaattacatcaaactaaaaagtttctgcacagccaaggaaacaatcaacagagtgaagagacaacctacagaatgggagaaaatatttgcagattgtatatctgttaagggattatgttccaaaacataaggaactcaactcagttgtgagaaaacaagtcagttaaaaaagagcamaggatctgaatagacatttctcaaaagaaaacatacaaatggccaaaagatataagaaaaaatgctcaatattactaattatgatggaaatttgtaaactcacaccacaaggatatatcacctcacacctattaggaaggctattatcaaaaagacaaaagatacatgttggagaggatgggaataaaaggtaatccacctgttggtgggaatgtaaattaatacagtcattatgaaaaacagaatggatgttcctcaattaaataaagaactaccatatgatctaggaattccattactgggtatatatccaaaggaaatgcaattagtattttgaagtgatatttgtattctcatgttcaatgcagcattattcacaatagcgaag

SEQ ID NO: 324277 - DNA, 586 bp, Homo sapiens
aaaagcaaacatagaaaaatgaaattacatcaaactaaaaagtttctgcacagccaaggaaacaatcaacagagtgaagagacaacctacagaatgggagaaaatatttgcagattgtatatctgttaagggattatgttccaaaacataaggaactcaactcagttgtgagaaaacaagtcagttaaaaaagagcacaggatctgaatagacatttctcaaaagaaaacatacaaatggccaaaagatataagaaaaaatgctcaatattactaattatgatggaaatttgtaaactcacaccacaaggatatatcacctcacacctattaggaaggctattatcaaaaagacaaaagatacatgttggagaggatgkgaataaaaggtaatccacctgttggtgggaatgtaaattaatacagtcattatgaaaaacagaatggatgttcctcaattaaataaagaactaccatatgatctaggaattccattactgggtatatatccaaaggaaatgcaattagtattttgaagtgatatttgtattctcatgttcaatgcagcattattcacaatagcgaag

SEQ ID NO: 324278 - DNA, 589 bp, Homo sapiens
caatatttaatcaacttaataaaatatttcttcaaagctttagcagagcaattataaakacataaattaatttgctgaataaaaatattgcatatattaaaaagttgaatagagcacctatttagaaatatattcatgcaattctacttcatgtatataaccagtaaatttgcatttaaatttttctgaaaggctgtttactttttgaaactgtactcatatagtcttcatacctcttgggcccctgaaggaaagatacaaagtaatcaaaggaggaaggacccaaagaggcagaaacataatgattagaaagccagagatattattattaaagttgtcaatggagaaaagtttcaagaagcagttcctcattaacagtgttaagtgcagtagaaaggtccagcaaaacaaagactaaaaagctcacgttgcatttggcaatttggggttcattcgtgacttttctgaaagcattttgaatagaattaccaaaatcagattgctgaagctaaaagaaaaaatgggaagtgaaaaattagagacaaaaatctagttaatttttcaagtctggatggctaaggtagggagt

SEQ ID NO: 324279 - DNA, 568 bp, Homo sapiens
tgttatacccatggttgcagattattacagcagaaaagatacagattaaaatcagcaaaggaaaaacacacagaaatctagaggtaagcacatggtttcaggtatcttcttcaagtgaagttgtagaaacagcagacagcgcttaattctctcagtaacaaggtgtgacagcatgtrtggccaaccaggaaaactcactccagcatttttggggtcagtcttgggggtcagtcacgtaggcatgaggtgctgtcatgactgaccttagctactcagtctccagtccctcccagaggtcaaactgatagagaatggccctaggtcccaggtgaacaaaaacagacattcaccatacatcacattgttagcagaaacacttctggcatggcccaaagctcaggtataaaatgacatgtttattaggtaggatattccgacactatatgggttatctcttaggagccagtcaaggccagccttgaagacagttggaatgcacagtatttgaatagcccaagtccaagttaaccctttactgaacagacatatatacctatacatattgctt

SEQ ID NO: 324280 - DNA, 568 bp, Homo sapiens
tgttatacccatggttgcagattattacagcagaaaagatacagattaaaatcagcaaaggaaaaacacacagaaatctagaggtaagcacatggtttcaggtatcttcttcaagtgaagttgtagaaacagcagacagcgcttaattctctcagtaacaaggtgtgacagcatgtgtggccaaccaggaaaactcactccagcatttttggggtcagtcttgggggtcagtcacgtaggcatgaggtgctgtcatgactgaccttagctactcagtctccagtccctcccagaggtcaaactgatagagaatggccctaggtcccaggtgaacaaaarcagacattcaccatacatcacattgttagcagaaacacttctggcatggcccaaagctcaggtataaaatgacatgtttattaggtaggatattccgacactatatgggttatctcttaggagccagtcaaggccagccttgaagacagttggaatgcacagtatttgaatagcccaagtccaagttaaccctttactgaacagacatatatacctatacatattgctt

SEQ ID NO: 324281 - DNA, 559 bp, Homo sapiens
tctctggcctttaaagagtgactaacgttctaggactctagaatatccagtctcggagaataggtatcaagttatctttctgagggccacaaggtcatttaggacatcacaaaccattaccatgtttctggaagtaatttgtaattgtgtaataatatttatcaaatggttagcattctaggaggcaaaacttttagatttccataaggaaaacagctctattgaataagcattgcagagtggcagagagcacagcctcataaatgaagttactctgcttctttatttgtctrtgaagttagggaccatttctatggttcatcacagcttgtcatttcactgttttatattggactctgccatgaatctgcagcacacgtagttgggactctggtgatatccttctcaacctttgtgaggtaactgaacctgttttctatctggatttcctgctattggctaagttcatgattcaaatcaaatgcctgacattgccgttgtcttggcttagacaaatgactctcaaatatcagggtaattaaacaccatttggaggagc

SEQ ID NO: 324282 - DNA, 559 bp, Homo sapiens
tctctggcctttaaagagtgactaacgttctaggactctagaatatccagtctcggagaataggtatcaagttatctttctgagggccacaaggtcatttaggacatcacaaaccattaccatgtttctggaagtaatttgtaattgtgtaataatatttatcaaatggttagcattctaggaggcaaaacttttagatttccataaggaaaacagctctattgaataagcattgcagagtggcagagagcacagcctcataaatgaagttactctgcttctttatttgtctatgaagttagggaccatttctatggttcatcacagcttgtcatttcactgttttatattggactctgccatgaatctgcagcacacgtagttgggactctggtgatatccttctcaacctttgtgaggtaactgaacctgttttctatctggatttcctgctattggctaagttcatgattcaaatcaaatgcctgacattgccrttgtcttggcttagacaaatgactctcaaatatcagggtaattaaacaccatttggaggagc

SEQ ID NO: 324283 - DNA, 566 bp, Homo sapiens
tcagtcctcacatcaatcattctgtttaaggaaggagaaagctgattgatactatttacatatatcaacattggctgatttacctttttagccaactatgcaggcctcaggctcagaaacatcagcagtcaacaatataatatgtagctagaatgtaataggattgcattgttttattgaatttatcttcccttttatttatggtaatcaattctggcttcctgtttatgtgatggtattatgtttcctttaaaactaaatttaattttaaagaggtagaatcaatttaaaggtattaaataaataatagtatagacatagcagtaattatgataccaatacatgaaggattagagtatgggaaatatactggtacagttgagaatccctgaaatcagagatgggctctaccactgctttaatatgcgactttagtaacccactgattctgttgtagaattcttggactcgaagtactgtgagttatcatttttcagtccacgatagtattgcgtcaaacamaattatgaaatatatacaaatttgagacattatgagcagaggca

SEQ ID NO: 324284 - DNA, 605 bp, Homo sapiens
tttttttttttgtagtagtagaaacaactatttctaaatctggggattcagtagttcattcaaattargatctttaagagctgtctaggtcaatgttccttaacgttttctacctgggagtaatctttaagagaacaaaaagaaaatgaaactctatataatttaatgcaaagtcttttacattaatgtaagggtaggaaaagaggttggaggaagatatggggaggtaggaaaatgggacttttttcctccatttacttttgatgtttgaatttcaaacatgagtatatttgtgtattattttgcggttaaaaacactgaagattgcataaagatcaaagagggaaatttaagggaattaatgggttatgattgcatttgttcagaatggttttggtggctcatgacaacattttgagagagagagattttaatggcaccaatggcagctaggataactagtttaaagtttagggcctgtgttaatagattttgctttctagtttcagaaagattctcttatagtactgttttaatctgtttttctaagccctctgatttatgtatatttaataggccacaaaataatgtcaaatatatggcat

SEQ ID NO: 324285 - DNA, 584 bp, Homo sapiens
  misc_feature (1)...(584): n = A,T,C or G
gaagtctgtacattatgtagctatgcacccatctaaagaagttaggaaaatgacatcaagtagaacatcaaaagaaagaaggaaaggataacttaaaacagaaatgaatgaaataaaaccagaatagaagagacgatctacaaatccaaaagttggtttgttgaaaatactagtagagctgacatacytgtggtgagactgatggaaataatgcagttacaactaaccaatatcataattggaaaggaaatcactataggtgctgtaaaaattaaaaagataatagaatattatgaacaattttctgccaatattattgaaagtttagataaaatggaaaattcatttaaaaatataatttgacagtattatgttatgtgaatactataatgataatcctgtaatcattaaatgaaccagtagtttaaaatttttccatatagggaaggtcagggccagatgtgttcaatggttggttctactagacattcaaaaaaataataattcaagtctacacaaactttcctgagattagaaaaaatanagaagagtccccccacctgtttcttactttatgagaccaa

SEQ ID NO: 324286 - DNA, 584 bp, Homo sapiens
  misc_feature (1)...(584): n = A,T,C or G
gaagtctgtacattatgtagctatgcacccatctaaagaagttaggaaaatgacatcaagtagaacatcaaaagaaagaaggaaaggataacttaaaacagaaatgaatgaaataaaaccagaatagaagagacgatctacaaatccaaaagttggtttgttgaaaatactagtagagctgacatacttgtggtgagactgatggaaataatgcagttacaactaaccaatatcataattggaaaggaaatcactataggtgctgtaaaaattaaaaagataayagaatattatgaacaattttctgccaatattattgaaagtttagataaaatggaaaattcatttaaaaatataatttgacagtattatgttatgtgaatactataatgataatcctgtaatcattaaatgaaccagtagtttaaaatttttccatatagggaaggtcagggccagatgtgttcaatggttggttctactagacattcaaaaaaataataattcaagtctacacaaactttcctgagattagaaaaaatanagaagagtccccccacctgtttcttactttatgagaccaa

SEQ ID NO: 324287 - DNA, 615 bp, Homo sapiens
tgtgttttctttccttttctttaatttacagcatttttcagaccatttggtccctatgtgtatactgctgattacagagttattctgttaaaataattatgaagagaaaaattcaattgtgtattttgacacataattgtatttatatactcttaatttgttgattattttgtatacatagaaaaaaggctttgtgaattactatggaccacagagatttgggaagggaaggaaagttcacacagaccaaattggactagctttgctgaagaatgaaatggtatggattttgaaaaatgtaatcttatctgtttctgtcaattatacttactacataacccagctccttgctttcttaactctatcatataaatgcgtgtacaacactcacataccaaatatattacattactgaacatttagtaagctgctgctctgtccttgatatcacattacaaaaaagccaacagtgtgagtgtccttgtggttagtacatatttgagatwtgacacacaaatgaccatcactttccaattttagtgaactgaatataagatatagaggaaattttgatcctacaatcccagaaatcagatatcagatcatataaaagat

SEQ ID NO: 324288 - DNA, 615 bp, Homo sapiens
tgtgttttctttccttttctttaatttacagcatttttcagaccatttggtccctatgtgtatactgctgattacagagttattctgttaaaataattatgaagagaaaaattcaattgtgtattttgacacataattgtatttatatactcttaatttgttgattattttgtatacatagaaaaaaggctttgtgaattactatggaccacagagatttgggaagggaaggaaagttcacacagaccaaattggactagctttgctgaagaatgaaatggtatggattttgaaaaatgtaatcttatctgtttctgtcaattatacttactacataacccagctccttgctttcttaactctatcatataaatgcgtgtacaacactcacataccaaatatattacattactgaacatttagtaagctgctgctctgtccttgatatcacattacaaaaaagccaacagtgtgagtgtccttgtggttagtacatatttgagatatgacacasaaatgaccatcactttccaattttagtgaactgaatataagatatagaggaaattttgatcctacaatcccagaaatcagatatcagatcatataaaagat

SEQ ID NO: 324289 - DNA, 615 bp, Homo sapiens
tgtgttttctttccttttctttaatttacagcatttttcagaccatttggtccctatgtgtatactgctgattacagagttattctgttaaaataattatgaagagaaaaattcaattgtgtattttgacacataattgtatttatatactcttaatttgttgattattttgtatacatagaaaaaaggctttgtgaattactatggaccacagagatttgggaagggaaggaaagttcacacagaccaaattggactagctttgctgaagaatgaaatggtatggattttgaaaaatgtaatcttatctgtttctgtcaattatacttactacataacccagctccttgctttcttaactctatcatataaatgcgtgtacaacactcacataccaaatatattacattactgaacatttagtaagctgctgctctgtccttgatatcacattacaaaaaagccaacagtgtgagtgtccttgtggttagtacatatttgagatatgacacacaaatgaccatcactttccaattttagtgaactgaatakaagatatagaggaaattttgatcctacaatcccagaaatcagatatcagatcatataaaagat

SEQ ID NO: 324290 - DNA, 438 bp, Homo sapiens
tgcatgcctgtatcaaaacatctcatgtaccccatatgtatatatgcctagtatgtactgacaaaaattaaaagttaaaaacaagaaaagggaagtgaagagttagaaccagccatgggaaagtcttcagagggaacatcaagttcaaggcaattagcaggatgtgagcttggcacattcaaggaagaaaaaggctaatgttagtggggcaaggggttacacagtatgagataagattcagaaagccaaatcacattgggttttataacccatggattattttctgcatgcaacaagaagtgactgaaaagttcacacaacttaattagcatgggtactcayggatgaggattgtgtggcattacatataaaacaaactaattgtgcctatactgatttcaaagacaatatggactcaatagagaaattgtaagttat

SEQ ID NO: 324291 - DNA, 622 bp, Homo sapiens
tggaaattgtccttcctgatgcctggctttttagatggatcagagtgtccctgaaacatttaaaaaagaaataaacaggattatttgacatatttagtcacgtgagattgccaaaatgatgttcagtcttctttaagttatattttggtgaataatactaatatatgttcaaatattgtatggaatttctaaaattctaatgtctaagtatacgctatcaatcataattaagggtaaagttattgtaaaccacggagataaacaaacttctttgtcagtcatgtttttmactgttaactatcctggaaatgttgccattcacagacaattgttgtcttgctttgtaccttctcaaaagatggtttataatcaagccatattaaggactttaacaggtgttctcaaatgcaggtttttaatagctttgaagattgtaacactggaataaagaatgtacaggactcctaaagaactgacatgttcacaaatatcaagcaaaacaagagttaactaagtggactctactcaaaaagtttaagcaaccttttcaacttttccttggaatattgctgatccttattttgtttttcagagtcaaggaaacttattttaaactatttat

SEQ ID NO: 324292 - DNA, 536 bp, Homo sapiens
gggtatgtgcccaaaaacagagcatcaaaatacatgaggcaaaactgatagaactgtaaggagaaattgataaaactaccattatatttgtagacttttacactcctataatagaaatggacagatctagcagaaagaaaatcagtaaaaacatgattcagctcaatagcaccatcaatcaactggataagaatggaacacatgggccaaagaataaatctggagagaaatttcaaaaatattttgaattaaatgaaaatgaaaatacaaattatcaaaatttgtgggatgcagtgctgagagagaaatttatagcattaaatacagaagaagaaacttcttttctaatatatrcattcaatgctacatattggtagtggagggggagttgtgtgtgtgtgtggggacaggaagtatataagaactctatattctttccactcaattttaatatgaacctgaaactgctctaaaaactaaattttattaatgcaaacaaaccagataacacttcatacccaatggaataagctgaa

SEQ ID NO: 324293 - DNA, 602 bp, Homo sapiens
aggatttggggttatttaaccttatttttcctgccttctaaagtcagatttatctacattcagtatagtttttgatctaccagttggtatgtgatcttgacaaaccagaaaagaagaaagactgtgtcagcaaatttggttctgtcttgaytgaactttaccttgttggaatggtccttttttgtgccatatatttcttcaacactctaaatgtaagaggtatgctccttgtgttagcattgatatgatcccggaattgttaattctacattttgtccaaacctttgttttccatgataaacatgtccaaatctacctgagatattgagcctacccccaatcacaactgatgacctttttctttggactatctttgaccctcacctttggtaatgacgagtaactggggagaattacttggggaaaggtaaattagcttcacattctttatacttaatctcaaaagaaagtcagatttatatattccctaaagagaccagctcctaggcctacaagaggtgaagataatttcatttaatgtattaacttattgatactcaaagtgtggtttacgaaccagctatactgatataactgctagc

SEQ ID NO: 324294 - DNA, 602 bp, Homo sapiens
aggatttggggttatttaaccttatttttcctgccttctaaagtcagatttatctacattcagtatagtttttgatctaccagttggtatgtgatcttgacaaaccagaaaagaagaaagactgtgtcagcaaatttggttctgtcttgactgaactttaccttgttggaatggtccttttttgtgccatatatttcttcaacactctaaatgtaagaggtatgctccttgtgttagcattgatatgatcccggaattgttaattctacattttgtccaaacctttgttttccatgataaacatgtccaaatctacctgagatattgagcctacccccaatcacaactgatgacctttttctttggactatctttgaccctcacctttggtaatgaygagtaactggggagaattacttggggaaaggtaaattagcttcacattctttatacttaatctcaaaagaaagtcagatttatatattccctaaagagaccagctcctaggcctacaagaggtgaagataatttcatttaatgtattaacttattgatactcaaagtgtggtttacgaaccagctatactgatataactgctagc

SEQ ID NO: 324295 - DNA, 602 bp, Homo sapiens
aggatttggggttatttaaccttatttttcctgccttctaaagtcagatttatctacattcagtatagtttttgatctaccagttggtatgtgatcttgacaaaccagaaaagaagaaagactgtgtcagcaaatttggttctgtcttgactgaactttaccttgttggaatggtccttttttgtgccatatatttcttcaacactctaaatgtaagaggtatgctccttgtgttagcattgatatgatcccggaattgttaattctacattttgtccaaacctttgttttccatgataaacatgtccaaatctacctgagatattgagcctacccccaatcacaactgatgacctttttctttggactatctttgaccctcacctttggtaatgacgagtractggggagaattacttggggaaaggtaaattagcttcacattctttatacttaatctcaaaagaaagtcagatttatatattccctaaagagaccagctcctaggcctacaagaggtgaagataatttcatttaatgtattaacttattgatactcaaagtgtggtttacgaaccagctatactgatataactgctagc

SEQ ID NO: 324296 - DNA, 455 bp, Homo sapiens
aaatgtacaaggtatctttygcatttttttttcccttatgctttgccccaggggtgagccccagtcacagagcagcgcatcagcagtggatgcataattaaaacttcgataggaagctcgtcttccaaccagagaaaccaacaaagaagattctgggggctggagagaggagagaatctcagagaagagagaaccagaaaagagaatcccctgattctatgtaaaacctgcagatgtttcaggctcacttattattcatggatgcgagagacaagttcaaacaagtggactaagtgtttttggaactgaactgagattttaaccaccacacaaagaaagtgagacagactttgtgatctgaacctagccatgttgattgcctgctaaagaaaaatcaacattctccagagtattataacagaacttagagtctacacaacatgacatttgcaatg

SEQ ID NO: 324297 - DNA, 455 bp, Homo sapiens
aaatgtacaaggtatctttcgcatttttttttcccttatgctttgccccaggggtgagccccagtcacagagcagcgcatcagcagtggatgcataattaaaacttcgataggaagctcgtcttccaaccagagaaaccaacaaagaagattctgggggctggagagaggagagaatctcagagaagagagaaccagaaaagagaatcccctgattctatgtaaaacctgcagatgtttcagsctcacttattattcatggatgcgagagacaagttcaaacaagtggactaagtgtttttggaactgaactgagattttaaccaccacacaaagaaagtgagacagactttgtgatctgaacctagccatgttgattgcctgctaaagaaaaatcaacattctccagagtattataacagaacttagagtctacacaacatgacatttgcaatg

SEQ ID NO: 324298 - DNA, 455 bp, Homo sapiens
aaatgtacaaggtatctttcgcatttttttttcccttatgctttgccccaggggtgagccccagtcacagagcagcgcatcagcagtggatgcataattaaaacttcgataggaagctcgtcttccaaccagagaaaccaacaaagaagattctgggggctggagagaggagagaatctcagagaagagagaaccagaaaagagaatcccctgattctatgtaaaacctgcagatgtttcaggctcacttattattcatggatgcgagagacaagytcaaacaagtggactaagtgtttttggaactgaactgagattttaaccaccacacaaagaaagtgagacagactttgtgatctgaacctagccatgttgattgcctgctaaagaaaaatcaacattctccagagtattataacagaacttagagtctacacaacatgacatttgcaatg

SEQ ID NO: 324299 - DNA, 598 bp, Homo sapiens
aatggaataatactcagaagtaaaaaggaagtgactatcaacacacagagtttgatgaatctaagtgaaaagatctagcctcaaaaggttgtatactgtatgattccatttagatgataccttggaaaaggcaaaactatggggagtgaaaatatgcaagtgattgcatagggcaagaggcagattacgaaaggacagcacaaggaattttgtttcttaattgatgtaactgttttgtatcctgattgtagaggcagmtacttaaatctatacttgtgttaaaattcatagagcttctcacagaagttaattttacagcgtgtttatttttgaagtgacattacaatctctttaatgattacatctcttatttatacctcaggtaaaactaacaatactgacgttcgtgctaagaaaaaattcatctatttcttttaaaattctgaatagacaaccatgcaaaaattgaaacaattaaatacatataaatattttagcagtgctgtcaagaaaattatattaagtaaaatgtataacaaagttaatttaacatgcattactgttataaaacattagtattggtttccatggtatgcag

SEQ ID NO: 324300 - DNA, 533 bp, Homo sapiens
actgttgtgtttaaagaaacaactcttggatttattgagaaattatattttgtttttaaattcattaaatatctgtctttgtarttattacaggttcttctctgtttcctttggtttattctgtggttgcttttgtaacttattccacagattactaaattcctttattttattggtattttaataatgagagcttttaagattattgcctctgagaataactttggctgcatgatactacaataataagtaatgtttgttgtatctctattattttttaagtagtctattattgcaattttgaattttttgtcctaatagactttttaaagaatgttttaaattatcaaattgctgggttttatttctgtttgtttttaaactttgattattaatttgtgatttactatattgtaactggacaattttctgctcagtttctgatttaataattttatttatgagtagaatataatcaatttttatacttatgaaatttgaaaataatatatatgctctttgtatacaaagtt

SEQ ID NO: 324301 - DNA, 593 bp, Homo sapiens
agccaagctgggattccgccaagcccggtccatgggaaacaacacggtgccagatgggagtaaagtgcagctctgctccagacgcgaggcctgagagaggccttgtgcgaaatccagggactcacaaaagagaaggcacagagctggtggccagctgccttctgaagggtgcattctggcattctggcaagtacaactgcagaactcaccctgggctccggatgacattgaaagctgtcagcctccaattagtttctggcagactctgcttggatttgagcttcatgagggcactgtcccccctttctcaccagtgtccgacatctccaactctgcccacagccaagccccatmaccacacacctattgcaattctgcagagccctagctaaaatgatcatccttcccccaaagtaggaactcagggatctgtgatcctctttctcttttgagcacctgttgcccagaagaggatgccgattggtcatctgggaggagtagcaagagttatctggacatgggccccttgcctgtcattctcagacacttgctggggtttaatgaaactggtgtgattcttcaggcactgcatc

SEQ ID NO: 324302 - DNA, 597 bp, Homo sapiens
ttgctggcattggctcagaagctccacaggtcagggctgctgtctctgtgattcctgtcatctttcccctatggggcaagactgtgatggcatcttcaaatgcagcattcaccttcagacgaaagcagagcagtggtagctgtgcctttcctttttactgggagagctaaaagccttcctattgctgccaggagacttttacttgaatttcatacatcagagcagtgttaaaggactaagccatctcaagctgcaagggagtctgggggacattgctttaatttccccacttcagtatgggaggagaaaagggagaaggaggttagaaatgtagtatcaaccaataaacagggtctgccayaatgcccagcagaaatgaagtctgtattttctctggtctagttcagtataccagtattgtcttatacacctatttagcactgtatagctaagtatatagccgcaagtataggagactgggaagcttcatggaatctaactgcaacaaatatgattattggtcatggaaggagaagctactgccaagaatagaggttaatcatattacactaaaagtgtcatctgctttgcatttcc

SEQ ID NO: 324303 - DNA, 577 bp, Homo sapiens
aaccatctgcagagagtgatcagaatgacagcctcaggaagtaaccacggcaagaagactatagggagtaatctgaaaggagcaggctccaggcaggccggacggaggctgtccccttagggttgagggtgtggctagagaaggaaattggaaattgtgagcaaagtgctccgtgaaacttacactttatgggacaggtttatgcctaaattaaatgtataggaaaatatatgttgtccttaggcctcagcgttggcttgtactttctcataaaatccttttgtgtatgttygtaaactttaggtagctttaaaggtaactctctgaaatgggttgatcctttctgactcttaagcctcaagattctggtacccagactggaaaaaccatgtaactaacactgcttataaggccccctttagcaaggtgttttcagtctgagttttctatatgctacagacgacttacagtggtcctcaccaaagaggcagtgatcctggaggctagcctggaaactatttttggaggtgggagctgggaaatactagatctctctttctgcctctgacttagcctt

SEQ ID NO: 324304 - DNA, 447 bp, Homo sapiens
tcacgatgacaataataatggccctcaactatatgattagcttgttttargatgacatattgatagaatttaatcctcaaagataacgctttaatattatgttcattacaaaaatgaggaaattaaagatttgaaagttgaagtaacccactcaaggtcacaaagctagaaagtggcatagtaatgatggtaatctggatcttagtgttataaaacccattaatactttcaattaccttgctggaaggccccagttgttgaaaatagggtgggagggaatcaagagtgtagacctagaagtcaaagtataaatttaaagagagcatatagagagatgagtgcattttagaagacaaagagggaagaaattcaggtggcctgataaaaatggtatatagttttttaaaatgtgagacagagagagagagagagagagagagagaggga

SEQ ID NO: 324305 - DNA, 581 bp, Homo sapiens
tagaacctaaacctacttctgtaatgaattggaatgacaaccattatcaatctttttaaatctctgcttaagaaattgtattcaagatggtagactccaactggcttcatttgtgttgtgtgtcatcttttcatcagactgtaaacatggggaaaaggttaatttctcatatgaagtgcrgagaatggtcattgagtaaccaaaatcaacatctgacctgttttgaccaacacaagaggctgttgggagtagacataaaactgaaattgccaatggtccagcagcaatcatgaatccacccaacaagttgggaaactctgagatggaaatggagttaggggatcagactcttcccaaattttactcagaagggtacaatacaggacaataataatgttgccctcaatgtaaaggaaagagtcattttccacaaaccactttactctatgctgatagaaaaatagcataaatactagcattcttataagacatttaattttgaatctacatttgatgataatccaggaaaattattgaacctgggccctcctcactacattgggctgatttagcgaatgatc

SEQ ID NO: 324306 - DNA, 495 bp, Homo sapiens
ttgggaaactctgagatggaaatggagttaggggatcagactcttcccaaattttactcagaagggtacaatacaggacaataataatgttgccctcaatgtaaaggaaagagtcattttccacaaaccactttactctatgctgatagaaaaatagcataaatactagcattcttataagacatttaattttgaatctacatttgatgataatccaggaaaattattgaacctgggccctcctcactacattgggctgatttagcgaatgatctgttaatgagttgttaatcacttattcaaattgggagggttgggtgattgagcaggtgctgaacctggaggaagaatctgctgcaataatacctcgcaatttctatttctctgagggaaggctcttcttgcttgaattccttattttttttcttccactttctagcagaatctcragcaaaattgtctcctgatgtgtcctgaaattctggtggccagagt

SEQ ID NO: 324307 - DNA, 520 bp, Homo sapiens
gaacctacacaattcaacaagcaaaaaacaaatmacccattaaaaagcgggcaaaggacacagacacttctcaaaagaaggcatatgcacaatgaacgaacatgaaaaaatgctcatcatcactaatcatcagagaaatgaaaattaacaccacaataagataccatctcgcaccagtcagaatgacaattattaaaaagtctaaaaacaatagatgatggtgaggctgcagagaaaaaggaaggctgatacactgttggtgggagtgcaaattagttcaaccaccgtggaaagcagtttgaagatttctcaaagaacttaaaacagagctactattgaacccagcaatcctatcactggctatatacccaaaggaaaagaaatcattatatcagaaagacaatgcatgcttatgttaatcgctgcactaccacaatagcaaagacatggaatcaacctgggtgtgcatcaatggtggattggataaaaaaaaaaaagtggtctatatacaccatggatt

SEQ ID NO: 324308 - DNA, 520 bp, Homo sapiens
gaacctacacaattcaacaagcaaaaaacaaatcacccattaaaaagcgggcaaaggacacagacacttctcaaaagaaggcatatgcacaatgaacgaacatgaaaaaatgctcatcatcactaatcatcagagaaatgaaaattaacaccacaataagataccatctcgcaccagtcagaatgacaattattaaaaagtctaaaaacaatagatgatggtgaggctgcagagaaaaaggaaggctgatacactgttggtgggagtgcaaattagttcaaccaccgtggaaagcagtttgaagatttctcaaagaacttaaaacagagctactattgaacccagcaatcctatcactggctatatacccaaaggaaaagaaatcattatatcagaaagacaatgcatgcttatgttaatcgctgcactaccacaatagcaaagayatggaatcaacctgggtgtgcatcaatggtggattggataaaaaaaaaaaagtggtctatatacaccatggatt

SEQ ID NO: 324309 - DNA, 432 bp, Homo sapiens
acacactccccaagtagtgtttatgtacactaaagtttgacagttttagtctctcactgatttgccttacctattactatggccarcacatttaataagattaatgacctaacctctctgcctacagtatatgagaagtataacattagaagatgaaatgggaaagaaaaggaaaagctctttgaaggtagcacacgtatcaggagaggtgatatttgacaaactgctattgagaaataggaaagaaacactaaaaaatagatgtagacctctatttacctcagcaaaacaaatcatagaaattacttatgcccatcctgagtcacaaaaagagtttaaattttattcagtgccctttttctgttaataccaggaaaggaataataaatgtttaaaggattttgaaaaacaactttagattaaaacttattc

SEQ ID NO: 324310 - DNA, 628 bp, Homo sapiens
aactccccatgggcctgtggtggtggccaccaggataggtttctctgcatatggaaaggggagggaagatcagagaaaactttttcttgtggtttgaggccaacttagctgaagtagaatagaacactaggtagatttccaaggtttttgactccagtccctagctcccagatagcaactgtggaccaacttggggactgaaggaacttgctgccctgaagggaggagccctaggacctatagtaaacataggtggtagccaggtagtggttatgtgggttttgagtgagatccactgctgtgctggcttcaggcctgacccagtacaatctcagtgctggtggtcacagtggtacttgcatcackccacctctagctccaggcagcacagcagagagaaagactcccttttttaggaaaaaataaggaaagagaacaagattctctgcctggtaatccagagcatttttctggattggatattatccaagaccatcagggtggtaattctatgagtctacaagaactacagtactattgggcttgggtctcaagtccctttgaatacgtggaaagccttccccagaaaaacaggtataaataagcccagactgtgaagattataata

SEQ ID NO: 324311 - DNA, 628 bp, Homo sapiens
aactccccatgggcctgtggtggtggccaccaggataggtttctctgcatatggaaaggggagggaagatcagagaaaactttttcttgtggtttgaggccaacttagctgaagtagaatagaacactaggtagatttccaaggtttttgactccagtccctagctcccagatagcaactgtggaccaacttggggactgaaggaacttgctgccctgaagggaggagccctaggacctatagtaaacataggtggtagccaggtagtggttatgtgggttttgagtgagatccactgctgtgctggcttcaggcctgacccagtacaatctcagtgctggtggtcacagtggtacttgcatcactccacctctagctccaggcagcacagmagagagaaagactcccttttttaggaaaaaataaggaaagagaacaagattctctgcctggtaatccagagcatttttctggattggatattatccaagaccatcagggtggtaattctatgagtctacaagaactacagtactattgggcttgggtctcaagtccctttgaatacgtggaaagccttccccagaaaaacaggtataaataagcccagactgtgaagattataata

SEQ ID NO: 324312 - DNA, 628 bp, Homo sapiens
aactccccatgggcctgtggtggtggccaccaggataggtttctctgcatatggaaaggggagggaagatcagagaaaactttttcttgtggtttgaggccaacttagctgaagtagaatagaacactaggtagatttccaaggtttttgactccagtccctagctcccagatagcaactgtggaccaacttggggactgaaggaacttgctgccctgaagggaggagccctaggacctatagtaaacataggtggtagccaggtagtggttatgtgggttttgagtgagatccactgctgtgctggcttcaggcctgacccagtacaatctcagtgctggtggtcacagtggtacttgcatcactccacctctagctccaggcagcacagcagagagaaagactcccttttttaggaaaaaataaggaaagagaacaagattctctgcctggtaatccagagcatttttctggattggatattatccaagaccatcagggtrgtaattctatgagtctacaagaactacagtactattgggcttgggtctcaagtccctttgaatacgtggaaagccttccccagaaaaacaggtataaataagcccagactgtgaagattataata

SEQ ID NO: 324313 - DNA, 534 bp, Homo sapiens
caaatcagttaatgtgattcatcccatagacagaatgaaggtcaaaatctgtctgatcatcttgacagatgcagaataatcatttgataaaatttagtaccccttcatgataaaaaccctcaataaactaggratagaagaaacatacctcaaaataataaaggccaaacaacatatctgcagtcaatatcatattgaatgtggaaaacttgaaattaatccccctaagaactagaagatgacaaagatgcccactttccccacccttattcaacatagtactggaagttctagccagagcaatcagattaaaaaaagaaagaaagaaaagacatccaaattagaaaggagaaagtaaaattatttgtttgctgaaaatataatcttatacctagaaaaccctaaagactcttctaacttttggatttgataaatgaattcagtaaattatcaggatacaaaattaatacacaaaaatttgtaacatgtctatatgccaataagaatcaagtagtgaaccaaatcaaaatggcc

SEQ ID NO: 324314 - DNA, 620 bp, Homo sapiens
aaaaaaatgtgaatgacacaaacaaatgggaaaacatcccaagctcatggattggaagaattaacattgttaaaatgaccatacttccaaaagcaatctacagattcaatacaacccctatcaaaatatcaacgttatttttcacagaattagaaaatacaattctaaaaatcatgtgaaaccaaaaaggagcccaaattgccaaagcaatcctaagcaaaaagaacaaagctgggggcatcaccttacctgacctcaaattactctacaaggctctagtaaccacaacagcatagtactggtaaaaaaaaaaaatagacacgcaggtctatggaacagaatagagaacccagaaataaagccacatatttatagacaattgatacttaacaaagtcaacaaaaacatacacwggggaaaggacaacctgaagctataaagaatactaaagaaaacctagggaaaactcttctggacattggtctaggcaaataattcatgactaagactcaaaagcacaagcaacaaaaacagaaatagacaagtgggactttatactacaaagctgcaatggcaaaagaaataagagttcacagacaattgacagaatgggataaaat

SEQ ID NO: 324315 - DNA, 594 bp, Homo sapiens
atcttgaagaaagcatgctgacatttgccttttatagatggatatgtcagctagtactactagataacagtggaaaaatcatgttctaataacatattctcaggatttgcttacaaaaattattgaggaccaagagtttccagctattataacatacagtggctgatcatcctgtggatagttgaagcataatagaggtgaagatcatttaaagggatgaggctgaatagttgagagattggggtacatgagaaataaataaggttttcaaaaatgaaggctacttttggatagsatactcatgccataattgattggataaagatgtgaatatgctgcatatgtaccagggtgctgtactcaaagatttggagcttaaaccaagatagtttaagtctcattctgtagatgcagagattctgagatagagaaaaacagactgtgcaggtcgtctttttaggatctgagagtatttagatctcttgacttcatgatgtatccctataaccttataatatctcttttttattatgatagttggtggattttttgtgacttaagaaaaactctaactaatatgctttgtccatcctc

SEQ ID NO: 324316 - DNA, 489 bp, Homo sapiens
cccacatagaacaagacaaaacaggaatctgtaattgagagttgagttcagaatggaactttgcagaggacagtcacacatttgctggacaaaagatccaaccatcagactttataaagactgagggatgatgtagtacaatcccactgtgttaaagattcgtttacaaggagccagagaagttgactgacttgccaagtcacattactaataaatgaaaaggaggaaatgataccagatcttctggctcaaaatcctgtatctttcttcaccacaatgtgcagtcttcttgggaccccgaatactctgcctgggtctggcttcacgaagcattgtttgatgtgctcaaaatagttggttcacscaaaattgaactgcctctagagaaatgtcatgttgcattgccaatctacctgtgggttcagctcactatggttatgacctctttattcatggcaggggtaagggagataattaattcaaaaaata

SEQ ID NO: 324317 - DNA, 530 bp, Homo sapiens
ctaagtacctaggactttcctttctaaaatcttcaatttctttaaagtctatttctaagttctattttcttgaggaagtggtccatgaccacctctcctaatgtttcttctctaatgttccatagcattcattcatttgtacagttagttttacaggcagctgtattctagtatttttctgattcttgtaatacattatattgtcttcttcagcagggcctttgcacatactgttccttgaaatccttcctctgcacccttcaactggttkcctctttcctatccttcagtttttcagttcaaatgttatttttatagcatgaattaagtcccctaattttaatctttcatagaactgatatttagtatagttgctaattaggatttatttgtttaagtatttgactttccattagactatatcgtctgtgaggaagatgctatttgcttttggtcacccgtgtattttttttttttttttttttttttttgagacagagtctcactctgtcgcccaggctggagtgcag

SEQ ID NO: 324318 - DNA, 401 bp, Homo sapiens
aggttttaatggagttccctgcagcccaagttgggactgcattgagattcagcttctcctcctgcccagccctgcttytgtccactccctcccaaggtggtgataccaaaagcatttccagtcaagtacctgtgtgctaattgctaatctccatctccaggtctgtgtctccaggaaacatgcctatggtaataaggacaaagacctataccagggtatgggtactaagaagtaggagggagcacaaactaattcaagacatagatggtataggactgacaggattgggggaccaactggacacaaagaagagggacaattttctaacatgaaatattgactggctgattttatcatgaacaaccttaaatacaaggatggactatatcaccctggagatc

SEQ ID NO: 324319 - DNA, 562 bp, Homo sapiens
gactcataagtgcattaaagtttgagaggcattgctctagatgaaaccccttattatatagattaggaaactgtgggcctgatctggggcattattagctctcattaaaacaatcacaaaacagagcctactcttcttctttctctggccatactgctcttccccatatgacactgcccctcttgaaccttaaattcagtgttaattgtgtatatgtgatcactagtaaaaaagcaactggccccccattcgcataaacagatactgtgtctgagtttctgtgatttctaatattattgcaaaaacaactagcacagtgtctgtgtatgtastgggtgcacaatggatactataataatattagtattgttagtactgacagttattagtgttatgtgcatggtaaaagcaagagaaaatggtgaaagcttttcaggcaaggtatcttgtcctcttatccacccaagtagcttcaagaccagaccaggaaatgatggaaggaagtggctatggtgggacctgggtttattttcacttagtttcctgccagaggctaggaggt

SEQ ID NO: 324320 - DNA, 575 bp, Homo sapiens
tagaagtgccatgagatgagagctatgggtgaatatgaacaaacaccatgagagaataagagaacgtctgatgaagaataaaactaagtgagcacctrtaatagctgcaggttgtgataatacattacatatctgtgttactgagtttttcaaggggtaggtggtaggaaagtctccttcgaggtagtaatatttgagttaagccttgccgatcaagtagcgtttcaccagctggcagaatgaagaagcgtccttgttagtagaaggactaacgtaagcaaagatgggacacaatggaagtgtgtccagagaatttaacaaatagctttgttaaatcatgaggtatacagaggagaatagcagaggatggtactggaaaggtacgtggaggtttgattttgaatagacctgaatgtcctactaaatagtctggcctctatctaatccattgccaaattttaagtagtacagtcacataaaaaatgtatttgagttttagacatatatctctggcattttggttgtgagaaaagttggagttaggaagaaccagcttataatactattaacatagt

SEQ ID NO: 324321 - DNA, 401 bp, Homo sapiens
aggttttaatggagttccctgcagcccaagttgggactgcattgagattcagcttctcctcctgcccagccctgcttctgtccactccctcccaaggtggtgataccaaaagcatttccagtcaagtacctgtgtgctaattgctaatctccatctccaggtctgtgtctccaggaaacatgcctatggtaataaggacaaagacctataccagggtatgggtactaagaagtaggagggagcacaaactaattcaagacatagatggtataggactgacaggattgggggaccaactggacacaaagaagagggacaattttytaacatgaaatattgactggctgattttatcatgaacaaccttaaatacaaggatggactatatcaccctggagatc

SEQ ID NO: 324322 - DNA, 559 bp, Homo sapiens
aatagctttgttaaatcatgaggtatacagaggagaatagcagaggatggtactggaaaggtacgtggaggtttgattttgaatagacctgaatgtcctactaaatagtctggcctctatctaatccattgccaaattttaagtagtacagtcacataaaaaatgtatttgagttttagacatatatctctggcattttggttgtgagaaaagttggagttaggaagaaccagcttataatrctattaacatagttcaggcaagagttgcaagccctcgtgccagctcaggtacagaagaaacagatacgttatgcaaagatctcttctcatcccttccttgtgtctccctgggaagggcagagaatgaactgcttagcctaagatcaacatctggggttcacacaagtcacctgtggtagagtctcctttgttcacacatatttaaatacaagaaaagctgtaaagaaaaggaaattatgtatacacttagttatacttggaagttaatcaccaattgcaaccttggtacttttaactacttggattatagtcagaaa

SEQ ID NO: 324323 - DNA, 559 bp, Homo sapiens
aatagctttgttaaatcatgaggtatacagaggagaatagcagaggatggtactggaaaggtacgtggaggtttgattttgaatagacctgaatgtcctactaaatagtctggcctctatctaatccattgccaaattttaagtagtacagtcacataaaaaatgtatttgagttttagacatatatctctggcattttggttgtgagaaaagttggagttaggaagaaccagcttataatactattaacatagttcaggcaagagttgcaagccctcgtgccagctcaggtacagaagaaacagatacgttatgcaaagatctcttctcatcccttccttgtgtctccctgggaagggcagagaatgaactgcttagcctragatcaacatctggggttcacacaagtcacctgtggtagagtctcctttgttcacacatatttaaatacaagaaaagctgtaaagaaaaggaaattatgtatacacttagttatacttggaagttaatcaccaattgcaaccttggtacttttaactacttggattatagtcagaaa

SEQ ID NO: 324324 - DNA, 559 bp, Homo sapiens
aatagctttgttaaatcatgaggtatacagaggagaatagcagaggatggtactggaaaggtacgtggaggtttgattttgaatagacctgaatgtcctactaaatagtctggcctctatctaatccattgccaaattttaagtagtacagtcacataaaaaatgtatttgagttttagacatatatctctggcattttggttgtgagaaaagttggagttaggaagaaccagcttataatactattaacatagttcaggcaagagttgcaagccctcgtgccagctcaggtacagaagaaacagatacgttatgcaaagatctcttctcatcccttccttgtgtctccctgggaagggcagagaatgaactgcttagcctaagatcwacatctggggttcacacaagtcacctgtggtagagtctcctttgttcacacatatttaaatacaagaaaagctgtaaagaaaaggaaattatgtatacacttagttatacttggaagttaatcaccaattgcaaccttggtacttttaactacttggattatagtcagaaa

SEQ ID NO: 324325 - DNA, 559 bp, Homo sapiens
aatagctttgttaaatcatgaggtatacagaggagaatagcagaggatggtactggaaaggtacgtggaggtttgattttgaatagacctgaatgtcctactaaatagtctggcctctatctaatccattgccaaattttaagtagtacagtcacataaaaaatgtatttgagttttagacatatatctctggcattttggttgtgagaaaagttggagttaggaagaaccagcttataatactattaacatagttcaggcaagagttgcaagccctcgtgccagctcaggtacagaagaaacagatacgttatgcaaagatctcttctcatcccttccttgtgtctccctgggaagggcagagaatgaactgcttagcctaagatcaacatctggggttcacacaagtcacctgtggtagagtctcctttgttcacacatatttaaatacaagaaaagctgtaaagaaaaggaaattatgtatacrcttagttatacttggaagttaatcaccaattgcaaccttggtacttttaactacttggattatagtcagaaa

SEQ ID NO: 324326 - DNA, 533 bp, Homo sapiens
agatgctcagcacttgtcaatactctttccagctggcaggtgagatagaacttggctcagcctttgacaactgtaatggcatctatgggatttatttgcaagaagctggatgccttctctcttaagatgctttcatttctgggcatgggatgccacacccagggcctggtgcatgtaatgagtggcagaaatgagcatgtccattgtagaagatgttaaaattacttactttggggtcagttcttttttggggggaaagrggcatacatgatgggtgacaaggcaatagtaggaatttgctatttggtaatccttccctgtgaaggagagaactaggacagtcctaactgagctgtgtcatgggttccacacacaaacacagatcaccaccactctactaactgcacatggagcagtgttttacttcaaagtgctgaaccactgttacatcttgttcttaaatcacaaggtttaaatagcagtgccatgtttaattagggcccgagtaagacttctgctttgaggaagaacaa

SEQ ID NO: 324327 - DNA, 533 bp, Homo sapiens
agatgctcagcacttgtcaatactctttccagctggcaggtgagatagaacttggctcagcctttgacaactgtaatggcatctatgggatttatttgcaagaagctggatgccttctctcttaagatgctttcatttctgggcatgggatgccacacccagggcctggtgcatgtaatgagtggcagaaatgagcatgtccattgtagaagatgttaaaattacttactttggggtcagttcttttttggggggaaaggggcatacatgatgggtgacaaggcaatagtaggaatttgctatttggtaatccttccctgtgaaggagagaactaggacagtcctaactgagctgtgtcatgggttccacacacaracacagatcaccaccactctactaactgcacatggagcagtgttttacttcaaagtgctgaaccactgttacatcttgttcttaaatcacaaggtttaaatagcagtgccatgtttaattagggcccgagtaagacttctgctttgaggaagaacaa

SEQ ID NO: 324328 - DNA, 551 bp, Homo sapiens
cactgaagctcaagtggagcttcctggtggtgtgaatatgttgatgtgacaagagggtggcagaccctgatttcacaagawggttcagagctctgcatttgagaccctcccagacttcaccctatatatctatttattaagttgttcctgatttgcatcttttataataataaaaacgtaataataagtccagcacttttgtaagttttatgagttattctagcaaattatcaaacctgaaacgatcttggaaaccctggaatttgtaaccaatagttcacaaatgctggcgatctcaaaaatatggctggcatctgaattggtgatagtcttattgagaatcgtgctctttagcctgtggagtctgcattaactacaggtggctagtgctagaattaaattgtagtccccactggatagccagatagctggtatcagagcacaggtgaaaaagtaaatgcaagatgttgaccctgttctgtgtctccactgaggtcaagtccctggtcacatagatgcacactgaactgcaataagtcattcgaaagtga

SEQ ID NO: 324329 - DNA, 404 bp, Homo sapiens
cctctgacttctgtagtagattgtggtacagggccaccattcagcataaaatattcgttatttytcttttttcagcatttgcaccgagcttttggtcaagatttaccctgggtattccaggaaagattcacatcaactcaccaaatggccaattcatttgcagagcctctttaaacgtttctggtctgcaggatatagctgaacattttattatatattgcttccactaagatgtagaaaaagacttatttgtaactcctgctctttctaagttccccctttagaatgggcaacataacgcaatgctacgggatttttacttctttcagctttgcttcctgtgccaacatgttaagtgttgaatggatttgtgttagaaacgaagggccaggccaggcgcagtg

SEQ ID NO: 324330 - DNA, 405 bp, Homo sapiens
gaacaagtgggacccgaatcgtactttgcccatttatttttttatataagcaaaactctgatgggggttatgtggcccaaatgtttataaaatttatggaaccgaaacacctgagaaatgttttagctgtatagtcagctcatgagtaactacgagttgtccttttctttctccttttctgtttccttttcttccttattcctacctctcttttttcatctctatcttcctccctccacccctaaacacatacctgttgcatgttgctgagattctgagaagcggtcagtgaatatgacagacacggtgcctgttatcatggagctcacagtycgggaaaaagacaacagaaaattacctacaaaagtaattgttcaagaatattctgataagtgtaataaagga

SEQ ID NO: 324331 - DNA, 595 bp, Homo sapiens
acgggactaaagttactttgtgctgagagggggaaagaagcacaaagtttggtctgttgcgtaattgaatttttaacactcttatccacaacaaacactttttcgtgtcctgctgtgtaaaagacatcagatatattacagattttcaaacaggtgagcatccttttacgagctgggcaggtggggagtggcgtggttttgatggagtgaggagatttggttgaatgaacgctaagatggccagacgcacctcttcgatctcaactctgcagcctgggattccagagctgcaaacaaccactgaattcgttctgtaaacctgttgtcatttgacgtttccaggcaggcatcaacatttacattgtaattcaatagacgctactactacaaaggagctttattcttccagcttaatatggttgctgcgggaacactgcaggatgaaactgactttttttgtggtaatgtttctcctggttgggawcaacgcaaattagcaaaggcgtaatttataaccgctgctaccaaagagtgaagtatttgtggaagttctgactggaatctagctcgtacatatggattgtggaaataaagg

SEQ ID NO: 324332 - DNA, 483 bp, Homo sapiens
gaaaactaatatggatgggagcttacttgcactgggtggagrtggtggcctaggggcctaggggcctaacagctttgtatctggcttttgaatcaatccctctggcatcagccctatcacttactcccaccttcaatgataatcagacacttgattttctaggccaagcttgtccagcccttggcctgtgggccacatgtggcccaggatggctttgaatgcagcccaacacaaatttgtaaactttcttaaaacgttatgagattttttttaaagctcatcagctattgttagtgttagtgtattttatgtgtggcccaagacaatttttcttctaatttggcccagagcagccaaaagattggacacccctgttctatgcctttctgatgttctacaggctaaatggtcatgatcctcagtgtctgcatatgattaagctcatctgtctcaattctgctaaatcagtttttactccttcag

SEQ ID NO: 324333 - DNA, 604 bp, Homo sapiens
ctgtttctgtttcaaaatctgcacacccagcctgcaggtcactgtcttgggtgtggacaaactcatcttctaaatctccatttaatctctagaaccttctcatgtgccctgcccaaggcacctgtggatgtagtaggttacctgcaaagagaaagacatgtgtctctcaaaagaatgtggagaacaaaataaagcagtaatggattataacacaaagtataaatatttatgagttcatatatttttgtaaataaatgaataaataacaaagtgggcaaagaggcaaatctccaatgcagaagaatttcaaattatttatatagacactgcaccctcaaggaggtagaacataactctccacattagyttcttgtggctgctataacaaattgccacactcggcgatttttgacaaagatctattttcacagttataggggccagaaatctgccatcagtatcactgaactaaaatcaaggtgtcagtgggtctgtgctctctctggagtctctggggtctccttgcctcctccagtttctcctgattgctggccgcatttctccactctctgcctctgggatcacattgcttttcccttcttct

SEQ ID NO: 324334 - DNA, 502 bp, Homo sapiens
aagagatgccctacacagaatcccrtatcgggcacatcgtgggttcctagttgatcgactgaaggaacaattttaaatacatgaatccaattgtagtttagcaaagagactttttataaagaagtccctttgtaagaggactgccttcttccaacatctctggcagggtagccatctccagtttattttacttgaaatctcagtgacaaataagtggggaaacccagagcccctttcagctgaagagcatatagcccactaattgaacctatcccacccgggttggtaaccaagtctttactagtgaatccagcatctcctgataatcccataactctgatagaaggaccaatcaaatcaacacacatgattcaatcgtatatttgcaaagtcacccttgtaacagtgggctctagttatagtttgagatgcaaagactatccctcccttctattctggttattttggcacttaacaaattactccaaaaccgagtggtgtt

SEQ ID NO: 324335 - DNA, 627 bp, Homo sapiens
ccctcgtgggccccagactcccctcgggatcagagaccagcaggtacttagcatgcccgtgaatcttctctaagtgttttcttcctgaaaacctgaagcaaagaatgacttaccatcttgggcaggttatttccscttcttggcttcagttttccccactgaagatgaggttaaatcagtgtttctaaatctctcatctgtgaagtgatcctaaacatcctaaaaccaactcaaacattctaaaaccaaaaccaaactctcaaagcaatccagacagtattttttcttacatgtattgaagaacatgtaataaaatagaaagacatatatatattgtgtgtgtatatttttttacataataaactatccttaaggaacagtgacccaggcctggaaacatgaggttgagcttgctaggcagagataggcactgattaccaactgatagtggggttgatggtactgctctatgttaggtctcttgtcttgtaattattacactttttttgtcataaattgtgcttttcattcttaatgcaataaaatgatttaatctaatattttcactttattatgagataaaacaacatgtaaataaactttgcatcttgttgagcatttaactct

SEQ ID NO: 324336 - DNA, 575 bp, Homo sapiens
ctgtgtcacatgttttcacaaaaatgattttatccttacaacagtatgtgaaacagaaaacatccttatttgcaggctccaacctcttccttgttgagtgagttccttgcttacctgagcataagaatgtgcttgtgaggaaaaggaaggtaaggaatccaggtcagtcctgaagctcagagcagcctggcatcgcctagcccagggacccttgatgaggctggttgcctacttgaaacaagggaaagcaaccatgattctgttttgagtctgggaagaggggctagcatgggggaatgggtccctcwgacctttgcccaaggtctagtcaaagggaggagggggaggtggtgaactctgccttcaggaatacacgtggagtggggtgcagtgcaaatagcagggccctaccatccatgtctttctagctttgcacccctggacaagccactttgtataagcctttgtttcttcatctgcaaaaaggggataattctattaaatttgtatatctgtggaatgcaaagtacctggaaatcctagacacccaatacctgctgttattatttttttga

SEQ ID NO: 324337 - DNA, 526 bp, Homo sapiens
ttctgctgaaatttccaggctgctggcctgccctacagattttggacttgcaagccccacaactgtgtgagccaattctttaaaatctctctctctacacccacacacacacacacgcacacacacacacacacacacacacacacaccctgtattggttctgtttttctggagactgtagactaatacagagagatatactatagtcataaatggtaacaattctccccgaaattataaatttaatgtaattcaactaaaactttcagtaggaggtttcatgaaacttgrcaaaattagtattaaaaaggttaaagaagagctaagacaatattgaagatgagtatgatgaggatatttgcccttaagttatgaagacatcataaaactataggaattaaaactgtataacttttgcagaaggatgaattcccattccccccaactttactgaggtatagttgacagttaaacattgcatatatttaagttgtacaacttgatgatttggtatatgtaaacattg

SEQ ID NO: 324338 - DNA, 498 bp, Homo sapiens
tataaacatgactgcaaaactgccctgagttgctactctctgcctatggggcagccctgctctgcaggagcaatcacggagctggatcaccgccagagccgtaacactgctgcttccataaagccattttcttctacctccagtttgccctcgagttctttcctgggcaaagccaagaactctcataggctaagccccagtttggggctcacctgccctgcatcaaaagtaaggaaggagtcacttaaattgttcacaggtggatcacagttgattccagtgctgastctcttctccctgcccagaggcaagaagaacttggggtgaagggaggtttgagtagctttttaattccacagggtcacctctattcctgccttctttattctctcttgatatcgcagtgacaaccgtgatatcagttacagagtattttgcttgaatgacagtgagactgcggaagaaagaatgtcaaatgaagaaaacaagatgcaatat

SEQ ID NO: 324339 - DNA, 620 bp, Homo sapiens
ggggctcacctgccctgcatcaaaagtaaggaaggagtcacttaaattgttcacaggtggatcacagttgattccagtgctgagtctcttctccctgcccagaggcaagaagaacttggggtgaagggaggtttgagtagctttttaattccacagggtcacctctattcctgccttctttattctctcttgatatcgcagtgacaaccgtgatatcagttacagagtattttgcttgaatgacagtgagactgcggaagaaagaatgtcaaatgaagaaaacaagatgcaatattgacaaatgtggtgtgtggccaggtgtggtggctcatgcctgtaatctcagcactttgggaggccgrggtaggcggatcacctgaggtcaggagttcaagaccagcctggccaacacagtgaaactccgtctctacaaaaaatacaaaatgagctgggtgtggtggtgtgcacctgtaatcccagctctgtaactgatgccttgcatcagacacaggggaagtgagaggcagttgggctttggcctaagaaaagcacctgacaaacatacatgtgtaattttattataaaggaagatataaaaatgggggtaaatgaactcattt

SEQ ID NO: 324340 - DNA, 550 bp, Homo sapiens
aatctgcccaccttggcctcccattgttggaatcatagattataggtgtgagccaccatgcccagactggagccttaatttttaaaaaagtttgattgagatataattaacataccatgcaatttgtccatttaaagtatacaattcactgggctttagtatgtgcagagttgtgcaaccatcatcacagccagtattagarcctttgcctccaaaagaaaccccctactctttaactatcaccccatcttttcccccgaccccagccttcaaaaagcactgatatgtctctgtaaatttctctattccagacttgcatatgaatgggattatataatatgtggcctttgtgcctggtttctttcacttagcatgttttcaaggttcatgtgtgttgtagcatgtatcatcacttcatacctttttatgactatcattccattgtatgtatatgctacattttgtttatccattcatcaggtggacattcaggttgcttctaccttttggctataatgaataatgctgctataaacatttgttttcaagt

SEQ ID NO: 324341 - DNA, 568 bp, Homo sapiens
gctcctggcctgtaacacaggcgatggagcaggtgctctctgaagccsctcccaatgctgacaaaccctccagggactccaacactagcctcacgctgtacactctgtgagtgccatcctctctcaggctgctgatttctcccactcatgagccactgtgcctggccgaaggttcattcttgctaacatctgcacgggaggccattagaaaaaaggcccttttagagttcaaacgtgccagtgagagaacaaggacgcctacttccaaccgcaggaggtagacctggaattctagagctgtcagtgaaattcccaaggctacctctgacttatattgtttgactgggtaagttgatgagttattttttgtttcaacaaaggtagtggttgaggtaaaatcaggtgtcctttgaaaactggatgaccatggagatgtagaatagtgctaaaatggacaaatcaacagctaatctggtgaacttggcacctgttctagggaagcattgccatttgggtggcctcgcttggactatggtttggtgttgagtctcagtccaaataaagtatg

SEQ ID NO: 324342 - DNA, 594 bp, Homo sapiens
caacttccaacaaggcaaatggaatcagcaaagaaacatacagactggagacattccaagtatgatatcttccatatgtgaaaactaagttatacattatgttgcacacaattagataaactaccaagatgaagagtcaaaagaaattgtatggtacataaacatcagatatttggcttatgtttaaatatttttcaatacaatgaaaaaacagaaaaccaaagtaatgggcaaagaaaaaaaactagaagcttctcaagtcatatctgaaaaaaaagcaaattgaaagtaagctattacaaatgtggtgaaacaatgtaatgtacaacatatgggttacatatgaaaatacactgagctgatgagaggccaataaaatagaatactaaccaaaattgatgtagttacatattttacagaaggcgaattaataragaatgaaatatatacatatatgaagattggattgagaagaaatgaacatctaattgctttactagactatataaaaaaagaaatatttaaagaattggtgattaaatagtttctaaaactgaaaacctttaaatcctttaaaagtttagaagtgtaatg

SEQ ID NO: 324343 - DNA, 570 bp, Homo sapiens
aatagtgttattcccctattatacatgattatttatacactttgggacttaagaatattgggaatacactaaagtgaaagacagtataatgagaataaacttgagctgcattttgtgtttactgagagtgctcaggagcttcactgtcagcctcagcagccttaggttatcacttctaatggtgagagctaagctgtgcattcagattttgaaatttttaatgggycacaaagaaccaaatttttctttccactctgaacaacctaaaagtagcatctatggattttttcctattttgtttcacccagtttggcatcatattaatgcaaattccataattcttccatggtgtagttgtcagacttatcagataaaaacatagaacagagctaagtttaatatttggattaaaaatgacttctgcaatatgttaaaggcaattatcaattgtttagctctggcaggtgagaaaagtttttgaagagacaatcaattcaatcgtactctatttgtgtgctctaatttatgacaaccaagattgtgatgaccaagattgctgatctcgtctgg

SEQ ID NO: 324344 - DNA, 604 bp, Homo sapiens
tttttatgatcagattttcattcatggtctgtataatagtgttattcccctattatacatgattatttatacactttgggacttaagaatattgggaatacactaaagtgaaagacagtataatgagaataaacttgagctgcattttgtgtttactgagagtgctcaggagcttcactgtcagcctcagcagccttaggttatcacttctaatggtgagagctaagctgtgcattcagattttgaaatttttaatgggtcacaaagaaccaaatttttctttccactctgaacaacctaaaagtagcatctatggattttttcctattttgtttcacccagtttggcatcatattaatgcaaattccataattcttccatggtgtagttgtcagacttatcarataaaaacatagaacagagctaagtttaatatttggattaaaaatgacttctgcaatatgttaaaggcaattatcaattgtttagctctggcaggtgagaaaagtttttgaagagacaatcaattcaatcgtactctatttgtgtgctctaatttatgacaaccaagattgtgatgaccaagattgctgatctcgtctgg

SEQ ID NO: 324345 - DNA, 603 bp, Homo sapiens
gagagcagtggtgatattaagatttgtttcaggaatctcaggaacatcaatgacaaacgtggcttgttatttctctattttttctttctgattttcgcaatcctaacagatttgaagtggtagctcattattggtttcatttgcaactgcctgatggtaggtgatattgagcactctttcatatacctgttggtcatttgttgtatatatttgttgacaaaatattttgtagtcttctgtctatttttcagttggattatcatcattattattatatttacctttgctttgaatttctcatatattttgaatattaaactcttatcatatatatggtttgctattttgagtatgatgcaataaacatgcaaatgtatctatcattttaatataataaattctttttttgggtagattcccaatgatgagatttctgaatcaaatggtagttctattcttagttatttgaaaaatttccatattgttttttacagrggttacattaatttatatgtttttgctgacagtgtatagagtgttcccctttttccacatctttgccaatgtttattatgttttttctttttaatagtagccattatt

SEQ ID NO: 324346 - DNA, 575 bp, Homo sapiens
cttgtttgtaattttttagggggaagaggaggtactggtactggcatcattcaatttaatgcttgggtcacctctggattcattatcacagtcttagcttttggtcatattacattgtatttttctgccatatgaatactctatttaaattaattgtgagatgctgattaataatctttagcaatgaaacgaagcctactagcattttatcttgctgcagaaaagatgggagtctacttctgggttatggtcagggttcctagcacacctggatgccctttagrtagtcagccctctatatactcagcaactgaggtcatcagtgcaggctcagcccctacaaaggccagggtatttcctgtccacctctattgctggtgtgtgattcttctgggttccaaccaaagccagtggacttcagtaggggtcaccttcattggcagaccctcaatccacttcttttccatctaatcccatgcatgtgtgcaaaagctgctctgcttctttgcatctcagtagtccctttcagaatccaaagatgaaactcagggaaatgggctccaaatgtgagactg

SEQ ID NO: 324347 - DNA, 378 bp, Homo sapiens
ctgggcccaaaacacaggtaaggtaataacgctcatatctggactaagacaatagagagattttgcctcttgtagataagcttagaacaatgggtatgcccagagtctcctacttgtacaaagtacacmgaagactatgacactaaaagatatcatataaagccctcaggctgtacacagagtgtcataactggacccaacacagagataagattattcctctcctatgcacacccagctgacaggattgtcaccctcacacatggacagagaccaatggtgagatcctgaatctcacttgtaggcacagtttacagttggaattgtacctattatatgtagatccagccacaaataagatggtgactcatttctgaa

SEQ ID NO: 324348 - DNA, 635 bp, Homo sapiens
ttctgaacgtcttaaaatctgttcattatcagatgctgaaagataaagagcaagtaaatgaatctatttcagtttttgtgggtaatttagccagtaaatttaatcttatttctttaatctttaagttttactactgaaggccagaatagatttttttctcttaaatttttggcaagtataaaagcacattcagaatgtcactttcatagatactatgaatatcaattgtcaagtgtgttgatttctaagataaaatatttgagaattaatattacccaacttgtccaataaaatgtttttaagttgcctatttttwaaaaaatctatcaattttgaattgcatacctagctaaatttttttaagattgaggataatatgtaaaataatttatacaagtaatataaactaagtttacttaaattatttacttatttaagaaatctaattacattttaaataaattgctgttacctgttagtatttgtgtagcattttttttttaagtttttgcctctaaagcaggtaacaatttgaacaaagaagaaaacaaaaattcaatgattgggaggaaaataaaaggtttgtatgatgacctaattaaggtaatgtaaaggataaaaatcttaatatttgt

SEQ ID NO: 324349 - DNA, 596 bp, Homo sapiens
ttgttacttgccttttgggtgcaactcacaggaggtgttgactctgatcctgaagttgggcatgtgagagattgtaaattgtatctctggacactttcacaggtgtgattgtgacatataccttcactcagtatctgactgatttttctctttgcctaggctgcacctgcggtttagattgtaaattatacttaggttgagggcctagataatgtgactttcctgcttgggctctgccctcccggggtattgtgagatatctctgggccaatcacctaggcgatgtgactctccctttctgcctgggccagtccacaggggttaccatgagatatcctttggcccatcacctatgttatgtgactcttctttgccttgaatctgtttacatgagaaatggttacatatcactgggcccatcacctagatggtgtgaccgtcttctacctggaacatgtttacagggtggattgtgmcatattgcttttcctagcacccaggagatgtaagttttattgtcaggaccctgcccttagtaaaaatattgacatatcgctgggccaccacctagttgatgccactctcccgcctagtct

SEQ ID NO: 324350 - DNA, 583 bp, Homo sapiens
ggacatgagcgggttgccactgcyggctggggtggccagtttttgttccattatttgtccccgcccatgtcctgctgattggtccattttacagagtgctgattggtgcattttacaaacttctagctacctacagagcactgattggtgcatttttacagagcactgattggtgaattttagagctctctagctagctagaggtttgtaattggtgcgtttttacagagtgctttttacaaacctcttgtaagacagaaaagttctccaagtccccactcaacccaggtagtccagatggctttgcctttcaacaggaagtggtggtggggctgggtcagcccagaaaccatgggctggagtgaggattaaacaagctgaaacacaacccccctcactcgctggctgtgggcagcagaaatgagagctgtatcccccctccacacacacacacaccttggggctctgtggtttctggcatctctgagtttttgggcaccactgtgttccctttctctaggtgccatcgcctgcagtggaagccacttgtggtacacctggtccagctgtggccatgcatgga

SEQ ID NO: 324351 - DNA, 655 bp, Homo sapiens
cataccattatagcccagctctcagtatttgtttgcattagaggatccttccaacagaacaacccagctaaccttgatggtgttacctcagggattttgagatagcccccacctgtttgggaaggtgttgtccaaaggcctctctgagttcctttatcctcaggttaaagttttacaatatgtagatgatattccacttggttttccaagtgagaaaatctctcaggagggccgtaagtcttcttaattacctggctaacagaagatataaggtctcaaaatctaagtcttagctctgtcagacttcagtgaagtactgaggtctagtcttgtcagacgggactaggatgctaggtgaagaaaggattaagcycatctccttcctacccctcccccaaaccctcaatcagctgaggagattgctaggcattacaggattctgcagactacatacacctgggtatggtgaaacagtttagcacttctatcacctaataaaggaaactcaggcagctaagagccactccttaatttgcaaagaagcggctaaaagaacctttgacttgtgaaccctgaatatgtgagacaggtctcagttaatttagaaagtttattttgccaaggttgaaaacatgcacccatgacacagcctcag

SEQ ID NO: 324352 - DNA, 655 bp, Homo sapiens
cataccattatagcccagctctcagtatttgtttgcattagaggatccttccaacagaacaacccagctaaccttgatggtgttacctcagggattttgagatagcccccacctgtttgggaaggtgttgtccaaaggcctctctgagttcctttatcctcaggttaaagttttacaatatgtagatgatattccacttggttttccaagtgagaaaatctctcaggagggccgtaagtcttcttaattacctggctaacagaagatataaggtctcaaaatctaagtcttagctctgtcagacttcagtgaagtactgaggtctagtcttgtcagacgggactaggatgctaggtgaagaaaggattaagcccatctccttcctacccctcccccaaaccctcaatcagctgaggagattgctaggcattacaggattctgcagactacatacacctgggtatggtgaaacagtttagcacttctatcacctaataaaggaaactcaggcagctaagagccactccytaatttgcaaagaagcggctaaaagaacctttgacttgtgaaccctgaatatgtgagacaggtctcagttaatttagaaagtttattttgccaaggttgaaaacatgcacccatgacacagcctcag

SEQ ID NO: 324353 - DNA, 550 bp, Homo sapiens
ataagttaggagacagaaaaaaatagaaacagaatggtcatttgatagaacaagaaatgcagtcaaaagatagaaatgtatagattatagataatgaacggagcaatgggaagtgggatcatacytacaaggccaggtgtggtggcacatgcctgtaatcctagcactttaagaggcttaggtaggtagattgtttcagctcaggagttcgagagcagcctgggcaacatggcaaaaccccatctctactaaaatacaaagtttagccagacatggtgggtgcttgcttgtagtcccagctactcaggagggtgaagcatgagaattgcttgagcccgggaagcagaggttgcagtgagctgagatcatgccactgcaccccagcatgggcaacagagtgaaactctgtcacaaaaaagaaaaaacaaacaaacaaatcaaaacaaaacaaaaaacaaacctacaagactagagaaataccatttatatttgaggaaataataattatgaactcggctattgtatagcattgttacagttaactaaggca

SEQ ID NO: 324354 - DNA, 566 bp, Homo sapiens
ttctttattaggttttaaagactatttcattatctaaactttttcaactttctattttctctgtatatccatgaagatggacacagagaaatatgaaaaacttcatatgacttacacagactgtccacagacatgtctgggctttctgttcagtcccggaattttttcttcttttttctttaaataatcagtcattttacccaggatgaaaaatttaccacacaaggtcttttttcatacaaaattactctttttttacaaccttccttaccaaaatcatattttcatrtctataactttcttcatatttctctccccttctaactaccttgtttcataaatcacctttttcaagtccataatttaacttttagataacttctaaattagacaaaactatttattctcactagtaacatatgttttttggcccagtttatatacagaattatatgttaactataattcttatccttagtagacttaaattaaagtgaaatcctaggaagcaaaaaccctgagcttcctaccagatattagcatttcataaatgagaacaattccac

SEQ ID NO: 324355 - DNA, 592 bp, Homo sapiens
ttaacatggttacactttgtttgccaaatgattcactggattaggtaatccaatgaacactgtgaaccaaaactttgtgtaaagcagttttcatggcagtytcatttttaaaggccaaacttccccagattccatagaacagtgaggccaaacagtaccaaaggagaacatcacatacaacccaggcccaaccctgctttaaaaagcagtgcaaaagcctaaatacatgcaactccatcccactttcctattaaacagcaaactccagattccaagcaatattggggcaaacagtgttgcaaaagaatatcaagtttactgaattctaattcctcatgactataatatagcaaacacacacacaatcaccaaaacacaatcctactgctgcagcaacaaagaagccccaagagtgtccaaactgaaacagggtgcttcctctctctatcagctgggcttgatcaagtgcaaacaaaaattccttaggaatttcctatattgagaagagctgaccctgttgtctggtacccataaaagaaactcacttgcccagacacaacacacaattacagaaaacccccaagactgtcca

SEQ ID NO: 324356 - DNA, 592 bp, Homo sapiens
ttaacatggttacactttgtttgccaaatgattcactggattaggtaatccaatgaacactgtgaaccaaaactttgtgtaaagcagttttcatggcagtctcatttttaaaggccaaacttccccagattccatagaacagtgaggccaaacagtaccaaaggagaacatcacatacaacccaggcccaaccctgctttaaaaagcagtgcaaaagcctraatacatgcaactccatcccactttcctattaaacagcaaactccagattccaagcaatattggggcaaacagtgttgcaaaagaatatcaagtttactgaattctaattcctcatgactataatatagcaaacacacacacaatcaccaaaacacaatcctactgctgcagcaacaaagaagccccaagagtgtccaaactgaaacagggtgcttcctctctctatcagctgggcttgatcaagtgcaaacaaaaattccttaggaatttcctatattgagaagagctgaccctgttgtctggtacccataaaagaaactcacttgcccagacacaacacacaattacagaaaacccccaagactgtcca

SEQ ID NO: 324357 - DNA, 550 bp, Homo sapiens
ataagttaggagacagaaaaaaatagaaacagaatggtcatttgatagaacaagaaatgcagtcaaaagatagaaatgtatagattatagataatgaacggagcaatgggaagtgggatcatacctacaaggccaggtgtggtggcacatgcctgtaatcctagcactttaagaggcttaggtaggtagattgtttcagctcaggagttcgagagcagcctgggcaacatggcaaaaccccatctctactaaaatacaaagtttagccagacatggtgggtgcttgcttgtagtcccagctactcaggagggtgaagcatgagaattgcttgagcccgggaagcagaggttgcagtgagctgagatcatgccactgcaccccagcatgggcaacagagtgaaactctgtcacaaaaaagaaaaaacaaacaaacaaatcaaaacaaaacaaaaaacaaacytacaagactagagaaataccatttatatttgaggaaataataattatgaactcggctattgtatagcattgttacagttaactaaggca

SEQ ID NO: 324358 - DNA, 544 bp, Homo sapiens
aactcaattttacagataagaaaactgaggctagtgtagtaacttttctaagtttagatattttgtaaggactggagtaggaytgtaattcaagcagcctgcctcaggtttcatgatctggactttatgaaatgtaaattaatataaacattgctttttataattttgtgaaagtcatcactttttcaatggacatgtattattttgaaattagagatcaacagtaacacaaactattttcagtaaataaagggaaacctttctcagttcataaaactccagatatttagattcaaactgaaaatgtgtattgaacagatggtcgtgtaaaactattcttatttctctttgctaaaatgccctgagttagaagaaataatagattttaaggaatcgcacagctcttgccagaaaatgaattcacaatttcaaaagtggttagtgaatatgaatcgtgctttattttctgtggctatgttttggagtgtaaacttcaagaagtgtattagttataaagaatcggaatcttcaacatggctttgtt

SEQ ID NO: 324359 - DNA, 487 bp, Homo sapiens
aatactttgtacaagaaatatggctgaatcctaaataatgttgctaaacagggctgcattaccaaatctgataacatttcaaagttgatttatagaatcctttaattagaagaaactttagggtcatcttcatagtcaatagttcatctgaaggaaaatcttttctatgtcactaacgattacttcttgaatatttcttaagttagaaatctttgttttttgttttcttgtttagttttgtttagtttaatatgttttctcagtttgtgaaatttgtacattttattgatttttagagccaattatgcctccctataatgcctgcttagctatttcttattctacttactgaaagtatgtagactaagtcaaaaccgtttatccacataaaggcctttcaaaacaaagagctatcagatttagcaaataaaaataaaagacatccatttaaatgwgattttcagataaacaacaagtaacttttaca

SEQ ID NO: 324360 - DNA, 437 bp, Homo sapiens
ctatatgcaccatcgagcctcatgatttattaactgcctaaataatcccttatcattattttttggttttatacataaccactcatcaggtactcagcactgtatctacctttctctgcagtgtctgagtccatgcatttgccctcagttactttcgtraattcttctggaagataatgatagcatttcaaattccataccactagccacattccacaccacagaatataaatgtgtatgaggtggtggtttcattatcttagggtcagtagaatttcaagagctttaaaattacctctatcattgatgcaagtgtcagcttagttttaataaatctttagaaacagccacaagttacttctaggacatcctcctatttccagaaatacatcattcagctgccaaatctactatcagtgtcttgctaaagaatttcc

SEQ ID NO: 324361 - DNA, 576 bp, Homo sapiens
tcacacccagctaatttttgtatttttagtagagacgaggttttgccacattggtaggggtaatctcgaactcctgacctcaggtgatccacccaccttggcctcccaaagtgctgygattacaggcataagccaccgcacccgacctacattatgcattttaaatatctaaaaggatatacgctaagctgctagcagtgattatctctattggcatggatttaagagggtaaacttttaattattttaagaaaaattttctacattaattcatgtgctagaagtttgagaaataattaagtttttgactgtcactacagtgttttttctaatacactatgagtcacatactgttttgatagagtataagggctaagcatttatataaattataaaggccataacagaatatgtattatatatttatatattatatgtaatttccatacaaataagaataaagaacgtatatatcattactaatttttttttttgagacagagtctcactcttcacgcccaggctggagtgcagtggcatgatctcggctcactgcaacctctacctcctgggttt

SEQ ID NO: 324362 - DNA, 639 bp, Homo sapiens
tctgaacataattgtaaggcttatttttggattttctgtcccatttcatttttttggtatgtctatctttataccagtaacacacaatattcattattgtagctttgaagtaaatattgaaatggggaagtgcgagtcttccaaccttattttttattttcaagattgttttagctattcaaagtcccttgtaattccatatgattttaggattaacttttccattttttcaaaaaagactagagattgcattgcatgggtagaatgctttgggaagtattattgccaccttagcaatattaatttttytaattcataaacacgaaatgtctttccatttattgtatatatttatgtcaaccatgttttacaatttttagtttagaagtcttgcacatccttggtgaaatttattcctacttttttttcatgctattataagtgaaattttttgctcattttattttcctatttttcattgctagtgtatagaaatgcaaccaatttttatatcttgatattatatcctgcaagtttgaatttgtttattagcagtaatagctttttatgaattctttaggattttctacataaaagatcatattatctgcagattaatataatttcattttttatgat

SEQ ID NO: 324363 - DNA, 614 bp, Homo sapiens
ttaatggaagaagataaataatgagcacaaaaatgaatcaatatgtaatattccagcgagatggagatttgtgctatgaaggaaaataaagcagggtaaagggacagaaaggggcaagaggaggggagtgctattttattgaggcttttcaagcatgcttctctgatataatgacacgtgagaggagattcaaggcaagtgagagaaaagccatgttgataactgagtgagagcatttgaagcakagcagagggcaaagaccctgagacaggggagtacctaggttgtgcaaaaagcaagggtacagagagaaagagggggggcaatattgaaagaaaaggtcaatgtgtggtggaacatgctgataagctaggatttttctctatctctatctggaaattatcagcatgtagataatgttcactttgggaatgaatgaaaatggagaagaggagtgtgaagactgagcattggctaggcaaatattgtggttccattgttactacaagttataacatttcatgatttataataatttcagtattacttttctcatttaatattagtaacagcaaagcaaatcatcccaatattctcaatcatgctttacagat

SEQ ID NO: 324364 - DNA, 614 bp, Homo sapiens
ttaatggaagaagataaataatgagcacaaaaatgaatcaatatgtaatattccagcgagatggagatttgtgctatgaaggaaaataaagcagggtaaagggacagaaaggggcaagaggaggggagtgctattttattgaggcttttcaagcatgcttctctgatataatgacacgtgagaggagattcaaggcaagtgagagaaaagccatgttgataactgagtgagagcatttgaagcagagcagagggcaaagaccctgagacaggggagtacctaggttgtgcaaaaagcaagggtacagagagaaagagggggggcaatattgaaagaaaaggtcaatrtgtggtggaacatgctgataagctaggatttttctctatctctatctggaaattatcagcatgtagataatgttcactttgggaatgaatgaaaatggagaagaggagtgtgaagactgagcattggctaggcaaatattgtggttccattgttactacaagttataacatttcatgatttataataatttcagtattacttttctcatttaatattagtaacagcaaagcaaatcatcccaatattctcaatcatgctttacagat

SEQ ID NO: 324365 - DNA, 620 bp, Homo sapiens
ataaattaatatactgtcagaaataaaattcaaataaaataatactttatgaaaaatattttgttataattggtaaatctttaataataatcccagataaatttgaaatttgcttatttttatgttagggattttccttttctttttctgaattctatcttcaagctacctatgacaatgcttataaagaaagtagactgaaaacttgaaaacaatctatttcagtttaatacaaataaacatgtaaaaatacttatgagtgcctgtcagtgccagtccctgataggtgctgaaaatataacagttatctaaactggctctgccctcatggagattgtatrgattaatgactctcaagctttaatttgcaatcaaaacatgcgaggatcctggtgaagtgtggatgctgattcagtagctttagggtggagcctgagattttgtgtttctaataaattgatgctgctggtcccagaacaaattttcataattaagattcagataattgaaatatgtactccaacaattactggtataggaattagaacccatgtagtcaaccattatctttactgtgagattaaacacattttggaaagatgggctaggaaatattttgt

SEQ ID NO: 324366 - DNA, 567 bp, Homo sapiens
caaaattcattacttcctaataatcctactaaattttattaatatctttgttcttgaggttatttatgcctcttgtactctatggcagaaatactatgtaattatgtgctactgagtatctcttctcaggtccatgttcagagatttcatgttggtagctggaaatcaaccttgatgagaatattwacaccacagaaattggcaccacacattaaaaatcatacacacatcactctctgctccagagctgcttgtcaaacatttatatgcacaccatttgccagataccacattttaaaagaaagggttccaatgctagagttatgggaactttgaactacaggatttaggggtgtattagccctcccctggtgtgatcaggggctatgatatgatgaaacatgatatggcagaggcttggatataggtgtaccctaggattttagcattcaccattctagggcataccacccactttcctgataattagggctgcctctaaccttgcagtagaataggtttaactgtattacacacaactcagtaactggggctttgcataagcag

SEQ ID NO: 324367 - DNA, 624 bp, Homo sapiens
gcctctaaccttgcagtagaataggtttaactgtattacacacaactcagtaactggggctttgcataagcagaattctttttctgggatgctaagatcaccctttaataactcatcacagtaagtctttaaaaaatatatcttttcactcaaataggtaaaatatattataaaatatcagggatgagaatcatttttcaaaagtatgcttaacacaatgtaacacattcaagacctctttgaagtcatgaattttaatgaattttatatgaattaaaaaatactttggaattttacatttaatttttattgtgtgctacctcaggataaaaagaaatgtatattatcataygatgcttcttcatcactgtgtgtgtgcatgtgttttttaatccttcctttaatgatacatcatagatgtttacctgactggaatggttaaaatgagctttcagggtgtctactcatcattctatggctttatgatttgttaaggattattatacaatcagtctgtaaaatgaagttgactacagtatagaagagaagaaaaaacttatttctttgaaatcactagtctaaaacagtttgcatacatgaacattttgattcctttgaacagat

SEQ ID NO: 324368 - DNA, 494 bp, Homo sapiens
tttcttaatgaaggacttatcaatgtttcacctatgatctagtaagtgtttaacttttaacaaacactcatagagaatagagcaaaagttatatttataatttttattcagagkaggtgatgtacaatgcatggttttatttaatcacatattttaatacttcatgtaatttctctgaataaattttttaaaattcaaattatttagaaagctcttattcagatcaatctgaaaaagcacatgggataagatgtttcacatcttgactaaactggaaattgtacttgtaagaaattttttttttctgcaaattaacaatcaattgcagacaagtcattttaaaagataaaaagtcttgtgacaccagtttactggaaaccaatgggagagcatgctatttagcttccacactctgttaattaataaatcaacggaagaatgtgcatatattgatcaaccatttttaaataagtgagttttaatattaaaactat

SEQ ID NO: 324369 - DNA, 494 bp, Homo sapiens
tttcttaatgaaggacttatcaatgtttcacctatgatctagtaagtgtttaacttttaacaaacactcatagagaatagagcaaaagttatatttataatttttattcagaggaggtgatgtacaatgcatggttttatttaatcacatattttaatacttcatgtaatttctctgaataaattttttaaaattcaaattatttagaaagctcttattcagatcaatctgaaaaagcacatgggataagatgtttcacatcttgactaaactggaaattgtacttgtaagaaattttttttttctgcaaattaacaatcaattgcagacaagtcattttaaaagataaaaagtcttgtgacaccagtttactggaaaccaatgggagagcatgctatttagcttccacactstgttaattaataaatcaacggaagaatgtgcatatattgatcaaccatttttaaataagtgagttttaatattaaaactat

SEQ ID NO: 324370 - DNA, 555 bp, Homo sapiens
tttttttttaatgtgaggagagacaagaatagacttaagtaggaaagacttctattagaggaaacatctgtgtgagagaaaatggaggaggtattgggaaggccaggagaatcatcaaactgtagtttattctggaagacctcgagcaaagaagagaaggagggaaggttattgggaagcatgctagactgccaggccagtggggcatccttgagccaaagcagccatcagaggagtactgtgtctctcaggaacagctctgtctttggggtgacagacctgctatgctcaatctttggagagactgactcaagtcaagcccatggggagcatgactttgccataaacacagtgatggatttcataatacaatgactggatgcttaatcagttatccccccatacttggkgtctgtgggatgcattttttggccaacaaatatgcttcatgtgctttcacaaactctcaatttattttattctggcattcatccaccctcttctcttgagtgattcataagaatatccccttcttccactaaagttaatacttct

SEQ ID NO: 324371 - DNA, 525 bp, Homo sapiens
caatgaggaacagagaaacagtgctgtcactggaaagaaatgtgttaccaagcggtggagtactgaagaatatttgacactcagcgggtattattttgaaacactctcccttcttctacaaaataatttattttcagtaataatgaagtgaaacaaataataatgttgaggctataattacaaaaaaaggtctctaagaaaaatttgtatctaacaccataactaaatacataaataagtaaacattatagtacaaaaagkttgggggaaataatgaattaatgttctttaatcattgtaatcaatttttcaagaaaaaagcagataaagaaaggcttatgcaaggcttaaaaatgatttgtacataacatagaaggacagaatttatgtaactcaagttctgtttttcatgtttacaatcactttcctctcattgttcattttgaatctcctgtttaaactcagggatatatcagagcactggggtatgaaaagagaatttcacctgaagcaagctcaaacaat

SEQ ID NO: 324372 - DNA, 589 bp, Homo sapiens
tgctcaatctaattaaatgttcaacaacaaggggatttttgttaattgtttaacttttctttgtttyaaggaaaagaacatttatctgaatttataattttaaaaatgtatgcttgtgaaatcttcagttctagggaatatctctggctcagaagttgaaaaacactgaagaaattacaaatgtctgttgaccaatgtccctgtattgcctgtattttcctggaattagaggtgcaaatgataacaggacttatatttcataaaattgcataatactttggaatgagtattatttatatttgtaagatgcttttcttcatgtaattgacaacattgtgattaggatgaacctttttctttgaataagtagagcctaacatatttattagaaaaaatatctcttttctgtttttcctgttcacaagtttaaactaagcaaatttatgtttacattttctgtatctttctactatctaaagatatactattacctccaaaattttacatacagttgtataaaattgctttgcatatcatactaattgttattaatttaattatagggtttatttaccaaattagatcatca

SEQ ID NO: 324373 - DNA, 589 bp, Homo sapiens
tgctcaatctaattaaatgttcaacaacaaggggatttttgttaattgtttaacttttctttgttttaaggaaaagaacatttatctgaatttataattttaaaaatgtatgcttgtgaaatcttcagttctagggaatatctctggctcagaagttgaaaaacactgaagaaattacaaatgtctgttgaccaatgtccctgtattgcctgtattttcctggaattagaggtgcaaatgataacaggacttatatttcataaaattgcataataytttggaatgagtattatttatatttgtaagatgcttttcttcatgtaattgacaacattgtgattaggatgaacctttttctttgaataagtagagcctaacatatttattagaaaaaatatctcttttctgtttttcctgttcacaagtttaaactaagcaaatttatgtttacattttctgtatctttctactatctaaagatatactattacctccaaaattttacatacagttgtataaaattgctttgcatatcatactaattgttattaatttaattatagggtttatttaccaaattagatcatca

SEQ ID NO: 324374 - DNA, 613 bp, Homo sapiens
ttcacaactatggttggagtttaagtgagaagccaaatgtgaaagaagtctaaatattcagaaaggaagaaaaaactctaatatttgaatatgtccagaagacaagtgccttctcttattctccgtggacatttttaatcttccttttatggattcatrtagttttgatgttataatttttattatattctcatatttgtttaagcctttaatattcaaatttaataaagtaaatttgttttcaggaatttatcaatatttccattttacaatcatagcctgccttgtatgactttacaacctccccttgactcttcacttcaattaggtcaagactgctgaaacatcagacatattgcttttccaaagcaatctgtcttctatctgtagttttcagaattaaattgttaatctagtgcaagagagagatagtttccagaaagaagagagtgcagaggcagaatatctgagagggagaggcagagggcttgggctttctgtgtctgcatctgatgactacacagggaggacagacagcaaggggaagaacaccacagacccctattgctcatctagtgagcatgcagctagaaaatcaggggaggggaatgaa

SEQ ID NO: 324375 - DNA, 584 bp, Homo sapiens
taagctcactgtcctccatccctctaatctcttgcctgcttacctgtgagctaaaaaataagaagtacttagggtaaaagtgccctgttaacataatccatggagtccaaccaatcagatcagagggcaggaggagatggagaaagaacaaacctggagggataaatggaagacatctagcttagacttgttaygaatgtttcaactactaccagatttcctaccactgttttagaaacaacatttggaattatcaggaagtttgagcgttctcttagagcttgttggaaaaacttgatatatgctaagtgtccttgatgcctcttgttaaaaaaaataaaaacagaaaatactactggattatacgtatcatatttaaatatatcctatcagaataagaaaaatattgatacatattatagcataatagatagagttctaacaaatattaaatgactagtaatatttggataaaatagaattttcaagagaataacataaaataaatcctaggaatggtgacctaagatgaacttagtatccttaaaagagtatagtatagtgacaaggaacatggatgtgac

SEQ ID NO: 324376 - DNA, 584 bp, Homo sapiens
taagctcactgtcctccatccctctaatctcttgcctgcttacctgtgagctaaaaaataagaagtacttagggtaaaagtgccctgttaacataatccatggagtccaaccaatcagatcagagggcaggaggagatggagaaagaacaaacctggagggataaatggaagacatctagcttagacttgttacgaatgtttcaactactaccagatttcctaccactgttttagaaacaacatttggaattatcaggaagtttgagcgttctcttagagcttgttggaaaaacttgatatatgctaagtgtccttgatgcctcttgttaaaaaaaataaaaacagaaaatacyactggattatacgtatcatatttaaatatatcctatcagaataagaaaaatattgatacatattatagcataatagatagagttctaacaaatattaaatgactagtaatatttggataaaatagaattttcaagagaataacataaaataaatcctaggaatggtgacctaagatgaacttagtatccttaaaagagtatagtatagtgacaaggaacatggatgtgac

SEQ ID NO: 324377 - DNA, 584 bp, Homo sapiens
taagctcactgtcctccatccctctaatctcttgcctgcttacctgtgagctaaaaaataagaagtacttagggtaaaagtgccctgttaacataatccatggagtccaaccaatcagatcagagggcaggaggagatggagaaagaacaaacctggagggataaatggaagacatctagcttagacttgttacgaatgtttcaactactaccagatttcctaccactgttttagaaacaacatttggaattatcaggaagtttgagcgttctcttagagcttgttggaaaaacttgatatatgctaagtgtccttgatgcctcttgttaaaaaaaataaaaacagaaaatactactggattatacgtatcatatttaaatatatcctatcagaataagaaaaatattgatacatattatagcataatagatagagttctaacaaatattaaatgactagtaatatttggataraatagaattttcaagagaataacataaaataaatcctaggaatggtgacctaagatgaacttagtatccttaaaagagtatagtatagtgacaaggaacatggatgtgac

SEQ ID NO: 324378 - DNA, 573 bp, Homo sapiens
aaaagaacaaaattattgataggtttatgacactacctgacttagtcaaggagagttaatgtacattcagaaactctgacctggaaataggtttttgttagatttcagaaacaatttatctgaaatggccctttgactgatttacagaaggagatctgggtctggtttatctctactgtgaatatttggttggtctgatcagctggtggagcataagaatgaatgaagatctggcatttatgtagataaatcatctgaactttttyagggaaaaagggggaaaaggaaaataaaggggaaaaagttatgtagtgagaaacaaaattaaatattgtggattatgctgatatgcaatctacagttgcacaagttggctagcacacaggatcctttagaacagcagaggatctgcaaaatattttgaaggagctaatttattaattttttcaaaaaaattcatagtcacactatagttataaaatatttgaaacaattgggttctggtccaactattactctagactaactagtcgtaccatgtaacttccctgactatctccgccttagtatatt

SEQ ID NO: 324379 - DNA, 525 bp, Homo sapiens
attaattaaaaacagttgggggtagaatttttaaagcatggggtaagttctatgggatagaggtggggcatcaatgtgattargaaatctgtacttgccaattgtaacttattaagttaggctcttaccccctcacagagactgagagagaggagtgatagccttcttgaataattacatttcaaaaagatggctcccgagtccttgagaaaaacattgctatgttgtaaatctgtcaagagactgagggaagattaacatctacaaagggcagagaaagaatttgcaattataaattttctaaaataaatgctctaagaaaagggaggtcaggagccaatcaagaagaagcctgtgtaaagtttagttaagataagaagacccttaaaccatcttgattacattaaaaaatgagatttctaacaatccactgagtgagaagccctcagttaacttactacatcacaaatgtaagtcttttatctctatatacgaaccatgaaaaaacttattagatagaggatg

SEQ ID NO: 324380 - DNA, 557 bp, Homo sapiens
cagctagtccagtactgtaaaaatgttgttgatattctgtatggaaagttataaatttatatttatttttgaataataagaatcttcataattttaagcagtcctrtttatgaatatggcatgtttttccattcatttagatctttcatgtacttcagtataacttcataatttttaataaaagtcttacatatcatttagtagcttcattcctgtgtgctttatagttttaggtttatatggaatctttcaaaattaactctctcacttaaacataattgtaaattattctgacattgaaatattaatttatgctgaagaactttgctgttaactgctttatttctaataatttctagagtctctaagatttttctgtccttcatagataataataaatttgtttaattcttgtaccatgcatttattttttcagatttattaaaattggccagaatctgctacccatcccctcccttcaaagttaaagggaaattatgctactgagtatcattgtatttctgattctattaaaaatatgtctgaaatattacctg

SEQ ID NO: 324381 - DNA, 606 bp, Homo sapiens
tacatcctgaaaaatttgccctggttttaataatgtggttacatatacaaagttccattttttwaaaaaaatctagtttccttggcacttgtcagctagtttttaccacagtcagaaaagcatacctttatttgaattatgacaaagaatcagaggagctttttgattcctcaattttaattgctttttgaactgccattccagattttttaagttcattcatcttacatttatggttttaaaaattaggtttgcatttcttatcagaaaagaaagtaaagagaaaagtggggtggaaactcagaaagttaatatatcaagaaaggccaataaatatttaaatttaaattgaggatattctaaaagtaaaaaagaaaaatcccagttattgactaagagtggaaagtaagaaaacgtcctcctctcccatggtctatctctattgatcttccagttttgttccaggtggaagaaaaatgacaaataaattaaatggtaaatgacaaaataccttgaataatccaaaagggctgaaacatgggtggatctaaattatgtgagacttctaaggggaacttgttactgtgttacagtttgcaacagaac

SEQ ID NO: 324382 - DNA, 554 bp, Homo sapiens
ggctcaggcatgaggctggttctcttctccctgaatgcggtcttgtctttggggaggctttgcaccaccgagttgctaagttaacccaatttaccggactgacagggcttgaacggttaccagaattcggagctgaacttcactggacagttagcttgttgaaagcgctctgaaatgtccttttgcagcaccgtactttccggaatcatctggttggggaggaggcgggtgctgcatcacgccctcattggaagagyatgtgagcagaaataattaaggagaaggtttcggcatcttgaaaacctgatgccagctcccttgagatccttcaaggagaaaaagagtagaattactcaataaattaagtactccaggagcaaaggcttcgttccagtagttattacccttcatgatattaattagcatttctatttgtagggtagctgaattaatttggagtatacgcgtcttttccctaaacacaaaatttggtgtctacaaaacagtgaaataacaaatagacaccaaatgtcatctgtgcatgattctaagta

SEQ ID NO: 324383 - DNA, 523 bp, Homo sapiens
gaaggtggtaatgggcagatacagggtcatgctactttctcataaagttaaacacaacattatttatgtttgtcctttcttgtatgctgtaagaaaagtatatcaatgcttgatcagaaaaagcaaaacattttgttaaaatattgtgttatttgtatatattgaattaaattgttttattaagttaatatattaaactaaagaaaagaatttccacgtagctattatgaaattaggtgctaraaatatagataagatactctattaggtctcaatacctatcataaaactatagtgtttaagtcagtacagtatttgttaaagggtaaacatactagaatctggtcgcacattaactgtcaatacatactgtcagtattatgaatgaaaatattttacttggaatttgatggaaactttggaatttcatgttagaaattgttcatagaaaacatcaaagttaaccacgagaactgaaatatgaaaaatttacctaacaatttgatgcagtagtaaatcagat

SEQ ID NO: 324384 - DNA, 523 bp, Homo sapiens
gaaggtggtaatgggcagatacagggtcatgctactttctcataaagttaaacacaacattatttatgtttgtcctttcttgtatgctgtaagaaaagtatatcaatgcttgatcagaaaaagcaaaacattttgttaaaatattgtgttatttgtatatattgaattaaattgttttattaagttaatatattaaactaaagaaaagaatttccacgtagctattatgaaattaggtgctagaaatatagataagatactctattaggtctcaatacctatcataaaactatagtgtttaagtcagtacagtatttgttaaagggtaaacatactagaatctggtcgcacattaactgtcaatacatactgtcagtattatgaatgaaaatattttacttggaatttgatggaaactttggaatttcatgttaraaattgttcatagaaaacatcaaagttaaccacgagaactgaaatatgaaaaatttacctaacaatttgatgcagtagtaaatcagat

SEQ ID NO: 324385 - DNA, 474 bp, Homo sapiens
cttccctggcaaaaacaaggtgctattgtgaaaagaatgtggaataaatgtacaacatcccaaatcagccactatctgccataatctacaactctggcttctgaggacttctattcagcattcctcttacttttaaaaagtatccatacttacataaaatatattcatttcttctcaaagagaggagccccaaatttcctgcatttctatgccagttccaaacataratgcttttggtagtatcgacttctctccctcagattagcttgataactctgatttacagcttctggcacttcagcttcctgtaggactcacagataaagataataacatctgggtgaagagtttctcatgagaacttctgatcctgtttaaccgcctctaaatgcaagttttattagcatgtagcctacataaagactgggaccatcttctcttacggttgtattaatcttaggtttttacattaca

SEQ ID NO: 324386 - DNA, 566 bp, Homo sapiens
aatttctgttgttttaaggcacacaatttctggatatttgttgtggtatacctgggaaattaatatggtacctgagactgccaaggacactgctcttacgaatgtcactactggattttaactggatctctcatagctctctcctcccccactaatggattatttttcctatttccaccctgaatgggattattctttacaggagcattttgaggtctttacacattttcactaatattcttttatttaaaaacgtgtatgtattcttatgaytatatcctcttctgggatgaattttacataaatctctgtctgatctagtattatcaagccctaccttgagtcttgccatgcacattttgttctcattctaacatctcaaactcaatgaagcaaagttgcattcattcaaatccatatgctccttccttcttcaattggcttcttctgattgacctctatgtaatcactgcccttattgttccaacttctcagagtcaaaatctaatttttatacctctctcttccttatatttgcattagagtcaaacactaatatataagaa

SEQ ID NO: 324387 - DNA, 482 bp, Homo sapiens
ttttgactatgaaacacaagaaaactatgtattacaactgtctaaaaaacatgttttatgaactktcatgaaaatgacatatccaataaaatgttttaaattgttaagatattcacagacctcaaaagccagttctgcatcatttatcaggcttccaaataatacaagaaactcttattttaaatttcctttctattcccccttcaggaagtgctaagagaaagctcgttatcacctttatctctgttatctaaactcatccttcatggaaggaggggtagctcatctacctgagagaataggataccttttgagaacccttttatgggtgagaaaggttacttttccaaaaaagcctgggaagcagcctccaccgtccctgtctttggaagcctgctgcctcctctggtgctaacagaaggatcccagctctcctccacttcctgcttctgcagcaagcacatcagtgtctgtgtgttact

SEQ ID NO: 324388 - DNA, 523 bp, Homo sapiens
gctaactcagtgaggaaaagctcagtttctgaaaaagctgaaaataaaaacagacttcgtattgtttgccttctcaaaggttagtgataaggccccgagagaagacaaacaatcaatatgcaaacaagagcattccaggagggctgcagatacccttcttttcctaagcacgatataaaaattgcatcaacagtacagccagctccgtattcaggaacacaccctgagaaattctgatattatagaattaataaaacagaaataatctacaaacacacttacactgaaccttaaaggaaatttaaacattgagtaaattcattctgagacatatttcctagataacaaggaaactcaacacacttggttccaaatcacgaaaagaccagcttcttaktgtcacttatcagtttctaaaagtgatggcaactaggagccagtcttcttccctatgactgcccaggcttacacaaagttagtccacaacttgagatgatccagcaacccaactaccaattaaata

SEQ ID NO: 324389 - DNA, 651 bp, Homo sapiens
aatcaccaacttacaccaatgcgttaattagacttgaaaagggatttagttgcaataatgacagcacaaaacttatttttttaatgtgctgtctgttaatcctgattataagcattatactaaaacatggaattgttcaacataatgctgagaaattaggtatactgcaaagagtcatttttctggtttggggagtcactaattcaaatatttattgcacacttatcacatttgtcctgcaatgtaacatttaaaaactaaacacaaaactagattctgcttagtaaggatttataatctagttagagaggcaaaatataaccacagagaagttaagtcatgttagagtaaatgacaaaacggcaaataaagagaaatcagaggaggcaytgatagggattgaagtgaaaaacaggcctttgcaggagtgcataggcagaaggaaggaggttagacagaccttgaggctgagttttaaaaagccagaggggtgattatacattggagtgattatattcttggattgccaaaaacacatgacatctcagcaatgcatattttgcctcagagttcagagatgccaactataattaaacccagatgcatacataaagtcactgcttagtataaatggggcaaagctgtatctcc

SEQ ID NO: 324390 - DNA, 586 bp, Homo sapiens
gagggatagaggactctcagacagaccatgctatttgtcctggtgcaaatccagtgatggattaaagacctggagctgtcataattcaatgtgttcatctggtcaggtagactattcccacagccgcctcactgttctccccatctctagtctctttctccttaccctcctcacattacctgcttaaacattctcaacacctccaactgccttaagagtcaagtttaaactccttacctcagtgcttcccaaattcttttttaaaaaatatcttgtcacatgtgaccattgtaacatttaaatggcacgctgcagtaagactcctgtggctagaggycctagctgcctcaggccccaactgactgtctggagggctgaggtcatcaagatcttaagtgcacctgtaaactcatgcacagaccactcactgggaaactgccacaaccaaatgtgcaacgttcaaagcttgtcatttcaaagtctaataccaaacaattctccgatttctccataccatccccattctattataaacatgcaattctagctatatttgctcatctatatgctatctctgagaatactt

SEQ ID NO: 324391 - DNA, 637 bp, Homo sapiens
agaataacaagatagctaacattttaaagaataagtaaataataaacaccctttgaatttgtataaatttgcagggcagctttttttttaactttcatattaaaataattttggatktacaagagttgaaagcatagtattgagatgtcctcttctttcgtcttactcttagctataactatggttcattaacatataaccatttataaacatttatataactatgatacatttatcaaaactaataaattttcattggcacaataccattaactacaaccttatttggatttctccgctgtttccactaatggccttatgctattccaggctccaatccaggacactgcattgcatttagttgactgttgaagtctcctttaatctgttacagttccttagtcttttcttttagatccttacaatagtatctagacaaaatatggttttccatagttatttaggtcaactccttctttccccagccccttcagaggagctatatttgtaatagagttagattcatttgttacagtctgcattccatcctggattctcctaacatcttgggtatttttttttttatttgcatacagcaaaagtcacttttgtgttatacaattctatgggttttgga

SEQ ID NO: 324392 - DNA, 606 bp, Homo sapiens
ttagtcagtagccacgaatccagaaaatgttcaattggcaagctgggcagtcttggaagcaccaagaaatacctctactcagcctattgctccctaggataaagcaagacggaggatttcttctaaggcctccatggatttagaccatcacctgtccttgtgaccccagcaagttttggtatctgacagtggaactgtaagtactaatgtgggaaaacatggagaggttcgaggatatttggggtggtggtagagtgagccacgagaaatcgcatgtaaaattgtatgcgtatgtgtgctgatgtgcatttttctgagaacagcgtcattagggttcatcagattatcaaaaggtcctgagtcccaaaaaatttcaggaactacttcagtttaggttatggccgaggccttggggtctccataaatttacaagtctgattccttagaggttcagattatcccccagtggatgatccctcccagaggatgagtcacagcagagagtcactttgcargaacacgtgctgtctgagcctcccctggagtactggcctcacaggcaatccctgctttataaaacacccctttctctgatttttgtgacac

SEQ ID NO: 324393 - DNA, 625 bp, Homo sapiens
tgtatcaaagttgctgtatttccttcttgctgggcagccaatagctgtgaaacagaatcttttcatgctgagaactcaatagccattggaacaatactggattttaactacttcaaactgtcagaagatctacaaattgaaaaggaccttggagtacatcttgcttaatctccatgtgactcatgactgtcctccacaactttacctataagaaatcaaccagttcttacattgtttttaattatagcagctgacatttattgagtgctaactatgcctgttaccattctacatactttatttgtacacactctcaattcttataatcatgatgtgaggtagataccattattatcccattttacaaaggaggaaactaaggcacatggaggctaatttgcctaaggtcatagagacggtgagtgacagatcacacagacatcatacagaaatcaaaatgggagaatsttaaaaccaattttatgccaataaattcaatattttaaatgaaatgtcaaaattccttaaaatatgccacttcccaaaatgaattcgagaaaaagtagtgtctgaataatcctctacttataaaaacaattcaaaattaaaaactttcctacaaaaa

SEQ ID NO: 324394 - DNA, 567 bp, Homo sapiens
catatatatgttataaacatatgtatatgttataaacacatgcatgctgcatgttataaacacatgcatgctgcatgttacaaacatgtatgctatatattataaacatgtgtgttacatatatgctataacatgttacttgtgttatamgcattgttacatgttataaacatgtgtacattacatatatgctataaacctgtgttgtacatacgtgtaaatatataaaatatatattatatatcaggaacaaggcaagataactgccctcatcagcaaaaacatgaaatactgagaaatatatttaacaaaatactgctatacattgaaaactaaaaaacactgctaagagaaattaaagaagacataaataactggaaagaaaaaccatgtttatagatttaaaatttgatattattaagataggaattttctccaaaatgatctatgtgtttatatttagcagaatcccaatagtgccaagcactattaggacaggcattattagggaaattgataagatgattctaaactgtatatggaaagatgcagggcaactaaaacaag

SEQ ID NO: 324395 - DNA, 567 bp, Homo sapiens
tgtttctgcataacctggttgtattagtccattctcccactactataaacaaatacctgagactggctaatctataaagaaaagaggtttaattggcccacagttccacaggctgtatagaaagcatggctggggaggccttaggagactttcaatcatggcagaaggcaaacaggggagcagggacatcttacatggccagaacaggaggaaggctggcagggaaatgttacacacttttaaacaaccagatctcatacgaactctatcacgagaacagctctacaggtmcggtgctaaaccattggaaaccacccccatgatccaatcacctaccaccaggccctacctccagcactgggattacaatctgacatgcgatttgggtgaggacacagatccaagccatcactggttgtcttctcccaaggaaactatttgcttgatccacaaattctactagacactagaggtcattgcttctgactaggtagatcaacatcttaaaataattaagcatttttcccccaaaatacacttatgacataagtggcaatttcatcatta

SEQ ID NO: 324396 - DNA, 643 bp, Homo sapiens
aagaaaaacacagcaacagcatttattgaggccctacagtgtactcagacctatactgggcaactagacagttacaatataaaagtataatacaaatttcaacacacatcaaaatataactaaaagtagtcttaatttactggcattacatactaaaaataacaataatagttattattgggcttacttctactattgctactattttacttyataaaaaccactgtactctggtacaaaaacagacacatagatcaatggaacagaatagggaccccagaaataaagttgcacacctacaaccatctgatcaaaaaagtcgacaaaagcaagcaatgcggaaaggactccctattcactaaatccctattgactaaatggtgctgggataactggctagccatatgcagaagattgaaactggaccccttctttacaccgtatacaaaaatcaactcaagatgaattaaagacttaaatataaaacctaaaatataaaaacttctggaagataatctaggaaataccattctggacacaggacctggcaaagattccatgatgaagatgccaatagcaattgcaacaaaaacaaaacttgacaaatggggcctaaactaaagagcttctgcatagtaaggga

SEQ ID NO: 324397 - DNA, 643 bp, Homo sapiens
aagaaaaacacagcaacagcatttattgaggccctacagtgtactcagacctatactgggcaactagacagttacaatataaaagtataatacaaatttcaacacacatcaaaatataactaaaagtagtcttaatttactggcattacatactaaaaataacaataatagttattattgggcttacttctactattgctactattttacttcataaaaaccactgtactctggtacaaaaacagacacatagatcaatggaacagaatagggaccccagaaataaagttgcacacctacaaccatctgatcaaaaaagtcgacaaaagcaagcaatgcggaaaggactccctattcactaaatccctattgactaaatggtgctgggataactggctagccatatgcagaagattgaaactggaccccttctttacaccgtatacaaaaatcaactcaagatgaattaaagacttaaatataaaacctaaaatataaaaacttctggaagataatctaggaaataccattctggacacaggacctggcaaagattccatgatgaagatgycaatagcaattgcaacaaaaacaaaacttgacaaatggggcctaaactaaagagcttctgcatagtaaggga

SEQ ID NO: 324398 - DNA, 573 bp, Homo sapiens
attttaaccttggtgaatctgacaattatgtgtcttggggttgctgttctcgaggagtatctttgtggtgttctctgtatttcctgaatttgaatgttggcctatcttgctaagttggggtaattctcctggataatatcctgaagagtgttttccaacttggtttcattctccccrtcactttcaagtacaccaatcaaacataggtttggtctgttcacatagtcccatatttcttggaggctttgttcattccttttcattcttttttctctaatcttgtcttcatgctttatttcattaagttgaatttcaatctctgatatcctttcttctgcttgattgattcagctgttgatacttgtgtatgcttcatgaagttctagtgctgtgtttttcagcttcatcaggtcatttatgttcttctctaaacctgttattctagttagcaattcgtctaaccttttttcaaggttcttagtttccttgcattgggttagaacatgcttctttagctcagaggagtttgttattacccaccttctgaagcctacttctgtcaattcatcaaac

SEQ ID NO: 324399 - DNA, 615 bp, Homo sapiens
cacaaatatggaagaaggtaacaagcctacaatataaccattttgaaagataagccttgttcagtcatttgaaaacgtgtgaaaaatcaacctccagaaacaartacctcagaatggctatcccacctcccaaatgtatggtcaatttaagcttgtaaaatgttttcccaaaattgatcagggatgtcctttccaaaaagtgtccactctaacagactttgctctttttattttggagagcaaggctaataaagttgaggacgtaggaaaatggaacctgagcttacctagggtcatgagttgtgaaggctttagagaaatctaacagctcccagggctatgcgtggctggaaaaaaataaatcccagctccccaagacagcatcataacgggttccacttaagtgtacacatctgtggagcccacctctttgtgctctttcccccaaatctcccagggcctgccctaggattgacaaacaaaactcacctctgaaatttcattagcaccaccagaatgtttgcctcacagcttccaggtgggacaggaggagaaaaggtattttctgagccccaccttaaatatgcaagcgccaagttcaaggaggagctatag

SEQ ID NO: 324400 - DNA, 604 bp, Homo sapiens
ttattttaactcctttggacgtgaatattttayccatgtgttcttctaaaactttacagttctacgttttatatttagatctatgatccattttgagttaatttttttgtaaagcatatgatttggcaaatgtgtttgcaattattccaacaccagttgttgaaaacaaaatcatttctcctttgattttgtaccttttctaagatttaattaagtatattttgtgggtctatttctggagtctctattttgtccagttgattaatgtgtcttctcctttactggtttgcactatctttacttctataggcttatataaaataaattagatatattcacctaattttattcttctttattttggatattctagtttttgtttttccttataatttttagaatcttcacgtttatagctacaaaaatacctgctagaattttgatttgtattgtgttaaacttatacaccaatttgtacagaattaatacttttactacaatgagtctttgaatctatgtatatatttagatttgcttttttaatttcacaaatactttatagttttcagcataaagatctcttatatgtttgttatatttatag

SEQ ID NO: 324401 - DNA, 551 bp, Homo sapiens
ttttacccatgtgttcttctaaaactttacagttctacgttttatatttagatctatgatccattttgagttaatttttttgtaaagcatatgatttggcaaatgtgtttgcaattattccaacaccagttgttgaaaacaaaatcatttytcctttgattttgtaccttttctaagatttaattaagtatattttgtgggtctatttctggagtctctattttgtccagttgattaatgtgtcttctcctttactggtttgcactatctttacttctataggcttatataaaataaattagatatattcacctaattttattcttctttattttggatattctagtttttgtttttccttataatttttagaatcttcacgtttatagctacaaaaatacctgctagaattttgatttgtattgtgttaaacttatacaccaatttgtacagaattaatacttttactacaatgagtctttgaatctatgtatatatttagatttgcttttttaatttcacaaatactttatagttttcagcataaagat

SEQ ID NO: 324402 - DNA, 551 bp, Homo sapiens
ttttacccatgtgttcttctaaaactttacagttctacgttttatatttagatctatgatccattttgagttaatttttttgtaaagcatatgatttggcaaatgtgtttgcaattattccaacaccagttgttgaaaacaaaatcatttctcctttgattttgtaccttttctaagatttaattaagtatattttgtgggtctatttctggagtctctattttgtccagttgattaatgtgtcttctcctttactggtttgcactatctttacttctataggcttatataaaataaattagatatattcacctaattttattcttctttattttggatattctagtttttgtttttccttrtaatttttagaatcttcacgtttatagctacaaaaatacctgctagaattttgatttgtattgtgttaaacttatacaccaatttgtacagaattaatacttttactacaatgagtctttgaatctatgtatatatttagatttgcttttttaatttcacaaatactttatagttttcagcataaagat

SEQ ID NO: 324403 - DNA, 604 bp, Homo sapiens
ttattttaactcctttggacgtgaatattttacccatgtgttcttctaaaactttacagttctacgttttatatttagatctatgatccattttgagttaatttttttgtaaagcatatgatttggcaaatgtgtttgcaattattccaacaccagttgttgaaaacaaaatcatttctcctttgattttgtaccttttctaagatttaattaagtatattttgtgggtctatttctggagtctctattttgtccagttgattaatgtgtcttctcctttactggtttgcactatctttacttctataggcttatataaaataaattagatatattcacctaattttattcttctttattttggatattctagtttttgtttttccttataatttttagaatcttcacgtttatagctacaaaaatacctgctagaattttgatttgtattgtgttaaasttatacaccaatttgtacagaattaatacttttactacaatgagtctttgaatctatgtatatatttagatttgcttttttaatttcacaaatactttatagttttcagcataaagatctcttatatgtttgttatatttatag

SEQ ID NO: 324404 - DNA, 631 bp, Homo sapiens
ccacaacttgtttctaaccaatggaatatgacagaggtgataagataagtgtgattacatgtatgtgattatataaggtttattttaatttcagtagctttgggggcacaggtggcttttgcttacatggatgaattgtatagtggggaaggcttggctttgartgtacctgtcaactgaattgcataccttgtacccgataggtaattttccatcctttaccctcctccttgcctccctccttctgagtctctgacttgaacaggcatttctcagaagatgagaatagccaacaaatggccaagaaacatgaaaaaaatgcttatcactaatcatcagggaaatgcaaattaaaaccataatgagctaccaccttacccagccagaatgaccactgttaaaaagtgaaacaacaatagatgttagcatggatgtggtgaaatggggactcttatatgctgctggtgggaatgtaaattagcacaacctctatggcaaacagtatgcaacagtatgcagatttctcaaagagctaaaaatagatctaccatttgatccagttaatcccactactggttatctacccaaaggaatacaagtcactgtataaaaaaacacacctgcatgtgca

SEQ ID NO: 324405 - DNA, 631 bp, Homo sapiens
ccacaacttgtttctaaccaatggaatatgacagaggtgataagataagtgtgattacatgtatgtgattatataaggtttattttaatttcagtagctttgggggcacaggtggcttttgcttacatggatgaattgtatagtggggaaggcttggctttgagtgtacctgtcaactgaattgcataccttgtacccgataggtaattttccatcctttaccctcctccttgcctccctccttctgagtctctgacttgaacaggcatttctcagaagatgagaatagccaacaaatggccaagaaacatgaaaaaaatgcttatcactaatcatcagggaaatgcaaattaaaaccataatgagctaccaccttacccagccagaatgaccactgttaaaaagtgaaacaacaatagatgttagcatggatgtggtgaaatggggactcttatatgctgctggtgggaatgtaaattagcacaacctctatggcaaacagtatgcaacagtatgcagatttctcaaagagctaaaaatagatctaccatttgatccagttaatcccactactggwtatctacccaaaggaatacaagtcactgtataaaaaaacacacctgcatgtgca

SEQ ID NO: 324406 - DNA, 642 bp, Homo sapiens
gaagcacatgtaaacagaaagcaaagtttccatgcacctagcaggactcttcatgagcgtagaaaggaaaacagcacaaggactctcatttccagagaggcaggggaagaaggcatgaggcacttctcagcccaggaagaaaaggcgtttcagaaacattcaaatgacagaagagaaagatcttgggctagaggagataaatagatggtattcaatttctcattaggctcatggtgtcactttcatttggaaccatgttccactgctaattttcacagtgcttgagtgcttcttaaaatgaatagcactcactcatgctttcatgcagactgcacggtacatttctgtgcctttattaaagggtacagtgagcatatacttccttcccaggggtataaatttagaactattaaatatgtgaccttggacctccatagcaaaatggcagctacccaggtattcatatttttttcattgcagtttgaatataaaatctccaaaatgtgtacacaagtacactcatgtgcacacacaatcactttcctaattattttgtmatttgcaaccttagcacctccacgtaaagactgatctgcctctgaacaccaactctgatctcttaagtacaactgaaagttaaaa

SEQ ID NO: 324407 - DNA, 563 bp, Homo sapiens
cggacaacttgaggccaggagttcagcctggccaacatggcgaaaccacgtctctacaaaaaaaaaaaaaaatacaaaaaattagccaggtgtggtggcatgtgcctgtagtcccagatacwttggagtctgaggctggaggatcacttgaacccaaaaggtggaggttgcagtgagccgagattgcaccactgcactccagcctggaagacagaccccatctcaaaaaaatgaattggtttgctgactatgtacaagatggatgacatagaaaaacaaagtttgtatgattctgaattttctcatcaggaactttaatatttcaacacttggtctaacgcataagatcacaggatatttttgtttctaatgaaattaatttatctctctcacacacacacttacctcccttcctcccttttcctgtctcatgaaaagtacaatctgtataggccaaactgtatctgtccttcaagggttaagcctccaataattcagggtgacaagtcagcttatcaattgtgaatgagaccacttgaagaacatgctaaatcagccagtca

SEQ ID NO: 324408 - DNA, 563 bp, Homo sapiens
cggacaacttgaggccaggagttcagcctggccaacatggcgaaaccacgtctctacaaaaaaaaaaaaaaatacaaaaaattagccaggtgtggtggcatgtgcctgtagtcccagatactttggagtctgaggctggaggatcacttgaacccaaaaggtggaggttgcagtgagccgagattgcaccactgcactccagcctggaagacagaccccatctcaaaaaaatgaattggtttgctgactatgtacaagatggatgacatagaaaaacaaagtttgtatgattctgaattttctcatcaggaactttaatatttcaasacttggtctaacgcataagatcacaggatatttttgtttctaatgaaattaatttatctctctcacacacacacttacctcccttcctcccttttcctgtctcatgaaaagtacaatctgtataggccaaactgtatctgtccttcaagggttaagcctccaataattcagggtgacaagtcagcttatcaattgtgaatgagaccacttgaagaacatgctaaatcagccagtca

SEQ ID NO: 324409 - DNA, 546 bp, Homo sapiens
acacttttaactgtggtggatgttgcaaaattgttgcattgctttaaactcctatgctcagggtagactttcctattttacaagcaattaatcatatstctaacaaatcccactgaaccatacgcaaacacaaacaattacaggcacatacagaatcaccttctgcaccaccatatactcagtacctagaaacatatcctggagacagtacatgtttaataaatgtttaccagatcaatgaatggatgaatcaattgtatacctaaactatgtaatgtttaatatctgaaagtcttatattgcattacacttcaacttgtacatgttttcaaattattcaggaagcaaacaaaggacaagctgtactgaaataaaatagaaagaagttcttgtttgttaatggggagattgtgagcatatatgttgagctccctgaataccagttccccattaatccttctccccagtgcttctgattccagagctgatgctcatgatgacccagagactgttctgaaccatcagagattaaattgtgtcgagcac

SEQ ID NO: 324410 - DNA, 546 bp, Homo sapiens
acacttttaactgtggtggatgttgcaaaattgttgcattgctttaaactcctatgctcagggtagactttcctattttacaagcaattaatcatatctctaacaaatcccactgaaccatacgcaaacacaaacaattacaggcacatrcagaatcaccttctgcaccaccatatactcagtacctagaaacatatcctggagacagtacatgtttaataaatgtttaccagatcaatgaatggatgaatcaattgtatacctaaactatgtaatgtttaatatctgaaagtcttatattgcattacacttcaacttgtacatgttttcaaattattcaggaagcaaacaaaggacaagctgtactgaaataaaatagaaagaagttcttgtttgttaatggggagattgtgagcatatatgttgagctccctgaataccagttccccattaatccttctccccagtgcttctgattccagagctgatgctcatgatgacccagagactgttctgaaccatcagagattaaattgtgtcgagcac

SEQ ID NO: 324411 - DNA, 542 bp, Homo sapiens
ctttgcactttctgttctccctggatacaatgttcttgcattctgactctttgcatagttggtcctcccaactttcgaaacaggcttaaatatcagttcctyatagaagtatttcctgacatcatagcacttaccacaggctgcaattatgcatttgttcatttagtgtgtgtgtgtgtgtgtgtgtgttttaactgtgtggcttacatgggaatgcaagcttcgtaggattagggacgtgtccatgtcctccttgttgcatgcccactgccaagaatagtgtctggtgcatgataaatacttgtttcatgaattaattaatatactattttgtttgcttgtgtatctgtttaatgctgtccagcagacaccttttagggcatctggtcacgtcactctctaattctccttaaaaattttgtgcttcttggtggcagggattatgtgtcatgaattcatatctcaagcacctagcatggagctcacacatcgtaggatttccacaatgtttgaattaaatcaaatcattacacaagaaataa

SEQ ID NO: 324412 - DNA, 567 bp, Homo sapiens
gatcttttttccccctctgagtcctctgttcactctcccttgtccattttgtacatttttaaagttgttattgttcatttcattaatatttatcacaggctatgtcaagaaaaacctgacatccaacagtaggcaaatgggtaaataagctacagtatagccatatgctaaaaaaaaaaaaaaaaaaaacaacctttaaaaacccatgttttcccaaaccatcagtaacactaraaaatgtttatgagataatttgtatgaaaatatgtttatagtatgattctgttttggaggaaaatgggtatctatgaaaattcaaatatactgatattttaaaagaggaggaaatacgtcaaaaatgttgagtgatgagtgataggctggggggagtcagattctacttcatatagcaaattttttcataatgtccaaatatgacttttattttcagaaagagtcagggttctttttaaaaagagaaattttcatgagcattttattctaaccatttttcacaacactgatatcagcactgaatagtcattcctttaacacacaaatttcgaa

SEQ ID NO: 324413 - DNA, 526 bp, Homo sapiens
ggtgaacatgcctcattatacccctctccaccattaccatcaacacaaactttaagtctgataagaaacatttacagtctattctccctaaaacctgctacttagaggctgtaaccgcacgataaaacctaggtctccataaccctttattgaaacccacacattcttttctcccggtaactctacgaaccacttgcccatcagaatatgtgtaaatctacctatgacctggraacaccttcctccttgaagtgtccctcccttccaggtagaaccaatgcaaatcttacatgtattgattgatgtctcatgtctccctaaatgtataaaagcaagctataccccaaccaccttgggcacgtgtcctcaggacctcctgaggctgtgtcaagggtgcaaccttaacctcagcaaaataacctttctaagttgactgagacttgtctcagatacttgttggtttataagtaataggagaagagaagaatataaagtctcacataccagtgcaaaccactcagctaga

SEQ ID NO: 324414 - DNA, 526 bp, Homo sapiens
ggtgaacatgcctcattatacccctctccaccattaccatcaacacaaactttaagtctgataagaaacatttacagtctattctccctaaaacctgctacttagaggctgtaaccgcacgataaaacctaggtctccataaccctttattgaaacccacacattcttttctcccggtaactctacgaaccacttgcccatcagaatatgtgtaaatctacctatgacctggaaacaccttcctccttgaagtgtccctcccttccaggtagaaccaatgcaaatcttacatgtattgattgatgtctcatgtctccctaaatgtataaaagcaagctataccccaaccaccttgggcacgtgtcctcaggacctcctgaggctgtgtcaagggtgcawccttaacctcagcaaaataacctttctaagttgactgagacttgtctcagatacttgttggtttataagtaataggagaagagaagaatataaagtctcacataccagtgcaaaccactcagctaga

SEQ ID NO: 324415 - DNA, 607 bp, Homo sapiens
tttttgtatttttactagagatagattttcaccatgttagccaggctggtctcaaacacctgacctcaggtgatatacctgcgtcagcctcccaaagtgctgggattacaggcatgagccaacctgctcaactcagtccccgttttactggggctaagtccactcctagatccaaacagcaaatattttacacagggttggatgttgagtatcagggatgggttcaggggtaggtaaggaattcaatccaggtgcaagaaaattggcctcaaaacttttcctagagcctactacttcttggatgagygtggtccacccaccagggctgctgttaacagtggcatgtcagccagaagctactagtggttgcctcagacatcctgctgggggacacggagaaaaataggtccgagaaattgagtcagagtttccatgacatggtgagatgatctgcatccacctggttctgactgcctgtcatctttggacttctcagatatctcagcctacatatcccctttgagtctccacttagctctgcaaccatgagttttagcaataacacttttatcgactacttttgctcgatggttaccagttttgttat

SEQ ID NO: 324416 - DNA, 607 bp, Homo sapiens
tttttgtatttttactagagatagattttcaccatgttagccaggctggtctcaaacacctgacctcaggtgatatacctgcgtcagcctcccaaagtgctgggattacaggcatgagccaacctgctcaactcagtccccgttttactggggctaagtccactcctagatccaaacagcaaatattttacacagggttggatgttgagtatcagggatgggttcaggggtaggtaaggaattcaatccaggtgcaagaaaattggcctcaaaacttttcctagagcctactacttcttggatgagtgtggtccacccaccagggctgctgttaacagtggcatgtcagccagaagctactagtggttgcctcagacatcctgctgggggacacggagaaaaatagrtccgagaaattgagtcagagtttccatgacatggtgagatgatctgcatccacctggttctgactgcctgtcatctttggacttctcagatatctcagcctacatatcccctttgagtctccacttagctctgcaaccatgagttttagcaataacacttttatcgactacttttgctcgatggttaccagttttgttat

SEQ ID NO: 324417 - DNA, 607 bp, Homo sapiens
tttttgtatttttactagagatagattttcaccatgttagccaggctggtctcaaacacctgacctcaggtgatatacctgcgtcagcctcccaaagtgctgggattacaggcatgagccaacctgctcaactcagtccccgttttactggggctaagtccactcctagatccaaacagcaaatattttacacagggttggatgttgagtatcagggatgggttcaggggtaggtaaggaattcaatccaggtgcaagaaaattggcctcaaaacttttcctagagcctactacttcttggatgagtgtggtccacccaccagggctgctgttaacagtggcatgtcagccagaagctactagtggttgcctcagacatcctgctgggggacacggagaaaaataggtccgagaaattgagtcagagtttccatgacatggtgagatgatctgcatccacctggttctgactgyctgtcatctttggacttctcagatatctcagcctacatatcccctttgagtctccacttagctctgcaaccatgagttttagcaataacacttttatcgactacttttgctcgatggttaccagttttgttat

SEQ ID NO: 324418 - DNA, 607 bp, Homo sapiens
tttttgtatttttactagagatagattttcaccatgttagccaggctggtctcaaacacctgacctcaggtgatatacctgcgtcagcctcccaaagtgctgggattacaggcatgagccaacctgctcaactcagtccccgttttactggggctaagtccactcctagatccaaacagcaaatattttacacagggttggatgttgagtatcagggatgggttcaggggtaggtaaggaattcaatccaggtgcaagaaaattggcctcaaaacttttcctagagcctactacttcttggatgagtgtggtccacccaccagggctgctgttaacagtggcatgtcagccagaagctactagtggttgcctcagacatcctgctgggggacacggagaaaaataggtccgagaaattgagtcagagtttccatgacatggtgagatgatctgcatccacctggttctgactgcctgtcatctttggacttctcagatatctcagcctacatatyccctttgagtctccacttagctctgcaaccatgagttttagcaataacacttttatcgactacttttgctcgatggttaccagttttgttat

SEQ ID NO: 324419 - DNA, 601 bp, Homo sapiens
tttagcattcaggaaagaaaatgcagaattcagaggaggctcccccagtactgaggatggggtgaaagagcagagataagccacaggcagctacttcacaagtttgcttacagcaggctgagaactggagctgtctgggtggtggagtttctgccaagtgtaacacactctgggaggtagaggactctcaggatcctgtagaaaaaatgatgcattttcgttttcttctttttttttttaagtgactgaactacattggtaaaaggagagatgctgccgcctggcataactctctccccgtcttttcaacatccctcagaaattcttgacttgacttgttgctcttctcccattttaaacccaggtatgtttstataaaatgatatttctaaaaaaaaaaagtttttaaaaggtgaggatgaagtgtgaaacgataaagtgaagaaaagttattttcagtgaataaatggaacaccaaatttgtaacaaaaaaaaaaagtaaagttaaaattaaaaattgcagtattttaacttaaagtaaaaacagaggaagtgtacttggaatgtaaatgagaaaatgtgagtaaaaataataaaatgg

SEQ ID NO: 324420 - DNA, 601 bp, Homo sapiens
tttagcattcaggaaagaaaatgcagaattcagaggaggctcccccagtactgaggatggggtgaaagagcagagataagccacaggcagctacttcacaagtttgcttacagcaggctgagaactggagctgtctgggtggtggagtttctgccaagtgtaacacactctgggaggtagaggactctcaggatcctgtagaaaaaatgatgcattttcgttttcttctttttttttttaagtgactgaactacattggtaaaaggagagatgctgccgcctggcataactctctccccgtcttttcaacatccctcagaaattcttgacttgacttgttgctcttctcccattttaaacccaggtatgtttgtataaaatgatatttctaaaaaaaaaaagtttttaaaaggtgaggatgaagtgtgaaacgataaagtgaagaaaagttattttcagtgaataaatggaacaccaaatttgtaacaaaaaaaaaaagtaaagttaaaattaaaaaytgcagtattttaacttaaagtaaaaacagaggaagtgtacttggaatgtaaatgagaaaatgtgagtaaaaataataaaatgg

SEQ ID NO: 324421 - DNA, 464 bp, Homo sapiens
tgagacagtagcaaccactattttcacacatcaatgtagctgaggctcattttcctaaagcaagatgagctcttaaacagagatatcaaccacatttagactatctttatttacagactagaaggcaagagcagaacctctgcattaaaaaagaagaagaagaaaagaatggaaaacccctccaacctcacagtgttaatgctagcttgctaattcatatctccttaaacagcctgcatccagctgttccaatttaaagtctctgccattttttttttgaatgcagaaaaaaaatctgaattaaagatgtaaayagaatacttgagcacaggaaaggaaggtagtgcccatttttcaatgtgataaatgcagttaataaagccatgtagccctaaaatgcattggtctgagagaagaaaatagaaattgagggatgctgcttttaagtcaagattaattactag

SEQ ID NO: 324422 - DNA, 553 bp, Homo sapiens
aatatgtatattttatccaccactgccatggtgggaataacaatgtgtttcacactataaacacactagtgggaagatttacttttattatatactttattaggaagatgtgtagggtactgaggagtaaaaagagataaactgctgggcatttacatgaaagaagtggtttttttgatggggtttgaaaaccctatggtggtaaatttattgaagagtatgtggattttaggtaatataagaaaatatggaattattggctcattccaatgcactttaattccaggatgcagaattctaaaaatgaaaggtcatttataacttatctaattgggatgtttcattttacagatgagaacgttaaagcaaatcaatatttttttctaaattgcccaatatcatgtgaattgtgacaaaactggaagcaaaaatcagcctctctgtgaatgtaggattcttcctactayactacacagcttccagggcaggcacagaccccgtgcccacatctcctctctggaaattgttctacctgaggatatatcctctctta

SEQ ID NO: 324423 - DNA, 568 bp, Homo sapiens
ttcaataggctctccttacaaaatccatcggcttggaagcacagctaagrtttcctgaaagtatccataatttttttctataaatcacttttcctttattagtttttctttttaatccattttaaattgtatgctttatcttgaaaattatctccattactgaaacacatcatgaatgagaggatggggaatgcaatttgcccagcatattaattgatgcagtgttcaattattgatatatggataaagaagaaattaatattaaaacatacaatgtacagaaggggagagggggaaatattatctcttgctcaggtctgagttttgaccattagtgatatttttacatggcacacagagaaaactgcttaaccgagccccttgttgatttaaatttttacctacaactgcgcatggcaaaatgtcaacctaaacaattaaaaagcattaggtaaactgtggaatcattggcagcatgagacgggtggcgagtaacctgttaaaatagcctataggtagtcccatcaagatgcatactggctaagcatgatggagagaatcaccacca

SEQ ID NO: 324424 - DNA, 423 bp, Homo sapiens
gcctctttatttgatctgagatgtaagtacacacacaaacacacacacacacacaactttagatacggcgttcatatagaacttttacaatataatacctactttatcttcagtatttccattctgagtaagacactgacatattagtgggatgcatggatggatggacggatggacagacagacaracagatacatagatagatgaatagatgcatggatggacaaatggatggatggctgaatggctggttggacaaacggatagaagatagatagatggatagatagatagacagaaagacagacagacagacaagattgccagatacagacagacatgagagaggggggaatatgaacacatcatggttgtgtgtacattttacattcactcaatgctcattttctgcaatgagagtta

SEQ ID NO: 324425 - DNA, 545 bp, Homo sapiens
tctctaggaaaagggaaaggagtgaaatagctgaaagtgaacattttgcctgatagggataagaatctggatttaaaattaaactgattaaaaatgaataatgtaataagttgtttcttgtgcatctgagttagcagactgagttctcttacaagctctgagaaagccaasaaagaaacccatttgatccacggtgaggggtgtacacaggctatacttcatggcctctgatacaccagtggattggtatgtgtcatttcttgtttttttatatttaatcttaagcttctgtgagcctaaatgagtcccctggttatgctcttcctgcctctgctcagtttgcacccattcattctcccacctgcttgaacatgtggtccctctgcaaggaatgagattcgccctaagatggagaaacattttatcactgtgacacaagcaggagacagctgtttcccattaatcaagtgtgggaggtgttacaatccctgtactctggagtccagaggttaaacagacggaatggaacattccgtggactgtcc

SEQ ID NO: 324426 - DNA, 536 bp, Homo sapiens
ggttatgctcttcctgcctctgctcagtttgcacccattcattctcccacctgcttgaacatgtggtccctctgcaaggaatgagattcgccctaagatggagaaacattttatcactgtgacacaagcaggagacagctgtttcccattaatcaagtgtgggaggtgttayaatccctgtactctggagtccagaggttaaacagacggaatggaacattccgtggactgtcccctcggggggtgtcagcaaattatttctatgttttaaattctgctcataaccaaattgatgattcaatcaattcctcaaaccttgttccttgaaatgagcagagtgacattttctatttattgtcactcccaaaaccttccattttaaatcattttaataacaaagtaaatatattcaaatattcaattcaaaaccatttttttccatatttacaagcaggctggtaggtccagagctgctttcacagtggaaacatttacaactcttgttgtcaagcttcaagagaaattattttaaaata

SEQ ID NO: 324427 - DNA, 536 bp, Homo sapiens
ggttatgctcttcctgcctctgctcagtttgcacccattcattctcccacctgcttgaacatgtggtccctctgcaaggaatgagattcgccctaagatggagaaacattttatcactgtgacacaagcaggagacagctgtttcccattaatcaagtgtgggaggtgttacaatccctgtactctggagtccagaggttaaacagacggaatggaacattccrtggactgtcccctcggggggtgtcagcaaattatttctatgttttaaattctgctcataaccaaattgatgattcaatcaattcctcaaaccttgttccttgaaatgagcagagtgacattttctatttattgtcactcccaaaaccttccattttaaatcattttaataacaaagtaaatatattcaaatattcaattcaaaaccatttttttccatatttacaagcaggctggtaggtccagagctgctttcacagtggaaacatttacaactcttgttgtcaagcttcaagagaaattattttaaaata

SEQ ID NO: 324428 - DNA, 536 bp, Homo sapiens
ggttatgctcttcctgcctctgctcagtttgcacccattcattctcccacctgcttgaacatgtggtccctctgcaaggaatgagattcgccctaagatggagaaacattttatcactgtgacacaagcaggagacagctgtttcccattaatcaagtgtgggaggtgttacaatccctgtactctggagtccagaggttaaacagacggaatggaacattccgtggactgtcccctcggggggtgtcagcaaattatttctatgttttaaattctgctcataaccaaattgatgattcaatcaattcctcaaaccttgttccttgaaatgagcagagtgacattttctatttattgtcactcccaaaaccttccattttaaatcattttaataacaaagtaaatatattcaaatattcarttcaaaaccatttttttccatatttacaagcaggctggtaggtccagagctgctttcacagtggaaacatttacaactcttgttgtcaagcttcaagagaaattattttaaaata

SEQ ID NO: 324429 - DNA, 646 bp, Homo sapiens
tttgttctggcagcgctcggctaactcatgcatgctcttgaccctgtaaagctcattttcatgctttgttgggaagatcttcttaggatttgtctacagtcatgggccatgccccttcatatagggaagggattggctgacattttctgaaaagagccaaatagtagaaattttaggctttgcaggtaaaatagtctcagtcacatattattawgttttaatcatctaaaacccattttagttgatcacagactacaaagacagcccatagccagatgttgcctgcagagcataatttgctgacccttgccctaagatacacactttactcctaaagtctgatctttctggagtctcaactgaatacctacaacctgtactacctctaccctggcctctgtgtcacagttaaccctccctgtgaggactcacaaagcctgaccctgcacataagtggcttattcctcagccaagaactcagggcatggagacttctccttcccacacagatctgtcctttctgtagcaaccggttccacaaattccagctacttcctcatccccaacttgtaaattcttcatctcagagcacttatgttcaagacgttcctcccaggaataaaactgggccaacggtagcttcatc

SEQ ID NO: 324430 - DNA, 646 bp, Homo sapiens
tttgttctggcagcgctcggctaactcatgcatgctcttgaccctgtaaagctcattttcatgctttgttgggaagatcttcttaggatttgtctacagtcatgggccatgccccttcatatagggaagggattggctgacattttctgaaaagagccaaatagtagaaattttaggctttgcaggtaaaatagtctcagtcacatattattaagttttaatcatctaaaacccattttagttgatcacagactacaaagacagcccatagccagatgttgcctgcagagcataatttgctgacccttgccctaagatacacactttactcctaaagtctgatctttctggagtctcaactgaatacctacaacctgtactacctctaccctggcctctgtgtcacagttaaccctccctgtgaggactcacaaagcctgaccctgcacataagtggcttattcctcagccaagaactcagggcatggagacttctccttcccacacagatctgtcctttctgtagcaaccggttccacaaattccagctacttcctcatccccaacttstaaattcttcatctcagagcacttatgttcaagacgttcctcccaggaataaaactgggccaacggtagcttcatc

SEQ ID NO: 324431 - DNA, 640 bp, Homo sapiens
gggctagaaggtgtgatgtgtgcataaaggtagagggagtctttatcaaaagaaaaatccagagtggacccataaacagaaacaaagacaggagatgagcaagacatacgttgagttcaggcagctttcccattctaagctctgattcctgggaggcctggttgcatgccttttctgcttaagatagctggaatctgtctctattgtttgcattccaaacaaccttaactgagagggagttatctcctaaatacttcaccatgmaatcaaatacagagcctgccctttatgttgtctttccttgtggggagtttggtggcagtagatatgtgttctctgtattctcatgcctggtatttctaggaggaagagaagtgaaataattattgggaataacactgtattaacagtagctcaccttgttgagtatcaggcctgcattttttttttttttcagtgctttaacgaagttgttttatccagtcaccaatcctatgagaaagctattcttattttacgtataggtaaagtaaagctttgagacactaaggagcatttagaagtgggatctgaacctaagtccataccagtgcttcaccagccctaaccacccttcctagtatgctgactatagagtcac

SEQ ID NO: 324432 - DNA, 507 bp, Homo sapiens
aggatggaagatgtgacctgtgagattcaatgttggcagagaaatcatctgtgtcaaattccacaaaccagaattcacaaagttgctgagcccayacatgtaggatgaaagagagtaatgaaaactaatgacaggaaaccagcaccctgacaaacagagtggacccctgtgaattccttttgtagcagactccattgggtaacaacactggagtgcattttctgcttcctccagtttaagtaaatcctacttttgtgcaggtaacaatgtgcctgatgctgcaaatgaatcataactgctgtagccaatcgctgagattccagttcaccttgccagtgattgatgtagagattggccaatgacatctaagaaaacgactgcagtgacgaattctgggaattattttcctgcagtaaaatgcaagacgtgtgaaggagaaactcctcttctccttccttctgatgagagtgctgccctgtgagaacgtgatatggggtagatggcaga

SEQ ID NO: 324433 - DNA, 507 bp, Homo sapiens
aggatggaagatgtgacctgtgagattcaatgttggcagagaaatcatctgtgtcaaattccacaaaccagaattcacaaagttgctgagcccacacatgtaggatgaaagagagtaatgaaaactaatgacaggaaaccagcaccctgacaaacagagtggacccctgtgaattccttttgtagcagactccattgggtaacaacactggagtgcattttctgcttcctccagtttaagtaaatcctacttttgtgcaggtaacaatgtgcctgatgctgcaaatgaatcataactgctgtagccaatcgctgagattccagttcaccttgccagtgattgatgtagagattggccaatgacatctaagaaaacsactgcagtgacgaattctgggaattattttcctgcagtaaaatgcaagacgtgtgaaggagaaactcctcttctccttccttctgatgagagtgctgccctgtgagaacgtgatatggggtagatggcaga

SEQ ID NO: 324434 - DNA, 467 bp, Homo sapiens
gtgtgtgttttaggatcacctgcaaaaggaaacctgatatacaaataaagtcataaaagacagacccaaccagatggctgagagcagagctggacgttttgatgaaaccctcaactgcgcagagcagacagcagaggatttaagggcaagggatctcctggatttaagtggaagctctgtcaccaccttaataagctacatgttttccctaagactgtagctgctcatraagacattcattcaaccaaggtgtatggaaacttcactgtatgtgaggatacagcagaaaccaaacccaaagaaaacaaaacaactctgaattatacagcttagggctaaaagatacccaaagtgggtacctctaagatgtgagaattaaacaggtgatccagtcaaatcctttagtttctcacatggaaagtgctaaattagccagaagtggtggctcgcacttgcaatcccatcta

SEQ ID NO: 324435 - DNA, 467 bp, Homo sapiens
gtgtgtgttttaggatcacctgcaaaaggaaacctgatatacaaataaagtcataaaagacagacccaaccagatggctgagagcagagctggacgttttgatgaaaccctcaactgcgcagagcagacagcagaggatttaagggcaagggatctcctggatttaagtggaagctctgtcaccaccttaataagctacatgttttccctaagactgtagctgctcatgaagacattcattcaaycaaggtgtatggaaacttcactgtatgtgaggatacagcagaaaccaaacccaaagaaaacaaaacaactctgaattatacagcttagggctaaaagatacccaaagtgggtacctctaagatgtgagaattaaacaggtgatccagtcaaatcctttagtttctcacatggaaagtgctaaattagccagaagtggtggctcgcacttgcaatcccatcta

SEQ ID NO: 324436 - DNA, 563 bp, Homo sapiens
aaacaactctgaattatacagcttagggctaaaagatacccaaagtgggtacctctaagatgtgagaattaaacaggtgatccagtcaaatcctttagttwctcacatggaaagtgctaaattagccagaagtggtggctcgcacttgcaatcccatctactcatacttgagctgaggaatttgagaccaatatgggcaacacgccaagactctatcttggaaaaaaaaaagaattttaattagctgggtgtggtgacctgtgcctgtagtctcagctactcaggaggctgaggtgagagtatcacttgcacccaggagttcaagcggcagtgagctgtgactgctccactgcactccagtctgaaagacagagcaagacaccatctctaaaaacagagtgctcaattaacagtggtgaggagcaggaggataaattgttactgttattattgctattgttttaaaaagtattaatctggtcatcatgctacagtttctataaaaggggttttggaaatttgaagttctgtctgtgcaaaacataagatatattaattaccca

SEQ ID NO: 324437 - DNA, 563 bp, Homo sapiens
aaacaactctgaattatacagcttagggctaaaagatacccaaagtgggtacctctaagatgtgagaattaaacaggtgatccagtcaaatcctttagtttctcacatggaaagtgctaaattagccagaagtggtggctcgcacttgcaatcccatctactcatacttgagctgaggaatttgagaccaatatgggcaacacgccaagacyctatcttggaaaaaaaaaagaattttaattagctgggtgtggtgacctgtgcctgtagtctcagctactcaggaggctgaggtgagagtatcacttgcacccaggagttcaagcggcagtgagctgtgactgctccactgcactccagtctgaaagacagagcaagacaccatctctaaaaacagagtgctcaattaacagtggtgaggagcaggaggataaattgttactgttattattgctattgttttaaaaagtattaatctggtcatcatgctacagtttctataaaaggggttttggaaatttgaagttctgtctgtgcaaaacataagatatattaattaccca

SEQ ID NO: 324438 - DNA, 563 bp, Homo sapiens
aaacaactctgaattatacagcttagggctaaaagatacccaaagtgggtacctctaagatgtgagaattaaacaggtgatccagtcaaatcctttagtttctcacatggaaagtgctaaattagccagaagtggtggctcgcacttgcaatcccatctactcatacttgagctgaggaatttgagaccaatatgggcaacacgccaagactctatcttggaaaaaaaaaagaattttaattagctgggtgtggtgacctgtgcctgtagtctcagctactcaggaggctgaggtgagagkatcacttgcacccaggagttcaagcggcagtgagctgtgactgctccactgcactccagtctgaaagacagagcaagacaccatctctaaaaacagagtgctcaattaacagtggtgaggagcaggaggataaattgttactgttattattgctattgttttaaaaagtattaatctggtcatcatgctacagtttctataaaaggggttttggaaatttgaagttctgtctgtgcaaaacataagatatattaattaccca

SEQ ID NO: 324439 - DNA, 563 bp, Homo sapiens
aaacaactctgaattatacagcttagggctaaaagatacccaaagtgggtacctctaagatgtgagaattaaacaggtgatccagtcaaatcctttagtttctcacatggaaagtgctaaattagccagaagtggtggctcgcacttgcaatcccatctactcatacttgagctgaggaatttgagaccaatatgggcaacacgccaagactctatcttggaaaaaaaaaagaattttaattagctgggtgtggtgacctgtgcctgtagtctcagctactcaggaggctgaggtgagagtatcacttgcacccaggagttcaagcggcagtgagctgtgaytgctccactgcactccagtctgaaagacagagcaagacaccatctctaaaaacagagtgctcaattaacagtggtgaggagcaggaggataaattgttactgttattattgctattgttttaaaaagtattaatctggtcatcatgctacagtttctataaaaggggttttggaaatttgaagttctgtctgtgcaaaacataagatatattaattaccca

SEQ ID NO: 324440 - DNA, 588 bp, Homo sapiens
ataaaataactcagccgggcacggtggctcacacctgcaatcccagcactttgggaggctgaggcaggaggaccatgaggtcaagagatcgagaccatcctggccaacatggtgaaaccccgtctctactaaaaatacagaaaactagctagcatggtggcgggcacctgtagtcccagctactcgggaggctgaggcaggagaattgcttgaacctgggaggcagaggttgcagtgagctgagatcatgtcactgcactccaacctggtgacagagcaagactttstctcaaaataataataataatgataataataataataataaaataactccccatagcaccaaaagagtaaatgtagggtggctatcttgaaaaacaaaacaaaagctccaattctgcagggacataagtatttttgtgtggattctcttcagtaggaaagtaaaagtacaaacagaaaataaaaagagagaggtcgctttgcctcgtctgcttctagggtctcatgtgtaatgtttattagatacctgagtttataaaggcctgaaatctttgaacataatacagtcctataatccgacgt

SEQ ID NO: 324441 - DNA, 588 bp, Homo sapiens
ataaaataactcagccgggcacggtggctcacacctgcaatcccagcactttgggaggctgaggcaggaggaccatgaggtcaagagatcgagaccatcctggccaacatggtgaaaccccgtctctactaaaaatacagaaaactagctagcatggtggcgggcacctgtagtcccagctactcgggaggctgaggcaggagaattgcttgaacctgggaggcagaggttgcagtgagctgagatcatgtcactgcactccaacctggtgacagagcaagactttgtctcaaaataataataataatgataataataataataataaaataactccccatagcaccaaaagagtaaatgtagggtggctatcttgaaaaacaaaacaaaagctccaattctgcagggacataagtatttttgtgtggattctcttcagtaggaaagtaaaagtacaaacagaaaataaaaagagagaggtcgctttgcctcgtctgcttctagggtctcatrtgtaatgtttattagatacctgagtttataaaggcctgaaatctttgaacataatacagtcctataatccgacgt

SEQ ID NO: 324442 - DNA, 565 bp, Homo sapiens
aagacaaaaatagaggcacactcctcctatttgaaagtatatttgttcatgtcaggagaatgaagactgcatgaattattcattagaataacagtttattggcaaaattgttgtatttggatggtgtacattatggagtgaataaataatgtgttatggatatttttagggactgaagagtaaatctaggaagaaaatttgtaacaggaaggaaaggaagttatggctagaagtggtggaggcttctcagtgaaatatgcagaagacataaaaattgcttccactgagatgtaaaccaagaataccagaaaaacccttctaacttctttcttctgtgtgtggccatttttctgcaacttaattgaaggttttctgtaccagtatgagccaaatgatgcttataattaggtttcctatagccacctctttgagctcgccaatgaggttcacgaattcacatgcaatgagaattggtggacaatgtggctgttgaggtttgaggtacactctttcccatttcctacctggctstgcaccctagcacatatcagacaaggtttcactt

SEQ ID NO: 324443 - DNA, 574 bp, Homo sapiens
taattaaagccaagtaaatttagtatttcacaattgcttattgtggaataatatttctttctacccaaatcagaaaatgttattagtcagaaaaaaaaaatctttaagaaaaaaaaagaaaatgttattaaaatgaattattgggaatggaatggaacataatagaaatgtgaataactagaccgctagtcataaaaaaatttcaaatacttcttgtttgctcaaaagagccttttaaacaagaggagatgaaccacaaatggtgtctaataggctcttaaataagccaaaatctcagaataatgtgaacaaccttctatccaaagcagtcctgagaattaattgatgcttgatttgggaagggaaaaayactttttcctctccccagcctctgtctgaacactgatgagcaaaacttcctgctcagtgccttatactccagaagattcagattccataagtctataatacggctcaagtttctttgtttttgccaactctgaggtggttctgatgcccagaaaaggctaagaagccaagctccagatctactccatagtctagaagaacaatc

SEQ ID NO: 324444 - DNA, 596 bp, Homo sapiens
gcattatctgtttaccctatttgagtcaacagcgctttctgtatgatttggctgtgatacgaatctctgagtcaccattctctccaaacattgcttcattcttaagatggtgactaaaattccagctcctctgctgtgtcacctcgggcaagttacctaacctctctctacgtgcattttctcatctgtaaaaccatgaaaatagaggctaactcaytgaaatattgagtatttaattagctaatgtacatcaagctaaaaagttaaaacaatatctggcaaatcacagatgctcaataaaaatcagccaaaacatgtagtgagcctgtgcacatacatttgcagatgaactacaaccttccccttttggagtttctactccaggaccaggtagggactgttgcataatgttatgtgttcgagtttaccaccattattcctttgagttaagttgctgttgtcacgtatcaggcttctaaccaaggagcttgcccctaatctgaggttcccttctaagtttccttttgtattagtccgttttcaggctgctgataaagacatacctgagactgggtaatgtataaagaaaaggaggt

SEQ ID NO: 324445 - DNA, 596 bp, Homo sapiens
gcattatctgtttaccctatttgagtcaacagcgctttctgtatgatttggctgtgatacgaatctctgagtcaccattctctccaaacattgcttcattcttaagatggtgactaaaattccagctcctctgctgtgtcacctcgggcaagttacctaacctctctctacgtgcattttctcatctgtaaaaccatgaaaatagaggctaactcactgaaatattgagtatttaattagctaatgtacatcaagctaaaaagttaaaacaatatctggcaaatcacagatgctcaataaaaatcagccaaaacatgtagtgagcctgtgcacatacatttgcagatgaactacaaccttccccttttggagtttctactccaggaccaggtagggactgttgcrtaatgttatgtgttcgagtttaccaccattattcctttgagttaagttgctgttgtcacgtatcaggcttctaaccaaggagcttgcccctaatctgaggttcccttctaagtttccttttgtattagtccgttttcaggctgctgataaagacatacctgagactgggtaatgtataaagaaaaggaggt

SEQ ID NO: 324446 - DNA, 553 bp, Homo sapiens
aatatgtatattttatccaccactgccatggtgggaataacaatgtrtttcacactataaacacactagtgggaagatttacttttattatatactttattaggaagatgtgtagggtactgaggagtaaaaagagataaactgctgggcatttacatgaaagaagtggtttttttgatggggtttgaaaaccctatggtggtaaatttattgaagagtatgtggattttaggtaatataagaaaatatggaattattggctcattccaatgcactttaattccaggatgcagaattctaaaaatgaaaggtcatttataacttatctaattgggatgtttcattttacagatgagaacgttaaagcaaatcaatatttttttctaaattgcccaatatcatgtgaattgtgacaaaactggaagcaaaaatcagcctctctgtgaatgtaggattcttcctactatactacacagcttccagggcaggcacagaccccgtgcccacatctcctctctggaaattgttctacctgaggatatatcctctctta

SEQ ID NO: 324447 - DNA, 506 bp, Homo sapiens
taagtagtgagcaaaatttttgcttaggtcctcctgatagaggcaggaggcagagaaattctaggcagacggggygggtccccggtgaaaacccaccttcatgccaaagtggcctgagacctgcagcccaaagtgagaacttccattcctctttgcccactctctcccaattggctctttctgagtaatgtctttttaccagtcaaacatggccttttccaaaactacctatggcctgcccccactcccatcctgtgcttataaagaccccagactcagtcagtagagaagagaggcagcttgacttcactgaggtggcttgacttcagggaatagctggctggacttcgtgaaagagccagccggactttgggggaaagactacctgcttgtcccatcccctgtccagctcccctgtccactgagaacaatttccatcacttaataaaattctccgccttcaccatccttcaaggctaacctcattcttcttgtccagcatccaa

SEQ ID NO: 324448 - DNA, 617 bp, Homo sapiens
aatactacttcaaacgtcattaggagcatcatcatatatgctgtcatttcaactgcttcccattctccatactctaatttcatgtatagaagcctgtcgtctatgactgactccactacttctctagcctctgaaatatatttgatgttctttctctcttgtctcacaaaaccaatgaattagcaaatagctcctttgtggtttctctttcattcttccctacatgttccatctctcccctagcactggaatatgggcttaacacctcacactagctgtattacactaatatcctggttgatctctctgaatcaaacctgtgctttgtacctcccatcattcttgttcctccaattttaatgctgtcattactctgcttgaaaatgacctctttacctacatactatttcaaattcattaactgcctccagctccttctatgttatggcataaatatacctgtcaagtcttttttgccaatagttaactttgarcattttggcatctatacctggtgaacctccagtcctctgaacataatgtatgcattctcaattcaaggtattttttcaggataccttccacaccgcattaactgtagcaggacgagaacaaaa

SEQ ID NO: 324449 - DNA, 576 bp, Homo sapiens
aatgttttctttcctaaaaggaaatttataaggactataaatcactactgagagtagtgatatataagagctaatggagttagaagtattgcctagctgaggcaatcattgatttggagatcaatgtagtatttggatccagaaggtaagtggaaatgtcagttgataagccatataaaggagttcaagtaaaagctagaaaaatattggagagttgaggacaaagttaattttcagaaatagacagattaaggcaagacagaaggtaagtggaaatctcagttgataagccatataaaggagttcaagtaaaagctagaaaaatattggaaagtygaggacaaagttaattttcagagatagacagattaaggcaagatttcactaaggcaagcacccaaaatttcagttagaaaggagacataagttcaagaaatctattgcacaacacgatgactgctgttaataaaaatgtattgaaaattgctaagagagtagatattgtgttctcacgaaaaagtatgtgaggtaatgtatatgttaattagcttagtcattgcacattgtatacatatc

SEQ ID NO: 324450 - DNA, 576 bp, Homo sapiens
aatgttttctttcctaaaaggaaatttataaggactataaatcactactgagagtagtgatatataagagctaatggagttagaagtattgcctagctgaggcaatcattgatttggagatcaatgtagtatttggatccagaaggtaagtggaaatgtcagttgataagccatataaaggagttcaagtaaaagctagaaaaatattggagagttgaggacaaagttaattttcagaaatagacagattaaggcaagacagaaggtaagtggaaatctcagttgataagccatataaaggagttcaagtaaaagctagaaaaatattggaaagtcgaggacaaagttaattttcagagatagacagattaaggcaagatttcactaaggcaagcacccaaaatttcagttagaaaggagacataagttcaagaaatctattgcacaacacgatgactgctgttaataaaaatgtattgaaaattgctaagagagtagatattgtgttctcaygaaaaagtatgtgaggtaatgtatatgttaattagcttagtcattgcacattgtatacatatc

SEQ ID NO: 324451 - DNA, 564 bp, Homo sapiens
ttatcctcttacagttcaggaagccagaagtctggaactaagatgccagcatgtctgtttcttctgaagtctctaagggaaaatctgttccacgctgctcctctccttcgatttggtggtcaacaatccttggtgttccttggttgcacagtcatcactccaatttctacatccatcttcacataactgtcttccctgtgtgtatgactctgtcttcaaatctctctctctctctctgcttatgtgacgacattagccattggatttaggatccaccccagtctagtttaacctcatcttaaattgattacattgcmaggccttgtttctaagtaaggtcacattcacaggtatcaaggatgagaacatcaacatatctttttggggaaaacaaaccagtccactacagtgactacgtatattttgtaaaaaatgcttaagagaaacaaaataccataaatgacacaggctataaacatagcctgtaaatttatgaaagatgtaaaagctgaatctgtaagaaagtgggtaagaaaaagaggaaataccaattaacttgtaaag

SEQ ID NO: 324452 - DNA, 626 bp, Homo sapiens
tgattcgttgttacactgcaatagctgcagaatatacagtggtttgtggtggctgttcttacttatctttcataactttccttaccctttttcatccygctctgtgccccaggagactcgcatttatacattgcatcaacattcttgtccccatgttgtatttggtttggcttagaacagaagccagcaatagatttgagagagtcagatcaaaataaggttgggatggctgccttgctgtactaaagaacagagatcctatcaggtgatttttttttaatagttgtagcattctattggttccagttaacactccttctacttgccccttcaggccaagaagtgtaaaagttctgttgtatgatctgtgtggctattacctaaccttgttcacaatttctaaatagccctctcataaagcgttttctcacttatcccaattcaggagtaccatctctttcctgctaggaacctgaatgatacacagaaatgcacccaccagttagtgatgaaataagagcaactcttccattccgttttaagctttggttagtaggttctgctgtccctactttggaagcattcttacacaatagaagtcaaaacacatctaacttctgtaagac

SEQ ID NO: 324453 - DNA, 447 bp, Homo sapiens
tgtctaggtggtctctccattattgaaagtggggtgttcaattaccttactattttttttttagtttttaatttttgtgggtaagtagtaagtatacatatttatggaatatatgagatattttgatacaggcatgcaatgtgtaataatcacgccagggtaaatggagtaaccatcgcctccaacatttattctttgtattacaaacaatccarttatactcctttagttatttttaaacataaaattaaattatttcttagtttagtcaccctgctgtgctagcaaatactagttctcattccttattttaaactattttttgaacccataaaccatctccacttcttttccagtccactatgcttcccagcccctggtagccatccttctactctctatctctatgagttcagttgtattcatttttagctcccacaaataagt

SEQ ID NO: 324454 - DNA, 646 bp, Homo sapiens
aatgaagtctgctgaaattcacttacttgagtcagaatcaagatttgaagccaggaaaactggctccagaatccatgcttttaatcatcattaatgattaatcactgtactatatcaactttaaataaaggacccttcctgttcccctaccttacttctgcttgtactttagagtgtagttaaaatttcatatttccaaataaaatctctaattcttcaacctgggtcaaaacatctcatccaaarataatttgaagagaccaactgccaccatattttaatattgaggttacatattaattattcttcacttgacaataacttaagacaaaattcaatttgttctccatatattgtcagcataacgttatgtgtctggtaaatggcagttaatacatatttactatagataaaagttgaatgataatgatcatgcagaaacagagaaaaatataaaaactatccatccaatactgcagtggttagtatgggttttaggtttaaataaatctaggctccagttctgcttctctcactttctaaatgggatcttggacaagttacttatgctctctctctatgctactgtattctcatatataaagtggaaataagagtcctcaaagttttcttgggaatagaaaat

SEQ ID NO: 324455 - DNA, 646 bp, Homo sapiens
aatgaagtctgctgaaattcacttacttgagtcagaatcaagatttgaagccaggaaaactggctccagaatccatgcttttaatcatcattaatgattaatcactgtactatatcaactttaaataaaggacccttcctgttcccctaccttacttctgcttgtactttagagtgtagttaaaatttcatatttccaaataaaatctctaattcttcaacctgggtcaaaacatctcatccaaagataatttgaagagaccaactgccaccatattttaatattgagrttacatattaattattcttcacttgacaataacttaagacaaaattcaatttgttctccatatattgtcagcataacgttatgtgtctggtaaatggcagttaatacatatttactatagataaaagttgaatgataatgatcatgcagaaacagagaaaaatataaaaactatccatccaatactgcagtggttagtatgggttttaggtttaaataaatctaggctccagttctgcttctctcactttctaaatgggatcttggacaagttacttatgctctctctctatgctactgtattctcatatataaagtggaaataagagtcctcaaagttttcttgggaatagaaaat

SEQ ID NO: 324456 - DNA, 646 bp, Homo sapiens
aatgaagtctgctgaaattcacttacttgagtcagaatcaagatttgaagccaggaaaactggctccagaatccatgcttttaatcatcattaatgattaatcactgtactatatcaactttaaataaaggacccttcctgttcccctaccttacttctgcttgtactttagagtgtagttaaaatttcatatttccaaataaaatctctaattcttcaacctgggtcaaaacatctcatccaaagataatttgaagagaccaactgccaccatattttaatattgaggttacatattaattattcttcacttgacaataacttaagacaaaattcaatttgttctccatatattgtcagcataacgttatgtgtctggtaaatggcagttaatacatatttaytatagataaaagttgaatgataatgatcatgcagaaacagagaaaaatataaaaactatccatccaatactgcagtggttagtatgggttttaggtttaaataaatctaggctccagttctgcttctctcactttctaaatgggatcttggacaagttacttatgctctctctctatgctactgtattctcatatataaagtggaaataagagtcctcaaagttttcttgggaatagaaaat

SEQ ID NO: 324457 - DNA, 431 bp, Homo sapiens
ctgggggaagctaagaataagtcaattatgggtgataacaatgaaaagttccaggttcattccaccagggccacataggaaggaagagacaacaagaaaaggatactatctatccttattacttaccttgaaccatctcggagtctttgtggaaacaatttcttgttagaaaaacttgctttaggttgaggtaatgtatttcacataatttccatttctcagtttaatttataccttccacattcacaattaatttttgtattgcttcttttacatgatagctcatagtcttatgttctataggtttttttattgccattttcttgtgggatmataggtgatttctattttgcctattgtatcatacaatatattacataccaggttaccaatgtatttataattaaaattaatgagcaagattcaattaa

SEQ ID NO: 324458 - DNA, 628 bp, Homo sapiens
tagaaagacaaacagagtgtttcatactgaaagagaataaagaaaaatgacaagtggatgcagtatctgcttctaatacagatccttttgatataaaaatgtattactgggaaatttgaggcaacttgaatagagtccaaggtttagatgataatgtaataacattggtctcctgattttcayggttgtattaaggattatgtaagagaatatattctgctaaaaaataatcattgaaattttgggggatggtgatgcagtgaattattataattttattttgcctcagcatccattttgaatataagtttaacttttataccagaagcagagctcagccacccttgccactgtatccagttctacagctcctcccaattcctcagtgtgattaatccagatatctgcctgtaattggaacaacacagtaaaggttgctgcctgggcattagaagtagaacgttatacccaaatgactcaagctggtgtccagactcaagaatttaggggcatctaccccacctagcattggatcaatagtgcagtaaaattcaacaactgtaaatataaatgtctctagtaactgaacataaaatgtgtgaagcaaaacctgacaggtgaaaagagg

SEQ ID NO: 324459 - DNA, 628 bp, Homo sapiens
tagaaagacaaacagagtgtttcatactgaaagagaataaagaaaaatgacaagtggatgcagtatctgcttctaatacagatccttttgatataaaaatgtattactgggaaatttgaggcaacttgaatagagtccaaggtttagatgataatgtaataacattggtctcctgattttcacggttrtattaaggattatgtaagagaatatattctgctaaaaaataatcattgaaattttgggggatggtgatgcagtgaattattataattttattttgcctcagcatccattttgaatataagtttaacttttataccagaagcagagctcagccacccttgccactgtatccagttctacagctcctcccaattcctcagtgtgattaatccagatatctgcctgtaattggaacaacacagtaaaggttgctgcctgggcattagaagtagaacgttatacccaaatgactcaagctggtgtccagactcaagaatttaggggcatctaccccacctagcattggatcaatagtgcagtaaaattcaacaactgtaaatataaatgtctctagtaactgaacataaaatgtgtgaagcaaaacctgacaggtgaaaagagg

SEQ ID NO: 324460 - DNA, 454 bp, Homo sapiens
agcgattctggtgtgagggctctggagtgggctatggctgctgtatagttaggttattggtgattttggtggtcaaacaggttcataaccatggtccacttcaatgctctcaacatatcccgtacatatgaatcacctgacratcgtctttaaatgcatattctgattcagcaggcacagagtggggtttacatctaaaacttatgacaaactcccagtggctgttgctgctgctggtccagttaccacattgtccacagcaaaaatctagaccaatggttctcagccttggatgggtttcagaatcactggcaatgtttaaaaataattgatacccaggccatactttagattaattcatcagaatctgtaggcataaactcatatatctgcattttatcaatgtctccaggaaattctgattgcatataacatttagagctagtggtctaga

SEQ ID NO: 324461 - DNA, 454 bp, Homo sapiens
agcgattctggtgtgagggctctggagtgggctatggctgctgtatagttaggttattggtgattttggtggtcaaacaggttcataaccatggtccacttcaatgctctcaacatatcccgtacatatgaatcacctgacaatcgtctttaaatgcatattctgattcagcaggcacagagtggggtttacatctaaaacttaygacaaactcccagtggctgttgctgctgctggtccagttaccacattgtccacagcaaaaatctagaccaatggttctcagccttggatgggtttcagaatcactggcaatgtttaaaaataattgatacccaggccatactttagattaattcatcagaatctgtaggcataaactcatatatctgcattttatcaatgtctccaggaaattctgattgcatataacatttagagctagtggtctaga

SEQ ID NO: 324462 - DNA, 597 bp, Homo sapiens
caggacggatcttgccacctccatcttagccagagggttttcctgagctcaggagccaagcttctcagacccattcttgcacactgcaaatttctaatccattgctaagggccactaatcccaaactgaatttagagaaacaaacaggaatagatgctttttaaaatacttaccaacattcatatttcttctctgattttgaaaaacataattaataataaaacacttgggatcatgcagcaaagatactttatgggaatatttattatgcaaataactaaattaattgcatacatttgcatcctattaagcattgaaaagtaaagcagctttaatagaattaaatctacttttaccaaaatgatctcatctggcaggaagagttagggcaagattggtttggattgagattttccatcctgcttaggaattctaaagttctatagaatgaaagtttttcttgayaataatttttaaatcataaaaatgaaagaaatgttattagaagtcctacgatttcaccaccaacttcaatgccctaatgtggctatccatactgcttttccaatatcttccaaacgtcgattatggatttat

SEQ ID NO: 324463 - DNA, 644 bp, Homo sapiens
ttgtggatagagacagaacacacgtgttttgaattggagtttgatgtcctttatttaaaagtatcttgtagatttcaaagttaatctcaagcataaacaactacaggrgtgcatgaaatgtataaaacaataaattttatatactggacagaaagcaatgggtgactaatcctcaagacaagaaaacataggaagtgagcactacatgtactctggctttatatctggaggtaattttaggaccacagcagaagacgaagccaaacagagcccagaagaatcactgtgctgaggagacagagatcagagttttgagggaccagagtaactagaatttgcagagcagtgtacgaaagaagccatgccaagaaatctgtatagcttcccctgtagtatttggatattccaatctgcatacccatagggagaaacatcaagagtctaaacaaaaaataacttctgaagaaggaaaatacattagctataaaacacccacagcttacagaggactgagaaaggttcaagtgccaattagccaccgtgaagagacgacattgaacaaaggtgatattcagcagagtaaggcctccctgaaatgcattctagacattttaaaagacaggtatacagacatgcatcagttt

SEQ ID NO: 324464 - DNA, 644 bp, Homo sapiens
ttgtggatagagacagaacacacgtgttttgaattggagtttgatgtcctttatttaaaagtatcttgtagatttcaaagttaatctcaagcataaacaactacagggstgcatgaaatgtataaaacaataaattttatatactggacagaaagcaatgggtgactaatcctcaagacaagaaaacataggaagtgagcactacatgtactctggctttatatctggaggtaattttaggaccacagcagaagacgaagccaaacagagcccagaagaatcactgtgctgaggagacagagatcagagttttgagggaccagagtaactagaatttgcagagcagtgtacgaaagaagccatgccaagaaatctgtatagcttcccctgtagtatttggatattccaatctgcatacccatagggagaaacatcaagagtctaaacaaaaaataacttctgaagaaggaaaatacattagctataaaacacccacagcttacagaggactgagaaaggttcaagtgccaattagccaccgtgaagagacgacattgaacaaaggtgatattcagcagagtaaggcctccctgaaatgcattctagacattttaaaagacaggtatacagacatgcatcagttt

SEQ ID NO: 324465 - DNA, 578 bp, Homo sapiens
acagtaacatcctaggccttcacattcactcacacaagctcattggcttgtgacccagagcaacttcctgttctgcacactctatttatactaagtgtcctgtacaggtgtactatttttctattctatactgtatttttactgtaccttttctacatttaggtatgtttagacacacaaatacttaccattgtgctacaattgcctacagcattcagtacagtaacatacactgcaggtttgtagcctaggccatagcgacaccatctagcctagrtgtataataggccacaccatctagcctaggtgtataataggccatgccatctaggtttgtgatgttcccagaatgacaaaatcacctaacaacacgtttctcagaacatattcccatggttaagtgaatcatgactgtacatataatggaatattattcaacctttaaaaagaaggacattttgacatgtgggaaaacatgaataaacctggaggacattatgctaagtgaaacaagccagtcacaggacaggcactgcacaatcccacttatgcgaggtatctgaaacactcaaactcat

SEQ ID NO: 324466 - DNA, 578 bp, Homo sapiens
acagtaacatcctaggccttcacattcactcacacaagctcattggcttgtgacccagagcaacttcctgttctgcacactctatttatactaagtgtcctgtacaggtgtactatttttctattctatactgtatttttactgtaccttttctacatttaggtatgtttagacacacaaatacttaccattgtgctacaattgcctacagcattcagtacagtaacatacactgcaggtttgtagcctaggccatagcgacaccatctagcctagatgtataataggccacaccatctagcctaggtgtataataggccatgccatctaggtttgtgatgttcccagaatgacaaaatcacctaacaacacgtttctcagaacatattcccatggttaagtgaatcatgactgtacatataatggaatattattcaacctttaaaaagaaggacattttgacatgtgggaaaacatgaataaacctggaggacattatgctaagtgaaacaagccagtcacaggacaggcactgcacratcccacttatgcgaggtatctgaaacactcaaactcat

SEQ ID NO: 324467 - DNA, 465 bp, Homo sapiens
gctctccccccagtagctgccaatcacatgccatccccgaggagccactaatccccgtgacargcttatggtctagttgaaccagctgcccctctggccatgtgcatgatttctccctgtgacagaggcctctaatcattctctcttcctctgccggggtgtcagccacaaatctgggcagagtcattaaagtgtccacctgtccgagctcattgttaggaggattcatcagtggccaggcctcactgctgcctccacctggagagggggctgatcctgcagcccctttaccctttaccctcggaaagcttggggactgagcaggccagggccctgtctgggctctgaaagctggagggaaggagagagtgggagaggagcaagaagagaaggcacctgcccagcaggcatccttgagtccctcctttttctgcagcctcccctgctgggatttagtttgaagct

SEQ ID NO: 324468 - DNA, 465 bp, Homo sapiens
gctctccccccagtagctgccaatcacatgccatccccgaggagccactaatccccgtgacaagcttatggtctagttgaaccagctgcccctctggccatgtgcatgatttctccctgtgacagaggcctctaatcattctctcttcctctgccggggtgtcagccacaaatctgggcagagtcattaaagtgtccacctgtccgagctcattgttaggaggattcatcagtggccaggcctcactgckgcctccacctggagagggggctgatcctgcagcccctttaccctttaccctcggaaagcttggggactgagcaggccagggccctgtctgggctctgaaagctggagggaaggagagagtgggagaggagcaagaagagaaggcacctgcccagcaggcatccttgagtccctcctttttctgcagcctcccctgctgggatttagtttgaagct

SEQ ID NO: 324469 - DNA, 644 bp, Homo sapiens
ttgtggatagagacagaacacacgtgttttgaattggagtttgatgtcctttatttaaaagtatcttgtagatttcaaagttaatctcaagcataaacaactacaggggtgcatgaaatgtataaaacaataaattttatatactggacagaaagcaatgggtgactaatcctcaagacaagaaaacataggaagtgagcactacatgtactctggctttatatctggaggtaattttaggaccacagcagaagacgaagccaaacagagcccagaagaatcactgtgctgaggagacagagatcagagttttgagggaccagagtaactagaatttgcagagcagtgtacgaaagaagccatgccaagaaatctgtatagcttcccctgtagtatttggatattccaatctgcatacccatagggagaaacatcaagagtctaaacaaaaaataacttctgaagaaggaaaatacattagctataaaacacccacagcttacagaggactgagaaaggttcaagtgccaattagycaccgtgaagagacgacattgaacaaaggtgatattcagcagagtaaggcctccctgaaatgcattctagacattttaaaagacaggtatacagacatgcatcagttt

SEQ ID NO: 324470 - DNA, 527 bp, Homo sapiens
caggaggtcactagctctgctcttcacaacccttaaccttttgaaatgacagatacaaaattacttgctggatttgaatttattcctttgccttcaacactggagttttcctgatgagatgagggttgacacaagttttccagacttctaatctctgaacactctgaaaaaataaaacctctctgactctttggagaataggtcctagtaagtttcaaagggctacatccctgtcaataccttcatcyacaaatgtgaactgtattcaaagcaggtggaaaaaagttctcaatccttcaggttataaacctttatgtggggcaaatattgtgactccgtgttatttttacagaatatagtgacaaaagcaaaacagcaggttcacaaagttagcatctcccttcctatgtggcaagtctggcttccatcctgtaggacattgacatggcttggatgtcccaccccaatctcatgttgaacagtgtttccaggtgctggaggttgggcctggtgggaggtgtgtgtat

SEQ ID NO: 324471 - DNA, 397 bp, Homo sapiens
accccccatgattcaattatctcccaccaggtccctcccacaacgtgtgggaattacgggaggtacaatttaagatgagatttgggtggggacacagccaaaccatatcarcatcacttccaaagtcctgcctcagtcccgtctcatgaggagttctggggcaccaagtgcatcacaaatcctgccccatattgggacagagattggaagtttatactttggcacgagtggccagtggcctcggacagccccagtggtgtctcctggcaggcagccttcatctgcaaggagcagccctccagagaaaaatgcagatgtagcagacagcatctgagacatgggccagctcagtaaagtggctctggagagggggcagcaagggcctctgacatggtta

SEQ ID NO: 324472 - DNA, 652 bp, Homo sapiens
gagtcctaggacaggacaccagcttctccaggtgctgattactgatttgtacatatttatactgcctgatattgctatagaggaaaagtgaatggtttgaatccccaaaggggctttggaaaagtaatatatcataatggaccacaatgttccagggaccctgttagtcattttaacctaagtcatttcattatgacatatgttaatcagtagaaataattatttctgaagccagtttttagataaagaaacagagggtcatgaaggcagaaacaagactgcaatacggttgtctggttcccactcctggatggcaaaggcgatgttaggcaatgacatcatcattaccaccaatgtcacrgcagtcgctcactgctgagcatcatttctgtgctttcctgccaggcaatcatgggcgcttttgtggaccatgcttcctccctgacccaccccacaggcctcatcagctccttggaggcatccaacgacatgcacacgtggtgcagtctgacagaagagcctttctacttttctacactgactagggcaaggtggccaagtggccaccatcacagtgccaaccataacaagagaaatgcaattagaaaaactcgaagagcattgaaaatatgttgttgaccagtgcccaaaa

SEQ ID NO: 324473 - DNA, 652 bp, Homo sapiens
gagtcctaggacaggacaccagcttctccaggtgctgattactgatttgtacatatttatactgcctgatattgctatagaggaaaagtgaatggtttgaatccccaaaggggctttggaaaagtaatatatcataatggaccacaatgttccagggaccctgttagtcattttaacctaagtcatttcattatgacatatgttaatcagtagaaataattatttctgaagccagtttttagataaagaaacagagggtcatgaaggcagaaacaagactgcaatacggttgtctggttcccactcctggatggcaaaggcgatgttaggcaatgacatcatcattaccaccaatgtcacagcagtcgctcactgctgagcatcatttctgtgctttcctgccaggcaatcatgggcgcttttgtggaccatgcttcctccctgacccaccccacaggcctcatcagctccttggaggcatccaacgacatgcacrcgtggtgcagtctgacagaagagcctttctacttttctacactgactagggcaaggtggccaagtggccaccatcacagtgccaaccataacaagagaaatgcaattagaaaaactcgaagagcattgaaaatatgttgttgaccagtgcccaaaa

SEQ ID NO: 324474 - DNA, 613 bp, Homo sapiens
agtataaatattatgttgtgtttgtaaaaaaaaaaaagatagttccagattttcactaactctatgtggtggttttccaaaaaccaactaaaacagttgggcaattttcaagtaaattctaaaaccctttgtaagtgtgttttacatatgatttctcagcacagtcacagtctattaattggcattgattctaagaattacacagaattctgtccattctcttatgccaaacaactttctgggtttttttgttgttgttgtttgcttgtttggttgttttaaggtctgtaagcaaagagacagaggcatcactaaggttttttttttcctgacatttctaccttgtaatatgaagaacctcacttgatcagaagatttaattaagttgctcttaatggagaaattccttttggttcagcagaacacctattttatgacacaagatatggycaaatccaccacgatagaagattcaggtctctgcgctgggagtatttagggtctcgctctggtaggagagaggaacgggcagcccatttccattggaatgtgacaagggctgcactagagggctctctcagcacaggcaaagggaagcagccattgcagagag

SEQ ID NO: 324475 - DNA, 564 bp, Homo sapiens
gtcttccatgaaaccggtccctagtgccaaaacggttggggactgctgccttaggtgactaaacacatttaatccttaaaacagcctatggagaaaacattgtctcctggtaagagttgcaaaacctacagcacagagaggtagaatacttgccctcactcatcttgctagtaagacagggctaggtttcaaacccagctgggccaacaccagatcctggctctcagcatggtcctgcctgcatgggtgtttgcaaaacaacatgcagatctgcggcatgaagggagcctgtgccatggtgagtgccaagactggagggaaagtgggtatcggggagaccttgtccagggggcatgtgcactgtgcctgtgagcttagactttgccctcaaggagatcagggtggggcattgagggatttgaagcaccagggtaacayggtcaaatttgcatttcagtgagatccagttggatatcatacagagggcaggctcatgtggacaagtctagacacaagaagaccaaccagtgggctgatgcagagccctgcctgccaggagaaggt

SEQ ID NO: 324476 - DNA, 574 bp, Homo sapiens
gaggcaccaagcaggaggtgctccctcttcctgaaaaaggctttcccggtctacccacatcagaaaagacctcaactggctaatccaaaccctccatgctgatttttagggctattttctctggcttcttttctagcaaatggaacacagccagtctcctgcacagacagttgctgattttgtgtagtgtaagagacagttattataagcatctgtcaaactccactccaaacagaattcaggctgagtccatccatccaaatrcaggaaatgaggcctcttcccatttcctgagccactgcacaggctgcccttgtcaccttctgagacaattactggccaatgttctgaattgagtcaattccccatgatgagcagagaagcaggaaggaccgtggatgccagcccacacgctggagagatggggaagtgagatgccatttgaacccctgcctgggggccaacacaacacaagccccacccagaaaggaagtactcttggcctcctgagagactcagcttaaccccagttgtttctccttttcaagataaacctgctccgggaggcacgtcc

SEQ ID NO: 324477 - DNA, 411 bp, Homo sapiens
aacacgcacatactgtatccttataaaggaagtcattatgcaaagcacacattaaggagtagaataatcttttcaagaagtttagatagtaagtaaaattgtyttgcatattttccccacatatttaccagtgtagatctacattttcattttacattatttttttacagactagaggatcttgttaacgtttcttgtaaaacaggatctgactgtgataagttatttaagtttttgtacttcattaacaacttttactttattttaattcagtatggaagtctaggttttttttttctttcactatcttaaagatattgtttcactattttctagcttgcattgtttctgataaaagctctgctgttgaaattaccttcatttattgtacctaatgcacctttttttctt

SEQ ID NO: 324478 - DNA, 572 bp, Homo sapiens
attttttattactggtcaagtagaatggagaatttattgtgttcattgatttaaaaccttgttcactgtctcctaaatctttaaggggaattcaaagaaaaatcaatctcaaaaccagtctgggagagattaaataatacaagtatgacaatctatttaataaatatgatctaaataacaataaacaatttggtaagagcttgctttctgtgaccaacggataaaaatattattttctccattaattaaaaaaatagatcataaagaggagggccttgaagaacagggcagagtgtttagctgaagcaaagagcatggtttgatttcagtagtttgagagtagttagcacttttgaagatcaacagtattgtttggagggggagtaaagaaaattaatgtgcaaaggggaatattgaaagaaatgtatgaaagttttgtttcaggccctattgcagaaaaaaaaaagctttgaattactcataatatrtgactattcataggtagattttctacactgtgagtgaaattttagattcagggccccccaatggagggatactaaaaatatatt

SEQ ID NO: 324479 - DNA, 586 bp, Homo sapiens
tttctcaaaaaatacatttatacctgattttaagaagatcctcctacaccatataagcttcagtctctaaaaatatgtagatttactcttgaagtgaattcaagtttgctataagttgtaggtaatgtggtggtttttgataaacagagtgtgtaatataatcagaattttgcttcataaagttataaagtgaataggatttccaggaaaactataagttagcagaacaactagaaaattattaactgtccatacagtaattgatggtgacttaagctaggattggarttatgggagtgcaaatttgggaataaataatttgaatgttactcagtaatattgacaagtctaagtggtagtttagtggaatacttagaaaattcccctacattcatttttgttattcagatggattattaagataatagagcataaaaggctttaagtgtttgaaagtatattcaataatcatattagtttccttgttgttaaaaactgtttactttgctatgataagaactctctgtctcactgaaattaaatctaaataaatatatttaataaaaaaatcttttgtcatcttcat

SEQ ID NO: 324480 - DNA, 545 bp, Homo sapiens
atggagggctcactgcatgttatccagttccatgactttaaatatgataatatttccagtgcatgcatgtaagacttctstctcctccagtggctctacaatcatatattcacatcttctcacatttccttttaaatatctgataggtttttctgagataatttgatcaaaataaaagtatcagctaacattccctctctccattccaacaggaactgcttcctcaacccagcatctctcattatggttcatggccctacaaaccacatagttatggtgatgaaaagaatcctacaaattatctttaatttcttacaacctacattcaatctataaccaaattcttgttggctctgccccaaggtttgcctcaaaccttatgaacaccattgtcactattgacttcatagaaccaaggcacaaacatctctccttaaaactaggacaatcaactgctaaattttattttttgattgtttaatttaatattttaaattgatagataaaattgtatgtattttatgtgtacaacatgatgtttcaag

SEQ ID NO: 324481 - DNA, 545 bp, Homo sapiens
atggagggctcactgcatgttatccagttccatgactttaaatatgataatatttccagtgcatgcatgtaagacttctgtctcctccagtggctctacaatcatatattcacatcttctcacatttccttttaaatatctgataggtttttctgagataatttgatcaaaataaaagtatcagctaacattccctctctccattccaacaggaactgcttcctcaacccagcatctctcattatggttcatggccctacaaaccacatagttatggtgatgaaaagaatcctacaaattatctttaatttcttacaacstacattcaatctataaccaaattcttgttggctctgccccaaggtttgcctcaaaccttatgaacaccattgtcactattgacttcatagaaccaaggcacaaacatctctccttaaaactaggacaatcaactgctaaattttattttttgattgtttaatttaatattttaaattgatagataaaattgtatgtattttatgtgtacaacatgatgtttcaag

SEQ ID NO: 324482 - DNA, 545 bp, Homo sapiens
atggagggctcactgcatgttatccagttccatgactttaaatatgataatatttccagtgcatgcatgtaagacttctgtctcctccagtggctctacaatcatatattcacatcttctcacatttccttttaaatatctgataggtttttctgagataatttgatcaaaataaaagtatcagctaacattccctctctccattccaacaggaactgcttcctcaacccagcatctctcattatggttcatggccctacaaaccacatagttatggtgatgaaaagaatcctacaaattatctttaatttcttacaacctacattcaatctataaccaaattcttgttggctctgccccaaggtttgcctcaaaccttatgaacaccattgtcactattgacttcatagaaccaaggcacaaacatctctccttaaaactaggacaatcaackgctaaattttattttttgattgtttaatttaatattttaaattgatagataaaattgtatgtattttatgtgtacaacatgatgtttcaag

SEQ ID NO: 324483 - DNA, 592 bp, Homo sapiens
ttagtcacaaattaaatgccctgatggttgtaatatagtgatttatcaccagagtcaggagtgattttgttttgtaatggatttaagaaaaggattgagggaaaaagaggcgaagggttgaaattytcaagtgtgcagacactaagtgtgaacaattcataaaggtttggtcaaaaaatctactacatttgactatgaagggagcttttaagaaattgagttatggaaggcaaacaacagtaactgtgtgagattaagctctttactttccaagtttcatgtagtcttcattgctttgtatttctcttgaaattactgagagagaaaaatgccatttgtcaactcataaagaatctcctgcttaacttctgagatataaatatttattttatattaccccaaataaataaaatctagacaattgggggaatgcagtaagtcgaagtgcactacatatacatctggtgtattgcagtcaaaatgattcctaatagtaattaacagaaaacagagtctcaaaatggcttacataaacaaaataatttattggcttctgtattagtccattcttgcatcgctataaagaaatagc

SEQ ID NO: 324484 - DNA, 638 bp, Homo sapiens
cctgaagtgtacattctctctgaagtatctactttcagattttgctaaaaacttaatcaaatgttattacattttttccttttaaaagcttttatgtagcaatgttccagtgttttatttcctttttaaggagttattatcttcctaaggtatgtcatgagaatagttggtagataaaacagtagtgagaataattaaaaacatacacacaatcatatcatattgggaaataaaatgtatttattttcttaagctattttttgtcattgtaattacaaatattttgtctatattatgataatgggagataaaaatacttgtgaacttttattatcttgatttttatttcagactccccaaattagacactgatatatttatattgaaagagaaaacaaaaataatgacagcttttgacttatctcctctattcattgcaccaaattctgataagtatattgatttcagagagaacccactactaccaaaatgtgggatgctaacagaaaatactcagaggcaaaacatattgggcacagttgttcccaaatgaacaactttaaaacaaatataagatttcagaactgmtttgaggacatgtatatacggaaagaccaagagtttcagcaacgctgcat

SEQ ID NO: 324485 - DNA, 575 bp, Homo sapiens
ttcagcaacgctgcataatctgtgcatctcaattcagatcggacatttttgaacttatggtttaaacatatttgatctatgtgaattcattacaattattactattatctatgttcaaattgtcacacctgtggaaatttcccctctggtaccttctttatgttttttaccatacygagtcctattgatttgaccataattaccttcgcaagcatccttgctatctgatatgacaagatatttcagactcatcttggatatatcctgtcccacagccaaaatgagccatttcttcaaggagcccttcaactattaatgggaaatgctatttggagatgataatctgtgttcacagagtatagttgacttttatggcctagaaatatattatcttaattatcagttcatgtgaaggataatctttttgctcagtagaggtcttgtcatacctaacaaatggtgtatttctagcatggtaataattaaaactgtgatttacaaatttaaatttgttaataaggaagatagattcttttcgaacttatgtaagtaaatacctgattagcaaagtaaag

SEQ ID NO: 324486 - DNA, 517 bp, Homo sapiens
aaggaaggaacctagaaggaagaaaagaaggaaaaatcgatgtttaaatttaaaaaattgcaaaattaccaaggttataaagtttccattattaatcagtttattctggaaacacagcaactttctcagaagatgcacattgacaaaagtcatgacatatttttagatagcattgcaaagtgagagataaaattggtttttggtagaagtccaggcttgaakaaaattctccaagtatttgaggagccagaactaggacaaaactacgctttgtaattttgttttattttttgggcagagtggctgttctgcgtgtaaaacaatgatcagaaaccaaaatcaaccaattcacttctaacagactttttatctgtagtatgtataatttaaaatatcctcctttgaaattcctgtgttaatattctcgactgacagaaagtggcattcatcataactgttatctaggattctattttgaatatttcagagagcctaatacaaatcacaaattaccaca

SEQ ID NO: 324487 - DNA, 615 bp, Homo sapiens
tgaattatttagcatatcttgaaactttttacagttttcttcattcagtagagcacatcaacttcacttagttgtccttatttcattctagtttcaactagggatcataatttaaccttagctgcctcagagttatttcatattgcattcctcttttcatggaacattgcagaacataataagaaagcctgtgagtaaaaatttcaaagcaacttgacatccaggaacaaaccttttccttgccctcaggcacacacacaggcgtgtatatacacacaagtaccccagagattttttttgtcatatttattcttagggtgctaggtcaaaaggaaggctatgcctaggtaaagaggaagcattttattttcttactctagtttaagatttgcctaccaaactaaggttttgtctcttgagtaaccttttctaattactggcattcatttaaataaacatctagtctagctctttagttctaaggaagcttgtgtaaagtataatccattgtcagtatatgacccaaattacagmatagtagataatactagatattatgcacaattacctgttggctatcaataccacacctcaagttaatgttaatgttaatgt

SEQ ID NO: 324488 - DNA, 543 bp, Homo sapiens
tccatttgtcacatctactaaaatagatctaacataacataacaacataacataacataacataacataacataacataacataacataacataacataatcatgggagtgatgaccgatctggttttccgtattgtaagcattagaagcaaggtccagcttgcaccaaaggaaaggtattaggcaacaggaaatgagatatcactgggggtcacattaggatttatttgtcacagcaacaaatgactccctaaattgaagtaatttgcaattcatttcttgcttatgtcacattttggtggctacagcaactactgtgatgccattacaaatatcttatcatcccaagactcaagctaaaagtgaagttcctcttttggagatatcacttgtgcagcagaaggaaaagagacatgattgagattgattattccttttaaaacaactgctcagatgagttcatccacatgtcaccaatcggaaaacatcacataacagtaagaagaamcatacaattctcttgacagtgaaaggaagaacaac

SEQ ID NO: 324489 - DNA, 616 bp, Homo sapiens
gtgtgtgaatatctgcctgtatgtgagaatgcacaatcctggttggattttggtactgagataatattagaataaaataattgggtacttttttttaatgtttcctttcttctggagccctttaaatggccatggggcttaatattttcagaatattttgtagaaatctcatattaaatggcctgttgataattttatttctatttgtaagcattgttctatctagatttgatatctttttgaagattgattttgatgttttgttttttcwtggtgctcagtcattgcaaaaaaaaattgtctagatgtgaacataatagtctcatatgatgtcttcctgtgtgtggttagacattatctttgaagataatttttgctgttgttgttccttctatttttgggaatgggttatctcttaatttattagttctatcactttttgttttgttattcattaatgtcagcatttacatttgttaaaatcagatcattctacttttccaatgcctaattatatttttagtgtcttggatttgattttttcataataaaaatatatacagcttttagtttctcttaaaaacccttttatctatatctcatctattttaacatg

SEQ ID NO: 324490 - DNA, 616 bp, Homo sapiens
gtgtgtgaatatctgcctgtatgtgagaatgcacaatcctggttggattttggtactgagataatattagaataaaataattgggtacttttttttaatgtttcctttcttctggagccctttaaatggccatggggcttaatattttcagaatattttgtagaaatctcatattaaatggcctgttgataattttatttctatttgtaagcattgttctatctagatttgatatctttttgaagattgattttgatgttttgttttttcatggtgctcagtcattgcaaaaaaaaattgtctagatgtgaacataatagtctcatatgatgtcttcctgtgtgtggttagacattatctttgaagrtaatttttgctgttgttgttccttctatttttgggaatgggttatctcttaatttattagttctatcactttttgttttgttattcattaatgtcagcatttacatttgttaaaatcagatcattctacttttccaatgcctaattatatttttagtgtcttggatttgattttttcataataaaaatatatacagcttttagtttctcttaaaaacccttttatctatatctcatctattttaacatg

SEQ ID NO: 324491 - DNA, 616 bp, Homo sapiens
gtgtgtgaatatctgcctgtatgtgagaatgcacaatcctggttggattttggtactgagataatattagaataaaataattgggtacttttttttaatgtttcctttcttctggagccctttaaatggccatggggcttaatattttcagaatattttgtagaaatctcatattaaatggcctgttgataattttatttctatttgtaagcattgttctatctagatttgatatctttttgaagattgattttgatgttttgttttttcatggtgctcagtcattgcaaaaaaaaattgtctagatgtgaacataatagtctcatatgatgtcttcctgtgtgtggttagacattatctttgaagataatttttgctgttkttgttccttctatttttgggaatgggttatctcttaatttattagttctatcactttttgttttgttattcattaatgtcagcatttacatttgttaaaatcagatcattctacttttccaatgcctaattatatttttagtgtcttggatttgattttttcataataaaaatatatacagcttttagtttctcttaaaaacccttttatctatatctcatctattttaacatg

SEQ ID NO: 324492 - DNA, 616 bp, Homo sapiens
gtgtgtgaatatctgcctgtatgtgagaatgcacaatcctggttggattttggtactgagataatattagaataaaataattgggtacttttttttaatgtttcctttcttctggagccctttaaatggccatggggcttaatattttcagaatattttgtagaaatctcatattaaatggcctgttgataattttatttctatttgtaagcattgttctatctagatttgatatctttttgaagattgattttgatgttttgttttttcatggtgctcagtcattgcaaaaaaaaattgtctagatgtgaacataatagtctcatatgatgtcttcctgtgtgtggttagacattatctttgaagataatttttgctgttgttgttccttctatttttgggaatgggttatctcttaatttattagttctatcactttttgttttgttattcattaatgtcagcatttacatttgttaaaatcagatcattctacttttccaatgcctaattatatttttagtgtcttgratttgattttttcataataaaaatatatacagcttttagtttctcttaaaaacccttttatctatatctcatctattttaacatg

SEQ ID NO: 324493 - DNA, 485 bp, Homo sapiens
agtgaaattctatttcccgttgtttaactattgtgttcattttggacatttatatacaattattcagtaatatagyattgtactatagatcatgttatagtttttatgtctttaacaacagccttcaaggctaaaaatctaataattttgtataattacttcactccaggacatctccccaagaattatcttagtgactgatgaatcagagggatacctaaatacaaaaactgagtgaaaacaccaaaggatgagccaagtttgccaatggtaacataagcatttaatggatggcctaataagaattttgtccaggtacctgtggggaagatttgataccagagttataaactggtgattgatggcagaaatgacaagtgatttcaaatgtcctttctgtaacagtagagtaacttttctttatgtaagcaatatgtagctcctcggtaatgtcaaatacaagaatagtaattattgtaaatttc

SEQ ID NO: 324494 - DNA, 485 bp, Homo sapiens
agtgaaattctatttcccgttgtttaactattgtgttcattttggacatttatatacaattattcagtaatatagcattgtactatagatcatgttatagtttttatgtctttaacaacagmcttcaaggctaaaaatctaataattttgtataattacttcactccaggacatctccccaagaattatcttagtgactgatgaatcagagggatacctaaatacaaaaactgagtgaaaacaccaaaggatgagccaagtttgccaatggtaacataagcatttaatggatggcctaataagaattttgtccaggtacctgtggggaagatttgataccagagttataaactggtgattgatggcagaaatgacaagtgatttcaaatgtcctttctgtaacagtagagtaacttttctttatgtaagcaatatgtagctcctcggtaatgtcaaatacaagaatagtaattattgtaaatttc

SEQ ID NO: 324495 - DNA, 485 bp, Homo sapiens
agtgaaattctatttcccgttgtttaactattgtgttcattttggacatttatatacaattattcagtaatatagcattgtactatagatcatgttatagtttttatgtctttaacaacagccttcaaggctaaaaatctaataattttgtataattacttcactccaggacatctccccaagaattatctwagtgactgatgaatcagagggatacctaaatacaaaaactgagtgaaaacaccaaaggatgagccaagtttgccaatggtaacataagcatttaatggatggcctaataagaattttgtccaggtacctgtggggaagatttgataccagagttataaactggtgattgatggcagaaatgacaagtgatttcaaatgtcctttctgtaacagtagagtaacttttctttatgtaagcaatatgtagctcctcggtaatgtcaaatacaagaatagtaattattgtaaatttc

SEQ ID NO: 324496 - DNA, 626 bp, Homo sapiens
gaaattctatttcccgttgtttaactattgtgttcattttggacatttatatacaattattcagtaatatagcattgtactatagatcatgttatagtttttatgtctttaacaacagccttcaaggctaaaaatctaataattttgtataattacttcactccaggacatctccccaagaattatcttagtgactgatgaatcagagggatacctaaatacaaaaactgagtgaaaacaccaaaggatgagccaagtttgccaatggtaacataagcatttaatggatggcctaataagaattttgtccaggtacctgtggggaagatttgataccagagttataaactggtgattgatggcagaaatgacaagtgatttcaaatgtcctttctgtaacagtagagtaacttttctttatgtaagcaatatgtagctcctcggtaatgtcaaatacaagaatagtaattattgtaaatttcactaaatttgtcaatratattcaaggtttaattagcaaatattaattgtatatgtagaggttgatatttttaaatccttgactttaaatacttaaactctcatatggaaaaaaaattttacacacgggaaaatggagaaaaatt

SEQ ID NO: 324497 - DNA, 586 bp, Homo sapiens
tatctggggggctattgtaaatgggattgagctcttgatttggttcttagcttgaatgttattcgtgtatagaaatgctattgattttttacatcaattttgtgttctgaatatttactgaagtaattatcaagtctaacagtctttggaagggatcttcagggttttctgggcwaaagaacatgtcatctgtgaacagagataatttaactttgtcttcacaatttggatgctttttatttctttctcttgcttgattgccctggctacagcatccaatactgtggtgaatagaaatcatgagagtgaccatacttgtcttgttccaatacttaacagaaatgctttcaactttctctattcagtaggattttttactgtgagtttgtcatagacagcttttattattttgacatatgtttctctgatgcttagtttgtagagagtttttatcttaaagaaatactgaatttattgaatgattttttaatctattgagatgatcatatagttttcatgtttagtatttttaggtgatgaatcatatttattcatttgcatatgttgaaccatccttgcatccctt

SEQ ID NO: 324498 - DNA, 586 bp, Homo sapiens
tatctggggggctattgtaaatgggattgagctcttgatttggttcttagcttgaatgttattcgtgtatagaaatgctattgattttttacatcaattttgtgttctgaatatttactgaagtaattatcaagtctaacagtctttggaagggatcttcagggttttctgggcaaaagaacatgtcatctgtgaacagagataatttaactttgtcttcacaatttggatgctttttatttctttctcttgcttgattgccctggctacagcatccaatactgtggtgaatagaaatcatgagagtgaccatacttgtcttgttccaatacttaacagaaatgctttcaactttctctattcagtaggatttttkactgtgagtttgtcatagacagcttttattattttgacatatgtttctctgatgcttagtttgtagagagtttttatcttaaagaaatactgaatttattgaatgattttttaatctattgagatgatcatatagttttcatgtttagtatttttaggtgatgaatcatatttattcatttgcatatgttgaaccatccttgcatccctt

SEQ ID NO: 324499 - DNA, 586 bp, Homo sapiens
tatctggggggctattgtaaatgggattgagctcttgatttggttcttagcttgaatgttattcgtgtatagaaatgctattgattttttacatcaattttgtgttctgaatatttactgaagtaattatcaagtctaacagtctttggaagggatcttcagggttttctgggcaaaagaacatgtcatctgtgaacagagataatttaactttgtcttcacaatttggatgctttttatttctttctcttgcttgattgccctggctacagcatccaatactgtggtgaatagaaatcatgagagtgaccatacttgtcttgttccaatacttaacagaaatgctttcaactttctctattcagtaggattttttactgtgagtttgtcatagacagcttttattattttgacatatgtttctctgatgcttagtttgtagagagtttttatcttaaagaaatactgaatttattgaatgattttttaatctaytgagatgatcatatagttttcatgtttagtatttttaggtgatgaatcatatttattcatttgcatatgttgaaccatccttgcatccctt

SEQ ID NO: 324500 - DNA, 586 bp, Homo sapiens
tatctggggggctattgtaaatgggattgagctcttgatttggttcttagcttgaatgttattcgtgtatagaaatgctattgattttttacatcaattttgtgttctgaatatttactgaagtaattatcaagtctaacagtctttggaagggatcttcagggttttctgggcaaaagaacatgtcatctgtgaacagagataatttaactttgtcttcacaatttggatgctttttatttctttctcttgcttgattgccctggctacagcatccaatactgtggtgaatagaaatcatgagagtgaccatacttgtcttgttccaatacttaacagaaatgctttcaactttctctattcagtaggattttttactgtgagtttgtcatagacagcttttattattttgacatatgtttctctgatgcttagtttgtagagagtttttatcttaaagaaatactgaatttattgaatgattttttaatctattgagatgatcatatagttttcatgtttagtatttttaggtgatgaatcayatttattcatttgcatatgttgaaccatccttgcatccctt

SEQ ID NO: 324501 - DNA, 638 bp, Homo sapiens
ttgagctttgctctgacctttgttatttcttttcttctgttagctttcggttcagtttagtcttatgtttttagttccttgagttgtgatgttaggttgttaatttaatacatttctatctttctgatatagacatttaaggctataaacttttctcttggcactgtttttttctgtatcccaggagttttggtatgttgtgtctctgttttcatttatttaaaataaattaaatttctaccttaatttcattgtttacccaaagatcattcaggagctagttgtttagttyccatgtacttctgtcattctgagagttcttcttagtagtaacttctaattttattccagtgtggaacaagaagatacttgatatgattctgattttttacatttattgagacatgctgtatgaccaaccatatggtcaattttggagaatgttccatgtgcggattaaaaaaacaacaacaacacttatattctgcagttgttgggttaaatgttctgtaaatatctattaagtccatttagctagagtctactttaagtccaaattttctttgttgattttctgcctcaatgatctatccagtgttgtcaatgaggtgatgacctccctcaacattattgcattg

SEQ ID NO: 324502 - DNA, 638 bp, Homo sapiens
ttgagctttgctctgacctttgttatttcttttcttctgttagctttcggttcagtttagtcttatgtttttagttccttgagttgtgatgttaggttgttaatttaatacatttctatctttctgatatagacatttaaggctataaacttttctcttggcactgtttttttctgtatcccaggagttttggtatgttgtgtctctgttttcatttatttaaaataaattaaatttctaccttaatttcattgtttacccaaagatcattcaggagctagttgtttagtttccatgtacttctgtcattctgagagttcttcttagtagtaacttctaattttattccagtgtggaacaagaagatacttgatatgattctgattttttacatttattgagacatgctgtatgaccaaccatatggtcaattttggagaatgttccatgtgcrgattaaaaaaacaacaacaacacttatattctgcagttgttgggttaaatgttctgtaaatatctattaagtccatttagctagagtctactttaagtccaaattttctttgttgattttctgcctcaatgatctatccagtgttgtcaatgaggtgatgacctccctcaacattattgcattg

SEQ ID NO: 324503 - DNA, 276 bp, Homo sapiens
aagcttagttttgcaggttacaaaactcttagctggcaattattttcttaagaatactaaaagtaggatcctagtaactttgacctttaaggtttcttctgagaggtccacygtctgatgatattttcttcatgggtgatttgatgcttccctctagctgcttttaggttttgttttttttattttcttttcttacactttgaccttgaatagtttgatggctatattctctggtgatattcatctagtatagcaccttcaaggtgttcttcaaat

SEQ ID NO: 324504 - DNA, 276 bp, Homo sapiens
aagcttagttttgcaggttacaaaactcttagctggcaattattttcttaagaatactaaaagtaggatcctagtaactttgacctttaaggtttcttctgagaggtccaccgtctgatgatattttcttcatgggtgatttgatgcttccctctagctgcttttaggttttgttttttttmttttcttttcttacactttgaccttgaatagtttgatggctatattctctggtgatattcatctagtatagcaccttcaaggtgttcttcaaat

SEQ ID NO: 324505 - DNA, 607 bp, Homo sapiens
tgggggctgtttgttatgatttcagttcttttgcatttgctgaggagtgttttgcttctgctatgatcaattttagagtaagtgccatgttttgatgagacaaatgtatattctgttgaattttggctcagagttctttaaatatctaacacattcacttgatccagagctgagttcaggtcctaaatatacttgttaattttctgtctcaatgatctaatattgtaagtggggtgttaaagtctcccactgttattttgtatgagtctaagtctctttgtaggtctctaagaacttgctttatgaatctgggtactcctgtattggggatgtttacattcagaatagttagctcttcttattaaattgaactctttaccattatrtaatgcccttctttgtcctttctcttctttgttggtttgaagtctgttttttttcagaaactaggactgcagcccctgctttttcctgttattcatttgtttggcaaattttcctcttttcctttattttgagcctatgtgtgtctttgcccatgagacaggtctcttaaagatcaagcagaatagaactctgcttactctattctgctattgatactagt

SEQ ID NO: 324506 - DNA, 595 bp, Homo sapiens
taattgatttgtgtatgttgaatcaatcttgcatccaaggattaaagcctatttcattgtgatggattagcttttagatgtgctgttacttttgatttgctagtattttgttgagaagttttgcatctatgtgtatcagggatattggattgaagttttctatttttgttgtgtctctgccaggttttggtaccagaatgatgctggcattgtaaaatgagttacggaaaagtccctcctcctcattttttgagaataattacagcatgattggtactagcttttctttgtatgtcagtagaatttggctattaatctggtccagggatttttttggttgataatttaatattttcatagtcatagtccttacaatgtaacactgaatcaaaataattttaattattgaaatatgtgcttattttctcacataatttggtgaagaacatgcctaatatatttttcaccatttttttcagtctttttatagctttatatttcagtatatggtatatttgatagctgaygaaattcttagtttcatgttataaaagactacctagaaaaaattttcacaaaaaattatttgaagcat

SEQ ID NO: 324507 - DNA, 450 bp, Homo sapiens
atatataagaacttatataagaacttatataaaaacatacataaaaacttatataaaaawatatatatatatatgacagagagacaagtttgtaaagattagctgatacagttgtgtagactgacaagttcaaaatttgcaagtgagttggcaggatggacacccaggagagaattgcagttcgaattcaaaggccttctgctggcagaattcctcttcctccagggaggtgaatctttttttattaaggtcttcaaataattacacaatgctcatctatattataagacataatctctgcactcaaaatctaattatttaaatataaatatcatctaagaatatcttcacagaaatatctagaataatgtttgatcaaatatctgtatactatggcctagccaagttggcacacaaaattaaccattacacactactcatccattcacc

SEQ ID NO: 324508 - DNA, 472 bp, Homo sapiens
gttttctagattcagcaacattgtgagttgtttctgaatctagaaaaaatatataacatccatttacagaaataattataggtatagttatatacacacatatataggacattgctatacatgctatttatgtataaacatagtataacacaatattgatatagtaaacatttatgaatgtgcagttatctatttattgccataatatatatgtgtgtttgtgtatgtgtgtgtatatatatataatttatatatatattttttatatatatatatatrtgtatacatgcctatacacattgctgtggtttgaatgtatccccaaaaaaacatgtgttggaaatttaatcataaatgcaatggtgttgggaagcggggactaatgagaggtgattaggttgtgaggactctgccctcattatcatcattattgtgcaagtgaattttttttttttagaaaaggatgagtttg

SEQ ID NO: 324509 - DNA, 573 bp, Homo sapiens
tggtatgcattttaagaccaaacagctcttatttgtatttgtgtttgtggaatagagagataaataaaacaaaattattatcaaataaattattacaaaatttaaaaataattgaaataaatagattagacttggattactcccggaataacaaaatgaagttcaaaagtaaatctaactaatttgcgtatgttttattacagaaatctttggctatttttttgttctaggccagctaaatgttaatttaaaattgcatggtatttatttttcatgagtcatgtagtttacttccacagctgaactctaacaatgtgatgaggataaatataacccaaatagaaagtcctattgttggycatgatgcctgaattagcatgtccaatccaccaaaaaaaaactatttgctaaatattaagaaaaagacacaatgattgagcattatttggcttgttttttaacacaaatacaaactattgacttacggtatgattagagttcatttttatacagatcaatgtcttaagaaaaaacaaaatatccttgagttgactgggaataaccaatgactat

SEQ ID NO: 324510 - DNA, 448 bp, Homo sapiens
tgaggtattgaattcatagttgttgttgtttttcaataattgaaataacacttatagtgttaattatttcctgttaaacatcaggaacactgttacttataaatatatttttgcttatatttttgcttaaacaacagaaatgtaaattctcacagttctggaggctggaagtccaagatcaaggtccagcagggtttggttactgctcagggctctcttcttggcttgcagatggctgtcttcttactgtgtccttacatggagagracacacagagatgcacatagagggaaggagacagtgagctccctggtgtctctttttataaggacactaatagtactagattagaacctcactcttatgacctcatttaacctaattaccttctaaaggccctatcttcaaatacggtcaaattggagattaatgcttccacattttgatt

SEQ ID NO: 324511 - DNA, 533 bp, Homo sapiens
agtgttatttcatcagccagaaacttctgtggctggtggtgactctgcttgggttttgcttgtgcctgctgggcttgttctgcccactcagtctagcaggctgcactcagctcacattaccagcctggatcccatgcctgccaagagccagccaggcgtggagcagtgagggcttcagccactgctcacagccaggcatcctgcctgtggtgggacaggcagctctaggcacccacacaggtgcccgctccatgtgaggctgcagctgggccagatatacgacaagaggcttctgcagcgggcaccagcatctagacaaaggaaacgtggtggcatccgaaagctctgagataccaggaactgcagagcccccaaagagaatgctacagcctgttacagccctggctcagtgatccccaaggtctggtcttccagaaggcccacagctcttctctctttcttgtcccctgcartgaggcaagtagggggcgtgtttcagccctgtttgtgttacagttcttttagtctctcca

SEQ ID NO: 324512 - DNA, 522 bp, Homo sapiens
actcacatacaaaaatatatataaaacttataagaaatctgaattaggtactaaaattatccccatattactgaagagaacaatgaagtctaagaggttaaaacatcaagtacagtttattagacttgtgcatgaatgaaccttcatatgatttcactgtcctcaggtgtcaagtcagwcccagattttaagttttccctgctcggtctacagacatcatatagaaagacagcaactttgctgcatcctttctgaaatctgcatccatagaatcattgaacacaacaaaatgattgtttatgacactgaatttacagtaattttttatgcaacaaaaataactgaaacaaacaccaacccaacgaggtatgtaatgcaatgcaatgcaccatggttatatttcaagaataaccccagtggagtttcaggaggatattttgtttcagcagcattgtgaaaaacatgtgagcctgggaaagggcactgggcatagaaatagtgcttaaatgcagtgattctgaa

SEQ ID NO: 324513 - DNA, 557 bp, Homo sapiens
aattgataaccacacaagttacaaaagagcaaacgtgaaaatttttttaaatatgtcaattaaatgaaagagaatcacagctaaaacttgcggtgaaacatgactatgaaactttattgataatatcttaattgcaaaacctctctcttcttgactattacatgmtttctaaccatctgcatttgcacctgtactgttcagtcttacaatgcagtcaggacttgtggtagagtctaaaatgaagaacttggtaaatttttatcagtaaactccctttttcttacaaatgtaatataaaataaaataaaatgtcaccagtaggatatctgagtaatgcattaaagtgaaaaagaatgtcatctttatgacatacatacacacacagatgttgacatgcacatgtgtaattaagaaaaaaagacacagaattttggatcagttcttaattcatcaaggaaaacattaagagcctgctggttgcctatggaccatagatgagagcgcaatgtacctttccagaccagacacagtcacagagggtaactttctggattcat

SEQ ID NO: 324514 - DNA, 579 bp, Homo sapiens
aagagcctgctggttgcctatggaccatagatgagagcgcaatgtacctttccagaccagacacagtcacagagggtaactttctggattcatgtagcttactccttccatttatatgaaagtatttgctgccagttagtcagggtttcatttcaggaactgcccagggctagaagaggatcccttgtgcagatcttttggcactggattacagggatgctgctttcactgcccttaagcctccatatcacaaccaccccctcattgtgttggccctacgttaatttgcggaatttaatctgtggaacagaaaagccagaggccttcctaaagcttccacattttcctgtttgagaaccagtggagaagttgtccattttaatgctttatttctcttcttataaaagacttggaaatgaatrggtcactctgaaatagtccttggaaagtctgctatttctttcatagatttctgatattgccttggttctgtagcaggtaatgtctgaagcaaaccagagtcaataatctgacaaagtcaaagggaggtaccttcactactttaaattatacattcat

SEQ ID NO: 324515 - DNA, 558 bp, Homo sapiens
acttgatgtggcttcaaaactggattatcacaacagtctttcaactggtgtcagcttctaatatagtgcccatttaaattattcttatagttgtacagatgagatcatttaatttgtattataaattcttgcatgctttacatgttctcacaccctctactaatttacrtaaatgtctcagcctagaattcaagactttaccctactagtctgatttatattatacagacacacacacacacacacacacacacacacactgtttttactataaataggatgaatattaattgcactgtccactaaagccaactattctaatgactctcactcaaaaatatctgcaaatttctggcttaggaatcttacttcacattgttcactttacctagattcctcagcttacttctcttcaattatatcatttcttccctagaaaataaggcttcttcaaatcacttacaatctcagcaaagacatgattaccagatacacaatggaacctccttcctgtcactggacacctacaatttacttcttcttgccatttgcaatata

SEQ ID NO: 324516 - DNA, 434 bp, Homo sapiens
tacattgctattctttactcttcagaattcaaaattcatgtcaattcaatatttccctatattttaaattgaatcaataactatttttttctttcatgaatgtatctcataaccctggctagtagatttagatgggctaggcttctttaacttatgtttgttctttttgttgagttgaactagtttttcttaatgctgacagctttatcacaaactaagagctgttaaattaagtttagcctaaagctgcctccttacatattttaagtttggcctaaaggtctctttgaacattatgaactataacctaactggatggataagcaaattgtaacctactctygtaccaatcatagatttcaggcaatcacaggcagccagttgttcaaactgtgttcaaataagactgacattgagctgtaaccaatacagca

SEQ ID NO: 324517 - DNA, 551 bp, Homo sapiens
ccaaaaatgaagtttgtctaagctgcgttacctttatgacttttcagatttctctgagattcccttggccaaagagttcagttgaggccaggcactgtggctcacacgtgtaatcccagcactttgggaggccaaggtgggtggatcacctcatgtcaggagttcaagaccagcctggccaatatggtgaaactccgactctacaaaaatacaaaaattagccaggcatgatggcaggtgcctgtaattccagctactctggaggctgaggtgggagaattatctgaacctyggaggcagaggttgcagcaagttgagattgcactattgcaccacagcctagttgacagaggaagactccatccccttccaccaaaaaaacaaaaacaaaaaaaaaaacacacaacaacaacaacaaaatacaaatgagttcagttgattggggggcctagattttattttttgtttacagtagatttaggaaaaattagttatattttttgggtggtgtgtcatgaataatttgtccttgcccaaacagaggcctctcc

SEQ ID NO: 324518 - DNA, 551 bp, Homo sapiens
ccaaaaatgaagtttgtctaagctgcgttacctttatgacttttcagatttctctgagattcccttggccaaagagttcagttgaggccaggcactgtggctcacacgtgtaatcccagcactttgggaggccaaggtgggtggatcacctcatgtcaggagttcaagaccagcctggccaatatggtgaaactccgactctacaaaaatacaaaaattagccaggcatgatggcaggtgcctgtaattccagctactctggaggctgaggtgggagaattatctgaacctcggaggcagaggttgcagcaagttgagattgcactattgcaccacagcctagttgacagaggaagactccatccccttccaccaaaaaaacaaaaacaaaaaaaaaaacacacawcaacaacaacaaaatacaaatgagttcagttgattggggggcctagattttattttttgtttacagtagatttaggaaaaattagttatattttttgggtggtgtgtcatgaataatttgtccttgcccaaacagaggcctctcc

SEQ ID NO: 324519 - DNA, 604 bp, Homo sapiens
gcacaagatcatgtgaccaggatgtcaaaatcagacctttgactgtttcttccattataacatgctgttacatatttggtataagaaattaagctcacattataatttgagatgattaatttgttgactgggtttactgatgccttcattcactccttcaacaaatatttggtaagcacttaccacaaatgtgcttagcattatgctaggagcaatgatacaatgataaagattatatcagccaggtgcggtggctcaagcctgtaatcccagcactttgggaggcttaagacaatttgttccagctcaaatcccacctcatttctgctgcatttggcaccctacccataacagcatttacttaaaactcactacacatccagaactactataaatgatttcacaaaagcttttttaaattttaaaattaaaatgtattttatttgtatactatttgtttcacattttacagatgaggaaactaaagaacaaaatgcttaagtaatttgtaaaagttattgtatcaaataaaagcaaaataccacaaaaatttraaataacaaaaagcaaaagaagaccacaatccaggcaatttgattcttaa

SEQ ID NO: 324520 - DNA, 506 bp, Homo sapiens
agcaatggcatgaattaagaggattttgacttattatgacattgatattctagctgaagttgtcagaaccaattgataaaaaggcttcaaaaatattgatggcattggcatgtgaatatagtcctatatgactcaagtgatttttacctagagttgtctaaaagaccttcatgtatttagttctttttatgaagcagttatgagtatctatctcttgaaaaattcctctagaaacagcaaaacatttttttttcagaaacagagtgctaattaagaaaaaaaaatcacatgaagaaaccarggttgtcaatttacatccacatatcttagagatgaaaggttgcattaatagaaacgtctcttttccctcaggagttgggcgatagatcatacagcagacaaaaaacataggaaaactgaggtccagaaagcccctaatgatggcagggaatctttatgtgatttgtcctctgcgagtgaggatgggatggttcaaaggagaagta

SEQ ID NO: 324521 - DNA, 470 bp, Homo sapiens
agtttttttttcttttaaaccaccctaatgttaaaatctatggcttcttctaattgccatatattttaacagtgaaatggggtagtgaaggattttttttttttgtagagataaatagccctaccctgaggatatcagtatgagagaggcagaggcagttgcaccagtacagtaagtgcaagggtccgggggcwcgccagtgggcaaagtaaggtaaagaagagtcctgaagactcttctttcagcctgtgccctgctgaagacatgtctggtagggcaggatcagtgttccacaggaatggttattggtgcacacagtgggaatccgggtgccctttggtcagaacagatctgtaggtattgaagaaattgtacaagataagattcatttctttaaaaaactctttttgagctcctatgtagtagtatatggcaagtatttcagtatttggggatatgaaggtgaataa

SEQ ID NO: 324522 - DNA, 470 bp, Homo sapiens
agtttttttttcttttaaaccaccctaatgttaaaatctatggcttcttctaattgccatatattttaacagtgaaatggggtagtgaaggattttttttttttgtagagataaatagccctaccctgaggatatcagtatgagagaggcagaggcagttgcaccagtacagtaagtgcaagggtccgggggctcgccagtgggcaaagtaaggtaaagwagagtcctgaagactcttctttcagcctgtgccctgctgaagacatgtctggtagggcaggatcagtgttccacaggaatggttattggtgcacacagtgggaatccgggtgccctttggtcagaacagatctgtaggtattgaagaaattgtacaagataagattcatttctttaaaaaactctttttgagctcctatgtagtagtatatggcaagtatttcagtatttggggatatgaaggtgaataa

SEQ ID NO: 324523 - DNA, 470 bp, Homo sapiens
agtttttttttcttttaaaccaccctaatgttaaaatctatggcttcttctaattgccatatattttaacagtgaaatggggtagtgaaggattttttttttttgtagagataaatagccctaccctgaggatatcagtatgagagaggcagaggcagttgcaccagtacagtaagtgcaagggtccgggggctcgccagtgggcaaagtaaggtaaagaagagtcctgaagactcttctttcagcctgtgccctgctgaagacatgtctggtagggcaggatcagtgttccacaggaatggttattggtgcacacagtgggaatccgggtgccctttggtcagaacagatctgtaggtattgaagaaattgtacawgataagattcatttctttaaaaaactctttttgagctcctatgtagtagtatatggcaagtatttcagtatttggggatatgaaggtgaataa

SEQ ID NO: 324524 - DNA, 592 bp, Homo sapiens
tatctcactccccagctgtctyagttcccagactcccgatgtcttccttctgacggcccgggatcccagcaaagaggcaacctccaacaccactgccaggtagatgggtgtctccccctacccagccacactcagcggtcaaatgccttgtcctgcagcactgctgtgtgctatccctccctccactttattttctattttgttagagagacagagtcttgctctgtcacccgggccagaatgcaatggcacaatcatagctcattgtagcctcaaacttgtgggcccaagtgatcttcctgccttagcctcctgagtagctaggactacaggcgctcaccaccatgcccagctaatgtttcactttttgtagagacggggtcttgttatgttacccaggctggtcttgaactcccagccagcctcaagcaatcctcctgcctcagcctcccaaaatgctaggattaaaggcttgagtcaccatgtccagcctctccctccccactaaaaatagcttctgtatagccgttctatgcatagaacacacctgagtttcccagccccacactctagctccctccaacatcgtctc

SEQ ID NO: 324525 - DNA, 559 bp, Homo sapiens
tgtcatgcagccattcagttagcttgcccttctgtcttcttccatgtgaggatgcagcaagaaggccctcaccagaccaaaggccagtgccttgatctcggacttcccagcctccagaatggtgagaaatatatttctgttcctcataaattacccagtctcaggcattttgttgtagcagcacaaatggactgagacaaggggtacgcagtggkcctgtgccaccttggcccatgggaggcaaaccaggaagccttgtctcctcaccactcagaatgaggagaacatgtgaaaggagaaaggggttggggctgggtagggtcatttgctgacttaagacctctaatgcgttgtctctggagagttgaaacatcttgctaaagacctcatagtcagtctttgctgcaacacagatggaccaagcctgtctgtattgcagcaaagagtgaggagatattccagcaaaggcagcatcctgtatgctgattactggggaagcacaagaaaggggagctgtcagaggctatagagctgcatctgtacctggggaaagtgagag

SEQ ID NO: 324526 - DNA, 558 bp, Homo sapiens
attttctcaccgttctggaggctaggaagtccaggatcagggcactggcaatgttgctggtgagggctgctctctgcttccaacatggcaccttgaacactgtgttctcatgtggtggaagggcaagaaggacaaactcccttcatcaagtcgctttataagggcacccaatcacattcatgagggaggatgtggcctaatcacctcctggcctaatcacctcttagaggccctacctcttaatactatcacattggcaaaactggggttttagaggggatcccttcaaaccatagcatctgctcccctgcttgacttgccacaggtagataatggcttttctctgggtgagcttagggacttcctggaggcttgagggctaccatatacataactgtttccatttcagggatgttcatttaaaataacatcgcrggaaactactttgacatttaaaatctagaaaaagccagcaagcctgtttcttggcacctaatggacaccttatgggatggcgtgttccaagagtctcactccagtgacgtgagctaccgaacc

SEQ ID NO: 324527 - DNA, 622 bp, Homo sapiens
actgcttcttgtggaaacacaataaattctactctaattgaaaagaagacagggtagctattctctttgctgacctatatgccattgctttcctcatttttccctttattaccttttgttagaagtaatctgtgcagatgttttaaacatttattgagattgttttataacctagaacatgatatgttctgctaaaattaccattgcatttggaaagagtgtgtattctacagttgtttgatatggtaatctattaaatattaattaaattatggtgattgattgatggtgttgtttaaaccttctatatatataaaaatcttttgtatagctctatcaattgctgtragagaggttttaaataggtgattatgcaattctctattcctccttttaattatgtacatgtttgctttgtataatttgaagctctgtttataattgtatatcttcttaatgaattaaccataaaattatctttttgaagtatttctttttatacttgatgatatttttgttttgaaatctattttatctgacattaatatagctactatatagccttcttattcttgagggttgcatggtatatcttttctatccatttaccttcagcttaact

SEQ ID NO: 324528 - DNA, 461 bp, Homo sapiens
aaaatccagatctcactcaacatttcagcagaagtctcttggaggcttattttccaggaagaatggaaaggaaagtccccggatttctcaagaggaaaagtaaaaaaaggatgctatacccaaataggagcagccggtgagtttgtacccaacattaaaactgagcagcccatgagttcgtacccaacattaaaactgaccatatttctctcaccattcagtttctagaaagctggcagccagacttgtaactttaggcaaaattattcttccctaggcaaaactactctttaggcaagactactcttcttttcaaaagaaaagacaccgtcatttgaggtttcccagccaaagattacaaccagttcattctatggtgaattggttgtaawctttcaaccaaaaaaattcaacaaggctatagcttttaaacagtttttggtcccctacttcacagaaca

SEQ ID NO: 324529 - DNA, 523 bp, Homo sapiens
cagcaatgttttgtgggtggtgactggtcgtacagtgccatcatcctctcccgggtccactttccccatccttggccttcttggcaagagtactttcctagggctgtgaatgtccagaaagcctatgtttactggtgtggtgaggacattaatagtaattaggattacaagtgagataaaatgcctgtaggtgcccaaagagaaaaggcaaatcacgtggttttgtaggtctcagaaagaactgatcctacagctgaaggaaaggctcctctgttcactcattggcagtcctctagctgtgctcttcatttgttcctgtctcaggtctttactattaaataactaacaaataacatttgatttttacctcacaacccccttagatacattaaatgcattaatcttgttggaccagtagattctgtttatcaggccactgccttagtacctcaaataataacttgtatttgtagaattctttttactcctaatytatattcatatattaaattaaatttatcct

SEQ ID NO: 324530 - DNA, 644 bp, Homo sapiens
ttccagctccattataattttatgagtctactgtctatatgtggttcattgtttaccaaaacatcgctatgtggtacatgactgtaatttatcgcccatgctgtctttcttacaaaactactggaaaacttgtttcaccctaatgagagagtaaatcaagaaagagaaaaacaggatgcaggaaatagaagctccaactcagaaaagagagaaagagattgctccaggttgragttgaaggtaaatttcaggatcatggaatttccaaggcatggatcacaaccaatctagttggagcagatcagaggcctctgaagagttgcattcaggaacttgatacaatttttatgaatttcaaacaactcaggaagagttaggacacagaagactaaaccaacaaaaaacactatggttaataccaacaaagtatacagagagttgctcaagaaaagaaaaataattctagtgtaaaatgcagcccagccagaatttaaaaaaatatagtaataatgtaaaccttgaatattgctctaactaaagttaaaactctctttgaagtatgtagaaatttatgcagtagagagggttagacagtgaaaataatgctaaattcacattccccattgtggaaaatcaacaaattg

SEQ ID NO: 324531 - DNA, 594 bp, Homo sapiens
ttgaacttctgacagcaagtggtccaccagcctcggcctcccacagtgctgggcttataggcgtgagccactgcgcctggcctccaagagggtaatgatattgtgtgttttatgtactactacagccgcaagttcccagaactgtattggctacatgcaggtactcggaattacccggtgaagccctatagtagtcccagctactccagaggctacggcaagaggatcgcagagcccaggaggtcaaggctgcagtgagctgtgattgtgccactacactctagcctgggcaacaaagcaagaccccatctctaaacaaaacaaaaccctgccgaattaattaacccgaaacacatttacagaaaaatctaacgagaccatttctagaataaaacacttgttaaggaaaaccatgtttatgttagaggaaagaatgtcagcttacaaaaaactaaaatcctaactagtaagtcargaattacaaaaatatgtgatccatctctataaatattgatgtaaggagttttctcatattgttgggcttatacaaatatgatttggcttcacaaatgtgcacttagcattcaggcccta

SEQ ID NO: 324532 - DNA, 587 bp, Homo sapiens
tcctgaagcacgcggaatggaatcaatagtttgtagtcccgtgtttgcgagtatcacgccatctcctcctccgggaggtgtaaggtgaacattaatggtgtactgaagctatcaaattattagaacaacygagaagcgataagagaagaaaaacaatgcatttttaagaacattgttggtttaagactagggtgcatgaagctgacacagagacaaaatgttctgttatttgcggtttctggaaaatgtcagcttcctggcaggaaagaaagtttcactgcaactccctgaaacttaaaagctagtgttggtggctgcctcacagaaattgtgactctcagagataagaaagcccagaccgggcgtggtggctcagcctgtaatcccaacactttgggaagccgaggcaggcgacaggcggatcgcttgagcccaggagttcaagaccagcctgagcaacatggtgaaaccccgtctctactaaaactacgaaaattagccaggcgtggtggcacgtgcctgtggtcccagcaactcgggaaactaaggtaggagaatcgttccaagcagggaggcagaggttgcag

SEQ ID NO: 324533 - DNA, 543 bp, Homo sapiens
cccagagcccctaagagaaaaattttctagctgcctctgtaggcttgcaggaagaattttctagcccccatttcactgtctgaaagcatttctagtgtccctgcttcagkgagttcagctgcaatttccgtctgtgggtccaaatcctagtgtcaagtcctagtgagggcattaaaactccaaactttagccctgatcttagaactaagacttgtctcccaccctccaccccatgaccccagttgctcagtttagcttgagcttttgcttatgcttaacttagatttccctctttggtctgacatctaggaatttccctttctttcttgaatctaaatgtttataaatctatttgctatgtttatgcagcatatctgtatttttaaaatagcaaaagtgggagaagtgatgtccatatcagctcagtatgtcattttacccacaggaaaaataatacagcctcaactgaaatgggctcatcacagagcagtcatttaaaatttataaaacaaaaaacaattaggcccaagacttcctaatgaa

SEQ ID NO: 324534 - DNA, 543 bp, Homo sapiens
cccagagcccctaagagaaaaattttctagctgcctctgtaggcttgcaggaagaattttctagcccccatttcactgtctgaaagcatttctagtgtccctgcttcagggagttcagctgcaatttccgtctgtgggtccaaatcctagtgtcaagtcctagtgagggcattaaaactccaaactttagccctgatcttagaactaagacttgtctcccaccctccaccccatgaccccagttgctcagtttagcttgagcttttgcttatgcttaacttagatttccctctttggtctgacatctaggaatttccctttctttcttgaatctaaatgtttataaatctatttgctatgtttatgcagcatatctgtatttttaaaatagcaaaagtgggagaagtgatgtccatatcagctcagtatgtcattttacccacaggaaaartaatacagcctcaactgaaatgggctcatcacagagcagtcatttaaaatttataaaacaaaaaacaattaggcccaagacttcctaatgaa

SEQ ID NO: 324535 - DNA, 562 bp, Homo sapiens
cccaatagaccaaatgggaaataaatctgataattttaataaagtttgcaaaggcattaaatagtttaacattatttctgatgttaaaatttccagaaattgaggctaaatgtagaagtacttcatgtattaaacaatgtctatcttaacttttatttctggaagtattgtagactagatgtccaaaaaacccctcctgttcagaacagttgaagatacagaataaaattaaacgtagaaaaatagataggtaggtaggtaggtaggtaggtagatagatcgaaagacagatggcagataacagaatcgttgcgctggcaagaaataaagaaaccccttggagatgagaaactacaaaattgacttctagaaagcttacgtcattctttaaaacaatgtctttcctggagttgactggcaaattctgatgactagactacagttcaggragcatggttttacagaagaacaacaaaaaattctaggtcctatataaggtaggtcattatcacataacttcatgtaaattcaaggcttctgaaagaataaactaagaaataca

SEQ ID NO: 324536 - DNA, 596 bp, Homo sapiens
catcattcgactatcaaaacgtatccgttttttaatatttcaaaatttagtctacatgtaatgctcagattgataatcctacagttttataaagaaagcaggtaacaagaattgtacytaagaaacattgctggtcttttaacgctaaagtcattagggaaaaaaacactacattgtagccttgattaattttagtctttctagagaagaagcgtcccagtgcattctatgaatttcctacttaaacttggcgagcaactgccctggaagtagctcccaaacgcttttatatcaaggagttatgttggcatttgatttcttaatgtttggagttcatgaatttcattcctcaaaggaaggctttagcttaaattagtgtcagcctctttctgttcattaattcatgactactaccttcttagtcctttatgaacacttcttgctttctatattattgcctacatctcagtgtgtgagttcttctatttgcttttcccactacagcacacacattcctcagtgaacgctggcatttcatgctagaactcatagaagctacaaacaatctaataaataacacgatatgaaaaaattac

SEQ ID NO: 324537 - DNA, 661 bp, Homo sapiens
ttgaacttgagtactttcaaaaaacatatttatatgttgacttatactgcattattttaaagactcatgtacgataaagttataaataatagatgtgtaccccaacccccactctacctcctgcaagagatgatagaaagaacactaatttattttcattgattttttttctctgatagacatactgtcaagaaagattaaatttcactccaatttcacaccagtcttccttggtgtatatttttaagtcccgccaaaattagaattgaaaatgttttcttaaacaagtgaaaaatccaaacattgctataaaataatgattagttttgcatgagacaatttacaatatgttgaggtataatacaaggggaaattatttcaagtttggaaaatacagggcactaaaacatctgacatatgttgcatgggactaactaaagccttaaaagttatcttgtgatgatggagaggttgggtgtgggaagttaagtaacgaggaaagaaaacatgtgaggagtatttaggatctgtaactattaaccctagtgattcagcaattttgcaaccgatgacrgtggtcttaccttagtgggatcattctagaattaaatgctttgtcctacaatattaatttctccctatagtcttttttcttagctat

SEQ ID NO: 324538 - DNA, 643 bp, Homo sapiens
atccatggatgtggaatccacagattcagaggtctgattgtacatgtttgaagaagcgaggtgagctgtagaaagctcaaggaaagggaacaatgcaacaattggtcattgtgtttctagcacagagtaaagrctctgagtctggctctggatggtaaataggtacattttggtttattcctccacaatgctcctattattccattggtcttcctccattccactgaaactgctcttgggaaagtcaccaacgtccttcacattactaaatgaaatgtccagttctcagttctcaccatatttgacctattagcagcatttgagacaagtgattactccactgacttccaggacacactgttcttgttttccttctaccgcttcagctactccttctcaatccccttcagtgccaactttaatccttcctaactttctcataatagagcaccacagtgctcaacccttggccttttcctctgctctgtcctcacatactcatttagtaatcccattgaagctcagtttgtactaagtgtattatcatctttatgaattgtcagtagctttattatatgtatcagcataattactgaaaaataatcttaccataccttatcagaaagctttcactgtaatttaa

SEQ ID NO: 324539 - DNA, 643 bp, Homo sapiens
atccatggatgtggaatccacagattcagaggtctgattgtacatgtttgaagaagcgaggtgagctgtagaaagctcaaggaaagggaacaatgcaacaattggtcattgtgtttctagcacagagtaaaggctctgagtctggctctggatggtaaataggtacattttggtttattcctccacaatgctcctattattccattggtcttcctccattccactgaaactgctcttgggaaagtcaccaacgtccttcacattactaaatgaaatgtccagttctcagttctcaccatatttgacctattagcagcatttgagacaagtgattactccactgacttccaggacacactgttcttgttttccttctaccgcttcagctactccttctcaatccccttcastgccaactttaatccttcctaactttctcataatagagcaccacagtgctcaacccttggccttttcctctgctctgtcctcacatactcatttagtaatcccattgaagctcagtttgtactaagtgtattatcatctttatgaattgtcagtagctttattatatgtatcagcataattactgaaaaataatcttaccataccttatcagaaagctttcactgtaatttaa

SEQ ID NO: 324540 - DNA, 589 bp, Homo sapiens
aataataaaatgtcaagaactgtgcacaaccttctttaacttacctcttccaagaatacaagaaatggcaacttgaactgttcaacaaatatgactgtatcgttgacaactctacccctaagcttagacttaacaggtctttccttcttagataagaaggtattatgctttcgatacctaacactgtgaccacaggtcacggatgggtgacctgtaacccataataactgaatggaagatcctggtatccttcccactggtcataacgcataaaaggaacactgaccactaagtgcctgaaaattttaaaaagctgtaaatcattactgcttgattccaattgtccctgaacttaaattgccattcttcttttctttaatttctttagaattacagtccttgcacttgtcattcctgaatgaaagctttgccttccacaaaatatttaaacatattcttcagtcaacacaayagtctttaataaatttcagcataataagaaaatcagttttctttaaagattatttgctattttatatttttatttttcttttctgctagtgaaactagttaaaaggtttgtgcagct

SEQ ID NO: 324541 - DNA, 559 bp, Homo sapiens
aatgataataacagctgtcatttattacatctgcaccttagtcggatgtgttatgtaaaktatctcatttaatacaaccaacgtgggcagatatgtatttatacttcctcattcttagatgcggaaactaaacttcaaagagttacctaagattacacagctattgattgctggaccaagattccaaaccaggcctgatttcaaaggcccttgcactcagcaacaccacctgttaccagactaaagtcctccttctgtacagatctcaaccatttctgccatgggaaaagctggtaggagagaaaacagactggcaggacttcagattaaacatggtttgtgtttcctaaggaatttaggaattgaatttcctaaggaggctgttagacttacttaaccatgtctctttaaaatgaataaacagcagctgggaaaatacatttcttacagaagtattctatatgcatccgacaaataaaaagaccctcaactccagatgttaatgtaaaattatccagatgctacaaaatgataatccagaatacccgaggcaaaagaa

SEQ ID NO: 324542 - DNA, 531 bp, Homo sapiens
taatcacaattgttgtacagggaaataattctgcctaaaatctgtttctatgacatgtttctgcaaggcaggtgttttgtttttgtttttgttttccctaagtgtatgtttaaaatgtaattttctcatcctgaaactgttttacagtttggtacaagcagcctctctactcaatttattcagttattcagtaggtgaaataattatggtgagtcaaggcaattgctaggaacatagcctgtctcccatcactcccttccacattttytatgtggcaaccacacagttccctagacaagtcactacagttttttttttctctctctctctgtaatcttgtaaccagacttttctgtgctagagatcttttctctgacttatttcctctcttatctaatcccccaaaagcataatgtccattatcccctgcacctaagacagtgtttgccataaagacagtgctcaatatttatttattgaaaaaaatagctaaatgttgaggtctacttactggctacatatacccaagaa

SEQ ID NO: 324543 - DNA, 551 bp, Homo sapiens
cctttgttgtattttcaagtgtacttttgccataatgataatagtacattatctttcctgttaagactgattaactgacacacccttgggtttttccgagtagagatggtggatggcatttaattatccacacagtgtcacacaaactcttgtgaccaacagtaaatacacatttagaaaatgactgattggacctaagtgttccatttatgaagtggaatgattataaggtttgccatcagaagatctggactggacctggaccagagattagtgttgaacatttaccacagtgtgacctcaaatcagttccttcacctccatctgtaaaatgagaataataacaattttggcttgaagcatctccaaggctttggtgaggatcagatggaagaatgcatggcagagtgccttgtaactgacacagcaccatagacaaatagttattgccaatattattgataacacaaacaayagttaatccattaatcctcttccttttgcttgggagtcatattttaactgaaaggcttaaactctacttaggtaac

SEQ ID NO: 324544 - DNA, 449 bp, Homo sapiens
aacttttagaggaataacatgtcttaggaacttggatagcaaaaaacaaaacaaaatcttaaaattgctttaacaattatgcatataagttactattattgtcttgggaagaaatgttggtcagtggatcttctgtattgctattagcttttgggatttagtattgaagggaaaatgtaagttcccttaaaagggaaggtcttttaagaacagctgaaagggaggctacagatgggtygaatgggtggggtgtgtagaggggtgggattaaggaatacaagccttctctaaatgtgggttactttcactgaggtttttatggtcatatttcctattgccatgtagaagcaatgactaaagacactaaaacactagacaaacaaagttatatttagacatcaaaagctcaaaataagctaagagtaaaatgatcaaaagtaatgcaaaaa

SEQ ID NO: 324545 - DNA, 449 bp, Homo sapiens
aacttttagaggaataacatgtcttaggaacttggatagcaaaaaacaaaacaaaatcttaaaattgctttaacaattatgcatataagttactattattgtcttgggaagaaatgttggtcagtggatcttctgtattgctattagcttttgggatttagtattgaagggaaaatgtaagttcccttaaaagggaaggtcttttaagaacagctgaaagggaggctacagatgggttgaatgggtggggtgtgtagaggggygggattaaggaatacaagccttctctaaatgtgggttactttcactgaggtttttatggtcatatttcctattgccatgtagaagcaatgactaaagacactaaaacactagacaaacaaagttatatttagacatcaaaagctcaaaataagctaagagtaaaatgatcaaaagtaatgcaaaaa

SEQ ID NO: 324546 - DNA, 608 bp, Homo sapiens
agcaatttctgaaaaataaataaattacaaaaatataatgcatttgtttgacaagtgcgttgagaaactttatttcacctcattgagtgtggccttttttctccaaaggatgatgcaaaggatgattgtatctgcggttttataactcccaaggtagaaatcattttgcaagacagtgtagtatactcttacctctcacagcgtggtcctgtgtacccgacagggcatccatcacagatcaatccaagactccggtctaaatggcacgttgggctaaagctatgttgatgttgttgcggaaaacagggacaaggaagaaggacatacacaaagtcattagcattttctcatttctctctctccactactgctctgacaaaagagtacaggctggtcattctcaccccagagacagagattagkgtctggccaatggaggatgaaatgacattgctatttctgcagacgtgaatatagcccagtggagagcagtatccctgtgacatgttattaactgacttttgactgctctgagtagtgatcatcagtaacaagtggaaatgtatagctgctttttagaaattcctccaggcctggcacatatgcag

SEQ ID NO: 324547 - DNA, 583 bp, Homo sapiens
cttactcatgtaaaatcctctacaggcctgggtgactgttagggcagctgacctctgtgtgctaaatcagtattccaggcttttttttttttttttttttttttttttttgagacagagtctccctctgtcacccaggctggagtgcaatggcgcgatctcrgctcactgcaacctccacatcccgggttcaagtgattctactgcctcagcctcctgagtagctgggattactgacacgtgccaccatgtctggctaattttggtatttttagtagagatggggtttcaccatgttggtcaggctggtctcgaacaactgacctcgtgatctgcctgcctcagcctcccaaattgctgggattacaggcatgagccaccgtgcccggccccaggctgttttttaatcttctgattgctgagtaagctgcagagagtctcacattggaaattcaatgtttacctcaggaaaaaaaaaaatacatcatttctaccacatttcattggctaaaccaagtcatgtgacacatctaccctccaggattagagaaatgcaatatcccctatagatgagattggaaatt

SEQ ID NO: 324548 - DNA, 610 bp, Homo sapiens
ttcaatattagccttagccaaatgcattatgaagcatatgcttcttggtttggcatgaccttagttccctgttaactaaaataatagctacctgacaactcataaacatatatgtgattacaaacaccttgaattgaaaaaagtgcacgaaagttacatatttcaaactgtagatggatgtgggttgtgtagaacaatagggaaagaaacttaaaactgaattaagctattattttaaaggaacttactacatgggaaaaaacaaacaacaaaaaagactgcagtctaattctcaaaataggacaatggcatctaaggagtatattgaatgacctatgacacttaggtaatccttcttgtcttagttcattcacatgaatgctaaataatttcactcaacactttacatttagagaactcttttcaccttaaaggaattccaaagtatacatctagttgccatatatatatatatatatatatatakagagagagagagagagagagagagagacagagagagagagaaagagagagacagaaagagagagagcagaccacttcatccaatactggaaaatgtccattttgagaaaagaatttttcattt

SEQ ID NO: 324549 - DNA, 635 bp, Homo sapiens
aatattgatttctctgattttacagagcactgtgtgttcagccaatagaacatttcattttctcctgctatttaggaactaatctgtcattgttctcttggctagagaaatatggttttccacaggtaggagtaagtgcaattttagttcactttgaggcaattcttatattactggatggattcgactatatttactagggatgaaaattatatctcttttcaatacaaagagaaagtgaatttagtgagagcggttcattccatttcataagggtctccaaaggcttggccttttccctctttctccatatctactaaggcaaattctcttcagggagattcagatatcaaattgagaaggcactgcaggaaaaaatttacctccattcctggagatggttctrggctaagccattcaatttcctgttcttcagcttcaccccattaagaaaagaagaacacaagtagctgtttcccatgagtacctgttttaattctaccttcagggggaaaaaccagcttgtttgcaagtaatattatagttactatgcaatatataacctaatgtcacaaataacaatatagtgtgcatggtgcacattgcattaaagatttaatgaggcaggaaagttt

SEQ ID NO: 324550 - DNA, 635 bp, Homo sapiens
aatattgatttctctgattttacagagcactgtgtgttcagccaatagaacatttcattttctcctgctatttaggaactaatctgtcattgttctcttggctagagaaatatggttttccacaggtaggagtaagtgcaattttagttcactttgaggcaattcttatattactggatggattcgactatatttactagggatgaaaattatatctcttttcaatacaaagagaaagtgaatttagtgagagcggttcattccatttcataagggtctccaaaggcttggccttttccctctttctccatatctactaaggcaaattctcttcagggagattcagatatcaaattgagaaggcactgcaggaaaaaatttacctccattcctggagatggttctgggctaagccattcamtttcctgttcttcagcttcaccccattaagaaaagaagaacacaagtagctgtttcccatgagtacctgttttaattctaccttcagggggaaaaaccagcttgtttgcaagtaatattatagttactatgcaatatataacctaatgtcacaaataacaatatagtgtgcatggtgcacattgcattaaagatttaatgaggcaggaaagttt

SEQ ID NO: 324551 - DNA, 559 bp, Homo sapiens
tactttttttcttgtcatttatcactatctaacacatgtatattttatgtgcttatctaattaatattctctcttctaactagaatgtaagcktcatgaggtctaagttgtattcactgtttggaaactagaaagtttctggcaagttaatataactggaatcaaaccaccaatcaaatcatcaagtatatgcaggatcaatgaatacatacattgaatattgaatacatacaatgaatacacaaattcaatacatacacacaatgaatacataagaggagcatcagtcaatcaaatgctcctcttaaaattacttttgtaatagttattcctttcagtgtctatcctggatgtctaaaaccatataatggattagctgagagcagtaaagaatccatcaggacagttagagccacagctggagaaaggtgttattgtgcatgaaagattaacgtcatctatttcatacatttttcttatgcctacatttactggactaatcaattacctagaacaggagtctttagagtttggttttacaatattataattaaaaatg

SEQ ID NO: 324552 - DNA, 573 bp, Homo sapiens
catttacttcatgattttggtgttagcgtcataaatttctgaagtttctaagtattttcttcttcagttcaatgatctctcctacttattctcaggagaatcattaagcaaacacttatttctttaattacctttaagtactatgaaatctgatttaatctccacaattgcatttcttaattagacttgatttattttctaagtatgtctttgaacratatatttctctaaacctgtttcccattctgcaaaatggaataatatgattgatttgataaacccttttatactgaaaaagtatgaaagcatattgccataataaattatagatacgacttattaattttttaaaaaactttgccttttttttttttttacaaatttttaaacaaattaagatatgttgatttaacgtgaaaggtatttagttaatagttaaagaattaaatctgcagttttctcatcctgctctagtcccttatattaacatagctgttaatataactgtaactatgtagcataattaacataactcttgccaaacagtgaagatttactgatttttacagtgaa

SEQ ID NO: 324553 - DNA, 582 bp, Homo sapiens
tgtgtatgcttctcttgcagagaatattttggaatccagcaaactaaacaacattaaatcaaacatttaaattaaaagccacagctgaccaaatattattgtatctgtttattttattatcttgaaaggcagctgcttcctaagtgaaagcaaattaaactcagttaagtgaattttttaatttgatggcatgaacccgaaatcgatgtttgaaaacaagtggcttgattttaacccaccttgactagaaagtaaatagctgattctttttttatgactctcatagaaaaatggtaagagatctgcagtggaagtcaggaaatcataaacctagtgtctgcctggtctctggagaagctgtatatctttgttcaagtgacttaatctttcagggtctcagtttccacattccattccayggactctcaacatataaaactgattttaaaaaaaacatccggtttaagaggaaaagagactccctatctgctccatcctacctcctgcccctagcatggaggaaccacaagaacacagggtgaaaaccatctcacacaaaacacatttaatagagtcctgctc

SEQ ID NO: 324554 - DNA, 448 bp, Homo sapiens
tctttctcatagaagctactgctttataaactaggtacaacttcagcagtacatattgaactgtgattgttagtcagctgggagtactactgacaaagttaccaggaatagctccagtgacatttaagttattttttttgtgtgataattgcttcaggaatttctcagtcatgcttggttttttggtagtttgtagttaattacaggttttcttctgttatgacctttagactaatgcatcctagtattaaaataagttaacaaaagaaggataattagttaattagcagtatttgttgaggactwactcctaaaacacacttttccaaggctagataatagttgatgggttagggagggagaaggaaatacataaacattagttctcaattttcacaagttcagcttttaatattgtgaaagagaaccagagctggacagtagttaa

SEQ ID NO: 324555 - DNA, 471 bp, Homo sapiens
tgtccatgtaaaaaattgactaacataatattatttgaactgtaggggttgcaagagataaattcattcaygcatgaaccttttatgccaaaaattctacatctgtaatttagattcaggattaaatgtacacattgaagtccatttgtaaaaatgcccaggaatcaagtctacaagttaatgaagtgaccattcctgtacacaaatgaaaaagaagagggaaatccaaaaccaataaaaatgttaacacaccataaaaatcctttcagggaaaaagaacagaaacttatctctacttgggaaaagcaatataaacaacaacaaaaagtaatccagtaggtatttatggttatactttatacttgtacagggcttcagtgtgataattatacctactgagaggcagaaaagattcaataacaccatttcatagattataaaacagaatcggaaaggctaaatgactgtcaa

SEQ ID NO: 324556 - DNA, 578 bp, Homo sapiens
aaacaaatactgagagtcagacagcacttatagtcaatgacttgtcatatatctgagattgacttgcctcttgtaattcgtgagagaaatttcaacatttttaacaatgcaaaaatattataaacatttgagtgtcttgagctagcactgctttcacattttgaaatataatgatgataatattcattaacatcattgttgaagagaaaatcttatgtgtaaaatgtaataatgtagttgacattgtattaaaaatttcattctcctctttttaaatctggaattcttttttacattcaattaaagaaattttaaattagaaattatattaagacattcaaaaagcacayataacatgcattacccatgcaacctagaggtaacaaaatatttatattttatatttgcctcagatatatttttaaagcaatgatacttagatacaaatgaatctcatttcacttctgttttattccctttcctgtttctctagaggtaactactattctgaaattagtacttaccctacaagtgtatttaaattttttaattataatatatgtattcacaaacaatgt

SEQ ID NO: 324557 - DNA, 571 bp, Homo sapiens
tcaacagttcatggcataactgagcccctgctttgaggaaagcccacatgagaaaataaaaatgtaaaactaattcatcaggcagttatgattcatagagaggaaacacctttccctctgaaagagattccaggaaacgtcagcatcccaagtgagttaacagaccggagcgttggtcatctagcagctcacatcagcaaatgagagacagccaggccttacatgtgggacagaagtatacttgtctggagtagaaaaatgcctactgagaataggcaggaactggaaattagagaagtgggctgggtgtggcctgtggcaaactgtggagtccatagaaagcctcccagcttggcacatggctggaaccaaggggtccgagggcagcccgttaagtgaaaccagaaatctggggaattaggtaaaatcaccaattaaaaaatgatggcaagtgtttcaaaaataaaataatacgcaaagcaaaggaaacacttctgtgggtcagatttggcctgagtrttatcagtttgtgaacttggccttaaatcttgaacgtgaagtatttttgtat

SEQ ID NO: 324558 - DNA, 558 bp, Homo sapiens
gaagaggcgttgaggcatggccggtatgtgtctgtggggtccttcaaaatcttatttatcaagcagttagagtgggctcaggactttgtgtatgtgtttgctctctcaggtgagcctgaaaagatcaggactgcgactcccattttacagagggataacctgaggctcagtgaggtgaaggcagttcaagatccttgacagaggctctggatcactgcgctagaaagtggyggggtggggaaagaccgctgggctttctgacttcagcaacacgttctccagtaaccagacttccgaacagtggcagacggggccctctgcctggcaagcacacaccacaggacctgtcccacagagggcctcccagcccgctctgccaacctcacccacaggcccccaaacttgagagggttgacataggccgtggagacctgtgcgaatgtctgccttccctactccagtcgaccccctgcatcacccagagcaccaggccagggcctggagtcacgctctcctctgcccagcactgccaggaaggcagaaggtgagacacaggag

SEQ ID NO: 324559 - DNA, 558 bp, Homo sapiens
gaagaggcgttgaggcatggccggtatgtgtctgtggggtccttcaaaatcttatttatcaagcagttagagtgggctcaggactttgtgtatgtgtttgctctctcaggtgagcctgaaaagatcaggactgcgactcccattttacagagggataacctgaggctcagtgaggtgaaggcagttcaagatccttgacagaggctctggatcactgcgctagaaagtggcggggtggggaaagaccgctgggctttctgacttcagcaacacgttctccagtaaccagacttccgaacagtggcagacggggccctctgcctggcaagcacacaccacaggacctgtcccacagagggcctcccagcccgctctgccaacctcacccacaggcccccaaacttgagagggttgacataggccrtggagacctgtgcgaatgtctgccttccctactccagtcgaccccctgcatcacccagagcaccaggccagggcctggagtcacgctctcctctgcccagcactgccaggaaggcagaaggtgagacacaggag

SEQ ID NO: 324560 - DNA, 551 bp, Homo sapiens
tcaggtcttggctttaattgggattttccaattgagactaaagtagcctttagtccttgactatttttttttttcaaattatcaaggcaaatccttctctgtgctctatttaattctccatgaattaagagtttyccagtctgtctggtagttttgactgaccatatttgagctttgcacattctttcaccaaccatggcatgtcattcctttccttgccatatgcagtttcctcacatgcataacctgatcagcacactgctaaagatgtaatgcagaagggaccccgtataaatctctagaactctcggtgcaatttaatttcttttgaactttgcagtaacaattgaagttgctttggtctcttcaggctttgagtttggtcttctcaacctaaggagtttgccagaattcagctagattcttcctctctactttgcggattggaaatttattcaaaaaataagctgagacaatcataaagcacagcttttgatttcttttctcccatggatcactgtttttttgctccctaacatacaaaccattat

SEQ ID NO: 324561 - DNA, 576 bp, Homo sapiens
tgcaggtctaaatccaagctaaatgtgaaatggaatcatcttagtccatttgagctcctataacaaaaatatcatagactcggtggcttataaacaacagaaatttacttctcasagttctggaagttgagaagtctaaaatcaggtgccagcagatatggtatcttgtgagagcccatttcctggtacataaacatctatcttcttgctgtcatttcacatgatgaaagggctaaggacatcctttgaggtctcttttataagggcactaagccctatcacaaggtctccaccctcatgatctaatcacctttcaaaggccctacctcttactatcatcatattgggattatgctttaacatataaatttggggggaactcagtcattcagtctgtagcagagaaacctttctttgacatcatccttgacttatctctggatatttctcttttattttatgtttgattccacgcttcacttgaaagaaagactaaattaatggataaccatgtatttaatttcatacatttctgttcttctaaataaacagtaaaaatcatctccaaacaagact

SEQ ID NO: 324562 - DNA, 576 bp, Homo sapiens
tgcaggtctaaatccaagctaaatgtgaaatggaatcatcttagtccatttgagctcctataacaaaaatatcatagactcggtggcttataaacaacagaaatttacttctcagagttctggaagttgagaagtctaaaatcaggtgccagcagatatggtatcttgtgagagcccatttcctggtacataaacatctatcttcttgctgtcatttcacatgatgaaagggctaaggacatcctttgaggtctcttttataagggcactaagccctatcacaaggtctccaccctcatgatctaatcacctttcaaaggccctacctcttactatcatcatattgggattatgctttaacatataaatttggggggaactcagtcattcagtctgtagcagrgaaacctttctttgacatcatccttgacttatctctggatatttctcttttattttatgtttgattccacgcttcacttgaaagaaagactaaattaatggataaccatgtatttaatttcatacatttctgttcttctaaataaacagtaaaaatcatctccaaacaagact

SEQ ID NO: 324563 - DNA, 568 bp, Homo sapiens
tgatactcagtagttaaaatatacttaagtacccaaatgtgtgtatgtatatgcatatatataagtttttttttttttttttttgagatgcagtttcactcttgttgcccaggctggagtctaatggcataatctcagctcactgcagtatctgcctcccaggttcaagaatttcttctgcctcagccttccaagtagctgggattacaggtgcccaacmccaggcccagttaaattttggtatttttagtgcagatggggtttcaccatgttggccaggccagttttgaactcctggcctcaggtgatctgcccgcctcagcctcccaaaatgttgggattacaggcatgagccaccactcccggtcatatatataagttttaaatgtggcaccccaaatgccactcatttaaaggaagattaatggtcccaacttacctcataacatagctaactaagtaataaaatatatgaagtacatatgatagttaccctttaaactttgatttctgaaaatagagcatgtataataaaacaatgcatatatagcattcatggaaactcatc

SEQ ID NO: 324564 - DNA, 597 bp, Homo sapiens
catgtgttctcatcatataactctcacttataagtgagaacacgcagtatttgtttttctgttcttgcattagcttgctgaggataatggcctccattattcctaatcccccrtgtcgttgtaaaagacgtgatctcattcttttttatgcctgcatagtattacacaaaatatattttttatttcaaactaattaaaaacaaaaatatatatttatttttatatttatttagttaccttcctcagtgccctttatttctgcatttaaattctagttacttgccagcatcctttcatttcagtctgaagagctttctttagtgtttcttgtatgacaagttcggtagtaatgaattctttgtttcctccttcatttttaaaggatagttttgctggatttaaattttttaattaaaagtctttttaaaaatttcctctgtcttctatgctttctgatgagaaatcagctgataatattattcagaatcccttgtttgtgataagccacttctatcttgctgctttcaagactatctgtgtctttggctttagagagttttattataatgtaccttggcatagatatctacaaattat

SEQ ID NO: 324565 - DNA, 669 bp, Homo sapiens
cagatccatgtcactgttcctataaataaaatcataaaagattttatattaccatataacaaacttatattttattgcttaagcgttttaggaatttatctataacttcattttatagtcaccagggatataaggtatacataacatcaaaatataagcaatttagtataaatattttgtaatattttatagatttcaataacagaatatgataaataattgctatttgtctgagatatagaaaattattatcaatttatttccctgtttgaaaatatacaaaatgtgacagtaagtagtctcactgtccttgcttcaataataatgtttctgtaactgagtctttgaaaagcttaaaaataggcacattttataatagcaatgttttatgaaaaaataatacttatgattacatatactctttgttcacaaagttcttgctttgcttggtgattctgttatggctactcacataggatgtttcctgagtgctttgatatgttttctcatgtcataaaaataacaataaaaatacatgttgccgtaacagtgttatggcaagacatttttgcaaagcagtgtgaacaatttataaatgccattatgtgattaagyagtaaggcacaacaggttatattacattgtgaagttctataataggtgctaaaa

SEQ ID NO: 324566 - DNA, 499 bp, Homo sapiens
tttagtttacccacagttccacgtggctggaactgtgagtaatacagttatgggctaatacattgtgaaaacggactaatacagtggacaagtcctcttttctctaagttatttttattttagattactttgttatattagtttgaattgttaactgcttggttcatagaagtcaatgtgacttgctctggccaataaaaagtgactgagggtaaaattcctttcagaaatgttgctttgaaaatcagcatagtgttcattgtgttatttttctttccgtgttctaagaatattaatatyccagagatttttttctgtcaaattagttctgggctaaagacaacatggagcaagccctaagccaatccattatgaatacgtagcatgtgagcaagaattaagcctttgttattgtaaggtactgagatttgtaggtttttggttgctgcagcacatcgtttactctctggctaatttaagaagattatttttaaacctg

SEQ ID NO: 324567 - DNA, 576 bp, Homo sapiens
attttcagcaatgaacagatcatccagacaaaaaatcaataaaaatcaaarttaaactacattgtagatcaaatgacataacagacatatacagaattccatccaacaggtacagaatacacatacttctcaactgcacataaaacattttctgggatagattgatcacaatttaggccatagagcagatataaacaaaattaagaaaatttaattatatcaaatatacttttggccacaataatataaaacaataagtaacaggagaaacatgggaaaattcacaaatacatgaaaattaaatagcatgcttctaaaaaacaaataggtcactcaaaactgcacaactacatcgaaactgaacaacctgctactgaatgactactgtgtaaataatgaaatgaaggcaaaaataaagatgttctttgaaaccaaagagaacaaagacataacataccagaatctctaggacacatttaaagcaatgtgcagaaggaaatttctagcactgatgcccacaagagaaaacaggaaagatctaaaattgatatcctaatatcacaattaaaagaacta

SEQ ID NO: 324568 - DNA, 469 bp, Homo sapiens
tttgaagcaaaaatgtcatgatgtttaaaaaaagatcctaacatatgtgttatagttaatgggaaagagagaaattacagtaggaataaaaatatttactggaaaagagataaatttataataggaatacaaataaattgattcagtgattgaaaaatcggggacaaatgtatatgtttatatattggaaactatttcttaaattatgtagattatataaaaagcccagcttccatagcaagttatgactgcatgtatagggaagatattactaaaaataaagtctaaaattattttaaaattttatcatattattcaaaaattgatatctctttcaatacatccaactttaattttatatkataattacttatatagttttgtgtttaaccaatattaattttccctggtagcttttggataacaacatttctctttggcttttttattttgatttatcttattgtta

SEQ ID NO: 324569 - DNA, 571 bp, Homo sapiens
atatttactggaaaagagataaatttataataggaatacaaataaattgattcagtgattgaaaaatcggggacaaatgtatatgtttatatattggaaactatttcttaaattatgtagattatataaaaagcccagcttccatagcaagttatgactgcatgtatagggaagatattactaaaaataaagtctaaaattattttaaaattttatcatattattcaaaaattgatatctctttcaatacatccaactttaattttatatgataattayttatatagttttgtgtttaaccaatattaattttccctggtagcttttggataacaacatttctctttggcttttttattttgatttatcttattgttagctgaggaacgcctttaattaattttttttaaggacacggttattttagtttctgaccactaaaatatttgaggatatctttctcttcctttcataaagggagtcattatttagacttcatattcacagatttacatgtgaaacagtgaatcatcttattctgttacccttattctgagatcataggttcata

SEQ ID NO: 324570 - DNA, 609 bp, Homo sapiens
tttgaaatctatactataaatttgaataatacataataaacaaaaacaaaatcatttaaagttacaataatcctatatcataagtaaaacaatattaacaatacaaagaaaaacactgaatcagaattttggatatatgtcatggtttcataatttagaaataatgtaccctgagaatactggcaaccaagaactagaaatatgaactatccaggtctcattatctttgggaggaaaatgctttttttctaaatgctaagtgaatttatggtgttgatttctctgtaaagaatgtttttcaatatcctctggagmagttacataaagaataaaaattggctttatgtggccatttcttgtatcaattgccaataaaattcatggatatacaattacattacatttctgtggaagcacatctcctagcagttaaagaaatatagtcaagttacataggctttaggatatatactggagagagtaagattagagacctatcaaggtgaatcatcatactgtcatttggacatctgtctcacatgtcacttttaaatgtctctgattagagatatggcaggtttttgacaacttatgtctctatccaacacc

SEQ ID NO: 324571 - DNA, 587 bp, Homo sapiens
tgcattctaattgacgtagtaagtattggaagatgggaactttaagaggtaattaggtaatatggaatctgtattcaggacagattaatgttatgaacacacaggagtaagttggttattgtgggagtgggaaactgatgaaagggggaggtctagccctcagtttccctctctcacatgcctactactgcattataccttccaccatgagacgacccttgctagatgctggtatcatgctttagaatcccaaccttcagaactgccagccaaaccagagccatggragcgaagccaatgcagagagaccctactaggttaatgcctagtgaaaatgtggatttgaagtttccagagagattccccagtagggcaatgcctagtgaagctgtggcagtgagacagcccctaggaacccagagccagtatgtaactccaacccgagagagctgaagcatgaactgagcccaggaaaaccacaggagtggggctgtctgaggcactgggagcccattctgcccagtgtgcctaggttgtgggacaggaagttaaaggagataattccccagctttaaaacttaatgttg

SEQ ID NO: 324572 - DNA, 480 bp, Homo sapiens
ttctcagaactttattttccttctgttagttagggtaaacaatcctagctgctagataaagcccagagattcagttacttttatttagaaataaaatttatgtcttaattccataagcatccattgaaggttgwttctgtgtgtgtgtgtgtgtgtgtgtgtgtgtgtgtgtgtgtgtgagagagagagagagagagagagagaagaaagaagaaagtaaagtagctatggagctatggagcaggtgggaacattatgtcttcgtactcattcagagggccagcttccattggacatttatttatacgtggctttaaggttttcctaccattatcaagaataaagaagggcaaaaagagaggataaagaaggcaggcatatctgctctccattgttctgaaatgcaattgatctagatcacttaccttaaatttttggggggatacctattcatttggcatcagctagatgcaaaagggc

SEQ ID NO: 324573 - DNA, 480 bp, Homo sapiens
ttctcagaactttattttccttctgttagttagggtaaacaatcctagctgctagataaagcccagagattcagttacttttatttagaaataaaatttatgtcttaattccataagcatccattgaaggttgtttctstgtgtgtgtgtgtgtgtgtgtgtgtgtgtgtgtgtgtgtgagagagagagagagagagagagagaagaaagaagaaagtaaagtagctatggagctatggagcaggtgggaacattatgtcttcgtactcattcagagggccagcttccattggacatttatttatacgtggctttaaggttttcctaccattatcaagaataaagaagggcaaaaagagaggataaagaaggcaggcatatctgctctccattgttctgaaatgcaattgatctagatcacttaccttaaatttttggggggatacctattcatttggcatcagctagatgcaaaagggc

SEQ ID NO: 324574 - DNA, 621 bp, Homo sapiens
acatttctatgtccttataattctctttttgcttagtctaagccaggggtsttctgatgctttcaaagaacattctaatcccatcctaagcagttgtggtctgactcccagttccagacatcagccgccgcacttctaacttttggtttcaccagttttctggcttgcctttatcttccctgcgacacataaatagtccaggggaacatggtactttacagtcgcagttcattactgtctcatttgcaggaaactgttcttccacacagcacttttgtttccctcaccaatggctaaatctctgagccacctgaaaaatgttaaattcagacattgtgcactctctccacatcagttctcccttcatatttcttgtccatttgctttcactacaactgacttttgtttttcacttcttcttgtttccctcccccatctcctcctctttgttcatcttcatcttcatctttgtcttcttctaagtagcaggatctctgttccttttctctgcttgctttctacagaataaaactctttgtcttcaatttattcacttatgtgaactgggccaccatttaaaccactctctgcccaaaatcacctaactgttcccccatgaac

SEQ ID NO: 324575 - DNA, 621 bp, Homo sapiens
acatttctatgtccttataattctctttttgcttagtctaagccaggggtgttctgatgctttcaaagaacattctaatcccatcctaagcagttgtkgtctgactcccagttccagacatcagccgccgcacttctaacttttggtttcaccagttttctggcttgcctttatcttccctgcgacacataaatagtccaggggaacatggtactttacagtcgcagttcattactgtctcatttgcaggaaactgttcttccacacagcacttttgtttccctcaccaatggctaaatctctgagccacctgaaaaatgttaaattcagacattgtgcactctctccacatcagttctcccttcatatttcttgtccatttgctttcactacaactgacttttgtttttcacttcttcttgtttccctcccccatctcctcctctttgttcatcttcatcttcatctttgtcttcttctaagtagcaggatctctgttccttttctctgcttgctttctacagaataaaactctttgtcttcaatttattcacttatgtgaactgggccaccatttaaaccactctctgcccaaaatcacctaactgttcccccatgaac

SEQ ID NO: 324576 - DNA, 621 bp, Homo sapiens
acatttctatgtccttataattctctttttgcttagtctaagccaggggtgttctgatgctttcaaagaacattctaatcccatcctaagcagttgtggtctgactcccagttccagacatcagccgccgcacttctaacttttggtttcaccagttttctggcttgcctttatcttccctgcgacacataaatagtccaggggaacatggtactttacagtcgcagttcattactgtctcatttgcaggaaactgttcttccacacagcacttttgttwccctcaccaatggctaaatctctgagccacctgaaaaatgttaaattcagacattgtgcactctctccacatcagttctcccttcatatttcttgtccatttgctttcactacaactgacttttgtttttcacttcttcttgtttccctcccccatctcctcctctttgttcatcttcatcttcatctttgtcttcttctaagtagcaggatctctgttccttttctctgcttgctttctacagaataaaactctttgtcttcaatttattcacttatgtgaactgggccaccatttaaaccactctctgcccaaaatcacctaactgttcccccatgaac

SEQ ID NO: 324577 - DNA, 621 bp, Homo sapiens
acatttctatgtccttataattctctttttgcttagtctaagccaggggtgttctgatgctttcaaagaacattctaatcccatcctaagcagttgtggtctgactcccagttccagacatcagccgccgcacttctaacttttggtttcaccagttttctggcttgcctttatcttccctgcgacacataaatagtccaggggaacatggtactttacagtcgcagttcattactgtctcatttgcaggaaactgttcttccacacagcacttttgtttccctcaccaatggctaaatctctgagccacctgaaaaatgttaaattcagacattgtgcactctctccacatcagttctcccttcatatttcttgtccatttgctttcactacaactgacttttgtttttcrcttcttcttgtttccctcccccatctcctcctctttgttcatcttcatcttcatctttgtcttcttctaagtagcaggatctctgttccttttctctgcttgctttctacagaataaaactctttgtcttcaatttattcacttatgtgaactgggccaccatttaaaccactctctgcccaaaatcacctaactgttcccccatgaac

SEQ ID NO: 324578 - DNA, 571 bp, Homo sapiens
gaataaaggttaaaagatggcattatttgaatctatgttttcttcttttttttttttttttacttttccgttctcttgaaatattgttattaaaagccyacaatcactttcatctggtcaactaccaatacctgacaatattatttttaaagcaatatttttaaaaaaatctacaatcactttcttactgataatttctccacctttcatagtctggcatcagtctccaccatttcaagaaaattgccttcatcagtttcacccaggacctctttgatattaaatataatggatcactcacagtttcattttcctttaactatctgtgatatttcaaattgttaattcttcaattcttcttttttctttaaattctatctccttggtttctatgacagcacactctgacgtccagttctcaaagtattttgctggcttctctaatatcaggctatcactcaaataatgacgtttctgattctcctttttttggattctctctcacttttttttaaactattttaagttctggcatacatgtgctcaatgtgcacatgtgttggttgcatag

SEQ ID NO: 324579 - DNA, 571 bp, Homo sapiens
gaataaaggttaaaagatggcattatttgaatctatgttttcttcttttttttttttttttacttttccgttctcttgaaatattgttattaaaagcctacaatcactttcatctggtcaactaccaatacctgacaatattatttttaaagcaatattttwaaaaaaatctacaatcactttcttactgataatttctccacctttcatagtctggcatcagtctccaccatttcaagaaaattgccttcatcagtttcacccaggacctctttgatattaaatataatggatcactcacagtttcattttcctttaactatctgtgatatttcaaattgttaattcttcaattcttcttttttctttaaattctatctccttggtttctatgacagcacactctgacgtccagttctcaaagtattttgctggcttctctaatatcaggctatcactcaaataatgacgtttctgattctcctttttttggattctctctcacttttttttaaactattttaagttctggcatacatgtgctcaatgtgcacatgtgttggttgcatag

SEQ ID NO: 324580 - DNA, 571 bp, Homo sapiens
gaataaaggttaaaagatggcattatttgaatctatgttttcttcttttttttttttttttacttttccgttctcttgaaatattgttattaaaagcctacaatcactttcatctggtcaactaccaatacctgacaatattatttttaaagcaatatttttaaaaaaatctacaatcactttcttactgataatttctccacctttcatagtctggcatcagtctccaccayttcaagaaaattgccttcatcagtttcacccaggacctctttgatattaaatataatggatcactcacagtttcattttcctttaactatctgtgatatttcaaattgttaattcttcaattcttcttttttctttaaattctatctccttggtttctatgacagcacactctgacgtccagttctcaaagtattttgctggcttctctaatatcaggctatcactcaaataatgacgtttctgattctcctttttttggattctctctcacttttttttaaactattttaagttctggcatacatgtgctcaatgtgcacatgtgttggttgcatag

SEQ ID NO: 324581 - DNA, 563 bp, Homo sapiens
gcagctgctcaggcacacatggagccccaagagatttagaaatctgggattcccagcaaaggcagctacaactctggcaaagcaggaggttagaaccctgtacatactcttaggaaaggagctgaatccaggtggctaagcaagaggttaaaaccccatacatactcctaggaaaggacttgaatccaggtggctgagtagcaatcatctgcaagctccatttccatggcatttcacagggtaaaacctactggtttggaactccagtcaaccaccagtagcagtcttacacctccctgagacagagctcccagaagaaggggtagtctaccatctttgctgttttgcaggcttagacattattgctttcattgcaaccactctatggcttgatccatcacaatcwagtaggctttaaggctgggatacaaggttgtttccacatatgcaaatcagtaaaagtgattcaccacataaacagaactaaagacaaaaaaaccacatgatcatctcaatagatgcagaaaagggttttgataaaattcaacatcccttcatgttaa

SEQ ID NO: 324582 - DNA, 524 bp, Homo sapiens
gcagattggaaaaagaaaatgtggtacatacacaccatgcaatactatgcaaccataagaaagaatatcatgttatttacaagaacttagttaaatctggaggccattatccttagcaaactaatgcagaaacagaaaatgaaataccacatgttctcacttataagtgggaactaaatgatgagagcacatgaacacaaaaaggggaacaacagacactaaagcctacttgaggatggagggtgggaggaggtagaggatcagaaaaaataactatttggtactaggcttactacctggctgactaaataatctgtacaccaaacctgtgagtcacaagtttacctatataacaaacctgcacatgtacsctgaacctaaaataaaagtttaaaaaattaaaatatgaatttcaaaagaaattatataaatagagcagacaatcctctgtagatctggaaccatttgatggctgctacgtatatgaaattgcctgaatcatatttgctttacttagacataaa

SEQ ID NO: 324583 - DNA, 596 bp, Homo sapiens
gatatgtttttatgagtacagcataattgacaatttttaaattttacttccttataattcaatccttttcttggttcactttttaaaaaattcttacctattgtttgaaattctttcaagtgatgatttaccctgtctgttgaactctgtggcagttttgcatatggtggctcttcagtgtgcttttcaataattattagcataggaattaaaatgacaattgggctggaaggaaaatattgatggccatcatttgcatttcagacacaactgttgaaggtacaatctttaaaatgaaacttcatccctaaggctagaaaatatgagattattcttttaattctcaccaaggatatagtttattttctcatcagctcatggatctttgctctgccacaagctctgtaagtatatcagtgattaagtgaaacagccaatgataaaagtatagcattgactgctggaggccattgctatttccctccgcctcccccttggactacaacattgarctattgattcattattaatagctttttagcctcaaagcaaacttttactgttacattgctgtattctgaagatggcaaaaacaa

SEQ ID NO: 324584 - DNA, 590 bp, Homo sapiens
gtacaagtttgataaagaagcaaggcccaacagtgtgctgtcttcataagacctatctcacaggcaatgacacccagatgctcaaagtaaaggggtggggaaagatctgtcaatctaagagaaaacaacagagtaggagttgctattctcgtttcagacaaaacagactttaaagcaagtacgatttgaaaggaaagtgaaaggcattacatattgatgaagagctcaattcaacaagaagacttaattatccaaaatatatatgcacttgacactggattcataaaacaggtttttagagacttatgaagagatttagacaaccacacacttttgttttgtatagtgctgaaagaaatcagagacaacacaaacaaactgaaaaacattctgtgataatggataggaagaatcaatattattaaaatggccatactgcccaaagaaatttatagattcaatgctcttgctatcaaactactcatatattttttcayagcattagataaaactattacaaaatttacatgaaaccaaaaaatagcccagatattcaaagcactcctacacaaaaggaacaaagccagagg

SEQ ID NO: 324585 - DNA, 550 bp, Homo sapiens
aaacatttcttagaaaatagactgagtttccaaaaggtacagaggaatatagaatataaatgtgtcagaaaataataatgagatagttttacttctaggggaataattatccaaattataaatgagtctcaatatatttcagaaaaatattctgaaaattataggacaaacatctcacccatttyaggactggtgtggtgaggctgcagcatttctctatttattcttctgatctcaggccacttcactgattaaactttcttcaagaaagaaaaatttctctactttcttggtcaataactatttaccaagtcttttgagggaacaggcaaatcaactttgatgtaaagagagcttgttccatctttggaaaggggcaaataaagatgatggaatcattgtcaagcttcttatggctgctagtgataatgtcagaagttcttaatatgaacagcatattaaattttcaatatgccattgagtgtgttagatgtaacataaattatcttgccaactttatctcatttaaagttctttgacaccaatgctc

SEQ ID NO: 324586 - DNA, 512 bp, Homo sapiens
tgttagatgtaacataaattatcttgccaactttatctcatttaaagttctttgacaccaatgctcaatgacaaagtacatctcactatgaaccagactgatctattttgtttaccctttattttttaaattcttcatcttgattttgtcaggcttgttttygccatctgtctgttacttgaaggacattggtagctgtaaggtcatcatcttctcacagatatgcctggactgacatgcactgctcacaagctgaagcactgtcttcttcagggatccaggtggagtggcagatttattaccctttccctggaggagtctgcttcaaagtggaaatgaacttgggagctcaaaatgtccagcacaccaaaaacatttgccttacattgacaacagcaataaagcattttctccttttaacaaaaacatcaggaaaatgtagcatttgcattacagtaacacattccctgaaatatctcttcatcagacagacttgctttctctgtcatttg

SEQ ID NO: 324587 - DNA, 563 bp, Homo sapiens
gttttcgccatctgtctgttacttgaaggacattggtagctgtaaggtcatcatcttctcacagatatgcctggactgacatgcactgctcacaagctgaagcactgtcttcttcagggatccaggtggagtggcagatttattaccctttccctggaggagtctgcttcaaagtggaaatgaacttgggagctcaaaatgtccagcacaccaaaaacatttgccttacattgacaacagcaataaagcattttctccttttaacaaaaacatcaggaaaatgtagcatttgcattacagtaacacattccctgaaatatctyttcatcagacagacttgctttctctgtcatttgcccatctttgtaattgctgtgtctgaatttttttttcctatgaacttagcagttacattaaatgaaaaaagagttgacatttactcccacaatgctttttcaaagactgatgactaacagcatggaagaaatatgtactttatcatgattgtttcaaggaagaattccaatatgatatttcattagttttagtagtgcaattatgat

SEQ ID NO: 324588 - DNA, 563 bp, Homo sapiens
gttttcgccatctgtctgttacttgaaggacattggtagctgtaaggtcatcatcttctcacagatatgcctggactgacatgcactgctcacaagctgaagcactgtcttcttcagggatccaggtggagtggcagatttattaccctttccctggaggagtctgcttcaaagtggaaatgaacttgggagctcaaaatgtccagcacaccaaaaacatttgccttacattgacaacagcaataaagcattttctccttttaacaaaaacatcaggaaaatgtagcatttgcattacagtaacacattccctgaaatatctcttcatcagacagacttgctttctctgtcatttgcccatctttgtaattgctrtgtctgaatttttttttcctatgaacttagcagttacattaaatgaaaaaagagttgacatttactcccacaatgctttttcaaagactgatgactaacagcatggaagaaatatgtactttatcatgattgtttcaaggaagaattccaatatgatatttcattagttttagtagtgcaattatgat

SEQ ID NO: 324589 - DNA, 622 bp, Homo sapiens
cagaatacctacatccgctatagttaaaaaaaatgaaatgtataaatgattatccagtcagatttggattgtgtaaccagccactaccaacagctattgtgctgaattcttagtgtattaattttttagggctgccacataaattaccacaaatcaaaaggcttaaacaacaaaaatttgttttctcatatttctggaggctagaagtgtgcaatctaggtgtcaacagaaccatgccctttatgaagactttagggtccttccttgcctcttattatctgctagtagccaggaatcctcagcctttcttggcttgtaaatgcattacttacctctgtcttcataggattctcctctatgtcttcacataaccttccctgtgtgtatgtcyctgtgtccaaattaacttcatttcataagggcaccagtcattggatttagggtccacctttaatccaatatgttctcattttaacttgattacatctgttttcggcaaaacactattttcaaataagttctcattctgaggttcaagtagaatgaattttgaggtggcactcttcaaaccagtgcatgagctaagtaggaggaaacagtaaagctactaataatttatttt

SEQ ID NO: 324590 - DNA, 604 bp, Homo sapiens
taattctaatatttgctcttcttagtttcatttgataaagtgcttcattgatcatgacttcaaaaacaatatgaaatcaaaatgaggaatggcttatccaagatggctggcccacgggctgattgattgtctaatctttgaggaaaggaaattattgagtgtcctaattatagtcacaaggctttaagcctttgacatatatagtttttcccatttgaggcactgtctagttactgactcactgcatcaagaagtcagtgacaatctgttctacccagagacttaataatctggacactgtcttgagataacatttttcctttacttrctgaaaaattgtttttttattaattttctaaatcatttaatttttttgaaaaaaatttaatactatggaagagttgacaatagtcattcccttctccatacatcttcagccctcttctcttctagataagagttaatttcaataactgaaaatcaaatcacatctataagcattgtttactacagagccaattagtttttttaaattatgttttcttcttcaaaatttttatatcacaatacctgtttcacataaacaaaatgattcagggtaagt

SEQ ID NO: 324591 - DNA, 551 bp, Homo sapiens
atttggtctgttcagactttggctttccttggcagccctgacagaaattcaaactttaagcagcctgagaaaagcataagcagcaatttgcagttcaatctggaagtagattagagattgctgggaaaaaaaaaaaaaaactccttctttaagacttgctcatattaagacaaaaagattaggtcacttataaacttttggttctgattttttttcagtgtatatwcaatcttaaaggcaatggcctgattaattgggtgtggctttcttttttctatttgtcccctttttcaccctatagccatttctcatctttattcaacaaaacatggactaaaaatgtggcttttgtactgtgcctagatgtattcctgtttcatttcctaaggagtggaagaattttgaaagcatttgatatactttcctttctcttcctgtcataaatgcaatcatacccattatgaactaaatatttgtgtccctctaaaattcatgtgttgaaccccaaccccatgtgtgaggtaattaaggttaaatgagatcataaggct

SEQ ID NO: 324592 - DNA, 602 bp, Homo sapiens
gtagtttaagtttgaacaagttatacaactgcttttttattcaagatattttaatagcttgttcacaatatagaaataaacagtacaccattgtacctcagcaataaagaattttaagagagtacaaaataaatatgcaacaaaattaaattataaaaacttattgactctaggaatgttcacaataattcatcaatattgctggaatgtagaaatgcaagtcatgaaatgtctcaattttagtgttattatctcaggtttatcattgttgctggtaaatagttacataaaaataaattttatctaggaatacaaagaaaattagaatacattttggcacaaatttccacagggaaaaaagaaagcaatataacagtcttaattcaaattcaaagaaggttggaattgatataagtttccaagttttctccagcaagcatcacttctggactgggagtatggaagagaayaaggtaaagactattaaaatgtttaattataattcactgggttaagtgttcattattcaaggaaaactgaaaaccatcatttatgctgcattttcttctttcatcttcctggcttgcatataaacttagtct

SEQ ID NO: 324593 - DNA, 578 bp, Homo sapiens
gtagccatataaatttacttattctgtaatgcatcataagttgtgtgtgatcatattgacaaaagatattttctgtaagtagaaaagagctgaaggcccatagtctacagtaaagtggatgagataaacattaatttgttttgacaagaaatattatattgcatcagagcagctctacaaaaggtatattgctgtttacattgagactgcctctcataattaggtggtgatgaatgtgtcaataataaccaagtgaaactaaggacacattatcaaatacatatgtctaagatcgcaatatcttagtcaaatggcatctcatgagtataactcatcaaatacaaacgataaaatgtcaaagaactaaatatccataacataaatatccccaaattttcctgactgaacaaattcctctagamgtgtaatacactcttgattttcttcttttgcttgtttttgatttgctaatcaaatcatgttttcctttcaataatgaacacactgaatgtacacttaacacaggaatctaagacaactttttttttctaacatctcctatagccccattcccccac

SEQ ID NO: 324594 - DNA, 488 bp, Homo sapiens
aagcttgacgtggaggtttggagctatgcttataatagttcaagtgtagtcatcgttttcatactgttatcccataaactgtatacctactggctagatacaaattcctggacacctgcatctctcctaaagaacactgcttatctccttgcagttaattttgaatgtgctttcttcctcagagtctttaartaaataaacatatttgacgtacacagacagtttcagggcccagattttcttttagtccttttctactatttacatttctcacaataattttcataaagaagggacttatgccaaaataccaattttcttttagtaattttcctcagggaatgaaataggataatgaagagaaaggagatgatattgtggagactggtttaaatgtatctgtttaaaaaaaaggctaaatttagacaaattataagaaaaaatctatcagcagtttaggaagatgatgattataaacaaccaattgg

SEQ ID NO: 324595 - DNA, 607 bp, Homo sapiens
gactagtattagtcatattatccgtggacaaatagttgtggtttaagcatggactgtggtgctaaactttttgggttcaaatctcagttctctcttactagcagctttgtgaccttgggcatgttacttaactatgactctaggcctcagtcttcctacctacaaaatgggaataatagtggcaccgaattcataggactcgtgtgamctttttaaaaaatattatttcaatagtttgggaggaacaggtaggtggtgtttggttacatggataagttattcagtggtgatttctgagattttggtgcatccatcacttgagcagtgtacactgtacccaatgtagagtcttttatccctcaccctactcccacccttccccctgagtccccagagcccattacatcattcctatgcctttgcatcctcatagcttagctcccccttataagtgagaacatatgatgtttggttttccattcctgagttacttcccttagaataatggtctccacctccacccaggttgtcgtgaatgccattattttgttccttcttatggctgagtagtattccatggtgtgtgtgtgtgtgtgtgtgtgtgtat

SEQ ID NO: 324596 - DNA, 522 bp, Homo sapiens
tgaaattaatattccaaaaggaagtctgtggttgtttttagtggccttctgaaaaatgtggaatagcttatgaccccacctaaagtttgccacaaatgcataagtacctgttacaaatatctaaatggaagaaagctatacatttttctcatttcactgagaactggctgagtattatgaggccaaatcatacattaaataatcagtcctggcaatgaggtctttgataaagtgatgatgctctttcctggctaacctctagtgcctaacaggttctgtgtaactctgttctagtagcctgacattttctacttgttgaaacataccagtggctgggcgcagtggctcatgcctgtaatcccagctactggggaggctgaggaaggaaaatctcttgaacctgagagggagcgagggarggagataccagaacacagaatttgatgggtgagggaaagatgagcttcatggtacccaaaaggccaaaagaagtgtctaagagatgtttgatcatactcttaa

SEQ ID NO: 324597 - DNA, 484 bp, Homo sapiens
gaacagagcagtaaatctatgctcatatcttctgagatagctcttaatattacaatttctctctgtggattgaacttatattactttccctataacttctatgtactgagtggattctgcccttcttggccatctagatctttcacaagacaggcctttcaaatatatgagacatgtcatcctccactcttctctcctctaggctaaatatcctgtttcttcagcttctcctctaggctaaatatcctcagctgtcccacatgtggtgtgatttttcagttccttcattaccttggatgcccttctcggaagacatcactgctctggttctataaacccacacggctaacatggaaggggagcagtttytggaatggaaggttattgacatattaagcgatctcccccaaaaatggttccaaagtctgggactaaaccagaaccctgtaatgctctttgccacaaactgattggtgaccaagtc

SEQ ID NO: 324598 - DNA, 542 bp, Homo sapiens
gcatttgccaaaaccagagcatatcatcctctgcatcatagtgggttttttttttcccacttatctgtctctccatctagatctgtggttctctactccctgtaaaataaattagagtcattgttttttaaaaaaaatgctaatgcctattaaacaaaaatctcttgaggtggatctgggcatcagagttttttaagtttcccccaaataattctagtgggcagccagcggtgggcgccactgagccagacggtctttgttgccagtgcacagggaacaatmctcagtgtctgttacacaaatgagtctctgatcattccactttggtctgcagggcaaaaactctacagagagggcatggagaggaagagatgggtcttgaagaagaaacttgcactagggaggacccacacctcccccctgactccagctccctctggtacaaaaccccaaagctgagctgtgggcccagccccacccacatgcaactctgcgctgttggaaaggcttggaagtcaaacagcaatctactcctcttcatg

SEQ ID NO: 324599 - DNA, 542 bp, Homo sapiens
gcatttgccaaaaccagagcatatcatcctctgcatcatagtgggttttttttttcccacttatctgtctctccatctagatctgtggttctctactccctgtaaaataaattagagtcattgttttttaaaaaaaatgctaatgcctattaaacaaaaatctcttgaggtggatctgggcatcagagttttttaagtttcccccaaataattctagtgggcagccagcggtgggcgccactgagccagacggtctttgttgccagtgcacagggaacaatcctcagtgtctgttacacaaatgagtctctgatcattccactttggtctgcagggcaaaaactctacagagagggcatggagaggaagagatgggtcttgaagaagaaacttgcmctagggaggacccacacctcccccctgactccagctccctctggtacaaaaccccaaagctgagctgtgggcccagccccacccacatgcaactctgcgctgttggaaaggcttggaagtcaaacagcaatctactcctcttcatg

SEQ ID NO: 324600 - DNA, 596 bp, Homo sapiens
gtagaaatgcctgtgaatgtttaaaagcattatatagactctatttcagaattgtgttgactaataaaaaatgctagttttccctaccccacacctatctttcaactgctttrtatttatttctttattagatagaaaattcctcagtaaacttttatttagagtaattcctctttatgatttttttgttctaaaggtcgattcttaaaagaaaacttgttgaagtgctctaaatggaagtctttttttttatttctctcctgtgtcttttatgatagtatctgacaactatattttttttgtttttgcagagattgggttttgctctgttgccaggcttgtctcaaactcctggcctcaagcgatcctcctgccacagcctcctgagtagctgtgattacgggtgtgagccactgtgcctaacaccttttttgagaaacttatatttttttacatatttattcttgattcataatatttatacatatttatggggtacatgtgatattttcatatgtgtatacaatgtataattataaaatcaggtgtttaggatacctgtcacctcagacacaacatttctttatgtcagacat

SEQ ID NO: 324601 - DNA, 596 bp, Homo sapiens
gtagaaatgcctgtgaatgtttaaaagcattatatagactctatttcagaattgtgttgactaataaaaaatgctagttttccctaccccacacctatctttcaactgctttgtatttatttctttattagatagaaaattcctcagtaaacttttatttagagtaattcctctttatgatttttttgttctaaaggtcgattcttaaaagaaaacttgttgaagtgctctaaatggaagtctttttttttatttctctcctgtgtcttttatgatagtatctgacaactatmttttttttgtttttgcagagattgggttttgctctgttgccaggcttgtctcaaactcctggcctcaagcgatcctcctgccacagcctcctgagtagctgtgattacgggtgtgagccactgtgcctaacaccttttttgagaaacttatatttttttacatatttattcttgattcataatatttatacatatttatggggtacatgtgatattttcatatgtgtatacaatgtataattataaaatcaggtgtttaggatacctgtcacctcagacacaacatttctttatgtcagacat

SEQ ID NO: 324602 - DNA, 298 bp, Homo sapiens
tcatgtaaccttaaaaaatttttaccctctcttctccactgcccttgttcaggccttatctcttccagcagctgttccaaaggcctactctgttttcctttcggagtgctmacctccaccgaagcctccacccagttgccaattctgccccatgcctgataatttgctcgtgcgttgacatacataaaatttctaagacaaaaattttttaataatggtaaatgaaccttgggaactgcatacagatcatacagatccataataagagaaaaggtcccagattaacacggaaaacttt

SEQ ID NO: 324603 - DNA, 298 bp, Homo sapiens
tcatgtaaccttaaaaaatttttaccctctcttctccactgcccttgttcaggccttatctcttccagcagctgttccaaaggcctactctgttttcctttcggagtgctaacctccaccgaagcctccacccagytgccaattctgccccatgcctgataatttgctcgtgcgttgacatacataaaatttctaagacaaaaattttttaataatggtaaatgaaccttgggaactgcatacagatcatacagatccataataagagaaaaggtcccagattaacacggaaaacttt

SEQ ID NO: 324604 - DNA, 594 bp, Homo sapiens
gttgtaagcctcttataaaattcatccagagcctgacaatcacaatcactaaatcaaattttcttttccattcctttcaacaattcaataagatatgttaacactaatatttttattcaaaaatatttattccctgggctgctctgtcataaactttcctggatcttatatctctcagatttttactttactagcttcttcttaggtacttctttttcctcccacccttataagttggccattttctactcccctgtgccaagtttttttttcccctcttttacacagawcccttctactccgatgcttcccattgcttctgaactctaaatgatcctgagatgtatccataattctgatcaatgaagcaatacataatgaacgctgattgactttcttttcactccagaatccataactttgaacccgactctaaatctcaatctctagtttcacatttgcaacgaacattgtcctacatgtcttttgaagagttcaaataaaagataacttaaacaagacttatcttcctttcccctaaacctttttttaacatattgattttcttgatggcaaaatagtaattttatacat

SEQ ID NO: 324605 - DNA, 553 bp, Homo sapiens
taatgttattttaaaaattttacaaccaggagcatgcaaacatcatatgaaatyttggtctacagcaaacactgacatcattttgtatataacagcttctcccaaattctcatacaaaaaattgcttggtaagtttttttccaactggttgacagcccactcatttaagggcacataactaaagtttatccatctgacatcatcaacttccaaagcacattaccaacaaaaaagcctgtgataaagtagaaggtacaccagatgtagattcagattttagttagatttcaagtcccagttatgccttgagacctaaagagaaactgagtgctttgggtttttttcatctgtaactagggataagatcaactgacatttaagattttctaaggttagagggcaaaatgttaagatgttattactcttataagaccctcagaatcttatgctgggtgcacagcaatacaccaaaacaatgacacagcagagtttgtcacagaaagtataatggttgcagggcaactgagtgaagatatgggaggagaccctcaac

SEQ ID NO: 324606 - DNA, 596 bp, Homo sapiens
ataatgttagttactttccatttgtattatgttggtcacttcaggactagttaccatatatcaaacatggaggacattacttcagtttttatagtaagtagctgagcccagacagaaaactagtgccaagttcagtccatatgcctaaaattgagacygagaggaagtagataaggcaatgtaagttgattgtatagtatcatttcttcttctagagcatgaaaaatgaatccattagaaaactttcatacattctgtaatgatggaatatcaagttattggaagaagaagaaggatagattttattttaaacaaagaaattgaagttctaaaaattaagagtgtgagttttctcaaaacattttaaaatcttttttcaaatccctggccctaccattgatctactcattctttgcaaatggccttgttatttcatcaaattccctttgttgcaattgagtatgattatttcttcactacctctctgctgttacagagattaagaactgtcactacgtcttggacatcatcattttgtaccttcttttgtgccatgacaaatcatttatttctcatcccttttctcttgaattttt

SEQ ID NO: 324607 - DNA, 652 bp, Homo sapiens
taacattattaactgatgccctagtaaatcacctcagtgattatcctggattatatttgctatttaaatcttttgggtagtaatctgctcatgagtatttctttattaaaacatctataaaaattgaacaattataaattctgaatagaattacatacaaaatcttatgtgaacaagcaggaaaggaaagaaaagaagtaaggttttaatctgagctttaaaatacaaaaaaaaagtgtttacaaggtaaaaaacaaagtgtatgacaataaaaaarcatagaaaaataaagtggttgaggtagacaagttgttcgatatgccccaaccattgtatgtttacaatagcagatggggtggacaggtaggtctaaagccttctgttatactctctggactacatcctgaagatgataaagaatcatgcagagaagtgacatgatcagatatgcattttaaaaagatgtttggaagcaagcaccttggaggataataaatattcattgaatgagtaaataattggaggaataagaatacaaagaatacagctaggaggttattaaaattgctcaaggaagagatgccgagagctggaaaaacattctacagtatatatatttatacattatcaaatctatatccagtcttttatg

SEQ ID NO: 324608 - DNA, 579 bp, Homo sapiens
acataattatcaggcactgtgctaagcagtagagatatggaggtaaagtatactctaccctactctcagtgatcttacatcccagaagaaatagacatctttaagcaagtaattaatgggttataaaaaacttctgaggggtttccrtttcactacattgaacaggaatcaaatattcaagaaggcaagtgcctgtgagtgaaaatgaaataaaaagattcacaaatgaaggaaaactgggagaattgtttttcaggatatatgatctataaaaaataatgaaagttattcaggctgaagagaaataacactgaagggaaacctgtatcttcaagaagaaagagaaacaggataagtatcggtgtaaacataaagtatatttcttaagttatttaatttatgcatgacagtttaaagcaaatgttgatagaggtgttgatgtatgtagatgtaacctatctgaaaaactaaatataaattaccatgggatgatcaaaggttgcaagtcttctacatcttgaagcggtacgatcttaactttaagtagattgtgaaaggcaatgcataatacagtttttt

SEQ ID NO: 324609 - DNA, 579 bp, Homo sapiens
acataattatcaggcactgtgctaagcagtagagatatggaggtaaagtatactctaccctactctcagtgatcttacatcccagaagaaatagacatctttaagcaagtaattaatgggttataaaaaacttctgaggggtttccgtttcactacattgaacaggaatcaaatattcaagaaggcaagtrcctgtgagtgaaaatgaaataaaaagattcacaaatgaaggaaaactgggagaattgtttttcaggatatatgatctataaaaaataatgaaagttattcaggctgaagagaaataacactgaagggaaacctgtatcttcaagaagaaagagaaacaggataagtatcggtgtaaacataaagtatatttcttaagttatttaatttatgcatgacagtttaaagcaaatgttgatagaggtgttgatgtatgtagatgtaacctatctgaaaaactaaatataaattaccatgggatgatcaaaggttgcaagtcttctacatcttgaagcggtacgatcttaactttaagtagattgtgaaaggcaatgcataatacagtttttt

SEQ ID NO: 324610 - DNA, 579 bp, Homo sapiens
acataattatcaggcactgtgctaagcagtagagatatggaggtaaagtatactctaccctactctcagtgatcttacatcccagaagaaatagacatctttaagcaagtaattaatgggttataaaaaacttctgaggggtttccgtttcactacattgaacaggaatcaaatattcaagaaggcaagtgcctgtgagtgaaaatgaaataaaaagattcacaaatgaaggaaaactgggagaattgtttttcaggatatatgatctataaaaaataatgaaagttattcaggctgaagagaaataacactgaagggaaacctgtatcttcaagaagaaagagaaacaggataagtatcggtgtaaacataaagtatatttcttaagttatttaatttatgcatgacagtttaaagcaaatgttgatagaggtgttgatgtatgtagatgtaacctayctgaaaaactaaatataaattaccatgggatgatcaaaggttgcaagtcttctacatcttgaagcggtacgatcttaactttaagtagattgtgaaaggcaatgcataatacagtttttt

SEQ ID NO: 324611 - DNA, 541 bp, Homo sapiens
gtggggtgggggggatggggcacagtgggagtgagactggctctctgggttgtgtgggagctatgactgcttgctttccctcacttccctgagagcctatgtgacacagtagaggcagccataatcctcccaggaacataactcctttgacctggaaaccacactcccattacacacagcagccccagcaagacctgcccaaggacagttgagctcagacatgcctagtcctgccccmacctaatggttgttccctactcatgctggtaactgaagacaaagggcatatactattgggaacccactacctgttcctcctcgtactaccacagctaatgctctcttgaaatcaccacctcatggcatgaggccaaccagcacaaaaatagtgcattaatcaaccaaagttaaggaccctcagagttcatttcactaccctgccacctgcactggagcaggtgctagtattcatggcaatctccagtaccagcttggagcctggtagacttcctgggtggctagatccagaagaaagataatc

SEQ ID NO: 324612 - DNA, 553 bp, Homo sapiens
cacagtagaggcagccataatcctcccaggaacataactcctttgacctggaaaccacactcccattacacacagcagccccagcaagacctgcccaaggacagttgagctcagacatgcctagtcctgcccccacctaatggttgttccctactcatgctggtaactgaagacaaagggcatatactattgggaacccactacctgttcctcctcgtactaccacagctaatgctctcttgaaatcaccacctcatggcatgaggccaaccagcacaaaaatagtgcattaatcaaccaaagytaaggaccctcagagttcatttcactaccctgccacctgcactggagcaggtgctagtattcatggcaatctccagtaccagcttggagcctggtagacttcctgggtggctagatccagaagaaagataatcactacagctcgcctctcagaaagccacatctttaggaaaagggggagagtactacattaaggaaacacccaatgagacaaaagaatcttaacaacagtcttgagccttagaccttc

SEQ ID NO: 324613 - DNA, 521 bp, Homo sapiens
agcatcaataaatttaagaaaattgaaattttatcaagcactctttcagaccacagtggaataaaactgaaaatcaacaccaaaagraacattcagaaccatgcgaatacatggaaactaaataacctgcttctgaatgatcactgtttattaatgaaatgaagatggaaactaaaaaattcttcaaactgaatgacaatagtgacacaacctatcaaaaaacctctgagatacagtaaaggtgtcactaagaggaaagttcatagacctaaacacctacatcaaaaagtctgaaagagcacaaacacacaatctaaggttccacctcagggaactagagaaataagaacaaaccaaacccaaacacagcagaagaaaggaaataaccaatatcagagcagaactaaataaaattgaagcaaaaatataaaaaagagaaatgaaacaaaaaaatagatctttgaaaagataaataaaattgatagatcattagcaagattaaccaagaaaagaaaacagaa

SEQ ID NO: 324614 - DNA, 521 bp, Homo sapiens
agcatcaataaatttaagaaaattgaaattttatcaagcactctttcagaccacagtggaataaaactgaaaatcaacaccaaaaggaacattcagaaccatgcgaatacatggaaaytaaataacctgcttctgaatgatcactgtttattaatgaaatgaagatggaaactaaaaaattcttcaaactgaatgacaatagtgacacaacctatcaaaaaacctctgagatacagtaaaggtgtcactaagaggaaagttcatagacctaaacacctacatcaaaaagtctgaaagagcacaaacacacaatctaaggttccacctcagggaactagagaaataagaacaaaccaaacccaaacacagcagaagaaaggaaataaccaatatcagagcagaactaaataaaattgaagcaaaaatataaaaaagagaaatgaaacaaaaaaatagatctttgaaaagataaataaaattgatagatcattagcaagattaaccaagaaaagaaaacagaa

SEQ ID NO: 324615 - DNA, 486 bp, Homo sapiens
atgtaataaaatccatctatgacaaacccacagccaacataatatgaaatagggaaagttaaaagcattccctctgaaaactggaacaaggcaaggatgcccactctcaccactcctcttmaacaaagtactggaagtcctagccagaacaatcaaataagagaaagaaatgaagggcatccaaatttgtaaagaggaagtcaaactgtggctgtttgctgatgatatgattgtttacctagaaaaccctaaagactccttcagaaagctcctagaactggtaaaagaattaagcaaaatttctgcatacaaaattaatgtacacaaatcagtagttctcttttacaccaacagcgaccaagctgagaatcaaatcaagaactcaatcccttttaaaaaagctgaaaaaaaaaatcaaatagttgggagcacagctaaccaaagaggtaaaagacctctacaagaaaactacaaaacattgttgaa

SEQ ID NO: 324616 - DNA, 486 bp, Homo sapiens
atgtaataaaatccatctatgacaaacccacagccaacataatatgaaatagggaaagttaaaagcattccctctgaaaactggaacaaggcaaggatgcccactctcaccactcctcttcaacaaagtactggaagtcctagccagaacaatcaaataagagaaagaaatgaagggcatccaaatttgtaaagaggaagtcaaactgtggctgtttgctgatgatatgattgtttacctagaaaaccctaaagactccttcagaaagctcctagaactggtaaaagaattaagcaaaatttctgcatacaaaattaatgtacacaaatcagtagttctcttttacaccaacagcgaccaagctgagaatcaaatcaagaaytcaatcccttttaaaaaagctgaaaaaaaaaatcaaatagttgggagcacagctaaccaaagaggtaaaagacctctacaagaaaactacaaaacattgttgaa

SEQ ID NO: 324617 - DNA, 591 bp, Homo sapiens
atccaccattctggggtctggagggtggtggacctcttctcacagttcctctaggtggtgccccagtagggactctctgtgggggcttgaccccacatttctcttccacactgccatagcagaatttttccatgagggccccacccctgaggcaaacttctgcctggacatccaggcatttctgtacatcttctgaaatctaggaggaggtacccaaaccgcaattattgacttctgtgcacccacaggctcaactccaygtggaatttgccaaggcttggggcttctactcactgaagctacagcctgagctgtaccttggcccctttaagttgtggctagagcagctagagcagctgggacacagggcaccaagtccctagactgcacacagcacaaggaccctgggcctggccaaagaaacccttttctttcctttgcctcctggcctgtgatgggaggggctgctgtgaatacctctgacatgccctgcaggaatcttccccatttgcctggggattaacattgggctcctttttagttatgcaaatttctgtaatggcgtgaatttcgcttcagaaaatgggattt

SEQ ID NO: 324618 - DNA, 582 bp, Homo sapiens
agtgtgcaagacacaatgaccactcccaaataatttagattccattagaaggaaacagctaacaaaaccaagtcatatataagaaaatgtatgacaaagcattaaatagtgtatggaggaaaataagagtgtgtaagggaaagaaataaagtacactattagggaggatggttgaagatgttctccaaggaggtgactttttaggaaagatttggattagttgaaggagtgagsccttcactcctttagaaaattccaaacaaaggaaatagaaacttccctcaggaaatactcttggaatgtttaaagaacagcaatcaactgcaacaatgaatgtgagaaaaggatgttggagatgcaactgagggtcagacagtatagggcattatgagccattgtaaagattttaaatttggccccatatgtggtggaaggttaaatatagtgtgcatttttctacatttttatgattatatttgacattggcaatactttgaaatttatatacaggaaatattttatccctattacaataacacacatatatgtatatgaatatgtgtgtatattttgttgtacaaa

SEQ ID NO: 324619 - DNA, 562 bp, Homo sapiens
gaaacttccctcaggaaatactcttggaatgtttaaagaacagcaatcaactgcaacaatgaatgtgagaaaaggatgttggagatgcaactgagggtcagacagtatagggcattatgagccattgtaaagattttaaatttggccccatatgtggtggaaggttaaatatagtgtgcatttttctacatttttatgattatatttgacattggcaatactttgaaatttatatacaggaaatattttatccctattacaataacacacatatatgtatatgartatgtgtgtatattttgttgtacaaaaatcttttatatgtctggttggataactcttttcctttgttattaatatgaagagttgtattattaatttttcaatgctagtccactaaagcataattgaaatgcttatattttactttaatacattttttaatccattgacttctctttctgatttttaaatgtgtatttagaatgcattctttttcattatctgggaaaacatacaagtcacgctcttgaactttctttaaagaattcaccctaaataa

SEQ ID NO: 324620 - DNA, 660 bp, Homo sapiens
ttagaatgtgacaaatgttaacagtgtctcaaatatagttgaccttcaaaatgttagttcaaaatattacagtttactcacattatatgttgtcataaatattaaattgtgtatgataaattttgcaaatgttcagcactctctggaccccttctttttttggggcttatgaaaacactgcactcctattcccttgaagctaggcatggtcatatgacctgcactggctaatgaactacgaataacaggtgttggtgttaggacgtggcatttaaaagcttcatgtgaatctcctactctcctttgtggtctctattcyaaatagtggaacctctgtcagtctgatgctggagagtaaataagcccactaccactcttaccctaggcaagcaacaattaacatataagggaatgaagagagaaataaatcttcactgagaactgggagttgtcagtatccccaatttaacctagagcatcctgacttacacttggaggaattcaaactatgctgcctgtgaactagagaggagattgcttttgctgaaaatattgttaaccctctatccccaccactagtttcttgtccttatgttttcaatgacagaaatgagggcaagatttcaaatttttttattgtaatccaaggggaaatagtaa

SEQ ID NO: 324621 - DNA, 623 bp, Homo sapiens
tgtttctttcttcatgctcatttatatatttaccatatatatgcacaagttttttaataagaaaaagtgtgaaatctataaagaagtcaaaataataaattttacacataattttatatatggcttttaaaatttactattctatataataatgaaaactcaaaaaacattttaaatgcaaagctaaatgggaattataaaacactttctacatatttcatatgaaggactaagtagctattcagaggactgttaataaaaatattattractgataaagtacttaaatatatagtagaactttaatatatcaacaattatttctactacttttcctggcaagtttttgtttcagtaaaaatctaatataaatatataatagaatacaaatatgtaatataatatatgtattgcatatatatataaaatttgtaagcatggattcatatgtttgggtagtaatagtataaataattttgttttctcatgtataattttctgttctttgcatttgttttatgagtgtatattatataatcagaaagcaaccataactacaaactaatttctctggcaataaaacatattaatggaaagtagtgtttcaatagaaatgaaataat

SEQ ID NO: 324622 - DNA, 548 bp, Homo sapiens
caaatccaatatcatggttttcccaaaatggtgaatctactgacagtctggagattaattcaaatgtaaaggaattctaataataccgtatgtctaattttatcttgcttgggtcttccacctgagtttctccagtgattctatcatacagaaggtgaaatagctgctctaagcaggtggaactcaacctaaaaatattcaaaagacattacgagtaaagaaaagaccaaatggtcaatccaaagtttactttaagaatcagaatctgaagtacttttattcgtgaaatttgtttcctgaatattacatgctgccttaaataagagaagaagttgtgctcgcatgctgtggatgattctcaaaaaagcatygaacttgtcaaaatattttaatttttatctgtttgactgttccctggtattttagccatgaggaagttatctacccttgaaaattcctcacatggaaaattggaatagttatatcttattgtgagaaatcaatatggtaatatctatcacagtattttcaaatctgcaaaggacctc

SEQ ID NO: 324623 - DNA, 548 bp, Homo sapiens
caaatccaatatcatggttttcccaaaatggtgaatctactgacagtctggagattaattcaaatgtaaaggaattctaataataccgtatgtctaattttatcttgcttgggtcttccacctgagtttctccagtgattctatcatacagaaggtgaaatagctgctctaagcaggtggaactcaacctaaaaatattcaaaagacattacgagtaaagaaaagaccaaatggtcaatccaaagtttactttaagaatcagaatctgaagtacttttattcgtgaaatttgtttcctgaatattacatgctgccttaaataagagaagaagttgtgctcgcatgctgtggatgattctcaaaaaagcattgaacttgtcaaaatattttaatttttatctgtttgactgttccctggtattttagccatgaggaagttatstacccttgaaaattcctcacatggaaaattggaatagttatatcttattgtgagaaatcaatatggtaatatctatcacagtattttcaaatctgcaaaggacctc

SEQ ID NO: 324624 - DNA, 563 bp, Homo sapiens
  misc_feature (1)...(563): n = A,T,C or G
atgggagtggaattaccgggtcatatggtaattctaagcttaagtttntgaggaacctccanaagtgttttccacagtggctgcaatattttacattcctaccagcaacgtccaaggtttctaatttctctatatcctggcaaacatttatattttccttttattttttatttatcacaattccagtgggtgtaaagaggtgtctcattgtggttttgatttgcatttccctaatgactaattacattgagtatcttgtcgtgtgtttgttggcttgctggttcttcttgaagaaatatctattcaagcctttggcccattttttaattgcgtcttttgtctttttgttattgagctgtaaatattccttaaatattacagatactagacatttatcatatatataatctgaagatatatgatttgcagatatttcytccattctgtaaatcttttaacaatatcctttgaagcacaagatttttaattttgatgtagtccaacttatttgttctcctctttcttgctctatgatgtaattttctttaccttcaatttagttg

SEQ ID NO: 324625 - DNA, 630 bp, Homo sapiens
gcagacagctcaaatgttgcaagtgtcagcataaaatgccctatgactctgatctctacatgagaagttcatctttccagtaagtagcatatctcagttaaaagtgatctctcgccgttctagtgtatttttcataatatttaatgtgatatcataatttttcatcatatttaatgtaatatgataagcattgaaaatcacagtcccatataaagtgccactagtgatgctggaagtgctctcaagaagcagaggaaggtcatgacatgacaagaaaaaagytgaattatttaatatgtatggtagattgagatttgcagctgtggttgaccacatttcaacttaaataaatccagcataaggaccattgttaaaaaaaaaaaaaaagaaaagaaaagaaaaagaaaaaaatgtgtactcattgctacatttatgccagcaaaaaatgaaaacctgcacttttcctaaaataccattctattgaaagtgcaacttttatgtggatgcaggattgctataagaaagacctacttatagactctagatttaagaaaaagtaaagtcattatacaaaaactgaaagaaaaaagatgatgaggctttaaagctggataatttaatgccaacaaa

SEQ ID NO: 324626 - DNA, 598 bp, Homo sapiens
tattataagcaaaatttggtataaaaattagggaacttaccatcaagccaaaatattagtgagcacctttctgcaaaccaggatggcaggcaggcaactttatttggtgtttttattatttatcctctagtccttaattatacatgtagctgttgacactttaattatttttttttatctttcctacatttctctcttctacctttacaagaaggcaatcaggttactactattttcctcctttagtagcttgtacaaaaataataataaaagataaaaaaaaacagaacctgatttgaagtgacaaaataccttaaaaagatgatgataggagatccacatggaaagggacttgaagatggtgttttaagtctggaaagaaagagaactttaactcaaggaaaagttcagaagttttggagattagtaaatttgcagttagctgagaacttgagcgccaccttgggaggtgttaagatctcatgaggattgaccccctggtatatttargacagcttgactcaagatgcttagatttttaggcatcttaagtaatcttgtgcccaagcttggcaaagaaatagcacaacaagaagac

SEQ ID NO: 324627 - DNA, 604 bp, Homo sapiens
atatagcttaaaatctcttcaaaaatagctggaatgcatttagttactttaaaaaatcccacattgggttgttattaatttattatagatgaggcaatgttttccttttaaaaagttctcttctgtattgtgccaatggcaccagtagaaaatttagagtgttttatattccatagaatatgcatagcagaatcaataataaatagcattttccacagtatagagtatgagccactcgctcagagagcagaatcactcacttttggtgagctaaaaataccttggtgacaggttttagaaaagaaagaaaaagaagagaattttgtgttcattacccaagggtagaaacttgtctgaatggtctacattgtccttaattatgtcctctcagtaatgccgaacattaaataaaccccagcatagtmtagtacacattgctatgacatcccttccctaatgcagtgtatctttcatttttaccagaaaatgtcagtggcaaacacttctacttctctctccagaaaaattttgaacaatccagggtaacataagatgccaaagtttattaataagaagatgaaataatttttgaatgaagaaatgc

SEQ ID NO: 324628 - DNA, 520 bp, Homo sapiens
attagttacagttatcctaaaagtaaaacattaagttaccctgcaccatgctgagaaatgtagtaagtgttaaacattcacagaataaatgatttcaaaaccatatttagctaaactaaaaaaatatatatactttggatagttcctgggccaaatacttattctactttttttgagggacttgctcaataaattattaaaatggctaagtaaatatattttttataatctgattataatgctctgacatgttgtaaaatgaccacttgggcaaagaataactgcaattatgagttctttgaaaagtaaattacccttacctattcagtgaaatgggatttttatttttaaaaaaccacttggttagcttggttctagttgctgaataytccagaaaactgcatttgaaaagtaaattatatagttatgacttaattaattagaaagcatttattttttctctcctacctgtaatgcagtattttccaagttgtgtttcttttccatggagactaacata

SEQ ID NO: 324629 - DNA, 686 bp, Homo sapiens
aaattttttgcattctaggttttgcatctaataagctatgttactttmttttcatctgctttatttttcccagcatgaacactcacacacatgcagtcacacacacgcactcacacacacatacatttcatttgggatttggccaaaaaaaaaaaagttacatgcaaggctttgatgactatcttaaattggatctacagattcattagtaaaaatatttactagggaaatttagtataacagatgtatattgtagaatgcaaaacagacttctaaagaatgatttaaattcacatatgcttaaaagttatgcttattaaaatgacttagctattactcattagaggcatagagaaatcttggtttatataaaatttatttctagtcaattgatattaaaatagttacttggaattaatacataatatttcaaaaatattcctcattcactcaaattatggacatatatgtatatatatttagataaattttatatttaaagtgatatataaatcaatacatatgctaataatggtaacttcccttgagataaatatcaaacattgccacaataattttctatcttgcatatttatgattgtatataatagttttctcactgtacatataagataactgtccttcactgtaaataaaaccatcctaagttacatttttcttcggga

SEQ ID NO: 324630 - DNA, 455 bp, Homo sapiens
ggataaagataatttttctgaagagcctgttaaaaatttcctaccattttttttattgaattgtttttatttatattgaattgtaggagtcctttatgtattttggagtatgagctttttacttgataacatgtgctttagatagcatctccccctcagtggtagatgatgagttataaggaaaatttgaaactcagatcaagtagagtcttgagggtaatagtaatgtcttagtattatattacyattccatcaagtatgatggaaacaacatatttgatcatgggaacaacataacctgacttgcagttttaaaaaattgttgcagctactgaacagaatatacagtttaggcaatataaagtggaggcagagaaagcagatatggtgtagtggttctctgacttcttttaccaggggtaatttacactttggttcaaaaatccacaccttaa

SEQ ID NO: 324631 - DNA, 589 bp, Homo sapiens
ctcctgagtgagctgggactacaggtgcccatcaccacgcccggccaatcttttgtatttttagtagagatggggtttcacgccatacatatatggctctatttcaagactctattctggtccattcttctattatgtcagtattctaacctaataatataatagaaataaaagaataggaaggaaaggtaaggaaaaaagaaaaaatatataagtatgcattattcctggtaaaaataaacattatttcatgaaagttcttgttcaattaaaagagagtgtaygtatgtttattagatcatcattatcaaaactcaatacttttgagttttccatcacaaatgagaaattattgaattagttttatccttttgtgatactctaaaatccaacttacctaagtgctaatagaccacaaatatatatttatgtgtgtgtgtatgtatgtgtgtgtgtgtgcgcgtgcgcgcacacgtgcactttttttctctttcagttctccttttctacttttgttctctgcaatggttgatgatggtgccaatgtctgctgtctttcccacaacatatgttctctgtttcttctaca

SEQ ID NO: 324632 - DNA, 593 bp, Homo sapiens
  misc_feature (1)...(593): n = A,T,C or G
nnnnnnnnnnnnnnnnnnnnnnnnnnnnnnnnnnnnnnnnnnnnngcagcattattaataatagccaaaatggaaacaacccaaatgtccatcaactgataagttaactaataaaatatggtatatccatacaatgtattattcttcaggcctaaaaaggaataaatcactaatatccatgttgtgtctttcatagcaatagaatggaaacaayagttcttattcttatctattccactctacaatatggataaaccttgaaaacattatgctaagtgaaagaagccagacacaaaagaccacatatagtatggttccacttacatgaagtatttgaaataggcaaatctagagagacagagagaaagggctaagggtagcagggagtggagagtacctgctaatgggtacaggtacttttcagggtgatgaaaacattcaaaaattacatagtggtggtggtttcataactgtgaattatactaaaaatgacagaatcatccactttaaaaggataaattttatgatatgtggattataactgaatttaaaaaagctattactagtttagtcatttattgatgatgagactt

SEQ ID NO: 324633 - DNA, 593 bp, Homo sapiens
  misc_feature (1)...(593): n = A,T,C or G
nnnnnnnnnnnnnnnnnnnnnnnnnnnnnnnnnnnnnnnnnnnnngcagcattattaataatagccaaaatggaaacaacccaaatgtccatcaactgataagttaactaataaaatatggtatatccatacaatgtattattcttcaggcctaaaaaggaataaatcactaatatccatgttgtgtctttcatagcaatagaatggaaacaatagttcttattcttatctattccactctacaatatggataaaccttgaaaacattaygctaagtgaaagaagccagacacaaaagaccacatatagtatggttccacttacatgaagtatttgaaataggcaaatctagagagacagagagaaagggctaagggtagcagggagtggagagtacctgctaatgggtacaggtacttttcagggtgatgaaaacattcaaaaattacatagtggtggtggtttcataactgtgaattatactaaaaatgacagaatcatccactttaaaaggataaattttatgatatgtggattataactgaatttaaaaaagctattactagtttagtcatttattgatgatgagactt

SEQ ID NO: 324634 - DNA, 567 bp, Homo sapiens
ttttttgtattttttgtacagacggggtttcaccgtgttactcaggatggtctcaatctcctgaccttgtgatctgccggccttggcctcccaaagtgctgggattaaggcgtgagccaccgtgccctgccaatatgccttatttctaatagtatatttcagaaataagtctttgttttttggattgtattattgaaggagagtttatattccaaagtacatttgctgtaaatttgataactttaaattagataaacaaaaagkcatagtttgtacacctaaaaatgtttgagaatactatccccaatattaaggcaactatgaatagattaattttcctttggggacaaatactacaacctctaactgaataaaaattgtgattttttattgtttttctttattatgcttgcaattgacttaattaaatacacacttatcatactagttgaattatttcaattaattttatttcatgattattcaagatagtatggtttattaacatgacacaaacaatgtagagttttgaaacttcatttgaagtatgctaagtaatatgaataa

SEQ ID NO: 324635 - DNA, 583 bp, Homo sapiens
gcacacagcgtgtcctgcagtccatttggaacttagttcttttcagagtaaatttaagtcttcagaccttcttaaacaattaggctaaattttcaatgcatacttctagtcctcaatatataaaataccagtattctaaaagactcttttcttctctatatatccttgcttctgccatgccagcttaataaaaataaacttatataaatgataatggtcagttgcaaargatatcatagttttagttaccaggcttgccagtgacctattaaacatcagtcttctccctactaaataaactctatgattgagataaaacgagagtaatcttcagtgaactgctgctgtcaaaaccttgcctggactgtatttactaaaattaaaatttgaagccacccacttggacgactttagattgctccatgtccgttgtttatttttcttcttcgaggtttcagaccaattcactaaaaagttaaaattttaaggtactattctgttatatactttttcccctcctgctatggtttgaatgtacgtgtctgctcacaattcatatgttggagtctcagactcaacgtaa

SEQ ID NO: 324636 - DNA, 616 bp, Homo sapiens
gtggagagctattctaactacagaaaaaaatcagaattcctcaacatacatgagtaattaaaaaaattcagtgtctcagcaatcatttgaatgcttattggttacatttacaaattggcctcctaatgaaaacctatgaaatgaaatccaatgtatttatatgcatgggaattatacatatttaaagaatgaagtgaaactaaatgttaaatgttaatatctagaaaaatgcctaaaatgcagctttcccctcccccaaygcacactttaattcatccagcctgtcaacacattgtgctgaaaaggtaaacataaatatatgttttgtttcattagggattgcttcacctcctcttttctctttattttatttgtgttgctgtgaggaattgggagcctattattaaaataatttttaatcctaagagaaagaaaataagctgatgacacagattgaaattatgtgaagagaatgagctacaaggaagaaagggttcaatgaaatcatattacagaaagaacatgcaagaactctggcttccccataggaatctacgattatacaaaattaactgcaaatcccctttgtttgttatcacttattgatggttggagg

SEQ ID NO: 324637 - DNA, 680 bp, Homo sapiens
agagcctgaggattcgatgtccaagggcagaagtatgtcccaaattcaggtgagactgaattcgcctttctcctacctttttattttacttggtcttcagctgattggatgctgcctcccacattgagggtgaatcttccttactcagtccactgatttcaaatggcagtctgttctggaaactcccacagatatacccagaaacaatgctttactagctatttatgtaccccttagtccagcaaggttgacacctcaacttaaccatcacagtagggtttcttttatcctccagtcatccaaggctcatttccttaccatattgtcagtctctcagttactacctaagaaactgtataaacccttaaccttgctattattgttattgtgtattttttctaaggcaatggaaacaccctcataattctgctcatttagaagatacatatttttcttcgtcagtaaaatgcagcgatcacaggacacaatatagatgccttccggactgaatgtggaatctccatcctgagcaatgctgcctgttaggaagtcctctaataactgattatacaagagaacttctaagctttttaaaattatggggttagtyaacatctaaaattttaacacaggacctaaagacttatgagctacctgttcatagatatgatcaatactgc

SEQ ID NO: 324638 - DNA, 531 bp, Homo sapiens
gtaattaaaataaatacagtaatgcatcatttaatgacagggatatgttttgagaaaagcattcttaagtaattttgtcattgttggaacatcatagagtatatttacccaaaactagatgctagagcctgctacacacctcmgctgtatggtatagtttattgtgcctaggctattgacctgtaccatatgttactgtactgaatgctgtaggcaattgtaacacaatgataagtatttttatatctaaacacagaaaagttacagtaaaagtacaatgtaaaggatttaaaatggtacatctttacagggtacttaccatcagtggagtttataggactggaaattgatctgaatgagtcagtgagtgagtggtaactgaatgtaaaaggctaggaccttacagtgtgctgctgtagactttataacactggaaaattaggcatcactaaattcatttgaaattcttatcttaaaattttatttcttcaataagaaattaaccttagcttactgtaattttttactttg

SEQ ID NO: 324639 - DNA, 531 bp, Homo sapiens
gtaattaaaataaatacagtaatgcatcatttaatgacagggatatgttttgagaaaagcattcttaagtaattttgtcattgttggaacatcatagagtatatttacccaaaactagatgctagagcctgctacacacctccgctgtatgrtatagtttattgtgcctaggctattgacctgtaccatatgttactgtactgaatgctgtaggcaattgtaacacaatgataagtatttttatatctaaacacagaaaagttacagtaaaagtacaatgtaaaggatttaaaatggtacatctttacagggtacttaccatcagtggagtttataggactggaaattgatctgaatgagtcagtgagtgagtggtaactgaatgtaaaaggctaggaccttacagtgtgctgctgtagactttataacactggaaaattaggcatcactaaattcatttgaaattcttatcttaaaattttatttcttcaataagaaattaaccttagcttactgtaattttttactttg

SEQ ID NO: 324640 - DNA, 570 bp, Homo sapiens
taaagagataaacagatataaattgaaatttaattttatatatctaatgttttgaatatatataaccaaatacacattgagatatattgaaaatttaaatgagatgaaaatagtttttaaaatattatgttttctgtatagaaatgttgcttactgcatatattttagacagtagttttaataggtcagatttaagataagattaggattcaagaataatctatgctaaagactgactctagactcaaattaagaaaggtgatagtttgtggggaaccagatttcttgtatcatatagagttttaaaatctctataatatcttgcttttcacgaaaatgttaagacaaatatttttctgagagaaaaatgctatggtgacccacccaatttgttatcagccagtaatagttcctctatcacaacaaaatttatattgttgttcttactctcttcttgcattcaaagtccaataaactgttctgggaatggttatatyaaattatgtcattaagagagaaagactgtttaatggaagaaaaacacgagcaacagcaaatgcatgttcttac

SEQ ID NO: 324641 - DNA, 557 bp, Homo sapiens
aaactcatcctaaaacttaatggcttagggttttatgggttggactgaacttagcgagactagttcatttgtgctacttagcctcacctagcatagcttgatttgggctggaaattatactttcataaaggttcactcacttaaatggcaagtgatgataattgttagttgggagctcagctgtggcaactgaccacaagtctctgttttctgcaggtgatatctcttgatgtgatagctctatttttcttataatatggcagttgaatcccaaagaaaaaacagtttcacaggacaatacctcaagtaagatctcttattttctcctgtgacgctctctaatgtcccattgaccaaarccagtcatatgaataggctcactgtgaaagtgtgacaggactgccccaagcatgaaatctgggagacatggatcatggtgagcatcaaaataacatcaatatgaaaatatttctacaattttggtgggaaagtgtaagaaaaagatatttattatttattcgtggatgaacattcaagagtagtaagaaacaaagtgc

SEQ ID NO: 324642 - DNA, 565 bp, Homo sapiens
gacaatcacatggaaaattcatctgaagacttttcattggtgacttttacttataattcagatagaagttctgtcttgggaacgtaattttaaatactgcaacattcaggrccaatatgaagataaggaaatgttttctttaaactgtctcatcagcttaggtaccttgtctatgttagttacccacttaggaattatttgcttaaaattttagcacccacatcatagttaaaatatctatttatttgatcccatatttcacaaataatccgcaggtgatttgtacatagctttaacttcttactaccttgacactttggtcatatctatgtgtgttttccattgttttgctgctgagtgatcatcaaaagtgaaagaatataattttcaatgtattgtttcttaaattgtaatgtagacatattcttcagaatctatgagattatatgtctaataaatgttacctaaaggttgttagacataggataaatttatgggaattattttaccttgctgactcagttttgcacttgccaactctcacaaaacttcacattgtattgaa

SEQ ID NO: 324643 - DNA, 565 bp, Homo sapiens
gacaatcacatggaaaattcatctgaagacttttcattggtgacttttacttataattcagatagaagttctgtcttgggaacgtaattttaaatactgcaacattcagggccaatatgaagataaggaaatgttttctttaaactgtctcatcagcttaggtaccttgtctatgttagttacccacttaggaattatttgcttaaaattttagcacccacatcatagttaaaatatctatttatttgatcccatatttcacaaataatccrcaggtgatttgtacatagctttaacttcttactaccttgacactttggtcatatctatgtgtgttttccattgttttgctgctgagtgatcatcaaaagtgaaagaatataattttcaatgtattgtttcttaaattgtaatgtagacatattcttcagaatctatgagattatatgtctaataaatgttacctaaaggttgttagacataggataaatttatgggaattattttaccttgctgactcagttttgcacttgccaactctcacaaaacttcacattgtattgaa

SEQ ID NO: 324644 - DNA, 600 bp, Homo sapiens
tcctttgtaaagctctatttgccaaaatattactagcaaattcatggaaatatacatttttaaattaaatagtgaaatatgttaatgtaacatacaaatataattcttacttatttagatggtgctgtgttccagtgagactgaatgagctaaaattgctaatttgtcaytgtaattttctttaacatgctaacagcttataaaatgtaaaaaatactctccttttttttattttgaggctagatttgggaaaagtataaacattatcttcaattatcacaatcatcaatttatagctaaataggccatatgattatggaggtcctggtccagcctgccacaaaacagatctctcagaagggttaaagaagagagatgaaatgaattctcaaagaaggattgcaacaagttttctagcctaaatgttgtcctgtcttttatatcagaacctgattttcaaccacctctaaaaatatactatcattttacatctttggaaactgagacacggacaaattaaataacattttccagtgagtggtaaatttataacacaaaactagggttatctggttctcaaaagaatgaagtctatttctt

SEQ ID NO: 324645 - DNA, 624 bp, Homo sapiens
actaagtcaaagaagaaactctgatcttaagaaattcaagagttaagcagttaaaattatacaaatgtgtaaataagtatataaaacatgcatatatatattctatcagaattttctctcactgtaaaataaaagaagaaagtaaatttstttgctatctcttatacatttttgcatctggcaattaatcacgtaagtgaatcaattgggtgttcattaaattctgaaaggggaggaacagaaaaagggagatgagaaggggtgggaggaaaaggggacagagagatggtcagataaagggaaaagggagaggagaagctaaatatgtgattctgtgacatctttgtatttctggatatgagaatcatgcgtaatgtaaaattaatttcctttttttgttaaactataaatgtgaaggttagtcttaaatgtggatttcaaagaaaagcactttatgcctaggaatttaatttcttgtaaagattaatcactactgtgaaagttgtcagaatcaaaatggagtcactactgttaaaaaaaaaaaaaaaaaattccctgccaaataaaggcagggaaggccatgaagagaaagttctcatgcctgtatgcctgataacaaaacct

SEQ ID NO: 324646 - DNA, 691 bp, Homo sapiens
aaaatgtcctttccaatcccttctctgacctaattactactagtcatctaaaagtaatctcagttacagcttctttcagaaaatatttttaattattcctgagacctcatctaaaccaaattaggtacctcacagttttgtgcccccaaagcctagggtcttcatatattttttgaattacctcagcttttcattctaattaacttattgctagactgtaagtttataaagagatacagtcaaatttgtacatatttaatgaatgcatyagttaatcagtattcacaggatgtctattttctattgaattctaacactgtatgaattttggcattggacaaatgaattctaagaaacttgtgcttccttactagagataatcatgcaacagctaaaataattaagtcaatattctctactatgacaaaagatctgacttctctacaccagaaactcactagcatggaattctggctatgtcaagggagaaacaagtaatgatgcatctacctgtatttcttctcaataactttgagtaatcctagaaaagaaaagatagtattcattattattattatgcatccttttttttgctataaaatgaggtcttcaaaatacggttagtgttgatacaatgagaatttaaagaacaggtgttttcaggaatcaatagatacctagagttgttttg

SEQ ID NO: 324647 - DNA, 691 bp, Homo sapiens
aaaatgtcctttccaatcccttctctgacctaattactactagtcatctaaaagtaatctcagttacagcttctttcagaaaatatttttaattattcctgagacctcatctaaaccaaattaggtacctcacagttttgtgcccccaaagcctagggtcttcatatattttttgaattacctcagcttttcattctaattaacttattgctagactgtaagtttataaagagatacagtcaaatttgtacatatttaatgaatgcattagttaatcagtattcacaggatgtctattttctattgaattctaacactgtatgaattttggcattggacaaatgaattctaagaaacttgtgcttccttactagagataatcatgcaacagctaaaataattaagtcaatattctctactatgacaaaagatctgacttctctacaccagaaactcactagcatggaattctggctatgtcaagggagaaacaagtaatgatgcatctacctgtatttcttctcaataactttgagtaatcctagaaaagaaaagatagtattcatyattattattatgcatccttttttttgctataaaatgaggtcttcaaaatacggttagtgttgatacaatgagaatttaaagaacaggtgttttcaggaatcaatagatacctagagttgttttg

SEQ ID NO: 324648 - DNA, 570 bp, Homo sapiens
ttacgataaactaaagcattataattttgaattgtgcaaataattccattcaaattataactaagcacatttctggaacatktttctgtcactaggactgtgtttttaataaaggatagaactttaattttgaagaaaatctctccccgtgcttatcttgcatctgaatcagcctatttaacagcatgaactttctcgagaataagatttattgtactttagaaagaaaaatgcatgcctgtatttcactgacaccaaaactcaggagctaagcatattagtgttttccctaagctctgaacacttgtgaaagtttgctaaaagagaatctcttccatattttgttttatcccatttacatacagtgctaacatttcatctcatcattttctttccacttgctccagacaataaaaaagggttatccttagcccattgcactattgtgattcctgttgtccaaactatattatatttcacttctttctcaaggcgaggcaaggaaggcgaaaagcgtatgcaaacagtgagtagaggcttgtctatgatattgaaagaataagtacacaa

SEQ ID NO: 324649 - DNA, 570 bp, Homo sapiens
ttacgataaactaaagcattataattttgaattgtgcaaataattccattcaaattataactaagcacatttctggaacatttttctgtcactaggactgtgtttttaataaaggatagaactttaattttgaagaaaatctctccccgtgcttatcttgcatctgaatcagcctatttaacagcatgaactttctcgagaataagatttattgtactttagaaagaaaaatgcatgcctgtatttcactgacaccaaaactcaggagctaagcatattagtgttttccctaagctctgaacacttgtgwaagtttgctaaaagagaatctcttccatattttgttttatcccatttacatacagtgctaacatttcatctcatcattttctttccacttgctccagacaataaaaaagggttatccttagcccattgcactattgtgattcctgttgtccaaactatattatatttcacttctttctcaaggcgaggcaaggaaggcgaaaagcgtatgcaaacagtgagtagaggcttgtctatgatattgaaagaataagtacacaa

SEQ ID NO: 324650 - DNA, 579 bp, Homo sapiens
aatgacatagctgtgagaaaaaagaatattccagctttccttattgattcctgccaagtaacaaagcaatttgctctaaacatgtgggcacatatttccrtgatccagtgcctctggcccgtctacatgattgggacacctggaccagaattacttacattgtagtacaaataaaaaatagtatttatatggttcagactagttttctagggcctacaattggacatggtggcaatccttgtatcactatagaatttttttttgtagaaatttctttttaagactttctttctcattatttcatgaggagtactggtttaaaagaacactctgtttttaaaaaatacggtccctttgtgaaaagacataacattatctggtttcctgtatttactgttcactatctaacccagaccccaagaatcataaatcctttaattctgttatttcactgttctttatcctctaaagtctttgcccccttttttacccagttgaaatccatgatcacacacttgattcccatggtctctcttgtttctttttacttgaatgacaaaaccacactctgattaaatc

SEQ ID NO: 324651 - DNA, 542 bp, Homo sapiens
ctccgtgaaaaagggcaagtttgataacatcctatattttgaatttgttcagagttcatcagagacacaacatcttatggggaattacctccccaccaagatcagagtacatactcagtttcaattgctgcatttcgtctttcaatttaaagggggctaaatatcatctaaaaatactcaagcacttggaaagactttttaactaagcttcattccatatgcatggcagctagcttgttataggattcctttccaacttgtctgtgtgctgtccagcaggaaggagcattcccaaatatgttggcacttgcttcctagttgcagcaagcagggaattaacatctgcaaagaggagattacactcatgcatcatattgagatttttcacacwcttctgttactccttcaaaagtaactcccttgtgacatattccatgacggagctaacaaatctgcaggcagcagacaaccttgaaaagtaattaatgataatatcttttcctcaccactatgcttgcctttttttttttttttttagctct

SEQ ID NO: 324652 - DNA, 553 bp, Homo sapiens
caaattaattaattaaaataaataaataaaaacttttatcctgtatgctctttctctaccctgctatcatgtgcagtagcttagtatggtacaaattagagaaattcagagaaagtacatctgctctgcaaattgtcaacattcctaggcctaaactagtaagggagtaccaggaagagctatacagcaaaaagtcaaagtcatgcagtgagaatgattagcattttttagttctcatactatgtttttgcttaactcagtgatatacagcttttcccacctaatttgaaggcatgcacagttcttaactttatttctgtttgattcctttgtctgcaattcagtttattcaaaactagaaggactgaggagaaatgtgatgaattatgtacaggttattgataaccactcctgtaagtgtcaaggaaattgtgtctccagtatagggaatgaggctgcaaaattatccactttgggaaatcacacatttagagaaacaktaagttagaaaaaagtgcctcgagaagggaaaatcaaatataaaaagcctatt

SEQ ID NO: 324653 - DNA, 553 bp, Homo sapiens
ttttttaaaactagttttaggtttatgacaaaattgagcagaaggtacagagttcttctaagccccctaccttcccccgacatgcatagcctttccattttcagtacccactaccagagttgtacatttatcacatggatgaacctaccttgacacatcatcatcaccccaagtccacactttacattaggtgcattatatgggtttggataaacgtataatgacatgtacttaccattatagcaacacacagaggatttccattgtcctaaaaatcctctatcctattcatcccttcctcactcctagctcctggccaccactgaacattttattgtctccatagtgttttaccttttccaagatgttgtattattggaatactttartaagtgaaagaagccaatcattagtaagtgaaagaagccaatctgaaaaagcggatacattatgcagctttttcagattggcttctttcagttactaatatgtatttatgtttcctccatgtatttttatggcttgatagctcatttcttttagtgctgaatag

SEQ ID NO: 324654 - DNA, 573 bp, Homo sapiens
gaggggctgaaagctgggggctgggctgctagtcccataaacttgtgtgggaatttgtggtgccttttcttgacccatggaccaatcagcatgcccttcttccccctcttggaggcccataaaagccccagactcagccagagctgagcagatgggacaaccagctgcagagagggtagctcctgcagagaacttcagagatctgcagagatgttgggactaccagctgcagagaggagccacccactccagggcctcctctctgccaagagctgaamcctcaatgagacaacctgcctacagagaggagctacccactacaggtctcctctgaacagttctaatacacaataaagctcctcttctcactcaccctccacttgactgagtaccttattcttcctggacacaggacaaaaactccggtaaaggtgccaccagccacagaggtttctggccagaaaagtgacaccccaaagatcctgtgacattatcttttccactatcaaattatttgactatcccttactatttaagtttttttaaatgtgagcatgggaaagagacctttat

SEQ ID NO: 324655 - DNA, 611 bp, Homo sapiens
accacatgtatgttagaagaagatttgttcttttgaattaagaattcttaatgaatgcttatttaaggtagagccacagaaaggagaatgcctgcctcacctgttgcaggtgggtacaatctactttttgcctcagattcttcccagcgtgcttgtaaattcagayagttctttggaacttattctatttccttctccctgcagaaaggcttagaaatatgccagccacatacaggctattacttaatgaaaagaggttttctcctggaattaattagatgttgggcccagcaaagaaaatgtatgtagcaggagcagttctactttcttttaaaaaggagggataattgagttgattatagtcaaaaatgaatccctgatactaaaaatttagaaagagaaaacaaataaagaacaaattattttttacaagaaactcttgaatgaaaaattgtcctaacaaatgggtattcagtcttcactttatcattgtctacaatcaacacataggacacagactatttaaaaacatagatttcttcaaaatacaatcgtgttgtcaagtacttttgaaagacaaaaggtgaaggtgtgaacagcatgttaatttc

SEQ ID NO: 324656 - DNA, 619 bp, Homo sapiens
taagaatattgctctcaacagcataatataatctttagtttttactatttcattttgaaaataacataactgagttatttcacactatcatgccatggcaagatggaaaaaatatgagcaatacattttaaaatttatgttggtggcaaaatttacagaaacaattcatagtagggctctacccaaacttgcacttggttataatagagaagaacacaggaaagaggaataatatatggttataaatatttagataccaaatcattgagccatggttgatgacttcccaagtgcttctctaccggcaaygtaggagttaactactcctaaactaaacaactaatacaataattccttgatagtcaggctctaataattagttcagtcttctacaggaaaaagatctgcgacaaaattacctagcacatagtgaccaaaatctgtgttagtttcccgttgctattgtaacatattacaacagacttcgttgcttataaccacaaaaatttattatcttattgttattgaggtctgaagtccaaaatgggtcttacacggctaaaatcaaggtatcaccagacctattttctttcagtttcttctgttccaggagtgaatc

SEQ ID NO: 324657 - DNA, 619 bp, Homo sapiens
taagaatattgctctcaacagcataatataatctttagtttttactatttcattttgaaaataacataactgagttatttcacactatcatgccatggcaagatggaaaaaatatgagcaatacattttaaaatttatgttggtggcaaaatttacagaaacaattcatagtagggctctacccaaacttgcacttggttataatagagaagaacacaggaaagaggaataatatatggttataaatatttagataccaaatcattgagccatggttgatgacttcccaagtgcttctctaccggcaacgtaggagttaactactcctaaactaaacaactaatacaataattccttgatagtcaggctctaataattagttcagtcttctacaggaaaaagatctgcgacaaaattacctagcacatagtgaccaaaatctgtgttagtttcccgttgctattgtaacatattacaacagacttcgttgyttataaccacaaaaatttattatcttattgttattgaggtctgaagtccaaaatgggtcttacacggctaaaatcaaggtatcaccagacctattttctttcagtttcttctgttccaggagtgaatc

SEQ ID NO: 324658 - DNA, 556 bp, Homo sapiens
aatgaaaaataaatttgatatattggcaataaacataatattgtacaagctatgtattaaatttatcataattattactatacttaaatgtactggattgaaataatgaagaaaatagacaaaaaatgttcataaacatttgcatgtcmatttttactaactgcttttctcttcatatcccagatacacactattccactcacctcttactgctcaactcaggtgtcatttcctcctgcattcattcctataaactccttccggttttcaagaagcaaaataaatattttataaattatacgctttttaggtaatcaacttatgagctttatagagacattaatttttgcctgttcttttgtatttcaccagtgcctatcttgaggattggaacatacgtagtggatattctattgtatttgctgagagattgatggaatcaatgataaatgagtaagtgagggtaaaatttggcattcaatattattttaaattatcctccatagctctataaactctagtggttttatccatagcccccaacaaggcaggtcca

SEQ ID NO: 324659 - DNA, 508 bp, Homo sapiens
aatggtcaattaacacatattttgtatgttctatatattatataccttattcttacaataaattaagctagagaaaataaaatattattaagaaaaagagaaaacatatttactattcatttagtagaagtggctcatcataaaagtcttcattctcattatcttcatgttgagtaggttgaagaggaagaagaaaaggaggggttagtcttgctgtctcaggggtggcagaggtgaaagaggtggaaggggagacaggagrgatggattgaaaaaaagtctatgtataattggacccattcagttgaaacccgtgttgttcaagagtcaactgcatatgtgtctgtgtggagagggctgcatggggagagcaagcacacaggatgatgcaaatacacagaaaaagaatggtcaactccagtaaagatagagagtggcataactctggtaacaggtgcccaattattttagtccacattttcaagaaaatggagtccaaggcaaggat

SEQ ID NO: 324660 - DNA, 592 bp, Homo sapiens
acctcttattaaacaggctatccttttccatcgggtgtcttagcacctttatcaaagatcagttgacagtaaacrtatggatgcatttctgggctctctattctgctcctttggtctacaagtttcttttgtgactgcactatattgttttgattactatagctttttaatatattttgaaatcagaatgtgtcatgtatccagctttatttttcttgcttaagattgcttttgaattcttggtattttgttcttttaaatgaattttagaattgtttttctatgtctgttaagaatgccattgggattttgacagggattgcattaaaaccagatcaatgggtagtttggacattttaacaatattaactatttttttatggtcactaactttaataacaatacatatatgatgttatcatcatgaatgtaaattcaggttagacaagagattttcacaagtgtaataaagcgttctatattatatcaaagttagcatataatgtgtgatcaaatcagcttgctcataaatcattaagcaattccattatgggtaattcgtttagtgtttacaactaaacattaaacattc

SEQ ID NO: 324661 - DNA, 569 bp, Homo sapiens
tgattcactcactgcaatcatgtatcaaaatagattgtaagtattttcaagattcatccttgaaaatatcatattttaaaatgattaagttcctgaagctctatggaaaaatttgagtgtaattcagagaattttaggatatccatataagtacatagagtacatttgataaatgaccatgttcacaaggraagatatacctcccataaagctttaataacagaaatcaagtgtagcatttttgtgtagttttatttaaaatatggcatatgaatcatttatattataaatatagcttgcagaaaaagctatggtatacttaacactagtaataaatgtggttgagttagattttaatagtctctgcacatgcagttagacatgaaacatgcaagtttaaattaatgagttcagaaaaaatttgtctcatatatgcttcttttctttagatattactgtatttcagaaagatgagtattttatttcactcagtagtgaggttaattcagtaaactgaatgaataataaatgaactgctttcatttagaagtctgattttaaatgtttag

SEQ ID NO: 324662 - DNA, 566 bp, Homo sapiens
gctgcttctccagagtgtcaagagaagaagggaggtagaggcaaggtatacgactatataccagatgagacctctccatgtggagtgcccaggagcacgaaacggtaggggttacactgagcacttggctgaaaagcgaagtgttctcctatctaccacaaaaaggagtttctatgcacaggcagtaataaatcaccacattttaacagcagttgaataatgagtttgtgcaagacaactttggtagcatgggaggaaacaattgcttcaaccaaaggaaaacacttagaaaagagaaatcaacttagaatgctacttagaatgcaatttagaatgctatccaaatgctaacatttgggtaacagttgtatcaatgcagaatgtccttccttcaaagaaaaggtggatgcatggtaatgctattggtcaggatctttagtagagtttagtcaaacttggaagtgaagcaaccatgaagaatgrgtagggaatgaggcagcaaaagcaatgctatatatgtgtaataaattttagattcaaagtgatctttgaatttcctttaatcc

SEQ ID NO: 324663 - DNA, 603 bp, Homo sapiens
taaaatgttagcattgtctagacatgaatttctatgtcctttcagaaattctagactttgtagtaaaatgttgaaatccaaatccagtgtgtttgacagtggaggcaaagctattaaccactatgtcatctacttccaattgtataattcacaaaaccttttccagccaatgcagttatctcatcattatttatcttttaatgggtcatcttatttctgtgaaaatatttcctgtgacaaagtaaatactggttcacaagaaagatttttctgctgttgggtagttttaattctgaaaagaaacaggagaaaggagaacaggcagttctttcttatgttgaactcaaatttaattcttgaatttktattatttacaagagacacaacacaagtacacctttaattcattcaaccttcaaatatttgaaaccatttgtcaggccctcctgaaacttctcttttgtttgtcgatacaatcaaatgctgaatttttatacaattttttcacattctagcttatatcaagagattatatattccagtttgtctggtataaacctagcttatcctacctcttaaaagtgacctgatttgaactgtaaa

SEQ ID NO: 324664 - DNA, 603 bp, Homo sapiens
atgttagcattgtctagacatgaatttctatgtcctttcagaaattctagactttgtagtaaaatgttgaaatccaaatccagtgtgtttgacagtggaggcaaagctattaaccactatgtcatctacttccaattgtataattcacaaaaccttttccagccaatgcagttatctcatcattatttatcttttaatgggtcatcttatttctgtgaaaatatttcctgtgacaaagtaaatactggttcacaagaaagatttttctgctgttgggtagttttaattctgaaaagaaacaggagaaaggagaacaggcagttctttcttatgttgaactcaaatttaattcttgaatttgtattatttacaagagacacaacacaagtacacctttaattcattcaaccttcaaatatttgaaaccatttgtcaggccctcctgaaacttctcttttgtttgtcgatacaatcaaatgctgaatttttatacaattttttcacattctagcttatatcaagagattatatattccagtttgtctgstataaacctagcttatcctacctcttaaaagtgacctgatttgaactgtaaattac

SEQ ID NO: 324665 - DNA, 559 bp, Homo sapiens
gctcctaacctcaagtgatcttccagcctcagcctcccaaagtgctgggattagaggtatgagccagctcgcctggcctgctagtgtttaaagattaaattgtaagaaaaaaatagacattcctatagaaagaaatagaaaaagagacaaatggaagaatgaaaggaagacaggcaggcagacaagacattgtaataaattgacattagaaattctcactctacacattttcagttattttaaccatataggttattttatttcccaggacctcagttttattacatttgaaatgaataagttgaggcatatatatctataatatgaaatagagcatgcaaaataacgaaatcttgaaaaaacctatgtatcatctacaaaaggaaagtgttcactgtaaccttcttgaggtaatacagatggaaaactcaaaatagaacaaagaactccagctgacttgcaatcatttgagctaacatgtggacaactcaaatcaatatttyggcctcatcagcttggcagagtagctttaaaggtgacttgtaaaaggaattgtcaa

SEQ ID NO: 324666 - DNA, 367 bp, Homo sapiens
gggaaattgagagagcattctctgagaaggaaatttaattggaacttatccttaatcatctaagagtaaaaacattttgaagatattctagaatattttatagaacatttcatgaaaagaaaggacaaacagatgagacagaatagcaagaatagaggacattagtgaagtgaaataagccaracaaagacaaataccgcatcatcttgggcttctgggtcgggtagggacttggggaacttttctgtctagctaaaggattgtaaacacaccaatcagtgctctgtgtctagctaaagatttgtaaacgcaccaatcagcactctgtcaaaacggaccaatcagctctctgtaaaatggaccaatc

SEQ ID NO: 324667 - DNA, 600 bp, Homo sapiens
ctgtaaaacaaaggcctactctgcagggaaaaagactttatcagagctatatcttacccaggagaaggtcaattttacaactctcatacccaggagaagggcaattttacaactctagctatattagcccaactgcctcagaaaaggtgagggggaggtgggagctaagaaaatgtgtgaaagtcaarccaagaacaaagacctactaaaacattgagttttaattacaatgttgtagatctctacccctcacccacacgttcccaccacatgtatagggctccagtgtaataatagtggattatagctgaacgagatacaaggcacacatgtaagaaggattttttgttttggttgttgatttttttctttaagtaaaacccaaagacaacagaagaaacaaaaagaaggacattaaaagaatttgaaactctgacacctgttgccacagcaaatattcaacatagcccaactccttcccaagtgaacataaaacctcatactaaaggtatatttattttggttcatattatgtctagttttcaacaacaacaacaaaatagaaggtgtcttagtctgggcttctaaaacaaaatatca

SEQ ID NO: 324668 - DNA, 600 bp, Homo sapiens
ctgtaaaacaaaggcctactctgcagggaaaaagactttatcagagctatatcttacccaggagaaggtcaattttacaactctcatacccaggagaagggcaattttacaactctagctatattagcccaactgcctcagaaaaggtgagggggaggtgggagctaagaaaatgtgtgaaagtcaagccaagaacaaagacctactaaaacaytgagttttaattacaatgttgtagatctctacccctcacccacacgttcccaccacatgtatagggctccagtgtaataatagtggattatagctgaacgagatacaaggcacacatgtaagaaggattttttgttttggttgttgatttttttctttaagtaaaacccaaagacaacagaagaaacaaaaagaaggacattaaaagaatttgaaactctgacacctgttgccacagcaaatattcaacatagcccaactccttcccaagtgaacataaaacctcatactaaaggtatatttattttggttcatattatgtctagttttcaacaacaacaacaaaatagaaggtgtcttagtctgggcttctaaaacaaaatatca

SEQ ID NO: 324669 - DNA, 600 bp, Homo sapiens
ctgtaaaacaaaggcctactctgcagggaaaaagactttatcagagctatatcttacccaggagaaggtcaattttacaactctcatacccaggagaagggcaattttacaactctagctatattagcccaactgcctcagaaaaggtgagggggaggtgggagctaagaaaatgtgtgaaagtcaagccaagaacaaagacctactaaaacattgagttttaattacaatgttgtagatctctacccctcacccacacgttcccaccacatgtatagggctccagtgtaataatagtggattatagctgaacgagatacaaggcacacatgtaagaaggattttttgttttggttgttgatttttttctttaagtaaaacccaaagacaacagaagaaacaaaaagaaggacaytaaaagaatttgaaactctgacacctgttgccacagcaaatattcaacatagcccaactccttcccaagtgaacataaaacctcatactaaaggtatatttattttggttcatattatgtctagttttcaacaacaacaacaaaatagaaggtgtcttagtctgggcttctaaaacaaaatatca

SEQ ID NO: 324670 - DNA, 529 bp, Homo sapiens
agtgaattgatgaagagtaagttatgttttacattttatggaaatgtcattcactaggggactgattttgtattggtaatgaagtagccaatagagaaaatccaggggcacattcctgtaagtttatgtataagctagcagtgagttgaggctagtaaaaatacttgcgcctcagtgtatttcttccttaggagctcagttgtttttctctataattatggaaatgtaattgttcattttaagttgctawaacagaatatttgagtctaggtattataaagaaaagatgtttatttggctcacaattctgatggtcaaaaagtccaagtctgggcagctgcatctggtgagggtctcatgctgcttccactcataatagaaagtggaaggggagtgggagtgtgcaaggagatcatatggctagcaagaaaacaagagaaagaaaccaaagaagccagactatttttaactagtgcattcctacaagagtgagaacttacccttctgagaggacattaatctattcatg

SEQ ID NO: 324671 - DNA, 448 bp, Homo sapiens
gttatgatgccacacataggctctcacaagatgtagccccctgatcttggacttcccagcctccagaaccataagyccaataaaactcgtttctttataaattattccatgcgtggtattctgttatagcagcagaaaatggactaagacgagattatcttcaaaggatacaatggagtactagagaaaagacctgagatagagctagaacacatttctattctatttgtgaagtttggatctctatgaggtgttacagtgggccataggcccttatgagaccatattatagacatggtatattttattttttaaaaaaagaatgatctttatatacagagggatggggtcagaaggcatacatgacttaattgaaaaatcagtatactttaaagttttttcaactttcaaaaagttaatttaagtataaagtaatataaatgaccta

SEQ ID NO: 324672 - DNA, 581 bp, Homo sapiens
aattgaaaaatcagtatactttaaagttttttcaactttcaaaaagttaatttaagtataaagtaatataaatgacctaactaccacttagataaaaacaatactttaagtgtgtatatttatatatacagttcatatagaactgatataaatggtcaatgaaaaagaaataaatgagaaaattctgctgactcagtttgcattaaactgactwcagatttttattaaaatttttctatcagtaaagggaagaggaaggagattgaaaaataaatgtgtggcaaacaaaaaaaaaatcttacattcaagtactaaagatagtatgcttcatttctctttgccatcgtagtgtaaggactaattgttactccttcagaagtgactgttttcacagctcgcattgccatttaaagccacagaaacatgcatgccactccacaagtcttcctgtacaaaatgaacaaggggacattgtgagccacaaaaaggtatattgctggccaaaaaaagatactgaatttaatttgaactaaagctgagagaaaacacctaagattaaatatccgccttctttaaatctt

SEQ ID NO: 324673 - DNA, 612 bp, Homo sapiens
tttcatactactttgggagcaaggagtaagcatattttatactatacagagcatgccattttggtggtagcatggttataaaaattaatatttggtcccataaattgaattgtagtaaaaatttacaccatattctgtcatttcaaactgtgcgatattaatgttctcttgtcctttcctcccagcaggggtgcctttaacttacattygaggcagtgtatctttatttttaatagaagtacatataaggaaatatgtacttaatctttgaaagtttaatcacaactagtcacttacatttagactctgacatttactcataaaatgtttgctaaaaatttaaatgcagaaatgggagtaatacatgttttaaaaagcatctactgcaatcaggattctttccttgttgatataacagtgcctaccatcgctggccatgaggcattgcacatccccttttcagatataagtttatgtaagtaatttgccgtagaaacatttctgtttccttctgctttaaaaattttgttataagtctcaaaatcttgtgtatttagttcaatagaatgagcaccaaacttgatgtcagggtaacatggctgaattattagt

SEQ ID NO: 324674 - DNA, 653 bp, Homo sapiens
tcttcatctcattctcttctaatttgtaattggagtgagtcagttctataaagaaaacccactttagcagtttgaagaaaaaaaaagtaattataaagaaaatcagagacttgcacatgatccttcaaagaaaatgctaaaaatactgagtgaaagtcccattgagacttttctgcttcaccaacctgacatgggtgccgtattttgcagtacccaaatctttttcaccactgctctcaaaagccagagccccccaccgccattgccaaataccagaattcccagcagtctctatgccttcattcttgacctttaaaaaattgtaaatgattastatctgggataatgaattcctgacttctgtcttggaaagctggacctaatgtgacaaatactcaactttaataatgggttctcaaatcaaatgactccaagcagccagcatgcatgggagaaatccagttcaacactcaattctgctcattcttgatcagttactatttatttgacttttccaagatgttttctatctactttttccaaactgtgaaatagcattactgataatcaactaagaaaatcaatttacataaatagatatgatgatataatacctgaattaaactattactgtgaaagttccatttacattc

SEQ ID NO: 324675 - DNA, 570 bp, Homo sapiens
atatgtttttcatgttaaaaatgaaatcttctgaatattctgcagcagaagaatggtcaatagttcattctgtattttcatggcacaaaatagatttggaaaggcaattctaggattttaactttacagtgacactatgaagtaatataaatttatacttgtgcttaatataaaatgccatatgcataaagtatgttaaataacgtgagacaagacctaatataatttttaaaatacaaattayaatataaattataatatactaatatggacatatatatctttctttcataaaattataaagtttgaccatagattttattttacagatccaagcttcaaatgaattaatgaagctcttaagttatacatcctgctctgcacccttattgaaatgttttgagcaatggcccacctactacagcctgaccccttacatttaataaagattatatttacatataacccaaataaattgtaagctaaatcttattttcaacagtcataaatatgagtcaaatagctttaaatttatgtaaattttgctgcaatatttatagaggcagcaac

SEQ ID NO: 324676 - DNA, 582 bp, Homo sapiens
tgcattgcattattttttaggatgctcacatgccaaagctcatcagtgcctttcagtcacttagaaacatttatgatacattatttgtaattcctactatatgtgataaaaataagcaattgtatttgaagcaatgtgttttaaatagaagttttaaatgtatatacagactttaaatgataaattgaaacaaatagaagacatataattggcattatatatgcccctggtatagaaaaaatatataagtagttaagtacaaacaaggaatacttgtacctgtcttttgggggagatggtcaaataatacacaatttccattagtgaagaagaataagatcaagtgatctattgtataaataactataatgactataattaataacatgtattatactcttgaaaattgctaagagagtagattttaagtattctcaccacaatcaataattatgtgaagtaatgtatatgttaattagctcaatttggccattgcaaaatgtatacatattttaaaactatatttttatgcaataaatatatacaayattttgtcagttaaaacaaagcaaaatttaaaat

SEQ ID NO: 324677 - DNA, 573 bp, Homo sapiens
ccaccctttttgttaaaaatcaggatacccatggcacccagtacctcccagctctatgttttctcagtaattaccactccatcttctctgaaagtaattgtycttttgacttaggttattatagattatttttgtttggtaaggttattaatggaatattttgtgtttgtcttctttcataaggtgttttgtttataatattcatcagtgtttttgcatgtaatcgtagtttgctcatttttattacatttcacacatgaatttaacacaacttatccattttactgttggacaagtattattgttttctttttgtgtctattctgacacttttctctcagtgaacatatatattcatttctgtagggtatataactgtgagtggtcaaagttatatattggcccacatttaattgatattgccaaatactttctcacttttatgtacagggttactttcctgtcagtaatgtgtgaaagttccctttcctctacaacatttgattttttttttttaagttcatgtttctggtggtgtggtgttatcatactaaatgttttactttaatttcc

SEQ ID NO: 324678 - DNA, 553 bp, Homo sapiens
aagaaaaaaaaactatataaaattaaaatgataaaaaattaaagttgaattatacaagatacaactaaatggattctattaaaacaaaggttataaatacttaaacctcatcacttcctgattatttttactgcatcttaataatagctatgctttgaggttctttaamtgactgtgtctataaggcggaagtactctatcgtgctgtgctgctgcgcatctcgaacccatgttcacgcaagtcatgttggcaacttgaaattggccctggtgggagtatttatacaacaggaacaggcaaatgctacaggtcggcagtgatttgtttcatggattttctatgcttaaaagagcatcttgtctgtagctagaacactgtgagtagcacaaaacattgaggaaacttttctgaatattgaaaaactattatccagttcaacaaagaagccgctcatggcactaaggctgcagcctgccccaactctttgttgtttcactttgatctgctccttaacatgaatgaacatttcagtgtttgtgccaacaccacact

SEQ ID NO: 324679 - DNA, 615 bp, Homo sapiens
aactacccatctggaacattcctggcttccctgggttggctcatctcccacccattccttcttcaacagaggaaactaagcagaagggttattgagaatgcacgctcattcattcatccatttgttcacttgtagaaacatcattgattacgtacccactgcattccagccctgcactaggcactgggaacattccttactcaaagatgaataagaaaccacccctgagctcataggactcgtagtctactgggaggataaycaagaggtctgcgtccacaggggtgagtgtgggagtggcaggtatcccaggtgatagggaaacacaggtgaagggcagcaatttgagttgggggaggggacatagagcaggggaaaggagctagaatcaatacatttagggaaagattagagaatctgtgtgttctaggacctgcaaataggcacatctgacctgattgagtcacatcatataattggtactggatatgtttgtatgggtgtgcttgtgtggggtgggtttttaaaacgtaatggctcttctgatggcaagaagacttttgcaggaggttcagaaggagtatgatgtgtaaaaggttggatctcaactgtatt

SEQ ID NO: 324680 - DNA, 582 bp, Homo sapiens
tgtcatgtaagatgtgtctttttgaagtacaaggaccccctggtggttctgacattgagaattgagtgcaccctgtaagaaaagttgtgtgctcctcagcttcaactcacctaaaaattagggctttgtaatttaattctgttaatcctgtgatgtgctattatcaatgaatgaagaaataagactgagaggatataattaacctacccgagacaggtaaggctgctcgtatacagtggggtcaaactattatcatctcaggaaggcacacagtgacttgctcacattgccagggctgaaccttgcactggagccctctggttgacaaggccagccgtctaaccactacactgcaggacgagaccactcagatgtggctgctttgtctgacttctatgtccaagtcctttccacttcctcatatccacaacacgctgagagagaaaattaaagtattcttcctagatatttgactgtrtgattccaaatattttggggttcacagacccctttgggaatctgacaaaaactgtaagtacccacctacacaaaagcttgtttacaagttcacggagctcagag

SEQ ID NO: 324681 - DNA, 463 bp, Homo sapiens
tccctcccacgtggctggacgagccctcaggcgacagctgcgttctgtcsaggaagccacgtaagtggggcggggctggggtgggatgggtggtgggccctgtacccactgaccatgaaacactccaccctcttccccctcggtgttctgagtgcctgtgtcacaccagcattcccaccgcagatgcagctggaaaggcgccagtgggaatttcagtgggctcccatcccgggcagtggagtgaggcagggctccaggggtccctggatgcagccacgcctggatgcaggtcctggctctgcccctccccagggcatagtaacctcaggcatgtggctgaccctctctgctgtgcctcagtttccacagctgcacaatctggttagtaacaggcccaccccgctgggctgtggtgaggacactcgagatggtgtttgtgaagtgttcagtcgaggttggccag

SEQ ID NO: 324682 - DNA, 463 bp, Homo sapiens
tccctcccacgtggctggacgagccctcaggcgacagctgcgttctgtcgaggaagccacgtaagtggggyggggctggggtgggatgggtggtgggccctgtacccactgaccatgaaacactccaccctcttccccctcggtgttctgagtgcctgtgtcacaccagcattcccaccgcagatgcagctggaaaggcgccagtgggaatttcagtgggctcccatcccgggcagtggagtgaggcagggctccaggggtccctggatgcagccacgcctggatgcaggtcctggctctgcccctccccagggcatagtaacctcaggcatgtggctgaccctctctgctgtgcctcagtttccacagctgcacaatctggttagtaacaggcccaccccgctgggctgtggtgaggacactcgagatggtgtttgtgaagtgttcagtcgaggttggccag

SEQ ID NO: 324683 - DNA, 561 bp, Homo sapiens
cacatggcattgtgcgtttcacacatacacaaacttttcctgcacttgaacgacctgagcatgggagcctccttacattttgcatcccaggtgtgtcttgtttgcctcccactggtccaggttcagcatcctaggtgccaaagtgtgcaaaaaggccagcagctagttgtgatgagaaggaacstgagaaaacttccttgattacaatgtggaaagcaccagcgctttgatgaaggggttgcacaagccccacagtggacaaggaggagcctcgtctatgtcttgggctctggacccccattccgtggttctgttcagttctcatgtctgtgcttgagagtgggtgcaactgctcccacttcacactcccagctggcaggtgcagagccagactgacctggctggcaggaagccccaatgctttcatctataccacactgtcttacaggaagtggaatgtgccagaggcctcagatgcctcttctctttcttccaagggtcctgtcaaaaccccagcatgctgatggcactggggtgcaccacgattagggatgatcattc

SEQ ID NO: 324684 - DNA, 563 bp, Homo sapiens
aaatgctgcatgattctacttataggaggtccctagaggggtcaaattcatagagacggaagtagaacgsgggatgccagggctgggagaaaagggaatgggaagttagtgtttcatgggtacagaatttcagttagggaagatggaaaagttctggaaatggacggtggtgatggttgcacaacagtgtgaagtaatgcccctgaactctattacttaatgcccctgaactgtatatcacttaatgccatgaaactgtagttgaacaaggtgaaaatgataaattccatgttatttttatttcaccataatagtaatttttttaaaaacataggtagagattggagattggcaggaacagcattccaggaggtgggaacagccagtgtgaaggcatggagtatcccattcagtaccgaagcagaatttggtctccttagtgtgatcgcttacctggggaaagtcagccagtagctctaggtctcatgggtaaaacgtggaatgcgaatcccagcccagtccctctctcaagggtcaacaaggagcaaacagacagcggatgt

SEQ ID NO: 324685 - DNA, 563 bp, Homo sapiens
aaatgctgcatgattctacttataggaggtccctagaggggtcaaattcatagagacggaagtagaacgggggatgccagggctgggagaaaagggaatgggaagttagtgtttcatgggtacagaatttcagttagggaagatggaaaagttctggaaatggacggtggtgatggttgcacaacagtgtgaagtaatgcccctgaactctattacttaatgcccctgaactgtatatcacttaatgccatgaaactgtagttgaacaagktgaaaatgataaattccatgttatttttatttcaccataatagtaatttttttaaaaacataggtagagattggagattggcaggaacagcattccaggaggtgggaacagccagtgtgaaggcatggagtatcccattcagtaccgaagcagaatttggtctccttagtgtgatcgcttacctggggaaagtcagccagtagctctaggtctcatgggtaaaacgtggaatgcgaatcccagcccagtccctctctcaagggtcaacaaggagcaaacagacagcggatgt

SEQ ID NO: 324686 - DNA, 563 bp, Homo sapiens
aaatgctgcatgattctacttataggaggtccctagaggggtcaaattcatagagacggaagtagaacgggggatgccagggctgggagaaaagggaatgggaagttagtgtttcatgggtacagaatttcagttagggaagatggaaaagttctggaaatggacggtggtgatggttgcacaacagtgtgaagtaatgcccctgaactctattacttaatgcccctgaactgtatatcacttaatgccatgaaactgtagttgaacaaggtgaaaatgataaattccatgttatttttatttcaccataatagtaatttttttaaaaacataggtagagattggagattggcaggaacagcattccaggaggtgggaacagccagtgtgaaggcatggagtatcccattcagtaccgaagcrgaatttggtctccttagtgtgatcgcttacctggggaaagtcagccagtagctctaggtctcatgggtaaaacgtggaatgcgaatcccagcccagtccctctctcaagggtcaacaaggagcaaacagacagcggatgt

SEQ ID NO: 324687 - DNA, 563 bp, Homo sapiens
aaatgctgcatgattctacttataggaggtccctagaggggtcaaattcatagagacggaagtagaacgggggatgccagggctgggagaaaagggaatgggaagttagtgtttcatgggtacagaatttcagttagggaagatggaaaagttctggaaatggacggtggtgatggttgcacaacagtgtgaagtaatgcccctgaactctattacttaatgcccctgaactgtatatcacttaatgccatgaaactgtagttgaacaaggtgaaaatgataaattccatgttatttttatttcaccataatagtaatttttttaaaaacataggtagagattggagattggcaggaacagcattccaggaggtgggaacagccagtgtgaaggcatggagtatcccattcagtaccgaagcagaatttggtctccttagtgtgatcgcttacctggggaaagtcagccagtagctctaggtctcatgggtaaaaygtggaatgcgaatcccagcccagtccctctctcaagggtcaacaaggagcaaacagacagcggatgt

SEQ ID NO: 324688 - DNA, 444 bp, Homo sapiens
tattctggaatcaggtaggggttgggagagagaatgatggatggtcaaaaattcaaaaggcctgctatattccagaatgttcaaagagaaggtgtgatcaccaggccatgaacgccagttttcccaagaatgctcaggatttggctactcctgctctgaggaagaatgagtctaattttttttaactctttattttgcagtaattttagatttggagaaaaattacaagggatagcacagagaatttccatatttccttcaccaggttcttctaatgtgaacaccttacgtaaccatggtacatttgccagaactaagsagtaattgttaccacaatattagcgagaccccaggtcttgttaagatttcacctatttttccactaatgacctttgcggtgttgctttaggatccaatacaggatgcgaattctgggtttgggtg

SEQ ID NO: 324689 - DNA, 542 bp, Homo sapiens
accatggtacatttgccagaactaaggagtaattgttaccacaatattagcgagaccccaggtcttgttaaratttcacctatttttccactaatgacctttgcggtgttgctttaggatccaatacaggatgcgaattctgggtttgggtgtcctgaccatcatgtctcctctgatctgtgacgctttgcctgtctttctttgtttttcatgaccttgacatttttgaaggtgaaatatgttgtggaatttccccagtttggatttgtctgatgttttctcatgatttgactggggttatgagttggcgggaagaaccgcactgtcgtggcagttcacaatagcagcccagcttattcctggtgatgctaagcttggtcccttggtgaagctggcatctgcaggtttctcctctacagagctactatttctccctttccatactcttagtccaaacctcactcaaggtgaggggaattaagtcccactctcccgagggaggaggatatgcacatatcacagcaatttcttctctgttactg

SEQ ID NO: 324690 - DNA, 542 bp, Homo sapiens
accatggtacatttgccagaactaaggagtaattgttaccacaatattagcgagaccccaggtcttgttaagatttcacctatttttccactaatgacctttgcggtgttgctttaggatccaatacaggatgcgaattctgggtttgggtgtcctgaccatcatgtctcctctgatctgtgacgctttgcctgtctttctttgtttttcatgaccttgacatttttgaaggtgaaatatgttgtggaatttccccagtttggatttgtctgatgttttctcatgatttgactggggttatgagttggcgggaagaaccgcactgtcgtggcagttcacaatagcagcccagcttattccyggtgatgctaagcttggtcccttggtgaagctggcatctgcaggtttctcctctacagagctactatttctccctttccatactcttagtccaaacctcactcaaggtgaggggaattaagtcccactctcccgagggaggaggatatgcacatatcacagcaatttcttctctgttactg

SEQ ID NO: 324691 - DNA, 607 bp, Homo sapiens
acgagtttttctttttttctaatacatgttwgccttgataaattggttacagttatcctcattttaccactgaagaaggcgaggcgaggtggcttggtaaggtcatgctgaaggtggcagagctggcagctggagggtgttactgtctccagggctgcttgagccctctgcacaaaacaggtgcacctgtggccctgcctgaggctctgtgtcccttggaggggacagttcagattccctatcatctcccctgtggcaaaatagttttgctattttgtatctggaagccttgccatgttatgtgctggaggctttgcctttctgatttgacctgccagacataggtgggtagcatccaggtagaacaggggtacctactggcaaagctgggactcaccctgggtgtcgcgatcacaatgccatgctagctgccggcatgagatcccatatggagcatctcaccaacatccagaattccaaattctcccagtacaaaccaccaatgctatactcatcttgtaaatgaagaaagtacggtgattggcctatggctctgaattaaagaaggggccaaagaatttgagttaaaattcatgtttcatgtctc

SEQ ID NO: 324692 - DNA, 607 bp, Homo sapiens
acgagtttttctttttttctaatacatgttagccttgataaattggttacagttatcctcattttaccactgaagaaggcgaggcgaggtggcttggtaaggtcatgctgaaggtggcagagctggcagctggagggtgttactgtctccagggctgcttgagccctctgcacaaaacaggtgyacctgtggccctgcctgaggctctgtgtcccttggaggggacagttcagattccctatcatctcccctgtggcaaaatagttttgctattttgtatctggaagccttgccatgttatgtgctggaggctttgcctttctgatttgacctgccagacataggtgggtagcatccaggtagaacaggggtacctactggcaaagctgggactcaccctgggtgtcgcgatcacaatgccatgctagctgccggcatgagatcccatatggagcatctcaccaacatccagaattccaaattctcccagtacaaaccaccaatgctatactcatcttgtaaatgaagaaagtacggtgattggcctatggctctgaattaaagaaggggccaaagaatttgagttaaaattcatgtttcatgtctc

SEQ ID NO: 324693 - DNA, 539 bp, Homo sapiens
gggtgaattttgtgtgatctcaacctcaggagaactgggcttctttgaacagctggctgttttttcccttttggacatggatccatgaacggtggggctgtgctcttcaccctggctcctagataaggagtgttggggtgttgaaggctgaaagtatgagggtcgtgatcaactcagcataccactggaggctataagagtaaacagtacactgcttacccaccgccccatcacgtggagaggcactcatggcaggcttcgtgcctrcagtccccactcccagctccatcatactcctctgctcttatcttcccctttgactcattccacccctcccctcaccagcttctttaaaaatgttttatttggtgtattatagttgtgcagtgttttttttagaacaaggtagtaaggcactctgtgaatgaaaagttaaagtgaagcatttcaggtagtgtgggggctatttggggcctcaccccagtgagttcggagattccaagatcttctgggggcctccaggcttccctgtcccatcc

SEQ ID NO: 324694 - DNA, 619 bp, Homo sapiens
aatttttcatttaatttcttctttggggttatttagaagtgtgtcatttaatttacaccaaacaaatttacaccaaataaatttaacaaaattatttctgttattgatttctaatttaattccattatggttggagaagatactttgtttaattttactccttttatagtcattgagactttctttaagaccctatggcttacatagggtctatcctggtgatgttttatgtaagcttgaaaataatggatattctgggtggattgctaatatatgtcagtttaatcaagttgtttgataatgttgttcagatcttttttatcctttctgactttctctccacttgttctatcaattactggaagaaaattmtcaaaatcttcaactatcattggtatattgtgtattgaactttttagttcagtcagattttgcctcacgtgttttaggactttttaaaaaggtacatgaacataattttgacagctctggctattgcttgctcttttcttattatgaagtcacccttttttcccagtaatatgtgttatcttaaattctattttgcctgatattaatatagtcaccccagttgtaatgtatttattgttcacatggt

SEQ ID NO: 324695 - DNA, 619 bp, Homo sapiens
aatttttcatttaatttcttctttggggttatttagaagtgtgtcatttaatttacaccaaacaaatttacaccaaataaatttaacaaaattatttctgttattgatttctaatttaattccattatggttggagaagatactttgtttaattttactccttttatagtcattgagactttctttaagaccctatggcttacatagggtctatcctggtgatgttttatgtaagcttgaaaataatggatattctgggtggattgctaatatatgtcagtttaatcaagttgtttgataatgttgttcagatcttttttatcctttctgactttctctccacttgttctatcaattactggaagaaaattatcaaaatcttcaactatcattggtatattgtgtattgaactttttagttcagtcagattttgcctcacgtgttttaggactttttaaaaaggtacatgaacataattttgacagctctggctattgcttgctcttttcttattatgaagtcacccttttttcccagtaatatgtgttatcttaaattctattttgcctgatattaatatagkcaccccagttgtaatgtatttattgttcacatggt

SEQ ID NO: 324696 - DNA, 619 bp, Homo sapiens
aatttttcatttaatttcttctttggggttatttagaagtgtgtcatttaatttacaccaaacaaatttacaccaaataaatttaacaaaattatttctgttattgatttctaatttaattccattatggttggagaagatactttgtttaattttactccttttatagtcattgagactttctttaagaccctatggcttacatagggtctatcctggtgatgttttatgtaagcttgaaaataatggatattctgggtggattgctaatatatgtcagtttaatcaagttgtttgataatgttgttcagatcttttttatcctttctgactttctctccacttgttctatcaattactggaagaaaattatcaaaatcttcaactatcattggtatattgtgtattgaactttttagttcagtcagattttgcctcacgtgttttaggactttttaaaaaggtacatgaacataattttgacagctctggctattgcttgctcttttcttattatgaagtcacccttttttcccagtaatatgtgttatcttaaattctattttgcctgatattaatatagtcaccccrgttgtaatgtatttattgttcacatggt

SEQ ID NO: 324697 - DNA, 626 bp, Homo sapiens
ctctctttctcttagtgcttgcaatgttatctcctttatttggcttttggcattttgactatgacatctaggtgtgattctctttaagtttttttttgttttgtttttgtttttgttttttaccttgggtytattcagtttcttgactctgtaagttaatggtatttactcacatggagacttttcaactttttaaaaaaataattgttctgtgcctctttctctttcctctccttttgggactcctattacatttgtgtttgaacactttatattgtctggcaggtctctaaggctctgtttacttaacttgtcgttctctgttctttggattgcataacttctgctctatcttcaaatgtacagcttctttcttctgccgtctcagatccgctcttgaacccatgtagtgaatttttgtaattttcagctgtagaaatcccatgtgattccttttttataattttcatctatctatccaaagtatctattggttcactgttaacaaaattttctttaattctttgaacatttttccttaattccttgagcatagctataacaacttctttgaagttgtgtcttaatctactgtctgtgttggtttttctggtcacactttcctg

SEQ ID NO: 324698 - DNA, 558 bp, Homo sapiens
tatctattggttcactgttaacaaaattttctttaattctttgaacatttttccttaattccttgagcatagctataacaacttctttgaagttgtgtcttaatctactgtctgtgttggtttttctggtcacactttcctgtttcattgtatgtctagtaatttctggttgaaaactagacattgcagtgattctagaytccattcactttcctaaaagttgttggttttctgttttagtaacttttctggacttaaattgcagaattaatctcctccatggtgtgcagccactgatactacagtgcagtttttattataatatttttctttgtttttcagtctggctccctaaaggtgtcctctattcttctattatatgatgatgagacaattatttagacagaagttatgctcaggtaccttgaacaactaagcctcccatcttctgctgccagagctgtgtgtggccgaagaaacacattcacatgtacaagtcctcacggaaggtgggagggtgagacaggggtgagggttgaaaaagtacctatttgttcc

SEQ ID NO: 324699 - DNA, 558 bp, Homo sapiens
tatctattggttcactgttaacaaaattttctttaattctttgaacatttttccttaattccttgagcatagctataacaacttctttgaagttgtgtcttaatctactgtctgtgttggtttttctggtcacactttcctgtttcattgtatgtctagtaatttctggttgaaaactagacattgcagtgattctagattccattcactttcctaaaagttgttggttttctgttttagtaacttttctggacttaaattgcagaattaatctcctccatggtgtgcagccactgatactacagtgcagtttttattataatatttttctttgtttttcagtctggctccctaaaggtgtcctctattcttstattatatgatgatgagacaattatttagacagaagttatgctcaggtaccttgaacaactaagcctcccatcttctgctgccagagctgtgtgtggccgaagaaacacattcacatgtacaagtcctcacggaaggtgggagggtgagacaggggtgagggttgaaaaagtacctatttgttcc

SEQ ID NO: 324700 - DNA, 558 bp, Homo sapiens
atagatactttttatgcatgaatccatktattctcacaaaaccccttggggaagtgaaacagattatttccatagtgtcttaaaaccccagaactctgcgttgctgcgtctattgacatgaacacctgtcaaacctgcaactcatagctcagtattgtctcagtccaatccaaggaaatgaactccttgagaaagctgacattctggaccatggggtagaagctaccctgtctgcctcccacacccactctcaaggatccaagactatgaagggagaagagagagcccaccgagtgacttcctcttataagccaatatcaagacactagtggaaaggaaccagctgaccagtggctcactgtgtctggctggaccagcaagactctgacgtcatcacagaagccttcttggtcccattggtcctttgactgctgtgtacaggatgccacccaccactccagacaccactcaccactctagatgttgggatccttctcccgttacctccattattcttgttctctactcctctgagttttcatagccaagcaaatttcc

SEQ ID NO: 324701 - DNA, 458 bp, Homo sapiens
gcagtataaactagactcagctgagcagcctgcttcacattatgcgggggatgagttagtgccttctgtggacatccctcatgctcttttctgtgtgcactaaattccttaggttgrtagagccttctagacaccttggagttcccctcaaatattggttcctaaggagaatttcacctatcaccataaccagctgcctgcctcactcctgtgtattaggaaaaaaaaaaaaaaaaagaaacacaagagatttgtatctcgtacactttgtattagttttttattgttgccataacagattattatgagttcagcggctaagaaaaacatccatttattatctaacacttctgtgggttagaagtcccacacagatttctccaggctaaaatcaaggtatcagcaaggctgtgtccctgactagggctctaggaaagaatctgcttccaagctcactg

SEQ ID NO: 324702 - DNA, 458 bp, Homo sapiens
gcagtataaactagactcagctgagcagcctgcttcacattatgcgggggatgagttagtgccttctgtggacatccctcatgctcttttctgtgtgcactaaattccttaggttgatagagccttctagacaccttggagttcccctcaaatattggttcctaaggagaatttcacctatcaccataaccagctgcctgcctcactcctgtgtattaggaaaaaaaaaaaaaaaaagaaacacaagagatttgtatctcgtacactttgtattagttttttattgttgccataacagattaytatgagttcagcggctaagaaaaacatccatttattatctaacacttctgtgggttagaagtcccacacagatttctccaggctaaaatcaaggtatcagcaaggctgtgtccctgactagggctctaggaaagaatctgcttccaagctcactg

SEQ ID NO: 324703 - DNA, 538 bp, Homo sapiens
aaaaaaaaaaaaaaagaaacacaagagatttgtatctcgtacactttgtattagttttttattgttgccataacagattattatgagttcagcggctaagaaaaacatccatttattatctaacacttctgtgrgttagaagtcccacacagatttctccaggctaaaatcaaggtatcagcaaggctgtgtccctgactagggctctaggaaagaatctgcttccaagctcactgacattggcagagtctaattccttgcagttataggactgagattccatttatttgcaggctatcagctgcgggccatcctcaggttccacaggcctctcttcagtccttgcacgtggcttcctccatctcagaaccagcaacagcgcaccaaatccttcttatgcttggaatctctctgattttccgttctgctgcatctccttcctgcctcctcaaatctaaaaaaaatttgcgattaaagtgggctcacttgaatgatctgagataatctccctatgttaaggtctgtaactttaattaga

SEQ ID NO: 324704 - DNA, 525 bp, Homo sapiens
gatagtgagttcttagaagatctgaaggtttaaaagtgttgcacttccccctttgctctctttctcctgctgccatgtaagtaagacttgccttgcttccccttctccttcagccatgattgtaagtctcctgaggcctcccyggccatgcagaactgtgagtcaattaaacttcttttctttgtaaattacccagtcttgggtatttctttatagcagtgtgaaaatggactaatacaatatgtaacaagttttaataatttgttaggagcccagaaagaaccacaaaagtttaagaactctgagaaagaagaaaactaaacaataagtaaaagtaattcctagagtgcacagaggtataaattaataacaacaaatatagatcagatagtattattttgacaacttcactgtcttcatataacttcagaagccaggctgatatctaaaattatttaacttatgcgtgtaatcccagtgcatttgaaggcaaggtaggagggtgcctggaggtcaggagcttga

SEQ ID NO: 324705 - DNA, 525 bp, Homo sapiens
gatagtgagttcttagaagatctgaaggtttaaaagtgttgcacttccccctttgctctctttctcctgctgccatgtaagtaagacttgccttgcttccccttctccttcagccatgattgtaagtctcctgaggcctccccggccatgcagaactgtgagtcaattaaacttcttttctttgtaaattacccagtcttgggyatttctttatagcagtgtgaaaatggactaatacaatatgtaacaagttttaataatttgttaggagcccagaaagaaccacaaaagtttaagaactctgagaaagaagaaaactaaacaataagtaaaagtaattcctagagtgcacagaggtataaattaataacaacaaatatagatcagatagtattattttgacaacttcactgtcttcatataacttcagaagccaggctgatatctaaaattatttaacttatgcgtgtaatcccagtgcatttgaaggcaaggtaggagggtgcctggaggtcaggagcttga

SEQ ID NO: 324706 - DNA, 593 bp, Homo sapiens
atgcaagcaggaaagagagacattttagaagtcttcaggaggtaagaaatagtaggagcttcttgaattttggaaatcagaacacaaaatagaggatacccctctgcagcagaattttaattcaacatcattaatatttttcacactcaagactttttttcccaatcaagactaccttgacttttgttctaccttgtaaatgtttttagtctatggttgactccaccctaatgtagcaggacgagctgctgacaaaactcctyagacaccgagttaaagaaggaaggggtttattcggccaggagcatcggcaagactcctgtctcaagagccgagctcccccagtgagcaattcctgtcccttttaagggctcacaactctaagggggtccacatgagagggtcgtgatcgattgagcaagcaggtggtacgtgacaggggctgcatgcaccagtggtcagagtgaagcagaacagactgggaagtttcacaatgtctttctatacaatgtctggaatctatagataacatcagttgctaggtcaggggtcgaattttaactaccaggcttaggtcaggcaggcccaggcct

SEQ ID NO: 324707 - DNA, 285 bp, Homo sapiens
attttcatggactgtatcctcaaatatgttttccaagttgcttactctctctcaggaatgccaatgagtcataggtttagtctctttacataatcccatatatcttgaaggctgtgttcattattaaattttttttattttaaacatcttttctrtttgtatctgaccaggttgatttgaaggactggtctttgagctctggatttttttcctcagcttggtttagtctgtttttaaggcttccaattgtatgttcaggttcttgtagtaaatttttcagttcca

SEQ ID NO: 324708 - DNA, 285 bp, Homo sapiens
attttcatggactgtatcctcaaatatgttttccaagttgcttactctctctcaggaatgccaatgagtcataggtttagtctctttacataatcccatatatcttgaaggctgtgttcattattaaattttttttattttaaacatcttttctgtttgtatctgaccaggttgatttgaaggactggtctttgagctctggatttttttcctcagcttggtttagtctgtttttaaggcttccrattgtatgttcaggttcttgtagtaaatttttcagttcca

SEQ ID NO: 324709 - DNA, 620 bp, Homo sapiens
gcactcagcaacttcgcgcaggcttcccaccttcctccctcttcaaccccagtgcctgtgtcacctctctttgagattggttaaaagtggaatagtttacttgatatttttgtgtctatcaggggagaggtgtttcctggctgtgtctagttggccatcttgtaggagatcccatcctataaagataatattctttgagaactgttacttctaagtttcctgtaagtctcatgctgtggccagtttctgagagtaggactwacttggaggaattgatttctccacattgattattttatgataacctatagaaaggactagaattaaattagaatttattataagtgttagtgattatgttgcaaaatagtaggatgaccacagcaaaacaattttgaatttcaaactgaattccattttctgtcgattacgctcaaggtagcaaaaataatcagcaaaatggaccactttgcattcaataaatattgattcattcccttctgtctgaagttgtatatattatttttacccaaaactccccagctcagatctatttttctttcactctaacccaaattaataaaggaaaaaataataaaaattttcctaaagaactgtgt

SEQ ID NO: 324710 - DNA, 620 bp, Homo sapiens
gcactcagcaacttcgcgcaggcttcccaccttcctccctcttcaaccccagtgcctgtgtcacctctctttgagattggttaaaagtggaatagtttacttgatatttttgtgtctatcaggggagaggtgtttcctggctgtgtctagttggccatcttgtaggagatcccatcctataaagataatattctttgagaactgttacttctaagtttcctgtaagtctcatgctgtggccagtttctgagagtaggactaacttggaggaattgatttctccacattgwttattttatgataacctatagaaaggactagaattaaattagaatttattataagtgttagtgattatgttgcaaaatagtaggatgaccacagcaaaacaattttgaatttcaaactgaattccattttctgtcgattacgctcaaggtagcaaaaataatcagcaaaatggaccactttgcattcaataaatattgattcattcccttctgtctgaagttgtatatattatttttacccaaaactccccagctcagatctatttttctttcactctaacccaaattaataaaggaaaaaataataaaaattttcctaaagaactgtgt

SEQ ID NO: 324711 - DNA, 558 bp, Homo sapiens
attattatatttttcagtcagccaaagaaaagactatcaggaaactggcacaagaccaccccaatgcccttttcttccctttccactcaaactttctgtttctctatcctatagcagaatgagagttagaaagaatagctgtgacccacagctcaggaagctggaaaaatttctaaggaacaggaaaacttagagcttgctacccactaggtaaataatccarctgtgtttaaaaaagggaaggtataaggattttgatctagaagaggatgctaaaagaagtggggcattggggaaaggagttagtaggatgaaatatgggtgtgtgtgtggaatattctcaactaactagaaagcattcacatggggtgccacagaagggctgggcagtgggtctccaaccagtgggaggaattagactgttatgaaaagtccttcttgatttcacccctttcccaagctctctatagttgaaatgtacactgtaaaccactgtcaatagttgactgaatcttatttgggtatgtgttaacatggcaaaaagaagggaataaacca

SEQ ID NO: 324712 - DNA, 555 bp, Homo sapiens
  misc_feature (1)...(555): n = A,T,C or G
nnnnnnnnnnnnnnnnnnnaaatttttttagtcactgctaacctaaaagtctatattcagtagaatagccttcaaatatgaaggtgaagtaaaaacattttcagactaacaaagctgatagacttcattgccagcagattggcactataaaaattggtgaagagagtacttcagctttaagttatgataccagatagaaacacaggtctgcagaaagaactgaagagcattagaaatggcaagtatgaaagactttagttaataatttctttaaaaaataattacccacttaaagcaaaaataataatccattatgtagtttgtaatatgtgtggaagtaaaacatatgaaaaaagtagcataaaaaccaaacattaaacatattacaggtgagttattaacaaatrtataaactaaaattctaaagatttcagaagcatatataggagaacataatttatgaattggagtagtaacatattttttggatgagaaaaaagaacaaaacaaaggagaatgattgataaattcaaatttactgaatcgagtaggata

SEQ ID NO: 324713 - DNA, 581 bp, Homo sapiens
catccgaatcaggaatcaggaaacgtagggacttatcgctaaattttastgttgaaatatatctgagggataattttggtaaatttctggatcgtatggataggaaattaaatttcaaggtcacaaacccacacattaagctcaggccattgattctgagcaaaagtattcttcagtgtcctaaacattcatgtttttcccaagtatcataactgacacagactccttaaacatttttatactgctgtgatcaagttattttattttcaagccaaagctatgagtgggcttaaatcacagaagcacatcagaattctagagtgagggaaccacaactgggctgagaacaaagaactggaatacagttaagagaatgatttgtccatttaagcttggtgtcaaggtgaaacatttaatccagaagctggctggtaattaaagatctaagcacattcagaaaaacacagaggtgagtttttaaattttggaccttcatccaaagcaaaggcactttaggcagtacagtgtagttgttaagagttttgatcttggagcttgacagcctcagtttgaaaccagca

SEQ ID NO: 324714 - DNA, 608 bp, Homo sapiens
tgaaacatttaatccagaagctggctggtaattaaagatctaagcacattcagaaaaacacagaggtgagtttttaaattttggaccttcatccaaagcaaaggcactttaggcagtacagtgyagttgttaagagttttgatcttggagcttgacagcctcagtttgaaaccagcattgtcacttaatagctacatggaaaaattgctttttctatgtctccttttttttttccctaattccacaataggagataataaaactactgaattcaaacacttcttatgagaattgaatgattaaagggtttgtaaccgtgcctggaggatagtaaacactaagtgatttctaataaatactatgccagctaatgtgtaccaagatattcattgtagcacatttgtagaattaaagaatgagaaataatataaaatactttatactttatggaggattggttaaatagatcacattatacccacaccaaaaaacattacattgctgttaaagaatgtgaggtggctctataggtaccacttgtgctatatggagaagtaaatttcttaaattaatctaacaggatggtatagttttttactgacatattt

SEQ ID NO: 324715 - DNA, 608 bp, Homo sapiens
ttgtccatttaagcttggtgtcaaggtgaaacatttaatccagaagctggctggtaattaaagatctaagcacattcagaaaaacacagaggtgagtttttaaattttggaccttcatccaaagcaaaggcactttaggcagtacagtgtagttgttaagagttttgatcttggagcwtgacagcctcagtttgaaaccagcattgtcacttaatagctacatggaaaaattgctttttctatgtctccttttttttttccctaattccacaataggagataataaaactactgaattcaaacacttcttatgagaattgaatgattaaagggtttgtaaccgtgcctggaggatagtaaacactaagtgatttctaataaatactatgccagctaatgtgtaccaagatattcattgtagcacatttgtagaattaaagaatgagaaataatataaaatactttatactttatggaggattggttaaatagatcacattatacccacaccaaaaaacattacattgctgttaaagaatgtgaggtggctctataggtaccacttgtgctatatggagaagtaaatttcttaaattaatctaacagga

SEQ ID NO: 324716 - DNA, 636 bp, Homo sapiens
agaaaagaaagctaacaaactgtttaatcagaactatatcaacttttaggtttaaaaaattattttgtgaaaaatccattagaatgtttcagagatatgatgattggtatgcagataaatttcatttttaaatatttggttagaaaaagttagaatttttcaaaatataaaattatgaattacataaacactcaatcatattttgtcccttttgatagattatgtgagtaaaagaaacgcaaaaagacaaaagaatatagatggattcaatgacatataaaatctttataatctaagccaaataaaattatatagcactggcaactttgtcatgactaaatttatgagtgtaacactaaataatgaactsttttgtgtgtgacttataaagtagactcattgttgaatgggagaaatatattatccaatgcattttgagcaagatgaaatgtaaggtaccatttttatagaaatattttagaggaagctgttcaacattggaggataatagccgttacttataaaatacagcatttcccctctgattcataggaaagtaacaagatctttatcagaatgttctcatttccacataattcaaataccatgtatatcaaaaaataacaagtaaagaca

SEQ ID NO: 324717 - DNA, 544 bp, Homo sapiens
ctcactctgttgcccagtgtggatcaaagataataactggggacagataaggcaataatcatgcctgggcacttatagaagagactgaggacttggcccagtttttatcccagcaaaagggtagagggttctgacccagtcatagaagtttccctgagctaaaagtggctaaaatgaaatctgttcacagtctcccttaatgctagtctcagaaatttcccaggaagttatcagttcttgccctgagaaattccatcagtctttgagcaaaaggaatatcttctgtctaaataaagaagcatgaatttaaggagagaattggcacatgtttatttatcattccgctctgtggcttctttggagagaaccatggccacgatctattaccaacctctattcagggattttccagagtttttccaagcattgcccataacataatactgtatgggggagtgtggaagtgaaaaaaaaaatggaaaatgaaacccaaatgttttakggcttagagacagggaaatatcatgtctagctcaaccagatc

SEQ ID NO: 324718 - DNA, 582 bp, Homo sapiens
atatgctgcaattctcagtaaagattagccatgatattgacatttttactcttgatacatttccatcttttctacaatgaacttattttagaaatcatgagaaaatcaatacaaatttattttaaaggcacgactatttaatttcattcatatggttatgtctgttggagaacctatattttcccatccttaaaataactttttcctgtattgcttactacctggaattgatcttccatttcaaatatatacattgaaatatatatatacatttatttcctctgtcacccaactagagcaagtgctggtaaaatatcagtcttgttccctgctgtatctttagtgtttagaaaaattcctgatacttagttggtactttataaatatatgttaaataaattaacttttaatacatacatamaaacaagagcctaattttacaaaattttggattacttagcaatttttctttaatataagtttcccaaaagaagaaagtctttgtatttttatgctgaagtttttgaaagtttaaattttccctcatctaaaatgttcttcccagttagcatatttaaaatg

SEQ ID NO: 324719 - DNA, 631 bp, Homo sapiens
taatattagcaatactaatactgtgacattgtcaccaataaatatggtattttataccatattatgattatttctattatgtaaaaatattgagttcactagtaccccaaaattatagtagttattctatttccccagaccttgttaattcatgtgactattaagaaactcaggtattgtgatattacaatttttagcactttgacaactattctaatacatgggattcctttgttgtattgtttatttagtyattacaaatataaaatagtattttaaaaagataaaaagataattcatagacttcaacagagtgcccagagggcccagggcaccaaaaaagaggagaagagaaaaggaaaaaaaccttgaagagagcaatgaaatgctgaaggcaaaagctgtaacttactcttgtttgtatctccagaatttagtctagtacccagaacatatttgttctcaaaaatcattgttggattacaccctagtatgaaagcatcaagaataaattagtaaactgtgacttggtggaaggattcaccaagtagataatgtttgaacgggctcttgtaaaatgagtaataagagaacatagtgaatagcatatacacactgatcagtaaagaac

SEQ ID NO: 324720 - DNA, 631 bp, Homo sapiens
taatattagcaatactaatactgtgacattgtcaccaataaatatggtattttataccatattatgattatttctattatgtaaaaatattgagttcactagtaccccaaaattatagtagttattctatttccccagaccttgttaattcatgtgactattaagaaactcaggtattgtgatattacaatttttagcactttgacaactattctaatacatgggattcctttgttgtattgtttatttagttattacaaatataaaatagtattttaaaaagataaaaagataattcatagacttcarcagagtgcccagagggcccagggcaccaaaaaagaggagaagagaaaaggaaaaaaaccttgaagagagcaatgaaatgctgaaggcaaaagctgtaacttactcttgtttgtatctccagaatttagtctagtacccagaacatatttgttctcaaaaatcattgttggattacaccctagtatgaaagcatcaagaataaattagtaaactgtgacttggtggaaggattcaccaagtagataatgtttgaacgggctcttgtaaaatgagtaataagagaacatagtgaatagcatatacacactgatcagtaaagaac

SEQ ID NO: 324721 - DNA, 598 bp, Homo sapiens
cttttctcttttttcttagcattgtccctgataatctttataaattataacttacaaatttagttctttccttcgtcgatttgagatragagttcttaaacttatattgaaatcagaaagagattgtacatgatattaaaatgaccttaagagcacttttcccatacatgtcttgttgcttttgtggtttatgtcctgtatgagggacttgcttatgtccctcattgttaggtctttttatatctttaaatattttgtgattattattccattgtgccctgtaagtcttgtggtagctgtgcttgtatggaaaacagaaacagatgtatgtaccaaactcaataaatgtcctttcacttgttcacaaagattagcttagtaaaattaattgggatttgatggaagtgcaacttggtaaatcaaagaagacttccaaaaggatatggattttaaactacttccaagaaaaccagaggaacatggaattgcaagaatggagagagtcaagatgagggtgagagccacaattaaaacacacacacacacacacacacacacacacacacacacacatgcacacatgcaatagtaaacataa

SEQ ID NO: 324722 - DNA, 598 bp, Homo sapiens
cttttctcttttttcttagcattgtccctgataatctttataaattataacttacaaatttagttctttccttcgtcgatttgagataagagttcttaaacttatattgaaatcagaaagagattgtacatgatattaaaatgaccttaagagcacttttcccatacatgtcttgttgcttttgtggtttatgtcctgtatgagggacttgcttatgtccctcattgttaggtctttttatatctttaaatattttgtgattattattccattgtgccctgtaagtcttgtggtagctgtgcttgtatggaaaacagaaacagatgtatgtaccaaactcaataaatgtcctttcacttgttcacaaagattagcttagtaaaattaattgggatttgatggaagtgcaacttggtaaatcaaagaagacttccaaaaggatatggattttaaactayttccaagaaaaccagaggaacatggaattgcaagaatggagagagtcaagatgagggtgagagccacaattaaaacacacacacacacacacacacacacacacacacacacacatgcacacatgcaatagtaaacataa

SEQ ID NO: 324723 - DNA, 506 bp, Homo sapiens
attgatctttgttctaacagacagttaaattacatctgaacccatttgatctatgtggagtttcatttatggtggcttagactagtctttattctagaactaatttattcccactacaaaggtgtgacccttctaatatctcccccaaagaacccacgtwttctgtgagtgtttttcactctaatgggaactcaaatgatttctggtcctgtatgttctctgggaattgttcagctcctcaataactttttctaagaagttgtttttgcacactccatggaatttcaccttacccatatataggactcaaagggactcctaaacagattatctagaactttttttttccatagctccctcctgtctgttatatcaccttgcacatcctagttaccaagacctgcccaaactttaatctatgtctcccaccattcagcaataccacaggcgctgtttgaatttcccttccctgcaccaagatctggaagttgcctccaggcagaaag

SEQ ID NO: 324724 - DNA, 506 bp, Homo sapiens
attgatctttgttctaacagacagttaaattacatctgaacccatttgatctatgtggagtttcatttatggtggcttagactagtctttattctagaactaatttattcccactacaaaggtgtgacccttctaatatctcccccaaagaacccacgtattctgtgagtgtttttcactctaatgggaactcaaatgatttctggtcctgtmtgttctctgggaattgttcagctcctcaataactttttctaagaagttgtttttgcacactccatggaatttcaccttacccatatataggactcaaagggactcctaaacagattatctagaactttttttttccatagctccctcctgtctgttatatcaccttgcacatcctagttaccaagacctgcccaaactttaatctatgtctcccaccattcagcaataccacaggcgctgtttgaatttcccttccctgcaccaagatctggaagttgcctccaggcagaaag

SEQ ID NO: 324725 - DNA, 555 bp, Homo sapiens
ccaattctttagcatccttcccacccttggccaatctgggcaattatgatcctatcttcccctaagtttcagatacatttatgtctataccagtaatccccaaacactgatttccaaccaagtttacaatggtgcatataaaaaagagaaaaatagtaatgtgctattcatttttaaaaacctgtcttttattctgagataattcctactatttactgttagaatgtttttgtttttccttttatgaaaaaatgataatagataatagttcattttatatttttttcttagtgaactaaaacattaacaatactataatgattcccaaagttagctgytctgaaaatttactaacctaggaaatttttatatcagcaatctttttttttccctcaaaaatggcagattagaggctttgttagcatacctcatccatctggaaataacaaaatagtgtgtagagattcatactgtgaacttttatacaagaaggaacacaggagcttaacacaaaagtgaaagaaacttcagatactttgaaaaataagagcgggc

SEQ ID NO: 324726 - DNA, 555 bp, Homo sapiens
ccaattctttagcatccttcccacccttggccaatctgggcaattatgatcctatcttcccctaagtttcagatacatttatgtctataccagtaatccccaaacactgatttccaaccaagtttacaatggtgcatataaaaaagagaaaaatagtaatgtgctattcatttttaaaaacctgtcttttattctgagataattcctactatttactgttagaatgtttttgtttttccttttatgaaaaaatgataatagataatagttcattttatatttttttcttagtgaactaaaacattaacaatactataatgattcccaaagttagctgttctgaaaatttactaacctaggaaatttttatatcagcaatctttttttttccctcaaaaatggcagattagaggctttgttagcatacctcatccatytggaaataacaaaatagtgtgtagagattcatactgtgaacttttatacaagaaggaacacaggagcttaacacaaaagtgaaagaaacttcagatactttgaaaaataagagcgggc

SEQ ID NO: 324727 - DNA, 588 bp, Homo sapiens
aatgacgctctaccgtacatcacaccagttcgtggatggagaaagagactcttcccagaaaactcctggtttgaacagaccataatacataaccatccaagctctcacaggacagtcttttatgggtttagcttggagcctttggcaggacaagtgagagcaaggctgaaggctcaggaacatcttatacctgctcccaagaggccagggctatgtgcccactaacattagtccccatccctgccacgtggcacacctgaggccactgcttagagagggggagtctaacataatttgtgaatgccacagtgggatctggggtcctaagtccactttctaagttcctgagaattatgcttctgacaccaggatagagtttcaacagcaaaacttaaaatatacctgttttaataatgagccaatttcaaacttaaacttgctgacttttccagtccatgctctgatttctctctctctctcttaaaatcaagctatttatctcaccagctcggctctgcaacttgctttattgtctgtgcaattgacacaggttatttktaatgccaaattgagaccatcagaaaacaa

SEQ ID NO: 324728 - DNA, 586 bp, Homo sapiens
tggcaatttcagcaagcaactgaagtaatgatttctttctgaaaaacagctcctggcttgctactaggatccagtgaaaacagaatagaacattaagtgaccatgcaacctagctgtccatcatgagttgttattggatgcatttaactctaaattccagcaagcccaaaatgagctgtgaaggcacaattaaattgcatatcagatcacttacattccttacaaccatattcctgctacatgccacctctccctcaaactacacctatggcttcatgagaagtgccctatgaccagcaagcttgcagaggggaaaatgcctctccctggttaaagaaagacctgagcattatgttacagctgcaagtgtaccactgttgcataacaactccattcaggggtgatcctgagaatcagctgagaggagaaagcctccytgtgagaagcacttacagtggtacatatcattgttcactttacttgaaaatatgtggcctgaggtcagtatctacatggtaatttctggcatgtccaatagactggctgaataagcaggactggggaggagcatatttggatgactagt

SEQ ID NO: 324729 - DNA, 595 bp, Homo sapiens
acttacattccttacaaccatattcctgctacatgccacctctccctcaaactacacctatggcttcatgagaagtgccctatgaccagcaagcttgcagaggggaaaatgcctctccctggttaaagaaagacctgagcattatgttacagctgcaagtgtaccactgttgcataacaactccattcaggggtgatcctgagaatcagctgagaggagaaagcctccctgtgagaagcacttacagtggtacrtatcattgttcactttacttgaaaatatgtggcctgaggtcagtatctacatggtaatttctggcatgtccaatagactggctgaataagcaggactggggaggagcatatttggatgactagtgacaaggtagtttgggaaaggaatatttagatacatttttgggaatgggaccagcacctgagaatatctgtgctccatgtgactgctcagcaaaattaccaccaagaagagagtactaataagtatatggacaaggtgactgttactgaaagagtgagccattttccttgcctagtcaattcagtacttggctaaatgttagtgttttgacagggac

SEQ ID NO: 324730 - DNA, 566 bp, Homo sapiens
aaaatcttaaaggaaaagaacaaagctggaggatttatactaccgtctatggaggccaagtgtaaagcttaattaagacagagtggtattagcacaagggtagacaaaataaccaatgggagagcatagagagttcaaaaatagacctctatggtcacatgggatagactrgggattttttgttgttgttctggatcaatcagatatccatatggaaaaaatatatcttgtcatctacttcaaaatagttacaaaaataaaatccagatggattgcaggactaaacataaaaagttaaaatcatagaggaaaatatagaacatcttaatggtcttgatgtagacaaagattttcttaacaagacatataatgtactaaccataaatttaaagaatgataaattggactatactaaaattaacaatatctgtctataaaaagatattactagcaaagtcaaaatgtaacccacagaatgagagaaaacatgagatatctctctctctctctctctacatatatatatatatataaacacacacacatatcaagtatagaaatatatg

SEQ ID NO: 324731 - DNA, 453 bp, Homo sapiens
caatgaaaaggaagaagtaatttctatttctggaaatatgatggattatcctgtaaaaattccttaaaaaactagaaacactaaataaaatataataagcatccttctaaagggtaatggtcagccataaagaaaattatcccacatggaaacatgggaattcaagttggaagaaccaaaacagtggtttaaaaaagtagaggaatctaaataaatattgagtccaaaacaataatagtaatacattgtggtgtttaatatatatagaaaaatgtaagttaacaataatacaggcaagargaagataaataggactaaagtgtgataaaatcctagattttttcagaagtggtaaaagtactaaattatatcacactggaagaagttaaggatgtgtgttttgatttttagaggaaccacaaaaaaacagtaaagttgacaacttaataagtg

SEQ ID NO: 324732 - DNA, 573 bp, Homo sapiens
aagccttcaactctcctgctgagggattgattttgttagagggctgcagaaggtgtgtttttcatttagacatgcttgtgtggctgtgaacacaaagggtaaattccatctaggcagtaattgataaggaaccatacgtgaaatgagatatattgccatagcaaaaaaaaaaaaaaaaaaaaaaaaccaaaaccctgtgctctctattggtctgttaggtgctggctgaaaaacgaggatatctcaaggaatattaattttgagcaattctttctttcatgtatttaaaatactgttgtaaagaaatttattttaaaaagtttcagattacctgcaaaatggctgtattagaagtttattagatcatacaaactcaatgtattatatctaaatgtgactcccttaaaaatgagagaatagagcctttgttccttcctctttttctcttttactggagagaggttagtaaaggtttactctggtgacatttggaaatgacactgggcttgccattttctttggtaaacagttctgcttggagtgcctmaaatatgtatccttaagaccagattt

SEQ ID NO: 324733 - DNA, 644 bp, Homo sapiens
taacatctttaaactgctgaagaggcaggaggggtttctatggggaactgtcaatctagaattctataaatgggagaaacatctttcaaaaatgaaggtgaaaagacattttccgaaaaacaaaactgagagactttgttgtcagcaagcctgcactacaataaatgttaaagcatgttctttaggctgaagggaaataataccagttggaaactcaaatctgtacaaagaaataaagaacaccggaaatagtaaatatatagataaatgtagaagaaccttttkcatttttaaaatgttttcacaggtaaattaaagcaaaaataggactgtgtctggtggctcacagctataatcccagcactttgggaggcctaggcaggtggattgcttgagtccaggaattcgagaccagcctgagcaacatggcaaaaccctgtctctaaaaaaaaatttaaaaataaaaaataaataaagcaaaaataaaacaatgtgctgtggggtttatggtgtatgttgaagtaagatgtttacagcacaaagaccagaatgtggtaagtggatgtgcagtcacccctcagtatccttgaggaattggttccaggacctcctacggataccaaagtctgcagatgttcaagtcc

SEQ ID NO: 324734 - DNA, 565 bp, Homo sapiens
gaaggggagttgtttctcaaagaagaatcagagtatagttcagaaggaagggaaagtaattaaactatcagccatcaattacagtatacttaaaaaagattgaataaatatatacaccaaatattatcagtaatgatttgagacagtgttcaataatttctttacatgcttctgttttctaatttatctaaaatgaaattttgttaaatgtaaaaagtcacttgaagagaaaagtacaaaagaagtatcttttcaccaaacaatcctaacctcttccaaaatggtatgcctcagtagagattsgttccatgtgcatgcttttacccacttttactgtcaagtatgaactattttgtattctacttttttctccttgacattatttcatgcagaccattccataaatccaggtagtcttcatatttgacattttaatggctatataatgtttcattgtattgctatgtcaagatttacttagtcatttcctggctgttaatgactctggattcatctgccattatgaaaagcataactgtaaacttctctgcaaaactggagcttt

SEQ ID NO: 324735 - DNA, 595 bp, Homo sapiens
ttgggtatgtgaatctacttttccaaccatgtctttggttcctgttttcgtgccattttagtctgctggtttctttctcaggaacatggctgtctttcctcacagtgttctccctgaccttttctctacacttcgcttctcaagtgtgtcttccaaagtactcatttttttctttggtgctgttctgttcgtaagccctttctgtacctttaaaattttagttttcatgctttttttttcttgtcyttatctcacccagctcacctttttatctcagcttgctgttctttcatctggtctgctggtttattatctcagcatattttcccattgtgaatttccactcctattttatcgaagtcgtaacttgcatcctgaggacagttgaaattgtttttatgtttaagtagcctcctgctatttcaattttacttagctttttaaaaatagcaatgattactgaattttattaataaagaagataaaaatcatgtgttgtgtcttttaacttgttgataaaataactaagttaccagacctccaattattaaagagttcttaaattcacagagtaaaccctacttgaccatagtgt

SEQ ID NO: 324736 - DNA, 584 bp, Homo sapiens
cttccaatgacaaatttgcaagatgtgcaaaaacagagaccacggggaatggtctctttctctaccctaaccctcgcctccaaaatctcagattcatcctgtatgtcacaactgttacatcacttccctgtttagacattgttcacatttctatatcattctagaagataaagttcaccttgttgycccggtatatgaggccccagttaacccttccagccttctattttcccagttcccttatccctacccccttacttgagccacatcacagtttcctgaactttccatacacatcacacctctgggacgttgtctcaccttttccagaattgttgtatatccttcaagacccagttcacatgtcactgtcttttaaagttactcttgataaccgggcacagtggctgacacctgtaattccagcactttgggaggctgaggcagccagattacctgaggtcaggatttcgagaccagcctgaccaacatagtgaaaccctgtctctactaaaaatacaaaaaattagccgagcgtggtggcgggagcctgtaaccccagctactcaggaggctgaggcagg

SEQ ID NO: 324737 - DNA, 591 bp, Homo sapiens
gaatctcttcccataatctacaaggtaattttagtgggagatggggtgtttccactggatagaattatgagagtttttttaatgtttttgagttcttatgattttctttttgtgttatagtgagcatcratttcatgaccagaaaagggtaacaaatacaactttatattgaattttgacatgcaaaatacttcagaaccatatgctgccaatattttttattgaattcattgtaatcataagatagccacatatacctaaatatatacttcagtttgtctggaaaagtctcagatctgcagcaataattggagtcctgtaagacatgtgtatctacctttccttctttatttggctgtcaaaacctttggttcaaatattaactccaaatttgttaagcctccttcccgttattcgaaataggtagaccatagattctctcctggggttatatgtgaaataagccactgtctttgtattttttcttcagtgtgtctattttgcacagagagaaaaccaagaaggtgggaataagaatctataacaattttgcattcgacatggatatatttcatgtgttttaggtggaga

SEQ ID NO: 324738 - DNA, 591 bp, Homo sapiens
gaatctcttcccataatctacaaggtaattttagtgggagatggggtgtttccactggatagaattatgagagtttttttaatgtttttgagttcttatgattttctttttgtgttatagtgagcatcaatttcatgaccagaaaagggtaacaaatacaactttatrttgaattttgacatgcaaaatacttcagaaccatatgctgccaatattttttattgaattcattgtaatcataagatagccacatatacctaaatatatacttcagtttgtctggaaaagtctcagatctgcagcaataattggagtcctgtaagacatgtgtatctacctttccttctttatttggctgtcaaaacctttggttcaaatattaactccaaatttgttaagcctccttcccgttattcgaaataggtagaccatagattctctcctggggttatatgtgaaataagccactgtctttgtattttttcttcagtgtgtctattttgcacagagagaaaaccaagaaggtgggaataagaatctataacaattttgcattcgacatggatatatttcatgtgttttaggtggaga

SEQ ID NO: 324739 - DNA, 591 bp, Homo sapiens
gaatctcttcccataatctacaaggtaattttagtgggagatggggtgtttccactggatagaattatgagagtttttttaatgtttttgagttcttatgattttctttttgtgttatagtgagcatcaatttcatgaccagaaaagggtaacaaatacaactttatattgaattttgacatgcaaaatacttcagaaccatmtgctgccaatattttttattgaattcattgtaatcataagatagccacatatacctaaatatatacttcagtttgtctggaaaagtctcagatctgcagcaataattggagtcctgtaagacatgtgtatctacctttccttctttatttggctgtcaaaacctttggttcaaatattaactccaaatttgttaagcctccttcccgttattcgaaataggtagaccatagattctctcctggggttatatgtgaaataagccactgtctttgtattttttcttcagtgtgtctattttgcacagagagaaaaccaagaaggtgggaataagaatctataacaattttgcattcgacatggatatatttcatgtgttttaggtggaga

SEQ ID NO: 324740 - DNA, 591 bp, Homo sapiens
gaatctcttcccataatctacaaggtaattttagtgggagatggggtgtttccactggatagaattatgagagtttttttaatgtttttgagttcttatgattttctttttgtgttatagtgagcatcaatttcatgaccagaaaagggtaacaaatacaactttatattgaattttgacatgcaaaatacttcagaaccatatgctgccaatattttttattgaattcattgtaatcataagatagccacatatacctaaatatatacttcagtttgtctggaaaagtctcagatctgcagcaataattggagtcctgtaagacatgtgtatctacctttccttctttatttggctgtcaaaacctttggttcaaatattaactccaaatttgttaagcctccttcccgttattcsaaataggtagaccatagattctctcctggggttatatgtgaaataagccactgtctttgtattttttcttcagtgtgtctattttgcacagagagaaaaccaagaaggtgggaataagaatctataacaattttgcattcgacatggatatatttcatgtgttttaggtggaga

SEQ ID NO: 324741 - DNA, 565 bp, Homo sapiens
agcaataattggagtcctgtaagacatgtgtatctacctttccttctttatttggctgtcaaaacctttggttcaaatattaactccaaatttgttaagcctccttcccgttattcgaaataggtagaccatagattctctcctggggttatatgtgaaataagccactgtctttgtattttttcttcagtgtgtctattttgcacagagagaaaaccaagaaggtgggaataagaatctataacaattttgcattcgacatggatatatttcatgtgttttaggtggagaatgacaaaggtagatttgtgagcctactgtttggaatacctcaggatcttagaaacagcgatactcatagttggaaaagcatcactgtggcatgctttcatacatcttttctgacatccacacgattaatctgtgggatgcttacaagacagaatgattttctaaagatgtctgagaaatggccgctgggcaaactttcstatgaatactcattttctgaagattcaaagtatgaaaccaacaaggatagattgctgctctttgagtatggcca

SEQ ID NO: 324742 - DNA, 560 bp, Homo sapiens
  misc_feature (1)...(560): n = A,T,C or G
ctcaggcaaaatttctgcctcagcctttagagtagctggggccacagatgtgtgccaccatgcctgattaaactttgaattatgtgtagagacagagtctccctatgttacccagactgggtcttgaactcctgggctcaagcagtcctcctgcctyggcctcccaaagtactggaattataggcatgaaccaccatgcctgaccctttggccggtttttaatacagttgtttgtttttttcctgttgagttgtttaagttctgtgtggattctggatattagtccttcattgggggcataatttgaagatactttctcccattctgtaggttgtctatttactctgtagattattttgctgtgcagatgctttttagtttgattaagtcccatttgtctatttttggttttgatgcatttgcttctgggatctttatcataaactctacctangccaatgtccagaagagttttttctaggttttcttctaggtcttacatttatgtgtttaatccatctagagttaatttttgtacatggtgagagatagaggtgcaa

SEQ ID NO: 324743 - DNA, 592 bp, Homo sapiens
tataatcaaatccagaaacaatacttttgagtctgtatttgccacctgaaaggagtgtgagtaaaattgaattcctggtcctctcagaactcatggaattcctttcctcgggagaaaaccagattatttttgtaattaaaatagctgtatagctgtagacagaaaagaaaatraaaaagagaggcagggaaaactttccattattgattttatcatgctgctgttttagaaaaaaaaaagaagccaggatatagaactactagtttgttcctacagtatgctttgtaccctcagttgaaatattgcagcagttagattatttgatggaaatgggtggcttattcagaagtctggttttcaacatggtgtgaattaaggttagtaggtctgtaccatccccaaacccacctgcctggctttaccataacagctgaagttcctgtcaccagcatcctctgtgcaacctgctatcatgatacagacctgggagagtaacttattattgggaatctccttaattaaaaatcaacacttgtcagaggaaggaagaaatcaggactgtgaggccaacttctatagcagaggaatccaa

SEQ ID NO: 324744 - DNA, 592 bp, Homo sapiens
tataatcaaatccagaaacaatacttttgagtctgtatttgccacctgaaaggagtgtgagtaaaattgaattcctggtcctctcagaactcatggaattcctttcctcgggagaaaaccagattatttttgtaattaaaatagctgtatagctgtagacagaaaagaaaataaaaaagagaggcagggaaaactttccattattgattttatcatgctgctgttttagaaaaaaaaaagaagccaggatatagaactrctagtttgttcctacagtatgctttgtaccctcagttgaaatattgcagcagttagattatttgatggaaatgggtggcttattcagaagtctggttttcaacatggtgtgaattaaggttagtaggtctgtaccatccccaaacccacctgcctggctttaccataacagctgaagttcctgtcaccagcatcctctgtgcaacctgctatcatgatacagacctgggagagtaacttattattgggaatctccttaattaaaaatcaacacttgtcagaggaaggaagaaatcaggactgtgaggccaacttctatagcagaggaatccaa

SEQ ID NO: 324745 - DNA, 592 bp, Homo sapiens
tataatcaaatccagaaacaatacttttgagtctgtatttgccacctgaaaggagtgtgagtaaaattgaattcctggtcctctcagaactcatggaattcctttcctcgggagaaaaccagattatttttgtaattaaaatagctgtatagctgtagacagaaaagaaaataaaaaagagaggcagggaaaactttccattattgattttatcatgctgctgttttagaaaaaaaaaagaagccaggatatagaactactagtttgttcctacagtatgctttgtaccctcagttgaaatattgcagcagttagattatttgatggaaatgggtggcttattcagaagtctggttttcaacatrgtgtgaattaaggttagtaggtctgtaccatccccaaacccacctgcctggctttaccataacagctgaagttcctgtcaccagcatcctctgtgcaacctgctatcatgatacagacctgggagagtaacttattattgggaatctccttaattaaaaatcaacacttgtcagaggaaggaagaaatcaggactgtgaggccaacttctatagcagaggaatccaa

SEQ ID NO: 324746 - DNA, 549 bp, Homo sapiens
aactgagatgatagtgtaaaaataattttccatcacctccttttkaacttaatattacatatttgtccaaaggcttagaaacattttaaacatacttttttggtttttttaaaatcaactttttattttgaggaatatctgccctgcagaaaagtgcaaaaaaatgctttggtaacacctgtatattcttcaatcgtcaattatttttatttgccatattaattttatctctctctacagtttattttgttgagccctaaagataacttttaatggctgcacgtatttactcctgtgtatgtatcatagttaattattctcaggaatagattatttctctttttacctttttttaccatttaaaattcagttcactgagcattcgtgctaagcattatacatacaagatctaactttaaaactataaccctaaggggcaggagttacagaagataggattaaagcttagagaatttaagtaacttgccaaaggtcaaatagctaacaagtggaggggctaagacatgaatcctggtttactggacttag

SEQ ID NO: 324747 - DNA, 549 bp, Homo sapiens
aactgagatgatagtgtaaaaataattttccatcacctcctttttaacttaatattacatatttgtccaaaggcttagaaacattttaaacatacttttttggtttttttaaaatcaactttttattttgaggaatatctgccctgcagaaaagtgcaaaaaaatgctttggtaacacctgtatattcttcaatcgtcaattatttttatttgccatattaattttatctctctctayagtttattttgttgagccctaaagataacttttaatggctgcacgtatttactcctgtgtatgtatcatagttaattattctcaggaatagattatttctctttttacctttttttaccatttaaaattcagttcactgagcattcgtgctaagcattatacatacaagatctaactttaaaactataaccctaaggggcaggagttacagaagataggattaaagcttagagaatttaagtaacttgccaaaggtcaaatagctaacaagtggaggggctaagacatgaatcctggtttactggacttag

SEQ ID NO: 324748 - DNA, 549 bp, Homo sapiens
aactgagatgatagtgtaaaaataattttccatcacctcctttttaacttaatattacatatttgtccaaaggcttagaaacattttaaacatacttttttggtttttttaaaatcaactttttattttgaggaatatctgccctgcagaaaagtgcaaaaaaatgctttggtaacacctgtatattcttcaatcgtcaattatttttatttgccatattaattttatctctctctacagtttattttgttgagccctaaagatracttttaatggctgcacgtatttactcctgtgtatgtatcatagttaattattctcaggaatagattatttctctttttacctttttttaccatttaaaattcagttcactgagcattcgtgctaagcattatacatacaagatctaactttaaaactataaccctaaggggcaggagttacagaagataggattaaagcttagagaatttaagtaacttgccaaaggtcaaatagctaacaagtggaggggctaagacatgaatcctggtttactggacttag

SEQ ID NO: 324749 - DNA, 602 bp, Homo sapiens
gatgaaaaaggaaaagtgcatgaaaggttagttttcctcaattttttgcaagaatgacatgtgaaaaaaatattggtgaacctagctattccttttccttgtattttgtgaccaagrtatttctatttataggaagaatataatcaagccattaatgtcaatgtcgtttttgttattcatacaaaccagttaaggaatctaaatgtgttaaatgtgcaaacattgtacagtaagagcagtgcagccttttggggtaatgatcatatattccttcaggtaacatgactaacagcttgggttaccaatacttagcctttgttttagggttgagagatgggtgaatgtgcggcttttaaccaatgacttgatatagatttcgggaactggctatgtggtggggagaaaactgtgaagacaatgtgggctggtagtttagaccaggtggacgcatttgaactcggactgaggagaagtgggttctttcctcagctttgccattgactcgctgtgtggctttgggtaagtcagttacactttctgtgccatctttttttcatttgtaaaacaaaccaaactcaaaccaaaccttcaaaaaagtgaag

SEQ ID NO: 324750 - DNA, 622 bp, Homo sapiens
aaaacaaaccaaactcaaaccaaaccttcaaaaaagtgaagaaggctatsttccttgcagaataagacaagagaagatctgaccattggcttctaccttttgtgcccatgcatcctctctgatctgctgtgacaggtctccgaaagagtcctttataacgttgcttttcttctatacttgcaccatcattttttgggaaactcactttcctgccctcgggttgtaacatatgaagcataatggacttagcattttcaatgggagcccagcaaaaatctctaatgaagagctctttacataagtttggaacaaaaaaaccacatgtctccaggaatattttttgggggccatgcttaattttcagggatggcaacagtataagtaaagaactcaatatagggatgggataactgaaagatgattttgttggaggaaatggaagatagggaagggtcattggattttatgtagatagtgtgaagaaatgcagcctacatttgattactcaaaaactgatttatcccagcctttttgttctttcccttctgcttgcctggctttagccttttttgctggttttgttaatatgtttactgtacagtggcaaagaaagagaatgctg

SEQ ID NO: 324751 - DNA, 489 bp, Homo sapiens
ttttgttaatatgtttactgtacagtggcaaagaaagagaatgctgataaggctcaaattacttaactttgttaccatctctagtaaaagctttagggaaggtgaaaatcaggtggcatttgtggttaatatcactggtttttttttttttttttttttttttgcatattctagttaartctgtctctcagatcactgggaattgtccagaaaggggcaaaattttagccaaattttaagtatatcaaatcactgaaggcttatgtagaatttgcctaaggactttgatagtgtctggaaataaatgcttcttatttcagaacaagtggtaaaacaaaacaaaacaaaaaaaagctaaaaaaaatccatgagatgaaaattacaaatttggatgatttttaaatagttaaacttttttgaacccagaaaaaggtctagtttggtttgagtttttggagagaaggtgcaggtcagttcttacttggttcc

SEQ ID NO: 324752 - DNA, 489 bp, Homo sapiens
ttttgttaatatgtttactgtacagtggcaaagaaagagaatgctgataaggctcaaattacttaactttgttaccatctctagtaaaagctttagggaaggtgaaaatcaggtggcatttgtggttaatatcactggtttttttttttttttttttttttttgcatattctagttaagtctgtctctcaratcactgggaattgtccagaaaggggcaaaattttagccaaattttaagtatatcaaatcactgaaggcttatgtagaatttgcctaaggactttgatagtgtctggaaataaatgcttcttatttcagaacaagtggtaaaacaaaacaaaacaaaaaaaagctaaaaaaaatccatgagatgaaaattacaaatttggatgatttttaaatagttaaacttttttgaacccagaaaaaggtctagtttggtttgagtttttggagagaaggtgcaggtcagttcttacttggttcc

SEQ ID NO: 324753 - DNA, 489 bp, Homo sapiens
ttttgttaatatgtttactgtacagtggcaaagaaagagaatgctgataaggctcaaattacttaactttgttaccatctctagtaaaagctttagggaaggtgaaaatcaggtggcatttgtggttaatatcactggtttttttttttttttttttttttttgcatattctagttaagtctgtctctcagatcactgggaattgtccagaaaggggcaaaattttagccaaattttaagtatatcaaatcactgaaggcttatgtagaatttgcctaaggactttgatagtgtctggaaataaatgcttctyatttcagaacaagtggtaaaacaaaacaaaacaaaaaaaagctaaaaaaaatccatgagatgaaaattacaaatttggatgatttttaaatagttaaacttttttgaacccagaaaaaggtctagtttggtttgagtttttggagagaaggtgcaggtcagttcttacttggttcc

SEQ ID NO: 324754 - DNA, 489 bp, Homo sapiens
ttttgttaatatgtttactgtacagtggcaaagaaagagaatgctgataaggctcaaattacttaactttgttaccatctctagtaaaagctttagggaaggtgaaaatcaggtggcatttgtggttaatatcactggtttttttttttttttttttttttttgcatattctagttaagtctgtctctcagatcactgggaattgtccagaaaggggcaaaattttagccaaattttaagtatatcaaatcactgaaggcttatgtagaatttgcctaaggactttgatagtgtctggaaataaatgcttcttatttcaraacaagtggtaaaacaaaacaaaacaaaaaaaagctaaaaaaaatccatgagatgaaaattacaaatttggatgatttttaaatagttaaacttttttgaacccagaaaaaggtctagtttggtttgagtttttggagagaaggtgcaggtcagttcttacttggttcc

SEQ ID NO: 324755 - DNA, 586 bp, Homo sapiens
atctgatttaaaagggggcaaaagaccttaataaacatttctcaaaagaaggcatacaaatggccaacagacatatgaaaacatgctcaacatcactaatcatcagcaaagtgcaaatcaaaaccacaatattaccttattccagttaaaatggctattatcaaaaagacaaaagataataagcattggcaaggatgttgaggaagagggaaacccatacactgttggtgggaatgtaaatgaatatacccattatgaaaaacagtatggaggttcctcaacaaattaagaatagtactaccatatgatccagaattcctgggtatatatcccaaggaaaggaaatcagtgtgtggaaggaatatctgcacttctataattatcacagcactactcacaatagccaagatagggaatcagcctaagtgcccatcaatggattagtaagtgaagaaaatgtggtatatatacacagtggaatactatttggtcataaaaaaaatgagaacctgtcattygcaccaatatgggtgagcctggaggatattgtgtttagtgaaataagccagacatagaaagaaaaata

SEQ ID NO: 324756 - DNA, 598 bp, Homo sapiens
tgttttgccaatattttattaagatatatccactcttttttcctttggattttcatgaatttgatggcttttctgcaaagttttctagaaccatattttattctaaaaacattgtaactatagctcatctggaagaaaactcagagttaattattcataaatttgaatgttgcttctattgaccttgtaaatgattatatttgataatcttgacctgatttattaggtgcttttgcttacaatacctcatgtattttatatattatatactacatttacataagactgcatagaatacatgaattgtgtataatacacatgtaaatataacacaataaggaatatgtgcatcatacacatttcaaatatacacatatggtatacatcagagagtaactgtctctgcctctggtgtyaaattttataaataaaaaataatgatgccaggtgctgtaacatatttactagcaccacttcatcttcatctttctgtaaatttcttctcaaacatagtctaattttaagataattcctctctttctgttttcaaattttgtgccagaaaataactagaaatcattcatatactagattccat

SEQ ID NO: 324757 - DNA, 558 bp, Homo sapiens
agatcacaatctttgaaaataattcaataacacattattaataaacagacgacccccaaaatcaatgacttagaaatcagtagtttcaaaatgaaggttgtaacaaagatgacattaaaactaatatctaaattacattttsattaattttggccattgcatttttccagaaaaaaattaatgtcctttaatttgtatttgtttgccgtgtaattgaatttatgcatcttttaaaacaaaatctcaatgatttttttcttctaaatttatggttatatctttcattcctaaacttatccagtttttctggcttctctgtccttttatctgactctctctctctctttccctctctctttctcttgctgtctctctttctctctctctctgtctctctctctctctatatatatatatacatatagtgtttttacttaaacaaattctaatttgtctctgtgtattttaaaataacaaaattttgtatttatcatttttatgttttgatttttagttctttaatattttaatattttcagcttttaaattaaggaactt

SEQ ID NO: 324758 - DNA, 261 bp, Homo sapiens
tatatctagtccacagaaattcttaaacattctctttytgtatatgtttctttagtctgtatgattttatctaaaggttgcatcatccttttattcctgttgccctttgtaaaatgactctagataaattactagagagtctgcttcactatcttattattttctcatcattttggctttagctacattaacatttttcttattcatttcttaattgtattacccttttccaagatccacatcttttagtaattattcagc

SEQ ID NO: 324759 - DNA, 534 bp, Homo sapiens
tgttgttgttgctttgtttttatttgtatttagtccctagggaactttgtagctttaaatgatctatagtgaaacttattatttctgtatttttactttgatataaaattgacattaaatatattgtaatatatttaaggtaactaaataataaaatggtattattaattggttactttatgtgttattttagatattgctagaatatttttaggactgttactaaaatgacaactttgttattttccaagtcaaagaaaaaaattaagaaatttgtctttagatattttaatccagatatattatagctgatactattatatgaccaatgtattttgatatcrtgtttgtacattttttcatagtagcctcaatttattctgccaaccacaaggtaagccaaccaatgtcaaataagcagcagccaaacaggattatctctcaatggatttgccaaaaataaaaactcttaaagttgtgcccaaaaaaagatactatttcaaaatcagagatccaaattttatatcacagttg

SEQ ID NO: 324760 - DNA, 529 bp, Homo sapiens
aggcagggaagatgtgtttatcttgtacctattgatctaaattgttgattaaatatttccatgaaagtgttcatcttagggttgtgacctggctagtgagtatgttgtagtgacagatatgcataaacatgtattactgcaatatagggagagagagtttcatctcatattgtacaccttaaaaaattaatttgattttgtaaatttaactatttattactccttttcactttatttgattcctccatttttaaaaataaaatggtgatacaataagaaaattgtggttttgataaaattttataataaatgctattaaaataaattaaaatatactaatttaattacaatcaaaatacatgtattaktaaagtaaactaataatttatggctttagaatatcaagattttttcaaaattttatatattttataatttttacaaaattaacactaatatatgcaatgagcaatgatgtttgcaaatttccatttatgcctactgcatgttcagtgttttaaatattttt

SEQ ID NO: 324761 - DNA, 583 bp, Homo sapiens
aactaaatatactcttctcatattatctagcaatcatgctccttggtatctatccacaggagctgaacacttaatgaacacacaaaaatctgcacatgcatgtttataaaggcaaaacttgaatggacaaacagtggtacatctagacaacaaaatatgatatagaactaaaaagaatgagctatcagccatgaaaaggcataaaagaaacttaaatgcctgctactayaggaaagaagctaatctgaacaggctacatactatatattccttctatatgacattctagaaaaaacaaaagaatgaaaataaaaagattagtagtagggagggagaaatgaatcagagaatttttaggacaggggaaatatgtttactgtaatggtggatacatgtcctttacattggttcaaacacatacaatgtgcaacactaagaatcagctataaagtatactgttgactttgggtgatcattatgtatcagtgtattatagactcatcagttataaaaaaaaaaagtactactgtgctgtgggatggtgataatgggtgagggtagagggtacagatgtgtggggcca

SEQ ID NO: 324762 - DNA, 588 bp, Homo sapiens
ctgtactgatttcaaacttaccttcctaatatctgttttccatatatgaatcatagtcattgcgttagttttctagggatgatataacaaaatcacaggctgaatggcttaaagaaatakaaatttattccctcacagatccaagatgaaagtgtcagcaggtttggtttctcttaaggacttcttccttgactggcagatgactgccttctctatgtgtcctcacatggtctttcctctgtttgcatgcatccctggtgtctctctgtgtatataaatttccttttattataagaaaaccattcagattggattagaaccaacttatatgacctcattttaccttcattacccccttaaatgcctcaattcccaaagcagtcacttctggaattactgagatttagggcttcaatatacaaattttggggtaacaaatccagcccttaataatcatccttttcaagccaaagtaatactctgtcatacctgtggtgtgattacttcccaaaacatctaaaatgaaagtagcatttggttctctcttcaatatctttctcacaattttccacccctgtaccagacaaa

SEQ ID NO: 324763 - DNA, 588 bp, Homo sapiens
ctgtactgatttcaaacttaccttcctaatatctgttttccatatatgaatcatagtcattgcgttagttttctagggatgatataacaaaatcacaggctgaatggcttaaagaaatataaatttattccctcacagatccaagatgaaagtgtcagcaggtttggtttctcttaaggacttcttccttgactggcagatgactgccttctctatgtgtcctcacatggtctttcctctgtttgcatgcatccctggtgtctctctgtgtatataaatttcctttyattataagaaaaccattcagattggattagaaccaacttatatgacctcattttaccttcattacccccttaaatgcctcaattcccaaagcagtcacttctggaattactgagatttagggcttcaatatacaaattttggggtaacaaatccagcccttaataatcatccttttcaagccaaagtaatactctgtcatacctgtggtgtgattacttcccaaaacatctaaaatgaaagtagcatttggttctctcttcaatatctttctcacaattttccacccctgtaccagacaaa

SEQ ID NO: 324764 - DNA, 638 bp, Homo sapiens
aaatactgccctgaaaactctgattatatgtaactagtggtgagacaaaggcaactgctttgattataatcataatacgtttgtatttttcatatgcatccttatattgaatacatgtgactcttttttaacctttatatctgattttattgttgtcgtaatttaaatacttagcagtgacattgttcaacctgtaaattcaacttttggcagggttcttcttgtctttatcatcactgaatttatgctacttgaragtatcaatttatcagagtaaagtagaaaaataattctaagccagacatggtggcacatgcttgtagtcctagctactccagaagctgaggttggaaggatcacttgagcccaggagttccaggctgcagtgagccatgatcctgtgattgcactccaccctaggggacagagagaccctgtctcaaataaattaaattaaattttaaaatgaaagaagaaaaataattatattcaagttattttctaagatttacagtctctcagtgaataaatcaagaaataggtataaagatttagggattgatgcaatgggagttgagcacattagtaatagcatcattgatgatgttttggttttcagatgttttgtgtttttgaag

SEQ ID NO: 324765 - DNA, 534 bp, Homo sapiens
ttgttcaacctgtaaattcaacttttggcagggttcttcttgtctttatcatcactgaatttatgctacttgagagtatcaatttatcagagtaaagtagaaaaataattctaagccagacatggtggcacatgcttgtagtcctagctactccagaagctgaggttggmaggatcacttgagcccaggagttccaggctgcagtgagccatgatcctgtgattgcactccaccctaggggacagagagaccctgtctcaaataaattaaattaaattttaaaatgaaagaagaaaaataattatattcaagttattttctaagatttacagtctctcagtgaataaatcaagaaataggtataaagatttagggattgatgcaatgggagttgagcacattagtaatagcatcattgatgatgttttggttttcagatgttttgtgtttttgaagcaggagacagaccaaatggagggccagaacttacagatccagaagttctcactttcagatggtaagacaaaatgagct

SEQ ID NO: 324766 - DNA, 534 bp, Homo sapiens
ttgttcaacctgtaaattcaacttttggcagggttcttcttgtctttatcatcactgaatttatgctacttgagagtatcaatttatcagagtaaagtagaaaaataattctaagccagacatggtggcacatgcttgtagtcctagctactccagaagctgaggttggaaggatcacttgagcccaggagttccaggctgcagtgagccatgatcctgtgattgcactccaccctaggggacagagagaccctgtctcaaataaattaaattaaattttaaaatgaaagaagaaaaataattatattcaagttattttctaagatktacagtctctcagtgaataaatcaagaaataggtataaagatttagggattgatgcaatgggagttgagcacattagtaatagcatcattgatgatgttttggttttcagatgttttgtgtttttgaagcaggagacagaccaaatggagggccagaacttacagatccagaagttctcactttcagatggtaagacaaaatgagct

SEQ ID NO: 324767 - DNA, 565 bp, Homo sapiens
ggaatctaaatagcaactttaaaatactatgcaatagatatcatttttccatatttctgcctaaatgccaaatccatttttagtttgtctcctaagcaggaagataaatgtggaaagcagaataacatctttcccattgcctcagtgtgctgaaaaaaggaatcaaggaagaatatagstcataaaggcacagtgtttaggtcagaaagtagagctagtgagaaatccacagagagagtattccaggtttataatgtaatgggctgcagggcttttgcagactgtgaaagagggaatgaaatgttttagaaaggcaattgaaaaatatggtatttaaagtgaactttgatctatctcataaacagatccctggagatttttttatacaaatagaaattacgatttcaatttaagattattgcatctaaccaccagggttaaaataaaatgataatactcggataaggatcagcaaaagtcagtatacattgaaaaaggcagatcagaatagatgtttagagaagagaatttgattatataaaagtcccattatgtggaattacat

SEQ ID NO: 324768 - DNA, 519 bp, Homo sapiens
tcagtaatttcaagaacttgactttctatgctttattatctacacaacagttggagtgatctttaaaagcaaacaagtatgtcatatcattccatagctataataattaaaatgatgtctgactattattataataaaaaaccaaacttacatcattcattgaagtcctgtatataatctgggccctggatccttcactctatagtttatttgtttcttgaacaaaacatatttgaaataatataacataatgcctataagcatgcaaattatgaatatgagtttcattgcttcatagctgcatttccttagcaacayatttataatctttaaagatagtaatgctatctactttgtagacttcttgcaaggattaaatcaaataatacatttaaaatatttagtgtctggctcacagtttgtgctgagtaaatataggctatttttattatgacggtttttatttcagaggctttgcaactctttactcttactggaatgctctccccatacaacagc

SEQ ID NO: 324769 - DNA, 550 bp, Homo sapiens
ccagttacattttccaactataaaggaatagaactaaaaagcagcagcaaaaggaaaactggaaattcataaatatatgaaaattaaacaccatactcttgaagaaccaatgggtcaaagaaaaaatcacaggggaattagaaaatatcttgagacgaatgaaaataaagataaagcatgccaaaaacttacaggatgcagcaagtgttactaagacagaagtttacagcagcacattgcacatgcrttaaaaaaaagaatgatctcaaatcaataacctaactttacatgtaaaagaactagagaaagaacaaactaaacctagagttatcaaaaggaacaaaatcataaagattagagcaaaaacaaaggaaataaataatttttaaaatggggaaaaataaacaaaattaagagttgatttttttcttagttagactagcttagaaaaatagagaagctcaaataaaaatcagaaatgaaagacaagacctacaattgatgacacataagtaaaaaggattataaaagactacaatgaacaattgta

SEQ ID NO: 324770 - DNA, 462 bp, Homo sapiens
tgaaaccccatctctactaaaaataaaaataaattagctgggcatggtggcaggcacctgtaatcccagctacttgggaggctgaggcaagagaatcacttgaacccaggaggcgaaggttgcagtgagccaagatcatgccattgcactttagcccagtcgacagagtgagactctgtctcaaaataaaaaagaagaaacactcracaaactaggaatagaaagaaattacctcaatatagtaaagaccatatataaaaggcccatagctaacattatgctgaatggtgaaaaactgaaagctttccctctaagatcaggaacaaggtatgcatgctctctctcaccagtctattcggtataatactggaagtccttgccagaggacaagggaaagaaacaaaagtcatccaaactaacattatttctgtttgcagacaacctgatcttgtatgtggaaaa

SEQ ID NO: 324771 - DNA, 517 bp, Homo sapiens
cttctgtgagctactccagccaattaatcaaacttaaagggggggggttgtgggaaccccaacttgaagccaattggtcagaagttctggaggtttggacatgtgactggtgtctgaagcgggggggagtctcgggaactgagcccccaacccatgggatgtgactctatcatcaggtagatagggtaggagttgaattggaggatgcctggctggtgtccactgcttaatgtgtggagaaaaaaaacccacacttttggtcacagaagtcttcctctgtattgatgattgttgttgtgttggtggtggctgtgtgagagcagraaaaaaaaacaacaacatggcttaagagagcttttccctaaacagtaagagaccaagtaagttgtccaaggtcatacaactaggaagtagtagagtaaggttgtgaacacaggcagcttaggtccagaacccatgggtttaaccactacactgtacagtcccttatgtgcttgacattgacaataacccaggc

SEQ ID NO: 324772 - DNA, 542 bp, Homo sapiens
ttattgccgttaacaatgatggcaaacacacacacacacaattacttttgcactaatctaatattcagaaaatactcaccaacttcatttatctgtgtatttatggtttattttggaagtggcttagtggaaaggttaaaagcataggttttggaaacaaaagctttgggttcaaatttcagatttgccacttaatattgtgtgtgggcaacttatttaaactctttaagccttagttttgacatctttaaaattaacacccacttctaggatggttgtacagattaatgtgatatctgctgagttgctaaatgttcagtacagaacctggcacagcaaacaccacctaatctttcagtaaagattagatgcttttctttaagtcccagtcacatcttgttaargttattcacagacattttatgcactttttgccgcactagtgaatgtcatttttctcattatttttttctaactggtttttatgatatacagaaaacctattgatttttatacattcatctcacatccagccaggtttc

SEQ ID NO: 324773 - DNA, 501 bp, Homo sapiens
gtttgaattgtatgagcactgatggtgatttgaaagttgttcctatcaaaagggagagctcaaatcagctccctctgctcaagcaaattagtgatggggtcagtatggccctggctcagctcagaccagtctagatgccagcaggggctcatcattcaatggacatttggcatcttcatcatgaaacttttgccaatccagaatggtattgcctacgttgtcccccagagtttttacagtttttggttttacatttaagtcttttagagcttctgcacagcaaaagaaactatcaacagagtaaacagacaacytaaagaaggggagaaaatatctgcaaactatgcatctgacaaaggtctaatattcagcatctgtaaggaacttaaacaaatttacaagaaaaaaataaacaactccattaaaaagtgggcaaaggacatgaacagacactttccaaaagaagacatatatgagccaggcacggtggctcatgcctgt

SEQ ID NO: 324774 - DNA, 566 bp, Homo sapiens
gtagctccacttactattacctctagtgaccaactgacaaagtgtttccttcctgttctatgaccttatgctatgctagcccagaggtcttagttccaaagggaggaatgctcccaccaggtgtcacaacaatgatcctactgagctgaaaattaatgctatgctagcccagaggctagcatatgctatgcaagtccagaggctagcatatgctatgctagcccagaggtcttagttccaggtgtcacaacaatgatcctactgtgctgaaagttaagactgctacccgggcactttgcactcctcatacctctgaatcaacaggcaaagaaaagagtaactatgctagccagggtgattgattctcactaccaaacagaaatgggactgctactacacaatggaggtaaggaagattatgtctggaataaagaagatccyttaggttatctcttagtattatcatggcctatgattaagatcaatgaaaaaccagaacaactcaatccaggcaggactattaatggctcaggcactttaagtttaggtcaccccacgtggtaaag

SEQ ID NO: 324775 - DNA, 428 bp, Homo sapiens
gatcttttcctgggtcagaatgaaaatttcagggcatcaagtctacagctcctccttgaatgaggcagagttctccagagcatcaggccttgtattctttctaaatcaaactctgattttatctggatattaggcttatcttggctagtcactagactgcattgggcttttttgcaatgtgatattgtaaagacacctcaacccacgactgcctgttgctcacagggagaatragaggggcaggcagggagccagcacttggggctgggctgagacccacactctcctaggctagatgcgggtaggctgttatgtctttgactcctgcctctccactgccctgcagatgtttccagggtccccatctctgcctttgcccccatgtttcctggctcagactattgcagtagtcttctaagtggtaccct

SEQ ID NO: 324776 - DNA, 569 bp, Homo sapiens
attgtgccccatttgggatcctaagcttttcctctgagcccatctttgtcctgtagcccttctctgcagccctgcctgccccttggcctctatttctgccctcgcattgctagaatctcccatttgctctctctctctctctctctctcagcttcagaaggctttttgatcttttcctgggtcagaatgaaaatttcagggcatcaagtctacagctcctccttgaatgaggcagagttctccagagcatcaggccttgtattctttctaaatcaaactctgattttatctggatattaggcttatcttggctagtcactagactgcattgggcttttttgcaatgtgatattgtaaagacacctcaacccacgactgcctgttgctcacagggagaatgagaggggcaggcagggagccagcacttggggctgggctgagacccacactctcctaggctagatgcgggtaggctgttatgtctttgactcctgcctctccaytgccctgcagatgtttccagggtccccatctctgcctttgcccccatgtttcctggctcagactat

SEQ ID NO: 324777 - DNA, 480 bp, Homo sapiens
atgttgtggacacagttcctgccttcagtgagcacatggcttagtgaaggagtcacacattcttacagaacatgtggtctgagccacacactttggtctctcattctggattctacttttgttttattactcacaggtgattcagctcacttgtcagtgccaggccttgacctgagtgctggggacacagttgtgagtcagagctagactgtgccctgcaggagctcataacaagamaaaaagagagacatgcccagaaatagccccaggataaggtagatgaacaccatgaggtggcagagggaagaaatggagaacagggtggctgaggctgcttctgtctgagaaggttccttccagaaggaagtagggttgcagcgaggccttacatccaggggtattggggaggaaggcatggcaggcagggataactgtgggcaaaggcctggaagcatcaaggagacattgtgagtcactgga

SEQ ID NO: 324778 - DNA, 466 bp, Homo sapiens
tgggaggtggctggctttcctgggaagaatgtgagctcctcaataaagtaagtcccaggaaacagatcccagagtcaacagtctgcactatgcctggataatttacgcatctacccaataccccagagagggaggaccaggcctcatgtcctcaaggtacctccatgagatagatgccaaatgaccccagctaccaatcaaatttctcttctatacatcttggcatctccatgctgtagtttcaccctgaacccagctagggtaaacacttccttcaatgtactctggacacycgtttgattccaaagttaagccaattactacatggcgcctatttctcttctcaaagtatgttgagatcagggcctctgggtttgcttacaaaagctgtgccctgcacaggggaacccagcaaaataagcctgtgggggctggaaacagcccgtccctcggggctgtgcccacc

SEQ ID NO: 324779 - DNA, 593 bp, Homo sapiens
tcctgggctcctgacaaaagaagcaagtcagaatcagttctgcrgctccagctccacgcggtgccacctctgctttgcccatctccagaaatgatagttgtccaatagtagcgccatactccgatgctgtgcattatttctgaatttgtggtatacagagtcatacaaaaataaaggctattgactggttggcaccccttctcagaataatgactaagcaagcatgctgttagctccccaacagcagttctgtgtacatgataacacagagcaaagatgaaaactgctattcatctgagccaaacaacagaaaaatgcaagcagaaaattgttagtgctggaggaggataccaaaacaaatattttcttccagctatgaaattttagaccaatgacaaacacagtacccaaggcaacctggcgggttagagtgaagtggagggctctggggtcaggcacagacctgggcttgaattgtggtccatctgcagactgacctcatggctttgggtgagtttctgccattatgtgtctatgtgggtagagcagcacagcatactagttaagaggtcagtccctggagggaggtggaa

SEQ ID NO: 324780 - DNA, 593 bp, Homo sapiens
tcctgggctcctgacaaaagaagcaagtcagaatcagttctgcagctccagctccacgcggtgccacctctgctttgcccatctccagaaatgatagttgtccaatagtagcgccatactccgatgctgtgcattatttctgmatttgtggtatacagagtcatacaaaaataaaggctattgactggttggcaccccttctcagaataatgactaagcaagcatgctgttagctccccaacagcagttctgtgtacatgataacacagagcaaagatgaaaactgctattcatctgagccaaacaacagaaaaatgcaagcagaaaattgttagtgctggaggaggataccaaaacaaatattttcttccagctatgaaattttagaccaatgacaaacacagtacccaaggcaacctggcgggttagagtgaagtggagggctctggggtcaggcacagacctgggcttgaattgtggtccatctgcagactgacctcatggctttgggtgagtttctgccattatgtgtctatgtgggtagagcagcacagcatactagttaagaggtcagtccctggagggaggtggaa

SEQ ID NO: 324781 - DNA, 593 bp, Homo sapiens
tcctgggctcctgacaaaagaagcaagtcagaatcagttctgcagctccagctccacgcggtgccacctctgctttgcccatctccagaaatgatagttgtccaatagtagcgccatactccgatgctgtgcattatttctgaatttgtggtatacagagtcatacaaaaataaaggctattgactggttggcaccccttctcagaataatgactaagcaagcatgctgttagctccccaacagcagttctgtgtacatgataacacagagcaaagatgaaaactgctattcatctgagccaaacaacagaaaaatgcaagcagaaaattgttagtgctggaggaggataccaaaacaaatattttcttccagctatgaaattttagaccaatgacaaacacagtacccaaggcaacctggcgggttagagtgaagtggagggctctggggtcaggcacagacctgggcttgaattgtggtccatctgcagactgacctcatggctttgggtgagtttctgccattatgtgtctatgtgggtagagcagcacagcataytagttaagaggtcagtccctggagggaggtggaa

SEQ ID NO: 324782 - DNA, 526 bp, Homo sapiens
gtttgggaattagggcttagtttcctatttctcttgggacttgcaacctccatgtgaacaagcccagggtaacatgtcacacagaggaaaactccaagttgtgtcagccaatccagacctagctaagtgcagatgcttgggtgagcatgagccaagttcagccaagcccagcccacagcggaagaaccycccagctgaacccaacccaaattgccaaactgtagaaatgagagctaaatgagtcacagttttcagccactaagctttggggtggtttgttatatatcaaaagcttcctgtcacagataggtacagtcaccccaattttcaaaatgaagaagccaagggacagagaagttaagtaattttcctgtggtcacagacttactaagggacaaagccagtgatctgaggcaatcttgttccaatgcctctctcttaaccactagctatgttgctctaaaaaaccaacagtgaaatgctgtgtgtgagaatactagtgatggatacctaagttaggagagca

SEQ ID NO: 324783 - DNA, 531 bp, Homo sapiens
tccacagtaatcccttccttcgcttaccctgctctggcttccttcatagttcttagaaccacccaacataggatrtatgcattttgaaacatttactgacttctcaagcaaatcccatgagatcaaggagcttgtctatcttgttctctgtggtatgcccaactcctagaacagtgtcttccacatagtaggggcttgatgaatatttatgggatgttgaatgaatgaatacagagggagaaccaagacatgaaaacccagtagatggagttaataactccagtgtatgggggtgggtggggggtatgggtaggttcactgttgggtgatgtgacatttgagatgggacttaaaaggtggagcaggtagttttcaggggaggaaaggagtgggatgtatcccaggaagagcctccaaacctcaaaaggccctatattcacaggaggaaatgagaagttctgtgtgttcgagtgttccttgtgtgtgtgtggtggctggggctgcaggaagtgaggctggagggggacaggt

SEQ ID NO: 324784 - DNA, 531 bp, Homo sapiens
tccacagtaatcccttccttcgcttaccctgctctggcttccttcatagttcttagaaccacccaacataggatgtatgcattttgaaacatttactgacttctcaagcaaatcccatgagatcaaggagcttgtctatcttgttctctgtggtatgcccaactcctagaacagtgtcttccacatagtaggggcttgatgaatatttatgggatgttgaatgaatgaatacagagggagaaccaagacatgaaaacccagtagatggagttaataactccagtgtatgggggtgggtggggggtatgggtaggttcactgttgggtgatgtgacatttgagatgggacttaaaaggtggagcaggtagttttcaggggaggaaaggagtgggaygtatcccaggaagagcctccaaacctcaaaaggccctatattcacaggaggaaatgagaagttctgtgtgttcgagtgttccttgtgtgtgtgtggtggctggggctgcaggaagtgaggctggagggggacaggt

SEQ ID NO: 324785 - DNA, 531 bp, Homo sapiens
tccacagtaatcccttccttcgcttaccctgctctggcttccttcatagttcttagaaccacccaacataggatgtatgcattttgaaacatttactgacttctcaagcaaatcccatgagatcaaggagcttgtctatcttgttctctgtggtatgcccaactcctagaacagtgtcttccacatagtaggggcttgatgaatatttatgggatgttgaatgaatgaatacagagggagaaccaagacatgaaaacccagtagatggagttaataactccagtgtatgggggtgggtggggggtatgggtaggttcactgttgggtgatgtgacatttgagatgggacttaaaaggtggagcaggtagttttcaggggaggaaaggagtgggatgtatcccaggaagagcctccaaacctcaaaaggccctatattcacargaggaaatgagaagttctgtgtgttcgagtgttccttgtgtgtgtgtggtggctggggctgcaggaagtgaggctggagggggacaggt

SEQ ID NO: 324786 - DNA, 579 bp, Homo sapiens
tgggcataaatgaagaagacacacacacacacacacacgcgtgtgtaaaaccacaaagggtgaatgcatggtaatctgagcaggtatcacaggagggtttgaccaggttgtgaggaaagggtgtcctgggcaaggaagggacaactgagttacttgaggaatgagtaagggacaactaagcaaggggcagatggagggggttcatcccaagcctccagatgagcatccacaaagatctcccccaaggcgaggtcaggttccccagtcatagcacttataccctgattatttaactgtctccctaaagatatcgttaagttccttgaaggcagaagctgtcttgttaactgttgtgtctcygatacctggcattcctgttaggcattcaataaatgtagaataaattaccatgagagcatgaacacaagtgtccagcatggtggctggaacataatagccgttcagtgtcctcattcctttgttctcctttccagtgtcccctctctgtttcaatcctgaacaaagacttttccctcatccccatgggtcctcccagcctccttctgcccacaagagcac

SEQ ID NO: 324787 - DNA, 586 bp, Homo sapiens
ctatcatatttaatagtttttaaataccttctactagcaacgttgtattttttaaggattatgttcttataagtattaaactgttacaaatataaatttgtgtctataaaaactaagctgtcaaattaagcatattgatattgtcaatatgtttataatttattaattatatttgccataattctttttttggttattggcaaagttgctaaaaacaacttggtagtagactaacttaaaytgataaaattatgtatttaacatatttttttccctgagaacagagagaagattgaaattattcaaagaaacaaaacaactaagtctgacaaattatttggagatgtaaatctagcatattatctcaatttggcaaaatttctcttatatctagcattgctctaggatttctgctatatataaaactaatttttcctgatacatttatatatatataatcaccagacctaaaagaaacatagtcaaacgcaatacttttaactcggaagtcaagaataagcaaagctgaaaattaaaggatgggaaaagatcaaattgagtctagttttctccttctctaattcat

SEQ ID NO: 324788 - DNA, 586 bp, Homo sapiens
ctatcatatttaatagtttttaaataccttctactagcaacgttgtattttttaaggattatgttcttataagtattaaactgttacaaatataaatttgtgtctataaaaactaagctgtcaaattaagcatattgatattgtcaatatgtttataatttattaattatatttgccataattctttttttggttattggcaaagttgctaaaaacaacttggtagtagactaacttaaactgataaaattatgtatttaacatatttttttccctgagaacagagagaagattgaaattattcaaagaaacaaaacaactaagtctgacaaattatttggagatgtaaatctagcatattatctcaatttggcaaaatttctcttatatctagcattgctctaggatttctgctatatataaaactaatttttcctgatacatttatatatatataatcaccagacctaaaagaaacatagtcaaacgcaatwcttttaactcggaagtcaagaataagcaaagctgaaaattaaaggatgggaaaagatcaaattgagtctagttttctccttctctaattcat

SEQ ID NO: 324789 - DNA, 581 bp, Homo sapiens
caacattcttccacttctcaactatttggcttcaaraagtcaaatggtcagagtggaagtaaatctttcctaagttaaagagagaagaaagaggaaagatatgatagtagggagactatactctttgtggcagaattaactggaaaactgttcaaaggctagggaacaccaggcatgctgaattcctcaccgggagttacaggagaaaaatggcagctgtagagttactctgggcagtatgactgctgcctggattagcaagtggtagtgtggcgggggatgcagaaggactagcagtattgtggcacagaagaccttacttaggcctaggtagatgaggcacaggatggggagactgggtagctgggatgttgttatttcaagatatttgtcagctgtatttctgcctctgttgaattacaatattaatttttgtagaaaagtttttaaaagattagaaagtttttaccttttatgtttattactaatcttagaaatttaatcccacatggagaaatatactactgaactagaagactgtatataaggaaggaagcttaaatattatgatcagagaacag

SEQ ID NO: 324790 - DNA, 581 bp, Homo sapiens
caacattcttccacttctcaactatttggcttcaagaagtcaaatggtcagagtggaagtaaatctttcctaagttaaagagagaagaaagaggaaagatatgatagtagggagactatactctttgtggcagaattaactggaaaactgttcaaaggctagggaacaccaggcatgctgaattcctcaccgggagttacaggagaaaaatggcagctgtagagttactctgggcagtatgactgctgcctggattagcaagtggtagtgtggygggggatgcagaaggactagcagtattgtggcacagaagaccttacttaggcctaggtagatgaggcacaggatggggagactgggtagctgggatgttgttatttcaagatatttgtcagctgtatttctgcctctgttgaattacaatattaatttttgtagaaaagtttttaaaagattagaaagtttttaccttttatgtttattactaatcttagaaatttaatcccacatggagaaatatactactgaactagaagactgtatataaggaaggaagcttaaatattatgatcagagaacag

SEQ ID NO: 324791 - DNA, 560 bp, Homo sapiens
ttactagtactgttttaaattttaggaaaaaaaagtaagctctcaattcagcctttcttattataaataaatccaatccctgccccccgcccccccsccccacaaaaaaaacactgggcaaaaaccaaaaacaaaacactgggcccctcccttcaggagttgacaggttagtggggaagacagacatgtataaataaatgtaataaagacagaattatcaaaactctggtacagatagaagccgaatactgtaagagcccaaggaatcaagtctgaattgtgacttgggacagcaagggggtactacatgaaggtggaaacatttgagcgatggtagaatttttaccgatggggatgaggaagaaatttcacggaaagggaacaactggagcagaggcctggggacataaatatattcttaatgttttattcaagggataataatctctattgtaaatgacctgtggagcactgtgtggacaataagtgagaaaaggttaactgggacctgatagtatagaaacatgaaaatcagtctttcatattagggtcttctactg

SEQ ID NO: 324792 - DNA, 529 bp, Homo sapiens
tgagctgagatcacgccattgcactccagcctgggcgacaagagtgaaactccatctcaaaaaatagaaaaaaaaaaaaaaagtaagaaagaaaatactcacatcatttttcataaaattagaaaaaaatcytaaaattcatatggaataaaaaaaaaaagcttgagtaaccaaagcaaccctaagcaaaaagaacaaatctggaggcatcacattacctaatttcaaattataattatactacgaggctatggtaaccaaaacagcatggtactggtataaaagtggatacatggaccaattgaacagaatagagaacccagaaataaagccaaatacttacaaccaactgatctttgacaaaatgtacaaaaataagaattgaggaaagcacaccctattcaataaatggtgctgggataactggcaagccacatgtagaagaatgacactggacccctgtttcttaccatacacaaaaatcaactaaagatgaattaaagactttaagacctgaaaccaaagaaat

SEQ ID NO: 324793 - DNA, 543 bp, Homo sapiens
attgagggttatcctgagtaggggataggtagcccagcctttatgtgctcatgctgaccagccattctgtgtgggctgcatccagggaagggagtgtgactttggttgaggcagatcttcatagtcaaagaayttcccaaagagggatgacagctgaggtcttacagcaggttggggaacctgttcctggtagttgaacaggatggcacggcacagcccccagtcttaaaataagaaccacttgttcttattttaagatgatgtatttttgagttactgatggcttgaaagtggtactcaatcagttttaatgctttcagttgcaagtaacagaacatccaacttaaaggaaaggggcaagcttgcaggaaaggatctttaagtcatctacatttgggtataaatgacagccacagagtatttaccctttttgggacgtaattttatcaggagaccaaagctttttgctaaaaacataaatttcaaacattaggacagtcattttacagaaacaaaataaataatttcaaagaaactattacc

SEQ ID NO: 324794 - DNA, 543 bp, Homo sapiens
attgagggttatcctgagtaggggataggtagcccagcctttatgtgctcatgctgaccagccattctgtgtgggctgcatccagggaagggagtgtgactttggttgaggcagatcttcatagtcaaagaatttcccaaagagggatgacagctgaggtcttacagcaggttggggaacctgttcctggtagttgaacaggatggcacggcacagcccccagtcttaaaataagaaccacttgttcttattttaagatgatgtatttttgagttactgatggcttgaaagtggtactcaatcagttttaatgctttcagttgcaagtaacagaacatccaacttaaaggaaaggggcaagcttgcaggaaaggatctttaagtcatctacatttgggtataaatgacagccacagagtatttaccctttttgggamgtaattttatcaggagaccaaagctttttgctaaaaacataaatttcaaacattaggacagtcattttacagaaacaaaataaataatttcaaagaaactattacc

SEQ ID NO: 324795 - DNA, 556 bp, Homo sapiens
catccacttaggctgctcctcatcctactggaatgaggaagtgtagcttggattcccagcctggctgacttctccaagcgttgacatctgtcccaccccatggggccaacacaccttcccaggcacctgcctgagtttctcatcttckaagtgggcataatactatattgagagggttcatctatgtaaagtgcctgggacagtgttgacaccctgtatgtgctaattttaatagcagcagcagcagctgtagttattagtgaagataatgggtgtggaacatgaacatttgttttgacatgtagggttgaaatttatgccaagagcctctgcctaaacccaagagtcccaagagtgtctgggatagactatgaaaaagcattaaaagcctgatgtctgtacagagatcacacaaattggcctgtagatgatttttgttgaaggggtggtgacagagcagtaataaaaaacctaagttgttcttatccactgagttgagtctttagaacccagcttaatattttcatggctcagatttattttgaatcttagcttt

SEQ ID NO: 324796 - DNA, 626 bp, Homo sapiens
gcactggcttggcactctgatgttaggtgtgagcatacactcatgaaggcatgtaaatcagcccttcatgcctatatctccctccattttggccaaccaatgttttaaatgcccattccaattctctattaaactattattctaaggaggacatctctgtgtccgttattggacattacatgctgaaactgtgtcccttggtctgaataaatgtgactcaaccacccaaattggtgtagtatcttctgttccagttcttttatagtatctgagcatttgcatctaccactgggtatgcaaaacccagtccagcgtgtacatctattwctttaaggacccatttatagcctctagtgctaccagcatcactcccacttgccagctatgtgctgggccttccccccagggaatctgtcccatagccatctgagtctgtctctcttgttggcagacagaactgtacttactggcattttgcacctcagagggtgcaaaaggaatatgcctaaatttagcccatctttgcattgctacagcccccaccccacaatgtctacttgtttcatgacccaggtgatcacctcaagtgaacatatcaagatatccactcactgacaccaatgacc

SEQ ID NO: 324797 - DNA, 626 bp, Homo sapiens
gcactggcttggcactctgatgttaggtgtgagcatacactcatgaaggcatgtaaatcagcccttcatgcctatatctccctccattttggccaaccaatgttttaaatgcccattccaattctctattaaactattattctaaggaggacatctctgtgtccgttattggacattacatgctgaaactgtgtcccttggtctgaataaatgtgactcaaccacccaaattggtgtagtatcttctgttccagttcttttatagtatctgagcatttgcatctaccactgggtatgcaaaacccagtccagcgtgtacatctattactttaaggacccatttatagcctctagtgctaccagcatcactcccacttgccagctatgtgctgggccttccccccagggaatctgtcccatagccatctgagtctgtctctcttgttggcagacagaactgtacttactggcattttgcacctcagagggtgcaaaaggaatatgcctaaatttagcccatctttgcattgctacagcccccaccccacaatgtcyacttgtttcatgacccaggtgatcacctcaagtgaacatatcaagatatccactcactgacaccaatgacc

SEQ ID NO: 324798 - DNA, 577 bp, Homo sapiens
cactaacctgggcaacagagcaagactctgtcaaacagcaacaacaacaacaacaacaaaatgctcaacattatttgtcattaaggaattgcatattaaaacaatgagatatatacatcagtatatatttaactttatcggaaattgccaaaccratgtcccattttgcatttccatcagcaatatataagtgttctagttgctcaggatccatcccagggaagaaaaaaggaaaggtaaaaagaaaaagaaataagagcttcagttgctctacatcctcagcttgtattgtcaagattttaaaatttgagcattttgtgatgttaatggtatctcattgtggttttaatatgcaattctctattgactaattatgttgagaatctttttatgtgcttatatcttatttggcgaagtagctttaaatcttttgttttatatcttatttttaagttagtgtttgttttatatcttatttggtaaacagctctaaatcttttgttcaattttaagtcagtgtttttatttattattgagttgggaggtttctgtatatattctggatagaatttggtat

SEQ ID NO: 324799 - DNA, 591 bp, Homo sapiens
ataaatgtactgtgagtctctcggttcagtattaggttcactttaatttatttatgctgtaagttatttttgcttccttctcctggacccacttccagtcccgttttgcattcccctttggattttgctttggctattttttgttgtaacctcttgatgtaacagcactttaaaagggcgacaactgactcacgagatggcaaccacctggagcctgtttggggagaccaccctgtacccgtgactttcgtttttaataataataataataataataaaagatgtcacttctggggctacggaggtgggagtgcaccggcggagcggggcggcggaacaccgtgcaacaggtgggggtgggagsggccccgcgggttctggggctcccagggtcagaatcgggcctgctcaagtgggcagcagcgagcactcaacctctccactgtgccctccagacacactcagttttcccccacagggcactccctctccgcgtttaggaccctcccttgggcccgggatggaggaggggcattacgtcacggtccttagcgcagcggtcccgggctctttcctcaagagctcgaaggc

SEQ ID NO: 324800 - DNA, 591 bp, Homo sapiens
ataaatgtactgtgagtctctcggttcagtattaggttcactttaatttatttatgctgtaagttatttttgcttccttctcctggacccacttccagtcccgttttgcattcccctttggattttgctttggctattttttgttgtaacctcttgatgtaacagcactttaaaagggcgacaactgactcacgagatggcaaccacctggagcctgtttggggagaccaccctgtacccgtgactttcgtttttaataataataataataataataaaagatgtcacttctggggctacggaggtgggagtgcaccggcggagcggggcggcggaacaccgtgcaacaggtgggggtgggaggsgccccgcgggttctggggctcccagggtcagaatcgggcctgctcaagtgggcagcagcgagcactcaacctctccactgtgccctccagacacactcagttttcccccacagggcactccctctccgcgtttaggaccctcccttgggcccgggatggaggaggggcattacgtcacggtccttagcgcagcggtcccgggctctttcctcaagagctcgaaggc

SEQ ID NO: 324801 - DNA, 591 bp, Homo sapiens
ataaatgtactgtgagtctctcggttcagtattaggttcactttaatttatttatgctgtaagttatttttgcttccttctcctggacccacttccagtcccgttttgcattcccctttggattttgctttggctattttttgttgtaacctcttgatgtaacagcactttaaaagggcgacaactgactcacgagatggcaaccacctggagcctgtttggggagaccaccctgtacccgtgactttcgtttttaataataataataataataataaaagatgtcacttctggggctacggaggtgggagtgcaccggcggagcggggcggcggaacaccgtgcaacaggtgggggtgggaggggccccgcgggttctggggctcccagggtcagaatcgggcctgctcaagtgggcagcagcgagcactcaacctctccactgtgccctccagacacactcagttttcccccacagggcactccctctccgcgtttaggaccctcccttgggcccggratggaggaggggcattacgtcacggtccttagcgcagcggtcccgggctctttcctcaagagctcgaaggc

SEQ ID NO: 324802 - DNA, 525 bp, Homo sapiens
ggtctggctctggagtcccaggtctggggtaagggacaagagtgmacggaagccggggcccctcttgggatccgcagtgggaagatgatctctatccccacctgttctggcaaatccagagtgagagactgagcaaagttggagccgccgttggagacagcatcaagtgggtttatttttcacccccacgggagaaagcagtaagtcccttccgatctccatttcctctgcaaatcagggtaacctgtgtgcaaaagcaccacttagaagaccccttaactcctggagcacaggtgactctgtgttctagtggcactcggttcatgaggctagcagggcactcacctccctttgttattcttggttgtaagtgtctgttgccctaagactgaaagtaagtccacagcaggggtcacaccttgcttttccttgcaatcttcaacacagggcccagggctccacaggcacacaacacatgtgtagatgaaaggcttccaactttgcggttcatctaggtgctgaaaa

SEQ ID NO: 324803 - DNA, 525 bp, Homo sapiens
ggtctggctctggagtcccaggtctggggtaagggacaagagtgcacggaagccggggcccctcttgggatccgcagtgggaagatgatctctatccccacctgttctggcaaatccagagtgagagactgagcaaagttggagccgccgttggagacagcatcaagtgggtttatttttcacccccacgggagaaagcagtaagtcccttccsatctccatttcctctgcaaatcagggtaacctgtgtgcaaaagcaccacttagaagaccccttaactcctggagcacaggtgactctgtgttctagtggcactcggttcatgaggctagcagggcactcacctccctttgttattcttggttgtaagtgtctgttgccctaagactgaaagtaagtccacagcaggggtcacaccttgcttttccttgcaatcttcaacacagggcccagggctccacaggcacacaacacatgtgtagatgaaaggcttccaactttgcggttcatctaggtgctgaaaa

SEQ ID NO: 324804 - DNA, 634 bp, Homo sapiens
tcactggcacacaggtccacccattcgtagctaccctgctctaaagccttgatccgttrcaaacatgtgactcctgccttgaattcagaacaccaacaaaagcagaactggatctgcatgctcttcccatgaattctaaacagcctcatctcctctctccatcctcagatgcttggctaagagcacaaactctggagccagatttactgaggtctcaatgctgccctgtcattgatgagtgacattgggcaagttgttgaatctctctgtgccttagcttcctcatctataacatagggagattaacagtacctacttcatagaactgttttctgttaatatatgtaaagcactgagaacagctcctggcatacaagaagtgctattgtattggtgtttgcaaagattacaactccctctgaattcactttcctgagactcaagccaggaatgcttttagagtcccaaaatgtaccccagtccatcaccctcctctcctccaggggcccagaaagggggcccagaaaggaggacaaaccggtgctttttcaagcctggactattgagctttctgaagacacattcataagaatctacaagcacagaggttggaagggcatcctgcaacgccaat

SEQ ID NO: 324805 - DNA, 569 bp, Homo sapiens
tctgagggctttgaaggactattagccatggggtctaactcaacactgatatctggtgacccaaagtgcttttatatccctccctcccatcagaatgagggagtatgggttccaggtgacaacgaagccstgatcctgctctaattcacagtgagtccagttgggtgcgtccaccaacccactgtggtcctatccctgattcctgaacgcttcggaatggacatacatggtagttggtagaaccctagcattgattccttgagtctctaaaagtgccgactctcctttgccatgatagtaaatcaaatacaagattgttttttattccaggaggaatggcaggaattagttccaccttcaaagattaaggaaatacagggatggtggtttttgttgtatccccatttaattcaccaatctggtccctacaaaaattgcataatcatggcgactgagagtacactcccacaaacttaaccaagtagtatccctacttgtggttgttgtgctacacacggcatcttcctggagcggatgaatacaccctccagatgcggtacatgaccaat

SEQ ID NO: 324806 - DNA, 608 bp, Homo sapiens
ctgctttaactgcaccccgctcaattgctaacacaaacttgatgctggttattgagttttctcaattaactatttcacccaatcaatggccttcaaatattagcctctgcttttgaaactttggaagtagaagccagcgaattaattctcagtagtagaaagaaatcaaaactgaagttgaccccttctgccgatttaaaagggctggagctctgctgacactggaattcgcagataactgactctggcataacacaattttttgcatttagcgattaatgcaattagaagcaactgctactacaattttatcttattttttaattgaagcaagaagtagctactacatttaattaatgtaaatgtatattgcaggtaggataatggtataattttgtaaggataaaatacagtaaatgaaagtaacttctgattttactcccatcagccttagacatttagattggttcaagagtaatttttagccctggtgtggctcatacctataatcccagcacttcgataggccaaggcaaaaggatcacttgagcccaggagttcgagacaagcctgggcaatakagcgagacctcgtctttactaaaactt

SEQ ID NO: 324807 - DNA, 445 bp, Homo sapiens
agacaacccaaatctctgcagacatctttttcttattaagcaatctaaagtgtccatgagagcagttaaaactcccaagcagccttctgcgttgatatttttttgctctcttccccacagatttgccaaactgcagagatgtctgtcaagatgtcgagcctaagaactgggaatgaaaaacaccaatgcagctgtgcaaaaggtagcctcactttttcatgggtagtatcccaagagacagagacagaaytcggtggctgcttttcatctccactctccagtacaaagtggctggatagcctttgccaaggtatcagttttcccatggtgaggactgccaggcaattagattcttgctctctccaaatttcagcaggagcacataagttttatttttaactgtgcaggaagatgttgccatagcaacataacaaactacaagagc

SEQ ID NO: 324808 - DNA, 445 bp, Homo sapiens
agacaacccaaatctctgcagacatctttttcttattaagcaatctaaagtgtccatgagagcagttaaaactcccaagcagccttctgcgttgatatttttttgctctcttccccacagatttgccaaactgcagagatgtctgtcaagatgtcgagcctaagaactgggaatgaaaaacaccaatgcagctgtgcaaaaggtagcctcactttttcatgggtagtatcccaagagacagagacagaactcggtggctgcttttcatctccactctccrgtacaaagtggctggatagcctttgccaaggtatcagttttcccatggtgaggactgccaggcaattagattcttgctctctccaaatttcagcaggagcacataagttttatttttaactgtgcaggaagatgttgccatagcaacataacaaactacaagagc

SEQ ID NO: 324809 - DNA, 598 bp, Homo sapiens
agccaaacataaaagaggtttccaaaaaatgtaaaatgatgctacttttcttactaattgttttgtttcagaaatatagttattcattaaaaatgtaatttatgttaataagtaatgagattttttatttttaaataaatcagtaacagttttaatttctaatgtggttaatattaatagaaataacccatttaagcggaaattctttgcagtttcaataatttttaagagtataaaggggccttcaagccaaaaatcttgaggaccagtcacaagagatcagattaagataactacgttactgaagtccctgagaaaggagtcagaatctcagcacaagatgggmtggaagggattaaagaatatccagtttgccggacaaagcctctgggagaagttccacactcactctggcaccaccattaacaagctctggagcagtagaataggcagcagcaaggatagaagggcctgggtgaacagttccacttccgattacccatggctgcgcttggtgtgaagggattcagaagcccagtggggtccggcggaagtgataactcaaagagctggaatcgtcgtggaagcaaggcaggaa

SEQ ID NO: 324810 - DNA, 550 bp, Homo sapiens
caggcacacaactagttaatttccatatgttctctaattcaactcctgcaacaactctacatgacaaattttaattccctttcacagatgagaaaactgaagccttaagggtttaaaatactttcttatgatatcacaactagtaaattcaaactcaggtctgtcagattcaaagcttaagttcttttcgctccctgcaacgattatgtttcactgatatgttacaatcccactgctagcatgtgacttggagttattagattttttttttttttggtataaaccttttaggattcaacgtgccccctcaggcagaaaactgccacatagagatgatgcattgtcccaggaatgtgttttttaaatcagaaacaaatccatttctctgcttttatattgcattratgtccttcctccttttaaagttctcctgaatgatagaggcattgaaaatcacattttgcctgctagttttcttgttaccatctactaccttttggtgccaccctcctcctttttatattttttgaagaaaatagtgaaatagctt

SEQ ID NO: 324811 - DNA, 549 bp, Homo sapiens
ccagagatgagaagcacccagagcaagaattctggcaccctgaaaaatctgaatgtagtgacaccaccaaacaattggctctccagcaatagtctctaaccaaaatggaaactcagaaatgacagatacataattcaaagtatggattgcaaggaaactcaatgaaattgaagacaagattgaaaatcaacacaaagaaacctctaaagcaatccaggaaatgaatgaagagataaacatcttaaaaagaaatcaattagagcttctggaattgaaaaactcasttaaggaatttcaaaatacaattaaaagctttatcactaaaccagaccatgcaaaagaaagattttcagagcttgaagaccagtcctttgaactaacccagtctaacaaaaataaaaattagttttaaaaaatgagtaaagcctttgagaaatatgggattttataaagcaaccaaacatacaaattattgacattcctgagagagaaagagaaaaggcaaacaacctgtaaagcatattttagggaataattcaagaaaacttc

SEQ ID NO: 324812 - DNA, 601 bp, Homo sapiens
gtaagactccatctcaaaaaaaaaaaaaaaaaaaagaaccctctggtcttgaactggaatcagaagtattaggataaactcattgtttttaatatctatacagacagatacgtgcagaaatataaatgtgggggtgttgctatacatacatgtattttctagctctgtctgctggataagcctaaaagcaatgacactccagtagcaatgagcatgcctaattgcccagatttttatttctactcacttttccccaatttcttagagaagtaggtgattctaaggctggggtgggaaaaatacaagacggatgtcttgtggtggcagaaaaatgaaagtactcaaaaaagattgtgagcttgccagagaacacgagctaacctgaaagagctcctaacaactaaagatggaaraggttaaacaacaaaataaataatgacagcattatattttaatcagtaaaataagctaaatgtccatgagtctacactgatataaataagcaatgaaatgcataaagaaatggggagaaaggacatatcttccctaaagaacaatttcaagcaatatacagagaaaagagaaacaaaaaatcactatt

SEQ ID NO: 324813 - DNA, 631 bp, Homo sapiens
agaatggccaaaatccagaacactgacaacattaaatgctgtcaaagatatagagcaacaggaactctcactctttgctggtggaaatgcaaaatgatatagccactttggaagaccatttggtagtttcttgcaaatctaaacatactcatcagcaatcatactccttggtatttccccaaaggagttgaaaacttatgtccctgcaaaacatctttattcataattaccaaaacttggaagcagccaagatacttttggtaagtgaacaaataaataataatctccattccgtctaggcaatggaatattattcagcactaaaaagaaatgaactatcaagccatgaaagacatggaggaaacttacatgcatgttactaagtgaaagaagccaatgagaaaaggctacatactatattattccaactatatgacacctggaaaaggcaaaactatggagacagaaaaaagattactcaggaggctgaggcaagaggattgcttgaamccaagagtagaagtctagcctggggaacatagcaagactgtgtccctagggaaaaaattcagtgttttccaggtttgggggaagacaggatgaataggaggagcacagagggtttttaggg

SEQ ID NO: 324814 - DNA, 639 bp, Homo sapiens
atagtttggaggttcctcaaaaaggtaaaaatagagctaccatatgatccagcaattccactgctggttatattcctaaaagaaagaaaaatcaagatattgaagagatatctgaactcccatgtttgttgcaacactgttcacaatagccaagatttggaagyaaataagtgtctatcagcagatgaatggataaagaaaatgtggtacatataatggagtactatacagccataaaaaagaatgggatcctgccatttgcaacaacaaggatggaactggaggtcattgtgttaagtgaaataaggcagtcacaaaaagacaaacttttcatgttctcacttatttgtggtaagtaaaaactaaaacaattgaactcatagagatagatagtaggacagttaccagaggctaggaagtacagtgctggggtagagggcatgggggagaagtggagatggttaatgggtacaaaaagtagttagaaagaatgaataagacctagtatttgataacacaacagggcaactatagtcaataataacttaattgtacattttaaaataactaaaatagtataattggaatgtttgtaacacaatgtttgagaggatggataccccacttaccattatgtga

SEQ ID NO: 324815 - DNA, 570 bp, Homo sapiens
taactaaataaatttcaatcctgtgtaagaaggctacaaagaagcaggtacagtgtgctatgatagctcagaggagaggccttatacaggtttacaggaggaagcaacggtaaacatgaaacttcaggggcaagcctacataagccacgttaataggggtggggacgggtgttgtatggggaaggtasaagcacagtaaacagcctacagaaaggcctagaagccaaagagaagcaggcaagttcagggagctacaaggagttccttggggatggacagagggaagtgatgagaaagaagctgtggcgttaagccgaagaatgaactgctttttccatctcacagttgcatctaagctgaggatgcactgtaattggctattttcatccctgggtatcttagagtacttgtggtagcaagctatattcaagcttgccaaggttctgctgagcatttgactcctaagactgctctggaggtctactaagatccccctgcatggtaaacccaacagctatgaagaagatatgcagcaaggggctgatagttcgttccagggggacagggcct

SEQ ID NO: 324816 - DNA, 572 bp, Homo sapiens
aacaagatgatttttcaagctactttttcaatatgacagagaactggcactgagccagcttcacctaattatccagtgcctctttgaaaatagttgaccaaagagggatgtgcaagtttttgattgtctctaagtctcaggtaccttacctgtaattagagacaatacataattcaaaggtctgtgaagagaatgaaaaagatggtatatgtgaagcactgagcaagtgttttgcacactgaaaggtctcaaatatttaagttccctttcctttgtcctcccactcctgacacaactgaaagggtcattgctcccttggagtatgtgtgaagtctgccttctaatgagtaattagaggcataaggatagagacctatttgatttggggctgcctcctggactcagccacttcccacagatggctgtaggcagaaytgcaattcacctccagtcttagcagcttatttgactcagagtcaagtgttcccccaaagaattaccattgtatggcctaagaaagtacttatcccactgacggcagcagctgctgccatcacactggctacaggagg

SEQ ID NO: 324817 - DNA, 615 bp, Homo sapiens
aatgacagtggatttgtaatgggagtaagaattaagactttgttgtcttagccactttgatttgcaggggctttcttattactgcataaaagctgcaggctatcttgactgatagagcaggagaccagcatgatgagatttatatttttaaaagataattgagacaatatggaggatggattagaagtagtagaggaagttaattacaggcacaaaaccaatacagagatattgcaatactccaggaaagagataataaaggccyaaaataagagcaataacagtggaagtgaagaaaatgagttatatttaagaaatatttacattgcaatatcaacaatattacattgcaatatcaaagaatatagtgattatcaaaatgtgctatatagattttttttcacctattcctatgtaaaaattaccccaaaacttattgacttaaaacaatgataaaagacattatctcacagtttctgtgggtcagaaagttcaagaacagcttagctggtggtcctggctcaggatttctcatgaggttgcagtcaagattttggccagggctgcagtcatctgaaggtttgactggggctggaggatccacttccaaaatgg

SEQ ID NO: 324818 - DNA, 567 bp, Homo sapiens
ctatcttgggaccatattatctaagttacctgagtcataaggatgaggggaagcattcgttcttatttgagaggggaaattccattcccctactttgacaatattttcccagtagtaatttaatcctcagaatcctgtaatacccttaggatagtaatgaataaatgaatggctgcagtacattaaatccttattttcatcctaagagcttgatcttggtggttaccatttttcagctcytcaatcatttattgcaacatatcatgctacaacagaaactatttagaagcaagcaagatgctaactgctgttatgtgcatttagaaatggtcagttgacgagaggagaaatcagatggttaaacttctgcaacatttttcaaagacctccagtaaggcttaatacattgaaatacaaattacaggaaaagaaagatttgcctgtactaaaattttggcaaagaaacaacagaaacatatcttcgaacccatcaaacaattctcttctgtctgacccttaccaagaactctctttatctccttggaatattgacttccttccaatata

SEQ ID NO: 324819 - DNA, 601 bp, Homo sapiens
tactttcctcttggcctcctttctaccatctctaatgctaaatcactcagttttcttcctgtcttttcagacttctaggctttcttcattctctacctggccatttcatggttattyaactaaagtaatctaccacttcctttgcacctttacccttccgtcacactcatccatataattcaaaccctcaataaatctgtcttctctcttcctatagacataaggttaggcatttctggagaaagacaagatgcagtcttttgtcccatcattagctggtcctctgctgggattatttttctcacagtataaccacagcctcccctgggttccaggacagtgaactgacatcaggcagaagtttgccttgcagacctccaggccacatcactgaccatgtggggtccactggaaacgtgtctgtggggaatgtgctgtctcaaagctggcttaggggagtaaatgctgacaggacctatactgtaaattgcatatcacaaatctttcaaaaagcacctccgacttcagcctactccccgtcaccgtaacaaactacaactcacaaacacagcagaggggaaggagtgtctgggtggactca

SEQ ID NO: 324820 - DNA, 601 bp, Homo sapiens
tactttcctcttggcctcctttctaccatctctaatgctaaatcactcagttttcttcctgtcttttcagacttctaggctttcttcattctctacctggccatttcatggttatttaactaaagtaatctaccacttcctttgcacctttacccttcygtcacactcatccatataattcaaaccctcaataaatctgtcttctctcttcctatagacataaggttaggcatttctggagaaagacaagatgcagtcttttgtcccatcattagctggtcctctgctgggattatttttctcacagtataaccacagcctcccctgggttccaggacagtgaactgacatcaggcagaagtttgccttgcagacctccaggccacatcactgaccatgtggggtccactggaaacgtgtctgtggggaatgtgctgtctcaaagctggcttaggggagtaaatgctgacaggacctatactgtaaattgcatatcacaaatctttcaaaaagcacctccgacttcagcctactccccgtcaccgtaacaaactacaactcacaaacacagcagaggggaaggagtgtctgggtggactca

SEQ ID NO: 324821 - DNA, 636 bp, Homo sapiens
acacacacacatatctatattgattcccatatctacccatctgtgtatactgaaaactatgaactcacggtaatatctccaaytccaaactctaacagtagagagctcatcagttttctccctttccatattttcacttccttctgtgacagtgagaaactttgctcctactctcctccatatcttgacatattggagcactactatatgtaatatcccaccttgtaggccctgacacccccctgccaggttgccctcccctaggcaggcccctctcaccctattcggactcccacacccagcaccaggctgctgattcccctcatctaaagccctcctcaccccacctggcctctgatgccacatgctgggctaccataggaatgtgcatcccaccttgcttggtatctgacacccgtgccaggcccccatcagcccctcgtgtgcatgcctttctcactctgcatggctccaacaccccgccctggtcttcctccctgcatgcctccgcacctgaacttgttcagacactgataccctaccttttgtcactgacctgcccaaccccatctaataatggcttttgaaatggattgttctggaaggaaacagaagggaaaacagataagaaaaaag

SEQ ID NO: 324822 - DNA, 559 bp, Homo sapiens
gaaatagtgaattaccatcacaaaactgctaggcaaaaaaaaaaaaaaaaaaaaaatccaggctaagtgtgaaataactactgactgaatctaggcctcttgagctgagggctcagtattagtcacttctgtccccctgtgtagccccatcttcacattgtcttctgaagcgagagccaggagtttccctggggtctaccacagcaaaatgcaaggggatcctgaatcctggcccagaatcattggggagatgtggaggagactcagagggatctgcagaggccggtgaaggccaagaccaggccgaagcagccagggagtcccacctgagaggccggcctaraagctacgctatcgtggaagtgggaattggtgatgtgctggtaaattagccctccaggaaaacaaaaccaaaatagcccagtttaaaagattcatagtgtttgctaatttctgtggtgtaactactaatgtagttgatttcaagctatcaacatgttacccaacacagatgtgagaaaagatgtgtgcaattagatgttgatggctgggatgaact

SEQ ID NO: 324823 - DNA, 556 bp, Homo sapiens
ttttatagttttgggctttatattaaaaaatacaactaaaattcccactttaaacatcrtggaaaaaaattctgcaatgccatttggcaaaaccatgctactgactccaaagagctgtggcttgtgctgctgctgctgctgctgctgcttttgtagaggatggggaggctggacaaggtttctgcacactgtggagagattaggagacatccatcctttccaactggtctgtaagcagctcctgaacatctactaagagcaattttgagggtttattttgtgtacatatgatatatcgggagagccaagcgtggcacgtgccattaccatcattctactaaccagaacatcttattaaccactacttttatagtaagatcttgtggtactttctgaatcatccagattggctcagcacagatttaggattaagtgctttttattgtgattctattctttgaaaattagtaattcatgtagggtctgaatcacagcttactaactagaactgtggtttccaagcatttgcttttcaccagaggagcagcccattctt

SEQ ID NO: 324824 - DNA, 503 bp, Homo sapiens
cctattttttctctttctaaatgggagcgctattacagttagtcaaggcctatcccacattgtatatttgatgggtaagggggaaggcagataacttgtctctttagttcactggtctttagagaaactgcaycagaggagctacgtgaagagtttcatcacgctggacttgatgtaagtgataagatcctggatttcaagctgatgccattttgagatgagacttgggctcttggagaaggggatgtgtgtattttgcatgtgagaggtatgtgaattattgtggccaaagggtagactgtggcagattgtattttctaatcccattacgatcttcttacaatatgactttgggactcctcacatgaaaagtggggtttacatcccctccccttgagtctggggtgcaagtctggcttggaattctggcagaaatgacactgtgtgacttccgacctgtgtggttagattttttaaagctatacagcttctgcctggttctt

SEQ ID NO: 324825 - DNA, 503 bp, Homo sapiens
cctattttttctctttctaaatgggagcgctattacagttagtcaaggcctatcccacattgtatatttgatgggtaagggggaaggcagataacttgtctctttagttcactggtctttagagaaactgcaccagaggagctacgtgaagagtttcatcacgctggacttgatgtaagtgataagatcctggatttcaagctgatgccattttgagatgagacttgggctcttggagaaggggatgtgtgtattttgcatgtgagaggtatgtgaaytattgtggccaaagggtagactgtggcagattgtattttctaatcccattacgatcttcttacaatatgactttgggactcctcacatgaaaagtggggtttacatcccctccccttgagtctggggtgcaagtctggcttggaattctggcagaaatgacactgtgtgacttccgacctgtgtggttagattttttaaagctatacagcttctgcctggttctt

SEQ ID NO: 324826 - DNA, 550 bp, Homo sapiens
tacattttccatcttctgagtgttccctttaactattatgcctggccaaaagggaataggaagctttagaaagatacttcgcaatccataccagcagcttcaaagaaaggcggaaggcaccaagtaaaaggtaaggaagatactttcaacaacttgttgactcatttcatagtcaatgaatagtcctgttattcccttaagtgatgactccataaagaaaatgatattcaaaatatattctaaattgcattttagagaggaaaaaggagagggagacttcacacaatttaagcaatatttttttcttactgtttccatcttgaaaactatttctataaaagaaagcctaaattttttttattactttgaagaaaaatattatgactaagcatgaaaatgctggattttaagcttcyaagaaagtaatcccttctttcaagtaaaatgagttttaatgagaaaatttctgttcataaactgttagcccccagataattgtgaaacgctataaataaagttttaaaatattatttactcattattcattgtt

SEQ ID NO: 324827 - DNA, 550 bp, Homo sapiens
tacattttccatcttctgagtgttccctttaactattatgcctggccaaaagggaataggaagctttagaaagatacttcgcaatccataccagcagcttcaaagaaaggcggaaggcaccaagtaaaaggtaaggaagatactttcaacaacttgttgactcatttcatagtcaatgaatagtcctgttattcccttaagtgatgactccataaagaaaatgatattcaaaatatattctaaattgcattttagagaggaaaaaggagagggagacttcacacaatttaagcaatatttttttcttactgtttccatcttgaaaactatttctataaaagaaagcctaaattttttttattactttgaagaaaaatattatgactaagcatgaaaatgctggattttaagcttctaagaaagtaatcccttctttcaagtaaaatgagttttaatgagaaaatttctgttcataaactgttagcccccagataattgtgaaacgctakaaataaagttttaaaatattatttactcattattcattgtt

SEQ ID NO: 324828 - DNA, 303 bp, Homo sapiens
actcttacccaggctgtaatgcagtggcgagatcatgactcactacagccttgatctccccggctcaagagatcctcccacctcgacctcccaaagcgctgagattacaggcatgagccaccacacccagccccaaattaaagatttttattcagaaaaattttatttaataaccaaaaaaaaacattgttttaaaataaggtctaatgtttytcctttctaataattttcctttttaaaacaatgtttgattccgtctctcatctcagcagagcctgtttgtaatgcttctttacaccgtac

SEQ ID NO: 324829 - DNA, 593 bp, Homo sapiens
tcattaaactgatatctagatgatgtacatttcttgacttamtacaattcaaaaaaaatgaaacaaattacatgaacacagtggctatcatttcccccttgtgaatggcatagtagcagtctatacaattttggatgttgtctttctgttgactgttagttactttagactacaaatctcagaacatttaaataatgatttgttacattactctaaacctaattattttatattcactcacaccatcccctctgttggttctgaaataaactattcaaaggagtgcagagccagtgggtgtagagaattatgttttattaattggaagcattctaacagtaaccatattgactgatcacatgcccaatattctctttttgaccaactttgctgctgtcaagaaaagaaggataatattgtacagtaattcaatgctaataatttatcagttccactattttgtaggtattaatatcaaaagctggttgttggaaagtcgaacaatgtagcaagggctcccagatgtgccatttctatcttcctgtgtgtgattggatctcagctctacaatgtgttctgtgctgtgtgggaaa

SEQ ID NO: 324830 - DNA, 593 bp, Homo sapiens
tcattaaactgatatctagatgatgtacatttcttgacttactacaattcaaaaaaaatgaaacaaattacatgaacacagtggctatcatttcccccttgtgaatggcatagtascagtctatacaattttggatgttgtctttctgttgactgttagttactttagactacaaatctcagaacatttaaataatgatttgttacattactctaaacctaattattttatattcactcacaccatcccctctgttggttctgaaataaactattcaaaggagtgcagagccagtgggtgtagagaattatgttttattaattggaagcattctaacagtaaccatattgactgatcacatgcccaatattctctttttgaccaactttgctgctgtcaagaaaagaaggataatattgtacagtaattcaatgctaataatttatcagttccactattttgtaggtattaatatcaaaagctggttgttggaaagtcgaacaatgtagcaagggctcccagatgtgccatttctatcttcctgtgtgtgattggatctcagctctacaatgtgttctgtgctgtgtgggaaa

SEQ ID NO: 324831 - DNA, 500 bp, Homo sapiens
accaacatgggattagtgagggccgggagctaggcctgtgccatgtatcactgcatgttgtgctgtgtgagatgacaaatctgtcttccattactttgttgagcagttacccctgagaagaattatttcctttaaaataaaaaacatactctgtactggctgctgcattatagggcatatcttgcctggaaaatggaagtcaggcaacatggctattctatggaaatgtctgagcacaaagaagaggcaaaagggaatgtggaggcctgcgatgtcttggaaatgagcaggaggatgactgcaatggcccttcasttaggttcaggcttctgcgggaaggcggcacccaggagcccagagcagggagacaaacctgcgtggaagtccaggtgtgctgtgatggagaggcctccatgtggccttccatatcctgacagcccagatggggcgaaggcagacctccacaggagtagacacccagaggctgcagtgaaccctgc

SEQ ID NO: 324832 - DNA, 500 bp, Homo sapiens
accaacatgggattagtgagggccgggagctaggcctgtgccatgtatcactgcatgttgtgctgtgtgagatgacaaatctgtcttccattactttgttgagcagttacccctgagaagaattatttcctttaaaataaaaaacatactctgtactggctgctgcattatagggcatatcttgcctggaaaatggaagtcaggcaacatggctattctatggaaatgtctgagcacaaagaagaggcaaaagggaatgtggaggcctgcgatgtcttggaaatgagcaggaggatgactgcaatggcccttcagttaggttcaggcttctgcgggaargcggcacccaggagcccagagcagggagacaaacctgcgtggaagtccaggtgtgctgtgatggagaggcctccatgtggccttccatatcctgacagcccagatggggcgaaggcagacctccacaggagtagacacccagaggctgcagtgaaccctgc

SEQ ID NO: 324833 - DNA, 519 bp, Homo sapiens
taaattcctgcaggaaaagaccattacttttaatgagattccttgaaatgaagaactatagcttaattgattaaaaaagattaataggtaattatttgcttaggaacaaaaataatcaaaataaaaaacacctgcagttgctcatcaagagcaggaatccagagagagaaaattttcaccctggctttagtcttataaaggtgctcattctcgcattggaccaaaacgtcgagagacatggatctgagtcytggttttgtaattatttctcttgtgactgcaggaatcttccttcaactttctggtcctgaaagaccaggtccataaaacgatgtggttggagcagataatctgcagcagctctggtgtgcctgaaactgtcagcagttaaaccgctcctgttcctttttgagatcttaatcagaaatgaatatgcatcaaagacaccccagagcgagaccctcttccgtgttatttctactgaatgagaggcaggaactgcatcagtgttttggtatg

SEQ ID NO: 324834 - DNA, 519 bp, Homo sapiens
taaattcctgcaggaaaagaccattacttttaatgagattccttgaaatgaagaactatagcttaattgattaaaaaagattaataggtaattatttgcttaggaacaaaaataatcaaaataaaaaacacctgcagttgctcatcaagagcaggaatccagagagagaaaattttcaccctggctttagtcttataaaggtgctcattctcgcattggaccaaaacgtcgagagacatggatctgagtcctggttttgtaattatttctcttgtgactgcaggaatcttccttcaactttctggtcctgaaagaccaggtccataaaasgatgtggttggagcagataatctgcagcagctctggtgtgcctgaaactgtcagcagttaaaccgctcctgttcctttttgagatcttaatcagaaatgaatatgcatcaaagacaccccagagcgagaccctcttccgtgttatttctactgaatgagaggcaggaactgcatcagtgttttggtatg

SEQ ID NO: 324835 - DNA, 591 bp, Homo sapiens
tgatcagaaactttgacacccccctcttggcttctackccagtgactgcagtctgtggccacaaggagatgaactgtcacttcccctcctccccaaccgcctcctcaagtgcactcaagcagagctactcccgtttgcccaaataatttttgattccctctacctcattaatacaatgttcctgattctctgaattgcagatgggcagacaaaatgtacccaggaaaagtgacaccctcctataagaaaacatgtggtgggttatctctgagcccctgctgttaacgttctacaccaaatgccctttctaatgctgggagtgtccctcagggcggccgcacccctcacctcacttctgaggcagggttctgaacacctgctgttaactttctacaccaaatgccctttctgacctcagggtagccgcacccctcacctcacttctgaggcagtgtcagcactcaacaccttctgctgattgtgtcattttgaataagaagagaaacaaaaacaacaaacgtgtttcttctttgtgaaccccgaaaagagcatgcaggctctgaggtgggtcattgataagacagcaggtca

SEQ ID NO: 324836 - DNA, 591 bp, Homo sapiens
tgatcagaaactttgacacccccctcttggcttctacgccagtgactgcagtctgtggccacaaggagatgaactgtcacttcccctcctccccaaccscctcctcaagtgcactcaagcagagctactcccgtttgcccaaataatttttgattccctctacctcattaatacaatgttcctgattctctgaattgcagatgggcagacaaaatgtacccaggaaaagtgacaccctcctataagaaaacatgtggtgggttatctctgagcccctgctgttaacgttctacaccaaatgccctttctaatgctgggagtgtccctcagggcggccgcacccctcacctcacttctgaggcagggttctgaacacctgctgttaactttctacaccaaatgccctttctgacctcagggtagccgcacccctcacctcacttctgaggcagtgtcagcactcaacaccttctgctgattgtgtcattttgaataagaagagaaacaaaaacaacaaacgtgtttcttctttgtgaaccccgaaaagagcatgcaggctctgaggtgggtcattgataagacagcaggtca

SEQ ID NO: 324837 - DNA, 366 bp, Homo sapiens
tgaagtgcacaaaaaaggagtagtagaarggcaagagcttctggaatgttagctttatttagcccaaaatgattggcagcaagttgtgactttattactcaatgcatctatgttgccattccaaacagttgttgcaagtgctcgagagagaacagtaagcctgtgtagctgtttttcttctgtcttctagttgggtgaagagaaatgcacataaaacctgctttgaaaaatactaatgattagaatcagggtctgttgatggttctgtagaatttatccactcttcatgtggtcttatttcaagaacaatattttccccttactgacatataatgcctacttattgtacaacatttgtaaaagcac

SEQ ID NO: 324838 - DNA, 589 bp, Homo sapiens
tgctttgaaaaatactaatgattagaatcagggtctgttgatggttctgtagaatttatccactcttcatgtggtcttatttcaagaacaatattttccccttactgacatataatgcctacttattgtacaacatttgtaaaagcacaaatgtaaatgaaaataaatattgtcatagcctcaacaccaagacataaccacattttggaaatatatcttgtaaaaagccaaaggggaaagggtggtaggaaatgaatacatatgaaaattgagacctggagaagtaaactttgctgcatctacggattctttatactacagcgcacttcctcaggggctcagctaagcatttcagaagagtgcaagtgttgttgacatttaaaagctacagcatgggcttgggataaggcaattctgttctctatttcttagagaagaaaagaatcccagtgcacaccaggaaaataattttggaaactcagttaattgtgaaggtgaggctgagccagcttgtggttaaagctacaaaggaaatattgttcacttcccataaatgatttcccrtatgtaaagtggggccgatcctagc

SEQ ID NO: 324839 - DNA, 577 bp, Homo sapiens
cattaacgtttgtgattagtcctggtgatgacttaccaggacacagagtttaggagtttggagatcctgccaagcttagctgaaagtgcacatctagaagaaaagaygcaaaagtagcccatggttccaggaaatggcagaggactgatccttcatgtcatgttttggaaaaatgagagttatcaaatgtttaatagaaggcagtttgagacagtggaaagaactctatgttgagaggcagaccgacttgggttcaaatatggccccatgagggtttttgtttgtttcattcactttatgcccaatatagtgcctgttacataatacgccctcagtattttctgaatgaatgactaaatgggtaaattaataacttactgaaccctcagttttctcatcaaagtaataggtgtttctcagaaaatgtcagctttaaagtttcaaatacacaaaaaaaaacttttataaaactgtttctctggctttgtcccatctcacaaatgatttctagaggtcttcagtttgttccacctgactcataaacacaccatgtaccatctatcacctaccacctgcc

SEQ ID NO: 324840 - DNA, 587 bp, Homo sapiens
ttcctatttcacagatgaagaaactgagactcaaggaggacaaagaattcacacacttgtgtgtggtaggatgaggatcagaacttgggctccacaggcactctgggtgctctttaccatttgcttctatttacttctcagctgccccaggaaatatggtggcatacaagattaggcttggcttggcgctcactaagaatagaacagggaacttttcccaattaatgaagggctctttgaaaaaatcgacccaatattcttccagccaataraaaaaaatgattctcctttgtaaaggagttggggcaaatggattctaaaaatcaattataaaagcagctggtccaatgtaaactgatgtctcagctgagtttggactgactgaaaatccagccacagcttggttttcacctcttcatccctccacccttccttgtgcctaaagagacaagagaatgtgagcccccacccctgacatgtttgaaaagggaaacaaattcattgataacattgtggtctgttcaattctttgcttttctttttgcctccttaccccaccatcttcctcaggtacacaggacacacca

SEQ ID NO: 324841 - DNA, 536 bp, Homo sapiens
tgtattttcatgtgtataaagtccaagaaaawtttttaaagctaaaggctacttaaaattaaatatggttaaatgaatactctttactttgtgttcaagccttctttctaataatcttaaaataacaatgtaaggataaattgacaaacagaatgagaagagataacaaagtgtgagaaactggaaagcaattggacaagtattaacagatttagcaaaacagagaaaaacaaaaccaaagctaccagtaggagacagcgtagaagcaagctggcaagctgacttagcccttggaattccaaaatctaaaaatgatattgttggtagggttgagcaatgaaggatttaccaaaaatatgtcttataagcagcaagataagatccagtgctgtgctggtaaccagctccctactccaccccacccccaataaaaagccctgttcgccagttttcatgacgtaaatattcccatcatggccaatttcaagctatcaatataatgttactcaacacagaactgggaagacatgaacaca

SEQ ID NO: 324842 - DNA, 383 bp, Homo sapiens
tcaacagaccttttccttgccaactctcccactttccagaatttctctcacctaaatttgagagctttcatgtcccagaggtcttatccttggtatyaataataataataataataataatagctaatgcttattgaacatttattatacattaggcactacacttggggttctttactcttaaatcacgtatcacccaacaatcccatgaagtacatactataattgccatggtcttaatgcttgtgtccccccaaattcatatgttgaaattgtcacccccaaggtaatggtgttaaaaggtgggaactttgggggaatgatgaggtcatgaggctggagccctcatggtggagattagtgcccttatacaagaggcccca

SEQ ID NO: 324843 - DNA, 576 bp, Homo sapiens
aaaacaatctgtccagttttgggcagaaggataaaagatttcataagaaatctttgggaaaaacttttatttacatttatattacttagataatattatttgagaaacttgaaggacataaaacactgtaataaagaaaaaaatataggccgggcgcagtggctcaagcatgtaatcccagcactttgggaggctgaggcgggcagatcacctgaggtggggagttcaagaccagcctgaccaacatggagaaaccctgtctctattaaaaatacaaaattatctgggcgtggtggagcatgcctgtaatcccagctactcgggaggctgaggcaggagaattgcttgaaccagggaggtggaggttgtggtgagccgagatcgtgccattgcactccagcctgggcaacaagagctaaactccatctcaagattaaaaaaaaaaagaaagaaaagaaaaaatatggcaaatactttcatagaaaatactttactatatgttaggcacagttgtagkcattttgtgtgcattaacttatttactcagaacaataattctatgaagaatgtactatt

SEQ ID NO: 324844 - DNA, 576 bp, Homo sapiens
aaaacaatctgtccagttttgggcagaaggataaaagatttcataagaaatctttgggaaaaacttttatttacatttatattacttagataatattatttgagaaacttgaaggacataaaacactgtaataaagaaaaaaatataggccgggcgcagtggctcaagcatgtaatcccagcactttgggaggctgaggcgggcagatcacctgaggtggggagttcaagaccagcctgaccaacatggagaaaccctgtctctattaaaaatacaaaattatctgggcgtggtggagcatgcctgtaatcccagctactcgggaggctgaggcaggagaattgcttgaaccagggaggtggaggttgtggtgagccgagatcgtgccattgcactccagcctgggcaacaagagctaaactccatctcaagattaaaaaaaaaaagaaagaaaagaaaaaatatggcaaatactttcatagaaaatactttactatatgttaggcacagttgtagtcattttgtktgcattaacttatttactcagaacaataattctatgaagaatgtactatt

SEQ ID NO: 324845 - DNA, 520 bp, Homo sapiens
cgactggatttgcttgatcacttatttctaaaatgttcataattcctaatgttaaattataaaaatgcctaatggctaagcattgccatgaagatttatattataaaacatgtgatgtgcccggtctcatatgtaaaatataatatttaaataatggtagctttctttccatgctatcaatcaaccagttaatttaagcccaaagacaaatcattcattcctgmatacattatttaagtgattaagaaaaactggtttaggatggaaagggctacgtctttggaggaaaaataaatcaaagtcaacattcacaaaggattttccaccattaacccaggagttcagaatcttatgaaatgagtaagaaaaagagaaagggatacatacatatatacatatggatttttatatatttgttccatactttttaaagtcttctctaatcttgcctgctttagtctacttttttctcactgaaaaacatgtttcatccatcctttgattctattaacagacaaag

SEQ ID NO: 324846 - DNA, 592 bp, Homo sapiens
tgctctgaaaccctaacaagggcattcactcatttagatgcagtccgtctgaatagcttcagttgcctgaggttgccaatgctctaaagtgtaactcctactcactcaggctgacctgaaacttataccattaaaccaagcttgagggcctcaggaagtcatagctagatggtaaagtattgtacaaataatctactcagaaagactgcttccaaggtccactggggttgagggtaattttgtaaaaattctcaatgtagaaggcagtactcctatgcctgtgtcacactggacatcatttgcctgttgtcagtatatccttttgtagagatgtaagaactgctttaatatgaaccatacacactttacagtgacaccatgactatatttaaattttaatatactgaactgcaaacagcagacatgcttctttcttccagactctagttcatgataactgtcaamcaaataaaatgtacctgctaaactagtgtagttgagtccatcagtaacaataacagaagaataaacgtggcagtatttagccttttaattgcatttatcacttaaaagaacctgagcaagtagactc

SEQ ID NO: 324847 - DNA, 543 bp, Homo sapiens
aaactttaaggagcaagagagaagcaggagctactttgaggactggcaaccaaaattgctaagaggtttagagcagcatgtgtcaccaatcccagcagaaatgatggcaaacgtgtatcctgaggctaactaatatagcatgactaggtccttacttactcagagacaaggtggggctgagtctgcaagttgcttstcttaaatgagacattaaaaagtagatgaatattaaagctgagccaagatttattgtgctatgttcctttaatctccacccctgcatgccataagagtaggaatttactatccctaaattgtaataattgtttattaaaaatattagccaataccaatttatagtattttccatgccccaaggactatgttaagtactttatggattttatctcatttaatacttactcactttgtctctaggaggtcaataatatttttttctattttctaatttagagatctgattgaggtttggagacattaattcactacatacagacacacagaagtagcaaagaagagatg

SEQ ID NO: 324848 - DNA, 545 bp, Homo sapiens
atttacctatgagtgatttgaagggaggttttctagtcaaatcattttgaacagcaatttgggaattacaaatgatcaaatgatactcccaaaacaatcctcctctgaaaaaaaaaawatatatatatatattcgagattacccaagaatttaatgcaaattcaaattaaccattttatatattacaagctgactttatcatctttctcattttattagtgtaaccttgtcttccaggttataccttatttttccaaaaatctttattgaaaataaagtatatacatatgtgtgtatatatgtgtggatgaatatatatatatattaaatatatatatatattctttttataaggacttttagaatttccctaaaagaaaatgtgcttcaagatataaatattcattgtgctttatatggaaacctagttcttttcttttttattatttttctttgctgcattgaaagatagaaaataagtaatgccattaccctgctgtgagagttgaaggattaaagtgtccttttcttctgaaaaagaatac

SEQ ID NO: 324849 - DNA, 545 bp, Homo sapiens
atttacctatgagtgatttgaagggaggttttctagtcaaatcattttgaacagcaatttgggaattacaaatgatcaaatgatactcccaaaacaatcctcctctgaaaaaaaaaaaatatatatatatattcgagattacccaagaatttaatgcaaattcaaattaaccattttatatattacaagctgactttatcatctttctcattttattagtgtaaccttgtcttccaggttataccttatttttccaaaaatctttattgaaaataaagtatatacatatgtgtgtatayatgtgtggatgaatatatatatatattaaatatatatatatattctttttataaggacttttagaatttccctaaaagaaaatgtgcttcaagatataaatattcattgtgctttatatggaaacctagttcttttcttttttattatttttctttgctgcattgaaagatagaaaataagtaatgccattaccctgctgtgagagttgaaggattaaagtgtccttttcttctgaaaaagaatac

SEQ ID NO: 324850 - DNA, 379 bp, Homo sapiens
tataacaggttattttagtttctgttctgtggaaagtgtaaagcattccaacaaagggttttaatgtagatttttttttgcacccatgctgttgattgctaaatgtaatagtctgatcgtgayactgaataaatgtctttttttttaatgtgctgtgtaaagttagtctactctgaagccatcttggtaaatttccccaacagtgtgaagttagaattccttcagggtgatgccaggttctatttggaatttatatacaacctgcttgggtgaagaagccattgtcttcggaaaccttggtgtagttgaactgatagttactgttgtgacctgaagttcaccattaaaagggattatccaagcaaaatcatggaattat

SEQ ID NO: 324851 - DNA, 379 bp, Homo sapiens
tataacaggttattttagtttctgttctgtggaaagtgtaaagcattccaacaaagggttttaatgtagatttttttttgcacccatgctgttgattgctaaatgtaatagtctgatcgtgacactgaataaatgtctttttttttaatgtgctgtgtaaagttagtctactctgaagccatcttggtaaatttccccaacagtgtgaagttagaattccttcagggtgatgccaggttctatttggaatttatatacaacctgcttgggtgaagaagccattgtcttyggaaaccttggtgtagttgaactgatagttactgttgtgacctgaagttcaccattaaaagggattatccaagcaaaatcatggaattat

SEQ ID NO: 324852 - DNA, 600 bp, Homo sapiens
ccctcagatgggtagtttgcaaatgttttctcccattccataggttgtctcctcactttattgattgtatcctttgctgtgcagaagcattttaacttgatgtaatcctatttgtccattttggctttggtttcctgtgcttatccagtatttcttaaaaaaatttttgctcacaccattgtcctggagattttccccagtgctttcttatagtagtttcatagtctgaggtcttagatttaagtctttaatccattttgattttgtttttgtaaatggtgagcgattggggtctagtttcattattctgcaggtggatatccatttttcccagcacaatttattgaacagactktctttaccccagtgtatgttcttggcatctttgtcaaaaaggagtgtgtggatttgcttcctcattctctattctgttctattggtctatgtatctgattttatgccatgctgttttggttactatagctctacagtataacttgaagtaaggtaatgtgattcccacagttttgttctttttgcttaggctagctttggctattctgggtcttttgtggttctaaacgaattttattttttttt

SEQ ID NO: 324853 - DNA, 581 bp, Homo sapiens
tactaatttctcataatcatctttccctattgttattaactgaattatgtccccccaccacccaccaaattcatacattaaagcctaaacatgcaatttgactatatttggagatagggtctttaaaaaggtaataaacagtaaatgaggtcataaagaaggggccctgatccaataggaataatgtccttaacaaaagagaaagaggcctgtctatgtgcatacacagagaaaggccatttgagaacacaacaagaaggtacctgcaagctgaagtgagaggcctcatcagtaaccaaccctgcagacaccttgatcttaaaaatccrgcctccagactgtgagaaaataaatttccattggttaagccacccagattgtggtattttgttatggaagcccaagttgactaatatacacataagcaaatgtttttccatgatgacattttaatcatcacagcatattatctgtgtataatttatttttactttcttattattggatatttcaattaaatatatttaaattgtaataattgttttcataaaaaaatctcagaaatatttctaaatgtaaag

SEQ ID NO: 324854 - DNA, 447 bp, Homo sapiens
ggtgcatgcctggccgaggcagaagaatcgcttgagcctggcagacggttgcrgtgagtcaagatcgcgccactgcactccagtctgggcgacagagtgacagagtgagacactgtctcaaaaataaataaatgaataaataaattatataaataaataaattgtataaataaataaataaaataaaaataacctgaagggtcagactctatgccagatggtggagccaactgcctcctattgtcttctcattcggatctatctattccataccatgaggtaccttatggacaggtttgcaaaacttcctatatgcacttcctatatgcacttcatatatgctctattcacacctttcacgaagatcaactccttggccactcatattgggcctaaggaagtcctctcaggaagacagacataaagaaagctacgcagagttagaga

SEQ ID NO: 324855 - DNA, 552 bp, Homo sapiens
taggtgataaaaaggtgaaaatagaatatcttaccctcaagttcatgattgcatctagaaatcaaacaagttaactatcctcttcctacaaaaaaaaaaaagacataaaaggaaatgctttgaaacatctattaaaatatggctgggactcaaatgtyctagtgaccaaacctatggatggttgtaccatgttagaaaaaaatgataccaagacagggcatgaggagagtcttaaaaggtgattactatttcctcagattagccagtaaaccagtcaaaaaaaaaaaaactggcttactgtactagcaccttaaactgacagttactattctgcacctgctcattaatttcaaggcagacactccaaactggcacatccctgccatttttacccacttgccaaagaagttcctagcttcaggcatctctgttaaaatttctggcacaacgaaaagcattcacaccaaaagaagaatgaccggagactcaaagtcattaaaatatccaggcatctcttagggaaattaaaaataaatcccaaagaagaagagc

SEQ ID NO: 324856 - DNA, 630 bp, Homo sapiens
ggttctatgatttaaggaaatgaagccccaaacctctgggctggtatgagcacttcagctcacataggccccactrttccctgatattttaaccctgtcttatttacatatatatgtatattatcttctatgcgacgataagtatttatatttctgttccttcttggagaagttttcataggtctataaacaataaaacataaaattgagagcaagatatttcgtctattttgtttactgctttatcttcggcatggaaaacaatgtcttgaatatagtgacacctcaaatcttgttaacttgtcaaataataaatataatacccgttttctattctaaatccttgcagaaagactatattaactattattttttcacaataatcttgatatattttcttacagaacttactccacttagcagtcaggaaaaattaaaaataagctacgtgtatttctcttatggaatttactgtcatgattgctaatgaaacctcttatctacgctaaattttctctaacgtttaaacttagaaattttaattaaattcctaagtaaattgacaccgaatatggtttggctgtgtctccacccaaatctcattttgaattttaactcccacaattccca

SEQ ID NO: 324857 - DNA, 600 bp, Homo sapiens
caaaacatctatggactttcaacctgggaattttcaagaaccacttcttccttgaaacctatgtccaagattagaaactctaaaggtgttctaatgagcagctggcttatgaatcacttctcttatatctctggcttcaatttttttctatcaatgctaaccttatgaatacatctatctctaacakgacttaaatcctctgtctctaagagtttctttataaaagtggaactcacatatagatgggtcaaatacaacaacatttaataaactaaagtaataaaaggagatattttcctttaataattgttatcaggcctacttctggtcttcaatcctttcaaaaattatcattttgaattacttccctattgttgttatctgtaaatctcatgcaaaaatatgatctgtggaggcttccactcaggaaaagccctttagaaggttgtcaggatttgtttagtataggcctaatataggcctaatatgcaaaattgatacttgatatactctgaggtggcacactacagatcactaggactgatgcattctcatcaaggttgtaaagataaatttgaggtacttataaaatcttttgtt

SEQ ID NO: 324858 - DNA, 600 bp, Homo sapiens
caaaacatctatggactttcaacctgggaattttcaagaaccacttcttccttgaaacctatgtccaagattagaaactctaaaggtgttctaatgagcagctggcttatgaatcacttctcttatatctctggcttcaatttttttctatcaatgctaaccttatgaatacatctatctctaacatgacttaaatcctctgtctctaagagtttctttataaaagtggaactcacatatagatgggtcaaatacaacaacatttaataaactaaagtaataaaaggagatattttcctttaataattgttatcaggcctacttctggtcttcaatcctttcaaaaattatcattttgrattacttccctattgttgttatctgtaaatctcatgcaaaaatatgatctgtggaggcttccactcaggaaaagccctttagaaggttgtcaggatttgtttagtataggcctaatataggcctaatatgcaaaattgatacttgatatactctgaggtggcacactacagatcactaggactgatgcattctcatcaaggttgtaaagataaatttgaggtacttataaaatcttttgtt

SEQ ID NO: 324859 - DNA, 600 bp, Homo sapiens
caaaacatctatggactttcaacctgggaattttcaagaaccacttcttccttgaaacctatgtccaagattagaaactctaaaggtgttctaatgagcagctggcttatgaatcacttctcttatatctctggcttcaatttttttctatcaatgctaaccttatgaatacatctatctctaacatgacttaaatcctctgtctctaagagtttctttataaaagtggaactcacatatagatgggtcaaatacaacaacatttaataaactaaagtaataaaaggagatattttcctttaataattgttatcaggcctacttctggtcttcaatcctttcaaaaattatcattttgaattacttccctattgttgttatctgtaaatctcatgcaaaaatatgatctgtggaggcttccactcaggaaaagycctttagaaggttgtcaggatttgtttagtataggcctaatataggcctaatatgcaaaattgatacttgatatactctgaggtggcacactacagatcactaggactgatgcattctcatcaaggttgtaaagataaatttgaggtacttataaaatcttttgtt

SEQ ID NO: 324860 - DNA, 600 bp, Homo sapiens
caaaacatctatggactttcaacctgggaattttcaagaaccacttcttccttgaaacctatgtccaagattagaaactctaaaggtgttctaatgagcagctggcttatgaatcacttctcttatatctctggcttcaatttttttctatcaatgctaaccttatgaatacatctatctctaacatgacttaaatcctctgtctctaagagtttctttataaaagtggaactcacatatagatgggtcaaatacaacaacatttaataaactaaagtaataaaaggagatattttcctttaataattgttatcaggcctacttctggtcttcaatcctttcaaaaattatcattttgaattacttccctattgttgttatctgtaaatctcatgcaaaaatatgatctgtggaggcttccactcaggaaaagccctttagaaggttgtcaggatttgtttagtataggcctaatataggcctaatrtgcaaaattgatacttgatatactctgaggtggcacactacagatcactaggactgatgcattctcatcaaggttgtaaagataaatttgaggtacttataaaatcttttgtt

SEQ ID NO: 324861 - DNA, 621 bp, Homo sapiens
gtagtacagccttcaggatgtaagtctttttcatcccaaatgacaagagacttgagactggtaatgcaatgaaacatttacatttctgtttctcaggcctgaccaatcataaatgcaaagatgatagtttctagagctgctatccattgctgcctatttatgctcaatttagcagtggtaaggacactagtgagcattttatgtttgtctatactattaggtcggtgcaaaagtaattgcgatttttgccattaattttaatggcaaacttttaacggcaaagttactggcattaacttttaatggcaaaaactgcaatyacttttgcacaaacctagtataaaagagtactgcatttcatataaatctgaaaatttaacccacatatccttcttgacagctaagaattttaatttatgatctcattgtcagactgaatcaacctaactgatgctatggtctcctttacttgggggtactcctgttatgataccacttcaagccttccaagttgaaatttatgtgaaatattatgagggctgagaaaatccaatatccaacacgagttctcagtatggttgctcacaggtttcttcccacctctctctctcttaaaggatc

SEQ ID NO: 324862 - DNA, 618 bp, Homo sapiens
aaattatcctatcactgaagcagtgaacatagtacattgggcaaactttgatgttatgctacatgtacacttagtggagtgattaaatcagactaattaacaaatccaccaagtcacatatttgttatttctttgtggtgagaacattcacaattttttttattttaacaattttgaaatatacaatatattaccattaactatatttcaccatactgtgtaatagatcactggaattgattcatcctgtctaactgaaaactttgtatcctttgactaacatctctcctttccctatctactctccttccacacttatcccctgggaaccatcatcctactctctatctctatgagaccaacttctataggtttcacawataaatgagttcgtatagtatttgtctttctatgcctgacttttttcacttagcataatgtcctctacattcatctatgctgttacaaatgacagaatttccttttttaatgaaatagtgaatagtattccattgtgtatatacaccacattttaaaaatcagtttaccattgatagacacttagattgatttcatatcttagctattgtgaataaagttgcaatgatcatgaaagtg

SEQ ID NO: 324863 - DNA, 624 bp, Homo sapiens
tttcatccacattgcaccagaagaaaagaggtaagaaacaagaaggttatactctctccatttaagataatttctcagaagatacacatatcatttccattagcatcccaacaatcagaacctagaaacatgggcacacagaactggaagggaagctagaaaatgatatttactcaagtgcctttacagtctttagmgtctttacagtcaggtgcctggctaaatgctagggtattattaccatgaaaaagaggaagacttgataggggacaacagctaatgatctcttttaaaagtgtgttgagaaataaaggaagcaaaatagaaatagaatataagaaagtctttgaagatgtttggctttgtagaggaaaagagcataaatcattcactacctggagataagaggttatagggcagtttttaaaaatggcttgaatgttgatttagaatgggagagatttaaatgtttagatgtggttgagaggatccagcagagaaagtaggtttgtatttagggaagacacaggaacatttgaagaaaccacgtacctgaacaggtaaggaagggcatcttttttgttgcttttttttttttttagcagagcttctcaaacttgaatt

SEQ ID NO: 324864 - DNA, 594 bp, Homo sapiens
gtaaaggagatgtaggggaacctggcaaggcaagagaagatgtgaaattgattttagttttatttcctccctcctcagtatccacatttctttctctcatgttttcctgcctccctcctctccccattttttcctctattgaaactgaggggccgggtgtggtggctcatgcttataaccccagcgaaggcccaggtaggaggattacctgaggtcaggagttcaagaccagcctggccaacatggcgaaaccccatctctatcaaaaaatacaaaaattagccgggcccagtagcacccacctgtagtcccagctactcgrgaggctgaggcaggagagtcgcttgaacccaggaggtggaggttgcagtgagccgagatcgggccactgcactgcagcctgggtgacagagcaagactctgtcccagaaaaaaaagaagaaacttaggaccgtgagccatttgtataatggaatagcaggagagaccttccctgtaactaacttcctaactagagaagaaaccatgtcttcatataccaacccatcctctgggggaagtgggtaaggtgcaggggatgcctgctggggacag

SEQ ID NO: 324865 - DNA, 615 bp, Homo sapiens
tggggacagcttgatatgtaattcttatgttcagaagaaaaaattgagaagttttctttttttttactgttgagttaaatgactacacttaattttttaaaaagtttttttttttttgagtcgcatcccttttcccacatgccttccattttataacccatttagatagagaagctcctactacttgctctgaagtgttttagaatggctaggaacacagattggatttccttactttaaatgtattgttattaaatcagtaatgtcccatgtctttcatgtaattctcacagtaacactttttaaatgattgcagtgaactttgagtgatgacatggttattgaattagggtgcaattggtgatgtgggcaagagtgggcagggtaaactaatggtaataatgatagaaaaggaagaggagraggaggagaaggagaaacaacttttcttgggtatttagtatttgccaggcataatgtttagctctttacttatattgactcatttgtttggatcaaaagaatgacagcttactagatcagagatgtgctgaagccaaagtgatcaaaactgagacatttgggaggataagtggagatgagctgtagtgacaa

SEQ ID NO: 324866 - DNA, 595 bp, Homo sapiens
aactaaaataaaagttggaattctaaaatattaaaattttaaaaaattaaatacgtattgtttttggaagaaaaaagaaaggaagaaaacattactcaccatttcggaagctggcttttaatcactaacttttttcttctcccaaaaggtaactgctattctcacttctatcatcataggatagatttgcttatttcttttaactttatataaagtaattatacatcatatattacttygtgtcttgtttcttttgcttgctgtttgctatgttaatctatgttgtcatagatagtgtatttcatttatttgtatggctgtgtagtagttctttctatggctatgccaaagatcatttagcctttctatggttttcggacatttgggttatttccagtttggagctattacaaactattacaaataatgctactgtgaatattcttgcatatgactttggtgcccaattacctacatttctgttacgtatacatttggtagggaaattgatgggtcataagataaacatagtgagttttaataaacaatgccagttttccaaagtgtttgtatcaattaacactttcattggtag

SEQ ID NO: 324867 - DNA, 595 bp, Homo sapiens
aactaaaataaaagttggaattctaaaatattaaaattttaaaaaattaaatacgtattgtttttggaagaaaaaagaaaggaagaaaacattactcaccatttcggaagctggcttttaatcactaacttttttcttctcccaaaaggtaactgctattctcacttctatcatcataggatagatttgcttatttcttttaactttatataaagtaattatacatcatatattactttgtgtcttgtttcttttgcttgctgtttgctatgttaatctatgttgtcatagatagtgtatttcatttatttgtatggctgtgtagtagttctttctatggctatgccaaagatcatttagcctttctatggttttcggacatttgggttatttccagtttggagctattacaaactattacaaataatgctacygtgaatattcttgcatatgactttggtgcccaattacctacatttctgttacgtatacatttggtagggaaattgatgggtcataagataaacatagtgagttttaataaacaatgccagttttccaaagtgtttgtatcaattaacactttcattggtag

SEQ ID NO: 324868 - DNA, 536 bp, Homo sapiens
ggtagtgattaataattaagtgaataatcacttctttcaatttgcagactgacsagacatcagtgttacacagacaaaaacatttcaattaatgttttaccttcatcctcctcttttgtttttggacctgatttgataacagaaaaaatgtgattatgattaagaggtagtataaaagcatgacctctggaaataagattcgaagctgagtttcaccatttactagctatgcaatcttgacaagttaactttgcttgcctgtacctaattttcttcatctgtaaaacaggattcataataatagtatctacttcctagtgttgtgctgtggtttgaaagaataaatcccacttaattttccatttcttacaggatttaattttttccccttggatcattttgaaatgcttagtacaaacattgacttcctgaaatgtaccacgtcttgtgtgtctgggccccaaatggatgtgggcttagtaattcctgggattctggaagacttcccttcctgaattaggatcgtgggagtgttt

SEQ ID NO: 324869 - DNA, 536 bp, Homo sapiens
ggtagtgattaataattaagtgaataatcacttctttcaatttgcagactgaccagacatcagtgttacacagacaaaaacatttcaattaatgttttaccttcatcctcctcttttgtttttggacctgatttgataacagaaaaaatgtgattatgrttaagaggtagtataaaagcatgacctctggaaataagattcgaagctgagtttcaccatttactagctatgcaatcttgacaagttaactttgcttgcctgtacctaattttcttcatctgtaaaacaggattcataataatagtatctacttcctagtgttgtgctgtggtttgaaagaataaatcccacttaattttccatttcttacaggatttaattttttccccttggatcattttgaaatgcttagtacaaacattgacttcctgaaatgtaccacgtcttgtgtgtctgggccccaaatggatgtgggcttagtaattcctgggattctggaagacttcccttcctgaattaggatcgtgggagtgttt

SEQ ID NO: 324870 - DNA, 536 bp, Homo sapiens
ggtagtgattaataattaagtgaataatcacttctttcaatttgcagactgaccagacatcagtgttacacagacaaaaacatttcaattaatgttttaccttcatcctcctcttttgtttttggacctgatttgataacagaaaaaatgtgattatgattaagaggtagtataaaagcatgacctctggaaataagattcgaagctgagtttcaccatttactagctatgcaatcttgacaagttaactttgcttgcctgtacctaattttcttcatctgtaaaacaggattcataataatagtatctacttcctagtgttgtgctgtggtttgaaagaataaatcccacttaattttccatttcttacaggatttaattttttccccttggatcattttgaaatgcttagtacaaacattgacttcctgaaatgtaccacgtcttgtgtgtctgggccccaaatggatgtgggcttagtaattcctgggattctggaagacttsccttcctgaattaggatcgtgggagtgttt

SEQ ID NO: 324871 - DNA, 562 bp, Homo sapiens
ctggtaagtctcctgtggtagtgaacacctttctctgttcaccctaacataccttgcaaatgtcatcatgatctgtgggtgtcatgacatgcaaaatgttggctgagaaaggataaaggtagagataaatttagaattaaaaatttttcagtttaagaattgatgtagctcaatatatttcaaaagtttaactgcaagtaacaattataaataatatgtgtatgtaacagtaaatgtatgtatgtgtgtccaaaacaagtttcttaccatgtgcagtacattctaataattctragctgttacatcacagaaatggctgcctgtgaccactgacttgattttgtaactcaccagtgggttgcaacccatgttttaaaaggctgatgtagagtgaattacacactaggaattaattatcttgtcttgtgcttgctcagatccttctgtgtttcccttctgcgtacagagaagttcagacccccttaaagcatggcatagccaacttttggctatagggtgaccaatttggccaggtttgcctgggactttcctggttctagca

SEQ ID NO: 324872 - DNA, 598 bp, Homo sapiens
gtcttaagatgtgaagatattcttaatttatagttttagaagattagaataaattgattttttgtgagcatgtgtaatgctgatctattttaggamaatctaattttactttattatctgaattaaataatatttaaatttattattgaaattaaaattattccttcattgtgattaatgtatcttgatagaaatttcctttaatatgatagtttaaatttgtgctcacttgggggttgcaaaaacagctggatggcttaaatttgcctgcatcctctatcgagagagagtgcccatttcaggcaggcctactggcccatgttgtcttgatttaactttgttgcacagagaatctggctcctttatcatacagcaggccaaggactcagagtcaaagctaaagctagtcatatctaaagatttgcttgttatcagttattttaaagatcagtctgccaggttacctgagagtagtttatttttagacatgttcatttatcatcttagcaactcagagaaaacagctccaagcgcaatagatggctctgttctaaagcatagattatttttacatcactgttaaagagaaagcccagcc

SEQ ID NO: 324873 - DNA, 612 bp, Homo sapiens
ttataaattaatggattttgctaaatcatccttttagagtcggaaaacagagattaaaaatgtaaatcaggcaggaaaaattatatcaatagatatataatggtagtgatttagtaaaagatagttgaatggatgagacaatgttaggagtatgtgtttgttgcacatttgtactaatgagtgagacaatgactctcccccgccattccctatgggaagaaagatttgttgcataatgaggaaaaatttctctgattttsgtcctttaaaagcatagaatgctgagtcaatttattgatgattggaaagttctcaaaattttagtgaaaatatgcacaatatggacgtaatgacaccaatagttgtttagcaattcaagagacatttattgagcactcagtgctaggcactaaggtacagaagtaaattagacatggcccctgtcttaagagctttaagtctaacaggaggagaagaatcacattaacagagtgtagtcatgcactatggtacatgttccagcagaactacgtgcagggtactctaacagcaccggtgaggggtgcatgatccagtcttgtgctgggatttagacatggtaccccaaaataa

SEQ ID NO: 324874 - DNA, 593 bp, Homo sapiens
aattctgtctaaaaacacattatgtttttcatactggcctcttaatgtcagatcctatgcccagttggtgtttttacagatcagtgacaaattaaaatgcaggtaaacaagatctgtggtgggattctaggggaaatttaaaaattccaagtctcttctctctttcataatacagttattacttaagataagttatttgccccacatctgaaacatgataacatcacgttgatgtgtaactacctcacaacaaagctttgtaagcttacagaagtgaggctgtcttaaagcctgtcaaaaaacatttcattatgagacataccttcttccccaaggaaagctgggtatgctaacaagtacattactttctttgggcatgtagaatacmtttcaaagcaagtgaagcattagctacactgtagtatctataagcagaaagagtttatgcaacttttgacttactcccagagggtaacctacacactgattataaactaagtgcatctttgcatatgtctctgtgctcaacaattctgttattattaactttgagctaaatcactcatatttttgaagtctatctgtcattagag

SEQ ID NO: 324875 - DNA, 573 bp, Homo sapiens
ttaaaatcaccaaaaaggggggttggtggaacatttgataacatctaataagactaatcaataaaagggagaaggcacaaatataagagtatcagagctggaaaaggtggcgtcactggagattttcaaggcaatataacagtaaataagactatatcaacatattagaaacaattttatgccaatacatatgaacatatagaagatatgaccatacttttattaaatacgacttaacaaaatggacaggagaaatagatatctaaacagacctacatggttaaatatttacaatttctataatgcaaactaaatattaaagaaactaaatcactaatataaaaccttccccacaaagaaaactccaaactctgacagatatctaaacaaattctgtttttaaaaamcaaataataaatagcttcaatattttataagttttttcagtgacatgcaattagaggaggaagaatgcatgtcagatattgggcagccagtggcacggacaggattgacatttgacagtcatctttggttgcccagcaaacagatcccatttatattgttaaaacc

SEQ ID NO: 324876 - DNA, 489 bp, Homo sapiens
tcctctggctttgagcccagcccaacacagcaccaaccaggacttagccaggaaytggagtcctcgttgcctagactgcctttgaagtttatttaggacctcagagcactttagcccatggtggaagggcttgctggaactcgggttctgaccactaaaacaggtgacttgcctctggggtaaggcagatctgaatgctccctcgtgggtgctggctgaattctgccccatgttgctttcctccgtgacagagaaatttgagttgcaatgcaaagtcccacagtcactgggttctccttcccccaagggcacaaattttctctccatactatatagctgctaccaggtgattagggaggggtggataggcatttcaagagtgtctttcctaccctctcagtgcatctttccttaatatgatgttaaaaccaggcactgtgattgctcacctggtgttttgattcttatgaaggtgcttttttgtgtgca

SEQ ID NO: 324877 - DNA, 459 bp, Homo sapiens
tctccagtcatttggagcacctgcttgcccagattggcatcctgactcactccagccttcttgtgcagtgatcagcatgcaaggagcccttctcaattgcacactcaggcagatctctgtatagtaggagcacccacttgcctggtccagcagcctaagtcacccctacttcctgcacaaagatcatggtgcagtagggccctctctgcgccacatccaggcagatctccaggcagtcagagcactgaataaccttgattasgagcctgggctgcaccacccttcctgtgtagagattgtggtgcagtgggtccctcgacaatccgtgcccaggctgatctttaggattctggagcacccactttcctagattaggagtttaggttgtacctccttcctgtgtggtgaacttggggccaaggagctttcccagctccatgacaaggcacacttctgggt

SEQ ID NO: 324878 - DNA, 459 bp, Homo sapiens
tctccagtcatttggagcacctgcttgcccagattggcatcctgactcactccagccttcttgtgcagtgatcagcatgcaaggagcccttctcaattgcacactcaggcagatctctgtatagtaggagcacccacttgcctggtccagcagcctaagtcacccctacttcctgcacaaagatcatggtgcagtagggccctctctgcgccacatccaggcagatctccaggcagtcagagcactgaataaccttgattacsagcctgggctgcaccacccttcctgtgtagagattgtggtgcagtgggtccctcgacaatccgtgcccaggctgatctttaggattctggagcacccactttcctagattaggagtttaggttgtacctccttcctgtgtggtgaacttggggccaaggagctttcccagctccatgacaaggcacacttctgggt

SEQ ID NO: 324879 - DNA, 597 bp, Homo sapiens
cagttcaaactgaagccagacctcccttcagaaacatgtaatgcttgatattaaggatttatttacaaaattcaatctgggaaagaagatgataccaaacattagggttagcttattaaagctcccgggcattcttcctgctagtatttaaggagtgtaagtacctaggaataatattcaggcaactgatatggccataataactgctacaatatggaacgactaccactccatacactaaccaatttccagtcttagctctaatgtaactcatctgagttgaccacaacttgcaatggtttgattcgctgtacagtttggtttggtgtttcagaccctagtgttttatatccagacttcaccctgatcctgaaaagcaaatggactgagtattcaagtgcctggccactcagatcctttttggtatccccacactataaccagagtaagttctcataagatagtgagatatcattgattaaattttttgcatrttgtcctagcctaagcctacaggcccaaatcaaaccaaggcctccagattgcaacttctagtgtttccaatatatgtatctcaacaatctgattttatgaggg

SEQ ID NO: 324880 - DNA, 552 bp, Homo sapiens
cccttccaatcttatcccccaaacccatgttccacctccaccccgtgggtaacratacttctcagtttattttctatctttactgagatattcatacacatacaagcaaatacgaaaagacatttcctttcttctttctatttttacacaaatattttgcacaaacatcttcacttttaaaaatttctcctaacatatcttgaaggtatgttcatatttagacaaaaagaaattcctcattcttttttacagctccacgtattcccctgtatgataatttttcatttatccaggcccttgttgatagacttttagactgatatattttactgttacagataataatgtaaggcatacgtattactttatttcacatgtaagagtctatttgcagaataaatcctagaaatgaaattgctgagcaaaaaggtaaatgcatttgaattttgacaaacatttccaaattactcatcatatgtattgtaccattttaacactcccaccagcaaagtatcataattcctattctgtcataagttacacaaaaaatga

SEQ ID NO: 324881 - DNA, 552 bp, Homo sapiens
cccttccaatcttatcccccaaacccatgttccacctccaccccgtgggtaacaatacttctcagtttattttctatctttactgagatattcatacacatacaagcaaatacgaaaagacatttcctttcttctttctatttttacacaaatattttgcacaaacatcttcacttttaaaaatttctcctaacatatcttgaaggtatgttcatatttagacaaaaagaaattcctcattcttttttacagctccacgtattcccctgtatgataatttttcatttatccaggcccttgttgatagacttttagactgatatattttactgttacagataataatgtaaggcatacrtattactttatttcacatgtaagagtctatttgcagaataaatcctagaaatgaaattgctgagcaaaaaggtaaatgcatttgaattttgacaaacatttccaaattactcatcatatgtattgtaccattttaacactcccaccagcaaagtatcataattcctattctgtcataagttacacaaaaaatga

SEQ ID NO: 324882 - DNA, 598 bp, Homo sapiens
tcccaaatatgtaaccactcattattttcttccatgtccttccagagattgacatatatttgaataaacattttctgtccccttccttttatacaagtggtagcacaaaattaattgattcaccaaacaacatatatcagagtattccaccatgtggttgtaccatacttcatttaaccagtctctcttgatggacatttaggctcatttatatcttttattgttataaacaatactataatgaatagcctcatatatttagcatttttcacatgtataagtatatttgtggaataaatttctagaagtagaattcctgggtttagtccatgaattttttattttaataaatattcccacattgcccttcataaacattgcaaacagcttatatttcatcgacagtgtatgagcgtacccactttctcacagcttggccaacatagcctgttattgaacatttagatcttttcaaatcagataggtgaaaatggcatctcttttcattttaatttgtttctcttgttttgagcaarctcgagcaacttttcataagttgataagagacaattgaaaaagtcagaggacttttacaatt

SEQ ID NO: 324883 - DNA, 606 bp, Homo sapiens
ttgctgagtgaggtgtggtagctcagaactgtaataccagctacttgggaggctgaggcaggaggattgtttgaggctaggagttcaagaccagcctgggcaacataacatscaagattaaaaaaaaaaaaaaaagtttgtagaatgaactatataattctgctttttaccaatgaggacactgagatgcgcagagagaataagtaattttctcaagttcatacagagtgttgttttgctacagtgctaggtttttacctaggcaggttgattcaagtttccacaatgtatatctctatgctacataatctctaacagtagttgatatgagtgatacacaacctaccccataaggttattgtgaggattatacaaagtaatgctctataaagtactcagaaaggagtctggtgtatactaactatatgtgagttttagcaattattataattttttcatattttaatttagccatttttcctatgggaaaaaatctttttagatcctctcatagaacatgttggtgtcattttcaattttagtaagcattgcctgtatctttatccacgtaattacataaaattattaaacatgacaaggcaaagg

SEQ ID NO: 324884 - DNA, 606 bp, Homo sapiens
ttgctgagtgaggtgtggtagctcagaactgtaataccagctacttgggaggctgaggcaggaggattgtttgaggctaggagttcaagaccagcctgggcaacataacatccaagattaaaaaaaaaaaaaaaagtttgtagaatgaactatataattctgctttttaccaatgaggacactgagatgcgcagagagaataagtaattttctcaagttcatacagagtgttgttttgctacagtgctaggtttttacctaggcaggttgattcaagtttccacaaygtatatctctatgctacataatctctaacagtagttgatatgagtgatacacaacctaccccataaggttattgtgaggattatacaaagtaatgctctataaagtactcagaaaggagtctggtgtatactaactatatgtgagttttagcaattattataattttttcatattttaatttagccatttttcctatgggaaaaaatctttttagatcctctcatagaacatgttggtgtcattttcaattttagtaagcattgcctgtatctttatccacgtaattacataaaattattaaacatgacaaggcaaagg

SEQ ID NO: 324885 - DNA, 624 bp, Homo sapiens
attggggtgagttgaagaaagggtacatggaacatgtttgtactacttttgcaatttcttgtaagtctatarttatttcaaaaggttattaaaaaggaaccattggactgccattcctactgccacctcaatgacaattttatgccagtgaatttgaaaacctaagtaaaacaggcaaatttccagaaaaatattactcactgaaactgactgaagaagaaaaagaaaatctaaatagttcatatgtacacgttaaataaatgatccaaaattataataaaacttcccccattcacaccaccaaataaattttacaaagctttcaagaataaactttagttaagagaatagatatgacacatcacaatccaatgtgagtaatgtcactggtgtcagttttgcctcttcaatagaaatatatactactaaattgattttattttcttcaatgtcctataattttcttttatcaggtctgttccagttactcatttggaatttgctgttaaagatacttcatgttctgggaagacaactggctgatcctaggcttcattttaccaggactcctacagaaatgcttcctcctaacagtttaaatttttcttttcatttcgtttatgc

SEQ ID NO: 324886 - DNA, 580 bp, Homo sapiens
taaacatgaaattttttttgcagttttaatatatactgaatatttcagaatgcaaccactgtgtaaatgaagggaaggctgcatttgttttgtttggaacttccctaagaactgtttgctttgttggaaaatacatccctaagggcaacaccactgactgagacaacctacctgtataggcatttgaggcaggatggtgttttacctatgacgagaggacctggctgctttgytaggttttctagtgtgattgtgggtgagcatctacatgttgacatacaaaatattttattattaataatttccttctattttccttcatattaatagtcagagtatgtatctatgtacatatacacacacaacacttgaaattgtgaaaaggttacacttgaaattataaaaaggttatattatctttgagatattacacatgatttgttatgaaaagtagacaatgggtctgaaaagattgaaaaccatgaattctaggccaactcttccatttgacagatgaggaaactgagacccagaggggagacatgacaaacttaggtcatcctgcaaatattggcagagc

SEQ ID NO: 324887 - DNA, 618 bp, Homo sapiens
aatgatgttctgcctgaagccaatttctcatcagcaacaatagatgccagtggactaatacctttgaagtgatcagaaaaacaaattctacattcagttaaccagcatttaaggatgaatgcaaaataaagacattttcagatatatacagactgaggtttwactaatctcagacttttgctcaaagaatttatgaagggtggactttagcaagaaaaaaattcagctcagaggggaagaatcttccaatcaaaatggaagaataagaaccagatttaccttttcacctggaacaacaaataaaactggacaaaacagttattattgataattatttaatgatgaggatgtattctgagaaatgcacctttaggtgttttttgtccttactgaaacatcatagaggatacttacacaaacctggatgtcatagcctactacacacctgggctacatgtagagcctgttgctcctaggctcctgtacaggaagttactgtattgaatactgttggcaattgtaacacaatggtaagtatttgtgtttaaacatatctaaacatagaaaggcagactaaaaatatggcataaaagattaaagtatggtatatttctatag

SEQ ID NO: 324888 - DNA, 618 bp, Homo sapiens
aatgatgttctgcctgaagccaatttctcatcagcaacaatagatgccagtggactaatacctttgaagtgatcagaaaaacaaattctacattcagttaaccagcatttaaggatgaatgcaaaataaagacattttcagatatatacagactgaggttttactaatctcagacttttgctcaaagaatttatgaagggtggactttagcaagaaaaaaattcagctcagaggggaagaatcttccaatcaaaatggaagaataagaaccagatttaccttttcacctggaacaacaaataaaactggacaaaacagttattattgataattatttaatgatgaggatgtattctgagaaatgcacctttaggtgttttttgtccttactgaaacatcatagaggatacttacacaaacctggatgtcatagcctactacacacctgggctacatgtagagcctgttgctcctaggctcctgtacaggawgttactgtattgaatactgttggcaattgtaacacaatggtaagtatttgtgtttaaacatatctaaacatagaaaggcagactaaaaatatggcataaaagattaaagtatggtatatttctatag

SEQ ID NO: 324889 - DNA, 466 bp, Homo sapiens
ttcttaaagaaatgagttaggccacaggctaattatgtgtatttcactggtttttgaatgcctacaatcatattctttataagacacagagaagattttccaaaaaaacaaatatgtgaacctgaaaagtaattaccacttgatagtgacaatatggatagggtgaagggcgtcatcaggaagcaatgaaaaagacacatttgcagttaaatttgaaaaccatgatgtttaacacatatggtaataaagaatactttctcctgtttcaaaattattatagaattcaagatagaagctaaaatacctagggataatgatatggttaatcacaaattaaaaattaaaggrtattttgagtattataagttaagaatgagaacttattacccaatgaaaaggggataattcattatgctccatatccattgaattaaaaggccccataacctgggtaatttaaaagttt

SEQ ID NO: 324890 - DNA, 578 bp, Homo sapiens
catatggtaataaagaatactttctcctgtttcaaaattattatagaattcaagatagaagctaaaatacctagggataatgatatggttaatcacaaattaaaaattaaagggtattttgagtattataagttaagaatgagaacttattacccaatgaaaaggggataattcattatgctccatatccattgaattaaaaggccccataacctgggtaatttaaaagtttaattttatttaaaagtcttgttttgttcatcaaactgaagggtttgcccccagaaatattctaggattgcatattcccaactctgtatgaagtatacaaataatgttataagggtcaccatctaaacgttattatgtaaataatttagtacsatttcatttgcctttgtagatttaaacatgtaaatggctttctcatattaggaaacatcatttttcaaaacccagataaacataatatattacaggagaataattatttatttattaaaaaaagaaatgctggatgctaagtccaaaagacataaattattttatactaatagctactaacattttattcatta

SEQ ID NO: 324891 - DNA, 590 bp, Homo sapiens
gcagccctcagcagcttggagaagctggagggctagatatccacagatgggctggaagcccgtgttctgtgacacaccttgtcacagaagtcaaggtgtgtcctcaaatctcccagccccagaagctgaccctgaagggctgaggccagcactgggagctgttcaaggaacccatgcaatcctgccatgagagccaggccaygccccagtggacaccagccccacaccctcggcagctcaacctcaagggctgtgagggcatttctggtgttagcgcctctggctgcgagttctgcatccaactcaccaaaggcaagcgacccccacctgcggagcaggagcagctgggtgcatgctgcaggggctgccactggcttcccaggaggggctgcaccatgcagggaacagccgccagcgaggtgtagccttccagcagacaggcaccgggttcggcaaccacccccagggcagtggcgcccttgtcaggggcctcagcctctgtggtcttggtactccctccacaccccccaccctgcccttccacaaaagttcaaggccaagcagctcatcccacggatcctggaagcccc

SEQ ID NO: 324892 - DNA, 518 bp, Homo sapiens
gggaggatcacctcaaactaggaggtcaatgctgaagcaagctgtgatgttgccactgcactccagccagggcaacagaacaagaccctgtctcaatcaacaccaccaccaacaaaaaaacccagtgatgtatatatacaagaaaawcacttaaacaatgataatggtggaaaataaaagaatgccaagagataccaggaaagtgcaaaagctaaagtaaaataaagagtggccataataataatagaagggtggaatttaaggttaagcactgaaatgggataaagagggacaccatgtaatgatgggcacaattcataatgagagaacactcgaaatctgcatgctcccgacagcatcacagtaaatacaaaaagcaaaatctagtaaaagatgagatttatagagaaaattataaagaacactcaaaatctgcattctccccacatcatagtaaatataaaaagcaaaaactagtaaaagaagagatttatagagaaaatttgagtggaaggcta

SEQ ID NO: 324893 - DNA, 503 bp, Homo sapiens
atttggaattcatgtctccttccctgccgcccatgcccacaacagggatgggcacacagaggatgctcagaagaatgagtacgtgcttgcctttggcttgtattcttcttgccgagtcgaacagggtggtcaaccctgaaggccacctggctgaaactgaacgtggtggcctgggtgggttttatgggcaggagacctgsaactgtcctggacacagccatttcctggcagcgtgacctttgaccagtcactaaacctctctgaacatctgtttgtactcaaggcaaatggaggtgcctatgtctgccttccaacttgttagaagcttaaccctgggtgcaagcctttgagtaagaggccacagtactgttagccctttgggactgtgtcttaccatattttatgtcccccgtgtccaacacagtgaccagtacataccaagtactcagtatgtgaaattagagtgcatggtgaatgacaaaactgcgccatacatggcagga

SEQ ID NO: 324894 - DNA, 503 bp, Homo sapiens
atttggaattcatgtctccttccctgccgcccatgcccacaacagggatgggcacacagaggatgctcagaagaatgagtacgtgcttgcctttggcttgtattcttcttgccgagtcgaacagggtggtcaaccctgaaggccacctggctgaaactgaacgtggtggcctgggtgggttttatgggcaggagacctgcaactgtcctrgacacagccatttcctggcagcgtgacctttgaccagtcactaaacctctctgaacatctgtttgtactcaaggcaaatggaggtgcctatgtctgccttccaacttgttagaagcttaaccctgggtgcaagcctttgagtaagaggccacagtactgttagccctttgggactgtgtcttaccatattttatgtcccccgtgtccaacacagtgaccagtacataccaagtactcagtatgtgaaattagagtgcatggtgaatgacaaaactgcgccatacatggcagga

SEQ ID NO: 324895 - DNA, 530 bp, Homo sapiens
atttggaattcatgtctccttccctgccgcccatgcccacaacagggatgggcacacagaggatgctcagaagaatgagtacgtgcttgcctttggcttgtattcttcttgccgagtcgaacagggtggtcaaccctgaaggccacctggctgaaactgaacgtggtggcctgggtgggttttatgggcaggagacctgcaactgtcctggacacagccatttcctggcagcgtgacctttgaccagtcactaaacctctctgaacatctgtttgtactcaaggcaaatggaggtgcctatgtctgccttccaacttgttagaagcttaaccctgggtgcaagcctttgagtaagaggccacagtactgttagccctttgggamtgtgtcttaccatattttatgtcccccgtgtccaacacagtgaccagtacataccaagtactcagtatgtgaaattagagtgcatggtgaatgacaaaactgcgccatacatggcaggagctcctctcttctaggggtctgtgggc

SEQ ID NO: 324896 - DNA, 441 bp, Homo sapiens
aagggacatttggcagccctttgatacccattgagaaaaacataatatcccctgataaaaacttcatgcaagctgtctgtcaaaaggctttagaatgtgtgtatttatctcacagagtaaacctttgttttgattcagcaggttggaagcatgttttttgcagaatctaagaagagacatttcaaagcacattgagrcctatagtgaaaaactgaaaatcctgtgataaaaactacaaacaagctgtctgtgaaaatgctttgtgatatgtgaaattatgtcacacatttaaacatttgttttaattcagtagtttggaaacactctttctgtaggatctacgaggagacatttcggagtccatgcagtcctatagtgaaataacaaatatcccatggtaaaaactagaaacaagctatctgtgaaaatgctttcggattt

SEQ ID NO: 324897 - DNA, 579 bp, Homo sapiens
aattatctgtgaaaatcctttgtgatgtgtggattcaactcatagaggtaaaactttgttttgatttagccaataggaaacactctttctgtagaatctataaagggacatttcagagcccatagagaaataaatggaaaaagtgaatattctttgataaacagtaggaacaagctatctatgaaaatgctttgggatttgtgggtccatctcaaagagttaaatgtttrttttgattcagcaggctggaagaactctatttgtagattctatgaaaagacattacaaatcttatttaggcctatggtgaaaagctgaatatcccgtgatgaaactagaagcaggctatcgatcaaaagatattgtgatgtgtggaatcatctctcagagttaaacatttgcttttattcagcaggttggaaacactttttgtggaatatatgaagggacatttcagaacccataaatgagtatattgaaacactgaatataatatcctgcaataaaaactaaaaacaagctacctctgaaaatgctttgcattgtgtggattcatctcacagagtgaaatatttattt

SEQ ID NO: 324898 - DNA, 634 bp, Homo sapiens
aaactacaaacaagctatctgtgaaaacacactgagatgtgtgaattcatctcacagagtttaaactttgttttgattcaaaaggttggaaacactttttttgtagaatcaaccaaaaaacatttccgagcctgttgaggcytatagtgaaaaaccaatatgccatggtaaagtctagaaacaagctgcctgtgaattatctttgaaatgtttggatttattccacagaggtaaacccttttttgtttttgattcagcagtttgtaaactgatgtataatctatgaggagacatttcagagcccattagaacctatagtgaaaaaccaaatatcttttgataaaaactagaaacaagctaactgtgaaaatgtttgtgatgtgtggctttatctcacagagttaaacctatgtttatatacagcaggttggcaacactctgttagtagaatctaaaagaagaaatttctgagtcctttgaggcctatcatgtaaaaccaaatatccccaataaaaactgaaaaaaacattatctgtgaaaatgctttaagatttgtggattcatctcacaaagttaaacctctgttttgattcagaaggttggaaacactctttttgtagcatctacagaagta

SEQ ID NO: 324899 - DNA, 634 bp, Homo sapiens
aaactacaaacaagctatctgtgaaaacacactgagatgtgtgaattcatctcacagagtttaaactttgttttgattcaaaaggttggaaacactttttttgtagaatcaaccaaaaaacatttccgagcctgttgaggcctatagtgaaaaaccaatatgccatggtaaagtctagaaacaagctgcctgtgaattatctttgaaatgtttggatttattccacagaggtaaacccttttttgtttttgattcagcagtttgtaaactgatgtataatctatgaggagacatttcagagcccattagaacctayagtgaaaaaccaaatatcttttgataaaaactagaaacaagctaactgtgaaaatgtttgtgatgtgtggctttatctcacagagttaaacctatgtttatatacagcaggttggcaacactctgttagtagaatctaaaagaagaaatttctgagtcctttgaggcctatcatgtaaaaccaaatatccccaataaaaactgaaaaaaacattatctgtgaaaatgctttaagatttgtggattcatctcacaaagttaaacctctgttttgattcagaaggttggaaacactctttttgtagcatctacagaagta

SEQ ID NO: 324900 - DNA, 592 bp, Homo sapiens
gattcaacaggttggaaatgcttttttttgtggaatgaacaaagggcctttttggagcccattgaggtctataataaaaaacctaatatttcgtgattcaagctagaaacaagctatccgtgaaaatacttgctgatgtgtggattaattttacagagttaaatctttgtttttattcagcaggttagaaatgctctttttgtagaatctgtgaagggacatttcagagcctattgaggcctagagtggaaaacaaaatatcccacaaaaaaaaaatagaaacaaactctatgtgaaaatgctttgcaatgtgttcattcattttacagagttaaacctttgctttcattcagcaggttgaaaacactcttttgtagaatctacaaggcaacatttctaagctgattgaggcctatggtgtaagagtgaatatctcgtgattaaaactagaaacaagctatctgtgaaaataatttgtgcrgtttgcattcattttacagaggtaaacctttgttttgatttcataggtaggaaacactctttttgtaggatctacaaggggacatttcagagcccattgaggtctacagtg

SEQ ID NO: 324901 - DNA, 523 bp, Homo sapiens
tttgtagaatctaagaaggcacatttcagagaacattgaggcctacagttaaaaactttatatctcgagataaaaactagaaacaagctacatatgagaatgtttcatgatgtgtggattcaactcrcagagttaaacctttgttatgattcagcaggttggaaacactttttgtagaatctacaaaggagcatttcagagcccatgaagaaatgcatgaaaaaaccctaatatcctaggatgaaaactagaaacaagctatctgtgaaaattctttgtgatgtgtggattcatctcacagagttgaacctttgttttgattcagcaggccaaaatcactttttgtagaatccacgaagggacattttggagcccactgtggcttgtagtgaaaaactgaatgtgccatgacaaaaactagaacaaagctctctgtcgaaatgctttatgatgtgtcatttcatgtcacagagttaaacttttgtttttattcagcaggatgaaagcactttttttgtagaat

SEQ ID NO: 324902 - DNA, 440 bp, Homo sapiens
aaacaccaacaccaaatgctggtgaagatatggagcgacaggaactcatctctatttctgctgagaatgcaaagtgggacagccactgtagaaggcagttttgcaagttcctgccagactaaacatatgcttaccatacaatccggtgaaaaaatgaaattttaaaaatatattttatatacttaaaacatgtacatttaaataaatatatattttatatatattttaaaagtatatatatttttattttttgtggagacagtctctgcagactatagcctgcagawtctattaattttaaaagcattttaaactcttgaacaagaaattatttgaagagtgaaaaataaaatgatagagtattgattggtaaattccaaatgttgtatattacataatctggattaattttcaattccaaaaagtgaaactttaaaaaa

SEQ ID NO: 324903 - DNA, 440 bp, Homo sapiens
aaacaccaacaccaaatgctggtgaagatatggagcgacaggaactcatctctatttctgctgagaatgcaaagtgggacagccactgtagaaggcagttttgcaagttcctgccagactaaacatatgcttaccatacaatccggtgaaaaaatgaaattttaaaaatatattttatatacttaaaacatgtacatttaaataaatatatattttatatatattttaaaagtatatatatttttattttttgtggagacagtctctgcagactatagcctgcagaatctattaattttaaaagcattttaaactcttgaacaagaaattatttgaagagtgaaaaataaaatgatagagtattgattggtaaattccaaatgttrtatattacataatctggattaattttcaattccaaaaagtgaaactttaaaaaa

SEQ ID NO: 324904 - DNA, 662 bp, Homo sapiens
aggaactcatctctatttctgctgagaatgcaaagtgggacagccactgtagaaggcagttttgcaagttcctgccagactaaacatatgcttaccatacaatccggtgaaaaaatgaaattttaaaaatatattttatatacttaaaacatgtacatttaaataaatatatattttatatatattttaaaagtatatatatttttattttttgtggagacagtctctgcagactatagcctgcagaatctattaattttaaaagcattttaaactcttgaacaagaaattatttgaagagtgaaaaataaaatgatagagtattgattggtaaattccaaatgttgtatattacataatytggattaattttcaattccaaaaagtgaaactttaaaaaatattttaaaaatttcctaatcccaagtcaatctatgttcaacacatttaagagccgatttcagaggacagataagtggtcaacatgttcttaggttttgactttgttttctaactatttgtgtttgtgaatggtgaatttttagattttgtttctttcttcttagggtattgtctaatattttattaaggcagagagacaataaattagaattatctgtttgtctattttatctgttataaatatttcctccaaattcact

SEQ ID NO: 324905 - DNA, 614 bp, Homo sapiens
gacaagtggagttttaaaaatatacaattttattatgagggagtgacacattttttgagaaggctagtttttaaactggaaggactgagcctatttattaaacaagcctagaaatatctgcaggaaatacgaatagaaactggtaagtgctttgtagagtataccttaaagttatattgctgcttactttaagtatttttgtttcaagtaacaaacatggaatgaggttaacttaagtaaaaaaaaaaaaattgcttgaaataataaactgtggttttccaaatcgagggaatattatacaaagaaaagaacctagaaaaggtagtggggagtttgtaggtctactgaacatcattttcttaattcttatgcaagaaagaataagctggaatttttgttctgtctccttagaagtgggtttcccaggaaataaacctaattaatgaactttaattatacatcacatattcaataggagartggaagaaaatttgattgacaaaacccattgattgtgggaggggtggatatttgaaaaaaatggaaaaccaatgctgaattgcaaaagttttgttaatgtataattcattttgaaatctcaacttcatttacat

SEQ ID NO: 324906 - DNA, 619 bp, Homo sapiens
ttgttattcttatttttgttgttgctgttataagctctggtccaagcctggacaaaacttttactcccaattcccattagcatgaccatatgctatatttctttcctgctcaacaggaaataatatgcaatgtggtgcttttgcttagaggagctgtggaagatgcaactaaaacaaagaagagagtgtagattcttacaataatccaaattttggctcacattattttccaagctttccttaatgatttaaaagaagatctcattaatcctcttgcaactggaaaatatataatctattccacctcaaaagatcacragttgaaagggaaccagatcacagaatcaaagctcagccgatagttactccatactataaaatatacaattttattaaaattggagcagattcctgaggcagatattatgattacagtttagtctgttgctgtatgtaaaataagacgtaagaccaagttcggggctttgctacctactgataattgcagagtggctggtgggtacagaacatgagaaagttgtgtggtttttaactatcctatcaccttccttaaaaataatcacttcaagctgggcacggtggctcacgcctgtaatcc

SEQ ID NO: 324907 - DNA, 619 bp, Homo sapiens
ttgttattcttatttttgttgttgctgttataagctctggtccaagcctggacaaaacttttactcccaattcccattagcatgaccatatgctatatttctttcctgctcaacaggaaataatatgcaatgtggtgcttttgcttagaggagctgtggaagatgcaactaaaacaaagaagagagtgtagattcttacaataatccaaattttggctcacattattttccaagctttccttaatgatttaaaagaagatctcattaatcctcttgcaactggaaaatatataatctattccacctcaaaagatcacaagttgaaagggaaccagatcacagaatcaaagctcagccgatarttactccatactataaaatatacaattttattaaaattggagcagattcctgaggcagatattatgattacagtttagtctgttgctgtatgtaaaataagacgtaagaccaagttcggggctttgctacctactgataattgcagagtggctggtgggtacagaacatgagaaagttgtgtggtttttaactatcctatcaccttccttaaaaataatcacttcaagctgggcacggtggctcacgcctgtaatcc

SEQ ID NO: 324908 - DNA, 632 bp, Homo sapiens
tttcctgtgctgttcttgtcatagtgaataattttcacaagatctgatggttttaaaaagaggagttcccctgcacaagctctctccctctttgtccgttgccataaagtacattatatttagaagacaaagaataaatagagaaactatttaggaatatcatgctaaaaagagtgttatgaatttgtcttctgagtttctatgaacatcagtagcaattcatcaaccaatatttaagggccaaatatgaatcaaaatctactggatatttatattcccattacattgattgmagcaatgagtattatttggttgtaatcaaggatataattgtgcaaggtcatgcagactgagagagtaccttatcctgaaagcattatttttaactctcaggaaattatatagttaattagagaaacttgaatatttaacaaaattaggagaaggaaagttttcttgggagggaaagtaaagtgaatatgcaagataagcaggaatcttgtagactatcttgtggcagataccaccattatttctattttagagataaagaaataaaaacataaagtaatatatctaaagatgtgaagctaatcagtaccaaatactagcaagaatgattaaaaagaccc

SEQ ID NO: 324909 - DNA, 602 bp, Homo sapiens
tttctttagggtgtacacccattaatggtattgcaggatgatatggtagttctmtttttagttttttttaaaaaacctccaagctgttcatagtggtaatactactttacattccgaccaatggtgtatgagattattctattctccaaatccttaccagcattctttattgcctatcttttgcataaaagtcattttaactgggatgagatgatacaacttaaaatgaccatgagaaaaccgtacatattattggaactaaaatcaacaaaattgatcgtagcccgtgttgctgtggatggagaacaaataaaactctcacacatttgggtaaaaaatcaaactttataaccaccttggaaaatagtttggcagcatcttcatacattgaacataatacctgccagctatttcatccttagatattaacccaaaataaatgataatatatgtccatacaaaaacttgtacactgatcttcataactaattttttcctagtagcccaatactggaaataacccaagtgtctatgaataggggaatggtgaaaaaaatgaacatatccatacaatggaagagtattcgtcaataagagaaaaa

SEQ ID NO: 324910 - DNA, 368 bp, Homo sapiens
ttatgaaatttaaaaaatcaatcatttatccattattttcttscctgttaatatagttatttgctttatgtacttttatatactataattctggagagaatattcatattgtgtttcaaattgagtacatcttgctataatatatggcaatatattatagcaatatattagtaatagaagatgcagtgaaaatcttttaaaaaaattaataactttattttaagagcagttttatattcccagcaatattgaaaagaacctaaagagatttttcatatatgccatcccccctcacatgcatagctccccccattatgaatatctcccacctgagtggtacatttgttacaactgagaagcttacattg

SEQ ID NO: 324911 - DNA, 548 bp, Homo sapiens
atccattattttcttgcctgttaatatagttatttgctttatgtacttttatatactayaattctggagagaatattcatattgtgtttcaaattgagtacatcttgctataatatatggcaatatattatagcaatatattagtaatagaagatgcagtgaaaatcttttaaaaaaattaataactttattttaagagcagttttatattcccagcaatattgaaaagaacctaaagagatttttcatatatgccatcccccctcacatgcatagctccccccattatgaatatctcccacctgagtggtacatttgttacaactgagaagcttacattgctggatcataataatcacccaaagtccatagtttatatcttagttcccttttggtattgtaccttctatatagttggacaaatatataataaatgtacctgccgttagaatactttcgctgccctgaaattcgtctctctttttttattcctccctcccaactaacccctgtcaactactaatatttttgctgtctccatagttttg

SEQ ID NO: 324912 - DNA, 600 bp, Homo sapiens
tgtttcattttaattatataggtttcagttttgttttatattttgttaaatttctgtttataattatgaaatttaaaaaatcaatcatttatccattattttcttgcctgttaatatagttatttgctttatgtacttttatatactataattctggagagaatattcatattgtgtttcaaattgagtacatcttgctataatatatggcaatatattatagcaatatattagtaatagaagatgcagtgaaaatcttttaaaaaaattaataactttattttaagagcagttttatattcccagcaatattgaaaagaacctaaagagatttttcatatatgccatcccccmtcacatgcatagctccccccattatgaatatctcccacctgagtggtacatttgttacaactgagaagcttacattgctggatcataataatcacccaaagtccatagtttatatcttagttcccttttggtattgtaccttctatatagttggacaaatatataataaatgtacctgccgttagaatactttcgctgccctgaaattcgtctctctttttttattcctccctcccaactaacccc

SEQ ID NO: 324913 - DNA, 568 bp, Homo sapiens
actataggcatacaaatatgtttcttatttaccttctttctttgagggatcagtttgaaaacagtctatattattataacatgactcacttataactaggttctccatcatgaaaaatgccaagagagtcatactatttttgtttacctaaagtgacaaagatttgttgttgttgttgtttttcmcactaggtagtgggacaactgttggcacatcttggtagctccagtgagtttatggttcctttatatatattttatatattagaaagtcctccctggcaacttgccatacctccccggcatttctttataagcttctctctgaaaaggagacaagactcagattggataagcttttaagggagtgctatttcctctgtgtgtgtttttttgaaggagctaaaatgaaagctgaatttaagcattgtttgtgccctacatagggtgaatgaatagctagaactaagcaaacttaccagaatcttccctaggagaggattagtgaaggtaaggatactgatctctcttaggctcttctgcactggcagctgaaaagtctttgcagg

SEQ ID NO: 324914 - DNA, 568 bp, Homo sapiens
actataggcatacaaatatgtttcttatttaccttctttctttgagggatcagtttgaaaacagtctatattattataacatgactcacttataactaggttctccatcatgaaaaatgccaagagagtcatactatttttgtttacctaaagtgacaaagatttgttgttgttgttgtttttcccactaggtagtgggacaactgttggcacatcttggtagctccagtgagtttatggttcctttatatatattttatatattagaaagtcctccctggcaacttgccatacctcccyggcatttctttataagcttctctctgaaaaggagacaagactcagattggataagcttttaagggagtgctatttcctctgtgtgtgtttttttgaaggagctaaaatgaaagctgaatttaagcattgtttgtgccctacatagggtgaatgaatagctagaactaagcaaacttaccagaatcttccctaggagaggattagtgaaggtaaggatactgatctctcttaggctcttctgcactggcagctgaaaagtctttgcagg

SEQ ID NO: 324915 - DNA, 568 bp, Homo sapiens
actataggcatacaaatatgtttcttatttaccttctttctttgagggatcagtttgaaaacagtctatattattataacatgactcacttataactaggttctccatcatgaaaaatgccaagagagtcatactatttttgtttacctaaagtgacaaagatttgttgttgttgttgtttttcccactaggtagtgggacaactgttggcacatcttggtagctccagtgagtttatggttcctttatatatattttatatattagaaagtcctccctggcaacttgccatacctccccggcrtttctttataagcttctctctgaaaaggagacaagactcagattggataagcttttaagggagtgctatttcctctgtgtgtgtttttttgaaggagctaaaatgaaagctgaatttaagcattgtttgtgccctacatagggtgaatgaatagctagaactaagcaaacttaccagaatcttccctaggagaggattagtgaaggtaaggatactgatctctcttaggctcttctgcactggcagctgaaaagtctttgcagg

SEQ ID NO: 324916 - DNA, 568 bp, Homo sapiens
actataggcatacaaatatgtttcttatttaccttctttctttgagggatcagtttgaaaacagtctatattattataacatgactcacttataactaggttctccatcatgaaaaatgccaagagagtcatactatttttgtttacctaaagtgacaaagatttgttgttgttgttgtttttcccactaggtagtgggacaactgttggcacatcttggtagctccagtgagtttatggttcctttatatatattttatatattagaaagtcctccctggcaacttgccatacctccccggcatttcttyataagcttctctctgaaaaggagacaagactcagattggataagcttttaagggagtgctatttcctctgtgtgtgtttttttgaaggagctaaaatgaaagctgaatttaagcattgtttgtgccctacatagggtgaatgaatagctagaactaagcaaacttaccagaatcttccctaggagaggattagtgaaggtaaggatactgatctctcttaggctcttctgcactggcagctgaaaagtctttgcagg

SEQ ID NO: 324917 - DNA, 579 bp, Homo sapiens
taataaatggtgttgggaaaactggctagccttatgcaggaaactgaaactggaccccttccttacactttatacaaaaattaactcaagatgcattaaagacttaaaagtaagttctaaatgtgtaaaaaccctggatgaaaacctaggcagtaccattcaggacataggcatgggcaaatacttcatgactaaaacacyaaaagcaatggcaacaaaagccaaaattgaaaaatgggatctaattaaactaaagaacttgtgtgcagctttatttgggagtgtgcgtggggtacctctgagttgtaaaaatgaagaaagtaagtagtcgtgctttcctgactctttggtagacatagccttttaagacagtcattctgagctgtcatggtcttagggttttctatactactaaaacttattgacgacatctaaccaagaacttaattttttttaaaaaaagaaaaagaaatcacccaaatacacattaaaaacctcttataacatatgtgcacattcatagataacatgtagaacgtgattttgtgtattaaaaccttgtagaaaagttcagacagt

SEQ ID NO: 324918 - DNA, 579 bp, Homo sapiens
taataaatggtgttgggaaaactggctagccttatgcaggaaactgaaactggaccccttccttacactttatacaaaaattaactcaagatgcattaaagacttaaaagtaagttctaaatgtgtaaaaaccctggatgaaaacctaggcagtaccattcaggacataggcatgggcaaatacttcatgactaaaacaccaaaagcaatggcaacaaaagccmaaattgaaaaatgggatctaattaaactaaagaacttgtgtgcagctttatttgggagtgtgcgtggggtacctctgagttgtaaaaatgaagaaagtaagtagtcgtgctttcctgactctttggtagacatagccttttaagacagtcattctgagctgtcatggtcttagggttttctatactactaaaacttattgacgacatctaaccaagaacttaattttttttaaaaaaagaaaaagaaatcacccaaatacacattaaaaacctcttataacatatgtgcacattcatagataacatgtagaacgtgattttgtgtattaaaaccttgtagaaaagttcagacagt

SEQ ID NO: 324919 - DNA, 579 bp, Homo sapiens
taataaatggtgttgggaaaactggctagccttatgcaggaaactgaaactggaccccttccttacactttatacaaaaattaactcaagatgcattaaagacttaaaagtaagttctaaatgtgtaaaaaccctggatgaaaacctaggcagtaccattcaggacataggcatgggcaaatacttcatgactaaaacaccaaaagcaatggcaacaaaagccaaaattgaaaaatgggatctaattaaactaaagaacttgtgtgcagctttatttgggagtgtgcgtggggtacctctgagttktaaaaatgaagaaagtaagtagtcgtgctttcctgactctttggtagacatagccttttaagacagtcattctgagctgtcatggtcttagggttttctatactactaaaacttattgacgacatctaaccaagaacttaattttttttaaaaaaagaaaaagaaatcacccaaatacacattaaaaacctcttataacatatgtgcacattcatagataacatgtagaacgtgattttgtgtattaaaaccttgtagaaaagttcagacagt

SEQ ID NO: 324920 - DNA, 554 bp, Homo sapiens
ctttaattctacagcctgtttccattgtaaagggaaggagaaagagattaagtaataaaaattataggcatcagatcatattgttaaaaccacatggaagaagtgattggaataacccataaacaatgtagaaagagaactaaggagacgtctgatgtggtaattattttactcaaggaagagggattgagaggcaagaaggagggaaaaggagatgttatttatgtaattttggggtttctgctgcagaaacctgatgggactcaacttcagatgcatttggaatatttgcataaaagaagattagattttggctgctccaggaactactggaagcaggatagagtgctagaattgtgatgacacacagtgactcattacccctctttgttactgttgggcatcagaggtatatgtttacttggtattagcyattcgaataggataatcatgaatatgcatacattggctttgtttttcaaggaactaacttttggataaaatagcaatttaatgaaaatactttagagaataacatgatccttcaaaccaga

SEQ ID NO: 324921 - DNA, 525 bp, Homo sapiens
aagtacttaggagggagacttttccagcagtctctctcttgggtatctgagtgtctatgaaggttcttaagcttactggtttttgtggatttgaataaggcaggatctatataatgacaataattggattttaaaatttttaatgttttaatcttctgtgaagaatattcccaataacaacctaacaacmtatgcatttgtactttgacttttgcacactcagctttcaaacatttgcggtgtttcaaggggctccctgtagtgttctagggtgaagagaatcaatgggccctctttaagtagcttgcatgctgaagatccaagactcccattttcccgtgacacagattagtctttgaatcagaaatagataatgcagaagagacagtgccttttctaccttgttttaggttatcaggtttactccagttcagtaacaaaagttgtgtcagatatcaactggattttcagtttagcctttagggtagataatttataaggacaaattattgtctggccgtgccg

SEQ ID NO: 324922 - DNA, 525 bp, Homo sapiens
aagtacttaggagggagacttttccagcagtctctctcttgggtatctgagtgtctatgaaggttcttaagcttactggtttttgtggatttgaataaggcaggatctatataatgacaataattggattttaaaatttttaatgttttaatcttctgtgaagaatattcccaataacaacctaacaacatatrcatttgtactttgacttttgcacactcagctttcaaacatttgcggtgtttcaaggggctccctgtagtgttctagggtgaagagaatcaatgggccctctttaagtagcttgcatgctgaagatccaagactcccattttcccgtgacacagattagtctttgaatcagaaatagataatgcagaagagacagtgccttttctaccttgttttaggttatcaggtttactccagttcagtaacaaaagttgtgtcagatatcaactggattttcagtttagcctttagggtagataatttataaggacaaattattgtctggccgtgccg

SEQ ID NO: 324923 - DNA, 525 bp, Homo sapiens
aagtacttaggagggagacttttccagcagtctctctcttgggtatctgagtgtctatgaaggttcttaagcttactggtttttgtggatttgaataaggcaggatctatataatgacaataattggattttaaaatttttaatgttttaatcttctgtgaagaatattcccaataacaacctaacaacatatgcatttgtactttgacttttgcacactcagctttcaaacatttgcggtgtttcarggggctccctgtagtgttctagggtgaagagaatcaatgggccctctttaagtagcttgcatgctgaagatccaagactcccattttcccgtgacacagattagtctttgaatcagaaatagataatgcagaagagacagtgccttttctaccttgttttaggttatcaggtttactccagttcagtaacaaaagttgtgtcagatatcaactggattttcagtttagcctttagggtagataatttataaggacaaattattgtctggccgtgccg

SEQ ID NO: 324924 - DNA, 525 bp, Homo sapiens
aagtacttaggagggagacttttccagcagtctctctcttgggtatctgagtgtctatgaaggttcttaagcttactggtttttgtggatttgaataaggcaggatctatataatgacaataattggattttaaaatttttaatgttttaatcttctgtgaagaatattcccaataacaacctaacaacatatgcatttgtactttgacttttgcacactcagctttcaaacatttgcggtgtttcaaggggctccctgtagtgttctagggtgaagagaatcaatgggccctctttaagtagcttrcatgctgaagatccaagactcccattttcccgtgacacagattagtctttgaatcagaaatagataatgcagaagagacagtgccttttctaccttgttttaggttatcaggtttactccagttcagtaacaaaagttgtgtcagatatcaactggattttcagtttagcctttagggtagataatttataaggacaaattattgtctggccgtgccg

SEQ ID NO: 324925 - DNA, 567 bp, Homo sapiens
tattgctcattcatttttctctttgtcccttatagggagcattgcctatmtctagattaagcaacagttgcatcttaaaaaagcacaataacctcctcagtctttctcacacagcgaaatgtttgttaagtaattaaagtgtagatgatgatacaaagagcttgattaaattagatgccaaagtacccttgtgattcagaatatgaatggtatttaatttctttgaaatcaataattgctgagtgacattaattaatgccaatatttcagaagttgttctagttagtgaaatgtatacaacatgcaaaagtttcagaactctgaagggcaacattattctatgattaagaattaagaattaattcacattaattattggggagaaataattattaagaatgacagaaatgtttttattttttatttagaaaattattttgtgcatgagcattactgcaagttttgcaagaaacataaatttaaagaaacaattatgtgcacaaggtgaatttaataacatctgatattttccatgattacagttttatttggtaaatctttaaatat

SEQ ID NO: 324926 - DNA, 567 bp, Homo sapiens
tattgctcattcatttttctctttgtcccttatagggagcattgcctatatctagrttaagcaacagttgcatcttaaaaaagcacaataacctcctcagtctttctcacacagcgaaatgtttgttaagtaattaaagtgtagatgatgatacaaagagcttgattaaattagatgccaaagtacccttgtgattcagaatatgaatggtatttaatttctttgaaatcaataattgctgagtgacattaattaatgccaatatttcagaagttgttctagttagtgaaatgtatacaacatgcaaaagtttcagaactctgaagggcaacattattctatgattaagaattaagaattaattcacattaattattggggagaaataattattaagaatgacagaaatgtttttattttttatttagaaaattattttgtgcatgagcattactgcaagttttgcaagaaacataaatttaaagaaacaattatgtgcacaaggtgaatttaataacatctgatattttccatgattacagttttatttggtaaatctttaaatat

SEQ ID NO: 324927 - DNA, 567 bp, Homo sapiens
tattgctcattcatttttctctttgtcccttatagggagcattgcctatatctagattaagcaacagttgcatcttaaaaaagcacaataacctcctcagtctttctcacacagcgaaatgtttgttaagtaattaaagtgtagatgatgatacaaagagcttgattaaattagatgccaaagtacccttgtgattcagaatatgaatggtatttaatttctttgaaatcaataattgctgagtgacattaattaatgccaatatttcagaagttgttctagttagtgaaatgtatacaacatgcaaaagtttcagaactctgaagggcaacattattctatrattaagaattaagaattaattcacattaattattggggagaaataattattaagaatgacagaaatgtttttattttttatttagaaaattattttgtgcatgagcattactgcaagttttgcaagaaacataaatttaaagaaacaattatgtgcacaaggtgaatttaataacatctgatattttccatgattacagttttatttggtaaatctttaaatat

SEQ ID NO: 324928 - DNA, 567 bp, Homo sapiens
tattgctcattcatttttctctttgtcccttatagggagcattgcctatatctagattaagcaacagttgcatcttaaaaaagcacaataacctcctcagtctttctcacacagcgaaatgtttgttaagtaattaaagtgtagatgatgatacaaagagcttgattaaattagatgccaaagtacccttgtgattcagaatatgaatggtatttaatttctttgaaatcaataattgctgagtgacattaattaatgccaatatttcagaagttgttctagttagtgaaatgtatacaacatgcaaaagtttcagaactctgaagggcaacattattctatgattaagaattaagaattaattcacattaattattggggagaaataattattaagaatgacagaaatgtttttattttttatttagaaaattattttgtgcatgagcattactgcaagttttgcaagaaacataaatttaaagaaacaattatgtgcacaaggtgaatttaawaacatctgatattttccatgattacagttttatttggtaaatctttaaatat

SEQ ID NO: 324929 - DNA, 291 bp, Homo sapiens
tgactctttctcccaatgttagttattcggagaaaaaaaacatgatggtaattttggrgtgacaaatacaatatttgatgaaagcaaatttattgagggttagacaaactacaagatactttaggctgcaaagtcaacacgagacttctggcccaaattgtgcagagtttgggtccagctgcaaagttcaaaggaagaggccatataagacgattctcacttttgacaccaactgccagtttaggggtttccccagaacaccctcagtttcaagaatttactagaaagact

SEQ ID NO: 324930 - DNA, 291 bp, Homo sapiens
tgactctttctcccaatgttagttattcggagaaaaaaaacatgatggtaattttggggtracaaatacaatatttgatgaaagcaaatttattgagggttagacaaactacaagatactttaggctgcaaagtcaacacgagacttctggcccaaattgtgcagagtttgggtccagctgcaaagttcaaaggaagaggccatataagacgattctcacttttgacaccaactgccagtttaggggtttccccagaacaccctcagtttcaagaatttactagaaagact

SEQ ID NO: 324931 - DNA, 291 bp, Homo sapiens
tgactctttctcccaatgttagttattcggagaaaaaaaacatgatggtaattttggggtgacaaatacaatatttgatgaaagcaaatttattgagggttagacaaactacaagatactttargctgcaaagtcaacacgagacttctggcccaaattgtgcagagtttgggtccagctgcaaagttcaaaggaagaggccatataagacgattctcacttttgacaccaactgccagtttaggggtttccccagaacaccctcagtttcaagaatttactagaaagact

SEQ ID NO: 324932 - DNA, 291 bp, Homo sapiens
tgactctttctcccaatgttagttattcggagaaaaaaaacatgatggtaattttggggtgacaaatacaatatttgatgaaagcaaatttattgagggttagacaaactacaagatactttaggctgcaaagtcaacacgagacttctggcccaaattgtgcagagtttgggtccagctgcaaagttcaaaggaagaggccatataagacgattctcacttytgacaccaactgccagtttaggggtttccccagaacaccctcagtttcaagaatttactagaaagact

SEQ ID NO: 324933 - DNA, 554 bp, Homo sapiens
atatgacccagaaatttattcctaggtatacacccagattattggaaagaggtgttcaaacacaaattgtacacaagtatttttagcagcagtatttaaaatagccaaaggtgaacacaactcgaatgtcaataaaatattattggataaacaaaatgttatatccatgaaattgaatgttatacagttataaaaagaaataaagtaccaatacgcatatgaaccttgatagcattatgccaactgaaagaagccaggcacaaaaggccacctattgtatgattctatttagatgaaaatagaataggaaaatctatagagacagaaaacagctttgtggttgcttaggattgagtaggggatgggtgcatrggaggttaacagctaaagaaggtggggtttctttttaaagtgatgaaaatgctctaaaattcattgtgatgatggctccacttatctgtgcatatactaaaagccattgacttgtagacattagtgtgtgcactctacactatgtaaattatgtctcaataaatcctttcaaaaatacacag

SEQ ID NO: 324934 - DNA, 554 bp, Homo sapiens
atatgacccagaaatttattcctaggtatacacccagattattggaaagaggtgttcaaacacaaattgtacacaagtatttttagcagcagtatttaaaatagccaaaggtgaacacaactcgaatgtcaataaaatattattggataaacaaaatgttatatccatgaaattgaatgttatacagttataaaaagaaataaagtaccaatacgcatatgaaccttgatagcattatgccaactgaaagaagccaggcacaaaaggccacctattgtatgattctatttagatgaaaatagaataggaaaatctatagagacagaaaacagctttgtggttgcttaggattgagtaggggatgggtgcataggaggttaacagctaaagaaggtggggtttctttttraagtgatgaaaatgctctaaaattcattgtgatgatggctccacttatctgtgcatatactaaaagccattgacttgtagacattagtgtgtgcactctacactatgtaaattatgtctcaataaatcctttcaaaaatacacag

SEQ ID NO: 324935 - DNA, 557 bp, Homo sapiens
aaatgccagttaccttgcatctacatgaaagaaaaatgccattyttattacattagatcattgttttacatgagttttggtatagcacaatgttgaaccaagggcaaagagagatgaattaatgaagttttaagatatcaacgttggggcagggcaaatcagactaggacacctccaagtccagctctggccctgccttggccctggccccttcctggcctgaccttgtccctggccctgccctgtccatgccctgtgtattttaccagtgttttataaccagaatcctataagaaacttaaatcagttctttttgtgcgtttttagtagagatggggtttcacaatgttgcccaggctggttccaaactcctgagctcaagccatctgcctgccttggcctcccaaagtgctgggattactggagtaatctggccaagtatttaacttctttatgcctgtttcctacatttggaaaatggggatggtttaagtacctagcacatagaattattgtgagaatcaatgcctcacaaatttacatattgataaaattat

SEQ ID NO: 324936 - DNA, 557 bp, Homo sapiens
aaatgccagttaccttgcatctacatgaaagaaaaatgccattcttattacattagatcattgttttacatgagttttggtatagcacaatgttgaaccaagggcaaagagagatgaattaatgaagttttaagatatcaacgttggggcagggcaaatcagactaggacacctccaagtccagctctggccctgccttggccctggccccttcctggcctgaccttgtccctggccctgccctgtccatgccctgtgtattttaccagtgttttataaccagaatcctayaagaaacttaaatcagttctttttgtgcgtttttagtagagatggggtttcacaatgttgcccaggctggttccaaactcctgagctcaagccatctgcctgccttggcctcccaaagtgctgggattactggagtaatctggccaagtatttaacttctttatgcctgtttcctacatttggaaaatggggatggtttaagtacctagcacatagaattattgtgagaatcaatgcctcacaaatttacatattgataaaattat

SEQ ID NO: 324937 - DNA, 557 bp, Homo sapiens
aaatgccagttaccttgcatctacatgaaagaaaaatgccattcttattacattagatcattgttttacatgagttttggtatagcacaatgttgaaccaagggcaaagagagatgaattaatgaagttttaagatatcaacgttggggcagggcaaatcagactaggacacctccaagtccagctctggccctgccttggccctggccccttcctggcctgaccttgtccctggccctgccctgtccatgccctgtgtattttaccagtgttttataaccagaatcctataagaaacttaaatcagttctttttgtgcrtttttagtagagatggggtttcacaatgttgcccaggctggttccaaactcctgagctcaagccatctgcctgccttggcctcccaaagtgctgggattactggagtaatctggccaagtatttaacttctttatgcctgtttcctacatttggaaaatggggatggtttaagtacctagcacatagaattattgtgagaatcaatgcctcacaaatttacatattgataaaattat

SEQ ID NO: 324938 - DNA, 607 bp, Homo sapiens
agcttttcttctagtttgatrtcatttaagaattgctaacacagtggcagtgttagatgaagatgctgtctacaaggtagataatatactgtttgatactcaaaacatttttcattttgtttaaagtagaagttacataattctatattttaagtcttgggtaaaaaagtagttttacattttataaagtaaagatgtaaatgattcaggtttaaagctctatttgacttttttgttgttgtttgagatagagtcttgctagtgtcaatagcaaaagccttctagctatctgcctttcaggtacatggtggggcatacttaactgttttctctgatgttgggcatagcatggacctacttggttcaatatctgacactatttgcatttattgacactatctgcgttgatttgtgctatttcctgtgtgtgatttgcacgtctgtcattgctttttgtctctagttactgctttcttttcctgtttgtcttgttcttgtaggaccctttctgactctctcaagagggaccttttcaaccccaactcccactggtctaatcctaaccagcaccagctggttgggaagtagagcaggaactctggctgcc

SEQ ID NO: 324939 - DNA, 607 bp, Homo sapiens
agcttttcttctagtttgatgtcatttaagaattgctaacacagtggcagtgttagatgaagatgctgtctacaaggtagataatatactgtttgatactcaaaacatttttcattttgtttaaagtagaagttacataattctatattttaagtcttgggtaaaaaagtagttttacattttataaagtaaagatgtaaatgattcaggtttaaagctctatttgacttttttgttgttgtttgagatagagtcttgctagtgtcaatagcaaaagccttctagctatctgcctttcaggtacatggtggggcatacttaactgttttctctgatgttgggcatagcatggacctacttggttcaatatctgacactatttgcatttattgacactatctgygttgatttgtgctatttcctgtgtgtgatttgcacgtctgtcattgctttttgtctctagttactgctttcttttcctgtttgtcttgttcttgtaggaccctttctgactctctcaagagggaccttttcaaccccaactcccactggtctaatcctaaccagcaccagctggttgggaagtagagcaggaactctggctgcc

SEQ ID NO: 324940 - DNA, 511 bp, Homo sapiens
ctcaaacactacagaatgggccaagcaagggaagatattccctaccactgtcctcccacccatctattacctatctgtgccttctattggttgaacccaaatgcaagccagaaggcaaaggagccctggtgataaagttggaaggtgttygtttccttgggaagaagagcagggaaaggcagagaatgaattgagggggatcagggtatcttgggtcctagggaagtggcaaacagaaaataaagcttcctaaggggagtctccttgtcttcaagtcaattaaaaacacatgtgtgcacacacgtgcaaaacactacaggaaaggccatgattggcaagacttggcagctatttaagggagatattctctacaatggggaacaagaaataaacttaaggaagttaaattgcagactgaaggtaaatagcagactacaacaatattatgcagtatatggtgattgtcagattaatggtgtaggccctagatgttaaaggagtttgaaggatg

SEQ ID NO: 324941 - DNA, 511 bp, Homo sapiens
ctcaaacactacagaatgggccaagcaagggaagatattccctaccactgtcctcccacccatctattacctatctgtgccttctattggttgaacccaaatgcaagccagaaggcaaaggagccctggtgataaagttggaaggtgtttgtttccttgggaagaagagcagggaaaggcagagaatgaattgagggggatcagggtatcttgggtcctagggaagtggcaaacagaaaataaagcttcctaaggggagtctcyttgtcttcaagtcaattaaaaacacatgtgtgcacacacgtgcaaaacactacaggaaaggccatgattggcaagacttggcagctatttaagggagatattctctacaatggggaacaagaaataaacttaaggaagttaaattgcagactgaaggtaaatagcagactacaacaatattatgcagtatatggtgattgtcagattaatggtgtaggccctagatgttaaaggagtttgaaggatg

SEQ ID NO: 324942 - DNA, 499 bp, Homo sapiens
gacaactctgtagctaggcaagttttgttatctcatcatagatgaaagaagttcagtgagatgaagtgacttatctaaggactcacgatcgagggtgcccaagccaggactaggaccagctaaaagcatgaacaccagccgatctcagaaaggggttaattgctgaagacatagactattagcttacaggagccctctcagcccaagcactttaatttcttagtagctacaaggaggaagattgcacatcttcaaaggaaactagatgcatgatattggtgagatgagacttggaggtgacttcacagatgatgggtttaatgccycataattatgaaggaaggccagtctctgccagtctgactcagagggcttaatgagtcatcctatttgtcctctctgctgctatttatgggcttcccagtcgctgatatttgttggttaaatgctcacacaaccagtcttgcctaaagcagtatcatttatagggtgttgagaa

SEQ ID NO: 324943 - DNA, 499 bp, Homo sapiens
gacaactctgtagctaggcaagttttgttatctcatcatagatgaaagaagttcagtgagatgaagtgacttatctaaggactcacgatcgagggtgcccaagccaggactaggaccagctaaaagcatgaacaccagccgatctcagaaaggggttaattgctgaagacatagactattagcttacaggagccctctcagcccaagcactttaatttcttagtagctacaaggaggaagattgcacatcttcaaaggaaactagatgcatgatattggtgagatgagacttggaggtgacttcacagatgatgggtttaatgccccataattatgaaggaaggccagtctctgccagtctgactcagagggcttaatgagtcatcctatttgtcctctctgctgctatttatgggcttcccagtygctgatatttgttggttaaatgctcacacaaccagtcttgcctaaagcagtatcatttatagggtgttgagaa

SEQ ID NO: 324944 - DNA, 587 bp, Homo sapiens
ggtagctgtgttaaagttgaatgtgtgtggaaagcttagttaaaaagccattgcatagttataataataaagagggggtcgcagtttgcacctacacatattaatattttcccactttatacttagatttagcttaagtttatccatttattcattcaacaaacacatactatgctcctgctttgtgattgtaaaagkatctacaaaatctgtctctaataaccctccctgactcctggcccctggcccccagccaccactggcaggactgatggtaggtgctgaggcaaaggaaaagcttctctgaggcagtgacatttgagcacaggaggaaggagtcagcgctgcagatcttggggacgggctgaggaaatagcttgctcaaggatctgagctttgcgtgaaggcggaaggtgctaggggaggcaatgatatggtggtccgaggcctgttcatggagggccttccaggccacagtaagacatttggattttattctgagggtgctgtatagtaaatagaaggttctgagcaggaaagtgagatgacagaatttatctttctaaaaataaattccagctactatg

SEQ ID NO: 324945 - DNA, 587 bp, Homo sapiens
ggtagctgtgttaaagttgaatgtgtgtggaaagcttagttaaaaagccattgcatagttataataataaagagggggtcgcagtttgcacctacacatattaatattttcccactttatacttagatttagcttaagtttatccatttattcattcaacaaacacatactatgctcctgctttgtgattgtaaaaggatctacaaaatctgtctctaataaccctccctgactcctggcccctggcccccagccaccactggcaggactgatggtaggtgctgaggcaaaggaaaagcttctctgaggcrgtgacatttgagcacaggaggaaggagtcagcgctgcagatcttggggacgggctgaggaaatagcttgctcaaggatctgagctttgcgtgaaggcggaaggtgctaggggaggcaatgatatggtggtccgaggcctgttcatggagggccttccaggccacagtaagacatttggattttattctgagggtgctgtatagtaaatagaaggttctgagcaggaaagtgagatgacagaatttatctttctaaaaataaattccagctactatg

SEQ ID NO: 324946 - DNA, 587 bp, Homo sapiens
ggtagctgtgttaaagttgaatgtgtgtggaaagcttagttaaaaagccattgcatagttataataataaagagggggtcgcagtttgcacctacacatattaatattttcccactttatacttagatttagcttaagtttatccatttattcattcaacaaacacatactatgctcctgctttgtgattgtaaaaggatctacaaaatctgtctctaataaccctccctgactcctggcccctggcccccagccaccactggcaggactgatggtaggtgctgaggcaaaggaaaagcttctctgaggcagtgacatttgagcacaggaggaaggagtcagcsctgcagatcttggggacgggctgaggaaatagcttgctcaaggatctgagctttgcgtgaaggcggaaggtgctaggggaggcaatgatatggtggtccgaggcctgttcatggagggccttccaggccacagtaagacatttggattttattctgagggtgctgtatagtaaatagaaggttctgagcaggaaagtgagatgacagaatttatctttctaaaaataaattccagctactatg

SEQ ID NO: 324947 - DNA, 535 bp, Homo sapiens
gggttgagggaactcacaccagttaaaatgaattgaattgctgttgtctaacttagcctgcctcaaattcactcaggagacttatttaaaaaggaagatttcccagagagatttatttaagggaaagcagaattggcattcttctttcgacctagagcaccttgacaagctgttgccaggacacgcaagtgggatggtgtctcttgtgcaactgataaaaggaagtgacccttggattgaaggaagtagaaagattaaatcagaaagaatcaagkttcagagtctgcaaagccacaagccctctgtatgggccagcaaacccctgggcctgagaggcatcagtaattgtcacccgagttggattgaactgaaataaagaagtaaagatcctatataatctattgaaatctttaaaagggttgcaagatatgcattactaatctatatattatcttaaaaacaaacaagacttgactctgaagacagcgctagatctcccagcacaatgtttgagctctgccaatggtcagactgc

SEQ ID NO: 324948 - DNA, 535 bp, Homo sapiens
gggttgagggaactcacaccagttaaaatgaattgaattgctgttgtctaacttagcctgcctcaaattcactcaggagacttatttaaaaaggaagatttcccagagagatttatttaagggaaagcagaattggcattcttctttcgacctagagcaccttgacaagctgttgccaggacacgcaagtgggatggtgtctcttgtgcaactgataaaaggaagtgacccttggattgaaggaagtagaaagattaaatcagaaagaatcaaggttcagagtctgcaaagccacaagccctctgtatgggccagcaarcccctgggcctgagaggcatcagtaattgtcacccgagttggattgaactgaaataaagaagtaaagatcctatataatctattgaaatctttaaaagggttgcaagatatgcattactaatctatatattatcttaaaaacaaacaagacttgactctgaagacagcgctagatctcccagcacaatgtttgagctctgccaatggtcagactgc

SEQ ID NO: 324949 - DNA, 535 bp, Homo sapiens
gggttgagggaactcacaccagttaaaatgaattgaattgctgttgtctaacttagcctgcctcaaattcactcaggagacttatttaaaaaggaagatttcccagagagatttatttaagggaaagcagaattggcattcttctttcgacctagagcaccttgacaagctgttgccaggacacgcaagtgggatggtgtctcttgtgcaactgataaaaggaagtgacccttggattgaaggaagtagaaagattaaatcagaaagaatcaaggttcagagtctgcaaagccacaagccctctgtatgggccagcaaayccctgggcctgagaggcatcagtaattgtcacccgagttggattgaactgaaataaagaagtaaagatcctatataatctattgaaatctttaaaagggttgcaagatatgcattactaatctatatattatcttaaaaacaaacaagacttgactctgaagacagcgctagatctcccagcacaatgtttgagctctgccaatggtcagactgc

SEQ ID NO: 324950 - DNA, 535 bp, Homo sapiens
gggttgagggaactcacaccagttaaaatgaattgaattgctgttgtctaacttagcctgcctcaaattcactcaggagacttatttaaaaaggaagatttcccagagagatttatttaagggaaagcagaattggcattcttctttcgacctagagcaccttgacaagctgttgccaggacacgcaagtgggatggtgtctcttgtgcaactgataaaaggaagtgacccttggattgaaggaagtagaaagattaaatcagaaagaatcaaggttcagagtctgcaaagccacaagccctctgtatgggccagcaaacccctgggcctgagaggcatcagtaattgtcacccgagttggattgaactgaaataaagaagtaaagatcctatatmatctattgaaatctttaaaagggttgcaagatatgcattactaatctatatattatcttaaaaacaaacaagacttgactctgaagacagcgctagatctcccagcacaatgtttgagctctgccaatggtcagactgc

SEQ ID NO: 324951 - DNA, 336 bp, Homo sapiens
catcaggggccaacagacacctcatacaggaaagctctggctggcatctggtgggtgcccctctgggatgaagcttccagaggaaggaayaggcagcaatctttgctgctctgtagcctccactggtgatacccaggcaaacagggtctggagtggaactccagcaaactccagcagacctgcagcagaggggcctgactgttagaaggaaaactaacaaacaggaaggaatagtatcaacatcaacaaaaaggatgtccactcagaaaccccatctgaaggtcaccaacatcaaacaccaaagggagataaatccatgaagatggggtgaaacca

SEQ ID NO: 324952 - DNA, 336 bp, Homo sapiens
catcaggggccaacagacacctcatacaggaaagctctggctggcatctggtgggtgcccctctgggatgaagcttccagaggaaggaacaggcagcaatctttgctgctctgtagcctccactggtgatacccaggcaaacagggtctggagtggaactccagcaaactccagcagasctgcagcagaggggcctgactgttagaaggaaaactaacaaacaggaaggaatagtatcaacatcaacaaaaaggatgtccactcagaaaccccatctgaaggtcaccaacatcaaacaccaaagggagataaatccatgaagatggggtgaaacca

SEQ ID NO: 324953 - DNA, 336 bp, Homo sapiens
catcaggggccaacagacacctcatacaggaaagctctggctggcatctggtgggtgcccctctgggatgaagcttccagaggaaggaacaggcagcaatctttgctgctctgtagcctccactggtgatacccaggcaaacagggtctggagtggaactccagcaaactccagcagacctgcagcagaggggcctgactgttagaaggaaaactaacaaacaggaaggaatagtatcaacatcaacaaaaaggatrtccactcagaaaccccatctgaaggtcaccaacatcaaacaccaaagggagataaatccatgaagatggggtgaaacca

SEQ ID NO: 324954 - DNA, 336 bp, Homo sapiens
catcaggggccaacagacacctcatacaggaaagctctggctggcatctggtgggtgcccctctgggatgaagcttccagaggaaggaacaggcagcaatctttgctgctctgtagcctccactggtgatacccaggcaaacagggtctggagtggaactccagcaaactccagcagacctgcagcagaggggcctgactgttagaaggaaaactaacaaacaggaaggaatagtatcaacatcaacaaaaaggatgtccactcagaaacyccatctgaaggtcaccaacatcaaacaccaaagggagataaatccatgaagatggggtgaaacca

SEQ ID NO: 324955 - DNA, 521 bp, Homo sapiens
tatcaacatcaacaaaaaggatgtccactcagaaaccccatctgaaggtcaccaayatcaaacaccaaagggagataaatccatgaagatggggtgaaaccagcgtgaaaagtctgaaaattccaaaaaccagaatgcctcttctcctccaaaggatcacaactcctcaccagcaagggaacaaaactgtacagagaatgagtttgacaaattgacagaagtaggcttcagaaggtgggtaataacaaactcctctgagctaaaggagcatgttctaacccaaggcaaggaagctaagaaccttgaaaaaatgttagatgaattgctaactagaataaccactttagagaagaacataaatgacctgatggagctgaaaaacccagcacgagaactttgtgaagcatatacaagtatcaatagctaaatcaaccaagcagaaaaaaaggatatcagagattgaagatcaaattaatgaaataaagtgtgaagacaagattagagaaaaagaatgaaaagga

SEQ ID NO: 324956 - DNA, 521 bp, Homo sapiens
tatcaacatcaacaaaaaggatgtccactcagaaaccccatctgaaggtcaccaacrtcaaacaccaaagggagataaatccatgaagatggggtgaaaccagcgtgaaaagtctgaaaattccaaaaaccagaatgcctcttctcctccaaaggatcacaactcctcaccagcaagggaacaaaactgtacagagaatgagtttgacaaattgacagaagtaggcttcagaaggtgggtaataacaaactcctctgagctaaaggagcatgttctaacccaaggcaaggaagctaagaaccttgaaaaaatgttagatgaattgctaactagaataaccactttagagaagaacataaatgacctgatggagctgaaaaacccagcacgagaactttgtgaagcatatacaagtatcaatagctaaatcaaccaagcagaaaaaaaggatatcagagattgaagatcaaattaatgaaataaagtgtgaagacaagattagagaaaaagaatgaaaagga

SEQ ID NO: 324957 - DNA, 521 bp, Homo sapiens
tatcaacatcaacaaaaaggatgtccactcagaaaccccatctgaaggtcaccaacatcaaacaccaaagggagataaatccatgaagatggggtgaaaccagcgtgaaaagtctgaaaattccaaaaaccagaatgcctcttctcctccaaaggatcacaactcctcaccagcaagggaacaaaactgtacagagaatgagtttgacaaattgacagaagtaggcttcagaaggtgggtaataacaaactcctctgagctaaaggrgcatgttctaacccaaggcaaggaagctaagaaccttgaaaaaatgttagatgaattgctaactagaataaccactttagagaagaacataaatgacctgatggagctgaaaaacccagcacgagaactttgtgaagcatatacaagtatcaatagctaaatcaaccaagcagaaaaaaaggatatcagagattgaagatcaaattaatgaaataaagtgtgaagacaagattagagaaaaagaatgaaaagga

SEQ ID NO: 324958 - DNA, 581 bp, Homo sapiens
ggagataaatccatgaagatggggtgaaaccagcgtgaaaagtctgaaaattccaaaaaccagaatgcctcttctcctccaaaggatcacaactcctcaccagcaagggaacaaaactgtacagagaatgagtttgacaaattgacagaagtaggcttcagaaggtgggtaataacaaactcctctgagctaaaggagcatgttctaacccaaggcaaggaagctaagaacsttgaaaaaatgttagatgaattgctaactagaataaccactttagagaagaacataaatgacctgatggagctgaaaaacccagcacgagaactttgtgaagcatatacaagtatcaatagctaaatcaaccaagcagaaaaaaaggatatcagagattgaagatcaaattaatgaaataaagtgtgaagacaagattagagaaaaagaatgaaaaggaatgaatgaagcctccaagaaatatgggactatgtgaaagacaaaacctgtgtttgattggtgtatctgaaagtgatggggagaatggaaccaagttggaagacactctgcagggtatgatccaggagaac

SEQ ID NO: 324959 - DNA, 581 bp, Homo sapiens
agttggcctttacaccacaggggtttgaactgtgcaggtccacttagcaaaaccaacaattctacatctttctccacaccctgcccaggaaaaggatgaggatgaagacctgtctgatcatctacttccatttaataactagtaaatatattttccttatsattttctttttcttttctctggcatgtttgttaagaatacagtatataagacatataacatattaaatatgtgttaattgactgcttgtgttatttgtaaggcttacagtaggctattagtagttaagttttgggggagtcaaagttatagtggattttctactgtgcagtggggccagcgccccaacctccgtgttgcttaagggtcaactgtacatgttatttcctttcctgtaagagaaaaatgatgagaaggtcttttctccaataagtgtattcaaaatgtagcagatttgaaatgtgttggcgccaccattttgcatctcactttgaaaacttattattaaaaatcgtactaaagcctaccttacttttccaaccttagaaaaaatgttgcaaagaaaaggggtgaatccatgc

SEQ ID NO: 324960 - DNA, 437 bp, Homo sapiens
ataatatattatattgattttcagatgttaaacctaccttgcattcctgggataaatcccacttagttatggtgtataatcctatttatatgttgctaggcttgggttgctaatactagtttacagaatgaattgggaagcattacctctcccttcattttctcattcatttattttattttactatcatatatatatatatatatataatttcatattatcttattttagtttttagagacagtgtcttgccctgtcacccaggctggattgyggtggtgtgatcatagttcactgcagtatcaacctcctggactcaagcgatcctcctgcctgggactataggcatgcaccaccatgcccagctaatcatccatttctttctttttttaaaacaaattttatgtttatttatttatttatttggatttctccta

SEQ ID NO: 324961 - DNA, 581 bp, Homo sapiens
agttggcctttacaccacaggggtttgaactgtgcaggtccacttagcaaaaccaacaattctacatctttctccacaccctgcccaggaaaaggatgaggatgaagacctgtctgatcatctacttccatttaataactagtaaatatattttccttatcattttctttttcttttctctggcatgtttgttaagaatacagtatataagacatataacatattaaatatgtgttaattgactgcttgtgttatttgtaaggcttacagtaggctattagtagttaagttttgggggagtcaaagttatagtggattttctactgtgcagtggggccagcgccccaacctccgtgttgcttaagggtcaactgtacwtgttatttcctttcctgtaagagaaaaatgatgagaaggtcttttctccaataagtgtattcaaaatgtagcagatttgaaatgtgttggcgccaccattttgcatctcactttgaaaacttattattaaaaatcgtactaaagcctaccttacttttccaaccttagaaaaaatgttgcaaagaaaaggggtgaatccatgc

SEQ ID NO: 324962 - DNA, 581 bp, Homo sapiens
agttggcctttacaccacaggggtttgaactgtgcaggtccacttagcaaaaccaacaattctacatctttctccacaccctgcccaggaaaaggatgaggatgaagacctgtctgatcatctacttccatttaataactagtaaatatattttccttatcattttctttttcttttctctggcatgtttgttaagaatacagtatataagacatataacatattaaatatgtgttaattgactgcttgtgttatttgtaaggcttacagtaggctattagtagttaagttttgggggagtcaaagttatagtggattttctactgtgcagtggggccagcgccccaacctccgtgttgcttaagggtcaactgtacatgttatttcctttcctgtaagagaaaaatgatgagaaggtcttttctccaataagtgtattcaaaatgtagcagatttgaaatgtgttggcgccaccattttgcatctcactttgaaaacttattattaaaaatcgtactaaagcctaccttacttttccaaccttagaaaaaatgttrcaaagaaaaggggtgaatccatgc

SEQ ID NO: 324963 - DNA, 320 bp, Homo sapiens
aaggtaattgcagtttttgccattgaaagtaatggctaaaggctgggcacagtggctcatgcctgtaatcacagcactttgggargctgaagcaggcagatcacttgagctcaggagttgaagaccaggctggctaaaatggtaaaacccctgtctctaccaaacgtacagaaattagctggacgtggtggtgcacacctgtaatcccagttactggagaggctgaggcaggtgaatcattcaaacctgggaggtagaggtggaggttgcagggagccaagatcatgccactgccctccagcctgggtgacagagtgaga

SEQ ID NO: 324964 - DNA, 320 bp, Homo sapiens
aaggtaattgcagtttttgccattgaaagtaatggctaaaggctgggcacagtggctcatgcctgtaatcacagcactttgggaggctgaagcaggcagatcacttgagctcaggagttgaagaccaggctggctaaaatggtaaaacccctgtctctaccaaacgtacagaaattagctggacgtggtggtgcacacctgtaatcccagttactggagaggctgaggcaggtgaatcattcraacctgggaggtagaggtggaggttgcagggagccaagatcatgccactgccctccagcctgggtgacagagtgaga

SEQ ID NO: 324965 - DNA, 288 bp, Homo sapiens
aaaacaaaaaacaaaaaacaaaaaacaccaaaaacctaaaaaaaaagtactttggagatgctgcaccccttctctgagtgtcgttaggagtgtcagtgaaaggagaatacatcctagaaggtgggggcgtatcagaattgaatgtttctatagccratggttggctactgatgccttcttcatggaaagcaaaggaaagggggatgacttttcctaacaatgcaccaggctgtctgcatggtgaaaggtggtttctccttagtcatgaattagggagaagctgtctgc

SEQ ID NO: 324966 - DNA, 288 bp, Homo sapiens
aaaacaaaaaacaaaaaacaaaaaacaccaaaaacctaaaaaaaaagtactttggagatgctgcaccccttctctgagtgtcgttaggagtgtcagtgaaaggagaatacatcctagaaggtgggggcgtatcagaattgaatgtttctatagccaatggttggctactgatgccttcytcatggaaagcaaaggaaagggggatgacttttcctaacaatgcaccaggctgtctgcatggtgaaaggtggtttctccttagtcatgaattagggagaagctgtctgc

SEQ ID NO: 324967 - DNA, 288 bp, Homo sapiens
aaaacaaaaaacaaaaaacaaaaaacaccaaaaacctaaaaaaaaagtactttggagatgctgcaccccttctctgagtgtcgttaggagtgtcagtgaaaggagaatacatcctagaaggtgggggcgtatcagaattgaatgtttctatagccaatggttggctactgatgccttcttcatkgaaagcaaaggaaagggggatgacttttcctaacaatgcaccaggctgtctgcatggtgaaaggtggtttctccttagtcatgaattagggagaagctgtctgc

SEQ ID NO: 324968 - DNA, 457 bp, Homo sapiens
ttggccaggctggtctcgaacctgacctcaggtgaaccacccgccttggcctcccaaagtgctgggattagaggcatgagccaccgtgcctggccagaacagatctttcttgaggtccaggggaaaagccctggactgctgaatgactcagatcttatgtgtgagcctggccccctgtgagcccctcagtccttgtgcctgctctctgcttgcatctccatacctgtcatgatggaattttgtcccaggtgacacaggagttgtgrggagcaggctggtttctctactcaatagagatgtaagtgttttggaagataatccaatttttaaaaattgggttaaaaggctaggtggggtggctcacacctgttaccccagcactttgggtggccgaggcaggcagatcacctgaggtcaggagttcaagaccagtctggccaacatggtgaaaccccat

SEQ ID NO: 324969 - DNA, 508 bp, Homo sapiens
gggcgcctgtagtcccagctacttgggaggccgaggcaggaaaatggcgtgaacctgggaggcagagcttgcagtgaactgagatcgggccactgcactccagcctgtgcgacagtgcgaaactctgtctcaaaaaaaaagaaaaaagaaaaaayaaaaaacaaacccaagacccaagcaaaggacaggcggagactggccgtcatgcgtgagcctcatgaaagaaaggtactgtcgcccatgccgtactgcacgctgcatttagataggaaaagaacactctcagtagcacacttcctgtttctactgcagtctcagttattcagggcactggaactaaagtcagaggaagagctggagtcaatttcccttcctttgcctggtcctgctctgccctgttcttttgatggggtataacaggcacatgactggggaacccttctgtcttggttagctgcacacagtgtccacagaatgatgaacagaggtagtaaaggtaaaatgcgat

SEQ ID NO: 324970 - DNA, 562 bp, Homo sapiens
taccaataacataaacactcaacacatattttgtatgtgatttgtattgtatactgtattcttacaatgcagtaagctacagaaaagaaaaagtactaataaaatcataaggaagagaatgtattcactatcactaaatggaagtggatcatcataaaggttttcatccatatcgtcttcacattgagtaggctgaagaaragaagaggttggtcctgtcatctcagggatggcagaggcagaaaaggtgggggagatgggaaggaagtcaggagatacacagacgctgagaaattcatcattatttctgtctgacatttttgctttttcatgtctctaaatatgtttctttatgttaccaatccttcttccaccatttgctttagttttggtgcccgtaccatagaaaggtccatgtggtagaagaagtcacaagtagtcttgaataatcagaacccctctgccagattgtcgaatgtcaacttattttctggcactgcatctacatcctcttcctcataatctggcactgattcaaaaacactcatctccatcaagtggt

SEQ ID NO: 324971 - DNA, 562 bp, Homo sapiens
taccaataacataaacactcaacacatattttgtatgtgatttgtattgtatactgtattcttacaatgcagtaagctacagaaaagaaaaagtactaataaaatcataaggaagagaatgtattcactatcactaaatggaagtggatcatcataaaggttttcatccatatcgtcttcacattgagtaggctgaagaagagaagaggttggtcctgtcatctcagggatggcagaggcagaaaaggtgggggagatgggaaggaagtcaggagatacacagacgctgagaaattcatcattatttctgtctgacatttttgctttttcatgtctctaaatatgtttctttatgttaccaatccttcttccaccatttgctttagttttggtgcycgtaccatagaaaggtccatgtggtagaagaagtcacaagtagtcttgaataatcagaacccctctgccagattgtcgaatgtcaacttattttctggcactgcatctacatcctcttcctcataatctggcactgattcaaaaacactcatctccatcaagtggt

SEQ ID NO: 324972 - DNA, 562 bp, Homo sapiens
taccaataacataaacactcaacacatattttgtatgtgatttgtattgtatactgtattcttacaatgcagtaagctacagaaaagaaaaagtactaataaaatcataaggaagagaatgtattcactatcactaaatggaagtggatcatcataaaggttttcatccatatcgtcttcacattgagtaggctgaagaagagaagaggttggtcctgtcatctcagggatggcagaggcagaaaaggtgggggagatgggaaggaagtcaggagatacacagacgctgagaaattcatcattatttctgtctgacatttttgctttttcatgtctctaaatatgtttctttatgttaccaatccttcttccaccatttgctttagttttggtgcccgtaccatagaaaggtccatgtggtagaagaagtcacaagtagtcttgaataatcagaacccctctgccagattgtygaatgtcaacttattttctggcactgcatctacatcctcttcctcataatctggcactgattcaaaaacactcatctccatcaagtggt

SEQ ID NO: 324973 - DNA, 550 bp, Homo sapiens
gcactgtctgtaataccaaataaatgatcaaagtggaataaagaaattatggtcatccatacaatagtatgcacaaggattccaaagaaatatacagcattcaacattaaagagctcacattcttcaacaatggagagtgtttataaactggccatgtagaagggccataatgcaaattcaacaagagttcaataatcaattcatatacaygagattctcttatcacaatgcaatcaaatcaaaagctattaaatatgaaaaaaattgtttaaaatcccatttggtgacgtatttttaaaaacatttctatataacccacagctcaaaaaaaaaactcacaatggaagtttaaaaatacttcaaattatatgataaaaatgtgactttatcagtatttaaatatttatactagaaaataagaactcaataagcttaatagccatctcaacaagaatattagaaaaacaaagtaaatcacacaaaagtaaaggaaataaagaacgaaaattaataaaataggaaacagctttgggagaccaaagtgggaag

SEQ ID NO: 324974 - DNA, 568 bp, Homo sapiens
acagtgacctattacgataactacctgttaataaaaactactcattagttgtcttagttgctatgataagcattgtattgactatttggttactttatttcattaaattcacataccaagctttgtaagatgmatgttacctctaccgtgagagttctcctggattgtcagcaccccttagggagtcacttaaagaagataaaagtcagtctgatttcttgtaatttgagaggttttattagatggtgggagtttgaagcttttaatttttttctaattttttacagtgagcacatacggcttctgtaataattaaagtggtcatttgaaaatgaatgatggatttttagaaaattttttcttaagcacctacagtgaactaggtactatttttgatgtttgttcacatcagtgcatggagcttaatgttgtagcatggatggagatgataaataatgcatataataaacacgttactaggatattagaatccactgagaacatggagaaaagaaaaagtaaagtagagcaagagaagttggttagtggggtgggagtgcaaattgca

SEQ ID NO: 324975 - DNA, 516 bp, Homo sapiens
ctgtaatctagccagcaagtaaagaaatttccctttgtttctttctcctgctcttttgcactggcagccagccataatcagcaagggtctggccaggtatggaagggaccagcaccgaccacctggagcacttgtgctattttgtacctggagagtaattctcttgagtgactcctcacaatatactcatacttgtaagaggaccagttggattacagagttaaccaccagaaccaaagcttctgacgctgcaggatgacttcagtgttcctcttttcatgatggaccctgggtgctctgccatcatcagtccatagattacaggcaggtctgggcagtagcttcttgaggttccttccttccttcattccactgtccagagttgcatattgaactgtgcttccagaggttacagcattgagtagtttctaactcctcarcactttactctggcatcctcacctccaggaaaggctacataatttgcagggtccagtgcaaaatgaaaatgtggag

SEQ ID NO: 324976 - DNA, 591 bp, Homo sapiens
caactaaaataaaatagatcaaagaatgagctagataaggagtctgctcattaagaaacaaaaacaaaaaccagcctgttcaattccttacaactgaatctctgtaacacccaacatattcctccatgtgcaactataagtatcagcaactgtacagacacctctgtttagccagtaagtaatctagagtaattctattatttagcacaactttagcaaaagaatttaaaactatagcctttacagtagaacctgttatggagcctatgatgagaggtaaatttctaatcattgcttcatttactccaaaccatggagaaagagacctaacatgtgctgcctatccaggagagtgaaggcctcctggcaatgttctctttaacctgtgatgtgggttaaggggagtggaccagtrttcttactgattatgaagcaataaaggtaccattaaagtttcttggccacagtggccctttatctcccatctatcaaggcataaggttgtccatgtatacaactggctgcaaaatcctccacaaataaaagtataatccatgagtacacacacgagacccctttttcaggtctatt

SEQ ID NO: 324977 - DNA, 648 bp, Homo sapiens
agttcggaggcactgcctgggaacacctgcccccaacgctggctattctttcatgcacttggtcactgagaaaaccccagtaggggcccctttctggggaggggaaggaggaggttgtgctctctctcccctccaagtgctgcctgtgttgcctggcattgtggcaatgtgcatgccttgctgctcttcctgcccctgtgaggagctggcagcctcagtgtgtactctttcccagagataagttagtttccaagatcaagtagggaacagtttgcttccttactgctatcttactcgcttacttctgctgcttcctctttgtgcatttctttttttttgtttgtttttttttttttttgagactgagtctcgctctgtctcacctaggctggagtgcagtggcgcaatcttggctcactgcaatccccgcctcccgggttcaagcgattctcccatctgagtctcccaagtagctgggattataggcgccagccatcatgcccggctaatttttttgtttttgtttttgtttttttggtatttttagtagagayggggtttcaccatattgcccaggctggtctcgaactccagacctcaggtgatctgcctgcctctgcctcccaaagtgctgggcttggcatgagc

SEQ ID NO: 324978 - DNA, 605 bp, Homo sapiens
taggggtgcctaaaatcttattataaagggaaaaaatcatacagcttaattactaggcttgattaggtagaaatatttaggacttcccttttgttcatcattgtgaaagtgagacaggaatgaccagttagtgaagcgggattatcatgcccagtctatctaatgtcttcctggacctttaggaagtaattcaagatcataacattagctgtgaaataatttttgagatattactgtataatacaaggaagtctccatttttaggtagaacccattcttggaagtcacatcttcaagctgttgctgtaaggcagaatcctaaatttgctttctatcctgctcttcractttctccttatccatttagatattattcagtgtcaccagaaaatgcaatgaatgtgtgaatggaaccctgaaagtgaaatattgggcctgaatgagcaaaatagcaaaagtgaagtcgtaagaagtggggccttcttatccacataccattgggtcacgttgggttttctaccaaggttggagtcatattcattaagggcaggaatcatgccttaatcatcattgaatgtaggactctgactatcccagaggaggca

SEQ ID NO: 324979 - DNA, 616 bp, Homo sapiens
gattacaggcttaaaacatgcatctttcttaataactagttttgcagaacatttttttgtgtgcttatttaccatttgtatatctactttgtgaaatgttcatttcttttctcagtttttaattagattatttacttatattaagttgcgttagttttaaaatatattttggactcaaatgctgtgttaggtatagaatttatcaatatcttctccaagtctataacttataatttcagtctcttaaaagtatctttggaagggcagatttttaaatttttatttcattttagttttagagacagggccttgctatatttcccaggctgaacacctgggctcaagagatccacctgcctcagtctcccgagtagctggggctataggcatgcatcactgtgcataggaatatacagttttttttttaaccatcatttgttgaaargtctaacatttcctcactaaattgcctttacatctttggtcaaaaatcagttgtcagtatatacatgagctggactctgtactgtttatctttcttgtcttctgatttattttttatctggttatttttatgccaataccacactgtattacttgattctgcacctttata

SEQ ID NO: 324980 - DNA, 616 bp, Homo sapiens
gattacaggcttaaaacatgcatctttcttaataactagttttgcagaacatttttttgtgtgcttatttaccatttgtatatctactttgtgaaatgttcatttcttttctcagtttttaattagattatttacttatattaagttgcgttagttttaaaatatattttggactcaaatgctgtgttaggtatagaatttatcaatatcttctccaagtctataacttataatttcagtctcttaaaagtatctttggaagggcagatttttaaatttttatttcattttagttttagagacagggccttgctatatttcccaggctgaacacctgggctcaagagatccacctgcctcagtctcccgagtagctggggctataggcatgcatcactgtgcataggaatatacagttttttttttaaccatcatttgttgaaaagtctaacatttcctcactaaattgcctttacatctttggtcaaaaatcagttgtcagtatatacatgagctggactctgtactgtttatctttcttgtcttctgatttattttttatctrgttatttttatgccaataccacactgtattacttgattctgcacctttata

SEQ ID NO: 324981 - DNA, 586 bp, Homo sapiens
ttgtatccttgaaaaatgctatgttggaatcttaatccccaggacctcagaatgtgaccttacttattaaaaacagggtctttacagaggtgttgcagttacagtaaggtcattagggtgggccctaatccagcatgactgatgtccttaaaagggggactttggagagaaaaacatgctcaaggaagaggatgtgaaggcyacgtgaagagactggagtgatgtgtctgcaagccaaagaacaccaaaaatcgtcagccaccacctgaagctggaagaggaaaggaaagatcttcccctagggccttcagagggaacacggccttgatctcagacttcccctctaagaactgtgggagaatcagcatcttttgtttaagcctcccatgttgtggtactttattgtggcagcctgagcaaacacagtggctaaggaaactaatttcaatcagagacaatattcaaaattcagcactggatattggcaggactaggcactaaccagtcagaagagatgacagctttgaactactcacacaggtgggccactgtggggcacagagatgatgtatggaaaccaggagtc

SEQ ID NO: 324982 - DNA, 595 bp, Homo sapiens
cagtgactgaagctgtctctttgcatcattggctcataagtccaaggctgtctgaggcatgactttgcccctaagagtagaacctcaggacttaaaaggaaccctgagcggttcgtgtaattccctgatgtcttagaagtgtgtctgaaggcaggttcacatattttgtgcagctttgaggttcacatgttagtcactcttctcagaaaacctcactgggcctgaccccagggtagcagtgggatgacaggggttggggattcrggttataggactgtgacctattcattctccatgagcatgttcttccctaggagtagagacctgcatcctgatgtaaagaggagacatgaaacgacttggctctcttttagcaacttacagaccatactctggcctctcccaggccctgaaggtcatttattttgcaaaataagccacagtaataacaccactagcaaaatttggcaaacagaccaggaatggagaaaatataatgcatataattaataggtaattgataacgttataagttttatgagccagatatgttctaaacttccttagtttttcaaagaaacagttcgtagaattt

SEQ ID NO: 324983 - DNA, 518 bp, Homo sapiens
gggttttcatatcctcacaartagttggtattggtcagacctctaatgtttaccagtctgatgcacaggcttattattataacgcattgccttttttttttaacagtctcaaatttacagaaaagttgcaaatacaatacaaataatgttttttcttgagccgtttaagagtaagttgccaactagatactttaatatcttagaatagtttgtgttttctatgaatgaggatattctcctatacattcataatgcagccaacaaaaaacaaggaattaacattattagtttgctaccatttaatctacaaacctcatacaagttttgctacttgtctgaatcatgacctttctaacgaaaagattcagttcaggttgcatgttgtatttagttgccatgtctctgtggtctctaatctggaaccattcctcaacccttctttgactgtgatgaccttcacatttttgcagattatttgccacttattttgttgcatatctctcagtttatgattggct

SEQ ID NO: 324984 - DNA, 518 bp, Homo sapiens
gggttttcatatcctcacaaatagttggtattggtcagacctctaatgtttaccagtctgatgcacaggcttattattataacgcattgccttttttttttaacagtctcaaatttacagaaaagttgcaaatacaatacaaataatgttttttcttgagccgtttaagagtaagttgccaactagatactttaatatcttagaatagtttgtgttttctatgaatgaggatattctcctatacattcataatscagccaacaaaaaacaaggaattaacattattagtttgctaccatttaatctacaaacctcatacaagttttgctacttgtctgaatcatgacctttctaacgaaaagattcagttcaggttgcatgttgtatttagttgccatgtctctgtggtctctaatctggaaccattcctcaacccttctttgactgtgatgaccttcacatttttgcagattatttgccacttattttgttgcatatctctcagtttatgattggct

SEQ ID NO: 324985 - DNA, 574 bp, Homo sapiens
tgtgacagctactaggtgcaatatttatcctgaattactaaaagtgaccatctttggtgaaacttggtgaaatatgaataagttctctgagtgctctgggagaagtgtacatgagagtcatttgcacaattcttgcaaattttctgtaagattaaaatggtttcaaaaacataacataaaatatgaagagaagaaataacaatggtttggttaggcaatcttgccatgaacctcgtaatcaagcacagaaaaggtagtttgtgaacctctctgctggctctgctgggaaaatgccgactcgtggtagtattctacacaaaagtgcctcttctagcagtgtgttcatattccatccyaaaaataccgctgtgcgaggaaatgcaaatcactacctgatgtgcagatacatatcaaacctagcaaaagacgagcttgcaagccaagcattcaataagctttagtttttactgatagtcaattatgcccagttcacataaaaccattactgtggtatattatgtagaagtagcttcagggcttacaaaagcattacctgaatgatggttaaaggctt

SEQ ID NO: 324986 - DNA, 554 bp, Homo sapiens
aatatagtctctcattcatataattacaaatcctaaccattagtgtctatagcagttccagttactagtatttgcatagcagctcacaatttacctattatttttcccatcatgcctggattataaaattgtagaatatcaaattcggatgatagcacaacattcttacctccttgtgacaaactgtaactcatcttttatgccttacccttatcttaacttcttggtgatgcattagtttactccattttgccagatttgtaaaaaaccctctttttttctacattaattgtgtatgttgcatacacttccataacagtaatggtttaatatttttkatgatattgttcttactacccttagtagactgagctcccagaaggcagagatttttttaaaaaatctttgtatcttctgttacacagtatttgtagaatgagggatgagtacataaatgaaaaagtatgcagcaatttccctttgcttaaactgtaataactggtcactttgccactttttaaatacttcagatggccatcttaacactataaaaa

SEQ ID NO: 324987 - DNA, 550 bp, Homo sapiens
ttcactctattcattttcttttgatggtatcagatttcaatacatctcagaccctgtttttcttctgtgtcctattacattccaaaacatgttgtgattgtaaaactcttagagtatattaacaatttgggatatttggcataatcagagaataggtccaaaaggaggcaataggatattctattaataattgtaattgccatttttagcatttcctgttatgtactatgctcttgtcaagtgctttgaagataktgttttacttttccttcccaccaccagcaatgtttatgaggtagatgtttttatacatgttctatggataaggaaactgagtctaattggccccggctgggaactaacgctagggaaacggcagacctgcattagaactcagctatgtctgacttcaaacacaggctcagtaatatgtggaaaagcttcccaattaactttgtctataaactttgtgtgagtctggattttgacttactctttgtctttacgcatctgagaggacccatgtaggaaataattcttctatataagt

SEQ ID NO: 324988 - DNA, 594 bp, Homo sapiens
atgcagtgcacaccttgtcataaaatgtgttatcactgactttacaattatggccatgtaatattattaatattttaaaaatactattatttcatcatataaaaaaattcaaccttgtaaatgactgtgaaacttcagggaaactaaagtttcactgacatgatgaaagatcaytttcttaaaaagtttaaaatgtaaaagaagagtatgagatgacagtcattagttcctttagtaaactcttctaatttgcttttttcaatctaaatattatttcgaaagccaaatgattaaataatctggtttctgtctaataagttattgctgatctctagtactaaattgttttcaaggaagtcaataaaagatgttttgtcttggggaagatctatataaaaacagaaattaaagtgggcttaagttcttcataaacaacttaacaaatactaatgacaatttctgggcattcttgaattacatttctcaatgattttttaaatcaaaatctttgttcaaaggcacacaagaaagcatgatttaagccaaattttgaagagcaatattttatatataaaatgcacatttatacattaa

SEQ ID NO: 324989 - DNA, 605 bp, Homo sapiens
aatgaaacaatatattttcttttagtgagttgaagccaccttactggtccccccacctcattattttaaagacgtgccataatataaatcttagcacagaactggataaacaacaaagtccataaagtttgaatgatttggccaaaatcaatttcattttatggtccatgtgtgttttctgaattattatataaggatactgtactttgaacctgaattcttacaccaaaccctctcactgtaatcccttgaaaggcagcttctgttctgctttcttgcactggtgaagctgctatcttgttttcttcaatgctcactgtgttctaaagtctttgtatttgaccatgttggtccctgcctctttttgagcctctcctattcatagaccaggcattatggcattccagtaagctgacccaattagttcaccatcatttttgtcccattttctctttcctttttggggtgcttgtttccacatctcttaaaggcatgrtatttttccctcaagagtatatcctctttcctcaaatattttatgcattgtttacttagtaattcacttgctactaagatttaaactaatattctactccttaaattaa

SEQ ID NO: 324990 - DNA, 548 bp, Homo sapiens
ccgatgaaatgatactttcccttcaggctttcatttattgataaattcaaacagaaagagaacaatgatgctcccttttttataattttttgttatcatttgcttggcacacccattagaccttgctgggaagggttacagaaaggattattaacttaataaacgttttctcctttcattccatctcagaacaaaacatcaagccaaaataaacactttcaaattattcaactgattctgcagcctggccgcagtggattcagcatcagttatagatgatcctccaactttcccttcacctccccaaaactcttctggcattacaaaactcaaaacaaattcatcttgttgacaagcaraactgattcaagaaaggcaagatagctcatcatctttgtcattaaactttagataattaaaacgtcacaccaaacttcccttgaattagctgattaactgctctcttctatatatttaacttaaaaacattaaaaaccattattttaatgatatagaacatgaaattagaggactattacattattcag

SEQ ID NO: 324991 - DNA, 571 bp, Homo sapiens
ttaaaaattttgcagttaaactggatttgcatcatggtattacaatttacacaatgtaagaaactgagaagtttctaggcatgtgtgggtgtgtgtgtatgtatacacacacatatatccacactagaaatggagaagggtatattcaattatttatatgtaaacatactcttcctaatatggagctaagctctataaacacatgtatgctagaacagagttgtgtgtgtctgtgactagctgtatagacatagatatggaamgttcccgaggatataatcagataaaatattttgttcaaaaccctgctattcttctttaatttacttgataattggagaattatgagcatcgtttaatattttgtatcagttatagatgatattaaatcttcattataagctataattggcaaaagtgttataaatataatttattaaaaattacatcagtattcattgacctgaagatatattcttttgttttttaataaatttctgcttttaagtttgttccagaaaacaaaaccaaacaagggaatttattgttttattataaagttattaaactc

SEQ ID NO: 324992 - DNA, 603 bp, Homo sapiens
aacttattatttgccaaattcataattttaccataaaatttataaatcattatttgtttcacaagaccactccctctcccagtttcatgagagtttatatccctgccacagatagaagaaacaagtgtaatattgaagaataattcttatttatattgcaagtttgggcataggggagggagaagcagaggagccaaataattttttttagaaagagcaatctcaatcaaaatccaggaagttattttgtggatatcaacaaactaattttaaactttatatgaagagtcaaaagacytaaattgccaacagaatattgaagaagtacaaaattggaggactgacacaacacagctttatgacctacatgaagtaagtcatgtaatcaaaacagtaatcaagacagtgtggggttggtgaaaaaatgggaaaataatcagtggaacagaatagagagcccagaagtagacccatactaatatagtcaattgatatctgttgaagaagcaaaggcaatacaatgaagcaaagatcaacttttcaacaaatagtgcgagacgagctggacatctacatgcaacaaatatataaataaaaatagac

SEQ ID NO: 324993 - DNA, 578 bp, Homo sapiens
ccaagaaagaggaaggacaagctgtgaaatacatttgccagatccttagctgtcttacatagcctaatacttggtttgtaactatttcacatratcagatgtcctcattcttctgtgcatttttgaagatccttaaatataatggtctatttaaaaaatgttttaaatgtctttgaaacaacttttaccctacatgtctaacatttttgtctaagaaacttgcacttgtgtctctgcattctaagtaaatgttggacatatttttgctatttttaatttgctgggcatttgggacattcctggtatttatagtttactaatttatttcctcatgtaagctcaccaaagttgggacatgcagtatatattttgaatcctgatgccgcccacctaggaattactcaacaggtgccatccacattagtaacttcatctttggataaggttaaatttagtgttgactaagctccaacaaactaagttctgttttccaggaccagtttagtctcaagctcatcaaagaaaaataaccatgactttgaaacttaagataaatatgaaccacaatatctcagtaa

SEQ ID NO: 324994 - DNA, 546 bp, Homo sapiens
tgcaaatcagtttgggttttctctctctttattgtttctatcawtttgaaaacaatcttgcttgttcatgtaaaagaaacccacctggactgatttacatagaaacattactataaaaaattgtgtttctctgagaacactattgaatttgtcatgtgagatactgtatgtgacaagattttggcatcattttatgagataattacaaataccttcctgtctaagaaatttgatttggattgtcgtcttccatttaagcctcttgaaatgtgtttatatgagagaatagaggcagcaaatggagttattacacagaaattacaatgtagaattcagaagtggattataaggcacaaaattgacaatttgacataaaatagaggtgtctcttcaacagcagatcatgatatacagaaaagctgaaactctacaaaaatttcacaaaaataaaacattgttaattttttcaattgaatagaatacttactaattgtaagggaaaaataagcatgaagatttcagctttatgggtggtacatatgcata

SEQ ID NO: 324995 - DNA, 588 bp, Homo sapiens
ataattcagtcttctggagaaatcatgggctgttcacttcaaattccaatctcagagctcccacartgacaaaaggtcaccaaacaatccaagcgtgattaaattttcaatagggtcaaataaatagtgtccctttaagagctagaattctgttaatctgatcaactattaagcaaagggagtataattgccattgagagcagtgtacatgcagactgtctcaatgaaagcatgcctattctcataaggaaacagatgtttgctaaattaatatgaagtacttcgccttaaagatataaagatgtccttcaatggttgctaggtaacatatttgcggttaagaaataagctaaattacagactttggaatacttttcttacttatgtattttagtaaaatgggggattaagaagtagataaataccaaagaaaatatcttaatgtgacatggtatcttcctttctagccccatgtccacagatacggagttgcaattgttactgtgtgagcattttcagaagttaagctggatacccaactcttatattccaatgtaagaatgtagtaacatacaattgagctttctg

SEQ ID NO: 324996 - DNA, 591 bp, Homo sapiens
tttttcaaaaatctcaactttggagtttgatttaaaagtgaatattaatgagttgactaccccataagatcggtggatggtctatgaaggcaagtaaattataaagtaaacataaattgaagtctgataatttccttttactttttttctgtcattctctttcaatctctgacctagtgctgttaattttatctccytaacatctcttcacccttccactcctccattgctactatcattgccctgggtcgcttctcatcatctctcacccaatcactctaacagtcatataaacactttctgagtgcaggcaggctaagcattatactattctatacactacagatagtgattgctttaaaatgcaaatctgatcaagtaatttaacgtgttagtaaaaatcacaaaatagctcccacttaacttcaaaaaaaatgtcccttatgaagtcaatttattccatttttaagagaaaattagtttaaataaaaatagcaaaaagagtaaaacataactatgaaggttacagaagaatgatgattgagaaatgacacataaaaggatgagatttgacaatcagaaggaagggga

SEQ ID NO: 324997 - DNA, 586 bp, Homo sapiens
aacagagctatgaaatagcctcatgatttcagagaattttgtatagttctatttggccagaacatggggaaggggyacatggaaacactaaaggaagaggccaggaatcaggtaagggttgggcaaaaagcaataatatctgaagctaagaaggctttattaagatttttaggtgaaagtttattttcatgtagggaacatgaaaatgacagccatgctcctgttactaaacttgaacttgagtgcagctatggagtttagagtcaagtttagagtcaagaaagtaaagacagattacttacaagacttctgtattctagatgataaaatagttttctgccctgtatttactaagaaattgcccacaggacagcaagaacaaaaaatcttaactcaaattctatcttccatgaacacaatatatgagtgtggaaggcagatgaaagaatgatacacatgtagcagagtagtaaaggaagatggacccacagaagcctgcagagggagacagagtaatgcaaacagattttcccacagacccccagaatggctcagaaagtatgagcatcagatcaaatggaaggta

SEQ ID NO: 324998 - DNA, 570 bp, Homo sapiens
ataaggatatattatacaaaaacattctaagagaaaaaaatattttcatacatcccttgtaaggaggctatcagaagtgaaaataatggaatccaacaaacaggtgaccaaatgtaagagagaggcaaagacattttcagctgatgataaggaaagttcagtgtaactgctatgtaacagatctagaragcaatcattttacattggaacaaagagaaatgattctagaattgttaacactagggaaataataaatctgatgcactgtgtgagaattggattataaggaaaattgtatacggatggattttacagatctgttggaaactgttaaaaaaaaaaaggtaaatgtagccataaagtcaacataaattatacaataaaaaagtgaggcaattattagctctatagaaaaaaaacaacaaactctgtttaagaaagagactttaatcctaggctagtattagtctggtagtgaataatatttacatgggaacaatgaaaacaatatagatttcactgaaaattatagtgtaagtatattgggggtagtgcagagaagaagggggt

SEQ ID NO: 324999 - DNA, 579 bp, Homo sapiens
tatagaaaaaaaacaacaaactctgtttaagaaagagactttaatcctaggctagtattagtctggtagtgaataatatttacatgggaacaatgaaaacaatatagatttcactgaaaattatagtgtaagtatattgggggtagtgcagagaagaagggggttataaagaagcaaagtccttatataccatcccaaaaagtcaatagtctctaaatttcataaagtaggatattaaagcatattacttggaaatacaaaaataatcaccataagaaattgctaaatgggtagaaattcattctttttgttggagaggagctagggataggactgctcttgtttgtttacctgtagaactttacatgttattttattttaatagtctaataacaatgaaaatcattcatttaaaaataaagtttatagaccaggcatggtggctcatgcctgtaatcccagcactttgggaggccgaggcaggcatataacttgaggtcaggagytcaagaccagcctggccaaaatggtgaaacctcattgctactaaaaatacaaaaaaaaaaaaaaaaaaaaaaa

SEQ ID NO: 325000 - DNA, 611 bp, Homo sapiens
gattgtttacgttcacttaggctaaaaacatagaacttggaagctgagagagaacactctgcctgctgtgtttaagagcctctgtgaaaagtaatggaaataaaaatgcagtgcacagggagtactaatccagccatcagttgacagggagcaatagagaaatttccaggaaaaagtaagcaactttcaaaaaatatttgttttttcaacaactttctttccttctttttacatcaactctaagcaaatattagactacttggaagattctgttgatccccactagagggcatcctattttcataaatacctgaaaattttaaaactacaataaattatagcaaaacatattggtgagatctgtcatctagtttgctatttgctaaggacactttgatggtttcattttgtattccactcatacacaattatgtatcagctttctgcagttggygtctctccagtgacatgctgtagctccacatcaccacgggtaggagctagatccacatacctgcaagaccatcggctaacagtggctgctgctgcgtagccttgtcaaaccgcaaagcgatgctgctcaaataatgagccaaccacctgaccactaa

SEQ ID NO: 325001 - DNA, 631 bp, Homo sapiens
taagcaactttcaaaaaatatttgttttttcaacaactttctttccttctttttacatcaactctaagcaaatattagactacttggaagattctgttgatccccactagagggcatcctattttcataaatacctgaaaattttaaaactacaataaattatagcaaaacatattggtgagatctgtcatctagtttgctatttgctaaggacactttgatggtttcattttgtattccactcatacacaattatgtatcagctttctgcagttggtgtctctccagtgacatgctgtagctccacatcaccacgggtaggagctagatccacatacctgcaagaccatcggctaacagtggctgctgctgcgtagccttgtcaaaccgcaaagcgatgctgctcaaataatgagccaaccacmtgaccactaagagagcatggagacttagaagtcatagcattaacagccaccctaaacctccccccccttttcatcctaaaatcctttcatttgtaatgcaccacaattgctggaatgcacaattgttaaaatgctaaggattccatttgaatctcttacaaattattggaatatattagctaaaggaaaataaaaataaaaacaga

SEQ ID NO: 325002 - DNA, 631 bp, Homo sapiens
taagcaactttcaaaaaatatttgttttttcaacaactttctttccttctttttacatcaactctaagcaaatattagactacttggaagattctgttgatccccactagagggcatcctattttcataaatacctgaaaattttaaaactacaataaattatagcaaaacatattggtgagatctgtcatctagtttgctatttgctaaggacactttgatggtttcattttgtattccactcatacacaattatgtatcagctttctgcagttggtgtctctccagtgacatgctgtagctccacatcaccacgggtaggagctagatccacatacctgcaagaccatcggctaacagtggctgctgctgcgtagccttgtcaaaccgcaaagcgatgctgctcaaataatgagccaaccacctgaccactaagagagcatggagacttagaagtcatagcattaacagccaccctaaacctccccccycttttcatcctaaaatcctttcatttgtaatgcaccacaattgctggaatgcacaattgttaaaatgctaaggattccatttgaatctcttacaaattattggaatatattagctaaaggaaaataaaaataaaaacaga

SEQ ID NO: 325003 - DNA, 521 bp, Homo sapiens
gtagctattttggcatcttctgggctaatatttttaattggaactggtggctaaattgaagtgttttcagggctgaccaaggaggtagcttctgctacgcatatgaccaggtcttgcacttcaagttcattgacacaaagattcagagatagaactttgatataattgccactgtttccactaagtcataaaggttaccctatacagcattctctgcccatgtgctgggcactttacagaccttatttcatttatcctccaaaggaccttatgakatgggcattgttatattacacgtgaaacaattgaagctcagattcattgactaatttgccccaagtcattaagtagcaagtcacagagctaagtttaaaattgcttctctctctctacaatacccatacattttcagtggcaccatattaccttctttgttggtataaaaaataaaaagagaaacactaaaatttttcaaggtgtttggccaagtactgccttgtatcctcataaaaatatatcat

SEQ ID NO: 325004 - DNA, 521 bp, Homo sapiens
gtagctattttggcatcttctgggctaatatttttaattggaactggtggctaaattgaagtgttttcagggctgaccaaggaggtagcttctgctacgcatatgaccaggtcttgcacttcaagttcattgacacaaagattcagagatagaactttgatataattgccactgtttccactaagtcataaaggttaccctatacagcattctctgcccatgtgctgggcactttacagaccttatttcatttatcctccaaaggaccttatgagatgggcattgttatattacacgtgaaacaattgaagctcagattcattgactaatttgccccaagtcattaagtagcaagtcacagagctaagtttaaaattgcttytctctctctacaatacccatacattttcagtggcaccatattaccttctttgttggtataaaaaataaaaagagaaacactaaaatttttcaaggtgtttggccaagtactgccttgtatcctcataaaaatatatcat

SEQ ID NO: 325005 - DNA, 468 bp, Homo sapiens
actagcaaaccctttgagggaatttagtccatgcctctgaccataatttattttaatggaatctccaaaacaaaatgttgcccttcaaatgtgatttttagataaaagcaaaatcatttatcttgccatttcatgacatggaaacatctgtaggaaaacactagagagcatccctcactaagatatcaaagtaactactaaactcagaggacagctgaagcacaagcagtataaatcatctgggtacctccaaaaaacatcttgcacattctcaaatgattgaccgatggactgcctgaygtgtgaataaatgaatgaagcctttgacagtgaatcaaaggcatgaccactttaagtgccagtaagaccaatagtattagtctgcaaaagagattgtgagatgattctctcttaaggcagtttaaaaattggcactggtacaaaacataaatttatgggaagcattaa

SEQ ID NO: 325006 - DNA, 565 bp, Homo sapiens
gtgtttctgaaactggggtctgaacaccctggagttaaaaaaatatatgatcagtggtataagaatatttctaattagcrtggctcaacttgcttgaaaattagtttaatgacaatgatttaaaacattaattttagactaaaataaacacatttggtcataaaatgaaaaattcacatagggtactataaataattgatccttcaaatacattttttcaagttcagaagactgagttttggtaaactcttatgagtaatttttcactccatccatctgtaggtatttttaagttaaaaaattaaagaagcattgccagaataattgatgtttttgcatatagagtagatgatcatttaccaagatattgtgggaaaagtccaacataggatgcaattctgattcttgcattgacaataaaccaaaatactccattatgtgtacttattagttgatcttttaacagaagcacagacataagattgagattgaaaaccttgaacatttctggcatggtggatcaagtgcattataaatttacttggtggaaaaatgttatgctggc

SEQ ID NO: 325007 - DNA, 565 bp, Homo sapiens
gtgtttctgaaactggggtctgaacaccctggagttaaaaaaatatatgatcagtggtataagaatatttctaattagcatggctcaacttgcttgaaaattagtttaatgacaatgatttaaaacattaattttagactaaaataaacacatttggtcataaaatgaaaaattcacatagggtactataaataattgatccttcraatacattttttcaagttcagaagactgagttttggtaaactcttatgagtaatttttcactccatccatctgtaggtatttttaagttaaaaaattaaagaagcattgccagaataattgatgtttttgcatatagagtagatgatcatttaccaagatattgtgggaaaagtccaacataggatgcaattctgattcttgcattgacaataaaccaaaatactccattatgtgtacttattagttgatcttttaacagaagcacagacataagattgagattgaaaaccttgaacatttctggcatggtggatcaagtgcattataaatttacttggtggaaaaatgttatgctggc

SEQ ID NO: 325008 - DNA, 495 bp, Homo sapiens
ttgtttgtctctactgataagtgtctatactacttcagtatctcacagtatcttcatgttttaggttactgtttcacctcttttctttcatgcttcagctttcaagcaaaatgactttggtggcacaccaccaacctattagggtgtaccttatttctctgtctctaggggaatctcctgaacacagaatataaggtgmagcctgtgtgctttcagccctatttttcctcaagggctgacttgtttggatgcctgggctttctttgtcaccaatcttaggtacagagtgagttgctggaactgcagctcctcagagatcaggaatgcttctggtggtcagacactagtcaattgctgaagttcaggtcaaaattaaacttagacataggcaaaagatcatttttaagtaatgataccttttcagcaatctattaaatataagtgtttgtcccctccaaatctcatgttgaaatgtgatctccaatactggaagta

SEQ ID NO: 325009 - DNA, 429 bp, Homo sapiens
atcagtattcactatgatcacccttgatcagggtggaacagttgttacccggatggacaaagctctccccaaattgaactgatgttttagtaagatcagagaagaaaaatgttcctgaaagtttctctactacatatgttaagatacagatagtgacttttatttcctgttgaaaaaattatcatctttaattatcaaactattataaaatcctatacccaataatgttaatctagcaaaaacggtagccacattttgagtacttgtaacatctaggacatatataaggggctttatattcagtatctaatttaatccttccacaaaactatcagcaaacgttattatccccactgtacagakgaagaaactgaggctgagagaaattaagtagcatgagcagggtgaaacgacaaatgaaagggtcat

SEQ ID NO: 325010 - DNA, 564 bp, Homo sapiens
gagatagctagtgatacctgttactaattattacaaggaaataatcaggaagtctgaagtgggtaagttttataaaagagatgaaattgagctcgatcttgagacatgagaaggttaccaaaaactctcacctggaggcaactagaaactacttcaaccaaagttcaacctgtagaaagacaaaaagcaatggctttccacatagatgaataaaattggcaaagacacagacttgggaatacayacatgttacctgaatgagctatcatctctcctgatgctaggcccttgtacacgctcttccttcacacatggctttcgccaccaccctggaactccattatgtaagagactttgatttacctttgtttattgagtagctagcatgagcctgtcacacaggaaattcaagctggacaaaggatgtcagatttgaaatcagattttagagtttttgacggatgagtgacaatcagcatagcttcttagaaagtagagataatggagtctgggagggctgcttgaagggcactgaagccatatagatagaccaggatggtggca

SEQ ID NO: 325011 - DNA, 537 bp, Homo sapiens
acatactttgcctaaaacagtgaataatactgaagggacacaatcaatagttgctgaatgaataagaacactttttaattctttcaattatttacttaaattaaagtggcctacatcttcatcaagtttatttttttctgaaaaatgttcaataccttatttcaatttgtttgcgtctatatattcactccaaaatttattcattttctcttattgtaaatatagtaggatcatgtattatatactacatttttgccaatttgaaatatgttttaaatatacttaagtctgtgataaaaasttataatgtttgacaagttcgatgatatttaaaacgaaatgaaatgcaaatgtattattagaggctttctgatggttgggacggaaatcatgatataatataaaaaataccaaatgccaaaaatctagtgtttgttcaagtgtgtgtgatattagtctaggtagttaatttccataatcatctcattttcttctataaaatgtgaataaaaataatctgtaatggttataagaaac

SEQ ID NO: 325012 - DNA, 666 bp, Homo sapiens
tgtttacacatattcaatgaatacttattgtgaagtaactactttgtgtaagaagccatctacatactttaaattctaattttatagttgttatattgtaatttctggatatttttctgagtcaatatagagcaggcatttactygatgaagaatcgtaaaaatatcaaagtaaaaacagaggttctcactacatttttaaagaaaggtaagaaatagacatggaaacaactattgataaccatgtaggaagcaaatacaagctaacatataaatattgtatttatcatatttatttcataattcatttacaattaaagaaatgaaaatatgttgctaatagcagagtcctcaggaaatgcattcatcaaaaaattcaactgaggctggtacagtggttcatgcctgtaatcccagcactttgggaggcagaggtgaggggattgcttgagctaaggagtttgagaccagcctgggcaacagggtgaaaccccatctctactaaaaatacaaaaaataaataaaaataaaaataaaaagccagacatagtgacaggcaggcacctgtcgtctcagctacttgggaggctgaggtagaaagactgcttgagctgtggagcggagtttgcagtgatcaactgagaactaagacttgattcaatttgaa

SEQ ID NO: 325013 - DNA, 666 bp, Homo sapiens
tgtttacacatattcaatgaatacttattgtgaagtaactactttgtgtaagaagccatctacatactttaaattctaattttatagttgttatattgtaatttctggatatttttctgagtcaatatagagcaggcatttactcgatgaagaatcgtaaaaatatcaaagtaaaaacagaggttctcactacatttttaaagaaaggtaagaaatagacatggaaacaactattgataamcatgtaggaagcaaatacaagctaacatataaatattgtatttatcatatttatttcataattcatttacaattaaagaaatgaaaatatgttgctaatagcagagtcctcaggaaatgcattcatcaaaaaattcaactgaggctggtacagtggttcatgcctgtaatcccagcactttgggaggcagaggtgaggggattgcttgagctaaggagtttgagaccagcctgggcaacagggtgaaaccccatctctactaaaaatacaaaaaataaataaaaataaaaataaaaagccagacatagtgacaggcaggcacctgtcgtctcagctacttgggaggctgaggtagaaagactgcttgagctgtggagcggagtttgcagtgatcaactgagaactaagacttgattcaatttgaa

SEQ ID NO: 325014 - DNA, 560 bp, Homo sapiens
tgggcagaattttttcatagcatttatattattttctctttaagtctaccctcactctctccctttcttaccagctcctatcactgaatttcctaattaaatgcacctatgctgaaaagccactgtgagaggttcctctgtttctccagaatgggttcttctctaacgcaaggtcaatatttgtatcattagctactaacattatacctggaacctaattcatgtttgtttagtgaacatgaaaaactgttgtcaaagtcccattarcctggaaaagaatgttccattcccatatagcttggaatccacactacattaaatgaaaacaattgaaaaatctcatacaaaggcattttaagttgactatgatgattaaaatcgaggggtataaaccaatatccgattggaaccacaatattatagcttatttcagctcaatgattatttattgataggcactgttctatatatttatgtaagaaaaaaagaatttttctaaaaagcatatccaagtccagaaagattaagaaaatgacattaaacatggatcaaattcagct

SEQ ID NO: 325015 - DNA, 560 bp, Homo sapiens
tgggcagaattttttcatagcatttatattattttctctttaagtctaccctcactctctccctttcttaccagctcctatcactgaatttcctaattaaatgcacctatgctgaaaagccactgtgagaggttcctctgtttctccagaatgggttcttctctaacgcaaggtcaatatttgtatcattagctactaacattatacctggaacctaattcatgtttgtttagtgaacatgaaaaactgttgtcaaagtcccattagcctggaaaagaatgttccattcccatatagcttggaatccacactacattaaatgaaaacaattgaaaaatctcatacaaaggcattttaagttgactatgatgattaaaatcgaggggtataaaccaatatccgattggaaccacaatattatagcttatttcagctcaatgattatttattgataggcactgttctakatatttatgtaagaaaaaaagaatttttctaaaaagcatatccaagtccagaaagattaagaaaatgacattaaacatggatcaaattcagct

SEQ ID NO: 325016 - DNA, 621 bp, Homo sapiens
cttgggcctctcttagacatttccttgattccctgggattgccatgaactagtggttctgtcctaaacctagaccttggatcctggactctccaaccagaacttccccaagcataaagtctcctgcccaagaccatggccttccccaaacaccaacccttcaaggttcacttttagttctaactcttgcatttccaccaactactacctataccagtcycttctttctctgaatgcttttgtttttcagaagcatagcacttcaagtggagttagatgacattaatgtttttttttccgtattagctggtcttacacacaagcctactttatttcaatgttcagttaaagaaatggcaacctgttcccatgctagagaagaaacttgaccaataagttgcaagttaatatagtatacaagaataccatgtgtgtggttcttaatttaagaaaatttcaagtaaatttgttacaaagaacttaaacaaatttacaagaaaaaaaacacaaccccatcaaaaagtgggtgaagtatatgaacagacacttctcaaaagaagacatttgtgcagccgacgaacatatgaaaaaaagctcatcatcaccggtcattagagaaacc

SEQ ID NO: 325017 - DNA, 497 bp, Homo sapiens
atatctactaaacaacttgctgctctaaaatcgcatggttcaatgcagatgtacaggagacatttttgagcctgggraatttgcagggtagctatccaagcgggttcgcaactctcccttactcataaatagttcttgcagcagcagctgtatttggtggcatagggctacaaacctccactgtgggttccctatatttagagctgcttctcctctgcaagggtcagtaaaaataaagaaatgaccatctgggacaaagtgtgtataggcagcagacacaaatatgctcaactgggaactaaaaatttgcaaatttggttctccttcctataaacatcttactggaatgtaatgaggttggtacgaagattagtttatttcagctattctgagaaaataattcaagtccaaatttcactgccaaagactatttcaagaggaaagagtaaatacgatgggaacgctaaaaaaaaaatgatagaattaaaatggagcaa

SEQ ID NO: 325018 - DNA, 607 bp, Homo sapiens
tttcatatttacattaattattttggtatttagatggaaataagaacaataacaaatttcagtgtcattctatctatcctatgccttggaaaagggctgaggacctgagccacaaagttactccctgaaaatgctgtatttttcttcaggagactacaagagcaaggaagaaatgattatggatcctcttaagtattgcctattgatagatgaacacatgaatagaaagtatagactacttattaattacatatttaaacaagaacacgagtggagacataaaagcacattagagactaattattgttaatatatttgaaatgtataacctagcattctatttacacataggctaaatacagtcaattaaatatataaatcatatgagcaggaatacataaaaatgctatctctttagataatcaaattataattgttttcctcattacttgactcaatgtattcatacattcataaattcattaatttaacaaatatttattgtttgtgttctatatgccaggcagtatttcaggaaccragaacacagtagtgaatgaaacaaagtccttgttctcacggaactaatattctaattgataaatta

SEQ ID NO: 325019 - DNA, 515 bp, Homo sapiens
tgtaatccagctgcatctcaatcatttgccaactggaatattaaaattaatatctcaattatgttccatcttttcatattaattttaagaacgttgtattttcagacatgctgtttcactaaatatattttcacatctacttcatttccttttcaatttcttttttccaatccaacaggtatcttagatccttggattcttctaactgaattcattgtttatctggtttctctcatgttttagaaccaaagcctccctcattccttaggtttttttcatcatgacattcacttatgacactgccctcctcatgacagacaaatggaccttttctttccaacgcttattragcaaaacataactgctgccttattcatgtcatgaaagataataaccaaagaaaatttattgcagtaaatgttttcaatgacccacaaaaggcaagataaaactaaatgtacttacaaaccccctaaggactgattgcatggtcttaaatatcctataaatttgta

SEQ ID NO: 325020 - DNA, 584 bp, Homo sapiens
cttgcataatctcaaagtcaaccattattcctgaaagaggcttcctatgtgtcaaacacaatggaatggcttccacacatcttccagaatggtatattctgaaatctactagagtttttaacattggtgcaaagtgctttctcactgctcataaggtgttcttagtagagaaaaaaaaaataacagcatcaatttggtactcctacgttactatttggtggcagacagaccatttaatctgtgatcttgctcttaatttttaggctttaattatacacattgtaattaacactgccagcattgccatctttyaataggaaatcaaatctgtatgaataaatcttattctcagagaattatgccctctaccccatccatattacaaatgttatgtagagtacagcttcctgatttattgtgtgaagtaactctagttttgtggatggccctagtagtgatttggatgaaaatttttaaactcctctggttaatcttgacactttggagaaaaatagcaaaatatggccaaaagctttatagttacttttaaaaagtgctcctatacggttataggacaaacctta

SEQ ID NO: 325021 - DNA, 576 bp, Homo sapiens
attttcagctttatgcagtgtttttctgtttttcattaattctgttcatcactttcaatggagaccttcaacaatttatcctttggttkcttcaggtcatatatggtggtcattccaacaccattctcttctggaagatgtttcccacttacaccacagtctagtctctccaacagcttgactttctgtgctataaaaaaaacaaaacaaaacaaaacaaaacaaaaaaaaacgcttcctttttttcttatcactgttacccataggggtatcttcaggcctttttgacattttcaacaatatctttatgccacacaatgaaaaataagcaaacaaacaaaaacaaaaacaaaacaaaaaccacagagtaatgcgtataggtcttgacccaatgtggggcactgtggggaacctgccattggcatgtccattctgcacacatgccattgtattaccctttgtgggtgtgcatggaaaagatacatagcagctaaaggggctgacagactattttttcccctgagaatgctgaataaactgtgttgtgcacctgcattttgactgcaatttgtcaca

SEQ ID NO: 325022 - DNA, 646 bp, Homo sapiens
ctgtttataaccccaacaaaaaggaaagaaaagcacatatctttcaaaaaccactaatgtgcttgctttcctattttcttcattctggaaaggcagacaggtgacagacagggccaaggccaggaaactgttgggttgaacagaagtctagtgtggatggaagatttactcgattcaggggagttgagtaaataagaaaacatattgagaataatgagagccaagtttctcatggttgacaaaaagaggcacaagtatggaaagaaaaataaactgtggtgttgagttggaattggaggtattatgaatgtatgtatatgtgaataatcacattgaattataataaggcatatatataatatcaaaataaataatgmttcaatgtatgtgtatgtatgtatgtgtgtgtatgcatacataaatttcttggttttgtccaccaagaaaacctaggagcaatgagatcttggtttctaaaatcaccctatacaaaaagacatacaagttccttaaagaaaagaataggatctaaagccaagttagggaatgtgcaagatgagcctagaacaccttgagccataaagaaagaaaattctcaaagagtgatagggcagttggaaaggagacacagccagtttgaaggggc

SEQ ID NO: 325023 - DNA, 660 bp, Homo sapiens
gtagcaagaattcaaaaatagtgaatccaaagaaaacataaataggttaggtgaataagtgtatgatcattaccgaaaaacatgttaacgcaggcctcaaattttaaaattattacagtcaattttttcaggttctagttgtgcatggatattttttaaataaaaattgcattaaattatgagaattttagtaaagaaaaattcttgagagcagagagatgatggatgaataaactaaattacaaaaaawtcatacttaaagtgatgtgtacacatcgtcatatcaatcagaagtaatatttaactgattatatctccacgatgctatgttaggcactatgcatcaataattaaacagacatgatccctggctgctataaaatctgtacctataaaaagtcacggagacttaaatgacacagagtcaagtgaatattgcagcggaacctatatcatctatttagaacatgtataagcagtggaacatgctcatttgatgatttcttgcagaaaaatgagttttctagagatggtgatttaggaggattgggcacttgctggaaaataaatttaaagaaaatcctgtagttacactttgttagcttccaatatgcttaaatttttcatgaaagaaatgttgattggcaatatgagcagaca

SEQ ID NO: 325024 - DNA, 660 bp, Homo sapiens
gtagcaagaattcaaaaatagtgaatccaaagaaaacataaataggttaggtgaataagtgtatgatcattaccgaaaaacatgttaacgcaggcctcaaattttaaaattattacagtcaattttttcaggttctagttgtgcatggatattttttaaataaaaattgcattaaattatgagaattttagtaaagaaaaattcttgagagcagagagatgatggatgaataaactaaattacaaaaaaatcatacttaaagtgatgtgtacacatcgtcatatcaatcagaagtaatatttaactgattatatctccacgatgctatgttaggcactatgcatcaataattaaacagacatgatccctggctgctataaaatctgtacctataaaaagtcacggagacttaaatgacacagagtcaagtgaatattgcagcggaacctatatcatctatttagaacatgtataagcagtggaacatgctcatttgatgatttcttgcagaaaaatgagttttctagagatggtgatttaggaggattgggcacttgctggaaaataaatttaaaraaaatcctgtagttacactttgttagcttccaatatgcttaaatttttcatgaaagaaatgttgattggcaatatgagcagaca

SEQ ID NO: 325025 - DNA, 583 bp, Homo sapiens
tacaactgaactcatgctccatcwctttaattggtgtaatccttagggccttaaagccacaaagggtctcagaagttgtaatattggctggtaaatagcagaacctgatggaggttcccaatctcccagatcttaccccagtgttcctttttatgctcttattcttctagagtggacaaataatgcactcatatcctattggcctcacagagatcattattcaagcaaaatgccctcccatttctcttcctttcttcagcatctgggattcgctatatgcaagcatgctgactgattacttctgatcccttagactgatgtctttacttaacataagggtcccaggaagctcttccttcttaagagcatgtaagtgggcatgagttgttacctgtctggtgtctccatttctttcttctaataataggaatactacttttgtcttaggagctatctatctttccacatgatgtcaagctaaccaatcacagtacattcttcccctagacgcagagatttgtaaaagggaaaagatctatttcaagtagggccagtcaagatccatttctggggactgaaatga

SEQ ID NO: 325026 - DNA, 583 bp, Homo sapiens
tacaactgaactcatgctccatctctttaattggtgtaatccttagggccttaaagccacaaagggtctcagaagttgtaatattggctggtaaatagcagaacctgatggaggttcccaatctcccagatcttaccccagtgttcctttttatgctcttattcttctagagtggacaaataatgcactcatatcctattggcctcacagagatcattattcaagcaaaatgccctcccatttctcttcctttcttcagcatctgggattcgctatatgcaagcatgctgactgattacttctgatcccttagactgatgtctttacttaacataagggtcccaggaagctcttccttcttaagagcatgtaagtgggcatgagttgttacctgtctggtgtctccatttctttcttctaataayaggaatactacttttgtcttaggagctatctatctttccacatgatgtcaagctaaccaatcacagtacattcttcccctagacgcagagatttgtaaaagggaaaagatctatttcaagtagggccagtcaagatccatttctggggactgaaatga

SEQ ID NO: 325027 - DNA, 469 bp, Homo sapiens
tttcacatagggtctgcatccagtggtaagtattcttataaaaaccggaagaagagaagacacaaagagaaagccatgcaaagatggaggcagagatcggaactgtgccaagactaaaggaattcttggagccatcaaagctagaagaagcaaggaaggattcttccctaaagtcctagagggatcatgcctctgcacatacctkggtttgaacttctgacctctagaattgtgagagaaaaagtttatgtccttttaagccacaaagtgcatggtaatttgttatagcaggcacagaaaattaggcattataaaacttaaatgtgagattaattattcacattcagaaccaaggaatatatagatttttgtcactgagattcccagcctgggacacaggcctggcctgccttggagaaaactggttgtattgcaaggggagggaaggacaactagatccaaagcagtg

SEQ ID NO: 325028 - DNA, 555 bp, Homo sapiens
tgctttctgtctgacctcaaataaggcaggattatctcaaaggagaagcaaagtaaataataaaaactcagattaaacagaattctgtgaaaacgtggggaacagtcactgatatgcttaattcctctttcttttcctttcaggttctgtattgtctatagggacagtackaatttgttaaaaaaaactcagttacagtagtttagggactttttttgttttgttttccttaatcagcaaagttacttgaatcaaaagggagcattttccacaaacacaattggaaaagtaggattaccttgaaagaggaaaattgtgcctttttagcgcagggctataaagcaacatgtaactcaaagagtttttttttagggaaaggcaagtcatctttagaaaaatctctacttttttgtactttgaatacgaaatttcccaatgttaacattatattttcactatacactgtttgatgagtcaagaagtagaagcatttctccataatagaattattctcaccgttattttttagaaacaatctataatatcataataaca

SEQ ID NO: 325029 - DNA, 542 bp, Homo sapiens
tagcacacctttttccaaagaagttctacttgcaatctccaaattccctggccatttcaactcaacctttccatatgttcaatgtgagtgtgtggctccacgtcacaaacgatgacttaagacgttatctgtacagggtctgcctagtccatcagaacctcactttggagtgagtagttggcacctattatcttgtggccgtaactatcactgaaactgatagagtgcaatttcccataactgacctttttttcttagaacttatcttcctycatgacttgctgaataataaaatgcttttgatgcatttcctttagccgttctttccctggaagacaacatttgcccatgtgccattgatagctccaagttggcataggtgattgcaagctctctgagtgcaaaattctacttttattccatttacagctgggtatcacctaacatggtgaacttcatctaaatagttgatttattatctccaccctacaagaatttgataataatatttcctaaaaaatatttacttcttaattcttaag

SEQ ID NO: 325030 - DNA, 622 bp, Homo sapiens
gcatttcttttaaattattttgaattactagttgtgtactagtttggagaccaattatccttaaatttaacgactgagatactcaggctctgctctgtagactgggaactgagtgattaattatttttcccaacaagctaatattttaacccttagacattgattctgagagctttgttccccctgttcaacaagcagacattgaaaagattttttcctgcttaaatatttaactcagtgacttcattggcttggctacactagctgtgtaatattgggaaattcatttaaccttttgggagagtwtttttattcctttatataagagaatatgccagattagatggacttcaatgtctcttctacatctaaaacaccatgaatctccatagatcagtctatgtggcgaaagaaacggtcagagttggccaccagctactggattataaaggatatgagctgaagattgctccaacttcactcactttggataccagagagatgcttgcctgcctcattcagatttcagtgcctgctctgtgtccagcatcggccagactttgggattccaaggcaagccatcttctatccctgccataggctttgaatttagttgacaggc

SEQ ID NO: 325031 - DNA, 626 bp, Homo sapiens
agcagcatttcttttaaattattttgaattactagttgtgtactagtttggagaccaattatccttaaatttaacgactgagatactcaggctctgctctgtagactgggaactgagtgattaattatttttcccaacaagctaatattttaacccttagacattgattctgagagctttgttccccctgttcaacaagcagacattgaaaagattttttcctgcttaaatatttaactcagtgacttcattggcttggctacactagctgtgtaatattgggaaattcatttaaccttttgggagagtttttttattcctttatataagagaatatgccagattagatggacttcratgtctcttctacatctaaaacaccatgaatctccatagatcagtctatgtggcgaaagaaacggtcagagttggccaccagctactggattataaaggatatgagctgaagattgctccaacttcactcactttggataccagagagatgcttgcctgcctcattcagatttcagtgcctgctctgtgtccagcatcggccagactttgggattccaaggcaagccatcttctatccctgccataggctttgaatttagttgacaggc

SEQ ID NO: 325032 - DNA, 626 bp, Homo sapiens
agcagcatttcttttaaattattttgaattactagttgtgtactagtttggagaccaattatccttaaatttaacgactgagatactcaggctctgctctgtagactgggaactgagtgattaattatttttcccaacaagctaatattttaacccttagacattgattctgagagctttgttccccctgttcaacaagcagacattgaaaagattttttcctgcttaaatatttaactcagtgacttcattggcttggctacactagctgtgtaatattgggaaattcatttaaccttttgggagagtttttttattcctttatataagagaatatgccagattagatggacttcaatgtctcttctacatctaaaacaccatgaatctccatagaycagtctatgtggcgaaagaaacggtcagagttggccaccagctactggattataaaggatatgagctgaagattgctccaacttcactcactttggataccagagagatgcttgcctgcctcattcagatttcagtgcctgctctgtgtccagcatcggccagactttgggattccaaggcaagccatcttctatccctgccataggctttgaatttagttgacaggc

SEQ ID NO: 325033 - DNA, 610 bp, Homo sapiens
gtgcacacaaatggaatctgtgggtaaagtgtggcctttttgctttttcctcattaatgcgacttttaacaggaaatcctcaggttaaacyaaaccatcctctggacttagtgtgctgattttcttcgacaattagtaaataccctttgttatcatcagcattttacataggaaatccaatcagtcaagatgtgattacgtgacttttggtagacttttccaaggattctgaagggatgatcagagatttttttcataacgttctacagtactcaaaattataagatttccataagtgttttctcttttagtgcttcttttggctgtgctgctagccctgggatttctctttttcatttgccctatctccttcttccttcctagatttctcccaggcaccatccatcacctttaatctcccactttttttccagaaaaaatcacattttctatagattctaattctaagacattcatgcccccatttttcatagtactgtaacaataaaaaaaaaaaaaaaaacctccttctaccagggggcagtagcacttacaaataacatatgtgtacaacatatgcctattttatataaaatacatgatttaacat

SEQ ID NO: 325034 - DNA, 604 bp, Homo sapiens
gtgctgctagccctgggatttctctttttcatttgccctatctccttcttccttcctagatttctcccaggcaccatccatcacctttaatctcccactttttttccagaaaaaatcacattttctatagattctaattctaagacattcatgcccccatttttcatagtactgtaacaataaaaaaaaaaaaaaaaacctccttctaccaggrggcagtagcacttacaaataacatatgtgtacaacatatgcctattttatataaaatacatgatttaacattgtattactatgacaaagagataaattaaaacacctctttctcaagaaggccaactgcataatatcatgagatgtataaagttaaggcaactttatgacacatgaatccatttattcattacagatcttaaatgcagaactgcatagatttttcttagattctatgtggatgtgcaattgatgtgcatagtattaaaattgttagcaacaaatgatgcaagcagaatctgctttttacctctttagttaattattttggaaatgatattgactcacagttcttggataacaataaataatagtttctgggtagagtggc

SEQ ID NO: 325035 - DNA, 527 bp, Homo sapiens
atacagtttatgtgcatggatatttatatatgactatttatagagttttttgaattagtttatgtgtgtatgtgtgcrtaaaatagattcacagatttattaaatgccacataaaatgctgacacatagggaatgtgctaaaaaaatacatttggacgtgggggcatatgttgaagttgacatacatacccaaagaaaagataattttccttaagtagaaaccatctgtaacagcaaggtggctagagtgcaaagaagatggatgggttattgctaagaacagatgtgaccaatatttcatgctactggctcttgtttctcctgtctgcattccccccagtggagtgaaggaatagtttgagtaaaccatcctaggatgtgacatcttcacctctaccttttccacctgttctttccaggggtgtactacttttgcaatgttgactgtggaacaccagagttagcaatggcacagccacggcattacttggagaaatttcaacacattttctacttttgagcttgct

SEQ ID NO: 325036 - DNA, 552 bp, Homo sapiens
gcatggatatttatatatgactatttatagagttttttgaattagtttatgtgtgtatgtgtgcgtaaaatagattcacagatttattaaatgccacataaaatgctgacacatagggaatgtgctaaaaaaatacatttggacgtgggggcatatgttgaagttgacatacatacccaaagaaaagataattttccttaagtagaaaccatctgtaacagcaaggtggctagagtgcaaagaagatggatgggttattgctaagaacagatgtgaccaatatttcatgctactggctcttgtttctcctgtctgcattccccccagtggagtgaaggaatagtttgagyaaaccatcctaggatgtgacatcttcacctctaccttttccacctgttctttccaggggtgtactacttttgcaatgttgactgtggaacaccagagttagcaatggcacagccacggcattacttggagaaatttcaacacattttctacttttgagcttgctcttatctagccagctttgggttgaatgtgtctgctata

SEQ ID NO: 325037 - DNA, 552 bp, Homo sapiens
gcatggatatttatatatgactatttatagagttttttgaattagtttatgtgtgtatgtgtgcgtaaaatagattcacagatttattaaatgccacataaaatgctgacacatagggaatgtgctaaaaaaatacatttggacgtgggggcatatgttgaagttgacatacatacccaaagaaaagataattttccttaagtagaaaccatctgtaacagcaaggtggctagagtgcaaagaagatggatgggttattgctaagaacagatgtgaccaatatttcatgctactggctcttgtttctcctgtctgcattccccccagtggagtgaaggaatagtttgagtaaaccatcctaggatgtgacatcttcacctctaccttttccacctgttctttccaggggtgtactacttttgcaatgttgactgtggaacaccagagttagcaatggcacagccacrgcattacttggagaaatttcaacacattttctacttttgagcttgctcttatctagccagctttgggttgaatgtgtctgctata

SEQ ID NO: 325038 - DNA, 450 bp, Homo sapiens
catttgaacttaagggctttaagatataattaccaagaaaatataatgtgaaaatctaatcacgataagcctcccaagacatatctagaactgagggtggcagctgttctttagagtatacagaaagttactccaattcaaatagtatcctatatgccctcaaaagctaacaagatgtcccttgcagaacagactcattacacatttatrgcattgattaattactaaatgtttactttgaagatgtttttacgtacccaacattcacaaaaattggtttgagcaaaggagtaaagcccccatgcaactttgagattttagtaaaaagctgcatagacttgaagtgaaggtgactcagtttgaactctttgacgagcagagaaaatgagtatttgggagcacagtgtgattctactgcaggtgtctaattggttatggtacaggtctcat

SEQ ID NO: 325039 - DNA, 637 bp, Homo sapiens
aaggatgcaggagatggaatagtgggggaggctgtatttgacatgaagaatcacgtattttcatgaactcttatttatttacaatcaacatatactggattaaattttaagttatcatcagaaagcactgttctgtattgcactgccaatatctacatgtggacactcactcatagaaaaccctgaaaaattctttaaaattgttattagtcatggcttgttttctgctggtgaatttatcattctaagtatagcatttttctggtaatacttgtatagatctatgcaaatccacttctacatataaaacccccaatgctaaagttatcctggtagcatatgaaaagcagtgaaagcaaattatattgttcaagatgcgaggaagaacagctgagaaagtatggttttgagaagataaccaaaattacaaatatgtttatttaacaggttgaatgaaagctgyctttatagaaatgcagcccagaacacaaaaaatttatatctacccactaaaaaattcaaaggtgtgattcattccactatattatgaagggcgatcagatatatactcctgttcctactttgttagagtcttcaactatgggtaactttgggatctggttgattatatatcata

SEQ ID NO: 325040 - DNA, 637 bp, Homo sapiens
aaggatgcaggagatggaatagtgggggaggctgtatttgacatgaagaatcacgtattttcatgaactcttatttatttacaatcaacatatactggattaaattttaagttatcatcagaaagcactgttctgtattgcactgccaatatctacatgtggacactcactcatagaaaaccctgaaaaattctttaaaattgttattagtcatggcttgttttctgctggtgaatttatcattctaagtatagcatttttctggtaatacttgtatagatctatgcaaatccacttctacatataaaacccccaatgctaaagttatcctggtagcatatgaaaagcagtgaaagcaaattatattgttcaagatgcgaggaagaacagctgagaaagtatggttttgagaagataaccaaaattacaaatatgtttatttaacaggttgaatgaaagctgcctttatagaaatgcagcccagaacacaaaaaatttatatctacccactaaaaaattcaaaggtgtrattcattccactatattatgaagggcgatcagatatatactcctgttcctactttgttagagtcttcaactatgggtaactttgggatctggttgattatatatcata

SEQ ID NO: 325041 - DNA, 637 bp, Homo sapiens
aaggatgcaggagatggaatagtgggggaggctgtatttgacatgaagaatcacgtattttcatgaactcttatttatttacaatcaacatatactggattaaattttaagttatcatcagaaagcactgttctgtattgcactgccaatatctacatgtggacactcactcatagaaaaccctgaaaaattctttaaaattgttattagtcatggcttgttttctgctggtgaatttatcattctaagtatagcatttttctggtaatacttgtatagatctatgcaaatccacttctacatataaaacccccaatgctaaagttatcctggtagcatatgaaaagcagtgaaagcaaattatattgttcaagatgcgaggaagaacagctgagaaagtatggttttgagaagataaccaaaattacaaatatgtttatttaacaggttgaatgaaagctgcctttatagaaatgcagcccagaacacaaaaaatttatatctacccactaaaaaattcaaaggtgtgattcattccactatattatgaagggcgatcagatatatamtcctgttcctactttgttagagtcttcaactatgggtaactttgggatctggttgattatatatcata

SEQ ID NO: 325042 - DNA, 614 bp, Homo sapiens
atttttattctaccatctgatgatgtcactatccctaattcattgtattttgtgggtgagaataaaataaataatggtttttaaaagtctctatttttttcacagaataggtcttcagtaaatattagttgttttgttgtaattattgttaataatgtgtgacaggaactaggcaggtttatatggaaaaagtagaagtagtgaccattcaggatttttacatgagagctgggctattcaaagttgtcagttgataaatgagtctgaaatttaggcaaaatttttaaatgtgatgtgaaagataacagaaaccactgtaagtgtctaaatagataagaaagcaagagatatcattatttattacgmtgagccaccaaaattttcttataattctcttatgtgctatattttctattaggcaataataacaaattgttgtttctactatactgaaaattcctccataataatctggttgtaaagtaacctaaggaagaaccaaaacttgacggctatttgaatatgggaccttaagaaagaataaatcaatcaataataatgtttaaaatttaaggaatgtgtttcccttaaagatttactgcagacctccttat

SEQ ID NO: 325043 - DNA, 646 bp, Homo sapiens
tcatgataaattttcaactctctaaataaagaaaatacacactgttcttggatcaagattaggcttggttttccacccacctttgtcctcaaacacatttgtaacaaacataagtaaatacttgacaggtgaatatcaccggtgccattaactgaaataaaatgaaccatgagtagaaagtgttaattcactatttcaatcacatcccattcgcagaaaaaggatcacagattctcaaccctttaaatgtaaccatggagagcagaaaattccgttcctgtgggcaacaagataagtctatgtgatgccattagggactttttaatgagactttctctatattgctatgtgttgtcaaacgtctaygtttatctaaatgatctccttggccagacttaaattcctacattatttctctgctgcccacatgtcaaaatctcctccactcagagaagttgcttttcctgcacacagtttactggaattagggaggttgataatgcatctaccaagtagagtccatgtgaagggctcagagaaatagaaaccccatatagaggagaagattctgcaaggctgagcagcacattacatgctttcatcagcctccagggtgcgtgcttgaccagtgtgcgtgcttgactag

SEQ ID NO: 325044 - DNA, 573 bp, Homo sapiens
ttaacagcctaatgacttgtagtggagtttagtaaatagagatttgttaaagtgtagttcttagaccaggagcaacagcagcaccagggatattgctaaaaatgcaaattctcaggctccaccccagactcctatcagaaactgtgtgatgcagttcagcaatatttttaaacaacttctccagataattctgatgcaaattaaactttgatgtccactaccttagcaaaagaaaaatgttagtaaacaatttatactacatattattctaaaacatttgctgggrttaggggagtgaatagagagaagtctcataaaacatataaaaacccattaaaatctgacaaatttaatcattgtaatgggtttcttctagccaagaggatgaaagcataagttccttagtctgacacagagtctttacacaatgtttgccgtctatctctgcagcctcattcattagttcagccattcagtcacttaactagaattcattgagtgcttactacatctggacaccgagtaagtaaatagggaaatgccaataacaatagcaaaccaccctaaccccca

SEQ ID NO: 325045 - DNA, 569 bp, Homo sapiens
gcagaattcagttctgtgtgcatgtaggactgggggctttggtttctggttggctgtcaaccagcagactctttcagctcctataggctgcctgtagttcatggtcttgtggacttcctaacataggcagtccacaacattgcagcttgtttcttgacatctgcaagcaagggaaagactcccgcaaggcaggccttacatacaacctgtattagtctgttctctcgctgctataaggaaatacctgaggctgggtaatttataaagaaaaaaggtttaactggctcacagttccacagactgtgcaggaagcatgacagcttctgctcagcttctggaaaggcctcaggaaacttatgatcatggcagaaggcaaaaagggagcaaacacccgacatgaccagagcaggaggaaaggggaggggtgctacacacctttaaacaaccagatctcatagaaccctataacaagaacagcactaggggaacagcactaaaccattcatgaaaaaccrccaccatgatccaatcacctcctaccaggcctcacctccaacattgggtattac

SEQ ID NO: 325046 - DNA, 553 bp, Homo sapiens
gtattagtctgttctctcgctgctataaggaaatacctgaggctgggtaatttataaagaaaaaaggtttaactggctcacagttccacagactgtgcaggaagcatgacagcttctgctcagcttctggaaaggcctcaggaaacttatgatcatggcagaaggcaaaaagggagcaaacacccgacatgaccagagcaggaggaaaggggaggggtgctacacacctttaaacaaccagatctcatagaaccctataacaagaacagcactaggggaacagcactaaaccattcatgaaaaaccgccaccatgatccaatcacctcctaccaggcctcacctccaacattgggtattacaattttacatgatatttgggtagggatacagatccaaaccatatcataatcttatgcaggtaatcctgtatatgcatcacatacatcctatccccttttctgtgttctgttggttaaaagcaagtcatatggccrtacctgtgatggttaatactgagtgtaaacttgactggattgaagcatacaaagtat

SEQ ID NO: 325047 - DNA, 567 bp, Homo sapiens
catttgctttgcatacttaccagtacctgtcactgttgtcttttcttctttattttaaacattttagctatatatgtggtactatttatatgacattctggaaaggcaaaactacaaggcaaaaacacagatccatagtttccaggggctatgatggaagaaggaatttgacaaagagatacaggggaattttggggcaggcgatggaaatcttctatctattgacttgaagacaatagatagaagtgaatagaaacattaagctaaaataaatcatagacttaaatgtaaaacctaaagctatagaaccgatggaagaatacataggagaaaagcttcatgcctcttctttaggcaaagatcttttaaataattagacaatgaaagcacaacccacttttaaaaagtgataaattgaactttgtccaaacttaaacctctgcttgtcaaaactcacatagttgttcactaaaaagggtaaattttgctgtatgtaaattayactttagtaatacatttaaaagaacaaaaaatttaataagtgtgtaataataacttatgcttttt

SEQ ID NO: 325048 - DNA, 583 bp, Homo sapiens
aggtctatgattcattttaacttaatttttgtatacagtttgaggtatggatcttttttgacactatacaaaagtctacaagtgtgtttcttaaagagtatttggaacgtgcaaatatttacaaccctatcagtgaacttttcattgtttttttttacattgaaatttattggtctatctggcataatttttttgccaaggcatgatattttgaaattatgtattactcatttggaaaatattggttcactgagctgtgcagattttccaaatgttaacacgctgccccactacwttataaaatataaaacgattcttaatagtgctaagaatcacataaaatatcttcatatatttgtaagctgtccagcccagtgtggttcgcatgacttttccaaaattctaacttttgcttagaagttcaagtgtgaccactggcatcaaatttgagttctaccgcttgaaatgacaggcgcatttgtccattttcacaaaaaaaatctgccaaatattgaaatctgtaaaaccatagtttatctgacagttgttctttaaggtaaataccactttccatgaaaaaagt

SEQ ID NO: 325049 - DNA, 377 bp, Homo sapiens
tttaaaagaagtagagtttggataatatttaaatgagctatttccagttaaaaaaatcagaggaaaactgcttgattaatgttttctgcacacacaaaaaagtgttctctaaatttttctaagtggcctttaatttaatgcaaattaagagtgttttagattgaagtcaagcattcagtagcggtaaggaaattctatcccttatacttactagaataggataatgatgatgcataaggttacmatagaacttgttctgagtcagattttttgaattataaataatatattggtggtcaagtacatttctttaaaaaaaagtcataaaatacactgcatcagaagtgccacttaaaattttattcattttaaaattt

SEQ ID NO: 325050 - DNA, 510 bp, Homo sapiens
cataatattcatcacaatagaatttgaaattctatgtattccatcttctgttaattttgacatattttattatactggcaaccaacatcggtcttttcccctctgactttttcagtttggaattatggaaaatgtgcttaattatattcaatttaccacttcattgtacatagtctcatattgttctctaattgtgctccgaatcttgtcttccaccaagcttgcatgctacagaggaagaaaatgtcatatactttgtatcttttatatttgctacaccgtttgaaaatagtgcctatgcaaacagtaagggctcaataagcccttgttaatcatgcctcttacaactctctctataccaccaaccttctcacagacccagcgaataaaagtaacaacaacmagtacagaagtttcctggcaatatttctaattatttgtttctacaaaacattttctttaattttcagagtcataacactgacaaaagattgaacttagttgttaaaa

SEQ ID NO: 325051 - DNA, 437 bp, Homo sapiens
aaaaaaattgacctgtgatgaataatgatggttagtaaattgtttttcaaaagcataatagctggttgctggaagcaaaaaatgaagaagaattaatcagtgataaaaaggcaggatgtttaaataaatggaagttctatcagatcctgtggcagacagactctaggagggcccccatgattcctctctccagtattgcatactttataagtatgggtattgtattagtcagggttctctagagggacagaactaatagaacagtatgtgtgtgtgtgtgtgtgtgtgtgtgtgtgtgtgtgtgtgtgtgtrtatatatcatatatatttatattatatatattatattcatatattcactatattcatatatatagcccaaatatatatatggtatattctctctatatatatattccatatataaatacatacac

SEQ ID NO: 325052 - DNA, 525 bp, Homo sapiens
gtttttacaagctgaaaccatttgttcagggttagaggaagccagaagttgaattctataattttcctctgaactagaaatgtgggtatcaggtcccttggaattctgtgagtggcttagaggtagagagttaaagaatcctataactttcttttcaaatgtcaacacactaacatgttttactggttgctattcccaaggcattttccattgcagcaaatgaaatggtatttttcatatatagtgtgtcaaaagaatgaaatcaattatgtctctccaatttcctaactgaaattattacttattctggtataggggaaggtagtaggtttgccagataagatagaggatgcctactgaaatttggatttcagataaataatattatttattaatactttatattagtatattaatattaatattttagtataagtgtgtcccaaatattgyatggctcccttaacattttggcctgattaaatgcgtttttagtcattgacagctatataaagtttcaaccta

SEQ ID NO: 325053 - DNA, 584 bp, Homo sapiens
gggatacattcaaactacagcaaaatctagcaaaatatgtacaagatctatatgaggaaaattgcaaacttcttttaaaaggaatcaaataaataatcgtgtgaaattcaatgtttatggatagaaagactcaagattttcaagatttcagttaatcccagcttgatcgatagattcatcacaatccagcaagtaattttatggatgttggcaaactgattctaaagtatatagagagaggtgaaagayccagaatagacgaaactatattgaaggaaaacgataaaatttgaggaccaataacacctaacctcaagagttaatataaagttacagtaattaaaacagtgtggtattggcaaaagaagagacaaatagatcaatggaacagaatagagaacctagaagtccacccacacaaatatagtcaactgttttttgcaagagaggaaaggcaatgcaaaggggaagacagtcctttcaataaatggtgctggaataattgcacatccacatgcaaaaaaaaaaaaaaaaaaaaatctagacacaaaccttgtgtccttgacaaaaattaactcaaaatg

SEQ ID NO: 325054 - DNA, 616 bp, Homo sapiens
ttctcactttggaaggaagtatcgcttcctctttcagcatccctaaaggtccacacactgtaaacctcagccctatggaggggaggagaaggaagactgtgccttctgcttccactgcccactttctcctttcaaactaattggtgaacttagggaaaagaccagaatatgctaagaattaggatatatgcatagcggtccagccagatgacataattgttttaaaaaaagtttttaggtaaggtgaaagaagagtaatgcagaataagaagaatgctgaaaactctccaattctttattcatattttgtcttttgatcatgaggtgcacacgcacacaaacacacacacacacacacacacacacacacaaaactctcatctcctttgaatggctgaacagaaagcattcccattagagtaaatctaaatttcaattaagacaagaaattgaggtagaaaaattgtcaggggaaatattaaaggtttacaagtgtttgtttacaattgaaacygaagtttcaaagagcaaagggaataggatgggggcaatgggcaacagtgggagaatgttagtagggggaagattacaatgatttgttgacagaatattaaga

SEQ ID NO: 325055 - DNA, 527 bp, Homo sapiens
tgttcatgtctctgtcctgactgtaagctccaagaggacactataaccacgtttcctttttttaaatctcaaagcttggcagagtatattattcacagaatatgtgaaagaactgtggaatatacaatgatggggagaagggaaagaagaaaatatgtattaccttactggttctctctattatttgtactgatatctttgacaacagcatcaaaaactatatgaacaatagaaccctttcaaattsctttgataccagaagagaggtacaaaaaaattatttttttgcagtggacagtggcaagtattgaaatggaaagcaagcagataaatcaatggcattggaagcaaagggagggagggagtagaaatggctctaggctttgaaatatccccaaaagaacatactggtttgaaggcttggctctcacagtttctcaatccatattttctgcatcctctccccatacaatttcacattttccatagaattttcttctccactcctcacacttattccgatcagt

SEQ ID NO: 325056 - DNA, 570 bp, Homo sapiens
ccacagatgtgggtgactgtgcctgggcctcaagcactggcccttacagcaaagcaaagggcagtatccatcggctctcatgttcctgtttcaacgccacatccccttgtctttgagatctcagtatgtttcctgataaagtcagctctgaaatgagggtgtggtagtatctgcattttgyatatttctttcaagctatgagaatgcaagattgtggaattttagtaagtagtctatataggatgcatttcaagattcttaatgcacttgacacatcattcatccaaagtacaagttcctggcaattccggttcattacaacacagacctgacactagatgtgagcaccacctctgagcacagtagcagttgttgcaaaacctcagcactaaagtatggccttagggcctaagggaagaatcttactgccattattcagcattatttaacataattagtgactagcttgctctttgggtttccacaactcacagccagcagctcagggcagcagcacaatagaaaggaatggacaggagttgacactggaagtgatgtgggtgaaaagtg

SEQ ID NO: 325057 - DNA, 570 bp, Homo sapiens
ccacagatgtgggtgactgtgcctgggcctcaagcactggcccttacagcaaagcaaagggcagtatccatcggctctcatgttcctgtttcaacgccacatccccttgtctttgagatctcagtatgtttcctgataaagtcagctctgaaatgagggtgtggtagtatctgcattttgcatatttctttcaagctatgagaatgcaagattgtggaattttagtaagtagtctayataggatgcatttcaagattcttaatgcacttgacacatcattcatccaaagtacaagttcctggcaattccggttcattacaacacagacctgacactagatgtgagcaccacctctgagcacagtagcagttgttgcaaaacctcagcactaaagtatggccttagggcctaagggaagaatcttactgccattattcagcattatttaacataattagtgactagcttgctctttgggtttccacaactcacagccagcagctcagggcagcagcacaatagaaaggaatggacaggagttgacactggaagtgatgtgggtgaaaagtg

SEQ ID NO: 325058 - DNA, 576 bp, Homo sapiens
cccctcttcaggccagcagtgggagttggggtttctctttggcaaggtagccacgtttccgatttcctaaggtggcatttgaagtggctgtcctggcttagcccggcagggggcggtgttagcctgtggaaaaggccactggggggctttgccaccaccagccttgggggcttggccctgaaggaaggcatttactacccgaagggcttggggataatctgaggaatctgcatgtcagagcttgtcccttcagagcctcagaatcccactcccagatgtgtggaccctgccttcaagaagtttggggtcctaagctggacattgccctttcgtcccctctcgccactttccagatctagggacttgggttcttccatactaatgctytctgtgccatgcaaggggaagtggttgattagggcccttgggaaaggtggggtgagggctggagggacaggggaagtagcttttggggaagttgggaggggtaatgaaagtccttaagacagttgttgagaaaatgctgatcatgccatcagggtcgctctcagaagatttgatccaaggggtgtgcca

SEQ ID NO: 325059 - DNA, 576 bp, Homo sapiens
cccctcttcaggccagcagtgggagttggggtttctctttggcaaggtagccacgtttccgatttcctaaggtggcatttgaagtggctgtcctggcttagcccggcagggggcggtgttagcctgtggaaaaggccactggggggctttgccaccaccagccttgggggcttggccctgaaggaaggcatttactacccgaagggcttggggataatctgaggaatctgcatgtcagagcttgtcccttcagagcctcagaatcccactcccagatgtgtggaccctgccttcaagaagtttggggtcctaagctggacattgccctttcgtcccctctcgccactttccagatctagggacttgggttcttccatactaatgctttctgtgccatgcaaggggaagtggttgattrgggcccttgggaaaggtggggtgagggctggagggacaggggaagtagcttttggggaagttgggaggggtaatgaaagtccttaagacagttgttgagaaaatgctgatcatgccatcagggtcgctctcagaagatttgatccaaggggtgtgcca

SEQ ID NO: 325060 - DNA, 550 bp, Homo sapiens
acaaaccacagtgaggggttctgggctgtgtccaaccaacactcttgctcccccagcctccacccacatttgctcaggcttccccaaggcctatattatgcytaatgtcttaaagccatccctcccagaacattactgctgcaagggtctggaagaacctagcccagtcccttgagtttcagataaggatgctgaggttgagagaggacatggctgtccaaggtcacatagctagtgctgggcagagctggggccagggcctggaccagtcatgtagatgttcaggtgaggtgtgtgctgatgccccttcaaacaggctttgctaaaaatatgttccactctctgtccatgggattggagttggtgcttaaggggagtgtatgggaggattcctaccaaccctgtgtattttagtggaagtggggaccaagacactgaagaagccaagtgtagagacccaagttttgggcaccatatgacttatttgttgcactttttttttttgagacagtgtctcgctctgtcactcaggctggagtacagtggtgtg

SEQ ID NO: 325061 - DNA, 577 bp, Homo sapiens
acatggctgtccaaggtcacatagctagtgctgggcagagctggggccagggcctggaccagtcatgtagatgttcaggtgaggtgtgtgctgatgccccttcaaacaggctttgctaaaaatatgttccactctctgtccatgggattggagttggtgcttaaggggagtgtatgggaggattcctaccaaccctgtgtattttagtggaagtggggaccaagacactgaagaagccaagtgtagagacccaagttttgggcaccatatgacttatttgttgcactttttttttttgagacagtgtctcgctctgtcactcaggctggagtacagtggygtgaacttggctcactgcaacctctgcctcccagacttaagtggttctcctgcctcagcctcccgagtagctgggactacaggcatgcgccaccacgcacggctaatttttgtattttttggtagagatggggtttcaccatgttggccaggctggtcttgaactcctgacctcaggggatctaccttccttggcctcccaaagtgttgggattacaggcgtgagtgccacaggcat

SEQ ID NO: 325062 - DNA, 585 bp, Homo sapiens
tgagtgtggctttagtcccttgcctacctcttggcaaacttctgtgacaggagagcaacatatattatttatccagcccagatcatgggtctcctcaatgtagtcagggtaatgggaaccactgccacctcaggttcattttcattggtagtaactttattttgtcccttaaattagctacatgggtagaaacaccctatcttattataagtttggtactgtttgtgttcagtagccagagaaaaatcagggctgtgagctagtgtgggagaatgtgtttgagtgatgtgagagtattcgtgtgtgtgaagccaagagaaaggaacaaatataatagrgaaaaaggagggaaggggtgagagagtgagagtagaatgaaatggtagaaggaggtgctaaccagtgacgaaggaatagcaaggagaaactgcagcacagcaaaggaataaagaatgatagatcaaactgaataagagaatcgtggcaaaaataagacaaaaggtagacaaaaaaagtttgaaatgaagataaattccaggtagggatgctccaaactgatttttcactctgcagcttggtgaaaac

SEQ ID NO: 325063 - DNA, 597 bp, Homo sapiens
catgatgttgcctaggctggcctcgagctcctgagcttaagggatccacctgcctcagcctcccaaagtgtaaaatatattttcataatcaatcaaaagccataatttccaattatcaaggaagtaataaaattatttaaaaatataagcagattcaaagttgtgtgtgtgtctgtgtgtgtatgtatgtatttccactatggtctgtggaaaagtaatttgttaattttcaagaagaatgaattctcacccccatttcagattggatttaacaacaaatatctgcttgtttctaataaagagctgtaaggacaggaaaaataactcactgagggaaagtcaacacatcttagctcaaaccccatctccccagtgttctatatggctgaaaccaggttaaaataaacactaagcacagtctataaaaggggagacaaatgygtaaaatagtctggcaaaaccatgtgccagatgtcttctgtttacttgtctagatccattctctacccaaatctactcatttctactctttttttctcagagaagatgaccaaaaaggactacttcacagggctcccatgtgctcagcttgcaatt

SEQ ID NO: 325064 - DNA, 606 bp, Homo sapiens
gaatatacatagctcctcctgtaacttgttaaatatgtatccttagccaactcattcagcataaatctcctaccccaatcttcctctatttgaagtgcctttttctgggctttggttggagcctgtgcttcctggcttgcgggataacaatcttgcaggttgtaaccatttataaaaactgaagtctcctttccaaacttagtgtgatttttaagctaacacatatattaaatacatgtatgtaaatatatgcaatagatccaaaaattattctcttctttatgcagttaataaaatcacatgaaaggagtggccaaaatggctgactagaggcagctagtgtgcatgactctcaaaaggaggaatgaaaggggcaagtaaatacagcaccttcaactggaacatccaggttctcacattgggactaatcaaggaaacaacttgacctccagtaaatggagaaaagcaaggcaggacaacaacccagccaggactgacagggagccaagggaaccactcccatccggggatgctgtgagtgaacacgtgaccctaggaacccatgcttctsccatgaatctttgcatccctcaggtccaagatccc

SEQ ID NO: 325065 - DNA, 510 bp, Homo sapiens
caaatggaaaaacattccatgttctttgataggaagaatcaacattgttaaaatggtcatactgcccaaagcaattaatagattcaatgctattcctattaaactaccattaagattttttacagaactagagaaaaactattttaaaattcagttggaaccaaaaaggagcccaaatagccaaggcaatcctaagcaaaaagaacaaagctggaggcatcatgttgcccttcttcaaactatgctatagggctaaccaaaacagtatggtgctggtactacaacacacacatagaccagtggaacaaaatagagaacacagaattaagactgcacatatacaattgtgtgattgtcaacaaatcttgcaaaaataagcaatggggaagcattctgtattcaataaattgtgctgggataactggctagccatayccagacgattaaaattagaccccttccgtacaccatatacaaaaattaactcaaggtggattaaagacttaaatg

SEQ ID NO: 325066 - DNA, 535 bp, Homo sapiens
gggagctctgtgcaaatgcagaattgctgtgcagactttatacctactgagttagaatgtgcatgctaaaaagattcccaggtgatttgtatgcatactaaattttgaatagcattcattgatactttcacagagaattatatccgtatcaaatctttacaacactgccttttgccagttcatattattaatcttttttcctacgcatatccctaacttggtggcacaaaggtcccagaatgcctgacacctttcttcgcaggctctcatatatcaaaatagtagaaataatcctcatgcaaagtgacacttggtgacaagttagtttgttcataggattataaatacgtatcaattcctttttctagataaattttaattcaactctgttattttacttattactcrtttccattttactcattttcttttgctttgtgtaagattattttatagtgtatgcagatataaatttagaaggattatttccattttagtcattttcttttgctttgtgtttaattattttatagtg

SEQ ID NO: 325067 - DNA, 382 bp, Homo sapiens
ttgtacaatttatggttcctcaataaagctgaaaaaaatataaatagtactgtttgtgtggatagatcccattctaaatcatactttartctgagttcaagggaagcagcaagaaagggaatatcaaatgcttcatatatgctaggcaagtgaaatgagaagaaaatggattagataatagtcatcttaaagtaaagtaattaaagggaattcctttcaatataagctatacttagctatccataaaactgggctgcataaacagggatggaagggcatgatgtgaacttttcaagccactcattgagtcatctctcatgactcatggaagttccctaaaaatatatattttccatgaattgcttaggcttttagaaatcat

SEQ ID NO: 325068 - DNA, 629 bp, Homo sapiens
tacagtaatgttattttcgtattggatgacgattacaaaaactgttctcttgacataatgtggtttggggtgtttagcagttaaagaaatactggctttaacttccgtgtttccttactggtttccyaaagctctacgaagctacattgccctgtggaaagagattgaactacgaagttaggaaaatctagatttgaatttatgctctgccctttataatctgagcaaagcttggcgagctcttcatcacttctcagcctgtgtttcctcttctattaaatgaagacaataccttgtagtagggtttcttaaccactattgacattttgggctggataattctttatcataagggctattctgtagtttataaggttttggcagcatccctagcctcgccccactggatgccagtagttcctctctagttatgacaaacaaacatgtttctagacattgccaaatataccctcaggggtaaaatttcccctggttgacaactcctgccttacgggatgtgaggattaaatatgatatttgtgaagtgcttaatatgtggaaataactacttatgctctcttggatatcatatccacctctgatttgaatttgtattttgaatgctgaga

SEQ ID NO: 325069 - DNA, 595 bp, Homo sapiens
aggggcagcaagttcccaagagtcaataaaaaaatagaaaattttaaaaatgatatatattaaattaaaataataattaaaattttaataatattaaaattaatgtcataacaccatccatatatcctcctaaagaatgttaaaatacctctaatatgttatattagccatggtttacctcactgcagctgccacagtttcgagtatgacaaatctactattctaatttgacgaactkctggaatatgtcataataacatacaaagcaagaaatgacttctatttaatctgggtgaagataaattctgagaaaaggagaagacacaaaagctcatggaggagaatattaattattacacaaaataattacctgtgaattctctactgaataaagtaaataaggcacaaagcactgttgaaaacatctgtctcagactgaatctgggtaggtaaatagcacagttaaagctaatttttaaaatgaaaaacaaaaaaagacaaatgaagtttaaagataaattttcttaagtaaaaaactctataggcttccaatacctagtaatgttctaaatgtcaaatagatacttgaataatt

SEQ ID NO: 325070 - DNA, 595 bp, Homo sapiens
aggggcagcaagttcccaagagtcaataaaaaaatagaaaattttaaaaatgatatatattaaattaaaataataattaaaattttaataatattaaaattaatgtcataacaccatccatatatcctcctaaagaatgttaaaatacctctaatatgttatattagccatggtttacctcactgcagctgccacagtttcgagtatgacaaatctactattctaatttgacgaacttctggaatatgtcataataacatacaaagcaagaaatgacttctatttaatctgggtgaagataaattctgagaaaaggagaagacacaaaagctcatggaggasaatattaattattacacaaaataattacctgtgaattctctactgaataaagtaaataaggcacaaagcactgttgaaaacatctgtctcagactgaatctgggtaggtaaatagcacagttaaagctaatttttaaaatgaaaaacaaaaaaagacaaatgaagtttaaagataaattttcttaagtaaaaaactctataggcttccaatacctagtaatgttctaaatgtcaaatagatacttgaataatt

SEQ ID NO: 325071 - DNA, 656 bp, Homo sapiens
  misc_feature (1)...(656): n = A,T,C or G
nnnnnnnnnnnnnnnnnnnnnnnnnnnnnnnnnnnnnnnnnnngaattctggagtctcatactgcacagattttgaacatgtgtactacaaatcaaagacacacatgtctctacacatactaaagctacaatgtaagtccccacaaacatgctcctttccccttcagaattggtcattattattttgagtaatgttattcgaattacataattcctctttaggcattattaaaatgaatggtcaaagcattcagtttattacttaaaatacataatgctgggcttttgaacaagatgttcaatggaacttctggcttctttatcaacctgaggctacaggcctcatagaatatcccaatgatttatctaaacagtttcaaatgcaagtaaatgaagcaagcwatttcaatcatcacttaaacatcaaaagtaaattataataaagcattttactctaattttgatgattgacttctgatatctttcaatccccatttcccctttctttcccacagctgggaatgctgataagaaagcctgcatgctctcttatttggtgacggtaggaagctgaaacctggctcttgtgaggcaccctttagcgcactttatcccttcaccactataaaaccccaagccagtcactcctctctgat

SEQ ID NO: 325072 - DNA, 552 bp, Homo sapiens
aaaaataaaataacccaaaacctcttacacaaaatgtttgatgtatgtggcctactccccaatttttaaatactgggtatttctatttcatttttcaaaaatatgactgccatacagaaccaattctgcattgtttaaggtaataagagatgaaagtgttgctctgtagatggtatgcggaactacctatggtgtcatgcattattctatcagacatgaagtgcctgggtacaatgatcatggggactaacaagtctttggtttttatttataagtacaattaacactatgggttatcttctagcctgttttgttcatgaattaatcaattcctcctttgccackgtcacaccatgtcagccaacatgatatgctaaatgttggagctatctactaggctagtgtcacttttccatttctgcatttcaatgtcttaatgatcggtgaaattacatcttcattttaagctcccttgttattgaaaacacaagactttctattaattgaagcaaaataagagctaaataacctatttagcactttcagactaac

SEQ ID NO: 325073 - DNA, 571 bp, Homo sapiens
ctggttcaaccaaccaggaagttgctccaggaagccaggaatggtggatgactccctgcactgaaaaaatcgggctgggtttatgaatgatgctagggacactgcactgtagttttattccaagcaagggagaaaaactggcccatcctgcrtatccttaacaggctcaggggtgttaaaattacacctttggccgggcacagtggctcacgcctgtaatcccagcactttgggaggccaaggtgggtggatcacaaggtcaggagatcgagaccatcctggctaacatggtgaaaccccatctctactaaaaatacaaaaaaaaaaaaaaaaaaaaattagccaggcatggtggcgggtgcctgtagtcccagctactggggaggctgaggcaggagaatggcgtgaacccaggaggcggagcttgcagtgagccaagatctcatgccactgcactccagcctgggcaactaagcaagactccgtctcaaaaaaaaaaaaaaaattacacctttatatatcacaacgatgacataaaatggcttttaggcccacaatcttattagtgaag

SEQ ID NO: 325074 - DNA, 561 bp, Homo sapiens
ctccatgttaccctcttcttagaacctacataaatctgaatgggaacaatgccagacctcaacaaagacaattgtcaatatgcatactggatataaaagtttgtatttatggcacagggggatagatggaaamggtgattggggtgctctggatagcctagctttgggaatatgtatattgacacaataagtatatatgtcgagtaactttattaatggtttcagagaatgaccagatgaaggctactgcaatcttggtcacccttcacagttaagcatggacatggttatacaggagagtgggtttttacattacagaaaaaaaaaatcttgtggtacaagggagggattttcttcctggccttctccaatgaccaagactataaagctcattaatgtgtttcattcattagattttttttaccaaatttgcagctgctccacaatttattaaaagaatgtgcttgactagctctacaaggtatatgttattgtctcaaaagaactgtattactaaaaataaacaacttattatgaatcatatatgcagggccatttcta

SEQ ID NO: 325075 - DNA, 588 bp, Homo sapiens
gaacatgtacagactttttcatgtcattattccctaaacattgcactataacaattatttacatagtatttatactgtattaggtattataattaatctaaaggggatttaaagtatacagaaagatgtccataggttatatagcaatacaacatctttttatatcagagacttcagcttccatggattttggtacctgagagaggtcctgagaccagtccccacaagataccactgggagactscatataccaggatagtttttcaccagaagcaatttatcaggaaaagagatacagcatattgccataaaatttgaaaagtaatggtgcaaaggaagccatgtaaaaattctgacatgtttgtgtactgattcagtcctttccaagaaaatacgtaggagggcagaaaatgtgttcagaaaattctgagaatgtccagcagcactcacaaatgcaggacatggcacactgaagtaatatctagaaaaagttaggaaggaaatcattaaagtggggtttcagttaaagcagaaaaacattccaggagacagtttcatctattttgtctattcaggatgaaagaaat

SEQ ID NO: 325076 - DNA, 559 bp, Homo sapiens
acactcactatgattggtaatagatttcttgaacttattccttttatctaactgaaattttgtaatctttgaccaatagctccccaactccattccctgataatcaccagtttactctctgtttatatgattttggcttattttagattccacataattaagatcatgtggtatttgtcttcctgtgtctagtttatttcactggcaaaaggtcttccaaattcatccatgttgtcacaaattacaaaattttcttttttaagactgatagtattttattgtgtgtatgtaacacattttctttttctattcatccattgatgtgcacttagattgtttccaaatcttgcctattataaatartgctgcagtgaacatgggtgccaggttgcaacccaagctggggtccgaaggaagctgctggatgggtgtcgggtagctgaaagaacagtcaagggactgtaggcagttgggacatggatttattctttcttcccctacaaagtcagcagtacagttatagttttcgcagacaacggtggctcaaagccaggtatga

SEQ ID NO: 325077 - DNA, 593 bp, Homo sapiens
catatcgtggtccaggcagcagtagcaccccagctggacccatctgtatatcatgmcccattgggaactggggggcccccttctttaaatgataatgactcagggtttaagggggcctcaggcagacccatgccttatcttgcattaggactacaggtcctaagacttcttgtaattctgctgctaaggggcttgtactcagggtacaatgctcttataagtaggtgccccattttgctaaggtggatgtctttgccgtcccagtctgtggagttgttatctatgaaggtatccaccccattattgggtaagttgtccacatgacaaatatagcccatcccatcaggctctcacaagcctggagtgtggcatatgtagctgctaattgcttttctattaatgaataccagatcacagctcccttccaaagttgggaccaaaagctcaactttgttctaaagtgcttcatgcaccgccataggcccagccaaaaccatctgtggtcacatgcacatcaagttcaaatgggcaccccaggtcaattactcgtagggcttgtgcttgctgtatggctttcttggctgctagaaaag

SEQ ID NO: 325078 - DNA, 564 bp, Homo sapiens
tgccttatcttgcattaggactacaggtcctaagacttcttgtaattctgctgctaaggggcttgtactcagggtacaatgctcttataagtaggtgccccattttgctaaggtggatgtctttgccgtcccagtctgtggagttgttatctatgaaggtatccaccccattattgggtaagttgtccacrtgacaaatatagcccatcccatcaggctctcacaagcctggagtgtggcatatgtagctgctaattgcttttctattaatgaataccagatcacagctcccttccaaagttgggaccaaaagctcaactttgttctaaagtgcttcatgcaccgccataggcccagccaaaaccatctgtggtcacatgcacatcaagttcaaatgggcaccccaggtcaattactcgtagggcttgtgcttgctgtatggctttcttggctgctagaaaagccatctcagcctcatcgttctaatcccaggtagttcctttttttgtcaactgataaaatggttatatcacctaagccaaatgggacgtgaatcaaatgcct

SEQ ID NO: 325079 - DNA, 564 bp, Homo sapiens
tgccttatcttgcattaggactacaggtcctaagacttcttgtaattctgctgctaaggggcttgtactcagggtacaatgctcttataagtaggtgccccattttgctaaggtggatgtctttgccgtcccagtctgtggagttgttatctatgaaggtatccaccccattattgggtaagttgtccacatgacaaatatagcccatcccatcaggctctcacaagcctggagtgtggcatatgtagctgctaattgcttttctattaatgaataccrgatcacagctcccttccaaagttgggaccaaaagctcaactttgttctaaagtgcttcatgcaccgccataggcccagccaaaaccatctgtggtcacatgcacatcaagttcaaatgggcaccccaggtcaattactcgtagggcttgtgcttgctgtatggctttcttggctgctagaaaagccatctcagcctcatcgttctaatcccaggtagttcctttttttgtcaactgataaaatggttatatcacctaagccaaatgggacgtgaatcaaatgcct

SEQ ID NO: 325080 - DNA, 593 bp, Homo sapiens
catatcgtggtccaggcagcagtagcaccccagctggacccatctgtatatcatgacccattgggaactggggggcccccttctttaaatgataatgactcagggtttaagggggcctcaggcagacccatgccttatcttgcattaggactacaggtcctaagacttcttgtaattctgctgctaaggggcttgtactcagggtacaatgctcttataagtaggtgccccattttgctaaggtggatgtctttgccgtcccagtctgtggagttgttatctatgaaggtatccaccccattattgggtaagttgtccacatgacaaatatagcccatcccatcaggctctcacaagcctggagtgtggcatatgtagctgctaattgcttttctattaatgaataccagatcacagctcccttccaaagttgggaccaaaagctcaactttgttctaaagtgcttcatgcacygccataggcccagccaaaaccatctgtggtcacatgcacatcaagttcaaatgggcaccccaggtcaattactcgtagggcttgtgcttgctgtatggctttcttggctgctagaaaag

SEQ ID NO: 325081 - DNA, 447 bp, Homo sapiens
atattaaatataaatcagacaaaaggaagtggtcatatgatacagtcaccctttgaccaaatccattgtgttcatactaccttagcttttctctgttaaaattaatgttattaatatgacctgaactaaacaaaatatttgtaagagtttatactcactkcagtctcagtacatataaagaaaaacaaatactatcttaactaaaatttaataaaagtcattagcttttaccaatgtcagcaagaagtaaaaaagaaaaaaatcatgagataaaaggacactgagaaacaaaaatttcataaatatcttgatcaggtagtgattcctttcacttacagccaattcaataatagcagtgttgacattctttttataaatttaagacaaagattatccatttgattagaatatgtatgctaatcaaatgtattcaagaatatattcttg

SEQ ID NO: 325082 - DNA, 447 bp, Homo sapiens
atattaaatataaatcagacaaaaggaagtggtcatatgatacagtcaccctttgaccaaatccattgtgttcatactaccttagcttttctctgttaaaattaatgttattaatatgacctgaactaaacaaaatatttgtaagagtttatactcactgcagtctcagtacatataaagaaaaacaaatactatcttaactaaaatttaataaaagkcattagcttttaccaatgtcagcaagaagtaaaaaagaaaaaaatcatgagataaaaggacactgagaaacaaaaatttcataaatatcttgatcaggtagtgattcctttcacttacagccaattcaataatagcagtgttgacattctttttataaatttaagacaaagattatccatttgattagaatatgtatgctaatcaaatgtattcaagaatatattcttg

SEQ ID NO: 325083 - DNA, 549 bp, Homo sapiens
ttaacaaaatagagccttctgatgtaccttcagaacaaaaaataataatgataaaatagagcctcatgtacaagtttaaatatgtttctttcttactcttaaatatgataatgcagccaggcgtggtggctcatgcctgtaatcccagcactttgggaggccraggtggatggatcacgagttcacgagttcaagaccagcctgaccaacatggtgaaactggtctcgactaaaaatacaaaaattatctgggcatggtagcacatgcctgtaatcccagctactcaggaggctgaggtatgagaatagcttgaacccaggaggcagaggttgtagtgagctgagatcgctccactgcactccagcctgggtgacagagcaagacacctctcaaaaaaaaaagtatataataatgcatgtgatttccaccaataacacctttctaactttcaactgaagcatcatgaaagaaagagagaaaataattttaagtctgagtgaggaagttactatcaagtcaattcaaatacatcatacagattgaatatt

SEQ ID NO: 325084 - DNA, 549 bp, Homo sapiens
ttaacaaaatagagccttctgatgtaccttcagaacaaaaaataataatgataaaatagagcctcatgtacaagtttaaatatgtttctttcttactcttaaatatgataatgcagccaggcgtggtggctcatgcctgtaatcccagcactttgggaggccaaggtggatggatcacgagttcacgagttcaagaccagcctgaccaacatggtgaaactggtctcgactaaaaatacaaaaattatctgggcatggtagcacatgcctgtaatcccagctactcaggaggctgaggtatgagaatagcttgaacccaggaggcagaggttgtagtgagctgagatcgctccactgcactccagcctgggtgacagagcaagacacctctcaaaaaaaaawgtatataataatgcatgtgatttccaccaataacacctttctaactttcaactgaagcatcatgaaagaaagagagaaaataattttaagtctgagtgaggaagttactatcaagtcaattcaaatacatcatacagattgaatatt

SEQ ID NO: 325085 - DNA, 529 bp, Homo sapiens
gctacctggtactaatttactatattagtctgttctcatgctgctaataaagatatacctgaggctaggtaatttgtaaaggaaagaggtttaattgactcaattccacatggctgagaggcatcacaatcatggcagaagagcaagggacatcttacatggcagcaggcaaggagagcttgtcaaggggaactcrtctttataaaaccatcagatctcatgagacttattggctatcatgagaacagcataggaaagaccctcctccataattcaattacctcccactgtgtccttccgacaacatgtagaaatggtgggagctacaattcaaaatgagacttgggtggggataaaatcaaaccatatatggtgtcatactgatgtttaaaaagttttggatttaggattattttgtatttcagattttcatattagtgatgcccaacttgtataaattaatcctcattacaaattgaaaaataatttcatgtattttgtatagtagatgttgcatctgggattaatg

SEQ ID NO: 325086 - DNA, 529 bp, Homo sapiens
gctacctggtactaatttactatattagtctgttctcatgctgctaataaagatatacctgaggctaggtaatttgtaaaggaaagaggtttaattgactcaattccacatggctgagaggcatcacaatcatggcagaagagcaagggacatcttacatggcagcaggcaaggagagcttgtcaaggggaactcgtctttataaaaccatcagatctcatgagacttattggctatcatgagaacagcataggaaagaccctcctccataattcaattacctcccactgtgtccttcygacaacatgtagaaatggtgggagctacaattcaaaatgagacttgggtggggataaaatcaaaccatatatggtgtcatactgatgtttaaaaagttttggatttaggattattttgtatttcagattttcatattagtgatgcccaacttgtataaattaatcctcattacaaattgaaaaataatttcatgtattttgtatagtagatgttgcatctgggattaatg

SEQ ID NO: 325087 - DNA, 566 bp, Homo sapiens
ttcttcaggctaggtaatacgaaaaagctgaaatacttctcaaattctggttttatttcaatatgtagattaaaacctaggctttggaatttatattgtatatattacatatgtaattttaaagtattagtgtgtgtacacatatatatacacacacatgttggtatgtatagattacattcgtgtatatatatataaaataaacatacacatataatttatatatctacctgcatatttatgttgattggtaaagaaatctgaggtgattgaatattagatttaatttaatatgtatttactgacatagaaacatttatgtttattaggaaaagaaacactgtttgattatataatccttatatattgtgttctctcatattgtagtatatatttctctaagattctcttgttggtaatgctgacacattgtctaccaagaggtttggtaattggaagagcatttgttgcagaaytcttacattaaattaagaaactataataaaattgtaaagaaactataataaaattctaataagttctctttcactacttaactacattga

SEQ ID NO: 325088 - DNA, 530 bp, Homo sapiens
tccccagagttaacatcataaaaacaagcaaaaayaagctacctttgcatttcttttttggaactgaatttaagaaactttttatttatttatttatttatttatttatttatttatttattttttattttttgagaaggagtctcgctccatcgcccaggttggagtgcagtggcgccttctcggctcactgcaagctctgcctcccgggtttacgccattctcctgcctcagcctcccgagtagctgcgactacaggcgcccgccaccacacccagctaattttttgtatttttagtacagacggggtttcaccgtgttagccaggatggtcttgatttcctgactttgtgatccacccacctcggcctcccaaagaatttaagaaacatttaaagcagatagataaacactgggttccatctcatccaaaggaagagtagtgataaagtgaaaaagttgcaattagcattacaagatattgcaaagtttcccagttctccttcgaaggtaacaaataaaataaaaac

SEQ ID NO: 325089 - DNA, 530 bp, Homo sapiens
tccccagagttaacatcataaaaacaagcaaaaacaagctacctttgcatttcttttttggaactgaatttaagaaactttttatttatttatttatttatttatttatttatttatttattttttattttttgagaaggagtctcgctccatcgcccaggttggagtgcagtggcgccttctcggctcactgcaagctctgcctcccgggtttacgccattctcctgcctcagcctcccgagtagctgcgactacaggcgcccgccaccacrcccagctaattttttgtatttttagtacagacggggtttcaccgtgttagccaggatggtcttgatttcctgactttgtgatccacccacctcggcctcccaaagaatttaagaaacatttaaagcagatagataaacactgggttccatctcatccaaaggaagagtagtgataaagtgaaaaagttgcaattagcattacaagatattgcaaagtttcccagttctccttcgaaggtaacaaataaaataaaaac

SEQ ID NO: 325090 - DNA, 530 bp, Homo sapiens
tccccagagttaacatcataaaaacaagcaaaaacaagctacctttgcatttcttttttggaactgaatttaagaaactttttatttatttatttatttatttatttatttatttatttattttttattttttgagaaggagtctcgctccatcgcccaggttggagtgcagtggcgccttctcggctcactgcaagctctgcctcccgggtttacgccattctcctgcctcagcctcccgagtagctgcgactacaggcgcccgccaccacacccrgctaattttttgtatttttagtacagacggggtttcaccgtgttagccaggatggtcttgatttcctgactttgtgatccacccacctcggcctcccaaagaatttaagaaacatttaaagcagatagataaacactgggttccatctcatccaaaggaagagtagtgataaagtgaaaaagttgcaattagcattacaagatattgcaaagtttcccagttctccttcgaaggtaacaaataaaataaaaac

SEQ ID NO: 325091 - DNA, 530 bp, Homo sapiens
tccccagagttaacatcataaaaacaagcaaaaacaagctacctttgcatttcttttttggaactgaatttaagaaactttttatttatttatttatttatttatttatttatttatttattttttattttttgagaaggagtctcgctccatcgcccaggttggagtgcagtggcgccttctcggctcactgcaagctctgcctcccgggtttacgccattctcctgcctcagcctcccgagtagctgcgactacaggcgcccgccaccacacccagctaattttttgtatttttagtacagacggggtttcaccgtgttagccaggatggtcttgatttcctgactttgtgatccacccacctcggcctcccaaagaatttaagaaacatttaaagcagatagataaacaytgggttccatctcatccaaaggaagagtagtgataaagtgaaaaagttgcaattagcattacaagatattgcaaagtttcccagttctccttcgaaggtaacaaataaaataaaaac

SEQ ID NO: 325092 - DNA, 498 bp, Homo sapiens
aacaaaacaccacacctatagccatctgacctttgatgaagtcaataaaaataaacaatggggaaagaactctctattcaataagtggtgctgggcatggtggtgcacacctgtaatacaaggtactcagaagtcaggagaattgcttgaacccaggaggccaaggttgcagagagccaaaatagcactactgcactgtggcctgggtgacagagcaagactccatctcaaaaaaaaaaaaaaaaaaaaaaaaaaaaaggagcaaaagacctgaacagtcacttctcaaaaraaaacatacaagtggccaagaaacatataaaaaatactccatatcactaatcattggataagtgcaaatcaaaactacaaggagatatcatctcataccaggcagaatggatactattaaaaagtcaaaaaacaacagatgcaggcaagactgcagagaaaggggaacatttatataccgttgttggaaatgtaaattagttcaac

SEQ ID NO: 325093 - DNA, 626 bp, Homo sapiens
tcatctcataccaggcagaatggatactattaaaaagtcaaaaaacaacagatgcaggcaagactgcagagaaaggggaacatttatataccgttgttggaaatgtaaattagttcaaccagtgtggaaagcagtttgaaaattttaaagaacttaaaactaccattctacccagcaatcacatcactgggtatatatttaaaacaaatatatatacccagygaaaatataaaataaatcattctgccaaaaagacacatacactgatatgttcactattcacaatagcaaagacatagaatcatcctaggtgcccaccaatgacggattggctaaagaaaatgtggtacatatattgtatggaatactacacagccataaaaaagaacaaaatcatgttattcacagtaacattgatgcagctggaggccattgcactaagtgaattaacacagggacagacaatcaaatactgcatattctcacttataagtgagaactatacattgagtacacatggacattaagatgggaacagcagatactggggactactggagaggggagggagggagaaggtaagggttgaaaaactaactattgggtgctatgctcagcacctggga

SEQ ID NO: 325094 - DNA, 626 bp, Homo sapiens
tcatctcataccaggcagaatggatactattaaaaagtcaaaaaacaacagatgcaggcaagactgcagagaaaggggaacatttatataccgttgttggaaatgtaaattagttcaaccagtgtggaaagcagtttgaaaattttaaagaacttaaaactaccattctacccagcaatcacatcactgggtatatatttaaaacaaatatatatacccagcgaaaatataaaataaatcattctgccaaaaagacacatacactgatatgttcactattcacaatagcaaagacatagaatcatcctaggtgcccaccaatgacggattggctaaagaaaatgtggtacatataytgtatggaatactacacagccataaaaaagaacaaaatcatgttattcacagtaacattgatgcagctggaggccattgcactaagtgaattaacacagggacagacaatcaaatactgcatattctcacttataagtgagaactatacattgagtacacatggacattaagatgggaacagcagatactggggactactggagaggggagggagggagaaggtaagggttgaaaaactaactattgggtgctatgctcagcacctggga

SEQ ID NO: 325095 - DNA, 626 bp, Homo sapiens
tcatctcataccaggcagaatggatactattaaaaagtcaaaaaacaacagatgcaggcaagactgcagagaaaggggaacatttatataccgttgttggaaatgtaaattagttcaaccagtgtggaaagcagtttgaaaattttaaagaacttaaaactaccattctacccagcaatcacatcactgggtatatatttaaaacaaatatatatacccagcgaaaatataaaataaatcattctgccaaaaagacacatacactgatatgttcactattcacaatagcaaagacatagaatcatcctaggtgcccaccaatgacggattggctaaagaaaatgtggtacatatattgtatggaatactacacagccataaaaaagaacaaaatcatgytattcacagtaacattgatgcagctggaggccattgcactaagtgaattaacacagggacagacaatcaaatactgcatattctcacttataagtgagaactatacattgagtacacatggacattaagatgggaacagcagatactggggactactggagaggggagggagggagaaggtaagggttgaaaaactaactattgggtgctatgctcagcacctggga

SEQ ID NO: 325096 - DNA, 626 bp, Homo sapiens
tcatctcataccaggcagaatggatactattaaaaagtcaaaaaacaacagatgcaggcaagactgcagagaaaggggaacatttatataccgttgttggaaatgtaaattagttcaaccagtgtggaaagcagtttgaaaattttaaagaacttaaaactaccattctacccagcaatcacatcactgggtatatatttaaaacaaatatatatacccagcgaaaatataaaataaatcattctgccaaaaagacacatacactgatatgttcactattcacaatagcaaagacatagaatcatcctaggtgcccaccaatgacggattggctaaagaaaatgtggtacatatattgtatggaatactacacagccataaaaaagaacaaaatcatgttattcacagtaacattgatgcagctggaggccattgcactaagtgaattaacacagggacagacaatcaaatactgcatattytcacttataagtgagaactatacattgagtacacatggacattaagatgggaacagcagatactggggactactggagaggggagggagggagaaggtaagggttgaaaaactaactattgggtgctatgctcagcacctggga

SEQ ID NO: 325097 - DNA, 630 bp, Homo sapiens
ttattataagaacatttcccatcggaaaacatatcttcttaaaatttatttcaattcagttttccatctagtttattatgggaacatgttcccatcagaagacatctctttttttttttaaataggaacatataaatttagatcctccctggaagaccattaagtacagaaataataagatgctaagtataattactttattaagcatcttaatgtatctgcgtgaagactatgtatttgaaactcacaagcggatcccttaacatgccaatcatgtttatgaattcacrtcattcactgaccattgttaaattgagcttgtgctctcttattaaaatatccatatttaaagtataaatcagtgttcaatatgttgctcaagcaaaggcattccataacatgatgcaaagttcattgtgcaactttccagagcacaaaaagattgaagaagtattaacgaaagatcaattcagagttcatctgtgaaatggaacacacaaaaatgtcatctccatgaaaacaaaatgaattttaagaagcataagacatcatttacttttattaatagctaaaataaattaaaattctatttattgtacatatttttaaggatagcagatgaaaagaaca

SEQ ID NO: 325098 - DNA, 630 bp, Homo sapiens
ttattataagaacatttcccatcggaaaacatatcttcttaaaatttatttcaattcagttttccatctagtttattatgggaacatgttcccatcagaagacatctctttttttttttaaataggaacatataaatttagatcctccctggaagaccattaagtacagaaataataagatgctaagtataattactttattaagcatcttaatgtatctgcgtgaagactatgtatttgaaactcacaagcggatcccttaacatgccaatcatgtttatgaattcacgtcattcactgaccattgttaaattgagcttgtgctctcttattaaaatatcsatatttaaagtataaatcagtgttcaatatgttgctcaagcaaaggcattccataacatgatgcaaagttcattgtgcaactttccagagcacaaaaagattgaagaagtattaacgaaagatcaattcagagttcatctgtgaaatggaacacacaaaaatgtcatctccatgaaaacaaaatgaattttaagaagcataagacatcatttacttttattaatagctaaaataaattaaaattctatttattgtacatatttttaaggatagcagatgaaaagaaca

SEQ ID NO: 325099 - DNA, 498 bp, Homo sapiens
ggtttaattctctcgtggacctcatctcagaaaggcttggataagcatgcttccattttccagttttctaggtagaacttttcataaactccatttacttaacgataaatagttgagagaaataactaaatgaagcatttttgacttgaaaatgtgaatgcagggtttaggggaattcacacgttaagaatgatctaatgaatatttactgatgggggcctatggyaatctggaaaaataatgagtataattcatatctgacctgcttctgcccaaagtagtataaataattgatctgtaattggcattgtcacaatcttttttcacattcctttcaaagcttttcatgaatacatatggataacttagagcaaattgtgcttttataataatacagcttacccaaattgcatgttagttacaattgttacctataattagaagagtcaagaaaatgcattttaaaattctctcagaaaattttaaaatgtatctggt

SEQ ID NO: 325100 - DNA, 431 bp, Homo sapiens
tatgcacacacacatatatacatacacatgatatatatgaaattatatatctcatatatatccatttgcttataaaatatamatgttttatgtatcatatttgatatataatacatcatttattcatgagatatatataatatgtatgcttatgaggtttatattatatataacatagtatataacatatatattgtaatatatatgtaaataacgtaagtaaacagattcaccatacttacagccctaggtctccactgcaatgctgatatggtttagctctgtttccctacccaaacctcgtgtcaaattgtaatccctaatattggaggagagttcaagtgggagatgattgctgttctcatgatagtgagtgagttctcacaagatctggttgtttaaaagtgtttaacacttcaccctttgctctc

SEQ ID NO: 325101 - DNA, 431 bp, Homo sapiens
tatgcacacacacatatatacatacacatgatatatatgaaattatatatctcatatatatccatttgcttataaaatataaatgttttatrtatcatatttgatatataatacatcatttattcatgagatatatataatatgtatgcttatgaggtttatattatatataacatagtatataacatatatattgtaatatatatgtaaataacgtaagtaaacagattcaccatacttacagccctaggtctccactgcaatgctgatatggtttagctctgtttccctacccaaacctcgtgtcaaattgtaatccctaatattggaggagagttcaagtgggagatgattgctgttctcatgatagtgagtgagttctcacaagatctggttgtttaaaagtgtttaacacttcaccctttgctctc

SEQ ID NO: 325102 - DNA, 431 bp, Homo sapiens
tatgcacacacacatatatacatacacatgatatatatgaaattatatatctcatatatatccatttgcttataaaatataaatgttttatgtatcatatttgatatataatacatcatttattcatgagatatatataatatgtatgcttatgagrtttatattatatataacatagtatataacatatatattgtaatatatatgtaaataacgtaagtaaacagattcaccatacttacagccctaggtctccactgcaatgctgatatggtttagctctgtttccctacccaaacctcgtgtcaaattgtaatccctaatattggaggagagttcaagtgggagatgattgctgttctcatgatagtgagtgagttctcacaagatctggttgtttaaaagtgtttaacacttcaccctttgctctc

SEQ ID NO: 325103 - DNA, 615 bp, Homo sapiens
aacccaagaaaagacaacaaagccagagcgattacacgatttgactttaaactatactgcaaggctaccgtaactaaaacagcatggtactagtacaaaaacagacacatagactaatagaacctgttagagaacccagaaacaaatccacacacctgatcttcaacaaagttggaaaatgtaagcaatggtgaaaggactccctattcaataaatggtgctgggataactggctagccatatgcagaagattgaaaatggactcattcctttcctcatatacaaaaatcaactaaagataarttaaagacttaaatgtaaaacctaaaattagaaaaaaacccaaaagaaaaaacctagaccatactattctgaacatgaaaatatttcatgacaaagatccaaaagtgttaaaagaaatcacaaattgacaaataggtactaattaaataaaagagcttctgcacagcaaaagaaactatcaacaaagtaaacagacaacctaaagaatgggagacaatatttgcaaactatgcatctgacaaaggcataatatccagaatctatagggaacttaaattagcaagcaaaaaccaaacaatttcatttaaaagt

SEQ ID NO: 325104 - DNA, 516 bp, Homo sapiens
ggtgctaaagtagattcattgatgttttctttcataccatcactttgaaacggagacaattagaaattctaaatttaaagcaagtacaaactggattgatataaaactttattttaaacaaattctgtgtttaacatattgtccaactgttgagtgtaaaaaactaaaataacaaaaataaaagcaaaaatcctattaagctgtttctaatgttcttaatcaatattattgtttaatatttgsaaatgaaaaaggtagttttaagaaaaagttatattgttgacattacaatagaactaggcatttaaatatgattttgaattttgtgaaacttaatagtatgtttaagtttgctctttgaaaattgctgcttgtcctccatgccacacatctaggggacagttgcattaggaattctttctatttttataattaagagtgttgcaggctttagtagctaaccactgggtttttattatttcttcacacgataattaaaattatgtctaatgagtt

SEQ ID NO: 325105 - DNA, 594 bp, Homo sapiens
aaatttaaagcaagtacaaactggattgatataaaactttattttaaacaaattctgtgtttaacatattgtccaactgttgagtgtaaaaaactaaaataacaaaaataaaagcaaaaatcctattaagctgtttctaatgttcttaatcaatattattgtttaatatttggaaatgaaaaaggtagttttaagaaaaagttatattgttgacattacaatagaactaggcatttaaatatgattttgaattttgtgaaasttaatagtatgtttaagtttgctctttgaaaattgctgcttgtcctccatgccacacatctaggggacagttgcattaggaattctttctatttttataattaagagtgttgcaggctttagtagctaaccactgggtttttattatttcttcacacgataattaaaattatgtctaatgagttgtatttttgttaatgcatactcagatgtttaaagagaatataactatttttgttttgttttctacgacttctttgtcagaagcctgttgaatgaataacaaccacagtctcacgtgtatattcagaacaatccagtaaattcattcat

SEQ ID NO: 325106 - DNA, 622 bp, Homo sapiens
gggacctgtgctgttggactttatatatatggtctccatctctgccaacaaggtcactgtttctgtgcccactgggccagtgctggtgtggccaatcacccaggctggtagggtcaactggctgagccattcgttctcttggttgttcagtgcttcttccatcatgggtgctctctggttggtgttgacatgagatacaaagatcttgccatggctgtatcatttcattgtcctcactaagtrctactatcagatccattttcctcaaacactgctttatttaagttatcctcctcgtttaaaagcatcaaaagtgttcccctttttcctaaagaaaaaatgaaaccaaaattgtaaaaccttctctaaccttgttctaattaacctctctactccatacacaaaatatcgatgcaaatcggaatggtctacatatcatcccccacaaatacgcaattggattgcttcttttgtgctttgcccataccattttacccttttgaaaagctcttccttctcctattcatctttcaaaatgatctagatgaaaatatacatggtaatctaagatccggcagtgatctctctcccctctagattttatcttgagaatactatggtg

SEQ ID NO: 325107 - DNA, 572 bp, Homo sapiens
atccctgtttgactatttaccgaggtaattgatttacccagaattgattgctgtctagaaagtttaagcagtctcttagaytcttaaatatacattcctcaagattctgtaagtttatctagacacatcaccaggaattaaacattaaatgatactacctttgctctccaaaagagttccatccatgagttaaaatatgatacattctaaatacagacatgatacatattaatataggaaaggttatttagaagcttgcttctctataacttttgcaatcattcaactaaacttctttcgccaacccttaaaccttggattcttgctaaaccttggatatttaactgggtttcagaagatgtatgaactctcccaaatttaatgcaaaaaaaaaaaaagtcttttctttctgggcccgattggagatagatctggtgctttcatcatcttctcaaaggagtcaggagtctgtcatcttttaaaaacattatgaaccactcactcattgctctgcttgtaagtcctagatttagaagggtattatattctaagcacattgttcccctaaagaa

SEQ ID NO: 325108 - DNA, 572 bp, Homo sapiens
atccctgtttgactatttaccgaggtaattgatttacccagaattgattgctgtctagaaagtttaagcagtctcttagattcttaaatatacattcctcaagattctgtaagtttatctagacacatcaccaggaattaaacattaaatgatactacctttgctctccaaaagagttccatccatgagttaaaatatgatacattctaaatacagacatgatacatattaatataggaaaggttatttagaagcttgcttctctataacttttgcaatcattcaactaaacttctttcgccaacccttaaaccttggattcttgctaaaccttggatatttaactgggtttcagaagatrtatgaactctcccaaatttaatgcaaaaaaaaaaaaagtcttttctttctgggcccgattggagatagatctggtgctttcatcatcttctcaaaggagtcaggagtctgtcatcttttaaaaacattatgaaccactcactcattgctctgcttgtaagtcctagatttagaagggtattatattctaagcacattgttcccctaaagaa

SEQ ID NO: 325109 - DNA, 572 bp, Homo sapiens
atccctgtttgactatttaccgaggtaattgatttacccagaattgattgctgtctagaaagtttaagcagtctcttagattcttaaatatacattcctcaagattctgtaagtttatctagacacatcaccaggaattaaacattaaatgatactacctttgctctccaaaagagttccatccatgagttaaaatatgatacattctaaatacagacatgatacatattaatataggaaaggttatttagaagcttgcttctctataacttttgcaatcattcaactaaacttctttcgccaacccttaaaccttggattcttgctaaaccttggatatttaactgggtttcagaagatgyatgaactctcccaaatttaatgcaaaaaaaaaaaaagtcttttctttctgggcccgattggagatagatctggtgctttcatcatcttctcaaaggagtcaggagtctgtcatcttttaaaaacattatgaaccactcactcattgctctgcttgtaagtcctagatttagaagggtattatattctaagcacattgttcccctaaagaa

SEQ ID NO: 325110 - DNA, 553 bp, Homo sapiens
tccctgcaatgtttcatctcaatatttcatcttacttccacaatctttaactaggaagctattttattttatttttatttttattttacttcaagttccaggatacatgcgcagaacgtgcaggtttgttacatgggtatacatgtgccatggtggtttkctcacctagcaatccatcatctaggttttaagccctttgtgcatgagctatttgtcctgatactctccctcccctcacccaccacccctccagcaggctctgatgtgtgttgttcccctcacagggaggggttctcattactgaactcccacttatgtttctcattactcaactcccacttatgaatgagaacatgtggtgtttggttttctgttcctgtgtttgctgaggatgatggcttccagcttcatccatgtccctgcaaaggacatgatctcattcttttttatggcagcatagcattgcatggtgtatatatatcacattttctttatccagtctatcattgatgggcatttgggtcctttccattactttattgttgtgaatact

SEQ ID NO: 325111 - DNA, 585 bp, Homo sapiens
gaactggagatttggagattatgtttttgctttttgaggagggaattttcatgtaatgataaaaattactgtgagctctagcacttttacttcttctgttcataggaagatgcttttgtgaagccttttatttaactttttcatataccagtaactaaacagtgctttgtagaaaagaatttttaagagtgagaaagaagactaatttcttctaaaacagttttacaactaaacgtgattacactatttttggtaaaaattacttgagaatatgtacatagcttgaatttgttgaatctttaatggatgattcagattttctgtgggatttgcattttaatttttttcccttagaattrtagctttttgtattaaaaataggtataaaaacatttcccagtgctatttggtaataagtagactttgtttactgaagagaaaatggttaatgaggtaataatcccaccttcaatttttttttaaattatgttggaattaaagcttagattttcattaaaattctacattctcttataagtaaatcttgaagtaatctattttatttttcagtaataattgaatcta

SEQ ID NO: 325112 - DNA, 478 bp, Homo sapiens
tcattcctgatggggggaaatatgttataggagatagaaagaaattatttaggtagatagattagggtagagagagtttccagcgaaaaactttccttctaacaaaaagcaggtcagaaatagttccctttctaacctcaagcagttcaaagaaatcacttctcttctaacaaagagcagcctagaaggtcaggctgtaaaacacagataagcaattcgggcacagagcagggttttctgggtaatcaccaaaattcacatacatacaatgggccctgataaaaagagtgggccttaataagcacwttcgtttactgcaacttggcaactcattcagcacccttttctgtgacagatagctgttctttccttttgcctattaaactcctgctccagtctcaacatgtgtgtgcatccacttccttgatttcttcagctgtgagaccaagaactttggtatttatcccagacaacaaag

SEQ ID NO: 325113 - DNA, 561 bp, Homo sapiens
tggttgctgggtatcaggttttgaatagggtagcctggtatttgaacttttcctatgaaggacccttggcaagaagttttgctgtttccaagtcatgttggtgtgagagactctgctcagggtgggatcccctgtgctttaaatcaaacctttcttggtacactgtggagctattccctctgaaggccctgtcacttccccattccaactacccataaacatgtatgacttttttaycctctagtcttcaagaaagcttttccagctccagcatcttccttttccgggctactagaagcagtttaggtcttggagtgggagtaggagaaataactgtgattctgctttagagagttaatgttctgtctgcactttaaacggaataagcttgtcagtttatgatatcacttgcatgcacacagcagtgcaatttcatgtacaatatagatttttatttggtttctgtattatgtcttttcaaaatgtggtcagcaaattttaatcaagcgtgtctggtattcttcttaaagtcacacaagtcaactgtcaaaatttaaaaat

SEQ ID NO: 325114 - DNA, 603 bp, Homo sapiens
ggatcccccaaaagtttttgaatacattaaaaaatgaccttttaagctgcaatcatatgccttttctaagcactgcacattaattaactcgtttaacacaacactcatccgaatttggtatcactgttataccaacaggaagccaagaggatactaaggttcaccaatggtgtatgacttttctgtagtcacacaactagtaagtggcacaaatgcaatactactcctgggcatcyagcccaaaccaaatgttcttctttattatgctccatattctgacctgattatattattgaaggtactggataattgagcttgcttctaaagaaaaaaaaaggtgaatgaatgattcattgtctgtcatgaattccctaagtatttattaacctctctctagtcattaattcaacagataatcattgcgttcctactatggcacaggcactgggcatctacaaaagaataagatacattctgaatacaagtgactgagattcagaaggggaaagcatattatatattgtgttttgttcacattgcatcataggaagtttcagcctacattacatcatcttagaataagtacaattacatcagccagaa

SEQ ID NO: 325115 - DNA, 603 bp, Homo sapiens
ggatcccccaaaagtttttgaatacattaaaaaatgaccttttaagctgcaatcatatgccttttctaagcactgcacattaattaactcgtttaacacaacactcatccgaatttggtatcactgttataccaacaggaagccaagaggatactaaggttcaccaatggtgtatgacttttctgtagtcacacaactagtaagtggcacaaatgcaatactactcctgggcatccagcccaaaccaaatgttcttctttattatgctccatattctgacctgattatattattgaaggtactggataattgagcttgcttctaaagaaaaaaaarggtgaatgaatgattcattgtctgtcatgaattccctaagtatttattaacctctctctagtcattaattcaacagataatcattgcgttcctactatggcacaggcactgggcatctacaaaagaataagatacattctgaatacaagtgactgagattcagaaggggaaagcatattatatattgtgttttgttcacattgcatcataggaagtttcagcctacattacatcatcttagaataagtacaattacatcagccagaa

SEQ ID NO: 325116 - DNA, 603 bp, Homo sapiens
ggatcccccaaaagtttttgaatacattaaaaaatgaccttttaagctgcaatcatatgccttttctaagcactgcacattaattaactcgtttaacacaacactcatccgaatttggtatcactgttataccaacaggaagccaagaggatactaaggttcaccaatggtgtatgacttttctgtagtcacacaactagtaagtggcacaaatgcaatactactcctgggcatccagcccaaaccaaatgttcttctttattatgctccatattctgacctgattatattattgaaggtactggataattgagcttgcttctaaagaaaaaaaaaggtgaatgaatgattcawtgtctgtcatgaattccctaagtatttattaacctctctctagtcattaattcaacagataatcattgcgttcctactatggcacaggcactgggcatctacaaaagaataagatacattctgaatacaagtgactgagattcagaaggggaaagcatattatatattgtgttttgttcacattgcatcataggaagtttcagcctacattacatcatcttagaataagtacaattacatcagccagaa

SEQ ID NO: 325117 - DNA, 461 bp, Homo sapiens
gccttttaccaaatgtctttagcagttctaatgatatacaaagtgttgtttttgcagtattttgaaaaagggacatattaatgtttcacctttagaaagtttttttcacaagaattgaatcactttctgattgttctgtatgacatcattgtagatgtataacactttttggcttatttaagtttattttaagcattctctaatatcttacgccttgtcttaacctcagtattaatcctgttgattacataatttgtattctttgaagcctatttcattatttgcacgtctttctcctttmtactcatcttgagctgatgaacttgaattacccttttgctctaaaccttaagtcagaccaaattagaataactcctcctttttttctataattatttttcctttcttgtattattactccttaccacattgtattgaacttgtttaggtaattatctgtc

SEQ ID NO: 325118 - DNA, 608 bp, Homo sapiens
tgtagtcgaagcaatgagatgtgagattttggctaaatacagaagggagtgaaatgtatttgcaagtatacaaatatacctggaggttatacacacaggtatgaaaatcttgaaaggataaaatggtattttgaaagggtagaatataggattttaaaatgtgcaataactgaggagggtttaaataaattatggaagatctatatttgtggaagtctaaatgggtagaatgcttatggaagcaatttaaccttgtccatcaacttcaagtgcaaatatcattcaacccaaaaattccactcctacaaatttcacctccaggtatatttgtatacttgcaaagtgaaggctgtacagggtattttgttgctgcattgttcgtaagagtaaaatgcccatcatagagaattgcttaggcttattatggtgcatccataaaaatgrcattatgaagctgtaaaaagaaatgcaaaaactctttatggatgtaaaatgttcttcaagatacaaggttaattaaaaaagaaaaacatcaaggttcagaacagtgtggtataatgcaatctaaaaaagggggaaaagcctatatatgtatttgcatacctgtg

SEQ ID NO: 325119 - DNA, 392 bp, Homo sapiens
aacataaggtctaccctcttaaaaaatttgtaagtgtactctacagaattgttaattataggaataatgttgtacagtagatctctagaatcrattcatcttgtatcattgagactttacgcccaagggggagttgctgacctgatctactgtttaaattcaggcatagttaggaccaccacaggcactggatttataaactgtgccaagtgggtttaaagaatctcagaacttcatgaatttactcttgattgattatataatgaagttgtctgaattagcattcatatagaatacagtgctttatttcattttagtgatacataataaaacatgacagtttgaaactaataagcaaagtattaaaattcaaaaaataaccaaatcagttt

SEQ ID NO: 325120 - DNA, 577 bp, Homo sapiens
atccagtgaactacctctcttcatctcacctctccccatacccacatatgcccttcctagtccctggtaagtatcattctactctctacctcccttagctctcatgtatgagtgagaacatccaatatttgtctttctaggcctggtttatttcacttaacataatgacctctagctccatccatgctgtgcaaatgcaagatgtcatcctttttatggctagatagtattccattgcgtatgtacaccacatttcctttatccattcatctcttgctagacacttaggttgattccataactttgctattgtgaatagcactgcagtagacgtggggatacaggttcccctttgatatgctgaattccttttccttctataaatacctactagtgagatcgctggatcatrtggtcattctatttttagtttcttgagaaatctctgtactattttccataatggatataatcatttgtattccccccaatagtgtataagagttcccttttctacacatcttcatcagcatctattttttgttgttgttattgttgttatctttttgataatggc

SEQ ID NO: 325121 - DNA, 632 bp, Homo sapiens
actgtagtacgtgttttatttccttcctgcatatcatagttctatgtttgtttggaaattaaatcattaaaaagtttttctcactttccatccagataaacaaaaaaaagaatggttaatactgatacttaataataatttatattttgttatcaataatgaattatattataamatatatagcttcacattttgtcaggattaaattactttcatttcatttacttgcaatgtgtttgcattaattgaaaaacgtgggctccctcttgtgacaacatcaatgattctatatttcttttggagccacactaagtcacctgtctatgttctttaatttttcacaagtaaagttatatataattttatataataatgtaatagtattctttttttgataattcattctacttttttaaaaggaggccaatatttgataatatttgattctgattattgtttaaagatttatataatatttaaaaatattgattttcaaatttatattgaaaatatcaaggaaaacaggaaatgacaaatttagatttccttgttttatattttatatgcgatattagctgttttggttggcattccaagatatgcacataatttactttatattctacgtgttc

SEQ ID NO: 325122 - DNA, 624 bp, Homo sapiens
aaatctcaactgagaaacatggactgaattaaatttttatattttacctgaaatatactctctaccttgattgatttgttttataaattgtattcctctcatctaatcttttgaatttgttcataatatgagaaggcactaagatgaggtgacatatggtagtatgttgtatacatagagtttctctcacttgcatcattattgcatttaccacattttttgcaaatatttaaatcttcagtagactaagaaatctataattcagggaccatattgtcctcatttcatgtcccaggacacaggctcatgtctgaacgcatagaaggcgttcagaaaaaaaaatgaacaaatgagttatagcattgttgtagatttgtgtctaaaatatatatgaaaagttctataattattttaatttttacatataattaaaatttatagatattgctccagaaactactactaaaatgatacagcttatgttattggatcagaattctataaaactaataaaggaaatataatttggttttgatgcagtttacatatatattarggaatgattactaaaaagatgctttttagtaatctgggagaactgggaaacttttgacaggggaaatc

SEQ ID NO: 325123 - DNA, 388 bp, Homo sapiens
ggttttatacaagtatcatgctattttggttactaaagccttgtaatataaagtcaggtagtgtgatgttkccaggtttgtttttttgcttaggattgctttggctattttttggtttcataaaaattttagaattgtttattctatttttgtgaaaaatggcatcggtattttgatagggattgcattgaatctttagattgctttggcattttaacaatattaattattctaatctataaacacagaatttttttccatttgtttgtgtcctttttaatttctttcataagtattttctagttttccttgcagagatctttcacttcctagattcctaggcagttcccagtaatccctaggtattttagggtttttgctgctattg

SEQ ID NO: 325124 - DNA, 573 bp, Homo sapiens
aatctgactatatccttctattcctttaaagacttatcctggttcccaggtgatttttattaaaaaaaaatatattcctcacaattccatgactttgtttgtttgtttactcacctaccttgcacatcttctttttccttgactttgcacatatagacccatatgttgtagccagtcagagctccttgctgaatacactgcatcatttttgcttctgcagttcaaagcatttgcacaaaacacttcttccacagcgaatactttgctctcacattttccactattatgaagcacaaatatcttcacctgaaattctgaaatattgagataaagtacatcatctctgtgaaagccttgctgacatcacaaagaagtattatcttgaggtttttagagtgcagccaccagaaaacaggtgagaaaaaaagacagctttttttcttgttagaatgaargtctatcccaaagtgtgattatgtaattatttcttctgtcagggaggagatgttttatgttaagtgggtactaagattagttaattgttctcagttctcacaaacaactatcctctaa

SEQ ID NO: 325125 - DNA, 484 bp, Homo sapiens
cagttacccgggcagctataacaaaacaccacagactgggtggcttaaacaaaaaaaatgtattgtatcacaattatggaagctagaaattccaaatcaagacaacagcaggtctggtttctcctgaagcttgctcctttgcttacagatgaccatcttgtagctgtgtccrcatatggtcttttctctgcgcgcacacatctctgatgtctctttgtgtgtccaaatgttctcttcttaaaaagactctggtcagattaaatcaggacccaccccagtggcctcattttaacataatcacctctttaaaggccctatataaaaatacagtcatattgtgtggtcctagagactagaacttcaacatctgaatttgagggagacaaaattcagctcaaaataactgggaacactgctatctttaaaatattaacctatctaggacttttactttctctgagattagttgttttagtcaaagtga

SEQ ID NO: 325126 - DNA, 540 bp, Homo sapiens
ctgaaaagggcattaagaatacccactgtgggctgggcatgattgctcatacctrtaatcccagcactttgggaggctgaggtgggcggatcacctcaggtcaggagttccagaccagcctggccaacatgatgaaaccccgtctctattaaaaatacaaaaattagccagacacagtggggtgtgcccctgtaatcccagctacttgggaggctgaggcaggagaatcacttgaacccagaaggcggaggttgcagtgagccaagatgagaccactacactcccacctaggtgaaagagcaagacttcgtctaaaaaaaaaaaaaaaaaaaggtaccctctctgagttaaaggcatacactttagttaatgtgaacttatgatgattaatttaatcaaatacatactgtatcaataagatattctctgtaacaaaatatcacaaactcatagaaataaagtcttttttttttttttccataaatcttagctacactatctctgactgaaaattagctggaccactttcctggtgttagc

SEQ ID NO: 325127 - DNA, 572 bp, Homo sapiens
tggtgtatatatattacattttctttatccagtccaccattgatggacatgtaggtttattctctgtctttgctattgtgaatagtgctgcagtgaacatgcaagtgcatgtgtctttttggtagaaggatttgttttcttttggatatatacccactgatgggattgctaggtcaaatggtaattctrttctaagttctttgaaaaattgccaaactgctttccacagtggctgaactaatttacattcccaccaagagtgtataagtattccatttcctccacagccttacttttttttttttttttactttttataatagccattctgacttatgtgagatggtatctccttgtggttttgatttgcacttatctaatgattagtgatgtacagtattttttatagattttttggctcattatatgactcctttggagaaatgtccatgtctttggcagtttttttaaatggggttatttccttttgagtgtttaattgttttagttccttatagattctggatactacacctttgttggatgcatacttgatgaatattttctcccat

SEQ ID NO: 325128 - DNA, 422 bp, Homo sapiens
tgacttttaatgacagagggtaaagaayatatgactatgttgtgaccatcaattctcctgacagcaggagctgccacagaaggtataaaggaaattgtgtaggaggtacgaaatattacccccacactcccctggcatgctgactttggcacatacatcataggaccttggttactgcacggaatcctcaaatataagtggagttgtgggaaattgtgtgttgaaaagcacaggccagcatggttttaatttaatgtcttttttttaaaagaaaattacatgctacataacagtcatgaaaaggtttagtggggtatggggtttgttttgggaacccagatcctgataacttttacttggaatgctcttctaggcctgcccatgtatagtaacaaggtagagagtttggatagtatattttc

SEQ ID NO: 325129 - DNA, 499 bp, Homo sapiens
tgagctccttggtcagccctggtggtgtgggagactggggccaagaagggcagggctggatgaggcaggtctacctagagattccctgatggcaagcataagcacctcagctgaggtagactccaatgggcagccatcaatcatccagagatgtgcctatgcatggagctgggaaacctcttcggccccaaatcactgcacagggataggaaataatagcttaaactcctaatccaggagagtgagtgctcyggatgcctggtgagctgccaaggcatgcagcagaggggatacctgcaccaagatctctgcatgggaagggtggggcaggtcaggctgctgatccaggtgaacaggtgttttgaatgtttggagatctgtctgggcacggatggagagggtcctctgcaccaggaactctgcaaaggaggagtggggcaacctagtccgttgaaccaggcaagtggctactctgaatgcctgggtgtgtcacagagaa

SEQ ID NO: 325130 - DNA, 524 bp, Homo sapiens
acttcaatgcctgtgattgatctctccaaaagtcttgtctcatgatttgttgaccttcttagcattaacacacctcaactctactgcagccaamctcacccgtagtcataccttgaaactggtcattaccaagaattacccaacattcttaaatataaactctaatgcttcactctctaacacatcttcacttccatcaggctccttaacctctctgtgttctttatatcttttactttgacctcaaggagatatttagttcacgcatgtcctcccttgtcttccctccactctcctaccctcccattccttccctctcttcttccctctccctctttttccttcctctcccctcccctcttctctcattttcttttcttttactctctcactctttcttctctctcatcagtctcaaatcttcattacttaaaccagtaggtggttaatgtttcactgtcttgtctactagttctacacaaatctgataaaattttacaatacacctgacaaaattctaacct

SEQ ID NO: 325131 - DNA, 524 bp, Homo sapiens
acttcaatgcctgtgattgatctctccaaaagtcttgtctcatgatttgttgaccttcttagcattaacacacctcaactctactgcagccaacctcacccgtagtcataccttgaaactggtcattaccaagaattacccaacattcttaaatataaactctaatgcttcactctctaacacatcttcacttccatcaggctccttaacmtctctgtgttctttatatcttttactttgacctcaaggagatatttagttcacgcatgtcctcccttgtcttccctccactctcctaccctcccattccttccctctcttcttccctctccctctttttccttcctctcccctcccctcttctctcattttcttttcttttactctctcactctttcttctctctcatcagtctcaaatcttcattacttaaaccagtaggtggttaatgtttcactgtcttgtctactagttctacacaaatctgataaaattttacaatacacctgacaaaattctaacct

SEQ ID NO: 325132 - DNA, 583 bp, Homo sapiens
ttttgtttagtaagagataccaactagtagtctgcaatacaatggtaaatactatttataataaataagataaaaaatacattcaaatgttgcgggaagtcagggaccctgaatggagggaccagctgaagccrcagcagaagaacataaattgtgaagatttcgtggacatttatcagttcccaaaattaatacttttataatttcttacacctgtctttactgcaatctctgaacataaattttgaagatttcatggacatttattagttccccaaattaatacttttataatttcttacacttgtcttactttaatctcttaatcccatcatcttcgtaaactgaggatgtatgtcacctcaggaccctgtgatgattgtattattaactgtacaaattgtttgtaaaacatgtgtgtttgaacaatatgaaatcagtgcaccctgaaaaagaacagaataacagcaattttcagggaacaaggaaggataaccataaggtctgactgcctgcggggtaaaacagaatagagccatatttttcttcttgcagaaagcctatagatggatgtgtgagtagg

SEQ ID NO: 325133 - DNA, 553 bp, Homo sapiens
gatctcagctcactccaagctccgcctcccgggttcacgccattctcttgcctcaacctcctgagtagctggcactacaggcaccggccaccacgcccggctaattttttgtatttttagtagagatggggtttcaccatgttagccaggatggtctygatctcctgacttcgtgaaccgcccacctcgacctcccaaagtgctgggattacaggcatgagccaccgcgcctggcctacttcttgttttattgctccatttttcacactaaatcccttgtgtgaccttggacaagttacttactttgcctcagtttactcttctataaaatggggataataatagtatctccctcctaaggttgttgtgaagataaattagctaatatgtgttaaatatttagaatagttcctgtcacataagcagtataaaagtatttaccaccacttccttctgatattatggtttttctcattgttcttaaatgatttttatctagatcattgatcactcaggagatcctgcagaaggagtatataaaacttatatttgt

SEQ ID NO: 325134 - DNA, 593 bp, Homo sapiens
ggttaatgttgattattgaaattaggggttatcaactttttctgtaaaaggccagatagtaaacaactcaggttttgtaggacacatggtttctgttgtaaagattcaactttgctattatagtatgaaggcagctgtagaaaatacacgaatgggccaggtgtgttggcctacgcctgtaatcccagcactttgggaggccaaggcagggggatcacaaggttaggagattgagaccatcctggctagcacagtgaaaccccatctctaccaaaaatacaaaaaattagccaggcgtggtggtgggcgcctatagtmccagctactcaggaggctgaggcaggagaatggtgtgaacctgggaggtggagcttgcagtgagccgagattgcgccactgcactccagcctggacgacagagcaagactctgtctcaaaaaaaaaagaaaaaaaaatttatatatatatgaatgaatgaatgtggctgtgttccaataaaactttatttacaaaagcaaactcctggctagatttggcccttgggctatatttgccaaactctgattaaaataagctaaaaattaaggtgttga

SEQ ID NO: 325135 - DNA, 593 bp, Homo sapiens
ggttaatgttgattattgaaattaggggttatcaactttttctgtaaaaggccagatagtaaacaactcaggttttgtaggacacatggtttctgttgtaaagattcaactttgctattatagtatgaaggcagctgtagaaaatacacgaatgggccaggtgtgttggcctacgcctgtaatcccagcactttgggaggccaaggcagggggatcacaaggttaggagattgagaccatcctggctagcacagtgaaaccccatctctaccaaaaatacaaaaaattagccaggcgtggtggtgggcgcctatagtcccagctactcaggaggctgaggcaggagaatggtgtgaacctgggaggtggagcttgcagtgagccgagattgcgccactgcactccagcctggacgacagagcaagactctgtctcaaaaaaaaaagaaaaaaaaatttatatatatatgaatgaatgaatgtggctgtgttccaataaaactttatttacaaaagcaaactcctggctagatttggccyttgggctatatttgccaaactctgattaaaataagctaaaaattaaggtgttga

SEQ ID NO: 325136 - DNA, 588 bp, Homo sapiens
tagcaagatggtaaaagtgtaagggatgaaaggtgggagtaaaggcgggggtttaaaggagcaaaatattcatcatctattatgataagttaacaaatacacttgaatatattatatgtaaatcaatatatattaatataagcaatgtctattatatatgtattatataatatatgmctataatatatacaatgtaaatatgtgtattatatacgtgtatatgtattatacagttgaactttgaacaacatggatttgaactgtgagggtccacttatacacagattttcttctacctctgccacccctgagacagcaataccaacccgtcctcttcttcctcctcctcagcctactcaatgtgaagaccatgaagatgaaaacctttctgataatccacttccccttcataaatagtaaatttattttctcttccttatgattttcctaataatatgtttttttctctagcttactttgcggtaaggatacagtatataatacatataccatacaaaatatgtgttaattggctgttttctgttatcgataaagcttctttctggttatcagtaggttattaataat

SEQ ID NO: 325137 - DNA, 496 bp, Homo sapiens
cagcaatactccctcactgtcctatctcaggggtagatccagccccgtgtcacaatttagtttgaagggatcttgatcaccttccccttccacaagctatcacactggtccattacattgatgacattatgctgattggacctagtaagcgtgaagtagcaattaccctggacttattggtaagtcatttgyatgtcagagggtgaaaatctaactgaaattcggggacttccgcctcattgaaatttctaggggtccagtgggtatgttactagcctatctaccaagtgactggaacagctgctagttttgagtgggccccagaatggaagaaggctctacagcaggtacagactgccgtgcaagctgctctgccacttgggccatatgatccagcagatgcaataaggcttgaggtgtcagcagcagacagggattctgtttggagcctttggcaagcccttataggtgaatcacagcaaaggcccttaggatt

SEQ ID NO: 325138 - DNA, 603 bp, Homo sapiens
ggccgggtgtggtggctcatgccwgtaatcccagcactttgggaagccgaggcaggtagatcgtttgaggccaggaatttgagaccagcctgagcaacatggcaaaaccctgtctctacaaaaatataaaagttagccaggcatggtggtgtgcacctgtagtcccagctactcgggaggctgaggcaggagaattgcttgaacccaggaggtagaggttgcagtgagccaagattgtgccactgctctccaacctggatgacagagaaagactctgtctcaaaaaataaaaataaatagatagatagataataaattttaaaaaaatataaccttaacaaatagagctgagaaaggccacagaaggagtgttcttgtgcatgaatgcctgataacaagaactatcacaaaacactcggcaaaaaccacagacttgcacaaatgccaacacaatcttacacaaaacaatacttctgtgagaacatctgtacagaaactaccttgccaacctcaactggcttgttattgattcttgtagccaaggatatttatcccaaaacaattatgcaatcctcctcatttttcctttaaaaacatttatgt

SEQ ID NO: 325139 - DNA, 584 bp, Homo sapiens
acacatagcaccaaaactaaacattctttttggtgtggggtttttcgttgttgttgttgttgttttggtttttggctttttggtttttttttttcttttttgagatggagcctcgctatgtggcccaggctgaagtgcagtggtgcagtctcagctcactgcaacctccgcctcctggcttcaggtgattctcctgcctcagctcytcagtagctgtgaatacaggcgtgcaccaccaccccctgactaatttttgtatttttagtagagagtgggtttcaccatattggccaggccagtctcgaactcctgacctcgagtgatctgcccgcctcagcctcccaaagtgcagggattacaggcatgagccactgcacccggcccctaactgaacattcttgaatctttttgtttgtttgtttgttttctgatggtgcgaggacctattatgtacctgatgctctacctatgttttcatttattcaatctgagcaataatttcttaagggggatgctcagtctccattttctgcataaaaagaatggaattcagagtggcttggcaagttgctcaaggatgcata

SEQ ID NO: 325140 - DNA, 584 bp, Homo sapiens
acacatagcaccaaaactaaacattctttttggtgtggggtttttcgttgttgttgttgttgttttggtttttggctttttggtttttttttttcttttttgagatggagcctcgctatgtggcccaggctgaagtgcagtggtgcagtctcagctcactgcaacctccgcctcctggcttcaggtgattctcctgcctcagctcctcagtagctgtgamtacaggcgtgcaccaccaccccctgactaatttttgtatttttagtagagagtgggtttcaccatattggccaggccagtctcgaactcctgacctcgagtgatctgcccgcctcagcctcccaaagtgcagggattacaggcatgagccactgcacccggcccctaactgaacattcttgaatctttttgtttgtttgtttgttttctgatggtgcgaggacctattatgtacctgatgctctacctatgttttcatttattcaatctgagcaataatttcttaagggggatgctcagtctccattttctgcataaaaagaatggaattcagagtggcttggcaagttgctcaaggatgcata

SEQ ID NO: 325141 - DNA, 584 bp, Homo sapiens
acacatagcaccaaaactaaacattctttttggtgtggggtttttcgttgttgttgttgttgttttggtttttggctttttggtttttttttttcttttttgagatggagcctcgctatgtggcccaggctgaagtgcagtggtgcagtctcagctcactgcaacctccgcctcctggcttcaggtgattctcctgcctcagctcctcagtagctgtgaatacaggcgtgcaccaccaccccctgactaatttttgtatttttagtagagagtgggtttcaccatattggccaggccagtctcgaactcctgacctcgagtgatckgcccgcctcagcctcccaaagtgcagggattacaggcatgagccactgcacccggcccctaactgaacattcttgaatctttttgtttgtttgtttgttttctgatggtgcgaggacctattatgtacctgatgctctacctatgttttcatttattcaatctgagcaataatttcttaagggggatgctcagtctccattttctgcataaaaagaatggaattcagagtggcttggcaagttgctcaaggatgcata

SEQ ID NO: 325142 - DNA, 562 bp, Homo sapiens
  misc_feature (1)...(562): n = A,T,C or G
gctataagcgttgtaccactcatgcctataatcccagcactttgggaggccgaggtgagtggaccacaaaatcaggagttcgagaccagcctggccaagatggtgatcacttgaacctgggaggcagaggtttaagtgagctgagatcgcaccactgcactctagcctgggcaacagagcaagactgaaccaaaaaaaaaaaaaaaattgtacccaaagtattcctgcatgtagatggtatgccartgtcagcacacggtcagagtcaggcatctgtattagccagggtgaggtcaggaaaagaaagtccaggcagggagtttgatagaaaacatagagtatggggagctcatcttaaagtgttggaagagctgaaaggtcaattgaggataatgagacaagtcagaaattagcaacatcaacanncctgctaccatccctagcattagaggcaaaggggtgggaggtagttctattagagtccaagagacagacctgctggatcacagaggaggcccagcccactgatgaggctgcatgccatgcctgaggcagagggagg

SEQ ID NO: 325143 - DNA, 590 bp, Homo sapiens
taagtagacaataaataatcattaactgtagtcacctaccctgctttagaacactggaattcactcttcccatctttctagctgtaatttgtatccgttaactctcttttccctatgacccttgcccctctacccttcccagcctctagtagcctctattttactctctacttctatgagagtaactttttaaattttcccatatatgaaagaggacatgtggcatttgtgtttccgttcctgacttttttcacttaacgtaatgtcctccaggctcatccatgctgccatgaatgacaagatttcattcttttttttttttatggctgtatagtattgtgttgcgtctatataccacattttctttatccattcatctgctaatgaacatttaggttgattccagattataatgtttatactgtgaatcatacatactttatgtacaatgtgtagcatagacaattcctcataatagaagctcaacaaatgttggtactataccattscctttcctgctctccttttctcactcctccccaggtacagagataacagaggtaactaaaatacaatccttgttcttgagg

SEQ ID NO: 325144 - DNA, 564 bp, Homo sapiens
aatttgggggagctaaaattggtaataaaacaatttaaaagtaaaatttaaaacaaaagacagctgaattcaaacagatataaggtcagtcccaagtgagttgacccaggctgatggaagtgctatgaaaagcttacctagctagaggctaaatgtgggaaatgtgcagcctcctagagacttacatttstgggtgctctggggaacccccaggatccctctggaaagtaacccttcacaagtaacctaagacatctttagactaaggagcaagatacttaaatgtccagccagctccttgtacttaacatgtctagatctgagtttataatcttccccctcaaattcttcctccagcttccctcttttgttcatggcgtggccagttcccccaactccagtctggtaaatcagagtaatctttgttgccttctccctgaaatcttgctgaatcacatgacatctaaatcataccttttgtattatattcatctcttccattcccatcccacccactttgtccagttcttattacctcttccctcaagtactacagtagcctcc

SEQ ID NO: 325145 - DNA, 569 bp, Homo sapiens
  misc_feature (1)...(569): n = A,T,C or G
gtagaatgaatggctcattcaaggctttgagagagtccagggcttgttagaggcatcattagaccgaggtgatctcaatctatttcaggtttagcaagtatttataactggagaagctagagattcaaaagatctgatggagaaagccaatggtttgatagcaaggttgagcatctattgtttgtttcaaggtcttttgactaaaagcaacagaaacagattcttcctatcytaagtaaaaaaaaaagagatagagcaaacataccagaaaaatgggcagaactcccaaactggcagaaatgtatgaaagtgtcaaacagattcaagaagggcagaagccaggacatccctgggaatcgaagtaacaggcaataattggtggtctccttagggtacagccatgggataaattagatccaacttttttctttacatccattaatgattccaagttccaagagagagtccagttagaacatcatgaccaatagccccaccaacanaagtaattacaaagtgccttgaaaacatcaaaccatggggccgggcacggtggctcacacctgcag

SEQ ID NO: 325146 - DNA, 569 bp, Homo sapiens
  misc_feature (1)...(569): n = A,T,C or G
gtagaatgaatggctcattcaaggctttgagagagtccagggcttgttagaggcatcattagaccgaggtgatctcaatctatttcaggtttagcaagtatttataactggagaagctagagattcaaaagatctgatggagaaagccaatggtttgatagcaaggttgagcatctattgtttgtttcaaggtcttttgactaaaagcaacagaaacagattcttcctatcctaagtaaaaaaaaaagagatagagcaaacataccagaaaaatgggcagaactcccaaactggcagaaatgtatgaaagtgtcaaacagattcaagaagggcagaagccaggacatccctgggaatcsaagtaacaggcaataattggtggtctccttagggtacagccatgggataaattagatccaacttttttctttacatccattaatgattccaagttccaagagagagtccagttagaacatcatgaccaatagccccaccaacanaagtaattacaaagtgccttgaaaacatcaaaccatggggccgggcacggtggctcacacctgcag

SEQ ID NO: 325147 - DNA, 561 bp, Homo sapiens
gtcatttaggagaagcagattgaaagcagctgtgaaaaatcctgaaatgaggatatggaatagtgctggccacctccgcatakgcccacatggaaacacacttaatcagcagagctgggcctatgtggagatgctgagccggaggctcctaggtgttaagcacttttctatgtgtaatgtggtggaaaccaccctagacttttcagcgcacccaaagcaatagaattttaactgggagggaattatccagccagggactagtttctggcttcttttggaactcagtgtggttgtatggctaagctctcaccaacagaatgtgagtggaagtgatgtgagccactctcagacctgaccatgaaacttggctcataggctcctccataccaccccacctccgccccaccttcctgcttggctggaatacaaaccttgcagtaaccttgtgagcaacgtgctgaaaataatagaactagcatctcctgggttccttgaaggatgcttggagtagaaggcccaccacctggcctgttctagactatttacatgaaagagaaaaaa

SEQ ID NO: 325148 - DNA, 561 bp, Homo sapiens
gtcatttaggagaagcagattgaaagcagctgtgaaaaatcctgaaatgaggatatggaatagtgctggccacctccgcatatgcccacatggaaacacacttaatcagcagagctgggcctatgtggagatgctgagccggaggctcctaggtgttaagcacttttctatgtgtaatgtggtggaaaccaccctagacttttcagcgcacccaaagcaatagaattttaactgggagggaattatccagccagggactagtttctggcttcttttggaactcagtgtggttgtatggctaagctctcaccaacagaatgtgagtggaagtgatgtgagccactctcagacctgaccatgaaacttggctcataggctcctccataccaccccacctccgccccaccttcctgcttggctggaatacmaaccttgcagtaaccttgtgagcaacgtgctgaaaataatagaactagcatctcctgggttccttgaaggatgcttggagtagaaggcccaccacctggcctgttctagactatttacatgaaagagaaaaaa

SEQ ID NO: 325149 - DNA, 555 bp, Homo sapiens
ctctttcattctctctattctctttctttggggctctgatcaggcagacagtaaatgttctcatctctcgtctacatcactgaacctctcatatttttcatttccttaactctatatggtattttacggataatcctttcttatttatagtttacttattctgtacttagaggtgtataatctactgtrtatcatatcctatgagccttttaagaatttttttcaacaatggtatttttcatgtctgaagtcctatttgattcttctgtgatcccatcctttatttctataaacatttcatgcataactatttcacattcagtatctgacaattctgtattggacgtctctggggtctaaatctgttattttttgtttcagctaaaggtagaatgacaagtaggattgcctgtgaatgaccctagattctctgatttgtccagcaatgaggtagcagggaccagtgactccccttctcctggccagaagggctacagcttcccttgggaccaggggttacttcttcccctgagatgttctcaatccagagatgtt

SEQ ID NO: 325150 - DNA, 518 bp, Homo sapiens
ctcactcaaatctggcaggctgtgaagatgcctgagatggggagacaggggttgagtgtgggagtggaaagatggttagagcaatsaatgagcacacattttccaaagaagagtcatgtaagccaagcctgttgttaattaacactgagtttgttgagaacgtggtgtccagactgcggcagacagaaggtgcaccccatctgtgactagctccccctagggaggggctggttaagagagaaccactccttccctgggtgccctcccactgcctggtgagcatattccacccccatagggtgggagggtggtgggttccacagtgacatgacacacagttgtctggaagtggggactgtgagcttctgggtgagtcactgttgcatcactcgtacatagacccagggagagcttttctaaactgtgaaactgaagatcttactgcagtaatttggttacattacagcttgctgatcaaaatcaccctgtactgctgaaggtatctggtgtggtgaggt

SEQ ID NO: 325151 - DNA, 518 bp, Homo sapiens
ctcactcaaatctggcaggctgtgaagatgcctgagatggggagacaggggttgagtgtgggagtggaaagatggttagagcaatgaatgagcacacattttccaaagaagagtcatgtaagccaagcctgttgttaattaacactgagtttgttgagaacgtggtgtccagactgcggcagacagaaggtgcaccccatctgtgactagctccccctagggaggggctggttaagagagaaccactccttccctgggtgccctcccactgcctggtgagcatattccacccccatagggtgggagggtggtgggttccacrgtgacatgacacacagttgtctggaagtggggactgtgagcttctgggtgagtcactgttgcatcactcgtacatagacccagggagagcttttctaaactgtgaaactgaagatcttactgcagtaatttggttacattacagcttgctgatcaaaatcaccctgtactgctgaaggtatctggtgtggtgaggt

SEQ ID NO: 325152 - DNA, 518 bp, Homo sapiens
ctcactcaaatctggcaggctgtgaagatgcctgagatggggagacaggggttgagtgtgggagtggaaagatggttagagcaatgaatgagcacacattttccaaagaagagtcatgtaagccaagcctgttgttaattaacactgagtttgttgagaacgtggtgtccagactgcggcagacagaaggtgcaccccatctgtgactagctccccctagggaggggctggttaagagagaaccactccttccctgggtgccctcccactgcctggtgagcatattccacccccatagggtgggagggtggtgggttccacagtgacatgacacacagttgtctggaagtggggactgtgagcttctgggtgagtcactgttgcatcactcrtacatagacccagggagagcttttctaaactgtgaaactgaagatcttactgcagtaatttggttacattacagcttgctgatcaaaatcaccctgtactgctgaaggtatctggtgtggtgaggt

SEQ ID NO: 325153 - DNA, 588 bp, Homo sapiens
ttagcaggaaacatgctgtggaaattctggctgtgacttcagcaaacttgttctgtggagactgcagtaggccatattggttccaacctatttcagccagtttttttattttttattttttttttgtctcagaagcagagggagtttcaatgtttcaacaagttgtttcttctgttcaaatctgccatcctgcaaactcaagaattcctattcatcattggcttctctagctctttgggggcatggtttcaaaggtgcaactgtgtctagggtggagctgggaatctcaatggaaaagggacactaaagagcaagggtttgacaagcagaatggattatttcatgggtagaactgttaagaagttcattagtcagcacattagtctgactttccccactagctaacagtggggaaagttagctattcaactcrccccatagaatctagcagagcagagaagctgacggtgttcagagataaataaataggagggcttaacctacatggaaaggctagttatattcattctgggcaataagacccaagataaagctgataagttgatctaggctagaaaggggtttagg

SEQ ID NO: 325154 - DNA, 588 bp, Homo sapiens
ttagcaggaaacatgctgtggaaattctggctgtgacttcagcaaacttgttctgtggagactgcagtaggccatattggttccaacctatttcagccagtttttttattttttattttttttttgtctcagaagcagagggagtttcaatgtttcaacaagttgtttcttctgttcaaatctgccatcctgcaaactcaagaattcctattcatcattggcttctctagctctttgggggcatggtttcaaaggtgcaactgtgtctagggtggagctgggaatctcaatggaaaagggacactaaagagcaagggtttgacaagcagaatggattatttcatgggtagaactgttaagaagttcattagtcagcacattagtctgactttccccactagctaacagtggggaaagttagctattcaactcgccccatagaatcyagcagagcagagaagctgacggtgttcagagataaataaataggagggcttaacctacatggaaaggctagttatattcattctgggcaataagacccaagataaagctgataagttgatctaggctagaaaggggtttagg

SEQ ID NO: 325155 - DNA, 603 bp, Homo sapiens
agacaacaaaatccacaatttggagataaatttatcccaatgaaataaatacaatagagtgatctaaggacaactttaaggcatgtgtgctcagaatctttagagagataaaaagaaaatatccttagaaaaacagtaaattatggcacaatagagccagaaataaagcaaaaagagcaaaaaaatgacaaaatcagaactcctagaagtaaaaaaatgataattgaaatggagaaatcttaacagacargataaatcctatactggacacaaagagagaattagtcaattagaagatattaggaaggaagacatccaaattagagcaaataaaaatataaaagtgtagttaagagctgtggataatagcatttgtaataggaattccaaaaggcagcagaggaaataacagagaacccatattgagagagatgagatagctaaaaattttccagaattgagaaaacatgggtcctcacactgaaaatgcgcataatgggcatataagggatgcctttagatctaccagagatgaaaaaaaaaatccagatcccttcacaaagaaggaatattcttacatggttagcagaccactcattaaca

SEQ ID NO: 325156 - DNA, 603 bp, Homo sapiens
agacaacaaaatccacaatttggagataaatttatcccaatgaaataaatacaatagagtgatctaaggacaactttaaggcatgtgtgctcagaatctttagagagataaaaagaaaatatccttagaaaaacagtaaattatggcacaatagagccagaaataaagcaaaaagagcaaaaaaatgacaaaatcagaactcctagaagtaaaaaaatgataattgaaatggagaaatcttaacagacaggataaatcctatactggacacaaagagagaattagtcaattagaagatattaggaaggaagacatccaaattagagcaaataaaaatataaaagtgtagttaagagctgtggataatagcatttgtaataggaattccaaaagrcagcagaggaaataacagagaacccatattgagagagatgagatagctaaaaattttccagaattgagaaaacatgggtcctcacactgaaaatgcgcataatgggcatataagggatgcctttagatctaccagagatgaaaaaaaaaatccagatcccttcacaaagaaggaatattcttacatggttagcagaccactcattaaca

SEQ ID NO: 325157 - DNA, 619 bp, Homo sapiens
aaaaatgttcaacattgagggcaactaactgagcttatgctactcatacctgcccccagtccccggtccttgctagtagaactactaccaaaggcctatgccatctagaacttgggtttttttttttttttttttttttttggagatggagtttcgctcttgttgcttaggctgaagtacagtggtgcgattttggctcactgcaacctytgcctcccggattcaagtgattctcctgccttagcctcccgagtagctgagattacaggtgcacgccatgacacctggctaattttttgtatttttagtagagacggggttttaccatgttggccagactggtctcgaactcttgatctcaggtgatccacctgcctcagcctcccaaagtgctgggattacaggcgtgagccactgcacctggccagaattgtggttcttaactgggaaaaaattctccctcaggagacacttgacatttctgattgtcatgatttgggagatgttatttttgtctagtgggtagaggtgagggataccactaaaatcctacagtgcacaggacactccaccataagaattatctcgtttaaaatgtgaatagtgtcactgttgagaa

SEQ ID NO: 325158 - DNA, 619 bp, Homo sapiens
aaaaatgttcaacattgagggcaactaactgagcttatgctactcatacctgcccccagtccccggtccttgctagtagaactactaccaaaggcctatgccatctagaacttgggtttttttttttttttttttttttttggagatggagtttcgctcttgttgcttaggctgaagtacagtggtgcgattttggctcactgcaacctttgcctcccggattcaagtgattctcctgccttagcctcccgagtagctgagattacaggtgcacgccaygacacctggctaattttttgtatttttagtagagacggggttttaccatgttggccagactggtctcgaactcttgatctcaggtgatccacctgcctcagcctcccaaagtgctgggattacaggcgtgagccactgcacctggccagaattgtggttcttaactgggaaaaaattctccctcaggagacacttgacatttctgattgtcatgatttgggagatgttatttttgtctagtgggtagaggtgagggataccactaaaatcctacagtgcacaggacactccaccataagaattatctcgtttaaaatgtgaatagtgtcactgttgagaa

SEQ ID NO: 325159 - DNA, 619 bp, Homo sapiens
aaaaatgttcaacattgagggcaactaactgagcttatgctactcatacctgcccccagtccccggtccttgctagtagaactactaccaaaggcctatgccatctagaacttgggtttttttttttttttttttttttttggagatggagtttcgctcttgttgcttaggctgaagtacagtggtgcgattttggctcactgcaacctttgcctcccggattcaagtgattctcctgccttagcctcccgagtagctgagattacaggtgcacgccatgacacctggctaattttttgtatttttagtagagacggggttttaccatgttggccagactggtctcgaactcttgatctcaggkgatccacctgcctcagcctcccaaagtgctgggattacaggcgtgagccactgcacctggccagaattgtggttcttaactgggaaaaaattctccctcaggagacacttgacatttctgattgtcatgatttgggagatgttatttttgtctagtgggtagaggtgagggataccactaaaatcctacagtgcacaggacactccaccataagaattatctcgtttaaaatgtgaatagtgtcactgttgagaa

SEQ ID NO: 325160 - DNA, 619 bp, Homo sapiens
aaaaatgttcaacattgagggcaactaactgagcttatgctactcatacctgcccccagtccccggtccttgctagtagaactactaccaaaggcctatgccatctagaacttgggtttttttttttttttttttttttttggagatggagtttcgctcttgttgcttaggctgaagtacagtggtgcgattttggctcactgcaacctttgcctcccggattcaagtgattctcctgccttagcctcccgagtagctgagattacaggtgcacgccatgacacctggctaattttttgtatttttagtagagacggggttttaccatgttggccagactggtctcgaactcttgatctcaggtgatccacctgcctcagcctcccaaagtgctgggattacaggcgtgagccactgcacctggccagaattgtggttcttaactgggaaaaaattctccctcaggagacacttgacatttctgattgtcatgatttgggagatgttatttttgtctagtgggtagaggtgagggataccactaaaatcctacagtgcayaggacactccaccataagaattatctcgtttaaaatgtgaatagtgtcactgttgagaa

SEQ ID NO: 325161 - DNA, 614 bp, Homo sapiens
gttgctgggtcatatggtagttctatttttaatttctttatgaaactccatactgtttcccataatggctgcaccaatctacattccccccarcagtgtatatgagtcccttttctccacaccctcaccaaatttattattgttttactttttgataacagccatcctaacagatgtgaggtaatatagcggttttgatttgcatttccttgaaagttaatgatgttgaccacctttttatatgtgtgttggccattttcatgtcttctttgaagaaatgtctatccaggttttttgctcattttttaatcaggttatttgtttttgtactattaggctgtatgagctctttataaattgtagatattaaccccttatcagatacatgttttgtgaatattttttcctaatctgtaggctaccatttcattttgttgattctgtccttagctgtgcagaagatttttagtttgatttgttccattcatttattttttgcttttgtggcctaagcttttggtgtaatatccaaaaaatcattgccatgggccgatgcccagattttccatgattttcttttcttctaggagttttatagtttctggtcttacagt

SEQ ID NO: 325162 - DNA, 614 bp, Homo sapiens
gttgctgggtcatatggtagttctatttttaatttctttatgaaactccatactgtttcccataatggctgcaccaatctacattccccccaacagtgtatatgagtcccttttctccacaccctcaccaaatttattattgttttactttttgataacagccatcctaacagatgtgaggtaatayagcggttttgatttgcatttccttgaaagttaatgatgttgaccacctttttatatgtgtgttggccattttcatgtcttctttgaagaaatgtctatccaggttttttgctcattttttaatcaggttatttgtttttgtactattaggctgtatgagctctttataaattgtagatattaaccccttatcagatacatgttttgtgaatattttttcctaatctgtaggctaccatttcattttgttgattctgtccttagctgtgcagaagatttttagtttgatttgttccattcatttattttttgcttttgtggcctaagcttttggtgtaatatccaaaaaatcattgccatgggccgatgcccagattttccatgattttcttttcttctaggagttttatagtttctggtcttacagt

SEQ ID NO: 325163 - DNA, 614 bp, Homo sapiens
gttgctgggtcatatggtagttctatttttaatttctttatgaaactccatactgtttcccataatggctgcaccaatctacattccccccaacagtgtatatgagtcccttttctccacaccctcaccaaatttattattgttttactttttgataacagccatcctaacagatgtgaggtaatatagcggttttgatttgcatttccttgaaagttaatgatgttgaccacctttttatatgtgtgttggccattttcatgtcttctttgaagaaatgtctatccaggttttttgctcattttttaatcaggttatttgtttttgtactattaggctgtatgagctctttataaattgtagatattaaccccttatcagatacatgttttgtgaatattttttcctaatctgtaggctrccatttcattttgttgattctgtccttagctgtgcagaagatttttagtttgatttgttccattcatttattttttgcttttgtggcctaagcttttggtgtaatatccaaaaaatcattgccatgggccgatgcccagattttccatgattttcttttcttctaggagttttatagtttctggtcttacagt

SEQ ID NO: 325164 - DNA, 582 bp, Homo sapiens
tgtcaccaatctatagccaagaaacttcagcctcataaacttgaaaatgtttgatttcattttaaaaacctttgtgacctagtaaactaacaagggctgctaggagcaaaaactgacatttagacgatcagaaacgggctaagagcttgggtttagaactaggacagtggacataaactctactaagggaatataaggccacagtggagatggggaagagaaagrtcttgtcacattgaagagcctgagaggaagatgctcaggcctgacttagaaatccagccgagagtccccgtcacaaacctttcactctgctatcagctagacagcttgcccctttccctttttactttgggacaaatagagatggtctttaagtttcatggctgctctcattcattgtgaaattttactgttcctaaatatggcagaattcttaaaggcctagcatagcaaagagagaagactacacttagcattttgggtgcacgtgggagtaaaggactgcactttccacagaagatacattgcaattggcatgtaggattgcaggggtaatgtgcgtgggccatggtgcagaag

SEQ ID NO: 325165 - DNA, 582 bp, Homo sapiens
tgtcaccaatctatagccaagaaacttcagcctcataaacttgaaaatgtttgatttcattttaaaaacctttgtgacctagtaaactaacaagggctgctaggagcaaaaactgacatttagacgatcagaaacgggctaagagcttgggtttagaactaggacagtggacataaactctactaagggaatataaggccacagtggagatggggaagagaaaggtcttgtcacattgaagagcctgagaggaagatgctcaggccwgacttagaaatccagccgagagtccccgtcacaaacctttcactctgctatcagctagacagcttgcccctttccctttttactttgggacaaatagagatggtctttaagtttcatggctgctctcattcattgtgaaattttactgttcctaaatatggcagaattcttaaaggcctagcatagcaaagagagaagactacacttagcattttgggtgcacgtgggagtaaaggactgcactttccacagaagatacattgcaattggcatgtaggattgcaggggtaatgtgcgtgggccatggtgcagaag

SEQ ID NO: 325166 - DNA, 525 bp, Homo sapiens
agagggcaaccaggagaaccttataagacttcagggctttcaggcaaataaatgatggtttgatggtttgaggggctgtgacttagagccagatcacacagacttctgagacataatccaatcaacaccaagcacacctcctttgactgtaagtaacttgagtgcttgttctaggacttttgtctcctctgttttcccagaaccagacacgttgcctggttcatagacactgagtaacattacattagaccaatgaaaggataaaagaatcctaggttctactgaaggagaaatgggcttacactgaaatattgggaagagagggtatagagtgggaatttattggcaaggaacgttgttgtattrttataggtctgttatgggttattgatgaagtgccctgtaatctaaggagacgcatcatcacagcagaatttcaaccattctggaatgatttcagtgggctgcctggagaaaggcatgaactgaccaccgtaggctttcatccttcccttgatgttgatg

SEQ ID NO: 325167 - DNA, 576 bp, Homo sapiens
catgctttgctaatgggaatgtaaattggtatagccattcttcaaaacagcttgtcagtttctttaaaaattaacatgcaactaccatacgactcarcaattgcacacttgggcgtttatcccaaagaaattaagatttgtgatcacaagaaaatctgtagacaaatgtttataacaccccccatctgcagtagcccagaactggaaacagatgttcttcaacaagtgagtgtttaaacaaactgtggtacatctatatcatggaattgtactcagcagtaaagaggaacaaattactgatacacacaacaacctggatgaatcttcagagaattatgttgagtaataaaagctaatctgaagagcttacatactgtatgagtcaatttaaataacattcttgaattgacaaaatgatagaaatagagaacacattaatggatgccagcagtttagaagtaggtgaaggcatagagagaagtggttgtcactatagaagggcaacatgagggatccttgtggggatggaaatattctgtatcagtgtcactatcttggtatgatattatgctatag

SEQ ID NO: 325168 - DNA, 576 bp, Homo sapiens
catgctttgctaatgggaatgtaaattggtatagccattcttcaaaacagcttgtcagtttctttaaaaattaacatgcaactaccatacgactcagmaattgcacacttgggcgtttatcccaaagaaattaagatttgtgatcacaagaaaatctgtagacaaatgtttataacaccccccatctgcagtagcccagaactggaaacagatgttcttcaacaagtgagtgtttaaacaaactgtggtacatctatatcatggaattgtactcagcagtaaagaggaacaaattactgatacacacaacaacctggatgaatcttcagagaattatgttgagtaataaaagctaatctgaagagcttacatactgtatgagtcaatttaaataacattcttgaattgacaaaatgatagaaatagagaacacattaatggatgccagcagtttagaagtaggtgaaggcatagagagaagtggttgtcactatagaagggcaacatgagggatccttgtggggatggaaatattctgtatcagtgtcactatcttggtatgatattatgctatag

SEQ ID NO: 325169 - DNA, 417 bp, Homo sapiens
tggcgggaaaggactgggtgctaatttaggtaggaatgtcaggaagtcagaagaaaatgtaaaagtgtgggcatgagccatgtaaagacatccagaaaagtgttccaggcagagggaagagcaagagttcttatattctgccagaccctatgctgaaagcttcgtacmaattatctcatttaatcctcacaaaccccctgagggtaagtgtcattatttcttcattttgctgctaagcatttgaaccttgaagtaacttgcttaggagcacacgattttctaatgagggaggcatgagttaaactgagccttctggctctgagataacatccccacctcaactactaaacagttccatgctttggtcagtctgcaacaacctctttgccagcacttttaacacaagatttagagaat

SEQ ID NO: 325170 - DNA, 586 bp, Homo sapiens
agctgtttaataggagtctagggacacatagtcacatagtgtgtttttktttttttttttttagacacagtctcgctctgtcacccaggctggagtgcaatagcgtgatctgggctcactgcaacttccacctcatgggttcaagcaattctcctgcctcagccgcccaagtaggtgagattacaggcacttgtcaccatccccagctaatttttgtatttttagtagagaaggggtttcaccatgctggccaggctggtcttgaactcctgacctcaagtgatccacccccctcagcctcccaaagtgctgggattacaggcttgagccaccacgcccggctcccatagctgctttttgtagtttcctggggatatcaggggcagactgggtcataaaatgtcctcccaaaagggtttgtctctcctttgaggcaggatcagtgatattatacttcccgattgcttcaactaaatgcccttgaaacaaacctggattctcatctttatcctgagaatcttccttaacctgttcatagataacaggctttttcatacatttcttcatcccttccaacgaacaagtg

SEQ ID NO: 325171 - DNA, 586 bp, Homo sapiens
agctgtttaataggagtctagggacacatagtcacatagtgtgtttttgtttttttttttttagacacagtctcgctctgtcacccaggctggagtgcaatagcgtgatctgggctcactgcaacttccacctcatgggttcaagcaattctcctgcctcagcckcccaagtaggtgagattacaggcacttgtcaccatccccagctaatttttgtatttttagtagagaaggggtttcaccatgctggccaggctggtcttgaactcctgacctcaagtgatccacccccctcagcctcccaaagtgctgggattacaggcttgagccaccacgcccggctcccatagctgctttttgtagtttcctggggatatcaggggcagactgggtcataaaatgtcctcccaaaagggtttgtctctcctttgaggcaggatcagtgatattatacttcccgattgcttcaactaaatgcccttgaaacaaacctggattctcatctttatcctgagaatcttccttaacctgttcatagataacaggctttttcatacatttcttcatcccttccaacgaacaagtg

SEQ ID NO: 325172 - DNA, 586 bp, Homo sapiens
agctgtttaataggagtctagggacacatagtcacatagtgtgtttttgtttttttttttttagacacagtctcgctctgtcacccaggctggagtgcaatagcgtgatctgggctcactgcaacttccacctcatgggttcaagcaattctcctgcctcagccgcccaagtaggtgagattacaggcacttgtcaccatccccagctaatttttgtatttttagtagagaaggggtttcaccatgctggccaggctggtcttgaactcctgacctcaagtgatccacccccctcagcctcccaaagtgctgggattacaggcttgagccaccaygcccggctcccatagctgctttttgtagtttcctggggatatcaggggcagactgggtcataaaatgtcctcccaaaagggtttgtctctcctttgaggcaggatcagtgatattatacttcccgattgcttcaactaaatgcccttgaaacaaacctggattctcatctttatcctgagaatcttccttaacctgttcatagataacaggctttttcatacatttcttcatcccttccaacgaacaagtg

SEQ ID NO: 325173 - DNA, 586 bp, Homo sapiens
agctgtttaataggagtctagggacacatagtcacatagtgtgtttttgtttttttttttttagacacagtctcgctctgtcacccaggctggagtgcaatagcgtgatctgggctcactgcaacttccacctcatgggttcaagcaattctcctgcctcagccgcccaagtaggtgagattacaggcacttgtcaccatccccagctaatttttgtatttttagtagagaaggggtttcaccatgctggccaggctggtcttgaactcctgacctcaagtgatccacccccctcagcctcccaaagtgctgggattacaggcttgagccaccacgcccggctcccatagctgctttttgtagtttyctggggatatcaggggcagactgggtcataaaatgtcctcccaaaagggtttgtctctcctttgaggcaggatcagtgatattatacttcccgattgcttcaactaaatgcccttgaaacaaacctggattctcatctttatcctgagaatcttccttaacctgttcatagataacaggctttttcatacatttcttcatcccttccaacgaacaagtg

SEQ ID NO: 325174 - DNA, 439 bp, Homo sapiens
aaaccatcttggatattgagagctgaatgttgaattttcaggaattttatgagctggttgacttcatgttggtaacttaaaatctgcgatggtgagctgggtgctgtggcacgcacctgtaatcccagctactcaggaggctgaggtgggaggatcacttgagcccaggagttcaagactagcctgggcaacatggtgagacccccatctcaaaaaaaaaaaaaaaaaaaaaaagctgccatggkgggaatatttatatgatggaaaccaatgaacactacaaagaaaggatttgcgtttcttctggagagccagttgttaaatatttactagcaaaccactgaacataagtgtttttaccaatttacagttgagtaaactgaggctttgagacccaagttctctcaaagcataagtaagtggcacagccagtattaaa

SEQ ID NO: 325175 - DNA, 386 bp, Homo sapiens
agctgtctcagtctttgccgccgcgccggcgagcgccgcccgggaggcagcggctggaggagcggacgggccccgcgggcccgagggcaaggagcagccgcctgccttggcctcccaaagtgccgagattgcagcctctgcccggccgccaccccgtctgggaagtgaggagtgtctctgcctggccgcccatcgtctgggatgtgaggagcccctctgcctggctgcccagtctggaaagtgaggagcrtctccgcccggccgccatcccatctaggaagtgaggagcgcctcttcccagccgccatcacatctaggaagtgaggagcgtctctgcccgcccgcccatcgtctgagatgtggggagcgcctctgccccgccgccc

SEQ ID NO: 325176 - DNA, 449 bp, Homo sapiens
gcgcccctcattccacacagctctggtgyctggaaactgcggtcgccggagcggtcgtcggtcctcccggtttctctattttaaaagccatttcaaacctccagcggcctcgccacctctgctgcagaccttccaagcccttctgaagccggaatgatttctccctaattcactccccctgcttaacacattcgaacggctcccgcttgttctcgggaccaaatccaaagcccctggcgccaccttcgagagcctccggacctgctgaccccccacacctgggctctgagctccagctccaagatgctgctcgccctcccttccccgccgctctctttctgcgcgcctttcccctgccttccctttctgtcactctccctggctgagccctctccgcctccaggtctccgggaaggttgtccccaggccggtggggcccctgcaggtcc

SEQ ID NO: 325177 - DNA, 668 bp, Homo sapiens
ttaccatttttgacaaaatagctgcttgatacccataaccatagtttatcagccattttttaaggtaaaaagggtattctatgacaaagcagctagctcaacttggaactmgaacaatcatacaatgcttttcctaagataactactctaatatgtggcaaaagtgctttatgtgtacatctcactcaaagattttttcaaagaaaaatattaatttttactgcctcattaaggacattcttttgtactgcaagtgtgtagtggagaagaatacaaagactaatagtactgtttgggtaccaccaccctgattcaggcaaaggtaccaatagctttatccatctttgcattttgtactatcagtgcatgtatcaatgtaatgaaaaaagcaaataacgtctaatttttattatgaaaatagttttgacctcatggaccctctgaagggatccacagactaaactttgagaaccactgtacaatatactgttaatcactttacttttttcattttataatataacttggaaatctttctatcttggcacagagggaactccttcactctttgtggaatggaaggtgtgtaatattccattatcagagatggatcctaataaattagttcattaccagtggccacttggcttatttttcatcctttggta

SEQ ID NO: 325178 - DNA, 639 bp, Homo sapiens
actatcagtgcatgtatcaatgtaatgaaaaaagcaaataacgtctaatttttattatgaaaatagttttgacctcatggaccctctgaagggatccacagactaaactttgagaaccactgtacaatatactgttaatcactttacttttttcattttataatataacttggaaatctttctatcttggcacagagggaactccttcactctttgtggaatggaaggtgtgtaatattccattatcagagatggatcctaataaattagttcattaccagtggccacttggcttatttttcatcctttggtatcgtaacagttaacaactttgtgtaaatgcaatttcatacacaggagaggcctgtatatgtagactatgtccatgacatacatatatgtagaattagttaccagaagtcaaagtgctatttcctccctccactctattgggtgctctgagatttaggtctctctgagggtactgtggggcacagtgattctccttatgtcagaatccctgattacgtgcatacttatgtctgccrtgctaaatcaagtaccattcttctatccccttctgttttccagaaatttactgaactctctctctcactgaatagagtaagaataacctat

SEQ ID NO: 325179 - DNA, 643 bp, Homo sapiens
ggtgttctgcaaatgttatctcagatagtctctggacaggacctgcaagcagacttgctcagggtctagaaagtcttccctggacaaattccagatctctagctagctaagacaactgcagccattttcctgtacaacttaatattaacaccaatatttaaccatcttcaactccctgagtccaagttaaggagagggaaagtctrtgtatgtcctgagtctccagcacatcttcctcacctccactagggcctacaattcacaacattctctgtgtggaccgtcatcttggacccatatgaaatacttgaaagataaggcagcctggccacacaaaagcacaatcacatgttattctatctacttgtgctgagaggaaagcacaaatgcaaatggacaaataaagactaggtgatagcatgacaacttcttcaaatacacaatctttacaccaggaaatccccagttgcctctttgttttagaagactccatgagtaaatcctgaaagggtgacaggtaatcaggaaagcaagggttcagctggaagtaatgccaagggacagagggagagaagaaggaaggatctatgcataagagctcctgtgaaactcaatctagcagactaatgctaagccacagttg

SEQ ID NO: 325180 - DNA, 608 bp, Homo sapiens
gctttcaatgaccacattttaaaaaattttaagtcagataggaccaataaataatcatattttaagtaatattcatagagttcttttgataccatgttgtaattttgaaactatagaggcaacgggacagaaaagagaagagcctaaactcacaaggacaaaaagaacagaaaagttcacagccaccaaaatttggaaggtataaagttgatggacgagtagtatttgacttagttgacccaagaagatagaaccttagccagctggaaagcccagaagtaaaccaatttacatcacagaactccaaaatgctyagtaatcagcagtaccacatacctttcagagtagcactgaaggtaggactaaaagcaggattgattgaaagtctatttagaagccgttagaatacagttcatcatagtgtatcgtattcaggatttttggtaagtgaatagattacagctgctcatggagggaggggtgagtaactgtgagttgatgaatacattaatttatttcaccgtagtaaccattttactatatatagatgcccctcaacctaagatggtgtcacttctgaataaacccattgtaggctgaaattgtcc

SEQ ID NO: 325181 - DNA, 539 bp, Homo sapiens
ttatgcaggtaggcaatgcccatctcccactatagcaaaaaactgtacattcatacttgggacagagtaaaacagagggtctctgaactgcagaacagcaggaaaaattaaaagcaagggtactacactgataaaaagattagtggaaaagagttattaaacgaaattttacactgactattgagaactccatacttcttcccccattttgctactccagataatatcaggtttatactcttyaggcaaaagattggatgagtcttttgggggatctgagtagccctccaaaagggaaatagtcccaagaattgcccccgccatatcattcatcaaagaggcttgcttgctgtcaatgagacactcccacatacagagctctcaaacaactttcaaattctccatcatcaagaagcatacaatatactgcatgttgaaataagaacaatactcagagaaaaagaacttctgaaaatttaaaacatgagagcataaaagaaaaactcactaaaagggtaagaagaaacattaataaatta

SEQ ID NO: 325182 - DNA, 514 bp, Homo sapiens
aaactactaagaaatgttccaaaagaaaaatgagcaaaggacatgacaatccacaaaggaacaaacataaaatgaccaacgtgaaaagacatacatactcactagtaatcaaatagattagaataaggaggcactacaccttttatctagtaaactggcccaacattgtttttaataatatgtatacttgagcaagggcacaagaaaactracactagtgttagtggggatacaaacacctttttctgaaggcaatttggcagtttctagcataactttaaaaatgaacataccctttcaatgagcaattctatttctgggattgtaacttaaaaaattatggatttgtgaagttatctgtaaaaaagtttattaaaatgttattggtagaaattttaaaacatgaaatgtgctaaaataaggaactgctaaaataaactgcagcgaaacaattagctatttagctagctgttaaacatggctggaaaaaccatataacatgatgcctagtctc

SEQ ID NO: 325183 - DNA, 604 bp, Homo sapiens
tttccttcatgcttctcaaattatgggaaggctaccacaaagacttccccaaatttaattatgtaataattgattatcttctattattycacattgaagtaacttatttaaaataataaaatttattttaaatttaaaattgttgattgaattaaaactaggtaatgcaatattttattcatatggcattatcttatgtggtttaagtacatgtcatcaaaagtgtagtgcttcacacttatattattcgatttatggatagtgaccttgacattttttccaactattttaaatttaaatcaacttttaaagactcctcctatctctttaagcataaggtaaataggtaagtaaaacagctttcttgtgggttgtctatatgacataaggcaatactgccaattatgttttctatagatgcattttcagcttttctatcatgactctcttcctcaagagagacgcattttgtgataataatttagcaatacactaagaacaaaatgaatagatatttaacaaaggttttcattattctattatatatctgagtgtatatagtatactatatatgtgtattagttcattttcatgatgcaaatac

SEQ ID NO: 325184 - DNA, 377 bp, Homo sapiens
acacacacacagaggctgtcacacaaagaatggttatataacaaagtaaacttttataacaaccatatttatctgaatcttgattcaaactaactggaaaaaatatgcctttgagacaattggggtaatttaaaaatggattgggtatttaataatattaagaatataatgatgattttgttaggtgcagttttggcatgagtgtttggttcaaacattaaagactctccaatcaaaaagtgataaactacctatsaggtattatgcttattacccaggtgatgaagtaatctgtacagcaaatccctgtgacaacaatttacctatataacaaacatgcacatgtacccctgaatctaaaacaaaagttaaaaaat

SEQ ID NO: 325185 - DNA, 530 bp, Homo sapiens
gatacagatatatagctatagagatagayatacacatacacaaaggcagagagaaaaaaaaaagtaagaggagatatggggaggtgagagggagaaagagaggaggagaaaaaagaaagtgaaattaggggaaaaatgcatcgtagactctcctagtaactatttccagataggttatgtactcctttgcttggatactatgagcattctttggaaatcaacacatattattttatttaccagttttcatttcttagagtctggctcatttaatttttaaaaaatttgctcaaagggtacaaaagtagatcaagtaaagtaatgtgttctatcttaagtaataattttagtagaaaccctagttcataacttgaattttcttattcaggaataaatattgcttaaagttagagcaaacaggtattcagtgtgaattactgacatactatataagagacatacttttaaaaatgtatatacttaatgaaattaatttaactaataattttaaggtaatttgtatgctataa

SEQ ID NO: 325186 - DNA, 530 bp, Homo sapiens
gatacagatatatagctatagagatagacatacacatacacaaaggcagagagaaaaaaaaaagtaagaggagatatggggaggtgagagggagaaagagaggaggagaaaaaagaaagtgaaattaggggaaaaatgcatcgtagactctcctagtaactatttccagataggttatgtactcctttgcttggatactatgagcaytctttggaaatcaacacatattattttatttaccagttttcatttcttagagtctggctcatttaatttttaaaaaatttgctcaaagggtacaaaagtagatcaagtaaagtaatgtgttctatcttaagtaataattttagtagaaaccctagttcataacttgaattttcttattcaggaataaatattgcttaaagttagagcaaacaggtattcagtgtgaattactgacatactatataagagacatacttttaaaaatgtatatacttaatgaaattaatttaactaataattttaaggtaatttgtatgctataa

SEQ ID NO: 325187 - DNA, 560 bp, Homo sapiens
cacatatctggtaacttatattccaacaaacaggccattataattcaatggagaaaaataataatgggaaaactggatattcgtgtggaacaaaagagccataagttttatttcccatcatacaaagctactaacttgaattaaatgaaatatatcataaatctaaatgtaaatgttataagtaccttttagcataaaacatagggagaatcttttcaaagtttgggtggaacttttttggatagaatgttaaaagaatggatcatcagaaaatggataaaatgaattttattaacaataaaaccttatgttaaaagtttttttatggcaaaagacacattaagaaagtgaaaatgtaagctgcagattgtaaataaatatttgtaatatttaggtctgacaaatgatttstttgtggaacatataaagaactattgtactcaaaacaagaagacaaaccatctagttaaaaatggattaaatgttttaggacacacttgacaaaagaagatacacaaatcattcataaacacctgaaaagatattgagtatcactaatc

SEQ ID NO: 325188 - DNA, 514 bp, Homo sapiens
tattactataaactttcctcttagaactgcttttgatggatcctatatattttgatatgttgtttctatttttgtttgctcaagatatttttaaatctctctttctttcgatttcttctttgatacattgattgttgaggagcatcttgtttagtttccacatatttttgatttttaaacttttctttttttattgattttaattgatcaataaatgattaccattattgtytcttaccattgtggttgggaaactacttgatatgattaaaatcttaaagcaatctaggaaatgaaggaaaagataaacatctgaaaataaaatcaattagaacttctgaaattgaaaaactcacttaagtaatttcaaaacacaattgaaatatttatcaatagactggacaaagcagaagaaataactttagagctagaaggctggtctttggaactaatgcagtcaggtaaaaataaagaaaaagaatttacaaaaatgaacaaagtccttgaaaaatac

SEQ ID NO: 325189 - DNA, 629 bp, Homo sapiens
tctctgtttatctcttgctaatcatggtttgtgttacataagtttccccaggacaaggactgtgtcagcctggtattgttccttcatatcaccttagtgattaaatattaattgttaacccagagttaccacgttcacatcaaataaagctttcaactccaccttatactataaaatataccaccaaaccttctcctgtatatgtgagtgaatagacaactataaaacataaaataaaccttttttatttttaatttttctaagctgagcaccatggatcagagataacttcactataattctgagcaatgactaatatattgkattacacattttccagataatgtgacccaaagtttgttaaccctgggaaataaaatgaaaactttcagttttaatttcaccttggattgggtgggtttcttggtgtgtgtatacgatgttgtgttataaaggatgcaaaatagtactctctctttcaacacacatatgacaaattaagcattatcaataattatccttcagagtaaatgtgtttcttacatacttgctgctatattgtcttgtatatggagacaggataaattgtctttgatcctgagtttgtgaatagaagaaaaaagaaggag

SEQ ID NO: 325190 - DNA, 575 bp, Homo sapiens
cagctcctgtggaatctccctggtcagactccaggtcaacaggtcctggagtccagtctggagtggatccagactccaggccaatgccatggacccagttgccagatctgttgacctgctgactcaagaaccagaagtctacctgaggaatccacagcaagtccacctgcagaacawgcaaaacagcctagtcagaatctctgaataggttgactggtcaagcctttctcagacaaagccactcttcaaagactgaaataaatctctacttcctcaaatgcacagacaacaatgcatggtcacaagtatcaagaacaaccagggaaacatgacattacaataaataaatacataactaactaactaaataaataaataaataacaaatacaaatgctagtagctaactctaaaataatggagatgtctgaactgcctgagaaataatttgatataattttaacaagatgggtgaacttctagaaaatactgagaaataattcaacaaaatcaagaaaacaatacatgaccaaacaagaaatttaacggattgaatttgaaaaaaagaacaaacaa

SEQ ID NO: 325191 - DNA, 574 bp, Homo sapiens
ttatcaaatgttataggactagtataactttttcataattttgaggataatacctgatgtctttgtgttaaaaaaggagactaaaaagtattaaagagatattgacagaaaatgatcaattttgactttcccttcataatgttatcaaagataccgagctaaattgaaacaggaattatactcttagtgtagtatacaatgtattctaaagctatatctgttaaccatcaaataatcttaaatatcactagtaatacagctacacaatttagaaaatgctgaacttattacatcatacatcttattgcactgaacagttttgcattattaataatttagtatctgtggagtccagatatggttgccatatctgatctaggagtaaggtaaaaagtccacatggatgctgtgtaattcctcaagaatgaagagaatagaatttggaaatgcatgctgtctgtagtacattcttccattgcctttgtgtatgtccagccctgatcatatacaaaataacatgcaaakctgaaaaataaatcatgcaacatataacaactgagtacgtcctgacgac

SEQ ID NO: 325192 - DNA, 512 bp, Homo sapiens
taaaaattcagggcatccaaatgttggcataatttactgtcagagaactagagatatttaagacactgggcaagtgtcctcaatttcttagtgagaaactgatgtgtcagagatgatgtcttaaataaatcctataaaaatacaagtattcttaacatcagaaaagaattcttttgatcttgtgttctgcagaatgttgagatatcctctccaaagcaaatgacaacttarggcaatttgtactgcaattaagtgatttaaaatgtactgcgtctttcagttatggaggcaacacatatcacacttgagtaagctgtcgcaaaccattcaaaaagtaaccttcagcttgcctctcttgcataattccttaccagacactcttattgtcccacctctatcttttgaattttactcccagtgattgtggtagtcagccatacatggaacccccaatgatcccattctctggtattcacatcattgtggagtctcctcccatactttacctggct

SEQ ID NO: 325193 - DNA, 580 bp, Homo sapiens
ataagtgaaatgtcaacagtcaaagaagattcaatacttacataattggagtcttaggaaaaataaaaaagcaacacaataggaatatacacagtgaaagggcccatattttaaaatgtatatgtttccttataggtgaagtgtgtctcttataggcagaagatagatgggtcttggtatttttcttttagatgggtcttgttttkttttttttttttttctttttctttctttttcatccattcagacactctatgtcatgtcttttgactggataatctaatctatttatatttgaggtatttgttggtagataacaacttacctactgccattttaaaaatagtttctggttgtattgtagatccttggttcctttttcctctcttattggcttcctttgggattaggtgatttctccctagttgtatagtttgatttttttctttttcatcttctatgtatctactacaggtttttgcattgtggttatgatgaggtttgcataaaacatcttatagttataatagggtatcttaagctggtaaaaactaacatcactcacatgaggggagtcttt

SEQ ID NO: 325194 - DNA, 580 bp, Homo sapiens
ataagtgaaatgtcaacagtcaaagaagattcaatacttacataattggagtcttaggaaaaataaaaaagcaacacaataggaatatacacagtgaaagggcccatattttaaaatgtatatgtttccttataggtgaagtgtgtctcttataggcagaagatagatgggtcttggtatttttcttttagatgggtcttgttttgttttttttttttttctttttctttctttttcatccattcagmcactctatgtcatgtcttttgactggataatctaatctatttatatttgaggtatttgttggtagataacaacttacctactgccattttaaaaatagtttctggttgtattgtagatccttggttcctttttcctctcttattggcttcctttgggattaggtgatttctccctagttgtatagtttgatttttttctttttcatcttctatgtatctactacaggtttttgcattgtggttatgatgaggtttgcataaaacatcttatagttataatagggtatcttaagctggtaaaaactaacatcactcacatgaggggagtcttt

SEQ ID NO: 325195 - DNA, 580 bp, Homo sapiens
ataagtgaaatgtcaacagtcaaagaagattcaatacttacataattggagtcttaggaaaaataaaaaagcaacacaataggaatatacacagtgaaagggcccatattttaaaatgtatatgtttccttataggtgaagtgtgtctcttataggcagaagatagatgggtcttggtatttttcttttagatgggtcttgttttgttttttttttttttctttttctttctttttcatccattcagacactctatgtcatgtcttttgactggataatctaatctatttatatttgaggtatttgttggtagataacaacttacctactgccattttaaaaatagtttctggttgtattgtagatccttggttcctttttcctctcttattggcttcctttgkgattaggtgatttctccctagttgtatagtttgatttttttctttttcatcttctatgtatctactacaggtttttgcattgtggttatgatgaggtttgcataaaacatcttatagttataatagggtatcttaagctggtaaaaactaacatcactcacatgaggggagtcttt

SEQ ID NO: 325196 - DNA, 604 bp, Homo sapiens
tggtaggtaaaagattaagacatttctatttctatttttctgggagcttttgttttcttctgttttgttttattatgaacaagtgcatraaagttaattgtatgcatcaattaactgggccacagggtgcccagatattcagtcaaacattattatggatgtttttataagggtgtttttggatgagattaacaactaaatcaatcagtagcctaagtaaagtagattgcctttgctaatggggatgggacgcgtccatcagtaaatgcctgagtctaacaaaaggctacttctctcccaagcaaaggaaaattctttcctctttctgcctttgaactgagacattaggtgtttgcctatagactgaaactggaacatcagctcttcatgggtctcaaaactgttgaccttctgactggaaatacacccctggctctctagttcttgggccttccaaattagactagaatttcatcattggctcccctgggatccagcttgctaatttaccctgaagttctcagcatttgtcagcctttataatcgcatgagctaattctttaaaataaataaatacctctctatggacagatatagatatagc

SEQ ID NO: 325197 - DNA, 540 bp, Homo sapiens
gtaagtcttaaagttgaataaagtcagtcctccaattttgttcttttcctttaatactgggttggctattttgtgtcttttgcctttagaatcagtttgttgatatccacagaatattttgctagaattttgattgtcattgcattaaatctataaatcaaattgggaagaactgatatcttgacaatattgagtcattctattcataaacatgaaatatctctccatttatttagttattgttttacttctttaatcagagttttgtagtttttctcattttgttagatttatacctaagtatttcatatttgggggcactaatgtaaatggtattgtgttttcaatttcaaattttacttgttcattgtttacataggaaggtgactgacttttgtatattaactttttatccttaaacctttctataatcccttrctagttctaggagggttttctttgtcagttcttttgaattttctacacaggcaatcatgttatctgtcacagttttatttcctccttcctaatctgtataca

SEQ ID NO: 325198 - DNA, 560 bp, Homo sapiens
actgaaatctttaggattccctcctaagtcccggaacatgtattcttaaagggaagcaacttgctttgagaaggctggaatcaatgaggagtccacagttacatcctgtgctgggcgcagctggtctgcgaagttcagctggctaagagaactttctaaaagctgacactggccagggaagccagtcacccactgtcatcagggtcttctagttcatctacttcctgctgacggctcytcagtgggaaagtataggagcagtttctgacctgcctgtcagcccaattttgtcgtttccttaggctcacccagctgccgtaacagagggaacagagttccttctgaacttctattttgccaccctttaaatgtctggtcatcctagggctgggaattattgttttcatctaaaagagtattttcccttatttccaaaactttgcttctaccgtggaagagtttgtgacccacgtctttgttcatccctaatgttctttcagccttctttggatagggatggttatccgctctcccacagcccctggctggtaacctcctac

SEQ ID NO: 325199 - DNA, 531 bp, Homo sapiens
tgtgtgcctaacttgattacaacctctattacagtgtactttatttatggatttatatgtctataagttcctctctcattattctgagagcaagtcagatacaggagccatatgttatttacccctgtggccctggtgcctactaagtgcctgacaaatagcaggcacccaatacaagtttaytgaattaatgacagaataagtatcaaaaacatcttgaagaaatcagagctgaaagtaaaataaaatcaaataagattaaatatactgttttcatccatctgggctgctacaacaaaataccctaagccgagtggcttataaacaacagaaatgtaattctcatagttccaaagactggaaagtccaagagcaaggcactaacaaatttgggttggctgatgcctgtgaacccaaaagtatctgagacagttctcaatcaatttagaaagtttattttgccaaggttgaggatgcacctgtgacctagcctcaggaagtcctgatgacatgtgcccaaggtggtcgggg

SEQ ID NO: 325200 - DNA, 542 bp, Homo sapiens
atattgcactgggtgaggccaaagaaggaatgaaaaggtgacagtgtcctggagtgagagcaacatggcttatctcagctgtgttctaaattacaaaaggcaccagttctggcatcaggtagacctcagttcaaatcctaaagagctacctcccaactctgtggccttggagagttcattaacctacatgagcctttgttttctcattcataaaatagaaaaactatgttgtattcatcagagtccaatcaggagacagaagccacaccagttgttcactaggtaactgaaaagataataagagaaacagctaccattcctgaagatggggggagggggaacaagctggaagagcracataggacatttggggcaccaacaggtttgtgttgacatttctaggggttgtggtgggggctgggggtggtgtgcaatgagactggtcctgcaagtgagggaaaaactgcaaactggatccagaagctgctgatgtgatactcatgggaacaggaagtagctacacgtccatagggaagagccag

SEQ ID NO: 325201 - DNA, 562 bp, Homo sapiens
tcaccctgcctagccacagggatttcttcaggggcatatgactgccacctccccagagccactgggatgctgtgagacattttctgaaacagtggcawgtggtagtattctttcctctaaagccgagacttgagacgatacagggtcaaatctgctgtcgccatcttgagagcactggggccaccgcagaggaaatggataagagacagagagaaaccagccatgcctaacaggtctactcttgggcgttttgttgttgttgttgttttctcactcagttccccaacaagtttacttcttgcttaaacccactggggtcggattttctgttacatgaggctgaagttggcaagttcctgttactgcctctatctggaattcccctatgtggtcacatccccatctactggcaaagaccttcatctctttcaagactcactttaagcaccgaccacctgtatgcctttcctacccgctgcctctcatggcactgattcctcctttatttttccccattgtactctgtacacacttttatcatagcacctaaattatttgaaac

SEQ ID NO: 325202 - DNA, 590 bp, Homo sapiens
aaatcagaaggaaaataaaaaactgagatgaaagaaaatgaagacgcaacatataacaaattatggggttcagctaaagcagtgcttagaggaaaatttatagatataaatacctatattaagaaagaagaggccaggcacagtggctcatggctataatcccaatgcttttggaggctgaggtgggaagactgcttgaggccagtagttcaagaccagcctgygcaacactgaaagaccccatttcaaaaataaaaatgttttaaaaatagaaagaagaaagatctcaaatcagtaacatgactttctaccttaaaacagtgacaaaaaagagcaaagggtatgagggttctttataaggtgataaaaatgttttaaaattgactgtggtgatcatttacatacctatagatatatgaaaaaccaacaaattatatattttaaatgggtgaattatatggtatgtgaattctatctcattaaagttcaaaaagtgaaggtgaaataaaaattttcccagataaatactaacagaattttcagatagtagacttgccatactgagaatgctaaagctgaaaggaaacggt

SEQ ID NO: 325203 - DNA, 578 bp, Homo sapiens
ggacaaggacagagtgcctgggggaggggaaggcaaccactttggttgtttgaataactcagcaattgcagcctgtgggctttggagagtccaagccaacaagggcagagatggttcatcagcactacatggctgttttgtcaaaggcatggccagacagcttctttaagtgggacccaaatccactgctcctcatgaggaggtccctcccggtcagagactccaactacccctgcctgtgttttatggccaagagaattctaatttctcttttggacagagtgcctgtgaggtggggcaggttgccaccttgactgtctgggcatctcagccggtccagyctgtgggctttagagagtccaaactaatcgggggctgaatagattgccaacacagcacagctgctctaccaaaaagcagcttcatcagaaacacaatcccattcacaattgccacaaaaagaataaaatacctagtaatacaactaacaagggaagtgaaagacctcttcaagtagaactatgaatgactgctcaaagaaatcagagatgaaacaaacaaatggaaaagcattccat

SEQ ID NO: 325204 - DNA, 641 bp, Homo sapiens
ttggaacaattttggacaaaaggataataatctgcctctagaaacaagatgatcagttcttgtattaaaagaaaaaaccttgcaaataatatggattcagagtattacaccttagtcacttgtgagtaaaaacaggggaaccaagatttttatttttctttcagaaaataaaattaaacaaaaatttaaaaccccmacagcagaaacaacaggcagtgcaaaagagcattataatctttctccttggatgaaggtggggcaaaaaaataaaaaagaccaggatatttaaagacttgatgcataatttatgtgcagggctatttttgcaggcttttgtaatagcaaaggagatgagatggcatcagcaaaaatcaaatgaaagtggagcttagattaatctcaaaataagttcccccaaaagaagcccatgaatatatggttcctccctcaacaattatgggaaggtatgactaattaaaagccctaaaaaactggtggaaaaaaattcaggcaaaacctgatttccccttcagatgaggtcattgtaaatgtcaatatttccatcagcatcagcaattgcagtttggagttggaacatcctgaagcagaactctagagtgcttcactctaggagctaacgt

SEQ ID NO: 325205 - DNA, 641 bp, Homo sapiens
ttggaacaattttggacaaaaggataataatctgcctctagaaacaagatgatcagttcttgtattaaaagaaaaaaccttgcaaataatatggattcagagtattacaccttagtcacttgtgagtaaaaacaggggaaccaagatttttatttttctttcagaaaataaaattaaacaaaaatttaaaaccccaacagcagaaacaacaggcagtgcaaaagagcattataatctttctccttggatgaaggtggggcaaaaaaataaaaaagaccaggatatttaaagacttgatgcataatttatgtgcagggctatttttgcaggcttttgtaatagcaaaggagatgagatggcatcagcaaaaatcaaatgaaagtggagcttagattaatctcaaaataagttcccccaaaagaagcccatgaatatatggttcctccctcaacaattatgggaargtatgactaattaaaagccctaaaaaactggtggaaaaaaattcaggcaaaacctgatttccccttcagatgaggtcattgtaaatgtcaatatttccatcagcatcagcaattgcagtttggagttggaacatcctgaagcagaactctagagtgcttcactctaggagctaacgt

SEQ ID NO: 325206 - DNA, 633 bp, Homo sapiens
gatctaataaaacaaaacacactctggttttaagcaaatgccacacaaggctgcctgcacagactttaccaaatggcttgtaggtcaggcaaggatcttaggatgcagcttcttgaccttggaccaaaggatcacagcttcatctggtattrcaggggagttagagataggacgttaagcctgacaatattgtctgctttcaaattgctagacatactggatttaagactacagaaggccaggagcaatggctcacgcctgtaatcccagcactttgggaggccaaggcaggtggatcacctaaggtcaggagtttgagacctgcctggccagtatggcaaaaccccatctctactaaaaatacaaaaaaattagcctggtgtggtggcacatgcctgtagttccagctgcttgggaagctgaggcaggagaatcacttgaacccgggaggcagaggttgcagtgagccaagatcacgccactgcactccagcctgggtaacagagcgagatgccatctcaaaaaaaaaaaagactacagaaagagttgtggccggagtgtgtgtgccttgaccatgggttcaaaaaaactgcatattacatctattcaagttgactttggatttggtattta

SEQ ID NO: 325207 - DNA, 633 bp, Homo sapiens
ttttgctcaatgttttctctatgatgtatacrgttattattattattaccattattattttgtgaagcttcttcatgcaggaatagaatgaatagcttgcagtgtgtgtacagttatgagctctgtctgacccttgggaaagttatttactattcaagtctcacctttctcatcaggaaaactggataacaataatatcaataattccgaaaaggttttcttttaaaaattacgtgagtacctagatgacatgtacactgcaaaatcttcttccactttcaacagctccccacacctattacatgtaagaacccatgctaggcactggatggtgacagaaagacaatttctgtcattaagccagtgctctggtcagctgtcagtcaaagcattataaatctgttcctttcgttttcatctgtcactttattctgctgacttcacttcctcaacatccctgaagatgattctttctgtccccataatcactgcctgcattcaggcctccaactttcctgcctcgatgttgtaatggcttcctaatgagtccctctgctaccctctcattagtcctcaatctgttaaactccctgctgccagactgaacattctaaatgcagctcccatcatacc

SEQ ID NO: 325208 - DNA, 583 bp, Homo sapiens
gaaatatcctctatttcctttagtaccactggtttcttgtgactcactttgtcattttgctaagttggtgacatctgtgtctgtgctgccataaaatatgtagtkgtaatattgctgctttttggactgagtatatttgtgtaaaatgatttgcaaatgtttcgtgtgtgtaagtgtttacatttgtatgcattcagtcaatacatgagatcagctgtaaagacagagaaccccagaatttgaaaataagtgccaaactaaaatgtcaatatgcagtgggtcaaagcagaaatatgaaaagttactcacaagatgtaatgttcctaggccagcaagatttgacaacatcctgagtaacagtggaaagataattaaatgtgaaaaatcaaggaaaagcaatggctagattaagaagcactggaaaaaacaggacacgtagggaaacaaatattgtcagtgtctatttggccctctccaaggcaggtgggtgccctgaagaaatgatgataaaatcaagtcttggcacaaaacaccataaccacagatactataacttttgctcaccatcatactaaccaatctt

SEQ ID NO: 325209 - DNA, 632 bp, Homo sapiens
tacccatccatgagcataggatgtgtttccatttgtttgtgtcatctatgatttctttcagcaatgtttatagttttccttgtagaggtctgtaacctccttagttaggtatacacttaagtattttaytttattttattttctgcagctattgtaataggggtctaagctcttgatttgattctcagcttggtcattgttggtgtatggcagtgctactgatttgtctacattgattttgtatcctgagacttttctgaattcatttactagttctaggagctttttggatgaatctttagggttttctaagtaagtgatcatattattagcaaacagtgagagtttgacttcctctttaccaatttggatgcccttgatttgtttctgttgtctgattgctctggctaggacttccagtaatacattgaatagaagtggtgaaagtgggcatccttgtcttgttccaattctcaaggggaatactttcaacttttccctgttcagtgtaaaattggctgtgggtttgtcatagatggcatacatgtcatacatggcttttattaccttaaggtatgttccatctatgccaattttgcttagggtattaataataaagaatactagatttt

SEQ ID NO: 325210 - DNA, 589 bp, Homo sapiens
ctctctgtgctcctagttaccagttcacactcccatagctaagctgcagcctcagtgccctggatctaagcaaagggcctcccatcccctgacagggtcaggctcagcrttcttagccttgaagtccttaaccccatttattggctgttcaaacgtctagagtaggagcctcagctttcagttgtgttgatgacatagtgatcccctcccaccatctcacctcccaccaagtcacaacactttaattggaattcaaaggcctggtacccacagctttcctgaagctaactcttctgccactatcttgctcaaggaacatcacaggatactcagagacaagtatccagcaagaaaatatttcatttgaccttgcagtcagcagatgccatcttttgatccagccattcactctgggactagattatctttttcagtttaactctttggctcctggcccagccttcttagttctatacatccttttgtgtccatcctgccaatccttcctggaaataacaagtgtatatggaaataaagggaatcatttcagttcttttcccttattgtcccaattttttcttttttactc

SEQ ID NO: 325211 - DNA, 589 bp, Homo sapiens
ctctctgtgctcctagttaccagttcacactcccatagctaagctgcagcctcagtgccctggatctaagcaaagggcctcccatcccctgacagggtcaggctcagcgttcttagccttgaagtccttaaccccatttattggctgttcaaacgtctagagtaggagcctcagctttcagttgtgttgatgacatagtgatcccctcccaccatctcacctcccaccaagtcacaacactttaattggaattcaaaggcctggtacccacagctttcctgaagctaactcttctgccactatcttgctcaaggaacatcacaggatactcagagacaagtatccagcaagaaaatatttcatttgaccttgcagtcagcagatgccatcttttgwtccagccattcactctgggactagattatctttttcagtttaactctttggctcctggcccagccttcttagttctatacatccttttgtgtccatcctgccaatccttcctggaaataacaagtgtatatggaaataaagggaatcatttcagttcttttcccttattgtcccaattttttcttttttactc

SEQ ID NO: 325212 - DNA, 504 bp, Homo sapiens
gtcatatgactaaatggataaataacacacaagtcatttatgagccagcaatatagtatgtcctcaggaaatacataaagctagttttagtttgacttttttgtgtgtttttcagagatatgcacatagtaattattcaaaaactgatctttcttcatttttttctttcttccttccttcctttataaattcattcaaccatggaatggctgtctgctctgttcaaagcaacacattggggtttggggattgaaagaratgaataaaaaggtaggtcaccccttggttctcaaatgactttcaaccttttgaaccgagaaaatggaggcaagtgtgaaagggatcttttcctacaatgacataagtgaacaaacaagttttgtcattaatttcatgggaaaagcagcttaaattcagaaaagatttcatcacagaaaggaggaagaatggaaattcataaagtaggattccccaggcctctaactttccaaggaatagatagaa

SEQ ID NO: 325213 - DNA, 504 bp, Homo sapiens
gtcatatgactaaatggataaataacacacaagtcatttatgagccagcaatatagtatgtcctcaggaaatacataaagctagttttagtttgacttttttgtgtgtttttcagagatatgcacatagtaattattcaaaaactgatctttcttcatttttttctttcttccttccttcctttataaattcattcaaccatggaatggctgtctgctctgttcaaagcaacacattggggtttggggattgaaagaaatgaataaaaaggtaggtcaccccttggttctcaaatgactttcaaccttttgaaccgagaaaatggaggcaagtgtgaaagggatcttttcctacaatgacataagtgaacaaacaagttttgtcattaatttcatgggaaaascagcttaaattcagaaaagatttcatcacagaaaggaggaagaatggaaattcataaagtaggattccccaggcctctaactttccaaggaatagatagaa

SEQ ID NO: 325214 - DNA, 477 bp, Homo sapiens
aagttgtaagtcaagaagaaaaaagtggcaaaatgttgttctcattgaaagcaaaaacaaatattgatttatctaagttttaacaaaacattttttctttyctttaaacactagcttcctcatacaattaaaatagaaactgattggcaaagcattgattcacagcaatattccagggccttatctaatatataaagtaaaacttatctgaaccaacaatgtaatccctgtccttagtttccattgcagaaagaaacagaaggaaagaaagctcaagttgtttataggccactgccaaggtagactagatcagaaggctacaaacaaccatcttttaggaactaagtattttgtagggttcaataacaaaattttcttttcaaattttcagaagcaacataattattttttaatcttatttccctgctttagattttctttaaatattgatacccaataccataagcagtactagta

SEQ ID NO: 325215 - DNA, 582 bp, Homo sapiens
gggctctttagaggcagatcctgagacagattcagacacaaatgatttattgagggaaagttctcaaatctgtaagaaagggaaggaagaagaataacgcagtggggacaggggtgtcagtggaggtggagtgtgggggaaggagctgagtacggttatggtctcagaacagtctaaatctaacctgttctgcaggggaattatataaattacactgcagaggtatccctacaagagcaagagggttggtcttttgcacaaccatattagccagtcaatggttatggtggctccagaagagatgcataatctcctgttcagtggtccctgtctacagagaagagatagctacactaagagaagctgggggaatggaagtagaaaagggaagctgactgggcaccaacagtgtctactatagccatcctggcaacttgatcattccttggctttctatccataaaacagcaaacattactgactcaacaaaaatacagtgatctcctatctgtgccaggtctttgttktatgccaagtttacaaaagtgaataagccattgtacctttaacacctggctaaag

SEQ ID NO: 325216 - DNA, 499 bp, Homo sapiens
actcaacaaaaatacagtgatctcctatctgtgccaggtctttgttttatgccaagtttacaaaagtgaataagccattgtacctttaacacctggctaaaggcaacactatgtctccagcagaaagtgaagaagtaactacatgcacaggagaatttcagatgctgaggaggactatgaggaaaattaatcatgctaatgtaagagagtgacttgtagggtggttacggttacttctttggaatggatgttcagggaagacttttctgtagaaggaccatttgagcaaagaattgaatggaataagaggaagaaataagccacttgaagatctaagggcagaacttttcctggcaaagggaacagctagtccaaagtctcyatggtggtaacaaacttgtaagcatccaagcactgaggatagagtgaggaaccattgaaggagtaactaaagcataagaagaaagatccaggatgcaccctaccatggaagcagaaa

SEQ ID NO: 325217 - DNA, 545 bp, Homo sapiens
aacctggcaaaggcacagtgacaaaagaaaactacaggccagtgtccctgatgaacatagatgcacaaatcctcaacgaaatactagcaaaaaaatccagcaatatatcaaaaagttaacttgccacaatcaagtaggctttatttctgggtgtaagattgaattaatatatgcaaatcaataaatgtgattcaccacataaacagaattaaaaacaaaaaccatatcatcatcacaatagacatgaagaaatctttcaataaaatcaacatcccttcataataaaaaccctcaataaagtagacattgaaggaacatacctaaaaataatcagagtcatctatgacaaaacccacagccaacatcataatgaatgggcaaaagctggaagcattccctttaagaacaggagcaagacaaggattcccactctcaccactcctattcaacaaagtactggaagtcccagccagagcaatcaagcatcagaaagaaataaaagacacctagraaataagtcaaatagatacataagaaaataaatc

SEQ ID NO: 325218 - DNA, 580 bp, Homo sapiens
ttttctgttacttaacaaatctttctatctctcatttttctttattagttttttcttttaaatagaggattccctttatttaaaatgcatctgttttgagtacttcctcttgattccaaatgttgaatttatcacagcaggtctacgcagaacttcaagaaaacaccagcatattaataattgggggctggagcggtccaaaggctccagaatgaatgtcttccacatgacaggtgtccatggtctgtgaccagtatkactcaagtccactgagtaggtgtttctattggtctgacttgtccaagggaccagagtattggagtccactgcccaagggaccatagttattgcagtacatactaacatgttgttctagcacaggctgactgcactgagagagaaacgtgacatccaaagcagaaaatatcagaataaaagcttatactctaaatatagacaaagattgatgtcagagtaatcaacggaaattactaaaaattgaagtgacaagatacatcagtctttctaagatcaaatgttaggagtaaaaaaggaaaatagtgttggcatccagtcggtg

SEQ ID NO: 325219 - DNA, 580 bp, Homo sapiens
ttttctgttacttaacaaatctttctatctctcatttttctttattagttttttcttttaaatagaggattccctttatttaaaatgcatctgttttgagtacttcctcttgattccaaatgttgaatttatcacagcaggtctacgcagaacttcaagaaaacaccagcatattaataattgggggctggagcggtccaaaggctccagaatgaatgtcttccacatgacaggtgtccatggtctgtgaccagtatgactcaagtccactgagtaggtgtttctattggtctgacttgtccaagggaccagagtattggagtccactgcccaagggaccatagttattgcagtacatactaacatgttgwtctagcacaggctgactgcactgagagagaaacgtgacatccaaagcagaaaatatcagaataaaagcttatactctaaatatagacaaagattgatgtcagagtaatcaacggaaattactaaaaattgaagtgacaagatacatcagtctttctaagatcaaatgttaggagtaaaaaaggaaaatagtgttggcatccagtcggtg

SEQ ID NO: 325220 - DNA, 605 bp, Homo sapiens
cttggttttttttttcattgtttaattgttttataggtcctgtgagatttgtgctttaaggatgttctattttggtttattttgaggatttgtttcaagatttagagctccttttagcagttcttgagtgctggmtgggtattggcaaattctgtcagcatttgtttgtctgaagaagactgtatctttccttcatatatgaagtttagtttcgctggataaaaattcttggctgataattgttttgtctaatgaggctaaaaataggacgccaaatcccttctagcttgtggggtttctgctgagaaatctgcagttaatctaataggtttttttctttataggttgcctgatgcttttaccttgcagctcttaagattctttccttgtcttgagtttagatgacctgatgactatgtaccttgttgttgatcattttgtgatatatttcctgagtgttctttgaactgcttgtattttgatgtctagatctagcaaggccagggaagttttccatgattattccattaaatatgctttccaaacttttagatttcccttcttcttttggaagaccaattattcttaggtttgattgtttaacg

SEQ ID NO: 325221 - DNA, 624 bp, Homo sapiens
gggtcaaggaataactctatacaccccacatcaggtaatggatgtcctaaactcaaaggcctttcactggatctcagacagctgtattagcaaatatcaaacactccttccacaggtaccagaattgagtattaggccctgtcaaactcttaatcctgccacccttgttacctgacccaaatgtagagagaccacttgaacattcttgcttggaaaccatagatttaacttgtaatgctagactagacctcctggatatatctcttatagatcctgaggccacagatggaaataactttatgacaggtggaacccgattgttaggctatgctattgttagcctagctgaagtcataaaatctagacccctttcaggagacactacctcagcccaaaaggctgagctcattgctcttacctgagccttacaattagggacaagcatgaggcttaacatctaaacagacttgtcctatgtctttcatgtagtgcatgcccrtgcagccatttggcgggaaagagggcttttaatggccccaaatattcgaattaaacatgctcttgaaataatggccaagttggaggcaattatgcttccctcacattagctatcattcactgcaa

SEQ ID NO: 325222 - DNA, 531 bp, Homo sapiens
gcatgaggcttaacatctaaacagacttgtcctatgtctttcatgtagtgcatgcccatgcagccatttggcgggaaagagggcttttaatggccccaaatattcgaattaaacatgctcttgaaataatggccaagttggaggcaattatgcttccctcacattagctatcattcactgcaaagcctattagaggaacaatgatgaaatctctattgggaacaaccaggctgacaaacaagcaaaactggcagccaggctgcccctttagtctgtcctagttcccaccctaactcccytgtctccacactatacacaggaggaaacccagaagctctagaaaggggtttctcccatacctcagaaggctgacttaaaaggtcctgatgggaaactcttgcttccaggagcctcacaatggcagcttctaaacagcttacaccaatcaactcatctaggggctaaggccctccagagagtaataaagctgctgtttaccagcaagagggtagcccaaactatgggccatct

SEQ ID NO: 325223 - DNA, 636 bp, Homo sapiens
caaaccataaaaaagtacctcatgaaggtaatttatggaatccaacagtcatggccaactttactcctcattgcactctgaaaagtccatatcactccaaaatatgaaactcagcccctttgagattctctatggaagatctttcctccaatagatcttttggtagaaccaaagagtcattatctcatgcaatatgttatacccctgggacaaaccatcaaggccattaatcattatcagaattttcatagcccaaaacctaaaccctgtttttcaggagacactcaccctaatcttatgcctggagactgggtatgtcgtcccaaaggacaaaaagccactggagcctctttggattagatcataccaagttctccttatgaccccaacagctgtaaatctccaaggcctctctgtggatttacctcttcagggtcmaggtggcaccagcacccaacaaagaacacttaaacctgtgaaccagttggagactttcatctgttgttcaggtgggacctgaactccagtgatatccaccctaatatgtagagggcttacttcatcctcttacagtccttaagccagtactcagaagttttccatggtcagctttgtcttctgctataaatgctttta

SEQ ID NO: 325224 - DNA, 587 bp, Homo sapiens
ccagctgccctcaattccccaaatctccaaaacataaagtctcactactgcacaaggtgcccttctccagacacttgttctgacccagtcccatggcaaaattgcaaggtttcaaattccccaaataattgcctacacattcccgtgctcagcagccccaaatctcagatgtttctagatgctcaatgctttcatttattctgggaaaatgaaacccaccaaatgcaaactgtaatatccaagccttacagcctcttacaactatgcactagctattcagtatttcttcaggtcagaaggccaaaatacactgtttcttcactttaagtctaacatcttcccctaaatctaagggagctttctycctctgagaatcaaatgcatatatttgtcttccagccaactggactgggacttgtacactactttacttagctccagacatccaaattgctccttctgatcaatccctcccaattccactttacagttctagtggggaaaaatgggccatccatctgattcccttactcattggcctaggaattgccactggattaggtacaagaataacacgtatgagcctt

SEQ ID NO: 325225 - DNA, 546 bp, Homo sapiens
agctgtaataatgctcttgcctactaggaaacagcagttggtaatgcattcctggatgttcttttgatagttctttcatggaggataaacatgttacctggagcaaggatttgcatctcaagatttctaccactgaggggagcattgagggtagatggagctcagttcaaagatagctgtaaaatattagcatataactaattttaagaagctaaaatttctttattacagtgtatttgctgctagcttaaatttatgtccatttctgactttagtkggatataaacactcatagctattagatattagttgaagttacttgaaataaattaaagctacactattgaagagaaagtttgaatgtttttctaattgtattccattaggacagaattttaatttttagaaaattaattctgttagacttgatgttcaagatagagaagtggaaagaatcgaaccacttagcacttaattttttttcagagtcattagcaaatccacatattcttcctgtgatctaattcaatatttttcccatgcttg

SEQ ID NO: 325226 - DNA, 596 bp, Homo sapiens
tgcacagcctcaatcctgacactcttgagatcctaatttttcttaattttagtggcatatttctctatttaaagggattagaaaggagtgggagaacttcttaggtgaatgccttctaggcacagcgcactcattcayttgatatttatctgcatggcagctgccttttctgagccttagctactttcttcatcagcaggtgagggaccattgagttctttattaaatagttgtgcttcttcacctttcccattaccactcctctctctaccgtctcttctccttcaaggaaagaaagaaagaaaaagttgtgaaggaaaaaatatagggcactatctcttgcctggactactaaaatcaactcccagatggtttttcttcctcttgtcttgcccgtttttccaaaaactgctaaaggggtatttccaaaacaaactgaccttgaatcccttgcaagtctatgatctcctccaaggaagcaatcgaagcactcatctttgattccttggctctggacacatgtctggtacatagtagatgctgaacaaatgtttgcttaattagggtagcactggaggtctgtcatttattaacat

SEQ ID NO: 325227 - DNA, 542 bp, Homo sapiens
agacacaatagtttgagtcatttttgtgttgaagcccatttgttacagaaggcaactttatcstaattcaggggactacatagtttagggaagtgagaagaggcctaagtagaagtgagaagtgagatttgagttgagacctaaaacatgagttaaggttatctaagcaatgcctgaagaggaaagtttgcagggtacatggccatttggatagaggtgctgaggaaccatttgaagaactcaatggagcccagcaaggttggggagcagtttgcttaatccacacttagagggaaaggctgaagccagatcctacaggatcttttaatcatgtaagtatctgagtctttttcctgaaataactaggggtatctttgaagaaattttagcagaggagtgatctgattgagtagagattgcatagagtcataggtaaatattttgaaagttacatgtaaacttttctcctgagtggctgtggtcctttatacttgtctttgtacacatttccctaaccctaaaaatgagcgtgcttacaaaac

SEQ ID NO: 325228 - DNA, 522 bp, Homo sapiens
aattgtaatccctagtgttggtggtggggtctggtgggaggtattggaccatgggatagagttctcaagaatgatttagtaccatccctcttcctactgtatagtgagtgagttctcacaagatttggttgtttaaaggtgtttagcacctcctctctctcttttggccctgctcctgccatgtaagatgcctgctcccactttgccttcgccatgagtaaatgttccctgaggccttcccagaagccgaaactactatgcttcctgtacagcctgtggaactgtgagccagttaaacgtctttctttataaattacccagtctcaggcatttctttatagcaatgtgagaatggactaatataccttatctmcaaatatagtcgtattggaggtcagggcttcaacatgtgaattttgggagtggggagaaacacaatttaatccagacaactaatgttcccttccttattatatgatcattagcatggagagggtgctcattgccatggaacagtagtgc

SEQ ID NO: 325229 - DNA, 651 bp, Homo sapiens
tgatagaatctaggtggtgggtgttcagatgttcattgtaaaatttttataagtttttgggatgtttgaaattttttatagtacatcttttttgggagaaaactctattatagaactcataatttgattttactcgttcatagcatatttaatagacaatacagaaatttataacttataattattgttttactcattttgaactaacccctccctttttttagtgtcattacggacacacacctccataaaattcaatttattccatctgactataatgattacttattttactataatcatactgtgactatttgacttctatggatcttctyttctggtttggccctcatttctctgaacaggtccttactttcttgtaatatgtccgcgataatttttcctgccccaggtttctgtttttattttaaatctacttgcttaaaaaatgactttctttaggtaatttgaacttttttttcctagccagttgacccaaagacttgtgaattaatgccaaaatgataaaactaatgttattacttttgaatttactcaaaactaatcggatctgcttcctctttttcctggaggtcgggaggtcagagccaggggttgatgggaagtaatctgcaattaagagaacccagg

SEQ ID NO: 325230 - DNA, 655 bp, Homo sapiens
tatatgttttaccaaagaatggtgggtgtttgatgtagctacaatacaattcacatattttaagtgcacaggttgatgatgctgacaaacaagccttaaataacaagtgacacaatgaagatataaaatatttctaccttcctagaaagttctttcatgctcctttgcagtccattgtataaatgtgttacatggaattattttacaaatttaaagagtaaccaacatagtacccaattctaaaccaagttccacaatttttctggtaaggaccctcttcctcagttcctcttctatcrgcgaagtcagaggaccccttgaaattacttgttccccttgtctcatctaaatagtcatttattcagtttccattaccatataatccctgcatatttcacagaaatatctcctacttgcatttgaaggtgtaattccttttattatgacagaatatttccttctcttctctttcatcttctttaaacatcctctattccctgactgcttgctcagtcttaagccactgaagcaaagcccacttaatccagcacagagtctcaccttcaggcttattacttaccttgctggcctaggtggccgccacctttcctgacccatcgggggctggtgattgaacacacatggcattgacctg

SEQ ID NO: 325231 - DNA, 622 bp, Homo sapiens
tcagttcaagaaactatgaggaacagaccaaagccaagagctagggaagggaaaggaggtgagcaaggatgtagtgtcaggataaatctagccttggtctcacctcctgggggcaacagaagaaggatctctagctcaaagggcaatatggagttgtcttgtcttgaggcaaggtggtggcaagcatttgtacacctgtcacagatgcattcattggctctggctgctcctgagtgaggagagtaggacacacaaagttttggttggccaaaggcagttctaaacagatacacytgtgccccatagcagctgccatcactggcagaagttgggggatgtgtggatcaggctgacaaagaggatctgggtgagcaccacagcatctgcctctcataggtttctgaacctgcagtaatacaaccatgaatcatgcaactggtgagggcataagaatagttgagctgagtgaccaggaaaagcctgctggcttgggttcattgcatttacagcactgtgcaaggtgcggggaggggcagtgtggtaatctcatcattgtagttgtttaagcagttagataggaggcaaattctccaggtatgcccagcctttgccttcttcccca

SEQ ID NO: 325232 - DNA, 522 bp, Homo sapiens
tgcaggaagcaggctgggggcttgtctgcactttacttttcaattgtttggtggttgcaggctgcaaaatgaattgcaggagcccatttgtaatgcattccccatgctctttgctgggatgctgaggaaggaaactgatatttatcagaagactgctttgacataggcactgggctaaaatcatatgaatctgattattatrttagtctaacatcatatgagtcagataaggaagatgagaatgagaatgttcaaatggtttatccagagacagctaatacaactagaggtaagattcacttccaggcccaaagtcctaagatttctactaaacacattgctttctagtataagaaaaattaaaaggagaactaagcttactctcaaaaatctgtccccagatgtctgctgtggagtggagtaactatattttctcatacaatacacttgtctaaaaaacatgagcataaggcagaggttgacaaactttttttggtaaagggtcaggtagtgagtattttg

SEQ ID NO: 325233 - DNA, 514 bp, Homo sapiens
ataagaaaaattaaaaggagaactaagcttactctcaaaaatctgtccccagatgtctgctgtggagtggagtaactatattttctcatacaatacacttgtctaaaaaacatgagcataaggcagaggttgacaaactttttttggtaaagggtcaggtagtgagtattttggactttgagagccatacagtctctgttgcggctacccaactctattgctacaatgtgaaagcagccatagacaatatgtaaacaaataggtgtggcaatgttccaatgaaacttaaggacactaacatttgaatttcatataattttcacttgtcataaattatttctcccactcctacccctgcaaccattaaaaagtgtaaaaactattcttatcttgcaggccatacaaaaacagaagaacaagagttggcgcacctgccacagtttcctgatacacatacacacacacacacacacacacacacacacacacacaygataacttttggtgttacttt

SEQ ID NO: 325234 - DNA, 591 bp, Homo sapiens
ctctaaaaaccttgtaagtgacttaacatattgatagccttcattttctagctagataaaacatttgggtaggaaggacaggggatgttagaggtgttcctcaaggaaataacagctaattatagtcaaaggatgagtcacatcaacatcgaagctattgtttagaactagaaggcagcttaagagacaattctaggaatacagtgatcgagagcttstgtttcacatagccctggataagatttaagattgggcaaagatctcaaaactctctaagcccctgtgtcctcatctataaactagaataataatgatatctttttcactgggtggatgtgagagttagatgagttgatgcacttggactagggtctgccatacgaaattgctgaattacatattattgctttatagccgtgtatttatcaagcacacacactggaaaatccaactcttttcaaaggtgaagaaacaattcagagaagtgaaaggattttctcaaggtcatgcagtcagcaggaaagagagctggaatgcagacttaggttttctaaacccaagggcacagttctatttatggaaacaaaaatg

SEQ ID NO: 325235 - DNA, 603 bp, Homo sapiens
agaataagacaaaaatcacttggagggcactggggactatttttcttttcaatttttcttaaagctcctcctgtatcaccttgttttatattcaacctttatttttaaagttttaaaaaaattcctcaacatgaaaaacttgtgaggccactcgttaacaaacctaaaaaacattccaaatggaatcttcagagtaccttaagaagatacaatctccacctgtcaagtcaaagtaggctactatgaaaatgattaatgaccacaggcattaaagtcaaacaaacaaacccaattcactcaaaagcctaaatggataagatggaaaactgatttattgacctaaaagcmgattgcttttaaacagggttgggatatgcttatggtgttccatgagtattattatcttaagggcgaatacttaatactcgagtttctttttaaccttaaaaggcgaatacttaatactcaagtttaagaaatactatctgagaatatagagcaagacaacaaaagcacagaatagaagagataaatattaaacacttggagacaaatccagaagctctagtgtccatgaaaaaaagatatatgggaggagagagc

SEQ ID NO: 325236 - DNA, 586 bp, Homo sapiens
tttagtatgttcagaagccattgtatttctttttcgttgcaaatttgctgtttaggccacctgttcatgtttctaatgaatagctttccttttcttgttgatttataagagttcctaataattaaggcaggttaactttgtctattataaaagtggcatatcttttgtttgttgtttgtcttttcactttaagtattttttcttatcctggcaaagatttttgcttttacataataaaatggcattcagatgtgacttctggattttgtgttaggttttgatagggctttcccattcctattttttggaaaaaaatgcttatttaaaaattctagtattgctatagttcttttcttccttctttgaatggwggttttaactgaaatttattttggtgcaaaaatgagaaaggggtctaatttttttttattcttattttggggaggggcaaatggttaacccattgtaccagcctatctttcaatacctatgtttctactactatttttcactacttattttaaatgtactttcttgcataataaatccatagtcatttcagactcctctgctccacctacccact

SEQ ID NO: 325237 - DNA, 581 bp, Homo sapiens
gaatgaatcaagccccctcatattatattggatggtcttccaactaaaacctagattagtgtttgattgaataactagaagcaataatctagccaagttgacacataaaggtgaccatagcagtagtttatcatcaaggtataattgacatacaataaagtgtacaatttggcaagtttagcagatgtatataactgtgaaagcatcaatcaagataatgaatatatctatcaccccaaaattacacttgagtcccttcccttctgtccctcctccattctcaagaaatattctcaagatmtgctttcagccactgcagaatagtttgcatattctacttaaattgaatcatacagtaagttatattcatggcttgtcatgattatttctaagcaatgtatcttttaaaattgttattgcaaatagaaactttagtttcttttattatattgtgtaacatgttgttttatctgcttataaaaatatactttgtatgtgagtttcatgacttatagacttttcatatgcatgtctaagagctttttatttgattctccttgttttttctaggcataatgatt

SEQ ID NO: 325238 - DNA, 581 bp, Homo sapiens
gaatgaatcaagccccctcatattatattggatggtcttccaactaaaacctagattagtgtttgattgaataactagaagcaataatctagccaagttgacacataaaggtgaccatagcagtagtttatcatcaaggtataattgacatacaataaagtgtacaatttggcaagtttagcagatgtatataactgtgaaagcatcaatcaagataatgaatatatctatcaccccaaaattacacttgagtcccttcccttctgtccctcctccattctcaagaaatattctcaagatatgctttcagccactgcagaatagtttgcatattctacttaaattgaatcatacagtaagttatattcatggcttgtcatgattatttctaagcaaygtatcttttaaaattgttattgcaaatagaaactttagtttcttttattatattgtgtaacatgttgttttatctgcttataaaaatatactttgtatgtgagtttcatgacttatagacttttcatatgcatgtctaagagctttttatttgattctccttgttttttctaggcataatgatt

SEQ ID NO: 325239 - DNA, 484 bp, Homo sapiens
atttttatttttaatgtagttgactgtatcattattttccattttcatttgctccttttaatattttaaatccatttctaccctgagacctatacagatttcacacattttcctttcatattaatctacttaacccatttgtgtttgtttcttaagttatgagactataattcatttcctaatttttatgtaaatatgtaatcattaaaggaccattagtaagtaatcgatcattttttccactgatcagaaatgcctatatcaacaagtgaaacttccacatatatgagattctgtgtctgttctctcaattctcttttgttgttttctgtcattctattttatttgtctatccttgtacttttagcacattattttaatcattatagctttaaaactcatctggatgtcgaataggaaagstcttccatcttgttcttttgcagaatgtcttggttgttcttgctcttctttcttccttata

SEQ ID NO: 325240 - DNA, 593 bp, Homo sapiens
agtttggggttattaagaatgatgcctttatcaacattcttgtatgtgtcttctaatatacattttaggcatttctgttggaaatagacctaagaatggaatttctggtcacagatatgcatttattcaggtttcagaaataagtggcaaataatttttcaaaatggttttattaattaatactcttaacagtgtctgagaattctagatgtttaacatcattgcaaatacttggtattctcaatcatttttattttaaccattgtaatatgtatgtgtgtgtaacaacattttttgtgattttaatttgcattttctttattactaatgaaattcagcagctttttaatgtggttcttggtcacgcgcatattttcttttgagaaacacctaaatgtttgcctgttttttatttggttgtctttctttttcwttttgaattctttattttggacacacattgtttagtgtatgcatatgtggtaagtgcttttctcactccctttctcttttttaatctcccattatgggttgccctttcagtttcttgtgatctttcacattttgattgattacctgtattcaatctgagt

SEQ ID NO: 325241 - DNA, 614 bp, Homo sapiens
ttctcaaaattggtattatactaaatttaaaaattaccattgtccacacttttcattcatagagccctttgatccattcccagttagtatatctacacagtcatcaatctatgcatctttatggaatggaataaagctttatgttttaaatgtaatgtatgtgcaacatggagatgaaattgacttgccaatcatataaagtagttagactgtcagaggttggaattgatcaaagatggttggagagttaatgatctttcaggaattttaatgaagatagtccacagaagggttttctattggagaagtaatatcactttcagcatcatgataataggacacattattgtctttattgaaataactcacaccctggctagcattgacatcttcttatcaataaatatgtttgacattttagaggacattatacagggaaatatgctctgcattctgatctaaataccatacaaggraaaaaaagcccaattctttaaatattctagaagcatgagaatgtcctttctcccaatctttagtttccacattatactgtctctcaatttatattgattcttaaatccaaatagtgttcttcatcactctcctgctcc

SEQ ID NO: 325242 - DNA, 588 bp, Homo sapiens
aaagatagcatttgtctagtgtatttgtttattgacctaattagaaaagtgcaagagaataaactacttttaaaaccttgttccgattagctatagatgataagaggtccccaaactctaaaacacattctgagatcaataaaaaaaaagcatctagaaaaataacctcttatttcatttccagacaggcagcagaatttcattttagccacaaagcaagatttagaagtccataagaaatgatataagcaggagctatcctgggcaagaaactacaaaatctgaacatgcaaagactggataataaacatgtattgtatgcttgcttcctagattgttacaaatggccccctccataccctgcagatctttttccctcttctactaatttttcttgactccccccaaattttgtccatcttacatataccatgttagayaaagttttaatactttgaatcaggtctaacttaaaacatacatactcttttcttgtctgtctttctcactagagtgtgaggtcattgagggcaggatccatgtgttattttgcgttgactgcttctggcacacaggaatgataattgt

SEQ ID NO: 325243 - DNA, 622 bp, Homo sapiens
tcttggctcagttgcagtgttatcccttctggaaaggctccccctgccccagtcacctcctgcactgggctctcagagtgcgctagtatggagtgctgatagttggtttgatgttccttccagtttgagaaacccttccgtgtagggatttgtatctcttttacttctttataaaccatcatgcttagcaaactgtagatgtctttttaaagtttgttcagttgaattgtgtgtccagtgggtgggggacagggtacataaagtaattatagggaagtacagatgaagcaggttgatacttgattcatggggttgtgaaaacaatggcaaaagttgagttaacatttttcaaaagttttcttggggggttgtatyatgctttcttgttatatagctttctgcctacttttttttttttttcttattttgagagtggtgtatgctagttagaattcagaattatcaggaggaactttatcttagtctgttttgtactgctatgacagaataccacagactgggtaatttataatgaacagaaattacctgttcattatcctggaggctaggaagtccaagactgagggaccaaactcgcccttttatatggaactctctcctc

SEQ ID NO: 325244 - DNA, 541 bp, Homo sapiens
tctcactaaattcctaggcaagctaatggttttctgccagataaactgtctgtacttccattgagattaattttcttatcatatttactgctgtctacatatagctcttattttaattttgtcttttctagttacagttactcctgtaactatttcatatattcaaaacagtttttgaagtgacacatgaaaataataaaacttatgaagaagatccttcattaggtgtgtgcraattatctccagtgaataccgtgtgggtcaagaattacccttgatgttctcattactgtatactgtcttattgtctgaataaacaccatcttatatggagtattaagagactatatatgtaagaaaactaaatttgaaggtcaaatgtagttttttagatgtgtaattaaaaaatagcaattggaatcattcaaaggaaattaaaatgtttatctgtgggttcgactacctggctacagattactttgggatcacataatgaaaatagttaaaatttgaatactaattatgattgttaactttacat

SEQ ID NO: 325245 - DNA, 541 bp, Homo sapiens
tctcactaaattcctaggcaagctaatggttttctgccagataaactgtctgtacttccattgagattaattttcttatcatatttactgctgtctacatatagctcttattttaattttgtcttttctagttacagttactcctgtaactatttcatatattcaaaacagtttttgaagtgacacatgaaaataataaaacttatgaagaagatccttcattaggtgtgtgcgaattatctccagtgaataccgtgtgggtcaagaattacccttgatgttctcattactgtatactgtcttattgtctgaataaacaccatcttatatggagtattaagaractatatatgtaagaaaactaaatttgaaggtcaaatgtagttttttagatgtgtaattaaaaaatagcaattggaatcattcaaaggaaattaaaatgtttatctgtgggttcgactacctggctacagattactttgggatcacataatgaaaatagttaaaatttgaatactaattatgattgttaactttacat

SEQ ID NO: 325246 - DNA, 622 bp, Homo sapiens
caatgtcctcttcactattgagtcccagggactcacatagcacatggcacaggatcagtgccaaatagactttagtgagctgaatctcagcacaaagggcaaagctagagttggagatgggaagagagaatcctacatgggggaaaaaaaagggagaggctctggggagcagaggcctgatggataacrcatgcaggatgggcttcaggttgcaaagttggtaatagcagcgaatatcctcgtaaccctggggaatcaataaggaaggggcccttgagggtgccaaatagagggtctcaactttgctttgcaccaccttttttaacctcagctgtttctatgtaatcagttagtatgtgcaggaatttttgtcctacacaagtgcatttatttgcatatcgctagaaacaacactagtgaaagtcaacaatgctttgcataatttatgtttctttagaaaatatgagctgggtgtgatggcttatgcctgtaatcctagcactttgggaggccaaggcaggaagatcacttgaggccgagagttcaacactcagcaacatagtgagaccttgtctcaagaaataaatgaataaataaataaaaataaaataaatataaaaga

SEQ ID NO: 325247 - DNA, 565 bp, Homo sapiens
agattttcatcatatccttttaagaatttggggactcatgtaaaatgtatttagagaaaataaataaatatcacttgctgttttcatatacacccttggggtcttgataagccaaagttctcacagaaggtctggttcatcagttcagcctcaccatgagccccatggcctgctgctgtccctgacactgacactaggcaccacgtctttgactcatctttgttgatagacccaaaacttcatttgaaggcatagtttaggaatattaggaggagatttttatgatatttattttacatttagtcgacagaatttaaatattttaaaataaaaactatcyatagggagatgattcgattaagcagtatgtaccgttcctagaggagtatgctgaaaaagctttctctaggttttgcaggtgattgttccggtagaggtgtgctcatagtgtttagtcattaatggagactgtgcctccgttggaactggctaataggtccagattgatccctcatagtaatgtcactaatacttgtaatactagaaaatatgcatgctaccaaaa

SEQ ID NO: 325248 - DNA, 583 bp, Homo sapiens
tgcgaccttccaatgtaagattttcatcatatccttttaagaatttggggactcatgtaaaatgtatttagagaaaataaataaatatcacttgctgttttcatatacacccttggggtcttgataagccaaagttctcacagaaggtctggttcatcagttcagcctcaccatgagccccatggcctgctgctgtccctgacactgacactaggcaccacgtctttgactcatctttgttgatagacccaaaacttcatttgaaggcatagtttaggaatattaggaggagatttttatgatatttattttacatttagtcgacagaatttaaatattttaaaataaaaactatctatagggagatgattcgattaagcagtatgtaccgttcctagaggagtatgctgaaaaagctttctctaggttttgcaggtgattgttccrgtagaggtgtgctcatagtgtttagtcattaatggagactgtgcctccgttggaactggctaataggtccagattgatccctcatagtaatgtcactaatacttgtaatactagaaaatatgcatgctaccaaaaa

SEQ ID NO: 325249 - DNA, 581 bp, Homo sapiens
gtgtacttaaaacgcacacagctcaaacaaaaccatacaaagtatacagtggaaaccaaaattacacctcattcctacaatatcagttctattcttcagaagtatttttgcatttttcccatattttcccccatattttgtgtgcagtttttttatttttaaattttaaaatattttaaacgtctggggaaataaatatgtataatgtgtaatatatgtcatacatgatatgactgtatatttttacaaagatgccatcatatactagtctaaaattcacttttgtctattcaayatattgccttaggcttccgaagttccctggaaataaggattttatgttcctaatgcacctcacaatttttaaagtgcattgccatgaactgtgtaataacagtacctggacctagtcttaaaacaagttctttcccaaatatctgggtaccacttggttagttaataatgtcttagcacattattatatgagaatgttttctcatgtaatagttataagtgtgtcacacgatttttacaaacagcttctatagaaacacattttttgcaaatcactcagtaaatat

SEQ ID NO: 325250 - DNA, 645 bp, Homo sapiens
ccttcctcctacctgactctttgtcatactcccagggtccaagcaggagggtgattagaaggggcagtgcagggggttcccatgacctcggtacagattccagcctcaacagtcactaatttgtaatcttggccagccattgcccttgtgaagagtatggagaagatcaggggtttctcaaacctccaggttttaaccagtctaagatgaaatgaggaaaataaagacaatatttatgtagctttaacattttaatctgttttatatttgtagctagatctatattgctataaagttataccagtccttccttaagaaaggctgttctttatactaagattatgtttttctaccttttttttgtttttgcttttcaaatgtcttctcatttatgaaatcacgggcaaatggatgatgggttttatgcaacaacatcacatggcaaaattaaaacctggcaaccctccatcttcccccataaaagttgtactgccttgtaaaagctgaaagtcagaaccttatggattcataaattctaaggattttcctcaatttaacattctattatttgaraattcatttaaactgtagatccttaagtgatttctcggcctgaggatcagagaggtttcatggtctcaatga

SEQ ID NO: 325251 - DNA, 565 bp, Homo sapiens
ttccatttcaaaaccaaggaaagagaaggaaggaaggaaggaaagaaagaaagagaaaggaaagaagggagggagggaagaaaggaaagaaggaaaggaaaggaaggaaggaaggaagggaaagaggaaggaagrcaggcaagcaacccaatgagtctaatagtagcactaagttagtttaatctgcagaattgaacctagaaaatcaaagcttggaatcttcacttttgtaaaatgcccaaagcaatttacccatctactctgccttctctgttctttcttcaacttgaaagagaattaaacgtcagatttacagctcagattcaggttactttatgtcaaattctctatctacgtagacaaattcagccaggtcttgctatgctggagcagctttcactgtgggaggaggtggtggaagtattatggaagttactacttatcactgggtgctgagaagcagcatgctccgccattctcgattaccaaacttgtagtcagaagaactttgcctgagcccctggtctgctgctccctgcttagtgatccagaacaggacctatta

SEQ ID NO: 325252 - DNA, 291 bp, Homo sapiens
atgctccgccattctcgattaccaaacttgtagtcagaagaactttgcctgagcccctggtctgctgctccctgcttagtgatccagaacaggacctattaatttctcagtctccaaaagaaaaatcttgccccttgaatagtgctgacctaaagttaatactcagtaagcattcatgaaatgaataaatgttacagaaagtgacatcagtaattatgttctaygtatttgtgctgtcgtcccttaaaactgtggatataagtccacagtctatatcaagtcaaacttagt

SEQ ID NO: 325253 - DNA, 566 bp, Homo sapiens
cattttgtgtttgcaacaaacaaataatcctgattattatttaaaatagctccatgagttcacttagtgtttgtcrgattttaacaatacctgacaaacagagctctgtatttattcgtgcatatgaagagcaagcttcattattttttggtattaggtagatcaaccagcagactcactcattcagtgaccataaatgttgtataatgcattaatgactccttaagtagagctcacaaaagtaccaccccagtttcttgtactaagtagcatatttcaaatataatttttctgtttcactggttgtgaatactactaaatcagatatatctgggtttaaatcctggctctaccaattacaaacttcttcaactctatgcctcatttcttcatctttaaaatgagaataaaaatcataccatcaaagagttgttatgaaaattgtttgcctgtaaagaatttagagcagtgtctggcacttagtaggtattcaataaatgttagctaatgttgtagagttgtaaataattttagtcttgttaattttccaaagtgataaagcagga

SEQ ID NO: 325254 - DNA, 529 bp, Homo sapiens
gttaggatacaggaggtttgagcaggatgttacgaagagaagaggctgagtctacatgacatcgtaaatctgctataaaagtgaagacacaatggtgaaattggtggtgagggattaaggaagccaaaacatattcatagaaatagaagcttcagccatgcatggccctatggaatgcttggtcccctctgtgcctttttctgcactactcactcctgatggtttctttttttccttttttttttttttttttttgagacggagtctcgctgtgacacccaggctggagtgcagtggctcgatctcggctcactgcaagctccacctcccaggttcacgccattctcctgcctcagcctcccgagtagctgggactacaggtgcccgccacctcacccaactaattttttgtattttgagtaaagacagggtttcaccrtgttagccaggatggtctcaacactcctgatggtttctaatgggcctattgacctgtaattagaattctcaggaagatatcacaaaccac

SEQ ID NO: 325255 - DNA, 574 bp, Homo sapiens
ttcctagttgaactcatatggcagtgagagattgccttctgtagagttattctttaaaattgtcgcagcaaaaacaaaagtaggagctacttgttgtaagtgaatcttgagttctttgaaattaaactgtttcttaagattcttctattagcaaaaaagttagcaatcttttaattcttcaaagtctcaacatagaaaatagtttcctcagtagtcgaaaatgacaggaattaacattttgaaataagagaaataaaactttattctaaagctgcagaaaatgtggaaagtaacaatattttagcattttagtatttttcccctacacaaaattatcaggatgccattttttaaagttgytttcaccctaccttttttttttttttttttttttttcctttctataggttcaatgagaactctctatgatttgcaatttccatgggttctctttcaattgttagcgtaatactgagaccccactgatggtaatatattatttaatgggatcttaatttagacaggcttctgaaaaatacatacaatttggtaagagtatttcattatccctgtg

SEQ ID NO: 325256 - DNA, 574 bp, Homo sapiens
ttcctagttgaactcatatggcagtgagagattgccttctgtagagttattctttaaaattgtcgcagcaaaaacaaaagtaggagctacttgttgtaagtgaatcttgagttctttgaaattaaactgtttcttaagattcttctattagcaaaaaagttagcaatcttttaattcttcaaagtctcaacatagaaaatagtttcctcagtagtcgaaaatgacaggaattaacattttgaaataagagaaataaaactttattctaaagctgcagaaaatgtggaaagtaacaatattttagcattttagtatttttcccctacacaaaattatcaggatgccattttttaaagttgctttcaccctaccttttttttttttttttttttttttcctttctatakgttcaatgagaactctctatgatttgcaatttccatgggttctctttcaattgttagcgtaatactgagaccccactgatggtaatatattatttaatgggatcttaatttagacaggcttctgaaaaatacatacaatttggtaagagtatttcattatccctgtg

SEQ ID NO: 325257 - DNA, 537 bp, Homo sapiens
ttaagagtttctattgcttcatgagtcaatccagaaatttatatttttctagaaaaatgttcacttcatctaagttttcaataaaatcagcctaagtaatttattttatttattattttttctttctattttctctccatctttattttatttatttattttattcccataggtttttgggaaacaggtggtatttggttacatgagtaagttctttggtggtgatttgtgagatgttggtgcacacgtcacctgaatagtatatgctgaaytcaatttatagtcttttatccctcgctcccttcccaccgtttccccctaagtccccaaagtccatcttatcattcttatgcatttgcatcctcgtagtttacttcccacttattagtgagaagatgtgatgtttggtttttcaatcctgagttccttcacttagaataataatctccaatcccatccaggtagctagaaatgccattaattcattcatttttatgactgagtagtattccatcatgtatatataccacagtttct

SEQ ID NO: 325258 - DNA, 624 bp, Homo sapiens
tggtgctgggataattggcaagccacatgtagaagaatgaaactggatcctcatctctcaccttatacaaaactcaacccaagatggagcaaggacttaaatcgaagacctgaaactataaaaattatagaaaataacattggaaaaacctttctagacattggcttaggcaaggatttcatgaccatgaacccaaaagcaaatgcaataaaaacaaaaataaatagctgggacttaattaaactaaagagtttctgcatggcaaaaggaacagtcagcagtgtaaacagacgacccatagagtgagagaaaatctttacaatatatacatccaataaaggactaatacccagaatctacaaaaaaactcaaacaaattagcaagaagaaaacaagcaatcccatcaaaaagtgggctaaggacatgaatagacagttcttgaaagaagatatacaaatggccaacaaacatgcgaaaaaakgctcaacattactaatgatcagggaaatgcaaatcaataccacaatgtgataccaccttactccctcgagaatggccataacaaaaaatcaaaacataatagatgttggtgtggatgcagtgaatagggaacacttctacac

SEQ ID NO: 325259 - DNA, 536 bp, Homo sapiens
taggattattgtaaagattaaataagttaatatatgtaaagtgctagaacagtgcctgacacacatttggtattacayagatgaaagctgtgattaatactattcaaaaatacttattgtgtgcctacaagatgccagggaatatgataaacttagttgataggcagatgtgaaataaacaattccctgttttgtagtgggggtgacaggcagcgggtaaattactaaacaagataatttccaatttcaaaatttctacgaagaacacacacacacacacacagggacgtaatagagggtagtagggtgtgggtgttttcttgaagtaggacggtcagagaagtggtatttaagcaatcagaggagagcatacatcttcattgttaataacggaaaatgagaagagccatgaggagatccacgggcagaatgttccaggctagaggaaaagatgatgaaaaatgccaagattagacaagtttggcatatctaagaatggaaatgagatcaatgagggtgaaaagtagtggagggca

SEQ ID NO: 325260 - DNA, 536 bp, Homo sapiens
taggattattgtaaagattaaataagttaatatatgtaaagtgctagaacagtgcctgacacacatttggtattacatagatgaaagctgtgattaatactattcaaaaatacttattgtgtgcctacaagatgccagggaatatgataaacttagttgataggcagatgtgaaataaacaattccctgttttgtagtgggggtgacaggcagygggtaaattactaaacaagataatttccaatttcaaaatttctacgaagaacacacacacacacacacagggacgtaatagagggtagtagggtgtgggtgttttcttgaagtaggacggtcagagaagtggtatttaagcaatcagaggagagcatacatcttcattgttaataacggaaaatgagaagagccatgaggagatccacgggcagaatgttccaggctagaggaaaagatgatgaaaaatgccaagattagacaagtttggcatatctaagaatggaaatgagatcaatgagggtgaaaagtagtggagggca

SEQ ID NO: 325261 - DNA, 365 bp, Homo sapiens
agatttaccacataaacagaattaaaaatcrtatgataatctcaattgacgcagaaaaagcctttgataaaatccaacatcccttcatgattaaaaccctcaacaagctaggcatcaaaggaatttacctcaaaataataagagccatatatgacaacccacagccaacatcatactgaatggacaaaagatgaaagcatttctcttggaaactgaaacaagacaaggacacctactctcactactcctattcaacatggtactggaagtcctacccagagcaacaggcaagacaaagaaataaaaggcatttaaataggaaaagaagtcaaatcatctctcttcactgatgatatgattctata

SEQ ID NO: 325262 - DNA, 588 bp, Homo sapiens
gtctatttttgaaagccaaaaaacctcctacaaagataacttatattttaatgaatattcttcaattctttgttctatgcacaaacatatatgcatataattaatttttataaaaataggattatgcagcacagactatttttaatgtaccttttcmtttaacaccatattgtgaacattatgatattaaataatgtgttgatataagattttattaggctgtagaatatttcattgtatatcatatggctgcatcataatttatttaactaattccattttatgagaaacttagattgccctccttttcctttttttttttttttttttttaaagatgaggtcatactatgttggttgcccaggctggattctaactccagggctcaagggatccgtctgtctcagccttttgagcagctgggattataggtatgcaccaaggtatgtgcccccttttactactgatgacgaaatacccatgcaacaaaatcttcggatataaccacacaaaattttaataataaattcttagagagtttagtcaaagcgtatagaaaacatcatggcttttgatgttttcagctta

SEQ ID NO: 325263 - DNA, 377 bp, Homo sapiens
tgtcagtgggatccaccattctggggtctggaggatggtggccttcttctcacacctccactaggtggtgccccagtggggactctgtgtgggggctctaacctcacatttcccttccgcactgccctagcagaggttstccatgagagccctgcccctgcagcaaacttctgcctggacatccaggcgtttccatacatcctctgaaatctaggcagagcttcccaaaccccagttcttgacttctgtgcactcacaggctcaacaccacatggaagctgctaaggtttggggtttgcaccctctgaagctgtagcctgagttgtaccttggtcccttttagtcacagctgtggcagctggcacgcagagcaccaa

SEQ ID NO: 325264 - DNA, 481 bp, Homo sapiens
gacaaaggtttccacaccaatctttttcaatttttggttaggtagagggcctagggaattaaaccctactattattttcctcctctattattattgcatagtttagagaagacctttgcaagtcagtctaataataatgctgcccctcattgagcatgtactctgagcagacagtgctgatggcttgacttgcattgtctcatgtaatccttccaataatactaaaaattcattttcaagattagagaactgagactcagcaaggtaaagtaacttgtccaatgtcacagagctagtagatggtagagctggtatgcctgatatacgatcacrcagactttgaattatcatttccagtgacaggtaaataatcatgtcatccttccaataatactaaaaattcattttcaagattagagaactgagactcagcaaggtaaagtaacttgtccaacatcacagagctagtagatggtagagc

SEQ ID NO: 325265 - DNA, 555 bp, Homo sapiens
ctgccttttaacaggagaattaacattttgcactattcatgattattaatatgtttgaacatattaccactattaaatagttaatatttattttcttaaaagtaagtttttcccctatctctttgggggactgatcgagttttctctacttttcttcccctcccagagatttaaaaattgwgtgctttgtttctgttcctgtattggctagctgtgaattttaaaagctcatttgtttaaatgtgtatacctttccctagtaaaagacaataaacctcagcacgctattactttctcctttaccaacattgccttgaccttcaaatcatataatgaattcatctagagtttcgttctacattcttaatatttgtaaaaatgtacagactgtaaagatatctacttaaccagaaggttcattggtttctttttaccttctgtttcctgtattcaatttcattctcctgaaatctttttgtttgtttgttttctttgagtacttccttgaatatttctttctgaatggacttcctaacattgcttcattttgctgtc

SEQ ID NO: 325266 - DNA, 569 bp, Homo sapiens
gttggtgagagtatttcttcaactatagttagtgatgacaaataaatcaagaatgatgtttctcatgtccaaatggaaagatttatttatttttcaaatattcataaacctgacttcagttttattcctcccagattttaggtgtgctctgtacttgggatattgattcatgtgactactaaataagcaatgcttgtcttacaaacctttatcagatatttatttctgttaattttgtacagctcaggatctagtaatccagattrgggaggcaacttttaaccctcaccagcttttacctatggcgacttacctgttctctgttttctaagcctgtgtttcctcatttacagaatgaagacaattatacctgcttcataccactgctatgtgaccctctagaagttttatcaggccaggcacagtggtgcatatctgtaatcccagcattttgggaggctgaggtgggaggattgtttgagcccaggagttcaagatcaggctgggcaacaaagcaagaccctgtccctacaagaaatacaaaaaaacattagccaggcacagtggct

SEQ ID NO: 325267 - DNA, 576 bp, Homo sapiens
caaagaagctaagaatcatgataaaacaatacaggagctgatagccagaatagccagtttagagagtaacataactgacctgatagtgctgaaaaacacaacataagaacatcacaatgcaatcacaagcatgaatagcagaatagaccaagtggaggaaagaatctcagagcttaaagattttctgaaataagatagccagaagggaatagagaaaaaagaatgaaaaggaataaacagaacctccaagaaatatgggattatgtatgaacccatgtcatgaacccatgactgaytggggtacaagaaaaagacagggagaatggaaccaagttggaaaacatacttcaggatatcatccaggagaactttcctaactagcaagataaaccaccattcaaattcaggaaatgcaaattcagagaatggggtaagtaagaaactccacaagaagatcaaccccaagacacatatcatgagattctcaaaggtcaaaatgaaagaaaaaatgttaagcacagccagagagaaagaccaggtcacctaaaaaagggagcacatcagactaacagtgga

SEQ ID NO: 325268 - DNA, 513 bp, Homo sapiens
cccaacatgaaattggccaaatagtgatatttgaaaatatatttacaaataagatctacttgcatctttacaacaacctaaaaggtgggcgagataactattgttccccccatttgacagatggggaaactaaggcacacttaaggatcttttttctttgcacatcacatatggaaagttataggagragacaagactaacaacccaaactcttaataaacattcataatcctctataaaaccttcaaagccagatgtacttcaaagttcaaaaaatgttttattattttagaaagacaatgtggtttatattctatatacaacaaaataccccagtaggatccagggaagaatcccattctcaaatatactaatgtttatacagcaaattatataaatattcacaccaaatatgataagattttacacggactcatggcaactcaagtccagattcactgccaaattagttagctgcaaacctatgaaaacaatactggttattaaaatatc

SEQ ID NO: 325269 - DNA, 430 bp, Homo sapiens
tagcagcagggcaatgggcagaaaaatgagaagtgagaaggagaacgaagtgtggccagatagagtagggctatgaggtgtactcattgatataggtgtatttttttgtcagtccgtttaagctctgaaaatagttcagcatgaccacattgagacaggttccctggtttcctygtcactgtctatagtctattatttccttgtttgtcttcattgtcctgtgaatttagagctcctccaatgaatacacaaagagagtcagaagagatgcagcccattagcttgtgatggagaagccaattatgatgttcagttcattattaattatcttttttttcctacttgcatggagcaaaagctcttttttcttttccttacctctcccccaaaacatatacacacacacatacacaccacacacacaaagact

SEQ ID NO: 325270 - DNA, 593 bp, Homo sapiens
cagcaggcatttggtgatgaaagtaataacctgtgagataaagatgaatatagatgaagaaaatgtggataaagacaaagattgaaattgcaaaaagagtcaagatcaagataagggccaggcgcagtgactcaygcctgtaatcccagcactttgggaggccgaggtgggcggatcacgaggtcaggagatcaagaccatcctggctaaaacggtgaaaccccatctctattaaaaacaaaaaaaactagccaggcatggtggcaggcagctgtagctccagctactcaggaggctgaggcaggagaatggcgtgaaccttggaggcaggtcttgcagtgaaccaagatcgcaccactgcactccagcctgggcgatcgagcaagactccgtctcaaaaaaaaaaaaaaaagtcaagacaagattcagagaaacaagctagaagagagaatagaaggaggaagtgatagtagaaagaagttcacctcaataataaaactagatctaaatatataaacagaaaaacaggtggaatgagatacattcaaagggtgatgagtggtgtaaaaaattaggtacaacaagaagtatgt

SEQ ID NO: 325271 - DNA, 593 bp, Homo sapiens
cagcaggcatttggtgatgaaagtaataacctgtgagataaagatgaatatagatgaagaaaatgtggataaagacaaagattgaaattgcaaaaagagtcaagatcaagataagggccaggcgcagtgactcacgcctgtaatcccagcactttgggaggccgaggtgggcggatcacgaggtcaggagatcaagaccatcctggctaaaacggtgaaaccccatctctaytaaaaacaaaaaaaactagccaggcatggtggcaggcagctgtagctccagctactcaggaggctgaggcaggagaatggcgtgaaccttggaggcaggtcttgcagtgaaccaagatcgcaccactgcactccagcctgggcgatcgagcaagactccgtctcaaaaaaaaaaaaaaaagtcaagacaagattcagagaaacaagctagaagagagaatagaaggaggaagtgatagtagaaagaagttcacctcaataataaaactagatctaaatatataaacagaaaaacaggtggaatgagatacattcaaagggtgatgagtggtgtaaaaaattaggtacaacaagaagtatgt

SEQ ID NO: 325272 - DNA, 593 bp, Homo sapiens
cagcaggcatttggtgatgaaagtaataacctgtgagataaagatgaatatagatgaagaaaatgtggataaagacaaagattgaaattgcaaaaagagtcaagatcaagataagggccaggcgcagtgactcacgcctgtaatcccagcactttgggaggccgaggtgggcggatcacgaggtcaggagatcaagaccatcctggctaaaacggtgaaaccccatctctattaaaaacaaaaaaaaytagccaggcatggtggcaggcagctgtagctccagctactcaggaggctgaggcaggagaatggcgtgaaccttggaggcaggtcttgcagtgaaccaagatcgcaccactgcactccagcctgggcgatcgagcaagactccgtctcaaaaaaaaaaaaaaaagtcaagacaagattcagagaaacaagctagaagagagaatagaaggaggaagtgatagtagaaagaagttcacctcaataataaaactagatctaaatatataaacagaaaaacaggtggaatgagatacattcaaagggtgatgagtggtgtaaaaaattaggtacaacaagaagtatgt

SEQ ID NO: 325273 - DNA, 593 bp, Homo sapiens
cagcaggcatttggtgatgaaagtaataacctgtgagataaagatgaatatagatgaagaaaatgtggataaagacaaagattgaaattgcaaaaagagtcaagatcaagataagggccaggcgcagtgactcacgcctgtaatcccagcactttgggaggccgaggtgggcggatcacgaggtcaggagatcaagaccatcctggctaaaacggtgaaaccccatctctattaaaaacaaaaaaaactagccaggcatggtggcaggcagctgtagctccagctactcaggaggctgaggcaggagaatggcgtgaaccttggaggcaggtcttgcagtgaaccaagatcgcaccactgcactccagcctgggcgatcgagcaagactccgtctcaaaaaaaaaaaaaaaagtcaagacaagattcagagaaacaagctagaagagagaatagaaggaggaagtgatagtagaaagaagttcacctcaataataaaactagatctaaakatataaacagaaaaacaggtggaatgagatacattcaaagggtgatgagtggtgtaaaaaattaggtacaacaagaagtatgt

SEQ ID NO: 325274 - DNA, 560 bp, Homo sapiens
aactcatcatgagattcagggacaggatttcaccatgaatcacaagaccttcccaaggtaggttaatctggaagcctgtttacttttaaattaaactgtcaaaagtggcctgtaggttttcaccatcctttctctgcttgycatgtggatgcagagaaaagggagtctgccaaacttgaaacttacccaactgtcccatagaactgatctttatagtttcttttgaacaaatgtgaaacttgagccccccagttttgaaatctcagaaagctccatttgtcttatcagaggccgtttctcaggaaaccaaccatcaggcctctaagattgtaacaaggagctgaaacacaccaggtcacagcatctggacaatgcaacccaggtaactgacccccggtgcctgcctaactgactatctgcttcttgttgacatattcctcttctttacccctaattcctagtttgctgcatgtagttacatttctgccctataaacccctaattttagtcagttatggagatggatttgagactgatctcccatctccttggctgcagca

SEQ ID NO: 325275 - DNA, 562 bp, Homo sapiens
tggcagcccttttctctttctggaaataagctctcctggatagttgctgttgtctggggcctcctcttgctctccatgtatcctccaactaggaccctaatgtcaaaaatgagctaaggaggaacttgaggttgagggagaaggttgaattatttgttatgtgtggcagagttagcctatgctcataagccaacaaggcaaacacttttagagtccatgatttgtgcagtcctctgttaatgtggaaaactggagattaatggagacatttttcattttacaaacatcagttaaatgcttgtgtgatataggctatatgctcaatgccattcctgccttcaagagttttcaatgtgcttttgtaggtgtwcctgtgtgtctccttctaagtaccagcttaaaaaacaataagctctgtgaaggcagggcttatctctcctttaactcctaacatagggcccggcatatagtaggtgctcattaaatacatgttttatatacttgagtgaatgaatgagagtgtgtaaataacaaaccaatcatgcgaataccaggaaggcat

SEQ ID NO: 325276 - DNA, 582 bp, Homo sapiens
tgtttcccaaacatttatggaaattgttgcctgctctgaccttccccactgcttgctccagcctgatccaagaaagtgccaccaaaatggacatccccaccgtgctattgagtgactgaggtctctcttggattctctgtttggggcccaggctaaggaggtcgaatttctctctaggtgccaacttggggctcagttgctgagagcttgctctgaggcctcaggccctgcatgggccctgaggagtcacagagggttgccatggaactgagctgcaggaccaggaggagttctgyggacaagggggggaagaggcagctgcaggtggagaaacaggaggggtaaggagtgctgtgaggagcacggaacaccagagcccagagtctggaaaggtgggcatgaagccccagccagagtggcctaagtgagggcagagggagagagctctggatttctggggcccaggaccgcagagtggctgcctctgaccccaagtgagatgaaggcagcgtgttgtggaaggactgggctgggaggtggcctttcctctaggcctggaaaggggtgggggcctggtggggg

SEQ ID NO: 325277 - DNA, 571 bp, Homo sapiens
cttatttttcatacaagagcatgtctttgagaaagtagttcttgtagtagaactgctgattagaaagggtatatatttttaattttggtgaatagtggcaaatttcccttcggaaaacttgaaatccatttcagcattgtaagacagtgccagttgtcccataccgccctcaaacmaggagttatccaacttgatctctgtcaatctgatagtgcctgtttccttgtgaaaaccatgtgtctagtcacaactgtgacccagacaaagggaagctctgtgtttttaacttctccccagagcaagatggacagagtctgatccctccccatatattcaggggaacaggtcattgttactcctctgttctggggaaaagatgaaaaatgagagatcatccccattttcttcgatgcagtctgatggaacgtctcctagccaagaatggaggagggaaaaaactctactttcctaggttacggttttctggaattaccatttttaccacatatgaatatttatttacagaatagtccaaagacagtccaatctaatggactggctagaaacccca

SEQ ID NO: 325278 - DNA, 654 bp, Homo sapiens
gtagcatcttattgattccttggatggggttgcaactttctcctgaatctcaatgatcttcattcctatccattttctgaattctatgtctgtcatttcagccatttcaggctggctagggacgattgctagagaattagtgtggtggtttggaggtaagaagacactctggtttttgagttgccagagttctcacactagttctttctcatctgtgtgggctgatgttccttcaatttttgaagttgwtgtgctttggagaggttttctgcttttatcttctttgatgatcttggtttgattgtggtatatggtgggtttggttgacatgcttcatttctggaagattttagggggcccagactcagctcagcactcctgggctgcgtgctctaactctgggagggctggtgctgggcgcctggctgtgctatctgaaccctcaaggttaggaatctattctgctggaggggctgagttgttcccagtctgctggccacagcactgtgatggaagatgctagccaaagcacttggtcagggtggtgtcagtgagatctgtgcttactgatgtatggcagcagctgcagcagcatggcggggtgcacacgtgttagctggggaggggttccagcagaaaaaaaaaaggcggtgt

SEQ ID NO: 325279 - DNA, 493 bp, Homo sapiens
ttatgtttccatatgttgcttggctttatttatatgcttccttttgtactctattttttggtatttttttctatcactgtgtcaatgccagggtctcttcagtatttgctctttcctattatcctttcttgcaccatgctgcactttcaattaattattcagtatcttttactcacaaactccttccttgactgtacctgagtttattaagcttttgcaccttttatttcaatgwctgttgagtattttgtttctaatatatcagaattttacaatcacctactattgtttcttgtctcttagtgtgttgctactatcattattgtttatgatgattattattcttgcctttattttggtaaggattctaaacattactaaaatattttcatatgtttaagatttaaatttgcattgggtgatgtcatgtttcaattgttgattgtgttatctatctcgatgcttaggtttcttcttatgttttgaaagtttg

SEQ ID NO: 325280 - DNA, 633 bp, Homo sapiens
ttctgtaaggttagtaaaaatatactgcatgccaagacattaaaaattgttttaatgtgggaaaattttaatggactaaaaatactgacaagttgttcttatttttgttttaataacagagaaaatggctaaaggaatagcaaaatagttttaattgggatttaatattgcatttttaaataaaagactgttagtcatcaaaatgctttaatctgtgtttatataaatttaatctgaatataatcaaatattaaaaagaaaaagaagcgtcaatgtgaggggcggggggacgtgttttactgatattatttgagatgcatgacagaatagctattctcaaaaaatgctctccttggttaatacagaattttacctttttgttacaaaactattatatggccattatagaaaaatatagaagattcataaggatacgaaaaaaamcttccattatcaccacccatagaaaaattactgctaaaatttacatttatttccagtctttttactgtactttaaaaaatttcctgaacttgatacataaccttttggttccacatgttataagcatttcctgtgttttttaacttttcataaatattgtttcagttattgtgaacaattctgcaaaga

SEQ ID NO: 325281 - DNA, 636 bp, Homo sapiens
gtcattacaaaacagcaagaaggtgagggtggctggaatgaagtaagggagaggttaggagatggggagaaagtgataggcggggatcaagtccagtgatgttctttaaggccagggatttgcattttattttaactatgatgggaagccactggaggattttgatctgaggaatggtgtgacatttttaaaagatcgttggcatgctttgtggagagtattgtgtctaggcacgagtggaagaaggaagaagagctgggagattttttccacttgcccagatgagagaggtagtggcgtagactgaggtggtaatgatgtgtgaagtggtcagatttgggatactgtttggtggtagagcaaacaggtcttgcttataaaatttaggcagaatgtgagggaaagagaggactcaaggatgaagcaggttttaatcttagaaactgagagctatttaattaggtgggaaagactgggggaagaacaaagttagaaggaaaatawagagtttggaatgagtattagccaagcaatgagtagagtacttgggtgcctgtatgagatagggcgagagcttatggccagatacattaatttggaagtcactagagctgagatgatatttaaaactgagac

SEQ ID NO: 325282 - DNA, 617 bp, Homo sapiens
gttgcttagcgttttgtgtctgtgtgtgtgtgcgtgcgtgtgtgtgtgtgtgtgtggattctggttagctgtaatcaaaataggaatttatttacagaacattatggtatgttaagaagcaaggaaaaattgaatagtaatattgggccaggtggcaaccaggaagtactgagaatcccataagcaaaagttcctggatattttctgccatttataagattcagatccagcgactccagatcaggttgagacatggctgctcagagcctcccyttatgtactgggagcagttccgagagaaggcagaacaatcatgggatggacagccattctaaggggtactttccagctttcaccccttcatgctacacatcaaagagcagcagactcagctctaccaggcataactgcaaaccctttctcactaataggagacagtacaagctcagacagtaatgagatctggagtgatgccataggcaccctgttctttgagtcgttgctgagaagtttttttttcttgtcctattacaacattttataaccttatgaatcaatggatacttttattgtaaataatatatcccagtagtgagaccaaaaaaaagtgaagaaaa

SEQ ID NO: 325283 - DNA, 540 bp, Homo sapiens
aaacattgcttcaggaatacatacgtattactagcttccctagtaattttattttcatttcctttagctgattgagttctcagtgactggcgctatcttaggttcatctcatgtttcagttgtgctgagtgagtcctctgttgtatcattttccccaaccacataccagggtgtggttgtggctttcaaacttcctgcatctctatcagtartacatataattgtcatttcaaataaaaagaaaataaattatttggtgcttctattccttagcaacaagtcactgttgtgactcattttaaattgtaaatcgtgaaaatttggcaagaaagtccacttacatatttataagtaaaatttaagcccaaagtaaaaacatgactcctgaaatacttgtcagcaccatacagttcagtctaatgctctttgttgttttgaagccattattgacaaatttgtgcatcttatcatttcttaccaatgtgagtctcaaaagtttctattttatcatttggtgaagtcgttttagggaatgtttat

SEQ ID NO: 325284 - DNA, 511 bp, Homo sapiens
tggaacttgctcagtaatacttacaaagacacaggtcctgatataggggaaaacctctgaagactcagctttatggtaaagcagatacacataaaataaattagcacataacggagcgtcacatgctgtagtatcatacatgtacagagtrcacccaaaagaatagaaaaggggagataaacttagtttggaagacacaagtaaacttggtagaggaattgaaatttaaggagggtgctgaaggatgggtagcacttgtctttcagatactggtatacagtcagtccaaataaagtgaatagacaaggaagtgtattatgaggaatggaaagcagcccagtacagctggaagccgggatacctatgtggggttatagatggggattcagaagaatatgtgaaagccaagcataaatggtctccctatccaaccaaagaatttgggttctattctgtatgcaacaagaagttgttgaaggtctatgagaagggaaatgtcataatcatagga

SEQ ID NO: 325285 - DNA, 604 bp, Homo sapiens
tcaggcctcagcattcagcattcaggaagcatgtggtcactgaatccactttgctatgagttaatcatgcatcagttatgcctgacatctcccccagtccggaggagaaatgccatcagccctattgggggaggacagtcactcagcatgaagtaaggctatcagtttctctctgattattgaattagctgtgttccaaatattttctaatttcctttgtgattcttctttgacctatgagttattttgaagtgtatggtctcatttccaagtttttgggattttccgaataattttctgttatcagtacctaatttaattccattgtagccaatgaatatatttcatatgattttgatccttttaaattcattgagacttgttttgtggcccagtgtgcrgtctattttgataaattccatatgtacttgcaaaaatacatattctacagttactgtgaatggagtgtgttataaatgtgaggtaaaattgatgggtaatgtttagtttttctatatctgtactgattttctgtcaagctgttgtaattactaagaaaggaatattgacatctccaaatatgtgtctatttatgtaattattt

SEQ ID NO: 325286 - DNA, 639 bp, Homo sapiens
cagaaaatgaagatgcatcttggtgatctgaaatttgtacactagaaagtaactagcaacttgtctggaagtgactgtgtttgtcatttaacctgagtgttctcagagcgctctgttcattagctttgcagcctagatctctcattgtgggagtacccactggttgctagtcacttcttaatatccttttactaaaaatttgtcaataacatatgtaaagccaactgatatgctctggattctcaagtgaaatccgaataccctgccttccttccatattcatgaacctttctctccagctgctcaaataacaggtgactaggttggcagaaaatctgcagaatataggataatgcatttaaaaaacataaycacctcccttctcttttttaaagtttttgttcacttttaataacctctgcagttttttttaaattttttaaatttttttaatttcaataggtttttggcgaacaggtggtgtttggttacatgaataagttctttagtggggattactgagattttggtgcacccatcatgtaagcagtgtacactgtacccagtgtgtagtctttatccttcgcttcccccaaccctttccctcaagtccccaaagtccattgtatcattctgatg

SEQ ID NO: 325287 - DNA, 499 bp, Homo sapiens
acagaaatcaaaaagtaaaaaaagaagaaaaaaatagcctgctgttaatgactagcagctcacaaaaacccctttcctctggtgggctttggactctaagcaatatattgatcagcctgagacattggaccagcactgccgtgcttccagttttaaacctgacttgcagcgtcacmatcaggatgttaactttcttaagcctttttctgtggctacactgacactcattagtacgtgatgaaaggtaaaacatctcatacttgaaataattggtgggagttggcatccgtgagtcaggatggacactggtgttaaggctacagctgttactaagtcccctcatttagctgggcattcatcttttagttactaaactatgagaagactcaggggttccttggggaatggcaggaggtggggttggtgtaggacaagcactaggaagactctgggggcatctatttaacaaactaaatgaaaacaaacaaacaaaacctcc

SEQ ID NO: 325288 - DNA, 499 bp, Homo sapiens
acagaaatcaaaaagtaaaaaaagaagaaaaaaatagcctgctgttaatgactagcagctcacaaaaacccctttcctctggtgggctttggactctaagcaatatattgatcagcctgagacattggaccagcactgccgtgcttccagttttaaacctgacttgcagcgtcaccatcaggatgttaactttcttaagcctttttctgtggctacactgacwctcattagtacgtgatgaaaggtaaaacatctcatacttgaaataattggtgggagttggcatccgtgagtcaggatggacactggtgttaaggctacagctgttactaagtcccctcatttagctgggcattcatcttttagttactaaactatgagaagactcaggggttccttggggaatggcaggaggtggggttggtgtaggacaagcactaggaagactctgggggcatctatttaacaaactaaatgaaaacaaacaaacaaaacctcc

SEQ ID NO: 325289 - DNA, 587 bp, Homo sapiens
aggtttatgttgccaaagttgaggacgtgctcagggaaaaagaagtacaagacacataagatttgtgtcttgtgctttttccaaagtggattttgagaacttcaatatttaaaggggaaaatgggaagaaagaaaaaatggggagggtaggcaatggggcaagtggtttcattcctgtgaggctttgattagcactcagtgaatttacactttacatgtgaaaagatggaagtgggaggaagtcaactatgtatacttctctttctcagtaaatctaatkttacataagattaaagtcagcatgtgaagttacatctatctattcgcgaacaaaaggaagttgtgtttttgttttgtttttttccatgactcagttccccaccttaactttccttttggtatagttaagtttggggtcttgagattttattattttacatattttagcttctatatgaaaattataatgtcatattgattactaatcttttatgtgacctagggttttttttttttccacataaactatttcagactcctgtctttatttttagtgtttctgaaaaattataatggtgtgccttgtt

SEQ ID NO: 325290 - DNA, 587 bp, Homo sapiens
aggtttatgttgccaaagttgaggacgtgctcagggaaaaagaagtacaagacacataagatttgtgtcttgtgctttttccaaagtggattttgagaacttcaatatttaaaggggaaaatgggaagaaagaaaaaatggggagggtaggcaatggggcaagtggtttcattcctgtgaggctttgattagcactcagtgaatttacactttacatgtgaaaagatggaagtgggaggaagtcaactatgtatacttctctttctcagtaaatctaatgttacataagattaaagtcagcatgtgaagttacatctatctattcgsgaacaaaaggaagttgtgtttttgttttgtttttttccatgactcagttccccaccttaactttccttttggtatagttaagtttggggtcttgagattttattattttacatattttagcttctatatgaaaattataatgtcatattgattactaatcttttatgtgacctagggttttttttttttccacataaactatttcagactcctgtctttatttttagtgtttctgaaaaattataatggtgtgccttgtt

SEQ ID NO: 325291 - DNA, 587 bp, Homo sapiens
aggtttatgttgccaaagttgaggacgtgctcagggaaaaagaagtacaagacacataagatttgtgtcttgtgctttttccaaagtggattttgagaacttcaatatttaaaggggaaaatgggaagaaagaaaaaatggggagggtaggcaatggggcaagtggtttcattcctgtgaggctttgattagcactcagtgaatttacactttacatgtgaaaagatggaagtgggaggaagtcaactatgtatacttctctttctcagtaaatctaatgttacataagattaaagtcagcatgtgaagttacatctatctattcgcgaacaaaaggaagttrtgtttttgttttgtttttttccatgactcagttccccaccttaactttccttttggtatagttaagtttggggtcttgagattttattattttacatattttagcttctatatgaaaattataatgtcatattgattactaatcttttatgtgacctagggttttttttttttccacataaactatttcagactcctgtctttatttttagtgtttctgaaaaattataatggtgtgccttgtt

SEQ ID NO: 325292 - DNA, 620 bp, Homo sapiens
tgcatggtgattgcctatttagttttaaaagaaactactgaactgttttcaaactgtttcttgcattcttacgtttgcaccagtaatgtatgtgttgattcagtttctcttcatcctcaccagaatttggtgttgtcaccatttgttattttagtcttccatagaggtatgtagtgctgtggttgtaatttgcaattccctgatgrctgtaaagctgaacatcttcatgtgcttcttttctgtctatatgtattcttcattgcaatatcttcatgtattttgcccatctgctaattgaattacttttttcttattgagtgcagatgatgaagcccaagttatcaatcttttttacagattacgatttggtgtcaactctaagaacttgttgcttagctctagatactgaatattttcttctatattttttctaaatgttttacagttttatatttaaaactataaaatgtacatagtccattttgagttaatttttgtttaaaggatgaggtttgggacaaagttcatgcacttgtctacagatgtccagttgttccagcagcatttggtaaaaatgttattcttcctccactgaatggctctacttttgtaaaatgaga

SEQ ID NO: 325293 - DNA, 620 bp, Homo sapiens
tgcatggtgattgcctatttagttttaaaagaaactactgaactgttttcaaactgtttcttgcattcttacgtttgcaccagtaatgtatgtgttgattcagtttctcttcatcctcaccagaatttggtgttgtcaccatttgttattttagtcttccatagaggtatgtagtgctgtggttgtaatttgcaattccctgatggctrtaaagctgaacatcttcatgtgcttcttttctgtctatatgtattcttcattgcaatatcttcatgtattttgcccatctgctaattgaattacttttttcttattgagtgcagatgatgaagcccaagttatcaatcttttttacagattacgatttggtgtcaactctaagaacttgttgcttagctctagatactgaatattttcttctatattttttctaaatgttttacagttttatatttaaaactataaaatgtacatagtccattttgagttaatttttgtttaaaggatgaggtttgggacaaagttcatgcacttgtctacagatgtccagttgttccagcagcatttggtaaaaatgttattcttcctccactgaatggctctacttttgtaaaatgaga

SEQ ID NO: 325294 - DNA, 620 bp, Homo sapiens
tgcatggtgattgcctatttagttttaaaagaaactactgaactgttttcaaactgtttcttgcattcttacgtttgcaccagtaatgtatgtgttgattcagtttctcttcatcctcaccagaatttggtgttgtcaccatttgttattttagtcttccatagaggtatgtagtgctgtggttgtaatttgcaattccctgatggctgtaaagctgaacatcttcatgtgcttcttttcwgtctatatgtattcttcattgcaatatcttcatgtattttgcccatctgctaattgaattacttttttcttattgagtgcagatgatgaagcccaagttatcaatcttttttacagattacgatttggtgtcaactctaagaacttgttgcttagctctagatactgaatattttcttctatattttttctaaatgttttacagttttatatttaaaactataaaatgtacatagtccattttgagttaatttttgtttaaaggatgaggtttgggacaaagttcatgcacttgtctacagatgtccagttgttccagcagcatttggtaaaaatgttattcttcctccactgaatggctctacttttgtaaaatgaga

SEQ ID NO: 325295 - DNA, 595 bp, Homo sapiens
ttgctaggtttgggaattggaagtgctgcgtttgagtcatcatctcctgttgaggagggagacataggatgccctgatgctgtgttgttcctccagttttggcttcccaaatcagttcttctttcttgctaccttttggaattcacctgtgttgtatcttgcattatttccaggatttacagttaygctatgtgagaatgagcagggagaaaccagtttctccctagtcttgtttttattttgtaattgcaatatcttatctgtgttcttatattgtaatcacaatacttctcttgtctctttgagaatcatagtttcttcttaaacattctctgtctttctgcgttttatgttttctctgtttttcgtttgtttgttttcctctcagactttcatgtaagggtcattcctcatataactggtgttctttgcctacttcctataattgtgaggttccaaaatgatgaaaaacagttctgtgcaaacagactggaaagcagccttattcctaatctttctgctcagtatggcttattaccctacctatagctatgaatagtctaagttctgtttcttccctgacttaagactccag

SEQ ID NO: 325296 - DNA, 595 bp, Homo sapiens
ttgctaggtttgggaattggaagtgctgcgtttgagtcatcatctcctgttgaggagggagacataggatgccctgatgctgtgttgttcctccagttttggcttcccaaatcagttcttctttcttgctaccttttggaattcacctgtgttgtatcttgcattatttccaggatttacagttatgctatgtgagaatgagcagggagaaaccagtttctccctagtcttgtttttattttgtaattgcaatatcttayctgtgttcttatattgtaatcacaatacttctcttgtctctttgagaatcatagtttcttcttaaacattctctgtctttctgcgttttatgttttctctgtttttcgtttgtttgttttcctctcagactttcatgtaagggtcattcctcatataactggtgttctttgcctacttcctataattgtgaggttccaaaatgatgaaaaacagttctgtgcaaacagactggaaagcagccttattcctaatctttctgctcagtatggcttattaccctacctatagctatgaatagtctaagttctgtttcttccctgacttaagactccag

SEQ ID NO: 325297 - DNA, 595 bp, Homo sapiens
ttgctaggtttgggaattggaagtgctgcgtttgagtcatcatctcctgttgaggagggagacataggatgccctgatgctgtgttgttcctccagttttggcttcccaaatcagttcttctttcttgctaccttttggaattcacctgtgttgtatcttgcattatttccaggatttacagttatgctatgtgagaatgagcagggagaaaccagtttctccctagtcttgtttttattttgtaattgcaatatcttatctgtgttcttatattgtaatcacaatacytctcttgtctctttgagaatcatagtttcttcttaaacattctctgtctttctgcgttttatgttttctctgtttttcgtttgtttgttttcctctcagactttcatgtaagggtcattcctcatataactggtgttctttgcctacttcctataattgtgaggttccaaaatgatgaaaaacagttctgtgcaaacagactggaaagcagccttattcctaatctttctgctcagtatggcttattaccctacctatagctatgaatagtctaagttctgtttcttccctgacttaagactccag

SEQ ID NO: 325298 - DNA, 396 bp, Homo sapiens
tttatatggatagctttatatgaaacttgcctcctatgttctgtacttttagaaatacctttaattgtccttggttaatgtratactccatatggaagagatcagaggtttcagtcatttctagggctcttacattcttagttctttagttcttttgttagttattgatatttatatatcaagaaaaccagccctttattcataaaatgtgctgcaaatatattctctagtttatgtgtttttttttcctagagttttgctttttaaaataaatacatttcagaattctgattgacctatggatgtgagatcagtatcttactggatccctcagtagttaatcagttaaacaaaatattttgcaagagatcattttatatttgtatgagtcatgat

SEQ ID NO: 325299 - DNA, 441 bp, Homo sapiens
ttcagtcatttctagggctcttacattcttagttctttagttcttttgttagttattgatatttatatatcaagaaaaccagccctttattcataaaatgtgctgcaaatatattctctagtttatgtgttttttttycctagagttttgctttttaaaataaatacatttcagaattctgattgacctatggatgtgagatcagtatcttactggatccctcagtagttaatcagttaaacaaaatattttgcaagagatcattttatatttgtatgagtcatgatattacctttttataaaaattatcattgaatgatttgctgacctgagatttaggtaaccagtccaaggcctggagattcactcttgaccaagccttagagaaattcctccaaaaagggaatcctctcctaggtacccagaggagcttgtgaaagt

SEQ ID NO: 325300 - DNA, 441 bp, Homo sapiens
ttcagtcatttctagggctcttacattcttagttctttagttcttttgttagttattgatatttatatatcaagaaaaccagccctttattcataaaatgtgctgcaaatatattctctagtttatgtgtttttttttcctagagttttgctttttaaaataaatacatttcagaattctgattgacctatggatgtgagatcagtatcttactggatccctcagtagttaatcagttaaacaaaatattttgcaagagatcattttatatttgtrtgagtcatgatattacctttttataaaaattatcattgaatgatttgctgacctgagatttaggtaaccagtccaaggcctggagattcactcttgaccaagccttagagaaattcctccaaaaagggaatcctctcctaggtacccagaggagcttgtgaaagt

SEQ ID NO: 325301 - DNA, 558 bp, Homo sapiens
tatagctacttgttcagcaacatatccactcatttgagtcggattcagaaaaatacctcctggaaatttgtttccatttttgataaaccagagtaagattatttgtgcttctttatgctgaacaaaacttaaaactgtatataggttaattatgttgtatcctttttttttttttttttttttttttttttactgcatgcagttatgctttaggggaaatgatttgacttttgctgaatctaaatccacaggtcacttgagctgattaatattctaaaaattttcattttgaaratttcatacatatttatcttgatcatacttacctataatactttgccttgttatatcagaaagtggaatgacaggaccaaatgaaataactactcaatctaggtggcttacctacttcctgtttgtaaggcatcaagtttgggtataaagcagtgttttcccgaatttataatacttacatcactggcacaactcttatatttctaaatattgtttgccttattttgagaaatgagatataacaaactgtggttctgatgtgct

SEQ ID NO: 325302 - DNA, 558 bp, Homo sapiens
tatagctacttgttcagcaacatatccactcatttgagtcggattcagaaaaatacctcctggaaatttgtttccatttttgataaaccagagtaagattatttgtgcttctttatgctgaacaaaacttaaaactgtatataggttaattatgttgtatcctttttttttttttttttttttttttttttactgcatgcagttatgctttaggggaaatgatttgacttttgctgaatctaaatccacaggtcacttgagctgattaatattctaaaaattttcattttgaagatttcatacatatttatcttgatcatacttacctataatactttgccttgttatatcaraaagtggaatgacaggaccaaatgaaataactactcaatctaggtggcttacctacttcctgtttgtaaggcatcaagtttgggtataaagcagtgttttcccgaatttataatacttacatcactggcacaactcttatatttctaaatattgtttgccttattttgagaaatgagatataacaaactgtggttctgatgtgct

SEQ ID NO: 325303 - DNA, 558 bp, Homo sapiens
tatagctacttgttcagcaacatatccactcatttgagtcggattcagaaaaatacctcctggaaatttgtttccatttttgataaaccagagtaagattatttgtgcttctttatgctgaacaaaacttaaaactgtatataggttaattatgttgtatcctttttttttttttttttttttttttttttactgcatgcagttatgctttaggggaaatgatttgacttttgctgaatctaaatccacaggtcacttgagctgattaatattctaaaaattttcattttgaagatttcatacatatttatcttgatcatacttacctataatactttgccttgttatatcagaaagtggaatgacaggaccaaatgaaataactactcaatctaggkggcttacctacttcctgtttgtaaggcatcaagtttgggtataaagcagtgttttcccgaatttataatacttacatcactggcacaactcttatatttctaaatattgtttgccttattttgagaaatgagatataacaaactgtggttctgatgtgct

SEQ ID NO: 325304 - DNA, 594 bp, Homo sapiens
aactacattagtcagaaatttgtcatgatcagatgaaaaactggaatgtttaaatgtcatcatgaacaacctctacgatctgtcatatcacatgttggcctctggtcattagcagtgaagaatgtgtactacaatatttagccttttctccacttttgaataataggtttgcatgtgtttacatatgtattatatatgtgttatgcatgtgtgcatatattcttacacactgtatccttaagctgctttgttattggtagaagatgctgtgaaatagtgygataaacagaaaagttgaatggaaaaagtagaagtcataaatgatttgagaaagaagtaacatgtacttttagaattattagtataaaaatggagtggtatccacataatcaacagaagagaaataacaaaaaaaagaccaggaggaaaaaattatacttaatagtggtatcattgcttcctcagattcacttctagcaataaaatattcaatatctcactggtgattgtcaaaggtagttgggacaactcttgccccacttgtaattgactaataccattgtgatagatgtatcttattattttactagctct

SEQ ID NO: 325305 - DNA, 576 bp, Homo sapiens
tgccaggtgtgaattagtagacggatgcagaatgaataacaatgtaggtttggcatctgggactttgctgtttagaacaatgtttcataattaattataaaaaatatattcattgaagatgaaatttaataaattccatttaaatatataagcacatttgatatatacatgtataatttatttcacaaatatatatagaatacctacagtgtcaatataacactcataattatttttttccagagacattgagaataaactcaataaatacaaaagtgttaatttcaaattttatgccctattacatctttttgtttgtgtatttatttgtcttccaacttgaggatcaatatacaacttcaacaataaaattaattttaaaagagctaactctgagagtgcacacrtatacacccatccacatacttatatatgtactgccaaatttcaaattacattttacttaactactttggtgccattccaagcacataaacaatatttgtaagtccgtttattttagattgatgaagtttctaattctgcacttggaggaaggtacgcctctccaagaat

SEQ ID NO: 325306 - DNA, 532 bp, Homo sapiens
ttctaggaatgtatctcacaaatgtacctacaaagatacacacatgcatatgttcaaaaatattcatgacagtactctttgtaatagtaaagtgttagaaataatgtaaatatgaaatggataaaataatttgggcaatggaaagaataagrgcaggaaaaaatgaagcctagaatgtggttttcaacatccaatatgcaatttttcttctttcatagctggtctacctcttctgagttgggccatgttgtaacttaaccctcttctgtgacctgatagtcagcactggagtggaagatggggccagttctgcagaggacaagcattgtggatgatggatgatgttgtgtcctagccagactatctttacccagccagtgcgcccaactctcagctgctgtaaatcttggttgcttatagctcacaacttcctcttttcaagaaattaactttgactaaatgggagccacctcactcaagaagttacttctcccaccccaggacagcctacagccagggcttggcccttgtg

SEQ ID NO: 325307 - DNA, 412 bp, Homo sapiens
atttaaattatatcacctgggtcaagattttatttttattaaaggctgaagtctatagactactctgtgccatattttgctttaatttggtgcctggagtggaactcaggtcttagttaaattttaattttgttgtgtttttgtattaaaaatgccaaacctgattcacttttaggaatgagatttttccaataatattgttgrgttacttttactcattctaggcaaataagtgatttgtttcattctctttttttttgcccatgacaaatttgtatttgctaaacttgtacatatttggtagatcctatgccaggtgatctgagtttataatatatcccttttattgatacataatacttatttgtggggtacatgtgatattttctcacatgcataaaatgggtaatga

SEQ ID NO: 325308 - DNA, 386 bp, Homo sapiens
ttttttttttgctaataaaaatgtttcagttagcttgaacatatctgtgtataactgaaaaaacatttataagatgaattattaaaagtgaattttgggatcaaaggttgtgtgtattttaaattttgacagataataccaatttaataatgtcatatgtttaaaaatctaatgaagtattctatagatttagttgacagaattatctgatcagtgaatccaaattaaatagtgaaaccaatattgaaacttaaaactgtacaatgctggaacacatagagagtcttaatgcawagttaagtatataaacaattatagtaaaacactacagcataataacagcctcctccacaattttcagcaagctgaaatcattttgcctttgt

SEQ ID NO: 325309 - DNA, 386 bp, Homo sapiens
ttttttttttgctaataaaaatgtttcagttagcttgaacatatctgtgtataactgaaaaaacatttataagatgaattattaaaagtgaattttgggatcaaaggttgtgtgtattttaaattttgacagataataccaatttaataatgtcatatgtttaaaaatctaatgaagtattctatagatttagttgacagaattatctgatcagtgaatccaaattaaatagtgaaaccaatattgaaacttaaaactgtacaatgctggaacacatagagagtcttaatgcatagttaagtatataaacaattatagtaaaacactacagcayaataacagcctcctccacaattttcagcaagctgaaatcattttgcctttgt

SEQ ID NO: 325310 - DNA, 423 bp, Homo sapiens
gcagtagagcaagagagaaatttgtttcactgtgtgcacagacaccaacatttaatttcatgtttttaaacctacttcttttgggatagaatttaagstatggcatgtgctgaatgctgagtagagtgcagaaacttttatcccagagatgggcggctaaagggtgatctagaaaagctcataattcattgagtacaactctgttcacttattacagtgttctgtttcttggggagttcacaagcaaaaaactactagcaatgggcttcccatttgtactgagaaattgagccatgcttcctcctcatatctattccatctgttcctagcctctccaagagaggcgctttgatccgaaaatctttgagatggaagagtctttgcttaatgctgaatcactatctactcttcatattgtcttat

SEQ ID NO: 325311 - DNA, 586 bp, Homo sapiens
aataatattagtaaataataagttcatgtttgtgagatactgtcaattaatctcaacatccatgcaaatctaagactcacatttcatctaaacaaaattgtaatgaagagaaagaaaaatgaagacaattattttgtactatggtagaaacagttttatttcaactaaagtgggctcctcgattttaggagggattggtgatctggcaaacactgtaacagaatcccagtgtgaataaacaaccgtgatgcctatgtggtctgaaaggagaacagaagctttagtgtttgccaaaaaaatttcctcagatggtttaatttgaaaaagcatacttggtgaaaatgaaggagaggagtatwgtccaaccatgaggattctttggcagtcatgaactttgttagttattaaccttctgatatcaatatgagcattgatatcagaaatggaagttgtagtgcatgaaggctgccattccaaaaccattgaaaataacagccatatactgaaagcctcctcactgccatttctgtggcccagcagagttttctaggatgcttggagtcttagtttctttattattctgtct

SEQ ID NO: 325312 - DNA, 565 bp, Homo sapiens
gggttgttaggagctaatctcccatgcagaaggtgtgagctgaaagattatctctyattcagtcttatttgataagtgagagaagtgactctaggagaggtaaagtgatgacttattaaaggtaattgattaatagtgaccaaaactccagtttgccagcttccagtttagctgtttttataatatcacacagctacagactacctgagctgagttaggtatgaaaatttttgcacaatgttaagtgtggaaaaatcataattttccttgtagatataaaatacatataggactggacaaaactccatgataatcaacaaatatttcttagaaaatgtttagttattgcttgttatgtgtcaagttctgttcaggctaaaaagacgagtaagacccttgtctaccctatcttgtggagaatcattgtcttgggatttgataatggaagaaactgcataaaatgcctaatacgtactctaaatctatgtaaaaagctttttactataattaaagccaaaatatgttttcaaatgttattttattttctttttatatcccttgacta

SEQ ID NO: 325313 - DNA, 584 bp, Homo sapiens
gatgctgatactttgaaacccaaaccttgatctgatcatgccaccctggttagagtagggtagtacatgggttttgttttgaatttttttttttttttaccactccgccagtgtccatatagtgactaagtcttatcaattctaattccaaatgctgtcttccatcggtcttttcttctttatccccaaagacactcattttatcactcttgcttaggtcaattaaaataacttgttgattattctccttgtttcaaagtrtttctccttccaatcactcagaatgatgatagaagaatgatgtcagagttttcttaatataagatgaaaacctctgcatcaatcctttgcttaaaaatcttcaatggttactattttgccgtacataaaatatcaaactcctattccttatgtgatccttcacagtctggtcacattttacctgccatccttgccccctgccacacacccctgctccctgtgttctgaccatacagaacttcaaccagtgccattaacaggtcaccctttgaatttctgataatttcattttgcccatctaaaaggccattccgtgttgtttt

SEQ ID NO: 325314 - DNA, 584 bp, Homo sapiens
gatgctgatactttgaaacccaaaccttgatctgatcatgccaccctggttagagtagggtagtacatgggttttgttttgaatttttttttttttttaccactccgccagtgtccatatagtgactaagtcttatcaattctaattccaaatgctgtcttccatcggtcttttcttctttatccccaaagacactcattttatcactcttgcttaggtcaattaaaataacttgttgattattctccttgtttcaaagtatttctccttccaatcactcagaatgatgatagaagaatgatgtcaragttttcttaatataagatgaaaacctctgcatcaatcctttgcttaaaaatcttcaatggttactattttgccgtacataaaatatcaaactcctattccttatgtgatccttcacagtctggtcacattttacctgccatccttgccccctgccacacacccctgctccctgtgttctgaccatacagaacttcaaccagtgccattaacaggtcaccctttgaatttctgataatttcattttgcccatctaaaaggccattccgtgttgtttt

SEQ ID NO: 325315 - DNA, 584 bp, Homo sapiens
gatgctgatactttgaaacccaaaccttgatctgatcatgccaccctggttagagtagggtagtacatgggttttgttttgaatttttttttttttttaccactccgccagtgtccatatagtgactaagtcttatcaattctaattccaaatgctgtcttccatcggtcttttcttctttatccccaaagacactcattttatcactcttgcttaggtcaattaaaataacttgttgattattctccttgtttcaaagtatttctccttccaatcactcagaatgatgatagaagaatgatgtcagagttttcttaatataagatgaaaacctctgcatcaatcctttgcttaaaaatcttcaatggttactattttgccgtacataaaatatcaaactcctattccttatgtgatccttcacaktctggtcacattttacctgccatccttgccccctgccacacacccctgctccctgtgttctgaccatacagaacttcaaccagtgccattaacaggtcaccctttgaatttctgataatttcattttgcccatctaaaaggccattccgtgttgtttt

SEQ ID NO: 325316 - DNA, 473 bp, Homo sapiens
agaaaagggtttcagagcttgcatctcgtgactcttatatttaactgatgatgaaagtgaagtccagagaaattaagttttttctcaaaaattcatctggtcagtggtagggctggaacccttttacattaatcacatgacttgtctcccagtgcctgggctggtgctgtttacataaatcccgtgactaggtaatccgtgaagtctgtgttttaattatagaagtcactatgatgmtactaaaaaaacattgagaacaagtatttttctaattacttagtgaattacaaatgatttttacattattcagaggattatagaaaatgaagactccacttatacaagaccttatttagttattgagtcagatacatttactgagtaccagccgtgagtgcacaccattgtagtagacccagggaatacacagaagaaaacataaaacctcaagtggacagagacgtaaacagcag

SEQ ID NO: 325317 - DNA, 636 bp, Homo sapiens
tatcaaaccctttattcctgtgagtctgttttctggctctggcagttgaggcaaaagagcctgttatcagcaggagtgtgttgctggatgtttggagactrggattggagggagcaagatgctgtctccatcttcctccactggagtggagagggaatgtcacttttctcgctgaaagtcctccagccctgggagtcaggaaaccagaccagtcatgcaattctccccctgtcccttaaagcttcctctctctgattccgacacgccctgggtaaatctcctcatagagttacagtaagaatggcatgaaataatattatgtaaatgttcttaaaaattacacattcgtttgatacaacattatgatcaagggtaaaaagaaggccataccaatatttccaaatatactcagagggttcctcctaaggattatgggttggaagggtttgacacacaaacaatgataaaagcataaccaagttatttattgcccaaagacaagaagtaaaggcataaaagagcccagattcggatctttagtttcactcttagaatcaggagaactgggtaacttttaatgaaaaagttggtccatcaaacttctgctctccagaaatgagtctgggtttaggcagg

SEQ ID NO: 325318 - DNA, 532 bp, Homo sapiens
gattggagggagcaagatgctgtctccatcttcctccactggagtggagagggaatgtcacttttctcgctgaaagtcctccagccctgggagtcaggaaaccagaccagtcatrcaattctccccctgtcccttaaagcttcctctctctgattccgacacgccctgggtaaatctcctcatagagttacagtaagaatggcatgaaataatattatgtaaatgttcttaaaaattacacattcgtttgatacaacattatgatcaagggtaaaaagaaggccataccaatatttccaaatatactcagagggttcctcctaaggattatgggttggaagggtttgacacacaaacaatgataaaagcataaccaagttatttattgcccaaagacaagaagtaaaggcataaaagagcccagattcggatctttagtttcactcttagaatcaggagaactgggtaacttttaatgaaaaagttggtccatcaaacttctgctctccagaaatgagtctgggtttaggca

SEQ ID NO: 325319 - DNA, 636 bp, Homo sapiens
tatcaaaccctttattcctgtgagtctgttttctggctctggcagttgaggcaaaagagcctgttatcagcaggagtgtgttgctggatgtttggagactgggattggagggagcaagatgctgtctccatcttcctccactggagtggagagggaatgtcacttttctcgctgaaagtcctccagccctgggagtcaggaaaccagaccagtcatgcaattctccccctgtcccttaaagcttcctctctctgattccgacacgccctgggtaaatctcctcatagagttacagtaagaatggcatgaaataatattatgtaaatgttcttaaaaattacacattcgtttgatacaacattatgatcaagggtaaaaagaaggccataccaatatttccaaatatactcagagggttcctcctaaggattatgggttggaagggtttgacacacaawcaatgataaaagcataaccaagttatttattgcccaaagacaagaagtaaaggcataaaagagcccagattcggatctttagtttcactcttagaatcaggagaactgggtaacttttaatgaaaaagttggtccatcaaacttctgctctccagaaatgagtctgggtttaggcagg

SEQ ID NO: 325320 - DNA, 515 bp, Homo sapiens
attcatttgtgatttggttcctgccagtttggttaatgactcaacttgtgaaaaacacagtgaaaacttaaaaaaaaaaaaaacaacagtcatgaggaatgaaagaggaggaaatggttacctaccaygtgtaaagcacattttccttggtgctgaattttagcctggaatgaatttttatgatcacattataaacctctgaaaatagagtttagtaggagtactgaaactgtcttaaatgtattttactggcaaatgtgctcctggaatgatttttctaaaggtaaagatattaattaattttatgcaatccatatatatatatgtgttttaaaacatttgaggggttacttattttcagcctaactaccacataatcaaagaaagatgtaacagaatgatttgaagagtctttagggaagaaattgcacatgctttctatcaaaggttctgcataattcatttcattctaatactgtgatgcatttagctccttacaacctaagcaccaggga

SEQ ID NO: 325321 - DNA, 580 bp, Homo sapiens
atttttttatttgtattttttctattttaaatatttttatttctctctttctctcaaagttcttttaaaagtaagaaagttatcttccttctttgcatgcatcagtgtgtacccttgccctcttcttggccaaataatggggcttgctactagacatgggtaatgaggggtggggattttgtggtttgaagmaggctctctgtggaatttctttgaactacagaaaccctgcaacttgctatgtctttcttgtttttaccagtttagcgcaaatgttgcctttcaatgcaacacatgttcaaagcaaaacataaaattgtgttagtttaaaggactcattaatttcctttgtactgcaaatcctctgcattaacaaatgcagtgtgctgactctatattcaaacttattccattttggttgctattaacttcaaaggaaacctgaaaaacgagtataagaaaattaaattctcgtgttgaaaaattaatacattactgacaactgacccactttttagtttctgttttatgaaattttaaagtttttctatttgtaagacagatctgtgattaaacttgt

SEQ ID NO: 325322 - DNA, 600 bp, Homo sapiens
attaatttcctttgtactgcaaatcctctgcattaacaaatgcagtgtgctgactctatattcaaacttattccattttggttgctattaacttcaaaggaaacctgaaaaacgagtataagaaaattaaattctcgtgttgaaaaattaatacattactgacaactgacccactttttagtttctgttttatgaaattttaaagtttttctatttgtaagacagatctgtgrttaaacttgttctaggatatttcttccttaaagattaagcctcccatcctacagcgtcattgtcattctatagattcttgtagtatagtttttaaaatatccctgaagatctctaatttccatcttgttgtgtatgtgtatatgtgtgtgcacatgtatgtgtgtggtttaggtattaaacagaaagatatttgatctctaaaatgatataatagaagcaaaaattagtcaattcaaggaataaggttttagtttatattgctgctgttaaaaattatgtattactttatataattagtcaatatttcaccttatcaggaattatcagtgtttaaatattgagcctgaacatctatgacttaaatat

SEQ ID NO: 325323 - DNA, 626 bp, Homo sapiens
agatgctagtcatcattgtattctaatttatatatgtgactatattaactattattagtttctagaaaaaatttttacatgttccaagcccaaaccctgttcataatttttttataacttgaatttgaaataataaaggtaaaaatttcaatgttgggaaatgttaaacaaaactccagagcatgggcttctcttgaaaaattagactcarggctatcattcttatatgggatccatattttgacgctaaacagtggtgttctcattaatgtagcacgaagtctccacctgactccagatacttattcagctcacctgcccaatctctgcaggcctggggcttgtagctcctatacaacatctttgaatgtcatctttgttacacacttcatgaactataattactttcagtgttgcaaccgttttttggctacagatatttttaagtttagagaaaaagtcatgataaagcaatagaaatagagcagaaataactatctattgtaacttcacagaggatatttactcagggagtagacaagtaagcaagggaactgtcagtaaaatctaaatgtgaacatttaactcgattctattaagtgatttgatggtaaaacacattgcat

SEQ ID NO: 325324 - DNA, 566 bp, Homo sapiens
cacagccacgctgactttgaattatacttataaggcaagtaaagtagttcatgggctcaaaggaaatagagtttatacctaattaagtgggagaagagggaagaagcagggatgcagaattatcttcacagggaaatttgtgtttgaaatcagccttaacaaatgaacaaaaagsaaaaagcaaagatagaaaagtattctaaggaaaggagtcagcattgggaaaaaagatggaagagagaaaagtacagacaggcgtgctactgtctgctttccacttacactttcccttaatattcacaaaatctgagtattattagcataattttaaagatgtgtaaactaaggtttaggcaaataaacttttttgtccaatgttacacaccatattattaactggtcttaggttacacacctaataaataaataaataaacagctctcaaaccctattatgaaaaacttcaaaaccatattatgctcatatagtaatttattcaaaaagcatttattaagcactcaccaggtatcaaagactatagttaaaactagtgatgcaatagtcac

SEQ ID NO: 325325 - DNA, 566 bp, Homo sapiens
cacagccacgctgactttgaattatacttataaggcaagtaaagtagttcatgggctcaaaggaaatagagtttatacctaattaagtgggagaagagggaagaagcagggatgcagaattatcttcacagggaaatttgtgtttgaaatcagccttaacaaatgaacaaaaagcaaaaagcaaagatagaaaagtattctaaggaaaggagtcagcattgggaaaaaagatggaagagagaaaagtacagacaggcgtsctactgtctgctttccacttacactttcccttaatattcacaaaatctgagtattattagcataattttaaagatgtgtaaactaaggtttaggcaaataaacttttttgtccaatgttacacaccatattattaactggtcttaggttacacacctaataaataaataaataaacagctctcaaaccctattatgaaaaacttcaaaaccatattatgctcatatagtaatttattcaaaaagcatttattaagcactcaccaggtatcaaagactatagttaaaactagtgatgcaatagtcac

SEQ ID NO: 325326 - DNA, 566 bp, Homo sapiens
cacagccacgctgactttgaattatacttataaggcaagtaaagtagttcatgggctcaaaggaaatagagtttatacctaattaagtgggagaagagggaagaagcagggatgcagaattatcttcacagggaaatttgtgtttgaaatcagccttaacaaatgaacaaaaagcaaaaagcaaagatagaaaagtattctaaggaaaggagtcagcattgggaaaaaagatggaagagagaaaagtacagacaggcgtgctactgtctgctttccacttacactttcccttaatattcacaaaatctgagtattattagcataattttaaagatgtgtaaactaaggttyaggcaaataaacttttttgtccaatgttacacaccatattattaactggtcttaggttacacacctaataaataaataaataaacagctctcaaaccctattatgaaaaacttcaaaaccatattatgctcatatagtaatttattcaaaaagcatttattaagcactcaccaggtatcaaagactatagttaaaactagtgatgcaatagtcac

SEQ ID NO: 325327 - DNA, 364 bp, Homo sapiens
gtcacctttccaaggaaaccttccttgacaccctacttaaactgtaacactccctccttttctgttctaattcagtgcaccctttccccctccctgctttagacttctgcacagtgcttactagcatgtggcaaactatatgtatttactcatctattgatttctgtcttcttctatttgaaataagtttctcgagggcaggaaattttgtctgttgtgtttagtcctggatacctagtacatagtaggtacccaaaaaacctttgttaaagaaatgagtatttagtgaattgattaatgaaraataaaggatgactatgtctgcaatgaagcaaagtgacttgtgaactgggctttaagtgtc

SEQ ID NO: 325328 - DNA, 539 bp, Homo sapiens
acctgcaggtactaggcttaatacctgggtgatgaaataatctctacaacaaacccccaggacatgagtttacctatataacaaacctttacttgtatccctcaacctaaaataaaagttaaaaaaattatttgtagtttcgtatttgtactctaaggtatgtttatatattaattgtcttggtaagccaaatatataagtktgtgtgtgtgagcgatatatatatgtgtgagatatatgtgtgtgagagatatatgtgtgtgtgtgtgatacatatatatgtatgtgtgtaatggttatctctgaggagtggatttatagaattggaagataattttctatttcacacactttttgttacaacttttatatcagatctgtatacctttataatttaaagtatttctccattttgaaaaacattactagtgggagaggacacaaggcaaataacctaatgagaaattgaatccaggaacaattgaaagatggcttgtacaacagcttcttactcttattctctttgcgtgcatgtcacc

SEQ ID NO: 325329 - DNA, 657 bp, Homo sapiens
cctctaccctcaagtaggccccagtgtctgttggtcccctctatgtgtccatatgttctcatcatttggctmccacttataagtgatagcatgaggtatttggttttttgttcctgaggtagtttcctaaaaataatggcttccagctccatccatgttcctgcaaagaacatgatcttgttcttcatggctgcatagtattccatgatgtatatataccacattttctaagttccaagacacatgtgcaagatgtgcaagtttgttacataggtaaccatgtgccatagtggtttgctgcacccatcggcccatcacctaaacattaagcccagcatgcattagcaatttatcctgatgctctcccttgccctgctaccccctgcccatgacaggtcccagtgtgtgttgctccccactctatgttcatgtgttctcattgttcagctccacttatgaatgagaacatgcagtgtctggctttctgttcctgcataagttagctgaggataatggcttccaggtccatccgtgtccctgcaaaggacatatttttctttccagttatggagttatggctctgtctatacagagccataccttataccttatgttaagcctgccttaacatacataaaagttgtttctctcagatct

SEQ ID NO: 325330 - DNA, 657 bp, Homo sapiens
cctctaccctcaagtaggccccagtgtctgttggtcccctctatgtgtccatatgttctcatcatttggctcccacttataagtgatagcatgaggtatttggttttttgttcctgaggtagtttcctaaaaataatggcttccagctccatccatgttcctgcaaagaacatgatcttgttcttcatggctgcatagtattccatgatgtatatataccacattttctaagttccaagacacatgtgcaagatgtgcaagtttgttacataggtaaccatgtgccatagtggtttgctgcacccatcrgcccatcacctaaacattaagcccagcatgcattagcaatttatcctgatgctctcccttgccctgctaccccctgcccatgacaggtcccagtgtgtgttgctccccactctatgttcatgtgttctcattgttcagctccacttatgaatgagaacatgcagtgtctggctttctgttcctgcataagttagctgaggataatggcttccaggtccatccgtgtccctgcaaaggacatatttttctttccagttatggagttatggctctgtctatacagagccataccttataccttatgttaagcctgccttaacatacataaaagttgtttctctcagatct

SEQ ID NO: 325331 - DNA, 657 bp, Homo sapiens
cctctaccctcaagtaggccccagtgtctgttggtcccctctatgtgtccatatgttctcatcatttggctcccacttataagtgatagcatgaggtatttggttttttgttcctgaggtagtttcctaaaaataatggcttccagctccatccatgttcctgcaaagaacatgatcttgttcttcatggctgcatagtattccatgatgtatatataccacattttctaagttccaagacacatgtgcaagatgtgcaagtttgttacataggtaaccatgtgccatagtggtttgctgcacccatcggcccatcacctaaacattaagcccagcatgcattagcaatttatcctgatgctctcccttgccctgctaccccctgcccatgacaggtcccagtgtgtgttgctccccactctatgttcatgtgttctcattgttcagctccacttatgaatgagaacatgcagtgtctggctttctgttcctgcataagttagctgaggataatggcttccaggtccatccrtgtccctgcaaaggacatatttttctttccagttatggagttatggctctgtctatacagagccataccttataccttatgttaagcctgccttaacatacataaaagttgtttctctcagatct

SEQ ID NO: 325332 - DNA, 657 bp, Homo sapiens
cctctaccctcaagtaggccccagtgtctgttggtcccctctatgtgtccatatgttctcatcatttggctcccacttataagtgatagcatgaggtatttggttttttgttcctgaggtagtttcctaaaaataatggcttccagctccatccatgttcctgcaaagaacatgatcttgttcttcatggctgcatagtattccatgatgtatatataccacattttctaagttccaagacacatgtgcaagatgtgcaagtttgttacataggtaaccatgtgccatagtggtttgctgcacccatcggcccatcacctaaacattaagcccagcatgcattagcaatttatcctgatgctctcccttgccctgctaccccctgcccatgacaggtcccagtgtgtgttgctccccactctatgttcatgtgttctcattgttcagctccacttatgaatgagaacatgcagtgtctggctttctgttcctgcataagttagctgaggataatggcttccaggtccatccgtgtccctgcaaaggacatatttttctttccagttatggagttatggctctgtctatacagagccataccttataccttatgttaagcctrccttaacatacataaaagttgtttctctcagatct

SEQ ID NO: 325333 - DNA, 387 bp, Homo sapiens
gttaatctgatttctgcttttcatagaaaagagtaggtaatgtaaggcaaacccaacacatcctatctttactatgctgggattttgctaaatgtttgaaaaacaaattcagatcaaggaaaaaaccrtccaggcataaataaacaagcaatcaactaggacctaatgaaaataatcattgaactactcatgctgcagagcacaaaaaaatctccaatatagcactgtccattttaaatatgctcagtttgaactttctttgaaaataccacatgtgtttgggcagctgtcatcttttagaagttcatattcactttgtacccttcctgttcccatgggcagactaagctgaacatgcttttagaagagcattccccttgcacttct

SEQ ID NO: 325334 - DNA, 387 bp, Homo sapiens
gttaatctgatttctgcttttcatagaaaagagtaggtaatgtaaggcaaacccaacacatcctatctttactatgctgggattttgctaaatgtttgaaaaacaaattcagatcaaggaaaaaaccgtccaggcataaataaacaagcaatcaactaggacctaatgaaaataatcattgaactactcatgctrcagagcacaaaaaaatctccaatatagcactgtccattttaaatatgctcagtttgaactttctttgaaaataccacatgtgtttgggcagctgtcatcttttagaagttcatattcactttgtacccttcctgttcccatgggcagactaagctgaacatgcttttagaagagcattccccttgcacttct

SEQ ID NO: 325335 - DNA, 546 bp, Homo sapiens
aaactatgaccatataataactacaaaaattgactcaatatcaaatatataatttgagtatccctataatcattaaggaaattaaattcacaattttaaaatttccatgaaagaaatctctaggcccagatgttcagagaattctaccaaatgtttaaagaaaaattaacaccaattctacgtaatatctttcagaaagtagagtaagaggaaacactttccaatccattttatgaaactgttattaccctgataccaaaaaaaagacacagaaagaaaatatcaaaagagaaaaccaaagaccaatattcttcatgaatatatatgcaaaaatcatcaataaaatattagcatatgaaactcagcgatacataaaaagaatcatacctcatraataagttttgttccatggatgcaaggctgattcaatatttgaaagttaataaatgtaatctaccataataataggctacaaagaaaaattaaacaaccatatcaattcatgcaaaaagaacatttgacaaattgctaggtattagaaaagat

SEQ ID NO: 325336 - DNA, 577 bp, Homo sapiens
tggtagtttgctaggaatagcactgaatatgtaaattgctttggacagtatggccattttaacaatgttgattttttcctatccatgagcatagaatgtttttccattatttgtcatctctgatttctttgagcagtgaaagattgtattgagacatccctacaaatctcattctcattgtagagatctttcacctccatggctagctgtactcctaggtattttatkctttttgtggcaattgtgaatggaattgtgatcttgattcggctctcagcttgaatattgtttgtgtattgaagtgctactgatttttctacattgattttgtatcttgaaactgctgaggttgtttatcagatcaaggagctttggggcagagactatggggttttcttgatatagaatcatattgtctgcaaacagagatagtttgactccctctcttcctacttagatgcctttcatttctttctcttgcctgatcactctggcttcaacatccagtactacgctgaaaaggaatggtgagagagggcatcgtcatcttgttctggaaggggaatgcttccagctt

SEQ ID NO: 325337 - DNA, 571 bp, Homo sapiens
atgtgtgcacacatgcacacacacatatacacacacacaccccttgaggcaggtgcttttgatctttttcaaagaaaggaaatgggcagtttcaaagtcactgcctgctgcttagaaaaacagaggtcatgaatgtttcattgatatagctcagatgttatcctttatgaatgaagggtttctatgcaacttgattgtggaaattgtctgcctacgggaactcacagaaaaaagaaaactatttgaagtgggtgtttcctgcataaaaagaggattatgatgatgcattctcaaccttaaatttgcgggttttttttaaagtcatgaccacaaatgcggcaatgaaaataccataagtagttcacttttcctacaccacaaaacttggccaggaatagcacatacttttggctacatctatatctctgattaattktttgaatgcaggaaatgtacaatcatggcatttaaacaaatgaacacagacgcatattgcttcaacttagagaaaagaaaaagaccaaatttcattatgttacgatacacacacacaaaaagagtttgtgtgaat

SEQ ID NO: 325338 - DNA, 571 bp, Homo sapiens
atgtgtgcacacatgcacacacacatatacacacacacaccccttgaggcaggtgcttttgatctttttcaaagaaaggaaatgggcagtttcaaagtcactgcctgctgcttagaaaaacagaggtcatgaatgtttcattgatatagctcagatgttatcctttatgaatgaagggtttctatgcaacttgattgtggaaattgtctgcctacgggaactcacagaaaaaagaaaactatttgaagtgggtgtttcctgcataaaaagaggattatgatgatgcattctcaaccttaaatttgcgggttttttttaaagtcatgaccacaaatgcggcaatgaaaataccataagtagttcacttttcctacaccacaaaacttggccaggaatagcacatacttttggctacatctatatctctgattaattttttgaatgcaggaaatgtacaatcatggcatttaaacaaatgaacacagacgcatattgcttcaacttagagaaaagaaaaagaccaaatttcattatgttacratacacacacacaaaaagagtttgtgtgaat

SEQ ID NO: 325339 - DNA, 472 bp, Homo sapiens
ggtgggttcagtcaactggctttgtttctggaagattttakaggggcaaagctcagctctgcaatcctgggctgcatcctttaactctgggaggttggtattgagcccctggctttgttctttagcacctcaagattaacctgctgcattggggcagccttccctttcctgctggaaagggaagcaggcagcgaggtgttcccagaccgctggccctggcactccgatgagtggtgccaaagcaaggcactttgttggggtcaggattcatgctctttggtgtgtaagtagtggcagcacagcggggtacacatgtcagctggggttgggtaccaatggaatatagctgctgcattcctgcttgcttacacaggtggttgtggcggaggcaagggtggcacactggcaggcctagggctactggcctcactgcatgcctttgaagtgctggtggtgatgggacaggggaaca

SEQ ID NO: 325340 - DNA, 472 bp, Homo sapiens
ggtgggttcagtcaactggctttgtttctggaagattttagaggggcaaagctcagctctgcaatcctgggctgcatcctttaactctgggaggttggtattgagcccctggctttgttctttagcacctcaagattaacctgctgcattggggcagccttccctttcctgctggaaagggaagcaggcagcgaggtgttcccagaccgctggccctggcactccgatgagtggtgccaaagcaaggcactttgttggggtcaggattcatgctctttggtgtgtaagtagtggcagcacagcggggtacacatgtcagctggggttgggtaccaatggaatatagctgcygcattcctgcttgcttacacaggtggttgtggcggaggcaagggtggcacactggcaggcctagggctactggcctcactgcatgcctttgaagtgctggtggtgatgggacaggggaaca

SEQ ID NO: 325341 - DNA, 631 bp, Homo sapiens
atattctttttaattcaaaagtcttgctacacatctgtgctttacaattatttgtctaaaacaaatcgactcatcagttaatttccttaactaaagtagtacataaattagaatatcaattactaaagaataatgacatcaaagttacggatttagccattttattgactcaaaatggatcttttccttgagaaatatcaataactaaaactatgactaagacagttaataacaattaatgcataaagtcagagaccaaatcacttttagccctgttacaagcattgcctggtcactagtttgatttttgaccttgttaatatggatgtcagagggcatgagggtataccatgtcactttaaaacctaattcttcatgcctaaatggcccttcaccatacaatggatggaaagcagtaaattgtatattccaagcacttctggtagtattttttataaragaagctcatagatttttctgggtttttttgttttgttttgcattggttttgcttttatcaaatctttgatttaaactatgttagattatgctgaaagaaaagcaacagtatcaggttaagttttcaggggtaaaatatgcttataaataaaatagtccctaacgtaaaaga

SEQ ID NO: 325342 - DNA, 631 bp, Homo sapiens
atattctttttaattcaaaagtcttgctacacatctgtgctttacaattatttgtctaaaacaaatcgactcatcagttaatttccttaactaaagtagtacataaattagaatatcaattactaaagaataatgacatcaaagttacggatttagccattttattgactcaaaatggatcttttccttgagaaatatcaataactaaaactatgactaagacagttaataacaattaatgcataaagtcagagaccaaatcacttttagccctgttacaagcattgcctggtcactagtttgatttttgaccttgttaatatggatgtcagagggcatgagggtataccatgtcactttaaaacctaattcttcatgcctaaatggcccttcaccatacaatggatggaaagcagtaaattgtatattccaagcacttctggtagtattttttataagaraagctcatagatttttctgggtttttttgttttgttttgcattggttttgcttttatcaaatctttgatttaaactatgttagattatgctgaaagaaaagcaacagtatcaggttaagttttcaggggtaaaatatgcttataaataaaatagtccctaacgtaaaaga

SEQ ID NO: 325343 - DNA, 501 bp, Homo sapiens
atcagaaaaaaaaataagaagtgataaattcagcaacctcttttgctgcacattgagcaccttttcagtaaaagctgtggaattacatgtttttgttctagaagtatcacgtgtgggagggtagagctagagaagaagtcagagcataataagtatctcagaaatttaaaatactaggcactttatatgtattatctaatgtaaccttcccaaaagttctatgaagtaaatatcattatttattattccgattttatggaagaagaaactgaggcaaagaagttccagtgatcagatcaggtggcacagttagtaactagcagagcacaatttaagcccaaatctgtctaataccaaagtcaaagcttccaatgtattaactaccctacctttcaagaaamtgcacagggtcacgacttttctataaactggcgctttattgtcctagcacagctctgactaaaatttgtgtctagggtatcaatatttctgtgaaaccta

SEQ ID NO: 325344 - DNA, 644 bp, Homo sapiens
tatccttatacacatatgaacagtaacatctgttttcttctagtactactgctttatacatgaattctcctagactctgcgctagtatyccatagtaacttactattttgccattctctatgcagttgtaagtatgtgactctaagtatatctgcacctgtctatatgaggcatgacctttacacaatgattttctttatcctgctgtaaaccttagacttggtagttggctttgtgtcaagtaacatgatttcaggagttctctaaaatgcttacctatactccctttttattaattcaggttctaaataatgcttctcactttaatcttctcattttatcttgcaaattgatagaatgataaataagaggtaaagtataaaaatatttcatgaaaatttcaataaagtgaattcatactggtgtattaaagagtgagagctgattcattccagtgatgattgataagtgagggagtagaatgtgatcataggcttgccatcagtgctataatttgtttattactgagcccttactatgtgtacaagctttttacatatacttagttccaggatcacaaagaggtagattctgcttatatctctattttatgtatttccaaaatcacatatccagtaaatgaa

SEQ ID NO: 325345 - DNA, 316 bp, Homo sapiens
agaagcaaaatgaaaactcacgtctatcattttgagactatgttgcagaatgaatatcaactcatctaattctcattattagagaaaaacagtgcaaggggattagagagttagtgttactagcaatgtcaggttgcatgtcagatgtattgattttcagtccattttttgtttcttttactgacagaagaatccttcttgaaagtaagtaacttcatgaacaccaagctagtgmcttgagaagcttatttactcttcctgacctgattagaacagtagtatctgagtgagaacatagtttaaatgcagcaattct

SEQ ID NO: 325346 - DNA, 473 bp, Homo sapiens
actaatcctttgactgctttacatgttgtaatactgtagtcacttgtatttttgccttgctcataataaactttgatatttaaaattgtttcattttgatataataaaatgtattattgtttcccataaggtatataatttcaaaatcttatttaagaaattcttttccacctgacttcttataaattgtctgctttaatagatttaaagttttttatttatgtttgtattttagttcagtgggattttatttttgtggtatttggtaagaaaactatttttcaaaaatattctatattgagaaaaaattgttgctaattattcactagttcattctaatttttattsatttgccattccaaaactgtcatttatgtatgagcctggttctcaactctatcccatttcactgatatttgctctttgctttttcctttttaaatttctattgaaacatatttcccaagtatcca

SEQ ID NO: 325347 - DNA, 558 bp, Homo sapiens
atggagacaaggaatgtctttgcagtttatctcatctggtttcaacttcctgtattagagctacagagactgcaggtcttggagagtcagacacacctkggaagacaaacctcaagctgctacttactggttgagtgatcccaagcatattagctaacaaaagatgtagttttctcactcataaattgtacatgaacacctccctcatggagttgttttaaaatttatgtgagatagggattctgaaactagagttagtgaaaccatcctacacaaacaagcactcaatgaatttcaggtaaataatagtaggtattatatgttacctactgttaggttaattatagaaatgaggaaattgagagccactgaaaacatgtgagagactgttaaccgcggaaccagagcaaaatctcagctccttaaatggggtatagtcctctttgcagtatatggaaataatatgtttctgagtgtgggtgtgaatgtgtgtgtgtgtgtgtgtgtgtgtgtgtaattcaaatgatgtgggactggtgctattcttactaagtcaag

SEQ ID NO: 325348 - DNA, 639 bp, Homo sapiens
atgctatgctatgtgaaataatccagttaccattctctcatgtctttctccctctcctcaggtctcctttccctgagatacaaaaatattaaaattaagataattaataactttacagtgacctctaagtattcaagcgaaaagaaaagtcatttagcttttaagtcaaaagctagaaataattaagtttagtgaggaaggcatgtcaaaagctgagacagcccaaaaagtaggcctcctacactaaacagtcaagtggcgaatgcaagggaaaagttattgaaggaaatttaaaaggctactccagtgtacacattaatgataagaaagaaaatcagtcttattgctcatgtggagaacgttttagtggtctggatagaagaggaaaccagccacaacattcccttaatccaaagcctaatccagagcaaggccctaattatgtgaaagctgagagaggtgcagaagctgcagaagaaaaatgggaagttagcagaggttggttcatgaggtttgaggaaagaaaccatctccataacawaacagtgcaaggtaaagtagcaagtactgatatggaagactgtagcaggttatccagaagacttagctatgataattgatgaagtaggctacactata

SEQ ID NO: 325349 - DNA, 455 bp, Homo sapiens
cttctattttctggaagaaatcgtgaagaatttgtgtaattcctttcttaaatgtttgatataattaaaaatttttattgtcttcctattttttttttttttttttagatgaagtcttactctatcacccaggctggagtgcagtggcttgatcttggttcactgcaacatccacctcccaagttcaagcaattctcatgcctcagcttcccaactagctgggattccmggcgtgtgccaccatgcctggctaatttttgtatttttagtagagatggggtttcaccatgtttgccaggctagtcttgaaccccttacctcaagcgatccaccttcctttggcctcccgaactgttgggattacagatgtgatccagcatgcccagacaaaaacgttattttcatatacttacttcttttcgtcccaatccttcatttgtggaatcatttttatt

SEQ ID NO: 325350 - DNA, 449 bp, Homo sapiens
aagttactctttagcatctctacagttttagttattattttatttcaaatactttgttttatatgtaacttttattcttttctgatttgtttctgtgtctgcctgtcgttctttcatagcatcttctttttatggatttcatttttgccctcttgaaacgtatttattttaaaaaatkccttgtgaattgtactgtggtctggttctttgtaaattccctagtttattgattctgtggacactattttatggaattaataggtattttttctcatatgtattctggggaattcttcactttctcttcaggtgacactataggtttcatcagacctgaatcaacacttagatttatttctcagttcagtagttttgtaactaaagggtgggatcagttcagacccccacagtaatcaatacatgtgcttgtgattcttatagtatgggta

SEQ ID NO: 325351 - DNA, 449 bp, Homo sapiens
aagttactctttagcatctctacagttttagttattattttatttcaaatactttgttttatatgtaacttttattcttttctgatttgtttctgtgtctgcctgtcgttctttcatagcatcttctttttatggatttcatttttgccctcttgaaacgtatttattttaaaaaattccttgtgaattgtactgtggtctggttctttgtaaattccctagtttattgattctgtggacactattttatggaattaataggtattttttctcatatgtattctggggaattcttcactttctcttcaggtgacactataggtttcatcagamctgaatcaacacttagatttatttctcagttcagtagttttgtaactaaagggtgggatcagttcagacccccacagtaatcaatacatgtgcttgtgattcttatagtatgggta

SEQ ID NO: 325352 - DNA, 621 bp, Homo sapiens
gggtaaaatagtgtatgttcaaaatgtgactaatataagacttatgatagaaactgataataaaaatattgtttatatagaatctttgtagtgatacagtttttctgtcctaatgcccttccaggtacaattttcaaaccacgcctctcttaggtgaaacagcttgtcagtgggtatactcctctgtgtccccacccttgtcagtgcccatcttgagtccctcaagaccaatagcttatcatttcattaggggatataactctcgggatgatacagtactaccaatagtataaaataytaatctatgtgtgcttatatactttaaatgtacatttatatctccagtttaagaaaatgatgccaacccaccagtgttcaagagaatattgtatcattaatatgattgtttttgatatgtgacttacttacattgtttgcataaattatggaaatttatacaatagccccaagaatcaaacacaaatctaacaagaagaaaagtgttgacaggctaatttttcagcattttcttgagtttgtattgtgaaaacaatattttcactcttagcactaagagcgaagtttagaaatggtcccaaagcccaaaaggcctcaataaaa

SEQ ID NO: 325353 - DNA, 592 bp, Homo sapiens
tcctttccaagctactcaattcagttcctgccaagatttccccagtgtcaattgcaatgtcaattgtaatgttactgttttccaaagagtgcttgaagattaagagtattttccaaaggaagatattagatctaaagattgaaggttttgtgtttgtttgaatcaactatcttatttttgagctttacaccacrattttagaaaatacactggcatgtcagctgtggtaccctctgggtgacaggattatagggataattttaatctttaatttttattttttgagatggagtcctattcactctatcaacaatgctggagtgcagaggtgagagaggtgagatctcggctcactgcaactcccactacagggtgcaagcgatttttctgcctcagactcccaaagtgctgggattataggtgtgagtcaccatgcacagccaattttaatctttttatgcttggtcaatttctaaaattatttgcattatgcttatttttatataattatgtcattaaaataagacatataagtagttaaaacttaagatagtgctaaatggcatacaattaaaaataccagttcctgctc

SEQ ID NO: 325354 - DNA, 561 bp, Homo sapiens
aaggctttgggtttacaccctctgaagctgtggcctgagctgtacattggccccttttaaccacagctgggatacagggcacaagttctgagactgtacaaagcagcagggccctgggcctggcccacgtttttccctgctaggcttctgggtctgtggtctgtgwtgggaggggctgccatgaagccctctgacatgccatagagacattttccccattgccttggtgattaacatttggctcctggttacttatgcaaatttctgtagctggcttgaatttctcctcagaaaatgagtttttcctttctatcatattgtcaggcagcaaagtttccaaacttttatgctctgctttgcttttaaacataagttccaattccaaaccatttctttatgaatgcatacaactgaatgctttaatgagcacccaagtcacttcttgaatactttgctgcttagaaatttcttctgccacatactgtaaattatgtctcacaagttctaagttccactaatctctagagcaggaaaaaaatgccactagtctctaaagcatag

SEQ ID NO: 325355 - DNA, 561 bp, Homo sapiens
aaggctttgggtttacaccctctgaagctgtggcctgagctgtacattggccccttttaaccacagctgggatacagggcacaagttctgagactgtacaaagcagcagggccctgggcctggcccacgtttttccctgctaggcttctgggtctgtggtctgtgttgggaggggctgccatgaagccctctgacatgccatagagacattttccccattgccttggtgattaacatttggctcctggttacttatgcaaatttctgtagctggcttgaatttctcctcagaaaatgagtttttcctttctatcatattgtcaggcagcaaagtttccaaacttttatgctctgctttgcttttaaacataagttccaattccaaaccatttctttatgaatgcatacaactgaatgctttwatgagcacccaagtcacttcttgaatactttgctgcttagaaatttcttctgccacatactgtaaattatgtctcacaagttctaagttccactaatctctagagcaggaaaaaaatgccactagtctctaaagcatag

SEQ ID NO: 325356 - DNA, 604 bp, Homo sapiens
caagcctcatcatactctcctcctttggagttcaaaccagcactaatattaatatggagatcctaagactgacaggacagactctttgtagcagtaagttaccaactccaacctgactctggtataacatcacatgaaagataaggggccctgaaaggaaatcaacgtatttttaccccaaaatgtatttctctggacatagtttgaagtggccctgcaaagctgtctcttatgaaaacagtttgtattctgtggagaatcaccttccctcactaggtctctccagagagtctgacacctttgataagagacattcacatcttttctctctgaagccagctacctgaaggcttcatctayaagacaaaagccttggcttccacaaccctcctcttactgtaactcaagctgatttcaactcttcaggcagagcttaaacctttcaaccaactgccagtcacgaatgtttaaatccacctatgaccagtaagccccgccttcgagatatcccactttttcaagtcaaacaaatgtatacctgacatgtatcaatttatgtctttggctgtaatgtttgtctctctaaaatgtataaatccaagct

SEQ ID NO: 325357 - DNA, 485 bp, Homo sapiens
ggaagcagttactctctctctstgtgtgtgtgtgtgtgtgtgtgtgtgtgtgtgtgtgtgtgtgagagagatgggatgaattgctggggagaatgagaactgaattctatgtgaagggagtatcctctggatagtatacatgatactgagcataaagccattaaactataatacaggctcttatcattagcacatttaaaggtgttcacaggaaatatcacagtgctatgcaatagggagtcgacttttatagttgagattctctgctggaacaccacttccctccagcgtgactttaactcccaccccatccagtcactgaaaccgctgagggcgtatagcctccagtgatcccatagagaaaatagaaacacaaatagaagctgtgcttagattagagacagaaggctactatggttttatcagccattatagaaagtgtacattaatgactaagtatttatatgtcgtaagctaagtatgtg

SEQ ID NO: 325358 - DNA, 477 bp, Homo sapiens
aaacttcttaaaagatacttttattaaaataaatttatcctttcacaacagggtaatgacccaaatcctcatcttactccttacagccctgtaaggagtactccttactgccctgtaaggagtactccttactcctaccgaaaacttgtctctgccaagtaagtgtatcttttatcacacagcagactttgctctttctaaccttccagaattctttttggaaccccacaatttmttttccttttggcctatccaaaaaaagttaccattaaaaaaactgttcattgcagctcctatttaaatcattctcttaaaatacaaactagaagtaatctttatagcaacaagtgcctgtaatgggagcacaaatagattttaatccacttgccaactcctatcaactggtgatggtagaggagggtgcagagctgaggattctgatgttctgaacaggctcatcgggaaagtgtatgatgc

SEQ ID NO: 325359 - DNA, 583 bp, Homo sapiens
tatatttttatttttacaaaaattaaaaatgcaaaacccaacattgtttctatagtatatcacatttcatataacaaagaaagagctatgagaaaatgtatatgcattaactcattyatgcaaaataaacacataaaggaagaaccagaaatgaatgagatttgttgcatccaagggttgttggaaagactatggaaagattagagaagggtaatggggtattaggaaggagtgctactattgtgagtattcccttttgtatagctttgactcctaggactacagcaatatcttatatacattctagatatatacatacatacatacataaaatatacaaggatactgagagagcataaaatggaataagcacaataggtttgaaatcaactctgttataaatggataacaaaaccctgctaaagggagtggttaagaaaagtacgaatctcagtaattttggaagagtatcttggctagataatgtgaggctaaaaacaaaagaaattgtacacaaatatcgtactccagacagtaaatttgtttttcacaggagtattggttagtgattctgaacatactt

SEQ ID NO: 325360 - DNA, 589 bp, Homo sapiens
cgtgtgtgtgtgtgtgtgtytttgccacatagagtcgggtattaattcactatagtaattttttcttaaagttttagttattgtagttttcaaatctgaaatttttaccaggtcatttataaaataattatcacagtaactaatgctctagttattgagctattttcatcacattttctttaattcctaaaaatggttttgtttagttatttttcccccaatatatttaaagtagcttgcttagatttttttttcctaagcccaatatttatgccatctctgtgacagtttttgttacatggttttgatttgcttttttttaatagtaggaaaaaattttactgtttctttccttgtctcataatttttcattggaacctgaaccttttcataaaatagttctactttgtggattcagatcttttgtccctcaaggattgttgttgaatttttgaattcatcttttgtttctataatgacttgtgtgtactaaatctatagattctgttccccatggcatgtggctgctgatgtttctgctcaattgaaagtgtgtgtgtgtgtgtgtgtaatcttgtatcacttaaca

SEQ ID NO: 325361 - DNA, 334 bp, Homo sapiens
atatggaagctcaccaaggaccccatatctgtctcatttcttggatgtccctgatagatgcctgagggttctgccattctgtttgcctgaatccatgccacatcttcattcttgctgagtcacttttcttctgtagattcatcatcaatgttgctcttgttactgatagtgctgcttgagcatggtgtcttacgttgttctacttcatatcaggtcaggctcctctggcaaagactttcagtttttttctcctctggtagaactatcactgtgactcagctgtggtgggggaagggcgaakccccaagtaaggatgccacaggctcccaccctt

SEQ ID NO: 325362 - DNA, 578 bp, Homo sapiens
ctcatatcttcatgtattagctttgtaacattggagtgattactttctgaactctctgaacatgtgctgattcatctataagtcattataggcatcatataggttgaataagagaatctaatcaaacaccatagtgactactccaaaaactatctctccattttgtttagtttgggccatgtatctattaaacaggtaacaaaattacgcacttagtaatgaatagggagaatgacgatgagtagaacattgcattagaaagaaagtctgccacatgtagggatctttagcyttgaaaactgagtagatgtatccattttattctagaaaatgacataattgctaatgatattatggtataaaatatgaagcttttagcaggtaataataatgataaaactttcaaacaactgtcactatctgactcattttcatttgcagattgaagaggttttattaggtatgcgatgaaagagatttctgcctgttggatgggattggctaagcaccactaagtaataattattataataatggtagctaagcaccagggcaaatatattttgtttaactttgta

SEQ ID NO: 325363 - DNA, 568 bp, Homo sapiens
tttttcccttcctaacgttgaagacagtagattaatagggaactcygactactgttctcataccaggcatgggaaagtcctgcacacacataaatatttaatattacagcacataaaataaaattctgtactatactctcagcctccattaaactaaattagggagtaatctaaaaatggtccttgggactttttctatgattgattcctctagcccagcatacctgtgaatgtctgattgtcaaagagagaaataacaaatctagaggcagttacaatttaaaaaatcaaggccacagtaacaagaaaatctgctgagtaatttcaaaataccttacaagcattccaatttcatgggctgcttgttgatattacctgttctaaaagagaatttatgtaaagatccatatggatattgatctctatatgaggaagatagccagataaatttaaaatagcttgcaaaacaatctcttgagctctaagttgtttatgagtcattttgcagtaaaagtgaagtcatttatcatgactcagaattgatggtttctgaggcccgatgatgagt

SEQ ID NO: 325364 - DNA, 568 bp, Homo sapiens
tttttcccttcctaacgttgaagacagtagattaatagggaactccgactactgttctcataccaggcatgggaaagtcctgcacacacataaatatttaatattacagcacataaaataaaattctgtactatactctcagcctccattaaactaaattagggagtaatctaaaaatggtccttgggactttttctatgattgattcctctagcccagcatacctgtgaatgtctgattgtcaaagagagaaataacaaatctagaggcagttacaatttaaaaaatcaaggccacagtaacaagaaaatctgctgagtaatttcaaaataccttayaagcattccaatttcatgggctgcttgttgatattacctgttctaaaagagaatttatgtaaagatccatatggatattgatctctatatgaggaagatagccagataaatttaaaatagcttgcaaaacaatctcttgagctctaagttgtttatgagtcattttgcagtaaaagtgaagtcatttatcatgactcagaattgatggtttctgaggcccgatgatgagt

SEQ ID NO: 325365 - DNA, 602 bp, Homo sapiens
ggaaacctgaaatttttgactgctcaagacatgaaaggaaatcttttctcctttctctcctgcctaaatgtgacttttgaggaaaacatggaactccctagattcagcagagccaaatttgraagtctagacaaactaaatccgcttgcttcttagatgtacaaacagatttagagacaatagtagctgaggtgaaattagaacttagaactcctgactgctactttatccagtcactgctcaacatacccagagttactgaaagcttatatgttttgttttcattgtagaaaaagagcttagttaccttgtctatctgacagtctatagaaaacattaagccttctctgcaatcttactgacataactttcaaaactatatttatgagatgaatctagaaaggtattttttaatacaatgatgcagaatgataattgaacaaacttctcttttatttccagagataagagacactaccagaagctattcactcatttggtaatatcaaggactttccttgccactcattctctgaatctgagacagacataaatacacttattaatgttttaatttcaattacacctcaaacaataatgca

SEQ ID NO: 325366 - DNA, 571 bp, Homo sapiens
tatcattattaaattggtgtttctatgggagaacaatgtctcagacttcctattctgccatcttgctgacatcactcctctgtatatatctttttaattattgagttttagatctctttccttctatattcaatgaaaaaaaattcttttttctattcttttcttgatatccttgcaaatttagcatatatacccaacaaatgtaagtaatggtttatctttgtttttcagcttttattgtctggctttttgacatttgtattcatctcttgttagctttcatgtgaatgtaaaatgtttgatatatttatccgggatgtctaggtttttgtgatacaatatttttcaggatttttagtcagctgtatttccagaaacagaccaccaaatacctttagaaaggattaactttataaagatacttcttacaatttcagtgcatttcaaatttgattaccawcaggacagatttaatatctttctgtattgttttctgtgtattagtgaacagaggttataaaataatgaaacaaaggagaaattgatgggaagattgctaactcgattttta

SEQ ID NO: 325367 - DNA, 571 bp, Homo sapiens
tatcattattaaattggtgtttctatgggagaacaatgtctcagacttcctattctgccatcttgctgacatcactcctctgtatatatctttttaattattgagttttagatctctttccttctatattcaatgaaaaaaaattcttttttctattcttttcttgatatccttgcaaatttagcatatatacccaacaaatgtaagtaatggtttatctttgtttttcagcttttattgtctggctttttgacatttgtattcatctcttgttagctttcatgtgaatgtaaaatgtttgatatatttatccgggatgtctaggtttttgtgatacaatatttttcaggatttttagtcagctgtatttccagaaacagaccaccaaatacctttagaaaggattaactttataaagatacttcttacaatttcagtgcatttcaaatttgattaccatmaggacagatttaatatctttctgtattgttttctgtgtattagtgaacagaggttataaaataatgaaacaaaggagaaattgatgggaagattgctaactcgattttta

SEQ ID NO: 325368 - DNA, 597 bp, Homo sapiens
tttgataaagaaacaaatctagtattacaacactcacatgcaycccagtacataacattttggtaagacgaagtaccaaaggtaggttagagttagtttccaaaggtaggttaaagttaaagtttttttttgcaaaaacactgatggtctatatcatgtaagtactccagataatgacccatgtccctccaggatctttctccaccattagagtggtagtatatatagaactattttgtctcctaatatggacatctggatacaaacagtggctacttttcattgccagctgtttatggatctgctaatgtgatgctgtctattaaatgtctctgcttcacttctcactatctttacctgctcattcaataacatctgtcaaagcagacaaacagatggcaggagctgcatgtactagcacatgctcagtctgctgtaggacattttttcatcatattttccagtagcctactgtccaatgagagccagcactgccagtgtagatcaaggaacaacaaatgtataaatagttctggaggagggaaaaaactaggaagggcttgggaattgttcttaaataaatgtagtgaaagagag

SEQ ID NO: 325369 - DNA, 542 bp, Homo sapiens
  misc_feature (1)...(542): n = A,T,C or G
aggcaacatagtgtgacccctatctcctaaaataaaaggaaaaaatrtataaatagggttcttagtgagcaaaaaatggtcagttatcagtgctgacttgagtaccaggaggtgtttcacaaaggaggttgcatttggactatatcataaaggatgagtaagatcaatagggaagaatggaatccaggtgtgtagatttgagtgncagaaatatactacttgaatgaagacagagatgtaattaggttgtatggtttttatgacttcatctttggaagttagataaacaatgaaattcattttctcatctctctttccctgacttgccagatgttaggatttctcccatctttagctattgttcagctcctcagtttgagagctgcaatgtcagtcttactgtctgctctttgtgtaacaggtctcatatgaaatgcattcacagtcctttttctagtacttatttttgatgcagggaacaggtggaagaagccaaagtcatttctctttatgtaccattcaaaatgtaggggagggaggtg

SEQ ID NO: 325370 - DNA, 534 bp, Homo sapiens
ataccttaataatgcacaatacgaattatttttaaaaattaattttaaaaagaaaattccagcaaggagttttgtaaaaatagacaagccttatagtaaaatttatatggaaaggcacaggccctgggatagctaaaagaatcttgaagaaaagaataaagggggaggaatcattctatccaacttaaggcttaccacatagctacagtaatcaagacagtgtggtattggcaaaaggataggcacatagatcaaaggaataagacagagaactaagaaataggactattgtctagaatatgtaactaactctcaaaacttaatagtaaaaaacaaataatacaattagaaaatgggtaaaagacagacatttcactgaatgaaatatacaagtggcaaagaaatatatgaaaatatgttcaactttattaaccattagagaaatgcaaattaaaaccaccaagagatatcactacaccatattaaaatggctaaaamaaaaaaaaaacaaaaaactgttgacaacaccaaatg

SEQ ID NO: 325371 - DNA, 619 bp, Homo sapiens
cactgtccctctccagctctagctctctccttataaagcgtcaagattatgtcaattggtcagagccagtcagggattttgtgtgagtgccgaaggaactgcaggagccagagaagaataaaactgtgtagagtcagcctggcttccagcttgttctaactggccctgagtctttggatgcagcctgcagaggctgcaagtgagattccttaacagtgttctagaagcagctgatggagatagggtggccaactagatgcagccaagaatarcttcttccattgagatacaagaccataaagaaaattgacacactccaagcagattttaggaaggaatgcattgagacaggacagaaggtggatgtggaccctggactgaagggtgaggaagctgagaaccctgtatggggttgctgagcaccaggactcaatcctggtcccaagcgactcctggggaaggagtgagttaaataggcatggagtggcccactcttgccatgctccatcagaatcctagctgcaggaaaccccatgacaccatgaacatttgagtcagcaggaagagctgctcggagagatgtcagggacaggactccagcctccacagaatccacagg

SEQ ID NO: 325372 - DNA, 625 bp, Homo sapiens
aaaagtcctggaccagatggattcacagctgaattctaccagatgcataaataagagttggtatgaatcctactgaagctattccaaaacatcaaggaggagggactccttgctaactcattttatgaggccagcatcattccaataacaaaacctggcagagacacaatcaaaaaagaaagcttcagggtaatatccctaatgaatgtagataaaaaagtccttaacaaaaatattaacaaactgaatccagcagcacatcaaaaaagctagtccaccatgatcaagtagactttattcctgggatgcaaagttggttcaacatatgcaaatcaataatgtgattcatcaaataaatagaactaaaaatagaagccacatgatcatctcaacagatgcagaaaaggctttcaataagattcaacatccaaaactatcaatagactagacatcagtggaacacagctcaaattaatataagccatctatgacaaactcacagccatcatactgaacaggtatataaaagctggaaacattccccttgagaaccggaacaasacaaggatgcctactgtcaccactgctattgaacatagttctgcctagccacagcaagcaggca

SEQ ID NO: 325373 - DNA, 580 bp, Homo sapiens
aaaaaacacagcctaagccaccaaggaactcacagacaccactgatgctgattacagatgacaaatcacatggagactacactactgcgcacactcagaattaaagccaaaacaccctacccaaccaatagataccccataaatacatctatagaaaaaaattgttacaaaagccaatccctaaaattggaaggagcaacagctatactagacatgcagatatcaatgtaaggacaaacaaaaaaaaacataaaaaagcaaggagacaacatgttcaaagaaacacaataattctccaacaacagaataataaaaaataraatgtccaataacgaattcaaaataagatatttaaaaagctcagtgagatagaagagagcacagataatgcaaagaagtcagaataacaagggatcatctgtttaagcctattaacagagatagatttgttaaaatgcaaaaaccctgactttaaagaattcaattaatagcagtcgtgaatggaagtttcctcatgatttgatgctctgtttgtctattaatggcatgtaggaatgcttgtgatttttgcacattgatt

SEQ ID NO: 325374 - DNA, 580 bp, Homo sapiens
aaaaaacacagcctaagccaccaaggaactcacagacaccactgatgctgattacagatgacaaatcacatggagactacactactgcgcacactcagaattaaagccaaaacaccctacccaaccaatagataccccataaatacatctatagaaaaaaattgttacaaaagccaatccctaaaattggaaggagcaacagctatactagacatgcagatatcaatgtaaggacaaacaaaaaaaaacataaaaaagcaaggagacaacatgttcaaagaaacacaataattctccaacaacagaataataaaaaatagaatgtccaawaacgaattcaaaataagatatttaaaaagctcagtgagatagaagagagcacagataatgcaaagaagtcagaataacaagggatcatctgtttaagcctattaacagagatagatttgttaaaatgcaaaaaccctgactttaaagaattcaattaatagcagtcgtgaatggaagtttcctcatgatttgatgctctgtttgtctattaatggcatgtaggaatgcttgtgatttttgcacattgatt

SEQ ID NO: 325375 - DNA, 636 bp, Homo sapiens
atacctcagcatgtgactacatttagatataaggtctttaaagaattaattaaggtaaaatgagatcattatggcaagccgtaatccaatatgactggtgcccttataataagaggaaattaggacaaagacagaaaaaaactaaggagtgargatgcacaggcacagggagaagactgacatccacagcgcagggagagaggtctcagaagaaatcaacaattctggtctccaaaactgtgagacaacaaatttctgttgtttaagccatccagtctgtgcataactttgttatggcagtcctagcgaactaatgcaaggagattatgatttatcctaaatttaggattaaatggataatggcacaatctgcaatgtagaaggtagattttctctcattccttttcttactcagttttcctgctcttgaaatctcaggaacagaaaacctgcagatatcttgttcagattccaatgccaagttttcttcatctttttaaggtcacaacttttttttccttataatgtttcttaaattaaaacctatccatttcaagccgcccttggatctttctgtcctcacaacattagtgtttgcctgtgtgagattgccagtgaaattgatgcatgtttctt

SEQ ID NO: 325376 - DNA, 636 bp, Homo sapiens
atacctcagcatgtgactacatttagatataaggtctttaaagaattaattaaggtaaaatgagatcattatggcaagccgtaatccaatatgactggtgcccttataataagaggaaattaggacaaagacagaaaaaaactaaggagtgaagaygcacaggcacagggagaagactgacatccacagcgcagggagagaggtctcagaagaaatcaacaattctggtctccaaaactgtgagacaacaaatttctgttgtttaagccatccagtctgtgcataactttgttatggcagtcctagcgaactaatgcaaggagattatgatttatcctaaatttaggattaaatggataatggcacaatctgcaatgtagaaggtagattttctctcattccttttcttactcagttttcctgctcttgaaatctcaggaacagaaaacctgcagatatcttgttcagattccaatgccaagttttcttcatctttttaaggtcacaacttttttttccttataatgtttcttaaattaaaacctatccatttcaagccgcccttggatctttctgtcctcacaacattagtgtttgcctgtgtgagattgccagtgaaattgatgcatgtttctt

SEQ ID NO: 325377 - DNA, 636 bp, Homo sapiens
atacctcagcatgtgactacatttagatataaggtctttaaagaattaattaaggtaaaatgagatcattatggcaagccgtaatccaatatgactggtgcccttataataagaggaaattaggacaaagacagaaaaaaactaaggagtgaagatgcacaggcacagggagaagactgwcatccacagcgcagggagagaggtctcagaagaaatcaacaattctggtctccaaaactgtgagacaacaaatttctgttgtttaagccatccagtctgtgcataactttgttatggcagtcctagcgaactaatgcaaggagattatgatttatcctaaatttaggattaaatggataatggcacaatctgcaatgtagaaggtagattttctctcattccttttcttactcagttttcctgctcttgaaatctcaggaacagaaaacctgcagatatcttgttcagattccaatgccaagttttcttcatctttttaaggtcacaacttttttttccttataatgtttcttaaattaaaacctatccatttcaagccgcccttggatctttctgtcctcacaacattagtgtttgcctgtgtgagattgccagtgaaattgatgcatgtttctt

SEQ ID NO: 325378 - DNA, 602 bp, Homo sapiens
tgtgactacatttagatataaggtctttaaagaattaattaaggtaaaatgagatcattatggcaagccgtaatccaatatgactggtgcccttataataagaggaaattaggacaaagacagaaaaaaactaaggagtgaagatgcacaggcacagggagaagactgacatccacagcgcagggagagaggtctcagaagaaatcaacaattctggtctccaaaactgtgagacaacaaatttctgttgtttaagccatccagtctgtgcataactttgttatggcagtcctagcgaactaatgcaaggagattatgatttatcctaaatttaggattaaatggataatggcacaatctgcaatgtagaaggtagattttctctcattccttttcttactcagttttcctgctcttgaaatctcaggaacagaaaacytgcagatatcttgttcagattccaatgccaagttttcttcatctttttaaggtcacaacttttttttccttataatgtttcttaaattaaaacctatccatttcaagccgcccttggatctttctgtcctcacaacattagtgtttgcctgtgtgagattgcc

SEQ ID NO: 325379 - DNA, 505 bp, Homo sapiens
  misc_feature (1)...(505): n = A,T,C or G
tttaattccacaccaaagtcaatttacacttcattaaaaacttaaatgtaaaggaaaaatggcaaaagtcttatgtaaaacatatttttataatcgttcataaagaataatttnttacataaaccataaaaaattataacaaaaaagattaatatattggatcatattaagttttttaaatgttacagaacaaaagacagcataaacaccataaaaagtcatacctcacatctggcatgtaaccaaaggttgaatctaatatattaaaaaaaawatatatatatatatataaatcaattaaagacaaatatcacaatagaaaaatagaaactatagaaaacttatagagaataaaatataaatggccaaaaaagaaaacaaaaacatcaaaacatgcttattctcactaaaaattgtcaatatccaaatttgaaataaataagatttcatctctcactgctatagtcaaaaaattaaaatgctaatattttaaccaaatattttg

SEQ ID NO: 325380 - DNA, 601 bp, Homo sapiens
cagcaagcttctctgacagattgaatgtgagatacaaacgaaaaaagaagagctaatggtgttgccaagtttgtaatcagctacaagaatgaagtttccacttactgagatrggaagacttaagggaggcaggcttgttgagggaggggatggatgaagaaacaaatgctcttaaaaattgttctgagtcaacatatctacggttaagaacagtttgatgaaaacgggttggagttagttaaagaaaattattcttggcatatgttaaagttctcaagaaagcattcttggaaaaaaacatgtttaaactgaggtctaagggataaacaggagttgtgaaactgaagggtggggatggagaaagggttctatggaaaagcctagtaaagacccaggaacaggataaaccacagcacatcaaagtgcgatctgctgtagcacttgctttgaataggtgaatctgttccaaagcaattgattaaattagaggtaatttgagtattggacgaaggcctcaaagaagagattcagaattcggtgcttcaatccagagtctcattcaagaagaaaaaactttttgggaaactcccaagctttctta

SEQ ID NO: 325381 - DNA, 543 bp, Homo sapiens
ctgccctttctgacaccctgtcgagaagaacacacttcccattcatagatactgcttcatgtcattctcctcctcatcagcctcttgcatgagttctgattagctaaacctaygtcacatttacatatcttcacagtaaaggagtctgaggaagccagaggtggttgttgtttatttggcaatagtttctcccctgaatgtgaaaaactatcaaaatatgaagcagattttgaaagactccataagccaagaagaaaagatgcaatgatgaaaggtatctaccatgcccattttcacgtttacttcatacatgggcttcagaatgactagactatatttcaagaaatctgaattgtggatgctctatgattattgtattttcttatgcaaatttccatttctgaatccactggccatgttagccatcatacctcctccctgatccttgacaaaccctaaaagccgtttctattcaccatgcttcaacctatcacatcaagatcaaatgtatagtttactgtgcaccaaagtgataaaaataag

SEQ ID NO: 325382 - DNA, 543 bp, Homo sapiens
ctgccctttctgacaccctgtcgagaagaacacacttcccattcatagatactgcttcatgtcattctcctcctcatcagcctcttgcatgagttctgattagctaaacctacgtcacatttacatatcttcacagtaaaggagtctgaggaagccagaggtggttgttgtttatttggcaatagtttctcccctgaatgtgaaaaactatcaaaatatgaagcagattttgaaagactccataagccaagaagaaaagatgcaatgatgaaaggtatctaccatgcccattttcaygtttacttcatacatgggcttcagaatgactagactatatttcaagaaatctgaattgtggatgctctatgattattgtattttcttatgcaaatttccatttctgaatccactggccatgttagccatcatacctcctccctgatccttgacaaaccctaaaagccgtttctattcaccatgcttcaacctatcacatcaagatcaaatgtatagtttactgtgcaccaaagtgataaaaataag

SEQ ID NO: 325383 - DNA, 601 bp, Homo sapiens
cagcaagcttctctgacagattgaatgtgagatacaaacgaaaaaagaagagctaatggtgttgccaagtttgtaatcagctacaagaatgaagtttccacttactgagatgggaagacttaagggaggcaggcttgttgagggaggggatggatgaagaaacaaatgctcttaaaaattgttctgagtcaacatatctacggttaagaacagtttgatgaaaacgggttggagttagttaaagaaaattattcttggcatatgttaaagttctcaagaaagcattcttggaaaaaaacatgtttaaactgaggtctaagggataaacaggagttgtgaaactgaagggtggggatggagaaagggttctatggaaaagcctagtaaagacccaggaacaggataaaccacagcacatcaaagtgcgatctgctgtagcacttgctttgaataggtgaatctgttccraagcaattgattaaattagaggtaatttgagtattggacgaaggcctcaaagaagagattcagaattcggtgcttcaatccagagtctcattcaagaagaaaaaactttttgggaaactcccaagctttctta

SEQ ID NO: 325384 - DNA, 636 bp, Homo sapiens
atcaataatctttaaattcctttgttttagaaaatgagggaggcactaaagaataagaactcaattatgactctgcaaacagattttttatattgcaacagtagatctgatatgtargagctttcttaccaatttccccctctgtaaaatgtacttttcttatcagaaattaaataaattaaatgttatgtgctatcattatatgcctagaccataataagtaatcaatgcatgcctgtgcagaatacttctctgagtggctttggaccatcccagttctccccgccttccttacccatggttcttcagaatagctgtggaatgtgctggtaatgcaacaccctaaggaggaactaactgaaatagcttcggccctgttcctgtccctcctagggaatgtaacatcttgagatagagggaaattgcccaggagagtctgggctttgtgcctctctcacacaggagcaagatgtccttccaagctttacctagggagtctcattacctctgaggtatgtaattgaagatggactgcttttcagaggatccagttgtggtacaagacactcaagactgtatccaccttgggaagctttcttgagctttgagcaactgcttcagagtggatcctaggct

SEQ ID NO: 325385 - DNA, 636 bp, Homo sapiens
atcaataatctttaaattcctttgttttagaaaatgagggaggcactaaagaataagaactcaattatgactctgcaaacagattttttatattgcaacagtagatctgatatgtaggagctttcttaccaatttccccctctgtaaaatgtacttttcttatcagaaattaaataaattaaatgttatgtgctatcattatatgcctagaccataataagtaatcaatgcatgcctgtgcagaatacttctctgagtggctttggaccatcccagttctccccgccttccttacccatggttctycagaatagctgtggaatgtgctggtaatgcaacaccctaaggaggaactaactgaaatagcttcggccctgttcctgtccctcctagggaatgtaacatcttgagatagagggaaattgcccaggagagtctgggctttgtgcctctctcacacaggagcaagatgtccttccaagctttacctagggagtctcattacctctgaggtatgtaattgaagatggactgcttttcagaggatccagttgtggtacaagacactcaagactgtatccaccttgggaagctttcttgagctttgagcaactgcttcagagtggatcctaggct

SEQ ID NO: 325386 - DNA, 633 bp, Homo sapiens
tttcttatcagaaattaaataaattaaatgttatgtgctatcattatatgcctagaccataataagtaatcaatgcatgcctgtgcagaatacttctctgagtggctttggaccatcccagttctccccgccttccttacccatggttcttcagaatagctgtggaatgtgctggtaatgcaacaccctaaggaggaactaactgaaatagcttcggccctgttcctgtccctcctagggaatgtaacatcttgagatagagggaaattgcccaggagagtctgggctttgtgcctctctcacacaggagcaagatgtccttccaagctttacctagggagtctcattacctctgaggtatgtaattgaagatggactgcttttcagaggatccagttktggtacaagacactcaagactgtatccaccttgggaagctttcttgagctttgagcaactgcttcagagtggatcctaggcttcttctgtccctgtatgtagtaaacgagctttgtatgacttgttgtgtgtgagtgtgttctgtttcaccaaattcagataagtagttaaccagttccagtaaacctgcttcacagtaagtactggtgtttatagtcatacacatgtatattg

SEQ ID NO: 325387 - DNA, 633 bp, Homo sapiens
tttcttatcagaaattaaataaattaaatgttatgtgctatcattatatgcctagaccataataagtaatcaatgcatgcctgtgcagaatacttctctgagtggctttggaccatcccagttctccccgccttccttacccatggttcttcagaatagctgtggaatgtgctggtaatgcaacaccctaaggaggaactaactgaaatagcttcggccctgttcctgtccctcctagggaatgtaacatcttgagatagagggaaattgcccaggagagtctgggctttgtgcctctctcacacaggagcaagatgtccttccaagctttacctagggagtctcattacctctgaggtatgtaattgaagatggactgcttttcagaggatccagttgtkgtacaagacactcaagactgtatccaccttgggaagctttcttgagctttgagcaactgcttcagagtggatcctaggcttcttctgtccctgtatgtagtaaacgagctttgtatgacttgttgtgtgtgagtgtgttctgtttcaccaaattcagataagtagttaaccagttccagtaaacctgcttcacagtaagtactggtgtttatagtcatacacatgtatattg

SEQ ID NO: 325388 - DNA, 586 bp, Homo sapiens
accaggcaaatccaatagccccaggccccaggactgttccagcaccaggccagctcctgtggcttcaggctataggttagcccctgtggacttaagacccaggtcagcctcagggactcaaaggctcaagaactgtccctacagacccaggtcccaggccttcccctgcagacccaagtgtcaggcccaccccaacaccaggctagcccacrtaactcaggctgaaagaatgcctcagcacagatctctgtggattcaggcttaaggccagctcctgtaaacatagcctcttgactaatccccacatacttgggtacatggtctatgtctatatggatgtatccagttgccaggctgactcaagcgaacctgggttctaggccagcccctgtaaccccagaattcaggtctgtactcacagacccaactaccaggcccacccacacagaaccaagctccaaaaccactccagtggaccaggctcacccctacagagccaggcaccagacttgcttcctgagtttacctgcagcaagcttgacagtagacctcaacagtcagcctatccataataatatctatatag

SEQ ID NO: 325389 - DNA, 545 bp, Homo sapiens
tacgaaattttatgtaatgtacagaacatgataaaaatatctaatttatgcattatgaaagacatagaaggagtaaagaaagataaaggtaagaaaagcatatttaaaaaaataataagctttctgaatctggagagagaaaagaacatccacatccaggaagcaaaatataaaccccaaatatatttgtacaaacagatcttcaataaaacacactataatcaaattatcagaagtaaaagtcagagacagttttgaaaatcgcaagagaaaatcaacttattacatacaaagaaacatatgtaatactattggcacatttctcagcagagaccttgaagaccaagagagatggaatgacacatttgaagttctgggaaaaaaacaaataaaaaattgccaacaagaatactacgtctggaaaakctattctttagaaatggagaaataaagacattccaggacaaacaaaaactgaggcagttcatcaccactagatctatgttacaaaacatgctgaacacaattcttctagttgaaacaaa

SEQ ID NO: 325390 - DNA, 588 bp, Homo sapiens
accaaaacttgaatattctagaagaaatggagaattttttagaagcattcaacctatcaagactaaatcaggaacaaataggaaatctgaacaggccaataatgagtaatgagattttatcagaaagcagaacctyccaagaaagaaaagcctagaatcttatagcttcattggtaaattctgtcaaacacttaaagaagaactaacaccaatacatcacaaactcttccaaaaagttgaataagtgggatcacatccaaacttattttatgagcccagcattattacagtgacatgaaaacaacacaaggacaaaacaagaaaataaaattacaggccagtattccaaataagatagatgttaaccatctcaacaaaatactaacaaactgaattgtacagcatattaaaagaatcatacactcttatcaggtgaagtgtgtggctggaatgcaaggatggtttgacataagcaaatcaataatgtgttacaccatattgatagaatgagtgataaaagcacataatcatctcaatagatacagaaaagaatcatttaacaaaattcaacaattttttataatgaaa

SEQ ID NO: 325391 - DNA, 617 bp, Homo sapiens
atgtaaattataaatgttttcctttycttcaatttttgaagatctaaaacagctatcaccttgccatccacctaatacctgaaagattaagaattaatgcaaagaaaaaaatcatcaaaccaaatgcaacttattcccagagtgctaaaggacattattttagtgattccggaataaaacttggcagaaagttattcctttgatgtgtttgcttgatttattatgaagcctatgatactaggccttaaatgtttcaaacagaattgagcatatacaaataactatcttttcaggtggaagaattctaaaatcacacaagaaaatgtaaggtaagtttgtaactattcttattttacagctgaggaaagtgaagctcataaaacataaagaactgagctaacatcatccaggtgttaaattaaaactagaacatcaattcattctcttgtatttttagcactgcattaatataccttattaagcaggtgtgatgttgaaatgttaaatcaattatgccagactatatagaccacgacgatatgggtcacaagtgttttgtcactattctatcccaaactcaaagcagtgttgagtacacaataagtcctaaataaata

SEQ ID NO: 325392 - DNA, 604 bp, Homo sapiens
ttgaagaaaattttattttatataagaaaccctaaaggaaataaagaaaaaacattagaactaatgaactaattctgtaaagttgaaatatacaaaaatcataaaaatctgtgtatctatacactaacaacaaattatccaaaagaagttaagaaaataatcccacttataattacatcaaaatatwgtaaaatacttaggaatacatttaaccaaagagctgaaagatctgtacactgaaaactataaaacatagattaaagatattgaagaaagcacacataaataaagaagtttacacactgaaagaatactgttaaaatgtccatactccctaaagtgatctacacataaaatgaaatgcccatcaaaatcttagaatctcagaccttttttttttaagaaataggaaaaagaccgacaatttttataaaatcacaaaagactccaaatagccagtgcaattatgaataagaataacaatgttggagccatgaaactcctgatttccaaatatattacaaatttatagtaatcaaaacatcgtgatgcttgtttaaaatcaacatatagaccattaaaagagaccaatagagagcccaga

SEQ ID NO: 325393 - DNA, 473 bp, Homo sapiens
aaaggtggttaacatgaaaataggagtattttaggaagagaagatttatgagtccaattcgagtctggttgatttggagtcaccaataagctatccagrtgaagatatgtaatagtgagatagaaattcagcccataagattatggaaaaataaattgatagtaatcacaatgacaaaatgaggatttctgaaaaaaattacatgagatttccaaaagcaaatgtataaaaaaagataattcgataattgtatttattaccatttactattatctgttatttatactcagaacattaatgttggtgaaagatttaaattcagggtgctgtatggataaatttgcgctgtatgtgtatgcaagtgggtttatatgagtgtgtaacatcagaaagaacattgtattcagtgtgataagtgacactgtgtggtatcagtggtttgtattttatctgaattggtttcctccaagaag

SEQ ID NO: 325394 - DNA, 473 bp, Homo sapiens
aaaggtggttaacatgaaaataggagtattttaggaagagaagatttatgagtccaattcgagtctggttgatttggagtcaccaataagctatccaggtgaagatatgtaatagtgagatagaaattcagcccataagattatggaaaaataaattgatagtaatcacaatgacaaaatgaggatttctgaaaaaaattacatgagatttccaaaagcaaatgtataaaaaaagataattcgataattgtatttattaccatttactattatctrttatttatactcagaacattaatgttggtgaaagatttaaattcagggtgctgtatggataaatttgcgctgtatgtgtatgcaagtgggtttatatgagtgtgtaacatcagaaagaacattgtattcagtgtgataagtgacactgtgtggtatcagtggtttgtattttatctgaattggtttcctccaagaag

SEQ ID NO: 325395 - DNA, 473 bp, Homo sapiens
aaaggtggttaacatgaaaataggagtattttaggaagagaagatttatgagtccaattcgagtctggttgatttggagtcaccaataagctatccaggtgaagatatgtaatagtgagatagaaattcagcccataagattatggaaaaataaattgatagtaatcacaatgacaaaatgaggatttctgaaaaaaattacatgagatttccaaaagcaaatgtataaaaaaagataattcgataattgtatttattaccatttactattatctgttatttatactcagaacattartgttggtgaaagatttaaattcagggtgctgtatggataaatttgcgctgtatgtgtatgcaagtgggtttatatgagtgtgtaacatcagaaagaacattgtattcagtgtgataagtgacactgtgtggtatcagtggtttgtattttatctgaattggtttcctccaagaag

SEQ ID NO: 325396 - DNA, 624 bp, Homo sapiens
aattctggtgatctattgaatagcatggtacctatagttaataatgtgttgtgtatttcaaaattactatagaagaatattttaaatgttctcaccacaaatacctaataaatatttgaggagatggacatgctaactaccccatttgataatttcacaatgtacacatgtatcaaaacatcacacggtactccataaatatatacaattattatttgttaataacataaaacttttgaaaagtgtttatcttaagcatttatctatgcctaggcatcatttactctggggttgtctcatgaatgcagtgctctggaaactgtccaattttcctctcttagctggaagctaacttgacctagaagacagggacaaagaatgggcgagagtgacttagtctctcgccagctcttataaaggaggaaattggagagaaatgacaaaacacacctcctcaaaaagattatgagaattrtcccattggtgcattatttcccaaagtagtatattgtgtataccttggttctacaatgtacacccttccaaaaacggctcttctctttgggtaggtctgaaacaactgattattttacttccttttgagctcttcaaaacacattagca

SEQ ID NO: 325397 - DNA, 574 bp, Homo sapiens
tacctgtggagacatgtctcgttcagtgttgcctgtgactggaaaattgagttcagataatactggggtttactgartgtaggtggatatttacaggtatgtcccccataagcccttttatccacctagcttttattagcagtaaagataaaattttttcttctatctttcatttctttgttacatctcttagtttttttaataacctaagtggagaatagaggtttgtggtacctacagatattcacattgggtggatggaccaaaaaactcaataaatgagacacagagagaaaataatgtttggagaaaaatacctgaggagtgattgtgttggtgtgtcaggtcttcggactttggtctttggtgggtgggccaaacattttgatctcgatggtggtggagacaggtgctagactaggaagatttttaaagttgtgtaattgtcttttaactgcagaatcttagccagtgatctttagcagtccataggctattttgaccttgatggatgactgaagttttagatgactttgtccaaggaagatggctgtatctttagaggcataccaga

SEQ ID NO: 325398 - DNA, 594 bp, Homo sapiens
ctgagtgtatcagcatttcacttttagggattattaaaaaatgatactcataaaascaggtattatattaatataaccatcaggaataccattccatggagaaagagctcaggtggtagttgctaaagcaacccccgccttcccacacacacctaacctatgtattgacaatctggtactcctgctagctaaagctgaaaagaataaaaagttaaaaataattaattttagactttaaattttaactcaacacaatttgagttcaaacttcaataacttcagacttacattcttgaacttaaagtgcaatgggaaataatctttcaactttaatttctgcttgagaatttcacaattagaggcagtttacatttcaatttcgcatatatctatttttggcattttactgtctgagtatcattgtgtattgtattacagaatcttaacttttcaacattttattttatgcagaattgttgataggctacattggacaatgcagctagatttaagttgggattggaaatagagtaagaaatgactttttagtgatgtgtaaagtgacagtggaattcatataattaatgtcctgtc

SEQ ID NO: 325399 - DNA, 529 bp, Homo sapiens
tctgaacaggctgggttctgaaggggatgtttttcctacctctccacttctgccattcttttgtcttatttctcaattgttcagagcttgaggaagaaaggctaatgccattcatagtgcagtctcagattccaaaattattaatcagatgagtgtaatttttagaatcaaatctaataatgctggratcaaggattattctttaaaaataacagaaaaatatttttaagacatcactttaccaaaatgagaggaaaaggaaataatcttttatattttatttgtaaattaaaattaaacaatgatgttaaagaagtacactgtagtagatctgagttgcaggcattatgcaaccttttacagacctcctgggccactcagttgatctgttagagtctcatctataaaataggaatgataatatgagactgggctgagatcagcatattggataagatagtgtttttaggtatattcaagctaaaaacctacagcttgattatgcatacattatacccattagtatcct

SEQ ID NO: 325400 - DNA, 618 bp, Homo sapiens
atggccagagcagtagaaagaaagagagaggggaggtgtcacacatttttaggccatcagaactcatgagaactcactcactatgtagtacctatataggggacggtgctaaatcattcatgagaactgtgtccctatggtccagtcacctcccacaatcccccctcctccatccatggggatcacaatttgacatgagatttgggcaggaacacagaaccaaaccatatcacatgcattcacatatcttagtattttgttctgttttaatgacaaattacccttttagaaatgaaaaacacttgagattttttttttcctcctaaaatgggtcattctacagtggatattttgtagcagaggtagcctcacctcatcctcctggaaggcaaacatgataaataccatacttgtataattgaatagaaatgccttttccatgttcaggttttaaaatcttccacctgccamcctcaatattccattaccatcaacttctgcatttcatttatcctgcagattagatttgcaaataagaattgcggattctctcttcattttaaaccaggcttttcaagtactgcattatgttccattgagccaggtttcaagatgtgg

SEQ ID NO: 325401 - DNA, 550 bp, Homo sapiens
ggtaatgggtcagaatccctcagttcccatttggaatgtatggtggatatttcaatagtgataagggtgccgacatgatataggaactatctctcccttacagaaatggagaatgggaattgacctcaggaatgaagtctaatgaggccaagatgacaaaagagctcctactgaccctctgtgtgaaatgcacaaatcaggacagtatgcagaattgcaaatgagttgaaaaaaaagccaaagaaggaattaaccatcaaaatagaaaagaatcaaagaargcaattaaaaattggtattagtagaaggaaccaaagttggagtttatgggtgaaggagaaaaaggaaatcagagcttgtggttctgaacttcatggcaggttcaggtgcctgtcccagcagcatatctgtgctgactggcttcacataaagagctagtggggaaccagccaagcagataaaataagcacattcgttcattggagaatgattcacagagttgttttcagttgttgttgttgtttttggttttggtttttttttttttttt

SEQ ID NO: 325402 - DNA, 570 bp, Homo sapiens
acaacaaaccttgaatttcttgtgaggtggcacaaattatctgtgagaatgtcacagtcattcatgcaagagaatgcatggccagaaacaaagtctgaagatactgatgaaggtacatggacatttgtggtgtcaaccagtacccttgctgtwttcttcatagcacctacttcctccctttgctctattctgaatgaatcttacatggatgagtctgagaggtgaaatgtaatactcatgtctattccctggatgctagaagagggcattttaggctaacatcatgcggacatggaattcgttatatgggtaattccctaaacataactagggtacaagaaatgatagtcattcattattttatccaaagagagaaccctatttcttagagggacctagcatttgatccaagtagaatcttatgggttagacagagtcaataagactccttcttggaggagaatgtatagatgttcaaagatactggttagaaactgtcactgagactccttttttaggggaaggggcatagatgttcaaagatagcagattattcaaagatagtggatc

SEQ ID NO: 325403 - DNA, 570 bp, Homo sapiens
acaacaaaccttgaatttcttgtgaggtggcacaaattatctgtgagaatgtcacagtcattcatgcaagagaatgcatggccagaaacaaagtctgaagatactgatgaaggtacatggacatttgtggtgtcaaccagtacccttgctgtattcttcatagcacctacttcctccctttgctctattctgaatgaatcttacatggatgagtctgagaggtgaaatgtaatactcatgtctattccctggatgctagaagagggcattttaggctaacatcatgsggacatggaattcgttatatgggtaattccctaaacataactagggtacaagaaatgatagtcattcattattttatccaaagagagaaccctatttcttagagggacctagcatttgatccaagtagaatcttatgggttagacagagtcaataagactccttcttggaggagaatgtatagatgttcaaagatactggttagaaactgtcactgagactccttttttaggggaaggggcatagatgttcaaagatagcagattattcaaagatagtggatc

SEQ ID NO: 325404 - DNA, 524 bp, Homo sapiens
atcattataaaccaggtctgggacactcattttgataaataaactatcaagtcagatatctagaaacaacaggagccagaaaaatgattactctctctctactgtcaaaaataatggtaaacaaagtgtatggtcatctggtaccaacctatattttagaatgttttagaaagtgccaacaccctggaaaatgtccagtcaytgcatgagcacccaggggcaagaaatgcattatttctaagcaggagataatattgtcttgtcccttaacttaaaaagaagcttctttatgttaaggtaaaaccacgaaatgtggtggagagaatatgcaatcgaaaaaatcacagaaatggaagtggtggtttggcttggcaatgtcctgtttgcataatctcagacatagcatgtaatgctttaaataaatatatatatatacacacacacacacacatgcacacacacacacacatatatacacatatatatttcgagatagagttttgctcttgtctcccaggctggag

SEQ ID NO: 325405 - DNA, 533 bp, Homo sapiens
tgtctgtagaataaatgtgtaaatcgcagatgcctactcaaatactggttattgtttttaaaatcagtatggaggtgttgacggggagcaggcaaaatctgtagattgtgactgccttcaggaactactgctgcataccatttgtcttattttttggctggtctgtgggagccttgagkgtggggaccacatctcaattctttcaaatgtccattgaagttagtagaacactcaacactgtgtgtgtgctgtataagaaactatataacacttcaggttaaaataacaggaataatctgctaatgaacattactcttttctcaaaaaagaggcaagcattaagctagaaggtcatttctagcttaaaacatctataaaaatgataccacagttgagagggcacattattccacccttagagacagatttcctccagatgacagggcatttggggcaatacaaagagcttaatccaccccctgaaaccctaagagtctaacttggatacatgtgggcttcagatgaatgtattt

SEQ ID NO: 325406 - DNA, 585 bp, Homo sapiens
ggcaaaatctgtagattgtgactgccttcaggaactactgctgcataccatttgtcttattttttggctggtctgtgggagccttgagtrtggggaccacatctcaattctttcaaatgtccattgaagttagtagaacactcaacactgtgtgtgtgctgtataagaaactatataacacttcaggttaaaataacaggaataatctgctaatgaacattactcttttctcaaaaaagaggcaagcattaagctagaaggtcatttctagcttaaaacatctataaaaatgataccacagttgagagggcacattattccacccttagagacagatttcctccagatgacagggcatttggggcaatacaaagagcttaatccaccccctgaaaccctaagagtctaacttggatacatgtgggcttcagatgaatgtatttaactccatttaggggtagtcttcatagatcagaagtgaaatcaatgaaacactaaataagagattaaatatgaaaattcaatcaaatttgattgcataactcaataaaatgttaaaactgagcaggtaaccaaagtaaatca

SEQ ID NO: 325407 - DNA, 533 bp, Homo sapiens
tgtctgtagaataaatgtgtaaatcgcagatgcctactcaaatactggttattgtttttaaaatcagtatggaggtgttgacggggagcaggcaaaatctgtagattgtgactgccttcaggaactactgctgcataccatttgtcttattttttggctggtctgtgggagccttgagtgtggggaccacatctcaattctttcaaatgtccattgaagttagtagaacactcaacactgtgtgtgtgctgtataagaaactatataacacttcaggttaaaataacaggaataayctgctaatgaacattactcttttctcaaaaaagaggcaagcattaagctagaaggtcatttctagcttaaaacatctataaaaatgataccacagttgagagggcacattattccacccttagagacagatttcctccagatgacagggcatttggggcaatacaaagagcttaatccaccccctgaaaccctaagagtctaacttggatacatgtgggcttcagatgaatgtattt

SEQ ID NO: 325408 - DNA, 533 bp, Homo sapiens
tgtctgtagaataaatgtgtaaatcgcagatgcctactcaaatactggttattgtttttaaaatcagtatggaggtgttgacggggagcaggcaaaatctgtagattgtgactgccttcaggaactactgctgcataccatttgtcttattttttggctggtctgtgggagccttgagtgtggggaccacatctcaattctttcaaatgtccattgaagttagtagaacactcaacactgtgtgtgtgctgtataagaaactatataacacttcaggttaaaataacaggaataatctgctaatgaacattactcttttctcaaaaaagaggcaagcattaagctagaaggtcatttctagcttaaaacatctataaaaatgataccacagttgagagggcacattattccacccttagagacagatttcctccagatgacagggcatttggggcaatacaaagagcttaatccacccyctgaaaccctaagagtctaacttggatacatgtgggcttcagatgaatgtattt

SEQ ID NO: 325409 - DNA, 523 bp, Homo sapiens
agtatggggaaaccaccctcatgattcagttatctccacatggccctgcccttgacatgtggggattmtgacaattcaaggtgagatttgggtggggacgcagccaaaccatatcaaggtgtgagccaccatggccaggcaatagacactcattgagcatttattctatggcagatattccacatatattgtctttctaaaaacaatcacacaagaaaactataaattagatatttctcttccgaaattacagcttttgcaggtggaactcagagagtctgagtgacttgaccaaggtcagatagataatagaccaggatttaaactcatgtctgacatgtcaacatttcttgctctctcacattggcaaatgggtcaaatatatcatcaattcccatccattttccaatgtccacattcatatattcattttctttctaaaatgaggagtcacagtttgatggcttataatatggaccctgaaaccagattgcctgaattgtatgatatctccaccaattaa

SEQ ID NO: 325410 - DNA, 523 bp, Homo sapiens
agtatggggaaaccaccctcatgattcagttatctccacatggccctgcccttgacatgtggggattctgacaattcaaggtgagatttgggtggggacgcagccaaacyatatcaaggtgtgagccaccatggccaggcaatagacactcattgagcatttattctatggcagatattccacatatattgtctttctaaaaacaatcacacaagaaaactataaattagatatttctcttccgaaattacagcttttgcaggtggaactcagagagtctgagtgacttgaccaaggtcagatagataatagaccaggatttaaactcatgtctgacatgtcaacatttcttgctctctcacattggcaaatgggtcaaatatatcatcaattcccatccattttccaatgtccacattcatatattcattttctttctaaaatgaggagtcacagtttgatggcttataatatggaccctgaaaccagattgcctgaattgtatgatatctccaccaattaa

SEQ ID NO: 325411 - DNA, 523 bp, Homo sapiens
agtatggggaaaccaccctcatgattcagttatctccacatggccctgcccttgacatgtggggattctgacaattcaaggtgagatttgggtggggacgcagccaaaccatatcaaggtgtgagccaccatggccaggcaatagacactcattgagcatttattctatggcagatattccacatatattgtctttctaaaaacaatcacacaagaaaactataaattagatatttctcttccraaattacagcttttgcaggtggaactcagagagtctgagtgacttgaccaaggtcagatagataatagaccaggatttaaactcatgtctgacatgtcaacatttcttgctctctcacattggcaaatgggtcaaatatatcatcaattcccatccattttccaatgtccacattcatatattcattttctttctaaaatgaggagtcacagtttgatggcttataatatggaccctgaaaccagattgcctgaattgtatgatatctccaccaattaa

SEQ ID NO: 325412 - DNA, 523 bp, Homo sapiens
agtatggggaaaccaccctcatgattcagttatctccacatggccctgcccttgacatgtggggattctgacaattcaaggtgagatttgggtggggacgcagccaaaccatatcaaggtgtgagccaccatggccaggcaatagacactcattgagcatttattctatggcagatattccacatatattgtctttctaaaaacaatcacacaagaaaactataaattagatatttctcttccgaaattacagcttttgcaggtggaactcagagagtctgagtgacttgaccaaggtcagatagataatagaccaggatttaaactcatgtctgacatgtcaacatttcttgctctctcacattggcaaatgggtcaaatatatcatcaattcccatccattttccaatgtccacattcatatattcattttctttctaaaatgaggagtcacagtttgatggcttataatatggaccctgaaaccagattgcytgaattgtatgatatctccaccaattaa

SEQ ID NO: 325413 - DNA, 627 bp, Homo sapiens
gtgtatttaacacttaaagtttctggagtttagaaatgcatcagtttgagtcactatatctttactatttagctatgtaaatcttgggaatactgcgtacgttaagtctgggttatgtcatttgtaaaatgtaaaaccaactccttttctagcagcaaatgggttgtatatagcatgtggaacggcattgtgactttctgagaataatgctatgaaggtacatattaaagattctcaactctagagttctaaatgaatgcccttggacaacaaaatttgtgcctctgactctcatattctttatttgcaagataaagatkcaatgactatctcaaaagagtggttgtgagaattatatgagataatgcaagtaaatcatgtggcatgcagaaggtatttaataacagcaattaacaccattattaatggacatgaagatattttgtatactctgtgaacattaggggacattctaattaattatttcttttgtctcacaggcatctttcaaacacttcacttgataatgtagacacaaccatagaaaggcctgatactctctttagagaaaatggaagtgaagagtatcccaggagcaagtaaaaactgcaaaaactcatagcattt

SEQ ID NO: 325414 - DNA, 627 bp, Homo sapiens
gtgtatttaacacttaaagtttctggagtttagaaatgcatcagtttgagtcactatatctttactatttagctatgtaaatcttgggaatactgcgtacgttaagtctgggttatgtcatttgtaaaatgtaaaaccaactccttttctagcagcaaatgggttgtatatagcatgtggaacggcattgtgactttctgagaataatgctatgaaggtacatattaaagattctcaactctagagttctaaatgaatgcccttggacaacaaaatttgtgcctctgactctcatattctttatttgcaagataaagattcaatgactatctcaaaagagtggttgtgagaattatatgagataatgcaagtaaatcatgtggcatgcagaaggtatttaataacagcaattaacaccattattaatggacatgaagatattttgtatactctgtgaacattaggggacattctaattaattatttcytttgtctcacaggcatctttcaaacacttcacttgataatgtagacacaaccatagaaaggcctgatactctctttagagaaaatggaagtgaagagtatcccaggagcaagtaaaaactgcaaaaactcatagcattt

SEQ ID NO: 325415 - DNA, 378 bp, Homo sapiens
tttctgcccacgaagtgctttcaacccttctgggcaccaacaatatgataatcatgtgaaagtggagaactccaaaggagaggcacagggccctcctagagtccatctgcataaagtgttatccayaatataataaactataaatacaattactaatacaattaagaactaggattagcttagtgtccatacgcaacagataataatacaagtcgcacaaagtttttaaaatgaatcagcttatttattcttgatcgaaatgctttagggtgcatatgattactctctaaattttacagagggggaaagtggggcacaagaaaacaaagattaattaaattgtctaaggacccctcagaacatcagagatataaccag

SEQ ID NO: 325416 - DNA, 508 bp, Homo sapiens
gaccatagttaacagtaatttattgtacatttcatcaaagctagaagagaagtttgaaatgttaccaacacaaataaattgtaactrtttggagtgatgggtatcctaattgtctgaatttgatcattacacattatatgcatgtctcaaaatatcacatagattccataaatatgcacaactattatgtatcaataaaaaagcaaacaacaatttacaaaacctgtacaacattattttatctccattaaatataatctgcatgtgtctcagttttgttttggtccttgaattatctgtttccgtttgttttagaagatggcattgagggcaagttgcccttctgaaaagtgattaagaaactgtacagcatacctaagcctggactttctactaattctcgtatcagaataaatgttttcaggtgcattttcatatactgggcaattggtataactaataatcatgtttttaatggtcgttgggtaaacttatagatgttcacaaa

SEQ ID NO: 325417 - DNA, 508 bp, Homo sapiens
gaccatagttaacagtaatttattgtacatttcatcaaagctagaagagaagtttgaaatgttaccaacacaaataaattgtaactatttggagtgatggrtatcctaattgtctgaatttgatcattacacattatatgcatgtctcaaaatatcacatagattccataaatatgcacaactattatgtatcaataaaaaagcaaacaacaatttacaaaacctgtacaacattattttatctccattaaatataatctgcatgtgtctcagttttgttttggtccttgaattatctgtttccgtttgttttagaagatggcattgagggcaagttgcccttctgaaaagtgattaagaaactgtacagcatacctaagcctggactttctactaattctcgtatcagaataaatgttttcaggtgcattttcatatactgggcaattggtataactaataatcatgtttttaatggtcgttgggtaaacttatagatgttcacaaa

SEQ ID NO: 325418 - DNA, 508 bp, Homo sapiens
gaccatagttaacagtaatttattgtacatttcatcaaagctagaagagaagtttgaaatgttaccaacacaaataaattgtaactatttggagtgatgggtatcctaattgtctgaatttgatcattacacattatatgcatgtctcaaaatatcacatagattccataaatatgcacaactattatgtatcaataaaaaagcaaacaacaatttacaaamcctgtacaacattattttatctccattaaatataatctgcatgtgtctcagttttgttttggtccttgaattatctgtttccgtttgttttagaagatggcattgagggcaagttgcccttctgaaaagtgattaagaaactgtacagcatacctaagcctggactttctactaattctcgtatcagaataaatgttttcaggtgcattttcatatactgggcaattggtataactaataatcatgtttttaatggtcgttgggtaaacttatagatgttcacaaa

SEQ ID NO: 325419 - DNA, 508 bp, Homo sapiens
gaccatagttaacagtaatttattgtacatttcatcaaagctagaagagaagtttgaaatgttaccaacacaaataaattgtaactatttggagtgatgggtatcctaattgtctgaatttgatcattacacattatatgcatgtctcaaaatatcacatagattccataaatatgcacaactattatgtatcaataaaaaagcaaacaacaatttacaaaacctgtacaacattattttatytccattaaatataatctgcatgtgtctcagttttgttttggtccttgaattatctgtttccgtttgttttagaagatggcattgagggcaagttgcccttctgaaaagtgattaagaaactgtacagcatacctaagcctggactttctactaattctcgtatcagaataaatgttttcaggtgcattttcatatactgggcaattggtataactaataatcatgtttttaatggtcgttgggtaaacttatagatgttcacaaa

SEQ ID NO: 325420 - DNA, 598 bp, Homo sapiens
tgtgctcctcctattctgccaaccaggtktgaattagtaacagagtatttttaaaaaatagtatgtgtgtcagtcactagtatttcaagtactctgggaatctgcttaaatataattcttagggtaacttcctttttccttcttccccagttttttctcttttgtttatgtattttgtttatttttatctcttcatatctcttgctttttgaatggtaccttaaatgacaagttttcatttttatgaaaaaatattttcttcaattgaatagaataatcttgataaatactcactcaacaacactaataatttattatagcacttctgcaatgacaattcaaaattatacatatctcatgtgcaaacacaagtaacttatgatcatatttacatagttcatacataagcagggaacaacaaaaagaaactgtaatttatcactatgcctgtggccaatatgttgagacacagctttgtgttttgaaaatcacaatgtgtatttttagagcatatctaaaaagtgtgttccccttctaataaactttatccattcttaaggcaacattcacttacaaatattctacattttctcctcta

SEQ ID NO: 325421 - DNA, 571 bp, Homo sapiens
ttctccttccgctctccatcttgttccaacactgggccagcacagcatcaagcatccacacgaccttggcttacttcaactcaatctagcatccgtgtaaaagcattctgagactccgyataccagacgggtggctggctgtgtgccaccagtttaattgccagcttaagtcacttgagtttcctaattctagagtagcgttttacacacctgcagtttttttctttttctttttcttttctttttttttttttttttagcttttcatgcaaatctagattttgccaactctggcatttttcagtaacagcacatttctctctgacagtcccattgaaagcaagtggggcttagcacctttcaactatgatattgcctttggctctcacacagatgtctatcacttcagcttctattttcagggttcaggaatgtataaggtttggaagactgacctgtgccagtaatcaacataaatcatattgtgtcactctactgcttactattctccagtggtttctcattgtactcaaaactctttgtttttccttcaaaatatgcaagtgctgat

SEQ ID NO: 325422 - DNA, 571 bp, Homo sapiens
ttctccttccgctctccatcttgttccaacactgggccagcacagcatcaagcatccacacgaccttggcttacttcaactcaatctagcatccgtgtaaaagcattctgagactccgtataccagacrggtggctggctgtgtgccaccagtttaattgccagcttaagtcacttgagtttcctaattctagagtagcgttttacacacctgcagtttttttctttttctttttcttttctttttttttttttttttagcttttcatgcaaatctagattttgccaactctggcatttttcagtaacagcacatttctctctgacagtcccattgaaagcaagtggggcttagcacctttcaactatgatattgcctttggctctcacacagatgtctatcacttcagcttctattttcagggttcaggaatgtataaggtttggaagactgacctgtgccagtaatcaacataaatcatattgtgtcactctactgcttactattctccagtggtttctcattgtactcaaaactctttgtttttccttcaaaatatgcaagtgctgat

SEQ ID NO: 325423 - DNA, 600 bp, Homo sapiens
aatcatgactcatggtataatcagaaaaatttttaccttcaggagaaccaactatttataagaaaatccttgtatgtattttataacttcagataagaattaaccattctgagctagtgacggtaatgcatgtagagtatattacatttccaaaagcacttaaatatacttatatttatatataaaatatataaaaattgtattagtttcccaagagaagtatgcctttggcccaaagctcatttagtcttttacatattttagaattttgtacatagaacactcaatcagctgataaaatcctggaactctggaaattaatggatttctccaatatcacttgtattggaagtgatagggccaggatggagcaggaagtgtctgttcttttcatagtttcaagctttctccagttaatgagaacaacaaaaaaagaggattgagctagtgttcttttttttctaaagcttactttaaacctgttgaccattgttattytacattttcaggacttgaatttgtgatgatgttctctgcgtaggcatcaacacactttccgattccagttggtcccacagcattgccaagaatatttttgcg

SEQ ID NO: 325424 - DNA, 615 bp, Homo sapiens
ctgaggcagccaggggcatgctggcatcacctatctcctaactccaggctatacagcttgtaagtcaaaaaaagatgccccttctttctgctagaggaaaggagaaggaagagtggagagaactttgtcttgcatcttgggtaccagccaagccacagttggatacggcactggtccaagtcatgagacccctgtttcagtctctagctccaagaagacatttctagacacacctgggtccagaagggaacccactggcttgaaggaaaagacccagtcctggcggaattcatcacttggtaattaaagagcccttgggcactaaataaccatcagggatacccatgtactatgtcgagggccttgggtgagcctctgagattttctggcttcagaggacagaasagccacaggagggtagagcaccaagcagtagagcaccaagtaaagtcccaattctaagactttacacttggatggcatttctggacctgccaagggccagaggggagcccagtgccataaatggtgagtcttaggccaggcagcattcaccacaatctgacctaagaggctttgggccttaagggaacattggcagcagttggcagtact

SEQ ID NO: 325425 - DNA, 494 bp, Homo sapiens
tccaagaagacatttctagacacacctgggtccagaagggaacccactggcttgaaggaaaagacccagtcctggcggaattcatcacttggtaattaaagagcccttgggcactaaataaccatcagggatacccatgtactatgtcgagggccttgggtgagcctctgagattttctggcttcagaggacagaagagccacaggagggtagagcaccaagcagtagagcaccaagtaaagtcccaattctaagactttacwcttggatggcatttctggacctgccaagggccagaggggagcccagtgccataaatggtgagtcttaggccaggcagcattcaccacaatctgacctaagaggctttgggccttaagggaacattggcagcagttggcagtactcctcatggcctgatgtgatggtggctacagggcgaagctcctctgcctttggaaaggggagggaagggtgggaaggagtggcagctc

SEQ ID NO: 325426 - DNA, 573 bp, Homo sapiens
tgggtgagcctctgagattttctggcttcagaggacagaagagccacaggagggtagagcaccaagcagtagagcaccaagtaaagtcccaattctaagactttacacttggatggcatttctggacctgccaagggccagaggggagcccagtgccataaatggtgagtcttaggccaggcagcattcaccacaatctgacctaagaggctttgggccttaagggaacattggcagcagttggcagtactcctcatggcctgatgtgatggtggctacagggcgaagctcctcwgcctttggaaaggggagggaagggtgggaaggagtggcagctcagcctcagtacaatagaacaccaggtagatttctaagtttttgactttagtctctgattcctggatggcactcctggacccaacgagagcctggaggattttaccattcttaagggaaggattcggatctgggtggctttgccacctgctggttgtagagccccaaggccttgagaaaacataggcaatagccagggaatggtaacagcaggccttgggtgagacccagtgtttt

SEQ ID NO: 325427 - DNA, 290 bp, Homo sapiens
tgtaggggggagtggcgaaaggataggcggggctaagacagaaagagaccttaaggaccagcaagatggggaaaggggtggagcccaatgagagcgcggagagctgggggggcgtggccatgaaaagacaaatytataacgggaagggagagttttggagaggcggaatagaggaaaaggcggggcctaaaggagggtgagacctttggggagacgaatctgactgcggggaggggtgaccagagaggtgggcttagagggaccttcagaaagaaacagcacaggaaaag

SEQ ID NO: 325428 - DNA, 559 bp, Homo sapiens
tgcatgagcactggaatgagctggctgttttgctgctagcaggatcaaactccactcactcagacccactgtgttccaccctcatgggagggagctcacaggtaagggggtacaggagctggagtgagcattttttgggcatctgcaggagtgaacttcatgcaggccccaaggcaatatccaggcggggggtgactgtgactcctgaagtcccagagtgtgtgttacagtgctttttaagatcttctgtccatggacagcttaagtgttaacagctctgtgggccctctgtcttttggcatgaggcagatgctctctgtcagcgagggcaaaggtccagtgtgacagccttttgtatctgcatttgtggctcctgagctcttgtccggcatccaggaaaaatraggtcacacaaataaatttgaaggatggtatatgcagaggattttattgccagtgaaaatggctctcaatgggaaggggagcagaaatggggatgaggtgggtaggtaatcttctaaagtccatctccagctggattcttatctgaagttacgcc

SEQ ID NO: 325429 - DNA, 614 bp, Homo sapiens
tattttcttactgacttgcaggtaggaattcttaatatgttctatatatatattatatatatacaaattttatgtttttgtgtattaatatatatgtacatatgtatatacattatgtatatatataaaatacatataatacaygaaaaatataaacaaaatgttcatataaattatatataacagtttttacccattcatcttttaaatcattcattaagtgaaacattacttactacatatctaacatgtacatgccaaagacaatgctagtgctagggataaagaatggttattttacaaattgctgatacatgcttataggaaaaaatgttggtaaatttggggataataaatagcaagctgggaagaactagttttttatttccaaataacctatgatctctcacctagacgttataattatcaaatttattttataatatgaattatcaaatatgaatatttgctaaaatatcaaatatgaatatttgctaaaatatcaaatgtattttataatatgtaatggaatattcatcattacaggtaccaggaaataaagattttcacatttccttgaatgttaagtagttctaaaagtataagttgcaaat

SEQ ID NO: 325430 - DNA, 608 bp, Homo sapiens
acttttatagatgtccttagtgagatacttcaggctaaagagaatggcaaagaaataaatttttgtcatttagttttggataccctgaagactgcaaagtcattatatatgcctcatagcatggcatcatgagtaatatttacaaggatgaaattttctggagcccactgcctcctgattgtctactttcttgtccagtaagagtgaagcatgaatggtcattttctccctttggtctcagtattcttacccttgacttttaggagatagaagcaatattgaatagcccatggttcattctttctgcccagaggctaaccaaagagaaatactttttcctgggttggctactccttatcawacgaaaattacctgcttaaaggtggaagcatcgaggggagagcaaggctttctttgttgttcatatcgatgaccaagctgtcacttaatgttactacctcgtttaggaagagtccattatattgactggatgacttactttttccttcagttgagacctttgaggcttttgatacatttgggtttccaagtaaagaacagaggagagcagaactgttctgcatgctacagggagaaaggaaattggt

SEQ ID NO: 325431 - DNA, 562 bp, Homo sapiens
cagggaatatgtgtttagagtccctcagttcactttctccacatactgtcttcaggtccatcctgcctggctttattttgtgcacacagctgagcaggccacatgtgtggaaaaggcttatgattggagtgagcgaggtgtcagaacaagatgagctttgtgatcgctcagctctagggagcgattgttgttttcaagccttcaccctccctcacacttcgcactcactttaattgtgaccaatttggaagtgctatttgcatctgctggaataaaatacgtacagctgtggaaataacaaaaaatgaaaactcactctkagtggaggtcgggggggaccttcatcaattgctactgagtacttaaaatgaaaatgttgcctttcctaacaaacagcactgagatttttcggagtgcaattttctctgctcgtgcatatgtatgcaatagatatcttcagatatacttctccccacgctttggttggggttacaaacgcagaagtgggccttcaagacagccttttattagatctaaaaccagtgggctaagtagcacatct

SEQ ID NO: 325432 - DNA, 566 bp, Homo sapiens
gagtgagcgaggtgtcagaacaagatgagctttgtgatcgctcagctctagggagcgattgttgttttcaagccttcaccctccctcacacttcgcactcactttaattgtgaccaatttggaagtgctatttgcatctgctggaataaaatacgtacagctgtggaaataacaaaaaatgaaaactcactctgagtggaggtcgggggggaccttcatcaattgctactgagtacttaaaatgaaaatgttgcctttcctaacaaacagcactgagatttttcggagtgcaattttctctgctcgtgcatatgtatgcaatagatatcttcagatatacttctccccaygctttggttggggttacaaacgcagaagtgggccttcaagacagccttttattagatctaaaaccagtgggctaagtagcacatcttaagtcatcataagatataattattactgaattgaaaagacacaaaacaccaaaaaaattcttagagttgaggatcaacctaaatattacttcttacttctcctaatccccattgtgccagatcagtgct

SEQ ID NO: 325433 - DNA, 567 bp, Homo sapiens
accatggccttcaagacttacttgatttgcctccgtgatatttcatattgatctcatccttatccacaatagtccagtgatactggcctccttggtttaagtcaaatacaacaacttgtattttctaattccattttccaaattcccattygccattctctctgctggaaattttcttcccccatcctctcattggacggcttcttttggtgtctgctcaaatgtcacctgagagaggctttttattgacccttcatctaaaatagcaacacacacccttcagtcaatttatcccctttagtttctgcatagcgttttattttactctcaataattacattaacttttaaaattctttatcatagtttgtgtcctccactagactgtaagcaaatgagaatatgtgctcattgcaactgcctcattctttattgtttccctagcttcaaaaacagtggctggagtaaattatctttcaaaagtgaatgcctgaaggagtgaataagggccaaaacagagggaattcagaggactaggattattcctaaattcaccactgttcctctg

SEQ ID NO: 325434 - DNA, 567 bp, Homo sapiens
accatggccttcaagacttacttgatttgcctccgtgatatttcatattgatctcatccttatccacaatagtccagtgatactggcctccttggtttaagtcaaatacaacaacttgtattttctaattccattttccaaattcccatttgccattctctctgctggaaattttcttcccccatcctctcattggacggcttcttttggtgtctgctcaaatgtcacctgagagaggctttttattgacccttcatctaaaatagcaacacacacccttcagtcaatttatcccctttagtttctgcatagcgttttattttactctcaataattacattaacttttaaaattctttwtcatagtttgtgtcctccactagactgtaagcaaatgagaatatgtgctcattgcaactgcctcattctttattgtttccctagcttcaaaaacagtggctggagtaaattatctttcaaaagtgaatgcctgaaggagtgaataagggccaaaacagagggaattcagaggactaggattattcctaaattcaccactgttcctctg

SEQ ID NO: 325435 - DNA, 590 bp, Homo sapiens
agcaagtcctgtaaagtaggcctagtggaaatgaactcccttagcttttgtttgtcacttacatgtgaaatcaaaaacaaactcatagatgcagagagtagaagagtggcaaccagaggttggagattgcagggaatggggacatgttggtcaacaggtaaaaaaaatctcagacagaagaaatatatatattttttctgagatctattgcasagtatagtgaatatagtcaataacactgtattgtacatttcaaaatttctaagagtaaatttcagtgttctcaccacaaaaagtgataaatatttgaggtgctagatatgttaattagcttgatttaattatctcacattgtagtcataaatcataacatcacttgtactgcataaacatatacaatgataatttatcaatttataatcaaattcttttaaaagtacatttattttcaggattataaatatttcctcctctttctccatcatcaacatcatcatcattaccatcatcatcacaggaactaatattcagtgaaggcttcttacatgccaaccaccctacttaatgttttataaatgtaatagaatatt

SEQ ID NO: 325436 - DNA, 590 bp, Homo sapiens
agcaagtcctgtaaagtaggcctagtggaaatgaactcccttagcttttgtttgtcacttacatgtgaaatcaaaaacaaactcatagatgcagagagtagaagagtggcaaccagaggttggagattgcagggaatggggacatgttggtcaacaggtaaaaaaaatctcagacagaagaaatatatatattttttctgagatctattgcacagtatagtgaatatagtcaataacactgtattgtacatttcaaaatttctaagagtaaatttcagtgttctcaccacaaaaagtgataaatatttgaggtgctagatatgttaattagcttgatttaattatctcacattgtagtcataaatcataacatcacttgtactgcataaacatatacaatgataatttatcaatttataaycaaattcttttaaaagtacatttattttcaggattataaatatttcctcctctttctccatcatcaacatcatcatcattaccatcatcatcacaggaactaatattcagtgaaggcttcttacatgccaaccaccctacttaatgttttataaatgtaatagaatatt

SEQ ID NO: 325437 - DNA, 629 bp, Homo sapiens
ttcttataactacaagactttgagcctcgtgtttctctggactgagttggtttggtggagatctttgaagaaaggtttctctacttgacaaattcctactctccagtgaaaactaaatagatattttccaattatctctttttatattttaatattactatttagagatgggatccactatgttactcaggctgacttcaaactcctgagctaaaacgccttccacctcaggctcttgagtagctgggactataggcttgtgccacagtgccaggcttcatagagtatgtttattaaatgaacacatgacaatgaggaagagggatgcttttacccgaatcatatgaactgcaggaaaaaagtcttcaataatgggaatctctgaggaattacaaacatgcccataaaggaaagcaacacttgtgaatctctgcaagtcttaagggtacaccaccaatgtaagaaatcatgagtcgaagtaaaactcctctctatcayctttgctagtcagaaactggctgacaagttggggtggtgaaataggaaagccagccatgtcttcaaccataacttcaggcttcttccgcctcaagtaaatttaagatgaaatttaatgcttaagtgtgagt

SEQ ID NO: 325438 - DNA, 435 bp, Homo sapiens
attaggtaactttttttttttttttttttttttttttttgtttaaagcagccttgctctgtagcccaggtggttcagggcaatgccctggccatcctgtgaaatgcacctaggccacaggtrgcagttgacagtgtgaggcaggtgctacattgttatgctgtgagtgagtgccctagaaaacagctgatacagtttggctgtgtccccacccaaatctcatcttgaattatagctcccataattcccatatgtcatgggagaaacctagtgagaggtaattcaatcatgggagcgggtctttttcctgatagtaaataagtctcatgaaatctgatggttttataaaggggagtttctctgcacacacactctcatgtaagacatccctctgctcttccttcatcttctgccatgattgtgaaacctccctagc

SEQ ID NO: 325439 - DNA, 561 bp, Homo sapiens
taaaattagaaatgtcatttctggtattctaatataagtaaattaattcaatggattaataaaaggttttttacaatctatctttttagatacagcaatgcgagcatcactaatcaacagtgtatctgttataagggtgttcccagacatgtccaacatttggtctgatgggacagacatttagaactttggatttagaatataagcttttcgtactcaaacattaacttagacacagcctgaaatagaggttaagctggggtttgatctctgcctttagtttttgtaatctctttgccttgaggaaaattgctcaagmtctctgatcttcagtttctcagacataaaacacagccatactgtctgcctcacggggttgtaaggatcaaaagaaatcatgctacataaagccttccactcaatgcagagacaaaataagggctcaataaatggtagcaattatagtaccaatgcacgcaaagcactgttctaggcactaggatacaaaaataagacatgctcccttgtccttgaagaaattacagtttattggtgaaaact

SEQ ID NO: 325440 - DNA, 633 bp, Homo sapiens
gacaagaaccagagggtggtttctagaagctaagagcagcccttagctgatagcaaggaagggggaacctcagtccttcaccagcaaggaactagattctgccaaaatcctgcatgatcctgaaagaagatcctaccgtacagccatcagataataccccaggccagtcaaaagccttgattttggcttttagagacctagagcagaaaaaccagctgagcccatctggaatcttgacccatgaaaactatgagaaaataagtattagctgtttaaatcactatgtatgtagtgatttattattgcaacagtaacaaaccaatacagaggattcccaaaagtgattcctacaaaggatttaggaatctacagcatggccacatctatgcaggggaggggctcgtgcccacaaaggttgaaaaacatttattttgatgacatttttctccaagaagaaagcaaaacatttatttgaagatttttcagtgttgcaggtattaagggatcctgggtagaaacaatatccctctccccatgttaggtaagataatagatgaaaaagaccttttaaggtcaagtgggctgtttcttaasaacagaattattaggtagtcttgaacagtgatgctttta

SEQ ID NO: 325441 - DNA, 590 bp, Homo sapiens
catttttctccaagaagaaagcaaaacatttatttgaagatttttcagtgttgcaggtattaagggatcctgggtagaaacaatatccctctccccatgttaggtaagataatagatgaaaaagaccttttaaggtcaagtgggctgtttcttaacaacagaattattaggtagtcttgaacagtgatgcttttaagtagaaatacatttcagaaggtttgagtcagagaaactcccatctcggactcatcctggtcctctcttctgactgtagctttttcatgtatgcattgatccagaaatgcatgaartcatgcattaagattttcatttattcatttgtccattaatgcaaggtactatgcttagtaagggagagacaaggttaaattaaatgtagtcctaaccctccataagcttacaatgaggagagagagatatacataaaatgataacaagcagatataaagtgataatcctcatataccataagcttgtcactttaccaaaaatgatccaggccatgcctagcacagttctctgttttaaacttaccctaacccctgtcattccattctgtatgtgtagag

SEQ ID NO: 325442 - DNA, 574 bp, Homo sapiens
cccagagcagctccctcatgacaatcccattttcctccgtggtgccctgtctggccaacttgacactagggaatcagaacaaagtcagaaaatcagacaaggaactcagatcagcactactatggagggatgaaagttgaatgctaaacattctaggactggctctaataccaggctgctcacagtgtagggtaaccaatcatcgtgattacctgggaccattctgggttttgcaatgtaaatcctacatctcaagaaattcgttcccaaggtggtagaagccacagcattcacagatggatgtagaagggcaccagaaaagcataaaacacatacggtagcaaaaaggagggggagggagctgaaagcaacacactttttggtgtcaaatggatatggcatagattatctttcatagtttattttttcccctgaccagtgatactggcaaccataatttgcagttaacattgttgcattgctctgagtatgtgactttagtgtgyaatgaaagtgcatcataatcatgagtgacagtccgtctctgattgactgagaaaatgactcatagctg

SEQ ID NO: 325443 - DNA, 486 bp, Homo sapiens
aatactcttctgagattttatgttgcaatcacattaacattctcccatgaagaggaataaggaagataacagctatatctatttaagatatctatatattttttagatatagrtatctatatctgtatctaaaaaattatgtagtatccacaaataatgaaattgcttaataaatctccacatttaattatctttctacattgtagtcaattttcatctttgaactatatttcatgaagcatataaacattcgacttcatctgaaaggtctcttaaattaagcaccaatatcttgactctctctgaagacttaaataccacaatttaaaaagagaaatacactaatacgaaatagactttctttgcatagtcaatgaatcatgctggaaaagtaaacaatgcattttgatactttttacctcaaatatgacttcagtcatggcagtgacaggatagacaggacatttcagtacaattccagatgag

SEQ ID NO: 325444 - DNA, 555 bp, Homo sapiens
cactcttgttgcccaggctggaatgcaatggcatgatctctgctctccgcaagctccacctcscgggttcaagggattctcctgtctcagcctcccaagtagctgggattacaggcacctgccaccatgcccggctaattttgtatttttagtagagacggggtttctccatgttgatcaggctgatctcaaactcccgacctcaggtgatccacccgcctcaacctccgaaattgctgggattacaggcgtgagccaccgtgccgggccaggtttcaaaacttctaaatcccagagaggaaggcaaaggcctacctcttgctgtccccactcctccacctgtagaatctggcaaaacatcactatcttctacccagagcctccctaactagtattcctgcctctatccatgttgcttgaaagtccgttctccatatgtgggtaatccttataaagttaagcatatcatgtcacccctttgttcaaaccccctcagtttcttcccatcaacacggagtaaaatccaaagaacgtgtaatggctgacaaggccctc

SEQ ID NO: 325445 - DNA, 555 bp, Homo sapiens
cactcttgttgcccaggctggaatgcaatggcatgatctctgctctccgcaagctccacctcgcgggttcaagggattctcctgtctcagcctcccaagtagctgggattacaggcacctgccaccatgcccggctaattttgtatttttagtagagacggggtttctccatgttgatcaggctgatctcaaactcccgacctcaggtgatccacccgcctcaacctccgaaattgctgggattacaggcgtgagccaccgtgcckggccaggtttcaaaacttctaaatcccagagaggaaggcaaaggcctacctcttgctgtccccactcctccacctgtagaatctggcaaaacatcactatcttctacccagagcctccctaactagtattcctgcctctatccatgttgcttgaaagtccgttctccatatgtgggtaatccttataaagttaagcatatcatgtcacccctttgttcaaaccccctcagtttcttcccatcaacacggagtaaaatccaaagaacgtgtaatggctgacaaggccctc

SEQ ID NO: 325446 - DNA, 565 bp, Homo sapiens
gctatgtgaggattttatgatcagttttacatagcgatcctagtttactggttgcacatcataagtactcaagcagaggtagctatttttcaaatggatgagaagtgtttcatagtatttctatgacttcagactcctatgcagagccagcctacacatggataattaactcagaaatgctcagtttggaagcaaattaaggctgaggtagggctatggcagtggtgggagtcaggaagtaaacagaaagagtacatgtcaatacaaattctagatcaacttttgtgtttttggagaatggctttattttcawctttttaatggtcttttaatatttatgaaggttagtaagcaaatcaattgatcttagccattatgacagagccaagtgatatggtttggctgtgtccccacacaaatctcatcttgaattgtagctcccataatccccacatgtggtgggaaagactcggtgggagggaatgaaatcatgggggtgggttttcctgtgctgttctcatgatggtgagtgggtctcaagagatctgatggttttataaagggg

SEQ ID NO: 325447 - DNA, 581 bp, Homo sapiens
gtgcagggagaaggcccttttcacacatctcctttgcttcttcccccacccctaaccacttttattcttaagtaccaccttctggaatgcagcctgaattacaccatcaaacaaaattcctactacaagcaacgtctcagaaagccactgaataaaactatttgcaaccaaggaatacttataaagccttacagagcatcctgaagcaaagccaattgattttacaaagtatgttcaacagtcatactcctaaggaaaaaaataataaaatatgaagctgcatccaaatgatagcaaatwcaaaaaaagacagctttctcatatgagatgaaaccagtgcaagaactctgacaacacagaaagccagcgtgtttcatcacctccaaaggatcccactgtctcccaagcaataaatcctaaccagaataaaatgttcaaaattacagatgtagaattcagaatgtggatagcaaagaaactcaacgaaatccaagagaaagtggaaatccaacatgaagaagccagcaaaatgatccaagatttgaaagacgacatagctatattaagaaagaaccaaacag

SEQ ID NO: 325448 - DNA, 581 bp, Homo sapiens
gtgcagggagaaggcccttttcacacatctcctttgcttcttcccccacccctaaccacttttattcttaagtaccaccttctggaatgcagcctgaattacaccatcaaacaaaattcctactacaagcaacgtctcagaaagccactgaataaaactatttgcaaccaaggaatacttataaagccttacagagcatcctgaagcaaagccaattgattttacaaagtatgttcaacagtcatactcctaaggaaaaaaataataaaatatgaagctgcatccaaatgatagcaaattcaaaaaaagacagctttctcatatgagatgaaaccagtgcaagaactctgacaacacaraaagccagcgtgtttcatcacctccaaaggatcccactgtctcccaagcaataaatcctaaccagaataaaatgttcaaaattacagatgtagaattcagaatgtggatagcaaagaaactcaacgaaatccaagagaaagtggaaatccaacatgaagaagccagcaaaatgatccaagatttgaaagacgacatagctatattaagaaagaaccaaacag

SEQ ID NO: 325449 - DNA, 581 bp, Homo sapiens
gtgcagggagaaggcccttttcacacatctcctttgcttcttcccccacccctaaccacttttattcttaagtaccaccttctggaatgcagcctgaattacaccatcaaacaaaattcctactacaagcaacgtctcagaaagccactgaataaaactatttgcaaccaaggaatacttataaagccttacagagcatcctgaagcaaagccaattgattttacaaagtatgttcaacagtcatactcctaaggaaaaaaataataaaatatgaagctgcatccaaatgatagcaaattcaaaaaaagacagctttctcatatgagatgaaaccagtgcaagaactctgacaacacagaaagccagcgtgtttcatcacctccaaaggatcccactgtctcccaagcaataaatcctaaccagaataaaatgttcaaaattacaratgtagaattcagaatgtggatagcaaagaaactcaacgaaatccaagagaaagtggaaatccaacatgaagaagccagcaaaatgatccaagatttgaaagacgacatagctatattaagaaagaaccaaacag

SEQ ID NO: 325450 - DNA, 626 bp, Homo sapiens
tatccctgatgaacatagatgcaaaagtcctcagcaaaataccagcaaactgaatccagaggtacawcaaaaagttaattcaaaacaaccaagtgaactttattcctgggatgcaagtatggttcaatgtatgcaaatcaataaatgtgatttgccacataaatagaattaataacaaaattatatgatcatctcaatagatgcagaaaaagaattttattaaatccaacatccttttatgataaaaaccctcaagaaactaagcatagaagagatattcctcaaaataacaagagccatctctgtcaaatccacagccaacgtcatactgaacagacaaaagctggaagcattccctctcagaagtgaaacaagacaaagatgtccactctcaccacgcctattcaacgtagtactggaaatctcttcatagccagagaaatcaggcaagagaaacaaaggcatctaattaaaaaagaagaagtcaaattatctctccttactggtgaaatgattcaacacctagaaaatcctaaagattctgccaacagactcctagacctcataaatgacttcagcagggtcccaggatgcaaaatcaatgtacaaaaattagtagcatttct

SEQ ID NO: 325451 - DNA, 588 bp, Homo sapiens
ccaccaactagtgctatgctggcttttctagaaattagccttacatctttgtttctaattggcttttctgttattctactagtactggcacttcataggaactccttataattattaatagctcactttgggaagcttttactctccatggattaaaccccattaactgaaccatcgccctataactgcctgtgatccagcccccagccacagagtttccagagkttactcagtatttccaactgattctaccatattgaagatcaagatggggttttcttggggatggggactgacctagctcaagtccctgtttaataagcctttgcacacaggcatttggcctgctgcccctatcacagttcccctggagtacttcagcttgctctccatttgatcctggttcttcctccaaaattcctgtagataggggccaaagggactacagacctcatcccactgtagtagatatctttataccaactatttcaaaccatgtatttatattattgttggattttttgataaaatcatagactatcagttctggaagtaaaaccctttcattttgcagaaaggaaaccaggt

SEQ ID NO: 325452 - DNA, 588 bp, Homo sapiens
ccaccaactagtgctatgctggcttttctagaaattagccttacatctttgtttctaattggcttttctgttattctactagtactggcacttcataggaactccttataattattaatagctcactttgggaagcttttactctccatggattaaaccccattaactgaaccatcgccctataactgcctgtgatccagcccccagccacagagtttccagaggttactcagtatttccaactgattctaccatattgaagatcaagatggggttttcttggggatggggactgacctagctcaagtccctgtttartaagcctttgcacacaggcatttggcctgctgcccctatcacagttcccctggagtacttcagcttgctctccatttgatcctggttcttcctccaaaattcctgtagataggggccaaagggactacagacctcatcccactgtagtagatatctttataccaactatttcaaaccatgtatttatattattgttggattttttgataaaatcatagactatcagttctggaagtaaaaccctttcattttgcagaaaggaaaccaggt

SEQ ID NO: 325453 - DNA, 588 bp, Homo sapiens
ccaccaactagtgctatgctggcttttctagaaattagccttacatctttgtttctaattggcttttctgttattctactagtactggcacttcataggaactccttataattattaatagctcactttgggaagcttttactctccatggattaaaccccattaactgaaccatcgccctataactgcctgtgatccagcccccagccacagagtttccagaggttactcagtatttccaactgattctaccatattgaagatcaagatggggttttcttggggatggggactgacctagctcaagtccctgtttaataagcctttgcacacaggcatttggcctgctgcccctatcacagttcccctggagtacttcagcttgcwctccatttgatcctggttcttcctccaaaattcctgtagataggggccaaagggactacagacctcatcccactgtagtagatatctttataccaactatttcaaaccatgtatttatattattgttggattttttgataaaatcatagactatcagttctggaagtaaaaccctttcattttgcagaaaggaaaccaggt

SEQ ID NO: 325454 - DNA, 588 bp, Homo sapiens
ccaccaactagtgctatgctggcttttctagaaattagccttacatctttgtttctaattggcttttctgttattctactagtactggcacttcataggaactccttataattattaatagctcactttgggaagcttttactctccatggattaaaccccattaactgaaccatcgccctataactgcctgtgatccagcccccagccacagagtttccagaggttactcagtatttccaactgattctaccatattgaagatcaagatggggttttcttggggatggggactgacctagctcaagtccctgtttaataagcctttgcacacaggcatttggcctgctgcccctatcacagttcccctggagtacttcagcttgctctccatttgatcctggttcttcctccaaaattcctgtagataggggccaaagggactacagacctcatcccactgtagtagatayctttataccaactatttcaaaccatgtatttatattattgttggattttttgataaaatcatagactatcagttctggaagtaaaaccctttcattttgcagaaaggaaaccaggt

SEQ ID NO: 325455 - DNA, 587 bp, Homo sapiens
aatgagccaagtggatactaaggaacagagcctttcaggcagaaagaattaggcagagtttttgaggttcaagggaatgataaggaggctagtgtagctggagaacattgagcagagggaagagtggtagtagtcaggtttagatcacacaataatttgtaggccaaaatagacttgagttttattctgagtgtacccaaaatgattgaagggttttaagaatacctgtacagaacctaacatttatttcttaactattaatcataacaaaggatattgaaaaactattctgagacttttaagatgattcacctggaggaatgaagtttagagacattaaagatgtaaagtcacagactgttttacagatacagaatttaatcccaggtaggctgattactttgctaaaaattatgctgaaaatatatggccagcagagatgagaagccatgacttttgactccctgcctggtttacttttataaggatgaagaaatacatgtgttacttgagaccatatacatacaagctcctaaatggccatsataggtatgacaagtaacttcagatgttattaaactttatca

SEQ ID NO: 325456 - DNA, 395 bp, Homo sapiens
actccatgttttttgattccaagtatcatcttattccactaaaaaatgcttcctctatacacattttttgtgtatgttrgagaactggatgaacatagtaattttgatgtgactggaggtgagggacttaattaaggaggtgatacatgctaagtaggactacctactctattttaaaatgtcactgaagagggatatttttccactacgaaatagcaagctgcttttccaggttaattctatttctagagaatgcaaattcagcttttcattgaagctactacattccagatagtacatgccaatttatttgatcattattttccctatcattgccaggctaaatcttctcaaacaaaaatctgctccaattcttgtgcaagcataattttctg

SEQ ID NO: 325457 - DNA, 395 bp, Homo sapiens
actccatgttttttgattccaagtatcatcttattccactaaaaaatgcttcctctatacacattttttgtgtatgttagagaactggatgaacatagtaattttgatrtgactggaggtgagggacttaattaaggaggtgatacatgctaagtaggactacctactctattttaaaatgtcactgaagagggatatttttccactacgaaatagcaagctgcttttccaggttaattctatttctagagaatgcaaattcagcttttcattgaagctactacattccagatagtacatgccaatttatttgatcattattttccctatcattgccaggctaaatcttctcaaacaaaaatctgctccaattcttgtgcaagcataattttctg

SEQ ID NO: 325458 - DNA, 543 bp, Homo sapiens
atagggcagaataaatgacaagaaagatggtaaaataaaaaacttcaagccctcttctccccacagaaacaccaatttaacagccagccacagacaaaaataactttatgagagctccagaatccacgtgaaagtcacagcataacagtaaagcacagaaaaagaaaagatacgttgaaaagagtaagaacactttacctataacgccccttccccaagctggcatggcacagtgctgagagagatccgcttggtttgtgaattatctaatggygaataaagagaatgaaatgagtatttgactgcctaacttttcagggcactatctgagagacctgtgtctgttgtacttcatctagaacactgaataaatctgcatggctacatcatctagaggtagctaagaacaaaaataaagggtacaggggctctcaacaaccagcacacagatctcaacagcaatcccacagaccccagcagcagacccacccaagtatcttactagctggcctgtctagaatccttgactaggctgactgatgg

SEQ ID NO: 325459 - DNA, 543 bp, Homo sapiens
atagggcagaataaatgacaagaaagatggtaaaataaaaaacttcaagccctcttctccccacagaaacaccaatttaacagccagccacagacaaaaataactttatgagagctccagaatccacgtgaaagtcacagcataacagtaaagcacagaaaaagaaaagatacgttgaaaagagtaagaacactttacctataacgccccttccccaagctggcatggcacagtgctgagagagatccgcttggtttgtgaattatctaatggcgaataaagagaatgaaatgagtatttgactgcytaacttttcagggcactatctgagagacctgtgtctgttgtacttcatctagaacactgaataaatctgcatggctacatcatctagaggtagctaagaacaaaaataaagggtacaggggctctcaacaaccagcacacagatctcaacagcaatcccacagaccccagcagcagacccacccaagtatcttactagctggcctgtctagaatccttgactaggctgactgatgg

SEQ ID NO: 325460 - DNA, 543 bp, Homo sapiens
atagggcagaataaatgacaagaaagatggtaaaataaaaaacttcaagccctcttctccccacagaaacaccaatttaacagccagccacagacaaaaataactttatgagagctccagaatccacgtgaaagtcacagcataacagtaaagcacagaaaaagaaaagatacgttgaaaagagtaagaacactttacctataacgccccttccccaagctggcatggcacagtgctgagagagatccgcttggtttgtgaattatctaatggcgaataaagagaatgaaatgagtatttgactgcctaacttttcagggcactatctgagagacctgtgtctgttgtasttcatctagaacactgaataaatctgcatggctacatcatctagaggtagctaagaacaaaaataaagggtacaggggctctcaacaaccagcacacagatctcaacagcaatcccacagaccccagcagcagacccacccaagtatcttactagctggcctgtctagaatccttgactaggctgactgatgg

SEQ ID NO: 325461 - DNA, 582 bp, Homo sapiens
tgctgtaaaatgcatctagttattcagtaacattattatcaggcctttggaggctttttacatagtcctaatgatgccagacaggtgaaccccaaagtggcgcttakcccgtgatggttcttggctttgctcaggaaggaattcaagagcaaggcagaggaaggagaaacagctttattgaagaggcagtgttacaactttgtgactgctcctgtagagcagggctacctctcacaggcagaaggtagcatctcagggaagttttgcagtcatatttatatcacttttaattacatgtagattaagggggtggtttacaaagaaatttctaggaaaggggtagtaacttttgggccatttggttgttgtcatggaaaggggcaggtgttgcctgccaactcccgggtgttgctgtggcaatggtaaactgacatggcaaaatggtgggtgtgtcttatggaaagctgcttctgctccatccctgttttagctagtcctcaatttggtctggtgtccaagccccccctccaggttctagtcccacctccatctcccacctcattaacataaaataattcctcc

SEQ ID NO: 325462 - DNA, 623 bp, Homo sapiens
aatgaacttatcaccctgtaaatctgctgctcctcatgggtgcccagtttcagggataggtacctccaaatatgaaggtattcaagccactgtctcttcccatgcactccctaccactctcatttctaatcaatcattaaattcagccaattttatattccaaatatcttctgaatcttttcacctccccctgcttttctagtttacatcacaattttctcttacctggactaatacaattgccttccaactggttyctgacttccaaccatgctgcaattcccaagtgccttacaaataaagtgtaaatattttattctttctttattttataaaatgaaaataatagggtctgtatctcacggtccggttattgtaaggaagtaattagattatagttgtaaaagtagaaggcattttaatcactgtttgaggaaaggcaaggattgtctggaccacctgaatcactaacatcctccaacttagatgatattgtgtccactttaagtgttgggaaactgaaattaggaacagcgataagatctgctcaaggtcagttgataagtgatactccagaattttttccgtgtaactatttgaccccacacctgtgaactttcctt

SEQ ID NO: 325463 - DNA, 623 bp, Homo sapiens
aatgaacttatcaccctgtaaatctgctgctcctcatgggtgcccagtttcagggataggtacctccaaatatgaaggtattcaagccactgtctcttcccatgcactccctaccactctcatttctaatcaatcattaaattcagccaattttatattccaaatatcttctgaatcttttcacctccccctgcttttctagtttacatcacaattttctcttacctggactaatacaattgccttccaactggttcctgacttccaaccatgctgcaattcccaagtgccttacaaataaagtgtaaatattttattctttctttattttataaaatgaaaataatagggtctgtatctcasggtccggttattgtaaggaagtaattagattatagttgtaaaagtagaaggcattttaatcactgtttgaggaaaggcaaggattgtctggaccacctgaatcactaacatcctccaacttagatgatattgtgtccactttaagtgttgggaaactgaaattaggaacagcgataagatctgctcaaggtcagttgataagtgatactccagaattttttccgtgtaactatttgaccccacacctgtgaactttcctt

SEQ ID NO: 325464 - DNA, 623 bp, Homo sapiens
aatgaacttatcaccctgtaaatctgctgctcctcatgggtgcccagtttcagggataggtacctccaaatatgaaggtattcaagccactgtctcttcccatgcactccctaccactctcatttctaatcaatcattaaattcagccaattttatattccaaatatcttctgaatcttttcacctccccctgcttttctagtttacatcacaattttctcttacctggactaatacaattgccttccaactggttcctgacttccaaccatgctgcaattcccaagtgccttacaaataaagtgtaaatattttattctttctttattttataaaatgaaaataatagggtctgtatctcacggtccggttattgtaaggaagtaattagattatagttgtaaaagtagaaggcattttaatcactrtttgaggaaaggcaaggattgtctggaccacctgaatcactaacatcctccaacttagatgatattgtgtccactttaagtgttgggaaactgaaattaggaacagcgataagatctgctcaaggtcagttgataagtgatactccagaattttttccgtgtaactatttgaccccacacctgtgaactttcctt

SEQ ID NO: 325465 - DNA, 578 bp, Homo sapiens
ctttctttattttataaaatgaaaataatagggtctgtatctcacggtccggttattgtaaggaagtaattagattatagttgtaaaagtagaaggcattttaatcactgtttgaggaaaggcaaggattgtctggaccacctgaatcactaacatcctccaacttakatgatattgtgtccactttaagtgttgggaaactgaaattaggaacagcgataagatctgctcaaggtcagttgataagtgatactccagaattttttccgtgtaactatttgaccccacacctgtgaactttcctttaccatagcttggactcagttctgtgtgaacttgggaaccagggatgatttttgaggatgaccccaatactcagaagaggatttgttacatatttcccagtaatacaatacttctggccttgtgggaatgctttcttgaagcctagggtaggtagagagactgtgaagccataagcagaatgaggtgaatgggatacttgacctactgtgtgaaaaataaagaaaatggcatctcagggctgatgcaggggagcatatcagctccatctttgg

SEQ ID NO: 325466 - DNA, 582 bp, Homo sapiens
atagttccttgatttaaaaacacatattttttacattttaaggtatttgatattggaatatgttttataatttttgtaaaaaagaaaaatgcagccattaagcagaagaatgtgtggcaacataacttctctttgcctgtggacatacatgtgctcatatctgtgttcatacctatgttcatactactgttacctgatttggattactttgttaacgtgatataaaattaaagtttgacttaaattttgatccccaattgtcatttaaaatgtcttcagaaagattatacagtgctaaaaagtccaytgaaatgaacagttattgtgtatgccaaagattgtctgtcatgcagcaggcattgcaattacagtcagtagaaactgtcacatttctgggaatagataatggtattttcagccctagaagaggttagtatgaccaatttattcatcatgaaggactaccactcaggaacataacatctatctgtcaaaagcctttggctaacttgcaaacagagctacttcacttaccgtaatatgtaatacagttacagaaaatttcaaaatgctaagttcatc

SEQ ID NO: 325467 - DNA, 522 bp, Homo sapiens
ggtgctgaaaaatgcaatgacactcatagaaattagtgcctttgccctaattcaagtgcctttgccctaatgcaaaagttcaacaattttaccaaccattgattttgcaccatcagtacaaacgtcaacacagcttaaaagggaaatgttttctcagtactattatggaaatagtcttgatattatggacctcctgagaaggtcacagggacacccacatgtctgcagaccacactttgagatgttgtgccttactgtaaatgcatcctgtatagctctgtttataaatgtttctgttttaaaaaccttaaagggaaaaaaaccaacaaattatttttaaaggatcattaaatggcagaagtgtgaaccaaaagacaactaatgtgttatrtaagtactttttaaaacattaattaaaagtaaattttatgagaaaaaagacttcaaagatttgaagtgagccattagttagaatatcctacaaaatagcacatttataatttaagaggttttcctttttac

SEQ ID NO: 325468 - DNA, 572 bp, Homo sapiens
gcatggtgatgacaagggaatgaatattttatctaattcctgcctaacaaatgtaaactttcaaattaattgaagatagaaaagaaaacactctgggcactattttataaacttaatacctcctttaattacctcggcaattccctgagtagtgacgtggggaccttagctgctcccatcctatcactaagccatctttattgtgccttccaaggttaacacaaaaaggataaaggtctgaagaatttcatggagtttttctaagacttcctggaattttttctgaatctctcccactcatatcccatcagccagatgtcacatagccatatgcaagggaagctgggaaatagagtcttcctctgtgtgtcccaggaatgaggacacatggtaagccagattttatcagagttaaaggcagcactgtccctgccatagttacyattatcattaccccttagagttacaccacatcaacattatcttttacgttttagccaaacgattaactctacagtgaaaccttccaataatgtgccccacagaataaaaacccaggcacgagtcagtca

SEQ ID NO: 325469 - DNA, 629 bp, Homo sapiens
ctttctggtgagtaaagtcaaggtcttccttgatgtttctattcctctaatacactttgtcaatctatcatcacattttgttggcttaatctttaaaatatgaccacttctcaataatttaccgttactaccctggcctaagttgctatcatcttttggctggaggaggcaatagacttctactggtcttttggcttcttccttacctcatttcagtctgtttcaaatataacagccagattgaccttaaaatctttactggacactcactttttacagtatttytgcctctgtattagagttcttctgagataattaacaggaaaggagactagatagatgacagacagacagacagacagataggaagggatttattaggggaattgacttacgtgattatagaggctgaaaaatcccatgataggttgtcttcaagtgagaaatattgggatgtcagtagtgtgagtcactccaaatccaaaagcctccgaatcagggaagccaatgtgtataattctcagtccaaggccaaaggcctaaaaacccaggggaaaggggttgctgacataaatcttggagtctcaagactggagagcctgggatcctaatattcaagggtggaggag

SEQ ID NO: 325470 - DNA, 365 bp, Homo sapiens
agatttatcacttcccaagtttagagrctagaaatgaaaaaaaacaaaacattaacaagtggttccttataaacacatgcgcacgtacctatctggatttatatcccgataccctggccaatagccactgctcatgctaatctccataagtatggaaggaattcttaacttgaaccccaagctaatagttgagctttcctctccccctttacccatcccctctttacctctccctccttagccacagctcagccacccaagaggcacccttagatttattctgtcccagaggctattagtggtcttgaattctgagttctggttgcataaaaaatcactggacatgatgataataactaacagga

SEQ ID NO: 325471 - DNA, 365 bp, Homo sapiens
agatttatcacttcccaagtttagagactagaaatgaaaaaaaacaaaacattaacaagtggttccttataaacacatgcrcacgtacctatctggatttatatcccgataccctggccaatagccactgctcatgctaatctccataagtatggaaggaattcttaacttgaaccccaagctaatagttgagctttcctctccccctttacccatcccctctttacctctccctccttagccacagctcagccacccaagaggcacccttagatttattctgtcccagaggctattagtggtcttgaattctgagttctggttgcataaaaaatcactggacatgatgataataactaacagga

SEQ ID NO: 325472 - DNA, 365 bp, Homo sapiens
agatttatcacttcccaagtttagagactagaaatgaaaaaaaacaaaacattaacaagtggttccttataaacacatgcgcacgtacctatctggatttatatcccgataccctggccaatagccactgctcatgctaatctcyataagtatggaaggaattcttaacttgaaccccaagctaatagttgagctttcctctccccctttacccatcccctctttacctctccctccttagccacagctcagccacccaagaggcacccttagatttattctgtcccagaggctattagtggtcttgaattctgagttctggttgcataaaaaatcactggacatgatgataataactaacagga

SEQ ID NO: 325473 - DNA, 365 bp, Homo sapiens
agatttatcacttcccaagtttagagactagaaatgaaaaaaaacaaaacattaacaagtggttccttataaacacatgcgcacgtacctatctggatttatatcccgataccctggccaatagccactgctcatgctaatctccataagtatggaaggaattcttaacttgaaccccaagctaatagttgagctttcctctccccctttacccatcccctctttacctctccctccttagccacagctcagccacccaagaggcacccttagatttattctgtcccagaggctattagtggtcttgaattctgwgttctggttgcataaaaaatcactggacatgatgataataactaacagga

SEQ ID NO: 325474 - DNA, 579 bp, Homo sapiens
atacttatctttgtatactgttttcaggtaggaaggtcctaggtttaaaatatcattttaaagttgattcaaatcaactttatggcttaaatcctagttctacaacttgctatgtgaccttagataaattatttaacctaagtygctgattccccactttcaaaatgaagatgataattaaactgcgctaataattgcacagagttaataggatagtgtatgagtacaaagggtctgacacatagtaggacttcaactagagccagtataggtcgcctttcctcagcattagtgcattccacttagaaataattcagtcattctttactaaataaagaaacggtttaaaagcctgtagccgtgtatatgaatacatatatggtcatttccaatacttctgcttgcttataataaaatttcaattaagcaagagagagagaccaaactcttgtttgctcacaaatatcagggtaattaataatgatgggaaacaaataccctggtgtttaataggaaatttagcaaaatattatattttccctgtttgctatatgtagacgtggtcttctaggcaaacac

SEQ ID NO: 325475 - DNA, 579 bp, Homo sapiens
atacttatctttgtatactgttttcaggtaggaaggtcctaggtttaaaatatcattttaaagttgattcaaatcaactttatggcttaaatcctagttctacaacttgctatgtgaccttagataaattatttaacctaagttgctgattccccactttcaaaatgaagatgataattaaactgcgctaataattgcacagagttaataggatagtgtatgagtacaaagggtctgacacatagtaggacttcaactagagccagtataggtcgcctttcctcagcattagtgcattccacttagaaataattcagtcattctttactaaataaagaaacggtttaaaagcctgtagccgtgtatatgaatacrtatatggtcatttccaatacttctgcttgcttataataaaatttcaattaagcaagagagagagaccaaactcttgtttgctcacaaatatcagggtaattaataatgatgggaaacaaataccctggtgtttaataggaaatttagcaaaatattatattttccctgtttgctatatgtagacgtggtcttctaggcaaacac

SEQ ID NO: 325476 - DNA, 613 bp, Homo sapiens
gggtgcatccagctgttatgtatttatgtcaggcatggtaaagtggaggatgtgtggaccacagacttatcaggcctcgatttgtgtcttgtctctgtcacttattagtttgtgacattgggtaaatcacttaacctgtaataggttcactttccttatctgtacaatggggatattaatacaatggaaatcttatttttctttccttttttgcagaaagaatgagacgtgttactttgtaaatttcaactatcatatcataacacatctataatatatgtttcttccctccattggcatcaataaagatgatagaaaaatccatgtgttacattttttgagggattgaaagcaattttcatcttgtgtcttgctaaatgctaagtgycctgatagtaagttcaagtccctcagagatccttcttatgaacaaattatacagtctacccactggggtttggcaactgaaatggttggaatccccttgttctggtagggagcataaccatatcatgaaatcactcacttgctgaacacctcctacatatgatcctgcaattgacaagtgcacctcagtgttgttacagatgctctgttacctaaaaagaaaact

SEQ ID NO: 325477 - DNA, 592 bp, Homo sapiens
catatttggtgtaacagaaaaataatgaaaaatattaattaggaaaacataccatcaaattcagcttgaatttaagaaacaacaagaataaatataagtgtrgaggctgacaaataataaagaaagtaaagtgacagttcagacactatgaagtcacaaataagtacaataagaatccaagtaaatgattcacacagattatgtgatggtatattgataaaagtagtaagtgatgccctggagccttctttcaccaccaacttttcaaatgcccctgaataatcactctttcttccccaaaatatatatcttaattaaaagaaagccttttcttattgtactatttgaaagcaacagtaaaagtattaagatactgcagctaatttcctgacatttattttatgattggaaattccatactgtaagctgacaaaccaatggtttatagaaaaaaaaataaatgcaatatgggcacttctgttttagcatcctctatattcctttgcttcagaacatattttgacataatgtttacctttctaaaaatttgtatataccaactttggtctgttttcctaccttaattacgtca

SEQ ID NO: 325478 - DNA, 592 bp, Homo sapiens
catatttggtgtaacagaaaaataatgaaaaatattaattaggaaaacataccatcaaattcagcttgaatttaagaaacaacaagaataaatataagtgtagaggctgacaaataataaagaaagtaaagtgacagttcagacactatgaagtcacaaataagtacaataagaatccaagtaaatgattcacacagattatgtgatggtatattgataaaagtagtaagtgatgccctggagccttctttcaccaccaacttttcaaatgcccctgaataatcactctttcttccccaaaatatatatcttaattaaaagaaagccttttcttattgtactatttgaaagmaacagtaaaagtattaagatactgcagctaatttcctgacatttattttatgattggaaattccatactgtaagctgacaaaccaatggtttatagaaaaaaaaataaatgcaatatgggcacttctgttttagcatcctctatattcctttgcttcagaacatattttgacataatgtttacctttctaaaaatttgtatataccaactttggtctgttttcctaccttaattacgtca

SEQ ID NO: 325479 - DNA, 339 bp, Homo sapiens
gaacctagacccaaattctatcttacatgtaaatrtaaacccagcatacatttggtgtggtttaaatacagattaaattcagattaaattctctataattacaactactgtctaaagtgaaataaaatgatgctttattttgtctgaaagtttgccaacagtgttgtaccattttaaagaactatattactaattccagtcatcatttttagtcaccaattcgacatactatatcatttttatagccatcacattcatggtgattatacatttacaaacataggaccacttaattttacacagaattaaaaatctaaatacttacgctagaattacttt

SEQ ID NO: 325480 - DNA, 593 bp, Homo sapiens
aatgtgcataatcctcaaataaaattagctacttttagaatattgtttttcttttaataccgttttacacaaaatgggctatcagaacagtagatcacatatttatttaaaaactaaaggagtgagttgagagagatacatgaaagaaaagaaagtgccacatgtggtatgccacctttatagagatttaatcttatataaaaagctctaagaattcctgttttaaagaaccttagacatttacttcaaacataaagctactaagattatttttgattgaatcatttttagatgtatttatcaacattctactgaagaaatgttccactgagcaaactattaaatggtaatgttagaatrcatgaaaaattaacgtaaaatcataggtcaaacagaaatgtaacactatagatctagtttggaaacaattaacagctaaagcccaggatatgactaaagagaaaggatctctgcttagattacagaatggaagaaaataaattctgataactaggtaattaagtttggcagctagggatgaaaaagacaactgaaaataaaatatggaagaagtaagaatgaaacacagcaag

SEQ ID NO: 325481 - DNA, 593 bp, Homo sapiens
aatgtgcataatcctcaaataaaattagctacttttagaatattgtttttcttttaataccgttttacacaaaatgggctatcagaacagtagatcacatatttatttaaaaactaaaggagtgagttgagagagatacatgaaagaaaagaaagtgccacatgtggtatgccacctttatagagatttaatcttatataaaaagctctaagaattcctgttttaaagaaccttagacatttacttcaaacataaagctactaagattatttttgattgaatcatttttagatgtatttatcaacattctactgaagaaatgttccactgagcaaactattaaatggtaatgttagaatgmatgaaaaattaacgtaaaatcataggtcaaacagaaatgtaacactatagatctagtttggaaacaattaacagctaaagcccaggatatgactaaagagaaaggatctctgcttagattacagaatggaagaaaataaattctgataactaggtaattaagtttggcagctagggatgaaaaagacaactgaaaataaaatatggaagaagtaagaatgaaacacagcaag

SEQ ID NO: 325482 - DNA, 546 bp, Homo sapiens
taaatgagaacatgcagtatttagctttctgttcctgcattaatttgctttggaatgatgaaccctagctccatctagtttgccacaaatggcattatttcattcttttatgactgtgtagtattagatgttgtatatgtaccacattttctttatccaatctaccattgataggcgcctaggttgatttcattatctttgctcttgtgatgtttcatgttcagtgctatggcaatgaacatttgggtgcatgyatctttttgtataaggatctgttttcctttgagtatgtgcctagtaatgggaatgctaggtagaatggtggctctattttaagttctttgagaaatctccaaattgctatctacagtgtctgaactaattttcattcccaccaaaagtatgtaagcattcagctttctccacaccctcatcaacatctgttatagtttacttaatagtagccattctgactggtgtgagatggtatctcattgtggttttgattggcatttctctaattcgtgatgataagcattttttcat

SEQ ID NO: 325483 - DNA, 546 bp, Homo sapiens
taaatgagaacatgcagtatttagctttctgttcctgcattaatttgctttggaatgatgaaccctagctccatctagtttgccacaaatggcattatttcattcttttatgactgtgtagtattagatgttgtatatgtaccacattttctttatccaatctaccattgataggcgcctaggttgatttcattatctttgctcttgtgatgtttcatgttcagtgctatggcaatgaacatttgggtgcatgtatctttttgtataaggatctgttttcctttgagtatgtgcctagtaatgggaatgctaggtagaatggtggctctattttaagttctttgagaaatctccaaattgctatctacagtgtctgaactaattttcattcccaccaaaagtatgtaagcattcagctttctccacaccctcatcaacatctgttatagtttacttaatartagccattctgactggtgtgagatggtatctcattgtggttttgattggcatttctctaattcgtgatgataagcattttttcat

SEQ ID NO: 325484 - DNA, 631 bp, Homo sapiens
cctgaattagtaaatgctgttaataatcaacaaacttatacaatcacagtctttgaattctttttttttttttttttttttactttttcctcaagcctttatcctatatcaggtgttgtacttggatttagacattttggaaagtatccaactktttttgtaatttcggtagtagcagtacaacttgttccctaaaaagctaaatagccacaacaaatgtacaatgatcggttagagtgggactgagaggcaatgtttcccaatatgtagaggagggattcagaaacatttaataatggtgtgatcctgtataacttactttatctccttgtgtatctccttgtttataagataaaatcatgatagtgtctgctgatagggttatggggattaaattaatgttaacatttgtaaagtgtttggaatggtgtcaaccacacagtaaaattatataattgctttactattactattgtaagattttttttgtaaggggacctgagataattttgttttttgaacaaagagaaaacaataaaaaattctaaccaataaatgatacagtgtgaagttcagtctaattagatatacaagtaaaccttatccaaccataggacaatgaattgttgca

SEQ ID NO: 325485 - DNA, 610 bp, Homo sapiens
aagactccttcttaccaatttgtagaaggcacataaaaaagtacttgggaattacaagctagtgacctacctataatacccaaaaaggtattatggtgatacattaaaaaaataaattcacagtatactgtgaatattattgtataccattatacaataatattaatatataataatgctaaactatataatagtatagtatactatgaataaataggaggctgaaattaaaattaagggatttggtttaggcagtggggttcataagaaaagggcaatagaaagggctagggttggagcaatagtgtaaagggtaacagtagatgatgagggttttagggtctctttagtgaaaagttttattgcatcagcaaatggttgaaatagtccataggggcctaaaatattggatcctttgcatagttgtatgtrgcctagaatttttcattcaatgagtgtagggaatgttacggcagccagagtagatataagtagtaggaggttgattataggcatgttgttaagaagattcattgaacctctgattataaagttttacattttatgcaattaccgggcttctgccaccttaacaaaccctacttttggg

SEQ ID NO: 325486 - DNA, 444 bp, Homo sapiens
aaaaataggttgaatatcagagaataattatttatttttagtacctgatttcttgaaataggtatagtgaaaaacatctgaaaagtaagatggaagatttcagggtgatagaagtagacagagggtaatggttctgtatgcaggaagaaatggtgactaagaaaaaaatgctgctctgctattaacagcaacaaggaatagacttctaggaaacagcagggtgtgtctgatgtgtatttacaagctagaaagatgttctctgtgcacagattaaaactgcaaaaaataaaagaactaaagacaaacaaaaatccaataaaacttaaaaagaccatactggttgaatcagtacaacgattttaattttcaaggcttgaccaaagacttatgaaaagaaggaaatagatccttccatggtttaacaragaagagttctgaaaatag

SEQ ID NO: 325487 - DNA, 675 bp, Homo sapiens
ttcatcacctttgcaaatcaaggccggcataatgaggaatagctcaattacctacagtacagaatatatctggaagttctctttagttgattagaatgcaagaaatcatgatagtcaattgaagctcagatatttaataattgttattggaaggtggcttggcttacgataagattttgaatacaaaattgaaagggataatagattaaataaaatttccaaatggtatataatttctctatcataagtaaaattatattccttatggtctgatcactagttgatagctgcctttattcaagaaaatctaaaggaaagggcgctattmgtttcaacagttggccccacatggaataggtgtataatggcttttgatttgcaactctggcggctgttcacaagtttcatttgctttatggtcctatatattcacccctgaaaccaactgttacatgttggtttgctctgtcagctgctgtttcccagcaagtcagagatatgtcatgctgttgaagctttttatcagcaagttcctttaaaaagatatcttctgcctgcagttactctgtttcagctctccataggatcgctgctcaggtaccctaccacgctgacagaattttataatatacaaagctttccagttgatgtatttgttatattttagggttgtta

SEQ ID NO: 325488 - DNA, 675 bp, Homo sapiens
ttcatcacctttgcaaatcaaggccggcataatgaggaatagctcaattacctacagtacagaatatatctggaagttctctttagttgattagaatgcaagaaatcatgatagtcaattgaagctcagatatttaataattgttattggaaggtggcttggcttacgataagattttgaatacaaaattgaaagggataatagattaaataaaatttccaaatggtatataatttctctatcataagtaaaattatattccttatggtctgatcactagttgatagctgcctttattcaagaaaatctaaaggaaagggcgctattagtttcaacagttggccccacatggaataggtgtataatggcttttgatttgcaactctggcggctgttcacaagtttcatttgstttatggtcctatatattcacccctgaaaccaactgttacatgttggtttgctctgtcagctgctgtttcccagcaagtcagagatatgtcatgctgttgaagctttttatcagcaagttcctttaaaaagatatcttctgcctgcagttactctgtttcagctctccataggatcgctgctcaggtaccctaccacgctgacagaattttataatatacaaagctttccagttgatgtatttgttatattttagggttgtta

SEQ ID NO: 325489 - DNA, 675 bp, Homo sapiens
ttcatcacctttgcaaatcaaggccggcataatgaggaatagctcaattacctacagtacagaatatatctggaagttctctttagttgattagaatgcaagaaatcatgatagtcaattgaagctcagatatttaataattgttattggaaggtggcttggcttacgataagattttgaatacaaaattgaaagggataatagattaaataaaatttccaaatggtatataatttctctatcataagtaaaattatattccttatggtctgatcactagttgatagctgcctttattcaagaaaatctaaaggaaagggcgctattagtttcaacagttggccccacatggaataggtgtataatggcttttgatttgcaactctggcggctgttcacaagtttcatttgctttatggtcctatatattcacccctgaaaccaactgttacatgttggtttgctctgtcagctgctgtttcccagcaagtcagagatatgtcatgctgttgaagctttttatcagcaagttcctttaaaaagatatcttctgcctgcagttactctgtttcagctctccataggatcgctgctcaggtacyctaccacgctgacagaattttataatatacaaagctttccagttgatgtatttgttatattttagggttgtta

SEQ ID NO: 325490 - DNA, 607 bp, Homo sapiens
ataataagttttctcactcagacaataattacacaagcaaaaatctttcccatgtaacttatttagaatgctataaaggcttgtatcttctaggggaaggctttagtggtaaactgaagaagattttggttagtatcacttcttaactcgacagcagccacctttcacactaacaaactctatggcaggtagttgtacacatgttactagagcagttttcatacaactcatgggaggcagggtgggcagtaaggacactgttctctaacattggggctgtgtgttctgatcattaattgctgtatttgatcaaggagggacaaacacaaaggcaggcaccyactcttgctacatctcccccttattgttccaagtagcattttctttggctgaagtgacttccagagtatataaagctcaagtgaggttttttttaatcttaattttttctttttctcatttttgtgaaccagagattaaagactaaaacattcacagcacctgaaaatacgggaaaattagaaagttttcaggaatgcccagggagaaatgcaggctcagaaaagatctgaaaaaaaaaaaaaaaaaaaacaacccttaagtttac

SEQ ID NO: 325491 - DNA, 441 bp, Homo sapiens
ctggtcagatgatatttcgtaaaggaccataaaaatatagaacaggataaacctttcaagattgtctagtttatagttataggggaaactggagctgagagaactaagtgctttgtttagagctacatagcaagccagagaccaggcccacagttgctgcccatgacccacaaacagtcacggaagaaaacaatccttctacagctcacagccaccaattatgggtactaaagttgggagtggggctaattagctctaaatagcagagaaaaacagtatttacatcactaaagagaacaacaaaaacagcccattaatccctgtttctgcagcttctgatgatctcaatgttgacaagcaacttctggkgattgctggaagcaagcaattgtcactgtgatcctttattacagtaaatagaatcatccaagcagaccggtg

SEQ ID NO: 325492 - DNA, 560 bp, Homo sapiens
gggcttcatgttcctgtgtcactgatgtagaagagtgggtccttgctcctggagaacatctagatggaccgtccctcctgataatactcagggcaaaaggaaagcgaggccagacagaataagaaatasttggggagaaccccagtgcccggacccctttgaacacaagggaagttagtctcccctcagccagtcctccagggctccttcactttccacaactgcccaagggcagaagcctccccatgccactcccagacaagggaccatgtgtgtccagtgggtcccacggtgaccatcaggacccagcttaggccccaggtgtgttctgaggacccttccctcctccccacccacagtggatccattccagtgtctctgccagggccaggctctgccccatcgggatcggaaatctgggcagatttgggatctagagcagggaggtctcagggttgaggcctgaagtctagcacggcacacagcagggctgagagcagaatccagggtcatgtctgattcccaggccggttaccgcctctctgaccccagatgtctca

SEQ ID NO: 325493 - DNA, 560 bp, Homo sapiens
gggcttcatgttcctgtgtcactgatgtagaagagtgggtccttgctcctggagaacatctagatggaccgtccctcctgataatactcagggcaaaaggaaagcgaggccagacagaataagaaatagttggggagaaccccagtgcccggacccctttgaacacaagggaagttagtctcccctcagccagtcctccagggctccttcactttccacaactgcccaagggcagaagcctccccatgccactcccagacaagggacyatgtgtgtccagtgggtcccacggtgaccatcaggacccagcttaggccccaggtgtgttctgaggacccttccctcctccccacccacagtggatccattccagtgtctctgccagggccaggctctgccccatcgggatcggaaatctgggcagatttgggatctagagcagggaggtctcagggttgaggcctgaagtctagcacggcacacagcagggctgagagcagaatccagggtcatgtctgattcccaggccggttaccgcctctctgaccccagatgtctca

SEQ ID NO: 325494 - DNA, 525 bp, Homo sapiens
tgtgggcaggtcctaccccagcagttctagttctagtgggcctgggagtctgcgtctgggattattctgctgagtagaaaacaccccctaatttcctttcatttttcagtccatttctctcccatcaggatctcatgggaaggagtgatcggtctagggctggatccgtgtgtctcggggtctctgagcaaaaagatatctgaataatacttcaaaatccttttaaaaagtttaacagcttttcaaaagatggcttgggttattgtcagtcctggatatatgatgatataaccacagsggtgggcctaaattttgctgtggacattaattatacgctggttttcttggtgtgtctgtgctgacttttaaggatttagggacaatacaaccccattctcaacagcaaaatatcacaaaaacaaaaacaaaacagaacagaacttgtcttctttgacttttcttcacaatcatggtgctgggtttggaaggatacactgatgataatggtgtccaggttttcagctg

SEQ ID NO: 325495 - DNA, 525 bp, Homo sapiens
tgtgggcaggtcctaccccagcagttctagttctagtgggcctgggagtctgcgtctgggattattctgctgagtagaaaacaccccctaatttcctttcatttttcagtccatttctctcccatcaggatctcatgggaaggagtgatcggtctagggctggatccgtgtgtctcggggtctctgagcaaaaagatatctgaataatacttcaaaatccttttaaaaagtttaacagcttttcaaaagatggcttgggttattgtcagtcctggatatatgatgatataaccacagcggtgggcctaaattttgctgtggacattaattatacrctggttttcttggtgtgtctgtgctgacttttaaggatttagggacaatacaaccccattctcaacagcaaaatatcacaaaaacaaaaacaaaacagaacagaacttgtcttctttgacttttcttcacaatcatggtgctgggtttggaaggatacactgatgataatggtgtccaggttttcagctg

SEQ ID NO: 325496 - DNA, 613 bp, Homo sapiens
cacttaaaataaaaggaaagttccctggtcggtttaacaacaaagttcccacagcgatcagtccactacaagccaaagccccatcacgacacaatacacccatgtaacaaacctgtacacgaaccccctcaatctaaaataatacatcacaaaaagcccctggcaagtgagcagcaggctcatggacacagtggcaaagacgcctttggcatgtgctgtttcttgcattattagcctcagaaacagccgaggccacgaacagtcagagaaacatgatgtatgcttccaaatggctggattctgtaccccttcctacaagcgaaagggaaatctgcacgcacttaaatatttctctttcctgcagcygggggagcagtgcttccctgggaggcactggccctgtaccaagagggctgcctggtgtggccgccccaccgcacatcagctatggggtggcgccctctgcggctaagctgtgaacaacacccctgaagcaaggctgatcttcaatctccttagccaaaagatacttagcagtaagttacaatgtttctttagagaaatacactatgaacctgatagagaaccacagtggaaggcacagagcactgaa

SEQ ID NO: 325497 - DNA, 603 bp, Homo sapiens
cacaaaaaagaaaattacagaccaatatgccttaagtatttagatgcaaaaattctcaataaaatattagcaaagtgaacccaacagcatatcaaagaaattattcaccataaccaagtggaatttattcctggagtgcaaagatggttcaacataaaaaaaaatcagtaaaatgcaccatattaaaaaaattaaaaggccaggcatggtggctcatgcctgtaatcccagcactttgggaggctgaggcrggtggatcatgaggtcaggagatcaagaccatcctggctaacatggtgaaaccccatctccactaaaaatacaaaaaattagacgggtgtggtggcgggtgcctgtagtcccagctacctgggaggctgaggcaggagaatcgctcaaacccaggaggcagaggttgcagtgagctgagattgcaccactgcactccagcctgggtgacagagtgagactccatctcaaaaaaaaaaaaaaaaaattacagaaaaaactatgttcatctcagttgatgcagaaaaaacaatttaaaaaatccaatattttttcatgataaaaacacaagaaactaggatagaaagtaacttc

SEQ ID NO: 325498 - DNA, 605 bp, Homo sapiens
tatttagatgcaaaaattctcaataaaatattagcaaagtgaacccaacagcatatcaaagaaattattcaccataaccaagtggaatttattcctggagtgcaaagatggttcaacataaaaaaaaatcagtaaaatgcaccatattaaaaaaattaaaaggccaggcatggtggctcatgcctgtaatcccagcactttgggaggctgaggcaggtggatcatgaggtcaggagatcaagaccatcctggctaacatggtgaaaccccatctccactaaaaatacaaaaaattagacgggtgtggtggcgggtgcctgtagtcccagctacctgggaggctgaggcaggagaatcgctcaaacccaggaggcagaggttgcagtgagctgagattgcaccactgcactccagcctgggtgacagagtgagactccatctcaaaaaaaaaaaaaaaaaattacagaaaaaactatgttcatctcagttgatgcagaaaaaacaatttaaaaaatccaatattttttcatgataaaaacacaagaaactaggrtagaaagtaacttccctatcatgataaaggccatatttgagaatcccacagc

SEQ ID NO: 325499 - DNA, 639 bp, Homo sapiens
taaataatcatgtacctcttgatctgatgcattaaggaggacacaatgtcagttcaatggtcctgccaacattgcataacctgaatctaatactaagaaaacatcagctaaacccaaagcatttctacaaactaactggcctgtactaataaaaaatgtcaacatcatgaaagtcaaagaaagactgaggaaatgttcctgattaaaggaaactaaggagagttataattgcatcaaagttaatttcctatttctgatcattttagtayagttatgtaagatactgtccttgattttagaaaatatacactgaataggctgggcgcagtggctcacacctgtaatcccagcactttgggaggctgaggcgggtggatcacctaaggtcaggagttcgagaccagcctgggcaacatggtgaaaccccatctctattaaaaatgcaaaaattagccgggcgtggtggtgggtgcctgtaatcccaacttggcaggcagaggttgtagtgagcctgagattgcgccactgcactccagtctgggcgacagtgtgatactccatctcaaaaaaaaaaaaaaaaaaaaaagaaaagaaagaaaacatacactgaaattttaggggtaaagggaaatcatgtct

SEQ ID NO: 325500 - DNA, 460 bp, Homo sapiens
agtcttccagaagcaattctttatataattgacgaacttggcttccactttsggaagaaaaccagctttttctgtacttccttgctgttttgctttaatgtcttctacagaactaggttctcttggtgttttaggaagtttgtttggttttttttctcctgttttttgaaggattcttgatcttggtgttgatggttttgaatcttttccattttggtttgatttttgtgcatttttggctggagtgtctcatacagatttcttcagtggagcttattcttgtctcctcttcctctccacaacccgggtaaccttgctaccacctccaggggcagatcactttccaaatgtacctaagagtttcatgtcctcctcttcttgatcttctaagcctcttcaccttcctccccagctcctaagtgctgttacctgatatgcacaggccctgaaccatacttca

SEQ ID NO: 325501 - DNA, 460 bp, Homo sapiens
agtcttccagaagcaattctttatataattgacgaacttggcttccactttgggaagaaaaccagctttttctgtacttccttgctgttttgctttaatgtcttctacagaactaggttctcttggtgttttaggaagtttgtttgkttttttttctcctgttttttgaaggattcttgatcttggtgttgatggttttgaatcttttccattttggtttgatttttgtgcatttttggctggagtgtctcatacagatttcttcagtggagcttattcttgtctcctcttcctctccacaacccgggtaaccttgctaccacctccaggggcagatcactttccaaatgtacctaagagtttcatgtcctcctcttcttgatcttctaagcctcttcaccttcctccccagctcctaagtgctgttacctgatatgcacaggccctgaaccatacttca

SEQ ID NO: 325502 - DNA, 560 bp, Homo sapiens
tttctatttttgaaatgcatgatctcctgttgcaaaaagtaatttacaagtatttaacattaaaaagcaatctgttatagttaaaatagcctcttaaaatcaatatttggaaactagaaaatttttaaatcatatttattataccaataacagtagttaaaaattttttttgttttttaagacagggtctcgctgtgtcaccctggctggagtgcagtggtttgatcatagctcaccrcagcctcaaactcctgggcttaagcgatcctcctgccaacctgagtagctggaactacaggcacgcactaccatgaccagccaattttgtattttttgtagagatggggtttcactgtgttgctcagtctggtcttcagcgcctgggctcaagtgatactcctgcctcggcctcccaaagtgctggggttacaggtgtgagcactgctcctggcccagtagtaatagttgacattcatatagtactttttcatttaaggaaagctcacatggcttcatttaatttattgtagtctaatctgttagaactattgatattatag

SEQ ID NO: 325503 - DNA, 590 bp, Homo sapiens
ccagtagtcccagctacttgggaggctgaggtgggaggatcactggagcacgggaggaagaggatgcagtgagccaagattacaccactacactccagtctgggtgactgagggagacctagtctggatgaccaaagaaaaccttgtctctaaataaataaataaataaatattatacctttatatgtggcaggtgtgatgtatgttcacactcgtgtaaatagctaaagaaaaacattttttaaatggtcgccaaaataaggattatctcaaggatttcagttgatttttaattttttctttcacctttggtattgtctaaatattttacataaaaatagtattacttaagcagaaatatagccatcttcattcataaattcatacacacatatcgtctgcacaggagaggaacattatgaaaagtctggggtacatttgtatgctgagattaaaagattgtcaagatacataaataataaaaaatgtacgttcaaaatatgtcgagtatgactcttctgatattaaaatatgtacacaygtacagatgcttgtgtgcccatatttaaatgcaaatacaaagggaaaag

SEQ ID NO: 325504 - DNA, 582 bp, Homo sapiens
ttgttttacgtatcagatttacattttccccccagtttttgtatccagtttctaccctactagactgagttctttgaggacaggactggatcttgtcaatctttagatccttagcacctaatgyagtagtgcctgatgctgtgtatttgaccacaacggattgcttaagaacatattctccgtacttctggataagatgtcagacagtaaattataatccattcttttatagtatgctatctgtattcagaatatttcagaatttcactttataaactttatatttttaaggtattactgtatgttagaaaagtctttacaattgctttataatcctttattggggcctgaatcattttggattggtttgcagttcttcttagatttttattgcatcagtggtcatgttagctttgagataaattccacattttacaagcttgaaataatttcctaatagttatgtaaatttattctgaaccacagtagcctcatttccatggtaactaaccaccttcagaagagaactttcagatattctagaaaagaccagaaatatccatgtgaaataaaatgaactaa

SEQ ID NO: 325505 - DNA, 576 bp, Homo sapiens
agttctaatgattagtttctctctcaatagatgggcttattaaagtctattaatttttgcttgaatgctgaacacggtatgctgaacaacagtaagtattatttacacctgaaaaatggtatgcttatttttctgtcatgtcattagtgtgaaagagtttagttaatctagtcaggaattgagcttggaatggattttattgttatagttaccttaagtatactataggtttcaaattcctctactgggagactaccattgtcctgtgcttaggagccagagagtttctctctcttttttyttcctttcctctgagttttcaaccactccagcataccaataccacaggatatccctctgtgctcttgacctttcccaaacagtagaaagttcatggttgaggcagctaggattctccattgttctggtccagcctcagtcttaggtaggccctctggctcttcttcctgtggcagtcaaaatctgccttgtatttgtattggtcttaggtagaagtttcctactcttcccctagtagtaaaagacctctccttggtatcagtgtagaatcctgag

SEQ ID NO: 325506 - DNA, 633 bp, Homo sapiens
  misc_feature (1)...(633): n = A,T,C or G
actggtattcaagttttatatatctcttacatcccttattatattgtaaactctaaaaaagaagagctcagatctagtaagttactgtattccttcttttagctttcctgtataaatatttatcttgcaaattaaaacagcaaaatagaaaacacaattaataacatgacacttactctccttcttataatctatgcatctttaatacatgcccaataacgtcactaaaaaatttcatcagctcataaaacgctattctcaaaaagagagaagcaaatacactatgactacaattttaacactatccawatattttcagaggaaagcccaattaggattagtttaggaacttcctggcatacttaaccatttctactgttagagttagatttgtaacagtaatctcaaacacaaatataatgaagtgcctttgcttagttccatgtaaataaatataccccaaatagctacgaggtttactaagaaaagtcactgccacaagtaaaaagaaataagcctatctacctcactaattctgctagtgccttatttggtaattgtactcaggcatttcaccacagatggaaaaatggcatgcttctactaaaatcatttccaataaannnnnnnnnn

SEQ ID NO: 325507 - DNA, 633 bp, Homo sapiens
  misc_feature (1)...(633): n = A,T,C or G
actggtattcaagttttatatatctcttacatcccttattatattgtaaactctaaaaaagaagagctcagatctagtaagttactgtattccttcttttagctttcctgtataaatatttatcttgcaaattaaaacagcaaaatagaaaacacaattaataacatgacacttactctccttcttataatctatgcatctttaatacatgcccaataacgtcactaaaaaatttcatcagctcataaaacgctattctcaaaaagagagaagcaaatacactatgactacaattttaacactatccatatattttcagagraaagcccaattaggattagtttaggaacttcctggcatacttaaccatttctactgttagagttagatttgtaacagtaatctcaaacacaaatataatgaagtgcctttgcttagttccatgtaaataaatataccccaaatagctacgaggtttactaagaaaagtcactgccacaagtaaaaagaaataagcctatctacctcactaattctgctagtgccttatttggtaattgtactcaggcatttcaccacagatggaaaaatggcatgcttctactaaaatcatttccaataaannnnnnnnnn

SEQ ID NO: 325508 - DNA, 633 bp, Homo sapiens
  misc_feature (1)...(633): n = A,T,C or G
actggtattcaagttttatatatctcttacatcccttattatattgtaaactctaaaaaagaagagctcagatctagtaagttactgtattccttcttttagctttcctgtataaatatttatcttgcaaattaaaacagcaaaatagaaaacacaattaataacatgacacttactctccttcttataatctatgcatctttaatacatgcccaataacgtcactaaaaaatttcatcagctcataaaacgctattctcaaaaagagagaagcaaatacactatgactacaattttaacactatccatatattttcagaggaaagcccaattaggattagtttaggaacttcctggcatacttaaccatttctactgttagagttagatttgtaacagtaatctcaaacacaaatataatgaagtgcctttgcttagttccatgtaaataaatataccccaaatagctaygaggtttactaagaaaagtcactgccacaagtaaaaagaaataagcctatctacctcactaattctgctagtgccttatttggtaattgtactcaggcatttcaccacagatggaaaaatggcatgcttctactaaaatcatttccaataaannnnnnnnnn

SEQ ID NO: 325509 - DNA, 603 bp, Homo sapiens
tatctagttatggttaagtgtcctggagttataatgcctgaacataagtgaccattaaatgattaggtttttctttgacactttactattttgtaatcttttccrtgtaaaaatactttccaagttttaacagctatgccaaagtccatctaactgatgtatccactccttttaaccatttctcagagctaaatatttaaaattctttttttatgtaggtgatgttttttcctatttctgcattattttatcaggagacattcccaggagtgagattattgggtcaaagggcatgtgtacttttatagctcttgagatagtttgtcaaacatattccagtgagtgagtccagtttcacctgtgatgttgccagaatttgatgttactatttaatttatttacaactttaatagatataaagtgatgcctattattttaaatttgcatttctttcacaactgtgaaggtaatatatttaaaatacatttatttgctatttgtatcattttaaaatgtttctttatatgagtgaatattaattcagggaatactgagtttattggtcacattctgggcaagggcaggatagaagggagggttaga

SEQ ID NO: 325510 - DNA, 516 bp, Homo sapiens
agtggaaaagttaagaggcttgaactctagcagactggtttcagaatgagtgctttcaattgttgtgttaagcagcacgaaggaaaatatgatagaattaagatagtcttttcatgtgaatgcttagaagttgctttaataacaccacactgaatttcttcagatgtaagygttggttaatctctgtttctctgggttatgatattaatgtatggtcttatgcatattccccagagagagaaagatggcaaaaaaattaggaaggtattctatttttgtgtgtatatgtttgtaaggagtgcagagaccatctttttagaggaaacaatttcaaagggtcaggtgataccacataacccgttagtcacagaggtagcactggaactgaatttcaccattctaggccaccggtatttttctttctttcttggaatttgtttgtcacctccctctgccttcaaagggtgctctcttcatgataattcagtgtgagaagtttgtaaaggaggtaatgac

SEQ ID NO: 325511 - DNA, 516 bp, Homo sapiens
agtggaaaagttaagaggcttgaactctagcagactggtttcagaatgagtgctttcaattgttgtgttaagcagcacgaaggaaaatatgatagaattaagatagtcttttcatgtgaatgcttagaagttgctttaataacaccacactgaatttcttcagatgtaagcgttggttaatctctgtttctctgggttatgatattaatgtatggtcttatgcatattccccagagagagaaagatggcaaaaaaattaggaaggtattctatttttgtgtgtatatgtttgtaaggagtgcagagaccatctttttagaggaaacaatttcaaagggtcaggtgataccacataacccrttagtcacagaggtagcactggaactgaatttcaccattctaggccaccggtatttttctttctttcttggaatttgtttgtcacctccctctgccttcaaagggtgctctcttcatgataattcagtgtgagaagtttgtaaaggaggtaatgac

SEQ ID NO: 325512 - DNA, 382 bp, Homo sapiens
cccacaattcaacagctatcaccttgtggccaatttatttcatccatcctcctttttcccaaagtatttytaaagcatatcccagatatcatattattttatctgtaaatattttaatacatatctatgaaacatcaagttagcattcaatcttctaaatgtgtcataaatgtcacatttttaaaaatcttattttgtttaaaccaggatctaaataagatacatccattattattggtttacatgtcttaaagtctatagatccctacactatcttttttttgtttattccttgcagtgaacttggagaagacaattatattctctaaattatctgaatgtaagcatctctgcggcagaaactgtttagacattcaccaaa

SEQ ID NO: 325513 - DNA, 518 bp, Homo sapiens
tgattttctttctttcttttgccttattgctctagctaggacttccagtactctgttgaataggagtggtggaaacaggcatccttgtcttattccagatcttagaggaagggctttctgcatgatgttagtggtgggtttgtcatatatggccttttttattttgaggtatgttcctcccatatytagtttgttgagagtttttaatcatgaagggatgttgaattttaattttattaaatgctttttctgcatctattgagatgatcatacttttgtattattatactttaagttctaggttaaatgtgcacaacgtggaggcttgttacatatgtatacatgtgccacattggtttgctgcaccaattaactcatcatttacattaggcatgtctcctaatgctatccctcccccagcccccacctcatgacaggccctggtgagtgatgttccccgccctgtgttctcattgttcaattcccacctatgagtgagaagatgcagtgtttagttt

SEQ ID NO: 325514 - DNA, 552 bp, Homo sapiens
aagtcacctgcagtaagagctttcctaggaactcacaaytggggatgacaataccagccttatagaagtgtctttaaaactaaatagagaaaactgtgtgaaaaatgttacacactcagcccacagtagcagcttttaaacaacaaaaatgtattttgttttacttttcgaaaaccaaatctctttcagaagaacctgttgcactggtatatacaccacaaactcagtgtttcttcaaacagatatttgaaatggttttaaccagaactgtaacataaatttcaaatctccaaaccctggccacacatttctaaaacgtctgcctcagtattttaagattcaaacacccctacaaaaggccagtgactcttacaaaacctagaaaacaaaattctgaaatgaagaaagtgaaaaaatgtatatattctagaggtatttatttctaaaggcaagtcagcatctacacagatcagtactgacaactggctttcaaagactctgtgaatgttctaagttattattgtttcccttctgccccattgtcatagggcc

SEQ ID NO: 325515 - DNA, 629 bp, Homo sapiens
ggcttggcagtcagttgtgtgacattgagtcaactatttaactttctaatcatcactttccccatctctgatgtgagagcagtcattgtatgttcctcatggcattgacaggaggacagagtgggactcaacacctatctgccatacacctgcttatttagggctctcataaagacctcacaggcatatttgtcttctttgcagggatgttctctataatagtcccctagcaacaacaacaacatcaccatcaccatcactgtcatttacatgctgcataatggagattcactgagcatcttctgagcagagaggagacccaagcaaaaaaagaaagagaactaagcctgagactttctgaagcttgttaaaaagtacaataaaaaaaaacaaaagtgatcattagtagggcatttattatgtgatagtcaaggaastaaacactttttatccactgtgtcttcttcagttctcccaccagccatcctatgaggaagatgctattactacctcacattttagaaatcagataactaaggattagaaaataaaattacttgtttaatgtcacgctgctagaagtggcagagctctcagtgccaagcctgcaacctccacaaagaggagaa

SEQ ID NO: 325516 - DNA, 625 bp, Homo sapiens
tttttgtaatgtagagtctacgcttctttcctttccctcacaaagcatcctcaccatctactcagaaggtaaagacagttaactactaagcaaaacagaagtcaggtaaataaatttttaaagatgatatagccttatttttagtaagtatttttcttggggttaatgggcacaatcttggtctgggaataaagccacgtaattaaaagattcccttgcctctttaattttttttcttttttcattgtatcaaagacagtagatacaaaagaaagacacttagaaggagccagckgtgtgtctgtcatcagcctgaaagctgggattgtagaccccaagttgcagacagagtacggcgtgtgattaagggaatgtcctgcctctttgatgtgagtccaaggcagaggagttccaccagagaaaaaggtgggagctcaggggcttgccttgaataggcaacaaaatcagatgaatagctgaaagtagctaactttggcagaagacatggtacaaaaaggccttcatcacagcacggcaaaatgcaccacatagaaggcctacctctttataaagacacaagctcagctgatgtgcatgattctggcaactgacacagaaagaatgt

SEQ ID NO: 325517 - DNA, 625 bp, Homo sapiens
tttttgtaatgtagagtctacgcttctttcctttccctcacaaagcatcctcaccatctactcagaaggtaaagacagttaactactaagcaaaacagaagtcaggtaaataaatttttaaagatgatatagccttatttttagtaagtatttttcttggggttaatgggcacaatcttggtctgggaataaagccacgtaattaaaagattcccttgcctctttaattttttttcttttttcattgtatcaaagacagtagatacaaaagaaagacacttagaaggagccagcggtgtgtctgtcatcagcctgaaagctgggattgtagaccccaagttgcagacagagtacggcgtgtgattaagggaatgtcctgcctctttgatgtgagtccaaggcagaggagttccaccagagaaaaaggtgggagctcaggggcttgccttgaayaggcaacaaaatcagatgaatagctgaaagtagctaactttggcagaagacatggtacaaaaaggccttcatcacagcacggcaaaatgcaccacatagaaggcctacctctttataaagacacaagctcagctgatgtgcatgattctggcaactgacacagaaagaatgt

SEQ ID NO: 325518 - DNA, 571 bp, Homo sapiens
  misc_feature (1)...(571): n = A,T,C or G
ttttcagtatttttctagaaacaaattctataagcttggangcaaatgatatatttgttataataccttgaaccttcatgctattgagtatattatgctagaataacacaagatctgtctttcatttggtggaccagaacattcgtaaacattttcctgctaaccagtttctcctctagcattcttatatcctccagacaaagtcacctggcctagagaattacccataaatcttttttaagattgcatctccttttacaatgcaactctgtgtaaaatttctcatctttaccttcataactcctctgtgacaggaagacagaggatraattgttttaagctctctatacatattaatttattctcataagaagcctatgaaatagatactagtaaaggtgattaaaactgaggcacattggggttaaaaaaaacttactaaagtctttcagttagaaagatgtggcaccagaattcaaacccgcaagtctgacccacatatactctatgcctgttacactacacctctgctgatgaaagtaaatgggaaacctacacagaaaataatttc

SEQ ID NO: 325519 - DNA, 536 bp, Homo sapiens
tttttttggtaagttacaccatgcaatatatcattcaagcttagaatctccattgatggcaagtgcatttacaggtcataaaaacactcaacagagacacttctaggaaggagttgtttgttttctgtctgaaaatactttcttctgcacaagaaacaatatcacttcgattttgacaacttattccactggtgtttaatacctcacctctttagtatatacctcagtttccccatcagaacaatgaggtaatgaactagagcaactgttctcagggttttttgatctcaggacccctttacactcttcagaatcatcgagaaacgtaaaaagcttttgtttatgtgggctgcatctaycttaacatggatgcatgttttctaaaattctaatttctgcttgaaagctcaaattttatcattaccagcaaatactttcagatgtttttcagttagcaggcttacttcttttattctcaaaaaaatgtatgcctgcttcccaagtctgaataactctagtttttcaattatttggtc

SEQ ID NO: 325520 - DNA, 568 bp, Homo sapiens
  misc_feature (1)...(568): n = A,T,C or G
aatgtttgtgcttcagaagataccattaagaaagtaaaaagacagaataggagaaaatgtttggaaatcatgtatctgacaggggacttgtatctagaatatacaaagaaccctcacaactcaataataaaaagacaaataatctagatttttttaatgcagcaatgatctgaacagacatttctccaaagraaatatatgaatggccaataagcatatgaaaagatgctgacatcattagccatcagggaactgcaaagcaatatgcaatgaaataccacttcacacccactaggagccagtaacagggttgagaaaattatttagaaggaattacacctgatagaggtagcttctttatccaaagtgaagcattgagaattctctggccattgtttcttagaatattacatgttttaaagtccttagatgcaacagaaatttttctacttgagcgtttttgaaaacattcttaaatcaacaagtgttacattatgtgtaaagggattttaaaattatataaatgttcactgtcaatcacatttcttcctaataannnnnnnnnnnn

SEQ ID NO: 325521 - DNA, 540 bp, Homo sapiens
aatatttcttgcataaattcccttttataaaatttttcatgacttacacaatctctgacatgctttgactttctgacttgttctaaacaaccagtttaacctctttaaacaaccagttaatttactttaggataagaatttaccatgcaagattcttttttatgtaaattctgttttctttagtatcaaagataacagtcctttcccaaaatgaacttccttcatgtctgcgaactagactgcctaaggccacaagattagaagttatggtatttcattaaatagttcaagatgtagctatctttattaaacaaatattaatgtttcatttatttaaaaattacacaagcaaagattattctgtttgggctgagtatagtttcgtaagctctatgccaaattttgacaccttatagtatttggcagagataagtatgaaattgcttgatcaataaatacaaaaaaaaatgtatgctggmaactcttaaggcatttctaattttactgtaccagtaagttttaaagactaaagtcacgtga

SEQ ID NO: 325522 - DNA, 497 bp, Homo sapiens
agtttttaccaaagtgaaaacacatctacatgtgtgacttagagctggagtgttcgtcatttttggcttcattagcctttatttagtcagatttgtttagtctcctcaaggtttgtaagaactgccatcttgtcaccagactgacaaaacaagactttattatcagaatttctatataaaatcatgttattttttaaaaaagcaaatttaccacagacctmtaaaaataaggtaagcaaaggcatgggcatatactctaagccttgtcttgatggtttgagctatagtttctcatttgacaaatacaaacactaaagtgcactgctttgcctttggggaaaaacaaaacaaacaagtctccagctgtctgtaacacatgagttcctgtgtaacattgagaccaagagaaacagaaaaaaaggcaggggcaggatttgccttccttcccctgattcaatgcttttttatacttttcccaatgataagaagagtaatta

SEQ ID NO: 325523 - DNA, 425 bp, Homo sapiens
atgtatatatatacacacaacttgtatttgccccttctatatctatcaacatacatacacacacaatgaaatattattcagcctttaaaaagaaggatgtctggtcatttgtaaaaacaaagataaacctgaaggaccttaygctaattgaaataagccaaacacagaaagaaaaatacttcatgacctcacttatatgtggcatcttaaaaaaaaaaaaaaagtccaatacatagaaacagaaagtaagaacgtggttaccaggggttttgtgccctttcatctatgtctcctgttaacagaagaatgggtgcaaagttgcaattatgtaggataaataagtatagagatctaatgtataccatgagagctatagttagttaataatataacattttatactaggaatgtgctaagaaaggaga

SEQ ID NO: 325524 - DNA, 541 bp, Homo sapiens
tgaacaaaatacaaataaggatggagagcatctgaataacataattttgattcaacatatatgatatttgtattctgccagagaataaacattttaaacatccatgaaacatttatagcagttattaattgaaaacatcaaactctaggaggtagaattatacaagttgcaatcactggccaaaatgcagttaaaactagaaaktagtatgaaaggtgtcttaaaacaaacaaaaaaattggaaagtgaaaatactaacctacacaatgctgaaaacaaacaggatataaagtggtaatcctgttttatatgtgtgaaatgctagtttattttcttcaattgaaatcagactagaaaggccaatatagtatataagacagacaaaattggtggtgttctccaagccagttctacacctatcaccagcagtggtcataggagaacctaccgtttcagggaacaaacttccaaaaccactattttagagttatttttgtaaactaaatattttaaagttttcatttgctaaaatatgtgtata

SEQ ID NO: 325525 - DNA, 569 bp, Homo sapiens
ttataatgtagagatgtggtttggtgggaggaaataaagcatgatacaacaaagttaaccaaaaggatcttttatgtaagagaattaaatagtagagaagaaaagttgatagttcactagggaaatttatttttacatgagaacatgatacgaaaggacttagtaaaatcagtcaaatggggaactctacacgtgctatgactttgaagccttccctggtcccctcagtggctcgggctgcctctgatacggggccgctgtggctggtcctaaagacaagaaaaatgcaaagttcaagaaggtcagggaaatgtttttgccaaagagcaaggactcttggagatgtctagggtagtggcaamagacaaagatgcctaaatatggatggtgcccaatgccaagcggagacaatttcaacatcctgatgacagtggttaaagtcaagcagaacaagttgagcctataaacaagtccatgataatactcagatggaacaaacagcaagcacgccaaggaaaaagcacatgagtttccaataaagtttacaagctgttcaattagttcaacaa

SEQ ID NO: 325526 - DNA, 493 bp, Homo sapiens
tttctaatctctaaagtctgagtcctgaagaccttcctccggagcctcagtaaatttacttagtctagatggatccaagtgctagggtgattacccttatcttgtctcctgctaaatcatggaggtttggggaattcctttagaccccartaaaacttgtttgtggatgtctggggaattccatcagaccccagttaaacttgtttaatcctaaacgggtcctgttaagaattccttaaaaaaaaaaaattcctttgttatcttgtcatgcttcaaggcccaggaaaagcctaggcaaaacaaaaggtgggcttttgttacatatcagcctttgtatagggacagaggctctatcagcttttaatatttaacttaaccactcagtcagtgctcaaacaattgtcatggaggtctgcccgttcagctgttagtgagacctagcctgccacaaaaggaagaggtatctatgacctaaaccaagggcatgaagaaa

SEQ ID NO: 325527 - DNA, 514 bp, Homo sapiens
atttgtggaactattttttcttttttcttgaatagagagtattaatacatgtttaccatggctcctgaatgagtgtatgatcccctttttctattgaagaaggattaatattatgtaatttcattgatttgaagttcttttcttagggacctttctggatcctggttataatacccctcccaaacctacttagggagaagtttatgtcttagtttaaggcctgttcttgttcagtaaactctgctgacattaaaccctagcaaggctgtgaatacatttctttatcaagttacaatttctgtttccttaaccttcagttgctggaatggaatggcccccacattcatacattttaaccctaggccatgggcacactattttatttttctgcttctaataggaacagcagctgagggccctagcctgctcaaaggcttgaaatttcccaagcaraagctgaaagaaatacaagtggtacagagatattgtctgggcgttgcattttatcaggaaa

SEQ ID NO: 325528 - DNA, 584 bp, Homo sapiens
atttacacaataaatactgtgaaacaaaattagaacaggcctgtttgtggctcttaatagtacaaattggaaactggagaaaaaccgtgatttatttaaaaacatttttgtaaaagcttttgccttttctggagtgtgtctcttgatgatacataatgattctattcaaggtctatgactattacatgaaaaacactaccacagtcacacacacaaaaatctgtcaagttaattggaacctttttgtattgttggtggtgggaatgtaaaatgttgcagctactgtggaaaacagtatggtggttcctcaaaaaattaaaaatagaatgaccatatgatccagtaattccacttctaagcacrtaccctaaagaattgaaagcaaggtctcaaagagatattggtacacatatgttcataggagcattattcacaacagccaagagatgcaagcaacccaactgaccattgacagatgaatgcatgaacaaaatgtgatgtatacatacaatggagtgttattcagcattaaaaaggaagaaaattctgacacataccacaacgtggatgaaccttactaagtg

SEQ ID NO: 325529 - DNA, 577 bp, Homo sapiens
ggccatacctggtagacacctccaggctggctgtgaaaccacatgcctgtgcccccagccggaataacatcactgtggccccaacctcagcaagctgacccaagttggctgacacactgcgtatgtgcacatgcccacaacctgagaaacagcccagtgagcccacacctggcaaagttaaactgccaacacaaatggtcatagcctaggccactgagacactcataaacatcactggtgtggattatagctgaagaaaatacatataaacaatagtattgtgtccacctagaaccaaagccaatgcactccaccaaattgacatcccaagacccacccatatgagtaagtctttttctacaaagtgcaytccataaaattggaagaggtgaattttccaccagatgcatagacatcaatgtaggtatacatcaaacatgaaaaagcaaagaaacatgacacctccaaaagaacaaaataattctccagtaacagaccctaatcataagaagatatacaaaattccagaaatgaaattcaagataagaatcttaaggaaacacagtgagatacaagt

SEQ ID NO: 325530 - DNA, 474 bp, Homo sapiens
gacacaaaacaagtctcaaaaagtttttaawtatcaaaattatatcaagtaccttatcagactacaatataataaaaccagaaatcaatacaaagaaaaacgttcaaaactgtataaatgcctggaaattaaaaaaaaaaaaacatgctcctgaatgaccaataggtgaagaaagaaattaataatgaaattaagaatcccttgaaacaaatgaaaatagaaacacaacataaaaaattctatagcacacagcaaaagcagtattgagtcaactttatagcaataaatgcctacatttaaaaagtagaaagatttcaaataacctaaagatgcctctcaaggaataagaaaagcaagaacaaatcaaactcaaaattggtagaaggaaagaaataataaagatcaaagtagaaataaacaacattgagactaaaaaaatacaaaatatcaatgaataaaaagttttttttaaag

SEQ ID NO: 325531 - DNA, 611 bp, Homo sapiens
ttatagcaataaatgcctacatttaaaaagtagaaagatttcaaataacctaaagatgcctctcaaggaataagaaaagcaagaacaaatcaaactcaaaattggtagaaggaaagaaataataaagatcaaagtagaaataaacaacattgagactaaaaaaatacaaaatatcaatgaataaaamgttttttttaaagttaaacaagattgataaatcattatctgaactaaggaaaaaagagagaaaacccaactaaataaaattagaaacaagaaaggggaatacaaaagatcattagagactactatgaacaactacatgccaatacatttgaaaacctagaggaaatggataaattcctagaagcaaacaatctaccaagactgaaccaagaataaatagaaaacttgaacacagcaataacaagtaacaagattaaataaaaagtctcccaacagaaacaagtctaggaccagatggcttcaccactgaattctgcccaatctttaaagaagaattaataccaattcttctcaaactattcttaaaaatggaaaagaaaagaaccctttctaacttattctattaggccagcctacccctgata

SEQ ID NO: 325532 - DNA, 594 bp, Homo sapiens
taccaaatattaatgaagatgtaaattgacaggacatttttgatgctgcagatgggagtgtaaattgatacactttaaaaaataattgagaattctattgtaatggtgaacattcccacatcttatgattaagtaaattctgtttctaagtgtgtgctgtatagaaatttgtatacaagccctgggacatcacaagaatgtttagaattgcattgtttgtaaagcccccaagctgaaaacaactwgaatttcaatcagtaggagagtggacatataaattgtactaaaaagaatcacatgctggtttcacagtgaaacttcctgtggcagtgtaatgagtaactagtgctctctgcaacaatgcacataaaacacggacagtgtttggcctcaggagcaggactgcagctggtggataacattctggcttctcattctcattctttaaatgagataaatggtggataacactgtggcttctcattctcattctttaaatagacaattcaggatgtgttctatctgtttctcgtggtagaattccctcactagtgaccatgatgaatgcccttcagtgagtttctctccttcccc

SEQ ID NO: 325533 - DNA, 546 bp, Homo sapiens
agaccaacaccaactcttgccaccatgctgtggtcgtagtctgatgttctagtgacattgctcacacagtgcagttctggttacagcagtgtaatgtgttgtgttggaattgtggtcttatgagactgtgtggcccagaaggtcaacagctgtgcttcacagctcctggtgtctctaagcctgacataaaaatagttactggacatctgtttttttgggtaaatagcttatgatattcctggagatgagagatggcttagaaaatgggcaagcaaaatatgaatatggaatttttcagaattcttcttatcaagatctaaataggcattttaaacrtctgcagcaatattccagtgagaaatggtgttcacgggaaaccctcaggacagctaaatggcaatgtctggagacgggaagagagttcagggctcaagtcattgatgtgagaatcacagcgggtacctagtgtggagagtcacagctttttaggagcctctgggcacacaagtgcttcaaatgatttaaggccccagggctctctagacc

SEQ ID NO: 325534 - DNA, 575 bp, Homo sapiens
tgataatgttgttttgatgctcagtgtttgagggaaacacaatctagtgaatggggttattggttgtcacacctgggagagtgaaaatgaggggctcacaacccaggtgaggtcatctggtgccactcagccccatcccagagaaagcagccttgggatgctggcctcggtgacaaccaagaagtgatggtgggttgctagagacagggtggagcacagagccctggaaggaagcaggaagtcaggttcaagaaaggacttgtgacctcacccttggcttcagggttttatttttctttcttttaaaacattttgagacaacatgtagacattcaaacttacagaacaaagaactattttttccctgaatcatttgagactaagttccctcctatcaccagacatttctacaaatgaggaccttcacaggactaaggtgccaccatcagaaccacaatatgtggggacggtactgccagctaagcctyagtgctgtttcggtgttgacagctgtcacaatgatgcccttttcagtagaggagcctgtgatggtcacgtgttgcaggtgatcattg

SEQ ID NO: 325535 - DNA, 553 bp, Homo sapiens
gaccgttttccgaagtggctgtgccatcttgcgttcccaccagccatgtttgaggaatcctgtcgttccacattctcatcagtgtttggtgttgtcagctttttttttttttgagatggagtttcactcttgttgcccaggctggagtgcagtggcgtgatctcggctcactgcaacctctgcctcccaggttcaaacgattctcttgactcagccttttgagtagctgggactacaggcgtgcaccactgcgcctggctaattttttgtacttttagtagagacagggtttcaccatgttggccaggctggtcttgaactcctgacctcagatgatctgccctccttggcctcccaaaatgttgggattacaggtgtgagccaccrcacctggtctggtgtcagctttctaaaagtcattttggtaggtaatggtattattgtgacttgacttttcctaattactgataatgttgagtatctttgtctgtacttaattgccttctgtatcttggaagacttagttttaaatgaagattattttaattgtaaa

SEQ ID NO: 325536 - DNA, 593 bp, Homo sapiens
cctggtctggtgtcagctttctaaaagtcattttggtaggtaatggtattattgtgacttgacttttcctaattactgataatgttgagtatctttgtctgtacttaattgccttctgtatcttggaagacttagttttaaatgaagattattttaattgtaaaagtaaacrctttacttaaagttctaagaaattctagtttgttagaaattccgtatgttacttaaactctttttcctctgtatacattgtttcttctccttatgtcatcataccagtagtttctaggaaataccccagctccctaatctcatcttatacatgcgcagtgctctgagcccttcagtaaagccagaaggcaccaggatggccttgattcactctttcctgactaatcctttattaacaggccatgtctgagactctcattggtaaaaagttactgggactgagtacaggagatgaaggcatattaaaaagaaaaccttctatatttggcagttctgagcccagagtctaaaatagccaggccaaacaattccattgtcatggccactgggccaaggggactgactcaaaatgtaaactgtga

SEQ ID NO: 325537 - DNA, 554 bp, Homo sapiens
ttgctaaaaggattctcttatccaggtatttgttccccttcgttgaggaagcattttaaaagggaaaaarggaactgaatagttatttatggatggcatttacttacatttttctcatttattctgcaggttgatgcagggaggtcaagagagtccccagttaacacccaggaagggctggagtaagaccttgacctgggcctgctttacccaaggcccatgctctctgctccaggtcatcttgatggcctgtagcatggggctgtaaagtctctcttgttacatcacatcaaggaaaaattgggtacaatttttcctaaagggaggctggccatatgaatttgctcagaagggtcccagatactgccctccaatttgtctttccaaattgatttggatgacaaattacatggttttcctatcaatgggccgtgacactccctttctccagggtcttggagataagactccaacttcacctgaaacttaccaccaggtataaaaactgaggccagacaggctgcccctgcaaccatatttgatgcagcccaagg

SEQ ID NO: 325538 - DNA, 617 bp, Homo sapiens
atgacttggatcttacatttccacattatttatttggtgtttaaattagcttctaggagctgtggtacaatttggacggtagaccctttgaagagactgaaaatatcactattactattctctccccactcagaggaaactttagggtggagaaagcagagcatggcacttgtgtcaccatttcccaatactcatgcccaaggcagacatccccagtgaatcacagtattcttcatcacagataaggccaacatgacactccagacagaccataccaatcaatcagagttaccaaggcaagtaaaatatrttagtcatccctgcctaagggaaacacatgggaaataccagaaactcttagaaacccctaatgtgagattatctgaaataaagcaaaggggatactggattatcagaccaaatctctctcccatgctacaacccatttatttagtttctcctggatttacccacttgttcttcccatggctgtcttgcctaagaattaaacatctcaactctttcccagaagcctgtttcttatccaaaagccaataaaactctgtgttttaccagctcagactgcagtgacaaaatgccatggaccgggtacttaa

SEQ ID NO: 325539 - DNA, 539 bp, Homo sapiens
cttgacccctctgccagttctcaggcctttgcaaagcccagggccaccctgagggacctgcctctcctccttgcaagaggagctggatgttcagccgcaccctgctttgcagcttgcttcctgtgtttctgcttagaaatccctgaggagggatttagcatttgagggaggaaagaaccacatatccccctacacgagtgttattttctttggagatccaactgtattaacatcctcagagaaatctgattataaaaaaaygggggatggggtaaggaggattcagtaagagttgccctccgctcaccttgtaccctaggtgcatacctgagtctcccaggtggctgatctcccagaataagaatgctgaagccatgagaatcattaagcacatcgcaaagaaaaatggaaaatctctacccgcctcccttcaggtgagccagggccttaagtatcaaatcaggggatggagaaaagggaggctctggtaagattcatgcatgccagtgatctcagcagggaaccatggaagcacccac

SEQ ID NO: 325540 - DNA, 620 bp, Homo sapiens
cagataggtgtgtggacgtgatacaatgcaggcaccaggaggttgggccatttagcatctccctgctgtctgtttaataaaaggggattaggagtgactgctgaaggctgctgcatttgctcttatttggaataagaggaggtggtcgggtggagcaggtgctggaccaggtcaggagacccatcttttagggctaaccctgctaagttattcactgtgtggcctggggaaaaaccttctctgcttggtgcctcagtttcctcatctctgtaggaagcaatgagattggccatgtgagagagcctcggagagtttgtggtgtgaagcccatragctgccacatttcctgtaaatatctgaccactttagacccttcaaattagactctacctacccatctgttcacacagaatatcttcccattgtccaagcagtcattttaaattaaactaggcaactggctctctcagtattttcaggtaacttaattcccctattttgctttgctttcaataaaagcaagctccattttttgtctttttttctattatatttattggaatcaggcttcacaaatagcttttgatgtcatctgtagtttttaacaaaataatagtgcc

SEQ ID NO: 325541 - DNA, 445 bp, Homo sapiens
gaccctacagagaagccacatgggcagtgagcaactcagggaaagaaaccacagagaggaggggtagacaccctacggtttgagtccaggtatcttgggaaattgtcacttcttttatgggggtgcttacatattyagaagcatgactggagtgtaatctgatcatttaatccatataacctggtaatatattataattaatgtcagaagtatttctcaacctcttatcaggtttctctgcaatgtaaataaatattgccccagtgtaccaccctttctacggcactgaggaaggccagttgtgcccagactaaccttctgggccccctgcacaaaaagacacgggggcagttagggtgggaagttaggatggatgaatcctacctatcccatggcaagccagacatcaggtacttagaggatgacatggcagaagcagtgagac

SEQ ID NO: 325542 - DNA, 601 bp, Homo sapiens
attttaaaaaaaattgaaggtttgtggcaaccctgtgttcagcaaatttattagctgttttttccatgtgctcacataatgtctgtgtgtcacagtttggtaattcatgcaatatttcaaactttttcattattatatcttttatgattatctgtaatcagtggtttttactattattactattataattattttggggtgccacaaaccattcccacatcacattgaacttaattcatgaaatgttttgtgtgttctgattgytccacctactggcaaatatcccatctttctccatctcttcagacctctctattccttgagacacaacaatattaaaattagatcaattagtaaccctacaatgacttctaaaggttcaagtgaaagaaagagttgcacatctctgaccttaaatcaaaagctagaaatgattgagcttaatgaggaaggtatgttgtaaccaagataggctgaacgctagccatcttgcacccaacagttagccaagctgtgaattcaaagaaaaacttaagggaaactaaaagtgttattctagtgaatacacaaatgataagaaagccaaaaaaccttattggtg

SEQ ID NO: 325543 - DNA, 601 bp, Homo sapiens
attttaaaaaaaattgaaggtttgtggcaaccctgtgttcagcaaatttattagctgttttttccatgtgctcacataatgtctgtgtgtcacagtttggtaattcatgcaatatttcaaactttttcattattatatcttttatgattatctgtaatcagtggtttttactattattactattataattattttggggtgccacaaaccattcccacatcacattgaacttaattcatgaaatgttttgtgtgttctgattgttccacctactggcaaatatcccatctttctccatctcttcagrcctctctattccttgagacacaacaatattaaaattagatcaattagtaaccctacaatgacttctaaaggttcaagtgaaagaaagagttgcacatctctgaccttaaatcaaaagctagaaatgattgagcttaatgaggaaggtatgttgtaaccaagataggctgaacgctagccatcttgcacccaacagttagccaagctgtgaattcaaagaaaaacttaagggaaactaaaagtgttattctagtgaatacacaaatgataagaaagccaaaaaaccttattggtg

SEQ ID NO: 325544 - DNA, 506 bp, Homo sapiens
tgcaggggccatcttatccgattcgctgtgatattccctgggcctagcccgatgcctggctacaagatgtgctcaaaacgtatttgactgtacgggtgtatctgcacaggatgggcctcacaggctttctgcctcttagtgaggtcaactgtcagtgttaaatctggtctttatcttcacaagtttagaaacttaatttttcatggaagcccagcacctggaacatgattcctgataactacacttaggggatatctacttcctgactgtgaggtccctgggaaagtaagttagtgagcattcagagcacatttgatgactaaagaaagaggatggttttgagaggaattcacttctcttaggctggaaaattaaccttgytttcttaaagagtgcatgtttcttctagacatagcttttttctcccaccattagatccattaaaatcatgcttagtaaggccgtggcatataataagagctcagtaaatatctgaatacatatct

SEQ ID NO: 325545 - DNA, 475 bp, Homo sapiens
acattttggagcccgttgatgcctatagagaaaaacaatatcccacagtaaaaacttgatgcaagctatctgtcaaaaggctttgcaatgtgtggatttatctcacagagttaaacctttgtwgtgattcatcaggttggaaacacattttttgtagaatctaagtagggatatttcaaagcacattgaagcctgtagtaaaaaaaaggaatatctcgcgataaaagctacaaacaacctatttgtgtaactgctttgtgatatgtgaaataatgtcatactgttacacttttgttttaaattagcagtttggaaacactcttttgtagaatctacaaagggacatattgaagcccatggaggcctgtattaaaaaaccgaatatgttgcagtaaaaactagaagcaagctatctagctatctgtgaaaatgctttgtgatgtgtggactcatctcacagatttaaacctttctt

SEQ ID NO: 325546 - DNA, 578 bp, Homo sapiens
gtgaaaatgtttcgtgatgtgtggattcatctcactgagttaaacctttgttttgattcagcacattaaaaaccatcttttttttacaatctatgagggggcatatgggagcctattgaggcctatagtgaaaaaccaaatatcctgtgataaaaactacaaacaagctatctgtgaaaatacttcacaacgtgtggatacatctcacagatttaaacctttatttagattcagcaggttggaaacactttttttgtagaatctatkaaggcacatttcagagtccatgaaagccattagtaaaaacaatatcccatgacaaaaattagaataaagctatctgtgaaaatgctttgcaatgtgtcgattcatctcacagagttaaacctttgttttgattcagccagttgaaaacactctttttgtagaatctaagaaggcacatttcagagaacattcaaacctacagttaaaaaccttatatctcaagataaaaactagaaacaagctatatatgagaatgctttatgatgtgtggattcaactcacagagttaaaccttgttttgattcagcagg

SEQ ID NO: 325547 - DNA, 578 bp, Homo sapiens
gtgaaaatgtttcgtgatgtgtggattcatctcactgagttaaacctttgttttgattcagcacattaaaaaccatcttttttttacaatctatgagggggcatatgggagcctattgaggcctatagtgaaaaaccaaatatcctgtgataaaaactacaaacaagctatctgtgaaaatacttcacaacgtgtggatacatctcacagatttaaacctttatttagattcagcaggttggaaacactttttttgtagaatctattaaggcacatttcagagtccatgaaagccattagtaaaaacaatatcccatgacaaaaattagaataaagctatctgtgaaaatgctttgcaatgtgtcgattcatctcacagagttaaacctttgttttgattcagccagttgaaaacactctttttgtagaatctaagaaggcacatttcagagaacattcaaacctacagttaaaaacyttatatctcaagataaaaactagaaacaagctatatatgagaatgctttatgatgtgtggattcaactcacagagttaaaccttgttttgattcagcagg

SEQ ID NO: 325548 - DNA, 545 bp, Homo sapiens
ttatgcacatgagagtgtcattgtagaatgctttttagcatatcyaccacaggtataatgaaacacaggctacatactgataaaatggaaggaccaaatgaaacaagcctattcatacacatttctgtgtctctttgcatctgtggttttcagactttagtgtgcatcagaatcgcccagaggacttgttaaaacacagattgctaggccgcaccccagagtttcagattcagtaggtctgagatgaggccccaggagctgcagcaagtaaaacgggcagcaacagctactgcgtcacctgaggcccatttgcgacagtctctgctctgtgtgataaaaaagatcacattttcctttcctctaggtctgatgtgaggctggcttgttttacattgggcatctctgagaaagtatcaggaaaaaggcagacaaagcagaagtgcctgaaatgatatttattaatttggattctgagtagctaaattgaaacttgattgtgcccttacccctagctcctcctgggcctggagcaaggacaggctacg

SEQ ID NO: 325549 - DNA, 625 bp, Homo sapiens
ctattctgaaaaaccaaatatactgtgataaaaactagaaactacctatctgcaaaaatttgttgcaatatatgaattcgtctcaaagrgttaaacctccattttgattcgacacattgaaaatactcttttctagatcctatgaagtgacatttcagagcccattgaggcctatagtgaaaaatctaatatcccaccataaaaactagaaaacagctaattgagaaaatcctttgcaatgtgtgaattcatctcacagagttaaacctttattttgattcagcaagttggaaaccctcgttttctagaatctatgaagggacatttcaaagcccactgaggcctacagtgaaaaaccaaatatcccacaataaaaactagaaaaaactctttgagaaaatcctttgcgatgcggggattcatcccacagagttaaacttttgttttgattgatcaggttgaaaatgttctatcagtaaaatctatgaagggcaggttgaaaacactctttttgaagaatctacaaagggacattttggaacccattgaggcctgtagtgaaaaaatgaactttctgtggtaaagactagaagcaagtattgcgggatgtggccagcagcctgca

SEQ ID NO: 325550 - DNA, 625 bp, Homo sapiens
ctattctgaaaaaccaaatatactgtgataaaaactagaaactacctatctgcaaaaatttgttgcaatatatgaattcgtctcaaagggttaaacctccattttgattcracacattgaaaatactcttttctagatcctatgaagtgacatttcagagcccattgaggcctatagtgaaaaatctaatatcccaccataaaaactagaaaacagctaattgagaaaatcctttgcaatgtgtgaattcatctcacagagttaaacctttattttgattcagcaagttggaaaccctcgttttctagaatctatgaagggacatttcaaagcccactgaggcctacagtgaaaaaccaaatatcccacaataaaaactagaaaaaactctttgagaaaatcctttgcgatgcggggattcatcccacagagttaaacttttgttttgattgatcaggttgaaaatgttctatcagtaaaatctatgaagggcaggttgaaaacactctttttgaagaatctacaaagggacattttggaacccattgaggcctgtagtgaaaaaatgaactttctgtggtaaagactagaagcaagtattgcgggatgtggccagcagcctgca

SEQ ID NO: 325551 - DNA, 580 bp, Homo sapiens
aactagaaaacagctaattgagaaaatcctttgcaatgtgtgaattcatctcacagagttaaacctttattttgattcagcaagttggaaaccctcgttttctagaatctatgaagggacatttcaaagcccactgaggcctacagtgaaaaaccaaatatcccacaataaaaactagaaaaaactmtttgagaaaatcctttgcgatgcggggattcatcccacagagttaaacttttgttttgattgatcaggttgaaaatgttctatcagtaaaatctatgaagggcaggttgaaaacactctttttgaagaatctacaaagggacattttggaacccattgaggcctgtagtgaaaaaatgaactttctgtggtaaagactagaagcaagtattgcgggatgtggccagcagcctgcaatgcaacagggctctctctttgttcccaggtggattggcaggtggagaaataatagacacacaaaagatagagaaagctggatccaggggggtcactgccttctggtcccatgatgccaacaatgcactggatataccagcacttattattaagttta

SEQ ID NO: 325552 - DNA, 570 bp, Homo sapiens
cgtatctctgatcattagtgatgttgagcattttttcatatatttgttggccattttttatatcttcttttgagaattgtctattcaagtccttagaccattatttgaatggattgggggttttytttctgctaatttgtctgagttccttgtagattctggatattagtcctttgtcagatgtatagattgtgaagatattctcccattctgtgggttgtctgtttactctgctaattgtttctctggctgtgcagaaactttttggtttaattaagtctcacctgtttatcttcattttgttgttgtcgcacttgctttagggttcttgatcatgaagtctttgcctaagccagtgtctagaagggtttttccaatgttatcttctataatttttatggtttcaggtctcaggtttaagttgatctttgtttaaggtaagaagtgagatacccattgtttctcttttaatacatttaaaacaagcaaaccttctacccagtttagatttattattcttcattgattgtttcattctcttggagaacattctggcagtaaagtaataga

SEQ ID NO: 325553 - DNA, 629 bp, Homo sapiens
tttacgtgtttctgaagtgaggcttgtgcttcaattgcagaagaaatagcttttataatattggagaaacaaaatagaaattaatataaaatttggataacaatagcttcaatgaaagtgagaattgtattttagtggtattataatattttaaatccattgaaatagaatctgaaatagaaatttatggaaaaaggtacagaaatagaataatgtctaccaaatcaaggtagtaatgaataaaatttacacataaaaactcagaactggaacatgtttaaggaaatcaaatattattaaagaagaaatatataactgtaatttgcaatttatgatatacatatatgttatgtgtatataaacacatgactgcttattatacttgcttaatttatctcttgctcctggctccagaaaaaatgaaaaaactcttttgtccatgagtatatgaatagcatttatcataaagctgtggcaaagtaggcatttaatagtatttgrtactgaatatgttaaaatactaaaaataaaaatacttttaccattttatactttttaatgtttaaaatgctgttttgcagggggatttgtggagttttgttttttttttttttagttaaaacaaattt

SEQ ID NO: 325554 - DNA, 643 bp, Homo sapiens
attttgaataggtgaaacccagttataccactgactgacaaaatatgagataaagttyctttagtatctttactcaagtactgcaactttatttgtcagatattttttctcatgtaaaggcttaagttgtgtaataccagagactgagactcaaacttgagtctgactccacagccatagtaggctttactgcatcatgctgcctcaccattgacaataggaaggcctctggtctggggttatgttaccagaaaggggttccaatccagaccccaagagagggttcttgatccttgtacaagaatttatttattaagaaagtaaaggaataaagaattgctactccataggcaagcagtggcgtgggctgcttaactgagtatacttatagttatttcttgatcatgtgctaatcgaggggtagattattcaagagtgttccaggaaaggggtggggtgggcaattcctggaattgaggttcctccctgctgttttagaccatatagggcaacttccaaatgttgccatggcatttgtaagctctcatggctctggtgggagtgtctttcagcatgctaatgcattataattagctaataatgagtactgacgatgaccagaggtgactttcttcaccatctt

SEQ ID NO: 325555 - DNA, 595 bp, Homo sapiens
ttgcaaatgtggtgtgtgtgtgtgtgtgtgtrtatatataatttcattgtgtatatataacttcattctttatatttcattgtatatacaatttcattgtgtatatatttcattatatatatataatgtaatatagatgtatattacacaataatatacacaatcgtatttcattgtatatatatttcattttatatatatacacgcatgcaatgaaacagtattcagccataaaaagataaaattccgtcctttgtagcaacagggatgaacctggaggtcattgtgttaagtaaaataagccaggcataaaaaaaaatactgcacattctcactaatacatagaatctaataaagttgatctcatagaagtagagagtagactggtgattactagaagctagggtgtgtaagagtggaaatgagagaagcagctagggtgggttgatatggaaatgagtgaagaggctagattagccacaatgtatatgagataatcagagttaaccaaggagtgggtaaaattaaaatgatcatggtaattatttagagcactaaagaacaaacattgataatgtgagatctgttgtttttt

SEQ ID NO: 325556 - DNA, 563 bp, Homo sapiens
gtgggttgtctttgcatggaatattgcttgggttttaactaatattaaatatgtataaatgacatagataaaatcaaaatcatatttgaccataaaatgtaaacattttcattcctgttatgaacataggaagactgaaaaactaaggcaaaacactttagtttgttctgtgattaaagttctatttaactcataagcttaacaaacttacttcccttatccaaagtactatatatgcaatctttaataattaaactactgtgatgttgataaatttaatacaaactcttcaaacatgtaaaaaggtaggcaagcatacccaagaggattttttttctcaaggcacttaatcaattctttcaatctaatcaatcacacttacaaatttactgaatcgaattatttaaaactgaaatggtgtttaaaagcttagtcaaaatttttatatttwaaatcacatatctaacaacaactactttctacagttgcattttcactaaaaaaaggaatttcacaagttgaaatgaagttttagttaaaaaaaagggggggatcttcagctt

SEQ ID NO: 325557 - DNA, 563 bp, Homo sapiens
gtgggttgtctttgcatggaatattgcttgggttttaactaatattaaatatgtataaatgacatagataaaatcaaaatcatatttgaccataaaatgtaaacattttcattcctgttatgaacataggaagactgaaaaactaaggcaaaacactttagtttgttctgtgattaaagttctatttaactcataagcttaacaaacttacttcccttatccaaagtactatatatgcaatctttaataattaaactactgtgatgttgataaatttaatacaaactcttcaaacatgtaaaaaggtaggcaagcatacccaagaggattttttttctcaaggcacttaatcaattctttcaatctaatcaatcacacttacaaatttactgaatcgaattatttaaaactgaaatggtgtttaaaagcttagtcaaaatttttatattttaaatcrcatatctaacaacaactactttctacagttgcattttcactaaaaaaaggaatttcacaagttgaaatgaagttttagttaaaaaaaagggggggatcttcagctt

SEQ ID NO: 325558 - DNA, 572 bp, Homo sapiens
tctgattctgtttggtttgtgtttcatccagaatagtaccttacataagcacttacatccgatttttgaaacagatttcttggcaaatattgggtatggttaagagaatacattcggtgtcatgccatgcacaagacagctacatttcctggcctctatggcaatcaggttgggaccaggttgacaaggttctggccatttgacagaggtggatgtgatatacgccacttacaarcctgttcccaaaatgtcccacactatgttccacactctttctttactagttgggcaatcagatagaaaagatctaggagagaacttcaagaaggctctggggagttatggagctacaagatagaaagagcctggatccctgagtcacagctaggaggagattgcccaagagagctgcccaactcatattcactgtgaggtgagggagaaatgaatccttgttgcattaagccacagagatttggggggttctttgctatagtagctagtgttaattaacctaatacatttttaaatttcttagaatataataatggctacataaatgttgattttta

SEQ ID NO: 325559 - DNA, 629 bp, Homo sapiens
tataatttttttctacatttaaagccttatagtcagagaaaattacaagataacttaagctccagtaaatatttttgttatagaaagatgagatagggtaattaagataggattttaaagaataagataaaattagaaaggaaaaagtaggatagaaatataactacaagaagctaacaaaacgatctcaaacttctgactgataagaaaatgtgttcatgtatttttttaatgaatttttacaatgtctataaataatcttaaaatatttcaacatatatagtattttttgtttgttccaattagtttaaattttcactataggagaagtccgttgccttaatgaaaaacatgcggtccaggagtgatcagatggggatttaaaagggaactttctaatccaaatacagctaacaaaagtcttcyattatccacgtctccattagaactgaggctttctaaatgaatattgtgaatgtcagaaatgggttttaattaatagaaatactgacctgttgatcagcatgatggatattggaaattggctctttgacataattaagagaattcagatatgtggcttggctaaacatactttagacacttatctatatttgttttaacagact

SEQ ID NO: 325560 - DNA, 583 bp, Homo sapiens
caatatgctgcttgccgccatggttgagctcccaccaatgaatctcctattttctctcataatctttcacttggattactataatgcccacctgagtgcacctggcttcaattccaccctccatgttactcttggtataaattacaaccacagttatctagagccctagttttctcaaggaacargtgaatttccttttcatcttatagcagaaagtggaggggctactcattgatttacaaatttaaaagtcctgacttgctcagtgtgaccctggaaaaaagcacaaacagctcatatctcttaacaccctacacttgatcttcccaagttcagtgtttttcatgtccctgcatctctctggataaccttatgaaacccaacaaggaaccaactcaagatgagtaatggtgtagtgactcagaaaagaacaagatgtctctgagtgaaagaaaacagtgtgctccaacagcaggaaaccaggagcagtaatcaacaggagagccaaaacgcagtcttgaagcagcacagctgccaactgctaaaaatttcctcaggttgcaaacgaattaaaatagtaact

SEQ ID NO: 325561 - DNA, 540 bp, Homo sapiens
cctgtctcttcagcttcccaaatagcaatttaccctgtcacctcaattccctgatagactaagaagagttgttgaactacattgtttcttgtggtgaggacaggtgagacatttctaagttatttacatgtgtaagaagaaaccagaagtcwggactgtttggggaccactttaagaaccactggtttagcgagaaaatagccaccttcagtcaatctcagaatacataaaagccttaggctccactgcatagcctccaatacccacattaatttaataatcatttgtagcattattttcttccagccaatgtccttcatgtcaaaaataatatgtgtctcagaaaagggagaagacccaacacccttgattgagaggtctcatgttgtacatgtctgagcctgcctcaccctgagtcacatcctcaccctaaaccacatcctcaagtgtacctgttggaatgcttttagctgcaagtatcaaaatacctgactcaaatggtaggaacaataagaaatgttctaacaataagtattgact

SEQ ID NO: 325562 - DNA, 540 bp, Homo sapiens
cctgtctcttcagcttcccaaatagcaatttaccctgtcacctcaattccctgatagactaagaagagttgttgaactacattgtttcttgtggtgaggacaggtgagacatttctaagttatttacatgtgtaagaagaaaccagaagtctggactgttkggggaccactttaagaaccactggtttagcgagaaaatagccaccttcagtcaatctcagaatacataaaagccttaggctccactgcatagcctccaatacccacattaatttaataatcatttgtagcattattttcttccagccaatgtccttcatgtcaaaaataatatgtgtctcagaaaagggagaagacccaacacccttgattgagaggtctcatgttgtacatgtctgagcctgcctcaccctgagtcacatcctcaccctaaaccacatcctcaagtgtacctgttggaatgcttttagctgcaagtatcaaaatacctgactcaaatggtaggaacaataagaaatgttctaacaataagtattgact

SEQ ID NO: 325563 - DNA, 540 bp, Homo sapiens
cctgtctcttcagcttcccaaatagcaatttaccctgtcacctcaattccctgatagactaagaagagttgttgaactacattgtttcttgtggtgaggacaggtgagacatttctaagttatttacatgtgtaagaagaaaccagaagtctggactgtttggggaccactttaagaaccactggtttagcgagaaaatagccaccttcagtcaatctcagaatacataaaagccttaggctccactgcatagcctccaatacccacmttaatttaataatcatttgtagcattattttcttccagccaatgtccttcatgtcaaaaataatatgtgtctcagaaaagggagaagacccaacacccttgattgagaggtctcatgttgtacatgtctgagcctgcctcaccctgagtcacatcctcaccctaaaccacatcctcaagtgtacctgttggaatgcttttagctgcaagtatcaaaatacctgactcaaatggtaggaacaataagaaatgttctaacaataagtattgact

SEQ ID NO: 325564 - DNA, 540 bp, Homo sapiens
cctgtctcttcagcttcccaaatagcaatttaccctgtcacctcaattccctgatagactaagaagagttgttgaactacattgtttcttgtggtgaggacaggtgagacatttctaagttatttacatgtgtaagaagaaaccagaagtctggactgtttggggaccactttaagaaccactggtttagcgagaaaatagccaccttcagtcaatctcagaatacataaaagccttaggctccactgcatagcctccaatacccacattaatttaataatyatttgtagcattattttcttccagccaatgtccttcatgtcaaaaataatatgtgtctcagaaaagggagaagacccaacacccttgattgagaggtctcatgttgtacatgtctgagcctgcctcaccctgagtcacatcctcaccctaaaccacatcctcaagtgtacctgttggaatgcttttagctgcaagtatcaaaatacctgactcaaatggtaggaacaataagaaatgttctaacaataagtattgact

SEQ ID NO: 325565 - DNA, 488 bp, Homo sapiens
agtatcaaaatacctgactcaaatggtaggaacaataagaaatgttctaacaataagtattgactacataagagagactctgaagcataatggactgcagggcaggggacctaaaggctcaactatgtcgtcaaagccacaggttctttctactttcatcctgctatccacactctattttattctaaasttggctccccttatgtttccagtaggttctcagtgacaaaaaaggctaaatgttttcctcttcatgtccactgggagagaaaaaactagttttctccagcactcaaataaatgctctttcttttatactttttgggacaacttaggtcatatgcttacctctaaaccgatacagatgctcctgaacttatgatgatgctatatccagataaaccaattacacgttgaaaatactgtaagtcaaaaatacatttaatacagctgacctactgaacattatagcttagcctaacctacct

SEQ ID NO: 325566 - DNA, 488 bp, Homo sapiens
agtatcaaaatacctgactcaaatggtaggaacaataagaaatgttctaacaataagtattgactacataagagagactctgaagcataatggactgcagggcaggggacctaaaggctcaactatgtcgtcaaagccacaggttctttctactttcatcctgctatccacactctattttattctaaagttggctccccttatgtttccagtaggttctcagtgacaaaaaaggctaaatgttttcctcttcatgtccactgggagagaaaaaactagttttctccagcactcaaataaatgctctttcttttatactktttgggacaacttaggtcatatgcttacctctaaaccgatacagatgctcctgaacttatgatgatgctatatccagataaaccaattacacgttgaaaatactgtaagtcaaaaatacatttaatacagctgacctactgaacattatagcttagcctaacctacct

SEQ ID NO: 325567 - DNA, 512 bp, Homo sapiens
agcttttgcaatagaagacaatttcttggcagaaaatggataaagttccatatggctcctgtctatttcttttaaaaattctgttgcaattaagatcccttcccataataaaaacatgatgagattgacagttttctgaaatcgtagctagtatattaggaaaacttgctcttggttttcaataactacagagcataacagaggcacaaattgttgatcaaagagggcctgaaattttaactaccttcttaaggaattgtatttccctgaaattcagttcaactttaggaagttctcatatacaatggcaactcattataaatttctccayttttataagctatttcctgttaaaatttgctttaactttttttaaaaaaaagataaatggaaatctgaaaagtacaaagcagattggaagatacatcaatcttgagaaggtgaaggagtcaaatatcacatttaaaactctgttttccaaaatggccaaatataagccttcacccatcatt

SEQ ID NO: 325568 - DNA, 565 bp, Homo sapiens
aaatcagttgctctgctatacaccaacagtgaccaagctgagaatcaaatcaagaacttaacccctttcacaatagttgcaaaaaaaataaaataaaatacttaggaatatacctaacaaaaaacgtgaaagatctctacagggaaaaccacaaaacactgctgaaagaaataatagacaacacaaacagatggaaacatatcccatgctcatggatgggtagaatcaatattgtgaaaatgaccatactgccaaaagcaatctacaaattccatgcaattcccatcaaaataccaccatctctcttcacagaagtagaaaaaatgatcttaaaattcatatggaaccmaaagacagcccacataccccgagaaagactaagcaaaaagaacaaatctggaggcatcacattacccaacttccaactataaagccatagtcaccaaaatagcatggtactggtataaaaatcggcacatacaccaatggaacagaatagagaacccagaaataaagccaaatagttacagtcaactgatcttccacaaaacaaacaaaaacataa

SEQ ID NO: 325569 - DNA, 565 bp, Homo sapiens
aaatcagttgctctgctatacaccaacagtgaccaagctgagaatcaaatcaagaacttaacccctttcacaatagttgcaaaaaaaataaaataaaatacttaggaatatacctaacaaaaaacgtgaaagatctctacagggaaaaccacaaaacactgctgaaagaaataatagacaacacaaacagatggaaacatatcccatgctcatggatgggtagaatcaatattgtgaaaatgaccatactgccaaaagcaatctacaaattccatgcaattcccatcaaaataccaccatctctcttcacagaagtagaaaaaatgatcttaaaattcatatggaaccaaaagacagcccacataccccgagaaagactaagcaaaaagaacaaatctggaggcatcacattacccaacttcmaactataaagccatagtcaccaaaatagcatggtactggtataaaaatcggcacatacaccaatggaacagaatagagaacccagaaataaagccaaatagttacagtcaactgatcttccacaaaacaaacaaaaacataa

SEQ ID NO: 325570 - DNA, 565 bp, Homo sapiens
aaatcagttgctctgctatacaccaacagtgaccaagctgagaatcaaatcaagaacttaacccctttcacaatagttgcaaaaaaaataaaataaaatacttaggaatatacctaacaaaaaacgtgaaagatctctacagggaaaaccacaaaacactgctgaaagaaataatagacaacacaaacagatggaaacatatcccatgctcatggatgggtagaatcaatattgtgaaaatgaccatactgccaaaagcaatctacaaattccatgcaattcccatcaaaataccaccatctctcttcacagaagtagaaaaaatgatcttaaaattcatatggaaccaaaagacagcccacataccccgagaaagactaagcaaaaagaacaaatctggaggcatcacattacccaacttccaactataaagccatagtcaccaaaatagcatggtactrgtataaaaatcggcacatacaccaatggaacagaatagagaacccagaaataaagccaaatagttacagtcaactgatcttccacaaaacaaacaaaaacataa

SEQ ID NO: 325571 - DNA, 589 bp, Homo sapiens
agtttccccaaacttggtagggaagaggacatacacattcaaaaaatacagagaacctctgcaagagactatataagataaccatccccaaggtatatagtcaacagattcaccaaggtcaaaacaaaagaaaaaaatcttcaagaaaactagagagaaaggttgggtcmcctccaaagaaaaccttttcaggctagcagcagacccctcagcagaaaacctaaaagacagaaaatttggggacctgtttttatcattcttaaggcaaaaaaaattataaccaaaaatattataccccacctagctaagcttcataagcaaaggagaaataaaatccttctcagtcaagtaagcactaagggaatttgttatcaccagaccacctttacaggagcttcttaacaaagtggtaaacatagaaacaaaggacaaaagcctgctacctcataaatacacttaaacagatagcccacagacaatataaacaactacataatcaaatctacaaaacaaacaaccaacaacaggatgacaggatcaaaatcttatctatcaatacattacccagaatataaatggtctacatacc

SEQ ID NO: 325572 - DNA, 589 bp, Homo sapiens
agtttccccaaacttggtagggaagaggacatacacattcaaaaaatacagagaacctctgcaagagactatataagataaccatccccaaggtatatagtcaacagattcaccaaggtcaaaacaaaagaaaaaaatcttcaagaaaactagagagaaaggttgggtcacctccaaagaaaaccttttcaggctagcagcagacccctcagcagaaaacctaaaagacagaaaatttggggacctgtttttatcattcttaaggcaaaaaaaattmtaaccaaaaatattataccccacctagctaagcttcataagcaaaggagaaataaaatccttctcagtcaagtaagcactaagggaatttgttatcaccagaccacctttacaggagcttcttaacaaagtggtaaacatagaaacaaaggacaaaagcctgctacctcataaatacacttaaacagatagcccacagacaatataaacaactacataatcaaatctacaaaacaaacaaccaacaacaggatgacaggatcaaaatcttatctatcaatacattacccagaatataaatggtctacatacc

SEQ ID NO: 325573 - DNA, 534 bp, Homo sapiens
ttacatataatcaagttcacaactgtgaacacacacacatgttaagggtcttcaaaaagttcattaaaatgtgtattttgaaaaaactacacatggatttcaagattttttgcaccaaaatacactcatattaacttgttagaacatgccttaagaggatctagtttcaagcactaagacatcggtatgaaaagagcctctatcagagcaacatgaattctgataaaattaaagcaagaacaaacttccaatttattgtgaagcttgagtgtaaaaacggtgaaataattgatgctttgtgaaaagtttatggggatgatgtctcaaataaatcagcagtttacaagtggacaaatgtattttaagaagggaaaagatgatattgcagatgaagcccacagcagcagaccatccacatcagtttgcatggaaaaaaaaaaaaaaaaaaaaaactcatcttgtccatgccctaattgaaaagtaccaatgattaacagcagaaaaaatgrcgagcactatagatgtctcgtttgg

SEQ ID NO: 325574 - DNA, 617 bp, Homo sapiens
gtagggccaaagaacaataacatctgcttattatgagagtgttagccaagactttagcagaaaacaacatccagaagaacttcaccagagagtccttctccaccatgacagtgcttttactcatctyatcaaacaagagcaattttctgacagtttcagtaagaaagttaggcatctaccttatagtcctgatatgacttcttctgacttgtttttgtttcctaatcttaacaaaatatttaaaggacacctatttttccttcagttaataatgtaaaaaagattgccttgacatggttaaaatctcaggaccttctgttcttcagggatggactacatggctgctatcatcacttacaaaactgtcttgaccttgatagagcttatgttgagaaataaagtttatactttttatctttttattccattttccgtgaacattttgaagtctttttgtactatacatataagatgatcaagtttacaattatatattgaagatcttctcttcttaagagatttttctctgcttcttcaaccactgttgaggaagtgggttaatctctatgattgtgaatttgtctattttcaaattttccccatatatgttaaagtta

SEQ ID NO: 325575 - DNA, 461 bp, Homo sapiens
aacaaacacagcctgaagtacagaccaaatggacctagcagacatttgcagaacatttaatctaaaagctgcagagtacttgtcatcagcacatggaaataaactatacattaggccacaaaaaaagtctcaacacattttaaaaattctaaattatatcaagtctcttctcagcccacagtggaataaatctagaaataaataacaagaggacttcagaaactayacaagtaacctgaaatttaaacaacgtgctcctaaatgactatgagtcaatgaagaaattaagaaggaaattaaaaaatttcttgagacatgagaaccaaaaccaatgagatagaagaaaattagtgcagagagggctgtttatagcaataaacaccaacatcaaaaaagtagaaatacttcaaataaaacctaaatatgcaactcaaggaagtataaaagcaagagaaaaccaa

SEQ ID NO: 325576 - DNA, 555 bp, Homo sapiens
acaatcagaatcagaattgattctgggggacaaaattaattcagtttttctataaatcaaacaatatcaaaagcataatgatgtaaggctagaatctgggtccatgtgttggaataacaggatattttttgagcaytgaattgttctttactataaactcataaaaggctataaaaggtttatggaaatgttaccctatgatcaatatgatttaaattagatttatttataagttttcataaaattacttttaacattaacaatacaaaatgcaaaggtaaaatttggttttctattttgagaaaaattttgtgtaatattaataagagaaaataaaagatttttgtttaccctttgagtaaactgcaagggaaaaaaggaggggagagacagatttagttgatgtcatgttttcttatttctgggaaactgagtttcctgtatcaaagagtaaagctttttgctttttttgaagtctcccaattattgttttgactaaatgaatcactactttataatgacctgtgatcctattttgtgatctcaactgtctta

SEQ ID NO: 325577 - DNA, 560 bp, Homo sapiens
tctcagacagaatcaaagaaatgaaactttctgtatcactgcatctggacaatgagatgccagatctctcacctgtcaagactacctaaccacccatatgcttactgttgactaaatcctcttccttacccctctctaattcttgttttcccacacacagtcacatttcttccctgctgtgtaaaaccctaattttactcatttggggagacagatttgagattgatcaccctcggctgcatcacctgattaaagtcttcgtctttgacaatacttatctcagtaattggttttgtgtgtgatgagcagcaggacctagacctaacccctggcatttcagtttccagaagtattaacagaagaacagaccaagctgaggaaagaatctcaaagtctgaagaccagattttgaatcaactcagtaatacaaaaagagaaaaataatgaacaaaacctccaaraaatatgggattttttaagcaatcaaacttatgacttattggcatccctgagaaagacagtgtaagcaatgtggtaaacacatttaaggatatagccca

SEQ ID NO: 325578 - DNA, 496 bp, Homo sapiens
cagctaaagaaaccatcaatagggtaaacagacaacctacagaatgggagaaataatcacaaatgatgcatccaataaaggtctgataaacaatctacagggaatttaaacaaatcaataagcaaaaacaaccccattaaaaatgggcaaaggacatgaacagacacttatcaaaagaaggcatataaacagccagcaaacatgaaaaaatgttcatcatactaatcatcagggaaatgaaaatcaaaaccacaatgagatgctaatttcacaccagtcagaatggctattattaaaaagtcaaggctgcagagaaaagggaaagcttacaaaccagtggtgggaatacaaattagttcagccactgtgaaaaacagtttggagatttctaaaagaacttaataaaaaactatcattygacccagcaatcccattactgttatatacccaaagaaaaataaatcattctgccaaaaaggcacatgcactcatatgt

SEQ ID NO: 325579 - DNA, 586 bp, Homo sapiens
cctttgcttcctgggttcaagcgattctcctgcctcagcctcccgagtagctgggactacaggtctgtgccaccacacccagctaatttttgtatttttagtagagayggggtttcaccatgttggccaggctggtcttgaacccctgacctcaagtgatccacccaccttagcctcccaaagttctgggattacaggtgtgaaccacaacgcctggccgaaacatatagcttcttatatttaatgtttaatatttcttacatttaaccttgactacgaccatccatattttaaaagccctgataatccccaaagaaaaaacacttcttaagtatgattatagagttgctggaaattatctgaacataaacctctccccactcccttatttttcccaagcaatgttatctgaaactgatgaaactttttatttgaaatcttgttctttccagaactattgatctactatatggataccccagatgtatcacaaaggcagagaagaaagtaaagctcctctgcagatttaatgcataggttggggttttagttttaatttagtaacaacagcaggattagtctactt

SEQ ID NO: 325580 - DNA, 509 bp, Homo sapiens
tatttcagcttagaaacgcagatatctggctaacattatctcccagccagcaaaaaaattggtgagtatattccaaggtaacacattttcttgactccataaaagaattgaggtcataaggcaagcaaccaacctgaaaacgtgaaacagagagtcccatacctgcagattaaaccagattccaagcatttattttcctggggaagatgccaccagaacttatagaagccaacagataaatgaaactggaaattttaatgcattgtwggaggatgaatgtagactaccatgaaagtaggatgtctacagaggaacattgatatttggattcctactcattttcaggcttttcctctgggaaatccatcaggttttcctggagaggatcagagacattgtgctggcttcaggaaaacatcaaccactactgaaatctgcttacatcctctatctcccttgtagaataaagagtgtaatctctagggagaagaacactgaggcctacatgg

SEQ ID NO: 325581 - DNA, 610 bp, Homo sapiens
cctcaacagccttactttgctaatgattttggcagactagatcttaaccacatccaaatttctccagtaatacaagtataacattacattgttcatattctcctctgagaagattcactggactcactcattcaagacatataaacattcaaaaaagaactcatgaaaaggaaatgggccatttccccacatgtagtcatagaccctgccacctcatttaaatagatgaaagttatttgataagcggagagtcatttcatctctggcaatgtccagaaacttctattggccttctcaytacctgtaagttaaaataagttcaataattttaggtctttttgaattctgcaggcaacatattctgcatttatttaagttcagttatactgttactcacaaataggcccatcttgaatggttccccctgcaagaaaaggctctgaaatctgtccaaattgcaacagaacaggcactctcattagcggcctgcagagaatccattactgctgaggcttcctagagtctctggaccactcatgaggactataagttgtccaatctcataagcttaagacaaatggtactctcaggatagagccacacttgggtt

SEQ ID NO: 325582 - DNA, 561 bp, Homo sapiens
aattttactataaaatggtctttgattttatcaattcttattctgtgtttattgagatgagcatgtgtttttccctttattctattgatatggtatattacattgattttcaatcaacattgcattgttgggataaattcaacttgatcatcgtgaataagtcttttctaacttcactccagtgaagtcatctaggactggagtttctttgtgggaagatttcacaagatgaattagattttgttatttgttataggtatatttagaatttctatttcttctcaaatgtattgtagaaatatgtagttttatagatatgtttccatttcatctcaggggtcaaatgtgttggcgtaaagtggttcacagtatttccttgtaattcatttaattactgaagggttactggtaatatcttttatttctaattttagcgatttgtgctttatttcttggtcaatagaggcaaaagttgtcasttttgttgatgtaaaagatacattttttgtgctcttacaatacacagtacttatctctgatcacaaaaatgtgtgtgagtgt

SEQ ID NO: 325583 - DNA, 566 bp, Homo sapiens
taatcataccaccctgtatacaaatatatcaaaacatcacattgtattccacaaatatatacatttatttttaaaatgtgtgctagtgaaaaaaaatatatcatctattttgtacctgtgagagcaagttcctttggtcatggatcccaactatttttgtagtgccagaatagacactgtgggcaataggagaccttgtccagtcaagtcctctttrtatttctgaaactcttactttgctgtcctattattatgcatttaatcttggaggaagtgtaggagggtgagtatgggtgagttggtatgtatagaacgttcctgtcatttgacagtcataaggatcagtatttaggcttatttccattgaggtttgatttttatgtatttacttcttttgtctcagtactcttaatgtggaactaagcattgggatgtaataatagggagtcttattacacagagcttcttcctaagctgcattcttggtctttgaatttattttgcatattaagtttttctaacagcttgtgggcaatggaaaacacttttgagggacccagagttac

SEQ ID NO: 325584 - DNA, 599 bp, Homo sapiens
tacctatttttaatctgtttcattaaacaaaagccatactgactattctcttgggttcatggtgagactgctgggagacaaccaccttatgattcctagaagctctattgtttaataacattctattcatcagtagtgagtcaataagatcagttcttattctaggaaagaggactaaaacttcaattatgtacaagtgaagggccaaagaatttgcaaatatatttagaatgtccatgccatgaaaatttaattttgttttcaattttttttgcagacttaattcagattgtagataagttagaatatctaagttagcttgattaaaaagtaagtaaaatattacattatttattttgaaaatttagaaaattgagtgaagtgtgtcccagtttcttatcaatctttcatcttgggatgttaggacaccaatgtattggagatgaaatgagaaactatatcyggaagagttatataactaggaacattttataaaattatagtatagaactaccatcagcatcaggaagaatcttccttaattggttgtaatcccatactaaattgactatgctataataaactgcttttccttgaaa

SEQ ID NO: 325585 - DNA, 592 bp, Homo sapiens
cagttatcacagcaccatttattgaatagggagtcctttccccattacttgttagctttgtcaaagaagagatggttgtaggtgtgtggttttatttctggcttctctattctgttccattggtgcatgggtttttgtagcagtaccatgctgttttggttaccatagccttataatatagtttgaagtcaggagatgtgatgcctctagctttgttctttttccttaggattgctttggctattcaagctgttctttggtatccatatggattttagagaagttatttttttttctaattctgtggaaaatgacattattattttrataggaatagtgttgaatctttaggttgctttaggcaatgtggctattttaatgatactgattattctaatccatgagcatggaatcttttttccaattttgcggcatctatgatttattttggcagtgttttgtagtcatttttgtaaacatcttttgcctccttgattagatgtattcctaggtattttgtgtgtgtgtgtgtgtgtgtgtgtgtgtgtgtggctactggaaatgcctattgcattcctgatttggctttcat

SEQ ID NO: 325586 - DNA, 583 bp, Homo sapiens
ggattccccaggggatcagctccatattctctggtattttaaaatttggttttattttaaaatttggtttatctatgttactaagcatcctaggcaatgtggcttactatgttgttctaaaccaagataaaactatctaggtcatggtgctccaacaagccagatgctggtcaggtgctcatgagtgctttcaattacaggagtaaggtttgcattcctcagcattatcccataatagctctcctcagcaagaagcagccagaaagattgacaaccagattccccatgatggaggaattgataaatagaaaggggatactgataccagccaaattgtcccatacaaaaaatatctataggtttttaaaaatagacatagaaattgaccctcccttgtcttaaaacttgcaacttacatttatctcatctgagttccctcctcaggaaaccaaccctcaggtgagggactgaaactcactagattaccacatccggatcagacaaaaagatgcaataaacttcattcctcatgattgcttccttaccyctccctaattcctgttttcctgccttccctgctata

SEQ ID NO: 325587 - DNA, 635 bp, Homo sapiens
tgactggggaggcctcagaatcatggcggaaggtgaaaggcacctcttaaacggcagcagacaagagagaatgagaaccaagccaaaagggtttccccttataaaaccatcaggtcttgtgagacttcttcagtaccactagaacagtataggggaaactgccaccatgactcagttatgtcccaccgggtcccttccacaatacatggcaattatgggagatacaattcaagatgacatttgggtgtgaacacaaccaaatcatatcacctggcaatccttgttaactcagtgattggctttctgtgcagtgagcaacaggacgtagacctgtgatgtttcagtaacaatcttatttaataattaaaataatattttagttttatagctgaagacactgaggcttagggtgatgaaaacatgcagatagcatgactattaagaatgtgrtatttttatagcatgatatataaaccactaaaatttataggggaacttcagtgtcataattcaggcctgactcttatcattataccatgctacctgccgaacaaatctttgtagaaagtagaatgcttctacgggaaggaagcaaatgaaacagaaaaagaaaaaagagagagagaaaatgttca

SEQ ID NO: 325588 - DNA, 597 bp, Homo sapiens
tcttgtatttatataatcttcccctttggttgtggcagatttatctgaaaacagagtaacctatgtcaagctttgaacgtgggggtctgagaaaacactagggccaatcacatgagttctaaaagagtatgctttgtatcatgtggagaagtgcataaaaatgatttgccacaataatgaaaagtgagggcaacttggcagcaggtggagggaagaaaaaaaataatagaagcaataaaaggagaaagatcaacttaatatttattttctgtttatagattttcttgaggctattttgtgaaatacaccaatatatttctaataaattaaccttttaccttatgatatttttacctgttataaagatattattttattatttatacagcttaaaatatttgctttttayattttagcctaaagcaattgaatttagaatttacatataaaattgatgagatgttactacagtaatgtgaagatctgtactaattagcataaacttaatacaggacccttcctggcatacattccatggagactgcttatcacatatgctttacagctaatctcttaaagatttttggagaatgtata

SEQ ID NO: 325589 - DNA, 554 bp, Homo sapiens
tagtgcataacaaaagtgaccttcactccagttcccagtaagttcttcatctccatctgagacctcgtcaacgtggcctttgctgtctatatcactatcagcgttttggtcacaatcattcaacaaatctctaggaagttctaaactttctatcatcttcctgtcttcttctgagtcctccaaactcttccaacctctgcacattacccagtttcaaagtcacttccacattttcagctatcttcatagcaataccygactcctagtaccaggtttctatagtagttttttctcacactgctataaaggaataactgagactgggtaatttataatgaaaagatgtttcattggcttataattctgcaggctgtacaggaaacatggctgggcaggcctaaggaaacttacaatcatggcagaagacaaaggggaagaaggcacatcttcacatggccagagcaggcactgcggggaggagatgggttcaggtagcacacagttttaaacaaccaaatctggattcctcactcattatcatgagaacagcacca

SEQ ID NO: 325590 - DNA, 427 bp, Homo sapiens
ggtgtttccattcttaaacagatattgtagtaagaactgaattgagatatttgaactttgctaaaccctgttaaaccttttattatcttagtgtttataaaacaagattatatatcagtagtactctttcaaatttagaaagtcatctaaagtcaattgtttaccttaatttttcttttaccaaagctaaagattatgtaacttgtcatgtactacactcatcaggccaataatacccagtactyttaggctggctacattactacccatgattattttattgtctgctttctgcctcaatgcttatttgttgtcccctttttaatgctgtactcttaattaataactcctgaaacaattgtgatattggaatgttttgtcagacaaaaatacaaaaatatatttcttatgaatatagaacaggtat

SEQ ID NO: 325591 - DNA, 560 bp, Homo sapiens
tgcctctcttcgttcaacctaacgcaaaaaaagatgagtcttgccacttctttgagtcttcattttcttatgcgggctcctgtgtcatctaaaatttacattaaatttgtatgcttttcttctgttaatctgttttatgtctatgtaattctcaggcccatacaggaccctaaaagagtagaggtaaagtttcatctcccttacacaagcttaactgctaaattagtgttgcagacaagtcacttcagacactttttgaattgaataaacaaatgttaaattgaaagaaccagaactcagtaatgaagtaagctggaaaggccacacagattaagtaaaattgtacttggatattcaagtcagtatgaaattcaaataatcaagaaagaggagaaaatcattcaggaacaggaaggagcaagaatgaattgttttttctttttttttttttttctttagaggagaagratgacccctgaggtgacttgttggaattgtttgtaaagcacatttggagccaggttatataggtctttgatttccaggctgaggaatttgaa

SEQ ID NO: 325592 - DNA, 582 bp, Homo sapiens
agctgttagcacactgtaacatgccctctggagcttcagggtcacgggcattcctatttgggtatcaccacattcccctcgtctggatgctggagtccaccgagggagtcacttgcaacatgcttggtccagcccaagcctcatacagagcccactccagtgctggcacttggagtggccagctggaccccactcgcttgcttacacatccactcctgctgggatctgaatatggatcccacagcaaacatggaatctggactggagtgcaagtgaggcacagcccagcagggtgagtgggcacggcacctcctgtagtgagcctgggactgactgaggcctggacaggggcattgcctggcacagaggtctctggctggcaaagctcagccaaaaagaaaaaaaaagcatcaatatttttctatcttcttatgatattggcagaattaaattgtagaagagatttatttaactagtgtaaagaaaaacaaacacatttataaactaaatattctctcaggaaaatgaaaactrtcccccaaactttcaagtttatgtgtcttgagtaatctttggtaaata

SEQ ID NO: 325593 - DNA, 572 bp, Homo sapiens
tgactttttaaagttttcattattaaagacaacactctgactcattatggaatagatgagatgatacaaatcatgaaaagaaatgatggggtgactattctaaaactgctgaagtggtttataaccattgttggggttgtcaaacccataattctagtaagaaaatgacctcagttgatacatttttgccacttactggatcacttgaatatttacagagggattttactcaattgccaactttgatgactyttttctgtttgtataaaatctttcccatgcgagaaggctgaatctataacataagcaaaaaaaaaaaaattattagaaaatgtgttttgtttatggggcattcttggagaaatcttcagcaatgaaggtattcatttcactagaaaaattataaaagtgtcaaataaggaattgcaaacacaaagccattaagcaaagctaactgaatcgaatgggttgctttgatcaaagttactactgattgatgatccactagaaagtacagactgaccgcttatgaaataattactagaaggaccatgcccctaataattggactt

SEQ ID NO: 325594 - DNA, 572 bp, Homo sapiens
tgactttttaaagttttcattattaaagacaacactctgactcattatggaatagatgagatgatacaaatcatgaaaagaaatgatggggtgactattctaaaactgctgaagtggtttataaccattgttggggttgtcaaacccataattctagtaagaaaatgacctcagttgatacatttttgccacttactggatcacttgaatatttacagagggattttactcaattgccaactttgatgactcttttctgtttgtataaaatctttcccatgcgagaaggctgaatctataacataagcaaaaaaaaaaaaattattagaaaatgtgttttgtttatggggcattcttggagaaatcttcagcaatgaaggtattcatttcactagaaaaattataaaagtgtcaaataaggaattgcaaacacaaagccattaagcaaagctaactgaatcgaatggkttgctttgatcaaagttactactgattgatgatccactagaaagtacagactgaccgcttatgaaataattactagaaggaccatgcccctaataattggactt

SEQ ID NO: 325595 - DNA, 636 bp, Homo sapiens
ctggttgtctgctctgaaaccctgcctcctgataagatgttatcaatgacaatgtgtgcctgaaacttcattagcaattttaattttgccccagtcctgtggtcctgtgatctcaccctgcctcaatttgccttgtgatattctattaccttgtgaaacacgtgatctctgtgacccacaccctattygtacactccctccccttttgaaaatcactaataaaaacttgctggttttgcggctcaggggccatcatggaacctgccgtcatgtgatgtcttcccccggacacccagctttaaaatttctctcttttgtactctgtccctttatatctcagaccggctgacacttagggaaaatagaaaagaacgtacgtgaagtatcagggctgaatttcggccgatatctggctgaatttcccccgatactcagggaacttaactgaattttggatatgtcatgtgaaacgtaagtccttatataatcttagcttctggttcactctgtaactggtatttcaaatatgatttctgatactttctagacttatgtattcagttttcttgtttaaatgtaacaatagacaaaactaaagtgatggttttgcagttaaactctgccataagttgaata

SEQ ID NO: 325596 - DNA, 636 bp, Homo sapiens
ctggttgtctgctctgaaaccctgcctcctgataagatgttatcaatgacaatgtgtgcctgaaacttcattagcaattttaattttgccccagtcctgtggtcctgtgatctcaccctgcctcaatttgccttgtgatattctattaccttgtgaaacacgtgatctctgtgacccacaccctatttgtacactccctccccttttgaaaatcactaataaaaacttgctggttttgcggctcaggggccatcatggaacctgccgtcatgtgatgtcttcccccggacacccagctttaaaatttctctcttttgtactctgtccctttatatctcagaccggctgacacttagggaaaatagaaaagaacstacgtgaagtatcagggctgaatttcggccgatatctggctgaatttcccccgatactcagggaacttaactgaattttggatatgtcatgtgaaacgtaagtccttatataatcttagcttctggttcactctgtaactggtatttcaaatatgatttctgatactttctagacttatgtattcagttttcttgtttaaatgtaacaatagacaaaactaaagtgatggttttgcagttaaactctgccataagttgaata

SEQ ID NO: 325597 - DNA, 636 bp, Homo sapiens
ctggttgtctgctctgaaaccctgcctcctgataagatgttatcaatgacaatgtgtgcctgaaacttcattagcaattttaattttgccccagtcctgtggtcctgtgatctcaccctgcctcaatttgccttgtgatattctattaccttgtgaaacacgtgatctctgtgacccacaccctatttgtacactccctccccttttgaaaatcactaataaaaacttgctggttttgcggctcaggggccatcatggaacctgccgtcatgtgatgtcttcccccggacacccagctttaaaatttctctcttttgtactctgtccctttatatctcagaccggctgacacttagggaaaatagaaaagaacgtacgtgaagtatcagggctgaatttcggccgatatctggctgaatttcccccgatactcagggaacttaactgaattttggatatgtcatgtgaaacgtaagtccttatataatcttagcttctggttcactctgtaactggtatttcaaatatgatttctgatactttctagacttatgtattcagttttcttgtttaaatgtaacaatagacaaaactaaagtgatgrttttgcagttaaactctgccataagttgaata

SEQ ID NO: 325598 - DNA, 581 bp, Homo sapiens
gctaaaacaaatagatttctcttgtggttcatattttatatatttgattttgatcagtttgcttatttggggctcctgttagagtgtatttcattttcttagtattatcctcctgatagccatcataatggtttctctggtgcaccagattctctcaagagtcttaaatgttcttatgcagccatctgtcatatgccaagtgatcttactacagtttgaatagtgaaaacctaaaaagaacagaagaaacattcaactaacccaattgtgaattataaattccatactgagaccaaacaagatcattgtgatggtgacagaatgatgtcagtgcccaaggttttggtcaatctttccaaattgagaagccgaccaaatggggacattttaaattaaaataaatatggcctaaaactccctccatactttgaattccttcataacagagttcaacctaatgttgtatttaaaaaaaaaaaactgctacctaacttaaaagtatattcctgcaacaaatggctgagtcctagccaatcayggcagctgagcttcagttaatcacagggtgccagctgatcaga

SEQ ID NO: 325599 - DNA, 446 bp, Homo sapiens
tctggttggtctagccagacacttgaaagtcttcttatgatttagcttcagaagtaccagaatgtcaaatttgccaagttatattactcaagcaaggaggaaagccaggtcagatccaagtgtggttgagaaggtgatgaagaggaggaagatatactatttcacatgagaaagtggcatgtatgtttgtataaggaatatatagataacatatgtcataaacacaaactacttaagtccatactctggcttcaacaattcaaatttggtgttgaatttttttaatagactataatatttggagcagttttaggttctcagcacaattgaggggaaggtagagagataatccaaatagctccttctcacawacatgcacacatcttatcaacatttctctccaaagtggtatatttgttacaattgatgaatctatattgacacat

SEQ ID NO: 325600 - DNA, 599 bp, Homo sapiens
acctgctaaacagtcataaatggcatttgagaatggtagcaaaatttcttggaaaccatctcatcccatgtccttatttctcagcagagacatcaaaagcccaaggcaagtaatgtgacaagtccaaagtggacamcgagctggtcgtgcgcagtggctcatgcaaataatcccagcattttgggaagcaaaagcaggtggatcacttgaggtcaagagttcaagaccagctggtcaacacagcaaaaccccatctctactaaaagtacaaaaaaattagccaggcatggtggcgcacacctgtgaccccagttactcaggaggctgaggcaggagaatcactggagcctgggaggcggaggttgcaatgaggcgagattacaccattagactccagcctgggtgacagagcgagactccatctcaaaaaaaacccaaagtgacagcgagcaaatgacaaagctgggccagactcctgctctgttcgacttctccaccggaggcccaccgtcctaccgaggatggaaccatgcacagggggccagcagtccatgcttacacacatccaggaaggaaccaagaagtcgccatgcagccca

SEQ ID NO: 325601 - DNA, 575 bp, Homo sapiens
gaacactgtttctggaataacctaatgatattccattagccacttgcagtggccgatttcaacatgaataaatattgataagtatattactgagagcctaatatgtataaagcatagtttttggacactaagtggaagttgttgggatttgctagcttgaaacgctgttctgttttactgtaaggccaactgcttcccctcaaagatttgactttgaagttctcatatgagaactctggttttcatttataaytggagttttaatttgagagttttccatttataactggagtttaatttgagttttatatgagaactgattttcacttataattggagttttcttattccattattttattccttccccctttattataaacatgattatttatattgccatgaagacagtggaaaaaaaatcagaatatttacaacgctgaggttgtgaccttttgttttccatgaagtttaaaacatttttgcttttatcaagtttttgatagtgtttatgaaaatgatagttacattctaatttaggtaattacgtatttaccacccttgtcttatgttag

SEQ ID NO: 325602 - DNA, 575 bp, Homo sapiens
gaacactgtttctggaataacctaatgatattccattagccacttgcagtggccgatttcaacatgaataaatattgataagtatattactgagagcctaatatgtataaagcatagtttttggacactaagtggaagttgttgggatttgctagcttgaaacgctgttctgttttactgtaaggccaactgcttcccctcaaagatttgactttgaagttctcatatgagaactctggttttcatttataactggagttttaatttgagagttttccatttataactggagtttaatttgagttttatatgagaactgattttcacttataattggagttttcttattccattattttattccttccccctttattataaacatgattatttatattgccatgaagacagtggaaaaaaaatcagaatatttacaacgctgaggttgtgacmttttgttttccatgaagtttaaaacatttttgcttttatcaagtttttgatagtgtttatgaaaatgatagttacattctaatttaggtaattacgtatttaccacccttgtcttatgttag

SEQ ID NO: 325603 - DNA, 565 bp, Homo sapiens
ctgggctcaagcaattctcttgcctcagcctaccgagtagctgggactacaggcatatgccaccacacttggctgattttgtatttttagtagagacagagtttcaccatgttggccagactggtattgaactcctgacctcaagtgatctgccttcagcctcccaaagtgctgggacaggtgtgagccaccacactagaccaacaatggattacttctaaaaaccatcctgtgtcagaatctatgatctcatatcaaaaagatgcatattaaaattaatgcagctgccaaatggaagtctagatacttttctagatacaacacacatgagcatagctccatcagatatgtcttcttcataattcattggccttgattttataaaatttccaaaaatggttcttttggcacttcaaaaccaattgtgttcaaaagaaatcataccagtgggagtagcagaggtgttcaggaaacaaaataaatgattctttatttcagatcataatctctaagcttmaagtggactcacaacaatttctagctagactcttgactgggcctagat

SEQ ID NO: 325604 - DNA, 559 bp, Homo sapiens
ggttaacatccccagtgagaccacatggctatcttggacatctgacaggaagtggtaagaagggcaaatcacctccgtggtattctttccaaaaattcacaaccctggtataatcatggggaatacatcagacaaacccaaattggggaacattctatataattgacaaacattctatataattgacaaacactcctcaaaagtgtcaaggtcatgagaaagactaaaacactgtcagagatcagagaagattaaggagacacagacaataaatagaatgtggtgctctagattgaatggtggaatcaaaaacaaaaattaatggaaaaactcatgagctctgagtaaagtttggtgctcagttaatagtaaacacacccatgttgggttcctagtaggtccttgtcaaaaggtcattcttttgtggctactctgacaatgaaatgaagaaattatggagcaaactgcatagaagccaagtaaaatataagttgtgttaaataagttaaattttrctaaccaggttttactggatttactggtatgcacttaggccgtg

SEQ ID NO: 325605 - DNA, 622 bp, Homo sapiens
ctacttctctccccatggatccctctacagaagccaaacaggccaccttgctgtcctttgaacatgatcagcatttttctgctgtcctcagcctacctagagtaacaggcaactcagtcaccttctggaggtcctcatatgtcactttatcaataagacctattctgccacacatatgtaaaccgtcttccattgtgctttcttcctctttttattttttgctttgtagcgcacaccttctaatatacagtacacatttatttgtttcgtatattgtctatygttcactcactgccccaagggaaattctaaaatgacagcgatgggcccattatatgcattgctgcatacacatgggtcaataagtattctaaaacacacaaataacaacgcagtttcactttatttttattcttttttgttttttcttccttgaagtttaactttaaaatagtggattttaaacaactctattgaggtataatttatatatgcttaatgtcaaccagtttaattgtacaattcaatgactcttagtaaatttacagagttgtacgaccatcactacaatctagtttcagaacacttccatcacaccaaatgatccgaagagggattttta

SEQ ID NO: 325606 - DNA, 557 bp, Homo sapiens
tgtcacttattcaagaagttttccttgagcccaccattccagattagtttactttgtcatacacttcagaaaaccaggttttctctgggagcaccaatctgagtttcactgatccactagaaagaaattaagccaatgctgtttgtgacaagtcctgcttctcacaagcccaactttaagttttatggcagaaatggctaggagaaaacttcggccaaagtggccttaataaacatacaagctaagcaaaaacaaagtggccttaataaatgtacaagctaagcagaaacaaagtgcttgctatgccagtgttgattcaagacaaatccaactagatccgcttctacccactctgcagtggcagaatcttatatagaaattctagagcyacctgtctatttggcttcccattgttcccacagagtgtagcaaaaagtactggcatataataaacacccagcaaatcattcttgaataaggaaagtgagaaaaaaaaaacacgaatgaatgaaaactaagtcagtgggtcctagtcatctttacatgttttgcatgtt

SEQ ID NO: 325607 - DNA, 559 bp, Homo sapiens
ctgcgtttccttctaaaattctaggtcaatgagacagtatgtgatcaaatgacaatagagtgggttggaactacccagcgactcatcaaaaaggccataaaaaagcagagagaacaaagcctgaagctcaggctgagccacgcgtgtaaaaccacgacacaaggacggacaaaggaactataataaagagtggaaaaaagtggtgaaggcaataaagacaagaggagcttcacatgaatggagaattattggctttataggtgcctggagaaaggcagaacaggtcatatcactttcccttctagtgaagggcagttcagcgatttggaattcaactatgtttgatggagagttttgatctcaaactaacattttgctctrgcagcggcaatggaggtgggtcattaactcataaccccataataaataaatgcatgtgacaatgccacccaggagaggacagtgctgagagaaccatctgagaaagtcccccagtccataagaaaagatctcctttcccatgacgtttcccgcctcattcacactttatacttcagtg

SEQ ID NO: 325608 - DNA, 559 bp, Homo sapiens
ctgcgtttccttctaaaattctaggtcaatgagacagtatgtgatcaaatgacaatagagtgggttggaactacccagcgactcatcaaaaaggccataaaaaagcagagagaacaaagcctgaagctcaggctgagccacgcgtgtaaaaccacgacacaaggacggacaaaggaactataataaagagtggaaaaaagtggtgaaggcaataaagacaagaggagcttcacatgaatggagaattattggctttataggtgcctggagaaaggcagaacaggtcatatcactttcccttctagtgaagggcagttcagcgatttggaattcaactatgtttgatggagagttttgatctcaaactaacattttgctctagcagcggcaatggaggtgggtcattaackcataaccccataataaataaatgcatgtgacaatgccacccaggagaggacagtgctgagagaaccatctgagaaagtcccccagtccataagaaaagatctcctttcccatgacgtttcccgcctcattcacactttatacttcagtg

SEQ ID NO: 325609 - DNA, 559 bp, Homo sapiens
ctgcgtttccttctaaaattctaggtcaatgagacagtatgtgatcaaatgacaatagagtgggttggaactacccagcgactcatcaaaaaggccataaaaaagcagagagaacaaagcctgaagctcaggctgagccacgcgtgtaaaaccacgacacaaggacggacaaaggaactataataaagagtggaaaaaagtggtgaaggcaataaagacaagaggagcttcacatgaatggagaattattggctttataggtgcctggagaaaggcagaacaggtcatatcactttcccttctagtgaagggcagttcagcgatttggaattcaactatgtttgatggagagttttgatctcaaactaacattttgctctagcagcggcaatggaggtgggtcattaactcataaccccataataaataaatgcatgtgacaatgccacccaggagaggacagtgctgagagaaccatctgagaaagtcccccagtccataagaaaagatctcctttcccatgacgtttcccrcctcattcacactttatacttcagtg

SEQ ID NO: 325610 - DNA, 354 bp, Homo sapiens
ttaaaatatttcaaaataatttattcactgtggtctcactgttttacatttctgtttataaatatttacaacgcactaccttcgtcaaataattattattcagtgttcacagtaaagagaaaggcatcagagactgtgtgtgtgtatgcctctcctaatctgtgtgacaatattttaatttagcattaattctcarctcttctcagttaaacatacatggctttatttgctgtttcaggtgatatttatagacaagcagcatgcattcacagtacaagtttttatctgtagtgatttagtgatacaagggaaagacttcaagttaatattaatgtggaatactaacacattttc

SEQ ID NO: 325611 - DNA, 479 bp, Homo sapiens
gtcctctccccagatttccaatccaacactcttcatccaagggagtactacatatttgcagctggtttgcaacttagtcttatgtaggaagtagatgtatccttaaattcagaatcatgtgacaaagtcactataggaacaggtcaaagcatctgaagagagcagcagattgtacagcagcagaaaatacactcccttgtattttctctggagcatttgtgctttagagtagaacttcttactctacatacacagaagggtttttgtttccttcccctggccctcacagagtgtagtttagtatgactgacgtgctgaaagaatggaaggtgcatctccatcacccttctacattggagaagaaaatgcagcagtgagccttggggstagaaattatgttaattagacaagcagcaggaaaggaacccagcctgtgggaagagtctcccctccccatagaaccaccacaacaatcacat

SEQ ID NO: 325612 - DNA, 607 bp, Homo sapiens
atcaacaagaaaaactgcattatttttatttttccatctgttcatttaaatccattttccttcggttataaataccccagcacacctggtttttttgtttggttggttgatttggtttttttgagttgtttttttaagccatcaggtcatactctactaatcccttggtgrcgaaaaccaggccgttggcaagaccatctgagcattcccattaaaagccatcacatgctaaggtcccatggcttttttttttttttcttggcttgtcttttttgttaagtgccttctctcttttccttggagtgtcagcagtttgagctcgattactgaaagtgaagaagaaatgcctttctctttccctgacagctatattcccactgtgacaaagataatcatagacattaacagtggtaacaagctattagatcatcaactcagtgcttcttccagggcaggcaaagcatctaaaataacacagtatcatgactgcattctcaaaggtaaatacattaactctcactcccaattaacaaaaaggctctttacacacctacgctaaatccctctgtgcttgatacaatactccaggtacccaaagtcagactcc

SEQ ID NO: 325613 - DNA, 607 bp, Homo sapiens
atcaacaagaaaaactgcattatttttatttttccatctgttcatttaaatccattttccttcggttataaataccccagcacacctggtttttttgtttggttggttgatttggtttttttgagttgtttttttaagccatcaggtcatactctactaatcccttggtgacgaaaaccaggccrttggcaagaccatctgagcattcccattaaaagccatcacatgctaaggtcccatggcttttttttttttttcttggcttgtcttttttgttaagtgccttctctcttttccttggagtgtcagcagtttgagctcgattactgaaagtgaagaagaaatgcctttctctttccctgacagctatattcccactgtgacaaagataatcatagacattaacagtggtaacaagctattagatcatcaactcagtgcttcttccagggcaggcaaagcatctaaaataacacagtatcatgactgcattctcaaaggtaaatacattaactctcactcccaattaacaaaaaggctctttacacacctacgctaaatccctctgtgcttgatacaatactccaggtacccaaagtcagactcc

SEQ ID NO: 325614 - DNA, 607 bp, Homo sapiens
atcaacaagaaaaactgcattatttttatttttccatctgttcatttaaatccattttccttcggttataaataccccagcacacctggtttttttgtttggttggttgatttggtttttttgagttgtttttttaagccatcaggtcatactctactaatcccttggtgacgaaaaccaggccgttggcaagaccatctgagcattcccattaaaagccatcacatgctaaggtcccatggcttttttttttttttcttggcttgtcttttttgttaagtgccttctctcttttccttggagtgtcagcagtttgagctcgattactgaaagtgaagaagaaatgcctttctctttccctgacagctatattcccactgtgacaaagataatcatagacattaacagtggtaacaagctattagatcatcaactcagtgcttcttccagggcaggcaaagcatctaaaataacacagtatcatgactgcattctcaaaggtaaatacrttaactctcactcccaattaacaaaaaggctctttacacacctacgctaaatccctctgtgcttgatacaatactccaggtacccaaagtcagactcc

SEQ ID NO: 325615 - DNA, 504 bp, Homo sapiens
ttaactaaatccgaatgagtcattttatcaaagctttaacatgtatgtttgttttctgggtagcttatcacccctttttctttttcctttttttttttttttactttaaaagtttttttatatttggttggataaccacatgatacgggtgtataaagttgtttgtatgaccataaactttgaaaatgggttttaagaaggcatttgcaccatcttatcctgcaaattagtaactttctgatctggaaaaggacttttgctatgcctcatacatttccctggagtttgatgtaaattgaaatttattatgaatcaaattcaattttaggtgttcttgaggaatctgtaaatgccagttgagaggggaaattgatttygcgttcagccctctatgatgaatatccccgtgtttgacacgtgtaagtgttccgcttatgttagttatttttcctaataacctttcagaagtgtctgctaatgaaagttgtacctgtttttttcact

SEQ ID NO: 325616 - DNA, 605 bp, Homo sapiens
ggacacagtaaaataaatccaaatacatatgactcaaataatagatgcaagccatcatttgtaaaaacagatacctgataattctcctcctactactaacaatttaaaaaatactctgcratgtcagaaaagtacttgccattcatattagttctcataaccttccagacatgggtaaaatacaatttatcactctataaaaatataatctgggttcataccagtgggattcatttattcactggtaacaatctgaagctttaagccaactacatgcttgctttcacacttccacccaatatacattcaagtgcaattttaattgaaactgatcttccacttcagatttcaaattaattcttctttggagtacttcatgcttcagacacccttgccttgcaaaaacccctatgtcattagcagaggaaatagaacactttttccaagcttgcagatattgattatctattctcacatcgaagcaccattgccattccacactgtataaatctcttcagtgttaagacactttataaaagactgagaattataccattaatcatttgcagttccacaagactcatagtattgaatgctttgttttt

SEQ ID NO: 325617 - DNA, 545 bp, Homo sapiens
tattgctatccccatttcacagttgaagaaactgaggatcaaagagaaagtaacttactatggtcatgtattagttaataacagaggcatatttcttacctgggtgtgtmtgtttcaaaccatgtgcattttgtactgtgcttcctcttgctatgacaagtttatctcacataaatggagattctctttaaagctaacttgttaataccacatcccactggccaactgctaatccatctgtcatttcacttgccctctgcattccctctccatcctttcatactcacacaaacttgtgtacatacaaaaatgactgtttggaaagcaaccacctaccgtgaagtgacccagaactttgcaccgttccatggataattgtaggaaaccaacaaatagttttcttgttcaagacatatgtaagtaattggtcaaagttaagtggcatccatcctattctgcatagctggactgttcttgcaaccctcaacccttgcattcctctgcaaagtgttttgtttatacaggcaaaattctaagcacatgga

SEQ ID NO: 325618 - DNA, 545 bp, Homo sapiens
tattgctatccccatttcacagttgaagaaactgaggatcaaagagaaagtaacttactatggtcatgtattagttaataacagaggcatatttcttacctgggtgtgtatgtttcaaacyatgtgcattttgtactgtgcttcctcttgctatgacaagtttatctcacataaatggagattctctttaaagctaacttgttaataccacatcccactggccaactgctaatccatctgtcatttcacttgccctctgcattccctctccatcctttcatactcacacaaacttgtgtacatacaaaaatgactgtttggaaagcaaccacctaccgtgaagtgacccagaactttgcaccgttccatggataattgtaggaaaccaacaaatagttttcttgttcaagacatatgtaagtaattggtcaaagttaagtggcatccatcctattctgcatagctggactgttcttgcaaccctcaacccttgcattcctctgcaaagtgttttgtttatacaggcaaaattctaagcacatgga

SEQ ID NO: 325619 - DNA, 506 bp, Homo sapiens
ggagtcagtctgaaaaaaagatgaagagtagaaaagtaggcaaaggctatgaacaggcaattcacaagattagaattatatactcaatatacatataaaaattgtttatgtgaatttttaacatttttaacctaataatttccctgctaagaatttatcctgtggtaacaatcagactaataaragtatagattttaaagtaaaaataattgggaaagtaaaaacttaaattatgtcaaagaagaagaatttgttaaattaattatagtcatacaaatggggtataaggaaagccattacaatactataagtaaatatttattgacattgaaagccatggaacattttaactttcaataaagttgaaaacattatatatagtatgattccacttaggaaaaaattgcgaatgactgcatagaaaaatatttggatgatatacgccaaaacagcaattatgtctgggtaatcatcttatggaggattttctttttgttcttttttag

SEQ ID NO: 325620 - DNA, 596 bp, Homo sapiens
ccttctttgaaggagatggagaaggtgaatccatccaacaactcctgcttaatatgctgcatggaactctgaaaagagagtgtccaaaagccaggccaagaggcatcaatggccagccttgctgtttccccaggcagtcacccagattagaactttccttccaagatcaggcacataggagcatctgcagagcatctccagtcagagaggaaactagatgagagattggtctcaggatgaacatgtgaaaagaaaagctttgtccccaacactccctttcccatcctgccagccatgaccagagtatgaatctgacagacccacctygctcccaacccctgacaacctgcccctgtccagggagggcccctcatctcttgcttccctaaaacacatggtgatggggaaggatatgggacagccctgattggatcacagctgaggcctggactggaagggcctgccactgggctgccctgtgttacctgtgggtgccttctgccaaatggccagaggcgtcgatggtgagggttcagccaatgtccgcagtctctggaaagattctcactttggcctttgttgagacaaggacatag

SEQ ID NO: 325621 - DNA, 596 bp, Homo sapiens
ccttctttgaaggagatggagaaggtgaatccatccaacaactcctgcttaatatgctgcatggaactctgaaaagagagtgtccaaaagccaggccaagaggcatcaatggccagccttgctgtttccccaggcagtcacccagattagaactttccttccaagatcaggcacataggagcatctgcagagcatctccagtcagagaggaaactagatgagagattggtctcaggatgaacatgtgaaaagaaaagctttgtccccaacactccctttcccatcctgccagccatgaccagagtatgaatctgacagacccacctcgctcccaacccctgacaacctgcycctgtccagggagggcccctcatctcttgcttccctaaaacacatggtgatggggaaggatatgggacagccctgattggatcacagctgaggcctggactggaagggcctgccactgggctgccctgtgttacctgtgggtgccttctgccaaatggccagaggcgtcgatggtgagggttcagccaatgtccgcagtctctggaaagattctcactttggcctttgttgagacaaggacatag

SEQ ID NO: 325622 - DNA, 357 bp, Homo sapiens
aaaattccacgaaaattgggtgaggagggagaatatttctcttagaaaaaaaaaatccccttctaggtataggctctagtaatgttgggtaaatatttggatatttggatattatgattagctaagaatggagaccatcaaaaatcaggttgaataacaatgggttattgacaatttgccttttaaggaaggcgggtccagttgacctcagaagttcttcaagtgagattattttttaagtggaatctgaatttgttgggacaatagagtataacttagagatttatggggaaaatatcaakaaagaaaaacatctctaggctggcagctgaagaattactctctgggagaaaaaag

SEQ ID NO: 325623 - DNA, 490 bp, Homo sapiens
aacaaaatttataatgaaagcattttagggcataaaatacattaaactaagttatactatatttcttaactagaacatgatgctgttatttggaatgcagggggaaaaacataaatttgacctttcatacattctcaaatatttcatgttgtttgaggtatggacatattacatacattccttaattcatttatatattcactgatgccaaacaaacatttctaagattattygttttaagcttatttggacagtgaaaaatgtcagtatacaatatgcttaattctacttcagcttagaaacggttgtctcagctcaaatgtcaacttttaaaaccaaatagaagagtcagcaattacgttctaacatttagatctgagagtgaaaatgaatactggccgccctcctaatcgttttctgcttttgtttttgttttcctttttgcttttttatttcacttctcctccttgacccacaaaacttgaagatt

SEQ ID NO: 325624 - DNA, 543 bp, Homo sapiens
ttcctaccagggaattgactaggggtataccagctgtttatttttgccctacccacagggcaccaatcccatgttttaatcataccagttatttatcctttatcccccaacccccttggaatctgcagaggctcagaacaatcataagctactgaaagtgtgaggacatgtcccactatggggttcaagagtccaaatacaaaacagcttgggggagaggaaaagtttcaaattggatgaggatctgaaatttttatagtttggaaactacaatggatttttatgttgcctgatactatcttaaaagccatgccattttgccattcatygggagcgaaagagcaactcaacagaaaggaattaaaaggaccagttggagaaaatataaacctgctttctgtttgcaacctactgtgtacaagtccttccaaataatggttgccattttatatcacacccagacttaacctctaagctctaaattaaatatgtaaccgaacacttgatgtctacatttagatgctttgtaggcatctctacttt

SEQ ID NO: 325625 - DNA, 554 bp, Homo sapiens
attagacaaattattctgtaaatgaggggttaggtctggactggagtaatatatttaggcatcttcaatttttaaaatgacatttaaaactctgaaactgtctgagatcactaagggagagtgtagatactgaaaagaagaaatccgaagactgagaattagtctgattttcattttctggcttttcagaatgcagcagtaggctctctagaaacagatggaggggaaaatcttccttctccccctccatcagaatgaagacaaattgtgccactatacataagcctgtggagggcttctcttaaatagctatgatggtataatctgtttataaactaagtatcatagtctaacttaatggagcaatccgaatacgtaaatgtaagtaagaatccaacataaaaatttctatgtgtatatatgatttattaaacatkttgtcaatagtatttcagtcttatttggtttagtgtttcttttatcattacataatctttggttacgcaaagactctcactgaatcatttattcttttattcagtaggaacttatta

SEQ ID NO: 325626 - DNA, 535 bp, Homo sapiens
cttaagaaaacttggtccttaatggaacattggctagttgtctagcagtatgctttgtggcctggggcagtggtggcgggcgagggggtggctacagagtgagattcctctgcctttggaaaggggtggaaagagtgggaagtacttcttcttgtggtttgagtgccagttcagccacaatacaatagaacactatgtagacttctaaggtttttgactctactccctgacttccagacacctctggacccacctggggcctggggtaccttgccacactgaagggaaggacacaggcctgcctggctttgcacttgctaattgtagagtccaagggtcttcagtgarcataggaagtagccagggagtggttttggcaggctttaggtgagacctagctatgtgctgacttcagatctgaccgagcacagtcattgtggaggaggctacaggggtgattgtgtcactctattcctagcttcaggtggctcaaaacagagatagagactctgtgtgtttgggagaaagtaaggga

SEQ ID NO: 325627 - DNA, 439 bp, Homo sapiens
ggatcctctgcctagatttcagatgatgtatggaaacacctggaagtccaggctgaactcttctgcaagggcagagccccttgtggagaacctctgatagggaagtgtggaagggaaatgtggggttggagccttcacatggagtccccacaggggcactgcctagtggagctgtgagatgagagccaccatcctcctgaccccagaaagccagatctaccaacagcttgtactgtgtgcctggaaaatcagcagacactcaacactagccagtgaaagcagccaggagtggggctgtaccttgaaaagccacaggggtggaggtgcccaaggctggggatgggccaccttttgcatcagcatgacctggatgtgagacatggrgtcaaaagaattttaaggtttaataactgccttattaaatctcacacttgctgcc

SEQ ID NO: 325628 - DNA, 587 bp, Homo sapiens
agcaacgactttcaagctgtgggtccccaatctactacttgtctccttttttgttatgtgtatttttttaaagataagtctgtcgaaatcaactctggtatgcactgttcagatagaaatcatttcttattgtcatgtaaattacccttgctgtgccctgtcagtattggaacttatttatacctgagacatgcttgggcaacaggagacaggaaaggccaccctggtcatgaatgtaggtgttcaggcatagactttgtcagtcacacagctagggagtggtggcctgagaaaaggatccagagctgtgtttactcagcttttgctgcatgagcaatggccaaacactaatcatttggttgttgtttgtatgtgtcttaaggaagctttagattgaatatgtttacataagtgtgaatatgtatatatacacatgtgtacatrtacacatatgtgtacatgtacatatgtgtacacacatgtgtgtgcatgtacatatgtgtacacatatgtgtgttcatgtacatatgtgtgtacacatatgtgtatgtgtgtacatagatacatatgtgtatgcatacgtatat

SEQ ID NO: 325629 - DNA, 592 bp, Homo sapiens
gttgagtaaactcaaatattctgttttagttattatgctttaaagctccagaatatctgtttgtgtttttaaaataatttctgtttccttttttttttttttttttkggggggggacagagtcttgctctgttgcccaggctggaatgcagtggcatgatctcagctcattgcaacctctgcctcccaggttcaagtgattctcctacctcagcttcccaagtagctgggattacaggcacccaccaccgtgcctggctaatttttgtatttttagtaaagatggggtttcaccatcttggccaggctggtctcaaactgctgacctcgtgatccacccaccttggcctcccagagtgctgggattacaggcgtgagtcacagcaactgacctaatttctgtttctttactgataatctttattgggtgaattattgtcatactgtcctttaattctttgaaaaggattcctgttagttctttaaacacatttataatagcttaattaaagtctgtctagtaagtctaaaatctgggtcccctcaggtaacagattttctattgacaatttcttttcccctgtgtatgcacc

SEQ ID NO: 325630 - DNA, 592 bp, Homo sapiens
gttgagtaaactcaaatattctgttttagttattatgctttaaagctccagaatatctgtttgtgtttttaaaataatttctgtttccttttttttttttttttttgggkgggggacagagtcttgctctgttgcccaggctggaatgcagtggcatgatctcagctcattgcaacctctgcctcccaggttcaagtgattctcctacctcagcttcccaagtagctgggattacaggcacccaccaccgtgcctggctaatttttgtatttttagtaaagatggggtttcaccatcttggccaggctggtctcaaactgctgacctcgtgatccacccaccttggcctcccagagtgctgggattacaggcgtgagtcacagcaactgacctaatttctgtttctttactgataatctttattgggtgaattattgtcatactgtcctttaattctttgaaaaggattcctgttagttctttaaacacatttataatagcttaattaaagtctgtctagtaagtctaaaatctgggtcccctcaggtaacagattttctattgacaatttcttttcccctgtgtatgcacc

SEQ ID NO: 325631 - DNA, 428 bp, Homo sapiens
aggaatttatctatttcttttaggttttcaaatttgttggtgtatagttgttcataacagtgtctaatgattctttatatttctgtggtttccagttgttatgtctccattttctttctgattttatttgggtcatctctttttcttagtctagctaaagtttcgttgattttatcttttcaaaaaatcaactttttgcttcattgatcttctgtattttttaggctcaatttcatttatttctgctctgatctttattatttgcttcctagtactaattgggggtttggttattgcttttttagcgcatttgggtgcatccattcggttatttgaagtcttcmtacgttttttgatgtaagcatttattgctacaaacttcccctttactgtattactccttttactgtatcctgtagattttggat

SEQ ID NO: 325632 - DNA, 540 bp, Homo sapiens
tttaatatgtattcactattatattattaaattctattttaaaacttgtaaatttatcrttacacaaggtttataataaactgtttaaactcatcataaggcatcttttaattatccgaagctacaaataatacacaagtagaaaacattacatgcatttttccccttcactggtattcaatatcaatttattgccaatcacacaagcatcaaaaagtagttatctgataagattttctttacttgaattttaaattttttgatttgactttatttatcaaatgcactctatcgtgattataagaaatgagacttctattataggaaaattgtcatgttgcccatcactgtgtaccattaggagactcttcagttatttgtttttgtttctacttcctctgtttcttggcttctgactcaagtaatacagtacttgttcctcctgaatactgtgaacaggagagagagagagcaagaacgggcttttatatatgtaatgtaatgagtgtaataattttatatagagagtatatgtgtaat

SEQ ID NO: 325633 - DNA, 540 bp, Homo sapiens
tttaatatgtattcactattatattattaaattctattttaaaacttgtaaatttatcgttacacaaggtttataataaactgtttaaactcatcataaggcatcttttaattatccgaagctacaaataatacacaagtagaaaacattacatgcatttttccccttcactggtattcaatatcaatttattgccaatcacacaagcatcaaaaagtagttatctgataagattttctttacttgaattttaaattttttgatttgactttatttatcaaatgcactctatcrtgattataagaaatgagacttctattataggaaaattgtcatgttgcccatcactgtgtaccattaggagactcttcagttatttgtttttgtttctacttcctctgtttcttggcttctgactcaagtaatacagtacttgttcctcctgaatactgtgaacaggagagagagagagcaagaacgggcttttatatatgtaatgtaatgagtgtaataattttatatagagagtatatgtgtaat
